United States Patent Application Publication US 2015/0141320 A1 - sequence listing, part 48

SEQ ID NO: 1892468 - DNA, 15 bp, Homo sapiens
tcagcctaaaggcag

SEQ ID NO: 1892469 - DNA, 15 bp, Homo sapiens
cagcctaaaggcagc

SEQ ID NO: 1892470 - DNA, 15 bp, Homo sapiens
agcctaaaggcagcc

SEQ ID NO: 1892471 - DNA, 15 bp, Homo sapiens
gcctaaaggcagcct

SEQ ID NO: 1892472 - DNA, 15 bp, Homo sapiens
cctaaaggcagcctc

SEQ ID NO: 1892473 - DNA, 15 bp, Homo sapiens
ctaaaggcagcctca

SEQ ID NO: 1892474 - DNA, 15 bp, Homo sapiens
taaaggcagcctcag

SEQ ID NO: 1892475 - DNA, 15 bp, Homo sapiens
aaaggcagcctcagg

SEQ ID NO: 1892476 - DNA, 15 bp, Homo sapiens
aaggcagcctcaggc

SEQ ID NO: 1892477 - DNA, 15 bp, Homo sapiens
aggcagcctcaggct

SEQ ID NO: 1892478 - DNA, 15 bp, Homo sapiens
ggcagcctcaggcta

SEQ ID NO: 1892479 - DNA, 15 bp, Homo sapiens
gcagcctcaggctaa

SEQ ID NO: 1892480 - DNA, 15 bp, Homo sapiens
cagcctcaggctaat

SEQ ID NO: 1892481 - DNA, 15 bp, Homo sapiens
agcctcaggctaatt

SEQ ID NO: 1892482 - DNA, 15 bp, Homo sapiens
gcctcaggctaattc

SEQ ID NO: 1892483 - DNA, 15 bp, Homo sapiens
cctcaggctaattct

SEQ ID NO: 1892484 - DNA, 15 bp, Homo sapiens
ctcaggctaattctc

SEQ ID NO: 1892485 - DNA, 15 bp, Homo sapiens
tcaggctaattctcc

SEQ ID NO: 1892486 - DNA, 15 bp, Homo sapiens
caggctaattctcca

SEQ ID NO: 1892487 - DNA, 15 bp, Homo sapiens
aggctaattctccag

SEQ ID NO: 1892488 - DNA, 15 bp, Homo sapiens
ggctaattctccagt

SEQ ID NO: 1892489 - DNA, 15 bp, Homo sapiens
gctaattctccagtc

SEQ ID NO: 1892490 - DNA, 15 bp, Homo sapiens
ctaattctccagtct

SEQ ID NO: 1892491 - DNA, 15 bp, Homo sapiens
taattctccagtctt

SEQ ID NO: 1892492 - DNA, 15 bp, Homo sapiens
aattctccagtcttt

SEQ ID NO: 1892493 - DNA, 15 bp, Homo sapiens
attctccagtctttc

SEQ ID NO: 1892494 - DNA, 15 bp, Homo sapiens
ttctccagtctttca

SEQ ID NO: 1892495 - DNA, 15 bp, Homo sapiens
tctccagtctttcaa

SEQ ID NO: 1892496 - DNA, 15 bp, Homo sapiens
ctccagtctttcaag

SEQ ID NO: 1892497 - DNA, 15 bp, Homo sapiens
tccagtctttcaaga

SEQ ID NO: 1892498 - DNA, 15 bp, Homo sapiens
ccagtctttcaagaa

SEQ ID NO: 1892499 - DNA, 15 bp, Homo sapiens
cagtctttcaagaat

SEQ ID NO: 1892500 - DNA, 15 bp, Homo sapiens
agtctttcaagaatc

SEQ ID NO: 1892501 - DNA, 15 bp, Homo sapiens
gtctttcaagaatct

SEQ ID NO: 1892502 - DNA, 15 bp, Homo sapiens
tctttcaagaatctt

SEQ ID NO: 1892503 - DNA, 15 bp, Homo sapiens
ctttcaagaatcttt

SEQ ID NO: 1892504 - DNA, 15 bp, Homo sapiens
tttcaagaatctttt

SEQ ID NO: 1892505 - DNA, 15 bp, Homo sapiens
ttcaagaatcttttc

SEQ ID NO: 1892506 - DNA, 15 bp, Homo sapiens
tcaagaatcttttct

SEQ ID NO: 1892507 - DNA, 15 bp, Homo sapiens
caagaatcttttctt

SEQ ID NO: 1892508 - DNA, 15 bp, Homo sapiens
aagaatcttttcttg

SEQ ID NO: 1892509 - DNA, 15 bp, Homo sapiens
agaatcttttcttga

SEQ ID NO: 1892510 - DNA, 15 bp, Homo sapiens
gaatcttttcttgat

SEQ ID NO: 1892511 - DNA, 15 bp, Homo sapiens
aatcttttcttgatt

SEQ ID NO: 1892512 - DNA, 15 bp, Homo sapiens
atcttttcttgattt

SEQ ID NO: 1892513 - DNA, 15 bp, Homo sapiens
tcttttcttgatttc

SEQ ID NO: 1892514 - DNA, 15 bp, Homo sapiens
cttttcttgatttca

SEQ ID NO: 1892515 - DNA, 15 bp, Homo sapiens
ttttcttgatttcac

SEQ ID NO: 1892516 - DNA, 15 bp, Homo sapiens
tttcttgatttcact

SEQ ID NO: 1892517 - DNA, 15 bp, Homo sapiens
ttcttgatttcactt

SEQ ID NO: 1892518 - DNA, 15 bp, Homo sapiens
tcttgatttcacttc

SEQ ID NO: 1892519 - DNA, 15 bp, Homo sapiens
cttgatttcacttcc

SEQ ID NO: 1892520 - DNA, 15 bp, Homo sapiens
ttgatttcacttccc

SEQ ID NO: 1892521 - DNA, 15 bp, Homo sapiens
tgatttcacttccct

SEQ ID NO: 1892522 - DNA, 15 bp, Homo sapiens
gatttcacttcccta

SEQ ID NO: 1892523 - DNA, 15 bp, Homo sapiens
atttcacttccctag

SEQ ID NO: 1892524 - DNA, 15 bp, Homo sapiens
tttcacttccctaga

SEQ ID NO: 1892525 - DNA, 15 bp, Homo sapiens
ttcacttccctagag

SEQ ID NO: 1892526 - DNA, 15 bp, Homo sapiens
tcacttccctagagg

SEQ ID NO: 1892527 - DNA, 15 bp, Homo sapiens
cacttccctagagga

SEQ ID NO: 1892528 - DNA, 15 bp, Homo sapiens
acttccctagaggaa

SEQ ID NO: 1892529 - DNA, 15 bp, Homo sapiens
cttccctagaggaac

SEQ ID NO: 1892530 - DNA, 15 bp, Homo sapiens
ttccctagaggaact

SEQ ID NO: 1892531 - DNA, 15 bp, Homo sapiens
tccctagaggaactg

SEQ ID NO: 1892532 - DNA, 15 bp, Homo sapiens
ccctagaggaactgc

SEQ ID NO: 1892533 - DNA, 15 bp, Homo sapiens
cctagaggaactgcc

SEQ ID NO: 1892534 - DNA, 15 bp, Homo sapiens
ctagaggaactgcct

SEQ ID NO: 1892535 - DNA, 15 bp, Homo sapiens
tagaggaactgcctc

SEQ ID NO: 1892536 - DNA, 15 bp, Homo sapiens
agaggaactgcctca

SEQ ID NO: 1892537 - DNA, 15 bp, Homo sapiens
gaggaactgcctcat

SEQ ID NO: 1892538 - DNA, 15 bp, Homo sapiens
aggaactgcctcatt

SEQ ID NO: 1892539 - DNA, 15 bp, Homo sapiens
ggaactgcctcattt

SEQ ID NO: 1892540 - DNA, 15 bp, Homo sapiens
gaactgcctcatttt

SEQ ID NO: 1892541 - DNA, 15 bp, Homo sapiens
aactgcctcattttt

SEQ ID NO: 1892542 - DNA, 15 bp, Homo sapiens
actgcctcatttttc

SEQ ID NO: 1892543 - DNA, 15 bp, Homo sapiens
ctgcctcatttttct

SEQ ID NO: 1892544 - DNA, 15 bp, Homo sapiens
tgcctcatttttctg

SEQ ID NO: 1892545 - DNA, 15 bp, Homo sapiens
gcctcatttttctgc

SEQ ID NO: 1892546 - DNA, 15 bp, Homo sapiens
cctcatttttctgct

SEQ ID NO: 1892547 - DNA, 15 bp, Homo sapiens
ctcatttttctgctt

SEQ ID NO: 1892548 - DNA, 15 bp, Homo sapiens
tcatttttctgcttt

SEQ ID NO: 1892549 - DNA, 15 bp, Homo sapiens
catttttctgctttt

SEQ ID NO: 1892550 - DNA, 15 bp, Homo sapiens
atttttctgcttttc

SEQ ID NO: 1892551 - DNA, 15 bp, Homo sapiens
tttttctgcttttca

SEQ ID NO: 1892552 - DNA, 15 bp, Homo sapiens
ttttctgcttttcat

SEQ ID NO: 1892553 - DNA, 15 bp, Homo sapiens
tttctgcttttcatt

SEQ ID NO: 1892554 - DNA, 15 bp, Homo sapiens
ttctgcttttcattt

SEQ ID NO: 1892555 - DNA, 15 bp, Homo sapiens
tctgcttttcatttc

SEQ ID NO: 1892556 - DNA, 15 bp, Homo sapiens
ctgcttttcatttca

SEQ ID NO: 1892557 - DNA, 15 bp, Homo sapiens
tgcttttcatttcag

SEQ ID NO: 1892558 - DNA, 15 bp, Homo sapiens
gcttttcatttcagt

SEQ ID NO: 1892559 - DNA, 15 bp, Homo sapiens
cttttcatttcagta

SEQ ID NO: 1892560 - DNA, 15 bp, Homo sapiens
ttttcatttcagtaa

SEQ ID NO: 1892561 - DNA, 15 bp, Homo sapiens
tttcatttcagtaag

SEQ ID NO: 1892562 - DNA, 15 bp, Homo sapiens
ttcatttcagtaagg

SEQ ID NO: 1892563 - DNA, 15 bp, Homo sapiens
tcatttcagtaaggc

SEQ ID NO: 1892564 - DNA, 15 bp, Homo sapiens
catttcagtaaggcc

SEQ ID NO: 1892565 - DNA, 15 bp, Homo sapiens
atttcagtaaggccc

SEQ ID NO: 1892566 - DNA, 15 bp, Homo sapiens
tttcagtaaggccct

SEQ ID NO: 1892567 - DNA, 15 bp, Homo sapiens
ttcagtaaggccctt

SEQ ID NO: 1892568 - DNA, 15 bp, Homo sapiens
tcagtaaggcccttt

SEQ ID NO: 1892569 - DNA, 15 bp, Homo sapiens
cagtaaggcccttta

SEQ ID NO: 1892570 - DNA, 15 bp, Homo sapiens
agtaaggccctttaa

SEQ ID NO: 1892571 - DNA, 15 bp, Homo sapiens
gtaaggccctttaag

SEQ ID NO: 1892572 - DNA, 15 bp, Homo sapiens
taaggccctttaagg

SEQ ID NO: 1892573 - DNA, 15 bp, Homo sapiens
aaggccctttaaggt

SEQ ID NO: 1892574 - DNA, 15 bp, Homo sapiens
aggccctttaaggtc

SEQ ID NO: 1892575 - DNA, 15 bp, Homo sapiens
ggccctttaaggtct

SEQ ID NO: 1892576 - DNA, 15 bp, Homo sapiens
gccctttaaggtctg

SEQ ID NO: 1892577 - DNA, 15 bp, Homo sapiens
ccctttaaggtctgc

SEQ ID NO: 1892578 - DNA, 15 bp, Homo sapiens
cctttaaggtctgct

SEQ ID NO: 1892579 - DNA, 15 bp, Homo sapiens
ctttaaggtctgctt

SEQ ID NO: 1892580 - DNA, 15 bp, Homo sapiens
tttaaggtctgcttc

SEQ ID NO: 1892581 - DNA, 15 bp, Homo sapiens
ttaaggtctgcttct

SEQ ID NO: 1892582 - DNA, 15 bp, Homo sapiens
taaggtctgcttctc

SEQ ID NO: 1892583 - DNA, 15 bp, Homo sapiens
aaggtctgcttctca

SEQ ID NO: 1892584 - DNA, 15 bp, Homo sapiens
aggtctgcttctcat

SEQ ID NO: 1892585 - DNA, 15 bp, Homo sapiens
ggtctgcttctcatt

SEQ ID NO: 1892586 - DNA, 15 bp, Homo sapiens
gtctgcttctcatta

SEQ ID NO: 1892587 - DNA, 15 bp, Homo sapiens
tctgcttctcattaa

SEQ ID NO: 1892588 - DNA, 15 bp, Homo sapiens
ctgcttctcattaaa

SEQ ID NO: 1892589 - DNA, 15 bp, Homo sapiens
tgcttctcattaaag

SEQ ID NO: 1892590 - DNA, 15 bp, Homo sapiens
gcttctcattaaagt

SEQ ID NO: 1892591 - DNA, 15 bp, Homo sapiens
cttctcattaaagta

SEQ ID NO: 1892592 - DNA, 15 bp, Homo sapiens
ttctcattaaagtaa

SEQ ID NO: 1892593 - DNA, 15 bp, Homo sapiens
tctcattaaagtaag

SEQ ID NO: 1892594 - DNA, 15 bp, Homo sapiens
ctcattaaagtaagg

SEQ ID NO: 1892595 - DNA, 15 bp, Homo sapiens
tcattaaagtaaggt

SEQ ID NO: 1892596 - DNA, 15 bp, Homo sapiens
cattaaagtaaggtc

SEQ ID NO: 1892597 - DNA, 15 bp, Homo sapiens
attaaagtaaggtcc

SEQ ID NO: 1892598 - DNA, 15 bp, Homo sapiens
ttaaagtaaggtcct

SEQ ID NO: 1892599 - DNA, 15 bp, Homo sapiens
taaagtaaggtcctc

SEQ ID NO: 1892600 - DNA, 15 bp, Homo sapiens
aaagtaaggtcctca

SEQ ID NO: 1892601 - DNA, 15 bp, Homo sapiens
aagtaaggtcctcat

SEQ ID NO: 1892602 - DNA, 15 bp, Homo sapiens
agtaaggtcctcatc

SEQ ID NO: 1892603 - DNA, 15 bp, Homo sapiens
gtaaggtcctcatct

SEQ ID NO: 1892604 - DNA, 15 bp, Homo sapiens
taaggtcctcatctg

SEQ ID NO: 1892605 - DNA, 15 bp, Homo sapiens
aaggtcctcatctgt

SEQ ID NO: 1892606 - DNA, 15 bp, Homo sapiens
aggtcctcatctgta

SEQ ID NO: 1892607 - DNA, 15 bp, Homo sapiens
ggtcctcatctgtaa

SEQ ID NO: 1892608 - DNA, 15 bp, Homo sapiens
gtcctcatctgtaaa

SEQ ID NO: 1892609 - DNA, 15 bp, Homo sapiens
ctcatctgtaaaagc

SEQ ID NO: 1892610 - DNA, 15 bp, Homo sapiens
tcatctgtaaaagcc

SEQ ID NO: 1892611 - DNA, 15 bp, Homo sapiens
catctgtaaaagcct

SEQ ID NO: 1892612 - DNA, 15 bp, Homo sapiens
atctgtaaaagccta

SEQ ID NO: 1892613 - DNA, 15 bp, Homo sapiens
tctgtaaaagcctaa

SEQ ID NO: 1892614 - DNA, 15 bp, Homo sapiens
ctgtaaaagcctaac

SEQ ID NO: 1892615 - DNA, 15 bp, Homo sapiens
tgtaaaagcctaaca

SEQ ID NO: 1892616 - DNA, 15 bp, Homo sapiens
gtaaaagcctaacaa

SEQ ID NO: 1892617 - DNA, 15 bp, Homo sapiens
taaaagcctaacaag

SEQ ID NO: 1892618 - DNA, 15 bp, Homo sapiens
aaaagcctaacaagc

SEQ ID NO: 1892619 - DNA, 15 bp, Homo sapiens
aaagcctaacaagcc

SEQ ID NO: 1892620 - DNA, 15 bp, Homo sapiens
aagcctaacaagcct

SEQ ID NO: 1892621 - DNA, 15 bp, Homo sapiens
agcctaacaagcctc

SEQ ID NO: 1892622 - DNA, 15 bp, Homo sapiens
gcctaacaagcctct

SEQ ID NO: 1892623 - DNA, 15 bp, Homo sapiens
cctaacaagcctctg

SEQ ID NO: 1892624 - DNA, 15 bp, Homo sapiens
ctaacaagcctctgc

SEQ ID NO: 1892625 - DNA, 15 bp, Homo sapiens
taacaagcctctgcc

SEQ ID NO: 1892626 - DNA, 15 bp, Homo sapiens
aacaagcctctgcct

SEQ ID NO: 1892627 - DNA, 15 bp, Homo sapiens
acaagcctctgccta

SEQ ID NO: 1892628 - DNA, 15 bp, Homo sapiens
caagcctctgcctac

SEQ ID NO: 1892629 - DNA, 15 bp, Homo sapiens
aagcctctgcctaca

SEQ ID NO: 1892630 - DNA, 15 bp, Homo sapiens
agcctctgcctacac

SEQ ID NO: 1892631 - DNA, 15 bp, Homo sapiens
gcctctgcctacact

SEQ ID NO: 1892632 - DNA, 15 bp, Homo sapiens
cctctgcctacactc

SEQ ID NO: 1892633 - DNA, 15 bp, Homo sapiens
ctctgcctacactct

SEQ ID NO: 1892634 - DNA, 15 bp, Homo sapiens
tctgcctacactctc

SEQ ID NO: 1892635 - DNA, 15 bp, Homo sapiens
ctgcctacactctca

SEQ ID NO: 1892636 - DNA, 15 bp, Homo sapiens
tgcctacactctcac

SEQ ID NO: 1892637 - DNA, 15 bp, Homo sapiens
gcctacactctcacc

SEQ ID NO: 1892638 - DNA, 15 bp, Homo sapiens
cctacactctcacca

SEQ ID NO: 1892639 - DNA, 15 bp, Homo sapiens
ctacactctcaccaa

SEQ ID NO: 1892640 - DNA, 15 bp, Homo sapiens
tacactctcaccaat

SEQ ID NO: 1892641 - DNA, 15 bp, Homo sapiens
acactctcaccaatt

SEQ ID NO: 1892642 - DNA, 15 bp, Homo sapiens
cactctcaccaattc

SEQ ID NO: 1892643 - DNA, 15 bp, Homo sapiens
actctcaccaattct

SEQ ID NO: 1892644 - DNA, 15 bp, Homo sapiens
ctctcaccaattctt

SEQ ID NO: 1892645 - DNA, 15 bp, Homo sapiens
tctcaccaattcttt

SEQ ID NO: 1892646 - DNA, 15 bp, Homo sapiens
ctcaccaattctttc

SEQ ID NO: 1892647 - DNA, 15 bp, Homo sapiens
tcaccaattctttct

SEQ ID NO: 1892648 - DNA, 15 bp, Homo sapiens
caccaattctttctt

SEQ ID NO: 1892649 - DNA, 15 bp, Homo sapiens
accaattctttcttt

SEQ ID NO: 1892650 - DNA, 15 bp, Homo sapiens
ccaattctttctttc

SEQ ID NO: 1892651 - DNA, 15 bp, Homo sapiens
caattctttctttcc

SEQ ID NO: 1892652 - DNA, 15 bp, Homo sapiens
aattctttctttccc

SEQ ID NO: 1892653 - DNA, 15 bp, Homo sapiens
attctttctttcccc

SEQ ID NO: 1892654 - DNA, 15 bp, Homo sapiens
ttctttctttcccct

SEQ ID NO: 1892655 - DNA, 15 bp, Homo sapiens
tctttctttcccctt

SEQ ID NO: 1892656 - DNA, 15 bp, Homo sapiens
ctttctttccccttc

SEQ ID NO: 1892657 - DNA, 15 bp, Homo sapiens
tttctttccccttct

SEQ ID NO: 1892658 - DNA, 15 bp, Homo sapiens
ttctttccccttctt

SEQ ID NO: 1892659 - DNA, 15 bp, Homo sapiens
tctttccccttcttt

SEQ ID NO: 1892660 - DNA, 15 bp, Homo sapiens
ctttccccttctttc

SEQ ID NO: 1892661 - DNA, 15 bp, Homo sapiens
tttccccttctttct

SEQ ID NO: 1892662 - DNA, 15 bp, Homo sapiens
ttccccttctttctt

SEQ ID NO: 1892663 - DNA, 15 bp, Homo sapiens
tccccttctttctta

SEQ ID NO: 1892664 - DNA, 15 bp, Homo sapiens
ccccttctttcttaa

SEQ ID NO: 1892665 - DNA, 15 bp, Homo sapiens
cccttctttcttaaa

SEQ ID NO: 1892666 - DNA, 15 bp, Homo sapiens
ccttctttcttaaat

SEQ ID NO: 1892667 - DNA, 15 bp, Homo sapiens
cttctttcttaaatt

SEQ ID NO: 1892668 - DNA, 15 bp, Homo sapiens
ttctttcttaaattc

SEQ ID NO: 1892669 - DNA, 15 bp, Homo sapiens
tctttcttaaattca

SEQ ID NO: 1892670 - DNA, 15 bp, Homo sapiens
ctttcttaaattcat

SEQ ID NO: 1892671 - DNA, 15 bp, Homo sapiens
tttcttaaattcatt

SEQ ID NO: 1892672 - DNA, 15 bp, Homo sapiens
ttcttaaattcattt

SEQ ID NO: 1892673 - DNA, 15 bp, Homo sapiens
tcttaaattcatttc

SEQ ID NO: 1892674 - DNA, 15 bp, Homo sapiens
cttaaattcatttca

SEQ ID NO: 1892675 - DNA, 15 bp, Homo sapiens
ttaaattcatttcaa

SEQ ID NO: 1892676 - DNA, 15 bp, Homo sapiens
taaattcatttcaat

SEQ ID NO: 1892677 - DNA, 15 bp, Homo sapiens
aaattcatttcaatt

SEQ ID NO: 1892678 - DNA, 15 bp, Homo sapiens
aattcatttcaatta

SEQ ID NO: 1892679 - DNA, 15 bp, Homo sapiens
attcatttcaattag

SEQ ID NO: 1892680 - DNA, 15 bp, Homo sapiens
ttcatttcaattaga

SEQ ID NO: 1892681 - DNA, 15 bp, Homo sapiens
tcatttcaattagac

SEQ ID NO: 1892682 - DNA, 15 bp, Homo sapiens
catttcaattagact

SEQ ID NO: 1892683 - DNA, 15 bp, Homo sapiens
atttcaattagactt

SEQ ID NO: 1892684 - DNA, 15 bp, Homo sapiens
tttcaattagacttt

SEQ ID NO: 1892685 - DNA, 15 bp, Homo sapiens
ttcaattagactttt

SEQ ID NO: 1892686 - DNA, 15 bp, Homo sapiens
tcaattagacttttg

SEQ ID NO: 1892687 - DNA, 15 bp, Homo sapiens
caattagacttttgc

SEQ ID NO: 1892688 - DNA, 15 bp, Homo sapiens
aattagacttttgcc

SEQ ID NO: 1892689 - DNA, 15 bp, Homo sapiens
attagacttttgccc

SEQ ID NO: 1892690 - DNA, 15 bp, Homo sapiens
ttagacttttgccca

SEQ ID NO: 1892691 - DNA, 15 bp, Homo sapiens
tagacttttgcccac

SEQ ID NO: 1892692 - DNA, 15 bp, Homo sapiens
agacttttgcccaca

SEQ ID NO: 1892693 - DNA, 15 bp, Homo sapiens
gacttttgcccacat

SEQ ID NO: 1892694 - DNA, 15 bp, Homo sapiens
acttttgcccacatg

SEQ ID NO: 1892695 - DNA, 15 bp, Homo sapiens
cttttgcccacatgt

SEQ ID NO: 1892696 - DNA, 15 bp, Homo sapiens
ttttgcccacatgtt

SEQ ID NO: 1892697 - DNA, 15 bp, Homo sapiens
tttgcccacatgttt

SEQ ID NO: 1892698 - DNA, 15 bp, Homo sapiens
ttgcccacatgtttt

SEQ ID NO: 1892699 - DNA, 15 bp, Homo sapiens
tgcccacatgtttta

SEQ ID NO: 1892700 - DNA, 15 bp, Homo sapiens
gcccacatgttttaa

SEQ ID NO: 1892701 - DNA, 15 bp, Homo sapiens
cccacatgttttaat

SEQ ID NO: 1892702 - DNA, 15 bp, Homo sapiens
ccacatgttttaata

SEQ ID NO: 1892703 - DNA, 15 bp, Homo sapiens
cacatgttttaataa

SEQ ID NO: 1892704 - DNA, 15 bp, Homo sapiens
acatgttttaataaa

SEQ ID NO: 1892705 - DNA, 15 bp, Homo sapiens
catgttttaataaag

SEQ ID NO: 1892706 - DNA, 15 bp, Homo sapiens
atgttttaataaagt

SEQ ID NO: 1892707 - DNA, 15 bp, Homo sapiens
tgttttaataaagtt

SEQ ID NO: 1892708 - DNA, 15 bp, Homo sapiens
gttttaataaagttt

SEQ ID NO: 1892709 - DNA, 15 bp, Homo sapiens
ttttaataaagttta

SEQ ID NO: 1892710 - DNA, 15 bp, Homo sapiens
tttaataaagtttac

SEQ ID NO: 1892711 - DNA, 15 bp, Homo sapiens
ttaataaagtttact

SEQ ID NO: 1892712 - DNA, 15 bp, Homo sapiens
taataaagtttacta

SEQ ID NO: 1892713 - DNA, 15 bp, Homo sapiens
aataaagtttactaa

SEQ ID NO: 1892714 - DNA, 15 bp, Homo sapiens
ataaagtttactaac

SEQ ID NO: 1892715 - DNA, 15 bp, Homo sapiens
taaagtttactaacc

SEQ ID NO: 1892716 - DNA, 15 bp, Homo sapiens
aaagtttactaacca

SEQ ID NO: 1892717 - DNA, 15 bp, Homo sapiens
aagtttactaaccac

SEQ ID NO: 1892718 - DNA, 15 bp, Homo sapiens
agtttactaaccact

SEQ ID NO: 1892719 - DNA, 15 bp, Homo sapiens
gtttactaaccactc

SEQ ID NO: 1892720 - DNA, 15 bp, Homo sapiens
tttactaaccactct

SEQ ID NO: 1892721 - DNA, 15 bp, Homo sapiens
ttactaaccactcta

SEQ ID NO: 1892722 - DNA, 15 bp, Homo sapiens
tactaaccactctac

SEQ ID NO: 1892723 - DNA, 15 bp, Homo sapiens
actaaccactctacc

SEQ ID NO: 1892724 - DNA, 15 bp, Homo sapiens
ctaaccactctacca

SEQ ID NO: 1892725 - DNA, 15 bp, Homo sapiens
taaccactctaccaa

SEQ ID NO: 1892726 - DNA, 15 bp, Homo sapiens
aaccactctaccaat

SEQ ID NO: 1892727 - DNA, 15 bp, Homo sapiens
accactctaccaatc

SEQ ID NO: 1892728 - DNA, 15 bp, Homo sapiens
ccactctaccaatcg

SEQ ID NO: 1892729 - DNA, 15 bp, Homo sapiens
cactctaccaatcgt

SEQ ID NO: 1892730 - DNA, 15 bp, Homo sapiens
actctaccaatcgtt

SEQ ID NO: 1892731 - DNA, 15 bp, Homo sapiens
ctctaccaatcgttt

SEQ ID NO: 1892732 - DNA, 15 bp, Homo sapiens
tctaccaatcgtttt

SEQ ID NO: 1892733 - DNA, 15 bp, Homo sapiens
ctaccaatcgtttta

SEQ ID NO: 1892734 - DNA, 15 bp, Homo sapiens
taccaatcgttttaa

SEQ ID NO: 1892735 - DNA, 15 bp, Homo sapiens
accaatcgttttaat

SEQ ID NO: 1892736 - DNA, 15 bp, Homo sapiens
ccaatcgttttaatc

SEQ ID NO: 1892737 - DNA, 15 bp, Homo sapiens
caatcgttttaatca

SEQ ID NO: 1892738 - DNA, 15 bp, Homo sapiens
aatcgttttaatcat

SEQ ID NO: 1892739 - DNA, 15 bp, Homo sapiens
atcgttttaatcatg

SEQ ID NO: 1892740 - DNA, 15 bp, Homo sapiens
tcgttttaatcatgt

SEQ ID NO: 1892741 - DNA, 15 bp, Homo sapiens
cgttttaatcatgtt

SEQ ID NO: 1892742 - DNA, 15 bp, Homo sapiens
gttttaatcatgttt

SEQ ID NO: 1892743 - DNA, 15 bp, Homo sapiens
tttaatcatgtttac

SEQ ID NO: 1892744 - DNA, 15 bp, Homo sapiens
ttaatcatgtttact

SEQ ID NO: 1892745 - DNA, 15 bp, Homo sapiens
taatcatgtttacta

SEQ ID NO: 1892746 - DNA, 15 bp, Homo sapiens
aatcatgtttactaa

SEQ ID NO: 1892747 - DNA, 15 bp, Homo sapiens
atcatgtttactaaa

SEQ ID NO: 1892748 - DNA, 15 bp, Homo sapiens
tcatgtttactaaac

SEQ ID NO: 1892749 - DNA, 15 bp, Homo sapiens
catgtttactaaacc

SEQ ID NO: 1892750 - DNA, 15 bp, Homo sapiens
atgtttactaaacct

SEQ ID NO: 1892751 - DNA, 15 bp, Homo sapiens
tgtttactaaacctc

SEQ ID NO: 1892752 - DNA, 15 bp, Homo sapiens
gtttactaaacctct

SEQ ID NO: 1892753 - DNA, 15 bp, Homo sapiens
tttactaaacctcta

SEQ ID NO: 1892754 - DNA, 15 bp, Homo sapiens
ttactaaacctctac

SEQ ID NO: 1892755 - DNA, 15 bp, Homo sapiens
tactaaacctctact

SEQ ID NO: 1892756 - DNA, 15 bp, Homo sapiens
actaaacctctactt

SEQ ID NO: 1892757 - DNA, 15 bp, Homo sapiens
ctaaacctctacttg

SEQ ID NO: 1892758 - DNA, 15 bp, Homo sapiens
taaacctctacttgt

SEQ ID NO: 1892759 - DNA, 15 bp, Homo sapiens
aaacctctacttgtt

SEQ ID NO: 1892760 - DNA, 15 bp, Homo sapiens
aacctctacttgtta

SEQ ID NO: 1892761 - DNA, 15 bp, Homo sapiens
acctctacttgttaa

SEQ ID NO: 1892762 - DNA, 15 bp, Homo sapiens
cctctacttgttaaa

SEQ ID NO: 1892763 - DNA, 15 bp, Homo sapiens
ctctacttgttaaac

SEQ ID NO: 1892764 - DNA, 15 bp, Homo sapiens
tctacttgttaaacg

SEQ ID NO: 1892765 - DNA, 15 bp, Homo sapiens
ctacttgttaaacga

SEQ ID NO: 1892766 - DNA, 15 bp, Homo sapiens
tacttgttaaacgaa

SEQ ID NO: 1892767 - DNA, 15 bp, Homo sapiens
acttgttaaacgaaa

SEQ ID NO: 1892768 - DNA, 15 bp, Homo sapiens
cttgttaaacgaaat

SEQ ID NO: 1892769 - DNA, 15 bp, Homo sapiens
ttgttaaacgaaata

SEQ ID NO: 1892770 - DNA, 15 bp, Homo sapiens
tgttaaacgaaatat

SEQ ID NO: 1892771 - DNA, 15 bp, Homo sapiens
gttaaacgaaatatc

SEQ ID NO: 1892772 - DNA, 15 bp, Homo sapiens
ttaaacgaaatatca

SEQ ID NO: 1892773 - DNA, 15 bp, Homo sapiens
taaacgaaatatcaa

SEQ ID NO: 1892774 - DNA, 15 bp, Homo sapiens
aaacgaaatatcaat

SEQ ID NO: 1892775 - DNA, 15 bp, Homo sapiens
aacgaaatatcaatt

SEQ ID NO: 1892776 - DNA, 15 bp, Homo sapiens
acgaaatatcaattc

SEQ ID NO: 1892777 - DNA, 15 bp, Homo sapiens
cgaaatatcaattcc

SEQ ID NO: 1892778 - DNA, 15 bp, Homo sapiens
gaaatatcaattcct

SEQ ID NO: 1892779 - DNA, 15 bp, Homo sapiens
aaatatcaattccta

SEQ ID NO: 1892780 - DNA, 15 bp, Homo sapiens
aatatcaattcctag

SEQ ID NO: 1892781 - DNA, 15 bp, Homo sapiens
atatcaattcctagg

SEQ ID NO: 1892782 - DNA, 15 bp, Homo sapiens
tatcaattcctaggc

SEQ ID NO: 1892783 - DNA, 15 bp, Homo sapiens
atcaattcctaggcc

SEQ ID NO: 1892784 - DNA, 15 bp, Homo sapiens
tcaattcctaggcct

SEQ ID NO: 1892785 - DNA, 15 bp, Homo sapiens
caattcctaggcctc

SEQ ID NO: 1892786 - DNA, 15 bp, Homo sapiens
aattcctaggcctcc

SEQ ID NO: 1892787 - DNA, 15 bp, Homo sapiens
attcctaggcctcct

SEQ ID NO: 1892788 - DNA, 15 bp, Homo sapiens
ttcctaggcctcctt

SEQ ID NO: 1892789 - DNA, 15 bp, Homo sapiens
tcctaggcctccttt

SEQ ID NO: 1892790 - DNA, 15 bp, Homo sapiens
cctaggcctcctttt

SEQ ID NO: 1892791 - DNA, 15 bp, Homo sapiens
ctaggcctccttttc

SEQ ID NO: 1892792 - DNA, 15 bp, Homo sapiens
taggcctccttttct

SEQ ID NO: 1892793 - DNA, 15 bp, Homo sapiens
aggcctccttttctt

SEQ ID NO: 1892794 - DNA, 15 bp, Homo sapiens
ggcctccttttcttt

SEQ ID NO: 1892795 - DNA, 15 bp, Homo sapiens
gcctccttttcttta

SEQ ID NO: 1892796 - DNA, 15 bp, Homo sapiens
ctccttttctttata

SEQ ID NO: 1892797 - DNA, 15 bp, Homo sapiens
tccttttctttatat

SEQ ID NO: 1892798 - DNA, 15 bp, Homo sapiens
ccttttctttatatc

SEQ ID NO: 1892799 - DNA, 15 bp, Homo sapiens
cttttctttatatct

SEQ ID NO: 1892800 - DNA, 15 bp, Homo sapiens
ttttctttatatctc

SEQ ID NO: 1892801 - DNA, 15 bp, Homo sapiens
tttctttatatctca

SEQ ID NO: 1892802 - DNA, 15 bp, Homo sapiens
ttctttatatctcag

SEQ ID NO: 1892803 - DNA, 15 bp, Homo sapiens
tctttatatctcaga

SEQ ID NO: 1892804 - DNA, 15 bp, Homo sapiens
ctttatatctcagaa

SEQ ID NO: 1892805 - DNA, 15 bp, Homo sapiens
tttatatctcagaaa

SEQ ID NO: 1892806 - DNA, 15 bp, Homo sapiens
ttatatctcagaaac

SEQ ID NO: 1892807 - DNA, 15 bp, Homo sapiens
tatatctcagaaaca

SEQ ID NO: 1892808 - DNA, 15 bp, Homo sapiens
atatctcagaaacat

SEQ ID NO: 1892809 - DNA, 15 bp, Homo sapiens
tatctcagaaacatt

SEQ ID NO: 1892810 - DNA, 15 bp, Homo sapiens
atctcagaaacattt

SEQ ID NO: 1892811 - DNA, 15 bp, Homo sapiens
tctcagaaacatttg

SEQ ID NO: 1892812 - DNA, 15 bp, Homo sapiens
ctcagaaacatttga

SEQ ID NO: 1892813 - DNA, 15 bp, Homo sapiens
tcagaaacatttgac

SEQ ID NO: 1892814 - DNA, 15 bp, Homo sapiens
cagaaacatttgaca

SEQ ID NO: 1892815 - DNA, 15 bp, Homo sapiens
agaaacatttgacac

SEQ ID NO: 1892816 - DNA, 15 bp, Homo sapiens
gaaacatttgacacc

SEQ ID NO: 1892817 - DNA, 15 bp, Homo sapiens
aaacatttgacacca

SEQ ID NO: 1892818 - DNA, 15 bp, Homo sapiens
aacatttgacaccat

SEQ ID NO: 1892819 - DNA, 15 bp, Homo sapiens
acatttgacaccatt

SEQ ID NO: 1892820 - DNA, 15 bp, Homo sapiens
catttgacaccattg

SEQ ID NO: 1892821 - DNA, 15 bp, Homo sapiens
atttgacaccattga

SEQ ID NO: 1892822 - DNA, 15 bp, Homo sapiens
tttgacaccattgac

SEQ ID NO: 1892823 - DNA, 15 bp, Homo sapiens
ttgacaccattgact

SEQ ID NO: 1892824 - DNA, 15 bp, Homo sapiens
tgacaccattgactc

SEQ ID NO: 1892825 - DNA, 15 bp, Homo sapiens
gacaccattgactct

SEQ ID NO: 1892826 - DNA, 15 bp, Homo sapiens
acaccattgactctg

SEQ ID NO: 1892827 - DNA, 15 bp, Homo sapiens
caccattgactctgt

SEQ ID NO: 1892828 - DNA, 15 bp, Homo sapiens
accattgactctgtc

SEQ ID NO: 1892829 - DNA, 15 bp, Homo sapiens
ccattgactctgtcc

SEQ ID NO: 1892830 - DNA, 15 bp, Homo sapiens
cattgactctgtccc

SEQ ID NO: 1892831 - DNA, 15 bp, Homo sapiens
attgactctgtcccc

SEQ ID NO: 1892832 - DNA, 15 bp, Homo sapiens
ttgactctgtcccct

SEQ ID NO: 1892833 - DNA, 15 bp, Homo sapiens
tgactctgtcccctc

SEQ ID NO: 1892834 - DNA, 15 bp, Homo sapiens
gactctgtcccctct

SEQ ID NO: 1892835 - DNA, 15 bp, Homo sapiens
actctgtcccctctt

SEQ ID NO: 1892836 - DNA, 15 bp, Homo sapiens
ctctgtcccctcttc

SEQ ID NO: 1892837 - DNA, 15 bp, Homo sapiens
tctgtcccctcttca

SEQ ID NO: 1892838 - DNA, 15 bp, Homo sapiens
ctgtcccctcttcat

SEQ ID NO: 1892839 - DNA, 15 bp, Homo sapiens
tgtcccctcttcatc

SEQ ID NO: 1892840 - DNA, 15 bp, Homo sapiens
gtcccctcttcatcc

SEQ ID NO: 1892841 - DNA, 15 bp, Homo sapiens
tcccctcttcatcca

SEQ ID NO: 1892842 - DNA, 15 bp, Homo sapiens
cccctcttcatccat

SEQ ID NO: 1892843 - DNA, 15 bp, Homo sapiens
ccctcttcatccatc

SEQ ID NO: 1892844 - DNA, 15 bp, Homo sapiens
cctcttcatccatca

SEQ ID NO: 1892845 - DNA, 15 bp, Homo sapiens
ctcttcatccatcaa

SEQ ID NO: 1892846 - DNA, 15 bp, Homo sapiens
tcttcatccatcaat

SEQ ID NO: 1892847 - DNA, 15 bp, Homo sapiens
cttcatccatcaatt

SEQ ID NO: 1892848 - DNA, 15 bp, Homo sapiens
ttcatccatcaatta

SEQ ID NO: 1892849 - DNA, 15 bp, Homo sapiens
tcatccatcaattac

SEQ ID NO: 1892850 - DNA, 15 bp, Homo sapiens
catccatcaattact

SEQ ID NO: 1892851 - DNA, 15 bp, Homo sapiens
atccatcaattactt

SEQ ID NO: 1892852 - DNA, 15 bp, Homo sapiens
tccatcaattacttt

SEQ ID NO: 1892853 - DNA, 15 bp, Homo sapiens
ccatcaattactttc

SEQ ID NO: 1892854 - DNA, 15 bp, Homo sapiens
catcaattactttct

SEQ ID NO: 1892855 - DNA, 15 bp, Homo sapiens
atcaattactttctt

SEQ ID NO: 1892856 - DNA, 15 bp, Homo sapiens
tcaattactttcttg

SEQ ID NO: 1892857 - DNA, 15 bp, Homo sapiens
caattactttcttgc

SEQ ID NO: 1892858 - DNA, 15 bp, Homo sapiens
aattactttcttgcc

SEQ ID NO: 1892859 - DNA, 15 bp, Homo sapiens
attactttcttgcct

SEQ ID NO: 1892860 - DNA, 15 bp, Homo sapiens
ttactttcttgcctt

SEQ ID NO: 1892861 - DNA, 15 bp, Homo sapiens
tactttcttgccttg

SEQ ID NO: 1892862 - DNA, 15 bp, Homo sapiens
actttcttgccttgc

SEQ ID NO: 1892863 - DNA, 15 bp, Homo sapiens
ctttcttgccttgct

SEQ ID NO: 1892864 - DNA, 15 bp, Homo sapiens
tttcttgccttgctt

SEQ ID NO: 1892865 - DNA, 15 bp, Homo sapiens
ttcttgccttgcttc

SEQ ID NO: 1892866 - DNA, 15 bp, Homo sapiens
tcttgccttgcttcc

SEQ ID NO: 1892867 - DNA, 15 bp, Homo sapiens
cttgccttgcttcca

SEQ ID NO: 1892868 - DNA, 15 bp, Homo sapiens
ttgccttgcttccag

SEQ ID NO: 1892869 - DNA, 15 bp, Homo sapiens
tgccttgcttccaga

SEQ ID NO: 1892870 - DNA, 15 bp, Homo sapiens
gccttgcttccagaa

SEQ ID NO: 1892871 - DNA, 15 bp, Homo sapiens
ccttgcttccagaat

SEQ ID NO: 1892872 - DNA, 15 bp, Homo sapiens
cttgcttccagaatg

SEQ ID NO: 1892873 - DNA, 15 bp, Homo sapiens
ttgcttccagaatgc

SEQ ID NO: 1892874 - DNA, 15 bp, Homo sapiens
tgcttccagaatgcc

SEQ ID NO: 1892875 - DNA, 15 bp, Homo sapiens
gcttccagaatgcca

SEQ ID NO: 1892876 - DNA, 15 bp, Homo sapiens
cttccagaatgccat

SEQ ID NO: 1892877 - DNA, 15 bp, Homo sapiens
ttccagaatgccatg

SEQ ID NO: 1892878 - DNA, 15 bp, Homo sapiens
tccagaatgccatga

SEQ ID NO: 1892879 - DNA, 15 bp, Homo sapiens
ccagaatgccatgat

SEQ ID NO: 1892880 - DNA, 15 bp, Homo sapiens
cagaatgccatgatc

SEQ ID NO: 1892881 - DNA, 15 bp, Homo sapiens
agaatgccatgatct

SEQ ID NO: 1892882 - DNA, 15 bp, Homo sapiens
gaatgccatgatctt

SEQ ID NO: 1892883 - DNA, 15 bp, Homo sapiens
aatgccatgatcttc

SEQ ID NO: 1892884 - DNA, 15 bp, Homo sapiens
atgccatgatcttct

SEQ ID NO: 1892885 - DNA, 15 bp, Homo sapiens
tgccatgatcttctg

SEQ ID NO: 1892886 - DNA, 15 bp, Homo sapiens
gccatgatcttctga

SEQ ID NO: 1892887 - DNA, 15 bp, Homo sapiens
ccatgatcttctgat

SEQ ID NO: 1892888 - DNA, 15 bp, Homo sapiens
catgatcttctgatt

SEQ ID NO: 1892889 - DNA, 15 bp, Homo sapiens
atgatcttctgattt

SEQ ID NO: 1892890 - DNA, 15 bp, Homo sapiens
tgatcttctgatttt

SEQ ID NO: 1892891 - DNA, 15 bp, Homo sapiens
gatcttctgattttt

SEQ ID NO: 1892892 - DNA, 15 bp, Homo sapiens
atcttctgatttttt

SEQ ID NO: 1892893 - DNA, 15 bp, Homo sapiens
tcttctgattttttt

SEQ ID NO: 1892894 - DNA, 15 bp, Homo sapiens
cttctgatttttttt

SEQ ID NO: 1892895 - DNA, 15 bp, Homo sapiens
ctgatttttttttta

SEQ ID NO: 1892896 - DNA, 15 bp, Homo sapiens
tgattttttttttac

SEQ ID NO: 1892897 - DNA, 15 bp, Homo sapiens
gattttttttttacc

SEQ ID NO: 1892898 - DNA, 15 bp, Homo sapiens
attttttttttaccc

SEQ ID NO: 1892899 - DNA, 15 bp, Homo sapiens
ttttttttttacccc

SEQ ID NO: 1892900 - DNA, 15 bp, Homo sapiens
tttttttttacccca

SEQ ID NO: 1892901 - DNA, 15 bp, Homo sapiens
ttttttttaccccac

SEQ ID NO: 1892902 - DNA, 15 bp, Homo sapiens
tttttttaccccact

SEQ ID NO: 1892903 - DNA, 15 bp, Homo sapiens
ttttttaccccactg

SEQ ID NO: 1892904 - DNA, 15 bp, Homo sapiens
tttttaccccactgg

SEQ ID NO: 1892905 - DNA, 15 bp, Homo sapiens
ttttaccccactggc

SEQ ID NO: 1892906 - DNA, 15 bp, Homo sapiens
tttaccccactggcc

SEQ ID NO: 1892907 - DNA, 15 bp, Homo sapiens
ttaccccactggcca

SEQ ID NO: 1892908 - DNA, 15 bp, Homo sapiens
taccccactggccac

SEQ ID NO: 1892909 - DNA, 15 bp, Homo sapiens
accccactggccact

SEQ ID NO: 1892910 - DNA, 15 bp, Homo sapiens
ccccactggccactc

SEQ ID NO: 1892911 - DNA, 15 bp, Homo sapiens
cccactggccactct

SEQ ID NO: 1892912 - DNA, 15 bp, Homo sapiens
ccactggccactctc

SEQ ID NO: 1892913 - DNA, 15 bp, Homo sapiens
cactggccactctct

SEQ ID NO: 1892914 - DNA, 15 bp, Homo sapiens
actggccactctctt

SEQ ID NO: 1892915 - DNA, 15 bp, Homo sapiens
ctggccactctcttt

SEQ ID NO: 1892916 - DNA, 15 bp, Homo sapiens
tggccactctctttc

SEQ ID NO: 1892917 - DNA, 15 bp, Homo sapiens
ggccactctctttca

SEQ ID NO: 1892918 - DNA, 15 bp, Homo sapiens
gccactctctttcac

SEQ ID NO: 1892919 - DNA, 15 bp, Homo sapiens
ccactctctttcact

SEQ ID NO: 1892920 - DNA, 15 bp, Homo sapiens
cactctctttcactc

SEQ ID NO: 1892921 - DNA, 15 bp, Homo sapiens
actctctttcactct

SEQ ID NO: 1892922 - DNA, 15 bp, Homo sapiens
ctctctttcactctc

SEQ ID NO: 1892923 - DNA, 15 bp, Homo sapiens
tctctttcactctcc

SEQ ID NO: 1892924 - DNA, 15 bp, Homo sapiens
ctctttcactctcct

SEQ ID NO: 1892925 - DNA, 15 bp, Homo sapiens
tctttcactctcctc

SEQ ID NO: 1892926 - DNA, 15 bp, Homo sapiens
ctttcactctcctct

SEQ ID NO: 1892927 - DNA, 15 bp, Homo sapiens
tttcactctcctctg

SEQ ID NO: 1892928 - DNA, 15 bp, Homo sapiens
ttcactctcctctgt

SEQ ID NO: 1892929 - DNA, 15 bp, Homo sapiens
tcactctcctctgtt

SEQ ID NO: 1892930 - DNA, 15 bp, Homo sapiens
cactctcctctgttt

SEQ ID NO: 1892931 - DNA, 15 bp, Homo sapiens
actctcctctgtttt

SEQ ID NO: 1892932 - DNA, 15 bp, Homo sapiens
ctctcctctgtttta

SEQ ID NO: 1892933 - DNA, 15 bp, Homo sapiens
tctcctctgttttac

SEQ ID NO: 1892934 - DNA, 15 bp, Homo sapiens
ctcctctgttttact

SEQ ID NO: 1892935 - DNA, 15 bp, Homo sapiens
tcctctgttttactc

SEQ ID NO: 1892936 - DNA, 15 bp, Homo sapiens
cctctgttttactcc

SEQ ID NO: 1892937 - DNA, 15 bp, Homo sapiens
ctctgttttactcct

SEQ ID NO: 1892938 - DNA, 15 bp, Homo sapiens
tctgttttactcctc

SEQ ID NO: 1892939 - DNA, 15 bp, Homo sapiens
ctgttttactcctca

SEQ ID NO: 1892940 - DNA, 15 bp, Homo sapiens
tgttttactcctcat

SEQ ID NO: 1892941 - DNA, 15 bp, Homo sapiens
gttttactcctcatc

SEQ ID NO: 1892942 - DNA, 15 bp, Homo sapiens
ttttactcctcatct

SEQ ID NO: 1892943 - DNA, 15 bp, Homo sapiens
tttactcctcatctc

SEQ ID NO: 1892944 - DNA, 15 bp, Homo sapiens
ttactcctcatctct

SEQ ID NO: 1892945 - DNA, 15 bp, Homo sapiens
tactcctcatctctt

SEQ ID NO: 1892946 - DNA, 15 bp, Homo sapiens
actcctcatctcttc

SEQ ID NO: 1892947 - DNA, 15 bp, Homo sapiens
ctcctcatctcttct

SEQ ID NO: 1892948 - DNA, 15 bp, Homo sapiens
tcctcatctcttcta

SEQ ID NO: 1892949 - DNA, 15 bp, Homo sapiens
cctcatctcttctac

SEQ ID NO: 1892950 - DNA, 15 bp, Homo sapiens
ctcatctcttctacc

SEQ ID NO: 1892951 - DNA, 15 bp, Homo sapiens
tcatctcttctacct

SEQ ID NO: 1892952 - DNA, 15 bp, Homo sapiens
catctcttctacctc

SEQ ID NO: 1892953 - DNA, 15 bp, Homo sapiens
atctcttctacctct

SEQ ID NO: 1892954 - DNA, 15 bp, Homo sapiens
tctcttctacctctt

SEQ ID NO: 1892955 - DNA, 15 bp, Homo sapiens
ctcttctacctcttc

SEQ ID NO: 1892956 - DNA, 15 bp, Homo sapiens
tcttctacctcttct

SEQ ID NO: 1892957 - DNA, 15 bp, Homo sapiens
cttctacctcttctc

SEQ ID NO: 1892958 - DNA, 15 bp, Homo sapiens
ttctacctcttctct

SEQ ID NO: 1892959 - DNA, 15 bp, Homo sapiens
tctacctcttctctt

SEQ ID NO: 1892960 - DNA, 15 bp, Homo sapiens
ctacctcttctcttc

SEQ ID NO: 1892961 - DNA, 15 bp, Homo sapiens
tacctcttctcttct

SEQ ID NO: 1892962 - DNA, 15 bp, Homo sapiens
acctcttctcttctc

SEQ ID NO: 1892963 - DNA, 15 bp, Homo sapiens
cctcttctcttctct

SEQ ID NO: 1892964 - DNA, 15 bp, Homo sapiens
tcttctcttctcttt

SEQ ID NO: 1892965 - DNA, 15 bp, Homo sapiens
cttctcttctctttc

SEQ ID NO: 1892966 - DNA, 15 bp, Homo sapiens
ttctcttctctttct

SEQ ID NO: 1892967 - DNA, 15 bp, Homo sapiens
tctcttctctttcta

SEQ ID NO: 1892968 - DNA, 15 bp, Homo sapiens
ctcttctctttctac

SEQ ID NO: 1892969 - DNA, 15 bp, Homo sapiens
tcttctctttctaca

SEQ ID NO: 1892970 - DNA, 15 bp, Homo sapiens
cttctctttctacac

SEQ ID NO: 1892971 - DNA, 15 bp, Homo sapiens
ttctctttctacact

SEQ ID NO: 1892972 - DNA, 15 bp, Homo sapiens
tctctttctacactc

SEQ ID NO: 1892973 - DNA, 15 bp, Homo sapiens
ctctttctacactca

SEQ ID NO: 1892974 - DNA, 15 bp, Homo sapiens
tctttctacactcac

SEQ ID NO: 1892975 - DNA, 15 bp, Homo sapiens
ctttctacactcact

SEQ ID NO: 1892976 - DNA, 15 bp, Homo sapiens
tttctacactcactc

SEQ ID NO: 1892977 - DNA, 15 bp, Homo sapiens
ttctacactcactcc

SEQ ID NO: 1892978 - DNA, 15 bp, Homo sapiens
tctacactcactcct

SEQ ID NO: 1892979 - DNA, 15 bp, Homo sapiens
ctacactcactcctt

SEQ ID NO: 1892980 - DNA, 15 bp, Homo sapiens
tacactcactccttg

SEQ ID NO: 1892981 - DNA, 15 bp, Homo sapiens
acactcactccttgg

SEQ ID NO: 1892982 - DNA, 15 bp, Homo sapiens
cactcactccttgga

SEQ ID NO: 1892983 - DNA, 15 bp, Homo sapiens
actcactccttggat

SEQ ID NO: 1892984 - DNA, 15 bp, Homo sapiens
ctcactccttggatg

SEQ ID NO: 1892985 - DNA, 15 bp, Homo sapiens
tcactccttggatga

SEQ ID NO: 1892986 - DNA, 15 bp, Homo sapiens
cactccttggatgac

SEQ ID NO: 1892987 - DNA, 15 bp, Homo sapiens
actccttggatgacc

SEQ ID NO: 1892988 - DNA, 15 bp, Homo sapiens
ctccttggatgacct

SEQ ID NO: 1892989 - DNA, 15 bp, Homo sapiens
tccttggatgacctt

SEQ ID NO: 1892990 - DNA, 15 bp, Homo sapiens
ccttggatgacctta

SEQ ID NO: 1892991 - DNA, 15 bp, Homo sapiens
cttggatgaccttat

SEQ ID NO: 1892992 - DNA, 15 bp, Homo sapiens
ttggatgaccttatc

SEQ ID NO: 1892993 - DNA, 15 bp, Homo sapiens
tggatgaccttatct

SEQ ID NO: 1892994 - DNA, 15 bp, Homo sapiens
ggatgaccttatcta

SEQ ID NO: 1892995 - DNA, 15 bp, Homo sapiens
gatgaccttatctag

SEQ ID NO: 1892996 - DNA, 15 bp, Homo sapiens
atgaccttatctagt

SEQ ID NO: 1892997 - DNA, 15 bp, Homo sapiens
tgaccttatctagtg

SEQ ID NO: 1892998 - DNA, 15 bp, Homo sapiens
gaccttatctagtgc

SEQ ID NO: 1892999 - DNA, 15 bp, Homo sapiens
accttatctagtgcc

SEQ ID NO: 1893000 - DNA, 15 bp, Homo sapiens
ccttatctagtgcca

SEQ ID NO: 1893001 - DNA, 15 bp, Homo sapiens
cttatctagtgccat

SEQ ID NO: 1893002 - DNA, 15 bp, Homo sapiens
ttatctagtgccatg

SEQ ID NO: 1893003 - DNA, 15 bp, Homo sapiens
tatctagtgccatgg

SEQ ID NO: 1893004 - DNA, 15 bp, Homo sapiens
atctagtgccatggc

SEQ ID NO: 1893005 - DNA, 15 bp, Homo sapiens
tctagtgccatggct

SEQ ID NO: 1893006 - DNA, 15 bp, Homo sapiens
ctagtgccatggctc

SEQ ID NO: 1893007 - DNA, 15 bp, Homo sapiens
tagtgccatggctct

SEQ ID NO: 1893008 - DNA, 15 bp, Homo sapiens
agtgccatggctcta

SEQ ID NO: 1893009 - DNA, 15 bp, Homo sapiens
gtgccatggctctaa

SEQ ID NO: 1893010 - DNA, 15 bp, Homo sapiens
tgccatggctctaaa

SEQ ID NO: 1893011 - DNA, 15 bp, Homo sapiens
gccatggctctaaat

SEQ ID NO: 1893012 - DNA, 15 bp, Homo sapiens
ccatggctctaaata

SEQ ID NO: 1893013 - DNA, 15 bp, Homo sapiens
catggctctaaatac

SEQ ID NO: 1893014 - DNA, 15 bp, Homo sapiens
atggctctaaatacc

SEQ ID NO: 1893015 - DNA, 15 bp, Homo sapiens
tggctctaaatacct

SEQ ID NO: 1893016 - DNA, 15 bp, Homo sapiens
ggctctaaatacctt

SEQ ID NO: 1893017 - DNA, 15 bp, Homo sapiens
gctctaaataccttt

SEQ ID NO: 1893018 - DNA, 15 bp, Homo sapiens
ctctaaatacctttt

SEQ ID NO: 1893019 - DNA, 15 bp, Homo sapiens
tctaaataccttttg

SEQ ID NO: 1893020 - DNA, 15 bp, Homo sapiens
ctaaataccttttgt

SEQ ID NO: 1893021 - DNA, 15 bp, Homo sapiens
taaataccttttgta

SEQ ID NO: 1893022 - DNA, 15 bp, Homo sapiens
aaataccttttgtaa

SEQ ID NO: 1893023 - DNA, 15 bp, Homo sapiens
aataccttttgtaaa

SEQ ID NO: 1893024 - DNA, 15 bp, Homo sapiens
ataccttttgtaaac

SEQ ID NO: 1893025 - DNA, 15 bp, Homo sapiens
taccttttgtaaact

SEQ ID NO: 1893026 - DNA, 15 bp, Homo sapiens
accttttgtaaactc

SEQ ID NO: 1893027 - DNA, 15 bp, Homo sapiens
ccttttgtaaactca

SEQ ID NO: 1893028 - DNA, 15 bp, Homo sapiens
cttttgtaaactcac

SEQ ID NO: 1893029 - DNA, 15 bp, Homo sapiens
ttttgtaaactcaca

SEQ ID NO: 1893030 - DNA, 15 bp, Homo sapiens
tttgtaaactcacaa

SEQ ID NO: 1893031 - DNA, 15 bp, Homo sapiens
ttgtaaactcacaac

SEQ ID NO: 1893032 - DNA, 15 bp, Homo sapiens
tgtaaactcacaact

SEQ ID NO: 1893033 - DNA, 15 bp, Homo sapiens
gtaaactcacaactt

SEQ ID NO: 1893034 - DNA, 15 bp, Homo sapiens
taaactcacaacttt

SEQ ID NO: 1893035 - DNA, 15 bp, Homo sapiens
aaactcacaactttt

SEQ ID NO: 1893036 - DNA, 15 bp, Homo sapiens
aactcacaacttttt

SEQ ID NO: 1893037 - DNA, 15 bp, Homo sapiens
actcacaacttttta

SEQ ID NO: 1893038 - DNA, 15 bp, Homo sapiens
ctcacaactttttat

SEQ ID NO: 1893039 - DNA, 15 bp, Homo sapiens
tcacaactttttata

SEQ ID NO: 1893040 - DNA, 15 bp, Homo sapiens
cacaactttttatat

SEQ ID NO: 1893041 - DNA, 15 bp, Homo sapiens
acaactttttatatt

SEQ ID NO: 1893042 - DNA, 15 bp, Homo sapiens
caactttttatattt

SEQ ID NO: 1893043 - DNA, 15 bp, Homo sapiens
aactttttatatttc

SEQ ID NO: 1893044 - DNA, 15 bp, Homo sapiens
ctttttatatttcta

SEQ ID NO: 1893045 - DNA, 15 bp, Homo sapiens
tttttatatttctac

SEQ ID NO: 1893046 - DNA, 15 bp, Homo sapiens
ttttatatttctact

SEQ ID NO: 1893047 - DNA, 15 bp, Homo sapiens
tttatatttctactc

SEQ ID NO: 1893048 - DNA, 15 bp, Homo sapiens
ttatatttctactct

SEQ ID NO: 1893049 - DNA, 15 bp, Homo sapiens
tatatttctactctg

SEQ ID NO: 1893050 - DNA, 15 bp, Homo sapiens
atatttctactctgg

SEQ ID NO: 1893051 - DNA, 15 bp, Homo sapiens
tatttctactctgga

SEQ ID NO: 1893052 - DNA, 15 bp, Homo sapiens
atttctactctggac

SEQ ID NO: 1893053 - DNA, 15 bp, Homo sapiens
tttctactctggact

SEQ ID NO: 1893054 - DNA, 15 bp, Homo sapiens
ttctactctggactc

SEQ ID NO: 1893055 - DNA, 15 bp, Homo sapiens
tctactctggactcc

SEQ ID NO: 1893056 - DNA, 15 bp, Homo sapiens
ctactctggactcca

SEQ ID NO: 1893057 - DNA, 15 bp, Homo sapiens
tactctggactccac

SEQ ID NO: 1893058 - DNA, 15 bp, Homo sapiens
actctggactccact

SEQ ID NO: 1893059 - DNA, 15 bp, Homo sapiens
ctctggactccactc

SEQ ID NO: 1893060 - DNA, 15 bp, Homo sapiens
tctggactccactct

SEQ ID NO: 1893061 - DNA, 15 bp, Homo sapiens
ctggactccactcta

SEQ ID NO: 1893062 - DNA, 15 bp, Homo sapiens
tggactccactctag

SEQ ID NO: 1893063 - DNA, 15 bp, Homo sapiens
ggactccactctagc

SEQ ID NO: 1893064 - DNA, 15 bp, Homo sapiens
gactccactctagct

SEQ ID NO: 1893065 - DNA, 15 bp, Homo sapiens
actccactctagctt

SEQ ID NO: 1893066 - DNA, 15 bp, Homo sapiens
ctccactctagcttt

SEQ ID NO: 1893067 - DNA, 15 bp, Homo sapiens
tccactctagctttc

SEQ ID NO: 1893068 - DNA, 15 bp, Homo sapiens
ccactctagctttct

SEQ ID NO: 1893069 - DNA, 15 bp, Homo sapiens
cactctagctttcta

SEQ ID NO: 1893070 - DNA, 15 bp, Homo sapiens
actctagctttctac

SEQ ID NO: 1893071 - DNA, 15 bp, Homo sapiens
ctctagctttctact

SEQ ID NO: 1893072 - DNA, 15 bp, Homo sapiens
tctagctttctactc

SEQ ID NO: 1893073 - DNA, 15 bp, Homo sapiens
ctagctttctactca

SEQ ID NO: 1893074 - DNA, 15 bp, Homo sapiens
tagctttctactcag

SEQ ID NO: 1893075 - DNA, 15 bp, Homo sapiens
agctttctactcagc

SEQ ID NO: 1893076 - DNA, 15 bp, Homo sapiens
gctttctactcagca

SEQ ID NO: 1893077 - DNA, 15 bp, Homo sapiens
ctttctactcagcat

SEQ ID NO: 1893078 - DNA, 15 bp, Homo sapiens
tttctactcagcatc

SEQ ID NO: 1893079 - DNA, 15 bp, Homo sapiens
ttctactcagcatct

SEQ ID NO: 1893080 - DNA, 15 bp, Homo sapiens
tctactcagcatctc

SEQ ID NO: 1893081 - DNA, 15 bp, Homo sapiens
ctactcagcatctcc

SEQ ID NO: 1893082 - DNA, 15 bp, Homo sapiens
tactcagcatctcca

SEQ ID NO: 1893083 - DNA, 15 bp, Homo sapiens
actcagcatctccac

SEQ ID NO: 1893084 - DNA, 15 bp, Homo sapiens
ctcagcatctccact

SEQ ID NO: 1893085 - DNA, 15 bp, Homo sapiens
tcagcatctccactt

SEQ ID NO: 1893086 - DNA, 15 bp, Homo sapiens
cagcatctccactta

SEQ ID NO: 1893087 - DNA, 15 bp, Homo sapiens
agcatctccacttag

SEQ ID NO: 1893088 - DNA, 15 bp, Homo sapiens
gcatctccacttaga

SEQ ID NO: 1893089 - DNA, 15 bp, Homo sapiens
catctccacttagat

SEQ ID NO: 1893090 - DNA, 15 bp, Homo sapiens
atctccacttagatg

SEQ ID NO: 1893091 - DNA, 15 bp, Homo sapiens
tctccacttagatgt

SEQ ID NO: 1893092 - DNA, 15 bp, Homo sapiens
ctccacttagatgtc

SEQ ID NO: 1893093 - DNA, 15 bp, Homo sapiens
tccacttagatgtca

SEQ ID NO: 1893094 - DNA, 15 bp, Homo sapiens
ccacttagatgtcat

SEQ ID NO: 1893095 - DNA, 15 bp, Homo sapiens
cacttagatgtcata

SEQ ID NO: 1893096 - DNA, 15 bp, Homo sapiens
acttagatgtcatat

SEQ ID NO: 1893097 - DNA, 15 bp, Homo sapiens
cttagatgtcatata

SEQ ID NO: 1893098 - DNA, 15 bp, Homo sapiens
ttagatgtcatatat

SEQ ID NO: 1893099 - DNA, 15 bp, Homo sapiens
tagatgtcatatata

SEQ ID NO: 1893100 - DNA, 15 bp, Homo sapiens
agatgtcatatatat

SEQ ID NO: 1893101 - DNA, 15 bp, Homo sapiens
gatgtcatatatata

SEQ ID NO: 1893102 - DNA, 15 bp, Homo sapiens
atgtcatatatatat

SEQ ID NO: 1893103 - DNA, 15 bp, Homo sapiens
tgtcatatatatata

SEQ ID NO: 1893104 - DNA, 15 bp, Homo sapiens
gtcatatatatatat

SEQ ID NO: 1893105 - DNA, 15 bp, Homo sapiens
tcatatatatatata

SEQ ID NO: 1893106 - DNA, 15 bp, Homo sapiens
catatatatatatat

SEQ ID NO: 1893107 - DNA, 15 bp, Homo sapiens
tatatatatatatct

SEQ ID NO: 1893108 - DNA, 15 bp, Homo sapiens
atatatatatatctt

SEQ ID NO: 1893109 - DNA, 15 bp, Homo sapiens
tatatatatatcttt

SEQ ID NO: 1893110 - DNA, 15 bp, Homo sapiens
atatatatatcttta

SEQ ID NO: 1893111 - DNA, 15 bp, Homo sapiens
tatatatatctttag

SEQ ID NO: 1893112 - DNA, 15 bp, Homo sapiens
atatatatctttagc

SEQ ID NO: 1893113 - DNA, 15 bp, Homo sapiens
tatatatctttagct

SEQ ID NO: 1893114 - DNA, 15 bp, Homo sapiens
atatatctttagctt

SEQ ID NO: 1893115 - DNA, 15 bp, Homo sapiens
tatatctttagctta

SEQ ID NO: 1893116 - DNA, 15 bp, Homo sapiens
atatctttagcttag

SEQ ID NO: 1893117 - DNA, 15 bp, Homo sapiens
tatctttagcttagc

SEQ ID NO: 1893118 - DNA, 15 bp, Homo sapiens
atctttagcttagca

SEQ ID NO: 1893119 - DNA, 15 bp, Homo sapiens
tctttagcttagcat

SEQ ID NO: 1893120 - DNA, 15 bp, Homo sapiens
ctttagcttagcatg

SEQ ID NO: 1893121 - DNA, 15 bp, Homo sapiens
tttagcttagcatgt

SEQ ID NO: 1893122 - DNA, 15 bp, Homo sapiens
ttagcttagcatgtt

SEQ ID NO: 1893123 - DNA, 15 bp, Homo sapiens
tagcttagcatgtta

SEQ ID NO: 1893124 - DNA, 15 bp, Homo sapiens
agcttagcatgttaa

SEQ ID NO: 1893125 - DNA, 15 bp, Homo sapiens
gcttagcatgttaag

SEQ ID NO: 1893126 - DNA, 15 bp, Homo sapiens
cttagcatgttaagt

SEQ ID NO: 1893127 - DNA, 15 bp, Homo sapiens
ttagcatgttaagtt

SEQ ID NO: 1893128 - DNA, 15 bp, Homo sapiens
tagcatgttaagtta

SEQ ID NO: 1893129 - DNA, 15 bp, Homo sapiens
agcatgttaagttaa

SEQ ID NO: 1893130 - DNA, 15 bp, Homo sapiens
gcatgttaagttaaa

SEQ ID NO: 1893131 - DNA, 15 bp, Homo sapiens
catgttaagttaaat

SEQ ID NO: 1893132 - DNA, 15 bp, Homo sapiens
atgttaagttaaata

SEQ ID NO: 1893133 - DNA, 15 bp, Homo sapiens
tgttaagttaaatat

SEQ ID NO: 1893134 - DNA, 15 bp, Homo sapiens
gttaagttaaatatc

SEQ ID NO: 1893135 - DNA, 15 bp, Homo sapiens
ttaagttaaatatct

SEQ ID NO: 1893136 - DNA, 15 bp, Homo sapiens
taagttaaatatctg

SEQ ID NO: 1893137 - DNA, 15 bp, Homo sapiens
aagttaaatatctgg

SEQ ID NO: 1893138 - DNA, 15 bp, Homo sapiens
agttaaatatctggt

SEQ ID NO: 1893139 - DNA, 15 bp, Homo sapiens
gttaaatatctggtt

SEQ ID NO: 1893140 - DNA, 15 bp, Homo sapiens
ttaaatatctggttc

SEQ ID NO: 1893141 - DNA, 15 bp, Homo sapiens
taaatatctggttcc

SEQ ID NO: 1893142 - DNA, 15 bp, Homo sapiens
aaatatctggttcct

SEQ ID NO: 1893143 - DNA, 15 bp, Homo sapiens
aatatctggttcctc

SEQ ID NO: 1893144 - DNA, 15 bp, Homo sapiens
atatctggttcctcc

SEQ ID NO: 1893145 - DNA, 15 bp, Homo sapiens
tatctggttcctcca

SEQ ID NO: 1893146 - DNA, 15 bp, Homo sapiens
atctggttcctccaa

SEQ ID NO: 1893147 - DNA, 15 bp, Homo sapiens
tctggttcctccaag

SEQ ID NO: 1893148 - DNA, 15 bp, Homo sapiens
ctggttcctccaagc

SEQ ID NO: 1893149 - DNA, 15 bp, Homo sapiens
tggttcctccaagcc

SEQ ID NO: 1893150 - DNA, 15 bp, Homo sapiens
ggttcctccaagcct

SEQ ID NO: 1893151 - DNA, 15 bp, Homo sapiens
gttcctccaagccta

SEQ ID NO: 1893152 - DNA, 15 bp, Homo sapiens
ttcctccaagcctat

SEQ ID NO: 1893153 - DNA, 15 bp, Homo sapiens
tcctccaagcctatt

SEQ ID NO: 1893154 - DNA, 15 bp, Homo sapiens
cctccaagcctattt

SEQ ID NO: 1893155 - DNA, 15 bp, Homo sapiens
ctccaagcctatttc

SEQ ID NO: 1893156 - DNA, 15 bp, Homo sapiens
tccaagcctatttca

SEQ ID NO: 1893157 - DNA, 15 bp, Homo sapiens
ccaagcctatttcac

SEQ ID NO: 1893158 - DNA, 15 bp, Homo sapiens
caagcctatttcacc

SEQ ID NO: 1893159 - DNA, 15 bp, Homo sapiens
aagcctatttcacct

SEQ ID NO: 1893160 - DNA, 15 bp, Homo sapiens
agcctatttcaccta

SEQ ID NO: 1893161 - DNA, 15 bp, Homo sapiens
gcctatttcacctac

SEQ ID NO: 1893162 - DNA, 15 bp, Homo sapiens
cctatttcacctaca

SEQ ID NO: 1893163 - DNA, 15 bp, Homo sapiens
ctatttcacctacac

SEQ ID NO: 1893164 - DNA, 15 bp, Homo sapiens
tatttcacctacact

SEQ ID NO: 1893165 - DNA, 15 bp, Homo sapiens
atttcacctacactc

SEQ ID NO: 1893166 - DNA, 15 bp, Homo sapiens
tttcacctacactca

SEQ ID NO: 1893167 - DNA, 15 bp, Homo sapiens
ttcacctacactcat

SEQ ID NO: 1893168 - DNA, 15 bp, Homo sapiens
tcacctacactcatg

SEQ ID NO: 1893169 - DNA, 15 bp, Homo sapiens
cacctacactcatgt

SEQ ID NO: 1893170 - DNA, 15 bp, Homo sapiens
acctacactcatgtc

SEQ ID NO: 1893171 - DNA, 15 bp, Homo sapiens
cctacactcatgtct

SEQ ID NO: 1893172 - DNA, 15 bp, Homo sapiens
ctacactcatgtctt

SEQ ID NO: 1893173 - DNA, 15 bp, Homo sapiens
tacactcatgtcttc

SEQ ID NO: 1893174 - DNA, 15 bp, Homo sapiens
acactcatgtcttca

SEQ ID NO: 1893175 - DNA, 15 bp, Homo sapiens
cactcatgtcttcac

SEQ ID NO: 1893176 - DNA, 15 bp, Homo sapiens
actcatgtcttcacc

SEQ ID NO: 1893177 - DNA, 15 bp, Homo sapiens
ctcatgtcttcacca

SEQ ID NO: 1893178 - DNA, 15 bp, Homo sapiens
tcatgtcttcaccat

SEQ ID NO: 1893179 - DNA, 15 bp, Homo sapiens
catgtcttcaccatt

SEQ ID NO: 1893180 - DNA, 15 bp, Homo sapiens
atgtcttcaccatta

SEQ ID NO: 1893181 - DNA, 15 bp, Homo sapiens
tgtcttcaccattaa

SEQ ID NO: 1893182 - DNA, 15 bp, Homo sapiens
gtcttcaccattaat

SEQ ID NO: 1893183 - DNA, 15 bp, Homo sapiens
tcttcaccattaatg

SEQ ID NO: 1893184 - DNA, 15 bp, Homo sapiens
cttcaccattaatgg

SEQ ID NO: 1893185 - DNA, 15 bp, Homo sapiens
ttcaccattaatggt

SEQ ID NO: 1893186 - DNA, 15 bp, Homo sapiens
tcaccattaatggta

SEQ ID NO: 1893187 - DNA, 15 bp, Homo sapiens
caccattaatggtaa

SEQ ID NO: 1893188 - DNA, 15 bp, Homo sapiens
accattaatggtaac

SEQ ID NO: 1893189 - DNA, 15 bp, Homo sapiens
ccattaatggtaact

SEQ ID NO: 1893190 - DNA, 15 bp, Homo sapiens
cattaatggtaactt

SEQ ID NO: 1893191 - DNA, 15 bp, Homo sapiens
attaatggtaactta

SEQ ID NO: 1893192 - DNA, 15 bp, Homo sapiens
ttaatggtaacttag

SEQ ID NO: 1893193 - DNA, 15 bp, Homo sapiens
taatggtaacttagt

SEQ ID NO: 1893194 - DNA, 15 bp, Homo sapiens
aatggtaacttagtt

SEQ ID NO: 1893195 - DNA, 15 bp, Homo sapiens
atggtaacttagttg

SEQ ID NO: 1893196 - DNA, 15 bp, Homo sapiens
tggtaacttagttgc

SEQ ID NO: 1893197 - DNA, 15 bp, Homo sapiens
ggtaacttagttgct

SEQ ID NO: 1893198 - DNA, 15 bp, Homo sapiens
gtaacttagttgctc

SEQ ID NO: 1893199 - DNA, 15 bp, Homo sapiens
acttagttgctcaag

SEQ ID NO: 1893200 - DNA, 15 bp, Homo sapiens
cttagttgctcaaga

SEQ ID NO: 1893201 - DNA, 15 bp, Homo sapiens
ttagttgctcaagat

SEQ ID NO: 1893202 - DNA, 15 bp, Homo sapiens
tagttgctcaagatg

SEQ ID NO: 1893203 - DNA, 15 bp, Homo sapiens
agttgctcaagatga

SEQ ID NO: 1893204 - DNA, 15 bp, Homo sapiens
gttgctcaagatgaa

SEQ ID NO: 1893205 - DNA, 15 bp, Homo sapiens
ttgctcaagatgaaa

SEQ ID NO: 1893206 - DNA, 15 bp, Homo sapiens
tgctcaagatgaaag

SEQ ID NO: 1893207 - DNA, 15 bp, Homo sapiens
gctcaagatgaaagt

SEQ ID NO: 1893208 - DNA, 15 bp, Homo sapiens
ctcaagatgaaagtc

SEQ ID NO: 1893209 - DNA, 15 bp, Homo sapiens
tcaagatgaaagtct

SEQ ID NO: 1893210 - DNA, 15 bp, Homo sapiens
caagatgaaagtcta

SEQ ID NO: 1893211 - DNA, 15 bp, Homo sapiens
aagatgaaagtctag

SEQ ID NO: 1893212 - DNA, 15 bp, Homo sapiens
agatgaaagtctaga

SEQ ID NO: 1893213 - DNA, 15 bp, Homo sapiens
gatgaaagtctagaa

SEQ ID NO: 1893214 - DNA, 15 bp, Homo sapiens
atgaaagtctagaag

SEQ ID NO: 1893215 - DNA, 15 bp, Homo sapiens
tgaaagtctagaaga

SEQ ID NO: 1893216 - DNA, 15 bp, Homo sapiens
gaaagtctagaagac

SEQ ID NO: 1893217 - DNA, 15 bp, Homo sapiens
aaagtctagaagaca

SEQ ID NO: 1893218 - DNA, 15 bp, Homo sapiens
aagtctagaagacat

SEQ ID NO: 1893219 - DNA, 15 bp, Homo sapiens
agtctagaagacatc

SEQ ID NO: 1893220 - DNA, 15 bp, Homo sapiens
gtctagaagacatcc

SEQ ID NO: 1893221 - DNA, 15 bp, Homo sapiens
tctagaagacatcct

SEQ ID NO: 1893222 - DNA, 15 bp, Homo sapiens
ctagaagacatcctt

SEQ ID NO: 1893223 - DNA, 15 bp, Homo sapiens
tagaagacatccttg

SEQ ID NO: 1893224 - DNA, 15 bp, Homo sapiens
agaagacatccttgg

SEQ ID NO: 1893225 - DNA, 15 bp, Homo sapiens
gaagacatccttggc

SEQ ID NO: 1893226 - DNA, 15 bp, Homo sapiens
aagacatccttggct

SEQ ID NO: 1893227 - DNA, 15 bp, Homo sapiens
agacatccttggctc

SEQ ID NO: 1893228 - DNA, 15 bp, Homo sapiens
gacatccttggctcc

SEQ ID NO: 1893229 - DNA, 15 bp, Homo sapiens
acatccttggctcct

SEQ ID NO: 1893230 - DNA, 15 bp, Homo sapiens
catccttggctcctc

SEQ ID NO: 1893231 - DNA, 15 bp, Homo sapiens
atccttggctcctct

SEQ ID NO: 1893232 - DNA, 15 bp, Homo sapiens
tccttggctcctctc

SEQ ID NO: 1893233 - DNA, 15 bp, Homo sapiens
ccttggctcctctct

SEQ ID NO: 1893234 - DNA, 15 bp, Homo sapiens
cttggctcctctctc

SEQ ID NO: 1893235 - DNA, 15 bp, Homo sapiens
ttggctcctctctct

SEQ ID NO: 1893236 - DNA, 15 bp, Homo sapiens
tggctcctctctctc

SEQ ID NO: 1893237 - DNA, 15 bp, Homo sapiens
ggctcctctctctct

SEQ ID NO: 1893238 - DNA, 15 bp, Homo sapiens
gctcctctctctctc

SEQ ID NO: 1893239 - DNA, 15 bp, Homo sapiens
ctcctctctctctca

SEQ ID NO: 1893240 - DNA, 15 bp, Homo sapiens
tcctctctctctcat

SEQ ID NO: 1893241 - DNA, 15 bp, Homo sapiens
cctctctctctcatt

SEQ ID NO: 1893242 - DNA, 15 bp, Homo sapiens
tctctctctcattcc

SEQ ID NO: 1893243 - DNA, 15 bp, Homo sapiens
ctctctctcattccc

SEQ ID NO: 1893244 - DNA, 15 bp, Homo sapiens
tctctctcattccct

SEQ ID NO: 1893245 - DNA, 15 bp, Homo sapiens
ctctctcattcccta

SEQ ID NO: 1893246 - DNA, 15 bp, Homo sapiens
tctctcattccctac

SEQ ID NO: 1893247 - DNA, 15 bp, Homo sapiens
ctctcattccctaca

SEQ ID NO: 1893248 - DNA, 15 bp, Homo sapiens
tctcattccctacat

SEQ ID NO: 1893249 - DNA, 15 bp, Homo sapiens
ctcattccctacatc

SEQ ID NO: 1893250 - DNA, 15 bp, Homo sapiens
tcattccctacatct

SEQ ID NO: 1893251 - DNA, 15 bp, Homo sapiens
cattccctacatcta

SEQ ID NO: 1893252 - DNA, 15 bp, Homo sapiens
attccctacatctaa

SEQ ID NO: 1893253 - DNA, 15 bp, Homo sapiens
ttccctacatctaat

SEQ ID NO: 1893254 - DNA, 15 bp, Homo sapiens
tccctacatctaatc

SEQ ID NO: 1893255 - DNA, 15 bp, Homo sapiens
ccctacatctaatcc

SEQ ID NO: 1893256 - DNA, 15 bp, Homo sapiens
cctacatctaatcca

SEQ ID NO: 1893257 - DNA, 15 bp, Homo sapiens
ctacatctaatccat

SEQ ID NO: 1893258 - DNA, 15 bp, Homo sapiens
tacatctaatccatc

SEQ ID NO: 1893259 - DNA, 15 bp, Homo sapiens
acatctaatccatca

SEQ ID NO: 1893260 - DNA, 15 bp, Homo sapiens
catctaatccatcag

SEQ ID NO: 1893261 - DNA, 15 bp, Homo sapiens
atctaatccatcagt

SEQ ID NO: 1893262 - DNA, 15 bp, Homo sapiens
tctaatccatcagta

SEQ ID NO: 1893263 - DNA, 15 bp, Homo sapiens
ctaatccatcagtac

SEQ ID NO: 1893264 - DNA, 15 bp, Homo sapiens
taatccatcagtaca

SEQ ID NO: 1893265 - DNA, 15 bp, Homo sapiens
aatccatcagtacat

SEQ ID NO: 1893266 - DNA, 15 bp, Homo sapiens
atccatcagtacatt

SEQ ID NO: 1893267 - DNA, 15 bp, Homo sapiens
tccatcagtacattt

SEQ ID NO: 1893268 - DNA, 15 bp, Homo sapiens
ccatcagtacatttg

SEQ ID NO: 1893269 - DNA, 15 bp, Homo sapiens
catcagtacatttga

SEQ ID NO: 1893270 - DNA, 15 bp, Homo sapiens
atcagtacatttgat

SEQ ID NO: 1893271 - DNA, 15 bp, Homo sapiens
tcagtacatttgata

SEQ ID NO: 1893272 - DNA, 15 bp, Homo sapiens
cagtacatttgatag

SEQ ID NO: 1893273 - DNA, 15 bp, Homo sapiens
agtacatttgataga

SEQ ID NO: 1893274 - DNA, 15 bp, Homo sapiens
gtacatttgatagac

SEQ ID NO: 1893275 - DNA, 15 bp, Homo sapiens
tacatttgatagact

SEQ ID NO: 1893276 - DNA, 15 bp, Homo sapiens
acatttgatagactt

SEQ ID NO: 1893277 - DNA, 15 bp, Homo sapiens
catttgatagacttt

SEQ ID NO: 1893278 - DNA, 15 bp, Homo sapiens
atttgatagacttta

SEQ ID NO: 1893279 - DNA, 15 bp, Homo sapiens
tttgatagactttac

SEQ ID NO: 1893280 - DNA, 15 bp, Homo sapiens
ttgatagactttacc

SEQ ID NO: 1893281 - DNA, 15 bp, Homo sapiens
tgatagactttacct

SEQ ID NO: 1893282 - DNA, 15 bp, Homo sapiens
gatagactttacctt

SEQ ID NO: 1893283 - DNA, 15 bp, Homo sapiens
atagactttaccttc

SEQ ID NO: 1893284 - DNA, 15 bp, Homo sapiens
tagactttaccttca

SEQ ID NO: 1893285 - DNA, 15 bp, Homo sapiens
agactttaccttcaa

SEQ ID NO: 1893286 - DNA, 15 bp, Homo sapiens
gactttaccttcaaa

SEQ ID NO: 1893287 - DNA, 15 bp, Homo sapiens
actttaccttcaaaa

SEQ ID NO: 1893288 - DNA, 15 bp, Homo sapiens
ctttaccttcaaaat

SEQ ID NO: 1893289 - DNA, 15 bp, Homo sapiens
tttaccttcaaaata

SEQ ID NO: 1893290 - DNA, 15 bp, Homo sapiens
ttaccttcaaaatag

SEQ ID NO: 1893291 - DNA, 15 bp, Homo sapiens
taccttcaaaataga

SEQ ID NO: 1893292 - DNA, 15 bp, Homo sapiens
accttcaaaatagat

SEQ ID NO: 1893293 - DNA, 15 bp, Homo sapiens
ccttcaaaatagatc

SEQ ID NO: 1893294 - DNA, 15 bp, Homo sapiens
cttcaaaatagatcc

SEQ ID NO: 1893295 - DNA, 15 bp, Homo sapiens
ttcaaaatagatcca

SEQ ID NO: 1893296 - DNA, 15 bp, Homo sapiens
tcaaaatagatccag

SEQ ID NO: 1893297 - DNA, 15 bp, Homo sapiens
caaaatagatccaga

SEQ ID NO: 1893298 - DNA, 15 bp, Homo sapiens
aaaatagatccagaa

SEQ ID NO: 1893299 - DNA, 15 bp, Homo sapiens
aaatagatccagaat

SEQ ID NO: 1893300 - DNA, 15 bp, Homo sapiens
aatagatccagaatc

SEQ ID NO: 1893301 - DNA, 15 bp, Homo sapiens
atagatccagaatct

SEQ ID NO: 1893302 - DNA, 15 bp, Homo sapiens
tagatccagaatctg

SEQ ID NO: 1893303 - DNA, 15 bp, Homo sapiens
agatccagaatctga

SEQ ID NO: 1893304 - DNA, 15 bp, Homo sapiens
gatccagaatctgac

SEQ ID NO: 1893305 - DNA, 15 bp, Homo sapiens
atccagaatctgaca

SEQ ID NO: 1893306 - DNA, 15 bp, Homo sapiens
tccagaatctgacac

SEQ ID NO: 1893307 - DNA, 15 bp, Homo sapiens
ccagaatctgacacc

SEQ ID NO: 1893308 - DNA, 15 bp, Homo sapiens
cagaatctgacacca

SEQ ID NO: 1893309 - DNA, 15 bp, Homo sapiens
agaatctgacaccac

SEQ ID NO: 1893310 - DNA, 15 bp, Homo sapiens
gaatctgacaccact

SEQ ID NO: 1893311 - DNA, 15 bp, Homo sapiens
aatctgacaccacta

SEQ ID NO: 1893312 - DNA, 15 bp, Homo sapiens
atctgacaccactac

SEQ ID NO: 1893313 - DNA, 15 bp, Homo sapiens
tctgacaccactact

SEQ ID NO: 1893314 - DNA, 15 bp, Homo sapiens
ctgacaccactactt

SEQ ID NO: 1893315 - DNA, 15 bp, Homo sapiens
tgacaccactacttc

SEQ ID NO: 1893316 - DNA, 15 bp, Homo sapiens
gacaccactacttct

SEQ ID NO: 1893317 - DNA, 15 bp, Homo sapiens
acaccactacttctg

SEQ ID NO: 1893318 - DNA, 15 bp, Homo sapiens
caccactacttctgc

SEQ ID NO: 1893319 - DNA, 15 bp, Homo sapiens
accactacttctgcc

SEQ ID NO: 1893320 - DNA, 15 bp, Homo sapiens
ccactacttctgcca

SEQ ID NO: 1893321 - DNA, 15 bp, Homo sapiens
cactacttctgccac

SEQ ID NO: 1893322 - DNA, 15 bp, Homo sapiens
actacttctgccaca

SEQ ID NO: 1893323 - DNA, 15 bp, Homo sapiens
ctacttctgccacat

SEQ ID NO: 1893324 - DNA, 15 bp, Homo sapiens
tacttctgccacatt

SEQ ID NO: 1893325 - DNA, 15 bp, Homo sapiens
acttctgccacatta

SEQ ID NO: 1893326 - DNA, 15 bp, Homo sapiens
cttctgccacattaa

SEQ ID NO: 1893327 - DNA, 15 bp, Homo sapiens
ttctgccacattaat

SEQ ID NO: 1893328 - DNA, 15 bp, Homo sapiens
tctgccacattaatc

SEQ ID NO: 1893329 - DNA, 15 bp, Homo sapiens
ctgccacattaatcc

SEQ ID NO: 1893330 - DNA, 15 bp, Homo sapiens
tgccacattaatcca

SEQ ID NO: 1893331 - DNA, 15 bp, Homo sapiens
gccacattaatccaa

SEQ ID NO: 1893332 - DNA, 15 bp, Homo sapiens
ccacattaatccaag

SEQ ID NO: 1893333 - DNA, 15 bp, Homo sapiens
cacattaatccaagc

SEQ ID NO: 1893334 - DNA, 15 bp, Homo sapiens
acattaatccaagct

SEQ ID NO: 1893335 - DNA, 15 bp, Homo sapiens
cattaatccaagcta

SEQ ID NO: 1893336 - DNA, 15 bp, Homo sapiens
attaatccaagctac

SEQ ID NO: 1893337 - DNA, 15 bp, Homo sapiens
ttaatccaagctacc

SEQ ID NO: 1893338 - DNA, 15 bp, Homo sapiens
taatccaagctacct

SEQ ID NO: 1893339 - DNA, 15 bp, Homo sapiens
aatccaagctacctt

SEQ ID NO: 1893340 - DNA, 15 bp, Homo sapiens
atccaagctaccttt

SEQ ID NO: 1893341 - DNA, 15 bp, Homo sapiens
tccaagctaccttta

SEQ ID NO: 1893342 - DNA, 15 bp, Homo sapiens
ccaagctacctttat

SEQ ID NO: 1893343 - DNA, 15 bp, Homo sapiens
caagctacctttatc

SEQ ID NO: 1893344 - DNA, 15 bp, Homo sapiens
aagctacctttatct

SEQ ID NO: 1893345 - DNA, 15 bp, Homo sapiens
agctacctttatctc

SEQ ID NO: 1893346 - DNA, 15 bp, Homo sapiens
gctacctttatctct

SEQ ID NO: 1893347 - DNA, 15 bp, Homo sapiens
ctacctttatctctc

SEQ ID NO: 1893348 - DNA, 15 bp, Homo sapiens
tacctttatctctca

SEQ ID NO: 1893349 - DNA, 15 bp, Homo sapiens
acctttatctctcac

SEQ ID NO: 1893350 - DNA, 15 bp, Homo sapiens
cctttatctctcaca

SEQ ID NO: 1893351 - DNA, 15 bp, Homo sapiens
ctttatctctcacat

SEQ ID NO: 1893352 - DNA, 15 bp, Homo sapiens
tttatctctcacatc

SEQ ID NO: 1893353 - DNA, 15 bp, Homo sapiens
ttatctctcacatca

SEQ ID NO: 1893354 - DNA, 15 bp, Homo sapiens
tatctctcacatcaa

SEQ ID NO: 1893355 - DNA, 15 bp, Homo sapiens
atctctcacatcaat

SEQ ID NO: 1893356 - DNA, 15 bp, Homo sapiens
tctctcacatcaatt

SEQ ID NO: 1893357 - DNA, 15 bp, Homo sapiens
ctctcacatcaatta

SEQ ID NO: 1893358 - DNA, 15 bp, Homo sapiens
tctcacatcaattat

SEQ ID NO: 1893359 - DNA, 15 bp, Homo sapiens
ctcacatcaattatc

SEQ ID NO: 1893360 - DNA, 15 bp, Homo sapiens
tcacatcaattatct

SEQ ID NO: 1893361 - DNA, 15 bp, Homo sapiens
cacatcaattatctc

SEQ ID NO: 1893362 - DNA, 15 bp, Homo sapiens
acatcaattatctca

SEQ ID NO: 1893363 - DNA, 15 bp, Homo sapiens
catcaattatctcag

SEQ ID NO: 1893364 - DNA, 15 bp, Homo sapiens
atcaattatctcagg

SEQ ID NO: 1893365 - DNA, 15 bp, Homo sapiens
tcaattatctcaggt

SEQ ID NO: 1893366 - DNA, 15 bp, Homo sapiens
caattatctcaggtc

SEQ ID NO: 1893367 - DNA, 15 bp, Homo sapiens
aattatctcaggtct

SEQ ID NO: 1893368 - DNA, 15 bp, Homo sapiens
attatctcaggtctc

SEQ ID NO: 1893369 - DNA, 15 bp, Homo sapiens
ttatctcaggtctcc

SEQ ID NO: 1893370 - DNA, 15 bp, Homo sapiens
tatctcaggtctccc

SEQ ID NO: 1893371 - DNA, 15 bp, Homo sapiens
atctcaggtctccct

SEQ ID NO: 1893372 - DNA, 15 bp, Homo sapiens
tctcaggtctccctg

SEQ ID NO: 1893373 - DNA, 15 bp, Homo sapiens
ctcaggtctccctgc

SEQ ID NO: 1893374 - DNA, 15 bp, Homo sapiens
tcaggtctccctgct

SEQ ID NO: 1893375 - DNA, 15 bp, Homo sapiens
caggtctccctgctt

SEQ ID NO: 1893376 - DNA, 15 bp, Homo sapiens
aggtctccctgcttc

SEQ ID NO: 1893377 - DNA, 15 bp, Homo sapiens
ggtctccctgcttct

SEQ ID NO: 1893378 - DNA, 15 bp, Homo sapiens
gtctccctgcttcta

SEQ ID NO: 1893379 - DNA, 15 bp, Homo sapiens
tctccctgcttctac

SEQ ID NO: 1893380 - DNA, 15 bp, Homo sapiens
ctccctgcttctacc

SEQ ID NO: 1893381 - DNA, 15 bp, Homo sapiens
tccctgcttctacct

SEQ ID NO: 1893382 - DNA, 15 bp, Homo sapiens
ccctgcttctacctt

SEQ ID NO: 1893383 - DNA, 15 bp, Homo sapiens
cctgcttctaccttc

SEQ ID NO: 1893384 - DNA, 15 bp, Homo sapiens
ctgcttctaccttcc

SEQ ID NO: 1893385 - DNA, 15 bp, Homo sapiens
tgcttctaccttccc

SEQ ID NO: 1893386 - DNA, 15 bp, Homo sapiens
gcttctaccttccct

SEQ ID NO: 1893387 - DNA, 15 bp, Homo sapiens
cttctaccttcccta

SEQ ID NO: 1893388 - DNA, 15 bp, Homo sapiens
ttctaccttccctag

SEQ ID NO: 1893389 - DNA, 15 bp, Homo sapiens
tctaccttccctagc

SEQ ID NO: 1893390 - DNA, 15 bp, Homo sapiens
ctaccttccctagca

SEQ ID NO: 1893391 - DNA, 15 bp, Homo sapiens
taccttccctagcaa

SEQ ID NO: 1893392 - DNA, 15 bp, Homo sapiens
accttccctagcaac

SEQ ID NO: 1893393 - DNA, 15 bp, Homo sapiens
ccttccctagcaacc

SEQ ID NO: 1893394 - DNA, 15 bp, Homo sapiens
cttccctagcaaccc

SEQ ID NO: 1893395 - DNA, 15 bp, Homo sapiens
ttccctagcaacccc

SEQ ID NO: 1893396 - DNA, 15 bp, Homo sapiens
tccctagcaacccca

SEQ ID NO: 1893397 - DNA, 15 bp, Homo sapiens
ccctagcaaccccat

SEQ ID NO: 1893398 - DNA, 15 bp, Homo sapiens
cctagcaaccccatc

SEQ ID NO: 1893399 - DNA, 15 bp, Homo sapiens
ctagcaaccccatca

SEQ ID NO: 1893400 - DNA, 15 bp, Homo sapiens
tagcaaccccatcat

SEQ ID NO: 1893401 - DNA, 15 bp, Homo sapiens
agcaaccccatcatg

SEQ ID NO: 1893402 - DNA, 15 bp, Homo sapiens
gcaaccccatcatgg

SEQ ID NO: 1893403 - DNA, 15 bp, Homo sapiens
caaccccatcatggt

SEQ ID NO: 1893404 - DNA, 15 bp, Homo sapiens
aaccccatcatggtc

SEQ ID NO: 1893405 - DNA, 15 bp, Homo sapiens
accccatcatggtct

SEQ ID NO: 1893406 - DNA, 15 bp, Homo sapiens
ccccatcatggtcta

SEQ ID NO: 1893407 - DNA, 15 bp, Homo sapiens
cccatcatggtctat

SEQ ID NO: 1893408 - DNA, 15 bp, Homo sapiens
ccatcatggtctatt

SEQ ID NO: 1893409 - DNA, 15 bp, Homo sapiens
catcatggtctattt

SEQ ID NO: 1893410 - DNA, 15 bp, Homo sapiens
atcatggtctatttc

SEQ ID NO: 1893411 - DNA, 15 bp, Homo sapiens
tcatggtctatttcc

SEQ ID NO: 1893412 - DNA, 15 bp, Homo sapiens
catggtctatttcca

SEQ ID NO: 1893413 - DNA, 15 bp, Homo sapiens
atggtctatttccaa

SEQ ID NO: 1893414 - DNA, 15 bp, Homo sapiens
tggtctatttccaac

SEQ ID NO: 1893415 - DNA, 15 bp, Homo sapiens
ggtctatttccaaca

SEQ ID NO: 1893416 - DNA, 15 bp, Homo sapiens
gtctatttccaacaa

SEQ ID NO: 1893417 - DNA, 15 bp, Homo sapiens
tctatttccaacaaa

SEQ ID NO: 1893418 - DNA, 15 bp, Homo sapiens
ctatttccaacaaag

SEQ ID NO: 1893419 - DNA, 15 bp, Homo sapiens
tatttccaacaaagc

SEQ ID NO: 1893420 - DNA, 15 bp, Homo sapiens
atttccaacaaagca

SEQ ID NO: 1893421 - DNA, 15 bp, Homo sapiens
tttccaacaaagcag

SEQ ID NO: 1893422 - DNA, 15 bp, Homo sapiens
ttccaacaaagcagt

SEQ ID NO: 1893423 - DNA, 15 bp, Homo sapiens
tccaacaaagcagtc

SEQ ID NO: 1893424 - DNA, 15 bp, Homo sapiens
ccaacaaagcagtct

SEQ ID NO: 1893425 - DNA, 15 bp, Homo sapiens
caacaaagcagtctc

SEQ ID NO: 1893426 - DNA, 15 bp, Homo sapiens
aacaaagcagtctcg

SEQ ID NO: 1893427 - DNA, 15 bp, Homo sapiens
acaaagcagtctcgg

SEQ ID NO: 1893428 - DNA, 15 bp, Homo sapiens
caaagcagtctcggt

SEQ ID NO: 1893429 - DNA, 15 bp, Homo sapiens
aaagcagtctcggtg

SEQ ID NO: 1893430 - DNA, 15 bp, Homo sapiens
aagcagtctcggtga

SEQ ID NO: 1893431 - DNA, 15 bp, Homo sapiens
agcagtctcggtgag

SEQ ID NO: 1893432 - DNA, 15 bp, Homo sapiens
gcagtctcggtgagc

SEQ ID NO: 1893433 - DNA, 15 bp, Homo sapiens
cagtctcggtgagcc

SEQ ID NO: 1893434 - DNA, 15 bp, Homo sapiens
agtctcggtgagcct

SEQ ID NO: 1893435 - DNA, 15 bp, Homo sapiens
gtctcggtgagccta

SEQ ID NO: 1893436 - DNA, 15 bp, Homo sapiens
tctcggtgagcctaa

SEQ ID NO: 1893437 - DNA, 15 bp, Homo sapiens
ctcggtgagcctaac

SEQ ID NO: 1893438 - DNA, 15 bp, Homo sapiens
tcggtgagcctaaca

SEQ ID NO: 1893439 - DNA, 15 bp, Homo sapiens
cggtgagcctaacag

SEQ ID NO: 1893440 - DNA, 15 bp, Homo sapiens
ggtgagcctaacagg

SEQ ID NO: 1893441 - DNA, 15 bp, Homo sapiens
gtgagcctaacaggc

SEQ ID NO: 1893442 - DNA, 15 bp, Homo sapiens
tgagcctaacaggca

SEQ ID NO: 1893443 - DNA, 15 bp, Homo sapiens
gagcctaacaggcaa

SEQ ID NO: 1893444 - DNA, 15 bp, Homo sapiens
agcctaacaggcaag

SEQ ID NO: 1893445 - DNA, 15 bp, Homo sapiens
gcctaacaggcaagc

SEQ ID NO: 1893446 - DNA, 15 bp, Homo sapiens
cctaacaggcaagcc

SEQ ID NO: 1893447 - DNA, 15 bp, Homo sapiens
ctaacaggcaagcca

SEQ ID NO: 1893448 - DNA, 15 bp, Homo sapiens
taacaggcaagccag

SEQ ID NO: 1893449 - DNA, 15 bp, Homo sapiens
aacaggcaagccaga

SEQ ID NO: 1893450 - DNA, 15 bp, Homo sapiens
acaggcaagccagat

SEQ ID NO: 1893451 - DNA, 15 bp, Homo sapiens
caggcaagccagatc

SEQ ID NO: 1893452 - DNA, 15 bp, Homo sapiens
aggcaagccagatca

SEQ ID NO: 1893453 - DNA, 15 bp, Homo sapiens
ggcaagccagatcat

SEQ ID NO: 1893454 - DNA, 15 bp, Homo sapiens
gcaagccagatcatg

SEQ ID NO: 1893455 - DNA, 15 bp, Homo sapiens
caagccagatcatgg

SEQ ID NO: 1893456 - DNA, 15 bp, Homo sapiens
aagccagatcatggt

SEQ ID NO: 1893457 - DNA, 15 bp, Homo sapiens
agccagatcatggtt

SEQ ID NO: 1893458 - DNA, 15 bp, Homo sapiens
gccagatcatggttt

SEQ ID NO: 1893459 - DNA, 15 bp, Homo sapiens
ccagatcatggtttc

SEQ ID NO: 1893460 - DNA, 15 bp, Homo sapiens
cagatcatggtttcc

SEQ ID NO: 1893461 - DNA, 15 bp, Homo sapiens
agatcatggtttccc

SEQ ID NO: 1893462 - DNA, 15 bp, Homo sapiens
gatcatggtttcccc

SEQ ID NO: 1893463 - DNA, 15 bp, Homo sapiens
atcatggtttccccc

SEQ ID NO: 1893464 - DNA, 15 bp, Homo sapiens
tcatggtttccccct

SEQ ID NO: 1893465 - DNA, 15 bp, Homo sapiens
catggtttccccctt

SEQ ID NO: 1893466 - DNA, 15 bp, Homo sapiens
atggtttcccccttc

SEQ ID NO: 1893467 - DNA, 15 bp, Homo sapiens
tggtttcccccttct

SEQ ID NO: 1893468 - DNA, 15 bp, Homo sapiens
ggtttcccccttctt

SEQ ID NO: 1893469 - DNA, 15 bp, Homo sapiens
gtttcccccttcttg

SEQ ID NO: 1893470 - DNA, 15 bp, Homo sapiens
tttcccccttcttga

SEQ ID NO: 1893471 - DNA, 15 bp, Homo sapiens
ttcccccttcttgaa

SEQ ID NO: 1893472 - DNA, 15 bp, Homo sapiens
tcccccttcttgaaa

SEQ ID NO: 1893473 - DNA, 15 bp, Homo sapiens
cccccttcttgaaac

SEQ ID NO: 1893474 - DNA, 15 bp, Homo sapiens
ccccttcttgaaacc

SEQ ID NO: 1893475 - DNA, 15 bp, Homo sapiens
cccttcttgaaaccc

SEQ ID NO: 1893476 - DNA, 15 bp, Homo sapiens
ccttcttgaaaccca

SEQ ID NO: 1893477 - DNA, 15 bp, Homo sapiens
cttcttgaaacccac

SEQ ID NO: 1893478 - DNA, 15 bp, Homo sapiens
ttcttgaaacccacc

SEQ ID NO: 1893479 - DNA, 15 bp, Homo sapiens
tcttgaaacccacct

SEQ ID NO: 1893480 - DNA, 15 bp, Homo sapiens
cttgaaacccacctc

SEQ ID NO: 1893481 - DNA, 15 bp, Homo sapiens
ttgaaacccacctct

SEQ ID NO: 1893482 - DNA, 15 bp, Homo sapiens
tgaaacccacctctc

SEQ ID NO: 1893483 - DNA, 15 bp, Homo sapiens
gaaacccacctctct

SEQ ID NO: 1893484 - DNA, 15 bp, Homo sapiens
aaacccacctctctc

SEQ ID NO: 1893485 - DNA, 15 bp, Homo sapiens
aacccacctctctca

SEQ ID NO: 1893486 - DNA, 15 bp, Homo sapiens
acccacctctctcat

SEQ ID NO: 1893487 - DNA, 15 bp, Homo sapiens
cccacctctctcata

SEQ ID NO: 1893488 - DNA, 15 bp, Homo sapiens
ccacctctctcataa

SEQ ID NO: 1893489 - DNA, 15 bp, Homo sapiens
cacctctctcataat

SEQ ID NO: 1893490 - DNA, 15 bp, Homo sapiens
acctctctcataata

SEQ ID NO: 1893491 - DNA, 15 bp, Homo sapiens
cctctctcataatag

SEQ ID NO: 1893492 - DNA, 15 bp, Homo sapiens
ctctctcataataga

SEQ ID NO: 1893493 - DNA, 15 bp, Homo sapiens
tctctcataatagaa

SEQ ID NO: 1893494 - DNA, 15 bp, Homo sapiens
ctctcataatagaag

SEQ ID NO: 1893495 - DNA, 15 bp, Homo sapiens
tctcataatagaagc

SEQ ID NO: 1893496 - DNA, 15 bp, Homo sapiens
ctcataatagaagcc

SEQ ID NO: 1893497 - DNA, 15 bp, Homo sapiens
tcataatagaagcca

SEQ ID NO: 1893498 - DNA, 15 bp, Homo sapiens
cataatagaagccaa

SEQ ID NO: 1893499 - DNA, 15 bp, Homo sapiens
ataatagaagccaat

SEQ ID NO: 1893500 - DNA, 15 bp, Homo sapiens
taatagaagccaatg

SEQ ID NO: 1893501 - DNA, 15 bp, Homo sapiens
aatagaagccaatgt

SEQ ID NO: 1893502 - DNA, 15 bp, Homo sapiens
atagaagccaatgtt

SEQ ID NO: 1893503 - DNA, 15 bp, Homo sapiens
tagaagccaatgttt

SEQ ID NO: 1893504 - DNA, 15 bp, Homo sapiens
agaagccaatgtttg

SEQ ID NO: 1893505 - DNA, 15 bp, Homo sapiens
gaagccaatgtttgc

SEQ ID NO: 1893506 - DNA, 15 bp, Homo sapiens
aagccaatgtttgca

SEQ ID NO: 1893507 - DNA, 15 bp, Homo sapiens
agccaatgtttgcaa

SEQ ID NO: 1893508 - DNA, 15 bp, Homo sapiens
gccaatgtttgcaat

SEQ ID NO: 1893509 - DNA, 15 bp, Homo sapiens
ccaatgtttgcaatg

SEQ ID NO: 1893510 - DNA, 15 bp, Homo sapiens
caatgtttgcaatgg

SEQ ID NO: 1893511 - DNA, 15 bp, Homo sapiens
aatgtttgcaatggc

SEQ ID NO: 1893512 - DNA, 15 bp, Homo sapiens
atgtttgcaatggcc

SEQ ID NO: 1893513 - DNA, 15 bp, Homo sapiens
tgtttgcaatggcct

SEQ ID NO: 1893514 - DNA, 15 bp, Homo sapiens
gtttgcaatggcctc

SEQ ID NO: 1893515 - DNA, 15 bp, Homo sapiens
tttgcaatggcctcc

SEQ ID NO: 1893516 - DNA, 15 bp, Homo sapiens
ttgcaatggcctccc

SEQ ID NO: 1893517 - DNA, 15 bp, Homo sapiens
tgcaatggcctccca

SEQ ID NO: 1893518 - DNA, 15 bp, Homo sapiens
gcaatggcctcccag

SEQ ID NO: 1893519 - DNA, 15 bp, Homo sapiens
caatggcctcccagt

SEQ ID NO: 1893520 - DNA, 15 bp, Homo sapiens
aatggcctcccagtc

SEQ ID NO: 1893521 - DNA, 15 bp, Homo sapiens
atggcctcccagtcc

SEQ ID NO: 1893522 - DNA, 15 bp, Homo sapiens
tggcctcccagtccc

SEQ ID NO: 1893523 - DNA, 15 bp, Homo sapiens
ggcctcccagtccca

SEQ ID NO: 1893524 - DNA, 15 bp, Homo sapiens
gcctcccagtcccat

SEQ ID NO: 1893525 - DNA, 15 bp, Homo sapiens
cctcccagtcccatc

SEQ ID NO: 1893526 - DNA, 15 bp, Homo sapiens
ctcccagtcccatca

SEQ ID NO: 1893527 - DNA, 15 bp, Homo sapiens
tcccagtcccatcac

SEQ ID NO: 1893528 - DNA, 15 bp, Homo sapiens
cccagtcccatcacc

SEQ ID NO: 1893529 - DNA, 15 bp, Homo sapiens
ccagtcccatcacca

SEQ ID NO: 1893530 - DNA, 15 bp, Homo sapiens
cagtcccatcaccat

SEQ ID NO: 1893531 - DNA, 15 bp, Homo sapiens
agtcccatcaccatc

SEQ ID NO: 1893532 - DNA, 15 bp, Homo sapiens
gtcccatcaccatct

SEQ ID NO: 1893533 - DNA, 15 bp, Homo sapiens
tcccatcaccatctg

SEQ ID NO: 1893534 - DNA, 15 bp, Homo sapiens
cccatcaccatctgg

SEQ ID NO: 1893535 - DNA, 15 bp, Homo sapiens
ccatcaccatctggc

SEQ ID NO: 1893536 - DNA, 15 bp, Homo sapiens
catcaccatctggcc

SEQ ID NO: 1893537 - DNA, 15 bp, Homo sapiens
atcaccatctggcca

SEQ ID NO: 1893538 - DNA, 15 bp, Homo sapiens
caccatctggccacc

SEQ ID NO: 1893539 - DNA, 15 bp, Homo sapiens
accatctggccacca

SEQ ID NO: 1893540 - DNA, 15 bp, Homo sapiens
ccatctggccaccac

SEQ ID NO: 1893541 - DNA, 15 bp, Homo sapiens
catctggccaccaca

SEQ ID NO: 1893542 - DNA, 15 bp, Homo sapiens
atctggccaccacaa

SEQ ID NO: 1893543 - DNA, 15 bp, Homo sapiens
tctggccaccacaat

SEQ ID NO: 1893544 - DNA, 15 bp, Homo sapiens
ctggccaccacaatc

SEQ ID NO: 1893545 - DNA, 15 bp, Homo sapiens
tggccaccacaatct

SEQ ID NO: 1893546 - DNA, 15 bp, Homo sapiens
ggccaccacaatctg

SEQ ID NO: 1893547 - DNA, 15 bp, Homo sapiens
gccaccacaatctga

SEQ ID NO: 1893548 - DNA, 15 bp, Homo sapiens
ccaccacaatctgag

SEQ ID NO: 1893549 - DNA, 15 bp, Homo sapiens
caccacaatctgagc

SEQ ID NO: 1893550 - DNA, 15 bp, Homo sapiens
accacaatctgagct

SEQ ID NO: 1893551 - DNA, 15 bp, Homo sapiens
ccacaatctgagctc

SEQ ID NO: 1893552 - DNA, 15 bp, Homo sapiens
cacaatctgagctct

SEQ ID NO: 1893553 - DNA, 15 bp, Homo sapiens
acaatctgagctctt

SEQ ID NO: 1893554 - DNA, 15 bp, Homo sapiens
caatctgagctcttc

SEQ ID NO: 1893555 - DNA, 15 bp, Homo sapiens
aatctgagctcttcc

SEQ ID NO: 1893556 - DNA, 15 bp, Homo sapiens
atctgagctcttcca

SEQ ID NO: 1893557 - DNA, 15 bp, Homo sapiens
tctgagctcttccac

SEQ ID NO: 1893558 - DNA, 15 bp, Homo sapiens
ctgagctcttccact

SEQ ID NO: 1893559 - DNA, 15 bp, Homo sapiens
tgagctcttccactg

SEQ ID NO: 1893560 - DNA, 15 bp, Homo sapiens
gagctcttccactgc

SEQ ID NO: 1893561 - DNA, 15 bp, Homo sapiens
agctcttccactgct

SEQ ID NO: 1893562 - DNA, 15 bp, Homo sapiens
gctcttccactgctc

SEQ ID NO: 1893563 - DNA, 15 bp, Homo sapiens
ctcttccactgctct

SEQ ID NO: 1893564 - DNA, 15 bp, Homo sapiens
tcttccactgctctc

SEQ ID NO: 1893565 - DNA, 15 bp, Homo sapiens
cttccactgctctcc

SEQ ID NO: 1893566 - DNA, 15 bp, Homo sapiens
ttccactgctctccc

SEQ ID NO: 1893567 - DNA, 15 bp, Homo sapiens
tccactgctctcccc

SEQ ID NO: 1893568 - DNA, 15 bp, Homo sapiens
ccactgctctcccct

SEQ ID NO: 1893569 - DNA, 15 bp, Homo sapiens
cactgctctcccctt

SEQ ID NO: 1893570 - DNA, 15 bp, Homo sapiens
actgctctccccttg

SEQ ID NO: 1893571 - DNA, 15 bp, Homo sapiens
ctgctctccccttgc

SEQ ID NO: 1893572 - DNA, 15 bp, Homo sapiens
tgctctccccttgct

SEQ ID NO: 1893573 - DNA, 15 bp, Homo sapiens
gctctccccttgctt

SEQ ID NO: 1893574 - DNA, 15 bp, Homo sapiens
ctctccccttgcttg

SEQ ID NO: 1893575 - DNA, 15 bp, Homo sapiens
tctccccttgcttgg

SEQ ID NO: 1893576 - DNA, 15 bp, Homo sapiens
ctccccttgcttggc

SEQ ID NO: 1893577 - DNA, 15 bp, Homo sapiens
tccccttgcttggcc

SEQ ID NO: 1893578 - DNA, 15 bp, Homo sapiens
ccccttgcttggccc

SEQ ID NO: 1893579 - DNA, 15 bp, Homo sapiens
cccttgcttggccca

SEQ ID NO: 1893580 - DNA, 15 bp, Homo sapiens
ccttgcttggcccag

SEQ ID NO: 1893581 - DNA, 15 bp, Homo sapiens
cttgcttggcccagt

SEQ ID NO: 1893582 - DNA, 15 bp, Homo sapiens
ttgcttggcccagtt

SEQ ID NO: 1893583 - DNA, 15 bp, Homo sapiens
tgcttggcccagttc

SEQ ID NO: 1893584 - DNA, 15 bp, Homo sapiens
gcttggcccagttca

SEQ ID NO: 1893585 - DNA, 15 bp, Homo sapiens
cttggcccagttcag

SEQ ID NO: 1893586 - DNA, 15 bp, Homo sapiens
ttggcccagttcagc

SEQ ID NO: 1893587 - DNA, 15 bp, Homo sapiens
tggcccagttcagcc

SEQ ID NO: 1893588 - DNA, 15 bp, Homo sapiens
ggcccagttcagcca

SEQ ID NO: 1893589 - DNA, 15 bp, Homo sapiens
gcccagttcagccac

SEQ ID NO: 1893590 - DNA, 15 bp, Homo sapiens
cccagttcagccaca

SEQ ID NO: 1893591 - DNA, 15 bp, Homo sapiens
ccagttcagccacaa

SEQ ID NO: 1893592 - DNA, 15 bp, Homo sapiens
cagttcagccacaat

SEQ ID NO: 1893593 - DNA, 15 bp, Homo sapiens
agttcagccacaatg

SEQ ID NO: 1893594 - DNA, 15 bp, Homo sapiens
gttcagccacaatgg

SEQ ID NO: 1893595 - DNA, 15 bp, Homo sapiens
ttcagccacaatggc

SEQ ID NO: 1893596 - DNA, 15 bp, Homo sapiens
tcagccacaatggcc

SEQ ID NO: 1893597 - DNA, 15 bp, Homo sapiens
cagccacaatggccc

SEQ ID NO: 1893598 - DNA, 15 bp, Homo sapiens
agccacaatggcccc

SEQ ID NO: 1893599 - DNA, 15 bp, Homo sapiens
gccacaatggccccc

SEQ ID NO: 1893600 - DNA, 15 bp, Homo sapiens
ccacaatggccccct

SEQ ID NO: 1893601 - DNA, 15 bp, Homo sapiens
cacaatggccccctt

SEQ ID NO: 1893602 - DNA, 15 bp, Homo sapiens
acaatggcccccttg

SEQ ID NO: 1893603 - DNA, 15 bp, Homo sapiens
caatggcccccttgc

SEQ ID NO: 1893604 - DNA, 15 bp, Homo sapiens
aatggcccccttgcc

SEQ ID NO: 1893605 - DNA, 15 bp, Homo sapiens
atggcccccttgcca

SEQ ID NO: 1893606 - DNA, 15 bp, Homo sapiens
tggcccccttgccat

SEQ ID NO: 1893607 - DNA, 15 bp, Homo sapiens
ggcccccttgccatt

SEQ ID NO: 1893608 - DNA, 15 bp, Homo sapiens
gcccccttgccattg

SEQ ID NO: 1893609 - DNA, 15 bp, Homo sapiens
cccccttgccattgc

SEQ ID NO: 1893610 - DNA, 15 bp, Homo sapiens
ccccttgccattgct

SEQ ID NO: 1893611 - DNA, 15 bp, Homo sapiens
cccttgccattgctg

SEQ ID NO: 1893612 - DNA, 15 bp, Homo sapiens
ccttgccattgctgg

SEQ ID NO: 1893613 - DNA, 15 bp, Homo sapiens
cttgccattgctgga

SEQ ID NO: 1893614 - DNA, 15 bp, Homo sapiens
ttgccattgctggaa

SEQ ID NO: 1893615 - DNA, 15 bp, Homo sapiens
tgccattgctggaac

SEQ ID NO: 1893616 - DNA, 15 bp, Homo sapiens
gccattgctggaaca

SEQ ID NO: 1893617 - DNA, 15 bp, Homo sapiens
ccattgctggaacaa

SEQ ID NO: 1893618 - DNA, 15 bp, Homo sapiens
cattgctggaacaaa

SEQ ID NO: 1893619 - DNA, 15 bp, Homo sapiens
attgctggaacaaac

SEQ ID NO: 1893620 - DNA, 15 bp, Homo sapiens
ttgctggaacaaact

SEQ ID NO: 1893621 - DNA, 15 bp, Homo sapiens
tgctggaacaaactg

SEQ ID NO: 1893622 - DNA, 15 bp, Homo sapiens
gctggaacaaactgg

SEQ ID NO: 1893623 - DNA, 15 bp, Homo sapiens
ctggaacaaactgga

SEQ ID NO: 1893624 - DNA, 15 bp, Homo sapiens
tggaacaaactggac

SEQ ID NO: 1893625 - DNA, 15 bp, Homo sapiens
ggaacaaactggaca

SEQ ID NO: 1893626 - DNA, 15 bp, Homo sapiens
gaacaaactggacat

SEQ ID NO: 1893627 - DNA, 15 bp, Homo sapiens
aacaaactggacatt

SEQ ID NO: 1893628 - DNA, 15 bp, Homo sapiens
acaaactggacattg

SEQ ID NO: 1893629 - DNA, 15 bp, Homo sapiens
caaactggacattgt

SEQ ID NO: 1893630 - DNA, 15 bp, Homo sapiens
aaactggacattgtt

SEQ ID NO: 1893631 - DNA, 15 bp, Homo sapiens
aactggacattgttc

SEQ ID NO: 1893632 - DNA, 15 bp, Homo sapiens
actggacattgttcc

SEQ ID NO: 1893633 - DNA, 15 bp, Homo sapiens
ctggacattgttcca

SEQ ID NO: 1893634 - DNA, 15 bp, Homo sapiens
tggacattgttccag

SEQ ID NO: 1893635 - DNA, 15 bp, Homo sapiens
ggacattgttccaga

SEQ ID NO: 1893636 - DNA, 15 bp, Homo sapiens
gacattgttccagaa

SEQ ID NO: 1893637 - DNA, 15 bp, Homo sapiens
acattgttccagaaa

SEQ ID NO: 1893638 - DNA, 15 bp, Homo sapiens
cattgttccagaaag

SEQ ID NO: 1893639 - DNA, 15 bp, Homo sapiens
attgttccagaaaga

SEQ ID NO: 1893640 - DNA, 15 bp, Homo sapiens
ttgttccagaaagag

SEQ ID NO: 1893641 - DNA, 15 bp, Homo sapiens
tgttccagaaagagg

SEQ ID NO: 1893642 - DNA, 15 bp, Homo sapiens
gttccagaaagaggg

SEQ ID NO: 1893643 - DNA, 15 bp, Homo sapiens
ttccagaaagagggc

SEQ ID NO: 1893644 - DNA, 15 bp, Homo sapiens
tccagaaagagggct

SEQ ID NO: 1893645 - DNA, 15 bp, Homo sapiens
ccagaaagagggctt

SEQ ID NO: 1893646 - DNA, 15 bp, Homo sapiens
cagaaagagggcttt

SEQ ID NO: 1893647 - DNA, 15 bp, Homo sapiens
agaaagagggcttta

SEQ ID NO: 1893648 - DNA, 15 bp, Homo sapiens
gaaagagggctttat

SEQ ID NO: 1893649 - DNA, 15 bp, Homo sapiens
aaagagggctttatt

SEQ ID NO: 1893650 - DNA, 15 bp, Homo sapiens
aagagggctttattc

SEQ ID NO: 1893651 - DNA, 15 bp, Homo sapiens
agagggctttattct

SEQ ID NO: 1893652 - DNA, 15 bp, Homo sapiens
gagggctttattctc

SEQ ID NO: 1893653 - DNA, 15 bp, Homo sapiens
agggctttattctct

SEQ ID NO: 1893654 - DNA, 15 bp, Homo sapiens
gggctttattctctt

SEQ ID NO: 1893655 - DNA, 15 bp, Homo sapiens
ggctttattctcttt

SEQ ID NO: 1893656 - DNA, 15 bp, Homo sapiens
gctttattctctttg

SEQ ID NO: 1893657 - DNA, 15 bp, Homo sapiens
ctttattctctttgc

SEQ ID NO: 1893658 - DNA, 15 bp, Homo sapiens
tttattctctttgcc

SEQ ID NO: 1893659 - DNA, 15 bp, Homo sapiens
ttattctctttgcct

SEQ ID NO: 1893660 - DNA, 15 bp, Homo sapiens
tattctctttgccta

SEQ ID NO: 1893661 - DNA, 15 bp, Homo sapiens
attctctttgcctag

SEQ ID NO: 1893662 - DNA, 15 bp, Homo sapiens
ttctctttgcctaga

SEQ ID NO: 1893663 - DNA, 15 bp, Homo sapiens
tctctttgcctagaa

SEQ ID NO: 1893664 - DNA, 15 bp, Homo sapiens
ctctttgcctagaat

SEQ ID NO: 1893665 - DNA, 15 bp, Homo sapiens
tctttgcctagaatg

SEQ ID NO: 1893666 - DNA, 15 bp, Homo sapiens
ctttgcctagaatgt

SEQ ID NO: 1893667 - DNA, 15 bp, Homo sapiens
tttgcctagaatgtt

SEQ ID NO: 1893668 - DNA, 15 bp, Homo sapiens
ttgcctagaatgttc

SEQ ID NO: 1893669 - DNA, 15 bp, Homo sapiens
tgcctagaatgttct

SEQ ID NO: 1893670 - DNA, 15 bp, Homo sapiens
gcctagaatgttctt

SEQ ID NO: 1893671 - DNA, 15 bp, Homo sapiens
cctagaatgttcttc

SEQ ID NO: 1893672 - DNA, 15 bp, Homo sapiens
ctagaatgttcttct

SEQ ID NO: 1893673 - DNA, 15 bp, Homo sapiens
tagaatgttcttctc

SEQ ID NO: 1893674 - DNA, 15 bp, Homo sapiens
agaatgttcttctcc

SEQ ID NO: 1893675 - DNA, 15 bp, Homo sapiens
gaatgttcttctccc

SEQ ID NO: 1893676 - DNA, 15 bp, Homo sapiens
aatgttcttctccca

SEQ ID NO: 1893677 - DNA, 15 bp, Homo sapiens
atgttcttctcccag

SEQ ID NO: 1893678 - DNA, 15 bp, Homo sapiens
tgttcttctcccaga

SEQ ID NO: 1893679 - DNA, 15 bp, Homo sapiens
gttcttctcccagaa

SEQ ID NO: 1893680 - DNA, 15 bp, Homo sapiens
ttcttctcccagaat

SEQ ID NO: 1893681 - DNA, 15 bp, Homo sapiens
tcttctcccagaatg

SEQ ID NO: 1893682 - DNA, 15 bp, Homo sapiens
cttctcccagaatgc

SEQ ID NO: 1893683 - DNA, 15 bp, Homo sapiens
ttctcccagaatgcc

SEQ ID NO: 1893684 - DNA, 15 bp, Homo sapiens
tctcccagaatgcca

SEQ ID NO: 1893685 - DNA, 15 bp, Homo sapiens
ctcccagaatgccat

SEQ ID NO: 1893686 - DNA, 15 bp, Homo sapiens
tcccagaatgccatg

SEQ ID NO: 1893687 - DNA, 15 bp, Homo sapiens
cccagaatgccatgt

SEQ ID NO: 1893688 - DNA, 15 bp, Homo sapiens
ccagaatgccatgtg

SEQ ID NO: 1893689 - DNA, 15 bp, Homo sapiens
cagaatgccatgtgg

SEQ ID NO: 1893690 - DNA, 15 bp, Homo sapiens
agaatgccatgtggt

SEQ ID NO: 1893691 - DNA, 15 bp, Homo sapiens
gaatgccatgtggtt

SEQ ID NO: 1893692 - DNA, 15 bp, Homo sapiens
aatgccatgtggttc

SEQ ID NO: 1893693 - DNA, 15 bp, Homo sapiens
atgccatgtggttcc

SEQ ID NO: 1893694 - DNA, 15 bp, Homo sapiens
tgccatgtggttccc

SEQ ID NO: 1893695 - DNA, 15 bp, Homo sapiens
gccatgtggttccct

SEQ ID NO: 1893696 - DNA, 15 bp, Homo sapiens
ccatgtggttccctc

SEQ ID NO: 1893697 - DNA, 15 bp, Homo sapiens
catgtggttccctct

SEQ ID NO: 1893698 - DNA, 15 bp, Homo sapiens
atgtggttccctctc

SEQ ID NO: 1893699 - DNA, 15 bp, Homo sapiens
tgtggttccctctca

SEQ ID NO: 1893700 - DNA, 15 bp, Homo sapiens
gtggttccctctcaa

SEQ ID NO: 1893701 - DNA, 15 bp, Homo sapiens
tggttccctctcaaa

SEQ ID NO: 1893702 - DNA, 15 bp, Homo sapiens
ggttccctctcaaat

SEQ ID NO: 1893703 - DNA, 15 bp, Homo sapiens
gttccctctcaaatt

SEQ ID NO: 1893704 - DNA, 15 bp, Homo sapiens
ttccctctcaaattc

SEQ ID NO: 1893705 - DNA, 15 bp, Homo sapiens
tccctctcaaattct

SEQ ID NO: 1893706 - DNA, 15 bp, Homo sapiens
ccctctcaaattctc

SEQ ID NO: 1893707 - DNA, 15 bp, Homo sapiens
cctctcaaattctca

SEQ ID NO: 1893708 - DNA, 15 bp, Homo sapiens
ctctcaaattctcag

SEQ ID NO: 1893709 - DNA, 15 bp, Homo sapiens
tctcaaattctcagc

SEQ ID NO: 1893710 - DNA, 15 bp, Homo sapiens
ctcaaattctcagca

SEQ ID NO: 1893711 - DNA, 15 bp, Homo sapiens
tcaaattctcagcaa

SEQ ID NO: 1893712 - DNA, 15 bp, Homo sapiens
caaattctcagcaag

SEQ ID NO: 1893713 - DNA, 15 bp, Homo sapiens
aaattctcagcaaga

SEQ ID NO: 1893714 - DNA, 15 bp, Homo sapiens
aattctcagcaagac

SEQ ID NO: 1893715 - DNA, 15 bp, Homo sapiens
attctcagcaagact

SEQ ID NO: 1893716 - DNA, 15 bp, Homo sapiens
ttctcagcaagactt

SEQ ID NO: 1893717 - DNA, 15 bp, Homo sapiens
tctcagcaagacttt

SEQ ID NO: 1893718 - DNA, 15 bp, Homo sapiens
ctcagcaagactttc

SEQ ID NO: 1893719 - DNA, 15 bp, Homo sapiens
tcagcaagactttct

SEQ ID NO: 1893720 - DNA, 15 bp, Homo sapiens
cagcaagactttctc

SEQ ID NO: 1893721 - DNA, 15 bp, Homo sapiens
agcaagactttctct

SEQ ID NO: 1893722 - DNA, 15 bp, Homo sapiens
gcaagactttctctg

SEQ ID NO: 1893723 - DNA, 15 bp, Homo sapiens
caagactttctctga

SEQ ID NO: 1893724 - DNA, 15 bp, Homo sapiens
aagactttctctgac

SEQ ID NO: 1893725 - DNA, 15 bp, Homo sapiens
agactttctctgacc

SEQ ID NO: 1893726 - DNA, 15 bp, Homo sapiens
gactttctctgacca

SEQ ID NO: 1893727 - DNA, 15 bp, Homo sapiens
actttctctgaccat

SEQ ID NO: 1893728 - DNA, 15 bp, Homo sapiens
ctttctctgaccata

SEQ ID NO: 1893729 - DNA, 15 bp, Homo sapiens
tttctctgaccataa

SEQ ID NO: 1893730 - DNA, 15 bp, Homo sapiens
ttctctgaccataaa

SEQ ID NO: 1893731 - DNA, 15 bp, Homo sapiens
tctctgaccataaaa

SEQ ID NO: 1893732 - DNA, 15 bp, Homo sapiens
ctctgaccataaaat

SEQ ID NO: 1893733 - DNA, 15 bp, Homo sapiens
tctgaccataaaatt

SEQ ID NO: 1893734 - DNA, 15 bp, Homo sapiens
ctgaccataaaatta

SEQ ID NO: 1893735 - DNA, 15 bp, Homo sapiens
tgaccataaaattat

SEQ ID NO: 1893736 - DNA, 15 bp, Homo sapiens
gaccataaaattata

SEQ ID NO: 1893737 - DNA, 15 bp, Homo sapiens
accataaaattataa

SEQ ID NO: 1893738 - DNA, 15 bp, Homo sapiens
ccataaaattataat

SEQ ID NO: 1893739 - DNA, 15 bp, Homo sapiens
cataaaattataatt

SEQ ID NO: 1893740 - DNA, 15 bp, Homo sapiens
ataaaattataattg

SEQ ID NO: 1893741 - DNA, 15 bp, Homo sapiens
taaaattataattgc

SEQ ID NO: 1893742 - DNA, 15 bp, Homo sapiens
aaaattataattgca

SEQ ID NO: 1893743 - DNA, 15 bp, Homo sapiens
aaattataattgcag

SEQ ID NO: 1893744 - DNA, 15 bp, Homo sapiens
aattataattgcagc

SEQ ID NO: 1893745 - DNA, 15 bp, Homo sapiens
attataattgcagct

SEQ ID NO: 1893746 - DNA, 15 bp, Homo sapiens
ttataattgcagctc

SEQ ID NO: 1893747 - DNA, 15 bp, Homo sapiens
tataattgcagctcc

SEQ ID NO: 1893748 - DNA, 15 bp, Homo sapiens
ataattgcagctcct

SEQ ID NO: 1893749 - DNA, 15 bp, Homo sapiens
taattgcagctcctg

SEQ ID NO: 1893750 - DNA, 15 bp, Homo sapiens
aattgcagctcctgc

SEQ ID NO: 1893751 - DNA, 15 bp, Homo sapiens
attgcagctcctgca

SEQ ID NO: 1893752 - DNA, 15 bp, Homo sapiens
ttgcagctcctgcac

SEQ ID NO: 1893753 - DNA, 15 bp, Homo sapiens
tgcagctcctgcact

SEQ ID NO: 1893754 - DNA, 15 bp, Homo sapiens
gcagctcctgcactt

SEQ ID NO: 1893755 - DNA, 15 bp, Homo sapiens
cagctcctgcacttc

SEQ ID NO: 1893756 - DNA, 15 bp, Homo sapiens
agctcctgcacttcc

SEQ ID NO: 1893757 - DNA, 15 bp, Homo sapiens
gctcctgcacttcct

SEQ ID NO: 1893758 - DNA, 15 bp, Homo sapiens
ctcctgcacttccta

SEQ ID NO: 1893759 - DNA, 15 bp, Homo sapiens
tcctgcacttcctat

SEQ ID NO: 1893760 - DNA, 15 bp, Homo sapiens
cctgcacttcctatt

SEQ ID NO: 1893761 - DNA, 15 bp, Homo sapiens
ctgcacttcctatta

SEQ ID NO: 1893762 - DNA, 15 bp, Homo sapiens
tgcacttcctattat

SEQ ID NO: 1893763 - DNA, 15 bp, Homo sapiens
gcacttcctattatg

SEQ ID NO: 1893764 - DNA, 15 bp, Homo sapiens
cacttcctattatgt

SEQ ID NO: 1893765 - DNA, 15 bp, Homo sapiens
acttcctattatgtc

SEQ ID NO: 1893766 - DNA, 15 bp, Homo sapiens
cttcctattatgtcc

SEQ ID NO: 1893767 - DNA, 15 bp, Homo sapiens
ttcctattatgtcct

SEQ ID NO: 1893768 - DNA, 15 bp, Homo sapiens
tcctattatgtcctc

SEQ ID NO: 1893769 - DNA, 15 bp, Homo sapiens
cctattatgtcctct

SEQ ID NO: 1893770 - DNA, 15 bp, Homo sapiens
ctattatgtcctctg

SEQ ID NO: 1893771 - DNA, 15 bp, Homo sapiens
tattatgtcctctgc

SEQ ID NO: 1893772 - DNA, 15 bp, Homo sapiens
attatgtcctctgct

SEQ ID NO: 1893773 - DNA, 15 bp, Homo sapiens
ttatgtcctctgcta

SEQ ID NO: 1893774 - DNA, 15 bp, Homo sapiens
tatgtcctctgctaa

SEQ ID NO: 1893775 - DNA, 15 bp, Homo sapiens
atgtcctctgctaat

SEQ ID NO: 1893776 - DNA, 15 bp, Homo sapiens
tgtcctctgctaatt

SEQ ID NO: 1893777 - DNA, 15 bp, Homo sapiens
gtcctctgctaattg

SEQ ID NO: 1893778 - DNA, 15 bp, Homo sapiens
tcctctgctaattgt

SEQ ID NO: 1893779 - DNA, 15 bp, Homo sapiens
cctctgctaattgtt

SEQ ID NO: 1893780 - DNA, 15 bp, Homo sapiens
ctctgctaattgtta

SEQ ID NO: 1893781 - DNA, 15 bp, Homo sapiens
tctgctaattgttaa

SEQ ID NO: 1893782 - DNA, 15 bp, Homo sapiens
ctgctaattgttaaa

SEQ ID NO: 1893783 - DNA, 15 bp, Homo sapiens
tgctaattgttaaaa

SEQ ID NO: 1893784 - DNA, 15 bp, Homo sapiens
gctaattgttaaaat

SEQ ID NO: 1893785 - DNA, 15 bp, Homo sapiens
ctaattgttaaaata

SEQ ID NO: 1893786 - DNA, 15 bp, Homo sapiens
taattgttaaaatag

SEQ ID NO: 1893787 - DNA, 15 bp, Homo sapiens
aattgttaaaataga

SEQ ID NO: 1893788 - DNA, 15 bp, Homo sapiens
attgttaaaatagac

SEQ ID NO: 1893789 - DNA, 15 bp, Homo sapiens
ttgttaaaatagacg

SEQ ID NO: 1893790 - DNA, 15 bp, Homo sapiens
tgttaaaatagacgg

SEQ ID NO: 1893791 - DNA, 15 bp, Homo sapiens
gttaaaatagacggc

SEQ ID NO: 1893792 - DNA, 15 bp, Homo sapiens
ttaaaatagacggca

SEQ ID NO: 1893793 - DNA, 15 bp, Homo sapiens
taaaatagacggcaa

SEQ ID NO: 1893794 - DNA, 15 bp, Homo sapiens
aaaatagacggcaag

SEQ ID NO: 1893795 - DNA, 15 bp, Homo sapiens
aaatagacggcaagc

SEQ ID NO: 1893796 - DNA, 15 bp, Homo sapiens
aatagacggcaagct

SEQ ID NO: 1893797 - DNA, 15 bp, Homo sapiens
atagacggcaagctt

SEQ ID NO: 1893798 - DNA, 15 bp, Homo sapiens
tagacggcaagcttc

SEQ ID NO: 1893799 - DNA, 15 bp, Homo sapiens
agacggcaagcttca

SEQ ID NO: 1893800 - DNA, 15 bp, Homo sapiens
gacggcaagcttcac

SEQ ID NO: 1893801 - DNA, 15 bp, Homo sapiens
acggcaagcttcaca

SEQ ID NO: 1893802 - DNA, 15 bp, Homo sapiens
cggcaagcttcacaa

SEQ ID NO: 1893803 - DNA, 15 bp, Homo sapiens
ggcaagcttcacaag

SEQ ID NO: 1893804 - DNA, 15 bp, Homo sapiens
gcaagcttcacaagg

SEQ ID NO: 1893805 - DNA, 15 bp, Homo sapiens
caagcttcacaagga

SEQ ID NO: 1893806 - DNA, 15 bp, Homo sapiens
aagcttcacaaggac

SEQ ID NO: 1893807 - DNA, 15 bp, Homo sapiens
agcttcacaaggaca

SEQ ID NO: 1893808 - DNA, 15 bp, Homo sapiens
gcttcacaaggacag

SEQ ID NO: 1893809 - DNA, 15 bp, Homo sapiens
cttcacaaggacaga

SEQ ID NO: 1893810 - DNA, 15 bp, Homo sapiens
ttcacaaggacagaa

SEQ ID NO: 1893811 - DNA, 15 bp, Homo sapiens
tcacaaggacagaaa

SEQ ID NO: 1893812 - DNA, 15 bp, Homo sapiens
cacaaggacagaaat

SEQ ID NO: 1893813 - DNA, 15 bp, Homo sapiens
acaaggacagaaata

SEQ ID NO: 1893814 - DNA, 15 bp, Homo sapiens
caaggacagaaatag

SEQ ID NO: 1893815 - DNA, 15 bp, Homo sapiens
aaggacagaaatagt

SEQ ID NO: 1893816 - DNA, 15 bp, Homo sapiens
aggacagaaatagtc

SEQ ID NO: 1893817 - DNA, 15 bp, Homo sapiens
ggacagaaatagtct

SEQ ID NO: 1893818 - DNA, 15 bp, Homo sapiens
gacagaaatagtctt

SEQ ID NO: 1893819 - DNA, 15 bp, Homo sapiens
acagaaatagtctta

SEQ ID NO: 1893820 - DNA, 15 bp, Homo sapiens
cagaaatagtcttat

SEQ ID NO: 1893821 - DNA, 15 bp, Homo sapiens
agaaatagtcttatt

SEQ ID NO: 1893822 - DNA, 15 bp, Homo sapiens
gaaatagtcttattg

SEQ ID NO: 1893823 - DNA, 15 bp, Homo sapiens
aaatagtcttattgc

SEQ ID NO: 1893824 - DNA, 15 bp, Homo sapiens
aatagtcttattgct

SEQ ID NO: 1893825 - DNA, 15 bp, Homo sapiens
atagtcttattgctt

SEQ ID NO: 1893826 - DNA, 15 bp, Homo sapiens
tagtcttattgcttt

SEQ ID NO: 1893827 - DNA, 15 bp, Homo sapiens
agtcttattgctttt

SEQ ID NO: 1893828 - DNA, 15 bp, Homo sapiens
gtcttattgctttta

SEQ ID NO: 1893829 - DNA, 15 bp, Homo sapiens
tcttattgcttttaa

SEQ ID NO: 1893830 - DNA, 15 bp, Homo sapiens
cttattgcttttaat

SEQ ID NO: 1893831 - DNA, 15 bp, Homo sapiens
ttattgcttttaatc

SEQ ID NO: 1893832 - DNA, 15 bp, Homo sapiens
tattgcttttaatcc

SEQ ID NO: 1893833 - DNA, 15 bp, Homo sapiens
attgcttttaatcct

SEQ ID NO: 1893834 - DNA, 15 bp, Homo sapiens
ttgcttttaatcctc

SEQ ID NO: 1893835 - DNA, 15 bp, Homo sapiens
tgcttttaatcctca

SEQ ID NO: 1893836 - DNA, 15 bp, Homo sapiens
gcttttaatcctcag

SEQ ID NO: 1893837 - DNA, 15 bp, Homo sapiens
cttttaatcctcagc

SEQ ID NO: 1893838 - DNA, 15 bp, Homo sapiens
ttttaatcctcagca

SEQ ID NO: 1893839 - DNA, 15 bp, Homo sapiens
tttaatcctcagcac

SEQ ID NO: 1893840 - DNA, 15 bp, Homo sapiens
ttaatcctcagcacc

SEQ ID NO: 1893841 - DNA, 15 bp, Homo sapiens
taatcctcagcacca

SEQ ID NO: 1893842 - DNA, 15 bp, Homo sapiens
aatcctcagcaccat

SEQ ID NO: 1893843 - DNA, 15 bp, Homo sapiens
atcctcagcaccata

SEQ ID NO: 1893844 - DNA, 15 bp, Homo sapiens
tcctcagcaccatat

SEQ ID NO: 1893845 - DNA, 15 bp, Homo sapiens
cctcagcaccatatc

SEQ ID NO: 1893846 - DNA, 15 bp, Homo sapiens
ctcagcaccatatcc

SEQ ID NO: 1893847 - DNA, 15 bp, Homo sapiens
tcagcaccatatcca

SEQ ID NO: 1893848 - DNA, 15 bp, Homo sapiens
cagcaccatatccag

SEQ ID NO: 1893849 - DNA, 15 bp, Homo sapiens
agcaccatatccagc

SEQ ID NO: 1893850 - DNA, 15 bp, Homo sapiens
gcaccatatccagca

SEQ ID NO: 1893851 - DNA, 15 bp, Homo sapiens
caccatatccagcac

SEQ ID NO: 1893852 - DNA, 15 bp, Homo sapiens
accatatccagcaca

SEQ ID NO: 1893853 - DNA, 15 bp, Homo sapiens
ccatatccagcacat

SEQ ID NO: 1893854 - DNA, 15 bp, Homo sapiens
catatccagcacatg

SEQ ID NO: 1893855 - DNA, 15 bp, Homo sapiens
atatccagcacatgg

SEQ ID NO: 1893856 - DNA, 15 bp, Homo sapiens
tatccagcacatggt

SEQ ID NO: 1893857 - DNA, 15 bp, Homo sapiens
atccagcacatggta

SEQ ID NO: 1893858 - DNA, 15 bp, Homo sapiens
tccagcacatggtag

SEQ ID NO: 1893859 - DNA, 15 bp, Homo sapiens
ccagcacatggtagg

SEQ ID NO: 1893860 - DNA, 15 bp, Homo sapiens
cagcacatggtaggg

SEQ ID NO: 1893861 - DNA, 15 bp, Homo sapiens
agcacatggtaggga

SEQ ID NO: 1893862 - DNA, 15 bp, Homo sapiens
gcacatggtagggat

SEQ ID NO: 1893863 - DNA, 15 bp, Homo sapiens
cacatggtagggatt

SEQ ID NO: 1893864 - DNA, 15 bp, Homo sapiens
acatggtagggattc

SEQ ID NO: 1893865 - DNA, 15 bp, Homo sapiens
catggtagggattca

SEQ ID NO: 1893866 - DNA, 15 bp, Homo sapiens
atggtagggattcag

SEQ ID NO: 1893867 - DNA, 15 bp, Homo sapiens
tggtagggattcagt

SEQ ID NO: 1893868 - DNA, 15 bp, Homo sapiens
ggtagggattcagta

SEQ ID NO: 1893869 - DNA, 15 bp, Homo sapiens
gtagggattcagtaa

SEQ ID NO: 1893870 - DNA, 15 bp, Homo sapiens
tagggattcagtaaa

SEQ ID NO: 1893871 - DNA, 15 bp, Homo sapiens
agggattcagtaaat

SEQ ID NO: 1893872 - DNA, 15 bp, Homo sapiens
gggattcagtaaatg

SEQ ID NO: 1893873 - DNA, 15 bp, Homo sapiens
ggattcagtaaatgt

SEQ ID NO: 1893874 - DNA, 15 bp, Homo sapiens
gattcagtaaatgtc

SEQ ID NO: 1893875 - DNA, 15 bp, Homo sapiens
attcagtaaatgtct

SEQ ID NO: 1893876 - DNA, 15 bp, Homo sapiens
ttcagtaaatgtctg

SEQ ID NO: 1893877 - DNA, 15 bp, Homo sapiens
tcagtaaatgtctgt

SEQ ID NO: 1893878 - DNA, 15 bp, Homo sapiens
cagtaaatgtctgta

SEQ ID NO: 1893879 - DNA, 15 bp, Homo sapiens
agtaaatgtctgtaa

SEQ ID NO: 1893880 - DNA, 15 bp, Homo sapiens
gtaaatgtctgtaaa

SEQ ID NO: 1893881 - DNA, 15 bp, Homo sapiens
taaatgtctgtaaat

SEQ ID NO: 1893882 - DNA, 15 bp, Homo sapiens
aaatgtctgtaaatg

SEQ ID NO: 1893883 - DNA, 15 bp, Homo sapiens
aatgtctgtaaatgt

SEQ ID NO: 1893884 - DNA, 15 bp, Homo sapiens
atgtctgtaaatgtt

SEQ ID NO: 1893885 - DNA, 15 bp, Homo sapiens
tgtctgtaaatgttg

SEQ ID NO: 1893886 - DNA, 15 bp, Homo sapiens
gtctgtaaatgttga

SEQ ID NO: 1893887 - DNA, 15 bp, Homo sapiens
tctgtaaatgttgaa

SEQ ID NO: 1893888 - DNA, 15 bp, Homo sapiens
ctgtaaatgttgaat

SEQ ID NO: 1893889 - DNA, 15 bp, Homo sapiens
tgtaaatgttgaatg

SEQ ID NO: 1893890 - DNA, 15 bp, Homo sapiens
gtaaatgttgaatga

SEQ ID NO: 1893891 - DNA, 15 bp, Homo sapiens
taaatgttgaatgaa

SEQ ID NO: 1893892 - DNA, 15 bp, Homo sapiens
aaatgttgaatgaaa

SEQ ID NO: 1893893 - DNA, 15 bp, Homo sapiens
aatgttgaatgaaag

SEQ ID NO: 1893894 - DNA, 15 bp, Homo sapiens
atgttgaatgaaaga

SEQ ID NO: 1893895 - DNA, 15 bp, Homo sapiens
tgttgaatgaaagat

SEQ ID NO: 1893896 - DNA, 15 bp, Homo sapiens
gttgaatgaaagata

SEQ ID NO: 1893897 - DNA, 15 bp, Homo sapiens
ttgaatgaaagataa

SEQ ID NO: 1893898 - DNA, 15 bp, Homo sapiens
tgaatgaaagataat

SEQ ID NO: 1893899 - DNA, 15 bp, Homo sapiens
gaatgaaagataata

SEQ ID NO: 1893900 - DNA, 15 bp, Homo sapiens
aatgaaagataatat

SEQ ID NO: 1893901 - DNA, 15 bp, Homo sapiens
atgaaagataatata

SEQ ID NO: 1893902 - DNA, 15 bp, Homo sapiens
tgaaagataatatag

SEQ ID NO: 1893903 - DNA, 15 bp, Homo sapiens
gaaagataatatagt

SEQ ID NO: 1893904 - DNA, 15 bp, Homo sapiens
aaagataatatagtt

SEQ ID NO: 1893905 - DNA, 15 bp, Homo sapiens
aagataatatagttt

SEQ ID NO: 1893906 - DNA, 15 bp, Homo sapiens
agataatatagtttt

SEQ ID NO: 1893907 - DNA, 15 bp, Homo sapiens
gataatatagtttta

SEQ ID NO: 1893908 - DNA, 15 bp, Homo sapiens
ataatatagttttaa

SEQ ID NO: 1893909 - DNA, 15 bp, Homo sapiens
taatatagttttaaa

SEQ ID NO: 1893910 - DNA, 15 bp, Homo sapiens
aatatagttttaaaa

SEQ ID NO: 1893911 - DNA, 15 bp, Homo sapiens
atatagttttaaaat

SEQ ID NO: 1893912 - DNA, 15 bp, Homo sapiens
tatagttttaaaata

SEQ ID NO: 1893913 - DNA, 15 bp, Homo sapiens
atagttttaaaatat

SEQ ID NO: 1893914 - DNA, 15 bp, Homo sapiens
tagttttaaaatata

SEQ ID NO: 1893915 - DNA, 15 bp, Homo sapiens
agttttaaaatataa

SEQ ID NO: 1893916 - DNA, 15 bp, Homo sapiens
gttttaaaatataat

SEQ ID NO: 1893917 - DNA, 15 bp, Homo sapiens
ttttaaaatataatt

SEQ ID NO: 1893918 - DNA, 15 bp, Homo sapiens
tttaaaatataattt

SEQ ID NO: 1893919 - DNA, 15 bp, Homo sapiens
ttaaaatataatttt

SEQ ID NO: 1893920 - DNA, 15 bp, Homo sapiens
taaaatataattttg

SEQ ID NO: 1893921 - DNA, 15 bp, Homo sapiens
aaaatataattttga

SEQ ID NO: 1893922 - DNA, 15 bp, Homo sapiens
aaatataattttgat

SEQ ID NO: 1893923 - DNA, 15 bp, Homo sapiens
aatataattttgatt

SEQ ID NO: 1893924 - DNA, 15 bp, Homo sapiens
atataattttgattc

SEQ ID NO: 1893925 - DNA, 15 bp, Homo sapiens
tataattttgattca

SEQ ID NO: 1893926 - DNA, 15 bp, Homo sapiens
ataattttgattcat

SEQ ID NO: 1893927 - DNA, 15 bp, Homo sapiens
taattttgattcatt

SEQ ID NO: 1893928 - DNA, 15 bp, Homo sapiens
aattttgattcattt

SEQ ID NO: 1893929 - DNA, 15 bp, Homo sapiens
attttgattcatttt

SEQ ID NO: 1893930 - DNA, 15 bp, Homo sapiens
ttttgattcattttt

SEQ ID NO: 1893931 - DNA, 15 bp, Homo sapiens
tttgattcattttta

SEQ ID NO: 1893932 - DNA, 15 bp, Homo sapiens
ttgattcatttttaa

SEQ ID NO: 1893933 - DNA, 15 bp, Homo sapiens
tgattcatttttaat

SEQ ID NO: 1893934 - DNA, 15 bp, Homo sapiens
gattcatttttaatt

SEQ ID NO: 1893935 - DNA, 15 bp, Homo sapiens
attcatttttaattc

SEQ ID NO: 1893936 - DNA, 15 bp, Homo sapiens
ttcatttttaattca

SEQ ID NO: 1893937 - DNA, 15 bp, Homo sapiens
tcatttttaattcaa

SEQ ID NO: 1893938 - DNA, 15 bp, Homo sapiens
catttttaattcaac

SEQ ID NO: 1893939 - DNA, 15 bp, Homo sapiens
atttttaattcaacc

SEQ ID NO: 1893940 - DNA, 15 bp, Homo sapiens
tttttaattcaacct

SEQ ID NO: 1893941 - DNA, 15 bp, Homo sapiens
ttttaattcaacctt

SEQ ID NO: 1893942 - DNA, 15 bp, Homo sapiens
tttaattcaaccttt

SEQ ID NO: 1893943 - DNA, 15 bp, Homo sapiens
ttaattcaacctttg

SEQ ID NO: 1893944 - DNA, 15 bp, Homo sapiens
taattcaacctttgt

SEQ ID NO: 1893945 - DNA, 15 bp, Homo sapiens
aattcaacctttgtc

SEQ ID NO: 1893946 - DNA, 15 bp, Homo sapiens
attcaacctttgtca

SEQ ID NO: 1893947 - DNA, 15 bp, Homo sapiens
ttcaacctttgtcat

SEQ ID NO: 1893948 - DNA, 15 bp, Homo sapiens
tcaacctttgtcatg

SEQ ID NO: 1893949 - DNA, 15 bp, Homo sapiens
caacctttgtcatgt

SEQ ID NO: 1893950 - DNA, 15 bp, Homo sapiens
aacctttgtcatgtc

SEQ ID NO: 1893951 - DNA, 15 bp, Homo sapiens
acctttgtcatgtcc

SEQ ID NO: 1893952 - DNA, 15 bp, Homo sapiens
cctttgtcatgtcct

SEQ ID NO: 1893953 - DNA, 15 bp, Homo sapiens
ctttgtcatgtccta

SEQ ID NO: 1893954 - DNA, 15 bp, Homo sapiens
tttgtcatgtcctat

SEQ ID NO: 1893955 - DNA, 15 bp, Homo sapiens
ttgtcatgtcctatt

SEQ ID NO: 1893956 - DNA, 15 bp, Homo sapiens
tgtcatgtcctatta

SEQ ID NO: 1893957 - DNA, 15 bp, Homo sapiens
gtcatgtcctattat

SEQ ID NO: 1893958 - DNA, 15 bp, Homo sapiens
tcatgtcctattata

SEQ ID NO: 1893959 - DNA, 15 bp, Homo sapiens
catgtcctattatac

SEQ ID NO: 1893960 - DNA, 15 bp, Homo sapiens
atgtcctattataca

SEQ ID NO: 1893961 - DNA, 15 bp, Homo sapiens
tgtcctattatacaa

SEQ ID NO: 1893962 - DNA, 15 bp, Homo sapiens
gtcctattatacaag

SEQ ID NO: 1893963 - DNA, 15 bp, Homo sapiens
tcctattatacaagc

SEQ ID NO: 1893964 - DNA, 15 bp, Homo sapiens
cctattatacaagct

SEQ ID NO: 1893965 - DNA, 15 bp, Homo sapiens
ctattatacaagcta

SEQ ID NO: 1893966 - DNA, 15 bp, Homo sapiens
tattatacaagctat

SEQ ID NO: 1893967 - DNA, 15 bp, Homo sapiens
attatacaagctatt

SEQ ID NO: 1893968 - DNA, 15 bp, Homo sapiens
ttatacaagctattc

SEQ ID NO: 1893969 - DNA, 15 bp, Homo sapiens
tatacaagctattca

SEQ ID NO: 1893970 - DNA, 15 bp, Homo sapiens
atacaagctattcag

SEQ ID NO: 1893971 - DNA, 15 bp, Homo sapiens
tacaagctattcagt

SEQ ID NO: 1893972 - DNA, 15 bp, Homo sapiens
acaagctattcagta

SEQ ID NO: 1893973 - DNA, 15 bp, Homo sapiens
caagctattcagtat

SEQ ID NO: 1893974 - DNA, 15 bp, Homo sapiens
aagctattcagtatt

SEQ ID NO: 1893975 - DNA, 15 bp, Homo sapiens
agctattcagtattt

SEQ ID NO: 1893976 - DNA, 15 bp, Homo sapiens
gctattcagtattta

SEQ ID NO: 1893977 - DNA, 15 bp, Homo sapiens
ctattcagtatttaa

SEQ ID NO: 1893978 - DNA, 15 bp, Homo sapiens
tattcagtatttaaa

SEQ ID NO: 1893979 - DNA, 15 bp, Homo sapiens
ttcagtatttaaaag

SEQ ID NO: 1893980 - DNA, 15 bp, Homo sapiens
tcagtatttaaaagc

SEQ ID NO: 1893981 - DNA, 15 bp, Homo sapiens
cagtatttaaaagcc

SEQ ID NO: 1893982 - DNA, 15 bp, Homo sapiens
agtatttaaaagcct

SEQ ID NO: 1893983 - DNA, 15 bp, Homo sapiens
gtatttaaaagccta

SEQ ID NO: 1893984 - DNA, 15 bp, Homo sapiens
tatttaaaagcctaa

SEQ ID NO: 1893985 - DNA, 15 bp, Homo sapiens
atttaaaagcctaac

SEQ ID NO: 1893986 - DNA, 15 bp, Homo sapiens
tttaaaagcctaaca

SEQ ID NO: 1893987 - DNA, 15 bp, Homo sapiens
ttaaaagcctaacaa

SEQ ID NO: 1893988 - DNA, 15 bp, Homo sapiens
cctaacaagcctctt

SEQ ID NO: 1893989 - DNA, 15 bp, Homo sapiens
ctaacaagcctctta

SEQ ID NO: 1893990 - DNA, 15 bp, Homo sapiens
taacaagcctcttaa

SEQ ID NO: 1893991 - DNA, 15 bp, Homo sapiens
aacaagcctcttaat

SEQ ID NO: 1893992 - DNA, 15 bp, Homo sapiens
acaagcctcttaata

SEQ ID NO: 1893993 - DNA, 15 bp, Homo sapiens
caagcctcttaataa

SEQ ID NO: 1893994 - DNA, 15 bp, Homo sapiens
aagcctcttaataag

SEQ ID NO: 1893995 - DNA, 15 bp, Homo sapiens
agcctcttaataagc

SEQ ID NO: 1893996 - DNA, 15 bp, Homo sapiens
gcctcttaataagca

SEQ ID NO: 1893997 - DNA, 15 bp, Homo sapiens
cctcttaataagcat

SEQ ID NO: 1893998 - DNA, 15 bp, Homo sapiens
ctcttaataagcatt

SEQ ID NO: 1893999 - DNA, 15 bp, Homo sapiens
tcttaataagcattt

SEQ ID NO: 1894000 - DNA, 15 bp, Homo sapiens
cttaataagcatttg

SEQ ID NO: 1894001 - DNA, 15 bp, Homo sapiens
ttaataagcatttgt

SEQ ID NO: 1894002 - DNA, 15 bp, Homo sapiens
taataagcatttgtg

SEQ ID NO: 1894003 - DNA, 15 bp, Homo sapiens
aataagcatttgtga

SEQ ID NO: 1894004 - DNA, 15 bp, Homo sapiens
ataagcatttgtgaa

SEQ ID NO: 1894005 - DNA, 15 bp, Homo sapiens
taagcatttgtgaaa

SEQ ID NO: 1894006 - DNA, 15 bp, Homo sapiens
aagcatttgtgaaaa

SEQ ID NO: 1894007 - DNA, 15 bp, Homo sapiens
agcatttgtgaaaag

SEQ ID NO: 1894008 - DNA, 15 bp, Homo sapiens
gcatttgtgaaaagc

SEQ ID NO: 1894009 - DNA, 15 bp, Homo sapiens
catttgtgaaaagcc

SEQ ID NO: 1894010 - DNA, 15 bp, Homo sapiens
atttgtgaaaagcct

SEQ ID NO: 1894011 - DNA, 15 bp, Homo sapiens
tttgtgaaaagcctg

SEQ ID NO: 1894012 - DNA, 15 bp, Homo sapiens
ttgtgaaaagcctgg

SEQ ID NO: 1894013 - DNA, 15 bp, Homo sapiens
tgtgaaaagcctggt

SEQ ID NO: 1894014 - DNA, 15 bp, Homo sapiens
gtgaaaagcctggtg

SEQ ID NO: 1894015 - DNA, 15 bp, Homo sapiens
tgaaaagcctggtgt

SEQ ID NO: 1894016 - DNA, 15 bp, Homo sapiens
gaaaagcctggtgta

SEQ ID NO: 1894017 - DNA, 15 bp, Homo sapiens
aaaagcctggtgtat

SEQ ID NO: 1894018 - DNA, 15 bp, Homo sapiens
aaagcctggtgtatt

SEQ ID NO: 1894019 - DNA, 15 bp, Homo sapiens
aagcctggtgtattt

SEQ ID NO: 1894020 - DNA, 15 bp, Homo sapiens
agcctggtgtattta

SEQ ID NO: 1894021 - DNA, 15 bp, Homo sapiens
gcctggtgtatttaa

SEQ ID NO: 1894022 - DNA, 15 bp, Homo sapiens
cctggtgtatttaaa

SEQ ID NO: 1894023 - DNA, 15 bp, Homo sapiens
ctggtgtatttaaat

SEQ ID NO: 1894024 - DNA, 15 bp, Homo sapiens
tggtgtatttaaatt

SEQ ID NO: 1894025 - DNA, 15 bp, Homo sapiens
ggtgtatttaaatta

SEQ ID NO: 1894026 - DNA, 15 bp, Homo sapiens
gtgtatttaaattac

SEQ ID NO: 1894027 - DNA, 15 bp, Homo sapiens
tgtatttaaattact

SEQ ID NO: 1894028 - DNA, 15 bp, Homo sapiens
gtatttaaattactg

SEQ ID NO: 1894029 - DNA, 15 bp, Homo sapiens
tatttaaattactga

SEQ ID NO: 1894030 - DNA, 15 bp, Homo sapiens
atttaaattactgaa

SEQ ID NO: 1894031 - DNA, 15 bp, Homo sapiens
tttaaattactgaat

SEQ ID NO: 1894032 - DNA, 15 bp, Homo sapiens
ttaaattactgaata

SEQ ID NO: 1894033 - DNA, 15 bp, Homo sapiens
taaattactgaatag

SEQ ID NO: 1894034 - DNA, 15 bp, Homo sapiens
aaattactgaatagt

SEQ ID NO: 1894035 - DNA, 15 bp, Homo sapiens
aattactgaatagta

SEQ ID NO: 1894036 - DNA, 15 bp, Homo sapiens
attactgaatagtaa

SEQ ID NO: 1894037 - DNA, 15 bp, Homo sapiens
ttactgaatagtaaa

SEQ ID NO: 1894038 - DNA, 15 bp, Homo sapiens
tactgaatagtaaac

SEQ ID NO: 1894039 - DNA, 15 bp, Homo sapiens
actgaatagtaaaca

SEQ ID NO: 1894040 - DNA, 15 bp, Homo sapiens
ctgaatagtaaacat

SEQ ID NO: 1894041 - DNA, 15 bp, Homo sapiens
tgaatagtaaacatc

SEQ ID NO: 1894042 - DNA, 15 bp, Homo sapiens
gaatagtaaacatca

SEQ ID NO: 1894043 - DNA, 15 bp, Homo sapiens
aatagtaaacatcag

SEQ ID NO: 1894044 - DNA, 15 bp, Homo sapiens
atagtaaacatcagc

SEQ ID NO: 1894045 - DNA, 15 bp, Homo sapiens
tagtaaacatcagcc

SEQ ID NO: 1894046 - DNA, 15 bp, Homo sapiens
agtaaacatcagcca

SEQ ID NO: 1894047 - DNA, 15 bp, Homo sapiens
gtaaacatcagccaa

SEQ ID NO: 1894048 - DNA, 15 bp, Homo sapiens
taaacatcagccaag

SEQ ID NO: 1894049 - DNA, 15 bp, Homo sapiens
aaacatcagccaaga

SEQ ID NO: 1894050 - DNA, 15 bp, Homo sapiens
aacatcagccaagac

SEQ ID NO: 1894051 - DNA, 15 bp, Homo sapiens
acatcagccaagact

SEQ ID NO: 1894052 - DNA, 15 bp, Homo sapiens
catcagccaagactt

SEQ ID NO: 1894053 - DNA, 15 bp, Homo sapiens
atcagccaagacttg

SEQ ID NO: 1894054 - DNA, 15 bp, Homo sapiens
tcagccaagacttgc

SEQ ID NO: 1894055 - DNA, 15 bp, Homo sapiens
cagccaagacttgca

SEQ ID NO: 1894056 - DNA, 15 bp, Homo sapiens
agccaagacttgcag

SEQ ID NO: 1894057 - DNA, 15 bp, Homo sapiens
gccaagacttgcaga

SEQ ID NO: 1894058 - DNA, 15 bp, Homo sapiens
ccaagacttgcagaa

SEQ ID NO: 1894059 - DNA, 15 bp, Homo sapiens
caagacttgcagaac

SEQ ID NO: 1894060 - DNA, 15 bp, Homo sapiens
aagacttgcagaact

SEQ ID NO: 1894061 - DNA, 15 bp, Homo sapiens
agacttgcagaactt

SEQ ID NO: 1894062 - DNA, 15 bp, Homo sapiens
gacttgcagaacttg

SEQ ID NO: 1894063 - DNA, 15 bp, Homo sapiens
acttgcagaacttga

SEQ ID NO: 1894064 - DNA, 15 bp, Homo sapiens
cttgcagaacttgat

SEQ ID NO: 1894065 - DNA, 15 bp, Homo sapiens
ttgcagaacttgatg

SEQ ID NO: 1894066 - DNA, 15 bp, Homo sapiens
tgcagaacttgatga

SEQ ID NO: 1894067 - DNA, 15 bp, Homo sapiens
gcagaacttgatgag

SEQ ID NO: 1894068 - DNA, 15 bp, Homo sapiens
cagaacttgatgagg

SEQ ID NO: 1894069 - DNA, 15 bp, Homo sapiens
agaacttgatgaggt

SEQ ID NO: 1894070 - DNA, 15 bp, Homo sapiens
gaacttgatgaggtt

SEQ ID NO: 1894071 - DNA, 15 bp, Homo sapiens
aacttgatgaggttt

SEQ ID NO: 1894072 - DNA, 15 bp, Homo sapiens
acttgatgaggtttg

SEQ ID NO: 1894073 - DNA, 15 bp, Homo sapiens
tgatgaggtttgaaa

SEQ ID NO: 1894074 - DNA, 15 bp, Homo sapiens
gatgaggtttgaaac

SEQ ID NO: 1894075 - DNA, 15 bp, Homo sapiens
atgaggtttgaaaca

SEQ ID NO: 1894076 - DNA, 15 bp, Homo sapiens
tgaggtttgaaacaa

SEQ ID NO: 1894077 - DNA, 15 bp, Homo sapiens
gaggtttgaaacaaa

SEQ ID NO: 1894078 - DNA, 15 bp, Homo sapiens
aggtttgaaacaaag

SEQ ID NO: 1894079 - DNA, 15 bp, Homo sapiens
ggtttgaaacaaagg

SEQ ID NO: 1894080 - DNA, 15 bp, Homo sapiens
gtttgaaacaaagga

SEQ ID NO: 1894081 - DNA, 15 bp, Homo sapiens
tttgaaacaaaggat

SEQ ID NO: 1894082 - DNA, 15 bp, Homo sapiens
ttgaaacaaaggatc

SEQ ID NO: 1894083 - DNA, 15 bp, Homo sapiens
tgaaacaaaggatct

SEQ ID NO: 1894084 - DNA, 15 bp, Homo sapiens
gaaacaaaggatctt

SEQ ID NO: 1894085 - DNA, 15 bp, Homo sapiens
aaacaaaggatctta

SEQ ID NO: 1894086 - DNA, 15 bp, Homo sapiens
aacaaaggatcttat

SEQ ID NO: 1894087 - DNA, 15 bp, Homo sapiens
acaaaggatcttatt

SEQ ID NO: 1894088 - DNA, 15 bp, Homo sapiens
caaaggatcttattc

SEQ ID NO: 1894089 - DNA, 15 bp, Homo sapiens
aaaggatcttattcc

SEQ ID NO: 1894090 - DNA, 15 bp, Homo sapiens
aaggatcttattcct

SEQ ID NO: 1894091 - DNA, 15 bp, Homo sapiens
aggatcttattcctc

SEQ ID NO: 1894092 - DNA, 15 bp, Homo sapiens
ggatcttattcctct

SEQ ID NO: 1894093 - DNA, 15 bp, Homo sapiens
gatcttattcctcta

SEQ ID NO: 1894094 - DNA, 15 bp, Homo sapiens
atcttattcctctaa

SEQ ID NO: 1894095 - DNA, 15 bp, Homo sapiens
tcttattcctctaac

SEQ ID NO: 1894096 - DNA, 15 bp, Homo sapiens
cttattcctctaact

SEQ ID NO: 1894097 - DNA, 15 bp, Homo sapiens
ttattcctctaactt

SEQ ID NO: 1894098 - DNA, 15 bp, Homo sapiens
tattcctctaacttg

SEQ ID NO: 1894099 - DNA, 15 bp, Homo sapiens
attcctctaacttgc

SEQ ID NO: 1894100 - DNA, 15 bp, Homo sapiens
ttcctctaacttgca

SEQ ID NO: 1894101 - DNA, 15 bp, Homo sapiens
tcctctaacttgcat

SEQ ID NO: 1894102 - DNA, 15 bp, Homo sapiens
cctctaacttgcatc

SEQ ID NO: 1894103 - DNA, 15 bp, Homo sapiens
ctctaacttgcatca

SEQ ID NO: 1894104 - DNA, 15 bp, Homo sapiens
tctaacttgcatcaa

SEQ ID NO: 1894105 - DNA, 15 bp, Homo sapiens
ctaacttgcatcaag

SEQ ID NO: 1894106 - DNA, 15 bp, Homo sapiens
taacttgcatcaagc

SEQ ID NO: 1894107 - DNA, 15 bp, Homo sapiens
aacttgcatcaagct

SEQ ID NO: 1894108 - DNA, 15 bp, Homo sapiens
acttgcatcaagcta

SEQ ID NO: 1894109 - DNA, 15 bp, Homo sapiens
cttgcatcaagctaa

SEQ ID NO: 1894110 - DNA, 15 bp, Homo sapiens
ttgcatcaagctaag

SEQ ID NO: 1894111 - DNA, 15 bp, Homo sapiens
tgcatcaagctaagt

SEQ ID NO: 1894112 - DNA, 15 bp, Homo sapiens
gcatcaagctaagta

SEQ ID NO: 1894113 - DNA, 15 bp, Homo sapiens
catcaagctaagtac

SEQ ID NO: 1894114 - DNA, 15 bp, Homo sapiens
atcaagctaagtacc

SEQ ID NO: 1894115 - DNA, 15 bp, Homo sapiens
tcaagctaagtacca

SEQ ID NO: 1894116 - DNA, 15 bp, Homo sapiens
caagctaagtaccag

SEQ ID NO: 1894117 - DNA, 15 bp, Homo sapiens
aagctaagtaccagt

SEQ ID NO: 1894118 - DNA, 15 bp, Homo sapiens
agctaagtaccagtt

SEQ ID NO: 1894119 - DNA, 15 bp, Homo sapiens
gctaagtaccagtta

SEQ ID NO: 1894120 - DNA, 15 bp, Homo sapiens
ctaagtaccagttac

SEQ ID NO: 1894121 - DNA, 15 bp, Homo sapiens
taagtaccagttacc

SEQ ID NO: 1894122 - DNA, 15 bp, Homo sapiens
aagtaccagttaccg

SEQ ID NO: 1894123 - DNA, 15 bp, Homo sapiens
agtaccagttaccgt

SEQ ID NO: 1894124 - DNA, 15 bp, Homo sapiens
gtaccagttaccgtg

SEQ ID NO: 1894125 - DNA, 15 bp, Homo sapiens
taccagttaccgtgt

SEQ ID NO: 1894126 - DNA, 15 bp, Homo sapiens
accagttaccgtgtt

SEQ ID NO: 1894127 - DNA, 15 bp, Homo sapiens
ccagttaccgtgttt

SEQ ID NO: 1894128 - DNA, 15 bp, Homo sapiens
cagttaccgtgtttc

SEQ ID NO: 1894129 - DNA, 15 bp, Homo sapiens
agttaccgtgtttct

SEQ ID NO: 1894130 - DNA, 15 bp, Homo sapiens
gttaccgtgtttctg

SEQ ID NO: 1894131 - DNA, 15 bp, Homo sapiens
ttaccgtgtttctga

SEQ ID NO: 1894132 - DNA, 15 bp, Homo sapiens
taccgtgtttctgag

SEQ ID NO: 1894133 - DNA, 15 bp, Homo sapiens
accgtgtttctgagg

SEQ ID NO: 1894134 - DNA, 15 bp, Homo sapiens
ccgtgtttctgaggg

SEQ ID NO: 1894135 - DNA, 15 bp, Homo sapiens
cgtgtttctgagggc

SEQ ID NO: 1894136 - DNA, 15 bp, Homo sapiens
gtgtttctgagggca

SEQ ID NO: 1894137 - DNA, 15 bp, Homo sapiens
tgtttctgagggcat

SEQ ID NO: 1894138 - DNA, 15 bp, Homo sapiens
gtttctgagggcatt

SEQ ID NO: 1894139 - DNA, 15 bp, Homo sapiens
tttctgagggcattt

SEQ ID NO: 1894140 - DNA, 15 bp, Homo sapiens
ttctgagggcatttc

SEQ ID NO: 1894141 - DNA, 15 bp, Homo sapiens
tctgagggcatttca

SEQ ID NO: 1894142 - DNA, 15 bp, Homo sapiens
ctgagggcatttcaa

SEQ ID NO: 1894143 - DNA, 15 bp, Homo sapiens
tgagggcatttcaag

SEQ ID NO: 1894144 - DNA, 15 bp, Homo sapiens
gagggcatttcaaga

SEQ ID NO: 1894145 - DNA, 15 bp, Homo sapiens
agggcatttcaagag

SEQ ID NO: 1894146 - DNA, 15 bp, Homo sapiens
gggcatttcaagaga

SEQ ID NO: 1894147 - DNA, 15 bp, Homo sapiens
ggcatttcaagagag

SEQ ID NO: 1894148 - DNA, 15 bp, Homo sapiens
gcatttcaagagagt

SEQ ID NO: 1894149 - DNA, 15 bp, Homo sapiens
catttcaagagagtg

SEQ ID NO: 1894150 - DNA, 15 bp, Homo sapiens
atttcaagagagtga

SEQ ID NO: 1894151 - DNA, 15 bp, Homo sapiens
tttcaagagagtgag

SEQ ID NO: 1894152 - DNA, 15 bp, Homo sapiens
ttcaagagagtgagg

SEQ ID NO: 1894153 - DNA, 15 bp, Homo sapiens
tcaagagagtgaggt

SEQ ID NO: 1894154 - DNA, 15 bp, Homo sapiens
caagagagtgaggtg

SEQ ID NO: 1894155 - DNA, 15 bp, Homo sapiens
aagagagtgaggtga

SEQ ID NO: 1894156 - DNA, 15 bp, Homo sapiens
agagagtgaggtgat

SEQ ID NO: 1894157 - DNA, 15 bp, Homo sapiens
gagagtgaggtgatg

SEQ ID NO: 1894158 - DNA, 15 bp, Homo sapiens
agagtgaggtgatgt

SEQ ID NO: 1894159 - DNA, 15 bp, Homo sapiens
gagtgaggtgatgtt

SEQ ID NO: 1894160 - DNA, 15 bp, Homo sapiens
agtgaggtgatgttc

SEQ ID NO: 1894161 - DNA, 15 bp, Homo sapiens
gtgaggtgatgttca

SEQ ID NO: 1894162 - DNA, 15 bp, Homo sapiens
tgaggtgatgttcag

SEQ ID NO: 1894163 - DNA, 15 bp, Homo sapiens
gaggtgatgttcagt

SEQ ID NO: 1894164 - DNA, 15 bp, Homo sapiens
aggtgatgttcagtt

SEQ ID NO: 1894165 - DNA, 15 bp, Homo sapiens
ggtgatgttcagttt

SEQ ID NO: 1894166 - DNA, 15 bp, Homo sapiens
gtgatgttcagttta

SEQ ID NO: 1894167 - DNA, 15 bp, Homo sapiens
tgatgttcagtttag

SEQ ID NO: 1894168 - DNA, 15 bp, Homo sapiens
gatgttcagtttaga

SEQ ID NO: 1894169 - DNA, 15 bp, Homo sapiens
atgttcagtttagag

SEQ ID NO: 1894170 - DNA, 15 bp, Homo sapiens
tgttcagtttagagg

SEQ ID NO: 1894171 - DNA, 15 bp, Homo sapiens
gttcagtttagaggg

SEQ ID NO: 1894172 - DNA, 15 bp, Homo sapiens
ttcagtttagaggga

SEQ ID NO: 1894173 - DNA, 15 bp, Homo sapiens
tcagtttagagggat

SEQ ID NO: 1894174 - DNA, 15 bp, Homo sapiens
cagtttagagggatg

SEQ ID NO: 1894175 - DNA, 15 bp, Homo sapiens
agtttagagggatga

SEQ ID NO: 1894176 - DNA, 15 bp, Homo sapiens
gtttagagggatgaa

SEQ ID NO: 1894177 - DNA, 15 bp, Homo sapiens
tttagagggatgaac

SEQ ID NO: 1894178 - DNA, 15 bp, Homo sapiens
ttagagggatgaact

SEQ ID NO: 1894179 - DNA, 15 bp, Homo sapiens
tagagggatgaactg

SEQ ID NO: 1894180 - DNA, 15 bp, Homo sapiens
agagggatgaactgc

SEQ ID NO: 1894181 - DNA, 15 bp, Homo sapiens
gagggatgaactgcc

SEQ ID NO: 1894182 - DNA, 15 bp, Homo sapiens
agggatgaactgcca

SEQ ID NO: 1894183 - DNA, 15 bp, Homo sapiens
gggatgaactgccag

SEQ ID NO: 1894184 - DNA, 15 bp, Homo sapiens
ggatgaactgccagc

SEQ ID NO: 1894185 - DNA, 15 bp, Homo sapiens
gatgaactgccagct

SEQ ID NO: 1894186 - DNA, 15 bp, Homo sapiens
atgaactgccagctt

SEQ ID NO: 1894187 - DNA, 15 bp, Homo sapiens
tgaactgccagcttt

SEQ ID NO: 1894188 - DNA, 15 bp, Homo sapiens
gaactgccagctttc

SEQ ID NO: 1894189 - DNA, 15 bp, Homo sapiens
aactgccagctttcc

SEQ ID NO: 1894190 - DNA, 15 bp, Homo sapiens
actgccagctttccc

SEQ ID NO: 1894191 - DNA, 15 bp, Homo sapiens
ctgccagctttcccg

SEQ ID NO: 1894192 - DNA, 15 bp, Homo sapiens
tgccagctttcccgc

SEQ ID NO: 1894193 - DNA, 15 bp, Homo sapiens
gccagctttcccgca

SEQ ID NO: 1894194 - DNA, 15 bp, Homo sapiens
ccagctttcccgcag

SEQ ID NO: 1894195 - DNA, 15 bp, Homo sapiens
cagctttcccgcagg

SEQ ID NO: 1894196 - DNA, 15 bp, Homo sapiens
agctttcccgcaggg

SEQ ID NO: 1894197 - DNA, 15 bp, Homo sapiens
gctttcccgcagggc

SEQ ID NO: 1894198 - DNA, 15 bp, Homo sapiens
ctttcccgcagggct

SEQ ID NO: 1894199 - DNA, 15 bp, Homo sapiens
tttcccgcagggctg

SEQ ID NO: 1894200 - DNA, 15 bp, Homo sapiens
ttcccgcagggctgg

SEQ ID NO: 1894201 - DNA, 15 bp, Homo sapiens
tcccgcagggctgga

SEQ ID NO: 1894202 - DNA, 15 bp, Homo sapiens
cccgcagggctggat

SEQ ID NO: 1894203 - DNA, 15 bp, Homo sapiens
ccgcagggctggatt

SEQ ID NO: 1894204 - DNA, 15 bp, Homo sapiens
cgcagggctggattt

SEQ ID NO: 1894205 - DNA, 15 bp, Homo sapiens
gcagggctggatttc

SEQ ID NO: 1894206 - DNA, 15 bp, Homo sapiens
cagggctggatttct

SEQ ID NO: 1894207 - DNA, 15 bp, Homo sapiens
agggctggatttctg

SEQ ID NO: 1894208 - DNA, 15 bp, Homo sapiens
gggctggatttctgt

SEQ ID NO: 1894209 - DNA, 15 bp, Homo sapiens
ggctggatttctgtt

SEQ ID NO: 1894210 - DNA, 15 bp, Homo sapiens
gctggatttctgtta

SEQ ID NO: 1894211 - DNA, 15 bp, Homo sapiens
ctggatttctgttag

SEQ ID NO: 1894212 - DNA, 15 bp, Homo sapiens
tggatttctgttagt

SEQ ID NO: 1894213 - DNA, 15 bp, Homo sapiens
ggatttctgttagtg

SEQ ID NO: 1894214 - DNA, 15 bp, Homo sapiens
gatttctgttagtgt

SEQ ID NO: 1894215 - DNA, 15 bp, Homo sapiens
atttctgttagtgtc

SEQ ID NO: 1894216 - DNA, 15 bp, Homo sapiens
tttctgttagtgtca

SEQ ID NO: 1894217 - DNA, 15 bp, Homo sapiens
ttctgttagtgtcag

SEQ ID NO: 1894218 - DNA, 15 bp, Homo sapiens
tctgttagtgtcaga

SEQ ID NO: 1894219 - DNA, 15 bp, Homo sapiens
ctgttagtgtcagaa

SEQ ID NO: 1894220 - DNA, 15 bp, Homo sapiens
tgttagtgtcagaac

SEQ ID NO: 1894221 - DNA, 15 bp, Homo sapiens
gttagtgtcagaact

SEQ ID NO: 1894222 - DNA, 15 bp, Homo sapiens
ttagtgtcagaactg

SEQ ID NO: 1894223 - DNA, 15 bp, Homo sapiens
tagtgtcagaactgc

SEQ ID NO: 1894224 - DNA, 15 bp, Homo sapiens
agtgtcagaactgct

SEQ ID NO: 1894225 - DNA, 15 bp, Homo sapiens
gtgtcagaactgctg

SEQ ID NO: 1894226 - DNA, 15 bp, Homo sapiens
tgtcagaactgctga

SEQ ID NO: 1894227 - DNA, 15 bp, Homo sapiens
gtcagaactgctgac

SEQ ID NO: 1894228 - DNA, 15 bp, Homo sapiens
tcagaactgctgaca

SEQ ID NO: 1894229 - DNA, 15 bp, Homo sapiens
cagaactgctgacac

SEQ ID NO: 1894230 - DNA, 15 bp, Homo sapiens
agaactgctgacaca

SEQ ID NO: 1894231 - DNA, 15 bp, Homo sapiens
gaactgctgacacac

SEQ ID NO: 1894232 - DNA, 15 bp, Homo sapiens
aactgctgacacacc

SEQ ID NO: 1894233 - DNA, 15 bp, Homo sapiens
actgctgacacacct

SEQ ID NO: 1894234 - DNA, 15 bp, Homo sapiens
ctgctgacacacctg

SEQ ID NO: 1894235 - DNA, 15 bp, Homo sapiens
tgctgacacacctgc

SEQ ID NO: 1894236 - DNA, 15 bp, Homo sapiens
gctgacacacctgct

SEQ ID NO: 1894237 - DNA, 15 bp, Homo sapiens
ctgacacacctgctc

SEQ ID NO: 1894238 - DNA, 15 bp, Homo sapiens
tgacacacctgctcg

SEQ ID NO: 1894239 - DNA, 15 bp, Homo sapiens
gacacacctgctcgg

SEQ ID NO: 1894240 - DNA, 15 bp, Homo sapiens
acacacctgctcggg

SEQ ID NO: 1894241 - DNA, 15 bp, Homo sapiens
cacacctgctcgggg

SEQ ID NO: 1894242 - DNA, 15 bp, Homo sapiens
acacctgctcggggt

SEQ ID NO: 1894243 - DNA, 15 bp, Homo sapiens
cacctgctcggggtg

SEQ ID NO: 1894244 - DNA, 15 bp, Homo sapiens
acctgctcggggtgg

SEQ ID NO: 1894245 - DNA, 15 bp, Homo sapiens
cctgctcggggtgga

SEQ ID NO: 1894246 - DNA, 15 bp, Homo sapiens
ctgctcggggtggac

SEQ ID NO: 1894247 - DNA, 15 bp, Homo sapiens
tgctcggggtggact

SEQ ID NO: 1894248 - DNA, 15 bp, Homo sapiens
gctcggggtggactc

SEQ ID NO: 1894249 - DNA, 15 bp, Homo sapiens
ctcggggtggactca

SEQ ID NO: 1894250 - DNA, 15 bp, Homo sapiens
tcggggtggactcag

SEQ ID NO: 1894251 - DNA, 15 bp, Homo sapiens
cggggtggactcagg

SEQ ID NO: 1894252 - DNA, 15 bp, Homo sapiens
ggggtggactcaggg

SEQ ID NO: 1894253 - DNA, 15 bp, Homo sapiens
gggtggactcagggc

SEQ ID NO: 1894254 - DNA, 15 bp, Homo sapiens
ggtggactcagggca

SEQ ID NO: 1894255 - DNA, 15 bp, Homo sapiens
gtggactcagggcaa

SEQ ID NO: 1894256 - DNA, 15 bp, Homo sapiens
tggactcagggcaaa

SEQ ID NO: 1894257 - DNA, 15 bp, Homo sapiens
ggactcagggcaaaa

SEQ ID NO: 1894258 - DNA, 15 bp, Homo sapiens
gactcagggcaaaac

SEQ ID NO: 1894259 - DNA, 15 bp, Homo sapiens
actcagggcaaaacc

SEQ ID NO: 1894260 - DNA, 15 bp, Homo sapiens
ctcagggcaaaacct

SEQ ID NO: 1894261 - DNA, 15 bp, Homo sapiens
tcagggcaaaacctg

SEQ ID NO: 1894262 - DNA, 15 bp, Homo sapiens
cagggcaaaacctga

SEQ ID NO: 1894263 - DNA, 15 bp, Homo sapiens
agggcaaaacctgat

SEQ ID NO: 1894264 - DNA, 15 bp, Homo sapiens
gggcaaaacctgatc

SEQ ID NO: 1894265 - DNA, 15 bp, Homo sapiens
ggcaaaacctgatca

SEQ ID NO: 1894266 - DNA, 15 bp, Homo sapiens
gcaaaacctgatcaa

SEQ ID NO: 1894267 - DNA, 15 bp, Homo sapiens
caaaacctgatcaag

SEQ ID NO: 1894268 - DNA, 15 bp, Homo sapiens
aaaacctgatcaagg

SEQ ID NO: 1894269 - DNA, 15 bp, Homo sapiens
aaacctgatcaaggg

SEQ ID NO: 1894270 - DNA, 15 bp, Homo sapiens
aacctgatcaagggc

SEQ ID NO: 1894271 - DNA, 15 bp, Homo sapiens
acctgatcaagggca

SEQ ID NO: 1894272 - DNA, 15 bp, Homo sapiens
cctgatcaagggcaa

SEQ ID NO: 1894273 - DNA, 15 bp, Homo sapiens
ctgatcaagggcaag

SEQ ID NO: 1894274 - DNA, 15 bp, Homo sapiens
tgatcaagggcaagc

SEQ ID NO: 1894275 - DNA, 15 bp, Homo sapiens
gatcaagggcaagcc

SEQ ID NO: 1894276 - DNA, 15 bp, Homo sapiens
atcaagggcaagcct

SEQ ID NO: 1894277 - DNA, 15 bp, Homo sapiens
tcaagggcaagcctg

SEQ ID NO: 1894278 - DNA, 15 bp, Homo sapiens
caagggcaagcctgg

SEQ ID NO: 1894279 - DNA, 15 bp, Homo sapiens
aagggcaagcctggg

SEQ ID NO: 1894280 - DNA, 15 bp, Homo sapiens
agggcaagcctgggt

SEQ ID NO: 1894281 - DNA, 15 bp, Homo sapiens
gggcaagcctgggta

SEQ ID NO: 1894282 - DNA, 15 bp, Homo sapiens
ggcaagcctgggtaa

SEQ ID NO: 1894283 - DNA, 15 bp, Homo sapiens
gcaagcctgggtaag

SEQ ID NO: 1894284 - DNA, 15 bp, Homo sapiens
caagcctgggtaagt

SEQ ID NO: 1894285 - DNA, 15 bp, Homo sapiens
aagcctgggtaagta

SEQ ID NO: 1894286 - DNA, 15 bp, Homo sapiens
agcctgggtaagtaa

SEQ ID NO: 1894287 - DNA, 15 bp, Homo sapiens
gcctgggtaagtaaa

SEQ ID NO: 1894288 - DNA, 15 bp, Homo sapiens
cctgggtaagtaaag

SEQ ID NO: 1894289 - DNA, 15 bp, Homo sapiens
ctgggtaagtaaaga

SEQ ID NO: 1894290 - DNA, 15 bp, Homo sapiens
tgggtaagtaaagag

SEQ ID NO: 1894291 - DNA, 15 bp, Homo sapiens
gggtaagtaaagagt

SEQ ID NO: 1894292 - DNA, 15 bp, Homo sapiens
ggtaagtaaagagtg

SEQ ID NO: 1894293 - DNA, 15 bp, Homo sapiens
gtaagtaaagagtgc

SEQ ID NO: 1894294 - DNA, 15 bp, Homo sapiens
taagtaaagagtgca

SEQ ID NO: 1894295 - DNA, 15 bp, Homo sapiens
aagtaaagagtgcaa

SEQ ID NO: 1894296 - DNA, 15 bp, Homo sapiens
agtaaagagtgcaag

SEQ ID NO: 1894297 - DNA, 15 bp, Homo sapiens
gtaaagagtgcaagt

SEQ ID NO: 1894298 - DNA, 15 bp, Homo sapiens
taaagagtgcaagtt

SEQ ID NO: 1894299 - DNA, 15 bp, Homo sapiens
aaagagtgcaagtta

SEQ ID NO: 1894300 - DNA, 15 bp, Homo sapiens
aagagtgcaagttag

SEQ ID NO: 1894301 - DNA, 15 bp, Homo sapiens
agagtgcaagttagc

SEQ ID NO: 1894302 - DNA, 15 bp, Homo sapiens
gagtgcaagttagca

SEQ ID NO: 1894303 - DNA, 15 bp, Homo sapiens
agtgcaagttagcat

SEQ ID NO: 1894304 - DNA, 15 bp, Homo sapiens
gtgcaagttagcatc

SEQ ID NO: 1894305 - DNA, 15 bp, Homo sapiens
tgcaagttagcatct

SEQ ID NO: 1894306 - DNA, 15 bp, Homo sapiens
gcaagttagcatctg

SEQ ID NO: 1894307 - DNA, 15 bp, Homo sapiens
caagttagcatctga

SEQ ID NO: 1894308 - DNA, 15 bp, Homo sapiens
aagttagcatctgac

SEQ ID NO: 1894309 - DNA, 15 bp, Homo sapiens
agttagcatctgacc

SEQ ID NO: 1894310 - DNA, 15 bp, Homo sapiens
gttagcatctgacca

SEQ ID NO: 1894311 - DNA, 15 bp, Homo sapiens
ttagcatctgaccac

SEQ ID NO: 1894312 - DNA, 15 bp, Homo sapiens
tagcatctgaccact

SEQ ID NO: 1894313 - DNA, 15 bp, Homo sapiens
agcatctgaccactt

SEQ ID NO: 1894314 - DNA, 15 bp, Homo sapiens
gcatctgaccacttt

SEQ ID NO: 1894315 - DNA, 15 bp, Homo sapiens
catctgaccactttt

SEQ ID NO: 1894316 - DNA, 15 bp, Homo sapiens
atctgaccacttttt

SEQ ID NO: 1894317 - DNA, 15 bp, Homo sapiens
tctgaccactttttc

SEQ ID NO: 1894318 - DNA, 15 bp, Homo sapiens
ctgaccactttttcc

SEQ ID NO: 1894319 - DNA, 15 bp, Homo sapiens
tgaccactttttcct

SEQ ID NO: 1894320 - DNA, 15 bp, Homo sapiens
gaccactttttcctt

SEQ ID NO: 1894321 - DNA, 15 bp, Homo sapiens
accactttttcctta

SEQ ID NO: 1894322 - DNA, 15 bp, Homo sapiens
ccactttttccttag

SEQ ID NO: 1894323 - DNA, 15 bp, Homo sapiens
cactttttccttaga

SEQ ID NO: 1894324 - DNA, 15 bp, Homo sapiens
actttttccttagac

SEQ ID NO: 1894325 - DNA, 15 bp, Homo sapiens
ctttttccttagaca

SEQ ID NO: 1894326 - DNA, 15 bp, Homo sapiens
tttttccttagacat

SEQ ID NO: 1894327 - DNA, 15 bp, Homo sapiens
ttttccttagacatt

SEQ ID NO: 1894328 - DNA, 15 bp, Homo sapiens
tttccttagacatta

SEQ ID NO: 1894329 - DNA, 15 bp, Homo sapiens
ttccttagacattaa

SEQ ID NO: 1894330 - DNA, 15 bp, Homo sapiens
tccttagacattaaa

SEQ ID NO: 1894331 - DNA, 15 bp, Homo sapiens
ccttagacattaaaa

SEQ ID NO: 1894332 - DNA, 15 bp, Homo sapiens
cttagacattaaaaa

SEQ ID NO: 1894333 - DNA, 15 bp, Homo sapiens
ttagacattaaaaaa

SEQ ID NO: 1894334 - DNA, 15 bp, Homo sapiens
tagacattaaaaaaa

SEQ ID NO: 1894335 - DNA, 15 bp, Homo sapiens
agacattaaaaaaaa

SEQ ID NO: 1894336 - DNA, 15 bp, Homo sapiens
gacattaaaaaaaaa

SEQ ID NO: 1894337 - DNA, 15 bp, Homo sapiens
acattaaaaaaaaag

SEQ ID NO: 1894338 - DNA, 15 bp, Homo sapiens
cattaaaaaaaaagt

SEQ ID NO: 1894339 - DNA, 15 bp, Homo sapiens
attaaaaaaaaagtt

SEQ ID NO: 1894340 - DNA, 15 bp, Homo sapiens
ttaaaaaaaaagttt

SEQ ID NO: 1894341 - DNA, 15 bp, Homo sapiens
taaaaaaaaagtttt

SEQ ID NO: 1894342 - DNA, 15 bp, Homo sapiens
aaaaaaaaagttttc

SEQ ID NO: 1894343 - DNA, 15 bp, Homo sapiens
aaaaaaaagttttct

SEQ ID NO: 1894344 - DNA, 15 bp, Homo sapiens
aaaaaaagttttctt

SEQ ID NO: 1894345 - DNA, 15 bp, Homo sapiens
aaaaaagttttcttc

SEQ ID NO: 1894346 - DNA, 15 bp, Homo sapiens
aaaaagttttcttca

SEQ ID NO: 1894347 - DNA, 15 bp, Homo sapiens
aaaagttttcttcaa

SEQ ID NO: 1894348 - DNA, 15 bp, Homo sapiens
aaagttttcttcaat

SEQ ID NO: 1894349 - DNA, 15 bp, Homo sapiens
aagttttcttcaata

SEQ ID NO: 1894350 - DNA, 15 bp, Homo sapiens
agttttcttcaataa

SEQ ID NO: 1894351 - DNA, 15 bp, Homo sapiens
gttttcttcaataaa

SEQ ID NO: 1894352 - DNA, 15 bp, Homo sapiens
ttttcttcaataaat

SEQ ID NO: 1894353 - DNA, 15 bp, Homo sapiens
tttcttcaataaata

SEQ ID NO: 1894354 - DNA, 15 bp, Homo sapiens
ttcttcaataaatat

SEQ ID NO: 1894355 - DNA, 15 bp, Homo sapiens
tcttcaataaatatg

SEQ ID NO: 1894356 - DNA, 15 bp, Homo sapiens
cttcaataaatatga

SEQ ID NO: 1894357 - DNA, 15 bp, Homo sapiens
ttcaataaatatgaa

SEQ ID NO: 1894358 - DNA, 15 bp, Homo sapiens
tcaataaatatgaaa

SEQ ID NO: 1894359 - DNA, 15 bp, Homo sapiens
caataaatatgaaaa

SEQ ID NO: 1894360 - DNA, 15 bp, Homo sapiens
aataaatatgaaaaa

SEQ ID NO: 1894361 - DNA, 15 bp, Homo sapiens
ataaatatgaaaaat

SEQ ID NO: 1894362 - DNA, 15 bp, Homo sapiens
taaatatgaaaaatc

SEQ ID NO: 1894363 - DNA, 15 bp, Homo sapiens
aaatatgaaaaatct

SEQ ID NO: 1894364 - DNA, 15 bp, Homo sapiens
aatatgaaaaatctt

SEQ ID NO: 1894365 - DNA, 15 bp, Homo sapiens
atatgaaaaatcttt

SEQ ID NO: 1894366 - DNA, 15 bp, Homo sapiens
tatgaaaaatctttg

SEQ ID NO: 1894367 - DNA, 15 bp, Homo sapiens
atgaaaaatctttga

SEQ ID NO: 1894368 - DNA, 15 bp, Homo sapiens
tgaaaaatctttgat

SEQ ID NO: 1894369 - DNA, 15 bp, Homo sapiens
gaaaaatctttgatc

SEQ ID NO: 1894370 - DNA, 15 bp, Homo sapiens
aaaaatctttgatca

SEQ ID NO: 1894371 - DNA, 15 bp, Homo sapiens
aaaatctttgatcaa

SEQ ID NO: 1894372 - DNA, 15 bp, Homo sapiens
aaatctttgatcaat

SEQ ID NO: 1894373 - DNA, 15 bp, Homo sapiens
aatctttgatcaatg

SEQ ID NO: 1894374 - DNA, 15 bp, Homo sapiens
atctttgatcaatgt

SEQ ID NO: 1894375 - DNA, 15 bp, Homo sapiens
tctttgatcaatgtt

SEQ ID NO: 1894376 - DNA, 15 bp, Homo sapiens
ctttgatcaatgttc

SEQ ID NO: 1894377 - DNA, 15 bp, Homo sapiens
tttgatcaatgttca

SEQ ID NO: 1894378 - DNA, 15 bp, Homo sapiens
ttgatcaatgttcac

SEQ ID NO: 1894379 - DNA, 15 bp, Homo sapiens
tgatcaatgttcaca

SEQ ID NO: 1894380 - DNA, 15 bp, Homo sapiens
gatcaatgttcacat

SEQ ID NO: 1894381 - DNA, 15 bp, Homo sapiens
atcaatgttcacatg

SEQ ID NO: 1894382 - DNA, 15 bp, Homo sapiens
tcaatgttcacatgt

SEQ ID NO: 1894383 - DNA, 15 bp, Homo sapiens
caatgttcacatgtt

SEQ ID NO: 1894384 - DNA, 15 bp, Homo sapiens
aatgttcacatgttt

SEQ ID NO: 1894385 - DNA, 15 bp, Homo sapiens
atgttcacatgtttt

SEQ ID NO: 1894386 - DNA, 15 bp, Homo sapiens
tgttcacatgttttc

SEQ ID NO: 1894387 - DNA, 15 bp, Homo sapiens
gttcacatgttttct

SEQ ID NO: 1894388 - DNA, 15 bp, Homo sapiens
ttcacatgttttctt

SEQ ID NO: 1894389 - DNA, 15 bp, Homo sapiens
tcacatgttttcttg

SEQ ID NO: 1894390 - DNA, 15 bp, Homo sapiens
cacatgttttcttgg

SEQ ID NO: 1894391 - DNA, 15 bp, Homo sapiens
acatgttttcttgga

SEQ ID NO: 1894392 - DNA, 15 bp, Homo sapiens
catgttttcttggaa

SEQ ID NO: 1894393 - DNA, 15 bp, Homo sapiens
atgttttcttggaaa

SEQ ID NO: 1894394 - DNA, 15 bp, Homo sapiens
tgttttcttggaaat

SEQ ID NO: 1894395 - DNA, 15 bp, Homo sapiens
gttttcttggaaatg

SEQ ID NO: 1894396 - DNA, 15 bp, Homo sapiens
ttttcttggaaatgc

SEQ ID NO: 1894397 - DNA, 15 bp, Homo sapiens
tttcttggaaatgca

SEQ ID NO: 1894398 - DNA, 15 bp, Homo sapiens
ttcttggaaatgcac

SEQ ID NO: 1894399 - DNA, 15 bp, Homo sapiens
tcttggaaatgcaca

SEQ ID NO: 1894400 - DNA, 15 bp, Homo sapiens
cttggaaatgcacat

SEQ ID NO: 1894401 - DNA, 15 bp, Homo sapiens
ttggaaatgcacatc

SEQ ID NO: 1894402 - DNA, 15 bp, Homo sapiens
tggaaatgcacatct

SEQ ID NO: 1894403 - DNA, 15 bp, Homo sapiens
ggaaatgcacatcta

SEQ ID NO: 1894404 - DNA, 15 bp, Homo sapiens
gaaatgcacatctaa

SEQ ID NO: 1894405 - DNA, 15 bp, Homo sapiens
aaatgcacatctaaa

SEQ ID NO: 1894406 - DNA, 15 bp, Homo sapiens
aatgcacatctaaaa

SEQ ID NO: 1894407 - DNA, 15 bp, Homo sapiens
atgcacatctaaaag

SEQ ID NO: 1894408 - DNA, 15 bp, Homo sapiens
tgcacatctaaaagt

SEQ ID NO: 1894409 - DNA, 15 bp, Homo sapiens
gcacatctaaaagtg

SEQ ID NO: 1894410 - DNA, 15 bp, Homo sapiens
cacatctaaaagtgg

SEQ ID NO: 1894411 - DNA, 15 bp, Homo sapiens
acatctaaaagtgga

SEQ ID NO: 1894412 - DNA, 15 bp, Homo sapiens
catctaaaagtggaa

SEQ ID NO: 1894413 - DNA, 15 bp, Homo sapiens
atctaaaagtggaac

SEQ ID NO: 1894414 - DNA, 15 bp, Homo sapiens
tctaaaagtggaact

SEQ ID NO: 1894415 - DNA, 15 bp, Homo sapiens
ctaaaagtggaacta

SEQ ID NO: 1894416 - DNA, 15 bp, Homo sapiens
taaaagtggaactat

SEQ ID NO: 1894417 - DNA, 15 bp, Homo sapiens
aaaagtggaactatc

SEQ ID NO: 1894418 - DNA, 15 bp, Homo sapiens
aaagtggaactatct

SEQ ID NO: 1894419 - DNA, 15 bp, Homo sapiens
aagtggaactatctg

SEQ ID NO: 1894420 - DNA, 15 bp, Homo sapiens
agtggaactatctgc

SEQ ID NO: 1894421 - DNA, 15 bp, Homo sapiens
gtggaactatctgct

SEQ ID NO: 1894422 - DNA, 15 bp, Homo sapiens
tggaactatctgctc

SEQ ID NO: 1894423 - DNA, 15 bp, Homo sapiens
ggaactatctgctct

SEQ ID NO: 1894424 - DNA, 15 bp, Homo sapiens
gaactatctgctctt

SEQ ID NO: 1894425 - DNA, 15 bp, Homo sapiens
aactatctgctcttc

SEQ ID NO: 1894426 - DNA, 15 bp, Homo sapiens
actatctgctcttct

SEQ ID NO: 1894427 - DNA, 15 bp, Homo sapiens
ctatctgctcttctc

SEQ ID NO: 1894428 - DNA, 15 bp, Homo sapiens
tatctgctcttctct

SEQ ID NO: 1894429 - DNA, 15 bp, Homo sapiens
atctgctcttctcta

SEQ ID NO: 1894430 - DNA, 15 bp, Homo sapiens
tctgctcttctctag

SEQ ID NO: 1894431 - DNA, 15 bp, Homo sapiens
ctgctcttctctaga

SEQ ID NO: 1894432 - DNA, 15 bp, Homo sapiens
tgctcttctctagaa

SEQ ID NO: 1894433 - DNA, 15 bp, Homo sapiens
gctcttctctagaaa

SEQ ID NO: 1894434 - DNA, 15 bp, Homo sapiens
ctcttctctagaaac

SEQ ID NO: 1894435 - DNA, 15 bp, Homo sapiens
tcttctctagaaact

SEQ ID NO: 1894436 - DNA, 15 bp, Homo sapiens
cttctctagaaactt

SEQ ID NO: 1894437 - DNA, 15 bp, Homo sapiens
ttctctagaaacttc

SEQ ID NO: 1894438 - DNA, 15 bp, Homo sapiens
ctctagaaacttcta

SEQ ID NO: 1894439 - DNA, 15 bp, Homo sapiens
tctagaaacttctag

SEQ ID NO: 1894440 - DNA, 15 bp, Homo sapiens
ctagaaacttctagg

SEQ ID NO: 1894441 - DNA, 15 bp, Homo sapiens
tagaaacttctaggg

SEQ ID NO: 1894442 - DNA, 15 bp, Homo sapiens
agaaacttctagggg

SEQ ID NO: 1894443 - DNA, 15 bp, Homo sapiens
gaaacttctaggggc

SEQ ID NO: 1894444 - DNA, 15 bp, Homo sapiens
aaacttctaggggca

SEQ ID NO: 1894445 - DNA, 15 bp, Homo sapiens
aacttctaggggcaa

SEQ ID NO: 1894446 - DNA, 15 bp, Homo sapiens
acttctaggggcaag

SEQ ID NO: 1894447 - DNA, 15 bp, Homo sapiens
cttctaggggcaaga

SEQ ID NO: 1894448 - DNA, 15 bp, Homo sapiens
ttctaggggcaagag

SEQ ID NO: 1894449 - DNA, 15 bp, Homo sapiens
tctaggggcaagaga

SEQ ID NO: 1894450 - DNA, 15 bp, Homo sapiens
ctaggggcaagagaa

SEQ ID NO: 1894451 - DNA, 15 bp, Homo sapiens
taggggcaagagaac

SEQ ID NO: 1894452 - DNA, 15 bp, Homo sapiens
aggggcaagagaaca

SEQ ID NO: 1894453 - DNA, 15 bp, Homo sapiens
ggggcaagagaacag

SEQ ID NO: 1894454 - DNA, 15 bp, Homo sapiens
gggcaagagaacaga

SEQ ID NO: 1894455 - DNA, 15 bp, Homo sapiens
ggcaagagaacagaa

SEQ ID NO: 1894456 - DNA, 15 bp, Homo sapiens
gcaagagaacagaat

SEQ ID NO: 1894457 - DNA, 15 bp, Homo sapiens
caagagaacagaata

SEQ ID NO: 1894458 - DNA, 15 bp, Homo sapiens
aagagaacagaatag

SEQ ID NO: 1894459 - DNA, 15 bp, Homo sapiens
agagaacagaatagc

SEQ ID NO: 1894460 - DNA, 15 bp, Homo sapiens
gagaacagaatagcc

SEQ ID NO: 1894461 - DNA, 15 bp, Homo sapiens
agaacagaatagcca

SEQ ID NO: 1894462 - DNA, 15 bp, Homo sapiens
gaacagaatagccat

SEQ ID NO: 1894463 - DNA, 15 bp, Homo sapiens
aacagaatagccata

SEQ ID NO: 1894464 - DNA, 15 bp, Homo sapiens
acagaatagccataa

SEQ ID NO: 1894465 - DNA, 15 bp, Homo sapiens
cagaatagccataat

SEQ ID NO: 1894466 - DNA, 15 bp, Homo sapiens
agaatagccataata

SEQ ID NO: 1894467 - DNA, 15 bp, Homo sapiens
gaatagccataatag

SEQ ID NO: 1894468 - DNA, 15 bp, Homo sapiens
aatagccataataga

SEQ ID NO: 1894469 - DNA, 15 bp, Homo sapiens
atagccataatagag

SEQ ID NO: 1894470 - DNA, 15 bp, Homo sapiens
tagccataatagaga

SEQ ID NO: 1894471 - DNA, 15 bp, Homo sapiens
agccataatagagat

SEQ ID NO: 1894472 - DNA, 15 bp, Homo sapiens
gccataatagagatc

SEQ ID NO: 1894473 - DNA, 15 bp, Homo sapiens
ccataatagagatca

SEQ ID NO: 1894474 - DNA, 15 bp, Homo sapiens
cataatagagatcag

SEQ ID NO: 1894475 - DNA, 15 bp, Homo sapiens
ataatagagatcaga

SEQ ID NO: 1894476 - DNA, 15 bp, Homo sapiens
taatagagatcagag

SEQ ID NO: 1894477 - DNA, 15 bp, Homo sapiens
aatagagatcagagt

SEQ ID NO: 1894478 - DNA, 15 bp, Homo sapiens
atagagatcagagta

SEQ ID NO: 1894479 - DNA, 15 bp, Homo sapiens
tagagatcagagtat

SEQ ID NO: 1894480 - DNA, 15 bp, Homo sapiens
agagatcagagtata

SEQ ID NO: 1894481 - DNA, 15 bp, Homo sapiens
gagatcagagtataa

SEQ ID NO: 1894482 - DNA, 15 bp, Homo sapiens
agatcagagtataaa

SEQ ID NO: 1894483 - DNA, 15 bp, Homo sapiens
gatcagagtataaat

SEQ ID NO: 1894484 - DNA, 15 bp, Homo sapiens
atcagagtataaatt

SEQ ID NO: 1894485 - DNA, 15 bp, Homo sapiens
tcagagtataaatta

SEQ ID NO: 1894486 - DNA, 15 bp, Homo sapiens
cagagtataaattag

SEQ ID NO: 1894487 - DNA, 15 bp, Homo sapiens
agagtataaattaga

SEQ ID NO: 1894488 - DNA, 15 bp, Homo sapiens
gagtataaattagag

SEQ ID NO: 1894489 - DNA, 15 bp, Homo sapiens
agtataaattagagg

SEQ ID NO: 1894490 - DNA, 15 bp, Homo sapiens
gtataaattagaggg

SEQ ID NO: 1894491 - DNA, 15 bp, Homo sapiens
tataaattagagggc

SEQ ID NO: 1894492 - DNA, 15 bp, Homo sapiens
ataaattagagggct

SEQ ID NO: 1894493 - DNA, 15 bp, Homo sapiens
taaattagagggctg

SEQ ID NO: 1894494 - DNA, 15 bp, Homo sapiens
aaattagagggctga

SEQ ID NO: 1894495 - DNA, 15 bp, Homo sapiens
aattagagggctgac

SEQ ID NO: 1894496 - DNA, 15 bp, Homo sapiens
attagagggctgaca

SEQ ID NO: 1894497 - DNA, 15 bp, Homo sapiens
ttagagggctgacag

SEQ ID NO: 1894498 - DNA, 15 bp, Homo sapiens
tagagggctgacagc

SEQ ID NO: 1894499 - DNA, 15 bp, Homo sapiens
agagggctgacagca

SEQ ID NO: 1894500 - DNA, 15 bp, Homo sapiens
gagggctgacagcat

SEQ ID NO: 1894501 - DNA, 15 bp, Homo sapiens
agggctgacagcatc

SEQ ID NO: 1894502 - DNA, 15 bp, Homo sapiens
gggctgacagcatca

SEQ ID NO: 1894503 - DNA, 15 bp, Homo sapiens
ggctgacagcatcat

SEQ ID NO: 1894504 - DNA, 15 bp, Homo sapiens
gctgacagcatcatt

SEQ ID NO: 1894505 - DNA, 15 bp, Homo sapiens
ctgacagcatcatta

SEQ ID NO: 1894506 - DNA, 15 bp, Homo sapiens
tgacagcatcattac

SEQ ID NO: 1894507 - DNA, 15 bp, Homo sapiens
gacagcatcattaca

SEQ ID NO: 1894508 - DNA, 15 bp, Homo sapiens
acagcatcattacaa

SEQ ID NO: 1894509 - DNA, 15 bp, Homo sapiens
cagcatcattacaaa

SEQ ID NO: 1894510 - DNA, 15 bp, Homo sapiens
agcatcattacaaaa

SEQ ID NO: 1894511 - DNA, 15 bp, Homo sapiens
gcatcattacaaaat

SEQ ID NO: 1894512 - DNA, 15 bp, Homo sapiens
catcattacaaaatg

SEQ ID NO: 1894513 - DNA, 15 bp, Homo sapiens
atcattacaaaatga

SEQ ID NO: 1894514 - DNA, 15 bp, Homo sapiens
tcattacaaaatgag

SEQ ID NO: 1894515 - DNA, 15 bp, Homo sapiens
cattacaaaatgagg

SEQ ID NO: 1894516 - DNA, 15 bp, Homo sapiens
attacaaaatgagga

SEQ ID NO: 1894517 - DNA, 15 bp, Homo sapiens
ttacaaaatgaggat

SEQ ID NO: 1894518 - DNA, 15 bp, Homo sapiens
tacaaaatgaggatt

SEQ ID NO: 1894519 - DNA, 15 bp, Homo sapiens
acaaaatgaggattg

SEQ ID NO: 1894520 - DNA, 15 bp, Homo sapiens
caaaatgaggattgg

SEQ ID NO: 1894521 - DNA, 15 bp, Homo sapiens
aaaatgaggattggt

SEQ ID NO: 1894522 - DNA, 15 bp, Homo sapiens
aaatgaggattggta

SEQ ID NO: 1894523 - DNA, 15 bp, Homo sapiens
aatgaggattggtat

SEQ ID NO: 1894524 - DNA, 15 bp, Homo sapiens
atgaggattggtatc

SEQ ID NO: 1894525 - DNA, 15 bp, Homo sapiens
tgaggattggtatct

SEQ ID NO: 1894526 - DNA, 15 bp, Homo sapiens
gaggattggtatcta

SEQ ID NO: 1894527 - DNA, 15 bp, Homo sapiens
aggattggtatctaa

SEQ ID NO: 1894528 - DNA, 15 bp, Homo sapiens
ggattggtatctaaa

SEQ ID NO: 1894529 - DNA, 15 bp, Homo sapiens
gattggtatctaaaa

SEQ ID NO: 1894530 - DNA, 15 bp, Homo sapiens
attggtatctaaaat

SEQ ID NO: 1894531 - DNA, 15 bp, Homo sapiens
ttggtatctaaaatg

SEQ ID NO: 1894532 - DNA, 15 bp, Homo sapiens
tggtatctaaaatgc

SEQ ID NO: 1894533 - DNA, 15 bp, Homo sapiens
ggtatctaaaatgct

SEQ ID NO: 1894534 - DNA, 15 bp, Homo sapiens
gtatctaaaatgcta

SEQ ID NO: 1894535 - DNA, 15 bp, Homo sapiens
tatctaaaatgctag

SEQ ID NO: 1894536 - DNA, 15 bp, Homo sapiens
atctaaaatgctaga

SEQ ID NO: 1894537 - DNA, 15 bp, Homo sapiens
tctaaaatgctagag

SEQ ID NO: 1894538 - DNA, 15 bp, Homo sapiens
ctaaaatgctagagc

SEQ ID NO: 1894539 - DNA, 15 bp, Homo sapiens
taaaatgctagagcc

SEQ ID NO: 1894540 - DNA, 15 bp, Homo sapiens
aaaatgctagagccg

SEQ ID NO: 1894541 - DNA, 15 bp, Homo sapiens
aaatgctagagccgg

SEQ ID NO: 1894542 - DNA, 15 bp, Homo sapiens
aatgctagagccggt

SEQ ID NO: 1894543 - DNA, 15 bp, Homo sapiens
atgctagagccggtg

SEQ ID NO: 1894544 - DNA, 15 bp, Homo sapiens
tgctagagccggtgg

SEQ ID NO: 1894545 - DNA, 15 bp, Homo sapiens
gctagagccggtggc

SEQ ID NO: 1894546 - DNA, 15 bp, Homo sapiens
ctagagccggtggct

SEQ ID NO: 1894547 - DNA, 15 bp, Homo sapiens
tagagccggtggcta

SEQ ID NO: 1894548 - DNA, 15 bp, Homo sapiens
agagccggtggctag

SEQ ID NO: 1894549 - DNA, 15 bp, Homo sapiens
gagccggtggctaga

SEQ ID NO: 1894550 - DNA, 15 bp, Homo sapiens
agccggtggctagag

SEQ ID NO: 1894551 - DNA, 15 bp, Homo sapiens
gccggtggctagagg

SEQ ID NO: 1894552 - DNA, 15 bp, Homo sapiens
ccggtggctagagga

SEQ ID NO: 1894553 - DNA, 15 bp, Homo sapiens
cggtggctagaggag

SEQ ID NO: 1894554 - DNA, 15 bp, Homo sapiens
ggtggctagaggagt

SEQ ID NO: 1894555 - DNA, 15 bp, Homo sapiens
gtggctagaggagtc

SEQ ID NO: 1894556 - DNA, 15 bp, Homo sapiens
tggctagaggagtct

SEQ ID NO: 1894557 - DNA, 15 bp, Homo sapiens
ggctagaggagtctc

SEQ ID NO: 1894558 - DNA, 15 bp, Homo sapiens
gctagaggagtctct

SEQ ID NO: 1894559 - DNA, 15 bp, Homo sapiens
ctagaggagtctctg

SEQ ID NO: 1894560 - DNA, 15 bp, Homo sapiens
tagaggagtctctgg

SEQ ID NO: 1894561 - DNA, 15 bp, Homo sapiens
agaggagtctctggc

SEQ ID NO: 1894562 - DNA, 15 bp, Homo sapiens
gaggagtctctggcc

SEQ ID NO: 1894563 - DNA, 15 bp, Homo sapiens
aggagtctctggcct

SEQ ID NO: 1894564 - DNA, 15 bp, Homo sapiens
ggagtctctggcctc

SEQ ID NO: 1894565 - DNA, 15 bp, Homo sapiens
gagtctctggcctcc

SEQ ID NO: 1894566 - DNA, 15 bp, Homo sapiens
agtctctggcctcct

SEQ ID NO: 1894567 - DNA, 15 bp, Homo sapiens
gtctctggcctcctg

SEQ ID NO: 1894568 - DNA, 15 bp, Homo sapiens
tctctggcctcctgt

SEQ ID NO: 1894569 - DNA, 15 bp, Homo sapiens
ctctggcctcctgtc

SEQ ID NO: 1894570 - DNA, 15 bp, Homo sapiens
tctggcctcctgtca

SEQ ID NO: 1894571 - DNA, 15 bp, Homo sapiens
ctggcctcctgtcag

SEQ ID NO: 1894572 - DNA, 15 bp, Homo sapiens
tggcctcctgtcaga

SEQ ID NO: 1894573 - DNA, 15 bp, Homo sapiens
ggcctcctgtcagac

SEQ ID NO: 1894574 - DNA, 15 bp, Homo sapiens
gcctcctgtcagaca

SEQ ID NO: 1894575 - DNA, 15 bp, Homo sapiens
cctcctgtcagacag

SEQ ID NO: 1894576 - DNA, 15 bp, Homo sapiens
ctcctgtcagacaga

SEQ ID NO: 1894577 - DNA, 15 bp, Homo sapiens
tcctgtcagacagag

SEQ ID NO: 1894578 - DNA, 15 bp, Homo sapiens
cctgtcagacagaga

SEQ ID NO: 1894579 - DNA, 15 bp, Homo sapiens
ctgtcagacagagag

SEQ ID NO: 1894580 - DNA, 15 bp, Homo sapiens
tgtcagacagagaga

SEQ ID NO: 1894581 - DNA, 15 bp, Homo sapiens
gtcagacagagagaa

SEQ ID NO: 1894582 - DNA, 15 bp, Homo sapiens
tcagacagagagaaa

SEQ ID NO: 1894583 - DNA, 15 bp, Homo sapiens
cagacagagagaaac

SEQ ID NO: 1894584 - DNA, 15 bp, Homo sapiens
agacagagagaaaca

SEQ ID NO: 1894585 - DNA, 15 bp, Homo sapiens
gacagagagaaacat

SEQ ID NO: 1894586 - DNA, 15 bp, Homo sapiens
acagagagaaacatg

SEQ ID NO: 1894587 - DNA, 15 bp, Homo sapiens
cagagagaaacatgc

SEQ ID NO: 1894588 - DNA, 15 bp, Homo sapiens
agagagaaacatgct

SEQ ID NO: 1894589 - DNA, 15 bp, Homo sapiens
gagagaaacatgctt

SEQ ID NO: 1894590 - DNA, 15 bp, Homo sapiens
agagaaacatgcttc

SEQ ID NO: 1894591 - DNA, 15 bp, Homo sapiens
gagaaacatgcttct

SEQ ID NO: 1894592 - DNA, 15 bp, Homo sapiens
agaaacatgcttctt

SEQ ID NO: 1894593 - DNA, 15 bp, Homo sapiens
gaaacatgcttcttc

SEQ ID NO: 1894594 - DNA, 15 bp, Homo sapiens
aaacatgcttcttcc

SEQ ID NO: 1894595 - DNA, 15 bp, Homo sapiens
aacatgcttcttccc

SEQ ID NO: 1894596 - DNA, 15 bp, Homo sapiens
acatgcttcttccca

SEQ ID NO: 1894597 - DNA, 15 bp, Homo sapiens
catgcttcttcccaa

SEQ ID NO: 1894598 - DNA, 15 bp, Homo sapiens
atgcttcttcccaaa

SEQ ID NO: 1894599 - DNA, 15 bp, Homo sapiens
tgcttcttcccaaag

SEQ ID NO: 1894600 - DNA, 15 bp, Homo sapiens
gcttcttcccaaagt

SEQ ID NO: 1894601 - DNA, 15 bp, Homo sapiens
cttcttcccaaagtt

SEQ ID NO: 1894602 - DNA, 15 bp, Homo sapiens
ttcttcccaaagttt

SEQ ID NO: 1894603 - DNA, 15 bp, Homo sapiens
tcttcccaaagtttc

SEQ ID NO: 1894604 - DNA, 15 bp, Homo sapiens
cttcccaaagtttct

SEQ ID NO: 1894605 - DNA, 15 bp, Homo sapiens
ttcccaaagtttctc

SEQ ID NO: 1894606 - DNA, 15 bp, Homo sapiens
tcccaaagtttctcc

SEQ ID NO: 1894607 - DNA, 15 bp, Homo sapiens
cccaaagtttctccc

SEQ ID NO: 1894608 - DNA, 15 bp, Homo sapiens
ccaaagtttctcccc

SEQ ID NO: 1894609 - DNA, 15 bp, Homo sapiens
caaagtttctccccc

SEQ ID NO: 1894610 - DNA, 15 bp, Homo sapiens
aaagtttctccccct

SEQ ID NO: 1894611 - DNA, 15 bp, Homo sapiens
aagtttctccccctg

SEQ ID NO: 1894612 - DNA, 15 bp, Homo sapiens
agtttctccccctgt

SEQ ID NO: 1894613 - DNA, 15 bp, Homo sapiens
gtttctccccctgtg

SEQ ID NO: 1894614 - DNA, 15 bp, Homo sapiens
tttctccccctgtgc

SEQ ID NO: 1894615 - DNA, 15 bp, Homo sapiens
ttctccccctgtgca

SEQ ID NO: 1894616 - DNA, 15 bp, Homo sapiens
tctccccctgtgcaa

SEQ ID NO: 1894617 - DNA, 15 bp, Homo sapiens
ctccccctgtgcaat

SEQ ID NO: 1894618 - DNA, 15 bp, Homo sapiens
tccccctgtgcaata

SEQ ID NO: 1894619 - DNA, 15 bp, Homo sapiens
ccccctgtgcaataa

SEQ ID NO: 1894620 - DNA, 15 bp, Homo sapiens
cccctgtgcaataac

SEQ ID NO: 1894621 - DNA, 15 bp, Homo sapiens
ccctgtgcaataacc

SEQ ID NO: 1894622 - DNA, 15 bp, Homo sapiens
cctgtgcaataacct

SEQ ID NO: 1894623 - DNA, 15 bp, Homo sapiens
ctgtgcaataacctt

SEQ ID NO: 1894624 - DNA, 15 bp, Homo sapiens
tgtgcaataacctta

SEQ ID NO: 1894625 - DNA, 15 bp, Homo sapiens
gtgcaataaccttaa

SEQ ID NO: 1894626 - DNA, 15 bp, Homo sapiens
tgcaataaccttaat

SEQ ID NO: 1894627 - DNA, 15 bp, Homo sapiens
gcaataaccttaata

SEQ ID NO: 1894628 - DNA, 15 bp, Homo sapiens
caataaccttaataa

SEQ ID NO: 1894629 - DNA, 15 bp, Homo sapiens
aataaccttaataat

SEQ ID NO: 1894630 - DNA, 15 bp, Homo sapiens
ataaccttaataata

SEQ ID NO: 1894631 - DNA, 15 bp, Homo sapiens
taaccttaataatat

SEQ ID NO: 1894632 - DNA, 15 bp, Homo sapiens
aaccttaataatatc

SEQ ID NO: 1894633 - DNA, 15 bp, Homo sapiens
accttaataatatca

SEQ ID NO: 1894634 - DNA, 15 bp, Homo sapiens
ccttaataatatcaa

SEQ ID NO: 1894635 - DNA, 15 bp, Homo sapiens
cttaataatatcaac

SEQ ID NO: 1894636 - DNA, 15 bp, Homo sapiens
ttaataatatcaacc

SEQ ID NO: 1894637 - DNA, 15 bp, Homo sapiens
taataatatcaacca

SEQ ID NO: 1894638 - DNA, 15 bp, Homo sapiens
aataatatcaaccag

SEQ ID NO: 1894639 - DNA, 15 bp, Homo sapiens
ataatatcaaccagt

SEQ ID NO: 1894640 - DNA, 15 bp, Homo sapiens
taatatcaaccagtt

SEQ ID NO: 1894641 - DNA, 15 bp, Homo sapiens
aatatcaaccagttc

SEQ ID NO: 1894642 - DNA, 15 bp, Homo sapiens
atatcaaccagttct

SEQ ID NO: 1894643 - DNA, 15 bp, Homo sapiens
tatcaaccagttcta

SEQ ID NO: 1894644 - DNA, 15 bp, Homo sapiens
atcaaccagttctaa

SEQ ID NO: 1894645 - DNA, 15 bp, Homo sapiens
tcaaccagttctaaa

SEQ ID NO: 1894646 - DNA, 15 bp, Homo sapiens
caaccagttctaaac

SEQ ID NO: 1894647 - DNA, 15 bp, Homo sapiens
aaccagttctaaaca

SEQ ID NO: 1894648 - DNA, 15 bp, Homo sapiens
accagttctaaacaa

SEQ ID NO: 1894649 - DNA, 15 bp, Homo sapiens
ccagttctaaacaac

SEQ ID NO: 1894650 - DNA, 15 bp, Homo sapiens
cagttctaaacaaca

SEQ ID NO: 1894651 - DNA, 15 bp, Homo sapiens
agttctaaacaacat

SEQ ID NO: 1894652 - DNA, 15 bp, Homo sapiens
gttctaaacaacata

SEQ ID NO: 1894653 - DNA, 15 bp, Homo sapiens
ttctaaacaacatat

SEQ ID NO: 1894654 - DNA, 15 bp, Homo sapiens
tctaaacaacatatt

SEQ ID NO: 1894655 - DNA, 15 bp, Homo sapiens
ctaaacaacatattc

SEQ ID NO: 1894656 - DNA, 15 bp, Homo sapiens
taaacaacatattct

SEQ ID NO: 1894657 - DNA, 15 bp, Homo sapiens
aaacaacatattctg

SEQ ID NO: 1894658 - DNA, 15 bp, Homo sapiens
aacaacatattctgt

SEQ ID NO: 1894659 - DNA, 15 bp, Homo sapiens
acaacatattctgtg

SEQ ID NO: 1894660 - DNA, 15 bp, Homo sapiens
caacatattctgtgt

SEQ ID NO: 1894661 - DNA, 15 bp, Homo sapiens
aacatattctgtgtt

SEQ ID NO: 1894662 - DNA, 15 bp, Homo sapiens
acatattctgtgttg

SEQ ID NO: 1894663 - DNA, 15 bp, Homo sapiens
catattctgtgttgg

SEQ ID NO: 1894664 - DNA, 15 bp, Homo sapiens
atattctgtgttggg

SEQ ID NO: 1894665 - DNA, 15 bp, Homo sapiens
tattctgtgttgggt

SEQ ID NO: 1894666 - DNA, 15 bp, Homo sapiens
attctgtgttgggtc

SEQ ID NO: 1894667 - DNA, 15 bp, Homo sapiens
ttctgtgttgggtct

SEQ ID NO: 1894668 - DNA, 15 bp, Homo sapiens
tctgtgttgggtctg

SEQ ID NO: 1894669 - DNA, 15 bp, Homo sapiens
ctgtgttgggtctgt

SEQ ID NO: 1894670 - DNA, 15 bp, Homo sapiens
tgtgttgggtctgtt

SEQ ID NO: 1894671 - DNA, 15 bp, Homo sapiens
gtgttgggtctgtta

SEQ ID NO: 1894672 - DNA, 15 bp, Homo sapiens
tgttgggtctgttag

SEQ ID NO: 1894673 - DNA, 15 bp, Homo sapiens
gttgggtctgttaga

SEQ ID NO: 1894674 - DNA, 15 bp, Homo sapiens
ttgggtctgttagat

SEQ ID NO: 1894675 - DNA, 15 bp, Homo sapiens
tgggtctgttagata

SEQ ID NO: 1894676 - DNA, 15 bp, Homo sapiens
gggtctgttagatac

SEQ ID NO: 1894677 - DNA, 15 bp, Homo sapiens
ggtctgttagatact

SEQ ID NO: 1894678 - DNA, 15 bp, Homo sapiens
gtctgttagatactt

SEQ ID NO: 1894679 - DNA, 15 bp, Homo sapiens
tctgttagatacttt

SEQ ID NO: 1894680 - DNA, 15 bp, Homo sapiens
ctgttagatacttta

SEQ ID NO: 1894681 - DNA, 15 bp, Homo sapiens
tgttagatactttat

SEQ ID NO: 1894682 - DNA, 15 bp, Homo sapiens
gttagatactttatc

SEQ ID NO: 1894683 - DNA, 15 bp, Homo sapiens
ttagatactttatca

SEQ ID NO: 1894684 - DNA, 15 bp, Homo sapiens
tagatactttatcaa

SEQ ID NO: 1894685 - DNA, 15 bp, Homo sapiens
agatactttatcaac

SEQ ID NO: 1894686 - DNA, 15 bp, Homo sapiens
atactttatcaacat

SEQ ID NO: 1894687 - DNA, 15 bp, Homo sapiens
tactttatcaacatt

SEQ ID NO: 1894688 - DNA, 15 bp, Homo sapiens
actttatcaacatta

SEQ ID NO: 1894689 - DNA, 15 bp, Homo sapiens
ctttatcaacattat

SEQ ID NO: 1894690 - DNA, 15 bp, Homo sapiens
tttatcaacattatc

SEQ ID NO: 1894691 - DNA, 15 bp, Homo sapiens
ttatcaacattatct

SEQ ID NO: 1894692 - DNA, 15 bp, Homo sapiens
tatcaacattatctc

SEQ ID NO: 1894693 - DNA, 15 bp, Homo sapiens
atcaacattatctca

SEQ ID NO: 1894694 - DNA, 15 bp, Homo sapiens
tcaacattatctcat

SEQ ID NO: 1894695 - DNA, 15 bp, Homo sapiens
caacattatctcata

SEQ ID NO: 1894696 - DNA, 15 bp, Homo sapiens
aacattatctcataa

SEQ ID NO: 1894697 - DNA, 15 bp, Homo sapiens
acattatctcataat

SEQ ID NO: 1894698 - DNA, 15 bp, Homo sapiens
cattatctcataatt

SEQ ID NO: 1894699 - DNA, 15 bp, Homo sapiens
attatctcataattg

SEQ ID NO: 1894700 - DNA, 15 bp, Homo sapiens
ttatctcataattgt

SEQ ID NO: 1894701 - DNA, 15 bp, Homo sapiens
tatctcataattgtt

SEQ ID NO: 1894702 - DNA, 15 bp, Homo sapiens
atctcataattgttc

SEQ ID NO: 1894703 - DNA, 15 bp, Homo sapiens
tctcataattgttca

SEQ ID NO: 1894704 - DNA, 15 bp, Homo sapiens
ctcataattgttcaa

SEQ ID NO: 1894705 - DNA, 15 bp, Homo sapiens
tcataattgttcaaa

SEQ ID NO: 1894706 - DNA, 15 bp, Homo sapiens
cataattgttcaaaa

SEQ ID NO: 1894707 - DNA, 15 bp, Homo sapiens
ataattgttcaaaat

SEQ ID NO: 1894708 - DNA, 15 bp, Homo sapiens
taattgttcaaaata

SEQ ID NO: 1894709 - DNA, 15 bp, Homo sapiens
aattgttcaaaatac

SEQ ID NO: 1894710 - DNA, 15 bp, Homo sapiens
attgttcaaaatact

SEQ ID NO: 1894711 - DNA, 15 bp, Homo sapiens
ttgttcaaaatactt

SEQ ID NO: 1894712 - DNA, 15 bp, Homo sapiens
tgttcaaaatactta

SEQ ID NO: 1894713 - DNA, 15 bp, Homo sapiens
gttcaaaatacttat

SEQ ID NO: 1894714 - DNA, 15 bp, Homo sapiens
ttcaaaatacttatt

SEQ ID NO: 1894715 - DNA, 15 bp, Homo sapiens
tcaaaatacttatta

SEQ ID NO: 1894716 - DNA, 15 bp, Homo sapiens
caaaatacttattac

SEQ ID NO: 1894717 - DNA, 15 bp, Homo sapiens
aaaatacttattacc

SEQ ID NO: 1894718 - DNA, 15 bp, Homo sapiens
aaatacttattaccc

SEQ ID NO: 1894719 - DNA, 15 bp, Homo sapiens
aatacttattacccg

SEQ ID NO: 1894720 - DNA, 15 bp, Homo sapiens
atacttattacccgc

SEQ ID NO: 1894721 - DNA, 15 bp, Homo sapiens
tacttattacccgca

SEQ ID NO: 1894722 - DNA, 15 bp, Homo sapiens
acttattacccgcac

SEQ ID NO: 1894723 - DNA, 15 bp, Homo sapiens
cttattacccgcact

SEQ ID NO: 1894724 - DNA, 15 bp, Homo sapiens
ttattacccgcactc

SEQ ID NO: 1894725 - DNA, 15 bp, Homo sapiens
tattacccgcactct

SEQ ID NO: 1894726 - DNA, 15 bp, Homo sapiens
attacccgcactctg

SEQ ID NO: 1894727 - DNA, 15 bp, Homo sapiens
ttacccgcactctga

SEQ ID NO: 1894728 - DNA, 15 bp, Homo sapiens
tacccgcactctgaa

SEQ ID NO: 1894729 - DNA, 15 bp, Homo sapiens
acccgcactctgaag

SEQ ID NO: 1894730 - DNA, 15 bp, Homo sapiens
cccgcactctgaaga

SEQ ID NO: 1894731 - DNA, 15 bp, Homo sapiens
ccgcactctgaagat

SEQ ID NO: 1894732 - DNA, 15 bp, Homo sapiens
cgcactctgaagatg

SEQ ID NO: 1894733 - DNA, 15 bp, Homo sapiens
gcactctgaagatga

SEQ ID NO: 1894734 - DNA, 15 bp, Homo sapiens
cactctgaagatgag

SEQ ID NO: 1894735 - DNA, 15 bp, Homo sapiens
actctgaagatgaga

SEQ ID NO: 1894736 - DNA, 15 bp, Homo sapiens
ctctgaagatgagaa

SEQ ID NO: 1894737 - DNA, 15 bp, Homo sapiens
tctgaagatgagaat

SEQ ID NO: 1894738 - DNA, 15 bp, Homo sapiens
ctgaagatgagaata

SEQ ID NO: 1894739 - DNA, 15 bp, Homo sapiens
tgaagatgagaatac

SEQ ID NO: 1894740 - DNA, 15 bp, Homo sapiens
gaagatgagaatact

SEQ ID NO: 1894741 - DNA, 15 bp, Homo sapiens
aagatgagaatactg

SEQ ID NO: 1894742 - DNA, 15 bp, Homo sapiens
agatgagaatactga

SEQ ID NO: 1894743 - DNA, 15 bp, Homo sapiens
gatgagaatactgag

SEQ ID NO: 1894744 - DNA, 15 bp, Homo sapiens
atgagaatactgagg

SEQ ID NO: 1894745 - DNA, 15 bp, Homo sapiens
tgagaatactgaggc

SEQ ID NO: 1894746 - DNA, 15 bp, Homo sapiens
gagaatactgaggct

SEQ ID NO: 1894747 - DNA, 15 bp, Homo sapiens
agaatactgaggctc

SEQ ID NO: 1894748 - DNA, 15 bp, Homo sapiens
gaatactgaggctca

SEQ ID NO: 1894749 - DNA, 15 bp, Homo sapiens
aatactgaggctcag

SEQ ID NO: 1894750 - DNA, 15 bp, Homo sapiens
atactgaggctcaga

SEQ ID NO: 1894751 - DNA, 15 bp, Homo sapiens
tactgaggctcagaa

SEQ ID NO: 1894752 - DNA, 15 bp, Homo sapiens
actgaggctcagaaa

SEQ ID NO: 1894753 - DNA, 15 bp, Homo sapiens
ctgaggctcagaaag

SEQ ID NO: 1894754 - DNA, 15 bp, Homo sapiens
tgaggctcagaaagg

SEQ ID NO: 1894755 - DNA, 15 bp, Homo sapiens
gaggctcagaaaggt

SEQ ID NO: 1894756 - DNA, 15 bp, Homo sapiens
aggctcagaaaggtt

SEQ ID NO: 1894757 - DNA, 15 bp, Homo sapiens
ctcagaaaggttaat

SEQ ID NO: 1894758 - DNA, 15 bp, Homo sapiens
tcagaaaggttaatc

SEQ ID NO: 1894759 - DNA, 15 bp, Homo sapiens
cagaaaggttaatca

SEQ ID NO: 1894760 - DNA, 15 bp, Homo sapiens
agaaaggttaatcag

SEQ ID NO: 1894761 - DNA, 15 bp, Homo sapiens
gaaaggttaatcagc

SEQ ID NO: 1894762 - DNA, 15 bp, Homo sapiens
aaaggttaatcagct

SEQ ID NO: 1894763 - DNA, 15 bp, Homo sapiens
aaggttaatcagctt

SEQ ID NO: 1894764 - DNA, 15 bp, Homo sapiens
aggttaatcagcttg

SEQ ID NO: 1894765 - DNA, 15 bp, Homo sapiens
ggttaatcagcttgc

SEQ ID NO: 1894766 - DNA, 15 bp, Homo sapiens
gttaatcagcttgcc

SEQ ID NO: 1894767 - DNA, 15 bp, Homo sapiens
ttaatcagcttgcct

SEQ ID NO: 1894768 - DNA, 15 bp, Homo sapiens
taatcagcttgccta

SEQ ID NO: 1894769 - DNA, 15 bp, Homo sapiens
aatcagcttgcctaa

SEQ ID NO: 1894770 - DNA, 15 bp, Homo sapiens
atcagcttgcctaaa

SEQ ID NO: 1894771 - DNA, 15 bp, Homo sapiens
tcagcttgcctaaaa

SEQ ID NO: 1894772 - DNA, 15 bp, Homo sapiens
cagcttgcctaaaat

SEQ ID NO: 1894773 - DNA, 15 bp, Homo sapiens
agcttgcctaaaatc

SEQ ID NO: 1894774 - DNA, 15 bp, Homo sapiens
gcttgcctaaaatct

SEQ ID NO: 1894775 - DNA, 15 bp, Homo sapiens
cttgcctaaaatctc

SEQ ID NO: 1894776 - DNA, 15 bp, Homo sapiens
ttgcctaaaatctcc

SEQ ID NO: 1894777 - DNA, 15 bp, Homo sapiens
tgcctaaaatctccc

SEQ ID NO: 1894778 - DNA, 15 bp, Homo sapiens
gcctaaaatctccca

SEQ ID NO: 1894779 - DNA, 15 bp, Homo sapiens
cctaaaatctcccag

SEQ ID NO: 1894780 - DNA, 15 bp, Homo sapiens
ctaaaatctcccagc

SEQ ID NO: 1894781 - DNA, 15 bp, Homo sapiens
taaaatctcccagct

SEQ ID NO: 1894782 - DNA, 15 bp, Homo sapiens
aaaatctcccagcta

SEQ ID NO: 1894783 - DNA, 15 bp, Homo sapiens
aaatctcccagctag

SEQ ID NO: 1894784 - DNA, 15 bp, Homo sapiens
aatctcccagctagt

SEQ ID NO: 1894785 - DNA, 15 bp, Homo sapiens
atctcccagctagta

SEQ ID NO: 1894786 - DNA, 15 bp, Homo sapiens
tctcccagctagtat

SEQ ID NO: 1894787 - DNA, 15 bp, Homo sapiens
ctcccagctagtatg

SEQ ID NO: 1894788 - DNA, 15 bp, Homo sapiens
tcccagctagtatga

SEQ ID NO: 1894789 - DNA, 15 bp, Homo sapiens
cccagctagtatgag

SEQ ID NO: 1894790 - DNA, 15 bp, Homo sapiens
ccagctagtatgaga

SEQ ID NO: 1894791 - DNA, 15 bp, Homo sapiens
cagctagtatgagat

SEQ ID NO: 1894792 - DNA, 15 bp, Homo sapiens
agctagtatgagata

SEQ ID NO: 1894793 - DNA, 15 bp, Homo sapiens
gctagtatgagatag

SEQ ID NO: 1894794 - DNA, 15 bp, Homo sapiens
ctagtatgagatagg

SEQ ID NO: 1894795 - DNA, 15 bp, Homo sapiens
tagtatgagataggg

SEQ ID NO: 1894796 - DNA, 15 bp, Homo sapiens
agtatgagatagggt

SEQ ID NO: 1894797 - DNA, 15 bp, Homo sapiens
gtatgagatagggtc

SEQ ID NO: 1894798 - DNA, 15 bp, Homo sapiens
tatgagatagggtca

SEQ ID NO: 1894799 - DNA, 15 bp, Homo sapiens
atgagatagggtcag

SEQ ID NO: 1894800 - DNA, 15 bp, Homo sapiens
tgagatagggtcagt

SEQ ID NO: 1894801 - DNA, 15 bp, Homo sapiens
gagatagggtcagta

SEQ ID NO: 1894802 - DNA, 15 bp, Homo sapiens
agatagggtcagtat

SEQ ID NO: 1894803 - DNA, 15 bp, Homo sapiens
gatagggtcagtatt

SEQ ID NO: 1894804 - DNA, 15 bp, Homo sapiens
atagggtcagtattc

SEQ ID NO: 1894805 - DNA, 15 bp, Homo sapiens
tagggtcagtattca

SEQ ID NO: 1894806 - DNA, 15 bp, Homo sapiens
agggtcagtattcaa

SEQ ID NO: 1894807 - DNA, 15 bp, Homo sapiens
gggtcagtattcaaa

SEQ ID NO: 1894808 - DNA, 15 bp, Homo sapiens
ggtcagtattcaaac

SEQ ID NO: 1894809 - DNA, 15 bp, Homo sapiens
gtcagtattcaaact

SEQ ID NO: 1894810 - DNA, 15 bp, Homo sapiens
tcagtattcaaactc

SEQ ID NO: 1894811 - DNA, 15 bp, Homo sapiens
cagtattcaaactca

SEQ ID NO: 1894812 - DNA, 15 bp, Homo sapiens
agtattcaaactcaa

SEQ ID NO: 1894813 - DNA, 15 bp, Homo sapiens
gtattcaaactcaag

SEQ ID NO: 1894814 - DNA, 15 bp, Homo sapiens
tattcaaactcaagt

SEQ ID NO: 1894815 - DNA, 15 bp, Homo sapiens
attcaaactcaagta

SEQ ID NO: 1894816 - DNA, 15 bp, Homo sapiens
ttcaaactcaagtat

SEQ ID NO: 1894817 - DNA, 15 bp, Homo sapiens
tcaaactcaagtatc

SEQ ID NO: 1894818 - DNA, 15 bp, Homo sapiens
caaactcaagtatct

SEQ ID NO: 1894819 - DNA, 15 bp, Homo sapiens
aaactcaagtatcta

SEQ ID NO: 1894820 - DNA, 15 bp, Homo sapiens
aactcaagtatctat

SEQ ID NO: 1894821 - DNA, 15 bp, Homo sapiens
actcaagtatctatg

SEQ ID NO: 1894822 - DNA, 15 bp, Homo sapiens
ctcaagtatctatga

SEQ ID NO: 1894823 - DNA, 15 bp, Homo sapiens
tcaagtatctatgac

SEQ ID NO: 1894824 - DNA, 15 bp, Homo sapiens
caagtatctatgacc

SEQ ID NO: 1894825 - DNA, 15 bp, Homo sapiens
aagtatctatgaccc

SEQ ID NO: 1894826 - DNA, 15 bp, Homo sapiens
agtatctatgacccc

SEQ ID NO: 1894827 - DNA, 15 bp, Homo sapiens
gtatctatgacccca

SEQ ID NO: 1894828 - DNA, 15 bp, Homo sapiens
tatctatgaccccaa

SEQ ID NO: 1894829 - DNA, 15 bp, Homo sapiens
atctatgaccccaag

SEQ ID NO: 1894830 - DNA, 15 bp, Homo sapiens
tctatgaccccaagc

SEQ ID NO: 1894831 - DNA, 15 bp, Homo sapiens
ctatgaccccaagcc

SEQ ID NO: 1894832 - DNA, 15 bp, Homo sapiens
tatgaccccaagccc

SEQ ID NO: 1894833 - DNA, 15 bp, Homo sapiens
atgaccccaagccca

SEQ ID NO: 1894834 - DNA, 15 bp, Homo sapiens
tgaccccaagcccat

SEQ ID NO: 1894835 - DNA, 15 bp, Homo sapiens
gaccccaagcccatg

SEQ ID NO: 1894836 - DNA, 15 bp, Homo sapiens
accccaagcccatgt

SEQ ID NO: 1894837 - DNA, 15 bp, Homo sapiens
ccccaagcccatgtt

SEQ ID NO: 1894838 - DNA, 15 bp, Homo sapiens
cccaagcccatgtta

SEQ ID NO: 1894839 - DNA, 15 bp, Homo sapiens
ccaagcccatgttac

SEQ ID NO: 1894840 - DNA, 15 bp, Homo sapiens
caagcccatgttacg

SEQ ID NO: 1894841 - DNA, 15 bp, Homo sapiens
aagcccatgttacgc

SEQ ID NO: 1894842 - DNA, 15 bp, Homo sapiens
agcccatgttacgcc

SEQ ID NO: 1894843 - DNA, 15 bp, Homo sapiens
gcccatgttacgcct

SEQ ID NO: 1894844 - DNA, 15 bp, Homo sapiens
cccatgttacgcctc

SEQ ID NO: 1894845 - DNA, 15 bp, Homo sapiens
ccatgttacgcctct

SEQ ID NO: 1894846 - DNA, 15 bp, Homo sapiens
catgttacgcctcta

SEQ ID NO: 1894847 - DNA, 15 bp, Homo sapiens
atgttacgcctctaa

SEQ ID NO: 1894848 - DNA, 15 bp, Homo sapiens
tgttacgcctctaat

SEQ ID NO: 1894849 - DNA, 15 bp, Homo sapiens
gttacgcctctaata

SEQ ID NO: 1894850 - DNA, 15 bp, Homo sapiens
ttacgcctctaatac

SEQ ID NO: 1894851 - DNA, 15 bp, Homo sapiens
tacgcctctaatact

SEQ ID NO: 1894852 - DNA, 15 bp, Homo sapiens
acgcctctaatacta

SEQ ID NO: 1894853 - DNA, 15 bp, Homo sapiens
cgcctctaatactag

SEQ ID NO: 1894854 - DNA, 15 bp, Homo sapiens
gcctctaatactagg

SEQ ID NO: 1894855 - DNA, 15 bp, Homo sapiens
cctctaatactaggc

SEQ ID NO: 1894856 - DNA, 15 bp, Homo sapiens
ctctaatactaggct

SEQ ID NO: 1894857 - DNA, 15 bp, Homo sapiens
tctaatactaggctg

SEQ ID NO: 1894858 - DNA, 15 bp, Homo sapiens
ctaatactaggctga

SEQ ID NO: 1894859 - DNA, 15 bp, Homo sapiens
taatactaggctgaa

SEQ ID NO: 1894860 - DNA, 15 bp, Homo sapiens
aatactaggctgaag

SEQ ID NO: 1894861 - DNA, 15 bp, Homo sapiens
atactaggctgaagc

SEQ ID NO: 1894862 - DNA, 15 bp, Homo sapiens
tactaggctgaagct

SEQ ID NO: 1894863 - DNA, 15 bp, Homo sapiens
actaggctgaagctg

SEQ ID NO: 1894864 - DNA, 15 bp, Homo sapiens
ctaggctgaagctga

SEQ ID NO: 1894865 - DNA, 15 bp, Homo sapiens
taggctgaagctgaa

SEQ ID NO: 1894866 - DNA, 15 bp, Homo sapiens
aggctgaagctgaag

SEQ ID NO: 1894867 - DNA, 15 bp, Homo sapiens
ggctgaagctgaagc

SEQ ID NO: 1894868 - DNA, 15 bp, Homo sapiens
gctgaagctgaagct

SEQ ID NO: 1894869 - DNA, 15 bp, Homo sapiens
ctgaagctgaagcta

SEQ ID NO: 1894870 - DNA, 15 bp, Homo sapiens
tgaagctgaagctag

SEQ ID NO: 1894871 - DNA, 15 bp, Homo sapiens
gaagctgaagctagg

SEQ ID NO: 1894872 - DNA, 15 bp, Homo sapiens
aagctgaagctaggg

SEQ ID NO: 1894873 - DNA, 15 bp, Homo sapiens
agctgaagctagggt

SEQ ID NO: 1894874 - DNA, 15 bp, Homo sapiens
gctgaagctagggtt

SEQ ID NO: 1894875 - DNA, 15 bp, Homo sapiens
ctgaagctagggttt

SEQ ID NO: 1894876 - DNA, 15 bp, Homo sapiens
tgaagctagggttta

SEQ ID NO: 1894877 - DNA, 15 bp, Homo sapiens
gaagctagggtttag

SEQ ID NO: 1894878 - DNA, 15 bp, Homo sapiens
aagctagggtttaga

SEQ ID NO: 1894879 - DNA, 15 bp, Homo sapiens
agctagggtttagag

SEQ ID NO: 1894880 - DNA, 15 bp, Homo sapiens
gctagggtttagaga

SEQ ID NO: 1894881 - DNA, 15 bp, Homo sapiens
ctagggtttagagaa

SEQ ID NO: 1894882 - DNA, 15 bp, Homo sapiens
tagggtttagagaaa

SEQ ID NO: 1894883 - DNA, 15 bp, Homo sapiens
agggtttagagaaag

SEQ ID NO: 1894884 - DNA, 15 bp, Homo sapiens
gggtttagagaaagc

SEQ ID NO: 1894885 - DNA, 15 bp, Homo sapiens
ggtttagagaaagca

SEQ ID NO: 1894886 - DNA, 15 bp, Homo sapiens
gtttagagaaagcac

SEQ ID NO: 1894887 - DNA, 15 bp, Homo sapiens
tttagagaaagcacc

SEQ ID NO: 1894888 - DNA, 15 bp, Homo sapiens
ttagagaaagcaccc

SEQ ID NO: 1894889 - DNA, 15 bp, Homo sapiens
tagagaaagcaccca

SEQ ID NO: 1894890 - DNA, 15 bp, Homo sapiens
agagaaagcacccag

SEQ ID NO: 1894891 - DNA, 15 bp, Homo sapiens
gagaaagcacccagg

SEQ ID NO: 1894892 - DNA, 15 bp, Homo sapiens
agaaagcacccaggc

SEQ ID NO: 1894893 - DNA, 15 bp, Homo sapiens
gaaagcacccaggcc

SEQ ID NO: 1894894 - DNA, 15 bp, Homo sapiens
aaagcacccaggcct

SEQ ID NO: 1894895 - DNA, 15 bp, Homo sapiens
aagcacccaggcctg

SEQ ID NO: 1894896 - DNA, 15 bp, Homo sapiens
agcacccaggcctgg

SEQ ID NO: 1894897 - DNA, 15 bp, Homo sapiens
gcacccaggcctgga

SEQ ID NO: 1894898 - DNA, 15 bp, Homo sapiens
cacccaggcctggaa

SEQ ID NO: 1894899 - DNA, 15 bp, Homo sapiens
acccaggcctggaaa

SEQ ID NO: 1894900 - DNA, 15 bp, Homo sapiens
cccaggcctggaaaa

SEQ ID NO: 1894901 - DNA, 15 bp, Homo sapiens
ccaggcctggaaaag

SEQ ID NO: 1894902 - DNA, 15 bp, Homo sapiens
caggcctggaaaagg

SEQ ID NO: 1894903 - DNA, 15 bp, Homo sapiens
aggcctggaaaaggg

SEQ ID NO: 1894904 - DNA, 15 bp, Homo sapiens
ggcctggaaaaggga

SEQ ID NO: 1894905 - DNA, 15 bp, Homo sapiens
gcctggaaaagggag

SEQ ID NO: 1894906 - DNA, 15 bp, Homo sapiens
cctggaaaagggagt

SEQ ID NO: 1894907 - DNA, 15 bp, Homo sapiens
ctggaaaagggagta

SEQ ID NO: 1894908 - DNA, 15 bp, Homo sapiens
tggaaaagggagtag

SEQ ID NO: 1894909 - DNA, 15 bp, Homo sapiens
ggaaaagggagtagg

SEQ ID NO: 1894910 - DNA, 15 bp, Homo sapiens
gaaaagggagtaggc

SEQ ID NO: 1894911 - DNA, 15 bp, Homo sapiens
aaaagggagtaggct

SEQ ID NO: 1894912 - DNA, 15 bp, Homo sapiens
aaagggagtaggctg

SEQ ID NO: 1894913 - DNA, 15 bp, Homo sapiens
aagggagtaggctgg

SEQ ID NO: 1894914 - DNA, 15 bp, Homo sapiens
agggagtaggctggc

SEQ ID NO: 1894915 - DNA, 15 bp, Homo sapiens
gggagtaggctggca

SEQ ID NO: 1894916 - DNA, 15 bp, Homo sapiens
ggagtaggctggcat

SEQ ID NO: 1894917 - DNA, 15 bp, Homo sapiens
gagtaggctggcatc

SEQ ID NO: 1894918 - DNA, 15 bp, Homo sapiens
agtaggctggcatca

SEQ ID NO: 1894919 - DNA, 15 bp, Homo sapiens
gtaggctggcatcat

SEQ ID NO: 1894920 - DNA, 15 bp, Homo sapiens
taggctggcatcata

SEQ ID NO: 1894921 - DNA, 15 bp, Homo sapiens
aggctggcatcatag

SEQ ID NO: 1894922 - DNA, 15 bp, Homo sapiens
ggctggcatcatagc

SEQ ID NO: 1894923 - DNA, 15 bp, Homo sapiens
gctggcatcatagca

SEQ ID NO: 1894924 - DNA, 15 bp, Homo sapiens
ctggcatcatagcag

SEQ ID NO: 1894925 - DNA, 15 bp, Homo sapiens
tggcatcatagcagt

SEQ ID NO: 1894926 - DNA, 15 bp, Homo sapiens
ggcatcatagcagtg

SEQ ID NO: 1894927 - DNA, 15 bp, Homo sapiens
gcatcatagcagtgc

SEQ ID NO: 1894928 - DNA, 15 bp, Homo sapiens
catcatagcagtgct

SEQ ID NO: 1894929 - DNA, 15 bp, Homo sapiens
atcatagcagtgcta

SEQ ID NO: 1894930 - DNA, 15 bp, Homo sapiens
tcatagcagtgctaa

SEQ ID NO: 1894931 - DNA, 15 bp, Homo sapiens
catagcagtgctaag

SEQ ID NO: 1894932 - DNA, 15 bp, Homo sapiens
atagcagtgctaagg

SEQ ID NO: 1894933 - DNA, 15 bp, Homo sapiens
tagcagtgctaaggc

SEQ ID NO: 1894934 - DNA, 15 bp, Homo sapiens
agcagtgctaaggcc

SEQ ID NO: 1894935 - DNA, 15 bp, Homo sapiens
gcagtgctaaggccc

SEQ ID NO: 1894936 - DNA, 15 bp, Homo sapiens
cagtgctaaggcccc

SEQ ID NO: 1894937 - DNA, 15 bp, Homo sapiens
agtgctaaggcccca

SEQ ID NO: 1894938 - DNA, 15 bp, Homo sapiens
gtgctaaggccccag

SEQ ID NO: 1894939 - DNA, 15 bp, Homo sapiens
tgctaaggccccagt

SEQ ID NO: 1894940 - DNA, 15 bp, Homo sapiens
gctaaggccccagta

SEQ ID NO: 1894941 - DNA, 15 bp, Homo sapiens
ctaaggccccagtaa

SEQ ID NO: 1894942 - DNA, 15 bp, Homo sapiens
taaggccccagtaaa

SEQ ID NO: 1894943 - DNA, 15 bp, Homo sapiens
aaggccccagtaaag

SEQ ID NO: 1894944 - DNA, 15 bp, Homo sapiens
aggccccagtaaaga

SEQ ID NO: 1894945 - DNA, 15 bp, Homo sapiens
ggccccagtaaagaa

SEQ ID NO: 1894946 - DNA, 15 bp, Homo sapiens
gccccagtaaagaac

SEQ ID NO: 1894947 - DNA, 15 bp, Homo sapiens
ccccagtaaagaact

SEQ ID NO: 1894948 - DNA, 15 bp, Homo sapiens
cccagtaaagaactg

SEQ ID NO: 1894949 - DNA, 15 bp, Homo sapiens
ccagtaaagaactgg

SEQ ID NO: 1894950 - DNA, 15 bp, Homo sapiens
cagtaaagaactgga

SEQ ID NO: 1894951 - DNA, 15 bp, Homo sapiens
agtaaagaactggag

SEQ ID NO: 1894952 - DNA, 15 bp, Homo sapiens
gtaaagaactggagg

SEQ ID NO: 1894953 - DNA, 15 bp, Homo sapiens
taaagaactggaggc

SEQ ID NO: 1894954 - DNA, 15 bp, Homo sapiens
aaagaactggaggcc

SEQ ID NO: 1894955 - DNA, 15 bp, Homo sapiens
aagaactggaggcca

SEQ ID NO: 1894956 - DNA, 15 bp, Homo sapiens
agaactggaggccac

SEQ ID NO: 1894957 - DNA, 15 bp, Homo sapiens
gaactggaggccacc

SEQ ID NO: 1894958 - DNA, 15 bp, Homo sapiens
aactggaggccaccc

SEQ ID NO: 1894959 - DNA, 15 bp, Homo sapiens
actggaggccaccca

SEQ ID NO: 1894960 - DNA, 15 bp, Homo sapiens
ctggaggccacccag

SEQ ID NO: 1894961 - DNA, 15 bp, Homo sapiens
tggaggccacccagg

SEQ ID NO: 1894962 - DNA, 15 bp, Homo sapiens
ggaggccacccaggg

SEQ ID NO: 1894963 - DNA, 15 bp, Homo sapiens
ttcggccccaacttt

SEQ ID NO: 1894964 - DNA, 15 bp, Homo sapiens
tcggccccaacttta

SEQ ID NO: 1894965 - DNA, 15 bp, Homo sapiens
cggccccaactttat

SEQ ID NO: 1894966 - DNA, 15 bp, Homo sapiens
ggccccaactttatt

SEQ ID NO: 1894967 - DNA, 15 bp, Homo sapiens
gccccaactttatta

SEQ ID NO: 1894968 - DNA, 15 bp, Homo sapiens
ccccaactttattat

SEQ ID NO: 1894969 - DNA, 15 bp, Homo sapiens
cccaactttattatc

SEQ ID NO: 1894970 - DNA, 15 bp, Homo sapiens
ccaactttattatct

SEQ ID NO: 1894971 - DNA, 15 bp, Homo sapiens
caactttattatctg

SEQ ID NO: 1894972 - DNA, 15 bp, Homo sapiens
aactttattatctgg

SEQ ID NO: 1894973 - DNA, 15 bp, Homo sapiens
actttattatctggc

SEQ ID NO: 1894974 - DNA, 15 bp, Homo sapiens
ctttattatctggct

SEQ ID NO: 1894975 - DNA, 15 bp, Homo sapiens
tttattatctggctc

SEQ ID NO: 1894976 - DNA, 15 bp, Homo sapiens
ttattatctggctct

SEQ ID NO: 1894977 - DNA, 15 bp, Homo sapiens
tattatctggctctt

SEQ ID NO: 1894978 - DNA, 15 bp, Homo sapiens
attatctggctcttc

SEQ ID NO: 1894979 - DNA, 15 bp, Homo sapiens
ttatctggctcttca

SEQ ID NO: 1894980 - DNA, 15 bp, Homo sapiens
tatctggctcttcaa

SEQ ID NO: 1894981 - DNA, 15 bp, Homo sapiens
atctggctcttcaag

SEQ ID NO: 1894982 - DNA, 15 bp, Homo sapiens
tctggctcttcaagg

SEQ ID NO: 1894983 - DNA, 15 bp, Homo sapiens
ctggctcttcaaggt

SEQ ID NO: 1894984 - DNA, 15 bp, Homo sapiens
tggctcttcaaggtt

SEQ ID NO: 1894985 - DNA, 15 bp, Homo sapiens
ggctcttcaaggttt

SEQ ID NO: 1894986 - DNA, 15 bp, Homo sapiens
gctcttcaaggtttg

SEQ ID NO: 1894987 - DNA, 15 bp, Homo sapiens
ctcttcaaggtttgg

SEQ ID NO: 1894988 - DNA, 15 bp, Homo sapiens
tcttcaaggtttgga

SEQ ID NO: 1894989 - DNA, 15 bp, Homo sapiens
cttcaaggtttggag

SEQ ID NO: 1894990 - DNA, 15 bp, Homo sapiens
ttcaaggtttggagt

SEQ ID NO: 1894991 - DNA, 15 bp, Homo sapiens
tcaaggtttggagtc

SEQ ID NO: 1894992 - DNA, 15 bp, Homo sapiens
caaggtttggagtcc

SEQ ID NO: 1894993 - DNA, 15 bp, Homo sapiens
aaggtttggagtcca

SEQ ID NO: 1894994 - DNA, 15 bp, Homo sapiens
aggtttggagtccac

SEQ ID NO: 1894995 - DNA, 15 bp, Homo sapiens
ggtttggagtccact

SEQ ID NO: 1894996 - DNA, 15 bp, Homo sapiens
gtttggagtccactg

SEQ ID NO: 1894997 - DNA, 15 bp, Homo sapiens
tttggagtccactgt

SEQ ID NO: 1894998 - DNA, 15 bp, Homo sapiens
ttggagtccactgtg

SEQ ID NO: 1894999 - DNA, 15 bp, Homo sapiens
tggagtccactgtgc

SEQ ID NO: 1895000 - DNA, 15 bp, Homo sapiens
ggagtccactgtgct

SEQ ID NO: 1895001 - DNA, 15 bp, Homo sapiens
gagtccactgtgctg

SEQ ID NO: 1895002 - DNA, 15 bp, Homo sapiens
agtccactgtgctgg

SEQ ID NO: 1895003 - DNA, 15 bp, Homo sapiens
gtccactgtgctggg

SEQ ID NO: 1895004 - DNA, 15 bp, Homo sapiens
tccactgtgctggga

SEQ ID NO: 1895005 - DNA, 15 bp, Homo sapiens
ccactgtgctgggag

SEQ ID NO: 1895006 - DNA, 15 bp, Homo sapiens
cactgtgctgggagg

SEQ ID NO: 1895007 - DNA, 15 bp, Homo sapiens
actgtgctgggaggg

SEQ ID NO: 1895008 - DNA, 15 bp, Homo sapiens
ctgtgctgggagggc

SEQ ID NO: 1895009 - DNA, 15 bp, Homo sapiens
tgtgctgggagggcc

SEQ ID NO: 1895010 - DNA, 15 bp, Homo sapiens
gtgctgggagggcca

SEQ ID NO: 1895011 - DNA, 15 bp, Homo sapiens
tgctgggagggccaa

SEQ ID NO: 1895012 - DNA, 15 bp, Homo sapiens
gctgggagggccaag

SEQ ID NO: 1895013 - DNA, 15 bp, Homo sapiens
ctgggagggccaagg

SEQ ID NO: 1895014 - DNA, 15 bp, Homo sapiens
tgggagggccaaggt

SEQ ID NO: 1895015 - DNA, 15 bp, Homo sapiens
gggagggccaaggtg

SEQ ID NO: 1895016 - DNA, 15 bp, Homo sapiens
ggagggccaaggtgc

SEQ ID NO: 1895017 - DNA, 15 bp, Homo sapiens
gagggccaaggtgca

SEQ ID NO: 1895018 - DNA, 15 bp, Homo sapiens
agggccaaggtgcag

SEQ ID NO: 1895019 - DNA, 15 bp, Homo sapiens
gggccaaggtgcagc

SEQ ID NO: 1895020 - DNA, 15 bp, Homo sapiens
ggccaaggtgcagca

SEQ ID NO: 1895021 - DNA, 15 bp, Homo sapiens
gccaaggtgcagcag

SEQ ID NO: 1895022 - DNA, 15 bp, Homo sapiens
ccaaggtgcagcagc

SEQ ID NO: 1895023 - DNA, 15 bp, Homo sapiens
caaggtgcagcagct

SEQ ID NO: 1895024 - DNA, 15 bp, Homo sapiens
aaggtgcagcagctg

SEQ ID NO: 1895025 - DNA, 15 bp, Homo sapiens
aggtgcagcagctgc

SEQ ID NO: 1895026 - DNA, 15 bp, Homo sapiens
ggtgcagcagctgca

SEQ ID NO: 1895027 - DNA, 15 bp, Homo sapiens
gtgcagcagctgcag

SEQ ID NO: 1895028 - DNA, 15 bp, Homo sapiens
tgcagcagctgcagc

SEQ ID NO: 1895029 - DNA, 15 bp, Homo sapiens
gcagcagctgcagca

SEQ ID NO: 1895030 - DNA, 15 bp, Homo sapiens
cagcagctgcagcag

SEQ ID NO: 1895031 - DNA, 15 bp, Homo sapiens
agcagctgcagcaga

SEQ ID NO: 1895032 - DNA, 15 bp, Homo sapiens
gcagctgcagcagag

SEQ ID NO: 1895033 - DNA, 15 bp, Homo sapiens
cagctgcagcagagt

SEQ ID NO: 1895034 - DNA, 15 bp, Homo sapiens
agctgcagcagagtg

SEQ ID NO: 1895035 - DNA, 15 bp, Homo sapiens
gctgcagcagagtgc

SEQ ID NO: 1895036 - DNA, 15 bp, Homo sapiens
ctgcagcagagtgct

SEQ ID NO: 1895037 - DNA, 15 bp, Homo sapiens
tgcagcagagtgcta

SEQ ID NO: 1895038 - DNA, 15 bp, Homo sapiens
gcagcagagtgctag

SEQ ID NO: 1895039 - DNA, 15 bp, Homo sapiens
cagcagagtgctagc

SEQ ID NO: 1895040 - DNA, 15 bp, Homo sapiens
agcagagtgctagca

SEQ ID NO: 1895041 - DNA, 15 bp, Homo sapiens
gcagagtgctagcag

SEQ ID NO: 1895042 - DNA, 15 bp, Homo sapiens
cagagtgctagcaga

SEQ ID NO: 1895043 - DNA, 15 bp, Homo sapiens
agagtgctagcagac

SEQ ID NO: 1895044 - DNA, 15 bp, Homo sapiens
gagtgctagcagacg

SEQ ID NO: 1895045 - DNA, 15 bp, Homo sapiens
agtgctagcagacgc

SEQ ID NO: 1895046 - DNA, 15 bp, Homo sapiens
gtgctagcagacgca

SEQ ID NO: 1895047 - DNA, 15 bp, Homo sapiens
tgctagcagacgcag

SEQ ID NO: 1895048 - DNA, 15 bp, Homo sapiens
gctagcagacgcagg

SEQ ID NO: 1895049 - DNA, 15 bp, Homo sapiens
ctagcagacgcaggg

SEQ ID NO: 1895050 - DNA, 15 bp, Homo sapiens
tagcagacgcagggc

SEQ ID NO: 1895051 - DNA, 15 bp, Homo sapiens
agcagacgcagggct

SEQ ID NO: 1895052 - DNA, 15 bp, Homo sapiens
gcagacgcagggctg

SEQ ID NO: 1895053 - DNA, 15 bp, Homo sapiens
cagacgcagggctgc

SEQ ID NO: 1895054 - DNA, 15 bp, Homo sapiens
agacgcagggctgcc

SEQ ID NO: 1895055 - DNA, 15 bp, Homo sapiens
gacgcagggctgcct

SEQ ID NO: 1895056 - DNA, 15 bp, Homo sapiens
acgcagggctgcctg

SEQ ID NO: 1895057 - DNA, 15 bp, Homo sapiens
cgcagggctgcctgc

SEQ ID NO: 1895058 - DNA, 15 bp, Homo sapiens
gcagggctgcctgcc

SEQ ID NO: 1895059 - DNA, 15 bp, Homo sapiens
cagggctgcctgcca

SEQ ID NO: 1895060 - DNA, 15 bp, Homo sapiens
agggctgcctgccat

SEQ ID NO: 1895061 - DNA, 15 bp, Homo sapiens
gggctgcctgccatc

SEQ ID NO: 1895062 - DNA, 15 bp, Homo sapiens
ggctgcctgccatcc

SEQ ID NO: 1895063 - DNA, 15 bp, Homo sapiens
gctgcctgccatcct

SEQ ID NO: 1895064 - DNA, 15 bp, Homo sapiens
ctgcctgccatcctg

SEQ ID NO: 1895065 - DNA, 15 bp, Homo sapiens
tgcctgccatcctgt

SEQ ID NO: 1895066 - DNA, 15 bp, Homo sapiens
gcctgccatcctgtg

SEQ ID NO: 1895067 - DNA, 15 bp, Homo sapiens
cctgccatcctgtgg

SEQ ID NO: 1895068 - DNA, 15 bp, Homo sapiens
ctgccatcctgtggg

SEQ ID NO: 1895069 - DNA, 15 bp, Homo sapiens
tgccatcctgtgggc

SEQ ID NO: 1895070 - DNA, 15 bp, Homo sapiens
gccatcctgtgggca

SEQ ID NO: 1895071 - DNA, 15 bp, Homo sapiens
ccatcctgtgggcat

SEQ ID NO: 1895072 - DNA, 15 bp, Homo sapiens
catcctgtgggcatc

SEQ ID NO: 1895073 - DNA, 15 bp, Homo sapiens
atcctgtgggcatcc

SEQ ID NO: 1895074 - DNA, 15 bp, Homo sapiens
tcctgtgggcatcca

SEQ ID NO: 1895075 - DNA, 15 bp, Homo sapiens
cctgtgggcatccac

SEQ ID NO: 1895076 - DNA, 15 bp, Homo sapiens
ctgtgggcatccacc

SEQ ID NO: 1895077 - DNA, 15 bp, Homo sapiens
tgtgggcatccacca

SEQ ID NO: 1895078 - DNA, 15 bp, Homo sapiens
gtgggcatccaccac

SEQ ID NO: 1895079 - DNA, 15 bp, Homo sapiens
tgggcatccaccaca

SEQ ID NO: 1895080 - DNA, 15 bp, Homo sapiens
gggcatccaccacag

SEQ ID NO: 1895081 - DNA, 15 bp, Homo sapiens
ggcatccaccacagt

SEQ ID NO: 1895082 - DNA, 15 bp, Homo sapiens
gcatccaccacagtg

SEQ ID NO: 1895083 - DNA, 15 bp, Homo sapiens
catccaccacagtgg

SEQ ID NO: 1895084 - DNA, 15 bp, Homo sapiens
atccaccacagtggt

SEQ ID NO: 1895085 - DNA, 15 bp, Homo sapiens
tccaccacagtggtg

SEQ ID NO: 1895086 - DNA, 15 bp, Homo sapiens
ccaccacagtggtgg

SEQ ID NO: 1895087 - DNA, 15 bp, Homo sapiens
caccacagtggtggg

SEQ ID NO: 1895088 - DNA, 15 bp, Homo sapiens
accacagtggtgggg

SEQ ID NO: 1895089 - DNA, 15 bp, Homo sapiens
ccacagtggtggggg

SEQ ID NO: 1895090 - DNA, 15 bp, Homo sapiens
cacagtggtgggggc

SEQ ID NO: 1895091 - DNA, 15 bp, Homo sapiens
acagtggtgggggca

SEQ ID NO: 1895092 - DNA, 15 bp, Homo sapiens
cagtggtgggggcaa

SEQ ID NO: 1895093 - DNA, 15 bp, Homo sapiens
agtggtgggggcaat

SEQ ID NO: 1895094 - DNA, 15 bp, Homo sapiens
gtggtgggggcaatg

SEQ ID NO: 1895095 - DNA, 15 bp, Homo sapiens
tggtgggggcaatgc

SEQ ID NO: 1895096 - DNA, 15 bp, Homo sapiens
ggtgggggcaatgca

SEQ ID NO: 1895097 - DNA, 15 bp, Homo sapiens
gtgggggcaatgcaa

SEQ ID NO: 1895098 - DNA, 15 bp, Homo sapiens
tgggggcaatgcaac

SEQ ID NO: 1895099 - DNA, 15 bp, Homo sapiens
gggggcaatgcaacc

SEQ ID NO: 1895100 - DNA, 15 bp, Homo sapiens
ggggcaatgcaacca

SEQ ID NO: 1895101 - DNA, 15 bp, Homo sapiens
gggcaatgcaaccag

SEQ ID NO: 1895102 - DNA, 15 bp, Homo sapiens
ggcaatgcaaccagg

SEQ ID NO: 1895103 - DNA, 15 bp, Homo sapiens
gcaatgcaaccaggg

SEQ ID NO: 1895104 - DNA, 15 bp, Homo sapiens
caatgcaaccagggg

SEQ ID NO: 1895105 - DNA, 15 bp, Homo sapiens
aatgcaaccaggggg

SEQ ID NO: 1895106 - DNA, 15 bp, Homo sapiens
atgcaaccagggggt

SEQ ID NO: 1895107 - DNA, 15 bp, Homo sapiens
tgcaaccagggggta

SEQ ID NO: 1895108 - DNA, 15 bp, Homo sapiens
gcaaccagggggtac

SEQ ID NO: 1895109 - DNA, 15 bp, Homo sapiens
caaccagggggtaca

SEQ ID NO: 1895110 - DNA, 15 bp, Homo sapiens
aaccagggggtacag

SEQ ID NO: 1895111 - DNA, 15 bp, Homo sapiens
accagggggtacaga

SEQ ID NO: 1895112 - DNA, 15 bp, Homo sapiens
ccagggggtacagag

SEQ ID NO: 1895113 - DNA, 15 bp, Homo sapiens
cagggggtacagagg

SEQ ID NO: 1895114 - DNA, 15 bp, Homo sapiens
agggggtacagaggg

SEQ ID NO: 1895115 - DNA, 15 bp, Homo sapiens
gggggtacagagggc

SEQ ID NO: 1895116 - DNA, 15 bp, Homo sapiens
ggggtacagagggcc

SEQ ID NO: 1895117 - DNA, 15 bp, Homo sapiens
gggtacagagggccc

SEQ ID NO: 1895118 - DNA, 15 bp, Homo sapiens
ggtacagagggcccc

SEQ ID NO: 1895119 - DNA, 15 bp, Homo sapiens
gtacagagggcccct

SEQ ID NO: 1895120 - DNA, 15 bp, Homo sapiens
tacagagggcccctg

SEQ ID NO: 1895121 - DNA, 15 bp, Homo sapiens
acagagggcccctgc

SEQ ID NO: 1895122 - DNA, 15 bp, Homo sapiens
cagagggcccctgct

SEQ ID NO: 1895123 - DNA, 15 bp, Homo sapiens
agagggcccctgctg

SEQ ID NO: 1895124 - DNA, 15 bp, Homo sapiens
gagggcccctgctgg

SEQ ID NO: 1895125 - DNA, 15 bp, Homo sapiens
agggcccctgctgga

SEQ ID NO: 1895126 - DNA, 15 bp, Homo sapiens
gggcccctgctggag

SEQ ID NO: 1895127 - DNA, 15 bp, Homo sapiens
ggcccctgctggagc

SEQ ID NO: 1895128 - DNA, 15 bp, Homo sapiens
gcccctgctggagcc

SEQ ID NO: 1895129 - DNA, 15 bp, Homo sapiens
cccctgctggagcct

SEQ ID NO: 1895130 - DNA, 15 bp, Homo sapiens
ccctgctggagccta

SEQ ID NO: 1895131 - DNA, 15 bp, Homo sapiens
cctgctggagcctat

SEQ ID NO: 1895132 - DNA, 15 bp, Homo sapiens
ctgctggagcctatg

SEQ ID NO: 1895133 - DNA, 15 bp, Homo sapiens
tgctggagcctatgt

SEQ ID NO: 1895134 - DNA, 15 bp, Homo sapiens
gctggagcctatgtg

SEQ ID NO: 1895135 - DNA, 15 bp, Homo sapiens
ctggagcctatgtgt

SEQ ID NO: 1895136 - DNA, 15 bp, Homo sapiens
tggagcctatgtgtg

SEQ ID NO: 1895137 - DNA, 15 bp, Homo sapiens
ggagcctatgtgtgc

SEQ ID NO: 1895138 - DNA, 15 bp, Homo sapiens
gagcctatgtgtgct

SEQ ID NO: 1895139 - DNA, 15 bp, Homo sapiens
agcctatgtgtgctg

SEQ ID NO: 1895140 - DNA, 15 bp, Homo sapiens
gcctatgtgtgctgt

SEQ ID NO: 1895141 - DNA, 15 bp, Homo sapiens
cctatgtgtgctgtt

SEQ ID NO: 1895142 - DNA, 15 bp, Homo sapiens
ctatgtgtgctgttg

SEQ ID NO: 1895143 - DNA, 15 bp, Homo sapiens
tatgtgtgctgttgc

SEQ ID NO: 1895144 - DNA, 15 bp, Homo sapiens
atgtgtgctgttgca

SEQ ID NO: 1895145 - DNA, 15 bp, Homo sapiens
tgtgtgctgttgcac

SEQ ID NO: 1895146 - DNA, 15 bp, Homo sapiens
gtgtgctgttgcact

SEQ ID NO: 1895147 - DNA, 15 bp, Homo sapiens
tgtgctgttgcacta

SEQ ID NO: 1895148 - DNA, 15 bp, Homo sapiens
gtgctgttgcactag

SEQ ID NO: 1895149 - DNA, 15 bp, Homo sapiens
tgctgttgcactaga

SEQ ID NO: 1895150 - DNA, 15 bp, Homo sapiens
gctgttgcactagaa

SEQ ID NO: 1895151 - DNA, 15 bp, Homo sapiens
ctgttgcactagaag

SEQ ID NO: 1895152 - DNA, 15 bp, Homo sapiens
tgttgcactagaagt

SEQ ID NO: 1895153 - DNA, 15 bp, Homo sapiens
gttgcactagaagtg

SEQ ID NO: 1895154 - DNA, 15 bp, Homo sapiens
ttgcactagaagtgg

SEQ ID NO: 1895155 - DNA, 15 bp, Homo sapiens
tgcactagaagtggt

SEQ ID NO: 1895156 - DNA, 15 bp, Homo sapiens
gcactagaagtggtg

SEQ ID NO: 1895157 - DNA, 15 bp, Homo sapiens
cactagaagtggtgt

SEQ ID NO: 1895158 - DNA, 15 bp, Homo sapiens
actagaagtggtgtt

SEQ ID NO: 1895159 - DNA, 15 bp, Homo sapiens
ctagaagtggtgttg

SEQ ID NO: 1895160 - DNA, 15 bp, Homo sapiens
tagaagtggtgttgg

SEQ ID NO: 1895161 - DNA, 15 bp, Homo sapiens
agaagtggtgttggc

SEQ ID NO: 1895162 - DNA, 15 bp, Homo sapiens
gaagtggtgttggct

SEQ ID NO: 1895163 - DNA, 15 bp, Homo sapiens
aagtggtgttggctt

SEQ ID NO: 1895164 - DNA, 15 bp, Homo sapiens
agtggtgttggcttg

SEQ ID NO: 1895165 - DNA, 15 bp, Homo sapiens
gtggtgttggcttgg

SEQ ID NO: 1895166 - DNA, 15 bp, Homo sapiens
tggtgttggcttggg

SEQ ID NO: 1895167 - DNA, 15 bp, Homo sapiens
ggtgttggcttgggg

SEQ ID NO: 1895168 - DNA, 15 bp, Homo sapiens
gtgttggcttggggc

SEQ ID NO: 1895169 - DNA, 15 bp, Homo sapiens
tgttggcttggggca

SEQ ID NO: 1895170 - DNA, 15 bp, Homo sapiens
gttggcttggggcag

SEQ ID NO: 1895171 - DNA, 15 bp, Homo sapiens
ttggcttggggcagg

SEQ ID NO: 1895172 - DNA, 15 bp, Homo sapiens
tggcttggggcagga

SEQ ID NO: 1895173 - DNA, 15 bp, Homo sapiens
ggcttggggcaggat

SEQ ID NO: 1895174 - DNA, 15 bp, Homo sapiens
gcttggggcaggatg

SEQ ID NO: 1895175 - DNA, 15 bp, Homo sapiens
cttggggcaggatgc

SEQ ID NO: 1895176 - DNA, 15 bp, Homo sapiens
ttggggcaggatgct

SEQ ID NO: 1895177 - DNA, 15 bp, Homo sapiens
tggggcaggatgctg

SEQ ID NO: 1895178 - DNA, 15 bp, Homo sapiens
ggggcaggatgctga

SEQ ID NO: 1895179 - DNA, 15 bp, Homo sapiens
gggcaggatgctgac

SEQ ID NO: 1895180 - DNA, 15 bp, Homo sapiens
ggcaggatgctgact

SEQ ID NO: 1895181 - DNA, 15 bp, Homo sapiens
gcaggatgctgacta

SEQ ID NO: 1895182 - DNA, 15 bp, Homo sapiens
caggatgctgactag

SEQ ID NO: 1895183 - DNA, 15 bp, Homo sapiens
aggatgctgactagc

SEQ ID NO: 1895184 - DNA, 15 bp, Homo sapiens
ggatgctgactagct

SEQ ID NO: 1895185 - DNA, 15 bp, Homo sapiens
gatgctgactagctc

SEQ ID NO: 1895186 - DNA, 15 bp, Homo sapiens
atgctgactagctca

SEQ ID NO: 1895187 - DNA, 15 bp, Homo sapiens
tgctgactagctcag

SEQ ID NO: 1895188 - DNA, 15 bp, Homo sapiens
gctgactagctcagg

SEQ ID NO: 1895189 - DNA, 15 bp, Homo sapiens
ctgactagctcaggc

SEQ ID NO: 1895190 - DNA, 15 bp, Homo sapiens
tgactagctcaggcc

SEQ ID NO: 1895191 - DNA, 15 bp, Homo sapiens
gactagctcaggcct

SEQ ID NO: 1895192 - DNA, 15 bp, Homo sapiens
actagctcaggcctg

SEQ ID NO: 1895193 - DNA, 15 bp, Homo sapiens
ctagctcaggcctgg

SEQ ID NO: 1895194 - DNA, 15 bp, Homo sapiens
tagctcaggcctggg

SEQ ID NO: 1895195 - DNA, 15 bp, Homo sapiens
agctcaggcctgggt

SEQ ID NO: 1895196 - DNA, 15 bp, Homo sapiens
gctcaggcctgggtg

SEQ ID NO: 1895197 - DNA, 15 bp, Homo sapiens
ctcaggcctgggtgc

SEQ ID NO: 1895198 - DNA, 15 bp, Homo sapiens
tcaggcctgggtgcc

SEQ ID NO: 1895199 - DNA, 15 bp, Homo sapiens
caggcctgggtgcct

SEQ ID NO: 1895200 - DNA, 15 bp, Homo sapiens
aggcctgggtgcctt

SEQ ID NO: 1895201 - DNA, 15 bp, Homo sapiens
ggcctgggtgccttc

SEQ ID NO: 1895202 - DNA, 15 bp, Homo sapiens
gcctgggtgccttct

SEQ ID NO: 1895203 - DNA, 15 bp, Homo sapiens
cctgggtgccttctc

SEQ ID NO: 1895204 - DNA, 15 bp, Homo sapiens
ctgggtgccttctcc

SEQ ID NO: 1895205 - DNA, 15 bp, Homo sapiens
tgggtgccttctcca

SEQ ID NO: 1895206 - DNA, 15 bp, Homo sapiens
gggtgccttctccat

SEQ ID NO: 1895207 - DNA, 15 bp, Homo sapiens
ggtgccttctccatg

SEQ ID NO: 1895208 - DNA, 15 bp, Homo sapiens
gtgccttctccatgc

SEQ ID NO: 1895209 - DNA, 15 bp, Homo sapiens
tgccttctccatgcc

SEQ ID NO: 1895210 - DNA, 15 bp, Homo sapiens
gccttctccatgccc

SEQ ID NO: 1895211 - DNA, 15 bp, Homo sapiens
ccttctccatgccct

SEQ ID NO: 1895212 - DNA, 15 bp, Homo sapiens
cttctccatgccctg

SEQ ID NO: 1895213 - DNA, 15 bp, Homo sapiens
ttctccatgccctgc

SEQ ID NO: 1895214 - DNA, 15 bp, Homo sapiens
tctccatgccctgca

SEQ ID NO: 1895215 - DNA, 15 bp, Homo sapiens
ctccatgccctgcaa

SEQ ID NO: 1895216 - DNA, 15 bp, Homo sapiens
tccatgccctgcaag

SEQ ID NO: 1895217 - DNA, 15 bp, Homo sapiens
ccatgccctgcaagc

SEQ ID NO: 1895218 - DNA, 15 bp, Homo sapiens
catgccctgcaagca

SEQ ID NO: 1895219 - DNA, 15 bp, Homo sapiens
atgccctgcaagcag

SEQ ID NO: 1895220 - DNA, 15 bp, Homo sapiens
tgccctgcaagcagg

SEQ ID NO: 1895221 - DNA, 15 bp, Homo sapiens
gccctgcaagcagga

SEQ ID NO: 1895222 - DNA, 15 bp, Homo sapiens
ccctgcaagcaggat

SEQ ID NO: 1895223 - DNA, 15 bp, Homo sapiens
cctgcaagcaggatc

SEQ ID NO: 1895224 - DNA, 15 bp, Homo sapiens
ctgcaagcaggatca

SEQ ID NO: 1895225 - DNA, 15 bp, Homo sapiens
tgcaagcaggatcac

SEQ ID NO: 1895226 - DNA, 15 bp, Homo sapiens
gcaagcaggatcact

SEQ ID NO: 1895227 - DNA, 15 bp, Homo sapiens
caagcaggatcactc

SEQ ID NO: 1895228 - DNA, 15 bp, Homo sapiens
aagcaggatcactca

SEQ ID NO: 1895229 - DNA, 15 bp, Homo sapiens
agcaggatcactcag

SEQ ID NO: 1895230 - DNA, 15 bp, Homo sapiens
gcaggatcactcagg

SEQ ID NO: 1895231 - DNA, 15 bp, Homo sapiens
caggatcactcaggg

SEQ ID NO: 1895232 - DNA, 15 bp, Homo sapiens
aggatcactcagggc

SEQ ID NO: 1895233 - DNA, 15 bp, Homo sapiens
ggatcactcagggca

SEQ ID NO: 1895234 - DNA, 15 bp, Homo sapiens
gatcactcagggcat

SEQ ID NO: 1895235 - DNA, 15 bp, Homo sapiens
atcactcagggcata

SEQ ID NO: 1895236 - DNA, 15 bp, Homo sapiens
tcactcagggcatag

SEQ ID NO: 1895237 - DNA, 15 bp, Homo sapiens
cactcagggcataga

SEQ ID NO: 1895238 - DNA, 15 bp, Homo sapiens
actcagggcatagaa

SEQ ID NO: 1895239 - DNA, 15 bp, Homo sapiens
ctcagggcatagaag

SEQ ID NO: 1895240 - DNA, 15 bp, Homo sapiens
tcagggcatagaagg

SEQ ID NO: 1895241 - DNA, 15 bp, Homo sapiens
cagggcatagaagga

SEQ ID NO: 1895242 - DNA, 15 bp, Homo sapiens
agggcatagaaggat

SEQ ID NO: 1895243 - DNA, 15 bp, Homo sapiens
gggcatagaaggatc

SEQ ID NO: 1895244 - DNA, 15 bp, Homo sapiens
ggcatagaaggatcc

SEQ ID NO: 1895245 - DNA, 15 bp, Homo sapiens
gcatagaaggatcca

SEQ ID NO: 1895246 - DNA, 15 bp, Homo sapiens
catagaaggatccat

SEQ ID NO: 1895247 - DNA, 15 bp, Homo sapiens
atagaaggatccatt

SEQ ID NO: 1895248 - DNA, 15 bp, Homo sapiens
tagaaggatccattg

SEQ ID NO: 1895249 - DNA, 15 bp, Homo sapiens
agaaggatccattgt

SEQ ID NO: 1895250 - DNA, 15 bp, Homo sapiens
gaaggatccattgtt

SEQ ID NO: 1895251 - DNA, 15 bp, Homo sapiens
aaggatccattgttg

SEQ ID NO: 1895252 - DNA, 15 bp, Homo sapiens
aggatccattgttgt

SEQ ID NO: 1895253 - DNA, 15 bp, Homo sapiens
ggatccattgttgtc

SEQ ID NO: 1895254 - DNA, 15 bp, Homo sapiens
gatccattgttgtct

SEQ ID NO: 1895255 - DNA, 15 bp, Homo sapiens
atccattgttgtctg

SEQ ID NO: 1895256 - DNA, 15 bp, Homo sapiens
tccattgttgtctgc

SEQ ID NO: 1895257 - DNA, 15 bp, Homo sapiens
ccattgttgtctgca

SEQ ID NO: 1895258 - DNA, 15 bp, Homo sapiens
cattgttgtctgcac

SEQ ID NO: 1895259 - DNA, 15 bp, Homo sapiens
attgttgtctgcaca

SEQ ID NO: 1895260 - DNA, 15 bp, Homo sapiens
ttgttgtctgcacag

SEQ ID NO: 1895261 - DNA, 15 bp, Homo sapiens
tgttgtctgcacagt

SEQ ID NO: 1895262 - DNA, 15 bp, Homo sapiens
gttgtctgcacagtg

SEQ ID NO: 1895263 - DNA, 15 bp, Homo sapiens
ttgtctgcacagtgt

SEQ ID NO: 1895264 - DNA, 15 bp, Homo sapiens
tgtctgcacagtgtt

SEQ ID NO: 1895265 - DNA, 15 bp, Homo sapiens
gtctgcacagtgtta

SEQ ID NO: 1895266 - DNA, 15 bp, Homo sapiens
tctgcacagtgttag

SEQ ID NO: 1895267 - DNA, 15 bp, Homo sapiens
ctgcacagtgttagt

SEQ ID NO: 1895268 - DNA, 15 bp, Homo sapiens
tgcacagtgttagtg

SEQ ID NO: 1895269 - DNA, 15 bp, Homo sapiens
gcacagtgttagtgc

SEQ ID NO: 1895270 - DNA, 15 bp, Homo sapiens
cacagtgttagtgca

SEQ ID NO: 1895271 - DNA, 15 bp, Homo sapiens
acagtgttagtgcaa

SEQ ID NO: 1895272 - DNA, 15 bp, Homo sapiens
cagtgttagtgcaaa

SEQ ID NO: 1895273 - DNA, 15 bp, Homo sapiens
agtgttagtgcaaaa

SEQ ID NO: 1895274 - DNA, 15 bp, Homo sapiens
gtgttagtgcaaaag

SEQ ID NO: 1895275 - DNA, 15 bp, Homo sapiens
tgttagtgcaaaagc

SEQ ID NO: 1895276 - DNA, 15 bp, Homo sapiens
gttagtgcaaaagca

SEQ ID NO: 1895277 - DNA, 15 bp, Homo sapiens
ttagtgcaaaagcag

SEQ ID NO: 1895278 - DNA, 15 bp, Homo sapiens
tagtgcaaaagcagg

SEQ ID NO: 1895279 - DNA, 15 bp, Homo sapiens
agtgcaaaagcaggg

SEQ ID NO: 1895280 - DNA, 15 bp, Homo sapiens
gtgcaaaagcagggc

SEQ ID NO: 1895281 - DNA, 15 bp, Homo sapiens
tgcaaaagcagggct

SEQ ID NO: 1895282 - DNA, 15 bp, Homo sapiens
gcaaaagcagggctc

SEQ ID NO: 1895283 - DNA, 15 bp, Homo sapiens
caaaagcagggctct

SEQ ID NO: 1895284 - DNA, 15 bp, Homo sapiens
aaaagcagggctctg

SEQ ID NO: 1895285 - DNA, 15 bp, Homo sapiens
aaagcagggctctgg

SEQ ID NO: 1895286 - DNA, 15 bp, Homo sapiens
aagcagggctctggt

SEQ ID NO: 1895287 - DNA, 15 bp, Homo sapiens
agcagggctctggtg

SEQ ID NO: 1895288 - DNA, 15 bp, Homo sapiens
gcagggctctggtga

SEQ ID NO: 1895289 - DNA, 15 bp, Homo sapiens
cagggctctggtgag

SEQ ID NO: 1895290 - DNA, 15 bp, Homo sapiens
agggctctggtgagg

SEQ ID NO: 1895291 - DNA, 15 bp, Homo sapiens
gggctctggtgaggg

SEQ ID NO: 1895292 - DNA, 15 bp, Homo sapiens
ggctctggtgagggt

SEQ ID NO: 1895293 - DNA, 15 bp, Homo sapiens
gctctggtgagggtg

SEQ ID NO: 1895294 - DNA, 15 bp, Homo sapiens
ctctggtgagggtgg

SEQ ID NO: 1895295 - DNA, 15 bp, Homo sapiens
tctggtgagggtggg

SEQ ID NO: 1895296 - DNA, 15 bp, Homo sapiens
ctggtgagggtgggg

SEQ ID NO: 1895297 - DNA, 15 bp, Homo sapiens
tggtgagggtggggc

SEQ ID NO: 1895298 - DNA, 15 bp, Homo sapiens
ggtgagggtggggct

SEQ ID NO: 1895299 - DNA, 15 bp, Homo sapiens
gtgagggtggggctt

SEQ ID NO: 1895300 - DNA, 15 bp, Homo sapiens
tgagggtggggcttg

SEQ ID NO: 1895301 - DNA, 15 bp, Homo sapiens
gagggtggggcttgc

SEQ ID NO: 1895302 - DNA, 15 bp, Homo sapiens
agggtggggcttgct

SEQ ID NO: 1895303 - DNA, 15 bp, Homo sapiens
gggtggggcttgctg

SEQ ID NO: 1895304 - DNA, 15 bp, Homo sapiens
ggtggggcttgctgg

SEQ ID NO: 1895305 - DNA, 15 bp, Homo sapiens
gtggggcttgctggc

SEQ ID NO: 1895306 - DNA, 15 bp, Homo sapiens
tggggcttgctggct

SEQ ID NO: 1895307 - DNA, 15 bp, Homo sapiens
ggggcttgctggctc

SEQ ID NO: 1895308 - DNA, 15 bp, Homo sapiens
gggcttgctggctct

SEQ ID NO: 1895309 - DNA, 15 bp, Homo sapiens
ggcttgctggctctg

SEQ ID NO: 1895310 - DNA, 15 bp, Homo sapiens
gcttgctggctctgt

SEQ ID NO: 1895311 - DNA, 15 bp, Homo sapiens
cttgctggctctgtg

SEQ ID NO: 1895312 - DNA, 15 bp, Homo sapiens
ttgctggctctgtgc

SEQ ID NO: 1895313 - DNA, 15 bp, Homo sapiens
tgctggctctgtgcc

SEQ ID NO: 1895314 - DNA, 15 bp, Homo sapiens
gctggctctgtgcca

SEQ ID NO: 1895315 - DNA, 15 bp, Homo sapiens
ctggctctgtgccag

SEQ ID NO: 1895316 - DNA, 15 bp, Homo sapiens
tggctctgtgccagc

SEQ ID NO: 1895317 - DNA, 15 bp, Homo sapiens
ggctctgtgccagcc

SEQ ID NO: 1895318 - DNA, 15 bp, Homo sapiens
gctctgtgccagcca

SEQ ID NO: 1895319 - DNA, 15 bp, Homo sapiens
ctctgtgccagccaa

SEQ ID NO: 1895320 - DNA, 15 bp, Homo sapiens
tctgtgccagccaag

SEQ ID NO: 1895321 - DNA, 15 bp, Homo sapiens
ctgtgccagccaagg

SEQ ID NO: 1895322 - DNA, 15 bp, Homo sapiens
tgtgccagccaaggc

SEQ ID NO: 1895323 - DNA, 15 bp, Homo sapiens
gtgccagccaaggct

SEQ ID NO: 1895324 - DNA, 15 bp, Homo sapiens
tgccagccaaggctc

SEQ ID NO: 1895325 - DNA, 15 bp, Homo sapiens
gccagccaaggctcc

SEQ ID NO: 1895326 - DNA, 15 bp, Homo sapiens
ccagccaaggctccc

SEQ ID NO: 1895327 - DNA, 15 bp, Homo sapiens
cagccaaggctccct

SEQ ID NO: 1895328 - DNA, 15 bp, Homo sapiens
agccaaggctccctg

SEQ ID NO: 1895329 - DNA, 15 bp, Homo sapiens
gccaaggctccctgc

SEQ ID NO: 1895330 - DNA, 15 bp, Homo sapiens
ccaaggctccctgca

SEQ ID NO: 1895331 - DNA, 15 bp, Homo sapiens
caaggctccctgcaa

SEQ ID NO: 1895332 - DNA, 15 bp, Homo sapiens
aaggctccctgcaat

SEQ ID NO: 1895333 - DNA, 15 bp, Homo sapiens
aggctccctgcaatg

SEQ ID NO: 1895334 - DNA, 15 bp, Homo sapiens
ggctccctgcaatgg

SEQ ID NO: 1895335 - DNA, 15 bp, Homo sapiens
gctccctgcaatggt

SEQ ID NO: 1895336 - DNA, 15 bp, Homo sapiens
ctccctgcaatggtg

SEQ ID NO: 1895337 - DNA, 15 bp, Homo sapiens
tccctgcaatggtgg

SEQ ID NO: 1895338 - DNA, 15 bp, Homo sapiens
ccctgcaatggtggt

SEQ ID NO: 1895339 - DNA, 15 bp, Homo sapiens
cctgcaatggtggtt

SEQ ID NO: 1895340 - DNA, 15 bp, Homo sapiens
ctgcaatggtggtta

SEQ ID NO: 1895341 - DNA, 15 bp, Homo sapiens
tgcaatggtggttag

SEQ ID NO: 1895342 - DNA, 15 bp, Homo sapiens
gcaatggtggttagt

SEQ ID NO: 1895343 - DNA, 15 bp, Homo sapiens
caatggtggttagtg

SEQ ID NO: 1895344 - DNA, 15 bp, Homo sapiens
aatggtggttagtga

SEQ ID NO: 1895345 - DNA, 15 bp, Homo sapiens
atggtggttagtgag

SEQ ID NO: 1895346 - DNA, 15 bp, Homo sapiens
tggtggttagtgagt

SEQ ID NO: 1895347 - DNA, 15 bp, Homo sapiens
ggtggttagtgagtg

SEQ ID NO: 1895348 - DNA, 15 bp, Homo sapiens
gtggttagtgagtga

SEQ ID NO: 1895349 - DNA, 15 bp, Homo sapiens
tggttagtgagtgaa

SEQ ID NO: 1895350 - DNA, 15 bp, Homo sapiens
ggttagtgagtgaag

SEQ ID NO: 1895351 - DNA, 15 bp, Homo sapiens
gttagtgagtgaagg

SEQ ID NO: 1895352 - DNA, 15 bp, Homo sapiens
ttagtgagtgaaggg

SEQ ID NO: 1895353 - DNA, 15 bp, Homo sapiens
tagtgagtgaagggg

SEQ ID NO: 1895354 - DNA, 15 bp, Homo sapiens
agtgagtgaagggga

SEQ ID NO: 1895355 - DNA, 15 bp, Homo sapiens
gtgagtgaaggggag

SEQ ID NO: 1895356 - DNA, 15 bp, Homo sapiens
tgagtgaaggggagt

SEQ ID NO: 1895357 - DNA, 15 bp, Homo sapiens
gagtgaaggggagtg

SEQ ID NO: 1895358 - DNA, 15 bp, Homo sapiens
agtgaaggggagtgg

SEQ ID NO: 1895359 - DNA, 15 bp, Homo sapiens
gtgaaggggagtgga

SEQ ID NO: 1895360 - DNA, 15 bp, Homo sapiens
tgaaggggagtggac

SEQ ID NO: 1895361 - DNA, 15 bp, Homo sapiens
gaaggggagtggact

SEQ ID NO: 1895362 - DNA, 15 bp, Homo sapiens
aaggggagtggactg

SEQ ID NO: 1895363 - DNA, 15 bp, Homo sapiens
aggggagtggactgc

SEQ ID NO: 1895364 - DNA, 15 bp, Homo sapiens
ggggagtggactgca

SEQ ID NO: 1895365 - DNA, 15 bp, Homo sapiens
gggagtggactgcac

SEQ ID NO: 1895366 - DNA, 15 bp, Homo sapiens
ggagtggactgcact

SEQ ID NO: 1895367 - DNA, 15 bp, Homo sapiens
gagtggactgcactc

SEQ ID NO: 1895368 - DNA, 15 bp, Homo sapiens
agtggactgcactct

SEQ ID NO: 1895369 - DNA, 15 bp, Homo sapiens
gtggactgcactctt

SEQ ID NO: 1895370 - DNA, 15 bp, Homo sapiens
tggactgcactcttg

SEQ ID NO: 1895371 - DNA, 15 bp, Homo sapiens
ggactgcactcttgc

SEQ ID NO: 1895372 - DNA, 15 bp, Homo sapiens
gactgcactcttgca

SEQ ID NO: 1895373 - DNA, 15 bp, Homo sapiens
actgcactcttgcat

SEQ ID NO: 1895374 - DNA, 15 bp, Homo sapiens
ctgcactcttgcatc

SEQ ID NO: 1895375 - DNA, 15 bp, Homo sapiens
tgcactcttgcatcc

SEQ ID NO: 1895376 - DNA, 15 bp, Homo sapiens
gcactcttgcatcct

SEQ ID NO: 1895377 - DNA, 15 bp, Homo sapiens
cactcttgcatcctg

SEQ ID NO: 1895378 - DNA, 15 bp, Homo sapiens
actcttgcatcctga

SEQ ID NO: 1895379 - DNA, 15 bp, Homo sapiens
ctcttgcatcctgat

SEQ ID NO: 1895380 - DNA, 15 bp, Homo sapiens
tcttgcatcctgatg

SEQ ID NO: 1895381 - DNA, 15 bp, Homo sapiens
cttgcatcctgatgg

SEQ ID NO: 1895382 - DNA, 15 bp, Homo sapiens
ttgcatcctgatggg

SEQ ID NO: 1895383 - DNA, 15 bp, Homo sapiens
tgcatcctgatgggc

SEQ ID NO: 1895384 - DNA, 15 bp, Homo sapiens
gcatcctgatgggca

SEQ ID NO: 1895385 - DNA, 15 bp, Homo sapiens
catcctgatgggcaa

SEQ ID NO: 1895386 - DNA, 15 bp, Homo sapiens
atcctgatgggcaaa

SEQ ID NO: 1895387 - DNA, 15 bp, Homo sapiens
tcctgatgggcaaag

SEQ ID NO: 1895388 - DNA, 15 bp, Homo sapiens
cctgatgggcaaagt

SEQ ID NO: 1895389 - DNA, 15 bp, Homo sapiens
ctgatgggcaaagta

SEQ ID NO: 1895390 - DNA, 15 bp, Homo sapiens
tgatgggcaaagtaa

SEQ ID NO: 1895391 - DNA, 15 bp, Homo sapiens
gatgggcaaagtaat

SEQ ID NO: 1895392 - DNA, 15 bp, Homo sapiens
atgggcaaagtaatg

SEQ ID NO: 1895393 - DNA, 15 bp, Homo sapiens
tgggcaaagtaatgc

SEQ ID NO: 1895394 - DNA, 15 bp, Homo sapiens
gggcaaagtaatgca

SEQ ID NO: 1895395 - DNA, 15 bp, Homo sapiens
ggcaaagtaatgcaa

SEQ ID NO: 1895396 - DNA, 15 bp, Homo sapiens
gcaaagtaatgcaaa

SEQ ID NO: 1895397 - DNA, 15 bp, Homo sapiens
caaagtaatgcaaaa

SEQ ID NO: 1895398 - DNA, 15 bp, Homo sapiens
aaagtaatgcaaaac

SEQ ID NO: 1895399 - DNA, 15 bp, Homo sapiens
aagtaatgcaaaacc

SEQ ID NO: 1895400 - DNA, 15 bp, Homo sapiens
agtaatgcaaaaccc

SEQ ID NO: 1895401 - DNA, 15 bp, Homo sapiens
gtaatgcaaaaccca

SEQ ID NO: 1895402 - DNA, 15 bp, Homo sapiens
taatgcaaaacccac

SEQ ID NO: 1895403 - DNA, 15 bp, Homo sapiens
aatgcaaaacccacc

SEQ ID NO: 1895404 - DNA, 15 bp, Homo sapiens
atgcaaaacccacct

SEQ ID NO: 1895405 - DNA, 15 bp, Homo sapiens
tgcaaaacccacctg

SEQ ID NO: 1895406 - DNA, 15 bp, Homo sapiens
gcaaaacccacctgt

SEQ ID NO: 1895407 - DNA, 15 bp, Homo sapiens
caaaacccacctgtg

SEQ ID NO: 1895408 - DNA, 15 bp, Homo sapiens
aaaacccacctgtga

SEQ ID NO: 1895409 - DNA, 15 bp, Homo sapiens
aaacccacctgtgaa

SEQ ID NO: 1895410 - DNA, 15 bp, Homo sapiens
aacccacctgtgaag

SEQ ID NO: 1895411 - DNA, 15 bp, Homo sapiens
acccacctgtgaaga

SEQ ID NO: 1895412 - DNA, 15 bp, Homo sapiens
cccacctgtgaagac

SEQ ID NO: 1895413 - DNA, 15 bp, Homo sapiens
ccacctgtgaagaca

SEQ ID NO: 1895414 - DNA, 15 bp, Homo sapiens
cacctgtgaagacac

SEQ ID NO: 1895415 - DNA, 15 bp, Homo sapiens
acctgtgaagacaca

SEQ ID NO: 1895416 - DNA, 15 bp, Homo sapiens
cctgtgaagacacac

SEQ ID NO: 1895417 - DNA, 15 bp, Homo sapiens
ctgtgaagacacaca

SEQ ID NO: 1895418 - DNA, 15 bp, Homo sapiens
tgtgaagacacacac

SEQ ID NO: 1895419 - DNA, 15 bp, Homo sapiens
gtgaagacacacacc

SEQ ID NO: 1895420 - DNA, 15 bp, Homo sapiens
tgaagacacacacca

SEQ ID NO: 1895421 - DNA, 15 bp, Homo sapiens
gaagacacacaccag

SEQ ID NO: 1895422 - DNA, 15 bp, Homo sapiens
aagacacacaccagc

SEQ ID NO: 1895423 - DNA, 15 bp, Homo sapiens
agacacacaccagca

SEQ ID NO: 1895424 - DNA, 15 bp, Homo sapiens
gacacacaccagcaa

SEQ ID NO: 1895425 - DNA, 15 bp, Homo sapiens
acacacaccagcaaa

SEQ ID NO: 1895426 - DNA, 15 bp, Homo sapiens
cacacaccagcaaag

SEQ ID NO: 1895427 - DNA, 15 bp, Homo sapiens
acacaccagcaaagt

SEQ ID NO: 1895428 - DNA, 15 bp, Homo sapiens
cacaccagcaaagtg

SEQ ID NO: 1895429 - DNA, 15 bp, Homo sapiens
acaccagcaaagtga

SEQ ID NO: 1895430 - DNA, 15 bp, Homo sapiens
caccagcaaagtgat

SEQ ID NO: 1895431 - DNA, 15 bp, Homo sapiens
accagcaaagtgata

SEQ ID NO: 1895432 - DNA, 15 bp, Homo sapiens
ccagcaaagtgatat

SEQ ID NO: 1895433 - DNA, 15 bp, Homo sapiens
cagcaaagtgatatg

SEQ ID NO: 1895434 - DNA, 15 bp, Homo sapiens
agcaaagtgatatga

SEQ ID NO: 1895435 - DNA, 15 bp, Homo sapiens
gcaaagtgatatgag

SEQ ID NO: 1895436 - DNA, 15 bp, Homo sapiens
caaagtgatatgagg

SEQ ID NO: 1895437 - DNA, 15 bp, Homo sapiens
aaagtgatatgagga

SEQ ID NO: 1895438 - DNA, 15 bp, Homo sapiens
aagtgatatgaggaa

SEQ ID NO: 1895439 - DNA, 15 bp, Homo sapiens
agtgatatgaggaat

SEQ ID NO: 1895440 - DNA, 15 bp, Homo sapiens
gtgatatgaggaatt

SEQ ID NO: 1895441 - DNA, 15 bp, Homo sapiens
tgatatgaggaattg

SEQ ID NO: 1895442 - DNA, 15 bp, Homo sapiens
gatatgaggaattga

SEQ ID NO: 1895443 - DNA, 15 bp, Homo sapiens
atatgaggaattgat

SEQ ID NO: 1895444 - DNA, 15 bp, Homo sapiens
tatgaggaattgatg

SEQ ID NO: 1895445 - DNA, 15 bp, Homo sapiens
atgaggaattgatgt

SEQ ID NO: 1895446 - DNA, 15 bp, Homo sapiens
tgaggaattgatgtg

SEQ ID NO: 1895447 - DNA, 15 bp, Homo sapiens
gaggaattgatgtgg

SEQ ID NO: 1895448 - DNA, 15 bp, Homo sapiens
aggaattgatgtggg

SEQ ID NO: 1895449 - DNA, 15 bp, Homo sapiens
ggaattgatgtgggc

SEQ ID NO: 1895450 - DNA, 15 bp, Homo sapiens
gaattgatgtgggct

SEQ ID NO: 1895451 - DNA, 15 bp, Homo sapiens
aattgatgtgggctt

SEQ ID NO: 1895452 - DNA, 15 bp, Homo sapiens
attgatgtgggcttg

SEQ ID NO: 1895453 - DNA, 15 bp, Homo sapiens
ttgatgtgggcttgg

SEQ ID NO: 1895454 - DNA, 15 bp, Homo sapiens
tgatgtgggcttggg

SEQ ID NO: 1895455 - DNA, 15 bp, Homo sapiens
gatgtgggcttgggg

SEQ ID NO: 1895456 - DNA, 15 bp, Homo sapiens
atgtgggcttgggga

SEQ ID NO: 1895457 - DNA, 15 bp, Homo sapiens
tgtgggcttggggaa

SEQ ID NO: 1895458 - DNA, 15 bp, Homo sapiens
gtgggcttggggaaa

SEQ ID NO: 1895459 - DNA, 15 bp, Homo sapiens
tgggcttggggaaag

SEQ ID NO: 1895460 - DNA, 15 bp, Homo sapiens
gggcttggggaaagc

SEQ ID NO: 1895461 - DNA, 15 bp, Homo sapiens
ggcttggggaaagct

SEQ ID NO: 1895462 - DNA, 15 bp, Homo sapiens
gcttggggaaagctg

SEQ ID NO: 1895463 - DNA, 15 bp, Homo sapiens
cttggggaaagctgc

SEQ ID NO: 1895464 - DNA, 15 bp, Homo sapiens
ttggggaaagctgca

SEQ ID NO: 1895465 - DNA, 15 bp, Homo sapiens
tggggaaagctgcag

SEQ ID NO: 1895466 - DNA, 15 bp, Homo sapiens
ggggaaagctgcagt

SEQ ID NO: 1895467 - DNA, 15 bp, Homo sapiens
gggaaagctgcagta

SEQ ID NO: 1895468 - DNA, 15 bp, Homo sapiens
ggaaagctgcagtat

SEQ ID NO: 1895469 - DNA, 15 bp, Homo sapiens
gaaagctgcagtatg

SEQ ID NO: 1895470 - DNA, 15 bp, Homo sapiens
aaagctgcagtatgg

SEQ ID NO: 1895471 - DNA, 15 bp, Homo sapiens
aagctgcagtatggg

SEQ ID NO: 1895472 - DNA, 15 bp, Homo sapiens
agctgcagtatgggg

SEQ ID NO: 1895473 - DNA, 15 bp, Homo sapiens
gctgcagtatgggga

SEQ ID NO: 1895474 - DNA, 15 bp, Homo sapiens
ctgcagtatggggag

SEQ ID NO: 1895475 - DNA, 15 bp, Homo sapiens
tgcagtatggggagg

SEQ ID NO: 1895476 - DNA, 15 bp, Homo sapiens
gcagtatggggaggg

SEQ ID NO: 1895477 - DNA, 15 bp, Homo sapiens
cagtatggggagggg

SEQ ID NO: 1895478 - DNA, 15 bp, Homo sapiens
agtatggggaggggg

SEQ ID NO: 1895479 - DNA, 15 bp, Homo sapiens
gtatggggagggggc

SEQ ID NO: 1895480 - DNA, 15 bp, Homo sapiens
tatggggagggggca

SEQ ID NO: 1895481 - DNA, 15 bp, Homo sapiens
atggggagggggcat

SEQ ID NO: 1895482 - DNA, 15 bp, Homo sapiens
tggggagggggcata

SEQ ID NO: 1895483 - DNA, 15 bp, Homo sapiens
ggggagggggcatac

SEQ ID NO: 1895484 - DNA, 15 bp, Homo sapiens
gggagggggcataca

SEQ ID NO: 1895485 - DNA, 15 bp, Homo sapiens
ggagggggcatacag

SEQ ID NO: 1895486 - DNA, 15 bp, Homo sapiens
gagggggcatacagg

SEQ ID NO: 1895487 - DNA, 15 bp, Homo sapiens
agggggcatacaggc

SEQ ID NO: 1895488 - DNA, 15 bp, Homo sapiens
gggggcatacaggct

SEQ ID NO: 1895489 - DNA, 15 bp, Homo sapiens
ggggcatacaggctg

SEQ ID NO: 1895490 - DNA, 15 bp, Homo sapiens
gggcatacaggctgg

SEQ ID NO: 1895491 - DNA, 15 bp, Homo sapiens
ggcatacaggctggt

SEQ ID NO: 1895492 - DNA, 15 bp, Homo sapiens
gcatacaggctggtg

SEQ ID NO: 1895493 - DNA, 15 bp, Homo sapiens
catacaggctggtgt

SEQ ID NO: 1895494 - DNA, 15 bp, Homo sapiens
atacaggctggtgtg

SEQ ID NO: 1895495 - DNA, 15 bp, Homo sapiens
tacaggctggtgtga

SEQ ID NO: 1895496 - DNA, 15 bp, Homo sapiens
acaggctggtgtgag

SEQ ID NO: 1895497 - DNA, 15 bp, Homo sapiens
caggctggtgtgagg

SEQ ID NO: 1895498 - DNA, 15 bp, Homo sapiens
aggctggtgtgaggc

SEQ ID NO: 1895499 - DNA, 15 bp, Homo sapiens
ggctggtgtgaggcc

SEQ ID NO: 1895500 - DNA, 15 bp, Homo sapiens
gctggtgtgaggcca

SEQ ID NO: 1895501 - DNA, 15 bp, Homo sapiens
ctggtgtgaggccat

SEQ ID NO: 1895502 - DNA, 15 bp, Homo sapiens
tggtgtgaggccata

SEQ ID NO: 1895503 - DNA, 15 bp, Homo sapiens
ggtgtgaggccatag

SEQ ID NO: 1895504 - DNA, 15 bp, Homo sapiens
gtgtgaggccatagg

SEQ ID NO: 1895505 - DNA, 15 bp, Homo sapiens
tgtgaggccataggg

SEQ ID NO: 1895506 - DNA, 15 bp, Homo sapiens
gtgaggccatagggg

SEQ ID NO: 1895507 - DNA, 15 bp, Homo sapiens
tgaggccataggggc

SEQ ID NO: 1895508 - DNA, 15 bp, Homo sapiens
gaggccataggggct

SEQ ID NO: 1895509 - DNA, 15 bp, Homo sapiens
aggccataggggctg

SEQ ID NO: 1895510 - DNA, 15 bp, Homo sapiens
ggccataggggctgg

SEQ ID NO: 1895511 - DNA, 15 bp, Homo sapiens
gccataggggctggc

SEQ ID NO: 1895512 - DNA, 15 bp, Homo sapiens
ccataggggctggct

SEQ ID NO: 1895513 - DNA, 15 bp, Homo sapiens
cataggggctggctc

SEQ ID NO: 1895514 - DNA, 15 bp, Homo sapiens
ataggggctggctca

SEQ ID NO: 1895515 - DNA, 15 bp, Homo sapiens
taggggctggctcac

SEQ ID NO: 1895516 - DNA, 15 bp, Homo sapiens
aggggctggctcact

SEQ ID NO: 1895517 - DNA, 15 bp, Homo sapiens
ggggctggctcactg

SEQ ID NO: 1895518 - DNA, 15 bp, Homo sapiens
gggctggctcactgg

SEQ ID NO: 1895519 - DNA, 15 bp, Homo sapiens
ggctggctcactgga

SEQ ID NO: 1895520 - DNA, 15 bp, Homo sapiens
gctggctcactggag

SEQ ID NO: 1895521 - DNA, 15 bp, Homo sapiens
ctggctcactggagc

SEQ ID NO: 1895522 - DNA, 15 bp, Homo sapiens
tggctcactggagct

SEQ ID NO: 1895523 - DNA, 15 bp, Homo sapiens
ggctcactggagctc

SEQ ID NO: 1895524 - DNA, 15 bp, Homo sapiens
gctcactggagctct

SEQ ID NO: 1895525 - DNA, 15 bp, Homo sapiens
ctcactggagctctg

SEQ ID NO: 1895526 - DNA, 15 bp, Homo sapiens
tcactggagctctgt

SEQ ID NO: 1895527 - DNA, 15 bp, Homo sapiens
cactggagctctgtg

SEQ ID NO: 1895528 - DNA, 15 bp, Homo sapiens
actggagctctgtgc

SEQ ID NO: 1895529 - DNA, 15 bp, Homo sapiens
ctggagctctgtgcc

SEQ ID NO: 1895530 - DNA, 15 bp, Homo sapiens
tggagctctgtgcca

SEQ ID NO: 1895531 - DNA, 15 bp, Homo sapiens
ggagctctgtgccag

SEQ ID NO: 1895532 - DNA, 15 bp, Homo sapiens
gagctctgtgccagt

SEQ ID NO: 1895533 - DNA, 15 bp, Homo sapiens
agctctgtgccagtc

SEQ ID NO: 1895534 - DNA, 15 bp, Homo sapiens
gctctgtgccagtca

SEQ ID NO: 1895535 - DNA, 15 bp, Homo sapiens
ctctgtgccagtcag

SEQ ID NO: 1895536 - DNA, 15 bp, Homo sapiens
tctgtgccagtcagg

SEQ ID NO: 1895537 - DNA, 15 bp, Homo sapiens
ctgtgccagtcaggt

SEQ ID NO: 1895538 - DNA, 15 bp, Homo sapiens
tgtgccagtcaggta

SEQ ID NO: 1895539 - DNA, 15 bp, Homo sapiens
gtgccagtcaggtaa

SEQ ID NO: 1895540 - DNA, 15 bp, Homo sapiens
tgccagtcaggtaag

SEQ ID NO: 1895541 - DNA, 15 bp, Homo sapiens
gccagtcaggtaagg

SEQ ID NO: 1895542 - DNA, 15 bp, Homo sapiens
ccagtcaggtaaggt

SEQ ID NO: 1895543 - DNA, 15 bp, Homo sapiens
cagtcaggtaaggtc

SEQ ID NO: 1895544 - DNA, 15 bp, Homo sapiens
agtcaggtaaggtct

SEQ ID NO: 1895545 - DNA, 15 bp, Homo sapiens
gtcaggtaaggtctg

SEQ ID NO: 1895546 - DNA, 15 bp, Homo sapiens
tcaggtaaggtctgc

SEQ ID NO: 1895547 - DNA, 15 bp, Homo sapiens
caggtaaggtctgcc

SEQ ID NO: 1895548 - DNA, 15 bp, Homo sapiens
aggtaaggtctgcca

SEQ ID NO: 1895549 - DNA, 15 bp, Homo sapiens
ggtaaggtctgccag

SEQ ID NO: 1895550 - DNA, 15 bp, Homo sapiens
gtaaggtctgccagt

SEQ ID NO: 1895551 - DNA, 15 bp, Homo sapiens
taaggtctgccagta

SEQ ID NO: 1895552 - DNA, 15 bp, Homo sapiens
aaggtctgccagtac

SEQ ID NO: 1895553 - DNA, 15 bp, Homo sapiens
aggtctgccagtaca

SEQ ID NO: 1895554 - DNA, 15 bp, Homo sapiens
ggtctgccagtacag

SEQ ID NO: 1895555 - DNA, 15 bp, Homo sapiens
gtctgccagtacaga

SEQ ID NO: 1895556 - DNA, 15 bp, Homo sapiens
tctgccagtacagaa

SEQ ID NO: 1895557 - DNA, 15 bp, Homo sapiens
ctgccagtacagaag

SEQ ID NO: 1895558 - DNA, 15 bp, Homo sapiens
tgccagtacagaagc

SEQ ID NO: 1895559 - DNA, 15 bp, Homo sapiens
gccagtacagaagct

SEQ ID NO: 1895560 - DNA, 15 bp, Homo sapiens
ccagtacagaagcta

SEQ ID NO: 1895561 - DNA, 15 bp, Homo sapiens
cagtacagaagctat

SEQ ID NO: 1895562 - DNA, 15 bp, Homo sapiens
agtacagaagctatg

SEQ ID NO: 1895563 - DNA, 15 bp, Homo sapiens
gtacagaagctatgg

SEQ ID NO: 1895564 - DNA, 15 bp, Homo sapiens
tacagaagctatggt

SEQ ID NO: 1895565 - DNA, 15 bp, Homo sapiens
acagaagctatggtg

SEQ ID NO: 1895566 - DNA, 15 bp, Homo sapiens
cagaagctatggtgt

SEQ ID NO: 1895567 - DNA, 15 bp, Homo sapiens
agaagctatggtgtg

SEQ ID NO: 1895568 - DNA, 15 bp, Homo sapiens
gaagctatggtgtgg

SEQ ID NO: 1895569 - DNA, 15 bp, Homo sapiens
aagctatggtgtggg

SEQ ID NO: 1895570 - DNA, 15 bp, Homo sapiens
agctatggtgtgggc

SEQ ID NO: 1895571 - DNA, 15 bp, Homo sapiens
gctatggtgtgggcc

SEQ ID NO: 1895572 - DNA, 15 bp, Homo sapiens
ctatggtgtgggccc

SEQ ID NO: 1895573 - DNA, 15 bp, Homo sapiens
tatggtgtgggcccc

SEQ ID NO: 1895574 - DNA, 15 bp, Homo sapiens
atggtgtgggccccc

SEQ ID NO: 1895575 - DNA, 15 bp, Homo sapiens
tggtgtgggcccccc

SEQ ID NO: 1895576 - DNA, 15 bp, Homo sapiens
ggtgtgggccccccg

SEQ ID NO: 1895577 - DNA, 15 bp, Homo sapiens
gtgtgggccccccgg

SEQ ID NO: 1895578 - DNA, 15 bp, Homo sapiens
tgtgggccccccggg

SEQ ID NO: 1895579 - DNA, 15 bp, Homo sapiens
gtgggccccccgggc

SEQ ID NO: 1895580 - DNA, 15 bp, Homo sapiens
tgggccccccgggca

SEQ ID NO: 1895581 - DNA, 15 bp, Homo sapiens
gggccccccgggcac

SEQ ID NO: 1895582 - DNA, 15 bp, Homo sapiens
ggccccccgggcacc

SEQ ID NO: 1895583 - DNA, 15 bp, Homo sapiens
gccccccgggcaccc

SEQ ID NO: 1895584 - DNA, 15 bp, Homo sapiens
ccccccgggcaccca

SEQ ID NO: 1895585 - DNA, 15 bp, Homo sapiens
cccccgggcacccaa

SEQ ID NO: 1895586 - DNA, 15 bp, Homo sapiens
ccccgggcacccaaa

SEQ ID NO: 1895587 - DNA, 15 bp, Homo sapiens
cccgggcacccaaaa

SEQ ID NO: 1895588 - DNA, 15 bp, Homo sapiens
ccgggcacccaaaac

SEQ ID NO: 1895589 - DNA, 15 bp, Homo sapiens
cgggcacccaaaact

SEQ ID NO: 1895590 - DNA, 15 bp, Homo sapiens
gggcacccaaaactg

SEQ ID NO: 1895591 - DNA, 15 bp, Homo sapiens
ggcacccaaaactgc

SEQ ID NO: 1895592 - DNA, 15 bp, Homo sapiens
gcacccaaaactgct

SEQ ID NO: 1895593 - DNA, 15 bp, Homo sapiens
cacccaaaactgctc

SEQ ID NO: 1895594 - DNA, 15 bp, Homo sapiens
acccaaaactgctct

SEQ ID NO: 1895595 - DNA, 15 bp, Homo sapiens
cccaaaactgctctg

SEQ ID NO: 1895596 - DNA, 15 bp, Homo sapiens
ccaaaactgctctgt

SEQ ID NO: 1895597 - DNA, 15 bp, Homo sapiens
caaaactgctctgta

SEQ ID NO: 1895598 - DNA, 15 bp, Homo sapiens
aaaactgctctgtaa

SEQ ID NO: 1895599 - DNA, 15 bp, Homo sapiens
aaactgctctgtaag

SEQ ID NO: 1895600 - DNA, 15 bp, Homo sapiens
aactgctctgtaagc

SEQ ID NO: 1895601 - DNA, 15 bp, Homo sapiens
actgctctgtaagct

SEQ ID NO: 1895602 - DNA, 15 bp, Homo sapiens
ctgctctgtaagctg

SEQ ID NO: 1895603 - DNA, 15 bp, Homo sapiens
tgctctgtaagctgg

SEQ ID NO: 1895604 - DNA, 15 bp, Homo sapiens
gctctgtaagctggc

SEQ ID NO: 1895605 - DNA, 15 bp, Homo sapiens
ctctgtaagctggca

SEQ ID NO: 1895606 - DNA, 15 bp, Homo sapiens
tctgtaagctggcat

SEQ ID NO: 1895607 - DNA, 15 bp, Homo sapiens
ctgtaagctggcatg

SEQ ID NO: 1895608 - DNA, 15 bp, Homo sapiens
tgtaagctggcatga

SEQ ID NO: 1895609 - DNA, 15 bp, Homo sapiens
gtaagctggcatgac

SEQ ID NO: 1895610 - DNA, 15 bp, Homo sapiens
taagctggcatgacc

SEQ ID NO: 1895611 - DNA, 15 bp, Homo sapiens
aagctggcatgacca

SEQ ID NO: 1895612 - DNA, 15 bp, Homo sapiens
agctggcatgaccag

SEQ ID NO: 1895613 - DNA, 15 bp, Homo sapiens
gctggcatgaccagg

SEQ ID NO: 1895614 - DNA, 15 bp, Homo sapiens
ctggcatgaccaggc

SEQ ID NO: 1895615 - DNA, 15 bp, Homo sapiens
tggcatgaccaggct

SEQ ID NO: 1895616 - DNA, 15 bp, Homo sapiens
ggcatgaccaggctg

SEQ ID NO: 1895617 - DNA, 15 bp, Homo sapiens
gcatgaccaggctgg

SEQ ID NO: 1895618 - DNA, 15 bp, Homo sapiens
catgaccaggctggg

SEQ ID NO: 1895619 - DNA, 15 bp, Homo sapiens
atgaccaggctgggg

SEQ ID NO: 1895620 - DNA, 15 bp, Homo sapiens
tgaccaggctggggc

SEQ ID NO: 1895621 - DNA, 15 bp, Homo sapiens
gaccaggctggggcc

SEQ ID NO: 1895622 - DNA, 15 bp, Homo sapiens
accaggctggggccc

SEQ ID NO: 1895623 - DNA, 15 bp, Homo sapiens
ccaggctggggccct

SEQ ID NO: 1895624 - DNA, 15 bp, Homo sapiens
caggctggggccctg

SEQ ID NO: 1895625 - DNA, 15 bp, Homo sapiens
aggctggggccctgg

SEQ ID NO: 1895626 - DNA, 15 bp, Homo sapiens
ggctggggccctggg

SEQ ID NO: 1895627 - DNA, 15 bp, Homo sapiens
gctggggccctggga

SEQ ID NO: 1895628 - DNA, 15 bp, Homo sapiens
ctggggccctgggag

SEQ ID NO: 1895629 - DNA, 15 bp, Homo sapiens
tggggccctgggaga

SEQ ID NO: 1895630 - DNA, 15 bp, Homo sapiens
ggggccctgggagag

SEQ ID NO: 1895631 - DNA, 15 bp, Homo sapiens
gggccctgggagagg

SEQ ID NO: 1895632 - DNA, 15 bp, Homo sapiens
ggccctgggagaggc

SEQ ID NO: 1895633 - DNA, 15 bp, Homo sapiens
gccctgggagaggcc

SEQ ID NO: 1895634 - DNA, 15 bp, Homo sapiens
ccctgggagaggcca

SEQ ID NO: 1895635 - DNA, 15 bp, Homo sapiens
cctgggagaggccag

SEQ ID NO: 1895636 - DNA, 15 bp, Homo sapiens
ctgggagaggccagg

SEQ ID NO: 1895637 - DNA, 15 bp, Homo sapiens
tgggagaggccagga

SEQ ID NO: 1895638 - DNA, 15 bp, Homo sapiens
gggagaggccaggag

SEQ ID NO: 1895639 - DNA, 15 bp, Homo sapiens
ggagaggccaggaga

SEQ ID NO: 1895640 - DNA, 15 bp, Homo sapiens
gagaggccaggagac

SEQ ID NO: 1895641 - DNA, 15 bp, Homo sapiens
agaggccaggagacc

SEQ ID NO: 1895642 - DNA, 15 bp, Homo sapiens
gaggccaggagacca

SEQ ID NO: 1895643 - DNA, 15 bp, Homo sapiens
aggccaggagaccaa

SEQ ID NO: 1895644 - DNA, 15 bp, Homo sapiens
ggccaggagaccaag

SEQ ID NO: 1895645 - DNA, 15 bp, Homo sapiens
gccaggagaccaagg

SEQ ID NO: 1895646 - DNA, 15 bp, Homo sapiens
ccaggagaccaaggg

SEQ ID NO: 1895647 - DNA, 15 bp, Homo sapiens
caggagaccaagggg

SEQ ID NO: 1895648 - DNA, 15 bp, Homo sapiens
aggagaccaaggggt

SEQ ID NO: 1895649 - DNA, 15 bp, Homo sapiens
ggagaccaaggggtg

SEQ ID NO: 1895650 - DNA, 15 bp, Homo sapiens
gagaccaaggggtgc

SEQ ID NO: 1895651 - DNA, 15 bp, Homo sapiens
agaccaaggggtgct

SEQ ID NO: 1895652 - DNA, 15 bp, Homo sapiens
gaccaaggggtgctc

SEQ ID NO: 1895653 - DNA, 15 bp, Homo sapiens
accaaggggtgctca

SEQ ID NO: 1895654 - DNA, 15 bp, Homo sapiens
ccaaggggtgctcag

SEQ ID NO: 1895655 - DNA, 15 bp, Homo sapiens
caaggggtgctcagg

SEQ ID NO: 1895656 - DNA, 15 bp, Homo sapiens
aaggggtgctcaggt

SEQ ID NO: 1895657 - DNA, 15 bp, Homo sapiens
aggggtgctcaggtc

SEQ ID NO: 1895658 - DNA, 15 bp, Homo sapiens
ggggtgctcaggtca

SEQ ID NO: 1895659 - DNA, 15 bp, Homo sapiens
gggtgctcaggtcag

SEQ ID NO: 1895660 - DNA, 15 bp, Homo sapiens
ggtgctcaggtcagt

SEQ ID NO: 1895661 - DNA, 15 bp, Homo sapiens
gtgctcaggtcagtc

SEQ ID NO: 1895662 - DNA, 15 bp, Homo sapiens
tgctcaggtcagtcc

SEQ ID NO: 1895663 - DNA, 15 bp, Homo sapiens
gctcaggtcagtcca

SEQ ID NO: 1895664 - DNA, 15 bp, Homo sapiens
ctcaggtcagtccaa

SEQ ID NO: 1895665 - DNA, 15 bp, Homo sapiens
tcaggtcagtccaac

SEQ ID NO: 1895666 - DNA, 15 bp, Homo sapiens
caggtcagtccaacc

SEQ ID NO: 1895667 - DNA, 15 bp, Homo sapiens
aggtcagtccaaccc

SEQ ID NO: 1895668 - DNA, 15 bp, Homo sapiens
ggtcagtccaacccc

SEQ ID NO: 1895669 - DNA, 15 bp, Homo sapiens
gtcagtccaaccccg

SEQ ID NO: 1895670 - DNA, 15 bp, Homo sapiens
tcagtccaaccccgt

SEQ ID NO: 1895671 - DNA, 15 bp, Homo sapiens
cagtccaaccccgtc

SEQ ID NO: 1895672 - DNA, 15 bp, Homo sapiens
agtccaaccccgtct

SEQ ID NO: 1895673 - DNA, 15 bp, Homo sapiens
gtccaaccccgtctg

SEQ ID NO: 1895674 - DNA, 15 bp, Homo sapiens
tccaaccccgtctga

SEQ ID NO: 1895675 - DNA, 15 bp, Homo sapiens
ccaaccccgtctgat

SEQ ID NO: 1895676 - DNA, 15 bp, Homo sapiens
caaccccgtctgatg

SEQ ID NO: 1895677 - DNA, 15 bp, Homo sapiens
aaccccgtctgatgt

SEQ ID NO: 1895678 - DNA, 15 bp, Homo sapiens
accccgtctgatgtc

SEQ ID NO: 1895679 - DNA, 15 bp, Homo sapiens
ccccgtctgatgtcc

SEQ ID NO: 1895680 - DNA, 15 bp, Homo sapiens
cccgtctgatgtcca

SEQ ID NO: 1895681 - DNA, 15 bp, Homo sapiens
ccgtctgatgtccaa

SEQ ID NO: 1895682 - DNA, 15 bp, Homo sapiens
cgtctgatgtccaag

SEQ ID NO: 1895683 - DNA, 15 bp, Homo sapiens
gtctgatgtccaaga

SEQ ID NO: 1895684 - DNA, 15 bp, Homo sapiens
tctgatgtccaagac

SEQ ID NO: 1895685 - DNA, 15 bp, Homo sapiens
ctgatgtccaagacc

SEQ ID NO: 1895686 - DNA, 15 bp, Homo sapiens
tgatgtccaagacca

SEQ ID NO: 1895687 - DNA, 15 bp, Homo sapiens
gatgtccaagaccac

SEQ ID NO: 1895688 - DNA, 15 bp, Homo sapiens
atgtccaagaccacc

SEQ ID NO: 1895689 - DNA, 15 bp, Homo sapiens
tgtccaagaccaccc

SEQ ID NO: 1895690 - DNA, 15 bp, Homo sapiens
gtccaagaccaccct

SEQ ID NO: 1895691 - DNA, 15 bp, Homo sapiens
tccaagaccaccctg

SEQ ID NO: 1895692 - DNA, 15 bp, Homo sapiens
ccaagaccaccctgc

SEQ ID NO: 1895693 - DNA, 15 bp, Homo sapiens
caagaccaccctgcg

SEQ ID NO: 1895694 - DNA, 15 bp, Homo sapiens
aagaccaccctgcgg

SEQ ID NO: 1895695 - DNA, 15 bp, Homo sapiens
agaccaccctgcgga

SEQ ID NO: 1895696 - DNA, 15 bp, Homo sapiens
gaccaccctgcggag

SEQ ID NO: 1895697 - DNA, 15 bp, Homo sapiens
accaccctgcggaga

SEQ ID NO: 1895698 - DNA, 15 bp, Homo sapiens
ccaccctgcggagat

SEQ ID NO: 1895699 - DNA, 15 bp, Homo sapiens
caccctgcggagatc

SEQ ID NO: 1895700 - DNA, 15 bp, Homo sapiens
accctgcggagatca

SEQ ID NO: 1895701 - DNA, 15 bp, Homo sapiens
ccctgcggagatcag

SEQ ID NO: 1895702 - DNA, 15 bp, Homo sapiens
cctgcggagatcaga

SEQ ID NO: 1895703 - DNA, 15 bp, Homo sapiens
ctgcggagatcagaa

SEQ ID NO: 1895704 - DNA, 15 bp, Homo sapiens
tgcggagatcagaac

SEQ ID NO: 1895705 - DNA, 15 bp, Homo sapiens
gcggagatcagaact

SEQ ID NO: 1895706 - DNA, 15 bp, Homo sapiens
cggagatcagaactg

SEQ ID NO: 1895707 - DNA, 15 bp, Homo sapiens
ggagatcagaactga

SEQ ID NO: 1895708 - DNA, 15 bp, Homo sapiens
gagatcagaactgac

SEQ ID NO: 1895709 - DNA, 15 bp, Homo sapiens
agatcagaactgaca

SEQ ID NO: 1895710 - DNA, 15 bp, Homo sapiens
gatcagaactgacaa

SEQ ID NO: 1895711 - DNA, 15 bp, Homo sapiens
atcagaactgacaat

SEQ ID NO: 1895712 - DNA, 15 bp, Homo sapiens
tcagaactgacaatt

SEQ ID NO: 1895713 - DNA, 15 bp, Homo sapiens
cagaactgacaattc

SEQ ID NO: 1895714 - DNA, 15 bp, Homo sapiens
agaactgacaattcc

SEQ ID NO: 1895715 - DNA, 15 bp, Homo sapiens
gaactgacaattccc

SEQ ID NO: 1895716 - DNA, 15 bp, Homo sapiens
aactgacaattcccc

SEQ ID NO: 1895717 - DNA, 15 bp, Homo sapiens
actgacaattcccct

SEQ ID NO: 1895718 - DNA, 15 bp, Homo sapiens
ctgacaattccccta

SEQ ID NO: 1895719 - DNA, 15 bp, Homo sapiens
tgacaattcccctag

SEQ ID NO: 1895720 - DNA, 15 bp, Homo sapiens
gacaattcccctagg

SEQ ID NO: 1895721 - DNA, 15 bp, Homo sapiens
acaattcccctaggg

SEQ ID NO: 1895722 - DNA, 15 bp, Homo sapiens
caattcccctagggc

SEQ ID NO: 1895723 - DNA, 15 bp, Homo sapiens
aattcccctagggct

SEQ ID NO: 1895724 - DNA, 15 bp, Homo sapiens
attcccctagggcta

SEQ ID NO: 1895725 - DNA, 15 bp, Homo sapiens
ttcccctagggctaa

SEQ ID NO: 1895726 - DNA, 15 bp, Homo sapiens
tcccctagggctaaa

SEQ ID NO: 1895727 - DNA, 15 bp, Homo sapiens
cccctagggctaaag

SEQ ID NO: 1895728 - DNA, 15 bp, Homo sapiens
ccctagggctaaagt

SEQ ID NO: 1895729 - DNA, 15 bp, Homo sapiens
cctagggctaaagtc

SEQ ID NO: 1895730 - DNA, 15 bp, Homo sapiens
ctagggctaaagtct

SEQ ID NO: 1895731 - DNA, 15 bp, Homo sapiens
tagggctaaagtctc

SEQ ID NO: 1895732 - DNA, 15 bp, Homo sapiens
agggctaaagtctcc

SEQ ID NO: 1895733 - DNA, 15 bp, Homo sapiens
gggctaaagtctcct

SEQ ID NO: 1895734 - DNA, 15 bp, Homo sapiens
ggctaaagtctccta

SEQ ID NO: 1895735 - DNA, 15 bp, Homo sapiens
gctaaagtctcctat

SEQ ID NO: 1895736 - DNA, 15 bp, Homo sapiens
ctaaagtctcctatg

SEQ ID NO: 1895737 - DNA, 15 bp, Homo sapiens
taaagtctcctatga

SEQ ID NO: 1895738 - DNA, 15 bp, Homo sapiens
aaagtctcctatgag

SEQ ID NO: 1895739 - DNA, 15 bp, Homo sapiens
aagtctcctatgaga

SEQ ID NO: 1895740 - DNA, 15 bp, Homo sapiens
agtctcctatgagag

SEQ ID NO: 1895741 - DNA, 15 bp, Homo sapiens
gtctcctatgagagc

SEQ ID NO: 1895742 - DNA, 15 bp, Homo sapiens
tctcctatgagagca

SEQ ID NO: 1895743 - DNA, 15 bp, Homo sapiens
ctcctatgagagcaa

SEQ ID NO: 1895744 - DNA, 15 bp, Homo sapiens
tcctatgagagcaat

SEQ ID NO: 1895745 - DNA, 15 bp, Homo sapiens
cctatgagagcaatt

SEQ ID NO: 1895746 - DNA, 15 bp, Homo sapiens
ctatgagagcaattt

SEQ ID NO: 1895747 - DNA, 15 bp, Homo sapiens
tatgagagcaatttg

SEQ ID NO: 1895748 - DNA, 15 bp, Homo sapiens
atgagagcaatttga

SEQ ID NO: 1895749 - DNA, 15 bp, Homo sapiens
tgagagcaatttgag

SEQ ID NO: 1895750 - DNA, 15 bp, Homo sapiens
gagagcaatttgagc

SEQ ID NO: 1895751 - DNA, 15 bp, Homo sapiens
agagcaatttgagct

SEQ ID NO: 1895752 - DNA, 15 bp, Homo sapiens
gagcaatttgagctt

SEQ ID NO: 1895753 - DNA, 15 bp, Homo sapiens
agcaatttgagctta

SEQ ID NO: 1895754 - DNA, 15 bp, Homo sapiens
gcaatttgagcttag

SEQ ID NO: 1895755 - DNA, 15 bp, Homo sapiens
caatttgagcttagg

SEQ ID NO: 1895756 - DNA, 15 bp, Homo sapiens
aatttgagcttaggg

SEQ ID NO: 1895757 - DNA, 15 bp, Homo sapiens
atttgagcttagggg

SEQ ID NO: 1895758 - DNA, 15 bp, Homo sapiens
tttgagcttaggggg

SEQ ID NO: 1895759 - DNA, 15 bp, Homo sapiens
ttgagcttaggggga

SEQ ID NO: 1895760 - DNA, 15 bp, Homo sapiens
tgagcttagggggat

SEQ ID NO: 1895761 - DNA, 15 bp, Homo sapiens
gagcttagggggatg

SEQ ID NO: 1895762 - DNA, 15 bp, Homo sapiens
agcttagggggatgg

SEQ ID NO: 1895763 - DNA, 15 bp, Homo sapiens
gcttagggggatggc

SEQ ID NO: 1895764 - DNA, 15 bp, Homo sapiens
cttagggggatggct

SEQ ID NO: 1895765 - DNA, 15 bp, Homo sapiens
ttagggggatggctg

SEQ ID NO: 1895766 - DNA, 15 bp, Homo sapiens
tagggggatggctgt

SEQ ID NO: 1895767 - DNA, 15 bp, Homo sapiens
agggggatggctgtc

SEQ ID NO: 1895768 - DNA, 15 bp, Homo sapiens
gggggatggctgtcc

SEQ ID NO: 1895769 - DNA, 15 bp, Homo sapiens
ggggatggctgtccc

SEQ ID NO: 1895770 - DNA, 15 bp, Homo sapiens
gggatggctgtccct

SEQ ID NO: 1895771 - DNA, 15 bp, Homo sapiens
ggatggctgtccctg

SEQ ID NO: 1895772 - DNA, 15 bp, Homo sapiens
gatggctgtccctga

SEQ ID NO: 1895773 - DNA, 15 bp, Homo sapiens
atggctgtccctgac

SEQ ID NO: 1895774 - DNA, 15 bp, Homo sapiens
tggctgtccctgacc

SEQ ID NO: 1895775 - DNA, 15 bp, Homo sapiens
ggctgtccctgaccg

SEQ ID NO: 1895776 - DNA, 15 bp, Homo sapiens
gctgtccctgaccgt

SEQ ID NO: 1895777 - DNA, 15 bp, Homo sapiens
ctgtccctgaccgtg

SEQ ID NO: 1895778 - DNA, 15 bp, Homo sapiens
tgtccctgaccgtgc

SEQ ID NO: 1895779 - DNA, 15 bp, Homo sapiens
gtccctgaccgtgct

SEQ ID NO: 1895780 - DNA, 15 bp, Homo sapiens
tccctgaccgtgctc

SEQ ID NO: 1895781 - DNA, 15 bp, Homo sapiens
ccctgaccgtgctcc

SEQ ID NO: 1895782 - DNA, 15 bp, Homo sapiens
cctgaccgtgctcca

SEQ ID NO: 1895783 - DNA, 15 bp, Homo sapiens
ctgaccgtgctccac

SEQ ID NO: 1895784 - DNA, 15 bp, Homo sapiens
tgaccgtgctccact

SEQ ID NO: 1895785 - DNA, 15 bp, Homo sapiens
gaccgtgctccacta

SEQ ID NO: 1895786 - DNA, 15 bp, Homo sapiens
accgtgctccactac

SEQ ID NO: 1895787 - DNA, 15 bp, Homo sapiens
ccgtgctccactaca

SEQ ID NO: 1895788 - DNA, 15 bp, Homo sapiens
cgtgctccactacag

SEQ ID NO: 1895789 - DNA, 15 bp, Homo sapiens
gtgctccactacaga

SEQ ID NO: 1895790 - DNA, 15 bp, Homo sapiens
tgctccactacagac

SEQ ID NO: 1895791 - DNA, 15 bp, Homo sapiens
gctccactacagaca

SEQ ID NO: 1895792 - DNA, 15 bp, Homo sapiens
ctccactacagacac

SEQ ID NO: 1895793 - DNA, 15 bp, Homo sapiens
tccactacagacact

SEQ ID NO: 1895794 - DNA, 15 bp, Homo sapiens
ccactacagacactc

SEQ ID NO: 1895795 - DNA, 15 bp, Homo sapiens
cactacagacactcc

SEQ ID NO: 1895796 - DNA, 15 bp, Homo sapiens
actacagacactcct

SEQ ID NO: 1895797 - DNA, 15 bp, Homo sapiens
ctacagacactcctg

SEQ ID NO: 1895798 - DNA, 15 bp, Homo sapiens
tacagacactcctgc

SEQ ID NO: 1895799 - DNA, 15 bp, Homo sapiens
acagacactcctgca

SEQ ID NO: 1895800 - DNA, 15 bp, Homo sapiens
cagacactcctgcac

SEQ ID NO: 1895801 - DNA, 15 bp, Homo sapiens
agacactcctgcacc

SEQ ID NO: 1895802 - DNA, 15 bp, Homo sapiens
gacactcctgcacca

SEQ ID NO: 1895803 - DNA, 15 bp, Homo sapiens
acactcctgcaccaa

SEQ ID NO: 1895804 - DNA, 15 bp, Homo sapiens
cactcctgcaccaaa

SEQ ID NO: 1895805 - DNA, 15 bp, Homo sapiens
actcctgcaccaaac

SEQ ID NO: 1895806 - DNA, 15 bp, Homo sapiens
ctcctgcaccaaacc

SEQ ID NO: 1895807 - DNA, 15 bp, Homo sapiens
tcctgcaccaaaccc

SEQ ID NO: 1895808 - DNA, 15 bp, Homo sapiens
cctgcaccaaaccct

SEQ ID NO: 1895809 - DNA, 15 bp, Homo sapiens
ctgcaccaaaccctc

SEQ ID NO: 1895810 - DNA, 15 bp, Homo sapiens
tgcaccaaaccctct

SEQ ID NO: 1895811 - DNA, 15 bp, Homo sapiens
gcaccaaaccctctg

SEQ ID NO: 1895812 - DNA, 15 bp, Homo sapiens
caccaaaccctctgg

SEQ ID NO: 1895813 - DNA, 15 bp, Homo sapiens
accaaaccctctggg

SEQ ID NO: 1895814 - DNA, 15 bp, Homo sapiens
ccaaaccctctgggc

SEQ ID NO: 1895815 - DNA, 15 bp, Homo sapiens
caaaccctctgggct

SEQ ID NO: 1895816 - DNA, 15 bp, Homo sapiens
aaaccctctgggctt

SEQ ID NO: 1895817 - DNA, 15 bp, Homo sapiens
aaccctctgggcttc

SEQ ID NO: 1895818 - DNA, 15 bp, Homo sapiens
accctctgggcttca

SEQ ID NO: 1895819 - DNA, 15 bp, Homo sapiens
ccctctgggcttcac

SEQ ID NO: 1895820 - DNA, 15 bp, Homo sapiens
cctctgggcttcaca

SEQ ID NO: 1895821 - DNA, 15 bp, Homo sapiens
ctctgggcttcacat

SEQ ID NO: 1895822 - DNA, 15 bp, Homo sapiens
tctgggcttcacatc

SEQ ID NO: 1895823 - DNA, 15 bp, Homo sapiens
ctgggcttcacatca

SEQ ID NO: 1895824 - DNA, 15 bp, Homo sapiens
tgggcttcacatcag

SEQ ID NO: 1895825 - DNA, 15 bp, Homo sapiens
gggcttcacatcagc

SEQ ID NO: 1895826 - DNA, 15 bp, Homo sapiens
ggcttcacatcagct

SEQ ID NO: 1895827 - DNA, 15 bp, Homo sapiens
gcttcacatcagctg

SEQ ID NO: 1895828 - DNA, 15 bp, Homo sapiens
cttcacatcagctgg

SEQ ID NO: 1895829 - DNA, 15 bp, Homo sapiens
ttcacatcagctggc

SEQ ID NO: 1895830 - DNA, 15 bp, Homo sapiens
tcacatcagctggct

SEQ ID NO: 1895831 - DNA, 15 bp, Homo sapiens
cacatcagctggctt

SEQ ID NO: 1895832 - DNA, 15 bp, Homo sapiens
acatcagctggcttg

SEQ ID NO: 1895833 - DNA, 15 bp, Homo sapiens
catcagctggcttgc

SEQ ID NO: 1895834 - DNA, 15 bp, Homo sapiens
atcagctggcttgcc

SEQ ID NO: 1895835 - DNA, 15 bp, Homo sapiens
tcagctggcttgcca

SEQ ID NO: 1895836 - DNA, 15 bp, Homo sapiens
cagctggcttgccat

SEQ ID NO: 1895837 - DNA, 15 bp, Homo sapiens
agctggcttgccatc

SEQ ID NO: 1895838 - DNA, 15 bp, Homo sapiens
gctggcttgccatcc

SEQ ID NO: 1895839 - DNA, 15 bp, Homo sapiens
ctggcttgccatccc

SEQ ID NO: 1895840 - DNA, 15 bp, Homo sapiens
tggcttgccatccca

SEQ ID NO: 1895841 - DNA, 15 bp, Homo sapiens
ggcttgccatcccac

SEQ ID NO: 1895842 - DNA, 15 bp, Homo sapiens
gcttgccatcccacc

SEQ ID NO: 1895843 - DNA, 15 bp, Homo sapiens
cttgccatcccacca

SEQ ID NO: 1895844 - DNA, 15 bp, Homo sapiens
ttgccatcccaccac

SEQ ID NO: 1895845 - DNA, 15 bp, Homo sapiens
tgccatcccaccact

SEQ ID NO: 1895846 - DNA, 15 bp, Homo sapiens
gccatcccaccactt

SEQ ID NO: 1895847 - DNA, 15 bp, Homo sapiens
ccatcccaccacttc

SEQ ID NO: 1895848 - DNA, 15 bp, Homo sapiens
catcccaccacttct

SEQ ID NO: 1895849 - DNA, 15 bp, Homo sapiens
atcccaccacttctc

SEQ ID NO: 1895850 - DNA, 15 bp, Homo sapiens
tcccaccacttctct

SEQ ID NO: 1895851 - DNA, 15 bp, Homo sapiens
cccaccacttctcta

SEQ ID NO: 1895852 - DNA, 15 bp, Homo sapiens
ccaccacttctctag

SEQ ID NO: 1895853 - DNA, 15 bp, Homo sapiens
caccacttctctagg

SEQ ID NO: 1895854 - DNA, 15 bp, Homo sapiens
accacttctctaggc

SEQ ID NO: 1895855 - DNA, 15 bp, Homo sapiens
ccacttctctaggca

SEQ ID NO: 1895856 - DNA, 15 bp, Homo sapiens
cacttctctaggcag

SEQ ID NO: 1895857 - DNA, 15 bp, Homo sapiens
acttctctaggcagc

SEQ ID NO: 1895858 - DNA, 15 bp, Homo sapiens
cttctctaggcagct

SEQ ID NO: 1895859 - DNA, 15 bp, Homo sapiens
ttctctaggcagctc

SEQ ID NO: 1895860 - DNA, 15 bp, Homo sapiens
tctctaggcagctct

SEQ ID NO: 1895861 - DNA, 15 bp, Homo sapiens
ctctaggcagctctt

SEQ ID NO: 1895862 - DNA, 15 bp, Homo sapiens
tctaggcagctcttg

SEQ ID NO: 1895863 - DNA, 15 bp, Homo sapiens
ctaggcagctcttgc

SEQ ID NO: 1895864 - DNA, 15 bp, Homo sapiens
taggcagctcttgct

SEQ ID NO: 1895865 - DNA, 15 bp, Homo sapiens
aggcagctcttgctg

SEQ ID NO: 1895866 - DNA, 15 bp, Homo sapiens
ggcagctcttgctgc

SEQ ID NO: 1895867 - DNA, 15 bp, Homo sapiens
gcagctcttgctgct

SEQ ID NO: 1895868 - DNA, 15 bp, Homo sapiens
cagctcttgctgcta

SEQ ID NO: 1895869 - DNA, 15 bp, Homo sapiens
agctcttgctgctac

SEQ ID NO: 1895870 - DNA, 15 bp, Homo sapiens
gctcttgctgctacc

SEQ ID NO: 1895871 - DNA, 15 bp, Homo sapiens
ctcttgctgctacct

SEQ ID NO: 1895872 - DNA, 15 bp, Homo sapiens
tcttgctgctacctc

SEQ ID NO: 1895873 - DNA, 15 bp, Homo sapiens
cttgctgctacctca

SEQ ID NO: 1895874 - DNA, 15 bp, Homo sapiens
ttgctgctacctcaa

SEQ ID NO: 1895875 - DNA, 15 bp, Homo sapiens
tgctgctacctcaag

SEQ ID NO: 1895876 - DNA, 15 bp, Homo sapiens
gctgctacctcaagt

SEQ ID NO: 1895877 - DNA, 15 bp, Homo sapiens
ctgctacctcaagtg

SEQ ID NO: 1895878 - DNA, 15 bp, Homo sapiens
tgctacctcaagtgt

SEQ ID NO: 1895879 - DNA, 15 bp, Homo sapiens
gctacctcaagtgtc

SEQ ID NO: 1895880 - DNA, 15 bp, Homo sapiens
ctacctcaagtgtca

SEQ ID NO: 1895881 - DNA, 15 bp, Homo sapiens
tacctcaagtgtcat

SEQ ID NO: 1895882 - DNA, 15 bp, Homo sapiens
acctcaagtgtcatg

SEQ ID NO: 1895883 - DNA, 15 bp, Homo sapiens
cctcaagtgtcatgt

SEQ ID NO: 1895884 - DNA, 15 bp, Homo sapiens
ctcaagtgtcatgtg

SEQ ID NO: 1895885 - DNA, 15 bp, Homo sapiens
tcaagtgtcatgtgg

SEQ ID NO: 1895886 - DNA, 15 bp, Homo sapiens
caagtgtcatgtggt

SEQ ID NO: 1895887 - DNA, 15 bp, Homo sapiens
aagtgtcatgtggtg

SEQ ID NO: 1895888 - DNA, 15 bp, Homo sapiens
agtgtcatgtggtgg

SEQ ID NO: 1895889 - DNA, 15 bp, Homo sapiens
gtgtcatgtggtggt

SEQ ID NO: 1895890 - DNA, 15 bp, Homo sapiens
tgtcatgtggtggtc

SEQ ID NO: 1895891 - DNA, 15 bp, Homo sapiens
gtcatgtggtggtcg

SEQ ID NO: 1895892 - DNA, 15 bp, Homo sapiens
tcatgtggtggtcga

SEQ ID NO: 1895893 - DNA, 15 bp, Homo sapiens
catgtggtggtcgag

SEQ ID NO: 1895894 - DNA, 15 bp, Homo sapiens
atgtggtggtcgagg

SEQ ID NO: 1895895 - DNA, 15 bp, Homo sapiens
tgtggtggtcgaggg

SEQ ID NO: 1895896 - DNA, 15 bp, Homo sapiens
gtggtggtcgagggt

SEQ ID NO: 1895897 - DNA, 15 bp, Homo sapiens
tggtggtcgagggtt

SEQ ID NO: 1895898 - DNA, 15 bp, Homo sapiens
ggtggtcgagggttc

SEQ ID NO: 1895899 - DNA, 15 bp, Homo sapiens
gtggtcgagggttcc

SEQ ID NO: 1895900 - DNA, 15 bp, Homo sapiens
tggtcgagggttccc

SEQ ID NO: 1895901 - DNA, 15 bp, Homo sapiens
ggtcgagggttcccc

SEQ ID NO: 1895902 - DNA, 15 bp, Homo sapiens
gtcgagggttcccct

SEQ ID NO: 1895903 - DNA, 15 bp, Homo sapiens
tcgagggttcccctc

SEQ ID NO: 1895904 - DNA, 15 bp, Homo sapiens
cgagggttcccctcc

SEQ ID NO: 1895905 - DNA, 15 bp, Homo sapiens
gagggttcccctcct

SEQ ID NO: 1895906 - DNA, 15 bp, Homo sapiens
agggttcccctcctg

SEQ ID NO: 1895907 - DNA, 15 bp, Homo sapiens
gggttcccctcctgc

SEQ ID NO: 1895908 - DNA, 15 bp, Homo sapiens
ggttcccctcctgcc

SEQ ID NO: 1895909 - DNA, 15 bp, Homo sapiens
gttcccctcctgccg

SEQ ID NO: 1895910 - DNA, 15 bp, Homo sapiens
ttcccctcctgccgg

SEQ ID NO: 1895911 - DNA, 15 bp, Homo sapiens
tcccctcctgccggg

SEQ ID NO: 1895912 - DNA, 15 bp, Homo sapiens
cccctcctgccgggg

SEQ ID NO: 1895913 - DNA, 15 bp, Homo sapiens
ccctcctgccggggt

SEQ ID NO: 1895914 - DNA, 15 bp, Homo sapiens
cctcctgccggggtt

SEQ ID NO: 1895915 - DNA, 15 bp, Homo sapiens
ctcctgccggggttc

SEQ ID NO: 1895916 - DNA, 15 bp, Homo sapiens
tcctgccggggttct

SEQ ID NO: 1895917 - DNA, 15 bp, Homo sapiens
cctgccggggttcta

SEQ ID NO: 1895918 - DNA, 15 bp, Homo sapiens
ctgccggggttctag

SEQ ID NO: 1895919 - DNA, 15 bp, Homo sapiens
tgccggggttctaga

SEQ ID NO: 1895920 - DNA, 15 bp, Homo sapiens
gccggggttctagag

SEQ ID NO: 1895921 - DNA, 15 bp, Homo sapiens
ccggggttctagagg

SEQ ID NO: 1895922 - DNA, 15 bp, Homo sapiens
cggggttctagaggc

SEQ ID NO: 1895923 - DNA, 15 bp, Homo sapiens
ggggttctagaggcc

SEQ ID NO: 1895924 - DNA, 15 bp, Homo sapiens
gggttctagaggcct

SEQ ID NO: 1895925 - DNA, 15 bp, Homo sapiens
ggttctagaggcctg

SEQ ID NO: 1895926 - DNA, 15 bp, Homo sapiens
gttctagaggcctgt

SEQ ID NO: 1895927 - DNA, 15 bp, Homo sapiens
ttctagaggcctgtg

SEQ ID NO: 1895928 - DNA, 15 bp, Homo sapiens
tctagaggcctgtgg

SEQ ID NO: 1895929 - DNA, 15 bp, Homo sapiens
ctagaggcctgtggc

SEQ ID NO: 1895930 - DNA, 15 bp, Homo sapiens
tagaggcctgtggca

SEQ ID NO: 1895931 - DNA, 15 bp, Homo sapiens
agaggcctgtggcaa

SEQ ID NO: 1895932 - DNA, 15 bp, Homo sapiens
gaggcctgtggcaag

SEQ ID NO: 1895933 - DNA, 15 bp, Homo sapiens
aggcctgtggcaaga

SEQ ID NO: 1895934 - DNA, 15 bp, Homo sapiens
ggcctgtggcaagaa

SEQ ID NO: 1895935 - DNA, 15 bp, Homo sapiens
gcctgtggcaagaaa

SEQ ID NO: 1895936 - DNA, 15 bp, Homo sapiens
cctgtggcaagaaag

SEQ ID NO: 1895937 - DNA, 15 bp, Homo sapiens
ctgtggcaagaaaga

SEQ ID NO: 1895938 - DNA, 15 bp, Homo sapiens
tgtggcaagaaagag

SEQ ID NO: 1895939 - DNA, 15 bp, Homo sapiens
gtggcaagaaagagt

SEQ ID NO: 1895940 - DNA, 15 bp, Homo sapiens
tggcaagaaagagtt

SEQ ID NO: 1895941 - DNA, 15 bp, Homo sapiens
ggcaagaaagagttt

SEQ ID NO: 1895942 - DNA, 15 bp, Homo sapiens
gcaagaaagagtttc

SEQ ID NO: 1895943 - DNA, 15 bp, Homo sapiens
caagaaagagtttct

SEQ ID NO: 1895944 - DNA, 15 bp, Homo sapiens
aagaaagagtttctc

SEQ ID NO: 1895945 - DNA, 15 bp, Homo sapiens
agaaagagtttctcc

SEQ ID NO: 1895946 - DNA, 15 bp, Homo sapiens
gaaagagtttctcct

SEQ ID NO: 1895947 - DNA, 15 bp, Homo sapiens
aaagagtttctcctt

SEQ ID NO: 1895948 - DNA, 15 bp, Homo sapiens
aagagtttctccttg

SEQ ID NO: 1895949 - DNA, 15 bp, Homo sapiens
agagtttctccttgc

SEQ ID NO: 1895950 - DNA, 15 bp, Homo sapiens
gagtttctccttgcc

SEQ ID NO: 1895951 - DNA, 15 bp, Homo sapiens
agtttctccttgcca

SEQ ID NO: 1895952 - DNA, 15 bp, Homo sapiens
gtttctccttgccaa

SEQ ID NO: 1895953 - DNA, 15 bp, Homo sapiens
tttctccttgccaat

SEQ ID NO: 1895954 - DNA, 15 bp, Homo sapiens
ttctccttgccaatt

SEQ ID NO: 1895955 - DNA, 15 bp, Homo sapiens
tctccttgccaattg

SEQ ID NO: 1895956 - DNA, 15 bp, Homo sapiens
ctccttgccaattga

SEQ ID NO: 1895957 - DNA, 15 bp, Homo sapiens
tccttgccaattgaa

SEQ ID NO: 1895958 - DNA, 15 bp, Homo sapiens
ccttgccaattgaac

SEQ ID NO: 1895959 - DNA, 15 bp, Homo sapiens
cttgccaattgaact

SEQ ID NO: 1895960 - DNA, 15 bp, Homo sapiens
ttgccaattgaactc

SEQ ID NO: 1895961 - DNA, 15 bp, Homo sapiens
tgccaattgaactca

SEQ ID NO: 1895962 - DNA, 15 bp, Homo sapiens
gccaattgaactcac

SEQ ID NO: 1895963 - DNA, 15 bp, Homo sapiens
ccaattgaactcacc

SEQ ID NO: 1895964 - DNA, 15 bp, Homo sapiens
caattgaactcacca

SEQ ID NO: 1895965 - DNA, 15 bp, Homo sapiens
aattgaactcaccag

SEQ ID NO: 1895966 - DNA, 15 bp, Homo sapiens
attgaactcaccagt

SEQ ID NO: 1895967 - DNA, 15 bp, Homo sapiens
ttgaactcaccagtt

SEQ ID NO: 1895968 - DNA, 15 bp, Homo sapiens
tgaactcaccagttc

SEQ ID NO: 1895969 - DNA, 15 bp, Homo sapiens
gaactcaccagttcc

SEQ ID NO: 1895970 - DNA, 15 bp, Homo sapiens
aactcaccagttccc

SEQ ID NO: 1895971 - DNA, 15 bp, Homo sapiens
actcaccagttcccc

SEQ ID NO: 1895972 - DNA, 15 bp, Homo sapiens
ctcaccagttcccct

SEQ ID NO: 1895973 - DNA, 15 bp, Homo sapiens
tcaccagttcccctg

SEQ ID NO: 1895974 - DNA, 15 bp, Homo sapiens
caccagttcccctgg

SEQ ID NO: 1895975 - DNA, 15 bp, Homo sapiens
accagttcccctgga

SEQ ID NO: 1895976 - DNA, 15 bp, Homo sapiens
ccagttcccctggag

SEQ ID NO: 1895977 - DNA, 15 bp, Homo sapiens
cagttcccctggagc

SEQ ID NO: 1895978 - DNA, 15 bp, Homo sapiens
agttcccctggagct

SEQ ID NO: 1895979 - DNA, 15 bp, Homo sapiens
gttcccctggagctg

SEQ ID NO: 1895980 - DNA, 15 bp, Homo sapiens
ttcccctggagctgt

SEQ ID NO: 1895981 - DNA, 15 bp, Homo sapiens
tcccctggagctgtt

SEQ ID NO: 1895982 - DNA, 15 bp, Homo sapiens
cccctggagctgttg

SEQ ID NO: 1895983 - DNA, 15 bp, Homo sapiens
ccctggagctgttgt

SEQ ID NO: 1895984 - DNA, 15 bp, Homo sapiens
cctggagctgttgtg

SEQ ID NO: 1895985 - DNA, 15 bp, Homo sapiens
ctggagctgttgtgg

SEQ ID NO: 1895986 - DNA, 15 bp, Homo sapiens
tggagctgttgtggt

SEQ ID NO: 1895987 - DNA, 15 bp, Homo sapiens
ggagctgttgtggtt

SEQ ID NO: 1895988 - DNA, 15 bp, Homo sapiens
gagctgttgtggttc

SEQ ID NO: 1895989 - DNA, 15 bp, Homo sapiens
agctgttgtggttca

SEQ ID NO: 1895990 - DNA, 15 bp, Homo sapiens
gctgttgtggttcaa

SEQ ID NO: 1895991 - DNA, 15 bp, Homo sapiens
ctgttgtggttcaaa

SEQ ID NO: 1895992 - DNA, 15 bp, Homo sapiens
tgttgtggttcaaaa

SEQ ID NO: 1895993 - DNA, 15 bp, Homo sapiens
gttgtggttcaaaaa

SEQ ID NO: 1895994 - DNA, 15 bp, Homo sapiens
ttgtggttcaaaaat

SEQ ID NO: 1895995 - DNA, 15 bp, Homo sapiens
tgtggttcaaaaatg

SEQ ID NO: 1895996 - DNA, 15 bp, Homo sapiens
gtggttcaaaaatga

SEQ ID NO: 1895997 - DNA, 15 bp, Homo sapiens
tggttcaaaaatgag

SEQ ID NO: 1895998 - DNA, 15 bp, Homo sapiens
ggttcaaaaatgagt

SEQ ID NO: 1895999 - DNA, 15 bp, Homo sapiens
gttcaaaaatgagtc

SEQ ID NO: 1896000 - DNA, 15 bp, Homo sapiens
ttcaaaaatgagtcc

SEQ ID NO: 1896001 - DNA, 15 bp, Homo sapiens
tcaaaaatgagtccc

SEQ ID NO: 1896002 - DNA, 15 bp, Homo sapiens
caaaaatgagtccca

SEQ ID NO: 1896003 - DNA, 15 bp, Homo sapiens
aaaaatgagtcccag

SEQ ID NO: 1896004 - DNA, 15 bp, Homo sapiens
aaaatgagtcccagt

SEQ ID NO: 1896005 - DNA, 15 bp, Homo sapiens
aaatgagtcccagtg

SEQ ID NO: 1896006 - DNA, 15 bp, Homo sapiens
aatgagtcccagtgt

SEQ ID NO: 1896007 - DNA, 15 bp, Homo sapiens
atgagtcccagtgtg

SEQ ID NO: 1896008 - DNA, 15 bp, Homo sapiens
tgagtcccagtgtgc

SEQ ID NO: 1896009 - DNA, 15 bp, Homo sapiens
gagtcccagtgtgca

SEQ ID NO: 1896010 - DNA, 15 bp, Homo sapiens
agtcccagtgtgcaa

SEQ ID NO: 1896011 - DNA, 15 bp, Homo sapiens
gtcccagtgtgcaat

SEQ ID NO: 1896012 - DNA, 15 bp, Homo sapiens
tcccagtgtgcaatg

SEQ ID NO: 1896013 - DNA, 15 bp, Homo sapiens
cccagtgtgcaatgg

SEQ ID NO: 1896014 - DNA, 15 bp, Homo sapiens
ccagtgtgcaatggc

SEQ ID NO: 1896015 - DNA, 15 bp, Homo sapiens
cagtgtgcaatggcc

SEQ ID NO: 1896016 - DNA, 15 bp, Homo sapiens
agtgtgcaatggccc

SEQ ID NO: 1896017 - DNA, 15 bp, Homo sapiens
gtgtgcaatggccca

SEQ ID NO: 1896018 - DNA, 15 bp, Homo sapiens
tgtgcaatggcccat

SEQ ID NO: 1896019 - DNA, 15 bp, Homo sapiens
gtgcaatggcccatg

SEQ ID NO: 1896020 - DNA, 15 bp, Homo sapiens
tgcaatggcccatgc

SEQ ID NO: 1896021 - DNA, 15 bp, Homo sapiens
gcaatggcccatgca

SEQ ID NO: 1896022 - DNA, 15 bp, Homo sapiens
caatggcccatgcaa

SEQ ID NO: 1896023 - DNA, 15 bp, Homo sapiens
aatggcccatgcaag

SEQ ID NO: 1896024 - DNA, 15 bp, Homo sapiens
atggcccatgcaagg

SEQ ID NO: 1896025 - DNA, 15 bp, Homo sapiens
tggcccatgcaaggt

SEQ ID NO: 1896026 - DNA, 15 bp, Homo sapiens
ggcccatgcaaggtc

SEQ ID NO: 1896027 - DNA, 15 bp, Homo sapiens
gcccatgcaaggtcg

SEQ ID NO: 1896028 - DNA, 15 bp, Homo sapiens
cccatgcaaggtcgg

SEQ ID NO: 1896029 - DNA, 15 bp, Homo sapiens
ccatgcaaggtcggt

SEQ ID NO: 1896030 - DNA, 15 bp, Homo sapiens
catgcaaggtcggtg

SEQ ID NO: 1896031 - DNA, 15 bp, Homo sapiens
atgcaaggtcggtgc

SEQ ID NO: 1896032 - DNA, 15 bp, Homo sapiens
tgcaaggtcggtgcc

SEQ ID NO: 1896033 - DNA, 15 bp, Homo sapiens
gcaaggtcggtgcct

SEQ ID NO: 1896034 - DNA, 15 bp, Homo sapiens
caaggtcggtgcctt

SEQ ID NO: 1896035 - DNA, 15 bp, Homo sapiens
aaggtcggtgccttt

SEQ ID NO: 1896036 - DNA, 15 bp, Homo sapiens
aggtcggtgcctttc

SEQ ID NO: 1896037 - DNA, 15 bp, Homo sapiens
ggtcggtgcctttcc

SEQ ID NO: 1896038 - DNA, 15 bp, Homo sapiens
gtcggtgcctttcct

SEQ ID NO: 1896039 - DNA, 15 bp, Homo sapiens
tcggtgcctttcctc

SEQ ID NO: 1896040 - DNA, 15 bp, Homo sapiens
cggtgcctttcctct

SEQ ID NO: 1896041 - DNA, 15 bp, Homo sapiens
ggtgcctttcctctg

SEQ ID NO: 1896042 - DNA, 15 bp, Homo sapiens
gtgcctttcctctga

SEQ ID NO: 1896043 - DNA, 15 bp, Homo sapiens
tgcctttcctctgaa

SEQ ID NO: 1896044 - DNA, 15 bp, Homo sapiens
gcctttcctctgaag

SEQ ID NO: 1896045 - DNA, 15 bp, Homo sapiens
cctttcctctgaaga

SEQ ID NO: 1896046 - DNA, 15 bp, Homo sapiens
ctttcctctgaagat

SEQ ID NO: 1896047 - DNA, 15 bp, Homo sapiens
tttcctctgaagatc

SEQ ID NO: 1896048 - DNA, 15 bp, Homo sapiens
ttcctctgaagatct

SEQ ID NO: 1896049 - DNA, 15 bp, Homo sapiens
tcctctgaagatctg

SEQ ID NO: 1896050 - DNA, 15 bp, Homo sapiens
cctctgaagatctga

SEQ ID NO: 1896051 - DNA, 15 bp, Homo sapiens
ctctgaagatctgaa

SEQ ID NO: 1896052 - DNA, 15 bp, Homo sapiens
tctgaagatctgaaa

SEQ ID NO: 1896053 - DNA, 15 bp, Homo sapiens
ctgaagatctgaaag

SEQ ID NO: 1896054 - DNA, 15 bp, Homo sapiens
tgaagatctgaaagt

SEQ ID NO: 1896055 - DNA, 15 bp, Homo sapiens
gaagatctgaaagtt

SEQ ID NO: 1896056 - DNA, 15 bp, Homo sapiens
aagatctgaaagttc

SEQ ID NO: 1896057 - DNA, 15 bp, Homo sapiens
agatctgaaagttct

SEQ ID NO: 1896058 - DNA, 15 bp, Homo sapiens
gatctgaaagttctg

SEQ ID NO: 1896059 - DNA, 15 bp, Homo sapiens
atctgaaagttctgg

SEQ ID NO: 1896060 - DNA, 15 bp, Homo sapiens
tctgaaagttctggc

SEQ ID NO: 1896061 - DNA, 15 bp, Homo sapiens
ctgaaagttctggcc

SEQ ID NO: 1896062 - DNA, 15 bp, Homo sapiens
tgaaagttctggcct

SEQ ID NO: 1896063 - DNA, 15 bp, Homo sapiens
gaaagttctggcctt

SEQ ID NO: 1896064 - DNA, 15 bp, Homo sapiens
aaagttctggccttt

SEQ ID NO: 1896065 - DNA, 15 bp, Homo sapiens
aagttctggcctttt

SEQ ID NO: 1896066 - DNA, 15 bp, Homo sapiens
agttctggccttttt

SEQ ID NO: 1896067 - DNA, 15 bp, Homo sapiens
gttctggcctttttc

SEQ ID NO: 1896068 - DNA, 15 bp, Homo sapiens
ttctggcctttttcc

SEQ ID NO: 1896069 - DNA, 15 bp, Homo sapiens
tctggcctttttcca

SEQ ID NO: 1896070 - DNA, 15 bp, Homo sapiens
ctggcctttttccag

SEQ ID NO: 1896071 - DNA, 15 bp, Homo sapiens
tggcctttttccagc

SEQ ID NO: 1896072 - DNA, 15 bp, Homo sapiens
ggcctttttccagca

SEQ ID NO: 1896073 - DNA, 15 bp, Homo sapiens
gcctttttccagcag

SEQ ID NO: 1896074 - DNA, 15 bp, Homo sapiens
cctttttccagcagc

SEQ ID NO: 1896075 - DNA, 15 bp, Homo sapiens
ctttttccagcagct

SEQ ID NO: 1896076 - DNA, 15 bp, Homo sapiens
tttttccagcagctc

SEQ ID NO: 1896077 - DNA, 15 bp, Homo sapiens
ttttccagcagctct

SEQ ID NO: 1896078 - DNA, 15 bp, Homo sapiens
tttccagcagctcta

SEQ ID NO: 1896079 - DNA, 15 bp, Homo sapiens
ttccagcagctctag

SEQ ID NO: 1896080 - DNA, 15 bp, Homo sapiens
tccagcagctctagg

SEQ ID NO: 1896081 - DNA, 15 bp, Homo sapiens
ccagcagctctaggc

SEQ ID NO: 1896082 - DNA, 15 bp, Homo sapiens
cagcagctctaggca

SEQ ID NO: 1896083 - DNA, 15 bp, Homo sapiens
agcagctctaggcat

SEQ ID NO: 1896084 - DNA, 15 bp, Homo sapiens
gcagctctaggcatc

SEQ ID NO: 1896085 - DNA, 15 bp, Homo sapiens
cagctctaggcatct

SEQ ID NO: 1896086 - DNA, 15 bp, Homo sapiens
agctctaggcatcta

SEQ ID NO: 1896087 - DNA, 15 bp, Homo sapiens
gctctaggcatctat

SEQ ID NO: 1896088 - DNA, 15 bp, Homo sapiens
ctctaggcatctatc

SEQ ID NO: 1896089 - DNA, 15 bp, Homo sapiens
tctaggcatctatcc

SEQ ID NO: 1896090 - DNA, 15 bp, Homo sapiens
ctaggcatctatcca

SEQ ID NO: 1896091 - DNA, 15 bp, Homo sapiens
taggcatctatccaa

SEQ ID NO: 1896092 - DNA, 15 bp, Homo sapiens
aggcatctatccaag

SEQ ID NO: 1896093 - DNA, 15 bp, Homo sapiens
ggcatctatccaagc

SEQ ID NO: 1896094 - DNA, 15 bp, Homo sapiens
gcatctatccaagcc

SEQ ID NO: 1896095 - DNA, 15 bp, Homo sapiens
catctatccaagcca

SEQ ID NO: 1896096 - DNA, 15 bp, Homo sapiens
atctatccaagccag

SEQ ID NO: 1896097 - DNA, 15 bp, Homo sapiens
tctatccaagccagt

SEQ ID NO: 1896098 - DNA, 15 bp, Homo sapiens
ctatccaagccagta

SEQ ID NO: 1896099 - DNA, 15 bp, Homo sapiens
tatccaagccagtat

SEQ ID NO: 1896100 - DNA, 15 bp, Homo sapiens
atccaagccagtatt

SEQ ID NO: 1896101 - DNA, 15 bp, Homo sapiens
tccaagccagtatta

SEQ ID NO: 1896102 - DNA, 15 bp, Homo sapiens
ccaagccagtattac

SEQ ID NO: 1896103 - DNA, 15 bp, Homo sapiens
caagccagtattacc

SEQ ID NO: 1896104 - DNA, 15 bp, Homo sapiens
aagccagtattacca

SEQ ID NO: 1896105 - DNA, 15 bp, Homo sapiens
agccagtattaccaa

SEQ ID NO: 1896106 - DNA, 15 bp, Homo sapiens
gccagtattaccaag

SEQ ID NO: 1896107 - DNA, 15 bp, Homo sapiens
ccagtattaccaaga

SEQ ID NO: 1896108 - DNA, 15 bp, Homo sapiens
cagtattaccaagat

SEQ ID NO: 1896109 - DNA, 15 bp, Homo sapiens
agtattaccaagatg

SEQ ID NO: 1896110 - DNA, 15 bp, Homo sapiens
gtattaccaagatga

SEQ ID NO: 1896111 - DNA, 15 bp, Homo sapiens
tattaccaagatgac

SEQ ID NO: 1896112 - DNA, 15 bp, Homo sapiens
attaccaagatgact

SEQ ID NO: 1896113 - DNA, 15 bp, Homo sapiens
ttaccaagatgactg

SEQ ID NO: 1896114 - DNA, 15 bp, Homo sapiens
taccaagatgactga

SEQ ID NO: 1896115 - DNA, 15 bp, Homo sapiens
accaagatgactgag

SEQ ID NO: 1896116 - DNA, 15 bp, Homo sapiens
ccaagatgactgaga

SEQ ID NO: 1896117 - DNA, 15 bp, Homo sapiens
caagatgactgagag

SEQ ID NO: 1896118 - DNA, 15 bp, Homo sapiens
aagatgactgagagt

SEQ ID NO: 1896119 - DNA, 15 bp, Homo sapiens
agatgactgagagtt

SEQ ID NO: 1896120 - DNA, 15 bp, Homo sapiens
gatgactgagagttc

SEQ ID NO: 1896121 - DNA, 15 bp, Homo sapiens
atgactgagagttct

SEQ ID NO: 1896122 - DNA, 15 bp, Homo sapiens
tgactgagagttctt

SEQ ID NO: 1896123 - DNA, 15 bp, Homo sapiens
gactgagagttcttg

SEQ ID NO: 1896124 - DNA, 15 bp, Homo sapiens
actgagagttcttga

SEQ ID NO: 1896125 - DNA, 15 bp, Homo sapiens
ctgagagttcttgac

SEQ ID NO: 1896126 - DNA, 15 bp, Homo sapiens
tgagagttcttgact

SEQ ID NO: 1896127 - DNA, 15 bp, Homo sapiens
gagagttcttgactc

SEQ ID NO: 1896128 - DNA, 15 bp, Homo sapiens
agagttcttgactca

SEQ ID NO: 1896129 - DNA, 15 bp, Homo sapiens
gagttcttgactcaa

SEQ ID NO: 1896130 - DNA, 15 bp, Homo sapiens
agttcttgactcaag

SEQ ID NO: 1896131 - DNA, 15 bp, Homo sapiens
gttcttgactcaagc

SEQ ID NO: 1896132 - DNA, 15 bp, Homo sapiens
ttcttgactcaagcc

SEQ ID NO: 1896133 - DNA, 15 bp, Homo sapiens
tcttgactcaagcct

SEQ ID NO: 1896134 - DNA, 15 bp, Homo sapiens
cttgactcaagccta

SEQ ID NO: 1896135 - DNA, 15 bp, Homo sapiens
ttgactcaagcctac

SEQ ID NO: 1896136 - DNA, 15 bp, Homo sapiens
tgactcaagcctaca

SEQ ID NO: 1896137 - DNA, 15 bp, Homo sapiens
gactcaagcctacag

SEQ ID NO: 1896138 - DNA, 15 bp, Homo sapiens
actcaagcctacaga

SEQ ID NO: 1896139 - DNA, 15 bp, Homo sapiens
ctcaagcctacagaa

SEQ ID NO: 1896140 - DNA, 15 bp, Homo sapiens
tcaagcctacagaag

SEQ ID NO: 1896141 - DNA, 15 bp, Homo sapiens
caagcctacagaaga

SEQ ID NO: 1896142 - DNA, 15 bp, Homo sapiens
aagcctacagaagac

SEQ ID NO: 1896143 - DNA, 15 bp, Homo sapiens
agcctacagaagaca

SEQ ID NO: 1896144 - DNA, 15 bp, Homo sapiens
gcctacagaagacac

SEQ ID NO: 1896145 - DNA, 15 bp, Homo sapiens
cctacagaagacact

SEQ ID NO: 1896146 - DNA, 15 bp, Homo sapiens
ctacagaagacactc

SEQ ID NO: 1896147 - DNA, 15 bp, Homo sapiens
tacagaagacactca

SEQ ID NO: 1896148 - DNA, 15 bp, Homo sapiens
acagaagacactcac

SEQ ID NO: 1896149 - DNA, 15 bp, Homo sapiens
cagaagacactcact

SEQ ID NO: 1896150 - DNA, 15 bp, Homo sapiens
agaagacactcactt

SEQ ID NO: 1896151 - DNA, 15 bp, Homo sapiens
gaagacactcacttt

SEQ ID NO: 1896152 - DNA, 15 bp, Homo sapiens
aagacactcactttg

SEQ ID NO: 1896153 - DNA, 15 bp, Homo sapiens
agacactcactttgc

SEQ ID NO: 1896154 - DNA, 15 bp, Homo sapiens
gacactcactttgcc

SEQ ID NO: 1896155 - DNA, 15 bp, Homo sapiens
acactcactttgcct

SEQ ID NO: 1896156 - DNA, 15 bp, Homo sapiens
cactcactttgcctc

SEQ ID NO: 1896157 - DNA, 15 bp, Homo sapiens
actcactttgcctct

SEQ ID NO: 1896158 - DNA, 15 bp, Homo sapiens
ctcactttgcctctt

SEQ ID NO: 1896159 - DNA, 15 bp, Homo sapiens
tcactttgcctcttt

SEQ ID NO: 1896160 - DNA, 15 bp, Homo sapiens
cactttgcctctttt

SEQ ID NO: 1896161 - DNA, 15 bp, Homo sapiens
actttgcctctttta

SEQ ID NO: 1896162 - DNA, 15 bp, Homo sapiens
ctttgcctcttttaa

SEQ ID NO: 1896163 - DNA, 15 bp, Homo sapiens
tttgcctcttttaat

SEQ ID NO: 1896164 - DNA, 15 bp, Homo sapiens
ttgcctcttttaatt

SEQ ID NO: 1896165 - DNA, 15 bp, Homo sapiens
tgcctcttttaattt

SEQ ID NO: 1896166 - DNA, 15 bp, Homo sapiens
gcctcttttaatttt

SEQ ID NO: 1896167 - DNA, 15 bp, Homo sapiens
cctcttttaattttc

SEQ ID NO: 1896168 - DNA, 15 bp, Homo sapiens
ctcttttaattttca

SEQ ID NO: 1896169 - DNA, 15 bp, Homo sapiens
tcttttaattttcaa

SEQ ID NO: 1896170 - DNA, 15 bp, Homo sapiens
cttttaattttcaaa

SEQ ID NO: 1896171 - DNA, 15 bp, Homo sapiens
ttttaattttcaaaa

SEQ ID NO: 1896172 - DNA, 15 bp, Homo sapiens
ttaattttcaaaata

SEQ ID NO: 1896173 - DNA, 15 bp, Homo sapiens
taattttcaaaataa

SEQ ID NO: 1896174 - DNA, 15 bp, Homo sapiens
aattttcaaaataat

SEQ ID NO: 1896175 - DNA, 15 bp, Homo sapiens
attttcaaaataatt

SEQ ID NO: 1896176 - DNA, 15 bp, Homo sapiens
ttttcaaaataattc

SEQ ID NO: 1896177 - DNA, 15 bp, Homo sapiens
tttcaaaataattct

SEQ ID NO: 1896178 - DNA, 15 bp, Homo sapiens
ttcaaaataattctg

SEQ ID NO: 1896179 - DNA, 15 bp, Homo sapiens
tcaaaataattctgt

SEQ ID NO: 1896180 - DNA, 15 bp, Homo sapiens
caaaataattctgtg

SEQ ID NO: 1896181 - DNA, 15 bp, Homo sapiens
aaaataattctgtgc

SEQ ID NO: 1896182 - DNA, 15 bp, Homo sapiens
aaataattctgtgca

SEQ ID NO: 1896183 - DNA, 15 bp, Homo sapiens
aataattctgtgcag

SEQ ID NO: 1896184 - DNA, 15 bp, Homo sapiens
ataattctgtgcaga

SEQ ID NO: 1896185 - DNA, 15 bp, Homo sapiens
taattctgtgcagat

SEQ ID NO: 1896186 - DNA, 15 bp, Homo sapiens
aattctgtgcagata

SEQ ID NO: 1896187 - DNA, 15 bp, Homo sapiens
attctgtgcagatat

SEQ ID NO: 1896188 - DNA, 15 bp, Homo sapiens
ttctgtgcagatata

SEQ ID NO: 1896189 - DNA, 15 bp, Homo sapiens
tctgtgcagatataa

SEQ ID NO: 1896190 - DNA, 15 bp, Homo sapiens
ctgtgcagatataat

SEQ ID NO: 1896191 - DNA, 15 bp, Homo sapiens
tgtgcagatataatt

SEQ ID NO: 1896192 - DNA, 15 bp, Homo sapiens
gtgcagatataatta

SEQ ID NO: 1896193 - DNA, 15 bp, Homo sapiens
tgcagatataattac

SEQ ID NO: 1896194 - DNA, 15 bp, Homo sapiens
gcagatataattaca

SEQ ID NO: 1896195 - DNA, 15 bp, Homo sapiens
cagatataattacat

SEQ ID NO: 1896196 - DNA, 15 bp, Homo sapiens
agatataattacatt

SEQ ID NO: 1896197 - DNA, 15 bp, Homo sapiens
gatataattacatta

SEQ ID NO: 1896198 - DNA, 15 bp, Homo sapiens
atataattacattaa

SEQ ID NO: 1896199 - DNA, 15 bp, Homo sapiens
tataattacattaat

SEQ ID NO: 1896200 - DNA, 15 bp, Homo sapiens
ataattacattaatt

SEQ ID NO: 1896201 - DNA, 15 bp, Homo sapiens
taattacattaattt

SEQ ID NO: 1896202 - DNA, 15 bp, Homo sapiens
aattacattaatttt

SEQ ID NO: 1896203 - DNA, 15 bp, Homo sapiens
attacattaatttta

SEQ ID NO: 1896204 - DNA, 15 bp, Homo sapiens
ttacattaattttac

SEQ ID NO: 1896205 - DNA, 15 bp, Homo sapiens
tacattaattttaca

SEQ ID NO: 1896206 - DNA, 15 bp, Homo sapiens
acattaattttacaa

SEQ ID NO: 1896207 - DNA, 15 bp, Homo sapiens
cattaattttacaat

SEQ ID NO: 1896208 - DNA, 15 bp, Homo sapiens
attaattttacaatg

SEQ ID NO: 1896209 - DNA, 15 bp, Homo sapiens
ttaattttacaatgc

SEQ ID NO: 1896210 - DNA, 15 bp, Homo sapiens
taattttacaatgca

SEQ ID NO: 1896211 - DNA, 15 bp, Homo sapiens
aattttacaatgcaa

SEQ ID NO: 1896212 - DNA, 15 bp, Homo sapiens
attttacaatgcaaa

SEQ ID NO: 1896213 - DNA, 15 bp, Homo sapiens
ttttacaatgcaaat

SEQ ID NO: 1896214 - DNA, 15 bp, Homo sapiens
tttacaatgcaaata

SEQ ID NO: 1896215 - DNA, 15 bp, Homo sapiens
ttacaatgcaaatat

SEQ ID NO: 1896216 - DNA, 15 bp, Homo sapiens
tacaatgcaaatatt

SEQ ID NO: 1896217 - DNA, 15 bp, Homo sapiens
acaatgcaaatatta

SEQ ID NO: 1896218 - DNA, 15 bp, Homo sapiens
caatgcaaatattaa

SEQ ID NO: 1896219 - DNA, 15 bp, Homo sapiens
aatgcaaatattaat

SEQ ID NO: 1896220 - DNA, 15 bp, Homo sapiens
atgcaaatattaatg

SEQ ID NO: 1896221 - DNA, 15 bp, Homo sapiens
tgcaaatattaatgc

SEQ ID NO: 1896222 - DNA, 15 bp, Homo sapiens
gcaaatattaatgcc

SEQ ID NO: 1896223 - DNA, 15 bp, Homo sapiens
caaatattaatgccc

SEQ ID NO: 1896224 - DNA, 15 bp, Homo sapiens
aaatattaatgccca

SEQ ID NO: 1896225 - DNA, 15 bp, Homo sapiens
aatattaatgcccat

SEQ ID NO: 1896226 - DNA, 15 bp, Homo sapiens
atattaatgcccatg

SEQ ID NO: 1896227 - DNA, 15 bp, Homo sapiens
tattaatgcccatgt

SEQ ID NO: 1896228 - DNA, 15 bp, Homo sapiens
attaatgcccatgtt

SEQ ID NO: 1896229 - DNA, 15 bp, Homo sapiens
ttaatgcccatgtta

SEQ ID NO: 1896230 - DNA, 15 bp, Homo sapiens
taatgcccatgttag

SEQ ID NO: 1896231 - DNA, 15 bp, Homo sapiens
aatgcccatgttagt

SEQ ID NO: 1896232 - DNA, 15 bp, Homo sapiens
atgcccatgttagtt

SEQ ID NO: 1896233 - DNA, 15 bp, Homo sapiens
tgcccatgttagttg

SEQ ID NO: 1896234 - DNA, 15 bp, Homo sapiens
gcccatgttagttgc

SEQ ID NO: 1896235 - DNA, 15 bp, Homo sapiens
cccatgttagttgct

SEQ ID NO: 1896236 - DNA, 15 bp, Homo sapiens
ccatgttagttgctt

SEQ ID NO: 1896237 - DNA, 15 bp, Homo sapiens
catgttagttgctta

SEQ ID NO: 1896238 - DNA, 15 bp, Homo sapiens
atgttagttgcttat

SEQ ID NO: 1896239 - DNA, 15 bp, Homo sapiens
tgttagttgcttatg

SEQ ID NO: 1896240 - DNA, 15 bp, Homo sapiens
gttagttgcttatgg

SEQ ID NO: 1896241 - DNA, 15 bp, Homo sapiens
ttagttgcttatgga

SEQ ID NO: 1896242 - DNA, 15 bp, Homo sapiens
tagttgcttatggat

SEQ ID NO: 1896243 - DNA, 15 bp, Homo sapiens
agttgcttatggata

SEQ ID NO: 1896244 - DNA, 15 bp, Homo sapiens
gttgcttatggatac

SEQ ID NO: 1896245 - DNA, 15 bp, Homo sapiens
ttgcttatggatact

SEQ ID NO: 1896246 - DNA, 15 bp, Homo sapiens
tgcttatggatacta

SEQ ID NO: 1896247 - DNA, 15 bp, Homo sapiens
gcttatggatactaa

SEQ ID NO: 1896248 - DNA, 15 bp, Homo sapiens
cttatggatactaaa

SEQ ID NO: 1896249 - DNA, 15 bp, Homo sapiens
ttatggatactaaac

SEQ ID NO: 1896250 - DNA, 15 bp, Homo sapiens
tatggatactaaact

SEQ ID NO: 1896251 - DNA, 15 bp, Homo sapiens
atggatactaaacta

SEQ ID NO: 1896252 - DNA, 15 bp, Homo sapiens
tggatactaaactag

SEQ ID NO: 1896253 - DNA, 15 bp, Homo sapiens
ggatactaaactagc

SEQ ID NO: 1896254 - DNA, 15 bp, Homo sapiens
gatactaaactagct

SEQ ID NO: 1896255 - DNA, 15 bp, Homo sapiens
atactaaactagctt

SEQ ID NO: 1896256 - DNA, 15 bp, Homo sapiens
tactaaactagctta

SEQ ID NO: 1896257 - DNA, 15 bp, Homo sapiens
actaaactagcttaa

SEQ ID NO: 1896258 - DNA, 15 bp, Homo sapiens
ctaaactagcttaaa

SEQ ID NO: 1896259 - DNA, 15 bp, Homo sapiens
taaactagcttaaaa

SEQ ID NO: 1896260 - DNA, 15 bp, Homo sapiens
aaactagcttaaaaa

SEQ ID NO: 1896261 - DNA, 15 bp, Homo sapiens
aactagcttaaaaaa

SEQ ID NO: 1896262 - DNA, 15 bp, Homo sapiens
actagcttaaaaaaa

SEQ ID NO: 1896263 - DNA, 15 bp, Homo sapiens
ctagcttaaaaaaat

SEQ ID NO: 1896264 - DNA, 15 bp, Homo sapiens
tagcttaaaaaaata

SEQ ID NO: 1896265 - DNA, 15 bp, Homo sapiens
agcttaaaaaaatac

SEQ ID NO: 1896266 - DNA, 15 bp, Homo sapiens
gcttaaaaaaatacc

SEQ ID NO: 1896267 - DNA, 15 bp, Homo sapiens
cttaaaaaaatacca

SEQ ID NO: 1896268 - DNA, 15 bp, Homo sapiens
ttaaaaaaataccag

SEQ ID NO: 1896269 - DNA, 15 bp, Homo sapiens
taaaaaaataccaga

SEQ ID NO: 1896270 - DNA, 15 bp, Homo sapiens
aaaaaaataccagat

SEQ ID NO: 1896271 - DNA, 15 bp, Homo sapiens
aaaaaataccagatc

SEQ ID NO: 1896272 - DNA, 15 bp, Homo sapiens
aaaaataccagatct

SEQ ID NO: 1896273 - DNA, 15 bp, Homo sapiens
aaaataccagatctt

SEQ ID NO: 1896274 - DNA, 15 bp, Homo sapiens
aaataccagatcttc

SEQ ID NO: 1896275 - DNA, 15 bp, Homo sapiens
aataccagatcttct

SEQ ID NO: 1896276 - DNA, 15 bp, Homo sapiens
ataccagatcttctc

SEQ ID NO: 1896277 - DNA, 15 bp, Homo sapiens
taccagatcttctca

SEQ ID NO: 1896278 - DNA, 15 bp, Homo sapiens
accagatcttctcac

SEQ ID NO: 1896279 - DNA, 15 bp, Homo sapiens
ccagatcttctcaca

SEQ ID NO: 1896280 - DNA, 15 bp, Homo sapiens
cagatcttctcacaa

SEQ ID NO: 1896281 - DNA, 15 bp, Homo sapiens
agatcttctcacaac

SEQ ID NO: 1896282 - DNA, 15 bp, Homo sapiens
gatcttctcacaacc

SEQ ID NO: 1896283 - DNA, 15 bp, Homo sapiens
atcttctcacaacca

SEQ ID NO: 1896284 - DNA, 15 bp, Homo sapiens
tcttctcacaaccaa

SEQ ID NO: 1896285 - DNA, 15 bp, Homo sapiens
cttctcacaaccaat

SEQ ID NO: 1896286 - DNA, 15 bp, Homo sapiens
ttctcacaaccaatt

SEQ ID NO: 1896287 - DNA, 15 bp, Homo sapiens
tctcacaaccaattc

SEQ ID NO: 1896288 - DNA, 15 bp, Homo sapiens
ctcacaaccaattca

SEQ ID NO: 1896289 - DNA, 15 bp, Homo sapiens
tcacaaccaattcag

SEQ ID NO: 1896290 - DNA, 15 bp, Homo sapiens
cacaaccaattcagt

SEQ ID NO: 1896291 - DNA, 15 bp, Homo sapiens
acaaccaattcagta

SEQ ID NO: 1896292 - DNA, 15 bp, Homo sapiens
caaccaattcagtac

SEQ ID NO: 1896293 - DNA, 15 bp, Homo sapiens
aaccaattcagtact

SEQ ID NO: 1896294 - DNA, 15 bp, Homo sapiens
accaattcagtactt

SEQ ID NO: 1896295 - DNA, 15 bp, Homo sapiens
ccaattcagtactta

SEQ ID NO: 1896296 - DNA, 15 bp, Homo sapiens
caattcagtacttat

SEQ ID NO: 1896297 - DNA, 15 bp, Homo sapiens
aattcagtacttatc

SEQ ID NO: 1896298 - DNA, 15 bp, Homo sapiens
attcagtacttatct

SEQ ID NO: 1896299 - DNA, 15 bp, Homo sapiens
ttcagtacttatctc

SEQ ID NO: 1896300 - DNA, 15 bp, Homo sapiens
tcagtacttatctcc

SEQ ID NO: 1896301 - DNA, 15 bp, Homo sapiens
cagtacttatctcct

SEQ ID NO: 1896302 - DNA, 15 bp, Homo sapiens
agtacttatctccta

SEQ ID NO: 1896303 - DNA, 15 bp, Homo sapiens
gtacttatctcctat

SEQ ID NO: 1896304 - DNA, 15 bp, Homo sapiens
tacttatctcctatc

SEQ ID NO: 1896305 - DNA, 15 bp, Homo sapiens
acttatctcctatca

SEQ ID NO: 1896306 - DNA, 15 bp, Homo sapiens
cttatctcctatcaa

SEQ ID NO: 1896307 - DNA, 15 bp, Homo sapiens
ttatctcctatcaac

SEQ ID NO: 1896308 - DNA, 15 bp, Homo sapiens
tatctcctatcaact

SEQ ID NO: 1896309 - DNA, 15 bp, Homo sapiens
atctcctatcaacta

SEQ ID NO: 1896310 - DNA, 15 bp, Homo sapiens
tctcctatcaactaa

SEQ ID NO: 1896311 - DNA, 15 bp, Homo sapiens
ctcctatcaactaaa

SEQ ID NO: 1896312 - DNA, 15 bp, Homo sapiens
tcctatcaactaaat

SEQ ID NO: 1896313 - DNA, 15 bp, Homo sapiens
cctatcaactaaata

SEQ ID NO: 1896314 - DNA, 15 bp, Homo sapiens
ctatcaactaaataa

SEQ ID NO: 1896315 - DNA, 15 bp, Homo sapiens
tatcaactaaataat

SEQ ID NO: 1896316 - DNA, 15 bp, Homo sapiens
atcaactaaataatt

SEQ ID NO: 1896317 - DNA, 15 bp, Homo sapiens
tcaactaaataattc

SEQ ID NO: 1896318 - DNA, 15 bp, Homo sapiens
caactaaataattcc

SEQ ID NO: 1896319 - DNA, 15 bp, Homo sapiens
aactaaataattcca

SEQ ID NO: 1896320 - DNA, 15 bp, Homo sapiens
actaaataattccac

SEQ ID NO: 1896321 - DNA, 15 bp, Homo sapiens
ctaaataattccact

SEQ ID NO: 1896322 - DNA, 15 bp, Homo sapiens
taaataattccactt

SEQ ID NO: 1896323 - DNA, 15 bp, Homo sapiens
aaataattccacttc

SEQ ID NO: 1896324 - DNA, 15 bp, Homo sapiens
aataattccacttca

SEQ ID NO: 1896325 - DNA, 15 bp, Homo sapiens
ataattccacttcac

SEQ ID NO: 1896326 - DNA, 15 bp, Homo sapiens
taattccacttcact

SEQ ID NO: 1896327 - DNA, 15 bp, Homo sapiens
aattccacttcactg

SEQ ID NO: 1896328 - DNA, 15 bp, Homo sapiens
attccacttcactgt

SEQ ID NO: 1896329 - DNA, 15 bp, Homo sapiens
ttccacttcactgtc

SEQ ID NO: 1896330 - DNA, 15 bp, Homo sapiens
tccacttcactgtct

SEQ ID NO: 1896331 - DNA, 15 bp, Homo sapiens
ccacttcactgtcta

SEQ ID NO: 1896332 - DNA, 15 bp, Homo sapiens
cacttcactgtctaa

SEQ ID NO: 1896333 - DNA, 15 bp, Homo sapiens
acttcactgtctaaa

SEQ ID NO: 1896334 - DNA, 15 bp, Homo sapiens
cttcactgtctaaaa

SEQ ID NO: 1896335 - DNA, 15 bp, Homo sapiens
ttcactgtctaaaac

SEQ ID NO: 1896336 - DNA, 15 bp, Homo sapiens
tcactgtctaaaaca

SEQ ID NO: 1896337 - DNA, 15 bp, Homo sapiens
cactgtctaaaacat

SEQ ID NO: 1896338 - DNA, 15 bp, Homo sapiens
actgtctaaaacatt

SEQ ID NO: 1896339 - DNA, 15 bp, Homo sapiens
ctgtctaaaacattt

SEQ ID NO: 1896340 - DNA, 15 bp, Homo sapiens
tgtctaaaacattta

SEQ ID NO: 1896341 - DNA, 15 bp, Homo sapiens
gtctaaaacatttat

SEQ ID NO: 1896342 - DNA, 15 bp, Homo sapiens
tctaaaacatttata

SEQ ID NO: 1896343 - DNA, 15 bp, Homo sapiens
ctaaaacatttatag

SEQ ID NO: 1896344 - DNA, 15 bp, Homo sapiens
taaaacatttatagg

SEQ ID NO: 1896345 - DNA, 15 bp, Homo sapiens
aaaacatttatagga

SEQ ID NO: 1896346 - DNA, 15 bp, Homo sapiens
aaacatttataggat

SEQ ID NO: 1896347 - DNA, 15 bp, Homo sapiens
aacatttataggatt

SEQ ID NO: 1896348 - DNA, 15 bp, Homo sapiens
acatttataggattt

SEQ ID NO: 1896349 - DNA, 15 bp, Homo sapiens
catttataggatttc

SEQ ID NO: 1896350 - DNA, 15 bp, Homo sapiens
atttataggatttct

SEQ ID NO: 1896351 - DNA, 15 bp, Homo sapiens
tttataggatttctt

SEQ ID NO: 1896352 - DNA, 15 bp, Homo sapiens
ttataggatttcttt

SEQ ID NO: 1896353 - DNA, 15 bp, Homo sapiens
tataggatttcttta

SEQ ID NO: 1896354 - DNA, 15 bp, Homo sapiens
ataggatttctttaa

SEQ ID NO: 1896355 - DNA, 15 bp, Homo sapiens
taggatttctttaaa

SEQ ID NO: 1896356 - DNA, 15 bp, Homo sapiens
aggatttctttaaaa

SEQ ID NO: 1896357 - DNA, 15 bp, Homo sapiens
ggatttctttaaaat

SEQ ID NO: 1896358 - DNA, 15 bp, Homo sapiens
gatttctttaaaatt

SEQ ID NO: 1896359 - DNA, 15 bp, Homo sapiens
atttctttaaaattc

SEQ ID NO: 1896360 - DNA, 15 bp, Homo sapiens
tttctttaaaattcc

SEQ ID NO: 1896361 - DNA, 15 bp, Homo sapiens
ttctttaaaattcca

SEQ ID NO: 1896362 - DNA, 15 bp, Homo sapiens
tctttaaaattccat

SEQ ID NO: 1896363 - DNA, 15 bp, Homo sapiens
ctttaaaattccatt

SEQ ID NO: 1896364 - DNA, 15 bp, Homo sapiens
tttaaaattccattt

SEQ ID NO: 1896365 - DNA, 15 bp, Homo sapiens
ttaaaattccatttt

SEQ ID NO: 1896366 - DNA, 15 bp, Homo sapiens
taaaattccatttta

SEQ ID NO: 1896367 - DNA, 15 bp, Homo sapiens
aaaattccattttaa

SEQ ID NO: 1896368 - DNA, 15 bp, Homo sapiens
aaattccattttaag

SEQ ID NO: 1896369 - DNA, 15 bp, Homo sapiens
aattccattttaagc

SEQ ID NO: 1896370 - DNA, 15 bp, Homo sapiens
attccattttaagcc

SEQ ID NO: 1896371 - DNA, 15 bp, Homo sapiens
ttccattttaagcct

SEQ ID NO: 1896372 - DNA, 15 bp, Homo sapiens
tccattttaagccta

SEQ ID NO: 1896373 - DNA, 15 bp, Homo sapiens
ccattttaagcctaa

SEQ ID NO: 1896374 - DNA, 15 bp, Homo sapiens
cattttaagcctaaa

SEQ ID NO: 1896375 - DNA, 15 bp, Homo sapiens
attttaagcctaaag

SEQ ID NO: 1896376 - DNA, 15 bp, Homo sapiens
ttttaagcctaaagg

SEQ ID NO: 1896377 - DNA, 15 bp, Homo sapiens
tttaagcctaaaggc

SEQ ID NO: 1896378 - DNA, 15 bp, Homo sapiens
ttaagcctaaaggct

SEQ ID NO: 1896379 - DNA, 15 bp, Homo sapiens
taagcctaaaggctt

SEQ ID NO: 1896380 - DNA, 15 bp, Homo sapiens
aagcctaaaggctta

SEQ ID NO: 1896381 - DNA, 15 bp, Homo sapiens
agcctaaaggcttaa

SEQ ID NO: 1896382 - DNA, 15 bp, Homo sapiens
gcctaaaggcttaat

SEQ ID NO: 1896383 - DNA, 15 bp, Homo sapiens
cctaaaggcttaata

SEQ ID NO: 1896384 - DNA, 15 bp, Homo sapiens
ctaaaggcttaataa

SEQ ID NO: 1896385 - DNA, 15 bp, Homo sapiens
taaaggcttaataaa

SEQ ID NO: 1896386 - DNA, 15 bp, Homo sapiens
aaaggcttaataaag

SEQ ID NO: 1896387 - DNA, 15 bp, Homo sapiens
aaggcttaataaagt

SEQ ID NO: 1896388 - DNA, 15 bp, Homo sapiens
aggcttaataaagta

SEQ ID NO: 1896389 - DNA, 15 bp, Homo sapiens
ggcttaataaagtac

SEQ ID NO: 1896390 - DNA, 15 bp, Homo sapiens
gcttaataaagtaca

SEQ ID NO: 1896391 - DNA, 15 bp, Homo sapiens
cttaataaagtacac

SEQ ID NO: 1896392 - DNA, 15 bp, Homo sapiens
ttaataaagtacaca

SEQ ID NO: 1896393 - DNA, 15 bp, Homo sapiens
taataaagtacacat

SEQ ID NO: 1896394 - DNA, 15 bp, Homo sapiens
aataaagtacacata

SEQ ID NO: 1896395 - DNA, 15 bp, Homo sapiens
ataaagtacacatat

SEQ ID NO: 1896396 - DNA, 15 bp, Homo sapiens
taaagtacacatata

SEQ ID NO: 1896397 - DNA, 15 bp, Homo sapiens
aaagtacacatatat

SEQ ID NO: 1896398 - DNA, 15 bp, Homo sapiens
aagtacacatatatt

SEQ ID NO: 1896399 - DNA, 15 bp, Homo sapiens
agtacacatatattt

SEQ ID NO: 1896400 - DNA, 15 bp, Homo sapiens
gtacacatatatttt

SEQ ID NO: 1896401 - DNA, 15 bp, Homo sapiens
tacacatatattttg

SEQ ID NO: 1896402 - DNA, 15 bp, Homo sapiens
acacatatattttgg

SEQ ID NO: 1896403 - DNA, 15 bp, Homo sapiens
cacatatattttgga

SEQ ID NO: 1896404 - DNA, 15 bp, Homo sapiens
acatatattttggaa

SEQ ID NO: 1896405 - DNA, 15 bp, Homo sapiens
catatattttggaaa

SEQ ID NO: 1896406 - DNA, 15 bp, Homo sapiens
atatattttggaaag

SEQ ID NO: 1896407 - DNA, 15 bp, Homo sapiens
tatattttggaaagt

SEQ ID NO: 1896408 - DNA, 15 bp, Homo sapiens
atattttggaaagta

SEQ ID NO: 1896409 - DNA, 15 bp, Homo sapiens
tattttggaaagtat

SEQ ID NO: 1896410 - DNA, 15 bp, Homo sapiens
attttggaaagtata

SEQ ID NO: 1896411 - DNA, 15 bp, Homo sapiens
ttttggaaagtatat

SEQ ID NO: 1896412 - DNA, 15 bp, Homo sapiens
tttggaaagtatata

SEQ ID NO: 1896413 - DNA, 15 bp, Homo sapiens
ttggaaagtatatac

SEQ ID NO: 1896414 - DNA, 15 bp, Homo sapiens
tggaaagtatataca

SEQ ID NO: 1896415 - DNA, 15 bp, Homo sapiens
ggaaagtatatacac

SEQ ID NO: 1896416 - DNA, 15 bp, Homo sapiens
gaaagtatatacaca

SEQ ID NO: 1896417 - DNA, 15 bp, Homo sapiens
aaagtatatacacaa

SEQ ID NO: 1896418 - DNA, 15 bp, Homo sapiens
aagtatatacacaag

SEQ ID NO: 1896419 - DNA, 15 bp, Homo sapiens
agtatatacacaagc

SEQ ID NO: 1896420 - DNA, 15 bp, Homo sapiens
gtatatacacaagct

SEQ ID NO: 1896421 - DNA, 15 bp, Homo sapiens
tatatacacaagctc

SEQ ID NO: 1896422 - DNA, 15 bp, Homo sapiens
atatacacaagctct

SEQ ID NO: 1896423 - DNA, 15 bp, Homo sapiens
tatacacaagctctc

SEQ ID NO: 1896424 - DNA, 15 bp, Homo sapiens
atacacaagctctct

SEQ ID NO: 1896425 - DNA, 15 bp, Homo sapiens
tacacaagctctctt

SEQ ID NO: 1896426 - DNA, 15 bp, Homo sapiens
acacaagctctctta

SEQ ID NO: 1896427 - DNA, 15 bp, Homo sapiens
cacaagctctcttat

SEQ ID NO: 1896428 - DNA, 15 bp, Homo sapiens
acaagctctcttata

SEQ ID NO: 1896429 - DNA, 15 bp, Homo sapiens
caagctctcttatag

SEQ ID NO: 1896430 - DNA, 15 bp, Homo sapiens
aagctctcttatagc

SEQ ID NO: 1896431 - DNA, 15 bp, Homo sapiens
agctctcttatagcc

SEQ ID NO: 1896432 - DNA, 15 bp, Homo sapiens
gctctcttatagcct

SEQ ID NO: 1896433 - DNA, 15 bp, Homo sapiens
ctctcttatagcctc

SEQ ID NO: 1896434 - DNA, 15 bp, Homo sapiens
tctcttatagcctcc

SEQ ID NO: 1896435 - DNA, 15 bp, Homo sapiens
ctcttatagcctcct

SEQ ID NO: 1896436 - DNA, 15 bp, Homo sapiens
tcttatagcctccta

SEQ ID NO: 1896437 - DNA, 15 bp, Homo sapiens
cttatagcctcctat

SEQ ID NO: 1896438 - DNA, 15 bp, Homo sapiens
ttatagcctcctatc

SEQ ID NO: 1896439 - DNA, 15 bp, Homo sapiens
tatagcctcctatcc

SEQ ID NO: 1896440 - DNA, 15 bp, Homo sapiens
atagcctcctatcct

SEQ ID NO: 1896441 - DNA, 15 bp, Homo sapiens
tagcctcctatcctt

SEQ ID NO: 1896442 - DNA, 15 bp, Homo sapiens
agcctcctatcctta

SEQ ID NO: 1896443 - DNA, 15 bp, Homo sapiens
gcctcctatccttac

SEQ ID NO: 1896444 - DNA, 15 bp, Homo sapiens
cctcctatccttacc

SEQ ID NO: 1896445 - DNA, 15 bp, Homo sapiens
ctcctatccttacca

SEQ ID NO: 1896446 - DNA, 15 bp, Homo sapiens
tcctatccttaccag

SEQ ID NO: 1896447 - DNA, 15 bp, Homo sapiens
cctatccttaccagg

SEQ ID NO: 1896448 - DNA, 15 bp, Homo sapiens
ctatccttaccaggg

SEQ ID NO: 1896449 - DNA, 15 bp, Homo sapiens
tatccttaccaggga

SEQ ID NO: 1896450 - DNA, 15 bp, Homo sapiens
atccttaccagggag

SEQ ID NO: 1896451 - DNA, 15 bp, Homo sapiens
tccttaccagggagg

SEQ ID NO: 1896452 - DNA, 15 bp, Homo sapiens
ccttaccagggaggt

SEQ ID NO: 1896453 - DNA, 15 bp, Homo sapiens
cttaccagggaggta

SEQ ID NO: 1896454 - DNA, 15 bp, Homo sapiens
ttaccagggaggtaa

SEQ ID NO: 1896455 - DNA, 15 bp, Homo sapiens
taccagggaggtaaa

SEQ ID NO: 1896456 - DNA, 15 bp, Homo sapiens
accagggaggtaaat

SEQ ID NO: 1896457 - DNA, 15 bp, Homo sapiens
ccagggaggtaaatt

SEQ ID NO: 1896458 - DNA, 15 bp, Homo sapiens
cagggaggtaaatta

SEQ ID NO: 1896459 - DNA, 15 bp, Homo sapiens
agggaggtaaattaa

SEQ ID NO: 1896460 - DNA, 15 bp, Homo sapiens
gggaggtaaattaaa

SEQ ID NO: 1896461 - DNA, 15 bp, Homo sapiens
ggaggtaaattaaat

SEQ ID NO: 1896462 - DNA, 15 bp, Homo sapiens
gaggtaaattaaatc

SEQ ID NO: 1896463 - DNA, 15 bp, Homo sapiens
aggtaaattaaatcc

SEQ ID NO: 1896464 - DNA, 15 bp, Homo sapiens
ggtaaattaaatccc

SEQ ID NO: 1896465 - DNA, 15 bp, Homo sapiens
gtaaattaaatccct

SEQ ID NO: 1896466 - DNA, 15 bp, Homo sapiens
taaattaaatccctg

SEQ ID NO: 1896467 - DNA, 15 bp, Homo sapiens
aaattaaatccctgg

SEQ ID NO: 1896468 - DNA, 15 bp, Homo sapiens
aattaaatccctgga

SEQ ID NO: 1896469 - DNA, 15 bp, Homo sapiens
attaaatccctggac

SEQ ID NO: 1896470 - DNA, 15 bp, Homo sapiens
ttaaatccctggacc

SEQ ID NO: 1896471 - DNA, 15 bp, Homo sapiens
taaatccctggacca

SEQ ID NO: 1896472 - DNA, 15 bp, Homo sapiens
aaatccctggaccac

SEQ ID NO: 1896473 - DNA, 15 bp, Homo sapiens
aatccctggaccact

SEQ ID NO: 1896474 - DNA, 15 bp, Homo sapiens
atccctggaccactg

SEQ ID NO: 1896475 - DNA, 15 bp, Homo sapiens
tccctggaccactgg

SEQ ID NO: 1896476 - DNA, 15 bp, Homo sapiens
ccctggaccactgga

SEQ ID NO: 1896477 - DNA, 15 bp, Homo sapiens
cctggaccactggaa

SEQ ID NO: 1896478 - DNA, 15 bp, Homo sapiens
ctggaccactggaac

SEQ ID NO: 1896479 - DNA, 15 bp, Homo sapiens
tggaccactggaact

SEQ ID NO: 1896480 - DNA, 15 bp, Homo sapiens
ggaccactggaactt

SEQ ID NO: 1896481 - DNA, 15 bp, Homo sapiens
gaccactggaactta

SEQ ID NO: 1896482 - DNA, 15 bp, Homo sapiens
accactggaacttag

SEQ ID NO: 1896483 - DNA, 15 bp, Homo sapiens
ccactggaacttaga

SEQ ID NO: 1896484 - DNA, 15 bp, Homo sapiens
cactggaacttagat

SEQ ID NO: 1896485 - DNA, 15 bp, Homo sapiens
actggaacttagatt

SEQ ID NO: 1896486 - DNA, 15 bp, Homo sapiens
ggaacttagattcag

SEQ ID NO: 1896487 - DNA, 15 bp, Homo sapiens
gaacttagattcagt

SEQ ID NO: 1896488 - DNA, 15 bp, Homo sapiens
aacttagattcagtg

SEQ ID NO: 1896489 - DNA, 15 bp, Homo sapiens
acttagattcagtga

SEQ ID NO: 1896490 - DNA, 15 bp, Homo sapiens
cttagattcagtgaa

SEQ ID NO: 1896491 - DNA, 15 bp, Homo sapiens
ttagattcagtgaaa

SEQ ID NO: 1896492 - DNA, 15 bp, Homo sapiens
tagattcagtgaaag

SEQ ID NO: 1896493 - DNA, 15 bp, Homo sapiens
agattcagtgaaagg

SEQ ID NO: 1896494 - DNA, 15 bp, Homo sapiens
gattcagtgaaagga

SEQ ID NO: 1896495 - DNA, 15 bp, Homo sapiens
attcagtgaaaggac

SEQ ID NO: 1896496 - DNA, 15 bp, Homo sapiens
ttcagtgaaaggact

SEQ ID NO: 1896497 - DNA, 15 bp, Homo sapiens
tcagtgaaaggactt

SEQ ID NO: 1896498 - DNA, 15 bp, Homo sapiens
cagtgaaaggacttt

SEQ ID NO: 1896499 - DNA, 15 bp, Homo sapiens
agtgaaaggactttt

SEQ ID NO: 1896500 - DNA, 15 bp, Homo sapiens
gtgaaaggacttttc

SEQ ID NO: 1896501 - DNA, 15 bp, Homo sapiens
tgaaaggacttttca

SEQ ID NO: 1896502 - DNA, 15 bp, Homo sapiens
gaaaggacttttcag

SEQ ID NO: 1896503 - DNA, 15 bp, Homo sapiens
aaaggacttttcagg

SEQ ID NO: 1896504 - DNA, 15 bp, Homo sapiens
aaggacttttcaggc

SEQ ID NO: 1896505 - DNA, 15 bp, Homo sapiens
aggacttttcaggcc

SEQ ID NO: 1896506 - DNA, 15 bp, Homo sapiens
ggacttttcaggcca

SEQ ID NO: 1896507 - DNA, 15 bp, Homo sapiens
gacttttcaggccat

SEQ ID NO: 1896508 - DNA, 15 bp, Homo sapiens
acttttcaggccata

SEQ ID NO: 1896509 - DNA, 15 bp, Homo sapiens
cttttcaggccatac

SEQ ID NO: 1896510 - DNA, 15 bp, Homo sapiens
ttttcaggccataca

SEQ ID NO: 1896511 - DNA, 15 bp, Homo sapiens
tttcaggccatacag

SEQ ID NO: 1896512 - DNA, 15 bp, Homo sapiens
ttcaggccatacagt

SEQ ID NO: 1896513 - DNA, 15 bp, Homo sapiens
tcaggccatacagtg

SEQ ID NO: 1896514 - DNA, 15 bp, Homo sapiens
caggccatacagtga

SEQ ID NO: 1896515 - DNA, 15 bp, Homo sapiens
aggccatacagtgat

SEQ ID NO: 1896516 - DNA, 15 bp, Homo sapiens
ggccatacagtgata

SEQ ID NO: 1896517 - DNA, 15 bp, Homo sapiens
gccatacagtgatat

SEQ ID NO: 1896518 - DNA, 15 bp, Homo sapiens
ccatacagtgatatt

SEQ ID NO: 1896519 - DNA, 15 bp, Homo sapiens
catacagtgatattg

SEQ ID NO: 1896520 - DNA, 15 bp, Homo sapiens
atacagtgatattgg

SEQ ID NO: 1896521 - DNA, 15 bp, Homo sapiens
tacagtgatattggg

SEQ ID NO: 1896522 - DNA, 15 bp, Homo sapiens
acagtgatattgggc

SEQ ID NO: 1896523 - DNA, 15 bp, Homo sapiens
cagtgatattgggct

SEQ ID NO: 1896524 - DNA, 15 bp, Homo sapiens
agtgatattgggcta

SEQ ID NO: 1896525 - DNA, 15 bp, Homo sapiens
gtgatattgggctag

SEQ ID NO: 1896526 - DNA, 15 bp, Homo sapiens
tgatattgggctagc

SEQ ID NO: 1896527 - DNA, 15 bp, Homo sapiens
gatattgggctagcc

SEQ ID NO: 1896528 - DNA, 15 bp, Homo sapiens
atattgggctagccc

SEQ ID NO: 1896529 - DNA, 15 bp, Homo sapiens
tattgggctagccca

SEQ ID NO: 1896530 - DNA, 15 bp, Homo sapiens
attgggctagcccaa

SEQ ID NO: 1896531 - DNA, 15 bp, Homo sapiens
ttgggctagcccaat

SEQ ID NO: 1896532 - DNA, 15 bp, Homo sapiens
tgggctagcccaatg

SEQ ID NO: 1896533 - DNA, 15 bp, Homo sapiens
gggctagcccaatgc

SEQ ID NO: 1896534 - DNA, 15 bp, Homo sapiens
ggctagcccaatgcc

SEQ ID NO: 1896535 - DNA, 15 bp, Homo sapiens
gctagcccaatgccc

SEQ ID NO: 1896536 - DNA, 15 bp, Homo sapiens
ctagcccaatgccct

SEQ ID NO: 1896537 - DNA, 15 bp, Homo sapiens
tagcccaatgccctt

SEQ ID NO: 1896538 - DNA, 15 bp, Homo sapiens
agcccaatgcccttc

SEQ ID NO: 1896539 - DNA, 15 bp, Homo sapiens
gcccaatgcccttct

SEQ ID NO: 1896540 - DNA, 15 bp, Homo sapiens
cccaatgcccttctt

SEQ ID NO: 1896541 - DNA, 15 bp, Homo sapiens
ccaatgcccttcttt

SEQ ID NO: 1896542 - DNA, 15 bp, Homo sapiens
caatgcccttctttc

SEQ ID NO: 1896543 - DNA, 15 bp, Homo sapiens
aatgcccttctttct

SEQ ID NO: 1896544 - DNA, 15 bp, Homo sapiens
atgcccttctttctc

SEQ ID NO: 1896545 - DNA, 15 bp, Homo sapiens
tgcccttctttctca

SEQ ID NO: 1896546 - DNA, 15 bp, Homo sapiens
gcccttctttctcaa

SEQ ID NO: 1896547 - DNA, 15 bp, Homo sapiens
cccttctttctcaaa

SEQ ID NO: 1896548 - DNA, 15 bp, Homo sapiens
ccttctttctcaaaa

SEQ ID NO: 1896549 - DNA, 15 bp, Homo sapiens
cttctttctcaaaag

SEQ ID NO: 1896550 - DNA, 15 bp, Homo sapiens
ttctttctcaaaagg

SEQ ID NO: 1896551 - DNA, 15 bp, Homo sapiens
tctttctcaaaagga

SEQ ID NO: 1896552 - DNA, 15 bp, Homo sapiens
ctttctcaaaaggaa

SEQ ID NO: 1896553 - DNA, 15 bp, Homo sapiens
tttctcaaaaggaaa

SEQ ID NO: 1896554 - DNA, 15 bp, Homo sapiens
ttctcaaaaggaaaa

SEQ ID NO: 1896555 - DNA, 15 bp, Homo sapiens
tctcaaaaggaaaac

SEQ ID NO: 1896556 - DNA, 15 bp, Homo sapiens
ctcaaaaggaaaaca

SEQ ID NO: 1896557 - DNA, 15 bp, Homo sapiens
tcaaaaggaaaacaa

SEQ ID NO: 1896558 - DNA, 15 bp, Homo sapiens
caaaaggaaaacaag

SEQ ID NO: 1896559 - DNA, 15 bp, Homo sapiens
aaaaggaaaacaagc

SEQ ID NO: 1896560 - DNA, 15 bp, Homo sapiens
aaaggaaaacaagcc

SEQ ID NO: 1896561 - DNA, 15 bp, Homo sapiens
aaggaaaacaagccc

SEQ ID NO: 1896562 - DNA, 15 bp, Homo sapiens
aggaaaacaagccca

SEQ ID NO: 1896563 - DNA, 15 bp, Homo sapiens
ggaaaacaagcccaa

SEQ ID NO: 1896564 - DNA, 15 bp, Homo sapiens
gaaaacaagcccaag

SEQ ID NO: 1896565 - DNA, 15 bp, Homo sapiens
aaaacaagcccaaga

SEQ ID NO: 1896566 - DNA, 15 bp, Homo sapiens
aaacaagcccaagaa

SEQ ID NO: 1896567 - DNA, 15 bp, Homo sapiens
aacaagcccaagaag

SEQ ID NO: 1896568 - DNA, 15 bp, Homo sapiens
acaagcccaagaagg

SEQ ID NO: 1896569 - DNA, 15 bp, Homo sapiens
caagcccaagaaggt

SEQ ID NO: 1896570 - DNA, 15 bp, Homo sapiens
aagcccaagaaggtg

SEQ ID NO: 1896571 - DNA, 15 bp, Homo sapiens
agcccaagaaggtga

SEQ ID NO: 1896572 - DNA, 15 bp, Homo sapiens
gcccaagaaggtgaa

SEQ ID NO: 1896573 - DNA, 15 bp, Homo sapiens
cccaagaaggtgaaa

SEQ ID NO: 1896574 - DNA, 15 bp, Homo sapiens
ccaagaaggtgaaaa

SEQ ID NO: 1896575 - DNA, 15 bp, Homo sapiens
caagaaggtgaaaag

SEQ ID NO: 1896576 - DNA, 15 bp, Homo sapiens
aagaaggtgaaaaga

SEQ ID NO: 1896577 - DNA, 15 bp, Homo sapiens
agaaggtgaaaagat

SEQ ID NO: 1896578 - DNA, 15 bp, Homo sapiens
gaaggtgaaaagata

SEQ ID NO: 1896579 - DNA, 15 bp, Homo sapiens
aaggtgaaaagatat

SEQ ID NO: 1896580 - DNA, 15 bp, Homo sapiens
aggtgaaaagatatg

SEQ ID NO: 1896581 - DNA, 15 bp, Homo sapiens
ggtgaaaagatatgc

SEQ ID NO: 1896582 - DNA, 15 bp, Homo sapiens
gtgaaaagatatgct

SEQ ID NO: 1896583 - DNA, 15 bp, Homo sapiens
tgaaaagatatgctc

SEQ ID NO: 1896584 - DNA, 15 bp, Homo sapiens
gaaaagatatgctct

SEQ ID NO: 1896585 - DNA, 15 bp, Homo sapiens
aaaagatatgctctg

SEQ ID NO: 1896586 - DNA, 15 bp, Homo sapiens
aaagatatgctctgg

SEQ ID NO: 1896587 - DNA, 15 bp, Homo sapiens
aagatatgctctgga

SEQ ID NO: 1896588 - DNA, 15 bp, Homo sapiens
agatatgctctggat

SEQ ID NO: 1896589 - DNA, 15 bp, Homo sapiens
gatatgctctggatc

SEQ ID NO: 1896590 - DNA, 15 bp, Homo sapiens
atatgctctggatcc

SEQ ID NO: 1896591 - DNA, 15 bp, Homo sapiens
tatgctctggatcct

SEQ ID NO: 1896592 - DNA, 15 bp, Homo sapiens
atgctctggatcctc

SEQ ID NO: 1896593 - DNA, 15 bp, Homo sapiens
tgctctggatcctca

SEQ ID NO: 1896594 - DNA, 15 bp, Homo sapiens
gctctggatcctcac

SEQ ID NO: 1896595 - DNA, 15 bp, Homo sapiens
ctctggatcctcaca

SEQ ID NO: 1896596 - DNA, 15 bp, Homo sapiens
tctggatcctcacat

SEQ ID NO: 1896597 - DNA, 15 bp, Homo sapiens
ctggatcctcacatg

SEQ ID NO: 1896598 - DNA, 15 bp, Homo sapiens
tggatcctcacatgg

SEQ ID NO: 1896599 - DNA, 15 bp, Homo sapiens
ggatcctcacatggc

SEQ ID NO: 1896600 - DNA, 15 bp, Homo sapiens
gatcctcacatggcc

SEQ ID NO: 1896601 - DNA, 15 bp, Homo sapiens
atcctcacatggcca

SEQ ID NO: 1896602 - DNA, 15 bp, Homo sapiens
tcctcacatggccat

SEQ ID NO: 1896603 - DNA, 15 bp, Homo sapiens
cctcacatggccatt

SEQ ID NO: 1896604 - DNA, 15 bp, Homo sapiens
ctcacatggccattt

SEQ ID NO: 1896605 - DNA, 15 bp, Homo sapiens
tcacatggccatttc

SEQ ID NO: 1896606 - DNA, 15 bp, Homo sapiens
cacatggccatttcc

SEQ ID NO: 1896607 - DNA, 15 bp, Homo sapiens
acatggccatttcct

SEQ ID NO: 1896608 - DNA, 15 bp, Homo sapiens
catggccatttcctt

SEQ ID NO: 1896609 - DNA, 15 bp, Homo sapiens
atggccatttcctta

SEQ ID NO: 1896610 - DNA, 15 bp, Homo sapiens
tggccatttccttac

SEQ ID NO: 1896611 - DNA, 15 bp, Homo sapiens
ggccatttccttaca

SEQ ID NO: 1896612 - DNA, 15 bp, Homo sapiens
gccatttccttacag

SEQ ID NO: 1896613 - DNA, 15 bp, Homo sapiens
ccatttccttacaga

SEQ ID NO: 1896614 - DNA, 15 bp, Homo sapiens
catttccttacagaa

SEQ ID NO: 1896615 - DNA, 15 bp, Homo sapiens
atttccttacagaaa

SEQ ID NO: 1896616 - DNA, 15 bp, Homo sapiens
tttccttacagaaaa

SEQ ID NO: 1896617 - DNA, 15 bp, Homo sapiens
ttccttacagaaaat

SEQ ID NO: 1896618 - DNA, 15 bp, Homo sapiens
tccttacagaaaata

SEQ ID NO: 1896619 - DNA, 15 bp, Homo sapiens
ccttacagaaaataa

SEQ ID NO: 1896620 - DNA, 15 bp, Homo sapiens
cttacagaaaataag

SEQ ID NO: 1896621 - DNA, 15 bp, Homo sapiens
ttacagaaaataaga

SEQ ID NO: 1896622 - DNA, 15 bp, Homo sapiens
tacagaaaataagaa

SEQ ID NO: 1896623 - DNA, 15 bp, Homo sapiens
acagaaaataagaat

SEQ ID NO: 1896624 - DNA, 15 bp, Homo sapiens
cagaaaataagaatt

SEQ ID NO: 1896625 - DNA, 15 bp, Homo sapiens
agaaaataagaattc

SEQ ID NO: 1896626 - DNA, 15 bp, Homo sapiens
gaaaataagaattct

SEQ ID NO: 1896627 - DNA, 15 bp, Homo sapiens
aaaataagaattcta

SEQ ID NO: 1896628 - DNA, 15 bp, Homo sapiens
aaataagaattctaa

SEQ ID NO: 1896629 - DNA, 15 bp, Homo sapiens
aataagaattctaaa

SEQ ID NO: 1896630 - DNA, 15 bp, Homo sapiens
ataagaattctaaat

SEQ ID NO: 1896631 - DNA, 15 bp, Homo sapiens
taagaattctaaata

SEQ ID NO: 1896632 - DNA, 15 bp, Homo sapiens
aagaattctaaatat

SEQ ID NO: 1896633 - DNA, 15 bp, Homo sapiens
agaattctaaatatc

SEQ ID NO: 1896634 - DNA, 15 bp, Homo sapiens
gaattctaaatatcc

SEQ ID NO: 1896635 - DNA, 15 bp, Homo sapiens
aattctaaatatcct

SEQ ID NO: 1896636 - DNA, 15 bp, Homo sapiens
attctaaatatcctc

SEQ ID NO: 1896637 - DNA, 15 bp, Homo sapiens
ttctaaatatcctcc

SEQ ID NO: 1896638 - DNA, 15 bp, Homo sapiens
tctaaatatcctccc

SEQ ID NO: 1896639 - DNA, 15 bp, Homo sapiens
ctaaatatcctccca

SEQ ID NO: 1896640 - DNA, 15 bp, Homo sapiens
taaatatcctcccat

SEQ ID NO: 1896641 - DNA, 15 bp, Homo sapiens
aaatatcctcccatg

SEQ ID NO: 1896642 - DNA, 15 bp, Homo sapiens
aatatcctcccatgc

SEQ ID NO: 1896643 - DNA, 15 bp, Homo sapiens
atatcctcccatgcc

SEQ ID NO: 1896644 - DNA, 15 bp, Homo sapiens
tatcctcccatgcct

SEQ ID NO: 1896645 - DNA, 15 bp, Homo sapiens
atcctcccatgccta

SEQ ID NO: 1896646 - DNA, 15 bp, Homo sapiens
tcctcccatgcctaa

SEQ ID NO: 1896647 - DNA, 15 bp, Homo sapiens
cctcccatgcctaat

SEQ ID NO: 1896648 - DNA, 15 bp, Homo sapiens
ctcccatgcctaata

SEQ ID NO: 1896649 - DNA, 15 bp, Homo sapiens
tcccatgcctaatat

SEQ ID NO: 1896650 - DNA, 15 bp, Homo sapiens
cccatgcctaatatg

SEQ ID NO: 1896651 - DNA, 15 bp, Homo sapiens
ccatgcctaatatga

SEQ ID NO: 1896652 - DNA, 15 bp, Homo sapiens
catgcctaatatgac

SEQ ID NO: 1896653 - DNA, 15 bp, Homo sapiens
atgcctaatatgact

SEQ ID NO: 1896654 - DNA, 15 bp, Homo sapiens
tgcctaatatgactg

SEQ ID NO: 1896655 - DNA, 15 bp, Homo sapiens
gcctaatatgactga

SEQ ID NO: 1896656 - DNA, 15 bp, Homo sapiens
cctaatatgactgag

SEQ ID NO: 1896657 - DNA, 15 bp, Homo sapiens
ctaatatgactgaga

SEQ ID NO: 1896658 - DNA, 15 bp, Homo sapiens
taatatgactgagat

SEQ ID NO: 1896659 - DNA, 15 bp, Homo sapiens
aatatgactgagatt

SEQ ID NO: 1896660 - DNA, 15 bp, Homo sapiens
atatgactgagattt

SEQ ID NO: 1896661 - DNA, 15 bp, Homo sapiens
tatgactgagattta

SEQ ID NO: 1896662 - DNA, 15 bp, Homo sapiens
atgactgagatttag

SEQ ID NO: 1896663 - DNA, 15 bp, Homo sapiens
tgactgagatttagg

SEQ ID NO: 1896664 - DNA, 15 bp, Homo sapiens
gactgagatttagga

SEQ ID NO: 1896665 - DNA, 15 bp, Homo sapiens
actgagatttaggaa

SEQ ID NO: 1896666 - DNA, 15 bp, Homo sapiens
ctgagatttaggaag

SEQ ID NO: 1896667 - DNA, 15 bp, Homo sapiens
tgagatttaggaaga

SEQ ID NO: 1896668 - DNA, 15 bp, Homo sapiens
gagatttaggaagag

SEQ ID NO: 1896669 - DNA, 15 bp, Homo sapiens
agatttaggaagaga

SEQ ID NO: 1896670 - DNA, 15 bp, Homo sapiens
gatttaggaagagat

SEQ ID NO: 1896671 - DNA, 15 bp, Homo sapiens
atttaggaagagatt

SEQ ID NO: 1896672 - DNA, 15 bp, Homo sapiens
tttaggaagagattt

SEQ ID NO: 1896673 - DNA, 15 bp, Homo sapiens
ttaggaagagatttg

SEQ ID NO: 1896674 - DNA, 15 bp, Homo sapiens
taggaagagatttga

SEQ ID NO: 1896675 - DNA, 15 bp, Homo sapiens
aggaagagatttgag

SEQ ID NO: 1896676 - DNA, 15 bp, Homo sapiens
ggaagagatttgaga

SEQ ID NO: 1896677 - DNA, 15 bp, Homo sapiens
gaagagatttgagaa

SEQ ID NO: 1896678 - DNA, 15 bp, Homo sapiens
aagagatttgagaag

SEQ ID NO: 1896679 - DNA, 15 bp, Homo sapiens
agagatttgagaaga

SEQ ID NO: 1896680 - DNA, 15 bp, Homo sapiens
gagatttgagaagat

SEQ ID NO: 1896681 - DNA, 15 bp, Homo sapiens
agatttgagaagata

SEQ ID NO: 1896682 - DNA, 15 bp, Homo sapiens
gatttgagaagatat

SEQ ID NO: 1896683 - DNA, 15 bp, Homo sapiens
atttgagaagatatt

SEQ ID NO: 1896684 - DNA, 15 bp, Homo sapiens
tttgagaagatattt

SEQ ID NO: 1896685 - DNA, 15 bp, Homo sapiens
ttgagaagatatttg

SEQ ID NO: 1896686 - DNA, 15 bp, Homo sapiens
tgagaagatatttgc

SEQ ID NO: 1896687 - DNA, 15 bp, Homo sapiens
gagaagatatttgca

SEQ ID NO: 1896688 - DNA, 15 bp, Homo sapiens
agaagatatttgcaa

SEQ ID NO: 1896689 - DNA, 15 bp, Homo sapiens
gaagatatttgcaac

SEQ ID NO: 1896690 - DNA, 15 bp, Homo sapiens
aagatatttgcaaca

SEQ ID NO: 1896691 - DNA, 15 bp, Homo sapiens
agatatttgcaacat

SEQ ID NO: 1896692 - DNA, 15 bp, Homo sapiens
gatatttgcaacata

SEQ ID NO: 1896693 - DNA, 15 bp, Homo sapiens
atatttgcaacatat

SEQ ID NO: 1896694 - DNA, 15 bp, Homo sapiens
tatttgcaacatata

SEQ ID NO: 1896695 - DNA, 15 bp, Homo sapiens
atttgcaacatatat

SEQ ID NO: 1896696 - DNA, 15 bp, Homo sapiens
tttgcaacatatatt

SEQ ID NO: 1896697 - DNA, 15 bp, Homo sapiens
ttgcaacatatatta

SEQ ID NO: 1896698 - DNA, 15 bp, Homo sapiens
tgcaacatatattac

SEQ ID NO: 1896699 - DNA, 15 bp, Homo sapiens
gcaacatatattact

SEQ ID NO: 1896700 - DNA, 15 bp, Homo sapiens
caacatatattactc

SEQ ID NO: 1896701 - DNA, 15 bp, Homo sapiens
aacatatattactcg

SEQ ID NO: 1896702 - DNA, 15 bp, Homo sapiens
acatatattactcgt

SEQ ID NO: 1896703 - DNA, 15 bp, Homo sapiens
catatattactcgtg

SEQ ID NO: 1896704 - DNA, 15 bp, Homo sapiens
atatattactcgtga

SEQ ID NO: 1896705 - DNA, 15 bp, Homo sapiens
tatattactcgtgac

SEQ ID NO: 1896706 - DNA, 15 bp, Homo sapiens
atattactcgtgaca

SEQ ID NO: 1896707 - DNA, 15 bp, Homo sapiens
tattactcgtgacat

SEQ ID NO: 1896708 - DNA, 15 bp, Homo sapiens
attactcgtgacata

SEQ ID NO: 1896709 - DNA, 15 bp, Homo sapiens
ttactcgtgacatag

SEQ ID NO: 1896710 - DNA, 15 bp, Homo sapiens
tactcgtgacataga

SEQ ID NO: 1896711 - DNA, 15 bp, Homo sapiens
actcgtgacatagaa

SEQ ID NO: 1896712 - DNA, 15 bp, Homo sapiens
ctcgtgacatagaaa

SEQ ID NO: 1896713 - DNA, 15 bp, Homo sapiens
tcgtgacatagaaac

SEQ ID NO: 1896714 - DNA, 15 bp, Homo sapiens
cgtgacatagaaaca

SEQ ID NO: 1896715 - DNA, 15 bp, Homo sapiens
gtgacatagaaacaa

SEQ ID NO: 1896716 - DNA, 15 bp, Homo sapiens
tgacatagaaacaag

SEQ ID NO: 1896717 - DNA, 15 bp, Homo sapiens
gacatagaaacaaga

SEQ ID NO: 1896718 - DNA, 15 bp, Homo sapiens
acatagaaacaagag

SEQ ID NO: 1896719 - DNA, 15 bp, Homo sapiens
catagaaacaagagc

SEQ ID NO: 1896720 - DNA, 15 bp, Homo sapiens
atagaaacaagagct

SEQ ID NO: 1896721 - DNA, 15 bp, Homo sapiens
tagaaacaagagctc

SEQ ID NO: 1896722 - DNA, 15 bp, Homo sapiens
agaaacaagagctca

SEQ ID NO: 1896723 - DNA, 15 bp, Homo sapiens
gaaacaagagctcat

SEQ ID NO: 1896724 - DNA, 15 bp, Homo sapiens
aaacaagagctcatt

SEQ ID NO: 1896725 - DNA, 15 bp, Homo sapiens
aacaagagctcatta

SEQ ID NO: 1896726 - DNA, 15 bp, Homo sapiens
acaagagctcattac

SEQ ID NO: 1896727 - DNA, 15 bp, Homo sapiens
caagagctcattact

SEQ ID NO: 1896728 - DNA, 15 bp, Homo sapiens
aagagctcattactt

SEQ ID NO: 1896729 - DNA, 15 bp, Homo sapiens
agagctcattacttt

SEQ ID NO: 1896730 - DNA, 15 bp, Homo sapiens
gagctcattactttt

SEQ ID NO: 1896731 - DNA, 15 bp, Homo sapiens
agctcattacttttt

SEQ ID NO: 1896732 - DNA, 15 bp, Homo sapiens
gctcattactttttc

SEQ ID NO: 1896733 - DNA, 15 bp, Homo sapiens
ctcattactttttcc

SEQ ID NO: 1896734 - DNA, 15 bp, Homo sapiens
tcattactttttcca

SEQ ID NO: 1896735 - DNA, 15 bp, Homo sapiens
cattactttttccag

SEQ ID NO: 1896736 - DNA, 15 bp, Homo sapiens
attactttttccagc

SEQ ID NO: 1896737 - DNA, 15 bp, Homo sapiens
ttactttttccagct

SEQ ID NO: 1896738 - DNA, 15 bp, Homo sapiens
tactttttccagcta

SEQ ID NO: 1896739 - DNA, 15 bp, Homo sapiens
actttttccagctaa

SEQ ID NO: 1896740 - DNA, 15 bp, Homo sapiens
ctttttccagctaac

SEQ ID NO: 1896741 - DNA, 15 bp, Homo sapiens
tttttccagctaact

SEQ ID NO: 1896742 - DNA, 15 bp, Homo sapiens
ttttccagctaactc

SEQ ID NO: 1896743 - DNA, 15 bp, Homo sapiens
tttccagctaactca

SEQ ID NO: 1896744 - DNA, 15 bp, Homo sapiens
ttccagctaactcat

SEQ ID NO: 1896745 - DNA, 15 bp, Homo sapiens
tccagctaactcatc

SEQ ID NO: 1896746 - DNA, 15 bp, Homo sapiens
ccagctaactcatcc

SEQ ID NO: 1896747 - DNA, 15 bp, Homo sapiens
cagctaactcatccc

SEQ ID NO: 1896748 - DNA, 15 bp, Homo sapiens
agctaactcatcccc

SEQ ID NO: 1896749 - DNA, 15 bp, Homo sapiens
gctaactcatcccca

SEQ ID NO: 1896750 - DNA, 15 bp, Homo sapiens
ctaactcatccccaa

SEQ ID NO: 1896751 - DNA, 15 bp, Homo sapiens
taactcatccccaat

SEQ ID NO: 1896752 - DNA, 15 bp, Homo sapiens
aactcatccccaatc

SEQ ID NO: 1896753 - DNA, 15 bp, Homo sapiens
actcatccccaatca

SEQ ID NO: 1896754 - DNA, 15 bp, Homo sapiens
ctcatccccaatcac

SEQ ID NO: 1896755 - DNA, 15 bp, Homo sapiens
tcatccccaatcacc

SEQ ID NO: 1896756 - DNA, 15 bp, Homo sapiens
catccccaatcacca

SEQ ID NO: 1896757 - DNA, 15 bp, Homo sapiens
atccccaatcaccaa

SEQ ID NO: 1896758 - DNA, 15 bp, Homo sapiens
tccccaatcaccaat

SEQ ID NO: 1896759 - DNA, 15 bp, Homo sapiens
ccccaatcaccaata

SEQ ID NO: 1896760 - DNA, 15 bp, Homo sapiens
cccaatcaccaatat

SEQ ID NO: 1896761 - DNA, 15 bp, Homo sapiens
ccaatcaccaatatc

SEQ ID NO: 1896762 - DNA, 15 bp, Homo sapiens
caatcaccaatatct

SEQ ID NO: 1896763 - DNA, 15 bp, Homo sapiens
aatcaccaatatctt

SEQ ID NO: 1896764 - DNA, 15 bp, Homo sapiens
atcaccaatatcttt

SEQ ID NO: 1896765 - DNA, 15 bp, Homo sapiens
tcaccaatatctttt

SEQ ID NO: 1896766 - DNA, 15 bp, Homo sapiens
caccaatatcttttt

SEQ ID NO: 1896767 - DNA, 15 bp, Homo sapiens
accaatatctttttg

SEQ ID NO: 1896768 - DNA, 15 bp, Homo sapiens
ccaatatctttttga

SEQ ID NO: 1896769 - DNA, 15 bp, Homo sapiens
caatatctttttgat

SEQ ID NO: 1896770 - DNA, 15 bp, Homo sapiens
aatatctttttgatg

SEQ ID NO: 1896771 - DNA, 15 bp, Homo sapiens
atatctttttgatga

SEQ ID NO: 1896772 - DNA, 15 bp, Homo sapiens
tatctttttgatgag

SEQ ID NO: 1896773 - DNA, 15 bp, Homo sapiens
atctttttgatgagt

SEQ ID NO: 1896774 - DNA, 15 bp, Homo sapiens
tctttttgatgagta

SEQ ID NO: 1896775 - DNA, 15 bp, Homo sapiens
ctttttgatgagtag

SEQ ID NO: 1896776 - DNA, 15 bp, Homo sapiens
tttttgatgagtagt

SEQ ID NO: 1896777 - DNA, 15 bp, Homo sapiens
ttttgatgagtagtg

SEQ ID NO: 1896778 - DNA, 15 bp, Homo sapiens
tttgatgagtagtgt

SEQ ID NO: 1896779 - DNA, 15 bp, Homo sapiens
ttgatgagtagtgta

SEQ ID NO: 1896780 - DNA, 15 bp, Homo sapiens
tgatgagtagtgtaa

SEQ ID NO: 1896781 - DNA, 15 bp, Homo sapiens
gatgagtagtgtaaa

SEQ ID NO: 1896782 - DNA, 15 bp, Homo sapiens
atgagtagtgtaaaa

SEQ ID NO: 1896783 - DNA, 15 bp, Homo sapiens
tgagtagtgtaaaaa

SEQ ID NO: 1896784 - DNA, 15 bp, Homo sapiens
gagtagtgtaaaaaa

SEQ ID NO: 1896785 - DNA, 15 bp, Homo sapiens
agtagtgtaaaaaaa

SEQ ID NO: 1896786 - DNA, 15 bp, Homo sapiens
gtagtgtaaaaaaaa

SEQ ID NO: 1896787 - DNA, 15 bp, Homo sapiens
tagtgtaaaaaaaaa

SEQ ID NO: 1896788 - DNA, 15 bp, Homo sapiens
agtgtaaaaaaaaaa

SEQ ID NO: 1896789 - DNA, 15 bp, Homo sapiens
gtgtaaaaaaaaaaa

SEQ ID NO: 1896790 - DNA, 15 bp, Homo sapiens
taaaaaaaaaaacca

SEQ ID NO: 1896791 - DNA, 15 bp, Homo sapiens
aaaaaaaaaaaccaa

SEQ ID NO: 1896792 - DNA, 15 bp, Homo sapiens
aaaaaaaaaaccaac

SEQ ID NO: 1896793 - DNA, 15 bp, Homo sapiens
aaaaaaaaaccaaca

SEQ ID NO: 1896794 - DNA, 15 bp, Homo sapiens
aaaaaaaaccaacaa

SEQ ID NO: 1896795 - DNA, 15 bp, Homo sapiens
aaaaaaaccaacaac

SEQ ID NO: 1896796 - DNA, 15 bp, Homo sapiens
aaaaaaccaacaaca

SEQ ID NO: 1896797 - DNA, 15 bp, Homo sapiens
aaaaaccaacaacaa

SEQ ID NO: 1896798 - DNA, 15 bp, Homo sapiens
aaaaccaacaacaag

SEQ ID NO: 1896799 - DNA, 15 bp, Homo sapiens
aaaccaacaacaaga

SEQ ID NO: 1896800 - DNA, 15 bp, Homo sapiens
aaccaacaacaagaa

SEQ ID NO: 1896801 - DNA, 15 bp, Homo sapiens
accaacaacaagaaa

SEQ ID NO: 1896802 - DNA, 15 bp, Homo sapiens
ccaacaacaagaaat

SEQ ID NO: 1896803 - DNA, 15 bp, Homo sapiens
caacaacaagaaatt

SEQ ID NO: 1896804 - DNA, 15 bp, Homo sapiens
aacaacaagaaattg

SEQ ID NO: 1896805 - DNA, 15 bp, Homo sapiens
acaacaagaaattgt

SEQ ID NO: 1896806 - DNA, 15 bp, Homo sapiens
caacaagaaattgtt

SEQ ID NO: 1896807 - DNA, 15 bp, Homo sapiens
aacaagaaattgttg

SEQ ID NO: 1896808 - DNA, 15 bp, Homo sapiens
acaagaaattgttga

SEQ ID NO: 1896809 - DNA, 15 bp, Homo sapiens
caagaaattgttgat

SEQ ID NO: 1896810 - DNA, 15 bp, Homo sapiens
aagaaattgttgatg

SEQ ID NO: 1896811 - DNA, 15 bp, Homo sapiens
agaaattgttgatgc

SEQ ID NO: 1896812 - DNA, 15 bp, Homo sapiens
gaaattgttgatgct

SEQ ID NO: 1896813 - DNA, 15 bp, Homo sapiens
aaattgttgatgctt

SEQ ID NO: 1896814 - DNA, 15 bp, Homo sapiens
aattgttgatgcttt

SEQ ID NO: 1896815 - DNA, 15 bp, Homo sapiens
attgttgatgcttta

SEQ ID NO: 1896816 - DNA, 15 bp, Homo sapiens
ttgttgatgctttaa

SEQ ID NO: 1896817 - DNA, 15 bp, Homo sapiens
tgttgatgctttaaa

SEQ ID NO: 1896818 - DNA, 15 bp, Homo sapiens
gttgatgctttaaac

SEQ ID NO: 1896819 - DNA, 15 bp, Homo sapiens
ttgatgctttaaact

SEQ ID NO: 1896820 - DNA, 15 bp, Homo sapiens
tgatgctttaaacta

SEQ ID NO: 1896821 - DNA, 15 bp, Homo sapiens
gatgctttaaactac

SEQ ID NO: 1896822 - DNA, 15 bp, Homo sapiens
atgctttaaactact

SEQ ID NO: 1896823 - DNA, 15 bp, Homo sapiens
tgctttaaactactc

SEQ ID NO: 1896824 - DNA, 15 bp, Homo sapiens
gctttaaactactct

SEQ ID NO: 1896825 - DNA, 15 bp, Homo sapiens
ctttaaactactctt

SEQ ID NO: 1896826 - DNA, 15 bp, Homo sapiens
tttaaactactcttc

SEQ ID NO: 1896827 - DNA, 15 bp, Homo sapiens
ttaaactactcttca

SEQ ID NO: 1896828 - DNA, 15 bp, Homo sapiens
taaactactcttcaa

SEQ ID NO: 1896829 - DNA, 15 bp, Homo sapiens
aaactactcttcaaa

SEQ ID NO: 1896830 - DNA, 15 bp, Homo sapiens
aactactcttcaaac

SEQ ID NO: 1896831 - DNA, 15 bp, Homo sapiens
actactcttcaaaca

SEQ ID NO: 1896832 - DNA, 15 bp, Homo sapiens
ctactcttcaaacaa

SEQ ID NO: 1896833 - DNA, 15 bp, Homo sapiens
tactcttcaaacaaa

SEQ ID NO: 1896834 - DNA, 15 bp, Homo sapiens
actcttcaaacaaag

SEQ ID NO: 1896835 - DNA, 15 bp, Homo sapiens
ctcttcaaacaaagt

SEQ ID NO: 1896836 - DNA, 15 bp, Homo sapiens
tcttcaaacaaagtt

SEQ ID NO: 1896837 - DNA, 15 bp, Homo sapiens
cttcaaacaaagttt

SEQ ID NO: 1896838 - DNA, 15 bp, Homo sapiens
ttcaaacaaagtttt

SEQ ID NO: 1896839 - DNA, 15 bp, Homo sapiens
tcaaacaaagtttta

SEQ ID NO: 1896840 - DNA, 15 bp, Homo sapiens
caaacaaagttttaa

SEQ ID NO: 1896841 - DNA, 15 bp, Homo sapiens
aaacaaagttttaaa

SEQ ID NO: 1896842 - DNA, 15 bp, Homo sapiens
aacaaagttttaaag

SEQ ID NO: 1896843 - DNA, 15 bp, Homo sapiens
acaaagttttaaagc

SEQ ID NO: 1896844 - DNA, 15 bp, Homo sapiens
caaagttttaaagct

SEQ ID NO: 1896845 - DNA, 15 bp, Homo sapiens
aaagttttaaagcta

SEQ ID NO: 1896846 - DNA, 15 bp, Homo sapiens
aagttttaaagctat

SEQ ID NO: 1896847 - DNA, 15 bp, Homo sapiens
agttttaaagctata

SEQ ID NO: 1896848 - DNA, 15 bp, Homo sapiens
gttttaaagctatag

SEQ ID NO: 1896849 - DNA, 15 bp, Homo sapiens
ttttaaagctataga

SEQ ID NO: 1896850 - DNA, 15 bp, Homo sapiens
tttaaagctatagag

SEQ ID NO: 1896851 - DNA, 15 bp, Homo sapiens
ttaaagctatagaga

SEQ ID NO: 1896852 - DNA, 15 bp, Homo sapiens
taaagctatagagag

SEQ ID NO: 1896853 - DNA, 15 bp, Homo sapiens
aaagctatagagaga

SEQ ID NO: 1896854 - DNA, 15 bp, Homo sapiens
aagctatagagagaa

SEQ ID NO: 1896855 - DNA, 15 bp, Homo sapiens
agctatagagagaat

SEQ ID NO: 1896856 - DNA, 15 bp, Homo sapiens
gctatagagagaatg

SEQ ID NO: 1896857 - DNA, 15 bp, Homo sapiens
ctatagagagaatgg

SEQ ID NO: 1896858 - DNA, 15 bp, Homo sapiens
tatagagagaatgga

SEQ ID NO: 1896859 - DNA, 15 bp, Homo sapiens
atagagagaatggat

SEQ ID NO: 1896860 - DNA, 15 bp, Homo sapiens
tagagagaatggata

SEQ ID NO: 1896861 - DNA, 15 bp, Homo sapiens
agagagaatggatat

SEQ ID NO: 1896862 - DNA, 15 bp, Homo sapiens
gagagaatggatatt

SEQ ID NO: 1896863 - DNA, 15 bp, Homo sapiens
agagaatggatatta

SEQ ID NO: 1896864 - DNA, 15 bp, Homo sapiens
gagaatggatattag

SEQ ID NO: 1896865 - DNA, 15 bp, Homo sapiens
agaatggatattagc

SEQ ID NO: 1896866 - DNA, 15 bp, Homo sapiens
gaatggatattagcc

SEQ ID NO: 1896867 - DNA, 15 bp, Homo sapiens
aatggatattagccc

SEQ ID NO: 1896868 - DNA, 15 bp, Homo sapiens
atggatattagccct

SEQ ID NO: 1896869 - DNA, 15 bp, Homo sapiens
tggatattagccctt

SEQ ID NO: 1896870 - DNA, 15 bp, Homo sapiens
ggatattagcccttt

SEQ ID NO: 1896871 - DNA, 15 bp, Homo sapiens
gatattagccctttg

SEQ ID NO: 1896872 - DNA, 15 bp, Homo sapiens
atattagccctttgt

SEQ ID NO: 1896873 - DNA, 15 bp, Homo sapiens
tattagccctttgtc

SEQ ID NO: 1896874 - DNA, 15 bp, Homo sapiens
attagccctttgtca

SEQ ID NO: 1896875 - DNA, 15 bp, Homo sapiens
ttagccctttgtcag

SEQ ID NO: 1896876 - DNA, 15 bp, Homo sapiens
tagccctttgtcaga

SEQ ID NO: 1896877 - DNA, 15 bp, Homo sapiens
agccctttgtcagat

SEQ ID NO: 1896878 - DNA, 15 bp, Homo sapiens
gccctttgtcagatg

SEQ ID NO: 1896879 - DNA, 15 bp, Homo sapiens
ccctttgtcagatga

SEQ ID NO: 1896880 - DNA, 15 bp, Homo sapiens
cctttgtcagatgag

SEQ ID NO: 1896881 - DNA, 15 bp, Homo sapiens
ctttgtcagatgagt

SEQ ID NO: 1896882 - DNA, 15 bp, Homo sapiens
tttgtcagatgagta

SEQ ID NO: 1896883 - DNA, 15 bp, Homo sapiens
ttgtcagatgagtag

SEQ ID NO: 1896884 - DNA, 15 bp, Homo sapiens
tgtcagatgagtaga

SEQ ID NO: 1896885 - DNA, 15 bp, Homo sapiens
gtcagatgagtagat

SEQ ID NO: 1896886 - DNA, 15 bp, Homo sapiens
tcagatgagtagatt

SEQ ID NO: 1896887 - DNA, 15 bp, Homo sapiens
cagatgagtagattg

SEQ ID NO: 1896888 - DNA, 15 bp, Homo sapiens
agatgagtagattgc

SEQ ID NO: 1896889 - DNA, 15 bp, Homo sapiens
gatgagtagattgca

SEQ ID NO: 1896890 - DNA, 15 bp, Homo sapiens
atgagtagattgcaa

SEQ ID NO: 1896891 - DNA, 15 bp, Homo sapiens
tgagtagattgcaaa

SEQ ID NO: 1896892 - DNA, 15 bp, Homo sapiens
gagtagattgcaaaa

SEQ ID NO: 1896893 - DNA, 15 bp, Homo sapiens
agtagattgcaaaaa

SEQ ID NO: 1896894 - DNA, 15 bp, Homo sapiens
gtagattgcaaaaat

SEQ ID NO: 1896895 - DNA, 15 bp, Homo sapiens
tagattgcaaaaatt

SEQ ID NO: 1896896 - DNA, 15 bp, Homo sapiens
agattgcaaaaattt

SEQ ID NO: 1896897 - DNA, 15 bp, Homo sapiens
gattgcaaaaatttt

SEQ ID NO: 1896898 - DNA, 15 bp, Homo sapiens
attgcaaaaattttc

SEQ ID NO: 1896899 - DNA, 15 bp, Homo sapiens
ttgcaaaaattttct

SEQ ID NO: 1896900 - DNA, 15 bp, Homo sapiens
tgcaaaaattttctc

SEQ ID NO: 1896901 - DNA, 15 bp, Homo sapiens
gcaaaaattttctcc

SEQ ID NO: 1896902 - DNA, 15 bp, Homo sapiens
caaaaattttctccc

SEQ ID NO: 1896903 - DNA, 15 bp, Homo sapiens
aaaaattttctccca

SEQ ID NO: 1896904 - DNA, 15 bp, Homo sapiens
aaaattttctcccat

SEQ ID NO: 1896905 - DNA, 15 bp, Homo sapiens
aaattttctcccatt

SEQ ID NO: 1896906 - DNA, 15 bp, Homo sapiens
aattttctcccattc

SEQ ID NO: 1896907 - DNA, 15 bp, Homo sapiens
attttctcccattct

SEQ ID NO: 1896908 - DNA, 15 bp, Homo sapiens
cattctgtaggttgc

SEQ ID NO: 1896909 - DNA, 15 bp, Homo sapiens
tctgtaggttgcctg

SEQ ID NO: 1896910 - DNA, 15 bp, Homo sapiens
ctgtaggttgcctgt

SEQ ID NO: 1896911 - DNA, 15 bp, Homo sapiens
tgtaggttgcctgtt

SEQ ID NO: 1896912 - DNA, 15 bp, Homo sapiens
gtaggttgcctgttc

SEQ ID NO: 1896913 - DNA, 15 bp, Homo sapiens
taggttgcctgttca

SEQ ID NO: 1896914 - DNA, 15 bp, Homo sapiens
ggttgcctgttcact

SEQ ID NO: 1896915 - DNA, 15 bp, Homo sapiens
gttgcctgttcactc

SEQ ID NO: 1896916 - DNA, 15 bp, Homo sapiens
ttgcctgttcactct

SEQ ID NO: 1896917 - DNA, 15 bp, Homo sapiens
tgcctgttcactctg

SEQ ID NO: 1896918 - DNA, 15 bp, Homo sapiens
gcctgttcactctga

SEQ ID NO: 1896919 - DNA, 15 bp, Homo sapiens
cctgttcactctgat

SEQ ID NO: 1896920 - DNA, 15 bp, Homo sapiens
ctgttcactctgatg

SEQ ID NO: 1896921 - DNA, 15 bp, Homo sapiens
tgttcactctgatgg

SEQ ID NO: 1896922 - DNA, 15 bp, Homo sapiens
gttcactctgatggt

SEQ ID NO: 1896923 - DNA, 15 bp, Homo sapiens
ttcactctgatggtg

SEQ ID NO: 1896924 - DNA, 15 bp, Homo sapiens
tcactctgatggtgg

SEQ ID NO: 1896925 - DNA, 15 bp, Homo sapiens
cactctgatggtggt

SEQ ID NO: 1896926 - DNA, 15 bp, Homo sapiens
actctgatggtggtt

SEQ ID NO: 1896927 - DNA, 15 bp, Homo sapiens
ctctgatggtggttt

SEQ ID NO: 1896928 - DNA, 15 bp, Homo sapiens
tctgatggtggtttc

SEQ ID NO: 1896929 - DNA, 15 bp, Homo sapiens
ctgatggtggtttct

SEQ ID NO: 1896930 - DNA, 15 bp, Homo sapiens
tgatggtggtttctt

SEQ ID NO: 1896931 - DNA, 15 bp, Homo sapiens
gatggtggtttcttt

SEQ ID NO: 1896932 - DNA, 15 bp, Homo sapiens
atggtggtttctttt

SEQ ID NO: 1896933 - DNA, 15 bp, Homo sapiens
tggtggtttcttttg

SEQ ID NO: 1896934 - DNA, 15 bp, Homo sapiens
ggtggtttcttttgc

SEQ ID NO: 1896935 - DNA, 15 bp, Homo sapiens
gtggtttcttttgct

SEQ ID NO: 1896936 - DNA, 15 bp, Homo sapiens
tggtttcttttgctg

SEQ ID NO: 1896937 - DNA, 15 bp, Homo sapiens
ggtttcttttgctgt

SEQ ID NO: 1896938 - DNA, 15 bp, Homo sapiens
cagaagctctttagt

SEQ ID NO: 1896939 - DNA, 15 bp, Homo sapiens
agaagctctttagtt

SEQ ID NO: 1896940 - DNA, 15 bp, Homo sapiens
gaagctctttagttt

SEQ ID NO: 1896941 - DNA, 15 bp, Homo sapiens
aagctctttagttta

SEQ ID NO: 1896942 - DNA, 15 bp, Homo sapiens
agctctttagtttaa

SEQ ID NO: 1896943 - DNA, 15 bp, Homo sapiens
gctctttagtttaat

SEQ ID NO: 1896944 - DNA, 15 bp, Homo sapiens
ctttagtttaattag

SEQ ID NO: 1896945 - DNA, 15 bp, Homo sapiens
tttagtttaattaga

SEQ ID NO: 1896946 - DNA, 15 bp, Homo sapiens
ttagtttaattagat

SEQ ID NO: 1896947 - DNA, 15 bp, Homo sapiens
tagtttaattagatc

SEQ ID NO: 1896948 - DNA, 15 bp, Homo sapiens
agtttaattagatcc

SEQ ID NO: 1896949 - DNA, 15 bp, Homo sapiens
gtttaattagatccc

SEQ ID NO: 1896950 - DNA, 15 bp, Homo sapiens
tttaattagatcccg

SEQ ID NO: 1896951 - DNA, 15 bp, Homo sapiens
ttaattagatcccgt

SEQ ID NO: 1896952 - DNA, 15 bp, Homo sapiens
taattagatcccgtt

SEQ ID NO: 1896953 - DNA, 15 bp, Homo sapiens
aattagatcccgttt

SEQ ID NO: 1896954 - DNA, 15 bp, Homo sapiens
attagatcccgtttg

SEQ ID NO: 1896955 - DNA, 15 bp, Homo sapiens
ttagatcccgtttgt

SEQ ID NO: 1896956 - DNA, 15 bp, Homo sapiens
tagatcccgtttgtc

SEQ ID NO: 1896957 - DNA, 15 bp, Homo sapiens
agatcccgtttgtca

SEQ ID NO: 1896958 - DNA, 15 bp, Homo sapiens
gatcccgtttgtcaa

SEQ ID NO: 1896959 - DNA, 15 bp, Homo sapiens
atcccgtttgtcaat

SEQ ID NO: 1896960 - DNA, 15 bp, Homo sapiens
tcccgtttgtcaatt

SEQ ID NO: 1896961 - DNA, 15 bp, Homo sapiens
cccgtttgtcaattt

SEQ ID NO: 1896962 - DNA, 15 bp, Homo sapiens
ccgtttgtcaatttt

SEQ ID NO: 1896963 - DNA, 15 bp, Homo sapiens
cgtttgtcaattttg

SEQ ID NO: 1896964 - DNA, 15 bp, Homo sapiens
gtttgtcaattttgg

SEQ ID NO: 1896965 - DNA, 15 bp, Homo sapiens
tttgtcaattttggc

SEQ ID NO: 1896966 - DNA, 15 bp, Homo sapiens
ttgtcaattttggct

SEQ ID NO: 1896967 - DNA, 15 bp, Homo sapiens
tgtcaattttggctt

SEQ ID NO: 1896968 - DNA, 15 bp, Homo sapiens
gtcaattttggcttt

SEQ ID NO: 1896969 - DNA, 15 bp, Homo sapiens
ttggcttttgttgcc

SEQ ID NO: 1896970 - DNA, 15 bp, Homo sapiens
tggcttttgttgcca

SEQ ID NO: 1896971 - DNA, 15 bp, Homo sapiens
ggcttttgttgccat

SEQ ID NO: 1896972 - DNA, 15 bp, Homo sapiens
gcttttgttgccatt

SEQ ID NO: 1896973 - DNA, 15 bp, Homo sapiens
cttttgttgccattg

SEQ ID NO: 1896974 - DNA, 15 bp, Homo sapiens
ttttgttgccattgc

SEQ ID NO: 1896975 - DNA, 15 bp, Homo sapiens
tttgttgccattgct

SEQ ID NO: 1896976 - DNA, 15 bp, Homo sapiens
ttgttgccattgctt

SEQ ID NO: 1896977 - DNA, 15 bp, Homo sapiens
tgttgccattgcttt

SEQ ID NO: 1896978 - DNA, 15 bp, Homo sapiens
gttgccattgctttt

SEQ ID NO: 1896979 - DNA, 15 bp, Homo sapiens
ttgccattgcttttg

SEQ ID NO: 1896980 - DNA, 15 bp, Homo sapiens
tgccattgcttttgg

SEQ ID NO: 1896981 - DNA, 15 bp, Homo sapiens
gccattgcttttggt

SEQ ID NO: 1896982 - DNA, 15 bp, Homo sapiens
ccattgcttttggtg

SEQ ID NO: 1896983 - DNA, 15 bp, Homo sapiens
cattgcttttggtgt

SEQ ID NO: 1896984 - DNA, 15 bp, Homo sapiens
ttttggtgttttaga

SEQ ID NO: 1896985 - DNA, 15 bp, Homo sapiens
tttggtgttttagac

SEQ ID NO: 1896986 - DNA, 15 bp, Homo sapiens
ttggtgttttagaca

SEQ ID NO: 1896987 - DNA, 15 bp, Homo sapiens
tggtgttttagacat

SEQ ID NO: 1896988 - DNA, 15 bp, Homo sapiens
ggtgttttagacatg

SEQ ID NO: 1896989 - DNA, 15 bp, Homo sapiens
gtgttttagacatga

SEQ ID NO: 1896990 - DNA, 15 bp, Homo sapiens
tgttttagacatgaa

SEQ ID NO: 1896991 - DNA, 15 bp, Homo sapiens
gttttagacatgaag

SEQ ID NO: 1896992 - DNA, 15 bp, Homo sapiens
ttttagacatgaagt

SEQ ID NO: 1896993 - DNA, 15 bp, Homo sapiens
tttagacatgaagtc

SEQ ID NO: 1896994 - DNA, 15 bp, Homo sapiens
ttagacatgaagtcc

SEQ ID NO: 1896995 - DNA, 15 bp, Homo sapiens
tagacatgaagtcct

SEQ ID NO: 1896996 - DNA, 15 bp, Homo sapiens
agacatgaagtcctt

SEQ ID NO: 1896997 - DNA, 15 bp, Homo sapiens
gacatgaagtccttg

SEQ ID NO: 1896998 - DNA, 15 bp, Homo sapiens
acatgaagtccttgc

SEQ ID NO: 1896999 - DNA, 15 bp, Homo sapiens
catgaagtccttgcc

SEQ ID NO: 1897000 - DNA, 15 bp, Homo sapiens
atgaagtccttgccc

SEQ ID NO: 1897001 - DNA, 15 bp, Homo sapiens
tgaagtccttgccca

SEQ ID NO: 1897002 - DNA, 15 bp, Homo sapiens
gaagtccttgcccat

SEQ ID NO: 1897003 - DNA, 15 bp, Homo sapiens
aagtccttgcccatg

SEQ ID NO: 1897004 - DNA, 15 bp, Homo sapiens
agtccttgcccatgc

SEQ ID NO: 1897005 - DNA, 15 bp, Homo sapiens
gtccttgcccatgcc

SEQ ID NO: 1897006 - DNA, 15 bp, Homo sapiens
tccttgcccatgcct

SEQ ID NO: 1897007 - DNA, 15 bp, Homo sapiens
ccttgcccatgccta

SEQ ID NO: 1897008 - DNA, 15 bp, Homo sapiens
cttgcccatgcctat

SEQ ID NO: 1897009 - DNA, 15 bp, Homo sapiens
gcccatgcctatgtc

SEQ ID NO: 1897010 - DNA, 15 bp, Homo sapiens
cccatgcctatgtcc

SEQ ID NO: 1897011 - DNA, 15 bp, Homo sapiens
ccatgcctatgtcct

SEQ ID NO: 1897012 - DNA, 15 bp, Homo sapiens
catgcctatgtcctg

SEQ ID NO: 1897013 - DNA, 15 bp, Homo sapiens
atgcctatgtcctga

SEQ ID NO: 1897014 - DNA, 15 bp, Homo sapiens
tgcctatgtcctgaa

SEQ ID NO: 1897015 - DNA, 15 bp, Homo sapiens
gcctatgtcctgaat

SEQ ID NO: 1897016 - DNA, 15 bp, Homo sapiens
cctatgtcctgaatg

SEQ ID NO: 1897017 - DNA, 15 bp, Homo sapiens
ctatgtcctgaatgg

SEQ ID NO: 1897018 - DNA, 15 bp, Homo sapiens
tatgtcctgaatggt

SEQ ID NO: 1897019 - DNA, 15 bp, Homo sapiens
atgtcctgaatggta

SEQ ID NO: 1897020 - DNA, 15 bp, Homo sapiens
tgtcctgaatggtat

SEQ ID NO: 1897021 - DNA, 15 bp, Homo sapiens
gtcctgaatggtatt

SEQ ID NO: 1897022 - DNA, 15 bp, Homo sapiens
tcctgaatggtattg

SEQ ID NO: 1897023 - DNA, 15 bp, Homo sapiens
cctgaatggtattgc

SEQ ID NO: 1897024 - DNA, 15 bp, Homo sapiens
ctgaatggtattgcc

SEQ ID NO: 1897025 - DNA, 15 bp, Homo sapiens
tggtattgcctaggt

SEQ ID NO: 1897026 - DNA, 15 bp, Homo sapiens
ggtattgcctaggtt

SEQ ID NO: 1897027 - DNA, 15 bp, Homo sapiens
gtattgcctaggttt

SEQ ID NO: 1897028 - DNA, 15 bp, Homo sapiens
tattgcctaggtttt

SEQ ID NO: 1897029 - DNA, 15 bp, Homo sapiens
attgcctaggttttc

SEQ ID NO: 1897030 - DNA, 15 bp, Homo sapiens
ttgcctaggttttct

SEQ ID NO: 1897031 - DNA, 15 bp, Homo sapiens
tgcctaggttttctt

SEQ ID NO: 1897032 - DNA, 15 bp, Homo sapiens
gcctaggttttcttc

SEQ ID NO: 1897033 - DNA, 15 bp, Homo sapiens
cctaggttttcttct

SEQ ID NO: 1897034 - DNA, 15 bp, Homo sapiens
ctaggttttcttcta

SEQ ID NO: 1897035 - DNA, 15 bp, Homo sapiens
taggttttcttctaa

SEQ ID NO: 1897036 - DNA, 15 bp, Homo sapiens
aggttttcttctaag

SEQ ID NO: 1897037 - DNA, 15 bp, Homo sapiens
ggttttcttctaagg

SEQ ID NO: 1897038 - DNA, 15 bp, Homo sapiens
gttttcttctaaggt

SEQ ID NO: 1897039 - DNA, 15 bp, Homo sapiens
ttttcttctaaggtt

SEQ ID NO: 1897040 - DNA, 15 bp, Homo sapiens
tttcttctaaggttt

SEQ ID NO: 1897041 - DNA, 15 bp, Homo sapiens
ttcttctaaggtttt

SEQ ID NO: 1897042 - DNA, 15 bp, Homo sapiens
tcttctaaggttttt

SEQ ID NO: 1897043 - DNA, 15 bp, Homo sapiens
cttctaaggttttta

SEQ ID NO: 1897044 - DNA, 15 bp, Homo sapiens
ttctaaggtttttat

SEQ ID NO: 1897045 - DNA, 15 bp, Homo sapiens
tctaaggtttttatg

SEQ ID NO: 1897046 - DNA, 15 bp, Homo sapiens
ctaaggtttttatgg

SEQ ID NO: 1897047 - DNA, 15 bp, Homo sapiens
taaggtttttatggt

SEQ ID NO: 1897048 - DNA, 15 bp, Homo sapiens
aaggtttttatggtt

SEQ ID NO: 1897049 - DNA, 15 bp, Homo sapiens
aggtttttatggttt

SEQ ID NO: 1897050 - DNA, 15 bp, Homo sapiens
ggtttttatggtttt

SEQ ID NO: 1897051 - DNA, 15 bp, Homo sapiens
gtttttatggtttta

SEQ ID NO: 1897052 - DNA, 15 bp, Homo sapiens
tttttatggttttag

SEQ ID NO: 1897053 - DNA, 15 bp, Homo sapiens
ttttatggttttagg

SEQ ID NO: 1897054 - DNA, 15 bp, Homo sapiens
tttatggttttaggt

SEQ ID NO: 1897055 - DNA, 15 bp, Homo sapiens
ttatggttttaggtc

SEQ ID NO: 1897056 - DNA, 15 bp, Homo sapiens
tatggttttaggtct

SEQ ID NO: 1897057 - DNA, 15 bp, Homo sapiens
atggttttaggtcta

SEQ ID NO: 1897058 - DNA, 15 bp, Homo sapiens
tggttttaggtctaa

SEQ ID NO: 1897059 - DNA, 15 bp, Homo sapiens
ggttttaggtctaac

SEQ ID NO: 1897060 - DNA, 15 bp, Homo sapiens
gttttaggtctaaca

SEQ ID NO: 1897061 - DNA, 15 bp, Homo sapiens
ttttaggtctaacat

SEQ ID NO: 1897062 - DNA, 15 bp, Homo sapiens
tttaggtctaacatt

SEQ ID NO: 1897063 - DNA, 15 bp, Homo sapiens
ttaggtctaacattt

SEQ ID NO: 1897064 - DNA, 15 bp, Homo sapiens
taggtctaacattta

SEQ ID NO: 1897065 - DNA, 15 bp, Homo sapiens
aggtctaacatttaa

SEQ ID NO: 1897066 - DNA, 15 bp, Homo sapiens
ggtctaacatttaag

SEQ ID NO: 1897067 - DNA, 15 bp, Homo sapiens
gtctaacatttaagc

SEQ ID NO: 1897068 - DNA, 15 bp, Homo sapiens
tctaacatttaagcc

SEQ ID NO: 1897069 - DNA, 15 bp, Homo sapiens
ctaacatttaagcct

SEQ ID NO: 1897070 - DNA, 15 bp, Homo sapiens
taacatttaagcctt

SEQ ID NO: 1897071 - DNA, 15 bp, Homo sapiens
aacatttaagccttt

SEQ ID NO: 1897072 - DNA, 15 bp, Homo sapiens
acatttaagccttta

SEQ ID NO: 1897073 - DNA, 15 bp, Homo sapiens
catttaagcctttaa

SEQ ID NO: 1897074 - DNA, 15 bp, Homo sapiens
atttaagcctttaat

SEQ ID NO: 1897075 - DNA, 15 bp, Homo sapiens
tttaagcctttaatc

SEQ ID NO: 1897076 - DNA, 15 bp, Homo sapiens
ttaagcctttaatcc

SEQ ID NO: 1897077 - DNA, 15 bp, Homo sapiens
taagcctttaatcca

SEQ ID NO: 1897078 - DNA, 15 bp, Homo sapiens
aagcctttaatccat

SEQ ID NO: 1897079 - DNA, 15 bp, Homo sapiens
agcctttaatccatc

SEQ ID NO: 1897080 - DNA, 15 bp, Homo sapiens
gcctttaatccatct

SEQ ID NO: 1897081 - DNA, 15 bp, Homo sapiens
cctttaatccatctt

SEQ ID NO: 1897082 - DNA, 15 bp, Homo sapiens
ctttaatccatcttg

SEQ ID NO: 1897083 - DNA, 15 bp, Homo sapiens
tttaatccatcttga

SEQ ID NO: 1897084 - DNA, 15 bp, Homo sapiens
ttaatccatcttgaa

SEQ ID NO: 1897085 - DNA, 15 bp, Homo sapiens
taatccatcttgaat

SEQ ID NO: 1897086 - DNA, 15 bp, Homo sapiens
aatccatcttgaatt

SEQ ID NO: 1897087 - DNA, 15 bp, Homo sapiens
atccatcttgaatta

SEQ ID NO: 1897088 - DNA, 15 bp, Homo sapiens
tccatcttgaattaa

SEQ ID NO: 1897089 - DNA, 15 bp, Homo sapiens
ccatcttgaattaat

SEQ ID NO: 1897090 - DNA, 15 bp, Homo sapiens
catcttgaattaatt

SEQ ID NO: 1897091 - DNA, 15 bp, Homo sapiens
atcttgaattaattg

SEQ ID NO: 1897092 - DNA, 15 bp, Homo sapiens
tcttgaattaattgt

SEQ ID NO: 1897093 - DNA, 15 bp, Homo sapiens
cttgaattaattgtt

SEQ ID NO: 1897094 - DNA, 15 bp, Homo sapiens
ttgaattaattgttg

SEQ ID NO: 1897095 - DNA, 15 bp, Homo sapiens
tgaattaattgttgt

SEQ ID NO: 1897096 - DNA, 15 bp, Homo sapiens
gaattaattgttgta

SEQ ID NO: 1897097 - DNA, 15 bp, Homo sapiens
aattaattgttgtat

SEQ ID NO: 1897098 - DNA, 15 bp, Homo sapiens
attaattgttgtata

SEQ ID NO: 1897099 - DNA, 15 bp, Homo sapiens
ttaattgttgtataa

SEQ ID NO: 1897100 - DNA, 15 bp, Homo sapiens
taattgttgtataag

SEQ ID NO: 1897101 - DNA, 15 bp, Homo sapiens
aattgttgtataagg

SEQ ID NO: 1897102 - DNA, 15 bp, Homo sapiens
attgttgtataaggt

SEQ ID NO: 1897103 - DNA, 15 bp, Homo sapiens
ttgttgtataaggtg

SEQ ID NO: 1897104 - DNA, 15 bp, Homo sapiens
tgttgtataaggtgt

SEQ ID NO: 1897105 - DNA, 15 bp, Homo sapiens
gttgtataaggtgta

SEQ ID NO: 1897106 - DNA, 15 bp, Homo sapiens
gtataaggtgtaaga

SEQ ID NO: 1897107 - DNA, 15 bp, Homo sapiens
tataaggtgtaagaa

SEQ ID NO: 1897108 - DNA, 15 bp, Homo sapiens
ataaggtgtaagaaa

SEQ ID NO: 1897109 - DNA, 15 bp, Homo sapiens
taaggtgtaagaaag

SEQ ID NO: 1897110 - DNA, 15 bp, Homo sapiens
aaggtgtaagaaagg

SEQ ID NO: 1897111 - DNA, 15 bp, Homo sapiens
aggtgtaagaaaggg

SEQ ID NO: 1897112 - DNA, 15 bp, Homo sapiens
ggtgtaagaaaggga

SEQ ID NO: 1897113 - DNA, 15 bp, Homo sapiens
gtgtaagaaagggat

SEQ ID NO: 1897114 - DNA, 15 bp, Homo sapiens
tgtaagaaagggatc

SEQ ID NO: 1897115 - DNA, 15 bp, Homo sapiens
gtaagaaagggatcc

SEQ ID NO: 1897116 - DNA, 15 bp, Homo sapiens
taagaaagggatcca

SEQ ID NO: 1897117 - DNA, 15 bp, Homo sapiens
aagaaagggatccag

SEQ ID NO: 1897118 - DNA, 15 bp, Homo sapiens
agaaagggatccagt

SEQ ID NO: 1897119 - DNA, 15 bp, Homo sapiens
gaaagggatccagtt

SEQ ID NO: 1897120 - DNA, 15 bp, Homo sapiens
aaagggatccagttt

SEQ ID NO: 1897121 - DNA, 15 bp, Homo sapiens
aagggatccagtttc

SEQ ID NO: 1897122 - DNA, 15 bp, Homo sapiens
agggatccagtttca

SEQ ID NO: 1897123 - DNA, 15 bp, Homo sapiens
gggatccagtttcag

SEQ ID NO: 1897124 - DNA, 15 bp, Homo sapiens
ggatccagtttcagc

SEQ ID NO: 1897125 - DNA, 15 bp, Homo sapiens
gatccagtttcagct

SEQ ID NO: 1897126 - DNA, 15 bp, Homo sapiens
atccagtttcagctt

SEQ ID NO: 1897127 - DNA, 15 bp, Homo sapiens
tccagtttcagcttt

SEQ ID NO: 1897128 - DNA, 15 bp, Homo sapiens
ccagtttcagctttc

SEQ ID NO: 1897129 - DNA, 15 bp, Homo sapiens
cagtttcagctttct

SEQ ID NO: 1897130 - DNA, 15 bp, Homo sapiens
agtttcagctttcta

SEQ ID NO: 1897131 - DNA, 15 bp, Homo sapiens
gtttcagctttctac

SEQ ID NO: 1897132 - DNA, 15 bp, Homo sapiens
tttcagctttctaca

SEQ ID NO: 1897133 - DNA, 15 bp, Homo sapiens
ttcagctttctacat

SEQ ID NO: 1897134 - DNA, 15 bp, Homo sapiens
tcagctttctacata

SEQ ID NO: 1897135 - DNA, 15 bp, Homo sapiens
cagctttctacatac

SEQ ID NO: 1897136 - DNA, 15 bp, Homo sapiens
agctttctacatacg

SEQ ID NO: 1897137 - DNA, 15 bp, Homo sapiens
gctttctacatacgg

SEQ ID NO: 1897138 - DNA, 15 bp, Homo sapiens
ctttctacatacggc

SEQ ID NO: 1897139 - DNA, 15 bp, Homo sapiens
tttctacatacggct

SEQ ID NO: 1897140 - DNA, 15 bp, Homo sapiens
ttctacatacggcta

SEQ ID NO: 1897141 - DNA, 15 bp, Homo sapiens
tctacatacggctag

SEQ ID NO: 1897142 - DNA, 15 bp, Homo sapiens
ctacatacggctagc

SEQ ID NO: 1897143 - DNA, 15 bp, Homo sapiens
tacatacggctagcc

SEQ ID NO: 1897144 - DNA, 15 bp, Homo sapiens
acatacggctagcca

SEQ ID NO: 1897145 - DNA, 15 bp, Homo sapiens
catacggctagccac

SEQ ID NO: 1897146 - DNA, 15 bp, Homo sapiens
atacggctagccact

SEQ ID NO: 1897147 - DNA, 15 bp, Homo sapiens
tacggctagccactt

SEQ ID NO: 1897148 - DNA, 15 bp, Homo sapiens
acggctagccacttt

SEQ ID NO: 1897149 - DNA, 15 bp, Homo sapiens
cggctagccactttc

SEQ ID NO: 1897150 - DNA, 15 bp, Homo sapiens
ggctagccactttcc

SEQ ID NO: 1897151 - DNA, 15 bp, Homo sapiens
gctagccactttccc

SEQ ID NO: 1897152 - DNA, 15 bp, Homo sapiens
ctagccactttcccc

SEQ ID NO: 1897153 - DNA, 15 bp, Homo sapiens
tagccactttcccca

SEQ ID NO: 1897154 - DNA, 15 bp, Homo sapiens
agccactttccccag

SEQ ID NO: 1897155 - DNA, 15 bp, Homo sapiens
gccactttccccagc

SEQ ID NO: 1897156 - DNA, 15 bp, Homo sapiens
ccactttccccagca

SEQ ID NO: 1897157 - DNA, 15 bp, Homo sapiens
cactttccccagcac

SEQ ID NO: 1897158 - DNA, 15 bp, Homo sapiens
actttccccagcacc

SEQ ID NO: 1897159 - DNA, 15 bp, Homo sapiens
ctttccccagcacca

SEQ ID NO: 1897160 - DNA, 15 bp, Homo sapiens
tttccccagcaccat

SEQ ID NO: 1897161 - DNA, 15 bp, Homo sapiens
ttccccagcaccatt

SEQ ID NO: 1897162 - DNA, 15 bp, Homo sapiens
tccccagcaccattt

SEQ ID NO: 1897163 - DNA, 15 bp, Homo sapiens
ccccagcaccatttg

SEQ ID NO: 1897164 - DNA, 15 bp, Homo sapiens
cccagcaccatttgt

SEQ ID NO: 1897165 - DNA, 15 bp, Homo sapiens
ccagcaccatttgtt

SEQ ID NO: 1897166 - DNA, 15 bp, Homo sapiens
cagcaccatttgtta

SEQ ID NO: 1897167 - DNA, 15 bp, Homo sapiens
agcaccatttgttaa

SEQ ID NO: 1897168 - DNA, 15 bp, Homo sapiens
gcaccatttgttaaa

SEQ ID NO: 1897169 - DNA, 15 bp, Homo sapiens
caccatttgttaaat

SEQ ID NO: 1897170 - DNA, 15 bp, Homo sapiens
accatttgttaaata

SEQ ID NO: 1897171 - DNA, 15 bp, Homo sapiens
ccatttgttaaatag

SEQ ID NO: 1897172 - DNA, 15 bp, Homo sapiens
catttgttaaatagg

SEQ ID NO: 1897173 - DNA, 15 bp, Homo sapiens
atttgttaaataggg

SEQ ID NO: 1897174 - DNA, 15 bp, Homo sapiens
tttgttaaataggga

SEQ ID NO: 1897175 - DNA, 15 bp, Homo sapiens
ttgttaaatagggaa

SEQ ID NO: 1897176 - DNA, 15 bp, Homo sapiens
tgttaaatagggaat

SEQ ID NO: 1897177 - DNA, 15 bp, Homo sapiens
gttaaatagggaatc

SEQ ID NO: 1897178 - DNA, 15 bp, Homo sapiens
ggtttgtcaaagatg

SEQ ID NO: 1897179 - DNA, 15 bp, Homo sapiens
gtttgtcaaagatga

SEQ ID NO: 1897180 - DNA, 15 bp, Homo sapiens
ttgtcaaagatgaga

SEQ ID NO: 1897181 - DNA, 15 bp, Homo sapiens
tgtcaaagatgagac

SEQ ID NO: 1897182 - DNA, 15 bp, Homo sapiens
gtcaaagatgagaca

SEQ ID NO: 1897183 - DNA, 15 bp, Homo sapiens
tcaaagatgagacag

SEQ ID NO: 1897184 - DNA, 15 bp, Homo sapiens
caaagatgagacagc

SEQ ID NO: 1897185 - DNA, 15 bp, Homo sapiens
aaagatgagacagct

SEQ ID NO: 1897186 - DNA, 15 bp, Homo sapiens
aagatgagacagctg

SEQ ID NO: 1897187 - DNA, 15 bp, Homo sapiens
agatgagacagctgt

SEQ ID NO: 1897188 - DNA, 15 bp, Homo sapiens
gatgagacagctgta

SEQ ID NO: 1897189 - DNA, 15 bp, Homo sapiens
atgagacagctgtag

SEQ ID NO: 1897190 - DNA, 15 bp, Homo sapiens
tgagacagctgtaga

SEQ ID NO: 1897191 - DNA, 15 bp, Homo sapiens
gagacagctgtagat

SEQ ID NO: 1897192 - DNA, 15 bp, Homo sapiens
agacagctgtagatg

SEQ ID NO: 1897193 - DNA, 15 bp, Homo sapiens
gacagctgtagatgt

SEQ ID NO: 1897194 - DNA, 15 bp, Homo sapiens
acagctgtagatgtg

SEQ ID NO: 1897195 - DNA, 15 bp, Homo sapiens
cagctgtagatgtgt

SEQ ID NO: 1897196 - DNA, 15 bp, Homo sapiens
agctgtagatgtgtg

SEQ ID NO: 1897197 - DNA, 15 bp, Homo sapiens
gctgtagatgtgtgg

SEQ ID NO: 1897198 - DNA, 15 bp, Homo sapiens
ctgtagatgtgtggt

SEQ ID NO: 1897199 - DNA, 15 bp, Homo sapiens
tgtagatgtgtggta

SEQ ID NO: 1897200 - DNA, 15 bp, Homo sapiens
gtagatgtgtggtat

SEQ ID NO: 1897201 - DNA, 15 bp, Homo sapiens
tagatgtgtggtatt

SEQ ID NO: 1897202 - DNA, 15 bp, Homo sapiens
agatgtgtggtatta

SEQ ID NO: 1897203 - DNA, 15 bp, Homo sapiens
gatgtgtggtattat

SEQ ID NO: 1897204 - DNA, 15 bp, Homo sapiens
atgtgtggtattatt

SEQ ID NO: 1897205 - DNA, 15 bp, Homo sapiens
tgtgtggtattattt

SEQ ID NO: 1897206 - DNA, 15 bp, Homo sapiens
gtgtggtattatttc

SEQ ID NO: 1897207 - DNA, 15 bp, Homo sapiens
tgtggtattatttct

SEQ ID NO: 1897208 - DNA, 15 bp, Homo sapiens
gtggtattatttctg

SEQ ID NO: 1897209 - DNA, 15 bp, Homo sapiens
tggtattatttctga

SEQ ID NO: 1897210 - DNA, 15 bp, Homo sapiens
ggtattatttctgag

SEQ ID NO: 1897211 - DNA, 15 bp, Homo sapiens
gtattatttctgagg

SEQ ID NO: 1897212 - DNA, 15 bp, Homo sapiens
tattatttctgaggg

SEQ ID NO: 1897213 - DNA, 15 bp, Homo sapiens
attatttctgagggc

SEQ ID NO: 1897214 - DNA, 15 bp, Homo sapiens
ttatttctgagggct

SEQ ID NO: 1897215 - DNA, 15 bp, Homo sapiens
tatttctgagggctc

SEQ ID NO: 1897216 - DNA, 15 bp, Homo sapiens
atttctgagggctct

SEQ ID NO: 1897217 - DNA, 15 bp, Homo sapiens
tttctgagggctctg

SEQ ID NO: 1897218 - DNA, 15 bp, Homo sapiens
ttctgagggctctgt

SEQ ID NO: 1897219 - DNA, 15 bp, Homo sapiens
tctgagggctctgtt

SEQ ID NO: 1897220 - DNA, 15 bp, Homo sapiens
ctgagggctctgttc

SEQ ID NO: 1897221 - DNA, 15 bp, Homo sapiens
tgagggctctgttct

SEQ ID NO: 1897222 - DNA, 15 bp, Homo sapiens
gagggctctgttctg

SEQ ID NO: 1897223 - DNA, 15 bp, Homo sapiens
agggctctgttctgt

SEQ ID NO: 1897224 - DNA, 15 bp, Homo sapiens
gggctctgttctgtt

SEQ ID NO: 1897225 - DNA, 15 bp, Homo sapiens
ggctctgttctgttc

SEQ ID NO: 1897226 - DNA, 15 bp, Homo sapiens
gctctgttctgttcc

SEQ ID NO: 1897227 - DNA, 15 bp, Homo sapiens
tgttctgttccatta

SEQ ID NO: 1897228 - DNA, 15 bp, Homo sapiens
gttctgttccattag

SEQ ID NO: 1897229 - DNA, 15 bp, Homo sapiens
ttctgttccattagt

SEQ ID NO: 1897230 - DNA, 15 bp, Homo sapiens
tctgttccattagtc

SEQ ID NO: 1897231 - DNA, 15 bp, Homo sapiens
ctgttccattagtct

SEQ ID NO: 1897232 - DNA, 15 bp, Homo sapiens
tgttccattagtcta

SEQ ID NO: 1897233 - DNA, 15 bp, Homo sapiens
gttccattagtctat

SEQ ID NO: 1897234 - DNA, 15 bp, Homo sapiens
ttccattagtctata

SEQ ID NO: 1897235 - DNA, 15 bp, Homo sapiens
tccattagtctatat

SEQ ID NO: 1897236 - DNA, 15 bp, Homo sapiens
ccattagtctatatc

SEQ ID NO: 1897237 - DNA, 15 bp, Homo sapiens
cattagtctatatct

SEQ ID NO: 1897238 - DNA, 15 bp, Homo sapiens
attagtctatatctc

SEQ ID NO: 1897239 - DNA, 15 bp, Homo sapiens
ttagtctatatctct

SEQ ID NO: 1897240 - DNA, 15 bp, Homo sapiens
tagtctatatctctg

SEQ ID NO: 1897241 - DNA, 15 bp, Homo sapiens
agtctatatctctgt

SEQ ID NO: 1897242 - DNA, 15 bp, Homo sapiens
gtctatatctctgtt

SEQ ID NO: 1897243 - DNA, 15 bp, Homo sapiens
tctatatctctgttt

SEQ ID NO: 1897244 - DNA, 15 bp, Homo sapiens
ctatatctctgtttt

SEQ ID NO: 1897245 - DNA, 15 bp, Homo sapiens
tatatctctgttttg

SEQ ID NO: 1897246 - DNA, 15 bp, Homo sapiens
atatctctgttttgg

SEQ ID NO: 1897247 - DNA, 15 bp, Homo sapiens
tatctctgttttggt

SEQ ID NO: 1897248 - DNA, 15 bp, Homo sapiens
atctctgttttggta

SEQ ID NO: 1897249 - DNA, 15 bp, Homo sapiens
tctctgttttggtac

SEQ ID NO: 1897250 - DNA, 15 bp, Homo sapiens
ctctgttttggtacc

SEQ ID NO: 1897251 - DNA, 15 bp, Homo sapiens
tctgttttggtacca

SEQ ID NO: 1897252 - DNA, 15 bp, Homo sapiens
ctgttttggtaccag

SEQ ID NO: 1897253 - DNA, 15 bp, Homo sapiens
tgttttggtaccagt

SEQ ID NO: 1897254 - DNA, 15 bp, Homo sapiens
gttttggtaccagta

SEQ ID NO: 1897255 - DNA, 15 bp, Homo sapiens
ttttggtaccagtac

SEQ ID NO: 1897256 - DNA, 15 bp, Homo sapiens
tttggtaccagtacc

SEQ ID NO: 1897257 - DNA, 15 bp, Homo sapiens
ttggtaccagtacca

SEQ ID NO: 1897258 - DNA, 15 bp, Homo sapiens
tggtaccagtaccat

SEQ ID NO: 1897259 - DNA, 15 bp, Homo sapiens
ggtaccagtaccatg

SEQ ID NO: 1897260 - DNA, 15 bp, Homo sapiens
gtaccagtaccatgc

SEQ ID NO: 1897261 - DNA, 15 bp, Homo sapiens
taccagtaccatgct

SEQ ID NO: 1897262 - DNA, 15 bp, Homo sapiens
accagtaccatgctg

SEQ ID NO: 1897263 - DNA, 15 bp, Homo sapiens
ctgttttggttactg

SEQ ID NO: 1897264 - DNA, 15 bp, Homo sapiens
tgttttggttactgt

SEQ ID NO: 1897265 - DNA, 15 bp, Homo sapiens
gttttggttactgta

SEQ ID NO: 1897266 - DNA, 15 bp, Homo sapiens
ttttggttactgtag

SEQ ID NO: 1897267 - DNA, 15 bp, Homo sapiens
tttggttactgtagc

SEQ ID NO: 1897268 - DNA, 15 bp, Homo sapiens
ttggttactgtagcc

SEQ ID NO: 1897269 - DNA, 15 bp, Homo sapiens
tggttactgtagcct

SEQ ID NO: 1897270 - DNA, 15 bp, Homo sapiens
ggttactgtagcctt

SEQ ID NO: 1897271 - DNA, 15 bp, Homo sapiens
gttactgtagccttg

SEQ ID NO: 1897272 - DNA, 15 bp, Homo sapiens
ttactgtagccttgt

SEQ ID NO: 1897273 - DNA, 15 bp, Homo sapiens
tactgtagccttgta

SEQ ID NO: 1897274 - DNA, 15 bp, Homo sapiens
actgtagccttgtag

SEQ ID NO: 1897275 - DNA, 15 bp, Homo sapiens
ctgtagccttgtagt

SEQ ID NO: 1897276 - DNA, 15 bp, Homo sapiens
tgtagccttgtagta

SEQ ID NO: 1897277 - DNA, 15 bp, Homo sapiens
gtagccttgtagtat

SEQ ID NO: 1897278 - DNA, 15 bp, Homo sapiens
tagccttgtagtata

SEQ ID NO: 1897279 - DNA, 15 bp, Homo sapiens
agccttgtagtatag

SEQ ID NO: 1897280 - DNA, 15 bp, Homo sapiens
gccttgtagtatagt

SEQ ID NO: 1897281 - DNA, 15 bp, Homo sapiens
ccttgtagtatagtt

SEQ ID NO: 1897282 - DNA, 15 bp, Homo sapiens
cttgtagtatagttt

SEQ ID NO: 1897283 - DNA, 15 bp, Homo sapiens
ttgtagtatagtttg

SEQ ID NO: 1897284 - DNA, 15 bp, Homo sapiens
gtatagtttgaagtc

SEQ ID NO: 1897285 - DNA, 15 bp, Homo sapiens
tatagtttgaagtca

SEQ ID NO: 1897286 - DNA, 15 bp, Homo sapiens
atagtttgaagtcag

SEQ ID NO: 1897287 - DNA, 15 bp, Homo sapiens
tagtttgaagtcagg

SEQ ID NO: 1897288 - DNA, 15 bp, Homo sapiens
agtttgaagtcaggt

SEQ ID NO: 1897289 - DNA, 15 bp, Homo sapiens
gtttgaagtcaggta

SEQ ID NO: 1897290 - DNA, 15 bp, Homo sapiens
tttgaagtcaggtag

SEQ ID NO: 1897291 - DNA, 15 bp, Homo sapiens
ttgaagtcaggtagc

SEQ ID NO: 1897292 - DNA, 15 bp, Homo sapiens
tgaagtcaggtagcc

SEQ ID NO: 1897293 - DNA, 15 bp, Homo sapiens
gaagtcaggtagcct

SEQ ID NO: 1897294 - DNA, 15 bp, Homo sapiens
aagtcaggtagcctg

SEQ ID NO: 1897295 - DNA, 15 bp, Homo sapiens
agtcaggtagcctga

SEQ ID NO: 1897296 - DNA, 15 bp, Homo sapiens
gtcaggtagcctgat

SEQ ID NO: 1897297 - DNA, 15 bp, Homo sapiens
tcaggtagcctgatg

SEQ ID NO: 1897298 - DNA, 15 bp, Homo sapiens
caggtagcctgatgc

SEQ ID NO: 1897299 - DNA, 15 bp, Homo sapiens
aggtagcctgatgcc

SEQ ID NO: 1897300 - DNA, 15 bp, Homo sapiens
ggtagcctgatgcct

SEQ ID NO: 1897301 - DNA, 15 bp, Homo sapiens
gtagcctgatgcctc

SEQ ID NO: 1897302 - DNA, 15 bp, Homo sapiens
tagcctgatgcctcc

SEQ ID NO: 1897303 - DNA, 15 bp, Homo sapiens
agcctgatgcctcca

SEQ ID NO: 1897304 - DNA, 15 bp, Homo sapiens
gcctgatgcctccag

SEQ ID NO: 1897305 - DNA, 15 bp, Homo sapiens
cctgatgcctccagc

SEQ ID NO: 1897306 - DNA, 15 bp, Homo sapiens
ctgatgcctccagct

SEQ ID NO: 1897307 - DNA, 15 bp, Homo sapiens
ctccagctttgttcc

SEQ ID NO: 1897308 - DNA, 15 bp, Homo sapiens
tccagctttgttcct

SEQ ID NO: 1897309 - DNA, 15 bp, Homo sapiens
ccagctttgttcctt

SEQ ID NO: 1897310 - DNA, 15 bp, Homo sapiens
cagctttgttccttt

SEQ ID NO: 1897311 - DNA, 15 bp, Homo sapiens
agctttgttcctttg

SEQ ID NO: 1897312 - DNA, 15 bp, Homo sapiens
gctttgttcctttgg

SEQ ID NO: 1897313 - DNA, 15 bp, Homo sapiens
ctttgttcctttggc

SEQ ID NO: 1897314 - DNA, 15 bp, Homo sapiens
tttgttcctttggct

SEQ ID NO: 1897315 - DNA, 15 bp, Homo sapiens
ttgttcctttggctt

SEQ ID NO: 1897316 - DNA, 15 bp, Homo sapiens
tgttcctttggctta

SEQ ID NO: 1897317 - DNA, 15 bp, Homo sapiens
gttcctttggcttag

SEQ ID NO: 1897318 - DNA, 15 bp, Homo sapiens
ttcctttggcttagg

SEQ ID NO: 1897319 - DNA, 15 bp, Homo sapiens
tcctttggcttagga

SEQ ID NO: 1897320 - DNA, 15 bp, Homo sapiens
cctttggcttaggat

SEQ ID NO: 1897321 - DNA, 15 bp, Homo sapiens
ctttggcttaggatt

SEQ ID NO: 1897322 - DNA, 15 bp, Homo sapiens
tttggcttaggattg

SEQ ID NO: 1897323 - DNA, 15 bp, Homo sapiens
ttggcttaggattga

SEQ ID NO: 1897324 - DNA, 15 bp, Homo sapiens
tggcttaggattgac

SEQ ID NO: 1897325 - DNA, 15 bp, Homo sapiens
ggcttaggattgact

SEQ ID NO: 1897326 - DNA, 15 bp, Homo sapiens
gcttaggattgactt

SEQ ID NO: 1897327 - DNA, 15 bp, Homo sapiens
cttaggattgacttg

SEQ ID NO: 1897328 - DNA, 15 bp, Homo sapiens
ttaggattgacttgg

SEQ ID NO: 1897329 - DNA, 15 bp, Homo sapiens
taggattgacttggc

SEQ ID NO: 1897330 - DNA, 15 bp, Homo sapiens
aggattgacttggca

SEQ ID NO: 1897331 - DNA, 15 bp, Homo sapiens
ggattgacttggcaa

SEQ ID NO: 1897332 - DNA, 15 bp, Homo sapiens
gattgacttggcaat

SEQ ID NO: 1897333 - DNA, 15 bp, Homo sapiens
attgacttggcaatg

SEQ ID NO: 1897334 - DNA, 15 bp, Homo sapiens
ttgacttggcaatga

SEQ ID NO: 1897335 - DNA, 15 bp, Homo sapiens
tgacttggcaatgag

SEQ ID NO: 1897336 - DNA, 15 bp, Homo sapiens
gacttggcaatgagg

SEQ ID NO: 1897337 - DNA, 15 bp, Homo sapiens
acttggcaatgaggg

SEQ ID NO: 1897338 - DNA, 15 bp, Homo sapiens
cttggcaatgagggc

SEQ ID NO: 1897339 - DNA, 15 bp, Homo sapiens
ttggcaatgagggct

SEQ ID NO: 1897340 - DNA, 15 bp, Homo sapiens
tggcaatgagggctc

SEQ ID NO: 1897341 - DNA, 15 bp, Homo sapiens
ggcaatgagggctct

SEQ ID NO: 1897342 - DNA, 15 bp, Homo sapiens
gcaatgagggctctt

SEQ ID NO: 1897343 - DNA, 15 bp, Homo sapiens
caatgagggctcttt

SEQ ID NO: 1897344 - DNA, 15 bp, Homo sapiens
aatgagggctctttt

SEQ ID NO: 1897345 - DNA, 15 bp, Homo sapiens
atgagggctcttttt

SEQ ID NO: 1897346 - DNA, 15 bp, Homo sapiens
tgagggctctttttt

SEQ ID NO: 1897347 - DNA, 15 bp, Homo sapiens
gagggctcttttttg

SEQ ID NO: 1897348 - DNA, 15 bp, Homo sapiens
agggctcttttttgg

SEQ ID NO: 1897349 - DNA, 15 bp, Homo sapiens
gggctcttttttggt

SEQ ID NO: 1897350 - DNA, 15 bp, Homo sapiens
ggctcttttttggtt

SEQ ID NO: 1897351 - DNA, 15 bp, Homo sapiens
gctcttttttggttt

SEQ ID NO: 1897352 - DNA, 15 bp, Homo sapiens
ctcttttttggtttc

SEQ ID NO: 1897353 - DNA, 15 bp, Homo sapiens
tcttttttggtttca

SEQ ID NO: 1897354 - DNA, 15 bp, Homo sapiens
cttttttggtttcat

SEQ ID NO: 1897355 - DNA, 15 bp, Homo sapiens
ttttttggtttcata

SEQ ID NO: 1897356 - DNA, 15 bp, Homo sapiens
tttttggtttcatat

SEQ ID NO: 1897357 - DNA, 15 bp, Homo sapiens
ttttggtttcatatg

SEQ ID NO: 1897358 - DNA, 15 bp, Homo sapiens
tttggtttcatatga

SEQ ID NO: 1897359 - DNA, 15 bp, Homo sapiens
ttggtttcatatgaa

SEQ ID NO: 1897360 - DNA, 15 bp, Homo sapiens
tggtttcatatgaac

SEQ ID NO: 1897361 - DNA, 15 bp, Homo sapiens
ggtttcatatgaact

SEQ ID NO: 1897362 - DNA, 15 bp, Homo sapiens
gtttcatatgaactt

SEQ ID NO: 1897363 - DNA, 15 bp, Homo sapiens
tttcatatgaacttt

SEQ ID NO: 1897364 - DNA, 15 bp, Homo sapiens
ttcatatgaacttta

SEQ ID NO: 1897365 - DNA, 15 bp, Homo sapiens
tcatatgaactttaa

SEQ ID NO: 1897366 - DNA, 15 bp, Homo sapiens
catatgaactttaaa

SEQ ID NO: 1897367 - DNA, 15 bp, Homo sapiens
atatgaactttaaag

SEQ ID NO: 1897368 - DNA, 15 bp, Homo sapiens
tatgaactttaaagt

SEQ ID NO: 1897369 - DNA, 15 bp, Homo sapiens
atgaactttaaagta

SEQ ID NO: 1897370 - DNA, 15 bp, Homo sapiens
tgaactttaaagtag

SEQ ID NO: 1897371 - DNA, 15 bp, Homo sapiens
gaactttaaagtagt

SEQ ID NO: 1897372 - DNA, 15 bp, Homo sapiens
aactttaaagtagtt

SEQ ID NO: 1897373 - DNA, 15 bp, Homo sapiens
actttaaagtagttt

SEQ ID NO: 1897374 - DNA, 15 bp, Homo sapiens
ctttaaagtagtttt

SEQ ID NO: 1897375 - DNA, 15 bp, Homo sapiens
tttaaagtagttttt

SEQ ID NO: 1897376 - DNA, 15 bp, Homo sapiens
ttaaagtagtttttt

SEQ ID NO: 1897377 - DNA, 15 bp, Homo sapiens
taaagtagttttttt

SEQ ID NO: 1897378 - DNA, 15 bp, Homo sapiens
aaagtagtttttttc

SEQ ID NO: 1897379 - DNA, 15 bp, Homo sapiens
aagtagtttttttcc

SEQ ID NO: 1897380 - DNA, 15 bp, Homo sapiens
agtagtttttttcca

SEQ ID NO: 1897381 - DNA, 15 bp, Homo sapiens
gtagtttttttccaa

SEQ ID NO: 1897382 - DNA, 15 bp, Homo sapiens
tagtttttttccaat

SEQ ID NO: 1897383 - DNA, 15 bp, Homo sapiens
agtttttttccaatt

SEQ ID NO: 1897384 - DNA, 15 bp, Homo sapiens
gtttttttccaattc

SEQ ID NO: 1897385 - DNA, 15 bp, Homo sapiens
tttttttccaattct

SEQ ID NO: 1897386 - DNA, 15 bp, Homo sapiens
ttttttccaattctg

SEQ ID NO: 1897387 - DNA, 15 bp, Homo sapiens
tttttccaattctgt

SEQ ID NO: 1897388 - DNA, 15 bp, Homo sapiens
ttttccaattctgtg

SEQ ID NO: 1897389 - DNA, 15 bp, Homo sapiens
tttccaattctgtga

SEQ ID NO: 1897390 - DNA, 15 bp, Homo sapiens
ttccaattctgtgaa

SEQ ID NO: 1897391 - DNA, 15 bp, Homo sapiens
tccaattctgtgaag

SEQ ID NO: 1897392 - DNA, 15 bp, Homo sapiens
ccaattctgtgaaga

SEQ ID NO: 1897393 - DNA, 15 bp, Homo sapiens
caattctgtgaagaa

SEQ ID NO: 1897394 - DNA, 15 bp, Homo sapiens
aattctgtgaagaaa

SEQ ID NO: 1897395 - DNA, 15 bp, Homo sapiens
attctgtgaagaaag

SEQ ID NO: 1897396 - DNA, 15 bp, Homo sapiens
ttctgtgaagaaagt

SEQ ID NO: 1897397 - DNA, 15 bp, Homo sapiens
tctgtgaagaaagtc

SEQ ID NO: 1897398 - DNA, 15 bp, Homo sapiens
ctgtgaagaaagtca

SEQ ID NO: 1897399 - DNA, 15 bp, Homo sapiens
tgtgaagaaagtcat

SEQ ID NO: 1897400 - DNA, 15 bp, Homo sapiens
gtgaagaaagtcatt

SEQ ID NO: 1897401 - DNA, 15 bp, Homo sapiens
tgaagaaagtcattg

SEQ ID NO: 1897402 - DNA, 15 bp, Homo sapiens
gaagaaagtcattgg

SEQ ID NO: 1897403 - DNA, 15 bp, Homo sapiens
aagaaagtcattggt

SEQ ID NO: 1897404 - DNA, 15 bp, Homo sapiens
agaaagtcattggta

SEQ ID NO: 1897405 - DNA, 15 bp, Homo sapiens
gaaagtcattggtag

SEQ ID NO: 1897406 - DNA, 15 bp, Homo sapiens
aaagtcattggtagc

SEQ ID NO: 1897407 - DNA, 15 bp, Homo sapiens
aagtcattggtagct

SEQ ID NO: 1897408 - DNA, 15 bp, Homo sapiens
agtcattggtagctt

SEQ ID NO: 1897409 - DNA, 15 bp, Homo sapiens
gtcattggtagcttg

SEQ ID NO: 1897410 - DNA, 15 bp, Homo sapiens
tcattggtagcttga

SEQ ID NO: 1897411 - DNA, 15 bp, Homo sapiens
cattggtagcttgat

SEQ ID NO: 1897412 - DNA, 15 bp, Homo sapiens
attggtagcttgatg

SEQ ID NO: 1897413 - DNA, 15 bp, Homo sapiens
ttggtagcttgatgg

SEQ ID NO: 1897414 - DNA, 15 bp, Homo sapiens
tggtagcttgatggg

SEQ ID NO: 1897415 - DNA, 15 bp, Homo sapiens
ggtagcttgatgggg

SEQ ID NO: 1897416 - DNA, 15 bp, Homo sapiens
gtagcttgatgggga

SEQ ID NO: 1897417 - DNA, 15 bp, Homo sapiens
tagcttgatggggat

SEQ ID NO: 1897418 - DNA, 15 bp, Homo sapiens
agcttgatggggatg

SEQ ID NO: 1897419 - DNA, 15 bp, Homo sapiens
gcttgatggggatgg

SEQ ID NO: 1897420 - DNA, 15 bp, Homo sapiens
cttgatggggatggc

SEQ ID NO: 1897421 - DNA, 15 bp, Homo sapiens
ttgatggggatggca

SEQ ID NO: 1897422 - DNA, 15 bp, Homo sapiens
tgatggggatggcat

SEQ ID NO: 1897423 - DNA, 15 bp, Homo sapiens
gatggggatggcatt

SEQ ID NO: 1897424 - DNA, 15 bp, Homo sapiens
atggggatggcattg

SEQ ID NO: 1897425 - DNA, 15 bp, Homo sapiens
tggggatggcattgg

SEQ ID NO: 1897426 - DNA, 15 bp, Homo sapiens
ggggatggcattggg

SEQ ID NO: 1897427 - DNA, 15 bp, Homo sapiens
gggatggcattgggc

SEQ ID NO: 1897428 - DNA, 15 bp, Homo sapiens
ggatggcattgggct

SEQ ID NO: 1897429 - DNA, 15 bp, Homo sapiens
gatggcattgggcta

SEQ ID NO: 1897430 - DNA, 15 bp, Homo sapiens
atggcattgggctaa

SEQ ID NO: 1897431 - DNA, 15 bp, Homo sapiens
tggcattgggctaat

SEQ ID NO: 1897432 - DNA, 15 bp, Homo sapiens
ggcattgggctaata

SEQ ID NO: 1897433 - DNA, 15 bp, Homo sapiens
gcattgggctaatat

SEQ ID NO: 1897434 - DNA, 15 bp, Homo sapiens
cattgggctaatatc

SEQ ID NO: 1897435 - DNA, 15 bp, Homo sapiens
attgggctaatatcc

SEQ ID NO: 1897436 - DNA, 15 bp, Homo sapiens
ttgggctaatatcca

SEQ ID NO: 1897437 - DNA, 15 bp, Homo sapiens
tgggctaatatccag

SEQ ID NO: 1897438 - DNA, 15 bp, Homo sapiens
gggctaatatccaga

SEQ ID NO: 1897439 - DNA, 15 bp, Homo sapiens
ggctaatatccagaa

SEQ ID NO: 1897440 - DNA, 15 bp, Homo sapiens
gctaatatccagaat

SEQ ID NO: 1897441 - DNA, 15 bp, Homo sapiens
atatccagaatctac

SEQ ID NO: 1897442 - DNA, 15 bp, Homo sapiens
aaacaaatttacaag

SEQ ID NO: 1897443 - DNA, 15 bp, Homo sapiens
aacaaatttacaaga

SEQ ID NO: 1897444 - DNA, 15 bp, Homo sapiens
acaaatttacaagaa

SEQ ID NO: 1897445 - DNA, 15 bp, Homo sapiens
caaatttacaagaaa

SEQ ID NO: 1897446 - DNA, 15 bp, Homo sapiens
aaatttacaagaaaa

SEQ ID NO: 1897447 - DNA, 15 bp, Homo sapiens
aatttacaagaaaaa

SEQ ID NO: 1897448 - DNA, 15 bp, Homo sapiens
atttacaagaaaaaa

SEQ ID NO: 1897449 - DNA, 15 bp, Homo sapiens
tttacaagaaaaaaa

SEQ ID NO: 1897450 - DNA, 15 bp, Homo sapiens
ttacaagaaaaaaac

SEQ ID NO: 1897451 - DNA, 15 bp, Homo sapiens
tacaagaaaaaaaca

SEQ ID NO: 1897452 - DNA, 15 bp, Homo sapiens
acaagaaaaaaacaa

SEQ ID NO: 1897453 - DNA, 15 bp, Homo sapiens
caagaaaaaaacaaa

SEQ ID NO: 1897454 - DNA, 15 bp, Homo sapiens
aagaaaaaaacaaac

SEQ ID NO: 1897455 - DNA, 15 bp, Homo sapiens
atcaaaaagtgggtg

SEQ ID NO: 1897456 - DNA, 15 bp, Homo sapiens
tcaaaaagtgggtga

SEQ ID NO: 1897457 - DNA, 15 bp, Homo sapiens
caaaaagtgggtgaa

SEQ ID NO: 1897458 - DNA, 15 bp, Homo sapiens
aaaaagtgggtgaag

SEQ ID NO: 1897459 - DNA, 15 bp, Homo sapiens
aaaagtgggtgaagg

SEQ ID NO: 1897460 - DNA, 15 bp, Homo sapiens
aaagtgggtgaagga

SEQ ID NO: 1897461 - DNA, 15 bp, Homo sapiens
gtgggtgaaggatac

SEQ ID NO: 1897462 - DNA, 15 bp, Homo sapiens
tgggtgaaggatacg

SEQ ID NO: 1897463 - DNA, 15 bp, Homo sapiens
gggtgaaggatacga

SEQ ID NO: 1897464 - DNA, 15 bp, Homo sapiens
ggtgaaggatacgaa

SEQ ID NO: 1897465 - DNA, 15 bp, Homo sapiens
gtgaaggatacgaac

SEQ ID NO: 1897466 - DNA, 15 bp, Homo sapiens
tgaaggatacgaaca

SEQ ID NO: 1897467 - DNA, 15 bp, Homo sapiens
gaaggatacgaacag

SEQ ID NO: 1897468 - DNA, 15 bp, Homo sapiens
aaggatacgaacaga

SEQ ID NO: 1897469 - DNA, 15 bp, Homo sapiens
aggatacgaacagac

SEQ ID NO: 1897470 - DNA, 15 bp, Homo sapiens
ggatacgaacagaca

SEQ ID NO: 1897471 - DNA, 15 bp, Homo sapiens
gatacgaacagacac

SEQ ID NO: 1897472 - DNA, 15 bp, Homo sapiens
atacgaacagacact

SEQ ID NO: 1897473 - DNA, 15 bp, Homo sapiens
tacgaacagacactt

SEQ ID NO: 1897474 - DNA, 15 bp, Homo sapiens
acgaacagacacttc

SEQ ID NO: 1897475 - DNA, 15 bp, Homo sapiens
cgaacagacacttct

SEQ ID NO: 1897476 - DNA, 15 bp, Homo sapiens
gaacagacacttctc

SEQ ID NO: 1897477 - DNA, 15 bp, Homo sapiens
gacacttctcaaaag

SEQ ID NO: 1897478 - DNA, 15 bp, Homo sapiens
acacttctcaaaaga

SEQ ID NO: 1897479 - DNA, 15 bp, Homo sapiens
cacttctcaaaagaa

SEQ ID NO: 1897480 - DNA, 15 bp, Homo sapiens
acttctcaaaagaag

SEQ ID NO: 1897481 - DNA, 15 bp, Homo sapiens
cttctcaaaagaaga

SEQ ID NO: 1897482 - DNA, 15 bp, Homo sapiens
ttctcaaaagaagac

SEQ ID NO: 1897483 - DNA, 15 bp, Homo sapiens
tctcaaaagaagaca

SEQ ID NO: 1897484 - DNA, 15 bp, Homo sapiens
aaagaagacatttat

SEQ ID NO: 1897485 - DNA, 15 bp, Homo sapiens
aagaagacatttatg

SEQ ID NO: 1897486 - DNA, 15 bp, Homo sapiens
agaagacatttatgc

SEQ ID NO: 1897487 - DNA, 15 bp, Homo sapiens
gaagacatttatgca

SEQ ID NO: 1897488 - DNA, 15 bp, Homo sapiens
aagacatttatgcag

SEQ ID NO: 1897489 - DNA, 15 bp, Homo sapiens
agacatttatgcagc

SEQ ID NO: 1897490 - DNA, 15 bp, Homo sapiens
gacatttatgcagcc

SEQ ID NO: 1897491 - DNA, 15 bp, Homo sapiens
acatttatgcagcca

SEQ ID NO: 1897492 - DNA, 15 bp, Homo sapiens
catttatgcagccaa

SEQ ID NO: 1897493 - DNA, 15 bp, Homo sapiens
atttatgcagccaac

SEQ ID NO: 1897494 - DNA, 15 bp, Homo sapiens
tttatgcagccaaca

SEQ ID NO: 1897495 - DNA, 15 bp, Homo sapiens
ttatgcagccaacag

SEQ ID NO: 1897496 - DNA, 15 bp, Homo sapiens
tatgcagccaacaga

SEQ ID NO: 1897497 - DNA, 15 bp, Homo sapiens
atgcagccaacagac

SEQ ID NO: 1897498 - DNA, 15 bp, Homo sapiens
tgcagccaacagaca

SEQ ID NO: 1897499 - DNA, 15 bp, Homo sapiens
gcagccaacagacac

SEQ ID NO: 1897500 - DNA, 15 bp, Homo sapiens
cagccaacagacaca

SEQ ID NO: 1897501 - DNA, 15 bp, Homo sapiens
agccaacagacacat

SEQ ID NO: 1897502 - DNA, 15 bp, Homo sapiens
gccaacagacacatg

SEQ ID NO: 1897503 - DNA, 15 bp, Homo sapiens
ccaacagacacatga

SEQ ID NO: 1897504 - DNA, 15 bp, Homo sapiens
caacagacacatgaa

SEQ ID NO: 1897505 - DNA, 15 bp, Homo sapiens
aacagacacatgaaa

SEQ ID NO: 1897506 - DNA, 15 bp, Homo sapiens
catcactggccatca

SEQ ID NO: 1897507 - DNA, 15 bp, Homo sapiens
caaaaccacaatgac

SEQ ID NO: 1897508 - DNA, 15 bp, Homo sapiens
aaaaccacaatgaca

SEQ ID NO: 1897509 - DNA, 15 bp, Homo sapiens
aaaccacaatgacat

SEQ ID NO: 1897510 - DNA, 15 bp, Homo sapiens
aaccacaatgacata

SEQ ID NO: 1897511 - DNA, 15 bp, Homo sapiens
accacaatgacatat

SEQ ID NO: 1897512 - DNA, 15 bp, Homo sapiens
ccacaatgacatatc

SEQ ID NO: 1897513 - DNA, 15 bp, Homo sapiens
cacaatgacatatca

SEQ ID NO: 1897514 - DNA, 15 bp, Homo sapiens
acaatgacatatcat

SEQ ID NO: 1897515 - DNA, 15 bp, Homo sapiens
caatgacatatcatc

SEQ ID NO: 1897516 - DNA, 15 bp, Homo sapiens
aatgacatatcatct

SEQ ID NO: 1897517 - DNA, 15 bp, Homo sapiens
atgacatatcatctc

SEQ ID NO: 1897518 - DNA, 15 bp, Homo sapiens
tgacatatcatctca

SEQ ID NO: 1897519 - DNA, 15 bp, Homo sapiens
gacatatcatctcac

SEQ ID NO: 1897520 - DNA, 15 bp, Homo sapiens
acatatcatctcaca

SEQ ID NO: 1897521 - DNA, 15 bp, Homo sapiens
catatcatctcacac

SEQ ID NO: 1897522 - DNA, 15 bp, Homo sapiens
atatcatctcacacc

SEQ ID NO: 1897523 - DNA, 15 bp, Homo sapiens
tatcatctcacacca

SEQ ID NO: 1897524 - DNA, 15 bp, Homo sapiens
atcatctcacaccag

SEQ ID NO: 1897525 - DNA, 15 bp, Homo sapiens
tcatctcacaccagt

SEQ ID NO: 1897526 - DNA, 15 bp, Homo sapiens
agaatggcaatcatc

SEQ ID NO: 1897527 - DNA, 15 bp, Homo sapiens
gaatggcaatcatca

SEQ ID NO: 1897528 - DNA, 15 bp, Homo sapiens
aatggcaatcatcaa

SEQ ID NO: 1897529 - DNA, 15 bp, Homo sapiens
atggcaatcatcaaa

SEQ ID NO: 1897530 - DNA, 15 bp, Homo sapiens
tggcaatcatcaaaa

SEQ ID NO: 1897531 - DNA, 15 bp, Homo sapiens
ggcaatcatcaaaaa

SEQ ID NO: 1897532 - DNA, 15 bp, Homo sapiens
gcaatcatcaaaaag

SEQ ID NO: 1897533 - DNA, 15 bp, Homo sapiens
caatcatcaaaaagt

SEQ ID NO: 1897534 - DNA, 15 bp, Homo sapiens
aatcatcaaaaagtc

SEQ ID NO: 1897535 - DNA, 15 bp, Homo sapiens
atcatcaaaaagtca

SEQ ID NO: 1897536 - DNA, 15 bp, Homo sapiens
tcatcaaaaagtcag

SEQ ID NO: 1897537 - DNA, 15 bp, Homo sapiens
catcaaaaagtcagg

SEQ ID NO: 1897538 - DNA, 15 bp, Homo sapiens
atcaaaaagtcagga

SEQ ID NO: 1897539 - DNA, 15 bp, Homo sapiens
tcaaaaagtcaggaa

SEQ ID NO: 1897540 - DNA, 15 bp, Homo sapiens
caaaaagtcaggaaa

SEQ ID NO: 1897541 - DNA, 15 bp, Homo sapiens
tggagaaataggaac

SEQ ID NO: 1897542 - DNA, 15 bp, Homo sapiens
ggagaaataggaaca

SEQ ID NO: 1897543 - DNA, 15 bp, Homo sapiens
gagaaataggaacac

SEQ ID NO: 1897544 - DNA, 15 bp, Homo sapiens
agaaataggaacact

SEQ ID NO: 1897545 - DNA, 15 bp, Homo sapiens
gaaataggaacactt

SEQ ID NO: 1897546 - DNA, 15 bp, Homo sapiens
aaataggaacacttt

SEQ ID NO: 1897547 - DNA, 15 bp, Homo sapiens
aataggaacactttt

SEQ ID NO: 1897548 - DNA, 15 bp, Homo sapiens
ataggaacactttta

SEQ ID NO: 1897549 - DNA, 15 bp, Homo sapiens
taggaacacttttac

SEQ ID NO: 1897550 - DNA, 15 bp, Homo sapiens
aggaacacttttaca

SEQ ID NO: 1897551 - DNA, 15 bp, Homo sapiens
ggaacacttttacac

SEQ ID NO: 1897552 - DNA, 15 bp, Homo sapiens
aacacttttacactg

SEQ ID NO: 1897553 - DNA, 15 bp, Homo sapiens
acacttttacactgt

SEQ ID NO: 1897554 - DNA, 15 bp, Homo sapiens
cacttttacactgtt

SEQ ID NO: 1897555 - DNA, 15 bp, Homo sapiens
acttttacactgttg

SEQ ID NO: 1897556 - DNA, 15 bp, Homo sapiens
ggaagacagtgtggt

SEQ ID NO: 1897557 - DNA, 15 bp, Homo sapiens
gaagacagtgtggtg

SEQ ID NO: 1897558 - DNA, 15 bp, Homo sapiens
aagacagtgtggtga

SEQ ID NO: 1897559 - DNA, 15 bp, Homo sapiens
agacagtgtggtgat

SEQ ID NO: 1897560 - DNA, 15 bp, Homo sapiens
gacagtgtggtgatt

SEQ ID NO: 1897561 - DNA, 15 bp, Homo sapiens
acagtgtggtgattc

SEQ ID NO: 1897562 - DNA, 15 bp, Homo sapiens
cagtgtggtgattcc

SEQ ID NO: 1897563 - DNA, 15 bp, Homo sapiens
agtgtggtgattcct

SEQ ID NO: 1897564 - DNA, 15 bp, Homo sapiens
gtgtggtgattcctc

SEQ ID NO: 1897565 - DNA, 15 bp, Homo sapiens
tgtggtgattcctca

SEQ ID NO: 1897566 - DNA, 15 bp, Homo sapiens
gtggtgattcctcag

SEQ ID NO: 1897567 - DNA, 15 bp, Homo sapiens
tggtgattcctcagg

SEQ ID NO: 1897568 - DNA, 15 bp, Homo sapiens
ggtgattcctcaggg

SEQ ID NO: 1897569 - DNA, 15 bp, Homo sapiens
gtgattcctcaggga

SEQ ID NO: 1897570 - DNA, 15 bp, Homo sapiens
tgattcctcagggat

SEQ ID NO: 1897571 - DNA, 15 bp, Homo sapiens
gattcctcagggatc

SEQ ID NO: 1897572 - DNA, 15 bp, Homo sapiens
attcctcagggatct

SEQ ID NO: 1897573 - DNA, 15 bp, Homo sapiens
ttcctcagggatcta

SEQ ID NO: 1897574 - DNA, 15 bp, Homo sapiens
tcctcagggatctag

SEQ ID NO: 1897575 - DNA, 15 bp, Homo sapiens
cctcagggatctaga

SEQ ID NO: 1897576 - DNA, 15 bp, Homo sapiens
ctcagggatctagaa

SEQ ID NO: 1897577 - DNA, 15 bp, Homo sapiens
tcagggatctagaat

SEQ ID NO: 1897578 - DNA, 15 bp, Homo sapiens
cagggatctagaatt

SEQ ID NO: 1897579 - DNA, 15 bp, Homo sapiens
agggatctagaatta

SEQ ID NO: 1897580 - DNA, 15 bp, Homo sapiens
gggatctagaattag

SEQ ID NO: 1897581 - DNA, 15 bp, Homo sapiens
ggatctagaattaga

SEQ ID NO: 1897582 - DNA, 15 bp, Homo sapiens
gatctagaattagaa

SEQ ID NO: 1897583 - DNA, 15 bp, Homo sapiens
atctagaattagaaa

SEQ ID NO: 1897584 - DNA, 15 bp, Homo sapiens
tctagaattagaaat

SEQ ID NO: 1897585 - DNA, 15 bp, Homo sapiens
ctagaattagaaata

SEQ ID NO: 1897586 - DNA, 15 bp, Homo sapiens
tagaattagaaatac

SEQ ID NO: 1897587 - DNA, 15 bp, Homo sapiens
agaattagaaatacc

SEQ ID NO: 1897588 - DNA, 15 bp, Homo sapiens
gaattagaaatacca

SEQ ID NO: 1897589 - DNA, 15 bp, Homo sapiens
aattagaaataccat

SEQ ID NO: 1897590 - DNA, 15 bp, Homo sapiens
attagaaataccatt

SEQ ID NO: 1897591 - DNA, 15 bp, Homo sapiens
ttagaaataccattt

SEQ ID NO: 1897592 - DNA, 15 bp, Homo sapiens
tttgacccagccata

SEQ ID NO: 1897593 - DNA, 15 bp, Homo sapiens
ttgacccagccatac

SEQ ID NO: 1897594 - DNA, 15 bp, Homo sapiens
tgacccagccatacc

SEQ ID NO: 1897595 - DNA, 15 bp, Homo sapiens
gacccagccatacca

SEQ ID NO: 1897596 - DNA, 15 bp, Homo sapiens
acccagccataccat

SEQ ID NO: 1897597 - DNA, 15 bp, Homo sapiens
cccagccataccatt

SEQ ID NO: 1897598 - DNA, 15 bp, Homo sapiens
ccagccataccatta

SEQ ID NO: 1897599 - DNA, 15 bp, Homo sapiens
cagccataccattac

SEQ ID NO: 1897600 - DNA, 15 bp, Homo sapiens
agccataccattacc

SEQ ID NO: 1897601 - DNA, 15 bp, Homo sapiens
gccataccattacca

SEQ ID NO: 1897602 - DNA, 15 bp, Homo sapiens
ccataccattaccat

SEQ ID NO: 1897603 - DNA, 15 bp, Homo sapiens
cataccattaccatt

SEQ ID NO: 1897604 - DNA, 15 bp, Homo sapiens
ataccattaccattt

SEQ ID NO: 1897605 - DNA, 15 bp, Homo sapiens
taccattaccatttt

SEQ ID NO: 1897606 - DNA, 15 bp, Homo sapiens
accattaccattttg

SEQ ID NO: 1897607 - DNA, 15 bp, Homo sapiens
ccattaccattttgg

SEQ ID NO: 1897608 - DNA, 15 bp, Homo sapiens
cattaccattttggg

SEQ ID NO: 1897609 - DNA, 15 bp, Homo sapiens
attaccattttgggt

SEQ ID NO: 1897610 - DNA, 15 bp, Homo sapiens
ttaccattttgggta

SEQ ID NO: 1897611 - DNA, 15 bp, Homo sapiens
taccattttgggtat

SEQ ID NO: 1897612 - DNA, 15 bp, Homo sapiens
accattttgggtata

SEQ ID NO: 1897613 - DNA, 15 bp, Homo sapiens
ccattttgggtatac

SEQ ID NO: 1897614 - DNA, 15 bp, Homo sapiens
cattttgggtatact

SEQ ID NO: 1897615 - DNA, 15 bp, Homo sapiens
attttgggtatactg

SEQ ID NO: 1897616 - DNA, 15 bp, Homo sapiens
ttttgggtatactgg

SEQ ID NO: 1897617 - DNA, 15 bp, Homo sapiens
tttgggtatactggg

SEQ ID NO: 1897618 - DNA, 15 bp, Homo sapiens
ttgggtatactgggt

SEQ ID NO: 1897619 - DNA, 15 bp, Homo sapiens
tgggtatactgggta

SEQ ID NO: 1897620 - DNA, 15 bp, Homo sapiens
gggtatactgggtat

SEQ ID NO: 1897621 - DNA, 15 bp, Homo sapiens
ggtatactgggtata

SEQ ID NO: 1897622 - DNA, 15 bp, Homo sapiens
gtatactgggtatat

SEQ ID NO: 1897623 - DNA, 15 bp, Homo sapiens
tatactgggtatata

SEQ ID NO: 1897624 - DNA, 15 bp, Homo sapiens
atactgggtatatac

SEQ ID NO: 1897625 - DNA, 15 bp, Homo sapiens
gggtatatacccaat

SEQ ID NO: 1897626 - DNA, 15 bp, Homo sapiens
ggtatatacccaatg

SEQ ID NO: 1897627 - DNA, 15 bp, Homo sapiens
gtatatacccaatgg

SEQ ID NO: 1897628 - DNA, 15 bp, Homo sapiens
tatatacccaatgga

SEQ ID NO: 1897629 - DNA, 15 bp, Homo sapiens
atatacccaatggaa

SEQ ID NO: 1897630 - DNA, 15 bp, Homo sapiens
tatacccaatggaat

SEQ ID NO: 1897631 - DNA, 15 bp, Homo sapiens
atacccaatggaata

SEQ ID NO: 1897632 - DNA, 15 bp, Homo sapiens
tacccaatggaatat

SEQ ID NO: 1897633 - DNA, 15 bp, Homo sapiens
acccaatggaatata

SEQ ID NO: 1897634 - DNA, 15 bp, Homo sapiens
cccaatggaatataa

SEQ ID NO: 1897635 - DNA, 15 bp, Homo sapiens
ccaatggaatataaa

SEQ ID NO: 1897636 - DNA, 15 bp, Homo sapiens
caatggaatataaat

SEQ ID NO: 1897637 - DNA, 15 bp, Homo sapiens
aatggaatataaatc

SEQ ID NO: 1897638 - DNA, 15 bp, Homo sapiens
atggaatataaatca

SEQ ID NO: 1897639 - DNA, 15 bp, Homo sapiens
tggaatataaatcat

SEQ ID NO: 1897640 - DNA, 15 bp, Homo sapiens
tcatgctgctataaa

SEQ ID NO: 1897641 - DNA, 15 bp, Homo sapiens
catgctgctataaag

SEQ ID NO: 1897642 - DNA, 15 bp, Homo sapiens
atgctgctataaaga

SEQ ID NO: 1897643 - DNA, 15 bp, Homo sapiens
tgctgctataaagac

SEQ ID NO: 1897644 - DNA, 15 bp, Homo sapiens
gctgctataaagaca

SEQ ID NO: 1897645 - DNA, 15 bp, Homo sapiens
ctataaagacacatg

SEQ ID NO: 1897646 - DNA, 15 bp, Homo sapiens
tataaagacacatgc

SEQ ID NO: 1897647 - DNA, 15 bp, Homo sapiens
ataaagacacatgca

SEQ ID NO: 1897648 - DNA, 15 bp, Homo sapiens
taaagacacatgcac

SEQ ID NO: 1897649 - DNA, 15 bp, Homo sapiens
aaagacacatgcaca

SEQ ID NO: 1897650 - DNA, 15 bp, Homo sapiens
aagacacatgcacac

SEQ ID NO: 1897651 - DNA, 15 bp, Homo sapiens
agacacatgcacacg

SEQ ID NO: 1897652 - DNA, 15 bp, Homo sapiens
gacacatgcacacgt

SEQ ID NO: 1897653 - DNA, 15 bp, Homo sapiens
cacatgcacacgtac

SEQ ID NO: 1897654 - DNA, 15 bp, Homo sapiens
acatgcacacgtaca

SEQ ID NO: 1897655 - DNA, 15 bp, Homo sapiens
catgcacacgtacat

SEQ ID NO: 1897656 - DNA, 15 bp, Homo sapiens
atgcacacgtacatt

SEQ ID NO: 1897657 - DNA, 15 bp, Homo sapiens
tgcacacgtacattt

SEQ ID NO: 1897658 - DNA, 15 bp, Homo sapiens
gcacacgtacattta

SEQ ID NO: 1897659 - DNA, 15 bp, Homo sapiens
cacacgtacatttat

SEQ ID NO: 1897660 - DNA, 15 bp, Homo sapiens
acacgtacatttatt

SEQ ID NO: 1897661 - DNA, 15 bp, Homo sapiens
cacgtacatttattg

SEQ ID NO: 1897662 - DNA, 15 bp, Homo sapiens
acgtacatttattgc

SEQ ID NO: 1897663 - DNA, 15 bp, Homo sapiens
cgtacatttattgcg

SEQ ID NO: 1897664 - DNA, 15 bp, Homo sapiens
gtacatttattgcgg

SEQ ID NO: 1897665 - DNA, 15 bp, Homo sapiens
tacatttattgcggc

SEQ ID NO: 1897666 - DNA, 15 bp, Homo sapiens
acatttattgcggca

SEQ ID NO: 1897667 - DNA, 15 bp, Homo sapiens
catttattgcggcac

SEQ ID NO: 1897668 - DNA, 15 bp, Homo sapiens
atttattgcggcact

SEQ ID NO: 1897669 - DNA, 15 bp, Homo sapiens
tttattgcggcacta

SEQ ID NO: 1897670 - DNA, 15 bp, Homo sapiens
ttattgcggcactac

SEQ ID NO: 1897671 - DNA, 15 bp, Homo sapiens
tattgcggcactact

SEQ ID NO: 1897672 - DNA, 15 bp, Homo sapiens
attgcggcactactc

SEQ ID NO: 1897673 - DNA, 15 bp, Homo sapiens
ttgcggcactactca

SEQ ID NO: 1897674 - DNA, 15 bp, Homo sapiens
tgcggcactactcac

SEQ ID NO: 1897675 - DNA, 15 bp, Homo sapiens
gcggcactactcaca

SEQ ID NO: 1897676 - DNA, 15 bp, Homo sapiens
cggcactactcacaa

SEQ ID NO: 1897677 - DNA, 15 bp, Homo sapiens
ggcactactcacaat

SEQ ID NO: 1897678 - DNA, 15 bp, Homo sapiens
gcactactcacaata

SEQ ID NO: 1897679 - DNA, 15 bp, Homo sapiens
gacttggaaccaacg

SEQ ID NO: 1897680 - DNA, 15 bp, Homo sapiens
acttggaaccaacga

SEQ ID NO: 1897681 - DNA, 15 bp, Homo sapiens
cttggaaccaacgaa

SEQ ID NO: 1897682 - DNA, 15 bp, Homo sapiens
ttggaaccaacgaaa

SEQ ID NO: 1897683 - DNA, 15 bp, Homo sapiens
tggaaccaacgaaaa

SEQ ID NO: 1897684 - DNA, 15 bp, Homo sapiens
ggaaccaacgaaaat

SEQ ID NO: 1897685 - DNA, 15 bp, Homo sapiens
gaaccaacgaaaatg

SEQ ID NO: 1897686 - DNA, 15 bp, Homo sapiens
aaccaacgaaaatgt

SEQ ID NO: 1897687 - DNA, 15 bp, Homo sapiens
accaacgaaaatgtc

SEQ ID NO: 1897688 - DNA, 15 bp, Homo sapiens
ccaacgaaaatgtcc

SEQ ID NO: 1897689 - DNA, 15 bp, Homo sapiens
caacgaaaatgtcca

SEQ ID NO: 1897690 - DNA, 15 bp, Homo sapiens
aacgaaaatgtccat

SEQ ID NO: 1897691 - DNA, 15 bp, Homo sapiens
acgaaaatgtccatc

SEQ ID NO: 1897692 - DNA, 15 bp, Homo sapiens
cgaaaatgtccatca

SEQ ID NO: 1897693 - DNA, 15 bp, Homo sapiens
gaaaatgtccatcaa

SEQ ID NO: 1897694 - DNA, 15 bp, Homo sapiens
aaaatgtccatcaat

SEQ ID NO: 1897695 - DNA, 15 bp, Homo sapiens
aaatgtccatcaatg

SEQ ID NO: 1897696 - DNA, 15 bp, Homo sapiens
aatgtccatcaatga

SEQ ID NO: 1897697 - DNA, 15 bp, Homo sapiens
atgtccatcaatgat

SEQ ID NO: 1897698 - DNA, 15 bp, Homo sapiens
tgtccatcaatgata

SEQ ID NO: 1897699 - DNA, 15 bp, Homo sapiens
gtccatcaatgatag

SEQ ID NO: 1897700 - DNA, 15 bp, Homo sapiens
tccatcaatgataga

SEQ ID NO: 1897701 - DNA, 15 bp, Homo sapiens
tgtcctttgtagggg

SEQ ID NO: 1897702 - DNA, 15 bp, Homo sapiens
gtcctttgtaggggc

SEQ ID NO: 1897703 - DNA, 15 bp, Homo sapiens
tcctttgtaggggca

SEQ ID NO: 1897704 - DNA, 15 bp, Homo sapiens
cctttgtaggggcat

SEQ ID NO: 1897705 - DNA, 15 bp, Homo sapiens
ctttgtaggggcatg

SEQ ID NO: 1897706 - DNA, 15 bp, Homo sapiens
tttgtaggggcatgg

SEQ ID NO: 1897707 - DNA, 15 bp, Homo sapiens
ttgtaggggcatgga

SEQ ID NO: 1897708 - DNA, 15 bp, Homo sapiens
tgtaggggcatggat

SEQ ID NO: 1897709 - DNA, 15 bp, Homo sapiens
gtaggggcatggatg

SEQ ID NO: 1897710 - DNA, 15 bp, Homo sapiens
taggggcatggatga

SEQ ID NO: 1897711 - DNA, 15 bp, Homo sapiens
aggggcatggatgaa

SEQ ID NO: 1897712 - DNA, 15 bp, Homo sapiens
ggggcatggatgaag

SEQ ID NO: 1897713 - DNA, 15 bp, Homo sapiens
gggcatggatgaagc

SEQ ID NO: 1897714 - DNA, 15 bp, Homo sapiens
ggcatggatgaagct

SEQ ID NO: 1897715 - DNA, 15 bp, Homo sapiens
gcatggatgaagctg

SEQ ID NO: 1897716 - DNA, 15 bp, Homo sapiens
ctcagcaaactatca

SEQ ID NO: 1897717 - DNA, 15 bp, Homo sapiens
tcagcaaactatcac

SEQ ID NO: 1897718 - DNA, 15 bp, Homo sapiens
cagcaaactatcaca

SEQ ID NO: 1897719 - DNA, 15 bp, Homo sapiens
agcaaactatcacaa

SEQ ID NO: 1897720 - DNA, 15 bp, Homo sapiens
gcaaactatcacaag

SEQ ID NO: 1897721 - DNA, 15 bp, Homo sapiens
caaactatcacaagg

SEQ ID NO: 1897722 - DNA, 15 bp, Homo sapiens
aaactatcacaagga

SEQ ID NO: 1897723 - DNA, 15 bp, Homo sapiens
aactatcacaaggac

SEQ ID NO: 1897724 - DNA, 15 bp, Homo sapiens
actatcacaaggaca

SEQ ID NO: 1897725 - DNA, 15 bp, Homo sapiens
ctatcacaaggacaa

SEQ ID NO: 1897726 - DNA, 15 bp, Homo sapiens
tatcacaaggacaaa

SEQ ID NO: 1897727 - DNA, 15 bp, Homo sapiens
atcacaaggacaaaa

SEQ ID NO: 1897728 - DNA, 15 bp, Homo sapiens
tcacaaggacaaaaa

SEQ ID NO: 1897729 - DNA, 15 bp, Homo sapiens
cacaaggacaaaaaa

SEQ ID NO: 1897730 - DNA, 15 bp, Homo sapiens
acaaggacaaaaaac

SEQ ID NO: 1897731 - DNA, 15 bp, Homo sapiens
ctcataggtgggaac

SEQ ID NO: 1897732 - DNA, 15 bp, Homo sapiens
tcataggtgggaact

SEQ ID NO: 1897733 - DNA, 15 bp, Homo sapiens
cataggtgggaactg

SEQ ID NO: 1897734 - DNA, 15 bp, Homo sapiens
ataggtgggaactga

SEQ ID NO: 1897735 - DNA, 15 bp, Homo sapiens
taggtgggaactgaa

SEQ ID NO: 1897736 - DNA, 15 bp, Homo sapiens
gaacatcacacacta

SEQ ID NO: 1897737 - DNA, 15 bp, Homo sapiens
aacatcacacactag

SEQ ID NO: 1897738 - DNA, 15 bp, Homo sapiens
acatcacacactagg

SEQ ID NO: 1897739 - DNA, 15 bp, Homo sapiens
catcacacactaggg

SEQ ID NO: 1897740 - DNA, 15 bp, Homo sapiens
atcacacactagggc

SEQ ID NO: 1897741 - DNA, 15 bp, Homo sapiens
tcacacactagggcc

SEQ ID NO: 1897742 - DNA, 15 bp, Homo sapiens
cacacactagggcct

SEQ ID NO: 1897743 - DNA, 15 bp, Homo sapiens
acacactagggcctg

SEQ ID NO: 1897744 - DNA, 15 bp, Homo sapiens
cacactagggcctgt

SEQ ID NO: 1897745 - DNA, 15 bp, Homo sapiens
acactagggcctgtt

SEQ ID NO: 1897746 - DNA, 15 bp, Homo sapiens
cactagggcctgttg

SEQ ID NO: 1897747 - DNA, 15 bp, Homo sapiens
actagggcctgttgt

SEQ ID NO: 1897748 - DNA, 15 bp, Homo sapiens
ctagggcctgttgtg

SEQ ID NO: 1897749 - DNA, 15 bp, Homo sapiens
tagggcctgttgtgg

SEQ ID NO: 1897750 - DNA, 15 bp, Homo sapiens
agggcctgttgtggg

SEQ ID NO: 1897751 - DNA, 15 bp, Homo sapiens
gggggagggatagcg

SEQ ID NO: 1897752 - DNA, 15 bp, Homo sapiens
ggggagggatagcgt

SEQ ID NO: 1897753 - DNA, 15 bp, Homo sapiens
gggagggatagcgtt

SEQ ID NO: 1897754 - DNA, 15 bp, Homo sapiens
ggagggatagcgtta

SEQ ID NO: 1897755 - DNA, 15 bp, Homo sapiens
gagggatagcgttag

SEQ ID NO: 1897756 - DNA, 15 bp, Homo sapiens
agggatagcgttagg

SEQ ID NO: 1897757 - DNA, 15 bp, Homo sapiens
gggatagcgttagga

SEQ ID NO: 1897758 - DNA, 15 bp, Homo sapiens
ggatagcgttaggag

SEQ ID NO: 1897759 - DNA, 15 bp, Homo sapiens
gatagcgttaggaga

SEQ ID NO: 1897760 - DNA, 15 bp, Homo sapiens
atagcgttaggagat

SEQ ID NO: 1897761 - DNA, 15 bp, Homo sapiens
tagcgttaggagata

SEQ ID NO: 1897762 - DNA, 15 bp, Homo sapiens
agcgttaggagatat

SEQ ID NO: 1897763 - DNA, 15 bp, Homo sapiens
gcgttaggagatata

SEQ ID NO: 1897764 - DNA, 15 bp, Homo sapiens
cgttaggagatatac

SEQ ID NO: 1897765 - DNA, 15 bp, Homo sapiens
gttaggagatatacc

SEQ ID NO: 1897766 - DNA, 15 bp, Homo sapiens
gtaacaaacctgcat

SEQ ID NO: 1897767 - DNA, 15 bp, Homo sapiens
taacaaacctgcatt

SEQ ID NO: 1897768 - DNA, 15 bp, Homo sapiens
aacaaacctgcattt

SEQ ID NO: 1897769 - DNA, 15 bp, Homo sapiens
acaaacctgcatttt

SEQ ID NO: 1897770 - DNA, 15 bp, Homo sapiens
caaacctgcattttg

SEQ ID NO: 1897771 - DNA, 15 bp, Homo sapiens
aaacctgcattttgt

SEQ ID NO: 1897772 - DNA, 15 bp, Homo sapiens
aacctgcattttgtg

SEQ ID NO: 1897773 - DNA, 15 bp, Homo sapiens
acctgcattttgtgc

SEQ ID NO: 1897774 - DNA, 15 bp, Homo sapiens
cctgcattttgtgca

SEQ ID NO: 1897775 - DNA, 15 bp, Homo sapiens
ctgcattttgtgcac

SEQ ID NO: 1897776 - DNA, 15 bp, Homo sapiens
tgcattttgtgcaca

SEQ ID NO: 1897777 - DNA, 15 bp, Homo sapiens
gcattttgtgcacat

SEQ ID NO: 1897778 - DNA, 15 bp, Homo sapiens
cattttgtgcacatg

SEQ ID NO: 1897779 - DNA, 15 bp, Homo sapiens
attttgtgcacatgt

SEQ ID NO: 1897780 - DNA, 15 bp, Homo sapiens
ttttgtgcacatgta

SEQ ID NO: 1897781 - DNA, 15 bp, Homo sapiens
tttgtgcacatgtac

SEQ ID NO: 1897782 - DNA, 15 bp, Homo sapiens
ccctagaacttaaaa

SEQ ID NO: 1897783 - DNA, 15 bp, Homo sapiens
cctagaacttaaaaa

SEQ ID NO: 1897784 - DNA, 15 bp, Homo sapiens
ctagaacttaaaaag

SEQ ID NO: 1897785 - DNA, 15 bp, Homo sapiens
tagaacttaaaaagt

SEQ ID NO: 1897786 - DNA, 15 bp, Homo sapiens
agaacttaaaaagta

SEQ ID NO: 1897787 - DNA, 15 bp, Homo sapiens
gaacttaaaaagtat

SEQ ID NO: 1897788 - DNA, 15 bp, Homo sapiens
aacttaaaaagtata

SEQ ID NO: 1897789 - DNA, 15 bp, Homo sapiens
acttaaaaagtataa

SEQ ID NO: 1897790 - DNA, 15 bp, Homo sapiens
cttaaaaagtataat

SEQ ID NO: 1897791 - DNA, 15 bp, Homo sapiens
ttaaaaagtataata

SEQ ID NO: 1897792 - DNA, 15 bp, Homo sapiens
taaaaagtataataa

SEQ ID NO: 1897793 - DNA, 15 bp, Homo sapiens
aaaaagtataataaa

SEQ ID NO: 1897794 - DNA, 15 bp, Homo sapiens
aaaagtataataaat

SEQ ID NO: 1897795 - DNA, 15 bp, Homo sapiens
aaagtataataaata

SEQ ID NO: 1897796 - DNA, 15 bp, Homo sapiens
aagtataataaatat

SEQ ID NO: 1897797 - DNA, 15 bp, Homo sapiens
agtataataaatata

SEQ ID NO: 1897798 - DNA, 15 bp, Homo sapiens
gtataataaatatat

SEQ ID NO: 1897799 - DNA, 15 bp, Homo sapiens
tataataaatatata

SEQ ID NO: 1897800 - DNA, 15 bp, Homo sapiens
ataataaatatatat

SEQ ID NO: 1897801 - DNA, 15 bp, Homo sapiens
taataaatatatata

SEQ ID NO: 1897802 - DNA, 15 bp, Homo sapiens
aataaatatatatat

SEQ ID NO: 1897803 - DNA, 15 bp, Homo sapiens
aaatatatatatatt

SEQ ID NO: 1897804 - DNA, 15 bp, Homo sapiens
aatatatatatattt

SEQ ID NO: 1897805 - DNA, 15 bp, Homo sapiens
tatatatttaaaaat

SEQ ID NO: 1897806 - DNA, 15 bp, Homo sapiens
atatatttaaaaata

SEQ ID NO: 1897807 - DNA, 15 bp, Homo sapiens
tatatttaaaaataa

SEQ ID NO: 1897808 - DNA, 15 bp, Homo sapiens
atatttaaaaataaa

SEQ ID NO: 1897809 - DNA, 15 bp, Homo sapiens
tatttaaaaataaag

SEQ ID NO: 1897810 - DNA, 15 bp, Homo sapiens
atttaaaaataaaga

SEQ ID NO: 1897811 - DNA, 15 bp, Homo sapiens
tttaaaaataaagaa

SEQ ID NO: 1897812 - DNA, 15 bp, Homo sapiens
ttaaaaataaagaaa

SEQ ID NO: 1897813 - DNA, 15 bp, Homo sapiens
taaaaataaagaaat

SEQ ID NO: 1897814 - DNA, 15 bp, Homo sapiens
aaaaataaagaaata

SEQ ID NO: 1897815 - DNA, 15 bp, Homo sapiens
aaaataaagaaatac

SEQ ID NO: 1897816 - DNA, 15 bp, Homo sapiens
aaataaagaaataca

SEQ ID NO: 1897817 - DNA, 15 bp, Homo sapiens
aataaagaaatacat

SEQ ID NO: 1897818 - DNA, 15 bp, Homo sapiens
ataaagaaatacata

SEQ ID NO: 1897819 - DNA, 15 bp, Homo sapiens
taaagaaatacataa

SEQ ID NO: 1897820 - DNA, 15 bp, Homo sapiens
aaagaaatacataaa

SEQ ID NO: 1897821 - DNA, 15 bp, Homo sapiens
aagaaatacataaaa

SEQ ID NO: 1897822 - DNA, 15 bp, Homo sapiens
agaaatacataaaaa

SEQ ID NO: 1897823 - DNA, 15 bp, Homo sapiens
gaaatacataaaaat

SEQ ID NO: 1897824 - DNA, 15 bp, Homo sapiens
tacataaaaataaat

SEQ ID NO: 1897825 - DNA, 15 bp, Homo sapiens
acataaaaataaata

SEQ ID NO: 1897826 - DNA, 15 bp, Homo sapiens
cataaaaataaataa

SEQ ID NO: 1897827 - DNA, 15 bp, Homo sapiens
ataaataaataaagc

SEQ ID NO: 1897828 - DNA, 15 bp, Homo sapiens
taaataaataaagct

SEQ ID NO: 1897829 - DNA, 15 bp, Homo sapiens
aaataaataaagcta

SEQ ID NO: 1897830 - DNA, 15 bp, Homo sapiens
aataaataaagctaa

SEQ ID NO: 1897831 - DNA, 15 bp, Homo sapiens
ataaataaagctaat

SEQ ID NO: 1897832 - DNA, 15 bp, Homo sapiens
taaataaagctaatg

SEQ ID NO: 1897833 - DNA, 15 bp, Homo sapiens
aaataaagctaatga

SEQ ID NO: 1897834 - DNA, 15 bp, Homo sapiens
aataaagctaatgag

SEQ ID NO: 1897835 - DNA, 15 bp, Homo sapiens
ataaagctaatgaga

SEQ ID NO: 1897836 - DNA, 15 bp, Homo sapiens
taaagctaatgagag

SEQ ID NO: 1897837 - DNA, 15 bp, Homo sapiens
aaagctaatgagaga

SEQ ID NO: 1897838 - DNA, 15 bp, Homo sapiens
aagctaatgagagaa

SEQ ID NO: 1897839 - DNA, 15 bp, Homo sapiens
agctaatgagagaat

SEQ ID NO: 1897840 - DNA, 15 bp, Homo sapiens
gctaatgagagaatt

SEQ ID NO: 1897841 - DNA, 15 bp, Homo sapiens
ctaatgagagaattt

SEQ ID NO: 1897842 - DNA, 15 bp, Homo sapiens
taatgagagaatttg

SEQ ID NO: 1897843 - DNA, 15 bp, Homo sapiens
aatgagagaatttgc

SEQ ID NO: 1897844 - DNA, 15 bp, Homo sapiens
atgagagaatttgcc

SEQ ID NO: 1897845 - DNA, 15 bp, Homo sapiens
tgagagaatttgcct

SEQ ID NO: 1897846 - DNA, 15 bp, Homo sapiens
gagagaatttgcctg

SEQ ID NO: 1897847 - DNA, 15 bp, Homo sapiens
agagaatttgcctgg

SEQ ID NO: 1897848 - DNA, 15 bp, Homo sapiens
gagaatttgcctggt

SEQ ID NO: 1897849 - DNA, 15 bp, Homo sapiens
agaatttgcctggtt

SEQ ID NO: 1897850 - DNA, 15 bp, Homo sapiens
gaatttgcctggttg

SEQ ID NO: 1897851 - DNA, 15 bp, Homo sapiens
aatttgcctggttga

SEQ ID NO: 1897852 - DNA, 15 bp, Homo sapiens
atttgcctggttgag

SEQ ID NO: 1897853 - DNA, 15 bp, Homo sapiens
tttgcctggttgagt

SEQ ID NO: 1897854 - DNA, 15 bp, Homo sapiens
ttgcctggttgagtg

SEQ ID NO: 1897855 - DNA, 15 bp, Homo sapiens
tgcctggttgagtgt

SEQ ID NO: 1897856 - DNA, 15 bp, Homo sapiens
gcctggttgagtgtg

SEQ ID NO: 1897857 - DNA, 15 bp, Homo sapiens
cctggttgagtgtga

SEQ ID NO: 1897858 - DNA, 15 bp, Homo sapiens
ctggttgagtgtgaa

SEQ ID NO: 1897859 - DNA, 15 bp, Homo sapiens
tggttgagtgtgaaa

SEQ ID NO: 1897860 - DNA, 15 bp, Homo sapiens
ggttgagtgtgaaac

SEQ ID NO: 1897861 - DNA, 15 bp, Homo sapiens
gttgagtgtgaaact

SEQ ID NO: 1897862 - DNA, 15 bp, Homo sapiens
ttgagtgtgaaactg

SEQ ID NO: 1897863 - DNA, 15 bp, Homo sapiens
tgagtgtgaaactga

SEQ ID NO: 1897864 - DNA, 15 bp, Homo sapiens
gagtgtgaaactgag

SEQ ID NO: 1897865 - DNA, 15 bp, Homo sapiens
agtgtgaaactgagc

SEQ ID NO: 1897866 - DNA, 15 bp, Homo sapiens
gtgtgaaactgagcc

SEQ ID NO: 1897867 - DNA, 15 bp, Homo sapiens
tgtgaaactgagccc

SEQ ID NO: 1897868 - DNA, 15 bp, Homo sapiens
gtgaaactgagcccc

SEQ ID NO: 1897869 - DNA, 15 bp, Homo sapiens
tgaaactgagcccca

SEQ ID NO: 1897870 - DNA, 15 bp, Homo sapiens
gaaactgagccccac

SEQ ID NO: 1897871 - DNA, 15 bp, Homo sapiens
aaactgagccccact

SEQ ID NO: 1897872 - DNA, 15 bp, Homo sapiens
actgagccccactga

SEQ ID NO: 1897873 - DNA, 15 bp, Homo sapiens
ctgagccccactgag

SEQ ID NO: 1897874 - DNA, 15 bp, Homo sapiens
tgagccccactgagc

SEQ ID NO: 1897875 - DNA, 15 bp, Homo sapiens
gagccccactgagct

SEQ ID NO: 1897876 - DNA, 15 bp, Homo sapiens
agccccactgagctg

SEQ ID NO: 1897877 - DNA, 15 bp, Homo sapiens
gccccactgagctgt

SEQ ID NO: 1897878 - DNA, 15 bp, Homo sapiens
ccccactgagctgta

SEQ ID NO: 1897879 - DNA, 15 bp, Homo sapiens
cccactgagctgtat

SEQ ID NO: 1897880 - DNA, 15 bp, Homo sapiens
ccactgagctgtatt

SEQ ID NO: 1897881 - DNA, 15 bp, Homo sapiens
cactgagctgtatta

SEQ ID NO: 1897882 - DNA, 15 bp, Homo sapiens
actgagctgtattac

SEQ ID NO: 1897883 - DNA, 15 bp, Homo sapiens
ctgagctgtattaca

SEQ ID NO: 1897884 - DNA, 15 bp, Homo sapiens
tgagctgtattacaa

SEQ ID NO: 1897885 - DNA, 15 bp, Homo sapiens
gagctgtattacaag

SEQ ID NO: 1897886 - DNA, 15 bp, Homo sapiens
agctgtattacaaga

SEQ ID NO: 1897887 - DNA, 15 bp, Homo sapiens
gctgtattacaagag

SEQ ID NO: 1897888 - DNA, 15 bp, Homo sapiens
ctgtattacaagagc

SEQ ID NO: 1897889 - DNA, 15 bp, Homo sapiens
tgtattacaagagcc

SEQ ID NO: 1897890 - DNA, 15 bp, Homo sapiens
gtattacaagagcca

SEQ ID NO: 1897891 - DNA, 15 bp, Homo sapiens
tattacaagagccaa

SEQ ID NO: 1897892 - DNA, 15 bp, Homo sapiens
attacaagagccaaa

SEQ ID NO: 1897893 - DNA, 15 bp, Homo sapiens
ttacaagagccaaag

SEQ ID NO: 1897894 - DNA, 15 bp, Homo sapiens
tacaagagccaaagg

SEQ ID NO: 1897895 - DNA, 15 bp, Homo sapiens
acaagagccaaaggt

SEQ ID NO: 1897896 - DNA, 15 bp, Homo sapiens
caagagccaaaggtc

SEQ ID NO: 1897897 - DNA, 15 bp, Homo sapiens
aagagccaaaggtcc

SEQ ID NO: 1897898 - DNA, 15 bp, Homo sapiens
agagccaaaggtcct

SEQ ID NO: 1897899 - DNA, 15 bp, Homo sapiens
gagccaaaggtcctc

SEQ ID NO: 1897900 - DNA, 15 bp, Homo sapiens
agccaaaggtcctcc

SEQ ID NO: 1897901 - DNA, 15 bp, Homo sapiens
gccaaaggtcctccc

SEQ ID NO: 1897902 - DNA, 15 bp, Homo sapiens
ccaaaggtcctcccc

SEQ ID NO: 1897903 - DNA, 15 bp, Homo sapiens
caaaggtcctcccct

SEQ ID NO: 1897904 - DNA, 15 bp, Homo sapiens
aaaggtcctccccta

SEQ ID NO: 1897905 - DNA, 15 bp, Homo sapiens
aaggtcctcccctac

SEQ ID NO: 1897906 - DNA, 15 bp, Homo sapiens
aggtcctcccctaca

SEQ ID NO: 1897907 - DNA, 15 bp, Homo sapiens
ggtcctcccctacag

SEQ ID NO: 1897908 - DNA, 15 bp, Homo sapiens
gtcctcccctacagg

SEQ ID NO: 1897909 - DNA, 15 bp, Homo sapiens
tcctcccctacagga

SEQ ID NO: 1897910 - DNA, 15 bp, Homo sapiens
cctcccctacaggat

SEQ ID NO: 1897911 - DNA, 15 bp, Homo sapiens
ctcccctacaggatt

SEQ ID NO: 1897912 - DNA, 15 bp, Homo sapiens
tcccctacaggattt

SEQ ID NO: 1897913 - DNA, 15 bp, Homo sapiens
cccctacaggatttt

SEQ ID NO: 1897914 - DNA, 15 bp, Homo sapiens
ccctacaggatttta

SEQ ID NO: 1897915 - DNA, 15 bp, Homo sapiens
cctacaggattttac

SEQ ID NO: 1897916 - DNA, 15 bp, Homo sapiens
ctacaggattttact

SEQ ID NO: 1897917 - DNA, 15 bp, Homo sapiens
tacaggattttactg

SEQ ID NO: 1897918 - DNA, 15 bp, Homo sapiens
acaggattttactgt

SEQ ID NO: 1897919 - DNA, 15 bp, Homo sapiens
caggattttactgtg

SEQ ID NO: 1897920 - DNA, 15 bp, Homo sapiens
aggattttactgtga

SEQ ID NO: 1897921 - DNA, 15 bp, Homo sapiens
ggattttactgtgac

SEQ ID NO: 1897922 - DNA, 15 bp, Homo sapiens
gattttactgtgact

SEQ ID NO: 1897923 - DNA, 15 bp, Homo sapiens
attttactgtgactg

SEQ ID NO: 1897924 - DNA, 15 bp, Homo sapiens
ttttactgtgactgc

SEQ ID NO: 1897925 - DNA, 15 bp, Homo sapiens
tttactgtgactgcc

SEQ ID NO: 1897926 - DNA, 15 bp, Homo sapiens
ttactgtgactgcct

SEQ ID NO: 1897927 - DNA, 15 bp, Homo sapiens
tactgtgactgccta

SEQ ID NO: 1897928 - DNA, 15 bp, Homo sapiens
actgtgactgcctat

SEQ ID NO: 1897929 - DNA, 15 bp, Homo sapiens
ctgtgactgcctatc

SEQ ID NO: 1897930 - DNA, 15 bp, Homo sapiens
tgtgactgcctatca

SEQ ID NO: 1897931 - DNA, 15 bp, Homo sapiens
gtgactgcctatcaa

SEQ ID NO: 1897932 - DNA, 15 bp, Homo sapiens
tgactgcctatcaaa

SEQ ID NO: 1897933 - DNA, 15 bp, Homo sapiens
gactgcctatcaaaa

SEQ ID NO: 1897934 - DNA, 15 bp, Homo sapiens
actgcctatcaaaac

SEQ ID NO: 1897935 - DNA, 15 bp, Homo sapiens
ctgcctatcaaaact

SEQ ID NO: 1897936 - DNA, 15 bp, Homo sapiens
tgcctatcaaaactc

SEQ ID NO: 1897937 - DNA, 15 bp, Homo sapiens
gcctatcaaaactca

SEQ ID NO: 1897938 - DNA, 15 bp, Homo sapiens
cctatcaaaactcac

SEQ ID NO: 1897939 - DNA, 15 bp, Homo sapiens
ctatcaaaactcact

SEQ ID NO: 1897940 - DNA, 15 bp, Homo sapiens
tatcaaaactcactt

SEQ ID NO: 1897941 - DNA, 15 bp, Homo sapiens
atcaaaactcactta

SEQ ID NO: 1897942 - DNA, 15 bp, Homo sapiens
tcaaaactcacttaa

SEQ ID NO: 1897943 - DNA, 15 bp, Homo sapiens
caaaactcacttaat

SEQ ID NO: 1897944 - DNA, 15 bp, Homo sapiens
aaaactcacttaatt

SEQ ID NO: 1897945 - DNA, 15 bp, Homo sapiens
aaactcacttaatta

SEQ ID NO: 1897946 - DNA, 15 bp, Homo sapiens
aactcacttaattaa

SEQ ID NO: 1897947 - DNA, 15 bp, Homo sapiens
actcacttaattaat

SEQ ID NO: 1897948 - DNA, 15 bp, Homo sapiens
ctcacttaattaatg

SEQ ID NO: 1897949 - DNA, 15 bp, Homo sapiens
tcacttaattaatgc

SEQ ID NO: 1897950 - DNA, 15 bp, Homo sapiens
cacttaattaatgcc

SEQ ID NO: 1897951 - DNA, 15 bp, Homo sapiens
acttaattaatgcca

SEQ ID NO: 1897952 - DNA, 15 bp, Homo sapiens
cttaattaatgccac

SEQ ID NO: 1897953 - DNA, 15 bp, Homo sapiens
ttaattaatgccact

SEQ ID NO: 1897954 - DNA, 15 bp, Homo sapiens
taattaatgccactt

SEQ ID NO: 1897955 - DNA, 15 bp, Homo sapiens
aattaatgccactta

SEQ ID NO: 1897956 - DNA, 15 bp, Homo sapiens
attaatgccacttac

SEQ ID NO: 1897957 - DNA, 15 bp, Homo sapiens
ttaatgccacttaca

SEQ ID NO: 1897958 - DNA, 15 bp, Homo sapiens
taatgccacttacat

SEQ ID NO: 1897959 - DNA, 15 bp, Homo sapiens
aatgccacttacatt

SEQ ID NO: 1897960 - DNA, 15 bp, Homo sapiens
atgccacttacattc

SEQ ID NO: 1897961 - DNA, 15 bp, Homo sapiens
tgccacttacattct

SEQ ID NO: 1897962 - DNA, 15 bp, Homo sapiens
gccacttacattcta

SEQ ID NO: 1897963 - DNA, 15 bp, Homo sapiens
ccacttacattctat

SEQ ID NO: 1897964 - DNA, 15 bp, Homo sapiens
cacttacattctatg

SEQ ID NO: 1897965 - DNA, 15 bp, Homo sapiens
acttacattctatgt

SEQ ID NO: 1897966 - DNA, 15 bp, Homo sapiens
cttacattctatgta

SEQ ID NO: 1897967 - DNA, 15 bp, Homo sapiens
ttacattctatgtag

SEQ ID NO: 1897968 - DNA, 15 bp, Homo sapiens
tacattctatgtaga

SEQ ID NO: 1897969 - DNA, 15 bp, Homo sapiens
acattctatgtagac

SEQ ID NO: 1897970 - DNA, 15 bp, Homo sapiens
cattctatgtagact

SEQ ID NO: 1897971 - DNA, 15 bp, Homo sapiens
attctatgtagactt

SEQ ID NO: 1897972 - DNA, 15 bp, Homo sapiens
ttctatgtagacttt

SEQ ID NO: 1897973 - DNA, 15 bp, Homo sapiens
tctatgtagactttt

SEQ ID NO: 1897974 - DNA, 15 bp, Homo sapiens
ctatgtagacttttc

SEQ ID NO: 1897975 - DNA, 15 bp, Homo sapiens
tatgtagacttttca

SEQ ID NO: 1897976 - DNA, 15 bp, Homo sapiens
atgtagacttttcaa

SEQ ID NO: 1897977 - DNA, 15 bp, Homo sapiens
tgtagacttttcaag

SEQ ID NO: 1897978 - DNA, 15 bp, Homo sapiens
gtagacttttcaagc

SEQ ID NO: 1897979 - DNA, 15 bp, Homo sapiens
tagacttttcaagca

SEQ ID NO: 1897980 - DNA, 15 bp, Homo sapiens
agacttttcaagcaa

SEQ ID NO: 1897981 - DNA, 15 bp, Homo sapiens
gacttttcaagcaaa

SEQ ID NO: 1897982 - DNA, 15 bp, Homo sapiens
acttttcaagcaaaa

SEQ ID NO: 1897983 - DNA, 15 bp, Homo sapiens
cttttcaagcaaaaa

SEQ ID NO: 1897984 - DNA, 15 bp, Homo sapiens
ttttcaagcaaaaat

SEQ ID NO: 1897985 - DNA, 15 bp, Homo sapiens
tttcaagcaaaaata

SEQ ID NO: 1897986 - DNA, 15 bp, Homo sapiens
ttcaagcaaaaataa

SEQ ID NO: 1897987 - DNA, 15 bp, Homo sapiens
tcaagcaaaaataaa

SEQ ID NO: 1897988 - DNA, 15 bp, Homo sapiens
caagcaaaaataaat

SEQ ID NO: 1897989 - DNA, 15 bp, Homo sapiens
aagcaaaaataaatt

SEQ ID NO: 1897990 - DNA, 15 bp, Homo sapiens
agcaaaaataaattt

SEQ ID NO: 1897991 - DNA, 15 bp, Homo sapiens
gcaaaaataaatttc

SEQ ID NO: 1897992 - DNA, 15 bp, Homo sapiens
caaaaataaatttca

SEQ ID NO: 1897993 - DNA, 15 bp, Homo sapiens
aaaaataaatttcat

SEQ ID NO: 1897994 - DNA, 15 bp, Homo sapiens
aaaataaatttcatc

SEQ ID NO: 1897995 - DNA, 15 bp, Homo sapiens
aaataaatttcatct

SEQ ID NO: 1897996 - DNA, 15 bp, Homo sapiens
aataaatttcatcta

SEQ ID NO: 1897997 - DNA, 15 bp, Homo sapiens
ataaatttcatctaa

SEQ ID NO: 1897998 - DNA, 15 bp, Homo sapiens
taaatttcatctaat

SEQ ID NO: 1897999 - DNA, 15 bp, Homo sapiens
aaatttcatctaatg

SEQ ID NO: 1898000 - DNA, 15 bp, Homo sapiens
aatttcatctaatga

SEQ ID NO: 1898001 - DNA, 15 bp, Homo sapiens
atttcatctaatgat

SEQ ID NO: 1898002 - DNA, 15 bp, Homo sapiens
tttcatctaatgatt

SEQ ID NO: 1898003 - DNA, 15 bp, Homo sapiens
ttcatctaatgattt

SEQ ID NO: 1898004 - DNA, 15 bp, Homo sapiens
tcatctaatgatttt

SEQ ID NO: 1898005 - DNA, 15 bp, Homo sapiens
catctaatgattttt

SEQ ID NO: 1898006 - DNA, 15 bp, Homo sapiens
atctaatgatttttt

SEQ ID NO: 1898007 - DNA, 15 bp, Homo sapiens
tctaatgatttttta

SEQ ID NO: 1898008 - DNA, 15 bp, Homo sapiens
ctaatgattttttaa

SEQ ID NO: 1898009 - DNA, 15 bp, Homo sapiens
taatgattttttaaa

SEQ ID NO: 1898010 - DNA, 15 bp, Homo sapiens
aatgattttttaaag

SEQ ID NO: 1898011 - DNA, 15 bp, Homo sapiens
atgattttttaaagc

SEQ ID NO: 1898012 - DNA, 15 bp, Homo sapiens
tgattttttaaagct

SEQ ID NO: 1898013 - DNA, 15 bp, Homo sapiens
gattttttaaagctc

SEQ ID NO: 1898014 - DNA, 15 bp, Homo sapiens
attttttaaagctcc

SEQ ID NO: 1898015 - DNA, 15 bp, Homo sapiens
ttttttaaagctcca

SEQ ID NO: 1898016 - DNA, 15 bp, Homo sapiens
tttttaaagctccaa

SEQ ID NO: 1898017 - DNA, 15 bp, Homo sapiens
ttttaaagctccaat

SEQ ID NO: 1898018 - DNA, 15 bp, Homo sapiens
tttaaagctccaata

SEQ ID NO: 1898019 - DNA, 15 bp, Homo sapiens
ttaaagctccaatag

SEQ ID NO: 1898020 - DNA, 15 bp, Homo sapiens
taaagctccaatagc

SEQ ID NO: 1898021 - DNA, 15 bp, Homo sapiens
aaagctccaatagcc

SEQ ID NO: 1898022 - DNA, 15 bp, Homo sapiens
aagctccaatagcct

SEQ ID NO: 1898023 - DNA, 15 bp, Homo sapiens
agctccaatagcctt

SEQ ID NO: 1898024 - DNA, 15 bp, Homo sapiens
gctccaatagccttc

SEQ ID NO: 1898025 - DNA, 15 bp, Homo sapiens
ctccaatagccttca

SEQ ID NO: 1898026 - DNA, 15 bp, Homo sapiens
tccaatagccttcac

SEQ ID NO: 1898027 - DNA, 15 bp, Homo sapiens
ccaatagccttcaca

SEQ ID NO: 1898028 - DNA, 15 bp, Homo sapiens
caatagccttcacat

SEQ ID NO: 1898029 - DNA, 15 bp, Homo sapiens
aatagccttcacatc

SEQ ID NO: 1898030 - DNA, 15 bp, Homo sapiens
atagccttcacatct

SEQ ID NO: 1898031 - DNA, 15 bp, Homo sapiens
tagccttcacatcta

SEQ ID NO: 1898032 - DNA, 15 bp, Homo sapiens
agccttcacatctac

SEQ ID NO: 1898033 - DNA, 15 bp, Homo sapiens
gccttcacatctaca

SEQ ID NO: 1898034 - DNA, 15 bp, Homo sapiens
ccttcacatctacac

SEQ ID NO: 1898035 - DNA, 15 bp, Homo sapiens
cttcacatctacaca

SEQ ID NO: 1898036 - DNA, 15 bp, Homo sapiens
ttcacatctacacaa

SEQ ID NO: 1898037 - DNA, 15 bp, Homo sapiens
tcacatctacacaaa

SEQ ID NO: 1898038 - DNA, 15 bp, Homo sapiens
cacatctacacaaat

SEQ ID NO: 1898039 - DNA, 15 bp, Homo sapiens
acatctacacaaata

SEQ ID NO: 1898040 - DNA, 15 bp, Homo sapiens
catctacacaaatat

SEQ ID NO: 1898041 - DNA, 15 bp, Homo sapiens
atctacacaaatatc

SEQ ID NO: 1898042 - DNA, 15 bp, Homo sapiens
tctacacaaatatca

SEQ ID NO: 1898043 - DNA, 15 bp, Homo sapiens
ctacacaaatatcag

SEQ ID NO: 1898044 - DNA, 15 bp, Homo sapiens
tacacaaatatcagt

SEQ ID NO: 1898045 - DNA, 15 bp, Homo sapiens
acacaaatatcagtg

SEQ ID NO: 1898046 - DNA, 15 bp, Homo sapiens
cacaaatatcagtgc

SEQ ID NO: 1898047 - DNA, 15 bp, Homo sapiens
acaaatatcagtgct

SEQ ID NO: 1898048 - DNA, 15 bp, Homo sapiens
caaatatcagtgcta

SEQ ID NO: 1898049 - DNA, 15 bp, Homo sapiens
aaatatcagtgctaa

SEQ ID NO: 1898050 - DNA, 15 bp, Homo sapiens
aatatcagtgctaaa

SEQ ID NO: 1898051 - DNA, 15 bp, Homo sapiens
atatcagtgctaaaa

SEQ ID NO: 1898052 - DNA, 15 bp, Homo sapiens
tatcagtgctaaaaa

SEQ ID NO: 1898053 - DNA, 15 bp, Homo sapiens
atcagtgctaaaaaa

SEQ ID NO: 1898054 - DNA, 15 bp, Homo sapiens
tcagtgctaaaaaac

SEQ ID NO: 1898055 - DNA, 15 bp, Homo sapiens
cagtgctaaaaaaca

SEQ ID NO: 1898056 - DNA, 15 bp, Homo sapiens
agtgctaaaaaacag

SEQ ID NO: 1898057 - DNA, 15 bp, Homo sapiens
gtgctaaaaaacagt

SEQ ID NO: 1898058 - DNA, 15 bp, Homo sapiens
tgctaaaaaacagtt

SEQ ID NO: 1898059 - DNA, 15 bp, Homo sapiens
gctaaaaaacagtta

SEQ ID NO: 1898060 - DNA, 15 bp, Homo sapiens
ctaaaaaacagttaa

SEQ ID NO: 1898061 - DNA, 15 bp, Homo sapiens
taaaaaacagttaat

SEQ ID NO: 1898062 - DNA, 15 bp, Homo sapiens
aaaaaacagttaatc

SEQ ID NO: 1898063 - DNA, 15 bp, Homo sapiens
aaaaacagttaatca

SEQ ID NO: 1898064 - DNA, 15 bp, Homo sapiens
aaaacagttaatcaa

SEQ ID NO: 1898065 - DNA, 15 bp, Homo sapiens
aaacagttaatcaag

SEQ ID NO: 1898066 - DNA, 15 bp, Homo sapiens
aacagttaatcaagg

SEQ ID NO: 1898067 - DNA, 15 bp, Homo sapiens
acagttaatcaaggg

SEQ ID NO: 1898068 - DNA, 15 bp, Homo sapiens
cagttaatcaaggga

SEQ ID NO: 1898069 - DNA, 15 bp, Homo sapiens
agttaatcaagggat

SEQ ID NO: 1898070 - DNA, 15 bp, Homo sapiens
gttaatcaagggata

SEQ ID NO: 1898071 - DNA, 15 bp, Homo sapiens
ttaatcaagggatat

SEQ ID NO: 1898072 - DNA, 15 bp, Homo sapiens
taatcaagggatatg

SEQ ID NO: 1898073 - DNA, 15 bp, Homo sapiens
aatcaagggatatga

SEQ ID NO: 1898074 - DNA, 15 bp, Homo sapiens
atcaagggatatgaa

SEQ ID NO: 1898075 - DNA, 15 bp, Homo sapiens
tcaagggatatgaac

SEQ ID NO: 1898076 - DNA, 15 bp, Homo sapiens
caagggatatgaacc

SEQ ID NO: 1898077 - DNA, 15 bp, Homo sapiens
aagggatatgaaccg

SEQ ID NO: 1898078 - DNA, 15 bp, Homo sapiens
agggatatgaaccga

SEQ ID NO: 1898079 - DNA, 15 bp, Homo sapiens
gggatatgaaccgag

SEQ ID NO: 1898080 - DNA, 15 bp, Homo sapiens
ggatatgaaccgagt

SEQ ID NO: 1898081 - DNA, 15 bp, Homo sapiens
gatatgaaccgagtc

SEQ ID NO: 1898082 - DNA, 15 bp, Homo sapiens
atatgaaccgagtct

SEQ ID NO: 1898083 - DNA, 15 bp, Homo sapiens
tatgaaccgagtctg

SEQ ID NO: 1898084 - DNA, 15 bp, Homo sapiens
atgaaccgagtctga

SEQ ID NO: 1898085 - DNA, 15 bp, Homo sapiens
tgaaccgagtctgag

SEQ ID NO: 1898086 - DNA, 15 bp, Homo sapiens
gaaccgagtctgaga

SEQ ID NO: 1898087 - DNA, 15 bp, Homo sapiens
aaccgagtctgagac

SEQ ID NO: 1898088 - DNA, 15 bp, Homo sapiens
accgagtctgagacc

SEQ ID NO: 1898089 - DNA, 15 bp, Homo sapiens
ccgagtctgagacca

SEQ ID NO: 1898090 - DNA, 15 bp, Homo sapiens
cgagtctgagaccat

SEQ ID NO: 1898091 - DNA, 15 bp, Homo sapiens
gagtctgagaccatc

SEQ ID NO: 1898092 - DNA, 15 bp, Homo sapiens
agtctgagaccatca

SEQ ID NO: 1898093 - DNA, 15 bp, Homo sapiens
gtctgagaccatcac

SEQ ID NO: 1898094 - DNA, 15 bp, Homo sapiens
tctgagaccatcact

SEQ ID NO: 1898095 - DNA, 15 bp, Homo sapiens
ctgagaccatcactg

SEQ ID NO: 1898096 - DNA, 15 bp, Homo sapiens
tgagaccatcactgt

SEQ ID NO: 1898097 - DNA, 15 bp, Homo sapiens
gagaccatcactgtc

SEQ ID NO: 1898098 - DNA, 15 bp, Homo sapiens
agaccatcactgtca

SEQ ID NO: 1898099 - DNA, 15 bp, Homo sapiens
gaccatcactgtcaa

SEQ ID NO: 1898100 - DNA, 15 bp, Homo sapiens
accatcactgtcaaa

SEQ ID NO: 1898101 - DNA, 15 bp, Homo sapiens
ccatcactgtcaaat

SEQ ID NO: 1898102 - DNA, 15 bp, Homo sapiens
catcactgtcaaatc

SEQ ID NO: 1898103 - DNA, 15 bp, Homo sapiens
atcactgtcaaatct

SEQ ID NO: 1898104 - DNA, 15 bp, Homo sapiens
tcactgtcaaatctt

SEQ ID NO: 1898105 - DNA, 15 bp, Homo sapiens
cactgtcaaatcttt

SEQ ID NO: 1898106 - DNA, 15 bp, Homo sapiens
actgtcaaatctttg

SEQ ID NO: 1898107 - DNA, 15 bp, Homo sapiens
ctgtcaaatctttgt

SEQ ID NO: 1898108 - DNA, 15 bp, Homo sapiens
tgtcaaatctttgtt

SEQ ID NO: 1898109 - DNA, 15 bp, Homo sapiens
gtcaaatctttgttc

SEQ ID NO: 1898110 - DNA, 15 bp, Homo sapiens
tcaaatctttgttca

SEQ ID NO: 1898111 - DNA, 15 bp, Homo sapiens
caaatctttgttcat

SEQ ID NO: 1898112 - DNA, 15 bp, Homo sapiens
aaatctttgttcatg

SEQ ID NO: 1898113 - DNA, 15 bp, Homo sapiens
aatctttgttcatgg

SEQ ID NO: 1898114 - DNA, 15 bp, Homo sapiens
atctttgttcatgga

SEQ ID NO: 1898115 - DNA, 15 bp, Homo sapiens
tctttgttcatggaa

SEQ ID NO: 1898116 - DNA, 15 bp, Homo sapiens
ctttgttcatggaag

SEQ ID NO: 1898117 - DNA, 15 bp, Homo sapiens
tttgttcatggaagc

SEQ ID NO: 1898118 - DNA, 15 bp, Homo sapiens
ttgttcatggaagca

SEQ ID NO: 1898119 - DNA, 15 bp, Homo sapiens
tgttcatggaagcag

SEQ ID NO: 1898120 - DNA, 15 bp, Homo sapiens
gttcatggaagcagg

SEQ ID NO: 1898121 - DNA, 15 bp, Homo sapiens
ttcatggaagcaggt

SEQ ID NO: 1898122 - DNA, 15 bp, Homo sapiens
tcatggaagcaggtg

SEQ ID NO: 1898123 - DNA, 15 bp, Homo sapiens
catggaagcaggtgg

SEQ ID NO: 1898124 - DNA, 15 bp, Homo sapiens
atggaagcaggtgga

SEQ ID NO: 1898125 - DNA, 15 bp, Homo sapiens
tggaagcaggtggag

SEQ ID NO: 1898126 - DNA, 15 bp, Homo sapiens
ggaagcaggtggagt

SEQ ID NO: 1898127 - DNA, 15 bp, Homo sapiens
gaagcaggtggagtt

SEQ ID NO: 1898128 - DNA, 15 bp, Homo sapiens
aagcaggtggagtta

SEQ ID NO: 1898129 - DNA, 15 bp, Homo sapiens
agcaggtggagttag

SEQ ID NO: 1898130 - DNA, 15 bp, Homo sapiens
gcaggtggagttagg

SEQ ID NO: 1898131 - DNA, 15 bp, Homo sapiens
caggtggagttaggg

SEQ ID NO: 1898132 - DNA, 15 bp, Homo sapiens
aggtggagttagggc

SEQ ID NO: 1898133 - DNA, 15 bp, Homo sapiens
ggtggagttagggca

SEQ ID NO: 1898134 - DNA, 15 bp, Homo sapiens
gtggagttagggcag

SEQ ID NO: 1898135 - DNA, 15 bp, Homo sapiens
tggagttagggcaga

SEQ ID NO: 1898136 - DNA, 15 bp, Homo sapiens
ggagttagggcagat

SEQ ID NO: 1898137 - DNA, 15 bp, Homo sapiens
gagttagggcagata

SEQ ID NO: 1898138 - DNA, 15 bp, Homo sapiens
agttagggcagatac

SEQ ID NO: 1898139 - DNA, 15 bp, Homo sapiens
gttagggcagatacg

SEQ ID NO: 1898140 - DNA, 15 bp, Homo sapiens
ttagggcagatacgc

SEQ ID NO: 1898141 - DNA, 15 bp, Homo sapiens
tagggcagatacgcc

SEQ ID NO: 1898142 - DNA, 15 bp, Homo sapiens
agggcagatacgcca

SEQ ID NO: 1898143 - DNA, 15 bp, Homo sapiens
gggcagatacgccag

SEQ ID NO: 1898144 - DNA, 15 bp, Homo sapiens
ggcagatacgccaga

SEQ ID NO: 1898145 - DNA, 15 bp, Homo sapiens
gcagatacgccagac

SEQ ID NO: 1898146 - DNA, 15 bp, Homo sapiens
cagatacgccagaca

SEQ ID NO: 1898147 - DNA, 15 bp, Homo sapiens
agatacgccagacat

SEQ ID NO: 1898148 - DNA, 15 bp, Homo sapiens
gatacgccagacatt

SEQ ID NO: 1898149 - DNA, 15 bp, Homo sapiens
atacgccagacattc

SEQ ID NO: 1898150 - DNA, 15 bp, Homo sapiens
tacgccagacattct

SEQ ID NO: 1898151 - DNA, 15 bp, Homo sapiens
acgccagacattctt

SEQ ID NO: 1898152 - DNA, 15 bp, Homo sapiens
cgccagacattcttc

SEQ ID NO: 1898153 - DNA, 15 bp, Homo sapiens
gccagacattcttcc

SEQ ID NO: 1898154 - DNA, 15 bp, Homo sapiens
ccagacattcttcct

SEQ ID NO: 1898155 - DNA, 15 bp, Homo sapiens
cagacattcttcctt

SEQ ID NO: 1898156 - DNA, 15 bp, Homo sapiens
agacattcttcctta

SEQ ID NO: 1898157 - DNA, 15 bp, Homo sapiens
gacattcttccttac

SEQ ID NO: 1898158 - DNA, 15 bp, Homo sapiens
acattcttccttact

SEQ ID NO: 1898159 - DNA, 15 bp, Homo sapiens
cattcttccttacta

SEQ ID NO: 1898160 - DNA, 15 bp, Homo sapiens
attcttccttactaa

SEQ ID NO: 1898161 - DNA, 15 bp, Homo sapiens
ttcttccttactaaa

SEQ ID NO: 1898162 - DNA, 15 bp, Homo sapiens
tcttccttactaaaa

SEQ ID NO: 1898163 - DNA, 15 bp, Homo sapiens
cttccttactaaaag

SEQ ID NO: 1898164 - DNA, 15 bp, Homo sapiens
ttccttactaaaagc

SEQ ID NO: 1898165 - DNA, 15 bp, Homo sapiens
tccttactaaaagca

SEQ ID NO: 1898166 - DNA, 15 bp, Homo sapiens
ccttactaaaagcat

SEQ ID NO: 1898167 - DNA, 15 bp, Homo sapiens
cttactaaaagcatc

SEQ ID NO: 1898168 - DNA, 15 bp, Homo sapiens
ttactaaaagcatct

SEQ ID NO: 1898169 - DNA, 15 bp, Homo sapiens
tactaaaagcatcta

SEQ ID NO: 1898170 - DNA, 15 bp, Homo sapiens
actaaaagcatctag

SEQ ID NO: 1898171 - DNA, 15 bp, Homo sapiens
ctaaaagcatctagt

SEQ ID NO: 1898172 - DNA, 15 bp, Homo sapiens
taaaagcatctagtc

SEQ ID NO: 1898173 - DNA, 15 bp, Homo sapiens
aaaagcatctagtcc

SEQ ID NO: 1898174 - DNA, 15 bp, Homo sapiens
aaagcatctagtccc

SEQ ID NO: 1898175 - DNA, 15 bp, Homo sapiens
aagcatctagtccca

SEQ ID NO: 1898176 - DNA, 15 bp, Homo sapiens
agcatctagtcccac

SEQ ID NO: 1898177 - DNA, 15 bp, Homo sapiens
gcatctagtcccact

SEQ ID NO: 1898178 - DNA, 15 bp, Homo sapiens
catctagtcccactg

SEQ ID NO: 1898179 - DNA, 15 bp, Homo sapiens
atctagtcccactgc

SEQ ID NO: 1898180 - DNA, 15 bp, Homo sapiens
tctagtcccactgcc

SEQ ID NO: 1898181 - DNA, 15 bp, Homo sapiens
ctagtcccactgcct

SEQ ID NO: 1898182 - DNA, 15 bp, Homo sapiens
tagtcccactgcctg

SEQ ID NO: 1898183 - DNA, 15 bp, Homo sapiens
agtcccactgcctga

SEQ ID NO: 1898184 - DNA, 15 bp, Homo sapiens
gtcccactgcctgat

SEQ ID NO: 1898185 - DNA, 15 bp, Homo sapiens
tcccactgcctgata

SEQ ID NO: 1898186 - DNA, 15 bp, Homo sapiens
cccactgcctgatac

SEQ ID NO: 1898187 - DNA, 15 bp, Homo sapiens
ccactgcctgataca

SEQ ID NO: 1898188 - DNA, 15 bp, Homo sapiens
cactgcctgatacaa

SEQ ID NO: 1898189 - DNA, 15 bp, Homo sapiens
actgcctgatacaaa

SEQ ID NO: 1898190 - DNA, 15 bp, Homo sapiens
ctgcctgatacaaag

SEQ ID NO: 1898191 - DNA, 15 bp, Homo sapiens
tgcctgatacaaagt

SEQ ID NO: 1898192 - DNA, 15 bp, Homo sapiens
gcctgatacaaagtg

SEQ ID NO: 1898193 - DNA, 15 bp, Homo sapiens
cctgatacaaagtga

SEQ ID NO: 1898194 - DNA, 15 bp, Homo sapiens
ctgatacaaagtgag

SEQ ID NO: 1898195 - DNA, 15 bp, Homo sapiens
tgatacaaagtgagt

SEQ ID NO: 1898196 - DNA, 15 bp, Homo sapiens
gatacaaagtgagtt

SEQ ID NO: 1898197 - DNA, 15 bp, Homo sapiens
atacaaagtgagttc

SEQ ID NO: 1898198 - DNA, 15 bp, Homo sapiens
tacaaagtgagttct

SEQ ID NO: 1898199 - DNA, 15 bp, Homo sapiens
acaaagtgagttctt

SEQ ID NO: 1898200 - DNA, 15 bp, Homo sapiens
caaagtgagttctta

SEQ ID NO: 1898201 - DNA, 15 bp, Homo sapiens
aaagtgagttcttaa

SEQ ID NO: 1898202 - DNA, 15 bp, Homo sapiens
aagtgagttcttaac

SEQ ID NO: 1898203 - DNA, 15 bp, Homo sapiens
agtgagttcttaaca

SEQ ID NO: 1898204 - DNA, 15 bp, Homo sapiens
gtgagttcttaacaa

SEQ ID NO: 1898205 - DNA, 15 bp, Homo sapiens
tgagttcttaacaac

SEQ ID NO: 1898206 - DNA, 15 bp, Homo sapiens
gagttcttaacaact

SEQ ID NO: 1898207 - DNA, 15 bp, Homo sapiens
agttcttaacaactt

SEQ ID NO: 1898208 - DNA, 15 bp, Homo sapiens
gttcttaacaacttt

SEQ ID NO: 1898209 - DNA, 15 bp, Homo sapiens
ttcttaacaactttt

SEQ ID NO: 1898210 - DNA, 15 bp, Homo sapiens
tcttaacaacttttc

SEQ ID NO: 1898211 - DNA, 15 bp, Homo sapiens
cttaacaacttttcc

SEQ ID NO: 1898212 - DNA, 15 bp, Homo sapiens
ttaacaacttttcct

SEQ ID NO: 1898213 - DNA, 15 bp, Homo sapiens
taacaacttttcctt

SEQ ID NO: 1898214 - DNA, 15 bp, Homo sapiens
caacttttcctttac

SEQ ID NO: 1898215 - DNA, 15 bp, Homo sapiens
aacttttcctttact

SEQ ID NO: 1898216 - DNA, 15 bp, Homo sapiens
acttttcctttactt

SEQ ID NO: 1898217 - DNA, 15 bp, Homo sapiens
cttttcctttacttc

SEQ ID NO: 1898218 - DNA, 15 bp, Homo sapiens
ttttcctttacttct

SEQ ID NO: 1898219 - DNA, 15 bp, Homo sapiens
tttcctttacttctg

SEQ ID NO: 1898220 - DNA, 15 bp, Homo sapiens
ttcctttacttctgc

SEQ ID NO: 1898221 - DNA, 15 bp, Homo sapiens
tcctttacttctgct

SEQ ID NO: 1898222 - DNA, 15 bp, Homo sapiens
cctttacttctgctt

SEQ ID NO: 1898223 - DNA, 15 bp, Homo sapiens
ctttacttctgctta

SEQ ID NO: 1898224 - DNA, 15 bp, Homo sapiens
tttacttctgcttaa

SEQ ID NO: 1898225 - DNA, 15 bp, Homo sapiens
ttacttctgcttaag

SEQ ID NO: 1898226 - DNA, 15 bp, Homo sapiens
tacttctgcttaagt

SEQ ID NO: 1898227 - DNA, 15 bp, Homo sapiens
acttctgcttaagta

SEQ ID NO: 1898228 - DNA, 15 bp, Homo sapiens
cttctgcttaagtag

SEQ ID NO: 1898229 - DNA, 15 bp, Homo sapiens
ttctgcttaagtagc

SEQ ID NO: 1898230 - DNA, 15 bp, Homo sapiens
tctgcttaagtagct

SEQ ID NO: 1898231 - DNA, 15 bp, Homo sapiens
ctgcttaagtagctt

SEQ ID NO: 1898232 - DNA, 15 bp, Homo sapiens
tgcttaagtagcttt

SEQ ID NO: 1898233 - DNA, 15 bp, Homo sapiens
gcttaagtagcttta

SEQ ID NO: 1898234 - DNA, 15 bp, Homo sapiens
cttaagtagctttat

SEQ ID NO: 1898235 - DNA, 15 bp, Homo sapiens
ttaagtagctttatc

SEQ ID NO: 1898236 - DNA, 15 bp, Homo sapiens
taagtagctttatcc

SEQ ID NO: 1898237 - DNA, 15 bp, Homo sapiens
aagtagctttatcct

SEQ ID NO: 1898238 - DNA, 15 bp, Homo sapiens
agtagctttatccta

SEQ ID NO: 1898239 - DNA, 15 bp, Homo sapiens
gtagctttatcctac

SEQ ID NO: 1898240 - DNA, 15 bp, Homo sapiens
tagctttatcctacc

SEQ ID NO: 1898241 - DNA, 15 bp, Homo sapiens
agctttatcctacct

SEQ ID NO: 1898242 - DNA, 15 bp, Homo sapiens
gctttatcctacctg

SEQ ID NO: 1898243 - DNA, 15 bp, Homo sapiens
ctttatcctacctgc

SEQ ID NO: 1898244 - DNA, 15 bp, Homo sapiens
tttatcctacctgct

SEQ ID NO: 1898245 - DNA, 15 bp, Homo sapiens
ttatcctacctgctt

SEQ ID NO: 1898246 - DNA, 15 bp, Homo sapiens
tatcctacctgcttc

SEQ ID NO: 1898247 - DNA, 15 bp, Homo sapiens
atcctacctgcttcc

SEQ ID NO: 1898248 - DNA, 15 bp, Homo sapiens
tcctacctgcttcct

SEQ ID NO: 1898249 - DNA, 15 bp, Homo sapiens
cctacctgcttcctg

SEQ ID NO: 1898250 - DNA, 15 bp, Homo sapiens
ctacctgcttcctgc

SEQ ID NO: 1898251 - DNA, 15 bp, Homo sapiens
tacctgcttcctgca

SEQ ID NO: 1898252 - DNA, 15 bp, Homo sapiens
acctgcttcctgcaa

SEQ ID NO: 1898253 - DNA, 15 bp, Homo sapiens
cctgcttcctgcaac

SEQ ID NO: 1898254 - DNA, 15 bp, Homo sapiens
ctgcttcctgcaact

SEQ ID NO: 1898255 - DNA, 15 bp, Homo sapiens
tgcttcctgcaactt

SEQ ID NO: 1898256 - DNA, 15 bp, Homo sapiens
gcttcctgcaacttt

SEQ ID NO: 1898257 - DNA, 15 bp, Homo sapiens
cttcctgcaacttta

SEQ ID NO: 1898258 - DNA, 15 bp, Homo sapiens
ttcctgcaactttat

SEQ ID NO: 1898259 - DNA, 15 bp, Homo sapiens
tcctgcaactttatc

SEQ ID NO: 1898260 - DNA, 15 bp, Homo sapiens
cctgcaactttatca

SEQ ID NO: 1898261 - DNA, 15 bp, Homo sapiens
ctgcaactttatcat

SEQ ID NO: 1898262 - DNA, 15 bp, Homo sapiens
tgcaactttatcatc

SEQ ID NO: 1898263 - DNA, 15 bp, Homo sapiens
gcaactttatcatca

SEQ ID NO: 1898264 - DNA, 15 bp, Homo sapiens
caactttatcatcat

SEQ ID NO: 1898265 - DNA, 15 bp, Homo sapiens
aactttatcatcatg

SEQ ID NO: 1898266 - DNA, 15 bp, Homo sapiens
actttatcatcatgt

SEQ ID NO: 1898267 - DNA, 15 bp, Homo sapiens
ctttatcatcatgta

SEQ ID NO: 1898268 - DNA, 15 bp, Homo sapiens
tttatcatcatgtat

SEQ ID NO: 1898269 - DNA, 15 bp, Homo sapiens
ttatcatcatgtata

SEQ ID NO: 1898270 - DNA, 15 bp, Homo sapiens
tatcatcatgtatat

SEQ ID NO: 1898271 - DNA, 15 bp, Homo sapiens
atcatcatgtatata

SEQ ID NO: 1898272 - DNA, 15 bp, Homo sapiens
tcatcatgtatatag

SEQ ID NO: 1898273 - DNA, 15 bp, Homo sapiens
catcatgtatatagt

SEQ ID NO: 1898274 - DNA, 15 bp, Homo sapiens
atcatgtatatagta

SEQ ID NO: 1898275 - DNA, 15 bp, Homo sapiens
tcatgtatatagtaa

SEQ ID NO: 1898276 - DNA, 15 bp, Homo sapiens
catgtatatagtaat

SEQ ID NO: 1898277 - DNA, 15 bp, Homo sapiens
atgtatatagtaatg

SEQ ID NO: 1898278 - DNA, 15 bp, Homo sapiens
tgtatatagtaatgg

SEQ ID NO: 1898279 - DNA, 15 bp, Homo sapiens
gtatatagtaatggg

SEQ ID NO: 1898280 - DNA, 15 bp, Homo sapiens
tatatagtaatgggc

SEQ ID NO: 1898281 - DNA, 15 bp, Homo sapiens
atatagtaatgggct

SEQ ID NO: 1898282 - DNA, 15 bp, Homo sapiens
tatagtaatgggctt

SEQ ID NO: 1898283 - DNA, 15 bp, Homo sapiens
atagtaatgggcttg

SEQ ID NO: 1898284 - DNA, 15 bp, Homo sapiens
tagtaatgggcttgt

SEQ ID NO: 1898285 - DNA, 15 bp, Homo sapiens
agtaatgggcttgtt

SEQ ID NO: 1898286 - DNA, 15 bp, Homo sapiens
gtaatgggcttgttg

SEQ ID NO: 1898287 - DNA, 15 bp, Homo sapiens
taatgggcttgttgg

SEQ ID NO: 1898288 - DNA, 15 bp, Homo sapiens
aatgggcttgttggt

SEQ ID NO: 1898289 - DNA, 15 bp, Homo sapiens
atgggcttgttggta

SEQ ID NO: 1898290 - DNA, 15 bp, Homo sapiens
tgggcttgttggtag

SEQ ID NO: 1898291 - DNA, 15 bp, Homo sapiens
gggcttgttggtagg

SEQ ID NO: 1898292 - DNA, 15 bp, Homo sapiens
ggcttgttggtaggg

SEQ ID NO: 1898293 - DNA, 15 bp, Homo sapiens
gcttgttggtaggga

SEQ ID NO: 1898294 - DNA, 15 bp, Homo sapiens
cttgttggtagggat

SEQ ID NO: 1898295 - DNA, 15 bp, Homo sapiens
ttgttggtagggatg

SEQ ID NO: 1898296 - DNA, 15 bp, Homo sapiens
tgttggtagggatgt

SEQ ID NO: 1898297 - DNA, 15 bp, Homo sapiens
gttggtagggatgta

SEQ ID NO: 1898298 - DNA, 15 bp, Homo sapiens
ttggtagggatgtat

SEQ ID NO: 1898299 - DNA, 15 bp, Homo sapiens
tggtagggatgtatt

SEQ ID NO: 1898300 - DNA, 15 bp, Homo sapiens
ggtagggatgtattt

SEQ ID NO: 1898301 - DNA, 15 bp, Homo sapiens
gtagggatgtatttt

SEQ ID NO: 1898302 - DNA, 15 bp, Homo sapiens
tagggatgtattttc

SEQ ID NO: 1898303 - DNA, 15 bp, Homo sapiens
agggatgtattttca

SEQ ID NO: 1898304 - DNA, 15 bp, Homo sapiens
gggatgtattttcag

SEQ ID NO: 1898305 - DNA, 15 bp, Homo sapiens
ggatgtattttcagg

SEQ ID NO: 1898306 - DNA, 15 bp, Homo sapiens
gatgtattttcaggc

SEQ ID NO: 1898307 - DNA, 15 bp, Homo sapiens
atgtattttcaggcc

SEQ ID NO: 1898308 - DNA, 15 bp, Homo sapiens
tgtattttcaggcca

SEQ ID NO: 1898309 - DNA, 15 bp, Homo sapiens
gtattttcaggccaa

SEQ ID NO: 1898310 - DNA, 15 bp, Homo sapiens
tattttcaggccaag

SEQ ID NO: 1898311 - DNA, 15 bp, Homo sapiens
attttcaggccaagg

SEQ ID NO: 1898312 - DNA, 15 bp, Homo sapiens
ttttcaggccaagga

SEQ ID NO: 1898313 - DNA, 15 bp, Homo sapiens
tttcaggccaaggaa

SEQ ID NO: 1898314 - DNA, 15 bp, Homo sapiens
ttcaggccaaggaaa

SEQ ID NO: 1898315 - DNA, 15 bp, Homo sapiens
tcaggccaaggaaag

SEQ ID NO: 1898316 - DNA, 15 bp, Homo sapiens
caggccaaggaaagg

SEQ ID NO: 1898317 - DNA, 15 bp, Homo sapiens
aggccaaggaaaggt

SEQ ID NO: 1898318 - DNA, 15 bp, Homo sapiens
ggccaaggaaaggtt

SEQ ID NO: 1898319 - DNA, 15 bp, Homo sapiens
gccaaggaaaggttg

SEQ ID NO: 1898320 - DNA, 15 bp, Homo sapiens
ccaaggaaaggttgg

SEQ ID NO: 1898321 - DNA, 15 bp, Homo sapiens
caaggaaaggttggg

SEQ ID NO: 1898322 - DNA, 15 bp, Homo sapiens
aaggaaaggttggga

SEQ ID NO: 1898323 - DNA, 15 bp, Homo sapiens
aggaaaggttgggag

SEQ ID NO: 1898324 - DNA, 15 bp, Homo sapiens
ggaaaggttgggaga

SEQ ID NO: 1898325 - DNA, 15 bp, Homo sapiens
gaaaggttgggagac

SEQ ID NO: 1898326 - DNA, 15 bp, Homo sapiens
aaaggttgggagaca

SEQ ID NO: 1898327 - DNA, 15 bp, Homo sapiens
aaggttgggagacaa

SEQ ID NO: 1898328 - DNA, 15 bp, Homo sapiens
aggttgggagacaag

SEQ ID NO: 1898329 - DNA, 15 bp, Homo sapiens
ggttgggagacaaga

SEQ ID NO: 1898330 - DNA, 15 bp, Homo sapiens
gttgggagacaagag

SEQ ID NO: 1898331 - DNA, 15 bp, Homo sapiens
ttgggagacaagagg

SEQ ID NO: 1898332 - DNA, 15 bp, Homo sapiens
tgggagacaagagga

SEQ ID NO: 1898333 - DNA, 15 bp, Homo sapiens
gggagacaagaggag

SEQ ID NO: 1898334 - DNA, 15 bp, Homo sapiens
ggagacaagaggaga

SEQ ID NO: 1898335 - DNA, 15 bp, Homo sapiens
gagacaagaggagaa

SEQ ID NO: 1898336 - DNA, 15 bp, Homo sapiens
agacaagaggagaag

SEQ ID NO: 1898337 - DNA, 15 bp, Homo sapiens
gacaagaggagaagg

SEQ ID NO: 1898338 - DNA, 15 bp, Homo sapiens
acaagaggagaagga

SEQ ID NO: 1898339 - DNA, 15 bp, Homo sapiens
caagaggagaaggat

SEQ ID NO: 1898340 - DNA, 15 bp, Homo sapiens
aagaggagaaggatg

SEQ ID NO: 1898341 - DNA, 15 bp, Homo sapiens
agaggagaaggatga

SEQ ID NO: 1898342 - DNA, 15 bp, Homo sapiens
gaggagaaggatgaa

SEQ ID NO: 1898343 - DNA, 15 bp, Homo sapiens
aggagaaggatgaag

SEQ ID NO: 1898344 - DNA, 15 bp, Homo sapiens
ggagaaggatgaaga

SEQ ID NO: 1898345 - DNA, 15 bp, Homo sapiens
gagaaggatgaagat

SEQ ID NO: 1898346 - DNA, 15 bp, Homo sapiens
agaaggatgaagatt

SEQ ID NO: 1898347 - DNA, 15 bp, Homo sapiens
gaaggatgaagatta

SEQ ID NO: 1898348 - DNA, 15 bp, Homo sapiens
aaggatgaagattag

SEQ ID NO: 1898349 - DNA, 15 bp, Homo sapiens
aggatgaagattagt

SEQ ID NO: 1898350 - DNA, 15 bp, Homo sapiens
ggatgaagattagtt

SEQ ID NO: 1898351 - DNA, 15 bp, Homo sapiens
gatgaagattagtta

SEQ ID NO: 1898352 - DNA, 15 bp, Homo sapiens
atgaagattagttat

SEQ ID NO: 1898353 - DNA, 15 bp, Homo sapiens
tgaagattagttatg

SEQ ID NO: 1898354 - DNA, 15 bp, Homo sapiens
gaagattagttatgt

SEQ ID NO: 1898355 - DNA, 15 bp, Homo sapiens
aagattagttatgta

SEQ ID NO: 1898356 - DNA, 15 bp, Homo sapiens
agattagttatgtag

SEQ ID NO: 1898357 - DNA, 15 bp, Homo sapiens
gattagttatgtagt

SEQ ID NO: 1898358 - DNA, 15 bp, Homo sapiens
attagttatgtagtt

SEQ ID NO: 1898359 - DNA, 15 bp, Homo sapiens
ttagttatgtagtta

SEQ ID NO: 1898360 - DNA, 15 bp, Homo sapiens
tagttatgtagttaa

SEQ ID NO: 1898361 - DNA, 15 bp, Homo sapiens
agttatgtagttaat

SEQ ID NO: 1898362 - DNA, 15 bp, Homo sapiens
gttatgtagttaatt

SEQ ID NO: 1898363 - DNA, 15 bp, Homo sapiens
ttatgtagttaattg

SEQ ID NO: 1898364 - DNA, 15 bp, Homo sapiens
tatgtagttaattgt

SEQ ID NO: 1898365 - DNA, 15 bp, Homo sapiens
atgtagttaattgta

SEQ ID NO: 1898366 - DNA, 15 bp, Homo sapiens
tgtagttaattgtac

SEQ ID NO: 1898367 - DNA, 15 bp, Homo sapiens
gtagttaattgtaca

SEQ ID NO: 1898368 - DNA, 15 bp, Homo sapiens
tagttaattgtacag

SEQ ID NO: 1898369 - DNA, 15 bp, Homo sapiens
agttaattgtacaga

SEQ ID NO: 1898370 - DNA, 15 bp, Homo sapiens
gttaattgtacagat

SEQ ID NO: 1898371 - DNA, 15 bp, Homo sapiens
ttaattgtacagata

SEQ ID NO: 1898372 - DNA, 15 bp, Homo sapiens
taattgtacagatag

SEQ ID NO: 1898373 - DNA, 15 bp, Homo sapiens
aattgtacagatagc

SEQ ID NO: 1898374 - DNA, 15 bp, Homo sapiens
attgtacagatagcc

SEQ ID NO: 1898375 - DNA, 15 bp, Homo sapiens
ttgtacagatagcct

SEQ ID NO: 1898376 - DNA, 15 bp, Homo sapiens
tgtacagatagcctt

SEQ ID NO: 1898377 - DNA, 15 bp, Homo sapiens
gtacagatagcctta

SEQ ID NO: 1898378 - DNA, 15 bp, Homo sapiens
tacagatagccttat

SEQ ID NO: 1898379 - DNA, 15 bp, Homo sapiens
acagatagccttatt

SEQ ID NO: 1898380 - DNA, 15 bp, Homo sapiens
cagatagccttattc

SEQ ID NO: 1898381 - DNA, 15 bp, Homo sapiens
agatagccttattcc

SEQ ID NO: 1898382 - DNA, 15 bp, Homo sapiens
gatagccttattccc

SEQ ID NO: 1898383 - DNA, 15 bp, Homo sapiens
atagccttattccct

SEQ ID NO: 1898384 - DNA, 15 bp, Homo sapiens
tagccttattccctt

SEQ ID NO: 1898385 - DNA, 15 bp, Homo sapiens
agccttattcccttt

SEQ ID NO: 1898386 - DNA, 15 bp, Homo sapiens
gccttattcccttta

SEQ ID NO: 1898387 - DNA, 15 bp, Homo sapiens
ccttattccctttaa

SEQ ID NO: 1898388 - DNA, 15 bp, Homo sapiens
cttattccctttaag

SEQ ID NO: 1898389 - DNA, 15 bp, Homo sapiens
ttattccctttaagt

SEQ ID NO: 1898390 - DNA, 15 bp, Homo sapiens
tattccctttaagtt

SEQ ID NO: 1898391 - DNA, 15 bp, Homo sapiens
attccctttaagttt

SEQ ID NO: 1898392 - DNA, 15 bp, Homo sapiens
tccctttaagtttta

SEQ ID NO: 1898393 - DNA, 15 bp, Homo sapiens
ccctttaagttttaa

SEQ ID NO: 1898394 - DNA, 15 bp, Homo sapiens
cctttaagttttaag

SEQ ID NO: 1898395 - DNA, 15 bp, Homo sapiens
ctttaagttttaaga

SEQ ID NO: 1898396 - DNA, 15 bp, Homo sapiens
tttaagttttaagat

SEQ ID NO: 1898397 - DNA, 15 bp, Homo sapiens
ttaagttttaagata

SEQ ID NO: 1898398 - DNA, 15 bp, Homo sapiens
taagttttaagatag

SEQ ID NO: 1898399 - DNA, 15 bp, Homo sapiens
aagttttaagatagt

SEQ ID NO: 1898400 - DNA, 15 bp, Homo sapiens
agttttaagatagtc

SEQ ID NO: 1898401 - DNA, 15 bp, Homo sapiens
gttttaagatagtca

SEQ ID NO: 1898402 - DNA, 15 bp, Homo sapiens
ttttaagatagtcaa

SEQ ID NO: 1898403 - DNA, 15 bp, Homo sapiens
tttaagatagtcaag

SEQ ID NO: 1898404 - DNA, 15 bp, Homo sapiens
ttaagatagtcaaga

SEQ ID NO: 1898405 - DNA, 15 bp, Homo sapiens
taagatagtcaagaa

SEQ ID NO: 1898406 - DNA, 15 bp, Homo sapiens
aagatagtcaagaaa

SEQ ID NO: 1898407 - DNA, 15 bp, Homo sapiens
agatagtcaagaaaa

SEQ ID NO: 1898408 - DNA, 15 bp, Homo sapiens
gatagtcaagaaaaa

SEQ ID NO: 1898409 - DNA, 15 bp, Homo sapiens
atagtcaagaaaaat

SEQ ID NO: 1898410 - DNA, 15 bp, Homo sapiens
tagtcaagaaaaata

SEQ ID NO: 1898411 - DNA, 15 bp, Homo sapiens
agtcaagaaaaatat

SEQ ID NO: 1898412 - DNA, 15 bp, Homo sapiens
gtcaagaaaaatatt

SEQ ID NO: 1898413 - DNA, 15 bp, Homo sapiens
tcaagaaaaatattt

SEQ ID NO: 1898414 - DNA, 15 bp, Homo sapiens
caagaaaaatatttg

SEQ ID NO: 1898415 - DNA, 15 bp, Homo sapiens
aagaaaaatatttga

SEQ ID NO: 1898416 - DNA, 15 bp, Homo sapiens
agaaaaatatttgaa

SEQ ID NO: 1898417 - DNA, 15 bp, Homo sapiens
gaaaaatatttgaag

SEQ ID NO: 1898418 - DNA, 15 bp, Homo sapiens
aaaaatatttgaagg

SEQ ID NO: 1898419 - DNA, 15 bp, Homo sapiens
aaaatatttgaagga

SEQ ID NO: 1898420 - DNA, 15 bp, Homo sapiens
aaatatttgaaggat

SEQ ID NO: 1898421 - DNA, 15 bp, Homo sapiens
aatatttgaaggatg

SEQ ID NO: 1898422 - DNA, 15 bp, Homo sapiens
atatttgaaggatga

SEQ ID NO: 1898423 - DNA, 15 bp, Homo sapiens
tatttgaaggatgat

SEQ ID NO: 1898424 - DNA, 15 bp, Homo sapiens
atttgaaggatgatt

SEQ ID NO: 1898425 - DNA, 15 bp, Homo sapiens
tttgaaggatgatta

SEQ ID NO: 1898426 - DNA, 15 bp, Homo sapiens
ttgaaggatgattaa

SEQ ID NO: 1898427 - DNA, 15 bp, Homo sapiens
tgaaggatgattaat

SEQ ID NO: 1898428 - DNA, 15 bp, Homo sapiens
gaaggatgattaata

SEQ ID NO: 1898429 - DNA, 15 bp, Homo sapiens
aaggatgattaatat

SEQ ID NO: 1898430 - DNA, 15 bp, Homo sapiens
aggatgattaatatt

SEQ ID NO: 1898431 - DNA, 15 bp, Homo sapiens
ggatgattaatatta

SEQ ID NO: 1898432 - DNA, 15 bp, Homo sapiens
gatgattaatattaa

SEQ ID NO: 1898433 - DNA, 15 bp, Homo sapiens
atgattaatattaac

SEQ ID NO: 1898434 - DNA, 15 bp, Homo sapiens
tgattaatattaaca

SEQ ID NO: 1898435 - DNA, 15 bp, Homo sapiens
gattaatattaacag

SEQ ID NO: 1898436 - DNA, 15 bp, Homo sapiens
attaatattaacagg

SEQ ID NO: 1898437 - DNA, 15 bp, Homo sapiens
ttaatattaacagga

SEQ ID NO: 1898438 - DNA, 15 bp, Homo sapiens
taatattaacaggaa

SEQ ID NO: 1898439 - DNA, 15 bp, Homo sapiens
aatattaacaggaaa

SEQ ID NO: 1898440 - DNA, 15 bp, Homo sapiens
atattaacaggaaaa

SEQ ID NO: 1898441 - DNA, 15 bp, Homo sapiens
tattaacaggaaaaa

SEQ ID NO: 1898442 - DNA, 15 bp, Homo sapiens
attaacaggaaaaaa

SEQ ID NO: 1898443 - DNA, 15 bp, Homo sapiens
ttaacaggaaaaaag

SEQ ID NO: 1898444 - DNA, 15 bp, Homo sapiens
taacaggaaaaaagg

SEQ ID NO: 1898445 - DNA, 15 bp, Homo sapiens
aacaggaaaaaaggg

SEQ ID NO: 1898446 - DNA, 15 bp, Homo sapiens
acaggaaaaaaggga

SEQ ID NO: 1898447 - DNA, 15 bp, Homo sapiens
caggaaaaaagggaa

SEQ ID NO: 1898448 - DNA, 15 bp, Homo sapiens
aggaaaaaagggaaa

SEQ ID NO: 1898449 - DNA, 15 bp, Homo sapiens
ggaaaaaagggaaag

SEQ ID NO: 1898450 - DNA, 15 bp, Homo sapiens
gaaaaaagggaaaga

SEQ ID NO: 1898451 - DNA, 15 bp, Homo sapiens
aaaaaagggaaagag

SEQ ID NO: 1898452 - DNA, 15 bp, Homo sapiens
aaaaagggaaagaga

SEQ ID NO: 1898453 - DNA, 15 bp, Homo sapiens
aaaagggaaagagaa

SEQ ID NO: 1898454 - DNA, 15 bp, Homo sapiens
aaagggaaagagaat

SEQ ID NO: 1898455 - DNA, 15 bp, Homo sapiens
aagggaaagagaatc

SEQ ID NO: 1898456 - DNA, 15 bp, Homo sapiens
agggaaagagaatca

SEQ ID NO: 1898457 - DNA, 15 bp, Homo sapiens
gggaaagagaatcag

SEQ ID NO: 1898458 - DNA, 15 bp, Homo sapiens
ggaaagagaatcagt

SEQ ID NO: 1898459 - DNA, 15 bp, Homo sapiens
gaaagagaatcagta

SEQ ID NO: 1898460 - DNA, 15 bp, Homo sapiens
aaagagaatcagtaa

SEQ ID NO: 1898461 - DNA, 15 bp, Homo sapiens
aagagaatcagtaaa

SEQ ID NO: 1898462 - DNA, 15 bp, Homo sapiens
agagaatcagtaaat

SEQ ID NO: 1898463 - DNA, 15 bp, Homo sapiens
gagaatcagtaaata

SEQ ID NO: 1898464 - DNA, 15 bp, Homo sapiens
agaatcagtaaataa

SEQ ID NO: 1898465 - DNA, 15 bp, Homo sapiens
gaatcagtaaataaa

SEQ ID NO: 1898466 - DNA, 15 bp, Homo sapiens
aatcagtaaataaac

SEQ ID NO: 1898467 - DNA, 15 bp, Homo sapiens
atcagtaaataaaca

SEQ ID NO: 1898468 - DNA, 15 bp, Homo sapiens
tcagtaaataaacaa

SEQ ID NO: 1898469 - DNA, 15 bp, Homo sapiens
cagtaaataaacaaa

SEQ ID NO: 1898470 - DNA, 15 bp, Homo sapiens
agtaaataaacaaaa

SEQ ID NO: 1898471 - DNA, 15 bp, Homo sapiens
gtaaataaacaaaaa

SEQ ID NO: 1898472 - DNA, 15 bp, Homo sapiens
taaataaacaaaaag

SEQ ID NO: 1898473 - DNA, 15 bp, Homo sapiens
aaataaacaaaaagg

SEQ ID NO: 1898474 - DNA, 15 bp, Homo sapiens
aataaacaaaaagga

SEQ ID NO: 1898475 - DNA, 15 bp, Homo sapiens
ataaacaaaaaggag

SEQ ID NO: 1898476 - DNA, 15 bp, Homo sapiens
taaacaaaaaggaga

SEQ ID NO: 1898477 - DNA, 15 bp, Homo sapiens
aaacaaaaaggagag

SEQ ID NO: 1898478 - DNA, 15 bp, Homo sapiens
aacaaaaaggagaga

SEQ ID NO: 1898479 - DNA, 15 bp, Homo sapiens
acaaaaaggagagag

SEQ ID NO: 1898480 - DNA, 15 bp, Homo sapiens
caaaaaggagagaga

SEQ ID NO: 1898481 - DNA, 15 bp, Homo sapiens
aaaaaggagagagat

SEQ ID NO: 1898482 - DNA, 15 bp, Homo sapiens
aaaaggagagagatg

SEQ ID NO: 1898483 - DNA, 15 bp, Homo sapiens
aaaggagagagatga

SEQ ID NO: 1898484 - DNA, 15 bp, Homo sapiens
aaggagagagatgat

SEQ ID NO: 1898485 - DNA, 15 bp, Homo sapiens
aggagagagatgatg

SEQ ID NO: 1898486 - DNA, 15 bp, Homo sapiens
ggagagagatgatga

SEQ ID NO: 1898487 - DNA, 15 bp, Homo sapiens
gagagagatgatgac

SEQ ID NO: 1898488 - DNA, 15 bp, Homo sapiens
agagagatgatgaca

SEQ ID NO: 1898489 - DNA, 15 bp, Homo sapiens
gagagatgatgacaa

SEQ ID NO: 1898490 - DNA, 15 bp, Homo sapiens
agagatgatgacaat

SEQ ID NO: 1898491 - DNA, 15 bp, Homo sapiens
gagatgatgacaatg

SEQ ID NO: 1898492 - DNA, 15 bp, Homo sapiens
agatgatgacaatga

SEQ ID NO: 1898493 - DNA, 15 bp, Homo sapiens
gatgatgacaatgac

SEQ ID NO: 1898494 - DNA, 15 bp, Homo sapiens
atgatgacaatgacc

SEQ ID NO: 1898495 - DNA, 15 bp, Homo sapiens
tgatgacaatgacca

SEQ ID NO: 1898496 - DNA, 15 bp, Homo sapiens
gatgacaatgaccac

SEQ ID NO: 1898497 - DNA, 15 bp, Homo sapiens
atgacaatgaccacg

SEQ ID NO: 1898498 - DNA, 15 bp, Homo sapiens
tgacaatgaccacga

SEQ ID NO: 1898499 - DNA, 15 bp, Homo sapiens
gacaatgaccacgag

SEQ ID NO: 1898500 - DNA, 15 bp, Homo sapiens
acaatgaccacgagt

SEQ ID NO: 1898501 - DNA, 15 bp, Homo sapiens
caatgaccacgagtt

SEQ ID NO: 1898502 - DNA, 15 bp, Homo sapiens
aatgaccacgagttc

SEQ ID NO: 1898503 - DNA, 15 bp, Homo sapiens
atgaccacgagttct

SEQ ID NO: 1898504 - DNA, 15 bp, Homo sapiens
tgaccacgagttctt

SEQ ID NO: 1898505 - DNA, 15 bp, Homo sapiens
gaccacgagttcttg

SEQ ID NO: 1898506 - DNA, 15 bp, Homo sapiens
accacgagttcttga

SEQ ID NO: 1898507 - DNA, 15 bp, Homo sapiens
ccacgagttcttgac

SEQ ID NO: 1898508 - DNA, 15 bp, Homo sapiens
cacgagttcttgacc

SEQ ID NO: 1898509 - DNA, 15 bp, Homo sapiens
acgagttcttgacca

SEQ ID NO: 1898510 - DNA, 15 bp, Homo sapiens
cgagttcttgaccaa

SEQ ID NO: 1898511 - DNA, 15 bp, Homo sapiens
gagttcttgaccaat

SEQ ID NO: 1898512 - DNA, 15 bp, Homo sapiens
agttcttgaccaata

SEQ ID NO: 1898513 - DNA, 15 bp, Homo sapiens
gttcttgaccaataa

SEQ ID NO: 1898514 - DNA, 15 bp, Homo sapiens
ttcttgaccaataat

SEQ ID NO: 1898515 - DNA, 15 bp, Homo sapiens
tcttgaccaataata

SEQ ID NO: 1898516 - DNA, 15 bp, Homo sapiens
cttgaccaataatat

SEQ ID NO: 1898517 - DNA, 15 bp, Homo sapiens
ttgaccaataatatt

SEQ ID NO: 1898518 - DNA, 15 bp, Homo sapiens
tgaccaataatatta

SEQ ID NO: 1898519 - DNA, 15 bp, Homo sapiens
gaccaataatattaa

SEQ ID NO: 1898520 - DNA, 15 bp, Homo sapiens
accaataatattaat

SEQ ID NO: 1898521 - DNA, 15 bp, Homo sapiens
ccaataatattaata

SEQ ID NO: 1898522 - DNA, 15 bp, Homo sapiens
caataatattaataa

SEQ ID NO: 1898523 - DNA, 15 bp, Homo sapiens
aataatattaataac

SEQ ID NO: 1898524 - DNA, 15 bp, Homo sapiens
ataatattaataacc

SEQ ID NO: 1898525 - DNA, 15 bp, Homo sapiens
taatattaataacca

SEQ ID NO: 1898526 - DNA, 15 bp, Homo sapiens
aatattaataaccat

SEQ ID NO: 1898527 - DNA, 15 bp, Homo sapiens
atattaataaccatc

SEQ ID NO: 1898528 - DNA, 15 bp, Homo sapiens
tattaataaccatct

SEQ ID NO: 1898529 - DNA, 15 bp, Homo sapiens
attaataaccatcta

SEQ ID NO: 1898530 - DNA, 15 bp, Homo sapiens
ttaataaccatctat

SEQ ID NO: 1898531 - DNA, 15 bp, Homo sapiens
taataaccatctatt

SEQ ID NO: 1898532 - DNA, 15 bp, Homo sapiens
aataaccatctattc

SEQ ID NO: 1898533 - DNA, 15 bp, Homo sapiens
ataaccatctattca

SEQ ID NO: 1898534 - DNA, 15 bp, Homo sapiens
taaccatctattcag

SEQ ID NO: 1898535 - DNA, 15 bp, Homo sapiens
aaccatctattcagg

SEQ ID NO: 1898536 - DNA, 15 bp, Homo sapiens
accatctattcaggg

SEQ ID NO: 1898537 - DNA, 15 bp, Homo sapiens
ccatctattcagggc

SEQ ID NO: 1898538 - DNA, 15 bp, Homo sapiens
catctattcagggct

SEQ ID NO: 1898539 - DNA, 15 bp, Homo sapiens
atctattcagggctc

SEQ ID NO: 1898540 - DNA, 15 bp, Homo sapiens
tctattcagggctcc

SEQ ID NO: 1898541 - DNA, 15 bp, Homo sapiens
ctattcagggctcct

SEQ ID NO: 1898542 - DNA, 15 bp, Homo sapiens
tattcagggctccta

SEQ ID NO: 1898543 - DNA, 15 bp, Homo sapiens
attcagggctcctat

SEQ ID NO: 1898544 - DNA, 15 bp, Homo sapiens
ttcagggctcctatt

SEQ ID NO: 1898545 - DNA, 15 bp, Homo sapiens
tcagggctcctattt

SEQ ID NO: 1898546 - DNA, 15 bp, Homo sapiens
cagggctcctatttg

SEQ ID NO: 1898547 - DNA, 15 bp, Homo sapiens
agggctcctatttgc

SEQ ID NO: 1898548 - DNA, 15 bp, Homo sapiens
gggctcctatttgct

SEQ ID NO: 1898549 - DNA, 15 bp, Homo sapiens
ggctcctatttgcta

SEQ ID NO: 1898550 - DNA, 15 bp, Homo sapiens
gctcctatttgctaa

SEQ ID NO: 1898551 - DNA, 15 bp, Homo sapiens
ctcctatttgctaag

SEQ ID NO: 1898552 - DNA, 15 bp, Homo sapiens
tcctatttgctaagt

SEQ ID NO: 1898553 - DNA, 15 bp, Homo sapiens
cctatttgctaagtg

SEQ ID NO: 1898554 - DNA, 15 bp, Homo sapiens
ctatttgctaagtgc

SEQ ID NO: 1898555 - DNA, 15 bp, Homo sapiens
tatttgctaagtgcc

SEQ ID NO: 1898556 - DNA, 15 bp, Homo sapiens
atttgctaagtgccg

SEQ ID NO: 1898557 - DNA, 15 bp, Homo sapiens
tttgctaagtgccga

SEQ ID NO: 1898558 - DNA, 15 bp, Homo sapiens
ttgctaagtgccgaa

SEQ ID NO: 1898559 - DNA, 15 bp, Homo sapiens
tgctaagtgccgaat

SEQ ID NO: 1898560 - DNA, 15 bp, Homo sapiens
gctaagtgccgaata

SEQ ID NO: 1898561 - DNA, 15 bp, Homo sapiens
ctaagtgccgaatac

SEQ ID NO: 1898562 - DNA, 15 bp, Homo sapiens
taagtgccgaataca

SEQ ID NO: 1898563 - DNA, 15 bp, Homo sapiens
aagtgccgaatacat

SEQ ID NO: 1898564 - DNA, 15 bp, Homo sapiens
agtgccgaatacatt

SEQ ID NO: 1898565 - DNA, 15 bp, Homo sapiens
gtgccgaatacattc

SEQ ID NO: 1898566 - DNA, 15 bp, Homo sapiens
tgccgaatacattct

SEQ ID NO: 1898567 - DNA, 15 bp, Homo sapiens
gccgaatacattctt

SEQ ID NO: 1898568 - DNA, 15 bp, Homo sapiens
ccgaatacattctta

SEQ ID NO: 1898569 - DNA, 15 bp, Homo sapiens
cgaatacattcttat

SEQ ID NO: 1898570 - DNA, 15 bp, Homo sapiens
gaatacattcttatc

SEQ ID NO: 1898571 - DNA, 15 bp, Homo sapiens
aatacattcttatct

SEQ ID NO: 1898572 - DNA, 15 bp, Homo sapiens
atacattcttatctc

SEQ ID NO: 1898573 - DNA, 15 bp, Homo sapiens
tacattcttatctct

SEQ ID NO: 1898574 - DNA, 15 bp, Homo sapiens
acattcttatctcta

SEQ ID NO: 1898575 - DNA, 15 bp, Homo sapiens
cattcttatctctat

SEQ ID NO: 1898576 - DNA, 15 bp, Homo sapiens
attcttatctctatc

SEQ ID NO: 1898577 - DNA, 15 bp, Homo sapiens
ttcttatctctatca

SEQ ID NO: 1898578 - DNA, 15 bp, Homo sapiens
tcttatctctatcag

SEQ ID NO: 1898579 - DNA, 15 bp, Homo sapiens
cttatctctatcagg

SEQ ID NO: 1898580 - DNA, 15 bp, Homo sapiens
ttatctctatcaggt

SEQ ID NO: 1898581 - DNA, 15 bp, Homo sapiens
tatctctatcaggta

SEQ ID NO: 1898582 - DNA, 15 bp, Homo sapiens
atctctatcaggtac

SEQ ID NO: 1898583 - DNA, 15 bp, Homo sapiens
tctctatcaggtact

SEQ ID NO: 1898584 - DNA, 15 bp, Homo sapiens
ctctatcaggtactc

SEQ ID NO: 1898585 - DNA, 15 bp, Homo sapiens
tctatcaggtactca

SEQ ID NO: 1898586 - DNA, 15 bp, Homo sapiens
ctatcaggtactcat

SEQ ID NO: 1898587 - DNA, 15 bp, Homo sapiens
tatcaggtactcata

SEQ ID NO: 1898588 - DNA, 15 bp, Homo sapiens
atcaggtactcatag

SEQ ID NO: 1898589 - DNA, 15 bp, Homo sapiens
tcaggtactcataga

SEQ ID NO: 1898590 - DNA, 15 bp, Homo sapiens
caggtactcatagac

SEQ ID NO: 1898591 - DNA, 15 bp, Homo sapiens
aggtactcatagact

SEQ ID NO: 1898592 - DNA, 15 bp, Homo sapiens
ggtactcatagactc

SEQ ID NO: 1898593 - DNA, 15 bp, Homo sapiens
gtactcatagactca

SEQ ID NO: 1898594 - DNA, 15 bp, Homo sapiens
tactcatagactcat

SEQ ID NO: 1898595 - DNA, 15 bp, Homo sapiens
actcatagactcatt

SEQ ID NO: 1898596 - DNA, 15 bp, Homo sapiens
ctcatagactcattt

SEQ ID NO: 1898597 - DNA, 15 bp, Homo sapiens
tcatagactcatttt

SEQ ID NO: 1898598 - DNA, 15 bp, Homo sapiens
catagactcattttg

SEQ ID NO: 1898599 - DNA, 15 bp, Homo sapiens
atagactcattttgc

SEQ ID NO: 1898600 - DNA, 15 bp, Homo sapiens
tagactcattttgca

SEQ ID NO: 1898601 - DNA, 15 bp, Homo sapiens
agactcattttgcaa

SEQ ID NO: 1898602 - DNA, 15 bp, Homo sapiens
gactcattttgcaag

SEQ ID NO: 1898603 - DNA, 15 bp, Homo sapiens
actcattttgcaagt

SEQ ID NO: 1898604 - DNA, 15 bp, Homo sapiens
ctcattttgcaagtg

SEQ ID NO: 1898605 - DNA, 15 bp, Homo sapiens
tcattttgcaagtga

SEQ ID NO: 1898606 - DNA, 15 bp, Homo sapiens
cattttgcaagtgag

SEQ ID NO: 1898607 - DNA, 15 bp, Homo sapiens
attttgcaagtgaga

SEQ ID NO: 1898608 - DNA, 15 bp, Homo sapiens
ttttgcaagtgagaa

SEQ ID NO: 1898609 - DNA, 15 bp, Homo sapiens
tttgcaagtgagaaa

SEQ ID NO: 1898610 - DNA, 15 bp, Homo sapiens
ttgcaagtgagaaaa

SEQ ID NO: 1898611 - DNA, 15 bp, Homo sapiens
tgcaagtgagaaaag

SEQ ID NO: 1898612 - DNA, 15 bp, Homo sapiens
gcaagtgagaaaagg

SEQ ID NO: 1898613 - DNA, 15 bp, Homo sapiens
caagtgagaaaaggg

SEQ ID NO: 1898614 - DNA, 15 bp, Homo sapiens
aagtgagaaaagggg

SEQ ID NO: 1898615 - DNA, 15 bp, Homo sapiens
agtgagaaaaggggt

SEQ ID NO: 1898616 - DNA, 15 bp, Homo sapiens
gtgagaaaaggggtt

SEQ ID NO: 1898617 - DNA, 15 bp, Homo sapiens
tgagaaaaggggttg

SEQ ID NO: 1898618 - DNA, 15 bp, Homo sapiens
gagaaaaggggttga

SEQ ID NO: 1898619 - DNA, 15 bp, Homo sapiens
agaaaaggggttgag

SEQ ID NO: 1898620 - DNA, 15 bp, Homo sapiens
gaaaaggggttgagt

SEQ ID NO: 1898621 - DNA, 15 bp, Homo sapiens
aaaaggggttgagtg

SEQ ID NO: 1898622 - DNA, 15 bp, Homo sapiens
aaaggggttgagtgg

SEQ ID NO: 1898623 - DNA, 15 bp, Homo sapiens
aaggggttgagtgga

SEQ ID NO: 1898624 - DNA, 15 bp, Homo sapiens
aggggttgagtggag

SEQ ID NO: 1898625 - DNA, 15 bp, Homo sapiens
ggggttgagtggagg

SEQ ID NO: 1898626 - DNA, 15 bp, Homo sapiens
gggttgagtggaggg

SEQ ID NO: 1898627 - DNA, 15 bp, Homo sapiens
ggttgagtggagggc

SEQ ID NO: 1898628 - DNA, 15 bp, Homo sapiens
gttgagtggagggcc

SEQ ID NO: 1898629 - DNA, 15 bp, Homo sapiens
ttgagtggagggcca

SEQ ID NO: 1898630 - DNA, 15 bp, Homo sapiens
tgagtggagggccac

SEQ ID NO: 1898631 - DNA, 15 bp, Homo sapiens
gagtggagggccaca

SEQ ID NO: 1898632 - DNA, 15 bp, Homo sapiens
agtggagggccacag

SEQ ID NO: 1898633 - DNA, 15 bp, Homo sapiens
gtggagggccacaga

SEQ ID NO: 1898634 - DNA, 15 bp, Homo sapiens
tggagggccacagaa

SEQ ID NO: 1898635 - DNA, 15 bp, Homo sapiens
ggagggccacagaac

SEQ ID NO: 1898636 - DNA, 15 bp, Homo sapiens
gagggccacagaact

SEQ ID NO: 1898637 - DNA, 15 bp, Homo sapiens
agggccacagaactg

SEQ ID NO: 1898638 - DNA, 15 bp, Homo sapiens
gggccacagaactgg

SEQ ID NO: 1898639 - DNA, 15 bp, Homo sapiens
ggccacagaactgga

SEQ ID NO: 1898640 - DNA, 15 bp, Homo sapiens
gccacagaactggaa

SEQ ID NO: 1898641 - DNA, 15 bp, Homo sapiens
ccacagaactggaat

SEQ ID NO: 1898642 - DNA, 15 bp, Homo sapiens
cacagaactggaatg

SEQ ID NO: 1898643 - DNA, 15 bp, Homo sapiens
acagaactggaatgt

SEQ ID NO: 1898644 - DNA, 15 bp, Homo sapiens
cagaactggaatgtt

SEQ ID NO: 1898645 - DNA, 15 bp, Homo sapiens
agaactggaatgttt

SEQ ID NO: 1898646 - DNA, 15 bp, Homo sapiens
gaactggaatgtttt

SEQ ID NO: 1898647 - DNA, 15 bp, Homo sapiens
aactggaatgttttt

SEQ ID NO: 1898648 - DNA, 15 bp, Homo sapiens
actggaatgtttttg

SEQ ID NO: 1898649 - DNA, 15 bp, Homo sapiens
ctggaatgtttttgg

SEQ ID NO: 1898650 - DNA, 15 bp, Homo sapiens
tggaatgtttttgga

SEQ ID NO: 1898651 - DNA, 15 bp, Homo sapiens
ggaatgtttttggag

SEQ ID NO: 1898652 - DNA, 15 bp, Homo sapiens
gaatgtttttggagt

SEQ ID NO: 1898653 - DNA, 15 bp, Homo sapiens
aatgtttttggagtt

SEQ ID NO: 1898654 - DNA, 15 bp, Homo sapiens
atgtttttggagttg

SEQ ID NO: 1898655 - DNA, 15 bp, Homo sapiens
tgtttttggagttgg

SEQ ID NO: 1898656 - DNA, 15 bp, Homo sapiens
gtttttggagttggg

SEQ ID NO: 1898657 - DNA, 15 bp, Homo sapiens
tttttggagttggga

SEQ ID NO: 1898658 - DNA, 15 bp, Homo sapiens
ttttggagttgggat

SEQ ID NO: 1898659 - DNA, 15 bp, Homo sapiens
tttggagttgggatt

SEQ ID NO: 1898660 - DNA, 15 bp, Homo sapiens
ttggagttgggattt

SEQ ID NO: 1898661 - DNA, 15 bp, Homo sapiens
tggagttgggatttg

SEQ ID NO: 1898662 - DNA, 15 bp, Homo sapiens
ggagttgggatttgc

SEQ ID NO: 1898663 - DNA, 15 bp, Homo sapiens
gagttgggatttgcc

SEQ ID NO: 1898664 - DNA, 15 bp, Homo sapiens
agttgggatttgcct

SEQ ID NO: 1898665 - DNA, 15 bp, Homo sapiens
gttgggatttgccta

SEQ ID NO: 1898666 - DNA, 15 bp, Homo sapiens
ttgggatttgcctac

SEQ ID NO: 1898667 - DNA, 15 bp, Homo sapiens
tgggatttgcctaca

SEQ ID NO: 1898668 - DNA, 15 bp, Homo sapiens
gggatttgcctacat

SEQ ID NO: 1898669 - DNA, 15 bp, Homo sapiens
ggatttgcctacatg

SEQ ID NO: 1898670 - DNA, 15 bp, Homo sapiens
gatttgcctacatgc

SEQ ID NO: 1898671 - DNA, 15 bp, Homo sapiens
atttgcctacatgct

SEQ ID NO: 1898672 - DNA, 15 bp, Homo sapiens
tttgcctacatgctt

SEQ ID NO: 1898673 - DNA, 15 bp, Homo sapiens
ttgcctacatgcttt

SEQ ID NO: 1898674 - DNA, 15 bp, Homo sapiens
tgcctacatgctttc

SEQ ID NO: 1898675 - DNA, 15 bp, Homo sapiens
gcctacatgctttcc

SEQ ID NO: 1898676 - DNA, 15 bp, Homo sapiens
cctacatgctttcca

SEQ ID NO: 1898677 - DNA, 15 bp, Homo sapiens
ctacatgctttccac

SEQ ID NO: 1898678 - DNA, 15 bp, Homo sapiens
tacatgctttccacc

SEQ ID NO: 1898679 - DNA, 15 bp, Homo sapiens
acatgctttccacca

SEQ ID NO: 1898680 - DNA, 15 bp, Homo sapiens
catgctttccaccat

SEQ ID NO: 1898681 - DNA, 15 bp, Homo sapiens
atgctttccaccatt

SEQ ID NO: 1898682 - DNA, 15 bp, Homo sapiens
tgctttccaccattc

SEQ ID NO: 1898683 - DNA, 15 bp, Homo sapiens
gctttccaccattcc

SEQ ID NO: 1898684 - DNA, 15 bp, Homo sapiens
ctttccaccattcca

SEQ ID NO: 1898685 - DNA, 15 bp, Homo sapiens
tttccaccattccat

SEQ ID NO: 1898686 - DNA, 15 bp, Homo sapiens
ttccaccattccatt

SEQ ID NO: 1898687 - DNA, 15 bp, Homo sapiens
tccaccattccatta

SEQ ID NO: 1898688 - DNA, 15 bp, Homo sapiens
ccaccattccattat

SEQ ID NO: 1898689 - DNA, 15 bp, Homo sapiens
caccattccattatt

SEQ ID NO: 1898690 - DNA, 15 bp, Homo sapiens
accattccattattc

SEQ ID NO: 1898691 - DNA, 15 bp, Homo sapiens
ccattccattattcc

SEQ ID NO: 1898692 - DNA, 15 bp, Homo sapiens
cattccattattccc

SEQ ID NO: 1898693 - DNA, 15 bp, Homo sapiens
attccattattccca

SEQ ID NO: 1898694 - DNA, 15 bp, Homo sapiens
ttccattattcccaa

SEQ ID NO: 1898695 - DNA, 15 bp, Homo sapiens
tccattattcccaag

SEQ ID NO: 1898696 - DNA, 15 bp, Homo sapiens
ccattattcccaagg

SEQ ID NO: 1898697 - DNA, 15 bp, Homo sapiens
cattattcccaaggc

SEQ ID NO: 1898698 - DNA, 15 bp, Homo sapiens
attattcccaaggct

SEQ ID NO: 1898699 - DNA, 15 bp, Homo sapiens
ttattcccaaggctt

SEQ ID NO: 1898700 - DNA, 15 bp, Homo sapiens
tattcccaaggcttt

SEQ ID NO: 1898701 - DNA, 15 bp, Homo sapiens
attcccaaggctttt

SEQ ID NO: 1898702 - DNA, 15 bp, Homo sapiens
ttcccaaggcttttt

SEQ ID NO: 1898703 - DNA, 15 bp, Homo sapiens
tcccaaggcttttta

SEQ ID NO: 1898704 - DNA, 15 bp, Homo sapiens
cccaaggctttttag

SEQ ID NO: 1898705 - DNA, 15 bp, Homo sapiens
ccaaggctttttaga

SEQ ID NO: 1898706 - DNA, 15 bp, Homo sapiens
caaggctttttagaa

SEQ ID NO: 1898707 - DNA, 15 bp, Homo sapiens
aaggctttttagaaa

SEQ ID NO: 1898708 - DNA, 15 bp, Homo sapiens
aggctttttagaaaa

SEQ ID NO: 1898709 - DNA, 15 bp, Homo sapiens
ggctttttagaaaaa

SEQ ID NO: 1898710 - DNA, 15 bp, Homo sapiens
gctttttagaaaaac

SEQ ID NO: 1898711 - DNA, 15 bp, Homo sapiens
ctttttagaaaaaca

SEQ ID NO: 1898712 - DNA, 15 bp, Homo sapiens
tttttagaaaaacag

SEQ ID NO: 1898713 - DNA, 15 bp, Homo sapiens
ttttagaaaaacaga

SEQ ID NO: 1898714 - DNA, 15 bp, Homo sapiens
tttagaaaaacagaa

SEQ ID NO: 1898715 - DNA, 15 bp, Homo sapiens
ttagaaaaacagaag

SEQ ID NO: 1898716 - DNA, 15 bp, Homo sapiens
tagaaaaacagaagt

SEQ ID NO: 1898717 - DNA, 15 bp, Homo sapiens
agaaaaacagaagtg

SEQ ID NO: 1898718 - DNA, 15 bp, Homo sapiens
gaaaaacagaagtgg

SEQ ID NO: 1898719 - DNA, 15 bp, Homo sapiens
aaaaacagaagtggc

SEQ ID NO: 1898720 - DNA, 15 bp, Homo sapiens
aaaacagaagtggct

SEQ ID NO: 1898721 - DNA, 15 bp, Homo sapiens
aaacagaagtggcta

SEQ ID NO: 1898722 - DNA, 15 bp, Homo sapiens
aacagaagtggctag

SEQ ID NO: 1898723 - DNA, 15 bp, Homo sapiens
acagaagtggctaga

SEQ ID NO: 1898724 - DNA, 15 bp, Homo sapiens
cagaagtggctagat

SEQ ID NO: 1898725 - DNA, 15 bp, Homo sapiens
agaagtggctagata

SEQ ID NO: 1898726 - DNA, 15 bp, Homo sapiens
gaagtggctagataa

SEQ ID NO: 1898727 - DNA, 15 bp, Homo sapiens
aagtggctagataaa

SEQ ID NO: 1898728 - DNA, 15 bp, Homo sapiens
agtggctagataaag

SEQ ID NO: 1898729 - DNA, 15 bp, Homo sapiens
gtggctagataaagg

SEQ ID NO: 1898730 - DNA, 15 bp, Homo sapiens
tggctagataaaggg

SEQ ID NO: 1898731 - DNA, 15 bp, Homo sapiens
ggctagataaagggg

SEQ ID NO: 1898732 - DNA, 15 bp, Homo sapiens
gctagataaagggga

SEQ ID NO: 1898733 - DNA, 15 bp, Homo sapiens
ctagataaaggggag

SEQ ID NO: 1898734 - DNA, 15 bp, Homo sapiens
tagataaaggggaga

SEQ ID NO: 1898735 - DNA, 15 bp, Homo sapiens
agataaaggggagaa

SEQ ID NO: 1898736 - DNA, 15 bp, Homo sapiens
gataaaggggagaaa

SEQ ID NO: 1898737 - DNA, 15 bp, Homo sapiens
ataaaggggagaaaa

SEQ ID NO: 1898738 - DNA, 15 bp, Homo sapiens
taaaggggagaaaaa

SEQ ID NO: 1898739 - DNA, 15 bp, Homo sapiens
aaggggagaaaaaag

SEQ ID NO: 1898740 - DNA, 15 bp, Homo sapiens
aggggagaaaaaagg

SEQ ID NO: 1898741 - DNA, 15 bp, Homo sapiens
ggggagaaaaaagga

SEQ ID NO: 1898742 - DNA, 15 bp, Homo sapiens
gggagaaaaaaggaa

SEQ ID NO: 1898743 - DNA, 15 bp, Homo sapiens
ggagaaaaaaggaaa

SEQ ID NO: 1898744 - DNA, 15 bp, Homo sapiens
gagaaaaaaggaaaa

SEQ ID NO: 1898745 - DNA, 15 bp, Homo sapiens
agaaaaaaggaaaag

SEQ ID NO: 1898746 - DNA, 15 bp, Homo sapiens
gaaaaaaggaaaagg

SEQ ID NO: 1898747 - DNA, 15 bp, Homo sapiens
aaaaaaggaaaagga

SEQ ID NO: 1898748 - DNA, 15 bp, Homo sapiens
aaaaaggaaaaggaa

SEQ ID NO: 1898749 - DNA, 15 bp, Homo sapiens
aaaaggaaaaggaag

SEQ ID NO: 1898750 - DNA, 15 bp, Homo sapiens
aaaggaaaaggaagg

SEQ ID NO: 1898751 - DNA, 15 bp, Homo sapiens
aaggaaaaggaaggt

SEQ ID NO: 1898752 - DNA, 15 bp, Homo sapiens
aggaaaaggaaggta

SEQ ID NO: 1898753 - DNA, 15 bp, Homo sapiens
ggaaaaggaaggtat

SEQ ID NO: 1898754 - DNA, 15 bp, Homo sapiens
gaaaaggaaggtatt

SEQ ID NO: 1898755 - DNA, 15 bp, Homo sapiens
aaaaggaaggtattt

SEQ ID NO: 1898756 - DNA, 15 bp, Homo sapiens
aaaggaaggtattta

SEQ ID NO: 1898757 - DNA, 15 bp, Homo sapiens
aaggaaggtatttag

SEQ ID NO: 1898758 - DNA, 15 bp, Homo sapiens
aggaaggtatttagt

SEQ ID NO: 1898759 - DNA, 15 bp, Homo sapiens
ggaaggtatttagtt

SEQ ID NO: 1898760 - DNA, 15 bp, Homo sapiens
gaaggtatttagttc

SEQ ID NO: 1898761 - DNA, 15 bp, Homo sapiens
aaggtatttagttct

SEQ ID NO: 1898762 - DNA, 15 bp, Homo sapiens
aggtatttagttctc

SEQ ID NO: 1898763 - DNA, 15 bp, Homo sapiens
ggtatttagttctcc

SEQ ID NO: 1898764 - DNA, 15 bp, Homo sapiens
gtatttagttctcca

SEQ ID NO: 1898765 - DNA, 15 bp, Homo sapiens
tatttagttctccat

SEQ ID NO: 1898766 - DNA, 15 bp, Homo sapiens
atttagttctccatt

SEQ ID NO: 1898767 - DNA, 15 bp, Homo sapiens
tttagttctccattt

SEQ ID NO: 1898768 - DNA, 15 bp, Homo sapiens
ttagttctccatttg

SEQ ID NO: 1898769 - DNA, 15 bp, Homo sapiens
tagttctccatttgt

SEQ ID NO: 1898770 - DNA, 15 bp, Homo sapiens
agttctccatttgta

SEQ ID NO: 1898771 - DNA, 15 bp, Homo sapiens
gttctccatttgtac

SEQ ID NO: 1898772 - DNA, 15 bp, Homo sapiens
ttctccatttgtact

SEQ ID NO: 1898773 - DNA, 15 bp, Homo sapiens
tctccatttgtactc

SEQ ID NO: 1898774 - DNA, 15 bp, Homo sapiens
ctccatttgtactcc

SEQ ID NO: 1898775 - DNA, 15 bp, Homo sapiens
tccatttgtactcct

SEQ ID NO: 1898776 - DNA, 15 bp, Homo sapiens
ccatttgtactcctc

SEQ ID NO: 1898777 - DNA, 15 bp, Homo sapiens
catttgtactcctct

SEQ ID NO: 1898778 - DNA, 15 bp, Homo sapiens
atttgtactcctctg

SEQ ID NO: 1898779 - DNA, 15 bp, Homo sapiens
tttgtactcctctgg

SEQ ID NO: 1898780 - DNA, 15 bp, Homo sapiens
ttgtactcctctggc

SEQ ID NO: 1898781 - DNA, 15 bp, Homo sapiens
tgtactcctctggcc

SEQ ID NO: 1898782 - DNA, 15 bp, Homo sapiens
gtactcctctggcct

SEQ ID NO: 1898783 - DNA, 15 bp, Homo sapiens
tactcctctggcctc

SEQ ID NO: 1898784 - DNA, 15 bp, Homo sapiens
actcctctggcctcc

SEQ ID NO: 1898785 - DNA, 15 bp, Homo sapiens
ctcctctggcctcct

SEQ ID NO: 1898786 - DNA, 15 bp, Homo sapiens
tcctctggcctcctg

SEQ ID NO: 1898787 - DNA, 15 bp, Homo sapiens
cctctggcctcctgc

SEQ ID NO: 1898788 - DNA, 15 bp, Homo sapiens
ctctggcctcctgct

SEQ ID NO: 1898789 - DNA, 15 bp, Homo sapiens
tctggcctcctgctg

SEQ ID NO: 1898790 - DNA, 15 bp, Homo sapiens
ctggcctcctgctgg

SEQ ID NO: 1898791 - DNA, 15 bp, Homo sapiens
tggcctcctgctggt

SEQ ID NO: 1898792 - DNA, 15 bp, Homo sapiens
ggcctcctgctggtc

SEQ ID NO: 1898793 - DNA, 15 bp, Homo sapiens
gcctcctgctggtca

SEQ ID NO: 1898794 - DNA, 15 bp, Homo sapiens
cctcctgctggtcat

SEQ ID NO: 1898795 - DNA, 15 bp, Homo sapiens
ctcctgctggtcatt

SEQ ID NO: 1898796 - DNA, 15 bp, Homo sapiens
tcctgctggtcattt

SEQ ID NO: 1898797 - DNA, 15 bp, Homo sapiens
cctgctggtcatttc

SEQ ID NO: 1898798 - DNA, 15 bp, Homo sapiens
ctgctggtcatttca

SEQ ID NO: 1898799 - DNA, 15 bp, Homo sapiens
tgctggtcatttcag

SEQ ID NO: 1898800 - DNA, 15 bp, Homo sapiens
gctggtcatttcagt

SEQ ID NO: 1898801 - DNA, 15 bp, Homo sapiens
ctggtcatttcagtc

SEQ ID NO: 1898802 - DNA, 15 bp, Homo sapiens
tggtcatttcagtca

SEQ ID NO: 1898803 - DNA, 15 bp, Homo sapiens
ggtcatttcagtcag

SEQ ID NO: 1898804 - DNA, 15 bp, Homo sapiens
gtcatttcagtcagg

SEQ ID NO: 1898805 - DNA, 15 bp, Homo sapiens
tcatttcagtcaggg

SEQ ID NO: 1898806 - DNA, 15 bp, Homo sapiens
catttcagtcagggg

SEQ ID NO: 1898807 - DNA, 15 bp, Homo sapiens
atttcagtcagggga

SEQ ID NO: 1898808 - DNA, 15 bp, Homo sapiens
tttcagtcaggggat

SEQ ID NO: 1898809 - DNA, 15 bp, Homo sapiens
ttcagtcaggggatg

SEQ ID NO: 1898810 - DNA, 15 bp, Homo sapiens
tcagtcaggggatga

SEQ ID NO: 1898811 - DNA, 15 bp, Homo sapiens
cagtcaggggatgat

SEQ ID NO: 1898812 - DNA, 15 bp, Homo sapiens
agtcaggggatgata

SEQ ID NO: 1898813 - DNA, 15 bp, Homo sapiens
gtcaggggatgatat

SEQ ID NO: 1898814 - DNA, 15 bp, Homo sapiens
tcaggggatgatatg

SEQ ID NO: 1898815 - DNA, 15 bp, Homo sapiens
caggggatgatatgg

SEQ ID NO: 1898816 - DNA, 15 bp, Homo sapiens
aggggatgatatgga

SEQ ID NO: 1898817 - DNA, 15 bp, Homo sapiens
ggggatgatatggag

SEQ ID NO: 1898818 - DNA, 15 bp, Homo sapiens
gggatgatatggaga

SEQ ID NO: 1898819 - DNA, 15 bp, Homo sapiens
ggatgatatggagac

SEQ ID NO: 1898820 - DNA, 15 bp, Homo sapiens
gatgatatggagacc

SEQ ID NO: 1898821 - DNA, 15 bp, Homo sapiens
atgatatggagaccc

SEQ ID NO: 1898822 - DNA, 15 bp, Homo sapiens
tgatatggagaccct

SEQ ID NO: 1898823 - DNA, 15 bp, Homo sapiens
gatatggagaccctg

SEQ ID NO: 1898824 - DNA, 15 bp, Homo sapiens
atatggagaccctgg

SEQ ID NO: 1898825 - DNA, 15 bp, Homo sapiens
tatggagaccctggt

SEQ ID NO: 1898826 - DNA, 15 bp, Homo sapiens
atggagaccctggta

SEQ ID NO: 1898827 - DNA, 15 bp, Homo sapiens
tggagaccctggtaa

SEQ ID NO: 1898828 - DNA, 15 bp, Homo sapiens
ggagaccctggtaag

SEQ ID NO: 1898829 - DNA, 15 bp, Homo sapiens
gagaccctggtaagt

SEQ ID NO: 1898830 - DNA, 15 bp, Homo sapiens
agaccctggtaagtc

SEQ ID NO: 1898831 - DNA, 15 bp, Homo sapiens
gaccctggtaagtcc

SEQ ID NO: 1898832 - DNA, 15 bp, Homo sapiens
accctggtaagtccc

SEQ ID NO: 1898833 - DNA, 15 bp, Homo sapiens
ccctggtaagtccca

SEQ ID NO: 1898834 - DNA, 15 bp, Homo sapiens
cctggtaagtcccat

SEQ ID NO: 1898835 - DNA, 15 bp, Homo sapiens
ctggtaagtcccatt

SEQ ID NO: 1898836 - DNA, 15 bp, Homo sapiens
tggtaagtcccattc

SEQ ID NO: 1898837 - DNA, 15 bp, Homo sapiens
ggtaagtcccattca

SEQ ID NO: 1898838 - DNA, 15 bp, Homo sapiens
gtaagtcccattcag

SEQ ID NO: 1898839 - DNA, 15 bp, Homo sapiens
taagtcccattcagg

SEQ ID NO: 1898840 - DNA, 15 bp, Homo sapiens
aagtcccattcaggc

SEQ ID NO: 1898841 - DNA, 15 bp, Homo sapiens
agtcccattcaggca

SEQ ID NO: 1898842 - DNA, 15 bp, Homo sapiens
gtcccattcaggcac

SEQ ID NO: 1898843 - DNA, 15 bp, Homo sapiens
tcccattcaggcacc

SEQ ID NO: 1898844 - DNA, 15 bp, Homo sapiens
cccattcaggcaccc

SEQ ID NO: 1898845 - DNA, 15 bp, Homo sapiens
ccattcaggcaccca

SEQ ID NO: 1898846 - DNA, 15 bp, Homo sapiens
cattcaggcacccac

SEQ ID NO: 1898847 - DNA, 15 bp, Homo sapiens
attcaggcacccacc

SEQ ID NO: 1898848 - DNA, 15 bp, Homo sapiens
ttcaggcacccaccc

SEQ ID NO: 1898849 - DNA, 15 bp, Homo sapiens
tcaggcacccacccc

SEQ ID NO: 1898850 - DNA, 15 bp, Homo sapiens
caggcacccaccccc

SEQ ID NO: 1898851 - DNA, 15 bp, Homo sapiens
aggcacccacccccc

SEQ ID NO: 1898852 - DNA, 15 bp, Homo sapiens
ggcacccaccccccc

SEQ ID NO: 1898853 - DNA, 15 bp, Homo sapiens
gcacccaccccccca

SEQ ID NO: 1898854 - DNA, 15 bp, Homo sapiens
cacccacccccccaa

SEQ ID NO: 1898855 - DNA, 15 bp, Homo sapiens
acccacccccccaaa

SEQ ID NO: 1898856 - DNA, 15 bp, Homo sapiens
cccacccccccaaaa

SEQ ID NO: 1898857 - DNA, 15 bp, Homo sapiens
ccacccccccaaaaa

SEQ ID NO: 1898858 - DNA, 15 bp, Homo sapiens
cacccccccaaaaaa

SEQ ID NO: 1898859 - DNA, 15 bp, Homo sapiens
acccccccaaaaaaa

SEQ ID NO: 1898860 - DNA, 15 bp, Homo sapiens
cccccccaaaaaaag

SEQ ID NO: 1898861 - DNA, 15 bp, Homo sapiens
ccccccaaaaaaagt

SEQ ID NO: 1898862 - DNA, 15 bp, Homo sapiens
cccccaaaaaaagta

SEQ ID NO: 1898863 - DNA, 15 bp, Homo sapiens
ccccaaaaaaagtag

SEQ ID NO: 1898864 - DNA, 15 bp, Homo sapiens
cccaaaaaaagtagc

SEQ ID NO: 1898865 - DNA, 15 bp, Homo sapiens
ccaaaaaaagtagct

SEQ ID NO: 1898866 - DNA, 15 bp, Homo sapiens
caaaaaaagtagctg

SEQ ID NO: 1898867 - DNA, 15 bp, Homo sapiens
aaaaaaagtagctgt

SEQ ID NO: 1898868 - DNA, 15 bp, Homo sapiens
aaaaaagtagctgtt

SEQ ID NO: 1898869 - DNA, 15 bp, Homo sapiens
aaaaagtagctgttc

SEQ ID NO: 1898870 - DNA, 15 bp, Homo sapiens
aaaagtagctgttcg

SEQ ID NO: 1898871 - DNA, 15 bp, Homo sapiens
aaagtagctgttcgt

SEQ ID NO: 1898872 - DNA, 15 bp, Homo sapiens
aagtagctgttcgtg

SEQ ID NO: 1898873 - DNA, 15 bp, Homo sapiens
agtagctgttcgtgt

SEQ ID NO: 1898874 - DNA, 15 bp, Homo sapiens
gtagctgttcgtgtt

SEQ ID NO: 1898875 - DNA, 15 bp, Homo sapiens
tagctgttcgtgttc

SEQ ID NO: 1898876 - DNA, 15 bp, Homo sapiens
agctgttcgtgttca

SEQ ID NO: 1898877 - DNA, 15 bp, Homo sapiens
gctgttcgtgttcat

SEQ ID NO: 1898878 - DNA, 15 bp, Homo sapiens
ctgttcgtgttcatt

SEQ ID NO: 1898879 - DNA, 15 bp, Homo sapiens
tgttcgtgttcatta

SEQ ID NO: 1898880 - DNA, 15 bp, Homo sapiens
gttcgtgttcattat

SEQ ID NO: 1898881 - DNA, 15 bp, Homo sapiens
ttcgtgttcattatt

SEQ ID NO: 1898882 - DNA, 15 bp, Homo sapiens
tcgtgttcattattc

SEQ ID NO: 1898883 - DNA, 15 bp, Homo sapiens
cgtgttcattattca

SEQ ID NO: 1898884 - DNA, 15 bp, Homo sapiens
gtgttcattattcat

SEQ ID NO: 1898885 - DNA, 15 bp, Homo sapiens
tgttcattattcatg

SEQ ID NO: 1898886 - DNA, 15 bp, Homo sapiens
gttcattattcatgt

SEQ ID NO: 1898887 - DNA, 15 bp, Homo sapiens
ttcattattcatgtt

SEQ ID NO: 1898888 - DNA, 15 bp, Homo sapiens
tcattattcatgttg

SEQ ID NO: 1898889 - DNA, 15 bp, Homo sapiens
cattattcatgttga

SEQ ID NO: 1898890 - DNA, 15 bp, Homo sapiens
attattcatgttgaa

SEQ ID NO: 1898891 - DNA, 15 bp, Homo sapiens
ttattcatgttgaaa

SEQ ID NO: 1898892 - DNA, 15 bp, Homo sapiens
tattcatgttgaaat

SEQ ID NO: 1898893 - DNA, 15 bp, Homo sapiens
attcatgttgaaatt

SEQ ID NO: 1898894 - DNA, 15 bp, Homo sapiens
ttcatgttgaaattg

SEQ ID NO: 1898895 - DNA, 15 bp, Homo sapiens
tcatgttgaaattga

SEQ ID NO: 1898896 - DNA, 15 bp, Homo sapiens
catgttgaaattgat

SEQ ID NO: 1898897 - DNA, 15 bp, Homo sapiens
atgttgaaattgata

SEQ ID NO: 1898898 - DNA, 15 bp, Homo sapiens
tgttgaaattgataa

SEQ ID NO: 1898899 - DNA, 15 bp, Homo sapiens
gttgaaattgataaa

SEQ ID NO: 1898900 - DNA, 15 bp, Homo sapiens
ttgaaattgataaag

SEQ ID NO: 1898901 - DNA, 15 bp, Homo sapiens
tgaaattgataaaga

SEQ ID NO: 1898902 - DNA, 15 bp, Homo sapiens
gaaattgataaagaa

SEQ ID NO: 1898903 - DNA, 15 bp, Homo sapiens
aaattgataaagaaa

SEQ ID NO: 1898904 - DNA, 15 bp, Homo sapiens
aattgataaagaaac

SEQ ID NO: 1898905 - DNA, 15 bp, Homo sapiens
attgataaagaaacc

SEQ ID NO: 1898906 - DNA, 15 bp, Homo sapiens
ttgataaagaaacca

SEQ ID NO: 1898907 - DNA, 15 bp, Homo sapiens
tgataaagaaaccaa

SEQ ID NO: 1898908 - DNA, 15 bp, Homo sapiens
gataaagaaaccaag

SEQ ID NO: 1898909 - DNA, 15 bp, Homo sapiens
ataaagaaaccaagg

SEQ ID NO: 1898910 - DNA, 15 bp, Homo sapiens
taaagaaaccaaggg

SEQ ID NO: 1898911 - DNA, 15 bp, Homo sapiens
aaagaaaccaagggt

SEQ ID NO: 1898912 - DNA, 15 bp, Homo sapiens
aagaaaccaagggtt

SEQ ID NO: 1898913 - DNA, 15 bp, Homo sapiens
agaaaccaagggttt

SEQ ID NO: 1898914 - DNA, 15 bp, Homo sapiens
gaaaccaagggtttt

SEQ ID NO: 1898915 - DNA, 15 bp, Homo sapiens
aaaccaagggtttta

SEQ ID NO: 1898916 - DNA, 15 bp, Homo sapiens
aaccaagggttttaa

SEQ ID NO: 1898917 - DNA, 15 bp, Homo sapiens
accaagggttttaat

SEQ ID NO: 1898918 - DNA, 15 bp, Homo sapiens
ccaagggttttaatc

SEQ ID NO: 1898919 - DNA, 15 bp, Homo sapiens
caagggttttaatca

SEQ ID NO: 1898920 - DNA, 15 bp, Homo sapiens
aagggttttaatcac

SEQ ID NO: 1898921 - DNA, 15 bp, Homo sapiens
agggttttaatcaca

SEQ ID NO: 1898922 - DNA, 15 bp, Homo sapiens
gggttttaatcacag

SEQ ID NO: 1898923 - DNA, 15 bp, Homo sapiens
ggttttaatcacagc

SEQ ID NO: 1898924 - DNA, 15 bp, Homo sapiens
gttttaatcacagca

SEQ ID NO: 1898925 - DNA, 15 bp, Homo sapiens
ttttaatcacagcaa

SEQ ID NO: 1898926 - DNA, 15 bp, Homo sapiens
tttaatcacagcaaa

SEQ ID NO: 1898927 - DNA, 15 bp, Homo sapiens
ttaatcacagcaaag

SEQ ID NO: 1898928 - DNA, 15 bp, Homo sapiens
taatcacagcaaaga

SEQ ID NO: 1898929 - DNA, 15 bp, Homo sapiens
aatcacagcaaagag

SEQ ID NO: 1898930 - DNA, 15 bp, Homo sapiens
atcacagcaaagaga

SEQ ID NO: 1898931 - DNA, 15 bp, Homo sapiens
tcacagcaaagagaa

SEQ ID NO: 1898932 - DNA, 15 bp, Homo sapiens
cacagcaaagagaaa

SEQ ID NO: 1898933 - DNA, 15 bp, Homo sapiens
acagcaaagagaaac

SEQ ID NO: 1898934 - DNA, 15 bp, Homo sapiens
cagcaaagagaaact

SEQ ID NO: 1898935 - DNA, 15 bp, Homo sapiens
agcaaagagaaactg

SEQ ID NO: 1898936 - DNA, 15 bp, Homo sapiens
gcaaagagaaactgt

SEQ ID NO: 1898937 - DNA, 15 bp, Homo sapiens
caaagagaaactgtt

SEQ ID NO: 1898938 - DNA, 15 bp, Homo sapiens
aaagagaaactgtta

SEQ ID NO: 1898939 - DNA, 15 bp, Homo sapiens
aagagaaactgttat

SEQ ID NO: 1898940 - DNA, 15 bp, Homo sapiens
agagaaactgttatt

SEQ ID NO: 1898941 - DNA, 15 bp, Homo sapiens
gagaaactgttattc

SEQ ID NO: 1898942 - DNA, 15 bp, Homo sapiens
agaaactgttattct

SEQ ID NO: 1898943 - DNA, 15 bp, Homo sapiens
gaaactgttattctt

SEQ ID NO: 1898944 - DNA, 15 bp, Homo sapiens
aaactgttattcttt

SEQ ID NO: 1898945 - DNA, 15 bp, Homo sapiens
aactgttattcttta

SEQ ID NO: 1898946 - DNA, 15 bp, Homo sapiens
actgttattctttag

SEQ ID NO: 1898947 - DNA, 15 bp, Homo sapiens
ctgttattctttagc

SEQ ID NO: 1898948 - DNA, 15 bp, Homo sapiens
tgttattctttagct

SEQ ID NO: 1898949 - DNA, 15 bp, Homo sapiens
gttattctttagcta

SEQ ID NO: 1898950 - DNA, 15 bp, Homo sapiens
ttattctttagctaa

SEQ ID NO: 1898951 - DNA, 15 bp, Homo sapiens
tattctttagctaac

SEQ ID NO: 1898952 - DNA, 15 bp, Homo sapiens
attctttagctaaca

SEQ ID NO: 1898953 - DNA, 15 bp, Homo sapiens
ttctttagctaacag

SEQ ID NO: 1898954 - DNA, 15 bp, Homo sapiens
tctttagctaacagt

SEQ ID NO: 1898955 - DNA, 15 bp, Homo sapiens
ctttagctaacagta

SEQ ID NO: 1898956 - DNA, 15 bp, Homo sapiens
tttagctaacagtac

SEQ ID NO: 1898957 - DNA, 15 bp, Homo sapiens
ttagctaacagtact

SEQ ID NO: 1898958 - DNA, 15 bp, Homo sapiens
tagctaacagtactc

SEQ ID NO: 1898959 - DNA, 15 bp, Homo sapiens
agctaacagtactca

SEQ ID NO: 1898960 - DNA, 15 bp, Homo sapiens
gctaacagtactcag

SEQ ID NO: 1898961 - DNA, 15 bp, Homo sapiens
ctaacagtactcagc

SEQ ID NO: 1898962 - DNA, 15 bp, Homo sapiens
taacagtactcagct

SEQ ID NO: 1898963 - DNA, 15 bp, Homo sapiens
aacagtactcagcta

SEQ ID NO: 1898964 - DNA, 15 bp, Homo sapiens
acagtactcagctaa

SEQ ID NO: 1898965 - DNA, 15 bp, Homo sapiens
cagtactcagctaat

SEQ ID NO: 1898966 - DNA, 15 bp, Homo sapiens
agtactcagctaatg

SEQ ID NO: 1898967 - DNA, 15 bp, Homo sapiens
gtactcagctaatgc

SEQ ID NO: 1898968 - DNA, 15 bp, Homo sapiens
tactcagctaatgct

SEQ ID NO: 1898969 - DNA, 15 bp, Homo sapiens
actcagctaatgctg

SEQ ID NO: 1898970 - DNA, 15 bp, Homo sapiens
ctcagctaatgctgg

SEQ ID NO: 1898971 - DNA, 15 bp, Homo sapiens
tcagctaatgctgga

SEQ ID NO: 1898972 - DNA, 15 bp, Homo sapiens
cagctaatgctggac

SEQ ID NO: 1898973 - DNA, 15 bp, Homo sapiens
agctaatgctggacc

SEQ ID NO: 1898974 - DNA, 15 bp, Homo sapiens
gctaatgctggacca

SEQ ID NO: 1898975 - DNA, 15 bp, Homo sapiens
ctaatgctggaccaa

SEQ ID NO: 1898976 - DNA, 15 bp, Homo sapiens
taatgctggaccaaa

SEQ ID NO: 1898977 - DNA, 15 bp, Homo sapiens
aatgctggaccaaaa

SEQ ID NO: 1898978 - DNA, 15 bp, Homo sapiens
atgctggaccaaaat

SEQ ID NO: 1898979 - DNA, 15 bp, Homo sapiens
tgctggaccaaaatt

SEQ ID NO: 1898980 - DNA, 15 bp, Homo sapiens
gctggaccaaaatta

SEQ ID NO: 1898981 - DNA, 15 bp, Homo sapiens
ctggaccaaaattat

SEQ ID NO: 1898982 - DNA, 15 bp, Homo sapiens
tggaccaaaattata

SEQ ID NO: 1898983 - DNA, 15 bp, Homo sapiens
ggaccaaaattatag

SEQ ID NO: 1898984 - DNA, 15 bp, Homo sapiens
gaccaaaattatagg

SEQ ID NO: 1898985 - DNA, 15 bp, Homo sapiens
accaaaattatagga

SEQ ID NO: 1898986 - DNA, 15 bp, Homo sapiens
ccaaaattataggaa

SEQ ID NO: 1898987 - DNA, 15 bp, Homo sapiens
caaaattataggaaa

SEQ ID NO: 1898988 - DNA, 15 bp, Homo sapiens
aaaattataggaaaa

SEQ ID NO: 1898989 - DNA, 15 bp, Homo sapiens
aaattataggaaaat

SEQ ID NO: 1898990 - DNA, 15 bp, Homo sapiens
aattataggaaaata

SEQ ID NO: 1898991 - DNA, 15 bp, Homo sapiens
attataggaaaatat

SEQ ID NO: 1898992 - DNA, 15 bp, Homo sapiens
ttataggaaaatata

SEQ ID NO: 1898993 - DNA, 15 bp, Homo sapiens
tataggaaaatatat

SEQ ID NO: 1898994 - DNA, 15 bp, Homo sapiens
ataggaaaatatata

SEQ ID NO: 1898995 - DNA, 15 bp, Homo sapiens
taggaaaatatatat

SEQ ID NO: 1898996 - DNA, 15 bp, Homo sapiens
aggaaaatatatata

SEQ ID NO: 1898997 - DNA, 15 bp, Homo sapiens
ggaaaatatatatag

SEQ ID NO: 1898998 - DNA, 15 bp, Homo sapiens
gaaaatatatatagc

SEQ ID NO: 1898999 - DNA, 15 bp, Homo sapiens
aaaatatatatagca

SEQ ID NO: 1899000 - DNA, 15 bp, Homo sapiens
aaatatatatagcat

SEQ ID NO: 1899001 - DNA, 15 bp, Homo sapiens
aatatatatagcata

SEQ ID NO: 1899002 - DNA, 15 bp, Homo sapiens
atatatatagcataa

SEQ ID NO: 1899003 - DNA, 15 bp, Homo sapiens
tatatatagcataaa

SEQ ID NO: 1899004 - DNA, 15 bp, Homo sapiens
atatatagcataaat

SEQ ID NO: 1899005 - DNA, 15 bp, Homo sapiens
tatatagcataaatg

SEQ ID NO: 1899006 - DNA, 15 bp, Homo sapiens
atatagcataaatga

SEQ ID NO: 1899007 - DNA, 15 bp, Homo sapiens
tatagcataaatgag

SEQ ID NO: 1899008 - DNA, 15 bp, Homo sapiens
atagcataaatgagt

SEQ ID NO: 1899009 - DNA, 15 bp, Homo sapiens
tagcataaatgagtc

SEQ ID NO: 1899010 - DNA, 15 bp, Homo sapiens
agcataaatgagtca

SEQ ID NO: 1899011 - DNA, 15 bp, Homo sapiens
gcataaatgagtcat

SEQ ID NO: 1899012 - DNA, 15 bp, Homo sapiens
cataaatgagtcata

SEQ ID NO: 1899013 - DNA, 15 bp, Homo sapiens
ataaatgagtcataa

SEQ ID NO: 1899014 - DNA, 15 bp, Homo sapiens
taaatgagtcataaa

SEQ ID NO: 1899015 - DNA, 15 bp, Homo sapiens
aaatgagtcataaaa

SEQ ID NO: 1899016 - DNA, 15 bp, Homo sapiens
aatgagtcataaaaa

SEQ ID NO: 1899017 - DNA, 15 bp, Homo sapiens
atgagtcataaaaac

SEQ ID NO: 1899018 - DNA, 15 bp, Homo sapiens
tgagtcataaaaact

SEQ ID NO: 1899019 - DNA, 15 bp, Homo sapiens
gagtcataaaaactt

SEQ ID NO: 1899020 - DNA, 15 bp, Homo sapiens
agtcataaaaacttt

SEQ ID NO: 1899021 - DNA, 15 bp, Homo sapiens
gtcataaaaactttg

SEQ ID NO: 1899022 - DNA, 15 bp, Homo sapiens
tcataaaaactttga

SEQ ID NO: 1899023 - DNA, 15 bp, Homo sapiens
cataaaaactttgag

SEQ ID NO: 1899024 - DNA, 15 bp, Homo sapiens
ataaaaactttgaga

SEQ ID NO: 1899025 - DNA, 15 bp, Homo sapiens
taaaaactttgagag

SEQ ID NO: 1899026 - DNA, 15 bp, Homo sapiens
aaaaactttgagagt

SEQ ID NO: 1899027 - DNA, 15 bp, Homo sapiens
aaaactttgagagtc

SEQ ID NO: 1899028 - DNA, 15 bp, Homo sapiens
aaactttgagagtca

SEQ ID NO: 1899029 - DNA, 15 bp, Homo sapiens
aactttgagagtcac

SEQ ID NO: 1899030 - DNA, 15 bp, Homo sapiens
actttgagagtcaca

SEQ ID NO: 1899031 - DNA, 15 bp, Homo sapiens
ctttgagagtcacat

SEQ ID NO: 1899032 - DNA, 15 bp, Homo sapiens
tttgagagtcacatg

SEQ ID NO: 1899033 - DNA, 15 bp, Homo sapiens
ttgagagtcacatga

SEQ ID NO: 1899034 - DNA, 15 bp, Homo sapiens
tgagagtcacatgaa

SEQ ID NO: 1899035 - DNA, 15 bp, Homo sapiens
gagagtcacatgaat

SEQ ID NO: 1899036 - DNA, 15 bp, Homo sapiens
agagtcacatgaatg

SEQ ID NO: 1899037 - DNA, 15 bp, Homo sapiens
gagtcacatgaatgt

SEQ ID NO: 1899038 - DNA, 15 bp, Homo sapiens
agtcacatgaatgta

SEQ ID NO: 1899039 - DNA, 15 bp, Homo sapiens
gtcacatgaatgtat

SEQ ID NO: 1899040 - DNA, 15 bp, Homo sapiens
tcacatgaatgtatg

SEQ ID NO: 1899041 - DNA, 15 bp, Homo sapiens
cacatgaatgtatga

SEQ ID NO: 1899042 - DNA, 15 bp, Homo sapiens
acatgaatgtatgaa

SEQ ID NO: 1899043 - DNA, 15 bp, Homo sapiens
catgaatgtatgaac

SEQ ID NO: 1899044 - DNA, 15 bp, Homo sapiens
atgaatgtatgaaca

SEQ ID NO: 1899045 - DNA, 15 bp, Homo sapiens
tgaatgtatgaacat

SEQ ID NO: 1899046 - DNA, 15 bp, Homo sapiens
gaatgtatgaacatt

SEQ ID NO: 1899047 - DNA, 15 bp, Homo sapiens
aatgtatgaacattc

SEQ ID NO: 1899048 - DNA, 15 bp, Homo sapiens
atgtatgaacattct

SEQ ID NO: 1899049 - DNA, 15 bp, Homo sapiens
tgtatgaacattctc

SEQ ID NO: 1899050 - DNA, 15 bp, Homo sapiens
gtatgaacattctcc

SEQ ID NO: 1899051 - DNA, 15 bp, Homo sapiens
tatgaacattctcca

SEQ ID NO: 1899052 - DNA, 15 bp, Homo sapiens
atgaacattctccac

SEQ ID NO: 1899053 - DNA, 15 bp, Homo sapiens
tgaacattctccaca

SEQ ID NO: 1899054 - DNA, 15 bp, Homo sapiens
gaacattctccacag

SEQ ID NO: 1899055 - DNA, 15 bp, Homo sapiens
aacattctccacagg

SEQ ID NO: 1899056 - DNA, 15 bp, Homo sapiens
acattctccacaggc

SEQ ID NO: 1899057 - DNA, 15 bp, Homo sapiens
cattctccacaggcc

SEQ ID NO: 1899058 - DNA, 15 bp, Homo sapiens
attctccacaggcct

SEQ ID NO: 1899059 - DNA, 15 bp, Homo sapiens
ttctccacaggcctt

SEQ ID NO: 1899060 - DNA, 15 bp, Homo sapiens
tctccacaggccttg

SEQ ID NO: 1899061 - DNA, 15 bp, Homo sapiens
ctccacaggccttgt

SEQ ID NO: 1899062 - DNA, 15 bp, Homo sapiens
tccacaggccttgtt

SEQ ID NO: 1899063 - DNA, 15 bp, Homo sapiens
ccacaggccttgttt

SEQ ID NO: 1899064 - DNA, 15 bp, Homo sapiens
cacaggccttgttta

SEQ ID NO: 1899065 - DNA, 15 bp, Homo sapiens
acaggccttgtttat

SEQ ID NO: 1899066 - DNA, 15 bp, Homo sapiens
caggccttgtttatg

SEQ ID NO: 1899067 - DNA, 15 bp, Homo sapiens
aggccttgtttatgt

SEQ ID NO: 1899068 - DNA, 15 bp, Homo sapiens
ggccttgtttatgta

SEQ ID NO: 1899069 - DNA, 15 bp, Homo sapiens
gccttgtttatgtaa

SEQ ID NO: 1899070 - DNA, 15 bp, Homo sapiens
ccttgtttatgtaat

SEQ ID NO: 1899071 - DNA, 15 bp, Homo sapiens
cttgtttatgtaatc

SEQ ID NO: 1899072 - DNA, 15 bp, Homo sapiens
ttgtttatgtaatca

SEQ ID NO: 1899073 - DNA, 15 bp, Homo sapiens
tgtttatgtaatcat

SEQ ID NO: 1899074 - DNA, 15 bp, Homo sapiens
gtttatgtaatcatg

SEQ ID NO: 1899075 - DNA, 15 bp, Homo sapiens
tttatgtaatcatgt

SEQ ID NO: 1899076 - DNA, 15 bp, Homo sapiens
ttatgtaatcatgta

SEQ ID NO: 1899077 - DNA, 15 bp, Homo sapiens
tatgtaatcatgtat

SEQ ID NO: 1899078 - DNA, 15 bp, Homo sapiens
atgtaatcatgtatc

SEQ ID NO: 1899079 - DNA, 15 bp, Homo sapiens
tgtaatcatgtatct

SEQ ID NO: 1899080 - DNA, 15 bp, Homo sapiens
gtaatcatgtatcta

SEQ ID NO: 1899081 - DNA, 15 bp, Homo sapiens
taatcatgtatctac

SEQ ID NO: 1899082 - DNA, 15 bp, Homo sapiens
aatcatgtatctact

SEQ ID NO: 1899083 - DNA, 15 bp, Homo sapiens
atcatgtatctactt

SEQ ID NO: 1899084 - DNA, 15 bp, Homo sapiens
tcatgtatctactta

SEQ ID NO: 1899085 - DNA, 15 bp, Homo sapiens
catgtatctacttac

SEQ ID NO: 1899086 - DNA, 15 bp, Homo sapiens
atgtatctacttaca

SEQ ID NO: 1899087 - DNA, 15 bp, Homo sapiens
tgtatctacttacat

SEQ ID NO: 1899088 - DNA, 15 bp, Homo sapiens
gtatctacttacatg

SEQ ID NO: 1899089 - DNA, 15 bp, Homo sapiens
tatctacttacatgg

SEQ ID NO: 1899090 - DNA, 15 bp, Homo sapiens
atctacttacatggg

SEQ ID NO: 1899091 - DNA, 15 bp, Homo sapiens
tctacttacatgggt

SEQ ID NO: 1899092 - DNA, 15 bp, Homo sapiens
ctacttacatgggtg

SEQ ID NO: 1899093 - DNA, 15 bp, Homo sapiens
tacttacatgggtgt

SEQ ID NO: 1899094 - DNA, 15 bp, Homo sapiens
acttacatgggtgtg

SEQ ID NO: 1899095 - DNA, 15 bp, Homo sapiens
cttacatgggtgtgt

SEQ ID NO: 1899096 - DNA, 15 bp, Homo sapiens
ttacatgggtgtgtt

SEQ ID NO: 1899097 - DNA, 15 bp, Homo sapiens
tacatgggtgtgttt

SEQ ID NO: 1899098 - DNA, 15 bp, Homo sapiens
acatgggtgtgttta

SEQ ID NO: 1899099 - DNA, 15 bp, Homo sapiens
catgggtgtgtttat

SEQ ID NO: 1899100 - DNA, 15 bp, Homo sapiens
atgggtgtgtttatc

SEQ ID NO: 1899101 - DNA, 15 bp, Homo sapiens
tgggtgtgtttatct

SEQ ID NO: 1899102 - DNA, 15 bp, Homo sapiens
gggtgtgtttatctt

SEQ ID NO: 1899103 - DNA, 15 bp, Homo sapiens
ggtgtgtttatctta

SEQ ID NO: 1899104 - DNA, 15 bp, Homo sapiens
gtgtgtttatcttag

SEQ ID NO: 1899105 - DNA, 15 bp, Homo sapiens
tgtgtttatcttagc

SEQ ID NO: 1899106 - DNA, 15 bp, Homo sapiens
gtgtttatcttagct

SEQ ID NO: 1899107 - DNA, 15 bp, Homo sapiens
tgtttatcttagctt

SEQ ID NO: 1899108 - DNA, 15 bp, Homo sapiens
gtttatcttagcttt

SEQ ID NO: 1899109 - DNA, 15 bp, Homo sapiens
tttatcttagctttt

SEQ ID NO: 1899110 - DNA, 15 bp, Homo sapiens
ttatcttagcttttc

SEQ ID NO: 1899111 - DNA, 15 bp, Homo sapiens
tatcttagcttttcc

SEQ ID NO: 1899112 - DNA, 15 bp, Homo sapiens
atcttagcttttcca

SEQ ID NO: 1899113 - DNA, 15 bp, Homo sapiens
tcttagcttttccat

SEQ ID NO: 1899114 - DNA, 15 bp, Homo sapiens
cttagcttttccatg

SEQ ID NO: 1899115 - DNA, 15 bp, Homo sapiens
ttagcttttccatgt

SEQ ID NO: 1899116 - DNA, 15 bp, Homo sapiens
tagcttttccatgtg

SEQ ID NO: 1899117 - DNA, 15 bp, Homo sapiens
agcttttccatgtgg

SEQ ID NO: 1899118 - DNA, 15 bp, Homo sapiens
gcttttccatgtgga

SEQ ID NO: 1899119 - DNA, 15 bp, Homo sapiens
cttttccatgtggaa

SEQ ID NO: 1899120 - DNA, 15 bp, Homo sapiens
ttttccatgtggaac

SEQ ID NO: 1899121 - DNA, 15 bp, Homo sapiens
tttccatgtggaacc

SEQ ID NO: 1899122 - DNA, 15 bp, Homo sapiens
ttccatgtggaaccc

SEQ ID NO: 1899123 - DNA, 15 bp, Homo sapiens
tccatgtggaaccca

SEQ ID NO: 1899124 - DNA, 15 bp, Homo sapiens
ccatgtggaacccag

SEQ ID NO: 1899125 - DNA, 15 bp, Homo sapiens
catgtggaacccagc

SEQ ID NO: 1899126 - DNA, 15 bp, Homo sapiens
atgtggaacccagct

SEQ ID NO: 1899127 - DNA, 15 bp, Homo sapiens
tgtggaacccagctt

SEQ ID NO: 1899128 - DNA, 15 bp, Homo sapiens
gtggaacccagcttg

SEQ ID NO: 1899129 - DNA, 15 bp, Homo sapiens
tggaacccagcttgc

SEQ ID NO: 1899130 - DNA, 15 bp, Homo sapiens
ggaacccagcttgct

SEQ ID NO: 1899131 - DNA, 15 bp, Homo sapiens
gaacccagcttgctg

SEQ ID NO: 1899132 - DNA, 15 bp, Homo sapiens
aacccagcttgctgt

SEQ ID NO: 1899133 - DNA, 15 bp, Homo sapiens
acccagcttgctgta

SEQ ID NO: 1899134 - DNA, 15 bp, Homo sapiens
cccagcttgctgtag

SEQ ID NO: 1899135 - DNA, 15 bp, Homo sapiens
ccagcttgctgtaga

SEQ ID NO: 1899136 - DNA, 15 bp, Homo sapiens
cagcttgctgtagac

SEQ ID NO: 1899137 - DNA, 15 bp, Homo sapiens
agcttgctgtagacc

SEQ ID NO: 1899138 - DNA, 15 bp, Homo sapiens
gcttgctgtagaccc

SEQ ID NO: 1899139 - DNA, 15 bp, Homo sapiens
cttgctgtagaccca

SEQ ID NO: 1899140 - DNA, 15 bp, Homo sapiens
ttgctgtagacccaa

SEQ ID NO: 1899141 - DNA, 15 bp, Homo sapiens
tgctgtagacccaat

SEQ ID NO: 1899142 - DNA, 15 bp, Homo sapiens
gctgtagacccaatc

SEQ ID NO: 1899143 - DNA, 15 bp, Homo sapiens
ctgtagacccaatct

SEQ ID NO: 1899144 - DNA, 15 bp, Homo sapiens
tgtagacccaatctc

SEQ ID NO: 1899145 - DNA, 15 bp, Homo sapiens
gtagacccaatctct

SEQ ID NO: 1899146 - DNA, 15 bp, Homo sapiens
tagacccaatctctt

SEQ ID NO: 1899147 - DNA, 15 bp, Homo sapiens
agacccaatctcttt

SEQ ID NO: 1899148 - DNA, 15 bp, Homo sapiens
gacccaatctctttc

SEQ ID NO: 1899149 - DNA, 15 bp, Homo sapiens
acccaatctctttct

SEQ ID NO: 1899150 - DNA, 15 bp, Homo sapiens
cccaatctctttcta

SEQ ID NO: 1899151 - DNA, 15 bp, Homo sapiens
ccaatctctttctaa

SEQ ID NO: 1899152 - DNA, 15 bp, Homo sapiens
caatctctttctaaa

SEQ ID NO: 1899153 - DNA, 15 bp, Homo sapiens
aatctctttctaaac

SEQ ID NO: 1899154 - DNA, 15 bp, Homo sapiens
atctctttctaaaca

SEQ ID NO: 1899155 - DNA, 15 bp, Homo sapiens
tctctttctaaacag

SEQ ID NO: 1899156 - DNA, 15 bp, Homo sapiens
ctctttctaaacagt

SEQ ID NO: 1899157 - DNA, 15 bp, Homo sapiens
tctttctaaacagtg

SEQ ID NO: 1899158 - DNA, 15 bp, Homo sapiens
ctttctaaacagtga

SEQ ID NO: 1899159 - DNA, 15 bp, Homo sapiens
tttctaaacagtgag

SEQ ID NO: 1899160 - DNA, 15 bp, Homo sapiens
ttctaaacagtgagt

SEQ ID NO: 1899161 - DNA, 15 bp, Homo sapiens
tctaaacagtgagta

SEQ ID NO: 1899162 - DNA, 15 bp, Homo sapiens
ctaaacagtgagtaa

SEQ ID NO: 1899163 - DNA, 15 bp, Homo sapiens
taaacagtgagtaat

SEQ ID NO: 1899164 - DNA, 15 bp, Homo sapiens
aaacagtgagtaatc

SEQ ID NO: 1899165 - DNA, 15 bp, Homo sapiens
aacagtgagtaatca

SEQ ID NO: 1899166 - DNA, 15 bp, Homo sapiens
acagtgagtaatcaa

SEQ ID NO: 1899167 - DNA, 15 bp, Homo sapiens
cagtgagtaatcaaa

SEQ ID NO: 1899168 - DNA, 15 bp, Homo sapiens
agtgagtaatcaaaa

SEQ ID NO: 1899169 - DNA, 15 bp, Homo sapiens
gtgagtaatcaaaag

SEQ ID NO: 1899170 - DNA, 15 bp, Homo sapiens
tgagtaatcaaaagg

SEQ ID NO: 1899171 - DNA, 15 bp, Homo sapiens
gagtaatcaaaagga

SEQ ID NO: 1899172 - DNA, 15 bp, Homo sapiens
agtaatcaaaaggaa

SEQ ID NO: 1899173 - DNA, 15 bp, Homo sapiens
gtaatcaaaaggaat

SEQ ID NO: 1899174 - DNA, 15 bp, Homo sapiens
taatcaaaaggaatt

SEQ ID NO: 1899175 - DNA, 15 bp, Homo sapiens
aatcaaaaggaattc

SEQ ID NO: 1899176 - DNA, 15 bp, Homo sapiens
atcaaaaggaattca

SEQ ID NO: 1899177 - DNA, 15 bp, Homo sapiens
tcaaaaggaattcat

SEQ ID NO: 1899178 - DNA, 15 bp, Homo sapiens
caaaaggaattcatc

SEQ ID NO: 1899179 - DNA, 15 bp, Homo sapiens
aaaaggaattcatct

SEQ ID NO: 1899180 - DNA, 15 bp, Homo sapiens
aaaggaattcatctg

SEQ ID NO: 1899181 - DNA, 15 bp, Homo sapiens
aaggaattcatctgt

SEQ ID NO: 1899182 - DNA, 15 bp, Homo sapiens
aggaattcatctgtg

SEQ ID NO: 1899183 - DNA, 15 bp, Homo sapiens
ggaattcatctgtga

SEQ ID NO: 1899184 - DNA, 15 bp, Homo sapiens
gaattcatctgtgag

SEQ ID NO: 1899185 - DNA, 15 bp, Homo sapiens
aattcatctgtgagt

SEQ ID NO: 1899186 - DNA, 15 bp, Homo sapiens
attcatctgtgagta

SEQ ID NO: 1899187 - DNA, 15 bp, Homo sapiens
ttcatctgtgagtaa

SEQ ID NO: 1899188 - DNA, 15 bp, Homo sapiens
tcatctgtgagtaac

SEQ ID NO: 1899189 - DNA, 15 bp, Homo sapiens
catctgtgagtaact

SEQ ID NO: 1899190 - DNA, 15 bp, Homo sapiens
atctgtgagtaactt

SEQ ID NO: 1899191 - DNA, 15 bp, Homo sapiens
tctgtgagtaacttc

SEQ ID NO: 1899192 - DNA, 15 bp, Homo sapiens
ctgtgagtaacttca

SEQ ID NO: 1899193 - DNA, 15 bp, Homo sapiens
tgtgagtaacttcac

SEQ ID NO: 1899194 - DNA, 15 bp, Homo sapiens
gtgagtaacttcaca

SEQ ID NO: 1899195 - DNA, 15 bp, Homo sapiens
tgagtaacttcacac

SEQ ID NO: 1899196 - DNA, 15 bp, Homo sapiens
gagtaacttcacaca

SEQ ID NO: 1899197 - DNA, 15 bp, Homo sapiens
agtaacttcacacat

SEQ ID NO: 1899198 - DNA, 15 bp, Homo sapiens
gtaacttcacacatt

SEQ ID NO: 1899199 - DNA, 15 bp, Homo sapiens
taacttcacacattt

SEQ ID NO: 1899200 - DNA, 15 bp, Homo sapiens
aacttcacacattta

SEQ ID NO: 1899201 - DNA, 15 bp, Homo sapiens
acttcacacatttat

SEQ ID NO: 1899202 - DNA, 15 bp, Homo sapiens
cttcacacatttatt

SEQ ID NO: 1899203 - DNA, 15 bp, Homo sapiens
ttcacacatttatta

SEQ ID NO: 1899204 - DNA, 15 bp, Homo sapiens
tcacacatttattat

SEQ ID NO: 1899205 - DNA, 15 bp, Homo sapiens
cacacatttattata

SEQ ID NO: 1899206 - DNA, 15 bp, Homo sapiens
acacatttattataa

SEQ ID NO: 1899207 - DNA, 15 bp, Homo sapiens
cacatttattataag

SEQ ID NO: 1899208 - DNA, 15 bp, Homo sapiens
acatttattataaga

SEQ ID NO: 1899209 - DNA, 15 bp, Homo sapiens
catttattataagat

SEQ ID NO: 1899210 - DNA, 15 bp, Homo sapiens
atttattataagatg

SEQ ID NO: 1899211 - DNA, 15 bp, Homo sapiens
tttattataagatgt

SEQ ID NO: 1899212 - DNA, 15 bp, Homo sapiens
ttattataagatgtt

SEQ ID NO: 1899213 - DNA, 15 bp, Homo sapiens
tattataagatgtta

SEQ ID NO: 1899214 - DNA, 15 bp, Homo sapiens
attataagatgttag

SEQ ID NO: 1899215 - DNA, 15 bp, Homo sapiens
ttataagatgttaga

SEQ ID NO: 1899216 - DNA, 15 bp, Homo sapiens
tataagatgttagag

SEQ ID NO: 1899217 - DNA, 15 bp, Homo sapiens
ataagatgttagagt

SEQ ID NO: 1899218 - DNA, 15 bp, Homo sapiens
taagatgttagagtg

SEQ ID NO: 1899219 - DNA, 15 bp, Homo sapiens
aagatgttagagtga

SEQ ID NO: 1899220 - DNA, 15 bp, Homo sapiens
agatgttagagtgag

SEQ ID NO: 1899221 - DNA, 15 bp, Homo sapiens
gatgttagagtgagg

SEQ ID NO: 1899222 - DNA, 15 bp, Homo sapiens
atgttagagtgagga

SEQ ID NO: 1899223 - DNA, 15 bp, Homo sapiens
tgttagagtgaggaa

SEQ ID NO: 1899224 - DNA, 15 bp, Homo sapiens
gttagagtgaggaac

SEQ ID NO: 1899225 - DNA, 15 bp, Homo sapiens
ttagagtgaggaaca

SEQ ID NO: 1899226 - DNA, 15 bp, Homo sapiens
tagagtgaggaacaa

SEQ ID NO: 1899227 - DNA, 15 bp, Homo sapiens
agagtgaggaacaag

SEQ ID NO: 1899228 - DNA, 15 bp, Homo sapiens
gagtgaggaacaagg

SEQ ID NO: 1899229 - DNA, 15 bp, Homo sapiens
agtgaggaacaaggt

SEQ ID NO: 1899230 - DNA, 15 bp, Homo sapiens
gtgaggaacaaggtg

SEQ ID NO: 1899231 - DNA, 15 bp, Homo sapiens
tgaggaacaaggtgg

SEQ ID NO: 1899232 - DNA, 15 bp, Homo sapiens
gaggaacaaggtggt

SEQ ID NO: 1899233 - DNA, 15 bp, Homo sapiens
aggaacaaggtggtt

SEQ ID NO: 1899234 - DNA, 15 bp, Homo sapiens
ggaacaaggtggttt

SEQ ID NO: 1899235 - DNA, 15 bp, Homo sapiens
gaacaaggtggttta

SEQ ID NO: 1899236 - DNA, 15 bp, Homo sapiens
aacaaggtggtttaa

SEQ ID NO: 1899237 - DNA, 15 bp, Homo sapiens
acaaggtggtttaaa

SEQ ID NO: 1899238 - DNA, 15 bp, Homo sapiens
caaggtggtttaaat

SEQ ID NO: 1899239 - DNA, 15 bp, Homo sapiens
aaggtggtttaaatg

SEQ ID NO: 1899240 - DNA, 15 bp, Homo sapiens
aggtggtttaaatga

SEQ ID NO: 1899241 - DNA, 15 bp, Homo sapiens
ggtggtttaaatgat

SEQ ID NO: 1899242 - DNA, 15 bp, Homo sapiens
gtggtttaaatgata

SEQ ID NO: 1899243 - DNA, 15 bp, Homo sapiens
tggtttaaatgatag

SEQ ID NO: 1899244 - DNA, 15 bp, Homo sapiens
ggtttaaatgatagc

SEQ ID NO: 1899245 - DNA, 15 bp, Homo sapiens
gtttaaatgatagca

SEQ ID NO: 1899246 - DNA, 15 bp, Homo sapiens
tttaaatgatagcat

SEQ ID NO: 1899247 - DNA, 15 bp, Homo sapiens
ttaaatgatagcata

SEQ ID NO: 1899248 - DNA, 15 bp, Homo sapiens
taaatgatagcataa

SEQ ID NO: 1899249 - DNA, 15 bp, Homo sapiens
aaatgatagcataaa

SEQ ID NO: 1899250 - DNA, 15 bp, Homo sapiens
aatgatagcataaag

SEQ ID NO: 1899251 - DNA, 15 bp, Homo sapiens
atgatagcataaagt

SEQ ID NO: 1899252 - DNA, 15 bp, Homo sapiens
tgatagcataaagta

SEQ ID NO: 1899253 - DNA, 15 bp, Homo sapiens
gatagcataaagtaa

SEQ ID NO: 1899254 - DNA, 15 bp, Homo sapiens
atagcataaagtaac

SEQ ID NO: 1899255 - DNA, 15 bp, Homo sapiens
tagcataaagtaaca

SEQ ID NO: 1899256 - DNA, 15 bp, Homo sapiens
agcataaagtaacac

SEQ ID NO: 1899257 - DNA, 15 bp, Homo sapiens
gcataaagtaacaca

SEQ ID NO: 1899258 - DNA, 15 bp, Homo sapiens
cataaagtaacacaa

SEQ ID NO: 1899259 - DNA, 15 bp, Homo sapiens
ataaagtaacacaat

SEQ ID NO: 1899260 - DNA, 15 bp, Homo sapiens
taaagtaacacaatt

SEQ ID NO: 1899261 - DNA, 15 bp, Homo sapiens
aaagtaacacaattc

SEQ ID NO: 1899262 - DNA, 15 bp, Homo sapiens
aagtaacacaattcc

SEQ ID NO: 1899263 - DNA, 15 bp, Homo sapiens
agtaacacaattccc

SEQ ID NO: 1899264 - DNA, 15 bp, Homo sapiens
gtaacacaattccca

SEQ ID NO: 1899265 - DNA, 15 bp, Homo sapiens
taacacaattcccag

SEQ ID NO: 1899266 - DNA, 15 bp, Homo sapiens
aacacaattcccaga

SEQ ID NO: 1899267 - DNA, 15 bp, Homo sapiens
acacaattcccagag

SEQ ID NO: 1899268 - DNA, 15 bp, Homo sapiens
cacaattcccagagt

SEQ ID NO: 1899269 - DNA, 15 bp, Homo sapiens
acaattcccagagtt

SEQ ID NO: 1899270 - DNA, 15 bp, Homo sapiens
caattcccagagttt

SEQ ID NO: 1899271 - DNA, 15 bp, Homo sapiens
aattcccagagtttt

SEQ ID NO: 1899272 - DNA, 15 bp, Homo sapiens
attcccagagtttta

SEQ ID NO: 1899273 - DNA, 15 bp, Homo sapiens
ttcccagagttttaa

SEQ ID NO: 1899274 - DNA, 15 bp, Homo sapiens
tcccagagttttaag

SEQ ID NO: 1899275 - DNA, 15 bp, Homo sapiens
cccagagttttaagt

SEQ ID NO: 1899276 - DNA, 15 bp, Homo sapiens
ccagagttttaagtc

SEQ ID NO: 1899277 - DNA, 15 bp, Homo sapiens
cagagttttaagtcc

SEQ ID NO: 1899278 - DNA, 15 bp, Homo sapiens
agagttttaagtcca

SEQ ID NO: 1899279 - DNA, 15 bp, Homo sapiens
gagttttaagtccag

SEQ ID NO: 1899280 - DNA, 15 bp, Homo sapiens
agttttaagtccaga

SEQ ID NO: 1899281 - DNA, 15 bp, Homo sapiens
gttttaagtccagaa

SEQ ID NO: 1899282 - DNA, 15 bp, Homo sapiens
ttttaagtccagaaa

SEQ ID NO: 1899283 - DNA, 15 bp, Homo sapiens
tttaagtccagaaaa

SEQ ID NO: 1899284 - DNA, 15 bp, Homo sapiens
ttaagtccagaaaaa

SEQ ID NO: 1899285 - DNA, 15 bp, Homo sapiens
taagtccagaaaaaa

SEQ ID NO: 1899286 - DNA, 15 bp, Homo sapiens
aagtccagaaaaaat

SEQ ID NO: 1899287 - DNA, 15 bp, Homo sapiens
agtccagaaaaaatt

SEQ ID NO: 1899288 - DNA, 15 bp, Homo sapiens
gtccagaaaaaattc

SEQ ID NO: 1899289 - DNA, 15 bp, Homo sapiens
tccagaaaaaattca

SEQ ID NO: 1899290 - DNA, 15 bp, Homo sapiens
ccagaaaaaattcaa

SEQ ID NO: 1899291 - DNA, 15 bp, Homo sapiens
cagaaaaaattcaag

SEQ ID NO: 1899292 - DNA, 15 bp, Homo sapiens
agaaaaaattcaaga

SEQ ID NO: 1899293 - DNA, 15 bp, Homo sapiens
gaaaaaattcaagag

SEQ ID NO: 1899294 - DNA, 15 bp, Homo sapiens
aaaaaattcaagagt

SEQ ID NO: 1899295 - DNA, 15 bp, Homo sapiens
aaaaattcaagagtc

SEQ ID NO: 1899296 - DNA, 15 bp, Homo sapiens
aaaattcaagagtca

SEQ ID NO: 1899297 - DNA, 15 bp, Homo sapiens
aaattcaagagtcag

SEQ ID NO: 1899298 - DNA, 15 bp, Homo sapiens
aattcaagagtcagg

SEQ ID NO: 1899299 - DNA, 15 bp, Homo sapiens
attcaagagtcaggt

SEQ ID NO: 1899300 - DNA, 15 bp, Homo sapiens
ttcaagagtcaggtc

SEQ ID NO: 1899301 - DNA, 15 bp, Homo sapiens
tcaagagtcaggtct

SEQ ID NO: 1899302 - DNA, 15 bp, Homo sapiens
caagagtcaggtctg

SEQ ID NO: 1899303 - DNA, 15 bp, Homo sapiens
aagagtcaggtctgt

SEQ ID NO: 1899304 - DNA, 15 bp, Homo sapiens
agagtcaggtctgtg

SEQ ID NO: 1899305 - DNA, 15 bp, Homo sapiens
gagtcaggtctgtgg

SEQ ID NO: 1899306 - DNA, 15 bp, Homo sapiens
agtcaggtctgtggt

SEQ ID NO: 1899307 - DNA, 15 bp, Homo sapiens
gtcaggtctgtggtg

SEQ ID NO: 1899308 - DNA, 15 bp, Homo sapiens
tcaggtctgtggtga

SEQ ID NO: 1899309 - DNA, 15 bp, Homo sapiens
caggtctgtggtgaa

SEQ ID NO: 1899310 - DNA, 15 bp, Homo sapiens
aggtctgtggtgaat

SEQ ID NO: 1899311 - DNA, 15 bp, Homo sapiens
ggtctgtggtgaatc

SEQ ID NO: 1899312 - DNA, 15 bp, Homo sapiens
gtctgtggtgaatct

SEQ ID NO: 1899313 - DNA, 15 bp, Homo sapiens
tctgtggtgaatctc

SEQ ID NO: 1899314 - DNA, 15 bp, Homo sapiens
ctgtggtgaatctct

SEQ ID NO: 1899315 - DNA, 15 bp, Homo sapiens
tgtggtgaatctctc

SEQ ID NO: 1899316 - DNA, 15 bp, Homo sapiens
gtggtgaatctctca

SEQ ID NO: 1899317 - DNA, 15 bp, Homo sapiens
tggtgaatctctcaa

SEQ ID NO: 1899318 - DNA, 15 bp, Homo sapiens
ggtgaatctctcaag

SEQ ID NO: 1899319 - DNA, 15 bp, Homo sapiens
gtgaatctctcaagc

SEQ ID NO: 1899320 - DNA, 15 bp, Homo sapiens
tgaatctctcaagca

SEQ ID NO: 1899321 - DNA, 15 bp, Homo sapiens
gaatctctcaagcaa

SEQ ID NO: 1899322 - DNA, 15 bp, Homo sapiens
aatctctcaagcaat

SEQ ID NO: 1899323 - DNA, 15 bp, Homo sapiens
atctctcaagcaata

SEQ ID NO: 1899324 - DNA, 15 bp, Homo sapiens
tctctcaagcaataa

SEQ ID NO: 1899325 - DNA, 15 bp, Homo sapiens
ctctcaagcaataaa

SEQ ID NO: 1899326 - DNA, 15 bp, Homo sapiens
tctcaagcaataaag

SEQ ID NO: 1899327 - DNA, 15 bp, Homo sapiens
ctcaagcaataaaga

SEQ ID NO: 1899328 - DNA, 15 bp, Homo sapiens
tcaagcaataaagaa

SEQ ID NO: 1899329 - DNA, 15 bp, Homo sapiens
caagcaataaagaaa

SEQ ID NO: 1899330 - DNA, 15 bp, Homo sapiens
aagcaataaagaaaa

SEQ ID NO: 1899331 - DNA, 15 bp, Homo sapiens
agcaataaagaaaat

SEQ ID NO: 1899332 - DNA, 15 bp, Homo sapiens
gcaataaagaaaatg

SEQ ID NO: 1899333 - DNA, 15 bp, Homo sapiens
caataaagaaaatgc

SEQ ID NO: 1899334 - DNA, 15 bp, Homo sapiens
aataaagaaaatgct

SEQ ID NO: 1899335 - DNA, 15 bp, Homo sapiens
ataaagaaaatgctt

SEQ ID NO: 1899336 - DNA, 15 bp, Homo sapiens
taaagaaaatgcttt

SEQ ID NO: 1899337 - DNA, 15 bp, Homo sapiens
aaagaaaatgctttc

SEQ ID NO: 1899338 - DNA, 15 bp, Homo sapiens
aagaaaatgctttcg

SEQ ID NO: 1899339 - DNA, 15 bp, Homo sapiens
agaaaatgctttcgt

SEQ ID NO: 1899340 - DNA, 15 bp, Homo sapiens
gaaaatgctttcgtt

SEQ ID NO: 1899341 - DNA, 15 bp, Homo sapiens
aaaatgctttcgttt

SEQ ID NO: 1899342 - DNA, 15 bp, Homo sapiens
aaatgctttcgttta

SEQ ID NO: 1899343 - DNA, 15 bp, Homo sapiens
aatgctttcgtttat

SEQ ID NO: 1899344 - DNA, 15 bp, Homo sapiens
atgctttcgtttata

SEQ ID NO: 1899345 - DNA, 15 bp, Homo sapiens
tgctttcgtttatag

SEQ ID NO: 1899346 - DNA, 15 bp, Homo sapiens
gctttcgtttataga

SEQ ID NO: 1899347 - DNA, 15 bp, Homo sapiens
ctttcgtttatagac

SEQ ID NO: 1899348 - DNA, 15 bp, Homo sapiens
tttcgtttatagacc

SEQ ID NO: 1899349 - DNA, 15 bp, Homo sapiens
ttcgtttatagacca

SEQ ID NO: 1899350 - DNA, 15 bp, Homo sapiens
tcgtttatagaccaa

SEQ ID NO: 1899351 - DNA, 15 bp, Homo sapiens
cgtttatagaccaat

SEQ ID NO: 1899352 - DNA, 15 bp, Homo sapiens
gtttatagaccaatt

SEQ ID NO: 1899353 - DNA, 15 bp, Homo sapiens
tttatagaccaattg

SEQ ID NO: 1899354 - DNA, 15 bp, Homo sapiens
ttatagaccaattga

SEQ ID NO: 1899355 - DNA, 15 bp, Homo sapiens
tatagaccaattgac

SEQ ID NO: 1899356 - DNA, 15 bp, Homo sapiens
atagaccaattgaca

SEQ ID NO: 1899357 - DNA, 15 bp, Homo sapiens
tagaccaattgacat

SEQ ID NO: 1899358 - DNA, 15 bp, Homo sapiens
agaccaattgacatc

SEQ ID NO: 1899359 - DNA, 15 bp, Homo sapiens
gaccaattgacatca

SEQ ID NO: 1899360 - DNA, 15 bp, Homo sapiens
accaattgacatcag

SEQ ID NO: 1899361 - DNA, 15 bp, Homo sapiens
ccaattgacatcaga

SEQ ID NO: 1899362 - DNA, 15 bp, Homo sapiens
caattgacatcagaa

SEQ ID NO: 1899363 - DNA, 15 bp, Homo sapiens
aattgacatcagaac

SEQ ID NO: 1899364 - DNA, 15 bp, Homo sapiens
attgacatcagaact

SEQ ID NO: 1899365 - DNA, 15 bp, Homo sapiens
ttgacatcagaactt

SEQ ID NO: 1899366 - DNA, 15 bp, Homo sapiens
tgacatcagaacttg

SEQ ID NO: 1899367 - DNA, 15 bp, Homo sapiens
gacatcagaacttgg

SEQ ID NO: 1899368 - DNA, 15 bp, Homo sapiens
acatcagaacttgga

SEQ ID NO: 1899369 - DNA, 15 bp, Homo sapiens
catcagaacttggag

SEQ ID NO: 1899370 - DNA, 15 bp, Homo sapiens
atcagaacttggaga

SEQ ID NO: 1899371 - DNA, 15 bp, Homo sapiens
tcagaacttggagaa

SEQ ID NO: 1899372 - DNA, 15 bp, Homo sapiens
cagaacttggagaaa

SEQ ID NO: 1899373 - DNA, 15 bp, Homo sapiens
agaacttggagaaaa

SEQ ID NO: 1899374 - DNA, 15 bp, Homo sapiens
gaacttggagaaaag

SEQ ID NO: 1899375 - DNA, 15 bp, Homo sapiens
aacttggagaaaaga

SEQ ID NO: 1899376 - DNA, 15 bp, Homo sapiens
acttggagaaaagaa

SEQ ID NO: 1899377 - DNA, 15 bp, Homo sapiens
cttggagaaaagaat

SEQ ID NO: 1899378 - DNA, 15 bp, Homo sapiens
ttggagaaaagaatc

SEQ ID NO: 1899379 - DNA, 15 bp, Homo sapiens
tggagaaaagaatca

SEQ ID NO: 1899380 - DNA, 15 bp, Homo sapiens
ggagaaaagaatcat

SEQ ID NO: 1899381 - DNA, 15 bp, Homo sapiens
gagaaaagaatcatt

SEQ ID NO: 1899382 - DNA, 15 bp, Homo sapiens
agaaaagaatcattt

SEQ ID NO: 1899383 - DNA, 15 bp, Homo sapiens
gaaaagaatcatttc

SEQ ID NO: 1899384 - DNA, 15 bp, Homo sapiens
aaaagaatcatttca

SEQ ID NO: 1899385 - DNA, 15 bp, Homo sapiens
aaagaatcatttcac

SEQ ID NO: 1899386 - DNA, 15 bp, Homo sapiens
aagaatcatttcact

SEQ ID NO: 1899387 - DNA, 15 bp, Homo sapiens
agaatcatttcactt

SEQ ID NO: 1899388 - DNA, 15 bp, Homo sapiens
gaatcatttcacttt

SEQ ID NO: 1899389 - DNA, 15 bp, Homo sapiens
aatcatttcacttta

SEQ ID NO: 1899390 - DNA, 15 bp, Homo sapiens
atcatttcactttat

SEQ ID NO: 1899391 - DNA, 15 bp, Homo sapiens
tcatttcactttata

SEQ ID NO: 1899392 - DNA, 15 bp, Homo sapiens
catttcactttataa

SEQ ID NO: 1899393 - DNA, 15 bp, Homo sapiens
atttcactttataat

SEQ ID NO: 1899394 - DNA, 15 bp, Homo sapiens
tttcactttataatg

SEQ ID NO: 1899395 - DNA, 15 bp, Homo sapiens
ttcactttataatgc

SEQ ID NO: 1899396 - DNA, 15 bp, Homo sapiens
tcactttataatgct

SEQ ID NO: 1899397 - DNA, 15 bp, Homo sapiens
cactttataatgctg

SEQ ID NO: 1899398 - DNA, 15 bp, Homo sapiens
actttataatgctgg

SEQ ID NO: 1899399 - DNA, 15 bp, Homo sapiens
ctttataatgctgga

SEQ ID NO: 1899400 - DNA, 15 bp, Homo sapiens
tttataatgctggaa

SEQ ID NO: 1899401 - DNA, 15 bp, Homo sapiens
ttataatgctggaat

SEQ ID NO: 1899402 - DNA, 15 bp, Homo sapiens
tataatgctggaatt

SEQ ID NO: 1899403 - DNA, 15 bp, Homo sapiens
ataatgctggaattt

SEQ ID NO: 1899404 - DNA, 15 bp, Homo sapiens
taatgctggaatttg

SEQ ID NO: 1899405 - DNA, 15 bp, Homo sapiens
aatgctggaatttga

SEQ ID NO: 1899406 - DNA, 15 bp, Homo sapiens
atgctggaatttgaa

SEQ ID NO: 1899407 - DNA, 15 bp, Homo sapiens
tgctggaatttgaaa

SEQ ID NO: 1899408 - DNA, 15 bp, Homo sapiens
gctggaatttgaaag

SEQ ID NO: 1899409 - DNA, 15 bp, Homo sapiens
ctggaatttgaaaga

SEQ ID NO: 1899410 - DNA, 15 bp, Homo sapiens
tggaatttgaaagat

SEQ ID NO: 1899411 - DNA, 15 bp, Homo sapiens
ggaatttgaaagata

SEQ ID NO: 1899412 - DNA, 15 bp, Homo sapiens
gaatttgaaagatat

SEQ ID NO: 1899413 - DNA, 15 bp, Homo sapiens
aatttgaaagatatg

SEQ ID NO: 1899414 - DNA, 15 bp, Homo sapiens
atttgaaagatatgg

SEQ ID NO: 1899415 - DNA, 15 bp, Homo sapiens
tttgaaagatatggc

SEQ ID NO: 1899416 - DNA, 15 bp, Homo sapiens
ttgaaagatatggca

SEQ ID NO: 1899417 - DNA, 15 bp, Homo sapiens
tgaaagatatggcat

SEQ ID NO: 1899418 - DNA, 15 bp, Homo sapiens
gaaagatatggcatt

SEQ ID NO: 1899419 - DNA, 15 bp, Homo sapiens
aaagatatggcatta

SEQ ID NO: 1899420 - DNA, 15 bp, Homo sapiens
aagatatggcattag

SEQ ID NO: 1899421 - DNA, 15 bp, Homo sapiens
agatatggcattaga

SEQ ID NO: 1899422 - DNA, 15 bp, Homo sapiens
gatatggcattagaa

SEQ ID NO: 1899423 - DNA, 15 bp, Homo sapiens
atatggcattagaaa

SEQ ID NO: 1899424 - DNA, 15 bp, Homo sapiens
tatggcattagaaat

SEQ ID NO: 1899425 - DNA, 15 bp, Homo sapiens
atggcattagaaatt

SEQ ID NO: 1899426 - DNA, 15 bp, Homo sapiens
tggcattagaaattg

SEQ ID NO: 1899427 - DNA, 15 bp, Homo sapiens
ggcattagaaattga

SEQ ID NO: 1899428 - DNA, 15 bp, Homo sapiens
gcattagaaattgac

SEQ ID NO: 1899429 - DNA, 15 bp, Homo sapiens
cattagaaattgaca

SEQ ID NO: 1899430 - DNA, 15 bp, Homo sapiens
attagaaattgacaa

SEQ ID NO: 1899431 - DNA, 15 bp, Homo sapiens
ttagaaattgacaaa

SEQ ID NO: 1899432 - DNA, 15 bp, Homo sapiens
tagaaattgacaaag

SEQ ID NO: 1899433 - DNA, 15 bp, Homo sapiens
agaaattgacaaagt

SEQ ID NO: 1899434 - DNA, 15 bp, Homo sapiens
gaaattgacaaagtc

SEQ ID NO: 1899435 - DNA, 15 bp, Homo sapiens
aaattgacaaagtct

SEQ ID NO: 1899436 - DNA, 15 bp, Homo sapiens
aattgacaaagtctt

SEQ ID NO: 1899437 - DNA, 15 bp, Homo sapiens
attgacaaagtcttt

SEQ ID NO: 1899438 - DNA, 15 bp, Homo sapiens
ttgacaaagtctttt

SEQ ID NO: 1899439 - DNA, 15 bp, Homo sapiens
tgacaaagtcttttt

SEQ ID NO: 1899440 - DNA, 15 bp, Homo sapiens
gacaaagtcttttta

SEQ ID NO: 1899441 - DNA, 15 bp, Homo sapiens
acaaagtctttttat

SEQ ID NO: 1899442 - DNA, 15 bp, Homo sapiens
agtctttttatgttt

SEQ ID NO: 1899443 - DNA, 15 bp, Homo sapiens
gtctttttatgttta

SEQ ID NO: 1899444 - DNA, 15 bp, Homo sapiens
tctttttatgtttaa

SEQ ID NO: 1899445 - DNA, 15 bp, Homo sapiens
ctttttatgtttaat

SEQ ID NO: 1899446 - DNA, 15 bp, Homo sapiens
tttttatgtttaatt

SEQ ID NO: 1899447 - DNA, 15 bp, Homo sapiens
ttttatgtttaattt

SEQ ID NO: 1899448 - DNA, 15 bp, Homo sapiens
tttatgtttaatttt

SEQ ID NO: 1899449 - DNA, 15 bp, Homo sapiens
ttatgtttaatttta

SEQ ID NO: 1899450 - DNA, 15 bp, Homo sapiens
tatgtttaattttat

SEQ ID NO: 1899451 - DNA, 15 bp, Homo sapiens
atgtttaattttatt

SEQ ID NO: 1899452 - DNA, 15 bp, Homo sapiens
tgtttaattttattt

SEQ ID NO: 1899453 - DNA, 15 bp, Homo sapiens
gtttaattttattta

SEQ ID NO: 1899454 - DNA, 15 bp, Homo sapiens
tttaattttatttaa

SEQ ID NO: 1899455 - DNA, 15 bp, Homo sapiens
ttaattttatttaaa

SEQ ID NO: 1899456 - DNA, 15 bp, Homo sapiens
taattttatttaaaa

SEQ ID NO: 1899457 - DNA, 15 bp, Homo sapiens
aattttatttaaaat

SEQ ID NO: 1899458 - DNA, 15 bp, Homo sapiens
attttatttaaaatc

SEQ ID NO: 1899459 - DNA, 15 bp, Homo sapiens
ttttatttaaaatct

SEQ ID NO: 1899460 - DNA, 15 bp, Homo sapiens
tttatttaaaatctc

SEQ ID NO: 1899461 - DNA, 15 bp, Homo sapiens
ttatttaaaatctcc

SEQ ID NO: 1899462 - DNA, 15 bp, Homo sapiens
tatttaaaatctcca

SEQ ID NO: 1899463 - DNA, 15 bp, Homo sapiens
atttaaaatctccat

SEQ ID NO: 1899464 - DNA, 15 bp, Homo sapiens
tttaaaatctccatc

SEQ ID NO: 1899465 - DNA, 15 bp, Homo sapiens
ttaaaatctccatct

SEQ ID NO: 1899466 - DNA, 15 bp, Homo sapiens
taaaatctccatctt

SEQ ID NO: 1899467 - DNA, 15 bp, Homo sapiens
aaaatctccatcttc

SEQ ID NO: 1899468 - DNA, 15 bp, Homo sapiens
aaatctccatcttcc

SEQ ID NO: 1899469 - DNA, 15 bp, Homo sapiens
aatctccatcttcca

SEQ ID NO: 1899470 - DNA, 15 bp, Homo sapiens
atctccatcttccag

SEQ ID NO: 1899471 - DNA, 15 bp, Homo sapiens
tctccatcttccagg

SEQ ID NO: 1899472 - DNA, 15 bp, Homo sapiens
ctccatcttccaggg

SEQ ID NO: 1899473 - DNA, 15 bp, Homo sapiens
tccatcttccaggga

SEQ ID NO: 1899474 - DNA, 15 bp, Homo sapiens
ccatcttccagggaa

SEQ ID NO: 1899475 - DNA, 15 bp, Homo sapiens
catcttccagggaaa

SEQ ID NO: 1899476 - DNA, 15 bp, Homo sapiens
atcttccagggaaaa

SEQ ID NO: 1899477 - DNA, 15 bp, Homo sapiens
tcttccagggaaaac

SEQ ID NO: 1899478 - DNA, 15 bp, Homo sapiens
cttccagggaaaaca

SEQ ID NO: 1899479 - DNA, 15 bp, Homo sapiens
ttccagggaaaacaa

SEQ ID NO: 1899480 - DNA, 15 bp, Homo sapiens
tccagggaaaacaac

SEQ ID NO: 1899481 - DNA, 15 bp, Homo sapiens
ccagggaaaacaacc

SEQ ID NO: 1899482 - DNA, 15 bp, Homo sapiens
cagggaaaacaacca

SEQ ID NO: 1899483 - DNA, 15 bp, Homo sapiens
agggaaaacaaccag

SEQ ID NO: 1899484 - DNA, 15 bp, Homo sapiens
gggaaaacaaccagg

SEQ ID NO: 1899485 - DNA, 15 bp, Homo sapiens
ggaaaacaaccaggt

SEQ ID NO: 1899486 - DNA, 15 bp, Homo sapiens
gaaaacaaccaggtt

SEQ ID NO: 1899487 - DNA, 15 bp, Homo sapiens
aaaacaaccaggttt

SEQ ID NO: 1899488 - DNA, 15 bp, Homo sapiens
aaacaaccaggtttc

SEQ ID NO: 1899489 - DNA, 15 bp, Homo sapiens
aacaaccaggtttca

SEQ ID NO: 1899490 - DNA, 15 bp, Homo sapiens
acaaccaggtttcaa

SEQ ID NO: 1899491 - DNA, 15 bp, Homo sapiens
caaccaggtttcaag

SEQ ID NO: 1899492 - DNA, 15 bp, Homo sapiens
aaccaggtttcaagt

SEQ ID NO: 1899493 - DNA, 15 bp, Homo sapiens
accaggtttcaagtg

SEQ ID NO: 1899494 - DNA, 15 bp, Homo sapiens
ccaggtttcaagtgt

SEQ ID NO: 1899495 - DNA, 15 bp, Homo sapiens
caggtttcaagtgtc

SEQ ID NO: 1899496 - DNA, 15 bp, Homo sapiens
aggtttcaagtgtca

SEQ ID NO: 1899497 - DNA, 15 bp, Homo sapiens
ggtttcaagtgtcat

SEQ ID NO: 1899498 - DNA, 15 bp, Homo sapiens
gtttcaagtgtcatt

SEQ ID NO: 1899499 - DNA, 15 bp, Homo sapiens
tttcaagtgtcattg

SEQ ID NO: 1899500 - DNA, 15 bp, Homo sapiens
ttcaagtgtcattgt

SEQ ID NO: 1899501 - DNA, 15 bp, Homo sapiens
tcaagtgtcattgta

SEQ ID NO: 1899502 - DNA, 15 bp, Homo sapiens
caagtgtcattgtaa

SEQ ID NO: 1899503 - DNA, 15 bp, Homo sapiens
aagtgtcattgtaaa

SEQ ID NO: 1899504 - DNA, 15 bp, Homo sapiens
agtgtcattgtaaaa

SEQ ID NO: 1899505 - DNA, 15 bp, Homo sapiens
gtgtcattgtaaaaa

SEQ ID NO: 1899506 - DNA, 15 bp, Homo sapiens
tgtcattgtaaaaat

SEQ ID NO: 1899507 - DNA, 15 bp, Homo sapiens
gtcattgtaaaaatt

SEQ ID NO: 1899508 - DNA, 15 bp, Homo sapiens
tcattgtaaaaattg

SEQ ID NO: 1899509 - DNA, 15 bp, Homo sapiens
cattgtaaaaattga

SEQ ID NO: 1899510 - DNA, 15 bp, Homo sapiens
attgtaaaaattgac

SEQ ID NO: 1899511 - DNA, 15 bp, Homo sapiens
ttgtaaaaattgaca

SEQ ID NO: 1899512 - DNA, 15 bp, Homo sapiens
tgtaaaaattgacat

SEQ ID NO: 1899513 - DNA, 15 bp, Homo sapiens
gtaaaaattgacatg

SEQ ID NO: 1899514 - DNA, 15 bp, Homo sapiens
taaaaattgacatgc

SEQ ID NO: 1899515 - DNA, 15 bp, Homo sapiens
aaaaattgacatgcc

SEQ ID NO: 1899516 - DNA, 15 bp, Homo sapiens
aaaattgacatgccc

SEQ ID NO: 1899517 - DNA, 15 bp, Homo sapiens
aaattgacatgccct

SEQ ID NO: 1899518 - DNA, 15 bp, Homo sapiens
aattgacatgcccta

SEQ ID NO: 1899519 - DNA, 15 bp, Homo sapiens
attgacatgccctat

SEQ ID NO: 1899520 - DNA, 15 bp, Homo sapiens
ttgacatgccctatg

SEQ ID NO: 1899521 - DNA, 15 bp, Homo sapiens
tgacatgccctatgt

SEQ ID NO: 1899522 - DNA, 15 bp, Homo sapiens
gacatgccctatgtt

SEQ ID NO: 1899523 - DNA, 15 bp, Homo sapiens
acatgccctatgttt

SEQ ID NO: 1899524 - DNA, 15 bp, Homo sapiens
catgccctatgtttg

SEQ ID NO: 1899525 - DNA, 15 bp, Homo sapiens
atgccctatgtttga

SEQ ID NO: 1899526 - DNA, 15 bp, Homo sapiens
tgccctatgtttgat

SEQ ID NO: 1899527 - DNA, 15 bp, Homo sapiens
gccctatgtttgatt

SEQ ID NO: 1899528 - DNA, 15 bp, Homo sapiens
ccctatgtttgattt

SEQ ID NO: 1899529 - DNA, 15 bp, Homo sapiens
cctatgtttgatttg

SEQ ID NO: 1899530 - DNA, 15 bp, Homo sapiens
ctatgtttgatttgc

SEQ ID NO: 1899531 - DNA, 15 bp, Homo sapiens
tatgtttgatttgct

SEQ ID NO: 1899532 - DNA, 15 bp, Homo sapiens
atgtttgatttgcta

SEQ ID NO: 1899533 - DNA, 15 bp, Homo sapiens
tgtttgatttgctat

SEQ ID NO: 1899534 - DNA, 15 bp, Homo sapiens
gtttgatttgctatg

SEQ ID NO: 1899535 - DNA, 15 bp, Homo sapiens
tttgatttgctatgt

SEQ ID NO: 1899536 - DNA, 15 bp, Homo sapiens
ttgatttgctatgta

SEQ ID NO: 1899537 - DNA, 15 bp, Homo sapiens
tgatttgctatgtaa

SEQ ID NO: 1899538 - DNA, 15 bp, Homo sapiens
gatttgctatgtaaa

SEQ ID NO: 1899539 - DNA, 15 bp, Homo sapiens
atttgctatgtaaat

SEQ ID NO: 1899540 - DNA, 15 bp, Homo sapiens
tttgctatgtaaatc

SEQ ID NO: 1899541 - DNA, 15 bp, Homo sapiens
ttgctatgtaaatca

SEQ ID NO: 1899542 - DNA, 15 bp, Homo sapiens
tgctatgtaaatcac

SEQ ID NO: 1899543 - DNA, 15 bp, Homo sapiens
gctatgtaaatcaca

SEQ ID NO: 1899544 - DNA, 15 bp, Homo sapiens
ctatgtaaatcacac

SEQ ID NO: 1899545 - DNA, 15 bp, Homo sapiens
tatgtaaatcacact

SEQ ID NO: 1899546 - DNA, 15 bp, Homo sapiens
atgtaaatcacactc

SEQ ID NO: 1899547 - DNA, 15 bp, Homo sapiens
tgtaaatcacactcc

SEQ ID NO: 1899548 - DNA, 15 bp, Homo sapiens
gtaaatcacactccc

SEQ ID NO: 1899549 - DNA, 15 bp, Homo sapiens
taaatcacactccca

SEQ ID NO: 1899550 - DNA, 15 bp, Homo sapiens
aaatcacactcccaa

SEQ ID NO: 1899551 - DNA, 15 bp, Homo sapiens
aatcacactcccaaa

SEQ ID NO: 1899552 - DNA, 15 bp, Homo sapiens
atcacactcccaaac

SEQ ID NO: 1899553 - DNA, 15 bp, Homo sapiens
tcacactcccaaaca

SEQ ID NO: 1899554 - DNA, 15 bp, Homo sapiens
cacactcccaaacaa

SEQ ID NO: 1899555 - DNA, 15 bp, Homo sapiens
acactcccaaacaaa

SEQ ID NO: 1899556 - DNA, 15 bp, Homo sapiens
cactcccaaacaaac

SEQ ID NO: 1899557 - DNA, 15 bp, Homo sapiens
actcccaaacaaaca

SEQ ID NO: 1899558 - DNA, 15 bp, Homo sapiens
ctcccaaacaaacat

SEQ ID NO: 1899559 - DNA, 15 bp, Homo sapiens
tcccaaacaaacatt

SEQ ID NO: 1899560 - DNA, 15 bp, Homo sapiens
cccaaacaaacattt

SEQ ID NO: 1899561 - DNA, 15 bp, Homo sapiens
ccaaacaaacatttt

SEQ ID NO: 1899562 - DNA, 15 bp, Homo sapiens
caaacaaacattttc

SEQ ID NO: 1899563 - DNA, 15 bp, Homo sapiens
aaacaaacattttct

SEQ ID NO: 1899564 - DNA, 15 bp, Homo sapiens
aacaaacattttctg

SEQ ID NO: 1899565 - DNA, 15 bp, Homo sapiens
acaaacattttctga

SEQ ID NO: 1899566 - DNA, 15 bp, Homo sapiens
caaacattttctgac

SEQ ID NO: 1899567 - DNA, 15 bp, Homo sapiens
aaacattttctgaca

SEQ ID NO: 1899568 - DNA, 15 bp, Homo sapiens
aacattttctgacag

SEQ ID NO: 1899569 - DNA, 15 bp, Homo sapiens
acattttctgacagt

SEQ ID NO: 1899570 - DNA, 15 bp, Homo sapiens
cattttctgacagtt

SEQ ID NO: 1899571 - DNA, 15 bp, Homo sapiens
attttctgacagttc

SEQ ID NO: 1899572 - DNA, 15 bp, Homo sapiens
ttttctgacagttca

SEQ ID NO: 1899573 - DNA, 15 bp, Homo sapiens
tttctgacagttcaa

SEQ ID NO: 1899574 - DNA, 15 bp, Homo sapiens
ttctgacagttcaaa

SEQ ID NO: 1899575 - DNA, 15 bp, Homo sapiens
tctgacagttcaaac

SEQ ID NO: 1899576 - DNA, 15 bp, Homo sapiens
ctgacagttcaaact

SEQ ID NO: 1899577 - DNA, 15 bp, Homo sapiens
tgacagttcaaactc

SEQ ID NO: 1899578 - DNA, 15 bp, Homo sapiens
gacagttcaaactca

SEQ ID NO: 1899579 - DNA, 15 bp, Homo sapiens
acagttcaaactcat

SEQ ID NO: 1899580 - DNA, 15 bp, Homo sapiens
cagttcaaactcatc

SEQ ID NO: 1899581 - DNA, 15 bp, Homo sapiens
agttcaaactcatcg

SEQ ID NO: 1899582 - DNA, 15 bp, Homo sapiens
gttcaaactcatcgt

SEQ ID NO: 1899583 - DNA, 15 bp, Homo sapiens
ttcaaactcatcgtg

SEQ ID NO: 1899584 - DNA, 15 bp, Homo sapiens
tcaaactcatcgtgg

SEQ ID NO: 1899585 - DNA, 15 bp, Homo sapiens
caaactcatcgtggc

SEQ ID NO: 1899586 - DNA, 15 bp, Homo sapiens
aaactcatcgtggca

SEQ ID NO: 1899587 - DNA, 15 bp, Homo sapiens
aactcatcgtggcag

SEQ ID NO: 1899588 - DNA, 15 bp, Homo sapiens
actcatcgtggcagc

SEQ ID NO: 1899589 - DNA, 15 bp, Homo sapiens
ctcatcgtggcagct

SEQ ID NO: 1899590 - DNA, 15 bp, Homo sapiens
tcatcgtggcagctc

SEQ ID NO: 1899591 - DNA, 15 bp, Homo sapiens
catcgtggcagctcc

SEQ ID NO: 1899592 - DNA, 15 bp, Homo sapiens
atcgtggcagctccc

SEQ ID NO: 1899593 - DNA, 15 bp, Homo sapiens
tcgtggcagctccca

SEQ ID NO: 1899594 - DNA, 15 bp, Homo sapiens
cgtggcagctcccaa

SEQ ID NO: 1899595 - DNA, 15 bp, Homo sapiens
gtggcagctcccaag

SEQ ID NO: 1899596 - DNA, 15 bp, Homo sapiens
tggcagctcccaagc

SEQ ID NO: 1899597 - DNA, 15 bp, Homo sapiens
ggcagctcccaagca

SEQ ID NO: 1899598 - DNA, 15 bp, Homo sapiens
gcagctcccaagcag

SEQ ID NO: 1899599 - DNA, 15 bp, Homo sapiens
cagctcccaagcaga

SEQ ID NO: 1899600 - DNA, 15 bp, Homo sapiens
agctcccaagcagag

SEQ ID NO: 1899601 - DNA, 15 bp, Homo sapiens
gctcccaagcagaga

SEQ ID NO: 1899602 - DNA, 15 bp, Homo sapiens
ctcccaagcagagag

SEQ ID NO: 1899603 - DNA, 15 bp, Homo sapiens
tcccaagcagagagg

SEQ ID NO: 1899604 - DNA, 15 bp, Homo sapiens
cccaagcagagaggt

SEQ ID NO: 1899605 - DNA, 15 bp, Homo sapiens
ccaagcagagaggtc

SEQ ID NO: 1899606 - DNA, 15 bp, Homo sapiens
caagcagagaggtca

SEQ ID NO: 1899607 - DNA, 15 bp, Homo sapiens
aagcagagaggtcaa

SEQ ID NO: 1899608 - DNA, 15 bp, Homo sapiens
agcagagaggtcaac

SEQ ID NO: 1899609 - DNA, 15 bp, Homo sapiens
gcagagaggtcaact

SEQ ID NO: 1899610 - DNA, 15 bp, Homo sapiens
cagagaggtcaacta

SEQ ID NO: 1899611 - DNA, 15 bp, Homo sapiens
agagaggtcaactaa

SEQ ID NO: 1899612 - DNA, 15 bp, Homo sapiens
gagaggtcaactaat

SEQ ID NO: 1899613 - DNA, 15 bp, Homo sapiens
agaggtcaactaata

SEQ ID NO: 1899614 - DNA, 15 bp, Homo sapiens
gaggtcaactaataa

SEQ ID NO: 1899615 - DNA, 15 bp, Homo sapiens
aggtcaactaataag

SEQ ID NO: 1899616 - DNA, 15 bp, Homo sapiens
ggtcaactaataaga

SEQ ID NO: 1899617 - DNA, 15 bp, Homo sapiens
gtcaactaataagag

SEQ ID NO: 1899618 - DNA, 15 bp, Homo sapiens
tcaactaataagaga

SEQ ID NO: 1899619 - DNA, 15 bp, Homo sapiens
caactaataagagat

SEQ ID NO: 1899620 - DNA, 15 bp, Homo sapiens
aactaataagagata

SEQ ID NO: 1899621 - DNA, 15 bp, Homo sapiens
actaataagagatag

SEQ ID NO: 1899622 - DNA, 15 bp, Homo sapiens
ctaataagagatagt

SEQ ID NO: 1899623 - DNA, 15 bp, Homo sapiens
taataagagatagtc

SEQ ID NO: 1899624 - DNA, 15 bp, Homo sapiens
aataagagatagtct

SEQ ID NO: 1899625 - DNA, 15 bp, Homo sapiens
ataagagatagtctc

SEQ ID NO: 1899626 - DNA, 15 bp, Homo sapiens
taagagatagtctct

SEQ ID NO: 1899627 - DNA, 15 bp, Homo sapiens
aagagatagtctctt

SEQ ID NO: 1899628 - DNA, 15 bp, Homo sapiens
agagatagtctcttc

SEQ ID NO: 1899629 - DNA, 15 bp, Homo sapiens
gagatagtctcttcc

SEQ ID NO: 1899630 - DNA, 15 bp, Homo sapiens
agatagtctcttccc

SEQ ID NO: 1899631 - DNA, 15 bp, Homo sapiens
gatagtctcttccct

SEQ ID NO: 1899632 - DNA, 15 bp, Homo sapiens
atagtctcttccctt

SEQ ID NO: 1899633 - DNA, 15 bp, Homo sapiens
tagtctcttcccttt

SEQ ID NO: 1899634 - DNA, 15 bp, Homo sapiens
agtctcttccctttt

SEQ ID NO: 1899635 - DNA, 15 bp, Homo sapiens
gtctcttcccttttt

SEQ ID NO: 1899636 - DNA, 15 bp, Homo sapiens
tctcttccctttttt

SEQ ID NO: 1899637 - DNA, 15 bp, Homo sapiens
ctcttccctttttta

SEQ ID NO: 1899638 - DNA, 15 bp, Homo sapiens
tcttcccttttttat

SEQ ID NO: 1899639 - DNA, 15 bp, Homo sapiens
cttcccttttttatg

SEQ ID NO: 1899640 - DNA, 15 bp, Homo sapiens
ttcccttttttatgc

SEQ ID NO: 1899641 - DNA, 15 bp, Homo sapiens
tcccttttttatgct

SEQ ID NO: 1899642 - DNA, 15 bp, Homo sapiens
cccttttttatgcta

SEQ ID NO: 1899643 - DNA, 15 bp, Homo sapiens
ccttttttatgctag

SEQ ID NO: 1899644 - DNA, 15 bp, Homo sapiens
cttttttatgctagc

SEQ ID NO: 1899645 - DNA, 15 bp, Homo sapiens
ttttttatgctagct

SEQ ID NO: 1899646 - DNA, 15 bp, Homo sapiens
tttttatgctagctg

SEQ ID NO: 1899647 - DNA, 15 bp, Homo sapiens
ttttatgctagctgt

SEQ ID NO: 1899648 - DNA, 15 bp, Homo sapiens
tttatgctagctgta

SEQ ID NO: 1899649 - DNA, 15 bp, Homo sapiens
ttatgctagctgtaa

SEQ ID NO: 1899650 - DNA, 15 bp, Homo sapiens
tatgctagctgtaaa

SEQ ID NO: 1899651 - DNA, 15 bp, Homo sapiens
atgctagctgtaaaa

SEQ ID NO: 1899652 - DNA, 15 bp, Homo sapiens
tgctagctgtaaaat

SEQ ID NO: 1899653 - DNA, 15 bp, Homo sapiens
gctagctgtaaaata

SEQ ID NO: 1899654 - DNA, 15 bp, Homo sapiens
ctagctgtaaaatat

SEQ ID NO: 1899655 - DNA, 15 bp, Homo sapiens
tagctgtaaaatatt

SEQ ID NO: 1899656 - DNA, 15 bp, Homo sapiens
agctgtaaaatattc

SEQ ID NO: 1899657 - DNA, 15 bp, Homo sapiens
gctgtaaaatattct

SEQ ID NO: 1899658 - DNA, 15 bp, Homo sapiens
ctgtaaaatattctg

SEQ ID NO: 1899659 - DNA, 15 bp, Homo sapiens
tgtaaaatattctgg

SEQ ID NO: 1899660 - DNA, 15 bp, Homo sapiens
gtaaaatattctggg

SEQ ID NO: 1899661 - DNA, 15 bp, Homo sapiens
taaaatattctgggt

SEQ ID NO: 1899662 - DNA, 15 bp, Homo sapiens
aaaatattctgggta

SEQ ID NO: 1899663 - DNA, 15 bp, Homo sapiens
aaatattctgggtat

SEQ ID NO: 1899664 - DNA, 15 bp, Homo sapiens
aatattctgggtatc

SEQ ID NO: 1899665 - DNA, 15 bp, Homo sapiens
atattctgggtatca

SEQ ID NO: 1899666 - DNA, 15 bp, Homo sapiens
tattctgggtatcac

SEQ ID NO: 1899667 - DNA, 15 bp, Homo sapiens
attctgggtatcacc

SEQ ID NO: 1899668 - DNA, 15 bp, Homo sapiens
ttctgggtatcaccc

SEQ ID NO: 1899669 - DNA, 15 bp, Homo sapiens
tctgggtatcacccc

SEQ ID NO: 1899670 - DNA, 15 bp, Homo sapiens
ctgggtatcacccct

SEQ ID NO: 1899671 - DNA, 15 bp, Homo sapiens
tgggtatcacccctg

SEQ ID NO: 1899672 - DNA, 15 bp, Homo sapiens
gggtatcacccctgc

SEQ ID NO: 1899673 - DNA, 15 bp, Homo sapiens
ggtatcacccctgca

SEQ ID NO: 1899674 - DNA, 15 bp, Homo sapiens
gtatcacccctgcat

SEQ ID NO: 1899675 - DNA, 15 bp, Homo sapiens
tatcacccctgcata

SEQ ID NO: 1899676 - DNA, 15 bp, Homo sapiens
atcacccctgcatac

SEQ ID NO: 1899677 - DNA, 15 bp, Homo sapiens
tcacccctgcataca

SEQ ID NO: 1899678 - DNA, 15 bp, Homo sapiens
cacccctgcatacat

SEQ ID NO: 1899679 - DNA, 15 bp, Homo sapiens
acccctgcatacatt

SEQ ID NO: 1899680 - DNA, 15 bp, Homo sapiens
cccctgcatacattc

SEQ ID NO: 1899681 - DNA, 15 bp, Homo sapiens
ccctgcatacattcc

SEQ ID NO: 1899682 - DNA, 15 bp, Homo sapiens
cctgcatacattcca

SEQ ID NO: 1899683 - DNA, 15 bp, Homo sapiens
ctgcatacattccaa

SEQ ID NO: 1899684 - DNA, 15 bp, Homo sapiens
tgcatacattccaaa

SEQ ID NO: 1899685 - DNA, 15 bp, Homo sapiens
gcatacattccaaac

SEQ ID NO: 1899686 - DNA, 15 bp, Homo sapiens
catacattccaaacc

SEQ ID NO: 1899687 - DNA, 15 bp, Homo sapiens
atacattccaaacct

SEQ ID NO: 1899688 - DNA, 15 bp, Homo sapiens
tacattccaaaccta

SEQ ID NO: 1899689 - DNA, 15 bp, Homo sapiens
acattccaaacctag

SEQ ID NO: 1899690 - DNA, 15 bp, Homo sapiens
cattccaaacctaga

SEQ ID NO: 1899691 - DNA, 15 bp, Homo sapiens
attccaaacctagaa

SEQ ID NO: 1899692 - DNA, 15 bp, Homo sapiens
ttccaaacctagaag

SEQ ID NO: 1899693 - DNA, 15 bp, Homo sapiens
tccaaacctagaagc

SEQ ID NO: 1899694 - DNA, 15 bp, Homo sapiens
ccaaacctagaagca

SEQ ID NO: 1899695 - DNA, 15 bp, Homo sapiens
caaacctagaagcat

SEQ ID NO: 1899696 - DNA, 15 bp, Homo sapiens
aaacctagaagcata

SEQ ID NO: 1899697 - DNA, 15 bp, Homo sapiens
aacctagaagcatac

SEQ ID NO: 1899698 - DNA, 15 bp, Homo sapiens
acctagaagcatact

SEQ ID NO: 1899699 - DNA, 15 bp, Homo sapiens
cctagaagcatacta

SEQ ID NO: 1899700 - DNA, 15 bp, Homo sapiens
ctagaagcatactat

SEQ ID NO: 1899701 - DNA, 15 bp, Homo sapiens
tagaagcatactatg

SEQ ID NO: 1899702 - DNA, 15 bp, Homo sapiens
agaagcatactatgt

SEQ ID NO: 1899703 - DNA, 15 bp, Homo sapiens
gaagcatactatgtg

SEQ ID NO: 1899704 - DNA, 15 bp, Homo sapiens
aagcatactatgtgt

SEQ ID NO: 1899705 - DNA, 15 bp, Homo sapiens
agcatactatgtgtt

SEQ ID NO: 1899706 - DNA, 15 bp, Homo sapiens
gcatactatgtgttt

SEQ ID NO: 1899707 - DNA, 15 bp, Homo sapiens
catactatgtgtttc

SEQ ID NO: 1899708 - DNA, 15 bp, Homo sapiens
atactatgtgtttca

SEQ ID NO: 1899709 - DNA, 15 bp, Homo sapiens
tactatgtgtttcaa

SEQ ID NO: 1899710 - DNA, 15 bp, Homo sapiens
actatgtgtttcaaa

SEQ ID NO: 1899711 - DNA, 15 bp, Homo sapiens
ctatgtgtttcaaat

SEQ ID NO: 1899712 - DNA, 15 bp, Homo sapiens
tatgtgtttcaaatt

SEQ ID NO: 1899713 - DNA, 15 bp, Homo sapiens
atgtgtttcaaattt

SEQ ID NO: 1899714 - DNA, 15 bp, Homo sapiens
tgtgtttcaaattta

SEQ ID NO: 1899715 - DNA, 15 bp, Homo sapiens
gtgtttcaaatttat

SEQ ID NO: 1899716 - DNA, 15 bp, Homo sapiens
tgtttcaaatttatc

SEQ ID NO: 1899717 - DNA, 15 bp, Homo sapiens
gtttcaaatttatct

SEQ ID NO: 1899718 - DNA, 15 bp, Homo sapiens
tttcaaatttatcta

SEQ ID NO: 1899719 - DNA, 15 bp, Homo sapiens
ttcaaatttatctag

SEQ ID NO: 1899720 - DNA, 15 bp, Homo sapiens
tcaaatttatctaga

SEQ ID NO: 1899721 - DNA, 15 bp, Homo sapiens
caaatttatctagac

SEQ ID NO: 1899722 - DNA, 15 bp, Homo sapiens
aaatttatctagact

SEQ ID NO: 1899723 - DNA, 15 bp, Homo sapiens
aatttatctagactt

SEQ ID NO: 1899724 - DNA, 15 bp, Homo sapiens
atttatctagactta

SEQ ID NO: 1899725 - DNA, 15 bp, Homo sapiens
tttatctagacttag

SEQ ID NO: 1899726 - DNA, 15 bp, Homo sapiens
ttatctagacttaga

SEQ ID NO: 1899727 - DNA, 15 bp, Homo sapiens
tatctagacttagat

SEQ ID NO: 1899728 - DNA, 15 bp, Homo sapiens
atctagacttagata

SEQ ID NO: 1899729 - DNA, 15 bp, Homo sapiens
tctagacttagatat

SEQ ID NO: 1899730 - DNA, 15 bp, Homo sapiens
ctagacttagatatc

SEQ ID NO: 1899731 - DNA, 15 bp, Homo sapiens
tagacttagatatct

SEQ ID NO: 1899732 - DNA, 15 bp, Homo sapiens
agacttagatatctg

SEQ ID NO: 1899733 - DNA, 15 bp, Homo sapiens
gacttagatatctgt

SEQ ID NO: 1899734 - DNA, 15 bp, Homo sapiens
acttagatatctgtc

SEQ ID NO: 1899735 - DNA, 15 bp, Homo sapiens
cttagatatctgtct

SEQ ID NO: 1899736 - DNA, 15 bp, Homo sapiens
ttagatatctgtcta

SEQ ID NO: 1899737 - DNA, 15 bp, Homo sapiens
tagatatctgtctag

SEQ ID NO: 1899738 - DNA, 15 bp, Homo sapiens
agatatctgtctaga

SEQ ID NO: 1899739 - DNA, 15 bp, Homo sapiens
gatatctgtctagat

SEQ ID NO: 1899740 - DNA, 15 bp, Homo sapiens
atatctgtctagata

SEQ ID NO: 1899741 - DNA, 15 bp, Homo sapiens
tatctgtctagatat

SEQ ID NO: 1899742 - DNA, 15 bp, Homo sapiens
atctgtctagatatg

SEQ ID NO: 1899743 - DNA, 15 bp, Homo sapiens
tctgtctagatatgg

SEQ ID NO: 1899744 - DNA, 15 bp, Homo sapiens
ctgtctagatatggt

SEQ ID NO: 1899745 - DNA, 15 bp, Homo sapiens
tgtctagatatggta

SEQ ID NO: 1899746 - DNA, 15 bp, Homo sapiens
gtctagatatggtag

SEQ ID NO: 1899747 - DNA, 15 bp, Homo sapiens
tctagatatggtagt

SEQ ID NO: 1899748 - DNA, 15 bp, Homo sapiens
ctagatatggtagtc

SEQ ID NO: 1899749 - DNA, 15 bp, Homo sapiens
tagatatggtagtca

SEQ ID NO: 1899750 - DNA, 15 bp, Homo sapiens
agatatggtagtcat

SEQ ID NO: 1899751 - DNA, 15 bp, Homo sapiens
gatatggtagtcatt

SEQ ID NO: 1899752 - DNA, 15 bp, Homo sapiens
atatggtagtcatta

SEQ ID NO: 1899753 - DNA, 15 bp, Homo sapiens
tatggtagtcattag

SEQ ID NO: 1899754 - DNA, 15 bp, Homo sapiens
atggtagtcattagc

SEQ ID NO: 1899755 - DNA, 15 bp, Homo sapiens
tggtagtcattagcc

SEQ ID NO: 1899756 - DNA, 15 bp, Homo sapiens
ggtagtcattagcca

SEQ ID NO: 1899757 - DNA, 15 bp, Homo sapiens
gtagtcattagccaa

SEQ ID NO: 1899758 - DNA, 15 bp, Homo sapiens
tagtcattagccaaa

SEQ ID NO: 1899759 - DNA, 15 bp, Homo sapiens
agtcattagccaaac

SEQ ID NO: 1899760 - DNA, 15 bp, Homo sapiens
gtcattagccaaaca

SEQ ID NO: 1899761 - DNA, 15 bp, Homo sapiens
tcattagccaaacaa

SEQ ID NO: 1899762 - DNA, 15 bp, Homo sapiens
cattagccaaacaag

SEQ ID NO: 1899763 - DNA, 15 bp, Homo sapiens
attagccaaacaagg

SEQ ID NO: 1899764 - DNA, 15 bp, Homo sapiens
ttagccaaacaaggc

SEQ ID NO: 1899765 - DNA, 15 bp, Homo sapiens
tagccaaacaaggct

SEQ ID NO: 1899766 - DNA, 15 bp, Homo sapiens
agccaaacaaggcta

SEQ ID NO: 1899767 - DNA, 15 bp, Homo sapiens
gccaaacaaggctaa

SEQ ID NO: 1899768 - DNA, 15 bp, Homo sapiens
ccaaacaaggctaaa

SEQ ID NO: 1899769 - DNA, 15 bp, Homo sapiens
caaacaaggctaaat

SEQ ID NO: 1899770 - DNA, 15 bp, Homo sapiens
aaacaaggctaaatt

SEQ ID NO: 1899771 - DNA, 15 bp, Homo sapiens
aacaaggctaaatta

SEQ ID NO: 1899772 - DNA, 15 bp, Homo sapiens
acaaggctaaattaa

SEQ ID NO: 1899773 - DNA, 15 bp, Homo sapiens
caaggctaaattaat

SEQ ID NO: 1899774 - DNA, 15 bp, Homo sapiens
aaggctaaattaatt

SEQ ID NO: 1899775 - DNA, 15 bp, Homo sapiens
aggctaaattaatta

SEQ ID NO: 1899776 - DNA, 15 bp, Homo sapiens
ggctaaattaattaa

SEQ ID NO: 1899777 - DNA, 15 bp, Homo sapiens
gctaaattaattaaa

SEQ ID NO: 1899778 - DNA, 15 bp, Homo sapiens
ctaaattaattaaat

SEQ ID NO: 1899779 - DNA, 15 bp, Homo sapiens
taaattaattaaatc

SEQ ID NO: 1899780 - DNA, 15 bp, Homo sapiens
aaattaattaaatcc

SEQ ID NO: 1899781 - DNA, 15 bp, Homo sapiens
aattaattaaatcca

SEQ ID NO: 1899782 - DNA, 15 bp, Homo sapiens
attaattaaatccaa

SEQ ID NO: 1899783 - DNA, 15 bp, Homo sapiens
ttaattaaatccaac

SEQ ID NO: 1899784 - DNA, 15 bp, Homo sapiens
taattaaatccaaca

SEQ ID NO: 1899785 - DNA, 15 bp, Homo sapiens
aattaaatccaacaa

SEQ ID NO: 1899786 - DNA, 15 bp, Homo sapiens
attaaatccaacaaa

SEQ ID NO: 1899787 - DNA, 15 bp, Homo sapiens
ttaaatccaacaaaa

SEQ ID NO: 1899788 - DNA, 15 bp, Homo sapiens
taaatccaacaaaat

SEQ ID NO: 1899789 - DNA, 15 bp, Homo sapiens
aaatccaacaaaatt

SEQ ID NO: 1899790 - DNA, 15 bp, Homo sapiens
aatccaacaaaatta

SEQ ID NO: 1899791 - DNA, 15 bp, Homo sapiens
atccaacaaaattaa

SEQ ID NO: 1899792 - DNA, 15 bp, Homo sapiens
tccaacaaaattaag

SEQ ID NO: 1899793 - DNA, 15 bp, Homo sapiens
ccaacaaaattaaga

SEQ ID NO: 1899794 - DNA, 15 bp, Homo sapiens
caacaaaattaagaa

SEQ ID NO: 1899795 - DNA, 15 bp, Homo sapiens
aacaaaattaagaat

SEQ ID NO: 1899796 - DNA, 15 bp, Homo sapiens
acaaaattaagaatt

SEQ ID NO: 1899797 - DNA, 15 bp, Homo sapiens
caaaattaagaattc

SEQ ID NO: 1899798 - DNA, 15 bp, Homo sapiens
aaaattaagaattcc

SEQ ID NO: 1899799 - DNA, 15 bp, Homo sapiens
aaattaagaattcca

SEQ ID NO: 1899800 - DNA, 15 bp, Homo sapiens
aattaagaattccat

SEQ ID NO: 1899801 - DNA, 15 bp, Homo sapiens
attaagaattccata

SEQ ID NO: 1899802 - DNA, 15 bp, Homo sapiens
ttaagaattccatat

SEQ ID NO: 1899803 - DNA, 15 bp, Homo sapiens
taagaattccatatt

SEQ ID NO: 1899804 - DNA, 15 bp, Homo sapiens
aagaattccatattc

SEQ ID NO: 1899805 - DNA, 15 bp, Homo sapiens
agaattccatattcc

SEQ ID NO: 1899806 - DNA, 15 bp, Homo sapiens
gaattccatattcct

SEQ ID NO: 1899807 - DNA, 15 bp, Homo sapiens
aattccatattcctg

SEQ ID NO: 1899808 - DNA, 15 bp, Homo sapiens
attccatattcctgt

SEQ ID NO: 1899809 - DNA, 15 bp, Homo sapiens
ttccatattcctgtc

SEQ ID NO: 1899810 - DNA, 15 bp, Homo sapiens
tccatattcctgtct

SEQ ID NO: 1899811 - DNA, 15 bp, Homo sapiens
ccatattcctgtctc

SEQ ID NO: 1899812 - DNA, 15 bp, Homo sapiens
catattcctgtctca

SEQ ID NO: 1899813 - DNA, 15 bp, Homo sapiens
atattcctgtctcac

SEQ ID NO: 1899814 - DNA, 15 bp, Homo sapiens
tattcctgtctcact

SEQ ID NO: 1899815 - DNA, 15 bp, Homo sapiens
attcctgtctcacta

SEQ ID NO: 1899816 - DNA, 15 bp, Homo sapiens
ttcctgtctcactag

SEQ ID NO: 1899817 - DNA, 15 bp, Homo sapiens
tcctgtctcactagc

SEQ ID NO: 1899818 - DNA, 15 bp, Homo sapiens
cctgtctcactagcc

SEQ ID NO: 1899819 - DNA, 15 bp, Homo sapiens
ctgtctcactagcca

SEQ ID NO: 1899820 - DNA, 15 bp, Homo sapiens
tgtctcactagccat

SEQ ID NO: 1899821 - DNA, 15 bp, Homo sapiens
gtctcactagccata

SEQ ID NO: 1899822 - DNA, 15 bp, Homo sapiens
tctcactagccatat

SEQ ID NO: 1899823 - DNA, 15 bp, Homo sapiens
ctcactagccatatt

SEQ ID NO: 1899824 - DNA, 15 bp, Homo sapiens
tcactagccatattt

SEQ ID NO: 1899825 - DNA, 15 bp, Homo sapiens
cactagccatatttc

SEQ ID NO: 1899826 - DNA, 15 bp, Homo sapiens
actagccatatttca

SEQ ID NO: 1899827 - DNA, 15 bp, Homo sapiens
ctagccatatttcaa

SEQ ID NO: 1899828 - DNA, 15 bp, Homo sapiens
tagccatatttcaag

SEQ ID NO: 1899829 - DNA, 15 bp, Homo sapiens
agccatatttcaagt

SEQ ID NO: 1899830 - DNA, 15 bp, Homo sapiens
gccatatttcaagtg

SEQ ID NO: 1899831 - DNA, 15 bp, Homo sapiens
ccatatttcaagtgt

SEQ ID NO: 1899832 - DNA, 15 bp, Homo sapiens
catatttcaagtgtt

SEQ ID NO: 1899833 - DNA, 15 bp, Homo sapiens
atatttcaagtgttc

SEQ ID NO: 1899834 - DNA, 15 bp, Homo sapiens
tatttcaagtgttcc

SEQ ID NO: 1899835 - DNA, 15 bp, Homo sapiens
atttcaagtgttcca

SEQ ID NO: 1899836 - DNA, 15 bp, Homo sapiens
tttcaagtgttccat

SEQ ID NO: 1899837 - DNA, 15 bp, Homo sapiens
ttcaagtgttccatt

SEQ ID NO: 1899838 - DNA, 15 bp, Homo sapiens
tcaagtgttccattg

SEQ ID NO: 1899839 - DNA, 15 bp, Homo sapiens
caagtgttccattgt

SEQ ID NO: 1899840 - DNA, 15 bp, Homo sapiens
aagtgttccattgtc

SEQ ID NO: 1899841 - DNA, 15 bp, Homo sapiens
agtgttccattgtca

SEQ ID NO: 1899842 - DNA, 15 bp, Homo sapiens
gtgttccattgtcat

SEQ ID NO: 1899843 - DNA, 15 bp, Homo sapiens
tgttccattgtcata

SEQ ID NO: 1899844 - DNA, 15 bp, Homo sapiens
gttccattgtcatat

SEQ ID NO: 1899845 - DNA, 15 bp, Homo sapiens
ttccattgtcatatg

SEQ ID NO: 1899846 - DNA, 15 bp, Homo sapiens
tccattgtcatatgg

SEQ ID NO: 1899847 - DNA, 15 bp, Homo sapiens
ccattgtcatatggg

SEQ ID NO: 1899848 - DNA, 15 bp, Homo sapiens
cattgtcatatgggg

SEQ ID NO: 1899849 - DNA, 15 bp, Homo sapiens
attgtcatatggggc

SEQ ID NO: 1899850 - DNA, 15 bp, Homo sapiens
ttgtcatatggggct

SEQ ID NO: 1899851 - DNA, 15 bp, Homo sapiens
tgtcatatggggcta

SEQ ID NO: 1899852 - DNA, 15 bp, Homo sapiens
gtcatatggggctag

SEQ ID NO: 1899853 - DNA, 15 bp, Homo sapiens
tcatatggggctagt

SEQ ID NO: 1899854 - DNA, 15 bp, Homo sapiens
catatggggctagtg

SEQ ID NO: 1899855 - DNA, 15 bp, Homo sapiens
atatggggctagtgg

SEQ ID NO: 1899856 - DNA, 15 bp, Homo sapiens
tatggggctagtggc

SEQ ID NO: 1899857 - DNA, 15 bp, Homo sapiens
atggggctagtggct

SEQ ID NO: 1899858 - DNA, 15 bp, Homo sapiens
tggggctagtggcta

SEQ ID NO: 1899859 - DNA, 15 bp, Homo sapiens
ggggctagtggctat

SEQ ID NO: 1899860 - DNA, 15 bp, Homo sapiens
gggctagtggctatt

SEQ ID NO: 1899861 - DNA, 15 bp, Homo sapiens
ggctagtggctattg

SEQ ID NO: 1899862 - DNA, 15 bp, Homo sapiens
gctagtggctattgt

SEQ ID NO: 1899863 - DNA, 15 bp, Homo sapiens
ctagtggctattgta

SEQ ID NO: 1899864 - DNA, 15 bp, Homo sapiens
tagtggctattgtat

SEQ ID NO: 1899865 - DNA, 15 bp, Homo sapiens
agtggctattgtatt

SEQ ID NO: 1899866 - DNA, 15 bp, Homo sapiens
gtggctattgtattt

SEQ ID NO: 1899867 - DNA, 15 bp, Homo sapiens
tggctattgtattta

SEQ ID NO: 1899868 - DNA, 15 bp, Homo sapiens
ggctattgtatttat

SEQ ID NO: 1899869 - DNA, 15 bp, Homo sapiens
gctattgtatttatt

SEQ ID NO: 1899870 - DNA, 15 bp, Homo sapiens
ctattgtatttattg

SEQ ID NO: 1899871 - DNA, 15 bp, Homo sapiens
tattgtatttattgg

SEQ ID NO: 1899872 - DNA, 15 bp, Homo sapiens
attgtatttattggc

SEQ ID NO: 1899873 - DNA, 15 bp, Homo sapiens
ttgtatttattggca

SEQ ID NO: 1899874 - DNA, 15 bp, Homo sapiens
tgtatttattggcac

SEQ ID NO: 1899875 - DNA, 15 bp, Homo sapiens
gtatttattggcaca

SEQ ID NO: 1899876 - DNA, 15 bp, Homo sapiens
tatttattggcacat

SEQ ID NO: 1899877 - DNA, 15 bp, Homo sapiens
atttattggcacatg

SEQ ID NO: 1899878 - DNA, 15 bp, Homo sapiens
tttattggcacatgg

SEQ ID NO: 1899879 - DNA, 15 bp, Homo sapiens
ttattggcacatggt

SEQ ID NO: 1899880 - DNA, 15 bp, Homo sapiens
tattggcacatggtt

SEQ ID NO: 1899881 - DNA, 15 bp, Homo sapiens
attggcacatggtta

SEQ ID NO: 1899882 - DNA, 15 bp, Homo sapiens
ttggcacatggttat

SEQ ID NO: 1899883 - DNA, 15 bp, Homo sapiens
tggcacatggttata

SEQ ID NO: 1899884 - DNA, 15 bp, Homo sapiens
ggcacatggttatag

SEQ ID NO: 1899885 - DNA, 15 bp, Homo sapiens
gcacatggttataga

SEQ ID NO: 1899886 - DNA, 15 bp, Homo sapiens
cacatggttatagaa

SEQ ID NO: 1899887 - DNA, 15 bp, Homo sapiens
acatggttatagaat

SEQ ID NO: 1899888 - DNA, 15 bp, Homo sapiens
catggttatagaata

SEQ ID NO: 1899889 - DNA, 15 bp, Homo sapiens
atggttatagaatat

SEQ ID NO: 1899890 - DNA, 15 bp, Homo sapiens
tggttatagaatatt

SEQ ID NO: 1899891 - DNA, 15 bp, Homo sapiens
ggttatagaatattt

SEQ ID NO: 1899892 - DNA, 15 bp, Homo sapiens
gttatagaatatttc

SEQ ID NO: 1899893 - DNA, 15 bp, Homo sapiens
ttatagaatatttct

SEQ ID NO: 1899894 - DNA, 15 bp, Homo sapiens
tatagaatatttcta

SEQ ID NO: 1899895 - DNA, 15 bp, Homo sapiens
atagaatatttctat

SEQ ID NO: 1899896 - DNA, 15 bp, Homo sapiens
tagaatatttctatc

SEQ ID NO: 1899897 - DNA, 15 bp, Homo sapiens
agaatatttctatca

SEQ ID NO: 1899898 - DNA, 15 bp, Homo sapiens
gaatatttctatcat

SEQ ID NO: 1899899 - DNA, 15 bp, Homo sapiens
aatatttctatcatt

SEQ ID NO: 1899900 - DNA, 15 bp, Homo sapiens
atatttctatcattg

SEQ ID NO: 1899901 - DNA, 15 bp, Homo sapiens
tatttctatcattgc

SEQ ID NO: 1899902 - DNA, 15 bp, Homo sapiens
atttctatcattgca

SEQ ID NO: 1899903 - DNA, 15 bp, Homo sapiens
tttctatcattgcaa

SEQ ID NO: 1899904 - DNA, 15 bp, Homo sapiens
ttctatcattgcaaa

SEQ ID NO: 1899905 - DNA, 15 bp, Homo sapiens
tctatcattgcaaaa

SEQ ID NO: 1899906 - DNA, 15 bp, Homo sapiens
ctatcattgcaaaaa

SEQ ID NO: 1899907 - DNA, 15 bp, Homo sapiens
tatcattgcaaaaaa

SEQ ID NO: 1899908 - DNA, 15 bp, Homo sapiens
atcattgcaaaaaaa

SEQ ID NO: 1899909 - DNA, 15 bp, Homo sapiens
tcattgcaaaaaaaa

SEQ ID NO: 1899910 - DNA, 15 bp, Homo sapiens
cattgcaaaaaaaaa

SEQ ID NO: 1899911 - DNA, 15 bp, Homo sapiens
attgcaaaaaaaaat

SEQ ID NO: 1899912 - DNA, 15 bp, Homo sapiens
ttgcaaaaaaaaatt

SEQ ID NO: 1899913 - DNA, 15 bp, Homo sapiens
tgcaaaaaaaaattt

SEQ ID NO: 1899914 - DNA, 15 bp, Homo sapiens
gcaaaaaaaaatttt

SEQ ID NO: 1899915 - DNA, 15 bp, Homo sapiens
caaaaaaaaattttc

SEQ ID NO: 1899916 - DNA, 15 bp, Homo sapiens
aaaaaaaaattttct

SEQ ID NO: 1899917 - DNA, 15 bp, Homo sapiens
aaaaaaaattttctt

SEQ ID NO: 1899918 - DNA, 15 bp, Homo sapiens
aaaaaaattttcttc

SEQ ID NO: 1899919 - DNA, 15 bp, Homo sapiens
aaaaaattttcttca

SEQ ID NO: 1899920 - DNA, 15 bp, Homo sapiens
aaaaattttcttcat

SEQ ID NO: 1899921 - DNA, 15 bp, Homo sapiens
aaaattttcttcatc

SEQ ID NO: 1899922 - DNA, 15 bp, Homo sapiens
aaattttcttcatca

SEQ ID NO: 1899923 - DNA, 15 bp, Homo sapiens
aattttcttcatcag

SEQ ID NO: 1899924 - DNA, 15 bp, Homo sapiens
attttcttcatcagt

SEQ ID NO: 1899925 - DNA, 15 bp, Homo sapiens
ttttcttcatcagtg

SEQ ID NO: 1899926 - DNA, 15 bp, Homo sapiens
tttcttcatcagtgc

SEQ ID NO: 1899927 - DNA, 15 bp, Homo sapiens
ttcttcatcagtgct

SEQ ID NO: 1899928 - DNA, 15 bp, Homo sapiens
tcttcatcagtgctt

SEQ ID NO: 1899929 - DNA, 15 bp, Homo sapiens
cttcatcagtgcttc

SEQ ID NO: 1899930 - DNA, 15 bp, Homo sapiens
ttcatcagtgcttct

SEQ ID NO: 1899931 - DNA, 15 bp, Homo sapiens
tcatcagtgcttctc

SEQ ID NO: 1899932 - DNA, 15 bp, Homo sapiens
catcagtgcttctct

SEQ ID NO: 1899933 - DNA, 15 bp, Homo sapiens
atcagtgcttctcta

SEQ ID NO: 1899934 - DNA, 15 bp, Homo sapiens
tcagtgcttctctag

SEQ ID NO: 1899935 - DNA, 15 bp, Homo sapiens
cagtgcttctctaga

SEQ ID NO: 1899936 - DNA, 15 bp, Homo sapiens
agtgcttctctagac

SEQ ID NO: 1899937 - DNA, 15 bp, Homo sapiens
gtgcttctctagaca

SEQ ID NO: 1899938 - DNA, 15 bp, Homo sapiens
tgcttctctagacaa

SEQ ID NO: 1899939 - DNA, 15 bp, Homo sapiens
gcttctctagacaag

SEQ ID NO: 1899940 - DNA, 15 bp, Homo sapiens
cttctctagacaagt

SEQ ID NO: 1899941 - DNA, 15 bp, Homo sapiens
ttctctagacaagta

SEQ ID NO: 1899942 - DNA, 15 bp, Homo sapiens
tctctagacaagtat

SEQ ID NO: 1899943 - DNA, 15 bp, Homo sapiens
ctctagacaagtatc

SEQ ID NO: 1899944 - DNA, 15 bp, Homo sapiens
tctagacaagtatct

SEQ ID NO: 1899945 - DNA, 15 bp, Homo sapiens
ctagacaagtatctt

SEQ ID NO: 1899946 - DNA, 15 bp, Homo sapiens
tagacaagtatcttc

SEQ ID NO: 1899947 - DNA, 15 bp, Homo sapiens
agacaagtatcttcc

SEQ ID NO: 1899948 - DNA, 15 bp, Homo sapiens
gacaagtatcttccc

SEQ ID NO: 1899949 - DNA, 15 bp, Homo sapiens
acaagtatcttccct

SEQ ID NO: 1899950 - DNA, 15 bp, Homo sapiens
caagtatcttccctt

SEQ ID NO: 1899951 - DNA, 15 bp, Homo sapiens
aagtatcttcccttc

SEQ ID NO: 1899952 - DNA, 15 bp, Homo sapiens
agtatcttcccttca

SEQ ID NO: 1899953 - DNA, 15 bp, Homo sapiens
gtatcttcccttcac

SEQ ID NO: 1899954 - DNA, 15 bp, Homo sapiens
tatcttcccttcaca

SEQ ID NO: 1899955 - DNA, 15 bp, Homo sapiens
atcttcccttcacaa

SEQ ID NO: 1899956 - DNA, 15 bp, Homo sapiens
tcttcccttcacaaa

SEQ ID NO: 1899957 - DNA, 15 bp, Homo sapiens
cttcccttcacaaag

SEQ ID NO: 1899958 - DNA, 15 bp, Homo sapiens
ttcccttcacaaaga

SEQ ID NO: 1899959 - DNA, 15 bp, Homo sapiens
tcccttcacaaagat

SEQ ID NO: 1899960 - DNA, 15 bp, Homo sapiens
cccttcacaaagatg

SEQ ID NO: 1899961 - DNA, 15 bp, Homo sapiens
ccttcacaaagatgg

SEQ ID NO: 1899962 - DNA, 15 bp, Homo sapiens
cttcacaaagatgga

SEQ ID NO: 1899963 - DNA, 15 bp, Homo sapiens
ttcacaaagatggaa

SEQ ID NO: 1899964 - DNA, 15 bp, Homo sapiens
tcacaaagatggaaa

SEQ ID NO: 1899965 - DNA, 15 bp, Homo sapiens
cacaaagatggaaat

SEQ ID NO: 1899966 - DNA, 15 bp, Homo sapiens
acaaagatggaaatc

SEQ ID NO: 1899967 - DNA, 15 bp, Homo sapiens
caaagatggaaatct

SEQ ID NO: 1899968 - DNA, 15 bp, Homo sapiens
aaagatggaaatctg

SEQ ID NO: 1899969 - DNA, 15 bp, Homo sapiens
aagatggaaatctgt

SEQ ID NO: 1899970 - DNA, 15 bp, Homo sapiens
agatggaaatctgtt

SEQ ID NO: 1899971 - DNA, 15 bp, Homo sapiens
gatggaaatctgttt

SEQ ID NO: 1899972 - DNA, 15 bp, Homo sapiens
atggaaatctgtttt

SEQ ID NO: 1899973 - DNA, 15 bp, Homo sapiens
tggaaatctgttttt

SEQ ID NO: 1899974 - DNA, 15 bp, Homo sapiens
ggaaatctgttttta

SEQ ID NO: 1899975 - DNA, 15 bp, Homo sapiens
gaaatctgtttttaa

SEQ ID NO: 1899976 - DNA, 15 bp, Homo sapiens
aaatctgtttttaaa

SEQ ID NO: 1899977 - DNA, 15 bp, Homo sapiens
aatctgtttttaaag

SEQ ID NO: 1899978 - DNA, 15 bp, Homo sapiens
atctgtttttaaaga

SEQ ID NO: 1899979 - DNA, 15 bp, Homo sapiens
tctgtttttaaagat

SEQ ID NO: 1899980 - DNA, 15 bp, Homo sapiens
ctgtttttaaagata

SEQ ID NO: 1899981 - DNA, 15 bp, Homo sapiens
tgtttttaaagatac

SEQ ID NO: 1899982 - DNA, 15 bp, Homo sapiens
gtttttaaagatacc

SEQ ID NO: 1899983 - DNA, 15 bp, Homo sapiens
tttttaaagatacct

SEQ ID NO: 1899984 - DNA, 15 bp, Homo sapiens
ttttaaagatacctt

SEQ ID NO: 1899985 - DNA, 15 bp, Homo sapiens
tttaaagataccttg

SEQ ID NO: 1899986 - DNA, 15 bp, Homo sapiens
ttaaagataccttgt

SEQ ID NO: 1899987 - DNA, 15 bp, Homo sapiens
taaagataccttgtt

SEQ ID NO: 1899988 - DNA, 15 bp, Homo sapiens
aaagataccttgttg

SEQ ID NO: 1899989 - DNA, 15 bp, Homo sapiens
aagataccttgttgg

SEQ ID NO: 1899990 - DNA, 15 bp, Homo sapiens
agataccttgttgga

SEQ ID NO: 1899991 - DNA, 15 bp, Homo sapiens
gataccttgttggaa

SEQ ID NO: 1899992 - DNA, 15 bp, Homo sapiens
ataccttgttggaag

SEQ ID NO: 1899993 - DNA, 15 bp, Homo sapiens
taccttgttggaagg

SEQ ID NO: 1899994 - DNA, 15 bp, Homo sapiens
accttgttggaaggg

SEQ ID NO: 1899995 - DNA, 15 bp, Homo sapiens
ccttgttggaaggga

SEQ ID NO: 1899996 - DNA, 15 bp, Homo sapiens
cttgttggaagggag

SEQ ID NO: 1899997 - DNA, 15 bp, Homo sapiens
ttgttggaagggaga

SEQ ID NO: 1899998 - DNA, 15 bp, Homo sapiens
tgttggaagggagaa

SEQ ID NO: 1899999 - DNA, 15 bp, Homo sapiens
gttggaagggagaac

SEQ ID NO: 1900000 - DNA, 15 bp, Homo sapiens
ttggaagggagaaca

SEQ ID NO: 1900001 - DNA, 15 bp, Homo sapiens
tggaagggagaacaa

SEQ ID NO: 1900002 - DNA, 15 bp, Homo sapiens
ggaagggagaacaag

SEQ ID NO: 1900003 - DNA, 15 bp, Homo sapiens
gaagggagaacaaga

SEQ ID NO: 1900004 - DNA, 15 bp, Homo sapiens
aagggagaacaagaa

SEQ ID NO: 1900005 - DNA, 15 bp, Homo sapiens
agggagaacaagaaa

SEQ ID NO: 1900006 - DNA, 15 bp, Homo sapiens
gggagaacaagaaag

SEQ ID NO: 1900007 - DNA, 15 bp, Homo sapiens
ggagaacaagaaagc

SEQ ID NO: 1900008 - DNA, 15 bp, Homo sapiens
gagaacaagaaagca

SEQ ID NO: 1900009 - DNA, 15 bp, Homo sapiens
agaacaagaaagcaa

SEQ ID NO: 1900010 - DNA, 15 bp, Homo sapiens
gaacaagaaagcaat

SEQ ID NO: 1900011 - DNA, 15 bp, Homo sapiens
aacaagaaagcaatc

SEQ ID NO: 1900012 - DNA, 15 bp, Homo sapiens
acaagaaagcaatca

SEQ ID NO: 1900013 - DNA, 15 bp, Homo sapiens
caagaaagcaatcac

SEQ ID NO: 1900014 - DNA, 15 bp, Homo sapiens
aagaaagcaatcacc

SEQ ID NO: 1900015 - DNA, 15 bp, Homo sapiens
agaaagcaatcacct

SEQ ID NO: 1900016 - DNA, 15 bp, Homo sapiens
gaaagcaatcacctt

SEQ ID NO: 1900017 - DNA, 15 bp, Homo sapiens
aaagcaatcacctta

SEQ ID NO: 1900018 - DNA, 15 bp, Homo sapiens
aagcaatcaccttac

SEQ ID NO: 1900019 - DNA, 15 bp, Homo sapiens
agcaatcaccttact

SEQ ID NO: 1900020 - DNA, 15 bp, Homo sapiens
gcaatcaccttactt

SEQ ID NO: 1900021 - DNA, 15 bp, Homo sapiens
caatcaccttacttc

SEQ ID NO: 1900022 - DNA, 15 bp, Homo sapiens
aatcaccttacttcc

SEQ ID NO: 1900023 - DNA, 15 bp, Homo sapiens
atcaccttacttcct

SEQ ID NO: 1900024 - DNA, 15 bp, Homo sapiens
tcaccttacttcctc

SEQ ID NO: 1900025 - DNA, 15 bp, Homo sapiens
caccttacttcctct

SEQ ID NO: 1900026 - DNA, 15 bp, Homo sapiens
accttacttcctctc

SEQ ID NO: 1900027 - DNA, 15 bp, Homo sapiens
ccttacttcctctcc

SEQ ID NO: 1900028 - DNA, 15 bp, Homo sapiens
cttacttcctctcct

SEQ ID NO: 1900029 - DNA, 15 bp, Homo sapiens
ttacttcctctccta

SEQ ID NO: 1900030 - DNA, 15 bp, Homo sapiens
tacttcctctcctac

SEQ ID NO: 1900031 - DNA, 15 bp, Homo sapiens
acttcctctcctaca

SEQ ID NO: 1900032 - DNA, 15 bp, Homo sapiens
cttcctctcctacaa

SEQ ID NO: 1900033 - DNA, 15 bp, Homo sapiens
ttcctctcctacaat

SEQ ID NO: 1900034 - DNA, 15 bp, Homo sapiens
tcctctcctacaatt

SEQ ID NO: 1900035 - DNA, 15 bp, Homo sapiens
cctctcctacaattt

SEQ ID NO: 1900036 - DNA, 15 bp, Homo sapiens
ctctcctacaattta

SEQ ID NO: 1900037 - DNA, 15 bp, Homo sapiens
tctcctacaatttaa

SEQ ID NO: 1900038 - DNA, 15 bp, Homo sapiens
ctcctacaatttaag

SEQ ID NO: 1900039 - DNA, 15 bp, Homo sapiens
tcctacaatttaaga

SEQ ID NO: 1900040 - DNA, 15 bp, Homo sapiens
cctacaatttaagaa

SEQ ID NO: 1900041 - DNA, 15 bp, Homo sapiens
ctacaatttaagaac

SEQ ID NO: 1900042 - DNA, 15 bp, Homo sapiens
tacaatttaagaaca

SEQ ID NO: 1900043 - DNA, 15 bp, Homo sapiens
acaatttaagaacat

SEQ ID NO: 1900044 - DNA, 15 bp, Homo sapiens
caatttaagaacatg

SEQ ID NO: 1900045 - DNA, 15 bp, Homo sapiens
aatttaagaacatga

SEQ ID NO: 1900046 - DNA, 15 bp, Homo sapiens
atttaagaacatgag

SEQ ID NO: 1900047 - DNA, 15 bp, Homo sapiens
tttaagaacatgaga

SEQ ID NO: 1900048 - DNA, 15 bp, Homo sapiens
ttaagaacatgagac

SEQ ID NO: 1900049 - DNA, 15 bp, Homo sapiens
taagaacatgagact

SEQ ID NO: 1900050 - DNA, 15 bp, Homo sapiens
aagaacatgagactc

SEQ ID NO: 1900051 - DNA, 15 bp, Homo sapiens
agaacatgagactca

SEQ ID NO: 1900052 - DNA, 15 bp, Homo sapiens
gaacatgagactcaa

SEQ ID NO: 1900053 - DNA, 15 bp, Homo sapiens
aacatgagactcaag

SEQ ID NO: 1900054 - DNA, 15 bp, Homo sapiens
acatgagactcaaga

SEQ ID NO: 1900055 - DNA, 15 bp, Homo sapiens
catgagactcaagag

SEQ ID NO: 1900056 - DNA, 15 bp, Homo sapiens
atgagactcaagagg

SEQ ID NO: 1900057 - DNA, 15 bp, Homo sapiens
tgagactcaagaggt

SEQ ID NO: 1900058 - DNA, 15 bp, Homo sapiens
gagactcaagaggtt

SEQ ID NO: 1900059 - DNA, 15 bp, Homo sapiens
agactcaagaggtta

SEQ ID NO: 1900060 - DNA, 15 bp, Homo sapiens
gactcaagaggttaa

SEQ ID NO: 1900061 - DNA, 15 bp, Homo sapiens
actcaagaggttaac

SEQ ID NO: 1900062 - DNA, 15 bp, Homo sapiens
ctcaagaggttaact

SEQ ID NO: 1900063 - DNA, 15 bp, Homo sapiens
tcaagaggttaactg

SEQ ID NO: 1900064 - DNA, 15 bp, Homo sapiens
caagaggttaactgg

SEQ ID NO: 1900065 - DNA, 15 bp, Homo sapiens
aagaggttaactggc

SEQ ID NO: 1900066 - DNA, 15 bp, Homo sapiens
agaggttaactggct

SEQ ID NO: 1900067 - DNA, 15 bp, Homo sapiens
gaggttaactggctt

SEQ ID NO: 1900068 - DNA, 15 bp, Homo sapiens
aggttaactggcttt

SEQ ID NO: 1900069 - DNA, 15 bp, Homo sapiens
ggttaactggctttg

SEQ ID NO: 1900070 - DNA, 15 bp, Homo sapiens
gttaactggctttgt

SEQ ID NO: 1900071 - DNA, 15 bp, Homo sapiens
ttaactggctttgtt

SEQ ID NO: 1900072 - DNA, 15 bp, Homo sapiens
taactggctttgtta

SEQ ID NO: 1900073 - DNA, 15 bp, Homo sapiens
aactggctttgttaa

SEQ ID NO: 1900074 - DNA, 15 bp, Homo sapiens
actggctttgttaaa

SEQ ID NO: 1900075 - DNA, 15 bp, Homo sapiens
ctggctttgttaaac

SEQ ID NO: 1900076 - DNA, 15 bp, Homo sapiens
tggctttgttaaact

SEQ ID NO: 1900077 - DNA, 15 bp, Homo sapiens
ggctttgttaaactc

SEQ ID NO: 1900078 - DNA, 15 bp, Homo sapiens
gctttgttaaactca

SEQ ID NO: 1900079 - DNA, 15 bp, Homo sapiens
ctttgttaaactcaa

SEQ ID NO: 1900080 - DNA, 15 bp, Homo sapiens
tttgttaaactcaac

SEQ ID NO: 1900081 - DNA, 15 bp, Homo sapiens
ttgttaaactcaaca

SEQ ID NO: 1900082 - DNA, 15 bp, Homo sapiens
tgttaaactcaacac

SEQ ID NO: 1900083 - DNA, 15 bp, Homo sapiens
gttaaactcaacacc

SEQ ID NO: 1900084 - DNA, 15 bp, Homo sapiens
ttaaactcaacacca

SEQ ID NO: 1900085 - DNA, 15 bp, Homo sapiens
taaactcaacaccag

SEQ ID NO: 1900086 - DNA, 15 bp, Homo sapiens
aaactcaacaccagt

SEQ ID NO: 1900087 - DNA, 15 bp, Homo sapiens
aactcaacaccagtt

SEQ ID NO: 1900088 - DNA, 15 bp, Homo sapiens
actcaacaccagtta

SEQ ID NO: 1900089 - DNA, 15 bp, Homo sapiens
ctcaacaccagttaa

SEQ ID NO: 1900090 - DNA, 15 bp, Homo sapiens
tcaacaccagttaat

SEQ ID NO: 1900091 - DNA, 15 bp, Homo sapiens
caacaccagttaatg

SEQ ID NO: 1900092 - DNA, 15 bp, Homo sapiens
aacaccagttaatga

SEQ ID NO: 1900093 - DNA, 15 bp, Homo sapiens
acaccagttaatgag

SEQ ID NO: 1900094 - DNA, 15 bp, Homo sapiens
caccagttaatgaga

SEQ ID NO: 1900095 - DNA, 15 bp, Homo sapiens
accagttaatgagag

SEQ ID NO: 1900096 - DNA, 15 bp, Homo sapiens
ccagttaatgagaga

SEQ ID NO: 1900097 - DNA, 15 bp, Homo sapiens
cagttaatgagagaa

SEQ ID NO: 1900098 - DNA, 15 bp, Homo sapiens
agttaatgagagaac

SEQ ID NO: 1900099 - DNA, 15 bp, Homo sapiens
gttaatgagagaacc

SEQ ID NO: 1900100 - DNA, 15 bp, Homo sapiens
ttaatgagagaacca

SEQ ID NO: 1900101 - DNA, 15 bp, Homo sapiens
taatgagagaaccaa

SEQ ID NO: 1900102 - DNA, 15 bp, Homo sapiens
aatgagagaaccaag

SEQ ID NO: 1900103 - DNA, 15 bp, Homo sapiens
atgagagaaccaaga

SEQ ID NO: 1900104 - DNA, 15 bp, Homo sapiens
tgagagaaccaagac

SEQ ID NO: 1900105 - DNA, 15 bp, Homo sapiens
gagagaaccaagact

SEQ ID NO: 1900106 - DNA, 15 bp, Homo sapiens
agagaaccaagacta

SEQ ID NO: 1900107 - DNA, 15 bp, Homo sapiens
gagaaccaagactaa

SEQ ID NO: 1900108 - DNA, 15 bp, Homo sapiens
agaaccaagactaaa

SEQ ID NO: 1900109 - DNA, 15 bp, Homo sapiens
gaaccaagactaaag

SEQ ID NO: 1900110 - DNA, 15 bp, Homo sapiens
aaccaagactaaagt

SEQ ID NO: 1900111 - DNA, 15 bp, Homo sapiens
accaagactaaagtc

SEQ ID NO: 1900112 - DNA, 15 bp, Homo sapiens
ccaagactaaagtcc

SEQ ID NO: 1900113 - DNA, 15 bp, Homo sapiens
caagactaaagtcca

SEQ ID NO: 1900114 - DNA, 15 bp, Homo sapiens
aagactaaagtccac

SEQ ID NO: 1900115 - DNA, 15 bp, Homo sapiens
agactaaagtccacc

SEQ ID NO: 1900116 - DNA, 15 bp, Homo sapiens
gactaaagtccacct

SEQ ID NO: 1900117 - DNA, 15 bp, Homo sapiens
actaaagtccacctt

SEQ ID NO: 1900118 - DNA, 15 bp, Homo sapiens
ctaaagtccaccttt

SEQ ID NO: 1900119 - DNA, 15 bp, Homo sapiens
taaagtccacctttc

SEQ ID NO: 1900120 - DNA, 15 bp, Homo sapiens
aaagtccacctttct

SEQ ID NO: 1900121 - DNA, 15 bp, Homo sapiens
aagtccacctttctt

SEQ ID NO: 1900122 - DNA, 15 bp, Homo sapiens
agtccacctttcttg

SEQ ID NO: 1900123 - DNA, 15 bp, Homo sapiens
gtccacctttcttgc

SEQ ID NO: 1900124 - DNA, 15 bp, Homo sapiens
tccacctttcttgca

SEQ ID NO: 1900125 - DNA, 15 bp, Homo sapiens
ccacctttcttgcat

SEQ ID NO: 1900126 - DNA, 15 bp, Homo sapiens
cacctttcttgcatc

SEQ ID NO: 1900127 - DNA, 15 bp, Homo sapiens
acctttcttgcatca

SEQ ID NO: 1900128 - DNA, 15 bp, Homo sapiens
cctttcttgcatcat

SEQ ID NO: 1900129 - DNA, 15 bp, Homo sapiens
ctttcttgcatcatg

SEQ ID NO: 1900130 - DNA, 15 bp, Homo sapiens
tttcttgcatcatgc

SEQ ID NO: 1900131 - DNA, 15 bp, Homo sapiens
ttcttgcatcatgct

SEQ ID NO: 1900132 - DNA, 15 bp, Homo sapiens
tcttgcatcatgctc

SEQ ID NO: 1900133 - DNA, 15 bp, Homo sapiens
cttgcatcatgctca

SEQ ID NO: 1900134 - DNA, 15 bp, Homo sapiens
ttgcatcatgctcat

SEQ ID NO: 1900135 - DNA, 15 bp, Homo sapiens
tgcatcatgctcatt

SEQ ID NO: 1900136 - DNA, 15 bp, Homo sapiens
gcatcatgctcattc

SEQ ID NO: 1900137 - DNA, 15 bp, Homo sapiens
catcatgctcattcc

SEQ ID NO: 1900138 - DNA, 15 bp, Homo sapiens
atcatgctcattccc

SEQ ID NO: 1900139 - DNA, 15 bp, Homo sapiens
tcatgctcattccca

SEQ ID NO: 1900140 - DNA, 15 bp, Homo sapiens
catgctcattcccag

SEQ ID NO: 1900141 - DNA, 15 bp, Homo sapiens
atgctcattcccagg

SEQ ID NO: 1900142 - DNA, 15 bp, Homo sapiens
tgctcattcccaggc

SEQ ID NO: 1900143 - DNA, 15 bp, Homo sapiens
gctcattcccaggct

SEQ ID NO: 1900144 - DNA, 15 bp, Homo sapiens
ctcattcccaggcta

SEQ ID NO: 1900145 - DNA, 15 bp, Homo sapiens
tcattcccaggctat

SEQ ID NO: 1900146 - DNA, 15 bp, Homo sapiens
cattcccaggctatt

SEQ ID NO: 1900147 - DNA, 15 bp, Homo sapiens
attcccaggctattc

SEQ ID NO: 1900148 - DNA, 15 bp, Homo sapiens
ttcccaggctattca

SEQ ID NO: 1900149 - DNA, 15 bp, Homo sapiens
tcccaggctattcac

SEQ ID NO: 1900150 - DNA, 15 bp, Homo sapiens
cccaggctattcaca

SEQ ID NO: 1900151 - DNA, 15 bp, Homo sapiens
ccaggctattcacag

SEQ ID NO: 1900152 - DNA, 15 bp, Homo sapiens
caggctattcacagg

SEQ ID NO: 1900153 - DNA, 15 bp, Homo sapiens
aggctattcacaggg

SEQ ID NO: 1900154 - DNA, 15 bp, Homo sapiens
ggctattcacagggt

SEQ ID NO: 1900155 - DNA, 15 bp, Homo sapiens
gctattcacagggtc

SEQ ID NO: 1900156 - DNA, 15 bp, Homo sapiens
ctattcacagggtcg

SEQ ID NO: 1900157 - DNA, 15 bp, Homo sapiens
tattcacagggtcgt

SEQ ID NO: 1900158 - DNA, 15 bp, Homo sapiens
attcacagggtcgtt

SEQ ID NO: 1900159 - DNA, 15 bp, Homo sapiens
ttcacagggtcgttt

SEQ ID NO: 1900160 - DNA, 15 bp, Homo sapiens
tcacagggtcgtttc

SEQ ID NO: 1900161 - DNA, 15 bp, Homo sapiens
cacagggtcgtttca

SEQ ID NO: 1900162 - DNA, 15 bp, Homo sapiens
acagggtcgtttcat

SEQ ID NO: 1900163 - DNA, 15 bp, Homo sapiens
cagggtcgtttcatt

SEQ ID NO: 1900164 - DNA, 15 bp, Homo sapiens
agggtcgtttcatta

SEQ ID NO: 1900165 - DNA, 15 bp, Homo sapiens
gggtcgtttcattaa

SEQ ID NO: 1900166 - DNA, 15 bp, Homo sapiens
ggtcgtttcattaaa

SEQ ID NO: 1900167 - DNA, 15 bp, Homo sapiens
gtcgtttcattaaat

SEQ ID NO: 1900168 - DNA, 15 bp, Homo sapiens
tcgtttcattaaatg

SEQ ID NO: 1900169 - DNA, 15 bp, Homo sapiens
cgtttcattaaatgc

SEQ ID NO: 1900170 - DNA, 15 bp, Homo sapiens
gtttcattaaatgct

SEQ ID NO: 1900171 - DNA, 15 bp, Homo sapiens
tttcattaaatgcta

SEQ ID NO: 1900172 - DNA, 15 bp, Homo sapiens
ttcattaaatgctat

SEQ ID NO: 1900173 - DNA, 15 bp, Homo sapiens
tcattaaatgctatg

SEQ ID NO: 1900174 - DNA, 15 bp, Homo sapiens
cattaaatgctatga

SEQ ID NO: 1900175 - DNA, 15 bp, Homo sapiens
attaaatgctatgaa

SEQ ID NO: 1900176 - DNA, 15 bp, Homo sapiens
ttaaatgctatgaat

SEQ ID NO: 1900177 - DNA, 15 bp, Homo sapiens
taaatgctatgaata

SEQ ID NO: 1900178 - DNA, 15 bp, Homo sapiens
aaatgctatgaataa

SEQ ID NO: 1900179 - DNA, 15 bp, Homo sapiens
aatgctatgaataaa

SEQ ID NO: 1900180 - DNA, 15 bp, Homo sapiens
atgctatgaataaat

SEQ ID NO: 1900181 - DNA, 15 bp, Homo sapiens
tgctatgaataaatg

SEQ ID NO: 1900182 - DNA, 15 bp, Homo sapiens
gctatgaataaatgg

SEQ ID NO: 1900183 - DNA, 15 bp, Homo sapiens
ctatgaataaatggt

SEQ ID NO: 1900184 - DNA, 15 bp, Homo sapiens
tatgaataaatggta

SEQ ID NO: 1900185 - DNA, 15 bp, Homo sapiens
atgaataaatggtat

SEQ ID NO: 1900186 - DNA, 15 bp, Homo sapiens
tgaataaatggtata

SEQ ID NO: 1900187 - DNA, 15 bp, Homo sapiens
gaataaatggtatat

SEQ ID NO: 1900188 - DNA, 15 bp, Homo sapiens
aataaatggtatatt

SEQ ID NO: 1900189 - DNA, 15 bp, Homo sapiens
ataaatggtatattt

SEQ ID NO: 1900190 - DNA, 15 bp, Homo sapiens
taaatggtatatttg

SEQ ID NO: 1900191 - DNA, 15 bp, Homo sapiens
aaatggtatatttga

SEQ ID NO: 1900192 - DNA, 15 bp, Homo sapiens
aatggtatatttgaa

SEQ ID NO: 1900193 - DNA, 15 bp, Homo sapiens
atggtatatttgaat

SEQ ID NO: 1900194 - DNA, 15 bp, Homo sapiens
tggtatatttgaatg

SEQ ID NO: 1900195 - DNA, 15 bp, Homo sapiens
ggtatatttgaatgg

SEQ ID NO: 1900196 - DNA, 15 bp, Homo sapiens
gtatatttgaatggc

SEQ ID NO: 1900197 - DNA, 15 bp, Homo sapiens
tatatttgaatggcc

SEQ ID NO: 1900198 - DNA, 15 bp, Homo sapiens
atatttgaatggcca

SEQ ID NO: 1900199 - DNA, 15 bp, Homo sapiens
tatttgaatggccaa

SEQ ID NO: 1900200 - DNA, 15 bp, Homo sapiens
atttgaatggccaag

SEQ ID NO: 1900201 - DNA, 15 bp, Homo sapiens
tttgaatggccaaga

SEQ ID NO: 1900202 - DNA, 15 bp, Homo sapiens
ttgaatggccaagat

SEQ ID NO: 1900203 - DNA, 15 bp, Homo sapiens
tgaatggccaagata

SEQ ID NO: 1900204 - DNA, 15 bp, Homo sapiens
gaatggccaagatat

SEQ ID NO: 1900205 - DNA, 15 bp, Homo sapiens
aatggccaagatatt

SEQ ID NO: 1900206 - DNA, 15 bp, Homo sapiens
atggccaagatattt

SEQ ID NO: 1900207 - DNA, 15 bp, Homo sapiens
tggccaagatatttt

SEQ ID NO: 1900208 - DNA, 15 bp, Homo sapiens
ggccaagatattttc

SEQ ID NO: 1900209 - DNA, 15 bp, Homo sapiens
gccaagatattttcc

SEQ ID NO: 1900210 - DNA, 15 bp, Homo sapiens
caagatattttccaa

SEQ ID NO: 1900211 - DNA, 15 bp, Homo sapiens
aagatattttccaac

SEQ ID NO: 1900212 - DNA, 15 bp, Homo sapiens
agatattttccaacc

SEQ ID NO: 1900213 - DNA, 15 bp, Homo sapiens
gatattttccaacca

SEQ ID NO: 1900214 - DNA, 15 bp, Homo sapiens
atattttccaaccat

SEQ ID NO: 1900215 - DNA, 15 bp, Homo sapiens
tattttccaaccatc

SEQ ID NO: 1900216 - DNA, 15 bp, Homo sapiens
attttccaaccatct

SEQ ID NO: 1900217 - DNA, 15 bp, Homo sapiens
ttttccaaccatctt

SEQ ID NO: 1900218 - DNA, 15 bp, Homo sapiens
tttccaaccatcttc

SEQ ID NO: 1900219 - DNA, 15 bp, Homo sapiens
ttccaaccatcttca

SEQ ID NO: 1900220 - DNA, 15 bp, Homo sapiens
tccaaccatcttcag

SEQ ID NO: 1900221 - DNA, 15 bp, Homo sapiens
ccaaccatcttcagt

SEQ ID NO: 1900222 - DNA, 15 bp, Homo sapiens
caaccatcttcagtt

SEQ ID NO: 1900223 - DNA, 15 bp, Homo sapiens
aaccatcttcagttc

SEQ ID NO: 1900224 - DNA, 15 bp, Homo sapiens
accatcttcagttcc

SEQ ID NO: 1900225 - DNA, 15 bp, Homo sapiens
ccatcttcagttcct

SEQ ID NO: 1900226 - DNA, 15 bp, Homo sapiens
catcttcagttcctg

SEQ ID NO: 1900227 - DNA, 15 bp, Homo sapiens
atcttcagttcctga

SEQ ID NO: 1900228 - DNA, 15 bp, Homo sapiens
tcttcagttcctgac

SEQ ID NO: 1900229 - DNA, 15 bp, Homo sapiens
cttcagttcctgact

SEQ ID NO: 1900230 - DNA, 15 bp, Homo sapiens
ttcagttcctgactc

SEQ ID NO: 1900231 - DNA, 15 bp, Homo sapiens
tcagttcctgactcc

SEQ ID NO: 1900232 - DNA, 15 bp, Homo sapiens
cagttcctgactcct

SEQ ID NO: 1900233 - DNA, 15 bp, Homo sapiens
agttcctgactccta

SEQ ID NO: 1900234 - DNA, 15 bp, Homo sapiens
gttcctgactcctat

SEQ ID NO: 1900235 - DNA, 15 bp, Homo sapiens
ttcctgactcctata

SEQ ID NO: 1900236 - DNA, 15 bp, Homo sapiens
tcctgactcctataa

SEQ ID NO: 1900237 - DNA, 15 bp, Homo sapiens
cctgactcctataag

SEQ ID NO: 1900238 - DNA, 15 bp, Homo sapiens
ctgactcctataaga

SEQ ID NO: 1900239 - DNA, 15 bp, Homo sapiens
tgactcctataagat

SEQ ID NO: 1900240 - DNA, 15 bp, Homo sapiens
gactcctataagatg

SEQ ID NO: 1900241 - DNA, 15 bp, Homo sapiens
actcctataagatga

SEQ ID NO: 1900242 - DNA, 15 bp, Homo sapiens
ctcctataagatgaa

SEQ ID NO: 1900243 - DNA, 15 bp, Homo sapiens
tcctataagatgaaa

SEQ ID NO: 1900244 - DNA, 15 bp, Homo sapiens
cctataagatgaaat

SEQ ID NO: 1900245 - DNA, 15 bp, Homo sapiens
ctataagatgaaatt

SEQ ID NO: 1900246 - DNA, 15 bp, Homo sapiens
tataagatgaaattt

SEQ ID NO: 1900247 - DNA, 15 bp, Homo sapiens
ataagatgaaatttt

SEQ ID NO: 1900248 - DNA, 15 bp, Homo sapiens
taagatgaaattttc

SEQ ID NO: 1900249 - DNA, 15 bp, Homo sapiens
aagatgaaattttca

SEQ ID NO: 1900250 - DNA, 15 bp, Homo sapiens
agatgaaattttcac

SEQ ID NO: 1900251 - DNA, 15 bp, Homo sapiens
gatgaaattttcaca

SEQ ID NO: 1900252 - DNA, 15 bp, Homo sapiens
atgaaattttcacaa

SEQ ID NO: 1900253 - DNA, 15 bp, Homo sapiens
tgaaattttcacaag

SEQ ID NO: 1900254 - DNA, 15 bp, Homo sapiens
gaaattttcacaagt

SEQ ID NO: 1900255 - DNA, 15 bp, Homo sapiens
aaattttcacaagtc

SEQ ID NO: 1900256 - DNA, 15 bp, Homo sapiens
aattttcacaagtct

SEQ ID NO: 1900257 - DNA, 15 bp, Homo sapiens
attttcacaagtctc

SEQ ID NO: 1900258 - DNA, 15 bp, Homo sapiens
ttttcacaagtctcc

SEQ ID NO: 1900259 - DNA, 15 bp, Homo sapiens
tttcacaagtctcca

SEQ ID NO: 1900260 - DNA, 15 bp, Homo sapiens
ttcacaagtctccag

SEQ ID NO: 1900261 - DNA, 15 bp, Homo sapiens
tcacaagtctccagg

SEQ ID NO: 1900262 - DNA, 15 bp, Homo sapiens
cacaagtctccaggc

SEQ ID NO: 1900263 - DNA, 15 bp, Homo sapiens
acaagtctccaggct

SEQ ID NO: 1900264 - DNA, 15 bp, Homo sapiens
caagtctccaggctc

SEQ ID NO: 1900265 - DNA, 15 bp, Homo sapiens
aagtctccaggctct

SEQ ID NO: 1900266 - DNA, 15 bp, Homo sapiens
agtctccaggctctt

SEQ ID NO: 1900267 - DNA, 15 bp, Homo sapiens
gtctccaggctcttt

SEQ ID NO: 1900268 - DNA, 15 bp, Homo sapiens
tctccaggctctttc

SEQ ID NO: 1900269 - DNA, 15 bp, Homo sapiens
ctccaggctctttca

SEQ ID NO: 1900270 - DNA, 15 bp, Homo sapiens
tccaggctctttcat

SEQ ID NO: 1900271 - DNA, 15 bp, Homo sapiens
ccaggctctttcatt

SEQ ID NO: 1900272 - DNA, 15 bp, Homo sapiens
caggctctttcattt

SEQ ID NO: 1900273 - DNA, 15 bp, Homo sapiens
aggctctttcatttc

SEQ ID NO: 1900274 - DNA, 15 bp, Homo sapiens
ggctctttcatttct

SEQ ID NO: 1900275 - DNA, 15 bp, Homo sapiens
gctctttcatttcta

SEQ ID NO: 1900276 - DNA, 15 bp, Homo sapiens
ctctttcatttctat

SEQ ID NO: 1900277 - DNA, 15 bp, Homo sapiens
tctttcatttctatt

SEQ ID NO: 1900278 - DNA, 15 bp, Homo sapiens
ctttcatttctattt

SEQ ID NO: 1900279 - DNA, 15 bp, Homo sapiens
tttcatttctatttc

SEQ ID NO: 1900280 - DNA, 15 bp, Homo sapiens
ttcatttctatttct

SEQ ID NO: 1900281 - DNA, 15 bp, Homo sapiens
tcatttctatttcta

SEQ ID NO: 1900282 - DNA, 15 bp, Homo sapiens
catttctatttctac

SEQ ID NO: 1900283 - DNA, 15 bp, Homo sapiens
atttctatttctact

SEQ ID NO: 1900284 - DNA, 15 bp, Homo sapiens
tttctatttctactt

SEQ ID NO: 1900285 - DNA, 15 bp, Homo sapiens
ttctatttctacttc

SEQ ID NO: 1900286 - DNA, 15 bp, Homo sapiens
tctatttctacttct

SEQ ID NO: 1900287 - DNA, 15 bp, Homo sapiens
ctatttctacttctc

SEQ ID NO: 1900288 - DNA, 15 bp, Homo sapiens
tatttctacttctct

SEQ ID NO: 1900289 - DNA, 15 bp, Homo sapiens
atttctacttctcta

SEQ ID NO: 1900290 - DNA, 15 bp, Homo sapiens
tttctacttctctag

SEQ ID NO: 1900291 - DNA, 15 bp, Homo sapiens
ttctacttctctagg

SEQ ID NO: 1900292 - DNA, 15 bp, Homo sapiens
tctacttctctaggt

SEQ ID NO: 1900293 - DNA, 15 bp, Homo sapiens
ctacttctctaggta

SEQ ID NO: 1900294 - DNA, 15 bp, Homo sapiens
tacttctctaggtat

SEQ ID NO: 1900295 - DNA, 15 bp, Homo sapiens
acttctctaggtata

SEQ ID NO: 1900296 - DNA, 15 bp, Homo sapiens
cttctctaggtatat

SEQ ID NO: 1900297 - DNA, 15 bp, Homo sapiens
ttctctaggtatata

SEQ ID NO: 1900298 - DNA, 15 bp, Homo sapiens
tctctaggtatatac

SEQ ID NO: 1900299 - DNA, 15 bp, Homo sapiens
ctctaggtatatacc

SEQ ID NO: 1900300 - DNA, 15 bp, Homo sapiens
tctaggtatatacca

SEQ ID NO: 1900301 - DNA, 15 bp, Homo sapiens
ctaggtatataccac

SEQ ID NO: 1900302 - DNA, 15 bp, Homo sapiens
taggtatataccacc

SEQ ID NO: 1900303 - DNA, 15 bp, Homo sapiens
aggtatataccacca

SEQ ID NO: 1900304 - DNA, 15 bp, Homo sapiens
ggtatataccaccat

SEQ ID NO: 1900305 - DNA, 15 bp, Homo sapiens
gtatataccaccatc

SEQ ID NO: 1900306 - DNA, 15 bp, Homo sapiens
tatataccaccatca

SEQ ID NO: 1900307 - DNA, 15 bp, Homo sapiens
atataccaccatcac

SEQ ID NO: 1900308 - DNA, 15 bp, Homo sapiens
tataccaccatcacc

SEQ ID NO: 1900309 - DNA, 15 bp, Homo sapiens
ataccaccatcacca

SEQ ID NO: 1900310 - DNA, 15 bp, Homo sapiens
taccaccatcaccac

SEQ ID NO: 1900311 - DNA, 15 bp, Homo sapiens
accaccatcaccact

SEQ ID NO: 1900312 - DNA, 15 bp, Homo sapiens
ccaccatcaccacta

SEQ ID NO: 1900313 - DNA, 15 bp, Homo sapiens
caccatcaccactat

SEQ ID NO: 1900314 - DNA, 15 bp, Homo sapiens
accatcaccactatc

SEQ ID NO: 1900315 - DNA, 15 bp, Homo sapiens
ccatcaccactatca

SEQ ID NO: 1900316 - DNA, 15 bp, Homo sapiens
catcaccactatcat

SEQ ID NO: 1900317 - DNA, 15 bp, Homo sapiens
atcaccactatcatc

SEQ ID NO: 1900318 - DNA, 15 bp, Homo sapiens
tcaccactatcatcc

SEQ ID NO: 1900319 - DNA, 15 bp, Homo sapiens
caccactatcatcct

SEQ ID NO: 1900320 - DNA, 15 bp, Homo sapiens
accactatcatcctt

SEQ ID NO: 1900321 - DNA, 15 bp, Homo sapiens
ccactatcatccttt

SEQ ID NO: 1900322 - DNA, 15 bp, Homo sapiens
cactatcatcctttc

SEQ ID NO: 1900323 - DNA, 15 bp, Homo sapiens
actatcatcctttcc

SEQ ID NO: 1900324 - DNA, 15 bp, Homo sapiens
ctatcatcctttcct

SEQ ID NO: 1900325 - DNA, 15 bp, Homo sapiens
tatcatcctttcctc

SEQ ID NO: 1900326 - DNA, 15 bp, Homo sapiens
atcatcctttcctcc

SEQ ID NO: 1900327 - DNA, 15 bp, Homo sapiens
tcatcctttcctcct

SEQ ID NO: 1900328 - DNA, 15 bp, Homo sapiens
catcctttcctcctc

SEQ ID NO: 1900329 - DNA, 15 bp, Homo sapiens
atcctttcctcctct

SEQ ID NO: 1900330 - DNA, 15 bp, Homo sapiens
tcctttcctcctctt

SEQ ID NO: 1900331 - DNA, 15 bp, Homo sapiens
cctttcctcctcttc

SEQ ID NO: 1900332 - DNA, 15 bp, Homo sapiens
ctttcctcctcttca

SEQ ID NO: 1900333 - DNA, 15 bp, Homo sapiens
tttcctcctcttcaa

SEQ ID NO: 1900334 - DNA, 15 bp, Homo sapiens
ttcctcctcttcaaa

SEQ ID NO: 1900335 - DNA, 15 bp, Homo sapiens
tcctcctcttcaaac

SEQ ID NO: 1900336 - DNA, 15 bp, Homo sapiens
cctcctcttcaaact

SEQ ID NO: 1900337 - DNA, 15 bp, Homo sapiens
ctcctcttcaaactc

SEQ ID NO: 1900338 - DNA, 15 bp, Homo sapiens
tcctcttcaaactca

SEQ ID NO: 1900339 - DNA, 15 bp, Homo sapiens
cctcttcaaactcaa

SEQ ID NO: 1900340 - DNA, 15 bp, Homo sapiens
ctcttcaaactcaaa

SEQ ID NO: 1900341 - DNA, 15 bp, Homo sapiens
tcttcaaactcaaat

SEQ ID NO: 1900342 - DNA, 15 bp, Homo sapiens
cttcaaactcaaatc

SEQ ID NO: 1900343 - DNA, 15 bp, Homo sapiens
ttcaaactcaaatcc

SEQ ID NO: 1900344 - DNA, 15 bp, Homo sapiens
tcaaactcaaatcca

SEQ ID NO: 1900345 - DNA, 15 bp, Homo sapiens
caaactcaaatccaa

SEQ ID NO: 1900346 - DNA, 15 bp, Homo sapiens
aaactcaaatccaag

SEQ ID NO: 1900347 - DNA, 15 bp, Homo sapiens
aactcaaatccaagt

SEQ ID NO: 1900348 - DNA, 15 bp, Homo sapiens
actcaaatccaagtt

SEQ ID NO: 1900349 - DNA, 15 bp, Homo sapiens
ctcaaatccaagtta

SEQ ID NO: 1900350 - DNA, 15 bp, Homo sapiens
tcaaatccaagttag

SEQ ID NO: 1900351 - DNA, 15 bp, Homo sapiens
caaatccaagttagc

SEQ ID NO: 1900352 - DNA, 15 bp, Homo sapiens
aaatccaagttagca

SEQ ID NO: 1900353 - DNA, 15 bp, Homo sapiens
aatccaagttagcat

SEQ ID NO: 1900354 - DNA, 15 bp, Homo sapiens
atccaagttagcata

SEQ ID NO: 1900355 - DNA, 15 bp, Homo sapiens
tccaagttagcataa

SEQ ID NO: 1900356 - DNA, 15 bp, Homo sapiens
ccaagttagcataaa

SEQ ID NO: 1900357 - DNA, 15 bp, Homo sapiens
caagttagcataaac

SEQ ID NO: 1900358 - DNA, 15 bp, Homo sapiens
aagttagcataaact

SEQ ID NO: 1900359 - DNA, 15 bp, Homo sapiens
agttagcataaactc

SEQ ID NO: 1900360 - DNA, 15 bp, Homo sapiens
gttagcataaactct

SEQ ID NO: 1900361 - DNA, 15 bp, Homo sapiens
ttagcataaactctc

SEQ ID NO: 1900362 - DNA, 15 bp, Homo sapiens
tagcataaactctcc

SEQ ID NO: 1900363 - DNA, 15 bp, Homo sapiens
agcataaactctcct

SEQ ID NO: 1900364 - DNA, 15 bp, Homo sapiens
gcataaactctcctg

SEQ ID NO: 1900365 - DNA, 15 bp, Homo sapiens
cataaactctcctgt

SEQ ID NO: 1900366 - DNA, 15 bp, Homo sapiens
ataaactctcctgta

SEQ ID NO: 1900367 - DNA, 15 bp, Homo sapiens
aaactctcctgtaag

SEQ ID NO: 1900368 - DNA, 15 bp, Homo sapiens
aactctcctgtaagc

SEQ ID NO: 1900369 - DNA, 15 bp, Homo sapiens
actctcctgtaagct

SEQ ID NO: 1900370 - DNA, 15 bp, Homo sapiens
ctctcctgtaagctc

SEQ ID NO: 1900371 - DNA, 15 bp, Homo sapiens
tctcctgtaagctcc

SEQ ID NO: 1900372 - DNA, 15 bp, Homo sapiens
ctcctgtaagctcct

SEQ ID NO: 1900373 - DNA, 15 bp, Homo sapiens
tcctgtaagctcctt

SEQ ID NO: 1900374 - DNA, 15 bp, Homo sapiens
cctgtaagctccttt

SEQ ID NO: 1900375 - DNA, 15 bp, Homo sapiens
ctgtaagctcctttc

SEQ ID NO: 1900376 - DNA, 15 bp, Homo sapiens
tgtaagctcctttct

SEQ ID NO: 1900377 - DNA, 15 bp, Homo sapiens
gtaagctcctttcta

SEQ ID NO: 1900378 - DNA, 15 bp, Homo sapiens
taagctcctttctag

SEQ ID NO: 1900379 - DNA, 15 bp, Homo sapiens
aagctcctttctagg

SEQ ID NO: 1900380 - DNA, 15 bp, Homo sapiens
agctcctttctaggg

SEQ ID NO: 1900381 - DNA, 15 bp, Homo sapiens
gctcctttctagggt

SEQ ID NO: 1900382 - DNA, 15 bp, Homo sapiens
ctcctttctagggtt

SEQ ID NO: 1900383 - DNA, 15 bp, Homo sapiens
tcctttctagggttt

SEQ ID NO: 1900384 - DNA, 15 bp, Homo sapiens
cctttctagggtttt

SEQ ID NO: 1900385 - DNA, 15 bp, Homo sapiens
ctttctagggttttc

SEQ ID NO: 1900386 - DNA, 15 bp, Homo sapiens
tttctagggttttct

SEQ ID NO: 1900387 - DNA, 15 bp, Homo sapiens
ttctagggttttcta

SEQ ID NO: 1900388 - DNA, 15 bp, Homo sapiens
tctagggttttctaa

SEQ ID NO: 1900389 - DNA, 15 bp, Homo sapiens
ctagggttttctaag

SEQ ID NO: 1900390 - DNA, 15 bp, Homo sapiens
tagggttttctaagc

SEQ ID NO: 1900391 - DNA, 15 bp, Homo sapiens
agggttttctaagcc

SEQ ID NO: 1900392 - DNA, 15 bp, Homo sapiens
gggttttctaagcca

SEQ ID NO: 1900393 - DNA, 15 bp, Homo sapiens
ggttttctaagccaa

SEQ ID NO: 1900394 - DNA, 15 bp, Homo sapiens
gttttctaagccaaa

SEQ ID NO: 1900395 - DNA, 15 bp, Homo sapiens
ttttctaagccaaaa

SEQ ID NO: 1900396 - DNA, 15 bp, Homo sapiens
tttctaagccaaaac

SEQ ID NO: 1900397 - DNA, 15 bp, Homo sapiens
ttctaagccaaaacc

SEQ ID NO: 1900398 - DNA, 15 bp, Homo sapiens
tctaagccaaaaccc

SEQ ID NO: 1900399 - DNA, 15 bp, Homo sapiens
ctaagccaaaaccca

SEQ ID NO: 1900400 - DNA, 15 bp, Homo sapiens
taagccaaaacccag

SEQ ID NO: 1900401 - DNA, 15 bp, Homo sapiens
aagccaaaacccaga

SEQ ID NO: 1900402 - DNA, 15 bp, Homo sapiens
agccaaaacccagac

SEQ ID NO: 1900403 - DNA, 15 bp, Homo sapiens
gccaaaacccagact

SEQ ID NO: 1900404 - DNA, 15 bp, Homo sapiens
ccaaaacccagactc

SEQ ID NO: 1900405 - DNA, 15 bp, Homo sapiens
caaaacccagactct

SEQ ID NO: 1900406 - DNA, 15 bp, Homo sapiens
aaaacccagactctc

SEQ ID NO: 1900407 - DNA, 15 bp, Homo sapiens
aaacccagactctct

SEQ ID NO: 1900408 - DNA, 15 bp, Homo sapiens
aacccagactctctc

SEQ ID NO: 1900409 - DNA, 15 bp, Homo sapiens
acccagactctctcc

SEQ ID NO: 1900410 - DNA, 15 bp, Homo sapiens
cccagactctctccc

SEQ ID NO: 1900411 - DNA, 15 bp, Homo sapiens
ccagactctctccca

SEQ ID NO: 1900412 - DNA, 15 bp, Homo sapiens
cagactctctcccat

SEQ ID NO: 1900413 - DNA, 15 bp, Homo sapiens
agactctctcccata

SEQ ID NO: 1900414 - DNA, 15 bp, Homo sapiens
gactctctcccataa

SEQ ID NO: 1900415 - DNA, 15 bp, Homo sapiens
actctctcccataaa

SEQ ID NO: 1900416 - DNA, 15 bp, Homo sapiens
ctctctcccataaat

SEQ ID NO: 1900417 - DNA, 15 bp, Homo sapiens
tctctcccataaatc

SEQ ID NO: 1900418 - DNA, 15 bp, Homo sapiens
ctctcccataaatcc

SEQ ID NO: 1900419 - DNA, 15 bp, Homo sapiens
tctcccataaatcca

SEQ ID NO: 1900420 - DNA, 15 bp, Homo sapiens
ctcccataaatccat

SEQ ID NO: 1900421 - DNA, 15 bp, Homo sapiens
tcccataaatccatg

SEQ ID NO: 1900422 - DNA, 15 bp, Homo sapiens
cccataaatccatgg

SEQ ID NO: 1900423 - DNA, 15 bp, Homo sapiens
ccataaatccatggt

SEQ ID NO: 1900424 - DNA, 15 bp, Homo sapiens
cataaatccatggtt

SEQ ID NO: 1900425 - DNA, 15 bp, Homo sapiens
ataaatccatggttc

SEQ ID NO: 1900426 - DNA, 15 bp, Homo sapiens
taaatccatggttcc

SEQ ID NO: 1900427 - DNA, 15 bp, Homo sapiens
aaatccatggttcca

SEQ ID NO: 1900428 - DNA, 15 bp, Homo sapiens
aatccatggttccag

SEQ ID NO: 1900429 - DNA, 15 bp, Homo sapiens
atccatggttccaga

SEQ ID NO: 1900430 - DNA, 15 bp, Homo sapiens
tccatggttccagat

SEQ ID NO: 1900431 - DNA, 15 bp, Homo sapiens
ccatggttccagatc

SEQ ID NO: 1900432 - DNA, 15 bp, Homo sapiens
catggttccagatct

SEQ ID NO: 1900433 - DNA, 15 bp, Homo sapiens
atggttccagatctc

SEQ ID NO: 1900434 - DNA, 15 bp, Homo sapiens
tggttccagatctca

SEQ ID NO: 1900435 - DNA, 15 bp, Homo sapiens
ggttccagatctcat

SEQ ID NO: 1900436 - DNA, 15 bp, Homo sapiens
gttccagatctcatg

SEQ ID NO: 1900437 - DNA, 15 bp, Homo sapiens
ttccagatctcatgc

SEQ ID NO: 1900438 - DNA, 15 bp, Homo sapiens
tccagatctcatgct

SEQ ID NO: 1900439 - DNA, 15 bp, Homo sapiens
ccagatctcatgctc

SEQ ID NO: 1900440 - DNA, 15 bp, Homo sapiens
cagatctcatgctcc

SEQ ID NO: 1900441 - DNA, 15 bp, Homo sapiens
agatctcatgctccc

SEQ ID NO: 1900442 - DNA, 15 bp, Homo sapiens
gatctcatgctccca

SEQ ID NO: 1900443 - DNA, 15 bp, Homo sapiens
atctcatgctcccaa

SEQ ID NO: 1900444 - DNA, 15 bp, Homo sapiens
tctcatgctcccaac

SEQ ID NO: 1900445 - DNA, 15 bp, Homo sapiens
ctcatgctcccaacc

SEQ ID NO: 1900446 - DNA, 15 bp, Homo sapiens
tcatgctcccaaccc

SEQ ID NO: 1900447 - DNA, 15 bp, Homo sapiens
catgctcccaacccc

SEQ ID NO: 1900448 - DNA, 15 bp, Homo sapiens
atgctcccaacccca

SEQ ID NO: 1900449 - DNA, 15 bp, Homo sapiens
tgctcccaaccccaa

SEQ ID NO: 1900450 - DNA, 15 bp, Homo sapiens
gctcccaaccccaat

SEQ ID NO: 1900451 - DNA, 15 bp, Homo sapiens
ctcccaaccccaatc

SEQ ID NO: 1900452 - DNA, 15 bp, Homo sapiens
tcccaaccccaatcc

SEQ ID NO: 1900453 - DNA, 15 bp, Homo sapiens
cccaaccccaatcct

SEQ ID NO: 1900454 - DNA, 15 bp, Homo sapiens
ccaaccccaatcctc

SEQ ID NO: 1900455 - DNA, 15 bp, Homo sapiens
caaccccaatcctca

SEQ ID NO: 1900456 - DNA, 15 bp, Homo sapiens
aaccccaatcctcaa

SEQ ID NO: 1900457 - DNA, 15 bp, Homo sapiens
accccaatcctcaag

SEQ ID NO: 1900458 - DNA, 15 bp, Homo sapiens
ccccaatcctcaagc

SEQ ID NO: 1900459 - DNA, 15 bp, Homo sapiens
cccaatcctcaagct

SEQ ID NO: 1900460 - DNA, 15 bp, Homo sapiens
ccaatcctcaagctg

SEQ ID NO: 1900461 - DNA, 15 bp, Homo sapiens
caatcctcaagctgg

SEQ ID NO: 1900462 - DNA, 15 bp, Homo sapiens
aatcctcaagctggt

SEQ ID NO: 1900463 - DNA, 15 bp, Homo sapiens
atcctcaagctggta

SEQ ID NO: 1900464 - DNA, 15 bp, Homo sapiens
tcctcaagctggtag

SEQ ID NO: 1900465 - DNA, 15 bp, Homo sapiens
cctcaagctggtagc

SEQ ID NO: 1900466 - DNA, 15 bp, Homo sapiens
ctcaagctggtagcc

SEQ ID NO: 1900467 - DNA, 15 bp, Homo sapiens
tcaagctggtagcct

SEQ ID NO: 1900468 - DNA, 15 bp, Homo sapiens
caagctggtagccta

SEQ ID NO: 1900469 - DNA, 15 bp, Homo sapiens
aagctggtagcctaa

SEQ ID NO: 1900470 - DNA, 15 bp, Homo sapiens
agctggtagcctaaa

SEQ ID NO: 1900471 - DNA, 15 bp, Homo sapiens
gctggtagcctaaac

SEQ ID NO: 1900472 - DNA, 15 bp, Homo sapiens
ctggtagcctaaacc

SEQ ID NO: 1900473 - DNA, 15 bp, Homo sapiens
tggtagcctaaacca

SEQ ID NO: 1900474 - DNA, 15 bp, Homo sapiens
ggtagcctaaaccag

SEQ ID NO: 1900475 - DNA, 15 bp, Homo sapiens
gtagcctaaaccagt

SEQ ID NO: 1900476 - DNA, 15 bp, Homo sapiens
tagcctaaaccagtc

SEQ ID NO: 1900477 - DNA, 15 bp, Homo sapiens
agcctaaaccagtca

SEQ ID NO: 1900478 - DNA, 15 bp, Homo sapiens
gcctaaaccagtcat

SEQ ID NO: 1900479 - DNA, 15 bp, Homo sapiens
cctaaaccagtcata

SEQ ID NO: 1900480 - DNA, 15 bp, Homo sapiens
ctaaaccagtcatat

SEQ ID NO: 1900481 - DNA, 15 bp, Homo sapiens
taaaccagtcatatc

SEQ ID NO: 1900482 - DNA, 15 bp, Homo sapiens
aaaccagtcatatcc

SEQ ID NO: 1900483 - DNA, 15 bp, Homo sapiens
aaccagtcatatcct

SEQ ID NO: 1900484 - DNA, 15 bp, Homo sapiens
accagtcatatcctg

SEQ ID NO: 1900485 - DNA, 15 bp, Homo sapiens
ccagtcatatcctgg

SEQ ID NO: 1900486 - DNA, 15 bp, Homo sapiens
cagtcatatcctggg

SEQ ID NO: 1900487 - DNA, 15 bp, Homo sapiens
agtcatatcctggga

SEQ ID NO: 1900488 - DNA, 15 bp, Homo sapiens
gtcatatcctgggaa

SEQ ID NO: 1900489 - DNA, 15 bp, Homo sapiens
tcatatcctgggaac

SEQ ID NO: 1900490 - DNA, 15 bp, Homo sapiens
catatcctgggaacc

SEQ ID NO: 1900491 - DNA, 15 bp, Homo sapiens
atatcctgggaacct

SEQ ID NO: 1900492 - DNA, 15 bp, Homo sapiens
tatcctgggaacctg

SEQ ID NO: 1900493 - DNA, 15 bp, Homo sapiens
atcctgggaacctgc

SEQ ID NO: 1900494 - DNA, 15 bp, Homo sapiens
tcctgggaacctgcc

SEQ ID NO: 1900495 - DNA, 15 bp, Homo sapiens
cctgggaacctgccc

SEQ ID NO: 1900496 - DNA, 15 bp, Homo sapiens
ctgggaacctgccca

SEQ ID NO: 1900497 - DNA, 15 bp, Homo sapiens
tgggaacctgcccac

SEQ ID NO: 1900498 - DNA, 15 bp, Homo sapiens
gggaacctgcccacc

SEQ ID NO: 1900499 - DNA, 15 bp, Homo sapiens
ggaacctgcccaccc

SEQ ID NO: 1900500 - DNA, 15 bp, Homo sapiens
gaacctgcccaccca

SEQ ID NO: 1900501 - DNA, 15 bp, Homo sapiens
aacctgcccacccac

SEQ ID NO: 1900502 - DNA, 15 bp, Homo sapiens
acctgcccacccact

SEQ ID NO: 1900503 - DNA, 15 bp, Homo sapiens
cctgcccacccacta

SEQ ID NO: 1900504 - DNA, 15 bp, Homo sapiens
ctgcccacccactac

SEQ ID NO: 1900505 - DNA, 15 bp, Homo sapiens
tgcccacccactaca

SEQ ID NO: 1900506 - DNA, 15 bp, Homo sapiens
gcccacccactacat

SEQ ID NO: 1900507 - DNA, 15 bp, Homo sapiens
cccacccactacatc

SEQ ID NO: 1900508 - DNA, 15 bp, Homo sapiens
ccacccactacatcc

SEQ ID NO: 1900509 - DNA, 15 bp, Homo sapiens
cacccactacatccc

SEQ ID NO: 1900510 - DNA, 15 bp, Homo sapiens
acccactacatccct

SEQ ID NO: 1900511 - DNA, 15 bp, Homo sapiens
cccactacatcccta

SEQ ID NO: 1900512 - DNA, 15 bp, Homo sapiens
ccactacatccctat

SEQ ID NO: 1900513 - DNA, 15 bp, Homo sapiens
cactacatccctata

SEQ ID NO: 1900514 - DNA, 15 bp, Homo sapiens
actacatccctatac

SEQ ID NO: 1900515 - DNA, 15 bp, Homo sapiens
ctacatccctataca

SEQ ID NO: 1900516 - DNA, 15 bp, Homo sapiens
tacatccctatacag

SEQ ID NO: 1900517 - DNA, 15 bp, Homo sapiens
acatccctatacagc

SEQ ID NO: 1900518 - DNA, 15 bp, Homo sapiens
catccctatacagcc

SEQ ID NO: 1900519 - DNA, 15 bp, Homo sapiens
atccctatacagccc

SEQ ID NO: 1900520 - DNA, 15 bp, Homo sapiens
tccctatacagccct

SEQ ID NO: 1900521 - DNA, 15 bp, Homo sapiens
ccctatacagccctt

SEQ ID NO: 1900522 - DNA, 15 bp, Homo sapiens
cctatacagcccttc

SEQ ID NO: 1900523 - DNA, 15 bp, Homo sapiens
ctatacagcccttct

SEQ ID NO: 1900524 - DNA, 15 bp, Homo sapiens
tatacagcccttctg

SEQ ID NO: 1900525 - DNA, 15 bp, Homo sapiens
atacagcccttctgg

SEQ ID NO: 1900526 - DNA, 15 bp, Homo sapiens
tacagcccttctggt

SEQ ID NO: 1900527 - DNA, 15 bp, Homo sapiens
acagcccttctggta

SEQ ID NO: 1900528 - DNA, 15 bp, Homo sapiens
cagcccttctggtag

SEQ ID NO: 1900529 - DNA, 15 bp, Homo sapiens
agcccttctggtagc

SEQ ID NO: 1900530 - DNA, 15 bp, Homo sapiens
gcccttctggtagct

SEQ ID NO: 1900531 - DNA, 15 bp, Homo sapiens
cccttctggtagctt

SEQ ID NO: 1900532 - DNA, 15 bp, Homo sapiens
ccttctggtagcttc

SEQ ID NO: 1900533 - DNA, 15 bp, Homo sapiens
cttctggtagcttca

SEQ ID NO: 1900534 - DNA, 15 bp, Homo sapiens
ttctggtagcttcac

SEQ ID NO: 1900535 - DNA, 15 bp, Homo sapiens
tctggtagcttcacc

SEQ ID NO: 1900536 - DNA, 15 bp, Homo sapiens
ctggtagcttcacct

SEQ ID NO: 1900537 - DNA, 15 bp, Homo sapiens
tggtagcttcacctc

SEQ ID NO: 1900538 - DNA, 15 bp, Homo sapiens
ggtagcttcacctca

SEQ ID NO: 1900539 - DNA, 15 bp, Homo sapiens
gtagcttcacctcag

SEQ ID NO: 1900540 - DNA, 15 bp, Homo sapiens
tagcttcacctcaga

SEQ ID NO: 1900541 - DNA, 15 bp, Homo sapiens
agcttcacctcagac

SEQ ID NO: 1900542 - DNA, 15 bp, Homo sapiens
gcttcacctcagact

SEQ ID NO: 1900543 - DNA, 15 bp, Homo sapiens
cttcacctcagactt

SEQ ID NO: 1900544 - DNA, 15 bp, Homo sapiens
ttcacctcagacttt

SEQ ID NO: 1900545 - DNA, 15 bp, Homo sapiens
tcacctcagactttt

SEQ ID NO: 1900546 - DNA, 15 bp, Homo sapiens
cacctcagacttttg

SEQ ID NO: 1900547 - DNA, 15 bp, Homo sapiens
acctcagacttttga

SEQ ID NO: 1900548 - DNA, 15 bp, Homo sapiens
cctcagacttttgag

SEQ ID NO: 1900549 - DNA, 15 bp, Homo sapiens
ctcagacttttgagc

SEQ ID NO: 1900550 - DNA, 15 bp, Homo sapiens
tcagacttttgagca

SEQ ID NO: 1900551 - DNA, 15 bp, Homo sapiens
cagacttttgagcag

SEQ ID NO: 1900552 - DNA, 15 bp, Homo sapiens
agacttttgagcaga

SEQ ID NO: 1900553 - DNA, 15 bp, Homo sapiens
gacttttgagcagag

SEQ ID NO: 1900554 - DNA, 15 bp, Homo sapiens
acttttgagcagagg

SEQ ID NO: 1900555 - DNA, 15 bp, Homo sapiens
cttttgagcagaggc

SEQ ID NO: 1900556 - DNA, 15 bp, Homo sapiens
ttttgagcagaggcc

SEQ ID NO: 1900557 - DNA, 15 bp, Homo sapiens
tttgagcagaggcct

SEQ ID NO: 1900558 - DNA, 15 bp, Homo sapiens
ttgagcagaggccta

SEQ ID NO: 1900559 - DNA, 15 bp, Homo sapiens
tgagcagaggcctat

SEQ ID NO: 1900560 - DNA, 15 bp, Homo sapiens
gagcagaggcctatt

SEQ ID NO: 1900561 - DNA, 15 bp, Homo sapiens
agcagaggcctattc

SEQ ID NO: 1900562 - DNA, 15 bp, Homo sapiens
gcagaggcctattct

SEQ ID NO: 1900563 - DNA, 15 bp, Homo sapiens
cagaggcctattctg

SEQ ID NO: 1900564 - DNA, 15 bp, Homo sapiens
agaggcctattctga

SEQ ID NO: 1900565 - DNA, 15 bp, Homo sapiens
gaggcctattctgag

SEQ ID NO: 1900566 - DNA, 15 bp, Homo sapiens
aggcctattctgagt

SEQ ID NO: 1900567 - DNA, 15 bp, Homo sapiens
ggcctattctgagtc

SEQ ID NO: 1900568 - DNA, 15 bp, Homo sapiens
gcctattctgagtcc

SEQ ID NO: 1900569 - DNA, 15 bp, Homo sapiens
cctattctgagtccc

SEQ ID NO: 1900570 - DNA, 15 bp, Homo sapiens
ctattctgagtccct

SEQ ID NO: 1900571 - DNA, 15 bp, Homo sapiens
tattctgagtccctg

SEQ ID NO: 1900572 - DNA, 15 bp, Homo sapiens
attctgagtccctga

SEQ ID NO: 1900573 - DNA, 15 bp, Homo sapiens
ttctgagtccctgaa

SEQ ID NO: 1900574 - DNA, 15 bp, Homo sapiens
tctgagtccctgaac

SEQ ID NO: 1900575 - DNA, 15 bp, Homo sapiens
ctgagtccctgaaca

SEQ ID NO: 1900576 - DNA, 15 bp, Homo sapiens
tgagtccctgaacag

SEQ ID NO: 1900577 - DNA, 15 bp, Homo sapiens
gagtccctgaacagt

SEQ ID NO: 1900578 - DNA, 15 bp, Homo sapiens
agtccctgaacagta

SEQ ID NO: 1900579 - DNA, 15 bp, Homo sapiens
gtccctgaacagtat

SEQ ID NO: 1900580 - DNA, 15 bp, Homo sapiens
tccctgaacagtatt

SEQ ID NO: 1900581 - DNA, 15 bp, Homo sapiens
ccctgaacagtattg

SEQ ID NO: 1900582 - DNA, 15 bp, Homo sapiens
cctgaacagtattga

SEQ ID NO: 1900583 - DNA, 15 bp, Homo sapiens
ctgaacagtattgat

SEQ ID NO: 1900584 - DNA, 15 bp, Homo sapiens
tgaacagtattgatg

SEQ ID NO: 1900585 - DNA, 15 bp, Homo sapiens
gaacagtattgatgg

SEQ ID NO: 1900586 - DNA, 15 bp, Homo sapiens
aacagtattgatgga

SEQ ID NO: 1900587 - DNA, 15 bp, Homo sapiens
acagtattgatggag

SEQ ID NO: 1900588 - DNA, 15 bp, Homo sapiens
cagtattgatggagg

SEQ ID NO: 1900589 - DNA, 15 bp, Homo sapiens
agtattgatggaggg

SEQ ID NO: 1900590 - DNA, 15 bp, Homo sapiens
gtattgatggagggg

SEQ ID NO: 1900591 - DNA, 15 bp, Homo sapiens
tattgatggaggggt

SEQ ID NO: 1900592 - DNA, 15 bp, Homo sapiens
attgatggaggggtg

SEQ ID NO: 1900593 - DNA, 15 bp, Homo sapiens
ttgatggaggggtga

SEQ ID NO: 1900594 - DNA, 15 bp, Homo sapiens
tgatggaggggtgat

SEQ ID NO: 1900595 - DNA, 15 bp, Homo sapiens
gatggaggggtgatt

SEQ ID NO: 1900596 - DNA, 15 bp, Homo sapiens
atggaggggtgattc

SEQ ID NO: 1900597 - DNA, 15 bp, Homo sapiens
tggaggggtgattcc

SEQ ID NO: 1900598 - DNA, 15 bp, Homo sapiens
ggaggggtgattccc

SEQ ID NO: 1900599 - DNA, 15 bp, Homo sapiens
gaggggtgattccct

SEQ ID NO: 1900600 - DNA, 15 bp, Homo sapiens
aggggtgattccctg

SEQ ID NO: 1900601 - DNA, 15 bp, Homo sapiens
ggggtgattccctgg

SEQ ID NO: 1900602 - DNA, 15 bp, Homo sapiens
gggtgattccctgga

SEQ ID NO: 1900603 - DNA, 15 bp, Homo sapiens
ggtgattccctggac

SEQ ID NO: 1900604 - DNA, 15 bp, Homo sapiens
gtgattccctggaca

SEQ ID NO: 1900605 - DNA, 15 bp, Homo sapiens
tgattccctggacaa

SEQ ID NO: 1900606 - DNA, 15 bp, Homo sapiens
gattccctggacaat

SEQ ID NO: 1900607 - DNA, 15 bp, Homo sapiens
attccctggacaatt

SEQ ID NO: 1900608 - DNA, 15 bp, Homo sapiens
ttccctggacaattt

SEQ ID NO: 1900609 - DNA, 15 bp, Homo sapiens
tccctggacaatttt

SEQ ID NO: 1900610 - DNA, 15 bp, Homo sapiens
ccctggacaattttc

SEQ ID NO: 1900611 - DNA, 15 bp, Homo sapiens
cctggacaattttct

SEQ ID NO: 1900612 - DNA, 15 bp, Homo sapiens
ctggacaattttcta

SEQ ID NO: 1900613 - DNA, 15 bp, Homo sapiens
tggacaattttctag

SEQ ID NO: 1900614 - DNA, 15 bp, Homo sapiens
ggacaattttctagg

SEQ ID NO: 1900615 - DNA, 15 bp, Homo sapiens
gacaattttctaggt

SEQ ID NO: 1900616 - DNA, 15 bp, Homo sapiens
acaattttctaggta

SEQ ID NO: 1900617 - DNA, 15 bp, Homo sapiens
caattttctaggtag

SEQ ID NO: 1900618 - DNA, 15 bp, Homo sapiens
aattttctaggtagt

SEQ ID NO: 1900619 - DNA, 15 bp, Homo sapiens
attttctaggtagtc

SEQ ID NO: 1900620 - DNA, 15 bp, Homo sapiens
ttttctaggtagtca

SEQ ID NO: 1900621 - DNA, 15 bp, Homo sapiens
tttctaggtagtcac

SEQ ID NO: 1900622 - DNA, 15 bp, Homo sapiens
ttctaggtagtcact

SEQ ID NO: 1900623 - DNA, 15 bp, Homo sapiens
tctaggtagtcactt

SEQ ID NO: 1900624 - DNA, 15 bp, Homo sapiens
ctaggtagtcacttc

SEQ ID NO: 1900625 - DNA, 15 bp, Homo sapiens
taggtagtcacttcc

SEQ ID NO: 1900626 - DNA, 15 bp, Homo sapiens
aggtagtcacttcct

SEQ ID NO: 1900627 - DNA, 15 bp, Homo sapiens
ggtagtcacttccta

SEQ ID NO: 1900628 - DNA, 15 bp, Homo sapiens
gtagtcacttcctat

SEQ ID NO: 1900629 - DNA, 15 bp, Homo sapiens
tagtcacttcctatc

SEQ ID NO: 1900630 - DNA, 15 bp, Homo sapiens
agtcacttcctatcc

SEQ ID NO: 1900631 - DNA, 15 bp, Homo sapiens
gtcacttcctatccc

SEQ ID NO: 1900632 - DNA, 15 bp, Homo sapiens
tcacttcctatccca

SEQ ID NO: 1900633 - DNA, 15 bp, Homo sapiens
cacttcctatcccaa

SEQ ID NO: 1900634 - DNA, 15 bp, Homo sapiens
acttcctatcccaag

SEQ ID NO: 1900635 - DNA, 15 bp, Homo sapiens
cttcctatcccaagc

SEQ ID NO: 1900636 - DNA, 15 bp, Homo sapiens
ttcctatcccaagca

SEQ ID NO: 1900637 - DNA, 15 bp, Homo sapiens
tcctatcccaagcag

SEQ ID NO: 1900638 - DNA, 15 bp, Homo sapiens
cctatcccaagcagc

SEQ ID NO: 1900639 - DNA, 15 bp, Homo sapiens
ctatcccaagcagca

SEQ ID NO: 1900640 - DNA, 15 bp, Homo sapiens
tatcccaagcagcaa

SEQ ID NO: 1900641 - DNA, 15 bp, Homo sapiens
atcccaagcagcaaa

SEQ ID NO: 1900642 - DNA, 15 bp, Homo sapiens
tcccaagcagcaaag

SEQ ID NO: 1900643 - DNA, 15 bp, Homo sapiens
cccaagcagcaaaga

SEQ ID NO: 1900644 - DNA, 15 bp, Homo sapiens
ccaagcagcaaagaa

SEQ ID NO: 1900645 - DNA, 15 bp, Homo sapiens
caagcagcaaagaag

SEQ ID NO: 1900646 - DNA, 15 bp, Homo sapiens
aagcagcaaagaagg

SEQ ID NO: 1900647 - DNA, 15 bp, Homo sapiens
agcagcaaagaaggg

SEQ ID NO: 1900648 - DNA, 15 bp, Homo sapiens
gcagcaaagaaggga

SEQ ID NO: 1900649 - DNA, 15 bp, Homo sapiens
cagcaaagaagggaa

SEQ ID NO: 1900650 - DNA, 15 bp, Homo sapiens
agcaaagaagggaat

SEQ ID NO: 1900651 - DNA, 15 bp, Homo sapiens
gcaaagaagggaatg

SEQ ID NO: 1900652 - DNA, 15 bp, Homo sapiens
caaagaagggaatga

SEQ ID NO: 1900653 - DNA, 15 bp, Homo sapiens
aaagaagggaatgaa

SEQ ID NO: 1900654 - DNA, 15 bp, Homo sapiens
aagaagggaatgaat

SEQ ID NO: 1900655 - DNA, 15 bp, Homo sapiens
agaagggaatgaatc

SEQ ID NO: 1900656 - DNA, 15 bp, Homo sapiens
gaagggaatgaatct

SEQ ID NO: 1900657 - DNA, 15 bp, Homo sapiens
aagggaatgaatctc

SEQ ID NO: 1900658 - DNA, 15 bp, Homo sapiens
agggaatgaatctca

SEQ ID NO: 1900659 - DNA, 15 bp, Homo sapiens
gggaatgaatctcag

SEQ ID NO: 1900660 - DNA, 15 bp, Homo sapiens
ggaatgaatctcagg

SEQ ID NO: 1900661 - DNA, 15 bp, Homo sapiens
gaatgaatctcaggc

SEQ ID NO: 1900662 - DNA, 15 bp, Homo sapiens
aatgaatctcaggcc

SEQ ID NO: 1900663 - DNA, 15 bp, Homo sapiens
atgaatctcaggcct

SEQ ID NO: 1900664 - DNA, 15 bp, Homo sapiens
tgaatctcaggcctg

SEQ ID NO: 1900665 - DNA, 15 bp, Homo sapiens
gaatctcaggcctgt

SEQ ID NO: 1900666 - DNA, 15 bp, Homo sapiens
aatctcaggcctgtg

SEQ ID NO: 1900667 - DNA, 15 bp, Homo sapiens
atctcaggcctgtga

SEQ ID NO: 1900668 - DNA, 15 bp, Homo sapiens
tctcaggcctgtgaa

SEQ ID NO: 1900669 - DNA, 15 bp, Homo sapiens
ctcaggcctgtgaaa

SEQ ID NO: 1900670 - DNA, 15 bp, Homo sapiens
tcaggcctgtgaaaa

SEQ ID NO: 1900671 - DNA, 15 bp, Homo sapiens
caggcctgtgaaaac

SEQ ID NO: 1900672 - DNA, 15 bp, Homo sapiens
aggcctgtgaaaacc

SEQ ID NO: 1900673 - DNA, 15 bp, Homo sapiens
ggcctgtgaaaacca

SEQ ID NO: 1900674 - DNA, 15 bp, Homo sapiens
gcctgtgaaaaccat

SEQ ID NO: 1900675 - DNA, 15 bp, Homo sapiens
cctgtgaaaaccatg

SEQ ID NO: 1900676 - DNA, 15 bp, Homo sapiens
ctgtgaaaaccatgc

SEQ ID NO: 1900677 - DNA, 15 bp, Homo sapiens
tgtgaaaaccatgct

SEQ ID NO: 1900678 - DNA, 15 bp, Homo sapiens
gtgaaaaccatgctg

SEQ ID NO: 1900679 - DNA, 15 bp, Homo sapiens
tgaaaaccatgctgc

SEQ ID NO: 1900680 - DNA, 15 bp, Homo sapiens
gaaaaccatgctgcc

SEQ ID NO: 1900681 - DNA, 15 bp, Homo sapiens
aaaaccatgctgcca

SEQ ID NO: 1900682 - DNA, 15 bp, Homo sapiens
aaaccatgctgccac

SEQ ID NO: 1900683 - DNA, 15 bp, Homo sapiens
aaccatgctgccact

SEQ ID NO: 1900684 - DNA, 15 bp, Homo sapiens
accatgctgccactg

SEQ ID NO: 1900685 - DNA, 15 bp, Homo sapiens
ccatgctgccactgt

SEQ ID NO: 1900686 - DNA, 15 bp, Homo sapiens
catgctgccactgtg

SEQ ID NO: 1900687 - DNA, 15 bp, Homo sapiens
atgctgccactgtgc

SEQ ID NO: 1900688 - DNA, 15 bp, Homo sapiens
tgctgccactgtgca

SEQ ID NO: 1900689 - DNA, 15 bp, Homo sapiens
gctgccactgtgcag

SEQ ID NO: 1900690 - DNA, 15 bp, Homo sapiens
ctgccactgtgcagc

SEQ ID NO: 1900691 - DNA, 15 bp, Homo sapiens
tgccactgtgcagca

SEQ ID NO: 1900692 - DNA, 15 bp, Homo sapiens
gccactgtgcagcag

SEQ ID NO: 1900693 - DNA, 15 bp, Homo sapiens
ccactgtgcagcagc

SEQ ID NO: 1900694 - DNA, 15 bp, Homo sapiens
cactgtgcagcagct

SEQ ID NO: 1900695 - DNA, 15 bp, Homo sapiens
actgtgcagcagctt

SEQ ID NO: 1900696 - DNA, 15 bp, Homo sapiens
ctgtgcagcagcttc

SEQ ID NO: 1900697 - DNA, 15 bp, Homo sapiens
tgtgcagcagcttct

SEQ ID NO: 1900698 - DNA, 15 bp, Homo sapiens
gtgcagcagcttctt

SEQ ID NO: 1900699 - DNA, 15 bp, Homo sapiens
tgcagcagcttcttg

SEQ ID NO: 1900700 - DNA, 15 bp, Homo sapiens
gcagcagcttcttgg

SEQ ID NO: 1900701 - DNA, 15 bp, Homo sapiens
cagcagcttcttggg

SEQ ID NO: 1900702 - DNA, 15 bp, Homo sapiens
agcagcttcttgggg

SEQ ID NO: 1900703 - DNA, 15 bp, Homo sapiens
gcagcttcttggggg

SEQ ID NO: 1900704 - DNA, 15 bp, Homo sapiens
cagcttcttgggggt

SEQ ID NO: 1900705 - DNA, 15 bp, Homo sapiens
agcttcttgggggta

SEQ ID NO: 1900706 - DNA, 15 bp, Homo sapiens
gcttcttgggggtaa

SEQ ID NO: 1900707 - DNA, 15 bp, Homo sapiens
cttcttgggggtaag

SEQ ID NO: 1900708 - DNA, 15 bp, Homo sapiens
ttcttgggggtaaga

SEQ ID NO: 1900709 - DNA, 15 bp, Homo sapiens
tcttgggggtaagag

SEQ ID NO: 1900710 - DNA, 15 bp, Homo sapiens
cttgggggtaagaga

SEQ ID NO: 1900711 - DNA, 15 bp, Homo sapiens
ttgggggtaagagat

SEQ ID NO: 1900712 - DNA, 15 bp, Homo sapiens
tgggggtaagagata

SEQ ID NO: 1900713 - DNA, 15 bp, Homo sapiens
gggggtaagagataa

SEQ ID NO: 1900714 - DNA, 15 bp, Homo sapiens
ggggtaagagataat

SEQ ID NO: 1900715 - DNA, 15 bp, Homo sapiens
gggtaagagataata

SEQ ID NO: 1900716 - DNA, 15 bp, Homo sapiens
ggtaagagataatat

SEQ ID NO: 1900717 - DNA, 15 bp, Homo sapiens
gtaagagataatatc

SEQ ID NO: 1900718 - DNA, 15 bp, Homo sapiens
taagagataatatcc

SEQ ID NO: 1900719 - DNA, 15 bp, Homo sapiens
aagagataatatcct

SEQ ID NO: 1900720 - DNA, 15 bp, Homo sapiens
agagataatatcctc

SEQ ID NO: 1900721 - DNA, 15 bp, Homo sapiens
gagataatatcctca

SEQ ID NO: 1900722 - DNA, 15 bp, Homo sapiens
agataatatcctcac

SEQ ID NO: 1900723 - DNA, 15 bp, Homo sapiens
gataatatcctcact

SEQ ID NO: 1900724 - DNA, 15 bp, Homo sapiens
ataatatcctcactt

SEQ ID NO: 1900725 - DNA, 15 bp, Homo sapiens
taatatcctcacttg

SEQ ID NO: 1900726 - DNA, 15 bp, Homo sapiens
aatatcctcacttgt

SEQ ID NO: 1900727 - DNA, 15 bp, Homo sapiens
atatcctcacttgtc

SEQ ID NO: 1900728 - DNA, 15 bp, Homo sapiens
tatcctcacttgtct

SEQ ID NO: 1900729 - DNA, 15 bp, Homo sapiens
atcctcacttgtctc

SEQ ID NO: 1900730 - DNA, 15 bp, Homo sapiens
tcctcacttgtctct

SEQ ID NO: 1900731 - DNA, 15 bp, Homo sapiens
cctcacttgtctctt

SEQ ID NO: 1900732 - DNA, 15 bp, Homo sapiens
ctcacttgtctctta

SEQ ID NO: 1900733 - DNA, 15 bp, Homo sapiens
tcacttgtctcttag

SEQ ID NO: 1900734 - DNA, 15 bp, Homo sapiens
cacttgtctcttagg

SEQ ID NO: 1900735 - DNA, 15 bp, Homo sapiens
acttgtctcttaggt

SEQ ID NO: 1900736 - DNA, 15 bp, Homo sapiens
cttgtctcttaggtc

SEQ ID NO: 1900737 - DNA, 15 bp, Homo sapiens
ttgtctcttaggtcg

SEQ ID NO: 1900738 - DNA, 15 bp, Homo sapiens
tgtctcttaggtcgt

SEQ ID NO: 1900739 - DNA, 15 bp, Homo sapiens
gtctcttaggtcgtt

SEQ ID NO: 1900740 - DNA, 15 bp, Homo sapiens
tctcttaggtcgttc

SEQ ID NO: 1900741 - DNA, 15 bp, Homo sapiens
ctcttaggtcgttcc

SEQ ID NO: 1900742 - DNA, 15 bp, Homo sapiens
tcttaggtcgttcca

SEQ ID NO: 1900743 - DNA, 15 bp, Homo sapiens
cttaggtcgttccat

SEQ ID NO: 1900744 - DNA, 15 bp, Homo sapiens
ttaggtcgttccata

SEQ ID NO: 1900745 - DNA, 15 bp, Homo sapiens
taggtcgttccatag

SEQ ID NO: 1900746 - DNA, 15 bp, Homo sapiens
aggtcgttccatagg

SEQ ID NO: 1900747 - DNA, 15 bp, Homo sapiens
ggtcgttccataggc

SEQ ID NO: 1900748 - DNA, 15 bp, Homo sapiens
gtcgttccataggct

SEQ ID NO: 1900749 - DNA, 15 bp, Homo sapiens
tcgttccataggcta

SEQ ID NO: 1900750 - DNA, 15 bp, Homo sapiens
cgttccataggctaa

SEQ ID NO: 1900751 - DNA, 15 bp, Homo sapiens
gttccataggctaaa

SEQ ID NO: 1900752 - DNA, 15 bp, Homo sapiens
ttccataggctaaag

SEQ ID NO: 1900753 - DNA, 15 bp, Homo sapiens
tccataggctaaagc

SEQ ID NO: 1900754 - DNA, 15 bp, Homo sapiens
ccataggctaaagct

SEQ ID NO: 1900755 - DNA, 15 bp, Homo sapiens
cataggctaaagctg

SEQ ID NO: 1900756 - DNA, 15 bp, Homo sapiens
ataggctaaagctgg

SEQ ID NO: 1900757 - DNA, 15 bp, Homo sapiens
taggctaaagctggc

SEQ ID NO: 1900758 - DNA, 15 bp, Homo sapiens
aggctaaagctggcc

SEQ ID NO: 1900759 - DNA, 15 bp, Homo sapiens
ggctaaagctggcct

SEQ ID NO: 1900760 - DNA, 15 bp, Homo sapiens
gctaaagctggccta

SEQ ID NO: 1900761 - DNA, 15 bp, Homo sapiens
ctaaagctggcctag

SEQ ID NO: 1900762 - DNA, 15 bp, Homo sapiens
taaagctggcctagc

SEQ ID NO: 1900763 - DNA, 15 bp, Homo sapiens
aaagctggcctagcc

SEQ ID NO: 1900764 - DNA, 15 bp, Homo sapiens
aagctggcctagcca

SEQ ID NO: 1900765 - DNA, 15 bp, Homo sapiens
agctggcctagccaa

SEQ ID NO: 1900766 - DNA, 15 bp, Homo sapiens
gctggcctagccaag

SEQ ID NO: 1900767 - DNA, 15 bp, Homo sapiens
ctggcctagccaaga

SEQ ID NO: 1900768 - DNA, 15 bp, Homo sapiens
tggcctagccaagaa

SEQ ID NO: 1900769 - DNA, 15 bp, Homo sapiens
ggcctagccaagaac

SEQ ID NO: 1900770 - DNA, 15 bp, Homo sapiens
gcctagccaagaact

SEQ ID NO: 1900771 - DNA, 15 bp, Homo sapiens
cctagccaagaactt

SEQ ID NO: 1900772 - DNA, 15 bp, Homo sapiens
ctagccaagaacttg

SEQ ID NO: 1900773 - DNA, 15 bp, Homo sapiens
tagccaagaacttgt

SEQ ID NO: 1900774 - DNA, 15 bp, Homo sapiens
agccaagaacttgta

SEQ ID NO: 1900775 - DNA, 15 bp, Homo sapiens
gccaagaacttgtat

SEQ ID NO: 1900776 - DNA, 15 bp, Homo sapiens
ccaagaacttgtatc

SEQ ID NO: 1900777 - DNA, 15 bp, Homo sapiens
caagaacttgtatca

SEQ ID NO: 1900778 - DNA, 15 bp, Homo sapiens
aagaacttgtatcag

SEQ ID NO: 1900779 - DNA, 15 bp, Homo sapiens
agaacttgtatcagg

SEQ ID NO: 1900780 - DNA, 15 bp, Homo sapiens
gaacttgtatcaggt

SEQ ID NO: 1900781 - DNA, 15 bp, Homo sapiens
aacttgtatcaggta

SEQ ID NO: 1900782 - DNA, 15 bp, Homo sapiens
acttgtatcaggtac

SEQ ID NO: 1900783 - DNA, 15 bp, Homo sapiens
cttgtatcaggtact

SEQ ID NO: 1900784 - DNA, 15 bp, Homo sapiens
ttgtatcaggtactg

SEQ ID NO: 1900785 - DNA, 15 bp, Homo sapiens
tgtatcaggtactgt

SEQ ID NO: 1900786 - DNA, 15 bp, Homo sapiens
gtatcaggtactgtg

SEQ ID NO: 1900787 - DNA, 15 bp, Homo sapiens
tatcaggtactgtga

SEQ ID NO: 1900788 - DNA, 15 bp, Homo sapiens
atcaggtactgtgaa

SEQ ID NO: 1900789 - DNA, 15 bp, Homo sapiens
tcaggtactgtgaaa

SEQ ID NO: 1900790 - DNA, 15 bp, Homo sapiens
caggtactgtgaaat

SEQ ID NO: 1900791 - DNA, 15 bp, Homo sapiens
aggtactgtgaaatt

SEQ ID NO: 1900792 - DNA, 15 bp, Homo sapiens
ggtactgtgaaatta

SEQ ID NO: 1900793 - DNA, 15 bp, Homo sapiens
gtactgtgaaattat

SEQ ID NO: 1900794 - DNA, 15 bp, Homo sapiens
tactgtgaaattatg

SEQ ID NO: 1900795 - DNA, 15 bp, Homo sapiens
actgtgaaattatga

SEQ ID NO: 1900796 - DNA, 15 bp, Homo sapiens
ctgtgaaattatgaa

SEQ ID NO: 1900797 - DNA, 15 bp, Homo sapiens
tgtgaaattatgaaa

SEQ ID NO: 1900798 - DNA, 15 bp, Homo sapiens
gtgaaattatgaaaa

SEQ ID NO: 1900799 - DNA, 15 bp, Homo sapiens
tgaaattatgaaaag

SEQ ID NO: 1900800 - DNA, 15 bp, Homo sapiens
gaaattatgaaaagt

SEQ ID NO: 1900801 - DNA, 15 bp, Homo sapiens
aaattatgaaaagtt

SEQ ID NO: 1900802 - DNA, 15 bp, Homo sapiens
aattatgaaaagttg

SEQ ID NO: 1900803 - DNA, 15 bp, Homo sapiens
attatgaaaagttgt

SEQ ID NO: 1900804 - DNA, 15 bp, Homo sapiens
ttatgaaaagttgtt

SEQ ID NO: 1900805 - DNA, 15 bp, Homo sapiens
tatgaaaagttgttt

SEQ ID NO: 1900806 - DNA, 15 bp, Homo sapiens
atgaaaagttgtttc

SEQ ID NO: 1900807 - DNA, 15 bp, Homo sapiens
tgaaaagttgtttca

SEQ ID NO: 1900808 - DNA, 15 bp, Homo sapiens
gaaaagttgtttcat

SEQ ID NO: 1900809 - DNA, 15 bp, Homo sapiens
aaaagttgtttcatt

SEQ ID NO: 1900810 - DNA, 15 bp, Homo sapiens
aaagttgtttcattg

SEQ ID NO: 1900811 - DNA, 15 bp, Homo sapiens
aagttgtttcattgt

SEQ ID NO: 1900812 - DNA, 15 bp, Homo sapiens
agttgtttcattgtc

SEQ ID NO: 1900813 - DNA, 15 bp, Homo sapiens
gttgtttcattgtct

SEQ ID NO: 1900814 - DNA, 15 bp, Homo sapiens
ttgtttcattgtcta

SEQ ID NO: 1900815 - DNA, 15 bp, Homo sapiens
tgtttcattgtctat

SEQ ID NO: 1900816 - DNA, 15 bp, Homo sapiens
gtttcattgtctatc

SEQ ID NO: 1900817 - DNA, 15 bp, Homo sapiens
tttcattgtctatct

SEQ ID NO: 1900818 - DNA, 15 bp, Homo sapiens
ttcattgtctatctt

SEQ ID NO: 1900819 - DNA, 15 bp, Homo sapiens
tcattgtctatcttc

SEQ ID NO: 1900820 - DNA, 15 bp, Homo sapiens
cattgtctatcttca

SEQ ID NO: 1900821 - DNA, 15 bp, Homo sapiens
attgtctatcttcaa

SEQ ID NO: 1900822 - DNA, 15 bp, Homo sapiens
ttgtctatcttcaag

SEQ ID NO: 1900823 - DNA, 15 bp, Homo sapiens
tgtctatcttcaagt

SEQ ID NO: 1900824 - DNA, 15 bp, Homo sapiens
gtctatcttcaagta

SEQ ID NO: 1900825 - DNA, 15 bp, Homo sapiens
tctatcttcaagtaa

SEQ ID NO: 1900826 - DNA, 15 bp, Homo sapiens
ctatcttcaagtaat

SEQ ID NO: 1900827 - DNA, 15 bp, Homo sapiens
tatcttcaagtaata

SEQ ID NO: 1900828 - DNA, 15 bp, Homo sapiens
atcttcaagtaatat

SEQ ID NO: 1900829 - DNA, 15 bp, Homo sapiens
tcttcaagtaatata

SEQ ID NO: 1900830 - DNA, 15 bp, Homo sapiens
cttcaagtaatataa

SEQ ID NO: 1900831 - DNA, 15 bp, Homo sapiens
ttcaagtaatataaa

SEQ ID NO: 1900832 - DNA, 15 bp, Homo sapiens
tcaagtaatataaat

SEQ ID NO: 1900833 - DNA, 15 bp, Homo sapiens
caagtaatataaatg

SEQ ID NO: 1900834 - DNA, 15 bp, Homo sapiens
aagtaatataaatga

SEQ ID NO: 1900835 - DNA, 15 bp, Homo sapiens
agtaatataaatgag

SEQ ID NO: 1900836 - DNA, 15 bp, Homo sapiens
gtaatataaatgaga

SEQ ID NO: 1900837 - DNA, 15 bp, Homo sapiens
taatataaatgagag

SEQ ID NO: 1900838 - DNA, 15 bp, Homo sapiens
aatataaatgagaga

SEQ ID NO: 1900839 - DNA, 15 bp, Homo sapiens
atataaatgagagag

SEQ ID NO: 1900840 - DNA, 15 bp, Homo sapiens
tataaatgagagagt

SEQ ID NO: 1900841 - DNA, 15 bp, Homo sapiens
ataaatgagagagta

SEQ ID NO: 1900842 - DNA, 15 bp, Homo sapiens
taaatgagagagtag

SEQ ID NO: 1900843 - DNA, 15 bp, Homo sapiens
aaatgagagagtagg

SEQ ID NO: 1900844 - DNA, 15 bp, Homo sapiens
aatgagagagtaggt

SEQ ID NO: 1900845 - DNA, 15 bp, Homo sapiens
atgagagagtaggtt

SEQ ID NO: 1900846 - DNA, 15 bp, Homo sapiens
tgagagagtaggttt

SEQ ID NO: 1900847 - DNA, 15 bp, Homo sapiens
gagagagtaggtttt

SEQ ID NO: 1900848 - DNA, 15 bp, Homo sapiens
agagagtaggtttta

SEQ ID NO: 1900849 - DNA, 15 bp, Homo sapiens
gagagtaggttttat

SEQ ID NO: 1900850 - DNA, 15 bp, Homo sapiens
agagtaggttttatt

SEQ ID NO: 1900851 - DNA, 15 bp, Homo sapiens
gagtaggttttattt

SEQ ID NO: 1900852 - DNA, 15 bp, Homo sapiens
agtaggttttatttt

SEQ ID NO: 1900853 - DNA, 15 bp, Homo sapiens
gtaggttttattttc

SEQ ID NO: 1900854 - DNA, 15 bp, Homo sapiens
taggttttattttca

SEQ ID NO: 1900855 - DNA, 15 bp, Homo sapiens
aggttttattttcat

SEQ ID NO: 1900856 - DNA, 15 bp, Homo sapiens
ggttttattttcata

SEQ ID NO: 1900857 - DNA, 15 bp, Homo sapiens
gttttattttcataa

SEQ ID NO: 1900858 - DNA, 15 bp, Homo sapiens
ttttattttcataaa

SEQ ID NO: 1900859 - DNA, 15 bp, Homo sapiens
tttattttcataaaa

SEQ ID NO: 1900860 - DNA, 15 bp, Homo sapiens
ttattttcataaaat

SEQ ID NO: 1900861 - DNA, 15 bp, Homo sapiens
tattttcataaaatt

SEQ ID NO: 1900862 - DNA, 15 bp, Homo sapiens
attttcataaaatta

SEQ ID NO: 1900863 - DNA, 15 bp, Homo sapiens
ttttcataaaattaa

SEQ ID NO: 1900864 - DNA, 15 bp, Homo sapiens
tttcataaaattaaa

SEQ ID NO: 1900865 - DNA, 15 bp, Homo sapiens
ttcataaaattaaag

SEQ ID NO: 1900866 - DNA, 15 bp, Homo sapiens
tcataaaattaaaga

SEQ ID NO: 1900867 - DNA, 15 bp, Homo sapiens
cataaaattaaagat

SEQ ID NO: 1900868 - DNA, 15 bp, Homo sapiens
ataaaattaaagatt

SEQ ID NO: 1900869 - DNA, 15 bp, Homo sapiens
taaaattaaagatta

SEQ ID NO: 1900870 - DNA, 15 bp, Homo sapiens
aaaattaaagattac

SEQ ID NO: 1900871 - DNA, 15 bp, Homo sapiens
aaattaaagattaca

SEQ ID NO: 1900872 - DNA, 15 bp, Homo sapiens
aattaaagattacag

SEQ ID NO: 1900873 - DNA, 15 bp, Homo sapiens
attaaagattacaga

SEQ ID NO: 1900874 - DNA, 15 bp, Homo sapiens
ttaaagattacagaa

SEQ ID NO: 1900875 - DNA, 15 bp, Homo sapiens
taaagattacagaaa

SEQ ID NO: 1900876 - DNA, 15 bp, Homo sapiens
aaagattacagaaat

SEQ ID NO: 1900877 - DNA, 15 bp, Homo sapiens
aagattacagaaatg

SEQ ID NO: 1900878 - DNA, 15 bp, Homo sapiens
agattacagaaatgt

SEQ ID NO: 1900879 - DNA, 15 bp, Homo sapiens
gattacagaaatgtt

SEQ ID NO: 1900880 - DNA, 15 bp, Homo sapiens
attacagaaatgttg

SEQ ID NO: 1900881 - DNA, 15 bp, Homo sapiens
ttacagaaatgttgt

SEQ ID NO: 1900882 - DNA, 15 bp, Homo sapiens
tacagaaatgttgtt

SEQ ID NO: 1900883 - DNA, 15 bp, Homo sapiens
acagaaatgttgttc

SEQ ID NO: 1900884 - DNA, 15 bp, Homo sapiens
cagaaatgttgttca

SEQ ID NO: 1900885 - DNA, 15 bp, Homo sapiens
agaaatgttgttcaa

SEQ ID NO: 1900886 - DNA, 15 bp, Homo sapiens
gaaatgttgttcaaa

SEQ ID NO: 1900887 - DNA, 15 bp, Homo sapiens
aaatgttgttcaaat

SEQ ID NO: 1900888 - DNA, 15 bp, Homo sapiens
aatgttgttcaaatt

SEQ ID NO: 1900889 - DNA, 15 bp, Homo sapiens
atgttgttcaaatta

SEQ ID NO: 1900890 - DNA, 15 bp, Homo sapiens
tgttgttcaaattag

SEQ ID NO: 1900891 - DNA, 15 bp, Homo sapiens
gttgttcaaattaga

SEQ ID NO: 1900892 - DNA, 15 bp, Homo sapiens
ttgttcaaattagag

SEQ ID NO: 1900893 - DNA, 15 bp, Homo sapiens
tgttcaaattagagc

SEQ ID NO: 1900894 - DNA, 15 bp, Homo sapiens
gttcaaattagagct

SEQ ID NO: 1900895 - DNA, 15 bp, Homo sapiens
ttcaaattagagctt

SEQ ID NO: 1900896 - DNA, 15 bp, Homo sapiens
tcaaattagagctta

SEQ ID NO: 1900897 - DNA, 15 bp, Homo sapiens
caaattagagcttaa

SEQ ID NO: 1900898 - DNA, 15 bp, Homo sapiens
aaattagagcttaat

SEQ ID NO: 1900899 - DNA, 15 bp, Homo sapiens
aattagagcttaatc

SEQ ID NO: 1900900 - DNA, 15 bp, Homo sapiens
attagagcttaatca

SEQ ID NO: 1900901 - DNA, 15 bp, Homo sapiens
ttagagcttaatcac

SEQ ID NO: 1900902 - DNA, 15 bp, Homo sapiens
tagagcttaatcaca

SEQ ID NO: 1900903 - DNA, 15 bp, Homo sapiens
agagcttaatcacac

SEQ ID NO: 1900904 - DNA, 15 bp, Homo sapiens
gagcttaatcacaca

SEQ ID NO: 1900905 - DNA, 15 bp, Homo sapiens
agcttaatcacacag

SEQ ID NO: 1900906 - DNA, 15 bp, Homo sapiens
gcttaatcacacagg

SEQ ID NO: 1900907 - DNA, 15 bp, Homo sapiens
cttaatcacacagga

SEQ ID NO: 1900908 - DNA, 15 bp, Homo sapiens
ttaatcacacaggaa

SEQ ID NO: 1900909 - DNA, 15 bp, Homo sapiens
taatcacacaggaaa

SEQ ID NO: 1900910 - DNA, 15 bp, Homo sapiens
aatcacacaggaaag

SEQ ID NO: 1900911 - DNA, 15 bp, Homo sapiens
atcacacaggaaaga

SEQ ID NO: 1900912 - DNA, 15 bp, Homo sapiens
tcacacaggaaagaa

SEQ ID NO: 1900913 - DNA, 15 bp, Homo sapiens
cacacaggaaagaat

SEQ ID NO: 1900914 - DNA, 15 bp, Homo sapiens
acacaggaaagaatg

SEQ ID NO: 1900915 - DNA, 15 bp, Homo sapiens
cacaggaaagaatgc

SEQ ID NO: 1900916 - DNA, 15 bp, Homo sapiens
acaggaaagaatgct

SEQ ID NO: 1900917 - DNA, 15 bp, Homo sapiens
caggaaagaatgctt

SEQ ID NO: 1900918 - DNA, 15 bp, Homo sapiens
aggaaagaatgctta

SEQ ID NO: 1900919 - DNA, 15 bp, Homo sapiens
ggaaagaatgcttaa

SEQ ID NO: 1900920 - DNA, 15 bp, Homo sapiens
gaaagaatgcttaaa

SEQ ID NO: 1900921 - DNA, 15 bp, Homo sapiens
aaagaatgcttaaaa

SEQ ID NO: 1900922 - DNA, 15 bp, Homo sapiens
aagaatgcttaaaaa

SEQ ID NO: 1900923 - DNA, 15 bp, Homo sapiens
agaatgcttaaaaat

SEQ ID NO: 1900924 - DNA, 15 bp, Homo sapiens
gaatgcttaaaaata

SEQ ID NO: 1900925 - DNA, 15 bp, Homo sapiens
aatgcttaaaaataa

SEQ ID NO: 1900926 - DNA, 15 bp, Homo sapiens
atgcttaaaaataag

SEQ ID NO: 1900927 - DNA, 15 bp, Homo sapiens
tgcttaaaaataagt

SEQ ID NO: 1900928 - DNA, 15 bp, Homo sapiens
gcttaaaaataagtt

SEQ ID NO: 1900929 - DNA, 15 bp, Homo sapiens
cttaaaaataagttc

SEQ ID NO: 1900930 - DNA, 15 bp, Homo sapiens
ttaaaaataagttcc

SEQ ID NO: 1900931 - DNA, 15 bp, Homo sapiens
taaaaataagttcca

SEQ ID NO: 1900932 - DNA, 15 bp, Homo sapiens
aaaaataagttccag

SEQ ID NO: 1900933 - DNA, 15 bp, Homo sapiens
aaaataagttccaga

SEQ ID NO: 1900934 - DNA, 15 bp, Homo sapiens
aaataagttccagat

SEQ ID NO: 1900935 - DNA, 15 bp, Homo sapiens
aataagttccagata

SEQ ID NO: 1900936 - DNA, 15 bp, Homo sapiens
ataagttccagatac

SEQ ID NO: 1900937 - DNA, 15 bp, Homo sapiens
taagttccagataca

SEQ ID NO: 1900938 - DNA, 15 bp, Homo sapiens
aagttccagatacat

SEQ ID NO: 1900939 - DNA, 15 bp, Homo sapiens
agttccagatacata

SEQ ID NO: 1900940 - DNA, 15 bp, Homo sapiens
gttccagatacatac

SEQ ID NO: 1900941 - DNA, 15 bp, Homo sapiens
ttccagatacataca

SEQ ID NO: 1900942 - DNA, 15 bp, Homo sapiens
tccagatacatacac

SEQ ID NO: 1900943 - DNA, 15 bp, Homo sapiens
ccagatacatacaca

SEQ ID NO: 1900944 - DNA, 15 bp, Homo sapiens
cagatacatacacac

SEQ ID NO: 1900945 - DNA, 15 bp, Homo sapiens
agatacatacacact

SEQ ID NO: 1900946 - DNA, 15 bp, Homo sapiens
gatacatacacactc

SEQ ID NO: 1900947 - DNA, 15 bp, Homo sapiens
atacatacacactcc

SEQ ID NO: 1900948 - DNA, 15 bp, Homo sapiens
tacatacacactcca

SEQ ID NO: 1900949 - DNA, 15 bp, Homo sapiens
acatacacactccag

SEQ ID NO: 1900950 - DNA, 15 bp, Homo sapiens
catacacactccaga

SEQ ID NO: 1900951 - DNA, 15 bp, Homo sapiens
atacacactccagaa

SEQ ID NO: 1900952 - DNA, 15 bp, Homo sapiens
tacacactccagaag

SEQ ID NO: 1900953 - DNA, 15 bp, Homo sapiens
acacactccagaagg

SEQ ID NO: 1900954 - DNA, 15 bp, Homo sapiens
cacactccagaaggg

SEQ ID NO: 1900955 - DNA, 15 bp, Homo sapiens
acactccagaagggt

SEQ ID NO: 1900956 - DNA, 15 bp, Homo sapiens
cactccagaagggtt

SEQ ID NO: 1900957 - DNA, 15 bp, Homo sapiens
actccagaagggtta

SEQ ID NO: 1900958 - DNA, 15 bp, Homo sapiens
ctccagaagggttat

SEQ ID NO: 1900959 - DNA, 15 bp, Homo sapiens
tccagaagggttatg

SEQ ID NO: 1900960 - DNA, 15 bp, Homo sapiens
ccagaagggttatga

SEQ ID NO: 1900961 - DNA, 15 bp, Homo sapiens
cagaagggttatgat

SEQ ID NO: 1900962 - DNA, 15 bp, Homo sapiens
agaagggttatgatg

SEQ ID NO: 1900963 - DNA, 15 bp, Homo sapiens
gaagggttatgatgt

SEQ ID NO: 1900964 - DNA, 15 bp, Homo sapiens
aagggttatgatgtt

SEQ ID NO: 1900965 - DNA, 15 bp, Homo sapiens
agggttatgatgttt

SEQ ID NO: 1900966 - DNA, 15 bp, Homo sapiens
gggttatgatgtttg

SEQ ID NO: 1900967 - DNA, 15 bp, Homo sapiens
ggttatgatgtttgc

SEQ ID NO: 1900968 - DNA, 15 bp, Homo sapiens
gttatgatgtttgca

SEQ ID NO: 1900969 - DNA, 15 bp, Homo sapiens
ttatgatgtttgcac

SEQ ID NO: 1900970 - DNA, 15 bp, Homo sapiens
tatgatgtttgcact

SEQ ID NO: 1900971 - DNA, 15 bp, Homo sapiens
atgatgtttgcactt

SEQ ID NO: 1900972 - DNA, 15 bp, Homo sapiens
tgatgtttgcacttt

SEQ ID NO: 1900973 - DNA, 15 bp, Homo sapiens
gatgtttgcactttg

SEQ ID NO: 1900974 - DNA, 15 bp, Homo sapiens
atgtttgcactttgg

SEQ ID NO: 1900975 - DNA, 15 bp, Homo sapiens
tgtttgcactttggg

SEQ ID NO: 1900976 - DNA, 15 bp, Homo sapiens
gtttgcactttggga

SEQ ID NO: 1900977 - DNA, 15 bp, Homo sapiens
tttgcactttgggaa

SEQ ID NO: 1900978 - DNA, 15 bp, Homo sapiens
ttgcactttgggaaa

SEQ ID NO: 1900979 - DNA, 15 bp, Homo sapiens
tgcactttgggaaaa

SEQ ID NO: 1900980 - DNA, 15 bp, Homo sapiens
gcactttgggaaaaa

SEQ ID NO: 1900981 - DNA, 15 bp, Homo sapiens
cactttgggaaaaac

SEQ ID NO: 1900982 - DNA, 15 bp, Homo sapiens
actttgggaaaaact

SEQ ID NO: 1900983 - DNA, 15 bp, Homo sapiens
ctttgggaaaaactt

SEQ ID NO: 1900984 - DNA, 15 bp, Homo sapiens
tttgggaaaaactta

SEQ ID NO: 1900985 - DNA, 15 bp, Homo sapiens
ttgggaaaaacttaa

SEQ ID NO: 1900986 - DNA, 15 bp, Homo sapiens
tgggaaaaacttaaa

SEQ ID NO: 1900987 - DNA, 15 bp, Homo sapiens
gggaaaaacttaaaa

SEQ ID NO: 1900988 - DNA, 15 bp, Homo sapiens
ggaaaaacttaaaaa

SEQ ID NO: 1900989 - DNA, 15 bp, Homo sapiens
gaaaaacttaaaaaa

SEQ ID NO: 1900990 - DNA, 15 bp, Homo sapiens
aaaaacttaaaaaaa

SEQ ID NO: 1900991 - DNA, 15 bp, Homo sapiens
aaaacttaaaaaaag

SEQ ID NO: 1900992 - DNA, 15 bp, Homo sapiens
aaacttaaaaaaaga

SEQ ID NO: 1900993 - DNA, 15 bp, Homo sapiens
aacttaaaaaaagaa

SEQ ID NO: 1900994 - DNA, 15 bp, Homo sapiens
acttaaaaaaagaat

SEQ ID NO: 1900995 - DNA, 15 bp, Homo sapiens
cttaaaaaaagaatg

SEQ ID NO: 1900996 - DNA, 15 bp, Homo sapiens
ttaaaaaaagaatgc

SEQ ID NO: 1900997 - DNA, 15 bp, Homo sapiens
taaaaaaagaatgct

SEQ ID NO: 1900998 - DNA, 15 bp, Homo sapiens
aaaaaaagaatgctt

SEQ ID NO: 1900999 - DNA, 15 bp, Homo sapiens
aaaaaagaatgcttt

SEQ ID NO: 1901000 - DNA, 15 bp, Homo sapiens
aaaaagaatgctttt

SEQ ID NO: 1901001 - DNA, 15 bp, Homo sapiens
aaaagaatgcttttt

SEQ ID NO: 1901002 - DNA, 15 bp, Homo sapiens
aaagaatgcttttta

SEQ ID NO: 1901003 - DNA, 15 bp, Homo sapiens
aagaatgctttttat

SEQ ID NO: 1901004 - DNA, 15 bp, Homo sapiens
agaatgctttttata

SEQ ID NO: 1901005 - DNA, 15 bp, Homo sapiens
gaatgctttttatag

SEQ ID NO: 1901006 - DNA, 15 bp, Homo sapiens
aatgctttttatagt

SEQ ID NO: 1901007 - DNA, 15 bp, Homo sapiens
atgctttttatagtt

SEQ ID NO: 1901008 - DNA, 15 bp, Homo sapiens
tgctttttatagttg

SEQ ID NO: 1901009 - DNA, 15 bp, Homo sapiens
gctttttatagttgt

SEQ ID NO: 1901010 - DNA, 15 bp, Homo sapiens
ctttttatagttgtc

SEQ ID NO: 1901011 - DNA, 15 bp, Homo sapiens
tttttatagttgtct

SEQ ID NO: 1901012 - DNA, 15 bp, Homo sapiens
ttttatagttgtctg

SEQ ID NO: 1901013 - DNA, 15 bp, Homo sapiens
tttatagttgtctgt

SEQ ID NO: 1901014 - DNA, 15 bp, Homo sapiens
ttatagttgtctgta

SEQ ID NO: 1901015 - DNA, 15 bp, Homo sapiens
tatagttgtctgtaa

SEQ ID NO: 1901016 - DNA, 15 bp, Homo sapiens
atagttgtctgtaag

SEQ ID NO: 1901017 - DNA, 15 bp, Homo sapiens
tagttgtctgtaaga

SEQ ID NO: 1901018 - DNA, 15 bp, Homo sapiens
agttgtctgtaagag

SEQ ID NO: 1901019 - DNA, 15 bp, Homo sapiens
gttgtctgtaagagc

SEQ ID NO: 1901020 - DNA, 15 bp, Homo sapiens
ttgtctgtaagagcc

SEQ ID NO: 1901021 - DNA, 15 bp, Homo sapiens
tgtctgtaagagcct

SEQ ID NO: 1901022 - DNA, 15 bp, Homo sapiens
gtctgtaagagcctt

SEQ ID NO: 1901023 - DNA, 15 bp, Homo sapiens
tctgtaagagccttt

SEQ ID NO: 1901024 - DNA, 15 bp, Homo sapiens
ctgtaagagcctttt

SEQ ID NO: 1901025 - DNA, 15 bp, Homo sapiens
tgtaagagccttttc

SEQ ID NO: 1901026 - DNA, 15 bp, Homo sapiens
gtaagagccttttct

SEQ ID NO: 1901027 - DNA, 15 bp, Homo sapiens
taagagccttttctt

SEQ ID NO: 1901028 - DNA, 15 bp, Homo sapiens
aagagccttttcttt

SEQ ID NO: 1901029 - DNA, 15 bp, Homo sapiens
agagccttttctttg

SEQ ID NO: 1901030 - DNA, 15 bp, Homo sapiens
gagccttttctttgc

SEQ ID NO: 1901031 - DNA, 15 bp, Homo sapiens
agccttttctttgcc

SEQ ID NO: 1901032 - DNA, 15 bp, Homo sapiens
gccttttctttgcca

SEQ ID NO: 1901033 - DNA, 15 bp, Homo sapiens
ccttttctttgccaa

SEQ ID NO: 1901034 - DNA, 15 bp, Homo sapiens
cttttctttgccaac

SEQ ID NO: 1901035 - DNA, 15 bp, Homo sapiens
ttttctttgccaaca

SEQ ID NO: 1901036 - DNA, 15 bp, Homo sapiens
tttctttgccaacaa

SEQ ID NO: 1901037 - DNA, 15 bp, Homo sapiens
ttctttgccaacaaa

SEQ ID NO: 1901038 - DNA, 15 bp, Homo sapiens
tctttgccaacaaaa

SEQ ID NO: 1901039 - DNA, 15 bp, Homo sapiens
ctttgccaacaaaac

SEQ ID NO: 1901040 - DNA, 15 bp, Homo sapiens
tttgccaacaaaacc

SEQ ID NO: 1901041 - DNA, 15 bp, Homo sapiens
ttgccaacaaaacct

SEQ ID NO: 1901042 - DNA, 15 bp, Homo sapiens
tgccaacaaaacctt

SEQ ID NO: 1901043 - DNA, 15 bp, Homo sapiens
gccaacaaaaccttt

SEQ ID NO: 1901044 - DNA, 15 bp, Homo sapiens
ccaacaaaaccttta

SEQ ID NO: 1901045 - DNA, 15 bp, Homo sapiens
caacaaaacctttaa

SEQ ID NO: 1901046 - DNA, 15 bp, Homo sapiens
aacaaaacctttaaa

SEQ ID NO: 1901047 - DNA, 15 bp, Homo sapiens
aaaacctttaaaaat

SEQ ID NO: 1901048 - DNA, 15 bp, Homo sapiens
aaacctttaaaaatt

SEQ ID NO: 1901049 - DNA, 15 bp, Homo sapiens
aacctttaaaaatta

SEQ ID NO: 1901050 - DNA, 15 bp, Homo sapiens
acctttaaaaattat

SEQ ID NO: 1901051 - DNA, 15 bp, Homo sapiens
cctttaaaaattatt

SEQ ID NO: 1901052 - DNA, 15 bp, Homo sapiens
ctttaaaaattattg

SEQ ID NO: 1901053 - DNA, 15 bp, Homo sapiens
tttaaaaattattgt

SEQ ID NO: 1901054 - DNA, 15 bp, Homo sapiens
ttaaaaattattgtt

SEQ ID NO: 1901055 - DNA, 15 bp, Homo sapiens
taaaaattattgtta

SEQ ID NO: 1901056 - DNA, 15 bp, Homo sapiens
aaaaattattgttat

SEQ ID NO: 1901057 - DNA, 15 bp, Homo sapiens
aaaattattgttatt

SEQ ID NO: 1901058 - DNA, 15 bp, Homo sapiens
aaattattgttattc

SEQ ID NO: 1901059 - DNA, 15 bp, Homo sapiens
aattattgttattca

SEQ ID NO: 1901060 - DNA, 15 bp, Homo sapiens
attattgttattcat

SEQ ID NO: 1901061 - DNA, 15 bp, Homo sapiens
ttattgttattcatt

SEQ ID NO: 1901062 - DNA, 15 bp, Homo sapiens
tattgttattcattc

SEQ ID NO: 1901063 - DNA, 15 bp, Homo sapiens
attgttattcattcc

SEQ ID NO: 1901064 - DNA, 15 bp, Homo sapiens
ttgttattcattcct

SEQ ID NO: 1901065 - DNA, 15 bp, Homo sapiens
tgttattcattccta

SEQ ID NO: 1901066 - DNA, 15 bp, Homo sapiens
gttattcattcctat

SEQ ID NO: 1901067 - DNA, 15 bp, Homo sapiens
ttattcattcctatg

SEQ ID NO: 1901068 - DNA, 15 bp, Homo sapiens
tattcattcctatgc

SEQ ID NO: 1901069 - DNA, 15 bp, Homo sapiens
attcattcctatgct

SEQ ID NO: 1901070 - DNA, 15 bp, Homo sapiens
ttcattcctatgctt

SEQ ID NO: 1901071 - DNA, 15 bp, Homo sapiens
tcattcctatgcttt

SEQ ID NO: 1901072 - DNA, 15 bp, Homo sapiens
cattcctatgctttt

SEQ ID NO: 1901073 - DNA, 15 bp, Homo sapiens
attcctatgcttttg

SEQ ID NO: 1901074 - DNA, 15 bp, Homo sapiens
ttcctatgcttttga

SEQ ID NO: 1901075 - DNA, 15 bp, Homo sapiens
tcctatgcttttgaa

SEQ ID NO: 1901076 - DNA, 15 bp, Homo sapiens
cctatgcttttgaat

SEQ ID NO: 1901077 - DNA, 15 bp, Homo sapiens
ctatgcttttgaatg

SEQ ID NO: 1901078 - DNA, 15 bp, Homo sapiens
tatgcttttgaatgg

SEQ ID NO: 1901079 - DNA, 15 bp, Homo sapiens
atgcttttgaatggt

SEQ ID NO: 1901080 - DNA, 15 bp, Homo sapiens
tgcttttgaatggta

SEQ ID NO: 1901081 - DNA, 15 bp, Homo sapiens
gcttttgaatggtaa

SEQ ID NO: 1901082 - DNA, 15 bp, Homo sapiens
cttttgaatggtaat

SEQ ID NO: 1901083 - DNA, 15 bp, Homo sapiens
ttttgaatggtaatt

SEQ ID NO: 1901084 - DNA, 15 bp, Homo sapiens
tttgaatggtaattt

SEQ ID NO: 1901085 - DNA, 15 bp, Homo sapiens
ttgaatggtaattta

SEQ ID NO: 1901086 - DNA, 15 bp, Homo sapiens
tgaatggtaatttat

SEQ ID NO: 1901087 - DNA, 15 bp, Homo sapiens
gaatggtaatttata

SEQ ID NO: 1901088 - DNA, 15 bp, Homo sapiens
aatggtaatttatat

SEQ ID NO: 1901089 - DNA, 15 bp, Homo sapiens
atggtaatttatatt

SEQ ID NO: 1901090 - DNA, 15 bp, Homo sapiens
tggtaatttatattc

SEQ ID NO: 1901091 - DNA, 15 bp, Homo sapiens
ggtaatttatattca

SEQ ID NO: 1901092 - DNA, 15 bp, Homo sapiens
gtaatttatattcag

SEQ ID NO: 1901093 - DNA, 15 bp, Homo sapiens
taatttatattcagc

SEQ ID NO: 1901094 - DNA, 15 bp, Homo sapiens
aatttatattcagca

SEQ ID NO: 1901095 - DNA, 15 bp, Homo sapiens
atttatattcagcat

SEQ ID NO: 1901096 - DNA, 15 bp, Homo sapiens
tttatattcagcata

SEQ ID NO: 1901097 - DNA, 15 bp, Homo sapiens
ttatattcagcatat

SEQ ID NO: 1901098 - DNA, 15 bp, Homo sapiens
tatattcagcatatc

SEQ ID NO: 1901099 - DNA, 15 bp, Homo sapiens
atattcagcatatct

SEQ ID NO: 1901100 - DNA, 15 bp, Homo sapiens
tattcagcatatctg

SEQ ID NO: 1901101 - DNA, 15 bp, Homo sapiens
attcagcatatctga

SEQ ID NO: 1901102 - DNA, 15 bp, Homo sapiens
ttcagcatatctgaa

SEQ ID NO: 1901103 - DNA, 15 bp, Homo sapiens
tcagcatatctgaaa

SEQ ID NO: 1901104 - DNA, 15 bp, Homo sapiens
cagcatatctgaaat

SEQ ID NO: 1901105 - DNA, 15 bp, Homo sapiens
agcatatctgaaata

SEQ ID NO: 1901106 - DNA, 15 bp, Homo sapiens
gcatatctgaaataa

SEQ ID NO: 1901107 - DNA, 15 bp, Homo sapiens
catatctgaaataat

SEQ ID NO: 1901108 - DNA, 15 bp, Homo sapiens
atatctgaaataatc

SEQ ID NO: 1901109 - DNA, 15 bp, Homo sapiens
tatctgaaataatca

SEQ ID NO: 1901110 - DNA, 15 bp, Homo sapiens
atctgaaataatcac

SEQ ID NO: 1901111 - DNA, 15 bp, Homo sapiens
tctgaaataatcaca

SEQ ID NO: 1901112 - DNA, 15 bp, Homo sapiens
ctgaaataatcacag

SEQ ID NO: 1901113 - DNA, 15 bp, Homo sapiens
tgaaataatcacagt

SEQ ID NO: 1901114 - DNA, 15 bp, Homo sapiens
gaaataatcacagtt

SEQ ID NO: 1901115 - DNA, 15 bp, Homo sapiens
aaataatcacagtta

SEQ ID NO: 1901116 - DNA, 15 bp, Homo sapiens
aataatcacagttaa

SEQ ID NO: 1901117 - DNA, 15 bp, Homo sapiens
ataatcacagttaaa

SEQ ID NO: 1901118 - DNA, 15 bp, Homo sapiens
taatcacagttaaaa

SEQ ID NO: 1901119 - DNA, 15 bp, Homo sapiens
aatcacagttaaaag

SEQ ID NO: 1901120 - DNA, 15 bp, Homo sapiens
atcacagttaaaagg

SEQ ID NO: 1901121 - DNA, 15 bp, Homo sapiens
tcacagttaaaagga

SEQ ID NO: 1901122 - DNA, 15 bp, Homo sapiens
cacagttaaaaggaa

SEQ ID NO: 1901123 - DNA, 15 bp, Homo sapiens
acagttaaaaggaaa

SEQ ID NO: 1901124 - DNA, 15 bp, Homo sapiens
cagttaaaaggaaat

SEQ ID NO: 1901125 - DNA, 15 bp, Homo sapiens
agttaaaaggaaata

SEQ ID NO: 1901126 - DNA, 15 bp, Homo sapiens
gttaaaaggaaatac

SEQ ID NO: 1901127 - DNA, 15 bp, Homo sapiens
ttaaaaggaaatacc

SEQ ID NO: 1901128 - DNA, 15 bp, Homo sapiens
taaaaggaaatacca

SEQ ID NO: 1901129 - DNA, 15 bp, Homo sapiens
aaaaggaaataccaa

SEQ ID NO: 1901130 - DNA, 15 bp, Homo sapiens
aaaggaaataccaaa

SEQ ID NO: 1901131 - DNA, 15 bp, Homo sapiens
aaggaaataccaaaa

SEQ ID NO: 1901132 - DNA, 15 bp, Homo sapiens
aggaaataccaaaat

SEQ ID NO: 1901133 - DNA, 15 bp, Homo sapiens
ggaaataccaaaatt

SEQ ID NO: 1901134 - DNA, 15 bp, Homo sapiens
gaaataccaaaattg

SEQ ID NO: 1901135 - DNA, 15 bp, Homo sapiens
aaataccaaaattgg

SEQ ID NO: 1901136 - DNA, 15 bp, Homo sapiens
aataccaaaattgga

SEQ ID NO: 1901137 - DNA, 15 bp, Homo sapiens
ataccaaaattggag

SEQ ID NO: 1901138 - DNA, 15 bp, Homo sapiens
taccaaaattggagt

SEQ ID NO: 1901139 - DNA, 15 bp, Homo sapiens
accaaaattggagtc

SEQ ID NO: 1901140 - DNA, 15 bp, Homo sapiens
ccaaaattggagtca

SEQ ID NO: 1901141 - DNA, 15 bp, Homo sapiens
aaaattggagtcaaa

SEQ ID NO: 1901142 - DNA, 15 bp, Homo sapiens
aaattggagtcaaag

SEQ ID NO: 1901143 - DNA, 15 bp, Homo sapiens
aattggagtcaaagc

SEQ ID NO: 1901144 - DNA, 15 bp, Homo sapiens
attggagtcaaagcc

SEQ ID NO: 1901145 - DNA, 15 bp, Homo sapiens
ttggagtcaaagcca

SEQ ID NO: 1901146 - DNA, 15 bp, Homo sapiens
tggagtcaaagccat

SEQ ID NO: 1901147 - DNA, 15 bp, Homo sapiens
ggagtcaaagccatc

SEQ ID NO: 1901148 - DNA, 15 bp, Homo sapiens
gagtcaaagccatct

SEQ ID NO: 1901149 - DNA, 15 bp, Homo sapiens
agtcaaagccatctc

SEQ ID NO: 1901150 - DNA, 15 bp, Homo sapiens
gtcaaagccatctcc

SEQ ID NO: 1901151 - DNA, 15 bp, Homo sapiens
tcaaagccatctcct

SEQ ID NO: 1901152 - DNA, 15 bp, Homo sapiens
caaagccatctcctc

SEQ ID NO: 1901153 - DNA, 15 bp, Homo sapiens
aaagccatctcctcc

SEQ ID NO: 1901154 - DNA, 15 bp, Homo sapiens
aagccatctcctcca

SEQ ID NO: 1901155 - DNA, 15 bp, Homo sapiens
agccatctcctccag

SEQ ID NO: 1901156 - DNA, 15 bp, Homo sapiens
gccatctcctccagg

SEQ ID NO: 1901157 - DNA, 15 bp, Homo sapiens
ccatctcctccagga

SEQ ID NO: 1901158 - DNA, 15 bp, Homo sapiens
catctcctccaggaa

SEQ ID NO: 1901159 - DNA, 15 bp, Homo sapiens
atctcctccaggaaa

SEQ ID NO: 1901160 - DNA, 15 bp, Homo sapiens
tctcctccaggaaac

SEQ ID NO: 1901161 - DNA, 15 bp, Homo sapiens
ctcctccaggaaaca

SEQ ID NO: 1901162 - DNA, 15 bp, Homo sapiens
tcctccaggaaacag

SEQ ID NO: 1901163 - DNA, 15 bp, Homo sapiens
cctccaggaaacaga

SEQ ID NO: 1901164 - DNA, 15 bp, Homo sapiens
ctccaggaaacagaa

SEQ ID NO: 1901165 - DNA, 15 bp, Homo sapiens
tccaggaaacagaat

SEQ ID NO: 1901166 - DNA, 15 bp, Homo sapiens
ccaggaaacagaatg

SEQ ID NO: 1901167 - DNA, 15 bp, Homo sapiens
caggaaacagaatgt

SEQ ID NO: 1901168 - DNA, 15 bp, Homo sapiens
aggaaacagaatgtc

SEQ ID NO: 1901169 - DNA, 15 bp, Homo sapiens
ggaaacagaatgtca

SEQ ID NO: 1901170 - DNA, 15 bp, Homo sapiens
gaaacagaatgtcaa

SEQ ID NO: 1901171 - DNA, 15 bp, Homo sapiens
aaacagaatgtcaaa

SEQ ID NO: 1901172 - DNA, 15 bp, Homo sapiens
aacagaatgtcaaat

SEQ ID NO: 1901173 - DNA, 15 bp, Homo sapiens
acagaatgtcaaata

SEQ ID NO: 1901174 - DNA, 15 bp, Homo sapiens
cagaatgtcaaatac

SEQ ID NO: 1901175 - DNA, 15 bp, Homo sapiens
agaatgtcaaatacc

SEQ ID NO: 1901176 - DNA, 15 bp, Homo sapiens
gaatgtcaaatacct

SEQ ID NO: 1901177 - DNA, 15 bp, Homo sapiens
aatgtcaaatacctt

SEQ ID NO: 1901178 - DNA, 15 bp, Homo sapiens
atgtcaaataccttg

SEQ ID NO: 1901179 - DNA, 15 bp, Homo sapiens
tgtcaaataccttgg

SEQ ID NO: 1901180 - DNA, 15 bp, Homo sapiens
gtcaaataccttgga

SEQ ID NO: 1901181 - DNA, 15 bp, Homo sapiens
tcaaataccttggag

SEQ ID NO: 1901182 - DNA, 15 bp, Homo sapiens
caaataccttggagt

SEQ ID NO: 1901183 - DNA, 15 bp, Homo sapiens
aaataccttggagtc

SEQ ID NO: 1901184 - DNA, 15 bp, Homo sapiens
aataccttggagtca

SEQ ID NO: 1901185 - DNA, 15 bp, Homo sapiens
ataccttggagtcag

SEQ ID NO: 1901186 - DNA, 15 bp, Homo sapiens
taccttggagtcagt

SEQ ID NO: 1901187 - DNA, 15 bp, Homo sapiens
accttggagtcagtg

SEQ ID NO: 1901188 - DNA, 15 bp, Homo sapiens
ccttggagtcagtgg

SEQ ID NO: 1901189 - DNA, 15 bp, Homo sapiens
cttggagtcagtggt

SEQ ID NO: 1901190 - DNA, 15 bp, Homo sapiens
ttggagtcagtggta

SEQ ID NO: 1901191 - DNA, 15 bp, Homo sapiens
tggagtcagtggtag

SEQ ID NO: 1901192 - DNA, 15 bp, Homo sapiens
ggagtcagtggtagg

SEQ ID NO: 1901193 - DNA, 15 bp, Homo sapiens
gagtcagtggtagga

SEQ ID NO: 1901194 - DNA, 15 bp, Homo sapiens
agtcagtggtaggag

SEQ ID NO: 1901195 - DNA, 15 bp, Homo sapiens
gtcagtggtaggaga

SEQ ID NO: 1901196 - DNA, 15 bp, Homo sapiens
tcagtggtaggagaa

SEQ ID NO: 1901197 - DNA, 15 bp, Homo sapiens
cagtggtaggagaaa

SEQ ID NO: 1901198 - DNA, 15 bp, Homo sapiens
agtggtaggagaaat

SEQ ID NO: 1901199 - DNA, 15 bp, Homo sapiens
gtggtaggagaaata

SEQ ID NO: 1901200 - DNA, 15 bp, Homo sapiens
tggtaggagaaataa

SEQ ID NO: 1901201 - DNA, 15 bp, Homo sapiens
ggtaggagaaataaa

SEQ ID NO: 1901202 - DNA, 15 bp, Homo sapiens
gtaggagaaataaaa

SEQ ID NO: 1901203 - DNA, 15 bp, Homo sapiens
taggagaaataaaac

SEQ ID NO: 1901204 - DNA, 15 bp, Homo sapiens
aggagaaataaaacc

SEQ ID NO: 1901205 - DNA, 15 bp, Homo sapiens
ggagaaataaaaccc

SEQ ID NO: 1901206 - DNA, 15 bp, Homo sapiens
gagaaataaaacccc

SEQ ID NO: 1901207 - DNA, 15 bp, Homo sapiens
agaaataaaacccca

SEQ ID NO: 1901208 - DNA, 15 bp, Homo sapiens
gaaataaaaccccat

SEQ ID NO: 1901209 - DNA, 15 bp, Homo sapiens
aaataaaaccccatc

SEQ ID NO: 1901210 - DNA, 15 bp, Homo sapiens
aataaaaccccatct

SEQ ID NO: 1901211 - DNA, 15 bp, Homo sapiens
ataaaaccccatctc

SEQ ID NO: 1901212 - DNA, 15 bp, Homo sapiens
taaaaccccatctcc

SEQ ID NO: 1901213 - DNA, 15 bp, Homo sapiens
aaaaccccatctcct

SEQ ID NO: 1901214 - DNA, 15 bp, Homo sapiens
aaaccccatctcctt

SEQ ID NO: 1901215 - DNA, 15 bp, Homo sapiens
aaccccatctccttc

SEQ ID NO: 1901216 - DNA, 15 bp, Homo sapiens
accccatctccttca

SEQ ID NO: 1901217 - DNA, 15 bp, Homo sapiens
ccccatctccttcag

SEQ ID NO: 1901218 - DNA, 15 bp, Homo sapiens
cccatctccttcagc

SEQ ID NO: 1901219 - DNA, 15 bp, Homo sapiens
ccatctccttcagcc

SEQ ID NO: 1901220 - DNA, 15 bp, Homo sapiens
catctccttcagcca

SEQ ID NO: 1901221 - DNA, 15 bp, Homo sapiens
atctccttcagccaa

SEQ ID NO: 1901222 - DNA, 15 bp, Homo sapiens
tctccttcagccaaa

SEQ ID NO: 1901223 - DNA, 15 bp, Homo sapiens
ctccttcagccaaaa

SEQ ID NO: 1901224 - DNA, 15 bp, Homo sapiens
tccttcagccaaaaa

SEQ ID NO: 1901225 - DNA, 15 bp, Homo sapiens
ccttcagccaaaaac

SEQ ID NO: 1901226 - DNA, 15 bp, Homo sapiens
cttcagccaaaaaca

SEQ ID NO: 1901227 - DNA, 15 bp, Homo sapiens
ttcagccaaaaacat

SEQ ID NO: 1901228 - DNA, 15 bp, Homo sapiens
tcagccaaaaacatt

SEQ ID NO: 1901229 - DNA, 15 bp, Homo sapiens
cagccaaaaacatta

SEQ ID NO: 1901230 - DNA, 15 bp, Homo sapiens
agccaaaaacattac

SEQ ID NO: 1901231 - DNA, 15 bp, Homo sapiens
gccaaaaacattaca

SEQ ID NO: 1901232 - DNA, 15 bp, Homo sapiens
ccaaaaacattacat

SEQ ID NO: 1901233 - DNA, 15 bp, Homo sapiens
caaaaacattacata

SEQ ID NO: 1901234 - DNA, 15 bp, Homo sapiens
aaaaacattacatag

SEQ ID NO: 1901235 - DNA, 15 bp, Homo sapiens
aaaacattacataga

SEQ ID NO: 1901236 - DNA, 15 bp, Homo sapiens
aaacattacatagaa

SEQ ID NO: 1901237 - DNA, 15 bp, Homo sapiens
aacattacatagaaa

SEQ ID NO: 1901238 - DNA, 15 bp, Homo sapiens
acattacatagaaac

SEQ ID NO: 1901239 - DNA, 15 bp, Homo sapiens
cattacatagaaaca

SEQ ID NO: 1901240 - DNA, 15 bp, Homo sapiens
attacatagaaacat

SEQ ID NO: 1901241 - DNA, 15 bp, Homo sapiens
ttacatagaaacata

SEQ ID NO: 1901242 - DNA, 15 bp, Homo sapiens
tacatagaaacatag

SEQ ID NO: 1901243 - DNA, 15 bp, Homo sapiens
acatagaaacataga

SEQ ID NO: 1901244 - DNA, 15 bp, Homo sapiens
catagaaacatagac

SEQ ID NO: 1901245 - DNA, 15 bp, Homo sapiens
atagaaacatagaca

SEQ ID NO: 1901246 - DNA, 15 bp, Homo sapiens
tagaaacatagacat

SEQ ID NO: 1901247 - DNA, 15 bp, Homo sapiens
agaaacatagacata

SEQ ID NO: 1901248 - DNA, 15 bp, Homo sapiens
gaaacatagacatag

SEQ ID NO: 1901249 - DNA, 15 bp, Homo sapiens
aaacatagacataga

SEQ ID NO: 1901250 - DNA, 15 bp, Homo sapiens
aacatagacatagaa

SEQ ID NO: 1901251 - DNA, 15 bp, Homo sapiens
acatagacatagaag

SEQ ID NO: 1901252 - DNA, 15 bp, Homo sapiens
catagacatagaagc

SEQ ID NO: 1901253 - DNA, 15 bp, Homo sapiens
atagacatagaagcg

SEQ ID NO: 1901254 - DNA, 15 bp, Homo sapiens
tagacatagaagcgg

SEQ ID NO: 1901255 - DNA, 15 bp, Homo sapiens
agacatagaagcgga

SEQ ID NO: 1901256 - DNA, 15 bp, Homo sapiens
gacatagaagcggag

SEQ ID NO: 1901257 - DNA, 15 bp, Homo sapiens
acatagaagcggagg

SEQ ID NO: 1901258 - DNA, 15 bp, Homo sapiens
catagaagcggagga

SEQ ID NO: 1901259 - DNA, 15 bp, Homo sapiens
atagaagcggaggaa

SEQ ID NO: 1901260 - DNA, 15 bp, Homo sapiens
tagaagcggaggaag

SEQ ID NO: 1901261 - DNA, 15 bp, Homo sapiens
agaagcggaggaaga

SEQ ID NO: 1901262 - DNA, 15 bp, Homo sapiens
gaagcggaggaagaa

SEQ ID NO: 1901263 - DNA, 15 bp, Homo sapiens
aagcggaggaagaaa

SEQ ID NO: 1901264 - DNA, 15 bp, Homo sapiens
agcggaggaagaaag

SEQ ID NO: 1901265 - DNA, 15 bp, Homo sapiens
gcggaggaagaaagg

SEQ ID NO: 1901266 - DNA, 15 bp, Homo sapiens
cggaggaagaaaggc

SEQ ID NO: 1901267 - DNA, 15 bp, Homo sapiens
ggaggaagaaaggca

SEQ ID NO: 1901268 - DNA, 15 bp, Homo sapiens
gaggaagaaaggcac

SEQ ID NO: 1901269 - DNA, 15 bp, Homo sapiens
aggaagaaaggcaca

SEQ ID NO: 1901270 - DNA, 15 bp, Homo sapiens
ggaagaaaggcacaa

SEQ ID NO: 1901271 - DNA, 15 bp, Homo sapiens
gaagaaaggcacaaa

SEQ ID NO: 1901272 - DNA, 15 bp, Homo sapiens
aagaaaggcacaaat

SEQ ID NO: 1901273 - DNA, 15 bp, Homo sapiens
agaaaggcacaaatg

SEQ ID NO: 1901274 - DNA, 15 bp, Homo sapiens
gaaaggcacaaatgt

SEQ ID NO: 1901275 - DNA, 15 bp, Homo sapiens
aaaggcacaaatgta

SEQ ID NO: 1901276 - DNA, 15 bp, Homo sapiens
aaggcacaaatgtag

SEQ ID NO: 1901277 - DNA, 15 bp, Homo sapiens
aggcacaaatgtaga

SEQ ID NO: 1901278 - DNA, 15 bp, Homo sapiens
ggcacaaatgtagaa

SEQ ID NO: 1901279 - DNA, 15 bp, Homo sapiens
gcacaaatgtagaag

SEQ ID NO: 1901280 - DNA, 15 bp, Homo sapiens
cacaaatgtagaaga

SEQ ID NO: 1901281 - DNA, 15 bp, Homo sapiens
acaaatgtagaagac

SEQ ID NO: 1901282 - DNA, 15 bp, Homo sapiens
caaatgtagaagaca

SEQ ID NO: 1901283 - DNA, 15 bp, Homo sapiens
aaatgtagaagacat

SEQ ID NO: 1901284 - DNA, 15 bp, Homo sapiens
aatgtagaagacata

SEQ ID NO: 1901285 - DNA, 15 bp, Homo sapiens
atgtagaagacatac

SEQ ID NO: 1901286 - DNA, 15 bp, Homo sapiens
tgtagaagacatact

SEQ ID NO: 1901287 - DNA, 15 bp, Homo sapiens
gtagaagacatactt

SEQ ID NO: 1901288 - DNA, 15 bp, Homo sapiens
tagaagacatacttt

SEQ ID NO: 1901289 - DNA, 15 bp, Homo sapiens
agaagacatactttg

SEQ ID NO: 1901290 - DNA, 15 bp, Homo sapiens
gaagacatactttgg

SEQ ID NO: 1901291 - DNA, 15 bp, Homo sapiens
aagacatactttggc

SEQ ID NO: 1901292 - DNA, 15 bp, Homo sapiens
agacatactttggcc

SEQ ID NO: 1901293 - DNA, 15 bp, Homo sapiens
gacatactttggcct

SEQ ID NO: 1901294 - DNA, 15 bp, Homo sapiens
acatactttggcctt

SEQ ID NO: 1901295 - DNA, 15 bp, Homo sapiens
catactttggccttc

SEQ ID NO: 1901296 - DNA, 15 bp, Homo sapiens
atactttggccttca

SEQ ID NO: 1901297 - DNA, 15 bp, Homo sapiens
tactttggccttcat

SEQ ID NO: 1901298 - DNA, 15 bp, Homo sapiens
actttggccttcatt

SEQ ID NO: 1901299 - DNA, 15 bp, Homo sapiens
ctttggccttcattc

SEQ ID NO: 1901300 - DNA, 15 bp, Homo sapiens
tttggccttcattct

SEQ ID NO: 1901301 - DNA, 15 bp, Homo sapiens
ttggccttcattcta

SEQ ID NO: 1901302 - DNA, 15 bp, Homo sapiens
tggccttcattctat

SEQ ID NO: 1901303 - DNA, 15 bp, Homo sapiens
ggccttcattctatg

SEQ ID NO: 1901304 - DNA, 15 bp, Homo sapiens
gccttcattctatga

SEQ ID NO: 1901305 - DNA, 15 bp, Homo sapiens
ccttcattctatgaa

SEQ ID NO: 1901306 - DNA, 15 bp, Homo sapiens
cttcattctatgaag

SEQ ID NO: 1901307 - DNA, 15 bp, Homo sapiens
ttcattctatgaagc

SEQ ID NO: 1901308 - DNA, 15 bp, Homo sapiens
tcattctatgaagct

SEQ ID NO: 1901309 - DNA, 15 bp, Homo sapiens
cattctatgaagctc

SEQ ID NO: 1901310 - DNA, 15 bp, Homo sapiens
attctatgaagctcc

SEQ ID NO: 1901311 - DNA, 15 bp, Homo sapiens
ttctatgaagctcct

SEQ ID NO: 1901312 - DNA, 15 bp, Homo sapiens
tctatgaagctcctg

SEQ ID NO: 1901313 - DNA, 15 bp, Homo sapiens
ctatgaagctcctgc

SEQ ID NO: 1901314 - DNA, 15 bp, Homo sapiens
tatgaagctcctgct

SEQ ID NO: 1901315 - DNA, 15 bp, Homo sapiens
atgaagctcctgctt

SEQ ID NO: 1901316 - DNA, 15 bp, Homo sapiens
tgaagctcctgcttc

SEQ ID NO: 1901317 - DNA, 15 bp, Homo sapiens
gaagctcctgcttct

SEQ ID NO: 1901318 - DNA, 15 bp, Homo sapiens
aagctcctgcttcta

SEQ ID NO: 1901319 - DNA, 15 bp, Homo sapiens
agctcctgcttctac

SEQ ID NO: 1901320 - DNA, 15 bp, Homo sapiens
gctcctgcttctacc

SEQ ID NO: 1901321 - DNA, 15 bp, Homo sapiens
ctcctgcttctacca

SEQ ID NO: 1901322 - DNA, 15 bp, Homo sapiens
tcctgcttctaccac

SEQ ID NO: 1901323 - DNA, 15 bp, Homo sapiens
cctgcttctaccacc

SEQ ID NO: 1901324 - DNA, 15 bp, Homo sapiens
ctgcttctaccaccc

SEQ ID NO: 1901325 - DNA, 15 bp, Homo sapiens
tgcttctaccaccca

SEQ ID NO: 1901326 - DNA, 15 bp, Homo sapiens
gcttctaccacccac

SEQ ID NO: 1901327 - DNA, 15 bp, Homo sapiens
cttctaccacccaca

SEQ ID NO: 1901328 - DNA, 15 bp, Homo sapiens
ttctaccacccacac

SEQ ID NO: 1901329 - DNA, 15 bp, Homo sapiens
tctaccacccacaca

SEQ ID NO: 1901330 - DNA, 15 bp, Homo sapiens
ctaccacccacacat

SEQ ID NO: 1901331 - DNA, 15 bp, Homo sapiens
taccacccacacatc

SEQ ID NO: 1901332 - DNA, 15 bp, Homo sapiens
accacccacacatca

SEQ ID NO: 1901333 - DNA, 15 bp, Homo sapiens
ccacccacacatcag

SEQ ID NO: 1901334 - DNA, 15 bp, Homo sapiens
cacccacacatcaga

SEQ ID NO: 1901335 - DNA, 15 bp, Homo sapiens
acccacacatcagac

SEQ ID NO: 1901336 - DNA, 15 bp, Homo sapiens
cccacacatcagacc

SEQ ID NO: 1901337 - DNA, 15 bp, Homo sapiens
ccacacatcagacca

SEQ ID NO: 1901338 - DNA, 15 bp, Homo sapiens
cacacatcagaccaa

SEQ ID NO: 1901339 - DNA, 15 bp, Homo sapiens
acacatcagaccaag

SEQ ID NO: 1901340 - DNA, 15 bp, Homo sapiens
cacatcagaccaaga

SEQ ID NO: 1901341 - DNA, 15 bp, Homo sapiens
acatcagaccaagac

SEQ ID NO: 1901342 - DNA, 15 bp, Homo sapiens
catcagaccaagaca

SEQ ID NO: 1901343 - DNA, 15 bp, Homo sapiens
atcagaccaagacac

SEQ ID NO: 1901344 - DNA, 15 bp, Homo sapiens
tcagaccaagacaca

SEQ ID NO: 1901345 - DNA, 15 bp, Homo sapiens
cagaccaagacacac

SEQ ID NO: 1901346 - DNA, 15 bp, Homo sapiens
agaccaagacacacc

SEQ ID NO: 1901347 - DNA, 15 bp, Homo sapiens
gaccaagacacacct

SEQ ID NO: 1901348 - DNA, 15 bp, Homo sapiens
accaagacacacctt

SEQ ID NO: 1901349 - DNA, 15 bp, Homo sapiens
ccaagacacaccttt

SEQ ID NO: 1901350 - DNA, 15 bp, Homo sapiens
caagacacaccttta

SEQ ID NO: 1901351 - DNA, 15 bp, Homo sapiens
aagacacacctttaa

SEQ ID NO: 1901352 - DNA, 15 bp, Homo sapiens
agacacacctttaaa

SEQ ID NO: 1901353 - DNA, 15 bp, Homo sapiens
gacacacctttaaat

SEQ ID NO: 1901354 - DNA, 15 bp, Homo sapiens
acacacctttaaata

SEQ ID NO: 1901355 - DNA, 15 bp, Homo sapiens
cacacctttaaatat

SEQ ID NO: 1901356 - DNA, 15 bp, Homo sapiens
acacctttaaatatg

SEQ ID NO: 1901357 - DNA, 15 bp, Homo sapiens
cacctttaaatatgt

SEQ ID NO: 1901358 - DNA, 15 bp, Homo sapiens
acctttaaatatgta

SEQ ID NO: 1901359 - DNA, 15 bp, Homo sapiens
cctttaaatatgtag

SEQ ID NO: 1901360 - DNA, 15 bp, Homo sapiens
ctttaaatatgtagg

SEQ ID NO: 1901361 - DNA, 15 bp, Homo sapiens
tttaaatatgtaggg

SEQ ID NO: 1901362 - DNA, 15 bp, Homo sapiens
ttaaatatgtaggga

SEQ ID NO: 1901363 - DNA, 15 bp, Homo sapiens
taaatatgtagggag

SEQ ID NO: 1901364 - DNA, 15 bp, Homo sapiens
aaatatgtagggagg

SEQ ID NO: 1901365 - DNA, 15 bp, Homo sapiens
aatatgtagggaggg

SEQ ID NO: 1901366 - DNA, 15 bp, Homo sapiens
atatgtagggaggga

SEQ ID NO: 1901367 - DNA, 15 bp, Homo sapiens
tatgtagggagggag

SEQ ID NO: 1901368 - DNA, 15 bp, Homo sapiens
atgtagggagggagg

SEQ ID NO: 1901369 - DNA, 15 bp, Homo sapiens
tgtagggagggaggg

SEQ ID NO: 1901370 - DNA, 15 bp, Homo sapiens
gtagggagggagggg

SEQ ID NO: 1901371 - DNA, 15 bp, Homo sapiens
tagggagggagggga

SEQ ID NO: 1901372 - DNA, 15 bp, Homo sapiens
agggagggaggggaa

SEQ ID NO: 1901373 - DNA, 15 bp, Homo sapiens
gggagggaggggaaa

SEQ ID NO: 1901374 - DNA, 15 bp, Homo sapiens
gagggaggggaaaat

SEQ ID NO: 1901375 - DNA, 15 bp, Homo sapiens
agggaggggaaaatt

SEQ ID NO: 1901376 - DNA, 15 bp, Homo sapiens
gggaggggaaaattt

SEQ ID NO: 1901377 - DNA, 15 bp, Homo sapiens
ggaggggaaaatttt

SEQ ID NO: 1901378 - DNA, 15 bp, Homo sapiens
gaggggaaaattttg

SEQ ID NO: 1901379 - DNA, 15 bp, Homo sapiens
aggggaaaattttgt

SEQ ID NO: 1901380 - DNA, 15 bp, Homo sapiens
ggggaaaattttgtc

SEQ ID NO: 1901381 - DNA, 15 bp, Homo sapiens
gggaaaattttgtct

SEQ ID NO: 1901382 - DNA, 15 bp, Homo sapiens
ggaaaattttgtctt

SEQ ID NO: 1901383 - DNA, 15 bp, Homo sapiens
gaaaattttgtcttg

SEQ ID NO: 1901384 - DNA, 15 bp, Homo sapiens
aaaattttgtcttgt

SEQ ID NO: 1901385 - DNA, 15 bp, Homo sapiens
aaattttgtcttgtc

SEQ ID NO: 1901386 - DNA, 15 bp, Homo sapiens
aattttgtcttgtcg

SEQ ID NO: 1901387 - DNA, 15 bp, Homo sapiens
attttgtcttgtcgg

SEQ ID NO: 1901388 - DNA, 15 bp, Homo sapiens
ttttgtcttgtcgga

SEQ ID NO: 1901389 - DNA, 15 bp, Homo sapiens
tttgtcttgtcggag

SEQ ID NO: 1901390 - DNA, 15 bp, Homo sapiens
ttgtcttgtcggagc

SEQ ID NO: 1901391 - DNA, 15 bp, Homo sapiens
tgtcttgtcggagct

SEQ ID NO: 1901392 - DNA, 15 bp, Homo sapiens
gtcttgtcggagctc

SEQ ID NO: 1901393 - DNA, 15 bp, Homo sapiens
tcttgtcggagctca

SEQ ID NO: 1901394 - DNA, 15 bp, Homo sapiens
cttgtcggagctcac

SEQ ID NO: 1901395 - DNA, 15 bp, Homo sapiens
ttgtcggagctcaca

SEQ ID NO: 1901396 - DNA, 15 bp, Homo sapiens
tgtcggagctcacag

SEQ ID NO: 1901397 - DNA, 15 bp, Homo sapiens
gtcggagctcacagt

SEQ ID NO: 1901398 - DNA, 15 bp, Homo sapiens
tcggagctcacagtc

SEQ ID NO: 1901399 - DNA, 15 bp, Homo sapiens
cggagctcacagtca

SEQ ID NO: 1901400 - DNA, 15 bp, Homo sapiens
ggagctcacagtcag

SEQ ID NO: 1901401 - DNA, 15 bp, Homo sapiens
gagctcacagtcagt

SEQ ID NO: 1901402 - DNA, 15 bp, Homo sapiens
agctcacagtcagtt

SEQ ID NO: 1901403 - DNA, 15 bp, Homo sapiens
gctcacagtcagttg

SEQ ID NO: 1901404 - DNA, 15 bp, Homo sapiens
ctcacagtcagttgc

SEQ ID NO: 1901405 - DNA, 15 bp, Homo sapiens
tcacagtcagttgcc

SEQ ID NO: 1901406 - DNA, 15 bp, Homo sapiens
cacagtcagttgccc

SEQ ID NO: 1901407 - DNA, 15 bp, Homo sapiens
acagtcagttgccca

SEQ ID NO: 1901408 - DNA, 15 bp, Homo sapiens
cagtcagttgcccaa

SEQ ID NO: 1901409 - DNA, 15 bp, Homo sapiens
agtcagttgcccaag

SEQ ID NO: 1901410 - DNA, 15 bp, Homo sapiens
gtcagttgcccaagg

SEQ ID NO: 1901411 - DNA, 15 bp, Homo sapiens
tcagttgcccaaggc

SEQ ID NO: 1901412 - DNA, 15 bp, Homo sapiens
cagttgcccaaggct

SEQ ID NO: 1901413 - DNA, 15 bp, Homo sapiens
agttgcccaaggctg

SEQ ID NO: 1901414 - DNA, 15 bp, Homo sapiens
gttgcccaaggctga

SEQ ID NO: 1901415 - DNA, 15 bp, Homo sapiens
ttgcccaaggctgaa

SEQ ID NO: 1901416 - DNA, 15 bp, Homo sapiens
tgcccaaggctgaac

SEQ ID NO: 1901417 - DNA, 15 bp, Homo sapiens
gcccaaggctgaaca

SEQ ID NO: 1901418 - DNA, 15 bp, Homo sapiens
cccaaggctgaacat

SEQ ID NO: 1901419 - DNA, 15 bp, Homo sapiens
ccaaggctgaacatg

SEQ ID NO: 1901420 - DNA, 15 bp, Homo sapiens
caaggctgaacatga

SEQ ID NO: 1901421 - DNA, 15 bp, Homo sapiens
aaggctgaacatgaa

SEQ ID NO: 1901422 - DNA, 15 bp, Homo sapiens
aggctgaacatgaat

SEQ ID NO: 1901423 - DNA, 15 bp, Homo sapiens
ggctgaacatgaata

SEQ ID NO: 1901424 - DNA, 15 bp, Homo sapiens
gctgaacatgaataa

SEQ ID NO: 1901425 - DNA, 15 bp, Homo sapiens
ctgaacatgaataac

SEQ ID NO: 1901426 - DNA, 15 bp, Homo sapiens
tgaacatgaataacc

SEQ ID NO: 1901427 - DNA, 15 bp, Homo sapiens
gaacatgaataacca

SEQ ID NO: 1901428 - DNA, 15 bp, Homo sapiens
aacatgaataaccac

SEQ ID NO: 1901429 - DNA, 15 bp, Homo sapiens
acatgaataaccact

SEQ ID NO: 1901430 - DNA, 15 bp, Homo sapiens
catgaataaccactc

SEQ ID NO: 1901431 - DNA, 15 bp, Homo sapiens
atgaataaccactcc

SEQ ID NO: 1901432 - DNA, 15 bp, Homo sapiens
tgaataaccactcca

SEQ ID NO: 1901433 - DNA, 15 bp, Homo sapiens
gaataaccactccaa

SEQ ID NO: 1901434 - DNA, 15 bp, Homo sapiens
aataaccactccaag

SEQ ID NO: 1901435 - DNA, 15 bp, Homo sapiens
ataaccactccaaga

SEQ ID NO: 1901436 - DNA, 15 bp, Homo sapiens
taaccactccaagac

SEQ ID NO: 1901437 - DNA, 15 bp, Homo sapiens
aaccactccaagaca

SEQ ID NO: 1901438 - DNA, 15 bp, Homo sapiens
accactccaagacat

SEQ ID NO: 1901439 - DNA, 15 bp, Homo sapiens
ccactccaagacatg

SEQ ID NO: 1901440 - DNA, 15 bp, Homo sapiens
cactccaagacatgc

SEQ ID NO: 1901441 - DNA, 15 bp, Homo sapiens
actccaagacatgca

SEQ ID NO: 1901442 - DNA, 15 bp, Homo sapiens
ctccaagacatgcac

SEQ ID NO: 1901443 - DNA, 15 bp, Homo sapiens
tccaagacatgcact

SEQ ID NO: 1901444 - DNA, 15 bp, Homo sapiens
ccaagacatgcactg

SEQ ID NO: 1901445 - DNA, 15 bp, Homo sapiens
caagacatgcactga

SEQ ID NO: 1901446 - DNA, 15 bp, Homo sapiens
aagacatgcactgac

SEQ ID NO: 1901447 - DNA, 15 bp, Homo sapiens
agacatgcactgaca

SEQ ID NO: 1901448 - DNA, 15 bp, Homo sapiens
gacatgcactgacaa

SEQ ID NO: 1901449 - DNA, 15 bp, Homo sapiens
acatgcactgacaac

SEQ ID NO: 1901450 - DNA, 15 bp, Homo sapiens
catgcactgacaacc

SEQ ID NO: 1901451 - DNA, 15 bp, Homo sapiens
atgcactgacaaccc

SEQ ID NO: 1901452 - DNA, 15 bp, Homo sapiens
tgcactgacaaccca

SEQ ID NO: 1901453 - DNA, 15 bp, Homo sapiens
gcactgacaacccac

SEQ ID NO: 1901454 - DNA, 15 bp, Homo sapiens
cactgacaacccaca

SEQ ID NO: 1901455 - DNA, 15 bp, Homo sapiens
actgacaacccacat

SEQ ID NO: 1901456 - DNA, 15 bp, Homo sapiens
ctgacaacccacatt

SEQ ID NO: 1901457 - DNA, 15 bp, Homo sapiens
tgacaacccacattt

SEQ ID NO: 1901458 - DNA, 15 bp, Homo sapiens
gacaacccacatttc

SEQ ID NO: 1901459 - DNA, 15 bp, Homo sapiens
acaacccacatttcc

SEQ ID NO: 1901460 - DNA, 15 bp, Homo sapiens
caacccacatttcct

SEQ ID NO: 1901461 - DNA, 15 bp, Homo sapiens
aacccacatttcctg

SEQ ID NO: 1901462 - DNA, 15 bp, Homo sapiens
acccacatttcctgc

SEQ ID NO: 1901463 - DNA, 15 bp, Homo sapiens
cccacatttcctgcc

SEQ ID NO: 1901464 - DNA, 15 bp, Homo sapiens
ccacatttcctgcct

SEQ ID NO: 1901465 - DNA, 15 bp, Homo sapiens
cacatttcctgcctt

SEQ ID NO: 1901466 - DNA, 15 bp, Homo sapiens
acatttcctgccttt

SEQ ID NO: 1901467 - DNA, 15 bp, Homo sapiens
catttcctgcctttg

SEQ ID NO: 1901468 - DNA, 15 bp, Homo sapiens
atttcctgcctttgg

SEQ ID NO: 1901469 - DNA, 15 bp, Homo sapiens
tttcctgcctttggt

SEQ ID NO: 1901470 - DNA, 15 bp, Homo sapiens
ttcctgcctttggtg

SEQ ID NO: 1901471 - DNA, 15 bp, Homo sapiens
tcctgcctttggtgt

SEQ ID NO: 1901472 - DNA, 15 bp, Homo sapiens
cctgcctttggtgtc

SEQ ID NO: 1901473 - DNA, 15 bp, Homo sapiens
ctgcctttggtgtca

SEQ ID NO: 1901474 - DNA, 15 bp, Homo sapiens
tgcctttggtgtcag

SEQ ID NO: 1901475 - DNA, 15 bp, Homo sapiens
gcctttggtgtcagc

SEQ ID NO: 1901476 - DNA, 15 bp, Homo sapiens
cctttggtgtcagca

SEQ ID NO: 1901477 - DNA, 15 bp, Homo sapiens
ctttggtgtcagcaa

SEQ ID NO: 1901478 - DNA, 15 bp, Homo sapiens
tttggtgtcagcaac

SEQ ID NO: 1901479 - DNA, 15 bp, Homo sapiens
ttggtgtcagcaacc

SEQ ID NO: 1901480 - DNA, 15 bp, Homo sapiens
tggtgtcagcaacca

SEQ ID NO: 1901481 - DNA, 15 bp, Homo sapiens
ggtgtcagcaaccag

SEQ ID NO: 1901482 - DNA, 15 bp, Homo sapiens
gtgtcagcaaccaga

SEQ ID NO: 1901483 - DNA, 15 bp, Homo sapiens
tgtcagcaaccagag

SEQ ID NO: 1901484 - DNA, 15 bp, Homo sapiens
gtcagcaaccagaga

SEQ ID NO: 1901485 - DNA, 15 bp, Homo sapiens
tcagcaaccagagac

SEQ ID NO: 1901486 - DNA, 15 bp, Homo sapiens
cagcaaccagagaca

SEQ ID NO: 1901487 - DNA, 15 bp, Homo sapiens
agcaaccagagacag

SEQ ID NO: 1901488 - DNA, 15 bp, Homo sapiens
gcaaccagagacaga

SEQ ID NO: 1901489 - DNA, 15 bp, Homo sapiens
caaccagagacagaa

SEQ ID NO: 1901490 - DNA, 15 bp, Homo sapiens
aaccagagacagaag

SEQ ID NO: 1901491 - DNA, 15 bp, Homo sapiens
accagagacagaagg

SEQ ID NO: 1901492 - DNA, 15 bp, Homo sapiens
ccagagacagaaggt

SEQ ID NO: 1901493 - DNA, 15 bp, Homo sapiens
cagagacagaaggta

SEQ ID NO: 1901494 - DNA, 15 bp, Homo sapiens
agagacagaaggtat

SEQ ID NO: 1901495 - DNA, 15 bp, Homo sapiens
gagacagaaggtatt

SEQ ID NO: 1901496 - DNA, 15 bp, Homo sapiens
agacagaaggtattt

SEQ ID NO: 1901497 - DNA, 15 bp, Homo sapiens
gacagaaggtattta

SEQ ID NO: 1901498 - DNA, 15 bp, Homo sapiens
acagaaggtatttat

SEQ ID NO: 1901499 - DNA, 15 bp, Homo sapiens
cagaaggtatttatt

SEQ ID NO: 1901500 - DNA, 15 bp, Homo sapiens
agaaggtatttattt

SEQ ID NO: 1901501 - DNA, 15 bp, Homo sapiens
gaaggtatttatttg

SEQ ID NO: 1901502 - DNA, 15 bp, Homo sapiens
aaggtatttatttgc

SEQ ID NO: 1901503 - DNA, 15 bp, Homo sapiens
aggtatttatttgcc

SEQ ID NO: 1901504 - DNA, 15 bp, Homo sapiens
ggtatttatttgcct

SEQ ID NO: 1901505 - DNA, 15 bp, Homo sapiens
gtatttatttgccta

SEQ ID NO: 1901506 - DNA, 15 bp, Homo sapiens
tatttatttgcctac

SEQ ID NO: 1901507 - DNA, 15 bp, Homo sapiens
atttatttgcctact

SEQ ID NO: 1901508 - DNA, 15 bp, Homo sapiens
tttatttgcctactt

SEQ ID NO: 1901509 - DNA, 15 bp, Homo sapiens
ttatttgcctacttc

SEQ ID NO: 1901510 - DNA, 15 bp, Homo sapiens
tatttgcctacttct

SEQ ID NO: 1901511 - DNA, 15 bp, Homo sapiens
atttgcctacttctc

SEQ ID NO: 1901512 - DNA, 15 bp, Homo sapiens
tttgcctacttctca

SEQ ID NO: 1901513 - DNA, 15 bp, Homo sapiens
ttgcctacttctcaa

SEQ ID NO: 1901514 - DNA, 15 bp, Homo sapiens
tgcctacttctcaaa

SEQ ID NO: 1901515 - DNA, 15 bp, Homo sapiens
gcctacttctcaaat

SEQ ID NO: 1901516 - DNA, 15 bp, Homo sapiens
cctacttctcaaatt

SEQ ID NO: 1901517 - DNA, 15 bp, Homo sapiens
ctacttctcaaatta

SEQ ID NO: 1901518 - DNA, 15 bp, Homo sapiens
tacttctcaaattac

SEQ ID NO: 1901519 - DNA, 15 bp, Homo sapiens
acttctcaaattacc

SEQ ID NO: 1901520 - DNA, 15 bp, Homo sapiens
cttctcaaattacca

SEQ ID NO: 1901521 - DNA, 15 bp, Homo sapiens
ttctcaaattaccag

SEQ ID NO: 1901522 - DNA, 15 bp, Homo sapiens
tctcaaattaccagc

SEQ ID NO: 1901523 - DNA, 15 bp, Homo sapiens
ctcaaattaccagct

SEQ ID NO: 1901524 - DNA, 15 bp, Homo sapiens
tcaaattaccagctg

SEQ ID NO: 1901525 - DNA, 15 bp, Homo sapiens
caaattaccagctgc

SEQ ID NO: 1901526 - DNA, 15 bp, Homo sapiens
aaattaccagctgct

SEQ ID NO: 1901527 - DNA, 15 bp, Homo sapiens
aattaccagctgctt

SEQ ID NO: 1901528 - DNA, 15 bp, Homo sapiens
attaccagctgcttg

SEQ ID NO: 1901529 - DNA, 15 bp, Homo sapiens
ttaccagctgcttga

SEQ ID NO: 1901530 - DNA, 15 bp, Homo sapiens
taccagctgcttgat

SEQ ID NO: 1901531 - DNA, 15 bp, Homo sapiens
accagctgcttgatc

SEQ ID NO: 1901532 - DNA, 15 bp, Homo sapiens
ccagctgcttgatct

SEQ ID NO: 1901533 - DNA, 15 bp, Homo sapiens
cagctgcttgatctt

SEQ ID NO: 1901534 - DNA, 15 bp, Homo sapiens
agctgcttgatcttc

SEQ ID NO: 1901535 - DNA, 15 bp, Homo sapiens
gctgcttgatcttcc

SEQ ID NO: 1901536 - DNA, 15 bp, Homo sapiens
ctgcttgatcttcca

SEQ ID NO: 1901537 - DNA, 15 bp, Homo sapiens
tgcttgatcttccac

SEQ ID NO: 1901538 - DNA, 15 bp, Homo sapiens
gcttgatcttccaca

SEQ ID NO: 1901539 - DNA, 15 bp, Homo sapiens
cttgatcttccacaa

SEQ ID NO: 1901540 - DNA, 15 bp, Homo sapiens
ttgatcttccacaaa

SEQ ID NO: 1901541 - DNA, 15 bp, Homo sapiens
tgatcttccacaaag

SEQ ID NO: 1901542 - DNA, 15 bp, Homo sapiens
gatcttccacaaagt

SEQ ID NO: 1901543 - DNA, 15 bp, Homo sapiens
atcttccacaaagta

SEQ ID NO: 1901544 - DNA, 15 bp, Homo sapiens
tcttccacaaagtac

SEQ ID NO: 1901545 - DNA, 15 bp, Homo sapiens
cttccacaaagtact

SEQ ID NO: 1901546 - DNA, 15 bp, Homo sapiens
ttccacaaagtactg

SEQ ID NO: 1901547 - DNA, 15 bp, Homo sapiens
tccacaaagtactga

SEQ ID NO: 1901548 - DNA, 15 bp, Homo sapiens
ccacaaagtactgag

SEQ ID NO: 1901549 - DNA, 15 bp, Homo sapiens
cacaaagtactgagt

SEQ ID NO: 1901550 - DNA, 15 bp, Homo sapiens
acaaagtactgagtc

SEQ ID NO: 1901551 - DNA, 15 bp, Homo sapiens
caaagtactgagtct

SEQ ID NO: 1901552 - DNA, 15 bp, Homo sapiens
aaagtactgagtctt

SEQ ID NO: 1901553 - DNA, 15 bp, Homo sapiens
aagtactgagtcttg

SEQ ID NO: 1901554 - DNA, 15 bp, Homo sapiens
agtactgagtcttga

SEQ ID NO: 1901555 - DNA, 15 bp, Homo sapiens
gtactgagtcttgaa

SEQ ID NO: 1901556 - DNA, 15 bp, Homo sapiens
tactgagtcttgaag

SEQ ID NO: 1901557 - DNA, 15 bp, Homo sapiens
tatttttgtaccagc

SEQ ID NO: 1901558 - DNA, 15 bp, Homo sapiens
atttttgtaccagca

SEQ ID NO: 1901559 - DNA, 15 bp, Homo sapiens
tttttgtaccagcac

SEQ ID NO: 1901560 - DNA, 15 bp, Homo sapiens
ttttgtaccagcaca

SEQ ID NO: 1901561 - DNA, 15 bp, Homo sapiens
tttgtaccagcacaa

SEQ ID NO: 1901562 - DNA, 15 bp, Homo sapiens
ttgtaccagcacaat

SEQ ID NO: 1901563 - DNA, 15 bp, Homo sapiens
tgtaccagcacaatg

SEQ ID NO: 1901564 - DNA, 15 bp, Homo sapiens
gtaccagcacaatgc

SEQ ID NO: 1901565 - DNA, 15 bp, Homo sapiens
taccagcacaatgct

SEQ ID NO: 1901566 - DNA, 15 bp, Homo sapiens
accagcacaatgctg

SEQ ID NO: 1901567 - DNA, 15 bp, Homo sapiens
ccagcacaatgctgt

SEQ ID NO: 1901568 - DNA, 15 bp, Homo sapiens
cagcacaatgctgtt

SEQ ID NO: 1901569 - DNA, 15 bp, Homo sapiens
agcacaatgctgttt

SEQ ID NO: 1901570 - DNA, 15 bp, Homo sapiens
gcacaatgctgtttt

SEQ ID NO: 1901571 - DNA, 15 bp, Homo sapiens
cacaatgctgttttg

SEQ ID NO: 1901572 - DNA, 15 bp, Homo sapiens
acaatgctgttttgg

SEQ ID NO: 1901573 - DNA, 15 bp, Homo sapiens
caatgctgttttggt

SEQ ID NO: 1901574 - DNA, 15 bp, Homo sapiens
aatgctgttttggtt

SEQ ID NO: 1901575 - DNA, 15 bp, Homo sapiens
ttggttactgtagct

SEQ ID NO: 1901576 - DNA, 15 bp, Homo sapiens
tggttactgtagctt

SEQ ID NO: 1901577 - DNA, 15 bp, Homo sapiens
ggttactgtagcttt

SEQ ID NO: 1901578 - DNA, 15 bp, Homo sapiens
gttactgtagctttg

SEQ ID NO: 1901579 - DNA, 15 bp, Homo sapiens
ttactgtagctttgt

SEQ ID NO: 1901580 - DNA, 15 bp, Homo sapiens
tactgtagctttgta

SEQ ID NO: 1901581 - DNA, 15 bp, Homo sapiens
actgtagctttgtag

SEQ ID NO: 1901582 - DNA, 15 bp, Homo sapiens
ctgtagctttgtagt

SEQ ID NO: 1901583 - DNA, 15 bp, Homo sapiens
tgtagctttgtagta

SEQ ID NO: 1901584 - DNA, 15 bp, Homo sapiens
gtagctttgtagtat

SEQ ID NO: 1901585 - DNA, 15 bp, Homo sapiens
tagctttgtagtata

SEQ ID NO: 1901586 - DNA, 15 bp, Homo sapiens
agctttgtagtatag

SEQ ID NO: 1901587 - DNA, 15 bp, Homo sapiens
gctttgtagtatagt

SEQ ID NO: 1901588 - DNA, 15 bp, Homo sapiens
ctttgtagtatagtt

SEQ ID NO: 1901589 - DNA, 15 bp, Homo sapiens
tttgtagtatagttc

SEQ ID NO: 1901590 - DNA, 15 bp, Homo sapiens
ttgtagtatagttcg

SEQ ID NO: 1901591 - DNA, 15 bp, Homo sapiens
tgtagtatagttcga

SEQ ID NO: 1901592 - DNA, 15 bp, Homo sapiens
gtagtatagttcgaa

SEQ ID NO: 1901593 - DNA, 15 bp, Homo sapiens
tagtatagttcgaag

SEQ ID NO: 1901594 - DNA, 15 bp, Homo sapiens
agtatagttcgaagt

SEQ ID NO: 1901595 - DNA, 15 bp, Homo sapiens
gtatagttcgaagtt

SEQ ID NO: 1901596 - DNA, 15 bp, Homo sapiens
tatagttcgaagttg

SEQ ID NO: 1901597 - DNA, 15 bp, Homo sapiens
atagttcgaagttgg

SEQ ID NO: 1901598 - DNA, 15 bp, Homo sapiens
tagttcgaagttggg

SEQ ID NO: 1901599 - DNA, 15 bp, Homo sapiens
agttcgaagttgggt

SEQ ID NO: 1901600 - DNA, 15 bp, Homo sapiens
gttcgaagttgggta

SEQ ID NO: 1901601 - DNA, 15 bp, Homo sapiens
ttcgaagttgggtaa

SEQ ID NO: 1901602 - DNA, 15 bp, Homo sapiens
tcgaagttgggtaat

SEQ ID NO: 1901603 - DNA, 15 bp, Homo sapiens
cgaagttgggtaatc

SEQ ID NO: 1901604 - DNA, 15 bp, Homo sapiens
gaagttgggtaatct

SEQ ID NO: 1901605 - DNA, 15 bp, Homo sapiens
aagttgggtaatctg

SEQ ID NO: 1901606 - DNA, 15 bp, Homo sapiens
agttgggtaatctga

SEQ ID NO: 1901607 - DNA, 15 bp, Homo sapiens
gttgggtaatctgat

SEQ ID NO: 1901608 - DNA, 15 bp, Homo sapiens
ttgggtaatctgatg

SEQ ID NO: 1901609 - DNA, 15 bp, Homo sapiens
tgggtaatctgatgc

SEQ ID NO: 1901610 - DNA, 15 bp, Homo sapiens
gggtaatctgatgcc

SEQ ID NO: 1901611 - DNA, 15 bp, Homo sapiens
ggtaatctgatgcct

SEQ ID NO: 1901612 - DNA, 15 bp, Homo sapiens
gtaatctgatgcctc

SEQ ID NO: 1901613 - DNA, 15 bp, Homo sapiens
taatctgatgcctcc

SEQ ID NO: 1901614 - DNA, 15 bp, Homo sapiens
aatctgatgcctcca

SEQ ID NO: 1901615 - DNA, 15 bp, Homo sapiens
atctgatgcctccag

SEQ ID NO: 1901616 - DNA, 15 bp, Homo sapiens
tctgatgcctccagc

SEQ ID NO: 1901617 - DNA, 15 bp, Homo sapiens
atgcctccagcttta

SEQ ID NO: 1901618 - DNA, 15 bp, Homo sapiens
tgcctccagctttat

SEQ ID NO: 1901619 - DNA, 15 bp, Homo sapiens
gcctccagctttatt

SEQ ID NO: 1901620 - DNA, 15 bp, Homo sapiens
cctccagctttattt

SEQ ID NO: 1901621 - DNA, 15 bp, Homo sapiens
ctccagctttatttt

SEQ ID NO: 1901622 - DNA, 15 bp, Homo sapiens
ccagctttattttta

SEQ ID NO: 1901623 - DNA, 15 bp, Homo sapiens
cagctttatttttat

SEQ ID NO: 1901624 - DNA, 15 bp, Homo sapiens
agctttatttttatt

SEQ ID NO: 1901625 - DNA, 15 bp, Homo sapiens
gctttatttttattt

SEQ ID NO: 1901626 - DNA, 15 bp, Homo sapiens
tatttttattttttc

SEQ ID NO: 1901627 - DNA, 15 bp, Homo sapiens
atttttattttttca

SEQ ID NO: 1901628 - DNA, 15 bp, Homo sapiens
tttttattttttcat

SEQ ID NO: 1901629 - DNA, 15 bp, Homo sapiens
ttttattttttcatt

SEQ ID NO: 1901630 - DNA, 15 bp, Homo sapiens
tttattttttcattt

SEQ ID NO: 1901631 - DNA, 15 bp, Homo sapiens
ttattttttcatttt

SEQ ID NO: 1901632 - DNA, 15 bp, Homo sapiens
tattttttcattttt

SEQ ID NO: 1901633 - DNA, 15 bp, Homo sapiens
attttttcatttttg

SEQ ID NO: 1901634 - DNA, 15 bp, Homo sapiens
ttttttcatttttgc

SEQ ID NO: 1901635 - DNA, 15 bp, Homo sapiens
tttttcatttttgct

SEQ ID NO: 1901636 - DNA, 15 bp, Homo sapiens
ttttcatttttgctc

SEQ ID NO: 1901637 - DNA, 15 bp, Homo sapiens
tttcatttttgctca

SEQ ID NO: 1901638 - DNA, 15 bp, Homo sapiens
ttcatttttgctcag

SEQ ID NO: 1901639 - DNA, 15 bp, Homo sapiens
tcatttttgctcagg

SEQ ID NO: 1901640 - DNA, 15 bp, Homo sapiens
catttttgctcaggg

SEQ ID NO: 1901641 - DNA, 15 bp, Homo sapiens
atttttgctcagggt

SEQ ID NO: 1901642 - DNA, 15 bp, Homo sapiens
tttttgctcagggtt

SEQ ID NO: 1901643 - DNA, 15 bp, Homo sapiens
ttttgctcagggttg

SEQ ID NO: 1901644 - DNA, 15 bp, Homo sapiens
tttgctcagggttgc

SEQ ID NO: 1901645 - DNA, 15 bp, Homo sapiens
ttgctcagggttgct

SEQ ID NO: 1901646 - DNA, 15 bp, Homo sapiens
tgctcagggttgctt

SEQ ID NO: 1901647 - DNA, 15 bp, Homo sapiens
gctcagggttgcttt

SEQ ID NO: 1901648 - DNA, 15 bp, Homo sapiens
ctcagggttgctttg

SEQ ID NO: 1901649 - DNA, 15 bp, Homo sapiens
tcagggttgctttgg

SEQ ID NO: 1901650 - DNA, 15 bp, Homo sapiens
cagggttgctttggc

SEQ ID NO: 1901651 - DNA, 15 bp, Homo sapiens
agggttgctttggct

SEQ ID NO: 1901652 - DNA, 15 bp, Homo sapiens
gggttgctttggcta

SEQ ID NO: 1901653 - DNA, 15 bp, Homo sapiens
ggttgctttggctat

SEQ ID NO: 1901654 - DNA, 15 bp, Homo sapiens
gttgctttggctatt

SEQ ID NO: 1901655 - DNA, 15 bp, Homo sapiens
ttgctttggctattc

SEQ ID NO: 1901656 - DNA, 15 bp, Homo sapiens
tgctttggctattca

SEQ ID NO: 1901657 - DNA, 15 bp, Homo sapiens
gctttggctattcag

SEQ ID NO: 1901658 - DNA, 15 bp, Homo sapiens
ctttggctattcaga

SEQ ID NO: 1901659 - DNA, 15 bp, Homo sapiens
tttggctattcagac

SEQ ID NO: 1901660 - DNA, 15 bp, Homo sapiens
ttggctattcagact

SEQ ID NO: 1901661 - DNA, 15 bp, Homo sapiens
tggctattcagactc

SEQ ID NO: 1901662 - DNA, 15 bp, Homo sapiens
ggctattcagactct

SEQ ID NO: 1901663 - DNA, 15 bp, Homo sapiens
gctattcagactctt

SEQ ID NO: 1901664 - DNA, 15 bp, Homo sapiens
ctattcagactcttt

SEQ ID NO: 1901665 - DNA, 15 bp, Homo sapiens
tattcagactctttt

SEQ ID NO: 1901666 - DNA, 15 bp, Homo sapiens
attcagactcttttt

SEQ ID NO: 1901667 - DNA, 15 bp, Homo sapiens
ttcagactctttttt

SEQ ID NO: 1901668 - DNA, 15 bp, Homo sapiens
tcagactcttttttg

SEQ ID NO: 1901669 - DNA, 15 bp, Homo sapiens
cagactcttttttgg

SEQ ID NO: 1901670 - DNA, 15 bp, Homo sapiens
agactcttttttggt

SEQ ID NO: 1901671 - DNA, 15 bp, Homo sapiens
gactcttttttggtg

SEQ ID NO: 1901672 - DNA, 15 bp, Homo sapiens
actcttttttggtga

SEQ ID NO: 1901673 - DNA, 15 bp, Homo sapiens
ctcttttttggtgag

SEQ ID NO: 1901674 - DNA, 15 bp, Homo sapiens
tcttttttggtgaga

SEQ ID NO: 1901675 - DNA, 15 bp, Homo sapiens
cttttttggtgagaa

SEQ ID NO: 1901676 - DNA, 15 bp, Homo sapiens
ttttttggtgagaaa

SEQ ID NO: 1901677 - DNA, 15 bp, Homo sapiens
tttttggtgagaaat

SEQ ID NO: 1901678 - DNA, 15 bp, Homo sapiens
ttttggtgagaaatg

SEQ ID NO: 1901679 - DNA, 15 bp, Homo sapiens
tttggtgagaaatga

SEQ ID NO: 1901680 - DNA, 15 bp, Homo sapiens
ttggtgagaaatgaa

SEQ ID NO: 1901681 - DNA, 15 bp, Homo sapiens
tggtgagaaatgaat

SEQ ID NO: 1901682 - DNA, 15 bp, Homo sapiens
ggtgagaaatgaatt

SEQ ID NO: 1901683 - DNA, 15 bp, Homo sapiens
gtgagaaatgaattt

SEQ ID NO: 1901684 - DNA, 15 bp, Homo sapiens
tgagaaatgaatttt

SEQ ID NO: 1901685 - DNA, 15 bp, Homo sapiens
gagaaatgaatttta

SEQ ID NO: 1901686 - DNA, 15 bp, Homo sapiens
agaaatgaattttag

SEQ ID NO: 1901687 - DNA, 15 bp, Homo sapiens
gaaatgaattttaga

SEQ ID NO: 1901688 - DNA, 15 bp, Homo sapiens
aaatgaattttagaa

SEQ ID NO: 1901689 - DNA, 15 bp, Homo sapiens
aatgaattttagaat

SEQ ID NO: 1901690 - DNA, 15 bp, Homo sapiens
atgaattttagaata

SEQ ID NO: 1901691 - DNA, 15 bp, Homo sapiens
tgaattttagaatac

SEQ ID NO: 1901692 - DNA, 15 bp, Homo sapiens
gaattttagaatact

SEQ ID NO: 1901693 - DNA, 15 bp, Homo sapiens
aattttagaatactt

SEQ ID NO: 1901694 - DNA, 15 bp, Homo sapiens
attttagaatacttt

SEQ ID NO: 1901695 - DNA, 15 bp, Homo sapiens
ttttagaatactttt

SEQ ID NO: 1901696 - DNA, 15 bp, Homo sapiens
tttagaatacttttt

SEQ ID NO: 1901697 - DNA, 15 bp, Homo sapiens
ttagaatactttttt

SEQ ID NO: 1901698 - DNA, 15 bp, Homo sapiens
tagaatacttttttc

SEQ ID NO: 1901699 - DNA, 15 bp, Homo sapiens
agaatacttttttca

SEQ ID NO: 1901700 - DNA, 15 bp, Homo sapiens
gaatacttttttcaa

SEQ ID NO: 1901701 - DNA, 15 bp, Homo sapiens
aatacttttttcaaa

SEQ ID NO: 1901702 - DNA, 15 bp, Homo sapiens
atacttttttcaaag

SEQ ID NO: 1901703 - DNA, 15 bp, Homo sapiens
tacttttttcaaagt

SEQ ID NO: 1901704 - DNA, 15 bp, Homo sapiens
acttttttcaaagtc

SEQ ID NO: 1901705 - DNA, 15 bp, Homo sapiens
cttttttcaaagtct

SEQ ID NO: 1901706 - DNA, 15 bp, Homo sapiens
ttttttcaaagtctg

SEQ ID NO: 1901707 - DNA, 15 bp, Homo sapiens
tttttcaaagtctgt

SEQ ID NO: 1901708 - DNA, 15 bp, Homo sapiens
ttttcaaagtctgtt

SEQ ID NO: 1901709 - DNA, 15 bp, Homo sapiens
tttcaaagtctgtta

SEQ ID NO: 1901710 - DNA, 15 bp, Homo sapiens
ttcaaagtctgttaa

SEQ ID NO: 1901711 - DNA, 15 bp, Homo sapiens
tcaaagtctgttaaa

SEQ ID NO: 1901712 - DNA, 15 bp, Homo sapiens
caaagtctgttaaaa

SEQ ID NO: 1901713 - DNA, 15 bp, Homo sapiens
aaagtctgttaaaaa

SEQ ID NO: 1901714 - DNA, 15 bp, Homo sapiens
aagtctgttaaaaat

SEQ ID NO: 1901715 - DNA, 15 bp, Homo sapiens
agtctgttaaaaatg

SEQ ID NO: 1901716 - DNA, 15 bp, Homo sapiens
gtctgttaaaaatga

SEQ ID NO: 1901717 - DNA, 15 bp, Homo sapiens
tctgttaaaaatgac

SEQ ID NO: 1901718 - DNA, 15 bp, Homo sapiens
ctgttaaaaatgaca

SEQ ID NO: 1901719 - DNA, 15 bp, Homo sapiens
tgttaaaaatgacat

SEQ ID NO: 1901720 - DNA, 15 bp, Homo sapiens
gttaaaaatgacatt

SEQ ID NO: 1901721 - DNA, 15 bp, Homo sapiens
ttaaaaatgacattg

SEQ ID NO: 1901722 - DNA, 15 bp, Homo sapiens
taaaaatgacattgg

SEQ ID NO: 1901723 - DNA, 15 bp, Homo sapiens
aaaaatgacattggt

SEQ ID NO: 1901724 - DNA, 15 bp, Homo sapiens
aaaatgacattggta

SEQ ID NO: 1901725 - DNA, 15 bp, Homo sapiens
aaatgacattggtaa

SEQ ID NO: 1901726 - DNA, 15 bp, Homo sapiens
aatgacattggtaat

SEQ ID NO: 1901727 - DNA, 15 bp, Homo sapiens
atgacattggtaatt

SEQ ID NO: 1901728 - DNA, 15 bp, Homo sapiens
tgacattggtaattt

SEQ ID NO: 1901729 - DNA, 15 bp, Homo sapiens
gacattggtaatttg

SEQ ID NO: 1901730 - DNA, 15 bp, Homo sapiens
acattggtaatttga

SEQ ID NO: 1901731 - DNA, 15 bp, Homo sapiens
cattggtaatttgaa

SEQ ID NO: 1901732 - DNA, 15 bp, Homo sapiens
attggtaatttgaaa

SEQ ID NO: 1901733 - DNA, 15 bp, Homo sapiens
ttggtaatttgaaaa

SEQ ID NO: 1901734 - DNA, 15 bp, Homo sapiens
tggtaatttgaaaag

SEQ ID NO: 1901735 - DNA, 15 bp, Homo sapiens
ggtaatttgaaaaga

SEQ ID NO: 1901736 - DNA, 15 bp, Homo sapiens
gtaatttgaaaagaa

SEQ ID NO: 1901737 - DNA, 15 bp, Homo sapiens
taatttgaaaagaat

SEQ ID NO: 1901738 - DNA, 15 bp, Homo sapiens
aatttgaaaagaata

SEQ ID NO: 1901739 - DNA, 15 bp, Homo sapiens
atttgaaaagaatag

SEQ ID NO: 1901740 - DNA, 15 bp, Homo sapiens
tttgaaaagaatagt

SEQ ID NO: 1901741 - DNA, 15 bp, Homo sapiens
ttgaaaagaatagta

SEQ ID NO: 1901742 - DNA, 15 bp, Homo sapiens
tgaaaagaatagtat

SEQ ID NO: 1901743 - DNA, 15 bp, Homo sapiens
gaaaagaatagtatt

SEQ ID NO: 1901744 - DNA, 15 bp, Homo sapiens
aaaagaatagtattg

SEQ ID NO: 1901745 - DNA, 15 bp, Homo sapiens
aaagaatagtattga

SEQ ID NO: 1901746 - DNA, 15 bp, Homo sapiens
aagaatagtattgaa

SEQ ID NO: 1901747 - DNA, 15 bp, Homo sapiens
agaatagtattgaat

SEQ ID NO: 1901748 - DNA, 15 bp, Homo sapiens
gaatagtattgaatc

SEQ ID NO: 1901749 - DNA, 15 bp, Homo sapiens
aatagtattgaatct

SEQ ID NO: 1901750 - DNA, 15 bp, Homo sapiens
atagtattgaatctg

SEQ ID NO: 1901751 - DNA, 15 bp, Homo sapiens
tagtattgaatctgt

SEQ ID NO: 1901752 - DNA, 15 bp, Homo sapiens
agtattgaatctgta

SEQ ID NO: 1901753 - DNA, 15 bp, Homo sapiens
gtattgaatctgtat

SEQ ID NO: 1901754 - DNA, 15 bp, Homo sapiens
tattgaatctgtata

SEQ ID NO: 1901755 - DNA, 15 bp, Homo sapiens
attgaatctgtatat

SEQ ID NO: 1901756 - DNA, 15 bp, Homo sapiens
ttgaatctgtatatt

SEQ ID NO: 1901757 - DNA, 15 bp, Homo sapiens
tgaatctgtatattg

SEQ ID NO: 1901758 - DNA, 15 bp, Homo sapiens
gaatctgtatattgc

SEQ ID NO: 1901759 - DNA, 15 bp, Homo sapiens
aatctgtatattgct

SEQ ID NO: 1901760 - DNA, 15 bp, Homo sapiens
atctgtatattgctt

SEQ ID NO: 1901761 - DNA, 15 bp, Homo sapiens
tctgtatattgcttt

SEQ ID NO: 1901762 - DNA, 15 bp, Homo sapiens
ctgtatattgctttg

SEQ ID NO: 1901763 - DNA, 15 bp, Homo sapiens
tgtatattgctttgg

SEQ ID NO: 1901764 - DNA, 15 bp, Homo sapiens
gtatattgctttggc

SEQ ID NO: 1901765 - DNA, 15 bp, Homo sapiens
tatattgctttggca

SEQ ID NO: 1901766 - DNA, 15 bp, Homo sapiens
atattgctttggcaa

SEQ ID NO: 1901767 - DNA, 15 bp, Homo sapiens
tattgctttggcaag

SEQ ID NO: 1901768 - DNA, 15 bp, Homo sapiens
attgctttggcaagt

SEQ ID NO: 1901769 - DNA, 15 bp, Homo sapiens
ttgctttggcaagta

SEQ ID NO: 1901770 - DNA, 15 bp, Homo sapiens
tgctttggcaagtat

SEQ ID NO: 1901771 - DNA, 15 bp, Homo sapiens
gctttggcaagtatg

SEQ ID NO: 1901772 - DNA, 15 bp, Homo sapiens
ctttggcaagtatgg

SEQ ID NO: 1901773 - DNA, 15 bp, Homo sapiens
tttggcaagtatgga

SEQ ID NO: 1901774 - DNA, 15 bp, Homo sapiens
ttggcaagtatggac

SEQ ID NO: 1901775 - DNA, 15 bp, Homo sapiens
tggcaagtatggaca

SEQ ID NO: 1901776 - DNA, 15 bp, Homo sapiens
ggcaagtatggacat

SEQ ID NO: 1901777 - DNA, 15 bp, Homo sapiens
gcaagtatggacatt

SEQ ID NO: 1901778 - DNA, 15 bp, Homo sapiens
caagtatggacattt

SEQ ID NO: 1901779 - DNA, 15 bp, Homo sapiens
aagtatggacatttt

SEQ ID NO: 1901780 - DNA, 15 bp, Homo sapiens
agtatggacatttta

SEQ ID NO: 1901781 - DNA, 15 bp, Homo sapiens
gtatggacattttaa

SEQ ID NO: 1901782 - DNA, 15 bp, Homo sapiens
tatggacattttaac

SEQ ID NO: 1901783 - DNA, 15 bp, Homo sapiens
caatattgattcttc

SEQ ID NO: 1901784 - DNA, 15 bp, Homo sapiens
aatattgattcttcc

SEQ ID NO: 1901785 - DNA, 15 bp, Homo sapiens
atattgattcttcca

SEQ ID NO: 1901786 - DNA, 15 bp, Homo sapiens
tattgattcttccaa

SEQ ID NO: 1901787 - DNA, 15 bp, Homo sapiens
attgattcttccaac

SEQ ID NO: 1901788 - DNA, 15 bp, Homo sapiens
ttgattcttccaacc

SEQ ID NO: 1901789 - DNA, 15 bp, Homo sapiens
tgattcttccaaccc

SEQ ID NO: 1901790 - DNA, 15 bp, Homo sapiens
gattcttccaaccca

SEQ ID NO: 1901791 - DNA, 15 bp, Homo sapiens
attcttccaacccat

SEQ ID NO: 1901792 - DNA, 15 bp, Homo sapiens
ttcttccaacccatg

SEQ ID NO: 1901793 - DNA, 15 bp, Homo sapiens
tcttccaacccatgt

SEQ ID NO: 1901794 - DNA, 15 bp, Homo sapiens
cttccaacccatgtg

SEQ ID NO: 1901795 - DNA, 15 bp, Homo sapiens
ttccaacccatgtgc

SEQ ID NO: 1901796 - DNA, 15 bp, Homo sapiens
tccaacccatgtgca

SEQ ID NO: 1901797 - DNA, 15 bp, Homo sapiens
ccaacccatgtgcat

SEQ ID NO: 1901798 - DNA, 15 bp, Homo sapiens
caacccatgtgcatg

SEQ ID NO: 1901799 - DNA, 15 bp, Homo sapiens
aacccatgtgcatgg

SEQ ID NO: 1901800 - DNA, 15 bp, Homo sapiens
acccatgtgcatgga

SEQ ID NO: 1901801 - DNA, 15 bp, Homo sapiens
cccatgtgcatggaa

SEQ ID NO: 1901802 - DNA, 15 bp, Homo sapiens
ccatgtgcatggaat

SEQ ID NO: 1901803 - DNA, 15 bp, Homo sapiens
catgtgcatggaatg

SEQ ID NO: 1901804 - DNA, 15 bp, Homo sapiens
atgtgcatggaatgc

SEQ ID NO: 1901805 - DNA, 15 bp, Homo sapiens
tgtgcatggaatgct

SEQ ID NO: 1901806 - DNA, 15 bp, Homo sapiens
gtgcatggaatgctt

SEQ ID NO: 1901807 - DNA, 15 bp, Homo sapiens
tgcatggaatgcttc

SEQ ID NO: 1901808 - DNA, 15 bp, Homo sapiens
gcatggaatgcttct

SEQ ID NO: 1901809 - DNA, 15 bp, Homo sapiens
catggaatgcttctc

SEQ ID NO: 1901810 - DNA, 15 bp, Homo sapiens
atggaatgcttctcc

SEQ ID NO: 1901811 - DNA, 15 bp, Homo sapiens
tggaatgcttctcca

SEQ ID NO: 1901812 - DNA, 15 bp, Homo sapiens
ggaatgcttctccac

SEQ ID NO: 1901813 - DNA, 15 bp, Homo sapiens
gaatgcttctccact

SEQ ID NO: 1901814 - DNA, 15 bp, Homo sapiens
aatgcttctccactt

SEQ ID NO: 1901815 - DNA, 15 bp, Homo sapiens
atgcttctccacttg

SEQ ID NO: 1901816 - DNA, 15 bp, Homo sapiens
tgcttctccacttgt

SEQ ID NO: 1901817 - DNA, 15 bp, Homo sapiens
gcttctccacttgtt

SEQ ID NO: 1901818 - DNA, 15 bp, Homo sapiens
cttctccacttgttt

SEQ ID NO: 1901819 - DNA, 15 bp, Homo sapiens
ttctccacttgtttg

SEQ ID NO: 1901820 - DNA, 15 bp, Homo sapiens
tctccacttgtttgt

SEQ ID NO: 1901821 - DNA, 15 bp, Homo sapiens
ctccacttgtttgtg

SEQ ID NO: 1901822 - DNA, 15 bp, Homo sapiens
tccacttgtttgtgt

SEQ ID NO: 1901823 - DNA, 15 bp, Homo sapiens
ccacttgtttgtgtc

SEQ ID NO: 1901824 - DNA, 15 bp, Homo sapiens
cacttgtttgtgtca

SEQ ID NO: 1901825 - DNA, 15 bp, Homo sapiens
acttgtttgtgtcat

SEQ ID NO: 1901826 - DNA, 15 bp, Homo sapiens
cttgtttgtgtcatc

SEQ ID NO: 1901827 - DNA, 15 bp, Homo sapiens
gtcatctctgatttg

SEQ ID NO: 1901828 - DNA, 15 bp, Homo sapiens
tcatctctgatttgt

SEQ ID NO: 1901829 - DNA, 15 bp, Homo sapiens
catctctgatttgtt

SEQ ID NO: 1901830 - DNA, 15 bp, Homo sapiens
atctctgatttgttt

SEQ ID NO: 1901831 - DNA, 15 bp, Homo sapiens
tctctgatttgttta

SEQ ID NO: 1901832 - DNA, 15 bp, Homo sapiens
ctctgatttgtttag

SEQ ID NO: 1901833 - DNA, 15 bp, Homo sapiens
tctgatttgtttagg

SEQ ID NO: 1901834 - DNA, 15 bp, Homo sapiens
ctgatttgtttaggc

SEQ ID NO: 1901835 - DNA, 15 bp, Homo sapiens
tgatttgtttaggca

SEQ ID NO: 1901836 - DNA, 15 bp, Homo sapiens
gatttgtttaggcaa

SEQ ID NO: 1901837 - DNA, 15 bp, Homo sapiens
atttgtttaggcaat

SEQ ID NO: 1901838 - DNA, 15 bp, Homo sapiens
tttgtttaggcaatg

SEQ ID NO: 1901839 - DNA, 15 bp, Homo sapiens
ttgtttaggcaatgt

SEQ ID NO: 1901840 - DNA, 15 bp, Homo sapiens
tgtttaggcaatgtt

SEQ ID NO: 1901841 - DNA, 15 bp, Homo sapiens
gtttaggcaatgttt

SEQ ID NO: 1901842 - DNA, 15 bp, Homo sapiens
tttaggcaatgtttt

SEQ ID NO: 1901843 - DNA, 15 bp, Homo sapiens
ttaggcaatgtttta

SEQ ID NO: 1901844 - DNA, 15 bp, Homo sapiens
taggcaatgttttat

SEQ ID NO: 1901845 - DNA, 15 bp, Homo sapiens
aggcaatgttttata

SEQ ID NO: 1901846 - DNA, 15 bp, Homo sapiens
ggcaatgttttatag

SEQ ID NO: 1901847 - DNA, 15 bp, Homo sapiens
gcaatgttttatagt

SEQ ID NO: 1901848 - DNA, 15 bp, Homo sapiens
caatgttttatagtt

SEQ ID NO: 1901849 - DNA, 15 bp, Homo sapiens
aatgttttatagttc

SEQ ID NO: 1901850 - DNA, 15 bp, Homo sapiens
atgttttatagttct

SEQ ID NO: 1901851 - DNA, 15 bp, Homo sapiens
tgttttatagttctc

SEQ ID NO: 1901852 - DNA, 15 bp, Homo sapiens
gttttatagttctcc

SEQ ID NO: 1901853 - DNA, 15 bp, Homo sapiens
ttttatagttctcct

SEQ ID NO: 1901854 - DNA, 15 bp, Homo sapiens
tttatagttctcctc

SEQ ID NO: 1901855 - DNA, 15 bp, Homo sapiens
ttatagttctcctca

SEQ ID NO: 1901856 - DNA, 15 bp, Homo sapiens
tatagttctcctcat

SEQ ID NO: 1901857 - DNA, 15 bp, Homo sapiens
atagttctcctcata

SEQ ID NO: 1901858 - DNA, 15 bp, Homo sapiens
tagttctcctcatag

SEQ ID NO: 1901859 - DNA, 15 bp, Homo sapiens
agttctcctcataga

SEQ ID NO: 1901860 - DNA, 15 bp, Homo sapiens
gttctcctcatagaa

SEQ ID NO: 1901861 - DNA, 15 bp, Homo sapiens
ttctcctcatagaaa

SEQ ID NO: 1901862 - DNA, 15 bp, Homo sapiens
tctcctcatagaaat

SEQ ID NO: 1901863 - DNA, 15 bp, Homo sapiens
ctcctcatagaaatc

SEQ ID NO: 1901864 - DNA, 15 bp, Homo sapiens
tcctcatagaaatct

SEQ ID NO: 1901865 - DNA, 15 bp, Homo sapiens
cctcatagaaatctt

SEQ ID NO: 1901866 - DNA, 15 bp, Homo sapiens
ctcatagaaatcttc

SEQ ID NO: 1901867 - DNA, 15 bp, Homo sapiens
tcatagaaatcttcc

SEQ ID NO: 1901868 - DNA, 15 bp, Homo sapiens
catagaaatcttcca

SEQ ID NO: 1901869 - DNA, 15 bp, Homo sapiens
atagaaatcttccat

SEQ ID NO: 1901870 - DNA, 15 bp, Homo sapiens
tagaaatcttccatc

SEQ ID NO: 1901871 - DNA, 15 bp, Homo sapiens
agaaatcttccatct

SEQ ID NO: 1901872 - DNA, 15 bp, Homo sapiens
gaaatcttccatctc

SEQ ID NO: 1901873 - DNA, 15 bp, Homo sapiens
aaatcttccatctct

SEQ ID NO: 1901874 - DNA, 15 bp, Homo sapiens
aatcttccatctctt

SEQ ID NO: 1901875 - DNA, 15 bp, Homo sapiens
atcttccatctcttt

SEQ ID NO: 1901876 - DNA, 15 bp, Homo sapiens
tcttccatctctttg

SEQ ID NO: 1901877 - DNA, 15 bp, Homo sapiens
cttccatctctttgg

SEQ ID NO: 1901878 - DNA, 15 bp, Homo sapiens
ttccatctctttggt

SEQ ID NO: 1901879 - DNA, 15 bp, Homo sapiens
tccatctctttggtt

SEQ ID NO: 1901880 - DNA, 15 bp, Homo sapiens
ccatctctttggtta

SEQ ID NO: 1901881 - DNA, 15 bp, Homo sapiens
catctctttggttac

SEQ ID NO: 1901882 - DNA, 15 bp, Homo sapiens
atctctttggttaca

SEQ ID NO: 1901883 - DNA, 15 bp, Homo sapiens
tctctttggttacat

SEQ ID NO: 1901884 - DNA, 15 bp, Homo sapiens
ctctttggttacatg

SEQ ID NO: 1901885 - DNA, 15 bp, Homo sapiens
tctttggttacatgt

SEQ ID NO: 1901886 - DNA, 15 bp, Homo sapiens
ctttggttacatgta

SEQ ID NO: 1901887 - DNA, 15 bp, Homo sapiens
tttggttacatgtag

SEQ ID NO: 1901888 - DNA, 15 bp, Homo sapiens
ttggttacatgtagt

SEQ ID NO: 1901889 - DNA, 15 bp, Homo sapiens
tggttacatgtagtc

SEQ ID NO: 1901890 - DNA, 15 bp, Homo sapiens
ggttacatgtagtct

SEQ ID NO: 1901891 - DNA, 15 bp, Homo sapiens
gttacatgtagtctc

SEQ ID NO: 1901892 - DNA, 15 bp, Homo sapiens
ttacatgtagtctca

SEQ ID NO: 1901893 - DNA, 15 bp, Homo sapiens
tacatgtagtctcag

SEQ ID NO: 1901894 - DNA, 15 bp, Homo sapiens
acatgtagtctcagg

SEQ ID NO: 1901895 - DNA, 15 bp, Homo sapiens
catgtagtctcaggt

SEQ ID NO: 1901896 - DNA, 15 bp, Homo sapiens
atgtagtctcaggta

SEQ ID NO: 1901897 - DNA, 15 bp, Homo sapiens
tgtagtctcaggtat

SEQ ID NO: 1901898 - DNA, 15 bp, Homo sapiens
gtagtctcaggtatt

SEQ ID NO: 1901899 - DNA, 15 bp, Homo sapiens
tagtctcaggtattt

SEQ ID NO: 1901900 - DNA, 15 bp, Homo sapiens
agtctcaggtatttg

SEQ ID NO: 1901901 - DNA, 15 bp, Homo sapiens
gtctcaggtatttgt

SEQ ID NO: 1901902 - DNA, 15 bp, Homo sapiens
tctcaggtatttgta

SEQ ID NO: 1901903 - DNA, 15 bp, Homo sapiens
ctcaggtatttgtat

SEQ ID NO: 1901904 - DNA, 15 bp, Homo sapiens
tcaggtatttgtatg

SEQ ID NO: 1901905 - DNA, 15 bp, Homo sapiens
caggtatttgtatgt

SEQ ID NO: 1901906 - DNA, 15 bp, Homo sapiens
aggtatttgtatgtg

SEQ ID NO: 1901907 - DNA, 15 bp, Homo sapiens
ggtatttgtatgtgt

SEQ ID NO: 1901908 - DNA, 15 bp, Homo sapiens
gtatttgtatgtgtg

SEQ ID NO: 1901909 - DNA, 15 bp, Homo sapiens
tatttgtatgtgtgt

SEQ ID NO: 1901910 - DNA, 15 bp, Homo sapiens
atttgtatgtgtgtg

SEQ ID NO: 1901911 - DNA, 15 bp, Homo sapiens
tttgtatgtgtgtgt

SEQ ID NO: 1901912 - DNA, 15 bp, Homo sapiens
ttgtatgtgtgtgtg

SEQ ID NO: 1901913 - DNA, 15 bp, Homo sapiens
tgtatgtgtgtgtgg

SEQ ID NO: 1901914 - DNA, 15 bp, Homo sapiens
gtatgtgtgtgtggc

SEQ ID NO: 1901915 - DNA, 15 bp, Homo sapiens
tatgtgtgtgtggct

SEQ ID NO: 1901916 - DNA, 15 bp, Homo sapiens
atgtgtgtgtggcta

SEQ ID NO: 1901917 - DNA, 15 bp, Homo sapiens
tgtgtgtgtggctat

SEQ ID NO: 1901918 - DNA, 15 bp, Homo sapiens
gtgtgtgtggctatt

SEQ ID NO: 1901919 - DNA, 15 bp, Homo sapiens
tgtgtgtggctattg

SEQ ID NO: 1901920 - DNA, 15 bp, Homo sapiens
gtgtgtggctattgt

SEQ ID NO: 1901921 - DNA, 15 bp, Homo sapiens
tgtgtggctattgta

SEQ ID NO: 1901922 - DNA, 15 bp, Homo sapiens
gtgtggctattgtaa

SEQ ID NO: 1901923 - DNA, 15 bp, Homo sapiens
tgtggctattgtaaa

SEQ ID NO: 1901924 - DNA, 15 bp, Homo sapiens
gtggctattgtaaat

SEQ ID NO: 1901925 - DNA, 15 bp, Homo sapiens
tggctattgtaaatg

SEQ ID NO: 1901926 - DNA, 15 bp, Homo sapiens
ggctattgtaaatga

SEQ ID NO: 1901927 - DNA, 15 bp, Homo sapiens
gctattgtaaatgag

SEQ ID NO: 1901928 - DNA, 15 bp, Homo sapiens
ctattgtaaatgaga

SEQ ID NO: 1901929 - DNA, 15 bp, Homo sapiens
tattgtaaatgagat

SEQ ID NO: 1901930 - DNA, 15 bp, Homo sapiens
attgtaaatgagatt

SEQ ID NO: 1901931 - DNA, 15 bp, Homo sapiens
ttgtaaatgagatta

SEQ ID NO: 1901932 - DNA, 15 bp, Homo sapiens
tgtaaatgagattac

SEQ ID NO: 1901933 - DNA, 15 bp, Homo sapiens
gtaaatgagattaca

SEQ ID NO: 1901934 - DNA, 15 bp, Homo sapiens
taaatgagattacat

SEQ ID NO: 1901935 - DNA, 15 bp, Homo sapiens
aaatgagattacatt

SEQ ID NO: 1901936 - DNA, 15 bp, Homo sapiens
aatgagattacattc

SEQ ID NO: 1901937 - DNA, 15 bp, Homo sapiens
atgagattacattct

SEQ ID NO: 1901938 - DNA, 15 bp, Homo sapiens
tgagattacattctt

SEQ ID NO: 1901939 - DNA, 15 bp, Homo sapiens
gagattacattcttg

SEQ ID NO: 1901940 - DNA, 15 bp, Homo sapiens
agattacattcttga

SEQ ID NO: 1901941 - DNA, 15 bp, Homo sapiens
gattacattcttgat

SEQ ID NO: 1901942 - DNA, 15 bp, Homo sapiens
attacattcttgatt

SEQ ID NO: 1901943 - DNA, 15 bp, Homo sapiens
ttacattcttgattt

SEQ ID NO: 1901944 - DNA, 15 bp, Homo sapiens
tacattcttgatttt

SEQ ID NO: 1901945 - DNA, 15 bp, Homo sapiens
acattcttgattttg

SEQ ID NO: 1901946 - DNA, 15 bp, Homo sapiens
cattcttgattttgt

SEQ ID NO: 1901947 - DNA, 15 bp, Homo sapiens
attcttgattttgtt

SEQ ID NO: 1901948 - DNA, 15 bp, Homo sapiens
ttcttgattttgttc

SEQ ID NO: 1901949 - DNA, 15 bp, Homo sapiens
tcttgattttgttct

SEQ ID NO: 1901950 - DNA, 15 bp, Homo sapiens
cttgattttgttctc

SEQ ID NO: 1901951 - DNA, 15 bp, Homo sapiens
ttgattttgttctca

SEQ ID NO: 1901952 - DNA, 15 bp, Homo sapiens
tgattttgttctcac

SEQ ID NO: 1901953 - DNA, 15 bp, Homo sapiens
gattttgttctcacc

SEQ ID NO: 1901954 - DNA, 15 bp, Homo sapiens
attttgttctcacca

SEQ ID NO: 1901955 - DNA, 15 bp, Homo sapiens
ttttgttctcaccac

SEQ ID NO: 1901956 - DNA, 15 bp, Homo sapiens
tttgttctcaccact

SEQ ID NO: 1901957 - DNA, 15 bp, Homo sapiens
ttgttctcaccactc

SEQ ID NO: 1901958 - DNA, 15 bp, Homo sapiens
tgttctcaccactcc

SEQ ID NO: 1901959 - DNA, 15 bp, Homo sapiens
gttctcaccactcct

SEQ ID NO: 1901960 - DNA, 15 bp, Homo sapiens
ttctcaccactccta

SEQ ID NO: 1901961 - DNA, 15 bp, Homo sapiens
tattcaacatagtac

SEQ ID NO: 1901962 - DNA, 15 bp, Homo sapiens
attcaacatagtact

SEQ ID NO: 1901963 - DNA, 15 bp, Homo sapiens
ttcaacatagtacta

SEQ ID NO: 1901964 - DNA, 15 bp, Homo sapiens
tcaacatagtactag

SEQ ID NO: 1901965 - DNA, 15 bp, Homo sapiens
caacatagtactaga

SEQ ID NO: 1901966 - DNA, 15 bp, Homo sapiens
aacatagtactagaa

SEQ ID NO: 1901967 - DNA, 15 bp, Homo sapiens
acatagtactagaag

SEQ ID NO: 1901968 - DNA, 15 bp, Homo sapiens
catagtactagaagt

SEQ ID NO: 1901969 - DNA, 15 bp, Homo sapiens
atagtactagaagtc

SEQ ID NO: 1901970 - DNA, 15 bp, Homo sapiens
tagtactagaagtct

SEQ ID NO: 1901971 - DNA, 15 bp, Homo sapiens
agtactagaagtctt

SEQ ID NO: 1901972 - DNA, 15 bp, Homo sapiens
gtactagaagtctta

SEQ ID NO: 1901973 - DNA, 15 bp, Homo sapiens
tactagaagtcttag

SEQ ID NO: 1901974 - DNA, 15 bp, Homo sapiens
actagaagtcttagc

SEQ ID NO: 1901975 - DNA, 15 bp, Homo sapiens
ctagaagtcttagcc

SEQ ID NO: 1901976 - DNA, 15 bp, Homo sapiens
tagaagtcttagcca

SEQ ID NO: 1901977 - DNA, 15 bp, Homo sapiens
agaagtcttagccag

SEQ ID NO: 1901978 - DNA, 15 bp, Homo sapiens
gaagtcttagccaga

SEQ ID NO: 1901979 - DNA, 15 bp, Homo sapiens
aagtcttagccagag

SEQ ID NO: 1901980 - DNA, 15 bp, Homo sapiens
agtcttagccagagc

SEQ ID NO: 1901981 - DNA, 15 bp, Homo sapiens
gtcttagccagagca

SEQ ID NO: 1901982 - DNA, 15 bp, Homo sapiens
tcttagccagagcaa

SEQ ID NO: 1901983 - DNA, 15 bp, Homo sapiens
cttagccagagcaat

SEQ ID NO: 1901984 - DNA, 15 bp, Homo sapiens
ttagccagagcaatc

SEQ ID NO: 1901985 - DNA, 15 bp, Homo sapiens
tagccagagcaatca

SEQ ID NO: 1901986 - DNA, 15 bp, Homo sapiens
agccagagcaatcag

SEQ ID NO: 1901987 - DNA, 15 bp, Homo sapiens
gccagagcaatcagg

SEQ ID NO: 1901988 - DNA, 15 bp, Homo sapiens
ccagagcaatcaggc

SEQ ID NO: 1901989 - DNA, 15 bp, Homo sapiens
cagagcaatcaggca

SEQ ID NO: 1901990 - DNA, 15 bp, Homo sapiens
agagcaatcaggcaa

SEQ ID NO: 1901991 - DNA, 15 bp, Homo sapiens
gagcaatcaggcaag

SEQ ID NO: 1901992 - DNA, 15 bp, Homo sapiens
agcaatcaggcaaga

SEQ ID NO: 1901993 - DNA, 15 bp, Homo sapiens
caggcaagagaaagt

SEQ ID NO: 1901994 - DNA, 15 bp, Homo sapiens
aggcaagagaaagta

SEQ ID NO: 1901995 - DNA, 15 bp, Homo sapiens
ggcaagagaaagtaa

SEQ ID NO: 1901996 - DNA, 15 bp, Homo sapiens
gcaagagaaagtaat

SEQ ID NO: 1901997 - DNA, 15 bp, Homo sapiens
caagagaaagtaata

SEQ ID NO: 1901998 - DNA, 15 bp, Homo sapiens
aagagaaagtaataa

SEQ ID NO: 1901999 - DNA, 15 bp, Homo sapiens
agagaaagtaataaa

SEQ ID NO: 1902000 - DNA, 15 bp, Homo sapiens
gagaaagtaataaaa

SEQ ID NO: 1902001 - DNA, 15 bp, Homo sapiens
agaaagtaataaaag

SEQ ID NO: 1902002 - DNA, 15 bp, Homo sapiens
gaaagtaataaaagg

SEQ ID NO: 1902003 - DNA, 15 bp, Homo sapiens
aaagtaataaaaggc

SEQ ID NO: 1902004 - DNA, 15 bp, Homo sapiens
aagtaataaaaggca

SEQ ID NO: 1902005 - DNA, 15 bp, Homo sapiens
agtaataaaaggcac

SEQ ID NO: 1902006 - DNA, 15 bp, Homo sapiens
gtaataaaaggcact

SEQ ID NO: 1902007 - DNA, 15 bp, Homo sapiens
taataaaaggcactg

SEQ ID NO: 1902008 - DNA, 15 bp, Homo sapiens
aataaaaggcactgc

SEQ ID NO: 1902009 - DNA, 15 bp, Homo sapiens
ataaaaggcactgcc

SEQ ID NO: 1902010 - DNA, 15 bp, Homo sapiens
taaaaggcactgccc

SEQ ID NO: 1902011 - DNA, 15 bp, Homo sapiens
aaaaggcactgccct

SEQ ID NO: 1902012 - DNA, 15 bp, Homo sapiens
aaaggcactgccctc

SEQ ID NO: 1902013 - DNA, 15 bp, Homo sapiens
aaggcactgccctcc

SEQ ID NO: 1902014 - DNA, 15 bp, Homo sapiens
aggcactgccctccc

SEQ ID NO: 1902015 - DNA, 15 bp, Homo sapiens
ggcactgccctcccc

SEQ ID NO: 1902016 - DNA, 15 bp, Homo sapiens
gcactgccctccccc

SEQ ID NO: 1902017 - DNA, 15 bp, Homo sapiens
cactgccctcccccc

SEQ ID NO: 1902018 - DNA, 15 bp, Homo sapiens
actgccctcccccca

SEQ ID NO: 1902019 - DNA, 15 bp, Homo sapiens
ctgccctccccccac

SEQ ID NO: 1902020 - DNA, 15 bp, Homo sapiens
tgccctccccccacc

SEQ ID NO: 1902021 - DNA, 15 bp, Homo sapiens
gccctccccccacca

SEQ ID NO: 1902022 - DNA, 15 bp, Homo sapiens
ccctccccccaccaa

SEQ ID NO: 1902023 - DNA, 15 bp, Homo sapiens
cctccccccaccaaa

SEQ ID NO: 1902024 - DNA, 15 bp, Homo sapiens
ctccccccaccaaaa

SEQ ID NO: 1902025 - DNA, 15 bp, Homo sapiens
tccccccaccaaaaa

SEQ ID NO: 1902026 - DNA, 15 bp, Homo sapiens
ccccccaccaaaaaa

SEQ ID NO: 1902027 - DNA, 15 bp, Homo sapiens
cccccaccaaaaaac

SEQ ID NO: 1902028 - DNA, 15 bp, Homo sapiens
ccccaccaaaaaacg

SEQ ID NO: 1902029 - DNA, 15 bp, Homo sapiens
cccaccaaaaaacga

SEQ ID NO: 1902030 - DNA, 15 bp, Homo sapiens
ccaccaaaaaacgaa

SEQ ID NO: 1902031 - DNA, 15 bp, Homo sapiens
caccaaaaaacgaaa

SEQ ID NO: 1902032 - DNA, 15 bp, Homo sapiens
accaaaaaacgaaaa

SEQ ID NO: 1902033 - DNA, 15 bp, Homo sapiens
ccaaaaaacgaaaaa

SEQ ID NO: 1902034 - DNA, 15 bp, Homo sapiens
caaaaaacgaaaaag

SEQ ID NO: 1902035 - DNA, 15 bp, Homo sapiens
aaaaaacgaaaaagt

SEQ ID NO: 1902036 - DNA, 15 bp, Homo sapiens
aaaaacgaaaaagtt

SEQ ID NO: 1902037 - DNA, 15 bp, Homo sapiens
aaaacgaaaaagtta

SEQ ID NO: 1902038 - DNA, 15 bp, Homo sapiens
aaacgaaaaagttat

SEQ ID NO: 1902039 - DNA, 15 bp, Homo sapiens
aacgaaaaagttatc

SEQ ID NO: 1902040 - DNA, 15 bp, Homo sapiens
acgaaaaagttatca

SEQ ID NO: 1902041 - DNA, 15 bp, Homo sapiens
cgaaaaagttatcac

SEQ ID NO: 1902042 - DNA, 15 bp, Homo sapiens
gaaaaagttatcacc

SEQ ID NO: 1902043 - DNA, 15 bp, Homo sapiens
aaaaagttatcacca

SEQ ID NO: 1902044 - DNA, 15 bp, Homo sapiens
aaaagttatcaccac

SEQ ID NO: 1902045 - DNA, 15 bp, Homo sapiens
aaagttatcaccact

SEQ ID NO: 1902046 - DNA, 15 bp, Homo sapiens
aagttatcaccacta

SEQ ID NO: 1902047 - DNA, 15 bp, Homo sapiens
agttatcaccactaa

SEQ ID NO: 1902048 - DNA, 15 bp, Homo sapiens
gttatcaccactaac

SEQ ID NO: 1902049 - DNA, 15 bp, Homo sapiens
ttatcaccactaaca

SEQ ID NO: 1902050 - DNA, 15 bp, Homo sapiens
tatcaccactaacaa

SEQ ID NO: 1902051 - DNA, 15 bp, Homo sapiens
atcaccactaacaat

SEQ ID NO: 1902052 - DNA, 15 bp, Homo sapiens
tcaccactaacaata

SEQ ID NO: 1902053 - DNA, 15 bp, Homo sapiens
caccactaacaatat

SEQ ID NO: 1902054 - DNA, 15 bp, Homo sapiens
accactaacaatatg

SEQ ID NO: 1902055 - DNA, 15 bp, Homo sapiens
ccactaacaatatga

SEQ ID NO: 1902056 - DNA, 15 bp, Homo sapiens
cactaacaatatgat

SEQ ID NO: 1902057 - DNA, 15 bp, Homo sapiens
actaacaatatgatt

SEQ ID NO: 1902058 - DNA, 15 bp, Homo sapiens
ctaacaatatgattc

SEQ ID NO: 1902059 - DNA, 15 bp, Homo sapiens
taacaatatgattct

SEQ ID NO: 1902060 - DNA, 15 bp, Homo sapiens
aacaatatgattcta

SEQ ID NO: 1902061 - DNA, 15 bp, Homo sapiens
acaatatgattctat

SEQ ID NO: 1902062 - DNA, 15 bp, Homo sapiens
caatatgattctata

SEQ ID NO: 1902063 - DNA, 15 bp, Homo sapiens
aatatgattctatat

SEQ ID NO: 1902064 - DNA, 15 bp, Homo sapiens
atatgattctatatc

SEQ ID NO: 1902065 - DNA, 15 bp, Homo sapiens
tatgattctatatct

SEQ ID NO: 1902066 - DNA, 15 bp, Homo sapiens
atgattctatatcta

SEQ ID NO: 1902067 - DNA, 15 bp, Homo sapiens
tgattctatatctag

SEQ ID NO: 1902068 - DNA, 15 bp, Homo sapiens
gattctatatctagg

SEQ ID NO: 1902069 - DNA, 15 bp, Homo sapiens
attctatatctagga

SEQ ID NO: 1902070 - DNA, 15 bp, Homo sapiens
ttctatatctaggaa

SEQ ID NO: 1902071 - DNA, 15 bp, Homo sapiens
tctatatctaggaaa

SEQ ID NO: 1902072 - DNA, 15 bp, Homo sapiens
ctatatctaggaaac

SEQ ID NO: 1902073 - DNA, 15 bp, Homo sapiens
tatatctaggaaacc

SEQ ID NO: 1902074 - DNA, 15 bp, Homo sapiens
atatctaggaaaccc

SEQ ID NO: 1902075 - DNA, 15 bp, Homo sapiens
tatctaggaaaccct

SEQ ID NO: 1902076 - DNA, 15 bp, Homo sapiens
atctaggaaacccta

SEQ ID NO: 1902077 - DNA, 15 bp, Homo sapiens
tctaggaaaccctaa

SEQ ID NO: 1902078 - DNA, 15 bp, Homo sapiens
ctaggaaaccctaaa

SEQ ID NO: 1902079 - DNA, 15 bp, Homo sapiens
taggaaaccctaaag

SEQ ID NO: 1902080 - DNA, 15 bp, Homo sapiens
aggaaaccctaaaga

SEQ ID NO: 1902081 - DNA, 15 bp, Homo sapiens
ggaaaccctaaagat

SEQ ID NO: 1902082 - DNA, 15 bp, Homo sapiens
gaaaccctaaagatt

SEQ ID NO: 1902083 - DNA, 15 bp, Homo sapiens
aaaccctaaagattc

SEQ ID NO: 1902084 - DNA, 15 bp, Homo sapiens
aaccctaaagattct

SEQ ID NO: 1902085 - DNA, 15 bp, Homo sapiens
accctaaagattctg

SEQ ID NO: 1902086 - DNA, 15 bp, Homo sapiens
ccctaaagattctgc

SEQ ID NO: 1902087 - DNA, 15 bp, Homo sapiens
cctaaagattctgca

SEQ ID NO: 1902088 - DNA, 15 bp, Homo sapiens
ctaaagattctgcaa

SEQ ID NO: 1902089 - DNA, 15 bp, Homo sapiens
taaagattctgcaaa

SEQ ID NO: 1902090 - DNA, 15 bp, Homo sapiens
aaagattctgcaaaa

SEQ ID NO: 1902091 - DNA, 15 bp, Homo sapiens
aagattctgcaaaaa

SEQ ID NO: 1902092 - DNA, 15 bp, Homo sapiens
agattctgcaaaaag

SEQ ID NO: 1902093 - DNA, 15 bp, Homo sapiens
gattctgcaaaaaga

SEQ ID NO: 1902094 - DNA, 15 bp, Homo sapiens
attctgcaaaaagac

SEQ ID NO: 1902095 - DNA, 15 bp, Homo sapiens
ttctgcaaaaagact

SEQ ID NO: 1902096 - DNA, 15 bp, Homo sapiens
tctgcaaaaagactc

SEQ ID NO: 1902097 - DNA, 15 bp, Homo sapiens
ctgcaaaaagactcc

SEQ ID NO: 1902098 - DNA, 15 bp, Homo sapiens
tgcaaaaagactcct

SEQ ID NO: 1902099 - DNA, 15 bp, Homo sapiens
gcaaaaagactccta

SEQ ID NO: 1902100 - DNA, 15 bp, Homo sapiens
caaaaagactcctag

SEQ ID NO: 1902101 - DNA, 15 bp, Homo sapiens
aaaagactcctagac

SEQ ID NO: 1902102 - DNA, 15 bp, Homo sapiens
aaagactcctagact

SEQ ID NO: 1902103 - DNA, 15 bp, Homo sapiens
aagactcctagactt

SEQ ID NO: 1902104 - DNA, 15 bp, Homo sapiens
agactcctagacttg

SEQ ID NO: 1902105 - DNA, 15 bp, Homo sapiens
gactcctagacttga

SEQ ID NO: 1902106 - DNA, 15 bp, Homo sapiens
actcctagacttgat

SEQ ID NO: 1902107 - DNA, 15 bp, Homo sapiens
ctcctagacttgata

SEQ ID NO: 1902108 - DNA, 15 bp, Homo sapiens
tcctagacttgataa

SEQ ID NO: 1902109 - DNA, 15 bp, Homo sapiens
cctagacttgataaa

SEQ ID NO: 1902110 - DNA, 15 bp, Homo sapiens
ctagacttgataaac

SEQ ID NO: 1902111 - DNA, 15 bp, Homo sapiens
tagacttgataaaca

SEQ ID NO: 1902112 - DNA, 15 bp, Homo sapiens
agacttgataaacaa

SEQ ID NO: 1902113 - DNA, 15 bp, Homo sapiens
gacttgataaacaac

SEQ ID NO: 1902114 - DNA, 15 bp, Homo sapiens
acttgataaacaact

SEQ ID NO: 1902115 - DNA, 15 bp, Homo sapiens
cttgataaacaactt

SEQ ID NO: 1902116 - DNA, 15 bp, Homo sapiens
ttgataaacaacttt

SEQ ID NO: 1902117 - DNA, 15 bp, Homo sapiens
tgataaacaacttta

SEQ ID NO: 1902118 - DNA, 15 bp, Homo sapiens
gataaacaactttag

SEQ ID NO: 1902119 - DNA, 15 bp, Homo sapiens
ataaacaactttagt

SEQ ID NO: 1902120 - DNA, 15 bp, Homo sapiens
taaacaactttagta

SEQ ID NO: 1902121 - DNA, 15 bp, Homo sapiens
aaacaactttagtaa

SEQ ID NO: 1902122 - DNA, 15 bp, Homo sapiens
aacaactttagtaaa

SEQ ID NO: 1902123 - DNA, 15 bp, Homo sapiens
acaactttagtaaag

SEQ ID NO: 1902124 - DNA, 15 bp, Homo sapiens
caactttagtaaagt

SEQ ID NO: 1902125 - DNA, 15 bp, Homo sapiens
aactttagtaaagtc

SEQ ID NO: 1902126 - DNA, 15 bp, Homo sapiens
actttagtaaagtct

SEQ ID NO: 1902127 - DNA, 15 bp, Homo sapiens
ctttagtaaagtctc

SEQ ID NO: 1902128 - DNA, 15 bp, Homo sapiens
tttagtaaagtctca

SEQ ID NO: 1902129 - DNA, 15 bp, Homo sapiens
ttagtaaagtctcag

SEQ ID NO: 1902130 - DNA, 15 bp, Homo sapiens
tagtaaagtctcagg

SEQ ID NO: 1902131 - DNA, 15 bp, Homo sapiens
agtaaagtctcagga

SEQ ID NO: 1902132 - DNA, 15 bp, Homo sapiens
gtaaagtctcaggat

SEQ ID NO: 1902133 - DNA, 15 bp, Homo sapiens
taaagtctcaggata

SEQ ID NO: 1902134 - DNA, 15 bp, Homo sapiens
aaagtctcaggataa

SEQ ID NO: 1902135 - DNA, 15 bp, Homo sapiens
aagtctcaggataaa

SEQ ID NO: 1902136 - DNA, 15 bp, Homo sapiens
agtctcaggataaaa

SEQ ID NO: 1902137 - DNA, 15 bp, Homo sapiens
gtctcaggataaaaa

SEQ ID NO: 1902138 - DNA, 15 bp, Homo sapiens
ctcaggataaaaata

SEQ ID NO: 1902139 - DNA, 15 bp, Homo sapiens
tcaggataaaaatag

SEQ ID NO: 1902140 - DNA, 15 bp, Homo sapiens
caggataaaaatagt

SEQ ID NO: 1902141 - DNA, 15 bp, Homo sapiens
aggataaaaatagtc

SEQ ID NO: 1902142 - DNA, 15 bp, Homo sapiens
ggataaaaatagtca

SEQ ID NO: 1902143 - DNA, 15 bp, Homo sapiens
gataaaaatagtcaa

SEQ ID NO: 1902144 - DNA, 15 bp, Homo sapiens
ataaaaatagtcaac

SEQ ID NO: 1902145 - DNA, 15 bp, Homo sapiens
taaaaatagtcaaca

SEQ ID NO: 1902146 - DNA, 15 bp, Homo sapiens
aaaaatagtcaacat

SEQ ID NO: 1902147 - DNA, 15 bp, Homo sapiens
aaaatagtcaacata

SEQ ID NO: 1902148 - DNA, 15 bp, Homo sapiens
aaatagtcaacatat

SEQ ID NO: 1902149 - DNA, 15 bp, Homo sapiens
aatagtcaacatata

SEQ ID NO: 1902150 - DNA, 15 bp, Homo sapiens
atagtcaacatataa

SEQ ID NO: 1902151 - DNA, 15 bp, Homo sapiens
tagtcaacatataaa

SEQ ID NO: 1902152 - DNA, 15 bp, Homo sapiens
agtcaacatataaaa

SEQ ID NO: 1902153 - DNA, 15 bp, Homo sapiens
gtcaacatataaaaa

SEQ ID NO: 1902154 - DNA, 15 bp, Homo sapiens
tcaacatataaaaat

SEQ ID NO: 1902155 - DNA, 15 bp, Homo sapiens
caacatataaaaatc

SEQ ID NO: 1902156 - DNA, 15 bp, Homo sapiens
aacatataaaaatca

SEQ ID NO: 1902157 - DNA, 15 bp, Homo sapiens
acatataaaaatcag

SEQ ID NO: 1902158 - DNA, 15 bp, Homo sapiens
catataaaaatcagt

SEQ ID NO: 1902159 - DNA, 15 bp, Homo sapiens
atataaaaatcagta

SEQ ID NO: 1902160 - DNA, 15 bp, Homo sapiens
tataaaaatcagtag

SEQ ID NO: 1902161 - DNA, 15 bp, Homo sapiens
ataaaaatcagtagc

SEQ ID NO: 1902162 - DNA, 15 bp, Homo sapiens
taaaaatcagtagca

SEQ ID NO: 1902163 - DNA, 15 bp, Homo sapiens
aaaaatcagtagcat

SEQ ID NO: 1902164 - DNA, 15 bp, Homo sapiens
aaaatcagtagcatt

SEQ ID NO: 1902165 - DNA, 15 bp, Homo sapiens
aaatcagtagcattt

SEQ ID NO: 1902166 - DNA, 15 bp, Homo sapiens
aatcagtagcatttc

SEQ ID NO: 1902167 - DNA, 15 bp, Homo sapiens
atcagtagcatttct

SEQ ID NO: 1902168 - DNA, 15 bp, Homo sapiens
tcagtagcatttcta

SEQ ID NO: 1902169 - DNA, 15 bp, Homo sapiens
cagtagcatttctat

SEQ ID NO: 1902170 - DNA, 15 bp, Homo sapiens
agtagcatttctata

SEQ ID NO: 1902171 - DNA, 15 bp, Homo sapiens
gtagcatttctatac

SEQ ID NO: 1902172 - DNA, 15 bp, Homo sapiens
tagcatttctataca

SEQ ID NO: 1902173 - DNA, 15 bp, Homo sapiens
agcatttctatacac

SEQ ID NO: 1902174 - DNA, 15 bp, Homo sapiens
gcatttctatacacg

SEQ ID NO: 1902175 - DNA, 15 bp, Homo sapiens
catttctatacacgt

SEQ ID NO: 1902176 - DNA, 15 bp, Homo sapiens
atttctatacacgtg

SEQ ID NO: 1902177 - DNA, 15 bp, Homo sapiens
tttctatacacgtga

SEQ ID NO: 1902178 - DNA, 15 bp, Homo sapiens
ttctatacacgtgat

SEQ ID NO: 1902179 - DNA, 15 bp, Homo sapiens
tctatacacgtgata

SEQ ID NO: 1902180 - DNA, 15 bp, Homo sapiens
ctatacacgtgatat

SEQ ID NO: 1902181 - DNA, 15 bp, Homo sapiens
tatacacgtgatatc

SEQ ID NO: 1902182 - DNA, 15 bp, Homo sapiens
atacacgtgatatct

SEQ ID NO: 1902183 - DNA, 15 bp, Homo sapiens
tacacgtgatatctt

SEQ ID NO: 1902184 - DNA, 15 bp, Homo sapiens
acacgtgatatcttt

SEQ ID NO: 1902185 - DNA, 15 bp, Homo sapiens
cacgtgatatctttc

SEQ ID NO: 1902186 - DNA, 15 bp, Homo sapiens
acgtgatatctttca

SEQ ID NO: 1902187 - DNA, 15 bp, Homo sapiens
cgtgatatctttcaa

SEQ ID NO: 1902188 - DNA, 15 bp, Homo sapiens
gtgatatctttcaac

SEQ ID NO: 1902189 - DNA, 15 bp, Homo sapiens
tgatatctttcaact

SEQ ID NO: 1902190 - DNA, 15 bp, Homo sapiens
gatatctttcaacta

SEQ ID NO: 1902191 - DNA, 15 bp, Homo sapiens
atatctttcaactag

SEQ ID NO: 1902192 - DNA, 15 bp, Homo sapiens
tatctttcaactaga

SEQ ID NO: 1902193 - DNA, 15 bp, Homo sapiens
atctttcaactagat

SEQ ID NO: 1902194 - DNA, 15 bp, Homo sapiens
tctttcaactagatt

SEQ ID NO: 1902195 - DNA, 15 bp, Homo sapiens
ctttcaactagattt

SEQ ID NO: 1902196 - DNA, 15 bp, Homo sapiens
tttcaactagattta

SEQ ID NO: 1902197 - DNA, 15 bp, Homo sapiens
ttcaactagatttat

SEQ ID NO: 1902198 - DNA, 15 bp, Homo sapiens
tcaactagatttatt

SEQ ID NO: 1902199 - DNA, 15 bp, Homo sapiens
caactagatttattt

SEQ ID NO: 1902200 - DNA, 15 bp, Homo sapiens
aactagatttatttc

SEQ ID NO: 1902201 - DNA, 15 bp, Homo sapiens
actagatttatttct

SEQ ID NO: 1902202 - DNA, 15 bp, Homo sapiens
ctagatttatttcta

SEQ ID NO: 1902203 - DNA, 15 bp, Homo sapiens
tagatttatttctag

SEQ ID NO: 1902204 - DNA, 15 bp, Homo sapiens
agatttatttctagt

SEQ ID NO: 1902205 - DNA, 15 bp, Homo sapiens
gatttatttctagtt

SEQ ID NO: 1902206 - DNA, 15 bp, Homo sapiens
atttatttctagttt

SEQ ID NO: 1902207 - DNA, 15 bp, Homo sapiens
tttatttctagttta

SEQ ID NO: 1902208 - DNA, 15 bp, Homo sapiens
ttatttctagtttaa

SEQ ID NO: 1902209 - DNA, 15 bp, Homo sapiens
tatttctagtttaat

SEQ ID NO: 1902210 - DNA, 15 bp, Homo sapiens
atttctagtttaatt

SEQ ID NO: 1902211 - DNA, 15 bp, Homo sapiens
tttctagtttaattc

SEQ ID NO: 1902212 - DNA, 15 bp, Homo sapiens
ttctagtttaattct

SEQ ID NO: 1902213 - DNA, 15 bp, Homo sapiens
tctagtttaattcta

SEQ ID NO: 1902214 - DNA, 15 bp, Homo sapiens
ctagtttaattctac

SEQ ID NO: 1902215 - DNA, 15 bp, Homo sapiens
tagtttaattctact

SEQ ID NO: 1902216 - DNA, 15 bp, Homo sapiens
agtttaattctactg

SEQ ID NO: 1902217 - DNA, 15 bp, Homo sapiens
gtttaattctactgt

SEQ ID NO: 1902218 - DNA, 15 bp, Homo sapiens
tttaattctactgtg

SEQ ID NO: 1902219 - DNA, 15 bp, Homo sapiens
ttaattctactgtgg

SEQ ID NO: 1902220 - DNA, 15 bp, Homo sapiens
taattctactgtggt

SEQ ID NO: 1902221 - DNA, 15 bp, Homo sapiens
aattctactgtggtc

SEQ ID NO: 1902222 - DNA, 15 bp, Homo sapiens
attctactgtggtca

SEQ ID NO: 1902223 - DNA, 15 bp, Homo sapiens
ttctactgtggtcag

SEQ ID NO: 1902224 - DNA, 15 bp, Homo sapiens
tctactgtggtcaga

SEQ ID NO: 1902225 - DNA, 15 bp, Homo sapiens
ctactgtggtcagag

SEQ ID NO: 1902226 - DNA, 15 bp, Homo sapiens
tactgtggtcagaga

SEQ ID NO: 1902227 - DNA, 15 bp, Homo sapiens
actgtggtcagagat

SEQ ID NO: 1902228 - DNA, 15 bp, Homo sapiens
ctgtggtcagagatc

SEQ ID NO: 1902229 - DNA, 15 bp, Homo sapiens
tgtggtcagagatca

SEQ ID NO: 1902230 - DNA, 15 bp, Homo sapiens
gtggtcagagatcat

SEQ ID NO: 1902231 - DNA, 15 bp, Homo sapiens
tggtcagagatcatc

SEQ ID NO: 1902232 - DNA, 15 bp, Homo sapiens
ggtcagagatcatct

SEQ ID NO: 1902233 - DNA, 15 bp, Homo sapiens
gtcagagatcatctt

SEQ ID NO: 1902234 - DNA, 15 bp, Homo sapiens
tcagagatcatcttt

SEQ ID NO: 1902235 - DNA, 15 bp, Homo sapiens
cagagatcatctttt

SEQ ID NO: 1902236 - DNA, 15 bp, Homo sapiens
agagatcatctttta

SEQ ID NO: 1902237 - DNA, 15 bp, Homo sapiens
gagatcatcttttat

SEQ ID NO: 1902238 - DNA, 15 bp, Homo sapiens
agatcatcttttatt

SEQ ID NO: 1902239 - DNA, 15 bp, Homo sapiens
gatcatcttttatta

SEQ ID NO: 1902240 - DNA, 15 bp, Homo sapiens
atcatcttttattat

SEQ ID NO: 1902241 - DNA, 15 bp, Homo sapiens
tcatcttttattatt

SEQ ID NO: 1902242 - DNA, 15 bp, Homo sapiens
catcttttattattt

SEQ ID NO: 1902243 - DNA, 15 bp, Homo sapiens
atcttttattatttc

SEQ ID NO: 1902244 - DNA, 15 bp, Homo sapiens
tcttttattatttca

SEQ ID NO: 1902245 - DNA, 15 bp, Homo sapiens
cttttattatttcag

SEQ ID NO: 1902246 - DNA, 15 bp, Homo sapiens
ttttattatttcagc

SEQ ID NO: 1902247 - DNA, 15 bp, Homo sapiens
tttattatttcagct

SEQ ID NO: 1902248 - DNA, 15 bp, Homo sapiens
ttattatttcagctt

SEQ ID NO: 1902249 - DNA, 15 bp, Homo sapiens
tattatttcagcttt

SEQ ID NO: 1902250 - DNA, 15 bp, Homo sapiens
attatttcagctttt

SEQ ID NO: 1902251 - DNA, 15 bp, Homo sapiens
ttatttcagcttttc

SEQ ID NO: 1902252 - DNA, 15 bp, Homo sapiens
tatttcagcttttca

SEQ ID NO: 1902253 - DNA, 15 bp, Homo sapiens
atttcagcttttcaa

SEQ ID NO: 1902254 - DNA, 15 bp, Homo sapiens
tttcagcttttcaac

SEQ ID NO: 1902255 - DNA, 15 bp, Homo sapiens
ttcagcttttcaact

SEQ ID NO: 1902256 - DNA, 15 bp, Homo sapiens
tcagcttttcaactt

SEQ ID NO: 1902257 - DNA, 15 bp, Homo sapiens
cagcttttcaacttg

SEQ ID NO: 1902258 - DNA, 15 bp, Homo sapiens
agcttttcaacttgt

SEQ ID NO: 1902259 - DNA, 15 bp, Homo sapiens
gcttttcaacttgtt

SEQ ID NO: 1902260 - DNA, 15 bp, Homo sapiens
cttttcaacttgtta

SEQ ID NO: 1902261 - DNA, 15 bp, Homo sapiens
ttttcaacttgttaa

SEQ ID NO: 1902262 - DNA, 15 bp, Homo sapiens
tttcaacttgttaaa

SEQ ID NO: 1902263 - DNA, 15 bp, Homo sapiens
ttcaacttgttaaag

SEQ ID NO: 1902264 - DNA, 15 bp, Homo sapiens
tcaacttgttaaagt

SEQ ID NO: 1902265 - DNA, 15 bp, Homo sapiens
caacttgttaaagtt

SEQ ID NO: 1902266 - DNA, 15 bp, Homo sapiens
aacttgttaaagttt

SEQ ID NO: 1902267 - DNA, 15 bp, Homo sapiens
acttgttaaagtttg

SEQ ID NO: 1902268 - DNA, 15 bp, Homo sapiens
cttgttaaagtttgt

SEQ ID NO: 1902269 - DNA, 15 bp, Homo sapiens
ttgttaaagtttgtt

SEQ ID NO: 1902270 - DNA, 15 bp, Homo sapiens
tgttaaagtttgttt

SEQ ID NO: 1902271 - DNA, 15 bp, Homo sapiens
gttaaagtttgtttt

SEQ ID NO: 1902272 - DNA, 15 bp, Homo sapiens
ttaaagtttgttttt

SEQ ID NO: 1902273 - DNA, 15 bp, Homo sapiens
taaagtttgtttttc

SEQ ID NO: 1902274 - DNA, 15 bp, Homo sapiens
aaagtttgtttttcc

SEQ ID NO: 1902275 - DNA, 15 bp, Homo sapiens
aagtttgtttttccc

SEQ ID NO: 1902276 - DNA, 15 bp, Homo sapiens
agtttgtttttcccc

SEQ ID NO: 1902277 - DNA, 15 bp, Homo sapiens
gtttgtttttcccca

SEQ ID NO: 1902278 - DNA, 15 bp, Homo sapiens
tttgtttttccccag

SEQ ID NO: 1902279 - DNA, 15 bp, Homo sapiens
ttgtttttccccaga

SEQ ID NO: 1902280 - DNA, 15 bp, Homo sapiens
tgtttttccccagaa

SEQ ID NO: 1902281 - DNA, 15 bp, Homo sapiens
gtttttccccagaat

SEQ ID NO: 1902282 - DNA, 15 bp, Homo sapiens
tttttccccagaata

SEQ ID NO: 1902283 - DNA, 15 bp, Homo sapiens
ttttccccagaatat

SEQ ID NO: 1902284 - DNA, 15 bp, Homo sapiens
tttccccagaatata

SEQ ID NO: 1902285 - DNA, 15 bp, Homo sapiens
ttccccagaatataa

SEQ ID NO: 1902286 - DNA, 15 bp, Homo sapiens
tccccagaatataat

SEQ ID NO: 1902287 - DNA, 15 bp, Homo sapiens
ccccagaatataatc

SEQ ID NO: 1902288 - DNA, 15 bp, Homo sapiens
cccagaatataatct

SEQ ID NO: 1902289 - DNA, 15 bp, Homo sapiens
ccagaatataatcta

SEQ ID NO: 1902290 - DNA, 15 bp, Homo sapiens
cagaatataatctat

SEQ ID NO: 1902291 - DNA, 15 bp, Homo sapiens
agaatataatctatc

SEQ ID NO: 1902292 - DNA, 15 bp, Homo sapiens
gaatataatctatct

SEQ ID NO: 1902293 - DNA, 15 bp, Homo sapiens
aatataatctatctt

SEQ ID NO: 1902294 - DNA, 15 bp, Homo sapiens
atataatctatctta

SEQ ID NO: 1902295 - DNA, 15 bp, Homo sapiens
tataatctatcttag

SEQ ID NO: 1902296 - DNA, 15 bp, Homo sapiens
ataatctatcttagt

SEQ ID NO: 1902297 - DNA, 15 bp, Homo sapiens
taatctatcttagtg

SEQ ID NO: 1902298 - DNA, 15 bp, Homo sapiens
aatctatcttagtga

SEQ ID NO: 1902299 - DNA, 15 bp, Homo sapiens
atctatcttagtgaa

SEQ ID NO: 1902300 - DNA, 15 bp, Homo sapiens
tctatcttagtgaat

SEQ ID NO: 1902301 - DNA, 15 bp, Homo sapiens
ctatcttagtgaatt

SEQ ID NO: 1902302 - DNA, 15 bp, Homo sapiens
tatcttagtgaattt

SEQ ID NO: 1902303 - DNA, 15 bp, Homo sapiens
atcttagtgaatttc

SEQ ID NO: 1902304 - DNA, 15 bp, Homo sapiens
tcttagtgaatttcc

SEQ ID NO: 1902305 - DNA, 15 bp, Homo sapiens
cttagtgaatttccc

SEQ ID NO: 1902306 - DNA, 15 bp, Homo sapiens
ttagtgaatttccca

SEQ ID NO: 1902307 - DNA, 15 bp, Homo sapiens
tagtgaatttcccat

SEQ ID NO: 1902308 - DNA, 15 bp, Homo sapiens
agtgaatttcccatt

SEQ ID NO: 1902309 - DNA, 15 bp, Homo sapiens
gtgaatttcccattt

SEQ ID NO: 1902310 - DNA, 15 bp, Homo sapiens
tgaatttcccatttg

SEQ ID NO: 1902311 - DNA, 15 bp, Homo sapiens
gaatttcccatttgc

SEQ ID NO: 1902312 - DNA, 15 bp, Homo sapiens
aatttcccatttgca

SEQ ID NO: 1902313 - DNA, 15 bp, Homo sapiens
atttcccatttgcac

SEQ ID NO: 1902314 - DNA, 15 bp, Homo sapiens
tttcccatttgcact

SEQ ID NO: 1902315 - DNA, 15 bp, Homo sapiens
ttcccatttgcactt

SEQ ID NO: 1902316 - DNA, 15 bp, Homo sapiens
tcccatttgcactta

SEQ ID NO: 1902317 - DNA, 15 bp, Homo sapiens
cccatttgcacttaa

SEQ ID NO: 1902318 - DNA, 15 bp, Homo sapiens
ccatttgcacttaaa

SEQ ID NO: 1902319 - DNA, 15 bp, Homo sapiens
catttgcacttaaaa

SEQ ID NO: 1902320 - DNA, 15 bp, Homo sapiens
atttgcacttaaaaa

SEQ ID NO: 1902321 - DNA, 15 bp, Homo sapiens
tttgcacttaaaaag

SEQ ID NO: 1902322 - DNA, 15 bp, Homo sapiens
ttgcacttaaaaagg

SEQ ID NO: 1902323 - DNA, 15 bp, Homo sapiens
tgcacttaaaaagga

SEQ ID NO: 1902324 - DNA, 15 bp, Homo sapiens
gcacttaaaaaggaa

SEQ ID NO: 1902325 - DNA, 15 bp, Homo sapiens
cacttaaaaaggaat

SEQ ID NO: 1902326 - DNA, 15 bp, Homo sapiens
acttaaaaaggaata

SEQ ID NO: 1902327 - DNA, 15 bp, Homo sapiens
cttaaaaaggaatat

SEQ ID NO: 1902328 - DNA, 15 bp, Homo sapiens
ttaaaaaggaatatt

SEQ ID NO: 1902329 - DNA, 15 bp, Homo sapiens
taaaaaggaatattt

SEQ ID NO: 1902330 - DNA, 15 bp, Homo sapiens
aaaaaggaatatttc

SEQ ID NO: 1902331 - DNA, 15 bp, Homo sapiens
aaaaggaatatttca

SEQ ID NO: 1902332 - DNA, 15 bp, Homo sapiens
aaaggaatatttcat

SEQ ID NO: 1902333 - DNA, 15 bp, Homo sapiens
aaggaatatttcatg

SEQ ID NO: 1902334 - DNA, 15 bp, Homo sapiens
aggaatatttcatgt

SEQ ID NO: 1902335 - DNA, 15 bp, Homo sapiens
ggaatatttcatgtg

SEQ ID NO: 1902336 - DNA, 15 bp, Homo sapiens
gaatatttcatgtgc

SEQ ID NO: 1902337 - DNA, 15 bp, Homo sapiens
aatatttcatgtgct

SEQ ID NO: 1902338 - DNA, 15 bp, Homo sapiens
atatttcatgtgctg

SEQ ID NO: 1902339 - DNA, 15 bp, Homo sapiens
tatttcatgtgctgt

SEQ ID NO: 1902340 - DNA, 15 bp, Homo sapiens
atttcatgtgctgtt

SEQ ID NO: 1902341 - DNA, 15 bp, Homo sapiens
tttcatgtgctgtta

SEQ ID NO: 1902342 - DNA, 15 bp, Homo sapiens
ttcatgtgctgttat

SEQ ID NO: 1902343 - DNA, 15 bp, Homo sapiens
tcatgtgctgttatt

SEQ ID NO: 1902344 - DNA, 15 bp, Homo sapiens
catgtgctgttattc

SEQ ID NO: 1902345 - DNA, 15 bp, Homo sapiens
atgtgctgttattcg

SEQ ID NO: 1902346 - DNA, 15 bp, Homo sapiens
tgtgctgttattcga

SEQ ID NO: 1902347 - DNA, 15 bp, Homo sapiens
gtgctgttattcgat

SEQ ID NO: 1902348 - DNA, 15 bp, Homo sapiens
tgctgttattcgatg

SEQ ID NO: 1902349 - DNA, 15 bp, Homo sapiens
gctgttattcgatgg

SEQ ID NO: 1902350 - DNA, 15 bp, Homo sapiens
ctgttattcgatgga

SEQ ID NO: 1902351 - DNA, 15 bp, Homo sapiens
tgttattcgatggaa

SEQ ID NO: 1902352 - DNA, 15 bp, Homo sapiens
gttattcgatggaat

SEQ ID NO: 1902353 - DNA, 15 bp, Homo sapiens
ttattcgatggaatg

SEQ ID NO: 1902354 - DNA, 15 bp, Homo sapiens
tattcgatggaatgt

SEQ ID NO: 1902355 - DNA, 15 bp, Homo sapiens
attcgatggaatgtt

SEQ ID NO: 1902356 - DNA, 15 bp, Homo sapiens
ttcgatggaatgttg

SEQ ID NO: 1902357 - DNA, 15 bp, Homo sapiens
tcgatggaatgttgt

SEQ ID NO: 1902358 - DNA, 15 bp, Homo sapiens
cgatggaatgttgtc

SEQ ID NO: 1902359 - DNA, 15 bp, Homo sapiens
gatggaatgttgtca

SEQ ID NO: 1902360 - DNA, 15 bp, Homo sapiens
atggaatgttgtcag

SEQ ID NO: 1902361 - DNA, 15 bp, Homo sapiens
tggaatgttgtcaga

SEQ ID NO: 1902362 - DNA, 15 bp, Homo sapiens
ggaatgttgtcagat

SEQ ID NO: 1902363 - DNA, 15 bp, Homo sapiens
gaatgttgtcagata

SEQ ID NO: 1902364 - DNA, 15 bp, Homo sapiens
aatgttgtcagatat

SEQ ID NO: 1902365 - DNA, 15 bp, Homo sapiens
atgttgtcagatatt

SEQ ID NO: 1902366 - DNA, 15 bp, Homo sapiens
tgttgtcagatatta

SEQ ID NO: 1902367 - DNA, 15 bp, Homo sapiens
gttgtcagatattaa

SEQ ID NO: 1902368 - DNA, 15 bp, Homo sapiens
ttgtcagatattaat

SEQ ID NO: 1902369 - DNA, 15 bp, Homo sapiens
tgtcagatattaata

SEQ ID NO: 1902370 - DNA, 15 bp, Homo sapiens
gtcagatattaatat

SEQ ID NO: 1902371 - DNA, 15 bp, Homo sapiens
tcagatattaatata

SEQ ID NO: 1902372 - DNA, 15 bp, Homo sapiens
cagatattaatataa

SEQ ID NO: 1902373 - DNA, 15 bp, Homo sapiens
agatattaatataaa

SEQ ID NO: 1902374 - DNA, 15 bp, Homo sapiens
gatattaatataaac

SEQ ID NO: 1902375 - DNA, 15 bp, Homo sapiens
atattaatataaaca

SEQ ID NO: 1902376 - DNA, 15 bp, Homo sapiens
tattaatataaacat

SEQ ID NO: 1902377 - DNA, 15 bp, Homo sapiens
attaatataaacatg

SEQ ID NO: 1902378 - DNA, 15 bp, Homo sapiens
ttaatataaacatgt

SEQ ID NO: 1902379 - DNA, 15 bp, Homo sapiens
taatataaacatgtc

SEQ ID NO: 1902380 - DNA, 15 bp, Homo sapiens
aatataaacatgtcc

SEQ ID NO: 1902381 - DNA, 15 bp, Homo sapiens
atataaacatgtcca

SEQ ID NO: 1902382 - DNA, 15 bp, Homo sapiens
tataaacatgtccat

SEQ ID NO: 1902383 - DNA, 15 bp, Homo sapiens
ataaacatgtccatt

SEQ ID NO: 1902384 - DNA, 15 bp, Homo sapiens
taaacatgtccattt

SEQ ID NO: 1902385 - DNA, 15 bp, Homo sapiens
aaacatgtccattta

SEQ ID NO: 1902386 - DNA, 15 bp, Homo sapiens
aacatgtccatttac

SEQ ID NO: 1902387 - DNA, 15 bp, Homo sapiens
acatgtccatttact

SEQ ID NO: 1902388 - DNA, 15 bp, Homo sapiens
catgtccatttactt

SEQ ID NO: 1902389 - DNA, 15 bp, Homo sapiens
atgtccatttacttt

SEQ ID NO: 1902390 - DNA, 15 bp, Homo sapiens
tgtccatttactttt

SEQ ID NO: 1902391 - DNA, 15 bp, Homo sapiens
gtccatttacttttg

SEQ ID NO: 1902392 - DNA, 15 bp, Homo sapiens
tccatttacttttga

SEQ ID NO: 1902393 - DNA, 15 bp, Homo sapiens
ccatttacttttgat

SEQ ID NO: 1902394 - DNA, 15 bp, Homo sapiens
catttacttttgatt

SEQ ID NO: 1902395 - DNA, 15 bp, Homo sapiens
atttacttttgatta

SEQ ID NO: 1902396 - DNA, 15 bp, Homo sapiens
tttacttttgattag

SEQ ID NO: 1902397 - DNA, 15 bp, Homo sapiens
ttacttttgattagt

SEQ ID NO: 1902398 - DNA, 15 bp, Homo sapiens
tacttttgattagtg

SEQ ID NO: 1902399 - DNA, 15 bp, Homo sapiens
acttttgattagtgt

SEQ ID NO: 1902400 - DNA, 15 bp, Homo sapiens
cttttgattagtgtt

SEQ ID NO: 1902401 - DNA, 15 bp, Homo sapiens
ttttgattagtgttt

SEQ ID NO: 1902402 - DNA, 15 bp, Homo sapiens
tttgattagtgtttt

SEQ ID NO: 1902403 - DNA, 15 bp, Homo sapiens
ttgattagtgttttc

SEQ ID NO: 1902404 - DNA, 15 bp, Homo sapiens
tgattagtgttttca

SEQ ID NO: 1902405 - DNA, 15 bp, Homo sapiens
gattagtgttttcat

SEQ ID NO: 1902406 - DNA, 15 bp, Homo sapiens
attagtgttttcatg

SEQ ID NO: 1902407 - DNA, 15 bp, Homo sapiens
ttagtgttttcatga

SEQ ID NO: 1902408 - DNA, 15 bp, Homo sapiens
tagtgttttcatgac

SEQ ID NO: 1902409 - DNA, 15 bp, Homo sapiens
agtgttttcatgacg

SEQ ID NO: 1902410 - DNA, 15 bp, Homo sapiens
gtgttttcatgacgt

SEQ ID NO: 1902411 - DNA, 15 bp, Homo sapiens
tgttttcatgacgta

SEQ ID NO: 1902412 - DNA, 15 bp, Homo sapiens
gttttcatgacgtat

SEQ ID NO: 1902413 - DNA, 15 bp, Homo sapiens
ttttcatgacgtatc

SEQ ID NO: 1902414 - DNA, 15 bp, Homo sapiens
tttcatgacgtatca

SEQ ID NO: 1902415 - DNA, 15 bp, Homo sapiens
ttcatgacgtatcat

SEQ ID NO: 1902416 - DNA, 15 bp, Homo sapiens
tcatgacgtatcatt

SEQ ID NO: 1902417 - DNA, 15 bp, Homo sapiens
catgacgtatcattt

SEQ ID NO: 1902418 - DNA, 15 bp, Homo sapiens
atgacgtatcatttt

SEQ ID NO: 1902419 - DNA, 15 bp, Homo sapiens
tgacgtatcattttc

SEQ ID NO: 1902420 - DNA, 15 bp, Homo sapiens
gacgtatcattttct

SEQ ID NO: 1902421 - DNA, 15 bp, Homo sapiens
acgtatcattttcta

SEQ ID NO: 1902422 - DNA, 15 bp, Homo sapiens
cgtatcattttctaa

SEQ ID NO: 1902423 - DNA, 15 bp, Homo sapiens
gtatcattttctaac

SEQ ID NO: 1902424 - DNA, 15 bp, Homo sapiens
tatcattttctaacc

SEQ ID NO: 1902425 - DNA, 15 bp, Homo sapiens
atcattttctaacct

SEQ ID NO: 1902426 - DNA, 15 bp, Homo sapiens
tcattttctaacctt

SEQ ID NO: 1902427 - DNA, 15 bp, Homo sapiens
cattttctaaccttt

SEQ ID NO: 1902428 - DNA, 15 bp, Homo sapiens
attttctaacctttt

SEQ ID NO: 1902429 - DNA, 15 bp, Homo sapiens
ttttctaacctttta

SEQ ID NO: 1902430 - DNA, 15 bp, Homo sapiens
tttctaaccttttac

SEQ ID NO: 1902431 - DNA, 15 bp, Homo sapiens
ttctaaccttttacc

SEQ ID NO: 1902432 - DNA, 15 bp, Homo sapiens
tctaaccttttacct

SEQ ID NO: 1902433 - DNA, 15 bp, Homo sapiens
ctaaccttttacctt

SEQ ID NO: 1902434 - DNA, 15 bp, Homo sapiens
taaccttttaccttt

SEQ ID NO: 1902435 - DNA, 15 bp, Homo sapiens
aaccttttaccttta

SEQ ID NO: 1902436 - DNA, 15 bp, Homo sapiens
accttttacctttaa

SEQ ID NO: 1902437 - DNA, 15 bp, Homo sapiens
ccttttacctttaac

SEQ ID NO: 1902438 - DNA, 15 bp, Homo sapiens
cttttacctttaacc

SEQ ID NO: 1902439 - DNA, 15 bp, Homo sapiens
ttttacctttaacct

SEQ ID NO: 1902440 - DNA, 15 bp, Homo sapiens
tttacctttaaccta

SEQ ID NO: 1902441 - DNA, 15 bp, Homo sapiens
ttacctttaacctac

SEQ ID NO: 1902442 - DNA, 15 bp, Homo sapiens
tacctttaacctacc

SEQ ID NO: 1902443 - DNA, 15 bp, Homo sapiens
acctttaacctacct

SEQ ID NO: 1902444 - DNA, 15 bp, Homo sapiens
cctttaacctaccta

SEQ ID NO: 1902445 - DNA, 15 bp, Homo sapiens
ctttaacctacctat

SEQ ID NO: 1902446 - DNA, 15 bp, Homo sapiens
tttaacctacctata

SEQ ID NO: 1902447 - DNA, 15 bp, Homo sapiens
ttaacctacctatat

SEQ ID NO: 1902448 - DNA, 15 bp, Homo sapiens
taacctacctatatt

SEQ ID NO: 1902449 - DNA, 15 bp, Homo sapiens
aacctacctatatta

SEQ ID NO: 1902450 - DNA, 15 bp, Homo sapiens
acctacctatattat

SEQ ID NO: 1902451 - DNA, 15 bp, Homo sapiens
cctacctatattatt

SEQ ID NO: 1902452 - DNA, 15 bp, Homo sapiens
ctacctatattattt

SEQ ID NO: 1902453 - DNA, 15 bp, Homo sapiens
tacctatattatttc

SEQ ID NO: 1902454 - DNA, 15 bp, Homo sapiens
acctatattatttcc

SEQ ID NO: 1902455 - DNA, 15 bp, Homo sapiens
cctatattatttcct

SEQ ID NO: 1902456 - DNA, 15 bp, Homo sapiens
ctatattatttcctt

SEQ ID NO: 1902457 - DNA, 15 bp, Homo sapiens
tatattatttccttt

SEQ ID NO: 1902458 - DNA, 15 bp, Homo sapiens
atattatttcctttg

SEQ ID NO: 1902459 - DNA, 15 bp, Homo sapiens
tattatttcctttga

SEQ ID NO: 1902460 - DNA, 15 bp, Homo sapiens
attatttcctttgaa

SEQ ID NO: 1902461 - DNA, 15 bp, Homo sapiens
ttatttcctttgaag

SEQ ID NO: 1902462 - DNA, 15 bp, Homo sapiens
tatttcctttgaagt

SEQ ID NO: 1902463 - DNA, 15 bp, Homo sapiens
atttcctttgaagtg

SEQ ID NO: 1902464 - DNA, 15 bp, Homo sapiens
tttcctttgaagtga

SEQ ID NO: 1902465 - DNA, 15 bp, Homo sapiens
ttcctttgaagtgag

SEQ ID NO: 1902466 - DNA, 15 bp, Homo sapiens
tcctttgaagtgagt

SEQ ID NO: 1902467 - DNA, 15 bp, Homo sapiens
cctttgaagtgagtt

SEQ ID NO: 1902468 - DNA, 15 bp, Homo sapiens
ctttgaagtgagttt

SEQ ID NO: 1902469 - DNA, 15 bp, Homo sapiens
tttgaagtgagtttc

SEQ ID NO: 1902470 - DNA, 15 bp, Homo sapiens
ttgaagtgagtttct

SEQ ID NO: 1902471 - DNA, 15 bp, Homo sapiens
tgaagtgagtttctt

SEQ ID NO: 1902472 - DNA, 15 bp, Homo sapiens
gaagtgagtttcttg

SEQ ID NO: 1902473 - DNA, 15 bp, Homo sapiens
aagtgagtttcttgt

SEQ ID NO: 1902474 - DNA, 15 bp, Homo sapiens
agtgagtttcttgta

SEQ ID NO: 1902475 - DNA, 15 bp, Homo sapiens
gtgagtttcttgtac

SEQ ID NO: 1902476 - DNA, 15 bp, Homo sapiens
tgagtttcttgtaca

SEQ ID NO: 1902477 - DNA, 15 bp, Homo sapiens
gagtttcttgtacat

SEQ ID NO: 1902478 - DNA, 15 bp, Homo sapiens
agtttcttgtacata

SEQ ID NO: 1902479 - DNA, 15 bp, Homo sapiens
gtttcttgtacatag

SEQ ID NO: 1902480 - DNA, 15 bp, Homo sapiens
tttcttgtacatagc

SEQ ID NO: 1902481 - DNA, 15 bp, Homo sapiens
ttcttgtacatagca

SEQ ID NO: 1902482 - DNA, 15 bp, Homo sapiens
tcttgtacatagcat

SEQ ID NO: 1902483 - DNA, 15 bp, Homo sapiens
cttgtacatagcatg

SEQ ID NO: 1902484 - DNA, 15 bp, Homo sapiens
ttgtacatagcatgt

SEQ ID NO: 1902485 - DNA, 15 bp, Homo sapiens
tgtacatagcatgta

SEQ ID NO: 1902486 - DNA, 15 bp, Homo sapiens
gtacatagcatgtag

SEQ ID NO: 1902487 - DNA, 15 bp, Homo sapiens
tacatagcatgtagt

SEQ ID NO: 1902488 - DNA, 15 bp, Homo sapiens
acatagcatgtagtt

SEQ ID NO: 1902489 - DNA, 15 bp, Homo sapiens
catagcatgtagttg

SEQ ID NO: 1902490 - DNA, 15 bp, Homo sapiens
atagcatgtagttgg

SEQ ID NO: 1902491 - DNA, 15 bp, Homo sapiens
tagcatgtagttggt

SEQ ID NO: 1902492 - DNA, 15 bp, Homo sapiens
agcatgtagttggtt

SEQ ID NO: 1902493 - DNA, 15 bp, Homo sapiens
gcatgtagttggttt

SEQ ID NO: 1902494 - DNA, 15 bp, Homo sapiens
catgtagttggttta

SEQ ID NO: 1902495 - DNA, 15 bp, Homo sapiens
atgtagttggtttat

SEQ ID NO: 1902496 - DNA, 15 bp, Homo sapiens
tgtagttggtttatt

SEQ ID NO: 1902497 - DNA, 15 bp, Homo sapiens
gtagttggtttattt

SEQ ID NO: 1902498 - DNA, 15 bp, Homo sapiens
tagttggtttatttt

SEQ ID NO: 1902499 - DNA, 15 bp, Homo sapiens
agttggtttattttt

SEQ ID NO: 1902500 - DNA, 15 bp, Homo sapiens
ttggtttattttttt

SEQ ID NO: 1902501 - DNA, 15 bp, Homo sapiens
tggtttattttttta

SEQ ID NO: 1902502 - DNA, 15 bp, Homo sapiens
ggtttatttttttaa

SEQ ID NO: 1902503 - DNA, 15 bp, Homo sapiens
gtttatttttttaat

SEQ ID NO: 1902504 - DNA, 15 bp, Homo sapiens
tttatttttttaatc

SEQ ID NO: 1902505 - DNA, 15 bp, Homo sapiens
ttatttttttaatcc

SEQ ID NO: 1902506 - DNA, 15 bp, Homo sapiens
tatttttttaatcca

SEQ ID NO: 1902507 - DNA, 15 bp, Homo sapiens
atttttttaatccat

SEQ ID NO: 1902508 - DNA, 15 bp, Homo sapiens
tttttttaatccatc

SEQ ID NO: 1902509 - DNA, 15 bp, Homo sapiens
ttttttaatccatct

SEQ ID NO: 1902510 - DNA, 15 bp, Homo sapiens
tttttaatccatcta

SEQ ID NO: 1902511 - DNA, 15 bp, Homo sapiens
ttttaatccatctat

SEQ ID NO: 1902512 - DNA, 15 bp, Homo sapiens
tttaatccatctatc

SEQ ID NO: 1902513 - DNA, 15 bp, Homo sapiens
ttaatccatctatcc

SEQ ID NO: 1902514 - DNA, 15 bp, Homo sapiens
taatccatctatcct

SEQ ID NO: 1902515 - DNA, 15 bp, Homo sapiens
aatccatctatccta

SEQ ID NO: 1902516 - DNA, 15 bp, Homo sapiens
atccatctatcctaa

SEQ ID NO: 1902517 - DNA, 15 bp, Homo sapiens
tccatctatcctaac

SEQ ID NO: 1902518 - DNA, 15 bp, Homo sapiens
ccatctatcctaaca

SEQ ID NO: 1902519 - DNA, 15 bp, Homo sapiens
catctatcctaacaa

SEQ ID NO: 1902520 - DNA, 15 bp, Homo sapiens
atctatcctaacaat

SEQ ID NO: 1902521 - DNA, 15 bp, Homo sapiens
tctatcctaacaatc

SEQ ID NO: 1902522 - DNA, 15 bp, Homo sapiens
ctatcctaacaatct

SEQ ID NO: 1902523 - DNA, 15 bp, Homo sapiens
tatcctaacaatctc

SEQ ID NO: 1902524 - DNA, 15 bp, Homo sapiens
atcctaacaatctct

SEQ ID NO: 1902525 - DNA, 15 bp, Homo sapiens
tcctaacaatctcta

SEQ ID NO: 1902526 - DNA, 15 bp, Homo sapiens
cctaacaatctctat

SEQ ID NO: 1902527 - DNA, 15 bp, Homo sapiens
ctaacaatctctatg

SEQ ID NO: 1902528 - DNA, 15 bp, Homo sapiens
taacaatctctatgt

SEQ ID NO: 1902529 - DNA, 15 bp, Homo sapiens
aacaatctctatgtt

SEQ ID NO: 1902530 - DNA, 15 bp, Homo sapiens
acaatctctatgttt

SEQ ID NO: 1902531 - DNA, 15 bp, Homo sapiens
caatctctatgtttt

SEQ ID NO: 1902532 - DNA, 15 bp, Homo sapiens
aatctctatgtttta

SEQ ID NO: 1902533 - DNA, 15 bp, Homo sapiens
atctctatgttttag

SEQ ID NO: 1902534 - DNA, 15 bp, Homo sapiens
tctctatgttttagt

SEQ ID NO: 1902535 - DNA, 15 bp, Homo sapiens
ctctatgttttagtt

SEQ ID NO: 1902536 - DNA, 15 bp, Homo sapiens
tctatgttttagttg

SEQ ID NO: 1902537 - DNA, 15 bp, Homo sapiens
ctatgttttagttgg

SEQ ID NO: 1902538 - DNA, 15 bp, Homo sapiens
tatgttttagttggt

SEQ ID NO: 1902539 - DNA, 15 bp, Homo sapiens
atgttttagttggta

SEQ ID NO: 1902540 - DNA, 15 bp, Homo sapiens
tgttttagttggtat

SEQ ID NO: 1902541 - DNA, 15 bp, Homo sapiens
gttttagttggtata

SEQ ID NO: 1902542 - DNA, 15 bp, Homo sapiens
ttttagttggtatat

SEQ ID NO: 1902543 - DNA, 15 bp, Homo sapiens
tttagttggtatatt

SEQ ID NO: 1902544 - DNA, 15 bp, Homo sapiens
ttagttggtatattt

SEQ ID NO: 1902545 - DNA, 15 bp, Homo sapiens
tagttggtatattta

SEQ ID NO: 1902546 - DNA, 15 bp, Homo sapiens
agttggtatatttag

SEQ ID NO: 1902547 - DNA, 15 bp, Homo sapiens
gttggtatatttaga

SEQ ID NO: 1902548 - DNA, 15 bp, Homo sapiens
ttggtatatttagat

SEQ ID NO: 1902549 - DNA, 15 bp, Homo sapiens
tggtatatttagatc

SEQ ID NO: 1902550 - DNA, 15 bp, Homo sapiens
ggtatatttagatca

SEQ ID NO: 1902551 - DNA, 15 bp, Homo sapiens
gtatatttagatcat

SEQ ID NO: 1902552 - DNA, 15 bp, Homo sapiens
tatatttagatcatt

SEQ ID NO: 1902553 - DNA, 15 bp, Homo sapiens
atatttagatcattt

SEQ ID NO: 1902554 - DNA, 15 bp, Homo sapiens
tatttagatcatttg

SEQ ID NO: 1902555 - DNA, 15 bp, Homo sapiens
atttagatcatttgc

SEQ ID NO: 1902556 - DNA, 15 bp, Homo sapiens
tttagatcatttgct

SEQ ID NO: 1902557 - DNA, 15 bp, Homo sapiens
ttagatcatttgctt

SEQ ID NO: 1902558 - DNA, 15 bp, Homo sapiens
tagatcatttgcttt

SEQ ID NO: 1902559 - DNA, 15 bp, Homo sapiens
agatcatttgctttt

SEQ ID NO: 1902560 - DNA, 15 bp, Homo sapiens
gatcatttgctttta

SEQ ID NO: 1902561 - DNA, 15 bp, Homo sapiens
atcatttgcttttaa

SEQ ID NO: 1902562 - DNA, 15 bp, Homo sapiens
tcatttgcttttaat

SEQ ID NO: 1902563 - DNA, 15 bp, Homo sapiens
catttgcttttaata

SEQ ID NO: 1902564 - DNA, 15 bp, Homo sapiens
atttgcttttaatat

SEQ ID NO: 1902565 - DNA, 15 bp, Homo sapiens
tttgcttttaatata

SEQ ID NO: 1902566 - DNA, 15 bp, Homo sapiens
ttgcttttaatataa

SEQ ID NO: 1902567 - DNA, 15 bp, Homo sapiens
tgcttttaatataat

SEQ ID NO: 1902568 - DNA, 15 bp, Homo sapiens
gcttttaatataatt

SEQ ID NO: 1902569 - DNA, 15 bp, Homo sapiens
cttttaatataatta

SEQ ID NO: 1902570 - DNA, 15 bp, Homo sapiens
ttttaatataattat

SEQ ID NO: 1902571 - DNA, 15 bp, Homo sapiens
tttaatataattatt

SEQ ID NO: 1902572 - DNA, 15 bp, Homo sapiens
ttaatataattatta

SEQ ID NO: 1902573 - DNA, 15 bp, Homo sapiens
taatataattattat

SEQ ID NO: 1902574 - DNA, 15 bp, Homo sapiens
aatataattattatg

SEQ ID NO: 1902575 - DNA, 15 bp, Homo sapiens
atataattattatga

SEQ ID NO: 1902576 - DNA, 15 bp, Homo sapiens
tataattattatgaa

SEQ ID NO: 1902577 - DNA, 15 bp, Homo sapiens
ataattattatgaat

SEQ ID NO: 1902578 - DNA, 15 bp, Homo sapiens
taattattatgaatt

SEQ ID NO: 1902579 - DNA, 15 bp, Homo sapiens
attattatgaattta

SEQ ID NO: 1902580 - DNA, 15 bp, Homo sapiens
ttattatgaatttag

SEQ ID NO: 1902581 - DNA, 15 bp, Homo sapiens
tattatgaatttagc

SEQ ID NO: 1902582 - DNA, 15 bp, Homo sapiens
attatgaatttagct

SEQ ID NO: 1902583 - DNA, 15 bp, Homo sapiens
ttatgaatttagctc

SEQ ID NO: 1902584 - DNA, 15 bp, Homo sapiens
tatgaatttagctct

SEQ ID NO: 1902585 - DNA, 15 bp, Homo sapiens
atgaatttagctctc

SEQ ID NO: 1902586 - DNA, 15 bp, Homo sapiens
tgaatttagctctcc

SEQ ID NO: 1902587 - DNA, 15 bp, Homo sapiens
gaatttagctctccc

SEQ ID NO: 1902588 - DNA, 15 bp, Homo sapiens
aatttagctctccca

SEQ ID NO: 1902589 - DNA, 15 bp, Homo sapiens
atttagctctcccat

SEQ ID NO: 1902590 - DNA, 15 bp, Homo sapiens
tttagctctcccatt

SEQ ID NO: 1902591 - DNA, 15 bp, Homo sapiens
ttagctctcccattt

SEQ ID NO: 1902592 - DNA, 15 bp, Homo sapiens
tagctctcccatttt

SEQ ID NO: 1902593 - DNA, 15 bp, Homo sapiens
agctctcccatttta

SEQ ID NO: 1902594 - DNA, 15 bp, Homo sapiens
gctctcccattttat

SEQ ID NO: 1902595 - DNA, 15 bp, Homo sapiens
ctctcccattttatt

SEQ ID NO: 1902596 - DNA, 15 bp, Homo sapiens
tctcccattttattt

SEQ ID NO: 1902597 - DNA, 15 bp, Homo sapiens
ctcccattttatttg

SEQ ID NO: 1902598 - DNA, 15 bp, Homo sapiens
tcccattttatttgt

SEQ ID NO: 1902599 - DNA, 15 bp, Homo sapiens
cccattttatttgtt

SEQ ID NO: 1902600 - DNA, 15 bp, Homo sapiens
ccattttatttgttt

SEQ ID NO: 1902601 - DNA, 15 bp, Homo sapiens
cattttatttgtttt

SEQ ID NO: 1902602 - DNA, 15 bp, Homo sapiens
attttatttgttttc

SEQ ID NO: 1902603 - DNA, 15 bp, Homo sapiens
ttttatttgttttct

SEQ ID NO: 1902604 - DNA, 15 bp, Homo sapiens
tttatttgttttctc

SEQ ID NO: 1902605 - DNA, 15 bp, Homo sapiens
ttatttgttttctct

SEQ ID NO: 1902606 - DNA, 15 bp, Homo sapiens
tatttgttttctcta

SEQ ID NO: 1902607 - DNA, 15 bp, Homo sapiens
atttgttttctctat

SEQ ID NO: 1902608 - DNA, 15 bp, Homo sapiens
tttgttttctctatt

SEQ ID NO: 1902609 - DNA, 15 bp, Homo sapiens
ttgttttctctattt

SEQ ID NO: 1902610 - DNA, 15 bp, Homo sapiens
tgttttctctatttt

SEQ ID NO: 1902611 - DNA, 15 bp, Homo sapiens
gttttctctattttt

SEQ ID NO: 1902612 - DNA, 15 bp, Homo sapiens
ttttctctatttttc

SEQ ID NO: 1902613 - DNA, 15 bp, Homo sapiens
tttctctatttttca

SEQ ID NO: 1902614 - DNA, 15 bp, Homo sapiens
ttctctatttttcat

SEQ ID NO: 1902615 - DNA, 15 bp, Homo sapiens
tctctatttttcatt

SEQ ID NO: 1902616 - DNA, 15 bp, Homo sapiens
ctctatttttcattc

SEQ ID NO: 1902617 - DNA, 15 bp, Homo sapiens
tctatttttcattcc

SEQ ID NO: 1902618 - DNA, 15 bp, Homo sapiens
ctatttttcattcct

SEQ ID NO: 1902619 - DNA, 15 bp, Homo sapiens
tatttttcattcctt

SEQ ID NO: 1902620 - DNA, 15 bp, Homo sapiens
atttttcattccttt

SEQ ID NO: 1902621 - DNA, 15 bp, Homo sapiens
tttttcattcctttg

SEQ ID NO: 1902622 - DNA, 15 bp, Homo sapiens
ttttcattcctttgt

SEQ ID NO: 1902623 - DNA, 15 bp, Homo sapiens
tttcattcctttgtt

SEQ ID NO: 1902624 - DNA, 15 bp, Homo sapiens
ttcattcctttgttt

SEQ ID NO: 1902625 - DNA, 15 bp, Homo sapiens
tcattcctttgtttt

SEQ ID NO: 1902626 - DNA, 15 bp, Homo sapiens
cattcctttgttttc

SEQ ID NO: 1902627 - DNA, 15 bp, Homo sapiens
attcctttgttttct

SEQ ID NO: 1902628 - DNA, 15 bp, Homo sapiens
ttcctttgttttcta

SEQ ID NO: 1902629 - DNA, 15 bp, Homo sapiens
tcctttgttttctat

SEQ ID NO: 1902630 - DNA, 15 bp, Homo sapiens
cctttgttttctatt

SEQ ID NO: 1902631 - DNA, 15 bp, Homo sapiens
ctttgttttctattc

SEQ ID NO: 1902632 - DNA, 15 bp, Homo sapiens
tttgttttctattcc

SEQ ID NO: 1902633 - DNA, 15 bp, Homo sapiens
ttgttttctattcct

SEQ ID NO: 1902634 - DNA, 15 bp, Homo sapiens
tgttttctattcctt

SEQ ID NO: 1902635 - DNA, 15 bp, Homo sapiens
gttttctattccttg

SEQ ID NO: 1902636 - DNA, 15 bp, Homo sapiens
ttttctattccttga

SEQ ID NO: 1902637 - DNA, 15 bp, Homo sapiens
tttctattccttgac

SEQ ID NO: 1902638 - DNA, 15 bp, Homo sapiens
ttctattccttgact

SEQ ID NO: 1902639 - DNA, 15 bp, Homo sapiens
tctattccttgactt

SEQ ID NO: 1902640 - DNA, 15 bp, Homo sapiens
ctattccttgacttt

SEQ ID NO: 1902641 - DNA, 15 bp, Homo sapiens
tattccttgactttt

SEQ ID NO: 1902642 - DNA, 15 bp, Homo sapiens
attccttgacttttt

SEQ ID NO: 1902643 - DNA, 15 bp, Homo sapiens
ttccttgactttttt

SEQ ID NO: 1902644 - DNA, 15 bp, Homo sapiens
tccttgacttttttg

SEQ ID NO: 1902645 - DNA, 15 bp, Homo sapiens
ccttgacttttttgg

SEQ ID NO: 1902646 - DNA, 15 bp, Homo sapiens
cttgacttttttgga

SEQ ID NO: 1902647 - DNA, 15 bp, Homo sapiens
ttgacttttttggat

SEQ ID NO: 1902648 - DNA, 15 bp, Homo sapiens
tgacttttttggata

SEQ ID NO: 1902649 - DNA, 15 bp, Homo sapiens
gacttttttggataa

SEQ ID NO: 1902650 - DNA, 15 bp, Homo sapiens
acttttttggataat

SEQ ID NO: 1902651 - DNA, 15 bp, Homo sapiens
cttttttggataatt

SEQ ID NO: 1902652 - DNA, 15 bp, Homo sapiens
ttttttggataattt

SEQ ID NO: 1902653 - DNA, 15 bp, Homo sapiens
tttttggataattta

SEQ ID NO: 1902654 - DNA, 15 bp, Homo sapiens
ttttggataatttaa

SEQ ID NO: 1902655 - DNA, 15 bp, Homo sapiens
tttggataatttaaa

SEQ ID NO: 1902656 - DNA, 15 bp, Homo sapiens
ttggataatttaaat

SEQ ID NO: 1902657 - DNA, 15 bp, Homo sapiens
tggataatttaaata

SEQ ID NO: 1902658 - DNA, 15 bp, Homo sapiens
ggataatttaaatat

SEQ ID NO: 1902659 - DNA, 15 bp, Homo sapiens
gataatttaaatatt

SEQ ID NO: 1902660 - DNA, 15 bp, Homo sapiens
ataatttaaatattt

SEQ ID NO: 1902661 - DNA, 15 bp, Homo sapiens
taatttaaatatttt

SEQ ID NO: 1902662 - DNA, 15 bp, Homo sapiens
aatttaaatattttt

SEQ ID NO: 1902663 - DNA, 15 bp, Homo sapiens
atttaaatattttta

SEQ ID NO: 1902664 - DNA, 15 bp, Homo sapiens
tttaaatatttttaa

SEQ ID NO: 1902665 - DNA, 15 bp, Homo sapiens
ttaaatatttttaat

SEQ ID NO: 1902666 - DNA, 15 bp, Homo sapiens
taaatatttttaatg

SEQ ID NO: 1902667 - DNA, 15 bp, Homo sapiens
aaatatttttaatgc

SEQ ID NO: 1902668 - DNA, 15 bp, Homo sapiens
aatatttttaatgct

SEQ ID NO: 1902669 - DNA, 15 bp, Homo sapiens
atatttttaatgctt

SEQ ID NO: 1902670 - DNA, 15 bp, Homo sapiens
tatttttaatgctta

SEQ ID NO: 1902671 - DNA, 15 bp, Homo sapiens
atttttaatgcttaa

SEQ ID NO: 1902672 - DNA, 15 bp, Homo sapiens
tttttaatgcttaaa

SEQ ID NO: 1902673 - DNA, 15 bp, Homo sapiens
ttttaatgcttaaat

SEQ ID NO: 1902674 - DNA, 15 bp, Homo sapiens
tttaatgcttaaatt

SEQ ID NO: 1902675 - DNA, 15 bp, Homo sapiens
ttaatgcttaaattt

SEQ ID NO: 1902676 - DNA, 15 bp, Homo sapiens
taatgcttaaattta

SEQ ID NO: 1902677 - DNA, 15 bp, Homo sapiens
aatgcttaaatttaa

SEQ ID NO: 1902678 - DNA, 15 bp, Homo sapiens
atgcttaaatttaat

SEQ ID NO: 1902679 - DNA, 15 bp, Homo sapiens
tgcttaaatttaatt

SEQ ID NO: 1902680 - DNA, 15 bp, Homo sapiens
gcttaaatttaattt

SEQ ID NO: 1902681 - DNA, 15 bp, Homo sapiens
cttaaatttaattta

SEQ ID NO: 1902682 - DNA, 15 bp, Homo sapiens
ttaaatttaatttat

SEQ ID NO: 1902683 - DNA, 15 bp, Homo sapiens
taaatttaatttatt

SEQ ID NO: 1902684 - DNA, 15 bp, Homo sapiens
aaatttaatttattt

SEQ ID NO: 1902685 - DNA, 15 bp, Homo sapiens
aatttaatttattta

SEQ ID NO: 1902686 - DNA, 15 bp, Homo sapiens
atttaatttatttaa

SEQ ID NO: 1902687 - DNA, 15 bp, Homo sapiens
tttaatttatttaat

SEQ ID NO: 1902688 - DNA, 15 bp, Homo sapiens
ttaatttatttaatg

SEQ ID NO: 1902689 - DNA, 15 bp, Homo sapiens
taatttatttaatgt

SEQ ID NO: 1902690 - DNA, 15 bp, Homo sapiens
aatttatttaatgtg

SEQ ID NO: 1902691 - DNA, 15 bp, Homo sapiens
atttatttaatgtgt

SEQ ID NO: 1902692 - DNA, 15 bp, Homo sapiens
tttatttaatgtgtt

SEQ ID NO: 1902693 - DNA, 15 bp, Homo sapiens
ttatttaatgtgttt

SEQ ID NO: 1902694 - DNA, 15 bp, Homo sapiens
tatttaatgtgtttt

SEQ ID NO: 1902695 - DNA, 15 bp, Homo sapiens
atttaatgtgttttt

SEQ ID NO: 1902696 - DNA, 15 bp, Homo sapiens
tttaatgtgttttta

SEQ ID NO: 1902697 - DNA, 15 bp, Homo sapiens
ttaatgtgtttttaa

SEQ ID NO: 1902698 - DNA, 15 bp, Homo sapiens
taatgtgtttttaat

SEQ ID NO: 1902699 - DNA, 15 bp, Homo sapiens
aatgtgtttttaatt

SEQ ID NO: 1902700 - DNA, 15 bp, Homo sapiens
atgtgtttttaatta

SEQ ID NO: 1902701 - DNA, 15 bp, Homo sapiens
tgtgtttttaattat

SEQ ID NO: 1902702 - DNA, 15 bp, Homo sapiens
gtgtttttaattatc

SEQ ID NO: 1902703 - DNA, 15 bp, Homo sapiens
tgtttttaattatct

SEQ ID NO: 1902704 - DNA, 15 bp, Homo sapiens
gtttttaattatctc

SEQ ID NO: 1902705 - DNA, 15 bp, Homo sapiens
tttttaattatctca

SEQ ID NO: 1902706 - DNA, 15 bp, Homo sapiens
ttttaattatctcag

SEQ ID NO: 1902707 - DNA, 15 bp, Homo sapiens
tttaattatctcagt

SEQ ID NO: 1902708 - DNA, 15 bp, Homo sapiens
ttaattatctcagtg

SEQ ID NO: 1902709 - DNA, 15 bp, Homo sapiens
taattatctcagtga

SEQ ID NO: 1902710 - DNA, 15 bp, Homo sapiens
aattatctcagtgaa

SEQ ID NO: 1902711 - DNA, 15 bp, Homo sapiens
attatctcagtgaat

SEQ ID NO: 1902712 - DNA, 15 bp, Homo sapiens
ttatctcagtgaata

SEQ ID NO: 1902713 - DNA, 15 bp, Homo sapiens
tatctcagtgaataa

SEQ ID NO: 1902714 - DNA, 15 bp, Homo sapiens
atctcagtgaataat

SEQ ID NO: 1902715 - DNA, 15 bp, Homo sapiens
tctcagtgaataata

SEQ ID NO: 1902716 - DNA, 15 bp, Homo sapiens
ctcagtgaataatat

SEQ ID NO: 1902717 - DNA, 15 bp, Homo sapiens
tcagtgaataatatt

SEQ ID NO: 1902718 - DNA, 15 bp, Homo sapiens
cagtgaataatattt

SEQ ID NO: 1902719 - DNA, 15 bp, Homo sapiens
agtgaataatatttt

SEQ ID NO: 1902720 - DNA, 15 bp, Homo sapiens
gtgaataatatttta

SEQ ID NO: 1902721 - DNA, 15 bp, Homo sapiens
tgaataatattttag

SEQ ID NO: 1902722 - DNA, 15 bp, Homo sapiens
gaataatattttagt

SEQ ID NO: 1902723 - DNA, 15 bp, Homo sapiens
aataatattttagtg

SEQ ID NO: 1902724 - DNA, 15 bp, Homo sapiens
ataatattttagtgg

SEQ ID NO: 1902725 - DNA, 15 bp, Homo sapiens
taatattttagtggc

SEQ ID NO: 1902726 - DNA, 15 bp, Homo sapiens
aatattttagtggcc

SEQ ID NO: 1902727 - DNA, 15 bp, Homo sapiens
atattttagtggccc

SEQ ID NO: 1902728 - DNA, 15 bp, Homo sapiens
tattttagtggccct

SEQ ID NO: 1902729 - DNA, 15 bp, Homo sapiens
attttagtggccctt

SEQ ID NO: 1902730 - DNA, 15 bp, Homo sapiens
ttttagtggcccttt

SEQ ID NO: 1902731 - DNA, 15 bp, Homo sapiens
tttagtggccctttt

SEQ ID NO: 1902732 - DNA, 15 bp, Homo sapiens
ttagtggccctttta

SEQ ID NO: 1902733 - DNA, 15 bp, Homo sapiens
tagtggcccttttaa

SEQ ID NO: 1902734 - DNA, 15 bp, Homo sapiens
agtggcccttttaaa

SEQ ID NO: 1902735 - DNA, 15 bp, Homo sapiens
gtggcccttttaaag

SEQ ID NO: 1902736 - DNA, 15 bp, Homo sapiens
tggcccttttaaaga

SEQ ID NO: 1902737 - DNA, 15 bp, Homo sapiens
ggcccttttaaagat

SEQ ID NO: 1902738 - DNA, 15 bp, Homo sapiens
gcccttttaaagatt

SEQ ID NO: 1902739 - DNA, 15 bp, Homo sapiens
cccttttaaagatta

SEQ ID NO: 1902740 - DNA, 15 bp, Homo sapiens
ccttttaaagattac

SEQ ID NO: 1902741 - DNA, 15 bp, Homo sapiens
cttttaaagattaca

SEQ ID NO: 1902742 - DNA, 15 bp, Homo sapiens
ttttaaagattacag

SEQ ID NO: 1902743 - DNA, 15 bp, Homo sapiens
tttaaagattacagt

SEQ ID NO: 1902744 - DNA, 15 bp, Homo sapiens
ttaaagattacagtc

SEQ ID NO: 1902745 - DNA, 15 bp, Homo sapiens
taaagattacagtct

SEQ ID NO: 1902746 - DNA, 15 bp, Homo sapiens
aaagattacagtcta

SEQ ID NO: 1902747 - DNA, 15 bp, Homo sapiens
aagattacagtctac

SEQ ID NO: 1902748 - DNA, 15 bp, Homo sapiens
agattacagtctaca

SEQ ID NO: 1902749 - DNA, 15 bp, Homo sapiens
gattacagtctacat

SEQ ID NO: 1902750 - DNA, 15 bp, Homo sapiens
attacagtctacata

SEQ ID NO: 1902751 - DNA, 15 bp, Homo sapiens
ttacagtctacatat

SEQ ID NO: 1902752 - DNA, 15 bp, Homo sapiens
tacagtctacatata

SEQ ID NO: 1902753 - DNA, 15 bp, Homo sapiens
acagtctacatatat

SEQ ID NO: 1902754 - DNA, 15 bp, Homo sapiens
cagtctacatatata

SEQ ID NO: 1902755 - DNA, 15 bp, Homo sapiens
agtctacatatataa

SEQ ID NO: 1902756 - DNA, 15 bp, Homo sapiens
gtctacatatataac

SEQ ID NO: 1902757 - DNA, 15 bp, Homo sapiens
tctacatatataact

SEQ ID NO: 1902758 - DNA, 15 bp, Homo sapiens
ctacatatataactt

SEQ ID NO: 1902759 - DNA, 15 bp, Homo sapiens
tacatatataacttt

SEQ ID NO: 1902760 - DNA, 15 bp, Homo sapiens
acatatataactttt

SEQ ID NO: 1902761 - DNA, 15 bp, Homo sapiens
catatataacttttc

SEQ ID NO: 1902762 - DNA, 15 bp, Homo sapiens
atatataacttttca

SEQ ID NO: 1902763 - DNA, 15 bp, Homo sapiens
tatataacttttcat

SEQ ID NO: 1902764 - DNA, 15 bp, Homo sapiens
atataacttttcata

SEQ ID NO: 1902765 - DNA, 15 bp, Homo sapiens
tataacttttcatag

SEQ ID NO: 1902766 - DNA, 15 bp, Homo sapiens
ataacttttcatagt

SEQ ID NO: 1902767 - DNA, 15 bp, Homo sapiens
taacttttcatagtc

SEQ ID NO: 1902768 - DNA, 15 bp, Homo sapiens
aacttttcatagtct

SEQ ID NO: 1902769 - DNA, 15 bp, Homo sapiens
acttttcatagtcta

SEQ ID NO: 1902770 - DNA, 15 bp, Homo sapiens
cttttcatagtctac

SEQ ID NO: 1902771 - DNA, 15 bp, Homo sapiens
ttttcatagtctaca

SEQ ID NO: 1902772 - DNA, 15 bp, Homo sapiens
tttcatagtctacat

SEQ ID NO: 1902773 - DNA, 15 bp, Homo sapiens
ttcatagtctacata

SEQ ID NO: 1902774 - DNA, 15 bp, Homo sapiens
tcatagtctacatac

SEQ ID NO: 1902775 - DNA, 15 bp, Homo sapiens
catagtctacataca

SEQ ID NO: 1902776 - DNA, 15 bp, Homo sapiens
atagtctacatacaa

SEQ ID NO: 1902777 - DNA, 15 bp, Homo sapiens
tagtctacatacaat

SEQ ID NO: 1902778 - DNA, 15 bp, Homo sapiens
agtctacatacaatc

SEQ ID NO: 1902779 - DNA, 15 bp, Homo sapiens
gtctacatacaatca

SEQ ID NO: 1902780 - DNA, 15 bp, Homo sapiens
tctacatacaatcaa

SEQ ID NO: 1902781 - DNA, 15 bp, Homo sapiens
ctacatacaatcaat

SEQ ID NO: 1902782 - DNA, 15 bp, Homo sapiens
tacatacaatcaata

SEQ ID NO: 1902783 - DNA, 15 bp, Homo sapiens
acatacaatcaatat

SEQ ID NO: 1902784 - DNA, 15 bp, Homo sapiens
catacaatcaatatt

SEQ ID NO: 1902785 - DNA, 15 bp, Homo sapiens
atacaatcaatattt

SEQ ID NO: 1902786 - DNA, 15 bp, Homo sapiens
tacaatcaatatttt

SEQ ID NO: 1902787 - DNA, 15 bp, Homo sapiens
acaatcaatatttta

SEQ ID NO: 1902788 - DNA, 15 bp, Homo sapiens
caatcaatattttac

SEQ ID NO: 1902789 - DNA, 15 bp, Homo sapiens
aatcaatattttact

SEQ ID NO: 1902790 - DNA, 15 bp, Homo sapiens
atcaatattttacta

SEQ ID NO: 1902791 - DNA, 15 bp, Homo sapiens
tcaatattttactag

SEQ ID NO: 1902792 - DNA, 15 bp, Homo sapiens
caatattttactagt

SEQ ID NO: 1902793 - DNA, 15 bp, Homo sapiens
aatattttactagtt

SEQ ID NO: 1902794 - DNA, 15 bp, Homo sapiens
atattttactagttc

SEQ ID NO: 1902795 - DNA, 15 bp, Homo sapiens
tattttactagttca

SEQ ID NO: 1902796 - DNA, 15 bp, Homo sapiens
attttactagttcaa

SEQ ID NO: 1902797 - DNA, 15 bp, Homo sapiens
ttttactagttcaag

SEQ ID NO: 1902798 - DNA, 15 bp, Homo sapiens
tttactagttcaagt

SEQ ID NO: 1902799 - DNA, 15 bp, Homo sapiens
ttactagttcaagta

SEQ ID NO: 1902800 - DNA, 15 bp, Homo sapiens
tactagttcaagtag

SEQ ID NO: 1902801 - DNA, 15 bp, Homo sapiens
actagttcaagtaga

SEQ ID NO: 1902802 - DNA, 15 bp, Homo sapiens
ctagttcaagtagaa

SEQ ID NO: 1902803 - DNA, 15 bp, Homo sapiens
tagttcaagtagaat

SEQ ID NO: 1902804 - DNA, 15 bp, Homo sapiens
agttcaagtagaatg

SEQ ID NO: 1902805 - DNA, 15 bp, Homo sapiens
gttcaagtagaatgt

SEQ ID NO: 1902806 - DNA, 15 bp, Homo sapiens
ttcaagtagaatgta

SEQ ID NO: 1902807 - DNA, 15 bp, Homo sapiens
tcaagtagaatgtaa

SEQ ID NO: 1902808 - DNA, 15 bp, Homo sapiens
caagtagaatgtaaa

SEQ ID NO: 1902809 - DNA, 15 bp, Homo sapiens
aagtagaatgtaaaa

SEQ ID NO: 1902810 - DNA, 15 bp, Homo sapiens
agtagaatgtaaaac

SEQ ID NO: 1902811 - DNA, 15 bp, Homo sapiens
gtagaatgtaaaact

SEQ ID NO: 1902812 - DNA, 15 bp, Homo sapiens
tagaatgtaaaactc

SEQ ID NO: 1902813 - DNA, 15 bp, Homo sapiens
agaatgtaaaactct

SEQ ID NO: 1902814 - DNA, 15 bp, Homo sapiens
gaatgtaaaactctc

SEQ ID NO: 1902815 - DNA, 15 bp, Homo sapiens
aatgtaaaactctca

SEQ ID NO: 1902816 - DNA, 15 bp, Homo sapiens
atgtaaaactctcac

SEQ ID NO: 1902817 - DNA, 15 bp, Homo sapiens
tgtaaaactctcacc

SEQ ID NO: 1902818 - DNA, 15 bp, Homo sapiens
gtaaaactctcacca

SEQ ID NO: 1902819 - DNA, 15 bp, Homo sapiens
taaaactctcaccac

SEQ ID NO: 1902820 - DNA, 15 bp, Homo sapiens
aaaactctcaccacc

SEQ ID NO: 1902821 - DNA, 15 bp, Homo sapiens
aaactctcaccacca

SEQ ID NO: 1902822 - DNA, 15 bp, Homo sapiens
aactctcaccaccaa

SEQ ID NO: 1902823 - DNA, 15 bp, Homo sapiens
actctcaccaccaaa

SEQ ID NO: 1902824 - DNA, 15 bp, Homo sapiens
ctctcaccaccaaat

SEQ ID NO: 1902825 - DNA, 15 bp, Homo sapiens
tctcaccaccaaata

SEQ ID NO: 1902826 - DNA, 15 bp, Homo sapiens
ctcaccaccaaatag

SEQ ID NO: 1902827 - DNA, 15 bp, Homo sapiens
tcaccaccaaatagg

SEQ ID NO: 1902828 - DNA, 15 bp, Homo sapiens
caccaccaaataggt

SEQ ID NO: 1902829 - DNA, 15 bp, Homo sapiens
accaccaaataggtt

SEQ ID NO: 1902830 - DNA, 15 bp, Homo sapiens
ccaccaaataggttc

SEQ ID NO: 1902831 - DNA, 15 bp, Homo sapiens
caccaaataggttcc

SEQ ID NO: 1902832 - DNA, 15 bp, Homo sapiens
accaaataggttcct

SEQ ID NO: 1902833 - DNA, 15 bp, Homo sapiens
ccaaataggttcctt

SEQ ID NO: 1902834 - DNA, 15 bp, Homo sapiens
caaataggttccttt

SEQ ID NO: 1902835 - DNA, 15 bp, Homo sapiens
aaataggttccttta

SEQ ID NO: 1902836 - DNA, 15 bp, Homo sapiens
aataggttcctttat

SEQ ID NO: 1902837 - DNA, 15 bp, Homo sapiens
ataggttcctttatc

SEQ ID NO: 1902838 - DNA, 15 bp, Homo sapiens
taggttcctttatct

SEQ ID NO: 1902839 - DNA, 15 bp, Homo sapiens
aggttcctttatctt

SEQ ID NO: 1902840 - DNA, 15 bp, Homo sapiens
ggttcctttatcttc

SEQ ID NO: 1902841 - DNA, 15 bp, Homo sapiens
gttcctttatcttcc

SEQ ID NO: 1902842 - DNA, 15 bp, Homo sapiens
ttcctttatcttccc

SEQ ID NO: 1902843 - DNA, 15 bp, Homo sapiens
tcctttatcttcccc

SEQ ID NO: 1902844 - DNA, 15 bp, Homo sapiens
cctttatcttccccc

SEQ ID NO: 1902845 - DNA, 15 bp, Homo sapiens
ctttatcttccccct

SEQ ID NO: 1902846 - DNA, 15 bp, Homo sapiens
tttatcttccccctt

SEQ ID NO: 1902847 - DNA, 15 bp, Homo sapiens
ttatcttcccccttt

SEQ ID NO: 1902848 - DNA, 15 bp, Homo sapiens
tatcttcccccttta

SEQ ID NO: 1902849 - DNA, 15 bp, Homo sapiens
atcttccccctttat

SEQ ID NO: 1902850 - DNA, 15 bp, Homo sapiens
tcttccccctttatc

SEQ ID NO: 1902851 - DNA, 15 bp, Homo sapiens
cttccccctttatct

SEQ ID NO: 1902852 - DNA, 15 bp, Homo sapiens
ttccccctttatctt

SEQ ID NO: 1902853 - DNA, 15 bp, Homo sapiens
tccccctttatctta

SEQ ID NO: 1902854 - DNA, 15 bp, Homo sapiens
ccccctttatcttac

SEQ ID NO: 1902855 - DNA, 15 bp, Homo sapiens
cccctttatcttaca

SEQ ID NO: 1902856 - DNA, 15 bp, Homo sapiens
ccctttatcttacaa

SEQ ID NO: 1902857 - DNA, 15 bp, Homo sapiens
cctttatcttacaat

SEQ ID NO: 1902858 - DNA, 15 bp, Homo sapiens
ctttatcttacaatt

SEQ ID NO: 1902859 - DNA, 15 bp, Homo sapiens
tttatcttacaatta

SEQ ID NO: 1902860 - DNA, 15 bp, Homo sapiens
ttatcttacaattat

SEQ ID NO: 1902861 - DNA, 15 bp, Homo sapiens
tatcttacaattatt

SEQ ID NO: 1902862 - DNA, 15 bp, Homo sapiens
atcttacaattattt

SEQ ID NO: 1902863 - DNA, 15 bp, Homo sapiens
tcttacaattatttt

SEQ ID NO: 1902864 - DNA, 15 bp, Homo sapiens
cttacaattatttta

SEQ ID NO: 1902865 - DNA, 15 bp, Homo sapiens
ttacaattattttat

SEQ ID NO: 1902866 - DNA, 15 bp, Homo sapiens
tacaattattttata

SEQ ID NO: 1902867 - DNA, 15 bp, Homo sapiens
acaattattttatat

SEQ ID NO: 1902868 - DNA, 15 bp, Homo sapiens
caattattttatata

SEQ ID NO: 1902869 - DNA, 15 bp, Homo sapiens
aattattttatatat

SEQ ID NO: 1902870 - DNA, 15 bp, Homo sapiens
attattttatatatg

SEQ ID NO: 1902871 - DNA, 15 bp, Homo sapiens
ttattttatatatga

SEQ ID NO: 1902872 - DNA, 15 bp, Homo sapiens
tattttatatatgac

SEQ ID NO: 1902873 - DNA, 15 bp, Homo sapiens
attttatatatgaca

SEQ ID NO: 1902874 - DNA, 15 bp, Homo sapiens
ttttatatatgacat

SEQ ID NO: 1902875 - DNA, 15 bp, Homo sapiens
tttatatatgacatc

SEQ ID NO: 1902876 - DNA, 15 bp, Homo sapiens
ttatatatgacatct

SEQ ID NO: 1902877 - DNA, 15 bp, Homo sapiens
tatatatgacatctg

SEQ ID NO: 1902878 - DNA, 15 bp, Homo sapiens
atatatgacatctgc

SEQ ID NO: 1902879 - DNA, 15 bp, Homo sapiens
tatatgacatctgca

SEQ ID NO: 1902880 - DNA, 15 bp, Homo sapiens
atatgacatctgcac

SEQ ID NO: 1902881 - DNA, 15 bp, Homo sapiens
tatgacatctgcaca

SEQ ID NO: 1902882 - DNA, 15 bp, Homo sapiens
atgacatctgcacat

SEQ ID NO: 1902883 - DNA, 15 bp, Homo sapiens
tgacatctgcacata

SEQ ID NO: 1902884 - DNA, 15 bp, Homo sapiens
gacatctgcacatac

SEQ ID NO: 1902885 - DNA, 15 bp, Homo sapiens
acatctgcacatact

SEQ ID NO: 1902886 - DNA, 15 bp, Homo sapiens
catctgcacatactg

SEQ ID NO: 1902887 - DNA, 15 bp, Homo sapiens
atctgcacatactga

SEQ ID NO: 1902888 - DNA, 15 bp, Homo sapiens
tctgcacatactgaa

SEQ ID NO: 1902889 - DNA, 15 bp, Homo sapiens
ctgcacatactgaaa

SEQ ID NO: 1902890 - DNA, 15 bp, Homo sapiens
tgcacatactgaaaa

SEQ ID NO: 1902891 - DNA, 15 bp, Homo sapiens
gcacatactgaaaac

SEQ ID NO: 1902892 - DNA, 15 bp, Homo sapiens
cacatactgaaaacc

SEQ ID NO: 1902893 - DNA, 15 bp, Homo sapiens
acatactgaaaacct

SEQ ID NO: 1902894 - DNA, 15 bp, Homo sapiens
catactgaaaacctc

SEQ ID NO: 1902895 - DNA, 15 bp, Homo sapiens
atactgaaaacctca

SEQ ID NO: 1902896 - DNA, 15 bp, Homo sapiens
tactgaaaacctcat

SEQ ID NO: 1902897 - DNA, 15 bp, Homo sapiens
actgaaaacctcata

SEQ ID NO: 1902898 - DNA, 15 bp, Homo sapiens
ctgaaaacctcatat

SEQ ID NO: 1902899 - DNA, 15 bp, Homo sapiens
tgaaaacctcatatg

SEQ ID NO: 1902900 - DNA, 15 bp, Homo sapiens
gaaaacctcatatga

SEQ ID NO: 1902901 - DNA, 15 bp, Homo sapiens
aaaacctcatatgac

SEQ ID NO: 1902902 - DNA, 15 bp, Homo sapiens
aaacctcatatgaca

SEQ ID NO: 1902903 - DNA, 15 bp, Homo sapiens
aacctcatatgacaa

SEQ ID NO: 1902904 - DNA, 15 bp, Homo sapiens
acctcatatgacaat

SEQ ID NO: 1902905 - DNA, 15 bp, Homo sapiens
cctcatatgacaatg

SEQ ID NO: 1902906 - DNA, 15 bp, Homo sapiens
ctcatatgacaatgc

SEQ ID NO: 1902907 - DNA, 15 bp, Homo sapiens
tcatatgacaatgcc

SEQ ID NO: 1902908 - DNA, 15 bp, Homo sapiens
catatgacaatgccc

SEQ ID NO: 1902909 - DNA, 15 bp, Homo sapiens
atatgacaatgccct

SEQ ID NO: 1902910 - DNA, 15 bp, Homo sapiens
tatgacaatgcccta

SEQ ID NO: 1902911 - DNA, 15 bp, Homo sapiens
atgacaatgccctaa

SEQ ID NO: 1902912 - DNA, 15 bp, Homo sapiens
tgacaatgccctaac

SEQ ID NO: 1902913 - DNA, 15 bp, Homo sapiens
gacaatgccctaact

SEQ ID NO: 1902914 - DNA, 15 bp, Homo sapiens
acaatgccctaactt

SEQ ID NO: 1902915 - DNA, 15 bp, Homo sapiens
caatgccctaacttc

SEQ ID NO: 1902916 - DNA, 15 bp, Homo sapiens
aatgccctaacttct

SEQ ID NO: 1902917 - DNA, 15 bp, Homo sapiens
atgccctaacttcta

SEQ ID NO: 1902918 - DNA, 15 bp, Homo sapiens
tgccctaacttctac

SEQ ID NO: 1902919 - DNA, 15 bp, Homo sapiens
gccctaacttctact

SEQ ID NO: 1902920 - DNA, 15 bp, Homo sapiens
ccctaacttctactt

SEQ ID NO: 1902921 - DNA, 15 bp, Homo sapiens
cctaacttctacttt

SEQ ID NO: 1902922 - DNA, 15 bp, Homo sapiens
ctaacttctactttc

SEQ ID NO: 1902923 - DNA, 15 bp, Homo sapiens
taacttctactttca

SEQ ID NO: 1902924 - DNA, 15 bp, Homo sapiens
aacttctactttcaa

SEQ ID NO: 1902925 - DNA, 15 bp, Homo sapiens
acttctactttcaac

SEQ ID NO: 1902926 - DNA, 15 bp, Homo sapiens
cttctactttcaacc

SEQ ID NO: 1902927 - DNA, 15 bp, Homo sapiens
ttctactttcaacca

SEQ ID NO: 1902928 - DNA, 15 bp, Homo sapiens
tctactttcaaccat

SEQ ID NO: 1902929 - DNA, 15 bp, Homo sapiens
ctactttcaaccatc

SEQ ID NO: 1902930 - DNA, 15 bp, Homo sapiens
tactttcaaccatca

SEQ ID NO: 1902931 - DNA, 15 bp, Homo sapiens
actttcaaccatcaa

SEQ ID NO: 1902932 - DNA, 15 bp, Homo sapiens
ctttcaaccatcaac

SEQ ID NO: 1902933 - DNA, 15 bp, Homo sapiens
tttcaaccatcaacc

SEQ ID NO: 1902934 - DNA, 15 bp, Homo sapiens
ttcaaccatcaacca

SEQ ID NO: 1902935 - DNA, 15 bp, Homo sapiens
tcaaccatcaaccat

SEQ ID NO: 1902936 - DNA, 15 bp, Homo sapiens
caaccatcaaccata

SEQ ID NO: 1902937 - DNA, 15 bp, Homo sapiens
aaccatcaaccatac

SEQ ID NO: 1902938 - DNA, 15 bp, Homo sapiens
accatcaaccatact

SEQ ID NO: 1902939 - DNA, 15 bp, Homo sapiens
ccatcaaccatactt

SEQ ID NO: 1902940 - DNA, 15 bp, Homo sapiens
catcaaccatactta

SEQ ID NO: 1902941 - DNA, 15 bp, Homo sapiens
atcaaccatacttaa

SEQ ID NO: 1902942 - DNA, 15 bp, Homo sapiens
tcaaccatacttaaa

SEQ ID NO: 1902943 - DNA, 15 bp, Homo sapiens
caaccatacttaaag

SEQ ID NO: 1902944 - DNA, 15 bp, Homo sapiens
aaccatacttaaaga

SEQ ID NO: 1902945 - DNA, 15 bp, Homo sapiens
accatacttaaagaa

SEQ ID NO: 1902946 - DNA, 15 bp, Homo sapiens
ccatacttaaagaat

SEQ ID NO: 1902947 - DNA, 15 bp, Homo sapiens
catacttaaagaatt

SEQ ID NO: 1902948 - DNA, 15 bp, Homo sapiens
atacttaaagaattc

SEQ ID NO: 1902949 - DNA, 15 bp, Homo sapiens
tacttaaagaattca

SEQ ID NO: 1902950 - DNA, 15 bp, Homo sapiens
acttaaagaattcaa

SEQ ID NO: 1902951 - DNA, 15 bp, Homo sapiens
cttaaagaattcaag

SEQ ID NO: 1902952 - DNA, 15 bp, Homo sapiens
ttaaagaattcaaga

SEQ ID NO: 1902953 - DNA, 15 bp, Homo sapiens
taaagaattcaagag

SEQ ID NO: 1902954 - DNA, 15 bp, Homo sapiens
aaagaattcaagagg

SEQ ID NO: 1902955 - DNA, 15 bp, Homo sapiens
aagaattcaagagga

SEQ ID NO: 1902956 - DNA, 15 bp, Homo sapiens
agaattcaagaggaa

SEQ ID NO: 1902957 - DNA, 15 bp, Homo sapiens
gaattcaagaggaaa

SEQ ID NO: 1902958 - DNA, 15 bp, Homo sapiens
aattcaagaggaaaa

SEQ ID NO: 1902959 - DNA, 15 bp, Homo sapiens
attcaagaggaaaaa

SEQ ID NO: 1902960 - DNA, 15 bp, Homo sapiens
ttcaagaggaaaaaa

SEQ ID NO: 1902961 - DNA, 15 bp, Homo sapiens
tcaagaggaaaaaaa

SEQ ID NO: 1902962 - DNA, 15 bp, Homo sapiens
caagaggaaaaaaat

SEQ ID NO: 1902963 - DNA, 15 bp, Homo sapiens
agaggaaaaaaataa

SEQ ID NO: 1902964 - DNA, 15 bp, Homo sapiens
gaggaaaaaaataat

SEQ ID NO: 1902965 - DNA, 15 bp, Homo sapiens
aggaaaaaaataatc

SEQ ID NO: 1902966 - DNA, 15 bp, Homo sapiens
ggaaaaaaataatct

SEQ ID NO: 1902967 - DNA, 15 bp, Homo sapiens
gaaaaaaataatcta

SEQ ID NO: 1902968 - DNA, 15 bp, Homo sapiens
aaaaaaataatctac

SEQ ID NO: 1902969 - DNA, 15 bp, Homo sapiens
aaaaaataatctact

SEQ ID NO: 1902970 - DNA, 15 bp, Homo sapiens
aaaaataatctactg

SEQ ID NO: 1902971 - DNA, 15 bp, Homo sapiens
aaaataatctactgt

SEQ ID NO: 1902972 - DNA, 15 bp, Homo sapiens
aaataatctactgtg

SEQ ID NO: 1902973 - DNA, 15 bp, Homo sapiens
aataatctactgtgt

SEQ ID NO: 1902974 - DNA, 15 bp, Homo sapiens
ataatctactgtgtt

SEQ ID NO: 1902975 - DNA, 15 bp, Homo sapiens
taatctactgtgttt

SEQ ID NO: 1902976 - DNA, 15 bp, Homo sapiens
aatctactgtgttta

SEQ ID NO: 1902977 - DNA, 15 bp, Homo sapiens
atctactgtgtttac

SEQ ID NO: 1902978 - DNA, 15 bp, Homo sapiens
tctactgtgtttacc

SEQ ID NO: 1902979 - DNA, 15 bp, Homo sapiens
ctactgtgtttacca

SEQ ID NO: 1902980 - DNA, 15 bp, Homo sapiens
tactgtgtttaccat

SEQ ID NO: 1902981 - DNA, 15 bp, Homo sapiens
actgtgtttaccatt

SEQ ID NO: 1902982 - DNA, 15 bp, Homo sapiens
ctgtgtttaccattt

SEQ ID NO: 1902983 - DNA, 15 bp, Homo sapiens
tgtgtttaccatttc

SEQ ID NO: 1902984 - DNA, 15 bp, Homo sapiens
gtgtttaccatttct

SEQ ID NO: 1902985 - DNA, 15 bp, Homo sapiens
tgtttaccatttctg

SEQ ID NO: 1902986 - DNA, 15 bp, Homo sapiens
gtttaccatttctgt

SEQ ID NO: 1902987 - DNA, 15 bp, Homo sapiens
tttaccatttctgtt

SEQ ID NO: 1902988 - DNA, 15 bp, Homo sapiens
ttaccatttctgttg

SEQ ID NO: 1902989 - DNA, 15 bp, Homo sapiens
taccatttctgttgg

SEQ ID NO: 1902990 - DNA, 15 bp, Homo sapiens
accatttctgttggt

SEQ ID NO: 1902991 - DNA, 15 bp, Homo sapiens
ccatttctgttggtc

SEQ ID NO: 1902992 - DNA, 15 bp, Homo sapiens
catttctgttggtct

SEQ ID NO: 1902993 - DNA, 15 bp, Homo sapiens
atttctgttggtctt

SEQ ID NO: 1902994 - DNA, 15 bp, Homo sapiens
tttctgttggtcttt

SEQ ID NO: 1902995 - DNA, 15 bp, Homo sapiens
ttctgttggtctttt

SEQ ID NO: 1902996 - DNA, 15 bp, Homo sapiens
tctgttggtcttttc

SEQ ID NO: 1902997 - DNA, 15 bp, Homo sapiens
ctgttggtcttttct

SEQ ID NO: 1902998 - DNA, 15 bp, Homo sapiens
tgttggtcttttctc

SEQ ID NO: 1902999 - DNA, 15 bp, Homo sapiens
gttggtcttttctca

SEQ ID NO: 1903000 - DNA, 15 bp, Homo sapiens
ttggtcttttctcat

SEQ ID NO: 1903001 - DNA, 15 bp, Homo sapiens
tggtcttttctcatt

SEQ ID NO: 1903002 - DNA, 15 bp, Homo sapiens
ggtcttttctcattt

SEQ ID NO: 1903003 - DNA, 15 bp, Homo sapiens
gtcttttctcatttg

SEQ ID NO: 1903004 - DNA, 15 bp, Homo sapiens
tcttttctcatttgt

SEQ ID NO: 1903005 - DNA, 15 bp, Homo sapiens
cttttctcatttgtg

SEQ ID NO: 1903006 - DNA, 15 bp, Homo sapiens
ttttctcatttgtga

SEQ ID NO: 1903007 - DNA, 15 bp, Homo sapiens
tttctcatttgtgat

SEQ ID NO: 1903008 - DNA, 15 bp, Homo sapiens
ttctcatttgtgatg

SEQ ID NO: 1903009 - DNA, 15 bp, Homo sapiens
tctcatttgtgatgt

SEQ ID NO: 1903010 - DNA, 15 bp, Homo sapiens
ctcatttgtgatgtt

SEQ ID NO: 1903011 - DNA, 15 bp, Homo sapiens
tcatttgtgatgttc

SEQ ID NO: 1903012 - DNA, 15 bp, Homo sapiens
catttgtgatgttct

SEQ ID NO: 1903013 - DNA, 15 bp, Homo sapiens
atttgtgatgttctg

SEQ ID NO: 1903014 - DNA, 15 bp, Homo sapiens
tttgtgatgttctga

SEQ ID NO: 1903015 - DNA, 15 bp, Homo sapiens
ttgtgatgttctgag

SEQ ID NO: 1903016 - DNA, 15 bp, Homo sapiens
tgtgatgttctgagt

SEQ ID NO: 1903017 - DNA, 15 bp, Homo sapiens
gtgatgttctgagtt

SEQ ID NO: 1903018 - DNA, 15 bp, Homo sapiens
tgatgttctgagttt

SEQ ID NO: 1903019 - DNA, 15 bp, Homo sapiens
gatgttctgagtttc

SEQ ID NO: 1903020 - DNA, 15 bp, Homo sapiens
atgttctgagtttcc

SEQ ID NO: 1903021 - DNA, 15 bp, Homo sapiens
tgttctgagtttcct

SEQ ID NO: 1903022 - DNA, 15 bp, Homo sapiens
gttctgagtttcctt

SEQ ID NO: 1903023 - DNA, 15 bp, Homo sapiens
ttctgagtttccttc

SEQ ID NO: 1903024 - DNA, 15 bp, Homo sapiens
tctgagtttccttct

SEQ ID NO: 1903025 - DNA, 15 bp, Homo sapiens
ctgagtttccttctg

SEQ ID NO: 1903026 - DNA, 15 bp, Homo sapiens
tgagtttccttctgg

SEQ ID NO: 1903027 - DNA, 15 bp, Homo sapiens
gagtttccttctggt

SEQ ID NO: 1903028 - DNA, 15 bp, Homo sapiens
agtttccttctggta

SEQ ID NO: 1903029 - DNA, 15 bp, Homo sapiens
gagaggggcattcag

SEQ ID NO: 1903030 - DNA, 15 bp, Homo sapiens
agaggggcattcaga

SEQ ID NO: 1903031 - DNA, 15 bp, Homo sapiens
gaggggcattcagac

SEQ ID NO: 1903032 - DNA, 15 bp, Homo sapiens
aggggcattcagacc

SEQ ID NO: 1903033 - DNA, 15 bp, Homo sapiens
ggggcattcagacct

SEQ ID NO: 1903034 - DNA, 15 bp, Homo sapiens
gggcattcagaccta

SEQ ID NO: 1903035 - DNA, 15 bp, Homo sapiens
ggcattcagacctac

SEQ ID NO: 1903036 - DNA, 15 bp, Homo sapiens
gcattcagacctacc

SEQ ID NO: 1903037 - DNA, 15 bp, Homo sapiens
cattcagacctacca

SEQ ID NO: 1903038 - DNA, 15 bp, Homo sapiens
attcagacctaccag

SEQ ID NO: 1903039 - DNA, 15 bp, Homo sapiens
ttcagacctaccagt

SEQ ID NO: 1903040 - DNA, 15 bp, Homo sapiens
tcagacctaccagtt

SEQ ID NO: 1903041 - DNA, 15 bp, Homo sapiens
cagacctaccagtta

SEQ ID NO: 1903042 - DNA, 15 bp, Homo sapiens
agacctaccagttac

SEQ ID NO: 1903043 - DNA, 15 bp, Homo sapiens
gacctaccagttaca

SEQ ID NO: 1903044 - DNA, 15 bp, Homo sapiens
acctaccagttacag

SEQ ID NO: 1903045 - DNA, 15 bp, Homo sapiens
cctaccagttacagt

SEQ ID NO: 1903046 - DNA, 15 bp, Homo sapiens
ctaccagttacagtc

SEQ ID NO: 1903047 - DNA, 15 bp, Homo sapiens
taccagttacagtcc

SEQ ID NO: 1903048 - DNA, 15 bp, Homo sapiens
accagttacagtcct

SEQ ID NO: 1903049 - DNA, 15 bp, Homo sapiens
ccagttacagtccta

SEQ ID NO: 1903050 - DNA, 15 bp, Homo sapiens
cagttacagtcctac

SEQ ID NO: 1903051 - DNA, 15 bp, Homo sapiens
agttacagtcctacc

SEQ ID NO: 1903052 - DNA, 15 bp, Homo sapiens
gttacagtcctacct

SEQ ID NO: 1903053 - DNA, 15 bp, Homo sapiens
ttacagtcctacctt

SEQ ID NO: 1903054 - DNA, 15 bp, Homo sapiens
tacagtcctaccttt

SEQ ID NO: 1903055 - DNA, 15 bp, Homo sapiens
acagtcctacctttc

SEQ ID NO: 1903056 - DNA, 15 bp, Homo sapiens
cagtcctacctttca

SEQ ID NO: 1903057 - DNA, 15 bp, Homo sapiens
agtcctacctttcat

SEQ ID NO: 1903058 - DNA, 15 bp, Homo sapiens
gtcctacctttcatg

SEQ ID NO: 1903059 - DNA, 15 bp, Homo sapiens
tcctacctttcatgt

SEQ ID NO: 1903060 - DNA, 15 bp, Homo sapiens
cctacctttcatgtc

SEQ ID NO: 1903061 - DNA, 15 bp, Homo sapiens
ctacctttcatgtct

SEQ ID NO: 1903062 - DNA, 15 bp, Homo sapiens
tacctttcatgtcta

SEQ ID NO: 1903063 - DNA, 15 bp, Homo sapiens
acctttcatgtctac

SEQ ID NO: 1903064 - DNA, 15 bp, Homo sapiens
cctttcatgtctaca

SEQ ID NO: 1903065 - DNA, 15 bp, Homo sapiens
ctttcatgtctacac

SEQ ID NO: 1903066 - DNA, 15 bp, Homo sapiens
tttcatgtctacacc

SEQ ID NO: 1903067 - DNA, 15 bp, Homo sapiens
ttcatgtctacacct

SEQ ID NO: 1903068 - DNA, 15 bp, Homo sapiens
tcatgtctacacctt

SEQ ID NO: 1903069 - DNA, 15 bp, Homo sapiens
catgtctacaccttt

SEQ ID NO: 1903070 - DNA, 15 bp, Homo sapiens
atgtctacacctttc

SEQ ID NO: 1903071 - DNA, 15 bp, Homo sapiens
tgtctacacctttct

SEQ ID NO: 1903072 - DNA, 15 bp, Homo sapiens
gtctacacctttctt

SEQ ID NO: 1903073 - DNA, 15 bp, Homo sapiens
tctacacctttcttt

SEQ ID NO: 1903074 - DNA, 15 bp, Homo sapiens
ctacacctttctttg

SEQ ID NO: 1903075 - DNA, 15 bp, Homo sapiens
tacacctttctttgg

SEQ ID NO: 1903076 - DNA, 15 bp, Homo sapiens
acacctttctttgga

SEQ ID NO: 1903077 - DNA, 15 bp, Homo sapiens
cacctttctttggac

SEQ ID NO: 1903078 - DNA, 15 bp, Homo sapiens
acctttctttggact

SEQ ID NO: 1903079 - DNA, 15 bp, Homo sapiens
cctttctttggactg

SEQ ID NO: 1903080 - DNA, 15 bp, Homo sapiens
ctttctttggactga

SEQ ID NO: 1903081 - DNA, 15 bp, Homo sapiens
tttctttggactgag

SEQ ID NO: 1903082 - DNA, 15 bp, Homo sapiens
ttctttggactgagc

SEQ ID NO: 1903083 - DNA, 15 bp, Homo sapiens
tctttggactgagcc

SEQ ID NO: 1903084 - DNA, 15 bp, Homo sapiens
ctttggactgagcct

SEQ ID NO: 1903085 - DNA, 15 bp, Homo sapiens
tttggactgagcctt

SEQ ID NO: 1903086 - DNA, 15 bp, Homo sapiens
ttggactgagccttg

SEQ ID NO: 1903087 - DNA, 15 bp, Homo sapiens
tggactgagccttgg

SEQ ID NO: 1903088 - DNA, 15 bp, Homo sapiens
ggactgagccttgga

SEQ ID NO: 1903089 - DNA, 15 bp, Homo sapiens
gactgagccttggaa

SEQ ID NO: 1903090 - DNA, 15 bp, Homo sapiens
actgagccttggaaa

SEQ ID NO: 1903091 - DNA, 15 bp, Homo sapiens
ctgagccttggaaag

SEQ ID NO: 1903092 - DNA, 15 bp, Homo sapiens
tgagccttggaaaga

SEQ ID NO: 1903093 - DNA, 15 bp, Homo sapiens
gagccttggaaagat

SEQ ID NO: 1903094 - DNA, 15 bp, Homo sapiens
agccttggaaagata

SEQ ID NO: 1903095 - DNA, 15 bp, Homo sapiens
gccttggaaagatac

SEQ ID NO: 1903096 - DNA, 15 bp, Homo sapiens
ccttggaaagataca

SEQ ID NO: 1903097 - DNA, 15 bp, Homo sapiens
cttggaaagatacaa

SEQ ID NO: 1903098 - DNA, 15 bp, Homo sapiens
ttggaaagatacaag

SEQ ID NO: 1903099 - DNA, 15 bp, Homo sapiens
tggaaagatacaagg

SEQ ID NO: 1903100 - DNA, 15 bp, Homo sapiens
ggaaagatacaaggt

SEQ ID NO: 1903101 - DNA, 15 bp, Homo sapiens
gaaagatacaaggtg

SEQ ID NO: 1903102 - DNA, 15 bp, Homo sapiens
aaagatacaaggtga

SEQ ID NO: 1903103 - DNA, 15 bp, Homo sapiens
aagatacaaggtgaa

SEQ ID NO: 1903104 - DNA, 15 bp, Homo sapiens
agatacaaggtgaaa

SEQ ID NO: 1903105 - DNA, 15 bp, Homo sapiens
gatacaaggtgaaaa

SEQ ID NO: 1903106 - DNA, 15 bp, Homo sapiens
atacaaggtgaaaaa

SEQ ID NO: 1903107 - DNA, 15 bp, Homo sapiens
tacaaggtgaaaaaa

SEQ ID NO: 1903108 - DNA, 15 bp, Homo sapiens
acaaggtgaaaaaag

SEQ ID NO: 1903109 - DNA, 15 bp, Homo sapiens
caaggtgaaaaaaga

SEQ ID NO: 1903110 - DNA, 15 bp, Homo sapiens
aaggtgaaaaaagaa

SEQ ID NO: 1903111 - DNA, 15 bp, Homo sapiens
aggtgaaaaaagaaa

SEQ ID NO: 1903112 - DNA, 15 bp, Homo sapiens
ggtgaaaaaagaaag

SEQ ID NO: 1903113 - DNA, 15 bp, Homo sapiens
gtgaaaaaagaaaga

SEQ ID NO: 1903114 - DNA, 15 bp, Homo sapiens
tgaaaaaagaaagaa

SEQ ID NO: 1903115 - DNA, 15 bp, Homo sapiens
agaaagaaagaaaag

SEQ ID NO: 1903116 - DNA, 15 bp, Homo sapiens
gaaagaaagaaaaga

SEQ ID NO: 1903117 - DNA, 15 bp, Homo sapiens
aaagaaagaaaagaa

SEQ ID NO: 1903118 - DNA, 15 bp, Homo sapiens
aagaaagaaaagaaa

SEQ ID NO: 1903119 - DNA, 15 bp, Homo sapiens
agaaagaaaagaaag

SEQ ID NO: 1903120 - DNA, 15 bp, Homo sapiens
gaaagaaaagaaaga

SEQ ID NO: 1903121 - DNA, 15 bp, Homo sapiens
aaagaaaagaaagac

SEQ ID NO: 1903122 - DNA, 15 bp, Homo sapiens
aagaaaagaaagaca

SEQ ID NO: 1903123 - DNA, 15 bp, Homo sapiens
agaaaagaaagacag

SEQ ID NO: 1903124 - DNA, 15 bp, Homo sapiens
gaaaagaaagacagg

SEQ ID NO: 1903125 - DNA, 15 bp, Homo sapiens
aaaagaaagacagga

SEQ ID NO: 1903126 - DNA, 15 bp, Homo sapiens
aaagaaagacaggat

SEQ ID NO: 1903127 - DNA, 15 bp, Homo sapiens
aagaaagacaggata

SEQ ID NO: 1903128 - DNA, 15 bp, Homo sapiens
agaaagacaggatag

SEQ ID NO: 1903129 - DNA, 15 bp, Homo sapiens
gaaagacaggatagg

SEQ ID NO: 1903130 - DNA, 15 bp, Homo sapiens
aaagacaggatagga

SEQ ID NO: 1903131 - DNA, 15 bp, Homo sapiens
aagacaggataggaa

SEQ ID NO: 1903132 - DNA, 15 bp, Homo sapiens
agacaggataggaaa

SEQ ID NO: 1903133 - DNA, 15 bp, Homo sapiens
gacaggataggaaac

SEQ ID NO: 1903134 - DNA, 15 bp, Homo sapiens
acaggataggaaaca

SEQ ID NO: 1903135 - DNA, 15 bp, Homo sapiens
caggataggaaacat

SEQ ID NO: 1903136 - DNA, 15 bp, Homo sapiens
aggataggaaacata

SEQ ID NO: 1903137 - DNA, 15 bp, Homo sapiens
ggataggaaacatat

SEQ ID NO: 1903138 - DNA, 15 bp, Homo sapiens
gataggaaacatatc

SEQ ID NO: 1903139 - DNA, 15 bp, Homo sapiens
ataggaaacatatct

SEQ ID NO: 1903140 - DNA, 15 bp, Homo sapiens
taggaaacatatcta

SEQ ID NO: 1903141 - DNA, 15 bp, Homo sapiens
aggaaacatatctac

SEQ ID NO: 1903142 - DNA, 15 bp, Homo sapiens
ggaaacatatctaca

SEQ ID NO: 1903143 - DNA, 15 bp, Homo sapiens
gaaacatatctacag

SEQ ID NO: 1903144 - DNA, 15 bp, Homo sapiens
aaacatatctacaga

SEQ ID NO: 1903145 - DNA, 15 bp, Homo sapiens
aacatatctacagag

SEQ ID NO: 1903146 - DNA, 15 bp, Homo sapiens
acatatctacagagc

SEQ ID NO: 1903147 - DNA, 15 bp, Homo sapiens
catatctacagagcc

SEQ ID NO: 1903148 - DNA, 15 bp, Homo sapiens
atatctacagagccc

SEQ ID NO: 1903149 - DNA, 15 bp, Homo sapiens
tatctacagagccct

SEQ ID NO: 1903150 - DNA, 15 bp, Homo sapiens
atctacagagccctt

SEQ ID NO: 1903151 - DNA, 15 bp, Homo sapiens
tctacagagcccttt

SEQ ID NO: 1903152 - DNA, 15 bp, Homo sapiens
ctacagagccctttc

SEQ ID NO: 1903153 - DNA, 15 bp, Homo sapiens
tacagagccctttct

SEQ ID NO: 1903154 - DNA, 15 bp, Homo sapiens
acagagccctttcta

SEQ ID NO: 1903155 - DNA, 15 bp, Homo sapiens
cagagccctttctat

SEQ ID NO: 1903156 - DNA, 15 bp, Homo sapiens
agagccctttctatg

SEQ ID NO: 1903157 - DNA, 15 bp, Homo sapiens
gagccctttctatgt

SEQ ID NO: 1903158 - DNA, 15 bp, Homo sapiens
agccctttctatgtc

SEQ ID NO: 1903159 - DNA, 15 bp, Homo sapiens
gccctttctatgtcc

SEQ ID NO: 1903160 - DNA, 15 bp, Homo sapiens
ccctttctatgtccc

SEQ ID NO: 1903161 - DNA, 15 bp, Homo sapiens
cctttctatgtccca

SEQ ID NO: 1903162 - DNA, 15 bp, Homo sapiens
tctatgtcccaggtt

SEQ ID NO: 1903163 - DNA, 15 bp, Homo sapiens
ctatgtcccaggttc

SEQ ID NO: 1903164 - DNA, 15 bp, Homo sapiens
tatgtcccaggttcc

SEQ ID NO: 1903165 - DNA, 15 bp, Homo sapiens
atgtcccaggttcct

SEQ ID NO: 1903166 - DNA, 15 bp, Homo sapiens
tgtcccaggttcctg

SEQ ID NO: 1903167 - DNA, 15 bp, Homo sapiens
gtcccaggttcctgt

SEQ ID NO: 1903168 - DNA, 15 bp, Homo sapiens
tcccaggttcctgtt

SEQ ID NO: 1903169 - DNA, 15 bp, Homo sapiens
cccaggttcctgttc

SEQ ID NO: 1903170 - DNA, 15 bp, Homo sapiens
ccaggttcctgttcc

SEQ ID NO: 1903171 - DNA, 15 bp, Homo sapiens
caggttcctgttcca

SEQ ID NO: 1903172 - DNA, 15 bp, Homo sapiens
aggttcctgttccat

SEQ ID NO: 1903173 - DNA, 15 bp, Homo sapiens
ggttcctgttccata

SEQ ID NO: 1903174 - DNA, 15 bp, Homo sapiens
gttcctgttccatat

SEQ ID NO: 1903175 - DNA, 15 bp, Homo sapiens
ttcctgttccatata

SEQ ID NO: 1903176 - DNA, 15 bp, Homo sapiens
tcctgttccatatat

SEQ ID NO: 1903177 - DNA, 15 bp, Homo sapiens
cctgttccatatatt

SEQ ID NO: 1903178 - DNA, 15 bp, Homo sapiens
ctgttccatatattg

SEQ ID NO: 1903179 - DNA, 15 bp, Homo sapiens
tgttccatatattgc

SEQ ID NO: 1903180 - DNA, 15 bp, Homo sapiens
gttccatatattgcc

SEQ ID NO: 1903181 - DNA, 15 bp, Homo sapiens
ttccatatattgcct

SEQ ID NO: 1903182 - DNA, 15 bp, Homo sapiens
tccatatattgcctt

SEQ ID NO: 1903183 - DNA, 15 bp, Homo sapiens
ccatatattgccttg

SEQ ID NO: 1903184 - DNA, 15 bp, Homo sapiens
catatattgccttgt

SEQ ID NO: 1903185 - DNA, 15 bp, Homo sapiens
atatattgccttgtt

SEQ ID NO: 1903186 - DNA, 15 bp, Homo sapiens
tatattgccttgttt

SEQ ID NO: 1903187 - DNA, 15 bp, Homo sapiens
atattgccttgtttc

SEQ ID NO: 1903188 - DNA, 15 bp, Homo sapiens
tattgccttgtttcc

SEQ ID NO: 1903189 - DNA, 15 bp, Homo sapiens
attgccttgtttcca

SEQ ID NO: 1903190 - DNA, 15 bp, Homo sapiens
ttgccttgtttccat

SEQ ID NO: 1903191 - DNA, 15 bp, Homo sapiens
tgccttgtttccatc

SEQ ID NO: 1903192 - DNA, 15 bp, Homo sapiens
gccttgtttccatct

SEQ ID NO: 1903193 - DNA, 15 bp, Homo sapiens
ccttgtttccatctc

SEQ ID NO: 1903194 - DNA, 15 bp, Homo sapiens
cttgtttccatctca

SEQ ID NO: 1903195 - DNA, 15 bp, Homo sapiens
ttgtttccatctcac

SEQ ID NO: 1903196 - DNA, 15 bp, Homo sapiens
tgtttccatctcacg

SEQ ID NO: 1903197 - DNA, 15 bp, Homo sapiens
gtttccatctcacgg

SEQ ID NO: 1903198 - DNA, 15 bp, Homo sapiens
tttccatctcacggt

SEQ ID NO: 1903199 - DNA, 15 bp, Homo sapiens
ttccatctcacggtt

SEQ ID NO: 1903200 - DNA, 15 bp, Homo sapiens
tccatctcacggttt

SEQ ID NO: 1903201 - DNA, 15 bp, Homo sapiens
ccatctcacggtttt

SEQ ID NO: 1903202 - DNA, 15 bp, Homo sapiens
catctcacggttttg

SEQ ID NO: 1903203 - DNA, 15 bp, Homo sapiens
atctcacggttttgg

SEQ ID NO: 1903204 - DNA, 15 bp, Homo sapiens
tctcacggttttggg

SEQ ID NO: 1903205 - DNA, 15 bp, Homo sapiens
ctcacggttttgggg

SEQ ID NO: 1903206 - DNA, 15 bp, Homo sapiens
tcacggttttgggga

SEQ ID NO: 1903207 - DNA, 15 bp, Homo sapiens
cacggttttggggaa

SEQ ID NO: 1903208 - DNA, 15 bp, Homo sapiens
acggttttggggaat

SEQ ID NO: 1903209 - DNA, 15 bp, Homo sapiens
cggttttggggaatc

SEQ ID NO: 1903210 - DNA, 15 bp, Homo sapiens
ggttttggggaatcc

SEQ ID NO: 1903211 - DNA, 15 bp, Homo sapiens
gttttggggaatcca

SEQ ID NO: 1903212 - DNA, 15 bp, Homo sapiens
ttttggggaatccat

SEQ ID NO: 1903213 - DNA, 15 bp, Homo sapiens
tttggggaatccatt

SEQ ID NO: 1903214 - DNA, 15 bp, Homo sapiens
ttggggaatccatta

SEQ ID NO: 1903215 - DNA, 15 bp, Homo sapiens
tggggaatccattaa

SEQ ID NO: 1903216 - DNA, 15 bp, Homo sapiens
ggggaatccattaaa

SEQ ID NO: 1903217 - DNA, 15 bp, Homo sapiens
gggaatccattaaat

SEQ ID NO: 1903218 - DNA, 15 bp, Homo sapiens
ggaatccattaaatc

SEQ ID NO: 1903219 - DNA, 15 bp, Homo sapiens
gaatccattaaatct

SEQ ID NO: 1903220 - DNA, 15 bp, Homo sapiens
aatccattaaatcta

SEQ ID NO: 1903221 - DNA, 15 bp, Homo sapiens
atccattaaatctag

SEQ ID NO: 1903222 - DNA, 15 bp, Homo sapiens
tccattaaatctaga

SEQ ID NO: 1903223 - DNA, 15 bp, Homo sapiens
ccattaaatctagag

SEQ ID NO: 1903224 - DNA, 15 bp, Homo sapiens
cattaaatctagagc

SEQ ID NO: 1903225 - DNA, 15 bp, Homo sapiens
attaaatctagagca

SEQ ID NO: 1903226 - DNA, 15 bp, Homo sapiens
ttaaatctagagcag

SEQ ID NO: 1903227 - DNA, 15 bp, Homo sapiens
taaatctagagcagg

SEQ ID NO: 1903228 - DNA, 15 bp, Homo sapiens
aaatctagagcaggt

SEQ ID NO: 1903229 - DNA, 15 bp, Homo sapiens
aatctagagcaggtg

SEQ ID NO: 1903230 - DNA, 15 bp, Homo sapiens
atctagagcaggtga

SEQ ID NO: 1903231 - DNA, 15 bp, Homo sapiens
tctagagcaggtgag

SEQ ID NO: 1903232 - DNA, 15 bp, Homo sapiens
ctagagcaggtgagt

SEQ ID NO: 1903233 - DNA, 15 bp, Homo sapiens
tagagcaggtgagta

SEQ ID NO: 1903234 - DNA, 15 bp, Homo sapiens
agagcaggtgagtaa

SEQ ID NO: 1903235 - DNA, 15 bp, Homo sapiens
gagcaggtgagtaag

SEQ ID NO: 1903236 - DNA, 15 bp, Homo sapiens
agcaggtgagtaaga

SEQ ID NO: 1903237 - DNA, 15 bp, Homo sapiens
gcaggtgagtaagaa

SEQ ID NO: 1903238 - DNA, 15 bp, Homo sapiens
caggtgagtaagaaa

SEQ ID NO: 1903239 - DNA, 15 bp, Homo sapiens
aggtgagtaagaaaa

SEQ ID NO: 1903240 - DNA, 15 bp, Homo sapiens
ggtgagtaagaaaat

SEQ ID NO: 1903241 - DNA, 15 bp, Homo sapiens
gtgagtaagaaaata

SEQ ID NO: 1903242 - DNA, 15 bp, Homo sapiens
tgagtaagaaaatac

SEQ ID NO: 1903243 - DNA, 15 bp, Homo sapiens
gagtaagaaaatact

SEQ ID NO: 1903244 - DNA, 15 bp, Homo sapiens
agtaagaaaatactt

SEQ ID NO: 1903245 - DNA, 15 bp, Homo sapiens
gtaagaaaatacttg

SEQ ID NO: 1903246 - DNA, 15 bp, Homo sapiens
taagaaaatacttga

SEQ ID NO: 1903247 - DNA, 15 bp, Homo sapiens
aagaaaatacttgaa

SEQ ID NO: 1903248 - DNA, 15 bp, Homo sapiens
agaaaatacttgaag

SEQ ID NO: 1903249 - DNA, 15 bp, Homo sapiens
gaaaatacttgaagt

SEQ ID NO: 1903250 - DNA, 15 bp, Homo sapiens
aaaatacttgaagtc

SEQ ID NO: 1903251 - DNA, 15 bp, Homo sapiens
aaatacttgaagtca

SEQ ID NO: 1903252 - DNA, 15 bp, Homo sapiens
aatacttgaagtcaa

SEQ ID NO: 1903253 - DNA, 15 bp, Homo sapiens
atacttgaagtcaag

SEQ ID NO: 1903254 - DNA, 15 bp, Homo sapiens
tacttgaagtcaagc

SEQ ID NO: 1903255 - DNA, 15 bp, Homo sapiens
acttgaagtcaagca

SEQ ID NO: 1903256 - DNA, 15 bp, Homo sapiens
cttgaagtcaagcaa

SEQ ID NO: 1903257 - DNA, 15 bp, Homo sapiens
ttgaagtcaagcaat

SEQ ID NO: 1903258 - DNA, 15 bp, Homo sapiens
tgaagtcaagcaatt

SEQ ID NO: 1903259 - DNA, 15 bp, Homo sapiens
gaagtcaagcaatta

SEQ ID NO: 1903260 - DNA, 15 bp, Homo sapiens
aagtcaagcaattag

SEQ ID NO: 1903261 - DNA, 15 bp, Homo sapiens
agtcaagcaattagg

SEQ ID NO: 1903262 - DNA, 15 bp, Homo sapiens
gtcaagcaattaggt

SEQ ID NO: 1903263 - DNA, 15 bp, Homo sapiens
tcaagcaattaggta

SEQ ID NO: 1903264 - DNA, 15 bp, Homo sapiens
caagcaattaggtaa

SEQ ID NO: 1903265 - DNA, 15 bp, Homo sapiens
aagcaattaggtaat

SEQ ID NO: 1903266 - DNA, 15 bp, Homo sapiens
agcaattaggtaatc

SEQ ID NO: 1903267 - DNA, 15 bp, Homo sapiens
gcaattaggtaatct

SEQ ID NO: 1903268 - DNA, 15 bp, Homo sapiens
caattaggtaatcta

SEQ ID NO: 1903269 - DNA, 15 bp, Homo sapiens
aattaggtaatctaa

SEQ ID NO: 1903270 - DNA, 15 bp, Homo sapiens
attaggtaatctaag

SEQ ID NO: 1903271 - DNA, 15 bp, Homo sapiens
ttaggtaatctaaga

SEQ ID NO: 1903272 - DNA, 15 bp, Homo sapiens
taggtaatctaagac

SEQ ID NO: 1903273 - DNA, 15 bp, Homo sapiens
aggtaatctaagaca

SEQ ID NO: 1903274 - DNA, 15 bp, Homo sapiens
ggtaatctaagacag

SEQ ID NO: 1903275 - DNA, 15 bp, Homo sapiens
gtaatctaagacagt

SEQ ID NO: 1903276 - DNA, 15 bp, Homo sapiens
taatctaagacagtg

SEQ ID NO: 1903277 - DNA, 15 bp, Homo sapiens
aatctaagacagtgg

SEQ ID NO: 1903278 - DNA, 15 bp, Homo sapiens
atctaagacagtggc

SEQ ID NO: 1903279 - DNA, 15 bp, Homo sapiens
tctaagacagtggct

SEQ ID NO: 1903280 - DNA, 15 bp, Homo sapiens
ctaagacagtggctg

SEQ ID NO: 1903281 - DNA, 15 bp, Homo sapiens
taagacagtggctgt

SEQ ID NO: 1903282 - DNA, 15 bp, Homo sapiens
aagacagtggctgtg

SEQ ID NO: 1903283 - DNA, 15 bp, Homo sapiens
agacagtggctgtgt

SEQ ID NO: 1903284 - DNA, 15 bp, Homo sapiens
gacagtggctgtgtg

SEQ ID NO: 1903285 - DNA, 15 bp, Homo sapiens
acagtggctgtgtgg

SEQ ID NO: 1903286 - DNA, 15 bp, Homo sapiens
cagtggctgtgtggg

SEQ ID NO: 1903287 - DNA, 15 bp, Homo sapiens
agtggctgtgtggga

SEQ ID NO: 1903288 - DNA, 15 bp, Homo sapiens
gtggctgtgtgggaa

SEQ ID NO: 1903289 - DNA, 15 bp, Homo sapiens
tggctgtgtgggaag

SEQ ID NO: 1903290 - DNA, 15 bp, Homo sapiens
ggctgtgtgggaagt

SEQ ID NO: 1903291 - DNA, 15 bp, Homo sapiens
gctgtgtgggaagtt

SEQ ID NO: 1903292 - DNA, 15 bp, Homo sapiens
ctgtgtgggaagtta

SEQ ID NO: 1903293 - DNA, 15 bp, Homo sapiens
tgtgtgggaagttac

SEQ ID NO: 1903294 - DNA, 15 bp, Homo sapiens
gtgtgggaagttaca

SEQ ID NO: 1903295 - DNA, 15 bp, Homo sapiens
tgtgggaagttacat

SEQ ID NO: 1903296 - DNA, 15 bp, Homo sapiens
gtgggaagttacatg

SEQ ID NO: 1903297 - DNA, 15 bp, Homo sapiens
gcaggtggggaattt

SEQ ID NO: 1903298 - DNA, 15 bp, Homo sapiens
caggtggggaatttc

SEQ ID NO: 1903299 - DNA, 15 bp, Homo sapiens
aggtggggaatttca

SEQ ID NO: 1903300 - DNA, 15 bp, Homo sapiens
ggtggggaatttcag

SEQ ID NO: 1903301 - DNA, 15 bp, Homo sapiens
gtggggaatttcaga

SEQ ID NO: 1903302 - DNA, 15 bp, Homo sapiens
tggggaatttcagaa

SEQ ID NO: 1903303 - DNA, 15 bp, Homo sapiens
ggggaatttcagaat

SEQ ID NO: 1903304 - DNA, 15 bp, Homo sapiens
gggaatttcagaatc

SEQ ID NO: 1903305 - DNA, 15 bp, Homo sapiens
ggaatttcagaatct

SEQ ID NO: 1903306 - DNA, 15 bp, Homo sapiens
gaatttcagaatctg

SEQ ID NO: 1903307 - DNA, 15 bp, Homo sapiens
aatttcagaatctga

SEQ ID NO: 1903308 - DNA, 15 bp, Homo sapiens
atttcagaatctgac

SEQ ID NO: 1903309 - DNA, 15 bp, Homo sapiens
tttcagaatctgact

SEQ ID NO: 1903310 - DNA, 15 bp, Homo sapiens
ttcagaatctgactc

SEQ ID NO: 1903311 - DNA, 15 bp, Homo sapiens
tcagaatctgactct

SEQ ID NO: 1903312 - DNA, 15 bp, Homo sapiens
cagaatctgactctt

SEQ ID NO: 1903313 - DNA, 15 bp, Homo sapiens
agaatctgactcttc

SEQ ID NO: 1903314 - DNA, 15 bp, Homo sapiens
gaatctgactcttca

SEQ ID NO: 1903315 - DNA, 15 bp, Homo sapiens
aatctgactcttcac

SEQ ID NO: 1903316 - DNA, 15 bp, Homo sapiens
atctgactcttcact

SEQ ID NO: 1903317 - DNA, 15 bp, Homo sapiens
tctgactcttcactc

SEQ ID NO: 1903318 - DNA, 15 bp, Homo sapiens
ctgactcttcactca

SEQ ID NO: 1903319 - DNA, 15 bp, Homo sapiens
tgactcttcactcac

SEQ ID NO: 1903320 - DNA, 15 bp, Homo sapiens
gactcttcactcaca

SEQ ID NO: 1903321 - DNA, 15 bp, Homo sapiens
actcttcactcacaa

SEQ ID NO: 1903322 - DNA, 15 bp, Homo sapiens
ctcttcactcacaat

SEQ ID NO: 1903323 - DNA, 15 bp, Homo sapiens
tcttcactcacaatt

SEQ ID NO: 1903324 - DNA, 15 bp, Homo sapiens
cttcactcacaattt

SEQ ID NO: 1903325 - DNA, 15 bp, Homo sapiens
ttcactcacaatttc

SEQ ID NO: 1903326 - DNA, 15 bp, Homo sapiens
tcactcacaatttcc

SEQ ID NO: 1903327 - DNA, 15 bp, Homo sapiens
cactcacaatttcct

SEQ ID NO: 1903328 - DNA, 15 bp, Homo sapiens
actcacaatttcctg

SEQ ID NO: 1903329 - DNA, 15 bp, Homo sapiens
ctcacaatttcctgt

SEQ ID NO: 1903330 - DNA, 15 bp, Homo sapiens
tcacaatttcctgta

SEQ ID NO: 1903331 - DNA, 15 bp, Homo sapiens
cacaatttcctgtat

SEQ ID NO: 1903332 - DNA, 15 bp, Homo sapiens
acaatttcctgtatg

SEQ ID NO: 1903333 - DNA, 15 bp, Homo sapiens
caatttcctgtatgt

SEQ ID NO: 1903334 - DNA, 15 bp, Homo sapiens
aatttcctgtatgta

SEQ ID NO: 1903335 - DNA, 15 bp, Homo sapiens
atttcctgtatgtat

SEQ ID NO: 1903336 - DNA, 15 bp, Homo sapiens
tttcctgtatgtatc

SEQ ID NO: 1903337 - DNA, 15 bp, Homo sapiens
ttcctgtatgtatca

SEQ ID NO: 1903338 - DNA, 15 bp, Homo sapiens
tcctgtatgtatcat

SEQ ID NO: 1903339 - DNA, 15 bp, Homo sapiens
cctgtatgtatcata

SEQ ID NO: 1903340 - DNA, 15 bp, Homo sapiens
ctgtatgtatcatag

SEQ ID NO: 1903341 - DNA, 15 bp, Homo sapiens
tgtatgtatcataga

SEQ ID NO: 1903342 - DNA, 15 bp, Homo sapiens
gtatgtatcatagac

SEQ ID NO: 1903343 - DNA, 15 bp, Homo sapiens
tatgtatcatagacg

SEQ ID NO: 1903344 - DNA, 15 bp, Homo sapiens
atgtatcatagacga

SEQ ID NO: 1903345 - DNA, 15 bp, Homo sapiens
tgtatcatagacgac

SEQ ID NO: 1903346 - DNA, 15 bp, Homo sapiens
gtatcatagacgacc

SEQ ID NO: 1903347 - DNA, 15 bp, Homo sapiens
tatcatagacgaccc

SEQ ID NO: 1903348 - DNA, 15 bp, Homo sapiens
atcatagacgaccct

SEQ ID NO: 1903349 - DNA, 15 bp, Homo sapiens
tcatagacgaccctc

SEQ ID NO: 1903350 - DNA, 15 bp, Homo sapiens
catagacgaccctcc

SEQ ID NO: 1903351 - DNA, 15 bp, Homo sapiens
atagacgaccctccc

SEQ ID NO: 1903352 - DNA, 15 bp, Homo sapiens
tagacgaccctccca

SEQ ID NO: 1903353 - DNA, 15 bp, Homo sapiens
agacgaccctcccag

SEQ ID NO: 1903354 - DNA, 15 bp, Homo sapiens
gacgaccctcccagc

SEQ ID NO: 1903355 - DNA, 15 bp, Homo sapiens
acgaccctcccagcc

SEQ ID NO: 1903356 - DNA, 15 bp, Homo sapiens
cgaccctcccagcca

SEQ ID NO: 1903357 - DNA, 15 bp, Homo sapiens
gaccctcccagccag

SEQ ID NO: 1903358 - DNA, 15 bp, Homo sapiens
accctcccagccagg

SEQ ID NO: 1903359 - DNA, 15 bp, Homo sapiens
ccctcccagccagga

SEQ ID NO: 1903360 - DNA, 15 bp, Homo sapiens
cctcccagccaggaa

SEQ ID NO: 1903361 - DNA, 15 bp, Homo sapiens
ctcccagccaggaat

SEQ ID NO: 1903362 - DNA, 15 bp, Homo sapiens
tcccagccaggaatg

SEQ ID NO: 1903363 - DNA, 15 bp, Homo sapiens
cccagccaggaatgt

SEQ ID NO: 1903364 - DNA, 15 bp, Homo sapiens
ccagccaggaatgtt

SEQ ID NO: 1903365 - DNA, 15 bp, Homo sapiens
cagccaggaatgttg

SEQ ID NO: 1903366 - DNA, 15 bp, Homo sapiens
agccaggaatgttga

SEQ ID NO: 1903367 - DNA, 15 bp, Homo sapiens
gccaggaatgttgac

SEQ ID NO: 1903368 - DNA, 15 bp, Homo sapiens
ccaggaatgttgaca

SEQ ID NO: 1903369 - DNA, 15 bp, Homo sapiens
caggaatgttgacat

SEQ ID NO: 1903370 - DNA, 15 bp, Homo sapiens
aggaatgttgacatg

SEQ ID NO: 1903371 - DNA, 15 bp, Homo sapiens
ggaatgttgacatga

SEQ ID NO: 1903372 - DNA, 15 bp, Homo sapiens
gaatgttgacatgat

SEQ ID NO: 1903373 - DNA, 15 bp, Homo sapiens
aatgttgacatgatc

SEQ ID NO: 1903374 - DNA, 15 bp, Homo sapiens
atgttgacatgatca

SEQ ID NO: 1903375 - DNA, 15 bp, Homo sapiens
tgttgacatgatcac

SEQ ID NO: 1903376 - DNA, 15 bp, Homo sapiens
gttgacatgatcaca

SEQ ID NO: 1903377 - DNA, 15 bp, Homo sapiens
ttgacatgatcacag

SEQ ID NO: 1903378 - DNA, 15 bp, Homo sapiens
tgacatgatcacaga

SEQ ID NO: 1903379 - DNA, 15 bp, Homo sapiens
gacatgatcacagaa

SEQ ID NO: 1903380 - DNA, 15 bp, Homo sapiens
acatgatcacagaat

SEQ ID NO: 1903381 - DNA, 15 bp, Homo sapiens
catgatcacagaata

SEQ ID NO: 1903382 - DNA, 15 bp, Homo sapiens
atgatcacagaatac

SEQ ID NO: 1903383 - DNA, 15 bp, Homo sapiens
tgatcacagaataca

SEQ ID NO: 1903384 - DNA, 15 bp, Homo sapiens
gatcacagaatacat

SEQ ID NO: 1903385 - DNA, 15 bp, Homo sapiens
atcacagaatacata

SEQ ID NO: 1903386 - DNA, 15 bp, Homo sapiens
tcacagaatacataa

SEQ ID NO: 1903387 - DNA, 15 bp, Homo sapiens
cacagaatacataaa

SEQ ID NO: 1903388 - DNA, 15 bp, Homo sapiens
acagaatacataaat

SEQ ID NO: 1903389 - DNA, 15 bp, Homo sapiens
cagaatacataaata

SEQ ID NO: 1903390 - DNA, 15 bp, Homo sapiens
agaatacataaataa

SEQ ID NO: 1903391 - DNA, 15 bp, Homo sapiens
gaatacataaataaa

SEQ ID NO: 1903392 - DNA, 15 bp, Homo sapiens
aatacataaataaaa

SEQ ID NO: 1903393 - DNA, 15 bp, Homo sapiens
atacataaataaaag

SEQ ID NO: 1903394 - DNA, 15 bp, Homo sapiens
tacataaataaaagg

SEQ ID NO: 1903395 - DNA, 15 bp, Homo sapiens
acataaataaaagga

SEQ ID NO: 1903396 - DNA, 15 bp, Homo sapiens
cataaataaaaggag

SEQ ID NO: 1903397 - DNA, 15 bp, Homo sapiens
ataaataaaaggagg

SEQ ID NO: 1903398 - DNA, 15 bp, Homo sapiens
taaataaaaggaggt

SEQ ID NO: 1903399 - DNA, 15 bp, Homo sapiens
aaataaaaggaggtg

SEQ ID NO: 1903400 - DNA, 15 bp, Homo sapiens
aataaaaggaggtga

SEQ ID NO: 1903401 - DNA, 15 bp, Homo sapiens
ataaaaggaggtgat

SEQ ID NO: 1903402 - DNA, 15 bp, Homo sapiens
taaaaggaggtgata

SEQ ID NO: 1903403 - DNA, 15 bp, Homo sapiens
aaaaggaggtgatag

SEQ ID NO: 1903404 - DNA, 15 bp, Homo sapiens
aaaggaggtgatagt

SEQ ID NO: 1903405 - DNA, 15 bp, Homo sapiens
aaggaggtgatagtt

SEQ ID NO: 1903406 - DNA, 15 bp, Homo sapiens
aggaggtgatagttt

SEQ ID NO: 1903407 - DNA, 15 bp, Homo sapiens
ggaggtgatagtttt

SEQ ID NO: 1903408 - DNA, 15 bp, Homo sapiens
gaggtgatagttttg

SEQ ID NO: 1903409 - DNA, 15 bp, Homo sapiens
aggtgatagttttgc

SEQ ID NO: 1903410 - DNA, 15 bp, Homo sapiens
ggtgatagttttgcc

SEQ ID NO: 1903411 - DNA, 15 bp, Homo sapiens
gtgatagttttgcca

SEQ ID NO: 1903412 - DNA, 15 bp, Homo sapiens
tgatagttttgccat

SEQ ID NO: 1903413 - DNA, 15 bp, Homo sapiens
gatagttttgccatc

SEQ ID NO: 1903414 - DNA, 15 bp, Homo sapiens
atagttttgccatcc

SEQ ID NO: 1903415 - DNA, 15 bp, Homo sapiens
tagttttgccatcct

SEQ ID NO: 1903416 - DNA, 15 bp, Homo sapiens
agttttgccatcctc

SEQ ID NO: 1903417 - DNA, 15 bp, Homo sapiens
gttttgccatcctca

SEQ ID NO: 1903418 - DNA, 15 bp, Homo sapiens
ttttgccatcctcag

SEQ ID NO: 1903419 - DNA, 15 bp, Homo sapiens
tttgccatcctcaga

SEQ ID NO: 1903420 - DNA, 15 bp, Homo sapiens
ttgccatcctcagaa

SEQ ID NO: 1903421 - DNA, 15 bp, Homo sapiens
tgccatcctcagaag

SEQ ID NO: 1903422 - DNA, 15 bp, Homo sapiens
gccatcctcagaagt

SEQ ID NO: 1903423 - DNA, 15 bp, Homo sapiens
ccatcctcagaagta

SEQ ID NO: 1903424 - DNA, 15 bp, Homo sapiens
catcctcagaagtaa

SEQ ID NO: 1903425 - DNA, 15 bp, Homo sapiens
atcctcagaagtaat

SEQ ID NO: 1903426 - DNA, 15 bp, Homo sapiens
tcctcagaagtaatt

SEQ ID NO: 1903427 - DNA, 15 bp, Homo sapiens
cctcagaagtaatta

SEQ ID NO: 1903428 - DNA, 15 bp, Homo sapiens
ctcagaagtaattag

SEQ ID NO: 1903429 - DNA, 15 bp, Homo sapiens
tcagaagtaattaga

SEQ ID NO: 1903430 - DNA, 15 bp, Homo sapiens
cagaagtaattagat

SEQ ID NO: 1903431 - DNA, 15 bp, Homo sapiens
agaagtaattagatg

SEQ ID NO: 1903432 - DNA, 15 bp, Homo sapiens
gaagtaattagatga

SEQ ID NO: 1903433 - DNA, 15 bp, Homo sapiens
aagtaattagatgac

SEQ ID NO: 1903434 - DNA, 15 bp, Homo sapiens
agtaattagatgaca

SEQ ID NO: 1903435 - DNA, 15 bp, Homo sapiens
gtaattagatgacac

SEQ ID NO: 1903436 - DNA, 15 bp, Homo sapiens
taattagatgacacc

SEQ ID NO: 1903437 - DNA, 15 bp, Homo sapiens
aattagatgacacca

SEQ ID NO: 1903438 - DNA, 15 bp, Homo sapiens
attagatgacaccag

SEQ ID NO: 1903439 - DNA, 15 bp, Homo sapiens
ttagatgacaccaga

SEQ ID NO: 1903440 - DNA, 15 bp, Homo sapiens
tagatgacaccagaa

SEQ ID NO: 1903441 - DNA, 15 bp, Homo sapiens
agatgacaccagaag

SEQ ID NO: 1903442 - DNA, 15 bp, Homo sapiens
gatgacaccagaagt

SEQ ID NO: 1903443 - DNA, 15 bp, Homo sapiens
atgacaccagaagtt

SEQ ID NO: 1903444 - DNA, 15 bp, Homo sapiens
tgacaccagaagttg

SEQ ID NO: 1903445 - DNA, 15 bp, Homo sapiens
gacaccagaagttgt

SEQ ID NO: 1903446 - DNA, 15 bp, Homo sapiens
acaccagaagttgta

SEQ ID NO: 1903447 - DNA, 15 bp, Homo sapiens
caccagaagttgtat

SEQ ID NO: 1903448 - DNA, 15 bp, Homo sapiens
accagaagttgtata

SEQ ID NO: 1903449 - DNA, 15 bp, Homo sapiens
ccagaagttgtataa

SEQ ID NO: 1903450 - DNA, 15 bp, Homo sapiens
cagaagttgtataat

SEQ ID NO: 1903451 - DNA, 15 bp, Homo sapiens
agaagttgtataatc

SEQ ID NO: 1903452 - DNA, 15 bp, Homo sapiens
gaagttgtataatca

SEQ ID NO: 1903453 - DNA, 15 bp, Homo sapiens
aagttgtataatcag

SEQ ID NO: 1903454 - DNA, 15 bp, Homo sapiens
agttgtataatcaga

SEQ ID NO: 1903455 - DNA, 15 bp, Homo sapiens
gttgtataatcagaa

SEQ ID NO: 1903456 - DNA, 15 bp, Homo sapiens
ttgtataatcagaaa

SEQ ID NO: 1903457 - DNA, 15 bp, Homo sapiens
tgtataatcagaaaa

SEQ ID NO: 1903458 - DNA, 15 bp, Homo sapiens
gtataatcagaaaaa

SEQ ID NO: 1903459 - DNA, 15 bp, Homo sapiens
tataatcagaaaaac

SEQ ID NO: 1903460 - DNA, 15 bp, Homo sapiens
ataatcagaaaaaca

SEQ ID NO: 1903461 - DNA, 15 bp, Homo sapiens
taatcagaaaaacag

SEQ ID NO: 1903462 - DNA, 15 bp, Homo sapiens
aatcagaaaaacaga

SEQ ID NO: 1903463 - DNA, 15 bp, Homo sapiens
atcagaaaaacagaa

SEQ ID NO: 1903464 - DNA, 15 bp, Homo sapiens
tcagaaaaacagaat

SEQ ID NO: 1903465 - DNA, 15 bp, Homo sapiens
cagaaaaacagaatc

SEQ ID NO: 1903466 - DNA, 15 bp, Homo sapiens
agaaaaacagaatcg

SEQ ID NO: 1903467 - DNA, 15 bp, Homo sapiens
gaaaaacagaatcgt

SEQ ID NO: 1903468 - DNA, 15 bp, Homo sapiens
aaaaacagaatcgta

SEQ ID NO: 1903469 - DNA, 15 bp, Homo sapiens
aaaacagaatcgtac

SEQ ID NO: 1903470 - DNA, 15 bp, Homo sapiens
aaacagaatcgtaca

SEQ ID NO: 1903471 - DNA, 15 bp, Homo sapiens
aacagaatcgtacag

SEQ ID NO: 1903472 - DNA, 15 bp, Homo sapiens
acagaatcgtacagt

SEQ ID NO: 1903473 - DNA, 15 bp, Homo sapiens
cagaatcgtacagtg

SEQ ID NO: 1903474 - DNA, 15 bp, Homo sapiens
agaatcgtacagtgt

SEQ ID NO: 1903475 - DNA, 15 bp, Homo sapiens
gaatcgtacagtgtt

SEQ ID NO: 1903476 - DNA, 15 bp, Homo sapiens
aatcgtacagtgttt

SEQ ID NO: 1903477 - DNA, 15 bp, Homo sapiens
atcgtacagtgttta

SEQ ID NO: 1903478 - DNA, 15 bp, Homo sapiens
tcgtacagtgtttaa

SEQ ID NO: 1903479 - DNA, 15 bp, Homo sapiens
cgtacagtgtttaaa

SEQ ID NO: 1903480 - DNA, 15 bp, Homo sapiens
gtacagtgtttaaaa

SEQ ID NO: 1903481 - DNA, 15 bp, Homo sapiens
tacagtgtttaaaag

SEQ ID NO: 1903482 - DNA, 15 bp, Homo sapiens
acagtgtttaaaagt

SEQ ID NO: 1903483 - DNA, 15 bp, Homo sapiens
cagtgtttaaaagtg

SEQ ID NO: 1903484 - DNA, 15 bp, Homo sapiens
agtgtttaaaagtgt

SEQ ID NO: 1903485 - DNA, 15 bp, Homo sapiens
gtgtttaaaagtgta

SEQ ID NO: 1903486 - DNA, 15 bp, Homo sapiens
tgtttaaaagtgtag

SEQ ID NO: 1903487 - DNA, 15 bp, Homo sapiens
gtttaaaagtgtaga

SEQ ID NO: 1903488 - DNA, 15 bp, Homo sapiens
tttaaaagtgtagac

SEQ ID NO: 1903489 - DNA, 15 bp, Homo sapiens
ttaaaagtgtagact

SEQ ID NO: 1903490 - DNA, 15 bp, Homo sapiens
taaaagtgtagactc

SEQ ID NO: 1903491 - DNA, 15 bp, Homo sapiens
aaaagtgtagactcc

SEQ ID NO: 1903492 - DNA, 15 bp, Homo sapiens
aaagtgtagactcct

SEQ ID NO: 1903493 - DNA, 15 bp, Homo sapiens
aagtgtagactccta

SEQ ID NO: 1903494 - DNA, 15 bp, Homo sapiens
agtgtagactcctaa

SEQ ID NO: 1903495 - DNA, 15 bp, Homo sapiens
gtgtagactcctaat

SEQ ID NO: 1903496 - DNA, 15 bp, Homo sapiens
tgtagactcctaatg

SEQ ID NO: 1903497 - DNA, 15 bp, Homo sapiens
gtagactcctaatgt

SEQ ID NO: 1903498 - DNA, 15 bp, Homo sapiens
tagactcctaatgta

SEQ ID NO: 1903499 - DNA, 15 bp, Homo sapiens
agactcctaatgtag

SEQ ID NO: 1903500 - DNA, 15 bp, Homo sapiens
gactcctaatgtagg

SEQ ID NO: 1903501 - DNA, 15 bp, Homo sapiens
actcctaatgtaggc

SEQ ID NO: 1903502 - DNA, 15 bp, Homo sapiens
ctcctaatgtaggct

SEQ ID NO: 1903503 - DNA, 15 bp, Homo sapiens
tcctaatgtaggctg

SEQ ID NO: 1903504 - DNA, 15 bp, Homo sapiens
cctaatgtaggctgc

SEQ ID NO: 1903505 - DNA, 15 bp, Homo sapiens
ctaatgtaggctgct

SEQ ID NO: 1903506 - DNA, 15 bp, Homo sapiens
taatgtaggctgctg

SEQ ID NO: 1903507 - DNA, 15 bp, Homo sapiens
aatgtaggctgctgg

SEQ ID NO: 1903508 - DNA, 15 bp, Homo sapiens
atgtaggctgctgga

SEQ ID NO: 1903509 - DNA, 15 bp, Homo sapiens
tgtaggctgctggag

SEQ ID NO: 1903510 - DNA, 15 bp, Homo sapiens
gtaggctgctggagt

SEQ ID NO: 1903511 - DNA, 15 bp, Homo sapiens
taggctgctggagtt

SEQ ID NO: 1903512 - DNA, 15 bp, Homo sapiens
aggctgctggagttc

SEQ ID NO: 1903513 - DNA, 15 bp, Homo sapiens
ggctgctggagttca

SEQ ID NO: 1903514 - DNA, 15 bp, Homo sapiens
gctgctggagttcaa

SEQ ID NO: 1903515 - DNA, 15 bp, Homo sapiens
ctgctggagttcaaa

SEQ ID NO: 1903516 - DNA, 15 bp, Homo sapiens
tgctggagttcaaac

SEQ ID NO: 1903517 - DNA, 15 bp, Homo sapiens
gctggagttcaaacc

SEQ ID NO: 1903518 - DNA, 15 bp, Homo sapiens
ctggagttcaaaccc

SEQ ID NO: 1903519 - DNA, 15 bp, Homo sapiens
tggagttcaaaccct

SEQ ID NO: 1903520 - DNA, 15 bp, Homo sapiens
ggagttcaaaccctg

SEQ ID NO: 1903521 - DNA, 15 bp, Homo sapiens
gagttcaaaccctgg

SEQ ID NO: 1903522 - DNA, 15 bp, Homo sapiens
agttcaaaccctggc

SEQ ID NO: 1903523 - DNA, 15 bp, Homo sapiens
gttcaaaccctggct

SEQ ID NO: 1903524 - DNA, 15 bp, Homo sapiens
ttcaaaccctggctc

SEQ ID NO: 1903525 - DNA, 15 bp, Homo sapiens
tcaaaccctggctcc

SEQ ID NO: 1903526 - DNA, 15 bp, Homo sapiens
caaaccctggctcct

SEQ ID NO: 1903527 - DNA, 15 bp, Homo sapiens
aaaccctggctcctc

SEQ ID NO: 1903528 - DNA, 15 bp, Homo sapiens
aaccctggctcctct

SEQ ID NO: 1903529 - DNA, 15 bp, Homo sapiens
accctggctcctcta

SEQ ID NO: 1903530 - DNA, 15 bp, Homo sapiens
ccctggctcctctac

SEQ ID NO: 1903531 - DNA, 15 bp, Homo sapiens
cctggctcctctact

SEQ ID NO: 1903532 - DNA, 15 bp, Homo sapiens
ctggctcctctactt

SEQ ID NO: 1903533 - DNA, 15 bp, Homo sapiens
tggctcctctacttg

SEQ ID NO: 1903534 - DNA, 15 bp, Homo sapiens
ggctcctctacttgc

SEQ ID NO: 1903535 - DNA, 15 bp, Homo sapiens
gctcctctacttgcc

SEQ ID NO: 1903536 - DNA, 15 bp, Homo sapiens
ctcctctacttgccg

SEQ ID NO: 1903537 - DNA, 15 bp, Homo sapiens
tcctctacttgccgg

SEQ ID NO: 1903538 - DNA, 15 bp, Homo sapiens
cctctacttgccggt

SEQ ID NO: 1903539 - DNA, 15 bp, Homo sapiens
ctctacttgccggtt

SEQ ID NO: 1903540 - DNA, 15 bp, Homo sapiens
tctacttgccggttt

SEQ ID NO: 1903541 - DNA, 15 bp, Homo sapiens
ctacttgccggtttt

SEQ ID NO: 1903542 - DNA, 15 bp, Homo sapiens
tacttgccggttttg

SEQ ID NO: 1903543 - DNA, 15 bp, Homo sapiens
acttgccggttttga

SEQ ID NO: 1903544 - DNA, 15 bp, Homo sapiens
cttgccggttttgag

SEQ ID NO: 1903545 - DNA, 15 bp, Homo sapiens
ttgccggttttgagc

SEQ ID NO: 1903546 - DNA, 15 bp, Homo sapiens
tgccggttttgagca

SEQ ID NO: 1903547 - DNA, 15 bp, Homo sapiens
gccggttttgagcaa

SEQ ID NO: 1903548 - DNA, 15 bp, Homo sapiens
ccggttttgagcaag

SEQ ID NO: 1903549 - DNA, 15 bp, Homo sapiens
cggttttgagcaagt

SEQ ID NO: 1903550 - DNA, 15 bp, Homo sapiens
ggttttgagcaagtt

SEQ ID NO: 1903551 - DNA, 15 bp, Homo sapiens
gttttgagcaagtta

SEQ ID NO: 1903552 - DNA, 15 bp, Homo sapiens
ttttgagcaagttat

SEQ ID NO: 1903553 - DNA, 15 bp, Homo sapiens
tttgagcaagttatg

SEQ ID NO: 1903554 - DNA, 15 bp, Homo sapiens
ttgagcaagttatga

SEQ ID NO: 1903555 - DNA, 15 bp, Homo sapiens
tgagcaagttatgaa

SEQ ID NO: 1903556 - DNA, 15 bp, Homo sapiens
gagcaagttatgaag

SEQ ID NO: 1903557 - DNA, 15 bp, Homo sapiens
agcaagttatgaagc

SEQ ID NO: 1903558 - DNA, 15 bp, Homo sapiens
gcaagttatgaagct

SEQ ID NO: 1903559 - DNA, 15 bp, Homo sapiens
caagttatgaagcta

SEQ ID NO: 1903560 - DNA, 15 bp, Homo sapiens
aagttatgaagctat

SEQ ID NO: 1903561 - DNA, 15 bp, Homo sapiens
agttatgaagctatg

SEQ ID NO: 1903562 - DNA, 15 bp, Homo sapiens
gttatgaagctatgc

SEQ ID NO: 1903563 - DNA, 15 bp, Homo sapiens
ttatgaagctatgca

SEQ ID NO: 1903564 - DNA, 15 bp, Homo sapiens
tatgaagctatgcaa

SEQ ID NO: 1903565 - DNA, 15 bp, Homo sapiens
atgaagctatgcaac

SEQ ID NO: 1903566 - DNA, 15 bp, Homo sapiens
tgaagctatgcaacc

SEQ ID NO: 1903567 - DNA, 15 bp, Homo sapiens
gaagctatgcaacct

SEQ ID NO: 1903568 - DNA, 15 bp, Homo sapiens
aagctatgcaacctt

SEQ ID NO: 1903569 - DNA, 15 bp, Homo sapiens
agctatgcaaccttc

SEQ ID NO: 1903570 - DNA, 15 bp, Homo sapiens
gctatgcaaccttca

SEQ ID NO: 1903571 - DNA, 15 bp, Homo sapiens
ctatgcaaccttcat

SEQ ID NO: 1903572 - DNA, 15 bp, Homo sapiens
tatgcaaccttcatc

SEQ ID NO: 1903573 - DNA, 15 bp, Homo sapiens
atgcaaccttcatca

SEQ ID NO: 1903574 - DNA, 15 bp, Homo sapiens
tgcaaccttcatcag

SEQ ID NO: 1903575 - DNA, 15 bp, Homo sapiens
gcaaccttcatcagt

SEQ ID NO: 1903576 - DNA, 15 bp, Homo sapiens
caaccttcatcagta

SEQ ID NO: 1903577 - DNA, 15 bp, Homo sapiens
aaccttcatcagtaa

SEQ ID NO: 1903578 - DNA, 15 bp, Homo sapiens
accttcatcagtaaa

SEQ ID NO: 1903579 - DNA, 15 bp, Homo sapiens
ccttcatcagtaaaa

SEQ ID NO: 1903580 - DNA, 15 bp, Homo sapiens
cttcatcagtaaaat

SEQ ID NO: 1903581 - DNA, 15 bp, Homo sapiens
ttcatcagtaaaata

SEQ ID NO: 1903582 - DNA, 15 bp, Homo sapiens
tcatcagtaaaatag

SEQ ID NO: 1903583 - DNA, 15 bp, Homo sapiens
catcagtaaaatagg

SEQ ID NO: 1903584 - DNA, 15 bp, Homo sapiens
atcagtaaaatagga

SEQ ID NO: 1903585 - DNA, 15 bp, Homo sapiens
tcagtaaaataggaa

SEQ ID NO: 1903586 - DNA, 15 bp, Homo sapiens
cagtaaaataggaat

SEQ ID NO: 1903587 - DNA, 15 bp, Homo sapiens
agtaaaataggaata

SEQ ID NO: 1903588 - DNA, 15 bp, Homo sapiens
gtaaaataggaataa

SEQ ID NO: 1903589 - DNA, 15 bp, Homo sapiens
taaaataggaataat

SEQ ID NO: 1903590 - DNA, 15 bp, Homo sapiens
aaaataggaataata

SEQ ID NO: 1903591 - DNA, 15 bp, Homo sapiens
aaataggaataataa

SEQ ID NO: 1903592 - DNA, 15 bp, Homo sapiens
aataggaataataaa

SEQ ID NO: 1903593 - DNA, 15 bp, Homo sapiens
ataggaataataaaa

SEQ ID NO: 1903594 - DNA, 15 bp, Homo sapiens
taggaataataaaaa

SEQ ID NO: 1903595 - DNA, 15 bp, Homo sapiens
aggaataataaaaat

SEQ ID NO: 1903596 - DNA, 15 bp, Homo sapiens
ggaataataaaaata

SEQ ID NO: 1903597 - DNA, 15 bp, Homo sapiens
gaataataaaaatac

SEQ ID NO: 1903598 - DNA, 15 bp, Homo sapiens
aataataaaaatacc

SEQ ID NO: 1903599 - DNA, 15 bp, Homo sapiens
ataataaaaatacct

SEQ ID NO: 1903600 - DNA, 15 bp, Homo sapiens
taataaaaataccta

SEQ ID NO: 1903601 - DNA, 15 bp, Homo sapiens
aataaaaatacctat

SEQ ID NO: 1903602 - DNA, 15 bp, Homo sapiens
ataaaaatacctatc

SEQ ID NO: 1903603 - DNA, 15 bp, Homo sapiens
taaaaatacctatct

SEQ ID NO: 1903604 - DNA, 15 bp, Homo sapiens
aaaaatacctatctt

SEQ ID NO: 1903605 - DNA, 15 bp, Homo sapiens
aaaatacctatctta

SEQ ID NO: 1903606 - DNA, 15 bp, Homo sapiens
aaatacctatcttat

SEQ ID NO: 1903607 - DNA, 15 bp, Homo sapiens
aatacctatcttatg

SEQ ID NO: 1903608 - DNA, 15 bp, Homo sapiens
atacctatcttatgg

SEQ ID NO: 1903609 - DNA, 15 bp, Homo sapiens
tacctatcttatggg

SEQ ID NO: 1903610 - DNA, 15 bp, Homo sapiens
acctatcttatgggg

SEQ ID NO: 1903611 - DNA, 15 bp, Homo sapiens
cctatcttatggggg

SEQ ID NO: 1903612 - DNA, 15 bp, Homo sapiens
ctatcttatgggggt

SEQ ID NO: 1903613 - DNA, 15 bp, Homo sapiens
tatcttatgggggtt

SEQ ID NO: 1903614 - DNA, 15 bp, Homo sapiens
atcttatgggggttt

SEQ ID NO: 1903615 - DNA, 15 bp, Homo sapiens
tcttatgggggtttc

SEQ ID NO: 1903616 - DNA, 15 bp, Homo sapiens
cttatgggggtttcc

SEQ ID NO: 1903617 - DNA, 15 bp, Homo sapiens
ttatgggggtttccg

SEQ ID NO: 1903618 - DNA, 15 bp, Homo sapiens
tatgggggtttccgg

SEQ ID NO: 1903619 - DNA, 15 bp, Homo sapiens
atgggggtttccggc

SEQ ID NO: 1903620 - DNA, 15 bp, Homo sapiens
tgggggtttccggca

SEQ ID NO: 1903621 - DNA, 15 bp, Homo sapiens
gggggtttccggcaa

SEQ ID NO: 1903622 - DNA, 15 bp, Homo sapiens
ggggtttccggcaac

SEQ ID NO: 1903623 - DNA, 15 bp, Homo sapiens
gggtttccggcaact

SEQ ID NO: 1903624 - DNA, 15 bp, Homo sapiens
ggtttccggcaacta

SEQ ID NO: 1903625 - DNA, 15 bp, Homo sapiens
gtttccggcaactac

SEQ ID NO: 1903626 - DNA, 15 bp, Homo sapiens
tttccggcaactaca

SEQ ID NO: 1903627 - DNA, 15 bp, Homo sapiens
ttccggcaactacat

SEQ ID NO: 1903628 - DNA, 15 bp, Homo sapiens
tccggcaactacatt

SEQ ID NO: 1903629 - DNA, 15 bp, Homo sapiens
ccggcaactacatta

SEQ ID NO: 1903630 - DNA, 15 bp, Homo sapiens
cggcaactacattaa

SEQ ID NO: 1903631 - DNA, 15 bp, Homo sapiens
ggcaactacattaat

SEQ ID NO: 1903632 - DNA, 15 bp, Homo sapiens
gcaactacattaatt

SEQ ID NO: 1903633 - DNA, 15 bp, Homo sapiens
caactacattaatta

SEQ ID NO: 1903634 - DNA, 15 bp, Homo sapiens
aactacattaattaa

SEQ ID NO: 1903635 - DNA, 15 bp, Homo sapiens
actacattaattaaa

SEQ ID NO: 1903636 - DNA, 15 bp, Homo sapiens
ctacattaattaaaa

SEQ ID NO: 1903637 - DNA, 15 bp, Homo sapiens
tacattaattaaaat

SEQ ID NO: 1903638 - DNA, 15 bp, Homo sapiens
acattaattaaaata

SEQ ID NO: 1903639 - DNA, 15 bp, Homo sapiens
cattaattaaaatat

SEQ ID NO: 1903640 - DNA, 15 bp, Homo sapiens
ttaattaaaatatac

SEQ ID NO: 1903641 - DNA, 15 bp, Homo sapiens
taattaaaatataca

SEQ ID NO: 1903642 - DNA, 15 bp, Homo sapiens
aattaaaatatacaa

SEQ ID NO: 1903643 - DNA, 15 bp, Homo sapiens
attaaaatatacaaa

SEQ ID NO: 1903644 - DNA, 15 bp, Homo sapiens
ttaaaatatacaaag

SEQ ID NO: 1903645 - DNA, 15 bp, Homo sapiens
taaaatatacaaagc

SEQ ID NO: 1903646 - DNA, 15 bp, Homo sapiens
aaaatatacaaagca

SEQ ID NO: 1903647 - DNA, 15 bp, Homo sapiens
aaatatacaaagcaa

SEQ ID NO: 1903648 - DNA, 15 bp, Homo sapiens
aatatacaaagcaac

SEQ ID NO: 1903649 - DNA, 15 bp, Homo sapiens
atatacaaagcaaca

SEQ ID NO: 1903650 - DNA, 15 bp, Homo sapiens
tatacaaagcaacat

SEQ ID NO: 1903651 - DNA, 15 bp, Homo sapiens
atacaaagcaacatg

SEQ ID NO: 1903652 - DNA, 15 bp, Homo sapiens
tacaaagcaacatga

SEQ ID NO: 1903653 - DNA, 15 bp, Homo sapiens
acaaagcaacatgaa

SEQ ID NO: 1903654 - DNA, 15 bp, Homo sapiens
caaagcaacatgaaa

SEQ ID NO: 1903655 - DNA, 15 bp, Homo sapiens
aaagcaacatgaaat

SEQ ID NO: 1903656 - DNA, 15 bp, Homo sapiens
gcaacatgaaataat

SEQ ID NO: 1903657 - DNA, 15 bp, Homo sapiens
caacatgaaataata

SEQ ID NO: 1903658 - DNA, 15 bp, Homo sapiens
aacatgaaataataa

SEQ ID NO: 1903659 - DNA, 15 bp, Homo sapiens
acatgaaataataaa

SEQ ID NO: 1903660 - DNA, 15 bp, Homo sapiens
catgaaataataaat

SEQ ID NO: 1903661 - DNA, 15 bp, Homo sapiens
atgaaataataaatg

SEQ ID NO: 1903662 - DNA, 15 bp, Homo sapiens
tgaaataataaatgt

SEQ ID NO: 1903663 - DNA, 15 bp, Homo sapiens
gaaataataaatgtt

SEQ ID NO: 1903664 - DNA, 15 bp, Homo sapiens
aaataataaatgtta

SEQ ID NO: 1903665 - DNA, 15 bp, Homo sapiens
aataataaatgttaa

SEQ ID NO: 1903666 - DNA, 15 bp, Homo sapiens
ataataaatgttaat

SEQ ID NO: 1903667 - DNA, 15 bp, Homo sapiens
taataaatgttaata

SEQ ID NO: 1903668 - DNA, 15 bp, Homo sapiens
aataaatgttaatat

SEQ ID NO: 1903669 - DNA, 15 bp, Homo sapiens
ataaatgttaatatt

SEQ ID NO: 1903670 - DNA, 15 bp, Homo sapiens
taaatgttaatattg

SEQ ID NO: 1903671 - DNA, 15 bp, Homo sapiens
aaatgttaatattgt

SEQ ID NO: 1903672 - DNA, 15 bp, Homo sapiens
aatgttaatattgta

SEQ ID NO: 1903673 - DNA, 15 bp, Homo sapiens
atgttaatattgtaa

SEQ ID NO: 1903674 - DNA, 15 bp, Homo sapiens
tgttaatattgtaat

SEQ ID NO: 1903675 - DNA, 15 bp, Homo sapiens
gttaatattgtaatg

SEQ ID NO: 1903676 - DNA, 15 bp, Homo sapiens
ttaatattgtaatgc

SEQ ID NO: 1903677 - DNA, 15 bp, Homo sapiens
taatattgtaatgcc

SEQ ID NO: 1903678 - DNA, 15 bp, Homo sapiens
aatattgtaatgccc

SEQ ID NO: 1903679 - DNA, 15 bp, Homo sapiens
atattgtaatgccca

SEQ ID NO: 1903680 - DNA, 15 bp, Homo sapiens
tattgtaatgcccat

SEQ ID NO: 1903681 - DNA, 15 bp, Homo sapiens
attgtaatgcccata

SEQ ID NO: 1903682 - DNA, 15 bp, Homo sapiens
ttgtaatgcccataa

SEQ ID NO: 1903683 - DNA, 15 bp, Homo sapiens
tgtaatgcccataat

SEQ ID NO: 1903684 - DNA, 15 bp, Homo sapiens
gtaatgcccataata

SEQ ID NO: 1903685 - DNA, 15 bp, Homo sapiens
taatgcccataatac

SEQ ID NO: 1903686 - DNA, 15 bp, Homo sapiens
aatgcccataatact

SEQ ID NO: 1903687 - DNA, 15 bp, Homo sapiens
atgcccataatactt

SEQ ID NO: 1903688 - DNA, 15 bp, Homo sapiens
tgcccataatacttt

SEQ ID NO: 1903689 - DNA, 15 bp, Homo sapiens
gcccataatacttta

SEQ ID NO: 1903690 - DNA, 15 bp, Homo sapiens
cccataatactttaa

SEQ ID NO: 1903691 - DNA, 15 bp, Homo sapiens
ccataatactttaag

SEQ ID NO: 1903692 - DNA, 15 bp, Homo sapiens
cataatactttaaga

SEQ ID NO: 1903693 - DNA, 15 bp, Homo sapiens
ataatactttaagag

SEQ ID NO: 1903694 - DNA, 15 bp, Homo sapiens
taatactttaagaga

SEQ ID NO: 1903695 - DNA, 15 bp, Homo sapiens
aatactttaagagag

SEQ ID NO: 1903696 - DNA, 15 bp, Homo sapiens
atactttaagagaga

SEQ ID NO: 1903697 - DNA, 15 bp, Homo sapiens
tactttaagagagat

SEQ ID NO: 1903698 - DNA, 15 bp, Homo sapiens
actttaagagagata

SEQ ID NO: 1903699 - DNA, 15 bp, Homo sapiens
ctttaagagagatat

SEQ ID NO: 1903700 - DNA, 15 bp, Homo sapiens
tttaagagagatatt

SEQ ID NO: 1903701 - DNA, 15 bp, Homo sapiens
ttaagagagatatta

SEQ ID NO: 1903702 - DNA, 15 bp, Homo sapiens
taagagagatattaa

SEQ ID NO: 1903703 - DNA, 15 bp, Homo sapiens
aagagagatattaac

SEQ ID NO: 1903704 - DNA, 15 bp, Homo sapiens
agagagatattaacc

SEQ ID NO: 1903705 - DNA, 15 bp, Homo sapiens
gagagatattaacca

SEQ ID NO: 1903706 - DNA, 15 bp, Homo sapiens
agagatattaaccaa

SEQ ID NO: 1903707 - DNA, 15 bp, Homo sapiens
gagatattaaccaat

SEQ ID NO: 1903708 - DNA, 15 bp, Homo sapiens
agatattaaccaatg

SEQ ID NO: 1903709 - DNA, 15 bp, Homo sapiens
gatattaaccaatgg

SEQ ID NO: 1903710 - DNA, 15 bp, Homo sapiens
atattaaccaatgga

SEQ ID NO: 1903711 - DNA, 15 bp, Homo sapiens
tattaaccaatggag

SEQ ID NO: 1903712 - DNA, 15 bp, Homo sapiens
attaaccaatggagc

SEQ ID NO: 1903713 - DNA, 15 bp, Homo sapiens
ttaaccaatggagca

SEQ ID NO: 1903714 - DNA, 15 bp, Homo sapiens
taaccaatggagcat

SEQ ID NO: 1903715 - DNA, 15 bp, Homo sapiens
aaccaatggagcata

SEQ ID NO: 1903716 - DNA, 15 bp, Homo sapiens
accaatggagcatag

SEQ ID NO: 1903717 - DNA, 15 bp, Homo sapiens
ccaatggagcatagc

SEQ ID NO: 1903718 - DNA, 15 bp, Homo sapiens
caatggagcatagcc

SEQ ID NO: 1903719 - DNA, 15 bp, Homo sapiens
aatggagcatagcct

SEQ ID NO: 1903720 - DNA, 15 bp, Homo sapiens
atggagcatagcctg

SEQ ID NO: 1903721 - DNA, 15 bp, Homo sapiens
tggagcatagcctga

SEQ ID NO: 1903722 - DNA, 15 bp, Homo sapiens
ggagcatagcctgac

SEQ ID NO: 1903723 - DNA, 15 bp, Homo sapiens
gagcatagcctgaca

SEQ ID NO: 1903724 - DNA, 15 bp, Homo sapiens
agcatagcctgacaa

SEQ ID NO: 1903725 - DNA, 15 bp, Homo sapiens
gcatagcctgacaag

SEQ ID NO: 1903726 - DNA, 15 bp, Homo sapiens
catagcctgacaagg

SEQ ID NO: 1903727 - DNA, 15 bp, Homo sapiens
atagcctgacaaggt

SEQ ID NO: 1903728 - DNA, 15 bp, Homo sapiens
tagcctgacaaggtg

SEQ ID NO: 1903729 - DNA, 15 bp, Homo sapiens
agcctgacaaggtga

SEQ ID NO: 1903730 - DNA, 15 bp, Homo sapiens
gcctgacaaggtgac

SEQ ID NO: 1903731 - DNA, 15 bp, Homo sapiens
cctgacaaggtgacc

SEQ ID NO: 1903732 - DNA, 15 bp, Homo sapiens
ctgacaaggtgacca

SEQ ID NO: 1903733 - DNA, 15 bp, Homo sapiens
tgacaaggtgaccag

SEQ ID NO: 1903734 - DNA, 15 bp, Homo sapiens
gacaaggtgaccaga

SEQ ID NO: 1903735 - DNA, 15 bp, Homo sapiens
acaaggtgaccagaa

SEQ ID NO: 1903736 - DNA, 15 bp, Homo sapiens
caaggtgaccagaat

SEQ ID NO: 1903737 - DNA, 15 bp, Homo sapiens
aaggtgaccagaata

SEQ ID NO: 1903738 - DNA, 15 bp, Homo sapiens
aggtgaccagaatat

SEQ ID NO: 1903739 - DNA, 15 bp, Homo sapiens
ggtgaccagaatatg

SEQ ID NO: 1903740 - DNA, 15 bp, Homo sapiens
gtgaccagaatatga

SEQ ID NO: 1903741 - DNA, 15 bp, Homo sapiens
tgaccagaatatgaa

SEQ ID NO: 1903742 - DNA, 15 bp, Homo sapiens
gaccagaatatgaag

SEQ ID NO: 1903743 - DNA, 15 bp, Homo sapiens
accagaatatgaaga

SEQ ID NO: 1903744 - DNA, 15 bp, Homo sapiens
ccagaatatgaagac

SEQ ID NO: 1903745 - DNA, 15 bp, Homo sapiens
cagaatatgaagaca

SEQ ID NO: 1903746 - DNA, 15 bp, Homo sapiens
agaatatgaagacaa

SEQ ID NO: 1903747 - DNA, 15 bp, Homo sapiens
gaatatgaagacaaa

SEQ ID NO: 1903748 - DNA, 15 bp, Homo sapiens
aatatgaagacaaac

SEQ ID NO: 1903749 - DNA, 15 bp, Homo sapiens
atatgaagacaaact

SEQ ID NO: 1903750 - DNA, 15 bp, Homo sapiens
tatgaagacaaactg

SEQ ID NO: 1903751 - DNA, 15 bp, Homo sapiens
atgaagacaaactga

SEQ ID NO: 1903752 - DNA, 15 bp, Homo sapiens
tgaagacaaactgag

SEQ ID NO: 1903753 - DNA, 15 bp, Homo sapiens
gaagacaaactgaga

SEQ ID NO: 1903754 - DNA, 15 bp, Homo sapiens
aagacaaactgagat

SEQ ID NO: 1903755 - DNA, 15 bp, Homo sapiens
agacaaactgagatt

SEQ ID NO: 1903756 - DNA, 15 bp, Homo sapiens
gacaaactgagatta

SEQ ID NO: 1903757 - DNA, 15 bp, Homo sapiens
acaaactgagattat

SEQ ID NO: 1903758 - DNA, 15 bp, Homo sapiens
caaactgagattatg

SEQ ID NO: 1903759 - DNA, 15 bp, Homo sapiens
aaactgagattatgc

SEQ ID NO: 1903760 - DNA, 15 bp, Homo sapiens
aactgagattatgcc

SEQ ID NO: 1903761 - DNA, 15 bp, Homo sapiens
actgagattatgcca

SEQ ID NO: 1903762 - DNA, 15 bp, Homo sapiens
ctgagattatgccat

SEQ ID NO: 1903763 - DNA, 15 bp, Homo sapiens
tgagattatgccatg

SEQ ID NO: 1903764 - DNA, 15 bp, Homo sapiens
gagattatgccatgt

SEQ ID NO: 1903765 - DNA, 15 bp, Homo sapiens
agattatgccatgtg

SEQ ID NO: 1903766 - DNA, 15 bp, Homo sapiens
gattatgccatgtga

SEQ ID NO: 1903767 - DNA, 15 bp, Homo sapiens
attatgccatgtgaa

SEQ ID NO: 1903768 - DNA, 15 bp, Homo sapiens
ttatgccatgtgaag

SEQ ID NO: 1903769 - DNA, 15 bp, Homo sapiens
tatgccatgtgaaga

SEQ ID NO: 1903770 - DNA, 15 bp, Homo sapiens
atgccatgtgaagaa

SEQ ID NO: 1903771 - DNA, 15 bp, Homo sapiens
tgccatgtgaagaat

SEQ ID NO: 1903772 - DNA, 15 bp, Homo sapiens
gccatgtgaagaata

SEQ ID NO: 1903773 - DNA, 15 bp, Homo sapiens
ccatgtgaagaataa

SEQ ID NO: 1903774 - DNA, 15 bp, Homo sapiens
catgtgaagaataat

SEQ ID NO: 1903775 - DNA, 15 bp, Homo sapiens
atgtgaagaataatt

SEQ ID NO: 1903776 - DNA, 15 bp, Homo sapiens
tgtgaagaataattg

SEQ ID NO: 1903777 - DNA, 15 bp, Homo sapiens
gtgaagaataattgt

SEQ ID NO: 1903778 - DNA, 15 bp, Homo sapiens
tgaagaataattgta

SEQ ID NO: 1903779 - DNA, 15 bp, Homo sapiens
gaagaataattgtag

SEQ ID NO: 1903780 - DNA, 15 bp, Homo sapiens
aagaataattgtagt

SEQ ID NO: 1903781 - DNA, 15 bp, Homo sapiens
agaataattgtagtt

SEQ ID NO: 1903782 - DNA, 15 bp, Homo sapiens
gaataattgtagtta

SEQ ID NO: 1903783 - DNA, 15 bp, Homo sapiens
aataattgtagttat

SEQ ID NO: 1903784 - DNA, 15 bp, Homo sapiens
ataattgtagttata

SEQ ID NO: 1903785 - DNA, 15 bp, Homo sapiens
taattgtagttatat

SEQ ID NO: 1903786 - DNA, 15 bp, Homo sapiens
aattgtagttatatg

SEQ ID NO: 1903787 - DNA, 15 bp, Homo sapiens
attgtagttatatgc

SEQ ID NO: 1903788 - DNA, 15 bp, Homo sapiens
ttgtagttatatgca

SEQ ID NO: 1903789 - DNA, 15 bp, Homo sapiens
tgtagttatatgcaa

SEQ ID NO: 1903790 - DNA, 15 bp, Homo sapiens
gtagttatatgcaac

SEQ ID NO: 1903791 - DNA, 15 bp, Homo sapiens
tagttatatgcaact

SEQ ID NO: 1903792 - DNA, 15 bp, Homo sapiens
agttatatgcaactt

SEQ ID NO: 1903793 - DNA, 15 bp, Homo sapiens
gttatatgcaactta

SEQ ID NO: 1903794 - DNA, 15 bp, Homo sapiens
ttatatgcaacttac

SEQ ID NO: 1903795 - DNA, 15 bp, Homo sapiens
tatatgcaacttaca

SEQ ID NO: 1903796 - DNA, 15 bp, Homo sapiens
atatgcaacttacag

SEQ ID NO: 1903797 - DNA, 15 bp, Homo sapiens
tatgcaacttacagt

SEQ ID NO: 1903798 - DNA, 15 bp, Homo sapiens
atgcaacttacagta

SEQ ID NO: 1903799 - DNA, 15 bp, Homo sapiens
tgcaacttacagtaa

SEQ ID NO: 1903800 - DNA, 15 bp, Homo sapiens
gcaacttacagtaaa

SEQ ID NO: 1903801 - DNA, 15 bp, Homo sapiens
caacttacagtaaag

SEQ ID NO: 1903802 - DNA, 15 bp, Homo sapiens
aacttacagtaaaga

SEQ ID NO: 1903803 - DNA, 15 bp, Homo sapiens
acttacagtaaagaa

SEQ ID NO: 1903804 - DNA, 15 bp, Homo sapiens
cttacagtaaagaaa

SEQ ID NO: 1903805 - DNA, 15 bp, Homo sapiens
ttacagtaaagaaat

SEQ ID NO: 1903806 - DNA, 15 bp, Homo sapiens
tacagtaaagaaatg

SEQ ID NO: 1903807 - DNA, 15 bp, Homo sapiens
acagtaaagaaatgt

SEQ ID NO: 1903808 - DNA, 15 bp, Homo sapiens
cagtaaagaaatgtt

SEQ ID NO: 1903809 - DNA, 15 bp, Homo sapiens
agtaaagaaatgttg

SEQ ID NO: 1903810 - DNA, 15 bp, Homo sapiens
gtaaagaaatgttgg

SEQ ID NO: 1903811 - DNA, 15 bp, Homo sapiens
taaagaaatgttggc

SEQ ID NO: 1903812 - DNA, 15 bp, Homo sapiens
aaagaaatgttggcc

SEQ ID NO: 1903813 - DNA, 15 bp, Homo sapiens
aagaaatgttggcca

SEQ ID NO: 1903814 - DNA, 15 bp, Homo sapiens
agaaatgttggccag

SEQ ID NO: 1903815 - DNA, 15 bp, Homo sapiens
gaaatgttggccagg

SEQ ID NO: 1903816 - DNA, 15 bp, Homo sapiens
aaatgttggccaggc

SEQ ID NO: 1903817 - DNA, 15 bp, Homo sapiens
aatgttggccaggca

SEQ ID NO: 1903818 - DNA, 15 bp, Homo sapiens
atgttggccaggcac

SEQ ID NO: 1903819 - DNA, 15 bp, Homo sapiens
tgttggccaggcacg

SEQ ID NO: 1903820 - DNA, 15 bp, Homo sapiens
gttggccaggcacgg

SEQ ID NO: 1903821 - DNA, 15 bp, Homo sapiens
ttggccaggcacggt

SEQ ID NO: 1903822 - DNA, 15 bp, Homo sapiens
tggccaggcacggtg

SEQ ID NO: 1903823 - DNA, 15 bp, Homo sapiens
tcccagcactttggc

SEQ ID NO: 1903824 - DNA, 15 bp, Homo sapiens
cccagcactttggca

SEQ ID NO: 1903825 - DNA, 15 bp, Homo sapiens
ccagcactttggcag

SEQ ID NO: 1903826 - DNA, 15 bp, Homo sapiens
cagcactttggcagg

SEQ ID NO: 1903827 - DNA, 15 bp, Homo sapiens
agcactttggcaggt

SEQ ID NO: 1903828 - DNA, 15 bp, Homo sapiens
gcactttggcaggtc

SEQ ID NO: 1903829 - DNA, 15 bp, Homo sapiens
cactttggcaggtca

SEQ ID NO: 1903830 - DNA, 15 bp, Homo sapiens
actttggcaggtcaa

SEQ ID NO: 1903831 - DNA, 15 bp, Homo sapiens
ctttggcaggtcaag

SEQ ID NO: 1903832 - DNA, 15 bp, Homo sapiens
tttggcaggtcaagg

SEQ ID NO: 1903833 - DNA, 15 bp, Homo sapiens
ttggcaggtcaaggc

SEQ ID NO: 1903834 - DNA, 15 bp, Homo sapiens
tggcaggtcaaggca

SEQ ID NO: 1903835 - DNA, 15 bp, Homo sapiens
ggcaggtcaaggcag

SEQ ID NO: 1903836 - DNA, 15 bp, Homo sapiens
gcaggtcaaggcagg

SEQ ID NO: 1903837 - DNA, 15 bp, Homo sapiens
caggtcaaggcaggc

SEQ ID NO: 1903838 - DNA, 15 bp, Homo sapiens
aggtcaaggcaggca

SEQ ID NO: 1903839 - DNA, 15 bp, Homo sapiens
ggtcaaggcaggcag

SEQ ID NO: 1903840 - DNA, 15 bp, Homo sapiens
gtcaaggcaggcaga

SEQ ID NO: 1903841 - DNA, 15 bp, Homo sapiens
tcaaggcaggcagat

SEQ ID NO: 1903842 - DNA, 15 bp, Homo sapiens
aaggtcaggagttca

SEQ ID NO: 1903843 - DNA, 15 bp, Homo sapiens
gcctggccaacattg

SEQ ID NO: 1903844 - DNA, 15 bp, Homo sapiens
cctggccaacattgt

SEQ ID NO: 1903845 - DNA, 15 bp, Homo sapiens
ctggccaacattgtg

SEQ ID NO: 1903846 - DNA, 15 bp, Homo sapiens
tggccaacattgtga

SEQ ID NO: 1903847 - DNA, 15 bp, Homo sapiens
ggccaacattgtgaa

SEQ ID NO: 1903848 - DNA, 15 bp, Homo sapiens
gccaacattgtgaaa

SEQ ID NO: 1903849 - DNA, 15 bp, Homo sapiens
ccaacattgtgaaat

SEQ ID NO: 1903850 - DNA, 15 bp, Homo sapiens
caacattgtgaaatc

SEQ ID NO: 1903851 - DNA, 15 bp, Homo sapiens
aacattgtgaaatcc

SEQ ID NO: 1903852 - DNA, 15 bp, Homo sapiens
acattgtgaaatccc

SEQ ID NO: 1903853 - DNA, 15 bp, Homo sapiens
cattgtgaaatccca

SEQ ID NO: 1903854 - DNA, 15 bp, Homo sapiens
attgtgaaatcccat

SEQ ID NO: 1903855 - DNA, 15 bp, Homo sapiens
ttgtgaaatcccatc

SEQ ID NO: 1903856 - DNA, 15 bp, Homo sapiens
tgtgaaatcccatct

SEQ ID NO: 1903857 - DNA, 15 bp, Homo sapiens
gtgaaatcccatctc

SEQ ID NO: 1903858 - DNA, 15 bp, Homo sapiens
tgaaatcccatctct

SEQ ID NO: 1903859 - DNA, 15 bp, Homo sapiens
gaaatcccatctcta

SEQ ID NO: 1903860 - DNA, 15 bp, Homo sapiens
aaatcccatctctac

SEQ ID NO: 1903861 - DNA, 15 bp, Homo sapiens
aatcccatctctact

SEQ ID NO: 1903862 - DNA, 15 bp, Homo sapiens
atcccatctctacta

SEQ ID NO: 1903863 - DNA, 15 bp, Homo sapiens
tcccatctctactaa

SEQ ID NO: 1903864 - DNA, 15 bp, Homo sapiens
attagctgggtgtga

SEQ ID NO: 1903865 - DNA, 15 bp, Homo sapiens
ttagctgggtgtgat

SEQ ID NO: 1903866 - DNA, 15 bp, Homo sapiens
tagctgggtgtgatg

SEQ ID NO: 1903867 - DNA, 15 bp, Homo sapiens
agctgggtgtgatga

SEQ ID NO: 1903868 - DNA, 15 bp, Homo sapiens
gctgggtgtgatgac

SEQ ID NO: 1903869 - DNA, 15 bp, Homo sapiens
ctgggtgtgatgacg

SEQ ID NO: 1903870 - DNA, 15 bp, Homo sapiens
tgggtgtgatgacgg

SEQ ID NO: 1903871 - DNA, 15 bp, Homo sapiens
gggtgtgatgacggg

SEQ ID NO: 1903872 - DNA, 15 bp, Homo sapiens
ggtgtgatgacgggc

SEQ ID NO: 1903873 - DNA, 15 bp, Homo sapiens
gtgtgatgacgggcg

SEQ ID NO: 1903874 - DNA, 15 bp, Homo sapiens
tgtgatgacgggcgc

SEQ ID NO: 1903875 - DNA, 15 bp, Homo sapiens
gtgatgacgggcgcc

SEQ ID NO: 1903876 - DNA, 15 bp, Homo sapiens
tgatgacgggcgcct

SEQ ID NO: 1903877 - DNA, 15 bp, Homo sapiens
gatgacgggcgcctg

SEQ ID NO: 1903878 - DNA, 15 bp, Homo sapiens
atgacgggcgcctgt

SEQ ID NO: 1903879 - DNA, 15 bp, Homo sapiens
tgacgggcgcctgta

SEQ ID NO: 1903880 - DNA, 15 bp, Homo sapiens
gacgggcgcctgtaa

SEQ ID NO: 1903881 - DNA, 15 bp, Homo sapiens
acgggcgcctgtaat

SEQ ID NO: 1903882 - DNA, 15 bp, Homo sapiens
ggcgcctgtaatcca

SEQ ID NO: 1903883 - DNA, 15 bp, Homo sapiens
gcgcctgtaatccaa

SEQ ID NO: 1903884 - DNA, 15 bp, Homo sapiens
cgcctgtaatccaag

SEQ ID NO: 1903885 - DNA, 15 bp, Homo sapiens
cctgtaatccaagct

SEQ ID NO: 1903886 - DNA, 15 bp, Homo sapiens
ctgtaatccaagcta

SEQ ID NO: 1903887 - DNA, 15 bp, Homo sapiens
tgtaatccaagctac

SEQ ID NO: 1903888 - DNA, 15 bp, Homo sapiens
gtaatccaagctact

SEQ ID NO: 1903889 - DNA, 15 bp, Homo sapiens
taatccaagctactc

SEQ ID NO: 1903890 - DNA, 15 bp, Homo sapiens
aatccaagctactca

SEQ ID NO: 1903891 - DNA, 15 bp, Homo sapiens
atccaagctactcag

SEQ ID NO: 1903892 - DNA, 15 bp, Homo sapiens
tccaagctactcaga

SEQ ID NO: 1903893 - DNA, 15 bp, Homo sapiens
ccaagctactcagag

SEQ ID NO: 1903894 - DNA, 15 bp, Homo sapiens
caagctactcagagg

SEQ ID NO: 1903895 - DNA, 15 bp, Homo sapiens
aagctactcagaggc

SEQ ID NO: 1903896 - DNA, 15 bp, Homo sapiens
agctactcagaggct

SEQ ID NO: 1903897 - DNA, 15 bp, Homo sapiens
gctactcagaggctg

SEQ ID NO: 1903898 - DNA, 15 bp, Homo sapiens
ctactcagaggctga

SEQ ID NO: 1903899 - DNA, 15 bp, Homo sapiens
tactcagaggctgag

SEQ ID NO: 1903900 - DNA, 15 bp, Homo sapiens
actcagaggctgagg

SEQ ID NO: 1903901 - DNA, 15 bp, Homo sapiens
ctcagaggctgaggc

SEQ ID NO: 1903902 - DNA, 15 bp, Homo sapiens
tcagaggctgaggca

SEQ ID NO: 1903903 - DNA, 15 bp, Homo sapiens
gaggcaggagaattc

SEQ ID NO: 1903904 - DNA, 15 bp, Homo sapiens
aggcaggagaattcc

SEQ ID NO: 1903905 - DNA, 15 bp, Homo sapiens
ggcaggagaattcct

SEQ ID NO: 1903906 - DNA, 15 bp, Homo sapiens
gcaggagaattcctt

SEQ ID NO: 1903907 - DNA, 15 bp, Homo sapiens
caggagaattccttg

SEQ ID NO: 1903908 - DNA, 15 bp, Homo sapiens
aggagaattccttga

SEQ ID NO: 1903909 - DNA, 15 bp, Homo sapiens
ggagaattccttgaa

SEQ ID NO: 1903910 - DNA, 15 bp, Homo sapiens
gagaattccttgaac

SEQ ID NO: 1903911 - DNA, 15 bp, Homo sapiens
agaattccttgaacc

SEQ ID NO: 1903912 - DNA, 15 bp, Homo sapiens
gaattccttgaacct

SEQ ID NO: 1903913 - DNA, 15 bp, Homo sapiens
aattccttgaacctg

SEQ ID NO: 1903914 - DNA, 15 bp, Homo sapiens
attccttgaacctgg

SEQ ID NO: 1903915 - DNA, 15 bp, Homo sapiens
ttccttgaacctggg

SEQ ID NO: 1903916 - DNA, 15 bp, Homo sapiens
tccttgaacctggga

SEQ ID NO: 1903917 - DNA, 15 bp, Homo sapiens
ccttgaacctgggag

SEQ ID NO: 1903918 - DNA, 15 bp, Homo sapiens
gctgagatcacgcca

SEQ ID NO: 1903919 - DNA, 15 bp, Homo sapiens
ctgagatcacgccac

SEQ ID NO: 1903920 - DNA, 15 bp, Homo sapiens
tgagatcacgccact

SEQ ID NO: 1903921 - DNA, 15 bp, Homo sapiens
ctgcactccagcccg

SEQ ID NO: 1903922 - DNA, 15 bp, Homo sapiens
tgcactccagcccgg

SEQ ID NO: 1903923 - DNA, 15 bp, Homo sapiens
gcactccagcccggg

SEQ ID NO: 1903924 - DNA, 15 bp, Homo sapiens
cactccagcccgggt

SEQ ID NO: 1903925 - DNA, 15 bp, Homo sapiens
actccagcccgggtg

SEQ ID NO: 1903926 - DNA, 15 bp, Homo sapiens
ctccagcccgggtga

SEQ ID NO: 1903927 - DNA, 15 bp, Homo sapiens
tccagcccgggtgac

SEQ ID NO: 1903928 - DNA, 15 bp, Homo sapiens
ccagcccgggtgaca

SEQ ID NO: 1903929 - DNA, 15 bp, Homo sapiens
cagcccgggtgacag

SEQ ID NO: 1903930 - DNA, 15 bp, Homo sapiens
agcccgggtgacagt

SEQ ID NO: 1903931 - DNA, 15 bp, Homo sapiens
gcccgggtgacagtg

SEQ ID NO: 1903932 - DNA, 15 bp, Homo sapiens
cccgggtgacagtgc

SEQ ID NO: 1903933 - DNA, 15 bp, Homo sapiens
ccgggtgacagtgca

SEQ ID NO: 1903934 - DNA, 15 bp, Homo sapiens
cgggtgacagtgcaa

SEQ ID NO: 1903935 - DNA, 15 bp, Homo sapiens
gggtgacagtgcaag

SEQ ID NO: 1903936 - DNA, 15 bp, Homo sapiens
ggtgacagtgcaaga

SEQ ID NO: 1903937 - DNA, 15 bp, Homo sapiens
gtgacagtgcaagac

SEQ ID NO: 1903938 - DNA, 15 bp, Homo sapiens
tgacagtgcaagact

SEQ ID NO: 1903939 - DNA, 15 bp, Homo sapiens
gacagtgcaagactc

SEQ ID NO: 1903940 - DNA, 15 bp, Homo sapiens
acagtgcaagactcc

SEQ ID NO: 1903941 - DNA, 15 bp, Homo sapiens
cagtgcaagactccg

SEQ ID NO: 1903942 - DNA, 15 bp, Homo sapiens
agtgcaagactccgt

SEQ ID NO: 1903943 - DNA, 15 bp, Homo sapiens
gtgcaagactccgtc

SEQ ID NO: 1903944 - DNA, 15 bp, Homo sapiens
tgcaagactccgtct

SEQ ID NO: 1903945 - DNA, 15 bp, Homo sapiens
ctccgtctcaaaaac

SEQ ID NO: 1903946 - DNA, 15 bp, Homo sapiens
tccgtctcaaaaaca

SEQ ID NO: 1903947 - DNA, 15 bp, Homo sapiens
gtctcaaaaacaaaa

SEQ ID NO: 1903948 - DNA, 15 bp, Homo sapiens
tctcaaaaacaaaaa

SEQ ID NO: 1903949 - DNA, 15 bp, Homo sapiens
ctcaaaaacaaaaaa

SEQ ID NO: 1903950 - DNA, 15 bp, Homo sapiens
tcaaaaacaaaaaag

SEQ ID NO: 1903951 - DNA, 15 bp, Homo sapiens
caaaaacaaaaaagt

SEQ ID NO: 1903952 - DNA, 15 bp, Homo sapiens
aaaaacaaaaaagtc

SEQ ID NO: 1903953 - DNA, 15 bp, Homo sapiens
aaaacaaaaaagtca

SEQ ID NO: 1903954 - DNA, 15 bp, Homo sapiens
aaacaaaaaagtcag

SEQ ID NO: 1903955 - DNA, 15 bp, Homo sapiens
aacaaaaaagtcaga

SEQ ID NO: 1903956 - DNA, 15 bp, Homo sapiens
acaaaaaagtcagaa

SEQ ID NO: 1903957 - DNA, 15 bp, Homo sapiens
caaaaaagtcagaaa

SEQ ID NO: 1903958 - DNA, 15 bp, Homo sapiens
aaaaaagtcagaaat

SEQ ID NO: 1903959 - DNA, 15 bp, Homo sapiens
aaaaagtcagaaatg

SEQ ID NO: 1903960 - DNA, 15 bp, Homo sapiens
aaaagtcagaaatgt

SEQ ID NO: 1903961 - DNA, 15 bp, Homo sapiens
aaagtcagaaatgtt

SEQ ID NO: 1903962 - DNA, 15 bp, Homo sapiens
aagtcagaaatgttg

SEQ ID NO: 1903963 - DNA, 15 bp, Homo sapiens
agtcagaaatgttgg

SEQ ID NO: 1903964 - DNA, 15 bp, Homo sapiens
gtcagaaatgttggc

SEQ ID NO: 1903965 - DNA, 15 bp, Homo sapiens
tcagaaatgttggca

SEQ ID NO: 1903966 - DNA, 15 bp, Homo sapiens
cagaaatgttggcaa

SEQ ID NO: 1903967 - DNA, 15 bp, Homo sapiens
agaaatgttggcaag

SEQ ID NO: 1903968 - DNA, 15 bp, Homo sapiens
gaaatgttggcaaga

SEQ ID NO: 1903969 - DNA, 15 bp, Homo sapiens
aaatgttggcaagac

SEQ ID NO: 1903970 - DNA, 15 bp, Homo sapiens
aatgttggcaagaca

SEQ ID NO: 1903971 - DNA, 15 bp, Homo sapiens
atgttggcaagacat

SEQ ID NO: 1903972 - DNA, 15 bp, Homo sapiens
tgttggcaagacatt

SEQ ID NO: 1903973 - DNA, 15 bp, Homo sapiens
gttggcaagacatta

SEQ ID NO: 1903974 - DNA, 15 bp, Homo sapiens
ttggcaagacattac

SEQ ID NO: 1903975 - DNA, 15 bp, Homo sapiens
tggcaagacattaca

SEQ ID NO: 1903976 - DNA, 15 bp, Homo sapiens
ggcaagacattacat

SEQ ID NO: 1903977 - DNA, 15 bp, Homo sapiens
gcaagacattacatg

SEQ ID NO: 1903978 - DNA, 15 bp, Homo sapiens
caagacattacatgg

SEQ ID NO: 1903979 - DNA, 15 bp, Homo sapiens
aagacattacatggc

SEQ ID NO: 1903980 - DNA, 15 bp, Homo sapiens
agacattacatggca

SEQ ID NO: 1903981 - DNA, 15 bp, Homo sapiens
gacattacatggcaa

SEQ ID NO: 1903982 - DNA, 15 bp, Homo sapiens
acattacatggcaag

SEQ ID NO: 1903983 - DNA, 15 bp, Homo sapiens
cattacatggcaaga

SEQ ID NO: 1903984 - DNA, 15 bp, Homo sapiens
attacatggcaagat

SEQ ID NO: 1903985 - DNA, 15 bp, Homo sapiens
ttacatggcaagatg

SEQ ID NO: 1903986 - DNA, 15 bp, Homo sapiens
tacatggcaagatgt

SEQ ID NO: 1903987 - DNA, 15 bp, Homo sapiens
acatggcaagatgta

SEQ ID NO: 1903988 - DNA, 15 bp, Homo sapiens
catggcaagatgtac

SEQ ID NO: 1903989 - DNA, 15 bp, Homo sapiens
atggcaagatgtact

SEQ ID NO: 1903990 - DNA, 15 bp, Homo sapiens
tggcaagatgtacta

SEQ ID NO: 1903991 - DNA, 15 bp, Homo sapiens
ggcaagatgtactaa

SEQ ID NO: 1903992 - DNA, 15 bp, Homo sapiens
gcaagatgtactaaa

SEQ ID NO: 1903993 - DNA, 15 bp, Homo sapiens
caagatgtactaaaa

SEQ ID NO: 1903994 - DNA, 15 bp, Homo sapiens
aagatgtactaaaat

SEQ ID NO: 1903995 - DNA, 15 bp, Homo sapiens
agatgtactaaaata

SEQ ID NO: 1903996 - DNA, 15 bp, Homo sapiens
gatgtactaaaatat

SEQ ID NO: 1903997 - DNA, 15 bp, Homo sapiens
atgtactaaaatatc

SEQ ID NO: 1903998 - DNA, 15 bp, Homo sapiens
tgtactaaaatatct

SEQ ID NO: 1903999 - DNA, 15 bp, Homo sapiens
gtactaaaatatctg

SEQ ID NO: 1904000 - DNA, 15 bp, Homo sapiens
tactaaaatatctgg

SEQ ID NO: 1904001 - DNA, 15 bp, Homo sapiens
actaaaatatctgga

SEQ ID NO: 1904002 - DNA, 15 bp, Homo sapiens
ctaaaatatctggaa

SEQ ID NO: 1904003 - DNA, 15 bp, Homo sapiens
taaaatatctggaaa

SEQ ID NO: 1904004 - DNA, 15 bp, Homo sapiens
aaaatatctggaaag

SEQ ID NO: 1904005 - DNA, 15 bp, Homo sapiens
aaatatctggaaagc

SEQ ID NO: 1904006 - DNA, 15 bp, Homo sapiens
aatatctggaaagca

SEQ ID NO: 1904007 - DNA, 15 bp, Homo sapiens
atatctggaaagcaa

SEQ ID NO: 1904008 - DNA, 15 bp, Homo sapiens
tatctggaaagcaat

SEQ ID NO: 1904009 - DNA, 15 bp, Homo sapiens
atctggaaagcaatc

SEQ ID NO: 1904010 - DNA, 15 bp, Homo sapiens
tctggaaagcaatcc

SEQ ID NO: 1904011 - DNA, 15 bp, Homo sapiens
ctggaaagcaatcca

SEQ ID NO: 1904012 - DNA, 15 bp, Homo sapiens
tggaaagcaatccag

SEQ ID NO: 1904013 - DNA, 15 bp, Homo sapiens
ggaaagcaatccaga

SEQ ID NO: 1904014 - DNA, 15 bp, Homo sapiens
gaaagcaatccagag

SEQ ID NO: 1904015 - DNA, 15 bp, Homo sapiens
aaagcaatccagagt

SEQ ID NO: 1904016 - DNA, 15 bp, Homo sapiens
aagcaatccagagtg

SEQ ID NO: 1904017 - DNA, 15 bp, Homo sapiens
agcaatccagagtgt

SEQ ID NO: 1904018 - DNA, 15 bp, Homo sapiens
gcaatccagagtgtt

SEQ ID NO: 1904019 - DNA, 15 bp, Homo sapiens
caatccagagtgttg

SEQ ID NO: 1904020 - DNA, 15 bp, Homo sapiens
aatccagagtgttga

SEQ ID NO: 1904021 - DNA, 15 bp, Homo sapiens
atccagagtgttgaa

SEQ ID NO: 1904022 - DNA, 15 bp, Homo sapiens
tccagagtgttgaac

SEQ ID NO: 1904023 - DNA, 15 bp, Homo sapiens
ccagagtgttgaacc

SEQ ID NO: 1904024 - DNA, 15 bp, Homo sapiens
cagagtgttgaacca

SEQ ID NO: 1904025 - DNA, 15 bp, Homo sapiens
agagtgttgaaccag

SEQ ID NO: 1904026 - DNA, 15 bp, Homo sapiens
gagtgttgaaccagg

SEQ ID NO: 1904027 - DNA, 15 bp, Homo sapiens
agtgttgaaccagga

SEQ ID NO: 1904028 - DNA, 15 bp, Homo sapiens
gtgttgaaccaggaa

SEQ ID NO: 1904029 - DNA, 15 bp, Homo sapiens
tgttgaaccaggaac

SEQ ID NO: 1904030 - DNA, 15 bp, Homo sapiens
gttgaaccaggaaca

SEQ ID NO: 1904031 - DNA, 15 bp, Homo sapiens
ttgaaccaggaacat

SEQ ID NO: 1904032 - DNA, 15 bp, Homo sapiens
tgaaccaggaacatt

SEQ ID NO: 1904033 - DNA, 15 bp, Homo sapiens
gaaccaggaacatta

SEQ ID NO: 1904034 - DNA, 15 bp, Homo sapiens
aaccaggaacattag

SEQ ID NO: 1904035 - DNA, 15 bp, Homo sapiens
accaggaacattagt

SEQ ID NO: 1904036 - DNA, 15 bp, Homo sapiens
ccaggaacattagtg

SEQ ID NO: 1904037 - DNA, 15 bp, Homo sapiens
caggaacattagtgg

SEQ ID NO: 1904038 - DNA, 15 bp, Homo sapiens
aggaacattagtgga

SEQ ID NO: 1904039 - DNA, 15 bp, Homo sapiens
ggaacattagtggaa

SEQ ID NO: 1904040 - DNA, 15 bp, Homo sapiens
gaacattagtggaac

SEQ ID NO: 1904041 - DNA, 15 bp, Homo sapiens
aacattagtggaact

SEQ ID NO: 1904042 - DNA, 15 bp, Homo sapiens
acattagtggaactc

SEQ ID NO: 1904043 - DNA, 15 bp, Homo sapiens
cattagtggaactct

SEQ ID NO: 1904044 - DNA, 15 bp, Homo sapiens
attagtggaactctt

SEQ ID NO: 1904045 - DNA, 15 bp, Homo sapiens
ttagtggaactcttg

SEQ ID NO: 1904046 - DNA, 15 bp, Homo sapiens
tagtggaactcttgg

SEQ ID NO: 1904047 - DNA, 15 bp, Homo sapiens
agtggaactcttggg

SEQ ID NO: 1904048 - DNA, 15 bp, Homo sapiens
gtggaactcttggga

SEQ ID NO: 1904049 - DNA, 15 bp, Homo sapiens
tggaactcttgggaa

SEQ ID NO: 1904050 - DNA, 15 bp, Homo sapiens
ggaactcttgggaaa

SEQ ID NO: 1904051 - DNA, 15 bp, Homo sapiens
gaactcttgggaaac

SEQ ID NO: 1904052 - DNA, 15 bp, Homo sapiens
aactcttgggaaaca

SEQ ID NO: 1904053 - DNA, 15 bp, Homo sapiens
actcttgggaaacaa

SEQ ID NO: 1904054 - DNA, 15 bp, Homo sapiens
ctcttgggaaacaaa

SEQ ID NO: 1904055 - DNA, 15 bp, Homo sapiens
tcttgggaaacaaat

SEQ ID NO: 1904056 - DNA, 15 bp, Homo sapiens
cttgggaaacaaatt

SEQ ID NO: 1904057 - DNA, 15 bp, Homo sapiens
ttgggaaacaaattc

SEQ ID NO: 1904058 - DNA, 15 bp, Homo sapiens
tgggaaacaaattct

SEQ ID NO: 1904059 - DNA, 15 bp, Homo sapiens
gggaaacaaattcta

SEQ ID NO: 1904060 - DNA, 15 bp, Homo sapiens
ggaaacaaattctag

SEQ ID NO: 1904061 - DNA, 15 bp, Homo sapiens
gaaacaaattctagc

SEQ ID NO: 1904062 - DNA, 15 bp, Homo sapiens
aaacaaattctagct

SEQ ID NO: 1904063 - DNA, 15 bp, Homo sapiens
aacaaattctagctc

SEQ ID NO: 1904064 - DNA, 15 bp, Homo sapiens
acaaattctagctca

SEQ ID NO: 1904065 - DNA, 15 bp, Homo sapiens
caaattctagctcaa

SEQ ID NO: 1904066 - DNA, 15 bp, Homo sapiens
aaattctagctcaaa

SEQ ID NO: 1904067 - DNA, 15 bp, Homo sapiens
aattctagctcaaat

SEQ ID NO: 1904068 - DNA, 15 bp, Homo sapiens
attctagctcaaatt

SEQ ID NO: 1904069 - DNA, 15 bp, Homo sapiens
ttctagctcaaattc

SEQ ID NO: 1904070 - DNA, 15 bp, Homo sapiens
tctagctcaaattct

SEQ ID NO: 1904071 - DNA, 15 bp, Homo sapiens
ctagctcaaattcta

SEQ ID NO: 1904072 - DNA, 15 bp, Homo sapiens
tagctcaaattctag

SEQ ID NO: 1904073 - DNA, 15 bp, Homo sapiens
agctcaaattctaga

SEQ ID NO: 1904074 - DNA, 15 bp, Homo sapiens
gctcaaattctagaa

SEQ ID NO: 1904075 - DNA, 15 bp, Homo sapiens
ctcaaattctagaaa

SEQ ID NO: 1904076 - DNA, 15 bp, Homo sapiens
tcaaattctagaaac

SEQ ID NO: 1904077 - DNA, 15 bp, Homo sapiens
caaattctagaaaca

SEQ ID NO: 1904078 - DNA, 15 bp, Homo sapiens
aaattctagaaacac

SEQ ID NO: 1904079 - DNA, 15 bp, Homo sapiens
aattctagaaacact

SEQ ID NO: 1904080 - DNA, 15 bp, Homo sapiens
attctagaaacactt

SEQ ID NO: 1904081 - DNA, 15 bp, Homo sapiens
ttctagaaacacttt

SEQ ID NO: 1904082 - DNA, 15 bp, Homo sapiens
tctagaaacactttt

SEQ ID NO: 1904083 - DNA, 15 bp, Homo sapiens
ctagaaacacttttc

SEQ ID NO: 1904084 - DNA, 15 bp, Homo sapiens
tagaaacacttttca

SEQ ID NO: 1904085 - DNA, 15 bp, Homo sapiens
agaaacacttttcat

SEQ ID NO: 1904086 - DNA, 15 bp, Homo sapiens
gaaacacttttcata

SEQ ID NO: 1904087 - DNA, 15 bp, Homo sapiens
aaacacttttcataa

SEQ ID NO: 1904088 - DNA, 15 bp, Homo sapiens
aacacttttcataaa

SEQ ID NO: 1904089 - DNA, 15 bp, Homo sapiens
acacttttcataaaa

SEQ ID NO: 1904090 - DNA, 15 bp, Homo sapiens
cacttttcataaaag

SEQ ID NO: 1904091 - DNA, 15 bp, Homo sapiens
acttttcataaaaga

SEQ ID NO: 1904092 - DNA, 15 bp, Homo sapiens
cttttcataaaagaa

SEQ ID NO: 1904093 - DNA, 15 bp, Homo sapiens
ttttcataaaagaaa

SEQ ID NO: 1904094 - DNA, 15 bp, Homo sapiens
tttcataaaagaaat

SEQ ID NO: 1904095 - DNA, 15 bp, Homo sapiens
ttcataaaagaaatg

SEQ ID NO: 1904096 - DNA, 15 bp, Homo sapiens
tcataaaagaaatgt

SEQ ID NO: 1904097 - DNA, 15 bp, Homo sapiens
cataaaagaaatgtc

SEQ ID NO: 1904098 - DNA, 15 bp, Homo sapiens
ataaaagaaatgtct

SEQ ID NO: 1904099 - DNA, 15 bp, Homo sapiens
taaaagaaatgtcta

SEQ ID NO: 1904100 - DNA, 15 bp, Homo sapiens
aaaagaaatgtctaa

SEQ ID NO: 1904101 - DNA, 15 bp, Homo sapiens
aaagaaatgtctaac

SEQ ID NO: 1904102 - DNA, 15 bp, Homo sapiens
aagaaatgtctaaca

SEQ ID NO: 1904103 - DNA, 15 bp, Homo sapiens
agaaatgtctaacaa

SEQ ID NO: 1904104 - DNA, 15 bp, Homo sapiens
gaaatgtctaacaat

SEQ ID NO: 1904105 - DNA, 15 bp, Homo sapiens
aaatgtctaacaata

SEQ ID NO: 1904106 - DNA, 15 bp, Homo sapiens
aatgtctaacaataa

SEQ ID NO: 1904107 - DNA, 15 bp, Homo sapiens
atgtctaacaataag

SEQ ID NO: 1904108 - DNA, 15 bp, Homo sapiens
tgtctaacaataaga

SEQ ID NO: 1904109 - DNA, 15 bp, Homo sapiens
gtctaacaataagag

SEQ ID NO: 1904110 - DNA, 15 bp, Homo sapiens
tctaacaataagagg

SEQ ID NO: 1904111 - DNA, 15 bp, Homo sapiens
ctaacaataagaggg

SEQ ID NO: 1904112 - DNA, 15 bp, Homo sapiens
taacaataagagggt

SEQ ID NO: 1904113 - DNA, 15 bp, Homo sapiens
aacaataagagggtt

SEQ ID NO: 1904114 - DNA, 15 bp, Homo sapiens
acaataagagggttt

SEQ ID NO: 1904115 - DNA, 15 bp, Homo sapiens
caataagagggtttg

SEQ ID NO: 1904116 - DNA, 15 bp, Homo sapiens
aataagagggtttgt

SEQ ID NO: 1904117 - DNA, 15 bp, Homo sapiens
ataagagggtttgtc

SEQ ID NO: 1904118 - DNA, 15 bp, Homo sapiens
taagagggtttgtca

SEQ ID NO: 1904119 - DNA, 15 bp, Homo sapiens
aagagggtttgtcat

SEQ ID NO: 1904120 - DNA, 15 bp, Homo sapiens
agagggtttgtcatc

SEQ ID NO: 1904121 - DNA, 15 bp, Homo sapiens
gagggtttgtcatca

SEQ ID NO: 1904122 - DNA, 15 bp, Homo sapiens
agggtttgtcatcag

SEQ ID NO: 1904123 - DNA, 15 bp, Homo sapiens
gggtttgtcatcaga

SEQ ID NO: 1904124 - DNA, 15 bp, Homo sapiens
ggtttgtcatcagag

SEQ ID NO: 1904125 - DNA, 15 bp, Homo sapiens
gtttgtcatcagaga

SEQ ID NO: 1904126 - DNA, 15 bp, Homo sapiens
tttgtcatcagagaa

SEQ ID NO: 1904127 - DNA, 15 bp, Homo sapiens
ttgtcatcagagaaa

SEQ ID NO: 1904128 - DNA, 15 bp, Homo sapiens
tgtcatcagagaaag

SEQ ID NO: 1904129 - DNA, 15 bp, Homo sapiens
gtcatcagagaaagt

SEQ ID NO: 1904130 - DNA, 15 bp, Homo sapiens
tcatcagagaaagtg

SEQ ID NO: 1904131 - DNA, 15 bp, Homo sapiens
catcagagaaagtgg

SEQ ID NO: 1904132 - DNA, 15 bp, Homo sapiens
atcagagaaagtggg

SEQ ID NO: 1904133 - DNA, 15 bp, Homo sapiens
tcagagaaagtgggt

SEQ ID NO: 1904134 - DNA, 15 bp, Homo sapiens
cagagaaagtgggtt

SEQ ID NO: 1904135 - DNA, 15 bp, Homo sapiens
agagaaagtgggttc

SEQ ID NO: 1904136 - DNA, 15 bp, Homo sapiens
gagaaagtgggttcc

SEQ ID NO: 1904137 - DNA, 15 bp, Homo sapiens
agaaagtgggttccc

SEQ ID NO: 1904138 - DNA, 15 bp, Homo sapiens
gaaagtgggttcccc

SEQ ID NO: 1904139 - DNA, 15 bp, Homo sapiens
aaagtgggttcccct

SEQ ID NO: 1904140 - DNA, 15 bp, Homo sapiens
aagtgggttcccctc

SEQ ID NO: 1904141 - DNA, 15 bp, Homo sapiens
agtgggttcccctcc

SEQ ID NO: 1904142 - DNA, 15 bp, Homo sapiens
gtgggttcccctcca

SEQ ID NO: 1904143 - DNA, 15 bp, Homo sapiens
tgggttcccctccac

SEQ ID NO: 1904144 - DNA, 15 bp, Homo sapiens
gggttcccctccact

SEQ ID NO: 1904145 - DNA, 15 bp, Homo sapiens
ggttcccctccacta

SEQ ID NO: 1904146 - DNA, 15 bp, Homo sapiens
gttcccctccactaa

SEQ ID NO: 1904147 - DNA, 15 bp, Homo sapiens
ttcccctccactaaa

SEQ ID NO: 1904148 - DNA, 15 bp, Homo sapiens
tcccctccactaaag

SEQ ID NO: 1904149 - DNA, 15 bp, Homo sapiens
cccctccactaaagg

SEQ ID NO: 1904150 - DNA, 15 bp, Homo sapiens
ccctccactaaaggt

SEQ ID NO: 1904151 - DNA, 15 bp, Homo sapiens
cctccactaaaggtg

SEQ ID NO: 1904152 - DNA, 15 bp, Homo sapiens
ctccactaaaggtgt

SEQ ID NO: 1904153 - DNA, 15 bp, Homo sapiens
tccactaaaggtgtt

SEQ ID NO: 1904154 - DNA, 15 bp, Homo sapiens
ccactaaaggtgttt

SEQ ID NO: 1904155 - DNA, 15 bp, Homo sapiens
cactaaaggtgttta

SEQ ID NO: 1904156 - DNA, 15 bp, Homo sapiens
actaaaggtgtttaa

SEQ ID NO: 1904157 - DNA, 15 bp, Homo sapiens
ctaaaggtgtttaac

SEQ ID NO: 1904158 - DNA, 15 bp, Homo sapiens
taaaggtgtttaacc

SEQ ID NO: 1904159 - DNA, 15 bp, Homo sapiens
aaaggtgtttaacca

SEQ ID NO: 1904160 - DNA, 15 bp, Homo sapiens
aaggtgtttaaccaa

SEQ ID NO: 1904161 - DNA, 15 bp, Homo sapiens
aggtgtttaaccaat

SEQ ID NO: 1904162 - DNA, 15 bp, Homo sapiens
ggtgtttaaccaata

SEQ ID NO: 1904163 - DNA, 15 bp, Homo sapiens
gtgtttaaccaatag

SEQ ID NO: 1904164 - DNA, 15 bp, Homo sapiens
tgtttaaccaatagc

SEQ ID NO: 1904165 - DNA, 15 bp, Homo sapiens
gtttaaccaatagct

SEQ ID NO: 1904166 - DNA, 15 bp, Homo sapiens
tttaaccaatagctg

SEQ ID NO: 1904167 - DNA, 15 bp, Homo sapiens
ttaaccaatagctgg

SEQ ID NO: 1904168 - DNA, 15 bp, Homo sapiens
taaccaatagctgga

SEQ ID NO: 1904169 - DNA, 15 bp, Homo sapiens
aaccaatagctggat

SEQ ID NO: 1904170 - DNA, 15 bp, Homo sapiens
accaatagctggata

SEQ ID NO: 1904171 - DNA, 15 bp, Homo sapiens
ccaatagctggataa

SEQ ID NO: 1904172 - DNA, 15 bp, Homo sapiens
caatagctggataac

SEQ ID NO: 1904173 - DNA, 15 bp, Homo sapiens
aatagctggataact

SEQ ID NO: 1904174 - DNA, 15 bp, Homo sapiens
atagctggataactc

SEQ ID NO: 1904175 - DNA, 15 bp, Homo sapiens
tagctggataactct

SEQ ID NO: 1904176 - DNA, 15 bp, Homo sapiens
agctggataactctt

SEQ ID NO: 1904177 - DNA, 15 bp, Homo sapiens
gctggataactcttc

SEQ ID NO: 1904178 - DNA, 15 bp, Homo sapiens
ctggataactcttca

SEQ ID NO: 1904179 - DNA, 15 bp, Homo sapiens
tggataactcttcat

SEQ ID NO: 1904180 - DNA, 15 bp, Homo sapiens
ggataactcttcatt

SEQ ID NO: 1904181 - DNA, 15 bp, Homo sapiens
gataactcttcattt

SEQ ID NO: 1904182 - DNA, 15 bp, Homo sapiens
ataactcttcattta

SEQ ID NO: 1904183 - DNA, 15 bp, Homo sapiens
taactcttcatttac

SEQ ID NO: 1904184 - DNA, 15 bp, Homo sapiens
aactcttcatttaca

SEQ ID NO: 1904185 - DNA, 15 bp, Homo sapiens
actcttcatttacaa

SEQ ID NO: 1904186 - DNA, 15 bp, Homo sapiens
ctcttcatttacaat

SEQ ID NO: 1904187 - DNA, 15 bp, Homo sapiens
tcttcatttacaata

SEQ ID NO: 1904188 - DNA, 15 bp, Homo sapiens
cttcatttacaatat

SEQ ID NO: 1904189 - DNA, 15 bp, Homo sapiens
ttcatttacaatatt

SEQ ID NO: 1904190 - DNA, 15 bp, Homo sapiens
tcatttacaatattt

SEQ ID NO: 1904191 - DNA, 15 bp, Homo sapiens
catttacaatatttc

SEQ ID NO: 1904192 - DNA, 15 bp, Homo sapiens
atttacaatatttca

SEQ ID NO: 1904193 - DNA, 15 bp, Homo sapiens
tttacaatatttcaa

SEQ ID NO: 1904194 - DNA, 15 bp, Homo sapiens
ttacaatatttcaaa

SEQ ID NO: 1904195 - DNA, 15 bp, Homo sapiens
tacaatatttcaaag

SEQ ID NO: 1904196 - DNA, 15 bp, Homo sapiens
acaatatttcaaaga

SEQ ID NO: 1904197 - DNA, 15 bp, Homo sapiens
caatatttcaaagaa

SEQ ID NO: 1904198 - DNA, 15 bp, Homo sapiens
aatatttcaaagaaa

SEQ ID NO: 1904199 - DNA, 15 bp, Homo sapiens
atatttcaaagaaat

SEQ ID NO: 1904200 - DNA, 15 bp, Homo sapiens
tatttcaaagaaatt

SEQ ID NO: 1904201 - DNA, 15 bp, Homo sapiens
atttcaaagaaattg

SEQ ID NO: 1904202 - DNA, 15 bp, Homo sapiens
tttcaaagaaattga

SEQ ID NO: 1904203 - DNA, 15 bp, Homo sapiens
ttcaaagaaattgat

SEQ ID NO: 1904204 - DNA, 15 bp, Homo sapiens
tcaaagaaattgatc

SEQ ID NO: 1904205 - DNA, 15 bp, Homo sapiens
caaagaaattgatca

SEQ ID NO: 1904206 - DNA, 15 bp, Homo sapiens
aaagaaattgatcaa

SEQ ID NO: 1904207 - DNA, 15 bp, Homo sapiens
aagaaattgatcaaa

SEQ ID NO: 1904208 - DNA, 15 bp, Homo sapiens
agaaattgatcaaaa

SEQ ID NO: 1904209 - DNA, 15 bp, Homo sapiens
gaaattgatcaaaaa

SEQ ID NO: 1904210 - DNA, 15 bp, Homo sapiens
aaattgatcaaaaaa

SEQ ID NO: 1904211 - DNA, 15 bp, Homo sapiens
aattgatcaaaaaaa

SEQ ID NO: 1904212 - DNA, 15 bp, Homo sapiens
attgatcaaaaaaat

SEQ ID NO: 1904213 - DNA, 15 bp, Homo sapiens
ttgatcaaaaaaatg

SEQ ID NO: 1904214 - DNA, 15 bp, Homo sapiens
tgatcaaaaaaatgc

SEQ ID NO: 1904215 - DNA, 15 bp, Homo sapiens
gatcaaaaaaatgca

SEQ ID NO: 1904216 - DNA, 15 bp, Homo sapiens
atcaaaaaaatgcag

SEQ ID NO: 1904217 - DNA, 15 bp, Homo sapiens
tcaaaaaaatgcagg

SEQ ID NO: 1904218 - DNA, 15 bp, Homo sapiens
caaaaaaatgcaggg

SEQ ID NO: 1904219 - DNA, 15 bp, Homo sapiens
aaaaaaatgcagggg

SEQ ID NO: 1904220 - DNA, 15 bp, Homo sapiens
aaaaaatgcagggga

SEQ ID NO: 1904221 - DNA, 15 bp, Homo sapiens
aaaaatgcaggggag

SEQ ID NO: 1904222 - DNA, 15 bp, Homo sapiens
aaaatgcaggggaga

SEQ ID NO: 1904223 - DNA, 15 bp, Homo sapiens
aaatgcaggggagaa

SEQ ID NO: 1904224 - DNA, 15 bp, Homo sapiens
aatgcaggggagaaa

SEQ ID NO: 1904225 - DNA, 15 bp, Homo sapiens
atgcaggggagaaaa

SEQ ID NO: 1904226 - DNA, 15 bp, Homo sapiens
tgcaggggagaaaaa

SEQ ID NO: 1904227 - DNA, 15 bp, Homo sapiens
gcaggggagaaaaat

SEQ ID NO: 1904228 - DNA, 15 bp, Homo sapiens
caggggagaaaaatg

SEQ ID NO: 1904229 - DNA, 15 bp, Homo sapiens
aggggagaaaaatga

SEQ ID NO: 1904230 - DNA, 15 bp, Homo sapiens
ggggagaaaaatgac

SEQ ID NO: 1904231 - DNA, 15 bp, Homo sapiens
gggagaaaaatgact

SEQ ID NO: 1904232 - DNA, 15 bp, Homo sapiens
agaaaaatgacttct

SEQ ID NO: 1904233 - DNA, 15 bp, Homo sapiens
gaaaaatgacttcta

SEQ ID NO: 1904234 - DNA, 15 bp, Homo sapiens
aaaaatgacttctaa

SEQ ID NO: 1904235 - DNA, 15 bp, Homo sapiens
aaaatgacttctaag

SEQ ID NO: 1904236 - DNA, 15 bp, Homo sapiens
aaatgacttctaagg

SEQ ID NO: 1904237 - DNA, 15 bp, Homo sapiens
aatgacttctaaggg

SEQ ID NO: 1904238 - DNA, 15 bp, Homo sapiens
atgacttctaaggga

SEQ ID NO: 1904239 - DNA, 15 bp, Homo sapiens
tgacttctaagggac

SEQ ID NO: 1904240 - DNA, 15 bp, Homo sapiens
gacttctaagggact

SEQ ID NO: 1904241 - DNA, 15 bp, Homo sapiens
acttctaagggactt

SEQ ID NO: 1904242 - DNA, 15 bp, Homo sapiens
cttctaagggactta

SEQ ID NO: 1904243 - DNA, 15 bp, Homo sapiens
ttctaagggacttag

SEQ ID NO: 1904244 - DNA, 15 bp, Homo sapiens
tctaagggacttagg

SEQ ID NO: 1904245 - DNA, 15 bp, Homo sapiens
ctaagggacttaggg

SEQ ID NO: 1904246 - DNA, 15 bp, Homo sapiens
taagggacttagggg

SEQ ID NO: 1904247 - DNA, 15 bp, Homo sapiens
aagggacttaggggt

SEQ ID NO: 1904248 - DNA, 15 bp, Homo sapiens
agggacttaggggtc

SEQ ID NO: 1904249 - DNA, 15 bp, Homo sapiens
gggacttaggggtct

SEQ ID NO: 1904250 - DNA, 15 bp, Homo sapiens
ggacttaggggtctc

SEQ ID NO: 1904251 - DNA, 15 bp, Homo sapiens
gacttaggggtctca

SEQ ID NO: 1904252 - DNA, 15 bp, Homo sapiens
acttaggggtctcag

SEQ ID NO: 1904253 - DNA, 15 bp, Homo sapiens
cttaggggtctcaga

SEQ ID NO: 1904254 - DNA, 15 bp, Homo sapiens
ttaggggtctcagat

SEQ ID NO: 1904255 - DNA, 15 bp, Homo sapiens
taggggtctcagatg

SEQ ID NO: 1904256 - DNA, 15 bp, Homo sapiens
aggggtctcagatga

SEQ ID NO: 1904257 - DNA, 15 bp, Homo sapiens
ggggtctcagatgac

SEQ ID NO: 1904258 - DNA, 15 bp, Homo sapiens
gggtctcagatgaca

SEQ ID NO: 1904259 - DNA, 15 bp, Homo sapiens
ggtctcagatgacaa

SEQ ID NO: 1904260 - DNA, 15 bp, Homo sapiens
gtctcagatgacaaa

SEQ ID NO: 1904261 - DNA, 15 bp, Homo sapiens
tctcagatgacaaag

SEQ ID NO: 1904262 - DNA, 15 bp, Homo sapiens
ctcagatgacaaagg

SEQ ID NO: 1904263 - DNA, 15 bp, Homo sapiens
tcagatgacaaaggg

SEQ ID NO: 1904264 - DNA, 15 bp, Homo sapiens
cagatgacaaagggc

SEQ ID NO: 1904265 - DNA, 15 bp, Homo sapiens
agatgacaaagggct

SEQ ID NO: 1904266 - DNA, 15 bp, Homo sapiens
gatgacaaagggctt

SEQ ID NO: 1904267 - DNA, 15 bp, Homo sapiens
atgacaaagggcttc

SEQ ID NO: 1904268 - DNA, 15 bp, Homo sapiens
tgacaaagggcttca

SEQ ID NO: 1904269 - DNA, 15 bp, Homo sapiens
gacaaagggcttcat

SEQ ID NO: 1904270 - DNA, 15 bp, Homo sapiens
acaaagggcttcata

SEQ ID NO: 1904271 - DNA, 15 bp, Homo sapiens
caaagggcttcatat

SEQ ID NO: 1904272 - DNA, 15 bp, Homo sapiens
aaagggcttcatatg

SEQ ID NO: 1904273 - DNA, 15 bp, Homo sapiens
aagggcttcatatgt

SEQ ID NO: 1904274 - DNA, 15 bp, Homo sapiens
agggcttcatatgtc

SEQ ID NO: 1904275 - DNA, 15 bp, Homo sapiens
gggcttcatatgtca

SEQ ID NO: 1904276 - DNA, 15 bp, Homo sapiens
ggcttcatatgtcac

SEQ ID NO: 1904277 - DNA, 15 bp, Homo sapiens
gcttcatatgtcacc

SEQ ID NO: 1904278 - DNA, 15 bp, Homo sapiens
cttcatatgtcacct

SEQ ID NO: 1904279 - DNA, 15 bp, Homo sapiens
ttcatatgtcaccta

SEQ ID NO: 1904280 - DNA, 15 bp, Homo sapiens
tcatatgtcacctaa

SEQ ID NO: 1904281 - DNA, 15 bp, Homo sapiens
catatgtcacctaac

SEQ ID NO: 1904282 - DNA, 15 bp, Homo sapiens
atatgtcacctaaca

SEQ ID NO: 1904283 - DNA, 15 bp, Homo sapiens
tatgtcacctaacag

SEQ ID NO: 1904284 - DNA, 15 bp, Homo sapiens
atgtcacctaacagt

SEQ ID NO: 1904285 - DNA, 15 bp, Homo sapiens
tgtcacctaacagta

SEQ ID NO: 1904286 - DNA, 15 bp, Homo sapiens
gtcacctaacagtaa

SEQ ID NO: 1904287 - DNA, 15 bp, Homo sapiens
tcacctaacagtaaa

SEQ ID NO: 1904288 - DNA, 15 bp, Homo sapiens
cacctaacagtaaat

SEQ ID NO: 1904289 - DNA, 15 bp, Homo sapiens
acctaacagtaaata

SEQ ID NO: 1904290 - DNA, 15 bp, Homo sapiens
cctaacagtaaatag

SEQ ID NO: 1904291 - DNA, 15 bp, Homo sapiens
ctaacagtaaatagg

SEQ ID NO: 1904292 - DNA, 15 bp, Homo sapiens
taacagtaaataggt

SEQ ID NO: 1904293 - DNA, 15 bp, Homo sapiens
aacagtaaataggtg

SEQ ID NO: 1904294 - DNA, 15 bp, Homo sapiens
acagtaaataggtgc

SEQ ID NO: 1904295 - DNA, 15 bp, Homo sapiens
cagtaaataggtgct

SEQ ID NO: 1904296 - DNA, 15 bp, Homo sapiens
agtaaataggtgctt

SEQ ID NO: 1904297 - DNA, 15 bp, Homo sapiens
gtaaataggtgctta

SEQ ID NO: 1904298 - DNA, 15 bp, Homo sapiens
taaataggtgcttat

SEQ ID NO: 1904299 - DNA, 15 bp, Homo sapiens
aaataggtgcttata

SEQ ID NO: 1904300 - DNA, 15 bp, Homo sapiens
aataggtgcttatag

SEQ ID NO: 1904301 - DNA, 15 bp, Homo sapiens
ataggtgcttatagt

SEQ ID NO: 1904302 - DNA, 15 bp, Homo sapiens
taggtgcttatagta

SEQ ID NO: 1904303 - DNA, 15 bp, Homo sapiens
aggtgcttatagtaa

SEQ ID NO: 1904304 - DNA, 15 bp, Homo sapiens
ggtgcttatagtaat

SEQ ID NO: 1904305 - DNA, 15 bp, Homo sapiens
gtgcttatagtaatt

SEQ ID NO: 1904306 - DNA, 15 bp, Homo sapiens
tgcttatagtaatta

SEQ ID NO: 1904307 - DNA, 15 bp, Homo sapiens
gcttatagtaattat

SEQ ID NO: 1904308 - DNA, 15 bp, Homo sapiens
cttatagtaattatt

SEQ ID NO: 1904309 - DNA, 15 bp, Homo sapiens
ttatagtaattattt

SEQ ID NO: 1904310 - DNA, 15 bp, Homo sapiens
tatagtaattatttt

SEQ ID NO: 1904311 - DNA, 15 bp, Homo sapiens
atagtaattattttt

SEQ ID NO: 1904312 - DNA, 15 bp, Homo sapiens
tagtaattattttta

SEQ ID NO: 1904313 - DNA, 15 bp, Homo sapiens
agtaattatttttag

SEQ ID NO: 1904314 - DNA, 15 bp, Homo sapiens
gtaattatttttagt

SEQ ID NO: 1904315 - DNA, 15 bp, Homo sapiens
taattatttttagta

SEQ ID NO: 1904316 - DNA, 15 bp, Homo sapiens
aattatttttagtaa

SEQ ID NO: 1904317 - DNA, 15 bp, Homo sapiens
attatttttagtaaa

SEQ ID NO: 1904318 - DNA, 15 bp, Homo sapiens
ttatttttagtaaat

SEQ ID NO: 1904319 - DNA, 15 bp, Homo sapiens
tatttttagtaaatt

SEQ ID NO: 1904320 - DNA, 15 bp, Homo sapiens
atttttagtaaattc

SEQ ID NO: 1904321 - DNA, 15 bp, Homo sapiens
tttttagtaaattcc

SEQ ID NO: 1904322 - DNA, 15 bp, Homo sapiens
ttttagtaaattcca

SEQ ID NO: 1904323 - DNA, 15 bp, Homo sapiens
tttagtaaattccat

SEQ ID NO: 1904324 - DNA, 15 bp, Homo sapiens
ttagtaaattccata

SEQ ID NO: 1904325 - DNA, 15 bp, Homo sapiens
tagtaaattccataa

SEQ ID NO: 1904326 - DNA, 15 bp, Homo sapiens
agtaaattccataaa

SEQ ID NO: 1904327 - DNA, 15 bp, Homo sapiens
gtaaattccataaag

SEQ ID NO: 1904328 - DNA, 15 bp, Homo sapiens
taaattccataaagt

SEQ ID NO: 1904329 - DNA, 15 bp, Homo sapiens
aaattccataaagta

SEQ ID NO: 1904330 - DNA, 15 bp, Homo sapiens
aattccataaagtat

SEQ ID NO: 1904331 - DNA, 15 bp, Homo sapiens
attccataaagtata

SEQ ID NO: 1904332 - DNA, 15 bp, Homo sapiens
ttccataaagtataa

SEQ ID NO: 1904333 - DNA, 15 bp, Homo sapiens
tccataaagtataaa

SEQ ID NO: 1904334 - DNA, 15 bp, Homo sapiens
ccataaagtataaat

SEQ ID NO: 1904335 - DNA, 15 bp, Homo sapiens
cataaagtataaata

SEQ ID NO: 1904336 - DNA, 15 bp, Homo sapiens
ataaagtataaatag

SEQ ID NO: 1904337 - DNA, 15 bp, Homo sapiens
taaagtataaatagt

SEQ ID NO: 1904338 - DNA, 15 bp, Homo sapiens
aaagtataaatagtc

SEQ ID NO: 1904339 - DNA, 15 bp, Homo sapiens
aagtataaatagtca

SEQ ID NO: 1904340 - DNA, 15 bp, Homo sapiens
agtataaatagtcat

SEQ ID NO: 1904341 - DNA, 15 bp, Homo sapiens
gtataaatagtcatg

SEQ ID NO: 1904342 - DNA, 15 bp, Homo sapiens
tataaatagtcatgg

SEQ ID NO: 1904343 - DNA, 15 bp, Homo sapiens
ataaatagtcatggc

SEQ ID NO: 1904344 - DNA, 15 bp, Homo sapiens
taaatagtcatggca

SEQ ID NO: 1904345 - DNA, 15 bp, Homo sapiens
aaatagtcatggcat

SEQ ID NO: 1904346 - DNA, 15 bp, Homo sapiens
aatagtcatggcatg

SEQ ID NO: 1904347 - DNA, 15 bp, Homo sapiens
atagtcatggcatga

SEQ ID NO: 1904348 - DNA, 15 bp, Homo sapiens
tagtcatggcatgag

SEQ ID NO: 1904349 - DNA, 15 bp, Homo sapiens
agtcatggcatgagc

SEQ ID NO: 1904350 - DNA, 15 bp, Homo sapiens
gtcatggcatgagct

SEQ ID NO: 1904351 - DNA, 15 bp, Homo sapiens
tcatggcatgagctt

SEQ ID NO: 1904352 - DNA, 15 bp, Homo sapiens
catggcatgagctta

SEQ ID NO: 1904353 - DNA, 15 bp, Homo sapiens
atggcatgagcttag

SEQ ID NO: 1904354 - DNA, 15 bp, Homo sapiens
tggcatgagcttagg

SEQ ID NO: 1904355 - DNA, 15 bp, Homo sapiens
ggcatgagcttaggt

SEQ ID NO: 1904356 - DNA, 15 bp, Homo sapiens
gcatgagcttaggtt

SEQ ID NO: 1904357 - DNA, 15 bp, Homo sapiens
catgagcttaggttg

SEQ ID NO: 1904358 - DNA, 15 bp, Homo sapiens
atgagcttaggttga

SEQ ID NO: 1904359 - DNA, 15 bp, Homo sapiens
tgagcttaggttgat

SEQ ID NO: 1904360 - DNA, 15 bp, Homo sapiens
gagcttaggttgatt

SEQ ID NO: 1904361 - DNA, 15 bp, Homo sapiens
agcttaggttgattt

SEQ ID NO: 1904362 - DNA, 15 bp, Homo sapiens
gcttaggttgatttg

SEQ ID NO: 1904363 - DNA, 15 bp, Homo sapiens
cttaggttgatttgt

SEQ ID NO: 1904364 - DNA, 15 bp, Homo sapiens
ttaggttgatttgtc

SEQ ID NO: 1904365 - DNA, 15 bp, Homo sapiens
taggttgatttgtca

SEQ ID NO: 1904366 - DNA, 15 bp, Homo sapiens
aggttgatttgtcat

SEQ ID NO: 1904367 - DNA, 15 bp, Homo sapiens
ggttgatttgtcatc

SEQ ID NO: 1904368 - DNA, 15 bp, Homo sapiens
gttgatttgtcatct

SEQ ID NO: 1904369 - DNA, 15 bp, Homo sapiens
ttgatttgtcatcta

SEQ ID NO: 1904370 - DNA, 15 bp, Homo sapiens
tgatttgtcatctag

SEQ ID NO: 1904371 - DNA, 15 bp, Homo sapiens
gatttgtcatctagt

SEQ ID NO: 1904372 - DNA, 15 bp, Homo sapiens
atttgtcatctagtt

SEQ ID NO: 1904373 - DNA, 15 bp, Homo sapiens
tttgtcatctagttt

SEQ ID NO: 1904374 - DNA, 15 bp, Homo sapiens
ttgtcatctagtttc

SEQ ID NO: 1904375 - DNA, 15 bp, Homo sapiens
tgtcatctagtttcc

SEQ ID NO: 1904376 - DNA, 15 bp, Homo sapiens
gtcatctagtttccc

SEQ ID NO: 1904377 - DNA, 15 bp, Homo sapiens
tcatctagtttccct

SEQ ID NO: 1904378 - DNA, 15 bp, Homo sapiens
catctagtttccctt

SEQ ID NO: 1904379 - DNA, 15 bp, Homo sapiens
atctagtttccctta

SEQ ID NO: 1904380 - DNA, 15 bp, Homo sapiens
tctagtttcccttaa

SEQ ID NO: 1904381 - DNA, 15 bp, Homo sapiens
ctagtttcccttaat

SEQ ID NO: 1904382 - DNA, 15 bp, Homo sapiens
tagtttcccttaata

SEQ ID NO: 1904383 - DNA, 15 bp, Homo sapiens
agtttcccttaataa

SEQ ID NO: 1904384 - DNA, 15 bp, Homo sapiens
gtttcccttaataac

SEQ ID NO: 1904385 - DNA, 15 bp, Homo sapiens
tttcccttaataacc

SEQ ID NO: 1904386 - DNA, 15 bp, Homo sapiens
ttcccttaataaccc

SEQ ID NO: 1904387 - DNA, 15 bp, Homo sapiens
tcccttaataaccct

SEQ ID NO: 1904388 - DNA, 15 bp, Homo sapiens
cccttaataaccctg

SEQ ID NO: 1904389 - DNA, 15 bp, Homo sapiens
ccttaataaccctgt

SEQ ID NO: 1904390 - DNA, 15 bp, Homo sapiens
cttaataaccctgtt

SEQ ID NO: 1904391 - DNA, 15 bp, Homo sapiens
ttaataaccctgttt

SEQ ID NO: 1904392 - DNA, 15 bp, Homo sapiens
taataaccctgttta

SEQ ID NO: 1904393 - DNA, 15 bp, Homo sapiens
aataaccctgtttac

SEQ ID NO: 1904394 - DNA, 15 bp, Homo sapiens
ataaccctgtttacc

SEQ ID NO: 1904395 - DNA, 15 bp, Homo sapiens
taaccctgtttaccc

SEQ ID NO: 1904396 - DNA, 15 bp, Homo sapiens
aaccctgtttaccca

SEQ ID NO: 1904397 - DNA, 15 bp, Homo sapiens
accctgtttacccag

SEQ ID NO: 1904398 - DNA, 15 bp, Homo sapiens
ccctgtttacccagt

SEQ ID NO: 1904399 - DNA, 15 bp, Homo sapiens
cctgtttacccagtg

SEQ ID NO: 1904400 - DNA, 15 bp, Homo sapiens
ctgtttacccagtga

SEQ ID NO: 1904401 - DNA, 15 bp, Homo sapiens
tgtttacccagtgat

SEQ ID NO: 1904402 - DNA, 15 bp, Homo sapiens
gtttacccagtgatg

SEQ ID NO: 1904403 - DNA, 15 bp, Homo sapiens
tttacccagtgatga

SEQ ID NO: 1904404 - DNA, 15 bp, Homo sapiens
ttacccagtgatgag

SEQ ID NO: 1904405 - DNA, 15 bp, Homo sapiens
tacccagtgatgagt

SEQ ID NO: 1904406 - DNA, 15 bp, Homo sapiens
acccagtgatgagta

SEQ ID NO: 1904407 - DNA, 15 bp, Homo sapiens
cccagtgatgagtaa

SEQ ID NO: 1904408 - DNA, 15 bp, Homo sapiens
ccagtgatgagtaaa

SEQ ID NO: 1904409 - DNA, 15 bp, Homo sapiens
cagtgatgagtaaaa

SEQ ID NO: 1904410 - DNA, 15 bp, Homo sapiens
agtgatgagtaaaat

SEQ ID NO: 1904411 - DNA, 15 bp, Homo sapiens
gtgatgagtaaaata

SEQ ID NO: 1904412 - DNA, 15 bp, Homo sapiens
tgatgagtaaaatac

SEQ ID NO: 1904413 - DNA, 15 bp, Homo sapiens
gatgagtaaaataca

SEQ ID NO: 1904414 - DNA, 15 bp, Homo sapiens
atgagtaaaatacag

SEQ ID NO: 1904415 - DNA, 15 bp, Homo sapiens
tgagtaaaatacaga

SEQ ID NO: 1904416 - DNA, 15 bp, Homo sapiens
gagtaaaatacagat

SEQ ID NO: 1904417 - DNA, 15 bp, Homo sapiens
agtaaaatacagatc

SEQ ID NO: 1904418 - DNA, 15 bp, Homo sapiens
gtaaaatacagatct

SEQ ID NO: 1904419 - DNA, 15 bp, Homo sapiens
taaaatacagatcta

SEQ ID NO: 1904420 - DNA, 15 bp, Homo sapiens
aaaatacagatctag

SEQ ID NO: 1904421 - DNA, 15 bp, Homo sapiens
aaatacagatctagg

SEQ ID NO: 1904422 - DNA, 15 bp, Homo sapiens
aatacagatctaggg

SEQ ID NO: 1904423 - DNA, 15 bp, Homo sapiens
atacagatctaggga

SEQ ID NO: 1904424 - DNA, 15 bp, Homo sapiens
tacagatctagggat

SEQ ID NO: 1904425 - DNA, 15 bp, Homo sapiens
acagatctagggatg

SEQ ID NO: 1904426 - DNA, 15 bp, Homo sapiens
cagatctagggatgt

SEQ ID NO: 1904427 - DNA, 15 bp, Homo sapiens
agatctagggatgtg

SEQ ID NO: 1904428 - DNA, 15 bp, Homo sapiens
gatctagggatgtgt

SEQ ID NO: 1904429 - DNA, 15 bp, Homo sapiens
atctagggatgtgtc

SEQ ID NO: 1904430 - DNA, 15 bp, Homo sapiens
tctagggatgtgtca

SEQ ID NO: 1904431 - DNA, 15 bp, Homo sapiens
ctagggatgtgtcac

SEQ ID NO: 1904432 - DNA, 15 bp, Homo sapiens
tagggatgtgtcaca

SEQ ID NO: 1904433 - DNA, 15 bp, Homo sapiens
agggatgtgtcacat

SEQ ID NO: 1904434 - DNA, 15 bp, Homo sapiens
gggatgtgtcacatc

SEQ ID NO: 1904435 - DNA, 15 bp, Homo sapiens
ggatgtgtcacatca

SEQ ID NO: 1904436 - DNA, 15 bp, Homo sapiens
gatgtgtcacatcat

SEQ ID NO: 1904437 - DNA, 15 bp, Homo sapiens
atgtgtcacatcatc

SEQ ID NO: 1904438 - DNA, 15 bp, Homo sapiens
tgtgtcacatcatct

SEQ ID NO: 1904439 - DNA, 15 bp, Homo sapiens
gtgtcacatcatctg

SEQ ID NO: 1904440 - DNA, 15 bp, Homo sapiens
tgtcacatcatctga

SEQ ID NO: 1904441 - DNA, 15 bp, Homo sapiens
gtcacatcatctgaa

SEQ ID NO: 1904442 - DNA, 15 bp, Homo sapiens
tcacatcatctgaaa

SEQ ID NO: 1904443 - DNA, 15 bp, Homo sapiens
cacatcatctgaaat

SEQ ID NO: 1904444 - DNA, 15 bp, Homo sapiens
acatcatctgaaatt

SEQ ID NO: 1904445 - DNA, 15 bp, Homo sapiens
catcatctgaaatta

SEQ ID NO: 1904446 - DNA, 15 bp, Homo sapiens
atcatctgaaattat

SEQ ID NO: 1904447 - DNA, 15 bp, Homo sapiens
tcatctgaaattatt

SEQ ID NO: 1904448 - DNA, 15 bp, Homo sapiens
catctgaaattattt

SEQ ID NO: 1904449 - DNA, 15 bp, Homo sapiens
atctgaaattatttc

SEQ ID NO: 1904450 - DNA, 15 bp, Homo sapiens
tctgaaattatttcc

SEQ ID NO: 1904451 - DNA, 15 bp, Homo sapiens
ctgaaattatttccc

SEQ ID NO: 1904452 - DNA, 15 bp, Homo sapiens
tgaaattatttcccc

SEQ ID NO: 1904453 - DNA, 15 bp, Homo sapiens
gaaattatttcccca

SEQ ID NO: 1904454 - DNA, 15 bp, Homo sapiens
aaattatttccccag

SEQ ID NO: 1904455 - DNA, 15 bp, Homo sapiens
aattatttccccagc

SEQ ID NO: 1904456 - DNA, 15 bp, Homo sapiens
attatttccccagct

SEQ ID NO: 1904457 - DNA, 15 bp, Homo sapiens
ttatttccccagctc

SEQ ID NO: 1904458 - DNA, 15 bp, Homo sapiens
tatttccccagctcc

SEQ ID NO: 1904459 - DNA, 15 bp, Homo sapiens
atttccccagctcca

SEQ ID NO: 1904460 - DNA, 15 bp, Homo sapiens
tttccccagctccat

SEQ ID NO: 1904461 - DNA, 15 bp, Homo sapiens
ttccccagctccatg

SEQ ID NO: 1904462 - DNA, 15 bp, Homo sapiens
tccccagctccatga

SEQ ID NO: 1904463 - DNA, 15 bp, Homo sapiens
ccccagctccatgat

SEQ ID NO: 1904464 - DNA, 15 bp, Homo sapiens
cccagctccatgatt

SEQ ID NO: 1904465 - DNA, 15 bp, Homo sapiens
ccagctccatgattc

SEQ ID NO: 1904466 - DNA, 15 bp, Homo sapiens
cagctccatgattca

SEQ ID NO: 1904467 - DNA, 15 bp, Homo sapiens
agctccatgattcat

SEQ ID NO: 1904468 - DNA, 15 bp, Homo sapiens
gctccatgattcatc

SEQ ID NO: 1904469 - DNA, 15 bp, Homo sapiens
ctccatgattcatcg

SEQ ID NO: 1904470 - DNA, 15 bp, Homo sapiens
tccatgattcatcgt

SEQ ID NO: 1904471 - DNA, 15 bp, Homo sapiens
ccatgattcatcgtg

SEQ ID NO: 1904472 - DNA, 15 bp, Homo sapiens
catgattcatcgtgg

SEQ ID NO: 1904473 - DNA, 15 bp, Homo sapiens
atgattcatcgtgga

SEQ ID NO: 1904474 - DNA, 15 bp, Homo sapiens
tgattcatcgtggac

SEQ ID NO: 1904475 - DNA, 15 bp, Homo sapiens
gattcatcgtggaca

SEQ ID NO: 1904476 - DNA, 15 bp, Homo sapiens
attcatcgtggacag

SEQ ID NO: 1904477 - DNA, 15 bp, Homo sapiens
ttcatcgtggacagc

SEQ ID NO: 1904478 - DNA, 15 bp, Homo sapiens
tcatcgtggacagct

SEQ ID NO: 1904479 - DNA, 15 bp, Homo sapiens
catcgtggacagctc

SEQ ID NO: 1904480 - DNA, 15 bp, Homo sapiens
atcgtggacagctct

SEQ ID NO: 1904481 - DNA, 15 bp, Homo sapiens
tcgtggacagctcta

SEQ ID NO: 1904482 - DNA, 15 bp, Homo sapiens
cgtggacagctctag

SEQ ID NO: 1904483 - DNA, 15 bp, Homo sapiens
gtggacagctctaga

SEQ ID NO: 1904484 - DNA, 15 bp, Homo sapiens
tggacagctctagac

SEQ ID NO: 1904485 - DNA, 15 bp, Homo sapiens
ggacagctctagaca

SEQ ID NO: 1904486 - DNA, 15 bp, Homo sapiens
gacagctctagacaa

SEQ ID NO: 1904487 - DNA, 15 bp, Homo sapiens
acagctctagacaaa

SEQ ID NO: 1904488 - DNA, 15 bp, Homo sapiens
cagctctagacaaat

SEQ ID NO: 1904489 - DNA, 15 bp, Homo sapiens
agctctagacaaatg

SEQ ID NO: 1904490 - DNA, 15 bp, Homo sapiens
gctctagacaaatgc

SEQ ID NO: 1904491 - DNA, 15 bp, Homo sapiens
ctctagacaaatgct

SEQ ID NO: 1904492 - DNA, 15 bp, Homo sapiens
tctagacaaatgctc

SEQ ID NO: 1904493 - DNA, 15 bp, Homo sapiens
ctagacaaatgctct

SEQ ID NO: 1904494 - DNA, 15 bp, Homo sapiens
tagacaaatgctctc

SEQ ID NO: 1904495 - DNA, 15 bp, Homo sapiens
agacaaatgctctca

SEQ ID NO: 1904496 - DNA, 15 bp, Homo sapiens
gacaaatgctctcaa

SEQ ID NO: 1904497 - DNA, 15 bp, Homo sapiens
acaaatgctctcaag

SEQ ID NO: 1904498 - DNA, 15 bp, Homo sapiens
caaatgctctcaagt

SEQ ID NO: 1904499 - DNA, 15 bp, Homo sapiens
aaatgctctcaagtg

SEQ ID NO: 1904500 - DNA, 15 bp, Homo sapiens
aatgctctcaagtgg

SEQ ID NO: 1904501 - DNA, 15 bp, Homo sapiens
atgctctcaagtggt

SEQ ID NO: 1904502 - DNA, 15 bp, Homo sapiens
tgctctcaagtggta

SEQ ID NO: 1904503 - DNA, 15 bp, Homo sapiens
gctctcaagtggtag

SEQ ID NO: 1904504 - DNA, 15 bp, Homo sapiens
ctctcaagtggtagc

SEQ ID NO: 1904505 - DNA, 15 bp, Homo sapiens
tctcaagtggtagct

SEQ ID NO: 1904506 - DNA, 15 bp, Homo sapiens
ctcaagtggtagctg

SEQ ID NO: 1904507 - DNA, 15 bp, Homo sapiens
tcaagtggtagctgt

SEQ ID NO: 1904508 - DNA, 15 bp, Homo sapiens
caagtggtagctgtc

SEQ ID NO: 1904509 - DNA, 15 bp, Homo sapiens
aagtggtagctgtcc

SEQ ID NO: 1904510 - DNA, 15 bp, Homo sapiens
agtggtagctgtccc

SEQ ID NO: 1904511 - DNA, 15 bp, Homo sapiens
gtggtagctgtccct

SEQ ID NO: 1904512 - DNA, 15 bp, Homo sapiens
tggtagctgtccctg

SEQ ID NO: 1904513 - DNA, 15 bp, Homo sapiens
ggtagctgtccctgg

SEQ ID NO: 1904514 - DNA, 15 bp, Homo sapiens
gtagctgtccctggc

SEQ ID NO: 1904515 - DNA, 15 bp, Homo sapiens
tagctgtccctggct

SEQ ID NO: 1904516 - DNA, 15 bp, Homo sapiens
agctgtccctggcta

SEQ ID NO: 1904517 - DNA, 15 bp, Homo sapiens
gctgtccctggctac

SEQ ID NO: 1904518 - DNA, 15 bp, Homo sapiens
ctgtccctggctact

SEQ ID NO: 1904519 - DNA, 15 bp, Homo sapiens
tgtccctggctactg

SEQ ID NO: 1904520 - DNA, 15 bp, Homo sapiens
gtccctggctactgc

SEQ ID NO: 1904521 - DNA, 15 bp, Homo sapiens
tccctggctactgca

SEQ ID NO: 1904522 - DNA, 15 bp, Homo sapiens
ccctggctactgcag

SEQ ID NO: 1904523 - DNA, 15 bp, Homo sapiens
cctggctactgcagc

SEQ ID NO: 1904524 - DNA, 15 bp, Homo sapiens
ctggctactgcagct

SEQ ID NO: 1904525 - DNA, 15 bp, Homo sapiens
tggctactgcagctg

SEQ ID NO: 1904526 - DNA, 15 bp, Homo sapiens
ggctactgcagctgc

SEQ ID NO: 1904527 - DNA, 15 bp, Homo sapiens
gctactgcagctgca

SEQ ID NO: 1904528 - DNA, 15 bp, Homo sapiens
ctactgcagctgcat

SEQ ID NO: 1904529 - DNA, 15 bp, Homo sapiens
tactgcagctgcatt

SEQ ID NO: 1904530 - DNA, 15 bp, Homo sapiens
actgcagctgcattt

SEQ ID NO: 1904531 - DNA, 15 bp, Homo sapiens
ctgcagctgcatttc

SEQ ID NO: 1904532 - DNA, 15 bp, Homo sapiens
tgcagctgcatttcc

SEQ ID NO: 1904533 - DNA, 15 bp, Homo sapiens
gcagctgcatttcct

SEQ ID NO: 1904534 - DNA, 15 bp, Homo sapiens
cagctgcatttcctt

SEQ ID NO: 1904535 - DNA, 15 bp, Homo sapiens
agctgcatttccttt

SEQ ID NO: 1904536 - DNA, 15 bp, Homo sapiens
gctgcatttcctttt

SEQ ID NO: 1904537 - DNA, 15 bp, Homo sapiens
ctgcatttccttttg

SEQ ID NO: 1904538 - DNA, 15 bp, Homo sapiens
tgcatttccttttgt

SEQ ID NO: 1904539 - DNA, 15 bp, Homo sapiens
gcatttccttttgtt

SEQ ID NO: 1904540 - DNA, 15 bp, Homo sapiens
catttccttttgttc

SEQ ID NO: 1904541 - DNA, 15 bp, Homo sapiens
atttccttttgttcc

SEQ ID NO: 1904542 - DNA, 15 bp, Homo sapiens
tttccttttgttccc

SEQ ID NO: 1904543 - DNA, 15 bp, Homo sapiens
ttccttttgttccca

SEQ ID NO: 1904544 - DNA, 15 bp, Homo sapiens
tccttttgttcccat

SEQ ID NO: 1904545 - DNA, 15 bp, Homo sapiens
ccttttgttcccatg

SEQ ID NO: 1904546 - DNA, 15 bp, Homo sapiens
cttttgttcccatgg

SEQ ID NO: 1904547 - DNA, 15 bp, Homo sapiens
ttttgttcccatgga

SEQ ID NO: 1904548 - DNA, 15 bp, Homo sapiens
tttgttcccatggaa

SEQ ID NO: 1904549 - DNA, 15 bp, Homo sapiens
ttgttcccatggaat

SEQ ID NO: 1904550 - DNA, 15 bp, Homo sapiens
tgttcccatggaatt

SEQ ID NO: 1904551 - DNA, 15 bp, Homo sapiens
gttcccatggaattt

SEQ ID NO: 1904552 - DNA, 15 bp, Homo sapiens
ttcccatggaatttt

SEQ ID NO: 1904553 - DNA, 15 bp, Homo sapiens
tcccatggaattttt

SEQ ID NO: 1904554 - DNA, 15 bp, Homo sapiens
cccatggaatttttc

SEQ ID NO: 1904555 - DNA, 15 bp, Homo sapiens
ccatggaatttttct

SEQ ID NO: 1904556 - DNA, 15 bp, Homo sapiens
catggaatttttctt

SEQ ID NO: 1904557 - DNA, 15 bp, Homo sapiens
atggaatttttcttg

SEQ ID NO: 1904558 - DNA, 15 bp, Homo sapiens
tggaatttttcttga

SEQ ID NO: 1904559 - DNA, 15 bp, Homo sapiens
ggaatttttcttgaa

SEQ ID NO: 1904560 - DNA, 15 bp, Homo sapiens
gaatttttcttgaaa

SEQ ID NO: 1904561 - DNA, 15 bp, Homo sapiens
aatttttcttgaaaa

SEQ ID NO: 1904562 - DNA, 15 bp, Homo sapiens
atttttcttgaaaaa

SEQ ID NO: 1904563 - DNA, 15 bp, Homo sapiens
tttttcttgaaaaac

SEQ ID NO: 1904564 - DNA, 15 bp, Homo sapiens
ttttcttgaaaaaca

SEQ ID NO: 1904565 - DNA, 15 bp, Homo sapiens
tttcttgaaaaacac

SEQ ID NO: 1904566 - DNA, 15 bp, Homo sapiens
ttcttgaaaaacaca

SEQ ID NO: 1904567 - DNA, 15 bp, Homo sapiens
tcttgaaaaacacaa

SEQ ID NO: 1904568 - DNA, 15 bp, Homo sapiens
cttgaaaaacacaat

SEQ ID NO: 1904569 - DNA, 15 bp, Homo sapiens
ttgaaaaacacaatg

SEQ ID NO: 1904570 - DNA, 15 bp, Homo sapiens
tgaaaaacacaatga

SEQ ID NO: 1904571 - DNA, 15 bp, Homo sapiens
gaaaaacacaatgac

SEQ ID NO: 1904572 - DNA, 15 bp, Homo sapiens
aaaaacacaatgact

SEQ ID NO: 1904573 - DNA, 15 bp, Homo sapiens
aaaacacaatgacta

SEQ ID NO: 1904574 - DNA, 15 bp, Homo sapiens
aaacacaatgactat

SEQ ID NO: 1904575 - DNA, 15 bp, Homo sapiens
aacacaatgactatt

SEQ ID NO: 1904576 - DNA, 15 bp, Homo sapiens
acacaatgactattt

SEQ ID NO: 1904577 - DNA, 15 bp, Homo sapiens
cacaatgactatttt

SEQ ID NO: 1904578 - DNA, 15 bp, Homo sapiens
acaatgactattttt

SEQ ID NO: 1904579 - DNA, 15 bp, Homo sapiens
caatgactatttttt

SEQ ID NO: 1904580 - DNA, 15 bp, Homo sapiens
aatgactattttttt

SEQ ID NO: 1904581 - DNA, 15 bp, Homo sapiens
atgactattttttta

SEQ ID NO: 1904582 - DNA, 15 bp, Homo sapiens
tgactatttttttac

SEQ ID NO: 1904583 - DNA, 15 bp, Homo sapiens
gactatttttttacc

SEQ ID NO: 1904584 - DNA, 15 bp, Homo sapiens
actatttttttacct

SEQ ID NO: 1904585 - DNA, 15 bp, Homo sapiens
ctatttttttacctc

SEQ ID NO: 1904586 - DNA, 15 bp, Homo sapiens
atttttttacctcta

SEQ ID NO: 1904587 - DNA, 15 bp, Homo sapiens
tttttttacctctac

SEQ ID NO: 1904588 - DNA, 15 bp, Homo sapiens
ttttttacctctaca

SEQ ID NO: 1904589 - DNA, 15 bp, Homo sapiens
tttttacctctacaa

SEQ ID NO: 1904590 - DNA, 15 bp, Homo sapiens
ttttacctctacaat

SEQ ID NO: 1904591 - DNA, 15 bp, Homo sapiens
tttacctctacaatt

SEQ ID NO: 1904592 - DNA, 15 bp, Homo sapiens
ttacctctacaattt

SEQ ID NO: 1904593 - DNA, 15 bp, Homo sapiens
tacctctacaatttg

SEQ ID NO: 1904594 - DNA, 15 bp, Homo sapiens
acctctacaatttgc

SEQ ID NO: 1904595 - DNA, 15 bp, Homo sapiens
cctctacaatttgct

SEQ ID NO: 1904596 - DNA, 15 bp, Homo sapiens
ctctacaatttgctt

SEQ ID NO: 1904597 - DNA, 15 bp, Homo sapiens
tctacaatttgcttg

SEQ ID NO: 1904598 - DNA, 15 bp, Homo sapiens
ctacaatttgcttgc

SEQ ID NO: 1904599 - DNA, 15 bp, Homo sapiens
tacaatttgcttgca

SEQ ID NO: 1904600 - DNA, 15 bp, Homo sapiens
acaatttgcttgcag

SEQ ID NO: 1904601 - DNA, 15 bp, Homo sapiens
caatttgcttgcagt

SEQ ID NO: 1904602 - DNA, 15 bp, Homo sapiens
aatttgcttgcagtg

SEQ ID NO: 1904603 - DNA, 15 bp, Homo sapiens
atttgcttgcagtgt

SEQ ID NO: 1904604 - DNA, 15 bp, Homo sapiens
tttgcttgcagtgtt

SEQ ID NO: 1904605 - DNA, 15 bp, Homo sapiens
ttgcttgcagtgttt

SEQ ID NO: 1904606 - DNA, 15 bp, Homo sapiens
tgcttgcagtgtttc

SEQ ID NO: 1904607 - DNA, 15 bp, Homo sapiens
gcttgcagtgtttct

SEQ ID NO: 1904608 - DNA, 15 bp, Homo sapiens
cttgcagtgtttctt

SEQ ID NO: 1904609 - DNA, 15 bp, Homo sapiens
ttgcagtgtttcttt

SEQ ID NO: 1904610 - DNA, 15 bp, Homo sapiens
tgcagtgtttctttt

SEQ ID NO: 1904611 - DNA, 15 bp, Homo sapiens
gcagtgtttcttttc

SEQ ID NO: 1904612 - DNA, 15 bp, Homo sapiens
cagtgtttcttttca

SEQ ID NO: 1904613 - DNA, 15 bp, Homo sapiens
agtgtttcttttcat

SEQ ID NO: 1904614 - DNA, 15 bp, Homo sapiens
gtgtttcttttcatt

SEQ ID NO: 1904615 - DNA, 15 bp, Homo sapiens
tgtttcttttcattc

SEQ ID NO: 1904616 - DNA, 15 bp, Homo sapiens
gtttcttttcattca

SEQ ID NO: 1904617 - DNA, 15 bp, Homo sapiens
tttcttttcattcat

SEQ ID NO: 1904618 - DNA, 15 bp, Homo sapiens
ttcttttcattcatt

SEQ ID NO: 1904619 - DNA, 15 bp, Homo sapiens
tcttttcattcattt

SEQ ID NO: 1904620 - DNA, 15 bp, Homo sapiens
cttttcattcattta

SEQ ID NO: 1904621 - DNA, 15 bp, Homo sapiens
ttttcattcatttaa

SEQ ID NO: 1904622 - DNA, 15 bp, Homo sapiens
tttcattcatttaac

SEQ ID NO: 1904623 - DNA, 15 bp, Homo sapiens
ttcattcatttaacg

SEQ ID NO: 1904624 - DNA, 15 bp, Homo sapiens
tcattcatttaacgt

SEQ ID NO: 1904625 - DNA, 15 bp, Homo sapiens
cattcatttaacgtg

SEQ ID NO: 1904626 - DNA, 15 bp, Homo sapiens
attcatttaacgtgt

SEQ ID NO: 1904627 - DNA, 15 bp, Homo sapiens
ttcatttaacgtgtt

SEQ ID NO: 1904628 - DNA, 15 bp, Homo sapiens
tcatttaacgtgttt

SEQ ID NO: 1904629 - DNA, 15 bp, Homo sapiens
catttaacgtgtttt

SEQ ID NO: 1904630 - DNA, 15 bp, Homo sapiens
atttaacgtgttttg

SEQ ID NO: 1904631 - DNA, 15 bp, Homo sapiens
tttaacgtgttttga

SEQ ID NO: 1904632 - DNA, 15 bp, Homo sapiens
ttaacgtgttttgaa

SEQ ID NO: 1904633 - DNA, 15 bp, Homo sapiens
taacgtgttttgaaa

SEQ ID NO: 1904634 - DNA, 15 bp, Homo sapiens
aacgtgttttgaaag

SEQ ID NO: 1904635 - DNA, 15 bp, Homo sapiens
acgtgttttgaaagc

SEQ ID NO: 1904636 - DNA, 15 bp, Homo sapiens
cgtgttttgaaagca

SEQ ID NO: 1904637 - DNA, 15 bp, Homo sapiens
gtgttttgaaagcaa

SEQ ID NO: 1904638 - DNA, 15 bp, Homo sapiens
tgttttgaaagcaat

SEQ ID NO: 1904639 - DNA, 15 bp, Homo sapiens
gttttgaaagcaata

SEQ ID NO: 1904640 - DNA, 15 bp, Homo sapiens
ttttgaaagcaatat

SEQ ID NO: 1904641 - DNA, 15 bp, Homo sapiens
tttgaaagcaatatg

SEQ ID NO: 1904642 - DNA, 15 bp, Homo sapiens
ttgaaagcaatatgc

SEQ ID NO: 1904643 - DNA, 15 bp, Homo sapiens
tgaaagcaatatgcc

SEQ ID NO: 1904644 - DNA, 15 bp, Homo sapiens
gaaagcaatatgcca

SEQ ID NO: 1904645 - DNA, 15 bp, Homo sapiens
aaagcaatatgccaa

SEQ ID NO: 1904646 - DNA, 15 bp, Homo sapiens
aagcaatatgccaaa

SEQ ID NO: 1904647 - DNA, 15 bp, Homo sapiens
agcaatatgccaaag

SEQ ID NO: 1904648 - DNA, 15 bp, Homo sapiens
gcaatatgccaaagg

SEQ ID NO: 1904649 - DNA, 15 bp, Homo sapiens
caatatgccaaaggg

SEQ ID NO: 1904650 - DNA, 15 bp, Homo sapiens
aatatgccaaaggga

SEQ ID NO: 1904651 - DNA, 15 bp, Homo sapiens
atatgccaaagggaa

SEQ ID NO: 1904652 - DNA, 15 bp, Homo sapiens
tatgccaaagggaat

SEQ ID NO: 1904653 - DNA, 15 bp, Homo sapiens
atgccaaagggaatt

SEQ ID NO: 1904654 - DNA, 15 bp, Homo sapiens
tgccaaagggaattt

SEQ ID NO: 1904655 - DNA, 15 bp, Homo sapiens
gccaaagggaatttg

SEQ ID NO: 1904656 - DNA, 15 bp, Homo sapiens
ccaaagggaatttga

SEQ ID NO: 1904657 - DNA, 15 bp, Homo sapiens
caaagggaatttgag

SEQ ID NO: 1904658 - DNA, 15 bp, Homo sapiens
aaagggaatttgaga

SEQ ID NO: 1904659 - DNA, 15 bp, Homo sapiens
aagggaatttgagag

SEQ ID NO: 1904660 - DNA, 15 bp, Homo sapiens
agggaatttgagagg

SEQ ID NO: 1904661 - DNA, 15 bp, Homo sapiens
gggaatttgagagga

SEQ ID NO: 1904662 - DNA, 15 bp, Homo sapiens
ggaatttgagaggag

SEQ ID NO: 1904663 - DNA, 15 bp, Homo sapiens
gaatttgagaggagt

SEQ ID NO: 1904664 - DNA, 15 bp, Homo sapiens
aatttgagaggagtt

SEQ ID NO: 1904665 - DNA, 15 bp, Homo sapiens
atttgagaggagttt

SEQ ID NO: 1904666 - DNA, 15 bp, Homo sapiens
tttgagaggagtttt

SEQ ID NO: 1904667 - DNA, 15 bp, Homo sapiens
ttgagaggagtttta

SEQ ID NO: 1904668 - DNA, 15 bp, Homo sapiens
tgagaggagttttat

SEQ ID NO: 1904669 - DNA, 15 bp, Homo sapiens
gagaggagttttatt

SEQ ID NO: 1904670 - DNA, 15 bp, Homo sapiens
agaggagttttattt

SEQ ID NO: 1904671 - DNA, 15 bp, Homo sapiens
gaggagttttatttt

SEQ ID NO: 1904672 - DNA, 15 bp, Homo sapiens
aggagttttattttg

SEQ ID NO: 1904673 - DNA, 15 bp, Homo sapiens
ggagttttattttga

SEQ ID NO: 1904674 - DNA, 15 bp, Homo sapiens
gagttttattttgac

SEQ ID NO: 1904675 - DNA, 15 bp, Homo sapiens
agttttattttgacc

SEQ ID NO: 1904676 - DNA, 15 bp, Homo sapiens
gttttattttgaccc

SEQ ID NO: 1904677 - DNA, 15 bp, Homo sapiens
ttttattttgaccct

SEQ ID NO: 1904678 - DNA, 15 bp, Homo sapiens
tttattttgacccta

SEQ ID NO: 1904679 - DNA, 15 bp, Homo sapiens
ttattttgaccctat

SEQ ID NO: 1904680 - DNA, 15 bp, Homo sapiens
tattttgaccctatg

SEQ ID NO: 1904681 - DNA, 15 bp, Homo sapiens
attttgaccctatgt

SEQ ID NO: 1904682 - DNA, 15 bp, Homo sapiens
ttttgaccctatgta

SEQ ID NO: 1904683 - DNA, 15 bp, Homo sapiens
tttgaccctatgtat

SEQ ID NO: 1904684 - DNA, 15 bp, Homo sapiens
ttgaccctatgtatc

SEQ ID NO: 1904685 - DNA, 15 bp, Homo sapiens
tgaccctatgtatca

SEQ ID NO: 1904686 - DNA, 15 bp, Homo sapiens
gaccctatgtatcag

SEQ ID NO: 1904687 - DNA, 15 bp, Homo sapiens
accctatgtatcagt

SEQ ID NO: 1904688 - DNA, 15 bp, Homo sapiens
ccctatgtatcagtt

SEQ ID NO: 1904689 - DNA, 15 bp, Homo sapiens
cctatgtatcagttt

SEQ ID NO: 1904690 - DNA, 15 bp, Homo sapiens
ctatgtatcagtttc

SEQ ID NO: 1904691 - DNA, 15 bp, Homo sapiens
tatgtatcagtttca

SEQ ID NO: 1904692 - DNA, 15 bp, Homo sapiens
atgtatcagtttcaa

SEQ ID NO: 1904693 - DNA, 15 bp, Homo sapiens
tgtatcagtttcaag

SEQ ID NO: 1904694 - DNA, 15 bp, Homo sapiens
gtatcagtttcaaga

SEQ ID NO: 1904695 - DNA, 15 bp, Homo sapiens
tatcagtttcaagaa

SEQ ID NO: 1904696 - DNA, 15 bp, Homo sapiens
tcagtttcaagaagg

SEQ ID NO: 1904697 - DNA, 15 bp, Homo sapiens
cagtttcaagaaggt

SEQ ID NO: 1904698 - DNA, 15 bp, Homo sapiens
agtttcaagaaggtg

SEQ ID NO: 1904699 - DNA, 15 bp, Homo sapiens
gtttcaagaaggtga

SEQ ID NO: 1904700 - DNA, 15 bp, Homo sapiens
tttcaagaaggtgaa

SEQ ID NO: 1904701 - DNA, 15 bp, Homo sapiens
ttcaagaaggtgaaa

SEQ ID NO: 1904702 - DNA, 15 bp, Homo sapiens
tcaagaaggtgaaaa

SEQ ID NO: 1904703 - DNA, 15 bp, Homo sapiens
caagaaggtgaaaaa

SEQ ID NO: 1904704 - DNA, 15 bp, Homo sapiens
aagaaggtgaaaaag

SEQ ID NO: 1904705 - DNA, 15 bp, Homo sapiens
agaaggtgaaaaagt

SEQ ID NO: 1904706 - DNA, 15 bp, Homo sapiens
gaaggtgaaaaagtt

SEQ ID NO: 1904707 - DNA, 15 bp, Homo sapiens
aaggtgaaaaagttc

SEQ ID NO: 1904708 - DNA, 15 bp, Homo sapiens
aggtgaaaaagttca

SEQ ID NO: 1904709 - DNA, 15 bp, Homo sapiens
ggtgaaaaagttcag

SEQ ID NO: 1904710 - DNA, 15 bp, Homo sapiens
gtgaaaaagttcaga

SEQ ID NO: 1904711 - DNA, 15 bp, Homo sapiens
tgaaaaagttcagaa

SEQ ID NO: 1904712 - DNA, 15 bp, Homo sapiens
gaaaaagttcagaaa

SEQ ID NO: 1904713 - DNA, 15 bp, Homo sapiens
aaaaagttcagaaac

SEQ ID NO: 1904714 - DNA, 15 bp, Homo sapiens
aaaagttcagaaaca

SEQ ID NO: 1904715 - DNA, 15 bp, Homo sapiens
aaagttcagaaacaa

SEQ ID NO: 1904716 - DNA, 15 bp, Homo sapiens
aagttcagaaacaaa

SEQ ID NO: 1904717 - DNA, 15 bp, Homo sapiens
agttcagaaacaaag

SEQ ID NO: 1904718 - DNA, 15 bp, Homo sapiens
gttcagaaacaaaga

SEQ ID NO: 1904719 - DNA, 15 bp, Homo sapiens
ttcagaaacaaagaa

SEQ ID NO: 1904720 - DNA, 15 bp, Homo sapiens
tcagaaacaaagaaa

SEQ ID NO: 1904721 - DNA, 15 bp, Homo sapiens
cagaaacaaagaaat

SEQ ID NO: 1904722 - DNA, 15 bp, Homo sapiens
agaaacaaagaaatt

SEQ ID NO: 1904723 - DNA, 15 bp, Homo sapiens
gaaacaaagaaattg

SEQ ID NO: 1904724 - DNA, 15 bp, Homo sapiens
aaacaaagaaattga

SEQ ID NO: 1904725 - DNA, 15 bp, Homo sapiens
aacaaagaaattgag

SEQ ID NO: 1904726 - DNA, 15 bp, Homo sapiens
acaaagaaattgagt

SEQ ID NO: 1904727 - DNA, 15 bp, Homo sapiens
caaagaaattgagtc

SEQ ID NO: 1904728 - DNA, 15 bp, Homo sapiens
aaagaaattgagtca

SEQ ID NO: 1904729 - DNA, 15 bp, Homo sapiens
aagaaattgagtcat

SEQ ID NO: 1904730 - DNA, 15 bp, Homo sapiens
agaaattgagtcatc

SEQ ID NO: 1904731 - DNA, 15 bp, Homo sapiens
gaaattgagtcatct

SEQ ID NO: 1904732 - DNA, 15 bp, Homo sapiens
aaattgagtcatctt

SEQ ID NO: 1904733 - DNA, 15 bp, Homo sapiens
aattgagtcatcttt

SEQ ID NO: 1904734 - DNA, 15 bp, Homo sapiens
attgagtcatctttt

SEQ ID NO: 1904735 - DNA, 15 bp, Homo sapiens
ttgagtcatcttttg

SEQ ID NO: 1904736 - DNA, 15 bp, Homo sapiens
tgagtcatcttttga

SEQ ID NO: 1904737 - DNA, 15 bp, Homo sapiens
gagtcatcttttgac

SEQ ID NO: 1904738 - DNA, 15 bp, Homo sapiens
agtcatcttttgacc

SEQ ID NO: 1904739 - DNA, 15 bp, Homo sapiens
gtcatcttttgacct

SEQ ID NO: 1904740 - DNA, 15 bp, Homo sapiens
tcatcttttgacctt

SEQ ID NO: 1904741 - DNA, 15 bp, Homo sapiens
catcttttgaccttg

SEQ ID NO: 1904742 - DNA, 15 bp, Homo sapiens
atcttttgaccttga

SEQ ID NO: 1904743 - DNA, 15 bp, Homo sapiens
tcttttgaccttgat

SEQ ID NO: 1904744 - DNA, 15 bp, Homo sapiens
cttttgaccttgata

SEQ ID NO: 1904745 - DNA, 15 bp, Homo sapiens
ttttgaccttgatac

SEQ ID NO: 1904746 - DNA, 15 bp, Homo sapiens
tttgaccttgataca

SEQ ID NO: 1904747 - DNA, 15 bp, Homo sapiens
ttgaccttgatacaa

SEQ ID NO: 1904748 - DNA, 15 bp, Homo sapiens
tgaccttgatacaac

SEQ ID NO: 1904749 - DNA, 15 bp, Homo sapiens
gaccttgatacaact

SEQ ID NO: 1904750 - DNA, 15 bp, Homo sapiens
accttgatacaactg

SEQ ID NO: 1904751 - DNA, 15 bp, Homo sapiens
ccttgatacaactga

SEQ ID NO: 1904752 - DNA, 15 bp, Homo sapiens
cttgatacaactgaa

SEQ ID NO: 1904753 - DNA, 15 bp, Homo sapiens
ttgatacaactgaag

SEQ ID NO: 1904754 - DNA, 15 bp, Homo sapiens
tgatacaactgaagc

SEQ ID NO: 1904755 - DNA, 15 bp, Homo sapiens
gatacaactgaagct

SEQ ID NO: 1904756 - DNA, 15 bp, Homo sapiens
atacaactgaagctt

SEQ ID NO: 1904757 - DNA, 15 bp, Homo sapiens
tacaactgaagcttt

SEQ ID NO: 1904758 - DNA, 15 bp, Homo sapiens
acaactgaagcttta

SEQ ID NO: 1904759 - DNA, 15 bp, Homo sapiens
caactgaagctttaa

SEQ ID NO: 1904760 - DNA, 15 bp, Homo sapiens
aactgaagctttaag

SEQ ID NO: 1904761 - DNA, 15 bp, Homo sapiens
actgaagctttaaga

SEQ ID NO: 1904762 - DNA, 15 bp, Homo sapiens
ctgaagctttaagat

SEQ ID NO: 1904763 - DNA, 15 bp, Homo sapiens
tgaagctttaagata

SEQ ID NO: 1904764 - DNA, 15 bp, Homo sapiens
gaagctttaagataa

SEQ ID NO: 1904765 - DNA, 15 bp, Homo sapiens
aagctttaagataaa

SEQ ID NO: 1904766 - DNA, 15 bp, Homo sapiens
agctttaagataaat

SEQ ID NO: 1904767 - DNA, 15 bp, Homo sapiens
gctttaagataaatc

SEQ ID NO: 1904768 - DNA, 15 bp, Homo sapiens
ctttaagataaatcc

SEQ ID NO: 1904769 - DNA, 15 bp, Homo sapiens
tttaagataaatcca

SEQ ID NO: 1904770 - DNA, 15 bp, Homo sapiens
ttaagataaatccat

SEQ ID NO: 1904771 - DNA, 15 bp, Homo sapiens
taagataaatccatt

SEQ ID NO: 1904772 - DNA, 15 bp, Homo sapiens
aagataaatccatta

SEQ ID NO: 1904773 - DNA, 15 bp, Homo sapiens
agataaatccattaa

SEQ ID NO: 1904774 - DNA, 15 bp, Homo sapiens
gataaatccattaaa

SEQ ID NO: 1904775 - DNA, 15 bp, Homo sapiens
ataaatccattaaaa

SEQ ID NO: 1904776 - DNA, 15 bp, Homo sapiens
taaatccattaaaaa

SEQ ID NO: 1904777 - DNA, 15 bp, Homo sapiens
aaatccattaaaaag

SEQ ID NO: 1904778 - DNA, 15 bp, Homo sapiens
aatccattaaaaaga

SEQ ID NO: 1904779 - DNA, 15 bp, Homo sapiens
atccattaaaaagag

SEQ ID NO: 1904780 - DNA, 15 bp, Homo sapiens
tccattaaaaagagc

SEQ ID NO: 1904781 - DNA, 15 bp, Homo sapiens
ccattaaaaagagct

SEQ ID NO: 1904782 - DNA, 15 bp, Homo sapiens
cattaaaaagagcta

SEQ ID NO: 1904783 - DNA, 15 bp, Homo sapiens
attaaaaagagctac

SEQ ID NO: 1904784 - DNA, 15 bp, Homo sapiens
ttcttgcatcatagc

SEQ ID NO: 1904785 - DNA, 15 bp, Homo sapiens
tcttgcatcatagca

SEQ ID NO: 1904786 - DNA, 15 bp, Homo sapiens
cttgcatcatagcaa

SEQ ID NO: 1904787 - DNA, 15 bp, Homo sapiens
ttgcatcatagcaaa

SEQ ID NO: 1904788 - DNA, 15 bp, Homo sapiens
tgcatcatagcaaaa

SEQ ID NO: 1904789 - DNA, 15 bp, Homo sapiens
gcatcatagcaaaac

SEQ ID NO: 1904790 - DNA, 15 bp, Homo sapiens
catcatagcaaaaca

SEQ ID NO: 1904791 - DNA, 15 bp, Homo sapiens
atcatagcaaaacaa

SEQ ID NO: 1904792 - DNA, 15 bp, Homo sapiens
tcatagcaaaacaat

SEQ ID NO: 1904793 - DNA, 15 bp, Homo sapiens
catagcaaaacaatt

SEQ ID NO: 1904794 - DNA, 15 bp, Homo sapiens
atagcaaaacaattg

SEQ ID NO: 1904795 - DNA, 15 bp, Homo sapiens
tagcaaaacaattgt

SEQ ID NO: 1904796 - DNA, 15 bp, Homo sapiens
agcaaaacaattgtt

SEQ ID NO: 1904797 - DNA, 15 bp, Homo sapiens
gcaaaacaattgttg

SEQ ID NO: 1904798 - DNA, 15 bp, Homo sapiens
caaaacaattgttgg

SEQ ID NO: 1904799 - DNA, 15 bp, Homo sapiens
aaaacaattgttgga

SEQ ID NO: 1904800 - DNA, 15 bp, Homo sapiens
aaacaattgttggag

SEQ ID NO: 1904801 - DNA, 15 bp, Homo sapiens
aacaattgttggagg

SEQ ID NO: 1904802 - DNA, 15 bp, Homo sapiens
acaattgttggaggt

SEQ ID NO: 1904803 - DNA, 15 bp, Homo sapiens
caattgttggaggta

SEQ ID NO: 1904804 - DNA, 15 bp, Homo sapiens
aattgttggaggtag

SEQ ID NO: 1904805 - DNA, 15 bp, Homo sapiens
attgttggaggtagc

SEQ ID NO: 1904806 - DNA, 15 bp, Homo sapiens
ttgttggaggtagct

SEQ ID NO: 1904807 - DNA, 15 bp, Homo sapiens
tgttggaggtagcta

SEQ ID NO: 1904808 - DNA, 15 bp, Homo sapiens
gttggaggtagctat

SEQ ID NO: 1904809 - DNA, 15 bp, Homo sapiens
ttggaggtagctatt

SEQ ID NO: 1904810 - DNA, 15 bp, Homo sapiens
tggaggtagctatta

SEQ ID NO: 1904811 - DNA, 15 bp, Homo sapiens
gaggtagctattaca

SEQ ID NO: 1904812 - DNA, 15 bp, Homo sapiens
aggtagctattacaa

SEQ ID NO: 1904813 - DNA, 15 bp, Homo sapiens
ggtagctattacaac

SEQ ID NO: 1904814 - DNA, 15 bp, Homo sapiens
gtagctattacaacc

SEQ ID NO: 1904815 - DNA, 15 bp, Homo sapiens
tagctattacaacct

SEQ ID NO: 1904816 - DNA, 15 bp, Homo sapiens
agctattacaacctt

SEQ ID NO: 1904817 - DNA, 15 bp, Homo sapiens
gctattacaaccttc

SEQ ID NO: 1904818 - DNA, 15 bp, Homo sapiens
ctattacaaccttca

SEQ ID NO: 1904819 - DNA, 15 bp, Homo sapiens
tattacaaccttcat

SEQ ID NO: 1904820 - DNA, 15 bp, Homo sapiens
attacaaccttcatt

SEQ ID NO: 1904821 - DNA, 15 bp, Homo sapiens
ttacaaccttcattt

SEQ ID NO: 1904822 - DNA, 15 bp, Homo sapiens
tacaaccttcatttt

SEQ ID NO: 1904823 - DNA, 15 bp, Homo sapiens
acaaccttcattttt

SEQ ID NO: 1904824 - DNA, 15 bp, Homo sapiens
caaccttcattttta

SEQ ID NO: 1904825 - DNA, 15 bp, Homo sapiens
aaccttcatttttac

SEQ ID NO: 1904826 - DNA, 15 bp, Homo sapiens
accttcatttttaca

SEQ ID NO: 1904827 - DNA, 15 bp, Homo sapiens
ccttcatttttacag

SEQ ID NO: 1904828 - DNA, 15 bp, Homo sapiens
cttcatttttacaga

SEQ ID NO: 1904829 - DNA, 15 bp, Homo sapiens
ttcatttttacagat

SEQ ID NO: 1904830 - DNA, 15 bp, Homo sapiens
tcatttttacagata

SEQ ID NO: 1904831 - DNA, 15 bp, Homo sapiens
catttttacagataa

SEQ ID NO: 1904832 - DNA, 15 bp, Homo sapiens
atttttacagataag

SEQ ID NO: 1904833 - DNA, 15 bp, Homo sapiens
tttttacagataagg

SEQ ID NO: 1904834 - DNA, 15 bp, Homo sapiens
ttttacagataagga

SEQ ID NO: 1904835 - DNA, 15 bp, Homo sapiens
tttacagataaggac

SEQ ID NO: 1904836 - DNA, 15 bp, Homo sapiens
ttacagataaggaca

SEQ ID NO: 1904837 - DNA, 15 bp, Homo sapiens
tacagataaggacat

SEQ ID NO: 1904838 - DNA, 15 bp, Homo sapiens
acagataaggacatt

SEQ ID NO: 1904839 - DNA, 15 bp, Homo sapiens
cagataaggacattg

SEQ ID NO: 1904840 - DNA, 15 bp, Homo sapiens
agataaggacattga

SEQ ID NO: 1904841 - DNA, 15 bp, Homo sapiens
gataaggacattgag

SEQ ID NO: 1904842 - DNA, 15 bp, Homo sapiens
ataaggacattgaga

SEQ ID NO: 1904843 - DNA, 15 bp, Homo sapiens
taaggacattgagat

SEQ ID NO: 1904844 - DNA, 15 bp, Homo sapiens
aaggacattgagatt

SEQ ID NO: 1904845 - DNA, 15 bp, Homo sapiens
aggacattgagattc

SEQ ID NO: 1904846 - DNA, 15 bp, Homo sapiens
ggacattgagattca

SEQ ID NO: 1904847 - DNA, 15 bp, Homo sapiens
gacattgagattcag

SEQ ID NO: 1904848 - DNA, 15 bp, Homo sapiens
acattgagattcaga

SEQ ID NO: 1904849 - DNA, 15 bp, Homo sapiens
cattgagattcagag

SEQ ID NO: 1904850 - DNA, 15 bp, Homo sapiens
attgagattcagagg

SEQ ID NO: 1904851 - DNA, 15 bp, Homo sapiens
ttgagattcagaggt

SEQ ID NO: 1904852 - DNA, 15 bp, Homo sapiens
tgagattcagaggtt

SEQ ID NO: 1904853 - DNA, 15 bp, Homo sapiens
gagattcagaggtta

SEQ ID NO: 1904854 - DNA, 15 bp, Homo sapiens
agattcagaggttaa

SEQ ID NO: 1904855 - DNA, 15 bp, Homo sapiens
gattcagaggttaac

SEQ ID NO: 1904856 - DNA, 15 bp, Homo sapiens
attcagaggttaact

SEQ ID NO: 1904857 - DNA, 15 bp, Homo sapiens
ttcagaggttaacta

SEQ ID NO: 1904858 - DNA, 15 bp, Homo sapiens
tcagaggttaactag

SEQ ID NO: 1904859 - DNA, 15 bp, Homo sapiens
cagaggttaactagc

SEQ ID NO: 1904860 - DNA, 15 bp, Homo sapiens
agaggttaactagct

SEQ ID NO: 1904861 - DNA, 15 bp, Homo sapiens
gaggttaactagctt

SEQ ID NO: 1904862 - DNA, 15 bp, Homo sapiens
aggttaactagctta

SEQ ID NO: 1904863 - DNA, 15 bp, Homo sapiens
ggttaactagcttac

SEQ ID NO: 1904864 - DNA, 15 bp, Homo sapiens
gttaactagcttacc

SEQ ID NO: 1904865 - DNA, 15 bp, Homo sapiens
ttaactagcttaccc

SEQ ID NO: 1904866 - DNA, 15 bp, Homo sapiens
taactagcttacccc

SEQ ID NO: 1904867 - DNA, 15 bp, Homo sapiens
aactagcttaccccg

SEQ ID NO: 1904868 - DNA, 15 bp, Homo sapiens
actagcttaccccgt

SEQ ID NO: 1904869 - DNA, 15 bp, Homo sapiens
ctagcttaccccgtg

SEQ ID NO: 1904870 - DNA, 15 bp, Homo sapiens
tagcttaccccgtgt

SEQ ID NO: 1904871 - DNA, 15 bp, Homo sapiens
agcttaccccgtgtc

SEQ ID NO: 1904872 - DNA, 15 bp, Homo sapiens
gcttaccccgtgtca

SEQ ID NO: 1904873 - DNA, 15 bp, Homo sapiens
cttaccccgtgtcat

SEQ ID NO: 1904874 - DNA, 15 bp, Homo sapiens
ttaccccgtgtcata

SEQ ID NO: 1904875 - DNA, 15 bp, Homo sapiens
taccccgtgtcatat

SEQ ID NO: 1904876 - DNA, 15 bp, Homo sapiens
accccgtgtcatata

SEQ ID NO: 1904877 - DNA, 15 bp, Homo sapiens
ccccgtgtcatatag

SEQ ID NO: 1904878 - DNA, 15 bp, Homo sapiens
cccgtgtcatatagc

SEQ ID NO: 1904879 - DNA, 15 bp, Homo sapiens
ccgtgtcatatagca

SEQ ID NO: 1904880 - DNA, 15 bp, Homo sapiens
cgtgtcatatagcaa

SEQ ID NO: 1904881 - DNA, 15 bp, Homo sapiens
gtgtcatatagcaaa

SEQ ID NO: 1904882 - DNA, 15 bp, Homo sapiens
tgtcatatagcaaag

SEQ ID NO: 1904883 - DNA, 15 bp, Homo sapiens
gtcatatagcaaaga

SEQ ID NO: 1904884 - DNA, 15 bp, Homo sapiens
tcatatagcaaagaa

SEQ ID NO: 1904885 - DNA, 15 bp, Homo sapiens
catatagcaaagaag

SEQ ID NO: 1904886 - DNA, 15 bp, Homo sapiens
atatagcaaagaagg

SEQ ID NO: 1904887 - DNA, 15 bp, Homo sapiens
tatagcaaagaagga

SEQ ID NO: 1904888 - DNA, 15 bp, Homo sapiens
atagcaaagaaggat

SEQ ID NO: 1904889 - DNA, 15 bp, Homo sapiens
tagcaaagaaggatc

SEQ ID NO: 1904890 - DNA, 15 bp, Homo sapiens
agcaaagaaggatca

SEQ ID NO: 1904891 - DNA, 15 bp, Homo sapiens
gcaaagaaggatcag

SEQ ID NO: 1904892 - DNA, 15 bp, Homo sapiens
caaagaaggatcaga

SEQ ID NO: 1904893 - DNA, 15 bp, Homo sapiens
aaagaaggatcagaa

SEQ ID NO: 1904894 - DNA, 15 bp, Homo sapiens
aagaaggatcagaag

SEQ ID NO: 1904895 - DNA, 15 bp, Homo sapiens
agaaggatcagaagt

SEQ ID NO: 1904896 - DNA, 15 bp, Homo sapiens
gaaggatcagaagtg

SEQ ID NO: 1904897 - DNA, 15 bp, Homo sapiens
aaggatcagaagtga

SEQ ID NO: 1904898 - DNA, 15 bp, Homo sapiens
aggatcagaagtgag

SEQ ID NO: 1904899 - DNA, 15 bp, Homo sapiens
ggatcagaagtgaga

SEQ ID NO: 1904900 - DNA, 15 bp, Homo sapiens
gatcagaagtgagag

SEQ ID NO: 1904901 - DNA, 15 bp, Homo sapiens
atcagaagtgagagg

SEQ ID NO: 1904902 - DNA, 15 bp, Homo sapiens
tcagaagtgagaggt

SEQ ID NO: 1904903 - DNA, 15 bp, Homo sapiens
cagaagtgagaggta

SEQ ID NO: 1904904 - DNA, 15 bp, Homo sapiens
agaagtgagaggtaa

SEQ ID NO: 1904905 - DNA, 15 bp, Homo sapiens
gaagtgagaggtaaa

SEQ ID NO: 1904906 - DNA, 15 bp, Homo sapiens
aagtgagaggtaaaa

SEQ ID NO: 1904907 - DNA, 15 bp, Homo sapiens
agtgagaggtaaaag

SEQ ID NO: 1904908 - DNA, 15 bp, Homo sapiens
gtgagaggtaaaagc

SEQ ID NO: 1904909 - DNA, 15 bp, Homo sapiens
tgagaggtaaaagca

SEQ ID NO: 1904910 - DNA, 15 bp, Homo sapiens
gagaggtaaaagcaa

SEQ ID NO: 1904911 - DNA, 15 bp, Homo sapiens
agaggtaaaagcaag

SEQ ID NO: 1904912 - DNA, 15 bp, Homo sapiens
gaggtaaaagcaagt

SEQ ID NO: 1904913 - DNA, 15 bp, Homo sapiens
aggtaaaagcaagtc

SEQ ID NO: 1904914 - DNA, 15 bp, Homo sapiens
ggtaaaagcaagtcc

SEQ ID NO: 1904915 - DNA, 15 bp, Homo sapiens
gtaaaagcaagtcca

SEQ ID NO: 1904916 - DNA, 15 bp, Homo sapiens
aaaagcaagtccatc

SEQ ID NO: 1904917 - DNA, 15 bp, Homo sapiens
aaagcaagtccatct

SEQ ID NO: 1904918 - DNA, 15 bp, Homo sapiens
aagcaagtccatctg

SEQ ID NO: 1904919 - DNA, 15 bp, Homo sapiens
agcaagtccatctgc

SEQ ID NO: 1904920 - DNA, 15 bp, Homo sapiens
gcaagtccatctgcc

SEQ ID NO: 1904921 - DNA, 15 bp, Homo sapiens
caagtccatctgcct

SEQ ID NO: 1904922 - DNA, 15 bp, Homo sapiens
aagtccatctgcctt

SEQ ID NO: 1904923 - DNA, 15 bp, Homo sapiens
agtccatctgccttt

SEQ ID NO: 1904924 - DNA, 15 bp, Homo sapiens
gtccatctgcctttt

SEQ ID NO: 1904925 - DNA, 15 bp, Homo sapiens
tccatctgccttttt

SEQ ID NO: 1904926 - DNA, 15 bp, Homo sapiens
ccatctgcctttttg

SEQ ID NO: 1904927 - DNA, 15 bp, Homo sapiens
catctgcctttttga

SEQ ID NO: 1904928 - DNA, 15 bp, Homo sapiens
atctgcctttttgat

SEQ ID NO: 1904929 - DNA, 15 bp, Homo sapiens
tctgcctttttgatc

SEQ ID NO: 1904930 - DNA, 15 bp, Homo sapiens
ctgcctttttgatcc

SEQ ID NO: 1904931 - DNA, 15 bp, Homo sapiens
tgcctttttgatcca

SEQ ID NO: 1904932 - DNA, 15 bp, Homo sapiens
gcctttttgatccat

SEQ ID NO: 1904933 - DNA, 15 bp, Homo sapiens
cctttttgatccatg

SEQ ID NO: 1904934 - DNA, 15 bp, Homo sapiens
ctttttgatccatgc

SEQ ID NO: 1904935 - DNA, 15 bp, Homo sapiens
tttttgatccatgct

SEQ ID NO: 1904936 - DNA, 15 bp, Homo sapiens
ttttgatccatgctt

SEQ ID NO: 1904937 - DNA, 15 bp, Homo sapiens
tttgatccatgcttc

SEQ ID NO: 1904938 - DNA, 15 bp, Homo sapiens
ttgatccatgcttcc

SEQ ID NO: 1904939 - DNA, 15 bp, Homo sapiens
tgatccatgcttcct

SEQ ID NO: 1904940 - DNA, 15 bp, Homo sapiens
gatccatgcttcctc

SEQ ID NO: 1904941 - DNA, 15 bp, Homo sapiens
atccatgcttcctct

SEQ ID NO: 1904942 - DNA, 15 bp, Homo sapiens
tccatgcttcctctt

SEQ ID NO: 1904943 - DNA, 15 bp, Homo sapiens
ccatgcttcctcttt

SEQ ID NO: 1904944 - DNA, 15 bp, Homo sapiens
catgcttcctctttg

SEQ ID NO: 1904945 - DNA, 15 bp, Homo sapiens
atgcttcctctttgt

SEQ ID NO: 1904946 - DNA, 15 bp, Homo sapiens
tgcttcctctttgta

SEQ ID NO: 1904947 - DNA, 15 bp, Homo sapiens
gcttcctctttgtaa

SEQ ID NO: 1904948 - DNA, 15 bp, Homo sapiens
cttcctctttgtaaa

SEQ ID NO: 1904949 - DNA, 15 bp, Homo sapiens
ttcctctttgtaaac

SEQ ID NO: 1904950 - DNA, 15 bp, Homo sapiens
tcctctttgtaaact

SEQ ID NO: 1904951 - DNA, 15 bp, Homo sapiens
cctctttgtaaactg

SEQ ID NO: 1904952 - DNA, 15 bp, Homo sapiens
ctctttgtaaactgg

SEQ ID NO: 1904953 - DNA, 15 bp, Homo sapiens
tctttgtaaactggg

SEQ ID NO: 1904954 - DNA, 15 bp, Homo sapiens
ctttgtaaactgggt

SEQ ID NO: 1904955 - DNA, 15 bp, Homo sapiens
tttgtaaactgggtt

SEQ ID NO: 1904956 - DNA, 15 bp, Homo sapiens
ttgtaaactgggttg

SEQ ID NO: 1904957 - DNA, 15 bp, Homo sapiens
tgtaaactgggttgt

SEQ ID NO: 1904958 - DNA, 15 bp, Homo sapiens
gtaaactgggttgtc

SEQ ID NO: 1904959 - DNA, 15 bp, Homo sapiens
taaactgggttgtct

SEQ ID NO: 1904960 - DNA, 15 bp, Homo sapiens
aaactgggttgtctt

SEQ ID NO: 1904961 - DNA, 15 bp, Homo sapiens
aactgggttgtcttt

SEQ ID NO: 1904962 - DNA, 15 bp, Homo sapiens
actgggttgtctttt

SEQ ID NO: 1904963 - DNA, 15 bp, Homo sapiens
ctgggttgtctttta

SEQ ID NO: 1904964 - DNA, 15 bp, Homo sapiens
tgggttgtcttttag

SEQ ID NO: 1904965 - DNA, 15 bp, Homo sapiens
gggttgtcttttagg

SEQ ID NO: 1904966 - DNA, 15 bp, Homo sapiens
ggttgtcttttagga

SEQ ID NO: 1904967 - DNA, 15 bp, Homo sapiens
gttgtcttttaggag

SEQ ID NO: 1904968 - DNA, 15 bp, Homo sapiens
ttgtcttttaggagt

SEQ ID NO: 1904969 - DNA, 15 bp, Homo sapiens
tgtcttttaggagta

SEQ ID NO: 1904970 - DNA, 15 bp, Homo sapiens
gtcttttaggagtat

SEQ ID NO: 1904971 - DNA, 15 bp, Homo sapiens
tcttttaggagtata

SEQ ID NO: 1904972 - DNA, 15 bp, Homo sapiens
cttttaggagtatat

SEQ ID NO: 1904973 - DNA, 15 bp, Homo sapiens
ttttaggagtatatg

SEQ ID NO: 1904974 - DNA, 15 bp, Homo sapiens
tttaggagtatatgt

SEQ ID NO: 1904975 - DNA, 15 bp, Homo sapiens
ttaggagtatatgtg

SEQ ID NO: 1904976 - DNA, 15 bp, Homo sapiens
taggagtatatgtgt

SEQ ID NO: 1904977 - DNA, 15 bp, Homo sapiens
aggagtatatgtgtc

SEQ ID NO: 1904978 - DNA, 15 bp, Homo sapiens
ggagtatatgtgtcc

SEQ ID NO: 1904979 - DNA, 15 bp, Homo sapiens
gagtatatgtgtccc

SEQ ID NO: 1904980 - DNA, 15 bp, Homo sapiens
agtatatgtgtccct

SEQ ID NO: 1904981 - DNA, 15 bp, Homo sapiens
gtatatgtgtcccta

SEQ ID NO: 1904982 - DNA, 15 bp, Homo sapiens
tatatgtgtccctaa

SEQ ID NO: 1904983 - DNA, 15 bp, Homo sapiens
atatgtgtccctaat

SEQ ID NO: 1904984 - DNA, 15 bp, Homo sapiens
tatgtgtccctaatt

SEQ ID NO: 1904985 - DNA, 15 bp, Homo sapiens
atgtgtccctaattt

SEQ ID NO: 1904986 - DNA, 15 bp, Homo sapiens
tgtgtccctaattta

SEQ ID NO: 1904987 - DNA, 15 bp, Homo sapiens
gtgtccctaatttag

SEQ ID NO: 1904988 - DNA, 15 bp, Homo sapiens
tgtccctaatttaga

SEQ ID NO: 1904989 - DNA, 15 bp, Homo sapiens
gtccctaatttagaa

SEQ ID NO: 1904990 - DNA, 15 bp, Homo sapiens
tccctaatttagaac

SEQ ID NO: 1904991 - DNA, 15 bp, Homo sapiens
ccctaatttagaact

SEQ ID NO: 1904992 - DNA, 15 bp, Homo sapiens
cctaatttagaactc

SEQ ID NO: 1904993 - DNA, 15 bp, Homo sapiens
ctaatttagaactca

SEQ ID NO: 1904994 - DNA, 15 bp, Homo sapiens
taatttagaactcaa

SEQ ID NO: 1904995 - DNA, 15 bp, Homo sapiens
aatttagaactcaag

SEQ ID NO: 1904996 - DNA, 15 bp, Homo sapiens
atttagaactcaaga

SEQ ID NO: 1904997 - DNA, 15 bp, Homo sapiens
tttagaactcaagaa

SEQ ID NO: 1904998 - DNA, 15 bp, Homo sapiens
ttagaactcaagaat

SEQ ID NO: 1904999 - DNA, 15 bp, Homo sapiens
tagaactcaagaatc

SEQ ID NO: 1905000 - DNA, 15 bp, Homo sapiens
agaactcaagaatct

SEQ ID NO: 1905001 - DNA, 15 bp, Homo sapiens
gaactcaagaatcta

SEQ ID NO: 1905002 - DNA, 15 bp, Homo sapiens
aactcaagaatctat

SEQ ID NO: 1905003 - DNA, 15 bp, Homo sapiens
actcaagaatctata

SEQ ID NO: 1905004 - DNA, 15 bp, Homo sapiens
ctcaagaatctatat

SEQ ID NO: 1905005 - DNA, 15 bp, Homo sapiens
tcaagaatctatatg

SEQ ID NO: 1905006 - DNA, 15 bp, Homo sapiens
caagaatctatatgc

SEQ ID NO: 1905007 - DNA, 15 bp, Homo sapiens
aagaatctatatgct

SEQ ID NO: 1905008 - DNA, 15 bp, Homo sapiens
agaatctatatgcta

SEQ ID NO: 1905009 - DNA, 15 bp, Homo sapiens
gaatctatatgctac

SEQ ID NO: 1905010 - DNA, 15 bp, Homo sapiens
aatctatatgctaca

SEQ ID NO: 1905011 - DNA, 15 bp, Homo sapiens
atctatatgctacaa

SEQ ID NO: 1905012 - DNA, 15 bp, Homo sapiens
tctatatgctacaaa

SEQ ID NO: 1905013 - DNA, 15 bp, Homo sapiens
ctatatgctacaaaa

SEQ ID NO: 1905014 - DNA, 15 bp, Homo sapiens
tatatgctacaaaat

SEQ ID NO: 1905015 - DNA, 15 bp, Homo sapiens
atatgctacaaaatg

SEQ ID NO: 1905016 - DNA, 15 bp, Homo sapiens
tatgctacaaaatgt

SEQ ID NO: 1905017 - DNA, 15 bp, Homo sapiens
atgctacaaaatgta

SEQ ID NO: 1905018 - DNA, 15 bp, Homo sapiens
tgctacaaaatgtag

SEQ ID NO: 1905019 - DNA, 15 bp, Homo sapiens
gctacaaaatgtagg

SEQ ID NO: 1905020 - DNA, 15 bp, Homo sapiens
ctacaaaatgtagga

SEQ ID NO: 1905021 - DNA, 15 bp, Homo sapiens
tacaaaatgtaggag

SEQ ID NO: 1905022 - DNA, 15 bp, Homo sapiens
acaaaatgtaggaga

SEQ ID NO: 1905023 - DNA, 15 bp, Homo sapiens
caaaatgtaggagat

SEQ ID NO: 1905024 - DNA, 15 bp, Homo sapiens
aaaatgtaggagatg

SEQ ID NO: 1905025 - DNA, 15 bp, Homo sapiens
aaatgtaggagatgc

SEQ ID NO: 1905026 - DNA, 15 bp, Homo sapiens
aatgtaggagatgca

SEQ ID NO: 1905027 - DNA, 15 bp, Homo sapiens
atgtaggagatgcaa

SEQ ID NO: 1905028 - DNA, 15 bp, Homo sapiens
tgtaggagatgcaag

SEQ ID NO: 1905029 - DNA, 15 bp, Homo sapiens
gtaggagatgcaagc

SEQ ID NO: 1905030 - DNA, 15 bp, Homo sapiens
taggagatgcaagct

SEQ ID NO: 1905031 - DNA, 15 bp, Homo sapiens
aggagatgcaagctc

SEQ ID NO: 1905032 - DNA, 15 bp, Homo sapiens
ggagatgcaagctct

SEQ ID NO: 1905033 - DNA, 15 bp, Homo sapiens
gagatgcaagctctt

SEQ ID NO: 1905034 - DNA, 15 bp, Homo sapiens
agatgcaagctctta

SEQ ID NO: 1905035 - DNA, 15 bp, Homo sapiens
gatgcaagctcttaa

SEQ ID NO: 1905036 - DNA, 15 bp, Homo sapiens
atgcaagctcttaaa

SEQ ID NO: 1905037 - DNA, 15 bp, Homo sapiens
tgcaagctcttaaac

SEQ ID NO: 1905038 - DNA, 15 bp, Homo sapiens
gcaagctcttaaact

SEQ ID NO: 1905039 - DNA, 15 bp, Homo sapiens
caagctcttaaacta

SEQ ID NO: 1905040 - DNA, 15 bp, Homo sapiens
aagctcttaaactat

SEQ ID NO: 1905041 - DNA, 15 bp, Homo sapiens
agctcttaaactatt

SEQ ID NO: 1905042 - DNA, 15 bp, Homo sapiens
gctcttaaactattc

SEQ ID NO: 1905043 - DNA, 15 bp, Homo sapiens
ctcttaaactattct

SEQ ID NO: 1905044 - DNA, 15 bp, Homo sapiens
tcttaaactattcta

SEQ ID NO: 1905045 - DNA, 15 bp, Homo sapiens
cttaaactattctaa

SEQ ID NO: 1905046 - DNA, 15 bp, Homo sapiens
ttaaactattctaag

SEQ ID NO: 1905047 - DNA, 15 bp, Homo sapiens
taaactattctaagt

SEQ ID NO: 1905048 - DNA, 15 bp, Homo sapiens
aaactattctaagtt

SEQ ID NO: 1905049 - DNA, 15 bp, Homo sapiens
aactattctaagtta

SEQ ID NO: 1905050 - DNA, 15 bp, Homo sapiens
actattctaagttat

SEQ ID NO: 1905051 - DNA, 15 bp, Homo sapiens
ctattctaagttatt

SEQ ID NO: 1905052 - DNA, 15 bp, Homo sapiens
tattctaagttattt

SEQ ID NO: 1905053 - DNA, 15 bp, Homo sapiens
attctaagttattta

SEQ ID NO: 1905054 - DNA, 15 bp, Homo sapiens
ttctaagttatttat

SEQ ID NO: 1905055 - DNA, 15 bp, Homo sapiens
tctaagttatttatg

SEQ ID NO: 1905056 - DNA, 15 bp, Homo sapiens
ctaagttatttatgt

SEQ ID NO: 1905057 - DNA, 15 bp, Homo sapiens
taagttatttatgtt

SEQ ID NO: 1905058 - DNA, 15 bp, Homo sapiens
aagttatttatgtta

SEQ ID NO: 1905059 - DNA, 15 bp, Homo sapiens
agttatttatgttat

SEQ ID NO: 1905060 - DNA, 15 bp, Homo sapiens
gttatttatgttatt

SEQ ID NO: 1905061 - DNA, 15 bp, Homo sapiens
ttatttatgttattt

SEQ ID NO: 1905062 - DNA, 15 bp, Homo sapiens
tatttatgttattta

SEQ ID NO: 1905063 - DNA, 15 bp, Homo sapiens
atttatgttatttat

SEQ ID NO: 1905064 - DNA, 15 bp, Homo sapiens
tttatgttatttata

SEQ ID NO: 1905065 - DNA, 15 bp, Homo sapiens
ttatgttatttatag

SEQ ID NO: 1905066 - DNA, 15 bp, Homo sapiens
tatgttatttatagg

SEQ ID NO: 1905067 - DNA, 15 bp, Homo sapiens
atgttatttataggg

SEQ ID NO: 1905068 - DNA, 15 bp, Homo sapiens
tgttatttatagggc

SEQ ID NO: 1905069 - DNA, 15 bp, Homo sapiens
gttatttatagggct

SEQ ID NO: 1905070 - DNA, 15 bp, Homo sapiens
ttatttatagggctt

SEQ ID NO: 1905071 - DNA, 15 bp, Homo sapiens
tatttatagggcttc

SEQ ID NO: 1905072 - DNA, 15 bp, Homo sapiens
atttatagggcttcc

SEQ ID NO: 1905073 - DNA, 15 bp, Homo sapiens
tttatagggcttcct

SEQ ID NO: 1905074 - DNA, 15 bp, Homo sapiens
ttatagggcttcctt

SEQ ID NO: 1905075 - DNA, 15 bp, Homo sapiens
tatagggcttccttg

SEQ ID NO: 1905076 - DNA, 15 bp, Homo sapiens
atagggcttccttgg

SEQ ID NO: 1905077 - DNA, 15 bp, Homo sapiens
tagggcttccttggc

SEQ ID NO: 1905078 - DNA, 15 bp, Homo sapiens
agggcttccttggca

SEQ ID NO: 1905079 - DNA, 15 bp, Homo sapiens
gggcttccttggcac

SEQ ID NO: 1905080 - DNA, 15 bp, Homo sapiens
ggcttccttggcacc

SEQ ID NO: 1905081 - DNA, 15 bp, Homo sapiens
gcttccttggcaccc

SEQ ID NO: 1905082 - DNA, 15 bp, Homo sapiens
cttccttggcaccca

SEQ ID NO: 1905083 - DNA, 15 bp, Homo sapiens
ttccttggcacccaa

SEQ ID NO: 1905084 - DNA, 15 bp, Homo sapiens
tccttggcacccaag

SEQ ID NO: 1905085 - DNA, 15 bp, Homo sapiens
ccttggcacccaagt

SEQ ID NO: 1905086 - DNA, 15 bp, Homo sapiens
cttggcacccaagtc

SEQ ID NO: 1905087 - DNA, 15 bp, Homo sapiens
ttggcacccaagtca

SEQ ID NO: 1905088 - DNA, 15 bp, Homo sapiens
tggcacccaagtcat

SEQ ID NO: 1905089 - DNA, 15 bp, Homo sapiens
ggcacccaagtcatc

SEQ ID NO: 1905090 - DNA, 15 bp, Homo sapiens
gcacccaagtcatcc

SEQ ID NO: 1905091 - DNA, 15 bp, Homo sapiens
cacccaagtcatcct

SEQ ID NO: 1905092 - DNA, 15 bp, Homo sapiens
acccaagtcatccta

SEQ ID NO: 1905093 - DNA, 15 bp, Homo sapiens
cccaagtcatcctat

SEQ ID NO: 1905094 - DNA, 15 bp, Homo sapiens
ccaagtcatcctatt

SEQ ID NO: 1905095 - DNA, 15 bp, Homo sapiens
caagtcatcctatta

SEQ ID NO: 1905096 - DNA, 15 bp, Homo sapiens
aagtcatcctattaa

SEQ ID NO: 1905097 - DNA, 15 bp, Homo sapiens
agtcatcctattaaa

SEQ ID NO: 1905098 - DNA, 15 bp, Homo sapiens
gtcatcctattaaac

SEQ ID NO: 1905099 - DNA, 15 bp, Homo sapiens
tcatcctattaaaca

SEQ ID NO: 1905100 - DNA, 15 bp, Homo sapiens
catcctattaaacat

SEQ ID NO: 1905101 - DNA, 15 bp, Homo sapiens
atcctattaaacatt

SEQ ID NO: 1905102 - DNA, 15 bp, Homo sapiens
tcctattaaacattt

SEQ ID NO: 1905103 - DNA, 15 bp, Homo sapiens
cctattaaacatttt

SEQ ID NO: 1905104 - DNA, 15 bp, Homo sapiens
ctattaaacattttc

SEQ ID NO: 1905105 - DNA, 15 bp, Homo sapiens
tattaaacattttcc

SEQ ID NO: 1905106 - DNA, 15 bp, Homo sapiens
attaaacattttcca

SEQ ID NO: 1905107 - DNA, 15 bp, Homo sapiens
ttaaacattttccag

SEQ ID NO: 1905108 - DNA, 15 bp, Homo sapiens
taaacattttccagg

SEQ ID NO: 1905109 - DNA, 15 bp, Homo sapiens
aaacattttccaggc

SEQ ID NO: 1905110 - DNA, 15 bp, Homo sapiens
aacattttccaggca

SEQ ID NO: 1905111 - DNA, 15 bp, Homo sapiens
acattttccaggcaa

SEQ ID NO: 1905112 - DNA, 15 bp, Homo sapiens
cattttccaggcaat

SEQ ID NO: 1905113 - DNA, 15 bp, Homo sapiens
attttccaggcaatt

SEQ ID NO: 1905114 - DNA, 15 bp, Homo sapiens
ttttccaggcaattc

SEQ ID NO: 1905115 - DNA, 15 bp, Homo sapiens
tttccaggcaattct

SEQ ID NO: 1905116 - DNA, 15 bp, Homo sapiens
ttccaggcaattctg

SEQ ID NO: 1905117 - DNA, 15 bp, Homo sapiens
tccaggcaattctga

SEQ ID NO: 1905118 - DNA, 15 bp, Homo sapiens
ccaggcaattctgaa

SEQ ID NO: 1905119 - DNA, 15 bp, Homo sapiens
caggcaattctgaaa

SEQ ID NO: 1905120 - DNA, 15 bp, Homo sapiens
aggcaattctgaaag

SEQ ID NO: 1905121 - DNA, 15 bp, Homo sapiens
ggcaattctgaaagc

SEQ ID NO: 1905122 - DNA, 15 bp, Homo sapiens
gcaattctgaaagca

SEQ ID NO: 1905123 - DNA, 15 bp, Homo sapiens
caattctgaaagcat

SEQ ID NO: 1905124 - DNA, 15 bp, Homo sapiens
aattctgaaagcata

SEQ ID NO: 1905125 - DNA, 15 bp, Homo sapiens
attctgaaagcatag

SEQ ID NO: 1905126 - DNA, 15 bp, Homo sapiens
ttctgaaagcataga

SEQ ID NO: 1905127 - DNA, 15 bp, Homo sapiens
tctgaaagcatagat

SEQ ID NO: 1905128 - DNA, 15 bp, Homo sapiens
ctgaaagcatagatt

SEQ ID NO: 1905129 - DNA, 15 bp, Homo sapiens
tgaaagcatagattt

SEQ ID NO: 1905130 - DNA, 15 bp, Homo sapiens
gaaagcatagatttt

SEQ ID NO: 1905131 - DNA, 15 bp, Homo sapiens
aaagcatagattttt

SEQ ID NO: 1905132 - DNA, 15 bp, Homo sapiens
aagcatagatttttt

SEQ ID NO: 1905133 - DNA, 15 bp, Homo sapiens
agcatagattttttt

SEQ ID NO: 1905134 - DNA, 15 bp, Homo sapiens
gcatagattttttta

SEQ ID NO: 1905135 - DNA, 15 bp, Homo sapiens
catagatttttttaa

SEQ ID NO: 1905136 - DNA, 15 bp, Homo sapiens
agatttttttaaagg

SEQ ID NO: 1905137 - DNA, 15 bp, Homo sapiens
gatttttttaaagga

SEQ ID NO: 1905138 - DNA, 15 bp, Homo sapiens
atttttttaaaggag

SEQ ID NO: 1905139 - DNA, 15 bp, Homo sapiens
tttttttaaaggagt

SEQ ID NO: 1905140 - DNA, 15 bp, Homo sapiens
ttttttaaaggagta

SEQ ID NO: 1905141 - DNA, 15 bp, Homo sapiens
tttttaaaggagtat

SEQ ID NO: 1905142 - DNA, 15 bp, Homo sapiens
ttttaaaggagtatc

SEQ ID NO: 1905143 - DNA, 15 bp, Homo sapiens
tttaaaggagtatct

SEQ ID NO: 1905144 - DNA, 15 bp, Homo sapiens
ttaaaggagtatcta

SEQ ID NO: 1905145 - DNA, 15 bp, Homo sapiens
taaaggagtatctaa

SEQ ID NO: 1905146 - DNA, 15 bp, Homo sapiens
aaaggagtatctaat

SEQ ID NO: 1905147 - DNA, 15 bp, Homo sapiens
aaggagtatctaatt

SEQ ID NO: 1905148 - DNA, 15 bp, Homo sapiens
aggagtatctaattt

SEQ ID NO: 1905149 - DNA, 15 bp, Homo sapiens
ggagtatctaattta

SEQ ID NO: 1905150 - DNA, 15 bp, Homo sapiens
gagtatctaatttaa

SEQ ID NO: 1905151 - DNA, 15 bp, Homo sapiens
agtatctaatttaat

SEQ ID NO: 1905152 - DNA, 15 bp, Homo sapiens
gtatctaatttaata

SEQ ID NO: 1905153 - DNA, 15 bp, Homo sapiens
tatctaatttaatac

SEQ ID NO: 1905154 - DNA, 15 bp, Homo sapiens
atctaatttaatact

SEQ ID NO: 1905155 - DNA, 15 bp, Homo sapiens
tctaatttaatactt

SEQ ID NO: 1905156 - DNA, 15 bp, Homo sapiens
ctaatttaatacttc

SEQ ID NO: 1905157 - DNA, 15 bp, Homo sapiens
taatttaatacttct

SEQ ID NO: 1905158 - DNA, 15 bp, Homo sapiens
aatttaatacttctc

SEQ ID NO: 1905159 - DNA, 15 bp, Homo sapiens
atttaatacttctca

SEQ ID NO: 1905160 - DNA, 15 bp, Homo sapiens
tttaatacttctcaa

SEQ ID NO: 1905161 - DNA, 15 bp, Homo sapiens
ttaatacttctcaag

SEQ ID NO: 1905162 - DNA, 15 bp, Homo sapiens
taatacttctcaaga

SEQ ID NO: 1905163 - DNA, 15 bp, Homo sapiens
aatacttctcaagag

SEQ ID NO: 1905164 - DNA, 15 bp, Homo sapiens
atacttctcaagagt

SEQ ID NO: 1905165 - DNA, 15 bp, Homo sapiens
tacttctcaagagtc

SEQ ID NO: 1905166 - DNA, 15 bp, Homo sapiens
acttctcaagagtct

SEQ ID NO: 1905167 - DNA, 15 bp, Homo sapiens
cttctcaagagtctt

SEQ ID NO: 1905168 - DNA, 15 bp, Homo sapiens
ttctcaagagtcttt

SEQ ID NO: 1905169 - DNA, 15 bp, Homo sapiens
tctcaagagtctttc

SEQ ID NO: 1905170 - DNA, 15 bp, Homo sapiens
ctcaagagtctttca

SEQ ID NO: 1905171 - DNA, 15 bp, Homo sapiens
tcaagagtctttcac

SEQ ID NO: 1905172 - DNA, 15 bp, Homo sapiens
caagagtctttcacc

SEQ ID NO: 1905173 - DNA, 15 bp, Homo sapiens
aagagtctttcacca

SEQ ID NO: 1905174 - DNA, 15 bp, Homo sapiens
agagtctttcaccat

SEQ ID NO: 1905175 - DNA, 15 bp, Homo sapiens
gagtctttcaccata

SEQ ID NO: 1905176 - DNA, 15 bp, Homo sapiens
agtctttcaccatag

SEQ ID NO: 1905177 - DNA, 15 bp, Homo sapiens
gtctttcaccataga

SEQ ID NO: 1905178 - DNA, 15 bp, Homo sapiens
tctttcaccatagaa

SEQ ID NO: 1905179 - DNA, 15 bp, Homo sapiens
ctttcaccatagaat

SEQ ID NO: 1905180 - DNA, 15 bp, Homo sapiens
tttcaccatagaatc

SEQ ID NO: 1905181 - DNA, 15 bp, Homo sapiens
ttcaccatagaatcc

SEQ ID NO: 1905182 - DNA, 15 bp, Homo sapiens
tcaccatagaatcca

SEQ ID NO: 1905183 - DNA, 15 bp, Homo sapiens
caccatagaatccaa

SEQ ID NO: 1905184 - DNA, 15 bp, Homo sapiens
accatagaatccaag

SEQ ID NO: 1905185 - DNA, 15 bp, Homo sapiens
ccatagaatccaagc

SEQ ID NO: 1905186 - DNA, 15 bp, Homo sapiens
catagaatccaagca

SEQ ID NO: 1905187 - DNA, 15 bp, Homo sapiens
atagaatccaagcaa

SEQ ID NO: 1905188 - DNA, 15 bp, Homo sapiens
tagaatccaagcaat

SEQ ID NO: 1905189 - DNA, 15 bp, Homo sapiens
agaatccaagcaatt

SEQ ID NO: 1905190 - DNA, 15 bp, Homo sapiens
gaatccaagcaattt

SEQ ID NO: 1905191 - DNA, 15 bp, Homo sapiens
aatccaagcaatttg

SEQ ID NO: 1905192 - DNA, 15 bp, Homo sapiens
atccaagcaatttga

SEQ ID NO: 1905193 - DNA, 15 bp, Homo sapiens
tccaagcaatttgac

SEQ ID NO: 1905194 - DNA, 15 bp, Homo sapiens
ccaagcaatttgacc

SEQ ID NO: 1905195 - DNA, 15 bp, Homo sapiens
caagcaatttgacct

SEQ ID NO: 1905196 - DNA, 15 bp, Homo sapiens
aagcaatttgacctg

SEQ ID NO: 1905197 - DNA, 15 bp, Homo sapiens
agcaatttgacctga

SEQ ID NO: 1905198 - DNA, 15 bp, Homo sapiens
gcaatttgacctgac

SEQ ID NO: 1905199 - DNA, 15 bp, Homo sapiens
caatttgacctgacc

SEQ ID NO: 1905200 - DNA, 15 bp, Homo sapiens
aatttgacctgacct

SEQ ID NO: 1905201 - DNA, 15 bp, Homo sapiens
atttgacctgacctg

SEQ ID NO: 1905202 - DNA, 15 bp, Homo sapiens
tttgacctgacctgg

SEQ ID NO: 1905203 - DNA, 15 bp, Homo sapiens
ttgacctgacctggt

SEQ ID NO: 1905204 - DNA, 15 bp, Homo sapiens
tgacctgacctggtt

SEQ ID NO: 1905205 - DNA, 15 bp, Homo sapiens
gacctgacctggttt

SEQ ID NO: 1905206 - DNA, 15 bp, Homo sapiens
acctgacctggtttt

SEQ ID NO: 1905207 - DNA, 15 bp, Homo sapiens
cctgacctggttttt

SEQ ID NO: 1905208 - DNA, 15 bp, Homo sapiens
ctgacctggtttttc

SEQ ID NO: 1905209 - DNA, 15 bp, Homo sapiens
tgacctggtttttct

SEQ ID NO: 1905210 - DNA, 15 bp, Homo sapiens
gacctggtttttctt

SEQ ID NO: 1905211 - DNA, 15 bp, Homo sapiens
acctggtttttcttt

SEQ ID NO: 1905212 - DNA, 15 bp, Homo sapiens
cctggtttttctttg

SEQ ID NO: 1905213 - DNA, 15 bp, Homo sapiens
ctggtttttctttga

SEQ ID NO: 1905214 - DNA, 15 bp, Homo sapiens
tggtttttctttgac

SEQ ID NO: 1905215 - DNA, 15 bp, Homo sapiens
ggtttttctttgacc

SEQ ID NO: 1905216 - DNA, 15 bp, Homo sapiens
gtttttctttgacct

SEQ ID NO: 1905217 - DNA, 15 bp, Homo sapiens
tttttctttgacctg

SEQ ID NO: 1905218 - DNA, 15 bp, Homo sapiens
ttttctttgacctgt

SEQ ID NO: 1905219 - DNA, 15 bp, Homo sapiens
tttctttgacctgta

SEQ ID NO: 1905220 - DNA, 15 bp, Homo sapiens
ttctttgacctgtag

SEQ ID NO: 1905221 - DNA, 15 bp, Homo sapiens
tctttgacctgtagc

SEQ ID NO: 1905222 - DNA, 15 bp, Homo sapiens
ctttgacctgtagcc

SEQ ID NO: 1905223 - DNA, 15 bp, Homo sapiens
tttgacctgtagcca

SEQ ID NO: 1905224 - DNA, 15 bp, Homo sapiens
ttgacctgtagccat

SEQ ID NO: 1905225 - DNA, 15 bp, Homo sapiens
tgacctgtagccatc

SEQ ID NO: 1905226 - DNA, 15 bp, Homo sapiens
gacctgtagccatcc

SEQ ID NO: 1905227 - DNA, 15 bp, Homo sapiens
acctgtagccatcca

SEQ ID NO: 1905228 - DNA, 15 bp, Homo sapiens
cctgtagccatccaa

SEQ ID NO: 1905229 - DNA, 15 bp, Homo sapiens
ctgtagccatccaaa

SEQ ID NO: 1905230 - DNA, 15 bp, Homo sapiens
tgtagccatccaaag

SEQ ID NO: 1905231 - DNA, 15 bp, Homo sapiens
gtagccatccaaaga

SEQ ID NO: 1905232 - DNA, 15 bp, Homo sapiens
tagccatccaaagag

SEQ ID NO: 1905233 - DNA, 15 bp, Homo sapiens
agccatccaaagaga

SEQ ID NO: 1905234 - DNA, 15 bp, Homo sapiens
gccatccaaagagaa

SEQ ID NO: 1905235 - DNA, 15 bp, Homo sapiens
ccatccaaagagaat

SEQ ID NO: 1905236 - DNA, 15 bp, Homo sapiens
catccaaagagaatc

SEQ ID NO: 1905237 - DNA, 15 bp, Homo sapiens
atccaaagagaatca

SEQ ID NO: 1905238 - DNA, 15 bp, Homo sapiens
tccaaagagaatcat

SEQ ID NO: 1905239 - DNA, 15 bp, Homo sapiens
ccaaagagaatcatt

SEQ ID NO: 1905240 - DNA, 15 bp, Homo sapiens
caaagagaatcatta

SEQ ID NO: 1905241 - DNA, 15 bp, Homo sapiens
aaagagaatcattat

SEQ ID NO: 1905242 - DNA, 15 bp, Homo sapiens
aagagaatcattatt

SEQ ID NO: 1905243 - DNA, 15 bp, Homo sapiens
agagaatcattattc

SEQ ID NO: 1905244 - DNA, 15 bp, Homo sapiens
gagaatcattattcc

SEQ ID NO: 1905245 - DNA, 15 bp, Homo sapiens
agaatcattattcct

SEQ ID NO: 1905246 - DNA, 15 bp, Homo sapiens
gaatcattattcctg

SEQ ID NO: 1905247 - DNA, 15 bp, Homo sapiens
aatcattattcctgt

SEQ ID NO: 1905248 - DNA, 15 bp, Homo sapiens
atcattattcctgtt

SEQ ID NO: 1905249 - DNA, 15 bp, Homo sapiens
tcattattcctgtta

SEQ ID NO: 1905250 - DNA, 15 bp, Homo sapiens
cattattcctgttaa

SEQ ID NO: 1905251 - DNA, 15 bp, Homo sapiens
attattcctgttaac

SEQ ID NO: 1905252 - DNA, 15 bp, Homo sapiens
ttattcctgttaact

SEQ ID NO: 1905253 - DNA, 15 bp, Homo sapiens
tattcctgttaactg

SEQ ID NO: 1905254 - DNA, 15 bp, Homo sapiens
attcctgttaactga

SEQ ID NO: 1905255 - DNA, 15 bp, Homo sapiens
ttcctgttaactgat

SEQ ID NO: 1905256 - DNA, 15 bp, Homo sapiens
tcctgttaactgatt

SEQ ID NO: 1905257 - DNA, 15 bp, Homo sapiens
cctgttaactgattt

SEQ ID NO: 1905258 - DNA, 15 bp, Homo sapiens
ctgttaactgatttt

SEQ ID NO: 1905259 - DNA, 15 bp, Homo sapiens
tgttaactgattttt

SEQ ID NO: 1905260 - DNA, 15 bp, Homo sapiens
gttaactgatttttt

SEQ ID NO: 1905261 - DNA, 15 bp, Homo sapiens
ttaactgattttttt

SEQ ID NO: 1905262 - DNA, 15 bp, Homo sapiens
taactgattttttta

SEQ ID NO: 1905263 - DNA, 15 bp, Homo sapiens
aactgatttttttaa

SEQ ID NO: 1905264 - DNA, 15 bp, Homo sapiens
actgatttttttaaa

SEQ ID NO: 1905265 - DNA, 15 bp, Homo sapiens
ctgatttttttaaat

SEQ ID NO: 1905266 - DNA, 15 bp, Homo sapiens
tgatttttttaaata

SEQ ID NO: 1905267 - DNA, 15 bp, Homo sapiens
gatttttttaaatac

SEQ ID NO: 1905268 - DNA, 15 bp, Homo sapiens
atttttttaaataca

SEQ ID NO: 1905269 - DNA, 15 bp, Homo sapiens
tttttttaaatacat

SEQ ID NO: 1905270 - DNA, 15 bp, Homo sapiens
ttttttaaatacatc

SEQ ID NO: 1905271 - DNA, 15 bp, Homo sapiens
tttttaaatacatct

SEQ ID NO: 1905272 - DNA, 15 bp, Homo sapiens
ttttaaatacatctt

SEQ ID NO: 1905273 - DNA, 15 bp, Homo sapiens
tttaaatacatcttt

SEQ ID NO: 1905274 - DNA, 15 bp, Homo sapiens
ttaaatacatcttta

SEQ ID NO: 1905275 - DNA, 15 bp, Homo sapiens
taaatacatctttaa

SEQ ID NO: 1905276 - DNA, 15 bp, Homo sapiens
aaatacatctttaag

SEQ ID NO: 1905277 - DNA, 15 bp, Homo sapiens
aatacatctttaagt

SEQ ID NO: 1905278 - DNA, 15 bp, Homo sapiens
atacatctttaagta

SEQ ID NO: 1905279 - DNA, 15 bp, Homo sapiens
tacatctttaagtat

SEQ ID NO: 1905280 - DNA, 15 bp, Homo sapiens
acatctttaagtata

SEQ ID NO: 1905281 - DNA, 15 bp, Homo sapiens
catctttaagtataa

SEQ ID NO: 1905282 - DNA, 15 bp, Homo sapiens
atctttaagtataat

SEQ ID NO: 1905283 - DNA, 15 bp, Homo sapiens
tctttaagtataatc

SEQ ID NO: 1905284 - DNA, 15 bp, Homo sapiens
ctttaagtataatcc

SEQ ID NO: 1905285 - DNA, 15 bp, Homo sapiens
tttaagtataatcct

SEQ ID NO: 1905286 - DNA, 15 bp, Homo sapiens
ttaagtataatcctt

SEQ ID NO: 1905287 - DNA, 15 bp, Homo sapiens
taagtataatccttc

SEQ ID NO: 1905288 - DNA, 15 bp, Homo sapiens
aagtataatccttca

SEQ ID NO: 1905289 - DNA, 15 bp, Homo sapiens
agtataatccttcaa

SEQ ID NO: 1905290 - DNA, 15 bp, Homo sapiens
gtataatccttcaat

SEQ ID NO: 1905291 - DNA, 15 bp, Homo sapiens
tataatccttcaatg

SEQ ID NO: 1905292 - DNA, 15 bp, Homo sapiens
ataatccttcaatga

SEQ ID NO: 1905293 - DNA, 15 bp, Homo sapiens
taatccttcaatgag

SEQ ID NO: 1905294 - DNA, 15 bp, Homo sapiens
aatccttcaatgagt

SEQ ID NO: 1905295 - DNA, 15 bp, Homo sapiens
atccttcaatgagtg

SEQ ID NO: 1905296 - DNA, 15 bp, Homo sapiens
tccttcaatgagtga

SEQ ID NO: 1905297 - DNA, 15 bp, Homo sapiens
ccttcaatgagtgag

SEQ ID NO: 1905298 - DNA, 15 bp, Homo sapiens
cttcaatgagtgaga

SEQ ID NO: 1905299 - DNA, 15 bp, Homo sapiens
ttcaatgagtgagag

SEQ ID NO: 1905300 - DNA, 15 bp, Homo sapiens
tcaatgagtgagagt

SEQ ID NO: 1905301 - DNA, 15 bp, Homo sapiens
caatgagtgagagta

SEQ ID NO: 1905302 - DNA, 15 bp, Homo sapiens
aatgagtgagagtag

SEQ ID NO: 1905303 - DNA, 15 bp, Homo sapiens
atgagtgagagtagg

SEQ ID NO: 1905304 - DNA, 15 bp, Homo sapiens
tgagtgagagtagga

SEQ ID NO: 1905305 - DNA, 15 bp, Homo sapiens
gagtgagagtaggat

SEQ ID NO: 1905306 - DNA, 15 bp, Homo sapiens
agtgagagtaggatt

SEQ ID NO: 1905307 - DNA, 15 bp, Homo sapiens
gtgagagtaggattt

SEQ ID NO: 1905308 - DNA, 15 bp, Homo sapiens
tgagagtaggattta

SEQ ID NO: 1905309 - DNA, 15 bp, Homo sapiens
gagagtaggatttag

SEQ ID NO: 1905310 - DNA, 15 bp, Homo sapiens
agagtaggatttaga

SEQ ID NO: 1905311 - DNA, 15 bp, Homo sapiens
gagtaggatttagaa

SEQ ID NO: 1905312 - DNA, 15 bp, Homo sapiens
agtaggatttagaat

SEQ ID NO: 1905313 - DNA, 15 bp, Homo sapiens
gtaggatttagaatt

SEQ ID NO: 1905314 - DNA, 15 bp, Homo sapiens
taggatttagaattt

SEQ ID NO: 1905315 - DNA, 15 bp, Homo sapiens
aggatttagaatttc

SEQ ID NO: 1905316 - DNA, 15 bp, Homo sapiens
ggatttagaatttca

SEQ ID NO: 1905317 - DNA, 15 bp, Homo sapiens
gatttagaatttcaa

SEQ ID NO: 1905318 - DNA, 15 bp, Homo sapiens
atttagaatttcaaa

SEQ ID NO: 1905319 - DNA, 15 bp, Homo sapiens
tttagaatttcaaat

SEQ ID NO: 1905320 - DNA, 15 bp, Homo sapiens
ttagaatttcaaata

SEQ ID NO: 1905321 - DNA, 15 bp, Homo sapiens
tagaatttcaaatac

SEQ ID NO: 1905322 - DNA, 15 bp, Homo sapiens
agaatttcaaataca

SEQ ID NO: 1905323 - DNA, 15 bp, Homo sapiens
gaatttcaaatacat

SEQ ID NO: 1905324 - DNA, 15 bp, Homo sapiens
aatttcaaatacatt

SEQ ID NO: 1905325 - DNA, 15 bp, Homo sapiens
atttcaaatacattt

SEQ ID NO: 1905326 - DNA, 15 bp, Homo sapiens
tttcaaatacatttt

SEQ ID NO: 1905327 - DNA, 15 bp, Homo sapiens
ttcaaatacattttc

SEQ ID NO: 1905328 - DNA, 15 bp, Homo sapiens
tcaaatacattttcc

SEQ ID NO: 1905329 - DNA, 15 bp, Homo sapiens
caaatacattttcct

SEQ ID NO: 1905330 - DNA, 15 bp, Homo sapiens
aaatacattttcctt

SEQ ID NO: 1905331 - DNA, 15 bp, Homo sapiens
aatacattttccttt

SEQ ID NO: 1905332 - DNA, 15 bp, Homo sapiens
atacattttccttta

SEQ ID NO: 1905333 - DNA, 15 bp, Homo sapiens
tacattttcctttat

SEQ ID NO: 1905334 - DNA, 15 bp, Homo sapiens
acattttcctttatc

SEQ ID NO: 1905335 - DNA, 15 bp, Homo sapiens
cattttcctttatct

SEQ ID NO: 1905336 - DNA, 15 bp, Homo sapiens
attttcctttatctg

SEQ ID NO: 1905337 - DNA, 15 bp, Homo sapiens
ttttcctttatctgc

SEQ ID NO: 1905338 - DNA, 15 bp, Homo sapiens
tcctttatctgctta

SEQ ID NO: 1905339 - DNA, 15 bp, Homo sapiens
cctttatctgcttag

SEQ ID NO: 1905340 - DNA, 15 bp, Homo sapiens
ctttatctgcttagt

SEQ ID NO: 1905341 - DNA, 15 bp, Homo sapiens
tttatctgcttagtg

SEQ ID NO: 1905342 - DNA, 15 bp, Homo sapiens
ttatctgcttagtgt

SEQ ID NO: 1905343 - DNA, 15 bp, Homo sapiens
tatctgcttagtgtc

SEQ ID NO: 1905344 - DNA, 15 bp, Homo sapiens
atctgcttagtgtct

SEQ ID NO: 1905345 - DNA, 15 bp, Homo sapiens
tctgcttagtgtctt

SEQ ID NO: 1905346 - DNA, 15 bp, Homo sapiens
ctgcttagtgtcttt

SEQ ID NO: 1905347 - DNA, 15 bp, Homo sapiens
tgcttagtgtctttt

SEQ ID NO: 1905348 - DNA, 15 bp, Homo sapiens
gcttagtgtcttttg

SEQ ID NO: 1905349 - DNA, 15 bp, Homo sapiens
cttagtgtcttttgc

SEQ ID NO: 1905350 - DNA, 15 bp, Homo sapiens
ttagtgtcttttgca

SEQ ID NO: 1905351 - DNA, 15 bp, Homo sapiens
tagtgtcttttgcat

SEQ ID NO: 1905352 - DNA, 15 bp, Homo sapiens
agtgtcttttgcatt

SEQ ID NO: 1905353 - DNA, 15 bp, Homo sapiens
gtgtcttttgcattg

SEQ ID NO: 1905354 - DNA, 15 bp, Homo sapiens
tgtcttttgcattgt

SEQ ID NO: 1905355 - DNA, 15 bp, Homo sapiens
gtcttttgcattgta

SEQ ID NO: 1905356 - DNA, 15 bp, Homo sapiens
tcttttgcattgtaa

SEQ ID NO: 1905357 - DNA, 15 bp, Homo sapiens
cttttgcattgtaaa

SEQ ID NO: 1905358 - DNA, 15 bp, Homo sapiens
ttttgcattgtaaaa

SEQ ID NO: 1905359 - DNA, 15 bp, Homo sapiens
tttgcattgtaaaag

SEQ ID NO: 1905360 - DNA, 15 bp, Homo sapiens
ttgcattgtaaaagt

SEQ ID NO: 1905361 - DNA, 15 bp, Homo sapiens
tgcattgtaaaagtc

SEQ ID NO: 1905362 - DNA, 15 bp, Homo sapiens
gcattgtaaaagtct

SEQ ID NO: 1905363 - DNA, 15 bp, Homo sapiens
cattgtaaaagtctt

SEQ ID NO: 1905364 - DNA, 15 bp, Homo sapiens
attgtaaaagtcttt

SEQ ID NO: 1905365 - DNA, 15 bp, Homo sapiens
ttgtaaaagtctttt

SEQ ID NO: 1905366 - DNA, 15 bp, Homo sapiens
tgtaaaagtcttttg

SEQ ID NO: 1905367 - DNA, 15 bp, Homo sapiens
gtaaaagtcttttgt

SEQ ID NO: 1905368 - DNA, 15 bp, Homo sapiens
taaaagtcttttgtt

SEQ ID NO: 1905369 - DNA, 15 bp, Homo sapiens
aaaagtcttttgttg

SEQ ID NO: 1905370 - DNA, 15 bp, Homo sapiens
aaagtcttttgttgt

SEQ ID NO: 1905371 - DNA, 15 bp, Homo sapiens
aagtcttttgttgtt

SEQ ID NO: 1905372 - DNA, 15 bp, Homo sapiens
agtcttttgttgttg

SEQ ID NO: 1905373 - DNA, 15 bp, Homo sapiens
gtcttttgttgttgg

SEQ ID NO: 1905374 - DNA, 15 bp, Homo sapiens
tcttttgttgttgga

SEQ ID NO: 1905375 - DNA, 15 bp, Homo sapiens
cttttgttgttggat

SEQ ID NO: 1905376 - DNA, 15 bp, Homo sapiens
ttttgttgttggatc

SEQ ID NO: 1905377 - DNA, 15 bp, Homo sapiens
tttgttgttggatcc

SEQ ID NO: 1905378 - DNA, 15 bp, Homo sapiens
ttgttgttggatcca

SEQ ID NO: 1905379 - DNA, 15 bp, Homo sapiens
tgttgttggatccat

SEQ ID NO: 1905380 - DNA, 15 bp, Homo sapiens
gttgttggatccatt

SEQ ID NO: 1905381 - DNA, 15 bp, Homo sapiens
ttgttggatccattt

SEQ ID NO: 1905382 - DNA, 15 bp, Homo sapiens
tgttggatccatttg

SEQ ID NO: 1905383 - DNA, 15 bp, Homo sapiens
gttggatccatttgc

SEQ ID NO: 1905384 - DNA, 15 bp, Homo sapiens
ttggatccatttgct

SEQ ID NO: 1905385 - DNA, 15 bp, Homo sapiens
tggatccatttgctt

SEQ ID NO: 1905386 - DNA, 15 bp, Homo sapiens
ggatccatttgcttc

SEQ ID NO: 1905387 - DNA, 15 bp, Homo sapiens
gatccatttgcttct

SEQ ID NO: 1905388 - DNA, 15 bp, Homo sapiens
atccatttgcttcta

SEQ ID NO: 1905389 - DNA, 15 bp, Homo sapiens
tccatttgcttctaa

SEQ ID NO: 1905390 - DNA, 15 bp, Homo sapiens
ccatttgcttctaag

SEQ ID NO: 1905391 - DNA, 15 bp, Homo sapiens
catttgcttctaagt

SEQ ID NO: 1905392 - DNA, 15 bp, Homo sapiens
atttgcttctaagtg

SEQ ID NO: 1905393 - DNA, 15 bp, Homo sapiens
tttgcttctaagtgg

SEQ ID NO: 1905394 - DNA, 15 bp, Homo sapiens
ttgcttctaagtggc

SEQ ID NO: 1905395 - DNA, 15 bp, Homo sapiens
tgcttctaagtggcc

SEQ ID NO: 1905396 - DNA, 15 bp, Homo sapiens
gcttctaagtggcct

SEQ ID NO: 1905397 - DNA, 15 bp, Homo sapiens
cttctaagtggcctt

SEQ ID NO: 1905398 - DNA, 15 bp, Homo sapiens
ttctaagtggccttt

SEQ ID NO: 1905399 - DNA, 15 bp, Homo sapiens
tctaagtggcctttt

SEQ ID NO: 1905400 - DNA, 15 bp, Homo sapiens
ctaagtggcctttta

SEQ ID NO: 1905401 - DNA, 15 bp, Homo sapiens
taagtggccttttac

SEQ ID NO: 1905402 - DNA, 15 bp, Homo sapiens
aagtggccttttacc

SEQ ID NO: 1905403 - DNA, 15 bp, Homo sapiens
agtggccttttacct

SEQ ID NO: 1905404 - DNA, 15 bp, Homo sapiens
gtggccttttacctg

SEQ ID NO: 1905405 - DNA, 15 bp, Homo sapiens
tggccttttacctga

SEQ ID NO: 1905406 - DNA, 15 bp, Homo sapiens
ggccttttacctgaa

SEQ ID NO: 1905407 - DNA, 15 bp, Homo sapiens
gccttttacctgaag

SEQ ID NO: 1905408 - DNA, 15 bp, Homo sapiens
ccttttacctgaagc

SEQ ID NO: 1905409 - DNA, 15 bp, Homo sapiens
cttttacctgaagcc

SEQ ID NO: 1905410 - DNA, 15 bp, Homo sapiens
ttttacctgaagcct

SEQ ID NO: 1905411 - DNA, 15 bp, Homo sapiens
tttacctgaagcctt

SEQ ID NO: 1905412 - DNA, 15 bp, Homo sapiens
ttacctgaagcctta

SEQ ID NO: 1905413 - DNA, 15 bp, Homo sapiens
tacctgaagccttaa

SEQ ID NO: 1905414 - DNA, 15 bp, Homo sapiens
acctgaagccttaaa

SEQ ID NO: 1905415 - DNA, 15 bp, Homo sapiens
cctgaagccttaaaa

SEQ ID NO: 1905416 - DNA, 15 bp, Homo sapiens
ctgaagccttaaaaa

SEQ ID NO: 1905417 - DNA, 15 bp, Homo sapiens
tgaagccttaaaaaa

SEQ ID NO: 1905418 - DNA, 15 bp, Homo sapiens
gaagccttaaaaaaa

SEQ ID NO: 1905419 - DNA, 15 bp, Homo sapiens
aagccttaaaaaaaa

SEQ ID NO: 1905420 - DNA, 15 bp, Homo sapiens
agccttaaaaaaaaa

SEQ ID NO: 1905421 - DNA, 15 bp, Homo sapiens
gccttaaaaaaaaaa

SEQ ID NO: 1905422 - DNA, 15 bp, Homo sapiens
ccttaaaaaaaaaaa

SEQ ID NO: 1905423 - DNA, 15 bp, Homo sapiens
aaaaaaaaaaactat

SEQ ID NO: 1905424 - DNA, 15 bp, Homo sapiens
aaaaaaaaaactatc

SEQ ID NO: 1905425 - DNA, 15 bp, Homo sapiens
aaaaaaaactatcca

SEQ ID NO: 1905426 - DNA, 15 bp, Homo sapiens
aaaaaaactatccaa

SEQ ID NO: 1905427 - DNA, 15 bp, Homo sapiens
aaaaaactatccaag

SEQ ID NO: 1905428 - DNA, 15 bp, Homo sapiens
aaaaactatccaaga

SEQ ID NO: 1905429 - DNA, 15 bp, Homo sapiens
aaaactatccaagaa

SEQ ID NO: 1905430 - DNA, 15 bp, Homo sapiens
aaactatccaagaaa

SEQ ID NO: 1905431 - DNA, 15 bp, Homo sapiens
aactatccaagaaaa

SEQ ID NO: 1905432 - DNA, 15 bp, Homo sapiens
actatccaagaaaac

SEQ ID NO: 1905433 - DNA, 15 bp, Homo sapiens
ctatccaagaaaacc

SEQ ID NO: 1905434 - DNA, 15 bp, Homo sapiens
tatccaagaaaacca

SEQ ID NO: 1905435 - DNA, 15 bp, Homo sapiens
atccaagaaaaccaa

SEQ ID NO: 1905436 - DNA, 15 bp, Homo sapiens
tccaagaaaaccaaa

SEQ ID NO: 1905437 - DNA, 15 bp, Homo sapiens
ccaagaaaaccaaaa

SEQ ID NO: 1905438 - DNA, 15 bp, Homo sapiens
caagaaaaccaaaaa

SEQ ID NO: 1905439 - DNA, 15 bp, Homo sapiens
aagaaaaccaaaaag

SEQ ID NO: 1905440 - DNA, 15 bp, Homo sapiens
agaaaaccaaaaagt

SEQ ID NO: 1905441 - DNA, 15 bp, Homo sapiens
gaaaaccaaaaagta

SEQ ID NO: 1905442 - DNA, 15 bp, Homo sapiens
aaaaccaaaaagtat

SEQ ID NO: 1905443 - DNA, 15 bp, Homo sapiens
aaaccaaaaagtatc

SEQ ID NO: 1905444 - DNA, 15 bp, Homo sapiens
aaccaaaaagtatcc

SEQ ID NO: 1905445 - DNA, 15 bp, Homo sapiens
accaaaaagtatcca

SEQ ID NO: 1905446 - DNA, 15 bp, Homo sapiens
ccaaaaagtatccac

SEQ ID NO: 1905447 - DNA, 15 bp, Homo sapiens
caaaaagtatccact

SEQ ID NO: 1905448 - DNA, 15 bp, Homo sapiens
aaaaagtatccactc

SEQ ID NO: 1905449 - DNA, 15 bp, Homo sapiens
aaaagtatccactct

SEQ ID NO: 1905450 - DNA, 15 bp, Homo sapiens
aaagtatccactctt

SEQ ID NO: 1905451 - DNA, 15 bp, Homo sapiens
aagtatccactctta

SEQ ID NO: 1905452 - DNA, 15 bp, Homo sapiens
agtatccactcttaa

SEQ ID NO: 1905453 - DNA, 15 bp, Homo sapiens
gtatccactcttaat

SEQ ID NO: 1905454 - DNA, 15 bp, Homo sapiens
tatccactcttaatg

SEQ ID NO: 1905455 - DNA, 15 bp, Homo sapiens
atccactcttaatgt

SEQ ID NO: 1905456 - DNA, 15 bp, Homo sapiens
tccactcttaatgtt

SEQ ID NO: 1905457 - DNA, 15 bp, Homo sapiens
ccactcttaatgttg

SEQ ID NO: 1905458 - DNA, 15 bp, Homo sapiens
cactcttaatgttgg

SEQ ID NO: 1905459 - DNA, 15 bp, Homo sapiens
actcttaatgttggc

SEQ ID NO: 1905460 - DNA, 15 bp, Homo sapiens
ctcttaatgttggca

SEQ ID NO: 1905461 - DNA, 15 bp, Homo sapiens
tcttaatgttggcat

SEQ ID NO: 1905462 - DNA, 15 bp, Homo sapiens
cttaatgttggcatc

SEQ ID NO: 1905463 - DNA, 15 bp, Homo sapiens
ttaatgttggcatct

SEQ ID NO: 1905464 - DNA, 15 bp, Homo sapiens
taatgttggcatctg

SEQ ID NO: 1905465 - DNA, 15 bp, Homo sapiens
aatgttggcatctgg

SEQ ID NO: 1905466 - DNA, 15 bp, Homo sapiens
atgttggcatctggc

SEQ ID NO: 1905467 - DNA, 15 bp, Homo sapiens
tgttggcatctggcc

SEQ ID NO: 1905468 - DNA, 15 bp, Homo sapiens
gttggcatctggccc

SEQ ID NO: 1905469 - DNA, 15 bp, Homo sapiens
ttggcatctggccca

SEQ ID NO: 1905470 - DNA, 15 bp, Homo sapiens
tggcatctggcccag

SEQ ID NO: 1905471 - DNA, 15 bp, Homo sapiens
ggcatctggcccaga

SEQ ID NO: 1905472 - DNA, 15 bp, Homo sapiens
gcatctggcccagaa

SEQ ID NO: 1905473 - DNA, 15 bp, Homo sapiens
catctggcccagaat

SEQ ID NO: 1905474 - DNA, 15 bp, Homo sapiens
atctggcccagaata

SEQ ID NO: 1905475 - DNA, 15 bp, Homo sapiens
tctggcccagaatat

SEQ ID NO: 1905476 - DNA, 15 bp, Homo sapiens
ctggcccagaatatc

SEQ ID NO: 1905477 - DNA, 15 bp, Homo sapiens
tggcccagaatatct

SEQ ID NO: 1905478 - DNA, 15 bp, Homo sapiens
ggcccagaatatctc

SEQ ID NO: 1905479 - DNA, 15 bp, Homo sapiens
gcccagaatatctct

SEQ ID NO: 1905480 - DNA, 15 bp, Homo sapiens
cccagaatatctctg

SEQ ID NO: 1905481 - DNA, 15 bp, Homo sapiens
ccagaatatctctga

SEQ ID NO: 1905482 - DNA, 15 bp, Homo sapiens
cagaatatctctgac

SEQ ID NO: 1905483 - DNA, 15 bp, Homo sapiens
agaatatctctgaca

SEQ ID NO: 1905484 - DNA, 15 bp, Homo sapiens
gaatatctctgacaa

SEQ ID NO: 1905485 - DNA, 15 bp, Homo sapiens
aatatctctgacaaa

SEQ ID NO: 1905486 - DNA, 15 bp, Homo sapiens
atatctctgacaaat

SEQ ID NO: 1905487 - DNA, 15 bp, Homo sapiens
tatctctgacaaatg

SEQ ID NO: 1905488 - DNA, 15 bp, Homo sapiens
atctctgacaaatgc

SEQ ID NO: 1905489 - DNA, 15 bp, Homo sapiens
tctctgacaaatgct

SEQ ID NO: 1905490 - DNA, 15 bp, Homo sapiens
ctctgacaaatgcta

SEQ ID NO: 1905491 - DNA, 15 bp, Homo sapiens
tctgacaaatgctaa

SEQ ID NO: 1905492 - DNA, 15 bp, Homo sapiens
ctgacaaatgctaat

SEQ ID NO: 1905493 - DNA, 15 bp, Homo sapiens
tgacaaatgctaata

SEQ ID NO: 1905494 - DNA, 15 bp, Homo sapiens
gacaaatgctaatat

SEQ ID NO: 1905495 - DNA, 15 bp, Homo sapiens
acaaatgctaatatt

SEQ ID NO: 1905496 - DNA, 15 bp, Homo sapiens
caaatgctaatattc

SEQ ID NO: 1905497 - DNA, 15 bp, Homo sapiens
aaatgctaatattca

SEQ ID NO: 1905498 - DNA, 15 bp, Homo sapiens
aatgctaatattcaa

SEQ ID NO: 1905499 - DNA, 15 bp, Homo sapiens
atgctaatattcaat

SEQ ID NO: 1905500 - DNA, 15 bp, Homo sapiens
tgctaatattcaatg

SEQ ID NO: 1905501 - DNA, 15 bp, Homo sapiens
gctaatattcaatga

SEQ ID NO: 1905502 - DNA, 15 bp, Homo sapiens
ctaatattcaatgat

SEQ ID NO: 1905503 - DNA, 15 bp, Homo sapiens
taatattcaatgatt

SEQ ID NO: 1905504 - DNA, 15 bp, Homo sapiens
aatattcaatgattt

SEQ ID NO: 1905505 - DNA, 15 bp, Homo sapiens
atattcaatgatttc

SEQ ID NO: 1905506 - DNA, 15 bp, Homo sapiens
tattcaatgatttct

SEQ ID NO: 1905507 - DNA, 15 bp, Homo sapiens
attcaatgatttctc

SEQ ID NO: 1905508 - DNA, 15 bp, Homo sapiens
ttcaatgatttctct

SEQ ID NO: 1905509 - DNA, 15 bp, Homo sapiens
tcaatgatttctctg

SEQ ID NO: 1905510 - DNA, 15 bp, Homo sapiens
caatgatttctctga

SEQ ID NO: 1905511 - DNA, 15 bp, Homo sapiens
aatgatttctctgaa

SEQ ID NO: 1905512 - DNA, 15 bp, Homo sapiens
atgatttctctgaat

SEQ ID NO: 1905513 - DNA, 15 bp, Homo sapiens
tgatttctctgaatt

SEQ ID NO: 1905514 - DNA, 15 bp, Homo sapiens
gatttctctgaatta

SEQ ID NO: 1905515 - DNA, 15 bp, Homo sapiens
atttctctgaattat

SEQ ID NO: 1905516 - DNA, 15 bp, Homo sapiens
tttctctgaattatg

SEQ ID NO: 1905517 - DNA, 15 bp, Homo sapiens
ttctctgaattatgt

SEQ ID NO: 1905518 - DNA, 15 bp, Homo sapiens
tctctgaattatgtc

SEQ ID NO: 1905519 - DNA, 15 bp, Homo sapiens
ctctgaattatgtct

SEQ ID NO: 1905520 - DNA, 15 bp, Homo sapiens
tctgaattatgtctc

SEQ ID NO: 1905521 - DNA, 15 bp, Homo sapiens
ctgaattatgtctca

SEQ ID NO: 1905522 - DNA, 15 bp, Homo sapiens
tgaattatgtctcaa

SEQ ID NO: 1905523 - DNA, 15 bp, Homo sapiens
gaattatgtctcaaa

SEQ ID NO: 1905524 - DNA, 15 bp, Homo sapiens
aattatgtctcaaat

SEQ ID NO: 1905525 - DNA, 15 bp, Homo sapiens
attatgtctcaaatc

SEQ ID NO: 1905526 - DNA, 15 bp, Homo sapiens
ttatgtctcaaatcc

SEQ ID NO: 1905527 - DNA, 15 bp, Homo sapiens
tatgtctcaaatccc

SEQ ID NO: 1905528 - DNA, 15 bp, Homo sapiens
atgtctcaaatccct

SEQ ID NO: 1905529 - DNA, 15 bp, Homo sapiens
tgtctcaaatccctt

SEQ ID NO: 1905530 - DNA, 15 bp, Homo sapiens
gtctcaaatcccttc

SEQ ID NO: 1905531 - DNA, 15 bp, Homo sapiens
tctcaaatcccttca

SEQ ID NO: 1905532 - DNA, 15 bp, Homo sapiens
ctcaaatcccttcag

SEQ ID NO: 1905533 - DNA, 15 bp, Homo sapiens
tcaaatcccttcagt

SEQ ID NO: 1905534 - DNA, 15 bp, Homo sapiens
caaatcccttcagtc

SEQ ID NO: 1905535 - DNA, 15 bp, Homo sapiens
aaatcccttcagtca

SEQ ID NO: 1905536 - DNA, 15 bp, Homo sapiens
aatcccttcagtcag

SEQ ID NO: 1905537 - DNA, 15 bp, Homo sapiens
atcccttcagtcagg

SEQ ID NO: 1905538 - DNA, 15 bp, Homo sapiens
tcccttcagtcaggc

SEQ ID NO: 1905539 - DNA, 15 bp, Homo sapiens
cccttcagtcaggct

SEQ ID NO: 1905540 - DNA, 15 bp, Homo sapiens
ccttcagtcaggcta

SEQ ID NO: 1905541 - DNA, 15 bp, Homo sapiens
cttcagtcaggctaa

SEQ ID NO: 1905542 - DNA, 15 bp, Homo sapiens
ttcagtcaggctaat

SEQ ID NO: 1905543 - DNA, 15 bp, Homo sapiens
tcagtcaggctaatg

SEQ ID NO: 1905544 - DNA, 15 bp, Homo sapiens
cagtcaggctaatgc

SEQ ID NO: 1905545 - DNA, 15 bp, Homo sapiens
agtcaggctaatgct

SEQ ID NO: 1905546 - DNA, 15 bp, Homo sapiens
gtcaggctaatgctc

SEQ ID NO: 1905547 - DNA, 15 bp, Homo sapiens
tcaggctaatgctct

SEQ ID NO: 1905548 - DNA, 15 bp, Homo sapiens
caggctaatgctctt

SEQ ID NO: 1905549 - DNA, 15 bp, Homo sapiens
aggctaatgctctta

SEQ ID NO: 1905550 - DNA, 15 bp, Homo sapiens
ggctaatgctcttaa

SEQ ID NO: 1905551 - DNA, 15 bp, Homo sapiens
gctaatgctcttaat

SEQ ID NO: 1905552 - DNA, 15 bp, Homo sapiens
ctaatgctcttaatt

SEQ ID NO: 1905553 - DNA, 15 bp, Homo sapiens
taatgctcttaattt

SEQ ID NO: 1905554 - DNA, 15 bp, Homo sapiens
aatgctcttaattta

SEQ ID NO: 1905555 - DNA, 15 bp, Homo sapiens
atgctcttaatttag

SEQ ID NO: 1905556 - DNA, 15 bp, Homo sapiens
tgctcttaatttagc

SEQ ID NO: 1905557 - DNA, 15 bp, Homo sapiens
gctcttaatttagca

SEQ ID NO: 1905558 - DNA, 15 bp, Homo sapiens
ctcttaatttagcat

SEQ ID NO: 1905559 - DNA, 15 bp, Homo sapiens
tcttaatttagcatg

SEQ ID NO: 1905560 - DNA, 15 bp, Homo sapiens
cttaatttagcatgt

SEQ ID NO: 1905561 - DNA, 15 bp, Homo sapiens
ttaatttagcatgtt

SEQ ID NO: 1905562 - DNA, 15 bp, Homo sapiens
taatttagcatgtta

SEQ ID NO: 1905563 - DNA, 15 bp, Homo sapiens
aatttagcatgttag

SEQ ID NO: 1905564 - DNA, 15 bp, Homo sapiens
atttagcatgttagg

SEQ ID NO: 1905565 - DNA, 15 bp, Homo sapiens
tttagcatgttagga

SEQ ID NO: 1905566 - DNA, 15 bp, Homo sapiens
ttagcatgttaggaa

SEQ ID NO: 1905567 - DNA, 15 bp, Homo sapiens
tagcatgttaggaat

SEQ ID NO: 1905568 - DNA, 15 bp, Homo sapiens
agcatgttaggaatc

SEQ ID NO: 1905569 - DNA, 15 bp, Homo sapiens
gcatgttaggaatca

SEQ ID NO: 1905570 - DNA, 15 bp, Homo sapiens
catgttaggaatcag

SEQ ID NO: 1905571 - DNA, 15 bp, Homo sapiens
atgttaggaatcagg

SEQ ID NO: 1905572 - DNA, 15 bp, Homo sapiens
tgttaggaatcaggc

SEQ ID NO: 1905573 - DNA, 15 bp, Homo sapiens
gttaggaatcaggca

SEQ ID NO: 1905574 - DNA, 15 bp, Homo sapiens
ttaggaatcaggcag

SEQ ID NO: 1905575 - DNA, 15 bp, Homo sapiens
taggaatcaggcaga

SEQ ID NO: 1905576 - DNA, 15 bp, Homo sapiens
aggaatcaggcagaa

SEQ ID NO: 1905577 - DNA, 15 bp, Homo sapiens
ggaatcaggcagaaa

SEQ ID NO: 1905578 - DNA, 15 bp, Homo sapiens
gaatcaggcagaaat

SEQ ID NO: 1905579 - DNA, 15 bp, Homo sapiens
aatcaggcagaaata

SEQ ID NO: 1905580 - DNA, 15 bp, Homo sapiens
atcaggcagaaatat

SEQ ID NO: 1905581 - DNA, 15 bp, Homo sapiens
tcaggcagaaatatg

SEQ ID NO: 1905582 - DNA, 15 bp, Homo sapiens
caggcagaaatatgg

SEQ ID NO: 1905583 - DNA, 15 bp, Homo sapiens
aggcagaaatatggc

SEQ ID NO: 1905584 - DNA, 15 bp, Homo sapiens
ggcagaaatatggcc

SEQ ID NO: 1905585 - DNA, 15 bp, Homo sapiens
gcagaaatatggcca

SEQ ID NO: 1905586 - DNA, 15 bp, Homo sapiens
cagaaatatggccaa

SEQ ID NO: 1905587 - DNA, 15 bp, Homo sapiens
agaaatatggccaaa

SEQ ID NO: 1905588 - DNA, 15 bp, Homo sapiens
gaaatatggccaaaa

SEQ ID NO: 1905589 - DNA, 15 bp, Homo sapiens
aaatatggccaaaag

SEQ ID NO: 1905590 - DNA, 15 bp, Homo sapiens
aatatggccaaaagc

SEQ ID NO: 1905591 - DNA, 15 bp, Homo sapiens
atatggccaaaagcc

SEQ ID NO: 1905592 - DNA, 15 bp, Homo sapiens
tatggccaaaagcct

SEQ ID NO: 1905593 - DNA, 15 bp, Homo sapiens
atggccaaaagcctt

SEQ ID NO: 1905594 - DNA, 15 bp, Homo sapiens
tggccaaaagcctta

SEQ ID NO: 1905595 - DNA, 15 bp, Homo sapiens
ggccaaaagccttaa

SEQ ID NO: 1905596 - DNA, 15 bp, Homo sapiens
gccaaaagccttaaa

SEQ ID NO: 1905597 - DNA, 15 bp, Homo sapiens
ccaaaagccttaaat

SEQ ID NO: 1905598 - DNA, 15 bp, Homo sapiens
caaaagccttaaatg

SEQ ID NO: 1905599 - DNA, 15 bp, Homo sapiens
aaaagccttaaatga

SEQ ID NO: 1905600 - DNA, 15 bp, Homo sapiens
aaagccttaaatgaa

SEQ ID NO: 1905601 - DNA, 15 bp, Homo sapiens
aagccttaaatgaaa

SEQ ID NO: 1905602 - DNA, 15 bp, Homo sapiens
agccttaaatgaaaa

SEQ ID NO: 1905603 - DNA, 15 bp, Homo sapiens
gccttaaatgaaaaa

SEQ ID NO: 1905604 - DNA, 15 bp, Homo sapiens
ccttaaatgaaaaag

SEQ ID NO: 1905605 - DNA, 15 bp, Homo sapiens
cttaaatgaaaaaga

SEQ ID NO: 1905606 - DNA, 15 bp, Homo sapiens
ttaaatgaaaaagaa

SEQ ID NO: 1905607 - DNA, 15 bp, Homo sapiens
taaatgaaaaagaat

SEQ ID NO: 1905608 - DNA, 15 bp, Homo sapiens
aaatgaaaaagaatt

SEQ ID NO: 1905609 - DNA, 15 bp, Homo sapiens
aatgaaaaagaatta

SEQ ID NO: 1905610 - DNA, 15 bp, Homo sapiens
atgaaaaagaattaa

SEQ ID NO: 1905611 - DNA, 15 bp, Homo sapiens
tgaaaaagaattaaa

SEQ ID NO: 1905612 - DNA, 15 bp, Homo sapiens
gaaaaagaattaaag

SEQ ID NO: 1905613 - DNA, 15 bp, Homo sapiens
aaaaagaattaaaga

SEQ ID NO: 1905614 - DNA, 15 bp, Homo sapiens
aaaagaattaaagat

SEQ ID NO: 1905615 - DNA, 15 bp, Homo sapiens
aaagaattaaagatg

SEQ ID NO: 1905616 - DNA, 15 bp, Homo sapiens
aagaattaaagatga

SEQ ID NO: 1905617 - DNA, 15 bp, Homo sapiens
agaattaaagatgaa

SEQ ID NO: 1905618 - DNA, 15 bp, Homo sapiens
gaattaaagatgaaa

SEQ ID NO: 1905619 - DNA, 15 bp, Homo sapiens
aattaaagatgaaaa

SEQ ID NO: 1905620 - DNA, 15 bp, Homo sapiens
attaaagatgaaaaa

SEQ ID NO: 1905621 - DNA, 15 bp, Homo sapiens
ttaaagatgaaaaat

SEQ ID NO: 1905622 - DNA, 15 bp, Homo sapiens
taaagatgaaaaata

SEQ ID NO: 1905623 - DNA, 15 bp, Homo sapiens
aaagatgaaaaatat

SEQ ID NO: 1905624 - DNA, 15 bp, Homo sapiens
aagatgaaaaatatt

SEQ ID NO: 1905625 - DNA, 15 bp, Homo sapiens
agatgaaaaatattt

SEQ ID NO: 1905626 - DNA, 15 bp, Homo sapiens
gatgaaaaatatttt

SEQ ID NO: 1905627 - DNA, 15 bp, Homo sapiens
atgaaaaatattttt

SEQ ID NO: 1905628 - DNA, 15 bp, Homo sapiens
tgaaaaatattttta

SEQ ID NO: 1905629 - DNA, 15 bp, Homo sapiens
gaaaaatatttttaa

SEQ ID NO: 1905630 - DNA, 15 bp, Homo sapiens
atatttttaaaaatc

SEQ ID NO: 1905631 - DNA, 15 bp, Homo sapiens
tatttttaaaaatct

SEQ ID NO: 1905632 - DNA, 15 bp, Homo sapiens
atttttaaaaatcta

SEQ ID NO: 1905633 - DNA, 15 bp, Homo sapiens
tttttaaaaatctaa

SEQ ID NO: 1905634 - DNA, 15 bp, Homo sapiens
ttttaaaaatctaat

SEQ ID NO: 1905635 - DNA, 15 bp, Homo sapiens
tttaaaaatctaata

SEQ ID NO: 1905636 - DNA, 15 bp, Homo sapiens
ttaaaaatctaataa

SEQ ID NO: 1905637 - DNA, 15 bp, Homo sapiens
taaaaatctaataag

SEQ ID NO: 1905638 - DNA, 15 bp, Homo sapiens
aaaaatctaataagc

SEQ ID NO: 1905639 - DNA, 15 bp, Homo sapiens
aaaatctaataagca

SEQ ID NO: 1905640 - DNA, 15 bp, Homo sapiens
aaatctaataagcat

SEQ ID NO: 1905641 - DNA, 15 bp, Homo sapiens
aatctaataagcatc

SEQ ID NO: 1905642 - DNA, 15 bp, Homo sapiens
atctaataagcatct

SEQ ID NO: 1905643 - DNA, 15 bp, Homo sapiens
tctaataagcatcta

SEQ ID NO: 1905644 - DNA, 15 bp, Homo sapiens
ctaataagcatctaa

SEQ ID NO: 1905645 - DNA, 15 bp, Homo sapiens
taataagcatctaaa

SEQ ID NO: 1905646 - DNA, 15 bp, Homo sapiens
aataagcatctaaag

SEQ ID NO: 1905647 - DNA, 15 bp, Homo sapiens
ataagcatctaaaga

SEQ ID NO: 1905648 - DNA, 15 bp, Homo sapiens
taagcatctaaagag

SEQ ID NO: 1905649 - DNA, 15 bp, Homo sapiens
aagcatctaaagaga

SEQ ID NO: 1905650 - DNA, 15 bp, Homo sapiens
agcatctaaagagat

SEQ ID NO: 1905651 - DNA, 15 bp, Homo sapiens
gcatctaaagagata

SEQ ID NO: 1905652 - DNA, 15 bp, Homo sapiens
catctaaagagataa

SEQ ID NO: 1905653 - DNA, 15 bp, Homo sapiens
atctaaagagataat

SEQ ID NO: 1905654 - DNA, 15 bp, Homo sapiens
tctaaagagataata

SEQ ID NO: 1905655 - DNA, 15 bp, Homo sapiens
ctaaagagataataa

SEQ ID NO: 1905656 - DNA, 15 bp, Homo sapiens
taaagagataataaa

SEQ ID NO: 1905657 - DNA, 15 bp, Homo sapiens
aaagagataataaac

SEQ ID NO: 1905658 - DNA, 15 bp, Homo sapiens
aagagataataaaca

SEQ ID NO: 1905659 - DNA, 15 bp, Homo sapiens
agagataataaacat

SEQ ID NO: 1905660 - DNA, 15 bp, Homo sapiens
gagataataaacatc

SEQ ID NO: 1905661 - DNA, 15 bp, Homo sapiens
agataataaacatca

SEQ ID NO: 1905662 - DNA, 15 bp, Homo sapiens
gataataaacatcat

SEQ ID NO: 1905663 - DNA, 15 bp, Homo sapiens
ataataaacatcatt

SEQ ID NO: 1905664 - DNA, 15 bp, Homo sapiens
taataaacatcatta

SEQ ID NO: 1905665 - DNA, 15 bp, Homo sapiens
aataaacatcattat

SEQ ID NO: 1905666 - DNA, 15 bp, Homo sapiens
ataaacatcattatt

SEQ ID NO: 1905667 - DNA, 15 bp, Homo sapiens
taaacatcattatta

SEQ ID NO: 1905668 - DNA, 15 bp, Homo sapiens
aaacatcattattaa

SEQ ID NO: 1905669 - DNA, 15 bp, Homo sapiens
aacatcattattaat

SEQ ID NO: 1905670 - DNA, 15 bp, Homo sapiens
acatcattattaatc

SEQ ID NO: 1905671 - DNA, 15 bp, Homo sapiens
catcattattaatca

SEQ ID NO: 1905672 - DNA, 15 bp, Homo sapiens
atcattattaatcaa

SEQ ID NO: 1905673 - DNA, 15 bp, Homo sapiens
tcattattaatcaaa

SEQ ID NO: 1905674 - DNA, 15 bp, Homo sapiens
cattattaatcaaag

SEQ ID NO: 1905675 - DNA, 15 bp, Homo sapiens
attattaatcaaaga

SEQ ID NO: 1905676 - DNA, 15 bp, Homo sapiens
ttattaatcaaagaa

SEQ ID NO: 1905677 - DNA, 15 bp, Homo sapiens
tattaatcaaagaaa

SEQ ID NO: 1905678 - DNA, 15 bp, Homo sapiens
attaatcaaagaaat

SEQ ID NO: 1905679 - DNA, 15 bp, Homo sapiens
ttaatcaaagaaatg

SEQ ID NO: 1905680 - DNA, 15 bp, Homo sapiens
taatcaaagaaatga

SEQ ID NO: 1905681 - DNA, 15 bp, Homo sapiens
aatcaaagaaatgaa

SEQ ID NO: 1905682 - DNA, 15 bp, Homo sapiens
atcaaagaaatgaaa

SEQ ID NO: 1905683 - DNA, 15 bp, Homo sapiens
tcaaagaaatgaaaa

SEQ ID NO: 1905684 - DNA, 15 bp, Homo sapiens
caaagaaatgaaaat

SEQ ID NO: 1905685 - DNA, 15 bp, Homo sapiens
aaagaaatgaaaatg

SEQ ID NO: 1905686 - DNA, 15 bp, Homo sapiens
aagaaatgaaaatgt

SEQ ID NO: 1905687 - DNA, 15 bp, Homo sapiens
agaaatgaaaatgtt

SEQ ID NO: 1905688 - DNA, 15 bp, Homo sapiens
gaaatgaaaatgttc

SEQ ID NO: 1905689 - DNA, 15 bp, Homo sapiens
aaatgaaaatgttca

SEQ ID NO: 1905690 - DNA, 15 bp, Homo sapiens
aatgaaaatgttcaa

SEQ ID NO: 1905691 - DNA, 15 bp, Homo sapiens
atgaaaatgttcaat

SEQ ID NO: 1905692 - DNA, 15 bp, Homo sapiens
tgaaaatgttcaata

SEQ ID NO: 1905693 - DNA, 15 bp, Homo sapiens
gaaaatgttcaataa

SEQ ID NO: 1905694 - DNA, 15 bp, Homo sapiens
aaaatgttcaataag

SEQ ID NO: 1905695 - DNA, 15 bp, Homo sapiens
aaatgttcaataaga

SEQ ID NO: 1905696 - DNA, 15 bp, Homo sapiens
aatgttcaataagat

SEQ ID NO: 1905697 - DNA, 15 bp, Homo sapiens
atgttcaataagata

SEQ ID NO: 1905698 - DNA, 15 bp, Homo sapiens
tgttcaataagatac

SEQ ID NO: 1905699 - DNA, 15 bp, Homo sapiens
gttcaataagatacc

SEQ ID NO: 1905700 - DNA, 15 bp, Homo sapiens
ttcaataagatacca

SEQ ID NO: 1905701 - DNA, 15 bp, Homo sapiens
tcaataagataccat

SEQ ID NO: 1905702 - DNA, 15 bp, Homo sapiens
caataagataccatc

SEQ ID NO: 1905703 - DNA, 15 bp, Homo sapiens
aataagataccatca

SEQ ID NO: 1905704 - DNA, 15 bp, Homo sapiens
ataagataccatcac

SEQ ID NO: 1905705 - DNA, 15 bp, Homo sapiens
taagataccatcaca

SEQ ID NO: 1905706 - DNA, 15 bp, Homo sapiens
aagataccatcacac

SEQ ID NO: 1905707 - DNA, 15 bp, Homo sapiens
agataccatcacaca

SEQ ID NO: 1905708 - DNA, 15 bp, Homo sapiens
gataccatcacacac

SEQ ID NO: 1905709 - DNA, 15 bp, Homo sapiens
ataccatcacacact

SEQ ID NO: 1905710 - DNA, 15 bp, Homo sapiens
taccatcacacactc

SEQ ID NO: 1905711 - DNA, 15 bp, Homo sapiens
accatcacacactca

SEQ ID NO: 1905712 - DNA, 15 bp, Homo sapiens
ccatcacacactcac

SEQ ID NO: 1905713 - DNA, 15 bp, Homo sapiens
catcacacactcact

SEQ ID NO: 1905714 - DNA, 15 bp, Homo sapiens
atcacacactcacta

SEQ ID NO: 1905715 - DNA, 15 bp, Homo sapiens
tcacacactcactaa

SEQ ID NO: 1905716 - DNA, 15 bp, Homo sapiens
cacacactcactaaa

SEQ ID NO: 1905717 - DNA, 15 bp, Homo sapiens
acacactcactaaaa

SEQ ID NO: 1905718 - DNA, 15 bp, Homo sapiens
cacactcactaaaat

SEQ ID NO: 1905719 - DNA, 15 bp, Homo sapiens
acactcactaaaata

SEQ ID NO: 1905720 - DNA, 15 bp, Homo sapiens
cactcactaaaataa

SEQ ID NO: 1905721 - DNA, 15 bp, Homo sapiens
actcactaaaataac

SEQ ID NO: 1905722 - DNA, 15 bp, Homo sapiens
ctcactaaaataact

SEQ ID NO: 1905723 - DNA, 15 bp, Homo sapiens
tcactaaaataacta

SEQ ID NO: 1905724 - DNA, 15 bp, Homo sapiens
cactaaaataactag

SEQ ID NO: 1905725 - DNA, 15 bp, Homo sapiens
actaaaataactaga

SEQ ID NO: 1905726 - DNA, 15 bp, Homo sapiens
ctaaaataactagaa

SEQ ID NO: 1905727 - DNA, 15 bp, Homo sapiens
taaaataactagaat

SEQ ID NO: 1905728 - DNA, 15 bp, Homo sapiens
aaaataactagaatg

SEQ ID NO: 1905729 - DNA, 15 bp, Homo sapiens
aaataactagaatga

SEQ ID NO: 1905730 - DNA, 15 bp, Homo sapiens
aataactagaatgaa

SEQ ID NO: 1905731 - DNA, 15 bp, Homo sapiens
ataactagaatgaaa

SEQ ID NO: 1905732 - DNA, 15 bp, Homo sapiens
taactagaatgaaaa

SEQ ID NO: 1905733 - DNA, 15 bp, Homo sapiens
aactagaatgaaaat

SEQ ID NO: 1905734 - DNA, 15 bp, Homo sapiens
actagaatgaaaatt

SEQ ID NO: 1905735 - DNA, 15 bp, Homo sapiens
ctagaatgaaaattt

SEQ ID NO: 1905736 - DNA, 15 bp, Homo sapiens
tagaatgaaaattta

SEQ ID NO: 1905737 - DNA, 15 bp, Homo sapiens
agaatgaaaatttag

SEQ ID NO: 1905738 - DNA, 15 bp, Homo sapiens
gaatgaaaatttagg

SEQ ID NO: 1905739 - DNA, 15 bp, Homo sapiens
aatgaaaatttaggc

SEQ ID NO: 1905740 - DNA, 15 bp, Homo sapiens
atgaaaatttaggca

SEQ ID NO: 1905741 - DNA, 15 bp, Homo sapiens
tgaaaatttaggcaa

SEQ ID NO: 1905742 - DNA, 15 bp, Homo sapiens
gaaaatttaggcaat

SEQ ID NO: 1905743 - DNA, 15 bp, Homo sapiens
aaaatttaggcaatg

SEQ ID NO: 1905744 - DNA, 15 bp, Homo sapiens
aaatttaggcaatgc

SEQ ID NO: 1905745 - DNA, 15 bp, Homo sapiens
aatttaggcaatgct

SEQ ID NO: 1905746 - DNA, 15 bp, Homo sapiens
atttaggcaatgcta

SEQ ID NO: 1905747 - DNA, 15 bp, Homo sapiens
tttaggcaatgctaa

SEQ ID NO: 1905748 - DNA, 15 bp, Homo sapiens
ttaggcaatgctaat

SEQ ID NO: 1905749 - DNA, 15 bp, Homo sapiens
taggcaatgctaatt

SEQ ID NO: 1905750 - DNA, 15 bp, Homo sapiens
aggcaatgctaattt

SEQ ID NO: 1905751 - DNA, 15 bp, Homo sapiens
ggcaatgctaatttt

SEQ ID NO: 1905752 - DNA, 15 bp, Homo sapiens
gcaatgctaattttt

SEQ ID NO: 1905753 - DNA, 15 bp, Homo sapiens
caatgctaatttttt

SEQ ID NO: 1905754 - DNA, 15 bp, Homo sapiens
aatgctaattttttg

SEQ ID NO: 1905755 - DNA, 15 bp, Homo sapiens
atgctaattttttga

SEQ ID NO: 1905756 - DNA, 15 bp, Homo sapiens
tgctaattttttgaa

SEQ ID NO: 1905757 - DNA, 15 bp, Homo sapiens
gctaattttttgaaa

SEQ ID NO: 1905758 - DNA, 15 bp, Homo sapiens
ctaattttttgaaag

SEQ ID NO: 1905759 - DNA, 15 bp, Homo sapiens
taattttttgaaaga

SEQ ID NO: 1905760 - DNA, 15 bp, Homo sapiens
aattttttgaaagat

SEQ ID NO: 1905761 - DNA, 15 bp, Homo sapiens
attttttgaaagatt

SEQ ID NO: 1905762 - DNA, 15 bp, Homo sapiens
ttttttgaaagattt

SEQ ID NO: 1905763 - DNA, 15 bp, Homo sapiens
tttttgaaagattta

SEQ ID NO: 1905764 - DNA, 15 bp, Homo sapiens
ttttgaaagatttag

SEQ ID NO: 1905765 - DNA, 15 bp, Homo sapiens
tttgaaagatttaga

SEQ ID NO: 1905766 - DNA, 15 bp, Homo sapiens
ttgaaagatttagag

SEQ ID NO: 1905767 - DNA, 15 bp, Homo sapiens
tgaaagatttagagt

SEQ ID NO: 1905768 - DNA, 15 bp, Homo sapiens
gaaagatttagagta

SEQ ID NO: 1905769 - DNA, 15 bp, Homo sapiens
aaagatttagagtaa

SEQ ID NO: 1905770 - DNA, 15 bp, Homo sapiens
aagatttagagtaaa

SEQ ID NO: 1905771 - DNA, 15 bp, Homo sapiens
agatttagagtaaat

SEQ ID NO: 1905772 - DNA, 15 bp, Homo sapiens
gatttagagtaaatg

SEQ ID NO: 1905773 - DNA, 15 bp, Homo sapiens
atttagagtaaatga

SEQ ID NO: 1905774 - DNA, 15 bp, Homo sapiens
tttagagtaaatgat

SEQ ID NO: 1905775 - DNA, 15 bp, Homo sapiens
ttagagtaaatgata

SEQ ID NO: 1905776 - DNA, 15 bp, Homo sapiens
tagagtaaatgataa

SEQ ID NO: 1905777 - DNA, 15 bp, Homo sapiens
agagtaaatgataac

SEQ ID NO: 1905778 - DNA, 15 bp, Homo sapiens
gagtaaatgataact

SEQ ID NO: 1905779 - DNA, 15 bp, Homo sapiens
agtaaatgataacta

SEQ ID NO: 1905780 - DNA, 15 bp, Homo sapiens
gtaaatgataactat

SEQ ID NO: 1905781 - DNA, 15 bp, Homo sapiens
taaatgataactatt

SEQ ID NO: 1905782 - DNA, 15 bp, Homo sapiens
aaatgataactattg

SEQ ID NO: 1905783 - DNA, 15 bp, Homo sapiens
aatgataactattgt

SEQ ID NO: 1905784 - DNA, 15 bp, Homo sapiens
atgataactattgtg

SEQ ID NO: 1905785 - DNA, 15 bp, Homo sapiens
tgataactattgtgc

SEQ ID NO: 1905786 - DNA, 15 bp, Homo sapiens
gataactattgtgct

SEQ ID NO: 1905787 - DNA, 15 bp, Homo sapiens
ataactattgtgctc

SEQ ID NO: 1905788 - DNA, 15 bp, Homo sapiens
taactattgtgctca

SEQ ID NO: 1905789 - DNA, 15 bp, Homo sapiens
aactattgtgctcaa

SEQ ID NO: 1905790 - DNA, 15 bp, Homo sapiens
actattgtgctcaat

SEQ ID NO: 1905791 - DNA, 15 bp, Homo sapiens
ctattgtgctcaata

SEQ ID NO: 1905792 - DNA, 15 bp, Homo sapiens
tattgtgctcaataa

SEQ ID NO: 1905793 - DNA, 15 bp, Homo sapiens
attgtgctcaataag

SEQ ID NO: 1905794 - DNA, 15 bp, Homo sapiens
ttgtgctcaataagt

SEQ ID NO: 1905795 - DNA, 15 bp, Homo sapiens
tgtgctcaataagtt

SEQ ID NO: 1905796 - DNA, 15 bp, Homo sapiens
gtgctcaataagtta

SEQ ID NO: 1905797 - DNA, 15 bp, Homo sapiens
tgctcaataagttat

SEQ ID NO: 1905798 - DNA, 15 bp, Homo sapiens
gctcaataagttata

SEQ ID NO: 1905799 - DNA, 15 bp, Homo sapiens
ctcaataagttataa

SEQ ID NO: 1905800 - DNA, 15 bp, Homo sapiens
tcaataagttataat

SEQ ID NO: 1905801 - DNA, 15 bp, Homo sapiens
caataagttataata

SEQ ID NO: 1905802 - DNA, 15 bp, Homo sapiens
aataagttataatat

SEQ ID NO: 1905803 - DNA, 15 bp, Homo sapiens
ataagttataatata

SEQ ID NO: 1905804 - DNA, 15 bp, Homo sapiens
taagttataatataa

SEQ ID NO: 1905805 - DNA, 15 bp, Homo sapiens
aagttataatataaa

SEQ ID NO: 1905806 - DNA, 15 bp, Homo sapiens
agttataatataaat

SEQ ID NO: 1905807 - DNA, 15 bp, Homo sapiens
gttataatataaatt

SEQ ID NO: 1905808 - DNA, 15 bp, Homo sapiens
ttataatataaattt

SEQ ID NO: 1905809 - DNA, 15 bp, Homo sapiens
tataatataaatttg

SEQ ID NO: 1905810 - DNA, 15 bp, Homo sapiens
ataatataaatttga

SEQ ID NO: 1905811 - DNA, 15 bp, Homo sapiens
taatataaatttgac

SEQ ID NO: 1905812 - DNA, 15 bp, Homo sapiens
aatataaatttgaca

SEQ ID NO: 1905813 - DNA, 15 bp, Homo sapiens
atataaatttgacaa

SEQ ID NO: 1905814 - DNA, 15 bp, Homo sapiens
tataaatttgacaat

SEQ ID NO: 1905815 - DNA, 15 bp, Homo sapiens
ataaatttgacaatt

SEQ ID NO: 1905816 - DNA, 15 bp, Homo sapiens
taaatttgacaattg

SEQ ID NO: 1905817 - DNA, 15 bp, Homo sapiens
aaatttgacaattgc

SEQ ID NO: 1905818 - DNA, 15 bp, Homo sapiens
aatttgacaattgca

SEQ ID NO: 1905819 - DNA, 15 bp, Homo sapiens
atttgacaattgcat

SEQ ID NO: 1905820 - DNA, 15 bp, Homo sapiens
tttgacaattgcata

SEQ ID NO: 1905821 - DNA, 15 bp, Homo sapiens
ttgacaattgcatag

SEQ ID NO: 1905822 - DNA, 15 bp, Homo sapiens
tgacaattgcatagg

SEQ ID NO: 1905823 - DNA, 15 bp, Homo sapiens
gacaattgcatagga

SEQ ID NO: 1905824 - DNA, 15 bp, Homo sapiens
acaattgcataggag

SEQ ID NO: 1905825 - DNA, 15 bp, Homo sapiens
caattgcataggaga

SEQ ID NO: 1905826 - DNA, 15 bp, Homo sapiens
aattgcataggagaa

SEQ ID NO: 1905827 - DNA, 15 bp, Homo sapiens
attgcataggagaac

SEQ ID NO: 1905828 - DNA, 15 bp, Homo sapiens
ttgcataggagaact

SEQ ID NO: 1905829 - DNA, 15 bp, Homo sapiens
tgcataggagaactt

SEQ ID NO: 1905830 - DNA, 15 bp, Homo sapiens
gcataggagaacttt

SEQ ID NO: 1905831 - DNA, 15 bp, Homo sapiens
cataggagaactttt

SEQ ID NO: 1905832 - DNA, 15 bp, Homo sapiens
ataggagaacttttt

SEQ ID NO: 1905833 - DNA, 15 bp, Homo sapiens
taggagaactttttg

SEQ ID NO: 1905834 - DNA, 15 bp, Homo sapiens
aggagaactttttgg

SEQ ID NO: 1905835 - DNA, 15 bp, Homo sapiens
ggagaactttttggc

SEQ ID NO: 1905836 - DNA, 15 bp, Homo sapiens
gagaactttttggca

SEQ ID NO: 1905837 - DNA, 15 bp, Homo sapiens
agaactttttggcag

SEQ ID NO: 1905838 - DNA, 15 bp, Homo sapiens
gaactttttggcagt

SEQ ID NO: 1905839 - DNA, 15 bp, Homo sapiens
aactttttggcagtt

SEQ ID NO: 1905840 - DNA, 15 bp, Homo sapiens
actttttggcagttt

SEQ ID NO: 1905841 - DNA, 15 bp, Homo sapiens
ctttttggcagtttc

SEQ ID NO: 1905842 - DNA, 15 bp, Homo sapiens
tttttggcagtttct

SEQ ID NO: 1905843 - DNA, 15 bp, Homo sapiens
ttttggcagtttcta

SEQ ID NO: 1905844 - DNA, 15 bp, Homo sapiens
tttggcagtttctaa

SEQ ID NO: 1905845 - DNA, 15 bp, Homo sapiens
ttggcagtttctaat

SEQ ID NO: 1905846 - DNA, 15 bp, Homo sapiens
tggcagtttctaata

SEQ ID NO: 1905847 - DNA, 15 bp, Homo sapiens
ggcagtttctaataa

SEQ ID NO: 1905848 - DNA, 15 bp, Homo sapiens
gcagtttctaataat

SEQ ID NO: 1905849 - DNA, 15 bp, Homo sapiens
cagtttctaataata

SEQ ID NO: 1905850 - DNA, 15 bp, Homo sapiens
agtttctaataatac

SEQ ID NO: 1905851 - DNA, 15 bp, Homo sapiens
gtttctaataataca

SEQ ID NO: 1905852 - DNA, 15 bp, Homo sapiens
tttctaataatacaa

SEQ ID NO: 1905853 - DNA, 15 bp, Homo sapiens
ttctaataatacaat

SEQ ID NO: 1905854 - DNA, 15 bp, Homo sapiens
tctaataatacaatt

SEQ ID NO: 1905855 - DNA, 15 bp, Homo sapiens
ctaataatacaattt

SEQ ID NO: 1905856 - DNA, 15 bp, Homo sapiens
taataatacaattta

SEQ ID NO: 1905857 - DNA, 15 bp, Homo sapiens
aataatacaatttaa

SEQ ID NO: 1905858 - DNA, 15 bp, Homo sapiens
ataatacaatttaaa

SEQ ID NO: 1905859 - DNA, 15 bp, Homo sapiens
taatacaatttaaaa

SEQ ID NO: 1905860 - DNA, 15 bp, Homo sapiens
aatacaatttaaaat

SEQ ID NO: 1905861 - DNA, 15 bp, Homo sapiens
atacaatttaaaata

SEQ ID NO: 1905862 - DNA, 15 bp, Homo sapiens
tacaatttaaaatac

SEQ ID NO: 1905863 - DNA, 15 bp, Homo sapiens
acaatttaaaataca

SEQ ID NO: 1905864 - DNA, 15 bp, Homo sapiens
caatttaaaatacac

SEQ ID NO: 1905865 - DNA, 15 bp, Homo sapiens
aatttaaaatacaca

SEQ ID NO: 1905866 - DNA, 15 bp, Homo sapiens
atttaaaatacacat

SEQ ID NO: 1905867 - DNA, 15 bp, Homo sapiens
tttaaaatacacata

SEQ ID NO: 1905868 - DNA, 15 bp, Homo sapiens
ttaaaatacacatat

SEQ ID NO: 1905869 - DNA, 15 bp, Homo sapiens
taaaatacacatatt

SEQ ID NO: 1905870 - DNA, 15 bp, Homo sapiens
aaaatacacatattc

SEQ ID NO: 1905871 - DNA, 15 bp, Homo sapiens
aaatacacatattct

SEQ ID NO: 1905872 - DNA, 15 bp, Homo sapiens
aatacacatattcta

SEQ ID NO: 1905873 - DNA, 15 bp, Homo sapiens
atacacatattctat

SEQ ID NO: 1905874 - DNA, 15 bp, Homo sapiens
tacacatattctata

SEQ ID NO: 1905875 - DNA, 15 bp, Homo sapiens
acacatattctatat

SEQ ID NO: 1905876 - DNA, 15 bp, Homo sapiens
cacatattctatatc

SEQ ID NO: 1905877 - DNA, 15 bp, Homo sapiens
acatattctatatcc

SEQ ID NO: 1905878 - DNA, 15 bp, Homo sapiens
catattctatatcct

SEQ ID NO: 1905879 - DNA, 15 bp, Homo sapiens
atattctatatccta

SEQ ID NO: 1905880 - DNA, 15 bp, Homo sapiens
tattctatatcctat

SEQ ID NO: 1905881 - DNA, 15 bp, Homo sapiens
attctatatcctata

SEQ ID NO: 1905882 - DNA, 15 bp, Homo sapiens
ttctatatcctataa

SEQ ID NO: 1905883 - DNA, 15 bp, Homo sapiens
tctatatcctataaa

SEQ ID NO: 1905884 - DNA, 15 bp, Homo sapiens
ctatatcctataaat

SEQ ID NO: 1905885 - DNA, 15 bp, Homo sapiens
tatatcctataaatt

SEQ ID NO: 1905886 - DNA, 15 bp, Homo sapiens
atatcctataaattt

SEQ ID NO: 1905887 - DNA, 15 bp, Homo sapiens
tatcctataaattta

SEQ ID NO: 1905888 - DNA, 15 bp, Homo sapiens
atcctataaatttac

SEQ ID NO: 1905889 - DNA, 15 bp, Homo sapiens
tcctataaatttaca

SEQ ID NO: 1905890 - DNA, 15 bp, Homo sapiens
cctataaatttacat

SEQ ID NO: 1905891 - DNA, 15 bp, Homo sapiens
ctataaatttacatg

SEQ ID NO: 1905892 - DNA, 15 bp, Homo sapiens
tataaatttacatga

SEQ ID NO: 1905893 - DNA, 15 bp, Homo sapiens
ataaatttacatgat

SEQ ID NO: 1905894 - DNA, 15 bp, Homo sapiens
taaatttacatgatg

SEQ ID NO: 1905895 - DNA, 15 bp, Homo sapiens
aaatttacatgatga

SEQ ID NO: 1905896 - DNA, 15 bp, Homo sapiens
aatttacatgatgaa

SEQ ID NO: 1905897 - DNA, 15 bp, Homo sapiens
atttacatgatgaaa

SEQ ID NO: 1905898 - DNA, 15 bp, Homo sapiens
tttacatgatgaaat

SEQ ID NO: 1905899 - DNA, 15 bp, Homo sapiens
ttacatgatgaaata

SEQ ID NO: 1905900 - DNA, 15 bp, Homo sapiens
tacatgatgaaatat

SEQ ID NO: 1905901 - DNA, 15 bp, Homo sapiens
acatgatgaaatatt

SEQ ID NO: 1905902 - DNA, 15 bp, Homo sapiens
catgatgaaatatta

SEQ ID NO: 1905903 - DNA, 15 bp, Homo sapiens
atgatgaaatattat

SEQ ID NO: 1905904 - DNA, 15 bp, Homo sapiens
tgatgaaatattata

SEQ ID NO: 1905905 - DNA, 15 bp, Homo sapiens
gatgaaatattatac

SEQ ID NO: 1905906 - DNA, 15 bp, Homo sapiens
atgaaatattataca

SEQ ID NO: 1905907 - DNA, 15 bp, Homo sapiens
tgaaatattatacag

SEQ ID NO: 1905908 - DNA, 15 bp, Homo sapiens
gaaatattatacagt

SEQ ID NO: 1905909 - DNA, 15 bp, Homo sapiens
aaatattatacagta

SEQ ID NO: 1905910 - DNA, 15 bp, Homo sapiens
aatattatacagtaa

SEQ ID NO: 1905911 - DNA, 15 bp, Homo sapiens
atattatacagtaat

SEQ ID NO: 1905912 - DNA, 15 bp, Homo sapiens
tattatacagtaata

SEQ ID NO: 1905913 - DNA, 15 bp, Homo sapiens
attatacagtaataa

SEQ ID NO: 1905914 - DNA, 15 bp, Homo sapiens
ttatacagtaataac

SEQ ID NO: 1905915 - DNA, 15 bp, Homo sapiens
tatacagtaataaca

SEQ ID NO: 1905916 - DNA, 15 bp, Homo sapiens
atacagtaataacaa

SEQ ID NO: 1905917 - DNA, 15 bp, Homo sapiens
tacagtaataacaat

SEQ ID NO: 1905918 - DNA, 15 bp, Homo sapiens
acagtaataacaata

SEQ ID NO: 1905919 - DNA, 15 bp, Homo sapiens
cagtaataacaataa

SEQ ID NO: 1905920 - DNA, 15 bp, Homo sapiens
agtaataacaataat

SEQ ID NO: 1905921 - DNA, 15 bp, Homo sapiens
gtaataacaataatt

SEQ ID NO: 1905922 - DNA, 15 bp, Homo sapiens
taataacaataattg

SEQ ID NO: 1905923 - DNA, 15 bp, Homo sapiens
aataacaataattga

SEQ ID NO: 1905924 - DNA, 15 bp, Homo sapiens
ataacaataattgat

SEQ ID NO: 1905925 - DNA, 15 bp, Homo sapiens
taacaataattgata

SEQ ID NO: 1905926 - DNA, 15 bp, Homo sapiens
aacaataattgataa

SEQ ID NO: 1905927 - DNA, 15 bp, Homo sapiens
acaataattgataat

SEQ ID NO: 1905928 - DNA, 15 bp, Homo sapiens
caataattgataatt

SEQ ID NO: 1905929 - DNA, 15 bp, Homo sapiens
aataattgataattg

SEQ ID NO: 1905930 - DNA, 15 bp, Homo sapiens
ataattgataattgc

SEQ ID NO: 1905931 - DNA, 15 bp, Homo sapiens
taattgataattgcc

SEQ ID NO: 1905932 - DNA, 15 bp, Homo sapiens
aattgataattgcca

SEQ ID NO: 1905933 - DNA, 15 bp, Homo sapiens
attgataattgccat

SEQ ID NO: 1905934 - DNA, 15 bp, Homo sapiens
ttgataattgccata

SEQ ID NO: 1905935 - DNA, 15 bp, Homo sapiens
tgataattgccatac

SEQ ID NO: 1905936 - DNA, 15 bp, Homo sapiens
gataattgccataca

SEQ ID NO: 1905937 - DNA, 15 bp, Homo sapiens
ataattgccatacag

SEQ ID NO: 1905938 - DNA, 15 bp, Homo sapiens
taattgccatacaga

SEQ ID NO: 1905939 - DNA, 15 bp, Homo sapiens
aattgccatacagaa

SEQ ID NO: 1905940 - DNA, 15 bp, Homo sapiens
attgccatacagaat

SEQ ID NO: 1905941 - DNA, 15 bp, Homo sapiens
ttgccatacagaatg

SEQ ID NO: 1905942 - DNA, 15 bp, Homo sapiens
tgccatacagaatga

SEQ ID NO: 1905943 - DNA, 15 bp, Homo sapiens
gccatacagaatgac

SEQ ID NO: 1905944 - DNA, 15 bp, Homo sapiens
ccatacagaatgaca

SEQ ID NO: 1905945 - DNA, 15 bp, Homo sapiens
catacagaatgacag

SEQ ID NO: 1905946 - DNA, 15 bp, Homo sapiens
atacagaatgacagt

SEQ ID NO: 1905947 - DNA, 15 bp, Homo sapiens
tacagaatgacagtg

SEQ ID NO: 1905948 - DNA, 15 bp, Homo sapiens
acagaatgacagtga

SEQ ID NO: 1905949 - DNA, 15 bp, Homo sapiens
cagaatgacagtgag

SEQ ID NO: 1905950 - DNA, 15 bp, Homo sapiens
agaatgacagtgagg

SEQ ID NO: 1905951 - DNA, 15 bp, Homo sapiens
gaatgacagtgagga

SEQ ID NO: 1905952 - DNA, 15 bp, Homo sapiens
aatgacagtgaggaa

SEQ ID NO: 1905953 - DNA, 15 bp, Homo sapiens
atgacagtgaggaat

SEQ ID NO: 1905954 - DNA, 15 bp, Homo sapiens
tgacagtgaggaata

SEQ ID NO: 1905955 - DNA, 15 bp, Homo sapiens
gacagtgaggaatat

SEQ ID NO: 1905956 - DNA, 15 bp, Homo sapiens
acagtgaggaatatt

SEQ ID NO: 1905957 - DNA, 15 bp, Homo sapiens
cagtgaggaatatta

SEQ ID NO: 1905958 - DNA, 15 bp, Homo sapiens
agtgaggaatattaa

SEQ ID NO: 1905959 - DNA, 15 bp, Homo sapiens
gtgaggaatattaaa

SEQ ID NO: 1905960 - DNA, 15 bp, Homo sapiens
tgaggaatattaaaa

SEQ ID NO: 1905961 - DNA, 15 bp, Homo sapiens
gaggaatattaaaaa

SEQ ID NO: 1905962 - DNA, 15 bp, Homo sapiens
aggaatattaaaaat

SEQ ID NO: 1905963 - DNA, 15 bp, Homo sapiens
ggaatattaaaaata

SEQ ID NO: 1905964 - DNA, 15 bp, Homo sapiens
gaatattaaaaatat

SEQ ID NO: 1905965 - DNA, 15 bp, Homo sapiens
aatattaaaaatata

SEQ ID NO: 1905966 - DNA, 15 bp, Homo sapiens
atattaaaaatatag

SEQ ID NO: 1905967 - DNA, 15 bp, Homo sapiens
tattaaaaatatagt

SEQ ID NO: 1905968 - DNA, 15 bp, Homo sapiens
attaaaaatatagta

SEQ ID NO: 1905969 - DNA, 15 bp, Homo sapiens
ttaaaaatatagtat

SEQ ID NO: 1905970 - DNA, 15 bp, Homo sapiens
taaaaatatagtatt

SEQ ID NO: 1905971 - DNA, 15 bp, Homo sapiens
aaaaatatagtatta

SEQ ID NO: 1905972 - DNA, 15 bp, Homo sapiens
aaaatatagtattac

SEQ ID NO: 1905973 - DNA, 15 bp, Homo sapiens
aaatatagtattaca

SEQ ID NO: 1905974 - DNA, 15 bp, Homo sapiens
aatatagtattacaa

SEQ ID NO: 1905975 - DNA, 15 bp, Homo sapiens
atatagtattacaaa

SEQ ID NO: 1905976 - DNA, 15 bp, Homo sapiens
tatagtattacaaac

SEQ ID NO: 1905977 - DNA, 15 bp, Homo sapiens
atagtattacaaaca

SEQ ID NO: 1905978 - DNA, 15 bp, Homo sapiens
tagtattacaaacat

SEQ ID NO: 1905979 - DNA, 15 bp, Homo sapiens
agtattacaaacata

SEQ ID NO: 1905980 - DNA, 15 bp, Homo sapiens
gtattacaaacataa

SEQ ID NO: 1905981 - DNA, 15 bp, Homo sapiens
tattacaaacataat

SEQ ID NO: 1905982 - DNA, 15 bp, Homo sapiens
attacaaacataata

SEQ ID NO: 1905983 - DNA, 15 bp, Homo sapiens
ttacaaacataatat

SEQ ID NO: 1905984 - DNA, 15 bp, Homo sapiens
tacaaacataatatt

SEQ ID NO: 1905985 - DNA, 15 bp, Homo sapiens
acaaacataatattt

SEQ ID NO: 1905986 - DNA, 15 bp, Homo sapiens
caaacataatatttc

SEQ ID NO: 1905987 - DNA, 15 bp, Homo sapiens
aaacataatatttca

SEQ ID NO: 1905988 - DNA, 15 bp, Homo sapiens
aacataatatttcaa

SEQ ID NO: 1905989 - DNA, 15 bp, Homo sapiens
acataatatttcaaa

SEQ ID NO: 1905990 - DNA, 15 bp, Homo sapiens
cataatatttcaaat

SEQ ID NO: 1905991 - DNA, 15 bp, Homo sapiens
ataatatttcaaata

SEQ ID NO: 1905992 - DNA, 15 bp, Homo sapiens
taatatttcaaatat

SEQ ID NO: 1905993 - DNA, 15 bp, Homo sapiens
aatatttcaaatata

SEQ ID NO: 1905994 - DNA, 15 bp, Homo sapiens
atatttcaaatataa

SEQ ID NO: 1905995 - DNA, 15 bp, Homo sapiens
tatttcaaatataac

SEQ ID NO: 1905996 - DNA, 15 bp, Homo sapiens
atttcaaatataaca

SEQ ID NO: 1905997 - DNA, 15 bp, Homo sapiens
tttcaaatataacat

SEQ ID NO: 1905998 - DNA, 15 bp, Homo sapiens
ttcaaatataacatg

SEQ ID NO: 1905999 - DNA, 15 bp, Homo sapiens
tcaaatataacatga

SEQ ID NO: 1906000 - DNA, 15 bp, Homo sapiens
caaatataacatgac

SEQ ID NO: 1906001 - DNA, 15 bp, Homo sapiens
aaatataacatgaca

SEQ ID NO: 1906002 - DNA, 15 bp, Homo sapiens
aatataacatgacaa

SEQ ID NO: 1906003 - DNA, 15 bp, Homo sapiens
atataacatgacaaa

SEQ ID NO: 1906004 - DNA, 15 bp, Homo sapiens
tataacatgacaaat

SEQ ID NO: 1906005 - DNA, 15 bp, Homo sapiens
ataacatgacaaata

SEQ ID NO: 1906006 - DNA, 15 bp, Homo sapiens
taacatgacaaataa

SEQ ID NO: 1906007 - DNA, 15 bp, Homo sapiens
aacatgacaaataat

SEQ ID NO: 1906008 - DNA, 15 bp, Homo sapiens
acatgacaaataata

SEQ ID NO: 1906009 - DNA, 15 bp, Homo sapiens
catgacaaataatat

SEQ ID NO: 1906010 - DNA, 15 bp, Homo sapiens
atgacaaataatatt

SEQ ID NO: 1906011 - DNA, 15 bp, Homo sapiens
tgacaaataatatta

SEQ ID NO: 1906012 - DNA, 15 bp, Homo sapiens
gacaaataatattat

SEQ ID NO: 1906013 - DNA, 15 bp, Homo sapiens
acaaataatattata

SEQ ID NO: 1906014 - DNA, 15 bp, Homo sapiens
caaataatattataa

SEQ ID NO: 1906015 - DNA, 15 bp, Homo sapiens
aaataatattataag

SEQ ID NO: 1906016 - DNA, 15 bp, Homo sapiens
aataatattataaga

SEQ ID NO: 1906017 - DNA, 15 bp, Homo sapiens
ataatattataagat

SEQ ID NO: 1906018 - DNA, 15 bp, Homo sapiens
taatattataagata

SEQ ID NO: 1906019 - DNA, 15 bp, Homo sapiens
aatattataagatac

SEQ ID NO: 1906020 - DNA, 15 bp, Homo sapiens
atattataagataca

SEQ ID NO: 1906021 - DNA, 15 bp, Homo sapiens
tattataagatacaa

SEQ ID NO: 1906022 - DNA, 15 bp, Homo sapiens
attataagatacaaa

SEQ ID NO: 1906023 - DNA, 15 bp, Homo sapiens
ttataagatacaaaa

SEQ ID NO: 1906024 - DNA, 15 bp, Homo sapiens
tataagatacaaaaa

SEQ ID NO: 1906025 - DNA, 15 bp, Homo sapiens
ataagatacaaaaat

SEQ ID NO: 1906026 - DNA, 15 bp, Homo sapiens
taagatacaaaaatt

SEQ ID NO: 1906027 - DNA, 15 bp, Homo sapiens
agatacaaaaattac

SEQ ID NO: 1906028 - DNA, 15 bp, Homo sapiens
gatacaaaaattaca

SEQ ID NO: 1906029 - DNA, 15 bp, Homo sapiens
atacaaaaattacat

SEQ ID NO: 1906030 - DNA, 15 bp, Homo sapiens
tacaaaaattacata

SEQ ID NO: 1906031 - DNA, 15 bp, Homo sapiens
acaaaaattacatat

SEQ ID NO: 1906032 - DNA, 15 bp, Homo sapiens
caaaaattacatatt

SEQ ID NO: 1906033 - DNA, 15 bp, Homo sapiens
aaaaattacatattg

SEQ ID NO: 1906034 - DNA, 15 bp, Homo sapiens
aaaattacatattga

SEQ ID NO: 1906035 - DNA, 15 bp, Homo sapiens
aaattacatattgac

SEQ ID NO: 1906036 - DNA, 15 bp, Homo sapiens
aattacatattgacc

SEQ ID NO: 1906037 - DNA, 15 bp, Homo sapiens
attacatattgaccg

SEQ ID NO: 1906038 - DNA, 15 bp, Homo sapiens
ttacatattgaccga

SEQ ID NO: 1906039 - DNA, 15 bp, Homo sapiens
tacatattgaccgat

SEQ ID NO: 1906040 - DNA, 15 bp, Homo sapiens
acatattgaccgatt

SEQ ID NO: 1906041 - DNA, 15 bp, Homo sapiens
catattgaccgattc

SEQ ID NO: 1906042 - DNA, 15 bp, Homo sapiens
atattgaccgattca

SEQ ID NO: 1906043 - DNA, 15 bp, Homo sapiens
tattgaccgattcaa

SEQ ID NO: 1906044 - DNA, 15 bp, Homo sapiens
attgaccgattcaaa

SEQ ID NO: 1906045 - DNA, 15 bp, Homo sapiens
ttgaccgattcaaat

SEQ ID NO: 1906046 - DNA, 15 bp, Homo sapiens
tgaccgattcaaatt

SEQ ID NO: 1906047 - DNA, 15 bp, Homo sapiens
gaccgattcaaattt

SEQ ID NO: 1906048 - DNA, 15 bp, Homo sapiens
accgattcaaatttt

SEQ ID NO: 1906049 - DNA, 15 bp, Homo sapiens
ccgattcaaattttg

SEQ ID NO: 1906050 - DNA, 15 bp, Homo sapiens
cgattcaaattttgc

SEQ ID NO: 1906051 - DNA, 15 bp, Homo sapiens
gattcaaattttgca

SEQ ID NO: 1906052 - DNA, 15 bp, Homo sapiens
attcaaattttgcaa

SEQ ID NO: 1906053 - DNA, 15 bp, Homo sapiens
ttcaaattttgcaaa

SEQ ID NO: 1906054 - DNA, 15 bp, Homo sapiens
tcaaattttgcaaaa

SEQ ID NO: 1906055 - DNA, 15 bp, Homo sapiens
caaattttgcaaaat

SEQ ID NO: 1906056 - DNA, 15 bp, Homo sapiens
aaattttgcaaaatt

SEQ ID NO: 1906057 - DNA, 15 bp, Homo sapiens
aattttgcaaaattt

SEQ ID NO: 1906058 - DNA, 15 bp, Homo sapiens
attttgcaaaattta

SEQ ID NO: 1906059 - DNA, 15 bp, Homo sapiens
ttttgcaaaatttaa

SEQ ID NO: 1906060 - DNA, 15 bp, Homo sapiens
tttgcaaaatttaaa

SEQ ID NO: 1906061 - DNA, 15 bp, Homo sapiens
ttgcaaaatttaaaa

SEQ ID NO: 1906062 - DNA, 15 bp, Homo sapiens
tgcaaaatttaaaaa

SEQ ID NO: 1906063 - DNA, 15 bp, Homo sapiens
gcaaaatttaaaaac

SEQ ID NO: 1906064 - DNA, 15 bp, Homo sapiens
caaaatttaaaaacc

SEQ ID NO: 1906065 - DNA, 15 bp, Homo sapiens
aaaatttaaaaacct

SEQ ID NO: 1906066 - DNA, 15 bp, Homo sapiens
aaatttaaaaaccta

SEQ ID NO: 1906067 - DNA, 15 bp, Homo sapiens
aatttaaaaacctat

SEQ ID NO: 1906068 - DNA, 15 bp, Homo sapiens
atttaaaaacctatg

SEQ ID NO: 1906069 - DNA, 15 bp, Homo sapiens
tttaaaaacctatga

SEQ ID NO: 1906070 - DNA, 15 bp, Homo sapiens
ttaaaaacctatgaa

SEQ ID NO: 1906071 - DNA, 15 bp, Homo sapiens
taaaaacctatgaaa

SEQ ID NO: 1906072 - DNA, 15 bp, Homo sapiens
aaaaacctatgaaat

SEQ ID NO: 1906073 - DNA, 15 bp, Homo sapiens
aaaacctatgaaatg

SEQ ID NO: 1906074 - DNA, 15 bp, Homo sapiens
aaacctatgaaatga

SEQ ID NO: 1906075 - DNA, 15 bp, Homo sapiens
aacctatgaaatgaa

SEQ ID NO: 1906076 - DNA, 15 bp, Homo sapiens
acctatgaaatgaat

SEQ ID NO: 1906077 - DNA, 15 bp, Homo sapiens
cctatgaaatgaatc

SEQ ID NO: 1906078 - DNA, 15 bp, Homo sapiens
ctatgaaatgaatct

SEQ ID NO: 1906079 - DNA, 15 bp, Homo sapiens
tatgaaatgaatcta

SEQ ID NO: 1906080 - DNA, 15 bp, Homo sapiens
atgaaatgaatctat

SEQ ID NO: 1906081 - DNA, 15 bp, Homo sapiens
tgaaatgaatctata

SEQ ID NO: 1906082 - DNA, 15 bp, Homo sapiens
gaaatgaatctataa

SEQ ID NO: 1906083 - DNA, 15 bp, Homo sapiens
aaatgaatctataat

SEQ ID NO: 1906084 - DNA, 15 bp, Homo sapiens
aatgaatctataata

SEQ ID NO: 1906085 - DNA, 15 bp, Homo sapiens
atgaatctataatat

SEQ ID NO: 1906086 - DNA, 15 bp, Homo sapiens
tgaatctataatatt

SEQ ID NO: 1906087 - DNA, 15 bp, Homo sapiens
gaatctataatatta

SEQ ID NO: 1906088 - DNA, 15 bp, Homo sapiens
aatctataatattaa

SEQ ID NO: 1906089 - DNA, 15 bp, Homo sapiens
atctataatattaaa

SEQ ID NO: 1906090 - DNA, 15 bp, Homo sapiens
tctataatattaaaa

SEQ ID NO: 1906091 - DNA, 15 bp, Homo sapiens
ctataatattaaaaa

SEQ ID NO: 1906092 - DNA, 15 bp, Homo sapiens
tataatattaaaaaa

SEQ ID NO: 1906093 - DNA, 15 bp, Homo sapiens
ataatattaaaaaag

SEQ ID NO: 1906094 - DNA, 15 bp, Homo sapiens
taatattaaaaaagc

SEQ ID NO: 1906095 - DNA, 15 bp, Homo sapiens
aatattaaaaaagca

SEQ ID NO: 1906096 - DNA, 15 bp, Homo sapiens
atattaaaaaagcac

SEQ ID NO: 1906097 - DNA, 15 bp, Homo sapiens
tattaaaaaagcaca

SEQ ID NO: 1906098 - DNA, 15 bp, Homo sapiens
attaaaaaagcacaa

SEQ ID NO: 1906099 - DNA, 15 bp, Homo sapiens
ttaaaaaagcacaat

SEQ ID NO: 1906100 - DNA, 15 bp, Homo sapiens
taaaaaagcacaata

SEQ ID NO: 1906101 - DNA, 15 bp, Homo sapiens
aaaaaagcacaatag

SEQ ID NO: 1906102 - DNA, 15 bp, Homo sapiens
aaaaagcacaatagt

SEQ ID NO: 1906103 - DNA, 15 bp, Homo sapiens
aaaagcacaatagtg

SEQ ID NO: 1906104 - DNA, 15 bp, Homo sapiens
aaagcacaatagtgg

SEQ ID NO: 1906105 - DNA, 15 bp, Homo sapiens
aagcacaatagtggt

SEQ ID NO: 1906106 - DNA, 15 bp, Homo sapiens
agcacaatagtggtt

SEQ ID NO: 1906107 - DNA, 15 bp, Homo sapiens
gcacaatagtggtta

SEQ ID NO: 1906108 - DNA, 15 bp, Homo sapiens
cacaatagtggttat

SEQ ID NO: 1906109 - DNA, 15 bp, Homo sapiens
acaatagtggttatc

SEQ ID NO: 1906110 - DNA, 15 bp, Homo sapiens
caatagtggttatcc

SEQ ID NO: 1906111 - DNA, 15 bp, Homo sapiens
aatagtggttatccc

SEQ ID NO: 1906112 - DNA, 15 bp, Homo sapiens
atagtggttatccct

SEQ ID NO: 1906113 - DNA, 15 bp, Homo sapiens
tagtggttatccctg

SEQ ID NO: 1906114 - DNA, 15 bp, Homo sapiens
agtggttatccctgg

SEQ ID NO: 1906115 - DNA, 15 bp, Homo sapiens
gtggttatccctgga

SEQ ID NO: 1906116 - DNA, 15 bp, Homo sapiens
tggttatccctggaa

SEQ ID NO: 1906117 - DNA, 15 bp, Homo sapiens
ggttatccctggaaa

SEQ ID NO: 1906118 - DNA, 15 bp, Homo sapiens
gttatccctggaaag

SEQ ID NO: 1906119 - DNA, 15 bp, Homo sapiens
ttatccctggaaagt

SEQ ID NO: 1906120 - DNA, 15 bp, Homo sapiens
tatccctggaaagta

SEQ ID NO: 1906121 - DNA, 15 bp, Homo sapiens
atccctggaaagtaa

SEQ ID NO: 1906122 - DNA, 15 bp, Homo sapiens
tccctggaaagtaag

SEQ ID NO: 1906123 - DNA, 15 bp, Homo sapiens
ccctggaaagtaagt

SEQ ID NO: 1906124 - DNA, 15 bp, Homo sapiens
cctggaaagtaagta

SEQ ID NO: 1906125 - DNA, 15 bp, Homo sapiens
ctggaaagtaagtag

SEQ ID NO: 1906126 - DNA, 15 bp, Homo sapiens
tggaaagtaagtaga

SEQ ID NO: 1906127 - DNA, 15 bp, Homo sapiens
ggaaagtaagtagag

SEQ ID NO: 1906128 - DNA, 15 bp, Homo sapiens
gaaagtaagtagaga

SEQ ID NO: 1906129 - DNA, 15 bp, Homo sapiens
aaagtaagtagagaa

SEQ ID NO: 1906130 - DNA, 15 bp, Homo sapiens
aagtaagtagagaat

SEQ ID NO: 1906131 - DNA, 15 bp, Homo sapiens
agtaagtagagaatg

SEQ ID NO: 1906132 - DNA, 15 bp, Homo sapiens
gtaagtagagaatgg

SEQ ID NO: 1906133 - DNA, 15 bp, Homo sapiens
taagtagagaatgga

SEQ ID NO: 1906134 - DNA, 15 bp, Homo sapiens
aagtagagaatggaa

SEQ ID NO: 1906135 - DNA, 15 bp, Homo sapiens
agtagagaatggaag

SEQ ID NO: 1906136 - DNA, 15 bp, Homo sapiens
gtagagaatggaagg

SEQ ID NO: 1906137 - DNA, 15 bp, Homo sapiens
tagagaatggaaggt

SEQ ID NO: 1906138 - DNA, 15 bp, Homo sapiens
agagaatggaaggtg

SEQ ID NO: 1906139 - DNA, 15 bp, Homo sapiens
gagaatggaaggtga

SEQ ID NO: 1906140 - DNA, 15 bp, Homo sapiens
agaatggaaggtgaa

SEQ ID NO: 1906141 - DNA, 15 bp, Homo sapiens
gaatggaaggtgaat

SEQ ID NO: 1906142 - DNA, 15 bp, Homo sapiens
aatggaaggtgaata

SEQ ID NO: 1906143 - DNA, 15 bp, Homo sapiens
atggaaggtgaataa

SEQ ID NO: 1906144 - DNA, 15 bp, Homo sapiens
tggaaggtgaataaa

SEQ ID NO: 1906145 - DNA, 15 bp, Homo sapiens
ggaaggtgaataaaa

SEQ ID NO: 1906146 - DNA, 15 bp, Homo sapiens
gaaggtgaataaaaa

SEQ ID NO: 1906147 - DNA, 15 bp, Homo sapiens
aaggtgaataaaaag

SEQ ID NO: 1906148 - DNA, 15 bp, Homo sapiens
aggtgaataaaaagg

SEQ ID NO: 1906149 - DNA, 15 bp, Homo sapiens
ggtgaataaaaaggg

SEQ ID NO: 1906150 - DNA, 15 bp, Homo sapiens
gtgaataaaaagggg

SEQ ID NO: 1906151 - DNA, 15 bp, Homo sapiens
tgaataaaaaggggt

SEQ ID NO: 1906152 - DNA, 15 bp, Homo sapiens
gaataaaaaggggtt

SEQ ID NO: 1906153 - DNA, 15 bp, Homo sapiens
aataaaaaggggttc

SEQ ID NO: 1906154 - DNA, 15 bp, Homo sapiens
ataaaaaggggttct

SEQ ID NO: 1906155 - DNA, 15 bp, Homo sapiens
taaaaaggggttctg

SEQ ID NO: 1906156 - DNA, 15 bp, Homo sapiens
aaaaaggggttctgt

SEQ ID NO: 1906157 - DNA, 15 bp, Homo sapiens
aaaaggggttctgtg

SEQ ID NO: 1906158 - DNA, 15 bp, Homo sapiens
aaaggggttctgtga

SEQ ID NO: 1906159 - DNA, 15 bp, Homo sapiens
aaggggttctgtgat

SEQ ID NO: 1906160 - DNA, 15 bp, Homo sapiens
aggggttctgtgatt

SEQ ID NO: 1906161 - DNA, 15 bp, Homo sapiens
ggggttctgtgattc

SEQ ID NO: 1906162 - DNA, 15 bp, Homo sapiens
gggttctgtgattct

SEQ ID NO: 1906163 - DNA, 15 bp, Homo sapiens
ggttctgtgattctg

SEQ ID NO: 1906164 - DNA, 15 bp, Homo sapiens
gttctgtgattctgc

SEQ ID NO: 1906165 - DNA, 15 bp, Homo sapiens
ttctgtgattctgct

SEQ ID NO: 1906166 - DNA, 15 bp, Homo sapiens
tctgtgattctgcta

SEQ ID NO: 1906167 - DNA, 15 bp, Homo sapiens
ctgtgattctgctac

SEQ ID NO: 1906168 - DNA, 15 bp, Homo sapiens
tgtgattctgctaca

SEQ ID NO: 1906169 - DNA, 15 bp, Homo sapiens
gtgattctgctacaa

SEQ ID NO: 1906170 - DNA, 15 bp, Homo sapiens
tgattctgctacaat

SEQ ID NO: 1906171 - DNA, 15 bp, Homo sapiens
gattctgctacaatt

SEQ ID NO: 1906172 - DNA, 15 bp, Homo sapiens
attctgctacaattc

SEQ ID NO: 1906173 - DNA, 15 bp, Homo sapiens
ttctgctacaattct

SEQ ID NO: 1906174 - DNA, 15 bp, Homo sapiens
tctgctacaattctg

SEQ ID NO: 1906175 - DNA, 15 bp, Homo sapiens
ctgctacaattctgt

SEQ ID NO: 1906176 - DNA, 15 bp, Homo sapiens
tgctacaattctgtt

SEQ ID NO: 1906177 - DNA, 15 bp, Homo sapiens
gctacaattctgttt

SEQ ID NO: 1906178 - DNA, 15 bp, Homo sapiens
ctacaattctgtttc

SEQ ID NO: 1906179 - DNA, 15 bp, Homo sapiens
tacaattctgtttct

SEQ ID NO: 1906180 - DNA, 15 bp, Homo sapiens
acaattctgtttctt

SEQ ID NO: 1906181 - DNA, 15 bp, Homo sapiens
caattctgtttcttg

SEQ ID NO: 1906182 - DNA, 15 bp, Homo sapiens
aattctgtttcttga

SEQ ID NO: 1906183 - DNA, 15 bp, Homo sapiens
attctgtttcttgac

SEQ ID NO: 1906184 - DNA, 15 bp, Homo sapiens
ttctgtttcttgact

SEQ ID NO: 1906185 - DNA, 15 bp, Homo sapiens
tctgtttcttgactt

SEQ ID NO: 1906186 - DNA, 15 bp, Homo sapiens
ctgtttcttgacttg

SEQ ID NO: 1906187 - DNA, 15 bp, Homo sapiens
tgtttcttgacttgg

SEQ ID NO: 1906188 - DNA, 15 bp, Homo sapiens
gtttcttgacttgga

SEQ ID NO: 1906189 - DNA, 15 bp, Homo sapiens
tttcttgacttggat

SEQ ID NO: 1906190 - DNA, 15 bp, Homo sapiens
ttcttgacttggatg

SEQ ID NO: 1906191 - DNA, 15 bp, Homo sapiens
tcttgacttggatgc

SEQ ID NO: 1906192 - DNA, 15 bp, Homo sapiens
cttgacttggatgct

SEQ ID NO: 1906193 - DNA, 15 bp, Homo sapiens
ttgacttggatgctg

SEQ ID NO: 1906194 - DNA, 15 bp, Homo sapiens
tgacttggatgctgg

SEQ ID NO: 1906195 - DNA, 15 bp, Homo sapiens
gacttggatgctggt

SEQ ID NO: 1906196 - DNA, 15 bp, Homo sapiens
acttggatgctggtt

SEQ ID NO: 1906197 - DNA, 15 bp, Homo sapiens
cttggatgctggttt

SEQ ID NO: 1906198 - DNA, 15 bp, Homo sapiens
ttggatgctggtttt

SEQ ID NO: 1906199 - DNA, 15 bp, Homo sapiens
tggatgctggtttta

SEQ ID NO: 1906200 - DNA, 15 bp, Homo sapiens
ggatgctggttttac

SEQ ID NO: 1906201 - DNA, 15 bp, Homo sapiens
gatgctggttttaca

SEQ ID NO: 1906202 - DNA, 15 bp, Homo sapiens
atgctggttttacac

SEQ ID NO: 1906203 - DNA, 15 bp, Homo sapiens
tgctggttttacaca

SEQ ID NO: 1906204 - DNA, 15 bp, Homo sapiens
gctggttttacacat

SEQ ID NO: 1906205 - DNA, 15 bp, Homo sapiens
ctggttttacacatg

SEQ ID NO: 1906206 - DNA, 15 bp, Homo sapiens
tggttttacacatgt

SEQ ID NO: 1906207 - DNA, 15 bp, Homo sapiens
ggttttacacatgtg

SEQ ID NO: 1906208 - DNA, 15 bp, Homo sapiens
gttttacacatgtgt

SEQ ID NO: 1906209 - DNA, 15 bp, Homo sapiens
ttttacacatgtgtt

SEQ ID NO: 1906210 - DNA, 15 bp, Homo sapiens
tttacacatgtgttc

SEQ ID NO: 1906211 - DNA, 15 bp, Homo sapiens
ttacacatgtgttca

SEQ ID NO: 1906212 - DNA, 15 bp, Homo sapiens
tacacatgtgttcag

SEQ ID NO: 1906213 - DNA, 15 bp, Homo sapiens
acacatgtgttcagt

SEQ ID NO: 1906214 - DNA, 15 bp, Homo sapiens
cacatgtgttcagtt

SEQ ID NO: 1906215 - DNA, 15 bp, Homo sapiens
acatgtgttcagttt

SEQ ID NO: 1906216 - DNA, 15 bp, Homo sapiens
catgtgttcagtttg

SEQ ID NO: 1906217 - DNA, 15 bp, Homo sapiens
atgtgttcagtttgt

SEQ ID NO: 1906218 - DNA, 15 bp, Homo sapiens
tgtgttcagtttgta

SEQ ID NO: 1906219 - DNA, 15 bp, Homo sapiens
gtgttcagtttgtaa

SEQ ID NO: 1906220 - DNA, 15 bp, Homo sapiens
tgttcagtttgtaaa

SEQ ID NO: 1906221 - DNA, 15 bp, Homo sapiens
gttcagtttgtaaaa

SEQ ID NO: 1906222 - DNA, 15 bp, Homo sapiens
ttcagtttgtaaaaa

SEQ ID NO: 1906223 - DNA, 15 bp, Homo sapiens
tcagtttgtaaaaac

SEQ ID NO: 1906224 - DNA, 15 bp, Homo sapiens
cagtttgtaaaaact

SEQ ID NO: 1906225 - DNA, 15 bp, Homo sapiens
agtttgtaaaaactt

SEQ ID NO: 1906226 - DNA, 15 bp, Homo sapiens
gtttgtaaaaactta

SEQ ID NO: 1906227 - DNA, 15 bp, Homo sapiens
tttgtaaaaacttat

SEQ ID NO: 1906228 - DNA, 15 bp, Homo sapiens
ttgtaaaaacttatt

SEQ ID NO: 1906229 - DNA, 15 bp, Homo sapiens
tgtaaaaacttattc

SEQ ID NO: 1906230 - DNA, 15 bp, Homo sapiens
gtaaaaacttattca

SEQ ID NO: 1906231 - DNA, 15 bp, Homo sapiens
taaaaacttattcaa

SEQ ID NO: 1906232 - DNA, 15 bp, Homo sapiens
aaaaacttattcaac

SEQ ID NO: 1906233 - DNA, 15 bp, Homo sapiens
aaaacttattcaact

SEQ ID NO: 1906234 - DNA, 15 bp, Homo sapiens
aaacttattcaactg

SEQ ID NO: 1906235 - DNA, 15 bp, Homo sapiens
aacttattcaactgc

SEQ ID NO: 1906236 - DNA, 15 bp, Homo sapiens
acttattcaactgca

SEQ ID NO: 1906237 - DNA, 15 bp, Homo sapiens
cttattcaactgcac

SEQ ID NO: 1906238 - DNA, 15 bp, Homo sapiens
ttattcaactgcaca

SEQ ID NO: 1906239 - DNA, 15 bp, Homo sapiens
tattcaactgcacac

SEQ ID NO: 1906240 - DNA, 15 bp, Homo sapiens
attcaactgcacact

SEQ ID NO: 1906241 - DNA, 15 bp, Homo sapiens
ttcaactgcacacta

SEQ ID NO: 1906242 - DNA, 15 bp, Homo sapiens
tcaactgcacactaa

SEQ ID NO: 1906243 - DNA, 15 bp, Homo sapiens
caactgcacactaag

SEQ ID NO: 1906244 - DNA, 15 bp, Homo sapiens
aactgcacactaagt

SEQ ID NO: 1906245 - DNA, 15 bp, Homo sapiens
actgcacactaagtt

SEQ ID NO: 1906246 - DNA, 15 bp, Homo sapiens
ctgcacactaagttt

SEQ ID NO: 1906247 - DNA, 15 bp, Homo sapiens
tgcacactaagtttt

SEQ ID NO: 1906248 - DNA, 15 bp, Homo sapiens
gcacactaagtttta

SEQ ID NO: 1906249 - DNA, 15 bp, Homo sapiens
cacactaagttttat

SEQ ID NO: 1906250 - DNA, 15 bp, Homo sapiens
acactaagttttata

SEQ ID NO: 1906251 - DNA, 15 bp, Homo sapiens
cactaagttttatag

SEQ ID NO: 1906252 - DNA, 15 bp, Homo sapiens
actaagttttataga

SEQ ID NO: 1906253 - DNA, 15 bp, Homo sapiens
ctaagttttatagaa

SEQ ID NO: 1906254 - DNA, 15 bp, Homo sapiens
taagttttatagaat

SEQ ID NO: 1906255 - DNA, 15 bp, Homo sapiens
aagttttatagaatt

SEQ ID NO: 1906256 - DNA, 15 bp, Homo sapiens
agttttatagaattt

SEQ ID NO: 1906257 - DNA, 15 bp, Homo sapiens
gttttatagaatttt

SEQ ID NO: 1906258 - DNA, 15 bp, Homo sapiens
ttttatagaattttc

SEQ ID NO: 1906259 - DNA, 15 bp, Homo sapiens
tttatagaattttct

SEQ ID NO: 1906260 - DNA, 15 bp, Homo sapiens
ttatagaattttctc

SEQ ID NO: 1906261 - DNA, 15 bp, Homo sapiens
tatagaattttctct

SEQ ID NO: 1906262 - DNA, 15 bp, Homo sapiens
atagaattttctctt

SEQ ID NO: 1906263 - DNA, 15 bp, Homo sapiens
tagaattttctcttt

SEQ ID NO: 1906264 - DNA, 15 bp, Homo sapiens
agaattttctctttt

SEQ ID NO: 1906265 - DNA, 15 bp, Homo sapiens
gaattttctctttta

SEQ ID NO: 1906266 - DNA, 15 bp, Homo sapiens
aattttctcttttaa

SEQ ID NO: 1906267 - DNA, 15 bp, Homo sapiens
attttctcttttaaa

SEQ ID NO: 1906268 - DNA, 15 bp, Homo sapiens
ttttctcttttaaag

SEQ ID NO: 1906269 - DNA, 15 bp, Homo sapiens
tttctcttttaaagt

SEQ ID NO: 1906270 - DNA, 15 bp, Homo sapiens
ttctcttttaaagta

SEQ ID NO: 1906271 - DNA, 15 bp, Homo sapiens
tctcttttaaagtat

SEQ ID NO: 1906272 - DNA, 15 bp, Homo sapiens
ctcttttaaagtata

SEQ ID NO: 1906273 - DNA, 15 bp, Homo sapiens
tcttttaaagtatac

SEQ ID NO: 1906274 - DNA, 15 bp, Homo sapiens
cttttaaagtataca

SEQ ID NO: 1906275 - DNA, 15 bp, Homo sapiens
ttttaaagtatacac

SEQ ID NO: 1906276 - DNA, 15 bp, Homo sapiens
tttaaagtatacacc

SEQ ID NO: 1906277 - DNA, 15 bp, Homo sapiens
ttaaagtatacaccc

SEQ ID NO: 1906278 - DNA, 15 bp, Homo sapiens
taaagtatacaccca

SEQ ID NO: 1906279 - DNA, 15 bp, Homo sapiens
aaagtatacacccat

SEQ ID NO: 1906280 - DNA, 15 bp, Homo sapiens
aagtatacacccata

SEQ ID NO: 1906281 - DNA, 15 bp, Homo sapiens
agtatacacccatat

SEQ ID NO: 1906282 - DNA, 15 bp, Homo sapiens
gtatacacccatata

SEQ ID NO: 1906283 - DNA, 15 bp, Homo sapiens
tatacacccatataa

SEQ ID NO: 1906284 - DNA, 15 bp, Homo sapiens
atacacccatataaa

SEQ ID NO: 1906285 - DNA, 15 bp, Homo sapiens
tacacccatataaag

SEQ ID NO: 1906286 - DNA, 15 bp, Homo sapiens
acacccatataaagt

SEQ ID NO: 1906287 - DNA, 15 bp, Homo sapiens
cacccatataaagtt

SEQ ID NO: 1906288 - DNA, 15 bp, Homo sapiens
acccatataaagtta

SEQ ID NO: 1906289 - DNA, 15 bp, Homo sapiens
cccatataaagttaa

SEQ ID NO: 1906290 - DNA, 15 bp, Homo sapiens
ccatataaagttaaa

SEQ ID NO: 1906291 - DNA, 15 bp, Homo sapiens
catataaagttaaaa

SEQ ID NO: 1906292 - DNA, 15 bp, Homo sapiens
atataaagttaaaac

SEQ ID NO: 1906293 - DNA, 15 bp, Homo sapiens
tataaagttaaaaca

SEQ ID NO: 1906294 - DNA, 15 bp, Homo sapiens
ataaagttaaaacat

SEQ ID NO: 1906295 - DNA, 15 bp, Homo sapiens
taaagttaaaacatt

SEQ ID NO: 1906296 - DNA, 15 bp, Homo sapiens
aaagttaaaacattg

SEQ ID NO: 1906297 - DNA, 15 bp, Homo sapiens
aagttaaaacattgg

SEQ ID NO: 1906298 - DNA, 15 bp, Homo sapiens
agttaaaacattggc

SEQ ID NO: 1906299 - DNA, 15 bp, Homo sapiens
gttaaaacattggca

SEQ ID NO: 1906300 - DNA, 15 bp, Homo sapiens
ttaaaacattggcat

SEQ ID NO: 1906301 - DNA, 15 bp, Homo sapiens
taaaacattggcatg

SEQ ID NO: 1906302 - DNA, 15 bp, Homo sapiens
aaaacattggcatgt

SEQ ID NO: 1906303 - DNA, 15 bp, Homo sapiens
aaacattggcatgtt

SEQ ID NO: 1906304 - DNA, 15 bp, Homo sapiens
aacattggcatgtta

SEQ ID NO: 1906305 - DNA, 15 bp, Homo sapiens
acattggcatgttag

SEQ ID NO: 1906306 - DNA, 15 bp, Homo sapiens
cattggcatgttagg

SEQ ID NO: 1906307 - DNA, 15 bp, Homo sapiens
attggcatgttaggt

SEQ ID NO: 1906308 - DNA, 15 bp, Homo sapiens
ttggcatgttaggta

SEQ ID NO: 1906309 - DNA, 15 bp, Homo sapiens
tggcatgttaggtat

SEQ ID NO: 1906310 - DNA, 15 bp, Homo sapiens
ggcatgttaggtata

SEQ ID NO: 1906311 - DNA, 15 bp, Homo sapiens
gcatgttaggtatat

SEQ ID NO: 1906312 - DNA, 15 bp, Homo sapiens
catgttaggtatatt

SEQ ID NO: 1906313 - DNA, 15 bp, Homo sapiens
atgttaggtatatta

SEQ ID NO: 1906314 - DNA, 15 bp, Homo sapiens
tgttaggtatattag

SEQ ID NO: 1906315 - DNA, 15 bp, Homo sapiens
gttaggtatattagg

SEQ ID NO: 1906316 - DNA, 15 bp, Homo sapiens
ttaggtatattagga

SEQ ID NO: 1906317 - DNA, 15 bp, Homo sapiens
taggtatattaggat

SEQ ID NO: 1906318 - DNA, 15 bp, Homo sapiens
aggtatattaggata

SEQ ID NO: 1906319 - DNA, 15 bp, Homo sapiens
ggtatattaggatat

SEQ ID NO: 1906320 - DNA, 15 bp, Homo sapiens
gtatattaggatata

SEQ ID NO: 1906321 - DNA, 15 bp, Homo sapiens
tatattaggatatat

SEQ ID NO: 1906322 - DNA, 15 bp, Homo sapiens
atattaggatatata

SEQ ID NO: 1906323 - DNA, 15 bp, Homo sapiens
tattaggatatataa

SEQ ID NO: 1906324 - DNA, 15 bp, Homo sapiens
attaggatatataaa

SEQ ID NO: 1906325 - DNA, 15 bp, Homo sapiens
ttaggatatataaaa

SEQ ID NO: 1906326 - DNA, 15 bp, Homo sapiens
taggatatataaaaa

SEQ ID NO: 1906327 - DNA, 15 bp, Homo sapiens
aggatatataaaaaa

SEQ ID NO: 1906328 - DNA, 15 bp, Homo sapiens
ggatatataaaaaag

SEQ ID NO: 1906329 - DNA, 15 bp, Homo sapiens
gatatataaaaaagc

SEQ ID NO: 1906330 - DNA, 15 bp, Homo sapiens
atatataaaaaagca

SEQ ID NO: 1906331 - DNA, 15 bp, Homo sapiens
tatataaaaaagcat

SEQ ID NO: 1906332 - DNA, 15 bp, Homo sapiens
atataaaaaagcata

SEQ ID NO: 1906333 - DNA, 15 bp, Homo sapiens
tataaaaaagcatat

SEQ ID NO: 1906334 - DNA, 15 bp, Homo sapiens
ataaaaaagcatatt

SEQ ID NO: 1906335 - DNA, 15 bp, Homo sapiens
taaaaaagcatattc

SEQ ID NO: 1906336 - DNA, 15 bp, Homo sapiens
aaaaaagcatattca

SEQ ID NO: 1906337 - DNA, 15 bp, Homo sapiens
aaaaagcatattcat

SEQ ID NO: 1906338 - DNA, 15 bp, Homo sapiens
aaaagcatattcatt

SEQ ID NO: 1906339 - DNA, 15 bp, Homo sapiens
aaagcatattcattt

SEQ ID NO: 1906340 - DNA, 15 bp, Homo sapiens
aagcatattcatttg

SEQ ID NO: 1906341 - DNA, 15 bp, Homo sapiens
agcatattcatttgt

SEQ ID NO: 1906342 - DNA, 15 bp, Homo sapiens
gcatattcatttgta

SEQ ID NO: 1906343 - DNA, 15 bp, Homo sapiens
catattcatttgtat

SEQ ID NO: 1906344 - DNA, 15 bp, Homo sapiens
atattcatttgtata

SEQ ID NO: 1906345 - DNA, 15 bp, Homo sapiens
tattcatttgtatac

SEQ ID NO: 1906346 - DNA, 15 bp, Homo sapiens
attcatttgtataca

SEQ ID NO: 1906347 - DNA, 15 bp, Homo sapiens
ttcatttgtatacat

SEQ ID NO: 1906348 - DNA, 15 bp, Homo sapiens
tcatttgtatacata

SEQ ID NO: 1906349 - DNA, 15 bp, Homo sapiens
catttgtatacatat

SEQ ID NO: 1906350 - DNA, 15 bp, Homo sapiens
atttgtatacatata

SEQ ID NO: 1906351 - DNA, 15 bp, Homo sapiens
tttgtatacatataa

SEQ ID NO: 1906352 - DNA, 15 bp, Homo sapiens
ttgtatacatataaa

SEQ ID NO: 1906353 - DNA, 15 bp, Homo sapiens
tgtatacatataaat

SEQ ID NO: 1906354 - DNA, 15 bp, Homo sapiens
gtatacatataaata

SEQ ID NO: 1906355 - DNA, 15 bp, Homo sapiens
tatacatataaataa

SEQ ID NO: 1906356 - DNA, 15 bp, Homo sapiens
atacatataaataaa

SEQ ID NO: 1906357 - DNA, 15 bp, Homo sapiens
tacatataaataaac

SEQ ID NO: 1906358 - DNA, 15 bp, Homo sapiens
acatataaataaaca

SEQ ID NO: 1906359 - DNA, 15 bp, Homo sapiens
catataaataaacag

SEQ ID NO: 1906360 - DNA, 15 bp, Homo sapiens
atataaataaacagc

SEQ ID NO: 1906361 - DNA, 15 bp, Homo sapiens
tataaataaacagct

SEQ ID NO: 1906362 - DNA, 15 bp, Homo sapiens
ataaataaacagctc

SEQ ID NO: 1906363 - DNA, 15 bp, Homo sapiens
taaataaacagctct

SEQ ID NO: 1906364 - DNA, 15 bp, Homo sapiens
aaataaacagctctg

SEQ ID NO: 1906365 - DNA, 15 bp, Homo sapiens
aataaacagctctgt

SEQ ID NO: 1906366 - DNA, 15 bp, Homo sapiens
ataaacagctctgtg

SEQ ID NO: 1906367 - DNA, 15 bp, Homo sapiens
taaacagctctgtgt

SEQ ID NO: 1906368 - DNA, 15 bp, Homo sapiens
aaacagctctgtgta

SEQ ID NO: 1906369 - DNA, 15 bp, Homo sapiens
aacagctctgtgtaa

SEQ ID NO: 1906370 - DNA, 15 bp, Homo sapiens
acagctctgtgtaaa

SEQ ID NO: 1906371 - DNA, 15 bp, Homo sapiens
cagctctgtgtaaat

SEQ ID NO: 1906372 - DNA, 15 bp, Homo sapiens
agctctgtgtaaata

SEQ ID NO: 1906373 - DNA, 15 bp, Homo sapiens
gctctgtgtaaataa

SEQ ID NO: 1906374 - DNA, 15 bp, Homo sapiens
ctctgtgtaaataag

SEQ ID NO: 1906375 - DNA, 15 bp, Homo sapiens
tctgtgtaaataagt

SEQ ID NO: 1906376 - DNA, 15 bp, Homo sapiens
ctgtgtaaataagta

SEQ ID NO: 1906377 - DNA, 15 bp, Homo sapiens
tgtgtaaataagtag

SEQ ID NO: 1906378 - DNA, 15 bp, Homo sapiens
gtgtaaataagtagc

SEQ ID NO: 1906379 - DNA, 15 bp, Homo sapiens
tgtaaataagtagct

SEQ ID NO: 1906380 - DNA, 15 bp, Homo sapiens
gtaaataagtagcta

SEQ ID NO: 1906381 - DNA, 15 bp, Homo sapiens
taaataagtagctac

SEQ ID NO: 1906382 - DNA, 15 bp, Homo sapiens
aaataagtagctact

SEQ ID NO: 1906383 - DNA, 15 bp, Homo sapiens
aataagtagctacta

SEQ ID NO: 1906384 - DNA, 15 bp, Homo sapiens
ataagtagctactaa

SEQ ID NO: 1906385 - DNA, 15 bp, Homo sapiens
taagtagctactaat

SEQ ID NO: 1906386 - DNA, 15 bp, Homo sapiens
aagtagctactaata

SEQ ID NO: 1906387 - DNA, 15 bp, Homo sapiens
agtagctactaataa

SEQ ID NO: 1906388 - DNA, 15 bp, Homo sapiens
gtagctactaataat

SEQ ID NO: 1906389 - DNA, 15 bp, Homo sapiens
tagctactaataatg

SEQ ID NO: 1906390 - DNA, 15 bp, Homo sapiens
agctactaataatgt

SEQ ID NO: 1906391 - DNA, 15 bp, Homo sapiens
gctactaataatgtc

SEQ ID NO: 1906392 - DNA, 15 bp, Homo sapiens
ctactaataatgtca

SEQ ID NO: 1906393 - DNA, 15 bp, Homo sapiens
tactaataatgtcaa

SEQ ID NO: 1906394 - DNA, 15 bp, Homo sapiens
actaataatgtcaag

SEQ ID NO: 1906395 - DNA, 15 bp, Homo sapiens
ctaataatgtcaagc

SEQ ID NO: 1906396 - DNA, 15 bp, Homo sapiens
taataatgtcaagcc

SEQ ID NO: 1906397 - DNA, 15 bp, Homo sapiens
aataatgtcaagcct

SEQ ID NO: 1906398 - DNA, 15 bp, Homo sapiens
ataatgtcaagccta

SEQ ID NO: 1906399 - DNA, 15 bp, Homo sapiens
taatgtcaagcctat

SEQ ID NO: 1906400 - DNA, 15 bp, Homo sapiens
aatgtcaagcctatt

SEQ ID NO: 1906401 - DNA, 15 bp, Homo sapiens
atgtcaagcctatta

SEQ ID NO: 1906402 - DNA, 15 bp, Homo sapiens
tgtcaagcctattat

SEQ ID NO: 1906403 - DNA, 15 bp, Homo sapiens
gtcaagcctattatt

SEQ ID NO: 1906404 - DNA, 15 bp, Homo sapiens
tcaagcctattattt

SEQ ID NO: 1906405 - DNA, 15 bp, Homo sapiens
caagcctattatttt

SEQ ID NO: 1906406 - DNA, 15 bp, Homo sapiens
aagcctattatttta

SEQ ID NO: 1906407 - DNA, 15 bp, Homo sapiens
agcctattattttaa

SEQ ID NO: 1906408 - DNA, 15 bp, Homo sapiens
gcctattattttaat

SEQ ID NO: 1906409 - DNA, 15 bp, Homo sapiens
cctattattttaatt

SEQ ID NO: 1906410 - DNA, 15 bp, Homo sapiens
ctattattttaatta

SEQ ID NO: 1906411 - DNA, 15 bp, Homo sapiens
tattattttaattaa

SEQ ID NO: 1906412 - DNA, 15 bp, Homo sapiens
attattttaattaat

SEQ ID NO: 1906413 - DNA, 15 bp, Homo sapiens
ttattttaattaatc

SEQ ID NO: 1906414 - DNA, 15 bp, Homo sapiens
tattttaattaatct

SEQ ID NO: 1906415 - DNA, 15 bp, Homo sapiens
attttaattaatctt

SEQ ID NO: 1906416 - DNA, 15 bp, Homo sapiens
ttttaattaatcttc

SEQ ID NO: 1906417 - DNA, 15 bp, Homo sapiens
tttaattaatcttca

SEQ ID NO: 1906418 - DNA, 15 bp, Homo sapiens
ttaattaatcttcat

SEQ ID NO: 1906419 - DNA, 15 bp, Homo sapiens
taattaatcttcatg

SEQ ID NO: 1906420 - DNA, 15 bp, Homo sapiens
aattaatcttcatga

SEQ ID NO: 1906421 - DNA, 15 bp, Homo sapiens
attaatcttcatgag

SEQ ID NO: 1906422 - DNA, 15 bp, Homo sapiens
ttaatcttcatgaga

SEQ ID NO: 1906423 - DNA, 15 bp, Homo sapiens
taatcttcatgagaa

SEQ ID NO: 1906424 - DNA, 15 bp, Homo sapiens
aatcttcatgagaaa

SEQ ID NO: 1906425 - DNA, 15 bp, Homo sapiens
atcttcatgagaaat

SEQ ID NO: 1906426 - DNA, 15 bp, Homo sapiens
tcttcatgagaaatt

SEQ ID NO: 1906427 - DNA, 15 bp, Homo sapiens
cttcatgagaaattt

SEQ ID NO: 1906428 - DNA, 15 bp, Homo sapiens
ttcatgagaaatttt

SEQ ID NO: 1906429 - DNA, 15 bp, Homo sapiens
tcatgagaaatttta

SEQ ID NO: 1906430 - DNA, 15 bp, Homo sapiens
catgagaaattttaa

SEQ ID NO: 1906431 - DNA, 15 bp, Homo sapiens
atgagaaattttaaa

SEQ ID NO: 1906432 - DNA, 15 bp, Homo sapiens
tgagaaattttaaag

SEQ ID NO: 1906433 - DNA, 15 bp, Homo sapiens
gagaaattttaaagg

SEQ ID NO: 1906434 - DNA, 15 bp, Homo sapiens
agaaattttaaaggt

SEQ ID NO: 1906435 - DNA, 15 bp, Homo sapiens
gaaattttaaaggtt

SEQ ID NO: 1906436 - DNA, 15 bp, Homo sapiens
aaattttaaaggttg

SEQ ID NO: 1906437 - DNA, 15 bp, Homo sapiens
aattttaaaggttgc

SEQ ID NO: 1906438 - DNA, 15 bp, Homo sapiens
attttaaaggttgca

SEQ ID NO: 1906439 - DNA, 15 bp, Homo sapiens
ttttaaaggttgcat

SEQ ID NO: 1906440 - DNA, 15 bp, Homo sapiens
tttaaaggttgcatt

SEQ ID NO: 1906441 - DNA, 15 bp, Homo sapiens
ttaaaggttgcatta

SEQ ID NO: 1906442 - DNA, 15 bp, Homo sapiens
taaaggttgcattaa

SEQ ID NO: 1906443 - DNA, 15 bp, Homo sapiens
aaaggttgcattaac

SEQ ID NO: 1906444 - DNA, 15 bp, Homo sapiens
aaggttgcattaaca

SEQ ID NO: 1906445 - DNA, 15 bp, Homo sapiens
aggttgcattaacag

SEQ ID NO: 1906446 - DNA, 15 bp, Homo sapiens
ggttgcattaacagt

SEQ ID NO: 1906447 - DNA, 15 bp, Homo sapiens
gttgcattaacagtc

SEQ ID NO: 1906448 - DNA, 15 bp, Homo sapiens
ttgcattaacagtct

SEQ ID NO: 1906449 - DNA, 15 bp, Homo sapiens
tgcattaacagtctc

SEQ ID NO: 1906450 - DNA, 15 bp, Homo sapiens
gcattaacagtctca

SEQ ID NO: 1906451 - DNA, 15 bp, Homo sapiens
cattaacagtctcat

SEQ ID NO: 1906452 - DNA, 15 bp, Homo sapiens
attaacagtctcatt

SEQ ID NO: 1906453 - DNA, 15 bp, Homo sapiens
ttaacagtctcattt

SEQ ID NO: 1906454 - DNA, 15 bp, Homo sapiens
taacagtctcatttt

SEQ ID NO: 1906455 - DNA, 15 bp, Homo sapiens
aacagtctcattttg

SEQ ID NO: 1906456 - DNA, 15 bp, Homo sapiens
acagtctcattttgg

SEQ ID NO: 1906457 - DNA, 15 bp, Homo sapiens
cagtctcattttgga

SEQ ID NO: 1906458 - DNA, 15 bp, Homo sapiens
agtctcattttggag

SEQ ID NO: 1906459 - DNA, 15 bp, Homo sapiens
gtctcattttggaga

SEQ ID NO: 1906460 - DNA, 15 bp, Homo sapiens
tctcattttggagac

SEQ ID NO: 1906461 - DNA, 15 bp, Homo sapiens
ctcattttggagaca

SEQ ID NO: 1906462 - DNA, 15 bp, Homo sapiens
tcattttggagacaa

SEQ ID NO: 1906463 - DNA, 15 bp, Homo sapiens
cattttggagacaag

SEQ ID NO: 1906464 - DNA, 15 bp, Homo sapiens
attttggagacaaga

SEQ ID NO: 1906465 - DNA, 15 bp, Homo sapiens
ttggagacaagagta

SEQ ID NO: 1906466 - DNA, 15 bp, Homo sapiens
tggagacaagagtat

SEQ ID NO: 1906467 - DNA, 15 bp, Homo sapiens
ggagacaagagtatt

SEQ ID NO: 1906468 - DNA, 15 bp, Homo sapiens
gagacaagagtatta

SEQ ID NO: 1906469 - DNA, 15 bp, Homo sapiens
agacaagagtattaa

SEQ ID NO: 1906470 - DNA, 15 bp, Homo sapiens
gacaagagtattaag

SEQ ID NO: 1906471 - DNA, 15 bp, Homo sapiens
acaagagtattaaga

SEQ ID NO: 1906472 - DNA, 15 bp, Homo sapiens
caagagtattaagac

SEQ ID NO: 1906473 - DNA, 15 bp, Homo sapiens
aagagtattaagact

SEQ ID NO: 1906474 - DNA, 15 bp, Homo sapiens
agagtattaagactc

SEQ ID NO: 1906475 - DNA, 15 bp, Homo sapiens
gagtattaagactca

SEQ ID NO: 1906476 - DNA, 15 bp, Homo sapiens
agtattaagactcag

SEQ ID NO: 1906477 - DNA, 15 bp, Homo sapiens
gtattaagactcaga

SEQ ID NO: 1906478 - DNA, 15 bp, Homo sapiens
tattaagactcagaa

SEQ ID NO: 1906479 - DNA, 15 bp, Homo sapiens
attaagactcagaaa

SEQ ID NO: 1906480 - DNA, 15 bp, Homo sapiens
ttaagactcagaaaa

SEQ ID NO: 1906481 - DNA, 15 bp, Homo sapiens
taagactcagaaaag

SEQ ID NO: 1906482 - DNA, 15 bp, Homo sapiens
aagactcagaaaagt

SEQ ID NO: 1906483 - DNA, 15 bp, Homo sapiens
agactcagaaaagtt

SEQ ID NO: 1906484 - DNA, 15 bp, Homo sapiens
gactcagaaaagtta

SEQ ID NO: 1906485 - DNA, 15 bp, Homo sapiens
actcagaaaagttaa

SEQ ID NO: 1906486 - DNA, 15 bp, Homo sapiens
ctcagaaaagttaat

SEQ ID NO: 1906487 - DNA, 15 bp, Homo sapiens
tcagaaaagttaatt

SEQ ID NO: 1906488 - DNA, 15 bp, Homo sapiens
cagaaaagttaatta

SEQ ID NO: 1906489 - DNA, 15 bp, Homo sapiens
agaaaagttaattag

SEQ ID NO: 1906490 - DNA, 15 bp, Homo sapiens
gaaaagttaattagc

SEQ ID NO: 1906491 - DNA, 15 bp, Homo sapiens
aaaagttaattagct

SEQ ID NO: 1906492 - DNA, 15 bp, Homo sapiens
aaagttaattagctt

SEQ ID NO: 1906493 - DNA, 15 bp, Homo sapiens
aagttaattagcttg

SEQ ID NO: 1906494 - DNA, 15 bp, Homo sapiens
agttaattagcttgc

SEQ ID NO: 1906495 - DNA, 15 bp, Homo sapiens
gttaattagcttgca

SEQ ID NO: 1906496 - DNA, 15 bp, Homo sapiens
ttaattagcttgcac

SEQ ID NO: 1906497 - DNA, 15 bp, Homo sapiens
taattagcttgcacc

SEQ ID NO: 1906498 - DNA, 15 bp, Homo sapiens
aattagcttgcaccc

SEQ ID NO: 1906499 - DNA, 15 bp, Homo sapiens
attagcttgcaccca

SEQ ID NO: 1906500 - DNA, 15 bp, Homo sapiens
ttagcttgcacccag

SEQ ID NO: 1906501 - DNA, 15 bp, Homo sapiens
tagcttgcacccagt

SEQ ID NO: 1906502 - DNA, 15 bp, Homo sapiens
agcttgcacccagtg

SEQ ID NO: 1906503 - DNA, 15 bp, Homo sapiens
gcttgcacccagtgt

SEQ ID NO: 1906504 - DNA, 15 bp, Homo sapiens
cttgcacccagtgta

SEQ ID NO: 1906505 - DNA, 15 bp, Homo sapiens
ttgcacccagtgtaa

SEQ ID NO: 1906506 - DNA, 15 bp, Homo sapiens
tgcacccagtgtaat

SEQ ID NO: 1906507 - DNA, 15 bp, Homo sapiens
gcacccagtgtaata

SEQ ID NO: 1906508 - DNA, 15 bp, Homo sapiens
cacccagtgtaatac

SEQ ID NO: 1906509 - DNA, 15 bp, Homo sapiens
acccagtgtaatact

SEQ ID NO: 1906510 - DNA, 15 bp, Homo sapiens
cccagtgtaatactg

SEQ ID NO: 1906511 - DNA, 15 bp, Homo sapiens
ccagtgtaatactga

SEQ ID NO: 1906512 - DNA, 15 bp, Homo sapiens
cagtgtaatactgat

SEQ ID NO: 1906513 - DNA, 15 bp, Homo sapiens
agtgtaatactgata

SEQ ID NO: 1906514 - DNA, 15 bp, Homo sapiens
gtgtaatactgatag

SEQ ID NO: 1906515 - DNA, 15 bp, Homo sapiens
tgtaatactgatagc

SEQ ID NO: 1906516 - DNA, 15 bp, Homo sapiens
gtaatactgatagca

SEQ ID NO: 1906517 - DNA, 15 bp, Homo sapiens
taatactgatagcaa

SEQ ID NO: 1906518 - DNA, 15 bp, Homo sapiens
aatactgatagcaaa

SEQ ID NO: 1906519 - DNA, 15 bp, Homo sapiens
atactgatagcaaaa

SEQ ID NO: 1906520 - DNA, 15 bp, Homo sapiens
tactgatagcaaaag

SEQ ID NO: 1906521 - DNA, 15 bp, Homo sapiens
actgatagcaaaaga

SEQ ID NO: 1906522 - DNA, 15 bp, Homo sapiens
ctgatagcaaaagaa

SEQ ID NO: 1906523 - DNA, 15 bp, Homo sapiens
tgatagcaaaagaac

SEQ ID NO: 1906524 - DNA, 15 bp, Homo sapiens
gatagcaaaagaaca

SEQ ID NO: 1906525 - DNA, 15 bp, Homo sapiens
atagcaaaagaacag

SEQ ID NO: 1906526 - DNA, 15 bp, Homo sapiens
tagcaaaagaacaga

SEQ ID NO: 1906527 - DNA, 15 bp, Homo sapiens
agcaaaagaacagaa

SEQ ID NO: 1906528 - DNA, 15 bp, Homo sapiens
aaaagaacagaaatg

SEQ ID NO: 1906529 - DNA, 15 bp, Homo sapiens
aaagaacagaaatgg

SEQ ID NO: 1906530 - DNA, 15 bp, Homo sapiens
aagaacagaaatgga

SEQ ID NO: 1906531 - DNA, 15 bp, Homo sapiens
agaacagaaatggaa

SEQ ID NO: 1906532 - DNA, 15 bp, Homo sapiens
gaacagaaatggaat

SEQ ID NO: 1906533 - DNA, 15 bp, Homo sapiens
aacagaaatggaatt

SEQ ID NO: 1906534 - DNA, 15 bp, Homo sapiens
acagaaatggaattc

SEQ ID NO: 1906535 - DNA, 15 bp, Homo sapiens
cagaaatggaattca

SEQ ID NO: 1906536 - DNA, 15 bp, Homo sapiens
agaaatggaattcaa

SEQ ID NO: 1906537 - DNA, 15 bp, Homo sapiens
gaaatggaattcaaa

SEQ ID NO: 1906538 - DNA, 15 bp, Homo sapiens
aaatggaattcaaac

SEQ ID NO: 1906539 - DNA, 15 bp, Homo sapiens
aatggaattcaaact

SEQ ID NO: 1906540 - DNA, 15 bp, Homo sapiens
atggaattcaaactc

SEQ ID NO: 1906541 - DNA, 15 bp, Homo sapiens
tggaattcaaactca

SEQ ID NO: 1906542 - DNA, 15 bp, Homo sapiens
ggaattcaaactcag

SEQ ID NO: 1906543 - DNA, 15 bp, Homo sapiens
gaattcaaactcagt

SEQ ID NO: 1906544 - DNA, 15 bp, Homo sapiens
aattcaaactcagtc

SEQ ID NO: 1906545 - DNA, 15 bp, Homo sapiens
attcaaactcagtca

SEQ ID NO: 1906546 - DNA, 15 bp, Homo sapiens
ttcaaactcagtcat

SEQ ID NO: 1906547 - DNA, 15 bp, Homo sapiens
tcaaactcagtcatc

SEQ ID NO: 1906548 - DNA, 15 bp, Homo sapiens
caaactcagtcatct

SEQ ID NO: 1906549 - DNA, 15 bp, Homo sapiens
aaactcagtcatctc

SEQ ID NO: 1906550 - DNA, 15 bp, Homo sapiens
aactcagtcatctct

SEQ ID NO: 1906551 - DNA, 15 bp, Homo sapiens
actcagtcatctcta

SEQ ID NO: 1906552 - DNA, 15 bp, Homo sapiens
ctcagtcatctctat

SEQ ID NO: 1906553 - DNA, 15 bp, Homo sapiens
tcagtcatctctatc

SEQ ID NO: 1906554 - DNA, 15 bp, Homo sapiens
cagtcatctctatct

SEQ ID NO: 1906555 - DNA, 15 bp, Homo sapiens
agtcatctctatctc

SEQ ID NO: 1906556 - DNA, 15 bp, Homo sapiens
gtcatctctatctcc

SEQ ID NO: 1906557 - DNA, 15 bp, Homo sapiens
tcatctctatctcca

SEQ ID NO: 1906558 - DNA, 15 bp, Homo sapiens
catctctatctccag

SEQ ID NO: 1906559 - DNA, 15 bp, Homo sapiens
atctctatctccaga

SEQ ID NO: 1906560 - DNA, 15 bp, Homo sapiens
tctctatctccagag

SEQ ID NO: 1906561 - DNA, 15 bp, Homo sapiens
ctctatctccagagt

SEQ ID NO: 1906562 - DNA, 15 bp, Homo sapiens
tctatctccagagtt

SEQ ID NO: 1906563 - DNA, 15 bp, Homo sapiens
ctatctccagagttt

SEQ ID NO: 1906564 - DNA, 15 bp, Homo sapiens
tatctccagagtttc

SEQ ID NO: 1906565 - DNA, 15 bp, Homo sapiens
atctccagagtttct

SEQ ID NO: 1906566 - DNA, 15 bp, Homo sapiens
tctccagagtttctt

SEQ ID NO: 1906567 - DNA, 15 bp, Homo sapiens
ctccagagtttctta

SEQ ID NO: 1906568 - DNA, 15 bp, Homo sapiens
tccagagtttcttac

SEQ ID NO: 1906569 - DNA, 15 bp, Homo sapiens
ccagagtttcttacc

SEQ ID NO: 1906570 - DNA, 15 bp, Homo sapiens
cagagtttcttacca

SEQ ID NO: 1906571 - DNA, 15 bp, Homo sapiens
agagtttcttaccac

SEQ ID NO: 1906572 - DNA, 15 bp, Homo sapiens
gagtttcttaccaca

SEQ ID NO: 1906573 - DNA, 15 bp, Homo sapiens
agtttcttaccacaa

SEQ ID NO: 1906574 - DNA, 15 bp, Homo sapiens
gtttcttaccacaat

SEQ ID NO: 1906575 - DNA, 15 bp, Homo sapiens
tttcttaccacaatt

SEQ ID NO: 1906576 - DNA, 15 bp, Homo sapiens
ttcttaccacaattg

SEQ ID NO: 1906577 - DNA, 15 bp, Homo sapiens
tcttaccacaattgc

SEQ ID NO: 1906578 - DNA, 15 bp, Homo sapiens
cttaccacaattgca

SEQ ID NO: 1906579 - DNA, 15 bp, Homo sapiens
ttaccacaattgcac

SEQ ID NO: 1906580 - DNA, 15 bp, Homo sapiens
taccacaattgcact

SEQ ID NO: 1906581 - DNA, 15 bp, Homo sapiens
accacaattgcacta

SEQ ID NO: 1906582 - DNA, 15 bp, Homo sapiens
ccacaattgcactaa

SEQ ID NO: 1906583 - DNA, 15 bp, Homo sapiens
cacaattgcactaag

SEQ ID NO: 1906584 - DNA, 15 bp, Homo sapiens
acaattgcactaagc

SEQ ID NO: 1906585 - DNA, 15 bp, Homo sapiens
caattgcactaagca

SEQ ID NO: 1906586 - DNA, 15 bp, Homo sapiens
aattgcactaagcaa

SEQ ID NO: 1906587 - DNA, 15 bp, Homo sapiens
attgcactaagcaat

SEQ ID NO: 1906588 - DNA, 15 bp, Homo sapiens
ttgcactaagcaata

SEQ ID NO: 1906589 - DNA, 15 bp, Homo sapiens
tgcactaagcaataa

SEQ ID NO: 1906590 - DNA, 15 bp, Homo sapiens
gcactaagcaataaa

SEQ ID NO: 1906591 - DNA, 15 bp, Homo sapiens
cactaagcaataaaa

SEQ ID NO: 1906592 - DNA, 15 bp, Homo sapiens
actaagcaataaaag

SEQ ID NO: 1906593 - DNA, 15 bp, Homo sapiens
ctaagcaataaaaga

SEQ ID NO: 1906594 - DNA, 15 bp, Homo sapiens
taagcaataaaagac

SEQ ID NO: 1906595 - DNA, 15 bp, Homo sapiens
aagcaataaaagaca

SEQ ID NO: 1906596 - DNA, 15 bp, Homo sapiens
agcaataaaagacat

SEQ ID NO: 1906597 - DNA, 15 bp, Homo sapiens
gcaataaaagacatg

SEQ ID NO: 1906598 - DNA, 15 bp, Homo sapiens
ataaaagacatgaat

SEQ ID NO: 1906599 - DNA, 15 bp, Homo sapiens
taaaagacatgaata

SEQ ID NO: 1906600 - DNA, 15 bp, Homo sapiens
aaagacatgaataaa

SEQ ID NO: 1906601 - DNA, 15 bp, Homo sapiens
aagacatgaataaat

SEQ ID NO: 1906602 - DNA, 15 bp, Homo sapiens
agacatgaataaatc

SEQ ID NO: 1906603 - DNA, 15 bp, Homo sapiens
gacatgaataaatca

SEQ ID NO: 1906604 - DNA, 15 bp, Homo sapiens
acatgaataaatcaa

SEQ ID NO: 1906605 - DNA, 15 bp, Homo sapiens
catgaataaatcaaa

SEQ ID NO: 1906606 - DNA, 15 bp, Homo sapiens
atgaataaatcaaag

SEQ ID NO: 1906607 - DNA, 15 bp, Homo sapiens
tgaataaatcaaagg

SEQ ID NO: 1906608 - DNA, 15 bp, Homo sapiens
gaataaatcaaagga

SEQ ID NO: 1906609 - DNA, 15 bp, Homo sapiens
aataaatcaaaggaa

SEQ ID NO: 1906610 - DNA, 15 bp, Homo sapiens
ataaatcaaaggaag

SEQ ID NO: 1906611 - DNA, 15 bp, Homo sapiens
taaatcaaaggaagc

SEQ ID NO: 1906612 - DNA, 15 bp, Homo sapiens
aaatcaaaggaagct

SEQ ID NO: 1906613 - DNA, 15 bp, Homo sapiens
aatcaaaggaagctt

SEQ ID NO: 1906614 - DNA, 15 bp, Homo sapiens
atcaaaggaagcttt

SEQ ID NO: 1906615 - DNA, 15 bp, Homo sapiens
tcaaaggaagctttg

SEQ ID NO: 1906616 - DNA, 15 bp, Homo sapiens
caaaggaagctttgt

SEQ ID NO: 1906617 - DNA, 15 bp, Homo sapiens
aaaggaagctttgtc

SEQ ID NO: 1906618 - DNA, 15 bp, Homo sapiens
aaggaagctttgtcc

SEQ ID NO: 1906619 - DNA, 15 bp, Homo sapiens
aggaagctttgtcct

SEQ ID NO: 1906620 - DNA, 15 bp, Homo sapiens
ggaagctttgtccta

SEQ ID NO: 1906621 - DNA, 15 bp, Homo sapiens
gaagctttgtcctat

SEQ ID NO: 1906622 - DNA, 15 bp, Homo sapiens
aagctttgtcctatt

SEQ ID NO: 1906623 - DNA, 15 bp, Homo sapiens
agctttgtcctattg

SEQ ID NO: 1906624 - DNA, 15 bp, Homo sapiens
gctttgtcctattgg

SEQ ID NO: 1906625 - DNA, 15 bp, Homo sapiens
ctttgtcctattggc

SEQ ID NO: 1906626 - DNA, 15 bp, Homo sapiens
tttgtcctattggca

SEQ ID NO: 1906627 - DNA, 15 bp, Homo sapiens
ttgtcctattggcaa

SEQ ID NO: 1906628 - DNA, 15 bp, Homo sapiens
tgtcctattggcaaa

SEQ ID NO: 1906629 - DNA, 15 bp, Homo sapiens
gtcctattggcaaaa

SEQ ID NO: 1906630 - DNA, 15 bp, Homo sapiens
tcctattggcaaaaa

SEQ ID NO: 1906631 - DNA, 15 bp, Homo sapiens
cctattggcaaaaag

SEQ ID NO: 1906632 - DNA, 15 bp, Homo sapiens
ctattggcaaaaaga

SEQ ID NO: 1906633 - DNA, 15 bp, Homo sapiens
tattggcaaaaagaa

SEQ ID NO: 1906634 - DNA, 15 bp, Homo sapiens
attggcaaaaagaaa

SEQ ID NO: 1906635 - DNA, 15 bp, Homo sapiens
ttggcaaaaagaaag

SEQ ID NO: 1906636 - DNA, 15 bp, Homo sapiens
tggcaaaaagaaagg

SEQ ID NO: 1906637 - DNA, 15 bp, Homo sapiens
ggcaaaaagaaaggg

SEQ ID NO: 1906638 - DNA, 15 bp, Homo sapiens
gcaaaaagaaagggc

SEQ ID NO: 1906639 - DNA, 15 bp, Homo sapiens
caaaaagaaagggct

SEQ ID NO: 1906640 - DNA, 15 bp, Homo sapiens
aaaaagaaagggctg

SEQ ID NO: 1906641 - DNA, 15 bp, Homo sapiens
aaaagaaagggctga

SEQ ID NO: 1906642 - DNA, 15 bp, Homo sapiens
aaagaaagggctgaa

SEQ ID NO: 1906643 - DNA, 15 bp, Homo sapiens
aagaaagggctgaat

SEQ ID NO: 1906644 - DNA, 15 bp, Homo sapiens
agaaagggctgaatg

SEQ ID NO: 1906645 - DNA, 15 bp, Homo sapiens
gaaagggctgaatga

SEQ ID NO: 1906646 - DNA, 15 bp, Homo sapiens
aaagggctgaatgac

SEQ ID NO: 1906647 - DNA, 15 bp, Homo sapiens
aagggctgaatgact

SEQ ID NO: 1906648 - DNA, 15 bp, Homo sapiens
agggctgaatgactc

SEQ ID NO: 1906649 - DNA, 15 bp, Homo sapiens
gggctgaatgactca

SEQ ID NO: 1906650 - DNA, 15 bp, Homo sapiens
ggctgaatgactcag

SEQ ID NO: 1906651 - DNA, 15 bp, Homo sapiens
gctgaatgactcagt

SEQ ID NO: 1906652 - DNA, 15 bp, Homo sapiens
ctgaatgactcagtt

SEQ ID NO: 1906653 - DNA, 15 bp, Homo sapiens
tgaatgactcagttt

SEQ ID NO: 1906654 - DNA, 15 bp, Homo sapiens
gaatgactcagtttc

SEQ ID NO: 1906655 - DNA, 15 bp, Homo sapiens
aatgactcagtttca

SEQ ID NO: 1906656 - DNA, 15 bp, Homo sapiens
atgactcagtttcag

SEQ ID NO: 1906657 - DNA, 15 bp, Homo sapiens
tgactcagtttcagg

SEQ ID NO: 1906658 - DNA, 15 bp, Homo sapiens
gactcagtttcaggc

SEQ ID NO: 1906659 - DNA, 15 bp, Homo sapiens
actcagtttcaggct

SEQ ID NO: 1906660 - DNA, 15 bp, Homo sapiens
ctcagtttcaggctg

SEQ ID NO: 1906661 - DNA, 15 bp, Homo sapiens
tcagtttcaggctga

SEQ ID NO: 1906662 - DNA, 15 bp, Homo sapiens
cagtttcaggctgag

SEQ ID NO: 1906663 - DNA, 15 bp, Homo sapiens
agtttcaggctgaga

SEQ ID NO: 1906664 - DNA, 15 bp, Homo sapiens
gtttcaggctgagaa

SEQ ID NO: 1906665 - DNA, 15 bp, Homo sapiens
tttcaggctgagaac

SEQ ID NO: 1906666 - DNA, 15 bp, Homo sapiens
ttcaggctgagaaca

SEQ ID NO: 1906667 - DNA, 15 bp, Homo sapiens
tcaggctgagaacac

SEQ ID NO: 1906668 - DNA, 15 bp, Homo sapiens
caggctgagaacact

SEQ ID NO: 1906669 - DNA, 15 bp, Homo sapiens
aggctgagaacactg

SEQ ID NO: 1906670 - DNA, 15 bp, Homo sapiens
ggctgagaacactga

SEQ ID NO: 1906671 - DNA, 15 bp, Homo sapiens
gctgagaacactgag

SEQ ID NO: 1906672 - DNA, 15 bp, Homo sapiens
ctgagaacactgagt

SEQ ID NO: 1906673 - DNA, 15 bp, Homo sapiens
tgagaacactgagtt

SEQ ID NO: 1906674 - DNA, 15 bp, Homo sapiens
gagaacactgagttc

SEQ ID NO: 1906675 - DNA, 15 bp, Homo sapiens
agaacactgagttca

SEQ ID NO: 1906676 - DNA, 15 bp, Homo sapiens
gaacactgagttcag

SEQ ID NO: 1906677 - DNA, 15 bp, Homo sapiens
aacactgagttcagt

SEQ ID NO: 1906678 - DNA, 15 bp, Homo sapiens
acactgagttcagta

SEQ ID NO: 1906679 - DNA, 15 bp, Homo sapiens
cactgagttcagtat

SEQ ID NO: 1906680 - DNA, 15 bp, Homo sapiens
actgagttcagtatg

SEQ ID NO: 1906681 - DNA, 15 bp, Homo sapiens
ctgagttcagtatgc

SEQ ID NO: 1906682 - DNA, 15 bp, Homo sapiens
tgagttcagtatgct

SEQ ID NO: 1906683 - DNA, 15 bp, Homo sapiens
gagttcagtatgctg

SEQ ID NO: 1906684 - DNA, 15 bp, Homo sapiens
agttcagtatgctgg

SEQ ID NO: 1906685 - DNA, 15 bp, Homo sapiens
gttcagtatgctggt

SEQ ID NO: 1906686 - DNA, 15 bp, Homo sapiens
ttcagtatgctggtt

SEQ ID NO: 1906687 - DNA, 15 bp, Homo sapiens
tcagtatgctggttt

SEQ ID NO: 1906688 - DNA, 15 bp, Homo sapiens
cagtatgctggtttc

SEQ ID NO: 1906689 - DNA, 15 bp, Homo sapiens
agtatgctggtttcc

SEQ ID NO: 1906690 - DNA, 15 bp, Homo sapiens
gtatgctggtttcct

SEQ ID NO: 1906691 - DNA, 15 bp, Homo sapiens
tatgctggtttcctt

SEQ ID NO: 1906692 - DNA, 15 bp, Homo sapiens
atgctggtttccttc

SEQ ID NO: 1906693 - DNA, 15 bp, Homo sapiens
tgctggtttccttca

SEQ ID NO: 1906694 - DNA, 15 bp, Homo sapiens
gctggtttccttcag

SEQ ID NO: 1906695 - DNA, 15 bp, Homo sapiens
ctggtttccttcagg

SEQ ID NO: 1906696 - DNA, 15 bp, Homo sapiens
tggtttccttcagga

SEQ ID NO: 1906697 - DNA, 15 bp, Homo sapiens
ggtttccttcaggaa

SEQ ID NO: 1906698 - DNA, 15 bp, Homo sapiens
gtttccttcaggaat

SEQ ID NO: 1906699 - DNA, 15 bp, Homo sapiens
tttccttcaggaata

SEQ ID NO: 1906700 - DNA, 15 bp, Homo sapiens
ttccttcaggaatag

SEQ ID NO: 1906701 - DNA, 15 bp, Homo sapiens
tccttcaggaataga

SEQ ID NO: 1906702 - DNA, 15 bp, Homo sapiens
ccttcaggaatagaa

SEQ ID NO: 1906703 - DNA, 15 bp, Homo sapiens
cttcaggaatagaat

SEQ ID NO: 1906704 - DNA, 15 bp, Homo sapiens
ttcaggaatagaatt

SEQ ID NO: 1906705 - DNA, 15 bp, Homo sapiens
tcaggaatagaattt

SEQ ID NO: 1906706 - DNA, 15 bp, Homo sapiens
caggaatagaatttt

SEQ ID NO: 1906707 - DNA, 15 bp, Homo sapiens
aggaatagaatttta

SEQ ID NO: 1906708 - DNA, 15 bp, Homo sapiens
ggaatagaattttac

SEQ ID NO: 1906709 - DNA, 15 bp, Homo sapiens
gaatagaattttaca

SEQ ID NO: 1906710 - DNA, 15 bp, Homo sapiens
aatagaattttacac

SEQ ID NO: 1906711 - DNA, 15 bp, Homo sapiens
atagaattttacaca

SEQ ID NO: 1906712 - DNA, 15 bp, Homo sapiens
tagaattttacacat

SEQ ID NO: 1906713 - DNA, 15 bp, Homo sapiens
agaattttacacata

SEQ ID NO: 1906714 - DNA, 15 bp, Homo sapiens
gaattttacacatat

SEQ ID NO: 1906715 - DNA, 15 bp, Homo sapiens
aattttacacatatt

SEQ ID NO: 1906716 - DNA, 15 bp, Homo sapiens
attttacacatatta

SEQ ID NO: 1906717 - DNA, 15 bp, Homo sapiens
ttttacacatattat

SEQ ID NO: 1906718 - DNA, 15 bp, Homo sapiens
tttacacatattatg

SEQ ID NO: 1906719 - DNA, 15 bp, Homo sapiens
ttacacatattatga

SEQ ID NO: 1906720 - DNA, 15 bp, Homo sapiens
tacacatattatgag

SEQ ID NO: 1906721 - DNA, 15 bp, Homo sapiens
acacatattatgagt

SEQ ID NO: 1906722 - DNA, 15 bp, Homo sapiens
cacatattatgagtt

SEQ ID NO: 1906723 - DNA, 15 bp, Homo sapiens
acatattatgagttc

SEQ ID NO: 1906724 - DNA, 15 bp, Homo sapiens
catattatgagttca

SEQ ID NO: 1906725 - DNA, 15 bp, Homo sapiens
atattatgagttcag

SEQ ID NO: 1906726 - DNA, 15 bp, Homo sapiens
tattatgagttcaga

SEQ ID NO: 1906727 - DNA, 15 bp, Homo sapiens
attatgagttcagag

SEQ ID NO: 1906728 - DNA, 15 bp, Homo sapiens
ttatgagttcagaga

SEQ ID NO: 1906729 - DNA, 15 bp, Homo sapiens
tatgagttcagagag

SEQ ID NO: 1906730 - DNA, 15 bp, Homo sapiens
atgagttcagagagg

SEQ ID NO: 1906731 - DNA, 15 bp, Homo sapiens
tgagttcagagaggc

SEQ ID NO: 1906732 - DNA, 15 bp, Homo sapiens
gagttcagagaggct

SEQ ID NO: 1906733 - DNA, 15 bp, Homo sapiens
agttcagagaggctg

SEQ ID NO: 1906734 - DNA, 15 bp, Homo sapiens
gttcagagaggctgt

SEQ ID NO: 1906735 - DNA, 15 bp, Homo sapiens
ttcagagaggctgtg

SEQ ID NO: 1906736 - DNA, 15 bp, Homo sapiens
tcagagaggctgtgg

SEQ ID NO: 1906737 - DNA, 15 bp, Homo sapiens
cagagaggctgtgga

SEQ ID NO: 1906738 - DNA, 15 bp, Homo sapiens
agagaggctgtggac

SEQ ID NO: 1906739 - DNA, 15 bp, Homo sapiens
gagaggctgtggaca

SEQ ID NO: 1906740 - DNA, 15 bp, Homo sapiens
agaggctgtggacaa

SEQ ID NO: 1906741 - DNA, 15 bp, Homo sapiens
gaggctgtggacaaa

SEQ ID NO: 1906742 - DNA, 15 bp, Homo sapiens
aggctgtggacaaat

SEQ ID NO: 1906743 - DNA, 15 bp, Homo sapiens
ggctgtggacaaatt

SEQ ID NO: 1906744 - DNA, 15 bp, Homo sapiens
gctgtggacaaattt

SEQ ID NO: 1906745 - DNA, 15 bp, Homo sapiens
ctgtggacaaattta

SEQ ID NO: 1906746 - DNA, 15 bp, Homo sapiens
tgtggacaaatttaa

SEQ ID NO: 1906747 - DNA, 15 bp, Homo sapiens
gtggacaaatttaat

SEQ ID NO: 1906748 - DNA, 15 bp, Homo sapiens
tggacaaatttaatt

SEQ ID NO: 1906749 - DNA, 15 bp, Homo sapiens
ggacaaatttaatta

SEQ ID NO: 1906750 - DNA, 15 bp, Homo sapiens
gacaaatttaattat

SEQ ID NO: 1906751 - DNA, 15 bp, Homo sapiens
acaaatttaattata

SEQ ID NO: 1906752 - DNA, 15 bp, Homo sapiens
caaatttaattatag

SEQ ID NO: 1906753 - DNA, 15 bp, Homo sapiens
aaatttaattatagt

SEQ ID NO: 1906754 - DNA, 15 bp, Homo sapiens
aatttaattatagtt

SEQ ID NO: 1906755 - DNA, 15 bp, Homo sapiens
atttaattatagttc

SEQ ID NO: 1906756 - DNA, 15 bp, Homo sapiens
tttaattatagttca

SEQ ID NO: 1906757 - DNA, 15 bp, Homo sapiens
ttaattatagttcac

SEQ ID NO: 1906758 - DNA, 15 bp, Homo sapiens
taattatagttcacc

SEQ ID NO: 1906759 - DNA, 15 bp, Homo sapiens
aattatagttcaccc

SEQ ID NO: 1906760 - DNA, 15 bp, Homo sapiens
attatagttcaccca

SEQ ID NO: 1906761 - DNA, 15 bp, Homo sapiens
ttatagttcacccaa

SEQ ID NO: 1906762 - DNA, 15 bp, Homo sapiens
tatagttcacccaat

SEQ ID NO: 1906763 - DNA, 15 bp, Homo sapiens
atagttcacccaata

SEQ ID NO: 1906764 - DNA, 15 bp, Homo sapiens
tagttcacccaataa

SEQ ID NO: 1906765 - DNA, 15 bp, Homo sapiens
agttcacccaataac

SEQ ID NO: 1906766 - DNA, 15 bp, Homo sapiens
gttcacccaataacc

SEQ ID NO: 1906767 - DNA, 15 bp, Homo sapiens
ttcacccaataacca

SEQ ID NO: 1906768 - DNA, 15 bp, Homo sapiens
tcacccaataaccac

SEQ ID NO: 1906769 - DNA, 15 bp, Homo sapiens
cacccaataaccacc

SEQ ID NO: 1906770 - DNA, 15 bp, Homo sapiens
acccaataaccacca

SEQ ID NO: 1906771 - DNA, 15 bp, Homo sapiens
cccaataaccaccac

SEQ ID NO: 1906772 - DNA, 15 bp, Homo sapiens
ccaataaccaccaca

SEQ ID NO: 1906773 - DNA, 15 bp, Homo sapiens
caataaccaccacaa

SEQ ID NO: 1906774 - DNA, 15 bp, Homo sapiens
aataaccaccacaat

SEQ ID NO: 1906775 - DNA, 15 bp, Homo sapiens
ataaccaccacaatt

SEQ ID NO: 1906776 - DNA, 15 bp, Homo sapiens
taaccaccacaattg

SEQ ID NO: 1906777 - DNA, 15 bp, Homo sapiens
aaccaccacaattgg

SEQ ID NO: 1906778 - DNA, 15 bp, Homo sapiens
accaccacaattgga

SEQ ID NO: 1906779 - DNA, 15 bp, Homo sapiens
ccaccacaattggat

SEQ ID NO: 1906780 - DNA, 15 bp, Homo sapiens
caccacaattggata

SEQ ID NO: 1906781 - DNA, 15 bp, Homo sapiens
accacaattggatag

SEQ ID NO: 1906782 - DNA, 15 bp, Homo sapiens
ccacaattggataga

SEQ ID NO: 1906783 - DNA, 15 bp, Homo sapiens
cacaattggatagaa

SEQ ID NO: 1906784 - DNA, 15 bp, Homo sapiens
acaattggatagaat

SEQ ID NO: 1906785 - DNA, 15 bp, Homo sapiens
caattggatagaata

SEQ ID NO: 1906786 - DNA, 15 bp, Homo sapiens
aattggatagaatag

SEQ ID NO: 1906787 - DNA, 15 bp, Homo sapiens
attggatagaatagg

SEQ ID NO: 1906788 - DNA, 15 bp, Homo sapiens
ttggatagaataggt

SEQ ID NO: 1906789 - DNA, 15 bp, Homo sapiens
tggatagaataggtc

SEQ ID NO: 1906790 - DNA, 15 bp, Homo sapiens
ggatagaataggtcc

SEQ ID NO: 1906791 - DNA, 15 bp, Homo sapiens
gatagaataggtcca

SEQ ID NO: 1906792 - DNA, 15 bp, Homo sapiens
atagaataggtccag

SEQ ID NO: 1906793 - DNA, 15 bp, Homo sapiens
tagaataggtccagt

SEQ ID NO: 1906794 - DNA, 15 bp, Homo sapiens
agaataggtccagtg

SEQ ID NO: 1906795 - DNA, 15 bp, Homo sapiens
gaataggtccagtga

SEQ ID NO: 1906796 - DNA, 15 bp, Homo sapiens
aataggtccagtgaa

SEQ ID NO: 1906797 - DNA, 15 bp, Homo sapiens
ataggtccagtgaac

SEQ ID NO: 1906798 - DNA, 15 bp, Homo sapiens
taggtccagtgaacc

SEQ ID NO: 1906799 - DNA, 15 bp, Homo sapiens
aggtccagtgaacca

SEQ ID NO: 1906800 - DNA, 15 bp, Homo sapiens
ggtccagtgaaccat

SEQ ID NO: 1906801 - DNA, 15 bp, Homo sapiens
gtccagtgaaccata

SEQ ID NO: 1906802 - DNA, 15 bp, Homo sapiens
tccagtgaaccatat

SEQ ID NO: 1906803 - DNA, 15 bp, Homo sapiens
ccagtgaaccatatt

SEQ ID NO: 1906804 - DNA, 15 bp, Homo sapiens
cagtgaaccatattt

SEQ ID NO: 1906805 - DNA, 15 bp, Homo sapiens
agtgaaccatatttt

SEQ ID NO: 1906806 - DNA, 15 bp, Homo sapiens
gtgaaccatattttc

SEQ ID NO: 1906807 - DNA, 15 bp, Homo sapiens
tgaaccatattttct

SEQ ID NO: 1906808 - DNA, 15 bp, Homo sapiens
gaaccatattttctt

SEQ ID NO: 1906809 - DNA, 15 bp, Homo sapiens
aaccatattttcttg

SEQ ID NO: 1906810 - DNA, 15 bp, Homo sapiens
accatattttcttgg

SEQ ID NO: 1906811 - DNA, 15 bp, Homo sapiens
ccatattttcttggc

SEQ ID NO: 1906812 - DNA, 15 bp, Homo sapiens
catattttcttggcc

SEQ ID NO: 1906813 - DNA, 15 bp, Homo sapiens
atattttcttggcca

SEQ ID NO: 1906814 - DNA, 15 bp, Homo sapiens
tattttcttggccac

SEQ ID NO: 1906815 - DNA, 15 bp, Homo sapiens
attttcttggccaca

SEQ ID NO: 1906816 - DNA, 15 bp, Homo sapiens
ttttcttggccacaa

SEQ ID NO: 1906817 - DNA, 15 bp, Homo sapiens
tttcttggccacaaa

SEQ ID NO: 1906818 - DNA, 15 bp, Homo sapiens
ttcttggccacaaaa

SEQ ID NO: 1906819 - DNA, 15 bp, Homo sapiens
tcttggccacaaaat

SEQ ID NO: 1906820 - DNA, 15 bp, Homo sapiens
cttggccacaaaata

SEQ ID NO: 1906821 - DNA, 15 bp, Homo sapiens
ttggccacaaaatac

SEQ ID NO: 1906822 - DNA, 15 bp, Homo sapiens
tggccacaaaatacc

SEQ ID NO: 1906823 - DNA, 15 bp, Homo sapiens
ggccacaaaatacct

SEQ ID NO: 1906824 - DNA, 15 bp, Homo sapiens
gccacaaaatacctc

SEQ ID NO: 1906825 - DNA, 15 bp, Homo sapiens
ccacaaaatacctcc

SEQ ID NO: 1906826 - DNA, 15 bp, Homo sapiens
cacaaaatacctccc

SEQ ID NO: 1906827 - DNA, 15 bp, Homo sapiens
acaaaatacctccct

SEQ ID NO: 1906828 - DNA, 15 bp, Homo sapiens
caaaatacctccctt

SEQ ID NO: 1906829 - DNA, 15 bp, Homo sapiens
aaaatacctccctta

SEQ ID NO: 1906830 - DNA, 15 bp, Homo sapiens
aaatacctcccttac

SEQ ID NO: 1906831 - DNA, 15 bp, Homo sapiens
aatacctcccttacc

SEQ ID NO: 1906832 - DNA, 15 bp, Homo sapiens
atacctcccttacca

SEQ ID NO: 1906833 - DNA, 15 bp, Homo sapiens
tacctcccttaccaa

SEQ ID NO: 1906834 - DNA, 15 bp, Homo sapiens
acctcccttaccaat

SEQ ID NO: 1906835 - DNA, 15 bp, Homo sapiens
cctcccttaccaatt

SEQ ID NO: 1906836 - DNA, 15 bp, Homo sapiens
ctcccttaccaattt

SEQ ID NO: 1906837 - DNA, 15 bp, Homo sapiens
tcccttaccaatttg

SEQ ID NO: 1906838 - DNA, 15 bp, Homo sapiens
cccttaccaatttgc

SEQ ID NO: 1906839 - DNA, 15 bp, Homo sapiens
ccttaccaatttgcc

SEQ ID NO: 1906840 - DNA, 15 bp, Homo sapiens
cttaccaatttgcca

SEQ ID NO: 1906841 - DNA, 15 bp, Homo sapiens
ttaccaatttgccat

SEQ ID NO: 1906842 - DNA, 15 bp, Homo sapiens
taccaatttgccatg

SEQ ID NO: 1906843 - DNA, 15 bp, Homo sapiens
accaatttgccatga

SEQ ID NO: 1906844 - DNA, 15 bp, Homo sapiens
ccaatttgccatgac

SEQ ID NO: 1906845 - DNA, 15 bp, Homo sapiens
caatttgccatgaca

SEQ ID NO: 1906846 - DNA, 15 bp, Homo sapiens
aatttgccatgacac

SEQ ID NO: 1906847 - DNA, 15 bp, Homo sapiens
atttgccatgacact

SEQ ID NO: 1906848 - DNA, 15 bp, Homo sapiens
tttgccatgacactt

SEQ ID NO: 1906849 - DNA, 15 bp, Homo sapiens
ttgccatgacactta

SEQ ID NO: 1906850 - DNA, 15 bp, Homo sapiens
tgccatgacacttaa

SEQ ID NO: 1906851 - DNA, 15 bp, Homo sapiens
gccatgacacttaaa

SEQ ID NO: 1906852 - DNA, 15 bp, Homo sapiens
ccatgacacttaaaa

SEQ ID NO: 1906853 - DNA, 15 bp, Homo sapiens
catgacacttaaaat

SEQ ID NO: 1906854 - DNA, 15 bp, Homo sapiens
atgacacttaaaatt

SEQ ID NO: 1906855 - DNA, 15 bp, Homo sapiens
tgacacttaaaattt

SEQ ID NO: 1906856 - DNA, 15 bp, Homo sapiens
gacacttaaaatttc

SEQ ID NO: 1906857 - DNA, 15 bp, Homo sapiens
acacttaaaatttcc

SEQ ID NO: 1906858 - DNA, 15 bp, Homo sapiens
cacttaaaatttcca

SEQ ID NO: 1906859 - DNA, 15 bp, Homo sapiens
acttaaaatttccac

SEQ ID NO: 1906860 - DNA, 15 bp, Homo sapiens
cttaaaatttccaca

SEQ ID NO: 1906861 - DNA, 15 bp, Homo sapiens
ttaaaatttccacaa

SEQ ID NO: 1906862 - DNA, 15 bp, Homo sapiens
taaaatttccacaat

SEQ ID NO: 1906863 - DNA, 15 bp, Homo sapiens
aaaatttccacaatt

SEQ ID NO: 1906864 - DNA, 15 bp, Homo sapiens
aaatttccacaatta

SEQ ID NO: 1906865 - DNA, 15 bp, Homo sapiens
aatttccacaattaa

SEQ ID NO: 1906866 - DNA, 15 bp, Homo sapiens
atttccacaattaat

SEQ ID NO: 1906867 - DNA, 15 bp, Homo sapiens
tttccacaattaatc

SEQ ID NO: 1906868 - DNA, 15 bp, Homo sapiens
ttccacaattaatca

SEQ ID NO: 1906869 - DNA, 15 bp, Homo sapiens
tccacaattaatcat

SEQ ID NO: 1906870 - DNA, 15 bp, Homo sapiens
ccacaattaatcatt

SEQ ID NO: 1906871 - DNA, 15 bp, Homo sapiens
cacaattaatcatta

SEQ ID NO: 1906872 - DNA, 15 bp, Homo sapiens
acaattaatcattag

SEQ ID NO: 1906873 - DNA, 15 bp, Homo sapiens
caattaatcattagc

SEQ ID NO: 1906874 - DNA, 15 bp, Homo sapiens
aattaatcattagct

SEQ ID NO: 1906875 - DNA, 15 bp, Homo sapiens
attaatcattagctc

SEQ ID NO: 1906876 - DNA, 15 bp, Homo sapiens
ttaatcattagctcc

SEQ ID NO: 1906877 - DNA, 15 bp, Homo sapiens
taatcattagctccc

SEQ ID NO: 1906878 - DNA, 15 bp, Homo sapiens
aatcattagctcccc

SEQ ID NO: 1906879 - DNA, 15 bp, Homo sapiens
atcattagctcccct

SEQ ID NO: 1906880 - DNA, 15 bp, Homo sapiens
tcattagctcccctt

SEQ ID NO: 1906881 - DNA, 15 bp, Homo sapiens
cattagctccccttt

SEQ ID NO: 1906882 - DNA, 15 bp, Homo sapiens
attagctcccctttg

SEQ ID NO: 1906883 - DNA, 15 bp, Homo sapiens
ttagctcccctttgg

SEQ ID NO: 1906884 - DNA, 15 bp, Homo sapiens
tagctcccctttggg

SEQ ID NO: 1906885 - DNA, 15 bp, Homo sapiens
agctcccctttggga

SEQ ID NO: 1906886 - DNA, 15 bp, Homo sapiens
gctcccctttgggat

SEQ ID NO: 1906887 - DNA, 15 bp, Homo sapiens
ctcccctttgggatg

SEQ ID NO: 1906888 - DNA, 15 bp, Homo sapiens
tcccctttgggatgg

SEQ ID NO: 1906889 - DNA, 15 bp, Homo sapiens
cccctttgggatgga

SEQ ID NO: 1906890 - DNA, 15 bp, Homo sapiens
ccctttgggatggag

SEQ ID NO: 1906891 - DNA, 15 bp, Homo sapiens
cctttgggatggagt

SEQ ID NO: 1906892 - DNA, 15 bp, Homo sapiens
ctttgggatggagta

SEQ ID NO: 1906893 - DNA, 15 bp, Homo sapiens
tttgggatggagtag

SEQ ID NO: 1906894 - DNA, 15 bp, Homo sapiens
ttgggatggagtagt

SEQ ID NO: 1906895 - DNA, 15 bp, Homo sapiens
tgggatggagtagta

SEQ ID NO: 1906896 - DNA, 15 bp, Homo sapiens
gggatggagtagtag

SEQ ID NO: 1906897 - DNA, 15 bp, Homo sapiens
ggatggagtagtagt

SEQ ID NO: 1906898 - DNA, 15 bp, Homo sapiens
gatggagtagtagtt

SEQ ID NO: 1906899 - DNA, 15 bp, Homo sapiens
atggagtagtagttt

SEQ ID NO: 1906900 - DNA, 15 bp, Homo sapiens
tggagtagtagttta

SEQ ID NO: 1906901 - DNA, 15 bp, Homo sapiens
ggagtagtagtttat

SEQ ID NO: 1906902 - DNA, 15 bp, Homo sapiens
gagtagtagtttatc

SEQ ID NO: 1906903 - DNA, 15 bp, Homo sapiens
agtagtagtttatcc

SEQ ID NO: 1906904 - DNA, 15 bp, Homo sapiens
gtagtagtttatcca

SEQ ID NO: 1906905 - DNA, 15 bp, Homo sapiens
tagtagtttatccat

SEQ ID NO: 1906906 - DNA, 15 bp, Homo sapiens
agtagtttatccatt

SEQ ID NO: 1906907 - DNA, 15 bp, Homo sapiens
gtagtttatccattg

SEQ ID NO: 1906908 - DNA, 15 bp, Homo sapiens
tagtttatccattgc

SEQ ID NO: 1906909 - DNA, 15 bp, Homo sapiens
agtttatccattgca

SEQ ID NO: 1906910 - DNA, 15 bp, Homo sapiens
gtttatccattgcat

SEQ ID NO: 1906911 - DNA, 15 bp, Homo sapiens
tttatccattgcatt

SEQ ID NO: 1906912 - DNA, 15 bp, Homo sapiens
ttatccattgcatta

SEQ ID NO: 1906913 - DNA, 15 bp, Homo sapiens
tatccattgcattag

SEQ ID NO: 1906914 - DNA, 15 bp, Homo sapiens
atccattgcattaga

SEQ ID NO: 1906915 - DNA, 15 bp, Homo sapiens
tccattgcattagag

SEQ ID NO: 1906916 - DNA, 15 bp, Homo sapiens
ccattgcattagaga

SEQ ID NO: 1906917 - DNA, 15 bp, Homo sapiens
cattgcattagagat

SEQ ID NO: 1906918 - DNA, 15 bp, Homo sapiens
attgcattagagata

SEQ ID NO: 1906919 - DNA, 15 bp, Homo sapiens
ttgcattagagatag

SEQ ID NO: 1906920 - DNA, 15 bp, Homo sapiens
tgcattagagatagg

SEQ ID NO: 1906921 - DNA, 15 bp, Homo sapiens
gcattagagataggg

SEQ ID NO: 1906922 - DNA, 15 bp, Homo sapiens
cattagagatagggc

SEQ ID NO: 1906923 - DNA, 15 bp, Homo sapiens
attagagatagggct

SEQ ID NO: 1906924 - DNA, 15 bp, Homo sapiens
ttagagatagggctc

SEQ ID NO: 1906925 - DNA, 15 bp, Homo sapiens
tagagatagggctcc

SEQ ID NO: 1906926 - DNA, 15 bp, Homo sapiens
agagatagggctcca

SEQ ID NO: 1906927 - DNA, 15 bp, Homo sapiens
gagatagggctccat

SEQ ID NO: 1906928 - DNA, 15 bp, Homo sapiens
agatagggctccatg

SEQ ID NO: 1906929 - DNA, 15 bp, Homo sapiens
gatagggctccatgg

SEQ ID NO: 1906930 - DNA, 15 bp, Homo sapiens
atagggctccatggg

SEQ ID NO: 1906931 - DNA, 15 bp, Homo sapiens
tagggctccatgggg

SEQ ID NO: 1906932 - DNA, 15 bp, Homo sapiens
agggctccatgggga

SEQ ID NO: 1906933 - DNA, 15 bp, Homo sapiens
gggctccatggggaa

SEQ ID NO: 1906934 - DNA, 15 bp, Homo sapiens
ggctccatggggaaa

SEQ ID NO: 1906935 - DNA, 15 bp, Homo sapiens
gctccatggggaaat

SEQ ID NO: 1906936 - DNA, 15 bp, Homo sapiens
ctccatggggaaatg

SEQ ID NO: 1906937 - DNA, 15 bp, Homo sapiens
tccatggggaaatgg

SEQ ID NO: 1906938 - DNA, 15 bp, Homo sapiens
ccatggggaaatgga

SEQ ID NO: 1906939 - DNA, 15 bp, Homo sapiens
catggggaaatggaa

SEQ ID NO: 1906940 - DNA, 15 bp, Homo sapiens
atggggaaatggaat

SEQ ID NO: 1906941 - DNA, 15 bp, Homo sapiens
tggggaaatggaata

SEQ ID NO: 1906942 - DNA, 15 bp, Homo sapiens
ggggaaatggaatag

SEQ ID NO: 1906943 - DNA, 15 bp, Homo sapiens
gggaaatggaatagg

SEQ ID NO: 1906944 - DNA, 15 bp, Homo sapiens
ggaaatggaataggg

SEQ ID NO: 1906945 - DNA, 15 bp, Homo sapiens
gaaatggaatagggt

SEQ ID NO: 1906946 - DNA, 15 bp, Homo sapiens
aaatggaatagggtg

SEQ ID NO: 1906947 - DNA, 15 bp, Homo sapiens
aatggaatagggtga

SEQ ID NO: 1906948 - DNA, 15 bp, Homo sapiens
atggaatagggtgag

SEQ ID NO: 1906949 - DNA, 15 bp, Homo sapiens
tggaatagggtgagg

SEQ ID NO: 1906950 - DNA, 15 bp, Homo sapiens
ggaatagggtgagga

SEQ ID NO: 1906951 - DNA, 15 bp, Homo sapiens
gaatagggtgaggaa

SEQ ID NO: 1906952 - DNA, 15 bp, Homo sapiens
aatagggtgaggaag

SEQ ID NO: 1906953 - DNA, 15 bp, Homo sapiens
atagggtgaggaaga

SEQ ID NO: 1906954 - DNA, 15 bp, Homo sapiens
tagggtgaggaagaa

SEQ ID NO: 1906955 - DNA, 15 bp, Homo sapiens
agggtgaggaagaaa

SEQ ID NO: 1906956 - DNA, 15 bp, Homo sapiens
gggtgaggaagaaat

SEQ ID NO: 1906957 - DNA, 15 bp, Homo sapiens
ggtgaggaagaaata

SEQ ID NO: 1906958 - DNA, 15 bp, Homo sapiens
gtgaggaagaaataa

SEQ ID NO: 1906959 - DNA, 15 bp, Homo sapiens
tgaggaagaaataag

SEQ ID NO: 1906960 - DNA, 15 bp, Homo sapiens
gaggaagaaataagg

SEQ ID NO: 1906961 - DNA, 15 bp, Homo sapiens
aggaagaaataaggt

SEQ ID NO: 1906962 - DNA, 15 bp, Homo sapiens
ggaagaaataaggta

SEQ ID NO: 1906963 - DNA, 15 bp, Homo sapiens
gaagaaataaggtac

SEQ ID NO: 1906964 - DNA, 15 bp, Homo sapiens
aagaaataaggtaca

SEQ ID NO: 1906965 - DNA, 15 bp, Homo sapiens
agaaataaggtacaa

SEQ ID NO: 1906966 - DNA, 15 bp, Homo sapiens
gaaataaggtacaaa

SEQ ID NO: 1906967 - DNA, 15 bp, Homo sapiens
aaataaggtacaaaa

SEQ ID NO: 1906968 - DNA, 15 bp, Homo sapiens
aataaggtacaaaaa

SEQ ID NO: 1906969 - DNA, 15 bp, Homo sapiens
ataaggtacaaaaac

SEQ ID NO: 1906970 - DNA, 15 bp, Homo sapiens
taaggtacaaaaacg

SEQ ID NO: 1906971 - DNA, 15 bp, Homo sapiens
aaggtacaaaaacgt

SEQ ID NO: 1906972 - DNA, 15 bp, Homo sapiens
aggtacaaaaacgtg

SEQ ID NO: 1906973 - DNA, 15 bp, Homo sapiens
ggtacaaaaacgtgg

SEQ ID NO: 1906974 - DNA, 15 bp, Homo sapiens
gtacaaaaacgtggt

SEQ ID NO: 1906975 - DNA, 15 bp, Homo sapiens
tacaaaaacgtggtt

SEQ ID NO: 1906976 - DNA, 15 bp, Homo sapiens
acaaaaacgtggttg

SEQ ID NO: 1906977 - DNA, 15 bp, Homo sapiens
caaaaacgtggttgg

SEQ ID NO: 1906978 - DNA, 15 bp, Homo sapiens
aaaaacgtggttgga

SEQ ID NO: 1906979 - DNA, 15 bp, Homo sapiens
aaaacgtggttggat

SEQ ID NO: 1906980 - DNA, 15 bp, Homo sapiens
aaacgtggttggatc

SEQ ID NO: 1906981 - DNA, 15 bp, Homo sapiens
aacgtggttggatcc

SEQ ID NO: 1906982 - DNA, 15 bp, Homo sapiens
acgtggttggatcct

SEQ ID NO: 1906983 - DNA, 15 bp, Homo sapiens
cgtggttggatccta

SEQ ID NO: 1906984 - DNA, 15 bp, Homo sapiens
gtggttggatcctaa

SEQ ID NO: 1906985 - DNA, 15 bp, Homo sapiens
tggttggatcctaac

SEQ ID NO: 1906986 - DNA, 15 bp, Homo sapiens
ggttggatcctaaca

SEQ ID NO: 1906987 - DNA, 15 bp, Homo sapiens
gttggatcctaacac

SEQ ID NO: 1906988 - DNA, 15 bp, Homo sapiens
ttggatcctaacacc

SEQ ID NO: 1906989 - DNA, 15 bp, Homo sapiens
tggatcctaacacca

SEQ ID NO: 1906990 - DNA, 15 bp, Homo sapiens
ggatcctaacaccat

SEQ ID NO: 1906991 - DNA, 15 bp, Homo sapiens
gatcctaacaccata

SEQ ID NO: 1906992 - DNA, 15 bp, Homo sapiens
atcctaacaccataa

SEQ ID NO: 1906993 - DNA, 15 bp, Homo sapiens
tcctaacaccataag

SEQ ID NO: 1906994 - DNA, 15 bp, Homo sapiens
cctaacaccataaga

SEQ ID NO: 1906995 - DNA, 15 bp, Homo sapiens
ctaacaccataagaa

SEQ ID NO: 1906996 - DNA, 15 bp, Homo sapiens
taacaccataagaag

SEQ ID NO: 1906997 - DNA, 15 bp, Homo sapiens
aacaccataagaagt

SEQ ID NO: 1906998 - DNA, 15 bp, Homo sapiens
acaccataagaagtt

SEQ ID NO: 1906999 - DNA, 15 bp, Homo sapiens
caccataagaagttt

SEQ ID NO: 1907000 - DNA, 15 bp, Homo sapiens
accataagaagtttt

SEQ ID NO: 1907001 - DNA, 15 bp, Homo sapiens
ccataagaagttttg

SEQ ID NO: 1907002 - DNA, 15 bp, Homo sapiens
cataagaagttttgt

SEQ ID NO: 1907003 - DNA, 15 bp, Homo sapiens
ataagaagttttgtg

SEQ ID NO: 1907004 - DNA, 15 bp, Homo sapiens
taagaagttttgtgc

SEQ ID NO: 1907005 - DNA, 15 bp, Homo sapiens
aagaagttttgtgcc

SEQ ID NO: 1907006 - DNA, 15 bp, Homo sapiens
agaagttttgtgccc

SEQ ID NO: 1907007 - DNA, 15 bp, Homo sapiens
gaagttttgtgccca

SEQ ID NO: 1907008 - DNA, 15 bp, Homo sapiens
aagttttgtgcccaa

SEQ ID NO: 1907009 - DNA, 15 bp, Homo sapiens
agttttgtgcccaag

SEQ ID NO: 1907010 - DNA, 15 bp, Homo sapiens
gttttgtgcccaaga

SEQ ID NO: 1907011 - DNA, 15 bp, Homo sapiens
ttttgtgcccaagat

SEQ ID NO: 1907012 - DNA, 15 bp, Homo sapiens
tttgtgcccaagatg

SEQ ID NO: 1907013 - DNA, 15 bp, Homo sapiens
ttgtgcccaagatgc

SEQ ID NO: 1907014 - DNA, 15 bp, Homo sapiens
tgtgcccaagatgcc

SEQ ID NO: 1907015 - DNA, 15 bp, Homo sapiens
gtgcccaagatgccc

SEQ ID NO: 1907016 - DNA, 15 bp, Homo sapiens
tgcccaagatgccca

SEQ ID NO: 1907017 - DNA, 15 bp, Homo sapiens
gcccaagatgcccaa

SEQ ID NO: 1907018 - DNA, 15 bp, Homo sapiens
cccaagatgcccaac

SEQ ID NO: 1907019 - DNA, 15 bp, Homo sapiens
ccaagatgcccaact

SEQ ID NO: 1907020 - DNA, 15 bp, Homo sapiens
caagatgcccaactc

SEQ ID NO: 1907021 - DNA, 15 bp, Homo sapiens
aagatgcccaactct

SEQ ID NO: 1907022 - DNA, 15 bp, Homo sapiens
agatgcccaactcta

SEQ ID NO: 1907023 - DNA, 15 bp, Homo sapiens
gatgcccaactctag

SEQ ID NO: 1907024 - DNA, 15 bp, Homo sapiens
atgcccaactctaga

SEQ ID NO: 1907025 - DNA, 15 bp, Homo sapiens
tgcccaactctagaa

SEQ ID NO: 1907026 - DNA, 15 bp, Homo sapiens
gcccaactctagaaa

SEQ ID NO: 1907027 - DNA, 15 bp, Homo sapiens
cccaactctagaaat

SEQ ID NO: 1907028 - DNA, 15 bp, Homo sapiens
ccaactctagaaatg

SEQ ID NO: 1907029 - DNA, 15 bp, Homo sapiens
caactctagaaatgc

SEQ ID NO: 1907030 - DNA, 15 bp, Homo sapiens
aactctagaaatgca

SEQ ID NO: 1907031 - DNA, 15 bp, Homo sapiens
actctagaaatgcag

SEQ ID NO: 1907032 - DNA, 15 bp, Homo sapiens
ctctagaaatgcagc

SEQ ID NO: 1907033 - DNA, 15 bp, Homo sapiens
tctagaaatgcagcc

SEQ ID NO: 1907034 - DNA, 15 bp, Homo sapiens
ctagaaatgcagccc

SEQ ID NO: 1907035 - DNA, 15 bp, Homo sapiens
tagaaatgcagccca

SEQ ID NO: 1907036 - DNA, 15 bp, Homo sapiens
agaaatgcagcccat

SEQ ID NO: 1907037 - DNA, 15 bp, Homo sapiens
gaaatgcagcccata

SEQ ID NO: 1907038 - DNA, 15 bp, Homo sapiens
aaatgcagcccatag

SEQ ID NO: 1907039 - DNA, 15 bp, Homo sapiens
aatgcagcccataga

SEQ ID NO: 1907040 - DNA, 15 bp, Homo sapiens
atgcagcccatagaa

SEQ ID NO: 1907041 - DNA, 15 bp, Homo sapiens
tgcagcccatagaaa

SEQ ID NO: 1907042 - DNA, 15 bp, Homo sapiens
gcagcccatagaaat

SEQ ID NO: 1907043 - DNA, 15 bp, Homo sapiens
cagcccatagaaatc

SEQ ID NO: 1907044 - DNA, 15 bp, Homo sapiens
agcccatagaaatca

SEQ ID NO: 1907045 - DNA, 15 bp, Homo sapiens
gcccatagaaatcat

SEQ ID NO: 1907046 - DNA, 15 bp, Homo sapiens
cccatagaaatcatt

SEQ ID NO: 1907047 - DNA, 15 bp, Homo sapiens
ccatagaaatcatta

SEQ ID NO: 1907048 - DNA, 15 bp, Homo sapiens
catagaaatcattaa

SEQ ID NO: 1907049 - DNA, 15 bp, Homo sapiens
atagaaatcattaac

SEQ ID NO: 1907050 - DNA, 15 bp, Homo sapiens
tagaaatcattaaca

SEQ ID NO: 1907051 - DNA, 15 bp, Homo sapiens
agaaatcattaacaa

SEQ ID NO: 1907052 - DNA, 15 bp, Homo sapiens
gaaatcattaacaag

SEQ ID NO: 1907053 - DNA, 15 bp, Homo sapiens
aaatcattaacaagg

SEQ ID NO: 1907054 - DNA, 15 bp, Homo sapiens
aatcattaacaagga

SEQ ID NO: 1907055 - DNA, 15 bp, Homo sapiens
atcattaacaaggat

SEQ ID NO: 1907056 - DNA, 15 bp, Homo sapiens
tcattaacaaggatc

SEQ ID NO: 1907057 - DNA, 15 bp, Homo sapiens
cattaacaaggatca

SEQ ID NO: 1907058 - DNA, 15 bp, Homo sapiens
attaacaaggatcag

SEQ ID NO: 1907059 - DNA, 15 bp, Homo sapiens
ttaacaaggatcagt

SEQ ID NO: 1907060 - DNA, 15 bp, Homo sapiens
taacaaggatcagtg

SEQ ID NO: 1907061 - DNA, 15 bp, Homo sapiens
aacaaggatcagtgg

SEQ ID NO: 1907062 - DNA, 15 bp, Homo sapiens
acaaggatcagtgga

SEQ ID NO: 1907063 - DNA, 15 bp, Homo sapiens
caaggatcagtggag

SEQ ID NO: 1907064 - DNA, 15 bp, Homo sapiens
aaggatcagtggagg

SEQ ID NO: 1907065 - DNA, 15 bp, Homo sapiens
aggatcagtggagga

SEQ ID NO: 1907066 - DNA, 15 bp, Homo sapiens
ggatcagtggaggac

SEQ ID NO: 1907067 - DNA, 15 bp, Homo sapiens
gatcagtggaggact

SEQ ID NO: 1907068 - DNA, 15 bp, Homo sapiens
atcagtggaggactt

SEQ ID NO: 1907069 - DNA, 15 bp, Homo sapiens
tcagtggaggacttt

SEQ ID NO: 1907070 - DNA, 15 bp, Homo sapiens
cagtggaggactttc

SEQ ID NO: 1907071 - DNA, 15 bp, Homo sapiens
agtggaggactttca

SEQ ID NO: 1907072 - DNA, 15 bp, Homo sapiens
gtggaggactttcat

SEQ ID NO: 1907073 - DNA, 15 bp, Homo sapiens
tggaggactttcatt

SEQ ID NO: 1907074 - DNA, 15 bp, Homo sapiens
ggaggactttcattt

SEQ ID NO: 1907075 - DNA, 15 bp, Homo sapiens
gaggactttcatttc

SEQ ID NO: 1907076 - DNA, 15 bp, Homo sapiens
aggactttcatttcg

SEQ ID NO: 1907077 - DNA, 15 bp, Homo sapiens
ggactttcatttcgc

SEQ ID NO: 1907078 - DNA, 15 bp, Homo sapiens
gactttcatttcgcc

SEQ ID NO: 1907079 - DNA, 15 bp, Homo sapiens
actttcatttcgcct

SEQ ID NO: 1907080 - DNA, 15 bp, Homo sapiens
ctttcatttcgcctt

SEQ ID NO: 1907081 - DNA, 15 bp, Homo sapiens
tttcatttcgccttc

SEQ ID NO: 1907082 - DNA, 15 bp, Homo sapiens
ttcatttcgccttcc

SEQ ID NO: 1907083 - DNA, 15 bp, Homo sapiens
tcatttcgccttccc

SEQ ID NO: 1907084 - DNA, 15 bp, Homo sapiens
catttcgccttccca

SEQ ID NO: 1907085 - DNA, 15 bp, Homo sapiens
atttcgccttcccat

SEQ ID NO: 1907086 - DNA, 15 bp, Homo sapiens
tttcgccttcccatt

SEQ ID NO: 1907087 - DNA, 15 bp, Homo sapiens
ttcgccttcccattt

SEQ ID NO: 1907088 - DNA, 15 bp, Homo sapiens
tcgccttcccatttg

SEQ ID NO: 1907089 - DNA, 15 bp, Homo sapiens
cgccttcccatttga

SEQ ID NO: 1907090 - DNA, 15 bp, Homo sapiens
gccttcccatttgat

SEQ ID NO: 1907091 - DNA, 15 bp, Homo sapiens
ccttcccatttgatg

SEQ ID NO: 1907092 - DNA, 15 bp, Homo sapiens
cttcccatttgatgc

SEQ ID NO: 1907093 - DNA, 15 bp, Homo sapiens
ttcccatttgatgct

SEQ ID NO: 1907094 - DNA, 15 bp, Homo sapiens
tcccatttgatgctt

SEQ ID NO: 1907095 - DNA, 15 bp, Homo sapiens
cccatttgatgctta

SEQ ID NO: 1907096 - DNA, 15 bp, Homo sapiens
ccatttgatgcttaa

SEQ ID NO: 1907097 - DNA, 15 bp, Homo sapiens
catttgatgcttaat

SEQ ID NO: 1907098 - DNA, 15 bp, Homo sapiens
atttgatgcttaatc

SEQ ID NO: 1907099 - DNA, 15 bp, Homo sapiens
tttgatgcttaatct

SEQ ID NO: 1907100 - DNA, 15 bp, Homo sapiens
ttgatgcttaatctt

SEQ ID NO: 1907101 - DNA, 15 bp, Homo sapiens
tgatgcttaatcttt

SEQ ID NO: 1907102 - DNA, 15 bp, Homo sapiens
gatgcttaatctttc

SEQ ID NO: 1907103 - DNA, 15 bp, Homo sapiens
atgcttaatctttcc

SEQ ID NO: 1907104 - DNA, 15 bp, Homo sapiens
tgcttaatctttcca

SEQ ID NO: 1907105 - DNA, 15 bp, Homo sapiens
gcttaatctttccac

SEQ ID NO: 1907106 - DNA, 15 bp, Homo sapiens
cttaatctttccacc

SEQ ID NO: 1907107 - DNA, 15 bp, Homo sapiens
ttaatctttccaccc

SEQ ID NO: 1907108 - DNA, 15 bp, Homo sapiens
taatctttccaccct

SEQ ID NO: 1907109 - DNA, 15 bp, Homo sapiens
aatctttccaccctc

SEQ ID NO: 1907110 - DNA, 15 bp, Homo sapiens
atctttccaccctcg

SEQ ID NO: 1907111 - DNA, 15 bp, Homo sapiens
tctttccaccctcga

SEQ ID NO: 1907112 - DNA, 15 bp, Homo sapiens
ctttccaccctcgac

SEQ ID NO: 1907113 - DNA, 15 bp, Homo sapiens
tttccaccctcgact

SEQ ID NO: 1907114 - DNA, 15 bp, Homo sapiens
ttccaccctcgactt

SEQ ID NO: 1907115 - DNA, 15 bp, Homo sapiens
tccaccctcgacttt

SEQ ID NO: 1907116 - DNA, 15 bp, Homo sapiens
ccaccctcgacttta

SEQ ID NO: 1907117 - DNA, 15 bp, Homo sapiens
caccctcgactttac

SEQ ID NO: 1907118 - DNA, 15 bp, Homo sapiens
accctcgactttact

SEQ ID NO: 1907119 - DNA, 15 bp, Homo sapiens
ccctcgactttacta

SEQ ID NO: 1907120 - DNA, 15 bp, Homo sapiens
cctcgactttactag

SEQ ID NO: 1907121 - DNA, 15 bp, Homo sapiens
ctcgactttactaga

SEQ ID NO: 1907122 - DNA, 15 bp, Homo sapiens
tcgactttactagat

SEQ ID NO: 1907123 - DNA, 15 bp, Homo sapiens
cgactttactagatt

SEQ ID NO: 1907124 - DNA, 15 bp, Homo sapiens
gactttactagattt

SEQ ID NO: 1907125 - DNA, 15 bp, Homo sapiens
actttactagatttg

SEQ ID NO: 1907126 - DNA, 15 bp, Homo sapiens
ctttactagatttgc

SEQ ID NO: 1907127 - DNA, 15 bp, Homo sapiens
tttactagatttgcc

SEQ ID NO: 1907128 - DNA, 15 bp, Homo sapiens
ttactagatttgcca

SEQ ID NO: 1907129 - DNA, 15 bp, Homo sapiens
tactagatttgccat

SEQ ID NO: 1907130 - DNA, 15 bp, Homo sapiens
actagatttgccatg

SEQ ID NO: 1907131 - DNA, 15 bp, Homo sapiens
ctagatttgccatga

SEQ ID NO: 1907132 - DNA, 15 bp, Homo sapiens
tagatttgccatgag

SEQ ID NO: 1907133 - DNA, 15 bp, Homo sapiens
agatttgccatgagc

SEQ ID NO: 1907134 - DNA, 15 bp, Homo sapiens
gatttgccatgagca

SEQ ID NO: 1907135 - DNA, 15 bp, Homo sapiens
atttgccatgagcat

SEQ ID NO: 1907136 - DNA, 15 bp, Homo sapiens
tttgccatgagcatt

SEQ ID NO: 1907137 - DNA, 15 bp, Homo sapiens
ttgccatgagcatta

SEQ ID NO: 1907138 - DNA, 15 bp, Homo sapiens
tgccatgagcattac

SEQ ID NO: 1907139 - DNA, 15 bp, Homo sapiens
gccatgagcattacc

SEQ ID NO: 1907140 - DNA, 15 bp, Homo sapiens
ccatgagcattaccg

SEQ ID NO: 1907141 - DNA, 15 bp, Homo sapiens
catgagcattaccga

SEQ ID NO: 1907142 - DNA, 15 bp, Homo sapiens
atgagcattaccgaa

SEQ ID NO: 1907143 - DNA, 15 bp, Homo sapiens
tgagcattaccgaat

SEQ ID NO: 1907144 - DNA, 15 bp, Homo sapiens
gagcattaccgaata

SEQ ID NO: 1907145 - DNA, 15 bp, Homo sapiens
agcattaccgaatat

SEQ ID NO: 1907146 - DNA, 15 bp, Homo sapiens
gcattaccgaatatt

SEQ ID NO: 1907147 - DNA, 15 bp, Homo sapiens
cattaccgaatattc

SEQ ID NO: 1907148 - DNA, 15 bp, Homo sapiens
attaccgaatattca

SEQ ID NO: 1907149 - DNA, 15 bp, Homo sapiens
ttaccgaatattcat

SEQ ID NO: 1907150 - DNA, 15 bp, Homo sapiens
taccgaatattcatt

SEQ ID NO: 1907151 - DNA, 15 bp, Homo sapiens
accgaatattcattt

SEQ ID NO: 1907152 - DNA, 15 bp, Homo sapiens
ccgaatattcattta

SEQ ID NO: 1907153 - DNA, 15 bp, Homo sapiens
cgaatattcatttac

SEQ ID NO: 1907154 - DNA, 15 bp, Homo sapiens
gaatattcatttacg

SEQ ID NO: 1907155 - DNA, 15 bp, Homo sapiens
aatattcatttacga

SEQ ID NO: 1907156 - DNA, 15 bp, Homo sapiens
atattcatttacgag

SEQ ID NO: 1907157 - DNA, 15 bp, Homo sapiens
tattcatttacgagt

SEQ ID NO: 1907158 - DNA, 15 bp, Homo sapiens
attcatttacgagtt

SEQ ID NO: 1907159 - DNA, 15 bp, Homo sapiens
ttcatttacgagtta

SEQ ID NO: 1907160 - DNA, 15 bp, Homo sapiens
tcatttacgagttaa

SEQ ID NO: 1907161 - DNA, 15 bp, Homo sapiens
catttacgagttaat

SEQ ID NO: 1907162 - DNA, 15 bp, Homo sapiens
atttacgagttaatg

SEQ ID NO: 1907163 - DNA, 15 bp, Homo sapiens
tttacgagttaatgg

SEQ ID NO: 1907164 - DNA, 15 bp, Homo sapiens
ttacgagttaatggg

SEQ ID NO: 1907165 - DNA, 15 bp, Homo sapiens
tacgagttaatgggt

SEQ ID NO: 1907166 - DNA, 15 bp, Homo sapiens
acgagttaatgggtg

SEQ ID NO: 1907167 - DNA, 15 bp, Homo sapiens
cgagttaatgggtgc

SEQ ID NO: 1907168 - DNA, 15 bp, Homo sapiens
gagttaatgggtgca

SEQ ID NO: 1907169 - DNA, 15 bp, Homo sapiens
caaacctgcacgttg

SEQ ID NO: 1907170 - DNA, 15 bp, Homo sapiens
aaacctgcacgttgt

SEQ ID NO: 1907171 - DNA, 15 bp, Homo sapiens
aacctgcacgttgtg

SEQ ID NO: 1907172 - DNA, 15 bp, Homo sapiens
acctgcacgttgtgc

SEQ ID NO: 1907173 - DNA, 15 bp, Homo sapiens
cctgcacgttgtgca

SEQ ID NO: 1907174 - DNA, 15 bp, Homo sapiens
ctgcacgttgtgcac

SEQ ID NO: 1907175 - DNA, 15 bp, Homo sapiens
tgcacgttgtgcaca

SEQ ID NO: 1907176 - DNA, 15 bp, Homo sapiens
gcacgttgtgcacat

SEQ ID NO: 1907177 - DNA, 15 bp, Homo sapiens
cacgttgtgcacatg

SEQ ID NO: 1907178 - DNA, 15 bp, Homo sapiens
acgttgtgcacatgt

SEQ ID NO: 1907179 - DNA, 15 bp, Homo sapiens
cgttgtgcacatgta

SEQ ID NO: 1907180 - DNA, 15 bp, Homo sapiens
gttgtgcacatgtac

SEQ ID NO: 1907181 - DNA, 15 bp, Homo sapiens
atgtaccctaaaact

SEQ ID NO: 1907182 - DNA, 15 bp, Homo sapiens
tgtaccctaaaactt

SEQ ID NO: 1907183 - DNA, 15 bp, Homo sapiens
gtaccctaaaactta

SEQ ID NO: 1907184 - DNA, 15 bp, Homo sapiens
taccctaaaacttaa

SEQ ID NO: 1907185 - DNA, 15 bp, Homo sapiens
accctaaaacttaaa

SEQ ID NO: 1907186 - DNA, 15 bp, Homo sapiens
ccctaaaacttaaag

SEQ ID NO: 1907187 - DNA, 15 bp, Homo sapiens
cctaaaacttaaagt

SEQ ID NO: 1907188 - DNA, 15 bp, Homo sapiens
ctaaaacttaaagta

SEQ ID NO: 1907189 - DNA, 15 bp, Homo sapiens
taaaacttaaagtat

SEQ ID NO: 1907190 - DNA, 15 bp, Homo sapiens
aaaacttaaagtata

SEQ ID NO: 1907191 - DNA, 15 bp, Homo sapiens
aaacttaaagtataa

SEQ ID NO: 1907192 - DNA, 15 bp, Homo sapiens
acttaaagtataata

SEQ ID NO: 1907193 - DNA, 15 bp, Homo sapiens
cttaaagtataataa

SEQ ID NO: 1907194 - DNA, 15 bp, Homo sapiens
ttaaagtataataat

SEQ ID NO: 1907195 - DNA, 15 bp, Homo sapiens
taaagtataataata

SEQ ID NO: 1907196 - DNA, 15 bp, Homo sapiens
aaagtataataataa

SEQ ID NO: 1907197 - DNA, 15 bp, Homo sapiens
aagtataataataaa

SEQ ID NO: 1907198 - DNA, 15 bp, Homo sapiens
agtataataataaag

SEQ ID NO: 1907199 - DNA, 15 bp, Homo sapiens
gtataataataaagt

SEQ ID NO: 1907200 - DNA, 15 bp, Homo sapiens
ataataataaagtaa

SEQ ID NO: 1907201 - DNA, 15 bp, Homo sapiens
taataataaagtaaa

SEQ ID NO: 1907202 - DNA, 15 bp, Homo sapiens
aataataaagtaaaa

SEQ ID NO: 1907203 - DNA, 15 bp, Homo sapiens
ataataaagtaaaaa

SEQ ID NO: 1907204 - DNA, 15 bp, Homo sapiens
taataaagtaaaaaa

SEQ ID NO: 1907205 - DNA, 15 bp, Homo sapiens
aataaagtaaaaaaa

SEQ ID NO: 1907206 - DNA, 15 bp, Homo sapiens
ataaagtaaaaaaac

SEQ ID NO: 1907207 - DNA, 15 bp, Homo sapiens
taaagtaaaaaaact

SEQ ID NO: 1907208 - DNA, 15 bp, Homo sapiens
aaagtaaaaaaacta

SEQ ID NO: 1907209 - DNA, 15 bp, Homo sapiens
aagtaaaaaaactaa

SEQ ID NO: 1907210 - DNA, 15 bp, Homo sapiens
agtaaaaaaactaaa

SEQ ID NO: 1907211 - DNA, 15 bp, Homo sapiens
gtaaaaaaactaaaa

SEQ ID NO: 1907212 - DNA, 15 bp, Homo sapiens
aaaaaactaaaaaaa

SEQ ID NO: 1907213 - DNA, 15 bp, Homo sapiens
aaaaactaaaaaaag

SEQ ID NO: 1907214 - DNA, 15 bp, Homo sapiens
aaaactaaaaaaagt

SEQ ID NO: 1907215 - DNA, 15 bp, Homo sapiens
aaactaaaaaaagta

SEQ ID NO: 1907216 - DNA, 15 bp, Homo sapiens
aactaaaaaaagtat

SEQ ID NO: 1907217 - DNA, 15 bp, Homo sapiens
actaaaaaaagtatt

SEQ ID NO: 1907218 - DNA, 15 bp, Homo sapiens
ctaaaaaaagtatta

SEQ ID NO: 1907219 - DNA, 15 bp, Homo sapiens
taaaaaaagtattaa

SEQ ID NO: 1907220 - DNA, 15 bp, Homo sapiens
aaaaaaagtattaac

SEQ ID NO: 1907221 - DNA, 15 bp, Homo sapiens
aaaaaagtattaact

SEQ ID NO: 1907222 - DNA, 15 bp, Homo sapiens
aaaaagtattaactg

SEQ ID NO: 1907223 - DNA, 15 bp, Homo sapiens
aaaagtattaactgg

SEQ ID NO: 1907224 - DNA, 15 bp, Homo sapiens
aaagtattaactggg

SEQ ID NO: 1907225 - DNA, 15 bp, Homo sapiens
aagtattaactgggt

SEQ ID NO: 1907226 - DNA, 15 bp, Homo sapiens
agtattaactgggtg

SEQ ID NO: 1907227 - DNA, 15 bp, Homo sapiens
gtattaactgggtgg

SEQ ID NO: 1907228 - DNA, 15 bp, Homo sapiens
tattaactgggtggt

SEQ ID NO: 1907229 - DNA, 15 bp, Homo sapiens
attaactgggtggtg

SEQ ID NO: 1907230 - DNA, 15 bp, Homo sapiens
ttaactgggtggtgt

SEQ ID NO: 1907231 - DNA, 15 bp, Homo sapiens
taactgggtggtgtc

SEQ ID NO: 1907232 - DNA, 15 bp, Homo sapiens
aactgggtggtgtct

SEQ ID NO: 1907233 - DNA, 15 bp, Homo sapiens
actgggtggtgtctc

SEQ ID NO: 1907234 - DNA, 15 bp, Homo sapiens
ctgggtggtgtctca

SEQ ID NO: 1907235 - DNA, 15 bp, Homo sapiens
tgggtggtgtctcat

SEQ ID NO: 1907236 - DNA, 15 bp, Homo sapiens
gggtggtgtctcatg

SEQ ID NO: 1907237 - DNA, 15 bp, Homo sapiens
ggtggtgtctcatgt

SEQ ID NO: 1907238 - DNA, 15 bp, Homo sapiens
gtggtgtctcatgta

SEQ ID NO: 1907239 - DNA, 15 bp, Homo sapiens
tggtgtctcatgtaa

SEQ ID NO: 1907240 - DNA, 15 bp, Homo sapiens
ggtgtctcatgtaat

SEQ ID NO: 1907241 - DNA, 15 bp, Homo sapiens
gtgtctcatgtaata

SEQ ID NO: 1907242 - DNA, 15 bp, Homo sapiens
tgtctcatgtaatat

SEQ ID NO: 1907243 - DNA, 15 bp, Homo sapiens
gtctcatgtaatatg

SEQ ID NO: 1907244 - DNA, 15 bp, Homo sapiens
tctcatgtaatatga

SEQ ID NO: 1907245 - DNA, 15 bp, Homo sapiens
ctcatgtaatatgac

SEQ ID NO: 1907246 - DNA, 15 bp, Homo sapiens
tcatgtaatatgact

SEQ ID NO: 1907247 - DNA, 15 bp, Homo sapiens
catgtaatatgactc

SEQ ID NO: 1907248 - DNA, 15 bp, Homo sapiens
atgtaatatgactca

SEQ ID NO: 1907249 - DNA, 15 bp, Homo sapiens
tgtaatatgactcac

SEQ ID NO: 1907250 - DNA, 15 bp, Homo sapiens
gtaatatgactcacc

SEQ ID NO: 1907251 - DNA, 15 bp, Homo sapiens
taatatgactcacct

SEQ ID NO: 1907252 - DNA, 15 bp, Homo sapiens
aatatgactcaccta

SEQ ID NO: 1907253 - DNA, 15 bp, Homo sapiens
atatgactcacctaa

SEQ ID NO: 1907254 - DNA, 15 bp, Homo sapiens
tatgactcacctaaa

SEQ ID NO: 1907255 - DNA, 15 bp, Homo sapiens
atgactcacctaaag

SEQ ID NO: 1907256 - DNA, 15 bp, Homo sapiens
tgactcacctaaagc

SEQ ID NO: 1907257 - DNA, 15 bp, Homo sapiens
gactcacctaaagcc

SEQ ID NO: 1907258 - DNA, 15 bp, Homo sapiens
actcacctaaagcca

SEQ ID NO: 1907259 - DNA, 15 bp, Homo sapiens
ctcacctaaagccaa

SEQ ID NO: 1907260 - DNA, 15 bp, Homo sapiens
tcacctaaagccaaa

SEQ ID NO: 1907261 - DNA, 15 bp, Homo sapiens
cacctaaagccaaaa

SEQ ID NO: 1907262 - DNA, 15 bp, Homo sapiens
acctaaagccaaaaa

SEQ ID NO: 1907263 - DNA, 15 bp, Homo sapiens
cctaaagccaaaaaa

SEQ ID NO: 1907264 - DNA, 15 bp, Homo sapiens
ctaaagccaaaaaat

SEQ ID NO: 1907265 - DNA, 15 bp, Homo sapiens
taaagccaaaaaata

SEQ ID NO: 1907266 - DNA, 15 bp, Homo sapiens
aaagccaaaaaataa

SEQ ID NO: 1907267 - DNA, 15 bp, Homo sapiens
aagccaaaaaataaa

SEQ ID NO: 1907268 - DNA, 15 bp, Homo sapiens
agccaaaaaataaaa

SEQ ID NO: 1907269 - DNA, 15 bp, Homo sapiens
gccaaaaaataaaaa

SEQ ID NO: 1907270 - DNA, 15 bp, Homo sapiens
ccaaaaaataaaaaa

SEQ ID NO: 1907271 - DNA, 15 bp, Homo sapiens
caaaaaataaaaaaa

SEQ ID NO: 1907272 - DNA, 15 bp, Homo sapiens
aaaaataaaaaaacc

SEQ ID NO: 1907273 - DNA, 15 bp, Homo sapiens
aaaataaaaaaacct

SEQ ID NO: 1907274 - DNA, 15 bp, Homo sapiens
aaataaaaaaaccta

SEQ ID NO: 1907275 - DNA, 15 bp, Homo sapiens
aataaaaaaacctac

SEQ ID NO: 1907276 - DNA, 15 bp, Homo sapiens
ataaaaaaacctact

SEQ ID NO: 1907277 - DNA, 15 bp, Homo sapiens
taaaaaaacctactt

SEQ ID NO: 1907278 - DNA, 15 bp, Homo sapiens
aaaaaaacctacttg

SEQ ID NO: 1907279 - DNA, 15 bp, Homo sapiens
aaaaaacctacttgc

SEQ ID NO: 1907280 - DNA, 15 bp, Homo sapiens
aaaaacctacttgca

SEQ ID NO: 1907281 - DNA, 15 bp, Homo sapiens
aaaacctacttgcaa

SEQ ID NO: 1907282 - DNA, 15 bp, Homo sapiens
aaacctacttgcaat

SEQ ID NO: 1907283 - DNA, 15 bp, Homo sapiens
aacctacttgcaatt

SEQ ID NO: 1907284 - DNA, 15 bp, Homo sapiens
acctacttgcaattt

SEQ ID NO: 1907285 - DNA, 15 bp, Homo sapiens
cctacttgcaatttt

SEQ ID NO: 1907286 - DNA, 15 bp, Homo sapiens
ctacttgcaattttt

SEQ ID NO: 1907287 - DNA, 15 bp, Homo sapiens
tacttgcaatttttc

SEQ ID NO: 1907288 - DNA, 15 bp, Homo sapiens
acttgcaatttttca

SEQ ID NO: 1907289 - DNA, 15 bp, Homo sapiens
cttgcaatttttcaa

SEQ ID NO: 1907290 - DNA, 15 bp, Homo sapiens
ttgcaatttttcaaa

SEQ ID NO: 1907291 - DNA, 15 bp, Homo sapiens
tgcaatttttcaaaa

SEQ ID NO: 1907292 - DNA, 15 bp, Homo sapiens
gcaatttttcaaaaa

SEQ ID NO: 1907293 - DNA, 15 bp, Homo sapiens
caatttttcaaaaaa

SEQ ID NO: 1907294 - DNA, 15 bp, Homo sapiens
aatttttcaaaaaaa

SEQ ID NO: 1907295 - DNA, 15 bp, Homo sapiens
atttttcaaaaaaaa

SEQ ID NO: 1907296 - DNA, 15 bp, Homo sapiens
tttttcaaaaaaaaa

SEQ ID NO: 1907297 - DNA, 15 bp, Homo sapiens
ttttcaaaaaaaaaa

SEQ ID NO: 1907298 - DNA, 15 bp, Homo sapiens
ttcaaaaaaaaaaag

SEQ ID NO: 1907299 - DNA, 15 bp, Homo sapiens
caaaaaaaaaaagaa

SEQ ID NO: 1907300 - DNA, 15 bp, Homo sapiens
aaaaaaaagaaataa

SEQ ID NO: 1907301 - DNA, 15 bp, Homo sapiens
aaaaaaagaaataaa

SEQ ID NO: 1907302 - DNA, 15 bp, Homo sapiens
aaaaaagaaataaat

SEQ ID NO: 1907303 - DNA, 15 bp, Homo sapiens
aaaaagaaataaata

SEQ ID NO: 1907304 - DNA, 15 bp, Homo sapiens
aaaagaaataaataa

SEQ ID NO: 1907305 - DNA, 15 bp, Homo sapiens
aaagaaataaataaa

SEQ ID NO: 1907306 - DNA, 15 bp, Homo sapiens
aagaaataaataaac

SEQ ID NO: 1907307 - DNA, 15 bp, Homo sapiens
agaaataaataaaca

SEQ ID NO: 1907308 - DNA, 15 bp, Homo sapiens
gaaataaataaacaa

SEQ ID NO: 1907309 - DNA, 15 bp, Homo sapiens
aataaataaacaaaa

SEQ ID NO: 1907310 - DNA, 15 bp, Homo sapiens
ataaataaacaaaat

SEQ ID NO: 1907311 - DNA, 15 bp, Homo sapiens
taaataaacaaaatg

SEQ ID NO: 1907312 - DNA, 15 bp, Homo sapiens
aaataaacaaaatgt

SEQ ID NO: 1907313 - DNA, 15 bp, Homo sapiens
aataaacaaaatgta

SEQ ID NO: 1907314 - DNA, 15 bp, Homo sapiens
ataaacaaaatgtaa

SEQ ID NO: 1907315 - DNA, 15 bp, Homo sapiens
taaacaaaatgtaaa

SEQ ID NO: 1907316 - DNA, 15 bp, Homo sapiens
aaacaaaatgtaaaa

SEQ ID NO: 1907317 - DNA, 15 bp, Homo sapiens
aacaaaatgtaaaat

SEQ ID NO: 1907318 - DNA, 15 bp, Homo sapiens
acaaaatgtaaaata

SEQ ID NO: 1907319 - DNA, 15 bp, Homo sapiens
caaaatgtaaaatat

SEQ ID NO: 1907320 - DNA, 15 bp, Homo sapiens
aaatgtaaaatataa

SEQ ID NO: 1907321 - DNA, 15 bp, Homo sapiens
aatgtaaaatataaa

SEQ ID NO: 1907322 - DNA, 15 bp, Homo sapiens
atgtaaaatataaat

SEQ ID NO: 1907323 - DNA, 15 bp, Homo sapiens
tgtaaaatataaatt

SEQ ID NO: 1907324 - DNA, 15 bp, Homo sapiens
gtaaaatataaatta

SEQ ID NO: 1907325 - DNA, 15 bp, Homo sapiens
taaaatataaattac

SEQ ID NO: 1907326 - DNA, 15 bp, Homo sapiens
aaaatataaattaca

SEQ ID NO: 1907327 - DNA, 15 bp, Homo sapiens
aatataaattacatt

SEQ ID NO: 1907328 - DNA, 15 bp, Homo sapiens
atataaattacattt

SEQ ID NO: 1907329 - DNA, 15 bp, Homo sapiens
tataaattacattta

SEQ ID NO: 1907330 - DNA, 15 bp, Homo sapiens
ataaattacatttaa

SEQ ID NO: 1907331 - DNA, 15 bp, Homo sapiens
taaattacatttaac

SEQ ID NO: 1907332 - DNA, 15 bp, Homo sapiens
aaattacatttaacc

SEQ ID NO: 1907333 - DNA, 15 bp, Homo sapiens
aattacatttaacca

SEQ ID NO: 1907334 - DNA, 15 bp, Homo sapiens
attacatttaaccaa

SEQ ID NO: 1907335 - DNA, 15 bp, Homo sapiens
ttacatttaaccaaa

SEQ ID NO: 1907336 - DNA, 15 bp, Homo sapiens
tacatttaaccaaag

SEQ ID NO: 1907337 - DNA, 15 bp, Homo sapiens
acatttaaccaaaga

SEQ ID NO: 1907338 - DNA, 15 bp, Homo sapiens
catttaaccaaagac

SEQ ID NO: 1907339 - DNA, 15 bp, Homo sapiens
atttaaccaaagaca

SEQ ID NO: 1907340 - DNA, 15 bp, Homo sapiens
tttaaccaaagacag

SEQ ID NO: 1907341 - DNA, 15 bp, Homo sapiens
ttaaccaaagacaga

SEQ ID NO: 1907342 - DNA, 15 bp, Homo sapiens
taaccaaagacagat

SEQ ID NO: 1907343 - DNA, 15 bp, Homo sapiens
aaccaaagacagatt

SEQ ID NO: 1907344 - DNA, 15 bp, Homo sapiens
accaaagacagatta

SEQ ID NO: 1907345 - DNA, 15 bp, Homo sapiens
ccaaagacagattat

SEQ ID NO: 1907346 - DNA, 15 bp, Homo sapiens
caaagacagattata

SEQ ID NO: 1907347 - DNA, 15 bp, Homo sapiens
aaagacagattataa

SEQ ID NO: 1907348 - DNA, 15 bp, Homo sapiens
aagacagattataag

SEQ ID NO: 1907349 - DNA, 15 bp, Homo sapiens
agacagattataagt

SEQ ID NO: 1907350 - DNA, 15 bp, Homo sapiens
gacagattataagtc

SEQ ID NO: 1907351 - DNA, 15 bp, Homo sapiens
acagattataagtca

SEQ ID NO: 1907352 - DNA, 15 bp, Homo sapiens
cagattataagtcaa

SEQ ID NO: 1907353 - DNA, 15 bp, Homo sapiens
agattataagtcaaa

SEQ ID NO: 1907354 - DNA, 15 bp, Homo sapiens
gattataagtcaaat

SEQ ID NO: 1907355 - DNA, 15 bp, Homo sapiens
attataagtcaaata

SEQ ID NO: 1907356 - DNA, 15 bp, Homo sapiens
ttataagtcaaataa

SEQ ID NO: 1907357 - DNA, 15 bp, Homo sapiens
tataagtcaaataag

SEQ ID NO: 1907358 - DNA, 15 bp, Homo sapiens
ataagtcaaataagt

SEQ ID NO: 1907359 - DNA, 15 bp, Homo sapiens
taagtcaaataagtt

SEQ ID NO: 1907360 - DNA, 15 bp, Homo sapiens
aagtcaaataagttg

SEQ ID NO: 1907361 - DNA, 15 bp, Homo sapiens
agtcaaataagttgc

SEQ ID NO: 1907362 - DNA, 15 bp, Homo sapiens
gtcaaataagttgca

SEQ ID NO: 1907363 - DNA, 15 bp, Homo sapiens
tcaaataagttgcag

SEQ ID NO: 1907364 - DNA, 15 bp, Homo sapiens
caaataagttgcagg

SEQ ID NO: 1907365 - DNA, 15 bp, Homo sapiens
aaataagttgcagga

SEQ ID NO: 1907366 - DNA, 15 bp, Homo sapiens
aataagttgcaggaa

SEQ ID NO: 1907367 - DNA, 15 bp, Homo sapiens
ataagttgcaggaac

SEQ ID NO: 1907368 - DNA, 15 bp, Homo sapiens
taagttgcaggaaca

SEQ ID NO: 1907369 - DNA, 15 bp, Homo sapiens
aagttgcaggaacag

SEQ ID NO: 1907370 - DNA, 15 bp, Homo sapiens
agttgcaggaacaga

SEQ ID NO: 1907371 - DNA, 15 bp, Homo sapiens
gttgcaggaacagac

SEQ ID NO: 1907372 - DNA, 15 bp, Homo sapiens
ttgcaggaacagacc

SEQ ID NO: 1907373 - DNA, 15 bp, Homo sapiens
tgcaggaacagacct

SEQ ID NO: 1907374 - DNA, 15 bp, Homo sapiens
gcaggaacagacctc

SEQ ID NO: 1907375 - DNA, 15 bp, Homo sapiens
caggaacagacctcg

SEQ ID NO: 1907376 - DNA, 15 bp, Homo sapiens
aggaacagacctcga

SEQ ID NO: 1907377 - DNA, 15 bp, Homo sapiens
ggaacagacctcgat

SEQ ID NO: 1907378 - DNA, 15 bp, Homo sapiens
gaacagacctcgatt

SEQ ID NO: 1907379 - DNA, 15 bp, Homo sapiens
aacagacctcgattt

SEQ ID NO: 1907380 - DNA, 15 bp, Homo sapiens
acagacctcgatttc

SEQ ID NO: 1907381 - DNA, 15 bp, Homo sapiens
cagacctcgatttca

SEQ ID NO: 1907382 - DNA, 15 bp, Homo sapiens
agacctcgatttcaa

SEQ ID NO: 1907383 - DNA, 15 bp, Homo sapiens
gacctcgatttcaac

SEQ ID NO: 1907384 - DNA, 15 bp, Homo sapiens
acctcgatttcaact

SEQ ID NO: 1907385 - DNA, 15 bp, Homo sapiens
cctcgatttcaactt

SEQ ID NO: 1907386 - DNA, 15 bp, Homo sapiens
ctcgatttcaacttt

SEQ ID NO: 1907387 - DNA, 15 bp, Homo sapiens
tcgatttcaactttc

SEQ ID NO: 1907388 - DNA, 15 bp, Homo sapiens
cgatttcaactttcc

SEQ ID NO: 1907389 - DNA, 15 bp, Homo sapiens
gatttcaactttcca

SEQ ID NO: 1907390 - DNA, 15 bp, Homo sapiens
atttcaactttccaa

SEQ ID NO: 1907391 - DNA, 15 bp, Homo sapiens
tttcaactttccaaa

SEQ ID NO: 1907392 - DNA, 15 bp, Homo sapiens
ttcaactttccaaag

SEQ ID NO: 1907393 - DNA, 15 bp, Homo sapiens
tcaactttccaaagt

SEQ ID NO: 1907394 - DNA, 15 bp, Homo sapiens
caactttccaaagta

SEQ ID NO: 1907395 - DNA, 15 bp, Homo sapiens
aactttccaaagtag

SEQ ID NO: 1907396 - DNA, 15 bp, Homo sapiens
actttccaaagtaga

SEQ ID NO: 1907397 - DNA, 15 bp, Homo sapiens
ctttccaaagtagaa

SEQ ID NO: 1907398 - DNA, 15 bp, Homo sapiens
tttccaaagtagaac

SEQ ID NO: 1907399 - DNA, 15 bp, Homo sapiens
ttccaaagtagaaca

SEQ ID NO: 1907400 - DNA, 15 bp, Homo sapiens
tccaaagtagaacat

SEQ ID NO: 1907401 - DNA, 15 bp, Homo sapiens
ccaaagtagaacata

SEQ ID NO: 1907402 - DNA, 15 bp, Homo sapiens
caaagtagaacataa

SEQ ID NO: 1907403 - DNA, 15 bp, Homo sapiens
aaagtagaacataag

SEQ ID NO: 1907404 - DNA, 15 bp, Homo sapiens
aagtagaacataaga

SEQ ID NO: 1907405 - DNA, 15 bp, Homo sapiens
agtagaacataagaa

SEQ ID NO: 1907406 - DNA, 15 bp, Homo sapiens
gtagaacataagaaa

SEQ ID NO: 1907407 - DNA, 15 bp, Homo sapiens
tagaacataagaaaa

SEQ ID NO: 1907408 - DNA, 15 bp, Homo sapiens
agaacataagaaaac

SEQ ID NO: 1907409 - DNA, 15 bp, Homo sapiens
gaacataagaaaact

SEQ ID NO: 1907410 - DNA, 15 bp, Homo sapiens
aacataagaaaactt

SEQ ID NO: 1907411 - DNA, 15 bp, Homo sapiens
acataagaaaacttt

SEQ ID NO: 1907412 - DNA, 15 bp, Homo sapiens
cataagaaaactttt

SEQ ID NO: 1907413 - DNA, 15 bp, Homo sapiens
ataagaaaacttttc

SEQ ID NO: 1907414 - DNA, 15 bp, Homo sapiens
taagaaaacttttca

SEQ ID NO: 1907415 - DNA, 15 bp, Homo sapiens
aagaaaacttttcag

SEQ ID NO: 1907416 - DNA, 15 bp, Homo sapiens
agaaaacttttcagg

SEQ ID NO: 1907417 - DNA, 15 bp, Homo sapiens
gaaaacttttcaggt

SEQ ID NO: 1907418 - DNA, 15 bp, Homo sapiens
aaaacttttcaggtg

SEQ ID NO: 1907419 - DNA, 15 bp, Homo sapiens
aaacttttcaggtga

SEQ ID NO: 1907420 - DNA, 15 bp, Homo sapiens
aacttttcaggtgaa

SEQ ID NO: 1907421 - DNA, 15 bp, Homo sapiens
acttttcaggtgaaa

SEQ ID NO: 1907422 - DNA, 15 bp, Homo sapiens
cttttcaggtgaaag

SEQ ID NO: 1907423 - DNA, 15 bp, Homo sapiens
ttttcaggtgaaagg

SEQ ID NO: 1907424 - DNA, 15 bp, Homo sapiens
tttcaggtgaaagga

SEQ ID NO: 1907425 - DNA, 15 bp, Homo sapiens
ttcaggtgaaaggaa

SEQ ID NO: 1907426 - DNA, 15 bp, Homo sapiens
tcaggtgaaaggaac

SEQ ID NO: 1907427 - DNA, 15 bp, Homo sapiens
caggtgaaaggaacc

SEQ ID NO: 1907428 - DNA, 15 bp, Homo sapiens
aggtgaaaggaacct

SEQ ID NO: 1907429 - DNA, 15 bp, Homo sapiens
ggtgaaaggaacctt

SEQ ID NO: 1907430 - DNA, 15 bp, Homo sapiens
gtgaaaggaacctta

SEQ ID NO: 1907431 - DNA, 15 bp, Homo sapiens
tgaaaggaaccttag

SEQ ID NO: 1907432 - DNA, 15 bp, Homo sapiens
gaaaggaaccttaga

SEQ ID NO: 1907433 - DNA, 15 bp, Homo sapiens
aaaggaaccttagac

SEQ ID NO: 1907434 - DNA, 15 bp, Homo sapiens
aaggaaccttagact

SEQ ID NO: 1907435 - DNA, 15 bp, Homo sapiens
aggaaccttagactc

SEQ ID NO: 1907436 - DNA, 15 bp, Homo sapiens
ggaaccttagactca

SEQ ID NO: 1907437 - DNA, 15 bp, Homo sapiens
gaaccttagactcat

SEQ ID NO: 1907438 - DNA, 15 bp, Homo sapiens
aaccttagactcatc

SEQ ID NO: 1907439 - DNA, 15 bp, Homo sapiens
accttagactcatct

SEQ ID NO: 1907440 - DNA, 15 bp, Homo sapiens
ccttagactcatctt

SEQ ID NO: 1907441 - DNA, 15 bp, Homo sapiens
cttagactcatcttt

SEQ ID NO: 1907442 - DNA, 15 bp, Homo sapiens
ttagactcatctttt

SEQ ID NO: 1907443 - DNA, 15 bp, Homo sapiens
tagactcatcttttt

SEQ ID NO: 1907444 - DNA, 15 bp, Homo sapiens
agactcatctttttc

SEQ ID NO: 1907445 - DNA, 15 bp, Homo sapiens
gactcatctttttca

SEQ ID NO: 1907446 - DNA, 15 bp, Homo sapiens
actcatctttttcaa

SEQ ID NO: 1907447 - DNA, 15 bp, Homo sapiens
ctcatctttttcaat

SEQ ID NO: 1907448 - DNA, 15 bp, Homo sapiens
tcatctttttcaatc

SEQ ID NO: 1907449 - DNA, 15 bp, Homo sapiens
catctttttcaatcc

SEQ ID NO: 1907450 - DNA, 15 bp, Homo sapiens
atctttttcaatccc

SEQ ID NO: 1907451 - DNA, 15 bp, Homo sapiens
tctttttcaatccca

SEQ ID NO: 1907452 - DNA, 15 bp, Homo sapiens
ctttttcaatcccac

SEQ ID NO: 1907453 - DNA, 15 bp, Homo sapiens
tttttcaatcccaca

SEQ ID NO: 1907454 - DNA, 15 bp, Homo sapiens
ttttcaatcccacat

SEQ ID NO: 1907455 - DNA, 15 bp, Homo sapiens
tttcaatcccacatg

SEQ ID NO: 1907456 - DNA, 15 bp, Homo sapiens
ttcaatcccacatgt

SEQ ID NO: 1907457 - DNA, 15 bp, Homo sapiens
tcaatcccacatgtt

SEQ ID NO: 1907458 - DNA, 15 bp, Homo sapiens
caatcccacatgtta

SEQ ID NO: 1907459 - DNA, 15 bp, Homo sapiens
aatcccacatgttac

SEQ ID NO: 1907460 - DNA, 15 bp, Homo sapiens
atcccacatgttaca

SEQ ID NO: 1907461 - DNA, 15 bp, Homo sapiens
tcccacatgttacat

SEQ ID NO: 1907462 - DNA, 15 bp, Homo sapiens
cccacatgttacata

SEQ ID NO: 1907463 - DNA, 15 bp, Homo sapiens
ccacatgttacatat

SEQ ID NO: 1907464 - DNA, 15 bp, Homo sapiens
cacatgttacatata

SEQ ID NO: 1907465 - DNA, 15 bp, Homo sapiens
acatgttacatataa

SEQ ID NO: 1907466 - DNA, 15 bp, Homo sapiens
catgttacatataag

SEQ ID NO: 1907467 - DNA, 15 bp, Homo sapiens
atgttacatataagg

SEQ ID NO: 1907468 - DNA, 15 bp, Homo sapiens
tgttacatataagga

SEQ ID NO: 1907469 - DNA, 15 bp, Homo sapiens
gttacatataaggaa

SEQ ID NO: 1907470 - DNA, 15 bp, Homo sapiens
ttacatataaggaat

SEQ ID NO: 1907471 - DNA, 15 bp, Homo sapiens
tacatataaggaata

SEQ ID NO: 1907472 - DNA, 15 bp, Homo sapiens
acatataaggaatag

SEQ ID NO: 1907473 - DNA, 15 bp, Homo sapiens
catataaggaatagg

SEQ ID NO: 1907474 - DNA, 15 bp, Homo sapiens
atataaggaatagga

SEQ ID NO: 1907475 - DNA, 15 bp, Homo sapiens
tataaggaataggag

SEQ ID NO: 1907476 - DNA, 15 bp, Homo sapiens
ataaggaataggaga

SEQ ID NO: 1907477 - DNA, 15 bp, Homo sapiens
taaggaataggagac

SEQ ID NO: 1907478 - DNA, 15 bp, Homo sapiens
aaggaataggagacc

SEQ ID NO: 1907479 - DNA, 15 bp, Homo sapiens
aggaataggagacca

SEQ ID NO: 1907480 - DNA, 15 bp, Homo sapiens
ggaataggagaccac

SEQ ID NO: 1907481 - DNA, 15 bp, Homo sapiens
gaataggagaccacg

SEQ ID NO: 1907482 - DNA, 15 bp, Homo sapiens
aataggagaccacga

SEQ ID NO: 1907483 - DNA, 15 bp, Homo sapiens
ataggagaccacgag

SEQ ID NO: 1907484 - DNA, 15 bp, Homo sapiens
taggagaccacgagg

SEQ ID NO: 1907485 - DNA, 15 bp, Homo sapiens
aggagaccacgaggc

SEQ ID NO: 1907486 - DNA, 15 bp, Homo sapiens
ggagaccacgaggca

SEQ ID NO: 1907487 - DNA, 15 bp, Homo sapiens
gagaccacgaggcaa

SEQ ID NO: 1907488 - DNA, 15 bp, Homo sapiens
agaccacgaggcaaa

SEQ ID NO: 1907489 - DNA, 15 bp, Homo sapiens
gaccacgaggcaaaa

SEQ ID NO: 1907490 - DNA, 15 bp, Homo sapiens
accacgaggcaaaac

SEQ ID NO: 1907491 - DNA, 15 bp, Homo sapiens
ccacgaggcaaaacg

SEQ ID NO: 1907492 - DNA, 15 bp, Homo sapiens
cacgaggcaaaacga

SEQ ID NO: 1907493 - DNA, 15 bp, Homo sapiens
acgaggcaaaacgac

SEQ ID NO: 1907494 - DNA, 15 bp, Homo sapiens
cgaggcaaaacgacc

SEQ ID NO: 1907495 - DNA, 15 bp, Homo sapiens
gaggcaaaacgaccc

SEQ ID NO: 1907496 - DNA, 15 bp, Homo sapiens
aggcaaaacgacccc

SEQ ID NO: 1907497 - DNA, 15 bp, Homo sapiens
ggcaaaacgacccca

SEQ ID NO: 1907498 - DNA, 15 bp, Homo sapiens
gcaaaacgaccccag

SEQ ID NO: 1907499 - DNA, 15 bp, Homo sapiens
caaaacgaccccagt

SEQ ID NO: 1907500 - DNA, 15 bp, Homo sapiens
aaaacgaccccagtt

SEQ ID NO: 1907501 - DNA, 15 bp, Homo sapiens
aaacgaccccagtta

SEQ ID NO: 1907502 - DNA, 15 bp, Homo sapiens
aacgaccccagttac

SEQ ID NO: 1907503 - DNA, 15 bp, Homo sapiens
acgaccccagttaca

SEQ ID NO: 1907504 - DNA, 15 bp, Homo sapiens
cgaccccagttacag

SEQ ID NO: 1907505 - DNA, 15 bp, Homo sapiens
gaccccagttacaga

SEQ ID NO: 1907506 - DNA, 15 bp, Homo sapiens
accccagttacagat

SEQ ID NO: 1907507 - DNA, 15 bp, Homo sapiens
ccccagttacagatg

SEQ ID NO: 1907508 - DNA, 15 bp, Homo sapiens
cccagttacagatga

SEQ ID NO: 1907509 - DNA, 15 bp, Homo sapiens
ccagttacagatgag

SEQ ID NO: 1907510 - DNA, 15 bp, Homo sapiens
cagttacagatgagt

SEQ ID NO: 1907511 - DNA, 15 bp, Homo sapiens
agttacagatgagtt

SEQ ID NO: 1907512 - DNA, 15 bp, Homo sapiens
gttacagatgagtta

SEQ ID NO: 1907513 - DNA, 15 bp, Homo sapiens
ttacagatgagttaa

SEQ ID NO: 1907514 - DNA, 15 bp, Homo sapiens
tacagatgagttaat

SEQ ID NO: 1907515 - DNA, 15 bp, Homo sapiens
acagatgagttaata

SEQ ID NO: 1907516 - DNA, 15 bp, Homo sapiens
cagatgagttaatag

SEQ ID NO: 1907517 - DNA, 15 bp, Homo sapiens
agatgagttaatagc

SEQ ID NO: 1907518 - DNA, 15 bp, Homo sapiens
gatgagttaatagca

SEQ ID NO: 1907519 - DNA, 15 bp, Homo sapiens
atgagttaatagcat

SEQ ID NO: 1907520 - DNA, 15 bp, Homo sapiens
tgagttaatagcata

SEQ ID NO: 1907521 - DNA, 15 bp, Homo sapiens
gagttaatagcatag

SEQ ID NO: 1907522 - DNA, 15 bp, Homo sapiens
agttaatagcatagc

SEQ ID NO: 1907523 - DNA, 15 bp, Homo sapiens
gttaatagcatagct

SEQ ID NO: 1907524 - DNA, 15 bp, Homo sapiens
ttaatagcatagcta

SEQ ID NO: 1907525 - DNA, 15 bp, Homo sapiens
taatagcatagctag

SEQ ID NO: 1907526 - DNA, 15 bp, Homo sapiens
aatagcatagctagt

SEQ ID NO: 1907527 - DNA, 15 bp, Homo sapiens
atagcatagctagtg

SEQ ID NO: 1907528 - DNA, 15 bp, Homo sapiens
tagcatagctagtgc

SEQ ID NO: 1907529 - DNA, 15 bp, Homo sapiens
agcatagctagtgct

SEQ ID NO: 1907530 - DNA, 15 bp, Homo sapiens
gcatagctagtgctc

SEQ ID NO: 1907531 - DNA, 15 bp, Homo sapiens
catagctagtgctct

SEQ ID NO: 1907532 - DNA, 15 bp, Homo sapiens
atagctagtgctctt

SEQ ID NO: 1907533 - DNA, 15 bp, Homo sapiens
tagctagtgctcttt

SEQ ID NO: 1907534 - DNA, 15 bp, Homo sapiens
agctagtgctctttc

SEQ ID NO: 1907535 - DNA, 15 bp, Homo sapiens
gctagtgctctttcc

SEQ ID NO: 1907536 - DNA, 15 bp, Homo sapiens
ctagtgctctttcca

SEQ ID NO: 1907537 - DNA, 15 bp, Homo sapiens
tagtgctctttccat

SEQ ID NO: 1907538 - DNA, 15 bp, Homo sapiens
agtgctctttccatg

SEQ ID NO: 1907539 - DNA, 15 bp, Homo sapiens
gtgctctttccatgg

SEQ ID NO: 1907540 - DNA, 15 bp, Homo sapiens
tgctctttccatggc

SEQ ID NO: 1907541 - DNA, 15 bp, Homo sapiens
gctctttccatggct

SEQ ID NO: 1907542 - DNA, 15 bp, Homo sapiens
tctttccatggctca

SEQ ID NO: 1907543 - DNA, 15 bp, Homo sapiens
ctttccatggctcac

SEQ ID NO: 1907544 - DNA, 15 bp, Homo sapiens
tttccatggctcact

SEQ ID NO: 1907545 - DNA, 15 bp, Homo sapiens
ttccatggctcactc

SEQ ID NO: 1907546 - DNA, 15 bp, Homo sapiens
tccatggctcactct

SEQ ID NO: 1907547 - DNA, 15 bp, Homo sapiens
ccatggctcactctt

SEQ ID NO: 1907548 - DNA, 15 bp, Homo sapiens
catggctcactcttt

SEQ ID NO: 1907549 - DNA, 15 bp, Homo sapiens
atggctcactctttt

SEQ ID NO: 1907550 - DNA, 15 bp, Homo sapiens
tggctcactcttttc

SEQ ID NO: 1907551 - DNA, 15 bp, Homo sapiens
ggctcactcttttct

SEQ ID NO: 1907552 - DNA, 15 bp, Homo sapiens
gctcactcttttctt

SEQ ID NO: 1907553 - DNA, 15 bp, Homo sapiens
ctcactcttttcttt

SEQ ID NO: 1907554 - DNA, 15 bp, Homo sapiens
tcactcttttctttg

SEQ ID NO: 1907555 - DNA, 15 bp, Homo sapiens
cactcttttctttgt

SEQ ID NO: 1907556 - DNA, 15 bp, Homo sapiens
actcttttctttgtg

SEQ ID NO: 1907557 - DNA, 15 bp, Homo sapiens
ctcttttctttgtgc

SEQ ID NO: 1907558 - DNA, 15 bp, Homo sapiens
tcttttctttgtgcc

SEQ ID NO: 1907559 - DNA, 15 bp, Homo sapiens
cttttctttgtgcct

SEQ ID NO: 1907560 - DNA, 15 bp, Homo sapiens
ttttctttgtgcctt

SEQ ID NO: 1907561 - DNA, 15 bp, Homo sapiens
tttctttgtgccttt

SEQ ID NO: 1907562 - DNA, 15 bp, Homo sapiens
ttctttgtgcctttc

SEQ ID NO: 1907563 - DNA, 15 bp, Homo sapiens
tctttgtgcctttct

SEQ ID NO: 1907564 - DNA, 15 bp, Homo sapiens
ctttgtgcctttctc

SEQ ID NO: 1907565 - DNA, 15 bp, Homo sapiens
tttgtgcctttctcc

SEQ ID NO: 1907566 - DNA, 15 bp, Homo sapiens
ttgtgcctttctcca

SEQ ID NO: 1907567 - DNA, 15 bp, Homo sapiens
tgtgcctttctccat

SEQ ID NO: 1907568 - DNA, 15 bp, Homo sapiens
gtgcctttctccata

SEQ ID NO: 1907569 - DNA, 15 bp, Homo sapiens
tgcctttctccataa

SEQ ID NO: 1907570 - DNA, 15 bp, Homo sapiens
gcctttctccataaa

SEQ ID NO: 1907571 - DNA, 15 bp, Homo sapiens
cctttctccataaaa

SEQ ID NO: 1907572 - DNA, 15 bp, Homo sapiens
ctttctccataaaaa

SEQ ID NO: 1907573 - DNA, 15 bp, Homo sapiens
tttctccataaaaaa

SEQ ID NO: 1907574 - DNA, 15 bp, Homo sapiens
ttctccataaaaaat

SEQ ID NO: 1907575 - DNA, 15 bp, Homo sapiens
tctccataaaaaatt

SEQ ID NO: 1907576 - DNA, 15 bp, Homo sapiens
ctccataaaaaatta

SEQ ID NO: 1907577 - DNA, 15 bp, Homo sapiens
tccataaaaaattaa

SEQ ID NO: 1907578 - DNA, 15 bp, Homo sapiens
ccataaaaaattaaa

SEQ ID NO: 1907579 - DNA, 15 bp, Homo sapiens
cataaaaaattaaat

SEQ ID NO: 1907580 - DNA, 15 bp, Homo sapiens
ataaaaaattaaata

SEQ ID NO: 1907581 - DNA, 15 bp, Homo sapiens
taaaaaattaaatat

SEQ ID NO: 1907582 - DNA, 15 bp, Homo sapiens
aaaaaattaaatatc

SEQ ID NO: 1907583 - DNA, 15 bp, Homo sapiens
aaaaattaaatatca

SEQ ID NO: 1907584 - DNA, 15 bp, Homo sapiens
aaaattaaatatcac

SEQ ID NO: 1907585 - DNA, 15 bp, Homo sapiens
aaattaaatatcaca

SEQ ID NO: 1907586 - DNA, 15 bp, Homo sapiens
aattaaatatcacat

SEQ ID NO: 1907587 - DNA, 15 bp, Homo sapiens
attaaatatcacatc

SEQ ID NO: 1907588 - DNA, 15 bp, Homo sapiens
ttaaatatcacatct

SEQ ID NO: 1907589 - DNA, 15 bp, Homo sapiens
taaatatcacatcta

SEQ ID NO: 1907590 - DNA, 15 bp, Homo sapiens
aaatatcacatctat

SEQ ID NO: 1907591 - DNA, 15 bp, Homo sapiens
aatatcacatctatg

SEQ ID NO: 1907592 - DNA, 15 bp, Homo sapiens
atatcacatctatga

SEQ ID NO: 1907593 - DNA, 15 bp, Homo sapiens
tatcacatctatgaa

SEQ ID NO: 1907594 - DNA, 15 bp, Homo sapiens
atcacatctatgaat

SEQ ID NO: 1907595 - DNA, 15 bp, Homo sapiens
tcacatctatgaatg

SEQ ID NO: 1907596 - DNA, 15 bp, Homo sapiens
cacatctatgaatgt

SEQ ID NO: 1907597 - DNA, 15 bp, Homo sapiens
acatctatgaatgtc

SEQ ID NO: 1907598 - DNA, 15 bp, Homo sapiens
catctatgaatgtct

SEQ ID NO: 1907599 - DNA, 15 bp, Homo sapiens
atctatgaatgtcta

SEQ ID NO: 1907600 - DNA, 15 bp, Homo sapiens
tctatgaatgtctac

SEQ ID NO: 1907601 - DNA, 15 bp, Homo sapiens
ctatgaatgtctact

SEQ ID NO: 1907602 - DNA, 15 bp, Homo sapiens
tatgaatgtctactg

SEQ ID NO: 1907603 - DNA, 15 bp, Homo sapiens
atgaatgtctactga

SEQ ID NO: 1907604 - DNA, 15 bp, Homo sapiens
tgaatgtctactgaa

SEQ ID NO: 1907605 - DNA, 15 bp, Homo sapiens
gaatgtctactgaat

SEQ ID NO: 1907606 - DNA, 15 bp, Homo sapiens
aatgtctactgaata

SEQ ID NO: 1907607 - DNA, 15 bp, Homo sapiens
atgtctactgaatac

SEQ ID NO: 1907608 - DNA, 15 bp, Homo sapiens
tgtctactgaataca

SEQ ID NO: 1907609 - DNA, 15 bp, Homo sapiens
gtctactgaatacat

SEQ ID NO: 1907610 - DNA, 15 bp, Homo sapiens
tctactgaatacatt

SEQ ID NO: 1907611 - DNA, 15 bp, Homo sapiens
ctactgaatacattt

SEQ ID NO: 1907612 - DNA, 15 bp, Homo sapiens
tactgaatacattta

SEQ ID NO: 1907613 - DNA, 15 bp, Homo sapiens
actgaatacatttaa

SEQ ID NO: 1907614 - DNA, 15 bp, Homo sapiens
ctgaatacatttaac

SEQ ID NO: 1907615 - DNA, 15 bp, Homo sapiens
tgaatacatttaact

SEQ ID NO: 1907616 - DNA, 15 bp, Homo sapiens
gaatacatttaactg

SEQ ID NO: 1907617 - DNA, 15 bp, Homo sapiens
aatacatttaactgt

SEQ ID NO: 1907618 - DNA, 15 bp, Homo sapiens
atacatttaactgtg

SEQ ID NO: 1907619 - DNA, 15 bp, Homo sapiens
tacatttaactgtgt

SEQ ID NO: 1907620 - DNA, 15 bp, Homo sapiens
acatttaactgtgtg

SEQ ID NO: 1907621 - DNA, 15 bp, Homo sapiens
catttaactgtgtga

SEQ ID NO: 1907622 - DNA, 15 bp, Homo sapiens
atttaactgtgtgaa

SEQ ID NO: 1907623 - DNA, 15 bp, Homo sapiens
tttaactgtgtgaac

SEQ ID NO: 1907624 - DNA, 15 bp, Homo sapiens
ttaactgtgtgaacc

SEQ ID NO: 1907625 - DNA, 15 bp, Homo sapiens
taactgtgtgaacct

SEQ ID NO: 1907626 - DNA, 15 bp, Homo sapiens
aactgtgtgaacctt

SEQ ID NO: 1907627 - DNA, 15 bp, Homo sapiens
actgtgtgaaccttt

SEQ ID NO: 1907628 - DNA, 15 bp, Homo sapiens
ctgtgtgaaccttta

SEQ ID NO: 1907629 - DNA, 15 bp, Homo sapiens
tgtgtgaacctttac

SEQ ID NO: 1907630 - DNA, 15 bp, Homo sapiens
gtgtgaacctttaca

SEQ ID NO: 1907631 - DNA, 15 bp, Homo sapiens
tgtgaacctttacac

SEQ ID NO: 1907632 - DNA, 15 bp, Homo sapiens
gtgaacctttacacc

SEQ ID NO: 1907633 - DNA, 15 bp, Homo sapiens
tgaacctttacaccg

SEQ ID NO: 1907634 - DNA, 15 bp, Homo sapiens
gaacctttacaccga

SEQ ID NO: 1907635 - DNA, 15 bp, Homo sapiens
aacctttacaccgat

SEQ ID NO: 1907636 - DNA, 15 bp, Homo sapiens
acctttacaccgatt

SEQ ID NO: 1907637 - DNA, 15 bp, Homo sapiens
cctttacaccgattt

SEQ ID NO: 1907638 - DNA, 15 bp, Homo sapiens
ctttacaccgatttt

SEQ ID NO: 1907639 - DNA, 15 bp, Homo sapiens
tttacaccgatttta

SEQ ID NO: 1907640 - DNA, 15 bp, Homo sapiens
ttacaccgattttat

SEQ ID NO: 1907641 - DNA, 15 bp, Homo sapiens
tacaccgattttatc

SEQ ID NO: 1907642 - DNA, 15 bp, Homo sapiens
acaccgattttatct

SEQ ID NO: 1907643 - DNA, 15 bp, Homo sapiens
caccgattttatctt

SEQ ID NO: 1907644 - DNA, 15 bp, Homo sapiens
accgattttatcttt

SEQ ID NO: 1907645 - DNA, 15 bp, Homo sapiens
ccgattttatctttc

SEQ ID NO: 1907646 - DNA, 15 bp, Homo sapiens
cgattttatctttca

SEQ ID NO: 1907647 - DNA, 15 bp, Homo sapiens
gattttatctttcaa

SEQ ID NO: 1907648 - DNA, 15 bp, Homo sapiens
attttatctttcaaa

SEQ ID NO: 1907649 - DNA, 15 bp, Homo sapiens
ttttatctttcaaat

SEQ ID NO: 1907650 - DNA, 15 bp, Homo sapiens
tttatctttcaaatc

SEQ ID NO: 1907651 - DNA, 15 bp, Homo sapiens
ttatctttcaaatct

SEQ ID NO: 1907652 - DNA, 15 bp, Homo sapiens
tatctttcaaatcta

SEQ ID NO: 1907653 - DNA, 15 bp, Homo sapiens
atctttcaaatctaa

SEQ ID NO: 1907654 - DNA, 15 bp, Homo sapiens
tctttcaaatctaat

SEQ ID NO: 1907655 - DNA, 15 bp, Homo sapiens
ctttcaaatctaata

SEQ ID NO: 1907656 - DNA, 15 bp, Homo sapiens
tttcaaatctaatat

SEQ ID NO: 1907657 - DNA, 15 bp, Homo sapiens
ttcaaatctaatata

SEQ ID NO: 1907658 - DNA, 15 bp, Homo sapiens
tcaaatctaatatat

SEQ ID NO: 1907659 - DNA, 15 bp, Homo sapiens
caaatctaatatata

SEQ ID NO: 1907660 - DNA, 15 bp, Homo sapiens
aaatctaatatatat

SEQ ID NO: 1907661 - DNA, 15 bp, Homo sapiens
aatctaatatatatg

SEQ ID NO: 1907662 - DNA, 15 bp, Homo sapiens
atctaatatatatgt

SEQ ID NO: 1907663 - DNA, 15 bp, Homo sapiens
tctaatatatatgta

SEQ ID NO: 1907664 - DNA, 15 bp, Homo sapiens
ctaatatatatgtaa

SEQ ID NO: 1907665 - DNA, 15 bp, Homo sapiens
taatatatatgtaat

SEQ ID NO: 1907666 - DNA, 15 bp, Homo sapiens
aatatatatgtaatt

SEQ ID NO: 1907667 - DNA, 15 bp, Homo sapiens
atatatatgtaattc

SEQ ID NO: 1907668 - DNA, 15 bp, Homo sapiens
tatatatgtaattca

SEQ ID NO: 1907669 - DNA, 15 bp, Homo sapiens
atatatgtaattcat

SEQ ID NO: 1907670 - DNA, 15 bp, Homo sapiens
tatatgtaattcatt

SEQ ID NO: 1907671 - DNA, 15 bp, Homo sapiens
atatgtaattcattt

SEQ ID NO: 1907672 - DNA, 15 bp, Homo sapiens
tatgtaattcatttt

SEQ ID NO: 1907673 - DNA, 15 bp, Homo sapiens
atgtaattcattttt

SEQ ID NO: 1907674 - DNA, 15 bp, Homo sapiens
tgtaattcattttta

SEQ ID NO: 1907675 - DNA, 15 bp, Homo sapiens
gtaattcatttttaa

SEQ ID NO: 1907676 - DNA, 15 bp, Homo sapiens
taattcatttttaag

SEQ ID NO: 1907677 - DNA, 15 bp, Homo sapiens
aattcatttttaagt

SEQ ID NO: 1907678 - DNA, 15 bp, Homo sapiens
attcatttttaagtg

SEQ ID NO: 1907679 - DNA, 15 bp, Homo sapiens
ttcatttttaagtgg

SEQ ID NO: 1907680 - DNA, 15 bp, Homo sapiens
tcatttttaagtggt

SEQ ID NO: 1907681 - DNA, 15 bp, Homo sapiens
catttttaagtggta

SEQ ID NO: 1907682 - DNA, 15 bp, Homo sapiens
atttttaagtggtaa

SEQ ID NO: 1907683 - DNA, 15 bp, Homo sapiens
tttttaagtggtaat

SEQ ID NO: 1907684 - DNA, 15 bp, Homo sapiens
ttttaagtggtaata

SEQ ID NO: 1907685 - DNA, 15 bp, Homo sapiens
tttaagtggtaatag

SEQ ID NO: 1907686 - DNA, 15 bp, Homo sapiens
ttaagtggtaatagc

SEQ ID NO: 1907687 - DNA, 15 bp, Homo sapiens
taagtggtaatagca

SEQ ID NO: 1907688 - DNA, 15 bp, Homo sapiens
aagtggtaatagcat

SEQ ID NO: 1907689 - DNA, 15 bp, Homo sapiens
agtggtaatagcata

SEQ ID NO: 1907690 - DNA, 15 bp, Homo sapiens
gtggtaatagcatat

SEQ ID NO: 1907691 - DNA, 15 bp, Homo sapiens
tggtaatagcatata

SEQ ID NO: 1907692 - DNA, 15 bp, Homo sapiens
ggtaatagcatatac

SEQ ID NO: 1907693 - DNA, 15 bp, Homo sapiens
gtaatagcatatact

SEQ ID NO: 1907694 - DNA, 15 bp, Homo sapiens
taatagcatatactt

SEQ ID NO: 1907695 - DNA, 15 bp, Homo sapiens
aatagcatatactta

SEQ ID NO: 1907696 - DNA, 15 bp, Homo sapiens
atagcatatacttaa

SEQ ID NO: 1907697 - DNA, 15 bp, Homo sapiens
tagcatatacttaat

SEQ ID NO: 1907698 - DNA, 15 bp, Homo sapiens
agcatatacttaatg

SEQ ID NO: 1907699 - DNA, 15 bp, Homo sapiens
gcatatacttaatgc

SEQ ID NO: 1907700 - DNA, 15 bp, Homo sapiens
catatacttaatgct

SEQ ID NO: 1907701 - DNA, 15 bp, Homo sapiens
atatacttaatgctt

SEQ ID NO: 1907702 - DNA, 15 bp, Homo sapiens
tatacttaatgcttc

SEQ ID NO: 1907703 - DNA, 15 bp, Homo sapiens
atacttaatgcttcc

SEQ ID NO: 1907704 - DNA, 15 bp, Homo sapiens
tacttaatgcttccc

SEQ ID NO: 1907705 - DNA, 15 bp, Homo sapiens
acttaatgcttccca

SEQ ID NO: 1907706 - DNA, 15 bp, Homo sapiens
cttaatgcttcccat

SEQ ID NO: 1907707 - DNA, 15 bp, Homo sapiens
ttaatgcttcccatg

SEQ ID NO: 1907708 - DNA, 15 bp, Homo sapiens
taatgcttcccatgt

SEQ ID NO: 1907709 - DNA, 15 bp, Homo sapiens
aatgcttcccatgtt

SEQ ID NO: 1907710 - DNA, 15 bp, Homo sapiens
atgcttcccatgttg

SEQ ID NO: 1907711 - DNA, 15 bp, Homo sapiens
tgcttcccatgttgc

SEQ ID NO: 1907712 - DNA, 15 bp, Homo sapiens
gcttcccatgttgca

SEQ ID NO: 1907713 - DNA, 15 bp, Homo sapiens
cttcccatgttgcag

SEQ ID NO: 1907714 - DNA, 15 bp, Homo sapiens
ttcccatgttgcaga

SEQ ID NO: 1907715 - DNA, 15 bp, Homo sapiens
tcccatgttgcagac

SEQ ID NO: 1907716 - DNA, 15 bp, Homo sapiens
cccatgttgcagaca

SEQ ID NO: 1907717 - DNA, 15 bp, Homo sapiens
ccatgttgcagacat

SEQ ID NO: 1907718 - DNA, 15 bp, Homo sapiens
catgttgcagacatt

SEQ ID NO: 1907719 - DNA, 15 bp, Homo sapiens
atgttgcagacattt

SEQ ID NO: 1907720 - DNA, 15 bp, Homo sapiens
tgttgcagacatttt

SEQ ID NO: 1907721 - DNA, 15 bp, Homo sapiens
gttgcagacattttt

SEQ ID NO: 1907722 - DNA, 15 bp, Homo sapiens
ttgcagacatttttc

SEQ ID NO: 1907723 - DNA, 15 bp, Homo sapiens
tgcagacatttttca

SEQ ID NO: 1907724 - DNA, 15 bp, Homo sapiens
gcagacatttttcac

SEQ ID NO: 1907725 - DNA, 15 bp, Homo sapiens
cagacatttttcaca

SEQ ID NO: 1907726 - DNA, 15 bp, Homo sapiens
agacatttttcacac

SEQ ID NO: 1907727 - DNA, 15 bp, Homo sapiens
gacatttttcacaca

SEQ ID NO: 1907728 - DNA, 15 bp, Homo sapiens
acatttttcacacat

SEQ ID NO: 1907729 - DNA, 15 bp, Homo sapiens
catttttcacacatt

SEQ ID NO: 1907730 - DNA, 15 bp, Homo sapiens
atttttcacacatta

SEQ ID NO: 1907731 - DNA, 15 bp, Homo sapiens
tttttcacacattaa

SEQ ID NO: 1907732 - DNA, 15 bp, Homo sapiens
ttttcacacattaac

SEQ ID NO: 1907733 - DNA, 15 bp, Homo sapiens
tttcacacattaact

SEQ ID NO: 1907734 - DNA, 15 bp, Homo sapiens
ttcacacattaactc

SEQ ID NO: 1907735 - DNA, 15 bp, Homo sapiens
tcacacattaactca

SEQ ID NO: 1907736 - DNA, 15 bp, Homo sapiens
cacacattaactcac

SEQ ID NO: 1907737 - DNA, 15 bp, Homo sapiens
acacattaactcaca

SEQ ID NO: 1907738 - DNA, 15 bp, Homo sapiens
cacattaactcacat

SEQ ID NO: 1907739 - DNA, 15 bp, Homo sapiens
acattaactcacatg

SEQ ID NO: 1907740 - DNA, 15 bp, Homo sapiens
cattaactcacatgt

SEQ ID NO: 1907741 - DNA, 15 bp, Homo sapiens
attaactcacatgta

SEQ ID NO: 1907742 - DNA, 15 bp, Homo sapiens
ttaactcacatgtat

SEQ ID NO: 1907743 - DNA, 15 bp, Homo sapiens
taactcacatgtata

SEQ ID NO: 1907744 - DNA, 15 bp, Homo sapiens
aactcacatgtatat

SEQ ID NO: 1907745 - DNA, 15 bp, Homo sapiens
actcacatgtatatc

SEQ ID NO: 1907746 - DNA, 15 bp, Homo sapiens
ctcacatgtatatca

SEQ ID NO: 1907747 - DNA, 15 bp, Homo sapiens
tcacatgtatatcat

SEQ ID NO: 1907748 - DNA, 15 bp, Homo sapiens
cacatgtatatcata

SEQ ID NO: 1907749 - DNA, 15 bp, Homo sapiens
acatgtatatcatat

SEQ ID NO: 1907750 - DNA, 15 bp, Homo sapiens
catgtatatcatata

SEQ ID NO: 1907751 - DNA, 15 bp, Homo sapiens
atgtatatcatatat

SEQ ID NO: 1907752 - DNA, 15 bp, Homo sapiens
tgtatatcatatata

SEQ ID NO: 1907753 - DNA, 15 bp, Homo sapiens
gtatatcatatatat

SEQ ID NO: 1907754 - DNA, 15 bp, Homo sapiens
tatcatatatatatt

SEQ ID NO: 1907755 - DNA, 15 bp, Homo sapiens
atcatatatatattc

SEQ ID NO: 1907756 - DNA, 15 bp, Homo sapiens
tcatatatatattca

SEQ ID NO: 1907757 - DNA, 15 bp, Homo sapiens
catatatatattcag

SEQ ID NO: 1907758 - DNA, 15 bp, Homo sapiens
atatatatattcagg

SEQ ID NO: 1907759 - DNA, 15 bp, Homo sapiens
tatatatattcaggt

SEQ ID NO: 1907760 - DNA, 15 bp, Homo sapiens
atatatattcaggta

SEQ ID NO: 1907761 - DNA, 15 bp, Homo sapiens
tatatattcaggtat

SEQ ID NO: 1907762 - DNA, 15 bp, Homo sapiens
atatattcaggtatt

SEQ ID NO: 1907763 - DNA, 15 bp, Homo sapiens
tatattcaggtatta

SEQ ID NO: 1907764 - DNA, 15 bp, Homo sapiens
atattcaggtattaa

SEQ ID NO: 1907765 - DNA, 15 bp, Homo sapiens
tattcaggtattaac

SEQ ID NO: 1907766 - DNA, 15 bp, Homo sapiens
attcaggtattaaca

SEQ ID NO: 1907767 - DNA, 15 bp, Homo sapiens
ttcaggtattaacat

SEQ ID NO: 1907768 - DNA, 15 bp, Homo sapiens
tcaggtattaacata

SEQ ID NO: 1907769 - DNA, 15 bp, Homo sapiens
caggtattaacatat

SEQ ID NO: 1907770 - DNA, 15 bp, Homo sapiens
aggtattaacatata

SEQ ID NO: 1907771 - DNA, 15 bp, Homo sapiens
ggtattaacatatat

SEQ ID NO: 1907772 - DNA, 15 bp, Homo sapiens
gtattaacatatata

SEQ ID NO: 1907773 - DNA, 15 bp, Homo sapiens
tattaacatatatat

SEQ ID NO: 1907774 - DNA, 15 bp, Homo sapiens
attaacatatatatg

SEQ ID NO: 1907775 - DNA, 15 bp, Homo sapiens
ttaacatatatatgt

SEQ ID NO: 1907776 - DNA, 15 bp, Homo sapiens
taacatatatatgta

SEQ ID NO: 1907777 - DNA, 15 bp, Homo sapiens
aacatatatatgtat

SEQ ID NO: 1907778 - DNA, 15 bp, Homo sapiens
atatatatgtattaa

SEQ ID NO: 1907779 - DNA, 15 bp, Homo sapiens
tatatatgtattaac

SEQ ID NO: 1907780 - DNA, 15 bp, Homo sapiens
atatatgtattaact

SEQ ID NO: 1907781 - DNA, 15 bp, Homo sapiens
tatatgtattaactc

SEQ ID NO: 1907782 - DNA, 15 bp, Homo sapiens
atatgtattaactca

SEQ ID NO: 1907783 - DNA, 15 bp, Homo sapiens
tatgtattaactcac

SEQ ID NO: 1907784 - DNA, 15 bp, Homo sapiens
atgtattaactcaca

SEQ ID NO: 1907785 - DNA, 15 bp, Homo sapiens
tgtattaactcacat

SEQ ID NO: 1907786 - DNA, 15 bp, Homo sapiens
gtattaactcacata

SEQ ID NO: 1907787 - DNA, 15 bp, Homo sapiens
tattaactcacatat

SEQ ID NO: 1907788 - DNA, 15 bp, Homo sapiens
attaactcacatata

SEQ ID NO: 1907789 - DNA, 15 bp, Homo sapiens
ttaactcacatatat

SEQ ID NO: 1907790 - DNA, 15 bp, Homo sapiens
taactcacatatatt

SEQ ID NO: 1907791 - DNA, 15 bp, Homo sapiens
aactcacatatattc

SEQ ID NO: 1907792 - DNA, 15 bp, Homo sapiens
actcacatatattca

SEQ ID NO: 1907793 - DNA, 15 bp, Homo sapiens
ctcacatatattcac

SEQ ID NO: 1907794 - DNA, 15 bp, Homo sapiens
tcacatatattcacg

SEQ ID NO: 1907795 - DNA, 15 bp, Homo sapiens
cacatatattcacgt

SEQ ID NO: 1907796 - DNA, 15 bp, Homo sapiens
acatatattcacgtt

SEQ ID NO: 1907797 - DNA, 15 bp, Homo sapiens
catatattcacgtta

SEQ ID NO: 1907798 - DNA, 15 bp, Homo sapiens
atatattcacgttac

SEQ ID NO: 1907799 - DNA, 15 bp, Homo sapiens
tatattcacgttaca

SEQ ID NO: 1907800 - DNA, 15 bp, Homo sapiens
atattcacgttacat

SEQ ID NO: 1907801 - DNA, 15 bp, Homo sapiens
tattcacgttacata

SEQ ID NO: 1907802 - DNA, 15 bp, Homo sapiens
attcacgttacatat

SEQ ID NO: 1907803 - DNA, 15 bp, Homo sapiens
ttcacgttacatata

SEQ ID NO: 1907804 - DNA, 15 bp, Homo sapiens
tcacgttacatatag

SEQ ID NO: 1907805 - DNA, 15 bp, Homo sapiens
cacgttacatatagt

SEQ ID NO: 1907806 - DNA, 15 bp, Homo sapiens
acgttacatatagta

SEQ ID NO: 1907807 - DNA, 15 bp, Homo sapiens
cgttacatatagtat

SEQ ID NO: 1907808 - DNA, 15 bp, Homo sapiens
gttacatatagtatg

SEQ ID NO: 1907809 - DNA, 15 bp, Homo sapiens
ttacatatagtatgt

SEQ ID NO: 1907810 - DNA, 15 bp, Homo sapiens
tacatatagtatgta

SEQ ID NO: 1907811 - DNA, 15 bp, Homo sapiens
acatatagtatgtac

SEQ ID NO: 1907812 - DNA, 15 bp, Homo sapiens
catatagtatgtact

SEQ ID NO: 1907813 - DNA, 15 bp, Homo sapiens
atatagtatgtactg

SEQ ID NO: 1907814 - DNA, 15 bp, Homo sapiens
tatagtatgtactgt

SEQ ID NO: 1907815 - DNA, 15 bp, Homo sapiens
atagtatgtactgtt

SEQ ID NO: 1907816 - DNA, 15 bp, Homo sapiens
tagtatgtactgttg

SEQ ID NO: 1907817 - DNA, 15 bp, Homo sapiens
agtatgtactgttgc

SEQ ID NO: 1907818 - DNA, 15 bp, Homo sapiens
gtatgtactgttgca

SEQ ID NO: 1907819 - DNA, 15 bp, Homo sapiens
tatgtactgttgcat

SEQ ID NO: 1907820 - DNA, 15 bp, Homo sapiens
atgtactgttgcata

SEQ ID NO: 1907821 - DNA, 15 bp, Homo sapiens
tgtactgttgcatac

SEQ ID NO: 1907822 - DNA, 15 bp, Homo sapiens
gtactgttgcatacg

SEQ ID NO: 1907823 - DNA, 15 bp, Homo sapiens
tactgttgcatacgc

SEQ ID NO: 1907824 - DNA, 15 bp, Homo sapiens
actgttgcatacgca

SEQ ID NO: 1907825 - DNA, 15 bp, Homo sapiens
ctgttgcatacgcac

SEQ ID NO: 1907826 - DNA, 15 bp, Homo sapiens
tgttgcatacgcaca

SEQ ID NO: 1907827 - DNA, 15 bp, Homo sapiens
gttgcatacgcacat

SEQ ID NO: 1907828 - DNA, 15 bp, Homo sapiens
ttgcatacgcacata

SEQ ID NO: 1907829 - DNA, 15 bp, Homo sapiens
tgcatacgcacatat

SEQ ID NO: 1907830 - DNA, 15 bp, Homo sapiens
gcatacgcacatata

SEQ ID NO: 1907831 - DNA, 15 bp, Homo sapiens
catacgcacatatat

SEQ ID NO: 1907832 - DNA, 15 bp, Homo sapiens
atacgcacatatatg

SEQ ID NO: 1907833 - DNA, 15 bp, Homo sapiens
tacgcacatatatgg

SEQ ID NO: 1907834 - DNA, 15 bp, Homo sapiens
acgcacatatatggt

SEQ ID NO: 1907835 - DNA, 15 bp, Homo sapiens
cgcacatatatggta

SEQ ID NO: 1907836 - DNA, 15 bp, Homo sapiens
gcacatatatggtat

SEQ ID NO: 1907837 - DNA, 15 bp, Homo sapiens
cacatatatggtata

SEQ ID NO: 1907838 - DNA, 15 bp, Homo sapiens
acatatatggtataa

SEQ ID NO: 1907839 - DNA, 15 bp, Homo sapiens
catatatggtataaa

SEQ ID NO: 1907840 - DNA, 15 bp, Homo sapiens
atatatggtataaaa

SEQ ID NO: 1907841 - DNA, 15 bp, Homo sapiens
tatatggtataaaat

SEQ ID NO: 1907842 - DNA, 15 bp, Homo sapiens
atatggtataaaatt

SEQ ID NO: 1907843 - DNA, 15 bp, Homo sapiens
tatggtataaaatta

SEQ ID NO: 1907844 - DNA, 15 bp, Homo sapiens
atggtataaaattat

SEQ ID NO: 1907845 - DNA, 15 bp, Homo sapiens
tggtataaaattatt

SEQ ID NO: 1907846 - DNA, 15 bp, Homo sapiens
ggtataaaattattg

SEQ ID NO: 1907847 - DNA, 15 bp, Homo sapiens
gtataaaattattgc

SEQ ID NO: 1907848 - DNA, 15 bp, Homo sapiens
tataaaattattgca

SEQ ID NO: 1907849 - DNA, 15 bp, Homo sapiens
ataaaattattgcac

SEQ ID NO: 1907850 - DNA, 15 bp, Homo sapiens
taaaattattgcact

SEQ ID NO: 1907851 - DNA, 15 bp, Homo sapiens
aaaattattgcactg

SEQ ID NO: 1907852 - DNA, 15 bp, Homo sapiens
aaattattgcactgt

SEQ ID NO: 1907853 - DNA, 15 bp, Homo sapiens
aattattgcactgta

SEQ ID NO: 1907854 - DNA, 15 bp, Homo sapiens
attattgcactgtaa

SEQ ID NO: 1907855 - DNA, 15 bp, Homo sapiens
ttattgcactgtaac

SEQ ID NO: 1907856 - DNA, 15 bp, Homo sapiens
tattgcactgtaaca

SEQ ID NO: 1907857 - DNA, 15 bp, Homo sapiens
attgcactgtaacat

SEQ ID NO: 1907858 - DNA, 15 bp, Homo sapiens
ttgcactgtaacatc

SEQ ID NO: 1907859 - DNA, 15 bp, Homo sapiens
tgcactgtaacatca

SEQ ID NO: 1907860 - DNA, 15 bp, Homo sapiens
gcactgtaacatcac

SEQ ID NO: 1907861 - DNA, 15 bp, Homo sapiens
cactgtaacatcaca

SEQ ID NO: 1907862 - DNA, 15 bp, Homo sapiens
actgtaacatcacaa

SEQ ID NO: 1907863 - DNA, 15 bp, Homo sapiens
ctgtaacatcacaaa

SEQ ID NO: 1907864 - DNA, 15 bp, Homo sapiens
tgtaacatcacaaag

SEQ ID NO: 1907865 - DNA, 15 bp, Homo sapiens
gtaacatcacaaagt

SEQ ID NO: 1907866 - DNA, 15 bp, Homo sapiens
taacatcacaaagta

SEQ ID NO: 1907867 - DNA, 15 bp, Homo sapiens
aacatcacaaagtat

SEQ ID NO: 1907868 - DNA, 15 bp, Homo sapiens
acatcacaaagtata

SEQ ID NO: 1907869 - DNA, 15 bp, Homo sapiens
catcacaaagtatat

SEQ ID NO: 1907870 - DNA, 15 bp, Homo sapiens
atcacaaagtatatc

SEQ ID NO: 1907871 - DNA, 15 bp, Homo sapiens
tcacaaagtatatca

SEQ ID NO: 1907872 - DNA, 15 bp, Homo sapiens
cacaaagtatatcac

SEQ ID NO: 1907873 - DNA, 15 bp, Homo sapiens
acaaagtatatcaca

SEQ ID NO: 1907874 - DNA, 15 bp, Homo sapiens
caaagtatatcacat

SEQ ID NO: 1907875 - DNA, 15 bp, Homo sapiens
aaagtatatcacata

SEQ ID NO: 1907876 - DNA, 15 bp, Homo sapiens
aagtatatcacataa

SEQ ID NO: 1907877 - DNA, 15 bp, Homo sapiens
agtatatcacataag

SEQ ID NO: 1907878 - DNA, 15 bp, Homo sapiens
gtatatcacataagt

SEQ ID NO: 1907879 - DNA, 15 bp, Homo sapiens
tatatcacataagtt

SEQ ID NO: 1907880 - DNA, 15 bp, Homo sapiens
atatcacataagtta

SEQ ID NO: 1907881 - DNA, 15 bp, Homo sapiens
tatcacataagttaa

SEQ ID NO: 1907882 - DNA, 15 bp, Homo sapiens
atcacataagttaac

SEQ ID NO: 1907883 - DNA, 15 bp, Homo sapiens
tcacataagttaact

SEQ ID NO: 1907884 - DNA, 15 bp, Homo sapiens
cacataagttaactc

SEQ ID NO: 1907885 - DNA, 15 bp, Homo sapiens
acataagttaactca

SEQ ID NO: 1907886 - DNA, 15 bp, Homo sapiens
cataagttaactcaa

SEQ ID NO: 1907887 - DNA, 15 bp, Homo sapiens
ataagttaactcaac

SEQ ID NO: 1907888 - DNA, 15 bp, Homo sapiens
taagttaactcaacc

SEQ ID NO: 1907889 - DNA, 15 bp, Homo sapiens
aagttaactcaacct

SEQ ID NO: 1907890 - DNA, 15 bp, Homo sapiens
agttaactcaacctt

SEQ ID NO: 1907891 - DNA, 15 bp, Homo sapiens
gttaactcaaccttc

SEQ ID NO: 1907892 - DNA, 15 bp, Homo sapiens
ttaactcaaccttca

SEQ ID NO: 1907893 - DNA, 15 bp, Homo sapiens
taactcaaccttcac

SEQ ID NO: 1907894 - DNA, 15 bp, Homo sapiens
aactcaaccttcaca

SEQ ID NO: 1907895 - DNA, 15 bp, Homo sapiens
actcaaccttcacaa

SEQ ID NO: 1907896 - DNA, 15 bp, Homo sapiens
ctcaaccttcacaag

SEQ ID NO: 1907897 - DNA, 15 bp, Homo sapiens
tcaaccttcacaaga

SEQ ID NO: 1907898 - DNA, 15 bp, Homo sapiens
caaccttcacaagaa

SEQ ID NO: 1907899 - DNA, 15 bp, Homo sapiens
aaccttcacaagaac

SEQ ID NO: 1907900 - DNA, 15 bp, Homo sapiens
accttcacaagaact

SEQ ID NO: 1907901 - DNA, 15 bp, Homo sapiens
ccttcacaagaactt

SEQ ID NO: 1907902 - DNA, 15 bp, Homo sapiens
cttcacaagaacttt

SEQ ID NO: 1907903 - DNA, 15 bp, Homo sapiens
ttcacaagaacttta

SEQ ID NO: 1907904 - DNA, 15 bp, Homo sapiens
tcacaagaactttat

SEQ ID NO: 1907905 - DNA, 15 bp, Homo sapiens
cacaagaactttatg

SEQ ID NO: 1907906 - DNA, 15 bp, Homo sapiens
acaagaactttatga

SEQ ID NO: 1907907 - DNA, 15 bp, Homo sapiens
caagaactttatgag

SEQ ID NO: 1907908 - DNA, 15 bp, Homo sapiens
aagaactttatgagg

SEQ ID NO: 1907909 - DNA, 15 bp, Homo sapiens
agaactttatgaggt

SEQ ID NO: 1907910 - DNA, 15 bp, Homo sapiens
gaactttatgaggta

SEQ ID NO: 1907911 - DNA, 15 bp, Homo sapiens
aactttatgaggtat

SEQ ID NO: 1907912 - DNA, 15 bp, Homo sapiens
actttatgaggtata

SEQ ID NO: 1907913 - DNA, 15 bp, Homo sapiens
ctttatgaggtatat

SEQ ID NO: 1907914 - DNA, 15 bp, Homo sapiens
tttatgaggtatata

SEQ ID NO: 1907915 - DNA, 15 bp, Homo sapiens
ttatgaggtatatac

SEQ ID NO: 1907916 - DNA, 15 bp, Homo sapiens
tatgaggtatatact

SEQ ID NO: 1907917 - DNA, 15 bp, Homo sapiens
atgaggtatatactg

SEQ ID NO: 1907918 - DNA, 15 bp, Homo sapiens
tgaggtatatactgt

SEQ ID NO: 1907919 - DNA, 15 bp, Homo sapiens
gaggtatatactgtt

SEQ ID NO: 1907920 - DNA, 15 bp, Homo sapiens
aggtatatactgtta

SEQ ID NO: 1907921 - DNA, 15 bp, Homo sapiens
ggtatatactgttat

SEQ ID NO: 1907922 - DNA, 15 bp, Homo sapiens
gtatatactgttatt

SEQ ID NO: 1907923 - DNA, 15 bp, Homo sapiens
tatatactgttatta

SEQ ID NO: 1907924 - DNA, 15 bp, Homo sapiens
atatactgttattat

SEQ ID NO: 1907925 - DNA, 15 bp, Homo sapiens
tatactgttattatc

SEQ ID NO: 1907926 - DNA, 15 bp, Homo sapiens
atactgttattatca

SEQ ID NO: 1907927 - DNA, 15 bp, Homo sapiens
tactgttattatcac

SEQ ID NO: 1907928 - DNA, 15 bp, Homo sapiens
actgttattatcacg

SEQ ID NO: 1907929 - DNA, 15 bp, Homo sapiens
ctgttattatcacgc

SEQ ID NO: 1907930 - DNA, 15 bp, Homo sapiens
tgttattatcacgct

SEQ ID NO: 1907931 - DNA, 15 bp, Homo sapiens
gttattatcacgcta

SEQ ID NO: 1907932 - DNA, 15 bp, Homo sapiens
ttattatcacgctaa

SEQ ID NO: 1907933 - DNA, 15 bp, Homo sapiens
tattatcacgctaat

SEQ ID NO: 1907934 - DNA, 15 bp, Homo sapiens
attatcacgctaatt

SEQ ID NO: 1907935 - DNA, 15 bp, Homo sapiens
ttatcacgctaattt

SEQ ID NO: 1907936 - DNA, 15 bp, Homo sapiens
tatcacgctaatttt

SEQ ID NO: 1907937 - DNA, 15 bp, Homo sapiens
atcacgctaatttta

SEQ ID NO: 1907938 - DNA, 15 bp, Homo sapiens
tcacgctaattttac

SEQ ID NO: 1907939 - DNA, 15 bp, Homo sapiens
cacgctaattttacg

SEQ ID NO: 1907940 - DNA, 15 bp, Homo sapiens
acgctaattttacgg

SEQ ID NO: 1907941 - DNA, 15 bp, Homo sapiens
cgctaattttacgga

SEQ ID NO: 1907942 - DNA, 15 bp, Homo sapiens
gctaattttacggaa

SEQ ID NO: 1907943 - DNA, 15 bp, Homo sapiens
ctaattttacggaag

SEQ ID NO: 1907944 - DNA, 15 bp, Homo sapiens
taattttacggaaga

SEQ ID NO: 1907945 - DNA, 15 bp, Homo sapiens
aattttacggaagaa

SEQ ID NO: 1907946 - DNA, 15 bp, Homo sapiens
attttacggaagaaa

SEQ ID NO: 1907947 - DNA, 15 bp, Homo sapiens
ttttacggaagaaaa

SEQ ID NO: 1907948 - DNA, 15 bp, Homo sapiens
tttacggaagaaaag

SEQ ID NO: 1907949 - DNA, 15 bp, Homo sapiens
ttacggaagaaaaga

SEQ ID NO: 1907950 - DNA, 15 bp, Homo sapiens
tacggaagaaaagac

SEQ ID NO: 1907951 - DNA, 15 bp, Homo sapiens
acggaagaaaagaca

SEQ ID NO: 1907952 - DNA, 15 bp, Homo sapiens
cggaagaaaagacaa

SEQ ID NO: 1907953 - DNA, 15 bp, Homo sapiens
ggaagaaaagacaaa

SEQ ID NO: 1907954 - DNA, 15 bp, Homo sapiens
gaagaaaagacaaat

SEQ ID NO: 1907955 - DNA, 15 bp, Homo sapiens
aagaaaagacaaatg

SEQ ID NO: 1907956 - DNA, 15 bp, Homo sapiens
agaaaagacaaatgt

SEQ ID NO: 1907957 - DNA, 15 bp, Homo sapiens
gaaaagacaaatgta

SEQ ID NO: 1907958 - DNA, 15 bp, Homo sapiens
aaaagacaaatgtaa

SEQ ID NO: 1907959 - DNA, 15 bp, Homo sapiens
aaagacaaatgtaaa

SEQ ID NO: 1907960 - DNA, 15 bp, Homo sapiens
aagacaaatgtaaaa

SEQ ID NO: 1907961 - DNA, 15 bp, Homo sapiens
agacaaatgtaaaaa

SEQ ID NO: 1907962 - DNA, 15 bp, Homo sapiens
gacaaatgtaaaaaa

SEQ ID NO: 1907963 - DNA, 15 bp, Homo sapiens
acaaatgtaaaaaag

SEQ ID NO: 1907964 - DNA, 15 bp, Homo sapiens
caaatgtaaaaaagc

SEQ ID NO: 1907965 - DNA, 15 bp, Homo sapiens
aaatgtaaaaaagca

SEQ ID NO: 1907966 - DNA, 15 bp, Homo sapiens
aatgtaaaaaagcat

SEQ ID NO: 1907967 - DNA, 15 bp, Homo sapiens
tgtaaaaaagcatta

SEQ ID NO: 1907968 - DNA, 15 bp, Homo sapiens
gtaaaaaagcattag

SEQ ID NO: 1907969 - DNA, 15 bp, Homo sapiens
taaaaaagcattaga

SEQ ID NO: 1907970 - DNA, 15 bp, Homo sapiens
aaaaaagcattagaa

SEQ ID NO: 1907971 - DNA, 15 bp, Homo sapiens
aaaaagcattagaaa

SEQ ID NO: 1907972 - DNA, 15 bp, Homo sapiens
aaaagcattagaaat

SEQ ID NO: 1907973 - DNA, 15 bp, Homo sapiens
aaagcattagaaatt

SEQ ID NO: 1907974 - DNA, 15 bp, Homo sapiens
aagcattagaaattg

SEQ ID NO: 1907975 - DNA, 15 bp, Homo sapiens
agcattagaaattgc

SEQ ID NO: 1907976 - DNA, 15 bp, Homo sapiens
gcattagaaattgcc

SEQ ID NO: 1907977 - DNA, 15 bp, Homo sapiens
cattagaaattgccc

SEQ ID NO: 1907978 - DNA, 15 bp, Homo sapiens
attagaaattgccca

SEQ ID NO: 1907979 - DNA, 15 bp, Homo sapiens
ttagaaattgcccaa

SEQ ID NO: 1907980 - DNA, 15 bp, Homo sapiens
tagaaattgcccaag

SEQ ID NO: 1907981 - DNA, 15 bp, Homo sapiens
agaaattgcccaagg

SEQ ID NO: 1907982 - DNA, 15 bp, Homo sapiens
gaaattgcccaaggc

SEQ ID NO: 1907983 - DNA, 15 bp, Homo sapiens
aaattgcccaaggcc

SEQ ID NO: 1907984 - DNA, 15 bp, Homo sapiens
aattgcccaaggcca

SEQ ID NO: 1907985 - DNA, 15 bp, Homo sapiens
attgcccaaggccac

SEQ ID NO: 1907986 - DNA, 15 bp, Homo sapiens
ttgcccaaggccact

SEQ ID NO: 1907987 - DNA, 15 bp, Homo sapiens
tgcccaaggccactt

SEQ ID NO: 1907988 - DNA, 15 bp, Homo sapiens
gcccaaggccactta

SEQ ID NO: 1907989 - DNA, 15 bp, Homo sapiens
cccaaggccacttag

SEQ ID NO: 1907990 - DNA, 15 bp, Homo sapiens
ccaaggccacttaga

SEQ ID NO: 1907991 - DNA, 15 bp, Homo sapiens
caaggccacttagat

SEQ ID NO: 1907992 - DNA, 15 bp, Homo sapiens
aaggccacttagata

SEQ ID NO: 1907993 - DNA, 15 bp, Homo sapiens
aggccacttagataa

SEQ ID NO: 1907994 - DNA, 15 bp, Homo sapiens
ggccacttagataat

SEQ ID NO: 1907995 - DNA, 15 bp, Homo sapiens
gccacttagataata

SEQ ID NO: 1907996 - DNA, 15 bp, Homo sapiens
ccacttagataataa

SEQ ID NO: 1907997 - DNA, 15 bp, Homo sapiens
cacttagataataag

SEQ ID NO: 1907998 - DNA, 15 bp, Homo sapiens
acttagataataagg

SEQ ID NO: 1907999 - DNA, 15 bp, Homo sapiens
cttagataataagga

SEQ ID NO: 1908000 - DNA, 15 bp, Homo sapiens
ttagataataaggag

SEQ ID NO: 1908001 - DNA, 15 bp, Homo sapiens
tagataataaggagc

SEQ ID NO: 1908002 - DNA, 15 bp, Homo sapiens
agataataaggagca

SEQ ID NO: 1908003 - DNA, 15 bp, Homo sapiens
gataataaggagcaa

SEQ ID NO: 1908004 - DNA, 15 bp, Homo sapiens
ataataaggagcaaa

SEQ ID NO: 1908005 - DNA, 15 bp, Homo sapiens
taataaggagcaaag

SEQ ID NO: 1908006 - DNA, 15 bp, Homo sapiens
aataaggagcaaagc

SEQ ID NO: 1908007 - DNA, 15 bp, Homo sapiens
ataaggagcaaagcc

SEQ ID NO: 1908008 - DNA, 15 bp, Homo sapiens
taaggagcaaagcct

SEQ ID NO: 1908009 - DNA, 15 bp, Homo sapiens
aaggagcaaagccta

SEQ ID NO: 1908010 - DNA, 15 bp, Homo sapiens
aggagcaaagcctag

SEQ ID NO: 1908011 - DNA, 15 bp, Homo sapiens
ggagcaaagcctagg

SEQ ID NO: 1908012 - DNA, 15 bp, Homo sapiens
gagcaaagcctaggt

SEQ ID NO: 1908013 - DNA, 15 bp, Homo sapiens
agcaaagcctaggtt

SEQ ID NO: 1908014 - DNA, 15 bp, Homo sapiens
gcaaagcctaggttt

SEQ ID NO: 1908015 - DNA, 15 bp, Homo sapiens
caaagcctaggtttg

SEQ ID NO: 1908016 - DNA, 15 bp, Homo sapiens
aaagcctaggtttgg

SEQ ID NO: 1908017 - DNA, 15 bp, Homo sapiens
aagcctaggtttggg

SEQ ID NO: 1908018 - DNA, 15 bp, Homo sapiens
agcctaggtttgggt

SEQ ID NO: 1908019 - DNA, 15 bp, Homo sapiens
gcctaggtttgggtc

SEQ ID NO: 1908020 - DNA, 15 bp, Homo sapiens
cctaggtttgggtcc

SEQ ID NO: 1908021 - DNA, 15 bp, Homo sapiens
ctaggtttgggtcca

SEQ ID NO: 1908022 - DNA, 15 bp, Homo sapiens
taggtttgggtccat

SEQ ID NO: 1908023 - DNA, 15 bp, Homo sapiens
aggtttgggtccatc

SEQ ID NO: 1908024 - DNA, 15 bp, Homo sapiens
ggtttgggtccatct

SEQ ID NO: 1908025 - DNA, 15 bp, Homo sapiens
gtttgggtccatctg

SEQ ID NO: 1908026 - DNA, 15 bp, Homo sapiens
tttgggtccatctgt

SEQ ID NO: 1908027 - DNA, 15 bp, Homo sapiens
ttgggtccatctgtt

SEQ ID NO: 1908028 - DNA, 15 bp, Homo sapiens
tgggtccatctgttc

SEQ ID NO: 1908029 - DNA, 15 bp, Homo sapiens
gggtccatctgttca

SEQ ID NO: 1908030 - DNA, 15 bp, Homo sapiens
ggtccatctgttcat

SEQ ID NO: 1908031 - DNA, 15 bp, Homo sapiens
gtccatctgttcata

SEQ ID NO: 1908032 - DNA, 15 bp, Homo sapiens
tccatctgttcatat

SEQ ID NO: 1908033 - DNA, 15 bp, Homo sapiens
ccatctgttcatatt

SEQ ID NO: 1908034 - DNA, 15 bp, Homo sapiens
catctgttcatattc

SEQ ID NO: 1908035 - DNA, 15 bp, Homo sapiens
atctgttcatattct

SEQ ID NO: 1908036 - DNA, 15 bp, Homo sapiens
tctgttcatattctt

SEQ ID NO: 1908037 - DNA, 15 bp, Homo sapiens
ctgttcatattctta

SEQ ID NO: 1908038 - DNA, 15 bp, Homo sapiens
tgttcatattcttac

SEQ ID NO: 1908039 - DNA, 15 bp, Homo sapiens
gttcatattcttacc

SEQ ID NO: 1908040 - DNA, 15 bp, Homo sapiens
ttcatattcttacca

SEQ ID NO: 1908041 - DNA, 15 bp, Homo sapiens
tcatattcttaccat

SEQ ID NO: 1908042 - DNA, 15 bp, Homo sapiens
catattcttaccatt

SEQ ID NO: 1908043 - DNA, 15 bp, Homo sapiens
atattcttaccatta

SEQ ID NO: 1908044 - DNA, 15 bp, Homo sapiens
tattcttaccattat

SEQ ID NO: 1908045 - DNA, 15 bp, Homo sapiens
attcttaccattata

SEQ ID NO: 1908046 - DNA, 15 bp, Homo sapiens
ttcttaccattatat

SEQ ID NO: 1908047 - DNA, 15 bp, Homo sapiens
tcttaccattatatt

SEQ ID NO: 1908048 - DNA, 15 bp, Homo sapiens
cttaccattatattt

SEQ ID NO: 1908049 - DNA, 15 bp, Homo sapiens
ttaccattatatttt

SEQ ID NO: 1908050 - DNA, 15 bp, Homo sapiens
taccattatatttta

SEQ ID NO: 1908051 - DNA, 15 bp, Homo sapiens
accattatattttat

SEQ ID NO: 1908052 - DNA, 15 bp, Homo sapiens
ccattatattttatt

SEQ ID NO: 1908053 - DNA, 15 bp, Homo sapiens
ttatattttattttc

SEQ ID NO: 1908054 - DNA, 15 bp, Homo sapiens
tatattttattttct

SEQ ID NO: 1908055 - DNA, 15 bp, Homo sapiens
atattttattttctt

SEQ ID NO: 1908056 - DNA, 15 bp, Homo sapiens
tattttattttcttg

SEQ ID NO: 1908057 - DNA, 15 bp, Homo sapiens
attttattttcttgt

SEQ ID NO: 1908058 - DNA, 15 bp, Homo sapiens
ttttattttcttgtc

SEQ ID NO: 1908059 - DNA, 15 bp, Homo sapiens
tttattttcttgtct

SEQ ID NO: 1908060 - DNA, 15 bp, Homo sapiens
ttattttcttgtctt

SEQ ID NO: 1908061 - DNA, 15 bp, Homo sapiens
tattttcttgtcttt

SEQ ID NO: 1908062 - DNA, 15 bp, Homo sapiens
attttcttgtctttt

SEQ ID NO: 1908063 - DNA, 15 bp, Homo sapiens
tttcttgtctttttc

SEQ ID NO: 1908064 - DNA, 15 bp, Homo sapiens
ttcttgtctttttct

SEQ ID NO: 1908065 - DNA, 15 bp, Homo sapiens
tcttgtctttttctc

SEQ ID NO: 1908066 - DNA, 15 bp, Homo sapiens
cttgtctttttctca

SEQ ID NO: 1908067 - DNA, 15 bp, Homo sapiens
ttgtctttttctcat

SEQ ID NO: 1908068 - DNA, 15 bp, Homo sapiens
tgtctttttctcatc

SEQ ID NO: 1908069 - DNA, 15 bp, Homo sapiens
gtctttttctcatcc

SEQ ID NO: 1908070 - DNA, 15 bp, Homo sapiens
tctttttctcatcct

SEQ ID NO: 1908071 - DNA, 15 bp, Homo sapiens
ctttttctcatcctg

SEQ ID NO: 1908072 - DNA, 15 bp, Homo sapiens
tttttctcatcctgc

SEQ ID NO: 1908073 - DNA, 15 bp, Homo sapiens
ttttctcatcctgcc

SEQ ID NO: 1908074 - DNA, 15 bp, Homo sapiens
tttctcatcctgcca

SEQ ID NO: 1908075 - DNA, 15 bp, Homo sapiens
ttctcatcctgccac

SEQ ID NO: 1908076 - DNA, 15 bp, Homo sapiens
tctcatcctgccaca

SEQ ID NO: 1908077 - DNA, 15 bp, Homo sapiens
ctcatcctgccacac

SEQ ID NO: 1908078 - DNA, 15 bp, Homo sapiens
tcatcctgccacact

SEQ ID NO: 1908079 - DNA, 15 bp, Homo sapiens
catcctgccacactc

SEQ ID NO: 1908080 - DNA, 15 bp, Homo sapiens
atcctgccacactct

SEQ ID NO: 1908081 - DNA, 15 bp, Homo sapiens
tcctgccacactctt

SEQ ID NO: 1908082 - DNA, 15 bp, Homo sapiens
cctgccacactcttc

SEQ ID NO: 1908083 - DNA, 15 bp, Homo sapiens
ctgccacactcttct

SEQ ID NO: 1908084 - DNA, 15 bp, Homo sapiens
tgccacactcttcta

SEQ ID NO: 1908085 - DNA, 15 bp, Homo sapiens
gccacactcttctat

SEQ ID NO: 1908086 - DNA, 15 bp, Homo sapiens
ccacactcttctatc

SEQ ID NO: 1908087 - DNA, 15 bp, Homo sapiens
cacactcttctatca

SEQ ID NO: 1908088 - DNA, 15 bp, Homo sapiens
acactcttctatcat

SEQ ID NO: 1908089 - DNA, 15 bp, Homo sapiens
cactcttctatcatc

SEQ ID NO: 1908090 - DNA, 15 bp, Homo sapiens
actcttctatcatcc

SEQ ID NO: 1908091 - DNA, 15 bp, Homo sapiens
ctcttctatcatccc

SEQ ID NO: 1908092 - DNA, 15 bp, Homo sapiens
tcttctatcatccct

SEQ ID NO: 1908093 - DNA, 15 bp, Homo sapiens
cttctatcatccctc

SEQ ID NO: 1908094 - DNA, 15 bp, Homo sapiens
ttctatcatccctca

SEQ ID NO: 1908095 - DNA, 15 bp, Homo sapiens
tctatcatccctcat

SEQ ID NO: 1908096 - DNA, 15 bp, Homo sapiens
ctatcatccctcatt

SEQ ID NO: 1908097 - DNA, 15 bp, Homo sapiens
tatcatccctcattt

SEQ ID NO: 1908098 - DNA, 15 bp, Homo sapiens
atcatccctcatttt

SEQ ID NO: 1908099 - DNA, 15 bp, Homo sapiens
tcatccctcattttc

SEQ ID NO: 1908100 - DNA, 15 bp, Homo sapiens
catccctcattttcc

SEQ ID NO: 1908101 - DNA, 15 bp, Homo sapiens
atccctcattttccc

SEQ ID NO: 1908102 - DNA, 15 bp, Homo sapiens
tccctcattttccct

SEQ ID NO: 1908103 - DNA, 15 bp, Homo sapiens
ccctcattttccctc

SEQ ID NO: 1908104 - DNA, 15 bp, Homo sapiens
cctcattttccctct

SEQ ID NO: 1908105 - DNA, 15 bp, Homo sapiens
tcattttccctctct

SEQ ID NO: 1908106 - DNA, 15 bp, Homo sapiens
cattttccctctctc

SEQ ID NO: 1908107 - DNA, 15 bp, Homo sapiens
attttccctctctct

SEQ ID NO: 1908108 - DNA, 15 bp, Homo sapiens
ttttccctctctctc

SEQ ID NO: 1908109 - DNA, 15 bp, Homo sapiens
ttccctctctctcta

SEQ ID NO: 1908110 - DNA, 15 bp, Homo sapiens
tccctctctctctaa

SEQ ID NO: 1908111 - DNA, 15 bp, Homo sapiens
ccctctctctctaaa

SEQ ID NO: 1908112 - DNA, 15 bp, Homo sapiens
cctctctctctaaat

SEQ ID NO: 1908113 - DNA, 15 bp, Homo sapiens
ctctctctctaaatt

SEQ ID NO: 1908114 - DNA, 15 bp, Homo sapiens
tctctctctaaattt

SEQ ID NO: 1908115 - DNA, 15 bp, Homo sapiens
ctctctctaaatttt

SEQ ID NO: 1908116 - DNA, 15 bp, Homo sapiens
tctctctaaattttg

SEQ ID NO: 1908117 - DNA, 15 bp, Homo sapiens
ctctctaaattttgt

SEQ ID NO: 1908118 - DNA, 15 bp, Homo sapiens
tctctaaattttgtg

SEQ ID NO: 1908119 - DNA, 15 bp, Homo sapiens
ctctaaattttgtgt

SEQ ID NO: 1908120 - DNA, 15 bp, Homo sapiens
tctaaattttgtgtc

SEQ ID NO: 1908121 - DNA, 15 bp, Homo sapiens
ctaaattttgtgtca

SEQ ID NO: 1908122 - DNA, 15 bp, Homo sapiens
taaattttgtgtcat

SEQ ID NO: 1908123 - DNA, 15 bp, Homo sapiens
aaattttgtgtcatg

SEQ ID NO: 1908124 - DNA, 15 bp, Homo sapiens
aattttgtgtcatga

SEQ ID NO: 1908125 - DNA, 15 bp, Homo sapiens
attttgtgtcatgaa

SEQ ID NO: 1908126 - DNA, 15 bp, Homo sapiens
ttttgtgtcatgaag

SEQ ID NO: 1908127 - DNA, 15 bp, Homo sapiens
tttgtgtcatgaaga

SEQ ID NO: 1908128 - DNA, 15 bp, Homo sapiens
ttgtgtcatgaagaa

SEQ ID NO: 1908129 - DNA, 15 bp, Homo sapiens
tgtgtcatgaagaat

SEQ ID NO: 1908130 - DNA, 15 bp, Homo sapiens
gtgtcatgaagaatt

SEQ ID NO: 1908131 - DNA, 15 bp, Homo sapiens
tgtcatgaagaatta

SEQ ID NO: 1908132 - DNA, 15 bp, Homo sapiens
gtcatgaagaattaa

SEQ ID NO: 1908133 - DNA, 15 bp, Homo sapiens
tcatgaagaattaat

SEQ ID NO: 1908134 - DNA, 15 bp, Homo sapiens
catgaagaattaatg

SEQ ID NO: 1908135 - DNA, 15 bp, Homo sapiens
atgaagaattaatgg

SEQ ID NO: 1908136 - DNA, 15 bp, Homo sapiens
tgaagaattaatgga

SEQ ID NO: 1908137 - DNA, 15 bp, Homo sapiens
gaagaattaatggaa

SEQ ID NO: 1908138 - DNA, 15 bp, Homo sapiens
aagaattaatggaag

SEQ ID NO: 1908139 - DNA, 15 bp, Homo sapiens
agaattaatggaaga

SEQ ID NO: 1908140 - DNA, 15 bp, Homo sapiens
gaattaatggaagaa

SEQ ID NO: 1908141 - DNA, 15 bp, Homo sapiens
aattaatggaagaaa

SEQ ID NO: 1908142 - DNA, 15 bp, Homo sapiens
attaatggaagaaat

SEQ ID NO: 1908143 - DNA, 15 bp, Homo sapiens
ttaatggaagaaata

SEQ ID NO: 1908144 - DNA, 15 bp, Homo sapiens
taatggaagaaataa

SEQ ID NO: 1908145 - DNA, 15 bp, Homo sapiens
aatggaagaaataag

SEQ ID NO: 1908146 - DNA, 15 bp, Homo sapiens
atggaagaaataagc

SEQ ID NO: 1908147 - DNA, 15 bp, Homo sapiens
tggaagaaataagct

SEQ ID NO: 1908148 - DNA, 15 bp, Homo sapiens
ggaagaaataagctg

SEQ ID NO: 1908149 - DNA, 15 bp, Homo sapiens
gaagaaataagctga

SEQ ID NO: 1908150 - DNA, 15 bp, Homo sapiens
aagaaataagctgaa

SEQ ID NO: 1908151 - DNA, 15 bp, Homo sapiens
agaaataagctgaat

SEQ ID NO: 1908152 - DNA, 15 bp, Homo sapiens
gaaataagctgaatg

SEQ ID NO: 1908153 - DNA, 15 bp, Homo sapiens
aaataagctgaatgt

SEQ ID NO: 1908154 - DNA, 15 bp, Homo sapiens
aataagctgaatgtt

SEQ ID NO: 1908155 - DNA, 15 bp, Homo sapiens
ataagctgaatgttg

SEQ ID NO: 1908156 - DNA, 15 bp, Homo sapiens
taagctgaatgttgc

SEQ ID NO: 1908157 - DNA, 15 bp, Homo sapiens
aagctgaatgttgcc

SEQ ID NO: 1908158 - DNA, 15 bp, Homo sapiens
agctgaatgttgcca

SEQ ID NO: 1908159 - DNA, 15 bp, Homo sapiens
gctgaatgttgccat

SEQ ID NO: 1908160 - DNA, 15 bp, Homo sapiens
ctgaatgttgccatc

SEQ ID NO: 1908161 - DNA, 15 bp, Homo sapiens
tgaatgttgccatcg

SEQ ID NO: 1908162 - DNA, 15 bp, Homo sapiens
gaatgttgccatcgc

SEQ ID NO: 1908163 - DNA, 15 bp, Homo sapiens
aatgttgccatcgct

SEQ ID NO: 1908164 - DNA, 15 bp, Homo sapiens
atgttgccatcgctt

SEQ ID NO: 1908165 - DNA, 15 bp, Homo sapiens
tgttgccatcgctta

SEQ ID NO: 1908166 - DNA, 15 bp, Homo sapiens
gttgccatcgcttaa

SEQ ID NO: 1908167 - DNA, 15 bp, Homo sapiens
ttgccatcgcttaac

SEQ ID NO: 1908168 - DNA, 15 bp, Homo sapiens
tgccatcgcttaacc

SEQ ID NO: 1908169 - DNA, 15 bp, Homo sapiens
gccatcgcttaacca

SEQ ID NO: 1908170 - DNA, 15 bp, Homo sapiens
ccatcgcttaaccat

SEQ ID NO: 1908171 - DNA, 15 bp, Homo sapiens
catcgcttaaccatt

SEQ ID NO: 1908172 - DNA, 15 bp, Homo sapiens
atcgcttaaccatta

SEQ ID NO: 1908173 - DNA, 15 bp, Homo sapiens
tcgcttaaccattac

SEQ ID NO: 1908174 - DNA, 15 bp, Homo sapiens
cgcttaaccattact

SEQ ID NO: 1908175 - DNA, 15 bp, Homo sapiens
gcttaaccattactt

SEQ ID NO: 1908176 - DNA, 15 bp, Homo sapiens
cttaaccattacttc

SEQ ID NO: 1908177 - DNA, 15 bp, Homo sapiens
ttaaccattacttct

SEQ ID NO: 1908178 - DNA, 15 bp, Homo sapiens
taaccattacttctt

SEQ ID NO: 1908179 - DNA, 15 bp, Homo sapiens
aaccattacttcttt

SEQ ID NO: 1908180 - DNA, 15 bp, Homo sapiens
accattacttctttg

SEQ ID NO: 1908181 - DNA, 15 bp, Homo sapiens
ccattacttctttga

SEQ ID NO: 1908182 - DNA, 15 bp, Homo sapiens
cattacttctttgat

SEQ ID NO: 1908183 - DNA, 15 bp, Homo sapiens
attacttctttgatg

SEQ ID NO: 1908184 - DNA, 15 bp, Homo sapiens
ttacttctttgatgg

SEQ ID NO: 1908185 - DNA, 15 bp, Homo sapiens
tacttctttgatgga

SEQ ID NO: 1908186 - DNA, 15 bp, Homo sapiens
acttctttgatggag

SEQ ID NO: 1908187 - DNA, 15 bp, Homo sapiens
cttctttgatggagt

SEQ ID NO: 1908188 - DNA, 15 bp, Homo sapiens
ttctttgatggagtt

SEQ ID NO: 1908189 - DNA, 15 bp, Homo sapiens
tctttgatggagttt

SEQ ID NO: 1908190 - DNA, 15 bp, Homo sapiens
ctttgatggagtttt

SEQ ID NO: 1908191 - DNA, 15 bp, Homo sapiens
tttgatggagttttg

SEQ ID NO: 1908192 - DNA, 15 bp, Homo sapiens
ttgatggagttttgg

SEQ ID NO: 1908193 - DNA, 15 bp, Homo sapiens
tgatggagttttggt

SEQ ID NO: 1908194 - DNA, 15 bp, Homo sapiens
gatggagttttggta

SEQ ID NO: 1908195 - DNA, 15 bp, Homo sapiens
atggagttttggtac

SEQ ID NO: 1908196 - DNA, 15 bp, Homo sapiens
tggagttttggtact

SEQ ID NO: 1908197 - DNA, 15 bp, Homo sapiens
ggagttttggtactt

SEQ ID NO: 1908198 - DNA, 15 bp, Homo sapiens
gagttttggtacttc

SEQ ID NO: 1908199 - DNA, 15 bp, Homo sapiens
agttttggtacttca

SEQ ID NO: 1908200 - DNA, 15 bp, Homo sapiens
gttttggtacttcat

SEQ ID NO: 1908201 - DNA, 15 bp, Homo sapiens
ttttggtacttcatt

SEQ ID NO: 1908202 - DNA, 15 bp, Homo sapiens
tttggtacttcattt

SEQ ID NO: 1908203 - DNA, 15 bp, Homo sapiens
ttggtacttcatttg

SEQ ID NO: 1908204 - DNA, 15 bp, Homo sapiens
tggtacttcatttgc

SEQ ID NO: 1908205 - DNA, 15 bp, Homo sapiens
ggtacttcatttgcc

SEQ ID NO: 1908206 - DNA, 15 bp, Homo sapiens
gtacttcatttgcct

SEQ ID NO: 1908207 - DNA, 15 bp, Homo sapiens
tacttcatttgccta

SEQ ID NO: 1908208 - DNA, 15 bp, Homo sapiens
acttcatttgcctag

SEQ ID NO: 1908209 - DNA, 15 bp, Homo sapiens
cttcatttgcctagc

SEQ ID NO: 1908210 - DNA, 15 bp, Homo sapiens
ttcatttgcctagca

SEQ ID NO: 1908211 - DNA, 15 bp, Homo sapiens
tcatttgcctagcaa

SEQ ID NO: 1908212 - DNA, 15 bp, Homo sapiens
catttgcctagcaaa

SEQ ID NO: 1908213 - DNA, 15 bp, Homo sapiens
atttgcctagcaaaa

SEQ ID NO: 1908214 - DNA, 15 bp, Homo sapiens
tttgcctagcaaaaa

SEQ ID NO: 1908215 - DNA, 15 bp, Homo sapiens
ttgcctagcaaaaat

SEQ ID NO: 1908216 - DNA, 15 bp, Homo sapiens
tgcctagcaaaaatt

SEQ ID NO: 1908217 - DNA, 15 bp, Homo sapiens
gcctagcaaaaatta

SEQ ID NO: 1908218 - DNA, 15 bp, Homo sapiens
cctagcaaaaattaa

SEQ ID NO: 1908219 - DNA, 15 bp, Homo sapiens
ctagcaaaaattaaa

SEQ ID NO: 1908220 - DNA, 15 bp, Homo sapiens
tagcaaaaattaaat

SEQ ID NO: 1908221 - DNA, 15 bp, Homo sapiens
agcaaaaattaaatt

SEQ ID NO: 1908222 - DNA, 15 bp, Homo sapiens
gcaaaaattaaattc

SEQ ID NO: 1908223 - DNA, 15 bp, Homo sapiens
caaaaattaaattct

SEQ ID NO: 1908224 - DNA, 15 bp, Homo sapiens
aaaaattaaattctg

SEQ ID NO: 1908225 - DNA, 15 bp, Homo sapiens
aaaattaaattctga

SEQ ID NO: 1908226 - DNA, 15 bp, Homo sapiens
aaattaaattctgaa

SEQ ID NO: 1908227 - DNA, 15 bp, Homo sapiens
aattaaattctgaaa

SEQ ID NO: 1908228 - DNA, 15 bp, Homo sapiens
attaaattctgaaaa

SEQ ID NO: 1908229 - DNA, 15 bp, Homo sapiens
ttaaattctgaaaaa

SEQ ID NO: 1908230 - DNA, 15 bp, Homo sapiens
taaattctgaaaaaa

SEQ ID NO: 1908231 - DNA, 15 bp, Homo sapiens
aaattctgaaaaaaa

SEQ ID NO: 1908232 - DNA, 15 bp, Homo sapiens
aattctgaaaaaaaa

SEQ ID NO: 1908233 - DNA, 15 bp, Homo sapiens
attctgaaaaaaaat

SEQ ID NO: 1908234 - DNA, 15 bp, Homo sapiens
ttctgaaaaaaaatt

SEQ ID NO: 1908235 - DNA, 15 bp, Homo sapiens
tctgaaaaaaaatta

SEQ ID NO: 1908236 - DNA, 15 bp, Homo sapiens
ctgaaaaaaaattaa

SEQ ID NO: 1908237 - DNA, 15 bp, Homo sapiens
tgaaaaaaaattaaa

SEQ ID NO: 1908238 - DNA, 15 bp, Homo sapiens
gaaaaaaaattaaat

SEQ ID NO: 1908239 - DNA, 15 bp, Homo sapiens
aaaaaaattaaattt

SEQ ID NO: 1908240 - DNA, 15 bp, Homo sapiens
aaaaaattaaatttt

SEQ ID NO: 1908241 - DNA, 15 bp, Homo sapiens
aaaaattaaattttg

SEQ ID NO: 1908242 - DNA, 15 bp, Homo sapiens
aaaattaaattttga

SEQ ID NO: 1908243 - DNA, 15 bp, Homo sapiens
aaattaaattttgaa

SEQ ID NO: 1908244 - DNA, 15 bp, Homo sapiens
aattaaattttgaaa

SEQ ID NO: 1908245 - DNA, 15 bp, Homo sapiens
attaaattttgaaaa

SEQ ID NO: 1908246 - DNA, 15 bp, Homo sapiens
ttaaattttgaaaaa

SEQ ID NO: 1908247 - DNA, 15 bp, Homo sapiens
taaattttgaaaaaa

SEQ ID NO: 1908248 - DNA, 15 bp, Homo sapiens
aaattttgaaaaaat

SEQ ID NO: 1908249 - DNA, 15 bp, Homo sapiens
aattttgaaaaaatt

SEQ ID NO: 1908250 - DNA, 15 bp, Homo sapiens
attttgaaaaaattc

SEQ ID NO: 1908251 - DNA, 15 bp, Homo sapiens
ttttgaaaaaattca

SEQ ID NO: 1908252 - DNA, 15 bp, Homo sapiens
tttgaaaaaattcaa

SEQ ID NO: 1908253 - DNA, 15 bp, Homo sapiens
ttgaaaaaattcaaa

SEQ ID NO: 1908254 - DNA, 15 bp, Homo sapiens
tgaaaaaattcaaaa

SEQ ID NO: 1908255 - DNA, 15 bp, Homo sapiens
gaaaaaattcaaaac

SEQ ID NO: 1908256 - DNA, 15 bp, Homo sapiens
aaaaaattcaaaacc

SEQ ID NO: 1908257 - DNA, 15 bp, Homo sapiens
aaaaattcaaaacca

SEQ ID NO: 1908258 - DNA, 15 bp, Homo sapiens
aaaattcaaaaccaa

SEQ ID NO: 1908259 - DNA, 15 bp, Homo sapiens
aaattcaaaaccaat

SEQ ID NO: 1908260 - DNA, 15 bp, Homo sapiens
aattcaaaaccaatg

SEQ ID NO: 1908261 - DNA, 15 bp, Homo sapiens
attcaaaaccaatga

SEQ ID NO: 1908262 - DNA, 15 bp, Homo sapiens
ttcaaaaccaatgag

SEQ ID NO: 1908263 - DNA, 15 bp, Homo sapiens
tcaaaaccaatgaga

SEQ ID NO: 1908264 - DNA, 15 bp, Homo sapiens
caaaaccaatgagag

SEQ ID NO: 1908265 - DNA, 15 bp, Homo sapiens
aaaaccaatgagaga

SEQ ID NO: 1908266 - DNA, 15 bp, Homo sapiens
aaaccaatgagagaa

SEQ ID NO: 1908267 - DNA, 15 bp, Homo sapiens
aaccaatgagagaac

SEQ ID NO: 1908268 - DNA, 15 bp, Homo sapiens
accaatgagagaacg

SEQ ID NO: 1908269 - DNA, 15 bp, Homo sapiens
ccaatgagagaacgt

SEQ ID NO: 1908270 - DNA, 15 bp, Homo sapiens
caatgagagaacgtt

SEQ ID NO: 1908271 - DNA, 15 bp, Homo sapiens
aatgagagaacgttg

SEQ ID NO: 1908272 - DNA, 15 bp, Homo sapiens
atgagagaacgttgg

SEQ ID NO: 1908273 - DNA, 15 bp, Homo sapiens
tgagagaacgttggt

SEQ ID NO: 1908274 - DNA, 15 bp, Homo sapiens
gagagaacgttggtt

SEQ ID NO: 1908275 - DNA, 15 bp, Homo sapiens
agagaacgttggttt

SEQ ID NO: 1908276 - DNA, 15 bp, Homo sapiens
gagaacgttggtttt

SEQ ID NO: 1908277 - DNA, 15 bp, Homo sapiens
agaacgttggttttg

SEQ ID NO: 1908278 - DNA, 15 bp, Homo sapiens
gaacgttggttttga

SEQ ID NO: 1908279 - DNA, 15 bp, Homo sapiens
aacgttggttttgaa

SEQ ID NO: 1908280 - DNA, 15 bp, Homo sapiens
acgttggttttgaag

SEQ ID NO: 1908281 - DNA, 15 bp, Homo sapiens
cgttggttttgaagt

SEQ ID NO: 1908282 - DNA, 15 bp, Homo sapiens
gttggttttgaagtt

SEQ ID NO: 1908283 - DNA, 15 bp, Homo sapiens
ttggttttgaagttg

SEQ ID NO: 1908284 - DNA, 15 bp, Homo sapiens
tggttttgaagttgg

SEQ ID NO: 1908285 - DNA, 15 bp, Homo sapiens
ggttttgaagttgga

SEQ ID NO: 1908286 - DNA, 15 bp, Homo sapiens
gttttgaagttggac

SEQ ID NO: 1908287 - DNA, 15 bp, Homo sapiens
ttttgaagttggaca

SEQ ID NO: 1908288 - DNA, 15 bp, Homo sapiens
tttgaagttggacag

SEQ ID NO: 1908289 - DNA, 15 bp, Homo sapiens
ttgaagttggacagg

SEQ ID NO: 1908290 - DNA, 15 bp, Homo sapiens
tgaagttggacaggc

SEQ ID NO: 1908291 - DNA, 15 bp, Homo sapiens
gaagttggacaggct

SEQ ID NO: 1908292 - DNA, 15 bp, Homo sapiens
aagttggacaggctt

SEQ ID NO: 1908293 - DNA, 15 bp, Homo sapiens
agttggacaggcttg

SEQ ID NO: 1908294 - DNA, 15 bp, Homo sapiens
gttggacaggcttgg

SEQ ID NO: 1908295 - DNA, 15 bp, Homo sapiens
ttggacaggcttgga

SEQ ID NO: 1908296 - DNA, 15 bp, Homo sapiens
tggacaggcttggat

SEQ ID NO: 1908297 - DNA, 15 bp, Homo sapiens
ggacaggcttggatt

SEQ ID NO: 1908298 - DNA, 15 bp, Homo sapiens
gacaggcttggattg

SEQ ID NO: 1908299 - DNA, 15 bp, Homo sapiens
acaggcttggattga

SEQ ID NO: 1908300 - DNA, 15 bp, Homo sapiens
caggcttggattgaa

SEQ ID NO: 1908301 - DNA, 15 bp, Homo sapiens
aggcttggattgaaa

SEQ ID NO: 1908302 - DNA, 15 bp, Homo sapiens
ggcttggattgaaat

SEQ ID NO: 1908303 - DNA, 15 bp, Homo sapiens
gcttggattgaaatt

SEQ ID NO: 1908304 - DNA, 15 bp, Homo sapiens
cttggattgaaattt

SEQ ID NO: 1908305 - DNA, 15 bp, Homo sapiens
ttggattgaaatttt

SEQ ID NO: 1908306 - DNA, 15 bp, Homo sapiens
tggattgaaatttta

SEQ ID NO: 1908307 - DNA, 15 bp, Homo sapiens
ggattgaaattttat

SEQ ID NO: 1908308 - DNA, 15 bp, Homo sapiens
gattgaaattttatc

SEQ ID NO: 1908309 - DNA, 15 bp, Homo sapiens
attgaaattttatct

SEQ ID NO: 1908310 - DNA, 15 bp, Homo sapiens
ttgaaattttatctt

SEQ ID NO: 1908311 - DNA, 15 bp, Homo sapiens
tgaaattttatcttc

SEQ ID NO: 1908312 - DNA, 15 bp, Homo sapiens
gaaattttatcttca

SEQ ID NO: 1908313 - DNA, 15 bp, Homo sapiens
aaattttatcttcac

SEQ ID NO: 1908314 - DNA, 15 bp, Homo sapiens
aattttatcttcacc

SEQ ID NO: 1908315 - DNA, 15 bp, Homo sapiens
attttatcttcacca

SEQ ID NO: 1908316 - DNA, 15 bp, Homo sapiens
ttttatcttcaccaa

SEQ ID NO: 1908317 - DNA, 15 bp, Homo sapiens
tttatcttcaccaat

SEQ ID NO: 1908318 - DNA, 15 bp, Homo sapiens
ttatcttcaccaatg

SEQ ID NO: 1908319 - DNA, 15 bp, Homo sapiens
tatcttcaccaatga

SEQ ID NO: 1908320 - DNA, 15 bp, Homo sapiens
atcttcaccaatgaa

SEQ ID NO: 1908321 - DNA, 15 bp, Homo sapiens
tcttcaccaatgaac

SEQ ID NO: 1908322 - DNA, 15 bp, Homo sapiens
cttcaccaatgaaca

SEQ ID NO: 1908323 - DNA, 15 bp, Homo sapiens
ttcaccaatgaacag

SEQ ID NO: 1908324 - DNA, 15 bp, Homo sapiens
tcaccaatgaacagt

SEQ ID NO: 1908325 - DNA, 15 bp, Homo sapiens
caccaatgaacagtt

SEQ ID NO: 1908326 - DNA, 15 bp, Homo sapiens
accaatgaacagtta

SEQ ID NO: 1908327 - DNA, 15 bp, Homo sapiens
ccaatgaacagttat

SEQ ID NO: 1908328 - DNA, 15 bp, Homo sapiens
caatgaacagttatg

SEQ ID NO: 1908329 - DNA, 15 bp, Homo sapiens
aatgaacagttatgt

SEQ ID NO: 1908330 - DNA, 15 bp, Homo sapiens
atgaacagttatgtg

SEQ ID NO: 1908331 - DNA, 15 bp, Homo sapiens
tgaacagttatgtga

SEQ ID NO: 1908332 - DNA, 15 bp, Homo sapiens
gaacagttatgtgaa

SEQ ID NO: 1908333 - DNA, 15 bp, Homo sapiens
aacagttatgtgaac

SEQ ID NO: 1908334 - DNA, 15 bp, Homo sapiens
acagttatgtgaact

SEQ ID NO: 1908335 - DNA, 15 bp, Homo sapiens
cagttatgtgaactg

SEQ ID NO: 1908336 - DNA, 15 bp, Homo sapiens
agttatgtgaactga

SEQ ID NO: 1908337 - DNA, 15 bp, Homo sapiens
gttatgtgaactgag

SEQ ID NO: 1908338 - DNA, 15 bp, Homo sapiens
ttatgtgaactgaga

SEQ ID NO: 1908339 - DNA, 15 bp, Homo sapiens
tatgtgaactgagaa

SEQ ID NO: 1908340 - DNA, 15 bp, Homo sapiens
atgtgaactgagaaa

SEQ ID NO: 1908341 - DNA, 15 bp, Homo sapiens
gtgaactgagaaaat

SEQ ID NO: 1908342 - DNA, 15 bp, Homo sapiens
tgaactgagaaaatt

SEQ ID NO: 1908343 - DNA, 15 bp, Homo sapiens
gaactgagaaaatta

SEQ ID NO: 1908344 - DNA, 15 bp, Homo sapiens
aactgagaaaattac

SEQ ID NO: 1908345 - DNA, 15 bp, Homo sapiens
actgagaaaattact

SEQ ID NO: 1908346 - DNA, 15 bp, Homo sapiens
ctgagaaaattactt

SEQ ID NO: 1908347 - DNA, 15 bp, Homo sapiens
tgagaaaattactta

SEQ ID NO: 1908348 - DNA, 15 bp, Homo sapiens
gagaaaattacttag

SEQ ID NO: 1908349 - DNA, 15 bp, Homo sapiens
agaaaattacttagt

SEQ ID NO: 1908350 - DNA, 15 bp, Homo sapiens
gaaaattacttagtt

SEQ ID NO: 1908351 - DNA, 15 bp, Homo sapiens
aaaattacttagttt

SEQ ID NO: 1908352 - DNA, 15 bp, Homo sapiens
aaattacttagtttc

SEQ ID NO: 1908353 - DNA, 15 bp, Homo sapiens
aattacttagtttcc

SEQ ID NO: 1908354 - DNA, 15 bp, Homo sapiens
attacttagtttcct

SEQ ID NO: 1908355 - DNA, 15 bp, Homo sapiens
ttacttagtttcctg

SEQ ID NO: 1908356 - DNA, 15 bp, Homo sapiens
tacttagtttcctga

SEQ ID NO: 1908357 - DNA, 15 bp, Homo sapiens
acttagtttcctgaa

SEQ ID NO: 1908358 - DNA, 15 bp, Homo sapiens
cttagtttcctgaaa

SEQ ID NO: 1908359 - DNA, 15 bp, Homo sapiens
ttagtttcctgaaaa

SEQ ID NO: 1908360 - DNA, 15 bp, Homo sapiens
tagtttcctgaaaat

SEQ ID NO: 1908361 - DNA, 15 bp, Homo sapiens
agtttcctgaaaatt

SEQ ID NO: 1908362 - DNA, 15 bp, Homo sapiens
gtttcctgaaaatta

SEQ ID NO: 1908363 - DNA, 15 bp, Homo sapiens
tttcctgaaaattag

SEQ ID NO: 1908364 - DNA, 15 bp, Homo sapiens
ttcctgaaaattagt

SEQ ID NO: 1908365 - DNA, 15 bp, Homo sapiens
tcctgaaaattagtt

SEQ ID NO: 1908366 - DNA, 15 bp, Homo sapiens
cctgaaaattagttt

SEQ ID NO: 1908367 - DNA, 15 bp, Homo sapiens
ctgaaaattagtttc

SEQ ID NO: 1908368 - DNA, 15 bp, Homo sapiens
tgaaaattagtttcc

SEQ ID NO: 1908369 - DNA, 15 bp, Homo sapiens
gaaaattagtttcct

SEQ ID NO: 1908370 - DNA, 15 bp, Homo sapiens
aaaattagtttcctc

SEQ ID NO: 1908371 - DNA, 15 bp, Homo sapiens
aaattagtttcctct

SEQ ID NO: 1908372 - DNA, 15 bp, Homo sapiens
aattagtttcctctt

SEQ ID NO: 1908373 - DNA, 15 bp, Homo sapiens
attagtttcctcttt

SEQ ID NO: 1908374 - DNA, 15 bp, Homo sapiens
ttagtttcctctttg

SEQ ID NO: 1908375 - DNA, 15 bp, Homo sapiens
tagtttcctctttgg

SEQ ID NO: 1908376 - DNA, 15 bp, Homo sapiens
agtttcctctttggg

SEQ ID NO: 1908377 - DNA, 15 bp, Homo sapiens
gtttcctctttgggt

SEQ ID NO: 1908378 - DNA, 15 bp, Homo sapiens
tttcctctttgggta

SEQ ID NO: 1908379 - DNA, 15 bp, Homo sapiens
ttcctctttgggtaa

SEQ ID NO: 1908380 - DNA, 15 bp, Homo sapiens
tcctctttgggtaaa

SEQ ID NO: 1908381 - DNA, 15 bp, Homo sapiens
cctctttgggtaaag

SEQ ID NO: 1908382 - DNA, 15 bp, Homo sapiens
ctctttgggtaaaga

SEQ ID NO: 1908383 - DNA, 15 bp, Homo sapiens
tctttgggtaaagag

SEQ ID NO: 1908384 - DNA, 15 bp, Homo sapiens
ctttgggtaaagagt

SEQ ID NO: 1908385 - DNA, 15 bp, Homo sapiens
tttgggtaaagagtt

SEQ ID NO: 1908386 - DNA, 15 bp, Homo sapiens
ttgggtaaagagttc

SEQ ID NO: 1908387 - DNA, 15 bp, Homo sapiens
tgggtaaagagttct

SEQ ID NO: 1908388 - DNA, 15 bp, Homo sapiens
gggtaaagagttctc

SEQ ID NO: 1908389 - DNA, 15 bp, Homo sapiens
ggtaaagagttctca

SEQ ID NO: 1908390 - DNA, 15 bp, Homo sapiens
gtaaagagttctcat

SEQ ID NO: 1908391 - DNA, 15 bp, Homo sapiens
taaagagttctcata

SEQ ID NO: 1908392 - DNA, 15 bp, Homo sapiens
aaagagttctcataa

SEQ ID NO: 1908393 - DNA, 15 bp, Homo sapiens
aagagttctcataaa

SEQ ID NO: 1908394 - DNA, 15 bp, Homo sapiens
agagttctcataaag

SEQ ID NO: 1908395 - DNA, 15 bp, Homo sapiens
gagttctcataaagg

SEQ ID NO: 1908396 - DNA, 15 bp, Homo sapiens
agttctcataaaggt

SEQ ID NO: 1908397 - DNA, 15 bp, Homo sapiens
gttctcataaaggtt

SEQ ID NO: 1908398 - DNA, 15 bp, Homo sapiens
ttctcataaaggtta

SEQ ID NO: 1908399 - DNA, 15 bp, Homo sapiens
tctcataaaggttac

SEQ ID NO: 1908400 - DNA, 15 bp, Homo sapiens
ctcataaaggttact

SEQ ID NO: 1908401 - DNA, 15 bp, Homo sapiens
tcataaaggttactg

SEQ ID NO: 1908402 - DNA, 15 bp, Homo sapiens
cataaaggttactgt

SEQ ID NO: 1908403 - DNA, 15 bp, Homo sapiens
ataaaggttactgtc

SEQ ID NO: 1908404 - DNA, 15 bp, Homo sapiens
taaaggttactgtca

SEQ ID NO: 1908405 - DNA, 15 bp, Homo sapiens
aaaggttactgtcag

SEQ ID NO: 1908406 - DNA, 15 bp, Homo sapiens
aaggttactgtcaga

SEQ ID NO: 1908407 - DNA, 15 bp, Homo sapiens
aggttactgtcagat

SEQ ID NO: 1908408 - DNA, 15 bp, Homo sapiens
ggttactgtcagatg

SEQ ID NO: 1908409 - DNA, 15 bp, Homo sapiens
gttactgtcagatgc

SEQ ID NO: 1908410 - DNA, 15 bp, Homo sapiens
ttactgtcagatgca

SEQ ID NO: 1908411 - DNA, 15 bp, Homo sapiens
tactgtcagatgcat

SEQ ID NO: 1908412 - DNA, 15 bp, Homo sapiens
actgtcagatgcata

SEQ ID NO: 1908413 - DNA, 15 bp, Homo sapiens
ctgtcagatgcatac

SEQ ID NO: 1908414 - DNA, 15 bp, Homo sapiens
tgtcagatgcataca

SEQ ID NO: 1908415 - DNA, 15 bp, Homo sapiens
gtcagatgcatacaa

SEQ ID NO: 1908416 - DNA, 15 bp, Homo sapiens
tcagatgcatacaaa

SEQ ID NO: 1908417 - DNA, 15 bp, Homo sapiens
cagatgcatacaaat

SEQ ID NO: 1908418 - DNA, 15 bp, Homo sapiens
agatgcatacaaatg

SEQ ID NO: 1908419 - DNA, 15 bp, Homo sapiens
gatgcatacaaatgc

SEQ ID NO: 1908420 - DNA, 15 bp, Homo sapiens
atgcatacaaatgca

SEQ ID NO: 1908421 - DNA, 15 bp, Homo sapiens
tgcatacaaatgcat

SEQ ID NO: 1908422 - DNA, 15 bp, Homo sapiens
gcatacaaatgcatt

SEQ ID NO: 1908423 - DNA, 15 bp, Homo sapiens
catacaaatgcatta

SEQ ID NO: 1908424 - DNA, 15 bp, Homo sapiens
atacaaatgcattat

SEQ ID NO: 1908425 - DNA, 15 bp, Homo sapiens
tacaaatgcattatg

SEQ ID NO: 1908426 - DNA, 15 bp, Homo sapiens
acaaatgcattatgt

SEQ ID NO: 1908427 - DNA, 15 bp, Homo sapiens
caaatgcattatgta

SEQ ID NO: 1908428 - DNA, 15 bp, Homo sapiens
aaatgcattatgtac

SEQ ID NO: 1908429 - DNA, 15 bp, Homo sapiens
aatgcattatgtaca

SEQ ID NO: 1908430 - DNA, 15 bp, Homo sapiens
atgcattatgtacat

SEQ ID NO: 1908431 - DNA, 15 bp, Homo sapiens
tgcattatgtacata

SEQ ID NO: 1908432 - DNA, 15 bp, Homo sapiens
gcattatgtacatag

SEQ ID NO: 1908433 - DNA, 15 bp, Homo sapiens
cattatgtacatagg

SEQ ID NO: 1908434 - DNA, 15 bp, Homo sapiens
attatgtacataggt

SEQ ID NO: 1908435 - DNA, 15 bp, Homo sapiens
ttatgtacataggtc

SEQ ID NO: 1908436 - DNA, 15 bp, Homo sapiens
tatgtacataggtct

SEQ ID NO: 1908437 - DNA, 15 bp, Homo sapiens
atgtacataggtcta

SEQ ID NO: 1908438 - DNA, 15 bp, Homo sapiens
tgtacataggtctag

SEQ ID NO: 1908439 - DNA, 15 bp, Homo sapiens
gtacataggtctaga

SEQ ID NO: 1908440 - DNA, 15 bp, Homo sapiens
tacataggtctagag

SEQ ID NO: 1908441 - DNA, 15 bp, Homo sapiens
acataggtctagaga

SEQ ID NO: 1908442 - DNA, 15 bp, Homo sapiens
cataggtctagagaa

SEQ ID NO: 1908443 - DNA, 15 bp, Homo sapiens
ataggtctagagaag

SEQ ID NO: 1908444 - DNA, 15 bp, Homo sapiens
taggtctagagaagt

SEQ ID NO: 1908445 - DNA, 15 bp, Homo sapiens
aggtctagagaagta

SEQ ID NO: 1908446 - DNA, 15 bp, Homo sapiens
ggtctagagaagtat

SEQ ID NO: 1908447 - DNA, 15 bp, Homo sapiens
gtctagagaagtatc

SEQ ID NO: 1908448 - DNA, 15 bp, Homo sapiens
tctagagaagtatct

SEQ ID NO: 1908449 - DNA, 15 bp, Homo sapiens
ctagagaagtatctc

SEQ ID NO: 1908450 - DNA, 15 bp, Homo sapiens
tagagaagtatctca

SEQ ID NO: 1908451 - DNA, 15 bp, Homo sapiens
agagaagtatctcac

SEQ ID NO: 1908452 - DNA, 15 bp, Homo sapiens
gagaagtatctcaca

SEQ ID NO: 1908453 - DNA, 15 bp, Homo sapiens
agaagtatctcacat

SEQ ID NO: 1908454 - DNA, 15 bp, Homo sapiens
gaagtatctcacatt

SEQ ID NO: 1908455 - DNA, 15 bp, Homo sapiens
aagtatctcacattt

SEQ ID NO: 1908456 - DNA, 15 bp, Homo sapiens
agtatctcacatttt

SEQ ID NO: 1908457 - DNA, 15 bp, Homo sapiens
gtatctcacattttc

SEQ ID NO: 1908458 - DNA, 15 bp, Homo sapiens
tatctcacattttca

SEQ ID NO: 1908459 - DNA, 15 bp, Homo sapiens
atctcacattttcat

SEQ ID NO: 1908460 - DNA, 15 bp, Homo sapiens
tctcacattttcatg

SEQ ID NO: 1908461 - DNA, 15 bp, Homo sapiens
ctcacattttcatgt

SEQ ID NO: 1908462 - DNA, 15 bp, Homo sapiens
tcacattttcatgtc

SEQ ID NO: 1908463 - DNA, 15 bp, Homo sapiens
cacattttcatgtct

SEQ ID NO: 1908464 - DNA, 15 bp, Homo sapiens
acattttcatgtcta

SEQ ID NO: 1908465 - DNA, 15 bp, Homo sapiens
cattttcatgtctat

SEQ ID NO: 1908466 - DNA, 15 bp, Homo sapiens
attttcatgtctatt

SEQ ID NO: 1908467 - DNA, 15 bp, Homo sapiens
ttttcatgtctattg

SEQ ID NO: 1908468 - DNA, 15 bp, Homo sapiens
tttcatgtctattgt

SEQ ID NO: 1908469 - DNA, 15 bp, Homo sapiens
ttcatgtctattgtt

SEQ ID NO: 1908470 - DNA, 15 bp, Homo sapiens
tcatgtctattgttg

SEQ ID NO: 1908471 - DNA, 15 bp, Homo sapiens
catgtctattgttgt

SEQ ID NO: 1908472 - DNA, 15 bp, Homo sapiens
atgtctattgttgtc

SEQ ID NO: 1908473 - DNA, 15 bp, Homo sapiens
tgtctattgttgtca

SEQ ID NO: 1908474 - DNA, 15 bp, Homo sapiens
gtctattgttgtcat

SEQ ID NO: 1908475 - DNA, 15 bp, Homo sapiens
tctattgttgtcatc

SEQ ID NO: 1908476 - DNA, 15 bp, Homo sapiens
ctattgttgtcatct

SEQ ID NO: 1908477 - DNA, 15 bp, Homo sapiens
tattgttgtcatctc

SEQ ID NO: 1908478 - DNA, 15 bp, Homo sapiens
attgttgtcatctca

SEQ ID NO: 1908479 - DNA, 15 bp, Homo sapiens
ttgttgtcatctcaa

SEQ ID NO: 1908480 - DNA, 15 bp, Homo sapiens
tgttgtcatctcaag

SEQ ID NO: 1908481 - DNA, 15 bp, Homo sapiens
gttgtcatctcaagt

SEQ ID NO: 1908482 - DNA, 15 bp, Homo sapiens
ttgtcatctcaagtt

SEQ ID NO: 1908483 - DNA, 15 bp, Homo sapiens
tgtcatctcaagttc

SEQ ID NO: 1908484 - DNA, 15 bp, Homo sapiens
gtcatctcaagttct

SEQ ID NO: 1908485 - DNA, 15 bp, Homo sapiens
tcatctcaagttctt

SEQ ID NO: 1908486 - DNA, 15 bp, Homo sapiens
catctcaagttcttc

SEQ ID NO: 1908487 - DNA, 15 bp, Homo sapiens
atctcaagttcttct

SEQ ID NO: 1908488 - DNA, 15 bp, Homo sapiens
tctcaagttcttctc

SEQ ID NO: 1908489 - DNA, 15 bp, Homo sapiens
ctcaagttcttctcc

SEQ ID NO: 1908490 - DNA, 15 bp, Homo sapiens
tcaagttcttctcca

SEQ ID NO: 1908491 - DNA, 15 bp, Homo sapiens
caagttcttctccat

SEQ ID NO: 1908492 - DNA, 15 bp, Homo sapiens
aagttcttctccata

SEQ ID NO: 1908493 - DNA, 15 bp, Homo sapiens
agttcttctccataa

SEQ ID NO: 1908494 - DNA, 15 bp, Homo sapiens
gttcttctccataaa

SEQ ID NO: 1908495 - DNA, 15 bp, Homo sapiens
ttcttctccataaag

SEQ ID NO: 1908496 - DNA, 15 bp, Homo sapiens
tcttctccataaaga

SEQ ID NO: 1908497 - DNA, 15 bp, Homo sapiens
cttctccataaagag

SEQ ID NO: 1908498 - DNA, 15 bp, Homo sapiens
ttctccataaagagc

SEQ ID NO: 1908499 - DNA, 15 bp, Homo sapiens
tctccataaagagct

SEQ ID NO: 1908500 - DNA, 15 bp, Homo sapiens
ctccataaagagctc

SEQ ID NO: 1908501 - DNA, 15 bp, Homo sapiens
tccataaagagctct

SEQ ID NO: 1908502 - DNA, 15 bp, Homo sapiens
ccataaagagctctt

SEQ ID NO: 1908503 - DNA, 15 bp, Homo sapiens
cataaagagctctta

SEQ ID NO: 1908504 - DNA, 15 bp, Homo sapiens
ataaagagctcttat

SEQ ID NO: 1908505 - DNA, 15 bp, Homo sapiens
taaagagctcttatt

SEQ ID NO: 1908506 - DNA, 15 bp, Homo sapiens
aaagagctcttatta

SEQ ID NO: 1908507 - DNA, 15 bp, Homo sapiens
aagagctcttattac

SEQ ID NO: 1908508 - DNA, 15 bp, Homo sapiens
agagctcttattaca

SEQ ID NO: 1908509 - DNA, 15 bp, Homo sapiens
gagctcttattacag

SEQ ID NO: 1908510 - DNA, 15 bp, Homo sapiens
agctcttattacagt

SEQ ID NO: 1908511 - DNA, 15 bp, Homo sapiens
gctcttattacagtt

SEQ ID NO: 1908512 - DNA, 15 bp, Homo sapiens
ctcttattacagttt

SEQ ID NO: 1908513 - DNA, 15 bp, Homo sapiens
tcttattacagtttg

SEQ ID NO: 1908514 - DNA, 15 bp, Homo sapiens
cttattacagtttga

SEQ ID NO: 1908515 - DNA, 15 bp, Homo sapiens
ttattacagtttgaa

SEQ ID NO: 1908516 - DNA, 15 bp, Homo sapiens
tattacagtttgaat

SEQ ID NO: 1908517 - DNA, 15 bp, Homo sapiens
attacagtttgaatc

SEQ ID NO: 1908518 - DNA, 15 bp, Homo sapiens
ttacagtttgaatcc

SEQ ID NO: 1908519 - DNA, 15 bp, Homo sapiens
tacagtttgaatccc

SEQ ID NO: 1908520 - DNA, 15 bp, Homo sapiens
acagtttgaatccct

SEQ ID NO: 1908521 - DNA, 15 bp, Homo sapiens
cagtttgaatcccta

SEQ ID NO: 1908522 - DNA, 15 bp, Homo sapiens
agtttgaatccctat

SEQ ID NO: 1908523 - DNA, 15 bp, Homo sapiens
gtttgaatccctata

SEQ ID NO: 1908524 - DNA, 15 bp, Homo sapiens
tttgaatccctatag

SEQ ID NO: 1908525 - DNA, 15 bp, Homo sapiens
ttgaatccctataga

SEQ ID NO: 1908526 - DNA, 15 bp, Homo sapiens
tgaatccctatagaa

SEQ ID NO: 1908527 - DNA, 15 bp, Homo sapiens
gaatccctatagaaa

SEQ ID NO: 1908528 - DNA, 15 bp, Homo sapiens
aatccctatagaaac

SEQ ID NO: 1908529 - DNA, 15 bp, Homo sapiens
atccctatagaaaca

SEQ ID NO: 1908530 - DNA, 15 bp, Homo sapiens
tccctatagaaacaa

SEQ ID NO: 1908531 - DNA, 15 bp, Homo sapiens
ccctatagaaacaag

SEQ ID NO: 1908532 - DNA, 15 bp, Homo sapiens
cctatagaaacaaga

SEQ ID NO: 1908533 - DNA, 15 bp, Homo sapiens
ctatagaaacaagag

SEQ ID NO: 1908534 - DNA, 15 bp, Homo sapiens
tatagaaacaagagt

SEQ ID NO: 1908535 - DNA, 15 bp, Homo sapiens
atagaaacaagagtt

SEQ ID NO: 1908536 - DNA, 15 bp, Homo sapiens
tagaaacaagagtta

SEQ ID NO: 1908537 - DNA, 15 bp, Homo sapiens
agaaacaagagttaa

SEQ ID NO: 1908538 - DNA, 15 bp, Homo sapiens
gaaacaagagttaaa

SEQ ID NO: 1908539 - DNA, 15 bp, Homo sapiens
aaacaagagttaaac

SEQ ID NO: 1908540 - DNA, 15 bp, Homo sapiens
aacaagagttaaacc

SEQ ID NO: 1908541 - DNA, 15 bp, Homo sapiens
acaagagttaaacca

SEQ ID NO: 1908542 - DNA, 15 bp, Homo sapiens
caagagttaaaccac

SEQ ID NO: 1908543 - DNA, 15 bp, Homo sapiens
aagagttaaaccaca

SEQ ID NO: 1908544 - DNA, 15 bp, Homo sapiens
agagttaaaccacat

SEQ ID NO: 1908545 - DNA, 15 bp, Homo sapiens
gagttaaaccacatt

SEQ ID NO: 1908546 - DNA, 15 bp, Homo sapiens
agttaaaccacattc

SEQ ID NO: 1908547 - DNA, 15 bp, Homo sapiens
gttaaaccacattca

SEQ ID NO: 1908548 - DNA, 15 bp, Homo sapiens
ttaaaccacattcac

SEQ ID NO: 1908549 - DNA, 15 bp, Homo sapiens
taaaccacattcacc

SEQ ID NO: 1908550 - DNA, 15 bp, Homo sapiens
aaaccacattcacca

SEQ ID NO: 1908551 - DNA, 15 bp, Homo sapiens
aaccacattcaccat

SEQ ID NO: 1908552 - DNA, 15 bp, Homo sapiens
accacattcaccatg

SEQ ID NO: 1908553 - DNA, 15 bp, Homo sapiens
ccacattcaccatgg

SEQ ID NO: 1908554 - DNA, 15 bp, Homo sapiens
cacattcaccatgga

SEQ ID NO: 1908555 - DNA, 15 bp, Homo sapiens
acattcaccatggag

SEQ ID NO: 1908556 - DNA, 15 bp, Homo sapiens
cattcaccatggagg

SEQ ID NO: 1908557 - DNA, 15 bp, Homo sapiens
attcaccatggagga

SEQ ID NO: 1908558 - DNA, 15 bp, Homo sapiens
ttcaccatggaggaa

SEQ ID NO: 1908559 - DNA, 15 bp, Homo sapiens
tcaccatggaggaaa

SEQ ID NO: 1908560 - DNA, 15 bp, Homo sapiens
caccatggaggaaag

SEQ ID NO: 1908561 - DNA, 15 bp, Homo sapiens
accatggaggaaagg

SEQ ID NO: 1908562 - DNA, 15 bp, Homo sapiens
ccatggaggaaaggg

SEQ ID NO: 1908563 - DNA, 15 bp, Homo sapiens
catggaggaaagggt

SEQ ID NO: 1908564 - DNA, 15 bp, Homo sapiens
atggaggaaagggtg

SEQ ID NO: 1908565 - DNA, 15 bp, Homo sapiens
tggaggaaagggtgg

SEQ ID NO: 1908566 - DNA, 15 bp, Homo sapiens
ggaggaaagggtggt

SEQ ID NO: 1908567 - DNA, 15 bp, Homo sapiens
gaggaaagggtggtt

SEQ ID NO: 1908568 - DNA, 15 bp, Homo sapiens
aggaaagggtggttt

SEQ ID NO: 1908569 - DNA, 15 bp, Homo sapiens
ggaaagggtggtttc

SEQ ID NO: 1908570 - DNA, 15 bp, Homo sapiens
gaaagggtggtttca

SEQ ID NO: 1908571 - DNA, 15 bp, Homo sapiens
aaagggtggtttcaa

SEQ ID NO: 1908572 - DNA, 15 bp, Homo sapiens
aagggtggtttcaac

SEQ ID NO: 1908573 - DNA, 15 bp, Homo sapiens
agggtggtttcaaca

SEQ ID NO: 1908574 - DNA, 15 bp, Homo sapiens
gggtggtttcaacat

SEQ ID NO: 1908575 - DNA, 15 bp, Homo sapiens
ggtggtttcaacata

SEQ ID NO: 1908576 - DNA, 15 bp, Homo sapiens
gtggtttcaacataa

SEQ ID NO: 1908577 - DNA, 15 bp, Homo sapiens
tggtttcaacataaa

SEQ ID NO: 1908578 - DNA, 15 bp, Homo sapiens
ggtttcaacataaat

SEQ ID NO: 1908579 - DNA, 15 bp, Homo sapiens
gtttcaacataaatc

SEQ ID NO: 1908580 - DNA, 15 bp, Homo sapiens
tttcaacataaatct

SEQ ID NO: 1908581 - DNA, 15 bp, Homo sapiens
ttcaacataaatctg

SEQ ID NO: 1908582 - DNA, 15 bp, Homo sapiens
tcaacataaatctgt

SEQ ID NO: 1908583 - DNA, 15 bp, Homo sapiens
caacataaatctgtc

SEQ ID NO: 1908584 - DNA, 15 bp, Homo sapiens
aacataaatctgtca

SEQ ID NO: 1908585 - DNA, 15 bp, Homo sapiens
acataaatctgtcat

SEQ ID NO: 1908586 - DNA, 15 bp, Homo sapiens
cataaatctgtcatt

SEQ ID NO: 1908587 - DNA, 15 bp, Homo sapiens
ataaatctgtcattt

SEQ ID NO: 1908588 - DNA, 15 bp, Homo sapiens
taaatctgtcattta

SEQ ID NO: 1908589 - DNA, 15 bp, Homo sapiens
aaatctgtcatttat

SEQ ID NO: 1908590 - DNA, 15 bp, Homo sapiens
aatctgtcatttata

SEQ ID NO: 1908591 - DNA, 15 bp, Homo sapiens
atctgtcatttatac

SEQ ID NO: 1908592 - DNA, 15 bp, Homo sapiens
tctgtcatttatact

SEQ ID NO: 1908593 - DNA, 15 bp, Homo sapiens
ctgtcatttatactg

SEQ ID NO: 1908594 - DNA, 15 bp, Homo sapiens
tgtcatttatactga

SEQ ID NO: 1908595 - DNA, 15 bp, Homo sapiens
gtcatttatactgat

SEQ ID NO: 1908596 - DNA, 15 bp, Homo sapiens
tcatttatactgatc

SEQ ID NO: 1908597 - DNA, 15 bp, Homo sapiens
catttatactgatct

SEQ ID NO: 1908598 - DNA, 15 bp, Homo sapiens
atttatactgatcta

SEQ ID NO: 1908599 - DNA, 15 bp, Homo sapiens
tttatactgatctag

SEQ ID NO: 1908600 - DNA, 15 bp, Homo sapiens
ttatactgatctagg

SEQ ID NO: 1908601 - DNA, 15 bp, Homo sapiens
tatactgatctagga

SEQ ID NO: 1908602 - DNA, 15 bp, Homo sapiens
atactgatctaggag

SEQ ID NO: 1908603 - DNA, 15 bp, Homo sapiens
tactgatctaggagg

SEQ ID NO: 1908604 - DNA, 15 bp, Homo sapiens
actgatctaggagga

SEQ ID NO: 1908605 - DNA, 15 bp, Homo sapiens
ctgatctaggaggaa

SEQ ID NO: 1908606 - DNA, 15 bp, Homo sapiens
tgatctaggaggaac

SEQ ID NO: 1908607 - DNA, 15 bp, Homo sapiens
gatctaggaggaaca

SEQ ID NO: 1908608 - DNA, 15 bp, Homo sapiens
atctaggaggaacac

SEQ ID NO: 1908609 - DNA, 15 bp, Homo sapiens
tctaggaggaacaca

SEQ ID NO: 1908610 - DNA, 15 bp, Homo sapiens
ctaggaggaacacat

SEQ ID NO: 1908611 - DNA, 15 bp, Homo sapiens
taggaggaacacatg

SEQ ID NO: 1908612 - DNA, 15 bp, Homo sapiens
aggaggaacacatga

SEQ ID NO: 1908613 - DNA, 15 bp, Homo sapiens
ggaggaacacatgag

SEQ ID NO: 1908614 - DNA, 15 bp, Homo sapiens
gaggaacacatgagt

SEQ ID NO: 1908615 - DNA, 15 bp, Homo sapiens
aggaacacatgagtt

SEQ ID NO: 1908616 - DNA, 15 bp, Homo sapiens
ggaacacatgagtta

SEQ ID NO: 1908617 - DNA, 15 bp, Homo sapiens
gaacacatgagttat

SEQ ID NO: 1908618 - DNA, 15 bp, Homo sapiens
aacacatgagttatg

SEQ ID NO: 1908619 - DNA, 15 bp, Homo sapiens
acacatgagttatga

SEQ ID NO: 1908620 - DNA, 15 bp, Homo sapiens
cacatgagttatgag

SEQ ID NO: 1908621 - DNA, 15 bp, Homo sapiens
acatgagttatgagc

SEQ ID NO: 1908622 - DNA, 15 bp, Homo sapiens
catgagttatgagca

SEQ ID NO: 1908623 - DNA, 15 bp, Homo sapiens
atgagttatgagcag

SEQ ID NO: 1908624 - DNA, 15 bp, Homo sapiens
tgagttatgagcagg

SEQ ID NO: 1908625 - DNA, 15 bp, Homo sapiens
gagttatgagcaggt

SEQ ID NO: 1908626 - DNA, 15 bp, Homo sapiens
agttatgagcaggtt

SEQ ID NO: 1908627 - DNA, 15 bp, Homo sapiens
gttatgagcaggttt

SEQ ID NO: 1908628 - DNA, 15 bp, Homo sapiens
ttatgagcaggtttc

SEQ ID NO: 1908629 - DNA, 15 bp, Homo sapiens
tatgagcaggtttcc

SEQ ID NO: 1908630 - DNA, 15 bp, Homo sapiens
atgagcaggtttcct

SEQ ID NO: 1908631 - DNA, 15 bp, Homo sapiens
tgagcaggtttcctc

SEQ ID NO: 1908632 - DNA, 15 bp, Homo sapiens
gagcaggtttcctca

SEQ ID NO: 1908633 - DNA, 15 bp, Homo sapiens
agcaggtttcctcac

SEQ ID NO: 1908634 - DNA, 15 bp, Homo sapiens
gcaggtttcctcaca

SEQ ID NO: 1908635 - DNA, 15 bp, Homo sapiens
caggtttcctcacac

SEQ ID NO: 1908636 - DNA, 15 bp, Homo sapiens
aggtttcctcacacc

SEQ ID NO: 1908637 - DNA, 15 bp, Homo sapiens
ggtttcctcacacca

SEQ ID NO: 1908638 - DNA, 15 bp, Homo sapiens
gtttcctcacaccag

SEQ ID NO: 1908639 - DNA, 15 bp, Homo sapiens
tttcctcacaccagc

SEQ ID NO: 1908640 - DNA, 15 bp, Homo sapiens
ttcctcacaccagct

SEQ ID NO: 1908641 - DNA, 15 bp, Homo sapiens
tcctcacaccagctg

SEQ ID NO: 1908642 - DNA, 15 bp, Homo sapiens
cctcacaccagctgt

SEQ ID NO: 1908643 - DNA, 15 bp, Homo sapiens
ctcacaccagctgtg

SEQ ID NO: 1908644 - DNA, 15 bp, Homo sapiens
tcacaccagctgtgt

SEQ ID NO: 1908645 - DNA, 15 bp, Homo sapiens
cacaccagctgtgta

SEQ ID NO: 1908646 - DNA, 15 bp, Homo sapiens
acaccagctgtgtat

SEQ ID NO: 1908647 - DNA, 15 bp, Homo sapiens
caccagctgtgtatg

SEQ ID NO: 1908648 - DNA, 15 bp, Homo sapiens
accagctgtgtatgc

SEQ ID NO: 1908649 - DNA, 15 bp, Homo sapiens
ccagctgtgtatgcg

SEQ ID NO: 1908650 - DNA, 15 bp, Homo sapiens
cagctgtgtatgcgt

SEQ ID NO: 1908651 - DNA, 15 bp, Homo sapiens
agctgtgtatgcgtg

SEQ ID NO: 1908652 - DNA, 15 bp, Homo sapiens
gctgtgtatgcgtga

SEQ ID NO: 1908653 - DNA, 15 bp, Homo sapiens
ctgtgtatgcgtgat

SEQ ID NO: 1908654 - DNA, 15 bp, Homo sapiens
tgtgtatgcgtgatg

SEQ ID NO: 1908655 - DNA, 15 bp, Homo sapiens
gtgtatgcgtgatgc

SEQ ID NO: 1908656 - DNA, 15 bp, Homo sapiens
tgtatgcgtgatgcc

SEQ ID NO: 1908657 - DNA, 15 bp, Homo sapiens
gtatgcgtgatgccc

SEQ ID NO: 1908658 - DNA, 15 bp, Homo sapiens
tatgcgtgatgccca

SEQ ID NO: 1908659 - DNA, 15 bp, Homo sapiens
atgcgtgatgcccaa

SEQ ID NO: 1908660 - DNA, 15 bp, Homo sapiens
tgcgtgatgcccaac

SEQ ID NO: 1908661 - DNA, 15 bp, Homo sapiens
gcgtgatgcccaaca

SEQ ID NO: 1908662 - DNA, 15 bp, Homo sapiens
cgtgatgcccaacac

SEQ ID NO: 1908663 - DNA, 15 bp, Homo sapiens
gtgatgcccaacaca

SEQ ID NO: 1908664 - DNA, 15 bp, Homo sapiens
tgatgcccaacacag

SEQ ID NO: 1908665 - DNA, 15 bp, Homo sapiens
gatgcccaacacagt

SEQ ID NO: 1908666 - DNA, 15 bp, Homo sapiens
atgcccaacacagtg

SEQ ID NO: 1908667 - DNA, 15 bp, Homo sapiens
tgcccaacacagtga

SEQ ID NO: 1908668 - DNA, 15 bp, Homo sapiens
gcccaacacagtgaa

SEQ ID NO: 1908669 - DNA, 15 bp, Homo sapiens
cccaacacagtgaag

SEQ ID NO: 1908670 - DNA, 15 bp, Homo sapiens
ccaacacagtgaagg

SEQ ID NO: 1908671 - DNA, 15 bp, Homo sapiens
caacacagtgaaggt

SEQ ID NO: 1908672 - DNA, 15 bp, Homo sapiens
aacacagtgaaggtt

SEQ ID NO: 1908673 - DNA, 15 bp, Homo sapiens
acacagtgaaggttt

SEQ ID NO: 1908674 - DNA, 15 bp, Homo sapiens
cacagtgaaggttta

SEQ ID NO: 1908675 - DNA, 15 bp, Homo sapiens
acagtgaaggtttaa

SEQ ID NO: 1908676 - DNA, 15 bp, Homo sapiens
cagtgaaggtttaac

SEQ ID NO: 1908677 - DNA, 15 bp, Homo sapiens
agtgaaggtttaaca

SEQ ID NO: 1908678 - DNA, 15 bp, Homo sapiens
gtgaaggtttaacaa

SEQ ID NO: 1908679 - DNA, 15 bp, Homo sapiens
tgaaggtttaacaat

SEQ ID NO: 1908680 - DNA, 15 bp, Homo sapiens
gaaggtttaacaatt

SEQ ID NO: 1908681 - DNA, 15 bp, Homo sapiens
aaggtttaacaatta

SEQ ID NO: 1908682 - DNA, 15 bp, Homo sapiens
aggtttaacaattaa

SEQ ID NO: 1908683 - DNA, 15 bp, Homo sapiens
ggtttaacaattaag

SEQ ID NO: 1908684 - DNA, 15 bp, Homo sapiens
gtttaacaattaagc

SEQ ID NO: 1908685 - DNA, 15 bp, Homo sapiens
tttaacaattaagct

SEQ ID NO: 1908686 - DNA, 15 bp, Homo sapiens
ttaacaattaagctg

SEQ ID NO: 1908687 - DNA, 15 bp, Homo sapiens
taacaattaagctgg

SEQ ID NO: 1908688 - DNA, 15 bp, Homo sapiens
aacaattaagctggt

SEQ ID NO: 1908689 - DNA, 15 bp, Homo sapiens
acaattaagctggtt

SEQ ID NO: 1908690 - DNA, 15 bp, Homo sapiens
caattaagctggttt

SEQ ID NO: 1908691 - DNA, 15 bp, Homo sapiens
aattaagctggtttt

SEQ ID NO: 1908692 - DNA, 15 bp, Homo sapiens
attaagctggtttta

SEQ ID NO: 1908693 - DNA, 15 bp, Homo sapiens
ttaagctggttttaa

SEQ ID NO: 1908694 - DNA, 15 bp, Homo sapiens
taagctggttttaaa

SEQ ID NO: 1908695 - DNA, 15 bp, Homo sapiens
aagctggttttaaat

SEQ ID NO: 1908696 - DNA, 15 bp, Homo sapiens
agctggttttaaatg

SEQ ID NO: 1908697 - DNA, 15 bp, Homo sapiens
gctggttttaaatgt

SEQ ID NO: 1908698 - DNA, 15 bp, Homo sapiens
ctggttttaaatgtg

SEQ ID NO: 1908699 - DNA, 15 bp, Homo sapiens
tggttttaaatgtgt

SEQ ID NO: 1908700 - DNA, 15 bp, Homo sapiens
ggttttaaatgtgta

SEQ ID NO: 1908701 - DNA, 15 bp, Homo sapiens
gttttaaatgtgtag

SEQ ID NO: 1908702 - DNA, 15 bp, Homo sapiens
ttttaaatgtgtagc

SEQ ID NO: 1908703 - DNA, 15 bp, Homo sapiens
tttaaatgtgtagca

SEQ ID NO: 1908704 - DNA, 15 bp, Homo sapiens
ttaaatgtgtagcat

SEQ ID NO: 1908705 - DNA, 15 bp, Homo sapiens
taaatgtgtagcata

SEQ ID NO: 1908706 - DNA, 15 bp, Homo sapiens
aaatgtgtagcatag

SEQ ID NO: 1908707 - DNA, 15 bp, Homo sapiens
aatgtgtagcataga

SEQ ID NO: 1908708 - DNA, 15 bp, Homo sapiens
atgtgtagcatagaa

SEQ ID NO: 1908709 - DNA, 15 bp, Homo sapiens
agatactggtttgaa

SEQ ID NO: 1908710 - DNA, 15 bp, Homo sapiens
gatactggtttgaag

SEQ ID NO: 1908711 - DNA, 15 bp, Homo sapiens
atactggtttgaagc

SEQ ID NO: 1908712 - DNA, 15 bp, Homo sapiens
tactggtttgaagca

SEQ ID NO: 1908713 - DNA, 15 bp, Homo sapiens
actggtttgaagcat

SEQ ID NO: 1908714 - DNA, 15 bp, Homo sapiens
ctggtttgaagcatg

SEQ ID NO: 1908715 - DNA, 15 bp, Homo sapiens
tggtttgaagcatgg

SEQ ID NO: 1908716 - DNA, 15 bp, Homo sapiens
ggtttgaagcatggg

SEQ ID NO: 1908717 - DNA, 15 bp, Homo sapiens
gtttgaagcatgggt

SEQ ID NO: 1908718 - DNA, 15 bp, Homo sapiens
tttgaagcatgggtc

SEQ ID NO: 1908719 - DNA, 15 bp, Homo sapiens
ttgaagcatgggtct

SEQ ID NO: 1908720 - DNA, 15 bp, Homo sapiens
tgaagcatgggtcta

SEQ ID NO: 1908721 - DNA, 15 bp, Homo sapiens
gaagcatgggtctac

SEQ ID NO: 1908722 - DNA, 15 bp, Homo sapiens
aagcatgggtctacc

SEQ ID NO: 1908723 - DNA, 15 bp, Homo sapiens
agcatgggtctacct

SEQ ID NO: 1908724 - DNA, 15 bp, Homo sapiens
gcatgggtctacctc

SEQ ID NO: 1908725 - DNA, 15 bp, Homo sapiens
catgggtctacctct

SEQ ID NO: 1908726 - DNA, 15 bp, Homo sapiens
atgggtctacctctt

SEQ ID NO: 1908727 - DNA, 15 bp, Homo sapiens
tgggtctacctcttc

SEQ ID NO: 1908728 - DNA, 15 bp, Homo sapiens
gggtctacctcttct

SEQ ID NO: 1908729 - DNA, 15 bp, Homo sapiens
ggtctacctcttcta

SEQ ID NO: 1908730 - DNA, 15 bp, Homo sapiens
gtctacctcttctaa

SEQ ID NO: 1908731 - DNA, 15 bp, Homo sapiens
tctacctcttctaaa

SEQ ID NO: 1908732 - DNA, 15 bp, Homo sapiens
ctacctcttctaaat

SEQ ID NO: 1908733 - DNA, 15 bp, Homo sapiens
tacctcttctaaatg

SEQ ID NO: 1908734 - DNA, 15 bp, Homo sapiens
acctcttctaaatgt

SEQ ID NO: 1908735 - DNA, 15 bp, Homo sapiens
cctcttctaaatgta

SEQ ID NO: 1908736 - DNA, 15 bp, Homo sapiens
ctcttctaaatgtaa

SEQ ID NO: 1908737 - DNA, 15 bp, Homo sapiens
tcttctaaatgtaag

SEQ ID NO: 1908738 - DNA, 15 bp, Homo sapiens
cttctaaatgtaagc

SEQ ID NO: 1908739 - DNA, 15 bp, Homo sapiens
ttctaaatgtaagca

SEQ ID NO: 1908740 - DNA, 15 bp, Homo sapiens
tctaaatgtaagcaa

SEQ ID NO: 1908741 - DNA, 15 bp, Homo sapiens
ctaaatgtaagcaaa

SEQ ID NO: 1908742 - DNA, 15 bp, Homo sapiens
taaatgtaagcaaaa

SEQ ID NO: 1908743 - DNA, 15 bp, Homo sapiens
aaatgtaagcaaaaa

SEQ ID NO: 1908744 - DNA, 15 bp, Homo sapiens
aatgtaagcaaaaat

SEQ ID NO: 1908745 - DNA, 15 bp, Homo sapiens
atgtaagcaaaaatc

SEQ ID NO: 1908746 - DNA, 15 bp, Homo sapiens
tgtaagcaaaaatct

SEQ ID NO: 1908747 - DNA, 15 bp, Homo sapiens
gtaagcaaaaatctc

SEQ ID NO: 1908748 - DNA, 15 bp, Homo sapiens
taagcaaaaatctca

SEQ ID NO: 1908749 - DNA, 15 bp, Homo sapiens
aagcaaaaatctcaa

SEQ ID NO: 1908750 - DNA, 15 bp, Homo sapiens
agcaaaaatctcaac

SEQ ID NO: 1908751 - DNA, 15 bp, Homo sapiens
gcaaaaatctcaacc

SEQ ID NO: 1908752 - DNA, 15 bp, Homo sapiens
caaaaatctcaacct

SEQ ID NO: 1908753 - DNA, 15 bp, Homo sapiens
aaaaatctcaacctt

SEQ ID NO: 1908754 - DNA, 15 bp, Homo sapiens
aaaatctcaaccttc

SEQ ID NO: 1908755 - DNA, 15 bp, Homo sapiens
aaatctcaaccttct

SEQ ID NO: 1908756 - DNA, 15 bp, Homo sapiens
aatctcaaccttctg

SEQ ID NO: 1908757 - DNA, 15 bp, Homo sapiens
atctcaaccttctga

SEQ ID NO: 1908758 - DNA, 15 bp, Homo sapiens
tctcaaccttctgaa

SEQ ID NO: 1908759 - DNA, 15 bp, Homo sapiens
ctcaaccttctgaaa

SEQ ID NO: 1908760 - DNA, 15 bp, Homo sapiens
caaccttctgaaagc

SEQ ID NO: 1908761 - DNA, 15 bp, Homo sapiens
aaccttctgaaagca

SEQ ID NO: 1908762 - DNA, 15 bp, Homo sapiens
accttctgaaagcat

SEQ ID NO: 1908763 - DNA, 15 bp, Homo sapiens
ccttctgaaagcatc

SEQ ID NO: 1908764 - DNA, 15 bp, Homo sapiens
cttctgaaagcatca

SEQ ID NO: 1908765 - DNA, 15 bp, Homo sapiens
ttctgaaagcatcat

SEQ ID NO: 1908766 - DNA, 15 bp, Homo sapiens
tctgaaagcatcatt

SEQ ID NO: 1908767 - DNA, 15 bp, Homo sapiens
ctgaaagcatcattt

SEQ ID NO: 1908768 - DNA, 15 bp, Homo sapiens
tgaaagcatcattta

SEQ ID NO: 1908769 - DNA, 15 bp, Homo sapiens
gaaagcatcatttag

SEQ ID NO: 1908770 - DNA, 15 bp, Homo sapiens
aaagcatcatttaga

SEQ ID NO: 1908771 - DNA, 15 bp, Homo sapiens
aagcatcatttagaa

SEQ ID NO: 1908772 - DNA, 15 bp, Homo sapiens
agcatcatttagaac

SEQ ID NO: 1908773 - DNA, 15 bp, Homo sapiens
gcatcatttagaacc

SEQ ID NO: 1908774 - DNA, 15 bp, Homo sapiens
catcatttagaacct

SEQ ID NO: 1908775 - DNA, 15 bp, Homo sapiens
atcatttagaacctg

SEQ ID NO: 1908776 - DNA, 15 bp, Homo sapiens
tcatttagaacctgg

SEQ ID NO: 1908777 - DNA, 15 bp, Homo sapiens
catttagaacctgga

SEQ ID NO: 1908778 - DNA, 15 bp, Homo sapiens
atttagaacctggaa

SEQ ID NO: 1908779 - DNA, 15 bp, Homo sapiens
tttagaacctggaaa

SEQ ID NO: 1908780 - DNA, 15 bp, Homo sapiens
ttagaacctggaaat

SEQ ID NO: 1908781 - DNA, 15 bp, Homo sapiens
tagaacctggaaata

SEQ ID NO: 1908782 - DNA, 15 bp, Homo sapiens
agaacctggaaataa

SEQ ID NO: 1908783 - DNA, 15 bp, Homo sapiens
gaacctggaaataat

SEQ ID NO: 1908784 - DNA, 15 bp, Homo sapiens
aacctggaaataata

SEQ ID NO: 1908785 - DNA, 15 bp, Homo sapiens
acctggaaataatat

SEQ ID NO: 1908786 - DNA, 15 bp, Homo sapiens
cctggaaataatatc

SEQ ID NO: 1908787 - DNA, 15 bp, Homo sapiens
ctggaaataatatca

SEQ ID NO: 1908788 - DNA, 15 bp, Homo sapiens
tggaaataatatcac

SEQ ID NO: 1908789 - DNA, 15 bp, Homo sapiens
ggaaataatatcact

SEQ ID NO: 1908790 - DNA, 15 bp, Homo sapiens
gaaataatatcacta

SEQ ID NO: 1908791 - DNA, 15 bp, Homo sapiens
aaataatatcactac

SEQ ID NO: 1908792 - DNA, 15 bp, Homo sapiens
aataatatcactacc

SEQ ID NO: 1908793 - DNA, 15 bp, Homo sapiens
ataatatcactaccc

SEQ ID NO: 1908794 - DNA, 15 bp, Homo sapiens
taatatcactaccca

SEQ ID NO: 1908795 - DNA, 15 bp, Homo sapiens
aatatcactacccac

SEQ ID NO: 1908796 - DNA, 15 bp, Homo sapiens
atatcactacccacc

SEQ ID NO: 1908797 - DNA, 15 bp, Homo sapiens
tatcactacccacct

SEQ ID NO: 1908798 - DNA, 15 bp, Homo sapiens
atcactacccacctt

SEQ ID NO: 1908799 - DNA, 15 bp, Homo sapiens
tcactacccaccttg

SEQ ID NO: 1908800 - DNA, 15 bp, Homo sapiens
cactacccaccttgc

SEQ ID NO: 1908801 - DNA, 15 bp, Homo sapiens
actacccaccttgca

SEQ ID NO: 1908802 - DNA, 15 bp, Homo sapiens
ctacccaccttgcag

SEQ ID NO: 1908803 - DNA, 15 bp, Homo sapiens
tacccaccttgcaga

SEQ ID NO: 1908804 - DNA, 15 bp, Homo sapiens
acccaccttgcagag

SEQ ID NO: 1908805 - DNA, 15 bp, Homo sapiens
cccaccttgcagagt

SEQ ID NO: 1908806 - DNA, 15 bp, Homo sapiens
ccaccttgcagagtt

SEQ ID NO: 1908807 - DNA, 15 bp, Homo sapiens
caccttgcagagttt

SEQ ID NO: 1908808 - DNA, 15 bp, Homo sapiens
accttgcagagtttt

SEQ ID NO: 1908809 - DNA, 15 bp, Homo sapiens
ccttgcagagttttc

SEQ ID NO: 1908810 - DNA, 15 bp, Homo sapiens
cttgcagagttttca

SEQ ID NO: 1908811 - DNA, 15 bp, Homo sapiens
ttgcagagttttcat

SEQ ID NO: 1908812 - DNA, 15 bp, Homo sapiens
tgcagagttttcatt

SEQ ID NO: 1908813 - DNA, 15 bp, Homo sapiens
gcagagttttcattg

SEQ ID NO: 1908814 - DNA, 15 bp, Homo sapiens
cagagttttcattgt

SEQ ID NO: 1908815 - DNA, 15 bp, Homo sapiens
agagttttcattgta

SEQ ID NO: 1908816 - DNA, 15 bp, Homo sapiens
gagttttcattgtat

SEQ ID NO: 1908817 - DNA, 15 bp, Homo sapiens
agttttcattgtata

SEQ ID NO: 1908818 - DNA, 15 bp, Homo sapiens
gttttcattgtataa

SEQ ID NO: 1908819 - DNA, 15 bp, Homo sapiens
ttttcattgtataag

SEQ ID NO: 1908820 - DNA, 15 bp, Homo sapiens
tttcattgtataagc

SEQ ID NO: 1908821 - DNA, 15 bp, Homo sapiens
ttcattgtataagca

SEQ ID NO: 1908822 - DNA, 15 bp, Homo sapiens
tcattgtataagcat

SEQ ID NO: 1908823 - DNA, 15 bp, Homo sapiens
cattgtataagcata

SEQ ID NO: 1908824 - DNA, 15 bp, Homo sapiens
attgtataagcataa

SEQ ID NO: 1908825 - DNA, 15 bp, Homo sapiens
ttgtataagcataac

SEQ ID NO: 1908826 - DNA, 15 bp, Homo sapiens
tgtataagcataaca

SEQ ID NO: 1908827 - DNA, 15 bp, Homo sapiens
gtataagcataacac

SEQ ID NO: 1908828 - DNA, 15 bp, Homo sapiens
tataagcataacaca

SEQ ID NO: 1908829 - DNA, 15 bp, Homo sapiens
ataagcataacacag

SEQ ID NO: 1908830 - DNA, 15 bp, Homo sapiens
taagcataacacaga

SEQ ID NO: 1908831 - DNA, 15 bp, Homo sapiens
aagcataacacagat

SEQ ID NO: 1908832 - DNA, 15 bp, Homo sapiens
agcataacacagata

SEQ ID NO: 1908833 - DNA, 15 bp, Homo sapiens
gcataacacagatat

SEQ ID NO: 1908834 - DNA, 15 bp, Homo sapiens
cataacacagatata

SEQ ID NO: 1908835 - DNA, 15 bp, Homo sapiens
ataacacagatatat

SEQ ID NO: 1908836 - DNA, 15 bp, Homo sapiens
taacacagatatatg

SEQ ID NO: 1908837 - DNA, 15 bp, Homo sapiens
aacacagatatatgc

SEQ ID NO: 1908838 - DNA, 15 bp, Homo sapiens
acacagatatatgca

SEQ ID NO: 1908839 - DNA, 15 bp, Homo sapiens
cacagatatatgcat

SEQ ID NO: 1908840 - DNA, 15 bp, Homo sapiens
acagatatatgcatg

SEQ ID NO: 1908841 - DNA, 15 bp, Homo sapiens
cagatatatgcatgt

SEQ ID NO: 1908842 - DNA, 15 bp, Homo sapiens
agatatatgcatgtt

SEQ ID NO: 1908843 - DNA, 15 bp, Homo sapiens
gatatatgcatgttc

SEQ ID NO: 1908844 - DNA, 15 bp, Homo sapiens
tatatgcatgttcat

SEQ ID NO: 1908845 - DNA, 15 bp, Homo sapiens
atatgcatgttcatt

SEQ ID NO: 1908846 - DNA, 15 bp, Homo sapiens
tatgcatgttcattt

SEQ ID NO: 1908847 - DNA, 15 bp, Homo sapiens
atgcatgttcatttc

SEQ ID NO: 1908848 - DNA, 15 bp, Homo sapiens
tgcatgttcatttca

SEQ ID NO: 1908849 - DNA, 15 bp, Homo sapiens
gcatgttcatttcat

SEQ ID NO: 1908850 - DNA, 15 bp, Homo sapiens
catgttcatttcatg

SEQ ID NO: 1908851 - DNA, 15 bp, Homo sapiens
atgttcatttcatga

SEQ ID NO: 1908852 - DNA, 15 bp, Homo sapiens
tgttcatttcatgaa

SEQ ID NO: 1908853 - DNA, 15 bp, Homo sapiens
gttcatttcatgaaa

SEQ ID NO: 1908854 - DNA, 15 bp, Homo sapiens
ttcatttcatgaaat

SEQ ID NO: 1908855 - DNA, 15 bp, Homo sapiens
tcatttcatgaaata

SEQ ID NO: 1908856 - DNA, 15 bp, Homo sapiens
catttcatgaaatac

SEQ ID NO: 1908857 - DNA, 15 bp, Homo sapiens
atttcatgaaatacg

SEQ ID NO: 1908858 - DNA, 15 bp, Homo sapiens
tttcatgaaatacgt

SEQ ID NO: 1908859 - DNA, 15 bp, Homo sapiens
ttcatgaaatacgta

SEQ ID NO: 1908860 - DNA, 15 bp, Homo sapiens
tcatgaaatacgtat

SEQ ID NO: 1908861 - DNA, 15 bp, Homo sapiens
catgaaatacgtatg

SEQ ID NO: 1908862 - DNA, 15 bp, Homo sapiens
atgaaatacgtatgt

SEQ ID NO: 1908863 - DNA, 15 bp, Homo sapiens
tgaaatacgtatgtg

SEQ ID NO: 1908864 - DNA, 15 bp, Homo sapiens
gaaatacgtatgtgc

SEQ ID NO: 1908865 - DNA, 15 bp, Homo sapiens
aaatacgtatgtgca

SEQ ID NO: 1908866 - DNA, 15 bp, Homo sapiens
aatacgtatgtgcat

SEQ ID NO: 1908867 - DNA, 15 bp, Homo sapiens
atacgtatgtgcata

SEQ ID NO: 1908868 - DNA, 15 bp, Homo sapiens
tacgtatgtgcataa

SEQ ID NO: 1908869 - DNA, 15 bp, Homo sapiens
acgtatgtgcataaa

SEQ ID NO: 1908870 - DNA, 15 bp, Homo sapiens
cgtatgtgcataaat

SEQ ID NO: 1908871 - DNA, 15 bp, Homo sapiens
gtatgtgcataaata

SEQ ID NO: 1908872 - DNA, 15 bp, Homo sapiens
tatgtgcataaataa

SEQ ID NO: 1908873 - DNA, 15 bp, Homo sapiens
atgtgcataaataat

SEQ ID NO: 1908874 - DNA, 15 bp, Homo sapiens
tgtgcataaataata

SEQ ID NO: 1908875 - DNA, 15 bp, Homo sapiens
gtgcataaataatac

SEQ ID NO: 1908876 - DNA, 15 bp, Homo sapiens
tgcataaataataca

SEQ ID NO: 1908877 - DNA, 15 bp, Homo sapiens
gcataaataatacat

SEQ ID NO: 1908878 - DNA, 15 bp, Homo sapiens
cataaataatacatt

SEQ ID NO: 1908879 - DNA, 15 bp, Homo sapiens
ataaataatacattc

SEQ ID NO: 1908880 - DNA, 15 bp, Homo sapiens
taaataatacattca

SEQ ID NO: 1908881 - DNA, 15 bp, Homo sapiens
aaataatacattcaa

SEQ ID NO: 1908882 - DNA, 15 bp, Homo sapiens
aataatacattcaaa

SEQ ID NO: 1908883 - DNA, 15 bp, Homo sapiens
ataatacattcaaag

SEQ ID NO: 1908884 - DNA, 15 bp, Homo sapiens
taatacattcaaagt

SEQ ID NO: 1908885 - DNA, 15 bp, Homo sapiens
aatacattcaaagtg

SEQ ID NO: 1908886 - DNA, 15 bp, Homo sapiens
atacattcaaagtgt

SEQ ID NO: 1908887 - DNA, 15 bp, Homo sapiens
tacattcaaagtgtg

SEQ ID NO: 1908888 - DNA, 15 bp, Homo sapiens
acattcaaagtgtgt

SEQ ID NO: 1908889 - DNA, 15 bp, Homo sapiens
cattcaaagtgtgtg

SEQ ID NO: 1908890 - DNA, 15 bp, Homo sapiens
attcaaagtgtgtgg

SEQ ID NO: 1908891 - DNA, 15 bp, Homo sapiens
ttcaaagtgtgtggc

SEQ ID NO: 1908892 - DNA, 15 bp, Homo sapiens
tcaaagtgtgtggca

SEQ ID NO: 1908893 - DNA, 15 bp, Homo sapiens
caaagtgtgtggcat

SEQ ID NO: 1908894 - DNA, 15 bp, Homo sapiens
aaagtgtgtggcata

SEQ ID NO: 1908895 - DNA, 15 bp, Homo sapiens
aagtgtgtggcatat

SEQ ID NO: 1908896 - DNA, 15 bp, Homo sapiens
agtgtgtggcatata

SEQ ID NO: 1908897 - DNA, 15 bp, Homo sapiens
gtgtgtggcatatag

SEQ ID NO: 1908898 - DNA, 15 bp, Homo sapiens
tgtgtggcatatagt

SEQ ID NO: 1908899 - DNA, 15 bp, Homo sapiens
gtgtggcatatagta

SEQ ID NO: 1908900 - DNA, 15 bp, Homo sapiens
tgtggcatatagtag

SEQ ID NO: 1908901 - DNA, 15 bp, Homo sapiens
gtggcatatagtaga

SEQ ID NO: 1908902 - DNA, 15 bp, Homo sapiens
tggcatatagtagat

SEQ ID NO: 1908903 - DNA, 15 bp, Homo sapiens
ggcatatagtagata

SEQ ID NO: 1908904 - DNA, 15 bp, Homo sapiens
gcatatagtagataa

SEQ ID NO: 1908905 - DNA, 15 bp, Homo sapiens
catatagtagataat

SEQ ID NO: 1908906 - DNA, 15 bp, Homo sapiens
atatagtagataata

SEQ ID NO: 1908907 - DNA, 15 bp, Homo sapiens
tatagtagataatat

SEQ ID NO: 1908908 - DNA, 15 bp, Homo sapiens
atagtagataatatg

SEQ ID NO: 1908909 - DNA, 15 bp, Homo sapiens
tagtagataatatgg

SEQ ID NO: 1908910 - DNA, 15 bp, Homo sapiens
agtagataatatggt

SEQ ID NO: 1908911 - DNA, 15 bp, Homo sapiens
gtagataatatggta

SEQ ID NO: 1908912 - DNA, 15 bp, Homo sapiens
tagataatatggtat

SEQ ID NO: 1908913 - DNA, 15 bp, Homo sapiens
agataatatggtata

SEQ ID NO: 1908914 - DNA, 15 bp, Homo sapiens
gataatatggtatat

SEQ ID NO: 1908915 - DNA, 15 bp, Homo sapiens
ataatatggtatata

SEQ ID NO: 1908916 - DNA, 15 bp, Homo sapiens
taatatggtatatag

SEQ ID NO: 1908917 - DNA, 15 bp, Homo sapiens
aatatggtatatagt

SEQ ID NO: 1908918 - DNA, 15 bp, Homo sapiens
atatggtatatagta

SEQ ID NO: 1908919 - DNA, 15 bp, Homo sapiens
tatggtatatagtag

SEQ ID NO: 1908920 - DNA, 15 bp, Homo sapiens
atggtatatagtagc

SEQ ID NO: 1908921 - DNA, 15 bp, Homo sapiens
tggtatatagtagct

SEQ ID NO: 1908922 - DNA, 15 bp, Homo sapiens
ggtatatagtagcta

SEQ ID NO: 1908923 - DNA, 15 bp, Homo sapiens
gtatatagtagctaa

SEQ ID NO: 1908924 - DNA, 15 bp, Homo sapiens
tatatagtagctaat

SEQ ID NO: 1908925 - DNA, 15 bp, Homo sapiens
atatagtagctaatg

SEQ ID NO: 1908926 - DNA, 15 bp, Homo sapiens
tatagtagctaatgt

SEQ ID NO: 1908927 - DNA, 15 bp, Homo sapiens
atagtagctaatgtt

SEQ ID NO: 1908928 - DNA, 15 bp, Homo sapiens
tagtagctaatgtta

SEQ ID NO: 1908929 - DNA, 15 bp, Homo sapiens
agtagctaatgttat

SEQ ID NO: 1908930 - DNA, 15 bp, Homo sapiens
gtagctaatgttatt

SEQ ID NO: 1908931 - DNA, 15 bp, Homo sapiens
tagctaatgttattt

SEQ ID NO: 1908932 - DNA, 15 bp, Homo sapiens
agctaatgttatttc

SEQ ID NO: 1908933 - DNA, 15 bp, Homo sapiens
gctaatgttatttcc

SEQ ID NO: 1908934 - DNA, 15 bp, Homo sapiens
ctaatgttatttccc

SEQ ID NO: 1908935 - DNA, 15 bp, Homo sapiens
taatgttatttccca

SEQ ID NO: 1908936 - DNA, 15 bp, Homo sapiens
aatgttatttcccat

SEQ ID NO: 1908937 - DNA, 15 bp, Homo sapiens
atgttatttcccatc

SEQ ID NO: 1908938 - DNA, 15 bp, Homo sapiens
tgttatttcccatct

SEQ ID NO: 1908939 - DNA, 15 bp, Homo sapiens
gttatttcccatctc

SEQ ID NO: 1908940 - DNA, 15 bp, Homo sapiens
ttatttcccatctca

SEQ ID NO: 1908941 - DNA, 15 bp, Homo sapiens
tatttcccatctcat

SEQ ID NO: 1908942 - DNA, 15 bp, Homo sapiens
atttcccatctcatg

SEQ ID NO: 1908943 - DNA, 15 bp, Homo sapiens
tttcccatctcatgc

SEQ ID NO: 1908944 - DNA, 15 bp, Homo sapiens
ttcccatctcatgct

SEQ ID NO: 1908945 - DNA, 15 bp, Homo sapiens
tcccatctcatgctt

SEQ ID NO: 1908946 - DNA, 15 bp, Homo sapiens
cccatctcatgctta

SEQ ID NO: 1908947 - DNA, 15 bp, Homo sapiens
ccatctcatgcttat

SEQ ID NO: 1908948 - DNA, 15 bp, Homo sapiens
catctcatgcttatc

SEQ ID NO: 1908949 - DNA, 15 bp, Homo sapiens
atctcatgcttatca

SEQ ID NO: 1908950 - DNA, 15 bp, Homo sapiens
tctcatgcttatcat

SEQ ID NO: 1908951 - DNA, 15 bp, Homo sapiens
ctcatgcttatcatt

SEQ ID NO: 1908952 - DNA, 15 bp, Homo sapiens
tcatgcttatcatta

SEQ ID NO: 1908953 - DNA, 15 bp, Homo sapiens
catgcttatcattaa

SEQ ID NO: 1908954 - DNA, 15 bp, Homo sapiens
atgcttatcattaat

SEQ ID NO: 1908955 - DNA, 15 bp, Homo sapiens
tgcttatcattaata

SEQ ID NO: 1908956 - DNA, 15 bp, Homo sapiens
gcttatcattaatat

SEQ ID NO: 1908957 - DNA, 15 bp, Homo sapiens
cttatcattaatatt

SEQ ID NO: 1908958 - DNA, 15 bp, Homo sapiens
ttatcattaatattg

SEQ ID NO: 1908959 - DNA, 15 bp, Homo sapiens
tatcattaatattgt

SEQ ID NO: 1908960 - DNA, 15 bp, Homo sapiens
atcattaatattgtg

SEQ ID NO: 1908961 - DNA, 15 bp, Homo sapiens
tcattaatattgtgc

SEQ ID NO: 1908962 - DNA, 15 bp, Homo sapiens
cattaatattgtgct

SEQ ID NO: 1908963 - DNA, 15 bp, Homo sapiens
attaatattgtgctt

SEQ ID NO: 1908964 - DNA, 15 bp, Homo sapiens
ttaatattgtgctta

SEQ ID NO: 1908965 - DNA, 15 bp, Homo sapiens
taatattgtgcttaa

SEQ ID NO: 1908966 - DNA, 15 bp, Homo sapiens
aatattgtgcttaac

SEQ ID NO: 1908967 - DNA, 15 bp, Homo sapiens
atattgtgcttaacc

SEQ ID NO: 1908968 - DNA, 15 bp, Homo sapiens
tattgtgcttaacca

SEQ ID NO: 1908969 - DNA, 15 bp, Homo sapiens
attgtgcttaaccaa

SEQ ID NO: 1908970 - DNA, 15 bp, Homo sapiens
ttgtgcttaaccaaa

SEQ ID NO: 1908971 - DNA, 15 bp, Homo sapiens
tgtgcttaaccaaac

SEQ ID NO: 1908972 - DNA, 15 bp, Homo sapiens
gtgcttaaccaaact

SEQ ID NO: 1908973 - DNA, 15 bp, Homo sapiens
tgcttaaccaaactg

SEQ ID NO: 1908974 - DNA, 15 bp, Homo sapiens
gcttaaccaaactga

SEQ ID NO: 1908975 - DNA, 15 bp, Homo sapiens
cttaaccaaactgaa

SEQ ID NO: 1908976 - DNA, 15 bp, Homo sapiens
ttaaccaaactgaaa

SEQ ID NO: 1908977 - DNA, 15 bp, Homo sapiens
taaccaaactgaaag

SEQ ID NO: 1908978 - DNA, 15 bp, Homo sapiens
aaccaaactgaaagc

SEQ ID NO: 1908979 - DNA, 15 bp, Homo sapiens
accaaactgaaagcc

SEQ ID NO: 1908980 - DNA, 15 bp, Homo sapiens
ccaaactgaaagcca

SEQ ID NO: 1908981 - DNA, 15 bp, Homo sapiens
caaactgaaagccac

SEQ ID NO: 1908982 - DNA, 15 bp, Homo sapiens
aaactgaaagccact

SEQ ID NO: 1908983 - DNA, 15 bp, Homo sapiens
ccacgtgttctcatt

SEQ ID NO: 1908984 - DNA, 15 bp, Homo sapiens
cacgtgttctcattg

SEQ ID NO: 1908985 - DNA, 15 bp, Homo sapiens
acgtgttctcattgc

SEQ ID NO: 1908986 - DNA, 15 bp, Homo sapiens
cgtgttctcattgct

SEQ ID NO: 1908987 - DNA, 15 bp, Homo sapiens
gtgttctcattgctc

SEQ ID NO: 1908988 - DNA, 15 bp, Homo sapiens
tgttctcattgctca

SEQ ID NO: 1908989 - DNA, 15 bp, Homo sapiens
gttctcattgctcag

SEQ ID NO: 1908990 - DNA, 15 bp, Homo sapiens
ttctcattgctcagc

SEQ ID NO: 1908991 - DNA, 15 bp, Homo sapiens
tctcattgctcagct

SEQ ID NO: 1908992 - DNA, 15 bp, Homo sapiens
ctcattgctcagctc

SEQ ID NO: 1908993 - DNA, 15 bp, Homo sapiens
tcattgctcagctcc

SEQ ID NO: 1908994 - DNA, 15 bp, Homo sapiens
cattgctcagctccc

SEQ ID NO: 1908995 - DNA, 15 bp, Homo sapiens
attgctcagctccca

SEQ ID NO: 1908996 - DNA, 15 bp, Homo sapiens
ttgctcagctcccac

SEQ ID NO: 1908997 - DNA, 15 bp, Homo sapiens
tgctcagctcccact

SEQ ID NO: 1908998 - DNA, 15 bp, Homo sapiens
gctcagctcccactt

SEQ ID NO: 1908999 - DNA, 15 bp, Homo sapiens
ctcagctcccactta

SEQ ID NO: 1909000 - DNA, 15 bp, Homo sapiens
tcagctcccacttat

SEQ ID NO: 1909001 - DNA, 15 bp, Homo sapiens
cagctcccacttata

SEQ ID NO: 1909002 - DNA, 15 bp, Homo sapiens
agctcccacttataa

SEQ ID NO: 1909003 - DNA, 15 bp, Homo sapiens
gctcccacttataag

SEQ ID NO: 1909004 - DNA, 15 bp, Homo sapiens
ctcccacttataagt

SEQ ID NO: 1909005 - DNA, 15 bp, Homo sapiens
tcccacttataagtg

SEQ ID NO: 1909006 - DNA, 15 bp, Homo sapiens
cccacttataagtga

SEQ ID NO: 1909007 - DNA, 15 bp, Homo sapiens
ccacttataagtgag

SEQ ID NO: 1909008 - DNA, 15 bp, Homo sapiens
acttataagtgagaa

SEQ ID NO: 1909009 - DNA, 15 bp, Homo sapiens
cttataagtgagaac

SEQ ID NO: 1909010 - DNA, 15 bp, Homo sapiens
ttataagtgagaaca

SEQ ID NO: 1909011 - DNA, 15 bp, Homo sapiens
tataagtgagaacat

SEQ ID NO: 1909012 - DNA, 15 bp, Homo sapiens
aagtgagaacatgcg

SEQ ID NO: 1909013 - DNA, 15 bp, Homo sapiens
gtttggttttctgtt

SEQ ID NO: 1909014 - DNA, 15 bp, Homo sapiens
tttggttttctgttt

SEQ ID NO: 1909015 - DNA, 15 bp, Homo sapiens
ttggttttctgtttc

SEQ ID NO: 1909016 - DNA, 15 bp, Homo sapiens
tggttttctgtttct

SEQ ID NO: 1909017 - DNA, 15 bp, Homo sapiens
ggttttctgtttctg

SEQ ID NO: 1909018 - DNA, 15 bp, Homo sapiens
gttttctgtttctgc

SEQ ID NO: 1909019 - DNA, 15 bp, Homo sapiens
ttttctgtttctgcg

SEQ ID NO: 1909020 - DNA, 15 bp, Homo sapiens
tttctgtttctgcgt

SEQ ID NO: 1909021 - DNA, 15 bp, Homo sapiens
ttctgtttctgcgtt

SEQ ID NO: 1909022 - DNA, 15 bp, Homo sapiens
tctgtttctgcgtta

SEQ ID NO: 1909023 - DNA, 15 bp, Homo sapiens
ctgtttctgcgttag

SEQ ID NO: 1909024 - DNA, 15 bp, Homo sapiens
tgtttctgcgttagt

SEQ ID NO: 1909025 - DNA, 15 bp, Homo sapiens
gtttctgcgttagtt

SEQ ID NO: 1909026 - DNA, 15 bp, Homo sapiens
tttctgcgttagttt

SEQ ID NO: 1909027 - DNA, 15 bp, Homo sapiens
ttctgcgttagtttg

SEQ ID NO: 1909028 - DNA, 15 bp, Homo sapiens
tctgcgttagtttgc

SEQ ID NO: 1909029 - DNA, 15 bp, Homo sapiens
ctgcgttagtttgct

SEQ ID NO: 1909030 - DNA, 15 bp, Homo sapiens
tgcgttagtttgctg

SEQ ID NO: 1909031 - DNA, 15 bp, Homo sapiens
gcgttagtttgctga

SEQ ID NO: 1909032 - DNA, 15 bp, Homo sapiens
cgttagtttgctgag

SEQ ID NO: 1909033 - DNA, 15 bp, Homo sapiens
agtttgctgaggata

SEQ ID NO: 1909034 - DNA, 15 bp, Homo sapiens
gtttgctgaggataa

SEQ ID NO: 1909035 - DNA, 15 bp, Homo sapiens
tttgctgaggataat

SEQ ID NO: 1909036 - DNA, 15 bp, Homo sapiens
ttgctgaggataatg

SEQ ID NO: 1909037 - DNA, 15 bp, Homo sapiens
tgctgaggataatgg

SEQ ID NO: 1909038 - DNA, 15 bp, Homo sapiens
gctgaggataatggc

SEQ ID NO: 1909039 - DNA, 15 bp, Homo sapiens
ctgaggataatggct

SEQ ID NO: 1909040 - DNA, 15 bp, Homo sapiens
tgaggataatggctt

SEQ ID NO: 1909041 - DNA, 15 bp, Homo sapiens
gaggataatggcttc

SEQ ID NO: 1909042 - DNA, 15 bp, Homo sapiens
aggataatggcttcc

SEQ ID NO: 1909043 - DNA, 15 bp, Homo sapiens
ggataatggcttcca

SEQ ID NO: 1909044 - DNA, 15 bp, Homo sapiens
gataatggcttccag

SEQ ID NO: 1909045 - DNA, 15 bp, Homo sapiens
ataatggcttccagc

SEQ ID NO: 1909046 - DNA, 15 bp, Homo sapiens
taatggcttccagct

SEQ ID NO: 1909047 - DNA, 15 bp, Homo sapiens
aatggcttccagctt

SEQ ID NO: 1909048 - DNA, 15 bp, Homo sapiens
tggcttccagcttca

SEQ ID NO: 1909049 - DNA, 15 bp, Homo sapiens
ggcttccagcttcat

SEQ ID NO: 1909050 - DNA, 15 bp, Homo sapiens
gcttccagcttcatc

SEQ ID NO: 1909051 - DNA, 15 bp, Homo sapiens
cttccagcttcatct

SEQ ID NO: 1909052 - DNA, 15 bp, Homo sapiens
ttccagcttcatcta

SEQ ID NO: 1909053 - DNA, 15 bp, Homo sapiens
tccagcttcatctaa

SEQ ID NO: 1909054 - DNA, 15 bp, Homo sapiens
ccagcttcatctaag

SEQ ID NO: 1909055 - DNA, 15 bp, Homo sapiens
cagcttcatctaagt

SEQ ID NO: 1909056 - DNA, 15 bp, Homo sapiens
agcttcatctaagta

SEQ ID NO: 1909057 - DNA, 15 bp, Homo sapiens
gcttcatctaagtaa

SEQ ID NO: 1909058 - DNA, 15 bp, Homo sapiens
cttcatctaagtaaa

SEQ ID NO: 1909059 - DNA, 15 bp, Homo sapiens
ttcatctaagtaaat

SEQ ID NO: 1909060 - DNA, 15 bp, Homo sapiens
tcatctaagtaaatc

SEQ ID NO: 1909061 - DNA, 15 bp, Homo sapiens
catctaagtaaatct

SEQ ID NO: 1909062 - DNA, 15 bp, Homo sapiens
atctaagtaaatcta

SEQ ID NO: 1909063 - DNA, 15 bp, Homo sapiens
tctaagtaaatctaa

SEQ ID NO: 1909064 - DNA, 15 bp, Homo sapiens
ctaagtaaatctaaa

SEQ ID NO: 1909065 - DNA, 15 bp, Homo sapiens
taagtaaatctaaat

SEQ ID NO: 1909066 - DNA, 15 bp, Homo sapiens
aagtaaatctaaatc

SEQ ID NO: 1909067 - DNA, 15 bp, Homo sapiens
agtaaatctaaatct

SEQ ID NO: 1909068 - DNA, 15 bp, Homo sapiens
gtaaatctaaatctt

SEQ ID NO: 1909069 - DNA, 15 bp, Homo sapiens
taaatctaaatctta

SEQ ID NO: 1909070 - DNA, 15 bp, Homo sapiens
aaatctaaatcttaa

SEQ ID NO: 1909071 - DNA, 15 bp, Homo sapiens
aatctaaatcttaat

SEQ ID NO: 1909072 - DNA, 15 bp, Homo sapiens
atctaaatcttaatc

SEQ ID NO: 1909073 - DNA, 15 bp, Homo sapiens
tctaaatcttaatct

SEQ ID NO: 1909074 - DNA, 15 bp, Homo sapiens
ctaaatcttaatctc

SEQ ID NO: 1909075 - DNA, 15 bp, Homo sapiens
taaatcttaatctcc

SEQ ID NO: 1909076 - DNA, 15 bp, Homo sapiens
aaatcttaatctcct

SEQ ID NO: 1909077 - DNA, 15 bp, Homo sapiens
aatcttaatctcctc

SEQ ID NO: 1909078 - DNA, 15 bp, Homo sapiens
atcttaatctcctcc

SEQ ID NO: 1909079 - DNA, 15 bp, Homo sapiens
tcttaatctcctcca

SEQ ID NO: 1909080 - DNA, 15 bp, Homo sapiens
cttaatctcctccat

SEQ ID NO: 1909081 - DNA, 15 bp, Homo sapiens
ttaatctcctccatc

SEQ ID NO: 1909082 - DNA, 15 bp, Homo sapiens
taatctcctccatca

SEQ ID NO: 1909083 - DNA, 15 bp, Homo sapiens
aatctcctccatcat

SEQ ID NO: 1909084 - DNA, 15 bp, Homo sapiens
atctcctccatcatt

SEQ ID NO: 1909085 - DNA, 15 bp, Homo sapiens
tctcctccatcattt

SEQ ID NO: 1909086 - DNA, 15 bp, Homo sapiens
ctcctccatcatttc

SEQ ID NO: 1909087 - DNA, 15 bp, Homo sapiens
tcctccatcatttct

SEQ ID NO: 1909088 - DNA, 15 bp, Homo sapiens
cctccatcatttctc

SEQ ID NO: 1909089 - DNA, 15 bp, Homo sapiens
ctccatcatttctct

SEQ ID NO: 1909090 - DNA, 15 bp, Homo sapiens
tccatcatttctctt

SEQ ID NO: 1909091 - DNA, 15 bp, Homo sapiens
ccatcatttctcttt

SEQ ID NO: 1909092 - DNA, 15 bp, Homo sapiens
catcatttctctttt

SEQ ID NO: 1909093 - DNA, 15 bp, Homo sapiens
atcatttctcttttt

SEQ ID NO: 1909094 - DNA, 15 bp, Homo sapiens
tcatttctctttttt

SEQ ID NO: 1909095 - DNA, 15 bp, Homo sapiens
catttctcttttttt

SEQ ID NO: 1909096 - DNA, 15 bp, Homo sapiens
atttctcttttttta

SEQ ID NO: 1909097 - DNA, 15 bp, Homo sapiens
tttctctttttttaa

SEQ ID NO: 1909098 - DNA, 15 bp, Homo sapiens
ttctctttttttaaa

SEQ ID NO: 1909099 - DNA, 15 bp, Homo sapiens
tctctttttttaaac

SEQ ID NO: 1909100 - DNA, 15 bp, Homo sapiens
ctctttttttaaacc

SEQ ID NO: 1909101 - DNA, 15 bp, Homo sapiens
tctttttttaaaccc

SEQ ID NO: 1909102 - DNA, 15 bp, Homo sapiens
ctttttttaaacccc

SEQ ID NO: 1909103 - DNA, 15 bp, Homo sapiens
tttttttaaacccct

SEQ ID NO: 1909104 - DNA, 15 bp, Homo sapiens
ttttttaaacccctc

SEQ ID NO: 1909105 - DNA, 15 bp, Homo sapiens
tttttaaacccctct

SEQ ID NO: 1909106 - DNA, 15 bp, Homo sapiens
ttttaaacccctctt

SEQ ID NO: 1909107 - DNA, 15 bp, Homo sapiens
tttaaacccctcttt

SEQ ID NO: 1909108 - DNA, 15 bp, Homo sapiens
ttaaacccctcttta

SEQ ID NO: 1909109 - DNA, 15 bp, Homo sapiens
taaacccctctttat

SEQ ID NO: 1909110 - DNA, 15 bp, Homo sapiens
aaacccctctttatc

SEQ ID NO: 1909111 - DNA, 15 bp, Homo sapiens
aacccctctttatct

SEQ ID NO: 1909112 - DNA, 15 bp, Homo sapiens
acccctctttatcta

SEQ ID NO: 1909113 - DNA, 15 bp, Homo sapiens
cccctctttatctaa

SEQ ID NO: 1909114 - DNA, 15 bp, Homo sapiens
ccctctttatctaac

SEQ ID NO: 1909115 - DNA, 15 bp, Homo sapiens
cctctttatctaaca

SEQ ID NO: 1909116 - DNA, 15 bp, Homo sapiens
ctctttatctaacac

SEQ ID NO: 1909117 - DNA, 15 bp, Homo sapiens
tctttatctaacacc

SEQ ID NO: 1909118 - DNA, 15 bp, Homo sapiens
ctttatctaacacct

SEQ ID NO: 1909119 - DNA, 15 bp, Homo sapiens
tttatctaacacctg

SEQ ID NO: 1909120 - DNA, 15 bp, Homo sapiens
ttatctaacacctga

SEQ ID NO: 1909121 - DNA, 15 bp, Homo sapiens
tatctaacacctgaa

SEQ ID NO: 1909122 - DNA, 15 bp, Homo sapiens
atctaacacctgaaa

SEQ ID NO: 1909123 - DNA, 15 bp, Homo sapiens
tctaacacctgaaac

SEQ ID NO: 1909124 - DNA, 15 bp, Homo sapiens
ctaacacctgaaaca

SEQ ID NO: 1909125 - DNA, 15 bp, Homo sapiens
taacacctgaaacac

SEQ ID NO: 1909126 - DNA, 15 bp, Homo sapiens
aacacctgaaacact

SEQ ID NO: 1909127 - DNA, 15 bp, Homo sapiens
acacctgaaacactg

SEQ ID NO: 1909128 - DNA, 15 bp, Homo sapiens
cacctgaaacactgg

SEQ ID NO: 1909129 - DNA, 15 bp, Homo sapiens
acctgaaacactggg

SEQ ID NO: 1909130 - DNA, 15 bp, Homo sapiens
cctgaaacactggga

SEQ ID NO: 1909131 - DNA, 15 bp, Homo sapiens
ctgaaacactgggag

SEQ ID NO: 1909132 - DNA, 15 bp, Homo sapiens
tgaaacactgggaga

SEQ ID NO: 1909133 - DNA, 15 bp, Homo sapiens
gaaacactgggagag

SEQ ID NO: 1909134 - DNA, 15 bp, Homo sapiens
aaacactgggagagt

SEQ ID NO: 1909135 - DNA, 15 bp, Homo sapiens
aacactgggagagtt

SEQ ID NO: 1909136 - DNA, 15 bp, Homo sapiens
acactgggagagttt

SEQ ID NO: 1909137 - DNA, 15 bp, Homo sapiens
cactgggagagttta

SEQ ID NO: 1909138 - DNA, 15 bp, Homo sapiens
actgggagagtttaa

SEQ ID NO: 1909139 - DNA, 15 bp, Homo sapiens
ctgggagagtttaag

SEQ ID NO: 1909140 - DNA, 15 bp, Homo sapiens
tgggagagtttaaga

SEQ ID NO: 1909141 - DNA, 15 bp, Homo sapiens
gggagagtttaagaa

SEQ ID NO: 1909142 - DNA, 15 bp, Homo sapiens
ggagagtttaagaat

SEQ ID NO: 1909143 - DNA, 15 bp, Homo sapiens
gagagtttaagaatc

SEQ ID NO: 1909144 - DNA, 15 bp, Homo sapiens
agagtttaagaatca

SEQ ID NO: 1909145 - DNA, 15 bp, Homo sapiens
gagtttaagaatcag

SEQ ID NO: 1909146 - DNA, 15 bp, Homo sapiens
agtttaagaatcagt

SEQ ID NO: 1909147 - DNA, 15 bp, Homo sapiens
gtttaagaatcagtc

SEQ ID NO: 1909148 - DNA, 15 bp, Homo sapiens
tttaagaatcagtcc

SEQ ID NO: 1909149 - DNA, 15 bp, Homo sapiens
ttaagaatcagtccc

SEQ ID NO: 1909150 - DNA, 15 bp, Homo sapiens
taagaatcagtccct

SEQ ID NO: 1909151 - DNA, 15 bp, Homo sapiens
aagaatcagtccctt

SEQ ID NO: 1909152 - DNA, 15 bp, Homo sapiens
agaatcagtcccttt

SEQ ID NO: 1909153 - DNA, 15 bp, Homo sapiens
gaatcagtccctttg

SEQ ID NO: 1909154 - DNA, 15 bp, Homo sapiens
aatcagtccctttgt

SEQ ID NO: 1909155 - DNA, 15 bp, Homo sapiens
atcagtccctttgtc

SEQ ID NO: 1909156 - DNA, 15 bp, Homo sapiens
tcagtccctttgtct

SEQ ID NO: 1909157 - DNA, 15 bp, Homo sapiens
cagtccctttgtctc

SEQ ID NO: 1909158 - DNA, 15 bp, Homo sapiens
agtccctttgtctcc

SEQ ID NO: 1909159 - DNA, 15 bp, Homo sapiens
gtccctttgtctcca

SEQ ID NO: 1909160 - DNA, 15 bp, Homo sapiens
tccctttgtctccat

SEQ ID NO: 1909161 - DNA, 15 bp, Homo sapiens
ccctttgtctccata

SEQ ID NO: 1909162 - DNA, 15 bp, Homo sapiens
cctttgtctccatat

SEQ ID NO: 1909163 - DNA, 15 bp, Homo sapiens
ctttgtctccatatg

SEQ ID NO: 1909164 - DNA, 15 bp, Homo sapiens
tttgtctccatatgt

SEQ ID NO: 1909165 - DNA, 15 bp, Homo sapiens
ttgtctccatatgta

SEQ ID NO: 1909166 - DNA, 15 bp, Homo sapiens
tgtctccatatgtaa

SEQ ID NO: 1909167 - DNA, 15 bp, Homo sapiens
gtctccatatgtaaa

SEQ ID NO: 1909168 - DNA, 15 bp, Homo sapiens
tctccatatgtaaac

SEQ ID NO: 1909169 - DNA, 15 bp, Homo sapiens
ctccatatgtaaaca

SEQ ID NO: 1909170 - DNA, 15 bp, Homo sapiens
tccatatgtaaacat

SEQ ID NO: 1909171 - DNA, 15 bp, Homo sapiens
ccatatgtaaacatt

SEQ ID NO: 1909172 - DNA, 15 bp, Homo sapiens
catatgtaaacattt

SEQ ID NO: 1909173 - DNA, 15 bp, Homo sapiens
atatgtaaacatttc

SEQ ID NO: 1909174 - DNA, 15 bp, Homo sapiens
tatgtaaacatttct

SEQ ID NO: 1909175 - DNA, 15 bp, Homo sapiens
atgtaaacatttcta

SEQ ID NO: 1909176 - DNA, 15 bp, Homo sapiens
tgtaaacatttctaa

SEQ ID NO: 1909177 - DNA, 15 bp, Homo sapiens
gtaaacatttctaaa

SEQ ID NO: 1909178 - DNA, 15 bp, Homo sapiens
taaacatttctaaac

SEQ ID NO: 1909179 - DNA, 15 bp, Homo sapiens
aaacatttctaaaca

SEQ ID NO: 1909180 - DNA, 15 bp, Homo sapiens
aacatttctaaacaa

SEQ ID NO: 1909181 - DNA, 15 bp, Homo sapiens
acatttctaaacaac

SEQ ID NO: 1909182 - DNA, 15 bp, Homo sapiens
catttctaaacaacc

SEQ ID NO: 1909183 - DNA, 15 bp, Homo sapiens
atttctaaacaacca

SEQ ID NO: 1909184 - DNA, 15 bp, Homo sapiens
tttctaaacaaccaa

SEQ ID NO: 1909185 - DNA, 15 bp, Homo sapiens
ttctaaacaaccaac

SEQ ID NO: 1909186 - DNA, 15 bp, Homo sapiens
tctaaacaaccaacc

SEQ ID NO: 1909187 - DNA, 15 bp, Homo sapiens
ctaaacaaccaacca

SEQ ID NO: 1909188 - DNA, 15 bp, Homo sapiens
taaacaaccaaccac

SEQ ID NO: 1909189 - DNA, 15 bp, Homo sapiens
aaacaaccaaccaca

SEQ ID NO: 1909190 - DNA, 15 bp, Homo sapiens
aacaaccaaccacac

SEQ ID NO: 1909191 - DNA, 15 bp, Homo sapiens
acaaccaaccacact

SEQ ID NO: 1909192 - DNA, 15 bp, Homo sapiens
caaccaaccacacta

SEQ ID NO: 1909193 - DNA, 15 bp, Homo sapiens
aaccaaccacactaa

SEQ ID NO: 1909194 - DNA, 15 bp, Homo sapiens
accaaccacactaac

SEQ ID NO: 1909195 - DNA, 15 bp, Homo sapiens
ccaaccacactaaca

SEQ ID NO: 1909196 - DNA, 15 bp, Homo sapiens
caaccacactaacac

SEQ ID NO: 1909197 - DNA, 15 bp, Homo sapiens
aaccacactaacacg

SEQ ID NO: 1909198 - DNA, 15 bp, Homo sapiens
accacactaacacga

SEQ ID NO: 1909199 - DNA, 15 bp, Homo sapiens
ccacactaacacgag

SEQ ID NO: 1909200 - DNA, 15 bp, Homo sapiens
cacactaacacgagt

SEQ ID NO: 1909201 - DNA, 15 bp, Homo sapiens
acactaacacgagtg

SEQ ID NO: 1909202 - DNA, 15 bp, Homo sapiens
cactaacacgagtga

SEQ ID NO: 1909203 - DNA, 15 bp, Homo sapiens
actaacacgagtgat

SEQ ID NO: 1909204 - DNA, 15 bp, Homo sapiens
ctaacacgagtgatc

SEQ ID NO: 1909205 - DNA, 15 bp, Homo sapiens
taacacgagtgatct

SEQ ID NO: 1909206 - DNA, 15 bp, Homo sapiens
aacacgagtgatctt

SEQ ID NO: 1909207 - DNA, 15 bp, Homo sapiens
acacgagtgatcttt

SEQ ID NO: 1909208 - DNA, 15 bp, Homo sapiens
cacgagtgatctttc

SEQ ID NO: 1909209 - DNA, 15 bp, Homo sapiens
acgagtgatctttct

SEQ ID NO: 1909210 - DNA, 15 bp, Homo sapiens
cgagtgatctttcta

SEQ ID NO: 1909211 - DNA, 15 bp, Homo sapiens
gagtgatctttctaa

SEQ ID NO: 1909212 - DNA, 15 bp, Homo sapiens
agtgatctttctaaa

SEQ ID NO: 1909213 - DNA, 15 bp, Homo sapiens
gtgatctttctaaag

SEQ ID NO: 1909214 - DNA, 15 bp, Homo sapiens
tgatctttctaaagc

SEQ ID NO: 1909215 - DNA, 15 bp, Homo sapiens
gatctttctaaagca

SEQ ID NO: 1909216 - DNA, 15 bp, Homo sapiens
atctttctaaagcac

SEQ ID NO: 1909217 - DNA, 15 bp, Homo sapiens
tctttctaaagcaca

SEQ ID NO: 1909218 - DNA, 15 bp, Homo sapiens
ctttctaaagcacat

SEQ ID NO: 1909219 - DNA, 15 bp, Homo sapiens
tttctaaagcacata

SEQ ID NO: 1909220 - DNA, 15 bp, Homo sapiens
ttctaaagcacatat

SEQ ID NO: 1909221 - DNA, 15 bp, Homo sapiens
tctaaagcacatatc

SEQ ID NO: 1909222 - DNA, 15 bp, Homo sapiens
ctaaagcacatatct

SEQ ID NO: 1909223 - DNA, 15 bp, Homo sapiens
taaagcacatatcta

SEQ ID NO: 1909224 - DNA, 15 bp, Homo sapiens
aaagcacatatctaa

SEQ ID NO: 1909225 - DNA, 15 bp, Homo sapiens
aagcacatatctaat

SEQ ID NO: 1909226 - DNA, 15 bp, Homo sapiens
agcacatatctaatc

SEQ ID NO: 1909227 - DNA, 15 bp, Homo sapiens
gcacatatctaatca

SEQ ID NO: 1909228 - DNA, 15 bp, Homo sapiens
cacatatctaatcat

SEQ ID NO: 1909229 - DNA, 15 bp, Homo sapiens
acatatctaatcatt

SEQ ID NO: 1909230 - DNA, 15 bp, Homo sapiens
catatctaatcattg

SEQ ID NO: 1909231 - DNA, 15 bp, Homo sapiens
atatctaatcattgt

SEQ ID NO: 1909232 - DNA, 15 bp, Homo sapiens
tatctaatcattgta

SEQ ID NO: 1909233 - DNA, 15 bp, Homo sapiens
atctaatcattgtac

SEQ ID NO: 1909234 - DNA, 15 bp, Homo sapiens
tctaatcattgtact

SEQ ID NO: 1909235 - DNA, 15 bp, Homo sapiens
ctaatcattgtactt

SEQ ID NO: 1909236 - DNA, 15 bp, Homo sapiens
taatcattgtacttg

SEQ ID NO: 1909237 - DNA, 15 bp, Homo sapiens
aatcattgtacttgc

SEQ ID NO: 1909238 - DNA, 15 bp, Homo sapiens
atcattgtacttgct

SEQ ID NO: 1909239 - DNA, 15 bp, Homo sapiens
tcattgtacttgctt

SEQ ID NO: 1909240 - DNA, 15 bp, Homo sapiens
cattgtacttgctta

SEQ ID NO: 1909241 - DNA, 15 bp, Homo sapiens
attgtacttgcttaa

SEQ ID NO: 1909242 - DNA, 15 bp, Homo sapiens
ttgtacttgcttaat

SEQ ID NO: 1909243 - DNA, 15 bp, Homo sapiens
tgtacttgcttaatt

SEQ ID NO: 1909244 - DNA, 15 bp, Homo sapiens
gtacttgcttaattc

SEQ ID NO: 1909245 - DNA, 15 bp, Homo sapiens
tacttgcttaattct

SEQ ID NO: 1909246 - DNA, 15 bp, Homo sapiens
acttgcttaattctt

SEQ ID NO: 1909247 - DNA, 15 bp, Homo sapiens
cttgcttaattcttt

SEQ ID NO: 1909248 - DNA, 15 bp, Homo sapiens
ttgcttaattctttt

SEQ ID NO: 1909249 - DNA, 15 bp, Homo sapiens
tgcttaattctttta

SEQ ID NO: 1909250 - DNA, 15 bp, Homo sapiens
gcttaattcttttaa

SEQ ID NO: 1909251 - DNA, 15 bp, Homo sapiens
cttaattcttttaat

SEQ ID NO: 1909252 - DNA, 15 bp, Homo sapiens
ttaattcttttaatg

SEQ ID NO: 1909253 - DNA, 15 bp, Homo sapiens
taattcttttaatgc

SEQ ID NO: 1909254 - DNA, 15 bp, Homo sapiens
aattcttttaatgcc

SEQ ID NO: 1909255 - DNA, 15 bp, Homo sapiens
attcttttaatgccc

SEQ ID NO: 1909256 - DNA, 15 bp, Homo sapiens
ttcttttaatgcccc

SEQ ID NO: 1909257 - DNA, 15 bp, Homo sapiens
tcttttaatgccccc

SEQ ID NO: 1909258 - DNA, 15 bp, Homo sapiens
cttttaatgccccct

SEQ ID NO: 1909259 - DNA, 15 bp, Homo sapiens
ttttaatgccccctc

SEQ ID NO: 1909260 - DNA, 15 bp, Homo sapiens
tttaatgccccctct

SEQ ID NO: 1909261 - DNA, 15 bp, Homo sapiens
ttaatgccccctcta

SEQ ID NO: 1909262 - DNA, 15 bp, Homo sapiens
taatgccccctctaa

SEQ ID NO: 1909263 - DNA, 15 bp, Homo sapiens
aatgccccctctaac

SEQ ID NO: 1909264 - DNA, 15 bp, Homo sapiens
atgccccctctaact

SEQ ID NO: 1909265 - DNA, 15 bp, Homo sapiens
tgccccctctaactt

SEQ ID NO: 1909266 - DNA, 15 bp, Homo sapiens
gccccctctaacttc

SEQ ID NO: 1909267 - DNA, 15 bp, Homo sapiens
ccccctctaacttca

SEQ ID NO: 1909268 - DNA, 15 bp, Homo sapiens
cccctctaacttcaa

SEQ ID NO: 1909269 - DNA, 15 bp, Homo sapiens
ccctctaacttcaaa

SEQ ID NO: 1909270 - DNA, 15 bp, Homo sapiens
cctctaacttcaaaa

SEQ ID NO: 1909271 - DNA, 15 bp, Homo sapiens
ctctaacttcaaaag

SEQ ID NO: 1909272 - DNA, 15 bp, Homo sapiens
tctaacttcaaaaga

SEQ ID NO: 1909273 - DNA, 15 bp, Homo sapiens
ctaacttcaaaagac

SEQ ID NO: 1909274 - DNA, 15 bp, Homo sapiens
taacttcaaaagaca

SEQ ID NO: 1909275 - DNA, 15 bp, Homo sapiens
aacttcaaaagacat

SEQ ID NO: 1909276 - DNA, 15 bp, Homo sapiens
acttcaaaagacata

SEQ ID NO: 1909277 - DNA, 15 bp, Homo sapiens
cttcaaaagacatac

SEQ ID NO: 1909278 - DNA, 15 bp, Homo sapiens
ttcaaaagacataca

SEQ ID NO: 1909279 - DNA, 15 bp, Homo sapiens
tcaaaagacatacaa

SEQ ID NO: 1909280 - DNA, 15 bp, Homo sapiens
caaaagacatacaag

SEQ ID NO: 1909281 - DNA, 15 bp, Homo sapiens
aaaagacatacaaga

SEQ ID NO: 1909282 - DNA, 15 bp, Homo sapiens
aaagacatacaagat

SEQ ID NO: 1909283 - DNA, 15 bp, Homo sapiens
aagacatacaagatc

SEQ ID NO: 1909284 - DNA, 15 bp, Homo sapiens
agacatacaagatcc

SEQ ID NO: 1909285 - DNA, 15 bp, Homo sapiens
gacatacaagatcct

SEQ ID NO: 1909286 - DNA, 15 bp, Homo sapiens
acatacaagatcctt

SEQ ID NO: 1909287 - DNA, 15 bp, Homo sapiens
catacaagatccttt

SEQ ID NO: 1909288 - DNA, 15 bp, Homo sapiens
atacaagatcctttt

SEQ ID NO: 1909289 - DNA, 15 bp, Homo sapiens
tacaagatccttttt

SEQ ID NO: 1909290 - DNA, 15 bp, Homo sapiens
acaagatcctttttc

SEQ ID NO: 1909291 - DNA, 15 bp, Homo sapiens
caagatcctttttct

SEQ ID NO: 1909292 - DNA, 15 bp, Homo sapiens
aagatcctttttctc

SEQ ID NO: 1909293 - DNA, 15 bp, Homo sapiens
agatcctttttctct

SEQ ID NO: 1909294 - DNA, 15 bp, Homo sapiens
gatcctttttctctg

SEQ ID NO: 1909295 - DNA, 15 bp, Homo sapiens
atcctttttctctgg

SEQ ID NO: 1909296 - DNA, 15 bp, Homo sapiens
tcctttttctctggt

SEQ ID NO: 1909297 - DNA, 15 bp, Homo sapiens
cctttttctctggtg

SEQ ID NO: 1909298 - DNA, 15 bp, Homo sapiens
ctttttctctggtgc

SEQ ID NO: 1909299 - DNA, 15 bp, Homo sapiens
tttttctctggtgcc

SEQ ID NO: 1909300 - DNA, 15 bp, Homo sapiens
ttttctctggtgcct

SEQ ID NO: 1909301 - DNA, 15 bp, Homo sapiens
tttctctggtgcctg

SEQ ID NO: 1909302 - DNA, 15 bp, Homo sapiens
ttctctggtgcctgc

SEQ ID NO: 1909303 - DNA, 15 bp, Homo sapiens
tctctggtgcctgcc

SEQ ID NO: 1909304 - DNA, 15 bp, Homo sapiens
ctctggtgcctgcct

SEQ ID NO: 1909305 - DNA, 15 bp, Homo sapiens
tctggtgcctgccta

SEQ ID NO: 1909306 - DNA, 15 bp, Homo sapiens
ctggtgcctgcctat

SEQ ID NO: 1909307 - DNA, 15 bp, Homo sapiens
tggtgcctgcctatc

SEQ ID NO: 1909308 - DNA, 15 bp, Homo sapiens
ggtgcctgcctatct

SEQ ID NO: 1909309 - DNA, 15 bp, Homo sapiens
gtgcctgcctatcta

SEQ ID NO: 1909310 - DNA, 15 bp, Homo sapiens
tgcctgcctatctaa

SEQ ID NO: 1909311 - DNA, 15 bp, Homo sapiens
gcctgcctatctaac

SEQ ID NO: 1909312 - DNA, 15 bp, Homo sapiens
cctgcctatctaacc

SEQ ID NO: 1909313 - DNA, 15 bp, Homo sapiens
ctgcctatctaacca

SEQ ID NO: 1909314 - DNA, 15 bp, Homo sapiens
tgcctatctaaccag

SEQ ID NO: 1909315 - DNA, 15 bp, Homo sapiens
gcctatctaaccagc

SEQ ID NO: 1909316 - DNA, 15 bp, Homo sapiens
cctatctaaccagct

SEQ ID NO: 1909317 - DNA, 15 bp, Homo sapiens
ctatctaaccagctc

SEQ ID NO: 1909318 - DNA, 15 bp, Homo sapiens
tatctaaccagctca

SEQ ID NO: 1909319 - DNA, 15 bp, Homo sapiens
atctaaccagctcac

SEQ ID NO: 1909320 - DNA, 15 bp, Homo sapiens
tctaaccagctcact

SEQ ID NO: 1909321 - DNA, 15 bp, Homo sapiens
ctaaccagctcactg

SEQ ID NO: 1909322 - DNA, 15 bp, Homo sapiens
taaccagctcactgt

SEQ ID NO: 1909323 - DNA, 15 bp, Homo sapiens
aaccagctcactgtc

SEQ ID NO: 1909324 - DNA, 15 bp, Homo sapiens
accagctcactgtct

SEQ ID NO: 1909325 - DNA, 15 bp, Homo sapiens
ccagctcactgtctg

SEQ ID NO: 1909326 - DNA, 15 bp, Homo sapiens
cagctcactgtctgc

SEQ ID NO: 1909327 - DNA, 15 bp, Homo sapiens
agctcactgtctgcc

SEQ ID NO: 1909328 - DNA, 15 bp, Homo sapiens
gctcactgtctgcca

SEQ ID NO: 1909329 - DNA, 15 bp, Homo sapiens
ctcactgtctgccat

SEQ ID NO: 1909330 - DNA, 15 bp, Homo sapiens
tcactgtctgccatt

SEQ ID NO: 1909331 - DNA, 15 bp, Homo sapiens
cactgtctgccattc

SEQ ID NO: 1909332 - DNA, 15 bp, Homo sapiens
actgtctgccattcc

SEQ ID NO: 1909333 - DNA, 15 bp, Homo sapiens
ctgtctgccattccc

SEQ ID NO: 1909334 - DNA, 15 bp, Homo sapiens
tgtctgccattccct

SEQ ID NO: 1909335 - DNA, 15 bp, Homo sapiens
gtctgccattccctg

SEQ ID NO: 1909336 - DNA, 15 bp, Homo sapiens
tctgccattccctgc

SEQ ID NO: 1909337 - DNA, 15 bp, Homo sapiens
ctgccattccctgcc

SEQ ID NO: 1909338 - DNA, 15 bp, Homo sapiens
tgccattccctgccc

SEQ ID NO: 1909339 - DNA, 15 bp, Homo sapiens
gccattccctgccca

SEQ ID NO: 1909340 - DNA, 15 bp, Homo sapiens
ccattccctgcccac

SEQ ID NO: 1909341 - DNA, 15 bp, Homo sapiens
cattccctgcccaca

SEQ ID NO: 1909342 - DNA, 15 bp, Homo sapiens
attccctgcccacaa

SEQ ID NO: 1909343 - DNA, 15 bp, Homo sapiens
ttccctgcccacaat

SEQ ID NO: 1909344 - DNA, 15 bp, Homo sapiens
tccctgcccacaata

SEQ ID NO: 1909345 - DNA, 15 bp, Homo sapiens
ccctgcccacaatat

SEQ ID NO: 1909346 - DNA, 15 bp, Homo sapiens
cctgcccacaatatc

SEQ ID NO: 1909347 - DNA, 15 bp, Homo sapiens
ctgcccacaatatcc

SEQ ID NO: 1909348 - DNA, 15 bp, Homo sapiens
tgcccacaatatcct

SEQ ID NO: 1909349 - DNA, 15 bp, Homo sapiens
gcccacaatatcctg

SEQ ID NO: 1909350 - DNA, 15 bp, Homo sapiens
cccacaatatcctgg

SEQ ID NO: 1909351 - DNA, 15 bp, Homo sapiens
ccacaatatcctgga

SEQ ID NO: 1909352 - DNA, 15 bp, Homo sapiens
cacaatatcctggaa

SEQ ID NO: 1909353 - DNA, 15 bp, Homo sapiens
acaatatcctggaat

SEQ ID NO: 1909354 - DNA, 15 bp, Homo sapiens
caatatcctggaatc

SEQ ID NO: 1909355 - DNA, 15 bp, Homo sapiens
aatatcctggaatcc

SEQ ID NO: 1909356 - DNA, 15 bp, Homo sapiens
atatcctggaatcca

SEQ ID NO: 1909357 - DNA, 15 bp, Homo sapiens
tatcctggaatccaa

SEQ ID NO: 1909358 - DNA, 15 bp, Homo sapiens
atcctggaatccaac

SEQ ID NO: 1909359 - DNA, 15 bp, Homo sapiens
tcctggaatccaacc

SEQ ID NO: 1909360 - DNA, 15 bp, Homo sapiens
cctggaatccaacca

SEQ ID NO: 1909361 - DNA, 15 bp, Homo sapiens
ctggaatccaaccac

SEQ ID NO: 1909362 - DNA, 15 bp, Homo sapiens
tggaatccaaccaca

SEQ ID NO: 1909363 - DNA, 15 bp, Homo sapiens
ggaatccaaccacac

SEQ ID NO: 1909364 - DNA, 15 bp, Homo sapiens
gaatccaaccacact

SEQ ID NO: 1909365 - DNA, 15 bp, Homo sapiens
aatccaaccacactc

SEQ ID NO: 1909366 - DNA, 15 bp, Homo sapiens
atccaaccacactct

SEQ ID NO: 1909367 - DNA, 15 bp, Homo sapiens
tccaaccacactcta

SEQ ID NO: 1909368 - DNA, 15 bp, Homo sapiens
ccaaccacactctac

SEQ ID NO: 1909369 - DNA, 15 bp, Homo sapiens
caaccacactctact

SEQ ID NO: 1909370 - DNA, 15 bp, Homo sapiens
aaccacactctacta

SEQ ID NO: 1909371 - DNA, 15 bp, Homo sapiens
accacactctactac

SEQ ID NO: 1909372 - DNA, 15 bp, Homo sapiens
ccacactctactacc

SEQ ID NO: 1909373 - DNA, 15 bp, Homo sapiens
cacactctactacct

SEQ ID NO: 1909374 - DNA, 15 bp, Homo sapiens
acactctactacctc

SEQ ID NO: 1909375 - DNA, 15 bp, Homo sapiens
cactctactacctct

SEQ ID NO: 1909376 - DNA, 15 bp, Homo sapiens
actctactacctcta

SEQ ID NO: 1909377 - DNA, 15 bp, Homo sapiens
ctctactacctctat

SEQ ID NO: 1909378 - DNA, 15 bp, Homo sapiens
tctactacctctatt

SEQ ID NO: 1909379 - DNA, 15 bp, Homo sapiens
ctactacctctattc

SEQ ID NO: 1909380 - DNA, 15 bp, Homo sapiens
tactacctctattct

SEQ ID NO: 1909381 - DNA, 15 bp, Homo sapiens
actacctctattctc

SEQ ID NO: 1909382 - DNA, 15 bp, Homo sapiens
ctacctctattctct

SEQ ID NO: 1909383 - DNA, 15 bp, Homo sapiens
tacctctattctctt

SEQ ID NO: 1909384 - DNA, 15 bp, Homo sapiens
acctctattctctta

SEQ ID NO: 1909385 - DNA, 15 bp, Homo sapiens
cctctattctcttat

SEQ ID NO: 1909386 - DNA, 15 bp, Homo sapiens
ctctattctcttata

SEQ ID NO: 1909387 - DNA, 15 bp, Homo sapiens
tctattctcttatat

SEQ ID NO: 1909388 - DNA, 15 bp, Homo sapiens
ctattctcttatatt

SEQ ID NO: 1909389 - DNA, 15 bp, Homo sapiens
tattctcttatattc

SEQ ID NO: 1909390 - DNA, 15 bp, Homo sapiens
attctcttatattct

SEQ ID NO: 1909391 - DNA, 15 bp, Homo sapiens
ttctcttatattctg

SEQ ID NO: 1909392 - DNA, 15 bp, Homo sapiens
tctcttatattctgc

SEQ ID NO: 1909393 - DNA, 15 bp, Homo sapiens
ctcttatattctgcc

SEQ ID NO: 1909394 - DNA, 15 bp, Homo sapiens
tcttatattctgcct

SEQ ID NO: 1909395 - DNA, 15 bp, Homo sapiens
cttatattctgcctg

SEQ ID NO: 1909396 - DNA, 15 bp, Homo sapiens
ttatattctgcctgg

SEQ ID NO: 1909397 - DNA, 15 bp, Homo sapiens
tatattctgcctgga

SEQ ID NO: 1909398 - DNA, 15 bp, Homo sapiens
atattctgcctggat

SEQ ID NO: 1909399 - DNA, 15 bp, Homo sapiens
tattctgcctggata

SEQ ID NO: 1909400 - DNA, 15 bp, Homo sapiens
attctgcctggatac

SEQ ID NO: 1909401 - DNA, 15 bp, Homo sapiens
ttctgcctggatact

SEQ ID NO: 1909402 - DNA, 15 bp, Homo sapiens
tctgcctggatactc

SEQ ID NO: 1909403 - DNA, 15 bp, Homo sapiens
ctgcctggatactct

SEQ ID NO: 1909404 - DNA, 15 bp, Homo sapiens
tgcctggatactctt

SEQ ID NO: 1909405 - DNA, 15 bp, Homo sapiens
gcctggatactcttc

SEQ ID NO: 1909406 - DNA, 15 bp, Homo sapiens
cctggatactcttcc

SEQ ID NO: 1909407 - DNA, 15 bp, Homo sapiens
ctggatactcttcct

SEQ ID NO: 1909408 - DNA, 15 bp, Homo sapiens
tggatactcttcctt

SEQ ID NO: 1909409 - DNA, 15 bp, Homo sapiens
ggatactcttccttt

SEQ ID NO: 1909410 - DNA, 15 bp, Homo sapiens
gatactcttcctttc

SEQ ID NO: 1909411 - DNA, 15 bp, Homo sapiens
atactcttcctttct

SEQ ID NO: 1909412 - DNA, 15 bp, Homo sapiens
tactcttcctttctc

SEQ ID NO: 1909413 - DNA, 15 bp, Homo sapiens
actcttcctttctca

SEQ ID NO: 1909414 - DNA, 15 bp, Homo sapiens
ctcttcctttctcaa

SEQ ID NO: 1909415 - DNA, 15 bp, Homo sapiens
tcttcctttctcaat

SEQ ID NO: 1909416 - DNA, 15 bp, Homo sapiens
cttcctttctcaatc

SEQ ID NO: 1909417 - DNA, 15 bp, Homo sapiens
ttcctttctcaatca

SEQ ID NO: 1909418 - DNA, 15 bp, Homo sapiens
tcctttctcaatcat

SEQ ID NO: 1909419 - DNA, 15 bp, Homo sapiens
cctttctcaatcatt

SEQ ID NO: 1909420 - DNA, 15 bp, Homo sapiens
ctttctcaatcattt

SEQ ID NO: 1909421 - DNA, 15 bp, Homo sapiens
tttctcaatcatttg

SEQ ID NO: 1909422 - DNA, 15 bp, Homo sapiens
ttctcaatcatttgc

SEQ ID NO: 1909423 - DNA, 15 bp, Homo sapiens
tctcaatcatttgct

SEQ ID NO: 1909424 - DNA, 15 bp, Homo sapiens
ctcaatcatttgctc

SEQ ID NO: 1909425 - DNA, 15 bp, Homo sapiens
tcaatcatttgctcg

SEQ ID NO: 1909426 - DNA, 15 bp, Homo sapiens
caatcatttgctcgt

SEQ ID NO: 1909427 - DNA, 15 bp, Homo sapiens
aatcatttgctcgtc

SEQ ID NO: 1909428 - DNA, 15 bp, Homo sapiens
atcatttgctcgtcc

SEQ ID NO: 1909429 - DNA, 15 bp, Homo sapiens
tcatttgctcgtcca

SEQ ID NO: 1909430 - DNA, 15 bp, Homo sapiens
catttgctcgtccaa

SEQ ID NO: 1909431 - DNA, 15 bp, Homo sapiens
atttgctcgtccaag

SEQ ID NO: 1909432 - DNA, 15 bp, Homo sapiens
tttgctcgtccaaga

SEQ ID NO: 1909433 - DNA, 15 bp, Homo sapiens
ttgctcgtccaagac

SEQ ID NO: 1909434 - DNA, 15 bp, Homo sapiens
tgctcgtccaagact

SEQ ID NO: 1909435 - DNA, 15 bp, Homo sapiens
gctcgtccaagactt

SEQ ID NO: 1909436 - DNA, 15 bp, Homo sapiens
ctcgtccaagactta

SEQ ID NO: 1909437 - DNA, 15 bp, Homo sapiens
tcgtccaagacttag

SEQ ID NO: 1909438 - DNA, 15 bp, Homo sapiens
cgtccaagacttagt

SEQ ID NO: 1909439 - DNA, 15 bp, Homo sapiens
gtccaagacttagtt

SEQ ID NO: 1909440 - DNA, 15 bp, Homo sapiens
tccaagacttagttt

SEQ ID NO: 1909441 - DNA, 15 bp, Homo sapiens
ccaagacttagtttg

SEQ ID NO: 1909442 - DNA, 15 bp, Homo sapiens
caagacttagtttgg

SEQ ID NO: 1909443 - DNA, 15 bp, Homo sapiens
aagacttagtttggt

SEQ ID NO: 1909444 - DNA, 15 bp, Homo sapiens
agacttagtttggtc

SEQ ID NO: 1909445 - DNA, 15 bp, Homo sapiens
gacttagtttggtcc

SEQ ID NO: 1909446 - DNA, 15 bp, Homo sapiens
acttagtttggtccg

SEQ ID NO: 1909447 - DNA, 15 bp, Homo sapiens
cttagtttggtccgt

SEQ ID NO: 1909448 - DNA, 15 bp, Homo sapiens
ttagtttggtccgtc

SEQ ID NO: 1909449 - DNA, 15 bp, Homo sapiens
tagtttggtccgtca

SEQ ID NO: 1909450 - DNA, 15 bp, Homo sapiens
agtttggtccgtcaa

SEQ ID NO: 1909451 - DNA, 15 bp, Homo sapiens
gtttggtccgtcaaa

SEQ ID NO: 1909452 - DNA, 15 bp, Homo sapiens
tttggtccgtcaaag

SEQ ID NO: 1909453 - DNA, 15 bp, Homo sapiens
ttggtccgtcaaagg

SEQ ID NO: 1909454 - DNA, 15 bp, Homo sapiens
tggtccgtcaaagga

SEQ ID NO: 1909455 - DNA, 15 bp, Homo sapiens
ggtccgtcaaaggac

SEQ ID NO: 1909456 - DNA, 15 bp, Homo sapiens
gtccgtcaaaggact

SEQ ID NO: 1909457 - DNA, 15 bp, Homo sapiens
tccgtcaaaggactc

SEQ ID NO: 1909458 - DNA, 15 bp, Homo sapiens
ccgtcaaaggactct

SEQ ID NO: 1909459 - DNA, 15 bp, Homo sapiens
cgtcaaaggactctt

SEQ ID NO: 1909460 - DNA, 15 bp, Homo sapiens
gtcaaaggactctta

SEQ ID NO: 1909461 - DNA, 15 bp, Homo sapiens
tcaaaggactcttaa

SEQ ID NO: 1909462 - DNA, 15 bp, Homo sapiens
caaaggactcttaat

SEQ ID NO: 1909463 - DNA, 15 bp, Homo sapiens
aaaggactcttaatc

SEQ ID NO: 1909464 - DNA, 15 bp, Homo sapiens
aaggactcttaatca

SEQ ID NO: 1909465 - DNA, 15 bp, Homo sapiens
aggactcttaatcat

SEQ ID NO: 1909466 - DNA, 15 bp, Homo sapiens
ggactcttaatcatc

SEQ ID NO: 1909467 - DNA, 15 bp, Homo sapiens
gactcttaatcatca

SEQ ID NO: 1909468 - DNA, 15 bp, Homo sapiens
actcttaatcatcac

SEQ ID NO: 1909469 - DNA, 15 bp, Homo sapiens
ctcttaatcatcacc

SEQ ID NO: 1909470 - DNA, 15 bp, Homo sapiens
tcttaatcatcacca

SEQ ID NO: 1909471 - DNA, 15 bp, Homo sapiens
cttaatcatcaccat

SEQ ID NO: 1909472 - DNA, 15 bp, Homo sapiens
ttaatcatcaccatt

SEQ ID NO: 1909473 - DNA, 15 bp, Homo sapiens
taatcatcaccattt

SEQ ID NO: 1909474 - DNA, 15 bp, Homo sapiens
aatcatcaccattta

SEQ ID NO: 1909475 - DNA, 15 bp, Homo sapiens
atcatcaccatttaa

SEQ ID NO: 1909476 - DNA, 15 bp, Homo sapiens
tcatcaccatttaaa

SEQ ID NO: 1909477 - DNA, 15 bp, Homo sapiens
catcaccatttaaat

SEQ ID NO: 1909478 - DNA, 15 bp, Homo sapiens
atcaccatttaaatc

SEQ ID NO: 1909479 - DNA, 15 bp, Homo sapiens
tcaccatttaaatca

SEQ ID NO: 1909480 - DNA, 15 bp, Homo sapiens
caccatttaaatcaa

SEQ ID NO: 1909481 - DNA, 15 bp, Homo sapiens
accatttaaatcaag

SEQ ID NO: 1909482 - DNA, 15 bp, Homo sapiens
ccatttaaatcaagt

SEQ ID NO: 1909483 - DNA, 15 bp, Homo sapiens
catttaaatcaagtt

SEQ ID NO: 1909484 - DNA, 15 bp, Homo sapiens
atttaaatcaagtta

SEQ ID NO: 1909485 - DNA, 15 bp, Homo sapiens
tttaaatcaagttat

SEQ ID NO: 1909486 - DNA, 15 bp, Homo sapiens
ttaaatcaagttatg

SEQ ID NO: 1909487 - DNA, 15 bp, Homo sapiens
taaatcaagttatgg

SEQ ID NO: 1909488 - DNA, 15 bp, Homo sapiens
aaatcaagttatggt

SEQ ID NO: 1909489 - DNA, 15 bp, Homo sapiens
aatcaagttatggtc

SEQ ID NO: 1909490 - DNA, 15 bp, Homo sapiens
atcaagttatggtcc

SEQ ID NO: 1909491 - DNA, 15 bp, Homo sapiens
tcaagttatggtccc

SEQ ID NO: 1909492 - DNA, 15 bp, Homo sapiens
caagttatggtccct

SEQ ID NO: 1909493 - DNA, 15 bp, Homo sapiens
aagttatggtcccta

SEQ ID NO: 1909494 - DNA, 15 bp, Homo sapiens
agttatggtccctaa

SEQ ID NO: 1909495 - DNA, 15 bp, Homo sapiens
gttatggtccctaac

SEQ ID NO: 1909496 - DNA, 15 bp, Homo sapiens
ttatggtccctaact

SEQ ID NO: 1909497 - DNA, 15 bp, Homo sapiens
tatggtccctaactg

SEQ ID NO: 1909498 - DNA, 15 bp, Homo sapiens
atggtccctaactgg

SEQ ID NO: 1909499 - DNA, 15 bp, Homo sapiens
tggtccctaactggc

SEQ ID NO: 1909500 - DNA, 15 bp, Homo sapiens
ggtccctaactggca

SEQ ID NO: 1909501 - DNA, 15 bp, Homo sapiens
gtccctaactggcag

SEQ ID NO: 1909502 - DNA, 15 bp, Homo sapiens
tccctaactggcagg

SEQ ID NO: 1909503 - DNA, 15 bp, Homo sapiens
ccctaactggcaggc

SEQ ID NO: 1909504 - DNA, 15 bp, Homo sapiens
cctaactggcaggct

SEQ ID NO: 1909505 - DNA, 15 bp, Homo sapiens
ctaactggcaggctt

SEQ ID NO: 1909506 - DNA, 15 bp, Homo sapiens
taactggcaggcttc

SEQ ID NO: 1909507 - DNA, 15 bp, Homo sapiens
aactggcaggcttcc

SEQ ID NO: 1909508 - DNA, 15 bp, Homo sapiens
actggcaggcttcct

SEQ ID NO: 1909509 - DNA, 15 bp, Homo sapiens
ctggcaggcttccta

SEQ ID NO: 1909510 - DNA, 15 bp, Homo sapiens
tggcaggcttcctaa

SEQ ID NO: 1909511 - DNA, 15 bp, Homo sapiens
ggcaggcttcctaaa

SEQ ID NO: 1909512 - DNA, 15 bp, Homo sapiens
gcaggcttcctaaac

SEQ ID NO: 1909513 - DNA, 15 bp, Homo sapiens
caggcttcctaaacc

SEQ ID NO: 1909514 - DNA, 15 bp, Homo sapiens
aggcttcctaaacca

SEQ ID NO: 1909515 - DNA, 15 bp, Homo sapiens
ggcttcctaaaccac

SEQ ID NO: 1909516 - DNA, 15 bp, Homo sapiens
gcttcctaaaccacc

SEQ ID NO: 1909517 - DNA, 15 bp, Homo sapiens
cttcctaaaccacct

SEQ ID NO: 1909518 - DNA, 15 bp, Homo sapiens
ttcctaaaccacctt

SEQ ID NO: 1909519 - DNA, 15 bp, Homo sapiens
tcctaaaccaccttt

SEQ ID NO: 1909520 - DNA, 15 bp, Homo sapiens
cctaaaccacctttg

SEQ ID NO: 1909521 - DNA, 15 bp, Homo sapiens
ctaaaccacctttga

SEQ ID NO: 1909522 - DNA, 15 bp, Homo sapiens
taaaccacctttgag

SEQ ID NO: 1909523 - DNA, 15 bp, Homo sapiens
aaaccacctttgagc

SEQ ID NO: 1909524 - DNA, 15 bp, Homo sapiens
aaccacctttgagct

SEQ ID NO: 1909525 - DNA, 15 bp, Homo sapiens
accacctttgagctt

SEQ ID NO: 1909526 - DNA, 15 bp, Homo sapiens
ccacctttgagcttg

SEQ ID NO: 1909527 - DNA, 15 bp, Homo sapiens
cacctttgagcttgt

SEQ ID NO: 1909528 - DNA, 15 bp, Homo sapiens
acctttgagcttgta

SEQ ID NO: 1909529 - DNA, 15 bp, Homo sapiens
cctttgagcttgtaa

SEQ ID NO: 1909530 - DNA, 15 bp, Homo sapiens
ctttgagcttgtaaa

SEQ ID NO: 1909531 - DNA, 15 bp, Homo sapiens
tttgagcttgtaaat

SEQ ID NO: 1909532 - DNA, 15 bp, Homo sapiens
ttgagcttgtaaatc

SEQ ID NO: 1909533 - DNA, 15 bp, Homo sapiens
tgagcttgtaaatca

SEQ ID NO: 1909534 - DNA, 15 bp, Homo sapiens
gagcttgtaaatcat

SEQ ID NO: 1909535 - DNA, 15 bp, Homo sapiens
agcttgtaaatcata

SEQ ID NO: 1909536 - DNA, 15 bp, Homo sapiens
gcttgtaaatcatag

SEQ ID NO: 1909537 - DNA, 15 bp, Homo sapiens
cttgtaaatcatagc

SEQ ID NO: 1909538 - DNA, 15 bp, Homo sapiens
ttgtaaatcatagcc

SEQ ID NO: 1909539 - DNA, 15 bp, Homo sapiens
tgtaaatcatagccc

SEQ ID NO: 1909540 - DNA, 15 bp, Homo sapiens
gtaaatcatagccct

SEQ ID NO: 1909541 - DNA, 15 bp, Homo sapiens
taaatcatagccctg

SEQ ID NO: 1909542 - DNA, 15 bp, Homo sapiens
aaatcatagccctgg

SEQ ID NO: 1909543 - DNA, 15 bp, Homo sapiens
aatcatagccctggg

SEQ ID NO: 1909544 - DNA, 15 bp, Homo sapiens
atcatagccctgggc

SEQ ID NO: 1909545 - DNA, 15 bp, Homo sapiens
tcatagccctgggcc

SEQ ID NO: 1909546 - DNA, 15 bp, Homo sapiens
catagccctgggcca

SEQ ID NO: 1909547 - DNA, 15 bp, Homo sapiens
atagccctgggccaa

SEQ ID NO: 1909548 - DNA, 15 bp, Homo sapiens
tagccctgggccaat

SEQ ID NO: 1909549 - DNA, 15 bp, Homo sapiens
agccctgggccaatt

SEQ ID NO: 1909550 - DNA, 15 bp, Homo sapiens
gccctgggccaattt

SEQ ID NO: 1909551 - DNA, 15 bp, Homo sapiens
ccctgggccaattta

SEQ ID NO: 1909552 - DNA, 15 bp, Homo sapiens
cctgggccaatttaa

SEQ ID NO: 1909553 - DNA, 15 bp, Homo sapiens
ctgggccaatttaat

SEQ ID NO: 1909554 - DNA, 15 bp, Homo sapiens
tgggccaatttaatc

SEQ ID NO: 1909555 - DNA, 15 bp, Homo sapiens
gggccaatttaatcc

SEQ ID NO: 1909556 - DNA, 15 bp, Homo sapiens
ggccaatttaatcca

SEQ ID NO: 1909557 - DNA, 15 bp, Homo sapiens
gccaatttaatccat

SEQ ID NO: 1909558 - DNA, 15 bp, Homo sapiens
ccaatttaatccata

SEQ ID NO: 1909559 - DNA, 15 bp, Homo sapiens
caatttaatccataa

SEQ ID NO: 1909560 - DNA, 15 bp, Homo sapiens
aatttaatccataac

SEQ ID NO: 1909561 - DNA, 15 bp, Homo sapiens
atttaatccataaca

SEQ ID NO: 1909562 - DNA, 15 bp, Homo sapiens
tttaatccataacat

SEQ ID NO: 1909563 - DNA, 15 bp, Homo sapiens
ttaatccataacatg

SEQ ID NO: 1909564 - DNA, 15 bp, Homo sapiens
taatccataacatgt

SEQ ID NO: 1909565 - DNA, 15 bp, Homo sapiens
aatccataacatgtc

SEQ ID NO: 1909566 - DNA, 15 bp, Homo sapiens
atccataacatgtct

SEQ ID NO: 1909567 - DNA, 15 bp, Homo sapiens
tccataacatgtctg

SEQ ID NO: 1909568 - DNA, 15 bp, Homo sapiens
ccataacatgtctgt

SEQ ID NO: 1909569 - DNA, 15 bp, Homo sapiens
cataacatgtctgta

SEQ ID NO: 1909570 - DNA, 15 bp, Homo sapiens
ataacatgtctgtag

SEQ ID NO: 1909571 - DNA, 15 bp, Homo sapiens
taacatgtctgtagt

SEQ ID NO: 1909572 - DNA, 15 bp, Homo sapiens
aacatgtctgtagtt

SEQ ID NO: 1909573 - DNA, 15 bp, Homo sapiens
acatgtctgtagtta

SEQ ID NO: 1909574 - DNA, 15 bp, Homo sapiens
catgtctgtagttac

SEQ ID NO: 1909575 - DNA, 15 bp, Homo sapiens
atgtctgtagttacg

SEQ ID NO: 1909576 - DNA, 15 bp, Homo sapiens
tgtctgtagttacgg

SEQ ID NO: 1909577 - DNA, 15 bp, Homo sapiens
gtctgtagttacggt

SEQ ID NO: 1909578 - DNA, 15 bp, Homo sapiens
tctgtagttacggtt

SEQ ID NO: 1909579 - DNA, 15 bp, Homo sapiens
ctgtagttacggttt

SEQ ID NO: 1909580 - DNA, 15 bp, Homo sapiens
tgtagttacggtttt

SEQ ID NO: 1909581 - DNA, 15 bp, Homo sapiens
gtagttacggttttt

SEQ ID NO: 1909582 - DNA, 15 bp, Homo sapiens
tagttacggttttta

SEQ ID NO: 1909583 - DNA, 15 bp, Homo sapiens
agttacggtttttaa

SEQ ID NO: 1909584 - DNA, 15 bp, Homo sapiens
gttacggtttttaat

SEQ ID NO: 1909585 - DNA, 15 bp, Homo sapiens
ttacggtttttaatt

SEQ ID NO: 1909586 - DNA, 15 bp, Homo sapiens
tacggtttttaattc

SEQ ID NO: 1909587 - DNA, 15 bp, Homo sapiens
acggtttttaattcc

SEQ ID NO: 1909588 - DNA, 15 bp, Homo sapiens
cggtttttaattcct

SEQ ID NO: 1909589 - DNA, 15 bp, Homo sapiens
ggtttttaattcctg

SEQ ID NO: 1909590 - DNA, 15 bp, Homo sapiens
tttttaattcctgac

SEQ ID NO: 1909591 - DNA, 15 bp, Homo sapiens
ttttaattcctgaca

SEQ ID NO: 1909592 - DNA, 15 bp, Homo sapiens
tttaattcctgacat

SEQ ID NO: 1909593 - DNA, 15 bp, Homo sapiens
ttaattcctgacatt

SEQ ID NO: 1909594 - DNA, 15 bp, Homo sapiens
taattcctgacattt

SEQ ID NO: 1909595 - DNA, 15 bp, Homo sapiens
aattcctgacattta

SEQ ID NO: 1909596 - DNA, 15 bp, Homo sapiens
attcctgacatttat

SEQ ID NO: 1909597 - DNA, 15 bp, Homo sapiens
ttcctgacatttatt

SEQ ID NO: 1909598 - DNA, 15 bp, Homo sapiens
tcctgacatttattt

SEQ ID NO: 1909599 - DNA, 15 bp, Homo sapiens
cctgacatttatttg

SEQ ID NO: 1909600 - DNA, 15 bp, Homo sapiens
ctgacatttatttgg

SEQ ID NO: 1909601 - DNA, 15 bp, Homo sapiens
tgacatttatttggc

SEQ ID NO: 1909602 - DNA, 15 bp, Homo sapiens
gacatttatttggcc

SEQ ID NO: 1909603 - DNA, 15 bp, Homo sapiens
acatttatttggccc

SEQ ID NO: 1909604 - DNA, 15 bp, Homo sapiens
catttatttggccct

SEQ ID NO: 1909605 - DNA, 15 bp, Homo sapiens
atttatttggccctt

SEQ ID NO: 1909606 - DNA, 15 bp, Homo sapiens
tttatttggcccttt

SEQ ID NO: 1909607 - DNA, 15 bp, Homo sapiens
tttggcccttttctg

SEQ ID NO: 1909608 - DNA, 15 bp, Homo sapiens
ttggcccttttctgt

SEQ ID NO: 1909609 - DNA, 15 bp, Homo sapiens
tggcccttttctgtt

SEQ ID NO: 1909610 - DNA, 15 bp, Homo sapiens
ggcccttttctgttt

SEQ ID NO: 1909611 - DNA, 15 bp, Homo sapiens
gcccttttctgtttt

SEQ ID NO: 1909612 - DNA, 15 bp, Homo sapiens
cccttttctgttttt

SEQ ID NO: 1909613 - DNA, 15 bp, Homo sapiens
ccttttctgtttttt

SEQ ID NO: 1909614 - DNA, 15 bp, Homo sapiens
cttttctgttttttt

SEQ ID NO: 1909615 - DNA, 15 bp, Homo sapiens
ttttctgtttttttc

SEQ ID NO: 1909616 - DNA, 15 bp, Homo sapiens
tttctgtttttttct

SEQ ID NO: 1909617 - DNA, 15 bp, Homo sapiens
ttctgtttttttctt

SEQ ID NO: 1909618 - DNA, 15 bp, Homo sapiens
tctgtttttttcttc

SEQ ID NO: 1909619 - DNA, 15 bp, Homo sapiens
ctgtttttttcttct

SEQ ID NO: 1909620 - DNA, 15 bp, Homo sapiens
tgtttttttcttcta

SEQ ID NO: 1909621 - DNA, 15 bp, Homo sapiens
gtttttttcttctac

SEQ ID NO: 1909622 - DNA, 15 bp, Homo sapiens
tttttttcttctacc

SEQ ID NO: 1909623 - DNA, 15 bp, Homo sapiens
ttttttcttctacca

SEQ ID NO: 1909624 - DNA, 15 bp, Homo sapiens
tttttcttctaccat

SEQ ID NO: 1909625 - DNA, 15 bp, Homo sapiens
ttttcttctaccatc

SEQ ID NO: 1909626 - DNA, 15 bp, Homo sapiens
tttcttctaccatcg

SEQ ID NO: 1909627 - DNA, 15 bp, Homo sapiens
ttcttctaccatcga

SEQ ID NO: 1909628 - DNA, 15 bp, Homo sapiens
tcttctaccatcgat

SEQ ID NO: 1909629 - DNA, 15 bp, Homo sapiens
cttctaccatcgatc

SEQ ID NO: 1909630 - DNA, 15 bp, Homo sapiens
ttctaccatcgatcc

SEQ ID NO: 1909631 - DNA, 15 bp, Homo sapiens
tctaccatcgatcca

SEQ ID NO: 1909632 - DNA, 15 bp, Homo sapiens
ctaccatcgatccac

SEQ ID NO: 1909633 - DNA, 15 bp, Homo sapiens
taccatcgatccact

SEQ ID NO: 1909634 - DNA, 15 bp, Homo sapiens
accatcgatccactg

SEQ ID NO: 1909635 - DNA, 15 bp, Homo sapiens
ccatcgatccactga

SEQ ID NO: 1909636 - DNA, 15 bp, Homo sapiens
catcgatccactgac

SEQ ID NO: 1909637 - DNA, 15 bp, Homo sapiens
atcgatccactgact

SEQ ID NO: 1909638 - DNA, 15 bp, Homo sapiens
tcgatccactgactg

SEQ ID NO: 1909639 - DNA, 15 bp, Homo sapiens
cgatccactgactgt

SEQ ID NO: 1909640 - DNA, 15 bp, Homo sapiens
gatccactgactgtt

SEQ ID NO: 1909641 - DNA, 15 bp, Homo sapiens
atccactgactgttc

SEQ ID NO: 1909642 - DNA, 15 bp, Homo sapiens
tccactgactgttca

SEQ ID NO: 1909643 - DNA, 15 bp, Homo sapiens
ccactgactgttcat

SEQ ID NO: 1909644 - DNA, 15 bp, Homo sapiens
cactgactgttcatt

SEQ ID NO: 1909645 - DNA, 15 bp, Homo sapiens
actgactgttcattt

SEQ ID NO: 1909646 - DNA, 15 bp, Homo sapiens
ctgactgttcatttt

SEQ ID NO: 1909647 - DNA, 15 bp, Homo sapiens
tgactgttcatttta

SEQ ID NO: 1909648 - DNA, 15 bp, Homo sapiens
gactgttcattttaa

SEQ ID NO: 1909649 - DNA, 15 bp, Homo sapiens
actgttcattttaag

SEQ ID NO: 1909650 - DNA, 15 bp, Homo sapiens
ctgttcattttaagg

SEQ ID NO: 1909651 - DNA, 15 bp, Homo sapiens
tgttcattttaagga

SEQ ID NO: 1909652 - DNA, 15 bp, Homo sapiens
gttcattttaaggaa

SEQ ID NO: 1909653 - DNA, 15 bp, Homo sapiens
ttcattttaaggaat

SEQ ID NO: 1909654 - DNA, 15 bp, Homo sapiens
tcattttaaggaatg

SEQ ID NO: 1909655 - DNA, 15 bp, Homo sapiens
cattttaaggaatgc

SEQ ID NO: 1909656 - DNA, 15 bp, Homo sapiens
attttaaggaatgcc

SEQ ID NO: 1909657 - DNA, 15 bp, Homo sapiens
ttttaaggaatgcct

SEQ ID NO: 1909658 - DNA, 15 bp, Homo sapiens
tttaaggaatgcctg

SEQ ID NO: 1909659 - DNA, 15 bp, Homo sapiens
ttaaggaatgcctga

SEQ ID NO: 1909660 - DNA, 15 bp, Homo sapiens
taaggaatgcctgaa

SEQ ID NO: 1909661 - DNA, 15 bp, Homo sapiens
aaggaatgcctgaaa

SEQ ID NO: 1909662 - DNA, 15 bp, Homo sapiens
aggaatgcctgaaaa

SEQ ID NO: 1909663 - DNA, 15 bp, Homo sapiens
ggaatgcctgaaaaa

SEQ ID NO: 1909664 - DNA, 15 bp, Homo sapiens
gaatgcctgaaaaag

SEQ ID NO: 1909665 - DNA, 15 bp, Homo sapiens
aatgcctgaaaaagt

SEQ ID NO: 1909666 - DNA, 15 bp, Homo sapiens
atgcctgaaaaagta

SEQ ID NO: 1909667 - DNA, 15 bp, Homo sapiens
tgcctgaaaaagtaa

SEQ ID NO: 1909668 - DNA, 15 bp, Homo sapiens
gcctgaaaaagtaat

SEQ ID NO: 1909669 - DNA, 15 bp, Homo sapiens
cctgaaaaagtaatg

SEQ ID NO: 1909670 - DNA, 15 bp, Homo sapiens
ctgaaaaagtaatgg

SEQ ID NO: 1909671 - DNA, 15 bp, Homo sapiens
tgaaaaagtaatggc

SEQ ID NO: 1909672 - DNA, 15 bp, Homo sapiens
gaaaaagtaatggcc

SEQ ID NO: 1909673 - DNA, 15 bp, Homo sapiens
aaaaagtaatggcca

SEQ ID NO: 1909674 - DNA, 15 bp, Homo sapiens
aaaagtaatggccaa

SEQ ID NO: 1909675 - DNA, 15 bp, Homo sapiens
aaagtaatggccaat

SEQ ID NO: 1909676 - DNA, 15 bp, Homo sapiens
aagtaatggccaatg

SEQ ID NO: 1909677 - DNA, 15 bp, Homo sapiens
agtaatggccaatgt

SEQ ID NO: 1909678 - DNA, 15 bp, Homo sapiens
gtaatggccaatgtg

SEQ ID NO: 1909679 - DNA, 15 bp, Homo sapiens
taatggccaatgtgc

SEQ ID NO: 1909680 - DNA, 15 bp, Homo sapiens
aatggccaatgtgcc

SEQ ID NO: 1909681 - DNA, 15 bp, Homo sapiens
atggccaatgtgcct

SEQ ID NO: 1909682 - DNA, 15 bp, Homo sapiens
tggccaatgtgcctg

SEQ ID NO: 1909683 - DNA, 15 bp, Homo sapiens
ggccaatgtgcctga

SEQ ID NO: 1909684 - DNA, 15 bp, Homo sapiens
gccaatgtgcctgaa

SEQ ID NO: 1909685 - DNA, 15 bp, Homo sapiens
ccaatgtgcctgaag

SEQ ID NO: 1909686 - DNA, 15 bp, Homo sapiens
caatgtgcctgaagc

SEQ ID NO: 1909687 - DNA, 15 bp, Homo sapiens
aatgtgcctgaagcc

SEQ ID NO: 1909688 - DNA, 15 bp, Homo sapiens
atgtgcctgaagcca

SEQ ID NO: 1909689 - DNA, 15 bp, Homo sapiens
tgtgcctgaagccaa

SEQ ID NO: 1909690 - DNA, 15 bp, Homo sapiens
gtgcctgaagccaat

SEQ ID NO: 1909691 - DNA, 15 bp, Homo sapiens
tgcctgaagccaatt

SEQ ID NO: 1909692 - DNA, 15 bp, Homo sapiens
gcctgaagccaattt

SEQ ID NO: 1909693 - DNA, 15 bp, Homo sapiens
cctgaagccaatttg

SEQ ID NO: 1909694 - DNA, 15 bp, Homo sapiens
ctgaagccaatttgc

SEQ ID NO: 1909695 - DNA, 15 bp, Homo sapiens
tgaagccaatttgcc

SEQ ID NO: 1909696 - DNA, 15 bp, Homo sapiens
gaagccaatttgcca

SEQ ID NO: 1909697 - DNA, 15 bp, Homo sapiens
aagccaatttgccaa

SEQ ID NO: 1909698 - DNA, 15 bp, Homo sapiens
agccaatttgccaaa

SEQ ID NO: 1909699 - DNA, 15 bp, Homo sapiens
gccaatttgccaaag

SEQ ID NO: 1909700 - DNA, 15 bp, Homo sapiens
ccaatttgccaaaga

SEQ ID NO: 1909701 - DNA, 15 bp, Homo sapiens
caatttgccaaagaa

SEQ ID NO: 1909702 - DNA, 15 bp, Homo sapiens
aatttgccaaagaat

SEQ ID NO: 1909703 - DNA, 15 bp, Homo sapiens
atttgccaaagaatc

SEQ ID NO: 1909704 - DNA, 15 bp, Homo sapiens
tttgccaaagaatcc

SEQ ID NO: 1909705 - DNA, 15 bp, Homo sapiens
ttgccaaagaatcca

SEQ ID NO: 1909706 - DNA, 15 bp, Homo sapiens
tgccaaagaatccat

SEQ ID NO: 1909707 - DNA, 15 bp, Homo sapiens
gccaaagaatccatt

SEQ ID NO: 1909708 - DNA, 15 bp, Homo sapiens
ccaaagaatccattt

SEQ ID NO: 1909709 - DNA, 15 bp, Homo sapiens
caaagaatccatttg

SEQ ID NO: 1909710 - DNA, 15 bp, Homo sapiens
aaagaatccatttgt

SEQ ID NO: 1909711 - DNA, 15 bp, Homo sapiens
aagaatccatttgtc

SEQ ID NO: 1909712 - DNA, 15 bp, Homo sapiens
agaatccatttgtca

SEQ ID NO: 1909713 - DNA, 15 bp, Homo sapiens
gaatccatttgtcat

SEQ ID NO: 1909714 - DNA, 15 bp, Homo sapiens
aatccatttgtcatc

SEQ ID NO: 1909715 - DNA, 15 bp, Homo sapiens
atccatttgtcatca

SEQ ID NO: 1909716 - DNA, 15 bp, Homo sapiens
tccatttgtcatcag

SEQ ID NO: 1909717 - DNA, 15 bp, Homo sapiens
ccatttgtcatcagt

SEQ ID NO: 1909718 - DNA, 15 bp, Homo sapiens
catttgtcatcagtc

SEQ ID NO: 1909719 - DNA, 15 bp, Homo sapiens
atttgtcatcagtca

SEQ ID NO: 1909720 - DNA, 15 bp, Homo sapiens
tttgtcatcagtcat

SEQ ID NO: 1909721 - DNA, 15 bp, Homo sapiens
ttgtcatcagtcatt

SEQ ID NO: 1909722 - DNA, 15 bp, Homo sapiens
tgtcatcagtcattt

SEQ ID NO: 1909723 - DNA, 15 bp, Homo sapiens
gtcatcagtcatttt

SEQ ID NO: 1909724 - DNA, 15 bp, Homo sapiens
tcatcagtcattttg

SEQ ID NO: 1909725 - DNA, 15 bp, Homo sapiens
catcagtcattttga

SEQ ID NO: 1909726 - DNA, 15 bp, Homo sapiens
atcagtcattttgat

SEQ ID NO: 1909727 - DNA, 15 bp, Homo sapiens
tcagtcattttgatg

SEQ ID NO: 1909728 - DNA, 15 bp, Homo sapiens
cagtcattttgatga

SEQ ID NO: 1909729 - DNA, 15 bp, Homo sapiens
agtcattttgatgaa

SEQ ID NO: 1909730 - DNA, 15 bp, Homo sapiens
gtcattttgatgaat

SEQ ID NO: 1909731 - DNA, 15 bp, Homo sapiens
tcattttgatgaatt

SEQ ID NO: 1909732 - DNA, 15 bp, Homo sapiens
cattttgatgaattt

SEQ ID NO: 1909733 - DNA, 15 bp, Homo sapiens
attttgatgaattta

SEQ ID NO: 1909734 - DNA, 15 bp, Homo sapiens
ttttgatgaatttat

SEQ ID NO: 1909735 - DNA, 15 bp, Homo sapiens
tttgatgaatttatc

SEQ ID NO: 1909736 - DNA, 15 bp, Homo sapiens
ttgatgaatttatcg

SEQ ID NO: 1909737 - DNA, 15 bp, Homo sapiens
tgatgaatttatcga

SEQ ID NO: 1909738 - DNA, 15 bp, Homo sapiens
gatgaatttatcgaa

SEQ ID NO: 1909739 - DNA, 15 bp, Homo sapiens
atgaatttatcgaat

SEQ ID NO: 1909740 - DNA, 15 bp, Homo sapiens
tgaatttatcgaatt

SEQ ID NO: 1909741 - DNA, 15 bp, Homo sapiens
gaatttatcgaattt

SEQ ID NO: 1909742 - DNA, 15 bp, Homo sapiens
aatttatcgaattta

SEQ ID NO: 1909743 - DNA, 15 bp, Homo sapiens
atttatcgaatttag

SEQ ID NO: 1909744 - DNA, 15 bp, Homo sapiens
tttatcgaatttagc

SEQ ID NO: 1909745 - DNA, 15 bp, Homo sapiens
ttatcgaatttagct

SEQ ID NO: 1909746 - DNA, 15 bp, Homo sapiens
tatcgaatttagcta

SEQ ID NO: 1909747 - DNA, 15 bp, Homo sapiens
atcgaatttagctat

SEQ ID NO: 1909748 - DNA, 15 bp, Homo sapiens
tcgaatttagctata

SEQ ID NO: 1909749 - DNA, 15 bp, Homo sapiens
cgaatttagctatat

SEQ ID NO: 1909750 - DNA, 15 bp, Homo sapiens
gaatttagctatata

SEQ ID NO: 1909751 - DNA, 15 bp, Homo sapiens
aatttagctatatac

SEQ ID NO: 1909752 - DNA, 15 bp, Homo sapiens
atttagctatatacc

SEQ ID NO: 1909753 - DNA, 15 bp, Homo sapiens
tttagctatatacca

SEQ ID NO: 1909754 - DNA, 15 bp, Homo sapiens
ttagctatataccac

SEQ ID NO: 1909755 - DNA, 15 bp, Homo sapiens
tagctatataccaca

SEQ ID NO: 1909756 - DNA, 15 bp, Homo sapiens
agctatataccacaa

SEQ ID NO: 1909757 - DNA, 15 bp, Homo sapiens
gctatataccacaaa

SEQ ID NO: 1909758 - DNA, 15 bp, Homo sapiens
ctatataccacaaat

SEQ ID NO: 1909759 - DNA, 15 bp, Homo sapiens
tatataccacaaatt

SEQ ID NO: 1909760 - DNA, 15 bp, Homo sapiens
atataccacaaattt

SEQ ID NO: 1909761 - DNA, 15 bp, Homo sapiens
tataccacaaatttt

SEQ ID NO: 1909762 - DNA, 15 bp, Homo sapiens
ataccacaaattttg

SEQ ID NO: 1909763 - DNA, 15 bp, Homo sapiens
taccacaaattttgt

SEQ ID NO: 1909764 - DNA, 15 bp, Homo sapiens
accacaaattttgta

SEQ ID NO: 1909765 - DNA, 15 bp, Homo sapiens
ccacaaattttgtat

SEQ ID NO: 1909766 - DNA, 15 bp, Homo sapiens
cacaaattttgtatg

SEQ ID NO: 1909767 - DNA, 15 bp, Homo sapiens
acaaattttgtatga

SEQ ID NO: 1909768 - DNA, 15 bp, Homo sapiens
caaattttgtatgat

SEQ ID NO: 1909769 - DNA, 15 bp, Homo sapiens
aaattttgtatgatc

SEQ ID NO: 1909770 - DNA, 15 bp, Homo sapiens
aattttgtatgatca

SEQ ID NO: 1909771 - DNA, 15 bp, Homo sapiens
attttgtatgatcac

SEQ ID NO: 1909772 - DNA, 15 bp, Homo sapiens
ttttgtatgatcact

SEQ ID NO: 1909773 - DNA, 15 bp, Homo sapiens
tttgtatgatcactg

SEQ ID NO: 1909774 - DNA, 15 bp, Homo sapiens
ttgtatgatcactgt

SEQ ID NO: 1909775 - DNA, 15 bp, Homo sapiens
tgtatgatcactgta

SEQ ID NO: 1909776 - DNA, 15 bp, Homo sapiens
gtatgatcactgtaa

SEQ ID NO: 1909777 - DNA, 15 bp, Homo sapiens
tatgatcactgtaac

SEQ ID NO: 1909778 - DNA, 15 bp, Homo sapiens
atgatcactgtaacc

SEQ ID NO: 1909779 - DNA, 15 bp, Homo sapiens
tgatcactgtaaccc

SEQ ID NO: 1909780 - DNA, 15 bp, Homo sapiens
gatcactgtaaccct

SEQ ID NO: 1909781 - DNA, 15 bp, Homo sapiens
atcactgtaacccta

SEQ ID NO: 1909782 - DNA, 15 bp, Homo sapiens
tcactgtaaccctac

SEQ ID NO: 1909783 - DNA, 15 bp, Homo sapiens
cactgtaaccctaca

SEQ ID NO: 1909784 - DNA, 15 bp, Homo sapiens
actgtaaccctacac

SEQ ID NO: 1909785 - DNA, 15 bp, Homo sapiens
ctgtaaccctacaca

SEQ ID NO: 1909786 - DNA, 15 bp, Homo sapiens
tgtaaccctacacag

SEQ ID NO: 1909787 - DNA, 15 bp, Homo sapiens
gtaaccctacacagt

SEQ ID NO: 1909788 - DNA, 15 bp, Homo sapiens
taaccctacacagtt

SEQ ID NO: 1909789 - DNA, 15 bp, Homo sapiens
aaccctacacagttc

SEQ ID NO: 1909790 - DNA, 15 bp, Homo sapiens
accctacacagttct

SEQ ID NO: 1909791 - DNA, 15 bp, Homo sapiens
ccctacacagttcta

SEQ ID NO: 1909792 - DNA, 15 bp, Homo sapiens
cctacacagttctat

SEQ ID NO: 1909793 - DNA, 15 bp, Homo sapiens
ctacacagttctata

SEQ ID NO: 1909794 - DNA, 15 bp, Homo sapiens
tacacagttctataa

SEQ ID NO: 1909795 - DNA, 15 bp, Homo sapiens
acacagttctataat

SEQ ID NO: 1909796 - DNA, 15 bp, Homo sapiens
cacagttctataata

SEQ ID NO: 1909797 - DNA, 15 bp, Homo sapiens
acagttctataataa

SEQ ID NO: 1909798 - DNA, 15 bp, Homo sapiens
cagttctataataaa

SEQ ID NO: 1909799 - DNA, 15 bp, Homo sapiens
agttctataataaac

SEQ ID NO: 1909800 - DNA, 15 bp, Homo sapiens
gttctataataaacc

SEQ ID NO: 1909801 - DNA, 15 bp, Homo sapiens
ttctataataaacca

SEQ ID NO: 1909802 - DNA, 15 bp, Homo sapiens
tctataataaaccac

SEQ ID NO: 1909803 - DNA, 15 bp, Homo sapiens
ctataataaaccaca

SEQ ID NO: 1909804 - DNA, 15 bp, Homo sapiens
tataataaaccacac

SEQ ID NO: 1909805 - DNA, 15 bp, Homo sapiens
ataataaaccacact

SEQ ID NO: 1909806 - DNA, 15 bp, Homo sapiens
taataaaccacacta

SEQ ID NO: 1909807 - DNA, 15 bp, Homo sapiens
aataaaccacactaa

SEQ ID NO: 1909808 - DNA, 15 bp, Homo sapiens
ataaaccacactaaa

SEQ ID NO: 1909809 - DNA, 15 bp, Homo sapiens
taaaccacactaaat

SEQ ID NO: 1909810 - DNA, 15 bp, Homo sapiens
aaaccacactaaatg

SEQ ID NO: 1909811 - DNA, 15 bp, Homo sapiens
aaccacactaaatgg

SEQ ID NO: 1909812 - DNA, 15 bp, Homo sapiens
accacactaaatgga

SEQ ID NO: 1909813 - DNA, 15 bp, Homo sapiens
ccacactaaatggaa

SEQ ID NO: 1909814 - DNA, 15 bp, Homo sapiens
cacactaaatggaat

SEQ ID NO: 1909815 - DNA, 15 bp, Homo sapiens
acactaaatggaatg

SEQ ID NO: 1909816 - DNA, 15 bp, Homo sapiens
cactaaatggaatga

SEQ ID NO: 1909817 - DNA, 15 bp, Homo sapiens
actaaatggaatgaa

SEQ ID NO: 1909818 - DNA, 15 bp, Homo sapiens
ctaaatggaatgaaa

SEQ ID NO: 1909819 - DNA, 15 bp, Homo sapiens
taaatggaatgaaaa

SEQ ID NO: 1909820 - DNA, 15 bp, Homo sapiens
aaatggaatgaaaac

SEQ ID NO: 1909821 - DNA, 15 bp, Homo sapiens
aatggaatgaaaaca

SEQ ID NO: 1909822 - DNA, 15 bp, Homo sapiens
atggaatgaaaacat

SEQ ID NO: 1909823 - DNA, 15 bp, Homo sapiens
tggaatgaaaacatt

SEQ ID NO: 1909824 - DNA, 15 bp, Homo sapiens
ggaatgaaaacattt

SEQ ID NO: 1909825 - DNA, 15 bp, Homo sapiens
gaatgaaaacattta

SEQ ID NO: 1909826 - DNA, 15 bp, Homo sapiens
aatgaaaacatttac

SEQ ID NO: 1909827 - DNA, 15 bp, Homo sapiens
atgaaaacatttaca

SEQ ID NO: 1909828 - DNA, 15 bp, Homo sapiens
tgaaaacatttacag

SEQ ID NO: 1909829 - DNA, 15 bp, Homo sapiens
gaaaacatttacagg

SEQ ID NO: 1909830 - DNA, 15 bp, Homo sapiens
aaaacatttacaggg

SEQ ID NO: 1909831 - DNA, 15 bp, Homo sapiens
aaacatttacagggg

SEQ ID NO: 1909832 - DNA, 15 bp, Homo sapiens
aacatttacaggggg

SEQ ID NO: 1909833 - DNA, 15 bp, Homo sapiens
acatttacagggggg

SEQ ID NO: 1909834 - DNA, 15 bp, Homo sapiens
catttacaggggggc

SEQ ID NO: 1909835 - DNA, 15 bp, Homo sapiens
atttacaggggggcc

SEQ ID NO: 1909836 - DNA, 15 bp, Homo sapiens
tttacaggggggcca

SEQ ID NO: 1909837 - DNA, 15 bp, Homo sapiens
ttacaggggggccag

SEQ ID NO: 1909838 - DNA, 15 bp, Homo sapiens
tacaggggggccaga

SEQ ID NO: 1909839 - DNA, 15 bp, Homo sapiens
acaggggggccagat

SEQ ID NO: 1909840 - DNA, 15 bp, Homo sapiens
caggggggccagatt

SEQ ID NO: 1909841 - DNA, 15 bp, Homo sapiens
aggggggccagattt

SEQ ID NO: 1909842 - DNA, 15 bp, Homo sapiens
ggggggccagattta

SEQ ID NO: 1909843 - DNA, 15 bp, Homo sapiens
gggggccagatttag

SEQ ID NO: 1909844 - DNA, 15 bp, Homo sapiens
ggggccagatttagg

SEQ ID NO: 1909845 - DNA, 15 bp, Homo sapiens
gggccagatttaggg

SEQ ID NO: 1909846 - DNA, 15 bp, Homo sapiens
ggccagatttagggc

SEQ ID NO: 1909847 - DNA, 15 bp, Homo sapiens
gccagatttagggcc

SEQ ID NO: 1909848 - DNA, 15 bp, Homo sapiens
ccagatttagggcct

SEQ ID NO: 1909849 - DNA, 15 bp, Homo sapiens
cagatttagggcctt

SEQ ID NO: 1909850 - DNA, 15 bp, Homo sapiens
agatttagggccttc

SEQ ID NO: 1909851 - DNA, 15 bp, Homo sapiens
gatttagggccttca

SEQ ID NO: 1909852 - DNA, 15 bp, Homo sapiens
atttagggccttcag

SEQ ID NO: 1909853 - DNA, 15 bp, Homo sapiens
tttagggccttcaga

SEQ ID NO: 1909854 - DNA, 15 bp, Homo sapiens
ttagggccttcagac

SEQ ID NO: 1909855 - DNA, 15 bp, Homo sapiens
tagggccttcagact

SEQ ID NO: 1909856 - DNA, 15 bp, Homo sapiens
agggccttcagactc

SEQ ID NO: 1909857 - DNA, 15 bp, Homo sapiens
gggccttcagactca

SEQ ID NO: 1909858 - DNA, 15 bp, Homo sapiens
ggccttcagactcac

SEQ ID NO: 1909859 - DNA, 15 bp, Homo sapiens
gccttcagactcact

SEQ ID NO: 1909860 - DNA, 15 bp, Homo sapiens
ccttcagactcactc

SEQ ID NO: 1909861 - DNA, 15 bp, Homo sapiens
cttcagactcactcc

SEQ ID NO: 1909862 - DNA, 15 bp, Homo sapiens
ttcagactcactcca

SEQ ID NO: 1909863 - DNA, 15 bp, Homo sapiens
tcagactcactccac

SEQ ID NO: 1909864 - DNA, 15 bp, Homo sapiens
cagactcactccact

SEQ ID NO: 1909865 - DNA, 15 bp, Homo sapiens
agactcactccactc

SEQ ID NO: 1909866 - DNA, 15 bp, Homo sapiens
gactcactccactcc

SEQ ID NO: 1909867 - DNA, 15 bp, Homo sapiens
actcactccactccg

SEQ ID NO: 1909868 - DNA, 15 bp, Homo sapiens
ctcactccactccgt

SEQ ID NO: 1909869 - DNA, 15 bp, Homo sapiens
tcactccactccgtc

SEQ ID NO: 1909870 - DNA, 15 bp, Homo sapiens
cactccactccgtct

SEQ ID NO: 1909871 - DNA, 15 bp, Homo sapiens
actccactccgtctc

SEQ ID NO: 1909872 - DNA, 15 bp, Homo sapiens
ctccactccgtctca

SEQ ID NO: 1909873 - DNA, 15 bp, Homo sapiens
tccactccgtctcac

SEQ ID NO: 1909874 - DNA, 15 bp, Homo sapiens
ccactccgtctcact

SEQ ID NO: 1909875 - DNA, 15 bp, Homo sapiens
cactccgtctcactc

SEQ ID NO: 1909876 - DNA, 15 bp, Homo sapiens
actccgtctcactct

SEQ ID NO: 1909877 - DNA, 15 bp, Homo sapiens
ctccgtctcactctc

SEQ ID NO: 1909878 - DNA, 15 bp, Homo sapiens
tccgtctcactctct

SEQ ID NO: 1909879 - DNA, 15 bp, Homo sapiens
ccgtctcactctctg

SEQ ID NO: 1909880 - DNA, 15 bp, Homo sapiens
cgtctcactctctgc

SEQ ID NO: 1909881 - DNA, 15 bp, Homo sapiens
gtctcactctctgca

SEQ ID NO: 1909882 - DNA, 15 bp, Homo sapiens
tctcactctctgcag

SEQ ID NO: 1909883 - DNA, 15 bp, Homo sapiens
ctcactctctgcagc

SEQ ID NO: 1909884 - DNA, 15 bp, Homo sapiens
tcactctctgcagcc

SEQ ID NO: 1909885 - DNA, 15 bp, Homo sapiens
cactctctgcagcca

SEQ ID NO: 1909886 - DNA, 15 bp, Homo sapiens
actctctgcagccat

SEQ ID NO: 1909887 - DNA, 15 bp, Homo sapiens
ctctctgcagccatt

SEQ ID NO: 1909888 - DNA, 15 bp, Homo sapiens
tctctgcagccattg

SEQ ID NO: 1909889 - DNA, 15 bp, Homo sapiens
ctctgcagccattgt

SEQ ID NO: 1909890 - DNA, 15 bp, Homo sapiens
tctgcagccattgtc

SEQ ID NO: 1909891 - DNA, 15 bp, Homo sapiens
ctgcagccattgtct

SEQ ID NO: 1909892 - DNA, 15 bp, Homo sapiens
tgcagccattgtctc

SEQ ID NO: 1909893 - DNA, 15 bp, Homo sapiens
gcagccattgtctct

SEQ ID NO: 1909894 - DNA, 15 bp, Homo sapiens
cagccattgtctctc

SEQ ID NO: 1909895 - DNA, 15 bp, Homo sapiens
agccattgtctctca

SEQ ID NO: 1909896 - DNA, 15 bp, Homo sapiens
gccattgtctctcaa

SEQ ID NO: 1909897 - DNA, 15 bp, Homo sapiens
ccattgtctctcaat

SEQ ID NO: 1909898 - DNA, 15 bp, Homo sapiens
cattgtctctcaatc

SEQ ID NO: 1909899 - DNA, 15 bp, Homo sapiens
attgtctctcaatct

SEQ ID NO: 1909900 - DNA, 15 bp, Homo sapiens
ttgtctctcaatctc

SEQ ID NO: 1909901 - DNA, 15 bp, Homo sapiens
tgtctctcaatctct

SEQ ID NO: 1909902 - DNA, 15 bp, Homo sapiens
gtctctcaatctctc

SEQ ID NO: 1909903 - DNA, 15 bp, Homo sapiens
tctctcaatctctcc

SEQ ID NO: 1909904 - DNA, 15 bp, Homo sapiens
ctctcaatctctccg

SEQ ID NO: 1909905 - DNA, 15 bp, Homo sapiens
tctcaatctctccgc

SEQ ID NO: 1909906 - DNA, 15 bp, Homo sapiens
ctcaatctctccgcc

SEQ ID NO: 1909907 - DNA, 15 bp, Homo sapiens
tcaatctctccgccc

SEQ ID NO: 1909908 - DNA, 15 bp, Homo sapiens
caatctctccgcccc

SEQ ID NO: 1909909 - DNA, 15 bp, Homo sapiens
aatctctccgcccct

SEQ ID NO: 1909910 - DNA, 15 bp, Homo sapiens
atctctccgcccctc

SEQ ID NO: 1909911 - DNA, 15 bp, Homo sapiens
tctctccgcccctct

SEQ ID NO: 1909912 - DNA, 15 bp, Homo sapiens
ctctccgcccctctg

SEQ ID NO: 1909913 - DNA, 15 bp, Homo sapiens
tctccgcccctctgt

SEQ ID NO: 1909914 - DNA, 15 bp, Homo sapiens
ctccgcccctctgtc

SEQ ID NO: 1909915 - DNA, 15 bp, Homo sapiens
tccgcccctctgtct

SEQ ID NO: 1909916 - DNA, 15 bp, Homo sapiens
ccgcccctctgtctt

SEQ ID NO: 1909917 - DNA, 15 bp, Homo sapiens
cgcccctctgtcttt

SEQ ID NO: 1909918 - DNA, 15 bp, Homo sapiens
gcccctctgtctttc

SEQ ID NO: 1909919 - DNA, 15 bp, Homo sapiens
cccctctgtctttcc

SEQ ID NO: 1909920 - DNA, 15 bp, Homo sapiens
ccctctgtctttcca

SEQ ID NO: 1909921 - DNA, 15 bp, Homo sapiens
cctctgtctttccat

SEQ ID NO: 1909922 - DNA, 15 bp, Homo sapiens
ctctgtctttccatc

SEQ ID NO: 1909923 - DNA, 15 bp, Homo sapiens
tctgtctttccatct

SEQ ID NO: 1909924 - DNA, 15 bp, Homo sapiens
ctgtctttccatctc

SEQ ID NO: 1909925 - DNA, 15 bp, Homo sapiens
tgtctttccatctct

SEQ ID NO: 1909926 - DNA, 15 bp, Homo sapiens
gtctttccatctctt

SEQ ID NO: 1909927 - DNA, 15 bp, Homo sapiens
tctttccatctcttg

SEQ ID NO: 1909928 - DNA, 15 bp, Homo sapiens
ctttccatctcttgt

SEQ ID NO: 1909929 - DNA, 15 bp, Homo sapiens
tttccatctcttgtc

SEQ ID NO: 1909930 - DNA, 15 bp, Homo sapiens
ttccatctcttgtcc

SEQ ID NO: 1909931 - DNA, 15 bp, Homo sapiens
tccatctcttgtccc

SEQ ID NO: 1909932 - DNA, 15 bp, Homo sapiens
ccatctcttgtccca

SEQ ID NO: 1909933 - DNA, 15 bp, Homo sapiens
catctcttgtcccag

SEQ ID NO: 1909934 - DNA, 15 bp, Homo sapiens
atctcttgtcccaga

SEQ ID NO: 1909935 - DNA, 15 bp, Homo sapiens
tctcttgtcccagac

SEQ ID NO: 1909936 - DNA, 15 bp, Homo sapiens
ctcttgtcccagaca

SEQ ID NO: 1909937 - DNA, 15 bp, Homo sapiens
tcttgtcccagacac

SEQ ID NO: 1909938 - DNA, 15 bp, Homo sapiens
cttgtcccagacacc

SEQ ID NO: 1909939 - DNA, 15 bp, Homo sapiens
ttgtcccagacaccc

SEQ ID NO: 1909940 - DNA, 15 bp, Homo sapiens
tgtcccagacaccct

SEQ ID NO: 1909941 - DNA, 15 bp, Homo sapiens
gtcccagacaccctc

SEQ ID NO: 1909942 - DNA, 15 bp, Homo sapiens
tcccagacaccctcg

SEQ ID NO: 1909943 - DNA, 15 bp, Homo sapiens
cccagacaccctcgg

SEQ ID NO: 1909944 - DNA, 15 bp, Homo sapiens
ccagacaccctcggc

SEQ ID NO: 1909945 - DNA, 15 bp, Homo sapiens
cagacaccctcggcc

SEQ ID NO: 1909946 - DNA, 15 bp, Homo sapiens
agacaccctcggcct

SEQ ID NO: 1909947 - DNA, 15 bp, Homo sapiens
gacaccctcggcctc

SEQ ID NO: 1909948 - DNA, 15 bp, Homo sapiens
acaccctcggcctcc

SEQ ID NO: 1909949 - DNA, 15 bp, Homo sapiens
caccctcggcctcca

SEQ ID NO: 1909950 - DNA, 15 bp, Homo sapiens
accctcggcctccag

SEQ ID NO: 1909951 - DNA, 15 bp, Homo sapiens
ccctcggcctccagt

SEQ ID NO: 1909952 - DNA, 15 bp, Homo sapiens
cctcggcctccagtc

SEQ ID NO: 1909953 - DNA, 15 bp, Homo sapiens
ctcggcctccagtct

SEQ ID NO: 1909954 - DNA, 15 bp, Homo sapiens
tcggcctccagtctc

SEQ ID NO: 1909955 - DNA, 15 bp, Homo sapiens
cggcctccagtctcc

SEQ ID NO: 1909956 - DNA, 15 bp, Homo sapiens
ggcctccagtctccc

SEQ ID NO: 1909957 - DNA, 15 bp, Homo sapiens
gcctccagtctccct

SEQ ID NO: 1909958 - DNA, 15 bp, Homo sapiens
cctccagtctccctt

SEQ ID NO: 1909959 - DNA, 15 bp, Homo sapiens
ctccagtctcccttc

SEQ ID NO: 1909960 - DNA, 15 bp, Homo sapiens
tccagtctcccttcc

SEQ ID NO: 1909961 - DNA, 15 bp, Homo sapiens
ccagtctcccttcct

SEQ ID NO: 1909962 - DNA, 15 bp, Homo sapiens
cagtctcccttcctc

SEQ ID NO: 1909963 - DNA, 15 bp, Homo sapiens
agtctcccttcctct

SEQ ID NO: 1909964 - DNA, 15 bp, Homo sapiens
gtctcccttcctctc

SEQ ID NO: 1909965 - DNA, 15 bp, Homo sapiens
tcccttcctctctgt

SEQ ID NO: 1909966 - DNA, 15 bp, Homo sapiens
cccttcctctctgtc

SEQ ID NO: 1909967 - DNA, 15 bp, Homo sapiens
ccttcctctctgtcc

SEQ ID NO: 1909968 - DNA, 15 bp, Homo sapiens
cttcctctctgtccc

SEQ ID NO: 1909969 - DNA, 15 bp, Homo sapiens
ttcctctctgtcccc

SEQ ID NO: 1909970 - DNA, 15 bp, Homo sapiens
tcctctctgtcccct

SEQ ID NO: 1909971 - DNA, 15 bp, Homo sapiens
cctctctgtcccctg

SEQ ID NO: 1909972 - DNA, 15 bp, Homo sapiens
ctctctgtcccctgt

SEQ ID NO: 1909973 - DNA, 15 bp, Homo sapiens
tctctgtcccctgtt

SEQ ID NO: 1909974 - DNA, 15 bp, Homo sapiens
ctctgtcccctgttc

SEQ ID NO: 1909975 - DNA, 15 bp, Homo sapiens
tctgtcccctgttcc

SEQ ID NO: 1909976 - DNA, 15 bp, Homo sapiens
ctgtcccctgttccc

SEQ ID NO: 1909977 - DNA, 15 bp, Homo sapiens
tgtcccctgttcccc

SEQ ID NO: 1909978 - DNA, 15 bp, Homo sapiens
gtcccctgttccccc

SEQ ID NO: 1909979 - DNA, 15 bp, Homo sapiens
tcccctgttcccccc

SEQ ID NO: 1909980 - DNA, 15 bp, Homo sapiens
cccctgttcccccca

SEQ ID NO: 1909981 - DNA, 15 bp, Homo sapiens
ccctgttccccccac

SEQ ID NO: 1909982 - DNA, 15 bp, Homo sapiens
cctgttccccccacc

SEQ ID NO: 1909983 - DNA, 15 bp, Homo sapiens
ctgttccccccaccc

SEQ ID NO: 1909984 - DNA, 15 bp, Homo sapiens
tgttccccccacccc

SEQ ID NO: 1909985 - DNA, 15 bp, Homo sapiens
gttccccccaccccc

SEQ ID NO: 1909986 - DNA, 15 bp, Homo sapiens
tccccccacccccat

SEQ ID NO: 1909987 - DNA, 15 bp, Homo sapiens
ccccccacccccatc

SEQ ID NO: 1909988 - DNA, 15 bp, Homo sapiens
cccccacccccatcc

SEQ ID NO: 1909989 - DNA, 15 bp, Homo sapiens
ccccacccccatccc

SEQ ID NO: 1909990 - DNA, 15 bp, Homo sapiens
cccacccccatccca

SEQ ID NO: 1909991 - DNA, 15 bp, Homo sapiens
ccacccccatcccag

SEQ ID NO: 1909992 - DNA, 15 bp, Homo sapiens
cacccccatcccagc

SEQ ID NO: 1909993 - DNA, 15 bp, Homo sapiens
acccccatcccagcc

SEQ ID NO: 1909994 - DNA, 15 bp, Homo sapiens
cccccatcccagcca

SEQ ID NO: 1909995 - DNA, 15 bp, Homo sapiens
ccccatcccagccat

SEQ ID NO: 1909996 - DNA, 15 bp, Homo sapiens
cccatcccagccatg

SEQ ID NO: 1909997 - DNA, 15 bp, Homo sapiens
ccatcccagccatgc

SEQ ID NO: 1909998 - DNA, 15 bp, Homo sapiens
catcccagccatgcc

SEQ ID NO: 1909999 - DNA, 15 bp, Homo sapiens
atcccagccatgccc

SEQ ID NO: 1910000 - DNA, 15 bp, Homo sapiens
tcccagccatgccct

SEQ ID NO: 1910001 - DNA, 15 bp, Homo sapiens
cccagccatgccctc

SEQ ID NO: 1910002 - DNA, 15 bp, Homo sapiens
ccagccatgccctcc

SEQ ID NO: 1910003 - DNA, 15 bp, Homo sapiens
cagccatgccctcct

SEQ ID NO: 1910004 - DNA, 15 bp, Homo sapiens
agccatgccctcctg

SEQ ID NO: 1910005 - DNA, 15 bp, Homo sapiens
gccatgccctcctgc

SEQ ID NO: 1910006 - DNA, 15 bp, Homo sapiens
ccatgccctcctgct

SEQ ID NO: 1910007 - DNA, 15 bp, Homo sapiens
catgccctcctgctt

SEQ ID NO: 1910008 - DNA, 15 bp, Homo sapiens
atgccctcctgcttc

SEQ ID NO: 1910009 - DNA, 15 bp, Homo sapiens
tgccctcctgcttcc

SEQ ID NO: 1910010 - DNA, 15 bp, Homo sapiens
gccctcctgcttcct

SEQ ID NO: 1910011 - DNA, 15 bp, Homo sapiens
ccctcctgcttcctc

SEQ ID NO: 1910012 - DNA, 15 bp, Homo sapiens
cctcctgcttcctct

SEQ ID NO: 1910013 - DNA, 15 bp, Homo sapiens
ctcctgcttcctctg

SEQ ID NO: 1910014 - DNA, 15 bp, Homo sapiens
tcctgcttcctctgc

SEQ ID NO: 1910015 - DNA, 15 bp, Homo sapiens
cctgcttcctctgcc

SEQ ID NO: 1910016 - DNA, 15 bp, Homo sapiens
ctgcttcctctgccc

SEQ ID NO: 1910017 - DNA, 15 bp, Homo sapiens
tgcttcctctgcccg

SEQ ID NO: 1910018 - DNA, 15 bp, Homo sapiens
gcttcctctgcccgc

SEQ ID NO: 1910019 - DNA, 15 bp, Homo sapiens
cttcctctgcccgct

SEQ ID NO: 1910020 - DNA, 15 bp, Homo sapiens
ttcctctgcccgcta

SEQ ID NO: 1910021 - DNA, 15 bp, Homo sapiens
tcctctgcccgctag

SEQ ID NO: 1910022 - DNA, 15 bp, Homo sapiens
cctctgcccgctagt

SEQ ID NO: 1910023 - DNA, 15 bp, Homo sapiens
ctctgcccgctagtc

SEQ ID NO: 1910024 - DNA, 15 bp, Homo sapiens
tctgcccgctagtct

SEQ ID NO: 1910025 - DNA, 15 bp, Homo sapiens
ctgcccgctagtctt

SEQ ID NO: 1910026 - DNA, 15 bp, Homo sapiens
tgcccgctagtcttc

SEQ ID NO: 1910027 - DNA, 15 bp, Homo sapiens
gcccgctagtcttcc

SEQ ID NO: 1910028 - DNA, 15 bp, Homo sapiens
cccgctagtcttccc

SEQ ID NO: 1910029 - DNA, 15 bp, Homo sapiens
ccgctagtcttccct

SEQ ID NO: 1910030 - DNA, 15 bp, Homo sapiens
cgctagtcttccctc

SEQ ID NO: 1910031 - DNA, 15 bp, Homo sapiens
gctagtcttccctcc

SEQ ID NO: 1910032 - DNA, 15 bp, Homo sapiens
ctagtcttccctcct

SEQ ID NO: 1910033 - DNA, 15 bp, Homo sapiens
tagtcttccctcctc

SEQ ID NO: 1910034 - DNA, 15 bp, Homo sapiens
agtcttccctcctct

SEQ ID NO: 1910035 - DNA, 15 bp, Homo sapiens
gtcttccctcctcta

SEQ ID NO: 1910036 - DNA, 15 bp, Homo sapiens
tcttccctcctctac

SEQ ID NO: 1910037 - DNA, 15 bp, Homo sapiens
cttccctcctctacc

SEQ ID NO: 1910038 - DNA, 15 bp, Homo sapiens
ttccctcctctaccc

SEQ ID NO: 1910039 - DNA, 15 bp, Homo sapiens
tccctcctctacccc

SEQ ID NO: 1910040 - DNA, 15 bp, Homo sapiens
ccctcctctacccct

SEQ ID NO: 1910041 - DNA, 15 bp, Homo sapiens
cctcctctacccctg

SEQ ID NO: 1910042 - DNA, 15 bp, Homo sapiens
ctcctctacccctgt

SEQ ID NO: 1910043 - DNA, 15 bp, Homo sapiens
tcctctacccctgtg

SEQ ID NO: 1910044 - DNA, 15 bp, Homo sapiens
cctctacccctgtgt

SEQ ID NO: 1910045 - DNA, 15 bp, Homo sapiens
ctctacccctgtgtg

SEQ ID NO: 1910046 - DNA, 15 bp, Homo sapiens
tctacccctgtgtgt

SEQ ID NO: 1910047 - DNA, 15 bp, Homo sapiens
ctacccctgtgtgtc

SEQ ID NO: 1910048 - DNA, 15 bp, Homo sapiens
tacccctgtgtgtcc

SEQ ID NO: 1910049 - DNA, 15 bp, Homo sapiens
acccctgtgtgtccc

SEQ ID NO: 1910050 - DNA, 15 bp, Homo sapiens
cccctgtgtgtcccc

SEQ ID NO: 1910051 - DNA, 15 bp, Homo sapiens
ccctgtgtgtccccc

SEQ ID NO: 1910052 - DNA, 15 bp, Homo sapiens
cctgtgtgtccccct

SEQ ID NO: 1910053 - DNA, 15 bp, Homo sapiens
ctgtgtgtccccctc

SEQ ID NO: 1910054 - DNA, 15 bp, Homo sapiens
tgtgtgtccccctct

SEQ ID NO: 1910055 - DNA, 15 bp, Homo sapiens
gtgtgtccccctctc

SEQ ID NO: 1910056 - DNA, 15 bp, Homo sapiens
tgtgtccccctctct

SEQ ID NO: 1910057 - DNA, 15 bp, Homo sapiens
gtgtccccctctcta

SEQ ID NO: 1910058 - DNA, 15 bp, Homo sapiens
tgtccccctctctag

SEQ ID NO: 1910059 - DNA, 15 bp, Homo sapiens
gtccccctctctagg

SEQ ID NO: 1910060 - DNA, 15 bp, Homo sapiens
tccccctctctaggt

SEQ ID NO: 1910061 - DNA, 15 bp, Homo sapiens
ccccctctctaggtc

SEQ ID NO: 1910062 - DNA, 15 bp, Homo sapiens
cccctctctaggtca

SEQ ID NO: 1910063 - DNA, 15 bp, Homo sapiens
ccctctctaggtcag

SEQ ID NO: 1910064 - DNA, 15 bp, Homo sapiens
cctctctaggtcagt

SEQ ID NO: 1910065 - DNA, 15 bp, Homo sapiens
ctctctaggtcagtg

SEQ ID NO: 1910066 - DNA, 15 bp, Homo sapiens
tctctaggtcagtgg

SEQ ID NO: 1910067 - DNA, 15 bp, Homo sapiens
ctctaggtcagtggg

SEQ ID NO: 1910068 - DNA, 15 bp, Homo sapiens
tctaggtcagtgggc

SEQ ID NO: 1910069 - DNA, 15 bp, Homo sapiens
ctaggtcagtgggcc

SEQ ID NO: 1910070 - DNA, 15 bp, Homo sapiens
taggtcagtgggcca

SEQ ID NO: 1910071 - DNA, 15 bp, Homo sapiens
aggtcagtgggccag

SEQ ID NO: 1910072 - DNA, 15 bp, Homo sapiens
ggtcagtgggccaga

SEQ ID NO: 1910073 - DNA, 15 bp, Homo sapiens
gtcagtgggccagac

SEQ ID NO: 1910074 - DNA, 15 bp, Homo sapiens
tcagtgggccagact

SEQ ID NO: 1910075 - DNA, 15 bp, Homo sapiens
cagtgggccagactt

SEQ ID NO: 1910076 - DNA, 15 bp, Homo sapiens
agtgggccagacttc

SEQ ID NO: 1910077 - DNA, 15 bp, Homo sapiens
gtgggccagacttcg

SEQ ID NO: 1910078 - DNA, 15 bp, Homo sapiens
tgggccagacttcgt

SEQ ID NO: 1910079 - DNA, 15 bp, Homo sapiens
gggccagacttcgtg

SEQ ID NO: 1910080 - DNA, 15 bp, Homo sapiens
ggccagacttcgtgt

SEQ ID NO: 1910081 - DNA, 15 bp, Homo sapiens
gccagacttcgtgtt

SEQ ID NO: 1910082 - DNA, 15 bp, Homo sapiens
ccagacttcgtgttt

SEQ ID NO: 1910083 - DNA, 15 bp, Homo sapiens
cagacttcgtgtttc

SEQ ID NO: 1910084 - DNA, 15 bp, Homo sapiens
agacttcgtgtttca

SEQ ID NO: 1910085 - DNA, 15 bp, Homo sapiens
gacttcgtgtttcac

SEQ ID NO: 1910086 - DNA, 15 bp, Homo sapiens
acttcgtgtttcact

SEQ ID NO: 1910087 - DNA, 15 bp, Homo sapiens
cttcgtgtttcactg

SEQ ID NO: 1910088 - DNA, 15 bp, Homo sapiens
ttcgtgtttcactga

SEQ ID NO: 1910089 - DNA, 15 bp, Homo sapiens
tcgtgtttcactgat

SEQ ID NO: 1910090 - DNA, 15 bp, Homo sapiens
cgtgtttcactgatt

SEQ ID NO: 1910091 - DNA, 15 bp, Homo sapiens
gtgtttcactgattc

SEQ ID NO: 1910092 - DNA, 15 bp, Homo sapiens
tgtttcactgattct

SEQ ID NO: 1910093 - DNA, 15 bp, Homo sapiens
gtttcactgattctt

SEQ ID NO: 1910094 - DNA, 15 bp, Homo sapiens
tttcactgattcttc

SEQ ID NO: 1910095 - DNA, 15 bp, Homo sapiens
ttcactgattcttct

SEQ ID NO: 1910096 - DNA, 15 bp, Homo sapiens
tcactgattcttctt

SEQ ID NO: 1910097 - DNA, 15 bp, Homo sapiens
cactgattcttcttt

SEQ ID NO: 1910098 - DNA, 15 bp, Homo sapiens
actgattcttctttt

SEQ ID NO: 1910099 - DNA, 15 bp, Homo sapiens
ctgattcttcttttc

SEQ ID NO: 1910100 - DNA, 15 bp, Homo sapiens
tgattcttcttttca

SEQ ID NO: 1910101 - DNA, 15 bp, Homo sapiens
gattcttcttttcag

SEQ ID NO: 1910102 - DNA, 15 bp, Homo sapiens
attcttcttttcagc

SEQ ID NO: 1910103 - DNA, 15 bp, Homo sapiens
ttcttcttttcagct

SEQ ID NO: 1910104 - DNA, 15 bp, Homo sapiens
tcttcttttcagctt

SEQ ID NO: 1910105 - DNA, 15 bp, Homo sapiens
cttcttttcagctta

SEQ ID NO: 1910106 - DNA, 15 bp, Homo sapiens
ttcttttcagcttag

SEQ ID NO: 1910107 - DNA, 15 bp, Homo sapiens
tcttttcagcttagc

SEQ ID NO: 1910108 - DNA, 15 bp, Homo sapiens
cttttcagcttagca

SEQ ID NO: 1910109 - DNA, 15 bp, Homo sapiens
ttttcagcttagcag

SEQ ID NO: 1910110 - DNA, 15 bp, Homo sapiens
tttcagcttagcaga

SEQ ID NO: 1910111 - DNA, 15 bp, Homo sapiens
ttcagcttagcagag

SEQ ID NO: 1910112 - DNA, 15 bp, Homo sapiens
tcagcttagcagagg

SEQ ID NO: 1910113 - DNA, 15 bp, Homo sapiens
cagcttagcagaggg

SEQ ID NO: 1910114 - DNA, 15 bp, Homo sapiens
agcttagcagagggt

SEQ ID NO: 1910115 - DNA, 15 bp, Homo sapiens
gcttagcagagggtc

SEQ ID NO: 1910116 - DNA, 15 bp, Homo sapiens
cttagcagagggtcc

SEQ ID NO: 1910117 - DNA, 15 bp, Homo sapiens
ttagcagagggtcct

SEQ ID NO: 1910118 - DNA, 15 bp, Homo sapiens
tagcagagggtccta

SEQ ID NO: 1910119 - DNA, 15 bp, Homo sapiens
agcagagggtcctac

SEQ ID NO: 1910120 - DNA, 15 bp, Homo sapiens
gcagagggtcctact

SEQ ID NO: 1910121 - DNA, 15 bp, Homo sapiens
cagagggtcctacta

SEQ ID NO: 1910122 - DNA, 15 bp, Homo sapiens
agagggtcctactat

SEQ ID NO: 1910123 - DNA, 15 bp, Homo sapiens
gagggtcctactatt

SEQ ID NO: 1910124 - DNA, 15 bp, Homo sapiens
agggtcctactattc

SEQ ID NO: 1910125 - DNA, 15 bp, Homo sapiens
gggtcctactattct

SEQ ID NO: 1910126 - DNA, 15 bp, Homo sapiens
ggtcctactattctt

SEQ ID NO: 1910127 - DNA, 15 bp, Homo sapiens
gtcctactattctta

SEQ ID NO: 1910128 - DNA, 15 bp, Homo sapiens
tcctactattcttac

SEQ ID NO: 1910129 - DNA, 15 bp, Homo sapiens
cctactattcttacc

SEQ ID NO: 1910130 - DNA, 15 bp, Homo sapiens
ctactattcttacca

SEQ ID NO: 1910131 - DNA, 15 bp, Homo sapiens
tactattcttaccat

SEQ ID NO: 1910132 - DNA, 15 bp, Homo sapiens
actattcttaccata

SEQ ID NO: 1910133 - DNA, 15 bp, Homo sapiens
ctattcttaccataa

SEQ ID NO: 1910134 - DNA, 15 bp, Homo sapiens
tattcttaccataac

SEQ ID NO: 1910135 - DNA, 15 bp, Homo sapiens
attcttaccataacc

SEQ ID NO: 1910136 - DNA, 15 bp, Homo sapiens
ttcttaccataacct

SEQ ID NO: 1910137 - DNA, 15 bp, Homo sapiens
tcttaccataacctt

SEQ ID NO: 1910138 - DNA, 15 bp, Homo sapiens
cttaccataaccttt

SEQ ID NO: 1910139 - DNA, 15 bp, Homo sapiens
ttaccataaccttta

SEQ ID NO: 1910140 - DNA, 15 bp, Homo sapiens
taccataacctttat

SEQ ID NO: 1910141 - DNA, 15 bp, Homo sapiens
accataacctttatc

SEQ ID NO: 1910142 - DNA, 15 bp, Homo sapiens
ccataacctttatca

SEQ ID NO: 1910143 - DNA, 15 bp, Homo sapiens
cataacctttatcaa

SEQ ID NO: 1910144 - DNA, 15 bp, Homo sapiens
ataacctttatcaat

SEQ ID NO: 1910145 - DNA, 15 bp, Homo sapiens
taacctttatcaatg

SEQ ID NO: 1910146 - DNA, 15 bp, Homo sapiens
acctttatcaatgag

SEQ ID NO: 1910147 - DNA, 15 bp, Homo sapiens
cctttatcaatgagt

SEQ ID NO: 1910148 - DNA, 15 bp, Homo sapiens
ctttatcaatgagtc

SEQ ID NO: 1910149 - DNA, 15 bp, Homo sapiens
tttatcaatgagtca

SEQ ID NO: 1910150 - DNA, 15 bp, Homo sapiens
ttatcaatgagtcaa

SEQ ID NO: 1910151 - DNA, 15 bp, Homo sapiens
tatcaatgagtcaag

SEQ ID NO: 1910152 - DNA, 15 bp, Homo sapiens
atcaatgagtcaaga

SEQ ID NO: 1910153 - DNA, 15 bp, Homo sapiens
tcaatgagtcaagaa

SEQ ID NO: 1910154 - DNA, 15 bp, Homo sapiens
caatgagtcaagaaa

SEQ ID NO: 1910155 - DNA, 15 bp, Homo sapiens
aatgagtcaagaaac

SEQ ID NO: 1910156 - DNA, 15 bp, Homo sapiens
atgagtcaagaaaca

SEQ ID NO: 1910157 - DNA, 15 bp, Homo sapiens
tgagtcaagaaacaa

SEQ ID NO: 1910158 - DNA, 15 bp, Homo sapiens
gagtcaagaaacaaa

SEQ ID NO: 1910159 - DNA, 15 bp, Homo sapiens
agtcaagaaacaaat

SEQ ID NO: 1910160 - DNA, 15 bp, Homo sapiens
gtcaagaaacaaatt

SEQ ID NO: 1910161 - DNA, 15 bp, Homo sapiens
tcaagaaacaaattt

SEQ ID NO: 1910162 - DNA, 15 bp, Homo sapiens
aagaaacaaattttg

SEQ ID NO: 1910163 - DNA, 15 bp, Homo sapiens
agaaacaaattttgg

SEQ ID NO: 1910164 - DNA, 15 bp, Homo sapiens
gaaacaaattttggt

SEQ ID NO: 1910165 - DNA, 15 bp, Homo sapiens
aaacaaattttggtt

SEQ ID NO: 1910166 - DNA, 15 bp, Homo sapiens
aacaaattttggtta

SEQ ID NO: 1910167 - DNA, 15 bp, Homo sapiens
acaaattttggttaa

SEQ ID NO: 1910168 - DNA, 15 bp, Homo sapiens
caaattttggttaat

SEQ ID NO: 1910169 - DNA, 15 bp, Homo sapiens
aaattttggttaatt

SEQ ID NO: 1910170 - DNA, 15 bp, Homo sapiens
aattttggttaattg

SEQ ID NO: 1910171 - DNA, 15 bp, Homo sapiens
attttggttaattga

SEQ ID NO: 1910172 - DNA, 15 bp, Homo sapiens
ttttggttaattgat

SEQ ID NO: 1910173 - DNA, 15 bp, Homo sapiens
tttggttaattgata

SEQ ID NO: 1910174 - DNA, 15 bp, Homo sapiens
ttggttaattgataa

SEQ ID NO: 1910175 - DNA, 15 bp, Homo sapiens
tggttaattgataaa

SEQ ID NO: 1910176 - DNA, 15 bp, Homo sapiens
ggttaattgataaag

SEQ ID NO: 1910177 - DNA, 15 bp, Homo sapiens
gttaattgataaagt

SEQ ID NO: 1910178 - DNA, 15 bp, Homo sapiens
ttaattgataaagtt

SEQ ID NO: 1910179 - DNA, 15 bp, Homo sapiens
taattgataaagttg

SEQ ID NO: 1910180 - DNA, 15 bp, Homo sapiens
aattgataaagttga

SEQ ID NO: 1910181 - DNA, 15 bp, Homo sapiens
attgataaagttgat

SEQ ID NO: 1910182 - DNA, 15 bp, Homo sapiens
ttgataaagttgata

SEQ ID NO: 1910183 - DNA, 15 bp, Homo sapiens
tgataaagttgataa

SEQ ID NO: 1910184 - DNA, 15 bp, Homo sapiens
gataaagttgataaa

SEQ ID NO: 1910185 - DNA, 15 bp, Homo sapiens
ataaagttgataaat

SEQ ID NO: 1910186 - DNA, 15 bp, Homo sapiens
taaagttgataaatc

SEQ ID NO: 1910187 - DNA, 15 bp, Homo sapiens
aaagttgataaatcc

SEQ ID NO: 1910188 - DNA, 15 bp, Homo sapiens
aagttgataaatcca

SEQ ID NO: 1910189 - DNA, 15 bp, Homo sapiens
agttgataaatccat

SEQ ID NO: 1910190 - DNA, 15 bp, Homo sapiens
gttgataaatccatc

SEQ ID NO: 1910191 - DNA, 15 bp, Homo sapiens
ttgataaatccatca

SEQ ID NO: 1910192 - DNA, 15 bp, Homo sapiens
tgataaatccatcaa

SEQ ID NO: 1910193 - DNA, 15 bp, Homo sapiens
gataaatccatcaaa

SEQ ID NO: 1910194 - DNA, 15 bp, Homo sapiens
ataaatccatcaaag

SEQ ID NO: 1910195 - DNA, 15 bp, Homo sapiens
taaatccatcaaagt

SEQ ID NO: 1910196 - DNA, 15 bp, Homo sapiens
aaatccatcaaagtg

SEQ ID NO: 1910197 - DNA, 15 bp, Homo sapiens
aatccatcaaagtgg

SEQ ID NO: 1910198 - DNA, 15 bp, Homo sapiens
atccatcaaagtggt

SEQ ID NO: 1910199 - DNA, 15 bp, Homo sapiens
tccatcaaagtggtc

SEQ ID NO: 1910200 - DNA, 15 bp, Homo sapiens
ccatcaaagtggtca

SEQ ID NO: 1910201 - DNA, 15 bp, Homo sapiens
catcaaagtggtcat

SEQ ID NO: 1910202 - DNA, 15 bp, Homo sapiens
atcaaagtggtcata

SEQ ID NO: 1910203 - DNA, 15 bp, Homo sapiens
tcaaagtggtcataa

SEQ ID NO: 1910204 - DNA, 15 bp, Homo sapiens
caaagtggtcataat

SEQ ID NO: 1910205 - DNA, 15 bp, Homo sapiens
aaagtggtcataatg

SEQ ID NO: 1910206 - DNA, 15 bp, Homo sapiens
aagtggtcataatgt

SEQ ID NO: 1910207 - DNA, 15 bp, Homo sapiens
agtggtcataatgtg

SEQ ID NO: 1910208 - DNA, 15 bp, Homo sapiens
gtggtcataatgtga

SEQ ID NO: 1910209 - DNA, 15 bp, Homo sapiens
tggtcataatgtgaa

SEQ ID NO: 1910210 - DNA, 15 bp, Homo sapiens
ggtcataatgtgaaa

SEQ ID NO: 1910211 - DNA, 15 bp, Homo sapiens
gtcataatgtgaaat

SEQ ID NO: 1910212 - DNA, 15 bp, Homo sapiens
tcataatgtgaaatt

SEQ ID NO: 1910213 - DNA, 15 bp, Homo sapiens
cataatgtgaaattt

SEQ ID NO: 1910214 - DNA, 15 bp, Homo sapiens
ataatgtgaaatttg

SEQ ID NO: 1910215 - DNA, 15 bp, Homo sapiens
taatgtgaaatttgc

SEQ ID NO: 1910216 - DNA, 15 bp, Homo sapiens
aatgtgaaatttgcc

SEQ ID NO: 1910217 - DNA, 15 bp, Homo sapiens
atgtgaaatttgcca

SEQ ID NO: 1910218 - DNA, 15 bp, Homo sapiens
tgtgaaatttgccac

SEQ ID NO: 1910219 - DNA, 15 bp, Homo sapiens
gtgaaatttgccaca

SEQ ID NO: 1910220 - DNA, 15 bp, Homo sapiens
tgaaatttgccacaa

SEQ ID NO: 1910221 - DNA, 15 bp, Homo sapiens
gaaatttgccacaag

SEQ ID NO: 1910222 - DNA, 15 bp, Homo sapiens
aaatttgccacaaga

SEQ ID NO: 1910223 - DNA, 15 bp, Homo sapiens
aatttgccacaagaa

SEQ ID NO: 1910224 - DNA, 15 bp, Homo sapiens
atttgccacaagaat

SEQ ID NO: 1910225 - DNA, 15 bp, Homo sapiens
tttgccacaagaatt

SEQ ID NO: 1910226 - DNA, 15 bp, Homo sapiens
ttgccacaagaattt

SEQ ID NO: 1910227 - DNA, 15 bp, Homo sapiens
tgccacaagaatttc

SEQ ID NO: 1910228 - DNA, 15 bp, Homo sapiens
gccacaagaatttca

SEQ ID NO: 1910229 - DNA, 15 bp, Homo sapiens
ccacaagaatttcaa

SEQ ID NO: 1910230 - DNA, 15 bp, Homo sapiens
cacaagaatttcaat

SEQ ID NO: 1910231 - DNA, 15 bp, Homo sapiens
acaagaatttcaata

SEQ ID NO: 1910232 - DNA, 15 bp, Homo sapiens
caagaatttcaataa

SEQ ID NO: 1910233 - DNA, 15 bp, Homo sapiens
aagaatttcaataat

SEQ ID NO: 1910234 - DNA, 15 bp, Homo sapiens
agaatttcaataatt

SEQ ID NO: 1910235 - DNA, 15 bp, Homo sapiens
gaatttcaataattc

SEQ ID NO: 1910236 - DNA, 15 bp, Homo sapiens
aatttcaataattct

SEQ ID NO: 1910237 - DNA, 15 bp, Homo sapiens
atttcaataattcta

SEQ ID NO: 1910238 - DNA, 15 bp, Homo sapiens
tttcaataattctaa

SEQ ID NO: 1910239 - DNA, 15 bp, Homo sapiens
ttcaataattctaaa

SEQ ID NO: 1910240 - DNA, 15 bp, Homo sapiens
tcaataattctaaaa

SEQ ID NO: 1910241 - DNA, 15 bp, Homo sapiens
caataattctaaaat

SEQ ID NO: 1910242 - DNA, 15 bp, Homo sapiens
aataattctaaaata

SEQ ID NO: 1910243 - DNA, 15 bp, Homo sapiens
ataattctaaaatat

SEQ ID NO: 1910244 - DNA, 15 bp, Homo sapiens
taattctaaaatatt

SEQ ID NO: 1910245 - DNA, 15 bp, Homo sapiens
aattctaaaatatta

SEQ ID NO: 1910246 - DNA, 15 bp, Homo sapiens
attctaaaatattag

SEQ ID NO: 1910247 - DNA, 15 bp, Homo sapiens
ttctaaaatattagc

SEQ ID NO: 1910248 - DNA, 15 bp, Homo sapiens
tctaaaatattagca

SEQ ID NO: 1910249 - DNA, 15 bp, Homo sapiens
ctaaaatattagcaa

SEQ ID NO: 1910250 - DNA, 15 bp, Homo sapiens
taaaatattagcaaa

SEQ ID NO: 1910251 - DNA, 15 bp, Homo sapiens
aaaatattagcaaaa

SEQ ID NO: 1910252 - DNA, 15 bp, Homo sapiens
aaatattagcaaaac

SEQ ID NO: 1910253 - DNA, 15 bp, Homo sapiens
aatattagcaaaaca

SEQ ID NO: 1910254 - DNA, 15 bp, Homo sapiens
atattagcaaaacag

SEQ ID NO: 1910255 - DNA, 15 bp, Homo sapiens
tattagcaaaacagc

SEQ ID NO: 1910256 - DNA, 15 bp, Homo sapiens
attagcaaaacagcc

SEQ ID NO: 1910257 - DNA, 15 bp, Homo sapiens
ttagcaaaacagcca

SEQ ID NO: 1910258 - DNA, 15 bp, Homo sapiens
tagcaaaacagccag

SEQ ID NO: 1910259 - DNA, 15 bp, Homo sapiens
agcaaaacagccagt

SEQ ID NO: 1910260 - DNA, 15 bp, Homo sapiens
gcaaaacagccagtg

SEQ ID NO: 1910261 - DNA, 15 bp, Homo sapiens
caaaacagccagtga

SEQ ID NO: 1910262 - DNA, 15 bp, Homo sapiens
aaaacagccagtgac

SEQ ID NO: 1910263 - DNA, 15 bp, Homo sapiens
aaacagccagtgact

SEQ ID NO: 1910264 - DNA, 15 bp, Homo sapiens
aacagccagtgactc

SEQ ID NO: 1910265 - DNA, 15 bp, Homo sapiens
acagccagtgactct

SEQ ID NO: 1910266 - DNA, 15 bp, Homo sapiens
cagccagtgactcta

SEQ ID NO: 1910267 - DNA, 15 bp, Homo sapiens
agccagtgactctaa

SEQ ID NO: 1910268 - DNA, 15 bp, Homo sapiens
gccagtgactctaaa

SEQ ID NO: 1910269 - DNA, 15 bp, Homo sapiens
ccagtgactctaaaa

SEQ ID NO: 1910270 - DNA, 15 bp, Homo sapiens
cagtgactctaaaaa

SEQ ID NO: 1910271 - DNA, 15 bp, Homo sapiens
agtgactctaaaaag

SEQ ID NO: 1910272 - DNA, 15 bp, Homo sapiens
gtgactctaaaaaga

SEQ ID NO: 1910273 - DNA, 15 bp, Homo sapiens
tgactctaaaaagaa

SEQ ID NO: 1910274 - DNA, 15 bp, Homo sapiens
gactctaaaaagaat

SEQ ID NO: 1910275 - DNA, 15 bp, Homo sapiens
actctaaaaagaatc

SEQ ID NO: 1910276 - DNA, 15 bp, Homo sapiens
ctctaaaaagaatct

SEQ ID NO: 1910277 - DNA, 15 bp, Homo sapiens
tctaaaaagaatctg

SEQ ID NO: 1910278 - DNA, 15 bp, Homo sapiens
ctaaaaagaatctga

SEQ ID NO: 1910279 - DNA, 15 bp, Homo sapiens
taaaaagaatctgaa

SEQ ID NO: 1910280 - DNA, 15 bp, Homo sapiens
aaaaagaatctgaaa

SEQ ID NO: 1910281 - DNA, 15 bp, Homo sapiens
aaaagaatctgaaaa

SEQ ID NO: 1910282 - DNA, 15 bp, Homo sapiens
aaagaatctgaaaac

SEQ ID NO: 1910283 - DNA, 15 bp, Homo sapiens
aagaatctgaaaact

SEQ ID NO: 1910284 - DNA, 15 bp, Homo sapiens
agaatctgaaaacta

SEQ ID NO: 1910285 - DNA, 15 bp, Homo sapiens
gaatctgaaaactag

SEQ ID NO: 1910286 - DNA, 15 bp, Homo sapiens
aatctgaaaactagt

SEQ ID NO: 1910287 - DNA, 15 bp, Homo sapiens
atctgaaaactagta

SEQ ID NO: 1910288 - DNA, 15 bp, Homo sapiens
tctgaaaactagtaa

SEQ ID NO: 1910289 - DNA, 15 bp, Homo sapiens
ctgaaaactagtaaa

SEQ ID NO: 1910290 - DNA, 15 bp, Homo sapiens
tgaaaactagtaaaa

SEQ ID NO: 1910291 - DNA, 15 bp, Homo sapiens
gaaaactagtaaaaa

SEQ ID NO: 1910292 - DNA, 15 bp, Homo sapiens
aaaactagtaaaaat

SEQ ID NO: 1910293 - DNA, 15 bp, Homo sapiens
aaactagtaaaaatt

SEQ ID NO: 1910294 - DNA, 15 bp, Homo sapiens
aactagtaaaaattg

SEQ ID NO: 1910295 - DNA, 15 bp, Homo sapiens
actagtaaaaattga

SEQ ID NO: 1910296 - DNA, 15 bp, Homo sapiens
ctagtaaaaattgaa

SEQ ID NO: 1910297 - DNA, 15 bp, Homo sapiens
tagtaaaaattgaaa

SEQ ID NO: 1910298 - DNA, 15 bp, Homo sapiens
agtaaaaattgaaag

SEQ ID NO: 1910299 - DNA, 15 bp, Homo sapiens
gtaaaaattgaaagg

SEQ ID NO: 1910300 - DNA, 15 bp, Homo sapiens
taaaaattgaaaggt

SEQ ID NO: 1910301 - DNA, 15 bp, Homo sapiens
aaaaattgaaaggtt

SEQ ID NO: 1910302 - DNA, 15 bp, Homo sapiens
aaaattgaaaggttc

SEQ ID NO: 1910303 - DNA, 15 bp, Homo sapiens
aaattgaaaggttcc

SEQ ID NO: 1910304 - DNA, 15 bp, Homo sapiens
aattgaaaggttccc

SEQ ID NO: 1910305 - DNA, 15 bp, Homo sapiens
attgaaaggttccca

SEQ ID NO: 1910306 - DNA, 15 bp, Homo sapiens
ttgaaaggttcccac

SEQ ID NO: 1910307 - DNA, 15 bp, Homo sapiens
tgaaaggttcccaca

SEQ ID NO: 1910308 - DNA, 15 bp, Homo sapiens
gaaaggttcccacat

SEQ ID NO: 1910309 - DNA, 15 bp, Homo sapiens
aaaggttcccacatg

SEQ ID NO: 1910310 - DNA, 15 bp, Homo sapiens
aaggttcccacatga

SEQ ID NO: 1910311 - DNA, 15 bp, Homo sapiens
aggttcccacatgaa

SEQ ID NO: 1910312 - DNA, 15 bp, Homo sapiens
ggttcccacatgaaa

SEQ ID NO: 1910313 - DNA, 15 bp, Homo sapiens
gttcccacatgaaat

SEQ ID NO: 1910314 - DNA, 15 bp, Homo sapiens
ttcccacatgaaatg

SEQ ID NO: 1910315 - DNA, 15 bp, Homo sapiens
tcccacatgaaatgc

SEQ ID NO: 1910316 - DNA, 15 bp, Homo sapiens
cccacatgaaatgct

SEQ ID NO: 1910317 - DNA, 15 bp, Homo sapiens
ccacatgaaatgcta

SEQ ID NO: 1910318 - DNA, 15 bp, Homo sapiens
cacatgaaatgctaa

SEQ ID NO: 1910319 - DNA, 15 bp, Homo sapiens
acatgaaatgctaaa

SEQ ID NO: 1910320 - DNA, 15 bp, Homo sapiens
catgaaatgctaaat

SEQ ID NO: 1910321 - DNA, 15 bp, Homo sapiens
atgaaatgctaaatt

SEQ ID NO: 1910322 - DNA, 15 bp, Homo sapiens
tgaaatgctaaattt

SEQ ID NO: 1910323 - DNA, 15 bp, Homo sapiens
gaaatgctaaatttt

SEQ ID NO: 1910324 - DNA, 15 bp, Homo sapiens
aaatgctaaattttt

SEQ ID NO: 1910325 - DNA, 15 bp, Homo sapiens
aatgctaaatttttg

SEQ ID NO: 1910326 - DNA, 15 bp, Homo sapiens
atgctaaatttttgt

SEQ ID NO: 1910327 - DNA, 15 bp, Homo sapiens
tgctaaatttttgtc

SEQ ID NO: 1910328 - DNA, 15 bp, Homo sapiens
gctaaatttttgtca

SEQ ID NO: 1910329 - DNA, 15 bp, Homo sapiens
ctaaatttttgtcat

SEQ ID NO: 1910330 - DNA, 15 bp, Homo sapiens
taaatttttgtcata

SEQ ID NO: 1910331 - DNA, 15 bp, Homo sapiens
aaatttttgtcatat

SEQ ID NO: 1910332 - DNA, 15 bp, Homo sapiens
aatttttgtcatatt

SEQ ID NO: 1910333 - DNA, 15 bp, Homo sapiens
atttttgtcatattt

SEQ ID NO: 1910334 - DNA, 15 bp, Homo sapiens
tttttgtcatatttg

SEQ ID NO: 1910335 - DNA, 15 bp, Homo sapiens
ttttgtcatatttgt

SEQ ID NO: 1910336 - DNA, 15 bp, Homo sapiens
tttgtcatatttgtt

SEQ ID NO: 1910337 - DNA, 15 bp, Homo sapiens
ttgtcatatttgtta

SEQ ID NO: 1910338 - DNA, 15 bp, Homo sapiens
tgtcatatttgttag

SEQ ID NO: 1910339 - DNA, 15 bp, Homo sapiens
gtcatatttgttaga

SEQ ID NO: 1910340 - DNA, 15 bp, Homo sapiens
tcatatttgttagaa

SEQ ID NO: 1910341 - DNA, 15 bp, Homo sapiens
catatttgttagaag

SEQ ID NO: 1910342 - DNA, 15 bp, Homo sapiens
atatttgttagaagg

SEQ ID NO: 1910343 - DNA, 15 bp, Homo sapiens
tatttgttagaagga

SEQ ID NO: 1910344 - DNA, 15 bp, Homo sapiens
atttgttagaaggat

SEQ ID NO: 1910345 - DNA, 15 bp, Homo sapiens
tttgttagaaggata

SEQ ID NO: 1910346 - DNA, 15 bp, Homo sapiens
ttgttagaaggatat

SEQ ID NO: 1910347 - DNA, 15 bp, Homo sapiens
tgttagaaggatata

SEQ ID NO: 1910348 - DNA, 15 bp, Homo sapiens
gttagaaggatatat

SEQ ID NO: 1910349 - DNA, 15 bp, Homo sapiens
ttagaaggatatatt

SEQ ID NO: 1910350 - DNA, 15 bp, Homo sapiens
tagaaggatatattc

SEQ ID NO: 1910351 - DNA, 15 bp, Homo sapiens
agaaggatatattca

SEQ ID NO: 1910352 - DNA, 15 bp, Homo sapiens
gaaggatatattcac

SEQ ID NO: 1910353 - DNA, 15 bp, Homo sapiens
aaggatatattcaca

SEQ ID NO: 1910354 - DNA, 15 bp, Homo sapiens
aggatatattcacaa

SEQ ID NO: 1910355 - DNA, 15 bp, Homo sapiens
ggatatattcacaaa

SEQ ID NO: 1910356 - DNA, 15 bp, Homo sapiens
gatatattcacaaac

SEQ ID NO: 1910357 - DNA, 15 bp, Homo sapiens
atatattcacaaacg

SEQ ID NO: 1910358 - DNA, 15 bp, Homo sapiens
tatattcacaaacgt

SEQ ID NO: 1910359 - DNA, 15 bp, Homo sapiens
atattcacaaacgta

SEQ ID NO: 1910360 - DNA, 15 bp, Homo sapiens
tattcacaaacgtat

SEQ ID NO: 1910361 - DNA, 15 bp, Homo sapiens
attcacaaacgtatt

SEQ ID NO: 1910362 - DNA, 15 bp, Homo sapiens
ttcacaaacgtattc

SEQ ID NO: 1910363 - DNA, 15 bp, Homo sapiens
tcacaaacgtattca

SEQ ID NO: 1910364 - DNA, 15 bp, Homo sapiens
cacaaacgtattcaa

SEQ ID NO: 1910365 - DNA, 15 bp, Homo sapiens
acaaacgtattcaag

SEQ ID NO: 1910366 - DNA, 15 bp, Homo sapiens
caaacgtattcaaga

SEQ ID NO: 1910367 - DNA, 15 bp, Homo sapiens
aaacgtattcaagaa

SEQ ID NO: 1910368 - DNA, 15 bp, Homo sapiens
aacgtattcaagaaa

SEQ ID NO: 1910369 - DNA, 15 bp, Homo sapiens
acgtattcaagaaag

SEQ ID NO: 1910370 - DNA, 15 bp, Homo sapiens
cgtattcaagaaagg

SEQ ID NO: 1910371 - DNA, 15 bp, Homo sapiens
gtattcaagaaaggc

SEQ ID NO: 1910372 - DNA, 15 bp, Homo sapiens
tattcaagaaaggca

SEQ ID NO: 1910373 - DNA, 15 bp, Homo sapiens
attcaagaaaggcat

SEQ ID NO: 1910374 - DNA, 15 bp, Homo sapiens
ttcaagaaaggcata

SEQ ID NO: 1910375 - DNA, 15 bp, Homo sapiens
tcaagaaaggcatat

SEQ ID NO: 1910376 - DNA, 15 bp, Homo sapiens
caagaaaggcatatt

SEQ ID NO: 1910377 - DNA, 15 bp, Homo sapiens
aagaaaggcatattt

SEQ ID NO: 1910378 - DNA, 15 bp, Homo sapiens
agaaaggcatattta

SEQ ID NO: 1910379 - DNA, 15 bp, Homo sapiens
gaaaggcatatttat

SEQ ID NO: 1910380 - DNA, 15 bp, Homo sapiens
aaaggcatatttata

SEQ ID NO: 1910381 - DNA, 15 bp, Homo sapiens
aaggcatatttataa

SEQ ID NO: 1910382 - DNA, 15 bp, Homo sapiens
aggcatatttataaa

SEQ ID NO: 1910383 - DNA, 15 bp, Homo sapiens
ggcatatttataaat

SEQ ID NO: 1910384 - DNA, 15 bp, Homo sapiens
catatttataaatat

SEQ ID NO: 1910385 - DNA, 15 bp, Homo sapiens
atatttataaatata

SEQ ID NO: 1910386 - DNA, 15 bp, Homo sapiens
tatttataaatatat

SEQ ID NO: 1910387 - DNA, 15 bp, Homo sapiens
atttataaatatatt

SEQ ID NO: 1910388 - DNA, 15 bp, Homo sapiens
tttataaatatattc

SEQ ID NO: 1910389 - DNA, 15 bp, Homo sapiens
ttataaatatattca

SEQ ID NO: 1910390 - DNA, 15 bp, Homo sapiens
tataaatatattcat

SEQ ID NO: 1910391 - DNA, 15 bp, Homo sapiens
ataaatatattcata

SEQ ID NO: 1910392 - DNA, 15 bp, Homo sapiens
taaatatattcataa

SEQ ID NO: 1910393 - DNA, 15 bp, Homo sapiens
aaatatattcataag

SEQ ID NO: 1910394 - DNA, 15 bp, Homo sapiens
aatatattcataaga

SEQ ID NO: 1910395 - DNA, 15 bp, Homo sapiens
atatattcataagaa

SEQ ID NO: 1910396 - DNA, 15 bp, Homo sapiens
tatattcataagaat

SEQ ID NO: 1910397 - DNA, 15 bp, Homo sapiens
atattcataagaata

SEQ ID NO: 1910398 - DNA, 15 bp, Homo sapiens
tattcataagaatat

SEQ ID NO: 1910399 - DNA, 15 bp, Homo sapiens
attcataagaatata

SEQ ID NO: 1910400 - DNA, 15 bp, Homo sapiens
ttcataagaatatat

SEQ ID NO: 1910401 - DNA, 15 bp, Homo sapiens
tcataagaatatatt

SEQ ID NO: 1910402 - DNA, 15 bp, Homo sapiens
cataagaatatattt

SEQ ID NO: 1910403 - DNA, 15 bp, Homo sapiens
ataagaatatattta

SEQ ID NO: 1910404 - DNA, 15 bp, Homo sapiens
taagaatatatttac

SEQ ID NO: 1910405 - DNA, 15 bp, Homo sapiens
aagaatatatttaca

SEQ ID NO: 1910406 - DNA, 15 bp, Homo sapiens
agaatatatttacaa

SEQ ID NO: 1910407 - DNA, 15 bp, Homo sapiens
gaatatatttacaaa

SEQ ID NO: 1910408 - DNA, 15 bp, Homo sapiens
aatatatttacaaag

SEQ ID NO: 1910409 - DNA, 15 bp, Homo sapiens
atatatttacaaaga

SEQ ID NO: 1910410 - DNA, 15 bp, Homo sapiens
tatatttacaaagag

SEQ ID NO: 1910411 - DNA, 15 bp, Homo sapiens
atatttacaaagaga

SEQ ID NO: 1910412 - DNA, 15 bp, Homo sapiens
tatttacaaagagac

SEQ ID NO: 1910413 - DNA, 15 bp, Homo sapiens
tttacaaagagacta

SEQ ID NO: 1910414 - DNA, 15 bp, Homo sapiens
ttacaaagagactaa

SEQ ID NO: 1910415 - DNA, 15 bp, Homo sapiens
acaaagagactaagc

SEQ ID NO: 1910416 - DNA, 15 bp, Homo sapiens
caaagagactaagcc

SEQ ID NO: 1910417 - DNA, 15 bp, Homo sapiens
aaagagactaagcct

SEQ ID NO: 1910418 - DNA, 15 bp, Homo sapiens
aagagactaagcctc

SEQ ID NO: 1910419 - DNA, 15 bp, Homo sapiens
agagactaagcctcc

SEQ ID NO: 1910420 - DNA, 15 bp, Homo sapiens
gagactaagcctcct

SEQ ID NO: 1910421 - DNA, 15 bp, Homo sapiens
agactaagcctcctt

SEQ ID NO: 1910422 - DNA, 15 bp, Homo sapiens
gactaagcctcctta

SEQ ID NO: 1910423 - DNA, 15 bp, Homo sapiens
ctaagcctccttaga

SEQ ID NO: 1910424 - DNA, 15 bp, Homo sapiens
taagcctccttagaa

SEQ ID NO: 1910425 - DNA, 15 bp, Homo sapiens
aagcctccttagaaa

SEQ ID NO: 1910426 - DNA, 15 bp, Homo sapiens
agcctccttagaaaa

SEQ ID NO: 1910427 - DNA, 15 bp, Homo sapiens
gcctccttagaaaac

SEQ ID NO: 1910428 - DNA, 15 bp, Homo sapiens
cctccttagaaaact

SEQ ID NO: 1910429 - DNA, 15 bp, Homo sapiens
ctccttagaaaactt

SEQ ID NO: 1910430 - DNA, 15 bp, Homo sapiens
tccttagaaaactta

SEQ ID NO: 1910431 - DNA, 15 bp, Homo sapiens
ccttagaaaacttag

SEQ ID NO: 1910432 - DNA, 15 bp, Homo sapiens
cttagaaaacttagc

SEQ ID NO: 1910433 - DNA, 15 bp, Homo sapiens
ttagaaaacttagct

SEQ ID NO: 1910434 - DNA, 15 bp, Homo sapiens
tagaaaacttagctt

SEQ ID NO: 1910435 - DNA, 15 bp, Homo sapiens
agaaaacttagcttt

SEQ ID NO: 1910436 - DNA, 15 bp, Homo sapiens
gaaaacttagctttt

SEQ ID NO: 1910437 - DNA, 15 bp, Homo sapiens
aaaacttagctttta

SEQ ID NO: 1910438 - DNA, 15 bp, Homo sapiens
aaacttagcttttaa

SEQ ID NO: 1910439 - DNA, 15 bp, Homo sapiens
aacttagcttttaaa

SEQ ID NO: 1910440 - DNA, 15 bp, Homo sapiens
acttagcttttaaaa

SEQ ID NO: 1910441 - DNA, 15 bp, Homo sapiens
cttagcttttaaaaa

SEQ ID NO: 1910442 - DNA, 15 bp, Homo sapiens
ttagcttttaaaaat

SEQ ID NO: 1910443 - DNA, 15 bp, Homo sapiens
tagcttttaaaaata

SEQ ID NO: 1910444 - DNA, 15 bp, Homo sapiens
agcttttaaaaatat

SEQ ID NO: 1910445 - DNA, 15 bp, Homo sapiens
gcttttaaaaatatc

SEQ ID NO: 1910446 - DNA, 15 bp, Homo sapiens
cttttaaaaatatca

SEQ ID NO: 1910447 - DNA, 15 bp, Homo sapiens
ttttaaaaatatcaa

SEQ ID NO: 1910448 - DNA, 15 bp, Homo sapiens
tttaaaaatatcaaa

SEQ ID NO: 1910449 - DNA, 15 bp, Homo sapiens
ttaaaaatatcaaac

SEQ ID NO: 1910450 - DNA, 15 bp, Homo sapiens
taaaaatatcaaact

SEQ ID NO: 1910451 - DNA, 15 bp, Homo sapiens
aaaaatatcaaactg

SEQ ID NO: 1910452 - DNA, 15 bp, Homo sapiens
aaaatatcaaactga

SEQ ID NO: 1910453 - DNA, 15 bp, Homo sapiens
aaatatcaaactgat

SEQ ID NO: 1910454 - DNA, 15 bp, Homo sapiens
aatatcaaactgatc

SEQ ID NO: 1910455 - DNA, 15 bp, Homo sapiens
atatcaaactgatcc

SEQ ID NO: 1910456 - DNA, 15 bp, Homo sapiens
tatcaaactgatcct

SEQ ID NO: 1910457 - DNA, 15 bp, Homo sapiens
atcaaactgatccta

SEQ ID NO: 1910458 - DNA, 15 bp, Homo sapiens
aaactgatcctaaaa

SEQ ID NO: 1910459 - DNA, 15 bp, Homo sapiens
aactgatcctaaaat

SEQ ID NO: 1910460 - DNA, 15 bp, Homo sapiens
actgatcctaaaata

SEQ ID NO: 1910461 - DNA, 15 bp, Homo sapiens
ctgatcctaaaatac

SEQ ID NO: 1910462 - DNA, 15 bp, Homo sapiens
tgatcctaaaatacc

SEQ ID NO: 1910463 - DNA, 15 bp, Homo sapiens
gatcctaaaatacca

SEQ ID NO: 1910464 - DNA, 15 bp, Homo sapiens
atcctaaaataccac

SEQ ID NO: 1910465 - DNA, 15 bp, Homo sapiens
tcctaaaataccact

SEQ ID NO: 1910466 - DNA, 15 bp, Homo sapiens
cctaaaataccacta

SEQ ID NO: 1910467 - DNA, 15 bp, Homo sapiens
ctaaaataccactaa

SEQ ID NO: 1910468 - DNA, 15 bp, Homo sapiens
taaaataccactaag

SEQ ID NO: 1910469 - DNA, 15 bp, Homo sapiens
aaaataccactaaga

SEQ ID NO: 1910470 - DNA, 15 bp, Homo sapiens
aaataccactaagat

SEQ ID NO: 1910471 - DNA, 15 bp, Homo sapiens
aataccactaagatg

SEQ ID NO: 1910472 - DNA, 15 bp, Homo sapiens
ataccactaagatga

SEQ ID NO: 1910473 - DNA, 15 bp, Homo sapiens
taccactaagatgaa

SEQ ID NO: 1910474 - DNA, 15 bp, Homo sapiens
accactaagatgaat

SEQ ID NO: 1910475 - DNA, 15 bp, Homo sapiens
ccactaagatgaatg

SEQ ID NO: 1910476 - DNA, 15 bp, Homo sapiens
cactaagatgaatgt

SEQ ID NO: 1910477 - DNA, 15 bp, Homo sapiens
actaagatgaatgta

SEQ ID NO: 1910478 - DNA, 15 bp, Homo sapiens
ctaagatgaatgtat

SEQ ID NO: 1910479 - DNA, 15 bp, Homo sapiens
taagatgaatgtatc

SEQ ID NO: 1910480 - DNA, 15 bp, Homo sapiens
aagatgaatgtatcc

SEQ ID NO: 1910481 - DNA, 15 bp, Homo sapiens
agatgaatgtatccg

SEQ ID NO: 1910482 - DNA, 15 bp, Homo sapiens
gatgaatgtatccgt

SEQ ID NO: 1910483 - DNA, 15 bp, Homo sapiens
atgaatgtatccgta

SEQ ID NO: 1910484 - DNA, 15 bp, Homo sapiens
tgaatgtatccgtaa

SEQ ID NO: 1910485 - DNA, 15 bp, Homo sapiens
gaatgtatccgtaag

SEQ ID NO: 1910486 - DNA, 15 bp, Homo sapiens
aatgtatccgtaaga

SEQ ID NO: 1910487 - DNA, 15 bp, Homo sapiens
atgtatccgtaagaa

SEQ ID NO: 1910488 - DNA, 15 bp, Homo sapiens
tgtatccgtaagaaa

SEQ ID NO: 1910489 - DNA, 15 bp, Homo sapiens
gtatccgtaagaaaa

SEQ ID NO: 1910490 - DNA, 15 bp, Homo sapiens
tatccgtaagaaaaa

SEQ ID NO: 1910491 - DNA, 15 bp, Homo sapiens
atccgtaagaaaaat

SEQ ID NO: 1910492 - DNA, 15 bp, Homo sapiens
tccgtaagaaaaata

SEQ ID NO: 1910493 - DNA, 15 bp, Homo sapiens
ccgtaagaaaaatac

SEQ ID NO: 1910494 - DNA, 15 bp, Homo sapiens
cgtaagaaaaataca

SEQ ID NO: 1910495 - DNA, 15 bp, Homo sapiens
gtaagaaaaatacac

SEQ ID NO: 1910496 - DNA, 15 bp, Homo sapiens
taagaaaaatacact

SEQ ID NO: 1910497 - DNA, 15 bp, Homo sapiens
aagaaaaatacactt

SEQ ID NO: 1910498 - DNA, 15 bp, Homo sapiens
agaaaaatacacttt

SEQ ID NO: 1910499 - DNA, 15 bp, Homo sapiens
gaaaaatacacttta

SEQ ID NO: 1910500 - DNA, 15 bp, Homo sapiens
aaaaatacactttat

SEQ ID NO: 1910501 - DNA, 15 bp, Homo sapiens
aaaatacactttatg

SEQ ID NO: 1910502 - DNA, 15 bp, Homo sapiens
aaatacactttatga

SEQ ID NO: 1910503 - DNA, 15 bp, Homo sapiens
aatacactttatgat

SEQ ID NO: 1910504 - DNA, 15 bp, Homo sapiens
atacactttatgatt

SEQ ID NO: 1910505 - DNA, 15 bp, Homo sapiens
tacactttatgattg

SEQ ID NO: 1910506 - DNA, 15 bp, Homo sapiens
acactttatgattga

SEQ ID NO: 1910507 - DNA, 15 bp, Homo sapiens
cactttatgattgaa

SEQ ID NO: 1910508 - DNA, 15 bp, Homo sapiens
actttatgattgaac

SEQ ID NO: 1910509 - DNA, 15 bp, Homo sapiens
ctttatgattgaaca

SEQ ID NO: 1910510 - DNA, 15 bp, Homo sapiens
tttatgattgaacag

SEQ ID NO: 1910511 - DNA, 15 bp, Homo sapiens
ttatgattgaacaga

SEQ ID NO: 1910512 - DNA, 15 bp, Homo sapiens
tatgattgaacagat

SEQ ID NO: 1910513 - DNA, 15 bp, Homo sapiens
atgattgaacagatt

SEQ ID NO: 1910514 - DNA, 15 bp, Homo sapiens
tgattgaacagattt

SEQ ID NO: 1910515 - DNA, 15 bp, Homo sapiens
gattgaacagatttt

SEQ ID NO: 1910516 - DNA, 15 bp, Homo sapiens
attgaacagattttt

SEQ ID NO: 1910517 - DNA, 15 bp, Homo sapiens
ttgaacagattttta

SEQ ID NO: 1910518 - DNA, 15 bp, Homo sapiens
tgaacagatttttaa

SEQ ID NO: 1910519 - DNA, 15 bp, Homo sapiens
gaacagatttttaaa

SEQ ID NO: 1910520 - DNA, 15 bp, Homo sapiens
aacagatttttaaaa

SEQ ID NO: 1910521 - DNA, 15 bp, Homo sapiens
cagatttttaaaata

SEQ ID NO: 1910522 - DNA, 15 bp, Homo sapiens
agatttttaaaatat

SEQ ID NO: 1910523 - DNA, 15 bp, Homo sapiens
gatttttaaaatata

SEQ ID NO: 1910524 - DNA, 15 bp, Homo sapiens
atttttaaaatatag

SEQ ID NO: 1910525 - DNA, 15 bp, Homo sapiens
tttttaaaatatagt

SEQ ID NO: 1910526 - DNA, 15 bp, Homo sapiens
ttttaaaatatagtc

SEQ ID NO: 1910527 - DNA, 15 bp, Homo sapiens
tttaaaatatagtct

SEQ ID NO: 1910528 - DNA, 15 bp, Homo sapiens
ttaaaatatagtctt

SEQ ID NO: 1910529 - DNA, 15 bp, Homo sapiens
taaaatatagtctta

SEQ ID NO: 1910530 - DNA, 15 bp, Homo sapiens
aaaatatagtcttaa

SEQ ID NO: 1910531 - DNA, 15 bp, Homo sapiens
aaatatagtcttaaa

SEQ ID NO: 1910532 - DNA, 15 bp, Homo sapiens
aatatagtcttaaaa

SEQ ID NO: 1910533 - DNA, 15 bp, Homo sapiens
atatagtcttaaaat

SEQ ID NO: 1910534 - DNA, 15 bp, Homo sapiens
tatagtcttaaaata

SEQ ID NO: 1910535 - DNA, 15 bp, Homo sapiens
atagtcttaaaatat

SEQ ID NO: 1910536 - DNA, 15 bp, Homo sapiens
tagtcttaaaatatt

SEQ ID NO: 1910537 - DNA, 15 bp, Homo sapiens
agtcttaaaatattc

SEQ ID NO: 1910538 - DNA, 15 bp, Homo sapiens
gtcttaaaatattca

SEQ ID NO: 1910539 - DNA, 15 bp, Homo sapiens
tcttaaaatattcat

SEQ ID NO: 1910540 - DNA, 15 bp, Homo sapiens
cttaaaatattcata

SEQ ID NO: 1910541 - DNA, 15 bp, Homo sapiens
ttaaaatattcatac

SEQ ID NO: 1910542 - DNA, 15 bp, Homo sapiens
taaaatattcataca

SEQ ID NO: 1910543 - DNA, 15 bp, Homo sapiens
aaaatattcatacaa

SEQ ID NO: 1910544 - DNA, 15 bp, Homo sapiens
aaatattcatacaaa

SEQ ID NO: 1910545 - DNA, 15 bp, Homo sapiens
aatattcatacaaaa

SEQ ID NO: 1910546 - DNA, 15 bp, Homo sapiens
atattcatacaaaaa

SEQ ID NO: 1910547 - DNA, 15 bp, Homo sapiens
tattcatacaaaaat

SEQ ID NO: 1910548 - DNA, 15 bp, Homo sapiens
ttcatacaaaaattt

SEQ ID NO: 1910549 - DNA, 15 bp, Homo sapiens
tcatacaaaaattta

SEQ ID NO: 1910550 - DNA, 15 bp, Homo sapiens
catacaaaaatttat

SEQ ID NO: 1910551 - DNA, 15 bp, Homo sapiens
atacaaaaatttatt

SEQ ID NO: 1910552 - DNA, 15 bp, Homo sapiens
tacaaaaatttattt

SEQ ID NO: 1910553 - DNA, 15 bp, Homo sapiens
acaaaaatttattta

SEQ ID NO: 1910554 - DNA, 15 bp, Homo sapiens
caaaaatttatttat

SEQ ID NO: 1910555 - DNA, 15 bp, Homo sapiens
aaaaatttatttata

SEQ ID NO: 1910556 - DNA, 15 bp, Homo sapiens
aaaatttatttatat

SEQ ID NO: 1910557 - DNA, 15 bp, Homo sapiens
aaatttatttatatt

SEQ ID NO: 1910558 - DNA, 15 bp, Homo sapiens
aatttatttatattc

SEQ ID NO: 1910559 - DNA, 15 bp, Homo sapiens
atttatttatattca

SEQ ID NO: 1910560 - DNA, 15 bp, Homo sapiens
tttatttatattcat

SEQ ID NO: 1910561 - DNA, 15 bp, Homo sapiens
ttatttatattcatt

SEQ ID NO: 1910562 - DNA, 15 bp, Homo sapiens
tatttatattcattt

SEQ ID NO: 1910563 - DNA, 15 bp, Homo sapiens
atttatattcattta

SEQ ID NO: 1910564 - DNA, 15 bp, Homo sapiens
tttatattcatttac

SEQ ID NO: 1910565 - DNA, 15 bp, Homo sapiens
ttatattcatttact

SEQ ID NO: 1910566 - DNA, 15 bp, Homo sapiens
tatattcatttacta

SEQ ID NO: 1910567 - DNA, 15 bp, Homo sapiens
atattcatttactat

SEQ ID NO: 1910568 - DNA, 15 bp, Homo sapiens
tattcatttactata

SEQ ID NO: 1910569 - DNA, 15 bp, Homo sapiens
attcatttactatat

SEQ ID NO: 1910570 - DNA, 15 bp, Homo sapiens
ttcatttactatatt

SEQ ID NO: 1910571 - DNA, 15 bp, Homo sapiens
tcatttactatattt

SEQ ID NO: 1910572 - DNA, 15 bp, Homo sapiens
catttactatattta

SEQ ID NO: 1910573 - DNA, 15 bp, Homo sapiens
atttactatatttaa

SEQ ID NO: 1910574 - DNA, 15 bp, Homo sapiens
tttactatatttaaa

SEQ ID NO: 1910575 - DNA, 15 bp, Homo sapiens
ttactatatttaaaa

SEQ ID NO: 1910576 - DNA, 15 bp, Homo sapiens
tactatatttaaaac

SEQ ID NO: 1910577 - DNA, 15 bp, Homo sapiens
actatatttaaaaca

SEQ ID NO: 1910578 - DNA, 15 bp, Homo sapiens
ctatatttaaaacaa

SEQ ID NO: 1910579 - DNA, 15 bp, Homo sapiens
tatatttaaaacaat

SEQ ID NO: 1910580 - DNA, 15 bp, Homo sapiens
atatttaaaacaata

SEQ ID NO: 1910581 - DNA, 15 bp, Homo sapiens
tatttaaaacaatac

SEQ ID NO: 1910582 - DNA, 15 bp, Homo sapiens
atttaaaacaatact

SEQ ID NO: 1910583 - DNA, 15 bp, Homo sapiens
tttaaaacaatactc

SEQ ID NO: 1910584 - DNA, 15 bp, Homo sapiens
ttaaaacaatactcc

SEQ ID NO: 1910585 - DNA, 15 bp, Homo sapiens
taaaacaatactcct

SEQ ID NO: 1910586 - DNA, 15 bp, Homo sapiens
aaaacaatactcctt

SEQ ID NO: 1910587 - DNA, 15 bp, Homo sapiens
aaacaatactcctta

SEQ ID NO: 1910588 - DNA, 15 bp, Homo sapiens
aacaatactccttaa

SEQ ID NO: 1910589 - DNA, 15 bp, Homo sapiens
acaatactccttaaa

SEQ ID NO: 1910590 - DNA, 15 bp, Homo sapiens
caatactccttaaaa

SEQ ID NO: 1910591 - DNA, 15 bp, Homo sapiens
aatactccttaaaat

SEQ ID NO: 1910592 - DNA, 15 bp, Homo sapiens
atactccttaaaata

SEQ ID NO: 1910593 - DNA, 15 bp, Homo sapiens
tactccttaaaataa

SEQ ID NO: 1910594 - DNA, 15 bp, Homo sapiens
actccttaaaataag

SEQ ID NO: 1910595 - DNA, 15 bp, Homo sapiens
ctccttaaaataagt

SEQ ID NO: 1910596 - DNA, 15 bp, Homo sapiens
tccttaaaataagtc

SEQ ID NO: 1910597 - DNA, 15 bp, Homo sapiens
ccttaaaataagtct

SEQ ID NO: 1910598 - DNA, 15 bp, Homo sapiens
cttaaaataagtctt

SEQ ID NO: 1910599 - DNA, 15 bp, Homo sapiens
ttaaaataagtcttt

SEQ ID NO: 1910600 - DNA, 15 bp, Homo sapiens
taaaataagtctttg

SEQ ID NO: 1910601 - DNA, 15 bp, Homo sapiens
aaaataagtctttgt

SEQ ID NO: 1910602 - DNA, 15 bp, Homo sapiens
aaataagtctttgtt

SEQ ID NO: 1910603 - DNA, 15 bp, Homo sapiens
aataagtctttgtta

SEQ ID NO: 1910604 - DNA, 15 bp, Homo sapiens
ataagtctttgttaa

SEQ ID NO: 1910605 - DNA, 15 bp, Homo sapiens
taagtctttgttaaa

SEQ ID NO: 1910606 - DNA, 15 bp, Homo sapiens
aagtctttgttaaat

SEQ ID NO: 1910607 - DNA, 15 bp, Homo sapiens
agtctttgttaaatc

SEQ ID NO: 1910608 - DNA, 15 bp, Homo sapiens
gtctttgttaaatct

SEQ ID NO: 1910609 - DNA, 15 bp, Homo sapiens
tctttgttaaatctg

SEQ ID NO: 1910610 - DNA, 15 bp, Homo sapiens
ctttgttaaatctgt

SEQ ID NO: 1910611 - DNA, 15 bp, Homo sapiens
tttgttaaatctgta

SEQ ID NO: 1910612 - DNA, 15 bp, Homo sapiens
ttgttaaatctgtaa

SEQ ID NO: 1910613 - DNA, 15 bp, Homo sapiens
tgttaaatctgtaag

SEQ ID NO: 1910614 - DNA, 15 bp, Homo sapiens
gttaaatctgtaagt

SEQ ID NO: 1910615 - DNA, 15 bp, Homo sapiens
ttaaatctgtaagtg

SEQ ID NO: 1910616 - DNA, 15 bp, Homo sapiens
taaatctgtaagtgt

SEQ ID NO: 1910617 - DNA, 15 bp, Homo sapiens
aaatctgtaagtgtc

SEQ ID NO: 1910618 - DNA, 15 bp, Homo sapiens
aatctgtaagtgtcg

SEQ ID NO: 1910619 - DNA, 15 bp, Homo sapiens
atctgtaagtgtcgt

SEQ ID NO: 1910620 - DNA, 15 bp, Homo sapiens
tctgtaagtgtcgta

SEQ ID NO: 1910621 - DNA, 15 bp, Homo sapiens
ctgtaagtgtcgtaa

SEQ ID NO: 1910622 - DNA, 15 bp, Homo sapiens
tgtaagtgtcgtaaa

SEQ ID NO: 1910623 - DNA, 15 bp, Homo sapiens
gtaagtgtcgtaaag

SEQ ID NO: 1910624 - DNA, 15 bp, Homo sapiens
taagtgtcgtaaagt

SEQ ID NO: 1910625 - DNA, 15 bp, Homo sapiens
aagtgtcgtaaagtt

SEQ ID NO: 1910626 - DNA, 15 bp, Homo sapiens
agtgtcgtaaagttg

SEQ ID NO: 1910627 - DNA, 15 bp, Homo sapiens
gtgtcgtaaagttgg

SEQ ID NO: 1910628 - DNA, 15 bp, Homo sapiens
tgtcgtaaagttggc

SEQ ID NO: 1910629 - DNA, 15 bp, Homo sapiens
gtcgtaaagttggca

SEQ ID NO: 1910630 - DNA, 15 bp, Homo sapiens
tcgtaaagttggcaa

SEQ ID NO: 1910631 - DNA, 15 bp, Homo sapiens
cgtaaagttggcaaa

SEQ ID NO: 1910632 - DNA, 15 bp, Homo sapiens
gtaaagttggcaaaa

SEQ ID NO: 1910633 - DNA, 15 bp, Homo sapiens
taaagttggcaaaat

SEQ ID NO: 1910634 - DNA, 15 bp, Homo sapiens
aaagttggcaaaata

SEQ ID NO: 1910635 - DNA, 15 bp, Homo sapiens
aagttggcaaaatat

SEQ ID NO: 1910636 - DNA, 15 bp, Homo sapiens
agttggcaaaatatt

SEQ ID NO: 1910637 - DNA, 15 bp, Homo sapiens
gttggcaaaatattt

SEQ ID NO: 1910638 - DNA, 15 bp, Homo sapiens
ttggcaaaatattta

SEQ ID NO: 1910639 - DNA, 15 bp, Homo sapiens
tggcaaaatatttat

SEQ ID NO: 1910640 - DNA, 15 bp, Homo sapiens
ggcaaaatatttatg

SEQ ID NO: 1910641 - DNA, 15 bp, Homo sapiens
gcaaaatatttatgt

SEQ ID NO: 1910642 - DNA, 15 bp, Homo sapiens
caaaatatttatgta

SEQ ID NO: 1910643 - DNA, 15 bp, Homo sapiens
aaaatatttatgtag

SEQ ID NO: 1910644 - DNA, 15 bp, Homo sapiens
aaatatttatgtagt

SEQ ID NO: 1910645 - DNA, 15 bp, Homo sapiens
aatatttatgtagtg

SEQ ID NO: 1910646 - DNA, 15 bp, Homo sapiens
atatttatgtagtga

SEQ ID NO: 1910647 - DNA, 15 bp, Homo sapiens
tatttatgtagtgag

SEQ ID NO: 1910648 - DNA, 15 bp, Homo sapiens
atttatgtagtgagc

SEQ ID NO: 1910649 - DNA, 15 bp, Homo sapiens
tttatgtagtgagct

SEQ ID NO: 1910650 - DNA, 15 bp, Homo sapiens
ttatgtagtgagctg

SEQ ID NO: 1910651 - DNA, 15 bp, Homo sapiens
tatgtagtgagctga

SEQ ID NO: 1910652 - DNA, 15 bp, Homo sapiens
atgtagtgagctgat

SEQ ID NO: 1910653 - DNA, 15 bp, Homo sapiens
tgtagtgagctgatc

SEQ ID NO: 1910654 - DNA, 15 bp, Homo sapiens
gtagtgagctgatcc

SEQ ID NO: 1910655 - DNA, 15 bp, Homo sapiens
tagtgagctgatcct

SEQ ID NO: 1910656 - DNA, 15 bp, Homo sapiens
agtgagctgatcctt

SEQ ID NO: 1910657 - DNA, 15 bp, Homo sapiens
gtgagctgatccttc

SEQ ID NO: 1910658 - DNA, 15 bp, Homo sapiens
tgagctgatccttca

SEQ ID NO: 1910659 - DNA, 15 bp, Homo sapiens
gagctgatccttcag

SEQ ID NO: 1910660 - DNA, 15 bp, Homo sapiens
agctgatccttcagt

SEQ ID NO: 1910661 - DNA, 15 bp, Homo sapiens
gctgatccttcagta

SEQ ID NO: 1910662 - DNA, 15 bp, Homo sapiens
ctgatccttcagtaa

SEQ ID NO: 1910663 - DNA, 15 bp, Homo sapiens
tgatccttcagtaaa

SEQ ID NO: 1910664 - DNA, 15 bp, Homo sapiens
gatccttcagtaaac

SEQ ID NO: 1910665 - DNA, 15 bp, Homo sapiens
atccttcagtaaact

SEQ ID NO: 1910666 - DNA, 15 bp, Homo sapiens
tccttcagtaaactg

SEQ ID NO: 1910667 - DNA, 15 bp, Homo sapiens
ccttcagtaaactgg

SEQ ID NO: 1910668 - DNA, 15 bp, Homo sapiens
cttcagtaaactggc

SEQ ID NO: 1910669 - DNA, 15 bp, Homo sapiens
ttcagtaaactggct

SEQ ID NO: 1910670 - DNA, 15 bp, Homo sapiens
tcagtaaactggctt

SEQ ID NO: 1910671 - DNA, 15 bp, Homo sapiens
cagtaaactggcttt

SEQ ID NO: 1910672 - DNA, 15 bp, Homo sapiens
agtaaactggctttt

SEQ ID NO: 1910673 - DNA, 15 bp, Homo sapiens
gtaaactggcttttt

SEQ ID NO: 1910674 - DNA, 15 bp, Homo sapiens
taaactggctttttg

SEQ ID NO: 1910675 - DNA, 15 bp, Homo sapiens
aaactggctttttgg

SEQ ID NO: 1910676 - DNA, 15 bp, Homo sapiens
aactggctttttggg

SEQ ID NO: 1910677 - DNA, 15 bp, Homo sapiens
actggctttttggga

SEQ ID NO: 1910678 - DNA, 15 bp, Homo sapiens
ctggctttttgggaa

SEQ ID NO: 1910679 - DNA, 15 bp, Homo sapiens
tggctttttgggaat

SEQ ID NO: 1910680 - DNA, 15 bp, Homo sapiens
ggctttttgggaatt

SEQ ID NO: 1910681 - DNA, 15 bp, Homo sapiens
gctttttgggaatta

SEQ ID NO: 1910682 - DNA, 15 bp, Homo sapiens
ctttttgggaattag

SEQ ID NO: 1910683 - DNA, 15 bp, Homo sapiens
tttttgggaattagc

SEQ ID NO: 1910684 - DNA, 15 bp, Homo sapiens
ttttgggaattagcc

SEQ ID NO: 1910685 - DNA, 15 bp, Homo sapiens
tttgggaattagcca

SEQ ID NO: 1910686 - DNA, 15 bp, Homo sapiens
ttgggaattagccat

SEQ ID NO: 1910687 - DNA, 15 bp, Homo sapiens
tgggaattagccatt

SEQ ID NO: 1910688 - DNA, 15 bp, Homo sapiens
gggaattagccattg

SEQ ID NO: 1910689 - DNA, 15 bp, Homo sapiens
ggaattagccattga

SEQ ID NO: 1910690 - DNA, 15 bp, Homo sapiens
gaattagccattgag

SEQ ID NO: 1910691 - DNA, 15 bp, Homo sapiens
aattagccattgaga

SEQ ID NO: 1910692 - DNA, 15 bp, Homo sapiens
attagccattgagaa

SEQ ID NO: 1910693 - DNA, 15 bp, Homo sapiens
ttagccattgagaaa

SEQ ID NO: 1910694 - DNA, 15 bp, Homo sapiens
tagccattgagaaac

SEQ ID NO: 1910695 - DNA, 15 bp, Homo sapiens
agccattgagaaact

SEQ ID NO: 1910696 - DNA, 15 bp, Homo sapiens
gccattgagaaactg

SEQ ID NO: 1910697 - DNA, 15 bp, Homo sapiens
ccattgagaaactga

SEQ ID NO: 1910698 - DNA, 15 bp, Homo sapiens
cattgagaaactgat

SEQ ID NO: 1910699 - DNA, 15 bp, Homo sapiens
attgagaaactgatc

SEQ ID NO: 1910700 - DNA, 15 bp, Homo sapiens
ttgagaaactgatcc

SEQ ID NO: 1910701 - DNA, 15 bp, Homo sapiens
tgagaaactgatcct

SEQ ID NO: 1910702 - DNA, 15 bp, Homo sapiens
gagaaactgatcctt

SEQ ID NO: 1910703 - DNA, 15 bp, Homo sapiens
agaaactgatccttt

SEQ ID NO: 1910704 - DNA, 15 bp, Homo sapiens
gaaactgatccttta

SEQ ID NO: 1910705 - DNA, 15 bp, Homo sapiens
aaactgatcctttag

SEQ ID NO: 1910706 - DNA, 15 bp, Homo sapiens
aactgatcctttagc

SEQ ID NO: 1910707 - DNA, 15 bp, Homo sapiens
actgatcctttagca

SEQ ID NO: 1910708 - DNA, 15 bp, Homo sapiens
ctgatcctttagcaa

SEQ ID NO: 1910709 - DNA, 15 bp, Homo sapiens
tgatcctttagcaag

SEQ ID NO: 1910710 - DNA, 15 bp, Homo sapiens
gatcctttagcaagt

SEQ ID NO: 1910711 - DNA, 15 bp, Homo sapiens
atcctttagcaagtt

SEQ ID NO: 1910712 - DNA, 15 bp, Homo sapiens
tcctttagcaagttg

SEQ ID NO: 1910713 - DNA, 15 bp, Homo sapiens
cctttagcaagttgg

SEQ ID NO: 1910714 - DNA, 15 bp, Homo sapiens
ctttagcaagttggc

SEQ ID NO: 1910715 - DNA, 15 bp, Homo sapiens
tttagcaagttggcc

SEQ ID NO: 1910716 - DNA, 15 bp, Homo sapiens
ttagcaagttggccc

SEQ ID NO: 1910717 - DNA, 15 bp, Homo sapiens
tagcaagttggccct

SEQ ID NO: 1910718 - DNA, 15 bp, Homo sapiens
agcaagttggccctt

SEQ ID NO: 1910719 - DNA, 15 bp, Homo sapiens
gcaagttggcccttg

SEQ ID NO: 1910720 - DNA, 15 bp, Homo sapiens
caagttggcccttgg

SEQ ID NO: 1910721 - DNA, 15 bp, Homo sapiens
aagttggcccttggc

SEQ ID NO: 1910722 - DNA, 15 bp, Homo sapiens
agttggcccttggcg

SEQ ID NO: 1910723 - DNA, 15 bp, Homo sapiens
gttggcccttggcgt

SEQ ID NO: 1910724 - DNA, 15 bp, Homo sapiens
ttggcccttggcgta

SEQ ID NO: 1910725 - DNA, 15 bp, Homo sapiens
tggcccttggcgtat

SEQ ID NO: 1910726 - DNA, 15 bp, Homo sapiens
ggcccttggcgtatc

SEQ ID NO: 1910727 - DNA, 15 bp, Homo sapiens
gcccttggcgtatca

SEQ ID NO: 1910728 - DNA, 15 bp, Homo sapiens
cccttggcgtatcag

SEQ ID NO: 1910729 - DNA, 15 bp, Homo sapiens
ccttggcgtatcagt

SEQ ID NO: 1910730 - DNA, 15 bp, Homo sapiens
cttggcgtatcagtt

SEQ ID NO: 1910731 - DNA, 15 bp, Homo sapiens
ttggcgtatcagttt

SEQ ID NO: 1910732 - DNA, 15 bp, Homo sapiens
tggcgtatcagtttg

SEQ ID NO: 1910733 - DNA, 15 bp, Homo sapiens
ggcgtatcagtttgc

SEQ ID NO: 1910734 - DNA, 15 bp, Homo sapiens
gcgtatcagtttgct

SEQ ID NO: 1910735 - DNA, 15 bp, Homo sapiens
cgtatcagtttgctt

SEQ ID NO: 1910736 - DNA, 15 bp, Homo sapiens
gtatcagtttgcttc

SEQ ID NO: 1910737 - DNA, 15 bp, Homo sapiens
tatcagtttgcttct

SEQ ID NO: 1910738 - DNA, 15 bp, Homo sapiens
atcagtttgcttctc

SEQ ID NO: 1910739 - DNA, 15 bp, Homo sapiens
tcagtttgcttctcc

SEQ ID NO: 1910740 - DNA, 15 bp, Homo sapiens
cagtttgcttctcct

SEQ ID NO: 1910741 - DNA, 15 bp, Homo sapiens
agtttgcttctcctg

SEQ ID NO: 1910742 - DNA, 15 bp, Homo sapiens
gtttgcttctcctgt

SEQ ID NO: 1910743 - DNA, 15 bp, Homo sapiens
tttgcttctcctgta

SEQ ID NO: 1910744 - DNA, 15 bp, Homo sapiens
ttgcttctcctgtac

SEQ ID NO: 1910745 - DNA, 15 bp, Homo sapiens
tgcttctcctgtaca

SEQ ID NO: 1910746 - DNA, 15 bp, Homo sapiens
gcttctcctgtacac

SEQ ID NO: 1910747 - DNA, 15 bp, Homo sapiens
cttctcctgtacaca

SEQ ID NO: 1910748 - DNA, 15 bp, Homo sapiens
ttctcctgtacacac

SEQ ID NO: 1910749 - DNA, 15 bp, Homo sapiens
tctcctgtacacacc

SEQ ID NO: 1910750 - DNA, 15 bp, Homo sapiens
ctcctgtacacacct

SEQ ID NO: 1910751 - DNA, 15 bp, Homo sapiens
tcctgtacacaccta

SEQ ID NO: 1910752 - DNA, 15 bp, Homo sapiens
cctgtacacacctat

SEQ ID NO: 1910753 - DNA, 15 bp, Homo sapiens
ctgtacacacctatc

SEQ ID NO: 1910754 - DNA, 15 bp, Homo sapiens
tgtacacacctatct

SEQ ID NO: 1910755 - DNA, 15 bp, Homo sapiens
gtacacacctatcta

SEQ ID NO: 1910756 - DNA, 15 bp, Homo sapiens
tacacacctatctaa

SEQ ID NO: 1910757 - DNA, 15 bp, Homo sapiens
acacacctatctaat

SEQ ID NO: 1910758 - DNA, 15 bp, Homo sapiens
cacacctatctaatc

SEQ ID NO: 1910759 - DNA, 15 bp, Homo sapiens
acacctatctaatca

SEQ ID NO: 1910760 - DNA, 15 bp, Homo sapiens
cacctatctaatcag

SEQ ID NO: 1910761 - DNA, 15 bp, Homo sapiens
acctatctaatcagt

SEQ ID NO: 1910762 - DNA, 15 bp, Homo sapiens
cctatctaatcagtc

SEQ ID NO: 1910763 - DNA, 15 bp, Homo sapiens
ctatctaatcagtct

SEQ ID NO: 1910764 - DNA, 15 bp, Homo sapiens
tatctaatcagtctc

SEQ ID NO: 1910765 - DNA, 15 bp, Homo sapiens
atctaatcagtctca

SEQ ID NO: 1910766 - DNA, 15 bp, Homo sapiens
tctaatcagtctcat

SEQ ID NO: 1910767 - DNA, 15 bp, Homo sapiens
ctaatcagtctcatt

SEQ ID NO: 1910768 - DNA, 15 bp, Homo sapiens
taatcagtctcattg

SEQ ID NO: 1910769 - DNA, 15 bp, Homo sapiens
aatcagtctcattgc

SEQ ID NO: 1910770 - DNA, 15 bp, Homo sapiens
atcagtctcattgcc

SEQ ID NO: 1910771 - DNA, 15 bp, Homo sapiens
tcagtctcattgcca

SEQ ID NO: 1910772 - DNA, 15 bp, Homo sapiens
cagtctcattgccat

SEQ ID NO: 1910773 - DNA, 15 bp, Homo sapiens
agtctcattgccata

SEQ ID NO: 1910774 - DNA, 15 bp, Homo sapiens
gtctcattgccatac

SEQ ID NO: 1910775 - DNA, 15 bp, Homo sapiens
tctcattgccataca

SEQ ID NO: 1910776 - DNA, 15 bp, Homo sapiens
ctcattgccatacac

SEQ ID NO: 1910777 - DNA, 15 bp, Homo sapiens
tcattgccatacact

SEQ ID NO: 1910778 - DNA, 15 bp, Homo sapiens
cattgccatacactg

SEQ ID NO: 1910779 - DNA, 15 bp, Homo sapiens
attgccatacactgc

SEQ ID NO: 1910780 - DNA, 15 bp, Homo sapiens
ttgccatacactgca

SEQ ID NO: 1910781 - DNA, 15 bp, Homo sapiens
tgccatacactgcaa

SEQ ID NO: 1910782 - DNA, 15 bp, Homo sapiens
gccatacactgcaat

SEQ ID NO: 1910783 - DNA, 15 bp, Homo sapiens
ccatacactgcaatg

SEQ ID NO: 1910784 - DNA, 15 bp, Homo sapiens
catacactgcaatga

SEQ ID NO: 1910785 - DNA, 15 bp, Homo sapiens
atacactgcaatgac

SEQ ID NO: 1910786 - DNA, 15 bp, Homo sapiens
tacactgcaatgact

SEQ ID NO: 1910787 - DNA, 15 bp, Homo sapiens
acactgcaatgactg

SEQ ID NO: 1910788 - DNA, 15 bp, Homo sapiens
cactgcaatgactga

SEQ ID NO: 1910789 - DNA, 15 bp, Homo sapiens
actgcaatgactgac

SEQ ID NO: 1910790 - DNA, 15 bp, Homo sapiens
ctgcaatgactgaca

SEQ ID NO: 1910791 - DNA, 15 bp, Homo sapiens
tgcaatgactgacat

SEQ ID NO: 1910792 - DNA, 15 bp, Homo sapiens
gcaatgactgacatc

SEQ ID NO: 1910793 - DNA, 15 bp, Homo sapiens
caatgactgacatct

SEQ ID NO: 1910794 - DNA, 15 bp, Homo sapiens
aatgactgacatctc

SEQ ID NO: 1910795 - DNA, 15 bp, Homo sapiens
atgactgacatctca

SEQ ID NO: 1910796 - DNA, 15 bp, Homo sapiens
tgactgacatctcac

SEQ ID NO: 1910797 - DNA, 15 bp, Homo sapiens
gactgacatctcact

SEQ ID NO: 1910798 - DNA, 15 bp, Homo sapiens
actgacatctcactc

SEQ ID NO: 1910799 - DNA, 15 bp, Homo sapiens
ctgacatctcactca

SEQ ID NO: 1910800 - DNA, 15 bp, Homo sapiens
tgacatctcactcag

SEQ ID NO: 1910801 - DNA, 15 bp, Homo sapiens
gacatctcactcagc

SEQ ID NO: 1910802 - DNA, 15 bp, Homo sapiens
acatctcactcagct

SEQ ID NO: 1910803 - DNA, 15 bp, Homo sapiens
catctcactcagctc

SEQ ID NO: 1910804 - DNA, 15 bp, Homo sapiens
atctcactcagctcc

SEQ ID NO: 1910805 - DNA, 15 bp, Homo sapiens
tctcactcagctccc

SEQ ID NO: 1910806 - DNA, 15 bp, Homo sapiens
ctcactcagctccct

SEQ ID NO: 1910807 - DNA, 15 bp, Homo sapiens
tcactcagctccctt

SEQ ID NO: 1910808 - DNA, 15 bp, Homo sapiens
cactcagctcccttg

SEQ ID NO: 1910809 - DNA, 15 bp, Homo sapiens
actcagctcccttgg

SEQ ID NO: 1910810 - DNA, 15 bp, Homo sapiens
ctcagctcccttggg

SEQ ID NO: 1910811 - DNA, 15 bp, Homo sapiens
tcagctcccttggga

SEQ ID NO: 1910812 - DNA, 15 bp, Homo sapiens
cagctcccttgggac

SEQ ID NO: 1910813 - DNA, 15 bp, Homo sapiens
agctcccttgggact

SEQ ID NO: 1910814 - DNA, 15 bp, Homo sapiens
gctcccttgggactc

SEQ ID NO: 1910815 - DNA, 15 bp, Homo sapiens
ctcccttgggactct

SEQ ID NO: 1910816 - DNA, 15 bp, Homo sapiens
tcccttgggactcta

SEQ ID NO: 1910817 - DNA, 15 bp, Homo sapiens
cccttgggactctaa

SEQ ID NO: 1910818 - DNA, 15 bp, Homo sapiens
ccttgggactctaag

SEQ ID NO: 1910819 - DNA, 15 bp, Homo sapiens
cttgggactctaagt

SEQ ID NO: 1910820 - DNA, 15 bp, Homo sapiens
ttgggactctaagtc

SEQ ID NO: 1910821 - DNA, 15 bp, Homo sapiens
tgggactctaagtct

SEQ ID NO: 1910822 - DNA, 15 bp, Homo sapiens
gggactctaagtctt

SEQ ID NO: 1910823 - DNA, 15 bp, Homo sapiens
ggactctaagtctta

SEQ ID NO: 1910824 - DNA, 15 bp, Homo sapiens
gactctaagtcttat

SEQ ID NO: 1910825 - DNA, 15 bp, Homo sapiens
actctaagtcttatt

SEQ ID NO: 1910826 - DNA, 15 bp, Homo sapiens
ctctaagtcttattt

SEQ ID NO: 1910827 - DNA, 15 bp, Homo sapiens
tctaagtcttattta

SEQ ID NO: 1910828 - DNA, 15 bp, Homo sapiens
ctaagtcttatttat

SEQ ID NO: 1910829 - DNA, 15 bp, Homo sapiens
taagtcttatttatt

SEQ ID NO: 1910830 - DNA, 15 bp, Homo sapiens
aagtcttatttattt

SEQ ID NO: 1910831 - DNA, 15 bp, Homo sapiens
agtcttatttatttg

SEQ ID NO: 1910832 - DNA, 15 bp, Homo sapiens
gtcttatttatttgg

SEQ ID NO: 1910833 - DNA, 15 bp, Homo sapiens
tcttatttatttggt

SEQ ID NO: 1910834 - DNA, 15 bp, Homo sapiens
cttatttatttggta

SEQ ID NO: 1910835 - DNA, 15 bp, Homo sapiens
ttatttatttggtat

SEQ ID NO: 1910836 - DNA, 15 bp, Homo sapiens
tatttatttggtatc

SEQ ID NO: 1910837 - DNA, 15 bp, Homo sapiens
atttatttggtatcg

SEQ ID NO: 1910838 - DNA, 15 bp, Homo sapiens
tttatttggtatcgc

SEQ ID NO: 1910839 - DNA, 15 bp, Homo sapiens
ttatttggtatcgcc

SEQ ID NO: 1910840 - DNA, 15 bp, Homo sapiens
tatttggtatcgcca

SEQ ID NO: 1910841 - DNA, 15 bp, Homo sapiens
atttggtatcgccag

SEQ ID NO: 1910842 - DNA, 15 bp, Homo sapiens
tttggtatcgccaga

SEQ ID NO: 1910843 - DNA, 15 bp, Homo sapiens
ttggtatcgccagaa

SEQ ID NO: 1910844 - DNA, 15 bp, Homo sapiens
tggtatcgccagaac

SEQ ID NO: 1910845 - DNA, 15 bp, Homo sapiens
ggtatcgccagaact

SEQ ID NO: 1910846 - DNA, 15 bp, Homo sapiens
gtatcgccagaactt

SEQ ID NO: 1910847 - DNA, 15 bp, Homo sapiens
tatcgccagaactta

SEQ ID NO: 1910848 - DNA, 15 bp, Homo sapiens
atcgccagaacttag

SEQ ID NO: 1910849 - DNA, 15 bp, Homo sapiens
tcgccagaacttagc

SEQ ID NO: 1910850 - DNA, 15 bp, Homo sapiens
cgccagaacttagca

SEQ ID NO: 1910851 - DNA, 15 bp, Homo sapiens
gccagaacttagcac

SEQ ID NO: 1910852 - DNA, 15 bp, Homo sapiens
ccagaacttagcaca

SEQ ID NO: 1910853 - DNA, 15 bp, Homo sapiens
cagaacttagcacat

SEQ ID NO: 1910854 - DNA, 15 bp, Homo sapiens
agaacttagcacatt

SEQ ID NO: 1910855 - DNA, 15 bp, Homo sapiens
gaacttagcacattg

SEQ ID NO: 1910856 - DNA, 15 bp, Homo sapiens
aacttagcacattgt

SEQ ID NO: 1910857 - DNA, 15 bp, Homo sapiens
acttagcacattgtg

SEQ ID NO: 1910858 - DNA, 15 bp, Homo sapiens
cttagcacattgtgt

SEQ ID NO: 1910859 - DNA, 15 bp, Homo sapiens
ttagcacattgtgtt

SEQ ID NO: 1910860 - DNA, 15 bp, Homo sapiens
tagcacattgtgttt

SEQ ID NO: 1910861 - DNA, 15 bp, Homo sapiens
agcacattgtgtttc

SEQ ID NO: 1910862 - DNA, 15 bp, Homo sapiens
gcacattgtgtttca

SEQ ID NO: 1910863 - DNA, 15 bp, Homo sapiens
cacattgtgtttcat

SEQ ID NO: 1910864 - DNA, 15 bp, Homo sapiens
acattgtgtttcatc

SEQ ID NO: 1910865 - DNA, 15 bp, Homo sapiens
cattgtgtttcatct

SEQ ID NO: 1910866 - DNA, 15 bp, Homo sapiens
attgtgtttcatctg

SEQ ID NO: 1910867 - DNA, 15 bp, Homo sapiens
ttgtgtttcatctga

SEQ ID NO: 1910868 - DNA, 15 bp, Homo sapiens
tgtgtttcatctgat

SEQ ID NO: 1910869 - DNA, 15 bp, Homo sapiens
gtgtttcatctgatg

SEQ ID NO: 1910870 - DNA, 15 bp, Homo sapiens
tgtttcatctgatga

SEQ ID NO: 1910871 - DNA, 15 bp, Homo sapiens
gtttcatctgatgaa

SEQ ID NO: 1910872 - DNA, 15 bp, Homo sapiens
tttcatctgatgaag

SEQ ID NO: 1910873 - DNA, 15 bp, Homo sapiens
ttcatctgatgaaga

SEQ ID NO: 1910874 - DNA, 15 bp, Homo sapiens
tcatctgatgaagac

SEQ ID NO: 1910875 - DNA, 15 bp, Homo sapiens
catctgatgaagact

SEQ ID NO: 1910876 - DNA, 15 bp, Homo sapiens
atctgatgaagactt

SEQ ID NO: 1910877 - DNA, 15 bp, Homo sapiens
tctgatgaagactta

SEQ ID NO: 1910878 - DNA, 15 bp, Homo sapiens
ctgatgaagacttag

SEQ ID NO: 1910879 - DNA, 15 bp, Homo sapiens
tgatgaagacttaga

SEQ ID NO: 1910880 - DNA, 15 bp, Homo sapiens
gatgaagacttagaa

SEQ ID NO: 1910881 - DNA, 15 bp, Homo sapiens
atgaagacttagaaa

SEQ ID NO: 1910882 - DNA, 15 bp, Homo sapiens
tgaagacttagaaat

SEQ ID NO: 1910883 - DNA, 15 bp, Homo sapiens
gaagacttagaaatg

SEQ ID NO: 1910884 - DNA, 15 bp, Homo sapiens
aagacttagaaatgt

SEQ ID NO: 1910885 - DNA, 15 bp, Homo sapiens
agacttagaaatgtt

SEQ ID NO: 1910886 - DNA, 15 bp, Homo sapiens
gacttagaaatgttg

SEQ ID NO: 1910887 - DNA, 15 bp, Homo sapiens
acttagaaatgttga

SEQ ID NO: 1910888 - DNA, 15 bp, Homo sapiens
cttagaaatgttgac

SEQ ID NO: 1910889 - DNA, 15 bp, Homo sapiens
ttagaaatgttgact

SEQ ID NO: 1910890 - DNA, 15 bp, Homo sapiens
tagaaatgttgacta

SEQ ID NO: 1910891 - DNA, 15 bp, Homo sapiens
agaaatgttgactaa

SEQ ID NO: 1910892 - DNA, 15 bp, Homo sapiens
gaaatgttgactaat

SEQ ID NO: 1910893 - DNA, 15 bp, Homo sapiens
aaatgttgactaatg

SEQ ID NO: 1910894 - DNA, 15 bp, Homo sapiens
aatgttgactaatga

SEQ ID NO: 1910895 - DNA, 15 bp, Homo sapiens
atgttgactaatgaa

SEQ ID NO: 1910896 - DNA, 15 bp, Homo sapiens
tgttgactaatgaat

SEQ ID NO: 1910897 - DNA, 15 bp, Homo sapiens
gttgactaatgaata

SEQ ID NO: 1910898 - DNA, 15 bp, Homo sapiens
ttgactaatgaataa

SEQ ID NO: 1910899 - DNA, 15 bp, Homo sapiens
tgactaatgaataag

SEQ ID NO: 1910900 - DNA, 15 bp, Homo sapiens
gactaatgaataagc

SEQ ID NO: 1910901 - DNA, 15 bp, Homo sapiens
actaatgaataagca

SEQ ID NO: 1910902 - DNA, 15 bp, Homo sapiens
ctaatgaataagcaa

SEQ ID NO: 1910903 - DNA, 15 bp, Homo sapiens
taatgaataagcaaa

SEQ ID NO: 1910904 - DNA, 15 bp, Homo sapiens
aatgaataagcaaat

SEQ ID NO: 1910905 - DNA, 15 bp, Homo sapiens
atgaataagcaaatt

SEQ ID NO: 1910906 - DNA, 15 bp, Homo sapiens
tgaataagcaaatta

SEQ ID NO: 1910907 - DNA, 15 bp, Homo sapiens
gaataagcaaattaa

SEQ ID NO: 1910908 - DNA, 15 bp, Homo sapiens
aataagcaaattaat

SEQ ID NO: 1910909 - DNA, 15 bp, Homo sapiens
ataagcaaattaatt

SEQ ID NO: 1910910 - DNA, 15 bp, Homo sapiens
taagcaaattaattc

SEQ ID NO: 1910911 - DNA, 15 bp, Homo sapiens
aagcaaattaattca

SEQ ID NO: 1910912 - DNA, 15 bp, Homo sapiens
agcaaattaattcat

SEQ ID NO: 1910913 - DNA, 15 bp, Homo sapiens
gcaaattaattcata

SEQ ID NO: 1910914 - DNA, 15 bp, Homo sapiens
caaattaattcataa

SEQ ID NO: 1910915 - DNA, 15 bp, Homo sapiens
aaattaattcataag

SEQ ID NO: 1910916 - DNA, 15 bp, Homo sapiens
aattaattcataagt

SEQ ID NO: 1910917 - DNA, 15 bp, Homo sapiens
attaattcataagtg

SEQ ID NO: 1910918 - DNA, 15 bp, Homo sapiens
ttaattcataagtgg

SEQ ID NO: 1910919 - DNA, 15 bp, Homo sapiens
taattcataagtggc

SEQ ID NO: 1910920 - DNA, 15 bp, Homo sapiens
aattcataagtggcc

SEQ ID NO: 1910921 - DNA, 15 bp, Homo sapiens
attcataagtggcct

SEQ ID NO: 1910922 - DNA, 15 bp, Homo sapiens
ttcataagtggcctt

SEQ ID NO: 1910923 - DNA, 15 bp, Homo sapiens
tcataagtggccttt

SEQ ID NO: 1910924 - DNA, 15 bp, Homo sapiens
cataagtggccttta

SEQ ID NO: 1910925 - DNA, 15 bp, Homo sapiens
ataagtggcctttat

SEQ ID NO: 1910926 - DNA, 15 bp, Homo sapiens
taagtggcctttatg

SEQ ID NO: 1910927 - DNA, 15 bp, Homo sapiens
aagtggcctttatgc

SEQ ID NO: 1910928 - DNA, 15 bp, Homo sapiens
agtggcctttatgct

SEQ ID NO: 1910929 - DNA, 15 bp, Homo sapiens
gtggcctttatgctg

SEQ ID NO: 1910930 - DNA, 15 bp, Homo sapiens
tggcctttatgctgc

SEQ ID NO: 1910931 - DNA, 15 bp, Homo sapiens
ggcctttatgctgcc

SEQ ID NO: 1910932 - DNA, 15 bp, Homo sapiens
gcctttatgctgcct

SEQ ID NO: 1910933 - DNA, 15 bp, Homo sapiens
cctttatgctgcctt

SEQ ID NO: 1910934 - DNA, 15 bp, Homo sapiens
ctttatgctgcctta

SEQ ID NO: 1910935 - DNA, 15 bp, Homo sapiens
tttatgctgccttaa

SEQ ID NO: 1910936 - DNA, 15 bp, Homo sapiens
ttatgctgccttaac

SEQ ID NO: 1910937 - DNA, 15 bp, Homo sapiens
tatgctgccttaacc

SEQ ID NO: 1910938 - DNA, 15 bp, Homo sapiens
atgctgccttaacct

SEQ ID NO: 1910939 - DNA, 15 bp, Homo sapiens
tgctgccttaacctg

SEQ ID NO: 1910940 - DNA, 15 bp, Homo sapiens
gctgccttaacctga

SEQ ID NO: 1910941 - DNA, 15 bp, Homo sapiens
ctgccttaacctgaa

SEQ ID NO: 1910942 - DNA, 15 bp, Homo sapiens
tgccttaacctgaat

SEQ ID NO: 1910943 - DNA, 15 bp, Homo sapiens
gccttaacctgaata

SEQ ID NO: 1910944 - DNA, 15 bp, Homo sapiens
ccttaacctgaatac

SEQ ID NO: 1910945 - DNA, 15 bp, Homo sapiens
cttaacctgaatact

SEQ ID NO: 1910946 - DNA, 15 bp, Homo sapiens
ttaacctgaatactt

SEQ ID NO: 1910947 - DNA, 15 bp, Homo sapiens
taacctgaatacttt

SEQ ID NO: 1910948 - DNA, 15 bp, Homo sapiens
aacctgaatactttt

SEQ ID NO: 1910949 - DNA, 15 bp, Homo sapiens
acctgaatacttttc

SEQ ID NO: 1910950 - DNA, 15 bp, Homo sapiens
cctgaatacttttct

SEQ ID NO: 1910951 - DNA, 15 bp, Homo sapiens
ctgaatacttttctc

SEQ ID NO: 1910952 - DNA, 15 bp, Homo sapiens
tgaatacttttctcc

SEQ ID NO: 1910953 - DNA, 15 bp, Homo sapiens
gaatacttttctcct

SEQ ID NO: 1910954 - DNA, 15 bp, Homo sapiens
aatacttttctcctt

SEQ ID NO: 1910955 - DNA, 15 bp, Homo sapiens
atacttttctccttc

SEQ ID NO: 1910956 - DNA, 15 bp, Homo sapiens
tacttttctccttct

SEQ ID NO: 1910957 - DNA, 15 bp, Homo sapiens
acttttctccttctc

SEQ ID NO: 1910958 - DNA, 15 bp, Homo sapiens
cttttctccttctct

SEQ ID NO: 1910959 - DNA, 15 bp, Homo sapiens
ttttctccttctctt

SEQ ID NO: 1910960 - DNA, 15 bp, Homo sapiens
tttctccttctcttt

SEQ ID NO: 1910961 - DNA, 15 bp, Homo sapiens
ttctccttctcttta

SEQ ID NO: 1910962 - DNA, 15 bp, Homo sapiens
tctccttctctttat

SEQ ID NO: 1910963 - DNA, 15 bp, Homo sapiens
ctccttctctttata

SEQ ID NO: 1910964 - DNA, 15 bp, Homo sapiens
tccttctctttatag

SEQ ID NO: 1910965 - DNA, 15 bp, Homo sapiens
ccttctctttatagg

SEQ ID NO: 1910966 - DNA, 15 bp, Homo sapiens
cttctctttatagga

SEQ ID NO: 1910967 - DNA, 15 bp, Homo sapiens
ttctctttataggat

SEQ ID NO: 1910968 - DNA, 15 bp, Homo sapiens
tctctttataggata

SEQ ID NO: 1910969 - DNA, 15 bp, Homo sapiens
ctctttataggatag

SEQ ID NO: 1910970 - DNA, 15 bp, Homo sapiens
tctttataggatagc

SEQ ID NO: 1910971 - DNA, 15 bp, Homo sapiens
ctttataggatagct

SEQ ID NO: 1910972 - DNA, 15 bp, Homo sapiens
tttataggatagcta

SEQ ID NO: 1910973 - DNA, 15 bp, Homo sapiens
ttataggatagctac

SEQ ID NO: 1910974 - DNA, 15 bp, Homo sapiens
tataggatagctacc

SEQ ID NO: 1910975 - DNA, 15 bp, Homo sapiens
ataggatagctacca

SEQ ID NO: 1910976 - DNA, 15 bp, Homo sapiens
taggatagctaccaa

SEQ ID NO: 1910977 - DNA, 15 bp, Homo sapiens
aggatagctaccaag

SEQ ID NO: 1910978 - DNA, 15 bp, Homo sapiens
ggatagctaccaagg

SEQ ID NO: 1910979 - DNA, 15 bp, Homo sapiens
gatagctaccaaggg

SEQ ID NO: 1910980 - DNA, 15 bp, Homo sapiens
atagctaccaaggga

SEQ ID NO: 1910981 - DNA, 15 bp, Homo sapiens
tagctaccaagggaa

SEQ ID NO: 1910982 - DNA, 15 bp, Homo sapiens
agctaccaagggaat

SEQ ID NO: 1910983 - DNA, 15 bp, Homo sapiens
gctaccaagggaatc

SEQ ID NO: 1910984 - DNA, 15 bp, Homo sapiens
ctaccaagggaatct

SEQ ID NO: 1910985 - DNA, 15 bp, Homo sapiens
taccaagggaatctg

SEQ ID NO: 1910986 - DNA, 15 bp, Homo sapiens
accaagggaatctga

SEQ ID NO: 1910987 - DNA, 15 bp, Homo sapiens
ccaagggaatctgaa

SEQ ID NO: 1910988 - DNA, 15 bp, Homo sapiens
caagggaatctgaat

SEQ ID NO: 1910989 - DNA, 15 bp, Homo sapiens
aagggaatctgaatt

SEQ ID NO: 1910990 - DNA, 15 bp, Homo sapiens
agggaatctgaattt

SEQ ID NO: 1910991 - DNA, 15 bp, Homo sapiens
gggaatctgaattta

SEQ ID NO: 1910992 - DNA, 15 bp, Homo sapiens
ggaatctgaatttaa

SEQ ID NO: 1910993 - DNA, 15 bp, Homo sapiens
gaatctgaatttaaa

SEQ ID NO: 1910994 - DNA, 15 bp, Homo sapiens
aatctgaatttaaat

SEQ ID NO: 1910995 - DNA, 15 bp, Homo sapiens
atctgaatttaaatg

SEQ ID NO: 1910996 - DNA, 15 bp, Homo sapiens
tctgaatttaaatgg

SEQ ID NO: 1910997 - DNA, 15 bp, Homo sapiens
ctgaatttaaatggg

SEQ ID NO: 1910998 - DNA, 15 bp, Homo sapiens
tgaatttaaatgggt

SEQ ID NO: 1910999 - DNA, 15 bp, Homo sapiens
gaatttaaatgggtg

SEQ ID NO: 1911000 - DNA, 15 bp, Homo sapiens
aatttaaatgggtgt

SEQ ID NO: 1911001 - DNA, 15 bp, Homo sapiens
atttaaatgggtgtg

SEQ ID NO: 1911002 - DNA, 15 bp, Homo sapiens
tttaaatgggtgtga

SEQ ID NO: 1911003 - DNA, 15 bp, Homo sapiens
ttaaatgggtgtgac

SEQ ID NO: 1911004 - DNA, 15 bp, Homo sapiens
taaatgggtgtgaca

SEQ ID NO: 1911005 - DNA, 15 bp, Homo sapiens
aaatgggtgtgacag

SEQ ID NO: 1911006 - DNA, 15 bp, Homo sapiens
aatgggtgtgacagc

SEQ ID NO: 1911007 - DNA, 15 bp, Homo sapiens
atgggtgtgacagcc

SEQ ID NO: 1911008 - DNA, 15 bp, Homo sapiens
tgggtgtgacagcca

SEQ ID NO: 1911009 - DNA, 15 bp, Homo sapiens
gggtgtgacagccaa

SEQ ID NO: 1911010 - DNA, 15 bp, Homo sapiens
ggtgtgacagccaag

SEQ ID NO: 1911011 - DNA, 15 bp, Homo sapiens
gtgtgacagccaagg

SEQ ID NO: 1911012 - DNA, 15 bp, Homo sapiens
tgtgacagccaagga

SEQ ID NO: 1911013 - DNA, 15 bp, Homo sapiens
gtgacagccaaggag

SEQ ID NO: 1911014 - DNA, 15 bp, Homo sapiens
tgacagccaaggagg

SEQ ID NO: 1911015 - DNA, 15 bp, Homo sapiens
gacagccaaggagga

SEQ ID NO: 1911016 - DNA, 15 bp, Homo sapiens
acagccaaggaggaa

SEQ ID NO: 1911017 - DNA, 15 bp, Homo sapiens
cagccaaggaggaaa

SEQ ID NO: 1911018 - DNA, 15 bp, Homo sapiens
agccaaggaggaaaa

SEQ ID NO: 1911019 - DNA, 15 bp, Homo sapiens
gccaaggaggaaaaa

SEQ ID NO: 1911020 - DNA, 15 bp, Homo sapiens
ccaaggaggaaaaac

SEQ ID NO: 1911021 - DNA, 15 bp, Homo sapiens
caaggaggaaaaact

SEQ ID NO: 1911022 - DNA, 15 bp, Homo sapiens
aaggaggaaaaactt

SEQ ID NO: 1911023 - DNA, 15 bp, Homo sapiens
aggaggaaaaacttt

SEQ ID NO: 1911024 - DNA, 15 bp, Homo sapiens
ggaggaaaaactttc

SEQ ID NO: 1911025 - DNA, 15 bp, Homo sapiens
gaggaaaaactttct

SEQ ID NO: 1911026 - DNA, 15 bp, Homo sapiens
aggaaaaactttctt

SEQ ID NO: 1911027 - DNA, 15 bp, Homo sapiens
ggaaaaactttcttt

SEQ ID NO: 1911028 - DNA, 15 bp, Homo sapiens
gaaaaactttctttc

SEQ ID NO: 1911029 - DNA, 15 bp, Homo sapiens
aaaaactttctttca

SEQ ID NO: 1911030 - DNA, 15 bp, Homo sapiens
aaaactttctttcac

SEQ ID NO: 1911031 - DNA, 15 bp, Homo sapiens
aaactttctttcaca

SEQ ID NO: 1911032 - DNA, 15 bp, Homo sapiens
aactttctttcacat

SEQ ID NO: 1911033 - DNA, 15 bp, Homo sapiens
actttctttcacatt

SEQ ID NO: 1911034 - DNA, 15 bp, Homo sapiens
ctttctttcacattt

SEQ ID NO: 1911035 - DNA, 15 bp, Homo sapiens
tttctttcacatttt

SEQ ID NO: 1911036 - DNA, 15 bp, Homo sapiens
ttctttcacattttg

SEQ ID NO: 1911037 - DNA, 15 bp, Homo sapiens
tctttcacattttgc

SEQ ID NO: 1911038 - DNA, 15 bp, Homo sapiens
ctttcacattttgct

SEQ ID NO: 1911039 - DNA, 15 bp, Homo sapiens
tttcacattttgctc

SEQ ID NO: 1911040 - DNA, 15 bp, Homo sapiens
ttcacattttgctct

SEQ ID NO: 1911041 - DNA, 15 bp, Homo sapiens
tcacattttgctctt

SEQ ID NO: 1911042 - DNA, 15 bp, Homo sapiens
cacattttgctcttt

SEQ ID NO: 1911043 - DNA, 15 bp, Homo sapiens
acattttgctcttta

SEQ ID NO: 1911044 - DNA, 15 bp, Homo sapiens
cattttgctctttat

SEQ ID NO: 1911045 - DNA, 15 bp, Homo sapiens
attttgctctttata

SEQ ID NO: 1911046 - DNA, 15 bp, Homo sapiens
ttttgctctttatat

SEQ ID NO: 1911047 - DNA, 15 bp, Homo sapiens
tttgctctttatatc

SEQ ID NO: 1911048 - DNA, 15 bp, Homo sapiens
ttgctctttatatcc

SEQ ID NO: 1911049 - DNA, 15 bp, Homo sapiens
tgctctttatatcca

SEQ ID NO: 1911050 - DNA, 15 bp, Homo sapiens
gctctttatatccat

SEQ ID NO: 1911051 - DNA, 15 bp, Homo sapiens
ctctttatatccata

SEQ ID NO: 1911052 - DNA, 15 bp, Homo sapiens
tctttatatccatat

SEQ ID NO: 1911053 - DNA, 15 bp, Homo sapiens
ctttatatccatatt

SEQ ID NO: 1911054 - DNA, 15 bp, Homo sapiens
tttatatccatattt

SEQ ID NO: 1911055 - DNA, 15 bp, Homo sapiens
ttatatccatatttg

SEQ ID NO: 1911056 - DNA, 15 bp, Homo sapiens
tatatccatatttgt

SEQ ID NO: 1911057 - DNA, 15 bp, Homo sapiens
atatccatatttgta

SEQ ID NO: 1911058 - DNA, 15 bp, Homo sapiens
tatccatatttgtat

SEQ ID NO: 1911059 - DNA, 15 bp, Homo sapiens
atccatatttgtatg

SEQ ID NO: 1911060 - DNA, 15 bp, Homo sapiens
tccatatttgtatgt

SEQ ID NO: 1911061 - DNA, 15 bp, Homo sapiens
ccatatttgtatgtg

SEQ ID NO: 1911062 - DNA, 15 bp, Homo sapiens
catatttgtatgtgc

SEQ ID NO: 1911063 - DNA, 15 bp, Homo sapiens
atatttgtatgtgca

SEQ ID NO: 1911064 - DNA, 15 bp, Homo sapiens
tatttgtatgtgcat

SEQ ID NO: 1911065 - DNA, 15 bp, Homo sapiens
atttgtatgtgcatg

SEQ ID NO: 1911066 - DNA, 15 bp, Homo sapiens
tttgtatgtgcatgg

SEQ ID NO: 1911067 - DNA, 15 bp, Homo sapiens
ttgtatgtgcatggc

SEQ ID NO: 1911068 - DNA, 15 bp, Homo sapiens
tgtatgtgcatggcc

SEQ ID NO: 1911069 - DNA, 15 bp, Homo sapiens
gtatgtgcatggcct

SEQ ID NO: 1911070 - DNA, 15 bp, Homo sapiens
tatgtgcatggcctc

SEQ ID NO: 1911071 - DNA, 15 bp, Homo sapiens
atgtgcatggcctca

SEQ ID NO: 1911072 - DNA, 15 bp, Homo sapiens
tgtgcatggcctcaa

SEQ ID NO: 1911073 - DNA, 15 bp, Homo sapiens
gtgcatggcctcaaa

SEQ ID NO: 1911074 - DNA, 15 bp, Homo sapiens
tgcatggcctcaaaa

SEQ ID NO: 1911075 - DNA, 15 bp, Homo sapiens
gcatggcctcaaaaa

SEQ ID NO: 1911076 - DNA, 15 bp, Homo sapiens
catggcctcaaaaat

SEQ ID NO: 1911077 - DNA, 15 bp, Homo sapiens
atggcctcaaaaata

SEQ ID NO: 1911078 - DNA, 15 bp, Homo sapiens
tggcctcaaaaataa

SEQ ID NO: 1911079 - DNA, 15 bp, Homo sapiens
ggcctcaaaaataat

SEQ ID NO: 1911080 - DNA, 15 bp, Homo sapiens
gcctcaaaaataatt

SEQ ID NO: 1911081 - DNA, 15 bp, Homo sapiens
cctcaaaaataattt

SEQ ID NO: 1911082 - DNA, 15 bp, Homo sapiens
ctcaaaaataatttg

SEQ ID NO: 1911083 - DNA, 15 bp, Homo sapiens
tcaaaaataatttgt

SEQ ID NO: 1911084 - DNA, 15 bp, Homo sapiens
caaaaataatttgtt

SEQ ID NO: 1911085 - DNA, 15 bp, Homo sapiens
aaaaataatttgttt

SEQ ID NO: 1911086 - DNA, 15 bp, Homo sapiens
aaaataatttgttta

SEQ ID NO: 1911087 - DNA, 15 bp, Homo sapiens
aaataatttgtttat

SEQ ID NO: 1911088 - DNA, 15 bp, Homo sapiens
aataatttgtttatg

SEQ ID NO: 1911089 - DNA, 15 bp, Homo sapiens
ataatttgtttatga

SEQ ID NO: 1911090 - DNA, 15 bp, Homo sapiens
taatttgtttatgaa

SEQ ID NO: 1911091 - DNA, 15 bp, Homo sapiens
aatttgtttatgaat

SEQ ID NO: 1911092 - DNA, 15 bp, Homo sapiens
atttgtttatgaatt

SEQ ID NO: 1911093 - DNA, 15 bp, Homo sapiens
tttgtttatgaatta

SEQ ID NO: 1911094 - DNA, 15 bp, Homo sapiens
ttgtttatgaattat

SEQ ID NO: 1911095 - DNA, 15 bp, Homo sapiens
tgtttatgaattatg

SEQ ID NO: 1911096 - DNA, 15 bp, Homo sapiens
gtttatgaattatgg

SEQ ID NO: 1911097 - DNA, 15 bp, Homo sapiens
tttatgaattatggg

SEQ ID NO: 1911098 - DNA, 15 bp, Homo sapiens
ttatgaattatgggc

SEQ ID NO: 1911099 - DNA, 15 bp, Homo sapiens
tatgaattatgggct

SEQ ID NO: 1911100 - DNA, 15 bp, Homo sapiens
atgaattatgggctg

SEQ ID NO: 1911101 - DNA, 15 bp, Homo sapiens
tgaattatgggctga

SEQ ID NO: 1911102 - DNA, 15 bp, Homo sapiens
gaattatgggctgac

SEQ ID NO: 1911103 - DNA, 15 bp, Homo sapiens
aattatgggctgacc

SEQ ID NO: 1911104 - DNA, 15 bp, Homo sapiens
attatgggctgaccc

SEQ ID NO: 1911105 - DNA, 15 bp, Homo sapiens
ttatgggctgacccc

SEQ ID NO: 1911106 - DNA, 15 bp, Homo sapiens
tatgggctgaccccc

SEQ ID NO: 1911107 - DNA, 15 bp, Homo sapiens
atgggctgaccccca

SEQ ID NO: 1911108 - DNA, 15 bp, Homo sapiens
tgggctgacccccaa

SEQ ID NO: 1911109 - DNA, 15 bp, Homo sapiens
gggctgacccccaat

SEQ ID NO: 1911110 - DNA, 15 bp, Homo sapiens
ggctgacccccaata

SEQ ID NO: 1911111 - DNA, 15 bp, Homo sapiens
gctgacccccaatat

SEQ ID NO: 1911112 - DNA, 15 bp, Homo sapiens
ctgacccccaatatc

SEQ ID NO: 1911113 - DNA, 15 bp, Homo sapiens
tgacccccaatatca

SEQ ID NO: 1911114 - DNA, 15 bp, Homo sapiens
gacccccaatatcaa

SEQ ID NO: 1911115 - DNA, 15 bp, Homo sapiens
acccccaatatcaaa

SEQ ID NO: 1911116 - DNA, 15 bp, Homo sapiens
cccccaatatcaaac

SEQ ID NO: 1911117 - DNA, 15 bp, Homo sapiens
ccccaatatcaaact

SEQ ID NO: 1911118 - DNA, 15 bp, Homo sapiens
cccaatatcaaactt

SEQ ID NO: 1911119 - DNA, 15 bp, Homo sapiens
ccaatatcaaacttc

SEQ ID NO: 1911120 - DNA, 15 bp, Homo sapiens
caatatcaaacttca

SEQ ID NO: 1911121 - DNA, 15 bp, Homo sapiens
aatatcaaacttcaa

SEQ ID NO: 1911122 - DNA, 15 bp, Homo sapiens
atatcaaacttcaag

SEQ ID NO: 1911123 - DNA, 15 bp, Homo sapiens
tatcaaacttcaaga

SEQ ID NO: 1911124 - DNA, 15 bp, Homo sapiens
atcaaacttcaagaa

SEQ ID NO: 1911125 - DNA, 15 bp, Homo sapiens
tcaaacttcaagaaa

SEQ ID NO: 1911126 - DNA, 15 bp, Homo sapiens
aaacttcaagaaact

SEQ ID NO: 1911127 - DNA, 15 bp, Homo sapiens
aacttcaagaaacta

SEQ ID NO: 1911128 - DNA, 15 bp, Homo sapiens
acttcaagaaactac

SEQ ID NO: 1911129 - DNA, 15 bp, Homo sapiens
cttcaagaaactaca

SEQ ID NO: 1911130 - DNA, 15 bp, Homo sapiens
ttcaagaaactacat

SEQ ID NO: 1911131 - DNA, 15 bp, Homo sapiens
tcaagaaactacata

SEQ ID NO: 1911132 - DNA, 15 bp, Homo sapiens
caagaaactacataa

SEQ ID NO: 1911133 - DNA, 15 bp, Homo sapiens
aagaaactacataaa

SEQ ID NO: 1911134 - DNA, 15 bp, Homo sapiens
agaaactacataaaa

SEQ ID NO: 1911135 - DNA, 15 bp, Homo sapiens
gaaactacataaaag

SEQ ID NO: 1911136 - DNA, 15 bp, Homo sapiens
aaactacataaaagg

SEQ ID NO: 1911137 - DNA, 15 bp, Homo sapiens
aactacataaaagga

SEQ ID NO: 1911138 - DNA, 15 bp, Homo sapiens
actacataaaaggag

SEQ ID NO: 1911139 - DNA, 15 bp, Homo sapiens
ctacataaaaggagc

SEQ ID NO: 1911140 - DNA, 15 bp, Homo sapiens
tacataaaaggagct

SEQ ID NO: 1911141 - DNA, 15 bp, Homo sapiens
acataaaaggagctc

SEQ ID NO: 1911142 - DNA, 15 bp, Homo sapiens
cataaaaggagctca

SEQ ID NO: 1911143 - DNA, 15 bp, Homo sapiens
ataaaaggagctcaa

SEQ ID NO: 1911144 - DNA, 15 bp, Homo sapiens
taaaaggagctcaaa

SEQ ID NO: 1911145 - DNA, 15 bp, Homo sapiens
aaaaggagctcaaaa

SEQ ID NO: 1911146 - DNA, 15 bp, Homo sapiens
aaaggagctcaaaat

SEQ ID NO: 1911147 - DNA, 15 bp, Homo sapiens
aaggagctcaaaata

SEQ ID NO: 1911148 - DNA, 15 bp, Homo sapiens
aggagctcaaaataa

SEQ ID NO: 1911149 - DNA, 15 bp, Homo sapiens
ggagctcaaaataaa

SEQ ID NO: 1911150 - DNA, 15 bp, Homo sapiens
gagctcaaaataaaa

SEQ ID NO: 1911151 - DNA, 15 bp, Homo sapiens
agctcaaaataaaat

SEQ ID NO: 1911152 - DNA, 15 bp, Homo sapiens
gctcaaaataaaatt

SEQ ID NO: 1911153 - DNA, 15 bp, Homo sapiens
ctcaaaataaaattt

SEQ ID NO: 1911154 - DNA, 15 bp, Homo sapiens
tcaaaataaaatttt

SEQ ID NO: 1911155 - DNA, 15 bp, Homo sapiens
caaaataaaatttta

SEQ ID NO: 1911156 - DNA, 15 bp, Homo sapiens
aaaataaaattttac

SEQ ID NO: 1911157 - DNA, 15 bp, Homo sapiens
aaataaaattttact

SEQ ID NO: 1911158 - DNA, 15 bp, Homo sapiens
aataaaattttacta

SEQ ID NO: 1911159 - DNA, 15 bp, Homo sapiens
ataaaattttactag

SEQ ID NO: 1911160 - DNA, 15 bp, Homo sapiens
taaaattttactagg

SEQ ID NO: 1911161 - DNA, 15 bp, Homo sapiens
aaaattttactaggt

SEQ ID NO: 1911162 - DNA, 15 bp, Homo sapiens
aaattttactaggtt

SEQ ID NO: 1911163 - DNA, 15 bp, Homo sapiens
aattttactaggttg

SEQ ID NO: 1911164 - DNA, 15 bp, Homo sapiens
attttactaggttga

SEQ ID NO: 1911165 - DNA, 15 bp, Homo sapiens
ttttactaggttgac

SEQ ID NO: 1911166 - DNA, 15 bp, Homo sapiens
tttactaggttgact

SEQ ID NO: 1911167 - DNA, 15 bp, Homo sapiens
ttactaggttgacta

SEQ ID NO: 1911168 - DNA, 15 bp, Homo sapiens
tactaggttgactaa

SEQ ID NO: 1911169 - DNA, 15 bp, Homo sapiens
actaggttgactaat

SEQ ID NO: 1911170 - DNA, 15 bp, Homo sapiens
ctaggttgactaatg

SEQ ID NO: 1911171 - DNA, 15 bp, Homo sapiens
taggttgactaatgc

SEQ ID NO: 1911172 - DNA, 15 bp, Homo sapiens
aggttgactaatgct

SEQ ID NO: 1911173 - DNA, 15 bp, Homo sapiens
ggttgactaatgctt

SEQ ID NO: 1911174 - DNA, 15 bp, Homo sapiens
gttgactaatgcttg

SEQ ID NO: 1911175 - DNA, 15 bp, Homo sapiens
ttgactaatgcttgg

SEQ ID NO: 1911176 - DNA, 15 bp, Homo sapiens
tgactaatgcttggc

SEQ ID NO: 1911177 - DNA, 15 bp, Homo sapiens
gactaatgcttggcg

SEQ ID NO: 1911178 - DNA, 15 bp, Homo sapiens
actaatgcttggcgt

SEQ ID NO: 1911179 - DNA, 15 bp, Homo sapiens
ctaatgcttggcgta

SEQ ID NO: 1911180 - DNA, 15 bp, Homo sapiens
taatgcttggcgtaa

SEQ ID NO: 1911181 - DNA, 15 bp, Homo sapiens
aatgcttggcgtaaa

SEQ ID NO: 1911182 - DNA, 15 bp, Homo sapiens
atgcttggcgtaaaa

SEQ ID NO: 1911183 - DNA, 15 bp, Homo sapiens
tgcttggcgtaaaat

SEQ ID NO: 1911184 - DNA, 15 bp, Homo sapiens
gcttggcgtaaaatt

SEQ ID NO: 1911185 - DNA, 15 bp, Homo sapiens
cttggcgtaaaattg

SEQ ID NO: 1911186 - DNA, 15 bp, Homo sapiens
ttggcgtaaaattga

SEQ ID NO: 1911187 - DNA, 15 bp, Homo sapiens
tggcgtaaaattgat

SEQ ID NO: 1911188 - DNA, 15 bp, Homo sapiens
ggcgtaaaattgatt

SEQ ID NO: 1911189 - DNA, 15 bp, Homo sapiens
gcgtaaaattgattg

SEQ ID NO: 1911190 - DNA, 15 bp, Homo sapiens
cgtaaaattgattga

SEQ ID NO: 1911191 - DNA, 15 bp, Homo sapiens
gtaaaattgattgaa

SEQ ID NO: 1911192 - DNA, 15 bp, Homo sapiens
taaaattgattgaag

SEQ ID NO: 1911193 - DNA, 15 bp, Homo sapiens
aaaattgattgaagc

SEQ ID NO: 1911194 - DNA, 15 bp, Homo sapiens
aaattgattgaagcc

SEQ ID NO: 1911195 - DNA, 15 bp, Homo sapiens
aattgattgaagcct

SEQ ID NO: 1911196 - DNA, 15 bp, Homo sapiens
attgattgaagcctt

SEQ ID NO: 1911197 - DNA, 15 bp, Homo sapiens
ttgattgaagcctta

SEQ ID NO: 1911198 - DNA, 15 bp, Homo sapiens
tgattgaagccttac

SEQ ID NO: 1911199 - DNA, 15 bp, Homo sapiens
gattgaagccttact

SEQ ID NO: 1911200 - DNA, 15 bp, Homo sapiens
attgaagccttacta

SEQ ID NO: 1911201 - DNA, 15 bp, Homo sapiens
ttgaagccttactaa

SEQ ID NO: 1911202 - DNA, 15 bp, Homo sapiens
tgaagccttactaaa

SEQ ID NO: 1911203 - DNA, 15 bp, Homo sapiens
gaagccttactaaac

SEQ ID NO: 1911204 - DNA, 15 bp, Homo sapiens
aagccttactaaaca

SEQ ID NO: 1911205 - DNA, 15 bp, Homo sapiens
agccttactaaacaa

SEQ ID NO: 1911206 - DNA, 15 bp, Homo sapiens
gccttactaaacaat

SEQ ID NO: 1911207 - DNA, 15 bp, Homo sapiens
ccttactaaacaatt

SEQ ID NO: 1911208 - DNA, 15 bp, Homo sapiens
cttactaaacaattg

SEQ ID NO: 1911209 - DNA, 15 bp, Homo sapiens
ttactaaacaattga

SEQ ID NO: 1911210 - DNA, 15 bp, Homo sapiens
tactaaacaattgaa

SEQ ID NO: 1911211 - DNA, 15 bp, Homo sapiens
actaaacaattgaaa

SEQ ID NO: 1911212 - DNA, 15 bp, Homo sapiens
ctaaacaattgaaaa

SEQ ID NO: 1911213 - DNA, 15 bp, Homo sapiens
taaacaattgaaaat

SEQ ID NO: 1911214 - DNA, 15 bp, Homo sapiens
aaacaattgaaaata

SEQ ID NO: 1911215 - DNA, 15 bp, Homo sapiens
aacaattgaaaatat

SEQ ID NO: 1911216 - DNA, 15 bp, Homo sapiens
acaattgaaaatatt

SEQ ID NO: 1911217 - DNA, 15 bp, Homo sapiens
caattgaaaatattt

SEQ ID NO: 1911218 - DNA, 15 bp, Homo sapiens
aattgaaaatatttt

SEQ ID NO: 1911219 - DNA, 15 bp, Homo sapiens
attgaaaatattttg

SEQ ID NO: 1911220 - DNA, 15 bp, Homo sapiens
ttgaaaatattttgt

SEQ ID NO: 1911221 - DNA, 15 bp, Homo sapiens
tgaaaatattttgtt

SEQ ID NO: 1911222 - DNA, 15 bp, Homo sapiens
gaaaatattttgttt

SEQ ID NO: 1911223 - DNA, 15 bp, Homo sapiens
aaatattttgtttac

SEQ ID NO: 1911224 - DNA, 15 bp, Homo sapiens
aatattttgtttaca

SEQ ID NO: 1911225 - DNA, 15 bp, Homo sapiens
atattttgtttacaa

SEQ ID NO: 1911226 - DNA, 15 bp, Homo sapiens
tattttgtttacaag

SEQ ID NO: 1911227 - DNA, 15 bp, Homo sapiens
attttgtttacaaga

SEQ ID NO: 1911228 - DNA, 15 bp, Homo sapiens
ttttgtttacaagat

SEQ ID NO: 1911229 - DNA, 15 bp, Homo sapiens
tttgtttacaagata

SEQ ID NO: 1911230 - DNA, 15 bp, Homo sapiens
ttgtttacaagatat

SEQ ID NO: 1911231 - DNA, 15 bp, Homo sapiens
tgtttacaagatatt

SEQ ID NO: 1911232 - DNA, 15 bp, Homo sapiens
gtttacaagatattt

SEQ ID NO: 1911233 - DNA, 15 bp, Homo sapiens
tttacaagatattta

SEQ ID NO: 1911234 - DNA, 15 bp, Homo sapiens
ttacaagatatttat

SEQ ID NO: 1911235 - DNA, 15 bp, Homo sapiens
tacaagatatttatc

SEQ ID NO: 1911236 - DNA, 15 bp, Homo sapiens
acaagatatttatca

SEQ ID NO: 1911237 - DNA, 15 bp, Homo sapiens
caagatatttatcac

SEQ ID NO: 1911238 - DNA, 15 bp, Homo sapiens
aagatatttatcaca

SEQ ID NO: 1911239 - DNA, 15 bp, Homo sapiens
agatatttatcacaa

SEQ ID NO: 1911240 - DNA, 15 bp, Homo sapiens
gatatttatcacaaa

SEQ ID NO: 1911241 - DNA, 15 bp, Homo sapiens
atatttatcacaaac

SEQ ID NO: 1911242 - DNA, 15 bp, Homo sapiens
tatttatcacaaaca

SEQ ID NO: 1911243 - DNA, 15 bp, Homo sapiens
atttatcacaaacac

SEQ ID NO: 1911244 - DNA, 15 bp, Homo sapiens
tttatcacaaacact

SEQ ID NO: 1911245 - DNA, 15 bp, Homo sapiens
ttatcacaaacactt

SEQ ID NO: 1911246 - DNA, 15 bp, Homo sapiens
tatcacaaacacttt

SEQ ID NO: 1911247 - DNA, 15 bp, Homo sapiens
atcacaaacactttt

SEQ ID NO: 1911248 - DNA, 15 bp, Homo sapiens
tcacaaacacttttg

SEQ ID NO: 1911249 - DNA, 15 bp, Homo sapiens
cacaaacacttttgt

SEQ ID NO: 1911250 - DNA, 15 bp, Homo sapiens
acaaacacttttgtt

SEQ ID NO: 1911251 - DNA, 15 bp, Homo sapiens
caaacacttttgtta

SEQ ID NO: 1911252 - DNA, 15 bp, Homo sapiens
aaacacttttgttat

SEQ ID NO: 1911253 - DNA, 15 bp, Homo sapiens
aacacttttgttata

SEQ ID NO: 1911254 - DNA, 15 bp, Homo sapiens
acacttttgttatac

SEQ ID NO: 1911255 - DNA, 15 bp, Homo sapiens
cacttttgttatact

SEQ ID NO: 1911256 - DNA, 15 bp, Homo sapiens
acttttgttatactt

SEQ ID NO: 1911257 - DNA, 15 bp, Homo sapiens
cttttgttatacttg

SEQ ID NO: 1911258 - DNA, 15 bp, Homo sapiens
ttttgttatacttgg

SEQ ID NO: 1911259 - DNA, 15 bp, Homo sapiens
tttgttatacttgga

SEQ ID NO: 1911260 - DNA, 15 bp, Homo sapiens
ttgttatacttggat

SEQ ID NO: 1911261 - DNA, 15 bp, Homo sapiens
tgttatacttggatt

SEQ ID NO: 1911262 - DNA, 15 bp, Homo sapiens
gttatacttggattt

SEQ ID NO: 1911263 - DNA, 15 bp, Homo sapiens
ttatacttggatttg

SEQ ID NO: 1911264 - DNA, 15 bp, Homo sapiens
tatacttggatttgc

SEQ ID NO: 1911265 - DNA, 15 bp, Homo sapiens
atacttggatttgcc

SEQ ID NO: 1911266 - DNA, 15 bp, Homo sapiens
tacttggatttgccc

SEQ ID NO: 1911267 - DNA, 15 bp, Homo sapiens
acttggatttgccct

SEQ ID NO: 1911268 - DNA, 15 bp, Homo sapiens
cttggatttgccctg

SEQ ID NO: 1911269 - DNA, 15 bp, Homo sapiens
ttggatttgccctgt

SEQ ID NO: 1911270 - DNA, 15 bp, Homo sapiens
tggatttgccctgta

SEQ ID NO: 1911271 - DNA, 15 bp, Homo sapiens
ggatttgccctgtag

SEQ ID NO: 1911272 - DNA, 15 bp, Homo sapiens
gatttgccctgtaga

SEQ ID NO: 1911273 - DNA, 15 bp, Homo sapiens
atttgccctgtagat

SEQ ID NO: 1911274 - DNA, 15 bp, Homo sapiens
tttgccctgtagatt

SEQ ID NO: 1911275 - DNA, 15 bp, Homo sapiens
ttgccctgtagattt

SEQ ID NO: 1911276 - DNA, 15 bp, Homo sapiens
tgccctgtagattta

SEQ ID NO: 1911277 - DNA, 15 bp, Homo sapiens
gccctgtagatttat

SEQ ID NO: 1911278 - DNA, 15 bp, Homo sapiens
ccctgtagatttatt

SEQ ID NO: 1911279 - DNA, 15 bp, Homo sapiens
cctgtagatttatta

SEQ ID NO: 1911280 - DNA, 15 bp, Homo sapiens
ctgtagatttattaa

SEQ ID NO: 1911281 - DNA, 15 bp, Homo sapiens
tgtagatttattaat

SEQ ID NO: 1911282 - DNA, 15 bp, Homo sapiens
gtagatttattaata

SEQ ID NO: 1911283 - DNA, 15 bp, Homo sapiens
tagatttattaataa

SEQ ID NO: 1911284 - DNA, 15 bp, Homo sapiens
agatttattaataac

SEQ ID NO: 1911285 - DNA, 15 bp, Homo sapiens
gatttattaataact

SEQ ID NO: 1911286 - DNA, 15 bp, Homo sapiens
atttattaataactt

SEQ ID NO: 1911287 - DNA, 15 bp, Homo sapiens
tttattaataacttc

SEQ ID NO: 1911288 - DNA, 15 bp, Homo sapiens
ttattaataacttct

SEQ ID NO: 1911289 - DNA, 15 bp, Homo sapiens
tattaataacttcta

SEQ ID NO: 1911290 - DNA, 15 bp, Homo sapiens
attaataacttctat

SEQ ID NO: 1911291 - DNA, 15 bp, Homo sapiens
ttaataacttctatt

SEQ ID NO: 1911292 - DNA, 15 bp, Homo sapiens
taataacttctattc

SEQ ID NO: 1911293 - DNA, 15 bp, Homo sapiens
aataacttctattct

SEQ ID NO: 1911294 - DNA, 15 bp, Homo sapiens
ataacttctattctc

SEQ ID NO: 1911295 - DNA, 15 bp, Homo sapiens
taacttctattctcc

SEQ ID NO: 1911296 - DNA, 15 bp, Homo sapiens
aacttctattctcca

SEQ ID NO: 1911297 - DNA, 15 bp, Homo sapiens
acttctattctccaa

SEQ ID NO: 1911298 - DNA, 15 bp, Homo sapiens
cttctattctccaaa

SEQ ID NO: 1911299 - DNA, 15 bp, Homo sapiens
ttctattctccaaag

SEQ ID NO: 1911300 - DNA, 15 bp, Homo sapiens
tctattctccaaagg

SEQ ID NO: 1911301 - DNA, 15 bp, Homo sapiens
ctattctccaaaggc

SEQ ID NO: 1911302 - DNA, 15 bp, Homo sapiens
tattctccaaaggct

SEQ ID NO: 1911303 - DNA, 15 bp, Homo sapiens
attctccaaaggctt

SEQ ID NO: 1911304 - DNA, 15 bp, Homo sapiens
ttctccaaaggcttt

SEQ ID NO: 1911305 - DNA, 15 bp, Homo sapiens
tctccaaaggctttg

SEQ ID NO: 1911306 - DNA, 15 bp, Homo sapiens
ctccaaaggctttga

SEQ ID NO: 1911307 - DNA, 15 bp, Homo sapiens
tccaaaggctttgaa

SEQ ID NO: 1911308 - DNA, 15 bp, Homo sapiens
ccaaaggctttgaac

SEQ ID NO: 1911309 - DNA, 15 bp, Homo sapiens
caaaggctttgaaca

SEQ ID NO: 1911310 - DNA, 15 bp, Homo sapiens
aaaggctttgaacag

SEQ ID NO: 1911311 - DNA, 15 bp, Homo sapiens
aaggctttgaacaga

SEQ ID NO: 1911312 - DNA, 15 bp, Homo sapiens
aggctttgaacagaa

SEQ ID NO: 1911313 - DNA, 15 bp, Homo sapiens
ggctttgaacagaat

SEQ ID NO: 1911314 - DNA, 15 bp, Homo sapiens
gctttgaacagaatg

SEQ ID NO: 1911315 - DNA, 15 bp, Homo sapiens
ctttgaacagaatgt

SEQ ID NO: 1911316 - DNA, 15 bp, Homo sapiens
tttgaacagaatgtt

SEQ ID NO: 1911317 - DNA, 15 bp, Homo sapiens
ttgaacagaatgttc

SEQ ID NO: 1911318 - DNA, 15 bp, Homo sapiens
tgaacagaatgttcc

SEQ ID NO: 1911319 - DNA, 15 bp, Homo sapiens
gaacagaatgttccc

SEQ ID NO: 1911320 - DNA, 15 bp, Homo sapiens
aacagaatgttccct

SEQ ID NO: 1911321 - DNA, 15 bp, Homo sapiens
acagaatgttcccta

SEQ ID NO: 1911322 - DNA, 15 bp, Homo sapiens
cagaatgttccctat

SEQ ID NO: 1911323 - DNA, 15 bp, Homo sapiens
agaatgttccctata

SEQ ID NO: 1911324 - DNA, 15 bp, Homo sapiens
gaatgttccctatat

SEQ ID NO: 1911325 - DNA, 15 bp, Homo sapiens
aatgttccctatata

SEQ ID NO: 1911326 - DNA, 15 bp, Homo sapiens
atgttccctatatat

SEQ ID NO: 1911327 - DNA, 15 bp, Homo sapiens
tgttccctatatata

SEQ ID NO: 1911328 - DNA, 15 bp, Homo sapiens
gttccctatatatag

SEQ ID NO: 1911329 - DNA, 15 bp, Homo sapiens
ttccctatatatagt

SEQ ID NO: 1911330 - DNA, 15 bp, Homo sapiens
tccctatatatagta

SEQ ID NO: 1911331 - DNA, 15 bp, Homo sapiens
ccctatatatagtaa

SEQ ID NO: 1911332 - DNA, 15 bp, Homo sapiens
cctatatatagtaaa

SEQ ID NO: 1911333 - DNA, 15 bp, Homo sapiens
ctatatatagtaaag

SEQ ID NO: 1911334 - DNA, 15 bp, Homo sapiens
tatatatagtaaaga

SEQ ID NO: 1911335 - DNA, 15 bp, Homo sapiens
atatatagtaaagac

SEQ ID NO: 1911336 - DNA, 15 bp, Homo sapiens
tatatagtaaagact

SEQ ID NO: 1911337 - DNA, 15 bp, Homo sapiens
atatagtaaagactg

SEQ ID NO: 1911338 - DNA, 15 bp, Homo sapiens
tatagtaaagactgc

SEQ ID NO: 1911339 - DNA, 15 bp, Homo sapiens
atagtaaagactgca

SEQ ID NO: 1911340 - DNA, 15 bp, Homo sapiens
tagtaaagactgcac

SEQ ID NO: 1911341 - DNA, 15 bp, Homo sapiens
agtaaagactgcaca

SEQ ID NO: 1911342 - DNA, 15 bp, Homo sapiens
gtaaagactgcacat

SEQ ID NO: 1911343 - DNA, 15 bp, Homo sapiens
taaagactgcacata

SEQ ID NO: 1911344 - DNA, 15 bp, Homo sapiens
aaagactgcacatat

SEQ ID NO: 1911345 - DNA, 15 bp, Homo sapiens
aagactgcacatatc

SEQ ID NO: 1911346 - DNA, 15 bp, Homo sapiens
agactgcacatatct

SEQ ID NO: 1911347 - DNA, 15 bp, Homo sapiens
gactgcacatatcta

SEQ ID NO: 1911348 - DNA, 15 bp, Homo sapiens
actgcacatatctac

SEQ ID NO: 1911349 - DNA, 15 bp, Homo sapiens
ctgcacatatctact

SEQ ID NO: 1911350 - DNA, 15 bp, Homo sapiens
tgcacatatctacta

SEQ ID NO: 1911351 - DNA, 15 bp, Homo sapiens
gcacatatctactat

SEQ ID NO: 1911352 - DNA, 15 bp, Homo sapiens
cacatatctactatt

SEQ ID NO: 1911353 - DNA, 15 bp, Homo sapiens
acatatctactattt

SEQ ID NO: 1911354 - DNA, 15 bp, Homo sapiens
catatctactatttg

SEQ ID NO: 1911355 - DNA, 15 bp, Homo sapiens
atatctactatttgt

SEQ ID NO: 1911356 - DNA, 15 bp, Homo sapiens
tatctactatttgtt

SEQ ID NO: 1911357 - DNA, 15 bp, Homo sapiens
atctactatttgtta

SEQ ID NO: 1911358 - DNA, 15 bp, Homo sapiens
tctactatttgttat

SEQ ID NO: 1911359 - DNA, 15 bp, Homo sapiens
ctactatttgttatt

SEQ ID NO: 1911360 - DNA, 15 bp, Homo sapiens
tactatttgttattg

SEQ ID NO: 1911361 - DNA, 15 bp, Homo sapiens
actatttgttattgt

SEQ ID NO: 1911362 - DNA, 15 bp, Homo sapiens
ctatttgttattgtc

SEQ ID NO: 1911363 - DNA, 15 bp, Homo sapiens
tatttgttattgtca

SEQ ID NO: 1911364 - DNA, 15 bp, Homo sapiens
atttgttattgtcaa

SEQ ID NO: 1911365 - DNA, 15 bp, Homo sapiens
tttgttattgtcaac

SEQ ID NO: 1911366 - DNA, 15 bp, Homo sapiens
ttgttattgtcaaca

SEQ ID NO: 1911367 - DNA, 15 bp, Homo sapiens
tgttattgtcaacat

SEQ ID NO: 1911368 - DNA, 15 bp, Homo sapiens
gttattgtcaacatg

SEQ ID NO: 1911369 - DNA, 15 bp, Homo sapiens
ttattgtcaacatgt

SEQ ID NO: 1911370 - DNA, 15 bp, Homo sapiens
tattgtcaacatgtg

SEQ ID NO: 1911371 - DNA, 15 bp, Homo sapiens
attgtcaacatgtgg

SEQ ID NO: 1911372 - DNA, 15 bp, Homo sapiens
ttgtcaacatgtggt

SEQ ID NO: 1911373 - DNA, 15 bp, Homo sapiens
tgtcaacatgtggtt

SEQ ID NO: 1911374 - DNA, 15 bp, Homo sapiens
gtcaacatgtggttc

SEQ ID NO: 1911375 - DNA, 15 bp, Homo sapiens
tcaacatgtggttca

SEQ ID NO: 1911376 - DNA, 15 bp, Homo sapiens
caacatgtggttcac

SEQ ID NO: 1911377 - DNA, 15 bp, Homo sapiens
aacatgtggttcacc

SEQ ID NO: 1911378 - DNA, 15 bp, Homo sapiens
acatgtggttcaccc

SEQ ID NO: 1911379 - DNA, 15 bp, Homo sapiens
catgtggttcaccct

SEQ ID NO: 1911380 - DNA, 15 bp, Homo sapiens
atgtggttcaccctg

SEQ ID NO: 1911381 - DNA, 15 bp, Homo sapiens
tgtggttcaccctga

SEQ ID NO: 1911382 - DNA, 15 bp, Homo sapiens
gtggttcaccctgaa

SEQ ID NO: 1911383 - DNA, 15 bp, Homo sapiens
tggttcaccctgaag

SEQ ID NO: 1911384 - DNA, 15 bp, Homo sapiens
ggttcaccctgaagc

SEQ ID NO: 1911385 - DNA, 15 bp, Homo sapiens
gttcaccctgaagcc

SEQ ID NO: 1911386 - DNA, 15 bp, Homo sapiens
ttcaccctgaagcca

SEQ ID NO: 1911387 - DNA, 15 bp, Homo sapiens
tcaccctgaagccaa

SEQ ID NO: 1911388 - DNA, 15 bp, Homo sapiens
caccctgaagccaag

SEQ ID NO: 1911389 - DNA, 15 bp, Homo sapiens
accctgaagccaaga

SEQ ID NO: 1911390 - DNA, 15 bp, Homo sapiens
ccctgaagccaagac

SEQ ID NO: 1911391 - DNA, 15 bp, Homo sapiens
cctgaagccaagact

SEQ ID NO: 1911392 - DNA, 15 bp, Homo sapiens
ctgaagccaagacta

SEQ ID NO: 1911393 - DNA, 15 bp, Homo sapiens
tgaagccaagactat

SEQ ID NO: 1911394 - DNA, 15 bp, Homo sapiens
gaagccaagactatc

SEQ ID NO: 1911395 - DNA, 15 bp, Homo sapiens
aagccaagactatct

SEQ ID NO: 1911396 - DNA, 15 bp, Homo sapiens
agccaagactatctc

SEQ ID NO: 1911397 - DNA, 15 bp, Homo sapiens
gccaagactatctca

SEQ ID NO: 1911398 - DNA, 15 bp, Homo sapiens
ccaagactatctcaa

SEQ ID NO: 1911399 - DNA, 15 bp, Homo sapiens
caagactatctcaac

SEQ ID NO: 1911400 - DNA, 15 bp, Homo sapiens
aagactatctcaaca

SEQ ID NO: 1911401 - DNA, 15 bp, Homo sapiens
agactatctcaacag

SEQ ID NO: 1911402 - DNA, 15 bp, Homo sapiens
gactatctcaacaga

SEQ ID NO: 1911403 - DNA, 15 bp, Homo sapiens
actatctcaacagac

SEQ ID NO: 1911404 - DNA, 15 bp, Homo sapiens
ctatctcaacagacc

SEQ ID NO: 1911405 - DNA, 15 bp, Homo sapiens
tatctcaacagacct

SEQ ID NO: 1911406 - DNA, 15 bp, Homo sapiens
atctcaacagacctt

SEQ ID NO: 1911407 - DNA, 15 bp, Homo sapiens
tctcaacagacctta

SEQ ID NO: 1911408 - DNA, 15 bp, Homo sapiens
ctcaacagaccttaa

SEQ ID NO: 1911409 - DNA, 15 bp, Homo sapiens
tcaacagaccttaaa

SEQ ID NO: 1911410 - DNA, 15 bp, Homo sapiens
caacagaccttaaat

SEQ ID NO: 1911411 - DNA, 15 bp, Homo sapiens
aacagaccttaaata

SEQ ID NO: 1911412 - DNA, 15 bp, Homo sapiens
acagaccttaaatat

SEQ ID NO: 1911413 - DNA, 15 bp, Homo sapiens
cagaccttaaatatg

SEQ ID NO: 1911414 - DNA, 15 bp, Homo sapiens
agaccttaaatatgg

SEQ ID NO: 1911415 - DNA, 15 bp, Homo sapiens
gaccttaaatatggt

SEQ ID NO: 1911416 - DNA, 15 bp, Homo sapiens
accttaaatatggtg

SEQ ID NO: 1911417 - DNA, 15 bp, Homo sapiens
ccttaaatatggtgc

SEQ ID NO: 1911418 - DNA, 15 bp, Homo sapiens
cttaaatatggtgct

SEQ ID NO: 1911419 - DNA, 15 bp, Homo sapiens
ttaaatatggtgctt

SEQ ID NO: 1911420 - DNA, 15 bp, Homo sapiens
taaatatggtgcttt

SEQ ID NO: 1911421 - DNA, 15 bp, Homo sapiens
aaatatggtgctttg

SEQ ID NO: 1911422 - DNA, 15 bp, Homo sapiens
aatatggtgctttgc

SEQ ID NO: 1911423 - DNA, 15 bp, Homo sapiens
atatggtgctttgcc

SEQ ID NO: 1911424 - DNA, 15 bp, Homo sapiens
tatggtgctttgcca

SEQ ID NO: 1911425 - DNA, 15 bp, Homo sapiens
atggtgctttgccag

SEQ ID NO: 1911426 - DNA, 15 bp, Homo sapiens
tggtgctttgccagg

SEQ ID NO: 1911427 - DNA, 15 bp, Homo sapiens
ggtgctttgccagga

SEQ ID NO: 1911428 - DNA, 15 bp, Homo sapiens
gtgctttgccaggac

SEQ ID NO: 1911429 - DNA, 15 bp, Homo sapiens
tgctttgccaggaca

SEQ ID NO: 1911430 - DNA, 15 bp, Homo sapiens
gctttgccaggacac

SEQ ID NO: 1911431 - DNA, 15 bp, Homo sapiens
ctttgccaggacaca

SEQ ID NO: 1911432 - DNA, 15 bp, Homo sapiens
tttgccaggacacac

SEQ ID NO: 1911433 - DNA, 15 bp, Homo sapiens
ttgccaggacacacc

SEQ ID NO: 1911434 - DNA, 15 bp, Homo sapiens
tgccaggacacacca

SEQ ID NO: 1911435 - DNA, 15 bp, Homo sapiens
gccaggacacaccaa

SEQ ID NO: 1911436 - DNA, 15 bp, Homo sapiens
ccaggacacaccaag

SEQ ID NO: 1911437 - DNA, 15 bp, Homo sapiens
caggacacaccaagg

SEQ ID NO: 1911438 - DNA, 15 bp, Homo sapiens
aggacacaccaaggc

SEQ ID NO: 1911439 - DNA, 15 bp, Homo sapiens
ggacacaccaaggct

SEQ ID NO: 1911440 - DNA, 15 bp, Homo sapiens
gacacaccaaggcta

SEQ ID NO: 1911441 - DNA, 15 bp, Homo sapiens
acacaccaaggctag

SEQ ID NO: 1911442 - DNA, 15 bp, Homo sapiens
cacaccaaggctaga

SEQ ID NO: 1911443 - DNA, 15 bp, Homo sapiens
acaccaaggctagat

SEQ ID NO: 1911444 - DNA, 15 bp, Homo sapiens
caccaaggctagatc

SEQ ID NO: 1911445 - DNA, 15 bp, Homo sapiens
accaaggctagatca

SEQ ID NO: 1911446 - DNA, 15 bp, Homo sapiens
ccaaggctagatcag

SEQ ID NO: 1911447 - DNA, 15 bp, Homo sapiens
caaggctagatcagc

SEQ ID NO: 1911448 - DNA, 15 bp, Homo sapiens
aaggctagatcagct

SEQ ID NO: 1911449 - DNA, 15 bp, Homo sapiens
aggctagatcagctt

SEQ ID NO: 1911450 - DNA, 15 bp, Homo sapiens
ggctagatcagcttc

SEQ ID NO: 1911451 - DNA, 15 bp, Homo sapiens
gctagatcagcttca

SEQ ID NO: 1911452 - DNA, 15 bp, Homo sapiens
ctagatcagcttcaa

SEQ ID NO: 1911453 - DNA, 15 bp, Homo sapiens
tagatcagcttcaaa

SEQ ID NO: 1911454 - DNA, 15 bp, Homo sapiens
agatcagcttcaaac

SEQ ID NO: 1911455 - DNA, 15 bp, Homo sapiens
gatcagcttcaaact

SEQ ID NO: 1911456 - DNA, 15 bp, Homo sapiens
atcagcttcaaactt

SEQ ID NO: 1911457 - DNA, 15 bp, Homo sapiens
tcagcttcaaactta

SEQ ID NO: 1911458 - DNA, 15 bp, Homo sapiens
cagcttcaaacttat

SEQ ID NO: 1911459 - DNA, 15 bp, Homo sapiens
agcttcaaacttata

SEQ ID NO: 1911460 - DNA, 15 bp, Homo sapiens
gcttcaaacttataa

SEQ ID NO: 1911461 - DNA, 15 bp, Homo sapiens
cttcaaacttataaa

SEQ ID NO: 1911462 - DNA, 15 bp, Homo sapiens
ttcaaacttataaag

SEQ ID NO: 1911463 - DNA, 15 bp, Homo sapiens
tcaaacttataaagt

SEQ ID NO: 1911464 - DNA, 15 bp, Homo sapiens
caaacttataaagtc

SEQ ID NO: 1911465 - DNA, 15 bp, Homo sapiens
aaacttataaagtca

SEQ ID NO: 1911466 - DNA, 15 bp, Homo sapiens
aacttataaagtcaa

SEQ ID NO: 1911467 - DNA, 15 bp, Homo sapiens
acttataaagtcaaa

SEQ ID NO: 1911468 - DNA, 15 bp, Homo sapiens
cttataaagtcaaat

SEQ ID NO: 1911469 - DNA, 15 bp, Homo sapiens
ttataaagtcaaatt

SEQ ID NO: 1911470 - DNA, 15 bp, Homo sapiens
tataaagtcaaattc

SEQ ID NO: 1911471 - DNA, 15 bp, Homo sapiens
ataaagtcaaattcc

SEQ ID NO: 1911472 - DNA, 15 bp, Homo sapiens
taaagtcaaattcct

SEQ ID NO: 1911473 - DNA, 15 bp, Homo sapiens
aaagtcaaattcctg

SEQ ID NO: 1911474 - DNA, 15 bp, Homo sapiens
aagtcaaattcctgc

SEQ ID NO: 1911475 - DNA, 15 bp, Homo sapiens
agtcaaattcctgct

SEQ ID NO: 1911476 - DNA, 15 bp, Homo sapiens
gtcaaattcctgctc

SEQ ID NO: 1911477 - DNA, 15 bp, Homo sapiens
tcaaattcctgctct

SEQ ID NO: 1911478 - DNA, 15 bp, Homo sapiens
caaattcctgctcta

SEQ ID NO: 1911479 - DNA, 15 bp, Homo sapiens
aaattcctgctctac

SEQ ID NO: 1911480 - DNA, 15 bp, Homo sapiens
aattcctgctctaca

SEQ ID NO: 1911481 - DNA, 15 bp, Homo sapiens
attcctgctctacac

SEQ ID NO: 1911482 - DNA, 15 bp, Homo sapiens
ttcctgctctacacc

SEQ ID NO: 1911483 - DNA, 15 bp, Homo sapiens
tcctgctctacaccc

SEQ ID NO: 1911484 - DNA, 15 bp, Homo sapiens
cctgctctacaccca

SEQ ID NO: 1911485 - DNA, 15 bp, Homo sapiens
ctgctctacacccac

SEQ ID NO: 1911486 - DNA, 15 bp, Homo sapiens
tgctctacacccact

SEQ ID NO: 1911487 - DNA, 15 bp, Homo sapiens
gctctacacccactg

SEQ ID NO: 1911488 - DNA, 15 bp, Homo sapiens
ctctacacccactgt

SEQ ID NO: 1911489 - DNA, 15 bp, Homo sapiens
tctacacccactgtt

SEQ ID NO: 1911490 - DNA, 15 bp, Homo sapiens
ctacacccactgttg

SEQ ID NO: 1911491 - DNA, 15 bp, Homo sapiens
tacacccactgttgg

SEQ ID NO: 1911492 - DNA, 15 bp, Homo sapiens
acacccactgttggg

SEQ ID NO: 1911493 - DNA, 15 bp, Homo sapiens
cacccactgttgggc

SEQ ID NO: 1911494 - DNA, 15 bp, Homo sapiens
acccactgttgggca

SEQ ID NO: 1911495 - DNA, 15 bp, Homo sapiens
cccactgttgggcag

SEQ ID NO: 1911496 - DNA, 15 bp, Homo sapiens
ccactgttgggcagc

SEQ ID NO: 1911497 - DNA, 15 bp, Homo sapiens
cactgttgggcagca

SEQ ID NO: 1911498 - DNA, 15 bp, Homo sapiens
actgttgggcagcac

SEQ ID NO: 1911499 - DNA, 15 bp, Homo sapiens
ctgttgggcagcaca

SEQ ID NO: 1911500 - DNA, 15 bp, Homo sapiens
tgttgggcagcacac

SEQ ID NO: 1911501 - DNA, 15 bp, Homo sapiens
gttgggcagcacact

SEQ ID NO: 1911502 - DNA, 15 bp, Homo sapiens
ttgggcagcacactt

SEQ ID NO: 1911503 - DNA, 15 bp, Homo sapiens
tgggcagcacactta

SEQ ID NO: 1911504 - DNA, 15 bp, Homo sapiens
gggcagcacacttag

SEQ ID NO: 1911505 - DNA, 15 bp, Homo sapiens
ggcagcacacttagt

SEQ ID NO: 1911506 - DNA, 15 bp, Homo sapiens
gcagcacacttagtc

SEQ ID NO: 1911507 - DNA, 15 bp, Homo sapiens
cagcacacttagtca

SEQ ID NO: 1911508 - DNA, 15 bp, Homo sapiens
agcacacttagtcaa

SEQ ID NO: 1911509 - DNA, 15 bp, Homo sapiens
gcacacttagtcaaa

SEQ ID NO: 1911510 - DNA, 15 bp, Homo sapiens
cacacttagtcaaaa

SEQ ID NO: 1911511 - DNA, 15 bp, Homo sapiens
acacttagtcaaaac

SEQ ID NO: 1911512 - DNA, 15 bp, Homo sapiens
cacttagtcaaaact

SEQ ID NO: 1911513 - DNA, 15 bp, Homo sapiens
acttagtcaaaactg

SEQ ID NO: 1911514 - DNA, 15 bp, Homo sapiens
cttagtcaaaactga

SEQ ID NO: 1911515 - DNA, 15 bp, Homo sapiens
ttagtcaaaactgaa

SEQ ID NO: 1911516 - DNA, 15 bp, Homo sapiens
tagtcaaaactgaat

SEQ ID NO: 1911517 - DNA, 15 bp, Homo sapiens
agtcaaaactgaatt

SEQ ID NO: 1911518 - DNA, 15 bp, Homo sapiens
gtcaaaactgaattt

SEQ ID NO: 1911519 - DNA, 15 bp, Homo sapiens
tcaaaactgaatttg

SEQ ID NO: 1911520 - DNA, 15 bp, Homo sapiens
caaaactgaatttgt

SEQ ID NO: 1911521 - DNA, 15 bp, Homo sapiens
aaaactgaatttgta

SEQ ID NO: 1911522 - DNA, 15 bp, Homo sapiens
aaactgaatttgtag

SEQ ID NO: 1911523 - DNA, 15 bp, Homo sapiens
aactgaatttgtagt

SEQ ID NO: 1911524 - DNA, 15 bp, Homo sapiens
actgaatttgtagtc

SEQ ID NO: 1911525 - DNA, 15 bp, Homo sapiens
ctgaatttgtagtca

SEQ ID NO: 1911526 - DNA, 15 bp, Homo sapiens
tgaatttgtagtcat

SEQ ID NO: 1911527 - DNA, 15 bp, Homo sapiens
gaatttgtagtcata

SEQ ID NO: 1911528 - DNA, 15 bp, Homo sapiens
aatttgtagtcatac

SEQ ID NO: 1911529 - DNA, 15 bp, Homo sapiens
atttgtagtcatacc

SEQ ID NO: 1911530 - DNA, 15 bp, Homo sapiens
tttgtagtcataccc

SEQ ID NO: 1911531 - DNA, 15 bp, Homo sapiens
ttgtagtcatacccc

SEQ ID NO: 1911532 - DNA, 15 bp, Homo sapiens
tgtagtcatacccca

SEQ ID NO: 1911533 - DNA, 15 bp, Homo sapiens
gtagtcataccccag

SEQ ID NO: 1911534 - DNA, 15 bp, Homo sapiens
tagtcataccccaga

SEQ ID NO: 1911535 - DNA, 15 bp, Homo sapiens
agtcataccccagac

SEQ ID NO: 1911536 - DNA, 15 bp, Homo sapiens
gtcataccccagact

SEQ ID NO: 1911537 - DNA, 15 bp, Homo sapiens
tcataccccagactc

SEQ ID NO: 1911538 - DNA, 15 bp, Homo sapiens
cataccccagactca

SEQ ID NO: 1911539 - DNA, 15 bp, Homo sapiens
ataccccagactcat

SEQ ID NO: 1911540 - DNA, 15 bp, Homo sapiens
taccccagactcatt

SEQ ID NO: 1911541 - DNA, 15 bp, Homo sapiens
accccagactcattc

SEQ ID NO: 1911542 - DNA, 15 bp, Homo sapiens
ccccagactcattct

SEQ ID NO: 1911543 - DNA, 15 bp, Homo sapiens
cccagactcattctt

SEQ ID NO: 1911544 - DNA, 15 bp, Homo sapiens
ccagactcattcttc

SEQ ID NO: 1911545 - DNA, 15 bp, Homo sapiens
cagactcattcttcc

SEQ ID NO: 1911546 - DNA, 15 bp, Homo sapiens
agactcattcttcct

SEQ ID NO: 1911547 - DNA, 15 bp, Homo sapiens
gactcattcttcctc

SEQ ID NO: 1911548 - DNA, 15 bp, Homo sapiens
actcattcttcctcc

SEQ ID NO: 1911549 - DNA, 15 bp, Homo sapiens
ctcattcttcctcct

SEQ ID NO: 1911550 - DNA, 15 bp, Homo sapiens
tcattcttcctcctg

SEQ ID NO: 1911551 - DNA, 15 bp, Homo sapiens
cattcttcctcctga

SEQ ID NO: 1911552 - DNA, 15 bp, Homo sapiens
attcttcctcctgag

SEQ ID NO: 1911553 - DNA, 15 bp, Homo sapiens
ttcttcctcctgagc

SEQ ID NO: 1911554 - DNA, 15 bp, Homo sapiens
tcttcctcctgagct

SEQ ID NO: 1911555 - DNA, 15 bp, Homo sapiens
cttcctcctgagctc

SEQ ID NO: 1911556 - DNA, 15 bp, Homo sapiens
ttcctcctgagctct

SEQ ID NO: 1911557 - DNA, 15 bp, Homo sapiens
tcctcctgagctctc

SEQ ID NO: 1911558 - DNA, 15 bp, Homo sapiens
cctcctgagctctcc

SEQ ID NO: 1911559 - DNA, 15 bp, Homo sapiens
ctcctgagctctcca

SEQ ID NO: 1911560 - DNA, 15 bp, Homo sapiens
tcctgagctctccac

SEQ ID NO: 1911561 - DNA, 15 bp, Homo sapiens
cctgagctctccaca

SEQ ID NO: 1911562 - DNA, 15 bp, Homo sapiens
ctgagctctccacat

SEQ ID NO: 1911563 - DNA, 15 bp, Homo sapiens
tgagctctccacatc

SEQ ID NO: 1911564 - DNA, 15 bp, Homo sapiens
gagctctccacatca

SEQ ID NO: 1911565 - DNA, 15 bp, Homo sapiens
agctctccacatcag

SEQ ID NO: 1911566 - DNA, 15 bp, Homo sapiens
gctctccacatcagt

SEQ ID NO: 1911567 - DNA, 15 bp, Homo sapiens
ctctccacatcagtg

SEQ ID NO: 1911568 - DNA, 15 bp, Homo sapiens
tctccacatcagtga

SEQ ID NO: 1911569 - DNA, 15 bp, Homo sapiens
ctccacatcagtgaa

SEQ ID NO: 1911570 - DNA, 15 bp, Homo sapiens
tccacatcagtgaat

SEQ ID NO: 1911571 - DNA, 15 bp, Homo sapiens
ccacatcagtgaatt

SEQ ID NO: 1911572 - DNA, 15 bp, Homo sapiens
cacatcagtgaattg

SEQ ID NO: 1911573 - DNA, 15 bp, Homo sapiens
acatcagtgaattgt

SEQ ID NO: 1911574 - DNA, 15 bp, Homo sapiens
catcagtgaattgtc

SEQ ID NO: 1911575 - DNA, 15 bp, Homo sapiens
atcagtgaattgtcc

SEQ ID NO: 1911576 - DNA, 15 bp, Homo sapiens
tcagtgaattgtccc

SEQ ID NO: 1911577 - DNA, 15 bp, Homo sapiens
cagtgaattgtccct

SEQ ID NO: 1911578 - DNA, 15 bp, Homo sapiens
agtgaattgtccctc

SEQ ID NO: 1911579 - DNA, 15 bp, Homo sapiens
gtgaattgtccctca

SEQ ID NO: 1911580 - DNA, 15 bp, Homo sapiens
tgaattgtccctcat

SEQ ID NO: 1911581 - DNA, 15 bp, Homo sapiens
gaattgtccctcatt

SEQ ID NO: 1911582 - DNA, 15 bp, Homo sapiens
aattgtccctcattc

SEQ ID NO: 1911583 - DNA, 15 bp, Homo sapiens
attgtccctcattcc

SEQ ID NO: 1911584 - DNA, 15 bp, Homo sapiens
ttgtccctcattcca

SEQ ID NO: 1911585 - DNA, 15 bp, Homo sapiens
tgtccctcattccat

SEQ ID NO: 1911586 - DNA, 15 bp, Homo sapiens
gtccctcattccatt

SEQ ID NO: 1911587 - DNA, 15 bp, Homo sapiens
tccctcattccatta

SEQ ID NO: 1911588 - DNA, 15 bp, Homo sapiens
ccctcattccattat

SEQ ID NO: 1911589 - DNA, 15 bp, Homo sapiens
cctcattccattatt

SEQ ID NO: 1911590 - DNA, 15 bp, Homo sapiens
ctcattccattattc

SEQ ID NO: 1911591 - DNA, 15 bp, Homo sapiens
cattccattattctt

SEQ ID NO: 1911592 - DNA, 15 bp, Homo sapiens
attccattattctta

SEQ ID NO: 1911593 - DNA, 15 bp, Homo sapiens
ttccattattcttag

SEQ ID NO: 1911594 - DNA, 15 bp, Homo sapiens
tccattattcttagc

SEQ ID NO: 1911595 - DNA, 15 bp, Homo sapiens
ccattattcttagca

SEQ ID NO: 1911596 - DNA, 15 bp, Homo sapiens
cattattcttagcac

SEQ ID NO: 1911597 - DNA, 15 bp, Homo sapiens
attattcttagcact

SEQ ID NO: 1911598 - DNA, 15 bp, Homo sapiens
ttattcttagcacta

SEQ ID NO: 1911599 - DNA, 15 bp, Homo sapiens
tattcttagcactac

SEQ ID NO: 1911600 - DNA, 15 bp, Homo sapiens
attcttagcactacc

SEQ ID NO: 1911601 - DNA, 15 bp, Homo sapiens
ttcttagcactacca

SEQ ID NO: 1911602 - DNA, 15 bp, Homo sapiens
tcttagcactaccac

SEQ ID NO: 1911603 - DNA, 15 bp, Homo sapiens
cttagcactaccacc

SEQ ID NO: 1911604 - DNA, 15 bp, Homo sapiens
ttagcactaccaccc

SEQ ID NO: 1911605 - DNA, 15 bp, Homo sapiens
tagcactaccacccc

SEQ ID NO: 1911606 - DNA, 15 bp, Homo sapiens
agcactaccaccccc

SEQ ID NO: 1911607 - DNA, 15 bp, Homo sapiens
gcactaccaccccca

SEQ ID NO: 1911608 - DNA, 15 bp, Homo sapiens
cactaccacccccac

SEQ ID NO: 1911609 - DNA, 15 bp, Homo sapiens
actaccacccccacc

SEQ ID NO: 1911610 - DNA, 15 bp, Homo sapiens
ctaccacccccaccc

SEQ ID NO: 1911611 - DNA, 15 bp, Homo sapiens
taccacccccaccct

SEQ ID NO: 1911612 - DNA, 15 bp, Homo sapiens
accacccccaccctc

SEQ ID NO: 1911613 - DNA, 15 bp, Homo sapiens
cacccccaccctcaa

SEQ ID NO: 1911614 - DNA, 15 bp, Homo sapiens
acccccaccctcaat

SEQ ID NO: 1911615 - DNA, 15 bp, Homo sapiens
cccccaccctcaatt

SEQ ID NO: 1911616 - DNA, 15 bp, Homo sapiens
ccccaccctcaattc

SEQ ID NO: 1911617 - DNA, 15 bp, Homo sapiens
cccaccctcaattcc

SEQ ID NO: 1911618 - DNA, 15 bp, Homo sapiens
ccaccctcaattcct

SEQ ID NO: 1911619 - DNA, 15 bp, Homo sapiens
caccctcaattcctc

SEQ ID NO: 1911620 - DNA, 15 bp, Homo sapiens
accctcaattcctct

SEQ ID NO: 1911621 - DNA, 15 bp, Homo sapiens
ccctcaattcctctc

SEQ ID NO: 1911622 - DNA, 15 bp, Homo sapiens
cctcaattcctctca

SEQ ID NO: 1911623 - DNA, 15 bp, Homo sapiens
ctcaattcctctcag

SEQ ID NO: 1911624 - DNA, 15 bp, Homo sapiens
tcaattcctctcagg

SEQ ID NO: 1911625 - DNA, 15 bp, Homo sapiens
caattcctctcaggt

SEQ ID NO: 1911626 - DNA, 15 bp, Homo sapiens
aattcctctcaggta

SEQ ID NO: 1911627 - DNA, 15 bp, Homo sapiens
attcctctcaggtag

SEQ ID NO: 1911628 - DNA, 15 bp, Homo sapiens
ttcctctcaggtaga

SEQ ID NO: 1911629 - DNA, 15 bp, Homo sapiens
tcctctcaggtagat

SEQ ID NO: 1911630 - DNA, 15 bp, Homo sapiens
cctctcaggtagatt

SEQ ID NO: 1911631 - DNA, 15 bp, Homo sapiens
ctctcaggtagattc

SEQ ID NO: 1911632 - DNA, 15 bp, Homo sapiens
tctcaggtagattca

SEQ ID NO: 1911633 - DNA, 15 bp, Homo sapiens
ctcaggtagattcat

SEQ ID NO: 1911634 - DNA, 15 bp, Homo sapiens
tcaggtagattcata

SEQ ID NO: 1911635 - DNA, 15 bp, Homo sapiens
caggtagattcataa

SEQ ID NO: 1911636 - DNA, 15 bp, Homo sapiens
aggtagattcataaa

SEQ ID NO: 1911637 - DNA, 15 bp, Homo sapiens
ggtagattcataaag

SEQ ID NO: 1911638 - DNA, 15 bp, Homo sapiens
gtagattcataaaga

SEQ ID NO: 1911639 - DNA, 15 bp, Homo sapiens
tagattcataaagaa

SEQ ID NO: 1911640 - DNA, 15 bp, Homo sapiens
agattcataaagaat

SEQ ID NO: 1911641 - DNA, 15 bp, Homo sapiens
gattcataaagaata

SEQ ID NO: 1911642 - DNA, 15 bp, Homo sapiens
attcataaagaatag

SEQ ID NO: 1911643 - DNA, 15 bp, Homo sapiens
ttcataaagaataga

SEQ ID NO: 1911644 - DNA, 15 bp, Homo sapiens
tcataaagaatagac

SEQ ID NO: 1911645 - DNA, 15 bp, Homo sapiens
cataaagaatagaca

SEQ ID NO: 1911646 - DNA, 15 bp, Homo sapiens
ataaagaatagacag

SEQ ID NO: 1911647 - DNA, 15 bp, Homo sapiens
taaagaatagacaga

SEQ ID NO: 1911648 - DNA, 15 bp, Homo sapiens
aaagaatagacagaa

SEQ ID NO: 1911649 - DNA, 15 bp, Homo sapiens
aagaatagacagaaa

SEQ ID NO: 1911650 - DNA, 15 bp, Homo sapiens
agaatagacagaaag

SEQ ID NO: 1911651 - DNA, 15 bp, Homo sapiens
gaatagacagaaaga

SEQ ID NO: 1911652 - DNA, 15 bp, Homo sapiens
aatagacagaaagaa

SEQ ID NO: 1911653 - DNA, 15 bp, Homo sapiens
atagacagaaagaac

SEQ ID NO: 1911654 - DNA, 15 bp, Homo sapiens
tagacagaaagaacc

SEQ ID NO: 1911655 - DNA, 15 bp, Homo sapiens
agacagaaagaacca

SEQ ID NO: 1911656 - DNA, 15 bp, Homo sapiens
gacagaaagaaccaa

SEQ ID NO: 1911657 - DNA, 15 bp, Homo sapiens
acagaaagaaccaaa

SEQ ID NO: 1911658 - DNA, 15 bp, Homo sapiens
cagaaagaaccaaag

SEQ ID NO: 1911659 - DNA, 15 bp, Homo sapiens
agaaagaaccaaagg

SEQ ID NO: 1911660 - DNA, 15 bp, Homo sapiens
gaaagaaccaaaggg

SEQ ID NO: 1911661 - DNA, 15 bp, Homo sapiens
aaagaaccaaagggt

SEQ ID NO: 1911662 - DNA, 15 bp, Homo sapiens
aagaaccaaagggtg

SEQ ID NO: 1911663 - DNA, 15 bp, Homo sapiens
agaaccaaagggtga

SEQ ID NO: 1911664 - DNA, 15 bp, Homo sapiens
gaaccaaagggtgat

SEQ ID NO: 1911665 - DNA, 15 bp, Homo sapiens
aaccaaagggtgata

SEQ ID NO: 1911666 - DNA, 15 bp, Homo sapiens
accaaagggtgataa

SEQ ID NO: 1911667 - DNA, 15 bp, Homo sapiens
ccaaagggtgataag

SEQ ID NO: 1911668 - DNA, 15 bp, Homo sapiens
caaagggtgataagc

SEQ ID NO: 1911669 - DNA, 15 bp, Homo sapiens
aaagggtgataagct

SEQ ID NO: 1911670 - DNA, 15 bp, Homo sapiens
aagggtgataagcta

SEQ ID NO: 1911671 - DNA, 15 bp, Homo sapiens
agggtgataagctat

SEQ ID NO: 1911672 - DNA, 15 bp, Homo sapiens
gggtgataagctatc

SEQ ID NO: 1911673 - DNA, 15 bp, Homo sapiens
ggtgataagctatca

SEQ ID NO: 1911674 - DNA, 15 bp, Homo sapiens
gtgataagctatcag

SEQ ID NO: 1911675 - DNA, 15 bp, Homo sapiens
tgataagctatcagc

SEQ ID NO: 1911676 - DNA, 15 bp, Homo sapiens
gataagctatcagcc

SEQ ID NO: 1911677 - DNA, 15 bp, Homo sapiens
ataagctatcagcct

SEQ ID NO: 1911678 - DNA, 15 bp, Homo sapiens
taagctatcagcctt

SEQ ID NO: 1911679 - DNA, 15 bp, Homo sapiens
aagctatcagccttg

SEQ ID NO: 1911680 - DNA, 15 bp, Homo sapiens
agctatcagccttgt

SEQ ID NO: 1911681 - DNA, 15 bp, Homo sapiens
gctatcagccttgtt

SEQ ID NO: 1911682 - DNA, 15 bp, Homo sapiens
ctatcagccttgtta

SEQ ID NO: 1911683 - DNA, 15 bp, Homo sapiens
tatcagccttgttaa

SEQ ID NO: 1911684 - DNA, 15 bp, Homo sapiens
atcagccttgttaat

SEQ ID NO: 1911685 - DNA, 15 bp, Homo sapiens
tcagccttgttaata

SEQ ID NO: 1911686 - DNA, 15 bp, Homo sapiens
cagccttgttaatac

SEQ ID NO: 1911687 - DNA, 15 bp, Homo sapiens
agccttgttaatact

SEQ ID NO: 1911688 - DNA, 15 bp, Homo sapiens
gccttgttaatactt

SEQ ID NO: 1911689 - DNA, 15 bp, Homo sapiens
ccttgttaatactta

SEQ ID NO: 1911690 - DNA, 15 bp, Homo sapiens
cttgttaatacttac

SEQ ID NO: 1911691 - DNA, 15 bp, Homo sapiens
ttgttaatacttaca

SEQ ID NO: 1911692 - DNA, 15 bp, Homo sapiens
tgttaatacttacat

SEQ ID NO: 1911693 - DNA, 15 bp, Homo sapiens
gttaatacttacatg

SEQ ID NO: 1911694 - DNA, 15 bp, Homo sapiens
ttaatacttacatgg

SEQ ID NO: 1911695 - DNA, 15 bp, Homo sapiens
taatacttacatggt

SEQ ID NO: 1911696 - DNA, 15 bp, Homo sapiens
aatacttacatggta

SEQ ID NO: 1911697 - DNA, 15 bp, Homo sapiens
atacttacatggtaa

SEQ ID NO: 1911698 - DNA, 15 bp, Homo sapiens
tacttacatggtaac

SEQ ID NO: 1911699 - DNA, 15 bp, Homo sapiens
acttacatggtaact

SEQ ID NO: 1911700 - DNA, 15 bp, Homo sapiens
cttacatggtaactc

SEQ ID NO: 1911701 - DNA, 15 bp, Homo sapiens
ttacatggtaactca

SEQ ID NO: 1911702 - DNA, 15 bp, Homo sapiens
tacatggtaactcac

SEQ ID NO: 1911703 - DNA, 15 bp, Homo sapiens
acatggtaactcaca

SEQ ID NO: 1911704 - DNA, 15 bp, Homo sapiens
catggtaactcacac

SEQ ID NO: 1911705 - DNA, 15 bp, Homo sapiens
atggtaactcacaca

SEQ ID NO: 1911706 - DNA, 15 bp, Homo sapiens
tggtaactcacacat

SEQ ID NO: 1911707 - DNA, 15 bp, Homo sapiens
ggtaactcacacatt

SEQ ID NO: 1911708 - DNA, 15 bp, Homo sapiens
gtaactcacacatta

SEQ ID NO: 1911709 - DNA, 15 bp, Homo sapiens
taactcacacattac

SEQ ID NO: 1911710 - DNA, 15 bp, Homo sapiens
aactcacacattaca

SEQ ID NO: 1911711 - DNA, 15 bp, Homo sapiens
actcacacattacaa

SEQ ID NO: 1911712 - DNA, 15 bp, Homo sapiens
ctcacacattacaag

SEQ ID NO: 1911713 - DNA, 15 bp, Homo sapiens
tcacacattacaagg

SEQ ID NO: 1911714 - DNA, 15 bp, Homo sapiens
cacacattacaaggc

SEQ ID NO: 1911715 - DNA, 15 bp, Homo sapiens
acacattacaaggct

SEQ ID NO: 1911716 - DNA, 15 bp, Homo sapiens
cacattacaaggctt

SEQ ID NO: 1911717 - DNA, 15 bp, Homo sapiens
acattacaaggcttc

SEQ ID NO: 1911718 - DNA, 15 bp, Homo sapiens
cattacaaggcttcc

SEQ ID NO: 1911719 - DNA, 15 bp, Homo sapiens
attacaaggcttcct

SEQ ID NO: 1911720 - DNA, 15 bp, Homo sapiens
ttacaaggcttccta

SEQ ID NO: 1911721 - DNA, 15 bp, Homo sapiens
tacaaggcttcctag

SEQ ID NO: 1911722 - DNA, 15 bp, Homo sapiens
acaaggcttcctagt

SEQ ID NO: 1911723 - DNA, 15 bp, Homo sapiens
caaggcttcctagta

SEQ ID NO: 1911724 - DNA, 15 bp, Homo sapiens
aaggcttcctagtat

SEQ ID NO: 1911725 - DNA, 15 bp, Homo sapiens
aggcttcctagtatg

SEQ ID NO: 1911726 - DNA, 15 bp, Homo sapiens
ggcttcctagtatgg

SEQ ID NO: 1911727 - DNA, 15 bp, Homo sapiens
gcttcctagtatgga

SEQ ID NO: 1911728 - DNA, 15 bp, Homo sapiens
cttcctagtatggaa

SEQ ID NO: 1911729 - DNA, 15 bp, Homo sapiens
ttcctagtatggaag

SEQ ID NO: 1911730 - DNA, 15 bp, Homo sapiens
tcctagtatggaaga

SEQ ID NO: 1911731 - DNA, 15 bp, Homo sapiens
cctagtatggaagag

SEQ ID NO: 1911732 - DNA, 15 bp, Homo sapiens
ctagtatggaagagg

SEQ ID NO: 1911733 - DNA, 15 bp, Homo sapiens
tagtatggaagagga

SEQ ID NO: 1911734 - DNA, 15 bp, Homo sapiens
agtatggaagaggat

SEQ ID NO: 1911735 - DNA, 15 bp, Homo sapiens
gtatggaagaggata

SEQ ID NO: 1911736 - DNA, 15 bp, Homo sapiens
tatggaagaggatac

SEQ ID NO: 1911737 - DNA, 15 bp, Homo sapiens
atggaagaggataca

SEQ ID NO: 1911738 - DNA, 15 bp, Homo sapiens
tggaagaggatacat

SEQ ID NO: 1911739 - DNA, 15 bp, Homo sapiens
ggaagaggatacata

SEQ ID NO: 1911740 - DNA, 15 bp, Homo sapiens
gaagaggatacatag

SEQ ID NO: 1911741 - DNA, 15 bp, Homo sapiens
aagaggatacatagg

SEQ ID NO: 1911742 - DNA, 15 bp, Homo sapiens
agaggatacataggg

SEQ ID NO: 1911743 - DNA, 15 bp, Homo sapiens
gaggatacatagggc

SEQ ID NO: 1911744 - DNA, 15 bp, Homo sapiens
aggatacatagggct

SEQ ID NO: 1911745 - DNA, 15 bp, Homo sapiens
ggatacatagggctg

SEQ ID NO: 1911746 - DNA, 15 bp, Homo sapiens
gatacatagggctgt

SEQ ID NO: 1911747 - DNA, 15 bp, Homo sapiens
atacatagggctgtg

SEQ ID NO: 1911748 - DNA, 15 bp, Homo sapiens
tacatagggctgtgg

SEQ ID NO: 1911749 - DNA, 15 bp, Homo sapiens
acatagggctgtggc

SEQ ID NO: 1911750 - DNA, 15 bp, Homo sapiens
catagggctgtggcc

SEQ ID NO: 1911751 - DNA, 15 bp, Homo sapiens
atagggctgtggccc

SEQ ID NO: 1911752 - DNA, 15 bp, Homo sapiens
tagggctgtggccca

SEQ ID NO: 1911753 - DNA, 15 bp, Homo sapiens
agggctgtggcccaa

SEQ ID NO: 1911754 - DNA, 15 bp, Homo sapiens
gggctgtggcccaaa

SEQ ID NO: 1911755 - DNA, 15 bp, Homo sapiens
ggctgtggcccaaaa

SEQ ID NO: 1911756 - DNA, 15 bp, Homo sapiens
gctgtggcccaaaat

SEQ ID NO: 1911757 - DNA, 15 bp, Homo sapiens
ctgtggcccaaaata

SEQ ID NO: 1911758 - DNA, 15 bp, Homo sapiens
tgtggcccaaaatat

SEQ ID NO: 1911759 - DNA, 15 bp, Homo sapiens
gtggcccaaaatatg

SEQ ID NO: 1911760 - DNA, 15 bp, Homo sapiens
tggcccaaaatatgg

SEQ ID NO: 1911761 - DNA, 15 bp, Homo sapiens
ggcccaaaatatggc

SEQ ID NO: 1911762 - DNA, 15 bp, Homo sapiens
gcccaaaatatggca

SEQ ID NO: 1911763 - DNA, 15 bp, Homo sapiens
cccaaaatatggcat

SEQ ID NO: 1911764 - DNA, 15 bp, Homo sapiens
ccaaaatatggcatc

SEQ ID NO: 1911765 - DNA, 15 bp, Homo sapiens
caaaatatggcatca

SEQ ID NO: 1911766 - DNA, 15 bp, Homo sapiens
aaaatatggcatcat

SEQ ID NO: 1911767 - DNA, 15 bp, Homo sapiens
aaatatggcatcatg

SEQ ID NO: 1911768 - DNA, 15 bp, Homo sapiens
aatatggcatcatgc

SEQ ID NO: 1911769 - DNA, 15 bp, Homo sapiens
atatggcatcatgct

SEQ ID NO: 1911770 - DNA, 15 bp, Homo sapiens
tatggcatcatgctc

SEQ ID NO: 1911771 - DNA, 15 bp, Homo sapiens
atggcatcatgctcc

SEQ ID NO: 1911772 - DNA, 15 bp, Homo sapiens
tggcatcatgctcct

SEQ ID NO: 1911773 - DNA, 15 bp, Homo sapiens
ggcatcatgctcctt

SEQ ID NO: 1911774 - DNA, 15 bp, Homo sapiens
gcatcatgctccttc

SEQ ID NO: 1911775 - DNA, 15 bp, Homo sapiens
catcatgctccttcc

SEQ ID NO: 1911776 - DNA, 15 bp, Homo sapiens
atcatgctccttcca

SEQ ID NO: 1911777 - DNA, 15 bp, Homo sapiens
tcatgctccttccaa

SEQ ID NO: 1911778 - DNA, 15 bp, Homo sapiens
catgctccttccaac

SEQ ID NO: 1911779 - DNA, 15 bp, Homo sapiens
atgctccttccaact

SEQ ID NO: 1911780 - DNA, 15 bp, Homo sapiens
tgctccttccaacta

SEQ ID NO: 1911781 - DNA, 15 bp, Homo sapiens
gctccttccaactag

SEQ ID NO: 1911782 - DNA, 15 bp, Homo sapiens
ctccttccaactagc

SEQ ID NO: 1911783 - DNA, 15 bp, Homo sapiens
tccttccaactagca

SEQ ID NO: 1911784 - DNA, 15 bp, Homo sapiens
ccttccaactagcac

SEQ ID NO: 1911785 - DNA, 15 bp, Homo sapiens
cttccaactagcact

SEQ ID NO: 1911786 - DNA, 15 bp, Homo sapiens
ttccaactagcactg

SEQ ID NO: 1911787 - DNA, 15 bp, Homo sapiens
tccaactagcactga

SEQ ID NO: 1911788 - DNA, 15 bp, Homo sapiens
ccaactagcactgaa

SEQ ID NO: 1911789 - DNA, 15 bp, Homo sapiens
caactagcactgaag

SEQ ID NO: 1911790 - DNA, 15 bp, Homo sapiens
aactagcactgaaga

SEQ ID NO: 1911791 - DNA, 15 bp, Homo sapiens
actagcactgaagac

SEQ ID NO: 1911792 - DNA, 15 bp, Homo sapiens
ctagcactgaagaca

SEQ ID NO: 1911793 - DNA, 15 bp, Homo sapiens
tagcactgaagacaa

SEQ ID NO: 1911794 - DNA, 15 bp, Homo sapiens
agcactgaagacaac

SEQ ID NO: 1911795 - DNA, 15 bp, Homo sapiens
gcactgaagacaaca

SEQ ID NO: 1911796 - DNA, 15 bp, Homo sapiens
cactgaagacaacat

SEQ ID NO: 1911797 - DNA, 15 bp, Homo sapiens
actgaagacaacatg

SEQ ID NO: 1911798 - DNA, 15 bp, Homo sapiens
ctgaagacaacatgg

SEQ ID NO: 1911799 - DNA, 15 bp, Homo sapiens
tgaagacaacatggt

SEQ ID NO: 1911800 - DNA, 15 bp, Homo sapiens
gaagacaacatggtg

SEQ ID NO: 1911801 - DNA, 15 bp, Homo sapiens
aagacaacatggtgt

SEQ ID NO: 1911802 - DNA, 15 bp, Homo sapiens
agacaacatggtgta

SEQ ID NO: 1911803 - DNA, 15 bp, Homo sapiens
gacaacatggtgtag

SEQ ID NO: 1911804 - DNA, 15 bp, Homo sapiens
acaacatggtgtaga

SEQ ID NO: 1911805 - DNA, 15 bp, Homo sapiens
caacatggtgtagaa

SEQ ID NO: 1911806 - DNA, 15 bp, Homo sapiens
aacatggtgtagaag

SEQ ID NO: 1911807 - DNA, 15 bp, Homo sapiens
acatggtgtagaagg

SEQ ID NO: 1911808 - DNA, 15 bp, Homo sapiens
catggtgtagaaggg

SEQ ID NO: 1911809 - DNA, 15 bp, Homo sapiens
atggtgtagaagggg

SEQ ID NO: 1911810 - DNA, 15 bp, Homo sapiens
tggtgtagaaggggc

SEQ ID NO: 1911811 - DNA, 15 bp, Homo sapiens
ggtgtagaaggggcc

SEQ ID NO: 1911812 - DNA, 15 bp, Homo sapiens
gtgtagaaggggcca

SEQ ID NO: 1911813 - DNA, 15 bp, Homo sapiens
tgtagaaggggccaa

SEQ ID NO: 1911814 - DNA, 15 bp, Homo sapiens
gtagaaggggccaac

SEQ ID NO: 1911815 - DNA, 15 bp, Homo sapiens
tagaaggggccaact

SEQ ID NO: 1911816 - DNA, 15 bp, Homo sapiens
agaaggggccaacta

SEQ ID NO: 1911817 - DNA, 15 bp, Homo sapiens
gaaggggccaactaa

SEQ ID NO: 1911818 - DNA, 15 bp, Homo sapiens
aaggggccaactaat

SEQ ID NO: 1911819 - DNA, 15 bp, Homo sapiens
aggggccaactaatg

SEQ ID NO: 1911820 - DNA, 15 bp, Homo sapiens
ggggccaactaatgc

SEQ ID NO: 1911821 - DNA, 15 bp, Homo sapiens
gggccaactaatgca

SEQ ID NO: 1911822 - DNA, 15 bp, Homo sapiens
ggccaactaatgcac

SEQ ID NO: 1911823 - DNA, 15 bp, Homo sapiens
gccaactaatgcacc

SEQ ID NO: 1911824 - DNA, 15 bp, Homo sapiens
ccaactaatgcaccc

SEQ ID NO: 1911825 - DNA, 15 bp, Homo sapiens
caactaatgcaccct

SEQ ID NO: 1911826 - DNA, 15 bp, Homo sapiens
aactaatgcaccctg

SEQ ID NO: 1911827 - DNA, 15 bp, Homo sapiens
actaatgcaccctgt

SEQ ID NO: 1911828 - DNA, 15 bp, Homo sapiens
ctaatgcaccctgtc

SEQ ID NO: 1911829 - DNA, 15 bp, Homo sapiens
taatgcaccctgtct

SEQ ID NO: 1911830 - DNA, 15 bp, Homo sapiens
aatgcaccctgtctc

SEQ ID NO: 1911831 - DNA, 15 bp, Homo sapiens
atgcaccctgtctca

SEQ ID NO: 1911832 - DNA, 15 bp, Homo sapiens
tgcaccctgtctcag

SEQ ID NO: 1911833 - DNA, 15 bp, Homo sapiens
gcaccctgtctcagg

SEQ ID NO: 1911834 - DNA, 15 bp, Homo sapiens
caccctgtctcaggc

SEQ ID NO: 1911835 - DNA, 15 bp, Homo sapiens
accctgtctcaggct

SEQ ID NO: 1911836 - DNA, 15 bp, Homo sapiens
ccctgtctcaggctg

SEQ ID NO: 1911837 - DNA, 15 bp, Homo sapiens
cctgtctcaggctgt

SEQ ID NO: 1911838 - DNA, 15 bp, Homo sapiens
ctgtctcaggctgtg

SEQ ID NO: 1911839 - DNA, 15 bp, Homo sapiens
tgtctcaggctgtga

SEQ ID NO: 1911840 - DNA, 15 bp, Homo sapiens
gtctcaggctgtgaa

SEQ ID NO: 1911841 - DNA, 15 bp, Homo sapiens
tctcaggctgtgaac

SEQ ID NO: 1911842 - DNA, 15 bp, Homo sapiens
ctcaggctgtgaaca

SEQ ID NO: 1911843 - DNA, 15 bp, Homo sapiens
tcaggctgtgaacac

SEQ ID NO: 1911844 - DNA, 15 bp, Homo sapiens
caggctgtgaacacc

SEQ ID NO: 1911845 - DNA, 15 bp, Homo sapiens
aggctgtgaacaccc

SEQ ID NO: 1911846 - DNA, 15 bp, Homo sapiens
ggctgtgaacaccct

SEQ ID NO: 1911847 - DNA, 15 bp, Homo sapiens
gctgtgaacaccctc

SEQ ID NO: 1911848 - DNA, 15 bp, Homo sapiens
ctgtgaacaccctct

SEQ ID NO: 1911849 - DNA, 15 bp, Homo sapiens
tgtgaacaccctctt

SEQ ID NO: 1911850 - DNA, 15 bp, Homo sapiens
gtgaacaccctcttt

SEQ ID NO: 1911851 - DNA, 15 bp, Homo sapiens
tgaacaccctctttc

SEQ ID NO: 1911852 - DNA, 15 bp, Homo sapiens
gaacaccctctttcc

SEQ ID NO: 1911853 - DNA, 15 bp, Homo sapiens
aacaccctctttccc

SEQ ID NO: 1911854 - DNA, 15 bp, Homo sapiens
acaccctctttccca

SEQ ID NO: 1911855 - DNA, 15 bp, Homo sapiens
caccctctttcccaa

SEQ ID NO: 1911856 - DNA, 15 bp, Homo sapiens
accctctttcccaac

SEQ ID NO: 1911857 - DNA, 15 bp, Homo sapiens
ccctctttcccaact

SEQ ID NO: 1911858 - DNA, 15 bp, Homo sapiens
cctctttcccaactg

SEQ ID NO: 1911859 - DNA, 15 bp, Homo sapiens
ctctttcccaactga

SEQ ID NO: 1911860 - DNA, 15 bp, Homo sapiens
tctttcccaactgag

SEQ ID NO: 1911861 - DNA, 15 bp, Homo sapiens
ctttcccaactgaga

SEQ ID NO: 1911862 - DNA, 15 bp, Homo sapiens
tttcccaactgagac

SEQ ID NO: 1911863 - DNA, 15 bp, Homo sapiens
ttcccaactgagact

SEQ ID NO: 1911864 - DNA, 15 bp, Homo sapiens
tcccaactgagactt

SEQ ID NO: 1911865 - DNA, 15 bp, Homo sapiens
cccaactgagactta

SEQ ID NO: 1911866 - DNA, 15 bp, Homo sapiens
ccaactgagacttac

SEQ ID NO: 1911867 - DNA, 15 bp, Homo sapiens
caactgagacttact

SEQ ID NO: 1911868 - DNA, 15 bp, Homo sapiens
aactgagacttacta

SEQ ID NO: 1911869 - DNA, 15 bp, Homo sapiens
actgagacttactac

SEQ ID NO: 1911870 - DNA, 15 bp, Homo sapiens
ctgagacttactacc

SEQ ID NO: 1911871 - DNA, 15 bp, Homo sapiens
tgagacttactacct

SEQ ID NO: 1911872 - DNA, 15 bp, Homo sapiens
gagacttactacctt

SEQ ID NO: 1911873 - DNA, 15 bp, Homo sapiens
agacttactaccttt

SEQ ID NO: 1911874 - DNA, 15 bp, Homo sapiens
gacttactaccttta

SEQ ID NO: 1911875 - DNA, 15 bp, Homo sapiens
acttactacctttac

SEQ ID NO: 1911876 - DNA, 15 bp, Homo sapiens
cttactacctttact

SEQ ID NO: 1911877 - DNA, 15 bp, Homo sapiens
ttactacctttacta

SEQ ID NO: 1911878 - DNA, 15 bp, Homo sapiens
tactacctttactac

SEQ ID NO: 1911879 - DNA, 15 bp, Homo sapiens
actacctttactact

SEQ ID NO: 1911880 - DNA, 15 bp, Homo sapiens
ctacctttactactt

SEQ ID NO: 1911881 - DNA, 15 bp, Homo sapiens
tacctttactacttg

SEQ ID NO: 1911882 - DNA, 15 bp, Homo sapiens
acctttactacttgg

SEQ ID NO: 1911883 - DNA, 15 bp, Homo sapiens
cctttactacttgga

SEQ ID NO: 1911884 - DNA, 15 bp, Homo sapiens
ctttactacttggac

SEQ ID NO: 1911885 - DNA, 15 bp, Homo sapiens
tttactacttggaca

SEQ ID NO: 1911886 - DNA, 15 bp, Homo sapiens
ttactacttggacat

SEQ ID NO: 1911887 - DNA, 15 bp, Homo sapiens
tactacttggacatg

SEQ ID NO: 1911888 - DNA, 15 bp, Homo sapiens
actacttggacatgc

SEQ ID NO: 1911889 - DNA, 15 bp, Homo sapiens
ctacttggacatgca

SEQ ID NO: 1911890 - DNA, 15 bp, Homo sapiens
tacttggacatgcaa

SEQ ID NO: 1911891 - DNA, 15 bp, Homo sapiens
acttggacatgcaaa

SEQ ID NO: 1911892 - DNA, 15 bp, Homo sapiens
cttggacatgcaaaa

SEQ ID NO: 1911893 - DNA, 15 bp, Homo sapiens
ttggacatgcaaaaa

SEQ ID NO: 1911894 - DNA, 15 bp, Homo sapiens
tggacatgcaaaaaa

SEQ ID NO: 1911895 - DNA, 15 bp, Homo sapiens
ggacatgcaaaaaac

SEQ ID NO: 1911896 - DNA, 15 bp, Homo sapiens
gacatgcaaaaaacc

SEQ ID NO: 1911897 - DNA, 15 bp, Homo sapiens
acatgcaaaaaacca

SEQ ID NO: 1911898 - DNA, 15 bp, Homo sapiens
catgcaaaaaaccaa

SEQ ID NO: 1911899 - DNA, 15 bp, Homo sapiens
atgcaaaaaaccaaa

SEQ ID NO: 1911900 - DNA, 15 bp, Homo sapiens
tgcaaaaaaccaaag

SEQ ID NO: 1911901 - DNA, 15 bp, Homo sapiens
gcaaaaaaccaaagc

SEQ ID NO: 1911902 - DNA, 15 bp, Homo sapiens
caaaaaaccaaagcc

SEQ ID NO: 1911903 - DNA, 15 bp, Homo sapiens
aaaaaaccaaagcct

SEQ ID NO: 1911904 - DNA, 15 bp, Homo sapiens
aaaaaccaaagcctg

SEQ ID NO: 1911905 - DNA, 15 bp, Homo sapiens
aaaaccaaagcctga

SEQ ID NO: 1911906 - DNA, 15 bp, Homo sapiens
aaaccaaagcctgaa

SEQ ID NO: 1911907 - DNA, 15 bp, Homo sapiens
aaccaaagcctgaac

SEQ ID NO: 1911908 - DNA, 15 bp, Homo sapiens
accaaagcctgaaca

SEQ ID NO: 1911909 - DNA, 15 bp, Homo sapiens
ccaaagcctgaacaa

SEQ ID NO: 1911910 - DNA, 15 bp, Homo sapiens
caaagcctgaacaaa

SEQ ID NO: 1911911 - DNA, 15 bp, Homo sapiens
aaagcctgaacaaaa

SEQ ID NO: 1911912 - DNA, 15 bp, Homo sapiens
aagcctgaacaaaag

SEQ ID NO: 1911913 - DNA, 15 bp, Homo sapiens
agcctgaacaaaagc

SEQ ID NO: 1911914 - DNA, 15 bp, Homo sapiens
gcctgaacaaaagca

SEQ ID NO: 1911915 - DNA, 15 bp, Homo sapiens
cctgaacaaaagcaa

SEQ ID NO: 1911916 - DNA, 15 bp, Homo sapiens
ctgaacaaaagcaag

SEQ ID NO: 1911917 - DNA, 15 bp, Homo sapiens
tgaacaaaagcaagt

SEQ ID NO: 1911918 - DNA, 15 bp, Homo sapiens
gaacaaaagcaagtc

SEQ ID NO: 1911919 - DNA, 15 bp, Homo sapiens
acaaaagcaagtcca

SEQ ID NO: 1911920 - DNA, 15 bp, Homo sapiens
caaaagcaagtccaa

SEQ ID NO: 1911921 - DNA, 15 bp, Homo sapiens
aaaagcaagtccaaa

SEQ ID NO: 1911922 - DNA, 15 bp, Homo sapiens
aaagcaagtccaaat

SEQ ID NO: 1911923 - DNA, 15 bp, Homo sapiens
aagcaagtccaaatg

SEQ ID NO: 1911924 - DNA, 15 bp, Homo sapiens
agcaagtccaaatga

SEQ ID NO: 1911925 - DNA, 15 bp, Homo sapiens
gcaagtccaaatgat

SEQ ID NO: 1911926 - DNA, 15 bp, Homo sapiens
caagtccaaatgata

SEQ ID NO: 1911927 - DNA, 15 bp, Homo sapiens
aagtccaaatgataa

SEQ ID NO: 1911928 - DNA, 15 bp, Homo sapiens
agtccaaatgataat

SEQ ID NO: 1911929 - DNA, 15 bp, Homo sapiens
gtccaaatgataatt

SEQ ID NO: 1911930 - DNA, 15 bp, Homo sapiens
tccaaatgataattt

SEQ ID NO: 1911931 - DNA, 15 bp, Homo sapiens
ccaaatgataatttt

SEQ ID NO: 1911932 - DNA, 15 bp, Homo sapiens
caaatgataattttt

SEQ ID NO: 1911933 - DNA, 15 bp, Homo sapiens
aaatgataatttttg

SEQ ID NO: 1911934 - DNA, 15 bp, Homo sapiens
aatgataatttttgt

SEQ ID NO: 1911935 - DNA, 15 bp, Homo sapiens
atgataatttttgtt

SEQ ID NO: 1911936 - DNA, 15 bp, Homo sapiens
tgataatttttgttt

SEQ ID NO: 1911937 - DNA, 15 bp, Homo sapiens
gataatttttgtttt

SEQ ID NO: 1911938 - DNA, 15 bp, Homo sapiens
atttttgttttacaa

SEQ ID NO: 1911939 - DNA, 15 bp, Homo sapiens
tttttgttttacaaa

SEQ ID NO: 1911940 - DNA, 15 bp, Homo sapiens
ttttgttttacaaaa

SEQ ID NO: 1911941 - DNA, 15 bp, Homo sapiens
tttgttttacaaaaa

SEQ ID NO: 1911942 - DNA, 15 bp, Homo sapiens
ttgttttacaaaaat

SEQ ID NO: 1911943 - DNA, 15 bp, Homo sapiens
tgttttacaaaaatt

SEQ ID NO: 1911944 - DNA, 15 bp, Homo sapiens
gttttacaaaaatta

SEQ ID NO: 1911945 - DNA, 15 bp, Homo sapiens
ttttacaaaaattat

SEQ ID NO: 1911946 - DNA, 15 bp, Homo sapiens
tttacaaaaattatg

SEQ ID NO: 1911947 - DNA, 15 bp, Homo sapiens
ttacaaaaattatgc

SEQ ID NO: 1911948 - DNA, 15 bp, Homo sapiens
tacaaaaattatgcc

SEQ ID NO: 1911949 - DNA, 15 bp, Homo sapiens
acaaaaattatgcca

SEQ ID NO: 1911950 - DNA, 15 bp, Homo sapiens
caaaaattatgccac

SEQ ID NO: 1911951 - DNA, 15 bp, Homo sapiens
aaaaattatgccaca

SEQ ID NO: 1911952 - DNA, 15 bp, Homo sapiens
aaaattatgccacac

SEQ ID NO: 1911953 - DNA, 15 bp, Homo sapiens
aattatgccacacat

SEQ ID NO: 1911954 - DNA, 15 bp, Homo sapiens
attatgccacacata

SEQ ID NO: 1911955 - DNA, 15 bp, Homo sapiens
ttatgccacacataa

SEQ ID NO: 1911956 - DNA, 15 bp, Homo sapiens
tatgccacacataag

SEQ ID NO: 1911957 - DNA, 15 bp, Homo sapiens
atgccacacataagc

SEQ ID NO: 1911958 - DNA, 15 bp, Homo sapiens
tgccacacataagca

SEQ ID NO: 1911959 - DNA, 15 bp, Homo sapiens
gccacacataagcaa

SEQ ID NO: 1911960 - DNA, 15 bp, Homo sapiens
ccacacataagcaat

SEQ ID NO: 1911961 - DNA, 15 bp, Homo sapiens
cacacataagcaatg

SEQ ID NO: 1911962 - DNA, 15 bp, Homo sapiens
acacataagcaatga

SEQ ID NO: 1911963 - DNA, 15 bp, Homo sapiens
cacataagcaatgac

SEQ ID NO: 1911964 - DNA, 15 bp, Homo sapiens
acataagcaatgacc

SEQ ID NO: 1911965 - DNA, 15 bp, Homo sapiens
cataagcaatgaccc

SEQ ID NO: 1911966 - DNA, 15 bp, Homo sapiens
ataagcaatgaccca

SEQ ID NO: 1911967 - DNA, 15 bp, Homo sapiens
taagcaatgacccaa

SEQ ID NO: 1911968 - DNA, 15 bp, Homo sapiens
aagcaatgacccaaa

SEQ ID NO: 1911969 - DNA, 15 bp, Homo sapiens
agcaatgacccaaaa

SEQ ID NO: 1911970 - DNA, 15 bp, Homo sapiens
gcaatgacccaaaaa

SEQ ID NO: 1911971 - DNA, 15 bp, Homo sapiens
caatgacccaaaaaa

SEQ ID NO: 1911972 - DNA, 15 bp, Homo sapiens
aatgacccaaaaaac

SEQ ID NO: 1911973 - DNA, 15 bp, Homo sapiens
atgacccaaaaaaca

SEQ ID NO: 1911974 - DNA, 15 bp, Homo sapiens
tgacccaaaaaacag

SEQ ID NO: 1911975 - DNA, 15 bp, Homo sapiens
gacccaaaaaacaga

SEQ ID NO: 1911976 - DNA, 15 bp, Homo sapiens
acccaaaaaacagag

SEQ ID NO: 1911977 - DNA, 15 bp, Homo sapiens
cccaaaaaacagagg

SEQ ID NO: 1911978 - DNA, 15 bp, Homo sapiens
ccaaaaaacagaggt

SEQ ID NO: 1911979 - DNA, 15 bp, Homo sapiens
caaaaaacagaggtg

SEQ ID NO: 1911980 - DNA, 15 bp, Homo sapiens
aaaaaacagaggtgg

SEQ ID NO: 1911981 - DNA, 15 bp, Homo sapiens
aaaaacagaggtggc

SEQ ID NO: 1911982 - DNA, 15 bp, Homo sapiens
aaaacagaggtggcc

SEQ ID NO: 1911983 - DNA, 15 bp, Homo sapiens
aaacagaggtggccc

SEQ ID NO: 1911984 - DNA, 15 bp, Homo sapiens
aacagaggtggccct

SEQ ID NO: 1911985 - DNA, 15 bp, Homo sapiens
acagaggtggccctc

SEQ ID NO: 1911986 - DNA, 15 bp, Homo sapiens
cagaggtggccctct

SEQ ID NO: 1911987 - DNA, 15 bp, Homo sapiens
agaggtggccctctg

SEQ ID NO: 1911988 - DNA, 15 bp, Homo sapiens
gaggtggccctctga

SEQ ID NO: 1911989 - DNA, 15 bp, Homo sapiens
aggtggccctctgac

SEQ ID NO: 1911990 - DNA, 15 bp, Homo sapiens
ggtggccctctgact

SEQ ID NO: 1911991 - DNA, 15 bp, Homo sapiens
gtggccctctgactg

SEQ ID NO: 1911992 - DNA, 15 bp, Homo sapiens
tggccctctgactgg

SEQ ID NO: 1911993 - DNA, 15 bp, Homo sapiens
ggccctctgactggc

SEQ ID NO: 1911994 - DNA, 15 bp, Homo sapiens
gccctctgactggcc

SEQ ID NO: 1911995 - DNA, 15 bp, Homo sapiens
ccctctgactggcct

SEQ ID NO: 1911996 - DNA, 15 bp, Homo sapiens
cctctgactggccta

SEQ ID NO: 1911997 - DNA, 15 bp, Homo sapiens
ctctgactggcctat

SEQ ID NO: 1911998 - DNA, 15 bp, Homo sapiens
tctgactggcctatc

SEQ ID NO: 1911999 - DNA, 15 bp, Homo sapiens
ctgactggcctatct

SEQ ID NO: 1912000 - DNA, 15 bp, Homo sapiens
tgactggcctatctc

SEQ ID NO: 1912001 - DNA, 15 bp, Homo sapiens
gactggcctatctca

SEQ ID NO: 1912002 - DNA, 15 bp, Homo sapiens
actggcctatctcac

SEQ ID NO: 1912003 - DNA, 15 bp, Homo sapiens
ctggcctatctcacc

SEQ ID NO: 1912004 - DNA, 15 bp, Homo sapiens
tggcctatctcacca

SEQ ID NO: 1912005 - DNA, 15 bp, Homo sapiens
ggcctatctcaccat

SEQ ID NO: 1912006 - DNA, 15 bp, Homo sapiens
gcctatctcaccatt

SEQ ID NO: 1912007 - DNA, 15 bp, Homo sapiens
cctatctcaccattg

SEQ ID NO: 1912008 - DNA, 15 bp, Homo sapiens
ctatctcaccattga

SEQ ID NO: 1912009 - DNA, 15 bp, Homo sapiens
tatctcaccattgag

SEQ ID NO: 1912010 - DNA, 15 bp, Homo sapiens
atctcaccattgaga

SEQ ID NO: 1912011 - DNA, 15 bp, Homo sapiens
tctcaccattgagat

SEQ ID NO: 1912012 - DNA, 15 bp, Homo sapiens
ctcaccattgagatt

SEQ ID NO: 1912013 - DNA, 15 bp, Homo sapiens
tcaccattgagatta

SEQ ID NO: 1912014 - DNA, 15 bp, Homo sapiens
caccattgagattag

SEQ ID NO: 1912015 - DNA, 15 bp, Homo sapiens
accattgagattagt

SEQ ID NO: 1912016 - DNA, 15 bp, Homo sapiens
ccattgagattagtc

SEQ ID NO: 1912017 - DNA, 15 bp, Homo sapiens
cattgagattagtca

SEQ ID NO: 1912018 - DNA, 15 bp, Homo sapiens
attgagattagtcac

SEQ ID NO: 1912019 - DNA, 15 bp, Homo sapiens
ttgagattagtcact

SEQ ID NO: 1912020 - DNA, 15 bp, Homo sapiens
tgagattagtcactc

SEQ ID NO: 1912021 - DNA, 15 bp, Homo sapiens
gagattagtcactcc

SEQ ID NO: 1912022 - DNA, 15 bp, Homo sapiens
agattagtcactcct

SEQ ID NO: 1912023 - DNA, 15 bp, Homo sapiens
gattagtcactcctc

SEQ ID NO: 1912024 - DNA, 15 bp, Homo sapiens
attagtcactcctct

SEQ ID NO: 1912025 - DNA, 15 bp, Homo sapiens
ttagtcactcctctg

SEQ ID NO: 1912026 - DNA, 15 bp, Homo sapiens
tagtcactcctctgc

SEQ ID NO: 1912027 - DNA, 15 bp, Homo sapiens
agtcactcctctgcc

SEQ ID NO: 1912028 - DNA, 15 bp, Homo sapiens
gtcactcctctgcct

SEQ ID NO: 1912029 - DNA, 15 bp, Homo sapiens
tcactcctctgcctg

SEQ ID NO: 1912030 - DNA, 15 bp, Homo sapiens
cactcctctgcctgt

SEQ ID NO: 1912031 - DNA, 15 bp, Homo sapiens
actcctctgcctgtg

SEQ ID NO: 1912032 - DNA, 15 bp, Homo sapiens
ctcctctgcctgtgc

SEQ ID NO: 1912033 - DNA, 15 bp, Homo sapiens
tcctctgcctgtgct

SEQ ID NO: 1912034 - DNA, 15 bp, Homo sapiens
cctctgcctgtgctt

SEQ ID NO: 1912035 - DNA, 15 bp, Homo sapiens
ctctgcctgtgctta

SEQ ID NO: 1912036 - DNA, 15 bp, Homo sapiens
tctgcctgtgcttag

SEQ ID NO: 1912037 - DNA, 15 bp, Homo sapiens
ctgcctgtgcttagg

SEQ ID NO: 1912038 - DNA, 15 bp, Homo sapiens
tgcctgtgcttagga

SEQ ID NO: 1912039 - DNA, 15 bp, Homo sapiens
gcctgtgcttaggac

SEQ ID NO: 1912040 - DNA, 15 bp, Homo sapiens
cctgtgcttaggaca

SEQ ID NO: 1912041 - DNA, 15 bp, Homo sapiens
ctgtgcttaggacac

SEQ ID NO: 1912042 - DNA, 15 bp, Homo sapiens
tgtgcttaggacact

SEQ ID NO: 1912043 - DNA, 15 bp, Homo sapiens
gtgcttaggacacta

SEQ ID NO: 1912044 - DNA, 15 bp, Homo sapiens
tgcttaggacactaa

SEQ ID NO: 1912045 - DNA, 15 bp, Homo sapiens
gcttaggacactaaa

SEQ ID NO: 1912046 - DNA, 15 bp, Homo sapiens
cttaggacactaaac

SEQ ID NO: 1912047 - DNA, 15 bp, Homo sapiens
ttaggacactaaact

SEQ ID NO: 1912048 - DNA, 15 bp, Homo sapiens
taggacactaaactt

SEQ ID NO: 1912049 - DNA, 15 bp, Homo sapiens
aggacactaaacttg

SEQ ID NO: 1912050 - DNA, 15 bp, Homo sapiens
ggacactaaacttgt

SEQ ID NO: 1912051 - DNA, 15 bp, Homo sapiens
gacactaaacttgtg

SEQ ID NO: 1912052 - DNA, 15 bp, Homo sapiens
acactaaacttgtgt

SEQ ID NO: 1912053 - DNA, 15 bp, Homo sapiens
cactaaacttgtgtg

SEQ ID NO: 1912054 - DNA, 15 bp, Homo sapiens
actaaacttgtgtgt

SEQ ID NO: 1912055 - DNA, 15 bp, Homo sapiens
ctaaacttgtgtgta

SEQ ID NO: 1912056 - DNA, 15 bp, Homo sapiens
taaacttgtgtgtac

SEQ ID NO: 1912057 - DNA, 15 bp, Homo sapiens
aaacttgtgtgtact

SEQ ID NO: 1912058 - DNA, 15 bp, Homo sapiens
aacttgtgtgtacta

SEQ ID NO: 1912059 - DNA, 15 bp, Homo sapiens
acttgtgtgtactat

SEQ ID NO: 1912060 - DNA, 15 bp, Homo sapiens
cttgtgtgtactata

SEQ ID NO: 1912061 - DNA, 15 bp, Homo sapiens
ttgtgtgtactataa

SEQ ID NO: 1912062 - DNA, 15 bp, Homo sapiens
tgtgtgtactataaa

SEQ ID NO: 1912063 - DNA, 15 bp, Homo sapiens
gtgtgtactataaat

SEQ ID NO: 1912064 - DNA, 15 bp, Homo sapiens
tgtgtactataaatg

SEQ ID NO: 1912065 - DNA, 15 bp, Homo sapiens
gtgtactataaatgt

SEQ ID NO: 1912066 - DNA, 15 bp, Homo sapiens
tgtactataaatgta

SEQ ID NO: 1912067 - DNA, 15 bp, Homo sapiens
gtactataaatgtac

SEQ ID NO: 1912068 - DNA, 15 bp, Homo sapiens
tactataaatgtaca

SEQ ID NO: 1912069 - DNA, 15 bp, Homo sapiens
actataaatgtacaa

SEQ ID NO: 1912070 - DNA, 15 bp, Homo sapiens
ctataaatgtacaat

SEQ ID NO: 1912071 - DNA, 15 bp, Homo sapiens
tataaatgtacaatc

SEQ ID NO: 1912072 - DNA, 15 bp, Homo sapiens
ataaatgtacaatca

SEQ ID NO: 1912073 - DNA, 15 bp, Homo sapiens
taaatgtacaatcac

SEQ ID NO: 1912074 - DNA, 15 bp, Homo sapiens
aaatgtacaatcact

SEQ ID NO: 1912075 - DNA, 15 bp, Homo sapiens
aatgtacaatcactt

SEQ ID NO: 1912076 - DNA, 15 bp, Homo sapiens
atgtacaatcacttt

SEQ ID NO: 1912077 - DNA, 15 bp, Homo sapiens
tgtacaatcactttc

SEQ ID NO: 1912078 - DNA, 15 bp, Homo sapiens
gtacaatcactttct

SEQ ID NO: 1912079 - DNA, 15 bp, Homo sapiens
tacaatcactttctt

SEQ ID NO: 1912080 - DNA, 15 bp, Homo sapiens
acaatcactttcttc

SEQ ID NO: 1912081 - DNA, 15 bp, Homo sapiens
caatcactttcttcc

SEQ ID NO: 1912082 - DNA, 15 bp, Homo sapiens
aatcactttcttcct

SEQ ID NO: 1912083 - DNA, 15 bp, Homo sapiens
atcactttcttcctc

SEQ ID NO: 1912084 - DNA, 15 bp, Homo sapiens
tcactttcttcctct

SEQ ID NO: 1912085 - DNA, 15 bp, Homo sapiens
cactttcttcctctt

SEQ ID NO: 1912086 - DNA, 15 bp, Homo sapiens
actttcttcctcttt

SEQ ID NO: 1912087 - DNA, 15 bp, Homo sapiens
ctttcttcctcttta

SEQ ID NO: 1912088 - DNA, 15 bp, Homo sapiens
tttcttcctctttag

SEQ ID NO: 1912089 - DNA, 15 bp, Homo sapiens
ttcttcctctttagc

SEQ ID NO: 1912090 - DNA, 15 bp, Homo sapiens
tcttcctctttagca

SEQ ID NO: 1912091 - DNA, 15 bp, Homo sapiens
cttcctctttagcaa

SEQ ID NO: 1912092 - DNA, 15 bp, Homo sapiens
ttcctctttagcaag

SEQ ID NO: 1912093 - DNA, 15 bp, Homo sapiens
tcctctttagcaagg

SEQ ID NO: 1912094 - DNA, 15 bp, Homo sapiens
cctctttagcaaggt

SEQ ID NO: 1912095 - DNA, 15 bp, Homo sapiens
ctctttagcaaggtc

SEQ ID NO: 1912096 - DNA, 15 bp, Homo sapiens
tctttagcaaggtca

SEQ ID NO: 1912097 - DNA, 15 bp, Homo sapiens
ctttagcaaggtcag

SEQ ID NO: 1912098 - DNA, 15 bp, Homo sapiens
tttagcaaggtcagc

SEQ ID NO: 1912099 - DNA, 15 bp, Homo sapiens
ttagcaaggtcagca

SEQ ID NO: 1912100 - DNA, 15 bp, Homo sapiens
tagcaaggtcagcag

SEQ ID NO: 1912101 - DNA, 15 bp, Homo sapiens
agcaaggtcagcaga

SEQ ID NO: 1912102 - DNA, 15 bp, Homo sapiens
gcaaggtcagcagaa

SEQ ID NO: 1912103 - DNA, 15 bp, Homo sapiens
caaggtcagcagaag

SEQ ID NO: 1912104 - DNA, 15 bp, Homo sapiens
aaggtcagcagaagt

SEQ ID NO: 1912105 - DNA, 15 bp, Homo sapiens
aggtcagcagaagtc

SEQ ID NO: 1912106 - DNA, 15 bp, Homo sapiens
ggtcagcagaagtca

SEQ ID NO: 1912107 - DNA, 15 bp, Homo sapiens
gtcagcagaagtcac

SEQ ID NO: 1912108 - DNA, 15 bp, Homo sapiens
tcagcagaagtcacc

SEQ ID NO: 1912109 - DNA, 15 bp, Homo sapiens
cagcagaagtcacct

SEQ ID NO: 1912110 - DNA, 15 bp, Homo sapiens
agcagaagtcacctc

SEQ ID NO: 1912111 - DNA, 15 bp, Homo sapiens
gcagaagtcacctct

SEQ ID NO: 1912112 - DNA, 15 bp, Homo sapiens
cagaagtcacctctt

SEQ ID NO: 1912113 - DNA, 15 bp, Homo sapiens
agaagtcacctcttt

SEQ ID NO: 1912114 - DNA, 15 bp, Homo sapiens
gaagtcacctctttg

SEQ ID NO: 1912115 - DNA, 15 bp, Homo sapiens
aagtcacctctttgg

SEQ ID NO: 1912116 - DNA, 15 bp, Homo sapiens
agtcacctctttgga

SEQ ID NO: 1912117 - DNA, 15 bp, Homo sapiens
gtcacctctttggat

SEQ ID NO: 1912118 - DNA, 15 bp, Homo sapiens
tcacctctttggatc

SEQ ID NO: 1912119 - DNA, 15 bp, Homo sapiens
cacctctttggatcc

SEQ ID NO: 1912120 - DNA, 15 bp, Homo sapiens
acctctttggatcct

SEQ ID NO: 1912121 - DNA, 15 bp, Homo sapiens
cctctttggatcctg

SEQ ID NO: 1912122 - DNA, 15 bp, Homo sapiens
ctctttggatcctgg

SEQ ID NO: 1912123 - DNA, 15 bp, Homo sapiens
tctttggatcctgga

SEQ ID NO: 1912124 - DNA, 15 bp, Homo sapiens
ctttggatcctggaa

SEQ ID NO: 1912125 - DNA, 15 bp, Homo sapiens
tttggatcctggaag

SEQ ID NO: 1912126 - DNA, 15 bp, Homo sapiens
ttggatcctggaaga

SEQ ID NO: 1912127 - DNA, 15 bp, Homo sapiens
tggatcctggaagag

SEQ ID NO: 1912128 - DNA, 15 bp, Homo sapiens
ggatcctggaagagt

SEQ ID NO: 1912129 - DNA, 15 bp, Homo sapiens
gatcctggaagagta

SEQ ID NO: 1912130 - DNA, 15 bp, Homo sapiens
atcctggaagagtag

SEQ ID NO: 1912131 - DNA, 15 bp, Homo sapiens
tcctggaagagtagg

SEQ ID NO: 1912132 - DNA, 15 bp, Homo sapiens
cctggaagagtaggg

SEQ ID NO: 1912133 - DNA, 15 bp, Homo sapiens
ctggaagagtaggga

SEQ ID NO: 1912134 - DNA, 15 bp, Homo sapiens
tggaagagtagggaa

SEQ ID NO: 1912135 - DNA, 15 bp, Homo sapiens
ggaagagtagggaaa

SEQ ID NO: 1912136 - DNA, 15 bp, Homo sapiens
gaagagtagggaaat

SEQ ID NO: 1912137 - DNA, 15 bp, Homo sapiens
aagagtagggaaata

SEQ ID NO: 1912138 - DNA, 15 bp, Homo sapiens
agagtagggaaatac

SEQ ID NO: 1912139 - DNA, 15 bp, Homo sapiens
gagtagggaaatacg

SEQ ID NO: 1912140 - DNA, 15 bp, Homo sapiens
agtagggaaatacgg

SEQ ID NO: 1912141 - DNA, 15 bp, Homo sapiens
gtagggaaatacgga

SEQ ID NO: 1912142 - DNA, 15 bp, Homo sapiens
tagggaaatacggaa

SEQ ID NO: 1912143 - DNA, 15 bp, Homo sapiens
agggaaatacggaaa

SEQ ID NO: 1912144 - DNA, 15 bp, Homo sapiens
gggaaatacggaaac

SEQ ID NO: 1912145 - DNA, 15 bp, Homo sapiens
ggaaatacggaaaca

SEQ ID NO: 1912146 - DNA, 15 bp, Homo sapiens
gaaatacggaaacaa

SEQ ID NO: 1912147 - DNA, 15 bp, Homo sapiens
aaatacggaaacaag

SEQ ID NO: 1912148 - DNA, 15 bp, Homo sapiens
aatacggaaacaaga

SEQ ID NO: 1912149 - DNA, 15 bp, Homo sapiens
atacggaaacaagaa

SEQ ID NO: 1912150 - DNA, 15 bp, Homo sapiens
tacggaaacaagaat

SEQ ID NO: 1912151 - DNA, 15 bp, Homo sapiens
acggaaacaagaatc

SEQ ID NO: 1912152 - DNA, 15 bp, Homo sapiens
cggaaacaagaatct

SEQ ID NO: 1912153 - DNA, 15 bp, Homo sapiens
ggaaacaagaatctc

SEQ ID NO: 1912154 - DNA, 15 bp, Homo sapiens
gaaacaagaatctca

SEQ ID NO: 1912155 - DNA, 15 bp, Homo sapiens
aaacaagaatctcac

SEQ ID NO: 1912156 - DNA, 15 bp, Homo sapiens
aacaagaatctcacc

SEQ ID NO: 1912157 - DNA, 15 bp, Homo sapiens
acaagaatctcacct

SEQ ID NO: 1912158 - DNA, 15 bp, Homo sapiens
caagaatctcacctt

SEQ ID NO: 1912159 - DNA, 15 bp, Homo sapiens
aagaatctcaccttt

SEQ ID NO: 1912160 - DNA, 15 bp, Homo sapiens
agaatctcacctttc

SEQ ID NO: 1912161 - DNA, 15 bp, Homo sapiens
gaatctcacctttcc

SEQ ID NO: 1912162 - DNA, 15 bp, Homo sapiens
aatctcacctttcca

SEQ ID NO: 1912163 - DNA, 15 bp, Homo sapiens
atctcacctttccac

SEQ ID NO: 1912164 - DNA, 15 bp, Homo sapiens
tctcacctttccact

SEQ ID NO: 1912165 - DNA, 15 bp, Homo sapiens
ctcacctttccactc

SEQ ID NO: 1912166 - DNA, 15 bp, Homo sapiens
tcacctttccactct

SEQ ID NO: 1912167 - DNA, 15 bp, Homo sapiens
cacctttccactctc

SEQ ID NO: 1912168 - DNA, 15 bp, Homo sapiens
acctttccactctcc

SEQ ID NO: 1912169 - DNA, 15 bp, Homo sapiens
cctttccactctcca

SEQ ID NO: 1912170 - DNA, 15 bp, Homo sapiens
ctttccactctccat

SEQ ID NO: 1912171 - DNA, 15 bp, Homo sapiens
tttccactctccatg

SEQ ID NO: 1912172 - DNA, 15 bp, Homo sapiens
ttccactctccatga

SEQ ID NO: 1912173 - DNA, 15 bp, Homo sapiens
tccactctccatgat

SEQ ID NO: 1912174 - DNA, 15 bp, Homo sapiens
ccactctccatgatt

SEQ ID NO: 1912175 - DNA, 15 bp, Homo sapiens
cactctccatgattt

SEQ ID NO: 1912176 - DNA, 15 bp, Homo sapiens
actctccatgatttc

SEQ ID NO: 1912177 - DNA, 15 bp, Homo sapiens
ctctccatgatttct

SEQ ID NO: 1912178 - DNA, 15 bp, Homo sapiens
tctccatgatttctc

SEQ ID NO: 1912179 - DNA, 15 bp, Homo sapiens
ctccatgatttctcc

SEQ ID NO: 1912180 - DNA, 15 bp, Homo sapiens
tccatgatttctcca

SEQ ID NO: 1912181 - DNA, 15 bp, Homo sapiens
ccatgatttctccag

SEQ ID NO: 1912182 - DNA, 15 bp, Homo sapiens
catgatttctccagt

SEQ ID NO: 1912183 - DNA, 15 bp, Homo sapiens
atgatttctccagtc

SEQ ID NO: 1912184 - DNA, 15 bp, Homo sapiens
tgatttctccagtca

SEQ ID NO: 1912185 - DNA, 15 bp, Homo sapiens
gatttctccagtcat

SEQ ID NO: 1912186 - DNA, 15 bp, Homo sapiens
atttctccagtcatc

SEQ ID NO: 1912187 - DNA, 15 bp, Homo sapiens
tttctccagtcatcc

SEQ ID NO: 1912188 - DNA, 15 bp, Homo sapiens
ttctccagtcatcca

SEQ ID NO: 1912189 - DNA, 15 bp, Homo sapiens
tctccagtcatccac

SEQ ID NO: 1912190 - DNA, 15 bp, Homo sapiens
ctccagtcatccaca

SEQ ID NO: 1912191 - DNA, 15 bp, Homo sapiens
tccagtcatccacat

SEQ ID NO: 1912192 - DNA, 15 bp, Homo sapiens
ccagtcatccacatc

SEQ ID NO: 1912193 - DNA, 15 bp, Homo sapiens
cagtcatccacatca

SEQ ID NO: 1912194 - DNA, 15 bp, Homo sapiens
agtcatccacatcaa

SEQ ID NO: 1912195 - DNA, 15 bp, Homo sapiens
gtcatccacatcaag

SEQ ID NO: 1912196 - DNA, 15 bp, Homo sapiens
tcatccacatcaagt

SEQ ID NO: 1912197 - DNA, 15 bp, Homo sapiens
catccacatcaagta

SEQ ID NO: 1912198 - DNA, 15 bp, Homo sapiens
atccacatcaagtac

SEQ ID NO: 1912199 - DNA, 15 bp, Homo sapiens
tccacatcaagtact

SEQ ID NO: 1912200 - DNA, 15 bp, Homo sapiens
ccacatcaagtacta

SEQ ID NO: 1912201 - DNA, 15 bp, Homo sapiens
cacatcaagtactag

SEQ ID NO: 1912202 - DNA, 15 bp, Homo sapiens
acatcaagtactaga

SEQ ID NO: 1912203 - DNA, 15 bp, Homo sapiens
catcaagtactagag

SEQ ID NO: 1912204 - DNA, 15 bp, Homo sapiens
atcaagtactagagc

SEQ ID NO: 1912205 - DNA, 15 bp, Homo sapiens
tcaagtactagagca

SEQ ID NO: 1912206 - DNA, 15 bp, Homo sapiens
caagtactagagcat

SEQ ID NO: 1912207 - DNA, 15 bp, Homo sapiens
aagtactagagcata

SEQ ID NO: 1912208 - DNA, 15 bp, Homo sapiens
agtactagagcataa

SEQ ID NO: 1912209 - DNA, 15 bp, Homo sapiens
gtactagagcataaa

SEQ ID NO: 1912210 - DNA, 15 bp, Homo sapiens
tactagagcataaat

SEQ ID NO: 1912211 - DNA, 15 bp, Homo sapiens
actagagcataaatc

SEQ ID NO: 1912212 - DNA, 15 bp, Homo sapiens
ctagagcataaatct

SEQ ID NO: 1912213 - DNA, 15 bp, Homo sapiens
tagagcataaatcta

SEQ ID NO: 1912214 - DNA, 15 bp, Homo sapiens
agagcataaatctaa

SEQ ID NO: 1912215 - DNA, 15 bp, Homo sapiens
gagcataaatctaaa

SEQ ID NO: 1912216 - DNA, 15 bp, Homo sapiens
agcataaatctaaac

SEQ ID NO: 1912217 - DNA, 15 bp, Homo sapiens
gcataaatctaaact

SEQ ID NO: 1912218 - DNA, 15 bp, Homo sapiens
cataaatctaaacta

SEQ ID NO: 1912219 - DNA, 15 bp, Homo sapiens
ataaatctaaactat

SEQ ID NO: 1912220 - DNA, 15 bp, Homo sapiens
taaatctaaactata

SEQ ID NO: 1912221 - DNA, 15 bp, Homo sapiens
aaatctaaactatat

SEQ ID NO: 1912222 - DNA, 15 bp, Homo sapiens
aatctaaactatatc

SEQ ID NO: 1912223 - DNA, 15 bp, Homo sapiens
atctaaactatatcc

SEQ ID NO: 1912224 - DNA, 15 bp, Homo sapiens
tctaaactatatcct

SEQ ID NO: 1912225 - DNA, 15 bp, Homo sapiens
ctaaactatatcctt

SEQ ID NO: 1912226 - DNA, 15 bp, Homo sapiens
taaactatatccttt

SEQ ID NO: 1912227 - DNA, 15 bp, Homo sapiens
aaactatatcctttt

SEQ ID NO: 1912228 - DNA, 15 bp, Homo sapiens
aactatatccttttt

SEQ ID NO: 1912229 - DNA, 15 bp, Homo sapiens
actatatcctttttc

SEQ ID NO: 1912230 - DNA, 15 bp, Homo sapiens
ctatatcctttttct

SEQ ID NO: 1912231 - DNA, 15 bp, Homo sapiens
tatatcctttttctt

SEQ ID NO: 1912232 - DNA, 15 bp, Homo sapiens
atatcctttttctta

SEQ ID NO: 1912233 - DNA, 15 bp, Homo sapiens
tatcctttttcttac

SEQ ID NO: 1912234 - DNA, 15 bp, Homo sapiens
atcctttttcttact

SEQ ID NO: 1912235 - DNA, 15 bp, Homo sapiens
tcctttttcttactt

SEQ ID NO: 1912236 - DNA, 15 bp, Homo sapiens
cctttttcttacttc

SEQ ID NO: 1912237 - DNA, 15 bp, Homo sapiens
ctttttcttacttcc

SEQ ID NO: 1912238 - DNA, 15 bp, Homo sapiens
tttttcttacttcct

SEQ ID NO: 1912239 - DNA, 15 bp, Homo sapiens
ttttcttacttcctc

SEQ ID NO: 1912240 - DNA, 15 bp, Homo sapiens
tttcttacttcctca

SEQ ID NO: 1912241 - DNA, 15 bp, Homo sapiens
ttcttacttcctcat

SEQ ID NO: 1912242 - DNA, 15 bp, Homo sapiens
tcttacttcctcatc

SEQ ID NO: 1912243 - DNA, 15 bp, Homo sapiens
cttacttcctcatca

SEQ ID NO: 1912244 - DNA, 15 bp, Homo sapiens
ttacttcctcatcat

SEQ ID NO: 1912245 - DNA, 15 bp, Homo sapiens
tacttcctcatcatc

SEQ ID NO: 1912246 - DNA, 15 bp, Homo sapiens
acttcctcatcatcc

SEQ ID NO: 1912247 - DNA, 15 bp, Homo sapiens
cttcctcatcatccc

SEQ ID NO: 1912248 - DNA, 15 bp, Homo sapiens
ttcctcatcatcccc

SEQ ID NO: 1912249 - DNA, 15 bp, Homo sapiens
tcctcatcatcccct

SEQ ID NO: 1912250 - DNA, 15 bp, Homo sapiens
cctcatcatcccctg

SEQ ID NO: 1912251 - DNA, 15 bp, Homo sapiens
ctcatcatcccctgt

SEQ ID NO: 1912252 - DNA, 15 bp, Homo sapiens
tcatcatcccctgta

SEQ ID NO: 1912253 - DNA, 15 bp, Homo sapiens
catcatcccctgtat

SEQ ID NO: 1912254 - DNA, 15 bp, Homo sapiens
atcatcccctgtatt

SEQ ID NO: 1912255 - DNA, 15 bp, Homo sapiens
tcatcccctgtattc

SEQ ID NO: 1912256 - DNA, 15 bp, Homo sapiens
catcccctgtattct

SEQ ID NO: 1912257 - DNA, 15 bp, Homo sapiens
atcccctgtattcta

SEQ ID NO: 1912258 - DNA, 15 bp, Homo sapiens
tcccctgtattctat

SEQ ID NO: 1912259 - DNA, 15 bp, Homo sapiens
cccctgtattctatc

SEQ ID NO: 1912260 - DNA, 15 bp, Homo sapiens
ccctgtattctatca

SEQ ID NO: 1912261 - DNA, 15 bp, Homo sapiens
cctgtattctatcag

SEQ ID NO: 1912262 - DNA, 15 bp, Homo sapiens
ctgtattctatcagc

SEQ ID NO: 1912263 - DNA, 15 bp, Homo sapiens
tgtattctatcagcc

SEQ ID NO: 1912264 - DNA, 15 bp, Homo sapiens
gtattctatcagcca

SEQ ID NO: 1912265 - DNA, 15 bp, Homo sapiens
tattctatcagccac

SEQ ID NO: 1912266 - DNA, 15 bp, Homo sapiens
attctatcagccacc

SEQ ID NO: 1912267 - DNA, 15 bp, Homo sapiens
ttctatcagccacca

SEQ ID NO: 1912268 - DNA, 15 bp, Homo sapiens
tctatcagccaccaa

SEQ ID NO: 1912269 - DNA, 15 bp, Homo sapiens
ctatcagccaccaaa

SEQ ID NO: 1912270 - DNA, 15 bp, Homo sapiens
tatcagccaccaaat

SEQ ID NO: 1912271 - DNA, 15 bp, Homo sapiens
atcagccaccaaatc

SEQ ID NO: 1912272 - DNA, 15 bp, Homo sapiens
tcagccaccaaatcc

SEQ ID NO: 1912273 - DNA, 15 bp, Homo sapiens
cagccaccaaatcct

SEQ ID NO: 1912274 - DNA, 15 bp, Homo sapiens
agccaccaaatcctg

SEQ ID NO: 1912275 - DNA, 15 bp, Homo sapiens
gccaccaaatcctga

SEQ ID NO: 1912276 - DNA, 15 bp, Homo sapiens
ccaccaaatcctgaa

SEQ ID NO: 1912277 - DNA, 15 bp, Homo sapiens
caccaaatcctgaag

SEQ ID NO: 1912278 - DNA, 15 bp, Homo sapiens
accaaatcctgaagt

SEQ ID NO: 1912279 - DNA, 15 bp, Homo sapiens
ccaaatcctgaagtt

SEQ ID NO: 1912280 - DNA, 15 bp, Homo sapiens
caaatcctgaagttc

SEQ ID NO: 1912281 - DNA, 15 bp, Homo sapiens
aaatcctgaagttct

SEQ ID NO: 1912282 - DNA, 15 bp, Homo sapiens
aatcctgaagttctg

SEQ ID NO: 1912283 - DNA, 15 bp, Homo sapiens
atcctgaagttctgt

SEQ ID NO: 1912284 - DNA, 15 bp, Homo sapiens
tcctgaagttctgtc

SEQ ID NO: 1912285 - DNA, 15 bp, Homo sapiens
cctgaagttctgtct

SEQ ID NO: 1912286 - DNA, 15 bp, Homo sapiens
ctgaagttctgtctc

SEQ ID NO: 1912287 - DNA, 15 bp, Homo sapiens
tgaagttctgtctca

SEQ ID NO: 1912288 - DNA, 15 bp, Homo sapiens
gaagttctgtctcat

SEQ ID NO: 1912289 - DNA, 15 bp, Homo sapiens
aagttctgtctcata

SEQ ID NO: 1912290 - DNA, 15 bp, Homo sapiens
agttctgtctcatag

SEQ ID NO: 1912291 - DNA, 15 bp, Homo sapiens
gttctgtctcataga

SEQ ID NO: 1912292 - DNA, 15 bp, Homo sapiens
ttctgtctcatagat

SEQ ID NO: 1912293 - DNA, 15 bp, Homo sapiens
tctgtctcatagata

SEQ ID NO: 1912294 - DNA, 15 bp, Homo sapiens
ctgtctcatagatat

SEQ ID NO: 1912295 - DNA, 15 bp, Homo sapiens
tgtctcatagatatt

SEQ ID NO: 1912296 - DNA, 15 bp, Homo sapiens
gtctcatagatattt

SEQ ID NO: 1912297 - DNA, 15 bp, Homo sapiens
tctcatagatatttc

SEQ ID NO: 1912298 - DNA, 15 bp, Homo sapiens
ctcatagatatttct

SEQ ID NO: 1912299 - DNA, 15 bp, Homo sapiens
tcatagatatttctc

SEQ ID NO: 1912300 - DNA, 15 bp, Homo sapiens
catagatatttctcc

SEQ ID NO: 1912301 - DNA, 15 bp, Homo sapiens
atagatatttctcca

SEQ ID NO: 1912302 - DNA, 15 bp, Homo sapiens
tagatatttctccat

SEQ ID NO: 1912303 - DNA, 15 bp, Homo sapiens
agatatttctccatg

SEQ ID NO: 1912304 - DNA, 15 bp, Homo sapiens
gatatttctccatgt

SEQ ID NO: 1912305 - DNA, 15 bp, Homo sapiens
atatttctccatgta

SEQ ID NO: 1912306 - DNA, 15 bp, Homo sapiens
tatttctccatgtat

SEQ ID NO: 1912307 - DNA, 15 bp, Homo sapiens
atttctccatgtatc

SEQ ID NO: 1912308 - DNA, 15 bp, Homo sapiens
tttctccatgtatcg

SEQ ID NO: 1912309 - DNA, 15 bp, Homo sapiens
ttctccatgtatcgt

SEQ ID NO: 1912310 - DNA, 15 bp, Homo sapiens
tctccatgtatcgtt

SEQ ID NO: 1912311 - DNA, 15 bp, Homo sapiens
ctccatgtatcgttt

SEQ ID NO: 1912312 - DNA, 15 bp, Homo sapiens
tccatgtatcgtttc

SEQ ID NO: 1912313 - DNA, 15 bp, Homo sapiens
ccatgtatcgtttct

SEQ ID NO: 1912314 - DNA, 15 bp, Homo sapiens
catgtatcgtttctt

SEQ ID NO: 1912315 - DNA, 15 bp, Homo sapiens
atgtatcgtttcttc

SEQ ID NO: 1912316 - DNA, 15 bp, Homo sapiens
tgtatcgtttcttct

SEQ ID NO: 1912317 - DNA, 15 bp, Homo sapiens
gtatcgtttcttctt

SEQ ID NO: 1912318 - DNA, 15 bp, Homo sapiens
tatcgtttcttcttt

SEQ ID NO: 1912319 - DNA, 15 bp, Homo sapiens
atcgtttcttcttta

SEQ ID NO: 1912320 - DNA, 15 bp, Homo sapiens
tcgtttcttctttat

SEQ ID NO: 1912321 - DNA, 15 bp, Homo sapiens
cgtttcttctttata

SEQ ID NO: 1912322 - DNA, 15 bp, Homo sapiens
gtttcttctttatac

SEQ ID NO: 1912323 - DNA, 15 bp, Homo sapiens
tttcttctttataca

SEQ ID NO: 1912324 - DNA, 15 bp, Homo sapiens
ttcttctttatacat

SEQ ID NO: 1912325 - DNA, 15 bp, Homo sapiens
tcttctttatacatc

SEQ ID NO: 1912326 - DNA, 15 bp, Homo sapiens
cttctttatacatcc

SEQ ID NO: 1912327 - DNA, 15 bp, Homo sapiens
ttctttatacatcct

SEQ ID NO: 1912328 - DNA, 15 bp, Homo sapiens
tctttatacatccta

SEQ ID NO: 1912329 - DNA, 15 bp, Homo sapiens
ctttatacatcctac

SEQ ID NO: 1912330 - DNA, 15 bp, Homo sapiens
tttatacatcctacc

SEQ ID NO: 1912331 - DNA, 15 bp, Homo sapiens
ttatacatcctacct

SEQ ID NO: 1912332 - DNA, 15 bp, Homo sapiens
tatacatcctacctt

SEQ ID NO: 1912333 - DNA, 15 bp, Homo sapiens
atacatcctaccttg

SEQ ID NO: 1912334 - DNA, 15 bp, Homo sapiens
tacatcctaccttga

SEQ ID NO: 1912335 - DNA, 15 bp, Homo sapiens
acatcctaccttgat

SEQ ID NO: 1912336 - DNA, 15 bp, Homo sapiens
catcctaccttgatc

SEQ ID NO: 1912337 - DNA, 15 bp, Homo sapiens
atcctaccttgatcc

SEQ ID NO: 1912338 - DNA, 15 bp, Homo sapiens
tcctaccttgatcct

SEQ ID NO: 1912339 - DNA, 15 bp, Homo sapiens
cctaccttgatccta

SEQ ID NO: 1912340 - DNA, 15 bp, Homo sapiens
ctaccttgatcctag

SEQ ID NO: 1912341 - DNA, 15 bp, Homo sapiens
taccttgatcctaga

SEQ ID NO: 1912342 - DNA, 15 bp, Homo sapiens
accttgatcctagat

SEQ ID NO: 1912343 - DNA, 15 bp, Homo sapiens
ccttgatcctagatc

SEQ ID NO: 1912344 - DNA, 15 bp, Homo sapiens
cttgatcctagatcc

SEQ ID NO: 1912345 - DNA, 15 bp, Homo sapiens
ttgatcctagatcca

SEQ ID NO: 1912346 - DNA, 15 bp, Homo sapiens
tgatcctagatccag

SEQ ID NO: 1912347 - DNA, 15 bp, Homo sapiens
gatcctagatccagc

SEQ ID NO: 1912348 - DNA, 15 bp, Homo sapiens
atcctagatccagcc

SEQ ID NO: 1912349 - DNA, 15 bp, Homo sapiens
tcctagatccagccc

SEQ ID NO: 1912350 - DNA, 15 bp, Homo sapiens
cctagatccagccct

SEQ ID NO: 1912351 - DNA, 15 bp, Homo sapiens
ctagatccagccctc

SEQ ID NO: 1912352 - DNA, 15 bp, Homo sapiens
tagatccagccctca

SEQ ID NO: 1912353 - DNA, 15 bp, Homo sapiens
agatccagccctcac

SEQ ID NO: 1912354 - DNA, 15 bp, Homo sapiens
gatccagccctcact

SEQ ID NO: 1912355 - DNA, 15 bp, Homo sapiens
atccagccctcactg

SEQ ID NO: 1912356 - DNA, 15 bp, Homo sapiens
tccagccctcactgt

SEQ ID NO: 1912357 - DNA, 15 bp, Homo sapiens
ccagccctcactgtc

SEQ ID NO: 1912358 - DNA, 15 bp, Homo sapiens
cagccctcactgtcc

SEQ ID NO: 1912359 - DNA, 15 bp, Homo sapiens
agccctcactgtcct

SEQ ID NO: 1912360 - DNA, 15 bp, Homo sapiens
gccctcactgtcctt

SEQ ID NO: 1912361 - DNA, 15 bp, Homo sapiens
ccctcactgtccttt

SEQ ID NO: 1912362 - DNA, 15 bp, Homo sapiens
cctcactgtcctttg

SEQ ID NO: 1912363 - DNA, 15 bp, Homo sapiens
ctcactgtcctttgc

SEQ ID NO: 1912364 - DNA, 15 bp, Homo sapiens
tcactgtcctttgcc

SEQ ID NO: 1912365 - DNA, 15 bp, Homo sapiens
cactgtcctttgcca

SEQ ID NO: 1912366 - DNA, 15 bp, Homo sapiens
actgtcctttgccaa

SEQ ID NO: 1912367 - DNA, 15 bp, Homo sapiens
ctgtcctttgccaac

SEQ ID NO: 1912368 - DNA, 15 bp, Homo sapiens
tgtcctttgccaaca

SEQ ID NO: 1912369 - DNA, 15 bp, Homo sapiens
gtcctttgccaacac

SEQ ID NO: 1912370 - DNA, 15 bp, Homo sapiens
tcctttgccaacact

SEQ ID NO: 1912371 - DNA, 15 bp, Homo sapiens
cctttgccaacacta

SEQ ID NO: 1912372 - DNA, 15 bp, Homo sapiens
ctttgccaacactac

SEQ ID NO: 1912373 - DNA, 15 bp, Homo sapiens
tttgccaacactaca

SEQ ID NO: 1912374 - DNA, 15 bp, Homo sapiens
ttgccaacactacag

SEQ ID NO: 1912375 - DNA, 15 bp, Homo sapiens
tgccaacactacagt

SEQ ID NO: 1912376 - DNA, 15 bp, Homo sapiens
gccaacactacagta

SEQ ID NO: 1912377 - DNA, 15 bp, Homo sapiens
ccaacactacagtaa

SEQ ID NO: 1912378 - DNA, 15 bp, Homo sapiens
caacactacagtaac

SEQ ID NO: 1912379 - DNA, 15 bp, Homo sapiens
acactacagtaacaa

SEQ ID NO: 1912380 - DNA, 15 bp, Homo sapiens
cactacagtaacaat

SEQ ID NO: 1912381 - DNA, 15 bp, Homo sapiens
actacagtaacaatc

SEQ ID NO: 1912382 - DNA, 15 bp, Homo sapiens
ctacagtaacaatcc

SEQ ID NO: 1912383 - DNA, 15 bp, Homo sapiens
tacagtaacaatccc

SEQ ID NO: 1912384 - DNA, 15 bp, Homo sapiens
acagtaacaatcccc

SEQ ID NO: 1912385 - DNA, 15 bp, Homo sapiens
cagtaacaatccccc

SEQ ID NO: 1912386 - DNA, 15 bp, Homo sapiens
agtaacaatcccccc

SEQ ID NO: 1912387 - DNA, 15 bp, Homo sapiens
gtaacaatcccccca

SEQ ID NO: 1912388 - DNA, 15 bp, Homo sapiens
taacaatccccccat

SEQ ID NO: 1912389 - DNA, 15 bp, Homo sapiens
aacaatccccccatt

SEQ ID NO: 1912390 - DNA, 15 bp, Homo sapiens
acaatccccccattc

SEQ ID NO: 1912391 - DNA, 15 bp, Homo sapiens
caatccccccattcc

SEQ ID NO: 1912392 - DNA, 15 bp, Homo sapiens
aatccccccattcct

SEQ ID NO: 1912393 - DNA, 15 bp, Homo sapiens
atccccccattcctc

SEQ ID NO: 1912394 - DNA, 15 bp, Homo sapiens
tccccccattcctct

SEQ ID NO: 1912395 - DNA, 15 bp, Homo sapiens
ccccccattcctctc

SEQ ID NO: 1912396 - DNA, 15 bp, Homo sapiens
cccccattcctctct

SEQ ID NO: 1912397 - DNA, 15 bp, Homo sapiens
ccccattcctctctc

SEQ ID NO: 1912398 - DNA, 15 bp, Homo sapiens
cccattcctctctct

SEQ ID NO: 1912399 - DNA, 15 bp, Homo sapiens
ccattcctctctctg

SEQ ID NO: 1912400 - DNA, 15 bp, Homo sapiens
cattcctctctctga

SEQ ID NO: 1912401 - DNA, 15 bp, Homo sapiens
attcctctctctgat

SEQ ID NO: 1912402 - DNA, 15 bp, Homo sapiens
ttcctctctctgatt

SEQ ID NO: 1912403 - DNA, 15 bp, Homo sapiens
tcctctctctgattt

SEQ ID NO: 1912404 - DNA, 15 bp, Homo sapiens
cctctctctgattta

SEQ ID NO: 1912405 - DNA, 15 bp, Homo sapiens
ctctctctgatttaa

SEQ ID NO: 1912406 - DNA, 15 bp, Homo sapiens
tctctctgatttaag

SEQ ID NO: 1912407 - DNA, 15 bp, Homo sapiens
ctctctgatttaagc

SEQ ID NO: 1912408 - DNA, 15 bp, Homo sapiens
tctctgatttaagcc

SEQ ID NO: 1912409 - DNA, 15 bp, Homo sapiens
ctctgatttaagcct

SEQ ID NO: 1912410 - DNA, 15 bp, Homo sapiens
tctgatttaagcctt

SEQ ID NO: 1912411 - DNA, 15 bp, Homo sapiens
ctgatttaagcctta

SEQ ID NO: 1912412 - DNA, 15 bp, Homo sapiens
tgatttaagccttat

SEQ ID NO: 1912413 - DNA, 15 bp, Homo sapiens
gatttaagccttatc

SEQ ID NO: 1912414 - DNA, 15 bp, Homo sapiens
atttaagccttatcc

SEQ ID NO: 1912415 - DNA, 15 bp, Homo sapiens
tttaagccttatcct

SEQ ID NO: 1912416 - DNA, 15 bp, Homo sapiens
ttaagccttatcctg

SEQ ID NO: 1912417 - DNA, 15 bp, Homo sapiens
taagccttatcctgt

SEQ ID NO: 1912418 - DNA, 15 bp, Homo sapiens
aagccttatcctgtt

SEQ ID NO: 1912419 - DNA, 15 bp, Homo sapiens
agccttatcctgttt

SEQ ID NO: 1912420 - DNA, 15 bp, Homo sapiens
gccttatcctgtttc

SEQ ID NO: 1912421 - DNA, 15 bp, Homo sapiens
ccttatcctgtttct

SEQ ID NO: 1912422 - DNA, 15 bp, Homo sapiens
cttatcctgtttctt

SEQ ID NO: 1912423 - DNA, 15 bp, Homo sapiens
ttatcctgtttctta

SEQ ID NO: 1912424 - DNA, 15 bp, Homo sapiens
tatcctgtttcttaa

SEQ ID NO: 1912425 - DNA, 15 bp, Homo sapiens
atcctgtttcttaaa

SEQ ID NO: 1912426 - DNA, 15 bp, Homo sapiens
tcctgtttcttaaac

SEQ ID NO: 1912427 - DNA, 15 bp, Homo sapiens
cctgtttcttaaact

SEQ ID NO: 1912428 - DNA, 15 bp, Homo sapiens
ctgtttcttaaactc

SEQ ID NO: 1912429 - DNA, 15 bp, Homo sapiens
tgtttcttaaactct

SEQ ID NO: 1912430 - DNA, 15 bp, Homo sapiens
gtttcttaaactctg

SEQ ID NO: 1912431 - DNA, 15 bp, Homo sapiens
tttcttaaactctgc

SEQ ID NO: 1912432 - DNA, 15 bp, Homo sapiens
ttcttaaactctgca

SEQ ID NO: 1912433 - DNA, 15 bp, Homo sapiens
tcttaaactctgcac

SEQ ID NO: 1912434 - DNA, 15 bp, Homo sapiens
cttaaactctgcaca

SEQ ID NO: 1912435 - DNA, 15 bp, Homo sapiens
ttaaactctgcacag

SEQ ID NO: 1912436 - DNA, 15 bp, Homo sapiens
taaactctgcacaga

SEQ ID NO: 1912437 - DNA, 15 bp, Homo sapiens
aaactctgcacagaa

SEQ ID NO: 1912438 - DNA, 15 bp, Homo sapiens
aactctgcacagaag

SEQ ID NO: 1912439 - DNA, 15 bp, Homo sapiens
actctgcacagaagc

SEQ ID NO: 1912440 - DNA, 15 bp, Homo sapiens
ctctgcacagaagcc

SEQ ID NO: 1912441 - DNA, 15 bp, Homo sapiens
tctgcacagaagcca

SEQ ID NO: 1912442 - DNA, 15 bp, Homo sapiens
ctgcacagaagccag

SEQ ID NO: 1912443 - DNA, 15 bp, Homo sapiens
tgcacagaagccaga

SEQ ID NO: 1912444 - DNA, 15 bp, Homo sapiens
gcacagaagccagag

SEQ ID NO: 1912445 - DNA, 15 bp, Homo sapiens
cacagaagccagagt

SEQ ID NO: 1912446 - DNA, 15 bp, Homo sapiens
acagaagccagagtg

SEQ ID NO: 1912447 - DNA, 15 bp, Homo sapiens
cagaagccagagtga

SEQ ID NO: 1912448 - DNA, 15 bp, Homo sapiens
agaagccagagtgat

SEQ ID NO: 1912449 - DNA, 15 bp, Homo sapiens
gaagccagagtgatc

SEQ ID NO: 1912450 - DNA, 15 bp, Homo sapiens
aagccagagtgatca

SEQ ID NO: 1912451 - DNA, 15 bp, Homo sapiens
agccagagtgatcat

SEQ ID NO: 1912452 - DNA, 15 bp, Homo sapiens
gccagagtgatcatt

SEQ ID NO: 1912453 - DNA, 15 bp, Homo sapiens
ccagagtgatcattt

SEQ ID NO: 1912454 - DNA, 15 bp, Homo sapiens
cagagtgatcatttt

SEQ ID NO: 1912455 - DNA, 15 bp, Homo sapiens
agagtgatcattttg

SEQ ID NO: 1912456 - DNA, 15 bp, Homo sapiens
gagtgatcattttga

SEQ ID NO: 1912457 - DNA, 15 bp, Homo sapiens
agtgatcattttgaa

SEQ ID NO: 1912458 - DNA, 15 bp, Homo sapiens
gtgatcattttgaaa

SEQ ID NO: 1912459 - DNA, 15 bp, Homo sapiens
tgatcattttgaaac

SEQ ID NO: 1912460 - DNA, 15 bp, Homo sapiens
gatcattttgaaact

SEQ ID NO: 1912461 - DNA, 15 bp, Homo sapiens
atcattttgaaactc

SEQ ID NO: 1912462 - DNA, 15 bp, Homo sapiens
tcattttgaaactca

SEQ ID NO: 1912463 - DNA, 15 bp, Homo sapiens
cattttgaaactcaa

SEQ ID NO: 1912464 - DNA, 15 bp, Homo sapiens
attttgaaactcaat

SEQ ID NO: 1912465 - DNA, 15 bp, Homo sapiens
ttttgaaactcaatc

SEQ ID NO: 1912466 - DNA, 15 bp, Homo sapiens
tttgaaactcaatcg

SEQ ID NO: 1912467 - DNA, 15 bp, Homo sapiens
ttgaaactcaatcgt

SEQ ID NO: 1912468 - DNA, 15 bp, Homo sapiens
tgaaactcaatcgtg

SEQ ID NO: 1912469 - DNA, 15 bp, Homo sapiens
gaaactcaatcgtgt

SEQ ID NO: 1912470 - DNA, 15 bp, Homo sapiens
aaactcaatcgtgtc

SEQ ID NO: 1912471 - DNA, 15 bp, Homo sapiens
aactcaatcgtgtca

SEQ ID NO: 1912472 - DNA, 15 bp, Homo sapiens
actcaatcgtgtcac

SEQ ID NO: 1912473 - DNA, 15 bp, Homo sapiens
ctcaatcgtgtcacc

SEQ ID NO: 1912474 - DNA, 15 bp, Homo sapiens
tcaatcgtgtcaccc

SEQ ID NO: 1912475 - DNA, 15 bp, Homo sapiens
caatcgtgtcaccct

SEQ ID NO: 1912476 - DNA, 15 bp, Homo sapiens
aatcgtgtcaccctc

SEQ ID NO: 1912477 - DNA, 15 bp, Homo sapiens
atcgtgtcaccctct

SEQ ID NO: 1912478 - DNA, 15 bp, Homo sapiens
tcgtgtcaccctctg

SEQ ID NO: 1912479 - DNA, 15 bp, Homo sapiens
cgtgtcaccctctga

SEQ ID NO: 1912480 - DNA, 15 bp, Homo sapiens
gtgtcaccctctgac

SEQ ID NO: 1912481 - DNA, 15 bp, Homo sapiens
tgtcaccctctgaca

SEQ ID NO: 1912482 - DNA, 15 bp, Homo sapiens
gtcaccctctgacag

SEQ ID NO: 1912483 - DNA, 15 bp, Homo sapiens
tcaccctctgacaga

SEQ ID NO: 1912484 - DNA, 15 bp, Homo sapiens
caccctctgacagat

SEQ ID NO: 1912485 - DNA, 15 bp, Homo sapiens
accctctgacagatt

SEQ ID NO: 1912486 - DNA, 15 bp, Homo sapiens
ccctctgacagattc

SEQ ID NO: 1912487 - DNA, 15 bp, Homo sapiens
cctctgacagattcc

SEQ ID NO: 1912488 - DNA, 15 bp, Homo sapiens
ctctgacagattcct

SEQ ID NO: 1912489 - DNA, 15 bp, Homo sapiens
tctgacagattccta

SEQ ID NO: 1912490 - DNA, 15 bp, Homo sapiens
ctgacagattcctat

SEQ ID NO: 1912491 - DNA, 15 bp, Homo sapiens
tgacagattcctatt

SEQ ID NO: 1912492 - DNA, 15 bp, Homo sapiens
gacagattcctattc

SEQ ID NO: 1912493 - DNA, 15 bp, Homo sapiens
acagattcctattca

SEQ ID NO: 1912494 - DNA, 15 bp, Homo sapiens
cagattcctattcac

SEQ ID NO: 1912495 - DNA, 15 bp, Homo sapiens
agattcctattcact

SEQ ID NO: 1912496 - DNA, 15 bp, Homo sapiens
gattcctattcacta

SEQ ID NO: 1912497 - DNA, 15 bp, Homo sapiens
attcctattcactac

SEQ ID NO: 1912498 - DNA, 15 bp, Homo sapiens
ttcctattcactaca

SEQ ID NO: 1912499 - DNA, 15 bp, Homo sapiens
tcctattcactacag

SEQ ID NO: 1912500 - DNA, 15 bp, Homo sapiens
cctattcactacaga

SEQ ID NO: 1912501 - DNA, 15 bp, Homo sapiens
ctattcactacagaa

SEQ ID NO: 1912502 - DNA, 15 bp, Homo sapiens
tattcactacagaat

SEQ ID NO: 1912503 - DNA, 15 bp, Homo sapiens
attcactacagaata

SEQ ID NO: 1912504 - DNA, 15 bp, Homo sapiens
ttcactacagaataa

SEQ ID NO: 1912505 - DNA, 15 bp, Homo sapiens
tcactacagaataaa

SEQ ID NO: 1912506 - DNA, 15 bp, Homo sapiens
cactacagaataaag

SEQ ID NO: 1912507 - DNA, 15 bp, Homo sapiens
actacagaataaagg

SEQ ID NO: 1912508 - DNA, 15 bp, Homo sapiens
ctacagaataaaggc

SEQ ID NO: 1912509 - DNA, 15 bp, Homo sapiens
tacagaataaaggcc

SEQ ID NO: 1912510 - DNA, 15 bp, Homo sapiens
acagaataaaggcca

SEQ ID NO: 1912511 - DNA, 15 bp, Homo sapiens
cagaataaaggccaa

SEQ ID NO: 1912512 - DNA, 15 bp, Homo sapiens
agaataaaggccaag

SEQ ID NO: 1912513 - DNA, 15 bp, Homo sapiens
gaataaaggccaagc

SEQ ID NO: 1912514 - DNA, 15 bp, Homo sapiens
aataaaggccaagct

SEQ ID NO: 1912515 - DNA, 15 bp, Homo sapiens
ataaaggccaagctc

SEQ ID NO: 1912516 - DNA, 15 bp, Homo sapiens
taaaggccaagctct

SEQ ID NO: 1912517 - DNA, 15 bp, Homo sapiens
aaaggccaagctctt

SEQ ID NO: 1912518 - DNA, 15 bp, Homo sapiens
aaggccaagctcttt

SEQ ID NO: 1912519 - DNA, 15 bp, Homo sapiens
aggccaagctcttta

SEQ ID NO: 1912520 - DNA, 15 bp, Homo sapiens
ggccaagctctttag

SEQ ID NO: 1912521 - DNA, 15 bp, Homo sapiens
gccaagctctttaga

SEQ ID NO: 1912522 - DNA, 15 bp, Homo sapiens
ccaagctctttagaa

SEQ ID NO: 1912523 - DNA, 15 bp, Homo sapiens
caagctctttagaat

SEQ ID NO: 1912524 - DNA, 15 bp, Homo sapiens
aagctctttagaatg

SEQ ID NO: 1912525 - DNA, 15 bp, Homo sapiens
agctctttagaatga

SEQ ID NO: 1912526 - DNA, 15 bp, Homo sapiens
gctctttagaatgac

SEQ ID NO: 1912527 - DNA, 15 bp, Homo sapiens
ctctttagaatgact

SEQ ID NO: 1912528 - DNA, 15 bp, Homo sapiens
tctttagaatgactt

SEQ ID NO: 1912529 - DNA, 15 bp, Homo sapiens
ctttagaatgactta

SEQ ID NO: 1912530 - DNA, 15 bp, Homo sapiens
tttagaatgacttac

SEQ ID NO: 1912531 - DNA, 15 bp, Homo sapiens
ttagaatgacttaca

SEQ ID NO: 1912532 - DNA, 15 bp, Homo sapiens
tagaatgacttacaa

SEQ ID NO: 1912533 - DNA, 15 bp, Homo sapiens
agaatgacttacaaa

SEQ ID NO: 1912534 - DNA, 15 bp, Homo sapiens
gaatgacttacaaaa

SEQ ID NO: 1912535 - DNA, 15 bp, Homo sapiens
aatgacttacaaaac

SEQ ID NO: 1912536 - DNA, 15 bp, Homo sapiens
atgacttacaaaacc

SEQ ID NO: 1912537 - DNA, 15 bp, Homo sapiens
tgacttacaaaaccc

SEQ ID NO: 1912538 - DNA, 15 bp, Homo sapiens
gacttacaaaaccct

SEQ ID NO: 1912539 - DNA, 15 bp, Homo sapiens
acttacaaaaccctt

SEQ ID NO: 1912540 - DNA, 15 bp, Homo sapiens
cttacaaaacccttc

SEQ ID NO: 1912541 - DNA, 15 bp, Homo sapiens
ttacaaaacccttca

SEQ ID NO: 1912542 - DNA, 15 bp, Homo sapiens
tacaaaacccttcat

SEQ ID NO: 1912543 - DNA, 15 bp, Homo sapiens
acaaaacccttcatg

SEQ ID NO: 1912544 - DNA, 15 bp, Homo sapiens
caaaacccttcatgg

SEQ ID NO: 1912545 - DNA, 15 bp, Homo sapiens
aaaacccttcatggc

SEQ ID NO: 1912546 - DNA, 15 bp, Homo sapiens
aaacccttcatggcc

SEQ ID NO: 1912547 - DNA, 15 bp, Homo sapiens
aacccttcatggcct

SEQ ID NO: 1912548 - DNA, 15 bp, Homo sapiens
acccttcatggccta

SEQ ID NO: 1912549 - DNA, 15 bp, Homo sapiens
cccttcatggcctac

SEQ ID NO: 1912550 - DNA, 15 bp, Homo sapiens
ccttcatggcctacc

SEQ ID NO: 1912551 - DNA, 15 bp, Homo sapiens
cttcatggcctacct

SEQ ID NO: 1912552 - DNA, 15 bp, Homo sapiens
ttcatggcctaccta

SEQ ID NO: 1912553 - DNA, 15 bp, Homo sapiens
tcatggcctacctac

SEQ ID NO: 1912554 - DNA, 15 bp, Homo sapiens
catggcctacctacc

SEQ ID NO: 1912555 - DNA, 15 bp, Homo sapiens
atggcctacctacct

SEQ ID NO: 1912556 - DNA, 15 bp, Homo sapiens
tggcctacctacctt

SEQ ID NO: 1912557 - DNA, 15 bp, Homo sapiens
ggcctacctaccttt

SEQ ID NO: 1912558 - DNA, 15 bp, Homo sapiens
gcctacctacctttg

SEQ ID NO: 1912559 - DNA, 15 bp, Homo sapiens
cctacctacctttgc

SEQ ID NO: 1912560 - DNA, 15 bp, Homo sapiens
ctacctacctttgca

SEQ ID NO: 1912561 - DNA, 15 bp, Homo sapiens
tacctacctttgcaa

SEQ ID NO: 1912562 - DNA, 15 bp, Homo sapiens
acctacctttgcaaa

SEQ ID NO: 1912563 - DNA, 15 bp, Homo sapiens
cctacctttgcaaac

SEQ ID NO: 1912564 - DNA, 15 bp, Homo sapiens
ctacctttgcaaact

SEQ ID NO: 1912565 - DNA, 15 bp, Homo sapiens
tacctttgcaaactc

SEQ ID NO: 1912566 - DNA, 15 bp, Homo sapiens
acctttgcaaactca

SEQ ID NO: 1912567 - DNA, 15 bp, Homo sapiens
cctttgcaaactcat

SEQ ID NO: 1912568 - DNA, 15 bp, Homo sapiens
ctttgcaaactcatc

SEQ ID NO: 1912569 - DNA, 15 bp, Homo sapiens
tttgcaaactcatct

SEQ ID NO: 1912570 - DNA, 15 bp, Homo sapiens
ttgcaaactcatctg

SEQ ID NO: 1912571 - DNA, 15 bp, Homo sapiens
tgcaaactcatctgc

SEQ ID NO: 1912572 - DNA, 15 bp, Homo sapiens
gcaaactcatctgcc

SEQ ID NO: 1912573 - DNA, 15 bp, Homo sapiens
caaactcatctgcct

SEQ ID NO: 1912574 - DNA, 15 bp, Homo sapiens
aaactcatctgcctc

SEQ ID NO: 1912575 - DNA, 15 bp, Homo sapiens
aactcatctgcctct

SEQ ID NO: 1912576 - DNA, 15 bp, Homo sapiens
tcatctgcctctttt

SEQ ID NO: 1912577 - DNA, 15 bp, Homo sapiens
catctgcctcttttt

SEQ ID NO: 1912578 - DNA, 15 bp, Homo sapiens
atctgcctctttttc

SEQ ID NO: 1912579 - DNA, 15 bp, Homo sapiens
tctgcctctttttcc

SEQ ID NO: 1912580 - DNA, 15 bp, Homo sapiens
ctgcctctttttccc

SEQ ID NO: 1912581 - DNA, 15 bp, Homo sapiens
tgcctctttttccct

SEQ ID NO: 1912582 - DNA, 15 bp, Homo sapiens
gcctctttttccctg

SEQ ID NO: 1912583 - DNA, 15 bp, Homo sapiens
cctctttttccctgt

SEQ ID NO: 1912584 - DNA, 15 bp, Homo sapiens
ctctttttccctgtc

SEQ ID NO: 1912585 - DNA, 15 bp, Homo sapiens
tctttttccctgtcc

SEQ ID NO: 1912586 - DNA, 15 bp, Homo sapiens
ctttttccctgtccc

SEQ ID NO: 1912587 - DNA, 15 bp, Homo sapiens
tttttccctgtccca

SEQ ID NO: 1912588 - DNA, 15 bp, Homo sapiens
ttttccctgtcccat

SEQ ID NO: 1912589 - DNA, 15 bp, Homo sapiens
ttccctgtcccatag

SEQ ID NO: 1912590 - DNA, 15 bp, Homo sapiens
tccctgtcccatagg

SEQ ID NO: 1912591 - DNA, 15 bp, Homo sapiens
ccctgtcccataggc

SEQ ID NO: 1912592 - DNA, 15 bp, Homo sapiens
cctgtcccataggca

SEQ ID NO: 1912593 - DNA, 15 bp, Homo sapiens
ctgtcccataggcat

SEQ ID NO: 1912594 - DNA, 15 bp, Homo sapiens
tgtcccataggcatc

SEQ ID NO: 1912595 - DNA, 15 bp, Homo sapiens
gtcccataggcatct

SEQ ID NO: 1912596 - DNA, 15 bp, Homo sapiens
tcccataggcatctc

SEQ ID NO: 1912597 - DNA, 15 bp, Homo sapiens
cccataggcatctca

SEQ ID NO: 1912598 - DNA, 15 bp, Homo sapiens
ccataggcatctcag

SEQ ID NO: 1912599 - DNA, 15 bp, Homo sapiens
cataggcatctcagt

SEQ ID NO: 1912600 - DNA, 15 bp, Homo sapiens
ataggcatctcagta

SEQ ID NO: 1912601 - DNA, 15 bp, Homo sapiens
taggcatctcagtaa

SEQ ID NO: 1912602 - DNA, 15 bp, Homo sapiens
aggcatctcagtaat

SEQ ID NO: 1912603 - DNA, 15 bp, Homo sapiens
ggcatctcagtaata

SEQ ID NO: 1912604 - DNA, 15 bp, Homo sapiens
gcatctcagtaatat

SEQ ID NO: 1912605 - DNA, 15 bp, Homo sapiens
catctcagtaatatt

SEQ ID NO: 1912606 - DNA, 15 bp, Homo sapiens
atctcagtaatatta

SEQ ID NO: 1912607 - DNA, 15 bp, Homo sapiens
tctcagtaatattaa

SEQ ID NO: 1912608 - DNA, 15 bp, Homo sapiens
ctcagtaatattaaa

SEQ ID NO: 1912609 - DNA, 15 bp, Homo sapiens
tcagtaatattaaaa

SEQ ID NO: 1912610 - DNA, 15 bp, Homo sapiens
cagtaatattaaaac

SEQ ID NO: 1912611 - DNA, 15 bp, Homo sapiens
agtaatattaaaaca

SEQ ID NO: 1912612 - DNA, 15 bp, Homo sapiens
gtaatattaaaacag

SEQ ID NO: 1912613 - DNA, 15 bp, Homo sapiens
taatattaaaacagt

SEQ ID NO: 1912614 - DNA, 15 bp, Homo sapiens
aatattaaaacagtt

SEQ ID NO: 1912615 - DNA, 15 bp, Homo sapiens
atattaaaacagttg

SEQ ID NO: 1912616 - DNA, 15 bp, Homo sapiens
tattaaaacagttgt

SEQ ID NO: 1912617 - DNA, 15 bp, Homo sapiens
attaaaacagttgta

SEQ ID NO: 1912618 - DNA, 15 bp, Homo sapiens
ttaaaacagttgtag

SEQ ID NO: 1912619 - DNA, 15 bp, Homo sapiens
taaaacagttgtagt

SEQ ID NO: 1912620 - DNA, 15 bp, Homo sapiens
aaaacagttgtagtt

SEQ ID NO: 1912621 - DNA, 15 bp, Homo sapiens
aaacagttgtagttt

SEQ ID NO: 1912622 - DNA, 15 bp, Homo sapiens
aacagttgtagtttc

SEQ ID NO: 1912623 - DNA, 15 bp, Homo sapiens
acagttgtagtttct

SEQ ID NO: 1912624 - DNA, 15 bp, Homo sapiens
cagttgtagtttctg

SEQ ID NO: 1912625 - DNA, 15 bp, Homo sapiens
agttgtagtttctga

SEQ ID NO: 1912626 - DNA, 15 bp, Homo sapiens
gttgtagtttctgat

SEQ ID NO: 1912627 - DNA, 15 bp, Homo sapiens
ttgtagtttctgata

SEQ ID NO: 1912628 - DNA, 15 bp, Homo sapiens
tgtagtttctgatat

SEQ ID NO: 1912629 - DNA, 15 bp, Homo sapiens
gtagtttctgatatt

SEQ ID NO: 1912630 - DNA, 15 bp, Homo sapiens
tagtttctgatattc

SEQ ID NO: 1912631 - DNA, 15 bp, Homo sapiens
agtttctgatattca

SEQ ID NO: 1912632 - DNA, 15 bp, Homo sapiens
gtttctgatattcac

SEQ ID NO: 1912633 - DNA, 15 bp, Homo sapiens
tttctgatattcacc

SEQ ID NO: 1912634 - DNA, 15 bp, Homo sapiens
ttctgatattcacca

SEQ ID NO: 1912635 - DNA, 15 bp, Homo sapiens
tctgatattcaccat

SEQ ID NO: 1912636 - DNA, 15 bp, Homo sapiens
ctgatattcaccatg

SEQ ID NO: 1912637 - DNA, 15 bp, Homo sapiens
tgatattcaccatgc

SEQ ID NO: 1912638 - DNA, 15 bp, Homo sapiens
gatattcaccatgca

SEQ ID NO: 1912639 - DNA, 15 bp, Homo sapiens
atattcaccatgcaa

SEQ ID NO: 1912640 - DNA, 15 bp, Homo sapiens
tattcaccatgcaat

SEQ ID NO: 1912641 - DNA, 15 bp, Homo sapiens
attcaccatgcaatt

SEQ ID NO: 1912642 - DNA, 15 bp, Homo sapiens
ttcaccatgcaattg

SEQ ID NO: 1912643 - DNA, 15 bp, Homo sapiens
tcaccatgcaattgc

SEQ ID NO: 1912644 - DNA, 15 bp, Homo sapiens
caccatgcaattgca

SEQ ID NO: 1912645 - DNA, 15 bp, Homo sapiens
accatgcaattgcaa

SEQ ID NO: 1912646 - DNA, 15 bp, Homo sapiens
ccatgcaattgcaag

SEQ ID NO: 1912647 - DNA, 15 bp, Homo sapiens
catgcaattgcaagt

SEQ ID NO: 1912648 - DNA, 15 bp, Homo sapiens
atgcaattgcaagtc

SEQ ID NO: 1912649 - DNA, 15 bp, Homo sapiens
tgcaattgcaagtct

SEQ ID NO: 1912650 - DNA, 15 bp, Homo sapiens
gcaattgcaagtctc

SEQ ID NO: 1912651 - DNA, 15 bp, Homo sapiens
caattgcaagtctcc

SEQ ID NO: 1912652 - DNA, 15 bp, Homo sapiens
aattgcaagtctcca

SEQ ID NO: 1912653 - DNA, 15 bp, Homo sapiens
attgcaagtctccat

SEQ ID NO: 1912654 - DNA, 15 bp, Homo sapiens
ttgcaagtctccatc

SEQ ID NO: 1912655 - DNA, 15 bp, Homo sapiens
tgcaagtctccatcc

SEQ ID NO: 1912656 - DNA, 15 bp, Homo sapiens
gcaagtctccatccc

SEQ ID NO: 1912657 - DNA, 15 bp, Homo sapiens
caagtctccatccct

SEQ ID NO: 1912658 - DNA, 15 bp, Homo sapiens
aagtctccatccctt

SEQ ID NO: 1912659 - DNA, 15 bp, Homo sapiens
agtctccatcccttt

SEQ ID NO: 1912660 - DNA, 15 bp, Homo sapiens
gtctccatccctttg

SEQ ID NO: 1912661 - DNA, 15 bp, Homo sapiens
tctccatccctttgt

SEQ ID NO: 1912662 - DNA, 15 bp, Homo sapiens
ctccatccctttgtt

SEQ ID NO: 1912663 - DNA, 15 bp, Homo sapiens
tccatccctttgttc

SEQ ID NO: 1912664 - DNA, 15 bp, Homo sapiens
ccatccctttgttca

SEQ ID NO: 1912665 - DNA, 15 bp, Homo sapiens
catccctttgttcat

SEQ ID NO: 1912666 - DNA, 15 bp, Homo sapiens
atccctttgttcatg

SEQ ID NO: 1912667 - DNA, 15 bp, Homo sapiens
tccctttgttcatgt

SEQ ID NO: 1912668 - DNA, 15 bp, Homo sapiens
ccctttgttcatgtg

SEQ ID NO: 1912669 - DNA, 15 bp, Homo sapiens
cctttgttcatgtga

SEQ ID NO: 1912670 - DNA, 15 bp, Homo sapiens
ctttgttcatgtgag

SEQ ID NO: 1912671 - DNA, 15 bp, Homo sapiens
tttgttcatgtgagt

SEQ ID NO: 1912672 - DNA, 15 bp, Homo sapiens
ttgttcatgtgagtc

SEQ ID NO: 1912673 - DNA, 15 bp, Homo sapiens
tgttcatgtgagtct

SEQ ID NO: 1912674 - DNA, 15 bp, Homo sapiens
gttcatgtgagtctt

SEQ ID NO: 1912675 - DNA, 15 bp, Homo sapiens
ttcatgtgagtcttt

SEQ ID NO: 1912676 - DNA, 15 bp, Homo sapiens
tcatgtgagtctttc

SEQ ID NO: 1912677 - DNA, 15 bp, Homo sapiens
catgtgagtctttct

SEQ ID NO: 1912678 - DNA, 15 bp, Homo sapiens
atgtgagtctttctg

SEQ ID NO: 1912679 - DNA, 15 bp, Homo sapiens
tgtgagtctttctgt

SEQ ID NO: 1912680 - DNA, 15 bp, Homo sapiens
gtgagtctttctgtc

SEQ ID NO: 1912681 - DNA, 15 bp, Homo sapiens
tgagtctttctgtct

SEQ ID NO: 1912682 - DNA, 15 bp, Homo sapiens
gagtctttctgtcta

SEQ ID NO: 1912683 - DNA, 15 bp, Homo sapiens
agtctttctgtctaa

SEQ ID NO: 1912684 - DNA, 15 bp, Homo sapiens
gtctttctgtctaaa

SEQ ID NO: 1912685 - DNA, 15 bp, Homo sapiens
tctttctgtctaaaa

SEQ ID NO: 1912686 - DNA, 15 bp, Homo sapiens
ctttctgtctaaaat

SEQ ID NO: 1912687 - DNA, 15 bp, Homo sapiens
tttctgtctaaaata

SEQ ID NO: 1912688 - DNA, 15 bp, Homo sapiens
ttctgtctaaaatac

SEQ ID NO: 1912689 - DNA, 15 bp, Homo sapiens
tctgtctaaaatacc

SEQ ID NO: 1912690 - DNA, 15 bp, Homo sapiens
ctgtctaaaatacct

SEQ ID NO: 1912691 - DNA, 15 bp, Homo sapiens
tgtctaaaatacctt

SEQ ID NO: 1912692 - DNA, 15 bp, Homo sapiens
gtctaaaataccttt

SEQ ID NO: 1912693 - DNA, 15 bp, Homo sapiens
tctaaaatacctttg

SEQ ID NO: 1912694 - DNA, 15 bp, Homo sapiens
ctaaaatacctttga

SEQ ID NO: 1912695 - DNA, 15 bp, Homo sapiens
taaaatacctttgac

SEQ ID NO: 1912696 - DNA, 15 bp, Homo sapiens
aaaatacctttgact

SEQ ID NO: 1912697 - DNA, 15 bp, Homo sapiens
aaatacctttgactc

SEQ ID NO: 1912698 - DNA, 15 bp, Homo sapiens
aatacctttgactct

SEQ ID NO: 1912699 - DNA, 15 bp, Homo sapiens
atacctttgactctt

SEQ ID NO: 1912700 - DNA, 15 bp, Homo sapiens
tacctttgactcttt

SEQ ID NO: 1912701 - DNA, 15 bp, Homo sapiens
acctttgactctttg

SEQ ID NO: 1912702 - DNA, 15 bp, Homo sapiens
cctttgactctttgt

SEQ ID NO: 1912703 - DNA, 15 bp, Homo sapiens
ctttgactctttgtc

SEQ ID NO: 1912704 - DNA, 15 bp, Homo sapiens
tttgactctttgtct

SEQ ID NO: 1912705 - DNA, 15 bp, Homo sapiens
ttgactctttgtctc

SEQ ID NO: 1912706 - DNA, 15 bp, Homo sapiens
tgactctttgtctca

SEQ ID NO: 1912707 - DNA, 15 bp, Homo sapiens
gactctttgtctcat

SEQ ID NO: 1912708 - DNA, 15 bp, Homo sapiens
actctttgtctcatt

SEQ ID NO: 1912709 - DNA, 15 bp, Homo sapiens
ctctttgtctcattt

SEQ ID NO: 1912710 - DNA, 15 bp, Homo sapiens
tctttgtctcatttg

SEQ ID NO: 1912711 - DNA, 15 bp, Homo sapiens
ctttgtctcatttgg

SEQ ID NO: 1912712 - DNA, 15 bp, Homo sapiens
tttgtctcatttggt

SEQ ID NO: 1912713 - DNA, 15 bp, Homo sapiens
ttgtctcatttggtt

SEQ ID NO: 1912714 - DNA, 15 bp, Homo sapiens
tgtctcatttggtta

SEQ ID NO: 1912715 - DNA, 15 bp, Homo sapiens
gtctcatttggttaa

SEQ ID NO: 1912716 - DNA, 15 bp, Homo sapiens
tctcatttggttaac

SEQ ID NO: 1912717 - DNA, 15 bp, Homo sapiens
ctcatttggttaact

SEQ ID NO: 1912718 - DNA, 15 bp, Homo sapiens
tcatttggttaactc

SEQ ID NO: 1912719 - DNA, 15 bp, Homo sapiens
catttggttaactct

SEQ ID NO: 1912720 - DNA, 15 bp, Homo sapiens
atttggttaactctg

SEQ ID NO: 1912721 - DNA, 15 bp, Homo sapiens
tttggttaactctga

SEQ ID NO: 1912722 - DNA, 15 bp, Homo sapiens
ttggttaactctgat

SEQ ID NO: 1912723 - DNA, 15 bp, Homo sapiens
tggttaactctgatt

SEQ ID NO: 1912724 - DNA, 15 bp, Homo sapiens
ggttaactctgattc

SEQ ID NO: 1912725 - DNA, 15 bp, Homo sapiens
gttaactctgattca

SEQ ID NO: 1912726 - DNA, 15 bp, Homo sapiens
ttaactctgattcaa

SEQ ID NO: 1912727 - DNA, 15 bp, Homo sapiens
taactctgattcaat

SEQ ID NO: 1912728 - DNA, 15 bp, Homo sapiens
aactctgattcaatc

SEQ ID NO: 1912729 - DNA, 15 bp, Homo sapiens
actctgattcaatct

SEQ ID NO: 1912730 - DNA, 15 bp, Homo sapiens
ctctgattcaatctt

SEQ ID NO: 1912731 - DNA, 15 bp, Homo sapiens
tctgattcaatcttg

SEQ ID NO: 1912732 - DNA, 15 bp, Homo sapiens
ctgattcaatcttga

SEQ ID NO: 1912733 - DNA, 15 bp, Homo sapiens
tgattcaatcttgaa

SEQ ID NO: 1912734 - DNA, 15 bp, Homo sapiens
gattcaatcttgaag

SEQ ID NO: 1912735 - DNA, 15 bp, Homo sapiens
attcaatcttgaaga

SEQ ID NO: 1912736 - DNA, 15 bp, Homo sapiens
ttcaatcttgaagat

SEQ ID NO: 1912737 - DNA, 15 bp, Homo sapiens
tcaatcttgaagatt

SEQ ID NO: 1912738 - DNA, 15 bp, Homo sapiens
caatcttgaagattt

SEQ ID NO: 1912739 - DNA, 15 bp, Homo sapiens
aatcttgaagatttt

SEQ ID NO: 1912740 - DNA, 15 bp, Homo sapiens
atcttgaagattttg

SEQ ID NO: 1912741 - DNA, 15 bp, Homo sapiens
tcttgaagattttgt

SEQ ID NO: 1912742 - DNA, 15 bp, Homo sapiens
cttgaagattttgtt

SEQ ID NO: 1912743 - DNA, 15 bp, Homo sapiens
ttgaagattttgttt

SEQ ID NO: 1912744 - DNA, 15 bp, Homo sapiens
tgaagattttgttta

SEQ ID NO: 1912745 - DNA, 15 bp, Homo sapiens
gaagattttgtttaa

SEQ ID NO: 1912746 - DNA, 15 bp, Homo sapiens
aagattttgtttaag

SEQ ID NO: 1912747 - DNA, 15 bp, Homo sapiens
agattttgtttaagg

SEQ ID NO: 1912748 - DNA, 15 bp, Homo sapiens
gattttgtttaaggt

SEQ ID NO: 1912749 - DNA, 15 bp, Homo sapiens
attttgtttaaggtg

SEQ ID NO: 1912750 - DNA, 15 bp, Homo sapiens
ttttgtttaaggtgt

SEQ ID NO: 1912751 - DNA, 15 bp, Homo sapiens
tttgtttaaggtgtt

SEQ ID NO: 1912752 - DNA, 15 bp, Homo sapiens
ttgtttaaggtgttt

SEQ ID NO: 1912753 - DNA, 15 bp, Homo sapiens
tgtttaaggtgtttc

SEQ ID NO: 1912754 - DNA, 15 bp, Homo sapiens
gtttaaggtgtttct

SEQ ID NO: 1912755 - DNA, 15 bp, Homo sapiens
tttaaggtgtttctc

SEQ ID NO: 1912756 - DNA, 15 bp, Homo sapiens
ttaaggtgtttctcc

SEQ ID NO: 1912757 - DNA, 15 bp, Homo sapiens
taaggtgtttctcct

SEQ ID NO: 1912758 - DNA, 15 bp, Homo sapiens
aaggtgtttctcctt

SEQ ID NO: 1912759 - DNA, 15 bp, Homo sapiens
aggtgtttctccttc

SEQ ID NO: 1912760 - DNA, 15 bp, Homo sapiens
ggtgtttctccttca

SEQ ID NO: 1912761 - DNA, 15 bp, Homo sapiens
gtgtttctccttcag

SEQ ID NO: 1912762 - DNA, 15 bp, Homo sapiens
tgtttctccttcagg

SEQ ID NO: 1912763 - DNA, 15 bp, Homo sapiens
gtttctccttcagga

SEQ ID NO: 1912764 - DNA, 15 bp, Homo sapiens
tttctccttcaggaa

SEQ ID NO: 1912765 - DNA, 15 bp, Homo sapiens
ttctccttcaggaac

SEQ ID NO: 1912766 - DNA, 15 bp, Homo sapiens
tctccttcaggaacc

SEQ ID NO: 1912767 - DNA, 15 bp, Homo sapiens
ctccttcaggaacct

SEQ ID NO: 1912768 - DNA, 15 bp, Homo sapiens
tccttcaggaacctt

SEQ ID NO: 1912769 - DNA, 15 bp, Homo sapiens
ccttcaggaaccttt

SEQ ID NO: 1912770 - DNA, 15 bp, Homo sapiens
cttcaggaacctttc

SEQ ID NO: 1912771 - DNA, 15 bp, Homo sapiens
ttcaggaacctttcc

SEQ ID NO: 1912772 - DNA, 15 bp, Homo sapiens
tcaggaacctttccc

SEQ ID NO: 1912773 - DNA, 15 bp, Homo sapiens
caggaacctttccct

SEQ ID NO: 1912774 - DNA, 15 bp, Homo sapiens
aggaacctttcccta

SEQ ID NO: 1912775 - DNA, 15 bp, Homo sapiens
ggaacctttccctaa

SEQ ID NO: 1912776 - DNA, 15 bp, Homo sapiens
gaacctttccctaaa

SEQ ID NO: 1912777 - DNA, 15 bp, Homo sapiens
aacctttccctaaat

SEQ ID NO: 1912778 - DNA, 15 bp, Homo sapiens
acctttccctaaatt

SEQ ID NO: 1912779 - DNA, 15 bp, Homo sapiens
cctttccctaaattc

SEQ ID NO: 1912780 - DNA, 15 bp, Homo sapiens
ctttccctaaattca

SEQ ID NO: 1912781 - DNA, 15 bp, Homo sapiens
tttccctaaattcaa

SEQ ID NO: 1912782 - DNA, 15 bp, Homo sapiens
ttccctaaattcaac

SEQ ID NO: 1912783 - DNA, 15 bp, Homo sapiens
tccctaaattcaacc

SEQ ID NO: 1912784 - DNA, 15 bp, Homo sapiens
ccctaaattcaaccc

SEQ ID NO: 1912785 - DNA, 15 bp, Homo sapiens
cctaaattcaaccct

SEQ ID NO: 1912786 - DNA, 15 bp, Homo sapiens
ctaaattcaaccctg

SEQ ID NO: 1912787 - DNA, 15 bp, Homo sapiens
taaattcaaccctgg

SEQ ID NO: 1912788 - DNA, 15 bp, Homo sapiens
aaattcaaccctggc

SEQ ID NO: 1912789 - DNA, 15 bp, Homo sapiens
aattcaaccctggct

SEQ ID NO: 1912790 - DNA, 15 bp, Homo sapiens
attcaaccctggctc

SEQ ID NO: 1912791 - DNA, 15 bp, Homo sapiens
ttcaaccctggctct

SEQ ID NO: 1912792 - DNA, 15 bp, Homo sapiens
tcaaccctggctctc

SEQ ID NO: 1912793 - DNA, 15 bp, Homo sapiens
caaccctggctctct

SEQ ID NO: 1912794 - DNA, 15 bp, Homo sapiens
aaccctggctctctg

SEQ ID NO: 1912795 - DNA, 15 bp, Homo sapiens
accctggctctctgt

SEQ ID NO: 1912796 - DNA, 15 bp, Homo sapiens
ccctggctctctgtc

SEQ ID NO: 1912797 - DNA, 15 bp, Homo sapiens
cctggctctctgtcc

SEQ ID NO: 1912798 - DNA, 15 bp, Homo sapiens
ctggctctctgtcct

SEQ ID NO: 1912799 - DNA, 15 bp, Homo sapiens
tggctctctgtcctg

SEQ ID NO: 1912800 - DNA, 15 bp, Homo sapiens
ggctctctgtcctgc

SEQ ID NO: 1912801 - DNA, 15 bp, Homo sapiens
gctctctgtcctgct

SEQ ID NO: 1912802 - DNA, 15 bp, Homo sapiens
ctctctgtcctgctc

SEQ ID NO: 1912803 - DNA, 15 bp, Homo sapiens
tctctgtcctgctcc

SEQ ID NO: 1912804 - DNA, 15 bp, Homo sapiens
ctctgtcctgctccc

SEQ ID NO: 1912805 - DNA, 15 bp, Homo sapiens
tctgtcctgctccct

SEQ ID NO: 1912806 - DNA, 15 bp, Homo sapiens
ctgtcctgctccctc

SEQ ID NO: 1912807 - DNA, 15 bp, Homo sapiens
tgtcctgctccctca

SEQ ID NO: 1912808 - DNA, 15 bp, Homo sapiens
gtcctgctccctcaa

SEQ ID NO: 1912809 - DNA, 15 bp, Homo sapiens
tcctgctccctcaag

SEQ ID NO: 1912810 - DNA, 15 bp, Homo sapiens
cctgctccctcaagc

SEQ ID NO: 1912811 - DNA, 15 bp, Homo sapiens
ctgctccctcaagct

SEQ ID NO: 1912812 - DNA, 15 bp, Homo sapiens
tgctccctcaagctg

SEQ ID NO: 1912813 - DNA, 15 bp, Homo sapiens
gctccctcaagctgg

SEQ ID NO: 1912814 - DNA, 15 bp, Homo sapiens
ctccctcaagctggg

SEQ ID NO: 1912815 - DNA, 15 bp, Homo sapiens
tccctcaagctgggg

SEQ ID NO: 1912816 - DNA, 15 bp, Homo sapiens
ccctcaagctggggt

SEQ ID NO: 1912817 - DNA, 15 bp, Homo sapiens
cctcaagctggggta

SEQ ID NO: 1912818 - DNA, 15 bp, Homo sapiens
ctcaagctggggtat

SEQ ID NO: 1912819 - DNA, 15 bp, Homo sapiens
tcaagctggggtatc

SEQ ID NO: 1912820 - DNA, 15 bp, Homo sapiens
caagctggggtatcc

SEQ ID NO: 1912821 - DNA, 15 bp, Homo sapiens
aagctggggtatcct

SEQ ID NO: 1912822 - DNA, 15 bp, Homo sapiens
agctggggtatcctt

SEQ ID NO: 1912823 - DNA, 15 bp, Homo sapiens
gctggggtatccttc

SEQ ID NO: 1912824 - DNA, 15 bp, Homo sapiens
ctggggtatccttcc

SEQ ID NO: 1912825 - DNA, 15 bp, Homo sapiens
tggggtatccttccc

SEQ ID NO: 1912826 - DNA, 15 bp, Homo sapiens
ggggtatccttccct

SEQ ID NO: 1912827 - DNA, 15 bp, Homo sapiens
gggtatccttccctc

SEQ ID NO: 1912828 - DNA, 15 bp, Homo sapiens
ggtatccttccctct

SEQ ID NO: 1912829 - DNA, 15 bp, Homo sapiens
gtatccttccctctt

SEQ ID NO: 1912830 - DNA, 15 bp, Homo sapiens
tatccttccctcttc

SEQ ID NO: 1912831 - DNA, 15 bp, Homo sapiens
atccttccctcttct

SEQ ID NO: 1912832 - DNA, 15 bp, Homo sapiens
tccttccctcttctc

SEQ ID NO: 1912833 - DNA, 15 bp, Homo sapiens
ccttccctcttctct

SEQ ID NO: 1912834 - DNA, 15 bp, Homo sapiens
cttccctcttctcta

SEQ ID NO: 1912835 - DNA, 15 bp, Homo sapiens
ttccctcttctctat

SEQ ID NO: 1912836 - DNA, 15 bp, Homo sapiens
tccctcttctctatt

SEQ ID NO: 1912837 - DNA, 15 bp, Homo sapiens
ccctcttctctattc

SEQ ID NO: 1912838 - DNA, 15 bp, Homo sapiens
cctcttctctattcc

SEQ ID NO: 1912839 - DNA, 15 bp, Homo sapiens
ctcttctctattccc

SEQ ID NO: 1912840 - DNA, 15 bp, Homo sapiens
tcttctctattccca

SEQ ID NO: 1912841 - DNA, 15 bp, Homo sapiens
cttctctattcccat

SEQ ID NO: 1912842 - DNA, 15 bp, Homo sapiens
ttctctattcccata

SEQ ID NO: 1912843 - DNA, 15 bp, Homo sapiens
tctctattcccataa

SEQ ID NO: 1912844 - DNA, 15 bp, Homo sapiens
ctctattcccataac

SEQ ID NO: 1912845 - DNA, 15 bp, Homo sapiens
tctattcccataaca

SEQ ID NO: 1912846 - DNA, 15 bp, Homo sapiens
ctattcccataacac

SEQ ID NO: 1912847 - DNA, 15 bp, Homo sapiens
tattcccataacact

SEQ ID NO: 1912848 - DNA, 15 bp, Homo sapiens
attcccataacactc

SEQ ID NO: 1912849 - DNA, 15 bp, Homo sapiens
ttcccataacactct

SEQ ID NO: 1912850 - DNA, 15 bp, Homo sapiens
tcccataacactctg

SEQ ID NO: 1912851 - DNA, 15 bp, Homo sapiens
cccataacactctgt

SEQ ID NO: 1912852 - DNA, 15 bp, Homo sapiens
ccataacactctgtg

SEQ ID NO: 1912853 - DNA, 15 bp, Homo sapiens
cataacactctgtga

SEQ ID NO: 1912854 - DNA, 15 bp, Homo sapiens
ataacactctgtgaa

SEQ ID NO: 1912855 - DNA, 15 bp, Homo sapiens
taacactctgtgaat

SEQ ID NO: 1912856 - DNA, 15 bp, Homo sapiens
aacactctgtgaatt

SEQ ID NO: 1912857 - DNA, 15 bp, Homo sapiens
acactctgtgaattg

SEQ ID NO: 1912858 - DNA, 15 bp, Homo sapiens
cactctgtgaattgc

SEQ ID NO: 1912859 - DNA, 15 bp, Homo sapiens
actctgtgaattgct

SEQ ID NO: 1912860 - DNA, 15 bp, Homo sapiens
ctctgtgaattgctc

SEQ ID NO: 1912861 - DNA, 15 bp, Homo sapiens
tctgtgaattgctcc

SEQ ID NO: 1912862 - DNA, 15 bp, Homo sapiens
ctgtgaattgctcca

SEQ ID NO: 1912863 - DNA, 15 bp, Homo sapiens
tgtgaattgctccat

SEQ ID NO: 1912864 - DNA, 15 bp, Homo sapiens
gtgaattgctccatc

SEQ ID NO: 1912865 - DNA, 15 bp, Homo sapiens
tgaattgctccatca

SEQ ID NO: 1912866 - DNA, 15 bp, Homo sapiens
gaattgctccatcat

SEQ ID NO: 1912867 - DNA, 15 bp, Homo sapiens
aattgctccatcatt

SEQ ID NO: 1912868 - DNA, 15 bp, Homo sapiens
attgctccatcatta

SEQ ID NO: 1912869 - DNA, 15 bp, Homo sapiens
ttgctccatcattaa

SEQ ID NO: 1912870 - DNA, 15 bp, Homo sapiens
tgctccatcattaag

SEQ ID NO: 1912871 - DNA, 15 bp, Homo sapiens
gctccatcattaagt

SEQ ID NO: 1912872 - DNA, 15 bp, Homo sapiens
ctccatcattaagtt

SEQ ID NO: 1912873 - DNA, 15 bp, Homo sapiens
tccatcattaagttt

SEQ ID NO: 1912874 - DNA, 15 bp, Homo sapiens
ccatcattaagtttt

SEQ ID NO: 1912875 - DNA, 15 bp, Homo sapiens
catcattaagttttt

SEQ ID NO: 1912876 - DNA, 15 bp, Homo sapiens
atcattaagtttttc

SEQ ID NO: 1912877 - DNA, 15 bp, Homo sapiens
tcattaagtttttca

SEQ ID NO: 1912878 - DNA, 15 bp, Homo sapiens
cattaagtttttcac

SEQ ID NO: 1912879 - DNA, 15 bp, Homo sapiens
attaagtttttcacc

SEQ ID NO: 1912880 - DNA, 15 bp, Homo sapiens
ttaagtttttcaccc

SEQ ID NO: 1912881 - DNA, 15 bp, Homo sapiens
taagtttttcacccc

SEQ ID NO: 1912882 - DNA, 15 bp, Homo sapiens
aagtttttcacccca

SEQ ID NO: 1912883 - DNA, 15 bp, Homo sapiens
agtttttcaccccac

SEQ ID NO: 1912884 - DNA, 15 bp, Homo sapiens
gtttttcaccccacg

SEQ ID NO: 1912885 - DNA, 15 bp, Homo sapiens
tttttcaccccacgc

SEQ ID NO: 1912886 - DNA, 15 bp, Homo sapiens
ttttcaccccacgct

SEQ ID NO: 1912887 - DNA, 15 bp, Homo sapiens
tttcaccccacgctg

SEQ ID NO: 1912888 - DNA, 15 bp, Homo sapiens
ttcaccccacgctga

SEQ ID NO: 1912889 - DNA, 15 bp, Homo sapiens
tcaccccacgctgat

SEQ ID NO: 1912890 - DNA, 15 bp, Homo sapiens
caccccacgctgata

SEQ ID NO: 1912891 - DNA, 15 bp, Homo sapiens
accccacgctgatat

SEQ ID NO: 1912892 - DNA, 15 bp, Homo sapiens
ccccacgctgatatt

SEQ ID NO: 1912893 - DNA, 15 bp, Homo sapiens
cccacgctgatattt

SEQ ID NO: 1912894 - DNA, 15 bp, Homo sapiens
ccacgctgatattta

SEQ ID NO: 1912895 - DNA, 15 bp, Homo sapiens
cacgctgatatttat

SEQ ID NO: 1912896 - DNA, 15 bp, Homo sapiens
acgctgatatttata

SEQ ID NO: 1912897 - DNA, 15 bp, Homo sapiens
cgctgatatttatat

SEQ ID NO: 1912898 - DNA, 15 bp, Homo sapiens
gctgatatttatata

SEQ ID NO: 1912899 - DNA, 15 bp, Homo sapiens
ctgatatttatatac

SEQ ID NO: 1912900 - DNA, 15 bp, Homo sapiens
tgatatttatataca

SEQ ID NO: 1912901 - DNA, 15 bp, Homo sapiens
gatatttatatacat

SEQ ID NO: 1912902 - DNA, 15 bp, Homo sapiens
atatttatatacatg

SEQ ID NO: 1912903 - DNA, 15 bp, Homo sapiens
tatttatatacatgt

SEQ ID NO: 1912904 - DNA, 15 bp, Homo sapiens
atttatatacatgtc

SEQ ID NO: 1912905 - DNA, 15 bp, Homo sapiens
tttatatacatgtct

SEQ ID NO: 1912906 - DNA, 15 bp, Homo sapiens
ttatatacatgtctg

SEQ ID NO: 1912907 - DNA, 15 bp, Homo sapiens
tatatacatgtctgt

SEQ ID NO: 1912908 - DNA, 15 bp, Homo sapiens
atatacatgtctgtt

SEQ ID NO: 1912909 - DNA, 15 bp, Homo sapiens
tatacatgtctgttt

SEQ ID NO: 1912910 - DNA, 15 bp, Homo sapiens
atacatgtctgtttt

SEQ ID NO: 1912911 - DNA, 15 bp, Homo sapiens
tacatgtctgttttc

SEQ ID NO: 1912912 - DNA, 15 bp, Homo sapiens
acatgtctgttttcc

SEQ ID NO: 1912913 - DNA, 15 bp, Homo sapiens
catgtctgttttcct

SEQ ID NO: 1912914 - DNA, 15 bp, Homo sapiens
atgtctgttttcctt

SEQ ID NO: 1912915 - DNA, 15 bp, Homo sapiens
tgtctgttttccttt

SEQ ID NO: 1912916 - DNA, 15 bp, Homo sapiens
gtctgttttcctttg

SEQ ID NO: 1912917 - DNA, 15 bp, Homo sapiens
tctgttttcctttgg

SEQ ID NO: 1912918 - DNA, 15 bp, Homo sapiens
ctgttttcctttggg

SEQ ID NO: 1912919 - DNA, 15 bp, Homo sapiens
tgttttcctttgggg

SEQ ID NO: 1912920 - DNA, 15 bp, Homo sapiens
gttttcctttggggc

SEQ ID NO: 1912921 - DNA, 15 bp, Homo sapiens
ttttcctttggggca

SEQ ID NO: 1912922 - DNA, 15 bp, Homo sapiens
tttcctttggggcag

SEQ ID NO: 1912923 - DNA, 15 bp, Homo sapiens
ttcctttggggcagg

SEQ ID NO: 1912924 - DNA, 15 bp, Homo sapiens
tcctttggggcaggg

SEQ ID NO: 1912925 - DNA, 15 bp, Homo sapiens
cctttggggcagggg

SEQ ID NO: 1912926 - DNA, 15 bp, Homo sapiens
ctttggggcaggggc

SEQ ID NO: 1912927 - DNA, 15 bp, Homo sapiens
tttggggcaggggcc

SEQ ID NO: 1912928 - DNA, 15 bp, Homo sapiens
ttggggcaggggcca

SEQ ID NO: 1912929 - DNA, 15 bp, Homo sapiens
tggggcaggggccat

SEQ ID NO: 1912930 - DNA, 15 bp, Homo sapiens
ggggcaggggccata

SEQ ID NO: 1912931 - DNA, 15 bp, Homo sapiens
gggcaggggccatat

SEQ ID NO: 1912932 - DNA, 15 bp, Homo sapiens
ggcaggggccatatc

SEQ ID NO: 1912933 - DNA, 15 bp, Homo sapiens
gcaggggccatatcc

SEQ ID NO: 1912934 - DNA, 15 bp, Homo sapiens
caggggccatatccc

SEQ ID NO: 1912935 - DNA, 15 bp, Homo sapiens
aggggccatatcccc

SEQ ID NO: 1912936 - DNA, 15 bp, Homo sapiens
ggggccatatcccca

SEQ ID NO: 1912937 - DNA, 15 bp, Homo sapiens
gggccatatccccaa

SEQ ID NO: 1912938 - DNA, 15 bp, Homo sapiens
ggccatatccccaat

SEQ ID NO: 1912939 - DNA, 15 bp, Homo sapiens
gccatatccccaata

SEQ ID NO: 1912940 - DNA, 15 bp, Homo sapiens
ccatatccccaataa

SEQ ID NO: 1912941 - DNA, 15 bp, Homo sapiens
catatccccaataac

SEQ ID NO: 1912942 - DNA, 15 bp, Homo sapiens
atatccccaataaca

SEQ ID NO: 1912943 - DNA, 15 bp, Homo sapiens
tatccccaataacaa

SEQ ID NO: 1912944 - DNA, 15 bp, Homo sapiens
atccccaataacaag

SEQ ID NO: 1912945 - DNA, 15 bp, Homo sapiens
tccccaataacaaga

SEQ ID NO: 1912946 - DNA, 15 bp, Homo sapiens
ccccaataacaagag

SEQ ID NO: 1912947 - DNA, 15 bp, Homo sapiens
cccaataacaagaga

SEQ ID NO: 1912948 - DNA, 15 bp, Homo sapiens
ccaataacaagagat

SEQ ID NO: 1912949 - DNA, 15 bp, Homo sapiens
caataacaagagatt

SEQ ID NO: 1912950 - DNA, 15 bp, Homo sapiens
aataacaagagatta

SEQ ID NO: 1912951 - DNA, 15 bp, Homo sapiens
ataacaagagattac

SEQ ID NO: 1912952 - DNA, 15 bp, Homo sapiens
taacaagagattacc

SEQ ID NO: 1912953 - DNA, 15 bp, Homo sapiens
aacaagagattacca

SEQ ID NO: 1912954 - DNA, 15 bp, Homo sapiens
acaagagattaccag

SEQ ID NO: 1912955 - DNA, 15 bp, Homo sapiens
caagagattaccagc

SEQ ID NO: 1912956 - DNA, 15 bp, Homo sapiens
aagagattaccagca

SEQ ID NO: 1912957 - DNA, 15 bp, Homo sapiens
agagattaccagcat

SEQ ID NO: 1912958 - DNA, 15 bp, Homo sapiens
gagattaccagcatt

SEQ ID NO: 1912959 - DNA, 15 bp, Homo sapiens
agattaccagcattc

SEQ ID NO: 1912960 - DNA, 15 bp, Homo sapiens
gattaccagcattca

SEQ ID NO: 1912961 - DNA, 15 bp, Homo sapiens
attaccagcattcag

SEQ ID NO: 1912962 - DNA, 15 bp, Homo sapiens
ttaccagcattcagg

SEQ ID NO: 1912963 - DNA, 15 bp, Homo sapiens
taccagcattcagga

SEQ ID NO: 1912964 - DNA, 15 bp, Homo sapiens
accagcattcaggag

SEQ ID NO: 1912965 - DNA, 15 bp, Homo sapiens
ccagcattcaggaga

SEQ ID NO: 1912966 - DNA, 15 bp, Homo sapiens
cagcattcaggagaa

SEQ ID NO: 1912967 - DNA, 15 bp, Homo sapiens
agcattcaggagaag

SEQ ID NO: 1912968 - DNA, 15 bp, Homo sapiens
gcattcaggagaagt

SEQ ID NO: 1912969 - DNA, 15 bp, Homo sapiens
cattcaggagaagtg

SEQ ID NO: 1912970 - DNA, 15 bp, Homo sapiens
attcaggagaagtgt

SEQ ID NO: 1912971 - DNA, 15 bp, Homo sapiens
ttcaggagaagtgtg

SEQ ID NO: 1912972 - DNA, 15 bp, Homo sapiens
tcaggagaagtgtgt

SEQ ID NO: 1912973 - DNA, 15 bp, Homo sapiens
caggagaagtgtgtg

SEQ ID NO: 1912974 - DNA, 15 bp, Homo sapiens
aggagaagtgtgtga

SEQ ID NO: 1912975 - DNA, 15 bp, Homo sapiens
ggagaagtgtgtgaa

SEQ ID NO: 1912976 - DNA, 15 bp, Homo sapiens
gagaagtgtgtgaac

SEQ ID NO: 1912977 - DNA, 15 bp, Homo sapiens
agaagtgtgtgaacc

SEQ ID NO: 1912978 - DNA, 15 bp, Homo sapiens
gaagtgtgtgaacct

SEQ ID NO: 1912979 - DNA, 15 bp, Homo sapiens
aagtgtgtgaaccta

SEQ ID NO: 1912980 - DNA, 15 bp, Homo sapiens
agtgtgtgaacctaa

SEQ ID NO: 1912981 - DNA, 15 bp, Homo sapiens
gtgtgtgaacctaaa

SEQ ID NO: 1912982 - DNA, 15 bp, Homo sapiens
tgtgtgaacctaaac

SEQ ID NO: 1912983 - DNA, 15 bp, Homo sapiens
gtgtgaacctaaact

SEQ ID NO: 1912984 - DNA, 15 bp, Homo sapiens
tgtgaacctaaactg

SEQ ID NO: 1912985 - DNA, 15 bp, Homo sapiens
gtgaacctaaactga

SEQ ID NO: 1912986 - DNA, 15 bp, Homo sapiens
tgaacctaaactgaa

SEQ ID NO: 1912987 - DNA, 15 bp, Homo sapiens
gaacctaaactgaac

SEQ ID NO: 1912988 - DNA, 15 bp, Homo sapiens
aacctaaactgaact

SEQ ID NO: 1912989 - DNA, 15 bp, Homo sapiens
acctaaactgaactc

SEQ ID NO: 1912990 - DNA, 15 bp, Homo sapiens
cctaaactgaactct

SEQ ID NO: 1912991 - DNA, 15 bp, Homo sapiens
ctaaactgaactctg

SEQ ID NO: 1912992 - DNA, 15 bp, Homo sapiens
taaactgaactctgc

SEQ ID NO: 1912993 - DNA, 15 bp, Homo sapiens
aaactgaactctgct

SEQ ID NO: 1912994 - DNA, 15 bp, Homo sapiens
aactgaactctgctc

SEQ ID NO: 1912995 - DNA, 15 bp, Homo sapiens
actgaactctgctct

SEQ ID NO: 1912996 - DNA, 15 bp, Homo sapiens
ctgaactctgctctt

SEQ ID NO: 1912997 - DNA, 15 bp, Homo sapiens
tgaactctgctcttc

SEQ ID NO: 1912998 - DNA, 15 bp, Homo sapiens
gaactctgctcttcc

SEQ ID NO: 1912999 - DNA, 15 bp, Homo sapiens
aactctgctcttcca

SEQ ID NO: 1913000 - DNA, 15 bp, Homo sapiens
actctgctcttccaa

SEQ ID NO: 1913001 - DNA, 15 bp, Homo sapiens
ctctgctcttccaaa

SEQ ID NO: 1913002 - DNA, 15 bp, Homo sapiens
tctgctcttccaaat

SEQ ID NO: 1913003 - DNA, 15 bp, Homo sapiens
ctgctcttccaaatc

SEQ ID NO: 1913004 - DNA, 15 bp, Homo sapiens
tgctcttccaaatca

SEQ ID NO: 1913005 - DNA, 15 bp, Homo sapiens
gctcttccaaatcat

SEQ ID NO: 1913006 - DNA, 15 bp, Homo sapiens
ctcttccaaatcatg

SEQ ID NO: 1913007 - DNA, 15 bp, Homo sapiens
tcttccaaatcatgt

SEQ ID NO: 1913008 - DNA, 15 bp, Homo sapiens
cttccaaatcatgta

SEQ ID NO: 1913009 - DNA, 15 bp, Homo sapiens
ttccaaatcatgtat

SEQ ID NO: 1913010 - DNA, 15 bp, Homo sapiens
tccaaatcatgtatt

SEQ ID NO: 1913011 - DNA, 15 bp, Homo sapiens
ccaaatcatgtattc

SEQ ID NO: 1913012 - DNA, 15 bp, Homo sapiens
caaatcatgtattca

SEQ ID NO: 1913013 - DNA, 15 bp, Homo sapiens
aaatcatgtattcat

SEQ ID NO: 1913014 - DNA, 15 bp, Homo sapiens
aatcatgtattcatt

SEQ ID NO: 1913015 - DNA, 15 bp, Homo sapiens
atcatgtattcattt

SEQ ID NO: 1913016 - DNA, 15 bp, Homo sapiens
tcatgtattcatttc

SEQ ID NO: 1913017 - DNA, 15 bp, Homo sapiens
catgtattcatttct

SEQ ID NO: 1913018 - DNA, 15 bp, Homo sapiens
atgtattcatttctt

SEQ ID NO: 1913019 - DNA, 15 bp, Homo sapiens
tgtattcatttcttt

SEQ ID NO: 1913020 - DNA, 15 bp, Homo sapiens
gtattcatttcttta

SEQ ID NO: 1913021 - DNA, 15 bp, Homo sapiens
tattcatttctttat

SEQ ID NO: 1913022 - DNA, 15 bp, Homo sapiens
attcatttctttatt

SEQ ID NO: 1913023 - DNA, 15 bp, Homo sapiens
ttcatttctttattt

SEQ ID NO: 1913024 - DNA, 15 bp, Homo sapiens
tcatttctttatttt

SEQ ID NO: 1913025 - DNA, 15 bp, Homo sapiens
catttctttattttc

SEQ ID NO: 1913026 - DNA, 15 bp, Homo sapiens
atttctttattttcc

SEQ ID NO: 1913027 - DNA, 15 bp, Homo sapiens
tttctttattttcca

SEQ ID NO: 1913028 - DNA, 15 bp, Homo sapiens
ttctttattttccat

SEQ ID NO: 1913029 - DNA, 15 bp, Homo sapiens
tctttattttccatt

SEQ ID NO: 1913030 - DNA, 15 bp, Homo sapiens
ctttattttccatta

SEQ ID NO: 1913031 - DNA, 15 bp, Homo sapiens
tttattttccattaa

SEQ ID NO: 1913032 - DNA, 15 bp, Homo sapiens
ttattttccattaat

SEQ ID NO: 1913033 - DNA, 15 bp, Homo sapiens
tattttccattaatt

SEQ ID NO: 1913034 - DNA, 15 bp, Homo sapiens
attttccattaattc

SEQ ID NO: 1913035 - DNA, 15 bp, Homo sapiens
ttttccattaattct

SEQ ID NO: 1913036 - DNA, 15 bp, Homo sapiens
tttccattaattcta

SEQ ID NO: 1913037 - DNA, 15 bp, Homo sapiens
ttccattaattctat

SEQ ID NO: 1913038 - DNA, 15 bp, Homo sapiens
tccattaattctata

SEQ ID NO: 1913039 - DNA, 15 bp, Homo sapiens
ccattaattctataa

SEQ ID NO: 1913040 - DNA, 15 bp, Homo sapiens
cattaattctataat

SEQ ID NO: 1913041 - DNA, 15 bp, Homo sapiens
attaattctataatc

SEQ ID NO: 1913042 - DNA, 15 bp, Homo sapiens
ttaattctataatca

SEQ ID NO: 1913043 - DNA, 15 bp, Homo sapiens
taattctataatcat

SEQ ID NO: 1913044 - DNA, 15 bp, Homo sapiens
aattctataatcatt

SEQ ID NO: 1913045 - DNA, 15 bp, Homo sapiens
attctataatcattt

SEQ ID NO: 1913046 - DNA, 15 bp, Homo sapiens
ttctataatcattta

SEQ ID NO: 1913047 - DNA, 15 bp, Homo sapiens
tctataatcatttac

SEQ ID NO: 1913048 - DNA, 15 bp, Homo sapiens
ctataatcatttact

SEQ ID NO: 1913049 - DNA, 15 bp, Homo sapiens
tataatcatttacta

SEQ ID NO: 1913050 - DNA, 15 bp, Homo sapiens
ataatcatttactaa

SEQ ID NO: 1913051 - DNA, 15 bp, Homo sapiens
taatcatttactaat

SEQ ID NO: 1913052 - DNA, 15 bp, Homo sapiens
aatcatttactaatg

SEQ ID NO: 1913053 - DNA, 15 bp, Homo sapiens
atcatttactaatga

SEQ ID NO: 1913054 - DNA, 15 bp, Homo sapiens
tcatttactaatgaa

SEQ ID NO: 1913055 - DNA, 15 bp, Homo sapiens
catttactaatgaat

SEQ ID NO: 1913056 - DNA, 15 bp, Homo sapiens
atttactaatgaatt

SEQ ID NO: 1913057 - DNA, 15 bp, Homo sapiens
tttactaatgaattc

SEQ ID NO: 1913058 - DNA, 15 bp, Homo sapiens
ttactaatgaattcc

SEQ ID NO: 1913059 - DNA, 15 bp, Homo sapiens
tactaatgaattcca

SEQ ID NO: 1913060 - DNA, 15 bp, Homo sapiens
actaatgaattccat

SEQ ID NO: 1913061 - DNA, 15 bp, Homo sapiens
ctaatgaattccatg

SEQ ID NO: 1913062 - DNA, 15 bp, Homo sapiens
taatgaattccatgg

SEQ ID NO: 1913063 - DNA, 15 bp, Homo sapiens
aatgaattccatggg

SEQ ID NO: 1913064 - DNA, 15 bp, Homo sapiens
atgaattccatgggt

SEQ ID NO: 1913065 - DNA, 15 bp, Homo sapiens
tgaattccatgggta

SEQ ID NO: 1913066 - DNA, 15 bp, Homo sapiens
gaattccatgggtat

SEQ ID NO: 1913067 - DNA, 15 bp, Homo sapiens
aattccatgggtatg

SEQ ID NO: 1913068 - DNA, 15 bp, Homo sapiens
attccatgggtatgg

SEQ ID NO: 1913069 - DNA, 15 bp, Homo sapiens
ttccatgggtatggc

SEQ ID NO: 1913070 - DNA, 15 bp, Homo sapiens
tccatgggtatggcc

SEQ ID NO: 1913071 - DNA, 15 bp, Homo sapiens
ccatgggtatggccc

SEQ ID NO: 1913072 - DNA, 15 bp, Homo sapiens
catgggtatggccca

SEQ ID NO: 1913073 - DNA, 15 bp, Homo sapiens
atgggtatggcccac

SEQ ID NO: 1913074 - DNA, 15 bp, Homo sapiens
tgggtatggcccact

SEQ ID NO: 1913075 - DNA, 15 bp, Homo sapiens
gggtatggcccactc

SEQ ID NO: 1913076 - DNA, 15 bp, Homo sapiens
ggtatggcccactcc

SEQ ID NO: 1913077 - DNA, 15 bp, Homo sapiens
gtatggcccactcca

SEQ ID NO: 1913078 - DNA, 15 bp, Homo sapiens
tatggcccactccac

SEQ ID NO: 1913079 - DNA, 15 bp, Homo sapiens
atggcccactccact

SEQ ID NO: 1913080 - DNA, 15 bp, Homo sapiens
tggcccactccactc

SEQ ID NO: 1913081 - DNA, 15 bp, Homo sapiens
ggcccactccactca

SEQ ID NO: 1913082 - DNA, 15 bp, Homo sapiens
gcccactccactcac

SEQ ID NO: 1913083 - DNA, 15 bp, Homo sapiens
cccactccactcacc

SEQ ID NO: 1913084 - DNA, 15 bp, Homo sapiens
ccactccactcaccc

SEQ ID NO: 1913085 - DNA, 15 bp, Homo sapiens
cactccactcaccca

SEQ ID NO: 1913086 - DNA, 15 bp, Homo sapiens
actccactcacccac

SEQ ID NO: 1913087 - DNA, 15 bp, Homo sapiens
ctccactcacccact

SEQ ID NO: 1913088 - DNA, 15 bp, Homo sapiens
tccactcacccactt

SEQ ID NO: 1913089 - DNA, 15 bp, Homo sapiens
ccactcacccacttt

SEQ ID NO: 1913090 - DNA, 15 bp, Homo sapiens
cactcacccactttc

SEQ ID NO: 1913091 - DNA, 15 bp, Homo sapiens
actcacccactttca

SEQ ID NO: 1913092 - DNA, 15 bp, Homo sapiens
ctcacccactttcat

SEQ ID NO: 1913093 - DNA, 15 bp, Homo sapiens
tcacccactttcatt

SEQ ID NO: 1913094 - DNA, 15 bp, Homo sapiens
cacccactttcattt

SEQ ID NO: 1913095 - DNA, 15 bp, Homo sapiens
acccactttcatttt

SEQ ID NO: 1913096 - DNA, 15 bp, Homo sapiens
cccactttcattttg

SEQ ID NO: 1913097 - DNA, 15 bp, Homo sapiens
ccactttcattttgc

SEQ ID NO: 1913098 - DNA, 15 bp, Homo sapiens
cactttcattttgct

SEQ ID NO: 1913099 - DNA, 15 bp, Homo sapiens
actttcattttgctg

SEQ ID NO: 1913100 - DNA, 15 bp, Homo sapiens
ctttcattttgctgg

SEQ ID NO: 1913101 - DNA, 15 bp, Homo sapiens
tttcattttgctggg

SEQ ID NO: 1913102 - DNA, 15 bp, Homo sapiens
ttcattttgctgggt

SEQ ID NO: 1913103 - DNA, 15 bp, Homo sapiens
tcattttgctgggta

SEQ ID NO: 1913104 - DNA, 15 bp, Homo sapiens
cattttgctgggtag

SEQ ID NO: 1913105 - DNA, 15 bp, Homo sapiens
attttgctgggtagt

SEQ ID NO: 1913106 - DNA, 15 bp, Homo sapiens
ttttgctgggtagta

SEQ ID NO: 1913107 - DNA, 15 bp, Homo sapiens
tttgctgggtagtat

SEQ ID NO: 1913108 - DNA, 15 bp, Homo sapiens
ttgctgggtagtatc

SEQ ID NO: 1913109 - DNA, 15 bp, Homo sapiens
tgctgggtagtatcc

SEQ ID NO: 1913110 - DNA, 15 bp, Homo sapiens
gctgggtagtatcct

SEQ ID NO: 1913111 - DNA, 15 bp, Homo sapiens
ctgggtagtatcctg

SEQ ID NO: 1913112 - DNA, 15 bp, Homo sapiens
tgggtagtatcctga

SEQ ID NO: 1913113 - DNA, 15 bp, Homo sapiens
gggtagtatcctgat

SEQ ID NO: 1913114 - DNA, 15 bp, Homo sapiens
ggtagtatcctgatt

SEQ ID NO: 1913115 - DNA, 15 bp, Homo sapiens
gtagtatcctgattt

SEQ ID NO: 1913116 - DNA, 15 bp, Homo sapiens
tagtatcctgatttc

SEQ ID NO: 1913117 - DNA, 15 bp, Homo sapiens
agtatcctgatttct

SEQ ID NO: 1913118 - DNA, 15 bp, Homo sapiens
gtatcctgatttctc

SEQ ID NO: 1913119 - DNA, 15 bp, Homo sapiens
tatcctgatttctca

SEQ ID NO: 1913120 - DNA, 15 bp, Homo sapiens
atcctgatttctcag

SEQ ID NO: 1913121 - DNA, 15 bp, Homo sapiens
tcctgatttctcaga

SEQ ID NO: 1913122 - DNA, 15 bp, Homo sapiens
cctgatttctcagat

SEQ ID NO: 1913123 - DNA, 15 bp, Homo sapiens
ctgatttctcagata

SEQ ID NO: 1913124 - DNA, 15 bp, Homo sapiens
tgatttctcagatat

SEQ ID NO: 1913125 - DNA, 15 bp, Homo sapiens
gatttctcagatatt

SEQ ID NO: 1913126 - DNA, 15 bp, Homo sapiens
atttctcagatattt

SEQ ID NO: 1913127 - DNA, 15 bp, Homo sapiens
tttctcagatatttt

SEQ ID NO: 1913128 - DNA, 15 bp, Homo sapiens
ttctcagatattttt

SEQ ID NO: 1913129 - DNA, 15 bp, Homo sapiens
tctcagatatttttg

SEQ ID NO: 1913130 - DNA, 15 bp, Homo sapiens
ctcagatatttttgg

SEQ ID NO: 1913131 - DNA, 15 bp, Homo sapiens
tcagatatttttggg

SEQ ID NO: 1913132 - DNA, 15 bp, Homo sapiens
cagatatttttgggc

SEQ ID NO: 1913133 - DNA, 15 bp, Homo sapiens
agatatttttgggct

SEQ ID NO: 1913134 - DNA, 15 bp, Homo sapiens
gatatttttgggctg

SEQ ID NO: 1913135 - DNA, 15 bp, Homo sapiens
atatttttgggctgt

SEQ ID NO: 1913136 - DNA, 15 bp, Homo sapiens
tatttttgggctgta

SEQ ID NO: 1913137 - DNA, 15 bp, Homo sapiens
atttttgggctgtat

SEQ ID NO: 1913138 - DNA, 15 bp, Homo sapiens
tttttgggctgtatg

SEQ ID NO: 1913139 - DNA, 15 bp, Homo sapiens
ttttgggctgtatga

SEQ ID NO: 1913140 - DNA, 15 bp, Homo sapiens
tttgggctgtatgaa

SEQ ID NO: 1913141 - DNA, 15 bp, Homo sapiens
ttgggctgtatgaaa

SEQ ID NO: 1913142 - DNA, 15 bp, Homo sapiens
tgggctgtatgaaaa

SEQ ID NO: 1913143 - DNA, 15 bp, Homo sapiens
gggctgtatgaaaat

SEQ ID NO: 1913144 - DNA, 15 bp, Homo sapiens
ggctgtatgaaaatc

SEQ ID NO: 1913145 - DNA, 15 bp, Homo sapiens
gctgtatgaaaatca

SEQ ID NO: 1913146 - DNA, 15 bp, Homo sapiens
ctgtatgaaaatcat

SEQ ID NO: 1913147 - DNA, 15 bp, Homo sapiens
tgtatgaaaatcatt

SEQ ID NO: 1913148 - DNA, 15 bp, Homo sapiens
gtatgaaaatcattc

SEQ ID NO: 1913149 - DNA, 15 bp, Homo sapiens
tatgaaaatcattca

SEQ ID NO: 1913150 - DNA, 15 bp, Homo sapiens
atgaaaatcattcac

SEQ ID NO: 1913151 - DNA, 15 bp, Homo sapiens
tgaaaatcattcact

SEQ ID NO: 1913152 - DNA, 15 bp, Homo sapiens
gaaaatcattcactt

SEQ ID NO: 1913153 - DNA, 15 bp, Homo sapiens
aaaatcattcacttt

SEQ ID NO: 1913154 - DNA, 15 bp, Homo sapiens
aaatcattcactttt

SEQ ID NO: 1913155 - DNA, 15 bp, Homo sapiens
aatcattcacttttc

SEQ ID NO: 1913156 - DNA, 15 bp, Homo sapiens
atcattcacttttcc

SEQ ID NO: 1913157 - DNA, 15 bp, Homo sapiens
tcattcacttttccc

SEQ ID NO: 1913158 - DNA, 15 bp, Homo sapiens
cattcacttttcccc

SEQ ID NO: 1913159 - DNA, 15 bp, Homo sapiens
attcacttttcccct

SEQ ID NO: 1913160 - DNA, 15 bp, Homo sapiens
ttcacttttcccctc

SEQ ID NO: 1913161 - DNA, 15 bp, Homo sapiens
tcacttttcccctct

SEQ ID NO: 1913162 - DNA, 15 bp, Homo sapiens
cacttttcccctctc

SEQ ID NO: 1913163 - DNA, 15 bp, Homo sapiens
acttttcccctctct

SEQ ID NO: 1913164 - DNA, 15 bp, Homo sapiens
cttttcccctctcta

SEQ ID NO: 1913165 - DNA, 15 bp, Homo sapiens
ttttcccctctctat

SEQ ID NO: 1913166 - DNA, 15 bp, Homo sapiens
tttcccctctctata

SEQ ID NO: 1913167 - DNA, 15 bp, Homo sapiens
ttcccctctctatac

SEQ ID NO: 1913168 - DNA, 15 bp, Homo sapiens
tcccctctctataca

SEQ ID NO: 1913169 - DNA, 15 bp, Homo sapiens
cccctctctatacat

SEQ ID NO: 1913170 - DNA, 15 bp, Homo sapiens
ccctctctatacatt

SEQ ID NO: 1913171 - DNA, 15 bp, Homo sapiens
cctctctatacattc

SEQ ID NO: 1913172 - DNA, 15 bp, Homo sapiens
ctctctatacattcc

SEQ ID NO: 1913173 - DNA, 15 bp, Homo sapiens
tctctatacattcca

SEQ ID NO: 1913174 - DNA, 15 bp, Homo sapiens
ctctatacattccag

SEQ ID NO: 1913175 - DNA, 15 bp, Homo sapiens
tctatacattccaga

SEQ ID NO: 1913176 - DNA, 15 bp, Homo sapiens
ctatacattccagag

SEQ ID NO: 1913177 - DNA, 15 bp, Homo sapiens
tatacattccagagc

SEQ ID NO: 1913178 - DNA, 15 bp, Homo sapiens
atacattccagagca

SEQ ID NO: 1913179 - DNA, 15 bp, Homo sapiens
tacattccagagcat

SEQ ID NO: 1913180 - DNA, 15 bp, Homo sapiens
acattccagagcata

SEQ ID NO: 1913181 - DNA, 15 bp, Homo sapiens
cattccagagcatat

SEQ ID NO: 1913182 - DNA, 15 bp, Homo sapiens
attccagagcatatc

SEQ ID NO: 1913183 - DNA, 15 bp, Homo sapiens
ttccagagcatatca

SEQ ID NO: 1913184 - DNA, 15 bp, Homo sapiens
tccagagcatatcaa

SEQ ID NO: 1913185 - DNA, 15 bp, Homo sapiens
ccagagcatatcaaa

SEQ ID NO: 1913186 - DNA, 15 bp, Homo sapiens
cagagcatatcaaaa

SEQ ID NO: 1913187 - DNA, 15 bp, Homo sapiens
agagcatatcaaaaa

SEQ ID NO: 1913188 - DNA, 15 bp, Homo sapiens
gagcatatcaaaaac

SEQ ID NO: 1913189 - DNA, 15 bp, Homo sapiens
agcatatcaaaaaca

SEQ ID NO: 1913190 - DNA, 15 bp, Homo sapiens
gcatatcaaaaacat

SEQ ID NO: 1913191 - DNA, 15 bp, Homo sapiens
catatcaaaaacatt

SEQ ID NO: 1913192 - DNA, 15 bp, Homo sapiens
atatcaaaaacattt

SEQ ID NO: 1913193 - DNA, 15 bp, Homo sapiens
tatcaaaaacatttg

SEQ ID NO: 1913194 - DNA, 15 bp, Homo sapiens
atcaaaaacatttgt

SEQ ID NO: 1913195 - DNA, 15 bp, Homo sapiens
tcaaaaacatttgtt

SEQ ID NO: 1913196 - DNA, 15 bp, Homo sapiens
caaaaacatttgtta

SEQ ID NO: 1913197 - DNA, 15 bp, Homo sapiens
aaaaacatttgttaa

SEQ ID NO: 1913198 - DNA, 15 bp, Homo sapiens
aaaacatttgttaac

SEQ ID NO: 1913199 - DNA, 15 bp, Homo sapiens
aaacatttgttaacc

SEQ ID NO: 1913200 - DNA, 15 bp, Homo sapiens
aacatttgttaacca

SEQ ID NO: 1913201 - DNA, 15 bp, Homo sapiens
acatttgttaaccac

SEQ ID NO: 1913202 - DNA, 15 bp, Homo sapiens
catttgttaaccact

SEQ ID NO: 1913203 - DNA, 15 bp, Homo sapiens
atttgttaaccactt

SEQ ID NO: 1913204 - DNA, 15 bp, Homo sapiens
tttgttaaccacttt

SEQ ID NO: 1913205 - DNA, 15 bp, Homo sapiens
ttgttaaccactttc

SEQ ID NO: 1913206 - DNA, 15 bp, Homo sapiens
tgttaaccactttca

SEQ ID NO: 1913207 - DNA, 15 bp, Homo sapiens
gttaaccactttcaa

SEQ ID NO: 1913208 - DNA, 15 bp, Homo sapiens
ttaaccactttcaaa

SEQ ID NO: 1913209 - DNA, 15 bp, Homo sapiens
taaccactttcaaat

SEQ ID NO: 1913210 - DNA, 15 bp, Homo sapiens
aaccactttcaaatt

SEQ ID NO: 1913211 - DNA, 15 bp, Homo sapiens
accactttcaaattg

SEQ ID NO: 1913212 - DNA, 15 bp, Homo sapiens
ccactttcaaattgt

SEQ ID NO: 1913213 - DNA, 15 bp, Homo sapiens
cactttcaaattgtg

SEQ ID NO: 1913214 - DNA, 15 bp, Homo sapiens
actttcaaattgtga

SEQ ID NO: 1913215 - DNA, 15 bp, Homo sapiens
ctttcaaattgtgat

SEQ ID NO: 1913216 - DNA, 15 bp, Homo sapiens
tttcaaattgtgatt

SEQ ID NO: 1913217 - DNA, 15 bp, Homo sapiens
ttcaaattgtgattt

SEQ ID NO: 1913218 - DNA, 15 bp, Homo sapiens
tcaaattgtgatttg

SEQ ID NO: 1913219 - DNA, 15 bp, Homo sapiens
caaattgtgatttgt

SEQ ID NO: 1913220 - DNA, 15 bp, Homo sapiens
aaattgtgatttgtt

SEQ ID NO: 1913221 - DNA, 15 bp, Homo sapiens
aattgtgatttgttt

SEQ ID NO: 1913222 - DNA, 15 bp, Homo sapiens
attgtgatttgtttt

SEQ ID NO: 1913223 - DNA, 15 bp, Homo sapiens
ttgtgatttgttttt

SEQ ID NO: 1913224 - DNA, 15 bp, Homo sapiens
tgtgatttgtttttg

SEQ ID NO: 1913225 - DNA, 15 bp, Homo sapiens
gtgatttgtttttga

SEQ ID NO: 1913226 - DNA, 15 bp, Homo sapiens
tgatttgtttttgaa

SEQ ID NO: 1913227 - DNA, 15 bp, Homo sapiens
gatttgtttttgaat

SEQ ID NO: 1913228 - DNA, 15 bp, Homo sapiens
atttgtttttgaatt

SEQ ID NO: 1913229 - DNA, 15 bp, Homo sapiens
tttgtttttgaatta

SEQ ID NO: 1913230 - DNA, 15 bp, Homo sapiens
ttgtttttgaattac

SEQ ID NO: 1913231 - DNA, 15 bp, Homo sapiens
tgtttttgaattaca

SEQ ID NO: 1913232 - DNA, 15 bp, Homo sapiens
gtttttgaattacac

SEQ ID NO: 1913233 - DNA, 15 bp, Homo sapiens
tttttgaattacacg

SEQ ID NO: 1913234 - DNA, 15 bp, Homo sapiens
ttttgaattacacgt

SEQ ID NO: 1913235 - DNA, 15 bp, Homo sapiens
tttgaattacacgtt

SEQ ID NO: 1913236 - DNA, 15 bp, Homo sapiens
ttgaattacacgttt

SEQ ID NO: 1913237 - DNA, 15 bp, Homo sapiens
tgaattacacgtttg

SEQ ID NO: 1913238 - DNA, 15 bp, Homo sapiens
gaattacacgtttga

SEQ ID NO: 1913239 - DNA, 15 bp, Homo sapiens
aattacacgtttgaa

SEQ ID NO: 1913240 - DNA, 15 bp, Homo sapiens
attacacgtttgaat

SEQ ID NO: 1913241 - DNA, 15 bp, Homo sapiens
ttacacgtttgaatc

SEQ ID NO: 1913242 - DNA, 15 bp, Homo sapiens
tacacgtttgaatca

SEQ ID NO: 1913243 - DNA, 15 bp, Homo sapiens
acacgtttgaatcat

SEQ ID NO: 1913244 - DNA, 15 bp, Homo sapiens
cacgtttgaatcatt

SEQ ID NO: 1913245 - DNA, 15 bp, Homo sapiens
acgtttgaatcattt

SEQ ID NO: 1913246 - DNA, 15 bp, Homo sapiens
cgtttgaatcatttt

SEQ ID NO: 1913247 - DNA, 15 bp, Homo sapiens
gtttgaatcattttt

SEQ ID NO: 1913248 - DNA, 15 bp, Homo sapiens
tttgaatcattttta

SEQ ID NO: 1913249 - DNA, 15 bp, Homo sapiens
ttgaatcatttttat

SEQ ID NO: 1913250 - DNA, 15 bp, Homo sapiens
tgaatcatttttata

SEQ ID NO: 1913251 - DNA, 15 bp, Homo sapiens
gaatcatttttatat

SEQ ID NO: 1913252 - DNA, 15 bp, Homo sapiens
aatcatttttatatg

SEQ ID NO: 1913253 - DNA, 15 bp, Homo sapiens
atcatttttatatgc

SEQ ID NO: 1913254 - DNA, 15 bp, Homo sapiens
tcatttttatatgct

SEQ ID NO: 1913255 - DNA, 15 bp, Homo sapiens
catttttatatgctt

SEQ ID NO: 1913256 - DNA, 15 bp, Homo sapiens
atttttatatgcttc

SEQ ID NO: 1913257 - DNA, 15 bp, Homo sapiens
tttttatatgcttct

SEQ ID NO: 1913258 - DNA, 15 bp, Homo sapiens
ttttatatgcttctt

SEQ ID NO: 1913259 - DNA, 15 bp, Homo sapiens
tttatatgcttcttg

SEQ ID NO: 1913260 - DNA, 15 bp, Homo sapiens
ttatatgcttcttgt

SEQ ID NO: 1913261 - DNA, 15 bp, Homo sapiens
tatatgcttcttgtt

SEQ ID NO: 1913262 - DNA, 15 bp, Homo sapiens
atatgcttcttgttc

SEQ ID NO: 1913263 - DNA, 15 bp, Homo sapiens
tatgcttcttgttct

SEQ ID NO: 1913264 - DNA, 15 bp, Homo sapiens
atgcttcttgttctg

SEQ ID NO: 1913265 - DNA, 15 bp, Homo sapiens
tgcttcttgttctga

SEQ ID NO: 1913266 - DNA, 15 bp, Homo sapiens
gcttcttgttctgat

SEQ ID NO: 1913267 - DNA, 15 bp, Homo sapiens
cttcttgttctgatg

SEQ ID NO: 1913268 - DNA, 15 bp, Homo sapiens
ttcttgttctgatga

SEQ ID NO: 1913269 - DNA, 15 bp, Homo sapiens
tcttgttctgatgac

SEQ ID NO: 1913270 - DNA, 15 bp, Homo sapiens
cttgttctgatgaca

SEQ ID NO: 1913271 - DNA, 15 bp, Homo sapiens
ttgttctgatgacac

SEQ ID NO: 1913272 - DNA, 15 bp, Homo sapiens
tgttctgatgacact

SEQ ID NO: 1913273 - DNA, 15 bp, Homo sapiens
gttctgatgacactg

SEQ ID NO: 1913274 - DNA, 15 bp, Homo sapiens
ttctgatgacactga

SEQ ID NO: 1913275 - DNA, 15 bp, Homo sapiens
tctgatgacactgat

SEQ ID NO: 1913276 - DNA, 15 bp, Homo sapiens
ctgatgacactgatt

SEQ ID NO: 1913277 - DNA, 15 bp, Homo sapiens
tgatgacactgatta

SEQ ID NO: 1913278 - DNA, 15 bp, Homo sapiens
gatgacactgattac

SEQ ID NO: 1913279 - DNA, 15 bp, Homo sapiens
atgacactgattaca

SEQ ID NO: 1913280 - DNA, 15 bp, Homo sapiens
tgacactgattacac

SEQ ID NO: 1913281 - DNA, 15 bp, Homo sapiens
gacactgattacact

SEQ ID NO: 1913282 - DNA, 15 bp, Homo sapiens
acactgattacactt

SEQ ID NO: 1913283 - DNA, 15 bp, Homo sapiens
cactgattacacttc

SEQ ID NO: 1913284 - DNA, 15 bp, Homo sapiens
actgattacacttct

SEQ ID NO: 1913285 - DNA, 15 bp, Homo sapiens
ctgattacacttctt

SEQ ID NO: 1913286 - DNA, 15 bp, Homo sapiens
tgattacacttcttc

SEQ ID NO: 1913287 - DNA, 15 bp, Homo sapiens
gattacacttcttct

SEQ ID NO: 1913288 - DNA, 15 bp, Homo sapiens
attacacttcttctc

SEQ ID NO: 1913289 - DNA, 15 bp, Homo sapiens
ttacacttcttctct

SEQ ID NO: 1913290 - DNA, 15 bp, Homo sapiens
tacacttcttctctt

SEQ ID NO: 1913291 - DNA, 15 bp, Homo sapiens
acacttcttctcttt

SEQ ID NO: 1913292 - DNA, 15 bp, Homo sapiens
cacttcttctctttt

SEQ ID NO: 1913293 - DNA, 15 bp, Homo sapiens
acttcttctctttta

SEQ ID NO: 1913294 - DNA, 15 bp, Homo sapiens
cttcttctcttttat

SEQ ID NO: 1913295 - DNA, 15 bp, Homo sapiens
ttcttctcttttatg

SEQ ID NO: 1913296 - DNA, 15 bp, Homo sapiens
tcttctcttttatgg

SEQ ID NO: 1913297 - DNA, 15 bp, Homo sapiens
cttctcttttatggg

SEQ ID NO: 1913298 - DNA, 15 bp, Homo sapiens
ttctcttttatgggt

SEQ ID NO: 1913299 - DNA, 15 bp, Homo sapiens
tctcttttatgggta

SEQ ID NO: 1913300 - DNA, 15 bp, Homo sapiens
ctcttttatgggtat

SEQ ID NO: 1913301 - DNA, 15 bp, Homo sapiens
tcttttatgggtata

SEQ ID NO: 1913302 - DNA, 15 bp, Homo sapiens
cttttatgggtatag

SEQ ID NO: 1913303 - DNA, 15 bp, Homo sapiens
ttttatgggtatagg

SEQ ID NO: 1913304 - DNA, 15 bp, Homo sapiens
tttatgggtataggc

SEQ ID NO: 1913305 - DNA, 15 bp, Homo sapiens
ttatgggtataggct

SEQ ID NO: 1913306 - DNA, 15 bp, Homo sapiens
tatgggtataggctg

SEQ ID NO: 1913307 - DNA, 15 bp, Homo sapiens
atgggtataggctga

SEQ ID NO: 1913308 - DNA, 15 bp, Homo sapiens
tgggtataggctgac

SEQ ID NO: 1913309 - DNA, 15 bp, Homo sapiens
gggtataggctgaca

SEQ ID NO: 1913310 - DNA, 15 bp, Homo sapiens
ggtataggctgacat

SEQ ID NO: 1913311 - DNA, 15 bp, Homo sapiens
gtataggctgacata

SEQ ID NO: 1913312 - DNA, 15 bp, Homo sapiens
tataggctgacataa

SEQ ID NO: 1913313 - DNA, 15 bp, Homo sapiens
ataggctgacataag

SEQ ID NO: 1913314 - DNA, 15 bp, Homo sapiens
taggctgacataagt

SEQ ID NO: 1913315 - DNA, 15 bp, Homo sapiens
aggctgacataagtg

SEQ ID NO: 1913316 - DNA, 15 bp, Homo sapiens
ggctgacataagtga

SEQ ID NO: 1913317 - DNA, 15 bp, Homo sapiens
gctgacataagtgat

SEQ ID NO: 1913318 - DNA, 15 bp, Homo sapiens
ctgacataagtgatg

SEQ ID NO: 1913319 - DNA, 15 bp, Homo sapiens
tgacataagtgatgc

SEQ ID NO: 1913320 - DNA, 15 bp, Homo sapiens
gacataagtgatgct

SEQ ID NO: 1913321 - DNA, 15 bp, Homo sapiens
acataagtgatgctg

SEQ ID NO: 1913322 - DNA, 15 bp, Homo sapiens
cataagtgatgctgt

SEQ ID NO: 1913323 - DNA, 15 bp, Homo sapiens
ataagtgatgctgtg

SEQ ID NO: 1913324 - DNA, 15 bp, Homo sapiens
taagtgatgctgtgt

SEQ ID NO: 1913325 - DNA, 15 bp, Homo sapiens
aagtgatgctgtgtg

SEQ ID NO: 1913326 - DNA, 15 bp, Homo sapiens
agtgatgctgtgtga

SEQ ID NO: 1913327 - DNA, 15 bp, Homo sapiens
gtgatgctgtgtgac

SEQ ID NO: 1913328 - DNA, 15 bp, Homo sapiens
tgatgctgtgtgaca

SEQ ID NO: 1913329 - DNA, 15 bp, Homo sapiens
gatgctgtgtgacag

SEQ ID NO: 1913330 - DNA, 15 bp, Homo sapiens
atgctgtgtgacagt

SEQ ID NO: 1913331 - DNA, 15 bp, Homo sapiens
tgctgtgtgacagtc

SEQ ID NO: 1913332 - DNA, 15 bp, Homo sapiens
gctgtgtgacagtct

SEQ ID NO: 1913333 - DNA, 15 bp, Homo sapiens
ctgtgtgacagtcta

SEQ ID NO: 1913334 - DNA, 15 bp, Homo sapiens
tgtgtgacagtctaa

SEQ ID NO: 1913335 - DNA, 15 bp, Homo sapiens
gtgtgacagtctaat

SEQ ID NO: 1913336 - DNA, 15 bp, Homo sapiens
tgtgacagtctaata

SEQ ID NO: 1913337 - DNA, 15 bp, Homo sapiens
gtgacagtctaatac

SEQ ID NO: 1913338 - DNA, 15 bp, Homo sapiens
tgacagtctaatacc

SEQ ID NO: 1913339 - DNA, 15 bp, Homo sapiens
gacagtctaataccc

SEQ ID NO: 1913340 - DNA, 15 bp, Homo sapiens
acagtctaataccct

SEQ ID NO: 1913341 - DNA, 15 bp, Homo sapiens
cagtctaataccctg

SEQ ID NO: 1913342 - DNA, 15 bp, Homo sapiens
agtctaataccctgg

SEQ ID NO: 1913343 - DNA, 15 bp, Homo sapiens
gtctaataccctgga

SEQ ID NO: 1913344 - DNA, 15 bp, Homo sapiens
tctaataccctggaa

SEQ ID NO: 1913345 - DNA, 15 bp, Homo sapiens
ctaataccctggaat

SEQ ID NO: 1913346 - DNA, 15 bp, Homo sapiens
taataccctggaatt

SEQ ID NO: 1913347 - DNA, 15 bp, Homo sapiens
aataccctggaattg

SEQ ID NO: 1913348 - DNA, 15 bp, Homo sapiens
ataccctggaattgt

SEQ ID NO: 1913349 - DNA, 15 bp, Homo sapiens
taccctggaattgtg

SEQ ID NO: 1913350 - DNA, 15 bp, Homo sapiens
accctggaattgtga

SEQ ID NO: 1913351 - DNA, 15 bp, Homo sapiens
ccctggaattgtgag

SEQ ID NO: 1913352 - DNA, 15 bp, Homo sapiens
cctggaattgtgaga

SEQ ID NO: 1913353 - DNA, 15 bp, Homo sapiens
ctggaattgtgagat

SEQ ID NO: 1913354 - DNA, 15 bp, Homo sapiens
tggaattgtgagatt

SEQ ID NO: 1913355 - DNA, 15 bp, Homo sapiens
ggaattgtgagatta

SEQ ID NO: 1913356 - DNA, 15 bp, Homo sapiens
gaattgtgagattat

SEQ ID NO: 1913357 - DNA, 15 bp, Homo sapiens
aattgtgagattatg

SEQ ID NO: 1913358 - DNA, 15 bp, Homo sapiens
attgtgagattatgc

SEQ ID NO: 1913359 - DNA, 15 bp, Homo sapiens
ttgtgagattatgct

SEQ ID NO: 1913360 - DNA, 15 bp, Homo sapiens
tgtgagattatgctc

SEQ ID NO: 1913361 - DNA, 15 bp, Homo sapiens
gtgagattatgctcc

SEQ ID NO: 1913362 - DNA, 15 bp, Homo sapiens
tgagattatgctccc

SEQ ID NO: 1913363 - DNA, 15 bp, Homo sapiens
gagattatgctccct

SEQ ID NO: 1913364 - DNA, 15 bp, Homo sapiens
agattatgctccctc

SEQ ID NO: 1913365 - DNA, 15 bp, Homo sapiens
gattatgctccctcc

SEQ ID NO: 1913366 - DNA, 15 bp, Homo sapiens
attatgctccctcct

SEQ ID NO: 1913367 - DNA, 15 bp, Homo sapiens
ttatgctccctcctt

SEQ ID NO: 1913368 - DNA, 15 bp, Homo sapiens
tatgctccctccttg

SEQ ID NO: 1913369 - DNA, 15 bp, Homo sapiens
atgctccctccttgc

SEQ ID NO: 1913370 - DNA, 15 bp, Homo sapiens
tgctccctccttgct

SEQ ID NO: 1913371 - DNA, 15 bp, Homo sapiens
gctccctccttgctg

SEQ ID NO: 1913372 - DNA, 15 bp, Homo sapiens
ctccctccttgctgt

SEQ ID NO: 1913373 - DNA, 15 bp, Homo sapiens
tccctccttgctgtc

SEQ ID NO: 1913374 - DNA, 15 bp, Homo sapiens
ccctccttgctgtct

SEQ ID NO: 1913375 - DNA, 15 bp, Homo sapiens
cctccttgctgtctt

SEQ ID NO: 1913376 - DNA, 15 bp, Homo sapiens
ctccttgctgtcttc

SEQ ID NO: 1913377 - DNA, 15 bp, Homo sapiens
tccttgctgtcttct

SEQ ID NO: 1913378 - DNA, 15 bp, Homo sapiens
ccttgctgtcttcta

SEQ ID NO: 1913379 - DNA, 15 bp, Homo sapiens
cttgctgtcttctat

SEQ ID NO: 1913380 - DNA, 15 bp, Homo sapiens
ttgctgtcttctatc

SEQ ID NO: 1913381 - DNA, 15 bp, Homo sapiens
tgctgtcttctatct

SEQ ID NO: 1913382 - DNA, 15 bp, Homo sapiens
gctgtcttctatctg

SEQ ID NO: 1913383 - DNA, 15 bp, Homo sapiens
ctgtcttctatctgc

SEQ ID NO: 1913384 - DNA, 15 bp, Homo sapiens
tgtcttctatctgca

SEQ ID NO: 1913385 - DNA, 15 bp, Homo sapiens
gtcttctatctgcag

SEQ ID NO: 1913386 - DNA, 15 bp, Homo sapiens
tcttctatctgcagg

SEQ ID NO: 1913387 - DNA, 15 bp, Homo sapiens
cttctatctgcagga

SEQ ID NO: 1913388 - DNA, 15 bp, Homo sapiens
ttctatctgcaggaa

SEQ ID NO: 1913389 - DNA, 15 bp, Homo sapiens
tctatctgcaggaaa

SEQ ID NO: 1913390 - DNA, 15 bp, Homo sapiens
ctatctgcaggaaat

SEQ ID NO: 1913391 - DNA, 15 bp, Homo sapiens
tatctgcaggaaatt

SEQ ID NO: 1913392 - DNA, 15 bp, Homo sapiens
atctgcaggaaattc

SEQ ID NO: 1913393 - DNA, 15 bp, Homo sapiens
tctgcaggaaattca

SEQ ID NO: 1913394 - DNA, 15 bp, Homo sapiens
ctgcaggaaattcag

SEQ ID NO: 1913395 - DNA, 15 bp, Homo sapiens
tgcaggaaattcaga

SEQ ID NO: 1913396 - DNA, 15 bp, Homo sapiens
gcaggaaattcagat

SEQ ID NO: 1913397 - DNA, 15 bp, Homo sapiens
caggaaattcagatc

SEQ ID NO: 1913398 - DNA, 15 bp, Homo sapiens
aggaaattcagatct

SEQ ID NO: 1913399 - DNA, 15 bp, Homo sapiens
ggaaattcagatctc

SEQ ID NO: 1913400 - DNA, 15 bp, Homo sapiens
gaaattcagatctct

SEQ ID NO: 1913401 - DNA, 15 bp, Homo sapiens
aaattcagatctcta

SEQ ID NO: 1913402 - DNA, 15 bp, Homo sapiens
aattcagatctctat

SEQ ID NO: 1913403 - DNA, 15 bp, Homo sapiens
attcagatctctatg

SEQ ID NO: 1913404 - DNA, 15 bp, Homo sapiens
ttcagatctctatgg

SEQ ID NO: 1913405 - DNA, 15 bp, Homo sapiens
tcagatctctatggc

SEQ ID NO: 1913406 - DNA, 15 bp, Homo sapiens
cagatctctatggca

SEQ ID NO: 1913407 - DNA, 15 bp, Homo sapiens
agatctctatggcag

SEQ ID NO: 1913408 - DNA, 15 bp, Homo sapiens
gatctctatggcagc

SEQ ID NO: 1913409 - DNA, 15 bp, Homo sapiens
atctctatggcagcc

SEQ ID NO: 1913410 - DNA, 15 bp, Homo sapiens
tctctatggcagcca

SEQ ID NO: 1913411 - DNA, 15 bp, Homo sapiens
ctctatggcagccat

SEQ ID NO: 1913412 - DNA, 15 bp, Homo sapiens
tctatggcagccatc

SEQ ID NO: 1913413 - DNA, 15 bp, Homo sapiens
ctatggcagccatca

SEQ ID NO: 1913414 - DNA, 15 bp, Homo sapiens
tatggcagccatcag

SEQ ID NO: 1913415 - DNA, 15 bp, Homo sapiens
atggcagccatcaga

SEQ ID NO: 1913416 - DNA, 15 bp, Homo sapiens
tggcagccatcagag

SEQ ID NO: 1913417 - DNA, 15 bp, Homo sapiens
ggcagccatcagagt

SEQ ID NO: 1913418 - DNA, 15 bp, Homo sapiens
gcagccatcagagtt

SEQ ID NO: 1913419 - DNA, 15 bp, Homo sapiens
cagccatcagagtta

SEQ ID NO: 1913420 - DNA, 15 bp, Homo sapiens
agccatcagagttaa

SEQ ID NO: 1913421 - DNA, 15 bp, Homo sapiens
gccatcagagttaaa

SEQ ID NO: 1913422 - DNA, 15 bp, Homo sapiens
ccatcagagttaaat

SEQ ID NO: 1913423 - DNA, 15 bp, Homo sapiens
catcagagttaaata

SEQ ID NO: 1913424 - DNA, 15 bp, Homo sapiens
atcagagttaaatac

SEQ ID NO: 1913425 - DNA, 15 bp, Homo sapiens
tcagagttaaataca

SEQ ID NO: 1913426 - DNA, 15 bp, Homo sapiens
cagagttaaatacat

SEQ ID NO: 1913427 - DNA, 15 bp, Homo sapiens
agagttaaatacatg

SEQ ID NO: 1913428 - DNA, 15 bp, Homo sapiens
gagttaaatacatgt

SEQ ID NO: 1913429 - DNA, 15 bp, Homo sapiens
agttaaatacatgtt

SEQ ID NO: 1913430 - DNA, 15 bp, Homo sapiens
gttaaatacatgttg

SEQ ID NO: 1913431 - DNA, 15 bp, Homo sapiens
ttaaatacatgttga

SEQ ID NO: 1913432 - DNA, 15 bp, Homo sapiens
taaatacatgttgat

SEQ ID NO: 1913433 - DNA, 15 bp, Homo sapiens
aaatacatgttgata

SEQ ID NO: 1913434 - DNA, 15 bp, Homo sapiens
aatacatgttgataa

SEQ ID NO: 1913435 - DNA, 15 bp, Homo sapiens
atacatgttgataaa

SEQ ID NO: 1913436 - DNA, 15 bp, Homo sapiens
tacatgttgataaat

SEQ ID NO: 1913437 - DNA, 15 bp, Homo sapiens
acatgttgataaata

SEQ ID NO: 1913438 - DNA, 15 bp, Homo sapiens
catgttgataaataa

SEQ ID NO: 1913439 - DNA, 15 bp, Homo sapiens
atgttgataaataat

SEQ ID NO: 1913440 - DNA, 15 bp, Homo sapiens
gttgataaataatat

SEQ ID NO: 1913441 - DNA, 15 bp, Homo sapiens
ttgataaataatata

SEQ ID NO: 1913442 - DNA, 15 bp, Homo sapiens
tgataaataatataa

SEQ ID NO: 1913443 - DNA, 15 bp, Homo sapiens
gataaataatataag

SEQ ID NO: 1913444 - DNA, 15 bp, Homo sapiens
ataaataatataagt

SEQ ID NO: 1913445 - DNA, 15 bp, Homo sapiens
taaataatataagtg

SEQ ID NO: 1913446 - DNA, 15 bp, Homo sapiens
aaataatataagtga

SEQ ID NO: 1913447 - DNA, 15 bp, Homo sapiens
aataatataagtgaa

SEQ ID NO: 1913448 - DNA, 15 bp, Homo sapiens
ataatataagtgaag

SEQ ID NO: 1913449 - DNA, 15 bp, Homo sapiens
taatataagtgaagt

SEQ ID NO: 1913450 - DNA, 15 bp, Homo sapiens
aatataagtgaagta

SEQ ID NO: 1913451 - DNA, 15 bp, Homo sapiens
atataagtgaagtaa

SEQ ID NO: 1913452 - DNA, 15 bp, Homo sapiens
tataagtgaagtaac

SEQ ID NO: 1913453 - DNA, 15 bp, Homo sapiens
ataagtgaagtaaca

SEQ ID NO: 1913454 - DNA, 15 bp, Homo sapiens
taagtgaagtaacag

SEQ ID NO: 1913455 - DNA, 15 bp, Homo sapiens
aagtgaagtaacagc

SEQ ID NO: 1913456 - DNA, 15 bp, Homo sapiens
agtgaagtaacagca

SEQ ID NO: 1913457 - DNA, 15 bp, Homo sapiens
gtgaagtaacagcag

SEQ ID NO: 1913458 - DNA, 15 bp, Homo sapiens
tgaagtaacagcaga

SEQ ID NO: 1913459 - DNA, 15 bp, Homo sapiens
gaagtaacagcagat

SEQ ID NO: 1913460 - DNA, 15 bp, Homo sapiens
aagtaacagcagatt

SEQ ID NO: 1913461 - DNA, 15 bp, Homo sapiens
agtaacagcagatta

SEQ ID NO: 1913462 - DNA, 15 bp, Homo sapiens
gtaacagcagattat

SEQ ID NO: 1913463 - DNA, 15 bp, Homo sapiens
taacagcagattatt

SEQ ID NO: 1913464 - DNA, 15 bp, Homo sapiens
aacagcagattatta

SEQ ID NO: 1913465 - DNA, 15 bp, Homo sapiens
acagcagattattat

SEQ ID NO: 1913466 - DNA, 15 bp, Homo sapiens
cagcagattattatt

SEQ ID NO: 1913467 - DNA, 15 bp, Homo sapiens
agcagattattattt

SEQ ID NO: 1913468 - DNA, 15 bp, Homo sapiens
gcagattattatttt

SEQ ID NO: 1913469 - DNA, 15 bp, Homo sapiens
cagattattatttta

SEQ ID NO: 1913470 - DNA, 15 bp, Homo sapiens
agattattattttac

SEQ ID NO: 1913471 - DNA, 15 bp, Homo sapiens
gattattattttaca

SEQ ID NO: 1913472 - DNA, 15 bp, Homo sapiens
attattattttacag

SEQ ID NO: 1913473 - DNA, 15 bp, Homo sapiens
ttattattttacagc

SEQ ID NO: 1913474 - DNA, 15 bp, Homo sapiens
tattattttacagca

SEQ ID NO: 1913475 - DNA, 15 bp, Homo sapiens
attattttacagcag

SEQ ID NO: 1913476 - DNA, 15 bp, Homo sapiens
ttattttacagcagg

SEQ ID NO: 1913477 - DNA, 15 bp, Homo sapiens
tattttacagcaggt

SEQ ID NO: 1913478 - DNA, 15 bp, Homo sapiens
attttacagcaggtc

SEQ ID NO: 1913479 - DNA, 15 bp, Homo sapiens
ttttacagcaggtct

SEQ ID NO: 1913480 - DNA, 15 bp, Homo sapiens
tttacagcaggtctt

SEQ ID NO: 1913481 - DNA, 15 bp, Homo sapiens
ttacagcaggtcttt

SEQ ID NO: 1913482 - DNA, 15 bp, Homo sapiens
tacagcaggtctttg

SEQ ID NO: 1913483 - DNA, 15 bp, Homo sapiens
acagcaggtctttga

SEQ ID NO: 1913484 - DNA, 15 bp, Homo sapiens
cagcaggtctttgaa

SEQ ID NO: 1913485 - DNA, 15 bp, Homo sapiens
agcaggtctttgaag

SEQ ID NO: 1913486 - DNA, 15 bp, Homo sapiens
gcaggtctttgaagc

SEQ ID NO: 1913487 - DNA, 15 bp, Homo sapiens
caggtctttgaagct

SEQ ID NO: 1913488 - DNA, 15 bp, Homo sapiens
aggtctttgaagcta

SEQ ID NO: 1913489 - DNA, 15 bp, Homo sapiens
ggtctttgaagctac

SEQ ID NO: 1913490 - DNA, 15 bp, Homo sapiens
gtctttgaagctact

SEQ ID NO: 1913491 - DNA, 15 bp, Homo sapiens
tctttgaagctactc

SEQ ID NO: 1913492 - DNA, 15 bp, Homo sapiens
ctttgaagctactca

SEQ ID NO: 1913493 - DNA, 15 bp, Homo sapiens
tttgaagctactcag

SEQ ID NO: 1913494 - DNA, 15 bp, Homo sapiens
ttgaagctactcaga

SEQ ID NO: 1913495 - DNA, 15 bp, Homo sapiens
tgaagctactcagac

SEQ ID NO: 1913496 - DNA, 15 bp, Homo sapiens
gaagctactcagact

SEQ ID NO: 1913497 - DNA, 15 bp, Homo sapiens
aagctactcagactc

SEQ ID NO: 1913498 - DNA, 15 bp, Homo sapiens
agctactcagactca

SEQ ID NO: 1913499 - DNA, 15 bp, Homo sapiens
gctactcagactcag

SEQ ID NO: 1913500 - DNA, 15 bp, Homo sapiens
ctactcagactcagc

SEQ ID NO: 1913501 - DNA, 15 bp, Homo sapiens
tactcagactcagcc

SEQ ID NO: 1913502 - DNA, 15 bp, Homo sapiens
actcagactcagcct

SEQ ID NO: 1913503 - DNA, 15 bp, Homo sapiens
ctcagactcagcctg

SEQ ID NO: 1913504 - DNA, 15 bp, Homo sapiens
tcagactcagcctgt

SEQ ID NO: 1913505 - DNA, 15 bp, Homo sapiens
cagactcagcctgtc

SEQ ID NO: 1913506 - DNA, 15 bp, Homo sapiens
agactcagcctgtct

SEQ ID NO: 1913507 - DNA, 15 bp, Homo sapiens
gactcagcctgtctc

SEQ ID NO: 1913508 - DNA, 15 bp, Homo sapiens
actcagcctgtctct

SEQ ID NO: 1913509 - DNA, 15 bp, Homo sapiens
ctcagcctgtctctt

SEQ ID NO: 1913510 - DNA, 15 bp, Homo sapiens
tcagcctgtctcttc

SEQ ID NO: 1913511 - DNA, 15 bp, Homo sapiens
cagcctgtctcttcc

SEQ ID NO: 1913512 - DNA, 15 bp, Homo sapiens
agcctgtctcttcct

SEQ ID NO: 1913513 - DNA, 15 bp, Homo sapiens
gcctgtctcttcctg

SEQ ID NO: 1913514 - DNA, 15 bp, Homo sapiens
cctgtctcttcctga

SEQ ID NO: 1913515 - DNA, 15 bp, Homo sapiens
ctgtctcttcctgat

SEQ ID NO: 1913516 - DNA, 15 bp, Homo sapiens
tgtctcttcctgatt

SEQ ID NO: 1913517 - DNA, 15 bp, Homo sapiens
gtctcttcctgattc

SEQ ID NO: 1913518 - DNA, 15 bp, Homo sapiens
tctcttcctgattca

SEQ ID NO: 1913519 - DNA, 15 bp, Homo sapiens
ctcttcctgattcag

SEQ ID NO: 1913520 - DNA, 15 bp, Homo sapiens
tcttcctgattcaga

SEQ ID NO: 1913521 - DNA, 15 bp, Homo sapiens
cttcctgattcagaa

SEQ ID NO: 1913522 - DNA, 15 bp, Homo sapiens
ttcctgattcagaaa

SEQ ID NO: 1913523 - DNA, 15 bp, Homo sapiens
tcctgattcagaaaa

SEQ ID NO: 1913524 - DNA, 15 bp, Homo sapiens
cctgattcagaaaag

SEQ ID NO: 1913525 - DNA, 15 bp, Homo sapiens
ctgattcagaaaagc

SEQ ID NO: 1913526 - DNA, 15 bp, Homo sapiens
tgattcagaaaagct

SEQ ID NO: 1913527 - DNA, 15 bp, Homo sapiens
gattcagaaaagctt

SEQ ID NO: 1913528 - DNA, 15 bp, Homo sapiens
attcagaaaagcttt

SEQ ID NO: 1913529 - DNA, 15 bp, Homo sapiens
ttcagaaaagctttc

SEQ ID NO: 1913530 - DNA, 15 bp, Homo sapiens
tcagaaaagctttca

SEQ ID NO: 1913531 - DNA, 15 bp, Homo sapiens
cagaaaagctttcag

SEQ ID NO: 1913532 - DNA, 15 bp, Homo sapiens
agaaaagctttcagc

SEQ ID NO: 1913533 - DNA, 15 bp, Homo sapiens
gaaaagctttcagcc

SEQ ID NO: 1913534 - DNA, 15 bp, Homo sapiens
aaaagctttcagccc

SEQ ID NO: 1913535 - DNA, 15 bp, Homo sapiens
aaagctttcagccca

SEQ ID NO: 1913536 - DNA, 15 bp, Homo sapiens
aagctttcagcccac

SEQ ID NO: 1913537 - DNA, 15 bp, Homo sapiens
agctttcagcccact

SEQ ID NO: 1913538 - DNA, 15 bp, Homo sapiens
gctttcagcccactg

SEQ ID NO: 1913539 - DNA, 15 bp, Homo sapiens
ctttcagcccactgg

SEQ ID NO: 1913540 - DNA, 15 bp, Homo sapiens
tttcagcccactggc

SEQ ID NO: 1913541 - DNA, 15 bp, Homo sapiens
ttcagcccactggct

SEQ ID NO: 1913542 - DNA, 15 bp, Homo sapiens
tcagcccactggctt

SEQ ID NO: 1913543 - DNA, 15 bp, Homo sapiens
cagcccactggcttt

SEQ ID NO: 1913544 - DNA, 15 bp, Homo sapiens
agcccactggcttta

SEQ ID NO: 1913545 - DNA, 15 bp, Homo sapiens
gcccactggctttag

SEQ ID NO: 1913546 - DNA, 15 bp, Homo sapiens
cccactggctttagc

SEQ ID NO: 1913547 - DNA, 15 bp, Homo sapiens
ccactggctttagct

SEQ ID NO: 1913548 - DNA, 15 bp, Homo sapiens
cactggctttagctg

SEQ ID NO: 1913549 - DNA, 15 bp, Homo sapiens
actggctttagctgc

SEQ ID NO: 1913550 - DNA, 15 bp, Homo sapiens
ctggctttagctgct

SEQ ID NO: 1913551 - DNA, 15 bp, Homo sapiens
tggctttagctgcta

SEQ ID NO: 1913552 - DNA, 15 bp, Homo sapiens
ggctttagctgctaa

SEQ ID NO: 1913553 - DNA, 15 bp, Homo sapiens
gctttagctgctaac

SEQ ID NO: 1913554 - DNA, 15 bp, Homo sapiens
ctttagctgctaacg

SEQ ID NO: 1913555 - DNA, 15 bp, Homo sapiens
tttagctgctaacgg

SEQ ID NO: 1913556 - DNA, 15 bp, Homo sapiens
ttagctgctaacgga

SEQ ID NO: 1913557 - DNA, 15 bp, Homo sapiens
tagctgctaacggac

SEQ ID NO: 1913558 - DNA, 15 bp, Homo sapiens
agctgctaacggaca

SEQ ID NO: 1913559 - DNA, 15 bp, Homo sapiens
gctgctaacggacac

SEQ ID NO: 1913560 - DNA, 15 bp, Homo sapiens
ctgctaacggacact

SEQ ID NO: 1913561 - DNA, 15 bp, Homo sapiens
tgctaacggacactg

SEQ ID NO: 1913562 - DNA, 15 bp, Homo sapiens
gctaacggacactga

SEQ ID NO: 1913563 - DNA, 15 bp, Homo sapiens
ctaacggacactgat

SEQ ID NO: 1913564 - DNA, 15 bp, Homo sapiens
taacggacactgatt

SEQ ID NO: 1913565 - DNA, 15 bp, Homo sapiens
aacggacactgattt

SEQ ID NO: 1913566 - DNA, 15 bp, Homo sapiens
acggacactgatttt

SEQ ID NO: 1913567 - DNA, 15 bp, Homo sapiens
cggacactgattttt

SEQ ID NO: 1913568 - DNA, 15 bp, Homo sapiens
gacactgatttttta

SEQ ID NO: 1913569 - DNA, 15 bp, Homo sapiens
acactgattttttaa

SEQ ID NO: 1913570 - DNA, 15 bp, Homo sapiens
cactgattttttaaa

SEQ ID NO: 1913571 - DNA, 15 bp, Homo sapiens
actgattttttaaaa

SEQ ID NO: 1913572 - DNA, 15 bp, Homo sapiens
ctgattttttaaaat

SEQ ID NO: 1913573 - DNA, 15 bp, Homo sapiens
tgattttttaaaatt

SEQ ID NO: 1913574 - DNA, 15 bp, Homo sapiens
gattttttaaaattt

SEQ ID NO: 1913575 - DNA, 15 bp, Homo sapiens
attttttaaaatttg

SEQ ID NO: 1913576 - DNA, 15 bp, Homo sapiens
ttttttaaaatttga

SEQ ID NO: 1913577 - DNA, 15 bp, Homo sapiens
tttttaaaatttgag

SEQ ID NO: 1913578 - DNA, 15 bp, Homo sapiens
ttttaaaatttgagt

SEQ ID NO: 1913579 - DNA, 15 bp, Homo sapiens
tttaaaatttgagtt

SEQ ID NO: 1913580 - DNA, 15 bp, Homo sapiens
ttaaaatttgagttc

SEQ ID NO: 1913581 - DNA, 15 bp, Homo sapiens
taaaatttgagttcc

SEQ ID NO: 1913582 - DNA, 15 bp, Homo sapiens
aaaatttgagttcct

SEQ ID NO: 1913583 - DNA, 15 bp, Homo sapiens
aaatttgagttccta

SEQ ID NO: 1913584 - DNA, 15 bp, Homo sapiens
aatttgagttcctaa

SEQ ID NO: 1913585 - DNA, 15 bp, Homo sapiens
atttgagttcctaaa

SEQ ID NO: 1913586 - DNA, 15 bp, Homo sapiens
tttgagttcctaaag

SEQ ID NO: 1913587 - DNA, 15 bp, Homo sapiens
ttgagttcctaaagg

SEQ ID NO: 1913588 - DNA, 15 bp, Homo sapiens
tgagttcctaaaggg

SEQ ID NO: 1913589 - DNA, 15 bp, Homo sapiens
gagttcctaaagggt

SEQ ID NO: 1913590 - DNA, 15 bp, Homo sapiens
agttcctaaagggtg

SEQ ID NO: 1913591 - DNA, 15 bp, Homo sapiens
gttcctaaagggtga

SEQ ID NO: 1913592 - DNA, 15 bp, Homo sapiens
ttcctaaagggtgaa

SEQ ID NO: 1913593 - DNA, 15 bp, Homo sapiens
tcctaaagggtgaag

SEQ ID NO: 1913594 - DNA, 15 bp, Homo sapiens
cctaaagggtgaagt

SEQ ID NO: 1913595 - DNA, 15 bp, Homo sapiens
ctaaagggtgaagtt

SEQ ID NO: 1913596 - DNA, 15 bp, Homo sapiens
taaagggtgaagttt

SEQ ID NO: 1913597 - DNA, 15 bp, Homo sapiens
aaagggtgaagtttt

SEQ ID NO: 1913598 - DNA, 15 bp, Homo sapiens
aagggtgaagtttta

SEQ ID NO: 1913599 - DNA, 15 bp, Homo sapiens
agggtgaagttttaa

SEQ ID NO: 1913600 - DNA, 15 bp, Homo sapiens
gggtgaagttttaaa

SEQ ID NO: 1913601 - DNA, 15 bp, Homo sapiens
ggtgaagttttaaaa

SEQ ID NO: 1913602 - DNA, 15 bp, Homo sapiens
gtgaagttttaaaag

SEQ ID NO: 1913603 - DNA, 15 bp, Homo sapiens
tgaagttttaaaagc

SEQ ID NO: 1913604 - DNA, 15 bp, Homo sapiens
gaagttttaaaagct

SEQ ID NO: 1913605 - DNA, 15 bp, Homo sapiens
aagttttaaaagctt

SEQ ID NO: 1913606 - DNA, 15 bp, Homo sapiens
agttttaaaagcttt

SEQ ID NO: 1913607 - DNA, 15 bp, Homo sapiens
gttttaaaagctttg

SEQ ID NO: 1913608 - DNA, 15 bp, Homo sapiens
ttttaaaagctttga

SEQ ID NO: 1913609 - DNA, 15 bp, Homo sapiens
tttaaaagctttgat

SEQ ID NO: 1913610 - DNA, 15 bp, Homo sapiens
ttaaaagctttgatg

SEQ ID NO: 1913611 - DNA, 15 bp, Homo sapiens
taaaagctttgatgt

SEQ ID NO: 1913612 - DNA, 15 bp, Homo sapiens
aaaagctttgatgta

SEQ ID NO: 1913613 - DNA, 15 bp, Homo sapiens
aaagctttgatgtaa

SEQ ID NO: 1913614 - DNA, 15 bp, Homo sapiens
aagctttgatgtaaa

SEQ ID NO: 1913615 - DNA, 15 bp, Homo sapiens
agctttgatgtaaat

SEQ ID NO: 1913616 - DNA, 15 bp, Homo sapiens
gctttgatgtaaatc

SEQ ID NO: 1913617 - DNA, 15 bp, Homo sapiens
ctttgatgtaaatcc

SEQ ID NO: 1913618 - DNA, 15 bp, Homo sapiens
tttgatgtaaatcct

SEQ ID NO: 1913619 - DNA, 15 bp, Homo sapiens
ttgatgtaaatccta

SEQ ID NO: 1913620 - DNA, 15 bp, Homo sapiens
tgatgtaaatcctag

SEQ ID NO: 1913621 - DNA, 15 bp, Homo sapiens
gatgtaaatcctaga

SEQ ID NO: 1913622 - DNA, 15 bp, Homo sapiens
atgtaaatcctagaa

SEQ ID NO: 1913623 - DNA, 15 bp, Homo sapiens
tgtaaatcctagaat

SEQ ID NO: 1913624 - DNA, 15 bp, Homo sapiens
gtaaatcctagaatt

SEQ ID NO: 1913625 - DNA, 15 bp, Homo sapiens
taaatcctagaattt

SEQ ID NO: 1913626 - DNA, 15 bp, Homo sapiens
aaatcctagaatttc

SEQ ID NO: 1913627 - DNA, 15 bp, Homo sapiens
aatcctagaatttcc

SEQ ID NO: 1913628 - DNA, 15 bp, Homo sapiens
atcctagaatttcca

SEQ ID NO: 1913629 - DNA, 15 bp, Homo sapiens
tcctagaatttccaa

SEQ ID NO: 1913630 - DNA, 15 bp, Homo sapiens
cctagaatttccaaa

SEQ ID NO: 1913631 - DNA, 15 bp, Homo sapiens
ctagaatttccaaac

SEQ ID NO: 1913632 - DNA, 15 bp, Homo sapiens
tagaatttccaaaca

SEQ ID NO: 1913633 - DNA, 15 bp, Homo sapiens
agaatttccaaacaa

SEQ ID NO: 1913634 - DNA, 15 bp, Homo sapiens
gaatttccaaacaaa

SEQ ID NO: 1913635 - DNA, 15 bp, Homo sapiens
aatttccaaacaaaa

SEQ ID NO: 1913636 - DNA, 15 bp, Homo sapiens
atttccaaacaaaat

SEQ ID NO: 1913637 - DNA, 15 bp, Homo sapiens
tttccaaacaaaatc

SEQ ID NO: 1913638 - DNA, 15 bp, Homo sapiens
ttccaaacaaaatct

SEQ ID NO: 1913639 - DNA, 15 bp, Homo sapiens
tccaaacaaaatctc

SEQ ID NO: 1913640 - DNA, 15 bp, Homo sapiens
ccaaacaaaatctca

SEQ ID NO: 1913641 - DNA, 15 bp, Homo sapiens
caaacaaaatctcaa

SEQ ID NO: 1913642 - DNA, 15 bp, Homo sapiens
aaacaaaatctcaaa

SEQ ID NO: 1913643 - DNA, 15 bp, Homo sapiens
aacaaaatctcaaaa

SEQ ID NO: 1913644 - DNA, 15 bp, Homo sapiens
acaaaatctcaaaaa

SEQ ID NO: 1913645 - DNA, 15 bp, Homo sapiens
caaaatctcaaaaaa

SEQ ID NO: 1913646 - DNA, 15 bp, Homo sapiens
aaaatctcaaaaaag

SEQ ID NO: 1913647 - DNA, 15 bp, Homo sapiens
aaatctcaaaaaaga

SEQ ID NO: 1913648 - DNA, 15 bp, Homo sapiens
aatctcaaaaaagaa

SEQ ID NO: 1913649 - DNA, 15 bp, Homo sapiens
atctcaaaaaagaat

SEQ ID NO: 1913650 - DNA, 15 bp, Homo sapiens
tctcaaaaaagaatg

SEQ ID NO: 1913651 - DNA, 15 bp, Homo sapiens
ctcaaaaaagaatga

SEQ ID NO: 1913652 - DNA, 15 bp, Homo sapiens
tcaaaaaagaatgaa

SEQ ID NO: 1913653 - DNA, 15 bp, Homo sapiens
caaaaaagaatgaag

SEQ ID NO: 1913654 - DNA, 15 bp, Homo sapiens
aaaaaagaatgaaga

SEQ ID NO: 1913655 - DNA, 15 bp, Homo sapiens
aaaaagaatgaagaa

SEQ ID NO: 1913656 - DNA, 15 bp, Homo sapiens
aaaagaatgaagaaa

SEQ ID NO: 1913657 - DNA, 15 bp, Homo sapiens
aaagaatgaagaaac

SEQ ID NO: 1913658 - DNA, 15 bp, Homo sapiens
aagaatgaagaaaca

SEQ ID NO: 1913659 - DNA, 15 bp, Homo sapiens
agaatgaagaaacac

SEQ ID NO: 1913660 - DNA, 15 bp, Homo sapiens
gaatgaagaaacaca

SEQ ID NO: 1913661 - DNA, 15 bp, Homo sapiens
aatgaagaaacacag

SEQ ID NO: 1913662 - DNA, 15 bp, Homo sapiens
atgaagaaacacaga

SEQ ID NO: 1913663 - DNA, 15 bp, Homo sapiens
tgaagaaacacagag

SEQ ID NO: 1913664 - DNA, 15 bp, Homo sapiens
gaagaaacacagagg

SEQ ID NO: 1913665 - DNA, 15 bp, Homo sapiens
agaaacacagagggt

SEQ ID NO: 1913666 - DNA, 15 bp, Homo sapiens
gaaacacagagggtg

SEQ ID NO: 1913667 - DNA, 15 bp, Homo sapiens
aaacacagagggtgg

SEQ ID NO: 1913668 - DNA, 15 bp, Homo sapiens
aacacagagggtggg

SEQ ID NO: 1913669 - DNA, 15 bp, Homo sapiens
acacagagggtgggt

SEQ ID NO: 1913670 - DNA, 15 bp, Homo sapiens
cacagagggtgggtg

SEQ ID NO: 1913671 - DNA, 15 bp, Homo sapiens
acagagggtgggtgg

SEQ ID NO: 1913672 - DNA, 15 bp, Homo sapiens
cagagggtgggtggt

SEQ ID NO: 1913673 - DNA, 15 bp, Homo sapiens
agagggtgggtggtt

SEQ ID NO: 1913674 - DNA, 15 bp, Homo sapiens
gagggtgggtggttg

SEQ ID NO: 1913675 - DNA, 15 bp, Homo sapiens
agggtgggtggttgc

SEQ ID NO: 1913676 - DNA, 15 bp, Homo sapiens
gggtgggtggttgcc

SEQ ID NO: 1913677 - DNA, 15 bp, Homo sapiens
ggtgggtggttgcca

SEQ ID NO: 1913678 - DNA, 15 bp, Homo sapiens
gtgggtggttgccag

SEQ ID NO: 1913679 - DNA, 15 bp, Homo sapiens
tgggtggttgccagt

SEQ ID NO: 1913680 - DNA, 15 bp, Homo sapiens
gggtggttgccagtc

SEQ ID NO: 1913681 - DNA, 15 bp, Homo sapiens
ggtggttgccagtct

SEQ ID NO: 1913682 - DNA, 15 bp, Homo sapiens
gtggttgccagtctg

SEQ ID NO: 1913683 - DNA, 15 bp, Homo sapiens
tggttgccagtctgt

SEQ ID NO: 1913684 - DNA, 15 bp, Homo sapiens
ggttgccagtctgtg

SEQ ID NO: 1913685 - DNA, 15 bp, Homo sapiens
gttgccagtctgtgg

SEQ ID NO: 1913686 - DNA, 15 bp, Homo sapiens
ttgccagtctgtgga

SEQ ID NO: 1913687 - DNA, 15 bp, Homo sapiens
tgccagtctgtggaa

SEQ ID NO: 1913688 - DNA, 15 bp, Homo sapiens
gccagtctgtggaag

SEQ ID NO: 1913689 - DNA, 15 bp, Homo sapiens
ccagtctgtggaagt

SEQ ID NO: 1913690 - DNA, 15 bp, Homo sapiens
cagtctgtggaagtc

SEQ ID NO: 1913691 - DNA, 15 bp, Homo sapiens
agtctgtggaagtca

SEQ ID NO: 1913692 - DNA, 15 bp, Homo sapiens
gtctgtggaagtcaa

SEQ ID NO: 1913693 - DNA, 15 bp, Homo sapiens
tctgtggaagtcaaa

SEQ ID NO: 1913694 - DNA, 15 bp, Homo sapiens
ctgtggaagtcaaaa

SEQ ID NO: 1913695 - DNA, 15 bp, Homo sapiens
tgtggaagtcaaaaa

SEQ ID NO: 1913696 - DNA, 15 bp, Homo sapiens
gtggaagtcaaaaac

SEQ ID NO: 1913697 - DNA, 15 bp, Homo sapiens
tggaagtcaaaaaca

SEQ ID NO: 1913698 - DNA, 15 bp, Homo sapiens
ggaagtcaaaaacag

SEQ ID NO: 1913699 - DNA, 15 bp, Homo sapiens
gaagtcaaaaacagg

SEQ ID NO: 1913700 - DNA, 15 bp, Homo sapiens
aagtcaaaaacaggg

SEQ ID NO: 1913701 - DNA, 15 bp, Homo sapiens
agtcaaaaacagggc

SEQ ID NO: 1913702 - DNA, 15 bp, Homo sapiens
gtcaaaaacagggca

SEQ ID NO: 1913703 - DNA, 15 bp, Homo sapiens
tcaaaaacagggcag

SEQ ID NO: 1913704 - DNA, 15 bp, Homo sapiens
caaaaacagggcagg

SEQ ID NO: 1913705 - DNA, 15 bp, Homo sapiens
aaaaacagggcaggc

SEQ ID NO: 1913706 - DNA, 15 bp, Homo sapiens
aaaacagggcaggcc

SEQ ID NO: 1913707 - DNA, 15 bp, Homo sapiens
aaacagggcaggcca

SEQ ID NO: 1913708 - DNA, 15 bp, Homo sapiens
aacagggcaggccag

SEQ ID NO: 1913709 - DNA, 15 bp, Homo sapiens
acagggcaggccagc

SEQ ID NO: 1913710 - DNA, 15 bp, Homo sapiens
cagggcaggccagct

SEQ ID NO: 1913711 - DNA, 15 bp, Homo sapiens
agggcaggccagcta

SEQ ID NO: 1913712 - DNA, 15 bp, Homo sapiens
gggcaggccagctaa

SEQ ID NO: 1913713 - DNA, 15 bp, Homo sapiens
ggcaggccagctaat

SEQ ID NO: 1913714 - DNA, 15 bp, Homo sapiens
gcaggccagctaatc

SEQ ID NO: 1913715 - DNA, 15 bp, Homo sapiens
caggccagctaatcc

SEQ ID NO: 1913716 - DNA, 15 bp, Homo sapiens
aggccagctaatcca

SEQ ID NO: 1913717 - DNA, 15 bp, Homo sapiens
ggccagctaatccag

SEQ ID NO: 1913718 - DNA, 15 bp, Homo sapiens
gccagctaatccaga

SEQ ID NO: 1913719 - DNA, 15 bp, Homo sapiens
ccagctaatccagag

SEQ ID NO: 1913720 - DNA, 15 bp, Homo sapiens
cagctaatccagagg

SEQ ID NO: 1913721 - DNA, 15 bp, Homo sapiens
agctaatccagaggc

SEQ ID NO: 1913722 - DNA, 15 bp, Homo sapiens
gctaatccagaggca

SEQ ID NO: 1913723 - DNA, 15 bp, Homo sapiens
ctaatccagaggcat

SEQ ID NO: 1913724 - DNA, 15 bp, Homo sapiens
taatccagaggcatt

SEQ ID NO: 1913725 - DNA, 15 bp, Homo sapiens
aatccagaggcattg

SEQ ID NO: 1913726 - DNA, 15 bp, Homo sapiens
atccagaggcattgg

SEQ ID NO: 1913727 - DNA, 15 bp, Homo sapiens
tccagaggcattggg

SEQ ID NO: 1913728 - DNA, 15 bp, Homo sapiens
ccagaggcattggga

SEQ ID NO: 1913729 - DNA, 15 bp, Homo sapiens
cagaggcattgggat

SEQ ID NO: 1913730 - DNA, 15 bp, Homo sapiens
agaggcattgggatt

SEQ ID NO: 1913731 - DNA, 15 bp, Homo sapiens
gaggcattgggattg

SEQ ID NO: 1913732 - DNA, 15 bp, Homo sapiens
aggcattgggattgg

SEQ ID NO: 1913733 - DNA, 15 bp, Homo sapiens
ggcattgggattggg

SEQ ID NO: 1913734 - DNA, 15 bp, Homo sapiens
gcattgggattggga

SEQ ID NO: 1913735 - DNA, 15 bp, Homo sapiens
cattgggattgggag

SEQ ID NO: 1913736 - DNA, 15 bp, Homo sapiens
attgggattgggagc

SEQ ID NO: 1913737 - DNA, 15 bp, Homo sapiens
ttgggattgggagct

SEQ ID NO: 1913738 - DNA, 15 bp, Homo sapiens
tgggattgggagctg

SEQ ID NO: 1913739 - DNA, 15 bp, Homo sapiens
gggattgggagctgg

SEQ ID NO: 1913740 - DNA, 15 bp, Homo sapiens
ggattgggagctggg

SEQ ID NO: 1913741 - DNA, 15 bp, Homo sapiens
gattgggagctgggg

SEQ ID NO: 1913742 - DNA, 15 bp, Homo sapiens
attgggagctgggga

SEQ ID NO: 1913743 - DNA, 15 bp, Homo sapiens
ttgggagctggggaa

SEQ ID NO: 1913744 - DNA, 15 bp, Homo sapiens
tgggagctggggaac

SEQ ID NO: 1913745 - DNA, 15 bp, Homo sapiens
gggagctggggaaca

SEQ ID NO: 1913746 - DNA, 15 bp, Homo sapiens
ggagctggggaacaa

SEQ ID NO: 1913747 - DNA, 15 bp, Homo sapiens
gagctggggaacaat

SEQ ID NO: 1913748 - DNA, 15 bp, Homo sapiens
agctggggaacaatg

SEQ ID NO: 1913749 - DNA, 15 bp, Homo sapiens
gctggggaacaatga

SEQ ID NO: 1913750 - DNA, 15 bp, Homo sapiens
ctggggaacaatgaa

SEQ ID NO: 1913751 - DNA, 15 bp, Homo sapiens
tggggaacaatgaaa

SEQ ID NO: 1913752 - DNA, 15 bp, Homo sapiens
ggggaacaatgaaag

SEQ ID NO: 1913753 - DNA, 15 bp, Homo sapiens
gggaacaatgaaaga

SEQ ID NO: 1913754 - DNA, 15 bp, Homo sapiens
ggaacaatgaaagat

SEQ ID NO: 1913755 - DNA, 15 bp, Homo sapiens
gaacaatgaaagata

SEQ ID NO: 1913756 - DNA, 15 bp, Homo sapiens
aacaatgaaagatat

SEQ ID NO: 1913757 - DNA, 15 bp, Homo sapiens
acaatgaaagatatg

SEQ ID NO: 1913758 - DNA, 15 bp, Homo sapiens
caatgaaagatatgg

SEQ ID NO: 1913759 - DNA, 15 bp, Homo sapiens
aatgaaagatatggg

SEQ ID NO: 1913760 - DNA, 15 bp, Homo sapiens
atgaaagatatgggc

SEQ ID NO: 1913761 - DNA, 15 bp, Homo sapiens
tgaaagatatgggct

SEQ ID NO: 1913762 - DNA, 15 bp, Homo sapiens
gaaagatatgggctc

SEQ ID NO: 1913763 - DNA, 15 bp, Homo sapiens
aaagatatgggctct

SEQ ID NO: 1913764 - DNA, 15 bp, Homo sapiens
aagatatgggctctc

SEQ ID NO: 1913765 - DNA, 15 bp, Homo sapiens
agatatgggctctcc

SEQ ID NO: 1913766 - DNA, 15 bp, Homo sapiens
gatatgggctctcca

SEQ ID NO: 1913767 - DNA, 15 bp, Homo sapiens
atatgggctctccag

SEQ ID NO: 1913768 - DNA, 15 bp, Homo sapiens
tatgggctctccagg

SEQ ID NO: 1913769 - DNA, 15 bp, Homo sapiens
atgggctctccaggc

SEQ ID NO: 1913770 - DNA, 15 bp, Homo sapiens
tgggctctccaggcc

SEQ ID NO: 1913771 - DNA, 15 bp, Homo sapiens
gggctctccaggcct

SEQ ID NO: 1913772 - DNA, 15 bp, Homo sapiens
ggctctccaggcctc

SEQ ID NO: 1913773 - DNA, 15 bp, Homo sapiens
gctctccaggcctct

SEQ ID NO: 1913774 - DNA, 15 bp, Homo sapiens
ctctccaggcctctg

SEQ ID NO: 1913775 - DNA, 15 bp, Homo sapiens
tctccaggcctctgg

SEQ ID NO: 1913776 - DNA, 15 bp, Homo sapiens
ctccaggcctctggc

SEQ ID NO: 1913777 - DNA, 15 bp, Homo sapiens
tccaggcctctggca

SEQ ID NO: 1913778 - DNA, 15 bp, Homo sapiens
ccaggcctctggcaa

SEQ ID NO: 1913779 - DNA, 15 bp, Homo sapiens
caggcctctggcaat

SEQ ID NO: 1913780 - DNA, 15 bp, Homo sapiens
aggcctctggcaatg

SEQ ID NO: 1913781 - DNA, 15 bp, Homo sapiens
ggcctctggcaatga

SEQ ID NO: 1913782 - DNA, 15 bp, Homo sapiens
gcctctggcaatgac

SEQ ID NO: 1913783 - DNA, 15 bp, Homo sapiens
cctctggcaatgacc

SEQ ID NO: 1913784 - DNA, 15 bp, Homo sapiens
ctctggcaatgacca

SEQ ID NO: 1913785 - DNA, 15 bp, Homo sapiens
tctggcaatgaccat

SEQ ID NO: 1913786 - DNA, 15 bp, Homo sapiens
ctggcaatgaccatg

SEQ ID NO: 1913787 - DNA, 15 bp, Homo sapiens
tggcaatgaccatga

SEQ ID NO: 1913788 - DNA, 15 bp, Homo sapiens
ggcaatgaccatgag

SEQ ID NO: 1913789 - DNA, 15 bp, Homo sapiens
gcaatgaccatgagc

SEQ ID NO: 1913790 - DNA, 15 bp, Homo sapiens
caatgaccatgagca

SEQ ID NO: 1913791 - DNA, 15 bp, Homo sapiens
aatgaccatgagcag

SEQ ID NO: 1913792 - DNA, 15 bp, Homo sapiens
atgaccatgagcagc

SEQ ID NO: 1913793 - DNA, 15 bp, Homo sapiens
tgaccatgagcagcc

SEQ ID NO: 1913794 - DNA, 15 bp, Homo sapiens
gaccatgagcagcca

SEQ ID NO: 1913795 - DNA, 15 bp, Homo sapiens
accatgagcagccaa

SEQ ID NO: 1913796 - DNA, 15 bp, Homo sapiens
ccatgagcagccaag

SEQ ID NO: 1913797 - DNA, 15 bp, Homo sapiens
tgagcagccaagagc

SEQ ID NO: 1913798 - DNA, 15 bp, Homo sapiens
gagcagccaagagca

SEQ ID NO: 1913799 - DNA, 15 bp, Homo sapiens
agcagccaagagcaa

SEQ ID NO: 1913800 - DNA, 15 bp, Homo sapiens
gcagccaagagcaag

SEQ ID NO: 1913801 - DNA, 15 bp, Homo sapiens
cagccaagagcaagt

SEQ ID NO: 1913802 - DNA, 15 bp, Homo sapiens
agccaagagcaagtg

SEQ ID NO: 1913803 - DNA, 15 bp, Homo sapiens
gccaagagcaagtga

SEQ ID NO: 1913804 - DNA, 15 bp, Homo sapiens
ccaagagcaagtgag

SEQ ID NO: 1913805 - DNA, 15 bp, Homo sapiens
caagagcaagtgaga

SEQ ID NO: 1913806 - DNA, 15 bp, Homo sapiens
aagagcaagtgagag

SEQ ID NO: 1913807 - DNA, 15 bp, Homo sapiens
agagcaagtgagagt

SEQ ID NO: 1913808 - DNA, 15 bp, Homo sapiens
gagcaagtgagagtg

SEQ ID NO: 1913809 - DNA, 15 bp, Homo sapiens
agcaagtgagagtgg

SEQ ID NO: 1913810 - DNA, 15 bp, Homo sapiens
gcaagtgagagtggg

SEQ ID NO: 1913811 - DNA, 15 bp, Homo sapiens
caagtgagagtggga

SEQ ID NO: 1913812 - DNA, 15 bp, Homo sapiens
aagtgagagtgggaa

SEQ ID NO: 1913813 - DNA, 15 bp, Homo sapiens
agtgagagtgggaag

SEQ ID NO: 1913814 - DNA, 15 bp, Homo sapiens
gtgagagtgggaaga

SEQ ID NO: 1913815 - DNA, 15 bp, Homo sapiens
tgagagtgggaagaa

SEQ ID NO: 1913816 - DNA, 15 bp, Homo sapiens
gagagtgggaagaag

SEQ ID NO: 1913817 - DNA, 15 bp, Homo sapiens
agagtgggaagaagc

SEQ ID NO: 1913818 - DNA, 15 bp, Homo sapiens
gagtgggaagaagcc

SEQ ID NO: 1913819 - DNA, 15 bp, Homo sapiens
agtgggaagaagcca

SEQ ID NO: 1913820 - DNA, 15 bp, Homo sapiens
gtgggaagaagccag

SEQ ID NO: 1913821 - DNA, 15 bp, Homo sapiens
tgggaagaagccagg

SEQ ID NO: 1913822 - DNA, 15 bp, Homo sapiens
gggaagaagccagga

SEQ ID NO: 1913823 - DNA, 15 bp, Homo sapiens
ggaagaagccaggaa

SEQ ID NO: 1913824 - DNA, 15 bp, Homo sapiens
gaagaagccaggaaa

SEQ ID NO: 1913825 - DNA, 15 bp, Homo sapiens
aagaagccaggaaag

SEQ ID NO: 1913826 - DNA, 15 bp, Homo sapiens
agaagccaggaaaga

SEQ ID NO: 1913827 - DNA, 15 bp, Homo sapiens
gaagccaggaaagac

SEQ ID NO: 1913828 - DNA, 15 bp, Homo sapiens
aagccaggaaagaca

SEQ ID NO: 1913829 - DNA, 15 bp, Homo sapiens
agccaggaaagacaa

SEQ ID NO: 1913830 - DNA, 15 bp, Homo sapiens
gccaggaaagacaag

SEQ ID NO: 1913831 - DNA, 15 bp, Homo sapiens
ccaggaaagacaagg

SEQ ID NO: 1913832 - DNA, 15 bp, Homo sapiens
caggaaagacaaggc

SEQ ID NO: 1913833 - DNA, 15 bp, Homo sapiens
aggaaagacaaggcc

SEQ ID NO: 1913834 - DNA, 15 bp, Homo sapiens
ggaaagacaaggccg

SEQ ID NO: 1913835 - DNA, 15 bp, Homo sapiens
gaaagacaaggccgt

SEQ ID NO: 1913836 - DNA, 15 bp, Homo sapiens
aaagacaaggccgtg

SEQ ID NO: 1913837 - DNA, 15 bp, Homo sapiens
aagacaaggccgtga

SEQ ID NO: 1913838 - DNA, 15 bp, Homo sapiens
agacaaggccgtgaa

SEQ ID NO: 1913839 - DNA, 15 bp, Homo sapiens
gacaaggccgtgaaa

SEQ ID NO: 1913840 - DNA, 15 bp, Homo sapiens
acaaggccgtgaaat

SEQ ID NO: 1913841 - DNA, 15 bp, Homo sapiens
caaggccgtgaaatg

SEQ ID NO: 1913842 - DNA, 15 bp, Homo sapiens
aaggccgtgaaatga

SEQ ID NO: 1913843 - DNA, 15 bp, Homo sapiens
aggccgtgaaatgat

SEQ ID NO: 1913844 - DNA, 15 bp, Homo sapiens
ggccgtgaaatgatg

SEQ ID NO: 1913845 - DNA, 15 bp, Homo sapiens
gccgtgaaatgatga

SEQ ID NO: 1913846 - DNA, 15 bp, Homo sapiens
ccgtgaaatgatgat

SEQ ID NO: 1913847 - DNA, 15 bp, Homo sapiens
cgtgaaatgatgata

SEQ ID NO: 1913848 - DNA, 15 bp, Homo sapiens
gtgaaatgatgataa

SEQ ID NO: 1913849 - DNA, 15 bp, Homo sapiens
tgaaatgatgataaa

SEQ ID NO: 1913850 - DNA, 15 bp, Homo sapiens
gaaatgatgataaac

SEQ ID NO: 1913851 - DNA, 15 bp, Homo sapiens
aaatgatgataaaca

SEQ ID NO: 1913852 - DNA, 15 bp, Homo sapiens
aatgatgataaacaa

SEQ ID NO: 1913853 - DNA, 15 bp, Homo sapiens
atgatgataaacaaa

SEQ ID NO: 1913854 - DNA, 15 bp, Homo sapiens
tgatgataaacaaag

SEQ ID NO: 1913855 - DNA, 15 bp, Homo sapiens
gatgataaacaaagg

SEQ ID NO: 1913856 - DNA, 15 bp, Homo sapiens
atgataaacaaaggc

SEQ ID NO: 1913857 - DNA, 15 bp, Homo sapiens
tgataaacaaaggcc

SEQ ID NO: 1913858 - DNA, 15 bp, Homo sapiens
gataaacaaaggcct

SEQ ID NO: 1913859 - DNA, 15 bp, Homo sapiens
ataaacaaaggcctg

SEQ ID NO: 1913860 - DNA, 15 bp, Homo sapiens
taaacaaaggcctgt

SEQ ID NO: 1913861 - DNA, 15 bp, Homo sapiens
aaacaaaggcctgta

SEQ ID NO: 1913862 - DNA, 15 bp, Homo sapiens
aacaaaggcctgtat

SEQ ID NO: 1913863 - DNA, 15 bp, Homo sapiens
acaaaggcctgtatt

SEQ ID NO: 1913864 - DNA, 15 bp, Homo sapiens
caaaggcctgtattt

SEQ ID NO: 1913865 - DNA, 15 bp, Homo sapiens
aaaggcctgtattta

SEQ ID NO: 1913866 - DNA, 15 bp, Homo sapiens
aaggcctgtatttag

SEQ ID NO: 1913867 - DNA, 15 bp, Homo sapiens
aggcctgtatttagc

SEQ ID NO: 1913868 - DNA, 15 bp, Homo sapiens
ggcctgtatttagct

SEQ ID NO: 1913869 - DNA, 15 bp, Homo sapiens
gcctgtatttagctc

SEQ ID NO: 1913870 - DNA, 15 bp, Homo sapiens
cctgtatttagctct

SEQ ID NO: 1913871 - DNA, 15 bp, Homo sapiens
ctgtatttagctctg

SEQ ID NO: 1913872 - DNA, 15 bp, Homo sapiens
tgtatttagctctga

SEQ ID NO: 1913873 - DNA, 15 bp, Homo sapiens
gtatttagctctgac

SEQ ID NO: 1913874 - DNA, 15 bp, Homo sapiens
tatttagctctgact

SEQ ID NO: 1913875 - DNA, 15 bp, Homo sapiens
atttagctctgactc

SEQ ID NO: 1913876 - DNA, 15 bp, Homo sapiens
tttagctctgactct

SEQ ID NO: 1913877 - DNA, 15 bp, Homo sapiens
ttagctctgactctc

SEQ ID NO: 1913878 - DNA, 15 bp, Homo sapiens
tagctctgactctcc

SEQ ID NO: 1913879 - DNA, 15 bp, Homo sapiens
agctctgactctcct

SEQ ID NO: 1913880 - DNA, 15 bp, Homo sapiens
gctctgactctccta

SEQ ID NO: 1913881 - DNA, 15 bp, Homo sapiens
ctctgactctcctac

SEQ ID NO: 1913882 - DNA, 15 bp, Homo sapiens
tctgactctcctact

SEQ ID NO: 1913883 - DNA, 15 bp, Homo sapiens
ctgactctcctacta

SEQ ID NO: 1913884 - DNA, 15 bp, Homo sapiens
tgactctcctactac

SEQ ID NO: 1913885 - DNA, 15 bp, Homo sapiens
gactctcctactaca

SEQ ID NO: 1913886 - DNA, 15 bp, Homo sapiens
actctcctactacaa

SEQ ID NO: 1913887 - DNA, 15 bp, Homo sapiens
ctctcctactacaat

SEQ ID NO: 1913888 - DNA, 15 bp, Homo sapiens
tctcctactacaatg

SEQ ID NO: 1913889 - DNA, 15 bp, Homo sapiens
ctcctactacaatgg

SEQ ID NO: 1913890 - DNA, 15 bp, Homo sapiens
tcctactacaatggg

SEQ ID NO: 1913891 - DNA, 15 bp, Homo sapiens
cctactacaatgggc

SEQ ID NO: 1913892 - DNA, 15 bp, Homo sapiens
ctactacaatgggct

SEQ ID NO: 1913893 - DNA, 15 bp, Homo sapiens
tactacaatgggctc

SEQ ID NO: 1913894 - DNA, 15 bp, Homo sapiens
actacaatgggctca

SEQ ID NO: 1913895 - DNA, 15 bp, Homo sapiens
ctacaatgggctcac

SEQ ID NO: 1913896 - DNA, 15 bp, Homo sapiens
tacaatgggctcact

SEQ ID NO: 1913897 - DNA, 15 bp, Homo sapiens
acaatgggctcactt

SEQ ID NO: 1913898 - DNA, 15 bp, Homo sapiens
caatgggctcacttc

SEQ ID NO: 1913899 - DNA, 15 bp, Homo sapiens
aatgggctcacttct

SEQ ID NO: 1913900 - DNA, 15 bp, Homo sapiens
atgggctcacttctc

SEQ ID NO: 1913901 - DNA, 15 bp, Homo sapiens
tgggctcacttctca

SEQ ID NO: 1913902 - DNA, 15 bp, Homo sapiens
gggctcacttctcaa

SEQ ID NO: 1913903 - DNA, 15 bp, Homo sapiens
ggctcacttctcaag

SEQ ID NO: 1913904 - DNA, 15 bp, Homo sapiens
gctcacttctcaagg

SEQ ID NO: 1913905 - DNA, 15 bp, Homo sapiens
ctcacttctcaagga

SEQ ID NO: 1913906 - DNA, 15 bp, Homo sapiens
tcacttctcaaggaa

SEQ ID NO: 1913907 - DNA, 15 bp, Homo sapiens
cacttctcaaggaaa

SEQ ID NO: 1913908 - DNA, 15 bp, Homo sapiens
acttctcaaggaaag

SEQ ID NO: 1913909 - DNA, 15 bp, Homo sapiens
cttctcaaggaaaga

SEQ ID NO: 1913910 - DNA, 15 bp, Homo sapiens
ttctcaaggaaagag

SEQ ID NO: 1913911 - DNA, 15 bp, Homo sapiens
tctcaaggaaagagt

SEQ ID NO: 1913912 - DNA, 15 bp, Homo sapiens
ctcaaggaaagagta

SEQ ID NO: 1913913 - DNA, 15 bp, Homo sapiens
tcaaggaaagagtaa

SEQ ID NO: 1913914 - DNA, 15 bp, Homo sapiens
caaggaaagagtaag

SEQ ID NO: 1913915 - DNA, 15 bp, Homo sapiens
aaggaaagagtaaga

SEQ ID NO: 1913916 - DNA, 15 bp, Homo sapiens
aggaaagagtaagat

SEQ ID NO: 1913917 - DNA, 15 bp, Homo sapiens
ggaaagagtaagatt

SEQ ID NO: 1913918 - DNA, 15 bp, Homo sapiens
gaaagagtaagattt

SEQ ID NO: 1913919 - DNA, 15 bp, Homo sapiens
aaagagtaagattta

SEQ ID NO: 1913920 - DNA, 15 bp, Homo sapiens
aagagtaagatttat

SEQ ID NO: 1913921 - DNA, 15 bp, Homo sapiens
agagtaagatttata

SEQ ID NO: 1913922 - DNA, 15 bp, Homo sapiens
gagtaagatttatac

SEQ ID NO: 1913923 - DNA, 15 bp, Homo sapiens
agtaagatttataca

SEQ ID NO: 1913924 - DNA, 15 bp, Homo sapiens
gtaagatttatacaa

SEQ ID NO: 1913925 - DNA, 15 bp, Homo sapiens
taagatttatacaaa

SEQ ID NO: 1913926 - DNA, 15 bp, Homo sapiens
aagatttatacaaac

SEQ ID NO: 1913927 - DNA, 15 bp, Homo sapiens
agatttatacaaacc

SEQ ID NO: 1913928 - DNA, 15 bp, Homo sapiens
gatttatacaaacca

SEQ ID NO: 1913929 - DNA, 15 bp, Homo sapiens
atttatacaaaccac

SEQ ID NO: 1913930 - DNA, 15 bp, Homo sapiens
tttatacaaaccacc

SEQ ID NO: 1913931 - DNA, 15 bp, Homo sapiens
ttatacaaaccacct

SEQ ID NO: 1913932 - DNA, 15 bp, Homo sapiens
tatacaaaccacctc

SEQ ID NO: 1913933 - DNA, 15 bp, Homo sapiens
atacaaaccacctca

SEQ ID NO: 1913934 - DNA, 15 bp, Homo sapiens
tacaaaccacctcaa

SEQ ID NO: 1913935 - DNA, 15 bp, Homo sapiens
acaaaccacctcaaa

SEQ ID NO: 1913936 - DNA, 15 bp, Homo sapiens
caaaccacctcaaaa

SEQ ID NO: 1913937 - DNA, 15 bp, Homo sapiens
aaaccacctcaaaaa

SEQ ID NO: 1913938 - DNA, 15 bp, Homo sapiens
aaccacctcaaaaag

SEQ ID NO: 1913939 - DNA, 15 bp, Homo sapiens
accacctcaaaaaga

SEQ ID NO: 1913940 - DNA, 15 bp, Homo sapiens
ccacctcaaaaagag

SEQ ID NO: 1913941 - DNA, 15 bp, Homo sapiens
cacctcaaaaagaga

SEQ ID NO: 1913942 - DNA, 15 bp, Homo sapiens
acctcaaaaagagaa

SEQ ID NO: 1913943 - DNA, 15 bp, Homo sapiens
cctcaaaaagagaac

SEQ ID NO: 1913944 - DNA, 15 bp, Homo sapiens
ctcaaaaagagaact

SEQ ID NO: 1913945 - DNA, 15 bp, Homo sapiens
tcaaaaagagaactt

SEQ ID NO: 1913946 - DNA, 15 bp, Homo sapiens
caaaaagagaacttt

SEQ ID NO: 1913947 - DNA, 15 bp, Homo sapiens
aaaaagagaacttta

SEQ ID NO: 1913948 - DNA, 15 bp, Homo sapiens
aaaagagaactttaa

SEQ ID NO: 1913949 - DNA, 15 bp, Homo sapiens
aaagagaactttaaa

SEQ ID NO: 1913950 - DNA, 15 bp, Homo sapiens
aagagaactttaaaa

SEQ ID NO: 1913951 - DNA, 15 bp, Homo sapiens
agagaactttaaaat

SEQ ID NO: 1913952 - DNA, 15 bp, Homo sapiens
gagaactttaaaata

SEQ ID NO: 1913953 - DNA, 15 bp, Homo sapiens
agaactttaaaataa

SEQ ID NO: 1913954 - DNA, 15 bp, Homo sapiens
actttaaaataataa

SEQ ID NO: 1913955 - DNA, 15 bp, Homo sapiens
ctttaaaataataat

SEQ ID NO: 1913956 - DNA, 15 bp, Homo sapiens
tttaaaataataata

SEQ ID NO: 1913957 - DNA, 15 bp, Homo sapiens
ttaaaataataataa

SEQ ID NO: 1913958 - DNA, 15 bp, Homo sapiens
taaaataataataag

SEQ ID NO: 1913959 - DNA, 15 bp, Homo sapiens
aaaataataataaga

SEQ ID NO: 1913960 - DNA, 15 bp, Homo sapiens
aaataataataagaa

SEQ ID NO: 1913961 - DNA, 15 bp, Homo sapiens
aataataataagaag

SEQ ID NO: 1913962 - DNA, 15 bp, Homo sapiens
ataataataagaaga

SEQ ID NO: 1913963 - DNA, 15 bp, Homo sapiens
taataataagaagaa

SEQ ID NO: 1913964 - DNA, 15 bp, Homo sapiens
aataataagaagaag

SEQ ID NO: 1913965 - DNA, 15 bp, Homo sapiens
ataataagaagaagc

SEQ ID NO: 1913966 - DNA, 15 bp, Homo sapiens
taataagaagaagct

SEQ ID NO: 1913967 - DNA, 15 bp, Homo sapiens
aataagaagaagcta

SEQ ID NO: 1913968 - DNA, 15 bp, Homo sapiens
ataagaagaagctaa

SEQ ID NO: 1913969 - DNA, 15 bp, Homo sapiens
taagaagaagctaat

SEQ ID NO: 1913970 - DNA, 15 bp, Homo sapiens
aagaagaagctaatc

SEQ ID NO: 1913971 - DNA, 15 bp, Homo sapiens
agaagaagctaatca

SEQ ID NO: 1913972 - DNA, 15 bp, Homo sapiens
gaagaagctaatcag

SEQ ID NO: 1913973 - DNA, 15 bp, Homo sapiens
aagaagctaatcagt

SEQ ID NO: 1913974 - DNA, 15 bp, Homo sapiens
agaagctaatcagtt

SEQ ID NO: 1913975 - DNA, 15 bp, Homo sapiens
gaagctaatcagtta

SEQ ID NO: 1913976 - DNA, 15 bp, Homo sapiens
aagctaatcagttaa

SEQ ID NO: 1913977 - DNA, 15 bp, Homo sapiens
agctaatcagttaat

SEQ ID NO: 1913978 - DNA, 15 bp, Homo sapiens
gctaatcagttaatt

SEQ ID NO: 1913979 - DNA, 15 bp, Homo sapiens
ctaatcagttaattt

SEQ ID NO: 1913980 - DNA, 15 bp, Homo sapiens
taatcagttaatttt

SEQ ID NO: 1913981 - DNA, 15 bp, Homo sapiens
aatcagttaattttg

SEQ ID NO: 1913982 - DNA, 15 bp, Homo sapiens
atcagttaattttgc

SEQ ID NO: 1913983 - DNA, 15 bp, Homo sapiens
tcagttaattttgca

SEQ ID NO: 1913984 - DNA, 15 bp, Homo sapiens
cagttaattttgcac

SEQ ID NO: 1913985 - DNA, 15 bp, Homo sapiens
agttaattttgcaca

SEQ ID NO: 1913986 - DNA, 15 bp, Homo sapiens
gttaattttgcacaa

SEQ ID NO: 1913987 - DNA, 15 bp, Homo sapiens
ttaattttgcacaac

SEQ ID NO: 1913988 - DNA, 15 bp, Homo sapiens
taattttgcacaacc

SEQ ID NO: 1913989 - DNA, 15 bp, Homo sapiens
aattttgcacaacca

SEQ ID NO: 1913990 - DNA, 15 bp, Homo sapiens
attttgcacaaccaa

SEQ ID NO: 1913991 - DNA, 15 bp, Homo sapiens
ttttgcacaaccaat

SEQ ID NO: 1913992 - DNA, 15 bp, Homo sapiens
tttgcacaaccaata

SEQ ID NO: 1913993 - DNA, 15 bp, Homo sapiens
ttgcacaaccaatac

SEQ ID NO: 1913994 - DNA, 15 bp, Homo sapiens
tgcacaaccaatact

SEQ ID NO: 1913995 - DNA, 15 bp, Homo sapiens
gcacaaccaatactt

SEQ ID NO: 1913996 - DNA, 15 bp, Homo sapiens
cacaaccaatactta

SEQ ID NO: 1913997 - DNA, 15 bp, Homo sapiens
acaaccaatacttag

SEQ ID NO: 1913998 - DNA, 15 bp, Homo sapiens
caaccaatacttaga

SEQ ID NO: 1913999 - DNA, 15 bp, Homo sapiens
aaccaatacttagat

SEQ ID NO: 1914000 - DNA, 15 bp, Homo sapiens
accaatacttagatt

SEQ ID NO: 1914001 - DNA, 15 bp, Homo sapiens
ccaatacttagatta

SEQ ID NO: 1914002 - DNA, 15 bp, Homo sapiens
caatacttagattaa

SEQ ID NO: 1914003 - DNA, 15 bp, Homo sapiens
aatacttagattaat

SEQ ID NO: 1914004 - DNA, 15 bp, Homo sapiens
atacttagattaata

SEQ ID NO: 1914005 - DNA, 15 bp, Homo sapiens
tacttagattaataa

SEQ ID NO: 1914006 - DNA, 15 bp, Homo sapiens
acttagattaataaa

SEQ ID NO: 1914007 - DNA, 15 bp, Homo sapiens
cttagattaataaat

SEQ ID NO: 1914008 - DNA, 15 bp, Homo sapiens
ttagattaataaata

SEQ ID NO: 1914009 - DNA, 15 bp, Homo sapiens
tagattaataaatac

SEQ ID NO: 1914010 - DNA, 15 bp, Homo sapiens
attaataaatactcg

SEQ ID NO: 1914011 - DNA, 15 bp, Homo sapiens
ttaataaatactcgg

SEQ ID NO: 1914012 - DNA, 15 bp, Homo sapiens
taataaatactcggc

SEQ ID NO: 1914013 - DNA, 15 bp, Homo sapiens
aataaatactcggcc

SEQ ID NO: 1914014 - DNA, 15 bp, Homo sapiens
ataaatactcggccc

SEQ ID NO: 1914015 - DNA, 15 bp, Homo sapiens
taaatactcggccct

SEQ ID NO: 1914016 - DNA, 15 bp, Homo sapiens
aaatactcggcccta

SEQ ID NO: 1914017 - DNA, 15 bp, Homo sapiens
aatactcggccctac

SEQ ID NO: 1914018 - DNA, 15 bp, Homo sapiens
atactcggccctaca

SEQ ID NO: 1914019 - DNA, 15 bp, Homo sapiens
tactcggccctacaa

SEQ ID NO: 1914020 - DNA, 15 bp, Homo sapiens
actcggccctacaac

SEQ ID NO: 1914021 - DNA, 15 bp, Homo sapiens
ctcggccctacaacc

SEQ ID NO: 1914022 - DNA, 15 bp, Homo sapiens
tcggccctacaacct

SEQ ID NO: 1914023 - DNA, 15 bp, Homo sapiens
cggccctacaacctc

SEQ ID NO: 1914024 - DNA, 15 bp, Homo sapiens
ggccctacaacctca

SEQ ID NO: 1914025 - DNA, 15 bp, Homo sapiens
gccctacaacctcat

SEQ ID NO: 1914026 - DNA, 15 bp, Homo sapiens
ccctacaacctcatg

SEQ ID NO: 1914027 - DNA, 15 bp, Homo sapiens
cctacaacctcatgg

SEQ ID NO: 1914028 - DNA, 15 bp, Homo sapiens
ctacaacctcatgga

SEQ ID NO: 1914029 - DNA, 15 bp, Homo sapiens
tacaacctcatggaa

SEQ ID NO: 1914030 - DNA, 15 bp, Homo sapiens
acaacctcatggaaa

SEQ ID NO: 1914031 - DNA, 15 bp, Homo sapiens
caacctcatggaaat

SEQ ID NO: 1914032 - DNA, 15 bp, Homo sapiens
aacctcatggaaata

SEQ ID NO: 1914033 - DNA, 15 bp, Homo sapiens
acctcatggaaatat

SEQ ID NO: 1914034 - DNA, 15 bp, Homo sapiens
cctcatggaaatata

SEQ ID NO: 1914035 - DNA, 15 bp, Homo sapiens
ctcatggaaatatat

SEQ ID NO: 1914036 - DNA, 15 bp, Homo sapiens
tcatggaaatatatt

SEQ ID NO: 1914037 - DNA, 15 bp, Homo sapiens
catggaaatatatta

SEQ ID NO: 1914038 - DNA, 15 bp, Homo sapiens
atggaaatatattaa

SEQ ID NO: 1914039 - DNA, 15 bp, Homo sapiens
tggaaatatattaag

SEQ ID NO: 1914040 - DNA, 15 bp, Homo sapiens
ggaaatatattaagt

SEQ ID NO: 1914041 - DNA, 15 bp, Homo sapiens
gaaatatattaagta

SEQ ID NO: 1914042 - DNA, 15 bp, Homo sapiens
aaatatattaagtac

SEQ ID NO: 1914043 - DNA, 15 bp, Homo sapiens
aatatattaagtaca

SEQ ID NO: 1914044 - DNA, 15 bp, Homo sapiens
atatattaagtacat

SEQ ID NO: 1914045 - DNA, 15 bp, Homo sapiens
tatattaagtacata

SEQ ID NO: 1914046 - DNA, 15 bp, Homo sapiens
atattaagtacatac

SEQ ID NO: 1914047 - DNA, 15 bp, Homo sapiens
tattaagtacataca

SEQ ID NO: 1914048 - DNA, 15 bp, Homo sapiens
attaagtacatacac

SEQ ID NO: 1914049 - DNA, 15 bp, Homo sapiens
ttaagtacatacaca

SEQ ID NO: 1914050 - DNA, 15 bp, Homo sapiens
taagtacatacacac

SEQ ID NO: 1914051 - DNA, 15 bp, Homo sapiens
aagtacatacacact

SEQ ID NO: 1914052 - DNA, 15 bp, Homo sapiens
agtacatacacactc

SEQ ID NO: 1914053 - DNA, 15 bp, Homo sapiens
gtacatacacactcc

SEQ ID NO: 1914054 - DNA, 15 bp, Homo sapiens
acatacacactccat

SEQ ID NO: 1914055 - DNA, 15 bp, Homo sapiens
catacacactccatc

SEQ ID NO: 1914056 - DNA, 15 bp, Homo sapiens
atacacactccatca

SEQ ID NO: 1914057 - DNA, 15 bp, Homo sapiens
tacacactccatcac

SEQ ID NO: 1914058 - DNA, 15 bp, Homo sapiens
acacactccatcacc

SEQ ID NO: 1914059 - DNA, 15 bp, Homo sapiens
cacactccatcacct

SEQ ID NO: 1914060 - DNA, 15 bp, Homo sapiens
acactccatcacctc

SEQ ID NO: 1914061 - DNA, 15 bp, Homo sapiens
cactccatcacctct

SEQ ID NO: 1914062 - DNA, 15 bp, Homo sapiens
actccatcacctcta

SEQ ID NO: 1914063 - DNA, 15 bp, Homo sapiens
ctccatcacctctat

SEQ ID NO: 1914064 - DNA, 15 bp, Homo sapiens
tccatcacctctata

SEQ ID NO: 1914065 - DNA, 15 bp, Homo sapiens
ccatcacctctataa

SEQ ID NO: 1914066 - DNA, 15 bp, Homo sapiens
catcacctctataag

SEQ ID NO: 1914067 - DNA, 15 bp, Homo sapiens
atcacctctataagg

SEQ ID NO: 1914068 - DNA, 15 bp, Homo sapiens
tcacctctataagga

SEQ ID NO: 1914069 - DNA, 15 bp, Homo sapiens
cacctctataaggaa

SEQ ID NO: 1914070 - DNA, 15 bp, Homo sapiens
acctctataaggaat

SEQ ID NO: 1914071 - DNA, 15 bp, Homo sapiens
cctctataaggaatc

SEQ ID NO: 1914072 - DNA, 15 bp, Homo sapiens
ctctataaggaatca

SEQ ID NO: 1914073 - DNA, 15 bp, Homo sapiens
tctataaggaatcaa

SEQ ID NO: 1914074 - DNA, 15 bp, Homo sapiens
ctataaggaatcaaa

SEQ ID NO: 1914075 - DNA, 15 bp, Homo sapiens
tataaggaatcaaaa

SEQ ID NO: 1914076 - DNA, 15 bp, Homo sapiens
ataaggaatcaaaat

SEQ ID NO: 1914077 - DNA, 15 bp, Homo sapiens
taaggaatcaaaatg

SEQ ID NO: 1914078 - DNA, 15 bp, Homo sapiens
aaggaatcaaaatgt

SEQ ID NO: 1914079 - DNA, 15 bp, Homo sapiens
aggaatcaaaatgtt

SEQ ID NO: 1914080 - DNA, 15 bp, Homo sapiens
ggaatcaaaatgttt

SEQ ID NO: 1914081 - DNA, 15 bp, Homo sapiens
gaatcaaaatgttta

SEQ ID NO: 1914082 - DNA, 15 bp, Homo sapiens
aatcaaaatgtttag

SEQ ID NO: 1914083 - DNA, 15 bp, Homo sapiens
atcaaaatgtttagc

SEQ ID NO: 1914084 - DNA, 15 bp, Homo sapiens
tcaaaatgtttagca

SEQ ID NO: 1914085 - DNA, 15 bp, Homo sapiens
caaaatgtttagcaa

SEQ ID NO: 1914086 - DNA, 15 bp, Homo sapiens
aaaatgtttagcaac

SEQ ID NO: 1914087 - DNA, 15 bp, Homo sapiens
aaatgtttagcaacc

SEQ ID NO: 1914088 - DNA, 15 bp, Homo sapiens
aatgtttagcaacca

SEQ ID NO: 1914089 - DNA, 15 bp, Homo sapiens
atgtttagcaaccag

SEQ ID NO: 1914090 - DNA, 15 bp, Homo sapiens
tgtttagcaaccagc

SEQ ID NO: 1914091 - DNA, 15 bp, Homo sapiens
gtttagcaaccagcc

SEQ ID NO: 1914092 - DNA, 15 bp, Homo sapiens
tttagcaaccagccc

SEQ ID NO: 1914093 - DNA, 15 bp, Homo sapiens
ttagcaaccagccca

SEQ ID NO: 1914094 - DNA, 15 bp, Homo sapiens
tagcaaccagcccag

SEQ ID NO: 1914095 - DNA, 15 bp, Homo sapiens
agcaaccagcccaga

SEQ ID NO: 1914096 - DNA, 15 bp, Homo sapiens
gcaaccagcccagaa

SEQ ID NO: 1914097 - DNA, 15 bp, Homo sapiens
caaccagcccagaag

SEQ ID NO: 1914098 - DNA, 15 bp, Homo sapiens
aaccagcccagaagg

SEQ ID NO: 1914099 - DNA, 15 bp, Homo sapiens
accagcccagaaggg

SEQ ID NO: 1914100 - DNA, 15 bp, Homo sapiens
ccagcccagaaggga

SEQ ID NO: 1914101 - DNA, 15 bp, Homo sapiens
cagcccagaagggat

SEQ ID NO: 1914102 - DNA, 15 bp, Homo sapiens
agcccagaagggatc

SEQ ID NO: 1914103 - DNA, 15 bp, Homo sapiens
gcccagaagggatca

SEQ ID NO: 1914104 - DNA, 15 bp, Homo sapiens
cccagaagggatcag

SEQ ID NO: 1914105 - DNA, 15 bp, Homo sapiens
ccagaagggatcagc

SEQ ID NO: 1914106 - DNA, 15 bp, Homo sapiens
cagaagggatcagcc

SEQ ID NO: 1914107 - DNA, 15 bp, Homo sapiens
agaagggatcagcca

SEQ ID NO: 1914108 - DNA, 15 bp, Homo sapiens
gaagggatcagccaa

SEQ ID NO: 1914109 - DNA, 15 bp, Homo sapiens
aagggatcagccaat

SEQ ID NO: 1914110 - DNA, 15 bp, Homo sapiens
agggatcagccaatc

SEQ ID NO: 1914111 - DNA, 15 bp, Homo sapiens
gggatcagccaatca

SEQ ID NO: 1914112 - DNA, 15 bp, Homo sapiens
ggatcagccaatcag

SEQ ID NO: 1914113 - DNA, 15 bp, Homo sapiens
gatcagccaatcaga

SEQ ID NO: 1914114 - DNA, 15 bp, Homo sapiens
atcagccaatcagaa

SEQ ID NO: 1914115 - DNA, 15 bp, Homo sapiens
tcagccaatcagaac

SEQ ID NO: 1914116 - DNA, 15 bp, Homo sapiens
cagccaatcagaaca

SEQ ID NO: 1914117 - DNA, 15 bp, Homo sapiens
agccaatcagaacag

SEQ ID NO: 1914118 - DNA, 15 bp, Homo sapiens
gccaatcagaacaga

SEQ ID NO: 1914119 - DNA, 15 bp, Homo sapiens
ccaatcagaacagat

SEQ ID NO: 1914120 - DNA, 15 bp, Homo sapiens
caatcagaacagata

SEQ ID NO: 1914121 - DNA, 15 bp, Homo sapiens
aatcagaacagatac

SEQ ID NO: 1914122 - DNA, 15 bp, Homo sapiens
atcagaacagatact

SEQ ID NO: 1914123 - DNA, 15 bp, Homo sapiens
tcagaacagatactg

SEQ ID NO: 1914124 - DNA, 15 bp, Homo sapiens
cagaacagatactgg

SEQ ID NO: 1914125 - DNA, 15 bp, Homo sapiens
agaacagatactggc

SEQ ID NO: 1914126 - DNA, 15 bp, Homo sapiens
gaacagatactggcc

SEQ ID NO: 1914127 - DNA, 15 bp, Homo sapiens
aacagatactggcca

SEQ ID NO: 1914128 - DNA, 15 bp, Homo sapiens
acagatactggccat

SEQ ID NO: 1914129 - DNA, 15 bp, Homo sapiens
cagatactggccata

SEQ ID NO: 1914130 - DNA, 15 bp, Homo sapiens
agatactggccataa

SEQ ID NO: 1914131 - DNA, 15 bp, Homo sapiens
gatactggccataaa

SEQ ID NO: 1914132 - DNA, 15 bp, Homo sapiens
atactggccataaac

SEQ ID NO: 1914133 - DNA, 15 bp, Homo sapiens
tactggccataaaca

SEQ ID NO: 1914134 - DNA, 15 bp, Homo sapiens
actggccataaacac

SEQ ID NO: 1914135 - DNA, 15 bp, Homo sapiens
ctggccataaacacc

SEQ ID NO: 1914136 - DNA, 15 bp, Homo sapiens
tggccataaacacca

SEQ ID NO: 1914137 - DNA, 15 bp, Homo sapiens
ggccataaacaccag

SEQ ID NO: 1914138 - DNA, 15 bp, Homo sapiens
gccataaacaccagt

SEQ ID NO: 1914139 - DNA, 15 bp, Homo sapiens
ccataaacaccagtc

SEQ ID NO: 1914140 - DNA, 15 bp, Homo sapiens
cataaacaccagtca

SEQ ID NO: 1914141 - DNA, 15 bp, Homo sapiens
ataaacaccagtcag

SEQ ID NO: 1914142 - DNA, 15 bp, Homo sapiens
taaacaccagtcagg

SEQ ID NO: 1914143 - DNA, 15 bp, Homo sapiens
aaacaccagtcaggc

SEQ ID NO: 1914144 - DNA, 15 bp, Homo sapiens
aacaccagtcaggcc

SEQ ID NO: 1914145 - DNA, 15 bp, Homo sapiens
acaccagtcaggcca

SEQ ID NO: 1914146 - DNA, 15 bp, Homo sapiens
caccagtcaggccat

SEQ ID NO: 1914147 - DNA, 15 bp, Homo sapiens
accagtcaggccatc

SEQ ID NO: 1914148 - DNA, 15 bp, Homo sapiens
ccagtcaggccatcc

SEQ ID NO: 1914149 - DNA, 15 bp, Homo sapiens
cagtcaggccatcct

SEQ ID NO: 1914150 - DNA, 15 bp, Homo sapiens
agtcaggccatcctg

SEQ ID NO: 1914151 - DNA, 15 bp, Homo sapiens
gtcaggccatcctgg

SEQ ID NO: 1914152 - DNA, 15 bp, Homo sapiens
tcaggccatcctgga

SEQ ID NO: 1914153 - DNA, 15 bp, Homo sapiens
caggccatcctggag

SEQ ID NO: 1914154 - DNA, 15 bp, Homo sapiens
aggccatcctggagc

SEQ ID NO: 1914155 - DNA, 15 bp, Homo sapiens
ggccatcctggagca

SEQ ID NO: 1914156 - DNA, 15 bp, Homo sapiens
gccatcctggagcac

SEQ ID NO: 1914157 - DNA, 15 bp, Homo sapiens
ccatcctggagcaca

SEQ ID NO: 1914158 - DNA, 15 bp, Homo sapiens
catcctggagcacaa

SEQ ID NO: 1914159 - DNA, 15 bp, Homo sapiens
atcctggagcacaaa

SEQ ID NO: 1914160 - DNA, 15 bp, Homo sapiens
tcctggagcacaaag

SEQ ID NO: 1914161 - DNA, 15 bp, Homo sapiens
cctggagcacaaagc

SEQ ID NO: 1914162 - DNA, 15 bp, Homo sapiens
ctggagcacaaagct

SEQ ID NO: 1914163 - DNA, 15 bp, Homo sapiens
tggagcacaaagcta

SEQ ID NO: 1914164 - DNA, 15 bp, Homo sapiens
ggagcacaaagctaa

SEQ ID NO: 1914165 - DNA, 15 bp, Homo sapiens
gagcacaaagctaaa

SEQ ID NO: 1914166 - DNA, 15 bp, Homo sapiens
agcacaaagctaaat

SEQ ID NO: 1914167 - DNA, 15 bp, Homo sapiens
gcacaaagctaaata

SEQ ID NO: 1914168 - DNA, 15 bp, Homo sapiens
cacaaagctaaatat

SEQ ID NO: 1914169 - DNA, 15 bp, Homo sapiens
acaaagctaaatata

SEQ ID NO: 1914170 - DNA, 15 bp, Homo sapiens
caaagctaaatataa

SEQ ID NO: 1914171 - DNA, 15 bp, Homo sapiens
aaagctaaatataag

SEQ ID NO: 1914172 - DNA, 15 bp, Homo sapiens
aagctaaatataagc

SEQ ID NO: 1914173 - DNA, 15 bp, Homo sapiens
agctaaatataagcc

SEQ ID NO: 1914174 - DNA, 15 bp, Homo sapiens
gctaaatataagccc

SEQ ID NO: 1914175 - DNA, 15 bp, Homo sapiens
ctaaatataagccct

SEQ ID NO: 1914176 - DNA, 15 bp, Homo sapiens
taaatataagccctg

SEQ ID NO: 1914177 - DNA, 15 bp, Homo sapiens
aaatataagccctga

SEQ ID NO: 1914178 - DNA, 15 bp, Homo sapiens
aatataagccctgaa

SEQ ID NO: 1914179 - DNA, 15 bp, Homo sapiens
atataagccctgaat

SEQ ID NO: 1914180 - DNA, 15 bp, Homo sapiens
tataagccctgaata

SEQ ID NO: 1914181 - DNA, 15 bp, Homo sapiens
ataagccctgaataa

SEQ ID NO: 1914182 - DNA, 15 bp, Homo sapiens
taagccctgaataaa

SEQ ID NO: 1914183 - DNA, 15 bp, Homo sapiens
aagccctgaataaac

SEQ ID NO: 1914184 - DNA, 15 bp, Homo sapiens
agccctgaataaaca

SEQ ID NO: 1914185 - DNA, 15 bp, Homo sapiens
gccctgaataaacac

SEQ ID NO: 1914186 - DNA, 15 bp, Homo sapiens
ccctgaataaacaca

SEQ ID NO: 1914187 - DNA, 15 bp, Homo sapiens
cctgaataaacacac

SEQ ID NO: 1914188 - DNA, 15 bp, Homo sapiens
ctgaataaacacaca

SEQ ID NO: 1914189 - DNA, 15 bp, Homo sapiens
tgaataaacacacaa

SEQ ID NO: 1914190 - DNA, 15 bp, Homo sapiens
gaataaacacacaac

SEQ ID NO: 1914191 - DNA, 15 bp, Homo sapiens
aataaacacacaact

SEQ ID NO: 1914192 - DNA, 15 bp, Homo sapiens
ataaacacacaactg

SEQ ID NO: 1914193 - DNA, 15 bp, Homo sapiens
taaacacacaactgc

SEQ ID NO: 1914194 - DNA, 15 bp, Homo sapiens
aaacacacaactgcg

SEQ ID NO: 1914195 - DNA, 15 bp, Homo sapiens
aacacacaactgcgc

SEQ ID NO: 1914196 - DNA, 15 bp, Homo sapiens
acacacaactgcgca

SEQ ID NO: 1914197 - DNA, 15 bp, Homo sapiens
cacacaactgcgcaa

SEQ ID NO: 1914198 - DNA, 15 bp, Homo sapiens
acacaactgcgcaaa

SEQ ID NO: 1914199 - DNA, 15 bp, Homo sapiens
cacaactgcgcaaac

SEQ ID NO: 1914200 - DNA, 15 bp, Homo sapiens
acaactgcgcaaaca

SEQ ID NO: 1914201 - DNA, 15 bp, Homo sapiens
caactgcgcaaacaa

SEQ ID NO: 1914202 - DNA, 15 bp, Homo sapiens
aactgcgcaaacaac

SEQ ID NO: 1914203 - DNA, 15 bp, Homo sapiens
actgcgcaaacaaca

SEQ ID NO: 1914204 - DNA, 15 bp, Homo sapiens
ctgcgcaaacaacag

SEQ ID NO: 1914205 - DNA, 15 bp, Homo sapiens
tgcgcaaacaacagg

SEQ ID NO: 1914206 - DNA, 15 bp, Homo sapiens
gcgcaaacaacaggc

SEQ ID NO: 1914207 - DNA, 15 bp, Homo sapiens
cgcaaacaacaggca

SEQ ID NO: 1914208 - DNA, 15 bp, Homo sapiens
gcaaacaacaggcat

SEQ ID NO: 1914209 - DNA, 15 bp, Homo sapiens
caaacaacaggcata

SEQ ID NO: 1914210 - DNA, 15 bp, Homo sapiens
aaacaacaggcatat

SEQ ID NO: 1914211 - DNA, 15 bp, Homo sapiens
aacaacaggcatatc

SEQ ID NO: 1914212 - DNA, 15 bp, Homo sapiens
acaacaggcatatct

SEQ ID NO: 1914213 - DNA, 15 bp, Homo sapiens
caacaggcatatctt

SEQ ID NO: 1914214 - DNA, 15 bp, Homo sapiens
aacaggcatatcttc

SEQ ID NO: 1914215 - DNA, 15 bp, Homo sapiens
acaggcatatcttcc

SEQ ID NO: 1914216 - DNA, 15 bp, Homo sapiens
caggcatatcttccc

SEQ ID NO: 1914217 - DNA, 15 bp, Homo sapiens
aggcatatcttccct

SEQ ID NO: 1914218 - DNA, 15 bp, Homo sapiens
ggcatatcttccctc

SEQ ID NO: 1914219 - DNA, 15 bp, Homo sapiens
gcatatcttccctcc

SEQ ID NO: 1914220 - DNA, 15 bp, Homo sapiens
catatcttccctccc

SEQ ID NO: 1914221 - DNA, 15 bp, Homo sapiens
atatcttccctcccc

SEQ ID NO: 1914222 - DNA, 15 bp, Homo sapiens
tatcttccctccccc

SEQ ID NO: 1914223 - DNA, 15 bp, Homo sapiens
atcttccctcccccg

SEQ ID NO: 1914224 - DNA, 15 bp, Homo sapiens
tcttccctcccccgc

SEQ ID NO: 1914225 - DNA, 15 bp, Homo sapiens
cttccctcccccgca

SEQ ID NO: 1914226 - DNA, 15 bp, Homo sapiens
ttccctcccccgcaa

SEQ ID NO: 1914227 - DNA, 15 bp, Homo sapiens
tccctcccccgcaaa

SEQ ID NO: 1914228 - DNA, 15 bp, Homo sapiens
ccctcccccgcaaag

SEQ ID NO: 1914229 - DNA, 15 bp, Homo sapiens
cctcccccgcaaagt

SEQ ID NO: 1914230 - DNA, 15 bp, Homo sapiens
ctcccccgcaaagtt

SEQ ID NO: 1914231 - DNA, 15 bp, Homo sapiens
tcccccgcaaagttc

SEQ ID NO: 1914232 - DNA, 15 bp, Homo sapiens
cccccgcaaagttcc

SEQ ID NO: 1914233 - DNA, 15 bp, Homo sapiens
ccccgcaaagttcca

SEQ ID NO: 1914234 - DNA, 15 bp, Homo sapiens
cccgcaaagttccac

SEQ ID NO: 1914235 - DNA, 15 bp, Homo sapiens
ccgcaaagttccact

SEQ ID NO: 1914236 - DNA, 15 bp, Homo sapiens
cgcaaagttccactt

SEQ ID NO: 1914237 - DNA, 15 bp, Homo sapiens
gcaaagttccacttt

SEQ ID NO: 1914238 - DNA, 15 bp, Homo sapiens
caaagttccacttta

SEQ ID NO: 1914239 - DNA, 15 bp, Homo sapiens
aaagttccactttag

SEQ ID NO: 1914240 - DNA, 15 bp, Homo sapiens
aagttccactttaga

SEQ ID NO: 1914241 - DNA, 15 bp, Homo sapiens
agttccactttagag

SEQ ID NO: 1914242 - DNA, 15 bp, Homo sapiens
gttccactttagagt

SEQ ID NO: 1914243 - DNA, 15 bp, Homo sapiens
ttccactttagagtc

SEQ ID NO: 1914244 - DNA, 15 bp, Homo sapiens
tccactttagagtca

SEQ ID NO: 1914245 - DNA, 15 bp, Homo sapiens
ggacataatgaatga

SEQ ID NO: 1914246 - DNA, 15 bp, Homo sapiens
gacataatgaatgaa

SEQ ID NO: 1914247 - DNA, 15 bp, Homo sapiens
acataatgaatgaaa

SEQ ID NO: 1914248 - DNA, 15 bp, Homo sapiens
cataatgaatgaaaa

SEQ ID NO: 1914249 - DNA, 15 bp, Homo sapiens
ataatgaatgaaaaa

SEQ ID NO: 1914250 - DNA, 15 bp, Homo sapiens
taatgaatgaaaaag

SEQ ID NO: 1914251 - DNA, 15 bp, Homo sapiens
aatgaatgaaaaagc

SEQ ID NO: 1914252 - DNA, 15 bp, Homo sapiens
atgaatgaaaaagca

SEQ ID NO: 1914253 - DNA, 15 bp, Homo sapiens
tgaatgaaaaagcac

SEQ ID NO: 1914254 - DNA, 15 bp, Homo sapiens
gaatgaaaaagcaca

SEQ ID NO: 1914255 - DNA, 15 bp, Homo sapiens
aatgaaaaagcacac

SEQ ID NO: 1914256 - DNA, 15 bp, Homo sapiens
atgaaaaagcacaca

SEQ ID NO: 1914257 - DNA, 15 bp, Homo sapiens
tgaaaaagcacacac

SEQ ID NO: 1914258 - DNA, 15 bp, Homo sapiens
gaaaaagcacacacc

SEQ ID NO: 1914259 - DNA, 15 bp, Homo sapiens
aaaaagcacacacca

SEQ ID NO: 1914260 - DNA, 15 bp, Homo sapiens
aaaagcacacaccaa

SEQ ID NO: 1914261 - DNA, 15 bp, Homo sapiens
aaagcacacaccaaa

SEQ ID NO: 1914262 - DNA, 15 bp, Homo sapiens
aagcacacaccaaag

SEQ ID NO: 1914263 - DNA, 15 bp, Homo sapiens
agcacacaccaaagc

SEQ ID NO: 1914264 - DNA, 15 bp, Homo sapiens
gcacacaccaaagcc

SEQ ID NO: 1914265 - DNA, 15 bp, Homo sapiens
cacacaccaaagcct

SEQ ID NO: 1914266 - DNA, 15 bp, Homo sapiens
acacaccaaagcctg

SEQ ID NO: 1914267 - DNA, 15 bp, Homo sapiens
cacaccaaagcctgc

SEQ ID NO: 1914268 - DNA, 15 bp, Homo sapiens
acaccaaagcctgct

SEQ ID NO: 1914269 - DNA, 15 bp, Homo sapiens
caccaaagcctgctt

SEQ ID NO: 1914270 - DNA, 15 bp, Homo sapiens
accaaagcctgcttg

SEQ ID NO: 1914271 - DNA, 15 bp, Homo sapiens
ccaaagcctgcttga

SEQ ID NO: 1914272 - DNA, 15 bp, Homo sapiens
caaagcctgcttgag

SEQ ID NO: 1914273 - DNA, 15 bp, Homo sapiens
aaagcctgcttgagt

SEQ ID NO: 1914274 - DNA, 15 bp, Homo sapiens
aagcctgcttgagtg

SEQ ID NO: 1914275 - DNA, 15 bp, Homo sapiens
agcctgcttgagtgt

SEQ ID NO: 1914276 - DNA, 15 bp, Homo sapiens
gcctgcttgagtgtg

SEQ ID NO: 1914277 - DNA, 15 bp, Homo sapiens
cctgcttgagtgtgg

SEQ ID NO: 1914278 - DNA, 15 bp, Homo sapiens
ctgcttgagtgtgga

SEQ ID NO: 1914279 - DNA, 15 bp, Homo sapiens
tgcttgagtgtggag

SEQ ID NO: 1914280 - DNA, 15 bp, Homo sapiens
gcttgagtgtggagg

SEQ ID NO: 1914281 - DNA, 15 bp, Homo sapiens
cttgagtgtggaggg

SEQ ID NO: 1914282 - DNA, 15 bp, Homo sapiens
ttgagtgtggaggga

SEQ ID NO: 1914283 - DNA, 15 bp, Homo sapiens
tgagtgtggagggag

SEQ ID NO: 1914284 - DNA, 15 bp, Homo sapiens
gagtgtggagggagg

SEQ ID NO: 1914285 - DNA, 15 bp, Homo sapiens
agtgtggagggagga

SEQ ID NO: 1914286 - DNA, 15 bp, Homo sapiens
gtgtggagggaggaa

SEQ ID NO: 1914287 - DNA, 15 bp, Homo sapiens
tgtggagggaggaag

SEQ ID NO: 1914288 - DNA, 15 bp, Homo sapiens
gtggagggaggaagg

SEQ ID NO: 1914289 - DNA, 15 bp, Homo sapiens
tggagggaggaagga

SEQ ID NO: 1914290 - DNA, 15 bp, Homo sapiens
ggagggaggaaggag

SEQ ID NO: 1914291 - DNA, 15 bp, Homo sapiens
gagggaggaaggagg

SEQ ID NO: 1914292 - DNA, 15 bp, Homo sapiens
agggaggaaggaggg

SEQ ID NO: 1914293 - DNA, 15 bp, Homo sapiens
gggaggaaggagggt

SEQ ID NO: 1914294 - DNA, 15 bp, Homo sapiens
ggaggaaggagggtg

SEQ ID NO: 1914295 - DNA, 15 bp, Homo sapiens
gaggaaggagggtga

SEQ ID NO: 1914296 - DNA, 15 bp, Homo sapiens
aggaaggagggtgag

SEQ ID NO: 1914297 - DNA, 15 bp, Homo sapiens
ggaaggagggtgaga

SEQ ID NO: 1914298 - DNA, 15 bp, Homo sapiens
gaaggagggtgagaa

SEQ ID NO: 1914299 - DNA, 15 bp, Homo sapiens
aaggagggtgagaat

SEQ ID NO: 1914300 - DNA, 15 bp, Homo sapiens
aggagggtgagaatt

SEQ ID NO: 1914301 - DNA, 15 bp, Homo sapiens
ggagggtgagaattt

SEQ ID NO: 1914302 - DNA, 15 bp, Homo sapiens
gagggtgagaattta

SEQ ID NO: 1914303 - DNA, 15 bp, Homo sapiens
agggtgagaatttaa

SEQ ID NO: 1914304 - DNA, 15 bp, Homo sapiens
gggtgagaatttaaa

SEQ ID NO: 1914305 - DNA, 15 bp, Homo sapiens
ggtgagaatttaaaa

SEQ ID NO: 1914306 - DNA, 15 bp, Homo sapiens
gtgagaatttaaaac

SEQ ID NO: 1914307 - DNA, 15 bp, Homo sapiens
tgagaatttaaaact

SEQ ID NO: 1914308 - DNA, 15 bp, Homo sapiens
gagaatttaaaacta

SEQ ID NO: 1914309 - DNA, 15 bp, Homo sapiens
agaatttaaaactac

SEQ ID NO: 1914310 - DNA, 15 bp, Homo sapiens
gaatttaaaactaca

SEQ ID NO: 1914311 - DNA, 15 bp, Homo sapiens
aatttaaaactacat

SEQ ID NO: 1914312 - DNA, 15 bp, Homo sapiens
atttaaaactacata

SEQ ID NO: 1914313 - DNA, 15 bp, Homo sapiens
tttaaaactacatag

SEQ ID NO: 1914314 - DNA, 15 bp, Homo sapiens
ttaaaactacatagg

SEQ ID NO: 1914315 - DNA, 15 bp, Homo sapiens
taaaactacataggg

SEQ ID NO: 1914316 - DNA, 15 bp, Homo sapiens
aaaactacatagggt

SEQ ID NO: 1914317 - DNA, 15 bp, Homo sapiens
aaactacatagggta

SEQ ID NO: 1914318 - DNA, 15 bp, Homo sapiens
aactacatagggtac

SEQ ID NO: 1914319 - DNA, 15 bp, Homo sapiens
actacatagggtact

SEQ ID NO: 1914320 - DNA, 15 bp, Homo sapiens
ctacatagggtacta

SEQ ID NO: 1914321 - DNA, 15 bp, Homo sapiens
tacatagggtactat

SEQ ID NO: 1914322 - DNA, 15 bp, Homo sapiens
acatagggtactatg

SEQ ID NO: 1914323 - DNA, 15 bp, Homo sapiens
catagggtactatgc

SEQ ID NO: 1914324 - DNA, 15 bp, Homo sapiens
atagggtactatgct

SEQ ID NO: 1914325 - DNA, 15 bp, Homo sapiens
tagggtactatgctt

SEQ ID NO: 1914326 - DNA, 15 bp, Homo sapiens
agggtactatgctta

SEQ ID NO: 1914327 - DNA, 15 bp, Homo sapiens
gggtactatgcttat

SEQ ID NO: 1914328 - DNA, 15 bp, Homo sapiens
ggtactatgcttatt

SEQ ID NO: 1914329 - DNA, 15 bp, Homo sapiens
gtactatgcttatta

SEQ ID NO: 1914330 - DNA, 15 bp, Homo sapiens
tactatgcttattac

SEQ ID NO: 1914331 - DNA, 15 bp, Homo sapiens
actatgcttattacc

SEQ ID NO: 1914332 - DNA, 15 bp, Homo sapiens
ctatgcttattacct

SEQ ID NO: 1914333 - DNA, 15 bp, Homo sapiens
tatgcttattacctg

SEQ ID NO: 1914334 - DNA, 15 bp, Homo sapiens
atgcttattacctgg

SEQ ID NO: 1914335 - DNA, 15 bp, Homo sapiens
tgcttattacctggg

SEQ ID NO: 1914336 - DNA, 15 bp, Homo sapiens
gcttattacctgggt

SEQ ID NO: 1914337 - DNA, 15 bp, Homo sapiens
cttattacctgggtg

SEQ ID NO: 1914338 - DNA, 15 bp, Homo sapiens
ttattacctgggtgg

SEQ ID NO: 1914339 - DNA, 15 bp, Homo sapiens
tattacctgggtggt

SEQ ID NO: 1914340 - DNA, 15 bp, Homo sapiens
attacctgggtggtg

SEQ ID NO: 1914341 - DNA, 15 bp, Homo sapiens
ttacctgggtggtga

SEQ ID NO: 1914342 - DNA, 15 bp, Homo sapiens
tacctgggtggtgaa

SEQ ID NO: 1914343 - DNA, 15 bp, Homo sapiens
acctgggtggtgaaa

SEQ ID NO: 1914344 - DNA, 15 bp, Homo sapiens
cctgggtggtgaaat

SEQ ID NO: 1914345 - DNA, 15 bp, Homo sapiens
ctgggtggtgaaata

SEQ ID NO: 1914346 - DNA, 15 bp, Homo sapiens
tgggtggtgaaataa

SEQ ID NO: 1914347 - DNA, 15 bp, Homo sapiens
gggtggtgaaataaa

SEQ ID NO: 1914348 - DNA, 15 bp, Homo sapiens
ggtggtgaaataaac

SEQ ID NO: 1914349 - DNA, 15 bp, Homo sapiens
gtggtgaaataaact

SEQ ID NO: 1914350 - DNA, 15 bp, Homo sapiens
tggtgaaataaactg

SEQ ID NO: 1914351 - DNA, 15 bp, Homo sapiens
ggtgaaataaactgt

SEQ ID NO: 1914352 - DNA, 15 bp, Homo sapiens
gtgaaataaactgta

SEQ ID NO: 1914353 - DNA, 15 bp, Homo sapiens
tgaaataaactgtac

SEQ ID NO: 1914354 - DNA, 15 bp, Homo sapiens
gaaataaactgtaca

SEQ ID NO: 1914355 - DNA, 15 bp, Homo sapiens
aaataaactgtacac

SEQ ID NO: 1914356 - DNA, 15 bp, Homo sapiens
aataaactgtacacc

SEQ ID NO: 1914357 - DNA, 15 bp, Homo sapiens
ataaactgtacacca

SEQ ID NO: 1914358 - DNA, 15 bp, Homo sapiens
taaactgtacaccac

SEQ ID NO: 1914359 - DNA, 15 bp, Homo sapiens
aaactgtacaccacg

SEQ ID NO: 1914360 - DNA, 15 bp, Homo sapiens
aactgtacaccacgc

SEQ ID NO: 1914361 - DNA, 15 bp, Homo sapiens
actgtacaccacgcc

SEQ ID NO: 1914362 - DNA, 15 bp, Homo sapiens
ctgtacaccacgccc

SEQ ID NO: 1914363 - DNA, 15 bp, Homo sapiens
tgtacaccacgcccc

SEQ ID NO: 1914364 - DNA, 15 bp, Homo sapiens
gtacaccacgcccct

SEQ ID NO: 1914365 - DNA, 15 bp, Homo sapiens
tacaccacgcccctg

SEQ ID NO: 1914366 - DNA, 15 bp, Homo sapiens
acaccacgcccctgt

SEQ ID NO: 1914367 - DNA, 15 bp, Homo sapiens
caccacgcccctgtg

SEQ ID NO: 1914368 - DNA, 15 bp, Homo sapiens
accacgcccctgtga

SEQ ID NO: 1914369 - DNA, 15 bp, Homo sapiens
ccacgcccctgtgac

SEQ ID NO: 1914370 - DNA, 15 bp, Homo sapiens
cacgcccctgtgaca

SEQ ID NO: 1914371 - DNA, 15 bp, Homo sapiens
acgcccctgtgacat

SEQ ID NO: 1914372 - DNA, 15 bp, Homo sapiens
cgcccctgtgacatg

SEQ ID NO: 1914373 - DNA, 15 bp, Homo sapiens
gcccctgtgacatgc

SEQ ID NO: 1914374 - DNA, 15 bp, Homo sapiens
cccctgtgacatgca

SEQ ID NO: 1914375 - DNA, 15 bp, Homo sapiens
ccctgtgacatgcaa

SEQ ID NO: 1914376 - DNA, 15 bp, Homo sapiens
cctgtgacatgcaat

SEQ ID NO: 1914377 - DNA, 15 bp, Homo sapiens
ctgtgacatgcaatt

SEQ ID NO: 1914378 - DNA, 15 bp, Homo sapiens
tgtgacatgcaattt

SEQ ID NO: 1914379 - DNA, 15 bp, Homo sapiens
gtgacatgcaattta

SEQ ID NO: 1914380 - DNA, 15 bp, Homo sapiens
tgacatgcaatttac

SEQ ID NO: 1914381 - DNA, 15 bp, Homo sapiens
gacatgcaatttacc

SEQ ID NO: 1914382 - DNA, 15 bp, Homo sapiens
acatgcaatttacct

SEQ ID NO: 1914383 - DNA, 15 bp, Homo sapiens
catgcaatttaccta

SEQ ID NO: 1914384 - DNA, 15 bp, Homo sapiens
atgcaatttacctat

SEQ ID NO: 1914385 - DNA, 15 bp, Homo sapiens
tgcaatttacctatg

SEQ ID NO: 1914386 - DNA, 15 bp, Homo sapiens
gcaatttacctatgt

SEQ ID NO: 1914387 - DNA, 15 bp, Homo sapiens
caatttacctatgta

SEQ ID NO: 1914388 - DNA, 15 bp, Homo sapiens
aatttacctatgtaa

SEQ ID NO: 1914389 - DNA, 15 bp, Homo sapiens
atttacctatgtaac

SEQ ID NO: 1914390 - DNA, 15 bp, Homo sapiens
tttacctatgtaaca

SEQ ID NO: 1914391 - DNA, 15 bp, Homo sapiens
ttacctatgtaacaa

SEQ ID NO: 1914392 - DNA, 15 bp, Homo sapiens
cctatgtaacaaacc

SEQ ID NO: 1914393 - DNA, 15 bp, Homo sapiens
ctatgtaacaaacct

SEQ ID NO: 1914394 - DNA, 15 bp, Homo sapiens
taacaaacctgcacc

SEQ ID NO: 1914395 - DNA, 15 bp, Homo sapiens
aacaaacctgcacct

SEQ ID NO: 1914396 - DNA, 15 bp, Homo sapiens
acaaacctgcaccta

SEQ ID NO: 1914397 - DNA, 15 bp, Homo sapiens
caaacctgcacctaa

SEQ ID NO: 1914398 - DNA, 15 bp, Homo sapiens
aaacctgcacctaaa

SEQ ID NO: 1914399 - DNA, 15 bp, Homo sapiens
aacctgcacctaaac

SEQ ID NO: 1914400 - DNA, 15 bp, Homo sapiens
acctgcacctaaacc

SEQ ID NO: 1914401 - DNA, 15 bp, Homo sapiens
cctgcacctaaacct

SEQ ID NO: 1914402 - DNA, 15 bp, Homo sapiens
ctgcacctaaaccta

SEQ ID NO: 1914403 - DNA, 15 bp, Homo sapiens
tgcacctaaacctaa

SEQ ID NO: 1914404 - DNA, 15 bp, Homo sapiens
gcacctaaacctaaa

SEQ ID NO: 1914405 - DNA, 15 bp, Homo sapiens
cacctaaacctaaaa

SEQ ID NO: 1914406 - DNA, 15 bp, Homo sapiens
acctaaacctaaaat

SEQ ID NO: 1914407 - DNA, 15 bp, Homo sapiens
cctaaacctaaaata

SEQ ID NO: 1914408 - DNA, 15 bp, Homo sapiens
ctaaacctaaaataa

SEQ ID NO: 1914409 - DNA, 15 bp, Homo sapiens
taaacctaaaataaa

SEQ ID NO: 1914410 - DNA, 15 bp, Homo sapiens
aaacctaaaataaaa

SEQ ID NO: 1914411 - DNA, 15 bp, Homo sapiens
aacctaaaataaaac

SEQ ID NO: 1914412 - DNA, 15 bp, Homo sapiens
acctaaaataaaact

SEQ ID NO: 1914413 - DNA, 15 bp, Homo sapiens
cctaaaataaaactt

SEQ ID NO: 1914414 - DNA, 15 bp, Homo sapiens
ctaaaataaaacttc

SEQ ID NO: 1914415 - DNA, 15 bp, Homo sapiens
taaaataaaacttca

SEQ ID NO: 1914416 - DNA, 15 bp, Homo sapiens
aaaataaaacttcac

SEQ ID NO: 1914417 - DNA, 15 bp, Homo sapiens
aaataaaacttcaca

SEQ ID NO: 1914418 - DNA, 15 bp, Homo sapiens
aataaaacttcacaa

SEQ ID NO: 1914419 - DNA, 15 bp, Homo sapiens
ataaaacttcacaac

SEQ ID NO: 1914420 - DNA, 15 bp, Homo sapiens
taaaacttcacaact

SEQ ID NO: 1914421 - DNA, 15 bp, Homo sapiens
aaaacttcacaactt

SEQ ID NO: 1914422 - DNA, 15 bp, Homo sapiens
aaacttcacaacttg

SEQ ID NO: 1914423 - DNA, 15 bp, Homo sapiens
aacttcacaacttgc

SEQ ID NO: 1914424 - DNA, 15 bp, Homo sapiens
acttcacaacttgca

SEQ ID NO: 1914425 - DNA, 15 bp, Homo sapiens
cttcacaacttgcaa

SEQ ID NO: 1914426 - DNA, 15 bp, Homo sapiens
ttcacaacttgcaat

SEQ ID NO: 1914427 - DNA, 15 bp, Homo sapiens
tcacaacttgcaatc

SEQ ID NO: 1914428 - DNA, 15 bp, Homo sapiens
cacaacttgcaatct

SEQ ID NO: 1914429 - DNA, 15 bp, Homo sapiens
acaacttgcaatctt

SEQ ID NO: 1914430 - DNA, 15 bp, Homo sapiens
caacttgcaatcttg

SEQ ID NO: 1914431 - DNA, 15 bp, Homo sapiens
aacttgcaatcttga

SEQ ID NO: 1914432 - DNA, 15 bp, Homo sapiens
acttgcaatcttgac

SEQ ID NO: 1914433 - DNA, 15 bp, Homo sapiens
cttgcaatcttgact

SEQ ID NO: 1914434 - DNA, 15 bp, Homo sapiens
ttgcaatcttgacta

SEQ ID NO: 1914435 - DNA, 15 bp, Homo sapiens
tgcaatcttgactaa

SEQ ID NO: 1914436 - DNA, 15 bp, Homo sapiens
gcaatcttgactaat

SEQ ID NO: 1914437 - DNA, 15 bp, Homo sapiens
caatcttgactaatc

SEQ ID NO: 1914438 - DNA, 15 bp, Homo sapiens
aatcttgactaatca

SEQ ID NO: 1914439 - DNA, 15 bp, Homo sapiens
atcttgactaatcaa

SEQ ID NO: 1914440 - DNA, 15 bp, Homo sapiens
tcttgactaatcaaa

SEQ ID NO: 1914441 - DNA, 15 bp, Homo sapiens
cttgactaatcaaag

SEQ ID NO: 1914442 - DNA, 15 bp, Homo sapiens
ttgactaatcaaaga

SEQ ID NO: 1914443 - DNA, 15 bp, Homo sapiens
tgactaatcaaagac

SEQ ID NO: 1914444 - DNA, 15 bp, Homo sapiens
gactaatcaaagaca

SEQ ID NO: 1914445 - DNA, 15 bp, Homo sapiens
actaatcaaagacac

SEQ ID NO: 1914446 - DNA, 15 bp, Homo sapiens
ctaatcaaagacact

SEQ ID NO: 1914447 - DNA, 15 bp, Homo sapiens
taatcaaagacactg

SEQ ID NO: 1914448 - DNA, 15 bp, Homo sapiens
aatcaaagacactga

SEQ ID NO: 1914449 - DNA, 15 bp, Homo sapiens
atcaaagacactgaa

SEQ ID NO: 1914450 - DNA, 15 bp, Homo sapiens
tcaaagacactgaaa

SEQ ID NO: 1914451 - DNA, 15 bp, Homo sapiens
caaagacactgaaac

SEQ ID NO: 1914452 - DNA, 15 bp, Homo sapiens
aaagacactgaaaca

SEQ ID NO: 1914453 - DNA, 15 bp, Homo sapiens
aagacactgaaacat

SEQ ID NO: 1914454 - DNA, 15 bp, Homo sapiens
agacactgaaacatt

SEQ ID NO: 1914455 - DNA, 15 bp, Homo sapiens
gacactgaaacattt

SEQ ID NO: 1914456 - DNA, 15 bp, Homo sapiens
acactgaaacatttt

SEQ ID NO: 1914457 - DNA, 15 bp, Homo sapiens
cactgaaacatttta

SEQ ID NO: 1914458 - DNA, 15 bp, Homo sapiens
actgaaacattttaa

SEQ ID NO: 1914459 - DNA, 15 bp, Homo sapiens
ctgaaacattttaac

SEQ ID NO: 1914460 - DNA, 15 bp, Homo sapiens
tgaaacattttaact

SEQ ID NO: 1914461 - DNA, 15 bp, Homo sapiens
gaaacattttaactc

SEQ ID NO: 1914462 - DNA, 15 bp, Homo sapiens
aaacattttaactcc

SEQ ID NO: 1914463 - DNA, 15 bp, Homo sapiens
aacattttaactcca

SEQ ID NO: 1914464 - DNA, 15 bp, Homo sapiens
acattttaactccac

SEQ ID NO: 1914465 - DNA, 15 bp, Homo sapiens
cattttaactccact

SEQ ID NO: 1914466 - DNA, 15 bp, Homo sapiens
attttaactccactt

SEQ ID NO: 1914467 - DNA, 15 bp, Homo sapiens
ttttaactccacttt

SEQ ID NO: 1914468 - DNA, 15 bp, Homo sapiens
tttaactccactttt

SEQ ID NO: 1914469 - DNA, 15 bp, Homo sapiens
ttaactccacttttt

SEQ ID NO: 1914470 - DNA, 15 bp, Homo sapiens
taactccactttttt

SEQ ID NO: 1914471 - DNA, 15 bp, Homo sapiens
aactccactttttta

SEQ ID NO: 1914472 - DNA, 15 bp, Homo sapiens
actccacttttttat

SEQ ID NO: 1914473 - DNA, 15 bp, Homo sapiens
ctccacttttttatt

SEQ ID NO: 1914474 - DNA, 15 bp, Homo sapiens
tccacttttttattc

SEQ ID NO: 1914475 - DNA, 15 bp, Homo sapiens
ccacttttttattct

SEQ ID NO: 1914476 - DNA, 15 bp, Homo sapiens
cacttttttattctt

SEQ ID NO: 1914477 - DNA, 15 bp, Homo sapiens
acttttttattcttt

SEQ ID NO: 1914478 - DNA, 15 bp, Homo sapiens
cttttttattctttt

SEQ ID NO: 1914479 - DNA, 15 bp, Homo sapiens
ttttttattcttttc

SEQ ID NO: 1914480 - DNA, 15 bp, Homo sapiens
tttttattcttttcc

SEQ ID NO: 1914481 - DNA, 15 bp, Homo sapiens
ttttattcttttccc

SEQ ID NO: 1914482 - DNA, 15 bp, Homo sapiens
tttattcttttccca

SEQ ID NO: 1914483 - DNA, 15 bp, Homo sapiens
ttattcttttcccaa

SEQ ID NO: 1914484 - DNA, 15 bp, Homo sapiens
tattcttttcccaac

SEQ ID NO: 1914485 - DNA, 15 bp, Homo sapiens
attcttttcccaact

SEQ ID NO: 1914486 - DNA, 15 bp, Homo sapiens
ttcttttcccaactt

SEQ ID NO: 1914487 - DNA, 15 bp, Homo sapiens
tcttttcccaactta

SEQ ID NO: 1914488 - DNA, 15 bp, Homo sapiens
cttttcccaacttat

SEQ ID NO: 1914489 - DNA, 15 bp, Homo sapiens
ttttcccaacttata

SEQ ID NO: 1914490 - DNA, 15 bp, Homo sapiens
tttcccaacttatat

SEQ ID NO: 1914491 - DNA, 15 bp, Homo sapiens
ttcccaacttatata

SEQ ID NO: 1914492 - DNA, 15 bp, Homo sapiens
tcccaacttatatat

SEQ ID NO: 1914493 - DNA, 15 bp, Homo sapiens
cccaacttatatatt

SEQ ID NO: 1914494 - DNA, 15 bp, Homo sapiens
ccaacttatatatta

SEQ ID NO: 1914495 - DNA, 15 bp, Homo sapiens
caacttatatattat

SEQ ID NO: 1914496 - DNA, 15 bp, Homo sapiens
aacttatatattatc

SEQ ID NO: 1914497 - DNA, 15 bp, Homo sapiens
acttatatattatca

SEQ ID NO: 1914498 - DNA, 15 bp, Homo sapiens
cttatatattatcat

SEQ ID NO: 1914499 - DNA, 15 bp, Homo sapiens
ttatatattatcatt

SEQ ID NO: 1914500 - DNA, 15 bp, Homo sapiens
tatatattatcattt

SEQ ID NO: 1914501 - DNA, 15 bp, Homo sapiens
atatattatcatttt

SEQ ID NO: 1914502 - DNA, 15 bp, Homo sapiens
tatattatcattttt

SEQ ID NO: 1914503 - DNA, 15 bp, Homo sapiens
atattatcattttta

SEQ ID NO: 1914504 - DNA, 15 bp, Homo sapiens
tattatcatttttat

SEQ ID NO: 1914505 - DNA, 15 bp, Homo sapiens
attatcatttttatg

SEQ ID NO: 1914506 - DNA, 15 bp, Homo sapiens
ttatcatttttatgt

SEQ ID NO: 1914507 - DNA, 15 bp, Homo sapiens
tatcatttttatgtt

SEQ ID NO: 1914508 - DNA, 15 bp, Homo sapiens
atcatttttatgtta

SEQ ID NO: 1914509 - DNA, 15 bp, Homo sapiens
tcatttttatgttat

SEQ ID NO: 1914510 - DNA, 15 bp, Homo sapiens
catttttatgttatg

SEQ ID NO: 1914511 - DNA, 15 bp, Homo sapiens
atttttatgttatgt

SEQ ID NO: 1914512 - DNA, 15 bp, Homo sapiens
tttttatgttatgta

SEQ ID NO: 1914513 - DNA, 15 bp, Homo sapiens
ttttatgttatgtat

SEQ ID NO: 1914514 - DNA, 15 bp, Homo sapiens
tttatgttatgtata

SEQ ID NO: 1914515 - DNA, 15 bp, Homo sapiens
ttatgttatgtatac

SEQ ID NO: 1914516 - DNA, 15 bp, Homo sapiens
tatgttatgtatact

SEQ ID NO: 1914517 - DNA, 15 bp, Homo sapiens
atgttatgtatactt

SEQ ID NO: 1914518 - DNA, 15 bp, Homo sapiens
tgttatgtatacttg

SEQ ID NO: 1914519 - DNA, 15 bp, Homo sapiens
gttatgtatacttga

SEQ ID NO: 1914520 - DNA, 15 bp, Homo sapiens
ttatgtatacttgaa

SEQ ID NO: 1914521 - DNA, 15 bp, Homo sapiens
tatgtatacttgaag

SEQ ID NO: 1914522 - DNA, 15 bp, Homo sapiens
atgtatacttgaagc

SEQ ID NO: 1914523 - DNA, 15 bp, Homo sapiens
tgtatacttgaagct

SEQ ID NO: 1914524 - DNA, 15 bp, Homo sapiens
gtatacttgaagctc

SEQ ID NO: 1914525 - DNA, 15 bp, Homo sapiens
tatacttgaagctca

SEQ ID NO: 1914526 - DNA, 15 bp, Homo sapiens
atacttgaagctcat

SEQ ID NO: 1914527 - DNA, 15 bp, Homo sapiens
tacttgaagctcatg

SEQ ID NO: 1914528 - DNA, 15 bp, Homo sapiens
acttgaagctcatgt

SEQ ID NO: 1914529 - DNA, 15 bp, Homo sapiens
cttgaagctcatgta

SEQ ID NO: 1914530 - DNA, 15 bp, Homo sapiens
ttgaagctcatgtag

SEQ ID NO: 1914531 - DNA, 15 bp, Homo sapiens
tgaagctcatgtaga

SEQ ID NO: 1914532 - DNA, 15 bp, Homo sapiens
gaagctcatgtagac

SEQ ID NO: 1914533 - DNA, 15 bp, Homo sapiens
aagctcatgtagaca

SEQ ID NO: 1914534 - DNA, 15 bp, Homo sapiens
agctcatgtagacat

SEQ ID NO: 1914535 - DNA, 15 bp, Homo sapiens
gctcatgtagacatt

SEQ ID NO: 1914536 - DNA, 15 bp, Homo sapiens
ctcatgtagacatta

SEQ ID NO: 1914537 - DNA, 15 bp, Homo sapiens
tcatgtagacattac

SEQ ID NO: 1914538 - DNA, 15 bp, Homo sapiens
catgtagacattact

SEQ ID NO: 1914539 - DNA, 15 bp, Homo sapiens
atgtagacattacta

SEQ ID NO: 1914540 - DNA, 15 bp, Homo sapiens
tgtagacattactat

SEQ ID NO: 1914541 - DNA, 15 bp, Homo sapiens
gtagacattactatt

SEQ ID NO: 1914542 - DNA, 15 bp, Homo sapiens
tagacattactattg

SEQ ID NO: 1914543 - DNA, 15 bp, Homo sapiens
agacattactattgt

SEQ ID NO: 1914544 - DNA, 15 bp, Homo sapiens
gacattactattgtt

SEQ ID NO: 1914545 - DNA, 15 bp, Homo sapiens
acattactattgttg

SEQ ID NO: 1914546 - DNA, 15 bp, Homo sapiens
cattactattgttgt

SEQ ID NO: 1914547 - DNA, 15 bp, Homo sapiens
attactattgttgtt

SEQ ID NO: 1914548 - DNA, 15 bp, Homo sapiens
ttactattgttgttg

SEQ ID NO: 1914549 - DNA, 15 bp, Homo sapiens
tactattgttgttgt

SEQ ID NO: 1914550 - DNA, 15 bp, Homo sapiens
actattgttgttgta

SEQ ID NO: 1914551 - DNA, 15 bp, Homo sapiens
ctattgttgttgtat

SEQ ID NO: 1914552 - DNA, 15 bp, Homo sapiens
tattgttgttgtata

SEQ ID NO: 1914553 - DNA, 15 bp, Homo sapiens
attgttgttgtatat

SEQ ID NO: 1914554 - DNA, 15 bp, Homo sapiens
ttgttgttgtatata

SEQ ID NO: 1914555 - DNA, 15 bp, Homo sapiens
tgttgttgtatatag

SEQ ID NO: 1914556 - DNA, 15 bp, Homo sapiens
gttgttgtatatagt

SEQ ID NO: 1914557 - DNA, 15 bp, Homo sapiens
ttgttgtatatagtc

SEQ ID NO: 1914558 - DNA, 15 bp, Homo sapiens
tgttgtatatagtca

SEQ ID NO: 1914559 - DNA, 15 bp, Homo sapiens
gttgtatatagtcaa

SEQ ID NO: 1914560 - DNA, 15 bp, Homo sapiens
ttgtatatagtcaat

SEQ ID NO: 1914561 - DNA, 15 bp, Homo sapiens
tgtatatagtcaatg

SEQ ID NO: 1914562 - DNA, 15 bp, Homo sapiens
gtatatagtcaatgt

SEQ ID NO: 1914563 - DNA, 15 bp, Homo sapiens
tatatagtcaatgtt

SEQ ID NO: 1914564 - DNA, 15 bp, Homo sapiens
atatagtcaatgtta

SEQ ID NO: 1914565 - DNA, 15 bp, Homo sapiens
tatagtcaatgttaa

SEQ ID NO: 1914566 - DNA, 15 bp, Homo sapiens
atagtcaatgttaat

SEQ ID NO: 1914567 - DNA, 15 bp, Homo sapiens
tagtcaatgttaatt

SEQ ID NO: 1914568 - DNA, 15 bp, Homo sapiens
agtcaatgttaattt

SEQ ID NO: 1914569 - DNA, 15 bp, Homo sapiens
gtcaatgttaattta

SEQ ID NO: 1914570 - DNA, 15 bp, Homo sapiens
tcaatgttaatttac

SEQ ID NO: 1914571 - DNA, 15 bp, Homo sapiens
caatgttaatttaca

SEQ ID NO: 1914572 - DNA, 15 bp, Homo sapiens
aatgttaatttacat

SEQ ID NO: 1914573 - DNA, 15 bp, Homo sapiens
atgttaatttacatg

SEQ ID NO: 1914574 - DNA, 15 bp, Homo sapiens
tgttaatttacatgg

SEQ ID NO: 1914575 - DNA, 15 bp, Homo sapiens
gttaatttacatgga

SEQ ID NO: 1914576 - DNA, 15 bp, Homo sapiens
ttaatttacatggat

SEQ ID NO: 1914577 - DNA, 15 bp, Homo sapiens
taatttacatggatc

SEQ ID NO: 1914578 - DNA, 15 bp, Homo sapiens
aatttacatggatcc

SEQ ID NO: 1914579 - DNA, 15 bp, Homo sapiens
atttacatggatcca

SEQ ID NO: 1914580 - DNA, 15 bp, Homo sapiens
tttacatggatccac

SEQ ID NO: 1914581 - DNA, 15 bp, Homo sapiens
ttacatggatccaca

SEQ ID NO: 1914582 - DNA, 15 bp, Homo sapiens
tacatggatccacat

SEQ ID NO: 1914583 - DNA, 15 bp, Homo sapiens
acatggatccacatt

SEQ ID NO: 1914584 - DNA, 15 bp, Homo sapiens
catggatccacattt

SEQ ID NO: 1914585 - DNA, 15 bp, Homo sapiens
atggatccacatttt

SEQ ID NO: 1914586 - DNA, 15 bp, Homo sapiens
tggatccacattttt

SEQ ID NO: 1914587 - DNA, 15 bp, Homo sapiens
ggatccacatttttc

SEQ ID NO: 1914588 - DNA, 15 bp, Homo sapiens
gatccacatttttcc

SEQ ID NO: 1914589 - DNA, 15 bp, Homo sapiens
atccacatttttcca

SEQ ID NO: 1914590 - DNA, 15 bp, Homo sapiens
tccacatttttccat

SEQ ID NO: 1914591 - DNA, 15 bp, Homo sapiens
ccacatttttccatt

SEQ ID NO: 1914592 - DNA, 15 bp, Homo sapiens
cacatttttccattt

SEQ ID NO: 1914593 - DNA, 15 bp, Homo sapiens
acatttttccatttt

SEQ ID NO: 1914594 - DNA, 15 bp, Homo sapiens
catttttccattttt

SEQ ID NO: 1914595 - DNA, 15 bp, Homo sapiens
atttttccattttta

SEQ ID NO: 1914596 - DNA, 15 bp, Homo sapiens
tttttccatttttat

SEQ ID NO: 1914597 - DNA, 15 bp, Homo sapiens
ttttccatttttatt

SEQ ID NO: 1914598 - DNA, 15 bp, Homo sapiens
tttccatttttatta

SEQ ID NO: 1914599 - DNA, 15 bp, Homo sapiens
ttccatttttattat

SEQ ID NO: 1914600 - DNA, 15 bp, Homo sapiens
tccatttttattatt

SEQ ID NO: 1914601 - DNA, 15 bp, Homo sapiens
ccatttttattattc

SEQ ID NO: 1914602 - DNA, 15 bp, Homo sapiens
catttttattattcg

SEQ ID NO: 1914603 - DNA, 15 bp, Homo sapiens
atttttattattcgt

SEQ ID NO: 1914604 - DNA, 15 bp, Homo sapiens
tttttattattcgta

SEQ ID NO: 1914605 - DNA, 15 bp, Homo sapiens
ttttattattcgtat

SEQ ID NO: 1914606 - DNA, 15 bp, Homo sapiens
tttattattcgtatt

SEQ ID NO: 1914607 - DNA, 15 bp, Homo sapiens
ttattattcgtattc

SEQ ID NO: 1914608 - DNA, 15 bp, Homo sapiens
tattattcgtattcc

SEQ ID NO: 1914609 - DNA, 15 bp, Homo sapiens
attattcgtattcct

SEQ ID NO: 1914610 - DNA, 15 bp, Homo sapiens
ttattcgtattcctt

SEQ ID NO: 1914611 - DNA, 15 bp, Homo sapiens
tattcgtattccttt

SEQ ID NO: 1914612 - DNA, 15 bp, Homo sapiens
attcgtattccttta

SEQ ID NO: 1914613 - DNA, 15 bp, Homo sapiens
ttcgtattcctttat

SEQ ID NO: 1914614 - DNA, 15 bp, Homo sapiens
tcgtattcctttatc

SEQ ID NO: 1914615 - DNA, 15 bp, Homo sapiens
cgtattcctttatct

SEQ ID NO: 1914616 - DNA, 15 bp, Homo sapiens
gtattcctttatctc

SEQ ID NO: 1914617 - DNA, 15 bp, Homo sapiens
tattcctttatctct

SEQ ID NO: 1914618 - DNA, 15 bp, Homo sapiens
attcctttatctctg

SEQ ID NO: 1914619 - DNA, 15 bp, Homo sapiens
ttcctttatctctgt

SEQ ID NO: 1914620 - DNA, 15 bp, Homo sapiens
tcctttatctctgtt

SEQ ID NO: 1914621 - DNA, 15 bp, Homo sapiens
cctttatctctgttc

SEQ ID NO: 1914622 - DNA, 15 bp, Homo sapiens
ctttatctctgttct

SEQ ID NO: 1914623 - DNA, 15 bp, Homo sapiens
tttatctctgttctt

SEQ ID NO: 1914624 - DNA, 15 bp, Homo sapiens
ttatctctgttcttc

SEQ ID NO: 1914625 - DNA, 15 bp, Homo sapiens
tatctctgttcttct

SEQ ID NO: 1914626 - DNA, 15 bp, Homo sapiens
atctctgttcttcta

SEQ ID NO: 1914627 - DNA, 15 bp, Homo sapiens
tctctgttcttctat

SEQ ID NO: 1914628 - DNA, 15 bp, Homo sapiens
ctctgttcttctatc

SEQ ID NO: 1914629 - DNA, 15 bp, Homo sapiens
tctgttcttctatct

SEQ ID NO: 1914630 - DNA, 15 bp, Homo sapiens
ctgttcttctatcta

SEQ ID NO: 1914631 - DNA, 15 bp, Homo sapiens
tgttcttctatctag

SEQ ID NO: 1914632 - DNA, 15 bp, Homo sapiens
gttcttctatctagg

SEQ ID NO: 1914633 - DNA, 15 bp, Homo sapiens
ttcttctatctagga

SEQ ID NO: 1914634 - DNA, 15 bp, Homo sapiens
tcttctatctaggat

SEQ ID NO: 1914635 - DNA, 15 bp, Homo sapiens
cttctatctaggatc

SEQ ID NO: 1914636 - DNA, 15 bp, Homo sapiens
ttctatctaggatca

SEQ ID NO: 1914637 - DNA, 15 bp, Homo sapiens
tctatctaggatcat

SEQ ID NO: 1914638 - DNA, 15 bp, Homo sapiens
ctatctaggatcatc

SEQ ID NO: 1914639 - DNA, 15 bp, Homo sapiens
tatctaggatcatct

SEQ ID NO: 1914640 - DNA, 15 bp, Homo sapiens
atctaggatcatctt

SEQ ID NO: 1914641 - DNA, 15 bp, Homo sapiens
tctaggatcatcttt

SEQ ID NO: 1914642 - DNA, 15 bp, Homo sapiens
ctaggatcatcttta

SEQ ID NO: 1914643 - DNA, 15 bp, Homo sapiens
taggatcatctttac

SEQ ID NO: 1914644 - DNA, 15 bp, Homo sapiens
aggatcatctttact

SEQ ID NO: 1914645 - DNA, 15 bp, Homo sapiens
ggatcatctttacta

SEQ ID NO: 1914646 - DNA, 15 bp, Homo sapiens
gatcatctttactag

SEQ ID NO: 1914647 - DNA, 15 bp, Homo sapiens
atcatctttactagt

SEQ ID NO: 1914648 - DNA, 15 bp, Homo sapiens
tcatctttactagta

SEQ ID NO: 1914649 - DNA, 15 bp, Homo sapiens
catctttactagtat

SEQ ID NO: 1914650 - DNA, 15 bp, Homo sapiens
atctttactagtatt

SEQ ID NO: 1914651 - DNA, 15 bp, Homo sapiens
tctttactagtattt

SEQ ID NO: 1914652 - DNA, 15 bp, Homo sapiens
ctttactagtattta

SEQ ID NO: 1914653 - DNA, 15 bp, Homo sapiens
tttactagtatttat

SEQ ID NO: 1914654 - DNA, 15 bp, Homo sapiens
ttactagtatttatt

SEQ ID NO: 1914655 - DNA, 15 bp, Homo sapiens
tactagtatttattt

SEQ ID NO: 1914656 - DNA, 15 bp, Homo sapiens
actagtatttatttt

SEQ ID NO: 1914657 - DNA, 15 bp, Homo sapiens
ctagtatttatttta

SEQ ID NO: 1914658 - DNA, 15 bp, Homo sapiens
tagtatttattttag

SEQ ID NO: 1914659 - DNA, 15 bp, Homo sapiens
agtatttattttagt

SEQ ID NO: 1914660 - DNA, 15 bp, Homo sapiens
gtatttattttagtg

SEQ ID NO: 1914661 - DNA, 15 bp, Homo sapiens
tatttattttagtgc

SEQ ID NO: 1914662 - DNA, 15 bp, Homo sapiens
atttattttagtgca

SEQ ID NO: 1914663 - DNA, 15 bp, Homo sapiens
tttattttagtgcaa

SEQ ID NO: 1914664 - DNA, 15 bp, Homo sapiens
ttattttagtgcaat

SEQ ID NO: 1914665 - DNA, 15 bp, Homo sapiens
tattttagtgcaatg

SEQ ID NO: 1914666 - DNA, 15 bp, Homo sapiens
attttagtgcaatga

SEQ ID NO: 1914667 - DNA, 15 bp, Homo sapiens
ttttagtgcaatgac

SEQ ID NO: 1914668 - DNA, 15 bp, Homo sapiens
tttagtgcaatgaca

SEQ ID NO: 1914669 - DNA, 15 bp, Homo sapiens
ttagtgcaatgacat

SEQ ID NO: 1914670 - DNA, 15 bp, Homo sapiens
tagtgcaatgacatc

SEQ ID NO: 1914671 - DNA, 15 bp, Homo sapiens
agtgcaatgacatcc

SEQ ID NO: 1914672 - DNA, 15 bp, Homo sapiens
gtgcaatgacatccc

SEQ ID NO: 1914673 - DNA, 15 bp, Homo sapiens
tgcaatgacatccct

SEQ ID NO: 1914674 - DNA, 15 bp, Homo sapiens
gcaatgacatcccta

SEQ ID NO: 1914675 - DNA, 15 bp, Homo sapiens
caatgacatccctaa

SEQ ID NO: 1914676 - DNA, 15 bp, Homo sapiens
aatgacatccctaaa

SEQ ID NO: 1914677 - DNA, 15 bp, Homo sapiens
atgacatccctaaaa

SEQ ID NO: 1914678 - DNA, 15 bp, Homo sapiens
tgacatccctaaaaa

SEQ ID NO: 1914679 - DNA, 15 bp, Homo sapiens
gacatccctaaaaaa

SEQ ID NO: 1914680 - DNA, 15 bp, Homo sapiens
acatccctaaaaaat

SEQ ID NO: 1914681 - DNA, 15 bp, Homo sapiens
catccctaaaaaatg

SEQ ID NO: 1914682 - DNA, 15 bp, Homo sapiens
atccctaaaaaatgt

SEQ ID NO: 1914683 - DNA, 15 bp, Homo sapiens
tccctaaaaaatgtt

SEQ ID NO: 1914684 - DNA, 15 bp, Homo sapiens
ccctaaaaaatgttc

SEQ ID NO: 1914685 - DNA, 15 bp, Homo sapiens
cctaaaaaatgttct

SEQ ID NO: 1914686 - DNA, 15 bp, Homo sapiens
ctaaaaaatgttctc

SEQ ID NO: 1914687 - DNA, 15 bp, Homo sapiens
taaaaaatgttctca

SEQ ID NO: 1914688 - DNA, 15 bp, Homo sapiens
aaaaaatgttctcat

SEQ ID NO: 1914689 - DNA, 15 bp, Homo sapiens
aaaaatgttctcatt

SEQ ID NO: 1914690 - DNA, 15 bp, Homo sapiens
aaaatgttctcattt

SEQ ID NO: 1914691 - DNA, 15 bp, Homo sapiens
aaatgttctcatttt

SEQ ID NO: 1914692 - DNA, 15 bp, Homo sapiens
aatgttctcattttt

SEQ ID NO: 1914693 - DNA, 15 bp, Homo sapiens
atgttctcatttttc

SEQ ID NO: 1914694 - DNA, 15 bp, Homo sapiens
tgttctcatttttca

SEQ ID NO: 1914695 - DNA, 15 bp, Homo sapiens
gttctcatttttcat

SEQ ID NO: 1914696 - DNA, 15 bp, Homo sapiens
ttctcatttttcatt

SEQ ID NO: 1914697 - DNA, 15 bp, Homo sapiens
ctcatttttcatttg

SEQ ID NO: 1914698 - DNA, 15 bp, Homo sapiens
tcatttttcatttgt

SEQ ID NO: 1914699 - DNA, 15 bp, Homo sapiens
catttttcatttgtc

SEQ ID NO: 1914700 - DNA, 15 bp, Homo sapiens
atttttcatttgtct

SEQ ID NO: 1914701 - DNA, 15 bp, Homo sapiens
tttttcatttgtctg

SEQ ID NO: 1914702 - DNA, 15 bp, Homo sapiens
ttttcatttgtctga

SEQ ID NO: 1914703 - DNA, 15 bp, Homo sapiens
tttcatttgtctgaa

SEQ ID NO: 1914704 - DNA, 15 bp, Homo sapiens
ttcatttgtctgaaa

SEQ ID NO: 1914705 - DNA, 15 bp, Homo sapiens
tcatttgtctgaaag

SEQ ID NO: 1914706 - DNA, 15 bp, Homo sapiens
catttgtctgaaagc

SEQ ID NO: 1914707 - DNA, 15 bp, Homo sapiens
atttgtctgaaagca

SEQ ID NO: 1914708 - DNA, 15 bp, Homo sapiens
tttgtctgaaagcat

SEQ ID NO: 1914709 - DNA, 15 bp, Homo sapiens
ttgtctgaaagcatt

SEQ ID NO: 1914710 - DNA, 15 bp, Homo sapiens
tgtctgaaagcattt

SEQ ID NO: 1914711 - DNA, 15 bp, Homo sapiens
gtctgaaagcatttt

SEQ ID NO: 1914712 - DNA, 15 bp, Homo sapiens
tctgaaagcattttt

SEQ ID NO: 1914713 - DNA, 15 bp, Homo sapiens
ctgaaagcatttttc

SEQ ID NO: 1914714 - DNA, 15 bp, Homo sapiens
tgaaagcatttttca

SEQ ID NO: 1914715 - DNA, 15 bp, Homo sapiens
gaaagcatttttcat

SEQ ID NO: 1914716 - DNA, 15 bp, Homo sapiens
aaagcatttttcatt

SEQ ID NO: 1914717 - DNA, 15 bp, Homo sapiens
aagcatttttcattt

SEQ ID NO: 1914718 - DNA, 15 bp, Homo sapiens
agcatttttcatttt

SEQ ID NO: 1914719 - DNA, 15 bp, Homo sapiens
gcatttttcatttta

SEQ ID NO: 1914720 - DNA, 15 bp, Homo sapiens
catttttcattttat

SEQ ID NO: 1914721 - DNA, 15 bp, Homo sapiens
atttttcattttatt

SEQ ID NO: 1914722 - DNA, 15 bp, Homo sapiens
ttcattttatttttc

SEQ ID NO: 1914723 - DNA, 15 bp, Homo sapiens
tcattttatttttct

SEQ ID NO: 1914724 - DNA, 15 bp, Homo sapiens
cattttatttttctt

SEQ ID NO: 1914725 - DNA, 15 bp, Homo sapiens
attttatttttcttc

SEQ ID NO: 1914726 - DNA, 15 bp, Homo sapiens
ttttatttttcttct

SEQ ID NO: 1914727 - DNA, 15 bp, Homo sapiens
tttatttttcttctg

SEQ ID NO: 1914728 - DNA, 15 bp, Homo sapiens
ttatttttcttctgg

SEQ ID NO: 1914729 - DNA, 15 bp, Homo sapiens
tatttttcttctgga

SEQ ID NO: 1914730 - DNA, 15 bp, Homo sapiens
atttttcttctggaa

SEQ ID NO: 1914731 - DNA, 15 bp, Homo sapiens
tttttcttctggaag

SEQ ID NO: 1914732 - DNA, 15 bp, Homo sapiens
ttttcttctggaagg

SEQ ID NO: 1914733 - DNA, 15 bp, Homo sapiens
tttcttctggaagga

SEQ ID NO: 1914734 - DNA, 15 bp, Homo sapiens
ttcttctggaaggac

SEQ ID NO: 1914735 - DNA, 15 bp, Homo sapiens
tcttctggaaggaca

SEQ ID NO: 1914736 - DNA, 15 bp, Homo sapiens
cttctggaaggacac

SEQ ID NO: 1914737 - DNA, 15 bp, Homo sapiens
ttctggaaggacaca

SEQ ID NO: 1914738 - DNA, 15 bp, Homo sapiens
tctggaaggacacat

SEQ ID NO: 1914739 - DNA, 15 bp, Homo sapiens
ctggaaggacacatt

SEQ ID NO: 1914740 - DNA, 15 bp, Homo sapiens
tggaaggacacattc

SEQ ID NO: 1914741 - DNA, 15 bp, Homo sapiens
ggaaggacacattca

SEQ ID NO: 1914742 - DNA, 15 bp, Homo sapiens
gaaggacacattcac

SEQ ID NO: 1914743 - DNA, 15 bp, Homo sapiens
aaggacacattcact

SEQ ID NO: 1914744 - DNA, 15 bp, Homo sapiens
aggacacattcactg

SEQ ID NO: 1914745 - DNA, 15 bp, Homo sapiens
ggacacattcactga

SEQ ID NO: 1914746 - DNA, 15 bp, Homo sapiens
gacacattcactgag

SEQ ID NO: 1914747 - DNA, 15 bp, Homo sapiens
acacattcactgagt

SEQ ID NO: 1914748 - DNA, 15 bp, Homo sapiens
cacattcactgagta

SEQ ID NO: 1914749 - DNA, 15 bp, Homo sapiens
acattcactgagtat

SEQ ID NO: 1914750 - DNA, 15 bp, Homo sapiens
cattcactgagtata

SEQ ID NO: 1914751 - DNA, 15 bp, Homo sapiens
attcactgagtataa

SEQ ID NO: 1914752 - DNA, 15 bp, Homo sapiens
ttcactgagtataaa

SEQ ID NO: 1914753 - DNA, 15 bp, Homo sapiens
tcactgagtataaaa

SEQ ID NO: 1914754 - DNA, 15 bp, Homo sapiens
cactgagtataaaat

SEQ ID NO: 1914755 - DNA, 15 bp, Homo sapiens
actgagtataaaatt

SEQ ID NO: 1914756 - DNA, 15 bp, Homo sapiens
ctgagtataaaattc

SEQ ID NO: 1914757 - DNA, 15 bp, Homo sapiens
tgagtataaaattct

SEQ ID NO: 1914758 - DNA, 15 bp, Homo sapiens
gagtataaaattcta

SEQ ID NO: 1914759 - DNA, 15 bp, Homo sapiens
agtataaaattctaa

SEQ ID NO: 1914760 - DNA, 15 bp, Homo sapiens
gtataaaattctaag

SEQ ID NO: 1914761 - DNA, 15 bp, Homo sapiens
tataaaattctaagt

SEQ ID NO: 1914762 - DNA, 15 bp, Homo sapiens
ataaaattctaagtt

SEQ ID NO: 1914763 - DNA, 15 bp, Homo sapiens
taaaattctaagttg

SEQ ID NO: 1914764 - DNA, 15 bp, Homo sapiens
aaaattctaagttgg

SEQ ID NO: 1914765 - DNA, 15 bp, Homo sapiens
aaattctaagttggc

SEQ ID NO: 1914766 - DNA, 15 bp, Homo sapiens
aattctaagttggct

SEQ ID NO: 1914767 - DNA, 15 bp, Homo sapiens
attctaagttggcta

SEQ ID NO: 1914768 - DNA, 15 bp, Homo sapiens
ttctaagttggctat

SEQ ID NO: 1914769 - DNA, 15 bp, Homo sapiens
tctaagttggctatt

SEQ ID NO: 1914770 - DNA, 15 bp, Homo sapiens
ctaagttggctattt

SEQ ID NO: 1914771 - DNA, 15 bp, Homo sapiens
taagttggctatttt

SEQ ID NO: 1914772 - DNA, 15 bp, Homo sapiens
aagttggctattttt

SEQ ID NO: 1914773 - DNA, 15 bp, Homo sapiens
agttggctatttttt

SEQ ID NO: 1914774 - DNA, 15 bp, Homo sapiens
gttggctattttttt

SEQ ID NO: 1914775 - DNA, 15 bp, Homo sapiens
ttggctatttttttt

SEQ ID NO: 1914776 - DNA, 15 bp, Homo sapiens
tggctattttttttc

SEQ ID NO: 1914777 - DNA, 15 bp, Homo sapiens
ggctattttttttcc

SEQ ID NO: 1914778 - DNA, 15 bp, Homo sapiens
gctattttttttcca

SEQ ID NO: 1914779 - DNA, 15 bp, Homo sapiens
ctattttttttccat

SEQ ID NO: 1914780 - DNA, 15 bp, Homo sapiens
tattttttttccatt

SEQ ID NO: 1914781 - DNA, 15 bp, Homo sapiens
attttttttccattg

SEQ ID NO: 1914782 - DNA, 15 bp, Homo sapiens
ttttttttccattgt

SEQ ID NO: 1914783 - DNA, 15 bp, Homo sapiens
tttttttccattgtc

SEQ ID NO: 1914784 - DNA, 15 bp, Homo sapiens
ttttttccattgtct

SEQ ID NO: 1914785 - DNA, 15 bp, Homo sapiens
tttttccattgtctt

SEQ ID NO: 1914786 - DNA, 15 bp, Homo sapiens
ttttccattgtcttc

SEQ ID NO: 1914787 - DNA, 15 bp, Homo sapiens
tttccattgtcttct

SEQ ID NO: 1914788 - DNA, 15 bp, Homo sapiens
ttccattgtcttctg

SEQ ID NO: 1914789 - DNA, 15 bp, Homo sapiens
tccattgtcttctgg

SEQ ID NO: 1914790 - DNA, 15 bp, Homo sapiens
ccattgtcttctggt

SEQ ID NO: 1914791 - DNA, 15 bp, Homo sapiens
cattgtcttctggtg

SEQ ID NO: 1914792 - DNA, 15 bp, Homo sapiens
attgtcttctggtga

SEQ ID NO: 1914793 - DNA, 15 bp, Homo sapiens
ttgtcttctggtgag

SEQ ID NO: 1914794 - DNA, 15 bp, Homo sapiens
tgtcttctggtgagc

SEQ ID NO: 1914795 - DNA, 15 bp, Homo sapiens
gtcttctggtgagca

SEQ ID NO: 1914796 - DNA, 15 bp, Homo sapiens
tcttctggtgagcat

SEQ ID NO: 1914797 - DNA, 15 bp, Homo sapiens
cttctggtgagcatt

SEQ ID NO: 1914798 - DNA, 15 bp, Homo sapiens
ttctggtgagcattg

SEQ ID NO: 1914799 - DNA, 15 bp, Homo sapiens
tctggtgagcattgt

SEQ ID NO: 1914800 - DNA, 15 bp, Homo sapiens
ctggtgagcattgtt

SEQ ID NO: 1914801 - DNA, 15 bp, Homo sapiens
tggtgagcattgtta

SEQ ID NO: 1914802 - DNA, 15 bp, Homo sapiens
ggtgagcattgttac

SEQ ID NO: 1914803 - DNA, 15 bp, Homo sapiens
gtgagcattgttact

SEQ ID NO: 1914804 - DNA, 15 bp, Homo sapiens
tgagcattgttacta

SEQ ID NO: 1914805 - DNA, 15 bp, Homo sapiens
gagcattgttactat

SEQ ID NO: 1914806 - DNA, 15 bp, Homo sapiens
agcattgttactatt

SEQ ID NO: 1914807 - DNA, 15 bp, Homo sapiens
gcattgttactattc

SEQ ID NO: 1914808 - DNA, 15 bp, Homo sapiens
cattgttactattca

SEQ ID NO: 1914809 - DNA, 15 bp, Homo sapiens
attgttactattcag

SEQ ID NO: 1914810 - DNA, 15 bp, Homo sapiens
ttgttactattcaga

SEQ ID NO: 1914811 - DNA, 15 bp, Homo sapiens
tgttactattcagaa

SEQ ID NO: 1914812 - DNA, 15 bp, Homo sapiens
gttactattcagaaa

SEQ ID NO: 1914813 - DNA, 15 bp, Homo sapiens
ttactattcagaaat

SEQ ID NO: 1914814 - DNA, 15 bp, Homo sapiens
tactattcagaaatc

SEQ ID NO: 1914815 - DNA, 15 bp, Homo sapiens
actattcagaaatca

SEQ ID NO: 1914816 - DNA, 15 bp, Homo sapiens
ctattcagaaatcag

SEQ ID NO: 1914817 - DNA, 15 bp, Homo sapiens
tattcagaaatcagc

SEQ ID NO: 1914818 - DNA, 15 bp, Homo sapiens
attcagaaatcagcc

SEQ ID NO: 1914819 - DNA, 15 bp, Homo sapiens
ttcagaaatcagccc

SEQ ID NO: 1914820 - DNA, 15 bp, Homo sapiens
tcagaaatcagccct

SEQ ID NO: 1914821 - DNA, 15 bp, Homo sapiens
cagaaatcagccctc

SEQ ID NO: 1914822 - DNA, 15 bp, Homo sapiens
agaaatcagccctca

SEQ ID NO: 1914823 - DNA, 15 bp, Homo sapiens
gaaatcagccctcag

SEQ ID NO: 1914824 - DNA, 15 bp, Homo sapiens
aaatcagccctcagt

SEQ ID NO: 1914825 - DNA, 15 bp, Homo sapiens
aatcagccctcagtc

SEQ ID NO: 1914826 - DNA, 15 bp, Homo sapiens
atcagccctcagtct

SEQ ID NO: 1914827 - DNA, 15 bp, Homo sapiens
tcagccctcagtcta

SEQ ID NO: 1914828 - DNA, 15 bp, Homo sapiens
cagccctcagtctaa

SEQ ID NO: 1914829 - DNA, 15 bp, Homo sapiens
agccctcagtctaat

SEQ ID NO: 1914830 - DNA, 15 bp, Homo sapiens
gccctcagtctaatt

SEQ ID NO: 1914831 - DNA, 15 bp, Homo sapiens
ccctcagtctaattg

SEQ ID NO: 1914832 - DNA, 15 bp, Homo sapiens
cctcagtctaattgc

SEQ ID NO: 1914833 - DNA, 15 bp, Homo sapiens
ctcagtctaattgct

SEQ ID NO: 1914834 - DNA, 15 bp, Homo sapiens
tcagtctaattgctg

SEQ ID NO: 1914835 - DNA, 15 bp, Homo sapiens
cagtctaattgctgc

SEQ ID NO: 1914836 - DNA, 15 bp, Homo sapiens
agtctaattgctgct

SEQ ID NO: 1914837 - DNA, 15 bp, Homo sapiens
gtctaattgctgctt

SEQ ID NO: 1914838 - DNA, 15 bp, Homo sapiens
tctaattgctgcttc

SEQ ID NO: 1914839 - DNA, 15 bp, Homo sapiens
ctaattgctgcttct

SEQ ID NO: 1914840 - DNA, 15 bp, Homo sapiens
taattgctgcttctt

SEQ ID NO: 1914841 - DNA, 15 bp, Homo sapiens
aattgctgcttcttt

SEQ ID NO: 1914842 - DNA, 15 bp, Homo sapiens
attgctgcttctttg

SEQ ID NO: 1914843 - DNA, 15 bp, Homo sapiens
ttgctgcttctttga

SEQ ID NO: 1914844 - DNA, 15 bp, Homo sapiens
tgctgcttctttgaa

SEQ ID NO: 1914845 - DNA, 15 bp, Homo sapiens
gctgcttctttgaaa

SEQ ID NO: 1914846 - DNA, 15 bp, Homo sapiens
ctgcttctttgaaag

SEQ ID NO: 1914847 - DNA, 15 bp, Homo sapiens
tgcttctttgaaagt

SEQ ID NO: 1914848 - DNA, 15 bp, Homo sapiens
gcttctttgaaagta

SEQ ID NO: 1914849 - DNA, 15 bp, Homo sapiens
cttctttgaaagtaa

SEQ ID NO: 1914850 - DNA, 15 bp, Homo sapiens
ttctttgaaagtaat

SEQ ID NO: 1914851 - DNA, 15 bp, Homo sapiens
tctttgaaagtaatc

SEQ ID NO: 1914852 - DNA, 15 bp, Homo sapiens
ctttgaaagtaatct

SEQ ID NO: 1914853 - DNA, 15 bp, Homo sapiens
tttgaaagtaatctt

SEQ ID NO: 1914854 - DNA, 15 bp, Homo sapiens
ttgaaagtaatcttg

SEQ ID NO: 1914855 - DNA, 15 bp, Homo sapiens
tgaaagtaatcttgg

SEQ ID NO: 1914856 - DNA, 15 bp, Homo sapiens
gaaagtaatcttggc

SEQ ID NO: 1914857 - DNA, 15 bp, Homo sapiens
aaagtaatcttggcc

SEQ ID NO: 1914858 - DNA, 15 bp, Homo sapiens
aagtaatcttggcct

SEQ ID NO: 1914859 - DNA, 15 bp, Homo sapiens
agtaatcttggccta

SEQ ID NO: 1914860 - DNA, 15 bp, Homo sapiens
gtaatcttggcctat

SEQ ID NO: 1914861 - DNA, 15 bp, Homo sapiens
taatcttggcctatt

SEQ ID NO: 1914862 - DNA, 15 bp, Homo sapiens
aatcttggcctattt

SEQ ID NO: 1914863 - DNA, 15 bp, Homo sapiens
atcttggcctatttt

SEQ ID NO: 1914864 - DNA, 15 bp, Homo sapiens
tcttggcctatttta

SEQ ID NO: 1914865 - DNA, 15 bp, Homo sapiens
cttggcctattttaa

SEQ ID NO: 1914866 - DNA, 15 bp, Homo sapiens
ttggcctattttaaa

SEQ ID NO: 1914867 - DNA, 15 bp, Homo sapiens
tggcctattttaaag

SEQ ID NO: 1914868 - DNA, 15 bp, Homo sapiens
ggcctattttaaaga

SEQ ID NO: 1914869 - DNA, 15 bp, Homo sapiens
gcctattttaaagat

SEQ ID NO: 1914870 - DNA, 15 bp, Homo sapiens
cctattttaaagatt

SEQ ID NO: 1914871 - DNA, 15 bp, Homo sapiens
ctattttaaagatta

SEQ ID NO: 1914872 - DNA, 15 bp, Homo sapiens
tattttaaagattat

SEQ ID NO: 1914873 - DNA, 15 bp, Homo sapiens
attttaaagattatt

SEQ ID NO: 1914874 - DNA, 15 bp, Homo sapiens
ttttaaagattattt

SEQ ID NO: 1914875 - DNA, 15 bp, Homo sapiens
tttaaagattatttt

SEQ ID NO: 1914876 - DNA, 15 bp, Homo sapiens
ttaaagattatttta

SEQ ID NO: 1914877 - DNA, 15 bp, Homo sapiens
taaagattattttat

SEQ ID NO: 1914878 - DNA, 15 bp, Homo sapiens
aaagattattttatt

SEQ ID NO: 1914879 - DNA, 15 bp, Homo sapiens
aagattattttattg

SEQ ID NO: 1914880 - DNA, 15 bp, Homo sapiens
agattattttattgg

SEQ ID NO: 1914881 - DNA, 15 bp, Homo sapiens
gattattttattggt

SEQ ID NO: 1914882 - DNA, 15 bp, Homo sapiens
attattttattggtt

SEQ ID NO: 1914883 - DNA, 15 bp, Homo sapiens
ttattttattggttt

SEQ ID NO: 1914884 - DNA, 15 bp, Homo sapiens
tattttattggtttt

SEQ ID NO: 1914885 - DNA, 15 bp, Homo sapiens
attttattggttttt

SEQ ID NO: 1914886 - DNA, 15 bp, Homo sapiens
ttttattggtttttc

SEQ ID NO: 1914887 - DNA, 15 bp, Homo sapiens
tttattggtttttct

SEQ ID NO: 1914888 - DNA, 15 bp, Homo sapiens
ttattggtttttcta

SEQ ID NO: 1914889 - DNA, 15 bp, Homo sapiens
tattggtttttctac

SEQ ID NO: 1914890 - DNA, 15 bp, Homo sapiens
attggtttttctaca

SEQ ID NO: 1914891 - DNA, 15 bp, Homo sapiens
ttggtttttctacag

SEQ ID NO: 1914892 - DNA, 15 bp, Homo sapiens
tggtttttctacagt

SEQ ID NO: 1914893 - DNA, 15 bp, Homo sapiens
ggtttttctacagtt

SEQ ID NO: 1914894 - DNA, 15 bp, Homo sapiens
gtttttctacagttt

SEQ ID NO: 1914895 - DNA, 15 bp, Homo sapiens
tttttctacagttta

SEQ ID NO: 1914896 - DNA, 15 bp, Homo sapiens
ttttctacagtttaa

SEQ ID NO: 1914897 - DNA, 15 bp, Homo sapiens
tttctacagtttaac

SEQ ID NO: 1914898 - DNA, 15 bp, Homo sapiens
ttctacagtttaact

SEQ ID NO: 1914899 - DNA, 15 bp, Homo sapiens
tctacagtttaacta

SEQ ID NO: 1914900 - DNA, 15 bp, Homo sapiens
ctacagtttaactat

SEQ ID NO: 1914901 - DNA, 15 bp, Homo sapiens
tacagtttaactatt

SEQ ID NO: 1914902 - DNA, 15 bp, Homo sapiens
acagtttaactatta

SEQ ID NO: 1914903 - DNA, 15 bp, Homo sapiens
cagtttaactattat

SEQ ID NO: 1914904 - DNA, 15 bp, Homo sapiens
agtttaactattatg

SEQ ID NO: 1914905 - DNA, 15 bp, Homo sapiens
gtttaactattatgt

SEQ ID NO: 1914906 - DNA, 15 bp, Homo sapiens
tttaactattatgtg

SEQ ID NO: 1914907 - DNA, 15 bp, Homo sapiens
ttaactattatgtgc

SEQ ID NO: 1914908 - DNA, 15 bp, Homo sapiens
taactattatgtgcc

SEQ ID NO: 1914909 - DNA, 15 bp, Homo sapiens
aactattatgtgcca

SEQ ID NO: 1914910 - DNA, 15 bp, Homo sapiens
actattatgtgccaa

SEQ ID NO: 1914911 - DNA, 15 bp, Homo sapiens
ctattatgtgccaat

SEQ ID NO: 1914912 - DNA, 15 bp, Homo sapiens
tattatgtgccaata

SEQ ID NO: 1914913 - DNA, 15 bp, Homo sapiens
attatgtgccaatac

SEQ ID NO: 1914914 - DNA, 15 bp, Homo sapiens
ttatgtgccaataca

SEQ ID NO: 1914915 - DNA, 15 bp, Homo sapiens
tatgtgccaatacat

SEQ ID NO: 1914916 - DNA, 15 bp, Homo sapiens
atgtgccaatacatg

SEQ ID NO: 1914917 - DNA, 15 bp, Homo sapiens
tgtgccaatacatgc

SEQ ID NO: 1914918 - DNA, 15 bp, Homo sapiens
gtgccaatacatgca

SEQ ID NO: 1914919 - DNA, 15 bp, Homo sapiens
tgccaatacatgcaa

SEQ ID NO: 1914920 - DNA, 15 bp, Homo sapiens
gccaatacatgcaat

SEQ ID NO: 1914921 - DNA, 15 bp, Homo sapiens
ccaatacatgcaatt

SEQ ID NO: 1914922 - DNA, 15 bp, Homo sapiens
caatacatgcaatta

SEQ ID NO: 1914923 - DNA, 15 bp, Homo sapiens
aatacatgcaattat

SEQ ID NO: 1914924 - DNA, 15 bp, Homo sapiens
atacatgcaattatt

SEQ ID NO: 1914925 - DNA, 15 bp, Homo sapiens
tacatgcaattattt

SEQ ID NO: 1914926 - DNA, 15 bp, Homo sapiens
acatgcaattatttt

SEQ ID NO: 1914927 - DNA, 15 bp, Homo sapiens
catgcaattattttt

SEQ ID NO: 1914928 - DNA, 15 bp, Homo sapiens
atgcaattattttta

SEQ ID NO: 1914929 - DNA, 15 bp, Homo sapiens
tgcaattatttttat

SEQ ID NO: 1914930 - DNA, 15 bp, Homo sapiens
gcaattatttttatt

SEQ ID NO: 1914931 - DNA, 15 bp, Homo sapiens
caattatttttattt

SEQ ID NO: 1914932 - DNA, 15 bp, Homo sapiens
aattatttttattta

SEQ ID NO: 1914933 - DNA, 15 bp, Homo sapiens
attatttttatttag

SEQ ID NO: 1914934 - DNA, 15 bp, Homo sapiens
ttatttttatttagc

SEQ ID NO: 1914935 - DNA, 15 bp, Homo sapiens
tatttttatttagcc

SEQ ID NO: 1914936 - DNA, 15 bp, Homo sapiens
atttttatttagcct

SEQ ID NO: 1914937 - DNA, 15 bp, Homo sapiens
tttttatttagccta

SEQ ID NO: 1914938 - DNA, 15 bp, Homo sapiens
ttttatttagcctac

SEQ ID NO: 1914939 - DNA, 15 bp, Homo sapiens
tttatttagcctact

SEQ ID NO: 1914940 - DNA, 15 bp, Homo sapiens
ttatttagcctactt

SEQ ID NO: 1914941 - DNA, 15 bp, Homo sapiens
tatttagcctactta

SEQ ID NO: 1914942 - DNA, 15 bp, Homo sapiens
atttagcctacttag

SEQ ID NO: 1914943 - DNA, 15 bp, Homo sapiens
tttagcctacttagc

SEQ ID NO: 1914944 - DNA, 15 bp, Homo sapiens
ttagcctacttagca

SEQ ID NO: 1914945 - DNA, 15 bp, Homo sapiens
tagcctacttagcat

SEQ ID NO: 1914946 - DNA, 15 bp, Homo sapiens
agcctacttagcatt

SEQ ID NO: 1914947 - DNA, 15 bp, Homo sapiens
gcctacttagcatta

SEQ ID NO: 1914948 - DNA, 15 bp, Homo sapiens
cctacttagcattag

SEQ ID NO: 1914949 - DNA, 15 bp, Homo sapiens
ctacttagcattagc

SEQ ID NO: 1914950 - DNA, 15 bp, Homo sapiens
tacttagcattagca

SEQ ID NO: 1914951 - DNA, 15 bp, Homo sapiens
acttagcattagcat

SEQ ID NO: 1914952 - DNA, 15 bp, Homo sapiens
cttagcattagcatt

SEQ ID NO: 1914953 - DNA, 15 bp, Homo sapiens
ttagcattagcattt

SEQ ID NO: 1914954 - DNA, 15 bp, Homo sapiens
tagcattagcatttc

SEQ ID NO: 1914955 - DNA, 15 bp, Homo sapiens
agcattagcatttcc

SEQ ID NO: 1914956 - DNA, 15 bp, Homo sapiens
gcattagcatttcca

SEQ ID NO: 1914957 - DNA, 15 bp, Homo sapiens
cattagcatttccag

SEQ ID NO: 1914958 - DNA, 15 bp, Homo sapiens
attagcatttccagg

SEQ ID NO: 1914959 - DNA, 15 bp, Homo sapiens
ttagcatttccaggg

SEQ ID NO: 1914960 - DNA, 15 bp, Homo sapiens
tagcatttccagggc

SEQ ID NO: 1914961 - DNA, 15 bp, Homo sapiens
agcatttccagggct

SEQ ID NO: 1914962 - DNA, 15 bp, Homo sapiens
gcatttccagggctt

SEQ ID NO: 1914963 - DNA, 15 bp, Homo sapiens
catttccagggcttc

SEQ ID NO: 1914964 - DNA, 15 bp, Homo sapiens
atttccagggcttct

SEQ ID NO: 1914965 - DNA, 15 bp, Homo sapiens
tttccagggcttctt

SEQ ID NO: 1914966 - DNA, 15 bp, Homo sapiens
ttccagggcttcttt

SEQ ID NO: 1914967 - DNA, 15 bp, Homo sapiens
tccagggcttctttc

SEQ ID NO: 1914968 - DNA, 15 bp, Homo sapiens
ccagggcttctttcc

SEQ ID NO: 1914969 - DNA, 15 bp, Homo sapiens
cagggcttctttccc

SEQ ID NO: 1914970 - DNA, 15 bp, Homo sapiens
agggcttctttccct

SEQ ID NO: 1914971 - DNA, 15 bp, Homo sapiens
gggcttctttccctg

SEQ ID NO: 1914972 - DNA, 15 bp, Homo sapiens
ggcttctttccctgc

SEQ ID NO: 1914973 - DNA, 15 bp, Homo sapiens
gcttctttccctgct

SEQ ID NO: 1914974 - DNA, 15 bp, Homo sapiens
cttctttccctgctc

SEQ ID NO: 1914975 - DNA, 15 bp, Homo sapiens
ttctttccctgctcc

SEQ ID NO: 1914976 - DNA, 15 bp, Homo sapiens
tctttccctgctcct

SEQ ID NO: 1914977 - DNA, 15 bp, Homo sapiens
ctttccctgctcctt

SEQ ID NO: 1914978 - DNA, 15 bp, Homo sapiens
tttccctgctcctta

SEQ ID NO: 1914979 - DNA, 15 bp, Homo sapiens
ttccctgctccttaa

SEQ ID NO: 1914980 - DNA, 15 bp, Homo sapiens
tccctgctccttaat

SEQ ID NO: 1914981 - DNA, 15 bp, Homo sapiens
ccctgctccttaata

SEQ ID NO: 1914982 - DNA, 15 bp, Homo sapiens
cctgctccttaatat

SEQ ID NO: 1914983 - DNA, 15 bp, Homo sapiens
ctgctccttaatatt

SEQ ID NO: 1914984 - DNA, 15 bp, Homo sapiens
tgctccttaatattc

SEQ ID NO: 1914985 - DNA, 15 bp, Homo sapiens
gctccttaatattct

SEQ ID NO: 1914986 - DNA, 15 bp, Homo sapiens
ctccttaatattctt

SEQ ID NO: 1914987 - DNA, 15 bp, Homo sapiens
tccttaatattcttt

SEQ ID NO: 1914988 - DNA, 15 bp, Homo sapiens
ccttaatattctttg

SEQ ID NO: 1914989 - DNA, 15 bp, Homo sapiens
cttaatattctttgt

SEQ ID NO: 1914990 - DNA, 15 bp, Homo sapiens
ttaatattctttgtc

SEQ ID NO: 1914991 - DNA, 15 bp, Homo sapiens
taatattctttgtca

SEQ ID NO: 1914992 - DNA, 15 bp, Homo sapiens
aatattctttgtcaa

SEQ ID NO: 1914993 - DNA, 15 bp, Homo sapiens
atattctttgtcaat

SEQ ID NO: 1914994 - DNA, 15 bp, Homo sapiens
tattctttgtcaatt

SEQ ID NO: 1914995 - DNA, 15 bp, Homo sapiens
attctttgtcaattt

SEQ ID NO: 1914996 - DNA, 15 bp, Homo sapiens
ttctttgtcaatttt

SEQ ID NO: 1914997 - DNA, 15 bp, Homo sapiens
tctttgtcaatttta

SEQ ID NO: 1914998 - DNA, 15 bp, Homo sapiens
ctttgtcaattttag

SEQ ID NO: 1914999 - DNA, 15 bp, Homo sapiens
tttgtcaattttaga

SEQ ID NO: 1915000 - DNA, 15 bp, Homo sapiens
ttgtcaattttagaa

SEQ ID NO: 1915001 - DNA, 15 bp, Homo sapiens
tgtcaattttagaaa

SEQ ID NO: 1915002 - DNA, 15 bp, Homo sapiens
gtcaattttagaaaa

SEQ ID NO: 1915003 - DNA, 15 bp, Homo sapiens
tcaattttagaaaat

SEQ ID NO: 1915004 - DNA, 15 bp, Homo sapiens
caattttagaaaatt

SEQ ID NO: 1915005 - DNA, 15 bp, Homo sapiens
aattttagaaaattc

SEQ ID NO: 1915006 - DNA, 15 bp, Homo sapiens
tttagaaaattctgt

SEQ ID NO: 1915007 - DNA, 15 bp, Homo sapiens
ttagaaaattctgtc

SEQ ID NO: 1915008 - DNA, 15 bp, Homo sapiens
tagaaaattctgtca

SEQ ID NO: 1915009 - DNA, 15 bp, Homo sapiens
agaaaattctgtcat

SEQ ID NO: 1915010 - DNA, 15 bp, Homo sapiens
gaaaattctgtcatt

SEQ ID NO: 1915011 - DNA, 15 bp, Homo sapiens
aaaattctgtcatta

SEQ ID NO: 1915012 - DNA, 15 bp, Homo sapiens
aaattctgtcattat

SEQ ID NO: 1915013 - DNA, 15 bp, Homo sapiens
aattctgtcattatc

SEQ ID NO: 1915014 - DNA, 15 bp, Homo sapiens
attctgtcattatct

SEQ ID NO: 1915015 - DNA, 15 bp, Homo sapiens
ttctgtcattatctc

SEQ ID NO: 1915016 - DNA, 15 bp, Homo sapiens
tctgtcattatctca

SEQ ID NO: 1915017 - DNA, 15 bp, Homo sapiens
ctgtcattatctcat

SEQ ID NO: 1915018 - DNA, 15 bp, Homo sapiens
tgtcattatctcatc

SEQ ID NO: 1915019 - DNA, 15 bp, Homo sapiens
gtcattatctcatca

SEQ ID NO: 1915020 - DNA, 15 bp, Homo sapiens
tcattatctcatcaa

SEQ ID NO: 1915021 - DNA, 15 bp, Homo sapiens
cattatctcatcaac

SEQ ID NO: 1915022 - DNA, 15 bp, Homo sapiens
attatctcatcaaca

SEQ ID NO: 1915023 - DNA, 15 bp, Homo sapiens
ttatctcatcaacat

SEQ ID NO: 1915024 - DNA, 15 bp, Homo sapiens
tatctcatcaacatt

SEQ ID NO: 1915025 - DNA, 15 bp, Homo sapiens
atctcatcaacattg

SEQ ID NO: 1915026 - DNA, 15 bp, Homo sapiens
tctcatcaacattgt

SEQ ID NO: 1915027 - DNA, 15 bp, Homo sapiens
ctcatcaacattgtc

SEQ ID NO: 1915028 - DNA, 15 bp, Homo sapiens
tcatcaacattgtct

SEQ ID NO: 1915029 - DNA, 15 bp, Homo sapiens
catcaacattgtctg

SEQ ID NO: 1915030 - DNA, 15 bp, Homo sapiens
atcaacattgtctgt

SEQ ID NO: 1915031 - DNA, 15 bp, Homo sapiens
tcaacattgtctgta

SEQ ID NO: 1915032 - DNA, 15 bp, Homo sapiens
caacattgtctgtag

SEQ ID NO: 1915033 - DNA, 15 bp, Homo sapiens
aacattgtctgtagt

SEQ ID NO: 1915034 - DNA, 15 bp, Homo sapiens
acattgtctgtagtc

SEQ ID NO: 1915035 - DNA, 15 bp, Homo sapiens
cattgtctgtagtca

SEQ ID NO: 1915036 - DNA, 15 bp, Homo sapiens
attgtctgtagtcat

SEQ ID NO: 1915037 - DNA, 15 bp, Homo sapiens
ttgtctgtagtcatt

SEQ ID NO: 1915038 - DNA, 15 bp, Homo sapiens
tgtctgtagtcattc

SEQ ID NO: 1915039 - DNA, 15 bp, Homo sapiens
gtctgtagtcattct

SEQ ID NO: 1915040 - DNA, 15 bp, Homo sapiens
tctgtagtcattctc

SEQ ID NO: 1915041 - DNA, 15 bp, Homo sapiens
ctgtagtcattctct

SEQ ID NO: 1915042 - DNA, 15 bp, Homo sapiens
tgtagtcattctctg

SEQ ID NO: 1915043 - DNA, 15 bp, Homo sapiens
gtagtcattctctgc

SEQ ID NO: 1915044 - DNA, 15 bp, Homo sapiens
tagtcattctctgcc

SEQ ID NO: 1915045 - DNA, 15 bp, Homo sapiens
agtcattctctgcct

SEQ ID NO: 1915046 - DNA, 15 bp, Homo sapiens
gtcattctctgcctc

SEQ ID NO: 1915047 - DNA, 15 bp, Homo sapiens
tcattctctgcctct

SEQ ID NO: 1915048 - DNA, 15 bp, Homo sapiens
cattctctgcctctt

SEQ ID NO: 1915049 - DNA, 15 bp, Homo sapiens
attctctgcctcttc

SEQ ID NO: 1915050 - DNA, 15 bp, Homo sapiens
ttctctgcctcttca

SEQ ID NO: 1915051 - DNA, 15 bp, Homo sapiens
tctctgcctcttcac

SEQ ID NO: 1915052 - DNA, 15 bp, Homo sapiens
ctctgcctcttcacc

SEQ ID NO: 1915053 - DNA, 15 bp, Homo sapiens
tctgcctcttcacct

SEQ ID NO: 1915054 - DNA, 15 bp, Homo sapiens
ctgcctcttcacctc

SEQ ID NO: 1915055 - DNA, 15 bp, Homo sapiens
tgcctcttcacctct

SEQ ID NO: 1915056 - DNA, 15 bp, Homo sapiens
gcctcttcacctctg

SEQ ID NO: 1915057 - DNA, 15 bp, Homo sapiens
cctcttcacctctgg

SEQ ID NO: 1915058 - DNA, 15 bp, Homo sapiens
ctcttcacctctggg

SEQ ID NO: 1915059 - DNA, 15 bp, Homo sapiens
tcttcacctctggga

SEQ ID NO: 1915060 - DNA, 15 bp, Homo sapiens
cttcacctctgggac

SEQ ID NO: 1915061 - DNA, 15 bp, Homo sapiens
ttcacctctgggact

SEQ ID NO: 1915062 - DNA, 15 bp, Homo sapiens
tcacctctgggactc

SEQ ID NO: 1915063 - DNA, 15 bp, Homo sapiens
cacctctgggactcc

SEQ ID NO: 1915064 - DNA, 15 bp, Homo sapiens
acctctgggactcca

SEQ ID NO: 1915065 - DNA, 15 bp, Homo sapiens
cctctgggactccag

SEQ ID NO: 1915066 - DNA, 15 bp, Homo sapiens
ctctgggactccagt

SEQ ID NO: 1915067 - DNA, 15 bp, Homo sapiens
tctgggactccagtt

SEQ ID NO: 1915068 - DNA, 15 bp, Homo sapiens
ctgggactccagttg

SEQ ID NO: 1915069 - DNA, 15 bp, Homo sapiens
tgggactccagttgg

SEQ ID NO: 1915070 - DNA, 15 bp, Homo sapiens
gggactccagttggc

SEQ ID NO: 1915071 - DNA, 15 bp, Homo sapiens
ggactccagttggcc

SEQ ID NO: 1915072 - DNA, 15 bp, Homo sapiens
gactccagttggcca

SEQ ID NO: 1915073 - DNA, 15 bp, Homo sapiens
actccagttggccac

SEQ ID NO: 1915074 - DNA, 15 bp, Homo sapiens
ctccagttggccaca

SEQ ID NO: 1915075 - DNA, 15 bp, Homo sapiens
tccagttggccacat

SEQ ID NO: 1915076 - DNA, 15 bp, Homo sapiens
ccagttggccacata

SEQ ID NO: 1915077 - DNA, 15 bp, Homo sapiens
cagttggccacatac

SEQ ID NO: 1915078 - DNA, 15 bp, Homo sapiens
agttggccacatacg

SEQ ID NO: 1915079 - DNA, 15 bp, Homo sapiens
gttggccacatacga

SEQ ID NO: 1915080 - DNA, 15 bp, Homo sapiens
ttggccacatacgag

SEQ ID NO: 1915081 - DNA, 15 bp, Homo sapiens
tggccacatacgagg

SEQ ID NO: 1915082 - DNA, 15 bp, Homo sapiens
ggccacatacgaggt

SEQ ID NO: 1915083 - DNA, 15 bp, Homo sapiens
gccacatacgaggtt

SEQ ID NO: 1915084 - DNA, 15 bp, Homo sapiens
ccacatacgaggttt

SEQ ID NO: 1915085 - DNA, 15 bp, Homo sapiens
cacatacgaggtttt

SEQ ID NO: 1915086 - DNA, 15 bp, Homo sapiens
acatacgaggttttc

SEQ ID NO: 1915087 - DNA, 15 bp, Homo sapiens
catacgaggttttct

SEQ ID NO: 1915088 - DNA, 15 bp, Homo sapiens
atacgaggttttctc

SEQ ID NO: 1915089 - DNA, 15 bp, Homo sapiens
tacgaggttttctca

SEQ ID NO: 1915090 - DNA, 15 bp, Homo sapiens
acgaggttttctcat

SEQ ID NO: 1915091 - DNA, 15 bp, Homo sapiens
cgaggttttctcatt

SEQ ID NO: 1915092 - DNA, 15 bp, Homo sapiens
gaggttttctcattg

SEQ ID NO: 1915093 - DNA, 15 bp, Homo sapiens
aggttttctcattgt

SEQ ID NO: 1915094 - DNA, 15 bp, Homo sapiens
ggttttctcattgta

SEQ ID NO: 1915095 - DNA, 15 bp, Homo sapiens
gttttctcattgtat

SEQ ID NO: 1915096 - DNA, 15 bp, Homo sapiens
ttttctcattgtatc

SEQ ID NO: 1915097 - DNA, 15 bp, Homo sapiens
tttctcattgtatcc

SEQ ID NO: 1915098 - DNA, 15 bp, Homo sapiens
ttctcattgtatccc

SEQ ID NO: 1915099 - DNA, 15 bp, Homo sapiens
tctcattgtatcccc

SEQ ID NO: 1915100 - DNA, 15 bp, Homo sapiens
ctcattgtatcccct

SEQ ID NO: 1915101 - DNA, 15 bp, Homo sapiens
tcattgtatccccta

SEQ ID NO: 1915102 - DNA, 15 bp, Homo sapiens
cattgtatcccctac

SEQ ID NO: 1915103 - DNA, 15 bp, Homo sapiens
attgtatcccctaca

SEQ ID NO: 1915104 - DNA, 15 bp, Homo sapiens
ttgtatcccctacat

SEQ ID NO: 1915105 - DNA, 15 bp, Homo sapiens
tgtatcccctacatg

SEQ ID NO: 1915106 - DNA, 15 bp, Homo sapiens
gtatcccctacatgt

SEQ ID NO: 1915107 - DNA, 15 bp, Homo sapiens
tatcccctacatgtc

SEQ ID NO: 1915108 - DNA, 15 bp, Homo sapiens
atcccctacatgtct

SEQ ID NO: 1915109 - DNA, 15 bp, Homo sapiens
tcccctacatgtctt

SEQ ID NO: 1915110 - DNA, 15 bp, Homo sapiens
cccctacatgtctta

SEQ ID NO: 1915111 - DNA, 15 bp, Homo sapiens
ccctacatgtcttat

SEQ ID NO: 1915112 - DNA, 15 bp, Homo sapiens
cctacatgtcttatg

SEQ ID NO: 1915113 - DNA, 15 bp, Homo sapiens
ctacatgtcttatgc

SEQ ID NO: 1915114 - DNA, 15 bp, Homo sapiens
tacatgtcttatgct

SEQ ID NO: 1915115 - DNA, 15 bp, Homo sapiens
acatgtcttatgctc

SEQ ID NO: 1915116 - DNA, 15 bp, Homo sapiens
catgtcttatgctcc

SEQ ID NO: 1915117 - DNA, 15 bp, Homo sapiens
atgtcttatgctccc

SEQ ID NO: 1915118 - DNA, 15 bp, Homo sapiens
tgtcttatgctccct

SEQ ID NO: 1915119 - DNA, 15 bp, Homo sapiens
gtcttatgctccctt

SEQ ID NO: 1915120 - DNA, 15 bp, Homo sapiens
tcttatgctcccttt

SEQ ID NO: 1915121 - DNA, 15 bp, Homo sapiens
cttatgctccctttt

SEQ ID NO: 1915122 - DNA, 15 bp, Homo sapiens
ttatgctcccttttg

SEQ ID NO: 1915123 - DNA, 15 bp, Homo sapiens
tatgctcccttttgt

SEQ ID NO: 1915124 - DNA, 15 bp, Homo sapiens
atgctcccttttgtt

SEQ ID NO: 1915125 - DNA, 15 bp, Homo sapiens
tgctcccttttgttt

SEQ ID NO: 1915126 - DNA, 15 bp, Homo sapiens
gctcccttttgtttt

SEQ ID NO: 1915127 - DNA, 15 bp, Homo sapiens
ctcccttttgttttt

SEQ ID NO: 1915128 - DNA, 15 bp, Homo sapiens
tcccttttgtttttc

SEQ ID NO: 1915129 - DNA, 15 bp, Homo sapiens
cccttttgtttttct

SEQ ID NO: 1915130 - DNA, 15 bp, Homo sapiens
ccttttgtttttctc

SEQ ID NO: 1915131 - DNA, 15 bp, Homo sapiens
cttttgtttttctcc

SEQ ID NO: 1915132 - DNA, 15 bp, Homo sapiens
ttttgtttttctccc

SEQ ID NO: 1915133 - DNA, 15 bp, Homo sapiens
tttgtttttctccct

SEQ ID NO: 1915134 - DNA, 15 bp, Homo sapiens
ttgtttttctccctc

SEQ ID NO: 1915135 - DNA, 15 bp, Homo sapiens
tgtttttctccctcc

SEQ ID NO: 1915136 - DNA, 15 bp, Homo sapiens
gtttttctccctcct

SEQ ID NO: 1915137 - DNA, 15 bp, Homo sapiens
tttttctccctcctt

SEQ ID NO: 1915138 - DNA, 15 bp, Homo sapiens
ttttctccctccttt

SEQ ID NO: 1915139 - DNA, 15 bp, Homo sapiens
tttctccctcctttt

SEQ ID NO: 1915140 - DNA, 15 bp, Homo sapiens
ttctccctccttttg

SEQ ID NO: 1915141 - DNA, 15 bp, Homo sapiens
tctccctccttttgt

SEQ ID NO: 1915142 - DNA, 15 bp, Homo sapiens
ctccctccttttgtc

SEQ ID NO: 1915143 - DNA, 15 bp, Homo sapiens
tccctccttttgtct

SEQ ID NO: 1915144 - DNA, 15 bp, Homo sapiens
ccctccttttgtctc

SEQ ID NO: 1915145 - DNA, 15 bp, Homo sapiens
cctccttttgtctct

SEQ ID NO: 1915146 - DNA, 15 bp, Homo sapiens
ctccttttgtctctc

SEQ ID NO: 1915147 - DNA, 15 bp, Homo sapiens
tccttttgtctctct

SEQ ID NO: 1915148 - DNA, 15 bp, Homo sapiens
ccttttgtctctctt

SEQ ID NO: 1915149 - DNA, 15 bp, Homo sapiens
cttttgtctctcttt

SEQ ID NO: 1915150 - DNA, 15 bp, Homo sapiens
ttttgtctctcttta

SEQ ID NO: 1915151 - DNA, 15 bp, Homo sapiens
tttgtctctctttac

SEQ ID NO: 1915152 - DNA, 15 bp, Homo sapiens
ttgtctctctttact

SEQ ID NO: 1915153 - DNA, 15 bp, Homo sapiens
tgtctctctttactt

SEQ ID NO: 1915154 - DNA, 15 bp, Homo sapiens
gtctctctttacttc

SEQ ID NO: 1915155 - DNA, 15 bp, Homo sapiens
tctctctttacttct

SEQ ID NO: 1915156 - DNA, 15 bp, Homo sapiens
ctctctttacttctt

SEQ ID NO: 1915157 - DNA, 15 bp, Homo sapiens
tctctttacttcttt

SEQ ID NO: 1915158 - DNA, 15 bp, Homo sapiens
ctctttacttctttc

SEQ ID NO: 1915159 - DNA, 15 bp, Homo sapiens
tctttacttctttct

SEQ ID NO: 1915160 - DNA, 15 bp, Homo sapiens
ctttacttctttctg

SEQ ID NO: 1915161 - DNA, 15 bp, Homo sapiens
tttacttctttctgg

SEQ ID NO: 1915162 - DNA, 15 bp, Homo sapiens
ttacttctttctgga

SEQ ID NO: 1915163 - DNA, 15 bp, Homo sapiens
tacttctttctggat

SEQ ID NO: 1915164 - DNA, 15 bp, Homo sapiens
acttctttctggata

SEQ ID NO: 1915165 - DNA, 15 bp, Homo sapiens
cttctttctggatac

SEQ ID NO: 1915166 - DNA, 15 bp, Homo sapiens
ttctttctggataca

SEQ ID NO: 1915167 - DNA, 15 bp, Homo sapiens
tctttctggatacat

SEQ ID NO: 1915168 - DNA, 15 bp, Homo sapiens
ctttctggatacatt

SEQ ID NO: 1915169 - DNA, 15 bp, Homo sapiens
tttctggatacattc

SEQ ID NO: 1915170 - DNA, 15 bp, Homo sapiens
ttctggatacattcc

SEQ ID NO: 1915171 - DNA, 15 bp, Homo sapiens
tctggatacattcct

SEQ ID NO: 1915172 - DNA, 15 bp, Homo sapiens
ctggatacattccta

SEQ ID NO: 1915173 - DNA, 15 bp, Homo sapiens
tggatacattcctat

SEQ ID NO: 1915174 - DNA, 15 bp, Homo sapiens
ggatacattcctatc

SEQ ID NO: 1915175 - DNA, 15 bp, Homo sapiens
gatacattcctatct

SEQ ID NO: 1915176 - DNA, 15 bp, Homo sapiens
atacattcctatctt

SEQ ID NO: 1915177 - DNA, 15 bp, Homo sapiens
tacattcctatcttc

SEQ ID NO: 1915178 - DNA, 15 bp, Homo sapiens
acattcctatcttct

SEQ ID NO: 1915179 - DNA, 15 bp, Homo sapiens
cattcctatcttcta

SEQ ID NO: 1915180 - DNA, 15 bp, Homo sapiens
attcctatcttctaa

SEQ ID NO: 1915181 - DNA, 15 bp, Homo sapiens
ttcctatcttctaat

SEQ ID NO: 1915182 - DNA, 15 bp, Homo sapiens
tcctatcttctaatt

SEQ ID NO: 1915183 - DNA, 15 bp, Homo sapiens
cctatcttctaattc

SEQ ID NO: 1915184 - DNA, 15 bp, Homo sapiens
ctatcttctaattca

SEQ ID NO: 1915185 - DNA, 15 bp, Homo sapiens
tatcttctaattcag

SEQ ID NO: 1915186 - DNA, 15 bp, Homo sapiens
atcttctaattcagc

SEQ ID NO: 1915187 - DNA, 15 bp, Homo sapiens
tcttctaattcagca

SEQ ID NO: 1915188 - DNA, 15 bp, Homo sapiens
cttctaattcagcaa

SEQ ID NO: 1915189 - DNA, 15 bp, Homo sapiens
ttctaattcagcaat

SEQ ID NO: 1915190 - DNA, 15 bp, Homo sapiens
tctaattcagcaatt

SEQ ID NO: 1915191 - DNA, 15 bp, Homo sapiens
ctaattcagcaattc

SEQ ID NO: 1915192 - DNA, 15 bp, Homo sapiens
taattcagcaattct

SEQ ID NO: 1915193 - DNA, 15 bp, Homo sapiens
aattcagcaattctt

SEQ ID NO: 1915194 - DNA, 15 bp, Homo sapiens
attcagcaattcttt

SEQ ID NO: 1915195 - DNA, 15 bp, Homo sapiens
ttcagcaattctttc

SEQ ID NO: 1915196 - DNA, 15 bp, Homo sapiens
tcagcaattctttcc

SEQ ID NO: 1915197 - DNA, 15 bp, Homo sapiens
cagcaattctttcct

SEQ ID NO: 1915198 - DNA, 15 bp, Homo sapiens
agcaattctttcctc

SEQ ID NO: 1915199 - DNA, 15 bp, Homo sapiens
gcaattctttcctct

SEQ ID NO: 1915200 - DNA, 15 bp, Homo sapiens
caattctttcctctg

SEQ ID NO: 1915201 - DNA, 15 bp, Homo sapiens
aattctttcctctgc

SEQ ID NO: 1915202 - DNA, 15 bp, Homo sapiens
attctttcctctgct

SEQ ID NO: 1915203 - DNA, 15 bp, Homo sapiens
ttctttcctctgctc

SEQ ID NO: 1915204 - DNA, 15 bp, Homo sapiens
tctttcctctgctct

SEQ ID NO: 1915205 - DNA, 15 bp, Homo sapiens
ctttcctctgctctg

SEQ ID NO: 1915206 - DNA, 15 bp, Homo sapiens
tttcctctgctctgc

SEQ ID NO: 1915207 - DNA, 15 bp, Homo sapiens
ttcctctgctctgca

SEQ ID NO: 1915208 - DNA, 15 bp, Homo sapiens
tcctctgctctgcag

SEQ ID NO: 1915209 - DNA, 15 bp, Homo sapiens
cctctgctctgcaga

SEQ ID NO: 1915210 - DNA, 15 bp, Homo sapiens
ctctgctctgcagat

SEQ ID NO: 1915211 - DNA, 15 bp, Homo sapiens
tctgctctgcagatc

SEQ ID NO: 1915212 - DNA, 15 bp, Homo sapiens
ctgctctgcagatca

SEQ ID NO: 1915213 - DNA, 15 bp, Homo sapiens
tgctctgcagatcaa

SEQ ID NO: 1915214 - DNA, 15 bp, Homo sapiens
gctctgcagatcaac

SEQ ID NO: 1915215 - DNA, 15 bp, Homo sapiens
ctctgcagatcaact

SEQ ID NO: 1915216 - DNA, 15 bp, Homo sapiens
tctgcagatcaactg

SEQ ID NO: 1915217 - DNA, 15 bp, Homo sapiens
ctgcagatcaactgt

SEQ ID NO: 1915218 - DNA, 15 bp, Homo sapiens
tgcagatcaactgtt

SEQ ID NO: 1915219 - DNA, 15 bp, Homo sapiens
gcagatcaactgtta

SEQ ID NO: 1915220 - DNA, 15 bp, Homo sapiens
cagatcaactgttaa

SEQ ID NO: 1915221 - DNA, 15 bp, Homo sapiens
agatcaactgttaaa

SEQ ID NO: 1915222 - DNA, 15 bp, Homo sapiens
gatcaactgttaaac

SEQ ID NO: 1915223 - DNA, 15 bp, Homo sapiens
atcaactgttaaacc

SEQ ID NO: 1915224 - DNA, 15 bp, Homo sapiens
tcaactgttaaaccc

SEQ ID NO: 1915225 - DNA, 15 bp, Homo sapiens
caactgttaaaccca

SEQ ID NO: 1915226 - DNA, 15 bp, Homo sapiens
aactgttaaacccat

SEQ ID NO: 1915227 - DNA, 15 bp, Homo sapiens
actgttaaacccatc

SEQ ID NO: 1915228 - DNA, 15 bp, Homo sapiens
ctgttaaacccatcc

SEQ ID NO: 1915229 - DNA, 15 bp, Homo sapiens
tgttaaacccatcca

SEQ ID NO: 1915230 - DNA, 15 bp, Homo sapiens
gttaaacccatccat

SEQ ID NO: 1915231 - DNA, 15 bp, Homo sapiens
ttaaacccatccatt

SEQ ID NO: 1915232 - DNA, 15 bp, Homo sapiens
taaacccatccattg

SEQ ID NO: 1915233 - DNA, 15 bp, Homo sapiens
aaacccatccattga

SEQ ID NO: 1915234 - DNA, 15 bp, Homo sapiens
aacccatccattgag

SEQ ID NO: 1915235 - DNA, 15 bp, Homo sapiens
acccatccattgagt

SEQ ID NO: 1915236 - DNA, 15 bp, Homo sapiens
cccatccattgagtc

SEQ ID NO: 1915237 - DNA, 15 bp, Homo sapiens
ccatccattgagtcc

SEQ ID NO: 1915238 - DNA, 15 bp, Homo sapiens
catccattgagtcct

SEQ ID NO: 1915239 - DNA, 15 bp, Homo sapiens
atccattgagtcctt

SEQ ID NO: 1915240 - DNA, 15 bp, Homo sapiens
tccattgagtcctta

SEQ ID NO: 1915241 - DNA, 15 bp, Homo sapiens
ccattgagtccttaa

SEQ ID NO: 1915242 - DNA, 15 bp, Homo sapiens
cattgagtccttaat

SEQ ID NO: 1915243 - DNA, 15 bp, Homo sapiens
attgagtccttaatt

SEQ ID NO: 1915244 - DNA, 15 bp, Homo sapiens
ttgagtccttaattt

SEQ ID NO: 1915245 - DNA, 15 bp, Homo sapiens
tgagtccttaatttc

SEQ ID NO: 1915246 - DNA, 15 bp, Homo sapiens
gagtccttaatttct

SEQ ID NO: 1915247 - DNA, 15 bp, Homo sapiens
agtccttaatttctc

SEQ ID NO: 1915248 - DNA, 15 bp, Homo sapiens
gtccttaatttctct

SEQ ID NO: 1915249 - DNA, 15 bp, Homo sapiens
tccttaatttctctt

SEQ ID NO: 1915250 - DNA, 15 bp, Homo sapiens
ccttaatttctctta

SEQ ID NO: 1915251 - DNA, 15 bp, Homo sapiens
cttaatttctcttac

SEQ ID NO: 1915252 - DNA, 15 bp, Homo sapiens
ttaatttctcttact

SEQ ID NO: 1915253 - DNA, 15 bp, Homo sapiens
taatttctcttactg

SEQ ID NO: 1915254 - DNA, 15 bp, Homo sapiens
aatttctcttactgt

SEQ ID NO: 1915255 - DNA, 15 bp, Homo sapiens
atttctcttactgta

SEQ ID NO: 1915256 - DNA, 15 bp, Homo sapiens
tttctcttactgtat

SEQ ID NO: 1915257 - DNA, 15 bp, Homo sapiens
ttctcttactgtatt

SEQ ID NO: 1915258 - DNA, 15 bp, Homo sapiens
tctcttactgtattt

SEQ ID NO: 1915259 - DNA, 15 bp, Homo sapiens
ctcttactgtatttt

SEQ ID NO: 1915260 - DNA, 15 bp, Homo sapiens
tcttactgtattttc

SEQ ID NO: 1915261 - DNA, 15 bp, Homo sapiens
cttactgtattttca

SEQ ID NO: 1915262 - DNA, 15 bp, Homo sapiens
ttactgtattttcaa

SEQ ID NO: 1915263 - DNA, 15 bp, Homo sapiens
tactgtattttcaat

SEQ ID NO: 1915264 - DNA, 15 bp, Homo sapiens
actgtattttcaatt

SEQ ID NO: 1915265 - DNA, 15 bp, Homo sapiens
ctgtattttcaattc

SEQ ID NO: 1915266 - DNA, 15 bp, Homo sapiens
tgtattttcaattct

SEQ ID NO: 1915267 - DNA, 15 bp, Homo sapiens
gtattttcaattcta

SEQ ID NO: 1915268 - DNA, 15 bp, Homo sapiens
tattttcaattctag

SEQ ID NO: 1915269 - DNA, 15 bp, Homo sapiens
attttcaattctaga

SEQ ID NO: 1915270 - DNA, 15 bp, Homo sapiens
ttttcaattctagaa

SEQ ID NO: 1915271 - DNA, 15 bp, Homo sapiens
tttcaattctagaat

SEQ ID NO: 1915272 - DNA, 15 bp, Homo sapiens
ttcaattctagaata

SEQ ID NO: 1915273 - DNA, 15 bp, Homo sapiens
tcaattctagaatat

SEQ ID NO: 1915274 - DNA, 15 bp, Homo sapiens
caattctagaatatc

SEQ ID NO: 1915275 - DNA, 15 bp, Homo sapiens
aattctagaatatcc

SEQ ID NO: 1915276 - DNA, 15 bp, Homo sapiens
attctagaatatcca

SEQ ID NO: 1915277 - DNA, 15 bp, Homo sapiens
ttctagaatatccaa

SEQ ID NO: 1915278 - DNA, 15 bp, Homo sapiens
tctagaatatccaac

SEQ ID NO: 1915279 - DNA, 15 bp, Homo sapiens
ctagaatatccaact

SEQ ID NO: 1915280 - DNA, 15 bp, Homo sapiens
tagaatatccaactg

SEQ ID NO: 1915281 - DNA, 15 bp, Homo sapiens
agaatatccaactga

SEQ ID NO: 1915282 - DNA, 15 bp, Homo sapiens
gaatatccaactgag

SEQ ID NO: 1915283 - DNA, 15 bp, Homo sapiens
aatatccaactgagt

SEQ ID NO: 1915284 - DNA, 15 bp, Homo sapiens
atatccaactgagtc

SEQ ID NO: 1915285 - DNA, 15 bp, Homo sapiens
tatccaactgagtct

SEQ ID NO: 1915286 - DNA, 15 bp, Homo sapiens
atccaactgagtctt

SEQ ID NO: 1915287 - DNA, 15 bp, Homo sapiens
tccaactgagtcttg

SEQ ID NO: 1915288 - DNA, 15 bp, Homo sapiens
ccaactgagtcttgt

SEQ ID NO: 1915289 - DNA, 15 bp, Homo sapiens
caactgagtcttgtt

SEQ ID NO: 1915290 - DNA, 15 bp, Homo sapiens
aactgagtcttgttt

SEQ ID NO: 1915291 - DNA, 15 bp, Homo sapiens
actgagtcttgtttt

SEQ ID NO: 1915292 - DNA, 15 bp, Homo sapiens
ctgagtcttgtttta

SEQ ID NO: 1915293 - DNA, 15 bp, Homo sapiens
tgagtcttgttttat

SEQ ID NO: 1915294 - DNA, 15 bp, Homo sapiens
gagtcttgttttatc

SEQ ID NO: 1915295 - DNA, 15 bp, Homo sapiens
agtcttgttttatca

SEQ ID NO: 1915296 - DNA, 15 bp, Homo sapiens
gtcttgttttatcat

SEQ ID NO: 1915297 - DNA, 15 bp, Homo sapiens
tcttgttttatcatt

SEQ ID NO: 1915298 - DNA, 15 bp, Homo sapiens
cttgttttatcattt

SEQ ID NO: 1915299 - DNA, 15 bp, Homo sapiens
ttgttttatcatttc

SEQ ID NO: 1915300 - DNA, 15 bp, Homo sapiens
tgttttatcatttct

SEQ ID NO: 1915301 - DNA, 15 bp, Homo sapiens
gttttatcatttcta

SEQ ID NO: 1915302 - DNA, 15 bp, Homo sapiens
ttttatcatttctag

SEQ ID NO: 1915303 - DNA, 15 bp, Homo sapiens
tttatcatttctagt

SEQ ID NO: 1915304 - DNA, 15 bp, Homo sapiens
ttatcatttctagtt

SEQ ID NO: 1915305 - DNA, 15 bp, Homo sapiens
tatcatttctagttc

SEQ ID NO: 1915306 - DNA, 15 bp, Homo sapiens
atcatttctagttct

SEQ ID NO: 1915307 - DNA, 15 bp, Homo sapiens
tcatttctagttctc

SEQ ID NO: 1915308 - DNA, 15 bp, Homo sapiens
catttctagttctct

SEQ ID NO: 1915309 - DNA, 15 bp, Homo sapiens
atttctagttctctg

SEQ ID NO: 1915310 - DNA, 15 bp, Homo sapiens
tttctagttctctgc

SEQ ID NO: 1915311 - DNA, 15 bp, Homo sapiens
ttctagttctctgca

SEQ ID NO: 1915312 - DNA, 15 bp, Homo sapiens
tctagttctctgcaa

SEQ ID NO: 1915313 - DNA, 15 bp, Homo sapiens
ctagttctctgcaat

SEQ ID NO: 1915314 - DNA, 15 bp, Homo sapiens
tagttctctgcaata

SEQ ID NO: 1915315 - DNA, 15 bp, Homo sapiens
agttctctgcaatat

SEQ ID NO: 1915316 - DNA, 15 bp, Homo sapiens
gttctctgcaatatt

SEQ ID NO: 1915317 - DNA, 15 bp, Homo sapiens
ttctctgcaatattt

SEQ ID NO: 1915318 - DNA, 15 bp, Homo sapiens
tctctgcaatatttt

SEQ ID NO: 1915319 - DNA, 15 bp, Homo sapiens
ctctgcaatatttta

SEQ ID NO: 1915320 - DNA, 15 bp, Homo sapiens
tctgcaatattttaa

SEQ ID NO: 1915321 - DNA, 15 bp, Homo sapiens
ctgcaatattttaat

SEQ ID NO: 1915322 - DNA, 15 bp, Homo sapiens
tgcaatattttaatt

SEQ ID NO: 1915323 - DNA, 15 bp, Homo sapiens
gcaatattttaatta

SEQ ID NO: 1915324 - DNA, 15 bp, Homo sapiens
caatattttaattat

SEQ ID NO: 1915325 - DNA, 15 bp, Homo sapiens
aatattttaattatt

SEQ ID NO: 1915326 - DNA, 15 bp, Homo sapiens
atattttaattattg

SEQ ID NO: 1915327 - DNA, 15 bp, Homo sapiens
tattttaattattgt

SEQ ID NO: 1915328 - DNA, 15 bp, Homo sapiens
attttaattattgtc

SEQ ID NO: 1915329 - DNA, 15 bp, Homo sapiens
ttttaattattgtct

SEQ ID NO: 1915330 - DNA, 15 bp, Homo sapiens
tttaattattgtctt

SEQ ID NO: 1915331 - DNA, 15 bp, Homo sapiens
ttaattattgtcttt

SEQ ID NO: 1915332 - DNA, 15 bp, Homo sapiens
taattattgtctttt

SEQ ID NO: 1915333 - DNA, 15 bp, Homo sapiens
aattattgtctttta

SEQ ID NO: 1915334 - DNA, 15 bp, Homo sapiens
attattgtcttttaa

SEQ ID NO: 1915335 - DNA, 15 bp, Homo sapiens
ttattgtcttttaaa

SEQ ID NO: 1915336 - DNA, 15 bp, Homo sapiens
tattgtcttttaaat

SEQ ID NO: 1915337 - DNA, 15 bp, Homo sapiens
attgtcttttaaatc

SEQ ID NO: 1915338 - DNA, 15 bp, Homo sapiens
ttgtcttttaaatct

SEQ ID NO: 1915339 - DNA, 15 bp, Homo sapiens
tgtcttttaaatctt

SEQ ID NO: 1915340 - DNA, 15 bp, Homo sapiens
gtcttttaaatcttt

SEQ ID NO: 1915341 - DNA, 15 bp, Homo sapiens
tcttttaaatctttc

SEQ ID NO: 1915342 - DNA, 15 bp, Homo sapiens
cttttaaatctttca

SEQ ID NO: 1915343 - DNA, 15 bp, Homo sapiens
ttttaaatctttcaa

SEQ ID NO: 1915344 - DNA, 15 bp, Homo sapiens
tttaaatctttcaac

SEQ ID NO: 1915345 - DNA, 15 bp, Homo sapiens
ttaaatctttcaaca

SEQ ID NO: 1915346 - DNA, 15 bp, Homo sapiens
taaatctttcaacat

SEQ ID NO: 1915347 - DNA, 15 bp, Homo sapiens
aaatctttcaacata

SEQ ID NO: 1915348 - DNA, 15 bp, Homo sapiens
aatctttcaacataa

SEQ ID NO: 1915349 - DNA, 15 bp, Homo sapiens
atctttcaacataaa

SEQ ID NO: 1915350 - DNA, 15 bp, Homo sapiens
tctttcaacataaaa

SEQ ID NO: 1915351 - DNA, 15 bp, Homo sapiens
ctttcaacataaaaa

SEQ ID NO: 1915352 - DNA, 15 bp, Homo sapiens
tttcaacataaaaag

SEQ ID NO: 1915353 - DNA, 15 bp, Homo sapiens
ttcaacataaaaagt

SEQ ID NO: 1915354 - DNA, 15 bp, Homo sapiens
tcaacataaaaagta

SEQ ID NO: 1915355 - DNA, 15 bp, Homo sapiens
caacataaaaagtaa

SEQ ID NO: 1915356 - DNA, 15 bp, Homo sapiens
aacataaaaagtaaa

SEQ ID NO: 1915357 - DNA, 15 bp, Homo sapiens
acataaaaagtaaaa

SEQ ID NO: 1915358 - DNA, 15 bp, Homo sapiens
cataaaaagtaaaat

SEQ ID NO: 1915359 - DNA, 15 bp, Homo sapiens
ataaaaagtaaaatt

SEQ ID NO: 1915360 - DNA, 15 bp, Homo sapiens
taaaaagtaaaatta

SEQ ID NO: 1915361 - DNA, 15 bp, Homo sapiens
aaaaagtaaaattat

SEQ ID NO: 1915362 - DNA, 15 bp, Homo sapiens
aaaagtaaaattata

SEQ ID NO: 1915363 - DNA, 15 bp, Homo sapiens
aaagtaaaattatag

SEQ ID NO: 1915364 - DNA, 15 bp, Homo sapiens
taaaattatagtcat

SEQ ID NO: 1915365 - DNA, 15 bp, Homo sapiens
aaaattatagtcatt

SEQ ID NO: 1915366 - DNA, 15 bp, Homo sapiens
aaattatagtcatta

SEQ ID NO: 1915367 - DNA, 15 bp, Homo sapiens
aattatagtcattat

SEQ ID NO: 1915368 - DNA, 15 bp, Homo sapiens
attatagtcattata

SEQ ID NO: 1915369 - DNA, 15 bp, Homo sapiens
ttatagtcattataa

SEQ ID NO: 1915370 - DNA, 15 bp, Homo sapiens
tatagtcattataaa

SEQ ID NO: 1915371 - DNA, 15 bp, Homo sapiens
atagtcattataaag

SEQ ID NO: 1915372 - DNA, 15 bp, Homo sapiens
tagtcattataaagt

SEQ ID NO: 1915373 - DNA, 15 bp, Homo sapiens
agtcattataaagtc

SEQ ID NO: 1915374 - DNA, 15 bp, Homo sapiens
gtcattataaagtct

SEQ ID NO: 1915375 - DNA, 15 bp, Homo sapiens
tcattataaagtcta

SEQ ID NO: 1915376 - DNA, 15 bp, Homo sapiens
cattataaagtctat

SEQ ID NO: 1915377 - DNA, 15 bp, Homo sapiens
attataaagtctatt

SEQ ID NO: 1915378 - DNA, 15 bp, Homo sapiens
ttataaagtctattt

SEQ ID NO: 1915379 - DNA, 15 bp, Homo sapiens
tataaagtctatttt

SEQ ID NO: 1915380 - DNA, 15 bp, Homo sapiens
ataaagtctattttg

SEQ ID NO: 1915381 - DNA, 15 bp, Homo sapiens
taaagtctattttga

SEQ ID NO: 1915382 - DNA, 15 bp, Homo sapiens
aaagtctattttgat

SEQ ID NO: 1915383 - DNA, 15 bp, Homo sapiens
aagtctattttgata

SEQ ID NO: 1915384 - DNA, 15 bp, Homo sapiens
agtctattttgatat

SEQ ID NO: 1915385 - DNA, 15 bp, Homo sapiens
gtctattttgatatc

SEQ ID NO: 1915386 - DNA, 15 bp, Homo sapiens
tctattttgatatct

SEQ ID NO: 1915387 - DNA, 15 bp, Homo sapiens
ctattttgatatctt

SEQ ID NO: 1915388 - DNA, 15 bp, Homo sapiens
tattttgatatcttc

SEQ ID NO: 1915389 - DNA, 15 bp, Homo sapiens
attttgatatcttca

SEQ ID NO: 1915390 - DNA, 15 bp, Homo sapiens
ttttgatatcttcac

SEQ ID NO: 1915391 - DNA, 15 bp, Homo sapiens
tttgatatcttcact

SEQ ID NO: 1915392 - DNA, 15 bp, Homo sapiens
ttgatatcttcacta

SEQ ID NO: 1915393 - DNA, 15 bp, Homo sapiens
tgatatcttcactat

SEQ ID NO: 1915394 - DNA, 15 bp, Homo sapiens
gatatcttcactatt

SEQ ID NO: 1915395 - DNA, 15 bp, Homo sapiens
atatcttcactattt

SEQ ID NO: 1915396 - DNA, 15 bp, Homo sapiens
tatcttcactatttg

SEQ ID NO: 1915397 - DNA, 15 bp, Homo sapiens
atcttcactatttga

SEQ ID NO: 1915398 - DNA, 15 bp, Homo sapiens
tcttcactatttgaa

SEQ ID NO: 1915399 - DNA, 15 bp, Homo sapiens
cttcactatttgaag

SEQ ID NO: 1915400 - DNA, 15 bp, Homo sapiens
ttcactatttgaagc

SEQ ID NO: 1915401 - DNA, 15 bp, Homo sapiens
tcactatttgaagcc

SEQ ID NO: 1915402 - DNA, 15 bp, Homo sapiens
cactatttgaagccc

SEQ ID NO: 1915403 - DNA, 15 bp, Homo sapiens
actatttgaagccca

SEQ ID NO: 1915404 - DNA, 15 bp, Homo sapiens
ctatttgaagcccat

SEQ ID NO: 1915405 - DNA, 15 bp, Homo sapiens
tatttgaagcccata

SEQ ID NO: 1915406 - DNA, 15 bp, Homo sapiens
atttgaagcccatat

SEQ ID NO: 1915407 - DNA, 15 bp, Homo sapiens
tttgaagcccatata

SEQ ID NO: 1915408 - DNA, 15 bp, Homo sapiens
ttgaagcccatatat

SEQ ID NO: 1915409 - DNA, 15 bp, Homo sapiens
tgaagcccatatata

SEQ ID NO: 1915410 - DNA, 15 bp, Homo sapiens
gaagcccatatatac

SEQ ID NO: 1915411 - DNA, 15 bp, Homo sapiens
aagcccatatatacc

SEQ ID NO: 1915412 - DNA, 15 bp, Homo sapiens
agcccatatatacct

SEQ ID NO: 1915413 - DNA, 15 bp, Homo sapiens
gcccatatatacctg

SEQ ID NO: 1915414 - DNA, 15 bp, Homo sapiens
cccatatatacctgt

SEQ ID NO: 1915415 - DNA, 15 bp, Homo sapiens
ccatatatacctgtt

SEQ ID NO: 1915416 - DNA, 15 bp, Homo sapiens
catatatacctgttc

SEQ ID NO: 1915417 - DNA, 15 bp, Homo sapiens
atatatacctgttct

SEQ ID NO: 1915418 - DNA, 15 bp, Homo sapiens
tatatacctgttctg

SEQ ID NO: 1915419 - DNA, 15 bp, Homo sapiens
atatacctgttctgt

SEQ ID NO: 1915420 - DNA, 15 bp, Homo sapiens
tatacctgttctgtt

SEQ ID NO: 1915421 - DNA, 15 bp, Homo sapiens
atacctgttctgttt

SEQ ID NO: 1915422 - DNA, 15 bp, Homo sapiens
tacctgttctgtttt

SEQ ID NO: 1915423 - DNA, 15 bp, Homo sapiens
acctgttctgttttt

SEQ ID NO: 1915424 - DNA, 15 bp, Homo sapiens
cctgttctgtttttg

SEQ ID NO: 1915425 - DNA, 15 bp, Homo sapiens
ctgttctgtttttgt

SEQ ID NO: 1915426 - DNA, 15 bp, Homo sapiens
tgttctgtttttgtt

SEQ ID NO: 1915427 - DNA, 15 bp, Homo sapiens
gttctgtttttgttt

SEQ ID NO: 1915428 - DNA, 15 bp, Homo sapiens
ttctgtttttgtttt

SEQ ID NO: 1915429 - DNA, 15 bp, Homo sapiens
tctgtttttgttttc

SEQ ID NO: 1915430 - DNA, 15 bp, Homo sapiens
ctgtttttgttttct

SEQ ID NO: 1915431 - DNA, 15 bp, Homo sapiens
tgtttttgttttctc

SEQ ID NO: 1915432 - DNA, 15 bp, Homo sapiens
gtttttgttttctct

SEQ ID NO: 1915433 - DNA, 15 bp, Homo sapiens
tttttgttttctctt

SEQ ID NO: 1915434 - DNA, 15 bp, Homo sapiens
ttttgttttctcttg

SEQ ID NO: 1915435 - DNA, 15 bp, Homo sapiens
tttgttttctcttgt

SEQ ID NO: 1915436 - DNA, 15 bp, Homo sapiens
ttgttttctcttgtt

SEQ ID NO: 1915437 - DNA, 15 bp, Homo sapiens
tgttttctcttgttt

SEQ ID NO: 1915438 - DNA, 15 bp, Homo sapiens
gttttctcttgtttg

SEQ ID NO: 1915439 - DNA, 15 bp, Homo sapiens
ttttctcttgtttgc

SEQ ID NO: 1915440 - DNA, 15 bp, Homo sapiens
tttctcttgtttgct

SEQ ID NO: 1915441 - DNA, 15 bp, Homo sapiens
ttctcttgtttgctt

SEQ ID NO: 1915442 - DNA, 15 bp, Homo sapiens
tctcttgtttgcttt

SEQ ID NO: 1915443 - DNA, 15 bp, Homo sapiens
ctcttgtttgctttc

SEQ ID NO: 1915444 - DNA, 15 bp, Homo sapiens
tcttgtttgctttca

SEQ ID NO: 1915445 - DNA, 15 bp, Homo sapiens
cttgtttgctttcat

SEQ ID NO: 1915446 - DNA, 15 bp, Homo sapiens
ttgtttgctttcatg

SEQ ID NO: 1915447 - DNA, 15 bp, Homo sapiens
tgtttgctttcatgt

SEQ ID NO: 1915448 - DNA, 15 bp, Homo sapiens
gtttgctttcatgtt

SEQ ID NO: 1915449 - DNA, 15 bp, Homo sapiens
tttgctttcatgttg

SEQ ID NO: 1915450 - DNA, 15 bp, Homo sapiens
ttgctttcatgttgt

SEQ ID NO: 1915451 - DNA, 15 bp, Homo sapiens
tgctttcatgttgtc

SEQ ID NO: 1915452 - DNA, 15 bp, Homo sapiens
gctttcatgttgtct

SEQ ID NO: 1915453 - DNA, 15 bp, Homo sapiens
ctttcatgttgtctt

SEQ ID NO: 1915454 - DNA, 15 bp, Homo sapiens
tttcatgttgtctta

SEQ ID NO: 1915455 - DNA, 15 bp, Homo sapiens
ttcatgttgtcttat

SEQ ID NO: 1915456 - DNA, 15 bp, Homo sapiens
tcatgttgtcttata

SEQ ID NO: 1915457 - DNA, 15 bp, Homo sapiens
catgttgtcttataa

SEQ ID NO: 1915458 - DNA, 15 bp, Homo sapiens
atgttgtcttataat

SEQ ID NO: 1915459 - DNA, 15 bp, Homo sapiens
tgttgtcttataata

SEQ ID NO: 1915460 - DNA, 15 bp, Homo sapiens
gttgtcttataatat

SEQ ID NO: 1915461 - DNA, 15 bp, Homo sapiens
ttgtcttataatatc

SEQ ID NO: 1915462 - DNA, 15 bp, Homo sapiens
tgtcttataatatct

SEQ ID NO: 1915463 - DNA, 15 bp, Homo sapiens
gtcttataatatctg

SEQ ID NO: 1915464 - DNA, 15 bp, Homo sapiens
tcttataatatctgg

SEQ ID NO: 1915465 - DNA, 15 bp, Homo sapiens
cttataatatctggc

SEQ ID NO: 1915466 - DNA, 15 bp, Homo sapiens
ttataatatctggct

SEQ ID NO: 1915467 - DNA, 15 bp, Homo sapiens
tataatatctggcta

SEQ ID NO: 1915468 - DNA, 15 bp, Homo sapiens
ataatatctggctat

SEQ ID NO: 1915469 - DNA, 15 bp, Homo sapiens
taatatctggctatg

SEQ ID NO: 1915470 - DNA, 15 bp, Homo sapiens
aatatctggctatgt

SEQ ID NO: 1915471 - DNA, 15 bp, Homo sapiens
atatctggctatgtt

SEQ ID NO: 1915472 - DNA, 15 bp, Homo sapiens
tatctggctatgttt

SEQ ID NO: 1915473 - DNA, 15 bp, Homo sapiens
atctggctatgtttt

SEQ ID NO: 1915474 - DNA, 15 bp, Homo sapiens
tctggctatgtttta

SEQ ID NO: 1915475 - DNA, 15 bp, Homo sapiens
ctggctatgttttat

SEQ ID NO: 1915476 - DNA, 15 bp, Homo sapiens
tggctatgttttatt

SEQ ID NO: 1915477 - DNA, 15 bp, Homo sapiens
ggctatgttttatta

SEQ ID NO: 1915478 - DNA, 15 bp, Homo sapiens
gctatgttttattag

SEQ ID NO: 1915479 - DNA, 15 bp, Homo sapiens
ctatgttttattagg

SEQ ID NO: 1915480 - DNA, 15 bp, Homo sapiens
tatgttttattaggt

SEQ ID NO: 1915481 - DNA, 15 bp, Homo sapiens
atgttttattaggtt

SEQ ID NO: 1915482 - DNA, 15 bp, Homo sapiens
tgttttattaggttt

SEQ ID NO: 1915483 - DNA, 15 bp, Homo sapiens
gttttattaggtttc

SEQ ID NO: 1915484 - DNA, 15 bp, Homo sapiens
ttttattaggtttct

SEQ ID NO: 1915485 - DNA, 15 bp, Homo sapiens
tttattaggtttctg

SEQ ID NO: 1915486 - DNA, 15 bp, Homo sapiens
ttattaggtttctga

SEQ ID NO: 1915487 - DNA, 15 bp, Homo sapiens
tattaggtttctgat

SEQ ID NO: 1915488 - DNA, 15 bp, Homo sapiens
attaggtttctgata

SEQ ID NO: 1915489 - DNA, 15 bp, Homo sapiens
ttaggtttctgatat

SEQ ID NO: 1915490 - DNA, 15 bp, Homo sapiens
taggtttctgatatt

SEQ ID NO: 1915491 - DNA, 15 bp, Homo sapiens
aggtttctgatatta

SEQ ID NO: 1915492 - DNA, 15 bp, Homo sapiens
ggtttctgatattat

SEQ ID NO: 1915493 - DNA, 15 bp, Homo sapiens
gtttctgatattata

SEQ ID NO: 1915494 - DNA, 15 bp, Homo sapiens
tttctgatattatat

SEQ ID NO: 1915495 - DNA, 15 bp, Homo sapiens
ttctgatattatatt

SEQ ID NO: 1915496 - DNA, 15 bp, Homo sapiens
tctgatattatattt

SEQ ID NO: 1915497 - DNA, 15 bp, Homo sapiens
ctgatattatatttg

SEQ ID NO: 1915498 - DNA, 15 bp, Homo sapiens
tgatattatatttgc

SEQ ID NO: 1915499 - DNA, 15 bp, Homo sapiens
gatattatatttgca

SEQ ID NO: 1915500 - DNA, 15 bp, Homo sapiens
atattatatttgcaa

SEQ ID NO: 1915501 - DNA, 15 bp, Homo sapiens
tattatatttgcaaa

SEQ ID NO: 1915502 - DNA, 15 bp, Homo sapiens
attatatttgcaaaa

SEQ ID NO: 1915503 - DNA, 15 bp, Homo sapiens
ttatatttgcaaaat

SEQ ID NO: 1915504 - DNA, 15 bp, Homo sapiens
tatatttgcaaaatt

SEQ ID NO: 1915505 - DNA, 15 bp, Homo sapiens
atatttgcaaaattt

SEQ ID NO: 1915506 - DNA, 15 bp, Homo sapiens
tatttgcaaaatttt

SEQ ID NO: 1915507 - DNA, 15 bp, Homo sapiens
atttgcaaaattttt

SEQ ID NO: 1915508 - DNA, 15 bp, Homo sapiens
tttgcaaaattttta

SEQ ID NO: 1915509 - DNA, 15 bp, Homo sapiens
ttgcaaaatttttat

SEQ ID NO: 1915510 - DNA, 15 bp, Homo sapiens
tgcaaaatttttata

SEQ ID NO: 1915511 - DNA, 15 bp, Homo sapiens
gcaaaatttttataa

SEQ ID NO: 1915512 - DNA, 15 bp, Homo sapiens
caaaatttttataaa

SEQ ID NO: 1915513 - DNA, 15 bp, Homo sapiens
aaaatttttataaaa

SEQ ID NO: 1915514 - DNA, 15 bp, Homo sapiens
aaatttttataaaaa

SEQ ID NO: 1915515 - DNA, 15 bp, Homo sapiens
aatttttataaaaaa

SEQ ID NO: 1915516 - DNA, 15 bp, Homo sapiens
atttttataaaaaat

SEQ ID NO: 1915517 - DNA, 15 bp, Homo sapiens
tttttataaaaaata

SEQ ID NO: 1915518 - DNA, 15 bp, Homo sapiens
ttttataaaaaataa

SEQ ID NO: 1915519 - DNA, 15 bp, Homo sapiens
tttataaaaaataac

SEQ ID NO: 1915520 - DNA, 15 bp, Homo sapiens
ttataaaaaataact

SEQ ID NO: 1915521 - DNA, 15 bp, Homo sapiens
tataaaaaataactt

SEQ ID NO: 1915522 - DNA, 15 bp, Homo sapiens
ataaaaaataacttc

SEQ ID NO: 1915523 - DNA, 15 bp, Homo sapiens
taaaaaataacttca

SEQ ID NO: 1915524 - DNA, 15 bp, Homo sapiens
aaaaaataacttcaa

SEQ ID NO: 1915525 - DNA, 15 bp, Homo sapiens
aaaaataacttcaat

SEQ ID NO: 1915526 - DNA, 15 bp, Homo sapiens
aaaataacttcaata

SEQ ID NO: 1915527 - DNA, 15 bp, Homo sapiens
aaataacttcaatac

SEQ ID NO: 1915528 - DNA, 15 bp, Homo sapiens
aataacttcaatact

SEQ ID NO: 1915529 - DNA, 15 bp, Homo sapiens
ataacttcaatacta

SEQ ID NO: 1915530 - DNA, 15 bp, Homo sapiens
taacttcaatactag

SEQ ID NO: 1915531 - DNA, 15 bp, Homo sapiens
aacttcaatactagg

SEQ ID NO: 1915532 - DNA, 15 bp, Homo sapiens
acttcaatactagga

SEQ ID NO: 1915533 - DNA, 15 bp, Homo sapiens
cttcaatactaggat

SEQ ID NO: 1915534 - DNA, 15 bp, Homo sapiens
ttcaatactaggata

SEQ ID NO: 1915535 - DNA, 15 bp, Homo sapiens
tcaatactaggataa

SEQ ID NO: 1915536 - DNA, 15 bp, Homo sapiens
caatactaggataat

SEQ ID NO: 1915537 - DNA, 15 bp, Homo sapiens
aatactaggataatg

SEQ ID NO: 1915538 - DNA, 15 bp, Homo sapiens
atactaggataatgt

SEQ ID NO: 1915539 - DNA, 15 bp, Homo sapiens
tactaggataatgtt

SEQ ID NO: 1915540 - DNA, 15 bp, Homo sapiens
actaggataatgtta

SEQ ID NO: 1915541 - DNA, 15 bp, Homo sapiens
ctaggataatgttac

SEQ ID NO: 1915542 - DNA, 15 bp, Homo sapiens
taggataatgttaca

SEQ ID NO: 1915543 - DNA, 15 bp, Homo sapiens
aggataatgttacaa

SEQ ID NO: 1915544 - DNA, 15 bp, Homo sapiens
ggataatgttacaat

SEQ ID NO: 1915545 - DNA, 15 bp, Homo sapiens
gataatgttacaatg

SEQ ID NO: 1915546 - DNA, 15 bp, Homo sapiens
ataatgttacaatgt

SEQ ID NO: 1915547 - DNA, 15 bp, Homo sapiens
taatgttacaatgtc

SEQ ID NO: 1915548 - DNA, 15 bp, Homo sapiens
aatgttacaatgtca

SEQ ID NO: 1915549 - DNA, 15 bp, Homo sapiens
atgttacaatgtcat

SEQ ID NO: 1915550 - DNA, 15 bp, Homo sapiens
tgttacaatgtcatc

SEQ ID NO: 1915551 - DNA, 15 bp, Homo sapiens
gttacaatgtcatct

SEQ ID NO: 1915552 - DNA, 15 bp, Homo sapiens
ttacaatgtcatctt

SEQ ID NO: 1915553 - DNA, 15 bp, Homo sapiens
tacaatgtcatcttt

SEQ ID NO: 1915554 - DNA, 15 bp, Homo sapiens
acaatgtcatctttt

SEQ ID NO: 1915555 - DNA, 15 bp, Homo sapiens
caatgtcatcttttc

SEQ ID NO: 1915556 - DNA, 15 bp, Homo sapiens
aatgtcatcttttcc

SEQ ID NO: 1915557 - DNA, 15 bp, Homo sapiens
atgtcatcttttcca

SEQ ID NO: 1915558 - DNA, 15 bp, Homo sapiens
tgtcatcttttccaa

SEQ ID NO: 1915559 - DNA, 15 bp, Homo sapiens
gtcatcttttccaaa

SEQ ID NO: 1915560 - DNA, 15 bp, Homo sapiens
tcatcttttccaaaa

SEQ ID NO: 1915561 - DNA, 15 bp, Homo sapiens
catcttttccaaaaa

SEQ ID NO: 1915562 - DNA, 15 bp, Homo sapiens
atcttttccaaaaat

SEQ ID NO: 1915563 - DNA, 15 bp, Homo sapiens
tcttttccaaaaatt

SEQ ID NO: 1915564 - DNA, 15 bp, Homo sapiens
cttttccaaaaatta

SEQ ID NO: 1915565 - DNA, 15 bp, Homo sapiens
ttttccaaaaattat

SEQ ID NO: 1915566 - DNA, 15 bp, Homo sapiens
tttccaaaaattatt

SEQ ID NO: 1915567 - DNA, 15 bp, Homo sapiens
tccaaaaattatttc

SEQ ID NO: 1915568 - DNA, 15 bp, Homo sapiens
ccaaaaattatttcc

SEQ ID NO: 1915569 - DNA, 15 bp, Homo sapiens
caaaaattatttcca

SEQ ID NO: 1915570 - DNA, 15 bp, Homo sapiens
aaaaattatttccac

SEQ ID NO: 1915571 - DNA, 15 bp, Homo sapiens
aaaattatttccact

SEQ ID NO: 1915572 - DNA, 15 bp, Homo sapiens
aaattatttccactt

SEQ ID NO: 1915573 - DNA, 15 bp, Homo sapiens
aattatttccactta

SEQ ID NO: 1915574 - DNA, 15 bp, Homo sapiens
attatttccacttac

SEQ ID NO: 1915575 - DNA, 15 bp, Homo sapiens
ttatttccacttact

SEQ ID NO: 1915576 - DNA, 15 bp, Homo sapiens
tatttccacttactt

SEQ ID NO: 1915577 - DNA, 15 bp, Homo sapiens
atttccacttacttc

SEQ ID NO: 1915578 - DNA, 15 bp, Homo sapiens
tttccacttacttct

SEQ ID NO: 1915579 - DNA, 15 bp, Homo sapiens
ttccacttacttctg

SEQ ID NO: 1915580 - DNA, 15 bp, Homo sapiens
tccacttacttctgc

SEQ ID NO: 1915581 - DNA, 15 bp, Homo sapiens
ccacttacttctgcc

SEQ ID NO: 1915582 - DNA, 15 bp, Homo sapiens
cacttacttctgcca

SEQ ID NO: 1915583 - DNA, 15 bp, Homo sapiens
acttacttctgccag

SEQ ID NO: 1915584 - DNA, 15 bp, Homo sapiens
cttacttctgccagg

SEQ ID NO: 1915585 - DNA, 15 bp, Homo sapiens
ttacttctgccaggt

SEQ ID NO: 1915586 - DNA, 15 bp, Homo sapiens
tacttctgccaggta

SEQ ID NO: 1915587 - DNA, 15 bp, Homo sapiens
acttctgccaggtac

SEQ ID NO: 1915588 - DNA, 15 bp, Homo sapiens
cttctgccaggtaca

SEQ ID NO: 1915589 - DNA, 15 bp, Homo sapiens
ttctgccaggtacaa

SEQ ID NO: 1915590 - DNA, 15 bp, Homo sapiens
tctgccaggtacaag

SEQ ID NO: 1915591 - DNA, 15 bp, Homo sapiens
ctgccaggtacaagc

SEQ ID NO: 1915592 - DNA, 15 bp, Homo sapiens
tgccaggtacaagcc

SEQ ID NO: 1915593 - DNA, 15 bp, Homo sapiens
gccaggtacaagcca

SEQ ID NO: 1915594 - DNA, 15 bp, Homo sapiens
ccaggtacaagccat

SEQ ID NO: 1915595 - DNA, 15 bp, Homo sapiens
caggtacaagccatt

SEQ ID NO: 1915596 - DNA, 15 bp, Homo sapiens
aggtacaagccattc

SEQ ID NO: 1915597 - DNA, 15 bp, Homo sapiens
ggtacaagccattca

SEQ ID NO: 1915598 - DNA, 15 bp, Homo sapiens
gtacaagccattcag

SEQ ID NO: 1915599 - DNA, 15 bp, Homo sapiens
tacaagccattcagg

SEQ ID NO: 1915600 - DNA, 15 bp, Homo sapiens
acaagccattcagga

SEQ ID NO: 1915601 - DNA, 15 bp, Homo sapiens
caagccattcaggat

SEQ ID NO: 1915602 - DNA, 15 bp, Homo sapiens
aagccattcaggatc

SEQ ID NO: 1915603 - DNA, 15 bp, Homo sapiens
agccattcaggatca

SEQ ID NO: 1915604 - DNA, 15 bp, Homo sapiens
gccattcaggatcac

SEQ ID NO: 1915605 - DNA, 15 bp, Homo sapiens
ccattcaggatcacc

SEQ ID NO: 1915606 - DNA, 15 bp, Homo sapiens
cattcaggatcacct

SEQ ID NO: 1915607 - DNA, 15 bp, Homo sapiens
attcaggatcacctc

SEQ ID NO: 1915608 - DNA, 15 bp, Homo sapiens
ttcaggatcacctca

SEQ ID NO: 1915609 - DNA, 15 bp, Homo sapiens
tcaggatcacctcat

SEQ ID NO: 1915610 - DNA, 15 bp, Homo sapiens
caggatcacctcatt

SEQ ID NO: 1915611 - DNA, 15 bp, Homo sapiens
aggatcacctcattc

SEQ ID NO: 1915612 - DNA, 15 bp, Homo sapiens
ggatcacctcattct

SEQ ID NO: 1915613 - DNA, 15 bp, Homo sapiens
gatcacctcattctg

SEQ ID NO: 1915614 - DNA, 15 bp, Homo sapiens
atcacctcattctga

SEQ ID NO: 1915615 - DNA, 15 bp, Homo sapiens
tcacctcattctgac

SEQ ID NO: 1915616 - DNA, 15 bp, Homo sapiens
cacctcattctgact

SEQ ID NO: 1915617 - DNA, 15 bp, Homo sapiens
acctcattctgactt

SEQ ID NO: 1915618 - DNA, 15 bp, Homo sapiens
cctcattctgacttc

SEQ ID NO: 1915619 - DNA, 15 bp, Homo sapiens
ctcattctgacttca

SEQ ID NO: 1915620 - DNA, 15 bp, Homo sapiens
tcattctgacttcat

SEQ ID NO: 1915621 - DNA, 15 bp, Homo sapiens
cattctgacttcata

SEQ ID NO: 1915622 - DNA, 15 bp, Homo sapiens
attctgacttcataa

SEQ ID NO: 1915623 - DNA, 15 bp, Homo sapiens
ttctgacttcataaa

SEQ ID NO: 1915624 - DNA, 15 bp, Homo sapiens
tctgacttcataaac

SEQ ID NO: 1915625 - DNA, 15 bp, Homo sapiens
ctgacttcataaact

SEQ ID NO: 1915626 - DNA, 15 bp, Homo sapiens
tgacttcataaactg

SEQ ID NO: 1915627 - DNA, 15 bp, Homo sapiens
gacttcataaactgt

SEQ ID NO: 1915628 - DNA, 15 bp, Homo sapiens
acttcataaactgtg

SEQ ID NO: 1915629 - DNA, 15 bp, Homo sapiens
cttcataaactgtga

SEQ ID NO: 1915630 - DNA, 15 bp, Homo sapiens
ttcataaactgtgat

SEQ ID NO: 1915631 - DNA, 15 bp, Homo sapiens
tcataaactgtgata

SEQ ID NO: 1915632 - DNA, 15 bp, Homo sapiens
cataaactgtgatat

SEQ ID NO: 1915633 - DNA, 15 bp, Homo sapiens
ataaactgtgatatt

SEQ ID NO: 1915634 - DNA, 15 bp, Homo sapiens
taaactgtgatattc

SEQ ID NO: 1915635 - DNA, 15 bp, Homo sapiens
aaactgtgatattca

SEQ ID NO: 1915636 - DNA, 15 bp, Homo sapiens
aactgtgatattcaa

SEQ ID NO: 1915637 - DNA, 15 bp, Homo sapiens
actgtgatattcaaa

SEQ ID NO: 1915638 - DNA, 15 bp, Homo sapiens
ctgtgatattcaaat

SEQ ID NO: 1915639 - DNA, 15 bp, Homo sapiens
tgtgatattcaaatc

SEQ ID NO: 1915640 - DNA, 15 bp, Homo sapiens
gtgatattcaaatct

SEQ ID NO: 1915641 - DNA, 15 bp, Homo sapiens
tgatattcaaatctg

SEQ ID NO: 1915642 - DNA, 15 bp, Homo sapiens
gatattcaaatctga

SEQ ID NO: 1915643 - DNA, 15 bp, Homo sapiens
atattcaaatctgaa

SEQ ID NO: 1915644 - DNA, 15 bp, Homo sapiens
tattcaaatctgaac

SEQ ID NO: 1915645 - DNA, 15 bp, Homo sapiens
attcaaatctgaact

SEQ ID NO: 1915646 - DNA, 15 bp, Homo sapiens
ttcaaatctgaactg

SEQ ID NO: 1915647 - DNA, 15 bp, Homo sapiens
tcaaatctgaactga

SEQ ID NO: 1915648 - DNA, 15 bp, Homo sapiens
caaatctgaactgaa

SEQ ID NO: 1915649 - DNA, 15 bp, Homo sapiens
aaatctgaactgaag

SEQ ID NO: 1915650 - DNA, 15 bp, Homo sapiens
aatctgaactgaagt

SEQ ID NO: 1915651 - DNA, 15 bp, Homo sapiens
atctgaactgaagtc

SEQ ID NO: 1915652 - DNA, 15 bp, Homo sapiens
tctgaactgaagtcc

SEQ ID NO: 1915653 - DNA, 15 bp, Homo sapiens
ctgaactgaagtccc

SEQ ID NO: 1915654 - DNA, 15 bp, Homo sapiens
tgaactgaagtccct

SEQ ID NO: 1915655 - DNA, 15 bp, Homo sapiens
gaactgaagtcccta

SEQ ID NO: 1915656 - DNA, 15 bp, Homo sapiens
aactgaagtccctat

SEQ ID NO: 1915657 - DNA, 15 bp, Homo sapiens
actgaagtccctatg

SEQ ID NO: 1915658 - DNA, 15 bp, Homo sapiens
ctgaagtccctatga

SEQ ID NO: 1915659 - DNA, 15 bp, Homo sapiens
tgaagtccctatgag

SEQ ID NO: 1915660 - DNA, 15 bp, Homo sapiens
gaagtccctatgagg

SEQ ID NO: 1915661 - DNA, 15 bp, Homo sapiens
aagtccctatgagga

SEQ ID NO: 1915662 - DNA, 15 bp, Homo sapiens
agtccctatgaggac

SEQ ID NO: 1915663 - DNA, 15 bp, Homo sapiens
gtccctatgaggacc

SEQ ID NO: 1915664 - DNA, 15 bp, Homo sapiens
tccctatgaggacct

SEQ ID NO: 1915665 - DNA, 15 bp, Homo sapiens
ccctatgaggaccta

SEQ ID NO: 1915666 - DNA, 15 bp, Homo sapiens
cctatgaggacctat

SEQ ID NO: 1915667 - DNA, 15 bp, Homo sapiens
ctatgaggacctatc

SEQ ID NO: 1915668 - DNA, 15 bp, Homo sapiens
tatgaggacctatct

SEQ ID NO: 1915669 - DNA, 15 bp, Homo sapiens
atgaggacctatcta

SEQ ID NO: 1915670 - DNA, 15 bp, Homo sapiens
tgaggacctatctat

SEQ ID NO: 1915671 - DNA, 15 bp, Homo sapiens
gaggacctatctatt

SEQ ID NO: 1915672 - DNA, 15 bp, Homo sapiens
aggacctatctattt

SEQ ID NO: 1915673 - DNA, 15 bp, Homo sapiens
ggacctatctatttc

SEQ ID NO: 1915674 - DNA, 15 bp, Homo sapiens
gacctatctatttca

SEQ ID NO: 1915675 - DNA, 15 bp, Homo sapiens
acctatctatttcag

SEQ ID NO: 1915676 - DNA, 15 bp, Homo sapiens
cctatctatttcagg

SEQ ID NO: 1915677 - DNA, 15 bp, Homo sapiens
ctatctatttcaggc

SEQ ID NO: 1915678 - DNA, 15 bp, Homo sapiens
tatctatttcaggct

SEQ ID NO: 1915679 - DNA, 15 bp, Homo sapiens
atctatttcaggctg

SEQ ID NO: 1915680 - DNA, 15 bp, Homo sapiens
tctatttcaggctga

SEQ ID NO: 1915681 - DNA, 15 bp, Homo sapiens
ctatttcaggctgac

SEQ ID NO: 1915682 - DNA, 15 bp, Homo sapiens
tatttcaggctgact

SEQ ID NO: 1915683 - DNA, 15 bp, Homo sapiens
atttcaggctgacta

SEQ ID NO: 1915684 - DNA, 15 bp, Homo sapiens
tttcaggctgactat

SEQ ID NO: 1915685 - DNA, 15 bp, Homo sapiens
ttcaggctgactatt

SEQ ID NO: 1915686 - DNA, 15 bp, Homo sapiens
tcaggctgactattc

SEQ ID NO: 1915687 - DNA, 15 bp, Homo sapiens
caggctgactattct

SEQ ID NO: 1915688 - DNA, 15 bp, Homo sapiens
aggctgactattctc

SEQ ID NO: 1915689 - DNA, 15 bp, Homo sapiens
ggctgactattctcc

SEQ ID NO: 1915690 - DNA, 15 bp, Homo sapiens
gctgactattctccc

SEQ ID NO: 1915691 - DNA, 15 bp, Homo sapiens
ctgactattctccca

SEQ ID NO: 1915692 - DNA, 15 bp, Homo sapiens
tgactattctcccag

SEQ ID NO: 1915693 - DNA, 15 bp, Homo sapiens
gactattctcccagg

SEQ ID NO: 1915694 - DNA, 15 bp, Homo sapiens
actattctcccagga

SEQ ID NO: 1915695 - DNA, 15 bp, Homo sapiens
ctattctcccaggat

SEQ ID NO: 1915696 - DNA, 15 bp, Homo sapiens
tattctcccaggatg

SEQ ID NO: 1915697 - DNA, 15 bp, Homo sapiens
attctcccaggatgc

SEQ ID NO: 1915698 - DNA, 15 bp, Homo sapiens
ttctcccaggatgca

SEQ ID NO: 1915699 - DNA, 15 bp, Homo sapiens
tctcccaggatgcag

SEQ ID NO: 1915700 - DNA, 15 bp, Homo sapiens
ctcccaggatgcagc

SEQ ID NO: 1915701 - DNA, 15 bp, Homo sapiens
tcccaggatgcagcc

SEQ ID NO: 1915702 - DNA, 15 bp, Homo sapiens
cccaggatgcagccc

SEQ ID NO: 1915703 - DNA, 15 bp, Homo sapiens
ccaggatgcagccct

SEQ ID NO: 1915704 - DNA, 15 bp, Homo sapiens
caggatgcagccctt

SEQ ID NO: 1915705 - DNA, 15 bp, Homo sapiens
aggatgcagcccttc

SEQ ID NO: 1915706 - DNA, 15 bp, Homo sapiens
ggatgcagcccttca

SEQ ID NO: 1915707 - DNA, 15 bp, Homo sapiens
gatgcagcccttcag

SEQ ID NO: 1915708 - DNA, 15 bp, Homo sapiens
atgcagcccttcaga

SEQ ID NO: 1915709 - DNA, 15 bp, Homo sapiens
tgcagcccttcagaa

SEQ ID NO: 1915710 - DNA, 15 bp, Homo sapiens
gcagcccttcagaat

SEQ ID NO: 1915711 - DNA, 15 bp, Homo sapiens
cagcccttcagaatc

SEQ ID NO: 1915712 - DNA, 15 bp, Homo sapiens
agcccttcagaatcc

SEQ ID NO: 1915713 - DNA, 15 bp, Homo sapiens
gcccttcagaatccc

SEQ ID NO: 1915714 - DNA, 15 bp, Homo sapiens
cccttcagaatccca

SEQ ID NO: 1915715 - DNA, 15 bp, Homo sapiens
ccttcagaatcccaa

SEQ ID NO: 1915716 - DNA, 15 bp, Homo sapiens
cttcagaatcccaac

SEQ ID NO: 1915717 - DNA, 15 bp, Homo sapiens
ttcagaatcccaacc

SEQ ID NO: 1915718 - DNA, 15 bp, Homo sapiens
tcagaatcccaaccc

SEQ ID NO: 1915719 - DNA, 15 bp, Homo sapiens
cagaatcccaaccca

SEQ ID NO: 1915720 - DNA, 15 bp, Homo sapiens
agaatcccaacccaa

SEQ ID NO: 1915721 - DNA, 15 bp, Homo sapiens
gaatcccaacccaaa

SEQ ID NO: 1915722 - DNA, 15 bp, Homo sapiens
aatcccaacccaaag

SEQ ID NO: 1915723 - DNA, 15 bp, Homo sapiens
atcccaacccaaagt

SEQ ID NO: 1915724 - DNA, 15 bp, Homo sapiens
tcccaacccaaagtg

SEQ ID NO: 1915725 - DNA, 15 bp, Homo sapiens
cccaacccaaagtga

SEQ ID NO: 1915726 - DNA, 15 bp, Homo sapiens
ccaacccaaagtgaa

SEQ ID NO: 1915727 - DNA, 15 bp, Homo sapiens
caacccaaagtgaat

SEQ ID NO: 1915728 - DNA, 15 bp, Homo sapiens
aacccaaagtgaata

SEQ ID NO: 1915729 - DNA, 15 bp, Homo sapiens
acccaaagtgaatag

SEQ ID NO: 1915730 - DNA, 15 bp, Homo sapiens
cccaaagtgaatagg

SEQ ID NO: 1915731 - DNA, 15 bp, Homo sapiens
ccaaagtgaataggg

SEQ ID NO: 1915732 - DNA, 15 bp, Homo sapiens
caaagtgaatagggg

SEQ ID NO: 1915733 - DNA, 15 bp, Homo sapiens
aaagtgaatagggga

SEQ ID NO: 1915734 - DNA, 15 bp, Homo sapiens
aagtgaataggggaa

SEQ ID NO: 1915735 - DNA, 15 bp, Homo sapiens
agtgaataggggaat

SEQ ID NO: 1915736 - DNA, 15 bp, Homo sapiens
gtgaataggggaatt

SEQ ID NO: 1915737 - DNA, 15 bp, Homo sapiens
tgaataggggaatta

SEQ ID NO: 1915738 - DNA, 15 bp, Homo sapiens
gaataggggaattat

SEQ ID NO: 1915739 - DNA, 15 bp, Homo sapiens
aataggggaattatc

SEQ ID NO: 1915740 - DNA, 15 bp, Homo sapiens
ataggggaattatca

SEQ ID NO: 1915741 - DNA, 15 bp, Homo sapiens
taggggaattatcaa

SEQ ID NO: 1915742 - DNA, 15 bp, Homo sapiens
aggggaattatcaag

SEQ ID NO: 1915743 - DNA, 15 bp, Homo sapiens
ggggaattatcaaga

SEQ ID NO: 1915744 - DNA, 15 bp, Homo sapiens
gggaattatcaagac

SEQ ID NO: 1915745 - DNA, 15 bp, Homo sapiens
ggaattatcaagacc

SEQ ID NO: 1915746 - DNA, 15 bp, Homo sapiens
gaattatcaagaccc

SEQ ID NO: 1915747 - DNA, 15 bp, Homo sapiens
aattatcaagacccc

SEQ ID NO: 1915748 - DNA, 15 bp, Homo sapiens
attatcaagacccca

SEQ ID NO: 1915749 - DNA, 15 bp, Homo sapiens
ttatcaagaccccag

SEQ ID NO: 1915750 - DNA, 15 bp, Homo sapiens
tatcaagaccccagc

SEQ ID NO: 1915751 - DNA, 15 bp, Homo sapiens
atcaagaccccagct

SEQ ID NO: 1915752 - DNA, 15 bp, Homo sapiens
tcaagaccccagctt

SEQ ID NO: 1915753 - DNA, 15 bp, Homo sapiens
caagaccccagcttg

SEQ ID NO: 1915754 - DNA, 15 bp, Homo sapiens
aagaccccagcttga

SEQ ID NO: 1915755 - DNA, 15 bp, Homo sapiens
agaccccagcttgat

SEQ ID NO: 1915756 - DNA, 15 bp, Homo sapiens
gaccccagcttgata

SEQ ID NO: 1915757 - DNA, 15 bp, Homo sapiens
accccagcttgatag

SEQ ID NO: 1915758 - DNA, 15 bp, Homo sapiens
ccccagcttgatagg

SEQ ID NO: 1915759 - DNA, 15 bp, Homo sapiens
cccagcttgataggc

SEQ ID NO: 1915760 - DNA, 15 bp, Homo sapiens
ccagcttgataggcc

SEQ ID NO: 1915761 - DNA, 15 bp, Homo sapiens
cagcttgataggccc

SEQ ID NO: 1915762 - DNA, 15 bp, Homo sapiens
agcttgataggccca

SEQ ID NO: 1915763 - DNA, 15 bp, Homo sapiens
gcttgataggcccac

SEQ ID NO: 1915764 - DNA, 15 bp, Homo sapiens
cttgataggcccaca

SEQ ID NO: 1915765 - DNA, 15 bp, Homo sapiens
ttgataggcccacaa

SEQ ID NO: 1915766 - DNA, 15 bp, Homo sapiens
tgataggcccacaat

SEQ ID NO: 1915767 - DNA, 15 bp, Homo sapiens
gataggcccacaatc

SEQ ID NO: 1915768 - DNA, 15 bp, Homo sapiens
ataggcccacaatca

SEQ ID NO: 1915769 - DNA, 15 bp, Homo sapiens
taggcccacaatcat

SEQ ID NO: 1915770 - DNA, 15 bp, Homo sapiens
aggcccacaatcata

SEQ ID NO: 1915771 - DNA, 15 bp, Homo sapiens
ggcccacaatcataa

SEQ ID NO: 1915772 - DNA, 15 bp, Homo sapiens
gcccacaatcataat

SEQ ID NO: 1915773 - DNA, 15 bp, Homo sapiens
cccacaatcataatt

SEQ ID NO: 1915774 - DNA, 15 bp, Homo sapiens
ccacaatcataattc

SEQ ID NO: 1915775 - DNA, 15 bp, Homo sapiens
cacaatcataattcc

SEQ ID NO: 1915776 - DNA, 15 bp, Homo sapiens
acaatcataattcct

SEQ ID NO: 1915777 - DNA, 15 bp, Homo sapiens
caatcataattcctg

SEQ ID NO: 1915778 - DNA, 15 bp, Homo sapiens
aatcataattcctgc

SEQ ID NO: 1915779 - DNA, 15 bp, Homo sapiens
atcataattcctgct

SEQ ID NO: 1915780 - DNA, 15 bp, Homo sapiens
tcataattcctgctc

SEQ ID NO: 1915781 - DNA, 15 bp, Homo sapiens
cataattcctgctca

SEQ ID NO: 1915782 - DNA, 15 bp, Homo sapiens
ataattcctgctcat

SEQ ID NO: 1915783 - DNA, 15 bp, Homo sapiens
taattcctgctcata

SEQ ID NO: 1915784 - DNA, 15 bp, Homo sapiens
tagagatttcatagt

SEQ ID NO: 1915785 - DNA, 15 bp, Homo sapiens
agagatttcatagtt

SEQ ID NO: 1915786 - DNA, 15 bp, Homo sapiens
gagatttcatagttt

SEQ ID NO: 1915787 - DNA, 15 bp, Homo sapiens
agatttcatagttta

SEQ ID NO: 1915788 - DNA, 15 bp, Homo sapiens
gatttcatagtttat

SEQ ID NO: 1915789 - DNA, 15 bp, Homo sapiens
atttcatagtttatt

SEQ ID NO: 1915790 - DNA, 15 bp, Homo sapiens
tttcatagtttatta

SEQ ID NO: 1915791 - DNA, 15 bp, Homo sapiens
ttcatagtttattat

SEQ ID NO: 1915792 - DNA, 15 bp, Homo sapiens
tcatagtttattatg

SEQ ID NO: 1915793 - DNA, 15 bp, Homo sapiens
catagtttattatgt

SEQ ID NO: 1915794 - DNA, 15 bp, Homo sapiens
atagtttattatgtg

SEQ ID NO: 1915795 - DNA, 15 bp, Homo sapiens
tagtttattatgtga

SEQ ID NO: 1915796 - DNA, 15 bp, Homo sapiens
agtttattatgtgat

SEQ ID NO: 1915797 - DNA, 15 bp, Homo sapiens
gtttattatgtgatg

SEQ ID NO: 1915798 - DNA, 15 bp, Homo sapiens
tttattatgtgatgc

SEQ ID NO: 1915799 - DNA, 15 bp, Homo sapiens
ttattatgtgatgct

SEQ ID NO: 1915800 - DNA, 15 bp, Homo sapiens
tattatgtgatgctt

SEQ ID NO: 1915801 - DNA, 15 bp, Homo sapiens
attatgtgatgcttg

SEQ ID NO: 1915802 - DNA, 15 bp, Homo sapiens
ttatgtgatgcttga

SEQ ID NO: 1915803 - DNA, 15 bp, Homo sapiens
tatgtgatgcttgat

SEQ ID NO: 1915804 - DNA, 15 bp, Homo sapiens
atgtgatgcttgatt

SEQ ID NO: 1915805 - DNA, 15 bp, Homo sapiens
tgtgatgcttgattg

SEQ ID NO: 1915806 - DNA, 15 bp, Homo sapiens
gtgatgcttgattga

SEQ ID NO: 1915807 - DNA, 15 bp, Homo sapiens
tgatgcttgattgac

SEQ ID NO: 1915808 - DNA, 15 bp, Homo sapiens
gatgcttgattgacg

SEQ ID NO: 1915809 - DNA, 15 bp, Homo sapiens
atgcttgattgacga

SEQ ID NO: 1915810 - DNA, 15 bp, Homo sapiens
tgcttgattgacgac

SEQ ID NO: 1915811 - DNA, 15 bp, Homo sapiens
gcttgattgacgact

SEQ ID NO: 1915812 - DNA, 15 bp, Homo sapiens
cttgattgacgactt

SEQ ID NO: 1915813 - DNA, 15 bp, Homo sapiens
ttgattgacgacttt

SEQ ID NO: 1915814 - DNA, 15 bp, Homo sapiens
tgattgacgactttt

SEQ ID NO: 1915815 - DNA, 15 bp, Homo sapiens
gattgacgactttta

SEQ ID NO: 1915816 - DNA, 15 bp, Homo sapiens
attgacgacttttag

SEQ ID NO: 1915817 - DNA, 15 bp, Homo sapiens
ttgacgacttttaga

SEQ ID NO: 1915818 - DNA, 15 bp, Homo sapiens
tgacgacttttagat

SEQ ID NO: 1915819 - DNA, 15 bp, Homo sapiens
gacgacttttagatg

SEQ ID NO: 1915820 - DNA, 15 bp, Homo sapiens
acgacttttagatga

SEQ ID NO: 1915821 - DNA, 15 bp, Homo sapiens
cgacttttagatgat

SEQ ID NO: 1915822 - DNA, 15 bp, Homo sapiens
gacttttagatgatc

SEQ ID NO: 1915823 - DNA, 15 bp, Homo sapiens
acttttagatgatca

SEQ ID NO: 1915824 - DNA, 15 bp, Homo sapiens
cttttagatgatcat

SEQ ID NO: 1915825 - DNA, 15 bp, Homo sapiens
ttttagatgatcatg

SEQ ID NO: 1915826 - DNA, 15 bp, Homo sapiens
tttagatgatcatgt

SEQ ID NO: 1915827 - DNA, 15 bp, Homo sapiens
ttagatgatcatgtg

SEQ ID NO: 1915828 - DNA, 15 bp, Homo sapiens
tagatgatcatgtgg

SEQ ID NO: 1915829 - DNA, 15 bp, Homo sapiens
agatgatcatgtgga

SEQ ID NO: 1915830 - DNA, 15 bp, Homo sapiens
gatgatcatgtggac

SEQ ID NO: 1915831 - DNA, 15 bp, Homo sapiens
atgatcatgtggaca

SEQ ID NO: 1915832 - DNA, 15 bp, Homo sapiens
tgatcatgtggacaa

SEQ ID NO: 1915833 - DNA, 15 bp, Homo sapiens
gatcatgtggacaaa

SEQ ID NO: 1915834 - DNA, 15 bp, Homo sapiens
atcatgtggacaaat

SEQ ID NO: 1915835 - DNA, 15 bp, Homo sapiens
tcatgtggacaaatg

SEQ ID NO: 1915836 - DNA, 15 bp, Homo sapiens
catgtggacaaatgt

SEQ ID NO: 1915837 - DNA, 15 bp, Homo sapiens
atgtggacaaatgtg

SEQ ID NO: 1915838 - DNA, 15 bp, Homo sapiens
tgtggacaaatgtga

SEQ ID NO: 1915839 - DNA, 15 bp, Homo sapiens
gtggacaaatgtgaa

SEQ ID NO: 1915840 - DNA, 15 bp, Homo sapiens
tggacaaatgtgaaa

SEQ ID NO: 1915841 - DNA, 15 bp, Homo sapiens
ggacaaatgtgaaat

SEQ ID NO: 1915842 - DNA, 15 bp, Homo sapiens
gacaaatgtgaaatt

SEQ ID NO: 1915843 - DNA, 15 bp, Homo sapiens
acaaatgtgaaattc

SEQ ID NO: 1915844 - DNA, 15 bp, Homo sapiens
caaatgtgaaattcc

SEQ ID NO: 1915845 - DNA, 15 bp, Homo sapiens
aaatgtgaaattcca

SEQ ID NO: 1915846 - DNA, 15 bp, Homo sapiens
aatgtgaaattccaa

SEQ ID NO: 1915847 - DNA, 15 bp, Homo sapiens
atgtgaaattccaat

SEQ ID NO: 1915848 - DNA, 15 bp, Homo sapiens
tgtgaaattccaata

SEQ ID NO: 1915849 - DNA, 15 bp, Homo sapiens
gtgaaattccaatag

SEQ ID NO: 1915850 - DNA, 15 bp, Homo sapiens
tgaaattccaataga

SEQ ID NO: 1915851 - DNA, 15 bp, Homo sapiens
gaaattccaatagaa

SEQ ID NO: 1915852 - DNA, 15 bp, Homo sapiens
aaattccaatagaaa

SEQ ID NO: 1915853 - DNA, 15 bp, Homo sapiens
aattccaatagaaaa

SEQ ID NO: 1915854 - DNA, 15 bp, Homo sapiens
attccaatagaaaaa

SEQ ID NO: 1915855 - DNA, 15 bp, Homo sapiens
ttccaatagaaaaac

SEQ ID NO: 1915856 - DNA, 15 bp, Homo sapiens
tccaatagaaaaaca

SEQ ID NO: 1915857 - DNA, 15 bp, Homo sapiens
ccaatagaaaaacat

SEQ ID NO: 1915858 - DNA, 15 bp, Homo sapiens
caatagaaaaacatg

SEQ ID NO: 1915859 - DNA, 15 bp, Homo sapiens
aatagaaaaacatgt

SEQ ID NO: 1915860 - DNA, 15 bp, Homo sapiens
atagaaaaacatgtt

SEQ ID NO: 1915861 - DNA, 15 bp, Homo sapiens
tagaaaaacatgtta

SEQ ID NO: 1915862 - DNA, 15 bp, Homo sapiens
agaaaaacatgttaa

SEQ ID NO: 1915863 - DNA, 15 bp, Homo sapiens
gaaaaacatgttaat

SEQ ID NO: 1915864 - DNA, 15 bp, Homo sapiens
aaaaacatgttaatg

SEQ ID NO: 1915865 - DNA, 15 bp, Homo sapiens
aaaacatgttaatga

SEQ ID NO: 1915866 - DNA, 15 bp, Homo sapiens
aaacatgttaatgaa

SEQ ID NO: 1915867 - DNA, 15 bp, Homo sapiens
aacatgttaatgaaa

SEQ ID NO: 1915868 - DNA, 15 bp, Homo sapiens
acatgttaatgaaaa

SEQ ID NO: 1915869 - DNA, 15 bp, Homo sapiens
catgttaatgaaaat

SEQ ID NO: 1915870 - DNA, 15 bp, Homo sapiens
atgttaatgaaaatt

SEQ ID NO: 1915871 - DNA, 15 bp, Homo sapiens
tgttaatgaaaattt

SEQ ID NO: 1915872 - DNA, 15 bp, Homo sapiens
gttaatgaaaattta

SEQ ID NO: 1915873 - DNA, 15 bp, Homo sapiens
ttaatgaaaatttat

SEQ ID NO: 1915874 - DNA, 15 bp, Homo sapiens
taatgaaaatttatt

SEQ ID NO: 1915875 - DNA, 15 bp, Homo sapiens
aatgaaaatttattg

SEQ ID NO: 1915876 - DNA, 15 bp, Homo sapiens
atgaaaatttattga

SEQ ID NO: 1915877 - DNA, 15 bp, Homo sapiens
tgaaaatttattgag

SEQ ID NO: 1915878 - DNA, 15 bp, Homo sapiens
gaaaatttattgagg

SEQ ID NO: 1915879 - DNA, 15 bp, Homo sapiens
aaaatttattgaggc

SEQ ID NO: 1915880 - DNA, 15 bp, Homo sapiens
aaatttattgaggct

SEQ ID NO: 1915881 - DNA, 15 bp, Homo sapiens
aatttattgaggctt

SEQ ID NO: 1915882 - DNA, 15 bp, Homo sapiens
atttattgaggcttt

SEQ ID NO: 1915883 - DNA, 15 bp, Homo sapiens
tttattgaggcttta

SEQ ID NO: 1915884 - DNA, 15 bp, Homo sapiens
ttattgaggctttat

SEQ ID NO: 1915885 - DNA, 15 bp, Homo sapiens
tattgaggctttatg

SEQ ID NO: 1915886 - DNA, 15 bp, Homo sapiens
attgaggctttatgc

SEQ ID NO: 1915887 - DNA, 15 bp, Homo sapiens
ttgaggctttatgca

SEQ ID NO: 1915888 - DNA, 15 bp, Homo sapiens
tgaggctttatgcat

SEQ ID NO: 1915889 - DNA, 15 bp, Homo sapiens
gaggctttatgcata

SEQ ID NO: 1915890 - DNA, 15 bp, Homo sapiens
aggctttatgcatat

SEQ ID NO: 1915891 - DNA, 15 bp, Homo sapiens
ggctttatgcatatt

SEQ ID NO: 1915892 - DNA, 15 bp, Homo sapiens
gctttatgcatattc

SEQ ID NO: 1915893 - DNA, 15 bp, Homo sapiens
ctttatgcatattca

SEQ ID NO: 1915894 - DNA, 15 bp, Homo sapiens
tttatgcatattcat

SEQ ID NO: 1915895 - DNA, 15 bp, Homo sapiens
ttatgcatattcatc

SEQ ID NO: 1915896 - DNA, 15 bp, Homo sapiens
tatgcatattcatca

SEQ ID NO: 1915897 - DNA, 15 bp, Homo sapiens
atgcatattcatcac

SEQ ID NO: 1915898 - DNA, 15 bp, Homo sapiens
tgcatattcatcact

SEQ ID NO: 1915899 - DNA, 15 bp, Homo sapiens
gcatattcatcactt

SEQ ID NO: 1915900 - DNA, 15 bp, Homo sapiens
catattcatcactta

SEQ ID NO: 1915901 - DNA, 15 bp, Homo sapiens
atattcatcacttaa

SEQ ID NO: 1915902 - DNA, 15 bp, Homo sapiens
tattcatcacttaat

SEQ ID NO: 1915903 - DNA, 15 bp, Homo sapiens
attcatcacttaatc

SEQ ID NO: 1915904 - DNA, 15 bp, Homo sapiens
ttcatcacttaatcc

SEQ ID NO: 1915905 - DNA, 15 bp, Homo sapiens
tcatcacttaatcct

SEQ ID NO: 1915906 - DNA, 15 bp, Homo sapiens
catcacttaatcctc

SEQ ID NO: 1915907 - DNA, 15 bp, Homo sapiens
atcacttaatcctca

SEQ ID NO: 1915908 - DNA, 15 bp, Homo sapiens
tcacttaatcctcac

SEQ ID NO: 1915909 - DNA, 15 bp, Homo sapiens
cacttaatcctcaca

SEQ ID NO: 1915910 - DNA, 15 bp, Homo sapiens
acttaatcctcacaa

SEQ ID NO: 1915911 - DNA, 15 bp, Homo sapiens
cttaatcctcacaaa

SEQ ID NO: 1915912 - DNA, 15 bp, Homo sapiens
ttaatcctcacaaaa

SEQ ID NO: 1915913 - DNA, 15 bp, Homo sapiens
taatcctcacaaaaa

SEQ ID NO: 1915914 - DNA, 15 bp, Homo sapiens
aatcctcacaaaaaa

SEQ ID NO: 1915915 - DNA, 15 bp, Homo sapiens
atcctcacaaaaaaa

SEQ ID NO: 1915916 - DNA, 15 bp, Homo sapiens
tcctcacaaaaaaaa

SEQ ID NO: 1915917 - DNA, 15 bp, Homo sapiens
cctcacaaaaaaaac

SEQ ID NO: 1915918 - DNA, 15 bp, Homo sapiens
ctcacaaaaaaaacc

SEQ ID NO: 1915919 - DNA, 15 bp, Homo sapiens
tcacaaaaaaaaccc

SEQ ID NO: 1915920 - DNA, 15 bp, Homo sapiens
cacaaaaaaaaccct

SEQ ID NO: 1915921 - DNA, 15 bp, Homo sapiens
acaaaaaaaaccctg

SEQ ID NO: 1915922 - DNA, 15 bp, Homo sapiens
caaaaaaaaccctgc

SEQ ID NO: 1915923 - DNA, 15 bp, Homo sapiens
aaaaaaaaccctgcc

SEQ ID NO: 1915924 - DNA, 15 bp, Homo sapiens
aaaaaaaccctgcca

SEQ ID NO: 1915925 - DNA, 15 bp, Homo sapiens
aaaaaaccctgccat

SEQ ID NO: 1915926 - DNA, 15 bp, Homo sapiens
aaaaaccctgccatg

SEQ ID NO: 1915927 - DNA, 15 bp, Homo sapiens
aaaaccctgccatga

SEQ ID NO: 1915928 - DNA, 15 bp, Homo sapiens
aaaccctgccatgaa

SEQ ID NO: 1915929 - DNA, 15 bp, Homo sapiens
aaccctgccatgaag

SEQ ID NO: 1915930 - DNA, 15 bp, Homo sapiens
accctgccatgaagg

SEQ ID NO: 1915931 - DNA, 15 bp, Homo sapiens
ccctgccatgaaggc

SEQ ID NO: 1915932 - DNA, 15 bp, Homo sapiens
cctgccatgaaggct

SEQ ID NO: 1915933 - DNA, 15 bp, Homo sapiens
ctgccatgaaggctc

SEQ ID NO: 1915934 - DNA, 15 bp, Homo sapiens
tgccatgaaggctct

SEQ ID NO: 1915935 - DNA, 15 bp, Homo sapiens
gccatgaaggctcta

SEQ ID NO: 1915936 - DNA, 15 bp, Homo sapiens
ccatgaaggctctat

SEQ ID NO: 1915937 - DNA, 15 bp, Homo sapiens
catgaaggctctatt

SEQ ID NO: 1915938 - DNA, 15 bp, Homo sapiens
atgaaggctctatta

SEQ ID NO: 1915939 - DNA, 15 bp, Homo sapiens
tgaaggctctattaa

SEQ ID NO: 1915940 - DNA, 15 bp, Homo sapiens
gaaggctctattaac

SEQ ID NO: 1915941 - DNA, 15 bp, Homo sapiens
aaggctctattaacc

SEQ ID NO: 1915942 - DNA, 15 bp, Homo sapiens
aggctctattaaccc

SEQ ID NO: 1915943 - DNA, 15 bp, Homo sapiens
ggctctattaacccc

SEQ ID NO: 1915944 - DNA, 15 bp, Homo sapiens
gctctattaacccca

SEQ ID NO: 1915945 - DNA, 15 bp, Homo sapiens
ctctattaaccccat

SEQ ID NO: 1915946 - DNA, 15 bp, Homo sapiens
tctattaaccccatt

SEQ ID NO: 1915947 - DNA, 15 bp, Homo sapiens
ctattaaccccatta

SEQ ID NO: 1915948 - DNA, 15 bp, Homo sapiens
tattaaccccattat

SEQ ID NO: 1915949 - DNA, 15 bp, Homo sapiens
attaaccccattata

SEQ ID NO: 1915950 - DNA, 15 bp, Homo sapiens
ttaaccccattatat

SEQ ID NO: 1915951 - DNA, 15 bp, Homo sapiens
taaccccattatata

SEQ ID NO: 1915952 - DNA, 15 bp, Homo sapiens
aaccccattatatag

SEQ ID NO: 1915953 - DNA, 15 bp, Homo sapiens
accccattatatagt

SEQ ID NO: 1915954 - DNA, 15 bp, Homo sapiens
ccccattatatagtt

SEQ ID NO: 1915955 - DNA, 15 bp, Homo sapiens
cccattatatagttt

SEQ ID NO: 1915956 - DNA, 15 bp, Homo sapiens
ccattatatagtttc

SEQ ID NO: 1915957 - DNA, 15 bp, Homo sapiens
cattatatagtttca

SEQ ID NO: 1915958 - DNA, 15 bp, Homo sapiens
attatatagtttcaa

SEQ ID NO: 1915959 - DNA, 15 bp, Homo sapiens
ttatatagtttcaaa

SEQ ID NO: 1915960 - DNA, 15 bp, Homo sapiens
tatatagtttcaaaa

SEQ ID NO: 1915961 - DNA, 15 bp, Homo sapiens
atatagtttcaaaaa

SEQ ID NO: 1915962 - DNA, 15 bp, Homo sapiens
tatagtttcaaaaaa

SEQ ID NO: 1915963 - DNA, 15 bp, Homo sapiens
atagtttcaaaaaaa

SEQ ID NO: 1915964 - DNA, 15 bp, Homo sapiens
tagtttcaaaaaaat

SEQ ID NO: 1915965 - DNA, 15 bp, Homo sapiens
agtttcaaaaaaatt

SEQ ID NO: 1915966 - DNA, 15 bp, Homo sapiens
gtttcaaaaaaattg

SEQ ID NO: 1915967 - DNA, 15 bp, Homo sapiens
tttcaaaaaaattga

SEQ ID NO: 1915968 - DNA, 15 bp, Homo sapiens
ttcaaaaaaattgat

SEQ ID NO: 1915969 - DNA, 15 bp, Homo sapiens
tcaaaaaaattgatt

SEQ ID NO: 1915970 - DNA, 15 bp, Homo sapiens
caaaaaaattgattc

SEQ ID NO: 1915971 - DNA, 15 bp, Homo sapiens
aaaaaaattgattct

SEQ ID NO: 1915972 - DNA, 15 bp, Homo sapiens
aaaaaattgattctg

SEQ ID NO: 1915973 - DNA, 15 bp, Homo sapiens
aaaaattgattctga

SEQ ID NO: 1915974 - DNA, 15 bp, Homo sapiens
aaaattgattctgag

SEQ ID NO: 1915975 - DNA, 15 bp, Homo sapiens
aaattgattctgaga

SEQ ID NO: 1915976 - DNA, 15 bp, Homo sapiens
aattgattctgagag

SEQ ID NO: 1915977 - DNA, 15 bp, Homo sapiens
attgattctgagagg

SEQ ID NO: 1915978 - DNA, 15 bp, Homo sapiens
ttgattctgagaggc

SEQ ID NO: 1915979 - DNA, 15 bp, Homo sapiens
tgattctgagaggcc

SEQ ID NO: 1915980 - DNA, 15 bp, Homo sapiens
gattctgagaggcca

SEQ ID NO: 1915981 - DNA, 15 bp, Homo sapiens
attctgagaggccac

SEQ ID NO: 1915982 - DNA, 15 bp, Homo sapiens
ttctgagaggccaca

SEQ ID NO: 1915983 - DNA, 15 bp, Homo sapiens
tctgagaggccacat

SEQ ID NO: 1915984 - DNA, 15 bp, Homo sapiens
ctgagaggccacata

SEQ ID NO: 1915985 - DNA, 15 bp, Homo sapiens
tgagaggccacataa

SEQ ID NO: 1915986 - DNA, 15 bp, Homo sapiens
gagaggccacataac

SEQ ID NO: 1915987 - DNA, 15 bp, Homo sapiens
agaggccacataact

SEQ ID NO: 1915988 - DNA, 15 bp, Homo sapiens
gaggccacataactt

SEQ ID NO: 1915989 - DNA, 15 bp, Homo sapiens
aggccacataacttg

SEQ ID NO: 1915990 - DNA, 15 bp, Homo sapiens
ggccacataacttgc

SEQ ID NO: 1915991 - DNA, 15 bp, Homo sapiens
gccacataacttgcc

SEQ ID NO: 1915992 - DNA, 15 bp, Homo sapiens
ccacataacttgcct

SEQ ID NO: 1915993 - DNA, 15 bp, Homo sapiens
cacataacttgccta

SEQ ID NO: 1915994 - DNA, 15 bp, Homo sapiens
acataacttgcctac

SEQ ID NO: 1915995 - DNA, 15 bp, Homo sapiens
cataacttgcctaca

SEQ ID NO: 1915996 - DNA, 15 bp, Homo sapiens
ataacttgcctacag

SEQ ID NO: 1915997 - DNA, 15 bp, Homo sapiens
taacttgcctacagt

SEQ ID NO: 1915998 - DNA, 15 bp, Homo sapiens
aacttgcctacagtc

SEQ ID NO: 1915999 - DNA, 15 bp, Homo sapiens
acttgcctacagtca

SEQ ID NO: 1916000 - DNA, 15 bp, Homo sapiens
cttgcctacagtcac

SEQ ID NO: 1916001 - DNA, 15 bp, Homo sapiens
ttgcctacagtcaca

SEQ ID NO: 1916002 - DNA, 15 bp, Homo sapiens
tgcctacagtcacac

SEQ ID NO: 1916003 - DNA, 15 bp, Homo sapiens
gcctacagtcacaca

SEQ ID NO: 1916004 - DNA, 15 bp, Homo sapiens
cctacagtcacacag

SEQ ID NO: 1916005 - DNA, 15 bp, Homo sapiens
ctacagtcacacagt

SEQ ID NO: 1916006 - DNA, 15 bp, Homo sapiens
tacagtcacacagta

SEQ ID NO: 1916007 - DNA, 15 bp, Homo sapiens
acagtcacacagtaa

SEQ ID NO: 1916008 - DNA, 15 bp, Homo sapiens
cagtcacacagtaac

SEQ ID NO: 1916009 - DNA, 15 bp, Homo sapiens
agtcacacagtaacc

SEQ ID NO: 1916010 - DNA, 15 bp, Homo sapiens
gtcacacagtaacca

SEQ ID NO: 1916011 - DNA, 15 bp, Homo sapiens
tcacacagtaaccag

SEQ ID NO: 1916012 - DNA, 15 bp, Homo sapiens
cacacagtaaccaga

SEQ ID NO: 1916013 - DNA, 15 bp, Homo sapiens
acacagtaaccagat

SEQ ID NO: 1916014 - DNA, 15 bp, Homo sapiens
cacagtaaccagatc

SEQ ID NO: 1916015 - DNA, 15 bp, Homo sapiens
acagtaaccagatct

SEQ ID NO: 1916016 - DNA, 15 bp, Homo sapiens
cagtaaccagatctc

SEQ ID NO: 1916017 - DNA, 15 bp, Homo sapiens
agtaaccagatctcc

SEQ ID NO: 1916018 - DNA, 15 bp, Homo sapiens
gtaaccagatctcct

SEQ ID NO: 1916019 - DNA, 15 bp, Homo sapiens
taaccagatctcctg

SEQ ID NO: 1916020 - DNA, 15 bp, Homo sapiens
aaccagatctcctga

SEQ ID NO: 1916021 - DNA, 15 bp, Homo sapiens
accagatctcctgag

SEQ ID NO: 1916022 - DNA, 15 bp, Homo sapiens
ccagatctcctgagc

SEQ ID NO: 1916023 - DNA, 15 bp, Homo sapiens
cagatctcctgagca

SEQ ID NO: 1916024 - DNA, 15 bp, Homo sapiens
agatctcctgagcac

SEQ ID NO: 1916025 - DNA, 15 bp, Homo sapiens
gatctcctgagcaca

SEQ ID NO: 1916026 - DNA, 15 bp, Homo sapiens
atctcctgagcacaa

SEQ ID NO: 1916027 - DNA, 15 bp, Homo sapiens
tctcctgagcacaag

SEQ ID NO: 1916028 - DNA, 15 bp, Homo sapiens
ctcctgagcacaagt

SEQ ID NO: 1916029 - DNA, 15 bp, Homo sapiens
tcctgagcacaagtt

SEQ ID NO: 1916030 - DNA, 15 bp, Homo sapiens
cctgagcacaagtta

SEQ ID NO: 1916031 - DNA, 15 bp, Homo sapiens
ctgagcacaagttag

SEQ ID NO: 1916032 - DNA, 15 bp, Homo sapiens
tgagcacaagttagg

SEQ ID NO: 1916033 - DNA, 15 bp, Homo sapiens
gagcacaagttagga

SEQ ID NO: 1916034 - DNA, 15 bp, Homo sapiens
agcacaagttaggag

SEQ ID NO: 1916035 - DNA, 15 bp, Homo sapiens
gcacaagttaggagc

SEQ ID NO: 1916036 - DNA, 15 bp, Homo sapiens
cacaagttaggagct

SEQ ID NO: 1916037 - DNA, 15 bp, Homo sapiens
acaagttaggagctt

SEQ ID NO: 1916038 - DNA, 15 bp, Homo sapiens
caagttaggagcttg

SEQ ID NO: 1916039 - DNA, 15 bp, Homo sapiens
aagttaggagcttgt

SEQ ID NO: 1916040 - DNA, 15 bp, Homo sapiens
agttaggagcttgtt

SEQ ID NO: 1916041 - DNA, 15 bp, Homo sapiens
gttaggagcttgtta

SEQ ID NO: 1916042 - DNA, 15 bp, Homo sapiens
ttaggagcttgttat

SEQ ID NO: 1916043 - DNA, 15 bp, Homo sapiens
taggagcttgttata

SEQ ID NO: 1916044 - DNA, 15 bp, Homo sapiens
aggagcttgttatac

SEQ ID NO: 1916045 - DNA, 15 bp, Homo sapiens
ggagcttgttatact

SEQ ID NO: 1916046 - DNA, 15 bp, Homo sapiens
gagcttgttatacta

SEQ ID NO: 1916047 - DNA, 15 bp, Homo sapiens
agcttgttatactac

SEQ ID NO: 1916048 - DNA, 15 bp, Homo sapiens
gcttgttatactact

SEQ ID NO: 1916049 - DNA, 15 bp, Homo sapiens
cttgttatactactc

SEQ ID NO: 1916050 - DNA, 15 bp, Homo sapiens
ttgttatactactca

SEQ ID NO: 1916051 - DNA, 15 bp, Homo sapiens
tgttatactactcat

SEQ ID NO: 1916052 - DNA, 15 bp, Homo sapiens
gttatactactcata

SEQ ID NO: 1916053 - DNA, 15 bp, Homo sapiens
ttatactactcatat

SEQ ID NO: 1916054 - DNA, 15 bp, Homo sapiens
tatactactcatata

SEQ ID NO: 1916055 - DNA, 15 bp, Homo sapiens
atactactcatatat

SEQ ID NO: 1916056 - DNA, 15 bp, Homo sapiens
tactactcatatatt

SEQ ID NO: 1916057 - DNA, 15 bp, Homo sapiens
actactcatatattc

SEQ ID NO: 1916058 - DNA, 15 bp, Homo sapiens
ctactcatatattca

SEQ ID NO: 1916059 - DNA, 15 bp, Homo sapiens
tactcatatattcat

SEQ ID NO: 1916060 - DNA, 15 bp, Homo sapiens
actcatatattcatg

SEQ ID NO: 1916061 - DNA, 15 bp, Homo sapiens
ctcatatattcatga

SEQ ID NO: 1916062 - DNA, 15 bp, Homo sapiens
tcatatattcatgat

SEQ ID NO: 1916063 - DNA, 15 bp, Homo sapiens
catatattcatgatc

SEQ ID NO: 1916064 - DNA, 15 bp, Homo sapiens
atatattcatgatca

SEQ ID NO: 1916065 - DNA, 15 bp, Homo sapiens
tatattcatgatcac

SEQ ID NO: 1916066 - DNA, 15 bp, Homo sapiens
atattcatgatcacc

SEQ ID NO: 1916067 - DNA, 15 bp, Homo sapiens
tattcatgatcacca

SEQ ID NO: 1916068 - DNA, 15 bp, Homo sapiens
attcatgatcaccaa

SEQ ID NO: 1916069 - DNA, 15 bp, Homo sapiens
ttcatgatcaccaaa

SEQ ID NO: 1916070 - DNA, 15 bp, Homo sapiens
tcatgatcaccaaag

SEQ ID NO: 1916071 - DNA, 15 bp, Homo sapiens
catgatcaccaaagg

SEQ ID NO: 1916072 - DNA, 15 bp, Homo sapiens
atgatcaccaaagga

SEQ ID NO: 1916073 - DNA, 15 bp, Homo sapiens
tgatcaccaaaggac

SEQ ID NO: 1916074 - DNA, 15 bp, Homo sapiens
gatcaccaaaggact

SEQ ID NO: 1916075 - DNA, 15 bp, Homo sapiens
atcaccaaaggactt

SEQ ID NO: 1916076 - DNA, 15 bp, Homo sapiens
tcaccaaaggactta

SEQ ID NO: 1916077 - DNA, 15 bp, Homo sapiens
caccaaaggacttat

SEQ ID NO: 1916078 - DNA, 15 bp, Homo sapiens
accaaaggacttatc

SEQ ID NO: 1916079 - DNA, 15 bp, Homo sapiens
ccaaaggacttatca

SEQ ID NO: 1916080 - DNA, 15 bp, Homo sapiens
caaaggacttatcaa

SEQ ID NO: 1916081 - DNA, 15 bp, Homo sapiens
aaaggacttatcaat

SEQ ID NO: 1916082 - DNA, 15 bp, Homo sapiens
aaggacttatcaata

SEQ ID NO: 1916083 - DNA, 15 bp, Homo sapiens
aggacttatcaataa

SEQ ID NO: 1916084 - DNA, 15 bp, Homo sapiens
ggacttatcaataat

SEQ ID NO: 1916085 - DNA, 15 bp, Homo sapiens
gacttatcaataata

SEQ ID NO: 1916086 - DNA, 15 bp, Homo sapiens
acttatcaataataa

SEQ ID NO: 1916087 - DNA, 15 bp, Homo sapiens
cttatcaataataaa

SEQ ID NO: 1916088 - DNA, 15 bp, Homo sapiens
ttatcaataataaaa

SEQ ID NO: 1916089 - DNA, 15 bp, Homo sapiens
tatcaataataaaag

SEQ ID NO: 1916090 - DNA, 15 bp, Homo sapiens
atcaataataaaagt

SEQ ID NO: 1916091 - DNA, 15 bp, Homo sapiens
tcaataataaaagta

SEQ ID NO: 1916092 - DNA, 15 bp, Homo sapiens
caataataaaagtac

SEQ ID NO: 1916093 - DNA, 15 bp, Homo sapiens
aataataaaagtaca

SEQ ID NO: 1916094 - DNA, 15 bp, Homo sapiens
ataataaaagtacat

SEQ ID NO: 1916095 - DNA, 15 bp, Homo sapiens
taataaaagtacatg

SEQ ID NO: 1916096 - DNA, 15 bp, Homo sapiens
aataaaagtacatga

SEQ ID NO: 1916097 - DNA, 15 bp, Homo sapiens
ataaaagtacatgac

SEQ ID NO: 1916098 - DNA, 15 bp, Homo sapiens
taaaagtacatgact

SEQ ID NO: 1916099 - DNA, 15 bp, Homo sapiens
aaaagtacatgactg

SEQ ID NO: 1916100 - DNA, 15 bp, Homo sapiens
aaagtacatgactga

SEQ ID NO: 1916101 - DNA, 15 bp, Homo sapiens
aagtacatgactgat

SEQ ID NO: 1916102 - DNA, 15 bp, Homo sapiens
agtacatgactgatt

SEQ ID NO: 1916103 - DNA, 15 bp, Homo sapiens
gtacatgactgattg

SEQ ID NO: 1916104 - DNA, 15 bp, Homo sapiens
tacatgactgattga

SEQ ID NO: 1916105 - DNA, 15 bp, Homo sapiens
acatgactgattgac

SEQ ID NO: 1916106 - DNA, 15 bp, Homo sapiens
catgactgattgaca

SEQ ID NO: 1916107 - DNA, 15 bp, Homo sapiens
atgactgattgacaa

SEQ ID NO: 1916108 - DNA, 15 bp, Homo sapiens
tgactgattgacaaa

SEQ ID NO: 1916109 - DNA, 15 bp, Homo sapiens
gactgattgacaaat

SEQ ID NO: 1916110 - DNA, 15 bp, Homo sapiens
actgattgacaaata

SEQ ID NO: 1916111 - DNA, 15 bp, Homo sapiens
ctgattgacaaatag

SEQ ID NO: 1916112 - DNA, 15 bp, Homo sapiens
tgattgacaaatagt

SEQ ID NO: 1916113 - DNA, 15 bp, Homo sapiens
gattgacaaatagta

SEQ ID NO: 1916114 - DNA, 15 bp, Homo sapiens
attgacaaatagtag

SEQ ID NO: 1916115 - DNA, 15 bp, Homo sapiens
ttgacaaatagtaga

SEQ ID NO: 1916116 - DNA, 15 bp, Homo sapiens
tgacaaatagtagaa

SEQ ID NO: 1916117 - DNA, 15 bp, Homo sapiens
gacaaatagtagaat

SEQ ID NO: 1916118 - DNA, 15 bp, Homo sapiens
acaaatagtagaatt

SEQ ID NO: 1916119 - DNA, 15 bp, Homo sapiens
caaatagtagaattt

SEQ ID NO: 1916120 - DNA, 15 bp, Homo sapiens
aaatagtagaatttt

SEQ ID NO: 1916121 - DNA, 15 bp, Homo sapiens
aatagtagaattttc

SEQ ID NO: 1916122 - DNA, 15 bp, Homo sapiens
atagtagaattttca

SEQ ID NO: 1916123 - DNA, 15 bp, Homo sapiens
tagtagaattttcat

SEQ ID NO: 1916124 - DNA, 15 bp, Homo sapiens
agtagaattttcatt

SEQ ID NO: 1916125 - DNA, 15 bp, Homo sapiens
gtagaattttcattt

SEQ ID NO: 1916126 - DNA, 15 bp, Homo sapiens
tagaattttcatttt

SEQ ID NO: 1916127 - DNA, 15 bp, Homo sapiens
agaattttcattttc

SEQ ID NO: 1916128 - DNA, 15 bp, Homo sapiens
gaattttcattttca

SEQ ID NO: 1916129 - DNA, 15 bp, Homo sapiens
aattttcattttcag

SEQ ID NO: 1916130 - DNA, 15 bp, Homo sapiens
attttcattttcagg

SEQ ID NO: 1916131 - DNA, 15 bp, Homo sapiens
ttttcattttcaggg

SEQ ID NO: 1916132 - DNA, 15 bp, Homo sapiens
tttcattttcaggga

SEQ ID NO: 1916133 - DNA, 15 bp, Homo sapiens
ttcattttcagggac

SEQ ID NO: 1916134 - DNA, 15 bp, Homo sapiens
tcattttcagggaca

SEQ ID NO: 1916135 - DNA, 15 bp, Homo sapiens
cattttcagggacag

SEQ ID NO: 1916136 - DNA, 15 bp, Homo sapiens
attttcagggacagt

SEQ ID NO: 1916137 - DNA, 15 bp, Homo sapiens
ttttcagggacagtt

SEQ ID NO: 1916138 - DNA, 15 bp, Homo sapiens
tttcagggacagtta

SEQ ID NO: 1916139 - DNA, 15 bp, Homo sapiens
ttcagggacagttaa

SEQ ID NO: 1916140 - DNA, 15 bp, Homo sapiens
tcagggacagttaat

SEQ ID NO: 1916141 - DNA, 15 bp, Homo sapiens
cagggacagttaatg

SEQ ID NO: 1916142 - DNA, 15 bp, Homo sapiens
agggacagttaatgg

SEQ ID NO: 1916143 - DNA, 15 bp, Homo sapiens
gggacagttaatggt

SEQ ID NO: 1916144 - DNA, 15 bp, Homo sapiens
ggacagttaatggtc

SEQ ID NO: 1916145 - DNA, 15 bp, Homo sapiens
gacagttaatggtct

SEQ ID NO: 1916146 - DNA, 15 bp, Homo sapiens
acagttaatggtcta

SEQ ID NO: 1916147 - DNA, 15 bp, Homo sapiens
cagttaatggtctag

SEQ ID NO: 1916148 - DNA, 15 bp, Homo sapiens
agttaatggtctagt

SEQ ID NO: 1916149 - DNA, 15 bp, Homo sapiens
gttaatggtctagtg

SEQ ID NO: 1916150 - DNA, 15 bp, Homo sapiens
ttaatggtctagtga

SEQ ID NO: 1916151 - DNA, 15 bp, Homo sapiens
taatggtctagtgac

SEQ ID NO: 1916152 - DNA, 15 bp, Homo sapiens
aatggtctagtgaca

SEQ ID NO: 1916153 - DNA, 15 bp, Homo sapiens
atggtctagtgacag

SEQ ID NO: 1916154 - DNA, 15 bp, Homo sapiens
tggtctagtgacagc

SEQ ID NO: 1916155 - DNA, 15 bp, Homo sapiens
ggtctagtgacagct

SEQ ID NO: 1916156 - DNA, 15 bp, Homo sapiens
gtctagtgacagctg

SEQ ID NO: 1916157 - DNA, 15 bp, Homo sapiens
tctagtgacagctgg

SEQ ID NO: 1916158 - DNA, 15 bp, Homo sapiens
ctagtgacagctggt

SEQ ID NO: 1916159 - DNA, 15 bp, Homo sapiens
tagtgacagctggtt

SEQ ID NO: 1916160 - DNA, 15 bp, Homo sapiens
agtgacagctggttt

SEQ ID NO: 1916161 - DNA, 15 bp, Homo sapiens
gtgacagctggttta

SEQ ID NO: 1916162 - DNA, 15 bp, Homo sapiens
tgacagctggtttat

SEQ ID NO: 1916163 - DNA, 15 bp, Homo sapiens
gacagctggtttata

SEQ ID NO: 1916164 - DNA, 15 bp, Homo sapiens
acagctggtttatat

SEQ ID NO: 1916165 - DNA, 15 bp, Homo sapiens
cagctggtttatatg

SEQ ID NO: 1916166 - DNA, 15 bp, Homo sapiens
agctggtttatatgt

SEQ ID NO: 1916167 - DNA, 15 bp, Homo sapiens
gctggtttatatgta

SEQ ID NO: 1916168 - DNA, 15 bp, Homo sapiens
ctggtttatatgtat

SEQ ID NO: 1916169 - DNA, 15 bp, Homo sapiens
tggtttatatgtatg

SEQ ID NO: 1916170 - DNA, 15 bp, Homo sapiens
ggtttatatgtatgt

SEQ ID NO: 1916171 - DNA, 15 bp, Homo sapiens
gtttatatgtatgtt

SEQ ID NO: 1916172 - DNA, 15 bp, Homo sapiens
tttatatgtatgttg

SEQ ID NO: 1916173 - DNA, 15 bp, Homo sapiens
ttatatgtatgttga

SEQ ID NO: 1916174 - DNA, 15 bp, Homo sapiens
tatatgtatgttgaa

SEQ ID NO: 1916175 - DNA, 15 bp, Homo sapiens
atatgtatgttgaaa

SEQ ID NO: 1916176 - DNA, 15 bp, Homo sapiens
tatgtatgttgaaaa

SEQ ID NO: 1916177 - DNA, 15 bp, Homo sapiens
atgtatgttgaaaaa

SEQ ID NO: 1916178 - DNA, 15 bp, Homo sapiens
tgtatgttgaaaaat

SEQ ID NO: 1916179 - DNA, 15 bp, Homo sapiens
gtatgttgaaaaatg

SEQ ID NO: 1916180 - DNA, 15 bp, Homo sapiens
tatgttgaaaaatga

SEQ ID NO: 1916181 - DNA, 15 bp, Homo sapiens
atgttgaaaaatgac

SEQ ID NO: 1916182 - DNA, 15 bp, Homo sapiens
tgttgaaaaatgaca

SEQ ID NO: 1916183 - DNA, 15 bp, Homo sapiens
gttgaaaaatgacaa

SEQ ID NO: 1916184 - DNA, 15 bp, Homo sapiens
ttgaaaaatgacaag

SEQ ID NO: 1916185 - DNA, 15 bp, Homo sapiens
tgaaaaatgacaaga

SEQ ID NO: 1916186 - DNA, 15 bp, Homo sapiens
gaaaaatgacaagat

SEQ ID NO: 1916187 - DNA, 15 bp, Homo sapiens
aaaaatgacaagatg

SEQ ID NO: 1916188 - DNA, 15 bp, Homo sapiens
aaaatgacaagatga

SEQ ID NO: 1916189 - DNA, 15 bp, Homo sapiens
aaatgacaagatgag

SEQ ID NO: 1916190 - DNA, 15 bp, Homo sapiens
aatgacaagatgaga

SEQ ID NO: 1916191 - DNA, 15 bp, Homo sapiens
atgacaagatgagaa

SEQ ID NO: 1916192 - DNA, 15 bp, Homo sapiens
tgacaagatgagaaa

SEQ ID NO: 1916193 - DNA, 15 bp, Homo sapiens
gacaagatgagaaag

SEQ ID NO: 1916194 - DNA, 15 bp, Homo sapiens
acaagatgagaaaga

SEQ ID NO: 1916195 - DNA, 15 bp, Homo sapiens
caagatgagaaagag

SEQ ID NO: 1916196 - DNA, 15 bp, Homo sapiens
aagatgagaaagagc

SEQ ID NO: 1916197 - DNA, 15 bp, Homo sapiens
agatgagaaagagct

SEQ ID NO: 1916198 - DNA, 15 bp, Homo sapiens
gatgagaaagagcta

SEQ ID NO: 1916199 - DNA, 15 bp, Homo sapiens
atgagaaagagctaa

SEQ ID NO: 1916200 - DNA, 15 bp, Homo sapiens
tgagaaagagctaaa

SEQ ID NO: 1916201 - DNA, 15 bp, Homo sapiens
gagaaagagctaaaa

SEQ ID NO: 1916202 - DNA, 15 bp, Homo sapiens
agaaagagctaaaaa

SEQ ID NO: 1916203 - DNA, 15 bp, Homo sapiens
gaaagagctaaaaac

SEQ ID NO: 1916204 - DNA, 15 bp, Homo sapiens
aaagagctaaaaaca

SEQ ID NO: 1916205 - DNA, 15 bp, Homo sapiens
aagagctaaaaacac

SEQ ID NO: 1916206 - DNA, 15 bp, Homo sapiens
agagctaaaaacacc

SEQ ID NO: 1916207 - DNA, 15 bp, Homo sapiens
gagctaaaaacacca

SEQ ID NO: 1916208 - DNA, 15 bp, Homo sapiens
agctaaaaacaccag

SEQ ID NO: 1916209 - DNA, 15 bp, Homo sapiens
gctaaaaacaccagg

SEQ ID NO: 1916210 - DNA, 15 bp, Homo sapiens
ctaaaaacaccaggg

SEQ ID NO: 1916211 - DNA, 15 bp, Homo sapiens
taaaaacaccagggc

SEQ ID NO: 1916212 - DNA, 15 bp, Homo sapiens
aaaaacaccagggca

SEQ ID NO: 1916213 - DNA, 15 bp, Homo sapiens
aaaacaccagggcag

SEQ ID NO: 1916214 - DNA, 15 bp, Homo sapiens
aaacaccagggcaga

SEQ ID NO: 1916215 - DNA, 15 bp, Homo sapiens
aacaccagggcagag

SEQ ID NO: 1916216 - DNA, 15 bp, Homo sapiens
acaccagggcagagg

SEQ ID NO: 1916217 - DNA, 15 bp, Homo sapiens
caccagggcagagga

SEQ ID NO: 1916218 - DNA, 15 bp, Homo sapiens
accagggcagaggac

SEQ ID NO: 1916219 - DNA, 15 bp, Homo sapiens
ccagggcagaggacc

SEQ ID NO: 1916220 - DNA, 15 bp, Homo sapiens
cagggcagaggacct

SEQ ID NO: 1916221 - DNA, 15 bp, Homo sapiens
agggcagaggacctt

SEQ ID NO: 1916222 - DNA, 15 bp, Homo sapiens
gggcagaggaccttt

SEQ ID NO: 1916223 - DNA, 15 bp, Homo sapiens
ggcagaggacctttt

SEQ ID NO: 1916224 - DNA, 15 bp, Homo sapiens
gcagaggaccttttc

SEQ ID NO: 1916225 - DNA, 15 bp, Homo sapiens
cagaggaccttttct

SEQ ID NO: 1916226 - DNA, 15 bp, Homo sapiens
agaggaccttttctc

SEQ ID NO: 1916227 - DNA, 15 bp, Homo sapiens
gaggaccttttctcc

SEQ ID NO: 1916228 - DNA, 15 bp, Homo sapiens
aggaccttttctcca

SEQ ID NO: 1916229 - DNA, 15 bp, Homo sapiens
ggaccttttctccac

SEQ ID NO: 1916230 - DNA, 15 bp, Homo sapiens
gaccttttctccact

SEQ ID NO: 1916231 - DNA, 15 bp, Homo sapiens
accttttctccactg

SEQ ID NO: 1916232 - DNA, 15 bp, Homo sapiens
ccttttctccactgg

SEQ ID NO: 1916233 - DNA, 15 bp, Homo sapiens
cttttctccactggt

SEQ ID NO: 1916234 - DNA, 15 bp, Homo sapiens
ttttctccactggta

SEQ ID NO: 1916235 - DNA, 15 bp, Homo sapiens
tttctccactggtat

SEQ ID NO: 1916236 - DNA, 15 bp, Homo sapiens
ttctccactggtatc

SEQ ID NO: 1916237 - DNA, 15 bp, Homo sapiens
tctccactggtatct

SEQ ID NO: 1916238 - DNA, 15 bp, Homo sapiens
ctccactggtatctg

SEQ ID NO: 1916239 - DNA, 15 bp, Homo sapiens
tccactggtatctgt

SEQ ID NO: 1916240 - DNA, 15 bp, Homo sapiens
ccactggtatctgtc

SEQ ID NO: 1916241 - DNA, 15 bp, Homo sapiens
cactggtatctgtct

SEQ ID NO: 1916242 - DNA, 15 bp, Homo sapiens
actggtatctgtctg

SEQ ID NO: 1916243 - DNA, 15 bp, Homo sapiens
ctggtatctgtctgt

SEQ ID NO: 1916244 - DNA, 15 bp, Homo sapiens
tggtatctgtctgtt

SEQ ID NO: 1916245 - DNA, 15 bp, Homo sapiens
ggtatctgtctgttg

SEQ ID NO: 1916246 - DNA, 15 bp, Homo sapiens
gtatctgtctgttgc

SEQ ID NO: 1916247 - DNA, 15 bp, Homo sapiens
tatctgtctgttgct

SEQ ID NO: 1916248 - DNA, 15 bp, Homo sapiens
atctgtctgttgctc

SEQ ID NO: 1916249 - DNA, 15 bp, Homo sapiens
tctgtctgttgctca

SEQ ID NO: 1916250 - DNA, 15 bp, Homo sapiens
ctgtctgttgctcat

SEQ ID NO: 1916251 - DNA, 15 bp, Homo sapiens
tgtctgttgctcata

SEQ ID NO: 1916252 - DNA, 15 bp, Homo sapiens
gtctgttgctcatat

SEQ ID NO: 1916253 - DNA, 15 bp, Homo sapiens
tctgttgctcatatg

SEQ ID NO: 1916254 - DNA, 15 bp, Homo sapiens
ctgttgctcatatgt

SEQ ID NO: 1916255 - DNA, 15 bp, Homo sapiens
tgttgctcatatgtg

SEQ ID NO: 1916256 - DNA, 15 bp, Homo sapiens
gttgctcatatgtgt

SEQ ID NO: 1916257 - DNA, 15 bp, Homo sapiens
ttgctcatatgtgta

SEQ ID NO: 1916258 - DNA, 15 bp, Homo sapiens
tgctcatatgtgtac

SEQ ID NO: 1916259 - DNA, 15 bp, Homo sapiens
gctcatatgtgtacc

SEQ ID NO: 1916260 - DNA, 15 bp, Homo sapiens
ctcatatgtgtacca

SEQ ID NO: 1916261 - DNA, 15 bp, Homo sapiens
tcatatgtgtaccat

SEQ ID NO: 1916262 - DNA, 15 bp, Homo sapiens
catatgtgtaccatt

SEQ ID NO: 1916263 - DNA, 15 bp, Homo sapiens
atatgtgtaccattg

SEQ ID NO: 1916264 - DNA, 15 bp, Homo sapiens
tatgtgtaccattgg

SEQ ID NO: 1916265 - DNA, 15 bp, Homo sapiens
atgtgtaccattggc

SEQ ID NO: 1916266 - DNA, 15 bp, Homo sapiens
tgtgtaccattggcc

SEQ ID NO: 1916267 - DNA, 15 bp, Homo sapiens
gtgtaccattggccc

SEQ ID NO: 1916268 - DNA, 15 bp, Homo sapiens
tgtaccattggccct

SEQ ID NO: 1916269 - DNA, 15 bp, Homo sapiens
gtaccattggccctg

SEQ ID NO: 1916270 - DNA, 15 bp, Homo sapiens
taccattggccctga

SEQ ID NO: 1916271 - DNA, 15 bp, Homo sapiens
accattggccctgag

SEQ ID NO: 1916272 - DNA, 15 bp, Homo sapiens
ccattggccctgagg

SEQ ID NO: 1916273 - DNA, 15 bp, Homo sapiens
cattggccctgaggt

SEQ ID NO: 1916274 - DNA, 15 bp, Homo sapiens
attggccctgaggtc

SEQ ID NO: 1916275 - DNA, 15 bp, Homo sapiens
ttggccctgaggtcc

SEQ ID NO: 1916276 - DNA, 15 bp, Homo sapiens
tggccctgaggtccc

SEQ ID NO: 1916277 - DNA, 15 bp, Homo sapiens
ggccctgaggtccca

SEQ ID NO: 1916278 - DNA, 15 bp, Homo sapiens
gccctgaggtcccac

SEQ ID NO: 1916279 - DNA, 15 bp, Homo sapiens
ccctgaggtcccaca

SEQ ID NO: 1916280 - DNA, 15 bp, Homo sapiens
cctgaggtcccacaa

SEQ ID NO: 1916281 - DNA, 15 bp, Homo sapiens
ctgaggtcccacaat

SEQ ID NO: 1916282 - DNA, 15 bp, Homo sapiens
tgaggtcccacaatc

SEQ ID NO: 1916283 - DNA, 15 bp, Homo sapiens
gaggtcccacaatca

SEQ ID NO: 1916284 - DNA, 15 bp, Homo sapiens
aggtcccacaatcaa

SEQ ID NO: 1916285 - DNA, 15 bp, Homo sapiens
ggtcccacaatcaat

SEQ ID NO: 1916286 - DNA, 15 bp, Homo sapiens
gtcccacaatcaatc

SEQ ID NO: 1916287 - DNA, 15 bp, Homo sapiens
tcccacaatcaatca

SEQ ID NO: 1916288 - DNA, 15 bp, Homo sapiens
cccacaatcaatcaa

SEQ ID NO: 1916289 - DNA, 15 bp, Homo sapiens
ccacaatcaatcaag

SEQ ID NO: 1916290 - DNA, 15 bp, Homo sapiens
cacaatcaatcaagt

SEQ ID NO: 1916291 - DNA, 15 bp, Homo sapiens
acaatcaatcaagta

SEQ ID NO: 1916292 - DNA, 15 bp, Homo sapiens
caatcaatcaagtat

SEQ ID NO: 1916293 - DNA, 15 bp, Homo sapiens
aatcaatcaagtatg

SEQ ID NO: 1916294 - DNA, 15 bp, Homo sapiens
atcaatcaagtatgg

SEQ ID NO: 1916295 - DNA, 15 bp, Homo sapiens
tcaatcaagtatgga

SEQ ID NO: 1916296 - DNA, 15 bp, Homo sapiens
caatcaagtatggac

SEQ ID NO: 1916297 - DNA, 15 bp, Homo sapiens
aatcaagtatggacc

SEQ ID NO: 1916298 - DNA, 15 bp, Homo sapiens
atcaagtatggacca

SEQ ID NO: 1916299 - DNA, 15 bp, Homo sapiens
tcaagtatggaccat

SEQ ID NO: 1916300 - DNA, 15 bp, Homo sapiens
caagtatggaccatg

SEQ ID NO: 1916301 - DNA, 15 bp, Homo sapiens
aagtatggaccatgc

SEQ ID NO: 1916302 - DNA, 15 bp, Homo sapiens
agtatggaccatgcc

SEQ ID NO: 1916303 - DNA, 15 bp, Homo sapiens
gtatggaccatgcct

SEQ ID NO: 1916304 - DNA, 15 bp, Homo sapiens
tatggaccatgcctc

SEQ ID NO: 1916305 - DNA, 15 bp, Homo sapiens
atggaccatgcctca

SEQ ID NO: 1916306 - DNA, 15 bp, Homo sapiens
tggaccatgcctcat

SEQ ID NO: 1916307 - DNA, 15 bp, Homo sapiens
ggaccatgcctcatc

SEQ ID NO: 1916308 - DNA, 15 bp, Homo sapiens
gaccatgcctcatcc

SEQ ID NO: 1916309 - DNA, 15 bp, Homo sapiens
accatgcctcatcca

SEQ ID NO: 1916310 - DNA, 15 bp, Homo sapiens
ccatgcctcatccat

SEQ ID NO: 1916311 - DNA, 15 bp, Homo sapiens
catgcctcatccatc

SEQ ID NO: 1916312 - DNA, 15 bp, Homo sapiens
atgcctcatccatcc

SEQ ID NO: 1916313 - DNA, 15 bp, Homo sapiens
tgcctcatccatcca

SEQ ID NO: 1916314 - DNA, 15 bp, Homo sapiens
gcctcatccatccag

SEQ ID NO: 1916315 - DNA, 15 bp, Homo sapiens
cctcatccatccagc

SEQ ID NO: 1916316 - DNA, 15 bp, Homo sapiens
ctcatccatccagcc

SEQ ID NO: 1916317 - DNA, 15 bp, Homo sapiens
tcatccatccagccc

SEQ ID NO: 1916318 - DNA, 15 bp, Homo sapiens
catccatccagccca

SEQ ID NO: 1916319 - DNA, 15 bp, Homo sapiens
atccatccagcccac

SEQ ID NO: 1916320 - DNA, 15 bp, Homo sapiens
tccatccagcccaca

SEQ ID NO: 1916321 - DNA, 15 bp, Homo sapiens
ccatccagcccacat

SEQ ID NO: 1916322 - DNA, 15 bp, Homo sapiens
catccagcccacatg

SEQ ID NO: 1916323 - DNA, 15 bp, Homo sapiens
atccagcccacatgc

SEQ ID NO: 1916324 - DNA, 15 bp, Homo sapiens
tccagcccacatgca

SEQ ID NO: 1916325 - DNA, 15 bp, Homo sapiens
ccagcccacatgcat

SEQ ID NO: 1916326 - DNA, 15 bp, Homo sapiens
cagcccacatgcatg

SEQ ID NO: 1916327 - DNA, 15 bp, Homo sapiens
agcccacatgcatgc

SEQ ID NO: 1916328 - DNA, 15 bp, Homo sapiens
gcccacatgcatgca

SEQ ID NO: 1916329 - DNA, 15 bp, Homo sapiens
cccacatgcatgcaa

SEQ ID NO: 1916330 - DNA, 15 bp, Homo sapiens
ccacatgcatgcaat

SEQ ID NO: 1916331 - DNA, 15 bp, Homo sapiens
cacatgcatgcaatg

SEQ ID NO: 1916332 - DNA, 15 bp, Homo sapiens
acatgcatgcaatga

SEQ ID NO: 1916333 - DNA, 15 bp, Homo sapiens
catgcatgcaatgaa

SEQ ID NO: 1916334 - DNA, 15 bp, Homo sapiens
atgcatgcaatgaaa

SEQ ID NO: 1916335 - DNA, 15 bp, Homo sapiens
tgcatgcaatgaaag

SEQ ID NO: 1916336 - DNA, 15 bp, Homo sapiens
gcatgcaatgaaagc

SEQ ID NO: 1916337 - DNA, 15 bp, Homo sapiens
catgcaatgaaagcc

SEQ ID NO: 1916338 - DNA, 15 bp, Homo sapiens
atgcaatgaaagccc

SEQ ID NO: 1916339 - DNA, 15 bp, Homo sapiens
tgcaatgaaagccca

SEQ ID NO: 1916340 - DNA, 15 bp, Homo sapiens
gcaatgaaagcccaa

SEQ ID NO: 1916341 - DNA, 15 bp, Homo sapiens
caatgaaagcccaat

SEQ ID NO: 1916342 - DNA, 15 bp, Homo sapiens
aatgaaagcccaatg

SEQ ID NO: 1916343 - DNA, 15 bp, Homo sapiens
atgaaagcccaatgg

SEQ ID NO: 1916344 - DNA, 15 bp, Homo sapiens
tgaaagcccaatggc

SEQ ID NO: 1916345 - DNA, 15 bp, Homo sapiens
gaaagcccaatggct

SEQ ID NO: 1916346 - DNA, 15 bp, Homo sapiens
aaagcccaatggctt

SEQ ID NO: 1916347 - DNA, 15 bp, Homo sapiens
aagcccaatggcttt

SEQ ID NO: 1916348 - DNA, 15 bp, Homo sapiens
agcccaatggctttc

SEQ ID NO: 1916349 - DNA, 15 bp, Homo sapiens
gcccaatggctttca

SEQ ID NO: 1916350 - DNA, 15 bp, Homo sapiens
cccaatggctttcaa

SEQ ID NO: 1916351 - DNA, 15 bp, Homo sapiens
ccaatggctttcaac

SEQ ID NO: 1916352 - DNA, 15 bp, Homo sapiens
caatggctttcaact

SEQ ID NO: 1916353 - DNA, 15 bp, Homo sapiens
aatggctttcaactt

SEQ ID NO: 1916354 - DNA, 15 bp, Homo sapiens
atggctttcaacttt

SEQ ID NO: 1916355 - DNA, 15 bp, Homo sapiens
tggctttcaacttta

SEQ ID NO: 1916356 - DNA, 15 bp, Homo sapiens
ggctttcaactttaa

SEQ ID NO: 1916357 - DNA, 15 bp, Homo sapiens
gctttcaactttaat

SEQ ID NO: 1916358 - DNA, 15 bp, Homo sapiens
ctttcaactttaatt

SEQ ID NO: 1916359 - DNA, 15 bp, Homo sapiens
tttcaactttaatta

SEQ ID NO: 1916360 - DNA, 15 bp, Homo sapiens
ttcaactttaattac

SEQ ID NO: 1916361 - DNA, 15 bp, Homo sapiens
tcaactttaattacc

SEQ ID NO: 1916362 - DNA, 15 bp, Homo sapiens
caactttaattacca

SEQ ID NO: 1916363 - DNA, 15 bp, Homo sapiens
aactttaattaccag

SEQ ID NO: 1916364 - DNA, 15 bp, Homo sapiens
actttaattaccagc

SEQ ID NO: 1916365 - DNA, 15 bp, Homo sapiens
ctttaattaccagct

SEQ ID NO: 1916366 - DNA, 15 bp, Homo sapiens
tttaattaccagctc

SEQ ID NO: 1916367 - DNA, 15 bp, Homo sapiens
ttaattaccagctcc

SEQ ID NO: 1916368 - DNA, 15 bp, Homo sapiens
taattaccagctcct

SEQ ID NO: 1916369 - DNA, 15 bp, Homo sapiens
aattaccagctcctg

SEQ ID NO: 1916370 - DNA, 15 bp, Homo sapiens
attaccagctcctgt

SEQ ID NO: 1916371 - DNA, 15 bp, Homo sapiens
ttaccagctcctgta

SEQ ID NO: 1916372 - DNA, 15 bp, Homo sapiens
taccagctcctgtat

SEQ ID NO: 1916373 - DNA, 15 bp, Homo sapiens
accagctcctgtatt

SEQ ID NO: 1916374 - DNA, 15 bp, Homo sapiens
ccagctcctgtatta

SEQ ID NO: 1916375 - DNA, 15 bp, Homo sapiens
cagctcctgtattac

SEQ ID NO: 1916376 - DNA, 15 bp, Homo sapiens
agctcctgtattaca

SEQ ID NO: 1916377 - DNA, 15 bp, Homo sapiens
gctcctgtattacag

SEQ ID NO: 1916378 - DNA, 15 bp, Homo sapiens
ctcctgtattacagt

SEQ ID NO: 1916379 - DNA, 15 bp, Homo sapiens
tcctgtattacagtt

SEQ ID NO: 1916380 - DNA, 15 bp, Homo sapiens
cctgtattacagttc

SEQ ID NO: 1916381 - DNA, 15 bp, Homo sapiens
ctgtattacagttct

SEQ ID NO: 1916382 - DNA, 15 bp, Homo sapiens
tgtattacagttctg

SEQ ID NO: 1916383 - DNA, 15 bp, Homo sapiens
gtattacagttctgc

SEQ ID NO: 1916384 - DNA, 15 bp, Homo sapiens
tattacagttctgcc

SEQ ID NO: 1916385 - DNA, 15 bp, Homo sapiens
attacagttctgcca

SEQ ID NO: 1916386 - DNA, 15 bp, Homo sapiens
ttacagttctgccag

SEQ ID NO: 1916387 - DNA, 15 bp, Homo sapiens
tacagttctgccaga

SEQ ID NO: 1916388 - DNA, 15 bp, Homo sapiens
acagttctgccagat

SEQ ID NO: 1916389 - DNA, 15 bp, Homo sapiens
cagttctgccagatg

SEQ ID NO: 1916390 - DNA, 15 bp, Homo sapiens
agttctgccagatgt

SEQ ID NO: 1916391 - DNA, 15 bp, Homo sapiens
gttctgccagatgtt

SEQ ID NO: 1916392 - DNA, 15 bp, Homo sapiens
ttctgccagatgttc

SEQ ID NO: 1916393 - DNA, 15 bp, Homo sapiens
tctgccagatgttct

SEQ ID NO: 1916394 - DNA, 15 bp, Homo sapiens
ctgccagatgttctc

SEQ ID NO: 1916395 - DNA, 15 bp, Homo sapiens
tgccagatgttctca

SEQ ID NO: 1916396 - DNA, 15 bp, Homo sapiens
gccagatgttctcag

SEQ ID NO: 1916397 - DNA, 15 bp, Homo sapiens
ccagatgttctcagt

SEQ ID NO: 1916398 - DNA, 15 bp, Homo sapiens
cagatgttctcagtg

SEQ ID NO: 1916399 - DNA, 15 bp, Homo sapiens
agatgttctcagtgg

SEQ ID NO: 1916400 - DNA, 15 bp, Homo sapiens
gatgttctcagtggt

SEQ ID NO: 1916401 - DNA, 15 bp, Homo sapiens
atgttctcagtggta

SEQ ID NO: 1916402 - DNA, 15 bp, Homo sapiens
tgttctcagtggtag

SEQ ID NO: 1916403 - DNA, 15 bp, Homo sapiens
gttctcagtggtagt

SEQ ID NO: 1916404 - DNA, 15 bp, Homo sapiens
ttctcagtggtagtt

SEQ ID NO: 1916405 - DNA, 15 bp, Homo sapiens
tctcagtggtagttt

SEQ ID NO: 1916406 - DNA, 15 bp, Homo sapiens
ctcagtggtagttta

SEQ ID NO: 1916407 - DNA, 15 bp, Homo sapiens
tcagtggtagtttat

SEQ ID NO: 1916408 - DNA, 15 bp, Homo sapiens
cagtggtagtttata

SEQ ID NO: 1916409 - DNA, 15 bp, Homo sapiens
agtggtagtttatat

SEQ ID NO: 1916410 - DNA, 15 bp, Homo sapiens
gtggtagtttatatg

SEQ ID NO: 1916411 - DNA, 15 bp, Homo sapiens
tggtagtttatatga

SEQ ID NO: 1916412 - DNA, 15 bp, Homo sapiens
ggtagtttatatgaa

SEQ ID NO: 1916413 - DNA, 15 bp, Homo sapiens
gtagtttatatgaag

SEQ ID NO: 1916414 - DNA, 15 bp, Homo sapiens
tagtttatatgaaga

SEQ ID NO: 1916415 - DNA, 15 bp, Homo sapiens
agtttatatgaagaa

SEQ ID NO: 1916416 - DNA, 15 bp, Homo sapiens
gtttatatgaagaat

SEQ ID NO: 1916417 - DNA, 15 bp, Homo sapiens
tttatatgaagaatc

SEQ ID NO: 1916418 - DNA, 15 bp, Homo sapiens
tatatgaagaatctt

SEQ ID NO: 1916419 - DNA, 15 bp, Homo sapiens
atatgaagaatctta

SEQ ID NO: 1916420 - DNA, 15 bp, Homo sapiens
tatgaagaatcttac

SEQ ID NO: 1916421 - DNA, 15 bp, Homo sapiens
atgaagaatcttacc

SEQ ID NO: 1916422 - DNA, 15 bp, Homo sapiens
tgaagaatcttacct

SEQ ID NO: 1916423 - DNA, 15 bp, Homo sapiens
gaagaatcttaccta

SEQ ID NO: 1916424 - DNA, 15 bp, Homo sapiens
aagaatcttacctag

SEQ ID NO: 1916425 - DNA, 15 bp, Homo sapiens
agaatcttacctagt

SEQ ID NO: 1916426 - DNA, 15 bp, Homo sapiens
gaatcttacctagtg

SEQ ID NO: 1916427 - DNA, 15 bp, Homo sapiens
aatcttacctagtga

SEQ ID NO: 1916428 - DNA, 15 bp, Homo sapiens
atcttacctagtgac

SEQ ID NO: 1916429 - DNA, 15 bp, Homo sapiens
tcttacctagtgaca

SEQ ID NO: 1916430 - DNA, 15 bp, Homo sapiens
cttacctagtgacag

SEQ ID NO: 1916431 - DNA, 15 bp, Homo sapiens
ttacctagtgacaga

SEQ ID NO: 1916432 - DNA, 15 bp, Homo sapiens
tacctagtgacagaa

SEQ ID NO: 1916433 - DNA, 15 bp, Homo sapiens
acctagtgacagaat

SEQ ID NO: 1916434 - DNA, 15 bp, Homo sapiens
cctagtgacagaatt

SEQ ID NO: 1916435 - DNA, 15 bp, Homo sapiens
ctagtgacagaatta

SEQ ID NO: 1916436 - DNA, 15 bp, Homo sapiens
tagtgacagaattat

SEQ ID NO: 1916437 - DNA, 15 bp, Homo sapiens
agtgacagaattatt

SEQ ID NO: 1916438 - DNA, 15 bp, Homo sapiens
gtgacagaattattg

SEQ ID NO: 1916439 - DNA, 15 bp, Homo sapiens
tgacagaattattgc

SEQ ID NO: 1916440 - DNA, 15 bp, Homo sapiens
gacagaattattgcc

SEQ ID NO: 1916441 - DNA, 15 bp, Homo sapiens
acagaattattgcca

SEQ ID NO: 1916442 - DNA, 15 bp, Homo sapiens
cagaattattgccat

SEQ ID NO: 1916443 - DNA, 15 bp, Homo sapiens
agaattattgccatt

SEQ ID NO: 1916444 - DNA, 15 bp, Homo sapiens
gaattattgccattt

SEQ ID NO: 1916445 - DNA, 15 bp, Homo sapiens
aattattgccatttg

SEQ ID NO: 1916446 - DNA, 15 bp, Homo sapiens
attattgccatttgt

SEQ ID NO: 1916447 - DNA, 15 bp, Homo sapiens
ttattgccatttgtc

SEQ ID NO: 1916448 - DNA, 15 bp, Homo sapiens
tattgccatttgtct

SEQ ID NO: 1916449 - DNA, 15 bp, Homo sapiens
attgccatttgtctg

SEQ ID NO: 1916450 - DNA, 15 bp, Homo sapiens
ttgccatttgtctga

SEQ ID NO: 1916451 - DNA, 15 bp, Homo sapiens
tgccatttgtctgac

SEQ ID NO: 1916452 - DNA, 15 bp, Homo sapiens
gccatttgtctgaca

SEQ ID NO: 1916453 - DNA, 15 bp, Homo sapiens
ccatttgtctgacaa

SEQ ID NO: 1916454 - DNA, 15 bp, Homo sapiens
catttgtctgacaaa

SEQ ID NO: 1916455 - DNA, 15 bp, Homo sapiens
atttgtctgacaaat

SEQ ID NO: 1916456 - DNA, 15 bp, Homo sapiens
tttgtctgacaaatg

SEQ ID NO: 1916457 - DNA, 15 bp, Homo sapiens
ttgtctgacaaatgt

SEQ ID NO: 1916458 - DNA, 15 bp, Homo sapiens
tgtctgacaaatgtt

SEQ ID NO: 1916459 - DNA, 15 bp, Homo sapiens
gtctgacaaatgttt

SEQ ID NO: 1916460 - DNA, 15 bp, Homo sapiens
tctgacaaatgtttc

SEQ ID NO: 1916461 - DNA, 15 bp, Homo sapiens
ctgacaaatgtttct

SEQ ID NO: 1916462 - DNA, 15 bp, Homo sapiens
tgacaaatgtttctt

SEQ ID NO: 1916463 - DNA, 15 bp, Homo sapiens
gacaaatgtttcttt

SEQ ID NO: 1916464 - DNA, 15 bp, Homo sapiens
acaaatgtttcttta

SEQ ID NO: 1916465 - DNA, 15 bp, Homo sapiens
caaatgtttctttaa

SEQ ID NO: 1916466 - DNA, 15 bp, Homo sapiens
aaatgtttctttaaa

SEQ ID NO: 1916467 - DNA, 15 bp, Homo sapiens
aatgtttctttaaaa

SEQ ID NO: 1916468 - DNA, 15 bp, Homo sapiens
atgtttctttaaaaa

SEQ ID NO: 1916469 - DNA, 15 bp, Homo sapiens
tgtttctttaaaaat

SEQ ID NO: 1916470 - DNA, 15 bp, Homo sapiens
gtttctttaaaaatc

SEQ ID NO: 1916471 - DNA, 15 bp, Homo sapiens
tttctttaaaaatct

SEQ ID NO: 1916472 - DNA, 15 bp, Homo sapiens
ttctttaaaaatcta

SEQ ID NO: 1916473 - DNA, 15 bp, Homo sapiens
tctttaaaaatctat

SEQ ID NO: 1916474 - DNA, 15 bp, Homo sapiens
ctttaaaaatctata

SEQ ID NO: 1916475 - DNA, 15 bp, Homo sapiens
tttaaaaatctatat

SEQ ID NO: 1916476 - DNA, 15 bp, Homo sapiens
ttaaaaatctatatt

SEQ ID NO: 1916477 - DNA, 15 bp, Homo sapiens
taaaaatctatattt

SEQ ID NO: 1916478 - DNA, 15 bp, Homo sapiens
aaaaatctatatttt

SEQ ID NO: 1916479 - DNA, 15 bp, Homo sapiens
aaaatctatattttt

SEQ ID NO: 1916480 - DNA, 15 bp, Homo sapiens
aaatctatattttta

SEQ ID NO: 1916481 - DNA, 15 bp, Homo sapiens
aatctatatttttaa

SEQ ID NO: 1916482 - DNA, 15 bp, Homo sapiens
atctatatttttaag

SEQ ID NO: 1916483 - DNA, 15 bp, Homo sapiens
tctatatttttaagc

SEQ ID NO: 1916484 - DNA, 15 bp, Homo sapiens
ctatatttttaagct

SEQ ID NO: 1916485 - DNA, 15 bp, Homo sapiens
tatatttttaagctg

SEQ ID NO: 1916486 - DNA, 15 bp, Homo sapiens
atatttttaagctga

SEQ ID NO: 1916487 - DNA, 15 bp, Homo sapiens
tatttttaagctgaa

SEQ ID NO: 1916488 - DNA, 15 bp, Homo sapiens
atttttaagctgaat

SEQ ID NO: 1916489 - DNA, 15 bp, Homo sapiens
tttttaagctgaatc

SEQ ID NO: 1916490 - DNA, 15 bp, Homo sapiens
ttttaagctgaatca

SEQ ID NO: 1916491 - DNA, 15 bp, Homo sapiens
tttaagctgaatcaa

SEQ ID NO: 1916492 - DNA, 15 bp, Homo sapiens
ttaagctgaatcaat

SEQ ID NO: 1916493 - DNA, 15 bp, Homo sapiens
taagctgaatcaatt

SEQ ID NO: 1916494 - DNA, 15 bp, Homo sapiens
aagctgaatcaattc

SEQ ID NO: 1916495 - DNA, 15 bp, Homo sapiens
agctgaatcaattca

SEQ ID NO: 1916496 - DNA, 15 bp, Homo sapiens
gctgaatcaattcac

SEQ ID NO: 1916497 - DNA, 15 bp, Homo sapiens
ctgaatcaattcaca

SEQ ID NO: 1916498 - DNA, 15 bp, Homo sapiens
tgaatcaattcacaa

SEQ ID NO: 1916499 - DNA, 15 bp, Homo sapiens
gaatcaattcacaaa

SEQ ID NO: 1916500 - DNA, 15 bp, Homo sapiens
aatcaattcacaaaa

SEQ ID NO: 1916501 - DNA, 15 bp, Homo sapiens
atcaattcacaaaag

SEQ ID NO: 1916502 - DNA, 15 bp, Homo sapiens
tcaattcacaaaagc

SEQ ID NO: 1916503 - DNA, 15 bp, Homo sapiens
caattcacaaaagca

SEQ ID NO: 1916504 - DNA, 15 bp, Homo sapiens
aattcacaaaagcat

SEQ ID NO: 1916505 - DNA, 15 bp, Homo sapiens
attcacaaaagcata

SEQ ID NO: 1916506 - DNA, 15 bp, Homo sapiens
ttcacaaaagcataa

SEQ ID NO: 1916507 - DNA, 15 bp, Homo sapiens
tcacaaaagcataag

SEQ ID NO: 1916508 - DNA, 15 bp, Homo sapiens
cacaaaagcataaga

SEQ ID NO: 1916509 - DNA, 15 bp, Homo sapiens
acaaaagcataagaa

SEQ ID NO: 1916510 - DNA, 15 bp, Homo sapiens
caaaagcataagaaa

SEQ ID NO: 1916511 - DNA, 15 bp, Homo sapiens
aaaagcataagaaaa

SEQ ID NO: 1916512 - DNA, 15 bp, Homo sapiens
aaagcataagaaaag

SEQ ID NO: 1916513 - DNA, 15 bp, Homo sapiens
aagcataagaaaagg

SEQ ID NO: 1916514 - DNA, 15 bp, Homo sapiens
agcataagaaaagga

SEQ ID NO: 1916515 - DNA, 15 bp, Homo sapiens
gcataagaaaaggaa

SEQ ID NO: 1916516 - DNA, 15 bp, Homo sapiens
cataagaaaaggaaa

SEQ ID NO: 1916517 - DNA, 15 bp, Homo sapiens
ataagaaaaggaaaa

SEQ ID NO: 1916518 - DNA, 15 bp, Homo sapiens
agaaaaggaaaaact

SEQ ID NO: 1916519 - DNA, 15 bp, Homo sapiens
gaaaaggaaaaactt

SEQ ID NO: 1916520 - DNA, 15 bp, Homo sapiens
aaaaggaaaaacttc

SEQ ID NO: 1916521 - DNA, 15 bp, Homo sapiens
aaaggaaaaacttca

SEQ ID NO: 1916522 - DNA, 15 bp, Homo sapiens
aaggaaaaacttcac

SEQ ID NO: 1916523 - DNA, 15 bp, Homo sapiens
aggaaaaacttcact

SEQ ID NO: 1916524 - DNA, 15 bp, Homo sapiens
ggaaaaacttcactt

SEQ ID NO: 1916525 - DNA, 15 bp, Homo sapiens
gaaaaacttcacttt

SEQ ID NO: 1916526 - DNA, 15 bp, Homo sapiens
aaaaacttcactttc

SEQ ID NO: 1916527 - DNA, 15 bp, Homo sapiens
aaaacttcactttca

SEQ ID NO: 1916528 - DNA, 15 bp, Homo sapiens
aaacttcactttcaa

SEQ ID NO: 1916529 - DNA, 15 bp, Homo sapiens
aacttcactttcaat

SEQ ID NO: 1916530 - DNA, 15 bp, Homo sapiens
acttcactttcaatg

SEQ ID NO: 1916531 - DNA, 15 bp, Homo sapiens
cttcactttcaatgg

SEQ ID NO: 1916532 - DNA, 15 bp, Homo sapiens
ttcactttcaatgga

SEQ ID NO: 1916533 - DNA, 15 bp, Homo sapiens
tcactttcaatggaa

SEQ ID NO: 1916534 - DNA, 15 bp, Homo sapiens
cactttcaatggaat

SEQ ID NO: 1916535 - DNA, 15 bp, Homo sapiens
actttcaatggaatg

SEQ ID NO: 1916536 - DNA, 15 bp, Homo sapiens
ctttcaatggaatgc

SEQ ID NO: 1916537 - DNA, 15 bp, Homo sapiens
tttcaatggaatgcc

SEQ ID NO: 1916538 - DNA, 15 bp, Homo sapiens
ttcaatggaatgcca

SEQ ID NO: 1916539 - DNA, 15 bp, Homo sapiens
tcaatggaatgccat

SEQ ID NO: 1916540 - DNA, 15 bp, Homo sapiens
caatggaatgccatt

SEQ ID NO: 1916541 - DNA, 15 bp, Homo sapiens
aatggaatgccattt

SEQ ID NO: 1916542 - DNA, 15 bp, Homo sapiens
atggaatgccatttt

SEQ ID NO: 1916543 - DNA, 15 bp, Homo sapiens
tggaatgccattttt

SEQ ID NO: 1916544 - DNA, 15 bp, Homo sapiens
ggaatgccattttta

SEQ ID NO: 1916545 - DNA, 15 bp, Homo sapiens
gaatgccatttttac

SEQ ID NO: 1916546 - DNA, 15 bp, Homo sapiens
aatgccatttttact

SEQ ID NO: 1916547 - DNA, 15 bp, Homo sapiens
atgccatttttactg

SEQ ID NO: 1916548 - DNA, 15 bp, Homo sapiens
tgccatttttactga

SEQ ID NO: 1916549 - DNA, 15 bp, Homo sapiens
gccatttttactgag

SEQ ID NO: 1916550 - DNA, 15 bp, Homo sapiens
ccatttttactgaga

SEQ ID NO: 1916551 - DNA, 15 bp, Homo sapiens
catttttactgagat

SEQ ID NO: 1916552 - DNA, 15 bp, Homo sapiens
atttttactgagatc

SEQ ID NO: 1916553 - DNA, 15 bp, Homo sapiens
tttttactgagatca

SEQ ID NO: 1916554 - DNA, 15 bp, Homo sapiens
ttttactgagatcat

SEQ ID NO: 1916555 - DNA, 15 bp, Homo sapiens
tttactgagatcatt

SEQ ID NO: 1916556 - DNA, 15 bp, Homo sapiens
ttactgagatcattt

SEQ ID NO: 1916557 - DNA, 15 bp, Homo sapiens
tactgagatcatttc

SEQ ID NO: 1916558 - DNA, 15 bp, Homo sapiens
actgagatcatttca

SEQ ID NO: 1916559 - DNA, 15 bp, Homo sapiens
ctgagatcatttcaa

SEQ ID NO: 1916560 - DNA, 15 bp, Homo sapiens
tgagatcatttcaat

SEQ ID NO: 1916561 - DNA, 15 bp, Homo sapiens
gagatcatttcaata

SEQ ID NO: 1916562 - DNA, 15 bp, Homo sapiens
agatcatttcaataa

SEQ ID NO: 1916563 - DNA, 15 bp, Homo sapiens
gatcatttcaataac

SEQ ID NO: 1916564 - DNA, 15 bp, Homo sapiens
atcatttcaataact

SEQ ID NO: 1916565 - DNA, 15 bp, Homo sapiens
tcatttcaataactt

SEQ ID NO: 1916566 - DNA, 15 bp, Homo sapiens
catttcaataactta

SEQ ID NO: 1916567 - DNA, 15 bp, Homo sapiens
atttcaataacttag

SEQ ID NO: 1916568 - DNA, 15 bp, Homo sapiens
tttcaataacttagc

SEQ ID NO: 1916569 - DNA, 15 bp, Homo sapiens
ttcaataacttagca

SEQ ID NO: 1916570 - DNA, 15 bp, Homo sapiens
tcaataacttagcac

SEQ ID NO: 1916571 - DNA, 15 bp, Homo sapiens
caataacttagcact

SEQ ID NO: 1916572 - DNA, 15 bp, Homo sapiens
aataacttagcactg

SEQ ID NO: 1916573 - DNA, 15 bp, Homo sapiens
ataacttagcactgt

SEQ ID NO: 1916574 - DNA, 15 bp, Homo sapiens
taacttagcactgtt

SEQ ID NO: 1916575 - DNA, 15 bp, Homo sapiens
aacttagcactgttc

SEQ ID NO: 1916576 - DNA, 15 bp, Homo sapiens
acttagcactgttca

SEQ ID NO: 1916577 - DNA, 15 bp, Homo sapiens
cttagcactgttcac

SEQ ID NO: 1916578 - DNA, 15 bp, Homo sapiens
ttagcactgttcacc

SEQ ID NO: 1916579 - DNA, 15 bp, Homo sapiens
tagcactgttcacca

SEQ ID NO: 1916580 - DNA, 15 bp, Homo sapiens
agcactgttcaccac

SEQ ID NO: 1916581 - DNA, 15 bp, Homo sapiens
gcactgttcaccact

SEQ ID NO: 1916582 - DNA, 15 bp, Homo sapiens
cactgttcaccactg

SEQ ID NO: 1916583 - DNA, 15 bp, Homo sapiens
actgttcaccactga

SEQ ID NO: 1916584 - DNA, 15 bp, Homo sapiens
ctgttcaccactgaa

SEQ ID NO: 1916585 - DNA, 15 bp, Homo sapiens
tgttcaccactgaaa

SEQ ID NO: 1916586 - DNA, 15 bp, Homo sapiens
gttcaccactgaaat

SEQ ID NO: 1916587 - DNA, 15 bp, Homo sapiens
ttcaccactgaaatt

SEQ ID NO: 1916588 - DNA, 15 bp, Homo sapiens
tcaccactgaaattg

SEQ ID NO: 1916589 - DNA, 15 bp, Homo sapiens
caccactgaaattgc

SEQ ID NO: 1916590 - DNA, 15 bp, Homo sapiens
accactgaaattgct

SEQ ID NO: 1916591 - DNA, 15 bp, Homo sapiens
ccactgaaattgcta

SEQ ID NO: 1916592 - DNA, 15 bp, Homo sapiens
cactgaaattgctac

SEQ ID NO: 1916593 - DNA, 15 bp, Homo sapiens
actgaaattgctact

SEQ ID NO: 1916594 - DNA, 15 bp, Homo sapiens
ctgaaattgctacta

SEQ ID NO: 1916595 - DNA, 15 bp, Homo sapiens
tgaaattgctactat

SEQ ID NO: 1916596 - DNA, 15 bp, Homo sapiens
gaaattgctactata

SEQ ID NO: 1916597 - DNA, 15 bp, Homo sapiens
aaattgctactataa

SEQ ID NO: 1916598 - DNA, 15 bp, Homo sapiens
aattgctactataaa

SEQ ID NO: 1916599 - DNA, 15 bp, Homo sapiens
attgctactataaac

SEQ ID NO: 1916600 - DNA, 15 bp, Homo sapiens
ttgctactataaact

SEQ ID NO: 1916601 - DNA, 15 bp, Homo sapiens
tgctactataaacta

SEQ ID NO: 1916602 - DNA, 15 bp, Homo sapiens
gctactataaactat

SEQ ID NO: 1916603 - DNA, 15 bp, Homo sapiens
ctactataaactatc

SEQ ID NO: 1916604 - DNA, 15 bp, Homo sapiens
tactataaactatct

SEQ ID NO: 1916605 - DNA, 15 bp, Homo sapiens
actataaactatctt

SEQ ID NO: 1916606 - DNA, 15 bp, Homo sapiens
ctataaactatcttg

SEQ ID NO: 1916607 - DNA, 15 bp, Homo sapiens
tataaactatcttgg

SEQ ID NO: 1916608 - DNA, 15 bp, Homo sapiens
ataaactatcttggc

SEQ ID NO: 1916609 - DNA, 15 bp, Homo sapiens
taaactatcttggca

SEQ ID NO: 1916610 - DNA, 15 bp, Homo sapiens
aaactatcttggcac

SEQ ID NO: 1916611 - DNA, 15 bp, Homo sapiens
aactatcttggcaca

SEQ ID NO: 1916612 - DNA, 15 bp, Homo sapiens
actatcttggcacaa

SEQ ID NO: 1916613 - DNA, 15 bp, Homo sapiens
ctatcttggcacaaa

SEQ ID NO: 1916614 - DNA, 15 bp, Homo sapiens
tatcttggcacaaaa

SEQ ID NO: 1916615 - DNA, 15 bp, Homo sapiens
atcttggcacaaaaa

SEQ ID NO: 1916616 - DNA, 15 bp, Homo sapiens
tcttggcacaaaaat

SEQ ID NO: 1916617 - DNA, 15 bp, Homo sapiens
cttggcacaaaaata

SEQ ID NO: 1916618 - DNA, 15 bp, Homo sapiens
ttggcacaaaaatat

SEQ ID NO: 1916619 - DNA, 15 bp, Homo sapiens
tggcacaaaaatata

SEQ ID NO: 1916620 - DNA, 15 bp, Homo sapiens
ggcacaaaaatatac

SEQ ID NO: 1916621 - DNA, 15 bp, Homo sapiens
gcacaaaaatataca

SEQ ID NO: 1916622 - DNA, 15 bp, Homo sapiens
cacaaaaatatacag

SEQ ID NO: 1916623 - DNA, 15 bp, Homo sapiens
acaaaaatatacaga

SEQ ID NO: 1916624 - DNA, 15 bp, Homo sapiens
caaaaatatacagat

SEQ ID NO: 1916625 - DNA, 15 bp, Homo sapiens
aaaaatatacagata

SEQ ID NO: 1916626 - DNA, 15 bp, Homo sapiens
aaaatatacagatac

SEQ ID NO: 1916627 - DNA, 15 bp, Homo sapiens
aaatatacagatacc

SEQ ID NO: 1916628 - DNA, 15 bp, Homo sapiens
aatatacagatacct

SEQ ID NO: 1916629 - DNA, 15 bp, Homo sapiens
atatacagatacctg

SEQ ID NO: 1916630 - DNA, 15 bp, Homo sapiens
tatacagatacctga

SEQ ID NO: 1916631 - DNA, 15 bp, Homo sapiens
atacagatacctgaa

SEQ ID NO: 1916632 - DNA, 15 bp, Homo sapiens
tacagatacctgaag

SEQ ID NO: 1916633 - DNA, 15 bp, Homo sapiens
acagatacctgaagc

SEQ ID NO: 1916634 - DNA, 15 bp, Homo sapiens
cagatacctgaagca

SEQ ID NO: 1916635 - DNA, 15 bp, Homo sapiens
agatacctgaagcat

SEQ ID NO: 1916636 - DNA, 15 bp, Homo sapiens
gatacctgaagcatt

SEQ ID NO: 1916637 - DNA, 15 bp, Homo sapiens
atacctgaagcattc

SEQ ID NO: 1916638 - DNA, 15 bp, Homo sapiens
tacctgaagcattca

SEQ ID NO: 1916639 - DNA, 15 bp, Homo sapiens
acctgaagcattcat

SEQ ID NO: 1916640 - DNA, 15 bp, Homo sapiens
cctgaagcattcata

SEQ ID NO: 1916641 - DNA, 15 bp, Homo sapiens
ctgaagcattcataa

SEQ ID NO: 1916642 - DNA, 15 bp, Homo sapiens
tgaagcattcataat

SEQ ID NO: 1916643 - DNA, 15 bp, Homo sapiens
gaagcattcataatc

SEQ ID NO: 1916644 - DNA, 15 bp, Homo sapiens
aagcattcataatct

SEQ ID NO: 1916645 - DNA, 15 bp, Homo sapiens
agcattcataatcta

SEQ ID NO: 1916646 - DNA, 15 bp, Homo sapiens
gcattcataatctaa

SEQ ID NO: 1916647 - DNA, 15 bp, Homo sapiens
cattcataatctaaa

SEQ ID NO: 1916648 - DNA, 15 bp, Homo sapiens
attcataatctaaat

SEQ ID NO: 1916649 - DNA, 15 bp, Homo sapiens
ttcataatctaaatt

SEQ ID NO: 1916650 - DNA, 15 bp, Homo sapiens
tcataatctaaattg

SEQ ID NO: 1916651 - DNA, 15 bp, Homo sapiens
cataatctaaattgg

SEQ ID NO: 1916652 - DNA, 15 bp, Homo sapiens
ataatctaaattggc

SEQ ID NO: 1916653 - DNA, 15 bp, Homo sapiens
taatctaaattggct

SEQ ID NO: 1916654 - DNA, 15 bp, Homo sapiens
aatctaaattggctt

SEQ ID NO: 1916655 - DNA, 15 bp, Homo sapiens
atctaaattggcttg

SEQ ID NO: 1916656 - DNA, 15 bp, Homo sapiens
tctaaattggcttgg

SEQ ID NO: 1916657 - DNA, 15 bp, Homo sapiens
ctaaattggcttggt

SEQ ID NO: 1916658 - DNA, 15 bp, Homo sapiens
taaattggcttggtt

SEQ ID NO: 1916659 - DNA, 15 bp, Homo sapiens
aaattggcttggttt

SEQ ID NO: 1916660 - DNA, 15 bp, Homo sapiens
aattggcttggttta

SEQ ID NO: 1916661 - DNA, 15 bp, Homo sapiens
attggcttggtttaa

SEQ ID NO: 1916662 - DNA, 15 bp, Homo sapiens
ttggcttggtttaaa

SEQ ID NO: 1916663 - DNA, 15 bp, Homo sapiens
tggcttggtttaaat

SEQ ID NO: 1916664 - DNA, 15 bp, Homo sapiens
ggcttggtttaaatt

SEQ ID NO: 1916665 - DNA, 15 bp, Homo sapiens
gcttggtttaaattc

SEQ ID NO: 1916666 - DNA, 15 bp, Homo sapiens
cttggtttaaattca

SEQ ID NO: 1916667 - DNA, 15 bp, Homo sapiens
ttggtttaaattcaa

SEQ ID NO: 1916668 - DNA, 15 bp, Homo sapiens
tggtttaaattcaac

SEQ ID NO: 1916669 - DNA, 15 bp, Homo sapiens
ggtttaaattcaacc

SEQ ID NO: 1916670 - DNA, 15 bp, Homo sapiens
gtttaaattcaacca

SEQ ID NO: 1916671 - DNA, 15 bp, Homo sapiens
tttaaattcaaccag

SEQ ID NO: 1916672 - DNA, 15 bp, Homo sapiens
ttaaattcaaccaga

SEQ ID NO: 1916673 - DNA, 15 bp, Homo sapiens
taaattcaaccagaa

SEQ ID NO: 1916674 - DNA, 15 bp, Homo sapiens
aaattcaaccagaaa

SEQ ID NO: 1916675 - DNA, 15 bp, Homo sapiens
aattcaaccagaaat

SEQ ID NO: 1916676 - DNA, 15 bp, Homo sapiens
attcaaccagaaatg

SEQ ID NO: 1916677 - DNA, 15 bp, Homo sapiens
ttcaaccagaaatgg

SEQ ID NO: 1916678 - DNA, 15 bp, Homo sapiens
tcaaccagaaatggt

SEQ ID NO: 1916679 - DNA, 15 bp, Homo sapiens
caaccagaaatggtt

SEQ ID NO: 1916680 - DNA, 15 bp, Homo sapiens
aaccagaaatggttt

SEQ ID NO: 1916681 - DNA, 15 bp, Homo sapiens
accagaaatggtttg

SEQ ID NO: 1916682 - DNA, 15 bp, Homo sapiens
ccagaaatggtttgt

SEQ ID NO: 1916683 - DNA, 15 bp, Homo sapiens
cagaaatggtttgtc

SEQ ID NO: 1916684 - DNA, 15 bp, Homo sapiens
agaaatggtttgtct

SEQ ID NO: 1916685 - DNA, 15 bp, Homo sapiens
gaaatggtttgtctg

SEQ ID NO: 1916686 - DNA, 15 bp, Homo sapiens
aaatggtttgtctgt

SEQ ID NO: 1916687 - DNA, 15 bp, Homo sapiens
aatggtttgtctgtt

SEQ ID NO: 1916688 - DNA, 15 bp, Homo sapiens
atggtttgtctgtta

SEQ ID NO: 1916689 - DNA, 15 bp, Homo sapiens
tggtttgtctgttat

SEQ ID NO: 1916690 - DNA, 15 bp, Homo sapiens
ggtttgtctgttatt

SEQ ID NO: 1916691 - DNA, 15 bp, Homo sapiens
gtttgtctgttattt

SEQ ID NO: 1916692 - DNA, 15 bp, Homo sapiens
tttgtctgttatttt

SEQ ID NO: 1916693 - DNA, 15 bp, Homo sapiens
ttgtctgttattttt

SEQ ID NO: 1916694 - DNA, 15 bp, Homo sapiens
tgtctgttatttttt

SEQ ID NO: 1916695 - DNA, 15 bp, Homo sapiens
gtctgttatttttta

SEQ ID NO: 1916696 - DNA, 15 bp, Homo sapiens
tctgttattttttaa

SEQ ID NO: 1916697 - DNA, 15 bp, Homo sapiens
ctgttattttttaaa

SEQ ID NO: 1916698 - DNA, 15 bp, Homo sapiens
tgttattttttaaat

SEQ ID NO: 1916699 - DNA, 15 bp, Homo sapiens
gttattttttaaatg

SEQ ID NO: 1916700 - DNA, 15 bp, Homo sapiens
ttattttttaaatgc

SEQ ID NO: 1916701 - DNA, 15 bp, Homo sapiens
tattttttaaatgct

SEQ ID NO: 1916702 - DNA, 15 bp, Homo sapiens
attttttaaatgctt

SEQ ID NO: 1916703 - DNA, 15 bp, Homo sapiens
ttttttaaatgcttt

SEQ ID NO: 1916704 - DNA, 15 bp, Homo sapiens
tttttaaatgctttg

SEQ ID NO: 1916705 - DNA, 15 bp, Homo sapiens
ttttaaatgctttgg

SEQ ID NO: 1916706 - DNA, 15 bp, Homo sapiens
tttaaatgctttggt

SEQ ID NO: 1916707 - DNA, 15 bp, Homo sapiens
ttaaatgctttggtt

SEQ ID NO: 1916708 - DNA, 15 bp, Homo sapiens
taaatgctttggttc

SEQ ID NO: 1916709 - DNA, 15 bp, Homo sapiens
aaatgctttggttca

SEQ ID NO: 1916710 - DNA, 15 bp, Homo sapiens
aatgctttggttcaa

SEQ ID NO: 1916711 - DNA, 15 bp, Homo sapiens
atgctttggttcaaa

SEQ ID NO: 1916712 - DNA, 15 bp, Homo sapiens
tgctttggttcaaaa

SEQ ID NO: 1916713 - DNA, 15 bp, Homo sapiens
gctttggttcaaaaa

SEQ ID NO: 1916714 - DNA, 15 bp, Homo sapiens
ctttggttcaaaaaa

SEQ ID NO: 1916715 - DNA, 15 bp, Homo sapiens
tttggttcaaaaaac

SEQ ID NO: 1916716 - DNA, 15 bp, Homo sapiens
ttggttcaaaaaaca

SEQ ID NO: 1916717 - DNA, 15 bp, Homo sapiens
tggttcaaaaaacat

SEQ ID NO: 1916718 - DNA, 15 bp, Homo sapiens
ggttcaaaaaacatt

SEQ ID NO: 1916719 - DNA, 15 bp, Homo sapiens
gttcaaaaaacattt

SEQ ID NO: 1916720 - DNA, 15 bp, Homo sapiens
ttcaaaaaacatttc

SEQ ID NO: 1916721 - DNA, 15 bp, Homo sapiens
tcaaaaaacatttct

SEQ ID NO: 1916722 - DNA, 15 bp, Homo sapiens
caaaaaacatttcta

SEQ ID NO: 1916723 - DNA, 15 bp, Homo sapiens
aaaaaacatttctaa

SEQ ID NO: 1916724 - DNA, 15 bp, Homo sapiens
aaaaacatttctaaa

SEQ ID NO: 1916725 - DNA, 15 bp, Homo sapiens
aaaacatttctaaaa

SEQ ID NO: 1916726 - DNA, 15 bp, Homo sapiens
aaacatttctaaaaa

SEQ ID NO: 1916727 - DNA, 15 bp, Homo sapiens
aacatttctaaaaat

SEQ ID NO: 1916728 - DNA, 15 bp, Homo sapiens
acatttctaaaaatg

SEQ ID NO: 1916729 - DNA, 15 bp, Homo sapiens
catttctaaaaatgt

SEQ ID NO: 1916730 - DNA, 15 bp, Homo sapiens
atttctaaaaatgtt

SEQ ID NO: 1916731 - DNA, 15 bp, Homo sapiens
tttctaaaaatgtta

SEQ ID NO: 1916732 - DNA, 15 bp, Homo sapiens
ttctaaaaatgttaa

SEQ ID NO: 1916733 - DNA, 15 bp, Homo sapiens
tctaaaaatgttaaa

SEQ ID NO: 1916734 - DNA, 15 bp, Homo sapiens
ctaaaaatgttaaag

SEQ ID NO: 1916735 - DNA, 15 bp, Homo sapiens
taaaaatgttaaaga

SEQ ID NO: 1916736 - DNA, 15 bp, Homo sapiens
aaaaatgttaaagaa

SEQ ID NO: 1916737 - DNA, 15 bp, Homo sapiens
aaaatgttaaagaaa

SEQ ID NO: 1916738 - DNA, 15 bp, Homo sapiens
aaatgttaaagaaat

SEQ ID NO: 1916739 - DNA, 15 bp, Homo sapiens
aatgttaaagaaatg

SEQ ID NO: 1916740 - DNA, 15 bp, Homo sapiens
atgttaaagaaatga

SEQ ID NO: 1916741 - DNA, 15 bp, Homo sapiens
tgttaaagaaatgat

SEQ ID NO: 1916742 - DNA, 15 bp, Homo sapiens
gttaaagaaatgatc

SEQ ID NO: 1916743 - DNA, 15 bp, Homo sapiens
ttaaagaaatgatca

SEQ ID NO: 1916744 - DNA, 15 bp, Homo sapiens
taaagaaatgatcag

SEQ ID NO: 1916745 - DNA, 15 bp, Homo sapiens
aaagaaatgatcagg

SEQ ID NO: 1916746 - DNA, 15 bp, Homo sapiens
aagaaatgatcaggg

SEQ ID NO: 1916747 - DNA, 15 bp, Homo sapiens
agaaatgatcagggc

SEQ ID NO: 1916748 - DNA, 15 bp, Homo sapiens
gaaatgatcagggca

SEQ ID NO: 1916749 - DNA, 15 bp, Homo sapiens
aaatgatcagggcat

SEQ ID NO: 1916750 - DNA, 15 bp, Homo sapiens
aatgatcagggcatc

SEQ ID NO: 1916751 - DNA, 15 bp, Homo sapiens
atgatcagggcatct

SEQ ID NO: 1916752 - DNA, 15 bp, Homo sapiens
tgatcagggcatctt

SEQ ID NO: 1916753 - DNA, 15 bp, Homo sapiens
gatcagggcatcttt

SEQ ID NO: 1916754 - DNA, 15 bp, Homo sapiens
atcagggcatctttg

SEQ ID NO: 1916755 - DNA, 15 bp, Homo sapiens
tcagggcatctttga

SEQ ID NO: 1916756 - DNA, 15 bp, Homo sapiens
cagggcatctttgaa

SEQ ID NO: 1916757 - DNA, 15 bp, Homo sapiens
agggcatctttgaag

SEQ ID NO: 1916758 - DNA, 15 bp, Homo sapiens
gggcatctttgaaga

SEQ ID NO: 1916759 - DNA, 15 bp, Homo sapiens
ggcatctttgaagat

SEQ ID NO: 1916760 - DNA, 15 bp, Homo sapiens
gcatctttgaagatg

SEQ ID NO: 1916761 - DNA, 15 bp, Homo sapiens
catctttgaagatgt

SEQ ID NO: 1916762 - DNA, 15 bp, Homo sapiens
atctttgaagatgtc

SEQ ID NO: 1916763 - DNA, 15 bp, Homo sapiens
tctttgaagatgtcc

SEQ ID NO: 1916764 - DNA, 15 bp, Homo sapiens
ctttgaagatgtcca

SEQ ID NO: 1916765 - DNA, 15 bp, Homo sapiens
tttgaagatgtccat

SEQ ID NO: 1916766 - DNA, 15 bp, Homo sapiens
ttgaagatgtccatt

SEQ ID NO: 1916767 - DNA, 15 bp, Homo sapiens
tgaagatgtccattt

SEQ ID NO: 1916768 - DNA, 15 bp, Homo sapiens
gaagatgtccatttt

SEQ ID NO: 1916769 - DNA, 15 bp, Homo sapiens
aagatgtccattttt

SEQ ID NO: 1916770 - DNA, 15 bp, Homo sapiens
agatgtccatttttg

SEQ ID NO: 1916771 - DNA, 15 bp, Homo sapiens
gatgtccatttttga

SEQ ID NO: 1916772 - DNA, 15 bp, Homo sapiens
atgtccatttttgaa

SEQ ID NO: 1916773 - DNA, 15 bp, Homo sapiens
tgtccatttttgaag

SEQ ID NO: 1916774 - DNA, 15 bp, Homo sapiens
gtccatttttgaagg

SEQ ID NO: 1916775 - DNA, 15 bp, Homo sapiens
tccatttttgaagga

SEQ ID NO: 1916776 - DNA, 15 bp, Homo sapiens
ccatttttgaaggac

SEQ ID NO: 1916777 - DNA, 15 bp, Homo sapiens
catttttgaaggaca

SEQ ID NO: 1916778 - DNA, 15 bp, Homo sapiens
atttttgaaggacaa

SEQ ID NO: 1916779 - DNA, 15 bp, Homo sapiens
tttttgaaggacaaa

SEQ ID NO: 1916780 - DNA, 15 bp, Homo sapiens
ttttgaaggacaaaa

SEQ ID NO: 1916781 - DNA, 15 bp, Homo sapiens
tttgaaggacaaaaa

SEQ ID NO: 1916782 - DNA, 15 bp, Homo sapiens
ttgaaggacaaaaat

SEQ ID NO: 1916783 - DNA, 15 bp, Homo sapiens
tgaaggacaaaaata

SEQ ID NO: 1916784 - DNA, 15 bp, Homo sapiens
gaaggacaaaaataa

SEQ ID NO: 1916785 - DNA, 15 bp, Homo sapiens
aaggacaaaaataaa

SEQ ID NO: 1916786 - DNA, 15 bp, Homo sapiens
aggacaaaaataaag

SEQ ID NO: 1916787 - DNA, 15 bp, Homo sapiens
ggacaaaaataaagg

SEQ ID NO: 1916788 - DNA, 15 bp, Homo sapiens
gacaaaaataaaggt

SEQ ID NO: 1916789 - DNA, 15 bp, Homo sapiens
acaaaaataaaggta

SEQ ID NO: 1916790 - DNA, 15 bp, Homo sapiens
caaaaataaaggtat

SEQ ID NO: 1916791 - DNA, 15 bp, Homo sapiens
aaaaataaaggtatt

SEQ ID NO: 1916792 - DNA, 15 bp, Homo sapiens
aaaataaaggtattc

SEQ ID NO: 1916793 - DNA, 15 bp, Homo sapiens
aaataaaggtattcc

SEQ ID NO: 1916794 - DNA, 15 bp, Homo sapiens
aataaaggtattccc

SEQ ID NO: 1916795 - DNA, 15 bp, Homo sapiens
ataaaggtattccca

SEQ ID NO: 1916796 - DNA, 15 bp, Homo sapiens
taaaggtattcccac

SEQ ID NO: 1916797 - DNA, 15 bp, Homo sapiens
aaaggtattcccaca

SEQ ID NO: 1916798 - DNA, 15 bp, Homo sapiens
aaggtattcccacac

SEQ ID NO: 1916799 - DNA, 15 bp, Homo sapiens
aggtattcccacact

SEQ ID NO: 1916800 - DNA, 15 bp, Homo sapiens
ggtattcccacactg

SEQ ID NO: 1916801 - DNA, 15 bp, Homo sapiens
gtattcccacactgc

SEQ ID NO: 1916802 - DNA, 15 bp, Homo sapiens
tattcccacactgcc

SEQ ID NO: 1916803 - DNA, 15 bp, Homo sapiens
attcccacactgcct

SEQ ID NO: 1916804 - DNA, 15 bp, Homo sapiens
ttcccacactgcctt

SEQ ID NO: 1916805 - DNA, 15 bp, Homo sapiens
tcccacactgcctta

SEQ ID NO: 1916806 - DNA, 15 bp, Homo sapiens
cccacactgccttac

SEQ ID NO: 1916807 - DNA, 15 bp, Homo sapiens
ccacactgccttaca

SEQ ID NO: 1916808 - DNA, 15 bp, Homo sapiens
cacactgccttacac

SEQ ID NO: 1916809 - DNA, 15 bp, Homo sapiens
acactgccttacacc

SEQ ID NO: 1916810 - DNA, 15 bp, Homo sapiens
cactgccttacaccc

SEQ ID NO: 1916811 - DNA, 15 bp, Homo sapiens
actgccttacaccct

SEQ ID NO: 1916812 - DNA, 15 bp, Homo sapiens
ctgccttacaccctt

SEQ ID NO: 1916813 - DNA, 15 bp, Homo sapiens
tgccttacacccttt

SEQ ID NO: 1916814 - DNA, 15 bp, Homo sapiens
gccttacaccctttt

SEQ ID NO: 1916815 - DNA, 15 bp, Homo sapiens
ccttacacccttttg

SEQ ID NO: 1916816 - DNA, 15 bp, Homo sapiens
cttacacccttttga

SEQ ID NO: 1916817 - DNA, 15 bp, Homo sapiens
ttacacccttttgat

SEQ ID NO: 1916818 - DNA, 15 bp, Homo sapiens
tacacccttttgatc

SEQ ID NO: 1916819 - DNA, 15 bp, Homo sapiens
acacccttttgatcc

SEQ ID NO: 1916820 - DNA, 15 bp, Homo sapiens
cacccttttgatcca

SEQ ID NO: 1916821 - DNA, 15 bp, Homo sapiens
acccttttgatccag

SEQ ID NO: 1916822 - DNA, 15 bp, Homo sapiens
cccttttgatccaga

SEQ ID NO: 1916823 - DNA, 15 bp, Homo sapiens
ccttttgatccagag

SEQ ID NO: 1916824 - DNA, 15 bp, Homo sapiens
cttttgatccagagg

SEQ ID NO: 1916825 - DNA, 15 bp, Homo sapiens
ttttgatccagaggc

SEQ ID NO: 1916826 - DNA, 15 bp, Homo sapiens
tttgatccagaggca

SEQ ID NO: 1916827 - DNA, 15 bp, Homo sapiens
ttgatccagaggcat

SEQ ID NO: 1916828 - DNA, 15 bp, Homo sapiens
tgatccagaggcatc

SEQ ID NO: 1916829 - DNA, 15 bp, Homo sapiens
gatccagaggcatct

SEQ ID NO: 1916830 - DNA, 15 bp, Homo sapiens
atccagaggcatcta

SEQ ID NO: 1916831 - DNA, 15 bp, Homo sapiens
tccagaggcatctaa

SEQ ID NO: 1916832 - DNA, 15 bp, Homo sapiens
ccagaggcatctaac

SEQ ID NO: 1916833 - DNA, 15 bp, Homo sapiens
cagaggcatctaact

SEQ ID NO: 1916834 - DNA, 15 bp, Homo sapiens
agaggcatctaactg

SEQ ID NO: 1916835 - DNA, 15 bp, Homo sapiens
gaggcatctaactgg

SEQ ID NO: 1916836 - DNA, 15 bp, Homo sapiens
aggcatctaactggt

SEQ ID NO: 1916837 - DNA, 15 bp, Homo sapiens
ggcatctaactggta

SEQ ID NO: 1916838 - DNA, 15 bp, Homo sapiens
gcatctaactggtag

SEQ ID NO: 1916839 - DNA, 15 bp, Homo sapiens
catctaactggtagg

SEQ ID NO: 1916840 - DNA, 15 bp, Homo sapiens
atctaactggtagga

SEQ ID NO: 1916841 - DNA, 15 bp, Homo sapiens
tctaactggtaggaa

SEQ ID NO: 1916842 - DNA, 15 bp, Homo sapiens
ctaactggtaggaaa

SEQ ID NO: 1916843 - DNA, 15 bp, Homo sapiens
taactggtaggaaat

SEQ ID NO: 1916844 - DNA, 15 bp, Homo sapiens
aactggtaggaaatt

SEQ ID NO: 1916845 - DNA, 15 bp, Homo sapiens
actggtaggaaattt

SEQ ID NO: 1916846 - DNA, 15 bp, Homo sapiens
ctggtaggaaatttg

SEQ ID NO: 1916847 - DNA, 15 bp, Homo sapiens
tggtaggaaatttgc

SEQ ID NO: 1916848 - DNA, 15 bp, Homo sapiens
ggtaggaaatttgct

SEQ ID NO: 1916849 - DNA, 15 bp, Homo sapiens
gtaggaaatttgctt

SEQ ID NO: 1916850 - DNA, 15 bp, Homo sapiens
taggaaatttgcttc

SEQ ID NO: 1916851 - DNA, 15 bp, Homo sapiens
aggaaatttgcttca

SEQ ID NO: 1916852 - DNA, 15 bp, Homo sapiens
ggaaatttgcttcat

SEQ ID NO: 1916853 - DNA, 15 bp, Homo sapiens
gaaatttgcttcatg

SEQ ID NO: 1916854 - DNA, 15 bp, Homo sapiens
aaatttgcttcatgg

SEQ ID NO: 1916855 - DNA, 15 bp, Homo sapiens
aatttgcttcatggc

SEQ ID NO: 1916856 - DNA, 15 bp, Homo sapiens
atttgcttcatggca

SEQ ID NO: 1916857 - DNA, 15 bp, Homo sapiens
tttgcttcatggcag

SEQ ID NO: 1916858 - DNA, 15 bp, Homo sapiens
ttgcttcatggcagt

SEQ ID NO: 1916859 - DNA, 15 bp, Homo sapiens
tgcttcatggcagtc

SEQ ID NO: 1916860 - DNA, 15 bp, Homo sapiens
gcttcatggcagtca

SEQ ID NO: 1916861 - DNA, 15 bp, Homo sapiens
cttcatggcagtcaa

SEQ ID NO: 1916862 - DNA, 15 bp, Homo sapiens
ttcatggcagtcaaa

SEQ ID NO: 1916863 - DNA, 15 bp, Homo sapiens
tcatggcagtcaaag

SEQ ID NO: 1916864 - DNA, 15 bp, Homo sapiens
catggcagtcaaagt

SEQ ID NO: 1916865 - DNA, 15 bp, Homo sapiens
atggcagtcaaagtc

SEQ ID NO: 1916866 - DNA, 15 bp, Homo sapiens
tggcagtcaaagtcc

SEQ ID NO: 1916867 - DNA, 15 bp, Homo sapiens
ggcagtcaaagtcca

SEQ ID NO: 1916868 - DNA, 15 bp, Homo sapiens
gcagtcaaagtccag

SEQ ID NO: 1916869 - DNA, 15 bp, Homo sapiens
cagtcaaagtccagt

SEQ ID NO: 1916870 - DNA, 15 bp, Homo sapiens
agtcaaagtccagtt

SEQ ID NO: 1916871 - DNA, 15 bp, Homo sapiens
gtcaaagtccagttt

SEQ ID NO: 1916872 - DNA, 15 bp, Homo sapiens
tcaaagtccagtttt

SEQ ID NO: 1916873 - DNA, 15 bp, Homo sapiens
caaagtccagttttc

SEQ ID NO: 1916874 - DNA, 15 bp, Homo sapiens
aaagtccagttttca

SEQ ID NO: 1916875 - DNA, 15 bp, Homo sapiens
aagtccagttttcat

SEQ ID NO: 1916876 - DNA, 15 bp, Homo sapiens
agtccagttttcata

SEQ ID NO: 1916877 - DNA, 15 bp, Homo sapiens
gtccagttttcatac

SEQ ID NO: 1916878 - DNA, 15 bp, Homo sapiens
tccagttttcatact

SEQ ID NO: 1916879 - DNA, 15 bp, Homo sapiens
ccagttttcatacta

SEQ ID NO: 1916880 - DNA, 15 bp, Homo sapiens
cagttttcatactaa

SEQ ID NO: 1916881 - DNA, 15 bp, Homo sapiens
agttttcatactaaa

SEQ ID NO: 1916882 - DNA, 15 bp, Homo sapiens
gttttcatactaaat

SEQ ID NO: 1916883 - DNA, 15 bp, Homo sapiens
ttttcatactaaatt

SEQ ID NO: 1916884 - DNA, 15 bp, Homo sapiens
tttcatactaaatta

SEQ ID NO: 1916885 - DNA, 15 bp, Homo sapiens
ttcatactaaattat

SEQ ID NO: 1916886 - DNA, 15 bp, Homo sapiens
tcatactaaattata

SEQ ID NO: 1916887 - DNA, 15 bp, Homo sapiens
catactaaattataa

SEQ ID NO: 1916888 - DNA, 15 bp, Homo sapiens
atactaaattataac

SEQ ID NO: 1916889 - DNA, 15 bp, Homo sapiens
tactaaattataact

SEQ ID NO: 1916890 - DNA, 15 bp, Homo sapiens
actaaattataactg

SEQ ID NO: 1916891 - DNA, 15 bp, Homo sapiens
ctaaattataactga

SEQ ID NO: 1916892 - DNA, 15 bp, Homo sapiens
taaattataactgat

SEQ ID NO: 1916893 - DNA, 15 bp, Homo sapiens
aaattataactgatt

SEQ ID NO: 1916894 - DNA, 15 bp, Homo sapiens
aattataactgattg

SEQ ID NO: 1916895 - DNA, 15 bp, Homo sapiens
attataactgattga

SEQ ID NO: 1916896 - DNA, 15 bp, Homo sapiens
ttataactgattgaa

SEQ ID NO: 1916897 - DNA, 15 bp, Homo sapiens
tataactgattgaaa

SEQ ID NO: 1916898 - DNA, 15 bp, Homo sapiens
ataactgattgaaaa

SEQ ID NO: 1916899 - DNA, 15 bp, Homo sapiens
taactgattgaaaaa

SEQ ID NO: 1916900 - DNA, 15 bp, Homo sapiens
aactgattgaaaaat

SEQ ID NO: 1916901 - DNA, 15 bp, Homo sapiens
actgattgaaaaatt

SEQ ID NO: 1916902 - DNA, 15 bp, Homo sapiens
ctgattgaaaaattc

SEQ ID NO: 1916903 - DNA, 15 bp, Homo sapiens
tgattgaaaaattct

SEQ ID NO: 1916904 - DNA, 15 bp, Homo sapiens
gattgaaaaattctg

SEQ ID NO: 1916905 - DNA, 15 bp, Homo sapiens
attgaaaaattctgc

SEQ ID NO: 1916906 - DNA, 15 bp, Homo sapiens
ttgaaaaattctgct

SEQ ID NO: 1916907 - DNA, 15 bp, Homo sapiens
tgaaaaattctgctt

SEQ ID NO: 1916908 - DNA, 15 bp, Homo sapiens
gaaaaattctgcttt

SEQ ID NO: 1916909 - DNA, 15 bp, Homo sapiens
aaaaattctgctttc

SEQ ID NO: 1916910 - DNA, 15 bp, Homo sapiens
aaaattctgctttct

SEQ ID NO: 1916911 - DNA, 15 bp, Homo sapiens
aaattctgctttctt

SEQ ID NO: 1916912 - DNA, 15 bp, Homo sapiens
aattctgctttcttg

SEQ ID NO: 1916913 - DNA, 15 bp, Homo sapiens
attctgctttcttgg

SEQ ID NO: 1916914 - DNA, 15 bp, Homo sapiens
ttctgctttcttggt

SEQ ID NO: 1916915 - DNA, 15 bp, Homo sapiens
tctgctttcttggtg

SEQ ID NO: 1916916 - DNA, 15 bp, Homo sapiens
ctgctttcttggtga

SEQ ID NO: 1916917 - DNA, 15 bp, Homo sapiens
tgctttcttggtgat

SEQ ID NO: 1916918 - DNA, 15 bp, Homo sapiens
gctttcttggtgata

SEQ ID NO: 1916919 - DNA, 15 bp, Homo sapiens
ctttcttggtgataa

SEQ ID NO: 1916920 - DNA, 15 bp, Homo sapiens
tttcttggtgataac

SEQ ID NO: 1916921 - DNA, 15 bp, Homo sapiens
ttcttggtgataact

SEQ ID NO: 1916922 - DNA, 15 bp, Homo sapiens
tcttggtgataactt

SEQ ID NO: 1916923 - DNA, 15 bp, Homo sapiens
cttggtgataacttt

SEQ ID NO: 1916924 - DNA, 15 bp, Homo sapiens
ttggtgataactttc

SEQ ID NO: 1916925 - DNA, 15 bp, Homo sapiens
tggtgataactttca

SEQ ID NO: 1916926 - DNA, 15 bp, Homo sapiens
ggtgataactttcac

SEQ ID NO: 1916927 - DNA, 15 bp, Homo sapiens
gtgataactttcacc

SEQ ID NO: 1916928 - DNA, 15 bp, Homo sapiens
tgataactttcaccc

SEQ ID NO: 1916929 - DNA, 15 bp, Homo sapiens
gataactttcacccc

SEQ ID NO: 1916930 - DNA, 15 bp, Homo sapiens
ataactttcaccccc

SEQ ID NO: 1916931 - DNA, 15 bp, Homo sapiens
taactttcaccccct

SEQ ID NO: 1916932 - DNA, 15 bp, Homo sapiens
aactttcaccccctt

SEQ ID NO: 1916933 - DNA, 15 bp, Homo sapiens
actttcaccccctta

SEQ ID NO: 1916934 - DNA, 15 bp, Homo sapiens
ctttcacccccttaa

SEQ ID NO: 1916935 - DNA, 15 bp, Homo sapiens
tttcacccccttaat

SEQ ID NO: 1916936 - DNA, 15 bp, Homo sapiens
ttcacccccttaatg

SEQ ID NO: 1916937 - DNA, 15 bp, Homo sapiens
tcacccccttaatgc

SEQ ID NO: 1916938 - DNA, 15 bp, Homo sapiens
cacccccttaatgcc

SEQ ID NO: 1916939 - DNA, 15 bp, Homo sapiens
acccccttaatgcct

SEQ ID NO: 1916940 - DNA, 15 bp, Homo sapiens
cccccttaatgcctt

SEQ ID NO: 1916941 - DNA, 15 bp, Homo sapiens
ccccttaatgccttg

SEQ ID NO: 1916942 - DNA, 15 bp, Homo sapiens
cccttaatgccttgc

SEQ ID NO: 1916943 - DNA, 15 bp, Homo sapiens
ccttaatgccttgct

SEQ ID NO: 1916944 - DNA, 15 bp, Homo sapiens
cttaatgccttgcta

SEQ ID NO: 1916945 - DNA, 15 bp, Homo sapiens
ttaatgccttgctag

SEQ ID NO: 1916946 - DNA, 15 bp, Homo sapiens
taatgccttgctagt

SEQ ID NO: 1916947 - DNA, 15 bp, Homo sapiens
aatgccttgctagta

SEQ ID NO: 1916948 - DNA, 15 bp, Homo sapiens
atgccttgctagtac

SEQ ID NO: 1916949 - DNA, 15 bp, Homo sapiens
tgccttgctagtacc

SEQ ID NO: 1916950 - DNA, 15 bp, Homo sapiens
gccttgctagtacca

SEQ ID NO: 1916951 - DNA, 15 bp, Homo sapiens
ccttgctagtaccag

SEQ ID NO: 1916952 - DNA, 15 bp, Homo sapiens
cttgctagtaccagg

SEQ ID NO: 1916953 - DNA, 15 bp, Homo sapiens
ttgctagtaccaggg

SEQ ID NO: 1916954 - DNA, 15 bp, Homo sapiens
tgctagtaccagggg

SEQ ID NO: 1916955 - DNA, 15 bp, Homo sapiens
gctagtaccagggga

SEQ ID NO: 1916956 - DNA, 15 bp, Homo sapiens
ctagtaccaggggat

SEQ ID NO: 1916957 - DNA, 15 bp, Homo sapiens
tagtaccaggggatt

SEQ ID NO: 1916958 - DNA, 15 bp, Homo sapiens
agtaccaggggattc

SEQ ID NO: 1916959 - DNA, 15 bp, Homo sapiens
gtaccaggggattct

SEQ ID NO: 1916960 - DNA, 15 bp, Homo sapiens
taccaggggattctc

SEQ ID NO: 1916961 - DNA, 15 bp, Homo sapiens
accaggggattctct

SEQ ID NO: 1916962 - DNA, 15 bp, Homo sapiens
ccaggggattctctg

SEQ ID NO: 1916963 - DNA, 15 bp, Homo sapiens
caggggattctctgc

SEQ ID NO: 1916964 - DNA, 15 bp, Homo sapiens
aggggattctctgct

SEQ ID NO: 1916965 - DNA, 15 bp, Homo sapiens
ggggattctctgctc

SEQ ID NO: 1916966 - DNA, 15 bp, Homo sapiens
gggattctctgctct

SEQ ID NO: 1916967 - DNA, 15 bp, Homo sapiens
ggattctctgctcta

SEQ ID NO: 1916968 - DNA, 15 bp, Homo sapiens
gattctctgctctac

SEQ ID NO: 1916969 - DNA, 15 bp, Homo sapiens
attctctgctctact

SEQ ID NO: 1916970 - DNA, 15 bp, Homo sapiens
ttctctgctctactc

SEQ ID NO: 1916971 - DNA, 15 bp, Homo sapiens
tctctgctctactca

SEQ ID NO: 1916972 - DNA, 15 bp, Homo sapiens
ctctgctctactcac

SEQ ID NO: 1916973 - DNA, 15 bp, Homo sapiens
tctgctctactcacc

SEQ ID NO: 1916974 - DNA, 15 bp, Homo sapiens
ctgctctactcacct

SEQ ID NO: 1916975 - DNA, 15 bp, Homo sapiens
tgctctactcaccta

SEQ ID NO: 1916976 - DNA, 15 bp, Homo sapiens
gctctactcacctat

SEQ ID NO: 1916977 - DNA, 15 bp, Homo sapiens
ctctactcacctata

SEQ ID NO: 1916978 - DNA, 15 bp, Homo sapiens
tctactcacctatac

SEQ ID NO: 1916979 - DNA, 15 bp, Homo sapiens
ctactcacctataca

SEQ ID NO: 1916980 - DNA, 15 bp, Homo sapiens
tactcacctatacaa

SEQ ID NO: 1916981 - DNA, 15 bp, Homo sapiens
actcacctatacaaa

SEQ ID NO: 1916982 - DNA, 15 bp, Homo sapiens
ctcacctatacaaat

SEQ ID NO: 1916983 - DNA, 15 bp, Homo sapiens
tcacctatacaaatg

SEQ ID NO: 1916984 - DNA, 15 bp, Homo sapiens
cacctatacaaatgt

SEQ ID NO: 1916985 - DNA, 15 bp, Homo sapiens
acctatacaaatgta

SEQ ID NO: 1916986 - DNA, 15 bp, Homo sapiens
cctatacaaatgtat

SEQ ID NO: 1916987 - DNA, 15 bp, Homo sapiens
ctatacaaatgtatt

SEQ ID NO: 1916988 - DNA, 15 bp, Homo sapiens
tatacaaatgtattc

SEQ ID NO: 1916989 - DNA, 15 bp, Homo sapiens
atacaaatgtattca

SEQ ID NO: 1916990 - DNA, 15 bp, Homo sapiens
tacaaatgtattcac

SEQ ID NO: 1916991 - DNA, 15 bp, Homo sapiens
acaaatgtattcaca

SEQ ID NO: 1916992 - DNA, 15 bp, Homo sapiens
caaatgtattcacat

SEQ ID NO: 1916993 - DNA, 15 bp, Homo sapiens
aaatgtattcacatt

SEQ ID NO: 1916994 - DNA, 15 bp, Homo sapiens
aatgtattcacattt

SEQ ID NO: 1916995 - DNA, 15 bp, Homo sapiens
atgtattcacattta

SEQ ID NO: 1916996 - DNA, 15 bp, Homo sapiens
tgtattcacatttat

SEQ ID NO: 1916997 - DNA, 15 bp, Homo sapiens
gtattcacatttatt

SEQ ID NO: 1916998 - DNA, 15 bp, Homo sapiens
tattcacatttattc

SEQ ID NO: 1916999 - DNA, 15 bp, Homo sapiens
attcacatttattct

SEQ ID NO: 1917000 - DNA, 15 bp, Homo sapiens
ttcacatttattctt

SEQ ID NO: 1917001 - DNA, 15 bp, Homo sapiens
tcacatttattctta

SEQ ID NO: 1917002 - DNA, 15 bp, Homo sapiens
cacatttattcttag

SEQ ID NO: 1917003 - DNA, 15 bp, Homo sapiens
acatttattcttagc

SEQ ID NO: 1917004 - DNA, 15 bp, Homo sapiens
catttattcttagct

SEQ ID NO: 1917005 - DNA, 15 bp, Homo sapiens
atttattcttagctg

SEQ ID NO: 1917006 - DNA, 15 bp, Homo sapiens
tttattcttagctgg

SEQ ID NO: 1917007 - DNA, 15 bp, Homo sapiens
ttattcttagctggt

SEQ ID NO: 1917008 - DNA, 15 bp, Homo sapiens
tattcttagctggtt

SEQ ID NO: 1917009 - DNA, 15 bp, Homo sapiens
attcttagctggtta

SEQ ID NO: 1917010 - DNA, 15 bp, Homo sapiens
ttcttagctggttaa

SEQ ID NO: 1917011 - DNA, 15 bp, Homo sapiens
tcttagctggttaaa

SEQ ID NO: 1917012 - DNA, 15 bp, Homo sapiens
cttagctggttaaat

SEQ ID NO: 1917013 - DNA, 15 bp, Homo sapiens
ttagctggttaaatt

SEQ ID NO: 1917014 - DNA, 15 bp, Homo sapiens
tagctggttaaattt

SEQ ID NO: 1917015 - DNA, 15 bp, Homo sapiens
agctggttaaatttt

SEQ ID NO: 1917016 - DNA, 15 bp, Homo sapiens
gctggttaaatttta

SEQ ID NO: 1917017 - DNA, 15 bp, Homo sapiens
ctggttaaattttaa

SEQ ID NO: 1917018 - DNA, 15 bp, Homo sapiens
tggttaaattttaag

SEQ ID NO: 1917019 - DNA, 15 bp, Homo sapiens
ggttaaattttaagg

SEQ ID NO: 1917020 - DNA, 15 bp, Homo sapiens
gttaaattttaaggt

SEQ ID NO: 1917021 - DNA, 15 bp, Homo sapiens
ttaaattttaaggtg

SEQ ID NO: 1917022 - DNA, 15 bp, Homo sapiens
taaattttaaggtgt

SEQ ID NO: 1917023 - DNA, 15 bp, Homo sapiens
aaattttaaggtgtc

SEQ ID NO: 1917024 - DNA, 15 bp, Homo sapiens
aattttaaggtgtca

SEQ ID NO: 1917025 - DNA, 15 bp, Homo sapiens
attttaaggtgtcaa

SEQ ID NO: 1917026 - DNA, 15 bp, Homo sapiens
ttttaaggtgtcaac

SEQ ID NO: 1917027 - DNA, 15 bp, Homo sapiens
tttaaggtgtcaacc

SEQ ID NO: 1917028 - DNA, 15 bp, Homo sapiens
ttaaggtgtcaacca

SEQ ID NO: 1917029 - DNA, 15 bp, Homo sapiens
taaggtgtcaaccag

SEQ ID NO: 1917030 - DNA, 15 bp, Homo sapiens
aaggtgtcaaccaga

SEQ ID NO: 1917031 - DNA, 15 bp, Homo sapiens
aggtgtcaaccagac

SEQ ID NO: 1917032 - DNA, 15 bp, Homo sapiens
ggtgtcaaccagacc

SEQ ID NO: 1917033 - DNA, 15 bp, Homo sapiens
gtgtcaaccagacct

SEQ ID NO: 1917034 - DNA, 15 bp, Homo sapiens
tgtcaaccagacctt

SEQ ID NO: 1917035 - DNA, 15 bp, Homo sapiens
gtcaaccagaccttg

SEQ ID NO: 1917036 - DNA, 15 bp, Homo sapiens
tcaaccagaccttgc

SEQ ID NO: 1917037 - DNA, 15 bp, Homo sapiens
caaccagaccttgct

SEQ ID NO: 1917038 - DNA, 15 bp, Homo sapiens
aaccagaccttgcta

SEQ ID NO: 1917039 - DNA, 15 bp, Homo sapiens
accagaccttgctac

SEQ ID NO: 1917040 - DNA, 15 bp, Homo sapiens
ccagaccttgctaca

SEQ ID NO: 1917041 - DNA, 15 bp, Homo sapiens
cagaccttgctacaa

SEQ ID NO: 1917042 - DNA, 15 bp, Homo sapiens
agaccttgctacaag

SEQ ID NO: 1917043 - DNA, 15 bp, Homo sapiens
gaccttgctacaaga

SEQ ID NO: 1917044 - DNA, 15 bp, Homo sapiens
accttgctacaagaa

SEQ ID NO: 1917045 - DNA, 15 bp, Homo sapiens
ccttgctacaagaac

SEQ ID NO: 1917046 - DNA, 15 bp, Homo sapiens
cttgctacaagaaca

SEQ ID NO: 1917047 - DNA, 15 bp, Homo sapiens
ttgctacaagaacag

SEQ ID NO: 1917048 - DNA, 15 bp, Homo sapiens
tgctacaagaacagc

SEQ ID NO: 1917049 - DNA, 15 bp, Homo sapiens
gctacaagaacagca

SEQ ID NO: 1917050 - DNA, 15 bp, Homo sapiens
ctacaagaacagcac

SEQ ID NO: 1917051 - DNA, 15 bp, Homo sapiens
tacaagaacagcaca

SEQ ID NO: 1917052 - DNA, 15 bp, Homo sapiens
acaagaacagcacat

SEQ ID NO: 1917053 - DNA, 15 bp, Homo sapiens
caagaacagcacatt

SEQ ID NO: 1917054 - DNA, 15 bp, Homo sapiens
aagaacagcacatta

SEQ ID NO: 1917055 - DNA, 15 bp, Homo sapiens
agaacagcacattaa

SEQ ID NO: 1917056 - DNA, 15 bp, Homo sapiens
gaacagcacattaaa

SEQ ID NO: 1917057 - DNA, 15 bp, Homo sapiens
aacagcacattaaac

SEQ ID NO: 1917058 - DNA, 15 bp, Homo sapiens
acagcacattaaacg

SEQ ID NO: 1917059 - DNA, 15 bp, Homo sapiens
cagcacattaaacgt

SEQ ID NO: 1917060 - DNA, 15 bp, Homo sapiens
agcacattaaacgtg

SEQ ID NO: 1917061 - DNA, 15 bp, Homo sapiens
gcacattaaacgtgg

SEQ ID NO: 1917062 - DNA, 15 bp, Homo sapiens
cacattaaacgtggt

SEQ ID NO: 1917063 - DNA, 15 bp, Homo sapiens
acattaaacgtggtt

SEQ ID NO: 1917064 - DNA, 15 bp, Homo sapiens
cattaaacgtggttt

SEQ ID NO: 1917065 - DNA, 15 bp, Homo sapiens
attaaacgtggttta

SEQ ID NO: 1917066 - DNA, 15 bp, Homo sapiens
ttaaacgtggtttac

SEQ ID NO: 1917067 - DNA, 15 bp, Homo sapiens
taaacgtggtttacg

SEQ ID NO: 1917068 - DNA, 15 bp, Homo sapiens
aaacgtggtttacga

SEQ ID NO: 1917069 - DNA, 15 bp, Homo sapiens
aacgtggtttacgat

SEQ ID NO: 1917070 - DNA, 15 bp, Homo sapiens
acgtggtttacgata

SEQ ID NO: 1917071 - DNA, 15 bp, Homo sapiens
cgtggtttacgataa

SEQ ID NO: 1917072 - DNA, 15 bp, Homo sapiens
gtggtttacgataaa

SEQ ID NO: 1917073 - DNA, 15 bp, Homo sapiens
tggtttacgataaat

SEQ ID NO: 1917074 - DNA, 15 bp, Homo sapiens
ggtttacgataaatg

SEQ ID NO: 1917075 - DNA, 15 bp, Homo sapiens
gtttacgataaatgc

SEQ ID NO: 1917076 - DNA, 15 bp, Homo sapiens
tttacgataaatgcc

SEQ ID NO: 1917077 - DNA, 15 bp, Homo sapiens
ttacgataaatgcca

SEQ ID NO: 1917078 - DNA, 15 bp, Homo sapiens
tacgataaatgccag

SEQ ID NO: 1917079 - DNA, 15 bp, Homo sapiens
acgataaatgccagc

SEQ ID NO: 1917080 - DNA, 15 bp, Homo sapiens
cgataaatgccagca

SEQ ID NO: 1917081 - DNA, 15 bp, Homo sapiens
gataaatgccagcat

SEQ ID NO: 1917082 - DNA, 15 bp, Homo sapiens
taaatgccagcatgc

SEQ ID NO: 1917083 - DNA, 15 bp, Homo sapiens
aaatgccagcatgct

SEQ ID NO: 1917084 - DNA, 15 bp, Homo sapiens
aatgccagcatgctc

SEQ ID NO: 1917085 - DNA, 15 bp, Homo sapiens
atgccagcatgctca

SEQ ID NO: 1917086 - DNA, 15 bp, Homo sapiens
tgccagcatgctcat

SEQ ID NO: 1917087 - DNA, 15 bp, Homo sapiens
gccagcatgctcatc

SEQ ID NO: 1917088 - DNA, 15 bp, Homo sapiens
ccagcatgctcatcc

SEQ ID NO: 1917089 - DNA, 15 bp, Homo sapiens
cagcatgctcatcct

SEQ ID NO: 1917090 - DNA, 15 bp, Homo sapiens
agcatgctcatcctc

SEQ ID NO: 1917091 - DNA, 15 bp, Homo sapiens
gcatgctcatcctcc

SEQ ID NO: 1917092 - DNA, 15 bp, Homo sapiens
catgctcatcctcca

SEQ ID NO: 1917093 - DNA, 15 bp, Homo sapiens
atgctcatcctccat

SEQ ID NO: 1917094 - DNA, 15 bp, Homo sapiens
tgctcatcctccatt

SEQ ID NO: 1917095 - DNA, 15 bp, Homo sapiens
gctcatcctccattc

SEQ ID NO: 1917096 - DNA, 15 bp, Homo sapiens
ctcatcctccattct

SEQ ID NO: 1917097 - DNA, 15 bp, Homo sapiens
tcatcctccattctt

SEQ ID NO: 1917098 - DNA, 15 bp, Homo sapiens
catcctccattctta

SEQ ID NO: 1917099 - DNA, 15 bp, Homo sapiens
atcctccattcttaa

SEQ ID NO: 1917100 - DNA, 15 bp, Homo sapiens
tcctccattcttaac

SEQ ID NO: 1917101 - DNA, 15 bp, Homo sapiens
cctccattcttaact

SEQ ID NO: 1917102 - DNA, 15 bp, Homo sapiens
ctccattcttaacta

SEQ ID NO: 1917103 - DNA, 15 bp, Homo sapiens
tccattcttaactaa

SEQ ID NO: 1917104 - DNA, 15 bp, Homo sapiens
ccattcttaactaat

SEQ ID NO: 1917105 - DNA, 15 bp, Homo sapiens
cattcttaactaatc

SEQ ID NO: 1917106 - DNA, 15 bp, Homo sapiens
attcttaactaatca

SEQ ID NO: 1917107 - DNA, 15 bp, Homo sapiens
ttcttaactaatcaa

SEQ ID NO: 1917108 - DNA, 15 bp, Homo sapiens
tcttaactaatcaaa

SEQ ID NO: 1917109 - DNA, 15 bp, Homo sapiens
cttaactaatcaaag

SEQ ID NO: 1917110 - DNA, 15 bp, Homo sapiens
ttaactaatcaaaga

SEQ ID NO: 1917111 - DNA, 15 bp, Homo sapiens
taactaatcaaagaa

SEQ ID NO: 1917112 - DNA, 15 bp, Homo sapiens
aactaatcaaagaaa

SEQ ID NO: 1917113 - DNA, 15 bp, Homo sapiens
actaatcaaagaaac

SEQ ID NO: 1917114 - DNA, 15 bp, Homo sapiens
ctaatcaaagaaact

SEQ ID NO: 1917115 - DNA, 15 bp, Homo sapiens
taatcaaagaaactt

SEQ ID NO: 1917116 - DNA, 15 bp, Homo sapiens
aatcaaagaaacttc

SEQ ID NO: 1917117 - DNA, 15 bp, Homo sapiens
atcaaagaaacttcc

SEQ ID NO: 1917118 - DNA, 15 bp, Homo sapiens
tcaaagaaacttcct

SEQ ID NO: 1917119 - DNA, 15 bp, Homo sapiens
caaagaaacttcctg

SEQ ID NO: 1917120 - DNA, 15 bp, Homo sapiens
aaagaaacttcctgc

SEQ ID NO: 1917121 - DNA, 15 bp, Homo sapiens
aagaaacttcctgct

SEQ ID NO: 1917122 - DNA, 15 bp, Homo sapiens
agaaacttcctgctg

SEQ ID NO: 1917123 - DNA, 15 bp, Homo sapiens
gaaacttcctgctgt

SEQ ID NO: 1917124 - DNA, 15 bp, Homo sapiens
aaacttcctgctgtt

SEQ ID NO: 1917125 - DNA, 15 bp, Homo sapiens
aacttcctgctgttt

SEQ ID NO: 1917126 - DNA, 15 bp, Homo sapiens
acttcctgctgttta

SEQ ID NO: 1917127 - DNA, 15 bp, Homo sapiens
cttcctgctgtttat

SEQ ID NO: 1917128 - DNA, 15 bp, Homo sapiens
ttcctgctgtttata

SEQ ID NO: 1917129 - DNA, 15 bp, Homo sapiens
tcctgctgtttatag

SEQ ID NO: 1917130 - DNA, 15 bp, Homo sapiens
cctgctgtttatagt

SEQ ID NO: 1917131 - DNA, 15 bp, Homo sapiens
ctgctgtttatagtc

SEQ ID NO: 1917132 - DNA, 15 bp, Homo sapiens
tgctgtttatagtca

SEQ ID NO: 1917133 - DNA, 15 bp, Homo sapiens
gctgtttatagtcaa

SEQ ID NO: 1917134 - DNA, 15 bp, Homo sapiens
ctgtttatagtcaaa

SEQ ID NO: 1917135 - DNA, 15 bp, Homo sapiens
tgtttatagtcaaat

SEQ ID NO: 1917136 - DNA, 15 bp, Homo sapiens
gtttatagtcaaata

SEQ ID NO: 1917137 - DNA, 15 bp, Homo sapiens
tttatagtcaaataa

SEQ ID NO: 1917138 - DNA, 15 bp, Homo sapiens
ttatagtcaaataat

SEQ ID NO: 1917139 - DNA, 15 bp, Homo sapiens
tatagtcaaataatt

SEQ ID NO: 1917140 - DNA, 15 bp, Homo sapiens
atagtcaaataattc

SEQ ID NO: 1917141 - DNA, 15 bp, Homo sapiens
tagtcaaataattca

SEQ ID NO: 1917142 - DNA, 15 bp, Homo sapiens
agtcaaataattcaa

SEQ ID NO: 1917143 - DNA, 15 bp, Homo sapiens
gtcaaataattcaat

SEQ ID NO: 1917144 - DNA, 15 bp, Homo sapiens
tcaaataattcaatg

SEQ ID NO: 1917145 - DNA, 15 bp, Homo sapiens
caaataattcaatga

SEQ ID NO: 1917146 - DNA, 15 bp, Homo sapiens
aaataattcaatgac

SEQ ID NO: 1917147 - DNA, 15 bp, Homo sapiens
aataattcaatgact

SEQ ID NO: 1917148 - DNA, 15 bp, Homo sapiens
ataattcaatgacta

SEQ ID NO: 1917149 - DNA, 15 bp, Homo sapiens
taattcaatgactac

SEQ ID NO: 1917150 - DNA, 15 bp, Homo sapiens
aattcaatgactaca

SEQ ID NO: 1917151 - DNA, 15 bp, Homo sapiens
attcaatgactacag

SEQ ID NO: 1917152 - DNA, 15 bp, Homo sapiens
ttcaatgactacagc

SEQ ID NO: 1917153 - DNA, 15 bp, Homo sapiens
tcaatgactacagct

SEQ ID NO: 1917154 - DNA, 15 bp, Homo sapiens
caatgactacagctc

SEQ ID NO: 1917155 - DNA, 15 bp, Homo sapiens
aatgactacagctca

SEQ ID NO: 1917156 - DNA, 15 bp, Homo sapiens
atgactacagctcag

SEQ ID NO: 1917157 - DNA, 15 bp, Homo sapiens
tgactacagctcagc

SEQ ID NO: 1917158 - DNA, 15 bp, Homo sapiens
gactacagctcagca

SEQ ID NO: 1917159 - DNA, 15 bp, Homo sapiens
actacagctcagcaa

SEQ ID NO: 1917160 - DNA, 15 bp, Homo sapiens
ctacagctcagcaaa

SEQ ID NO: 1917161 - DNA, 15 bp, Homo sapiens
tacagctcagcaaaa

SEQ ID NO: 1917162 - DNA, 15 bp, Homo sapiens
acagctcagcaaaaa

SEQ ID NO: 1917163 - DNA, 15 bp, Homo sapiens
cagctcagcaaaaaa

SEQ ID NO: 1917164 - DNA, 15 bp, Homo sapiens
agctcagcaaaaaaa

SEQ ID NO: 1917165 - DNA, 15 bp, Homo sapiens
gctcagcaaaaaaaa

SEQ ID NO: 1917166 - DNA, 15 bp, Homo sapiens
ctcagcaaaaaaaaa

SEQ ID NO: 1917167 - DNA, 15 bp, Homo sapiens
tcagcaaaaaaaaaa

SEQ ID NO: 1917168 - DNA, 15 bp, Homo sapiens
cagcaaaaaaaaaaa

SEQ ID NO: 1917169 - DNA, 15 bp, Homo sapiens
aaaaaaaaaaagcaa

SEQ ID NO: 1917170 - DNA, 15 bp, Homo sapiens
aaaaaaaaaagcaag

SEQ ID NO: 1917171 - DNA, 15 bp, Homo sapiens
aaaaaaaaagcaagg

SEQ ID NO: 1917172 - DNA, 15 bp, Homo sapiens
aaaaaaaagcaaggt

SEQ ID NO: 1917173 - DNA, 15 bp, Homo sapiens
aaaaaaagcaaggtg

SEQ ID NO: 1917174 - DNA, 15 bp, Homo sapiens
aaaaaagcaaggtgc

SEQ ID NO: 1917175 - DNA, 15 bp, Homo sapiens
aaaaagcaaggtgcc

SEQ ID NO: 1917176 - DNA, 15 bp, Homo sapiens
aaaagcaaggtgcct

SEQ ID NO: 1917177 - DNA, 15 bp, Homo sapiens
aaagcaaggtgcctg

SEQ ID NO: 1917178 - DNA, 15 bp, Homo sapiens
aagcaaggtgcctgt

SEQ ID NO: 1917179 - DNA, 15 bp, Homo sapiens
agcaaggtgcctgtg

SEQ ID NO: 1917180 - DNA, 15 bp, Homo sapiens
gcaaggtgcctgtgt

SEQ ID NO: 1917181 - DNA, 15 bp, Homo sapiens
caaggtgcctgtgtg

SEQ ID NO: 1917182 - DNA, 15 bp, Homo sapiens
aaggtgcctgtgtgc

SEQ ID NO: 1917183 - DNA, 15 bp, Homo sapiens
aggtgcctgtgtgcc

SEQ ID NO: 1917184 - DNA, 15 bp, Homo sapiens
ggtgcctgtgtgccc

SEQ ID NO: 1917185 - DNA, 15 bp, Homo sapiens
gtgcctgtgtgccca

SEQ ID NO: 1917186 - DNA, 15 bp, Homo sapiens
tgcctgtgtgcccac

SEQ ID NO: 1917187 - DNA, 15 bp, Homo sapiens
gcctgtgtgcccact

SEQ ID NO: 1917188 - DNA, 15 bp, Homo sapiens
cctgtgtgcccactg

SEQ ID NO: 1917189 - DNA, 15 bp, Homo sapiens
ctgtgtgcccactga

SEQ ID NO: 1917190 - DNA, 15 bp, Homo sapiens
tgtgtgcccactgat

SEQ ID NO: 1917191 - DNA, 15 bp, Homo sapiens
gtgtgcccactgata

SEQ ID NO: 1917192 - DNA, 15 bp, Homo sapiens
tgtgcccactgataa

SEQ ID NO: 1917193 - DNA, 15 bp, Homo sapiens
gtgcccactgataaa

SEQ ID NO: 1917194 - DNA, 15 bp, Homo sapiens
tgcccactgataaag

SEQ ID NO: 1917195 - DNA, 15 bp, Homo sapiens
gcccactgataaagt

SEQ ID NO: 1917196 - DNA, 15 bp, Homo sapiens
cccactgataaagtc

SEQ ID NO: 1917197 - DNA, 15 bp, Homo sapiens
ccactgataaagtca

SEQ ID NO: 1917198 - DNA, 15 bp, Homo sapiens
cactgataaagtcat

SEQ ID NO: 1917199 - DNA, 15 bp, Homo sapiens
actgataaagtcatg

SEQ ID NO: 1917200 - DNA, 15 bp, Homo sapiens
ctgataaagtcatgg

SEQ ID NO: 1917201 - DNA, 15 bp, Homo sapiens
tgataaagtcatggg

SEQ ID NO: 1917202 - DNA, 15 bp, Homo sapiens
gataaagtcatggga

SEQ ID NO: 1917203 - DNA, 15 bp, Homo sapiens
ataaagtcatgggaa

SEQ ID NO: 1917204 - DNA, 15 bp, Homo sapiens
taaagtcatgggaaa

SEQ ID NO: 1917205 - DNA, 15 bp, Homo sapiens
aaagtcatgggaaag

SEQ ID NO: 1917206 - DNA, 15 bp, Homo sapiens
aagtcatgggaaaga

SEQ ID NO: 1917207 - DNA, 15 bp, Homo sapiens
agtcatgggaaagag

SEQ ID NO: 1917208 - DNA, 15 bp, Homo sapiens
gtcatgggaaagagt

SEQ ID NO: 1917209 - DNA, 15 bp, Homo sapiens
tcatgggaaagagta

SEQ ID NO: 1917210 - DNA, 15 bp, Homo sapiens
catgggaaagagtaa

SEQ ID NO: 1917211 - DNA, 15 bp, Homo sapiens
atgggaaagagtaat

SEQ ID NO: 1917212 - DNA, 15 bp, Homo sapiens
tgggaaagagtaatt

SEQ ID NO: 1917213 - DNA, 15 bp, Homo sapiens
gggaaagagtaattc

SEQ ID NO: 1917214 - DNA, 15 bp, Homo sapiens
ggaaagagtaattca

SEQ ID NO: 1917215 - DNA, 15 bp, Homo sapiens
gaaagagtaattcaa

SEQ ID NO: 1917216 - DNA, 15 bp, Homo sapiens
aaagagtaattcaaa

SEQ ID NO: 1917217 - DNA, 15 bp, Homo sapiens
aagagtaattcaaat

SEQ ID NO: 1917218 - DNA, 15 bp, Homo sapiens
agagtaattcaaata

SEQ ID NO: 1917219 - DNA, 15 bp, Homo sapiens
gagtaattcaaatat

SEQ ID NO: 1917220 - DNA, 15 bp, Homo sapiens
agtaattcaaatata

SEQ ID NO: 1917221 - DNA, 15 bp, Homo sapiens
gtaattcaaatatat

SEQ ID NO: 1917222 - DNA, 15 bp, Homo sapiens
taattcaaatatatt

SEQ ID NO: 1917223 - DNA, 15 bp, Homo sapiens
aattcaaatatattt

SEQ ID NO: 1917224 - DNA, 15 bp, Homo sapiens
attcaaatatatttc

SEQ ID NO: 1917225 - DNA, 15 bp, Homo sapiens
ttcaaatatatttca

SEQ ID NO: 1917226 - DNA, 15 bp, Homo sapiens
tcaaatatatttcat

SEQ ID NO: 1917227 - DNA, 15 bp, Homo sapiens
caaatatatttcatt

SEQ ID NO: 1917228 - DNA, 15 bp, Homo sapiens
aaatatatttcatta

SEQ ID NO: 1917229 - DNA, 15 bp, Homo sapiens
aatatatttcattag

SEQ ID NO: 1917230 - DNA, 15 bp, Homo sapiens
atatatttcattagc

SEQ ID NO: 1917231 - DNA, 15 bp, Homo sapiens
tatatttcattagcc

SEQ ID NO: 1917232 - DNA, 15 bp, Homo sapiens
atatttcattagcca

SEQ ID NO: 1917233 - DNA, 15 bp, Homo sapiens
tatttcattagccaa

SEQ ID NO: 1917234 - DNA, 15 bp, Homo sapiens
atttcattagccaaa

SEQ ID NO: 1917235 - DNA, 15 bp, Homo sapiens
tttcattagccaaaa

SEQ ID NO: 1917236 - DNA, 15 bp, Homo sapiens
ttcattagccaaaac

SEQ ID NO: 1917237 - DNA, 15 bp, Homo sapiens
tcattagccaaaact

SEQ ID NO: 1917238 - DNA, 15 bp, Homo sapiens
cattagccaaaactc

SEQ ID NO: 1917239 - DNA, 15 bp, Homo sapiens
attagccaaaactct

SEQ ID NO: 1917240 - DNA, 15 bp, Homo sapiens
ttagccaaaactctt

SEQ ID NO: 1917241 - DNA, 15 bp, Homo sapiens
tagccaaaactcttt

SEQ ID NO: 1917242 - DNA, 15 bp, Homo sapiens
agccaaaactctttg

SEQ ID NO: 1917243 - DNA, 15 bp, Homo sapiens
gccaaaactctttgt

SEQ ID NO: 1917244 - DNA, 15 bp, Homo sapiens
ccaaaactctttgtt

SEQ ID NO: 1917245 - DNA, 15 bp, Homo sapiens
caaaactctttgttt

SEQ ID NO: 1917246 - DNA, 15 bp, Homo sapiens
aaaactctttgtttt

SEQ ID NO: 1917247 - DNA, 15 bp, Homo sapiens
aaactctttgttttt

SEQ ID NO: 1917248 - DNA, 15 bp, Homo sapiens
aactctttgtttttt

SEQ ID NO: 1917249 - DNA, 15 bp, Homo sapiens
actctttgtttttta

SEQ ID NO: 1917250 - DNA, 15 bp, Homo sapiens
ctctttgttttttaa

SEQ ID NO: 1917251 - DNA, 15 bp, Homo sapiens
tctttgttttttaaa

SEQ ID NO: 1917252 - DNA, 15 bp, Homo sapiens
ctttgttttttaaat

SEQ ID NO: 1917253 - DNA, 15 bp, Homo sapiens
tttgttttttaaata

SEQ ID NO: 1917254 - DNA, 15 bp, Homo sapiens
ttgttttttaaatac

SEQ ID NO: 1917255 - DNA, 15 bp, Homo sapiens
tgttttttaaatact

SEQ ID NO: 1917256 - DNA, 15 bp, Homo sapiens
gttttttaaatactt

SEQ ID NO: 1917257 - DNA, 15 bp, Homo sapiens
ttttttaaatacttt

SEQ ID NO: 1917258 - DNA, 15 bp, Homo sapiens
tttttaaatactttg

SEQ ID NO: 1917259 - DNA, 15 bp, Homo sapiens
ttttaaatactttgt

SEQ ID NO: 1917260 - DNA, 15 bp, Homo sapiens
tttaaatactttgtt

SEQ ID NO: 1917261 - DNA, 15 bp, Homo sapiens
ttaaatactttgttc

SEQ ID NO: 1917262 - DNA, 15 bp, Homo sapiens
taaatactttgttcc

SEQ ID NO: 1917263 - DNA, 15 bp, Homo sapiens
aaatactttgttcct

SEQ ID NO: 1917264 - DNA, 15 bp, Homo sapiens
aatactttgttcctg

SEQ ID NO: 1917265 - DNA, 15 bp, Homo sapiens
atactttgttcctgg

SEQ ID NO: 1917266 - DNA, 15 bp, Homo sapiens
tactttgttcctggg

SEQ ID NO: 1917267 - DNA, 15 bp, Homo sapiens
actttgttcctggga

SEQ ID NO: 1917268 - DNA, 15 bp, Homo sapiens
ctttgttcctgggaa

SEQ ID NO: 1917269 - DNA, 15 bp, Homo sapiens
tttgttcctgggaaa

SEQ ID NO: 1917270 - DNA, 15 bp, Homo sapiens
ttgttcctgggaaat

SEQ ID NO: 1917271 - DNA, 15 bp, Homo sapiens
tgttcctgggaaatc

SEQ ID NO: 1917272 - DNA, 15 bp, Homo sapiens
gttcctgggaaatct

SEQ ID NO: 1917273 - DNA, 15 bp, Homo sapiens
ttcctgggaaatcta

SEQ ID NO: 1917274 - DNA, 15 bp, Homo sapiens
tcctgggaaatctac

SEQ ID NO: 1917275 - DNA, 15 bp, Homo sapiens
cctgggaaatctact

SEQ ID NO: 1917276 - DNA, 15 bp, Homo sapiens
ctgggaaatctactg

SEQ ID NO: 1917277 - DNA, 15 bp, Homo sapiens
tgggaaatctactgg

SEQ ID NO: 1917278 - DNA, 15 bp, Homo sapiens
gggaaatctactggt

SEQ ID NO: 1917279 - DNA, 15 bp, Homo sapiens
ggaaatctactggtc

SEQ ID NO: 1917280 - DNA, 15 bp, Homo sapiens
gaaatctactggtct

SEQ ID NO: 1917281 - DNA, 15 bp, Homo sapiens
aaatctactggtcta

SEQ ID NO: 1917282 - DNA, 15 bp, Homo sapiens
aatctactggtctaa

SEQ ID NO: 1917283 - DNA, 15 bp, Homo sapiens
atctactggtctaaa

SEQ ID NO: 1917284 - DNA, 15 bp, Homo sapiens
tctactggtctaaat

SEQ ID NO: 1917285 - DNA, 15 bp, Homo sapiens
ctactggtctaaatt

SEQ ID NO: 1917286 - DNA, 15 bp, Homo sapiens
tactggtctaaattt

SEQ ID NO: 1917287 - DNA, 15 bp, Homo sapiens
actggtctaaatttt

SEQ ID NO: 1917288 - DNA, 15 bp, Homo sapiens
ctggtctaaattttt

SEQ ID NO: 1917289 - DNA, 15 bp, Homo sapiens
tggtctaaatttttc

SEQ ID NO: 1917290 - DNA, 15 bp, Homo sapiens
ggtctaaatttttct

SEQ ID NO: 1917291 - DNA, 15 bp, Homo sapiens
gtctaaatttttctg

SEQ ID NO: 1917292 - DNA, 15 bp, Homo sapiens
tctaaatttttctga

SEQ ID NO: 1917293 - DNA, 15 bp, Homo sapiens
ctaaatttttctgaa

SEQ ID NO: 1917294 - DNA, 15 bp, Homo sapiens
taaatttttctgaaa

SEQ ID NO: 1917295 - DNA, 15 bp, Homo sapiens
aaatttttctgaaat

SEQ ID NO: 1917296 - DNA, 15 bp, Homo sapiens
aatttttctgaaatt

SEQ ID NO: 1917297 - DNA, 15 bp, Homo sapiens
atttttctgaaattt

SEQ ID NO: 1917298 - DNA, 15 bp, Homo sapiens
tttttctgaaatttc

SEQ ID NO: 1917299 - DNA, 15 bp, Homo sapiens
ttttctgaaatttca

SEQ ID NO: 1917300 - DNA, 15 bp, Homo sapiens
tttctgaaatttcag

SEQ ID NO: 1917301 - DNA, 15 bp, Homo sapiens
ttctgaaatttcagg

SEQ ID NO: 1917302 - DNA, 15 bp, Homo sapiens
tctgaaatttcaggc

SEQ ID NO: 1917303 - DNA, 15 bp, Homo sapiens
ctgaaatttcaggct

SEQ ID NO: 1917304 - DNA, 15 bp, Homo sapiens
tgaaatttcaggctt

SEQ ID NO: 1917305 - DNA, 15 bp, Homo sapiens
gaaatttcaggcttc

SEQ ID NO: 1917306 - DNA, 15 bp, Homo sapiens
aaatttcaggcttct

SEQ ID NO: 1917307 - DNA, 15 bp, Homo sapiens
aatttcaggcttcta

SEQ ID NO: 1917308 - DNA, 15 bp, Homo sapiens
atttcaggcttctac

SEQ ID NO: 1917309 - DNA, 15 bp, Homo sapiens
tttcaggcttctacc

SEQ ID NO: 1917310 - DNA, 15 bp, Homo sapiens
ttcaggcttctaccc

SEQ ID NO: 1917311 - DNA, 15 bp, Homo sapiens
tcaggcttctacccc

SEQ ID NO: 1917312 - DNA, 15 bp, Homo sapiens
caggcttctacccca

SEQ ID NO: 1917313 - DNA, 15 bp, Homo sapiens
aggcttctaccccaa

SEQ ID NO: 1917314 - DNA, 15 bp, Homo sapiens
ggcttctaccccaaa

SEQ ID NO: 1917315 - DNA, 15 bp, Homo sapiens
gcttctaccccaaaa

SEQ ID NO: 1917316 - DNA, 15 bp, Homo sapiens
cttctaccccaaaac

SEQ ID NO: 1917317 - DNA, 15 bp, Homo sapiens
ttctaccccaaaacc

SEQ ID NO: 1917318 - DNA, 15 bp, Homo sapiens
tctaccccaaaacct

SEQ ID NO: 1917319 - DNA, 15 bp, Homo sapiens
ctaccccaaaaccta

SEQ ID NO: 1917320 - DNA, 15 bp, Homo sapiens
taccccaaaacctat

SEQ ID NO: 1917321 - DNA, 15 bp, Homo sapiens
accccaaaacctata

SEQ ID NO: 1917322 - DNA, 15 bp, Homo sapiens
ccccaaaacctatat

SEQ ID NO: 1917323 - DNA, 15 bp, Homo sapiens
cccaaaacctatatc

SEQ ID NO: 1917324 - DNA, 15 bp, Homo sapiens
ccaaaacctatatca

SEQ ID NO: 1917325 - DNA, 15 bp, Homo sapiens
caaaacctatatcaa

SEQ ID NO: 1917326 - DNA, 15 bp, Homo sapiens
aaaacctatatcaat

SEQ ID NO: 1917327 - DNA, 15 bp, Homo sapiens
aaacctatatcaatg

SEQ ID NO: 1917328 - DNA, 15 bp, Homo sapiens
aacctatatcaatgt

SEQ ID NO: 1917329 - DNA, 15 bp, Homo sapiens
acctatatcaatgta

SEQ ID NO: 1917330 - DNA, 15 bp, Homo sapiens
cctatatcaatgtac

SEQ ID NO: 1917331 - DNA, 15 bp, Homo sapiens
ctatatcaatgtacc

SEQ ID NO: 1917332 - DNA, 15 bp, Homo sapiens
tatatcaatgtacct

SEQ ID NO: 1917333 - DNA, 15 bp, Homo sapiens
atatcaatgtacctc

SEQ ID NO: 1917334 - DNA, 15 bp, Homo sapiens
tatcaatgtacctca

SEQ ID NO: 1917335 - DNA, 15 bp, Homo sapiens
atcaatgtacctcaa

SEQ ID NO: 1917336 - DNA, 15 bp, Homo sapiens
tcaatgtacctcaaa

SEQ ID NO: 1917337 - DNA, 15 bp, Homo sapiens
caatgtacctcaaag

SEQ ID NO: 1917338 - DNA, 15 bp, Homo sapiens
aatgtacctcaaagt

SEQ ID NO: 1917339 - DNA, 15 bp, Homo sapiens
atgtacctcaaagtt

SEQ ID NO: 1917340 - DNA, 15 bp, Homo sapiens
tgtacctcaaagttc

SEQ ID NO: 1917341 - DNA, 15 bp, Homo sapiens
gtacctcaaagttca

SEQ ID NO: 1917342 - DNA, 15 bp, Homo sapiens
tacctcaaagttcac

SEQ ID NO: 1917343 - DNA, 15 bp, Homo sapiens
acctcaaagttcacc

SEQ ID NO: 1917344 - DNA, 15 bp, Homo sapiens
cctcaaagttcaccc

SEQ ID NO: 1917345 - DNA, 15 bp, Homo sapiens
ctcaaagttcacccg

SEQ ID NO: 1917346 - DNA, 15 bp, Homo sapiens
tcaaagttcacccgc

SEQ ID NO: 1917347 - DNA, 15 bp, Homo sapiens
caaagttcacccgct

SEQ ID NO: 1917348 - DNA, 15 bp, Homo sapiens
aaagttcacccgctt

SEQ ID NO: 1917349 - DNA, 15 bp, Homo sapiens
aagttcacccgcttc

SEQ ID NO: 1917350 - DNA, 15 bp, Homo sapiens
agttcacccgcttcc

SEQ ID NO: 1917351 - DNA, 15 bp, Homo sapiens
gttcacccgcttcct

SEQ ID NO: 1917352 - DNA, 15 bp, Homo sapiens
ttcacccgcttcctt

SEQ ID NO: 1917353 - DNA, 15 bp, Homo sapiens
tcacccgcttcctta

SEQ ID NO: 1917354 - DNA, 15 bp, Homo sapiens
cacccgcttccttat

SEQ ID NO: 1917355 - DNA, 15 bp, Homo sapiens
acccgcttccttatc

SEQ ID NO: 1917356 - DNA, 15 bp, Homo sapiens
cccgcttccttatct

SEQ ID NO: 1917357 - DNA, 15 bp, Homo sapiens
ccgcttccttatctg

SEQ ID NO: 1917358 - DNA, 15 bp, Homo sapiens
cgcttccttatctgt

SEQ ID NO: 1917359 - DNA, 15 bp, Homo sapiens
gcttccttatctgtg

SEQ ID NO: 1917360 - DNA, 15 bp, Homo sapiens
cttccttatctgtgt

SEQ ID NO: 1917361 - DNA, 15 bp, Homo sapiens
ttccttatctgtgtc

SEQ ID NO: 1917362 - DNA, 15 bp, Homo sapiens
tccttatctgtgtct

SEQ ID NO: 1917363 - DNA, 15 bp, Homo sapiens
ccttatctgtgtctc

SEQ ID NO: 1917364 - DNA, 15 bp, Homo sapiens
cttatctgtgtctct

SEQ ID NO: 1917365 - DNA, 15 bp, Homo sapiens
ttatctgtgtctctg

SEQ ID NO: 1917366 - DNA, 15 bp, Homo sapiens
tatctgtgtctctgc

SEQ ID NO: 1917367 - DNA, 15 bp, Homo sapiens
atctgtgtctctgca

SEQ ID NO: 1917368 - DNA, 15 bp, Homo sapiens
tctgtgtctctgcat

SEQ ID NO: 1917369 - DNA, 15 bp, Homo sapiens
ctgtgtctctgcata

SEQ ID NO: 1917370 - DNA, 15 bp, Homo sapiens
tgtgtctctgcatat

SEQ ID NO: 1917371 - DNA, 15 bp, Homo sapiens
gtgtctctgcatata

SEQ ID NO: 1917372 - DNA, 15 bp, Homo sapiens
tgtctctgcatatag

SEQ ID NO: 1917373 - DNA, 15 bp, Homo sapiens
gtctctgcatatagt

SEQ ID NO: 1917374 - DNA, 15 bp, Homo sapiens
tctctgcatatagtc

SEQ ID NO: 1917375 - DNA, 15 bp, Homo sapiens
ctctgcatatagtca

SEQ ID NO: 1917376 - DNA, 15 bp, Homo sapiens
tctgcatatagtcat

SEQ ID NO: 1917377 - DNA, 15 bp, Homo sapiens
ctgcatatagtcatg

SEQ ID NO: 1917378 - DNA, 15 bp, Homo sapiens
tgcatatagtcatgg

SEQ ID NO: 1917379 - DNA, 15 bp, Homo sapiens
gcatatagtcatgga

SEQ ID NO: 1917380 - DNA, 15 bp, Homo sapiens
catatagtcatggag

SEQ ID NO: 1917381 - DNA, 15 bp, Homo sapiens
atatagtcatggagg

SEQ ID NO: 1917382 - DNA, 15 bp, Homo sapiens
tatagtcatggaggt

SEQ ID NO: 1917383 - DNA, 15 bp, Homo sapiens
atagtcatggaggtt

SEQ ID NO: 1917384 - DNA, 15 bp, Homo sapiens
tagtcatggaggttg

SEQ ID NO: 1917385 - DNA, 15 bp, Homo sapiens
agtcatggaggttgt

SEQ ID NO: 1917386 - DNA, 15 bp, Homo sapiens
gtcatggaggttgtg

SEQ ID NO: 1917387 - DNA, 15 bp, Homo sapiens
tcatggaggttgtgc

SEQ ID NO: 1917388 - DNA, 15 bp, Homo sapiens
catggaggttgtgca

SEQ ID NO: 1917389 - DNA, 15 bp, Homo sapiens
atggaggttgtgcat

SEQ ID NO: 1917390 - DNA, 15 bp, Homo sapiens
tggaggttgtgcatt

SEQ ID NO: 1917391 - DNA, 15 bp, Homo sapiens
ggaggttgtgcattg

SEQ ID NO: 1917392 - DNA, 15 bp, Homo sapiens
gaggttgtgcattgc

SEQ ID NO: 1917393 - DNA, 15 bp, Homo sapiens
aggttgtgcattgca

SEQ ID NO: 1917394 - DNA, 15 bp, Homo sapiens
ggttgtgcattgcac

SEQ ID NO: 1917395 - DNA, 15 bp, Homo sapiens
gttgtgcattgcaca

SEQ ID NO: 1917396 - DNA, 15 bp, Homo sapiens
ttgtgcattgcacag

SEQ ID NO: 1917397 - DNA, 15 bp, Homo sapiens
tgtgcattgcacaga

SEQ ID NO: 1917398 - DNA, 15 bp, Homo sapiens
gtgcattgcacagag

SEQ ID NO: 1917399 - DNA, 15 bp, Homo sapiens
tgcattgcacagagg

SEQ ID NO: 1917400 - DNA, 15 bp, Homo sapiens
gcattgcacagaggt

SEQ ID NO: 1917401 - DNA, 15 bp, Homo sapiens
cattgcacagaggta

SEQ ID NO: 1917402 - DNA, 15 bp, Homo sapiens
attgcacagaggtac

SEQ ID NO: 1917403 - DNA, 15 bp, Homo sapiens
ttgcacagaggtacc

SEQ ID NO: 1917404 - DNA, 15 bp, Homo sapiens
tgcacagaggtacca

SEQ ID NO: 1917405 - DNA, 15 bp, Homo sapiens
gcacagaggtaccaa

SEQ ID NO: 1917406 - DNA, 15 bp, Homo sapiens
cacagaggtaccaat

SEQ ID NO: 1917407 - DNA, 15 bp, Homo sapiens
acagaggtaccaatc

SEQ ID NO: 1917408 - DNA, 15 bp, Homo sapiens
cagaggtaccaatca

SEQ ID NO: 1917409 - DNA, 15 bp, Homo sapiens
agaggtaccaatcac

SEQ ID NO: 1917410 - DNA, 15 bp, Homo sapiens
gaggtaccaatcaca

SEQ ID NO: 1917411 - DNA, 15 bp, Homo sapiens
aggtaccaatcacat

SEQ ID NO: 1917412 - DNA, 15 bp, Homo sapiens
ggtaccaatcacatt

SEQ ID NO: 1917413 - DNA, 15 bp, Homo sapiens
gtaccaatcacattg

SEQ ID NO: 1917414 - DNA, 15 bp, Homo sapiens
taccaatcacattgt

SEQ ID NO: 1917415 - DNA, 15 bp, Homo sapiens
accaatcacattgta

SEQ ID NO: 1917416 - DNA, 15 bp, Homo sapiens
ccaatcacattgtaa

SEQ ID NO: 1917417 - DNA, 15 bp, Homo sapiens
caatcacattgtaaa

SEQ ID NO: 1917418 - DNA, 15 bp, Homo sapiens
aatcacattgtaaaa

SEQ ID NO: 1917419 - DNA, 15 bp, Homo sapiens
atcacattgtaaaag

SEQ ID NO: 1917420 - DNA, 15 bp, Homo sapiens
tcacattgtaaaagt

SEQ ID NO: 1917421 - DNA, 15 bp, Homo sapiens
cacattgtaaaagtc

SEQ ID NO: 1917422 - DNA, 15 bp, Homo sapiens
acattgtaaaagtca

SEQ ID NO: 1917423 - DNA, 15 bp, Homo sapiens
cattgtaaaagtcat

SEQ ID NO: 1917424 - DNA, 15 bp, Homo sapiens
attgtaaaagtcata

SEQ ID NO: 1917425 - DNA, 15 bp, Homo sapiens
ttgtaaaagtcatat

SEQ ID NO: 1917426 - DNA, 15 bp, Homo sapiens
tgtaaaagtcatata

SEQ ID NO: 1917427 - DNA, 15 bp, Homo sapiens
gtaaaagtcatatat

SEQ ID NO: 1917428 - DNA, 15 bp, Homo sapiens
taaaagtcatatatg

SEQ ID NO: 1917429 - DNA, 15 bp, Homo sapiens
aaaagtcatatatgt

SEQ ID NO: 1917430 - DNA, 15 bp, Homo sapiens
aaagtcatatatgtg

SEQ ID NO: 1917431 - DNA, 15 bp, Homo sapiens
aagtcatatatgtga

SEQ ID NO: 1917432 - DNA, 15 bp, Homo sapiens
agtcatatatgtgaa

SEQ ID NO: 1917433 - DNA, 15 bp, Homo sapiens
gtcatatatgtgaat

SEQ ID NO: 1917434 - DNA, 15 bp, Homo sapiens
tcatatatgtgaata

SEQ ID NO: 1917435 - DNA, 15 bp, Homo sapiens
catatatgtgaatat

SEQ ID NO: 1917436 - DNA, 15 bp, Homo sapiens
atatatgtgaatatt

SEQ ID NO: 1917437 - DNA, 15 bp, Homo sapiens
tatatgtgaatattt

SEQ ID NO: 1917438 - DNA, 15 bp, Homo sapiens
atatgtgaatattta

SEQ ID NO: 1917439 - DNA, 15 bp, Homo sapiens
tatgtgaatatttat

SEQ ID NO: 1917440 - DNA, 15 bp, Homo sapiens
atgtgaatatttata

SEQ ID NO: 1917441 - DNA, 15 bp, Homo sapiens
tgtgaatatttatag

SEQ ID NO: 1917442 - DNA, 15 bp, Homo sapiens
gtgaatatttatagt

SEQ ID NO: 1917443 - DNA, 15 bp, Homo sapiens
tgaatatttatagtt

SEQ ID NO: 1917444 - DNA, 15 bp, Homo sapiens
gaatatttatagtta

SEQ ID NO: 1917445 - DNA, 15 bp, Homo sapiens
aatatttatagttac

SEQ ID NO: 1917446 - DNA, 15 bp, Homo sapiens
atatttatagttaca

SEQ ID NO: 1917447 - DNA, 15 bp, Homo sapiens
tatttatagttacaa

SEQ ID NO: 1917448 - DNA, 15 bp, Homo sapiens
atttatagttacaat

SEQ ID NO: 1917449 - DNA, 15 bp, Homo sapiens
tttatagttacaatg

SEQ ID NO: 1917450 - DNA, 15 bp, Homo sapiens
ttatagttacaatgc

SEQ ID NO: 1917451 - DNA, 15 bp, Homo sapiens
tatagttacaatgca

SEQ ID NO: 1917452 - DNA, 15 bp, Homo sapiens
atagttacaatgcaa

SEQ ID NO: 1917453 - DNA, 15 bp, Homo sapiens
tagttacaatgcaaa

SEQ ID NO: 1917454 - DNA, 15 bp, Homo sapiens
agttacaatgcaaaa

SEQ ID NO: 1917455 - DNA, 15 bp, Homo sapiens
gttacaatgcaaaaa

SEQ ID NO: 1917456 - DNA, 15 bp, Homo sapiens
ttacaatgcaaaaat

SEQ ID NO: 1917457 - DNA, 15 bp, Homo sapiens
tacaatgcaaaaatt

SEQ ID NO: 1917458 - DNA, 15 bp, Homo sapiens
acaatgcaaaaattg

SEQ ID NO: 1917459 - DNA, 15 bp, Homo sapiens
caatgcaaaaattgg

SEQ ID NO: 1917460 - DNA, 15 bp, Homo sapiens
aatgcaaaaattggt

SEQ ID NO: 1917461 - DNA, 15 bp, Homo sapiens
atgcaaaaattggta

SEQ ID NO: 1917462 - DNA, 15 bp, Homo sapiens
tgcaaaaattggtaa

SEQ ID NO: 1917463 - DNA, 15 bp, Homo sapiens
gcaaaaattggtaaa

SEQ ID NO: 1917464 - DNA, 15 bp, Homo sapiens
caaaaattggtaaat

SEQ ID NO: 1917465 - DNA, 15 bp, Homo sapiens
aaaaattggtaaatg

SEQ ID NO: 1917466 - DNA, 15 bp, Homo sapiens
aaaattggtaaatga

SEQ ID NO: 1917467 - DNA, 15 bp, Homo sapiens
aaattggtaaatgac

SEQ ID NO: 1917468 - DNA, 15 bp, Homo sapiens
aattggtaaatgaca

SEQ ID NO: 1917469 - DNA, 15 bp, Homo sapiens
attggtaaatgacag

SEQ ID NO: 1917470 - DNA, 15 bp, Homo sapiens
ttggtaaatgacagt

SEQ ID NO: 1917471 - DNA, 15 bp, Homo sapiens
tggtaaatgacagta

SEQ ID NO: 1917472 - DNA, 15 bp, Homo sapiens
ggtaaatgacagtaa

SEQ ID NO: 1917473 - DNA, 15 bp, Homo sapiens
gtaaatgacagtaag

SEQ ID NO: 1917474 - DNA, 15 bp, Homo sapiens
taaatgacagtaaga

SEQ ID NO: 1917475 - DNA, 15 bp, Homo sapiens
aaatgacagtaagac

SEQ ID NO: 1917476 - DNA, 15 bp, Homo sapiens
aatgacagtaagacg

SEQ ID NO: 1917477 - DNA, 15 bp, Homo sapiens
atgacagtaagacgt

SEQ ID NO: 1917478 - DNA, 15 bp, Homo sapiens
tgacagtaagacgtg

SEQ ID NO: 1917479 - DNA, 15 bp, Homo sapiens
gacagtaagacgtga

SEQ ID NO: 1917480 - DNA, 15 bp, Homo sapiens
acagtaagacgtgag

SEQ ID NO: 1917481 - DNA, 15 bp, Homo sapiens
cagtaagacgtgagt

SEQ ID NO: 1917482 - DNA, 15 bp, Homo sapiens
agtaagacgtgagtt

SEQ ID NO: 1917483 - DNA, 15 bp, Homo sapiens
gtaagacgtgagttt

SEQ ID NO: 1917484 - DNA, 15 bp, Homo sapiens
taagacgtgagtttt

SEQ ID NO: 1917485 - DNA, 15 bp, Homo sapiens
aagacgtgagtttta

SEQ ID NO: 1917486 - DNA, 15 bp, Homo sapiens
agacgtgagttttat

SEQ ID NO: 1917487 - DNA, 15 bp, Homo sapiens
gacgtgagttttata

SEQ ID NO: 1917488 - DNA, 15 bp, Homo sapiens
acgtgagttttataa

SEQ ID NO: 1917489 - DNA, 15 bp, Homo sapiens
cgtgagttttataaa

SEQ ID NO: 1917490 - DNA, 15 bp, Homo sapiens
gtgagttttataaaa

SEQ ID NO: 1917491 - DNA, 15 bp, Homo sapiens
tgagttttataaaaa

SEQ ID NO: 1917492 - DNA, 15 bp, Homo sapiens
gagttttataaaaaa

SEQ ID NO: 1917493 - DNA, 15 bp, Homo sapiens
agttttataaaaaaa

SEQ ID NO: 1917494 - DNA, 15 bp, Homo sapiens
gttttataaaaaaaa

SEQ ID NO: 1917495 - DNA, 15 bp, Homo sapiens
ttttataaaaaaaat

SEQ ID NO: 1917496 - DNA, 15 bp, Homo sapiens
tttataaaaaaaata

SEQ ID NO: 1917497 - DNA, 15 bp, Homo sapiens
ttataaaaaaaataa

SEQ ID NO: 1917498 - DNA, 15 bp, Homo sapiens
tataaaaaaaataag

SEQ ID NO: 1917499 - DNA, 15 bp, Homo sapiens
ataaaaaaaataagt

SEQ ID NO: 1917500 - DNA, 15 bp, Homo sapiens
taaaaaaaataagtt

SEQ ID NO: 1917501 - DNA, 15 bp, Homo sapiens
aaaaaaaataagttt

SEQ ID NO: 1917502 - DNA, 15 bp, Homo sapiens
aaaaaaataagttta

SEQ ID NO: 1917503 - DNA, 15 bp, Homo sapiens
aaaaaataagtttat

SEQ ID NO: 1917504 - DNA, 15 bp, Homo sapiens
aaaaataagtttatt

SEQ ID NO: 1917505 - DNA, 15 bp, Homo sapiens
aaaataagtttatta

SEQ ID NO: 1917506 - DNA, 15 bp, Homo sapiens
aaataagtttattag

SEQ ID NO: 1917507 - DNA, 15 bp, Homo sapiens
aataagtttattagg

SEQ ID NO: 1917508 - DNA, 15 bp, Homo sapiens
ataagtttattagga

SEQ ID NO: 1917509 - DNA, 15 bp, Homo sapiens
taagtttattaggat

SEQ ID NO: 1917510 - DNA, 15 bp, Homo sapiens
aagtttattaggata

SEQ ID NO: 1917511 - DNA, 15 bp, Homo sapiens
agtttattaggataa

SEQ ID NO: 1917512 - DNA, 15 bp, Homo sapiens
gtttattaggataat

SEQ ID NO: 1917513 - DNA, 15 bp, Homo sapiens
tttattaggataatt

SEQ ID NO: 1917514 - DNA, 15 bp, Homo sapiens
ttattaggataattt

SEQ ID NO: 1917515 - DNA, 15 bp, Homo sapiens
tattaggataatttt

SEQ ID NO: 1917516 - DNA, 15 bp, Homo sapiens
attaggataattttc

SEQ ID NO: 1917517 - DNA, 15 bp, Homo sapiens
ttaggataattttcc

SEQ ID NO: 1917518 - DNA, 15 bp, Homo sapiens
taggataattttcca

SEQ ID NO: 1917519 - DNA, 15 bp, Homo sapiens
aggataattttccaa

SEQ ID NO: 1917520 - DNA, 15 bp, Homo sapiens
ggataattttccaac

SEQ ID NO: 1917521 - DNA, 15 bp, Homo sapiens
gataattttccaact

SEQ ID NO: 1917522 - DNA, 15 bp, Homo sapiens
ataattttccaactg

SEQ ID NO: 1917523 - DNA, 15 bp, Homo sapiens
taattttccaactga

SEQ ID NO: 1917524 - DNA, 15 bp, Homo sapiens
aattttccaactgaa

SEQ ID NO: 1917525 - DNA, 15 bp, Homo sapiens
attttccaactgaaa

SEQ ID NO: 1917526 - DNA, 15 bp, Homo sapiens
ttttccaactgaaaa

SEQ ID NO: 1917527 - DNA, 15 bp, Homo sapiens
tttccaactgaaaat

SEQ ID NO: 1917528 - DNA, 15 bp, Homo sapiens
ttccaactgaaaatt

SEQ ID NO: 1917529 - DNA, 15 bp, Homo sapiens
tccaactgaaaatta

SEQ ID NO: 1917530 - DNA, 15 bp, Homo sapiens
ccaactgaaaattat

SEQ ID NO: 1917531 - DNA, 15 bp, Homo sapiens
caactgaaaattata

SEQ ID NO: 1917532 - DNA, 15 bp, Homo sapiens
aactgaaaattataa

SEQ ID NO: 1917533 - DNA, 15 bp, Homo sapiens
actgaaaattataat

SEQ ID NO: 1917534 - DNA, 15 bp, Homo sapiens
ctgaaaattataatg

SEQ ID NO: 1917535 - DNA, 15 bp, Homo sapiens
tgaaaattataatgt

SEQ ID NO: 1917536 - DNA, 15 bp, Homo sapiens
gaaaattataatgtt

SEQ ID NO: 1917537 - DNA, 15 bp, Homo sapiens
aaaattataatgttt

SEQ ID NO: 1917538 - DNA, 15 bp, Homo sapiens
aaattataatgtttt

SEQ ID NO: 1917539 - DNA, 15 bp, Homo sapiens
aattataatgttttg

SEQ ID NO: 1917540 - DNA, 15 bp, Homo sapiens
attataatgttttga

SEQ ID NO: 1917541 - DNA, 15 bp, Homo sapiens
ttataatgttttgaa

SEQ ID NO: 1917542 - DNA, 15 bp, Homo sapiens
tataatgttttgaag

SEQ ID NO: 1917543 - DNA, 15 bp, Homo sapiens
ataatgttttgaaga

SEQ ID NO: 1917544 - DNA, 15 bp, Homo sapiens
taatgttttgaagaa

SEQ ID NO: 1917545 - DNA, 15 bp, Homo sapiens
aatgttttgaagaag

SEQ ID NO: 1917546 - DNA, 15 bp, Homo sapiens
atgttttgaagaagg

SEQ ID NO: 1917547 - DNA, 15 bp, Homo sapiens
tgttttgaagaagga

SEQ ID NO: 1917548 - DNA, 15 bp, Homo sapiens
gttttgaagaaggag

SEQ ID NO: 1917549 - DNA, 15 bp, Homo sapiens
ttttgaagaaggagc

SEQ ID NO: 1917550 - DNA, 15 bp, Homo sapiens
tttgaagaaggagca

SEQ ID NO: 1917551 - DNA, 15 bp, Homo sapiens
ttgaagaaggagcac

SEQ ID NO: 1917552 - DNA, 15 bp, Homo sapiens
tgaagaaggagcaca

SEQ ID NO: 1917553 - DNA, 15 bp, Homo sapiens
gaagaaggagcacag

SEQ ID NO: 1917554 - DNA, 15 bp, Homo sapiens
aagaaggagcacagt

SEQ ID NO: 1917555 - DNA, 15 bp, Homo sapiens
agaaggagcacagtg

SEQ ID NO: 1917556 - DNA, 15 bp, Homo sapiens
gaaggagcacagtgt

SEQ ID NO: 1917557 - DNA, 15 bp, Homo sapiens
aaggagcacagtgtt

SEQ ID NO: 1917558 - DNA, 15 bp, Homo sapiens
aggagcacagtgttt

SEQ ID NO: 1917559 - DNA, 15 bp, Homo sapiens
ggagcacagtgtttc

SEQ ID NO: 1917560 - DNA, 15 bp, Homo sapiens
gagcacagtgtttca

SEQ ID NO: 1917561 - DNA, 15 bp, Homo sapiens
agcacagtgtttcaa

SEQ ID NO: 1917562 - DNA, 15 bp, Homo sapiens
gcacagtgtttcaac

SEQ ID NO: 1917563 - DNA, 15 bp, Homo sapiens
cacagtgtttcaact

SEQ ID NO: 1917564 - DNA, 15 bp, Homo sapiens
acagtgtttcaactc

SEQ ID NO: 1917565 - DNA, 15 bp, Homo sapiens
cagtgtttcaactca

SEQ ID NO: 1917566 - DNA, 15 bp, Homo sapiens
agtgtttcaactcac

SEQ ID NO: 1917567 - DNA, 15 bp, Homo sapiens
gtgtttcaactcaca

SEQ ID NO: 1917568 - DNA, 15 bp, Homo sapiens
tgtttcaactcacac

SEQ ID NO: 1917569 - DNA, 15 bp, Homo sapiens
gtttcaactcacact

SEQ ID NO: 1917570 - DNA, 15 bp, Homo sapiens
tttcaactcacacta

SEQ ID NO: 1917571 - DNA, 15 bp, Homo sapiens
ttcaactcacactaa

SEQ ID NO: 1917572 - DNA, 15 bp, Homo sapiens
tcaactcacactaaa

SEQ ID NO: 1917573 - DNA, 15 bp, Homo sapiens
caactcacactaaaa

SEQ ID NO: 1917574 - DNA, 15 bp, Homo sapiens
aactcacactaaaac

SEQ ID NO: 1917575 - DNA, 15 bp, Homo sapiens
actcacactaaaaca

SEQ ID NO: 1917576 - DNA, 15 bp, Homo sapiens
ctcacactaaaacac

SEQ ID NO: 1917577 - DNA, 15 bp, Homo sapiens
tcacactaaaacact

SEQ ID NO: 1917578 - DNA, 15 bp, Homo sapiens
cacactaaaacactg

SEQ ID NO: 1917579 - DNA, 15 bp, Homo sapiens
acactaaaacactgt

SEQ ID NO: 1917580 - DNA, 15 bp, Homo sapiens
cactaaaacactgta

SEQ ID NO: 1917581 - DNA, 15 bp, Homo sapiens
actaaaacactgtat

SEQ ID NO: 1917582 - DNA, 15 bp, Homo sapiens
ctaaaacactgtata

SEQ ID NO: 1917583 - DNA, 15 bp, Homo sapiens
taaaacactgtatag

SEQ ID NO: 1917584 - DNA, 15 bp, Homo sapiens
aaaacactgtataga

SEQ ID NO: 1917585 - DNA, 15 bp, Homo sapiens
aaacactgtatagat

SEQ ID NO: 1917586 - DNA, 15 bp, Homo sapiens
aacactgtatagata

SEQ ID NO: 1917587 - DNA, 15 bp, Homo sapiens
acactgtatagataa

SEQ ID NO: 1917588 - DNA, 15 bp, Homo sapiens
cactgtatagataag

SEQ ID NO: 1917589 - DNA, 15 bp, Homo sapiens
actgtatagataagc

SEQ ID NO: 1917590 - DNA, 15 bp, Homo sapiens
ctgtatagataagca

SEQ ID NO: 1917591 - DNA, 15 bp, Homo sapiens
tgtatagataagcag

SEQ ID NO: 1917592 - DNA, 15 bp, Homo sapiens
gtatagataagcagt

SEQ ID NO: 1917593 - DNA, 15 bp, Homo sapiens
tatagataagcagtg

SEQ ID NO: 1917594 - DNA, 15 bp, Homo sapiens
atagataagcagtga

SEQ ID NO: 1917595 - DNA, 15 bp, Homo sapiens
tagataagcagtgat

SEQ ID NO: 1917596 - DNA, 15 bp, Homo sapiens
agataagcagtgatt

SEQ ID NO: 1917597 - DNA, 15 bp, Homo sapiens
gataagcagtgattc

SEQ ID NO: 1917598 - DNA, 15 bp, Homo sapiens
ataagcagtgattct

SEQ ID NO: 1917599 - DNA, 15 bp, Homo sapiens
taagcagtgattctg

SEQ ID NO: 1917600 - DNA, 15 bp, Homo sapiens
aagcagtgattctgt

SEQ ID NO: 1917601 - DNA, 15 bp, Homo sapiens
agcagtgattctgtc

SEQ ID NO: 1917602 - DNA, 15 bp, Homo sapiens
gcagtgattctgtca

SEQ ID NO: 1917603 - DNA, 15 bp, Homo sapiens
cagtgattctgtcag

SEQ ID NO: 1917604 - DNA, 15 bp, Homo sapiens
agtgattctgtcaga

SEQ ID NO: 1917605 - DNA, 15 bp, Homo sapiens
gtgattctgtcagaa

SEQ ID NO: 1917606 - DNA, 15 bp, Homo sapiens
tgattctgtcagaaa

SEQ ID NO: 1917607 - DNA, 15 bp, Homo sapiens
gattctgtcagaaac

SEQ ID NO: 1917608 - DNA, 15 bp, Homo sapiens
attctgtcagaaacc

SEQ ID NO: 1917609 - DNA, 15 bp, Homo sapiens
ttctgtcagaaacca

SEQ ID NO: 1917610 - DNA, 15 bp, Homo sapiens
tctgtcagaaaccaa

SEQ ID NO: 1917611 - DNA, 15 bp, Homo sapiens
ctgtcagaaaccaat

SEQ ID NO: 1917612 - DNA, 15 bp, Homo sapiens
tgtcagaaaccaatt

SEQ ID NO: 1917613 - DNA, 15 bp, Homo sapiens
gtcagaaaccaattt

SEQ ID NO: 1917614 - DNA, 15 bp, Homo sapiens
tcagaaaccaattta

SEQ ID NO: 1917615 - DNA, 15 bp, Homo sapiens
cagaaaccaatttaa

SEQ ID NO: 1917616 - DNA, 15 bp, Homo sapiens
agaaaccaatttaat

SEQ ID NO: 1917617 - DNA, 15 bp, Homo sapiens
gaaaccaatttaatt

SEQ ID NO: 1917618 - DNA, 15 bp, Homo sapiens
aaaccaatttaattc

SEQ ID NO: 1917619 - DNA, 15 bp, Homo sapiens
aaccaatttaattct

SEQ ID NO: 1917620 - DNA, 15 bp, Homo sapiens
accaatttaattctg

SEQ ID NO: 1917621 - DNA, 15 bp, Homo sapiens
ccaatttaattctga

SEQ ID NO: 1917622 - DNA, 15 bp, Homo sapiens
caatttaattctgat

SEQ ID NO: 1917623 - DNA, 15 bp, Homo sapiens
aatttaattctgata

SEQ ID NO: 1917624 - DNA, 15 bp, Homo sapiens
atttaattctgataa

SEQ ID NO: 1917625 - DNA, 15 bp, Homo sapiens
ttaattctgataaat

SEQ ID NO: 1917626 - DNA, 15 bp, Homo sapiens
taattctgataaatc

SEQ ID NO: 1917627 - DNA, 15 bp, Homo sapiens
aattctgataaatca

SEQ ID NO: 1917628 - DNA, 15 bp, Homo sapiens
attctgataaatcag

SEQ ID NO: 1917629 - DNA, 15 bp, Homo sapiens
ttctgataaatcaga

SEQ ID NO: 1917630 - DNA, 15 bp, Homo sapiens
tctgataaatcagat

SEQ ID NO: 1917631 - DNA, 15 bp, Homo sapiens
ctgataaatcagata

SEQ ID NO: 1917632 - DNA, 15 bp, Homo sapiens
tgataaatcagataa

SEQ ID NO: 1917633 - DNA, 15 bp, Homo sapiens
gataaatcagataag

SEQ ID NO: 1917634 - DNA, 15 bp, Homo sapiens
ataaatcagataagt

SEQ ID NO: 1917635 - DNA, 15 bp, Homo sapiens
taaatcagataagtt

SEQ ID NO: 1917636 - DNA, 15 bp, Homo sapiens
aaatcagataagtta

SEQ ID NO: 1917637 - DNA, 15 bp, Homo sapiens
aatcagataagttaa

SEQ ID NO: 1917638 - DNA, 15 bp, Homo sapiens
atcagataagttaat

SEQ ID NO: 1917639 - DNA, 15 bp, Homo sapiens
tcagataagttaatc

SEQ ID NO: 1917640 - DNA, 15 bp, Homo sapiens
cagataagttaatca

SEQ ID NO: 1917641 - DNA, 15 bp, Homo sapiens
agataagttaatcat

SEQ ID NO: 1917642 - DNA, 15 bp, Homo sapiens
gataagttaatcatt

SEQ ID NO: 1917643 - DNA, 15 bp, Homo sapiens
ataagttaatcattt

SEQ ID NO: 1917644 - DNA, 15 bp, Homo sapiens
taagttaatcatttg

SEQ ID NO: 1917645 - DNA, 15 bp, Homo sapiens
aagttaatcatttga

SEQ ID NO: 1917646 - DNA, 15 bp, Homo sapiens
agttaatcatttgat

SEQ ID NO: 1917647 - DNA, 15 bp, Homo sapiens
gttaatcatttgatt

SEQ ID NO: 1917648 - DNA, 15 bp, Homo sapiens
ttaatcatttgatta

SEQ ID NO: 1917649 - DNA, 15 bp, Homo sapiens
taatcatttgattac

SEQ ID NO: 1917650 - DNA, 15 bp, Homo sapiens
aatcatttgattaca

SEQ ID NO: 1917651 - DNA, 15 bp, Homo sapiens
atcatttgattacat

SEQ ID NO: 1917652 - DNA, 15 bp, Homo sapiens
tcatttgattacata

SEQ ID NO: 1917653 - DNA, 15 bp, Homo sapiens
catttgattacataa

SEQ ID NO: 1917654 - DNA, 15 bp, Homo sapiens
atttgattacataag

SEQ ID NO: 1917655 - DNA, 15 bp, Homo sapiens
tttgattacataagg

SEQ ID NO: 1917656 - DNA, 15 bp, Homo sapiens
ttgattacataaggg

SEQ ID NO: 1917657 - DNA, 15 bp, Homo sapiens
tgattacataagggg

SEQ ID NO: 1917658 - DNA, 15 bp, Homo sapiens
gattacataaggggc

SEQ ID NO: 1917659 - DNA, 15 bp, Homo sapiens
attacataaggggca

SEQ ID NO: 1917660 - DNA, 15 bp, Homo sapiens
ttacataaggggcag

SEQ ID NO: 1917661 - DNA, 15 bp, Homo sapiens
tacataaggggcagg

SEQ ID NO: 1917662 - DNA, 15 bp, Homo sapiens
acataaggggcagga

SEQ ID NO: 1917663 - DNA, 15 bp, Homo sapiens
cataaggggcaggac

SEQ ID NO: 1917664 - DNA, 15 bp, Homo sapiens
ataaggggcaggaca

SEQ ID NO: 1917665 - DNA, 15 bp, Homo sapiens
taaggggcaggacag

SEQ ID NO: 1917666 - DNA, 15 bp, Homo sapiens
aaggggcaggacagt

SEQ ID NO: 1917667 - DNA, 15 bp, Homo sapiens
aggggcaggacagta

SEQ ID NO: 1917668 - DNA, 15 bp, Homo sapiens
ggggcaggacagtaa

SEQ ID NO: 1917669 - DNA, 15 bp, Homo sapiens
gggcaggacagtaaa

SEQ ID NO: 1917670 - DNA, 15 bp, Homo sapiens
ggcaggacagtaaaa

SEQ ID NO: 1917671 - DNA, 15 bp, Homo sapiens
gcaggacagtaaaaa

SEQ ID NO: 1917672 - DNA, 15 bp, Homo sapiens
caggacagtaaaaag

SEQ ID NO: 1917673 - DNA, 15 bp, Homo sapiens
aggacagtaaaaagt

SEQ ID NO: 1917674 - DNA, 15 bp, Homo sapiens
ggacagtaaaaagtc

SEQ ID NO: 1917675 - DNA, 15 bp, Homo sapiens
gacagtaaaaagtct

SEQ ID NO: 1917676 - DNA, 15 bp, Homo sapiens
acagtaaaaagtcta

SEQ ID NO: 1917677 - DNA, 15 bp, Homo sapiens
cagtaaaaagtctat

SEQ ID NO: 1917678 - DNA, 15 bp, Homo sapiens
agtaaaaagtctatt

SEQ ID NO: 1917679 - DNA, 15 bp, Homo sapiens
gtaaaaagtctattg

SEQ ID NO: 1917680 - DNA, 15 bp, Homo sapiens
taaaaagtctattga

SEQ ID NO: 1917681 - DNA, 15 bp, Homo sapiens
aaaaagtctattgag

SEQ ID NO: 1917682 - DNA, 15 bp, Homo sapiens
aaaagtctattgaga

SEQ ID NO: 1917683 - DNA, 15 bp, Homo sapiens
aaagtctattgagag

SEQ ID NO: 1917684 - DNA, 15 bp, Homo sapiens
aagtctattgagagg

SEQ ID NO: 1917685 - DNA, 15 bp, Homo sapiens
agtctattgagaggt

SEQ ID NO: 1917686 - DNA, 15 bp, Homo sapiens
gtctattgagaggtt

SEQ ID NO: 1917687 - DNA, 15 bp, Homo sapiens
tctattgagaggttc

SEQ ID NO: 1917688 - DNA, 15 bp, Homo sapiens
ctattgagaggttct

SEQ ID NO: 1917689 - DNA, 15 bp, Homo sapiens
tattgagaggttctt

SEQ ID NO: 1917690 - DNA, 15 bp, Homo sapiens
attgagaggttctta

SEQ ID NO: 1917691 - DNA, 15 bp, Homo sapiens
ttgagaggttcttac

SEQ ID NO: 1917692 - DNA, 15 bp, Homo sapiens
tgagaggttcttacc

SEQ ID NO: 1917693 - DNA, 15 bp, Homo sapiens
gagaggttcttacca

SEQ ID NO: 1917694 - DNA, 15 bp, Homo sapiens
agaggttcttaccaa

SEQ ID NO: 1917695 - DNA, 15 bp, Homo sapiens
gaggttcttaccaat

SEQ ID NO: 1917696 - DNA, 15 bp, Homo sapiens
aggttcttaccaata

SEQ ID NO: 1917697 - DNA, 15 bp, Homo sapiens
ggttcttaccaatag

SEQ ID NO: 1917698 - DNA, 15 bp, Homo sapiens
gttcttaccaataga

SEQ ID NO: 1917699 - DNA, 15 bp, Homo sapiens
ttcttaccaatagag

SEQ ID NO: 1917700 - DNA, 15 bp, Homo sapiens
tcttaccaatagaga

SEQ ID NO: 1917701 - DNA, 15 bp, Homo sapiens
cttaccaatagagaa

SEQ ID NO: 1917702 - DNA, 15 bp, Homo sapiens
ttaccaatagagaag

SEQ ID NO: 1917703 - DNA, 15 bp, Homo sapiens
taccaatagagaaga

SEQ ID NO: 1917704 - DNA, 15 bp, Homo sapiens
accaatagagaagag

SEQ ID NO: 1917705 - DNA, 15 bp, Homo sapiens
ccaatagagaagaga

SEQ ID NO: 1917706 - DNA, 15 bp, Homo sapiens
caatagagaagagag

SEQ ID NO: 1917707 - DNA, 15 bp, Homo sapiens
aatagagaagagagt

SEQ ID NO: 1917708 - DNA, 15 bp, Homo sapiens
atagagaagagagtt

SEQ ID NO: 1917709 - DNA, 15 bp, Homo sapiens
tagagaagagagtta

SEQ ID NO: 1917710 - DNA, 15 bp, Homo sapiens
agagaagagagttaa

SEQ ID NO: 1917711 - DNA, 15 bp, Homo sapiens
gagaagagagttaac

SEQ ID NO: 1917712 - DNA, 15 bp, Homo sapiens
agaagagagttaacc

SEQ ID NO: 1917713 - DNA, 15 bp, Homo sapiens
gaagagagttaacca

SEQ ID NO: 1917714 - DNA, 15 bp, Homo sapiens
aagagagttaaccaa

SEQ ID NO: 1917715 - DNA, 15 bp, Homo sapiens
agagagttaaccaaa

SEQ ID NO: 1917716 - DNA, 15 bp, Homo sapiens
gagagttaaccaaaa

SEQ ID NO: 1917717 - DNA, 15 bp, Homo sapiens
agagttaaccaaaaa

SEQ ID NO: 1917718 - DNA, 15 bp, Homo sapiens
gagttaaccaaaaac

SEQ ID NO: 1917719 - DNA, 15 bp, Homo sapiens
agttaaccaaaaacc

SEQ ID NO: 1917720 - DNA, 15 bp, Homo sapiens
gttaaccaaaaaccc

SEQ ID NO: 1917721 - DNA, 15 bp, Homo sapiens
ttaaccaaaaaccca

SEQ ID NO: 1917722 - DNA, 15 bp, Homo sapiens
taaccaaaaacccaa

SEQ ID NO: 1917723 - DNA, 15 bp, Homo sapiens
aaccaaaaacccaaa

SEQ ID NO: 1917724 - DNA, 15 bp, Homo sapiens
accaaaaacccaaac

SEQ ID NO: 1917725 - DNA, 15 bp, Homo sapiens
ccaaaaacccaaaca

SEQ ID NO: 1917726 - DNA, 15 bp, Homo sapiens
caaaaacccaaacat

SEQ ID NO: 1917727 - DNA, 15 bp, Homo sapiens
aaaaacccaaacatc

SEQ ID NO: 1917728 - DNA, 15 bp, Homo sapiens
aaaacccaaacatct

SEQ ID NO: 1917729 - DNA, 15 bp, Homo sapiens
aaacccaaacatctc

SEQ ID NO: 1917730 - DNA, 15 bp, Homo sapiens
aacccaaacatctcc

SEQ ID NO: 1917731 - DNA, 15 bp, Homo sapiens
acccaaacatctccc

SEQ ID NO: 1917732 - DNA, 15 bp, Homo sapiens
cccaaacatctccca

SEQ ID NO: 1917733 - DNA, 15 bp, Homo sapiens
ccaaacatctcccag

SEQ ID NO: 1917734 - DNA, 15 bp, Homo sapiens
caaacatctcccaga

SEQ ID NO: 1917735 - DNA, 15 bp, Homo sapiens
aaacatctcccagaa

SEQ ID NO: 1917736 - DNA, 15 bp, Homo sapiens
aacatctcccagaaa

SEQ ID NO: 1917737 - DNA, 15 bp, Homo sapiens
acatctcccagaaaa

SEQ ID NO: 1917738 - DNA, 15 bp, Homo sapiens
catctcccagaaaag

SEQ ID NO: 1917739 - DNA, 15 bp, Homo sapiens
atctcccagaaaagt

SEQ ID NO: 1917740 - DNA, 15 bp, Homo sapiens
tctcccagaaaagtg

SEQ ID NO: 1917741 - DNA, 15 bp, Homo sapiens
ctcccagaaaagtga

SEQ ID NO: 1917742 - DNA, 15 bp, Homo sapiens
tcccagaaaagtgat

SEQ ID NO: 1917743 - DNA, 15 bp, Homo sapiens
cccagaaaagtgatt

SEQ ID NO: 1917744 - DNA, 15 bp, Homo sapiens
ccagaaaagtgattt

SEQ ID NO: 1917745 - DNA, 15 bp, Homo sapiens
cagaaaagtgattta

SEQ ID NO: 1917746 - DNA, 15 bp, Homo sapiens
agaaaagtgatttaa

SEQ ID NO: 1917747 - DNA, 15 bp, Homo sapiens
gaaaagtgatttaaa

SEQ ID NO: 1917748 - DNA, 15 bp, Homo sapiens
aaaagtgatttaaat

SEQ ID NO: 1917749 - DNA, 15 bp, Homo sapiens
aaagtgatttaaatc

SEQ ID NO: 1917750 - DNA, 15 bp, Homo sapiens
aagtgatttaaatca

SEQ ID NO: 1917751 - DNA, 15 bp, Homo sapiens
agtgatttaaatcac

SEQ ID NO: 1917752 - DNA, 15 bp, Homo sapiens
gtgatttaaatcact

SEQ ID NO: 1917753 - DNA, 15 bp, Homo sapiens
tgatttaaatcactt

SEQ ID NO: 1917754 - DNA, 15 bp, Homo sapiens
gatttaaatcacttt

SEQ ID NO: 1917755 - DNA, 15 bp, Homo sapiens
atttaaatcactttt

SEQ ID NO: 1917756 - DNA, 15 bp, Homo sapiens
tttaaatcacttttt

SEQ ID NO: 1917757 - DNA, 15 bp, Homo sapiens
ttaaatcactttttt

SEQ ID NO: 1917758 - DNA, 15 bp, Homo sapiens
taaatcacttttttc

SEQ ID NO: 1917759 - DNA, 15 bp, Homo sapiens
aaatcacttttttcc

SEQ ID NO: 1917760 - DNA, 15 bp, Homo sapiens
aatcacttttttcca

SEQ ID NO: 1917761 - DNA, 15 bp, Homo sapiens
atcacttttttccaa

SEQ ID NO: 1917762 - DNA, 15 bp, Homo sapiens
tcacttttttccaaa

SEQ ID NO: 1917763 - DNA, 15 bp, Homo sapiens
cacttttttccaaac

SEQ ID NO: 1917764 - DNA, 15 bp, Homo sapiens
acttttttccaaact

SEQ ID NO: 1917765 - DNA, 15 bp, Homo sapiens
cttttttccaaactt

SEQ ID NO: 1917766 - DNA, 15 bp, Homo sapiens
ttttttccaaactta

SEQ ID NO: 1917767 - DNA, 15 bp, Homo sapiens
tttttccaaacttaa

SEQ ID NO: 1917768 - DNA, 15 bp, Homo sapiens
ttttccaaacttaaa

SEQ ID NO: 1917769 - DNA, 15 bp, Homo sapiens
tttccaaacttaaaa

SEQ ID NO: 1917770 - DNA, 15 bp, Homo sapiens
tccaaacttaaaaaa

SEQ ID NO: 1917771 - DNA, 15 bp, Homo sapiens
ccaaacttaaaaaaa

SEQ ID NO: 1917772 - DNA, 15 bp, Homo sapiens
caaacttaaaaaaaa

SEQ ID NO: 1917773 - DNA, 15 bp, Homo sapiens
cttaaaaaaaaaaac

SEQ ID NO: 1917774 - DNA, 15 bp, Homo sapiens
aaaaaaaaaaccctc

SEQ ID NO: 1917775 - DNA, 15 bp, Homo sapiens
aaaaaaaaaccctca

SEQ ID NO: 1917776 - DNA, 15 bp, Homo sapiens
aaaaaaaaccctcat

SEQ ID NO: 1917777 - DNA, 15 bp, Homo sapiens
aaaaaaaccctcatt

SEQ ID NO: 1917778 - DNA, 15 bp, Homo sapiens
aaaaaaccctcatta

SEQ ID NO: 1917779 - DNA, 15 bp, Homo sapiens
aaaaaccctcattat

SEQ ID NO: 1917780 - DNA, 15 bp, Homo sapiens
aaaccctcattatta

SEQ ID NO: 1917781 - DNA, 15 bp, Homo sapiens
aaccctcattattat

SEQ ID NO: 1917782 - DNA, 15 bp, Homo sapiens
accctcattattata

SEQ ID NO: 1917783 - DNA, 15 bp, Homo sapiens
ccctcattattatat

SEQ ID NO: 1917784 - DNA, 15 bp, Homo sapiens
cctcattattatatc

SEQ ID NO: 1917785 - DNA, 15 bp, Homo sapiens
ctcattattatatca

SEQ ID NO: 1917786 - DNA, 15 bp, Homo sapiens
tcattattatatcag

SEQ ID NO: 1917787 - DNA, 15 bp, Homo sapiens
cattattatatcagt

SEQ ID NO: 1917788 - DNA, 15 bp, Homo sapiens
attattatatcagtt

SEQ ID NO: 1917789 - DNA, 15 bp, Homo sapiens
ttattatatcagttt

SEQ ID NO: 1917790 - DNA, 15 bp, Homo sapiens
tattatatcagtttt

SEQ ID NO: 1917791 - DNA, 15 bp, Homo sapiens
attatatcagttttg

SEQ ID NO: 1917792 - DNA, 15 bp, Homo sapiens
ttatatcagttttgt

SEQ ID NO: 1917793 - DNA, 15 bp, Homo sapiens
tatatcagttttgtc

SEQ ID NO: 1917794 - DNA, 15 bp, Homo sapiens
atatcagttttgtca

SEQ ID NO: 1917795 - DNA, 15 bp, Homo sapiens
tatcagttttgtcat

SEQ ID NO: 1917796 - DNA, 15 bp, Homo sapiens
atcagttttgtcatg

SEQ ID NO: 1917797 - DNA, 15 bp, Homo sapiens
tcagttttgtcatgg

SEQ ID NO: 1917798 - DNA, 15 bp, Homo sapiens
cagttttgtcatggc

SEQ ID NO: 1917799 - DNA, 15 bp, Homo sapiens
agttttgtcatggca

SEQ ID NO: 1917800 - DNA, 15 bp, Homo sapiens
gttttgtcatggcac

SEQ ID NO: 1917801 - DNA, 15 bp, Homo sapiens
ttttgtcatggcaca

SEQ ID NO: 1917802 - DNA, 15 bp, Homo sapiens
tttgtcatggcacat

SEQ ID NO: 1917803 - DNA, 15 bp, Homo sapiens
ttgtcatggcacatt

SEQ ID NO: 1917804 - DNA, 15 bp, Homo sapiens
tgtcatggcacattt

SEQ ID NO: 1917805 - DNA, 15 bp, Homo sapiens
gtcatggcacattta

SEQ ID NO: 1917806 - DNA, 15 bp, Homo sapiens
tcatggcacatttat

SEQ ID NO: 1917807 - DNA, 15 bp, Homo sapiens
catggcacatttata

SEQ ID NO: 1917808 - DNA, 15 bp, Homo sapiens
atggcacatttataa

SEQ ID NO: 1917809 - DNA, 15 bp, Homo sapiens
tggcacatttataaa

SEQ ID NO: 1917810 - DNA, 15 bp, Homo sapiens
ggcacatttataaac

SEQ ID NO: 1917811 - DNA, 15 bp, Homo sapiens
gcacatttataaacc

SEQ ID NO: 1917812 - DNA, 15 bp, Homo sapiens
cacatttataaacca

SEQ ID NO: 1917813 - DNA, 15 bp, Homo sapiens
acatttataaaccaa

SEQ ID NO: 1917814 - DNA, 15 bp, Homo sapiens
catttataaaccaag

SEQ ID NO: 1917815 - DNA, 15 bp, Homo sapiens
atttataaaccaagg

SEQ ID NO: 1917816 - DNA, 15 bp, Homo sapiens
tttataaaccaagga

SEQ ID NO: 1917817 - DNA, 15 bp, Homo sapiens
ttataaaccaaggaa

SEQ ID NO: 1917818 - DNA, 15 bp, Homo sapiens
tataaaccaaggaaa

SEQ ID NO: 1917819 - DNA, 15 bp, Homo sapiens
ataaaccaaggaaaa

SEQ ID NO: 1917820 - DNA, 15 bp, Homo sapiens
taaaccaaggaaaat

SEQ ID NO: 1917821 - DNA, 15 bp, Homo sapiens
aaaccaaggaaaata

SEQ ID NO: 1917822 - DNA, 15 bp, Homo sapiens
aaccaaggaaaataa

SEQ ID NO: 1917823 - DNA, 15 bp, Homo sapiens
accaaggaaaataag

SEQ ID NO: 1917824 - DNA, 15 bp, Homo sapiens
ccaaggaaaataagt

SEQ ID NO: 1917825 - DNA, 15 bp, Homo sapiens
caaggaaaataagtc

SEQ ID NO: 1917826 - DNA, 15 bp, Homo sapiens
aaggaaaataagtca

SEQ ID NO: 1917827 - DNA, 15 bp, Homo sapiens
aggaaaataagtcac

SEQ ID NO: 1917828 - DNA, 15 bp, Homo sapiens
ggaaaataagtcaca

SEQ ID NO: 1917829 - DNA, 15 bp, Homo sapiens
gaaaataagtcacag

SEQ ID NO: 1917830 - DNA, 15 bp, Homo sapiens
aaaataagtcacaga

SEQ ID NO: 1917831 - DNA, 15 bp, Homo sapiens
aaataagtcacagag

SEQ ID NO: 1917832 - DNA, 15 bp, Homo sapiens
aataagtcacagaga

SEQ ID NO: 1917833 - DNA, 15 bp, Homo sapiens
ataagtcacagagat

SEQ ID NO: 1917834 - DNA, 15 bp, Homo sapiens
taagtcacagagatt

SEQ ID NO: 1917835 - DNA, 15 bp, Homo sapiens
aagtcacagagattt

SEQ ID NO: 1917836 - DNA, 15 bp, Homo sapiens
agtcacagagatttc

SEQ ID NO: 1917837 - DNA, 15 bp, Homo sapiens
gtcacagagatttcc

SEQ ID NO: 1917838 - DNA, 15 bp, Homo sapiens
tcacagagatttcct

SEQ ID NO: 1917839 - DNA, 15 bp, Homo sapiens
cacagagatttcctc

SEQ ID NO: 1917840 - DNA, 15 bp, Homo sapiens
acagagatttcctca

SEQ ID NO: 1917841 - DNA, 15 bp, Homo sapiens
cagagatttcctcag

SEQ ID NO: 1917842 - DNA, 15 bp, Homo sapiens
agagatttcctcaga

SEQ ID NO: 1917843 - DNA, 15 bp, Homo sapiens
gagatttcctcagag

SEQ ID NO: 1917844 - DNA, 15 bp, Homo sapiens
agatttcctcagaga

SEQ ID NO: 1917845 - DNA, 15 bp, Homo sapiens
gatttcctcagagat

SEQ ID NO: 1917846 - DNA, 15 bp, Homo sapiens
atttcctcagagata

SEQ ID NO: 1917847 - DNA, 15 bp, Homo sapiens
tttcctcagagatag

SEQ ID NO: 1917848 - DNA, 15 bp, Homo sapiens
ttcctcagagatagc

SEQ ID NO: 1917849 - DNA, 15 bp, Homo sapiens
tcctcagagatagct

SEQ ID NO: 1917850 - DNA, 15 bp, Homo sapiens
cctcagagatagctt

SEQ ID NO: 1917851 - DNA, 15 bp, Homo sapiens
ctcagagatagcttt

SEQ ID NO: 1917852 - DNA, 15 bp, Homo sapiens
tcagagatagctttt

SEQ ID NO: 1917853 - DNA, 15 bp, Homo sapiens
cagagatagcttttt

SEQ ID NO: 1917854 - DNA, 15 bp, Homo sapiens
agagatagctttttt

SEQ ID NO: 1917855 - DNA, 15 bp, Homo sapiens
gagatagctttttta

SEQ ID NO: 1917856 - DNA, 15 bp, Homo sapiens
agatagcttttttaa

SEQ ID NO: 1917857 - DNA, 15 bp, Homo sapiens
gatagcttttttaat

SEQ ID NO: 1917858 - DNA, 15 bp, Homo sapiens
atagcttttttaatt

SEQ ID NO: 1917859 - DNA, 15 bp, Homo sapiens
tagcttttttaatta

SEQ ID NO: 1917860 - DNA, 15 bp, Homo sapiens
agcttttttaattaa

SEQ ID NO: 1917861 - DNA, 15 bp, Homo sapiens
gcttttttaattaaa

SEQ ID NO: 1917862 - DNA, 15 bp, Homo sapiens
cttttttaattaaaa

SEQ ID NO: 1917863 - DNA, 15 bp, Homo sapiens
ttttttaattaaaaa

SEQ ID NO: 1917864 - DNA, 15 bp, Homo sapiens
tttttaattaaaaat

SEQ ID NO: 1917865 - DNA, 15 bp, Homo sapiens
ttttaattaaaaatg

SEQ ID NO: 1917866 - DNA, 15 bp, Homo sapiens
tttaattaaaaatgt

SEQ ID NO: 1917867 - DNA, 15 bp, Homo sapiens
aattaaaaatgtgtc

SEQ ID NO: 1917868 - DNA, 15 bp, Homo sapiens
attaaaaatgtgtcc

SEQ ID NO: 1917869 - DNA, 15 bp, Homo sapiens
ttaaaaatgtgtcca

SEQ ID NO: 1917870 - DNA, 15 bp, Homo sapiens
taaaaatgtgtccaa

SEQ ID NO: 1917871 - DNA, 15 bp, Homo sapiens
aaaaatgtgtccaac

SEQ ID NO: 1917872 - DNA, 15 bp, Homo sapiens
aaaatgtgtccaact

SEQ ID NO: 1917873 - DNA, 15 bp, Homo sapiens
aaatgtgtccaacta

SEQ ID NO: 1917874 - DNA, 15 bp, Homo sapiens
aatgtgtccaactat

SEQ ID NO: 1917875 - DNA, 15 bp, Homo sapiens
atgtgtccaactata

SEQ ID NO: 1917876 - DNA, 15 bp, Homo sapiens
tgtgtccaactatat

SEQ ID NO: 1917877 - DNA, 15 bp, Homo sapiens
gtgtccaactatatc

SEQ ID NO: 1917878 - DNA, 15 bp, Homo sapiens
tgtccaactatatct

SEQ ID NO: 1917879 - DNA, 15 bp, Homo sapiens
gtccaactatatcta

SEQ ID NO: 1917880 - DNA, 15 bp, Homo sapiens
tccaactatatctaa

SEQ ID NO: 1917881 - DNA, 15 bp, Homo sapiens
ccaactatatctaac

SEQ ID NO: 1917882 - DNA, 15 bp, Homo sapiens
caactatatctaaca

SEQ ID NO: 1917883 - DNA, 15 bp, Homo sapiens
aactatatctaacat

SEQ ID NO: 1917884 - DNA, 15 bp, Homo sapiens
actatatctaacata

SEQ ID NO: 1917885 - DNA, 15 bp, Homo sapiens
ctatatctaacataa

SEQ ID NO: 1917886 - DNA, 15 bp, Homo sapiens
tatatctaacataaa

SEQ ID NO: 1917887 - DNA, 15 bp, Homo sapiens
atatctaacataaaa

SEQ ID NO: 1917888 - DNA, 15 bp, Homo sapiens
tatctaacataaaat

SEQ ID NO: 1917889 - DNA, 15 bp, Homo sapiens
atctaacataaaata

SEQ ID NO: 1917890 - DNA, 15 bp, Homo sapiens
tctaacataaaataa

SEQ ID NO: 1917891 - DNA, 15 bp, Homo sapiens
ctaacataaaataaa

SEQ ID NO: 1917892 - DNA, 15 bp, Homo sapiens
taacataaaataaaa

SEQ ID NO: 1917893 - DNA, 15 bp, Homo sapiens
aacataaaataaaaa

SEQ ID NO: 1917894 - DNA, 15 bp, Homo sapiens
acataaaataaaaag

SEQ ID NO: 1917895 - DNA, 15 bp, Homo sapiens
cataaaataaaaaga

SEQ ID NO: 1917896 - DNA, 15 bp, Homo sapiens
ataaaataaaaagaa

SEQ ID NO: 1917897 - DNA, 15 bp, Homo sapiens
taaaataaaaagaaa

SEQ ID NO: 1917898 - DNA, 15 bp, Homo sapiens
aaaataaaaagaaaa

SEQ ID NO: 1917899 - DNA, 15 bp, Homo sapiens
aaataaaaagaaaaa

SEQ ID NO: 1917900 - DNA, 15 bp, Homo sapiens
aataaaaagaaaaac

SEQ ID NO: 1917901 - DNA, 15 bp, Homo sapiens
ataaaaagaaaaact

SEQ ID NO: 1917902 - DNA, 15 bp, Homo sapiens
taaaaagaaaaacta

SEQ ID NO: 1917903 - DNA, 15 bp, Homo sapiens
aaaaagaaaaactac

SEQ ID NO: 1917904 - DNA, 15 bp, Homo sapiens
aaaagaaaaactaca

SEQ ID NO: 1917905 - DNA, 15 bp, Homo sapiens
aaagaaaaactacaa

SEQ ID NO: 1917906 - DNA, 15 bp, Homo sapiens
aagaaaaactacaaa

SEQ ID NO: 1917907 - DNA, 15 bp, Homo sapiens
agaaaaactacaaaa

SEQ ID NO: 1917908 - DNA, 15 bp, Homo sapiens
gaaaaactacaaaaa

SEQ ID NO: 1917909 - DNA, 15 bp, Homo sapiens
aaaaactacaaaaaa

SEQ ID NO: 1917910 - DNA, 15 bp, Homo sapiens
aaaactacaaaaaag

SEQ ID NO: 1917911 - DNA, 15 bp, Homo sapiens
aaactacaaaaaagt

SEQ ID NO: 1917912 - DNA, 15 bp, Homo sapiens
aactacaaaaaagtg

SEQ ID NO: 1917913 - DNA, 15 bp, Homo sapiens
actacaaaaaagtga

SEQ ID NO: 1917914 - DNA, 15 bp, Homo sapiens
ctacaaaaaagtgat

SEQ ID NO: 1917915 - DNA, 15 bp, Homo sapiens
tacaaaaaagtgatt

SEQ ID NO: 1917916 - DNA, 15 bp, Homo sapiens
acaaaaaagtgattt

SEQ ID NO: 1917917 - DNA, 15 bp, Homo sapiens
caaaaaagtgattta

SEQ ID NO: 1917918 - DNA, 15 bp, Homo sapiens
aaaaaagtgatttaa

SEQ ID NO: 1917919 - DNA, 15 bp, Homo sapiens
aaaaagtgatttaat

SEQ ID NO: 1917920 - DNA, 15 bp, Homo sapiens
aaaagtgatttaatt

SEQ ID NO: 1917921 - DNA, 15 bp, Homo sapiens
aaagtgatttaattc

SEQ ID NO: 1917922 - DNA, 15 bp, Homo sapiens
aagtgatttaattcc

SEQ ID NO: 1917923 - DNA, 15 bp, Homo sapiens
agtgatttaattcca

SEQ ID NO: 1917924 - DNA, 15 bp, Homo sapiens
gtgatttaattccat

SEQ ID NO: 1917925 - DNA, 15 bp, Homo sapiens
tgatttaattccatc

SEQ ID NO: 1917926 - DNA, 15 bp, Homo sapiens
gatttaattccatct

SEQ ID NO: 1917927 - DNA, 15 bp, Homo sapiens
atttaattccatctg

SEQ ID NO: 1917928 - DNA, 15 bp, Homo sapiens
tttaattccatctgt

SEQ ID NO: 1917929 - DNA, 15 bp, Homo sapiens
ttaattccatctgta

SEQ ID NO: 1917930 - DNA, 15 bp, Homo sapiens
taattccatctgtat

SEQ ID NO: 1917931 - DNA, 15 bp, Homo sapiens
aattccatctgtatc

SEQ ID NO: 1917932 - DNA, 15 bp, Homo sapiens
attccatctgtatct

SEQ ID NO: 1917933 - DNA, 15 bp, Homo sapiens
ttccatctgtatcta

SEQ ID NO: 1917934 - DNA, 15 bp, Homo sapiens
tccatctgtatctag

SEQ ID NO: 1917935 - DNA, 15 bp, Homo sapiens
ccatctgtatctaga

SEQ ID NO: 1917936 - DNA, 15 bp, Homo sapiens
catctgtatctagat

SEQ ID NO: 1917937 - DNA, 15 bp, Homo sapiens
atctgtatctagata

SEQ ID NO: 1917938 - DNA, 15 bp, Homo sapiens
tctgtatctagataa

SEQ ID NO: 1917939 - DNA, 15 bp, Homo sapiens
ctgtatctagataag

SEQ ID NO: 1917940 - DNA, 15 bp, Homo sapiens
tgtatctagataaga

SEQ ID NO: 1917941 - DNA, 15 bp, Homo sapiens
gtatctagataagaa

SEQ ID NO: 1917942 - DNA, 15 bp, Homo sapiens
tatctagataagaaa

SEQ ID NO: 1917943 - DNA, 15 bp, Homo sapiens
atctagataagaaag

SEQ ID NO: 1917944 - DNA, 15 bp, Homo sapiens
tctagataagaaaga

SEQ ID NO: 1917945 - DNA, 15 bp, Homo sapiens
ctagataagaaagag

SEQ ID NO: 1917946 - DNA, 15 bp, Homo sapiens
tagataagaaagagg

SEQ ID NO: 1917947 - DNA, 15 bp, Homo sapiens
agataagaaagagga

SEQ ID NO: 1917948 - DNA, 15 bp, Homo sapiens
gataagaaagaggag

SEQ ID NO: 1917949 - DNA, 15 bp, Homo sapiens
ataagaaagaggaga

SEQ ID NO: 1917950 - DNA, 15 bp, Homo sapiens
taagaaagaggagaa

SEQ ID NO: 1917951 - DNA, 15 bp, Homo sapiens
aagaaagaggagaaa

SEQ ID NO: 1917952 - DNA, 15 bp, Homo sapiens
agaaagaggagaaag

SEQ ID NO: 1917953 - DNA, 15 bp, Homo sapiens
gaaagaggagaaagg

SEQ ID NO: 1917954 - DNA, 15 bp, Homo sapiens
aaagaggagaaaggg

SEQ ID NO: 1917955 - DNA, 15 bp, Homo sapiens
aagaggagaaaggga

SEQ ID NO: 1917956 - DNA, 15 bp, Homo sapiens
agaggagaaagggaa

SEQ ID NO: 1917957 - DNA, 15 bp, Homo sapiens
gaggagaaagggaag

SEQ ID NO: 1917958 - DNA, 15 bp, Homo sapiens
aggagaaagggaagt

SEQ ID NO: 1917959 - DNA, 15 bp, Homo sapiens
ggagaaagggaagtg

SEQ ID NO: 1917960 - DNA, 15 bp, Homo sapiens
gagaaagggaagtgt

SEQ ID NO: 1917961 - DNA, 15 bp, Homo sapiens
agaaagggaagtgtg

SEQ ID NO: 1917962 - DNA, 15 bp, Homo sapiens
gaaagggaagtgtga

SEQ ID NO: 1917963 - DNA, 15 bp, Homo sapiens
aaagggaagtgtgaa

SEQ ID NO: 1917964 - DNA, 15 bp, Homo sapiens
aagggaagtgtgaac

SEQ ID NO: 1917965 - DNA, 15 bp, Homo sapiens
agggaagtgtgaaca

SEQ ID NO: 1917966 - DNA, 15 bp, Homo sapiens
gggaagtgtgaacag

SEQ ID NO: 1917967 - DNA, 15 bp, Homo sapiens
ggaagtgtgaacagg

SEQ ID NO: 1917968 - DNA, 15 bp, Homo sapiens
gaagtgtgaacagga

SEQ ID NO: 1917969 - DNA, 15 bp, Homo sapiens
aagtgtgaacaggaa

SEQ ID NO: 1917970 - DNA, 15 bp, Homo sapiens
agtgtgaacaggaag

SEQ ID NO: 1917971 - DNA, 15 bp, Homo sapiens
gtgtgaacaggaaga

SEQ ID NO: 1917972 - DNA, 15 bp, Homo sapiens
tgtgaacaggaagag

SEQ ID NO: 1917973 - DNA, 15 bp, Homo sapiens
gtgaacaggaagagg

SEQ ID NO: 1917974 - DNA, 15 bp, Homo sapiens
tgaacaggaagagga

SEQ ID NO: 1917975 - DNA, 15 bp, Homo sapiens
gaacaggaagaggaa

SEQ ID NO: 1917976 - DNA, 15 bp, Homo sapiens
aacaggaagaggaac

SEQ ID NO: 1917977 - DNA, 15 bp, Homo sapiens
acaggaagaggaaca

SEQ ID NO: 1917978 - DNA, 15 bp, Homo sapiens
caggaagaggaacag

SEQ ID NO: 1917979 - DNA, 15 bp, Homo sapiens
aggaagaggaacaga

SEQ ID NO: 1917980 - DNA, 15 bp, Homo sapiens
ggaagaggaacagag

SEQ ID NO: 1917981 - DNA, 15 bp, Homo sapiens
gaagaggaacagaga

SEQ ID NO: 1917982 - DNA, 15 bp, Homo sapiens
aagaggaacagagag

SEQ ID NO: 1917983 - DNA, 15 bp, Homo sapiens
agaggaacagagaga

SEQ ID NO: 1917984 - DNA, 15 bp, Homo sapiens
gaggaacagagagaa

SEQ ID NO: 1917985 - DNA, 15 bp, Homo sapiens
aggaacagagagaaa

SEQ ID NO: 1917986 - DNA, 15 bp, Homo sapiens
ggaacagagagaaag

SEQ ID NO: 1917987 - DNA, 15 bp, Homo sapiens
gaacagagagaaaga

SEQ ID NO: 1917988 - DNA, 15 bp, Homo sapiens
aacagagagaaagat

SEQ ID NO: 1917989 - DNA, 15 bp, Homo sapiens
acagagagaaagatt

SEQ ID NO: 1917990 - DNA, 15 bp, Homo sapiens
cagagagaaagattt

SEQ ID NO: 1917991 - DNA, 15 bp, Homo sapiens
agagagaaagattta

SEQ ID NO: 1917992 - DNA, 15 bp, Homo sapiens
gagagaaagatttaa

SEQ ID NO: 1917993 - DNA, 15 bp, Homo sapiens
agagaaagatttaaa

SEQ ID NO: 1917994 - DNA, 15 bp, Homo sapiens
gagaaagatttaaag

SEQ ID NO: 1917995 - DNA, 15 bp, Homo sapiens
agaaagatttaaagc

SEQ ID NO: 1917996 - DNA, 15 bp, Homo sapiens
gaaagatttaaagcc

SEQ ID NO: 1917997 - DNA, 15 bp, Homo sapiens
aaagatttaaagcca

SEQ ID NO: 1917998 - DNA, 15 bp, Homo sapiens
aagatttaaagccag

SEQ ID NO: 1917999 - DNA, 15 bp, Homo sapiens
agatttaaagccagg

SEQ ID NO: 1918000 - DNA, 15 bp, Homo sapiens
gatttaaagccaggt

SEQ ID NO: 1918001 - DNA, 15 bp, Homo sapiens
atttaaagccaggtg

SEQ ID NO: 1918002 - DNA, 15 bp, Homo sapiens
tttaaagccaggtgg

SEQ ID NO: 1918003 - DNA, 15 bp, Homo sapiens
ttaaagccaggtggg

SEQ ID NO: 1918004 - DNA, 15 bp, Homo sapiens
taaagccaggtgggg

SEQ ID NO: 1918005 - DNA, 15 bp, Homo sapiens
aaagccaggtggggg

SEQ ID NO: 1918006 - DNA, 15 bp, Homo sapiens
aagccaggtgggggt

SEQ ID NO: 1918007 - DNA, 15 bp, Homo sapiens
agccaggtgggggtt

SEQ ID NO: 1918008 - DNA, 15 bp, Homo sapiens
gccaggtgggggttg

SEQ ID NO: 1918009 - DNA, 15 bp, Homo sapiens
ccaggtgggggttga

SEQ ID NO: 1918010 - DNA, 15 bp, Homo sapiens
caggtgggggttgag

SEQ ID NO: 1918011 - DNA, 15 bp, Homo sapiens
aggtgggggttgagg

SEQ ID NO: 1918012 - DNA, 15 bp, Homo sapiens
ggtgggggttgaggg

SEQ ID NO: 1918013 - DNA, 15 bp, Homo sapiens
gtgggggttgaggga

SEQ ID NO: 1918014 - DNA, 15 bp, Homo sapiens
tgggggttgagggaa

SEQ ID NO: 1918015 - DNA, 15 bp, Homo sapiens
gggggttgagggaag

SEQ ID NO: 1918016 - DNA, 15 bp, Homo sapiens
ggggttgagggaagg

SEQ ID NO: 1918017 - DNA, 15 bp, Homo sapiens
gggttgagggaaggg

SEQ ID NO: 1918018 - DNA, 15 bp, Homo sapiens
ggttgagggaagggc

SEQ ID NO: 1918019 - DNA, 15 bp, Homo sapiens
gttgagggaagggca

SEQ ID NO: 1918020 - DNA, 15 bp, Homo sapiens
ttgagggaagggcaa

SEQ ID NO: 1918021 - DNA, 15 bp, Homo sapiens
tgagggaagggcaag

SEQ ID NO: 1918022 - DNA, 15 bp, Homo sapiens
gagggaagggcaagg

SEQ ID NO: 1918023 - DNA, 15 bp, Homo sapiens
agggaagggcaagga

SEQ ID NO: 1918024 - DNA, 15 bp, Homo sapiens
gggaagggcaaggaa

SEQ ID NO: 1918025 - DNA, 15 bp, Homo sapiens
ggaagggcaaggaag

SEQ ID NO: 1918026 - DNA, 15 bp, Homo sapiens
gaagggcaaggaagg

SEQ ID NO: 1918027 - DNA, 15 bp, Homo sapiens
aagggcaaggaagga

SEQ ID NO: 1918028 - DNA, 15 bp, Homo sapiens
agggcaaggaaggag

SEQ ID NO: 1918029 - DNA, 15 bp, Homo sapiens
gggcaaggaaggagg

SEQ ID NO: 1918030 - DNA, 15 bp, Homo sapiens
ggcaaggaaggagga

SEQ ID NO: 1918031 - DNA, 15 bp, Homo sapiens
gcaaggaaggaggag

SEQ ID NO: 1918032 - DNA, 15 bp, Homo sapiens
caaggaaggaggaga

SEQ ID NO: 1918033 - DNA, 15 bp, Homo sapiens
aaggaaggaggagat

SEQ ID NO: 1918034 - DNA, 15 bp, Homo sapiens
aggaaggaggagata

SEQ ID NO: 1918035 - DNA, 15 bp, Homo sapiens
ggaaggaggagatac

SEQ ID NO: 1918036 - DNA, 15 bp, Homo sapiens
gaaggaggagataca

SEQ ID NO: 1918037 - DNA, 15 bp, Homo sapiens
aaggaggagatacaa

SEQ ID NO: 1918038 - DNA, 15 bp, Homo sapiens
aggaggagatacaaa

SEQ ID NO: 1918039 - DNA, 15 bp, Homo sapiens
ggaggagatacaaaa

SEQ ID NO: 1918040 - DNA, 15 bp, Homo sapiens
gaggagatacaaaag

SEQ ID NO: 1918041 - DNA, 15 bp, Homo sapiens
aggagatacaaaaga

SEQ ID NO: 1918042 - DNA, 15 bp, Homo sapiens
ggagatacaaaagaa

SEQ ID NO: 1918043 - DNA, 15 bp, Homo sapiens
gagatacaaaagaaa

SEQ ID NO: 1918044 - DNA, 15 bp, Homo sapiens
agatacaaaagaaaa

SEQ ID NO: 1918045 - DNA, 15 bp, Homo sapiens
gatacaaaagaaaac

SEQ ID NO: 1918046 - DNA, 15 bp, Homo sapiens
atacaaaagaaaaca

SEQ ID NO: 1918047 - DNA, 15 bp, Homo sapiens
tacaaaagaaaacaa

SEQ ID NO: 1918048 - DNA, 15 bp, Homo sapiens
acaaaagaaaacaaa

SEQ ID NO: 1918049 - DNA, 15 bp, Homo sapiens
caaaagaaaacaaaa

SEQ ID NO: 1918050 - DNA, 15 bp, Homo sapiens
aaaagaaaacaaaat

SEQ ID NO: 1918051 - DNA, 15 bp, Homo sapiens
aaagaaaacaaaatc

SEQ ID NO: 1918052 - DNA, 15 bp, Homo sapiens
aagaaaacaaaatcc

SEQ ID NO: 1918053 - DNA, 15 bp, Homo sapiens
agaaaacaaaatcca

SEQ ID NO: 1918054 - DNA, 15 bp, Homo sapiens
gaaaacaaaatccaa

SEQ ID NO: 1918055 - DNA, 15 bp, Homo sapiens
aaaacaaaatccaaa

SEQ ID NO: 1918056 - DNA, 15 bp, Homo sapiens
aaacaaaatccaaag

SEQ ID NO: 1918057 - DNA, 15 bp, Homo sapiens
aacaaaatccaaaga

SEQ ID NO: 1918058 - DNA, 15 bp, Homo sapiens
acaaaatccaaagat

SEQ ID NO: 1918059 - DNA, 15 bp, Homo sapiens
caaaatccaaagata

SEQ ID NO: 1918060 - DNA, 15 bp, Homo sapiens
aaaatccaaagatac

SEQ ID NO: 1918061 - DNA, 15 bp, Homo sapiens
aaatccaaagataca

SEQ ID NO: 1918062 - DNA, 15 bp, Homo sapiens
aatccaaagatacaa

SEQ ID NO: 1918063 - DNA, 15 bp, Homo sapiens
atccaaagatacaag

SEQ ID NO: 1918064 - DNA, 15 bp, Homo sapiens
tccaaagatacaagt

SEQ ID NO: 1918065 - DNA, 15 bp, Homo sapiens
ccaaagatacaagtg

SEQ ID NO: 1918066 - DNA, 15 bp, Homo sapiens
caaagatacaagtgt

SEQ ID NO: 1918067 - DNA, 15 bp, Homo sapiens
aaagatacaagtgtg

SEQ ID NO: 1918068 - DNA, 15 bp, Homo sapiens
aagatacaagtgtgt

SEQ ID NO: 1918069 - DNA, 15 bp, Homo sapiens
agatacaagtgtgta

SEQ ID NO: 1918070 - DNA, 15 bp, Homo sapiens
gatacaagtgtgtat

SEQ ID NO: 1918071 - DNA, 15 bp, Homo sapiens
atacaagtgtgtatt

SEQ ID NO: 1918072 - DNA, 15 bp, Homo sapiens
tacaagtgtgtatta

SEQ ID NO: 1918073 - DNA, 15 bp, Homo sapiens
acaagtgtgtattaa

SEQ ID NO: 1918074 - DNA, 15 bp, Homo sapiens
caagtgtgtattaat

SEQ ID NO: 1918075 - DNA, 15 bp, Homo sapiens
aagtgtgtattaatc

SEQ ID NO: 1918076 - DNA, 15 bp, Homo sapiens
agtgtgtattaatct

SEQ ID NO: 1918077 - DNA, 15 bp, Homo sapiens
gtgtgtattaatctg

SEQ ID NO: 1918078 - DNA, 15 bp, Homo sapiens
tgtgtattaatctgt

SEQ ID NO: 1918079 - DNA, 15 bp, Homo sapiens
gtgtattaatctgtt

SEQ ID NO: 1918080 - DNA, 15 bp, Homo sapiens
tgtattaatctgttt

SEQ ID NO: 1918081 - DNA, 15 bp, Homo sapiens
gtattaatctgtttt

SEQ ID NO: 1918082 - DNA, 15 bp, Homo sapiens
tattaatctgttttc

SEQ ID NO: 1918083 - DNA, 15 bp, Homo sapiens
attaatctgttttca

SEQ ID NO: 1918084 - DNA, 15 bp, Homo sapiens
ttaatctgttttcac

SEQ ID NO: 1918085 - DNA, 15 bp, Homo sapiens
taatctgttttcaca

SEQ ID NO: 1918086 - DNA, 15 bp, Homo sapiens
aatctgttttcacac

SEQ ID NO: 1918087 - DNA, 15 bp, Homo sapiens
atctgttttcacact

SEQ ID NO: 1918088 - DNA, 15 bp, Homo sapiens
tctgttttcacactg

SEQ ID NO: 1918089 - DNA, 15 bp, Homo sapiens
gttttcacactgcta

SEQ ID NO: 1918090 - DNA, 15 bp, Homo sapiens
ttttcacactgctag

SEQ ID NO: 1918091 - DNA, 15 bp, Homo sapiens
tttcacactgctaga

SEQ ID NO: 1918092 - DNA, 15 bp, Homo sapiens
ttcacactgctagaa

SEQ ID NO: 1918093 - DNA, 15 bp, Homo sapiens
tcacactgctagaaa

SEQ ID NO: 1918094 - DNA, 15 bp, Homo sapiens
cacactgctagaaag

SEQ ID NO: 1918095 - DNA, 15 bp, Homo sapiens
acactgctagaaaga

SEQ ID NO: 1918096 - DNA, 15 bp, Homo sapiens
cactgctagaaagaa

SEQ ID NO: 1918097 - DNA, 15 bp, Homo sapiens
actgctagaaagaac

SEQ ID NO: 1918098 - DNA, 15 bp, Homo sapiens
ctgctagaaagaaca

SEQ ID NO: 1918099 - DNA, 15 bp, Homo sapiens
tgctagaaagaacaa

SEQ ID NO: 1918100 - DNA, 15 bp, Homo sapiens
gctagaaagaacaac

SEQ ID NO: 1918101 - DNA, 15 bp, Homo sapiens
ctagaaagaacaact

SEQ ID NO: 1918102 - DNA, 15 bp, Homo sapiens
tagaaagaacaactg

SEQ ID NO: 1918103 - DNA, 15 bp, Homo sapiens
agaaagaacaactga

SEQ ID NO: 1918104 - DNA, 15 bp, Homo sapiens
gaaagaacaactgag

SEQ ID NO: 1918105 - DNA, 15 bp, Homo sapiens
aaagaacaactgaga

SEQ ID NO: 1918106 - DNA, 15 bp, Homo sapiens
aagaacaactgagac

SEQ ID NO: 1918107 - DNA, 15 bp, Homo sapiens
agaacaactgagact

SEQ ID NO: 1918108 - DNA, 15 bp, Homo sapiens
gaacaactgagactg

SEQ ID NO: 1918109 - DNA, 15 bp, Homo sapiens
aacaactgagactgg

SEQ ID NO: 1918110 - DNA, 15 bp, Homo sapiens
acaactgagactggg

SEQ ID NO: 1918111 - DNA, 15 bp, Homo sapiens
caactgagactgggt

SEQ ID NO: 1918112 - DNA, 15 bp, Homo sapiens
aactgagactgggta

SEQ ID NO: 1918113 - DNA, 15 bp, Homo sapiens
actgagactgggtaa

SEQ ID NO: 1918114 - DNA, 15 bp, Homo sapiens
gggtaatttataaaa

SEQ ID NO: 1918115 - DNA, 15 bp, Homo sapiens
ggtaatttataaaag

SEQ ID NO: 1918116 - DNA, 15 bp, Homo sapiens
gtaatttataaaaga

SEQ ID NO: 1918117 - DNA, 15 bp, Homo sapiens
taatttataaaagaa

SEQ ID NO: 1918118 - DNA, 15 bp, Homo sapiens
aatttataaaagaaa

SEQ ID NO: 1918119 - DNA, 15 bp, Homo sapiens
atttataaaagaaaa

SEQ ID NO: 1918120 - DNA, 15 bp, Homo sapiens
tttataaaagaaaaa

SEQ ID NO: 1918121 - DNA, 15 bp, Homo sapiens
ttataaaagaaaaag

SEQ ID NO: 1918122 - DNA, 15 bp, Homo sapiens
tataaaagaaaaagg

SEQ ID NO: 1918123 - DNA, 15 bp, Homo sapiens
ataaaagaaaaaggt

SEQ ID NO: 1918124 - DNA, 15 bp, Homo sapiens
taaaagaaaaaggtt

SEQ ID NO: 1918125 - DNA, 15 bp, Homo sapiens
aaaagaaaaaggttt

SEQ ID NO: 1918126 - DNA, 15 bp, Homo sapiens
aaagaaaaaggttta

SEQ ID NO: 1918127 - DNA, 15 bp, Homo sapiens
aagaaaaaggtttag

SEQ ID NO: 1918128 - DNA, 15 bp, Homo sapiens
agaaaaaggtttagt

SEQ ID NO: 1918129 - DNA, 15 bp, Homo sapiens
gaaaaaggtttagtt

SEQ ID NO: 1918130 - DNA, 15 bp, Homo sapiens
aaaaaggtttagttg

SEQ ID NO: 1918131 - DNA, 15 bp, Homo sapiens
aaaaggtttagttga

SEQ ID NO: 1918132 - DNA, 15 bp, Homo sapiens
aaaggtttagttgac

SEQ ID NO: 1918133 - DNA, 15 bp, Homo sapiens
aaggtttagttgact

SEQ ID NO: 1918134 - DNA, 15 bp, Homo sapiens
aggtttagttgactc

SEQ ID NO: 1918135 - DNA, 15 bp, Homo sapiens
ggtttagttgactca

SEQ ID NO: 1918136 - DNA, 15 bp, Homo sapiens
gtttagttgactcat

SEQ ID NO: 1918137 - DNA, 15 bp, Homo sapiens
tttagttgactcatg

SEQ ID NO: 1918138 - DNA, 15 bp, Homo sapiens
ttagttgactcatgg

SEQ ID NO: 1918139 - DNA, 15 bp, Homo sapiens
tagttgactcatggt

SEQ ID NO: 1918140 - DNA, 15 bp, Homo sapiens
agttgactcatggtt

SEQ ID NO: 1918141 - DNA, 15 bp, Homo sapiens
gttgactcatggttc

SEQ ID NO: 1918142 - DNA, 15 bp, Homo sapiens
ttgactcatggttct

SEQ ID NO: 1918143 - DNA, 15 bp, Homo sapiens
tgactcatggttctg

SEQ ID NO: 1918144 - DNA, 15 bp, Homo sapiens
gactcatggttctgc

SEQ ID NO: 1918145 - DNA, 15 bp, Homo sapiens
actcatggttctgca

SEQ ID NO: 1918146 - DNA, 15 bp, Homo sapiens
ctcatggttctgcat

SEQ ID NO: 1918147 - DNA, 15 bp, Homo sapiens
tcatggttctgcatg

SEQ ID NO: 1918148 - DNA, 15 bp, Homo sapiens
catggttctgcatgg

SEQ ID NO: 1918149 - DNA, 15 bp, Homo sapiens
atggttctgcatggc

SEQ ID NO: 1918150 - DNA, 15 bp, Homo sapiens
tggttctgcatggct

SEQ ID NO: 1918151 - DNA, 15 bp, Homo sapiens
ggttctgcatggctg

SEQ ID NO: 1918152 - DNA, 15 bp, Homo sapiens
gttctgcatggctgg

SEQ ID NO: 1918153 - DNA, 15 bp, Homo sapiens
ttctgcatggctggg

SEQ ID NO: 1918154 - DNA, 15 bp, Homo sapiens
tctgcatggctgggg

SEQ ID NO: 1918155 - DNA, 15 bp, Homo sapiens
ctgcatggctgggga

SEQ ID NO: 1918156 - DNA, 15 bp, Homo sapiens
tgcatggctggggag

SEQ ID NO: 1918157 - DNA, 15 bp, Homo sapiens
atggctggggaggca

SEQ ID NO: 1918158 - DNA, 15 bp, Homo sapiens
tggctggggaggcat

SEQ ID NO: 1918159 - DNA, 15 bp, Homo sapiens
ggctggggaggcatc

SEQ ID NO: 1918160 - DNA, 15 bp, Homo sapiens
gctggggaggcatca

SEQ ID NO: 1918161 - DNA, 15 bp, Homo sapiens
ctggggaggcatcag

SEQ ID NO: 1918162 - DNA, 15 bp, Homo sapiens
tggggaggcatcagg

SEQ ID NO: 1918163 - DNA, 15 bp, Homo sapiens
ggggaggcatcagga

SEQ ID NO: 1918164 - DNA, 15 bp, Homo sapiens
gggaggcatcaggaa

SEQ ID NO: 1918165 - DNA, 15 bp, Homo sapiens
ggaggcatcaggaag

SEQ ID NO: 1918166 - DNA, 15 bp, Homo sapiens
gaggcatcaggaagc

SEQ ID NO: 1918167 - DNA, 15 bp, Homo sapiens
aggcatcaggaagct

SEQ ID NO: 1918168 - DNA, 15 bp, Homo sapiens
ggcatcaggaagctt

SEQ ID NO: 1918169 - DNA, 15 bp, Homo sapiens
gcatcaggaagctta

SEQ ID NO: 1918170 - DNA, 15 bp, Homo sapiens
catcaggaagcttac

SEQ ID NO: 1918171 - DNA, 15 bp, Homo sapiens
atcaggaagcttaca

SEQ ID NO: 1918172 - DNA, 15 bp, Homo sapiens
tcaggaagcttacaa

SEQ ID NO: 1918173 - DNA, 15 bp, Homo sapiens
caggaagcttacaat

SEQ ID NO: 1918174 - DNA, 15 bp, Homo sapiens
aggaagcttacaatc

SEQ ID NO: 1918175 - DNA, 15 bp, Homo sapiens
ggaagcttacaatca

SEQ ID NO: 1918176 - DNA, 15 bp, Homo sapiens
gaagcttacaatcat

SEQ ID NO: 1918177 - DNA, 15 bp, Homo sapiens
aagcttacaatcatg

SEQ ID NO: 1918178 - DNA, 15 bp, Homo sapiens
agcttacaatcatga

SEQ ID NO: 1918179 - DNA, 15 bp, Homo sapiens
gcttacaatcatgat

SEQ ID NO: 1918180 - DNA, 15 bp, Homo sapiens
cttacaatcatgatg

SEQ ID NO: 1918181 - DNA, 15 bp, Homo sapiens
ttacaatcatgatgg

SEQ ID NO: 1918182 - DNA, 15 bp, Homo sapiens
tacaatcatgatgga

SEQ ID NO: 1918183 - DNA, 15 bp, Homo sapiens
acaatcatgatggaa

SEQ ID NO: 1918184 - DNA, 15 bp, Homo sapiens
caatcatgatggaag

SEQ ID NO: 1918185 - DNA, 15 bp, Homo sapiens
aatcatgatggaagg

SEQ ID NO: 1918186 - DNA, 15 bp, Homo sapiens
atcatgatggaaggc

SEQ ID NO: 1918187 - DNA, 15 bp, Homo sapiens
tcatgatggaaggca

SEQ ID NO: 1918188 - DNA, 15 bp, Homo sapiens
catgatggaaggcaa

SEQ ID NO: 1918189 - DNA, 15 bp, Homo sapiens
atgatggaaggcaaa

SEQ ID NO: 1918190 - DNA, 15 bp, Homo sapiens
tgatggaaggcaaag

SEQ ID NO: 1918191 - DNA, 15 bp, Homo sapiens
gatggaaggcaaagg

SEQ ID NO: 1918192 - DNA, 15 bp, Homo sapiens
atggaaggcaaaggg

SEQ ID NO: 1918193 - DNA, 15 bp, Homo sapiens
tggaaggcaaagggg

SEQ ID NO: 1918194 - DNA, 15 bp, Homo sapiens
ggaaggcaaagggga

SEQ ID NO: 1918195 - DNA, 15 bp, Homo sapiens
aaaggggaagcaagg

SEQ ID NO: 1918196 - DNA, 15 bp, Homo sapiens
aaggggaagcaaggc

SEQ ID NO: 1918197 - DNA, 15 bp, Homo sapiens
aggggaagcaaggca

SEQ ID NO: 1918198 - DNA, 15 bp, Homo sapiens
ggggaagcaaggcat

SEQ ID NO: 1918199 - DNA, 15 bp, Homo sapiens
gggaagcaaggcatg

SEQ ID NO: 1918200 - DNA, 15 bp, Homo sapiens
ggaagcaaggcatgt

SEQ ID NO: 1918201 - DNA, 15 bp, Homo sapiens
gaagcaaggcatgtc

SEQ ID NO: 1918202 - DNA, 15 bp, Homo sapiens
aagcaaggcatgtct

SEQ ID NO: 1918203 - DNA, 15 bp, Homo sapiens
agcaaggcatgtctt

SEQ ID NO: 1918204 - DNA, 15 bp, Homo sapiens
gcaaggcatgtcttt

SEQ ID NO: 1918205 - DNA, 15 bp, Homo sapiens
caaggcatgtctttt

SEQ ID NO: 1918206 - DNA, 15 bp, Homo sapiens
aaggcatgtcttttc

SEQ ID NO: 1918207 - DNA, 15 bp, Homo sapiens
aggcatgtcttttca

SEQ ID NO: 1918208 - DNA, 15 bp, Homo sapiens
ggcatgtcttttcat

SEQ ID NO: 1918209 - DNA, 15 bp, Homo sapiens
gcatgtcttttcata

SEQ ID NO: 1918210 - DNA, 15 bp, Homo sapiens
catgtcttttcatac

SEQ ID NO: 1918211 - DNA, 15 bp, Homo sapiens
atgtcttttcatact

SEQ ID NO: 1918212 - DNA, 15 bp, Homo sapiens
tgtcttttcatactg

SEQ ID NO: 1918213 - DNA, 15 bp, Homo sapiens
gtcttttcatactgg

SEQ ID NO: 1918214 - DNA, 15 bp, Homo sapiens
tcttttcatactggc

SEQ ID NO: 1918215 - DNA, 15 bp, Homo sapiens
cttttcatactggca

SEQ ID NO: 1918216 - DNA, 15 bp, Homo sapiens
ttttcatactggcag

SEQ ID NO: 1918217 - DNA, 15 bp, Homo sapiens
tttcatactggcagg

SEQ ID NO: 1918218 - DNA, 15 bp, Homo sapiens
ttcatactggcagga

SEQ ID NO: 1918219 - DNA, 15 bp, Homo sapiens
tcatactggcaggag

SEQ ID NO: 1918220 - DNA, 15 bp, Homo sapiens
catactggcaggaga

SEQ ID NO: 1918221 - DNA, 15 bp, Homo sapiens
atactggcaggagag

SEQ ID NO: 1918222 - DNA, 15 bp, Homo sapiens
tactggcaggagaga

SEQ ID NO: 1918223 - DNA, 15 bp, Homo sapiens
actggcaggagagac

SEQ ID NO: 1918224 - DNA, 15 bp, Homo sapiens
ctggcaggagagaca

SEQ ID NO: 1918225 - DNA, 15 bp, Homo sapiens
tggcaggagagacag

SEQ ID NO: 1918226 - DNA, 15 bp, Homo sapiens
ggcaggagagacagc

SEQ ID NO: 1918227 - DNA, 15 bp, Homo sapiens
gcaggagagacagca

SEQ ID NO: 1918228 - DNA, 15 bp, Homo sapiens
caggagagacagcat

SEQ ID NO: 1918229 - DNA, 15 bp, Homo sapiens
aggagagacagcatg

SEQ ID NO: 1918230 - DNA, 15 bp, Homo sapiens
ggagagacagcatga

SEQ ID NO: 1918231 - DNA, 15 bp, Homo sapiens
gagagacagcatgag

SEQ ID NO: 1918232 - DNA, 15 bp, Homo sapiens
agagacagcatgagg

SEQ ID NO: 1918233 - DNA, 15 bp, Homo sapiens
gagacagcatgaggg

SEQ ID NO: 1918234 - DNA, 15 bp, Homo sapiens
agacagcatgagggc

SEQ ID NO: 1918235 - DNA, 15 bp, Homo sapiens
gacagcatgagggcc

SEQ ID NO: 1918236 - DNA, 15 bp, Homo sapiens
acagcatgagggcca

SEQ ID NO: 1918237 - DNA, 15 bp, Homo sapiens
cagcatgagggccag

SEQ ID NO: 1918238 - DNA, 15 bp, Homo sapiens
agcatgagggccagg

SEQ ID NO: 1918239 - DNA, 15 bp, Homo sapiens
gcatgagggccaggg

SEQ ID NO: 1918240 - DNA, 15 bp, Homo sapiens
catgagggccagggg

SEQ ID NO: 1918241 - DNA, 15 bp, Homo sapiens
atgagggccaggggg

SEQ ID NO: 1918242 - DNA, 15 bp, Homo sapiens
tgagggccagggggc

SEQ ID NO: 1918243 - DNA, 15 bp, Homo sapiens
gagggccagggggct

SEQ ID NO: 1918244 - DNA, 15 bp, Homo sapiens
agggccagggggctg

SEQ ID NO: 1918245 - DNA, 15 bp, Homo sapiens
gggccagggggctgc

SEQ ID NO: 1918246 - DNA, 15 bp, Homo sapiens
ggccagggggctgcc

SEQ ID NO: 1918247 - DNA, 15 bp, Homo sapiens
gccagggggctgcca

SEQ ID NO: 1918248 - DNA, 15 bp, Homo sapiens
ccagggggctgccag

SEQ ID NO: 1918249 - DNA, 15 bp, Homo sapiens
cagggggctgccaga

SEQ ID NO: 1918250 - DNA, 15 bp, Homo sapiens
agggggctgccagac

SEQ ID NO: 1918251 - DNA, 15 bp, Homo sapiens
gggggctgccagaca

SEQ ID NO: 1918252 - DNA, 15 bp, Homo sapiens
ggggctgccagacac

SEQ ID NO: 1918253 - DNA, 15 bp, Homo sapiens
gggctgccagacact

SEQ ID NO: 1918254 - DNA, 15 bp, Homo sapiens
ggctgccagacactt

SEQ ID NO: 1918255 - DNA, 15 bp, Homo sapiens
gctgccagacacttt

SEQ ID NO: 1918256 - DNA, 15 bp, Homo sapiens
ctgccagacactttt

SEQ ID NO: 1918257 - DNA, 15 bp, Homo sapiens
tgccagacactttta

SEQ ID NO: 1918258 - DNA, 15 bp, Homo sapiens
gccagacacttttaa

SEQ ID NO: 1918259 - DNA, 15 bp, Homo sapiens
ccagacacttttaaa

SEQ ID NO: 1918260 - DNA, 15 bp, Homo sapiens
cagacacttttaaac

SEQ ID NO: 1918261 - DNA, 15 bp, Homo sapiens
agacacttttaaacc

SEQ ID NO: 1918262 - DNA, 15 bp, Homo sapiens
gacacttttaaacca

SEQ ID NO: 1918263 - DNA, 15 bp, Homo sapiens
acacttttaaaccat

SEQ ID NO: 1918264 - DNA, 15 bp, Homo sapiens
cacttttaaaccatc

SEQ ID NO: 1918265 - DNA, 15 bp, Homo sapiens
acttttaaaccatca

SEQ ID NO: 1918266 - DNA, 15 bp, Homo sapiens
cttttaaaccatcac

SEQ ID NO: 1918267 - DNA, 15 bp, Homo sapiens
ttttaaaccatcaca

SEQ ID NO: 1918268 - DNA, 15 bp, Homo sapiens
tttaaaccatcacat

SEQ ID NO: 1918269 - DNA, 15 bp, Homo sapiens
ttaaaccatcacatc

SEQ ID NO: 1918270 - DNA, 15 bp, Homo sapiens
taaaccatcacatct

SEQ ID NO: 1918271 - DNA, 15 bp, Homo sapiens
aaaccatcacatctc

SEQ ID NO: 1918272 - DNA, 15 bp, Homo sapiens
aaccatcacatctca

SEQ ID NO: 1918273 - DNA, 15 bp, Homo sapiens
accatcacatctcat

SEQ ID NO: 1918274 - DNA, 15 bp, Homo sapiens
ccatcacatctcatg

SEQ ID NO: 1918275 - DNA, 15 bp, Homo sapiens
catcacatctcatga

SEQ ID NO: 1918276 - DNA, 15 bp, Homo sapiens
atcacatctcatgag

SEQ ID NO: 1918277 - DNA, 15 bp, Homo sapiens
tcacatctcatgaga

SEQ ID NO: 1918278 - DNA, 15 bp, Homo sapiens
cacatctcatgagaa

SEQ ID NO: 1918279 - DNA, 15 bp, Homo sapiens
acatctcatgagaac

SEQ ID NO: 1918280 - DNA, 15 bp, Homo sapiens
catctcatgagaact

SEQ ID NO: 1918281 - DNA, 15 bp, Homo sapiens
tctcatgagaactca

SEQ ID NO: 1918282 - DNA, 15 bp, Homo sapiens
ctcatgagaactcac

SEQ ID NO: 1918283 - DNA, 15 bp, Homo sapiens
tcatgagaactcact

SEQ ID NO: 1918284 - DNA, 15 bp, Homo sapiens
catgagaactcactc

SEQ ID NO: 1918285 - DNA, 15 bp, Homo sapiens
atgagaactcactca

SEQ ID NO: 1918286 - DNA, 15 bp, Homo sapiens
tgagaactcactcat

SEQ ID NO: 1918287 - DNA, 15 bp, Homo sapiens
gagaactcactcatt

SEQ ID NO: 1918288 - DNA, 15 bp, Homo sapiens
agaactcactcatta

SEQ ID NO: 1918289 - DNA, 15 bp, Homo sapiens
gaactcactcattat

SEQ ID NO: 1918290 - DNA, 15 bp, Homo sapiens
aactcactcattatc

SEQ ID NO: 1918291 - DNA, 15 bp, Homo sapiens
actcactcattatca

SEQ ID NO: 1918292 - DNA, 15 bp, Homo sapiens
ctcactcattatcat

SEQ ID NO: 1918293 - DNA, 15 bp, Homo sapiens
tcactcattatcatg

SEQ ID NO: 1918294 - DNA, 15 bp, Homo sapiens
cactcattatcatga

SEQ ID NO: 1918295 - DNA, 15 bp, Homo sapiens
actcattatcatgag

SEQ ID NO: 1918296 - DNA, 15 bp, Homo sapiens
ctcattatcatgaga

SEQ ID NO: 1918297 - DNA, 15 bp, Homo sapiens
tcattatcatgagaa

SEQ ID NO: 1918298 - DNA, 15 bp, Homo sapiens
cattatcatgagaac

SEQ ID NO: 1918299 - DNA, 15 bp, Homo sapiens
attatcatgagaaca

SEQ ID NO: 1918300 - DNA, 15 bp, Homo sapiens
ttatcatgagaacag

SEQ ID NO: 1918301 - DNA, 15 bp, Homo sapiens
gagaacagcatgggg

SEQ ID NO: 1918302 - DNA, 15 bp, Homo sapiens
agaacagcatgggga

SEQ ID NO: 1918303 - DNA, 15 bp, Homo sapiens
gaacagcatggggaa

SEQ ID NO: 1918304 - DNA, 15 bp, Homo sapiens
aacagcatggggaag

SEQ ID NO: 1918305 - DNA, 15 bp, Homo sapiens
acagcatggggaagc

SEQ ID NO: 1918306 - DNA, 15 bp, Homo sapiens
cagcatggggaagcc

SEQ ID NO: 1918307 - DNA, 15 bp, Homo sapiens
agcatggggaagcca

SEQ ID NO: 1918308 - DNA, 15 bp, Homo sapiens
gcatggggaagccac

SEQ ID NO: 1918309 - DNA, 15 bp, Homo sapiens
catggggaagccacc

SEQ ID NO: 1918310 - DNA, 15 bp, Homo sapiens
atggggaagccacct

SEQ ID NO: 1918311 - DNA, 15 bp, Homo sapiens
tggggaagccacctc

SEQ ID NO: 1918312 - DNA, 15 bp, Homo sapiens
ggggaagccacctcc

SEQ ID NO: 1918313 - DNA, 15 bp, Homo sapiens
gggaagccacctcca

SEQ ID NO: 1918314 - DNA, 15 bp, Homo sapiens
ggaagccacctccat

SEQ ID NO: 1918315 - DNA, 15 bp, Homo sapiens
gaagccacctccatg

SEQ ID NO: 1918316 - DNA, 15 bp, Homo sapiens
aagccacctccatga

SEQ ID NO: 1918317 - DNA, 15 bp, Homo sapiens
agccacctccatgat

SEQ ID NO: 1918318 - DNA, 15 bp, Homo sapiens
gccacctccatgatc

SEQ ID NO: 1918319 - DNA, 15 bp, Homo sapiens
ccacctccatgatcc

SEQ ID NO: 1918320 - DNA, 15 bp, Homo sapiens
cacctccatgatcca

SEQ ID NO: 1918321 - DNA, 15 bp, Homo sapiens
acctccatgatccag

SEQ ID NO: 1918322 - DNA, 15 bp, Homo sapiens
cctccatgatccagt

SEQ ID NO: 1918323 - DNA, 15 bp, Homo sapiens
ctccatgatccagtc

SEQ ID NO: 1918324 - DNA, 15 bp, Homo sapiens
tccatgatccagtca

SEQ ID NO: 1918325 - DNA, 15 bp, Homo sapiens
ccatgatccagtcac

SEQ ID NO: 1918326 - DNA, 15 bp, Homo sapiens
catgatccagtcacc

SEQ ID NO: 1918327 - DNA, 15 bp, Homo sapiens
atgatccagtcacct

SEQ ID NO: 1918328 - DNA, 15 bp, Homo sapiens
tgatccagtcacctc

SEQ ID NO: 1918329 - DNA, 15 bp, Homo sapiens
gatccagtcacctcc

SEQ ID NO: 1918330 - DNA, 15 bp, Homo sapiens
atccagtcacctccc

SEQ ID NO: 1918331 - DNA, 15 bp, Homo sapiens
tccagtcacctccca

SEQ ID NO: 1918332 - DNA, 15 bp, Homo sapiens
ccagtcacctcccac

SEQ ID NO: 1918333 - DNA, 15 bp, Homo sapiens
cagtcacctcccacc

SEQ ID NO: 1918334 - DNA, 15 bp, Homo sapiens
agtcacctcccacca

SEQ ID NO: 1918335 - DNA, 15 bp, Homo sapiens
gtcacctcccaccag

SEQ ID NO: 1918336 - DNA, 15 bp, Homo sapiens
tcacctcccaccagg

SEQ ID NO: 1918337 - DNA, 15 bp, Homo sapiens
cacctcccaccaggt

SEQ ID NO: 1918338 - DNA, 15 bp, Homo sapiens
accaggtccttccct

SEQ ID NO: 1918339 - DNA, 15 bp, Homo sapiens
ccaggtccttccctg

SEQ ID NO: 1918340 - DNA, 15 bp, Homo sapiens
caggtccttccctga

SEQ ID NO: 1918341 - DNA, 15 bp, Homo sapiens
aggtccttccctgac

SEQ ID NO: 1918342 - DNA, 15 bp, Homo sapiens
ggtccttccctgaca

SEQ ID NO: 1918343 - DNA, 15 bp, Homo sapiens
gtccttccctgacac

SEQ ID NO: 1918344 - DNA, 15 bp, Homo sapiens
tccttccctgacacg

SEQ ID NO: 1918345 - DNA, 15 bp, Homo sapiens
ccttccctgacacgt

SEQ ID NO: 1918346 - DNA, 15 bp, Homo sapiens
cttccctgacacgtg

SEQ ID NO: 1918347 - DNA, 15 bp, Homo sapiens
ttccctgacacgtgg

SEQ ID NO: 1918348 - DNA, 15 bp, Homo sapiens
tccctgacacgtgga

SEQ ID NO: 1918349 - DNA, 15 bp, Homo sapiens
ccctgacacgtggaa

SEQ ID NO: 1918350 - DNA, 15 bp, Homo sapiens
cctgacacgtggaaa

SEQ ID NO: 1918351 - DNA, 15 bp, Homo sapiens
ctgacacgtggaaat

SEQ ID NO: 1918352 - DNA, 15 bp, Homo sapiens
tgacacgtggaaatt

SEQ ID NO: 1918353 - DNA, 15 bp, Homo sapiens
gacacgtggaaatta

SEQ ID NO: 1918354 - DNA, 15 bp, Homo sapiens
acacgtggaaattac

SEQ ID NO: 1918355 - DNA, 15 bp, Homo sapiens
cacgtggaaattacg

SEQ ID NO: 1918356 - DNA, 15 bp, Homo sapiens
acgtggaaattacga

SEQ ID NO: 1918357 - DNA, 15 bp, Homo sapiens
cgtggaaattacgat

SEQ ID NO: 1918358 - DNA, 15 bp, Homo sapiens
gtggaaattacgatt

SEQ ID NO: 1918359 - DNA, 15 bp, Homo sapiens
tggaaattacgattt

SEQ ID NO: 1918360 - DNA, 15 bp, Homo sapiens
ggaaattacgatttg

SEQ ID NO: 1918361 - DNA, 15 bp, Homo sapiens
gaaattacgatttga

SEQ ID NO: 1918362 - DNA, 15 bp, Homo sapiens
aaattacgatttgag

SEQ ID NO: 1918363 - DNA, 15 bp, Homo sapiens
aattacgatttgaga

SEQ ID NO: 1918364 - DNA, 15 bp, Homo sapiens
attacgatttgagat

SEQ ID NO: 1918365 - DNA, 15 bp, Homo sapiens
ttacgatttgagatg

SEQ ID NO: 1918366 - DNA, 15 bp, Homo sapiens
tacgatttgagatga

SEQ ID NO: 1918367 - DNA, 15 bp, Homo sapiens
acgatttgagatgag

SEQ ID NO: 1918368 - DNA, 15 bp, Homo sapiens
cgatttgagatgaga

SEQ ID NO: 1918369 - DNA, 15 bp, Homo sapiens
gatttgagatgagac

SEQ ID NO: 1918370 - DNA, 15 bp, Homo sapiens
atttgagatgagact

SEQ ID NO: 1918371 - DNA, 15 bp, Homo sapiens
tttgagatgagactt

SEQ ID NO: 1918372 - DNA, 15 bp, Homo sapiens
ttgagatgagacttg

SEQ ID NO: 1918373 - DNA, 15 bp, Homo sapiens
tgagatgagacttgg

SEQ ID NO: 1918374 - DNA, 15 bp, Homo sapiens
gagatgagacttggg

SEQ ID NO: 1918375 - DNA, 15 bp, Homo sapiens
agatgagacttgggt

SEQ ID NO: 1918376 - DNA, 15 bp, Homo sapiens
gatgagacttgggtg

SEQ ID NO: 1918377 - DNA, 15 bp, Homo sapiens
atgagacttgggtgg

SEQ ID NO: 1918378 - DNA, 15 bp, Homo sapiens
tgagacttgggtgga

SEQ ID NO: 1918379 - DNA, 15 bp, Homo sapiens
gagacttgggtggag

SEQ ID NO: 1918380 - DNA, 15 bp, Homo sapiens
agacttgggtggaga

SEQ ID NO: 1918381 - DNA, 15 bp, Homo sapiens
gacttgggtggagac

SEQ ID NO: 1918382 - DNA, 15 bp, Homo sapiens
acttgggtggagaca

SEQ ID NO: 1918383 - DNA, 15 bp, Homo sapiens
cttgggtggagacac

SEQ ID NO: 1918384 - DNA, 15 bp, Homo sapiens
gggtggagacacaga

SEQ ID NO: 1918385 - DNA, 15 bp, Homo sapiens
ggtggagacacagag

SEQ ID NO: 1918386 - DNA, 15 bp, Homo sapiens
gtggagacacagagc

SEQ ID NO: 1918387 - DNA, 15 bp, Homo sapiens
tggagacacagagcc

SEQ ID NO: 1918388 - DNA, 15 bp, Homo sapiens
ggagacacagagcca

SEQ ID NO: 1918389 - DNA, 15 bp, Homo sapiens
gagacacagagccaa

SEQ ID NO: 1918390 - DNA, 15 bp, Homo sapiens
agacacagagccaaa

SEQ ID NO: 1918391 - DNA, 15 bp, Homo sapiens
gacacagagccaaac

SEQ ID NO: 1918392 - DNA, 15 bp, Homo sapiens
acacagagccaaacc

SEQ ID NO: 1918393 - DNA, 15 bp, Homo sapiens
cacagagccaaacca

SEQ ID NO: 1918394 - DNA, 15 bp, Homo sapiens
acagagccaaaccat

SEQ ID NO: 1918395 - DNA, 15 bp, Homo sapiens
aaaccatatcattct

SEQ ID NO: 1918396 - DNA, 15 bp, Homo sapiens
aaccatatcattctg

SEQ ID NO: 1918397 - DNA, 15 bp, Homo sapiens
accatatcattctgc

SEQ ID NO: 1918398 - DNA, 15 bp, Homo sapiens
ccatatcattctgcc

SEQ ID NO: 1918399 - DNA, 15 bp, Homo sapiens
catatcattctgccc

SEQ ID NO: 1918400 - DNA, 15 bp, Homo sapiens
atatcattctgcccc

SEQ ID NO: 1918401 - DNA, 15 bp, Homo sapiens
tatcattctgccccg

SEQ ID NO: 1918402 - DNA, 15 bp, Homo sapiens
atcattctgccccgg

SEQ ID NO: 1918403 - DNA, 15 bp, Homo sapiens
tcattctgccccggc

SEQ ID NO: 1918404 - DNA, 15 bp, Homo sapiens
cattctgccccggct

SEQ ID NO: 1918405 - DNA, 15 bp, Homo sapiens
attctgccccggctc

SEQ ID NO: 1918406 - DNA, 15 bp, Homo sapiens
ttctgccccggctct

SEQ ID NO: 1918407 - DNA, 15 bp, Homo sapiens
tctgccccggctctt

SEQ ID NO: 1918408 - DNA, 15 bp, Homo sapiens
ctgccccggctcttc

SEQ ID NO: 1918409 - DNA, 15 bp, Homo sapiens
tgccccggctcttcc

SEQ ID NO: 1918410 - DNA, 15 bp, Homo sapiens
gccccggctcttccc

SEQ ID NO: 1918411 - DNA, 15 bp, Homo sapiens
ccccggctcttccca

SEQ ID NO: 1918412 - DNA, 15 bp, Homo sapiens
cccggctcttcccaa

SEQ ID NO: 1918413 - DNA, 15 bp, Homo sapiens
ccggctcttcccaaa

SEQ ID NO: 1918414 - DNA, 15 bp, Homo sapiens
cggctcttcccaaat

SEQ ID NO: 1918415 - DNA, 15 bp, Homo sapiens
ggctcttcccaaatc

SEQ ID NO: 1918416 - DNA, 15 bp, Homo sapiens
gctcttcccaaatct

SEQ ID NO: 1918417 - DNA, 15 bp, Homo sapiens
ctcttcccaaatctc

SEQ ID NO: 1918418 - DNA, 15 bp, Homo sapiens
tcttcccaaatctca

SEQ ID NO: 1918419 - DNA, 15 bp, Homo sapiens
cttcccaaatctcat

SEQ ID NO: 1918420 - DNA, 15 bp, Homo sapiens
ttcccaaatctcatg

SEQ ID NO: 1918421 - DNA, 15 bp, Homo sapiens
aaatctcatgtcctt

SEQ ID NO: 1918422 - DNA, 15 bp, Homo sapiens
aatctcatgtccttt

SEQ ID NO: 1918423 - DNA, 15 bp, Homo sapiens
atctcatgtccttta

SEQ ID NO: 1918424 - DNA, 15 bp, Homo sapiens
tctcatgtcctttat

SEQ ID NO: 1918425 - DNA, 15 bp, Homo sapiens
ctcatgtcctttata

SEQ ID NO: 1918426 - DNA, 15 bp, Homo sapiens
tcatgtcctttatac

SEQ ID NO: 1918427 - DNA, 15 bp, Homo sapiens
catgtcctttataca

SEQ ID NO: 1918428 - DNA, 15 bp, Homo sapiens
atgtcctttatacat

SEQ ID NO: 1918429 - DNA, 15 bp, Homo sapiens
tgtcctttatacatt

SEQ ID NO: 1918430 - DNA, 15 bp, Homo sapiens
gtcctttatacattt

SEQ ID NO: 1918431 - DNA, 15 bp, Homo sapiens
tcctttatacatttc

SEQ ID NO: 1918432 - DNA, 15 bp, Homo sapiens
cctttatacatttca

SEQ ID NO: 1918433 - DNA, 15 bp, Homo sapiens
ctttatacatttcaa

SEQ ID NO: 1918434 - DNA, 15 bp, Homo sapiens
tttatacatttcaaa

SEQ ID NO: 1918435 - DNA, 15 bp, Homo sapiens
ttatacatttcaaaa

SEQ ID NO: 1918436 - DNA, 15 bp, Homo sapiens
tatacatttcaaaac

SEQ ID NO: 1918437 - DNA, 15 bp, Homo sapiens
atacatttcaaaacc

SEQ ID NO: 1918438 - DNA, 15 bp, Homo sapiens
tacatttcaaaacca

SEQ ID NO: 1918439 - DNA, 15 bp, Homo sapiens
acatttcaaaaccaa

SEQ ID NO: 1918440 - DNA, 15 bp, Homo sapiens
catttcaaaaccaat

SEQ ID NO: 1918441 - DNA, 15 bp, Homo sapiens
atttcaaaaccaatc

SEQ ID NO: 1918442 - DNA, 15 bp, Homo sapiens
tttcaaaaccaatca

SEQ ID NO: 1918443 - DNA, 15 bp, Homo sapiens
ttcaaaaccaatcat

SEQ ID NO: 1918444 - DNA, 15 bp, Homo sapiens
tcaaaaccaatcatg

SEQ ID NO: 1918445 - DNA, 15 bp, Homo sapiens
caaaaccaatcatgc

SEQ ID NO: 1918446 - DNA, 15 bp, Homo sapiens
aaaaccaatcatgcc

SEQ ID NO: 1918447 - DNA, 15 bp, Homo sapiens
ccccaaagtcttaaa

SEQ ID NO: 1918448 - DNA, 15 bp, Homo sapiens
cccaaagtcttaaat

SEQ ID NO: 1918449 - DNA, 15 bp, Homo sapiens
ccaaagtcttaaatc

SEQ ID NO: 1918450 - DNA, 15 bp, Homo sapiens
caaagtcttaaatca

SEQ ID NO: 1918451 - DNA, 15 bp, Homo sapiens
aaagtcttaaatcat

SEQ ID NO: 1918452 - DNA, 15 bp, Homo sapiens
aagtcttaaatcatt

SEQ ID NO: 1918453 - DNA, 15 bp, Homo sapiens
agtcttaaatcattc

SEQ ID NO: 1918454 - DNA, 15 bp, Homo sapiens
gtcttaaatcattcc

SEQ ID NO: 1918455 - DNA, 15 bp, Homo sapiens
tcttaaatcattcca

SEQ ID NO: 1918456 - DNA, 15 bp, Homo sapiens
cttaaatcattccag

SEQ ID NO: 1918457 - DNA, 15 bp, Homo sapiens
ttaaatcattccagc

SEQ ID NO: 1918458 - DNA, 15 bp, Homo sapiens
taaatcattccagca

SEQ ID NO: 1918459 - DNA, 15 bp, Homo sapiens
aaatcattccagcat

SEQ ID NO: 1918460 - DNA, 15 bp, Homo sapiens
aatcattccagcatt

SEQ ID NO: 1918461 - DNA, 15 bp, Homo sapiens
atcattccagcatta

SEQ ID NO: 1918462 - DNA, 15 bp, Homo sapiens
gcattaactcaaaat

SEQ ID NO: 1918463 - DNA, 15 bp, Homo sapiens
cattaactcaaaatt

SEQ ID NO: 1918464 - DNA, 15 bp, Homo sapiens
attaactcaaaattc

SEQ ID NO: 1918465 - DNA, 15 bp, Homo sapiens
ttaactcaaaattcc

SEQ ID NO: 1918466 - DNA, 15 bp, Homo sapiens
taactcaaaattcca

SEQ ID NO: 1918467 - DNA, 15 bp, Homo sapiens
aactcaaaattccaa

SEQ ID NO: 1918468 - DNA, 15 bp, Homo sapiens
actcaaaattccaag

SEQ ID NO: 1918469 - DNA, 15 bp, Homo sapiens
ctcaaaattccaagt

SEQ ID NO: 1918470 - DNA, 15 bp, Homo sapiens
tcaaaattccaagtc

SEQ ID NO: 1918471 - DNA, 15 bp, Homo sapiens
caaaattccaagtcc

SEQ ID NO: 1918472 - DNA, 15 bp, Homo sapiens
aaaattccaagtcca

SEQ ID NO: 1918473 - DNA, 15 bp, Homo sapiens
aaattccaagtccaa

SEQ ID NO: 1918474 - DNA, 15 bp, Homo sapiens
aattccaagtccaaa

SEQ ID NO: 1918475 - DNA, 15 bp, Homo sapiens
attccaagtccaaag

SEQ ID NO: 1918476 - DNA, 15 bp, Homo sapiens
ttccaagtccaaagt

SEQ ID NO: 1918477 - DNA, 15 bp, Homo sapiens
agtctcatctgagat

SEQ ID NO: 1918478 - DNA, 15 bp, Homo sapiens
gtctcatctgagata

SEQ ID NO: 1918479 - DNA, 15 bp, Homo sapiens
tctcatctgagataa

SEQ ID NO: 1918480 - DNA, 15 bp, Homo sapiens
ctcatctgagataag

SEQ ID NO: 1918481 - DNA, 15 bp, Homo sapiens
tcatctgagataagg

SEQ ID NO: 1918482 - DNA, 15 bp, Homo sapiens
catctgagataaggt

SEQ ID NO: 1918483 - DNA, 15 bp, Homo sapiens
atctgagataaggta

SEQ ID NO: 1918484 - DNA, 15 bp, Homo sapiens
tctgagataaggtaa

SEQ ID NO: 1918485 - DNA, 15 bp, Homo sapiens
ctgagataaggtaaa

SEQ ID NO: 1918486 - DNA, 15 bp, Homo sapiens
tgagataaggtaaat

SEQ ID NO: 1918487 - DNA, 15 bp, Homo sapiens
gagataaggtaaatc

SEQ ID NO: 1918488 - DNA, 15 bp, Homo sapiens
agataaggtaaatcc

SEQ ID NO: 1918489 - DNA, 15 bp, Homo sapiens
gataaggtaaatccc

SEQ ID NO: 1918490 - DNA, 15 bp, Homo sapiens
ataaggtaaatccct

SEQ ID NO: 1918491 - DNA, 15 bp, Homo sapiens
taaggtaaatccctt

SEQ ID NO: 1918492 - DNA, 15 bp, Homo sapiens
aaggtaaatcccttc

SEQ ID NO: 1918493 - DNA, 15 bp, Homo sapiens
aggtaaatcccttcc

SEQ ID NO: 1918494 - DNA, 15 bp, Homo sapiens
ggtaaatcccttccg

SEQ ID NO: 1918495 - DNA, 15 bp, Homo sapiens
gtaaatcccttccgc

SEQ ID NO: 1918496 - DNA, 15 bp, Homo sapiens
taaatcccttccgcc

SEQ ID NO: 1918497 - DNA, 15 bp, Homo sapiens
aaatcccttccgcct

SEQ ID NO: 1918498 - DNA, 15 bp, Homo sapiens
aatcccttccgccta

SEQ ID NO: 1918499 - DNA, 15 bp, Homo sapiens
atcccttccgcctat

SEQ ID NO: 1918500 - DNA, 15 bp, Homo sapiens
tcccttccgcctata

SEQ ID NO: 1918501 - DNA, 15 bp, Homo sapiens
cccttccgcctataa

SEQ ID NO: 1918502 - DNA, 15 bp, Homo sapiens
ccttccgcctataag

SEQ ID NO: 1918503 - DNA, 15 bp, Homo sapiens
cttccgcctataagc

SEQ ID NO: 1918504 - DNA, 15 bp, Homo sapiens
ttccgcctataagcc

SEQ ID NO: 1918505 - DNA, 15 bp, Homo sapiens
tccgcctataagcct

SEQ ID NO: 1918506 - DNA, 15 bp, Homo sapiens
ccgcctataagcctg

SEQ ID NO: 1918507 - DNA, 15 bp, Homo sapiens
cgcctataagcctgt

SEQ ID NO: 1918508 - DNA, 15 bp, Homo sapiens
gcctataagcctgta

SEQ ID NO: 1918509 - DNA, 15 bp, Homo sapiens
cctataagcctgtaa

SEQ ID NO: 1918510 - DNA, 15 bp, Homo sapiens
ctataagcctgtaaa

SEQ ID NO: 1918511 - DNA, 15 bp, Homo sapiens
tataagcctgtaaaa

SEQ ID NO: 1918512 - DNA, 15 bp, Homo sapiens
ataagcctgtaaaat

SEQ ID NO: 1918513 - DNA, 15 bp, Homo sapiens
taagcctgtaaaatc

SEQ ID NO: 1918514 - DNA, 15 bp, Homo sapiens
aagcctgtaaaatca

SEQ ID NO: 1918515 - DNA, 15 bp, Homo sapiens
agttagttacttcca

SEQ ID NO: 1918516 - DNA, 15 bp, Homo sapiens
gttagttacttccaa

SEQ ID NO: 1918517 - DNA, 15 bp, Homo sapiens
ttagttacttccaag

SEQ ID NO: 1918518 - DNA, 15 bp, Homo sapiens
tagttacttccaaga

SEQ ID NO: 1918519 - DNA, 15 bp, Homo sapiens
agttacttccaagat

SEQ ID NO: 1918520 - DNA, 15 bp, Homo sapiens
gttacttccaagata

SEQ ID NO: 1918521 - DNA, 15 bp, Homo sapiens
ttacttccaagatac

SEQ ID NO: 1918522 - DNA, 15 bp, Homo sapiens
tacttccaagataca

SEQ ID NO: 1918523 - DNA, 15 bp, Homo sapiens
acttccaagatacaa

SEQ ID NO: 1918524 - DNA, 15 bp, Homo sapiens
cttccaagatacaat

SEQ ID NO: 1918525 - DNA, 15 bp, Homo sapiens
ttccaagatacaatg

SEQ ID NO: 1918526 - DNA, 15 bp, Homo sapiens
tccaagatacaatgg

SEQ ID NO: 1918527 - DNA, 15 bp, Homo sapiens
ccaagatacaatggg

SEQ ID NO: 1918528 - DNA, 15 bp, Homo sapiens
caagatacaatgggg

SEQ ID NO: 1918529 - DNA, 15 bp, Homo sapiens
aagatacaatggggg

SEQ ID NO: 1918530 - DNA, 15 bp, Homo sapiens
caatgggggtacagg

SEQ ID NO: 1918531 - DNA, 15 bp, Homo sapiens
aatgggggtacaggc

SEQ ID NO: 1918532 - DNA, 15 bp, Homo sapiens
atgggggtacaggca

SEQ ID NO: 1918533 - DNA, 15 bp, Homo sapiens
tgggggtacaggcaa

SEQ ID NO: 1918534 - DNA, 15 bp, Homo sapiens
gggggtacaggcaat

SEQ ID NO: 1918535 - DNA, 15 bp, Homo sapiens
ggggtacaggcaatg

SEQ ID NO: 1918536 - DNA, 15 bp, Homo sapiens
gggtacaggcaatgg

SEQ ID NO: 1918537 - DNA, 15 bp, Homo sapiens
ggtacaggcaatggg

SEQ ID NO: 1918538 - DNA, 15 bp, Homo sapiens
gtacaggcaatgggt

SEQ ID NO: 1918539 - DNA, 15 bp, Homo sapiens
tacaggcaatgggta

SEQ ID NO: 1918540 - DNA, 15 bp, Homo sapiens
acaggcaatgggtaa

SEQ ID NO: 1918541 - DNA, 15 bp, Homo sapiens
caggcaatgggtaaa

SEQ ID NO: 1918542 - DNA, 15 bp, Homo sapiens
aggcaatgggtaaat

SEQ ID NO: 1918543 - DNA, 15 bp, Homo sapiens
ggcaatgggtaaata

SEQ ID NO: 1918544 - DNA, 15 bp, Homo sapiens
gcaatgggtaaatag

SEQ ID NO: 1918545 - DNA, 15 bp, Homo sapiens
caatgggtaaataga

SEQ ID NO: 1918546 - DNA, 15 bp, Homo sapiens
aatgggtaaatagac

SEQ ID NO: 1918547 - DNA, 15 bp, Homo sapiens
atgggtaaatagacc

SEQ ID NO: 1918548 - DNA, 15 bp, Homo sapiens
tgggtaaatagaccc

SEQ ID NO: 1918549 - DNA, 15 bp, Homo sapiens
gggtaaatagaccca

SEQ ID NO: 1918550 - DNA, 15 bp, Homo sapiens
ggtaaatagacccat

SEQ ID NO: 1918551 - DNA, 15 bp, Homo sapiens
gtaaatagacccatt

SEQ ID NO: 1918552 - DNA, 15 bp, Homo sapiens
taaatagacccattc

SEQ ID NO: 1918553 - DNA, 15 bp, Homo sapiens
aaatagacccattcc

SEQ ID NO: 1918554 - DNA, 15 bp, Homo sapiens
aatagacccattcca

SEQ ID NO: 1918555 - DNA, 15 bp, Homo sapiens
atagacccattccaa

SEQ ID NO: 1918556 - DNA, 15 bp, Homo sapiens
tagacccattccaaa

SEQ ID NO: 1918557 - DNA, 15 bp, Homo sapiens
agacccattccaaat

SEQ ID NO: 1918558 - DNA, 15 bp, Homo sapiens
gacccattccaaatg

SEQ ID NO: 1918559 - DNA, 15 bp, Homo sapiens
acccattccaaatgg

SEQ ID NO: 1918560 - DNA, 15 bp, Homo sapiens
cccattccaaatggg

SEQ ID NO: 1918561 - DNA, 15 bp, Homo sapiens
ccattccaaatggga

SEQ ID NO: 1918562 - DNA, 15 bp, Homo sapiens
cattccaaatgggag

SEQ ID NO: 1918563 - DNA, 15 bp, Homo sapiens
attccaaatgggaga

SEQ ID NO: 1918564 - DNA, 15 bp, Homo sapiens
ttccaaatgggagaa

SEQ ID NO: 1918565 - DNA, 15 bp, Homo sapiens
tccaaatgggagaaa

SEQ ID NO: 1918566 - DNA, 15 bp, Homo sapiens
tgggagaaattggct

SEQ ID NO: 1918567 - DNA, 15 bp, Homo sapiens
gggagaaattggcta

SEQ ID NO: 1918568 - DNA, 15 bp, Homo sapiens
ggagaaattggctaa

SEQ ID NO: 1918569 - DNA, 15 bp, Homo sapiens
gagaaattggctaaa

SEQ ID NO: 1918570 - DNA, 15 bp, Homo sapiens
agaaattggctaaaa

SEQ ID NO: 1918571 - DNA, 15 bp, Homo sapiens
gaaattggctaaaac

SEQ ID NO: 1918572 - DNA, 15 bp, Homo sapiens
aaattggctaaaaca

SEQ ID NO: 1918573 - DNA, 15 bp, Homo sapiens
aattggctaaaacaa

SEQ ID NO: 1918574 - DNA, 15 bp, Homo sapiens
attggctaaaacaaa

SEQ ID NO: 1918575 - DNA, 15 bp, Homo sapiens
ttggctaaaacaaag

SEQ ID NO: 1918576 - DNA, 15 bp, Homo sapiens
tggctaaaacaaagg

SEQ ID NO: 1918577 - DNA, 15 bp, Homo sapiens
ggctaaaacaaaggg

SEQ ID NO: 1918578 - DNA, 15 bp, Homo sapiens
gctaaaacaaaggga

SEQ ID NO: 1918579 - DNA, 15 bp, Homo sapiens
ctaaaacaaagggac

SEQ ID NO: 1918580 - DNA, 15 bp, Homo sapiens
taaaacaaagggacc

SEQ ID NO: 1918581 - DNA, 15 bp, Homo sapiens
aaaacaaagggacca

SEQ ID NO: 1918582 - DNA, 15 bp, Homo sapiens
aaacaaagggaccac

SEQ ID NO: 1918583 - DNA, 15 bp, Homo sapiens
aacaaagggaccaca

SEQ ID NO: 1918584 - DNA, 15 bp, Homo sapiens
acaaagggaccacag

SEQ ID NO: 1918585 - DNA, 15 bp, Homo sapiens
caaagggaccacagg

SEQ ID NO: 1918586 - DNA, 15 bp, Homo sapiens
aaagggaccacaggc

SEQ ID NO: 1918587 - DNA, 15 bp, Homo sapiens
aagggaccacaggcc

SEQ ID NO: 1918588 - DNA, 15 bp, Homo sapiens
agggaccacaggccc

SEQ ID NO: 1918589 - DNA, 15 bp, Homo sapiens
gggaccacaggcccc

SEQ ID NO: 1918590 - DNA, 15 bp, Homo sapiens
ggaccacaggcccca

SEQ ID NO: 1918591 - DNA, 15 bp, Homo sapiens
gaccacaggccccat

SEQ ID NO: 1918592 - DNA, 15 bp, Homo sapiens
accacaggccccata

SEQ ID NO: 1918593 - DNA, 15 bp, Homo sapiens
ccacaggccccatac

SEQ ID NO: 1918594 - DNA, 15 bp, Homo sapiens
cacaggccccataca

SEQ ID NO: 1918595 - DNA, 15 bp, Homo sapiens
acaggccccatacaa

SEQ ID NO: 1918596 - DNA, 15 bp, Homo sapiens
caggccccatacaag

SEQ ID NO: 1918597 - DNA, 15 bp, Homo sapiens
aggccccatacaagt

SEQ ID NO: 1918598 - DNA, 15 bp, Homo sapiens
ggccccatacaagtc

SEQ ID NO: 1918599 - DNA, 15 bp, Homo sapiens
gccccatacaagtcc

SEQ ID NO: 1918600 - DNA, 15 bp, Homo sapiens
ccccatacaagtcca

SEQ ID NO: 1918601 - DNA, 15 bp, Homo sapiens
cccatacaagtccaa

SEQ ID NO: 1918602 - DNA, 15 bp, Homo sapiens
ccatacaagtccaaa

SEQ ID NO: 1918603 - DNA, 15 bp, Homo sapiens
catacaagtccaaaa

SEQ ID NO: 1918604 - DNA, 15 bp, Homo sapiens
atacaagtccaaaac

SEQ ID NO: 1918605 - DNA, 15 bp, Homo sapiens
tacaagtccaaaacc

SEQ ID NO: 1918606 - DNA, 15 bp, Homo sapiens
acaagtccaaaacct

SEQ ID NO: 1918607 - DNA, 15 bp, Homo sapiens
caagtccaaaacctg

SEQ ID NO: 1918608 - DNA, 15 bp, Homo sapiens
aagtccaaaacctgg

SEQ ID NO: 1918609 - DNA, 15 bp, Homo sapiens
agtccaaaacctgga

SEQ ID NO: 1918610 - DNA, 15 bp, Homo sapiens
gtccaaaacctggac

SEQ ID NO: 1918611 - DNA, 15 bp, Homo sapiens
tccaaaacctggaca

SEQ ID NO: 1918612 - DNA, 15 bp, Homo sapiens
ccaaaacctggacag

SEQ ID NO: 1918613 - DNA, 15 bp, Homo sapiens
caaaacctggacagg

SEQ ID NO: 1918614 - DNA, 15 bp, Homo sapiens
aaaacctggacaggc

SEQ ID NO: 1918615 - DNA, 15 bp, Homo sapiens
aaacctggacaggca

SEQ ID NO: 1918616 - DNA, 15 bp, Homo sapiens
aacctggacaggcag

SEQ ID NO: 1918617 - DNA, 15 bp, Homo sapiens
acctggacaggcagt

SEQ ID NO: 1918618 - DNA, 15 bp, Homo sapiens
cctggacaggcagtc

SEQ ID NO: 1918619 - DNA, 15 bp, Homo sapiens
ctggacaggcagtca

SEQ ID NO: 1918620 - DNA, 15 bp, Homo sapiens
tggacaggcagtcat

SEQ ID NO: 1918621 - DNA, 15 bp, Homo sapiens
ggacaggcagtcatt

SEQ ID NO: 1918622 - DNA, 15 bp, Homo sapiens
gacaggcagtcatta

SEQ ID NO: 1918623 - DNA, 15 bp, Homo sapiens
acaggcagtcattaa

SEQ ID NO: 1918624 - DNA, 15 bp, Homo sapiens
caggcagtcattaaa

SEQ ID NO: 1918625 - DNA, 15 bp, Homo sapiens
aggcagtcattaaat

SEQ ID NO: 1918626 - DNA, 15 bp, Homo sapiens
ggcagtcattaaatc

SEQ ID NO: 1918627 - DNA, 15 bp, Homo sapiens
gcagtcattaaatct

SEQ ID NO: 1918628 - DNA, 15 bp, Homo sapiens
cagtcattaaatctt

SEQ ID NO: 1918629 - DNA, 15 bp, Homo sapiens
agtcattaaatctta

SEQ ID NO: 1918630 - DNA, 15 bp, Homo sapiens
gtcattaaatcttaa

SEQ ID NO: 1918631 - DNA, 15 bp, Homo sapiens
tcattaaatcttaaa

SEQ ID NO: 1918632 - DNA, 15 bp, Homo sapiens
cattaaatcttaaag

SEQ ID NO: 1918633 - DNA, 15 bp, Homo sapiens
attaaatcttaaagt

SEQ ID NO: 1918634 - DNA, 15 bp, Homo sapiens
ttaaatcttaaagtt

SEQ ID NO: 1918635 - DNA, 15 bp, Homo sapiens
taaatcttaaagttc

SEQ ID NO: 1918636 - DNA, 15 bp, Homo sapiens
tccatgtctcacatt

SEQ ID NO: 1918637 - DNA, 15 bp, Homo sapiens
ccatgtctcacattc

SEQ ID NO: 1918638 - DNA, 15 bp, Homo sapiens
catgtctcacattcg

SEQ ID NO: 1918639 - DNA, 15 bp, Homo sapiens
atgtctcacattcgg

SEQ ID NO: 1918640 - DNA, 15 bp, Homo sapiens
tgtctcacattcggg

SEQ ID NO: 1918641 - DNA, 15 bp, Homo sapiens
gtctcacattcgggg

SEQ ID NO: 1918642 - DNA, 15 bp, Homo sapiens
tctcacattcggggc

SEQ ID NO: 1918643 - DNA, 15 bp, Homo sapiens
ctcacattcggggca

SEQ ID NO: 1918644 - DNA, 15 bp, Homo sapiens
tcacattcggggcac

SEQ ID NO: 1918645 - DNA, 15 bp, Homo sapiens
cacattcggggcaca

SEQ ID NO: 1918646 - DNA, 15 bp, Homo sapiens
acattcggggcacac

SEQ ID NO: 1918647 - DNA, 15 bp, Homo sapiens
cattcggggcacact

SEQ ID NO: 1918648 - DNA, 15 bp, Homo sapiens
attcggggcacactg

SEQ ID NO: 1918649 - DNA, 15 bp, Homo sapiens
ttcggggcacactga

SEQ ID NO: 1918650 - DNA, 15 bp, Homo sapiens
tcggggcacactgat

SEQ ID NO: 1918651 - DNA, 15 bp, Homo sapiens
cggggcacactgatg

SEQ ID NO: 1918652 - DNA, 15 bp, Homo sapiens
ggggcacactgatgc

SEQ ID NO: 1918653 - DNA, 15 bp, Homo sapiens
gggcacactgatgca

SEQ ID NO: 1918654 - DNA, 15 bp, Homo sapiens
ggcacactgatgcaa

SEQ ID NO: 1918655 - DNA, 15 bp, Homo sapiens
gcacactgatgcaag

SEQ ID NO: 1918656 - DNA, 15 bp, Homo sapiens
cactgatgcaagaga

SEQ ID NO: 1918657 - DNA, 15 bp, Homo sapiens
actgatgcaagagat

SEQ ID NO: 1918658 - DNA, 15 bp, Homo sapiens
ctgatgcaagagatg

SEQ ID NO: 1918659 - DNA, 15 bp, Homo sapiens
tgatgcaagagatgg

SEQ ID NO: 1918660 - DNA, 15 bp, Homo sapiens
gatgcaagagatggg

SEQ ID NO: 1918661 - DNA, 15 bp, Homo sapiens
atgcaagagatgggt

SEQ ID NO: 1918662 - DNA, 15 bp, Homo sapiens
tgcaagagatgggtt

SEQ ID NO: 1918663 - DNA, 15 bp, Homo sapiens
gcaagagatgggttc

SEQ ID NO: 1918664 - DNA, 15 bp, Homo sapiens
caagagatgggttcc

SEQ ID NO: 1918665 - DNA, 15 bp, Homo sapiens
aagagatgggttccc

SEQ ID NO: 1918666 - DNA, 15 bp, Homo sapiens
agagatgggttccca

SEQ ID NO: 1918667 - DNA, 15 bp, Homo sapiens
gagatgggttcccaa

SEQ ID NO: 1918668 - DNA, 15 bp, Homo sapiens
agatgggttcccaag

SEQ ID NO: 1918669 - DNA, 15 bp, Homo sapiens
gatgggttcccaagg

SEQ ID NO: 1918670 - DNA, 15 bp, Homo sapiens
atgggttcccaaggc

SEQ ID NO: 1918671 - DNA, 15 bp, Homo sapiens
tgggttcccaaggcc

SEQ ID NO: 1918672 - DNA, 15 bp, Homo sapiens
gggttcccaaggcct

SEQ ID NO: 1918673 - DNA, 15 bp, Homo sapiens
ggttcccaaggcctt

SEQ ID NO: 1918674 - DNA, 15 bp, Homo sapiens
gttcccaaggccttg

SEQ ID NO: 1918675 - DNA, 15 bp, Homo sapiens
ttcccaaggccttgg

SEQ ID NO: 1918676 - DNA, 15 bp, Homo sapiens
tcccaaggccttggg

SEQ ID NO: 1918677 - DNA, 15 bp, Homo sapiens
cccaaggccttgggc

SEQ ID NO: 1918678 - DNA, 15 bp, Homo sapiens
ccaaggccttgggca

SEQ ID NO: 1918679 - DNA, 15 bp, Homo sapiens
caaggccttgggcag

SEQ ID NO: 1918680 - DNA, 15 bp, Homo sapiens
aaggccttgggcagc

SEQ ID NO: 1918681 - DNA, 15 bp, Homo sapiens
aggccttgggcagct

SEQ ID NO: 1918682 - DNA, 15 bp, Homo sapiens
ggccttgggcagctt

SEQ ID NO: 1918683 - DNA, 15 bp, Homo sapiens
gccttgggcagcttc

SEQ ID NO: 1918684 - DNA, 15 bp, Homo sapiens
ccttgggcagcttca

SEQ ID NO: 1918685 - DNA, 15 bp, Homo sapiens
cttgggcagcttcac

SEQ ID NO: 1918686 - DNA, 15 bp, Homo sapiens
ttgggcagcttcacc

SEQ ID NO: 1918687 - DNA, 15 bp, Homo sapiens
tgggcagcttcaccc

SEQ ID NO: 1918688 - DNA, 15 bp, Homo sapiens
gggcagcttcaccct

SEQ ID NO: 1918689 - DNA, 15 bp, Homo sapiens
ggcagcttcaccctg

SEQ ID NO: 1918690 - DNA, 15 bp, Homo sapiens
gcagcttcaccctgt

SEQ ID NO: 1918691 - DNA, 15 bp, Homo sapiens
cagcttcaccctgtg

SEQ ID NO: 1918692 - DNA, 15 bp, Homo sapiens
agcttcaccctgtgg

SEQ ID NO: 1918693 - DNA, 15 bp, Homo sapiens
gcttcaccctgtggt

SEQ ID NO: 1918694 - DNA, 15 bp, Homo sapiens
cttcaccctgtggtg

SEQ ID NO: 1918695 - DNA, 15 bp, Homo sapiens
ttcaccctgtggtgt

SEQ ID NO: 1918696 - DNA, 15 bp, Homo sapiens
tcaccctgtggtgtg

SEQ ID NO: 1918697 - DNA, 15 bp, Homo sapiens
caccctgtggtgtgg

SEQ ID NO: 1918698 - DNA, 15 bp, Homo sapiens
accctgtggtgtggt

SEQ ID NO: 1918699 - DNA, 15 bp, Homo sapiens
ccctgtggtgtggtt

SEQ ID NO: 1918700 - DNA, 15 bp, Homo sapiens
cctgtggtgtggttc

SEQ ID NO: 1918701 - DNA, 15 bp, Homo sapiens
ctgtggtgtggttct

SEQ ID NO: 1918702 - DNA, 15 bp, Homo sapiens
tgtggtgtggttctg

SEQ ID NO: 1918703 - DNA, 15 bp, Homo sapiens
gtggtgtggttctgc

SEQ ID NO: 1918704 - DNA, 15 bp, Homo sapiens
tggtgtggttctgca

SEQ ID NO: 1918705 - DNA, 15 bp, Homo sapiens
ggtgtggttctgcag

SEQ ID NO: 1918706 - DNA, 15 bp, Homo sapiens
gtgtggttctgcagg

SEQ ID NO: 1918707 - DNA, 15 bp, Homo sapiens
tgtggttctgcagga

SEQ ID NO: 1918708 - DNA, 15 bp, Homo sapiens
gtggttctgcaggat

SEQ ID NO: 1918709 - DNA, 15 bp, Homo sapiens
tggttctgcaggata

SEQ ID NO: 1918710 - DNA, 15 bp, Homo sapiens
ggttctgcaggatac

SEQ ID NO: 1918711 - DNA, 15 bp, Homo sapiens
gttctgcaggataca

SEQ ID NO: 1918712 - DNA, 15 bp, Homo sapiens
ttctgcaggatacag

SEQ ID NO: 1918713 - DNA, 15 bp, Homo sapiens
tctgcaggatacagc

SEQ ID NO: 1918714 - DNA, 15 bp, Homo sapiens
ctgcaggatacagcc

SEQ ID NO: 1918715 - DNA, 15 bp, Homo sapiens
tgcaggatacagccc

SEQ ID NO: 1918716 - DNA, 15 bp, Homo sapiens
gcaggatacagcccc

SEQ ID NO: 1918717 - DNA, 15 bp, Homo sapiens
caggatacagcccct

SEQ ID NO: 1918718 - DNA, 15 bp, Homo sapiens
aggatacagcccctg

SEQ ID NO: 1918719 - DNA, 15 bp, Homo sapiens
ggatacagcccctgc

SEQ ID NO: 1918720 - DNA, 15 bp, Homo sapiens
gatacagcccctgca

SEQ ID NO: 1918721 - DNA, 15 bp, Homo sapiens
atacagcccctgcag

SEQ ID NO: 1918722 - DNA, 15 bp, Homo sapiens
tacagcccctgcagt

SEQ ID NO: 1918723 - DNA, 15 bp, Homo sapiens
acagcccctgcagtt

SEQ ID NO: 1918724 - DNA, 15 bp, Homo sapiens
cagcccctgcagttg

SEQ ID NO: 1918725 - DNA, 15 bp, Homo sapiens
agcccctgcagttgc

SEQ ID NO: 1918726 - DNA, 15 bp, Homo sapiens
gcccctgcagttgct

SEQ ID NO: 1918727 - DNA, 15 bp, Homo sapiens
cccctgcagttgctt

SEQ ID NO: 1918728 - DNA, 15 bp, Homo sapiens
ccctgcagttgcttt

SEQ ID NO: 1918729 - DNA, 15 bp, Homo sapiens
cctgcagttgctttc

SEQ ID NO: 1918730 - DNA, 15 bp, Homo sapiens
ctgcagttgctttcc

SEQ ID NO: 1918731 - DNA, 15 bp, Homo sapiens
tgcagttgctttccc

SEQ ID NO: 1918732 - DNA, 15 bp, Homo sapiens
gcagttgctttcccg

SEQ ID NO: 1918733 - DNA, 15 bp, Homo sapiens
cagttgctttcccgg

SEQ ID NO: 1918734 - DNA, 15 bp, Homo sapiens
agttgctttcccggg

SEQ ID NO: 1918735 - DNA, 15 bp, Homo sapiens
gttgctttcccgggc

SEQ ID NO: 1918736 - DNA, 15 bp, Homo sapiens
ttgctttcccgggct

SEQ ID NO: 1918737 - DNA, 15 bp, Homo sapiens
tgctttcccgggctg

SEQ ID NO: 1918738 - DNA, 15 bp, Homo sapiens
gctttcccgggctgg

SEQ ID NO: 1918739 - DNA, 15 bp, Homo sapiens
ctttcccgggctggc

SEQ ID NO: 1918740 - DNA, 15 bp, Homo sapiens
tttcccgggctggct

SEQ ID NO: 1918741 - DNA, 15 bp, Homo sapiens
ttcccgggctggctc

SEQ ID NO: 1918742 - DNA, 15 bp, Homo sapiens
tcccgggctggctct

SEQ ID NO: 1918743 - DNA, 15 bp, Homo sapiens
cccgggctggctctg

SEQ ID NO: 1918744 - DNA, 15 bp, Homo sapiens
ccgggctggctctga

SEQ ID NO: 1918745 - DNA, 15 bp, Homo sapiens
cgggctggctctgag

SEQ ID NO: 1918746 - DNA, 15 bp, Homo sapiens
gggctggctctgagt

SEQ ID NO: 1918747 - DNA, 15 bp, Homo sapiens
ggctggctctgagtg

SEQ ID NO: 1918748 - DNA, 15 bp, Homo sapiens
gctggctctgagtgc

SEQ ID NO: 1918749 - DNA, 15 bp, Homo sapiens
ctggctctgagtgcc

SEQ ID NO: 1918750 - DNA, 15 bp, Homo sapiens
tggctctgagtgcct

SEQ ID NO: 1918751 - DNA, 15 bp, Homo sapiens
ggctctgagtgcctg

SEQ ID NO: 1918752 - DNA, 15 bp, Homo sapiens
gctctgagtgcctgc

SEQ ID NO: 1918753 - DNA, 15 bp, Homo sapiens
ctctgagtgcctgca

SEQ ID NO: 1918754 - DNA, 15 bp, Homo sapiens
tctgagtgcctgcag

SEQ ID NO: 1918755 - DNA, 15 bp, Homo sapiens
ctgagtgcctgcagc

SEQ ID NO: 1918756 - DNA, 15 bp, Homo sapiens
tgagtgcctgcagct

SEQ ID NO: 1918757 - DNA, 15 bp, Homo sapiens
gagtgcctgcagctt

SEQ ID NO: 1918758 - DNA, 15 bp, Homo sapiens
agtgcctgcagcttt

SEQ ID NO: 1918759 - DNA, 15 bp, Homo sapiens
gtgcctgcagctttt

SEQ ID NO: 1918760 - DNA, 15 bp, Homo sapiens
tgcctgcagcttttc

SEQ ID NO: 1918761 - DNA, 15 bp, Homo sapiens
gcctgcagcttttct

SEQ ID NO: 1918762 - DNA, 15 bp, Homo sapiens
cctgcagcttttcta

SEQ ID NO: 1918763 - DNA, 15 bp, Homo sapiens
ctgcagcttttctag

SEQ ID NO: 1918764 - DNA, 15 bp, Homo sapiens
tgcagcttttctagg

SEQ ID NO: 1918765 - DNA, 15 bp, Homo sapiens
gcagcttttctaggc

SEQ ID NO: 1918766 - DNA, 15 bp, Homo sapiens
cagcttttctaggca

SEQ ID NO: 1918767 - DNA, 15 bp, Homo sapiens
agcttttctaggcac

SEQ ID NO: 1918768 - DNA, 15 bp, Homo sapiens
gcttttctaggcaca

SEQ ID NO: 1918769 - DNA, 15 bp, Homo sapiens
cttttctaggcacac

SEQ ID NO: 1918770 - DNA, 15 bp, Homo sapiens
ttttctaggcacaca

SEQ ID NO: 1918771 - DNA, 15 bp, Homo sapiens
tttctaggcacacag

SEQ ID NO: 1918772 - DNA, 15 bp, Homo sapiens
ttctaggcacacagt

SEQ ID NO: 1918773 - DNA, 15 bp, Homo sapiens
tctaggcacacagtg

SEQ ID NO: 1918774 - DNA, 15 bp, Homo sapiens
ctaggcacacagtgc

SEQ ID NO: 1918775 - DNA, 15 bp, Homo sapiens
taggcacacagtgca

SEQ ID NO: 1918776 - DNA, 15 bp, Homo sapiens
aggcacacagtgcaa

SEQ ID NO: 1918777 - DNA, 15 bp, Homo sapiens
ggcacacagtgcaag

SEQ ID NO: 1918778 - DNA, 15 bp, Homo sapiens
gcacacagtgcaagc

SEQ ID NO: 1918779 - DNA, 15 bp, Homo sapiens
cacacagtgcaagct

SEQ ID NO: 1918780 - DNA, 15 bp, Homo sapiens
acacagtgcaagctg

SEQ ID NO: 1918781 - DNA, 15 bp, Homo sapiens
cacagtgcaagctgt

SEQ ID NO: 1918782 - DNA, 15 bp, Homo sapiens
acagtgcaagctgtc

SEQ ID NO: 1918783 - DNA, 15 bp, Homo sapiens
cagtgcaagctgtcg

SEQ ID NO: 1918784 - DNA, 15 bp, Homo sapiens
agtgcaagctgtcgg

SEQ ID NO: 1918785 - DNA, 15 bp, Homo sapiens
gtgcaagctgtcggt

SEQ ID NO: 1918786 - DNA, 15 bp, Homo sapiens
tgcaagctgtcggtg

SEQ ID NO: 1918787 - DNA, 15 bp, Homo sapiens
gcaagctgtcggtgg

SEQ ID NO: 1918788 - DNA, 15 bp, Homo sapiens
caagctgtcggtgga

SEQ ID NO: 1918789 - DNA, 15 bp, Homo sapiens
aagctgtcggtggat

SEQ ID NO: 1918790 - DNA, 15 bp, Homo sapiens
agctgtcggtggatc

SEQ ID NO: 1918791 - DNA, 15 bp, Homo sapiens
gctgtcggtggatct

SEQ ID NO: 1918792 - DNA, 15 bp, Homo sapiens
ctgtcggtggatcta

SEQ ID NO: 1918793 - DNA, 15 bp, Homo sapiens
tgtcggtggatctat

SEQ ID NO: 1918794 - DNA, 15 bp, Homo sapiens
gtcggtggatctatc

SEQ ID NO: 1918795 - DNA, 15 bp, Homo sapiens
tcggtggatctatcc

SEQ ID NO: 1918796 - DNA, 15 bp, Homo sapiens
cggtggatctatcct

SEQ ID NO: 1918797 - DNA, 15 bp, Homo sapiens
ggtggatctatcctt

SEQ ID NO: 1918798 - DNA, 15 bp, Homo sapiens
gtggatctatccttc

SEQ ID NO: 1918799 - DNA, 15 bp, Homo sapiens
tggatctatccttct

SEQ ID NO: 1918800 - DNA, 15 bp, Homo sapiens
ggatctatccttctg

SEQ ID NO: 1918801 - DNA, 15 bp, Homo sapiens
gatctatccttctgg

SEQ ID NO: 1918802 - DNA, 15 bp, Homo sapiens
atctatccttctggg

SEQ ID NO: 1918803 - DNA, 15 bp, Homo sapiens
tctatccttctgggg

SEQ ID NO: 1918804 - DNA, 15 bp, Homo sapiens
ctatccttctggggt

SEQ ID NO: 1918805 - DNA, 15 bp, Homo sapiens
tatccttctggggtc

SEQ ID NO: 1918806 - DNA, 15 bp, Homo sapiens
atccttctggggtct

SEQ ID NO: 1918807 - DNA, 15 bp, Homo sapiens
tccttctggggtctg

SEQ ID NO: 1918808 - DNA, 15 bp, Homo sapiens
ccttctggggtctga

SEQ ID NO: 1918809 - DNA, 15 bp, Homo sapiens
cttctggggtctgaa

SEQ ID NO: 1918810 - DNA, 15 bp, Homo sapiens
tctggggtctgaagg

SEQ ID NO: 1918811 - DNA, 15 bp, Homo sapiens
ctggggtctgaagga

SEQ ID NO: 1918812 - DNA, 15 bp, Homo sapiens
tggggtctgaaggac

SEQ ID NO: 1918813 - DNA, 15 bp, Homo sapiens
ggggtctgaaggaca

SEQ ID NO: 1918814 - DNA, 15 bp, Homo sapiens
gggtctgaaggacag

SEQ ID NO: 1918815 - DNA, 15 bp, Homo sapiens
ggtctgaaggacagc

SEQ ID NO: 1918816 - DNA, 15 bp, Homo sapiens
gtctgaaggacagcg

SEQ ID NO: 1918817 - DNA, 15 bp, Homo sapiens
tctgaaggacagcgg

SEQ ID NO: 1918818 - DNA, 15 bp, Homo sapiens
ctgaaggacagcggc

SEQ ID NO: 1918819 - DNA, 15 bp, Homo sapiens
tgaaggacagcggcc

SEQ ID NO: 1918820 - DNA, 15 bp, Homo sapiens
gaaggacagcggccc

SEQ ID NO: 1918821 - DNA, 15 bp, Homo sapiens
aaggacagcggccct

SEQ ID NO: 1918822 - DNA, 15 bp, Homo sapiens
aggacagcggccctc

SEQ ID NO: 1918823 - DNA, 15 bp, Homo sapiens
ggacagcggccctct

SEQ ID NO: 1918824 - DNA, 15 bp, Homo sapiens
gacagcggccctctt

SEQ ID NO: 1918825 - DNA, 15 bp, Homo sapiens
acagcggccctcttc

SEQ ID NO: 1918826 - DNA, 15 bp, Homo sapiens
cagcggccctcttct

SEQ ID NO: 1918827 - DNA, 15 bp, Homo sapiens
agcggccctcttctc

SEQ ID NO: 1918828 - DNA, 15 bp, Homo sapiens
gcggccctcttctca

SEQ ID NO: 1918829 - DNA, 15 bp, Homo sapiens
cggccctcttctcac

SEQ ID NO: 1918830 - DNA, 15 bp, Homo sapiens
ccctcttctcacagc

SEQ ID NO: 1918831 - DNA, 15 bp, Homo sapiens
cctcttctcacagct

SEQ ID NO: 1918832 - DNA, 15 bp, Homo sapiens
ctcttctcacagctc

SEQ ID NO: 1918833 - DNA, 15 bp, Homo sapiens
tcttctcacagctcc

SEQ ID NO: 1918834 - DNA, 15 bp, Homo sapiens
cttctcacagctcca

SEQ ID NO: 1918835 - DNA, 15 bp, Homo sapiens
acagctccactaggc

SEQ ID NO: 1918836 - DNA, 15 bp, Homo sapiens
cagctccactaggca

SEQ ID NO: 1918837 - DNA, 15 bp, Homo sapiens
agctccactaggcag

SEQ ID NO: 1918838 - DNA, 15 bp, Homo sapiens
gctccactaggcagt

SEQ ID NO: 1918839 - DNA, 15 bp, Homo sapiens
ctccactaggcagtg

SEQ ID NO: 1918840 - DNA, 15 bp, Homo sapiens
cactaggcagtgccc

SEQ ID NO: 1918841 - DNA, 15 bp, Homo sapiens
actaggcagtgcccc

SEQ ID NO: 1918842 - DNA, 15 bp, Homo sapiens
ctaggcagtgcccca

SEQ ID NO: 1918843 - DNA, 15 bp, Homo sapiens
taggcagtgccccag

SEQ ID NO: 1918844 - DNA, 15 bp, Homo sapiens
agtgccccagtgggg

SEQ ID NO: 1918845 - DNA, 15 bp, Homo sapiens
gtgccccagtgggga

SEQ ID NO: 1918846 - DNA, 15 bp, Homo sapiens
tgccccagtggggat

SEQ ID NO: 1918847 - DNA, 15 bp, Homo sapiens
gccccagtggggatt

SEQ ID NO: 1918848 - DNA, 15 bp, Homo sapiens
ccccagtggggattc

SEQ ID NO: 1918849 - DNA, 15 bp, Homo sapiens
cccagtggggattct

SEQ ID NO: 1918850 - DNA, 15 bp, Homo sapiens
ccagtggggattctg

SEQ ID NO: 1918851 - DNA, 15 bp, Homo sapiens
cagtggggattctgt

SEQ ID NO: 1918852 - DNA, 15 bp, Homo sapiens
agtggggattctgtg

SEQ ID NO: 1918853 - DNA, 15 bp, Homo sapiens
gtggggattctgtgt

SEQ ID NO: 1918854 - DNA, 15 bp, Homo sapiens
tggggattctgtgtg

SEQ ID NO: 1918855 - DNA, 15 bp, Homo sapiens
ggggattctgtgtgg

SEQ ID NO: 1918856 - DNA, 15 bp, Homo sapiens
gggattctgtgtggg

SEQ ID NO: 1918857 - DNA, 15 bp, Homo sapiens
ggattctgtgtggga

SEQ ID NO: 1918858 - DNA, 15 bp, Homo sapiens
gattctgtgtgggaa

SEQ ID NO: 1918859 - DNA, 15 bp, Homo sapiens
attctgtgtgggaac

SEQ ID NO: 1918860 - DNA, 15 bp, Homo sapiens
ttctgtgtgggaact

SEQ ID NO: 1918861 - DNA, 15 bp, Homo sapiens
tctgtgtgggaactc

SEQ ID NO: 1918862 - DNA, 15 bp, Homo sapiens
ctgtgtgggaactcc

SEQ ID NO: 1918863 - DNA, 15 bp, Homo sapiens
tgtgtgggaactcca

SEQ ID NO: 1918864 - DNA, 15 bp, Homo sapiens
gtgtgggaactccaa

SEQ ID NO: 1918865 - DNA, 15 bp, Homo sapiens
tgtgggaactccaac

SEQ ID NO: 1918866 - DNA, 15 bp, Homo sapiens
gtgggaactccaacc

SEQ ID NO: 1918867 - DNA, 15 bp, Homo sapiens
tgggaactccaaccc

SEQ ID NO: 1918868 - DNA, 15 bp, Homo sapiens
gggaactccaacccc

SEQ ID NO: 1918869 - DNA, 15 bp, Homo sapiens
ggaactccaacccca

SEQ ID NO: 1918870 - DNA, 15 bp, Homo sapiens
gaactccaaccccat

SEQ ID NO: 1918871 - DNA, 15 bp, Homo sapiens
aactccaaccccata

SEQ ID NO: 1918872 - DNA, 15 bp, Homo sapiens
actccaaccccatat

SEQ ID NO: 1918873 - DNA, 15 bp, Homo sapiens
ctccaaccccatatt

SEQ ID NO: 1918874 - DNA, 15 bp, Homo sapiens
tccaaccccatattt

SEQ ID NO: 1918875 - DNA, 15 bp, Homo sapiens
ccaaccccatatttc

SEQ ID NO: 1918876 - DNA, 15 bp, Homo sapiens
caaccccatatttcc

SEQ ID NO: 1918877 - DNA, 15 bp, Homo sapiens
aaccccatatttccc

SEQ ID NO: 1918878 - DNA, 15 bp, Homo sapiens
accccatatttccct

SEQ ID NO: 1918879 - DNA, 15 bp, Homo sapiens
ccccatatttccctt

SEQ ID NO: 1918880 - DNA, 15 bp, Homo sapiens
cccatatttcccttc

SEQ ID NO: 1918881 - DNA, 15 bp, Homo sapiens
ccatatttcccttct

SEQ ID NO: 1918882 - DNA, 15 bp, Homo sapiens
catatttcccttctg

SEQ ID NO: 1918883 - DNA, 15 bp, Homo sapiens
atatttcccttctgc

SEQ ID NO: 1918884 - DNA, 15 bp, Homo sapiens
tatttcccttctgca

SEQ ID NO: 1918885 - DNA, 15 bp, Homo sapiens
ggttctccatgaggt

SEQ ID NO: 1918886 - DNA, 15 bp, Homo sapiens
gttctccatgaggtc

SEQ ID NO: 1918887 - DNA, 15 bp, Homo sapiens
ttctccatgaggtct

SEQ ID NO: 1918888 - DNA, 15 bp, Homo sapiens
tctccatgaggtctc

SEQ ID NO: 1918889 - DNA, 15 bp, Homo sapiens
ctccatgaggtctcc

SEQ ID NO: 1918890 - DNA, 15 bp, Homo sapiens
tccatgaggtctcca

SEQ ID NO: 1918891 - DNA, 15 bp, Homo sapiens
ccatgaggtctccac

SEQ ID NO: 1918892 - DNA, 15 bp, Homo sapiens
catgaggtctccacc

SEQ ID NO: 1918893 - DNA, 15 bp, Homo sapiens
atgaggtctccaccc

SEQ ID NO: 1918894 - DNA, 15 bp, Homo sapiens
tgaggtctccacccc

SEQ ID NO: 1918895 - DNA, 15 bp, Homo sapiens
gaggtctccacccct

SEQ ID NO: 1918896 - DNA, 15 bp, Homo sapiens
aggtctccaccccta

SEQ ID NO: 1918897 - DNA, 15 bp, Homo sapiens
ggtctccacccctac

SEQ ID NO: 1918898 - DNA, 15 bp, Homo sapiens
gtctccacccctaca

SEQ ID NO: 1918899 - DNA, 15 bp, Homo sapiens
tctccacccctacat

SEQ ID NO: 1918900 - DNA, 15 bp, Homo sapiens
ctccacccctacatc

SEQ ID NO: 1918901 - DNA, 15 bp, Homo sapiens
tccacccctacatca

SEQ ID NO: 1918902 - DNA, 15 bp, Homo sapiens
ccacccctacatcag

SEQ ID NO: 1918903 - DNA, 15 bp, Homo sapiens
cacccctacatcaga

SEQ ID NO: 1918904 - DNA, 15 bp, Homo sapiens
acccctacatcagaa

SEQ ID NO: 1918905 - DNA, 15 bp, Homo sapiens
cccctacatcagaat

SEQ ID NO: 1918906 - DNA, 15 bp, Homo sapiens
ccctacatcagaatt

SEQ ID NO: 1918907 - DNA, 15 bp, Homo sapiens
cctacatcagaattc

SEQ ID NO: 1918908 - DNA, 15 bp, Homo sapiens
ctacatcagaattct

SEQ ID NO: 1918909 - DNA, 15 bp, Homo sapiens
tacatcagaattctg

SEQ ID NO: 1918910 - DNA, 15 bp, Homo sapiens
acatcagaattctgc

SEQ ID NO: 1918911 - DNA, 15 bp, Homo sapiens
catcagaattctgcc

SEQ ID NO: 1918912 - DNA, 15 bp, Homo sapiens
atcagaattctgcct

SEQ ID NO: 1918913 - DNA, 15 bp, Homo sapiens
tcagaattctgcctg

SEQ ID NO: 1918914 - DNA, 15 bp, Homo sapiens
cagaattctgcctgg

SEQ ID NO: 1918915 - DNA, 15 bp, Homo sapiens
agaattctgcctgga

SEQ ID NO: 1918916 - DNA, 15 bp, Homo sapiens
gaattctgcctggac

SEQ ID NO: 1918917 - DNA, 15 bp, Homo sapiens
aattctgcctggaca

SEQ ID NO: 1918918 - DNA, 15 bp, Homo sapiens
attctgcctggacac

SEQ ID NO: 1918919 - DNA, 15 bp, Homo sapiens
cctggacacccaggc

SEQ ID NO: 1918920 - DNA, 15 bp, Homo sapiens
ctggacacccaggca

SEQ ID NO: 1918921 - DNA, 15 bp, Homo sapiens
tggacacccaggcat

SEQ ID NO: 1918922 - DNA, 15 bp, Homo sapiens
ggacacccaggcatt

SEQ ID NO: 1918923 - DNA, 15 bp, Homo sapiens
gacacccaggcattt

SEQ ID NO: 1918924 - DNA, 15 bp, Homo sapiens
acacccaggcatttc

SEQ ID NO: 1918925 - DNA, 15 bp, Homo sapiens
cacccaggcatttct

SEQ ID NO: 1918926 - DNA, 15 bp, Homo sapiens
acccaggcatttcta

SEQ ID NO: 1918927 - DNA, 15 bp, Homo sapiens
cccaggcatttctat

SEQ ID NO: 1918928 - DNA, 15 bp, Homo sapiens
ccaggcatttctatc

SEQ ID NO: 1918929 - DNA, 15 bp, Homo sapiens
caggcatttctatct

SEQ ID NO: 1918930 - DNA, 15 bp, Homo sapiens
aggcatttctatcta

SEQ ID NO: 1918931 - DNA, 15 bp, Homo sapiens
ggcatttctatctat

SEQ ID NO: 1918932 - DNA, 15 bp, Homo sapiens
gcatttctatctatc

SEQ ID NO: 1918933 - DNA, 15 bp, Homo sapiens
catttctatctatcc

SEQ ID NO: 1918934 - DNA, 15 bp, Homo sapiens
atttctatctatcct

SEQ ID NO: 1918935 - DNA, 15 bp, Homo sapiens
tttctatctatcctc

SEQ ID NO: 1918936 - DNA, 15 bp, Homo sapiens
ttctatctatcctct

SEQ ID NO: 1918937 - DNA, 15 bp, Homo sapiens
tctatctatcctctg

SEQ ID NO: 1918938 - DNA, 15 bp, Homo sapiens
ctatctatcctctga

SEQ ID NO: 1918939 - DNA, 15 bp, Homo sapiens
tatctatcctctgaa

SEQ ID NO: 1918940 - DNA, 15 bp, Homo sapiens
atctatcctctgaaa

SEQ ID NO: 1918941 - DNA, 15 bp, Homo sapiens
tctatcctctgaaat

SEQ ID NO: 1918942 - DNA, 15 bp, Homo sapiens
ctatcctctgaaatc

SEQ ID NO: 1918943 - DNA, 15 bp, Homo sapiens
tatcctctgaaatct

SEQ ID NO: 1918944 - DNA, 15 bp, Homo sapiens
atcctctgaaatcta

SEQ ID NO: 1918945 - DNA, 15 bp, Homo sapiens
ctctgaaatctaggt

SEQ ID NO: 1918946 - DNA, 15 bp, Homo sapiens
tctgaaatctaggtg

SEQ ID NO: 1918947 - DNA, 15 bp, Homo sapiens
ctgaaatctaggtgg

SEQ ID NO: 1918948 - DNA, 15 bp, Homo sapiens
tgaaatctaggtgga

SEQ ID NO: 1918949 - DNA, 15 bp, Homo sapiens
gaaatctaggtggaa

SEQ ID NO: 1918950 - DNA, 15 bp, Homo sapiens
aaatctaggtggaag

SEQ ID NO: 1918951 - DNA, 15 bp, Homo sapiens
aatctaggtggaagt

SEQ ID NO: 1918952 - DNA, 15 bp, Homo sapiens
atctaggtggaagtt

SEQ ID NO: 1918953 - DNA, 15 bp, Homo sapiens
tctaggtggaagttc

SEQ ID NO: 1918954 - DNA, 15 bp, Homo sapiens
ctaggtggaagttcc

SEQ ID NO: 1918955 - DNA, 15 bp, Homo sapiens
taggtggaagttcca

SEQ ID NO: 1918956 - DNA, 15 bp, Homo sapiens
aggtggaagttccaa

SEQ ID NO: 1918957 - DNA, 15 bp, Homo sapiens
ggtggaagttccaaa

SEQ ID NO: 1918958 - DNA, 15 bp, Homo sapiens
gtggaagttccaaaa

SEQ ID NO: 1918959 - DNA, 15 bp, Homo sapiens
tggaagttccaaaac

SEQ ID NO: 1918960 - DNA, 15 bp, Homo sapiens
ggaagttccaaaacc

SEQ ID NO: 1918961 - DNA, 15 bp, Homo sapiens
gaagttccaaaacct

SEQ ID NO: 1918962 - DNA, 15 bp, Homo sapiens
aagttccaaaacctt

SEQ ID NO: 1918963 - DNA, 15 bp, Homo sapiens
agttccaaaacctta

SEQ ID NO: 1918964 - DNA, 15 bp, Homo sapiens
gttccaaaaccttaa

SEQ ID NO: 1918965 - DNA, 15 bp, Homo sapiens
ttccaaaaccttaac

SEQ ID NO: 1918966 - DNA, 15 bp, Homo sapiens
tccaaaaccttaact

SEQ ID NO: 1918967 - DNA, 15 bp, Homo sapiens
ccaaaaccttaactc

SEQ ID NO: 1918968 - DNA, 15 bp, Homo sapiens
caaaaccttaactct

SEQ ID NO: 1918969 - DNA, 15 bp, Homo sapiens
aaaaccttaactctt

SEQ ID NO: 1918970 - DNA, 15 bp, Homo sapiens
aaaccttaactcttt

SEQ ID NO: 1918971 - DNA, 15 bp, Homo sapiens
aaccttaactctttt

SEQ ID NO: 1918972 - DNA, 15 bp, Homo sapiens
accttaactcttttg

SEQ ID NO: 1918973 - DNA, 15 bp, Homo sapiens
ccttaactcttttgc

SEQ ID NO: 1918974 - DNA, 15 bp, Homo sapiens
cttaactcttttgca

SEQ ID NO: 1918975 - DNA, 15 bp, Homo sapiens
ttaactcttttgcac

SEQ ID NO: 1918976 - DNA, 15 bp, Homo sapiens
taactcttttgcaca

SEQ ID NO: 1918977 - DNA, 15 bp, Homo sapiens
aactcttttgcacac

SEQ ID NO: 1918978 - DNA, 15 bp, Homo sapiens
actcttttgcacacc

SEQ ID NO: 1918979 - DNA, 15 bp, Homo sapiens
ctcttttgcacacct

SEQ ID NO: 1918980 - DNA, 15 bp, Homo sapiens
tcttttgcacacctg

SEQ ID NO: 1918981 - DNA, 15 bp, Homo sapiens
cttttgcacacctgc

SEQ ID NO: 1918982 - DNA, 15 bp, Homo sapiens
ttttgcacacctgca

SEQ ID NO: 1918983 - DNA, 15 bp, Homo sapiens
tttgcacacctgcag

SEQ ID NO: 1918984 - DNA, 15 bp, Homo sapiens
ttgcacacctgcagt

SEQ ID NO: 1918985 - DNA, 15 bp, Homo sapiens
tgcacacctgcagtc

SEQ ID NO: 1918986 - DNA, 15 bp, Homo sapiens
gcacacctgcagtcc

SEQ ID NO: 1918987 - DNA, 15 bp, Homo sapiens
cacacctgcagtccc

SEQ ID NO: 1918988 - DNA, 15 bp, Homo sapiens
acacctgcagtccca

SEQ ID NO: 1918989 - DNA, 15 bp, Homo sapiens
cacctgcagtcccaa

SEQ ID NO: 1918990 - DNA, 15 bp, Homo sapiens
acctgcagtcccaac

SEQ ID NO: 1918991 - DNA, 15 bp, Homo sapiens
cctgcagtcccaaca

SEQ ID NO: 1918992 - DNA, 15 bp, Homo sapiens
ctgcagtcccaacaa

SEQ ID NO: 1918993 - DNA, 15 bp, Homo sapiens
tgcagtcccaacaac

SEQ ID NO: 1918994 - DNA, 15 bp, Homo sapiens
gcagtcccaacaaca

SEQ ID NO: 1918995 - DNA, 15 bp, Homo sapiens
cagtcccaacaacac

SEQ ID NO: 1918996 - DNA, 15 bp, Homo sapiens
agtcccaacaacacc

SEQ ID NO: 1918997 - DNA, 15 bp, Homo sapiens
gtcccaacaacacct

SEQ ID NO: 1918998 - DNA, 15 bp, Homo sapiens
tcccaacaacacctg

SEQ ID NO: 1918999 - DNA, 15 bp, Homo sapiens
cccaacaacacctgg

SEQ ID NO: 1919000 - DNA, 15 bp, Homo sapiens
ccaacaacacctgga

SEQ ID NO: 1919001 - DNA, 15 bp, Homo sapiens
caacaacacctggaa

SEQ ID NO: 1919002 - DNA, 15 bp, Homo sapiens
aacaacacctggaag

SEQ ID NO: 1919003 - DNA, 15 bp, Homo sapiens
acaacacctggaagc

SEQ ID NO: 1919004 - DNA, 15 bp, Homo sapiens
caacacctggaagct

SEQ ID NO: 1919005 - DNA, 15 bp, Homo sapiens
aacacctggaagctg

SEQ ID NO: 1919006 - DNA, 15 bp, Homo sapiens
acacctggaagctgc

SEQ ID NO: 1919007 - DNA, 15 bp, Homo sapiens
cacctggaagctgcc

SEQ ID NO: 1919008 - DNA, 15 bp, Homo sapiens
acctggaagctgcca

SEQ ID NO: 1919009 - DNA, 15 bp, Homo sapiens
cctggaagctgccaa

SEQ ID NO: 1919010 - DNA, 15 bp, Homo sapiens
ctggaagctgccaag

SEQ ID NO: 1919011 - DNA, 15 bp, Homo sapiens
tggaagctgccaagg

SEQ ID NO: 1919012 - DNA, 15 bp, Homo sapiens
ggaagctgccaaggc

SEQ ID NO: 1919013 - DNA, 15 bp, Homo sapiens
gaagctgccaaggct

SEQ ID NO: 1919014 - DNA, 15 bp, Homo sapiens
aagctgccaaggctt

SEQ ID NO: 1919015 - DNA, 15 bp, Homo sapiens
agctgccaaggcttg

SEQ ID NO: 1919016 - DNA, 15 bp, Homo sapiens
gctgccaaggcttgg

SEQ ID NO: 1919017 - DNA, 15 bp, Homo sapiens
caaggcttggggctt

SEQ ID NO: 1919018 - DNA, 15 bp, Homo sapiens
aaggcttggggcttg

SEQ ID NO: 1919019 - DNA, 15 bp, Homo sapiens
aggcttggggcttgc

SEQ ID NO: 1919020 - DNA, 15 bp, Homo sapiens
ggcttggggcttgca

SEQ ID NO: 1919021 - DNA, 15 bp, Homo sapiens
gcttggggcttgcac

SEQ ID NO: 1919022 - DNA, 15 bp, Homo sapiens
cttggggcttgcacc

SEQ ID NO: 1919023 - DNA, 15 bp, Homo sapiens
ttggggcttgcaccc

SEQ ID NO: 1919024 - DNA, 15 bp, Homo sapiens
tggggcttgcaccct

SEQ ID NO: 1919025 - DNA, 15 bp, Homo sapiens
ggggcttgcaccctc

SEQ ID NO: 1919026 - DNA, 15 bp, Homo sapiens
gggcttgcaccctct

SEQ ID NO: 1919027 - DNA, 15 bp, Homo sapiens
gcaccctctgaagca

SEQ ID NO: 1919028 - DNA, 15 bp, Homo sapiens
caccctctgaagcaa

SEQ ID NO: 1919029 - DNA, 15 bp, Homo sapiens
accctctgaagcaat

SEQ ID NO: 1919030 - DNA, 15 bp, Homo sapiens
ccctctgaagcaatg

SEQ ID NO: 1919031 - DNA, 15 bp, Homo sapiens
cctctgaagcaatgg

SEQ ID NO: 1919032 - DNA, 15 bp, Homo sapiens
ctctgaagcaatggc

SEQ ID NO: 1919033 - DNA, 15 bp, Homo sapiens
tctgaagcaatggcc

SEQ ID NO: 1919034 - DNA, 15 bp, Homo sapiens
ctgaagcaatggcct

SEQ ID NO: 1919035 - DNA, 15 bp, Homo sapiens
tgaagcaatggcctg

SEQ ID NO: 1919036 - DNA, 15 bp, Homo sapiens
gaagcaatggcctga

SEQ ID NO: 1919037 - DNA, 15 bp, Homo sapiens
aagcaatggcctgag

SEQ ID NO: 1919038 - DNA, 15 bp, Homo sapiens
agcaatggcctgagc

SEQ ID NO: 1919039 - DNA, 15 bp, Homo sapiens
gcaatggcctgagct

SEQ ID NO: 1919040 - DNA, 15 bp, Homo sapiens
caatggcctgagctg

SEQ ID NO: 1919041 - DNA, 15 bp, Homo sapiens
aatggcctgagctgt

SEQ ID NO: 1919042 - DNA, 15 bp, Homo sapiens
atggcctgagctgta

SEQ ID NO: 1919043 - DNA, 15 bp, Homo sapiens
tggcctgagctgtac

SEQ ID NO: 1919044 - DNA, 15 bp, Homo sapiens
ggcctgagctgtaca

SEQ ID NO: 1919045 - DNA, 15 bp, Homo sapiens
gcctgagctgtacat

SEQ ID NO: 1919046 - DNA, 15 bp, Homo sapiens
cctgagctgtacatt

SEQ ID NO: 1919047 - DNA, 15 bp, Homo sapiens
ctgagctgtacattg

SEQ ID NO: 1919048 - DNA, 15 bp, Homo sapiens
tgagctgtacattga

SEQ ID NO: 1919049 - DNA, 15 bp, Homo sapiens
gagctgtacattgac

SEQ ID NO: 1919050 - DNA, 15 bp, Homo sapiens
agctgtacattgacc

SEQ ID NO: 1919051 - DNA, 15 bp, Homo sapiens
gctgtacattgaccc

SEQ ID NO: 1919052 - DNA, 15 bp, Homo sapiens
ctgtacattgacccc

SEQ ID NO: 1919053 - DNA, 15 bp, Homo sapiens
tgtacattgacccct

SEQ ID NO: 1919054 - DNA, 15 bp, Homo sapiens
gtacattgacccctt

SEQ ID NO: 1919055 - DNA, 15 bp, Homo sapiens
tacattgacccctta

SEQ ID NO: 1919056 - DNA, 15 bp, Homo sapiens
acattgaccccttat

SEQ ID NO: 1919057 - DNA, 15 bp, Homo sapiens
cattgaccccttata

SEQ ID NO: 1919058 - DNA, 15 bp, Homo sapiens
attgaccccttatag

SEQ ID NO: 1919059 - DNA, 15 bp, Homo sapiens
ttgaccccttatagc

SEQ ID NO: 1919060 - DNA, 15 bp, Homo sapiens
tgaccccttatagcc

SEQ ID NO: 1919061 - DNA, 15 bp, Homo sapiens
gaccccttatagcca

SEQ ID NO: 1919062 - DNA, 15 bp, Homo sapiens
accccttatagccac

SEQ ID NO: 1919063 - DNA, 15 bp, Homo sapiens
ccccttatagccaca

SEQ ID NO: 1919064 - DNA, 15 bp, Homo sapiens
cccttatagccacag

SEQ ID NO: 1919065 - DNA, 15 bp, Homo sapiens
ccttatagccacagc

SEQ ID NO: 1919066 - DNA, 15 bp, Homo sapiens
cttatagccacagct

SEQ ID NO: 1919067 - DNA, 15 bp, Homo sapiens
ttatagccacagctg

SEQ ID NO: 1919068 - DNA, 15 bp, Homo sapiens
tatagccacagctgg

SEQ ID NO: 1919069 - DNA, 15 bp, Homo sapiens
atagccacagctgga

SEQ ID NO: 1919070 - DNA, 15 bp, Homo sapiens
tagccacagctggag

SEQ ID NO: 1919071 - DNA, 15 bp, Homo sapiens
agccacagctggagc

SEQ ID NO: 1919072 - DNA, 15 bp, Homo sapiens
gccacagctggagca

SEQ ID NO: 1919073 - DNA, 15 bp, Homo sapiens
ccacagctggagcag

SEQ ID NO: 1919074 - DNA, 15 bp, Homo sapiens
cacagctggagcagc

SEQ ID NO: 1919075 - DNA, 15 bp, Homo sapiens
acagctggagcagct

SEQ ID NO: 1919076 - DNA, 15 bp, Homo sapiens
cagctggagcagctg

SEQ ID NO: 1919077 - DNA, 15 bp, Homo sapiens
agctggagcagctgg

SEQ ID NO: 1919078 - DNA, 15 bp, Homo sapiens
gctggagcagctgga

SEQ ID NO: 1919079 - DNA, 15 bp, Homo sapiens
ctggagcagctggaa

SEQ ID NO: 1919080 - DNA, 15 bp, Homo sapiens
tggagcagctggaaa

SEQ ID NO: 1919081 - DNA, 15 bp, Homo sapiens
ggagcagctggaaaa

SEQ ID NO: 1919082 - DNA, 15 bp, Homo sapiens
gagcagctggaaaac

SEQ ID NO: 1919083 - DNA, 15 bp, Homo sapiens
agcagctggaaaaca

SEQ ID NO: 1919084 - DNA, 15 bp, Homo sapiens
gcagctggaaaacag

SEQ ID NO: 1919085 - DNA, 15 bp, Homo sapiens
cagctggaaaacagg

SEQ ID NO: 1919086 - DNA, 15 bp, Homo sapiens
agctggaaaacaggg

SEQ ID NO: 1919087 - DNA, 15 bp, Homo sapiens
gctggaaaacagggc

SEQ ID NO: 1919088 - DNA, 15 bp, Homo sapiens
ctggaaaacagggca

SEQ ID NO: 1919089 - DNA, 15 bp, Homo sapiens
tggaaaacagggcac

SEQ ID NO: 1919090 - DNA, 15 bp, Homo sapiens
ggaaaacagggcacc

SEQ ID NO: 1919091 - DNA, 15 bp, Homo sapiens
gaaaacagggcacca

SEQ ID NO: 1919092 - DNA, 15 bp, Homo sapiens
aaaacagggcaccaa

SEQ ID NO: 1919093 - DNA, 15 bp, Homo sapiens
aaacagggcaccaag

SEQ ID NO: 1919094 - DNA, 15 bp, Homo sapiens
aacagggcaccaagt

SEQ ID NO: 1919095 - DNA, 15 bp, Homo sapiens
acagggcaccaagtc

SEQ ID NO: 1919096 - DNA, 15 bp, Homo sapiens
cagggcaccaagtct

SEQ ID NO: 1919097 - DNA, 15 bp, Homo sapiens
agggcaccaagtctc

SEQ ID NO: 1919098 - DNA, 15 bp, Homo sapiens
gggcaccaagtctca

SEQ ID NO: 1919099 - DNA, 15 bp, Homo sapiens
ggcaccaagtctcaa

SEQ ID NO: 1919100 - DNA, 15 bp, Homo sapiens
gcaccaagtctcaag

SEQ ID NO: 1919101 - DNA, 15 bp, Homo sapiens
caccaagtctcaagg

SEQ ID NO: 1919102 - DNA, 15 bp, Homo sapiens
accaagtctcaaggc

SEQ ID NO: 1919103 - DNA, 15 bp, Homo sapiens
ccaagtctcaaggct

SEQ ID NO: 1919104 - DNA, 15 bp, Homo sapiens
caagtctcaaggctg

SEQ ID NO: 1919105 - DNA, 15 bp, Homo sapiens
aagtctcaaggctgc

SEQ ID NO: 1919106 - DNA, 15 bp, Homo sapiens
agtctcaaggctgca

SEQ ID NO: 1919107 - DNA, 15 bp, Homo sapiens
gtctcaaggctgcac

SEQ ID NO: 1919108 - DNA, 15 bp, Homo sapiens
tctcaaggctgcaca

SEQ ID NO: 1919109 - DNA, 15 bp, Homo sapiens
ctcaaggctgcacag

SEQ ID NO: 1919110 - DNA, 15 bp, Homo sapiens
tcaaggctgcacaga

SEQ ID NO: 1919111 - DNA, 15 bp, Homo sapiens
caaggctgcacagag

SEQ ID NO: 1919112 - DNA, 15 bp, Homo sapiens
aaggctgcacagagc

SEQ ID NO: 1919113 - DNA, 15 bp, Homo sapiens
aggctgcacagagca

SEQ ID NO: 1919114 - DNA, 15 bp, Homo sapiens
ggctgcacagagcag

SEQ ID NO: 1919115 - DNA, 15 bp, Homo sapiens
gctgcacagagcagc

SEQ ID NO: 1919116 - DNA, 15 bp, Homo sapiens
ctgcacagagcagca

SEQ ID NO: 1919117 - DNA, 15 bp, Homo sapiens
tgcacagagcagcag

SEQ ID NO: 1919118 - DNA, 15 bp, Homo sapiens
gcacagagcagcagg

SEQ ID NO: 1919119 - DNA, 15 bp, Homo sapiens
cacagagcagcaggg

SEQ ID NO: 1919120 - DNA, 15 bp, Homo sapiens
acagagcagcagggc

SEQ ID NO: 1919121 - DNA, 15 bp, Homo sapiens
cagagcagcagggcc

SEQ ID NO: 1919122 - DNA, 15 bp, Homo sapiens
agagcagcagggccc

SEQ ID NO: 1919123 - DNA, 15 bp, Homo sapiens
gagcagcagggccct

SEQ ID NO: 1919124 - DNA, 15 bp, Homo sapiens
agcagcagggcccta

SEQ ID NO: 1919125 - DNA, 15 bp, Homo sapiens
gcagcagggccctag

SEQ ID NO: 1919126 - DNA, 15 bp, Homo sapiens
cagcagggccctagg

SEQ ID NO: 1919127 - DNA, 15 bp, Homo sapiens
agcagggccctaggc

SEQ ID NO: 1919128 - DNA, 15 bp, Homo sapiens
gcagggccctaggcc

SEQ ID NO: 1919129 - DNA, 15 bp, Homo sapiens
cagggccctaggcca

SEQ ID NO: 1919130 - DNA, 15 bp, Homo sapiens
agggccctaggccat

SEQ ID NO: 1919131 - DNA, 15 bp, Homo sapiens
gggccctaggccatt

SEQ ID NO: 1919132 - DNA, 15 bp, Homo sapiens
ggccctaggccattt

SEQ ID NO: 1919133 - DNA, 15 bp, Homo sapiens
gccctaggccatttt

SEQ ID NO: 1919134 - DNA, 15 bp, Homo sapiens
ccctaggccattttt

SEQ ID NO: 1919135 - DNA, 15 bp, Homo sapiens
cctaggccatttttc

SEQ ID NO: 1919136 - DNA, 15 bp, Homo sapiens
ctaggccatttttcc

SEQ ID NO: 1919137 - DNA, 15 bp, Homo sapiens
taggccatttttccc

SEQ ID NO: 1919138 - DNA, 15 bp, Homo sapiens
aggccatttttccct

SEQ ID NO: 1919139 - DNA, 15 bp, Homo sapiens
ggccatttttccctc

SEQ ID NO: 1919140 - DNA, 15 bp, Homo sapiens
gccatttttccctcc

SEQ ID NO: 1919141 - DNA, 15 bp, Homo sapiens
ccatttttccctcca

SEQ ID NO: 1919142 - DNA, 15 bp, Homo sapiens
catttttccctccaa

SEQ ID NO: 1919143 - DNA, 15 bp, Homo sapiens
atttttccctccaat

SEQ ID NO: 1919144 - DNA, 15 bp, Homo sapiens
tttttccctccaatg

SEQ ID NO: 1919145 - DNA, 15 bp, Homo sapiens
ttttccctccaatgc

SEQ ID NO: 1919146 - DNA, 15 bp, Homo sapiens
tttccctccaatgcc

SEQ ID NO: 1919147 - DNA, 15 bp, Homo sapiens
ttccctccaatgcct

SEQ ID NO: 1919148 - DNA, 15 bp, Homo sapiens
tccctccaatgcctc

SEQ ID NO: 1919149 - DNA, 15 bp, Homo sapiens
ccctccaatgcctcc

SEQ ID NO: 1919150 - DNA, 15 bp, Homo sapiens
cctccaatgcctcca

SEQ ID NO: 1919151 - DNA, 15 bp, Homo sapiens
ctccaatgcctccag

SEQ ID NO: 1919152 - DNA, 15 bp, Homo sapiens
tccaatgcctccagg

SEQ ID NO: 1919153 - DNA, 15 bp, Homo sapiens
ccaatgcctccaggc

SEQ ID NO: 1919154 - DNA, 15 bp, Homo sapiens
caatgcctccaggcc

SEQ ID NO: 1919155 - DNA, 15 bp, Homo sapiens
aatgcctccaggcct

SEQ ID NO: 1919156 - DNA, 15 bp, Homo sapiens
atgcctccaggcctg

SEQ ID NO: 1919157 - DNA, 15 bp, Homo sapiens
tgcctccaggcctgt

SEQ ID NO: 1919158 - DNA, 15 bp, Homo sapiens
caggcctgtgatggg

SEQ ID NO: 1919159 - DNA, 15 bp, Homo sapiens
aggcctgtgatggga

SEQ ID NO: 1919160 - DNA, 15 bp, Homo sapiens
ggcctgtgatgggaa

SEQ ID NO: 1919161 - DNA, 15 bp, Homo sapiens
gcctgtgatgggaag

SEQ ID NO: 1919162 - DNA, 15 bp, Homo sapiens
cctgtgatgggaaga

SEQ ID NO: 1919163 - DNA, 15 bp, Homo sapiens
ctgtgatgggaagag

SEQ ID NO: 1919164 - DNA, 15 bp, Homo sapiens
tgtgatgggaagagc

SEQ ID NO: 1919165 - DNA, 15 bp, Homo sapiens
gtgatgggaagagct

SEQ ID NO: 1919166 - DNA, 15 bp, Homo sapiens
tgatgggaagagctg

SEQ ID NO: 1919167 - DNA, 15 bp, Homo sapiens
gatgggaagagctgc

SEQ ID NO: 1919168 - DNA, 15 bp, Homo sapiens
atgggaagagctgct

SEQ ID NO: 1919169 - DNA, 15 bp, Homo sapiens
tgggaagagctgcta

SEQ ID NO: 1919170 - DNA, 15 bp, Homo sapiens
gggaagagctgctac

SEQ ID NO: 1919171 - DNA, 15 bp, Homo sapiens
ggaagagctgctaca

SEQ ID NO: 1919172 - DNA, 15 bp, Homo sapiens
gaagagctgctacaa

SEQ ID NO: 1919173 - DNA, 15 bp, Homo sapiens
aagagctgctacaaa

SEQ ID NO: 1919174 - DNA, 15 bp, Homo sapiens
agagctgctacaaaa

SEQ ID NO: 1919175 - DNA, 15 bp, Homo sapiens
gagctgctacaaaaa

SEQ ID NO: 1919176 - DNA, 15 bp, Homo sapiens
agctgctacaaaaat

SEQ ID NO: 1919177 - DNA, 15 bp, Homo sapiens
gctgctacaaaaatc

SEQ ID NO: 1919178 - DNA, 15 bp, Homo sapiens
ctgctacaaaaatcc

SEQ ID NO: 1919179 - DNA, 15 bp, Homo sapiens
tgctacaaaaatccc

SEQ ID NO: 1919180 - DNA, 15 bp, Homo sapiens
gctacaaaaatccct

SEQ ID NO: 1919181 - DNA, 15 bp, Homo sapiens
ctacaaaaatccctg

SEQ ID NO: 1919182 - DNA, 15 bp, Homo sapiens
tacaaaaatccctga

SEQ ID NO: 1919183 - DNA, 15 bp, Homo sapiens
acaaaaatccctgac

SEQ ID NO: 1919184 - DNA, 15 bp, Homo sapiens
caaaaatccctgaca

SEQ ID NO: 1919185 - DNA, 15 bp, Homo sapiens
aaaaatccctgacat

SEQ ID NO: 1919186 - DNA, 15 bp, Homo sapiens
aaaatccctgacata

SEQ ID NO: 1919187 - DNA, 15 bp, Homo sapiens
aaatccctgacatac

SEQ ID NO: 1919188 - DNA, 15 bp, Homo sapiens
aatccctgacatacc

SEQ ID NO: 1919189 - DNA, 15 bp, Homo sapiens
atccctgacatacct

SEQ ID NO: 1919190 - DNA, 15 bp, Homo sapiens
tccctgacataccta

SEQ ID NO: 1919191 - DNA, 15 bp, Homo sapiens
ccctgacatacctag

SEQ ID NO: 1919192 - DNA, 15 bp, Homo sapiens
cctgacatacctaga

SEQ ID NO: 1919193 - DNA, 15 bp, Homo sapiens
ctgacatacctagag

SEQ ID NO: 1919194 - DNA, 15 bp, Homo sapiens
tgacatacctagaga

SEQ ID NO: 1919195 - DNA, 15 bp, Homo sapiens
gacatacctagagac

SEQ ID NO: 1919196 - DNA, 15 bp, Homo sapiens
acatacctagagaca

SEQ ID NO: 1919197 - DNA, 15 bp, Homo sapiens
catacctagagacat

SEQ ID NO: 1919198 - DNA, 15 bp, Homo sapiens
atacctagagacatt

SEQ ID NO: 1919199 - DNA, 15 bp, Homo sapiens
tacctagagacattt

SEQ ID NO: 1919200 - DNA, 15 bp, Homo sapiens
acctagagacatttt

SEQ ID NO: 1919201 - DNA, 15 bp, Homo sapiens
cctagagacattttc

SEQ ID NO: 1919202 - DNA, 15 bp, Homo sapiens
ctagagacattttcc

SEQ ID NO: 1919203 - DNA, 15 bp, Homo sapiens
tagagacattttccc

SEQ ID NO: 1919204 - DNA, 15 bp, Homo sapiens
agagacattttcccc

SEQ ID NO: 1919205 - DNA, 15 bp, Homo sapiens
attttccccattgtg

SEQ ID NO: 1919206 - DNA, 15 bp, Homo sapiens
ttttccccattgtgt

SEQ ID NO: 1919207 - DNA, 15 bp, Homo sapiens
tttccccattgtgtt

SEQ ID NO: 1919208 - DNA, 15 bp, Homo sapiens
ttccccattgtgttg

SEQ ID NO: 1919209 - DNA, 15 bp, Homo sapiens
tccccattgtgttgg

SEQ ID NO: 1919210 - DNA, 15 bp, Homo sapiens
ccccattgtgttggc

SEQ ID NO: 1919211 - DNA, 15 bp, Homo sapiens
cccattgtgttggct

SEQ ID NO: 1919212 - DNA, 15 bp, Homo sapiens
ccattgtgttggcta

SEQ ID NO: 1919213 - DNA, 15 bp, Homo sapiens
cattgtgttggctat

SEQ ID NO: 1919214 - DNA, 15 bp, Homo sapiens
attgtgttggctatt

SEQ ID NO: 1919215 - DNA, 15 bp, Homo sapiens
ttgtgttggctatta

SEQ ID NO: 1919216 - DNA, 15 bp, Homo sapiens
tgtgttggctattaa

SEQ ID NO: 1919217 - DNA, 15 bp, Homo sapiens
gtgttggctattaac

SEQ ID NO: 1919218 - DNA, 15 bp, Homo sapiens
tgttggctattaaca

SEQ ID NO: 1919219 - DNA, 15 bp, Homo sapiens
gttggctattaacat

SEQ ID NO: 1919220 - DNA, 15 bp, Homo sapiens
ttggctattaacatt

SEQ ID NO: 1919221 - DNA, 15 bp, Homo sapiens
tggctattaacattc

SEQ ID NO: 1919222 - DNA, 15 bp, Homo sapiens
ggctattaacattca

SEQ ID NO: 1919223 - DNA, 15 bp, Homo sapiens
gctattaacattcag

SEQ ID NO: 1919224 - DNA, 15 bp, Homo sapiens
ctattaacattcagc

SEQ ID NO: 1919225 - DNA, 15 bp, Homo sapiens
tattaacattcagct

SEQ ID NO: 1919226 - DNA, 15 bp, Homo sapiens
attaacattcagctc

SEQ ID NO: 1919227 - DNA, 15 bp, Homo sapiens
ttaacattcagctcc

SEQ ID NO: 1919228 - DNA, 15 bp, Homo sapiens
taacattcagctcct

SEQ ID NO: 1919229 - DNA, 15 bp, Homo sapiens
aacattcagctcctc

SEQ ID NO: 1919230 - DNA, 15 bp, Homo sapiens
acattcagctcctcc

SEQ ID NO: 1919231 - DNA, 15 bp, Homo sapiens
cattcagctcctcct

SEQ ID NO: 1919232 - DNA, 15 bp, Homo sapiens
attcagctcctcctt

SEQ ID NO: 1919233 - DNA, 15 bp, Homo sapiens
ttcagctcctcctta

SEQ ID NO: 1919234 - DNA, 15 bp, Homo sapiens
tcagctcctccttac

SEQ ID NO: 1919235 - DNA, 15 bp, Homo sapiens
cagctcctccttact

SEQ ID NO: 1919236 - DNA, 15 bp, Homo sapiens
agctcctccttactt

SEQ ID NO: 1919237 - DNA, 15 bp, Homo sapiens
gctcctccttactta

SEQ ID NO: 1919238 - DNA, 15 bp, Homo sapiens
ctcctccttacttat

SEQ ID NO: 1919239 - DNA, 15 bp, Homo sapiens
tcctccttacttatg

SEQ ID NO: 1919240 - DNA, 15 bp, Homo sapiens
cctccttacttatgc

SEQ ID NO: 1919241 - DNA, 15 bp, Homo sapiens
ctccttacttatgcc

SEQ ID NO: 1919242 - DNA, 15 bp, Homo sapiens
tccttacttatgcca

SEQ ID NO: 1919243 - DNA, 15 bp, Homo sapiens
ccttacttatgccaa

SEQ ID NO: 1919244 - DNA, 15 bp, Homo sapiens
cttacttatgccaat

SEQ ID NO: 1919245 - DNA, 15 bp, Homo sapiens
ttacttatgccaatt

SEQ ID NO: 1919246 - DNA, 15 bp, Homo sapiens
tacttatgccaattt

SEQ ID NO: 1919247 - DNA, 15 bp, Homo sapiens
acttatgccaatttc

SEQ ID NO: 1919248 - DNA, 15 bp, Homo sapiens
cttatgccaatttct

SEQ ID NO: 1919249 - DNA, 15 bp, Homo sapiens
ttatgccaatttctg

SEQ ID NO: 1919250 - DNA, 15 bp, Homo sapiens
tatgccaatttctgc

SEQ ID NO: 1919251 - DNA, 15 bp, Homo sapiens
atgccaatttctgca

SEQ ID NO: 1919252 - DNA, 15 bp, Homo sapiens
tgccaatttctgcag

SEQ ID NO: 1919253 - DNA, 15 bp, Homo sapiens
gccaatttctgcagg

SEQ ID NO: 1919254 - DNA, 15 bp, Homo sapiens
ccaatttctgcagga

SEQ ID NO: 1919255 - DNA, 15 bp, Homo sapiens
caatttctgcaggaa

SEQ ID NO: 1919256 - DNA, 15 bp, Homo sapiens
aatttctgcaggaag

SEQ ID NO: 1919257 - DNA, 15 bp, Homo sapiens
atttctgcaggaagc

SEQ ID NO: 1919258 - DNA, 15 bp, Homo sapiens
tttctgcaggaagct

SEQ ID NO: 1919259 - DNA, 15 bp, Homo sapiens
ttctgcaggaagctt

SEQ ID NO: 1919260 - DNA, 15 bp, Homo sapiens
tctgcaggaagcttg

SEQ ID NO: 1919261 - DNA, 15 bp, Homo sapiens
ctgcaggaagcttga

SEQ ID NO: 1919262 - DNA, 15 bp, Homo sapiens
tgcaggaagcttgaa

SEQ ID NO: 1919263 - DNA, 15 bp, Homo sapiens
gcaggaagcttgaat

SEQ ID NO: 1919264 - DNA, 15 bp, Homo sapiens
caggaagcttgaatt

SEQ ID NO: 1919265 - DNA, 15 bp, Homo sapiens
aggaagcttgaattt

SEQ ID NO: 1919266 - DNA, 15 bp, Homo sapiens
ggaagcttgaatttc

SEQ ID NO: 1919267 - DNA, 15 bp, Homo sapiens
gaagcttgaatttct

SEQ ID NO: 1919268 - DNA, 15 bp, Homo sapiens
aagcttgaatttctc

SEQ ID NO: 1919269 - DNA, 15 bp, Homo sapiens
agcttgaatttctcc

SEQ ID NO: 1919270 - DNA, 15 bp, Homo sapiens
gcttgaatttctccc

SEQ ID NO: 1919271 - DNA, 15 bp, Homo sapiens
cttgaatttctcccc

SEQ ID NO: 1919272 - DNA, 15 bp, Homo sapiens
ttgaatttctcccca

SEQ ID NO: 1919273 - DNA, 15 bp, Homo sapiens
tgaatttctccccag

SEQ ID NO: 1919274 - DNA, 15 bp, Homo sapiens
gaatttctccccaga

SEQ ID NO: 1919275 - DNA, 15 bp, Homo sapiens
aatttctccccagaa

SEQ ID NO: 1919276 - DNA, 15 bp, Homo sapiens
atttctccccagaaa

SEQ ID NO: 1919277 - DNA, 15 bp, Homo sapiens
tttctccccagaaaa

SEQ ID NO: 1919278 - DNA, 15 bp, Homo sapiens
ttctccccagaaaat

SEQ ID NO: 1919279 - DNA, 15 bp, Homo sapiens
tctccccagaaaatg

SEQ ID NO: 1919280 - DNA, 15 bp, Homo sapiens
ctccccagaaaatgg

SEQ ID NO: 1919281 - DNA, 15 bp, Homo sapiens
tccccagaaaatggg

SEQ ID NO: 1919282 - DNA, 15 bp, Homo sapiens
ccccagaaaatgggt

SEQ ID NO: 1919283 - DNA, 15 bp, Homo sapiens
cccagaaaatgggtt

SEQ ID NO: 1919284 - DNA, 15 bp, Homo sapiens
ccagaaaatgggttt

SEQ ID NO: 1919285 - DNA, 15 bp, Homo sapiens
cagaaaatgggtttt

SEQ ID NO: 1919286 - DNA, 15 bp, Homo sapiens
agaaaatgggttttt

SEQ ID NO: 1919287 - DNA, 15 bp, Homo sapiens
gaaaatgggtttttc

SEQ ID NO: 1919288 - DNA, 15 bp, Homo sapiens
aaaatgggtttttct

SEQ ID NO: 1919289 - DNA, 15 bp, Homo sapiens
aaatgggtttttctt

SEQ ID NO: 1919290 - DNA, 15 bp, Homo sapiens
aatgggtttttcttt

SEQ ID NO: 1919291 - DNA, 15 bp, Homo sapiens
atgggtttttctttt

SEQ ID NO: 1919292 - DNA, 15 bp, Homo sapiens
tgggtttttcttttc

SEQ ID NO: 1919293 - DNA, 15 bp, Homo sapiens
gggtttttcttttct

SEQ ID NO: 1919294 - DNA, 15 bp, Homo sapiens
ggtttttcttttcta

SEQ ID NO: 1919295 - DNA, 15 bp, Homo sapiens
gtttttcttttctac

SEQ ID NO: 1919296 - DNA, 15 bp, Homo sapiens
tttttcttttctacc

SEQ ID NO: 1919297 - DNA, 15 bp, Homo sapiens
ttttcttttctacca

SEQ ID NO: 1919298 - DNA, 15 bp, Homo sapiens
tttcttttctaccaa

SEQ ID NO: 1919299 - DNA, 15 bp, Homo sapiens
ttcttttctaccaac

SEQ ID NO: 1919300 - DNA, 15 bp, Homo sapiens
tcttttctaccaaca

SEQ ID NO: 1919301 - DNA, 15 bp, Homo sapiens
cttttctaccaacat

SEQ ID NO: 1919302 - DNA, 15 bp, Homo sapiens
ttttctaccaacatg

SEQ ID NO: 1919303 - DNA, 15 bp, Homo sapiens
tttctaccaacatgg

SEQ ID NO: 1919304 - DNA, 15 bp, Homo sapiens
ttctaccaacatggt

SEQ ID NO: 1919305 - DNA, 15 bp, Homo sapiens
tctaccaacatggtc

SEQ ID NO: 1919306 - DNA, 15 bp, Homo sapiens
ctaccaacatggtca

SEQ ID NO: 1919307 - DNA, 15 bp, Homo sapiens
taccaacatggtcag

SEQ ID NO: 1919308 - DNA, 15 bp, Homo sapiens
accaacatggtcagg

SEQ ID NO: 1919309 - DNA, 15 bp, Homo sapiens
ccaacatggtcaggc

SEQ ID NO: 1919310 - DNA, 15 bp, Homo sapiens
caacatggtcaggct

SEQ ID NO: 1919311 - DNA, 15 bp, Homo sapiens
aacatggtcaggctg

SEQ ID NO: 1919312 - DNA, 15 bp, Homo sapiens
acatggtcaggctgc

SEQ ID NO: 1919313 - DNA, 15 bp, Homo sapiens
catggtcaggctgca

SEQ ID NO: 1919314 - DNA, 15 bp, Homo sapiens
atggtcaggctgcac

SEQ ID NO: 1919315 - DNA, 15 bp, Homo sapiens
tggtcaggctgcaca

SEQ ID NO: 1919316 - DNA, 15 bp, Homo sapiens
ggtcaggctgcacat

SEQ ID NO: 1919317 - DNA, 15 bp, Homo sapiens
gtcaggctgcacatt

SEQ ID NO: 1919318 - DNA, 15 bp, Homo sapiens
tcaggctgcacattt

SEQ ID NO: 1919319 - DNA, 15 bp, Homo sapiens
caggctgcacatttt

SEQ ID NO: 1919320 - DNA, 15 bp, Homo sapiens
aggctgcacattttc

SEQ ID NO: 1919321 - DNA, 15 bp, Homo sapiens
ggctgcacattttcc

SEQ ID NO: 1919322 - DNA, 15 bp, Homo sapiens
gctgcacattttcca

SEQ ID NO: 1919323 - DNA, 15 bp, Homo sapiens
ctgcacattttccaa

SEQ ID NO: 1919324 - DNA, 15 bp, Homo sapiens
tgcacattttccaaa

SEQ ID NO: 1919325 - DNA, 15 bp, Homo sapiens
gcacattttccaaat

SEQ ID NO: 1919326 - DNA, 15 bp, Homo sapiens
cacattttccaaatt

SEQ ID NO: 1919327 - DNA, 15 bp, Homo sapiens
acattttccaaattt

SEQ ID NO: 1919328 - DNA, 15 bp, Homo sapiens
cattttccaaatttt

SEQ ID NO: 1919329 - DNA, 15 bp, Homo sapiens
attttccaaattttt

SEQ ID NO: 1919330 - DNA, 15 bp, Homo sapiens
ttttccaaattttta

SEQ ID NO: 1919331 - DNA, 15 bp, Homo sapiens
tttccaaatttttat

SEQ ID NO: 1919332 - DNA, 15 bp, Homo sapiens
ttccaaatttttatg

SEQ ID NO: 1919333 - DNA, 15 bp, Homo sapiens
tccaaatttttatgc

SEQ ID NO: 1919334 - DNA, 15 bp, Homo sapiens
ccaaatttttatgct

SEQ ID NO: 1919335 - DNA, 15 bp, Homo sapiens
caaatttttatgctt

SEQ ID NO: 1919336 - DNA, 15 bp, Homo sapiens
aaatttttatgcttt

SEQ ID NO: 1919337 - DNA, 15 bp, Homo sapiens
aatttttatgctttt

SEQ ID NO: 1919338 - DNA, 15 bp, Homo sapiens
atttttatgctttta

SEQ ID NO: 1919339 - DNA, 15 bp, Homo sapiens
tttttatgcttttaa

SEQ ID NO: 1919340 - DNA, 15 bp, Homo sapiens
ttttatgcttttaaa

SEQ ID NO: 1919341 - DNA, 15 bp, Homo sapiens
tttatgcttttaaac

SEQ ID NO: 1919342 - DNA, 15 bp, Homo sapiens
ttatgcttttaaaca

SEQ ID NO: 1919343 - DNA, 15 bp, Homo sapiens
tatgcttttaaacat

SEQ ID NO: 1919344 - DNA, 15 bp, Homo sapiens
atgcttttaaacata

SEQ ID NO: 1919345 - DNA, 15 bp, Homo sapiens
tgcttttaaacataa

SEQ ID NO: 1919346 - DNA, 15 bp, Homo sapiens
gcttttaaacataag

SEQ ID NO: 1919347 - DNA, 15 bp, Homo sapiens
cttttaaacataagc

SEQ ID NO: 1919348 - DNA, 15 bp, Homo sapiens
ttttaaacataagct

SEQ ID NO: 1919349 - DNA, 15 bp, Homo sapiens
tttaaacataagctc

SEQ ID NO: 1919350 - DNA, 15 bp, Homo sapiens
ttaaacataagctcc

SEQ ID NO: 1919351 - DNA, 15 bp, Homo sapiens
taaacataagctcca

SEQ ID NO: 1919352 - DNA, 15 bp, Homo sapiens
aaacataagctccaa

SEQ ID NO: 1919353 - DNA, 15 bp, Homo sapiens
aacataagctccaat

SEQ ID NO: 1919354 - DNA, 15 bp, Homo sapiens
acataagctccaatt

SEQ ID NO: 1919355 - DNA, 15 bp, Homo sapiens
cataagctccaattt

SEQ ID NO: 1919356 - DNA, 15 bp, Homo sapiens
ataagctccaatttc

SEQ ID NO: 1919357 - DNA, 15 bp, Homo sapiens
taagctccaatttca

SEQ ID NO: 1919358 - DNA, 15 bp, Homo sapiens
aagctccaatttcaa

SEQ ID NO: 1919359 - DNA, 15 bp, Homo sapiens
agctccaatttcaaa

SEQ ID NO: 1919360 - DNA, 15 bp, Homo sapiens
gctccaatttcaaat

SEQ ID NO: 1919361 - DNA, 15 bp, Homo sapiens
ctccaatttcaaatc

SEQ ID NO: 1919362 - DNA, 15 bp, Homo sapiens
tccaatttcaaatca

SEQ ID NO: 1919363 - DNA, 15 bp, Homo sapiens
ccaatttcaaatcat

SEQ ID NO: 1919364 - DNA, 15 bp, Homo sapiens
caatttcaaatcatc

SEQ ID NO: 1919365 - DNA, 15 bp, Homo sapiens
aatttcaaatcatct

SEQ ID NO: 1919366 - DNA, 15 bp, Homo sapiens
atttcaaatcatctc

SEQ ID NO: 1919367 - DNA, 15 bp, Homo sapiens
tttcaaatcatctct

SEQ ID NO: 1919368 - DNA, 15 bp, Homo sapiens
ttcaaatcatctctt

SEQ ID NO: 1919369 - DNA, 15 bp, Homo sapiens
tcaaatcatctcttt

SEQ ID NO: 1919370 - DNA, 15 bp, Homo sapiens
caaatcatctctttg

SEQ ID NO: 1919371 - DNA, 15 bp, Homo sapiens
atcatctctttgtga

SEQ ID NO: 1919372 - DNA, 15 bp, Homo sapiens
tcatctctttgtgaa

SEQ ID NO: 1919373 - DNA, 15 bp, Homo sapiens
catctctttgtgaat

SEQ ID NO: 1919374 - DNA, 15 bp, Homo sapiens
atctctttgtgaatg

SEQ ID NO: 1919375 - DNA, 15 bp, Homo sapiens
tctctttgtgaatgc

SEQ ID NO: 1919376 - DNA, 15 bp, Homo sapiens
ctctttgtgaatgca

SEQ ID NO: 1919377 - DNA, 15 bp, Homo sapiens
tctttgtgaatgcat

SEQ ID NO: 1919378 - DNA, 15 bp, Homo sapiens
ctttgtgaatgcatg

SEQ ID NO: 1919379 - DNA, 15 bp, Homo sapiens
tttgtgaatgcatgt

SEQ ID NO: 1919380 - DNA, 15 bp, Homo sapiens
ttgtgaatgcatgta

SEQ ID NO: 1919381 - DNA, 15 bp, Homo sapiens
tgtgaatgcatgtaa

SEQ ID NO: 1919382 - DNA, 15 bp, Homo sapiens
gtgaatgcatgtaac

SEQ ID NO: 1919383 - DNA, 15 bp, Homo sapiens
tgaatgcatgtaact

SEQ ID NO: 1919384 - DNA, 15 bp, Homo sapiens
gaatgcatgtaactg

SEQ ID NO: 1919385 - DNA, 15 bp, Homo sapiens
aatgcatgtaactgc

SEQ ID NO: 1919386 - DNA, 15 bp, Homo sapiens
atgcatgtaactgca

SEQ ID NO: 1919387 - DNA, 15 bp, Homo sapiens
tgcatgtaactgcac

SEQ ID NO: 1919388 - DNA, 15 bp, Homo sapiens
gcatgtaactgcaca

SEQ ID NO: 1919389 - DNA, 15 bp, Homo sapiens
catgtaactgcacat

SEQ ID NO: 1919390 - DNA, 15 bp, Homo sapiens
atgtaactgcacatt

SEQ ID NO: 1919391 - DNA, 15 bp, Homo sapiens
tgtaactgcacattt

SEQ ID NO: 1919392 - DNA, 15 bp, Homo sapiens
gtaactgcacatttc

SEQ ID NO: 1919393 - DNA, 15 bp, Homo sapiens
taactgcacatttca

SEQ ID NO: 1919394 - DNA, 15 bp, Homo sapiens
aactgcacatttcaa

SEQ ID NO: 1919395 - DNA, 15 bp, Homo sapiens
actgcacatttcaag

SEQ ID NO: 1919396 - DNA, 15 bp, Homo sapiens
ctgcacatttcaaga

SEQ ID NO: 1919397 - DNA, 15 bp, Homo sapiens
tgcacatttcaagaa

SEQ ID NO: 1919398 - DNA, 15 bp, Homo sapiens
gcacatttcaagaaa

SEQ ID NO: 1919399 - DNA, 15 bp, Homo sapiens
cacatttcaagaaaa

SEQ ID NO: 1919400 - DNA, 15 bp, Homo sapiens
acatttcaagaaaag

SEQ ID NO: 1919401 - DNA, 15 bp, Homo sapiens
catttcaagaaaagc

SEQ ID NO: 1919402 - DNA, 15 bp, Homo sapiens
atttcaagaaaagcc

SEQ ID NO: 1919403 - DNA, 15 bp, Homo sapiens
tttcaagaaaagcca

SEQ ID NO: 1919404 - DNA, 15 bp, Homo sapiens
ttcaagaaaagccag

SEQ ID NO: 1919405 - DNA, 15 bp, Homo sapiens
tcaagaaaagccagg

SEQ ID NO: 1919406 - DNA, 15 bp, Homo sapiens
caagaaaagccaggt

SEQ ID NO: 1919407 - DNA, 15 bp, Homo sapiens
aagaaaagccaggtc

SEQ ID NO: 1919408 - DNA, 15 bp, Homo sapiens
agaaaagccaggtca

SEQ ID NO: 1919409 - DNA, 15 bp, Homo sapiens
gaaaagccaggtcac

SEQ ID NO: 1919410 - DNA, 15 bp, Homo sapiens
aaaagccaggtcacc

SEQ ID NO: 1919411 - DNA, 15 bp, Homo sapiens
aaagccaggtcacct

SEQ ID NO: 1919412 - DNA, 15 bp, Homo sapiens
aagccaggtcacctc

SEQ ID NO: 1919413 - DNA, 15 bp, Homo sapiens
agccaggtcacctct

SEQ ID NO: 1919414 - DNA, 15 bp, Homo sapiens
gccaggtcacctctt

SEQ ID NO: 1919415 - DNA, 15 bp, Homo sapiens
ccaggtcacctcttg

SEQ ID NO: 1919416 - DNA, 15 bp, Homo sapiens
caggtcacctcttga

SEQ ID NO: 1919417 - DNA, 15 bp, Homo sapiens
aggtcacctcttgaa

SEQ ID NO: 1919418 - DNA, 15 bp, Homo sapiens
ggtcacctcttgaat

SEQ ID NO: 1919419 - DNA, 15 bp, Homo sapiens
ttgctggttagaaat

SEQ ID NO: 1919420 - DNA, 15 bp, Homo sapiens
tgctggttagaaatt

SEQ ID NO: 1919421 - DNA, 15 bp, Homo sapiens
gctggttagaaattt

SEQ ID NO: 1919422 - DNA, 15 bp, Homo sapiens
ctggttagaaatttc

SEQ ID NO: 1919423 - DNA, 15 bp, Homo sapiens
tggttagaaatttct

SEQ ID NO: 1919424 - DNA, 15 bp, Homo sapiens
ggttagaaatttctt

SEQ ID NO: 1919425 - DNA, 15 bp, Homo sapiens
gttagaaatttcttc

SEQ ID NO: 1919426 - DNA, 15 bp, Homo sapiens
agaaatttcttctgt

SEQ ID NO: 1919427 - DNA, 15 bp, Homo sapiens
gaaatttcttctgtc

SEQ ID NO: 1919428 - DNA, 15 bp, Homo sapiens
aaatttcttctgtca

SEQ ID NO: 1919429 - DNA, 15 bp, Homo sapiens
aatttcttctgtcag

SEQ ID NO: 1919430 - DNA, 15 bp, Homo sapiens
atttcttctgtcaga

SEQ ID NO: 1919431 - DNA, 15 bp, Homo sapiens
tttcttctgtcagat

SEQ ID NO: 1919432 - DNA, 15 bp, Homo sapiens
ttcttctgtcagata

SEQ ID NO: 1919433 - DNA, 15 bp, Homo sapiens
tcttctgtcagatat

SEQ ID NO: 1919434 - DNA, 15 bp, Homo sapiens
cttctgtcagatatc

SEQ ID NO: 1919435 - DNA, 15 bp, Homo sapiens
ttctgtcagatatcc

SEQ ID NO: 1919436 - DNA, 15 bp, Homo sapiens
tctgtcagatatcct

SEQ ID NO: 1919437 - DNA, 15 bp, Homo sapiens
ctgtcagatatccta

SEQ ID NO: 1919438 - DNA, 15 bp, Homo sapiens
tgtcagatatcctaa

SEQ ID NO: 1919439 - DNA, 15 bp, Homo sapiens
gtcagatatcctaat

SEQ ID NO: 1919440 - DNA, 15 bp, Homo sapiens
tcagatatcctaatt

SEQ ID NO: 1919441 - DNA, 15 bp, Homo sapiens
cagatatcctaattc

SEQ ID NO: 1919442 - DNA, 15 bp, Homo sapiens
agatatcctaattca

SEQ ID NO: 1919443 - DNA, 15 bp, Homo sapiens
gatatcctaattcat

SEQ ID NO: 1919444 - DNA, 15 bp, Homo sapiens
atatcctaattcatt

SEQ ID NO: 1919445 - DNA, 15 bp, Homo sapiens
tatcctaattcattt

SEQ ID NO: 1919446 - DNA, 15 bp, Homo sapiens
atcctaattcatttc

SEQ ID NO: 1919447 - DNA, 15 bp, Homo sapiens
tcctaattcatttct

SEQ ID NO: 1919448 - DNA, 15 bp, Homo sapiens
aattcatttctctca

SEQ ID NO: 1919449 - DNA, 15 bp, Homo sapiens
attcatttctctcaa

SEQ ID NO: 1919450 - DNA, 15 bp, Homo sapiens
ttcatttctctcaag

SEQ ID NO: 1919451 - DNA, 15 bp, Homo sapiens
tcatttctctcaagt

SEQ ID NO: 1919452 - DNA, 15 bp, Homo sapiens
catttctctcaagtt

SEQ ID NO: 1919453 - DNA, 15 bp, Homo sapiens
atttctctcaagttc

SEQ ID NO: 1919454 - DNA, 15 bp, Homo sapiens
tttctctcaagttca

SEQ ID NO: 1919455 - DNA, 15 bp, Homo sapiens
ttctctcaagttcaa

SEQ ID NO: 1919456 - DNA, 15 bp, Homo sapiens
ttcaaagttccacat

SEQ ID NO: 1919457 - DNA, 15 bp, Homo sapiens
tcaaagttccacata

SEQ ID NO: 1919458 - DNA, 15 bp, Homo sapiens
caaagttccacatat

SEQ ID NO: 1919459 - DNA, 15 bp, Homo sapiens
aaagttccacatatt

SEQ ID NO: 1919460 - DNA, 15 bp, Homo sapiens
aagttccacatattt

SEQ ID NO: 1919461 - DNA, 15 bp, Homo sapiens
agttccacatatttc

SEQ ID NO: 1919462 - DNA, 15 bp, Homo sapiens
gttccacatatttct

SEQ ID NO: 1919463 - DNA, 15 bp, Homo sapiens
ttccacatatttcta

SEQ ID NO: 1919464 - DNA, 15 bp, Homo sapiens
tccacatatttctat

SEQ ID NO: 1919465 - DNA, 15 bp, Homo sapiens
ccacatatttctatg

SEQ ID NO: 1919466 - DNA, 15 bp, Homo sapiens
cacatatttctatgg

SEQ ID NO: 1919467 - DNA, 15 bp, Homo sapiens
acatatttctatggc

SEQ ID NO: 1919468 - DNA, 15 bp, Homo sapiens
catatttctatggca

SEQ ID NO: 1919469 - DNA, 15 bp, Homo sapiens
atatttctatggcag

SEQ ID NO: 1919470 - DNA, 15 bp, Homo sapiens
tatttctatggcagg

SEQ ID NO: 1919471 - DNA, 15 bp, Homo sapiens
atttctatggcaggg

SEQ ID NO: 1919472 - DNA, 15 bp, Homo sapiens
tttctatggcaggga

SEQ ID NO: 1919473 - DNA, 15 bp, Homo sapiens
ttctatggcagggac

SEQ ID NO: 1919474 - DNA, 15 bp, Homo sapiens
tctatggcagggaca

SEQ ID NO: 1919475 - DNA, 15 bp, Homo sapiens
ctatggcagggacaa

SEQ ID NO: 1919476 - DNA, 15 bp, Homo sapiens
tatggcagggacaaa

SEQ ID NO: 1919477 - DNA, 15 bp, Homo sapiens
atggcagggacaaaa

SEQ ID NO: 1919478 - DNA, 15 bp, Homo sapiens
tggcagggacaaaat

SEQ ID NO: 1919479 - DNA, 15 bp, Homo sapiens
ggcagggacaaaatg

SEQ ID NO: 1919480 - DNA, 15 bp, Homo sapiens
gcagggacaaaatgc

SEQ ID NO: 1919481 - DNA, 15 bp, Homo sapiens
cagggacaaaatgct

SEQ ID NO: 1919482 - DNA, 15 bp, Homo sapiens
agggacaaaatgctg

SEQ ID NO: 1919483 - DNA, 15 bp, Homo sapiens
gggacaaaatgctgc

SEQ ID NO: 1919484 - DNA, 15 bp, Homo sapiens
ggacaaaatgctgct

SEQ ID NO: 1919485 - DNA, 15 bp, Homo sapiens
gacaaaatgctgcta

SEQ ID NO: 1919486 - DNA, 15 bp, Homo sapiens
acaaaatgctgctaa

SEQ ID NO: 1919487 - DNA, 15 bp, Homo sapiens
caaaatgctgctaat

SEQ ID NO: 1919488 - DNA, 15 bp, Homo sapiens
aaaatgctgctaatc

SEQ ID NO: 1919489 - DNA, 15 bp, Homo sapiens
aaatgctgctaatct

SEQ ID NO: 1919490 - DNA, 15 bp, Homo sapiens
aatgctgctaatctc

SEQ ID NO: 1919491 - DNA, 15 bp, Homo sapiens
atgctgctaatctct

SEQ ID NO: 1919492 - DNA, 15 bp, Homo sapiens
tgctgctaatctctt

SEQ ID NO: 1919493 - DNA, 15 bp, Homo sapiens
gctgctaatctcttt

SEQ ID NO: 1919494 - DNA, 15 bp, Homo sapiens
ctgctaatctctttg

SEQ ID NO: 1919495 - DNA, 15 bp, Homo sapiens
tgctaatctctttgc

SEQ ID NO: 1919496 - DNA, 15 bp, Homo sapiens
gctaatctctttgct

SEQ ID NO: 1919497 - DNA, 15 bp, Homo sapiens
ctaatctctttgcta

SEQ ID NO: 1919498 - DNA, 15 bp, Homo sapiens
taatctctttgctaa

SEQ ID NO: 1919499 - DNA, 15 bp, Homo sapiens
aatctctttgctaaa

SEQ ID NO: 1919500 - DNA, 15 bp, Homo sapiens
atctctttgctaaag

SEQ ID NO: 1919501 - DNA, 15 bp, Homo sapiens
tttgctaaagcatgg

SEQ ID NO: 1919502 - DNA, 15 bp, Homo sapiens
ttgctaaagcatggt

SEQ ID NO: 1919503 - DNA, 15 bp, Homo sapiens
tgctaaagcatggta

SEQ ID NO: 1919504 - DNA, 15 bp, Homo sapiens
gctaaagcatggtaa

SEQ ID NO: 1919505 - DNA, 15 bp, Homo sapiens
ctaaagcatggtaag

SEQ ID NO: 1919506 - DNA, 15 bp, Homo sapiens
taaagcatggtaagt

SEQ ID NO: 1919507 - DNA, 15 bp, Homo sapiens
aaagcatggtaagtg

SEQ ID NO: 1919508 - DNA, 15 bp, Homo sapiens
aagcatggtaagtgc

SEQ ID NO: 1919509 - DNA, 15 bp, Homo sapiens
agcatggtaagtgca

SEQ ID NO: 1919510 - DNA, 15 bp, Homo sapiens
gcatggtaagtgcaa

SEQ ID NO: 1919511 - DNA, 15 bp, Homo sapiens
catggtaagtgcaac

SEQ ID NO: 1919512 - DNA, 15 bp, Homo sapiens
atggtaagtgcaacc

SEQ ID NO: 1919513 - DNA, 15 bp, Homo sapiens
tggtaagtgcaacct

SEQ ID NO: 1919514 - DNA, 15 bp, Homo sapiens
ggtaagtgcaacctt

SEQ ID NO: 1919515 - DNA, 15 bp, Homo sapiens
gtaagtgcaaccttt

SEQ ID NO: 1919516 - DNA, 15 bp, Homo sapiens
taagtgcaacctttg

SEQ ID NO: 1919517 - DNA, 15 bp, Homo sapiens
aagtgcaacctttgc

SEQ ID NO: 1919518 - DNA, 15 bp, Homo sapiens
agtgcaacctttgct

SEQ ID NO: 1919519 - DNA, 15 bp, Homo sapiens
gtgcaacctttgctc

SEQ ID NO: 1919520 - DNA, 15 bp, Homo sapiens
tgcaacctttgctcc

SEQ ID NO: 1919521 - DNA, 15 bp, Homo sapiens
gcaacctttgctcca

SEQ ID NO: 1919522 - DNA, 15 bp, Homo sapiens
caacctttgctccag

SEQ ID NO: 1919523 - DNA, 15 bp, Homo sapiens
aacctttgctccagt

SEQ ID NO: 1919524 - DNA, 15 bp, Homo sapiens
tgctccagttcccag

SEQ ID NO: 1919525 - DNA, 15 bp, Homo sapiens
gctccagttcccagt

SEQ ID NO: 1919526 - DNA, 15 bp, Homo sapiens
ctccagttcccagta

SEQ ID NO: 1919527 - DNA, 15 bp, Homo sapiens
tccagttcccagtaa

SEQ ID NO: 1919528 - DNA, 15 bp, Homo sapiens
ccagttcccagtaag

SEQ ID NO: 1919529 - DNA, 15 bp, Homo sapiens
cagttcccagtaagt

SEQ ID NO: 1919530 - DNA, 15 bp, Homo sapiens
agttcccagtaagtt

SEQ ID NO: 1919531 - DNA, 15 bp, Homo sapiens
gttcccagtaagtta

SEQ ID NO: 1919532 - DNA, 15 bp, Homo sapiens
ttcccagtaagttac

SEQ ID NO: 1919533 - DNA, 15 bp, Homo sapiens
tcccagtaagttact

SEQ ID NO: 1919534 - DNA, 15 bp, Homo sapiens
cccagtaagttactc

SEQ ID NO: 1919535 - DNA, 15 bp, Homo sapiens
ccagtaagttactca

SEQ ID NO: 1919536 - DNA, 15 bp, Homo sapiens
cagtaagttactcat

SEQ ID NO: 1919537 - DNA, 15 bp, Homo sapiens
agtaagttactcatc

SEQ ID NO: 1919538 - DNA, 15 bp, Homo sapiens
gtaagttactcatct

SEQ ID NO: 1919539 - DNA, 15 bp, Homo sapiens
taagttactcatctc

SEQ ID NO: 1919540 - DNA, 15 bp, Homo sapiens
aagttactcatctcc

SEQ ID NO: 1919541 - DNA, 15 bp, Homo sapiens
agttactcatctcca

SEQ ID NO: 1919542 - DNA, 15 bp, Homo sapiens
gttactcatctccat

SEQ ID NO: 1919543 - DNA, 15 bp, Homo sapiens
ttactcatctccatc

SEQ ID NO: 1919544 - DNA, 15 bp, Homo sapiens
tactcatctccatct

SEQ ID NO: 1919545 - DNA, 15 bp, Homo sapiens
actcatctccatctg

SEQ ID NO: 1919546 - DNA, 15 bp, Homo sapiens
tcatctccatctgaa

SEQ ID NO: 1919547 - DNA, 15 bp, Homo sapiens
catctccatctgaaa

SEQ ID NO: 1919548 - DNA, 15 bp, Homo sapiens
atctccatctgaaac

SEQ ID NO: 1919549 - DNA, 15 bp, Homo sapiens
tctccatctgaaact

SEQ ID NO: 1919550 - DNA, 15 bp, Homo sapiens
ctccatctgaaacta

SEQ ID NO: 1919551 - DNA, 15 bp, Homo sapiens
tccatctgaaactac

SEQ ID NO: 1919552 - DNA, 15 bp, Homo sapiens
ccatctgaaactacc

SEQ ID NO: 1919553 - DNA, 15 bp, Homo sapiens
catctgaaactacct

SEQ ID NO: 1919554 - DNA, 15 bp, Homo sapiens
atctgaaactacctc

SEQ ID NO: 1919555 - DNA, 15 bp, Homo sapiens
tctgaaactacctca

SEQ ID NO: 1919556 - DNA, 15 bp, Homo sapiens
ctgaaactacctcat

SEQ ID NO: 1919557 - DNA, 15 bp, Homo sapiens
tgaaactacctcatt

SEQ ID NO: 1919558 - DNA, 15 bp, Homo sapiens
gaaactacctcattc

SEQ ID NO: 1919559 - DNA, 15 bp, Homo sapiens
aaactacctcattcc

SEQ ID NO: 1919560 - DNA, 15 bp, Homo sapiens
aactacctcattcca

SEQ ID NO: 1919561 - DNA, 15 bp, Homo sapiens
actacctcattccag

SEQ ID NO: 1919562 - DNA, 15 bp, Homo sapiens
ttcaggagaataaat

SEQ ID NO: 1919563 - DNA, 15 bp, Homo sapiens
tcaggagaataaata

SEQ ID NO: 1919564 - DNA, 15 bp, Homo sapiens
caggagaataaataa

SEQ ID NO: 1919565 - DNA, 15 bp, Homo sapiens
aggagaataaataac

SEQ ID NO: 1919566 - DNA, 15 bp, Homo sapiens
ggagaataaataact

SEQ ID NO: 1919567 - DNA, 15 bp, Homo sapiens
gagaataaataactg

SEQ ID NO: 1919568 - DNA, 15 bp, Homo sapiens
agaataaataactgt

SEQ ID NO: 1919569 - DNA, 15 bp, Homo sapiens
gaataaataactgtt

SEQ ID NO: 1919570 - DNA, 15 bp, Homo sapiens
aataaataactgttt

SEQ ID NO: 1919571 - DNA, 15 bp, Homo sapiens
ataaataactgtttt

SEQ ID NO: 1919572 - DNA, 15 bp, Homo sapiens
taaataactgttttg

SEQ ID NO: 1919573 - DNA, 15 bp, Homo sapiens
aaataactgttttgt

SEQ ID NO: 1919574 - DNA, 15 bp, Homo sapiens
aataactgttttgtg

SEQ ID NO: 1919575 - DNA, 15 bp, Homo sapiens
ataactgttttgtgt

SEQ ID NO: 1919576 - DNA, 15 bp, Homo sapiens
taactgttttgtgtt

SEQ ID NO: 1919577 - DNA, 15 bp, Homo sapiens
aactgttttgtgttg

SEQ ID NO: 1919578 - DNA, 15 bp, Homo sapiens
actgttttgtgttgg

SEQ ID NO: 1919579 - DNA, 15 bp, Homo sapiens
ctgttttgtgttggt

SEQ ID NO: 1919580 - DNA, 15 bp, Homo sapiens
tgttttgtgttggtt

SEQ ID NO: 1919581 - DNA, 15 bp, Homo sapiens
gttttgtgttggttg

SEQ ID NO: 1919582 - DNA, 15 bp, Homo sapiens
ttttgtgttggttgg

SEQ ID NO: 1919583 - DNA, 15 bp, Homo sapiens
tttgtgttggttggt

SEQ ID NO: 1919584 - DNA, 15 bp, Homo sapiens
ttgtgttggttggtg

SEQ ID NO: 1919585 - DNA, 15 bp, Homo sapiens
tgtgttggttggtgg

SEQ ID NO: 1919586 - DNA, 15 bp, Homo sapiens
gtgttggttggtggt

SEQ ID NO: 1919587 - DNA, 15 bp, Homo sapiens
tgttggttggtggtt

SEQ ID NO: 1919588 - DNA, 15 bp, Homo sapiens
gttggttggtggttt

SEQ ID NO: 1919589 - DNA, 15 bp, Homo sapiens
ttggttggtggtttt

SEQ ID NO: 1919590 - DNA, 15 bp, Homo sapiens
tggttggtggttttc

SEQ ID NO: 1919591 - DNA, 15 bp, Homo sapiens
ggttggtggttttca

SEQ ID NO: 1919592 - DNA, 15 bp, Homo sapiens
gttggtggttttcat

SEQ ID NO: 1919593 - DNA, 15 bp, Homo sapiens
ttggtggttttcata

SEQ ID NO: 1919594 - DNA, 15 bp, Homo sapiens
tggtggttttcataa

SEQ ID NO: 1919595 - DNA, 15 bp, Homo sapiens
ggtggttttcataat

SEQ ID NO: 1919596 - DNA, 15 bp, Homo sapiens
gtggttttcataatc

SEQ ID NO: 1919597 - DNA, 15 bp, Homo sapiens
tggttttcataatct

SEQ ID NO: 1919598 - DNA, 15 bp, Homo sapiens
ggttttcataatctt

SEQ ID NO: 1919599 - DNA, 15 bp, Homo sapiens
gttttcataatctta

SEQ ID NO: 1919600 - DNA, 15 bp, Homo sapiens
ttttcataatcttat

SEQ ID NO: 1919601 - DNA, 15 bp, Homo sapiens
tttcataatcttatt

SEQ ID NO: 1919602 - DNA, 15 bp, Homo sapiens
ttcataatcttattt

SEQ ID NO: 1919603 - DNA, 15 bp, Homo sapiens
tcataatcttatttc

SEQ ID NO: 1919604 - DNA, 15 bp, Homo sapiens
cataatcttatttct

SEQ ID NO: 1919605 - DNA, 15 bp, Homo sapiens
ataatcttatttctg

SEQ ID NO: 1919606 - DNA, 15 bp, Homo sapiens
taatcttatttctgt

SEQ ID NO: 1919607 - DNA, 15 bp, Homo sapiens
aatcttatttctgta

SEQ ID NO: 1919608 - DNA, 15 bp, Homo sapiens
atcttatttctgtac

SEQ ID NO: 1919609 - DNA, 15 bp, Homo sapiens
tcttatttctgtact

SEQ ID NO: 1919610 - DNA, 15 bp, Homo sapiens
cttatttctgtactg

SEQ ID NO: 1919611 - DNA, 15 bp, Homo sapiens
ttatttctgtactgg

SEQ ID NO: 1919612 - DNA, 15 bp, Homo sapiens
tatttctgtactgga

SEQ ID NO: 1919613 - DNA, 15 bp, Homo sapiens
atttctgtactggaa

SEQ ID NO: 1919614 - DNA, 15 bp, Homo sapiens
tttctgtactggaac

SEQ ID NO: 1919615 - DNA, 15 bp, Homo sapiens
ttctgtactggaact

SEQ ID NO: 1919616 - DNA, 15 bp, Homo sapiens
tctgtactggaacta

SEQ ID NO: 1919617 - DNA, 15 bp, Homo sapiens
ctgtactggaactag

SEQ ID NO: 1919618 - DNA, 15 bp, Homo sapiens
tgtactggaactagt

SEQ ID NO: 1919619 - DNA, 15 bp, Homo sapiens
gtactggaactagta

SEQ ID NO: 1919620 - DNA, 15 bp, Homo sapiens
tactggaactagtac

SEQ ID NO: 1919621 - DNA, 15 bp, Homo sapiens
actggaactagtact

SEQ ID NO: 1919622 - DNA, 15 bp, Homo sapiens
ctggaactagtactt

SEQ ID NO: 1919623 - DNA, 15 bp, Homo sapiens
tggaactagtacttt

SEQ ID NO: 1919624 - DNA, 15 bp, Homo sapiens
ggaactagtactttc

SEQ ID NO: 1919625 - DNA, 15 bp, Homo sapiens
gaactagtactttct

SEQ ID NO: 1919626 - DNA, 15 bp, Homo sapiens
aactagtactttctt

SEQ ID NO: 1919627 - DNA, 15 bp, Homo sapiens
actagtactttcttc

SEQ ID NO: 1919628 - DNA, 15 bp, Homo sapiens
ctagtactttcttct

SEQ ID NO: 1919629 - DNA, 15 bp, Homo sapiens
tagtactttcttctc

SEQ ID NO: 1919630 - DNA, 15 bp, Homo sapiens
agtactttcttctct

SEQ ID NO: 1919631 - DNA, 15 bp, Homo sapiens
gtactttcttctctc

SEQ ID NO: 1919632 - DNA, 15 bp, Homo sapiens
tactttcttctctca

SEQ ID NO: 1919633 - DNA, 15 bp, Homo sapiens
actttcttctctcat

SEQ ID NO: 1919634 - DNA, 15 bp, Homo sapiens
ctttcttctctcatt

SEQ ID NO: 1919635 - DNA, 15 bp, Homo sapiens
tttcttctctcattc

SEQ ID NO: 1919636 - DNA, 15 bp, Homo sapiens
ttcttctctcattcc

SEQ ID NO: 1919637 - DNA, 15 bp, Homo sapiens
tcttctctcattccg

SEQ ID NO: 1919638 - DNA, 15 bp, Homo sapiens
cttctctcattccgc

SEQ ID NO: 1919639 - DNA, 15 bp, Homo sapiens
ttctctcattccgcc

SEQ ID NO: 1919640 - DNA, 15 bp, Homo sapiens
tctctcattccgcca

SEQ ID NO: 1919641 - DNA, 15 bp, Homo sapiens
ctctcattccgccaa

SEQ ID NO: 1919642 - DNA, 15 bp, Homo sapiens
tctcattccgccaaa

SEQ ID NO: 1919643 - DNA, 15 bp, Homo sapiens
ctcattccgccaaaa

SEQ ID NO: 1919644 - DNA, 15 bp, Homo sapiens
tcattccgccaaaac

SEQ ID NO: 1919645 - DNA, 15 bp, Homo sapiens
cattccgccaaaaca

SEQ ID NO: 1919646 - DNA, 15 bp, Homo sapiens
attccgccaaaacag

SEQ ID NO: 1919647 - DNA, 15 bp, Homo sapiens
ttccgccaaaacagg

SEQ ID NO: 1919648 - DNA, 15 bp, Homo sapiens
tccgccaaaacaggg

SEQ ID NO: 1919649 - DNA, 15 bp, Homo sapiens
ccgccaaaacagggc

SEQ ID NO: 1919650 - DNA, 15 bp, Homo sapiens
cgccaaaacagggct

SEQ ID NO: 1919651 - DNA, 15 bp, Homo sapiens
gccaaaacagggctc

SEQ ID NO: 1919652 - DNA, 15 bp, Homo sapiens
ccaaaacagggctca

SEQ ID NO: 1919653 - DNA, 15 bp, Homo sapiens
caaaacagggctcag

SEQ ID NO: 1919654 - DNA, 15 bp, Homo sapiens
aaaacagggctcagt

SEQ ID NO: 1919655 - DNA, 15 bp, Homo sapiens
aaacagggctcagtt

SEQ ID NO: 1919656 - DNA, 15 bp, Homo sapiens
aacagggctcagtta

SEQ ID NO: 1919657 - DNA, 15 bp, Homo sapiens
acagggctcagttat

SEQ ID NO: 1919658 - DNA, 15 bp, Homo sapiens
cagggctcagttatt

SEQ ID NO: 1919659 - DNA, 15 bp, Homo sapiens
agggctcagttattc

SEQ ID NO: 1919660 - DNA, 15 bp, Homo sapiens
gggctcagttattca

SEQ ID NO: 1919661 - DNA, 15 bp, Homo sapiens
ggctcagttattcat

SEQ ID NO: 1919662 - DNA, 15 bp, Homo sapiens
gctcagttattcatt

SEQ ID NO: 1919663 - DNA, 15 bp, Homo sapiens
ctcagttattcattt

SEQ ID NO: 1919664 - DNA, 15 bp, Homo sapiens
tcagttattcatttg

SEQ ID NO: 1919665 - DNA, 15 bp, Homo sapiens
cagttattcatttgc

SEQ ID NO: 1919666 - DNA, 15 bp, Homo sapiens
agttattcatttgcc

SEQ ID NO: 1919667 - DNA, 15 bp, Homo sapiens
gttattcatttgcca

SEQ ID NO: 1919668 - DNA, 15 bp, Homo sapiens
ttattcatttgccaa

SEQ ID NO: 1919669 - DNA, 15 bp, Homo sapiens
tattcatttgccaag

SEQ ID NO: 1919670 - DNA, 15 bp, Homo sapiens
attcatttgccaagc

SEQ ID NO: 1919671 - DNA, 15 bp, Homo sapiens
ttcatttgccaagct

SEQ ID NO: 1919672 - DNA, 15 bp, Homo sapiens
tcatttgccaagctt

SEQ ID NO: 1919673 - DNA, 15 bp, Homo sapiens
catttgccaagcttc

SEQ ID NO: 1919674 - DNA, 15 bp, Homo sapiens
atttgccaagcttcg

SEQ ID NO: 1919675 - DNA, 15 bp, Homo sapiens
tttgccaagcttcgt

SEQ ID NO: 1919676 - DNA, 15 bp, Homo sapiens
ttgccaagcttcgtg

SEQ ID NO: 1919677 - DNA, 15 bp, Homo sapiens
tgccaagcttcgtgg

SEQ ID NO: 1919678 - DNA, 15 bp, Homo sapiens
gccaagcttcgtgga

SEQ ID NO: 1919679 - DNA, 15 bp, Homo sapiens
ccaagcttcgtggag

SEQ ID NO: 1919680 - DNA, 15 bp, Homo sapiens
caagcttcgtggagg

SEQ ID NO: 1919681 - DNA, 15 bp, Homo sapiens
aagcttcgtggagga

SEQ ID NO: 1919682 - DNA, 15 bp, Homo sapiens
agcttcgtggaggaa

SEQ ID NO: 1919683 - DNA, 15 bp, Homo sapiens
gcttcgtggaggaat

SEQ ID NO: 1919684 - DNA, 15 bp, Homo sapiens
cttcgtggaggaatg

SEQ ID NO: 1919685 - DNA, 15 bp, Homo sapiens
ttcgtggaggaatgt

SEQ ID NO: 1919686 - DNA, 15 bp, Homo sapiens
tcgtggaggaatgta

SEQ ID NO: 1919687 - DNA, 15 bp, Homo sapiens
cgtggaggaatgtag

SEQ ID NO: 1919688 - DNA, 15 bp, Homo sapiens
gtggaggaatgtagg

SEQ ID NO: 1919689 - DNA, 15 bp, Homo sapiens
tggaggaatgtaggt

SEQ ID NO: 1919690 - DNA, 15 bp, Homo sapiens
ggaggaatgtaggtg

SEQ ID NO: 1919691 - DNA, 15 bp, Homo sapiens
gaggaatgtaggtga

SEQ ID NO: 1919692 - DNA, 15 bp, Homo sapiens
aggaatgtaggtgac

SEQ ID NO: 1919693 - DNA, 15 bp, Homo sapiens
ggaatgtaggtgaca

SEQ ID NO: 1919694 - DNA, 15 bp, Homo sapiens
gaatgtaggtgacat

SEQ ID NO: 1919695 - DNA, 15 bp, Homo sapiens
aatgtaggtgacatc

SEQ ID NO: 1919696 - DNA, 15 bp, Homo sapiens
atgtaggtgacatca

SEQ ID NO: 1919697 - DNA, 15 bp, Homo sapiens
tgtaggtgacatcaa

SEQ ID NO: 1919698 - DNA, 15 bp, Homo sapiens
gtaggtgacatcaat

SEQ ID NO: 1919699 - DNA, 15 bp, Homo sapiens
taggtgacatcaatg

SEQ ID NO: 1919700 - DNA, 15 bp, Homo sapiens
aggtgacatcaatgt

SEQ ID NO: 1919701 - DNA, 15 bp, Homo sapiens
ggtgacatcaatgtg

SEQ ID NO: 1919702 - DNA, 15 bp, Homo sapiens
gtgacatcaatgtga

SEQ ID NO: 1919703 - DNA, 15 bp, Homo sapiens
tgacatcaatgtgat

SEQ ID NO: 1919704 - DNA, 15 bp, Homo sapiens
gacatcaatgtgata

SEQ ID NO: 1919705 - DNA, 15 bp, Homo sapiens
acatcaatgtgataa

SEQ ID NO: 1919706 - DNA, 15 bp, Homo sapiens
catcaatgtgataaa

SEQ ID NO: 1919707 - DNA, 15 bp, Homo sapiens
atcaatgtgataaag

SEQ ID NO: 1919708 - DNA, 15 bp, Homo sapiens
tcaatgtgataaagt

SEQ ID NO: 1919709 - DNA, 15 bp, Homo sapiens
caatgtgataaagtc

SEQ ID NO: 1919710 - DNA, 15 bp, Homo sapiens
aatgtgataaagtct

SEQ ID NO: 1919711 - DNA, 15 bp, Homo sapiens
atgtgataaagtctg

SEQ ID NO: 1919712 - DNA, 15 bp, Homo sapiens
tgtgataaagtctgt

SEQ ID NO: 1919713 - DNA, 15 bp, Homo sapiens
gtgataaagtctgtg

SEQ ID NO: 1919714 - DNA, 15 bp, Homo sapiens
tgataaagtctgtgt

SEQ ID NO: 1919715 - DNA, 15 bp, Homo sapiens
gataaagtctgtgtt

SEQ ID NO: 1919716 - DNA, 15 bp, Homo sapiens
ataaagtctgtgttc

SEQ ID NO: 1919717 - DNA, 15 bp, Homo sapiens
taaagtctgtgttct

SEQ ID NO: 1919718 - DNA, 15 bp, Homo sapiens
aaagtctgtgttctg

SEQ ID NO: 1919719 - DNA, 15 bp, Homo sapiens
aagtctgtgttctga

SEQ ID NO: 1919720 - DNA, 15 bp, Homo sapiens
agtctgtgttctgag

SEQ ID NO: 1919721 - DNA, 15 bp, Homo sapiens
gtctgtgttctgagt

SEQ ID NO: 1919722 - DNA, 15 bp, Homo sapiens
tctgtgttctgagtt

SEQ ID NO: 1919723 - DNA, 15 bp, Homo sapiens
ctgtgttctgagttg

SEQ ID NO: 1919724 - DNA, 15 bp, Homo sapiens
tgtgttctgagttgt

SEQ ID NO: 1919725 - DNA, 15 bp, Homo sapiens
gtgttctgagttgtc

SEQ ID NO: 1919726 - DNA, 15 bp, Homo sapiens
tgttctgagttgtca

SEQ ID NO: 1919727 - DNA, 15 bp, Homo sapiens
gttctgagttgtcag

SEQ ID NO: 1919728 - DNA, 15 bp, Homo sapiens
ttctgagttgtcaga

SEQ ID NO: 1919729 - DNA, 15 bp, Homo sapiens
tctgagttgtcagat

SEQ ID NO: 1919730 - DNA, 15 bp, Homo sapiens
ctgagttgtcagatc

SEQ ID NO: 1919731 - DNA, 15 bp, Homo sapiens
gagttgtcagatctc

SEQ ID NO: 1919732 - DNA, 15 bp, Homo sapiens
agttgtcagatctct

SEQ ID NO: 1919733 - DNA, 15 bp, Homo sapiens
gttgtcagatctctt

SEQ ID NO: 1919734 - DNA, 15 bp, Homo sapiens
ttgtcagatctcttg

SEQ ID NO: 1919735 - DNA, 15 bp, Homo sapiens
tgtcagatctcttga

SEQ ID NO: 1919736 - DNA, 15 bp, Homo sapiens
gtcagatctcttgaa

SEQ ID NO: 1919737 - DNA, 15 bp, Homo sapiens
tcagatctcttgaag

SEQ ID NO: 1919738 - DNA, 15 bp, Homo sapiens
cagatctcttgaaga

SEQ ID NO: 1919739 - DNA, 15 bp, Homo sapiens
agatctcttgaagac

SEQ ID NO: 1919740 - DNA, 15 bp, Homo sapiens
gatctcttgaagaca

SEQ ID NO: 1919741 - DNA, 15 bp, Homo sapiens
atctcttgaagacaa

SEQ ID NO: 1919742 - DNA, 15 bp, Homo sapiens
tctcttgaagacaat

SEQ ID NO: 1919743 - DNA, 15 bp, Homo sapiens
ctcttgaagacaata

SEQ ID NO: 1919744 - DNA, 15 bp, Homo sapiens
tcttgaagacaatat

SEQ ID NO: 1919745 - DNA, 15 bp, Homo sapiens
cttgaagacaatatt

SEQ ID NO: 1919746 - DNA, 15 bp, Homo sapiens
ttgaagacaatattt

SEQ ID NO: 1919747 - DNA, 15 bp, Homo sapiens
tgaagacaatatttt

SEQ ID NO: 1919748 - DNA, 15 bp, Homo sapiens
gaagacaatattttt

SEQ ID NO: 1919749 - DNA, 15 bp, Homo sapiens
aagacaatatttttc

SEQ ID NO: 1919750 - DNA, 15 bp, Homo sapiens
agacaatatttttca

SEQ ID NO: 1919751 - DNA, 15 bp, Homo sapiens
gacaatatttttcat

SEQ ID NO: 1919752 - DNA, 15 bp, Homo sapiens
acaatatttttcatc

SEQ ID NO: 1919753 - DNA, 15 bp, Homo sapiens
caatatttttcatca

SEQ ID NO: 1919754 - DNA, 15 bp, Homo sapiens
aatatttttcatcac

SEQ ID NO: 1919755 - DNA, 15 bp, Homo sapiens
atatttttcatcact

SEQ ID NO: 1919756 - DNA, 15 bp, Homo sapiens
tatttttcatcactt

SEQ ID NO: 1919757 - DNA, 15 bp, Homo sapiens
atttttcatcactta

SEQ ID NO: 1919758 - DNA, 15 bp, Homo sapiens
tttttcatcacttat

SEQ ID NO: 1919759 - DNA, 15 bp, Homo sapiens
ttttcatcacttatt

SEQ ID NO: 1919760 - DNA, 15 bp, Homo sapiens
tttcatcacttattg

SEQ ID NO: 1919761 - DNA, 15 bp, Homo sapiens
ttcatcacttattgt

SEQ ID NO: 1919762 - DNA, 15 bp, Homo sapiens
tcatcacttattgtt

SEQ ID NO: 1919763 - DNA, 15 bp, Homo sapiens
catcacttattgttt

SEQ ID NO: 1919764 - DNA, 15 bp, Homo sapiens
atcacttattgttta

SEQ ID NO: 1919765 - DNA, 15 bp, Homo sapiens
tcacttattgtttac

SEQ ID NO: 1919766 - DNA, 15 bp, Homo sapiens
cacttattgtttact

SEQ ID NO: 1919767 - DNA, 15 bp, Homo sapiens
acttattgtttacta

SEQ ID NO: 1919768 - DNA, 15 bp, Homo sapiens
cttattgtttactaa

SEQ ID NO: 1919769 - DNA, 15 bp, Homo sapiens
ttattgtttactaaa

SEQ ID NO: 1919770 - DNA, 15 bp, Homo sapiens
tattgtttactaaag

SEQ ID NO: 1919771 - DNA, 15 bp, Homo sapiens
attgtttactaaagc

SEQ ID NO: 1919772 - DNA, 15 bp, Homo sapiens
ttgtttactaaagct

SEQ ID NO: 1919773 - DNA, 15 bp, Homo sapiens
tgtttactaaagcta

SEQ ID NO: 1919774 - DNA, 15 bp, Homo sapiens
gtttactaaagctac

SEQ ID NO: 1919775 - DNA, 15 bp, Homo sapiens
tttactaaagctaca

SEQ ID NO: 1919776 - DNA, 15 bp, Homo sapiens
ttactaaagctacag

SEQ ID NO: 1919777 - DNA, 15 bp, Homo sapiens
tactaaagctacagc

SEQ ID NO: 1919778 - DNA, 15 bp, Homo sapiens
actaaagctacagcc

SEQ ID NO: 1919779 - DNA, 15 bp, Homo sapiens
ctaaagctacagcca

SEQ ID NO: 1919780 - DNA, 15 bp, Homo sapiens
taaagctacagccaa

SEQ ID NO: 1919781 - DNA, 15 bp, Homo sapiens
aaagctacagccaaa

SEQ ID NO: 1919782 - DNA, 15 bp, Homo sapiens
aagctacagccaaaa

SEQ ID NO: 1919783 - DNA, 15 bp, Homo sapiens
agctacagccaaaaa

SEQ ID NO: 1919784 - DNA, 15 bp, Homo sapiens
gctacagccaaaaat

SEQ ID NO: 1919785 - DNA, 15 bp, Homo sapiens
ctacagccaaaaata

SEQ ID NO: 1919786 - DNA, 15 bp, Homo sapiens
tacagccaaaaatat

SEQ ID NO: 1919787 - DNA, 15 bp, Homo sapiens
acagccaaaaatatt

SEQ ID NO: 1919788 - DNA, 15 bp, Homo sapiens
cagccaaaaatattt

SEQ ID NO: 1919789 - DNA, 15 bp, Homo sapiens
agccaaaaatatttt

SEQ ID NO: 1919790 - DNA, 15 bp, Homo sapiens
gccaaaaatattttt

SEQ ID NO: 1919791 - DNA, 15 bp, Homo sapiens
ccaaaaatatttttt

SEQ ID NO: 1919792 - DNA, 15 bp, Homo sapiens
caaaaatattttttt

SEQ ID NO: 1919793 - DNA, 15 bp, Homo sapiens
aaaaatatttttttt

SEQ ID NO: 1919794 - DNA, 15 bp, Homo sapiens
aaaatattttttttt

SEQ ID NO: 1919795 - DNA, 15 bp, Homo sapiens
aaatatttttttttc

SEQ ID NO: 1919796 - DNA, 15 bp, Homo sapiens
aatatttttttttct

SEQ ID NO: 1919797 - DNA, 15 bp, Homo sapiens
atatttttttttctt

SEQ ID NO: 1919798 - DNA, 15 bp, Homo sapiens
tatttttttttctta

SEQ ID NO: 1919799 - DNA, 15 bp, Homo sapiens
atttttttttcttat

SEQ ID NO: 1919800 - DNA, 15 bp, Homo sapiens
tttttttttcttatt

SEQ ID NO: 1919801 - DNA, 15 bp, Homo sapiens
ttttttttcttattc

SEQ ID NO: 1919802 - DNA, 15 bp, Homo sapiens
tttttttcttattct

SEQ ID NO: 1919803 - DNA, 15 bp, Homo sapiens
ttttttcttattcta

SEQ ID NO: 1919804 - DNA, 15 bp, Homo sapiens
tttttcttattctaa

SEQ ID NO: 1919805 - DNA, 15 bp, Homo sapiens
ttttcttattctaaa

SEQ ID NO: 1919806 - DNA, 15 bp, Homo sapiens
tttcttattctaaac

SEQ ID NO: 1919807 - DNA, 15 bp, Homo sapiens
ttcttattctaaact

SEQ ID NO: 1919808 - DNA, 15 bp, Homo sapiens
tcttattctaaactg

SEQ ID NO: 1919809 - DNA, 15 bp, Homo sapiens
cttattctaaactga

SEQ ID NO: 1919810 - DNA, 15 bp, Homo sapiens
ttattctaaactgag

SEQ ID NO: 1919811 - DNA, 15 bp, Homo sapiens
tattctaaactgagc

SEQ ID NO: 1919812 - DNA, 15 bp, Homo sapiens
attctaaactgagcc

SEQ ID NO: 1919813 - DNA, 15 bp, Homo sapiens
ttctaaactgagccc

SEQ ID NO: 1919814 - DNA, 15 bp, Homo sapiens
tctaaactgagccct

SEQ ID NO: 1919815 - DNA, 15 bp, Homo sapiens
ctaaactgagcccta

SEQ ID NO: 1919816 - DNA, 15 bp, Homo sapiens
taaactgagccctat

SEQ ID NO: 1919817 - DNA, 15 bp, Homo sapiens
aaactgagccctata

SEQ ID NO: 1919818 - DNA, 15 bp, Homo sapiens
aactgagccctatag

SEQ ID NO: 1919819 - DNA, 15 bp, Homo sapiens
actgagccctatagc

SEQ ID NO: 1919820 - DNA, 15 bp, Homo sapiens
ctgagccctatagca

SEQ ID NO: 1919821 - DNA, 15 bp, Homo sapiens
tgagccctatagcaa

SEQ ID NO: 1919822 - DNA, 15 bp, Homo sapiens
gagccctatagcaag

SEQ ID NO: 1919823 - DNA, 15 bp, Homo sapiens
agccctatagcaagt

SEQ ID NO: 1919824 - DNA, 15 bp, Homo sapiens
gccctatagcaagtg

SEQ ID NO: 1919825 - DNA, 15 bp, Homo sapiens
ccctatagcaagtga

SEQ ID NO: 1919826 - DNA, 15 bp, Homo sapiens
cctatagcaagtgaa

SEQ ID NO: 1919827 - DNA, 15 bp, Homo sapiens
ctatagcaagtgaag

SEQ ID NO: 1919828 - DNA, 15 bp, Homo sapiens
tatagcaagtgaagg

SEQ ID NO: 1919829 - DNA, 15 bp, Homo sapiens
atagcaagtgaaggg

SEQ ID NO: 1919830 - DNA, 15 bp, Homo sapiens
tagcaagtgaaggga

SEQ ID NO: 1919831 - DNA, 15 bp, Homo sapiens
agcaagtgaagggac

SEQ ID NO: 1919832 - DNA, 15 bp, Homo sapiens
gcaagtgaagggacc

SEQ ID NO: 1919833 - DNA, 15 bp, Homo sapiens
caagtgaagggacca

SEQ ID NO: 1919834 - DNA, 15 bp, Homo sapiens
aagtgaagggaccag

SEQ ID NO: 1919835 - DNA, 15 bp, Homo sapiens
agtgaagggaccaga

SEQ ID NO: 1919836 - DNA, 15 bp, Homo sapiens
gtgaagggaccagat

SEQ ID NO: 1919837 - DNA, 15 bp, Homo sapiens
tgaagggaccagatt

SEQ ID NO: 1919838 - DNA, 15 bp, Homo sapiens
gaagggaccagattt

SEQ ID NO: 1919839 - DNA, 15 bp, Homo sapiens
aagggaccagatttc

SEQ ID NO: 1919840 - DNA, 15 bp, Homo sapiens
agggaccagatttcc

SEQ ID NO: 1919841 - DNA, 15 bp, Homo sapiens
gggaccagatttcct

SEQ ID NO: 1919842 - DNA, 15 bp, Homo sapiens
ggaccagatttccta

SEQ ID NO: 1919843 - DNA, 15 bp, Homo sapiens
gaccagatttcctaa

SEQ ID NO: 1919844 - DNA, 15 bp, Homo sapiens
accagatttcctaat

SEQ ID NO: 1919845 - DNA, 15 bp, Homo sapiens
ccagatttcctaatt

SEQ ID NO: 1919846 - DNA, 15 bp, Homo sapiens
cagatttcctaatta

SEQ ID NO: 1919847 - DNA, 15 bp, Homo sapiens
agatttcctaattaa

SEQ ID NO: 1919848 - DNA, 15 bp, Homo sapiens
gatttcctaattaaa

SEQ ID NO: 1919849 - DNA, 15 bp, Homo sapiens
atttcctaattaaag

SEQ ID NO: 1919850 - DNA, 15 bp, Homo sapiens
tttcctaattaaagg

SEQ ID NO: 1919851 - DNA, 15 bp, Homo sapiens
ttcctaattaaagga

SEQ ID NO: 1919852 - DNA, 15 bp, Homo sapiens
tcctaattaaaggaa

SEQ ID NO: 1919853 - DNA, 15 bp, Homo sapiens
cctaattaaaggaag

SEQ ID NO: 1919854 - DNA, 15 bp, Homo sapiens
ctaattaaaggaagt

SEQ ID NO: 1919855 - DNA, 15 bp, Homo sapiens
taattaaaggaagtt

SEQ ID NO: 1919856 - DNA, 15 bp, Homo sapiens
aattaaaggaagtta

SEQ ID NO: 1919857 - DNA, 15 bp, Homo sapiens
attaaaggaagttag

SEQ ID NO: 1919858 - DNA, 15 bp, Homo sapiens
ttaaaggaagttagg

SEQ ID NO: 1919859 - DNA, 15 bp, Homo sapiens
taaaggaagttaggt

SEQ ID NO: 1919860 - DNA, 15 bp, Homo sapiens
aaaggaagttaggta

SEQ ID NO: 1919861 - DNA, 15 bp, Homo sapiens
aaggaagttaggtac

SEQ ID NO: 1919862 - DNA, 15 bp, Homo sapiens
aggaagttaggtact

SEQ ID NO: 1919863 - DNA, 15 bp, Homo sapiens
ggaagttaggtactt

SEQ ID NO: 1919864 - DNA, 15 bp, Homo sapiens
gaagttaggtacttt

SEQ ID NO: 1919865 - DNA, 15 bp, Homo sapiens
aagttaggtactttt

SEQ ID NO: 1919866 - DNA, 15 bp, Homo sapiens
agttaggtacttttc

SEQ ID NO: 1919867 - DNA, 15 bp, Homo sapiens
gttaggtacttttct

SEQ ID NO: 1919868 - DNA, 15 bp, Homo sapiens
ttaggtacttttctt

SEQ ID NO: 1919869 - DNA, 15 bp, Homo sapiens
taggtacttttcttg

SEQ ID NO: 1919870 - DNA, 15 bp, Homo sapiens
aggtacttttcttgt

SEQ ID NO: 1919871 - DNA, 15 bp, Homo sapiens
ggtacttttcttgta

SEQ ID NO: 1919872 - DNA, 15 bp, Homo sapiens
gtacttttcttgtat

SEQ ID NO: 1919873 - DNA, 15 bp, Homo sapiens
tacttttcttgtatt

SEQ ID NO: 1919874 - DNA, 15 bp, Homo sapiens
acttttcttgtattt

SEQ ID NO: 1919875 - DNA, 15 bp, Homo sapiens
cttttcttgtatttt

SEQ ID NO: 1919876 - DNA, 15 bp, Homo sapiens
ttttcttgtattttt

SEQ ID NO: 1919877 - DNA, 15 bp, Homo sapiens
tttcttgtatttttt

SEQ ID NO: 1919878 - DNA, 15 bp, Homo sapiens
ttcttgtatttttta

SEQ ID NO: 1919879 - DNA, 15 bp, Homo sapiens
tcttgtattttttac

SEQ ID NO: 1919880 - DNA, 15 bp, Homo sapiens
cttgtattttttacc

SEQ ID NO: 1919881 - DNA, 15 bp, Homo sapiens
ttgtattttttacca

SEQ ID NO: 1919882 - DNA, 15 bp, Homo sapiens
tgtattttttaccat

SEQ ID NO: 1919883 - DNA, 15 bp, Homo sapiens
gtattttttaccata

SEQ ID NO: 1919884 - DNA, 15 bp, Homo sapiens
tattttttaccatat

SEQ ID NO: 1919885 - DNA, 15 bp, Homo sapiens
attttttaccatatc

SEQ ID NO: 1919886 - DNA, 15 bp, Homo sapiens
ttttttaccatatca

SEQ ID NO: 1919887 - DNA, 15 bp, Homo sapiens
tttttaccatatcac

SEQ ID NO: 1919888 - DNA, 15 bp, Homo sapiens
ttttaccatatcact

SEQ ID NO: 1919889 - DNA, 15 bp, Homo sapiens
tttaccatatcactg

SEQ ID NO: 1919890 - DNA, 15 bp, Homo sapiens
ttaccatatcactgt

SEQ ID NO: 1919891 - DNA, 15 bp, Homo sapiens
taccatatcactgta

SEQ ID NO: 1919892 - DNA, 15 bp, Homo sapiens
accatatcactgtaa

SEQ ID NO: 1919893 - DNA, 15 bp, Homo sapiens
ccatatcactgtaaa

SEQ ID NO: 1919894 - DNA, 15 bp, Homo sapiens
catatcactgtaaag

SEQ ID NO: 1919895 - DNA, 15 bp, Homo sapiens
atatcactgtaaaga

SEQ ID NO: 1919896 - DNA, 15 bp, Homo sapiens
tatcactgtaaagaa

SEQ ID NO: 1919897 - DNA, 15 bp, Homo sapiens
atcactgtaaagaag

SEQ ID NO: 1919898 - DNA, 15 bp, Homo sapiens
tcactgtaaagaaga

SEQ ID NO: 1919899 - DNA, 15 bp, Homo sapiens
cactgtaaagaagag

SEQ ID NO: 1919900 - DNA, 15 bp, Homo sapiens
actgtaaagaagagg

SEQ ID NO: 1919901 - DNA, 15 bp, Homo sapiens
ctgtaaagaagaggg

SEQ ID NO: 1919902 - DNA, 15 bp, Homo sapiens
tgtaaagaagagggg

SEQ ID NO: 1919903 - DNA, 15 bp, Homo sapiens
gtaaagaagagggga

SEQ ID NO: 1919904 - DNA, 15 bp, Homo sapiens
taaagaagaggggaa

SEQ ID NO: 1919905 - DNA, 15 bp, Homo sapiens
aaagaagaggggaaa

SEQ ID NO: 1919906 - DNA, 15 bp, Homo sapiens
aagaagaggggaaac

SEQ ID NO: 1919907 - DNA, 15 bp, Homo sapiens
agaagaggggaaacc

SEQ ID NO: 1919908 - DNA, 15 bp, Homo sapiens
gaagaggggaaaccc

SEQ ID NO: 1919909 - DNA, 15 bp, Homo sapiens
aagaggggaaaccca

SEQ ID NO: 1919910 - DNA, 15 bp, Homo sapiens
agaggggaaacccag

SEQ ID NO: 1919911 - DNA, 15 bp, Homo sapiens
gaggggaaacccagc

SEQ ID NO: 1919912 - DNA, 15 bp, Homo sapiens
aggggaaacccagcc

SEQ ID NO: 1919913 - DNA, 15 bp, Homo sapiens
ggggaaacccagcca

SEQ ID NO: 1919914 - DNA, 15 bp, Homo sapiens
gggaaacccagccag

SEQ ID NO: 1919915 - DNA, 15 bp, Homo sapiens
ggaaacccagccagc

SEQ ID NO: 1919916 - DNA, 15 bp, Homo sapiens
gaaacccagccagct

SEQ ID NO: 1919917 - DNA, 15 bp, Homo sapiens
aaacccagccagcta

SEQ ID NO: 1919918 - DNA, 15 bp, Homo sapiens
aacccagccagctac

SEQ ID NO: 1919919 - DNA, 15 bp, Homo sapiens
acccagccagctact

SEQ ID NO: 1919920 - DNA, 15 bp, Homo sapiens
cccagccagctactt

SEQ ID NO: 1919921 - DNA, 15 bp, Homo sapiens
ccagccagctacttt

SEQ ID NO: 1919922 - DNA, 15 bp, Homo sapiens
cagccagctactttt

SEQ ID NO: 1919923 - DNA, 15 bp, Homo sapiens
agccagctacttttt

SEQ ID NO: 1919924 - DNA, 15 bp, Homo sapiens
gccagctactttttt

SEQ ID NO: 1919925 - DNA, 15 bp, Homo sapiens
ccagctacttttttt

SEQ ID NO: 1919926 - DNA, 15 bp, Homo sapiens
cagctactttttttc

SEQ ID NO: 1919927 - DNA, 15 bp, Homo sapiens
agctactttttttca

SEQ ID NO: 1919928 - DNA, 15 bp, Homo sapiens
gctactttttttcat

SEQ ID NO: 1919929 - DNA, 15 bp, Homo sapiens
ctactttttttcatc

SEQ ID NO: 1919930 - DNA, 15 bp, Homo sapiens
tactttttttcatca

SEQ ID NO: 1919931 - DNA, 15 bp, Homo sapiens
actttttttcatcac

SEQ ID NO: 1919932 - DNA, 15 bp, Homo sapiens
ctttttttcatcact

SEQ ID NO: 1919933 - DNA, 15 bp, Homo sapiens
tttttttcatcactt

SEQ ID NO: 1919934 - DNA, 15 bp, Homo sapiens
ttttttcatcacttt

SEQ ID NO: 1919935 - DNA, 15 bp, Homo sapiens
tttttcatcactttt

SEQ ID NO: 1919936 - DNA, 15 bp, Homo sapiens
ttttcatcacttttt

SEQ ID NO: 1919937 - DNA, 15 bp, Homo sapiens
tttcatcacttttta

SEQ ID NO: 1919938 - DNA, 15 bp, Homo sapiens
ttcatcactttttat

SEQ ID NO: 1919939 - DNA, 15 bp, Homo sapiens
tcatcactttttatt

SEQ ID NO: 1919940 - DNA, 15 bp, Homo sapiens
catcactttttattc

SEQ ID NO: 1919941 - DNA, 15 bp, Homo sapiens
atcactttttattca

SEQ ID NO: 1919942 - DNA, 15 bp, Homo sapiens
cactttttattcata

SEQ ID NO: 1919943 - DNA, 15 bp, Homo sapiens
actttttattcataa

SEQ ID NO: 1919944 - DNA, 15 bp, Homo sapiens
ctttttattcataac

SEQ ID NO: 1919945 - DNA, 15 bp, Homo sapiens
tttttattcataact

SEQ ID NO: 1919946 - DNA, 15 bp, Homo sapiens
ttttattcataactt

SEQ ID NO: 1919947 - DNA, 15 bp, Homo sapiens
tttattcataacttc

SEQ ID NO: 1919948 - DNA, 15 bp, Homo sapiens
ttattcataacttca

SEQ ID NO: 1919949 - DNA, 15 bp, Homo sapiens
tattcataacttcag

SEQ ID NO: 1919950 - DNA, 15 bp, Homo sapiens
attcataacttcaga

SEQ ID NO: 1919951 - DNA, 15 bp, Homo sapiens
ttcataacttcagat

SEQ ID NO: 1919952 - DNA, 15 bp, Homo sapiens
tcataacttcagatt

SEQ ID NO: 1919953 - DNA, 15 bp, Homo sapiens
cataacttcagattt

SEQ ID NO: 1919954 - DNA, 15 bp, Homo sapiens
ataacttcagatttg

SEQ ID NO: 1919955 - DNA, 15 bp, Homo sapiens
taacttcagatttgt

SEQ ID NO: 1919956 - DNA, 15 bp, Homo sapiens
acttcagatttgtaa

SEQ ID NO: 1919957 - DNA, 15 bp, Homo sapiens
cttcagatttgtaaa

SEQ ID NO: 1919958 - DNA, 15 bp, Homo sapiens
ttcagatttgtaaaa

SEQ ID NO: 1919959 - DNA, 15 bp, Homo sapiens
tcagatttgtaaaac

SEQ ID NO: 1919960 - DNA, 15 bp, Homo sapiens
cagatttgtaaaact

SEQ ID NO: 1919961 - DNA, 15 bp, Homo sapiens
agatttgtaaaacta

SEQ ID NO: 1919962 - DNA, 15 bp, Homo sapiens
gatttgtaaaactaa

SEQ ID NO: 1919963 - DNA, 15 bp, Homo sapiens
atttgtaaaactaat

SEQ ID NO: 1919964 - DNA, 15 bp, Homo sapiens
tttgtaaaactaatt

SEQ ID NO: 1919965 - DNA, 15 bp, Homo sapiens
ttgtaaaactaattt

SEQ ID NO: 1919966 - DNA, 15 bp, Homo sapiens
tgtaaaactaatttc

SEQ ID NO: 1919967 - DNA, 15 bp, Homo sapiens
gtaaaactaatttcc

SEQ ID NO: 1919968 - DNA, 15 bp, Homo sapiens
taaaactaatttcca

SEQ ID NO: 1919969 - DNA, 15 bp, Homo sapiens
aaaactaatttccaa

SEQ ID NO: 1919970 - DNA, 15 bp, Homo sapiens
aaactaatttccaaa

SEQ ID NO: 1919971 - DNA, 15 bp, Homo sapiens
actaatttccaaaat

SEQ ID NO: 1919972 - DNA, 15 bp, Homo sapiens
ctaatttccaaaata

SEQ ID NO: 1919973 - DNA, 15 bp, Homo sapiens
taatttccaaaatat

SEQ ID NO: 1919974 - DNA, 15 bp, Homo sapiens
aatttccaaaatata

SEQ ID NO: 1919975 - DNA, 15 bp, Homo sapiens
atttccaaaatataa

SEQ ID NO: 1919976 - DNA, 15 bp, Homo sapiens
tttccaaaatataag

SEQ ID NO: 1919977 - DNA, 15 bp, Homo sapiens
ttccaaaatataagc

SEQ ID NO: 1919978 - DNA, 15 bp, Homo sapiens
tccaaaatataagct

SEQ ID NO: 1919979 - DNA, 15 bp, Homo sapiens
ccaaaatataagctg

SEQ ID NO: 1919980 - DNA, 15 bp, Homo sapiens
caaaatataagctgt

SEQ ID NO: 1919981 - DNA, 15 bp, Homo sapiens
aaaatataagctgtt

SEQ ID NO: 1919982 - DNA, 15 bp, Homo sapiens
aaatataagctgttt

SEQ ID NO: 1919983 - DNA, 15 bp, Homo sapiens
aatataagctgtttt

SEQ ID NO: 1919984 - DNA, 15 bp, Homo sapiens
atataagctgttttc

SEQ ID NO: 1919985 - DNA, 15 bp, Homo sapiens
tataagctgttttca

SEQ ID NO: 1919986 - DNA, 15 bp, Homo sapiens
ataagctgttttcat

SEQ ID NO: 1919987 - DNA, 15 bp, Homo sapiens
taagctgttttcatt

SEQ ID NO: 1919988 - DNA, 15 bp, Homo sapiens
aagctgttttcatta

SEQ ID NO: 1919989 - DNA, 15 bp, Homo sapiens
agctgttttcattag

SEQ ID NO: 1919990 - DNA, 15 bp, Homo sapiens
gctgttttcattagc

SEQ ID NO: 1919991 - DNA, 15 bp, Homo sapiens
ctgttttcattagcc

SEQ ID NO: 1919992 - DNA, 15 bp, Homo sapiens
tgttttcattagcca

SEQ ID NO: 1919993 - DNA, 15 bp, Homo sapiens
gttttcattagccag

SEQ ID NO: 1919994 - DNA, 15 bp, Homo sapiens
ttttcattagccagt

SEQ ID NO: 1919995 - DNA, 15 bp, Homo sapiens
tttcattagccagtt

SEQ ID NO: 1919996 - DNA, 15 bp, Homo sapiens
ttcattagccagttc

SEQ ID NO: 1919997 - DNA, 15 bp, Homo sapiens
tcattagccagttct

SEQ ID NO: 1919998 - DNA, 15 bp, Homo sapiens
cattagccagttcta

SEQ ID NO: 1919999 - DNA, 15 bp, Homo sapiens
attagccagttctat

SEQ ID NO: 1920000 - DNA, 15 bp, Homo sapiens
ttagccagttctata

SEQ ID NO: 1920001 - DNA, 15 bp, Homo sapiens
tagccagttctataa

SEQ ID NO: 1920002 - DNA, 15 bp, Homo sapiens
agccagttctataat

SEQ ID NO: 1920003 - DNA, 15 bp, Homo sapiens
gccagttctataata

SEQ ID NO: 1920004 - DNA, 15 bp, Homo sapiens
ccagttctataatat

SEQ ID NO: 1920005 - DNA, 15 bp, Homo sapiens
cagttctataatatc

SEQ ID NO: 1920006 - DNA, 15 bp, Homo sapiens
agttctataatatct

SEQ ID NO: 1920007 - DNA, 15 bp, Homo sapiens
gttctataatatctt

SEQ ID NO: 1920008 - DNA, 15 bp, Homo sapiens
ttctataatatcttc

SEQ ID NO: 1920009 - DNA, 15 bp, Homo sapiens
tctataatatcttcc

SEQ ID NO: 1920010 - DNA, 15 bp, Homo sapiens
ctataatatcttcct

SEQ ID NO: 1920011 - DNA, 15 bp, Homo sapiens
tataatatcttcctg

SEQ ID NO: 1920012 - DNA, 15 bp, Homo sapiens
ataatatcttcctgt

SEQ ID NO: 1920013 - DNA, 15 bp, Homo sapiens
taatatcttcctgtg

SEQ ID NO: 1920014 - DNA, 15 bp, Homo sapiens
aatatcttcctgtga

SEQ ID NO: 1920015 - DNA, 15 bp, Homo sapiens
atatcttcctgtgat

SEQ ID NO: 1920016 - DNA, 15 bp, Homo sapiens
tatcttcctgtgatt

SEQ ID NO: 1920017 - DNA, 15 bp, Homo sapiens
atcttcctgtgattt

SEQ ID NO: 1920018 - DNA, 15 bp, Homo sapiens
tcttcctgtgattta

SEQ ID NO: 1920019 - DNA, 15 bp, Homo sapiens
cttcctgtgatttat

SEQ ID NO: 1920020 - DNA, 15 bp, Homo sapiens
ttcctgtgatttatg

SEQ ID NO: 1920021 - DNA, 15 bp, Homo sapiens
tcctgtgatttatgt

SEQ ID NO: 1920022 - DNA, 15 bp, Homo sapiens
cctgtgatttatgta

SEQ ID NO: 1920023 - DNA, 15 bp, Homo sapiens
ctgtgatttatgtag

SEQ ID NO: 1920024 - DNA, 15 bp, Homo sapiens
tgtgatttatgtaga

SEQ ID NO: 1920025 - DNA, 15 bp, Homo sapiens
gtgatttatgtagaa

SEQ ID NO: 1920026 - DNA, 15 bp, Homo sapiens
tgatttatgtagaaa

SEQ ID NO: 1920027 - DNA, 15 bp, Homo sapiens
gatttatgtagaaaa

SEQ ID NO: 1920028 - DNA, 15 bp, Homo sapiens
atttatgtagaaaat

SEQ ID NO: 1920029 - DNA, 15 bp, Homo sapiens
tttatgtagaaaatg

SEQ ID NO: 1920030 - DNA, 15 bp, Homo sapiens
ttatgtagaaaatga

SEQ ID NO: 1920031 - DNA, 15 bp, Homo sapiens
tatgtagaaaatgaa

SEQ ID NO: 1920032 - DNA, 15 bp, Homo sapiens
atgtagaaaatgaac

SEQ ID NO: 1920033 - DNA, 15 bp, Homo sapiens
tgtagaaaatgaaca

SEQ ID NO: 1920034 - DNA, 15 bp, Homo sapiens
gtagaaaatgaacac

SEQ ID NO: 1920035 - DNA, 15 bp, Homo sapiens
tagaaaatgaacaca

SEQ ID NO: 1920036 - DNA, 15 bp, Homo sapiens
agaaaatgaacacac

SEQ ID NO: 1920037 - DNA, 15 bp, Homo sapiens
gaaaatgaacacacc

SEQ ID NO: 1920038 - DNA, 15 bp, Homo sapiens
aaaatgaacacaccc

SEQ ID NO: 1920039 - DNA, 15 bp, Homo sapiens
aaatgaacacacccc

SEQ ID NO: 1920040 - DNA, 15 bp, Homo sapiens
aatgaacacacccct

SEQ ID NO: 1920041 - DNA, 15 bp, Homo sapiens
atgaacacacccctt

SEQ ID NO: 1920042 - DNA, 15 bp, Homo sapiens
tgaacacaccccttt

SEQ ID NO: 1920043 - DNA, 15 bp, Homo sapiens
gaacacacccctttt

SEQ ID NO: 1920044 - DNA, 15 bp, Homo sapiens
aacacaccccttttc

SEQ ID NO: 1920045 - DNA, 15 bp, Homo sapiens
acacaccccttttcc

SEQ ID NO: 1920046 - DNA, 15 bp, Homo sapiens
cacaccccttttcca

SEQ ID NO: 1920047 - DNA, 15 bp, Homo sapiens
acaccccttttccat

SEQ ID NO: 1920048 - DNA, 15 bp, Homo sapiens
caccccttttccatt

SEQ ID NO: 1920049 - DNA, 15 bp, Homo sapiens
accccttttccattt

SEQ ID NO: 1920050 - DNA, 15 bp, Homo sapiens
ccccttttccattta

SEQ ID NO: 1920051 - DNA, 15 bp, Homo sapiens
cccttttccatttaa

SEQ ID NO: 1920052 - DNA, 15 bp, Homo sapiens
ccttttccatttaag

SEQ ID NO: 1920053 - DNA, 15 bp, Homo sapiens
cttttccatttaaga

SEQ ID NO: 1920054 - DNA, 15 bp, Homo sapiens
ttttccatttaagac

SEQ ID NO: 1920055 - DNA, 15 bp, Homo sapiens
tttccatttaagacc

SEQ ID NO: 1920056 - DNA, 15 bp, Homo sapiens
ttccatttaagaccc

SEQ ID NO: 1920057 - DNA, 15 bp, Homo sapiens
tccatttaagaccct

SEQ ID NO: 1920058 - DNA, 15 bp, Homo sapiens
ccatttaagaccctg

SEQ ID NO: 1920059 - DNA, 15 bp, Homo sapiens
catttaagaccctgc

SEQ ID NO: 1920060 - DNA, 15 bp, Homo sapiens
atttaagaccctgct

SEQ ID NO: 1920061 - DNA, 15 bp, Homo sapiens
tttaagaccctgcta

SEQ ID NO: 1920062 - DNA, 15 bp, Homo sapiens
ttaagaccctgctac

SEQ ID NO: 1920063 - DNA, 15 bp, Homo sapiens
taagaccctgctact

SEQ ID NO: 1920064 - DNA, 15 bp, Homo sapiens
aagaccctgctactg

SEQ ID NO: 1920065 - DNA, 15 bp, Homo sapiens
agaccctgctactgt

SEQ ID NO: 1920066 - DNA, 15 bp, Homo sapiens
gaccctgctactgtg

SEQ ID NO: 1920067 - DNA, 15 bp, Homo sapiens
accctgctactgtgt

SEQ ID NO: 1920068 - DNA, 15 bp, Homo sapiens
ccctgctactgtgtg

SEQ ID NO: 1920069 - DNA, 15 bp, Homo sapiens
cctgctactgtgtga

SEQ ID NO: 1920070 - DNA, 15 bp, Homo sapiens
ctgctactgtgtgaa

SEQ ID NO: 1920071 - DNA, 15 bp, Homo sapiens
tgctactgtgtgaag

SEQ ID NO: 1920072 - DNA, 15 bp, Homo sapiens
gctactgtgtgaaga

SEQ ID NO: 1920073 - DNA, 15 bp, Homo sapiens
ctactgtgtgaagag

SEQ ID NO: 1920074 - DNA, 15 bp, Homo sapiens
tactgtgtgaagaga

SEQ ID NO: 1920075 - DNA, 15 bp, Homo sapiens
actgtgtgaagagat

SEQ ID NO: 1920076 - DNA, 15 bp, Homo sapiens
ctgtgtgaagagatg

SEQ ID NO: 1920077 - DNA, 15 bp, Homo sapiens
tgtgtgaagagatga

SEQ ID NO: 1920078 - DNA, 15 bp, Homo sapiens
gtgtgaagagatgat

SEQ ID NO: 1920079 - DNA, 15 bp, Homo sapiens
tgtgaagagatgata

SEQ ID NO: 1920080 - DNA, 15 bp, Homo sapiens
gtgaagagatgatac

SEQ ID NO: 1920081 - DNA, 15 bp, Homo sapiens
tgaagagatgatact

SEQ ID NO: 1920082 - DNA, 15 bp, Homo sapiens
gaagagatgatactt

SEQ ID NO: 1920083 - DNA, 15 bp, Homo sapiens
aagagatgatactta

SEQ ID NO: 1920084 - DNA, 15 bp, Homo sapiens
agagatgatacttac

SEQ ID NO: 1920085 - DNA, 15 bp, Homo sapiens
gagatgatacttaca

SEQ ID NO: 1920086 - DNA, 15 bp, Homo sapiens
agatgatacttacaa

SEQ ID NO: 1920087 - DNA, 15 bp, Homo sapiens
gatgatacttacaag

SEQ ID NO: 1920088 - DNA, 15 bp, Homo sapiens
atgatacttacaagg

SEQ ID NO: 1920089 - DNA, 15 bp, Homo sapiens
tgatacttacaagga

SEQ ID NO: 1920090 - DNA, 15 bp, Homo sapiens
gatacttacaaggag

SEQ ID NO: 1920091 - DNA, 15 bp, Homo sapiens
atacttacaaggagt

SEQ ID NO: 1920092 - DNA, 15 bp, Homo sapiens
tacttacaaggagtg

SEQ ID NO: 1920093 - DNA, 15 bp, Homo sapiens
acttacaaggagtgt

SEQ ID NO: 1920094 - DNA, 15 bp, Homo sapiens
cttacaaggagtgtc

SEQ ID NO: 1920095 - DNA, 15 bp, Homo sapiens
ttacaaggagtgtca

SEQ ID NO: 1920096 - DNA, 15 bp, Homo sapiens
tacaaggagtgtcat

SEQ ID NO: 1920097 - DNA, 15 bp, Homo sapiens
acaaggagtgtcatt

SEQ ID NO: 1920098 - DNA, 15 bp, Homo sapiens
caaggagtgtcatta

SEQ ID NO: 1920099 - DNA, 15 bp, Homo sapiens
aaggagtgtcattac

SEQ ID NO: 1920100 - DNA, 15 bp, Homo sapiens
aggagtgtcattacc

SEQ ID NO: 1920101 - DNA, 15 bp, Homo sapiens
ggagtgtcattacct

SEQ ID NO: 1920102 - DNA, 15 bp, Homo sapiens
gagtgtcattacctg

SEQ ID NO: 1920103 - DNA, 15 bp, Homo sapiens
agtgtcattacctgt

SEQ ID NO: 1920104 - DNA, 15 bp, Homo sapiens
gtgtcattacctgtg

SEQ ID NO: 1920105 - DNA, 15 bp, Homo sapiens
tgtcattacctgtga

SEQ ID NO: 1920106 - DNA, 15 bp, Homo sapiens
gtcattacctgtgag

SEQ ID NO: 1920107 - DNA, 15 bp, Homo sapiens
tcattacctgtgagc

SEQ ID NO: 1920108 - DNA, 15 bp, Homo sapiens
cattacctgtgagct

SEQ ID NO: 1920109 - DNA, 15 bp, Homo sapiens
attacctgtgagctg

SEQ ID NO: 1920110 - DNA, 15 bp, Homo sapiens
ttacctgtgagctga

SEQ ID NO: 1920111 - DNA, 15 bp, Homo sapiens
tacctgtgagctgac

SEQ ID NO: 1920112 - DNA, 15 bp, Homo sapiens
acctgtgagctgact

SEQ ID NO: 1920113 - DNA, 15 bp, Homo sapiens
cctgtgagctgactg

SEQ ID NO: 1920114 - DNA, 15 bp, Homo sapiens
ctgtgagctgactga

SEQ ID NO: 1920115 - DNA, 15 bp, Homo sapiens
tgtgagctgactgaa

SEQ ID NO: 1920116 - DNA, 15 bp, Homo sapiens
gtgagctgactgaat

SEQ ID NO: 1920117 - DNA, 15 bp, Homo sapiens
tgagctgactgaatg

SEQ ID NO: 1920118 - DNA, 15 bp, Homo sapiens
gagctgactgaatgt

SEQ ID NO: 1920119 - DNA, 15 bp, Homo sapiens
agctgactgaatgtt

SEQ ID NO: 1920120 - DNA, 15 bp, Homo sapiens
gctgactgaatgttg

SEQ ID NO: 1920121 - DNA, 15 bp, Homo sapiens
ctgactgaatgttgg

SEQ ID NO: 1920122 - DNA, 15 bp, Homo sapiens
tgactgaatgttggt

SEQ ID NO: 1920123 - DNA, 15 bp, Homo sapiens
gactgaatgttggta

SEQ ID NO: 1920124 - DNA, 15 bp, Homo sapiens
actgaatgttggtag

SEQ ID NO: 1920125 - DNA, 15 bp, Homo sapiens
ctgaatgttggtagg

SEQ ID NO: 1920126 - DNA, 15 bp, Homo sapiens
tgaatgttggtaggt

SEQ ID NO: 1920127 - DNA, 15 bp, Homo sapiens
gaatgttggtaggtg

SEQ ID NO: 1920128 - DNA, 15 bp, Homo sapiens
aatgttggtaggtgc

SEQ ID NO: 1920129 - DNA, 15 bp, Homo sapiens
atgttggtaggtgct

SEQ ID NO: 1920130 - DNA, 15 bp, Homo sapiens
tgttggtaggtgctc

SEQ ID NO: 1920131 - DNA, 15 bp, Homo sapiens
gttggtaggtgctcc

SEQ ID NO: 1920132 - DNA, 15 bp, Homo sapiens
ttggtaggtgctcca

SEQ ID NO: 1920133 - DNA, 15 bp, Homo sapiens
tggtaggtgctccat

SEQ ID NO: 1920134 - DNA, 15 bp, Homo sapiens
ggtaggtgctccatt

SEQ ID NO: 1920135 - DNA, 15 bp, Homo sapiens
gtaggtgctccatta

SEQ ID NO: 1920136 - DNA, 15 bp, Homo sapiens
taggtgctccattac

SEQ ID NO: 1920137 - DNA, 15 bp, Homo sapiens
aggtgctccattaca

SEQ ID NO: 1920138 - DNA, 15 bp, Homo sapiens
ggtgctccattacaa

SEQ ID NO: 1920139 - DNA, 15 bp, Homo sapiens
gtgctccattacaat

SEQ ID NO: 1920140 - DNA, 15 bp, Homo sapiens
tgctccattacaatc

SEQ ID NO: 1920141 - DNA, 15 bp, Homo sapiens
gctccattacaatcc

SEQ ID NO: 1920142 - DNA, 15 bp, Homo sapiens
ctccattacaatcca

SEQ ID NO: 1920143 - DNA, 15 bp, Homo sapiens
tccattacaatccag

SEQ ID NO: 1920144 - DNA, 15 bp, Homo sapiens
ccattacaatccagg

SEQ ID NO: 1920145 - DNA, 15 bp, Homo sapiens
cattacaatccagga

SEQ ID NO: 1920146 - DNA, 15 bp, Homo sapiens
attacaatccaggaa

SEQ ID NO: 1920147 - DNA, 15 bp, Homo sapiens
ttacaatccaggaaa

SEQ ID NO: 1920148 - DNA, 15 bp, Homo sapiens
tacaatccaggaaag

SEQ ID NO: 1920149 - DNA, 15 bp, Homo sapiens
acaatccaggaaagt

SEQ ID NO: 1920150 - DNA, 15 bp, Homo sapiens
caatccaggaaagtc

SEQ ID NO: 1920151 - DNA, 15 bp, Homo sapiens
aatccaggaaagtct

SEQ ID NO: 1920152 - DNA, 15 bp, Homo sapiens
atccaggaaagtctg

SEQ ID NO: 1920153 - DNA, 15 bp, Homo sapiens
tccaggaaagtctgt

SEQ ID NO: 1920154 - DNA, 15 bp, Homo sapiens
ccaggaaagtctgtg

SEQ ID NO: 1920155 - DNA, 15 bp, Homo sapiens
caggaaagtctgtgt

SEQ ID NO: 1920156 - DNA, 15 bp, Homo sapiens
aggaaagtctgtgtt

SEQ ID NO: 1920157 - DNA, 15 bp, Homo sapiens
ggaaagtctgtgtta

SEQ ID NO: 1920158 - DNA, 15 bp, Homo sapiens
gaaagtctgtgttac

SEQ ID NO: 1920159 - DNA, 15 bp, Homo sapiens
aaagtctgtgttact

SEQ ID NO: 1920160 - DNA, 15 bp, Homo sapiens
aagtctgtgttactg

SEQ ID NO: 1920161 - DNA, 15 bp, Homo sapiens
agtctgtgttactga

SEQ ID NO: 1920162 - DNA, 15 bp, Homo sapiens
gtctgtgttactgat

SEQ ID NO: 1920163 - DNA, 15 bp, Homo sapiens
tctgtgttactgata

SEQ ID NO: 1920164 - DNA, 15 bp, Homo sapiens
ctgtgttactgatat

SEQ ID NO: 1920165 - DNA, 15 bp, Homo sapiens
tgtgttactgatatt

SEQ ID NO: 1920166 - DNA, 15 bp, Homo sapiens
gtgttactgatattt

SEQ ID NO: 1920167 - DNA, 15 bp, Homo sapiens
tgttactgatatttg

SEQ ID NO: 1920168 - DNA, 15 bp, Homo sapiens
gttactgatatttgt

SEQ ID NO: 1920169 - DNA, 15 bp, Homo sapiens
ttactgatatttgtg

SEQ ID NO: 1920170 - DNA, 15 bp, Homo sapiens
tactgatatttgtgt

SEQ ID NO: 1920171 - DNA, 15 bp, Homo sapiens
actgatatttgtgtg

SEQ ID NO: 1920172 - DNA, 15 bp, Homo sapiens
ctgatatttgtgtgg

SEQ ID NO: 1920173 - DNA, 15 bp, Homo sapiens
tgatatttgtgtgga

SEQ ID NO: 1920174 - DNA, 15 bp, Homo sapiens
gatatttgtgtggaa

SEQ ID NO: 1920175 - DNA, 15 bp, Homo sapiens
atatttgtgtggaaa

SEQ ID NO: 1920176 - DNA, 15 bp, Homo sapiens
tatttgtgtggaaat

SEQ ID NO: 1920177 - DNA, 15 bp, Homo sapiens
atttgtgtggaaatc

SEQ ID NO: 1920178 - DNA, 15 bp, Homo sapiens
tttgtgtggaaatct

SEQ ID NO: 1920179 - DNA, 15 bp, Homo sapiens
ttgtgtggaaatctt

SEQ ID NO: 1920180 - DNA, 15 bp, Homo sapiens
tgtgtggaaatcttt

SEQ ID NO: 1920181 - DNA, 15 bp, Homo sapiens
gtgtggaaatcttta

SEQ ID NO: 1920182 - DNA, 15 bp, Homo sapiens
tgtggaaatctttat

SEQ ID NO: 1920183 - DNA, 15 bp, Homo sapiens
gtggaaatctttatt

SEQ ID NO: 1920184 - DNA, 15 bp, Homo sapiens
tggaaatctttattt

SEQ ID NO: 1920185 - DNA, 15 bp, Homo sapiens
ggaaatctttatttc

SEQ ID NO: 1920186 - DNA, 15 bp, Homo sapiens
gaaatctttatttca

SEQ ID NO: 1920187 - DNA, 15 bp, Homo sapiens
aaatctttatttcac

SEQ ID NO: 1920188 - DNA, 15 bp, Homo sapiens
aatctttatttcact

SEQ ID NO: 1920189 - DNA, 15 bp, Homo sapiens
atctttatttcactt

SEQ ID NO: 1920190 - DNA, 15 bp, Homo sapiens
tctttatttcacttc

SEQ ID NO: 1920191 - DNA, 15 bp, Homo sapiens
ctttatttcacttca

SEQ ID NO: 1920192 - DNA, 15 bp, Homo sapiens
tttatttcacttcaa

SEQ ID NO: 1920193 - DNA, 15 bp, Homo sapiens
ttatttcacttcaat

SEQ ID NO: 1920194 - DNA, 15 bp, Homo sapiens
tatttcacttcaatt

SEQ ID NO: 1920195 - DNA, 15 bp, Homo sapiens
atttcacttcaattt

SEQ ID NO: 1920196 - DNA, 15 bp, Homo sapiens
tttcacttcaattta

SEQ ID NO: 1920197 - DNA, 15 bp, Homo sapiens
ttcacttcaatttaa

SEQ ID NO: 1920198 - DNA, 15 bp, Homo sapiens
tcacttcaatttaac

SEQ ID NO: 1920199 - DNA, 15 bp, Homo sapiens
cacttcaatttaacc

SEQ ID NO: 1920200 - DNA, 15 bp, Homo sapiens
acttcaatttaacca

SEQ ID NO: 1920201 - DNA, 15 bp, Homo sapiens
cttcaatttaaccat

SEQ ID NO: 1920202 - DNA, 15 bp, Homo sapiens
ttcaatttaaccatt

SEQ ID NO: 1920203 - DNA, 15 bp, Homo sapiens
tcaatttaaccatta

SEQ ID NO: 1920204 - DNA, 15 bp, Homo sapiens
caatttaaccattag

SEQ ID NO: 1920205 - DNA, 15 bp, Homo sapiens
aatttaaccattaga

SEQ ID NO: 1920206 - DNA, 15 bp, Homo sapiens
atttaaccattagat

SEQ ID NO: 1920207 - DNA, 15 bp, Homo sapiens
tttaaccattagatg

SEQ ID NO: 1920208 - DNA, 15 bp, Homo sapiens
ttaaccattagatgg

SEQ ID NO: 1920209 - DNA, 15 bp, Homo sapiens
taaccattagatggt

SEQ ID NO: 1920210 - DNA, 15 bp, Homo sapiens
aaccattagatggta

SEQ ID NO: 1920211 - DNA, 15 bp, Homo sapiens
accattagatggtaa

SEQ ID NO: 1920212 - DNA, 15 bp, Homo sapiens
ccattagatggtaaa

SEQ ID NO: 1920213 - DNA, 15 bp, Homo sapiens
cattagatggtaaaa

SEQ ID NO: 1920214 - DNA, 15 bp, Homo sapiens
attagatggtaaaat

SEQ ID NO: 1920215 - DNA, 15 bp, Homo sapiens
ttagatggtaaaatt

SEQ ID NO: 1920216 - DNA, 15 bp, Homo sapiens
tagatggtaaaatta

SEQ ID NO: 1920217 - DNA, 15 bp, Homo sapiens
agatggtaaaattaa

SEQ ID NO: 1920218 - DNA, 15 bp, Homo sapiens
gatggtaaaattaag

SEQ ID NO: 1920219 - DNA, 15 bp, Homo sapiens
atggtaaaattaaga

SEQ ID NO: 1920220 - DNA, 15 bp, Homo sapiens
tggtaaaattaagat

SEQ ID NO: 1920221 - DNA, 15 bp, Homo sapiens
gtaaaattaagatgc

SEQ ID NO: 1920222 - DNA, 15 bp, Homo sapiens
taaaattaagatgct

SEQ ID NO: 1920223 - DNA, 15 bp, Homo sapiens
aaaattaagatgcta

SEQ ID NO: 1920224 - DNA, 15 bp, Homo sapiens
aaattaagatgctac

SEQ ID NO: 1920225 - DNA, 15 bp, Homo sapiens
aattaagatgctact

SEQ ID NO: 1920226 - DNA, 15 bp, Homo sapiens
attaagatgctactt

SEQ ID NO: 1920227 - DNA, 15 bp, Homo sapiens
ttaagatgctacttg

SEQ ID NO: 1920228 - DNA, 15 bp, Homo sapiens
taagatgctacttgt

SEQ ID NO: 1920229 - DNA, 15 bp, Homo sapiens
aagatgctacttgtt

SEQ ID NO: 1920230 - DNA, 15 bp, Homo sapiens
agatgctacttgttg

SEQ ID NO: 1920231 - DNA, 15 bp, Homo sapiens
gatgctacttgttgg

SEQ ID NO: 1920232 - DNA, 15 bp, Homo sapiens
atgctacttgttggt

SEQ ID NO: 1920233 - DNA, 15 bp, Homo sapiens
tgctacttgttggta

SEQ ID NO: 1920234 - DNA, 15 bp, Homo sapiens
gctacttgttggtaa

SEQ ID NO: 1920235 - DNA, 15 bp, Homo sapiens
ctacttgttggtaaa

SEQ ID NO: 1920236 - DNA, 15 bp, Homo sapiens
tacttgttggtaaaa

SEQ ID NO: 1920237 - DNA, 15 bp, Homo sapiens
acttgttggtaaaaa

SEQ ID NO: 1920238 - DNA, 15 bp, Homo sapiens
cttgttggtaaaaat

SEQ ID NO: 1920239 - DNA, 15 bp, Homo sapiens
ttgttggtaaaaatt

SEQ ID NO: 1920240 - DNA, 15 bp, Homo sapiens
tgttggtaaaaattg

SEQ ID NO: 1920241 - DNA, 15 bp, Homo sapiens
gttggtaaaaattgg

SEQ ID NO: 1920242 - DNA, 15 bp, Homo sapiens
ttggtaaaaattggt

SEQ ID NO: 1920243 - DNA, 15 bp, Homo sapiens
tggtaaaaattggtg

SEQ ID NO: 1920244 - DNA, 15 bp, Homo sapiens
ggtaaaaattggtgg

SEQ ID NO: 1920245 - DNA, 15 bp, Homo sapiens
gtaaaaattggtgga

SEQ ID NO: 1920246 - DNA, 15 bp, Homo sapiens
taaaaattggtggac

SEQ ID NO: 1920247 - DNA, 15 bp, Homo sapiens
aaaaattggtggact

SEQ ID NO: 1920248 - DNA, 15 bp, Homo sapiens
aaaattggtggactg

SEQ ID NO: 1920249 - DNA, 15 bp, Homo sapiens
aaattggtggactgg

SEQ ID NO: 1920250 - DNA, 15 bp, Homo sapiens
aattggtggactggt

SEQ ID NO: 1920251 - DNA, 15 bp, Homo sapiens
attggtggactggtt

SEQ ID NO: 1920252 - DNA, 15 bp, Homo sapiens
ttggtggactggttt

SEQ ID NO: 1920253 - DNA, 15 bp, Homo sapiens
tggtggactggtttc

SEQ ID NO: 1920254 - DNA, 15 bp, Homo sapiens
ggtggactggtttca

SEQ ID NO: 1920255 - DNA, 15 bp, Homo sapiens
gtggactggtttcaa

SEQ ID NO: 1920256 - DNA, 15 bp, Homo sapiens
tggactggtttcaat

SEQ ID NO: 1920257 - DNA, 15 bp, Homo sapiens
ggactggtttcaatg

SEQ ID NO: 1920258 - DNA, 15 bp, Homo sapiens
gactggtttcaatgg

SEQ ID NO: 1920259 - DNA, 15 bp, Homo sapiens
actggtttcaatggg

SEQ ID NO: 1920260 - DNA, 15 bp, Homo sapiens
ctggtttcaatgggt

SEQ ID NO: 1920261 - DNA, 15 bp, Homo sapiens
tggtttcaatgggta

SEQ ID NO: 1920262 - DNA, 15 bp, Homo sapiens
ggtttcaatgggtaa

SEQ ID NO: 1920263 - DNA, 15 bp, Homo sapiens
gtttcaatgggtaaa

SEQ ID NO: 1920264 - DNA, 15 bp, Homo sapiens
tttcaatgggtaaat

SEQ ID NO: 1920265 - DNA, 15 bp, Homo sapiens
ttcaatgggtaaatg

SEQ ID NO: 1920266 - DNA, 15 bp, Homo sapiens
tcaatgggtaaatgt

SEQ ID NO: 1920267 - DNA, 15 bp, Homo sapiens
caatgggtaaatgtg

SEQ ID NO: 1920268 - DNA, 15 bp, Homo sapiens
aatgggtaaatgtgt

SEQ ID NO: 1920269 - DNA, 15 bp, Homo sapiens
atgggtaaatgtgtt

SEQ ID NO: 1920270 - DNA, 15 bp, Homo sapiens
tgggtaaatgtgttg

SEQ ID NO: 1920271 - DNA, 15 bp, Homo sapiens
gggtaaatgtgttgt

SEQ ID NO: 1920272 - DNA, 15 bp, Homo sapiens
ggtaaatgtgttgtg

SEQ ID NO: 1920273 - DNA, 15 bp, Homo sapiens
gtaaatgtgttgtgg

SEQ ID NO: 1920274 - DNA, 15 bp, Homo sapiens
taaatgtgttgtggc

SEQ ID NO: 1920275 - DNA, 15 bp, Homo sapiens
aaatgtgttgtggca

SEQ ID NO: 1920276 - DNA, 15 bp, Homo sapiens
aatgtgttgtggcaa

SEQ ID NO: 1920277 - DNA, 15 bp, Homo sapiens
atgtgttgtggcaaa

SEQ ID NO: 1920278 - DNA, 15 bp, Homo sapiens
tgtgttgtggcaaat

SEQ ID NO: 1920279 - DNA, 15 bp, Homo sapiens
gtgttgtggcaaatt

SEQ ID NO: 1920280 - DNA, 15 bp, Homo sapiens
tgttgtggcaaatta

SEQ ID NO: 1920281 - DNA, 15 bp, Homo sapiens
gttgtggcaaattaa

SEQ ID NO: 1920282 - DNA, 15 bp, Homo sapiens
ttgtggcaaattaat

SEQ ID NO: 1920283 - DNA, 15 bp, Homo sapiens
tgtggcaaattaatg

SEQ ID NO: 1920284 - DNA, 15 bp, Homo sapiens
gtggcaaattaatgt

SEQ ID NO: 1920285 - DNA, 15 bp, Homo sapiens
tggcaaattaatgtg

SEQ ID NO: 1920286 - DNA, 15 bp, Homo sapiens
ggcaaattaatgtgt

SEQ ID NO: 1920287 - DNA, 15 bp, Homo sapiens
gcaaattaatgtgtt

SEQ ID NO: 1920288 - DNA, 15 bp, Homo sapiens
caaattaatgtgttg

SEQ ID NO: 1920289 - DNA, 15 bp, Homo sapiens
aaattaatgtgttgg

SEQ ID NO: 1920290 - DNA, 15 bp, Homo sapiens
aattaatgtgttgga

SEQ ID NO: 1920291 - DNA, 15 bp, Homo sapiens
attaatgtgttggaa

SEQ ID NO: 1920292 - DNA, 15 bp, Homo sapiens
ttaatgtgttggaat

SEQ ID NO: 1920293 - DNA, 15 bp, Homo sapiens
taatgtgttggaata

SEQ ID NO: 1920294 - DNA, 15 bp, Homo sapiens
aatgtgttggaatat

SEQ ID NO: 1920295 - DNA, 15 bp, Homo sapiens
atgtgttggaatatt

SEQ ID NO: 1920296 - DNA, 15 bp, Homo sapiens
tgtgttggaatattg

SEQ ID NO: 1920297 - DNA, 15 bp, Homo sapiens
gtgttggaatattgc

SEQ ID NO: 1920298 - DNA, 15 bp, Homo sapiens
tgttggaatattgct

SEQ ID NO: 1920299 - DNA, 15 bp, Homo sapiens
gttggaatattgctc

SEQ ID NO: 1920300 - DNA, 15 bp, Homo sapiens
ttggaatattgctct

SEQ ID NO: 1920301 - DNA, 15 bp, Homo sapiens
tggaatattgctctt

SEQ ID NO: 1920302 - DNA, 15 bp, Homo sapiens
ggaatattgctcttt

SEQ ID NO: 1920303 - DNA, 15 bp, Homo sapiens
gaatattgctctttg

SEQ ID NO: 1920304 - DNA, 15 bp, Homo sapiens
aatattgctctttgt

SEQ ID NO: 1920305 - DNA, 15 bp, Homo sapiens
atattgctctttgtg

SEQ ID NO: 1920306 - DNA, 15 bp, Homo sapiens
tattgctctttgtga

SEQ ID NO: 1920307 - DNA, 15 bp, Homo sapiens
attgctctttgtgaa

SEQ ID NO: 1920308 - DNA, 15 bp, Homo sapiens
ttgctctttgtgaat

SEQ ID NO: 1920309 - DNA, 15 bp, Homo sapiens
tgctctttgtgaatt

SEQ ID NO: 1920310 - DNA, 15 bp, Homo sapiens
gctctttgtgaattt

SEQ ID NO: 1920311 - DNA, 15 bp, Homo sapiens
ctctttgtgaatttg

SEQ ID NO: 1920312 - DNA, 15 bp, Homo sapiens
tctttgtgaatttgt

SEQ ID NO: 1920313 - DNA, 15 bp, Homo sapiens
ctttgtgaatttgtg

SEQ ID NO: 1920314 - DNA, 15 bp, Homo sapiens
tttgtgaatttgtgc

SEQ ID NO: 1920315 - DNA, 15 bp, Homo sapiens
ttgtgaatttgtgct

SEQ ID NO: 1920316 - DNA, 15 bp, Homo sapiens
tgtgaatttgtgctt

SEQ ID NO: 1920317 - DNA, 15 bp, Homo sapiens
gtgaatttgtgctta

SEQ ID NO: 1920318 - DNA, 15 bp, Homo sapiens
tgaatttgtgcttaa

SEQ ID NO: 1920319 - DNA, 15 bp, Homo sapiens
gaatttgtgcttaag

SEQ ID NO: 1920320 - DNA, 15 bp, Homo sapiens
aatttgtgcttaagt

SEQ ID NO: 1920321 - DNA, 15 bp, Homo sapiens
atttgtgcttaagtc

SEQ ID NO: 1920322 - DNA, 15 bp, Homo sapiens
tttgtgcttaagtca

SEQ ID NO: 1920323 - DNA, 15 bp, Homo sapiens
ttgtgcttaagtcaa

SEQ ID NO: 1920324 - DNA, 15 bp, Homo sapiens
tgtgcttaagtcaat

SEQ ID NO: 1920325 - DNA, 15 bp, Homo sapiens
gtgcttaagtcaatg

SEQ ID NO: 1920326 - DNA, 15 bp, Homo sapiens
tgcttaagtcaatga

SEQ ID NO: 1920327 - DNA, 15 bp, Homo sapiens
gcttaagtcaatgaa

SEQ ID NO: 1920328 - DNA, 15 bp, Homo sapiens
cttaagtcaatgaat

SEQ ID NO: 1920329 - DNA, 15 bp, Homo sapiens
ttaagtcaatgaatg

SEQ ID NO: 1920330 - DNA, 15 bp, Homo sapiens
taagtcaatgaatgt

SEQ ID NO: 1920331 - DNA, 15 bp, Homo sapiens
aagtcaatgaatgtg

SEQ ID NO: 1920332 - DNA, 15 bp, Homo sapiens
agtcaatgaatgtgt

SEQ ID NO: 1920333 - DNA, 15 bp, Homo sapiens
gtcaatgaatgtgta

SEQ ID NO: 1920334 - DNA, 15 bp, Homo sapiens
tcaatgaatgtgtag

SEQ ID NO: 1920335 - DNA, 15 bp, Homo sapiens
caatgaatgtgtagt

SEQ ID NO: 1920336 - DNA, 15 bp, Homo sapiens
aatgaatgtgtagta

SEQ ID NO: 1920337 - DNA, 15 bp, Homo sapiens
atgaatgtgtagtat

SEQ ID NO: 1920338 - DNA, 15 bp, Homo sapiens
tgaatgtgtagtatc

SEQ ID NO: 1920339 - DNA, 15 bp, Homo sapiens
gaatgtgtagtatct

SEQ ID NO: 1920340 - DNA, 15 bp, Homo sapiens
aatgtgtagtatctc

SEQ ID NO: 1920341 - DNA, 15 bp, Homo sapiens
atgtgtagtatctcc

SEQ ID NO: 1920342 - DNA, 15 bp, Homo sapiens
tgtgtagtatctcct

SEQ ID NO: 1920343 - DNA, 15 bp, Homo sapiens
gtgtagtatctcctt

SEQ ID NO: 1920344 - DNA, 15 bp, Homo sapiens
tgtagtatctccttc

SEQ ID NO: 1920345 - DNA, 15 bp, Homo sapiens
gtagtatctccttct

SEQ ID NO: 1920346 - DNA, 15 bp, Homo sapiens
tagtatctccttctg

SEQ ID NO: 1920347 - DNA, 15 bp, Homo sapiens
agtatctccttctga

SEQ ID NO: 1920348 - DNA, 15 bp, Homo sapiens
gtatctccttctgac

SEQ ID NO: 1920349 - DNA, 15 bp, Homo sapiens
tatctccttctgaca

SEQ ID NO: 1920350 - DNA, 15 bp, Homo sapiens
atctccttctgacaa

SEQ ID NO: 1920351 - DNA, 15 bp, Homo sapiens
tctccttctgacaag

SEQ ID NO: 1920352 - DNA, 15 bp, Homo sapiens
ctccttctgacaagc

SEQ ID NO: 1920353 - DNA, 15 bp, Homo sapiens
tccttctgacaagca

SEQ ID NO: 1920354 - DNA, 15 bp, Homo sapiens
ccttctgacaagcat

SEQ ID NO: 1920355 - DNA, 15 bp, Homo sapiens
cttctgacaagcatt

SEQ ID NO: 1920356 - DNA, 15 bp, Homo sapiens
ttctgacaagcattc

SEQ ID NO: 1920357 - DNA, 15 bp, Homo sapiens
tctgacaagcattcc

SEQ ID NO: 1920358 - DNA, 15 bp, Homo sapiens
ctgacaagcattccc

SEQ ID NO: 1920359 - DNA, 15 bp, Homo sapiens
tgacaagcattccct

SEQ ID NO: 1920360 - DNA, 15 bp, Homo sapiens
gacaagcattcccta

SEQ ID NO: 1920361 - DNA, 15 bp, Homo sapiens
acaagcattccctat

SEQ ID NO: 1920362 - DNA, 15 bp, Homo sapiens
caagcattccctatt

SEQ ID NO: 1920363 - DNA, 15 bp, Homo sapiens
aagcattccctattg

SEQ ID NO: 1920364 - DNA, 15 bp, Homo sapiens
agcattccctattgg

SEQ ID NO: 1920365 - DNA, 15 bp, Homo sapiens
gcattccctattggg

SEQ ID NO: 1920366 - DNA, 15 bp, Homo sapiens
cattccctattggga

SEQ ID NO: 1920367 - DNA, 15 bp, Homo sapiens
attccctattgggat

SEQ ID NO: 1920368 - DNA, 15 bp, Homo sapiens
ttccctattgggatt

SEQ ID NO: 1920369 - DNA, 15 bp, Homo sapiens
tccctattgggattt

SEQ ID NO: 1920370 - DNA, 15 bp, Homo sapiens
ccctattgggatttt

SEQ ID NO: 1920371 - DNA, 15 bp, Homo sapiens
cctattgggatttta

SEQ ID NO: 1920372 - DNA, 15 bp, Homo sapiens
ctattgggattttaa

SEQ ID NO: 1920373 - DNA, 15 bp, Homo sapiens
tattgggattttaaa

SEQ ID NO: 1920374 - DNA, 15 bp, Homo sapiens
attgggattttaaag

SEQ ID NO: 1920375 - DNA, 15 bp, Homo sapiens
ttgggattttaaagc

SEQ ID NO: 1920376 - DNA, 15 bp, Homo sapiens
tgggattttaaagct

SEQ ID NO: 1920377 - DNA, 15 bp, Homo sapiens
gggattttaaagcta

SEQ ID NO: 1920378 - DNA, 15 bp, Homo sapiens
ggattttaaagctat

SEQ ID NO: 1920379 - DNA, 15 bp, Homo sapiens
gattttaaagctatg

SEQ ID NO: 1920380 - DNA, 15 bp, Homo sapiens
attttaaagctatgt

SEQ ID NO: 1920381 - DNA, 15 bp, Homo sapiens
ttttaaagctatgtg

SEQ ID NO: 1920382 - DNA, 15 bp, Homo sapiens
tttaaagctatgtgc

SEQ ID NO: 1920383 - DNA, 15 bp, Homo sapiens
ttaaagctatgtgca

SEQ ID NO: 1920384 - DNA, 15 bp, Homo sapiens
taaagctatgtgcac

SEQ ID NO: 1920385 - DNA, 15 bp, Homo sapiens
aaagctatgtgcaca

SEQ ID NO: 1920386 - DNA, 15 bp, Homo sapiens
aagctatgtgcacag

SEQ ID NO: 1920387 - DNA, 15 bp, Homo sapiens
agctatgtgcacaga

SEQ ID NO: 1920388 - DNA, 15 bp, Homo sapiens
gctatgtgcacagaa

SEQ ID NO: 1920389 - DNA, 15 bp, Homo sapiens
ctatgtgcacagaat

SEQ ID NO: 1920390 - DNA, 15 bp, Homo sapiens
tatgtgcacagaata

SEQ ID NO: 1920391 - DNA, 15 bp, Homo sapiens
atgtgcacagaatat

SEQ ID NO: 1920392 - DNA, 15 bp, Homo sapiens
tgtgcacagaatatt

SEQ ID NO: 1920393 - DNA, 15 bp, Homo sapiens
gtgcacagaatatta

SEQ ID NO: 1920394 - DNA, 15 bp, Homo sapiens
tgcacagaatattag

SEQ ID NO: 1920395 - DNA, 15 bp, Homo sapiens
gcacagaatattagt

SEQ ID NO: 1920396 - DNA, 15 bp, Homo sapiens
cacagaatattagtc

SEQ ID NO: 1920397 - DNA, 15 bp, Homo sapiens
acagaatattagtct

SEQ ID NO: 1920398 - DNA, 15 bp, Homo sapiens
cagaatattagtctc

SEQ ID NO: 1920399 - DNA, 15 bp, Homo sapiens
agaatattagtctct

SEQ ID NO: 1920400 - DNA, 15 bp, Homo sapiens
gaatattagtctctt

SEQ ID NO: 1920401 - DNA, 15 bp, Homo sapiens
aatattagtctcttc

SEQ ID NO: 1920402 - DNA, 15 bp, Homo sapiens
atattagtctcttct

SEQ ID NO: 1920403 - DNA, 15 bp, Homo sapiens
tattagtctcttcta

SEQ ID NO: 1920404 - DNA, 15 bp, Homo sapiens
attagtctcttctac

SEQ ID NO: 1920405 - DNA, 15 bp, Homo sapiens
ttagtctcttctaca

SEQ ID NO: 1920406 - DNA, 15 bp, Homo sapiens
tagtctcttctacat

SEQ ID NO: 1920407 - DNA, 15 bp, Homo sapiens
agtctcttctacatg

SEQ ID NO: 1920408 - DNA, 15 bp, Homo sapiens
gtctcttctacatgt

SEQ ID NO: 1920409 - DNA, 15 bp, Homo sapiens
tctcttctacatgtt

SEQ ID NO: 1920410 - DNA, 15 bp, Homo sapiens
ctcttctacatgttt

SEQ ID NO: 1920411 - DNA, 15 bp, Homo sapiens
tcttctacatgtttt

SEQ ID NO: 1920412 - DNA, 15 bp, Homo sapiens
cttctacatgtttta

SEQ ID NO: 1920413 - DNA, 15 bp, Homo sapiens
ttctacatgttttat

SEQ ID NO: 1920414 - DNA, 15 bp, Homo sapiens
tctacatgttttatt

SEQ ID NO: 1920415 - DNA, 15 bp, Homo sapiens
ctacatgttttattt

SEQ ID NO: 1920416 - DNA, 15 bp, Homo sapiens
tacatgttttatttt

SEQ ID NO: 1920417 - DNA, 15 bp, Homo sapiens
acatgttttattttt

SEQ ID NO: 1920418 - DNA, 15 bp, Homo sapiens
catgttttatttttc

SEQ ID NO: 1920419 - DNA, 15 bp, Homo sapiens
atgttttatttttct

SEQ ID NO: 1920420 - DNA, 15 bp, Homo sapiens
tgttttatttttcta

SEQ ID NO: 1920421 - DNA, 15 bp, Homo sapiens
gttttatttttctat

SEQ ID NO: 1920422 - DNA, 15 bp, Homo sapiens
ttttatttttctatt

SEQ ID NO: 1920423 - DNA, 15 bp, Homo sapiens
tttatttttctattt

SEQ ID NO: 1920424 - DNA, 15 bp, Homo sapiens
ttatttttctattta

SEQ ID NO: 1920425 - DNA, 15 bp, Homo sapiens
tatttttctatttat

SEQ ID NO: 1920426 - DNA, 15 bp, Homo sapiens
atttttctatttata

SEQ ID NO: 1920427 - DNA, 15 bp, Homo sapiens
tttttctatttataa

SEQ ID NO: 1920428 - DNA, 15 bp, Homo sapiens
ttttctatttataat

SEQ ID NO: 1920429 - DNA, 15 bp, Homo sapiens
tttctatttataatt

SEQ ID NO: 1920430 - DNA, 15 bp, Homo sapiens
ttctatttataattc

SEQ ID NO: 1920431 - DNA, 15 bp, Homo sapiens
tctatttataattcc

SEQ ID NO: 1920432 - DNA, 15 bp, Homo sapiens
ctatttataattccc

SEQ ID NO: 1920433 - DNA, 15 bp, Homo sapiens
tatttataattccct

SEQ ID NO: 1920434 - DNA, 15 bp, Homo sapiens
atttataattccctt

SEQ ID NO: 1920435 - DNA, 15 bp, Homo sapiens
tttataattcccttt

SEQ ID NO: 1920436 - DNA, 15 bp, Homo sapiens
ttataattccctttt

SEQ ID NO: 1920437 - DNA, 15 bp, Homo sapiens
tataattcccttttt

SEQ ID NO: 1920438 - DNA, 15 bp, Homo sapiens
ataattccctttttt

SEQ ID NO: 1920439 - DNA, 15 bp, Homo sapiens
taattcccttttttg

SEQ ID NO: 1920440 - DNA, 15 bp, Homo sapiens
aattcccttttttgt

SEQ ID NO: 1920441 - DNA, 15 bp, Homo sapiens
attcccttttttgtt

SEQ ID NO: 1920442 - DNA, 15 bp, Homo sapiens
ttcccttttttgttg

SEQ ID NO: 1920443 - DNA, 15 bp, Homo sapiens
tcccttttttgttgt

SEQ ID NO: 1920444 - DNA, 15 bp, Homo sapiens
cccttttttgttgtt

SEQ ID NO: 1920445 - DNA, 15 bp, Homo sapiens
ccttttttgttgtta

SEQ ID NO: 1920446 - DNA, 15 bp, Homo sapiens
cttttttgttgttat

SEQ ID NO: 1920447 - DNA, 15 bp, Homo sapiens
ttttttgttgttata

SEQ ID NO: 1920448 - DNA, 15 bp, Homo sapiens
tttttgttgttatat

SEQ ID NO: 1920449 - DNA, 15 bp, Homo sapiens
ttttgttgttatatt

SEQ ID NO: 1920450 - DNA, 15 bp, Homo sapiens
tttgttgttatattt

SEQ ID NO: 1920451 - DNA, 15 bp, Homo sapiens
ttgttgttatatttt

SEQ ID NO: 1920452 - DNA, 15 bp, Homo sapiens
tgttgttatatttta

SEQ ID NO: 1920453 - DNA, 15 bp, Homo sapiens
gttgttatattttat

SEQ ID NO: 1920454 - DNA, 15 bp, Homo sapiens
ttgttatattttata

SEQ ID NO: 1920455 - DNA, 15 bp, Homo sapiens
tgttatattttatac

SEQ ID NO: 1920456 - DNA, 15 bp, Homo sapiens
gttatattttataca

SEQ ID NO: 1920457 - DNA, 15 bp, Homo sapiens
ttatattttatacac

SEQ ID NO: 1920458 - DNA, 15 bp, Homo sapiens
tatattttatacaca

SEQ ID NO: 1920459 - DNA, 15 bp, Homo sapiens
atattttatacacag

SEQ ID NO: 1920460 - DNA, 15 bp, Homo sapiens
tattttatacacaga

SEQ ID NO: 1920461 - DNA, 15 bp, Homo sapiens
attttatacacagaa

SEQ ID NO: 1920462 - DNA, 15 bp, Homo sapiens
ttttatacacagaat

SEQ ID NO: 1920463 - DNA, 15 bp, Homo sapiens
tttatacacagaata

SEQ ID NO: 1920464 - DNA, 15 bp, Homo sapiens
ttatacacagaatag

SEQ ID NO: 1920465 - DNA, 15 bp, Homo sapiens
tatacacagaataga

SEQ ID NO: 1920466 - DNA, 15 bp, Homo sapiens
atacacagaatagat

SEQ ID NO: 1920467 - DNA, 15 bp, Homo sapiens
tacacagaatagatc

SEQ ID NO: 1920468 - DNA, 15 bp, Homo sapiens
acacagaatagatct

SEQ ID NO: 1920469 - DNA, 15 bp, Homo sapiens
cacagaatagatctt

SEQ ID NO: 1920470 - DNA, 15 bp, Homo sapiens
acagaatagatcttt

SEQ ID NO: 1920471 - DNA, 15 bp, Homo sapiens
cagaatagatctttt

SEQ ID NO: 1920472 - DNA, 15 bp, Homo sapiens
agaatagatcttttt

SEQ ID NO: 1920473 - DNA, 15 bp, Homo sapiens
gaatagatctttttt

SEQ ID NO: 1920474 - DNA, 15 bp, Homo sapiens
aatagatcttttttc

SEQ ID NO: 1920475 - DNA, 15 bp, Homo sapiens
atagatcttttttct

SEQ ID NO: 1920476 - DNA, 15 bp, Homo sapiens
tagatcttttttcta

SEQ ID NO: 1920477 - DNA, 15 bp, Homo sapiens
agatcttttttctaa

SEQ ID NO: 1920478 - DNA, 15 bp, Homo sapiens
gatcttttttctaac

SEQ ID NO: 1920479 - DNA, 15 bp, Homo sapiens
atcttttttctaaca

SEQ ID NO: 1920480 - DNA, 15 bp, Homo sapiens
tcttttttctaacac

SEQ ID NO: 1920481 - DNA, 15 bp, Homo sapiens
cttttttctaacaca

SEQ ID NO: 1920482 - DNA, 15 bp, Homo sapiens
ttttttctaacacat

SEQ ID NO: 1920483 - DNA, 15 bp, Homo sapiens
tttttctaacacata

SEQ ID NO: 1920484 - DNA, 15 bp, Homo sapiens
ttttctaacacatat

SEQ ID NO: 1920485 - DNA, 15 bp, Homo sapiens
tttctaacacatatt

SEQ ID NO: 1920486 - DNA, 15 bp, Homo sapiens
ttctaacacatattt

SEQ ID NO: 1920487 - DNA, 15 bp, Homo sapiens
tctaacacatatttg

SEQ ID NO: 1920488 - DNA, 15 bp, Homo sapiens
ctaacacatatttga

SEQ ID NO: 1920489 - DNA, 15 bp, Homo sapiens
taacacatatttgaa

SEQ ID NO: 1920490 - DNA, 15 bp, Homo sapiens
aacacatatttgaac

SEQ ID NO: 1920491 - DNA, 15 bp, Homo sapiens
acacatatttgaact

SEQ ID NO: 1920492 - DNA, 15 bp, Homo sapiens
cacatatttgaactg

SEQ ID NO: 1920493 - DNA, 15 bp, Homo sapiens
acatatttgaactga

SEQ ID NO: 1920494 - DNA, 15 bp, Homo sapiens
catatttgaactgaa

SEQ ID NO: 1920495 - DNA, 15 bp, Homo sapiens
atatttgaactgaat

SEQ ID NO: 1920496 - DNA, 15 bp, Homo sapiens
tatttgaactgaata

SEQ ID NO: 1920497 - DNA, 15 bp, Homo sapiens
atttgaactgaataa

SEQ ID NO: 1920498 - DNA, 15 bp, Homo sapiens
tttgaactgaataac

SEQ ID NO: 1920499 - DNA, 15 bp, Homo sapiens
ttgaactgaataaca

SEQ ID NO: 1920500 - DNA, 15 bp, Homo sapiens
tgaactgaataacag

SEQ ID NO: 1920501 - DNA, 15 bp, Homo sapiens
gaactgaataacaga

SEQ ID NO: 1920502 - DNA, 15 bp, Homo sapiens
aactgaataacagac

SEQ ID NO: 1920503 - DNA, 15 bp, Homo sapiens
actgaataacagact

SEQ ID NO: 1920504 - DNA, 15 bp, Homo sapiens
ctgaataacagactt

SEQ ID NO: 1920505 - DNA, 15 bp, Homo sapiens
tgaataacagactta

SEQ ID NO: 1920506 - DNA, 15 bp, Homo sapiens
gaataacagacttaa

SEQ ID NO: 1920507 - DNA, 15 bp, Homo sapiens
aataacagacttaaa

SEQ ID NO: 1920508 - DNA, 15 bp, Homo sapiens
ataacagacttaaag

SEQ ID NO: 1920509 - DNA, 15 bp, Homo sapiens
taacagacttaaaga

SEQ ID NO: 1920510 - DNA, 15 bp, Homo sapiens
aacagacttaaagaa

SEQ ID NO: 1920511 - DNA, 15 bp, Homo sapiens
acagacttaaagaaa

SEQ ID NO: 1920512 - DNA, 15 bp, Homo sapiens
cagacttaaagaaag

SEQ ID NO: 1920513 - DNA, 15 bp, Homo sapiens
agacttaaagaaagc

SEQ ID NO: 1920514 - DNA, 15 bp, Homo sapiens
gacttaaagaaagcc

SEQ ID NO: 1920515 - DNA, 15 bp, Homo sapiens
acttaaagaaagcct

SEQ ID NO: 1920516 - DNA, 15 bp, Homo sapiens
cttaaagaaagcctt

SEQ ID NO: 1920517 - DNA, 15 bp, Homo sapiens
ttaaagaaagccttt

SEQ ID NO: 1920518 - DNA, 15 bp, Homo sapiens
taaagaaagcctttg

SEQ ID NO: 1920519 - DNA, 15 bp, Homo sapiens
aaagaaagcctttgt

SEQ ID NO: 1920520 - DNA, 15 bp, Homo sapiens
aagaaagcctttgtt

SEQ ID NO: 1920521 - DNA, 15 bp, Homo sapiens
agaaagcctttgttc

SEQ ID NO: 1920522 - DNA, 15 bp, Homo sapiens
gaaagcctttgttca

SEQ ID NO: 1920523 - DNA, 15 bp, Homo sapiens
aaagcctttgttcac

SEQ ID NO: 1920524 - DNA, 15 bp, Homo sapiens
aagcctttgttcaca

SEQ ID NO: 1920525 - DNA, 15 bp, Homo sapiens
agcctttgttcacat

SEQ ID NO: 1920526 - DNA, 15 bp, Homo sapiens
gcctttgttcacatt

SEQ ID NO: 1920527 - DNA, 15 bp, Homo sapiens
cctttgttcacattg

SEQ ID NO: 1920528 - DNA, 15 bp, Homo sapiens
ctttgttcacattgc

SEQ ID NO: 1920529 - DNA, 15 bp, Homo sapiens
tttgttcacattgct

SEQ ID NO: 1920530 - DNA, 15 bp, Homo sapiens
ttgttcacattgcta

SEQ ID NO: 1920531 - DNA, 15 bp, Homo sapiens
tgttcacattgctat

SEQ ID NO: 1920532 - DNA, 15 bp, Homo sapiens
gttcacattgctatt

SEQ ID NO: 1920533 - DNA, 15 bp, Homo sapiens
ttcacattgctattt

SEQ ID NO: 1920534 - DNA, 15 bp, Homo sapiens
tcacattgctattta

SEQ ID NO: 1920535 - DNA, 15 bp, Homo sapiens
cacattgctatttac

SEQ ID NO: 1920536 - DNA, 15 bp, Homo sapiens
acattgctatttact

SEQ ID NO: 1920537 - DNA, 15 bp, Homo sapiens
cattgctatttactt

SEQ ID NO: 1920538 - DNA, 15 bp, Homo sapiens
attgctatttacttt

SEQ ID NO: 1920539 - DNA, 15 bp, Homo sapiens
ttgctatttactttt

SEQ ID NO: 1920540 - DNA, 15 bp, Homo sapiens
tgctatttacttttg

SEQ ID NO: 1920541 - DNA, 15 bp, Homo sapiens
gctatttacttttgt

SEQ ID NO: 1920542 - DNA, 15 bp, Homo sapiens
tatttacttttgtgt

SEQ ID NO: 1920543 - DNA, 15 bp, Homo sapiens
atttacttttgtgtt

SEQ ID NO: 1920544 - DNA, 15 bp, Homo sapiens
tttacttttgtgttt

SEQ ID NO: 1920545 - DNA, 15 bp, Homo sapiens
ttacttttgtgtttg

SEQ ID NO: 1920546 - DNA, 15 bp, Homo sapiens
tacttttgtgtttgg

SEQ ID NO: 1920547 - DNA, 15 bp, Homo sapiens
acttttgtgtttggg

SEQ ID NO: 1920548 - DNA, 15 bp, Homo sapiens
cttttgtgtttgggg

SEQ ID NO: 1920549 - DNA, 15 bp, Homo sapiens
ttttgtgtttggggg

SEQ ID NO: 1920550 - DNA, 15 bp, Homo sapiens
tttgtgtttggggga

SEQ ID NO: 1920551 - DNA, 15 bp, Homo sapiens
ttgtgtttgggggaa

SEQ ID NO: 1920552 - DNA, 15 bp, Homo sapiens
tgtgtttgggggaaa

SEQ ID NO: 1920553 - DNA, 15 bp, Homo sapiens
gtgtttgggggaaaa

SEQ ID NO: 1920554 - DNA, 15 bp, Homo sapiens
tgtttgggggaaaat

SEQ ID NO: 1920555 - DNA, 15 bp, Homo sapiens
gtttgggggaaaata

SEQ ID NO: 1920556 - DNA, 15 bp, Homo sapiens
tttgggggaaaatac

SEQ ID NO: 1920557 - DNA, 15 bp, Homo sapiens
ttgggggaaaatacg

SEQ ID NO: 1920558 - DNA, 15 bp, Homo sapiens
tgggggaaaatacga

SEQ ID NO: 1920559 - DNA, 15 bp, Homo sapiens
gggggaaaatacgag

SEQ ID NO: 1920560 - DNA, 15 bp, Homo sapiens
ggggaaaatacgagg

SEQ ID NO: 1920561 - DNA, 15 bp, Homo sapiens
gggaaaatacgaggg

SEQ ID NO: 1920562 - DNA, 15 bp, Homo sapiens
ggaaaatacgaggga

SEQ ID NO: 1920563 - DNA, 15 bp, Homo sapiens
gaaaatacgagggat

SEQ ID NO: 1920564 - DNA, 15 bp, Homo sapiens
aaaatacgagggatt

SEQ ID NO: 1920565 - DNA, 15 bp, Homo sapiens
aaatacgagggattg

SEQ ID NO: 1920566 - DNA, 15 bp, Homo sapiens
aatacgagggattga

SEQ ID NO: 1920567 - DNA, 15 bp, Homo sapiens
atacgagggattgat

SEQ ID NO: 1920568 - DNA, 15 bp, Homo sapiens
tacgagggattgatt

SEQ ID NO: 1920569 - DNA, 15 bp, Homo sapiens
acgagggattgattt

SEQ ID NO: 1920570 - DNA, 15 bp, Homo sapiens
cgagggattgatttt

SEQ ID NO: 1920571 - DNA, 15 bp, Homo sapiens
gagggattgatttta

SEQ ID NO: 1920572 - DNA, 15 bp, Homo sapiens
agggattgattttaa

SEQ ID NO: 1920573 - DNA, 15 bp, Homo sapiens
gggattgattttaaa

SEQ ID NO: 1920574 - DNA, 15 bp, Homo sapiens
ggattgattttaaat

SEQ ID NO: 1920575 - DNA, 15 bp, Homo sapiens
gattgattttaaata

SEQ ID NO: 1920576 - DNA, 15 bp, Homo sapiens
attgattttaaataa

SEQ ID NO: 1920577 - DNA, 15 bp, Homo sapiens
ttgattttaaataaa

SEQ ID NO: 1920578 - DNA, 15 bp, Homo sapiens
tgattttaaataaaa

SEQ ID NO: 1920579 - DNA, 15 bp, Homo sapiens
gattttaaataaaaa

SEQ ID NO: 1920580 - DNA, 15 bp, Homo sapiens
attttaaataaaaaa

SEQ ID NO: 1920581 - DNA, 15 bp, Homo sapiens
ttttaaataaaaaac

SEQ ID NO: 1920582 - DNA, 15 bp, Homo sapiens
tttaaataaaaaaca

SEQ ID NO: 1920583 - DNA, 15 bp, Homo sapiens
ttaaataaaaaacat

SEQ ID NO: 1920584 - DNA, 15 bp, Homo sapiens
taaataaaaaacatt

SEQ ID NO: 1920585 - DNA, 15 bp, Homo sapiens
aaataaaaaacattc

SEQ ID NO: 1920586 - DNA, 15 bp, Homo sapiens
aataaaaaacattcc

SEQ ID NO: 1920587 - DNA, 15 bp, Homo sapiens
ataaaaaacattcca

SEQ ID NO: 1920588 - DNA, 15 bp, Homo sapiens
taaaaaacattccat

SEQ ID NO: 1920589 - DNA, 15 bp, Homo sapiens
aaaaaacattccatc

SEQ ID NO: 1920590 - DNA, 15 bp, Homo sapiens
aaaaacattccatct

SEQ ID NO: 1920591 - DNA, 15 bp, Homo sapiens
aaaacattccatctt

SEQ ID NO: 1920592 - DNA, 15 bp, Homo sapiens
aaacattccatcttt

SEQ ID NO: 1920593 - DNA, 15 bp, Homo sapiens
aacattccatctttc

SEQ ID NO: 1920594 - DNA, 15 bp, Homo sapiens
acattccatctttca

SEQ ID NO: 1920595 - DNA, 15 bp, Homo sapiens
cattccatctttcat

SEQ ID NO: 1920596 - DNA, 15 bp, Homo sapiens
attccatctttcatt

SEQ ID NO: 1920597 - DNA, 15 bp, Homo sapiens
ttccatctttcattt

SEQ ID NO: 1920598 - DNA, 15 bp, Homo sapiens
tccatctttcattta

SEQ ID NO: 1920599 - DNA, 15 bp, Homo sapiens
ccatctttcatttaa

SEQ ID NO: 1920600 - DNA, 15 bp, Homo sapiens
catctttcatttaat

SEQ ID NO: 1920601 - DNA, 15 bp, Homo sapiens
atctttcatttaata

SEQ ID NO: 1920602 - DNA, 15 bp, Homo sapiens
tctttcatttaatat

SEQ ID NO: 1920603 - DNA, 15 bp, Homo sapiens
ctttcatttaatatc

SEQ ID NO: 1920604 - DNA, 15 bp, Homo sapiens
tttcatttaatatca

SEQ ID NO: 1920605 - DNA, 15 bp, Homo sapiens
ttcatttaatatcaa

SEQ ID NO: 1920606 - DNA, 15 bp, Homo sapiens
tcatttaatatcaat

SEQ ID NO: 1920607 - DNA, 15 bp, Homo sapiens
catttaatatcaata

SEQ ID NO: 1920608 - DNA, 15 bp, Homo sapiens
atttaatatcaatat

SEQ ID NO: 1920609 - DNA, 15 bp, Homo sapiens
tttaatatcaatatc

SEQ ID NO: 1920610 - DNA, 15 bp, Homo sapiens
ttaatatcaatatca

SEQ ID NO: 1920611 - DNA, 15 bp, Homo sapiens
taatatcaatatcaa

SEQ ID NO: 1920612 - DNA, 15 bp, Homo sapiens
aatatcaatatcaaa

SEQ ID NO: 1920613 - DNA, 15 bp, Homo sapiens
atatcaatatcaaaa

SEQ ID NO: 1920614 - DNA, 15 bp, Homo sapiens
tatcaatatcaaaag

SEQ ID NO: 1920615 - DNA, 15 bp, Homo sapiens
atcaatatcaaaaga

SEQ ID NO: 1920616 - DNA, 15 bp, Homo sapiens
tcaatatcaaaagaa

SEQ ID NO: 1920617 - DNA, 15 bp, Homo sapiens
caatatcaaaagaag

SEQ ID NO: 1920618 - DNA, 15 bp, Homo sapiens
aatatcaaaagaaga

SEQ ID NO: 1920619 - DNA, 15 bp, Homo sapiens
atatcaaaagaagaa

SEQ ID NO: 1920620 - DNA, 15 bp, Homo sapiens
tatcaaaagaagaag

SEQ ID NO: 1920621 - DNA, 15 bp, Homo sapiens
atcaaaagaagaaga

SEQ ID NO: 1920622 - DNA, 15 bp, Homo sapiens
tcaaaagaagaagac

SEQ ID NO: 1920623 - DNA, 15 bp, Homo sapiens
caaaagaagaagaca

SEQ ID NO: 1920624 - DNA, 15 bp, Homo sapiens
aaaagaagaagacaa

SEQ ID NO: 1920625 - DNA, 15 bp, Homo sapiens
aaagaagaagacaaa

SEQ ID NO: 1920626 - DNA, 15 bp, Homo sapiens
aagaagaagacaaac

SEQ ID NO: 1920627 - DNA, 15 bp, Homo sapiens
agaagaagacaaaca

SEQ ID NO: 1920628 - DNA, 15 bp, Homo sapiens
gaagaagacaaacat

SEQ ID NO: 1920629 - DNA, 15 bp, Homo sapiens
aagaagacaaacatc

SEQ ID NO: 1920630 - DNA, 15 bp, Homo sapiens
agaagacaaacatct

SEQ ID NO: 1920631 - DNA, 15 bp, Homo sapiens
gaagacaaacatcta

SEQ ID NO: 1920632 - DNA, 15 bp, Homo sapiens
aagacaaacatctat

SEQ ID NO: 1920633 - DNA, 15 bp, Homo sapiens
agacaaacatctatc

SEQ ID NO: 1920634 - DNA, 15 bp, Homo sapiens
gacaaacatctatct

SEQ ID NO: 1920635 - DNA, 15 bp, Homo sapiens
acaaacatctatctt

SEQ ID NO: 1920636 - DNA, 15 bp, Homo sapiens
caaacatctatcttt

SEQ ID NO: 1920637 - DNA, 15 bp, Homo sapiens
aaacatctatctttc

SEQ ID NO: 1920638 - DNA, 15 bp, Homo sapiens
aacatctatctttct

SEQ ID NO: 1920639 - DNA, 15 bp, Homo sapiens
acatctatctttctc

SEQ ID NO: 1920640 - DNA, 15 bp, Homo sapiens
catctatctttctca

SEQ ID NO: 1920641 - DNA, 15 bp, Homo sapiens
atctatctttctcat

SEQ ID NO: 1920642 - DNA, 15 bp, Homo sapiens
tctatctttctcatc

SEQ ID NO: 1920643 - DNA, 15 bp, Homo sapiens
ctatctttctcatct

SEQ ID NO: 1920644 - DNA, 15 bp, Homo sapiens
tatctttctcatcta

SEQ ID NO: 1920645 - DNA, 15 bp, Homo sapiens
atctttctcatctat

SEQ ID NO: 1920646 - DNA, 15 bp, Homo sapiens
tctttctcatctata

SEQ ID NO: 1920647 - DNA, 15 bp, Homo sapiens
ctttctcatctatat

SEQ ID NO: 1920648 - DNA, 15 bp, Homo sapiens
tttctcatctatatt

SEQ ID NO: 1920649 - DNA, 15 bp, Homo sapiens
ttctcatctatattt

SEQ ID NO: 1920650 - DNA, 15 bp, Homo sapiens
tctcatctatattta

SEQ ID NO: 1920651 - DNA, 15 bp, Homo sapiens
ctcatctatatttaa

SEQ ID NO: 1920652 - DNA, 15 bp, Homo sapiens
tcatctatatttaag

SEQ ID NO: 1920653 - DNA, 15 bp, Homo sapiens
catctatatttaagt

SEQ ID NO: 1920654 - DNA, 15 bp, Homo sapiens
atctatatttaagta

SEQ ID NO: 1920655 - DNA, 15 bp, Homo sapiens
tctatatttaagtac

SEQ ID NO: 1920656 - DNA, 15 bp, Homo sapiens
ctatatttaagtacc

SEQ ID NO: 1920657 - DNA, 15 bp, Homo sapiens
tatatttaagtacct

SEQ ID NO: 1920658 - DNA, 15 bp, Homo sapiens
atatttaagtacctt

SEQ ID NO: 1920659 - DNA, 15 bp, Homo sapiens
tatttaagtaccttt

SEQ ID NO: 1920660 - DNA, 15 bp, Homo sapiens
atttaagtacctttt

SEQ ID NO: 1920661 - DNA, 15 bp, Homo sapiens
tttaagtaccttttt

SEQ ID NO: 1920662 - DNA, 15 bp, Homo sapiens
ttaagtacctttttg

SEQ ID NO: 1920663 - DNA, 15 bp, Homo sapiens
taagtacctttttgt

SEQ ID NO: 1920664 - DNA, 15 bp, Homo sapiens
aagtacctttttgta

SEQ ID NO: 1920665 - DNA, 15 bp, Homo sapiens
agtacctttttgtaa

SEQ ID NO: 1920666 - DNA, 15 bp, Homo sapiens
gtacctttttgtaat

SEQ ID NO: 1920667 - DNA, 15 bp, Homo sapiens
tacctttttgtaatg

SEQ ID NO: 1920668 - DNA, 15 bp, Homo sapiens
acctttttgtaatgt

SEQ ID NO: 1920669 - DNA, 15 bp, Homo sapiens
cctttttgtaatgta

SEQ ID NO: 1920670 - DNA, 15 bp, Homo sapiens
ctttttgtaatgtag

SEQ ID NO: 1920671 - DNA, 15 bp, Homo sapiens
tttttgtaatgtagt

SEQ ID NO: 1920672 - DNA, 15 bp, Homo sapiens
ttttgtaatgtagta

SEQ ID NO: 1920673 - DNA, 15 bp, Homo sapiens
tttgtaatgtagtat

SEQ ID NO: 1920674 - DNA, 15 bp, Homo sapiens
ttgtaatgtagtatc

SEQ ID NO: 1920675 - DNA, 15 bp, Homo sapiens
tgtaatgtagtatca

SEQ ID NO: 1920676 - DNA, 15 bp, Homo sapiens
gtaatgtagtatcaa

SEQ ID NO: 1920677 - DNA, 15 bp, Homo sapiens
taatgtagtatcaaa

SEQ ID NO: 1920678 - DNA, 15 bp, Homo sapiens
aatgtagtatcaaag

SEQ ID NO: 1920679 - DNA, 15 bp, Homo sapiens
atgtagtatcaaagt

SEQ ID NO: 1920680 - DNA, 15 bp, Homo sapiens
tgtagtatcaaagtt

SEQ ID NO: 1920681 - DNA, 15 bp, Homo sapiens
gtagtatcaaagttt

SEQ ID NO: 1920682 - DNA, 15 bp, Homo sapiens
tagtatcaaagtttt

SEQ ID NO: 1920683 - DNA, 15 bp, Homo sapiens
agtatcaaagttttt

SEQ ID NO: 1920684 - DNA, 15 bp, Homo sapiens
gtatcaaagtttttt

SEQ ID NO: 1920685 - DNA, 15 bp, Homo sapiens
tatcaaagtttttta

SEQ ID NO: 1920686 - DNA, 15 bp, Homo sapiens
atcaaagttttttag

SEQ ID NO: 1920687 - DNA, 15 bp, Homo sapiens
tcaaagttttttagg

SEQ ID NO: 1920688 - DNA, 15 bp, Homo sapiens
caaagttttttaggt

SEQ ID NO: 1920689 - DNA, 15 bp, Homo sapiens
aaagttttttaggta

SEQ ID NO: 1920690 - DNA, 15 bp, Homo sapiens
aagttttttaggtaa

SEQ ID NO: 1920691 - DNA, 15 bp, Homo sapiens
agttttttaggtaat

SEQ ID NO: 1920692 - DNA, 15 bp, Homo sapiens
gttttttaggtaatg

SEQ ID NO: 1920693 - DNA, 15 bp, Homo sapiens
ttttttaggtaatgc

SEQ ID NO: 1920694 - DNA, 15 bp, Homo sapiens
tttttaggtaatgca

SEQ ID NO: 1920695 - DNA, 15 bp, Homo sapiens
ttttaggtaatgcaa

SEQ ID NO: 1920696 - DNA, 15 bp, Homo sapiens
tttaggtaatgcaaa

SEQ ID NO: 1920697 - DNA, 15 bp, Homo sapiens
ttaggtaatgcaaaa

SEQ ID NO: 1920698 - DNA, 15 bp, Homo sapiens
taggtaatgcaaaat

SEQ ID NO: 1920699 - DNA, 15 bp, Homo sapiens
aggtaatgcaaaatt

SEQ ID NO: 1920700 - DNA, 15 bp, Homo sapiens
ggtaatgcaaaattt

SEQ ID NO: 1920701 - DNA, 15 bp, Homo sapiens
gtaatgcaaaatttt

SEQ ID NO: 1920702 - DNA, 15 bp, Homo sapiens
taatgcaaaatttta

SEQ ID NO: 1920703 - DNA, 15 bp, Homo sapiens
aatgcaaaattttac

SEQ ID NO: 1920704 - DNA, 15 bp, Homo sapiens
atgcaaaattttaca

SEQ ID NO: 1920705 - DNA, 15 bp, Homo sapiens
tgcaaaattttacaa

SEQ ID NO: 1920706 - DNA, 15 bp, Homo sapiens
gcaaaattttacaaa

SEQ ID NO: 1920707 - DNA, 15 bp, Homo sapiens
caaaattttacaaat

SEQ ID NO: 1920708 - DNA, 15 bp, Homo sapiens
aaaattttacaaatc

SEQ ID NO: 1920709 - DNA, 15 bp, Homo sapiens
aaattttacaaatca

SEQ ID NO: 1920710 - DNA, 15 bp, Homo sapiens
aattttacaaatcat

SEQ ID NO: 1920711 - DNA, 15 bp, Homo sapiens
attttacaaatcatt

SEQ ID NO: 1920712 - DNA, 15 bp, Homo sapiens
ttttacaaatcattt

SEQ ID NO: 1920713 - DNA, 15 bp, Homo sapiens
tttacaaatcatttg

SEQ ID NO: 1920714 - DNA, 15 bp, Homo sapiens
ttacaaatcatttgt

SEQ ID NO: 1920715 - DNA, 15 bp, Homo sapiens
tacaaatcatttgtg

SEQ ID NO: 1920716 - DNA, 15 bp, Homo sapiens
acaaatcatttgtgg

SEQ ID NO: 1920717 - DNA, 15 bp, Homo sapiens
caaatcatttgtgga

SEQ ID NO: 1920718 - DNA, 15 bp, Homo sapiens
aaatcatttgtggaa

SEQ ID NO: 1920719 - DNA, 15 bp, Homo sapiens
aatcatttgtggaat

SEQ ID NO: 1920720 - DNA, 15 bp, Homo sapiens
atcatttgtggaatg

SEQ ID NO: 1920721 - DNA, 15 bp, Homo sapiens
tcatttgtggaatga

SEQ ID NO: 1920722 - DNA, 15 bp, Homo sapiens
catttgtggaatgaa

SEQ ID NO: 1920723 - DNA, 15 bp, Homo sapiens
atttgtggaatgaat

SEQ ID NO: 1920724 - DNA, 15 bp, Homo sapiens
tttgtggaatgaatg

SEQ ID NO: 1920725 - DNA, 15 bp, Homo sapiens
ttgtggaatgaatgg

SEQ ID NO: 1920726 - DNA, 15 bp, Homo sapiens
tgtggaatgaatggt

SEQ ID NO: 1920727 - DNA, 15 bp, Homo sapiens
gtggaatgaatggta

SEQ ID NO: 1920728 - DNA, 15 bp, Homo sapiens
tggaatgaatggtaa

SEQ ID NO: 1920729 - DNA, 15 bp, Homo sapiens
ggaatgaatggtaaa

SEQ ID NO: 1920730 - DNA, 15 bp, Homo sapiens
gaatgaatggtaaaa

SEQ ID NO: 1920731 - DNA, 15 bp, Homo sapiens
aatgaatggtaaaac

SEQ ID NO: 1920732 - DNA, 15 bp, Homo sapiens
atgaatggtaaaact

SEQ ID NO: 1920733 - DNA, 15 bp, Homo sapiens
tgaatggtaaaacta

SEQ ID NO: 1920734 - DNA, 15 bp, Homo sapiens
gaatggtaaaactaa

SEQ ID NO: 1920735 - DNA, 15 bp, Homo sapiens
aatggtaaaactaat

SEQ ID NO: 1920736 - DNA, 15 bp, Homo sapiens
atggtaaaactaatc

SEQ ID NO: 1920737 - DNA, 15 bp, Homo sapiens
tggtaaaactaatct

SEQ ID NO: 1920738 - DNA, 15 bp, Homo sapiens
ggtaaaactaatctg

SEQ ID NO: 1920739 - DNA, 15 bp, Homo sapiens
gtaaaactaatctga

SEQ ID NO: 1920740 - DNA, 15 bp, Homo sapiens
taaaactaatctgat

SEQ ID NO: 1920741 - DNA, 15 bp, Homo sapiens
aaaactaatctgatg

SEQ ID NO: 1920742 - DNA, 15 bp, Homo sapiens
aaactaatctgatga

SEQ ID NO: 1920743 - DNA, 15 bp, Homo sapiens
aactaatctgatgaa

SEQ ID NO: 1920744 - DNA, 15 bp, Homo sapiens
actaatctgatgaaa

SEQ ID NO: 1920745 - DNA, 15 bp, Homo sapiens
ctaatctgatgaaat

SEQ ID NO: 1920746 - DNA, 15 bp, Homo sapiens
taatctgatgaaatg

SEQ ID NO: 1920747 - DNA, 15 bp, Homo sapiens
aatctgatgaaatgg

SEQ ID NO: 1920748 - DNA, 15 bp, Homo sapiens
atctgatgaaatgga

SEQ ID NO: 1920749 - DNA, 15 bp, Homo sapiens
tctgatgaaatggaa

SEQ ID NO: 1920750 - DNA, 15 bp, Homo sapiens
ctgatgaaatggaaa

SEQ ID NO: 1920751 - DNA, 15 bp, Homo sapiens
tgatgaaatggaaaa

SEQ ID NO: 1920752 - DNA, 15 bp, Homo sapiens
gatgaaatggaaaat

SEQ ID NO: 1920753 - DNA, 15 bp, Homo sapiens
atgaaatggaaaatt

SEQ ID NO: 1920754 - DNA, 15 bp, Homo sapiens
tgaaatggaaaatta

SEQ ID NO: 1920755 - DNA, 15 bp, Homo sapiens
gaaatggaaaattat

SEQ ID NO: 1920756 - DNA, 15 bp, Homo sapiens
aaatggaaaattatt

SEQ ID NO: 1920757 - DNA, 15 bp, Homo sapiens
aatggaaaattattc

SEQ ID NO: 1920758 - DNA, 15 bp, Homo sapiens
atggaaaattattct

SEQ ID NO: 1920759 - DNA, 15 bp, Homo sapiens
tggaaaattattctg

SEQ ID NO: 1920760 - DNA, 15 bp, Homo sapiens
ggaaaattattctgc

SEQ ID NO: 1920761 - DNA, 15 bp, Homo sapiens
gaaaattattctgca

SEQ ID NO: 1920762 - DNA, 15 bp, Homo sapiens
aaaattattctgcaa

SEQ ID NO: 1920763 - DNA, 15 bp, Homo sapiens
aaattattctgcaat

SEQ ID NO: 1920764 - DNA, 15 bp, Homo sapiens
aattattctgcaata

SEQ ID NO: 1920765 - DNA, 15 bp, Homo sapiens
attattctgcaatat

SEQ ID NO: 1920766 - DNA, 15 bp, Homo sapiens
ttattctgcaatatt

SEQ ID NO: 1920767 - DNA, 15 bp, Homo sapiens
tattctgcaatattg

SEQ ID NO: 1920768 - DNA, 15 bp, Homo sapiens
attctgcaatattgt

SEQ ID NO: 1920769 - DNA, 15 bp, Homo sapiens
ttctgcaatattgta

SEQ ID NO: 1920770 - DNA, 15 bp, Homo sapiens
tctgcaatattgtaa

SEQ ID NO: 1920771 - DNA, 15 bp, Homo sapiens
ctgcaatattgtaat

SEQ ID NO: 1920772 - DNA, 15 bp, Homo sapiens
tgcaatattgtaatt

SEQ ID NO: 1920773 - DNA, 15 bp, Homo sapiens
gcaatattgtaattc

SEQ ID NO: 1920774 - DNA, 15 bp, Homo sapiens
caatattgtaattca

SEQ ID NO: 1920775 - DNA, 15 bp, Homo sapiens
aatattgtaattcat

SEQ ID NO: 1920776 - DNA, 15 bp, Homo sapiens
atattgtaattcata

SEQ ID NO: 1920777 - DNA, 15 bp, Homo sapiens
tattgtaattcatag

SEQ ID NO: 1920778 - DNA, 15 bp, Homo sapiens
attgtaattcatagt

SEQ ID NO: 1920779 - DNA, 15 bp, Homo sapiens
ttgtaattcatagtt

SEQ ID NO: 1920780 - DNA, 15 bp, Homo sapiens
tgtaattcatagttt

SEQ ID NO: 1920781 - DNA, 15 bp, Homo sapiens
gtaattcatagtttg

SEQ ID NO: 1920782 - DNA, 15 bp, Homo sapiens
taattcatagtttga

SEQ ID NO: 1920783 - DNA, 15 bp, Homo sapiens
aattcatagtttgac

SEQ ID NO: 1920784 - DNA, 15 bp, Homo sapiens
attcatagtttgact

SEQ ID NO: 1920785 - DNA, 15 bp, Homo sapiens
ttcatagtttgactt

SEQ ID NO: 1920786 - DNA, 15 bp, Homo sapiens
tcatagtttgacttt

SEQ ID NO: 1920787 - DNA, 15 bp, Homo sapiens
catagtttgactttt

SEQ ID NO: 1920788 - DNA, 15 bp, Homo sapiens
atagtttgacttttc

SEQ ID NO: 1920789 - DNA, 15 bp, Homo sapiens
tagtttgacttttca

SEQ ID NO: 1920790 - DNA, 15 bp, Homo sapiens
agtttgacttttcat

SEQ ID NO: 1920791 - DNA, 15 bp, Homo sapiens
gtttgacttttcata

SEQ ID NO: 1920792 - DNA, 15 bp, Homo sapiens
tttgacttttcataa

SEQ ID NO: 1920793 - DNA, 15 bp, Homo sapiens
ttgacttttcataag

SEQ ID NO: 1920794 - DNA, 15 bp, Homo sapiens
tgacttttcataagc

SEQ ID NO: 1920795 - DNA, 15 bp, Homo sapiens
gacttttcataagca

SEQ ID NO: 1920796 - DNA, 15 bp, Homo sapiens
acttttcataagcaa

SEQ ID NO: 1920797 - DNA, 15 bp, Homo sapiens
cttttcataagcaaa

SEQ ID NO: 1920798 - DNA, 15 bp, Homo sapiens
ttttcataagcaaat

SEQ ID NO: 1920799 - DNA, 15 bp, Homo sapiens
tttcataagcaaata

SEQ ID NO: 1920800 - DNA, 15 bp, Homo sapiens
ttcataagcaaataa

SEQ ID NO: 1920801 - DNA, 15 bp, Homo sapiens
tcataagcaaataaa

SEQ ID NO: 1920802 - DNA, 15 bp, Homo sapiens
cataagcaaataaat

SEQ ID NO: 1920803 - DNA, 15 bp, Homo sapiens
ataagcaaataaatc

SEQ ID NO: 1920804 - DNA, 15 bp, Homo sapiens
taagcaaataaatcc

SEQ ID NO: 1920805 - DNA, 15 bp, Homo sapiens
aagcaaataaatccc

SEQ ID NO: 1920806 - DNA, 15 bp, Homo sapiens
agcaaataaatccct

SEQ ID NO: 1920807 - DNA, 15 bp, Homo sapiens
gcaaataaatcccta

SEQ ID NO: 1920808 - DNA, 15 bp, Homo sapiens
caaataaatccctag

SEQ ID NO: 1920809 - DNA, 15 bp, Homo sapiens
aaataaatccctagg

SEQ ID NO: 1920810 - DNA, 15 bp, Homo sapiens
aataaatccctagga

SEQ ID NO: 1920811 - DNA, 15 bp, Homo sapiens
ataaatccctaggat

SEQ ID NO: 1920812 - DNA, 15 bp, Homo sapiens
taaatccctaggatg

SEQ ID NO: 1920813 - DNA, 15 bp, Homo sapiens
aaatccctaggatgt

SEQ ID NO: 1920814 - DNA, 15 bp, Homo sapiens
aatccctaggatgta

SEQ ID NO: 1920815 - DNA, 15 bp, Homo sapiens
atccctaggatgtaa

SEQ ID NO: 1920816 - DNA, 15 bp, Homo sapiens
tccctaggatgtaat

SEQ ID NO: 1920817 - DNA, 15 bp, Homo sapiens
ccctaggatgtaatc

SEQ ID NO: 1920818 - DNA, 15 bp, Homo sapiens
cctaggatgtaatca

SEQ ID NO: 1920819 - DNA, 15 bp, Homo sapiens
ctaggatgtaatcag

SEQ ID NO: 1920820 - DNA, 15 bp, Homo sapiens
taggatgtaatcagg

SEQ ID NO: 1920821 - DNA, 15 bp, Homo sapiens
aggatgtaatcagga

SEQ ID NO: 1920822 - DNA, 15 bp, Homo sapiens
ggatgtaatcaggac

SEQ ID NO: 1920823 - DNA, 15 bp, Homo sapiens
gatgtaatcaggact

SEQ ID NO: 1920824 - DNA, 15 bp, Homo sapiens
atgtaatcaggactt

SEQ ID NO: 1920825 - DNA, 15 bp, Homo sapiens
tgtaatcaggacttc

SEQ ID NO: 1920826 - DNA, 15 bp, Homo sapiens
gtaatcaggacttca

SEQ ID NO: 1920827 - DNA, 15 bp, Homo sapiens
taatcaggacttcaa

SEQ ID NO: 1920828 - DNA, 15 bp, Homo sapiens
aatcaggacttcaaa

SEQ ID NO: 1920829 - DNA, 15 bp, Homo sapiens
atcaggacttcaaat

SEQ ID NO: 1920830 - DNA, 15 bp, Homo sapiens
tcaggacttcaaatg

SEQ ID NO: 1920831 - DNA, 15 bp, Homo sapiens
caggacttcaaatgt

SEQ ID NO: 1920832 - DNA, 15 bp, Homo sapiens
aggacttcaaatgtg

SEQ ID NO: 1920833 - DNA, 15 bp, Homo sapiens
ggacttcaaatgtgt

SEQ ID NO: 1920834 - DNA, 15 bp, Homo sapiens
gacttcaaatgtgta

SEQ ID NO: 1920835 - DNA, 15 bp, Homo sapiens
acttcaaatgtgtaa

SEQ ID NO: 1920836 - DNA, 15 bp, Homo sapiens
cttcaaatgtgtaat

SEQ ID NO: 1920837 - DNA, 15 bp, Homo sapiens
ttcaaatgtgtaatt

SEQ ID NO: 1920838 - DNA, 15 bp, Homo sapiens
tcaaatgtgtaatta

SEQ ID NO: 1920839 - DNA, 15 bp, Homo sapiens
caaatgtgtaattaa

SEQ ID NO: 1920840 - DNA, 15 bp, Homo sapiens
aaatgtgtaattaaa

SEQ ID NO: 1920841 - DNA, 15 bp, Homo sapiens
aatgtgtaattaaat

SEQ ID NO: 1920842 - DNA, 15 bp, Homo sapiens
atgtgtaattaaatt

SEQ ID NO: 1920843 - DNA, 15 bp, Homo sapiens
tgtgtaattaaattt

SEQ ID NO: 1920844 - DNA, 15 bp, Homo sapiens
gtgtaattaaatttt

SEQ ID NO: 1920845 - DNA, 15 bp, Homo sapiens
tgtaattaaattttt

SEQ ID NO: 1920846 - DNA, 15 bp, Homo sapiens
gtaattaaatttttt

SEQ ID NO: 1920847 - DNA, 15 bp, Homo sapiens
taattaaattttttt

SEQ ID NO: 1920848 - DNA, 15 bp, Homo sapiens
aattaaattttttta

SEQ ID NO: 1920849 - DNA, 15 bp, Homo sapiens
attaaatttttttaa

SEQ ID NO: 1920850 - DNA, 15 bp, Homo sapiens
ttaaatttttttaaa

SEQ ID NO: 1920851 - DNA, 15 bp, Homo sapiens
taaatttttttaaaa

SEQ ID NO: 1920852 - DNA, 15 bp, Homo sapiens
ttttttaaaaaaaat

SEQ ID NO: 1920853 - DNA, 15 bp, Homo sapiens
tttttaaaaaaaatc

SEQ ID NO: 1920854 - DNA, 15 bp, Homo sapiens
ttttaaaaaaaatct

SEQ ID NO: 1920855 - DNA, 15 bp, Homo sapiens
tttaaaaaaaatcta

SEQ ID NO: 1920856 - DNA, 15 bp, Homo sapiens
aaaaaaaatctatta

SEQ ID NO: 1920857 - DNA, 15 bp, Homo sapiens
aaaaaaatctattaa

SEQ ID NO: 1920858 - DNA, 15 bp, Homo sapiens
aaaaaatctattaaa

SEQ ID NO: 1920859 - DNA, 15 bp, Homo sapiens
aaaaatctattaaat

SEQ ID NO: 1920860 - DNA, 15 bp, Homo sapiens
aaaatctattaaatt

SEQ ID NO: 1920861 - DNA, 15 bp, Homo sapiens
aaatctattaaattg

SEQ ID NO: 1920862 - DNA, 15 bp, Homo sapiens
aatctattaaattgc

SEQ ID NO: 1920863 - DNA, 15 bp, Homo sapiens
atctattaaattgca

SEQ ID NO: 1920864 - DNA, 15 bp, Homo sapiens
tctattaaattgcaa

SEQ ID NO: 1920865 - DNA, 15 bp, Homo sapiens
ctattaaattgcaag

SEQ ID NO: 1920866 - DNA, 15 bp, Homo sapiens
tattaaattgcaaga

SEQ ID NO: 1920867 - DNA, 15 bp, Homo sapiens
attaaattgcaagat

SEQ ID NO: 1920868 - DNA, 15 bp, Homo sapiens
ttaaattgcaagatt

SEQ ID NO: 1920869 - DNA, 15 bp, Homo sapiens
taaattgcaagattt

SEQ ID NO: 1920870 - DNA, 15 bp, Homo sapiens
aaattgcaagatttg

SEQ ID NO: 1920871 - DNA, 15 bp, Homo sapiens
aattgcaagatttga

SEQ ID NO: 1920872 - DNA, 15 bp, Homo sapiens
attgcaagatttgaa

SEQ ID NO: 1920873 - DNA, 15 bp, Homo sapiens
ttgcaagatttgaat

SEQ ID NO: 1920874 - DNA, 15 bp, Homo sapiens
tgcaagatttgaata

SEQ ID NO: 1920875 - DNA, 15 bp, Homo sapiens
gcaagatttgaatac

SEQ ID NO: 1920876 - DNA, 15 bp, Homo sapiens
caagatttgaatact

SEQ ID NO: 1920877 - DNA, 15 bp, Homo sapiens
aagatttgaatactt

SEQ ID NO: 1920878 - DNA, 15 bp, Homo sapiens
agatttgaatacttc

SEQ ID NO: 1920879 - DNA, 15 bp, Homo sapiens
gatttgaatacttct

SEQ ID NO: 1920880 - DNA, 15 bp, Homo sapiens
atttgaatacttctt

SEQ ID NO: 1920881 - DNA, 15 bp, Homo sapiens
tttgaatacttcttg

SEQ ID NO: 1920882 - DNA, 15 bp, Homo sapiens
ttgaatacttcttgc

SEQ ID NO: 1920883 - DNA, 15 bp, Homo sapiens
tgaatacttcttgca

SEQ ID NO: 1920884 - DNA, 15 bp, Homo sapiens
gaatacttcttgcat

SEQ ID NO: 1920885 - DNA, 15 bp, Homo sapiens
aatacttcttgcatt

SEQ ID NO: 1920886 - DNA, 15 bp, Homo sapiens
atacttcttgcattc

SEQ ID NO: 1920887 - DNA, 15 bp, Homo sapiens
tacttcttgcattct

SEQ ID NO: 1920888 - DNA, 15 bp, Homo sapiens
acttcttgcattctg

SEQ ID NO: 1920889 - DNA, 15 bp, Homo sapiens
cttcttgcattctga

SEQ ID NO: 1920890 - DNA, 15 bp, Homo sapiens
ttcttgcattctgag

SEQ ID NO: 1920891 - DNA, 15 bp, Homo sapiens
tcttgcattctgagc

SEQ ID NO: 1920892 - DNA, 15 bp, Homo sapiens
cttgcattctgagct

SEQ ID NO: 1920893 - DNA, 15 bp, Homo sapiens
ttgcattctgagctg

SEQ ID NO: 1920894 - DNA, 15 bp, Homo sapiens
tgcattctgagctga

SEQ ID NO: 1920895 - DNA, 15 bp, Homo sapiens
gcattctgagctgac

SEQ ID NO: 1920896 - DNA, 15 bp, Homo sapiens
cattctgagctgaca

SEQ ID NO: 1920897 - DNA, 15 bp, Homo sapiens
attctgagctgacaa

SEQ ID NO: 1920898 - DNA, 15 bp, Homo sapiens
ttctgagctgacaag

SEQ ID NO: 1920899 - DNA, 15 bp, Homo sapiens
tctgagctgacaagc

SEQ ID NO: 1920900 - DNA, 15 bp, Homo sapiens
ctgagctgacaagcc

SEQ ID NO: 1920901 - DNA, 15 bp, Homo sapiens
tgagctgacaagccc

SEQ ID NO: 1920902 - DNA, 15 bp, Homo sapiens
gagctgacaagccca

SEQ ID NO: 1920903 - DNA, 15 bp, Homo sapiens
agctgacaagcccat

SEQ ID NO: 1920904 - DNA, 15 bp, Homo sapiens
gctgacaagcccatg

SEQ ID NO: 1920905 - DNA, 15 bp, Homo sapiens
ctgacaagcccatgg

SEQ ID NO: 1920906 - DNA, 15 bp, Homo sapiens
tgacaagcccatggt

SEQ ID NO: 1920907 - DNA, 15 bp, Homo sapiens
gacaagcccatggta

SEQ ID NO: 1920908 - DNA, 15 bp, Homo sapiens
acaagcccatggtag

SEQ ID NO: 1920909 - DNA, 15 bp, Homo sapiens
caagcccatggtagt

SEQ ID NO: 1920910 - DNA, 15 bp, Homo sapiens
aagcccatggtagtc

SEQ ID NO: 1920911 - DNA, 15 bp, Homo sapiens
agcccatggtagtcc

SEQ ID NO: 1920912 - DNA, 15 bp, Homo sapiens
gcccatggtagtcca

SEQ ID NO: 1920913 - DNA, 15 bp, Homo sapiens
cccatggtagtccaa

SEQ ID NO: 1920914 - DNA, 15 bp, Homo sapiens
ccatggtagtccaaa

SEQ ID NO: 1920915 - DNA, 15 bp, Homo sapiens
catggtagtccaaaa

SEQ ID NO: 1920916 - DNA, 15 bp, Homo sapiens
atggtagtccaaaaa

SEQ ID NO: 1920917 - DNA, 15 bp, Homo sapiens
tggtagtccaaaaat

SEQ ID NO: 1920918 - DNA, 15 bp, Homo sapiens
ggtagtccaaaaatt

SEQ ID NO: 1920919 - DNA, 15 bp, Homo sapiens
gtagtccaaaaattt

SEQ ID NO: 1920920 - DNA, 15 bp, Homo sapiens
tagtccaaaaatttg

SEQ ID NO: 1920921 - DNA, 15 bp, Homo sapiens
agtccaaaaatttgt

SEQ ID NO: 1920922 - DNA, 15 bp, Homo sapiens
gtccaaaaatttgta

SEQ ID NO: 1920923 - DNA, 15 bp, Homo sapiens
tccaaaaatttgtat

SEQ ID NO: 1920924 - DNA, 15 bp, Homo sapiens
ccaaaaatttgtatt

SEQ ID NO: 1920925 - DNA, 15 bp, Homo sapiens
caaaaatttgtattt

SEQ ID NO: 1920926 - DNA, 15 bp, Homo sapiens
aaaaatttgtatttc

SEQ ID NO: 1920927 - DNA, 15 bp, Homo sapiens
aaaatttgtatttca

SEQ ID NO: 1920928 - DNA, 15 bp, Homo sapiens
aaatttgtatttcaa

SEQ ID NO: 1920929 - DNA, 15 bp, Homo sapiens
aatttgtatttcaat

SEQ ID NO: 1920930 - DNA, 15 bp, Homo sapiens
atttgtatttcaata

SEQ ID NO: 1920931 - DNA, 15 bp, Homo sapiens
tttgtatttcaatac

SEQ ID NO: 1920932 - DNA, 15 bp, Homo sapiens
ttgtatttcaatacc

SEQ ID NO: 1920933 - DNA, 15 bp, Homo sapiens
tgtatttcaatacct

SEQ ID NO: 1920934 - DNA, 15 bp, Homo sapiens
gtatttcaatacctt

SEQ ID NO: 1920935 - DNA, 15 bp, Homo sapiens
tatttcaataccttt

SEQ ID NO: 1920936 - DNA, 15 bp, Homo sapiens
atttcaataccttta

SEQ ID NO: 1920937 - DNA, 15 bp, Homo sapiens
tttcaatacctttaa

SEQ ID NO: 1920938 - DNA, 15 bp, Homo sapiens
ttcaatacctttaaa

SEQ ID NO: 1920939 - DNA, 15 bp, Homo sapiens
tcaatacctttaaaa

SEQ ID NO: 1920940 - DNA, 15 bp, Homo sapiens
caatacctttaaaaa

SEQ ID NO: 1920941 - DNA, 15 bp, Homo sapiens
aatacctttaaaaat

SEQ ID NO: 1920942 - DNA, 15 bp, Homo sapiens
atacctttaaaaata

SEQ ID NO: 1920943 - DNA, 15 bp, Homo sapiens
tacctttaaaaatat

SEQ ID NO: 1920944 - DNA, 15 bp, Homo sapiens
acctttaaaaatatt

SEQ ID NO: 1920945 - DNA, 15 bp, Homo sapiens
cctttaaaaatattt

SEQ ID NO: 1920946 - DNA, 15 bp, Homo sapiens
ctttaaaaatatttt

SEQ ID NO: 1920947 - DNA, 15 bp, Homo sapiens
tttaaaaatattttg

SEQ ID NO: 1920948 - DNA, 15 bp, Homo sapiens
ttaaaaatattttga

SEQ ID NO: 1920949 - DNA, 15 bp, Homo sapiens
taaaaatattttgag

SEQ ID NO: 1920950 - DNA, 15 bp, Homo sapiens
aaaaatattttgagt

SEQ ID NO: 1920951 - DNA, 15 bp, Homo sapiens
aaaatattttgagtg

SEQ ID NO: 1920952 - DNA, 15 bp, Homo sapiens
aaatattttgagtga

SEQ ID NO: 1920953 - DNA, 15 bp, Homo sapiens
aatattttgagtgat

SEQ ID NO: 1920954 - DNA, 15 bp, Homo sapiens
atattttgagtgatt

SEQ ID NO: 1920955 - DNA, 15 bp, Homo sapiens
tattttgagtgatta

SEQ ID NO: 1920956 - DNA, 15 bp, Homo sapiens
attttgagtgattac

SEQ ID NO: 1920957 - DNA, 15 bp, Homo sapiens
ttttgagtgattaca

SEQ ID NO: 1920958 - DNA, 15 bp, Homo sapiens
tttgagtgattacaa

SEQ ID NO: 1920959 - DNA, 15 bp, Homo sapiens
ttgagtgattacaaa

SEQ ID NO: 1920960 - DNA, 15 bp, Homo sapiens
tgagtgattacaaag

SEQ ID NO: 1920961 - DNA, 15 bp, Homo sapiens
gagtgattacaaaga

SEQ ID NO: 1920962 - DNA, 15 bp, Homo sapiens
agtgattacaaagaa

SEQ ID NO: 1920963 - DNA, 15 bp, Homo sapiens
gtgattacaaagaaa

SEQ ID NO: 1920964 - DNA, 15 bp, Homo sapiens
tgattacaaagaaag

SEQ ID NO: 1920965 - DNA, 15 bp, Homo sapiens
gattacaaagaaagt

SEQ ID NO: 1920966 - DNA, 15 bp, Homo sapiens
attacaaagaaagtt

SEQ ID NO: 1920967 - DNA, 15 bp, Homo sapiens
ttacaaagaaagttt

SEQ ID NO: 1920968 - DNA, 15 bp, Homo sapiens
tacaaagaaagtttc

SEQ ID NO: 1920969 - DNA, 15 bp, Homo sapiens
acaaagaaagtttct

SEQ ID NO: 1920970 - DNA, 15 bp, Homo sapiens
caaagaaagtttctt

SEQ ID NO: 1920971 - DNA, 15 bp, Homo sapiens
aaagaaagtttcttt

SEQ ID NO: 1920972 - DNA, 15 bp, Homo sapiens
aagaaagtttctttt

SEQ ID NO: 1920973 - DNA, 15 bp, Homo sapiens
agaaagtttcttttt

SEQ ID NO: 1920974 - DNA, 15 bp, Homo sapiens
gaaagtttctttttt

SEQ ID NO: 1920975 - DNA, 15 bp, Homo sapiens
aaagtttcttttttt

SEQ ID NO: 1920976 - DNA, 15 bp, Homo sapiens
aagtttcttttttta

SEQ ID NO: 1920977 - DNA, 15 bp, Homo sapiens
agtttctttttttaa

SEQ ID NO: 1920978 - DNA, 15 bp, Homo sapiens
gtttctttttttaac

SEQ ID NO: 1920979 - DNA, 15 bp, Homo sapiens
tttctttttttaaca

SEQ ID NO: 1920980 - DNA, 15 bp, Homo sapiens
ttctttttttaacac

SEQ ID NO: 1920981 - DNA, 15 bp, Homo sapiens
tctttttttaacacc

SEQ ID NO: 1920982 - DNA, 15 bp, Homo sapiens
ctttttttaacaccc

SEQ ID NO: 1920983 - DNA, 15 bp, Homo sapiens
tttttttaacaccca

SEQ ID NO: 1920984 - DNA, 15 bp, Homo sapiens
ttttttaacacccaa

SEQ ID NO: 1920985 - DNA, 15 bp, Homo sapiens
tttttaacacccaaa

SEQ ID NO: 1920986 - DNA, 15 bp, Homo sapiens
ttttaacacccaaac

SEQ ID NO: 1920987 - DNA, 15 bp, Homo sapiens
tttaacacccaaaca

SEQ ID NO: 1920988 - DNA, 15 bp, Homo sapiens
ttaacacccaaacac

SEQ ID NO: 1920989 - DNA, 15 bp, Homo sapiens
taacacccaaacaca

SEQ ID NO: 1920990 - DNA, 15 bp, Homo sapiens
aacacccaaacacat

SEQ ID NO: 1920991 - DNA, 15 bp, Homo sapiens
acacccaaacacata

SEQ ID NO: 1920992 - DNA, 15 bp, Homo sapiens
cacccaaacacatac

SEQ ID NO: 1920993 - DNA, 15 bp, Homo sapiens
acccaaacacataca

SEQ ID NO: 1920994 - DNA, 15 bp, Homo sapiens
cccaaacacatacac

SEQ ID NO: 1920995 - DNA, 15 bp, Homo sapiens
ccaaacacatacaca

SEQ ID NO: 1920996 - DNA, 15 bp, Homo sapiens
caaacacatacacat

SEQ ID NO: 1920997 - DNA, 15 bp, Homo sapiens
aaacacatacacata

SEQ ID NO: 1920998 - DNA, 15 bp, Homo sapiens
aacacatacacataa

SEQ ID NO: 1920999 - DNA, 15 bp, Homo sapiens
acacatacacataat

SEQ ID NO: 1921000 - DNA, 15 bp, Homo sapiens
cacatacacataatg

SEQ ID NO: 1921001 - DNA, 15 bp, Homo sapiens
acatacacataatgc

SEQ ID NO: 1921002 - DNA, 15 bp, Homo sapiens
catacacataatgct

SEQ ID NO: 1921003 - DNA, 15 bp, Homo sapiens
atacacataatgctg

SEQ ID NO: 1921004 - DNA, 15 bp, Homo sapiens
tacacataatgctgt

SEQ ID NO: 1921005 - DNA, 15 bp, Homo sapiens
acacataatgctgtg

SEQ ID NO: 1921006 - DNA, 15 bp, Homo sapiens
cacataatgctgtga

SEQ ID NO: 1921007 - DNA, 15 bp, Homo sapiens
acataatgctgtgac

SEQ ID NO: 1921008 - DNA, 15 bp, Homo sapiens
cataatgctgtgacc

SEQ ID NO: 1921009 - DNA, 15 bp, Homo sapiens
ataatgctgtgacca

SEQ ID NO: 1921010 - DNA, 15 bp, Homo sapiens
taatgctgtgaccat

SEQ ID NO: 1921011 - DNA, 15 bp, Homo sapiens
aatgctgtgaccatt

SEQ ID NO: 1921012 - DNA, 15 bp, Homo sapiens
atgctgtgaccattt

SEQ ID NO: 1921013 - DNA, 15 bp, Homo sapiens
tgctgtgaccatttg

SEQ ID NO: 1921014 - DNA, 15 bp, Homo sapiens
gctgtgaccatttga

SEQ ID NO: 1921015 - DNA, 15 bp, Homo sapiens
ctgtgaccatttgaa

SEQ ID NO: 1921016 - DNA, 15 bp, Homo sapiens
tgtgaccatttgaaa

SEQ ID NO: 1921017 - DNA, 15 bp, Homo sapiens
gtgaccatttgaaaa

SEQ ID NO: 1921018 - DNA, 15 bp, Homo sapiens
tgaccatttgaaaaa

SEQ ID NO: 1921019 - DNA, 15 bp, Homo sapiens
gaccatttgaaaaat

SEQ ID NO: 1921020 - DNA, 15 bp, Homo sapiens
accatttgaaaaata

SEQ ID NO: 1921021 - DNA, 15 bp, Homo sapiens
ccatttgaaaaatag

SEQ ID NO: 1921022 - DNA, 15 bp, Homo sapiens
catttgaaaaatagg

SEQ ID NO: 1921023 - DNA, 15 bp, Homo sapiens
atttgaaaaatagga

SEQ ID NO: 1921024 - DNA, 15 bp, Homo sapiens
tttgaaaaataggat

SEQ ID NO: 1921025 - DNA, 15 bp, Homo sapiens
ttgaaaaataggatg

SEQ ID NO: 1921026 - DNA, 15 bp, Homo sapiens
tgaaaaataggatga

SEQ ID NO: 1921027 - DNA, 15 bp, Homo sapiens
gaaaaataggatgaa

SEQ ID NO: 1921028 - DNA, 15 bp, Homo sapiens
aaaaataggatgaaa

SEQ ID NO: 1921029 - DNA, 15 bp, Homo sapiens
aaaataggatgaaaa

SEQ ID NO: 1921030 - DNA, 15 bp, Homo sapiens
aaataggatgaaaaa

SEQ ID NO: 1921031 - DNA, 15 bp, Homo sapiens
aataggatgaaaaac

SEQ ID NO: 1921032 - DNA, 15 bp, Homo sapiens
ataggatgaaaaact

SEQ ID NO: 1921033 - DNA, 15 bp, Homo sapiens
taggatgaaaaactc

SEQ ID NO: 1921034 - DNA, 15 bp, Homo sapiens
aggatgaaaaactct

SEQ ID NO: 1921035 - DNA, 15 bp, Homo sapiens
ggatgaaaaactctt

SEQ ID NO: 1921036 - DNA, 15 bp, Homo sapiens
gatgaaaaactcttt

SEQ ID NO: 1921037 - DNA, 15 bp, Homo sapiens
atgaaaaactctttt

SEQ ID NO: 1921038 - DNA, 15 bp, Homo sapiens
tgaaaaactctttta

SEQ ID NO: 1921039 - DNA, 15 bp, Homo sapiens
gaaaaactcttttat

SEQ ID NO: 1921040 - DNA, 15 bp, Homo sapiens
aaaaactcttttatt

SEQ ID NO: 1921041 - DNA, 15 bp, Homo sapiens
aaaactcttttattt

SEQ ID NO: 1921042 - DNA, 15 bp, Homo sapiens
aaactcttttatttc

SEQ ID NO: 1921043 - DNA, 15 bp, Homo sapiens
aactcttttatttct

SEQ ID NO: 1921044 - DNA, 15 bp, Homo sapiens
actcttttatttcta

SEQ ID NO: 1921045 - DNA, 15 bp, Homo sapiens
ctcttttatttctac

SEQ ID NO: 1921046 - DNA, 15 bp, Homo sapiens
tcttttatttctact

SEQ ID NO: 1921047 - DNA, 15 bp, Homo sapiens
cttttatttctactc

SEQ ID NO: 1921048 - DNA, 15 bp, Homo sapiens
ttttatttctactct

SEQ ID NO: 1921049 - DNA, 15 bp, Homo sapiens
tttatttctactcta

SEQ ID NO: 1921050 - DNA, 15 bp, Homo sapiens
tatttctactctact

SEQ ID NO: 1921051 - DNA, 15 bp, Homo sapiens
atttctactctactt

SEQ ID NO: 1921052 - DNA, 15 bp, Homo sapiens
tttctactctacttt

SEQ ID NO: 1921053 - DNA, 15 bp, Homo sapiens
ttctactctacttta

SEQ ID NO: 1921054 - DNA, 15 bp, Homo sapiens
tctactctactttaa

SEQ ID NO: 1921055 - DNA, 15 bp, Homo sapiens
ctactctactttaaa

SEQ ID NO: 1921056 - DNA, 15 bp, Homo sapiens
tactctactttaaaa

SEQ ID NO: 1921057 - DNA, 15 bp, Homo sapiens
actctactttaaaac

SEQ ID NO: 1921058 - DNA, 15 bp, Homo sapiens
ctctactttaaaaca

SEQ ID NO: 1921059 - DNA, 15 bp, Homo sapiens
tctactttaaaacat

SEQ ID NO: 1921060 - DNA, 15 bp, Homo sapiens
ctactttaaaacata

SEQ ID NO: 1921061 - DNA, 15 bp, Homo sapiens
tactttaaaacatat

SEQ ID NO: 1921062 - DNA, 15 bp, Homo sapiens
actttaaaacatata

SEQ ID NO: 1921063 - DNA, 15 bp, Homo sapiens
ctttaaaacatataa

SEQ ID NO: 1921064 - DNA, 15 bp, Homo sapiens
tttaaaacatataat

SEQ ID NO: 1921065 - DNA, 15 bp, Homo sapiens
ttaaaacatataatt

SEQ ID NO: 1921066 - DNA, 15 bp, Homo sapiens
taaaacatataattc

SEQ ID NO: 1921067 - DNA, 15 bp, Homo sapiens
aaaacatataattct

SEQ ID NO: 1921068 - DNA, 15 bp, Homo sapiens
aaacatataattctg

SEQ ID NO: 1921069 - DNA, 15 bp, Homo sapiens
aacatataattctga

SEQ ID NO: 1921070 - DNA, 15 bp, Homo sapiens
acatataattctgaa

SEQ ID NO: 1921071 - DNA, 15 bp, Homo sapiens
catataattctgaag

SEQ ID NO: 1921072 - DNA, 15 bp, Homo sapiens
atataattctgaaga

SEQ ID NO: 1921073 - DNA, 15 bp, Homo sapiens
tataattctgaagat

SEQ ID NO: 1921074 - DNA, 15 bp, Homo sapiens
ataattctgaagata

SEQ ID NO: 1921075 - DNA, 15 bp, Homo sapiens
taattctgaagatac

SEQ ID NO: 1921076 - DNA, 15 bp, Homo sapiens
aattctgaagatact

SEQ ID NO: 1921077 - DNA, 15 bp, Homo sapiens
attctgaagatacta

SEQ ID NO: 1921078 - DNA, 15 bp, Homo sapiens
ttctgaagatactaa

SEQ ID NO: 1921079 - DNA, 15 bp, Homo sapiens
tctgaagatactaaa

SEQ ID NO: 1921080 - DNA, 15 bp, Homo sapiens
ctgaagatactaaag

SEQ ID NO: 1921081 - DNA, 15 bp, Homo sapiens
tgaagatactaaaga

SEQ ID NO: 1921082 - DNA, 15 bp, Homo sapiens
gaagatactaaagaa

SEQ ID NO: 1921083 - DNA, 15 bp, Homo sapiens
aagatactaaagaaa

SEQ ID NO: 1921084 - DNA, 15 bp, Homo sapiens
agatactaaagaaat

SEQ ID NO: 1921085 - DNA, 15 bp, Homo sapiens
gatactaaagaaata

SEQ ID NO: 1921086 - DNA, 15 bp, Homo sapiens
atactaaagaaatat

SEQ ID NO: 1921087 - DNA, 15 bp, Homo sapiens
tactaaagaaatatt

SEQ ID NO: 1921088 - DNA, 15 bp, Homo sapiens
actaaagaaatattt

SEQ ID NO: 1921089 - DNA, 15 bp, Homo sapiens
ctaaagaaatatttg

SEQ ID NO: 1921090 - DNA, 15 bp, Homo sapiens
taaagaaatatttga

SEQ ID NO: 1921091 - DNA, 15 bp, Homo sapiens
aaagaaatatttgag

SEQ ID NO: 1921092 - DNA, 15 bp, Homo sapiens
aagaaatatttgaga

SEQ ID NO: 1921093 - DNA, 15 bp, Homo sapiens
agaaatatttgagac

SEQ ID NO: 1921094 - DNA, 15 bp, Homo sapiens
gaaatatttgagact

SEQ ID NO: 1921095 - DNA, 15 bp, Homo sapiens
aaatatttgagacta

SEQ ID NO: 1921096 - DNA, 15 bp, Homo sapiens
aatatttgagactat

SEQ ID NO: 1921097 - DNA, 15 bp, Homo sapiens
atatttgagactata

SEQ ID NO: 1921098 - DNA, 15 bp, Homo sapiens
tatttgagactatag

SEQ ID NO: 1921099 - DNA, 15 bp, Homo sapiens
atttgagactataga

SEQ ID NO: 1921100 - DNA, 15 bp, Homo sapiens
tttgagactatagag

SEQ ID NO: 1921101 - DNA, 15 bp, Homo sapiens
ttgagactatagagc

SEQ ID NO: 1921102 - DNA, 15 bp, Homo sapiens
tgagactatagagct

SEQ ID NO: 1921103 - DNA, 15 bp, Homo sapiens
gagactatagagctg

SEQ ID NO: 1921104 - DNA, 15 bp, Homo sapiens
agactatagagctga

SEQ ID NO: 1921105 - DNA, 15 bp, Homo sapiens
gactatagagctgaa

SEQ ID NO: 1921106 - DNA, 15 bp, Homo sapiens
actatagagctgaaa

SEQ ID NO: 1921107 - DNA, 15 bp, Homo sapiens
ctatagagctgaaaa

SEQ ID NO: 1921108 - DNA, 15 bp, Homo sapiens
tatagagctgaaaat

SEQ ID NO: 1921109 - DNA, 15 bp, Homo sapiens
atagagctgaaaatg

SEQ ID NO: 1921110 - DNA, 15 bp, Homo sapiens
tagagctgaaaatgt

SEQ ID NO: 1921111 - DNA, 15 bp, Homo sapiens
agagctgaaaatgtg

SEQ ID NO: 1921112 - DNA, 15 bp, Homo sapiens
gagctgaaaatgtgc

SEQ ID NO: 1921113 - DNA, 15 bp, Homo sapiens
agctgaaaatgtgct

SEQ ID NO: 1921114 - DNA, 15 bp, Homo sapiens
gctgaaaatgtgctg

SEQ ID NO: 1921115 - DNA, 15 bp, Homo sapiens
ctgaaaatgtgctgt

SEQ ID NO: 1921116 - DNA, 15 bp, Homo sapiens
tgaaaatgtgctgtc

SEQ ID NO: 1921117 - DNA, 15 bp, Homo sapiens
gaaaatgtgctgtct

SEQ ID NO: 1921118 - DNA, 15 bp, Homo sapiens
aaaatgtgctgtctt

SEQ ID NO: 1921119 - DNA, 15 bp, Homo sapiens
aaatgtgctgtcttt

SEQ ID NO: 1921120 - DNA, 15 bp, Homo sapiens
aatgtgctgtcttta

SEQ ID NO: 1921121 - DNA, 15 bp, Homo sapiens
atgtgctgtctttaa

SEQ ID NO: 1921122 - DNA, 15 bp, Homo sapiens
tgtgctgtctttaat

SEQ ID NO: 1921123 - DNA, 15 bp, Homo sapiens
gtgctgtctttaatg

SEQ ID NO: 1921124 - DNA, 15 bp, Homo sapiens
tgctgtctttaatgt

SEQ ID NO: 1921125 - DNA, 15 bp, Homo sapiens
gctgtctttaatgtt

SEQ ID NO: 1921126 - DNA, 15 bp, Homo sapiens
ctgtctttaatgttc

SEQ ID NO: 1921127 - DNA, 15 bp, Homo sapiens
tgtctttaatgttcc

SEQ ID NO: 1921128 - DNA, 15 bp, Homo sapiens
gtctttaatgttcct

SEQ ID NO: 1921129 - DNA, 15 bp, Homo sapiens
tctttaatgttcctt

SEQ ID NO: 1921130 - DNA, 15 bp, Homo sapiens
ctttaatgttcctta

SEQ ID NO: 1921131 - DNA, 15 bp, Homo sapiens
tttaatgttccttag

SEQ ID NO: 1921132 - DNA, 15 bp, Homo sapiens
ttaatgttccttagg

SEQ ID NO: 1921133 - DNA, 15 bp, Homo sapiens
taatgttccttaggc

SEQ ID NO: 1921134 - DNA, 15 bp, Homo sapiens
aatgttccttaggct

SEQ ID NO: 1921135 - DNA, 15 bp, Homo sapiens
atgttccttaggctt

SEQ ID NO: 1921136 - DNA, 15 bp, Homo sapiens
tgttccttaggcttc

SEQ ID NO: 1921137 - DNA, 15 bp, Homo sapiens
gttccttaggcttcc

SEQ ID NO: 1921138 - DNA, 15 bp, Homo sapiens
ttccttaggcttccc

SEQ ID NO: 1921139 - DNA, 15 bp, Homo sapiens
tccttaggcttccct

SEQ ID NO: 1921140 - DNA, 15 bp, Homo sapiens
ccttaggcttccctt

SEQ ID NO: 1921141 - DNA, 15 bp, Homo sapiens
cttaggcttcccttc

SEQ ID NO: 1921142 - DNA, 15 bp, Homo sapiens
ttaggcttcccttcg

SEQ ID NO: 1921143 - DNA, 15 bp, Homo sapiens
taggcttcccttcga

SEQ ID NO: 1921144 - DNA, 15 bp, Homo sapiens
aggcttcccttcgag

SEQ ID NO: 1921145 - DNA, 15 bp, Homo sapiens
ggcttcccttcgagt

SEQ ID NO: 1921146 - DNA, 15 bp, Homo sapiens
gcttcccttcgagtg

SEQ ID NO: 1921147 - DNA, 15 bp, Homo sapiens
cttcccttcgagtga

SEQ ID NO: 1921148 - DNA, 15 bp, Homo sapiens
ttcccttcgagtgat

SEQ ID NO: 1921149 - DNA, 15 bp, Homo sapiens
tcccttcgagtgatc

SEQ ID NO: 1921150 - DNA, 15 bp, Homo sapiens
cccttcgagtgatcc

SEQ ID NO: 1921151 - DNA, 15 bp, Homo sapiens
ccttcgagtgatcca

SEQ ID NO: 1921152 - DNA, 15 bp, Homo sapiens
cttcgagtgatccaa

SEQ ID NO: 1921153 - DNA, 15 bp, Homo sapiens
ttcgagtgatccaag

SEQ ID NO: 1921154 - DNA, 15 bp, Homo sapiens
tcgagtgatccaagg

SEQ ID NO: 1921155 - DNA, 15 bp, Homo sapiens
cgagtgatccaaggg

SEQ ID NO: 1921156 - DNA, 15 bp, Homo sapiens
gagtgatccaagggt

SEQ ID NO: 1921157 - DNA, 15 bp, Homo sapiens
agtgatccaagggtg

SEQ ID NO: 1921158 - DNA, 15 bp, Homo sapiens
gtgatccaagggtga

SEQ ID NO: 1921159 - DNA, 15 bp, Homo sapiens
tgatccaagggtgaa

SEQ ID NO: 1921160 - DNA, 15 bp, Homo sapiens
gatccaagggtgaaa

SEQ ID NO: 1921161 - DNA, 15 bp, Homo sapiens
atccaagggtgaaat

SEQ ID NO: 1921162 - DNA, 15 bp, Homo sapiens
tccaagggtgaaata

SEQ ID NO: 1921163 - DNA, 15 bp, Homo sapiens
ccaagggtgaaatat

SEQ ID NO: 1921164 - DNA, 15 bp, Homo sapiens
caagggtgaaatata

SEQ ID NO: 1921165 - DNA, 15 bp, Homo sapiens
aagggtgaaatatat

SEQ ID NO: 1921166 - DNA, 15 bp, Homo sapiens
agggtgaaatatatg

SEQ ID NO: 1921167 - DNA, 15 bp, Homo sapiens
gggtgaaatatatgt

SEQ ID NO: 1921168 - DNA, 15 bp, Homo sapiens
ggtgaaatatatgtg

SEQ ID NO: 1921169 - DNA, 15 bp, Homo sapiens
gtgaaatatatgtga

SEQ ID NO: 1921170 - DNA, 15 bp, Homo sapiens
tgaaatatatgtgag

SEQ ID NO: 1921171 - DNA, 15 bp, Homo sapiens
gaaatatatgtgagt

SEQ ID NO: 1921172 - DNA, 15 bp, Homo sapiens
aaatatatgtgagtg

SEQ ID NO: 1921173 - DNA, 15 bp, Homo sapiens
aatatatgtgagtga

SEQ ID NO: 1921174 - DNA, 15 bp, Homo sapiens
tatatgtgagtgaaa

SEQ ID NO: 1921175 - DNA, 15 bp, Homo sapiens
atatgtgagtgaaat

SEQ ID NO: 1921176 - DNA, 15 bp, Homo sapiens
tatgtgagtgaaatt

SEQ ID NO: 1921177 - DNA, 15 bp, Homo sapiens
atgtgagtgaaatta

SEQ ID NO: 1921178 - DNA, 15 bp, Homo sapiens
tgtgagtgaaattat

SEQ ID NO: 1921179 - DNA, 15 bp, Homo sapiens
gtgagtgaaattatc

SEQ ID NO: 1921180 - DNA, 15 bp, Homo sapiens
tgagtgaaattatca

SEQ ID NO: 1921181 - DNA, 15 bp, Homo sapiens
gagtgaaattatcag

SEQ ID NO: 1921182 - DNA, 15 bp, Homo sapiens
agtgaaattatcaga

SEQ ID NO: 1921183 - DNA, 15 bp, Homo sapiens
gtgaaattatcagat

SEQ ID NO: 1921184 - DNA, 15 bp, Homo sapiens
tgaaattatcagatg

SEQ ID NO: 1921185 - DNA, 15 bp, Homo sapiens
gaaattatcagatgg

SEQ ID NO: 1921186 - DNA, 15 bp, Homo sapiens
aaattatcagatggg

SEQ ID NO: 1921187 - DNA, 15 bp, Homo sapiens
aattatcagatgggt

SEQ ID NO: 1921188 - DNA, 15 bp, Homo sapiens
attatcagatgggtt

SEQ ID NO: 1921189 - DNA, 15 bp, Homo sapiens
ttatcagatgggtta

SEQ ID NO: 1921190 - DNA, 15 bp, Homo sapiens
tatcagatgggttac

SEQ ID NO: 1921191 - DNA, 15 bp, Homo sapiens
atcagatgggttact

SEQ ID NO: 1921192 - DNA, 15 bp, Homo sapiens
tcagatgggttactt

SEQ ID NO: 1921193 - DNA, 15 bp, Homo sapiens
cagatgggttacttt

SEQ ID NO: 1921194 - DNA, 15 bp, Homo sapiens
agatgggttacttta

SEQ ID NO: 1921195 - DNA, 15 bp, Homo sapiens
gatgggttactttat

SEQ ID NO: 1921196 - DNA, 15 bp, Homo sapiens
atgggttactttatt

SEQ ID NO: 1921197 - DNA, 15 bp, Homo sapiens
gggttactttatttt

SEQ ID NO: 1921198 - DNA, 15 bp, Homo sapiens
ggttactttattttt

SEQ ID NO: 1921199 - DNA, 15 bp, Homo sapiens
gttactttattttta

SEQ ID NO: 1921200 - DNA, 15 bp, Homo sapiens
ttactttatttttac

SEQ ID NO: 1921201 - DNA, 15 bp, Homo sapiens
tactttatttttact

SEQ ID NO: 1921202 - DNA, 15 bp, Homo sapiens
actttatttttactt

SEQ ID NO: 1921203 - DNA, 15 bp, Homo sapiens
ctttatttttactta

SEQ ID NO: 1921204 - DNA, 15 bp, Homo sapiens
tttatttttacttaa

SEQ ID NO: 1921205 - DNA, 15 bp, Homo sapiens
ttatttttacttaat

SEQ ID NO: 1921206 - DNA, 15 bp, Homo sapiens
tatttttacttaatt

SEQ ID NO: 1921207 - DNA, 15 bp, Homo sapiens
atttttacttaattc

SEQ ID NO: 1921208 - DNA, 15 bp, Homo sapiens
tttttacttaattct

SEQ ID NO: 1921209 - DNA, 15 bp, Homo sapiens
ttttacttaattctg

SEQ ID NO: 1921210 - DNA, 15 bp, Homo sapiens
tttacttaattctga

SEQ ID NO: 1921211 - DNA, 15 bp, Homo sapiens
ttacttaattctgaa

SEQ ID NO: 1921212 - DNA, 15 bp, Homo sapiens
tacttaattctgaat

SEQ ID NO: 1921213 - DNA, 15 bp, Homo sapiens
acttaattctgaatt

SEQ ID NO: 1921214 - DNA, 15 bp, Homo sapiens
cttaattctgaattt

SEQ ID NO: 1921215 - DNA, 15 bp, Homo sapiens
ttaattctgaatttt

SEQ ID NO: 1921216 - DNA, 15 bp, Homo sapiens
taattctgaattttc

SEQ ID NO: 1921217 - DNA, 15 bp, Homo sapiens
aattctgaattttca

SEQ ID NO: 1921218 - DNA, 15 bp, Homo sapiens
attctgaattttcat

SEQ ID NO: 1921219 - DNA, 15 bp, Homo sapiens
ttctgaattttcatt

SEQ ID NO: 1921220 - DNA, 15 bp, Homo sapiens
tctgaattttcatta

SEQ ID NO: 1921221 - DNA, 15 bp, Homo sapiens
ctgaattttcattaa

SEQ ID NO: 1921222 - DNA, 15 bp, Homo sapiens
tgaattttcattaaa

SEQ ID NO: 1921223 - DNA, 15 bp, Homo sapiens
gaattttcattaaaa

SEQ ID NO: 1921224 - DNA, 15 bp, Homo sapiens
aattttcattaaaaa

SEQ ID NO: 1921225 - DNA, 15 bp, Homo sapiens
attttcattaaaaat

SEQ ID NO: 1921226 - DNA, 15 bp, Homo sapiens
ttttcattaaaaatt

SEQ ID NO: 1921227 - DNA, 15 bp, Homo sapiens
tttcattaaaaattc

SEQ ID NO: 1921228 - DNA, 15 bp, Homo sapiens
ttcattaaaaattcc

SEQ ID NO: 1921229 - DNA, 15 bp, Homo sapiens
tcattaaaaattccc

SEQ ID NO: 1921230 - DNA, 15 bp, Homo sapiens
cattaaaaattccca

SEQ ID NO: 1921231 - DNA, 15 bp, Homo sapiens
attaaaaattcccaa

SEQ ID NO: 1921232 - DNA, 15 bp, Homo sapiens
ttaaaaattcccaaa

SEQ ID NO: 1921233 - DNA, 15 bp, Homo sapiens
taaaaattcccaaat

SEQ ID NO: 1921234 - DNA, 15 bp, Homo sapiens
aaaaattcccaaata

SEQ ID NO: 1921235 - DNA, 15 bp, Homo sapiens
aaaattcccaaataa

SEQ ID NO: 1921236 - DNA, 15 bp, Homo sapiens
aaattcccaaataat

SEQ ID NO: 1921237 - DNA, 15 bp, Homo sapiens
aattcccaaataatg

SEQ ID NO: 1921238 - DNA, 15 bp, Homo sapiens
attcccaaataatgt

SEQ ID NO: 1921239 - DNA, 15 bp, Homo sapiens
ttcccaaataatgtt

SEQ ID NO: 1921240 - DNA, 15 bp, Homo sapiens
tcccaaataatgttt

SEQ ID NO: 1921241 - DNA, 15 bp, Homo sapiens
cccaaataatgttta

SEQ ID NO: 1921242 - DNA, 15 bp, Homo sapiens
ccaaataatgtttaa

SEQ ID NO: 1921243 - DNA, 15 bp, Homo sapiens
caaataatgtttaag

SEQ ID NO: 1921244 - DNA, 15 bp, Homo sapiens
aaataatgtttaaga

SEQ ID NO: 1921245 - DNA, 15 bp, Homo sapiens
aataatgtttaagat

SEQ ID NO: 1921246 - DNA, 15 bp, Homo sapiens
ataatgtttaagata

SEQ ID NO: 1921247 - DNA, 15 bp, Homo sapiens
taatgtttaagataa

SEQ ID NO: 1921248 - DNA, 15 bp, Homo sapiens
aatgtttaagataac

SEQ ID NO: 1921249 - DNA, 15 bp, Homo sapiens
atgtttaagataaca

SEQ ID NO: 1921250 - DNA, 15 bp, Homo sapiens
tgtttaagataacaa

SEQ ID NO: 1921251 - DNA, 15 bp, Homo sapiens
gtttaagataacaat

SEQ ID NO: 1921252 - DNA, 15 bp, Homo sapiens
tttaagataacaatg

SEQ ID NO: 1921253 - DNA, 15 bp, Homo sapiens
ttaagataacaatgt

SEQ ID NO: 1921254 - DNA, 15 bp, Homo sapiens
taagataacaatgta

SEQ ID NO: 1921255 - DNA, 15 bp, Homo sapiens
aagataacaatgtag

SEQ ID NO: 1921256 - DNA, 15 bp, Homo sapiens
agataacaatgtaga

SEQ ID NO: 1921257 - DNA, 15 bp, Homo sapiens
gataacaatgtagaa

SEQ ID NO: 1921258 - DNA, 15 bp, Homo sapiens
ataacaatgtagaaa

SEQ ID NO: 1921259 - DNA, 15 bp, Homo sapiens
taacaatgtagaaat

SEQ ID NO: 1921260 - DNA, 15 bp, Homo sapiens
aacaatgtagaaatt

SEQ ID NO: 1921261 - DNA, 15 bp, Homo sapiens
acaatgtagaaattt

SEQ ID NO: 1921262 - DNA, 15 bp, Homo sapiens
caatgtagaaatttt

SEQ ID NO: 1921263 - DNA, 15 bp, Homo sapiens
aatgtagaaattttt

SEQ ID NO: 1921264 - DNA, 15 bp, Homo sapiens
atgtagaaattttta

SEQ ID NO: 1921265 - DNA, 15 bp, Homo sapiens
tgtagaaatttttaa

SEQ ID NO: 1921266 - DNA, 15 bp, Homo sapiens
gtagaaatttttaaa

SEQ ID NO: 1921267 - DNA, 15 bp, Homo sapiens
tagaaatttttaaat

SEQ ID NO: 1921268 - DNA, 15 bp, Homo sapiens
agaaatttttaaata

SEQ ID NO: 1921269 - DNA, 15 bp, Homo sapiens
gaaatttttaaataa

SEQ ID NO: 1921270 - DNA, 15 bp, Homo sapiens
aaatttttaaataat

SEQ ID NO: 1921271 - DNA, 15 bp, Homo sapiens
aatttttaaataatg

SEQ ID NO: 1921272 - DNA, 15 bp, Homo sapiens
atttttaaataatga

SEQ ID NO: 1921273 - DNA, 15 bp, Homo sapiens
tttttaaataatgac

SEQ ID NO: 1921274 - DNA, 15 bp, Homo sapiens
ttttaaataatgaca

SEQ ID NO: 1921275 - DNA, 15 bp, Homo sapiens
tttaaataatgacac

SEQ ID NO: 1921276 - DNA, 15 bp, Homo sapiens
ttaaataatgacacc

SEQ ID NO: 1921277 - DNA, 15 bp, Homo sapiens
taaataatgacacca

SEQ ID NO: 1921278 - DNA, 15 bp, Homo sapiens
aaataatgacaccaa

SEQ ID NO: 1921279 - DNA, 15 bp, Homo sapiens
aataatgacaccaaa

SEQ ID NO: 1921280 - DNA, 15 bp, Homo sapiens
ataatgacaccaaaa

SEQ ID NO: 1921281 - DNA, 15 bp, Homo sapiens
taatgacaccaaaaa

SEQ ID NO: 1921282 - DNA, 15 bp, Homo sapiens
aatgacaccaaaaag

SEQ ID NO: 1921283 - DNA, 15 bp, Homo sapiens
atgacaccaaaaaga

SEQ ID NO: 1921284 - DNA, 15 bp, Homo sapiens
tgacaccaaaaagag

SEQ ID NO: 1921285 - DNA, 15 bp, Homo sapiens
gacaccaaaaagaga

SEQ ID NO: 1921286 - DNA, 15 bp, Homo sapiens
acaccaaaaagagat

SEQ ID NO: 1921287 - DNA, 15 bp, Homo sapiens
caccaaaaagagatt

SEQ ID NO: 1921288 - DNA, 15 bp, Homo sapiens
accaaaaagagatta

SEQ ID NO: 1921289 - DNA, 15 bp, Homo sapiens
ccaaaaagagattaa

SEQ ID NO: 1921290 - DNA, 15 bp, Homo sapiens
caaaaagagattaac

SEQ ID NO: 1921291 - DNA, 15 bp, Homo sapiens
aaaaagagattaact

SEQ ID NO: 1921292 - DNA, 15 bp, Homo sapiens
aaaagagattaactg

SEQ ID NO: 1921293 - DNA, 15 bp, Homo sapiens
aaagagattaactgc

SEQ ID NO: 1921294 - DNA, 15 bp, Homo sapiens
aagagattaactgct

SEQ ID NO: 1921295 - DNA, 15 bp, Homo sapiens
agagattaactgctg

SEQ ID NO: 1921296 - DNA, 15 bp, Homo sapiens
gagattaactgctgc

SEQ ID NO: 1921297 - DNA, 15 bp, Homo sapiens
agattaactgctgcc

SEQ ID NO: 1921298 - DNA, 15 bp, Homo sapiens
gattaactgctgcct

SEQ ID NO: 1921299 - DNA, 15 bp, Homo sapiens
attaactgctgcctt

SEQ ID NO: 1921300 - DNA, 15 bp, Homo sapiens
ttaactgctgccttc

SEQ ID NO: 1921301 - DNA, 15 bp, Homo sapiens
taactgctgccttct

SEQ ID NO: 1921302 - DNA, 15 bp, Homo sapiens
aactgctgccttcta

SEQ ID NO: 1921303 - DNA, 15 bp, Homo sapiens
actgctgccttctag

SEQ ID NO: 1921304 - DNA, 15 bp, Homo sapiens
ctgctgccttctaga

SEQ ID NO: 1921305 - DNA, 15 bp, Homo sapiens
tgctgccttctagaa

SEQ ID NO: 1921306 - DNA, 15 bp, Homo sapiens
gctgccttctagaat

SEQ ID NO: 1921307 - DNA, 15 bp, Homo sapiens
ctgccttctagaatc

SEQ ID NO: 1921308 - DNA, 15 bp, Homo sapiens
tgccttctagaatcc

SEQ ID NO: 1921309 - DNA, 15 bp, Homo sapiens
gccttctagaatccc

SEQ ID NO: 1921310 - DNA, 15 bp, Homo sapiens
ccttctagaatccca

SEQ ID NO: 1921311 - DNA, 15 bp, Homo sapiens
cttctagaatcccaa

SEQ ID NO: 1921312 - DNA, 15 bp, Homo sapiens
ttctagaatcccaac

SEQ ID NO: 1921313 - DNA, 15 bp, Homo sapiens
tctagaatcccaaca

SEQ ID NO: 1921314 - DNA, 15 bp, Homo sapiens
ctagaatcccaacat

SEQ ID NO: 1921315 - DNA, 15 bp, Homo sapiens
tagaatcccaacata

SEQ ID NO: 1921316 - DNA, 15 bp, Homo sapiens
agaatcccaacatag

SEQ ID NO: 1921317 - DNA, 15 bp, Homo sapiens
gaatcccaacatagc

SEQ ID NO: 1921318 - DNA, 15 bp, Homo sapiens
aatcccaacatagca

SEQ ID NO: 1921319 - DNA, 15 bp, Homo sapiens
atcccaacatagcaa

SEQ ID NO: 1921320 - DNA, 15 bp, Homo sapiens
tcccaacatagcaac

SEQ ID NO: 1921321 - DNA, 15 bp, Homo sapiens
cccaacatagcaaca

SEQ ID NO: 1921322 - DNA, 15 bp, Homo sapiens
ccaacatagcaacag

SEQ ID NO: 1921323 - DNA, 15 bp, Homo sapiens
caacatagcaacagc

SEQ ID NO: 1921324 - DNA, 15 bp, Homo sapiens
aacatagcaacagcc

SEQ ID NO: 1921325 - DNA, 15 bp, Homo sapiens
acatagcaacagccc

SEQ ID NO: 1921326 - DNA, 15 bp, Homo sapiens
catagcaacagcccc

SEQ ID NO: 1921327 - DNA, 15 bp, Homo sapiens
atagcaacagcccct

SEQ ID NO: 1921328 - DNA, 15 bp, Homo sapiens
tagcaacagcccctt

SEQ ID NO: 1921329 - DNA, 15 bp, Homo sapiens
agcaacagccccttc

SEQ ID NO: 1921330 - DNA, 15 bp, Homo sapiens
gcaacagccccttca

SEQ ID NO: 1921331 - DNA, 15 bp, Homo sapiens
caacagccccttcaa

SEQ ID NO: 1921332 - DNA, 15 bp, Homo sapiens
aacagccccttcaag

SEQ ID NO: 1921333 - DNA, 15 bp, Homo sapiens
acagccccttcaaga

SEQ ID NO: 1921334 - DNA, 15 bp, Homo sapiens
cagccccttcaagaa

SEQ ID NO: 1921335 - DNA, 15 bp, Homo sapiens
agccccttcaagaaa

SEQ ID NO: 1921336 - DNA, 15 bp, Homo sapiens
gccccttcaagaaat

SEQ ID NO: 1921337 - DNA, 15 bp, Homo sapiens
ccccttcaagaaatt

SEQ ID NO: 1921338 - DNA, 15 bp, Homo sapiens
cccttcaagaaattt

SEQ ID NO: 1921339 - DNA, 15 bp, Homo sapiens
ccttcaagaaattta

SEQ ID NO: 1921340 - DNA, 15 bp, Homo sapiens
cttcaagaaatttag

SEQ ID NO: 1921341 - DNA, 15 bp, Homo sapiens
ttcaagaaatttaga

SEQ ID NO: 1921342 - DNA, 15 bp, Homo sapiens
tcaagaaatttagat

SEQ ID NO: 1921343 - DNA, 15 bp, Homo sapiens
caagaaatttagata

SEQ ID NO: 1921344 - DNA, 15 bp, Homo sapiens
aagaaatttagatat

SEQ ID NO: 1921345 - DNA, 15 bp, Homo sapiens
agaaatttagatata

SEQ ID NO: 1921346 - DNA, 15 bp, Homo sapiens
gaaatttagatatat

SEQ ID NO: 1921347 - DNA, 15 bp, Homo sapiens
aaatttagatatata

SEQ ID NO: 1921348 - DNA, 15 bp, Homo sapiens
aatttagatatatat

SEQ ID NO: 1921349 - DNA, 15 bp, Homo sapiens
atttagatatatata

SEQ ID NO: 1921350 - DNA, 15 bp, Homo sapiens
tttagatatatatac

SEQ ID NO: 1921351 - DNA, 15 bp, Homo sapiens
ttagatatatataca

SEQ ID NO: 1921352 - DNA, 15 bp, Homo sapiens
tagatatatatacaa

SEQ ID NO: 1921353 - DNA, 15 bp, Homo sapiens
agatatatatacaat

SEQ ID NO: 1921354 - DNA, 15 bp, Homo sapiens
gatatatatacaatt

SEQ ID NO: 1921355 - DNA, 15 bp, Homo sapiens
atatatatacaatta

SEQ ID NO: 1921356 - DNA, 15 bp, Homo sapiens
tatatatacaattaa

SEQ ID NO: 1921357 - DNA, 15 bp, Homo sapiens
atatatacaattaat

SEQ ID NO: 1921358 - DNA, 15 bp, Homo sapiens
tatatacaattaatg

SEQ ID NO: 1921359 - DNA, 15 bp, Homo sapiens
atatacaattaatgc

SEQ ID NO: 1921360 - DNA, 15 bp, Homo sapiens
tatacaattaatgct

SEQ ID NO: 1921361 - DNA, 15 bp, Homo sapiens
atacaattaatgctc

SEQ ID NO: 1921362 - DNA, 15 bp, Homo sapiens
tacaattaatgctca

SEQ ID NO: 1921363 - DNA, 15 bp, Homo sapiens
acaattaatgctcat

SEQ ID NO: 1921364 - DNA, 15 bp, Homo sapiens
caattaatgctcatt

SEQ ID NO: 1921365 - DNA, 15 bp, Homo sapiens
aattaatgctcatta

SEQ ID NO: 1921366 - DNA, 15 bp, Homo sapiens
attaatgctcattat

SEQ ID NO: 1921367 - DNA, 15 bp, Homo sapiens
ttaatgctcattatt

SEQ ID NO: 1921368 - DNA, 15 bp, Homo sapiens
taatgctcattatta

SEQ ID NO: 1921369 - DNA, 15 bp, Homo sapiens
aatgctcattattaa

SEQ ID NO: 1921370 - DNA, 15 bp, Homo sapiens
atgctcattattaaa

SEQ ID NO: 1921371 - DNA, 15 bp, Homo sapiens
tgctcattattaaaa

SEQ ID NO: 1921372 - DNA, 15 bp, Homo sapiens
gctcattattaaaag

SEQ ID NO: 1921373 - DNA, 15 bp, Homo sapiens
ctcattattaaaaga

SEQ ID NO: 1921374 - DNA, 15 bp, Homo sapiens
tcattattaaaagag

SEQ ID NO: 1921375 - DNA, 15 bp, Homo sapiens
cattattaaaagaga

SEQ ID NO: 1921376 - DNA, 15 bp, Homo sapiens
ttaaaagagaaagat

SEQ ID NO: 1921377 - DNA, 15 bp, Homo sapiens
taaaagagaaagatc

SEQ ID NO: 1921378 - DNA, 15 bp, Homo sapiens
aaaagagaaagatct

SEQ ID NO: 1921379 - DNA, 15 bp, Homo sapiens
aaagagaaagatctg

SEQ ID NO: 1921380 - DNA, 15 bp, Homo sapiens
aagagaaagatctgg

SEQ ID NO: 1921381 - DNA, 15 bp, Homo sapiens
agagaaagatctggg

SEQ ID NO: 1921382 - DNA, 15 bp, Homo sapiens
gagaaagatctggga

SEQ ID NO: 1921383 - DNA, 15 bp, Homo sapiens
agaaagatctgggac

SEQ ID NO: 1921384 - DNA, 15 bp, Homo sapiens
gaaagatctgggact

SEQ ID NO: 1921385 - DNA, 15 bp, Homo sapiens
aaagatctgggacta

SEQ ID NO: 1921386 - DNA, 15 bp, Homo sapiens
aagatctgggactaa

SEQ ID NO: 1921387 - DNA, 15 bp, Homo sapiens
agatctgggactaat

SEQ ID NO: 1921388 - DNA, 15 bp, Homo sapiens
gatctgggactaata

SEQ ID NO: 1921389 - DNA, 15 bp, Homo sapiens
atctgggactaataa

SEQ ID NO: 1921390 - DNA, 15 bp, Homo sapiens
tctgggactaataat

SEQ ID NO: 1921391 - DNA, 15 bp, Homo sapiens
ctgggactaataatg

SEQ ID NO: 1921392 - DNA, 15 bp, Homo sapiens
tgggactaataatgt

SEQ ID NO: 1921393 - DNA, 15 bp, Homo sapiens
gggactaataatgtt

SEQ ID NO: 1921394 - DNA, 15 bp, Homo sapiens
ggactaataatgttt

SEQ ID NO: 1921395 - DNA, 15 bp, Homo sapiens
gactaataatgtttt

SEQ ID NO: 1921396 - DNA, 15 bp, Homo sapiens
actaataatgtttta

SEQ ID NO: 1921397 - DNA, 15 bp, Homo sapiens
ctaataatgttttaa

SEQ ID NO: 1921398 - DNA, 15 bp, Homo sapiens
taataatgttttaaa

SEQ ID NO: 1921399 - DNA, 15 bp, Homo sapiens
aataatgttttaaat

SEQ ID NO: 1921400 - DNA, 15 bp, Homo sapiens
ataatgttttaaatg

SEQ ID NO: 1921401 - DNA, 15 bp, Homo sapiens
taatgttttaaatgc

SEQ ID NO: 1921402 - DNA, 15 bp, Homo sapiens
aatgttttaaatgct

SEQ ID NO: 1921403 - DNA, 15 bp, Homo sapiens
atgttttaaatgctt

SEQ ID NO: 1921404 - DNA, 15 bp, Homo sapiens
tgttttaaatgcttt

SEQ ID NO: 1921405 - DNA, 15 bp, Homo sapiens
gttttaaatgctttg

SEQ ID NO: 1921406 - DNA, 15 bp, Homo sapiens
ttttaaatgctttgc

SEQ ID NO: 1921407 - DNA, 15 bp, Homo sapiens
tttaaatgctttgca

SEQ ID NO: 1921408 - DNA, 15 bp, Homo sapiens
ttaaatgctttgcac

SEQ ID NO: 1921409 - DNA, 15 bp, Homo sapiens
taaatgctttgcaca

SEQ ID NO: 1921410 - DNA, 15 bp, Homo sapiens
aaatgctttgcacat

SEQ ID NO: 1921411 - DNA, 15 bp, Homo sapiens
aatgctttgcacatg

SEQ ID NO: 1921412 - DNA, 15 bp, Homo sapiens
atgctttgcacatgt

SEQ ID NO: 1921413 - DNA, 15 bp, Homo sapiens
tgctttgcacatgtt

SEQ ID NO: 1921414 - DNA, 15 bp, Homo sapiens
gctttgcacatgtta

SEQ ID NO: 1921415 - DNA, 15 bp, Homo sapiens
ctttgcacatgttaa

SEQ ID NO: 1921416 - DNA, 15 bp, Homo sapiens
tttgcacatgttaac

SEQ ID NO: 1921417 - DNA, 15 bp, Homo sapiens
ttgcacatgttaact

SEQ ID NO: 1921418 - DNA, 15 bp, Homo sapiens
tgcacatgttaacta

SEQ ID NO: 1921419 - DNA, 15 bp, Homo sapiens
gcacatgttaactaa

SEQ ID NO: 1921420 - DNA, 15 bp, Homo sapiens
cacatgttaactaat

SEQ ID NO: 1921421 - DNA, 15 bp, Homo sapiens
acatgttaactaatt

SEQ ID NO: 1921422 - DNA, 15 bp, Homo sapiens
catgttaactaattt

SEQ ID NO: 1921423 - DNA, 15 bp, Homo sapiens
atgttaactaatttc

SEQ ID NO: 1921424 - DNA, 15 bp, Homo sapiens
tgttaactaatttca

SEQ ID NO: 1921425 - DNA, 15 bp, Homo sapiens
gttaactaatttcat

SEQ ID NO: 1921426 - DNA, 15 bp, Homo sapiens
ttaactaatttcatt

SEQ ID NO: 1921427 - DNA, 15 bp, Homo sapiens
taactaatttcatta

SEQ ID NO: 1921428 - DNA, 15 bp, Homo sapiens
aactaatttcattat

SEQ ID NO: 1921429 - DNA, 15 bp, Homo sapiens
actaatttcattatt

SEQ ID NO: 1921430 - DNA, 15 bp, Homo sapiens
ctaatttcattattt

SEQ ID NO: 1921431 - DNA, 15 bp, Homo sapiens
aatttcattatttaa

SEQ ID NO: 1921432 - DNA, 15 bp, Homo sapiens
atttcattatttaac

SEQ ID NO: 1921433 - DNA, 15 bp, Homo sapiens
tttcattatttaaca

SEQ ID NO: 1921434 - DNA, 15 bp, Homo sapiens
ttcattatttaacaa

SEQ ID NO: 1921435 - DNA, 15 bp, Homo sapiens
tcattatttaacaac

SEQ ID NO: 1921436 - DNA, 15 bp, Homo sapiens
cattatttaacaact

SEQ ID NO: 1921437 - DNA, 15 bp, Homo sapiens
attatttaacaactc

SEQ ID NO: 1921438 - DNA, 15 bp, Homo sapiens
ttatttaacaactct

SEQ ID NO: 1921439 - DNA, 15 bp, Homo sapiens
tatttaacaactctg

SEQ ID NO: 1921440 - DNA, 15 bp, Homo sapiens
atttaacaactctgt

SEQ ID NO: 1921441 - DNA, 15 bp, Homo sapiens
tttaacaactctgtt

SEQ ID NO: 1921442 - DNA, 15 bp, Homo sapiens
ttaacaactctgttg

SEQ ID NO: 1921443 - DNA, 15 bp, Homo sapiens
taacaactctgttgg

SEQ ID NO: 1921444 - DNA, 15 bp, Homo sapiens
aacaactctgttggg

SEQ ID NO: 1921445 - DNA, 15 bp, Homo sapiens
acaactctgttgggc

SEQ ID NO: 1921446 - DNA, 15 bp, Homo sapiens
caactctgttgggcg

SEQ ID NO: 1921447 - DNA, 15 bp, Homo sapiens
aactctgttgggcga

SEQ ID NO: 1921448 - DNA, 15 bp, Homo sapiens
actctgttgggcgag

SEQ ID NO: 1921449 - DNA, 15 bp, Homo sapiens
ctctgttgggcgagg

SEQ ID NO: 1921450 - DNA, 15 bp, Homo sapiens
tctgttgggcgaggt

SEQ ID NO: 1921451 - DNA, 15 bp, Homo sapiens
ctgttgggcgaggta

SEQ ID NO: 1921452 - DNA, 15 bp, Homo sapiens
tgttgggcgaggtat

SEQ ID NO: 1921453 - DNA, 15 bp, Homo sapiens
gttgggcgaggtatt

SEQ ID NO: 1921454 - DNA, 15 bp, Homo sapiens
ttgggcgaggtatta

SEQ ID NO: 1921455 - DNA, 15 bp, Homo sapiens
tgggcgaggtattat

SEQ ID NO: 1921456 - DNA, 15 bp, Homo sapiens
gggcgaggtattatt

SEQ ID NO: 1921457 - DNA, 15 bp, Homo sapiens
ggcgaggtattatta

SEQ ID NO: 1921458 - DNA, 15 bp, Homo sapiens
gcgaggtattattat

SEQ ID NO: 1921459 - DNA, 15 bp, Homo sapiens
cgaggtattattatt

SEQ ID NO: 1921460 - DNA, 15 bp, Homo sapiens
gaggtattattatta

SEQ ID NO: 1921461 - DNA, 15 bp, Homo sapiens
aggtattattattat

SEQ ID NO: 1921462 - DNA, 15 bp, Homo sapiens
ggtattattattatc

SEQ ID NO: 1921463 - DNA, 15 bp, Homo sapiens
gtattattattatct

SEQ ID NO: 1921464 - DNA, 15 bp, Homo sapiens
tattattattatctc

SEQ ID NO: 1921465 - DNA, 15 bp, Homo sapiens
attattattatctca

SEQ ID NO: 1921466 - DNA, 15 bp, Homo sapiens
ttattattatctcat

SEQ ID NO: 1921467 - DNA, 15 bp, Homo sapiens
tattattatctcatc

SEQ ID NO: 1921468 - DNA, 15 bp, Homo sapiens
attattatctcatcc

SEQ ID NO: 1921469 - DNA, 15 bp, Homo sapiens
ttattatctcatcct

SEQ ID NO: 1921470 - DNA, 15 bp, Homo sapiens
tattatctcatccta

SEQ ID NO: 1921471 - DNA, 15 bp, Homo sapiens
attatctcatcctac

SEQ ID NO: 1921472 - DNA, 15 bp, Homo sapiens
ttatctcatcctaca

SEQ ID NO: 1921473 - DNA, 15 bp, Homo sapiens
tatctcatcctacag

SEQ ID NO: 1921474 - DNA, 15 bp, Homo sapiens
atctcatcctacaga

SEQ ID NO: 1921475 - DNA, 15 bp, Homo sapiens
tctcatcctacagat

SEQ ID NO: 1921476 - DNA, 15 bp, Homo sapiens
ctcatcctacagatg

SEQ ID NO: 1921477 - DNA, 15 bp, Homo sapiens
tcatcctacagatga

SEQ ID NO: 1921478 - DNA, 15 bp, Homo sapiens
catcctacagatgag

SEQ ID NO: 1921479 - DNA, 15 bp, Homo sapiens
atcctacagatgaga

SEQ ID NO: 1921480 - DNA, 15 bp, Homo sapiens
tcctacagatgagaa

SEQ ID NO: 1921481 - DNA, 15 bp, Homo sapiens
cctacagatgagaat

SEQ ID NO: 1921482 - DNA, 15 bp, Homo sapiens
ctacagatgagaatg

SEQ ID NO: 1921483 - DNA, 15 bp, Homo sapiens
tacagatgagaatgt

SEQ ID NO: 1921484 - DNA, 15 bp, Homo sapiens
acagatgagaatgtt

SEQ ID NO: 1921485 - DNA, 15 bp, Homo sapiens
cagatgagaatgttg

SEQ ID NO: 1921486 - DNA, 15 bp, Homo sapiens
agatgagaatgttga

SEQ ID NO: 1921487 - DNA, 15 bp, Homo sapiens
gatgagaatgttgaa

SEQ ID NO: 1921488 - DNA, 15 bp, Homo sapiens
atgagaatgttgaag

SEQ ID NO: 1921489 - DNA, 15 bp, Homo sapiens
tgagaatgttgaagc

SEQ ID NO: 1921490 - DNA, 15 bp, Homo sapiens
gagaatgttgaagct

SEQ ID NO: 1921491 - DNA, 15 bp, Homo sapiens
agaatgttgaagctc

SEQ ID NO: 1921492 - DNA, 15 bp, Homo sapiens
gaatgttgaagctca

SEQ ID NO: 1921493 - DNA, 15 bp, Homo sapiens
aatgttgaagctcag

SEQ ID NO: 1921494 - DNA, 15 bp, Homo sapiens
atgttgaagctcaga

SEQ ID NO: 1921495 - DNA, 15 bp, Homo sapiens
tgttgaagctcagag

SEQ ID NO: 1921496 - DNA, 15 bp, Homo sapiens
gttgaagctcagaga

SEQ ID NO: 1921497 - DNA, 15 bp, Homo sapiens
ttgaagctcagagat

SEQ ID NO: 1921498 - DNA, 15 bp, Homo sapiens
tgaagctcagagatg

SEQ ID NO: 1921499 - DNA, 15 bp, Homo sapiens
gaagctcagagatgt

SEQ ID NO: 1921500 - DNA, 15 bp, Homo sapiens
tcagagatgttaaat

SEQ ID NO: 1921501 - DNA, 15 bp, Homo sapiens
cagagatgttaaata

SEQ ID NO: 1921502 - DNA, 15 bp, Homo sapiens
agagatgttaaataa

SEQ ID NO: 1921503 - DNA, 15 bp, Homo sapiens
gagatgttaaataat

SEQ ID NO: 1921504 - DNA, 15 bp, Homo sapiens
agatgttaaataatt

SEQ ID NO: 1921505 - DNA, 15 bp, Homo sapiens
gatgttaaataattt

SEQ ID NO: 1921506 - DNA, 15 bp, Homo sapiens
atgttaaataatttc

SEQ ID NO: 1921507 - DNA, 15 bp, Homo sapiens
tgttaaataatttcc

SEQ ID NO: 1921508 - DNA, 15 bp, Homo sapiens
gttaaataatttccc

SEQ ID NO: 1921509 - DNA, 15 bp, Homo sapiens
ttaaataatttcccc

SEQ ID NO: 1921510 - DNA, 15 bp, Homo sapiens
taaataatttcccca

SEQ ID NO: 1921511 - DNA, 15 bp, Homo sapiens
aaataatttccccaa

SEQ ID NO: 1921512 - DNA, 15 bp, Homo sapiens
aataatttccccaag

SEQ ID NO: 1921513 - DNA, 15 bp, Homo sapiens
ataatttccccaagg

SEQ ID NO: 1921514 - DNA, 15 bp, Homo sapiens
taatttccccaaggc

SEQ ID NO: 1921515 - DNA, 15 bp, Homo sapiens
aatttccccaaggct

SEQ ID NO: 1921516 - DNA, 15 bp, Homo sapiens
atttccccaaggcta

SEQ ID NO: 1921517 - DNA, 15 bp, Homo sapiens
tttccccaaggctat

SEQ ID NO: 1921518 - DNA, 15 bp, Homo sapiens
ttccccaaggctatg

SEQ ID NO: 1921519 - DNA, 15 bp, Homo sapiens
tccccaaggctatgc

SEQ ID NO: 1921520 - DNA, 15 bp, Homo sapiens
ccccaaggctatgca

SEQ ID NO: 1921521 - DNA, 15 bp, Homo sapiens
cccaaggctatgcac

SEQ ID NO: 1921522 - DNA, 15 bp, Homo sapiens
ccaaggctatgcaca

SEQ ID NO: 1921523 - DNA, 15 bp, Homo sapiens
caaggctatgcacat

SEQ ID NO: 1921524 - DNA, 15 bp, Homo sapiens
aaggctatgcacata

SEQ ID NO: 1921525 - DNA, 15 bp, Homo sapiens
aggctatgcacatac

SEQ ID NO: 1921526 - DNA, 15 bp, Homo sapiens
ggctatgcacatact

SEQ ID NO: 1921527 - DNA, 15 bp, Homo sapiens
gctatgcacatacta

SEQ ID NO: 1921528 - DNA, 15 bp, Homo sapiens
ctatgcacatactaa

SEQ ID NO: 1921529 - DNA, 15 bp, Homo sapiens
tatgcacatactaag

SEQ ID NO: 1921530 - DNA, 15 bp, Homo sapiens
atgcacatactaaga

SEQ ID NO: 1921531 - DNA, 15 bp, Homo sapiens
tgcacatactaagat

SEQ ID NO: 1921532 - DNA, 15 bp, Homo sapiens
gcacatactaagatg

SEQ ID NO: 1921533 - DNA, 15 bp, Homo sapiens
cacatactaagatgg

SEQ ID NO: 1921534 - DNA, 15 bp, Homo sapiens
acatactaagatggt

SEQ ID NO: 1921535 - DNA, 15 bp, Homo sapiens
catactaagatggtg

SEQ ID NO: 1921536 - DNA, 15 bp, Homo sapiens
atactaagatggtga

SEQ ID NO: 1921537 - DNA, 15 bp, Homo sapiens
tactaagatggtgaa

SEQ ID NO: 1921538 - DNA, 15 bp, Homo sapiens
actaagatggtgaag

SEQ ID NO: 1921539 - DNA, 15 bp, Homo sapiens
ctaagatggtgaaga

SEQ ID NO: 1921540 - DNA, 15 bp, Homo sapiens
taagatggtgaagag

SEQ ID NO: 1921541 - DNA, 15 bp, Homo sapiens
aagatggtgaagagc

SEQ ID NO: 1921542 - DNA, 15 bp, Homo sapiens
agatggtgaagagct

SEQ ID NO: 1921543 - DNA, 15 bp, Homo sapiens
gatggtgaagagcta

SEQ ID NO: 1921544 - DNA, 15 bp, Homo sapiens
atggtgaagagctaa

SEQ ID NO: 1921545 - DNA, 15 bp, Homo sapiens
tggtgaagagctaag

SEQ ID NO: 1921546 - DNA, 15 bp, Homo sapiens
ggtgaagagctaaga

SEQ ID NO: 1921547 - DNA, 15 bp, Homo sapiens
gtgaagagctaagaa

SEQ ID NO: 1921548 - DNA, 15 bp, Homo sapiens
tgaagagctaagaaa

SEQ ID NO: 1921549 - DNA, 15 bp, Homo sapiens
gaagagctaagaaaa

SEQ ID NO: 1921550 - DNA, 15 bp, Homo sapiens
aagagctaagaaaac

SEQ ID NO: 1921551 - DNA, 15 bp, Homo sapiens
agagctaagaaaaca

SEQ ID NO: 1921552 - DNA, 15 bp, Homo sapiens
gagctaagaaaacag

SEQ ID NO: 1921553 - DNA, 15 bp, Homo sapiens
agctaagaaaacagt

SEQ ID NO: 1921554 - DNA, 15 bp, Homo sapiens
gctaagaaaacagtc

SEQ ID NO: 1921555 - DNA, 15 bp, Homo sapiens
ctaagaaaacagtct

SEQ ID NO: 1921556 - DNA, 15 bp, Homo sapiens
taagaaaacagtctg

SEQ ID NO: 1921557 - DNA, 15 bp, Homo sapiens
aagaaaacagtctgt

SEQ ID NO: 1921558 - DNA, 15 bp, Homo sapiens
agaaaacagtctgta

SEQ ID NO: 1921559 - DNA, 15 bp, Homo sapiens
gaaaacagtctgtag

SEQ ID NO: 1921560 - DNA, 15 bp, Homo sapiens
aaaacagtctgtagt

SEQ ID NO: 1921561 - DNA, 15 bp, Homo sapiens
aaacagtctgtagtt

SEQ ID NO: 1921562 - DNA, 15 bp, Homo sapiens
aacagtctgtagttt

SEQ ID NO: 1921563 - DNA, 15 bp, Homo sapiens
acagtctgtagtttt

SEQ ID NO: 1921564 - DNA, 15 bp, Homo sapiens
cagtctgtagttttc

SEQ ID NO: 1921565 - DNA, 15 bp, Homo sapiens
agtctgtagttttcc

SEQ ID NO: 1921566 - DNA, 15 bp, Homo sapiens
gtctgtagttttcct

SEQ ID NO: 1921567 - DNA, 15 bp, Homo sapiens
tctgtagttttcctg

SEQ ID NO: 1921568 - DNA, 15 bp, Homo sapiens
ctgtagttttcctgc

SEQ ID NO: 1921569 - DNA, 15 bp, Homo sapiens
tgtagttttcctgct

SEQ ID NO: 1921570 - DNA, 15 bp, Homo sapiens
gtagttttcctgcta

SEQ ID NO: 1921571 - DNA, 15 bp, Homo sapiens
tagttttcctgctat

SEQ ID NO: 1921572 - DNA, 15 bp, Homo sapiens
agttttcctgctatg

SEQ ID NO: 1921573 - DNA, 15 bp, Homo sapiens
gttttcctgctatgg

SEQ ID NO: 1921574 - DNA, 15 bp, Homo sapiens
ttttcctgctatggt

SEQ ID NO: 1921575 - DNA, 15 bp, Homo sapiens
tttcctgctatggtg

SEQ ID NO: 1921576 - DNA, 15 bp, Homo sapiens
ttcctgctatggtga

SEQ ID NO: 1921577 - DNA, 15 bp, Homo sapiens
tcctgctatggtgac

SEQ ID NO: 1921578 - DNA, 15 bp, Homo sapiens
cctgctatggtgacc

SEQ ID NO: 1921579 - DNA, 15 bp, Homo sapiens
ctgctatggtgacca

SEQ ID NO: 1921580 - DNA, 15 bp, Homo sapiens
tgctatggtgaccat

SEQ ID NO: 1921581 - DNA, 15 bp, Homo sapiens
gctatggtgaccatt

SEQ ID NO: 1921582 - DNA, 15 bp, Homo sapiens
ctatggtgaccattt

SEQ ID NO: 1921583 - DNA, 15 bp, Homo sapiens
tatggtgaccatttc

SEQ ID NO: 1921584 - DNA, 15 bp, Homo sapiens
atggtgaccatttcc

SEQ ID NO: 1921585 - DNA, 15 bp, Homo sapiens
tggtgaccatttcca

SEQ ID NO: 1921586 - DNA, 15 bp, Homo sapiens
ggtgaccatttccat

SEQ ID NO: 1921587 - DNA, 15 bp, Homo sapiens
gtgaccatttccatg

SEQ ID NO: 1921588 - DNA, 15 bp, Homo sapiens
tgaccatttccatga

SEQ ID NO: 1921589 - DNA, 15 bp, Homo sapiens
gaccatttccatgac

SEQ ID NO: 1921590 - DNA, 15 bp, Homo sapiens
accatttccatgact

SEQ ID NO: 1921591 - DNA, 15 bp, Homo sapiens
ccatttccatgactt

SEQ ID NO: 1921592 - DNA, 15 bp, Homo sapiens
catttccatgacttt

SEQ ID NO: 1921593 - DNA, 15 bp, Homo sapiens
atttccatgactttg

SEQ ID NO: 1921594 - DNA, 15 bp, Homo sapiens
tttccatgactttgg

SEQ ID NO: 1921595 - DNA, 15 bp, Homo sapiens
ttccatgactttggc

SEQ ID NO: 1921596 - DNA, 15 bp, Homo sapiens
tccatgactttggca

SEQ ID NO: 1921597 - DNA, 15 bp, Homo sapiens
ccatgactttggcat

SEQ ID NO: 1921598 - DNA, 15 bp, Homo sapiens
catgactttggcatc

SEQ ID NO: 1921599 - DNA, 15 bp, Homo sapiens
atgactttggcatct

SEQ ID NO: 1921600 - DNA, 15 bp, Homo sapiens
tgactttggcatctt

SEQ ID NO: 1921601 - DNA, 15 bp, Homo sapiens
gactttggcatcttt

SEQ ID NO: 1921602 - DNA, 15 bp, Homo sapiens
actttggcatctttt

SEQ ID NO: 1921603 - DNA, 15 bp, Homo sapiens
ctttggcatctttta

SEQ ID NO: 1921604 - DNA, 15 bp, Homo sapiens
tttggcatcttttag

SEQ ID NO: 1921605 - DNA, 15 bp, Homo sapiens
ttggcatcttttaga

SEQ ID NO: 1921606 - DNA, 15 bp, Homo sapiens
tggcatcttttagat

SEQ ID NO: 1921607 - DNA, 15 bp, Homo sapiens
ggcatcttttagata

SEQ ID NO: 1921608 - DNA, 15 bp, Homo sapiens
gcatcttttagataa

SEQ ID NO: 1921609 - DNA, 15 bp, Homo sapiens
catcttttagataac

SEQ ID NO: 1921610 - DNA, 15 bp, Homo sapiens
atcttttagataaca

SEQ ID NO: 1921611 - DNA, 15 bp, Homo sapiens
tcttttagataacac

SEQ ID NO: 1921612 - DNA, 15 bp, Homo sapiens
cttttagataacaca

SEQ ID NO: 1921613 - DNA, 15 bp, Homo sapiens
ttttagataacacag

SEQ ID NO: 1921614 - DNA, 15 bp, Homo sapiens
tttagataacacagg

SEQ ID NO: 1921615 - DNA, 15 bp, Homo sapiens
ttagataacacaggg

SEQ ID NO: 1921616 - DNA, 15 bp, Homo sapiens
tagataacacagggg

SEQ ID NO: 1921617 - DNA, 15 bp, Homo sapiens
agataacacaggggg

SEQ ID NO: 1921618 - DNA, 15 bp, Homo sapiens
gataacacaggggga

SEQ ID NO: 1921619 - DNA, 15 bp, Homo sapiens
ataacacagggggat

SEQ ID NO: 1921620 - DNA, 15 bp, Homo sapiens
taacacagggggatt

SEQ ID NO: 1921621 - DNA, 15 bp, Homo sapiens
aacacagggggattc

SEQ ID NO: 1921622 - DNA, 15 bp, Homo sapiens
acacagggggattct

SEQ ID NO: 1921623 - DNA, 15 bp, Homo sapiens
cacagggggattctg

SEQ ID NO: 1921624 - DNA, 15 bp, Homo sapiens
acagggggattctga

SEQ ID NO: 1921625 - DNA, 15 bp, Homo sapiens
cagggggattctgag

SEQ ID NO: 1921626 - DNA, 15 bp, Homo sapiens
agggggattctgagg

SEQ ID NO: 1921627 - DNA, 15 bp, Homo sapiens
gggggattctgaggc

SEQ ID NO: 1921628 - DNA, 15 bp, Homo sapiens
ggggattctgaggct

SEQ ID NO: 1921629 - DNA, 15 bp, Homo sapiens
gggattctgaggctt

SEQ ID NO: 1921630 - DNA, 15 bp, Homo sapiens
ggattctgaggcttg

SEQ ID NO: 1921631 - DNA, 15 bp, Homo sapiens
gattctgaggcttgg

SEQ ID NO: 1921632 - DNA, 15 bp, Homo sapiens
attctgaggcttgga

SEQ ID NO: 1921633 - DNA, 15 bp, Homo sapiens
ttctgaggcttggaa

SEQ ID NO: 1921634 - DNA, 15 bp, Homo sapiens
tctgaggcttggaaa

SEQ ID NO: 1921635 - DNA, 15 bp, Homo sapiens
ctgaggcttggaaaa

SEQ ID NO: 1921636 - DNA, 15 bp, Homo sapiens
tgaggcttggaaaag

SEQ ID NO: 1921637 - DNA, 15 bp, Homo sapiens
gaggcttggaaaaga

SEQ ID NO: 1921638 - DNA, 15 bp, Homo sapiens
aggcttggaaaagat

SEQ ID NO: 1921639 - DNA, 15 bp, Homo sapiens
ggcttggaaaagatt

SEQ ID NO: 1921640 - DNA, 15 bp, Homo sapiens
gcttggaaaagatta

SEQ ID NO: 1921641 - DNA, 15 bp, Homo sapiens
cttggaaaagattac

SEQ ID NO: 1921642 - DNA, 15 bp, Homo sapiens
ttggaaaagattaca

SEQ ID NO: 1921643 - DNA, 15 bp, Homo sapiens
tggaaaagattacag

SEQ ID NO: 1921644 - DNA, 15 bp, Homo sapiens
ggaaaagattacagg

SEQ ID NO: 1921645 - DNA, 15 bp, Homo sapiens
gaaaagattacagga

SEQ ID NO: 1921646 - DNA, 15 bp, Homo sapiens
aaaagattacaggag

SEQ ID NO: 1921647 - DNA, 15 bp, Homo sapiens
aaagattacaggagt

SEQ ID NO: 1921648 - DNA, 15 bp, Homo sapiens
aagattacaggagtg

SEQ ID NO: 1921649 - DNA, 15 bp, Homo sapiens
agattacaggagtga

SEQ ID NO: 1921650 - DNA, 15 bp, Homo sapiens
gattacaggagtgaa

SEQ ID NO: 1921651 - DNA, 15 bp, Homo sapiens
attacaggagtgaag

SEQ ID NO: 1921652 - DNA, 15 bp, Homo sapiens
ttacaggagtgaaga

SEQ ID NO: 1921653 - DNA, 15 bp, Homo sapiens
tacaggagtgaagaa

SEQ ID NO: 1921654 - DNA, 15 bp, Homo sapiens
acaggagtgaagaaa

SEQ ID NO: 1921655 - DNA, 15 bp, Homo sapiens
caggagtgaagaaaa

SEQ ID NO: 1921656 - DNA, 15 bp, Homo sapiens
aggagtgaagaaaaa

SEQ ID NO: 1921657 - DNA, 15 bp, Homo sapiens
ggagtgaagaaaaag

SEQ ID NO: 1921658 - DNA, 15 bp, Homo sapiens
gagtgaagaaaaagc

SEQ ID NO: 1921659 - DNA, 15 bp, Homo sapiens
agtgaagaaaaagca

SEQ ID NO: 1921660 - DNA, 15 bp, Homo sapiens
gtgaagaaaaagcat

SEQ ID NO: 1921661 - DNA, 15 bp, Homo sapiens
tgaagaaaaagcatt

SEQ ID NO: 1921662 - DNA, 15 bp, Homo sapiens
gaagaaaaagcattg

SEQ ID NO: 1921663 - DNA, 15 bp, Homo sapiens
aagaaaaagcattga

SEQ ID NO: 1921664 - DNA, 15 bp, Homo sapiens
agaaaaagcattgaa

SEQ ID NO: 1921665 - DNA, 15 bp, Homo sapiens
gaaaaagcattgaac

SEQ ID NO: 1921666 - DNA, 15 bp, Homo sapiens
aaaaagcattgaact

SEQ ID NO: 1921667 - DNA, 15 bp, Homo sapiens
aaaagcattgaactg

SEQ ID NO: 1921668 - DNA, 15 bp, Homo sapiens
aaagcattgaactgg

SEQ ID NO: 1921669 - DNA, 15 bp, Homo sapiens
aagcattgaactgga

SEQ ID NO: 1921670 - DNA, 15 bp, Homo sapiens
agcattgaactggaa

SEQ ID NO: 1921671 - DNA, 15 bp, Homo sapiens
gcattgaactggaag

SEQ ID NO: 1921672 - DNA, 15 bp, Homo sapiens
cattgaactggaagt

SEQ ID NO: 1921673 - DNA, 15 bp, Homo sapiens
attgaactggaagtc

SEQ ID NO: 1921674 - DNA, 15 bp, Homo sapiens
ttgaactggaagtca

SEQ ID NO: 1921675 - DNA, 15 bp, Homo sapiens
tgaactggaagtcaa

SEQ ID NO: 1921676 - DNA, 15 bp, Homo sapiens
gaactggaagtcaaa

SEQ ID NO: 1921677 - DNA, 15 bp, Homo sapiens
aactggaagtcaaag

SEQ ID NO: 1921678 - DNA, 15 bp, Homo sapiens
actggaagtcaaaga

SEQ ID NO: 1921679 - DNA, 15 bp, Homo sapiens
ctggaagtcaaagac

SEQ ID NO: 1921680 - DNA, 15 bp, Homo sapiens
tggaagtcaaagact

SEQ ID NO: 1921681 - DNA, 15 bp, Homo sapiens
ggaagtcaaagactt

SEQ ID NO: 1921682 - DNA, 15 bp, Homo sapiens
gaagtcaaagacttc

SEQ ID NO: 1921683 - DNA, 15 bp, Homo sapiens
aagtcaaagacttca

SEQ ID NO: 1921684 - DNA, 15 bp, Homo sapiens
agtcaaagacttcat

SEQ ID NO: 1921685 - DNA, 15 bp, Homo sapiens
gtcaaagacttcatt

SEQ ID NO: 1921686 - DNA, 15 bp, Homo sapiens
tcaaagacttcattg

SEQ ID NO: 1921687 - DNA, 15 bp, Homo sapiens
caaagacttcattgg

SEQ ID NO: 1921688 - DNA, 15 bp, Homo sapiens
aaagacttcattgga

SEQ ID NO: 1921689 - DNA, 15 bp, Homo sapiens
aagacttcattggag

SEQ ID NO: 1921690 - DNA, 15 bp, Homo sapiens
agacttcattggaga

SEQ ID NO: 1921691 - DNA, 15 bp, Homo sapiens
gacttcattggagat

SEQ ID NO: 1921692 - DNA, 15 bp, Homo sapiens
acttcattggagata

SEQ ID NO: 1921693 - DNA, 15 bp, Homo sapiens
cttcattggagatac

SEQ ID NO: 1921694 - DNA, 15 bp, Homo sapiens
ttcattggagatacg

SEQ ID NO: 1921695 - DNA, 15 bp, Homo sapiens
tcattggagatacgg

SEQ ID NO: 1921696 - DNA, 15 bp, Homo sapiens
cattggagatacggt

SEQ ID NO: 1921697 - DNA, 15 bp, Homo sapiens
attggagatacggtg

SEQ ID NO: 1921698 - DNA, 15 bp, Homo sapiens
ttggagatacggtga

SEQ ID NO: 1921699 - DNA, 15 bp, Homo sapiens
tggagatacggtgac

SEQ ID NO: 1921700 - DNA, 15 bp, Homo sapiens
ggagatacggtgact

SEQ ID NO: 1921701 - DNA, 15 bp, Homo sapiens
gagatacggtgacta

SEQ ID NO: 1921702 - DNA, 15 bp, Homo sapiens
agatacggtgactag

SEQ ID NO: 1921703 - DNA, 15 bp, Homo sapiens
gatacggtgactaga

SEQ ID NO: 1921704 - DNA, 15 bp, Homo sapiens
atacggtgactagat

SEQ ID NO: 1921705 - DNA, 15 bp, Homo sapiens
tacggtgactagatg

SEQ ID NO: 1921706 - DNA, 15 bp, Homo sapiens
acggtgactagatga

SEQ ID NO: 1921707 - DNA, 15 bp, Homo sapiens
cggtgactagatgac

SEQ ID NO: 1921708 - DNA, 15 bp, Homo sapiens
ggtgactagatgact

SEQ ID NO: 1921709 - DNA, 15 bp, Homo sapiens
gtgactagatgactt

SEQ ID NO: 1921710 - DNA, 15 bp, Homo sapiens
tgactagatgacttt

SEQ ID NO: 1921711 - DNA, 15 bp, Homo sapiens
gactagatgacttta

SEQ ID NO: 1921712 - DNA, 15 bp, Homo sapiens
actagatgactttaa

SEQ ID NO: 1921713 - DNA, 15 bp, Homo sapiens
ctagatgactttaaa

SEQ ID NO: 1921714 - DNA, 15 bp, Homo sapiens
tagatgactttaaag

SEQ ID NO: 1921715 - DNA, 15 bp, Homo sapiens
agatgactttaaagt

SEQ ID NO: 1921716 - DNA, 15 bp, Homo sapiens
gatgactttaaagtt

SEQ ID NO: 1921717 - DNA, 15 bp, Homo sapiens
atgactttaaagttc

SEQ ID NO: 1921718 - DNA, 15 bp, Homo sapiens
tgactttaaagttct

SEQ ID NO: 1921719 - DNA, 15 bp, Homo sapiens
gactttaaagttctc

SEQ ID NO: 1921720 - DNA, 15 bp, Homo sapiens
actttaaagttctca

SEQ ID NO: 1921721 - DNA, 15 bp, Homo sapiens
ctttaaagttctcaa

SEQ ID NO: 1921722 - DNA, 15 bp, Homo sapiens
tttaaagttctcaat

SEQ ID NO: 1921723 - DNA, 15 bp, Homo sapiens
ttaaagttctcaatt

SEQ ID NO: 1921724 - DNA, 15 bp, Homo sapiens
taaagttctcaatta

SEQ ID NO: 1921725 - DNA, 15 bp, Homo sapiens
aaagttctcaattag

SEQ ID NO: 1921726 - DNA, 15 bp, Homo sapiens
aagttctcaattagt

SEQ ID NO: 1921727 - DNA, 15 bp, Homo sapiens
agttctcaattagtc

SEQ ID NO: 1921728 - DNA, 15 bp, Homo sapiens
gttctcaattagtct

SEQ ID NO: 1921729 - DNA, 15 bp, Homo sapiens
ttctcaattagtctt

SEQ ID NO: 1921730 - DNA, 15 bp, Homo sapiens
tctcaattagtcttt

SEQ ID NO: 1921731 - DNA, 15 bp, Homo sapiens
ctcaattagtctttt

SEQ ID NO: 1921732 - DNA, 15 bp, Homo sapiens
tcaattagtcttttg

SEQ ID NO: 1921733 - DNA, 15 bp, Homo sapiens
caattagtcttttga

SEQ ID NO: 1921734 - DNA, 15 bp, Homo sapiens
aattagtcttttgac

SEQ ID NO: 1921735 - DNA, 15 bp, Homo sapiens
attagtcttttgact

SEQ ID NO: 1921736 - DNA, 15 bp, Homo sapiens
ttagtcttttgactt

SEQ ID NO: 1921737 - DNA, 15 bp, Homo sapiens
tagtcttttgacttc

SEQ ID NO: 1921738 - DNA, 15 bp, Homo sapiens
agtcttttgacttct

SEQ ID NO: 1921739 - DNA, 15 bp, Homo sapiens
gtcttttgacttctt

SEQ ID NO: 1921740 - DNA, 15 bp, Homo sapiens
tcttttgacttcttt

SEQ ID NO: 1921741 - DNA, 15 bp, Homo sapiens
cttttgacttctttg

SEQ ID NO: 1921742 - DNA, 15 bp, Homo sapiens
ttttgacttctttga

SEQ ID NO: 1921743 - DNA, 15 bp, Homo sapiens
tttgacttctttgac

SEQ ID NO: 1921744 - DNA, 15 bp, Homo sapiens
ttgacttctttgact

SEQ ID NO: 1921745 - DNA, 15 bp, Homo sapiens
tgacttctttgactg

SEQ ID NO: 1921746 - DNA, 15 bp, Homo sapiens
gacttctttgactgt

SEQ ID NO: 1921747 - DNA, 15 bp, Homo sapiens
acttctttgactgta

SEQ ID NO: 1921748 - DNA, 15 bp, Homo sapiens
cttctttgactgtaa

SEQ ID NO: 1921749 - DNA, 15 bp, Homo sapiens
ttctttgactgtaaa

SEQ ID NO: 1921750 - DNA, 15 bp, Homo sapiens
tctttgactgtaaaa

SEQ ID NO: 1921751 - DNA, 15 bp, Homo sapiens
ctttgactgtaaaat

SEQ ID NO: 1921752 - DNA, 15 bp, Homo sapiens
tttgactgtaaaatt

SEQ ID NO: 1921753 - DNA, 15 bp, Homo sapiens
ttgactgtaaaatta

SEQ ID NO: 1921754 - DNA, 15 bp, Homo sapiens
tgactgtaaaattag

SEQ ID NO: 1921755 - DNA, 15 bp, Homo sapiens
gactgtaaaattagg

SEQ ID NO: 1921756 - DNA, 15 bp, Homo sapiens
actgtaaaattagga

SEQ ID NO: 1921757 - DNA, 15 bp, Homo sapiens
ctgtaaaattaggag

SEQ ID NO: 1921758 - DNA, 15 bp, Homo sapiens
tgtaaaattaggagg

SEQ ID NO: 1921759 - DNA, 15 bp, Homo sapiens
gtaaaattaggaggt

SEQ ID NO: 1921760 - DNA, 15 bp, Homo sapiens
taaaattaggaggtg

SEQ ID NO: 1921761 - DNA, 15 bp, Homo sapiens
aaaattaggaggtga

SEQ ID NO: 1921762 - DNA, 15 bp, Homo sapiens
aaattaggaggtgaa

SEQ ID NO: 1921763 - DNA, 15 bp, Homo sapiens
aattaggaggtgaag

SEQ ID NO: 1921764 - DNA, 15 bp, Homo sapiens
attaggaggtgaagt

SEQ ID NO: 1921765 - DNA, 15 bp, Homo sapiens
ttaggaggtgaagtc

SEQ ID NO: 1921766 - DNA, 15 bp, Homo sapiens
taggaggtgaagtca

SEQ ID NO: 1921767 - DNA, 15 bp, Homo sapiens
aggaggtgaagtcag

SEQ ID NO: 1921768 - DNA, 15 bp, Homo sapiens
ggaggtgaagtcagc

SEQ ID NO: 1921769 - DNA, 15 bp, Homo sapiens
gaggtgaagtcagct

SEQ ID NO: 1921770 - DNA, 15 bp, Homo sapiens
aggtgaagtcagctg

SEQ ID NO: 1921771 - DNA, 15 bp, Homo sapiens
ggtgaagtcagctga

SEQ ID NO: 1921772 - DNA, 15 bp, Homo sapiens
gtgaagtcagctgat

SEQ ID NO: 1921773 - DNA, 15 bp, Homo sapiens
tgaagtcagctgatc

SEQ ID NO: 1921774 - DNA, 15 bp, Homo sapiens
gaagtcagctgatca

SEQ ID NO: 1921775 - DNA, 15 bp, Homo sapiens
aagtcagctgatcat

SEQ ID NO: 1921776 - DNA, 15 bp, Homo sapiens
agtcagctgatcatc

SEQ ID NO: 1921777 - DNA, 15 bp, Homo sapiens
gtcagctgatcatca

SEQ ID NO: 1921778 - DNA, 15 bp, Homo sapiens
tcagctgatcatcaa

SEQ ID NO: 1921779 - DNA, 15 bp, Homo sapiens
cagctgatcatcaag

SEQ ID NO: 1921780 - DNA, 15 bp, Homo sapiens
agctgatcatcaagg

SEQ ID NO: 1921781 - DNA, 15 bp, Homo sapiens
gctgatcatcaaggt

SEQ ID NO: 1921782 - DNA, 15 bp, Homo sapiens
ctgatcatcaaggtc

SEQ ID NO: 1921783 - DNA, 15 bp, Homo sapiens
tgatcatcaaggtcc

SEQ ID NO: 1921784 - DNA, 15 bp, Homo sapiens
gatcatcaaggtccc

SEQ ID NO: 1921785 - DNA, 15 bp, Homo sapiens
atcatcaaggtccct

SEQ ID NO: 1921786 - DNA, 15 bp, Homo sapiens
tcatcaaggtccctt

SEQ ID NO: 1921787 - DNA, 15 bp, Homo sapiens
catcaaggtcccttt

SEQ ID NO: 1921788 - DNA, 15 bp, Homo sapiens
atcaaggtccctttt

SEQ ID NO: 1921789 - DNA, 15 bp, Homo sapiens
tcaaggtccctttta

SEQ ID NO: 1921790 - DNA, 15 bp, Homo sapiens
caaggtcccttttaa

SEQ ID NO: 1921791 - DNA, 15 bp, Homo sapiens
aaggtcccttttaac

SEQ ID NO: 1921792 - DNA, 15 bp, Homo sapiens
aggtcccttttaaca

SEQ ID NO: 1921793 - DNA, 15 bp, Homo sapiens
ggtcccttttaacac

SEQ ID NO: 1921794 - DNA, 15 bp, Homo sapiens
gtcccttttaacacg

SEQ ID NO: 1921795 - DNA, 15 bp, Homo sapiens
tcccttttaacacga

SEQ ID NO: 1921796 - DNA, 15 bp, Homo sapiens
cccttttaacacgaa

SEQ ID NO: 1921797 - DNA, 15 bp, Homo sapiens
ccttttaacacgaac

SEQ ID NO: 1921798 - DNA, 15 bp, Homo sapiens
cttttaacacgaaca

SEQ ID NO: 1921799 - DNA, 15 bp, Homo sapiens
ttttaacacgaacat

SEQ ID NO: 1921800 - DNA, 15 bp, Homo sapiens
tttaacacgaacatt

SEQ ID NO: 1921801 - DNA, 15 bp, Homo sapiens
ttaacacgaacattc

SEQ ID NO: 1921802 - DNA, 15 bp, Homo sapiens
taacacgaacattcc

SEQ ID NO: 1921803 - DNA, 15 bp, Homo sapiens
aacacgaacattcca

SEQ ID NO: 1921804 - DNA, 15 bp, Homo sapiens
acacgaacattccat

SEQ ID NO: 1921805 - DNA, 15 bp, Homo sapiens
cacgaacattccatc

SEQ ID NO: 1921806 - DNA, 15 bp, Homo sapiens
acgaacattccatcc

SEQ ID NO: 1921807 - DNA, 15 bp, Homo sapiens
cgaacattccatcct

SEQ ID NO: 1921808 - DNA, 15 bp, Homo sapiens
gaacattccatccta

SEQ ID NO: 1921809 - DNA, 15 bp, Homo sapiens
aacattccatcctag

SEQ ID NO: 1921810 - DNA, 15 bp, Homo sapiens
acattccatcctagg

SEQ ID NO: 1921811 - DNA, 15 bp, Homo sapiens
cattccatcctaggt

SEQ ID NO: 1921812 - DNA, 15 bp, Homo sapiens
attccatcctaggta

SEQ ID NO: 1921813 - DNA, 15 bp, Homo sapiens
ttccatcctaggtat

SEQ ID NO: 1921814 - DNA, 15 bp, Homo sapiens
tccatcctaggtatg

SEQ ID NO: 1921815 - DNA, 15 bp, Homo sapiens
ccatcctaggtatgt

SEQ ID NO: 1921816 - DNA, 15 bp, Homo sapiens
catcctaggtatgtg

SEQ ID NO: 1921817 - DNA, 15 bp, Homo sapiens
atcctaggtatgtgg

SEQ ID NO: 1921818 - DNA, 15 bp, Homo sapiens
tcctaggtatgtgga

SEQ ID NO: 1921819 - DNA, 15 bp, Homo sapiens
cctaggtatgtggaa

SEQ ID NO: 1921820 - DNA, 15 bp, Homo sapiens
ctaggtatgtggaaa

SEQ ID NO: 1921821 - DNA, 15 bp, Homo sapiens
taggtatgtggaaag

SEQ ID NO: 1921822 - DNA, 15 bp, Homo sapiens
aggtatgtggaaaga

SEQ ID NO: 1921823 - DNA, 15 bp, Homo sapiens
ggtatgtggaaagag

SEQ ID NO: 1921824 - DNA, 15 bp, Homo sapiens
gtatgtggaaagagg

SEQ ID NO: 1921825 - DNA, 15 bp, Homo sapiens
tatgtggaaagagga

SEQ ID NO: 1921826 - DNA, 15 bp, Homo sapiens
atgtggaaagaggaa

SEQ ID NO: 1921827 - DNA, 15 bp, Homo sapiens
tgtggaaagaggaat

SEQ ID NO: 1921828 - DNA, 15 bp, Homo sapiens
gtggaaagaggaatg

SEQ ID NO: 1921829 - DNA, 15 bp, Homo sapiens
tggaaagaggaatga

SEQ ID NO: 1921830 - DNA, 15 bp, Homo sapiens
ggaaagaggaatgaa

SEQ ID NO: 1921831 - DNA, 15 bp, Homo sapiens
gaaagaggaatgaat

SEQ ID NO: 1921832 - DNA, 15 bp, Homo sapiens
aaagaggaatgaata

SEQ ID NO: 1921833 - DNA, 15 bp, Homo sapiens
aagaggaatgaatac

SEQ ID NO: 1921834 - DNA, 15 bp, Homo sapiens
agaggaatgaatacc

SEQ ID NO: 1921835 - DNA, 15 bp, Homo sapiens
gaggaatgaatacca

SEQ ID NO: 1921836 - DNA, 15 bp, Homo sapiens
aggaatgaataccat

SEQ ID NO: 1921837 - DNA, 15 bp, Homo sapiens
ggaatgaataccatt

SEQ ID NO: 1921838 - DNA, 15 bp, Homo sapiens
gaatgaataccattt

SEQ ID NO: 1921839 - DNA, 15 bp, Homo sapiens
aatgaataccatttg

SEQ ID NO: 1921840 - DNA, 15 bp, Homo sapiens
atgaataccatttgc

SEQ ID NO: 1921841 - DNA, 15 bp, Homo sapiens
tgaataccatttgct

SEQ ID NO: 1921842 - DNA, 15 bp, Homo sapiens
gaataccatttgcta

SEQ ID NO: 1921843 - DNA, 15 bp, Homo sapiens
aataccatttgctaa

SEQ ID NO: 1921844 - DNA, 15 bp, Homo sapiens
ataccatttgctaac

SEQ ID NO: 1921845 - DNA, 15 bp, Homo sapiens
taccatttgctaacc

SEQ ID NO: 1921846 - DNA, 15 bp, Homo sapiens
accatttgctaacct

SEQ ID NO: 1921847 - DNA, 15 bp, Homo sapiens
ccatttgctaacctt

SEQ ID NO: 1921848 - DNA, 15 bp, Homo sapiens
catttgctaaccttc

SEQ ID NO: 1921849 - DNA, 15 bp, Homo sapiens
atttgctaaccttca

SEQ ID NO: 1921850 - DNA, 15 bp, Homo sapiens
tttgctaaccttcag

SEQ ID NO: 1921851 - DNA, 15 bp, Homo sapiens
ttgctaaccttcaga

SEQ ID NO: 1921852 - DNA, 15 bp, Homo sapiens
tgctaaccttcagag

SEQ ID NO: 1921853 - DNA, 15 bp, Homo sapiens
gctaaccttcagagc

SEQ ID NO: 1921854 - DNA, 15 bp, Homo sapiens
ctaaccttcagagca

SEQ ID NO: 1921855 - DNA, 15 bp, Homo sapiens
taaccttcagagcac

SEQ ID NO: 1921856 - DNA, 15 bp, Homo sapiens
aaccttcagagcaca

SEQ ID NO: 1921857 - DNA, 15 bp, Homo sapiens
accttcagagcacag

SEQ ID NO: 1921858 - DNA, 15 bp, Homo sapiens
ccttcagagcacagg

SEQ ID NO: 1921859 - DNA, 15 bp, Homo sapiens
cttcagagcacaggt

SEQ ID NO: 1921860 - DNA, 15 bp, Homo sapiens
ttcagagcacaggtc

SEQ ID NO: 1921861 - DNA, 15 bp, Homo sapiens
tcagagcacaggtct

SEQ ID NO: 1921862 - DNA, 15 bp, Homo sapiens
cagagcacaggtctg

SEQ ID NO: 1921863 - DNA, 15 bp, Homo sapiens
agagcacaggtctga

SEQ ID NO: 1921864 - DNA, 15 bp, Homo sapiens
gagcacaggtctgat

SEQ ID NO: 1921865 - DNA, 15 bp, Homo sapiens
agcacaggtctgatt

SEQ ID NO: 1921866 - DNA, 15 bp, Homo sapiens
gcacaggtctgattc

SEQ ID NO: 1921867 - DNA, 15 bp, Homo sapiens
cacaggtctgattct

SEQ ID NO: 1921868 - DNA, 15 bp, Homo sapiens
acaggtctgattctc

SEQ ID NO: 1921869 - DNA, 15 bp, Homo sapiens
caggtctgattctca

SEQ ID NO: 1921870 - DNA, 15 bp, Homo sapiens
aggtctgattctcaa

SEQ ID NO: 1921871 - DNA, 15 bp, Homo sapiens
ggtctgattctcaaa

SEQ ID NO: 1921872 - DNA, 15 bp, Homo sapiens
gtctgattctcaaac

SEQ ID NO: 1921873 - DNA, 15 bp, Homo sapiens
tctgattctcaaaca

SEQ ID NO: 1921874 - DNA, 15 bp, Homo sapiens
ctgattctcaaacag

SEQ ID NO: 1921875 - DNA, 15 bp, Homo sapiens
tgattctcaaacaga

SEQ ID NO: 1921876 - DNA, 15 bp, Homo sapiens
gattctcaaacagaa

SEQ ID NO: 1921877 - DNA, 15 bp, Homo sapiens
attctcaaacagaat

SEQ ID NO: 1921878 - DNA, 15 bp, Homo sapiens
ttctcaaacagaatc

SEQ ID NO: 1921879 - DNA, 15 bp, Homo sapiens
tctcaaacagaatct

SEQ ID NO: 1921880 - DNA, 15 bp, Homo sapiens
ctcaaacagaatctg

SEQ ID NO: 1921881 - DNA, 15 bp, Homo sapiens
tcaaacagaatctgt

SEQ ID NO: 1921882 - DNA, 15 bp, Homo sapiens
caaacagaatctgta

SEQ ID NO: 1921883 - DNA, 15 bp, Homo sapiens
aaacagaatctgtat

SEQ ID NO: 1921884 - DNA, 15 bp, Homo sapiens
aacagaatctgtata

SEQ ID NO: 1921885 - DNA, 15 bp, Homo sapiens
acagaatctgtatat

SEQ ID NO: 1921886 - DNA, 15 bp, Homo sapiens
cagaatctgtatata

SEQ ID NO: 1921887 - DNA, 15 bp, Homo sapiens
agaatctgtatatat

SEQ ID NO: 1921888 - DNA, 15 bp, Homo sapiens
gaatctgtatatatt

SEQ ID NO: 1921889 - DNA, 15 bp, Homo sapiens
aatctgtatatatta

SEQ ID NO: 1921890 - DNA, 15 bp, Homo sapiens
atctgtatatattaa

SEQ ID NO: 1921891 - DNA, 15 bp, Homo sapiens
tctgtatatattaat

SEQ ID NO: 1921892 - DNA, 15 bp, Homo sapiens
ctgtatatattaatc

SEQ ID NO: 1921893 - DNA, 15 bp, Homo sapiens
tgtatatattaatct

SEQ ID NO: 1921894 - DNA, 15 bp, Homo sapiens
gtatatattaatcta

SEQ ID NO: 1921895 - DNA, 15 bp, Homo sapiens
tatatattaatctat

SEQ ID NO: 1921896 - DNA, 15 bp, Homo sapiens
atatattaatctatg

SEQ ID NO: 1921897 - DNA, 15 bp, Homo sapiens
tatattaatctatgg

SEQ ID NO: 1921898 - DNA, 15 bp, Homo sapiens
atattaatctatgga

SEQ ID NO: 1921899 - DNA, 15 bp, Homo sapiens
tattaatctatggat

SEQ ID NO: 1921900 - DNA, 15 bp, Homo sapiens
attaatctatggatt

SEQ ID NO: 1921901 - DNA, 15 bp, Homo sapiens
ttaatctatggattg

SEQ ID NO: 1921902 - DNA, 15 bp, Homo sapiens
taatctatggattga

SEQ ID NO: 1921903 - DNA, 15 bp, Homo sapiens
aatctatggattgaa

SEQ ID NO: 1921904 - DNA, 15 bp, Homo sapiens
atctatggattgaaa

SEQ ID NO: 1921905 - DNA, 15 bp, Homo sapiens
tctatggattgaaaa

SEQ ID NO: 1921906 - DNA, 15 bp, Homo sapiens
ctatggattgaaaaa

SEQ ID NO: 1921907 - DNA, 15 bp, Homo sapiens
tatggattgaaaaac

SEQ ID NO: 1921908 - DNA, 15 bp, Homo sapiens
atggattgaaaaaca

SEQ ID NO: 1921909 - DNA, 15 bp, Homo sapiens
tggattgaaaaacag

SEQ ID NO: 1921910 - DNA, 15 bp, Homo sapiens
ggattgaaaaacagc

SEQ ID NO: 1921911 - DNA, 15 bp, Homo sapiens
gattgaaaaacagct

SEQ ID NO: 1921912 - DNA, 15 bp, Homo sapiens
attgaaaaacagctt

SEQ ID NO: 1921913 - DNA, 15 bp, Homo sapiens
ttgaaaaacagcttt

SEQ ID NO: 1921914 - DNA, 15 bp, Homo sapiens
tgaaaaacagctttt

SEQ ID NO: 1921915 - DNA, 15 bp, Homo sapiens
gaaaaacagcttttc

SEQ ID NO: 1921916 - DNA, 15 bp, Homo sapiens
aaaaacagcttttct

SEQ ID NO: 1921917 - DNA, 15 bp, Homo sapiens
aaaacagcttttcta

SEQ ID NO: 1921918 - DNA, 15 bp, Homo sapiens
aaacagcttttctat

SEQ ID NO: 1921919 - DNA, 15 bp, Homo sapiens
aacagcttttctatt

SEQ ID NO: 1921920 - DNA, 15 bp, Homo sapiens
acagcttttctattg

SEQ ID NO: 1921921 - DNA, 15 bp, Homo sapiens
cagcttttctattga

SEQ ID NO: 1921922 - DNA, 15 bp, Homo sapiens
agcttttctattgat

SEQ ID NO: 1921923 - DNA, 15 bp, Homo sapiens
gcttttctattgata

SEQ ID NO: 1921924 - DNA, 15 bp, Homo sapiens
cttttctattgatat

SEQ ID NO: 1921925 - DNA, 15 bp, Homo sapiens
ttttctattgatatt

SEQ ID NO: 1921926 - DNA, 15 bp, Homo sapiens
tttctattgatattc

SEQ ID NO: 1921927 - DNA, 15 bp, Homo sapiens
ttctattgatattcc

SEQ ID NO: 1921928 - DNA, 15 bp, Homo sapiens
tctattgatattcct

SEQ ID NO: 1921929 - DNA, 15 bp, Homo sapiens
ctattgatattccta

SEQ ID NO: 1921930 - DNA, 15 bp, Homo sapiens
tattgatattcctag

SEQ ID NO: 1921931 - DNA, 15 bp, Homo sapiens
attgatattcctagt

SEQ ID NO: 1921932 - DNA, 15 bp, Homo sapiens
ttgatattcctagta

SEQ ID NO: 1921933 - DNA, 15 bp, Homo sapiens
tgatattcctagtaa

SEQ ID NO: 1921934 - DNA, 15 bp, Homo sapiens
gatattcctagtaag

SEQ ID NO: 1921935 - DNA, 15 bp, Homo sapiens
atattcctagtaagt

SEQ ID NO: 1921936 - DNA, 15 bp, Homo sapiens
tattcctagtaagtc

SEQ ID NO: 1921937 - DNA, 15 bp, Homo sapiens
attcctagtaagtct

SEQ ID NO: 1921938 - DNA, 15 bp, Homo sapiens
ttcctagtaagtctt

SEQ ID NO: 1921939 - DNA, 15 bp, Homo sapiens
tcctagtaagtcttt

SEQ ID NO: 1921940 - DNA, 15 bp, Homo sapiens
cctagtaagtctttc

SEQ ID NO: 1921941 - DNA, 15 bp, Homo sapiens
ctagtaagtctttca

SEQ ID NO: 1921942 - DNA, 15 bp, Homo sapiens
tagtaagtctttcat

SEQ ID NO: 1921943 - DNA, 15 bp, Homo sapiens
agtaagtctttcatt

SEQ ID NO: 1921944 - DNA, 15 bp, Homo sapiens
gtaagtctttcattt

SEQ ID NO: 1921945 - DNA, 15 bp, Homo sapiens
taagtctttcatttt

SEQ ID NO: 1921946 - DNA, 15 bp, Homo sapiens
aagtctttcattttt

SEQ ID NO: 1921947 - DNA, 15 bp, Homo sapiens
agtctttcattttta

SEQ ID NO: 1921948 - DNA, 15 bp, Homo sapiens
gtctttcatttttaa

SEQ ID NO: 1921949 - DNA, 15 bp, Homo sapiens
tctttcatttttaag

SEQ ID NO: 1921950 - DNA, 15 bp, Homo sapiens
ctttcatttttaagc

SEQ ID NO: 1921951 - DNA, 15 bp, Homo sapiens
tttcatttttaagcc

SEQ ID NO: 1921952 - DNA, 15 bp, Homo sapiens
ttcatttttaagccc

SEQ ID NO: 1921953 - DNA, 15 bp, Homo sapiens
tcatttttaagccct

SEQ ID NO: 1921954 - DNA, 15 bp, Homo sapiens
catttttaagcccta

SEQ ID NO: 1921955 - DNA, 15 bp, Homo sapiens
atttttaagccctaa

SEQ ID NO: 1921956 - DNA, 15 bp, Homo sapiens
tttttaagccctaaa

SEQ ID NO: 1921957 - DNA, 15 bp, Homo sapiens
ttttaagccctaaag

SEQ ID NO: 1921958 - DNA, 15 bp, Homo sapiens
tttaagccctaaagc

SEQ ID NO: 1921959 - DNA, 15 bp, Homo sapiens
ttaagccctaaagct

SEQ ID NO: 1921960 - DNA, 15 bp, Homo sapiens
taagccctaaagcta

SEQ ID NO: 1921961 - DNA, 15 bp, Homo sapiens
aagccctaaagctat

SEQ ID NO: 1921962 - DNA, 15 bp, Homo sapiens
agccctaaagctata

SEQ ID NO: 1921963 - DNA, 15 bp, Homo sapiens
gccctaaagctatat

SEQ ID NO: 1921964 - DNA, 15 bp, Homo sapiens
ccctaaagctatatt

SEQ ID NO: 1921965 - DNA, 15 bp, Homo sapiens
cctaaagctatattt

SEQ ID NO: 1921966 - DNA, 15 bp, Homo sapiens
ctaaagctatatttc

SEQ ID NO: 1921967 - DNA, 15 bp, Homo sapiens
taaagctatatttcc

SEQ ID NO: 1921968 - DNA, 15 bp, Homo sapiens
aaagctatatttcca

SEQ ID NO: 1921969 - DNA, 15 bp, Homo sapiens
aagctatatttccat

SEQ ID NO: 1921970 - DNA, 15 bp, Homo sapiens
ctatatttccatctg

SEQ ID NO: 1921971 - DNA, 15 bp, Homo sapiens
tatatttccatctgc

SEQ ID NO: 1921972 - DNA, 15 bp, Homo sapiens
atatttccatctgct

SEQ ID NO: 1921973 - DNA, 15 bp, Homo sapiens
tatttccatctgcta

SEQ ID NO: 1921974 - DNA, 15 bp, Homo sapiens
atttccatctgctag

SEQ ID NO: 1921975 - DNA, 15 bp, Homo sapiens
tttccatctgctaga

SEQ ID NO: 1921976 - DNA, 15 bp, Homo sapiens
ttccatctgctagaa

SEQ ID NO: 1921977 - DNA, 15 bp, Homo sapiens
tccatctgctagaag

SEQ ID NO: 1921978 - DNA, 15 bp, Homo sapiens
ccatctgctagaagc

SEQ ID NO: 1921979 - DNA, 15 bp, Homo sapiens
catctgctagaagca

SEQ ID NO: 1921980 - DNA, 15 bp, Homo sapiens
atctgctagaagcag

SEQ ID NO: 1921981 - DNA, 15 bp, Homo sapiens
tctgctagaagcaga

SEQ ID NO: 1921982 - DNA, 15 bp, Homo sapiens
ctgctagaagcagag

SEQ ID NO: 1921983 - DNA, 15 bp, Homo sapiens
tgctagaagcagagc

SEQ ID NO: 1921984 - DNA, 15 bp, Homo sapiens
gctagaagcagagct

SEQ ID NO: 1921985 - DNA, 15 bp, Homo sapiens
ctagaagcagagctc

SEQ ID NO: 1921986 - DNA, 15 bp, Homo sapiens
tagaagcagagctct

SEQ ID NO: 1921987 - DNA, 15 bp, Homo sapiens
agaagcagagctctg

SEQ ID NO: 1921988 - DNA, 15 bp, Homo sapiens
gaagcagagctctga

SEQ ID NO: 1921989 - DNA, 15 bp, Homo sapiens
aagcagagctctgat

SEQ ID NO: 1921990 - DNA, 15 bp, Homo sapiens
agcagagctctgatc

SEQ ID NO: 1921991 - DNA, 15 bp, Homo sapiens
gcagagctctgatct

SEQ ID NO: 1921992 - DNA, 15 bp, Homo sapiens
cagagctctgatctc

SEQ ID NO: 1921993 - DNA, 15 bp, Homo sapiens
agagctctgatctcc

SEQ ID NO: 1921994 - DNA, 15 bp, Homo sapiens
gagctctgatctcca

SEQ ID NO: 1921995 - DNA, 15 bp, Homo sapiens
agctctgatctccat

SEQ ID NO: 1921996 - DNA, 15 bp, Homo sapiens
gctctgatctccata

SEQ ID NO: 1921997 - DNA, 15 bp, Homo sapiens
ctctgatctccatat

SEQ ID NO: 1921998 - DNA, 15 bp, Homo sapiens
tctgatctccatatg

SEQ ID NO: 1921999 - DNA, 15 bp, Homo sapiens
ctgatctccatatga

SEQ ID NO: 1922000 - DNA, 15 bp, Homo sapiens
tgatctccatatgat

SEQ ID NO: 1922001 - DNA, 15 bp, Homo sapiens
gatctccatatgatt

SEQ ID NO: 1922002 - DNA, 15 bp, Homo sapiens
atctccatatgattc

SEQ ID NO: 1922003 - DNA, 15 bp, Homo sapiens
tctccatatgattca

SEQ ID NO: 1922004 - DNA, 15 bp, Homo sapiens
ctccatatgattcat

SEQ ID NO: 1922005 - DNA, 15 bp, Homo sapiens
tccatatgattcatc

SEQ ID NO: 1922006 - DNA, 15 bp, Homo sapiens
ccatatgattcatca

SEQ ID NO: 1922007 - DNA, 15 bp, Homo sapiens
catatgattcatcaa

SEQ ID NO: 1922008 - DNA, 15 bp, Homo sapiens
atatgattcatcaag

SEQ ID NO: 1922009 - DNA, 15 bp, Homo sapiens
tatgattcatcaaga

SEQ ID NO: 1922010 - DNA, 15 bp, Homo sapiens
atgattcatcaagaa

SEQ ID NO: 1922011 - DNA, 15 bp, Homo sapiens
tgattcatcaagaat

SEQ ID NO: 1922012 - DNA, 15 bp, Homo sapiens
gattcatcaagaatg

SEQ ID NO: 1922013 - DNA, 15 bp, Homo sapiens
attcatcaagaatga

SEQ ID NO: 1922014 - DNA, 15 bp, Homo sapiens
ttcatcaagaatgac

SEQ ID NO: 1922015 - DNA, 15 bp, Homo sapiens
tcatcaagaatgact

SEQ ID NO: 1922016 - DNA, 15 bp, Homo sapiens
catcaagaatgactt

SEQ ID NO: 1922017 - DNA, 15 bp, Homo sapiens
atcaagaatgacttc

SEQ ID NO: 1922018 - DNA, 15 bp, Homo sapiens
tcaagaatgacttcc

SEQ ID NO: 1922019 - DNA, 15 bp, Homo sapiens
caagaatgacttccc

SEQ ID NO: 1922020 - DNA, 15 bp, Homo sapiens
aagaatgacttccct

SEQ ID NO: 1922021 - DNA, 15 bp, Homo sapiens
agaatgacttcccta

SEQ ID NO: 1922022 - DNA, 15 bp, Homo sapiens
gaatgacttccctaa

SEQ ID NO: 1922023 - DNA, 15 bp, Homo sapiens
aatgacttccctaaa

SEQ ID NO: 1922024 - DNA, 15 bp, Homo sapiens
atgacttccctaaat

SEQ ID NO: 1922025 - DNA, 15 bp, Homo sapiens
tgacttccctaaatg

SEQ ID NO: 1922026 - DNA, 15 bp, Homo sapiens
gacttccctaaatgg

SEQ ID NO: 1922027 - DNA, 15 bp, Homo sapiens
acttccctaaatggt

SEQ ID NO: 1922028 - DNA, 15 bp, Homo sapiens
cttccctaaatggta

SEQ ID NO: 1922029 - DNA, 15 bp, Homo sapiens
ttccctaaatggtat

SEQ ID NO: 1922030 - DNA, 15 bp, Homo sapiens
tccctaaatggtata

SEQ ID NO: 1922031 - DNA, 15 bp, Homo sapiens
ccctaaatggtataa

SEQ ID NO: 1922032 - DNA, 15 bp, Homo sapiens
cctaaatggtataaa

SEQ ID NO: 1922033 - DNA, 15 bp, Homo sapiens
ctaaatggtataaac

SEQ ID NO: 1922034 - DNA, 15 bp, Homo sapiens
taaatggtataaacg

SEQ ID NO: 1922035 - DNA, 15 bp, Homo sapiens
aaatggtataaacgt

SEQ ID NO: 1922036 - DNA, 15 bp, Homo sapiens
aatggtataaacgtc

SEQ ID NO: 1922037 - DNA, 15 bp, Homo sapiens
atggtataaacgtct

SEQ ID NO: 1922038 - DNA, 15 bp, Homo sapiens
tggtataaacgtcta

SEQ ID NO: 1922039 - DNA, 15 bp, Homo sapiens
ggtataaacgtctac

SEQ ID NO: 1922040 - DNA, 15 bp, Homo sapiens
gtataaacgtctaca

SEQ ID NO: 1922041 - DNA, 15 bp, Homo sapiens
tataaacgtctacac

SEQ ID NO: 1922042 - DNA, 15 bp, Homo sapiens
ataaacgtctacact

SEQ ID NO: 1922043 - DNA, 15 bp, Homo sapiens
taaacgtctacactt

SEQ ID NO: 1922044 - DNA, 15 bp, Homo sapiens
aaacgtctacacttc

SEQ ID NO: 1922045 - DNA, 15 bp, Homo sapiens
aacgtctacacttcc

SEQ ID NO: 1922046 - DNA, 15 bp, Homo sapiens
acgtctacacttcca

SEQ ID NO: 1922047 - DNA, 15 bp, Homo sapiens
cgtctacacttccaa

SEQ ID NO: 1922048 - DNA, 15 bp, Homo sapiens
gtctacacttccaaa

SEQ ID NO: 1922049 - DNA, 15 bp, Homo sapiens
tctacacttccaaat

SEQ ID NO: 1922050 - DNA, 15 bp, Homo sapiens
ctacacttccaaatc

SEQ ID NO: 1922051 - DNA, 15 bp, Homo sapiens
tacacttccaaatca

SEQ ID NO: 1922052 - DNA, 15 bp, Homo sapiens
acacttccaaatcac

SEQ ID NO: 1922053 - DNA, 15 bp, Homo sapiens
cacttccaaatcact

SEQ ID NO: 1922054 - DNA, 15 bp, Homo sapiens
acttccaaatcactt

SEQ ID NO: 1922055 - DNA, 15 bp, Homo sapiens
cttccaaatcacttt

SEQ ID NO: 1922056 - DNA, 15 bp, Homo sapiens
ttccaaatcactttc

SEQ ID NO: 1922057 - DNA, 15 bp, Homo sapiens
tccaaatcactttca

SEQ ID NO: 1922058 - DNA, 15 bp, Homo sapiens
ccaaatcactttcat

SEQ ID NO: 1922059 - DNA, 15 bp, Homo sapiens
caaatcactttcatt

SEQ ID NO: 1922060 - DNA, 15 bp, Homo sapiens
aaatcactttcatta

SEQ ID NO: 1922061 - DNA, 15 bp, Homo sapiens
aatcactttcattat

SEQ ID NO: 1922062 - DNA, 15 bp, Homo sapiens
atcactttcattatc

SEQ ID NO: 1922063 - DNA, 15 bp, Homo sapiens
tcactttcattatcc

SEQ ID NO: 1922064 - DNA, 15 bp, Homo sapiens
cactttcattatcca

SEQ ID NO: 1922065 - DNA, 15 bp, Homo sapiens
actttcattatccaa

SEQ ID NO: 1922066 - DNA, 15 bp, Homo sapiens
ctttcattatccaat

SEQ ID NO: 1922067 - DNA, 15 bp, Homo sapiens
tttcattatccaatt

SEQ ID NO: 1922068 - DNA, 15 bp, Homo sapiens
ttcattatccaattg

SEQ ID NO: 1922069 - DNA, 15 bp, Homo sapiens
tcattatccaattgg

SEQ ID NO: 1922070 - DNA, 15 bp, Homo sapiens
cattatccaattggc

SEQ ID NO: 1922071 - DNA, 15 bp, Homo sapiens
attatccaattggca

SEQ ID NO: 1922072 - DNA, 15 bp, Homo sapiens
ttatccaattggcac

SEQ ID NO: 1922073 - DNA, 15 bp, Homo sapiens
tatccaattggcaca

SEQ ID NO: 1922074 - DNA, 15 bp, Homo sapiens
atccaattggcacac

SEQ ID NO: 1922075 - DNA, 15 bp, Homo sapiens
tccaattggcacacc

SEQ ID NO: 1922076 - DNA, 15 bp, Homo sapiens
ccaattggcacaccc

SEQ ID NO: 1922077 - DNA, 15 bp, Homo sapiens
caattggcacacccc

SEQ ID NO: 1922078 - DNA, 15 bp, Homo sapiens
aattggcacacccca

SEQ ID NO: 1922079 - DNA, 15 bp, Homo sapiens
attggcacaccccat

SEQ ID NO: 1922080 - DNA, 15 bp, Homo sapiens
ttggcacaccccatc

SEQ ID NO: 1922081 - DNA, 15 bp, Homo sapiens
tggcacaccccatct

SEQ ID NO: 1922082 - DNA, 15 bp, Homo sapiens
ggcacaccccatcta

SEQ ID NO: 1922083 - DNA, 15 bp, Homo sapiens
gcacaccccatctaa

SEQ ID NO: 1922084 - DNA, 15 bp, Homo sapiens
cacaccccatctaaa

SEQ ID NO: 1922085 - DNA, 15 bp, Homo sapiens
acaccccatctaaaa

SEQ ID NO: 1922086 - DNA, 15 bp, Homo sapiens
caccccatctaaaac

SEQ ID NO: 1922087 - DNA, 15 bp, Homo sapiens
accccatctaaaact

SEQ ID NO: 1922088 - DNA, 15 bp, Homo sapiens
ccccatctaaaactt

SEQ ID NO: 1922089 - DNA, 15 bp, Homo sapiens
cccatctaaaactta

SEQ ID NO: 1922090 - DNA, 15 bp, Homo sapiens
ccatctaaaacttaa

SEQ ID NO: 1922091 - DNA, 15 bp, Homo sapiens
catctaaaacttaat

SEQ ID NO: 1922092 - DNA, 15 bp, Homo sapiens
atctaaaacttaatt

SEQ ID NO: 1922093 - DNA, 15 bp, Homo sapiens
tctaaaacttaattg

SEQ ID NO: 1922094 - DNA, 15 bp, Homo sapiens
ctaaaacttaattga

SEQ ID NO: 1922095 - DNA, 15 bp, Homo sapiens
taaaacttaattgat

SEQ ID NO: 1922096 - DNA, 15 bp, Homo sapiens
aaaacttaattgatt

SEQ ID NO: 1922097 - DNA, 15 bp, Homo sapiens
aaacttaattgattt

SEQ ID NO: 1922098 - DNA, 15 bp, Homo sapiens
aacttaattgatttc

SEQ ID NO: 1922099 - DNA, 15 bp, Homo sapiens
acttaattgatttca

SEQ ID NO: 1922100 - DNA, 15 bp, Homo sapiens
cttaattgatttcag

SEQ ID NO: 1922101 - DNA, 15 bp, Homo sapiens
ttaattgatttcaga

SEQ ID NO: 1922102 - DNA, 15 bp, Homo sapiens
taattgatttcagat

SEQ ID NO: 1922103 - DNA, 15 bp, Homo sapiens
aattgatttcagatt

SEQ ID NO: 1922104 - DNA, 15 bp, Homo sapiens
attgatttcagattc

SEQ ID NO: 1922105 - DNA, 15 bp, Homo sapiens
ttgatttcagattct

SEQ ID NO: 1922106 - DNA, 15 bp, Homo sapiens
tgatttcagattctc

SEQ ID NO: 1922107 - DNA, 15 bp, Homo sapiens
gatttcagattctct

SEQ ID NO: 1922108 - DNA, 15 bp, Homo sapiens
atttcagattctctg

SEQ ID NO: 1922109 - DNA, 15 bp, Homo sapiens
tttcagattctctga

SEQ ID NO: 1922110 - DNA, 15 bp, Homo sapiens
ttcagattctctgag

SEQ ID NO: 1922111 - DNA, 15 bp, Homo sapiens
tcagattctctgagt

SEQ ID NO: 1922112 - DNA, 15 bp, Homo sapiens
cagattctctgagtt

SEQ ID NO: 1922113 - DNA, 15 bp, Homo sapiens
agattctctgagttg

SEQ ID NO: 1922114 - DNA, 15 bp, Homo sapiens
gattctctgagttgc

SEQ ID NO: 1922115 - DNA, 15 bp, Homo sapiens
attctctgagttgca

SEQ ID NO: 1922116 - DNA, 15 bp, Homo sapiens
ttctctgagttgcaa

SEQ ID NO: 1922117 - DNA, 15 bp, Homo sapiens
tctctgagttgcaat

SEQ ID NO: 1922118 - DNA, 15 bp, Homo sapiens
ctctgagttgcaatt

SEQ ID NO: 1922119 - DNA, 15 bp, Homo sapiens
tctgagttgcaattg

SEQ ID NO: 1922120 - DNA, 15 bp, Homo sapiens
ctgagttgcaattgt

SEQ ID NO: 1922121 - DNA, 15 bp, Homo sapiens
tgagttgcaattgta

SEQ ID NO: 1922122 - DNA, 15 bp, Homo sapiens
gagttgcaattgtat

SEQ ID NO: 1922123 - DNA, 15 bp, Homo sapiens
agttgcaattgtatt

SEQ ID NO: 1922124 - DNA, 15 bp, Homo sapiens
gttgcaattgtatta

SEQ ID NO: 1922125 - DNA, 15 bp, Homo sapiens
ttgcaattgtattaa

SEQ ID NO: 1922126 - DNA, 15 bp, Homo sapiens
tgcaattgtattaaa

SEQ ID NO: 1922127 - DNA, 15 bp, Homo sapiens
gcaattgtattaaaa

SEQ ID NO: 1922128 - DNA, 15 bp, Homo sapiens
caattgtattaaaac

SEQ ID NO: 1922129 - DNA, 15 bp, Homo sapiens
aattgtattaaaacc

SEQ ID NO: 1922130 - DNA, 15 bp, Homo sapiens
attgtattaaaaccc

SEQ ID NO: 1922131 - DNA, 15 bp, Homo sapiens
ttgtattaaaaccca

SEQ ID NO: 1922132 - DNA, 15 bp, Homo sapiens
tgtattaaaacccag

SEQ ID NO: 1922133 - DNA, 15 bp, Homo sapiens
gtattaaaacccagg

SEQ ID NO: 1922134 - DNA, 15 bp, Homo sapiens
tattaaaacccagga

SEQ ID NO: 1922135 - DNA, 15 bp, Homo sapiens
attaaaacccaggaa

SEQ ID NO: 1922136 - DNA, 15 bp, Homo sapiens
ttaaaacccaggaat

SEQ ID NO: 1922137 - DNA, 15 bp, Homo sapiens
taaaacccaggaatg

SEQ ID NO: 1922138 - DNA, 15 bp, Homo sapiens
aaaacccaggaatgg

SEQ ID NO: 1922139 - DNA, 15 bp, Homo sapiens
aaacccaggaatggt

SEQ ID NO: 1922140 - DNA, 15 bp, Homo sapiens
aacccaggaatggta

SEQ ID NO: 1922141 - DNA, 15 bp, Homo sapiens
acccaggaatggtaa

SEQ ID NO: 1922142 - DNA, 15 bp, Homo sapiens
cccaggaatggtaaa

SEQ ID NO: 1922143 - DNA, 15 bp, Homo sapiens
ccaggaatggtaaat

SEQ ID NO: 1922144 - DNA, 15 bp, Homo sapiens
caggaatggtaaatg

SEQ ID NO: 1922145 - DNA, 15 bp, Homo sapiens
aggaatggtaaatgc

SEQ ID NO: 1922146 - DNA, 15 bp, Homo sapiens
ggaatggtaaatgca

SEQ ID NO: 1922147 - DNA, 15 bp, Homo sapiens
gaatggtaaatgcac

SEQ ID NO: 1922148 - DNA, 15 bp, Homo sapiens
aatggtaaatgcacc

SEQ ID NO: 1922149 - DNA, 15 bp, Homo sapiens
atggtaaatgcacca

SEQ ID NO: 1922150 - DNA, 15 bp, Homo sapiens
tggtaaatgcaccaa

SEQ ID NO: 1922151 - DNA, 15 bp, Homo sapiens
ggtaaatgcaccaat

SEQ ID NO: 1922152 - DNA, 15 bp, Homo sapiens
gtaaatgcaccaatg

SEQ ID NO: 1922153 - DNA, 15 bp, Homo sapiens
taaatgcaccaatga

SEQ ID NO: 1922154 - DNA, 15 bp, Homo sapiens
aaatgcaccaatgat

SEQ ID NO: 1922155 - DNA, 15 bp, Homo sapiens
aatgcaccaatgatt

SEQ ID NO: 1922156 - DNA, 15 bp, Homo sapiens
atgcaccaatgattg

SEQ ID NO: 1922157 - DNA, 15 bp, Homo sapiens
tgcaccaatgattgc

SEQ ID NO: 1922158 - DNA, 15 bp, Homo sapiens
gcaccaatgattgct

SEQ ID NO: 1922159 - DNA, 15 bp, Homo sapiens
caccaatgattgctt

SEQ ID NO: 1922160 - DNA, 15 bp, Homo sapiens
accaatgattgcttg

SEQ ID NO: 1922161 - DNA, 15 bp, Homo sapiens
ccaatgattgcttgc

SEQ ID NO: 1922162 - DNA, 15 bp, Homo sapiens
caatgattgcttgca

SEQ ID NO: 1922163 - DNA, 15 bp, Homo sapiens
aatgattgcttgcaa

SEQ ID NO: 1922164 - DNA, 15 bp, Homo sapiens
atgattgcttgcaaa

SEQ ID NO: 1922165 - DNA, 15 bp, Homo sapiens
tgattgcttgcaaat

SEQ ID NO: 1922166 - DNA, 15 bp, Homo sapiens
gattgcttgcaaata

SEQ ID NO: 1922167 - DNA, 15 bp, Homo sapiens
attgcttgcaaatag

SEQ ID NO: 1922168 - DNA, 15 bp, Homo sapiens
ttgcttgcaaatagc

SEQ ID NO: 1922169 - DNA, 15 bp, Homo sapiens
tgcttgcaaatagct

SEQ ID NO: 1922170 - DNA, 15 bp, Homo sapiens
gcttgcaaatagcta

SEQ ID NO: 1922171 - DNA, 15 bp, Homo sapiens
cttgcaaatagctat

SEQ ID NO: 1922172 - DNA, 15 bp, Homo sapiens
ttgcaaatagctata

SEQ ID NO: 1922173 - DNA, 15 bp, Homo sapiens
tgcaaatagctataa

SEQ ID NO: 1922174 - DNA, 15 bp, Homo sapiens
gcaaatagctataat

SEQ ID NO: 1922175 - DNA, 15 bp, Homo sapiens
caaatagctataata

SEQ ID NO: 1922176 - DNA, 15 bp, Homo sapiens
aaatagctataataa

SEQ ID NO: 1922177 - DNA, 15 bp, Homo sapiens
aatagctataataaa

SEQ ID NO: 1922178 - DNA, 15 bp, Homo sapiens
atagctataataaat

SEQ ID NO: 1922179 - DNA, 15 bp, Homo sapiens
tagctataataaata

SEQ ID NO: 1922180 - DNA, 15 bp, Homo sapiens
agctataataaatat

SEQ ID NO: 1922181 - DNA, 15 bp, Homo sapiens
gctataataaatata

SEQ ID NO: 1922182 - DNA, 15 bp, Homo sapiens
ctataataaatatat

SEQ ID NO: 1922183 - DNA, 15 bp, Homo sapiens
tataataaatatatg

SEQ ID NO: 1922184 - DNA, 15 bp, Homo sapiens
ataataaatatatga

SEQ ID NO: 1922185 - DNA, 15 bp, Homo sapiens
taataaatatatgat

SEQ ID NO: 1922186 - DNA, 15 bp, Homo sapiens
aataaatatatgatt

SEQ ID NO: 1922187 - DNA, 15 bp, Homo sapiens
ataaatatatgattc

SEQ ID NO: 1922188 - DNA, 15 bp, Homo sapiens
taaatatatgattct

SEQ ID NO: 1922189 - DNA, 15 bp, Homo sapiens
aaatatatgattctg

SEQ ID NO: 1922190 - DNA, 15 bp, Homo sapiens
aatatatgattctgt

SEQ ID NO: 1922191 - DNA, 15 bp, Homo sapiens
atatatgattctgta

SEQ ID NO: 1922192 - DNA, 15 bp, Homo sapiens
tatatgattctgtag

SEQ ID NO: 1922193 - DNA, 15 bp, Homo sapiens
atatgattctgtaga

SEQ ID NO: 1922194 - DNA, 15 bp, Homo sapiens
tatgattctgtagaa

SEQ ID NO: 1922195 - DNA, 15 bp, Homo sapiens
atgattctgtagaaa

SEQ ID NO: 1922196 - DNA, 15 bp, Homo sapiens
tgattctgtagaaag

SEQ ID NO: 1922197 - DNA, 15 bp, Homo sapiens
gattctgtagaaagc

SEQ ID NO: 1922198 - DNA, 15 bp, Homo sapiens
attctgtagaaagct

SEQ ID NO: 1922199 - DNA, 15 bp, Homo sapiens
ttctgtagaaagcta

SEQ ID NO: 1922200 - DNA, 15 bp, Homo sapiens
tctgtagaaagctac

SEQ ID NO: 1922201 - DNA, 15 bp, Homo sapiens
ctgtagaaagctact

SEQ ID NO: 1922202 - DNA, 15 bp, Homo sapiens
tgtagaaagctactg

SEQ ID NO: 1922203 - DNA, 15 bp, Homo sapiens
gtagaaagctactgg

SEQ ID NO: 1922204 - DNA, 15 bp, Homo sapiens
tagaaagctactggc

SEQ ID NO: 1922205 - DNA, 15 bp, Homo sapiens
agaaagctactggca

SEQ ID NO: 1922206 - DNA, 15 bp, Homo sapiens
gaaagctactggcaa

SEQ ID NO: 1922207 - DNA, 15 bp, Homo sapiens
aaagctactggcaaa

SEQ ID NO: 1922208 - DNA, 15 bp, Homo sapiens
aagctactggcaaaa

SEQ ID NO: 1922209 - DNA, 15 bp, Homo sapiens
agctactggcaaaac

SEQ ID NO: 1922210 - DNA, 15 bp, Homo sapiens
gctactggcaaaaca

SEQ ID NO: 1922211 - DNA, 15 bp, Homo sapiens
ctactggcaaaacac

SEQ ID NO: 1922212 - DNA, 15 bp, Homo sapiens
tactggcaaaacact

SEQ ID NO: 1922213 - DNA, 15 bp, Homo sapiens
actggcaaaacacta

SEQ ID NO: 1922214 - DNA, 15 bp, Homo sapiens
ctggcaaaacactag

SEQ ID NO: 1922215 - DNA, 15 bp, Homo sapiens
tggcaaaacactagc

SEQ ID NO: 1922216 - DNA, 15 bp, Homo sapiens
ggcaaaacactagct

SEQ ID NO: 1922217 - DNA, 15 bp, Homo sapiens
gcaaaacactagctg

SEQ ID NO: 1922218 - DNA, 15 bp, Homo sapiens
caaaacactagctga

SEQ ID NO: 1922219 - DNA, 15 bp, Homo sapiens
aaaacactagctgac

SEQ ID NO: 1922220 - DNA, 15 bp, Homo sapiens
aaacactagctgaca

SEQ ID NO: 1922221 - DNA, 15 bp, Homo sapiens
aacactagctgacac

SEQ ID NO: 1922222 - DNA, 15 bp, Homo sapiens
acactagctgacact

SEQ ID NO: 1922223 - DNA, 15 bp, Homo sapiens
cactagctgacactg

SEQ ID NO: 1922224 - DNA, 15 bp, Homo sapiens
actagctgacactgg

SEQ ID NO: 1922225 - DNA, 15 bp, Homo sapiens
ctagctgacactggt

SEQ ID NO: 1922226 - DNA, 15 bp, Homo sapiens
tagctgacactggta

SEQ ID NO: 1922227 - DNA, 15 bp, Homo sapiens
agctgacactggtaa

SEQ ID NO: 1922228 - DNA, 15 bp, Homo sapiens
gctgacactggtaat

SEQ ID NO: 1922229 - DNA, 15 bp, Homo sapiens
ctgacactggtaata

SEQ ID NO: 1922230 - DNA, 15 bp, Homo sapiens
tgacactggtaataa

SEQ ID NO: 1922231 - DNA, 15 bp, Homo sapiens
gacactggtaataac

SEQ ID NO: 1922232 - DNA, 15 bp, Homo sapiens
acactggtaataaca

SEQ ID NO: 1922233 - DNA, 15 bp, Homo sapiens
cactggtaataacag

SEQ ID NO: 1922234 - DNA, 15 bp, Homo sapiens
actggtaataacagt

SEQ ID NO: 1922235 - DNA, 15 bp, Homo sapiens
ctggtaataacagtg

SEQ ID NO: 1922236 - DNA, 15 bp, Homo sapiens
tggtaataacagtgt

SEQ ID NO: 1922237 - DNA, 15 bp, Homo sapiens
ggtaataacagtgta

SEQ ID NO: 1922238 - DNA, 15 bp, Homo sapiens
gtaataacagtgtag

SEQ ID NO: 1922239 - DNA, 15 bp, Homo sapiens
taataacagtgtagg

SEQ ID NO: 1922240 - DNA, 15 bp, Homo sapiens
aataacagtgtaggc

SEQ ID NO: 1922241 - DNA, 15 bp, Homo sapiens
ataacagtgtaggca

SEQ ID NO: 1922242 - DNA, 15 bp, Homo sapiens
taacagtgtaggcaa

SEQ ID NO: 1922243 - DNA, 15 bp, Homo sapiens
aacagtgtaggcaat

SEQ ID NO: 1922244 - DNA, 15 bp, Homo sapiens
acagtgtaggcaatc

SEQ ID NO: 1922245 - DNA, 15 bp, Homo sapiens
cagtgtaggcaatca

SEQ ID NO: 1922246 - DNA, 15 bp, Homo sapiens
agtgtaggcaatcat

SEQ ID NO: 1922247 - DNA, 15 bp, Homo sapiens
gtgtaggcaatcata

SEQ ID NO: 1922248 - DNA, 15 bp, Homo sapiens
tgtaggcaatcataa

SEQ ID NO: 1922249 - DNA, 15 bp, Homo sapiens
gtaggcaatcataaa

SEQ ID NO: 1922250 - DNA, 15 bp, Homo sapiens
taggcaatcataaaa

SEQ ID NO: 1922251 - DNA, 15 bp, Homo sapiens
aggcaatcataaaat

SEQ ID NO: 1922252 - DNA, 15 bp, Homo sapiens
ggcaatcataaaata

SEQ ID NO: 1922253 - DNA, 15 bp, Homo sapiens
gcaatcataaaatac

SEQ ID NO: 1922254 - DNA, 15 bp, Homo sapiens
caatcataaaatacc

SEQ ID NO: 1922255 - DNA, 15 bp, Homo sapiens
aatcataaaatacct

SEQ ID NO: 1922256 - DNA, 15 bp, Homo sapiens
atcataaaatacctc

SEQ ID NO: 1922257 - DNA, 15 bp, Homo sapiens
tcataaaatacctct

SEQ ID NO: 1922258 - DNA, 15 bp, Homo sapiens
cataaaatacctctt

SEQ ID NO: 1922259 - DNA, 15 bp, Homo sapiens
ataaaatacctctta

SEQ ID NO: 1922260 - DNA, 15 bp, Homo sapiens
taaaatacctcttat

SEQ ID NO: 1922261 - DNA, 15 bp, Homo sapiens
aaaatacctcttatg

SEQ ID NO: 1922262 - DNA, 15 bp, Homo sapiens
aaatacctcttatgt

SEQ ID NO: 1922263 - DNA, 15 bp, Homo sapiens
aatacctcttatgta

SEQ ID NO: 1922264 - DNA, 15 bp, Homo sapiens
atacctcttatgtag

SEQ ID NO: 1922265 - DNA, 15 bp, Homo sapiens
tacctcttatgtaga

SEQ ID NO: 1922266 - DNA, 15 bp, Homo sapiens
acctcttatgtagac

SEQ ID NO: 1922267 - DNA, 15 bp, Homo sapiens
cctcttatgtagacc

SEQ ID NO: 1922268 - DNA, 15 bp, Homo sapiens
ctcttatgtagacca

SEQ ID NO: 1922269 - DNA, 15 bp, Homo sapiens
tcttatgtagaccac

SEQ ID NO: 1922270 - DNA, 15 bp, Homo sapiens
cttatgtagaccacg

SEQ ID NO: 1922271 - DNA, 15 bp, Homo sapiens
ttatgtagaccacgt

SEQ ID NO: 1922272 - DNA, 15 bp, Homo sapiens
tatgtagaccacgtg

SEQ ID NO: 1922273 - DNA, 15 bp, Homo sapiens
atgtagaccacgtga

SEQ ID NO: 1922274 - DNA, 15 bp, Homo sapiens
tgtagaccacgtgac

SEQ ID NO: 1922275 - DNA, 15 bp, Homo sapiens
gtagaccacgtgaca

SEQ ID NO: 1922276 - DNA, 15 bp, Homo sapiens
tagaccacgtgacat

SEQ ID NO: 1922277 - DNA, 15 bp, Homo sapiens
agaccacgtgacatg

SEQ ID NO: 1922278 - DNA, 15 bp, Homo sapiens
gaccacgtgacatgt

SEQ ID NO: 1922279 - DNA, 15 bp, Homo sapiens
accacgtgacatgta

SEQ ID NO: 1922280 - DNA, 15 bp, Homo sapiens
ccacgtgacatgtag

SEQ ID NO: 1922281 - DNA, 15 bp, Homo sapiens
cacgtgacatgtaga

SEQ ID NO: 1922282 - DNA, 15 bp, Homo sapiens
acgtgacatgtagag

SEQ ID NO: 1922283 - DNA, 15 bp, Homo sapiens
cgtgacatgtagagt

SEQ ID NO: 1922284 - DNA, 15 bp, Homo sapiens
gtgacatgtagagtt

SEQ ID NO: 1922285 - DNA, 15 bp, Homo sapiens
tgacatgtagagttc

SEQ ID NO: 1922286 - DNA, 15 bp, Homo sapiens
gacatgtagagttcc

SEQ ID NO: 1922287 - DNA, 15 bp, Homo sapiens
acatgtagagttcca

SEQ ID NO: 1922288 - DNA, 15 bp, Homo sapiens
catgtagagttccag

SEQ ID NO: 1922289 - DNA, 15 bp, Homo sapiens
atgtagagttccagc

SEQ ID NO: 1922290 - DNA, 15 bp, Homo sapiens
tgtagagttccagca

SEQ ID NO: 1922291 - DNA, 15 bp, Homo sapiens
gtagagttccagcag

SEQ ID NO: 1922292 - DNA, 15 bp, Homo sapiens
tagagttccagcagg

SEQ ID NO: 1922293 - DNA, 15 bp, Homo sapiens
agagttccagcaggc

SEQ ID NO: 1922294 - DNA, 15 bp, Homo sapiens
gagttccagcaggct

SEQ ID NO: 1922295 - DNA, 15 bp, Homo sapiens
agttccagcaggcta

SEQ ID NO: 1922296 - DNA, 15 bp, Homo sapiens
gttccagcaggctac

SEQ ID NO: 1922297 - DNA, 15 bp, Homo sapiens
ttccagcaggctacc

SEQ ID NO: 1922298 - DNA, 15 bp, Homo sapiens
tccagcaggctaccg

SEQ ID NO: 1922299 - DNA, 15 bp, Homo sapiens
ccagcaggctaccgt

SEQ ID NO: 1922300 - DNA, 15 bp, Homo sapiens
cagcaggctaccgtt

SEQ ID NO: 1922301 - DNA, 15 bp, Homo sapiens
agcaggctaccgttt

SEQ ID NO: 1922302 - DNA, 15 bp, Homo sapiens
gcaggctaccgtttc

SEQ ID NO: 1922303 - DNA, 15 bp, Homo sapiens
caggctaccgtttcc

SEQ ID NO: 1922304 - DNA, 15 bp, Homo sapiens
aggctaccgtttccc

SEQ ID NO: 1922305 - DNA, 15 bp, Homo sapiens
ggctaccgtttccca

SEQ ID NO: 1922306 - DNA, 15 bp, Homo sapiens
gctaccgtttcccat

SEQ ID NO: 1922307 - DNA, 15 bp, Homo sapiens
ctaccgtttcccatt

SEQ ID NO: 1922308 - DNA, 15 bp, Homo sapiens
taccgtttcccattg

SEQ ID NO: 1922309 - DNA, 15 bp, Homo sapiens
accgtttcccattgc

SEQ ID NO: 1922310 - DNA, 15 bp, Homo sapiens
ccgtttcccattgct

SEQ ID NO: 1922311 - DNA, 15 bp, Homo sapiens
cgtttcccattgctg

SEQ ID NO: 1922312 - DNA, 15 bp, Homo sapiens
gtttcccattgctgt

SEQ ID NO: 1922313 - DNA, 15 bp, Homo sapiens
tttcccattgctgtg

SEQ ID NO: 1922314 - DNA, 15 bp, Homo sapiens
ttcccattgctgtga

SEQ ID NO: 1922315 - DNA, 15 bp, Homo sapiens
tcccattgctgtgaa

SEQ ID NO: 1922316 - DNA, 15 bp, Homo sapiens
cccattgctgtgaat

SEQ ID NO: 1922317 - DNA, 15 bp, Homo sapiens
ccattgctgtgaatg

SEQ ID NO: 1922318 - DNA, 15 bp, Homo sapiens
cattgctgtgaatga

SEQ ID NO: 1922319 - DNA, 15 bp, Homo sapiens
attgctgtgaatgac

SEQ ID NO: 1922320 - DNA, 15 bp, Homo sapiens
ttgctgtgaatgacc

SEQ ID NO: 1922321 - DNA, 15 bp, Homo sapiens
tgctgtgaatgacca

SEQ ID NO: 1922322 - DNA, 15 bp, Homo sapiens
gctgtgaatgaccat

SEQ ID NO: 1922323 - DNA, 15 bp, Homo sapiens
ctgtgaatgaccatg

SEQ ID NO: 1922324 - DNA, 15 bp, Homo sapiens
tgtgaatgaccatgt

SEQ ID NO: 1922325 - DNA, 15 bp, Homo sapiens
gtgaatgaccatgtt

SEQ ID NO: 1922326 - DNA, 15 bp, Homo sapiens
tgaatgaccatgttg

SEQ ID NO: 1922327 - DNA, 15 bp, Homo sapiens
gaatgaccatgttgg

SEQ ID NO: 1922328 - DNA, 15 bp, Homo sapiens
aatgaccatgttggc

SEQ ID NO: 1922329 - DNA, 15 bp, Homo sapiens
atgaccatgttggcc

SEQ ID NO: 1922330 - DNA, 15 bp, Homo sapiens
tgaccatgttggcca

SEQ ID NO: 1922331 - DNA, 15 bp, Homo sapiens
gaccatgttggccat

SEQ ID NO: 1922332 - DNA, 15 bp, Homo sapiens
ccatgttggccatgc

SEQ ID NO: 1922333 - DNA, 15 bp, Homo sapiens
tgttggccatgctgt

SEQ ID NO: 1922334 - DNA, 15 bp, Homo sapiens
gttggccatgctgtg

SEQ ID NO: 1922335 - DNA, 15 bp, Homo sapiens
ttggccatgctgtga

SEQ ID NO: 1922336 - DNA, 15 bp, Homo sapiens
tggccatgctgtgaa

SEQ ID NO: 1922337 - DNA, 15 bp, Homo sapiens
ggccatgctgtgaat

SEQ ID NO: 1922338 - DNA, 15 bp, Homo sapiens
gccatgctgtgaatg

SEQ ID NO: 1922339 - DNA, 15 bp, Homo sapiens
ccatgctgtgaatgc

SEQ ID NO: 1922340 - DNA, 15 bp, Homo sapiens
catgctgtgaatgca

SEQ ID NO: 1922341 - DNA, 15 bp, Homo sapiens
atgctgtgaatgcat

SEQ ID NO: 1922342 - DNA, 15 bp, Homo sapiens
tgctgtgaatgcatg

SEQ ID NO: 1922343 - DNA, 15 bp, Homo sapiens
gctgtgaatgcatgg

SEQ ID NO: 1922344 - DNA, 15 bp, Homo sapiens
ctgtgaatgcatggc

SEQ ID NO: 1922345 - DNA, 15 bp, Homo sapiens
tgtgaatgcatggca

SEQ ID NO: 1922346 - DNA, 15 bp, Homo sapiens
gtgaatgcatggcat

SEQ ID NO: 1922347 - DNA, 15 bp, Homo sapiens
tgaatgcatggcatt

SEQ ID NO: 1922348 - DNA, 15 bp, Homo sapiens
gaatgcatggcattt

SEQ ID NO: 1922349 - DNA, 15 bp, Homo sapiens
aatgcatggcattta

SEQ ID NO: 1922350 - DNA, 15 bp, Homo sapiens
atgcatggcatttat

SEQ ID NO: 1922351 - DNA, 15 bp, Homo sapiens
tgcatggcatttata

SEQ ID NO: 1922352 - DNA, 15 bp, Homo sapiens
gcatggcatttataa

SEQ ID NO: 1922353 - DNA, 15 bp, Homo sapiens
catggcatttataaa

SEQ ID NO: 1922354 - DNA, 15 bp, Homo sapiens
atggcatttataaag

SEQ ID NO: 1922355 - DNA, 15 bp, Homo sapiens
tggcatttataaagc

SEQ ID NO: 1922356 - DNA, 15 bp, Homo sapiens
ggcatttataaagca

SEQ ID NO: 1922357 - DNA, 15 bp, Homo sapiens
gcatttataaagcaa

SEQ ID NO: 1922358 - DNA, 15 bp, Homo sapiens
catttataaagcaaa

SEQ ID NO: 1922359 - DNA, 15 bp, Homo sapiens
atttataaagcaaat

SEQ ID NO: 1922360 - DNA, 15 bp, Homo sapiens
tttataaagcaaata

SEQ ID NO: 1922361 - DNA, 15 bp, Homo sapiens
ttataaagcaaatat

SEQ ID NO: 1922362 - DNA, 15 bp, Homo sapiens
tataaagcaaatatt

SEQ ID NO: 1922363 - DNA, 15 bp, Homo sapiens
ataaagcaaatatta

SEQ ID NO: 1922364 - DNA, 15 bp, Homo sapiens
taaagcaaatattat

SEQ ID NO: 1922365 - DNA, 15 bp, Homo sapiens
aaagcaaatattatt

SEQ ID NO: 1922366 - DNA, 15 bp, Homo sapiens
aagcaaatattattt

SEQ ID NO: 1922367 - DNA, 15 bp, Homo sapiens
agcaaatattatttt

SEQ ID NO: 1922368 - DNA, 15 bp, Homo sapiens
gcaaatattattttc

SEQ ID NO: 1922369 - DNA, 15 bp, Homo sapiens
caaatattattttca

SEQ ID NO: 1922370 - DNA, 15 bp, Homo sapiens
aaatattattttcag

SEQ ID NO: 1922371 - DNA, 15 bp, Homo sapiens
aatattattttcaga

SEQ ID NO: 1922372 - DNA, 15 bp, Homo sapiens
atattattttcagaa

SEQ ID NO: 1922373 - DNA, 15 bp, Homo sapiens
tattattttcagaat

SEQ ID NO: 1922374 - DNA, 15 bp, Homo sapiens
attattttcagaatg

SEQ ID NO: 1922375 - DNA, 15 bp, Homo sapiens
ttattttcagaatgt

SEQ ID NO: 1922376 - DNA, 15 bp, Homo sapiens
tattttcagaatgtc

SEQ ID NO: 1922377 - DNA, 15 bp, Homo sapiens
attttcagaatgtca

SEQ ID NO: 1922378 - DNA, 15 bp, Homo sapiens
ttttcagaatgtcaa

SEQ ID NO: 1922379 - DNA, 15 bp, Homo sapiens
tttcagaatgtcaag

SEQ ID NO: 1922380 - DNA, 15 bp, Homo sapiens
ttcagaatgtcaagc

SEQ ID NO: 1922381 - DNA, 15 bp, Homo sapiens
tcagaatgtcaagcc

SEQ ID NO: 1922382 - DNA, 15 bp, Homo sapiens
cagaatgtcaagcca

SEQ ID NO: 1922383 - DNA, 15 bp, Homo sapiens
agaatgtcaagccat

SEQ ID NO: 1922384 - DNA, 15 bp, Homo sapiens
gaatgtcaagccata

SEQ ID NO: 1922385 - DNA, 15 bp, Homo sapiens
aatgtcaagccataa

SEQ ID NO: 1922386 - DNA, 15 bp, Homo sapiens
atgtcaagccataaa

SEQ ID NO: 1922387 - DNA, 15 bp, Homo sapiens
tgtcaagccataaat

SEQ ID NO: 1922388 - DNA, 15 bp, Homo sapiens
gtcaagccataaatt

SEQ ID NO: 1922389 - DNA, 15 bp, Homo sapiens
tcaagccataaattt

SEQ ID NO: 1922390 - DNA, 15 bp, Homo sapiens
caagccataaatttc

SEQ ID NO: 1922391 - DNA, 15 bp, Homo sapiens
aagccataaatttct

SEQ ID NO: 1922392 - DNA, 15 bp, Homo sapiens
agccataaatttctt

SEQ ID NO: 1922393 - DNA, 15 bp, Homo sapiens
gccataaatttctta

SEQ ID NO: 1922394 - DNA, 15 bp, Homo sapiens
ccataaatttcttac

SEQ ID NO: 1922395 - DNA, 15 bp, Homo sapiens
cataaatttcttacc

SEQ ID NO: 1922396 - DNA, 15 bp, Homo sapiens
ataaatttcttacca

SEQ ID NO: 1922397 - DNA, 15 bp, Homo sapiens
taaatttcttaccac

SEQ ID NO: 1922398 - DNA, 15 bp, Homo sapiens
aaatttcttaccaca

SEQ ID NO: 1922399 - DNA, 15 bp, Homo sapiens
aatttcttaccacat

SEQ ID NO: 1922400 - DNA, 15 bp, Homo sapiens
atttcttaccacatt

SEQ ID NO: 1922401 - DNA, 15 bp, Homo sapiens
tttcttaccacattt

SEQ ID NO: 1922402 - DNA, 15 bp, Homo sapiens
ttcttaccacatttc

SEQ ID NO: 1922403 - DNA, 15 bp, Homo sapiens
tcttaccacatttct

SEQ ID NO: 1922404 - DNA, 15 bp, Homo sapiens
cttaccacatttctg

SEQ ID NO: 1922405 - DNA, 15 bp, Homo sapiens
ttaccacatttctgt

SEQ ID NO: 1922406 - DNA, 15 bp, Homo sapiens
taccacatttctgtg

SEQ ID NO: 1922407 - DNA, 15 bp, Homo sapiens
accacatttctgtgg

SEQ ID NO: 1922408 - DNA, 15 bp, Homo sapiens
ccacatttctgtggg

SEQ ID NO: 1922409 - DNA, 15 bp, Homo sapiens
cacatttctgtgggt

SEQ ID NO: 1922410 - DNA, 15 bp, Homo sapiens
acatttctgtgggtg

SEQ ID NO: 1922411 - DNA, 15 bp, Homo sapiens
catttctgtgggtga

SEQ ID NO: 1922412 - DNA, 15 bp, Homo sapiens
atttctgtgggtgaa

SEQ ID NO: 1922413 - DNA, 15 bp, Homo sapiens
tttctgtgggtgaaa

SEQ ID NO: 1922414 - DNA, 15 bp, Homo sapiens
ttctgtgggtgaaac

SEQ ID NO: 1922415 - DNA, 15 bp, Homo sapiens
tctgtgggtgaaaca

SEQ ID NO: 1922416 - DNA, 15 bp, Homo sapiens
ctgtgggtgaaacat

SEQ ID NO: 1922417 - DNA, 15 bp, Homo sapiens
tgtgggtgaaacatc

SEQ ID NO: 1922418 - DNA, 15 bp, Homo sapiens
gtgggtgaaacatct

SEQ ID NO: 1922419 - DNA, 15 bp, Homo sapiens
tgggtgaaacatctt

SEQ ID NO: 1922420 - DNA, 15 bp, Homo sapiens
gggtgaaacatctta

SEQ ID NO: 1922421 - DNA, 15 bp, Homo sapiens
ggtgaaacatcttaa

SEQ ID NO: 1922422 - DNA, 15 bp, Homo sapiens
gtgaaacatcttaac

SEQ ID NO: 1922423 - DNA, 15 bp, Homo sapiens
tgaaacatcttaaca

SEQ ID NO: 1922424 - DNA, 15 bp, Homo sapiens
gaaacatcttaacac

SEQ ID NO: 1922425 - DNA, 15 bp, Homo sapiens
aaacatcttaacact

SEQ ID NO: 1922426 - DNA, 15 bp, Homo sapiens
aacatcttaacactg

SEQ ID NO: 1922427 - DNA, 15 bp, Homo sapiens
acatcttaacactgt

SEQ ID NO: 1922428 - DNA, 15 bp, Homo sapiens
catcttaacactgta

SEQ ID NO: 1922429 - DNA, 15 bp, Homo sapiens
atcttaacactgtaa

SEQ ID NO: 1922430 - DNA, 15 bp, Homo sapiens
tcttaacactgtaat

SEQ ID NO: 1922431 - DNA, 15 bp, Homo sapiens
cttaacactgtaatc

SEQ ID NO: 1922432 - DNA, 15 bp, Homo sapiens
ttaacactgtaatca

SEQ ID NO: 1922433 - DNA, 15 bp, Homo sapiens
taacactgtaatcat

SEQ ID NO: 1922434 - DNA, 15 bp, Homo sapiens
aacactgtaatcatt

SEQ ID NO: 1922435 - DNA, 15 bp, Homo sapiens
acactgtaatcattc

SEQ ID NO: 1922436 - DNA, 15 bp, Homo sapiens
cactgtaatcattcc

SEQ ID NO: 1922437 - DNA, 15 bp, Homo sapiens
actgtaatcattcca

SEQ ID NO: 1922438 - DNA, 15 bp, Homo sapiens
ctgtaatcattccac

SEQ ID NO: 1922439 - DNA, 15 bp, Homo sapiens
tgtaatcattccact

SEQ ID NO: 1922440 - DNA, 15 bp, Homo sapiens
gtaatcattccactg

SEQ ID NO: 1922441 - DNA, 15 bp, Homo sapiens
taatcattccactgg

SEQ ID NO: 1922442 - DNA, 15 bp, Homo sapiens
aatcattccactggc

SEQ ID NO: 1922443 - DNA, 15 bp, Homo sapiens
atcattccactggca

SEQ ID NO: 1922444 - DNA, 15 bp, Homo sapiens
tcattccactggcat

SEQ ID NO: 1922445 - DNA, 15 bp, Homo sapiens
cattccactggcatt

SEQ ID NO: 1922446 - DNA, 15 bp, Homo sapiens
attccactggcatta

SEQ ID NO: 1922447 - DNA, 15 bp, Homo sapiens
ttccactggcattaa

SEQ ID NO: 1922448 - DNA, 15 bp, Homo sapiens
tccactggcattaaa

SEQ ID NO: 1922449 - DNA, 15 bp, Homo sapiens
ccactggcattaaaa

SEQ ID NO: 1922450 - DNA, 15 bp, Homo sapiens
cactggcattaaaaa

SEQ ID NO: 1922451 - DNA, 15 bp, Homo sapiens
actggcattaaaaat

SEQ ID NO: 1922452 - DNA, 15 bp, Homo sapiens
ctggcattaaaaatg

SEQ ID NO: 1922453 - DNA, 15 bp, Homo sapiens
tggcattaaaaatga

SEQ ID NO: 1922454 - DNA, 15 bp, Homo sapiens
ggcattaaaaatgag

SEQ ID NO: 1922455 - DNA, 15 bp, Homo sapiens
gcattaaaaatgaga

SEQ ID NO: 1922456 - DNA, 15 bp, Homo sapiens
cattaaaaatgagac

SEQ ID NO: 1922457 - DNA, 15 bp, Homo sapiens
attaaaaatgagacc

SEQ ID NO: 1922458 - DNA, 15 bp, Homo sapiens
ttaaaaatgagacca

SEQ ID NO: 1922459 - DNA, 15 bp, Homo sapiens
taaaaatgagaccag

SEQ ID NO: 1922460 - DNA, 15 bp, Homo sapiens
aaaaatgagaccagc

SEQ ID NO: 1922461 - DNA, 15 bp, Homo sapiens
aaaatgagaccagca

SEQ ID NO: 1922462 - DNA, 15 bp, Homo sapiens
aaatgagaccagcag

SEQ ID NO: 1922463 - DNA, 15 bp, Homo sapiens
aatgagaccagcagg

SEQ ID NO: 1922464 - DNA, 15 bp, Homo sapiens
atgagaccagcaggc

SEQ ID NO: 1922465 - DNA, 15 bp, Homo sapiens
tgagaccagcaggct

SEQ ID NO: 1922466 - DNA, 15 bp, Homo sapiens
gagaccagcaggcta

SEQ ID NO: 1922467 - DNA, 15 bp, Homo sapiens
agaccagcaggctag

SEQ ID NO: 1922468 - DNA, 15 bp, Homo sapiens
gaccagcaggctagc

SEQ ID NO: 1922469 - DNA, 15 bp, Homo sapiens
accagcaggctagca

SEQ ID NO: 1922470 - DNA, 15 bp, Homo sapiens
ccagcaggctagcaa

SEQ ID NO: 1922471 - DNA, 15 bp, Homo sapiens
cagcaggctagcaaa

SEQ ID NO: 1922472 - DNA, 15 bp, Homo sapiens
agcaggctagcaaaa

SEQ ID NO: 1922473 - DNA, 15 bp, Homo sapiens
gcaggctagcaaaac

SEQ ID NO: 1922474 - DNA, 15 bp, Homo sapiens
caggctagcaaaaca

SEQ ID NO: 1922475 - DNA, 15 bp, Homo sapiens
aggctagcaaaacaa

SEQ ID NO: 1922476 - DNA, 15 bp, Homo sapiens
ggctagcaaaacaat

SEQ ID NO: 1922477 - DNA, 15 bp, Homo sapiens
gctagcaaaacaata

SEQ ID NO: 1922478 - DNA, 15 bp, Homo sapiens
ctagcaaaacaatat

SEQ ID NO: 1922479 - DNA, 15 bp, Homo sapiens
tagcaaaacaatatg

SEQ ID NO: 1922480 - DNA, 15 bp, Homo sapiens
agcaaaacaatatga

SEQ ID NO: 1922481 - DNA, 15 bp, Homo sapiens
gcaaaacaatatgag

SEQ ID NO: 1922482 - DNA, 15 bp, Homo sapiens
caaaacaatatgagt

SEQ ID NO: 1922483 - DNA, 15 bp, Homo sapiens
aaaacaatatgagta

SEQ ID NO: 1922484 - DNA, 15 bp, Homo sapiens
aaacaatatgagtaa

SEQ ID NO: 1922485 - DNA, 15 bp, Homo sapiens
aacaatatgagtaat

SEQ ID NO: 1922486 - DNA, 15 bp, Homo sapiens
acaatatgagtaatt

SEQ ID NO: 1922487 - DNA, 15 bp, Homo sapiens
caatatgagtaattg

SEQ ID NO: 1922488 - DNA, 15 bp, Homo sapiens
aatatgagtaattga

SEQ ID NO: 1922489 - DNA, 15 bp, Homo sapiens
atatgagtaattgac

SEQ ID NO: 1922490 - DNA, 15 bp, Homo sapiens
tatgagtaattgact

SEQ ID NO: 1922491 - DNA, 15 bp, Homo sapiens
atgagtaattgactc

SEQ ID NO: 1922492 - DNA, 15 bp, Homo sapiens
tgagtaattgactca

SEQ ID NO: 1922493 - DNA, 15 bp, Homo sapiens
gagtaattgactcaa

SEQ ID NO: 1922494 - DNA, 15 bp, Homo sapiens
agtaattgactcaag

SEQ ID NO: 1922495 - DNA, 15 bp, Homo sapiens
gtaattgactcaagt

SEQ ID NO: 1922496 - DNA, 15 bp, Homo sapiens
taattgactcaagtg

SEQ ID NO: 1922497 - DNA, 15 bp, Homo sapiens
aattgactcaagtga

SEQ ID NO: 1922498 - DNA, 15 bp, Homo sapiens
attgactcaagtgag

SEQ ID NO: 1922499 - DNA, 15 bp, Homo sapiens
ttgactcaagtgagt

SEQ ID NO: 1922500 - DNA, 15 bp, Homo sapiens
tgactcaagtgagtt

SEQ ID NO: 1922501 - DNA, 15 bp, Homo sapiens
gactcaagtgagtta

SEQ ID NO: 1922502 - DNA, 15 bp, Homo sapiens
actcaagtgagttaa

SEQ ID NO: 1922503 - DNA, 15 bp, Homo sapiens
ctcaagtgagttaaa

SEQ ID NO: 1922504 - DNA, 15 bp, Homo sapiens
tcaagtgagttaaaa

SEQ ID NO: 1922505 - DNA, 15 bp, Homo sapiens
caagtgagttaaaac

SEQ ID NO: 1922506 - DNA, 15 bp, Homo sapiens
aagtgagttaaaaca

SEQ ID NO: 1922507 - DNA, 15 bp, Homo sapiens
agtgagttaaaacaa

SEQ ID NO: 1922508 - DNA, 15 bp, Homo sapiens
gtgagttaaaacaat

SEQ ID NO: 1922509 - DNA, 15 bp, Homo sapiens
tgagttaaaacaata

SEQ ID NO: 1922510 - DNA, 15 bp, Homo sapiens
gagttaaaacaataa

SEQ ID NO: 1922511 - DNA, 15 bp, Homo sapiens
agttaaaacaataat

SEQ ID NO: 1922512 - DNA, 15 bp, Homo sapiens
gttaaaacaataatt

SEQ ID NO: 1922513 - DNA, 15 bp, Homo sapiens
ttaaaacaataattt

SEQ ID NO: 1922514 - DNA, 15 bp, Homo sapiens
taaaacaataatttt

SEQ ID NO: 1922515 - DNA, 15 bp, Homo sapiens
aaaacaataatttta

SEQ ID NO: 1922516 - DNA, 15 bp, Homo sapiens
aaacaataattttaa

SEQ ID NO: 1922517 - DNA, 15 bp, Homo sapiens
aacaataattttaaa

SEQ ID NO: 1922518 - DNA, 15 bp, Homo sapiens
acaataattttaaag

SEQ ID NO: 1922519 - DNA, 15 bp, Homo sapiens
caataattttaaagc

SEQ ID NO: 1922520 - DNA, 15 bp, Homo sapiens
aataattttaaagca

SEQ ID NO: 1922521 - DNA, 15 bp, Homo sapiens
ataattttaaagcaa

SEQ ID NO: 1922522 - DNA, 15 bp, Homo sapiens
taattttaaagcaat

SEQ ID NO: 1922523 - DNA, 15 bp, Homo sapiens
aattttaaagcaatg

SEQ ID NO: 1922524 - DNA, 15 bp, Homo sapiens
attttaaagcaatgg

SEQ ID NO: 1922525 - DNA, 15 bp, Homo sapiens
ttttaaagcaatggt

SEQ ID NO: 1922526 - DNA, 15 bp, Homo sapiens
tttaaagcaatggtt

SEQ ID NO: 1922527 - DNA, 15 bp, Homo sapiens
ttaaagcaatggttt

SEQ ID NO: 1922528 - DNA, 15 bp, Homo sapiens
taaagcaatggtttg

SEQ ID NO: 1922529 - DNA, 15 bp, Homo sapiens
aaagcaatggtttgt

SEQ ID NO: 1922530 - DNA, 15 bp, Homo sapiens
aagcaatggtttgtt

SEQ ID NO: 1922531 - DNA, 15 bp, Homo sapiens
agcaatggtttgttc

SEQ ID NO: 1922532 - DNA, 15 bp, Homo sapiens
gcaatggtttgttct

SEQ ID NO: 1922533 - DNA, 15 bp, Homo sapiens
caatggtttgttcta

SEQ ID NO: 1922534 - DNA, 15 bp, Homo sapiens
aatggtttgttctaa

SEQ ID NO: 1922535 - DNA, 15 bp, Homo sapiens
tggtttgttctaata

SEQ ID NO: 1922536 - DNA, 15 bp, Homo sapiens
ggtttgttctaatac

SEQ ID NO: 1922537 - DNA, 15 bp, Homo sapiens
gtttgttctaataca

SEQ ID NO: 1922538 - DNA, 15 bp, Homo sapiens
tttgttctaatacaa

SEQ ID NO: 1922539 - DNA, 15 bp, Homo sapiens
ttgttctaatacaag

SEQ ID NO: 1922540 - DNA, 15 bp, Homo sapiens
tgttctaatacaagc

SEQ ID NO: 1922541 - DNA, 15 bp, Homo sapiens
gttctaatacaagca

SEQ ID NO: 1922542 - DNA, 15 bp, Homo sapiens
ttctaatacaagcat

SEQ ID NO: 1922543 - DNA, 15 bp, Homo sapiens
tctaatacaagcata

SEQ ID NO: 1922544 - DNA, 15 bp, Homo sapiens
ctaatacaagcatag

SEQ ID NO: 1922545 - DNA, 15 bp, Homo sapiens
taatacaagcatagt

SEQ ID NO: 1922546 - DNA, 15 bp, Homo sapiens
aatacaagcatagtt

SEQ ID NO: 1922547 - DNA, 15 bp, Homo sapiens
atacaagcatagtta

SEQ ID NO: 1922548 - DNA, 15 bp, Homo sapiens
tacaagcatagttaa

SEQ ID NO: 1922549 - DNA, 15 bp, Homo sapiens
acaagcatagttaaa

SEQ ID NO: 1922550 - DNA, 15 bp, Homo sapiens
caagcatagttaaat

SEQ ID NO: 1922551 - DNA, 15 bp, Homo sapiens
aagcatagttaaatt

SEQ ID NO: 1922552 - DNA, 15 bp, Homo sapiens
agcatagttaaattt

SEQ ID NO: 1922553 - DNA, 15 bp, Homo sapiens
gcatagttaaatttc

SEQ ID NO: 1922554 - DNA, 15 bp, Homo sapiens
catagttaaatttcc

SEQ ID NO: 1922555 - DNA, 15 bp, Homo sapiens
atagttaaatttcct

SEQ ID NO: 1922556 - DNA, 15 bp, Homo sapiens
tagttaaatttcctc

SEQ ID NO: 1922557 - DNA, 15 bp, Homo sapiens
agttaaatttcctcc

SEQ ID NO: 1922558 - DNA, 15 bp, Homo sapiens
gttaaatttcctccc

SEQ ID NO: 1922559 - DNA, 15 bp, Homo sapiens
ttaaatttcctccct

SEQ ID NO: 1922560 - DNA, 15 bp, Homo sapiens
taaatttcctccctc

SEQ ID NO: 1922561 - DNA, 15 bp, Homo sapiens
aaatttcctccctcc

SEQ ID NO: 1922562 - DNA, 15 bp, Homo sapiens
aatttcctccctccc

SEQ ID NO: 1922563 - DNA, 15 bp, Homo sapiens
atttcctccctcccc

SEQ ID NO: 1922564 - DNA, 15 bp, Homo sapiens
tttcctccctccccc

SEQ ID NO: 1922565 - DNA, 15 bp, Homo sapiens
ttcctccctccccca

SEQ ID NO: 1922566 - DNA, 15 bp, Homo sapiens
tcctccctcccccac

SEQ ID NO: 1922567 - DNA, 15 bp, Homo sapiens
cctccctcccccacc

SEQ ID NO: 1922568 - DNA, 15 bp, Homo sapiens
ctccctcccccacca

SEQ ID NO: 1922569 - DNA, 15 bp, Homo sapiens
tccctcccccaccaa

SEQ ID NO: 1922570 - DNA, 15 bp, Homo sapiens
ccctcccccaccaaa

SEQ ID NO: 1922571 - DNA, 15 bp, Homo sapiens
cctcccccaccaaaa

SEQ ID NO: 1922572 - DNA, 15 bp, Homo sapiens
ctcccccaccaaaac

SEQ ID NO: 1922573 - DNA, 15 bp, Homo sapiens
tcccccaccaaaaca

SEQ ID NO: 1922574 - DNA, 15 bp, Homo sapiens
cccccaccaaaacac

SEQ ID NO: 1922575 - DNA, 15 bp, Homo sapiens
ccccaccaaaacact

SEQ ID NO: 1922576 - DNA, 15 bp, Homo sapiens
cccaccaaaacactg

SEQ ID NO: 1922577 - DNA, 15 bp, Homo sapiens
ccaccaaaacactga

SEQ ID NO: 1922578 - DNA, 15 bp, Homo sapiens
caccaaaacactgaa

SEQ ID NO: 1922579 - DNA, 15 bp, Homo sapiens
accaaaacactgaaa

SEQ ID NO: 1922580 - DNA, 15 bp, Homo sapiens
ccaaaacactgaaat

SEQ ID NO: 1922581 - DNA, 15 bp, Homo sapiens
caaaacactgaaatg

SEQ ID NO: 1922582 - DNA, 15 bp, Homo sapiens
aaaacactgaaatga

SEQ ID NO: 1922583 - DNA, 15 bp, Homo sapiens
aaacactgaaatgaa

SEQ ID NO: 1922584 - DNA, 15 bp, Homo sapiens
aacactgaaatgaac

SEQ ID NO: 1922585 - DNA, 15 bp, Homo sapiens
acactgaaatgaaca

SEQ ID NO: 1922586 - DNA, 15 bp, Homo sapiens
cactgaaatgaacaa

SEQ ID NO: 1922587 - DNA, 15 bp, Homo sapiens
actgaaatgaacaat

SEQ ID NO: 1922588 - DNA, 15 bp, Homo sapiens
ctgaaatgaacaatg

SEQ ID NO: 1922589 - DNA, 15 bp, Homo sapiens
tgaaatgaacaatgg

SEQ ID NO: 1922590 - DNA, 15 bp, Homo sapiens
gaaatgaacaatggt

SEQ ID NO: 1922591 - DNA, 15 bp, Homo sapiens
aaatgaacaatggtt

SEQ ID NO: 1922592 - DNA, 15 bp, Homo sapiens
aatgaacaatggtta

SEQ ID NO: 1922593 - DNA, 15 bp, Homo sapiens
atgaacaatggttaa

SEQ ID NO: 1922594 - DNA, 15 bp, Homo sapiens
tgaacaatggttaag

SEQ ID NO: 1922595 - DNA, 15 bp, Homo sapiens
gaacaatggttaagt

SEQ ID NO: 1922596 - DNA, 15 bp, Homo sapiens
aacaatggttaagta

SEQ ID NO: 1922597 - DNA, 15 bp, Homo sapiens
acaatggttaagtaa

SEQ ID NO: 1922598 - DNA, 15 bp, Homo sapiens
caatggttaagtaag

SEQ ID NO: 1922599 - DNA, 15 bp, Homo sapiens
aatggttaagtaagt

SEQ ID NO: 1922600 - DNA, 15 bp, Homo sapiens
atggttaagtaagta

SEQ ID NO: 1922601 - DNA, 15 bp, Homo sapiens
tggttaagtaagtaa

SEQ ID NO: 1922602 - DNA, 15 bp, Homo sapiens
ggttaagtaagtaag

SEQ ID NO: 1922603 - DNA, 15 bp, Homo sapiens
gttaagtaagtaagg

SEQ ID NO: 1922604 - DNA, 15 bp, Homo sapiens
ttaagtaagtaaggt

SEQ ID NO: 1922605 - DNA, 15 bp, Homo sapiens
taagtaagtaaggta

SEQ ID NO: 1922606 - DNA, 15 bp, Homo sapiens
aagtaagtaaggtag

SEQ ID NO: 1922607 - DNA, 15 bp, Homo sapiens
agtaagtaaggtagt

SEQ ID NO: 1922608 - DNA, 15 bp, Homo sapiens
gtaagtaaggtagtt

SEQ ID NO: 1922609 - DNA, 15 bp, Homo sapiens
taagtaaggtagttc

SEQ ID NO: 1922610 - DNA, 15 bp, Homo sapiens
aagtaaggtagttct

SEQ ID NO: 1922611 - DNA, 15 bp, Homo sapiens
agtaaggtagttctc

SEQ ID NO: 1922612 - DNA, 15 bp, Homo sapiens
gtaaggtagttctca

SEQ ID NO: 1922613 - DNA, 15 bp, Homo sapiens
taaggtagttctcat

SEQ ID NO: 1922614 - DNA, 15 bp, Homo sapiens
aaggtagttctcatt

SEQ ID NO: 1922615 - DNA, 15 bp, Homo sapiens
aggtagttctcattg

SEQ ID NO: 1922616 - DNA, 15 bp, Homo sapiens
ggtagttctcattgt

SEQ ID NO: 1922617 - DNA, 15 bp, Homo sapiens
gtagttctcattgtc

SEQ ID NO: 1922618 - DNA, 15 bp, Homo sapiens
tagttctcattgtcc

SEQ ID NO: 1922619 - DNA, 15 bp, Homo sapiens
agttctcattgtccg

SEQ ID NO: 1922620 - DNA, 15 bp, Homo sapiens
gttctcattgtccgt

SEQ ID NO: 1922621 - DNA, 15 bp, Homo sapiens
ttctcattgtccgta

SEQ ID NO: 1922622 - DNA, 15 bp, Homo sapiens
tctcattgtccgtat

SEQ ID NO: 1922623 - DNA, 15 bp, Homo sapiens
ctcattgtccgtata

SEQ ID NO: 1922624 - DNA, 15 bp, Homo sapiens
tcattgtccgtataa

SEQ ID NO: 1922625 - DNA, 15 bp, Homo sapiens
cattgtccgtataag

SEQ ID NO: 1922626 - DNA, 15 bp, Homo sapiens
attgtccgtataagg

SEQ ID NO: 1922627 - DNA, 15 bp, Homo sapiens
ttgtccgtataagga

SEQ ID NO: 1922628 - DNA, 15 bp, Homo sapiens
tgtccgtataaggaa

SEQ ID NO: 1922629 - DNA, 15 bp, Homo sapiens
gtccgtataaggaag

SEQ ID NO: 1922630 - DNA, 15 bp, Homo sapiens
tccgtataaggaaga

SEQ ID NO: 1922631 - DNA, 15 bp, Homo sapiens
ccgtataaggaagaa

SEQ ID NO: 1922632 - DNA, 15 bp, Homo sapiens
cgtataaggaagaag

SEQ ID NO: 1922633 - DNA, 15 bp, Homo sapiens
gtataaggaagaagg

SEQ ID NO: 1922634 - DNA, 15 bp, Homo sapiens
tataaggaagaaggg

SEQ ID NO: 1922635 - DNA, 15 bp, Homo sapiens
ataaggaagaaggga

SEQ ID NO: 1922636 - DNA, 15 bp, Homo sapiens
taaggaagaagggat

SEQ ID NO: 1922637 - DNA, 15 bp, Homo sapiens
aaggaagaagggatg

SEQ ID NO: 1922638 - DNA, 15 bp, Homo sapiens
aggaagaagggatga

SEQ ID NO: 1922639 - DNA, 15 bp, Homo sapiens
ggaagaagggatgat

SEQ ID NO: 1922640 - DNA, 15 bp, Homo sapiens
gaagaagggatgatt

SEQ ID NO: 1922641 - DNA, 15 bp, Homo sapiens
aagaagggatgatta

SEQ ID NO: 1922642 - DNA, 15 bp, Homo sapiens
agaagggatgattaa

SEQ ID NO: 1922643 - DNA, 15 bp, Homo sapiens
gaagggatgattaaa

SEQ ID NO: 1922644 - DNA, 15 bp, Homo sapiens
aagggatgattaaag

SEQ ID NO: 1922645 - DNA, 15 bp, Homo sapiens
agggatgattaaagg

SEQ ID NO: 1922646 - DNA, 15 bp, Homo sapiens
gggatgattaaaggg

SEQ ID NO: 1922647 - DNA, 15 bp, Homo sapiens
ggatgattaaagggt

SEQ ID NO: 1922648 - DNA, 15 bp, Homo sapiens
gatgattaaagggta

SEQ ID NO: 1922649 - DNA, 15 bp, Homo sapiens
atgattaaagggtag

SEQ ID NO: 1922650 - DNA, 15 bp, Homo sapiens
tgattaaagggtaga

SEQ ID NO: 1922651 - DNA, 15 bp, Homo sapiens
gattaaagggtagac

SEQ ID NO: 1922652 - DNA, 15 bp, Homo sapiens
attaaagggtagaca

SEQ ID NO: 1922653 - DNA, 15 bp, Homo sapiens
ttaaagggtagacac

SEQ ID NO: 1922654 - DNA, 15 bp, Homo sapiens
taaagggtagacact

SEQ ID NO: 1922655 - DNA, 15 bp, Homo sapiens
aaagggtagacactg

SEQ ID NO: 1922656 - DNA, 15 bp, Homo sapiens
aagggtagacactgt

SEQ ID NO: 1922657 - DNA, 15 bp, Homo sapiens
agggtagacactgtt

SEQ ID NO: 1922658 - DNA, 15 bp, Homo sapiens
gggtagacactgttc

SEQ ID NO: 1922659 - DNA, 15 bp, Homo sapiens
ggtagacactgttcc

SEQ ID NO: 1922660 - DNA, 15 bp, Homo sapiens
gtagacactgttcct

SEQ ID NO: 1922661 - DNA, 15 bp, Homo sapiens
tagacactgttcctt

SEQ ID NO: 1922662 - DNA, 15 bp, Homo sapiens
agacactgttccttc

SEQ ID NO: 1922663 - DNA, 15 bp, Homo sapiens
gacactgttccttct

SEQ ID NO: 1922664 - DNA, 15 bp, Homo sapiens
acactgttccttctc

SEQ ID NO: 1922665 - DNA, 15 bp, Homo sapiens
cactgttccttctct

SEQ ID NO: 1922666 - DNA, 15 bp, Homo sapiens
actgttccttctctt

SEQ ID NO: 1922667 - DNA, 15 bp, Homo sapiens
ctgttccttctcttc

SEQ ID NO: 1922668 - DNA, 15 bp, Homo sapiens
tgttccttctcttct

SEQ ID NO: 1922669 - DNA, 15 bp, Homo sapiens
gttccttctcttctt

SEQ ID NO: 1922670 - DNA, 15 bp, Homo sapiens
ttccttctcttctta

SEQ ID NO: 1922671 - DNA, 15 bp, Homo sapiens
tccttctcttcttaa

SEQ ID NO: 1922672 - DNA, 15 bp, Homo sapiens
ccttctcttcttaac

SEQ ID NO: 1922673 - DNA, 15 bp, Homo sapiens
cttctcttcttaact

SEQ ID NO: 1922674 - DNA, 15 bp, Homo sapiens
ttctcttcttaactt

SEQ ID NO: 1922675 - DNA, 15 bp, Homo sapiens
tctcttcttaacttc

SEQ ID NO: 1922676 - DNA, 15 bp, Homo sapiens
ctcttcttaacttct

SEQ ID NO: 1922677 - DNA, 15 bp, Homo sapiens
tcttcttaacttctg

SEQ ID NO: 1922678 - DNA, 15 bp, Homo sapiens
cttcttaacttctgc

SEQ ID NO: 1922679 - DNA, 15 bp, Homo sapiens
ttcttaacttctgct

SEQ ID NO: 1922680 - DNA, 15 bp, Homo sapiens
tcttaacttctgctc

SEQ ID NO: 1922681 - DNA, 15 bp, Homo sapiens
cttaacttctgctct

SEQ ID NO: 1922682 - DNA, 15 bp, Homo sapiens
ttaacttctgctctt

SEQ ID NO: 1922683 - DNA, 15 bp, Homo sapiens
taacttctgctcttt

SEQ ID NO: 1922684 - DNA, 15 bp, Homo sapiens
aacttctgctctttt

SEQ ID NO: 1922685 - DNA, 15 bp, Homo sapiens
acttctgctcttttc

SEQ ID NO: 1922686 - DNA, 15 bp, Homo sapiens
cttctgctcttttct

SEQ ID NO: 1922687 - DNA, 15 bp, Homo sapiens
ttctgctcttttctc

SEQ ID NO: 1922688 - DNA, 15 bp, Homo sapiens
tctgctcttttctct

SEQ ID NO: 1922689 - DNA, 15 bp, Homo sapiens
ctgctcttttctctc

SEQ ID NO: 1922690 - DNA, 15 bp, Homo sapiens
tgctcttttctctct

SEQ ID NO: 1922691 - DNA, 15 bp, Homo sapiens
gctcttttctctctc

SEQ ID NO: 1922692 - DNA, 15 bp, Homo sapiens
ctcttttctctctcc

SEQ ID NO: 1922693 - DNA, 15 bp, Homo sapiens
tcttttctctctccc

SEQ ID NO: 1922694 - DNA, 15 bp, Homo sapiens
cttttctctctccct

SEQ ID NO: 1922695 - DNA, 15 bp, Homo sapiens
ttttctctctccctt

SEQ ID NO: 1922696 - DNA, 15 bp, Homo sapiens
tttctctctcccttg

SEQ ID NO: 1922697 - DNA, 15 bp, Homo sapiens
ttctctctcccttgt

SEQ ID NO: 1922698 - DNA, 15 bp, Homo sapiens
tctctctcccttgta

SEQ ID NO: 1922699 - DNA, 15 bp, Homo sapiens
ctctctcccttgtaa

SEQ ID NO: 1922700 - DNA, 15 bp, Homo sapiens
tctctcccttgtaaa

SEQ ID NO: 1922701 - DNA, 15 bp, Homo sapiens
ctctcccttgtaaaa

SEQ ID NO: 1922702 - DNA, 15 bp, Homo sapiens
tctcccttgtaaaat

SEQ ID NO: 1922703 - DNA, 15 bp, Homo sapiens
ctcccttgtaaaata

SEQ ID NO: 1922704 - DNA, 15 bp, Homo sapiens
tcccttgtaaaataa

SEQ ID NO: 1922705 - DNA, 15 bp, Homo sapiens
cccttgtaaaataat

SEQ ID NO: 1922706 - DNA, 15 bp, Homo sapiens
ccttgtaaaataatt

SEQ ID NO: 1922707 - DNA, 15 bp, Homo sapiens
cttgtaaaataattt

SEQ ID NO: 1922708 - DNA, 15 bp, Homo sapiens
ttgtaaaataattta

SEQ ID NO: 1922709 - DNA, 15 bp, Homo sapiens
tgtaaaataatttag

SEQ ID NO: 1922710 - DNA, 15 bp, Homo sapiens
gtaaaataatttagt

SEQ ID NO: 1922711 - DNA, 15 bp, Homo sapiens
taaaataatttagta

SEQ ID NO: 1922712 - DNA, 15 bp, Homo sapiens
aaaataatttagtaa

SEQ ID NO: 1922713 - DNA, 15 bp, Homo sapiens
aaataatttagtaag

SEQ ID NO: 1922714 - DNA, 15 bp, Homo sapiens
aataatttagtaaga

SEQ ID NO: 1922715 - DNA, 15 bp, Homo sapiens
ataatttagtaagaa

SEQ ID NO: 1922716 - DNA, 15 bp, Homo sapiens
taatttagtaagaac

SEQ ID NO: 1922717 - DNA, 15 bp, Homo sapiens
aatttagtaagaaca

SEQ ID NO: 1922718 - DNA, 15 bp, Homo sapiens
atttagtaagaacag

SEQ ID NO: 1922719 - DNA, 15 bp, Homo sapiens
tttagtaagaacagt

SEQ ID NO: 1922720 - DNA, 15 bp, Homo sapiens
ttagtaagaacagtc

SEQ ID NO: 1922721 - DNA, 15 bp, Homo sapiens
tagtaagaacagtca

SEQ ID NO: 1922722 - DNA, 15 bp, Homo sapiens
agtaagaacagtcac

SEQ ID NO: 1922723 - DNA, 15 bp, Homo sapiens
gtaagaacagtcaca

SEQ ID NO: 1922724 - DNA, 15 bp, Homo sapiens
taagaacagtcacag

SEQ ID NO: 1922725 - DNA, 15 bp, Homo sapiens
aagaacagtcacagt

SEQ ID NO: 1922726 - DNA, 15 bp, Homo sapiens
agaacagtcacagtt

SEQ ID NO: 1922727 - DNA, 15 bp, Homo sapiens
gaacagtcacagttc

SEQ ID NO: 1922728 - DNA, 15 bp, Homo sapiens
aacagtcacagttct

SEQ ID NO: 1922729 - DNA, 15 bp, Homo sapiens
acagtcacagttcta

SEQ ID NO: 1922730 - DNA, 15 bp, Homo sapiens
cagtcacagttctac

SEQ ID NO: 1922731 - DNA, 15 bp, Homo sapiens
agtcacagttctaca

SEQ ID NO: 1922732 - DNA, 15 bp, Homo sapiens
gtcacagttctacaa

SEQ ID NO: 1922733 - DNA, 15 bp, Homo sapiens
tcacagttctacaat

SEQ ID NO: 1922734 - DNA, 15 bp, Homo sapiens
cacagttctacaata

SEQ ID NO: 1922735 - DNA, 15 bp, Homo sapiens
acagttctacaataa

SEQ ID NO: 1922736 - DNA, 15 bp, Homo sapiens
cagttctacaataac

SEQ ID NO: 1922737 - DNA, 15 bp, Homo sapiens
agttctacaataacc

SEQ ID NO: 1922738 - DNA, 15 bp, Homo sapiens
gttctacaataacca

SEQ ID NO: 1922739 - DNA, 15 bp, Homo sapiens
ttctacaataaccac

SEQ ID NO: 1922740 - DNA, 15 bp, Homo sapiens
tctacaataaccact

SEQ ID NO: 1922741 - DNA, 15 bp, Homo sapiens
ctacaataaccactt

SEQ ID NO: 1922742 - DNA, 15 bp, Homo sapiens
tacaataaccacttc

SEQ ID NO: 1922743 - DNA, 15 bp, Homo sapiens
acaataaccacttcg

SEQ ID NO: 1922744 - DNA, 15 bp, Homo sapiens
caataaccacttcga

SEQ ID NO: 1922745 - DNA, 15 bp, Homo sapiens
aataaccacttcgat

SEQ ID NO: 1922746 - DNA, 15 bp, Homo sapiens
ataaccacttcgatg

SEQ ID NO: 1922747 - DNA, 15 bp, Homo sapiens
taaccacttcgatgt

SEQ ID NO: 1922748 - DNA, 15 bp, Homo sapiens
aaccacttcgatgta

SEQ ID NO: 1922749 - DNA, 15 bp, Homo sapiens
accacttcgatgtat

SEQ ID NO: 1922750 - DNA, 15 bp, Homo sapiens
ccacttcgatgtatg

SEQ ID NO: 1922751 - DNA, 15 bp, Homo sapiens
cacttcgatgtatgg

SEQ ID NO: 1922752 - DNA, 15 bp, Homo sapiens
acttcgatgtatgga

SEQ ID NO: 1922753 - DNA, 15 bp, Homo sapiens
cttcgatgtatggat

SEQ ID NO: 1922754 - DNA, 15 bp, Homo sapiens
ttcgatgtatggatc

SEQ ID NO: 1922755 - DNA, 15 bp, Homo sapiens
tcgatgtatggatca

SEQ ID NO: 1922756 - DNA, 15 bp, Homo sapiens
cgatgtatggatcat

SEQ ID NO: 1922757 - DNA, 15 bp, Homo sapiens
gatgtatggatcatg

SEQ ID NO: 1922758 - DNA, 15 bp, Homo sapiens
atgtatggatcatgt

SEQ ID NO: 1922759 - DNA, 15 bp, Homo sapiens
tgtatggatcatgta

SEQ ID NO: 1922760 - DNA, 15 bp, Homo sapiens
gtatggatcatgtag

SEQ ID NO: 1922761 - DNA, 15 bp, Homo sapiens
tatggatcatgtagg

SEQ ID NO: 1922762 - DNA, 15 bp, Homo sapiens
atggatcatgtagga

SEQ ID NO: 1922763 - DNA, 15 bp, Homo sapiens
tggatcatgtaggaa

SEQ ID NO: 1922764 - DNA, 15 bp, Homo sapiens
ggatcatgtaggaaa

SEQ ID NO: 1922765 - DNA, 15 bp, Homo sapiens
gatcatgtaggaaag

SEQ ID NO: 1922766 - DNA, 15 bp, Homo sapiens
atcatgtaggaaagt

SEQ ID NO: 1922767 - DNA, 15 bp, Homo sapiens
tcatgtaggaaagta

SEQ ID NO: 1922768 - DNA, 15 bp, Homo sapiens
catgtaggaaagtag

SEQ ID NO: 1922769 - DNA, 15 bp, Homo sapiens
atgtaggaaagtaga

SEQ ID NO: 1922770 - DNA, 15 bp, Homo sapiens
tgtaggaaagtagac

SEQ ID NO: 1922771 - DNA, 15 bp, Homo sapiens
gtaggaaagtagact

SEQ ID NO: 1922772 - DNA, 15 bp, Homo sapiens
taggaaagtagactc

SEQ ID NO: 1922773 - DNA, 15 bp, Homo sapiens
aggaaagtagactca

SEQ ID NO: 1922774 - DNA, 15 bp, Homo sapiens
ggaaagtagactcaa

SEQ ID NO: 1922775 - DNA, 15 bp, Homo sapiens
gaaagtagactcaag

SEQ ID NO: 1922776 - DNA, 15 bp, Homo sapiens
aaagtagactcaaga

SEQ ID NO: 1922777 - DNA, 15 bp, Homo sapiens
aagtagactcaagaa

SEQ ID NO: 1922778 - DNA, 15 bp, Homo sapiens
agtagactcaagaaa

SEQ ID NO: 1922779 - DNA, 15 bp, Homo sapiens
gtagactcaagaaat

SEQ ID NO: 1922780 - DNA, 15 bp, Homo sapiens
tagactcaagaaata

SEQ ID NO: 1922781 - DNA, 15 bp, Homo sapiens
agactcaagaaatag

SEQ ID NO: 1922782 - DNA, 15 bp, Homo sapiens
gactcaagaaatagt

SEQ ID NO: 1922783 - DNA, 15 bp, Homo sapiens
actcaagaaatagtt

SEQ ID NO: 1922784 - DNA, 15 bp, Homo sapiens
ctcaagaaatagttt

SEQ ID NO: 1922785 - DNA, 15 bp, Homo sapiens
tcaagaaatagtttc

SEQ ID NO: 1922786 - DNA, 15 bp, Homo sapiens
caagaaatagtttca

SEQ ID NO: 1922787 - DNA, 15 bp, Homo sapiens
aagaaatagtttcag

SEQ ID NO: 1922788 - DNA, 15 bp, Homo sapiens
agaaatagtttcagg

SEQ ID NO: 1922789 - DNA, 15 bp, Homo sapiens
gaaatagtttcagga

SEQ ID NO: 1922790 - DNA, 15 bp, Homo sapiens
aaatagtttcaggac

SEQ ID NO: 1922791 - DNA, 15 bp, Homo sapiens
aatagtttcaggact

SEQ ID NO: 1922792 - DNA, 15 bp, Homo sapiens
atagtttcaggactc

SEQ ID NO: 1922793 - DNA, 15 bp, Homo sapiens
tagtttcaggactcc

SEQ ID NO: 1922794 - DNA, 15 bp, Homo sapiens
agtttcaggactccc

SEQ ID NO: 1922795 - DNA, 15 bp, Homo sapiens
gtttcaggactcccc

SEQ ID NO: 1922796 - DNA, 15 bp, Homo sapiens
tttcaggactcccct

SEQ ID NO: 1922797 - DNA, 15 bp, Homo sapiens
ttcaggactcccctg

SEQ ID NO: 1922798 - DNA, 15 bp, Homo sapiens
tcaggactcccctga

SEQ ID NO: 1922799 - DNA, 15 bp, Homo sapiens
caggactcccctgaa

SEQ ID NO: 1922800 - DNA, 15 bp, Homo sapiens
aggactcccctgaaa

SEQ ID NO: 1922801 - DNA, 15 bp, Homo sapiens
ggactcccctgaaaa

SEQ ID NO: 1922802 - DNA, 15 bp, Homo sapiens
gactcccctgaaaag

SEQ ID NO: 1922803 - DNA, 15 bp, Homo sapiens
actcccctgaaaagt

SEQ ID NO: 1922804 - DNA, 15 bp, Homo sapiens
ctcccctgaaaagtt

SEQ ID NO: 1922805 - DNA, 15 bp, Homo sapiens
tcccctgaaaagttt

SEQ ID NO: 1922806 - DNA, 15 bp, Homo sapiens
ccctgaaaagtttgt

SEQ ID NO: 1922807 - DNA, 15 bp, Homo sapiens
cctgaaaagtttgtc

SEQ ID NO: 1922808 - DNA, 15 bp, Homo sapiens
ctgaaaagtttgtca

SEQ ID NO: 1922809 - DNA, 15 bp, Homo sapiens
tgaaaagtttgtcag

SEQ ID NO: 1922810 - DNA, 15 bp, Homo sapiens
gaaaagtttgtcagc

SEQ ID NO: 1922811 - DNA, 15 bp, Homo sapiens
aaaagtttgtcagca

SEQ ID NO: 1922812 - DNA, 15 bp, Homo sapiens
aaagtttgtcagcat

SEQ ID NO: 1922813 - DNA, 15 bp, Homo sapiens
aagtttgtcagcatg

SEQ ID NO: 1922814 - DNA, 15 bp, Homo sapiens
agtttgtcagcatga

SEQ ID NO: 1922815 - DNA, 15 bp, Homo sapiens
gtttgtcagcatgat

SEQ ID NO: 1922816 - DNA, 15 bp, Homo sapiens
tttgtcagcatgata

SEQ ID NO: 1922817 - DNA, 15 bp, Homo sapiens
ttgtcagcatgatat

SEQ ID NO: 1922818 - DNA, 15 bp, Homo sapiens
tgtcagcatgatatg

SEQ ID NO: 1922819 - DNA, 15 bp, Homo sapiens
gtcagcatgatatgc

SEQ ID NO: 1922820 - DNA, 15 bp, Homo sapiens
tcagcatgatatgca

SEQ ID NO: 1922821 - DNA, 15 bp, Homo sapiens
cagcatgatatgcac

SEQ ID NO: 1922822 - DNA, 15 bp, Homo sapiens
agcatgatatgcaca

SEQ ID NO: 1922823 - DNA, 15 bp, Homo sapiens
gcatgatatgcacag

SEQ ID NO: 1922824 - DNA, 15 bp, Homo sapiens
catgatatgcacagc

SEQ ID NO: 1922825 - DNA, 15 bp, Homo sapiens
atgatatgcacagca

SEQ ID NO: 1922826 - DNA, 15 bp, Homo sapiens
tgatatgcacagcag

SEQ ID NO: 1922827 - DNA, 15 bp, Homo sapiens
gatatgcacagcagg

SEQ ID NO: 1922828 - DNA, 15 bp, Homo sapiens
atatgcacagcagga

SEQ ID NO: 1922829 - DNA, 15 bp, Homo sapiens
tatgcacagcaggac

SEQ ID NO: 1922830 - DNA, 15 bp, Homo sapiens
atgcacagcaggact

SEQ ID NO: 1922831 - DNA, 15 bp, Homo sapiens
tgcacagcaggactg

SEQ ID NO: 1922832 - DNA, 15 bp, Homo sapiens
gcacagcaggactga

SEQ ID NO: 1922833 - DNA, 15 bp, Homo sapiens
cacagcaggactgaa

SEQ ID NO: 1922834 - DNA, 15 bp, Homo sapiens
acagcaggactgaag

SEQ ID NO: 1922835 - DNA, 15 bp, Homo sapiens
cagcaggactgaaga

SEQ ID NO: 1922836 - DNA, 15 bp, Homo sapiens
agcaggactgaagaa

SEQ ID NO: 1922837 - DNA, 15 bp, Homo sapiens
gcaggactgaagaaa

SEQ ID NO: 1922838 - DNA, 15 bp, Homo sapiens
caggactgaagaaat

SEQ ID NO: 1922839 - DNA, 15 bp, Homo sapiens
aggactgaagaaata

SEQ ID NO: 1922840 - DNA, 15 bp, Homo sapiens
ggactgaagaaataa

SEQ ID NO: 1922841 - DNA, 15 bp, Homo sapiens
gactgaagaaataac

SEQ ID NO: 1922842 - DNA, 15 bp, Homo sapiens
actgaagaaataact

SEQ ID NO: 1922843 - DNA, 15 bp, Homo sapiens
ctgaagaaataactt

SEQ ID NO: 1922844 - DNA, 15 bp, Homo sapiens
tgaagaaataacttc

SEQ ID NO: 1922845 - DNA, 15 bp, Homo sapiens
gaagaaataacttct

SEQ ID NO: 1922846 - DNA, 15 bp, Homo sapiens
aagaaataacttcta

SEQ ID NO: 1922847 - DNA, 15 bp, Homo sapiens
gaaataacttctacg

SEQ ID NO: 1922848 - DNA, 15 bp, Homo sapiens
aaataacttctacgt

SEQ ID NO: 1922849 - DNA, 15 bp, Homo sapiens
aataacttctacgtt

SEQ ID NO: 1922850 - DNA, 15 bp, Homo sapiens
ataacttctacgttg

SEQ ID NO: 1922851 - DNA, 15 bp, Homo sapiens
taacttctacgttga

SEQ ID NO: 1922852 - DNA, 15 bp, Homo sapiens
aacttctacgttgaa

SEQ ID NO: 1922853 - DNA, 15 bp, Homo sapiens
acttctacgttgaat

SEQ ID NO: 1922854 - DNA, 15 bp, Homo sapiens
cttctacgttgaatc

SEQ ID NO: 1922855 - DNA, 15 bp, Homo sapiens
ttctacgttgaatct

SEQ ID NO: 1922856 - DNA, 15 bp, Homo sapiens
tctacgttgaatctg

SEQ ID NO: 1922857 - DNA, 15 bp, Homo sapiens
ctacgttgaatctgt

SEQ ID NO: 1922858 - DNA, 15 bp, Homo sapiens
tacgttgaatctgtt

SEQ ID NO: 1922859 - DNA, 15 bp, Homo sapiens
acgttgaatctgttc

SEQ ID NO: 1922860 - DNA, 15 bp, Homo sapiens
cgttgaatctgttcc

SEQ ID NO: 1922861 - DNA, 15 bp, Homo sapiens
gttgaatctgttcca

SEQ ID NO: 1922862 - DNA, 15 bp, Homo sapiens
ttgaatctgttccac

SEQ ID NO: 1922863 - DNA, 15 bp, Homo sapiens
tgaatctgttccacc

SEQ ID NO: 1922864 - DNA, 15 bp, Homo sapiens
gaatctgttccacct

SEQ ID NO: 1922865 - DNA, 15 bp, Homo sapiens
aatctgttccacctt

SEQ ID NO: 1922866 - DNA, 15 bp, Homo sapiens
atctgttccaccttt

SEQ ID NO: 1922867 - DNA, 15 bp, Homo sapiens
tctgttccacctttc

SEQ ID NO: 1922868 - DNA, 15 bp, Homo sapiens
ctgttccacctttcc

SEQ ID NO: 1922869 - DNA, 15 bp, Homo sapiens
tgttccacctttcca

SEQ ID NO: 1922870 - DNA, 15 bp, Homo sapiens
gttccacctttccat

SEQ ID NO: 1922871 - DNA, 15 bp, Homo sapiens
ttccacctttccata

SEQ ID NO: 1922872 - DNA, 15 bp, Homo sapiens
tccacctttccatat

SEQ ID NO: 1922873 - DNA, 15 bp, Homo sapiens
ccacctttccatatt

SEQ ID NO: 1922874 - DNA, 15 bp, Homo sapiens
cacctttccatattt

SEQ ID NO: 1922875 - DNA, 15 bp, Homo sapiens
acctttccatatttg

SEQ ID NO: 1922876 - DNA, 15 bp, Homo sapiens
cctttccatatttga

SEQ ID NO: 1922877 - DNA, 15 bp, Homo sapiens
ctttccatatttgaa

SEQ ID NO: 1922878 - DNA, 15 bp, Homo sapiens
tttccatatttgaag

SEQ ID NO: 1922879 - DNA, 15 bp, Homo sapiens
ttccatatttgaagt

SEQ ID NO: 1922880 - DNA, 15 bp, Homo sapiens
tccatatttgaagta

SEQ ID NO: 1922881 - DNA, 15 bp, Homo sapiens
ccatatttgaagtaa

SEQ ID NO: 1922882 - DNA, 15 bp, Homo sapiens
catatttgaagtaac

SEQ ID NO: 1922883 - DNA, 15 bp, Homo sapiens
atatttgaagtaact

SEQ ID NO: 1922884 - DNA, 15 bp, Homo sapiens
tatttgaagtaactg

SEQ ID NO: 1922885 - DNA, 15 bp, Homo sapiens
atttgaagtaactgt

SEQ ID NO: 1922886 - DNA, 15 bp, Homo sapiens
tttgaagtaactgta

SEQ ID NO: 1922887 - DNA, 15 bp, Homo sapiens
ttgaagtaactgtaa

SEQ ID NO: 1922888 - DNA, 15 bp, Homo sapiens
tgaagtaactgtaag

SEQ ID NO: 1922889 - DNA, 15 bp, Homo sapiens
gaagtaactgtaaga

SEQ ID NO: 1922890 - DNA, 15 bp, Homo sapiens
aagtaactgtaagaa

SEQ ID NO: 1922891 - DNA, 15 bp, Homo sapiens
agtaactgtaagaaa

SEQ ID NO: 1922892 - DNA, 15 bp, Homo sapiens
gtaactgtaagaaat

SEQ ID NO: 1922893 - DNA, 15 bp, Homo sapiens
taactgtaagaaata

SEQ ID NO: 1922894 - DNA, 15 bp, Homo sapiens
aactgtaagaaataa

SEQ ID NO: 1922895 - DNA, 15 bp, Homo sapiens
actgtaagaaataat

SEQ ID NO: 1922896 - DNA, 15 bp, Homo sapiens
ctgtaagaaataata

SEQ ID NO: 1922897 - DNA, 15 bp, Homo sapiens
tgtaagaaataatac

SEQ ID NO: 1922898 - DNA, 15 bp, Homo sapiens
gtaagaaataataca

SEQ ID NO: 1922899 - DNA, 15 bp, Homo sapiens
taagaaataatacaa

SEQ ID NO: 1922900 - DNA, 15 bp, Homo sapiens
aagaaataatacaaa

SEQ ID NO: 1922901 - DNA, 15 bp, Homo sapiens
agaaataatacaaag

SEQ ID NO: 1922902 - DNA, 15 bp, Homo sapiens
gaaataatacaaagt

SEQ ID NO: 1922903 - DNA, 15 bp, Homo sapiens
aaataatacaaagta

SEQ ID NO: 1922904 - DNA, 15 bp, Homo sapiens
aataatacaaagtat

SEQ ID NO: 1922905 - DNA, 15 bp, Homo sapiens
ataatacaaagtata

SEQ ID NO: 1922906 - DNA, 15 bp, Homo sapiens
taatacaaagtatat

SEQ ID NO: 1922907 - DNA, 15 bp, Homo sapiens
aatacaaagtatata

SEQ ID NO: 1922908 - DNA, 15 bp, Homo sapiens
atacaaagtatataa

SEQ ID NO: 1922909 - DNA, 15 bp, Homo sapiens
tacaaagtatataac

SEQ ID NO: 1922910 - DNA, 15 bp, Homo sapiens
acaaagtatataacc

SEQ ID NO: 1922911 - DNA, 15 bp, Homo sapiens
caaagtatataaccc

SEQ ID NO: 1922912 - DNA, 15 bp, Homo sapiens
aaagtatataaccct

SEQ ID NO: 1922913 - DNA, 15 bp, Homo sapiens
aagtatataaccctg

SEQ ID NO: 1922914 - DNA, 15 bp, Homo sapiens
agtatataaccctgc

SEQ ID NO: 1922915 - DNA, 15 bp, Homo sapiens
gtatataaccctgcc

SEQ ID NO: 1922916 - DNA, 15 bp, Homo sapiens
tatataaccctgcct

SEQ ID NO: 1922917 - DNA, 15 bp, Homo sapiens
atataaccctgcctt

SEQ ID NO: 1922918 - DNA, 15 bp, Homo sapiens
tataaccctgcctta

SEQ ID NO: 1922919 - DNA, 15 bp, Homo sapiens
ataaccctgccttat

SEQ ID NO: 1922920 - DNA, 15 bp, Homo sapiens
taaccctgccttata

SEQ ID NO: 1922921 - DNA, 15 bp, Homo sapiens
aaccctgccttatat

SEQ ID NO: 1922922 - DNA, 15 bp, Homo sapiens
accctgccttatatt

SEQ ID NO: 1922923 - DNA, 15 bp, Homo sapiens
ccctgccttatattt

SEQ ID NO: 1922924 - DNA, 15 bp, Homo sapiens
cctgccttatatttt

SEQ ID NO: 1922925 - DNA, 15 bp, Homo sapiens
ctgccttatatttta

SEQ ID NO: 1922926 - DNA, 15 bp, Homo sapiens
tgccttatattttaa

SEQ ID NO: 1922927 - DNA, 15 bp, Homo sapiens
gccttatattttaag

SEQ ID NO: 1922928 - DNA, 15 bp, Homo sapiens
ccttatattttaaga

SEQ ID NO: 1922929 - DNA, 15 bp, Homo sapiens
cttatattttaagaa

SEQ ID NO: 1922930 - DNA, 15 bp, Homo sapiens
ttatattttaagaat

SEQ ID NO: 1922931 - DNA, 15 bp, Homo sapiens
tatattttaagaatg

SEQ ID NO: 1922932 - DNA, 15 bp, Homo sapiens
atattttaagaatgc

SEQ ID NO: 1922933 - DNA, 15 bp, Homo sapiens
tattttaagaatgcc

SEQ ID NO: 1922934 - DNA, 15 bp, Homo sapiens
attttaagaatgcct

SEQ ID NO: 1922935 - DNA, 15 bp, Homo sapiens
ttttaagaatgcctt

SEQ ID NO: 1922936 - DNA, 15 bp, Homo sapiens
tttaagaatgccttt

SEQ ID NO: 1922937 - DNA, 15 bp, Homo sapiens
ttaagaatgcctttg

SEQ ID NO: 1922938 - DNA, 15 bp, Homo sapiens
taagaatgcctttgt

SEQ ID NO: 1922939 - DNA, 15 bp, Homo sapiens
aagaatgcctttgta

SEQ ID NO: 1922940 - DNA, 15 bp, Homo sapiens
agaatgcctttgtaa

SEQ ID NO: 1922941 - DNA, 15 bp, Homo sapiens
gaatgcctttgtaat

SEQ ID NO: 1922942 - DNA, 15 bp, Homo sapiens
aatgcctttgtaatc

SEQ ID NO: 1922943 - DNA, 15 bp, Homo sapiens
atgcctttgtaatct

SEQ ID NO: 1922944 - DNA, 15 bp, Homo sapiens
tgcctttgtaatcta

SEQ ID NO: 1922945 - DNA, 15 bp, Homo sapiens
gcctttgtaatctac

SEQ ID NO: 1922946 - DNA, 15 bp, Homo sapiens
cctttgtaatctact

SEQ ID NO: 1922947 - DNA, 15 bp, Homo sapiens
ctttgtaatctacta

SEQ ID NO: 1922948 - DNA, 15 bp, Homo sapiens
tttgtaatctactag

SEQ ID NO: 1922949 - DNA, 15 bp, Homo sapiens
ttgtaatctactaga

SEQ ID NO: 1922950 - DNA, 15 bp, Homo sapiens
tgtaatctactagat

SEQ ID NO: 1922951 - DNA, 15 bp, Homo sapiens
gtaatctactagatg

SEQ ID NO: 1922952 - DNA, 15 bp, Homo sapiens
taatctactagatgg

SEQ ID NO: 1922953 - DNA, 15 bp, Homo sapiens
aatctactagatggg

SEQ ID NO: 1922954 - DNA, 15 bp, Homo sapiens
atctactagatgggt

SEQ ID NO: 1922955 - DNA, 15 bp, Homo sapiens
tctactagatgggtc

SEQ ID NO: 1922956 - DNA, 15 bp, Homo sapiens
ctactagatgggtca

SEQ ID NO: 1922957 - DNA, 15 bp, Homo sapiens
tactagatgggtcaa

SEQ ID NO: 1922958 - DNA, 15 bp, Homo sapiens
actagatgggtcaac

SEQ ID NO: 1922959 - DNA, 15 bp, Homo sapiens
ctagatgggtcaaca

SEQ ID NO: 1922960 - DNA, 15 bp, Homo sapiens
tagatgggtcaacaa

SEQ ID NO: 1922961 - DNA, 15 bp, Homo sapiens
agatgggtcaacaaa

SEQ ID NO: 1922962 - DNA, 15 bp, Homo sapiens
gatgggtcaacaaac

SEQ ID NO: 1922963 - DNA, 15 bp, Homo sapiens
atgggtcaacaaaca

SEQ ID NO: 1922964 - DNA, 15 bp, Homo sapiens
tgggtcaacaaacac

SEQ ID NO: 1922965 - DNA, 15 bp, Homo sapiens
gggtcaacaaacaca

SEQ ID NO: 1922966 - DNA, 15 bp, Homo sapiens
ggtcaacaaacacac

SEQ ID NO: 1922967 - DNA, 15 bp, Homo sapiens
gtcaacaaacacaca

SEQ ID NO: 1922968 - DNA, 15 bp, Homo sapiens
tcaacaaacacacat

SEQ ID NO: 1922969 - DNA, 15 bp, Homo sapiens
caacaaacacacatg

SEQ ID NO: 1922970 - DNA, 15 bp, Homo sapiens
aacaaacacacatga

SEQ ID NO: 1922971 - DNA, 15 bp, Homo sapiens
acaaacacacatgaa

SEQ ID NO: 1922972 - DNA, 15 bp, Homo sapiens
caaacacacatgaaa

SEQ ID NO: 1922973 - DNA, 15 bp, Homo sapiens
aaacacacatgaaat

SEQ ID NO: 1922974 - DNA, 15 bp, Homo sapiens
aacacacatgaaatt

SEQ ID NO: 1922975 - DNA, 15 bp, Homo sapiens
acacacatgaaatta

SEQ ID NO: 1922976 - DNA, 15 bp, Homo sapiens
cacacatgaaattaa

SEQ ID NO: 1922977 - DNA, 15 bp, Homo sapiens
acacatgaaattaaa

SEQ ID NO: 1922978 - DNA, 15 bp, Homo sapiens
cacatgaaattaaaa

SEQ ID NO: 1922979 - DNA, 15 bp, Homo sapiens
acatgaaattaaaaa

SEQ ID NO: 1922980 - DNA, 15 bp, Homo sapiens
catgaaattaaaaat

SEQ ID NO: 1922981 - DNA, 15 bp, Homo sapiens
atgaaattaaaaata

SEQ ID NO: 1922982 - DNA, 15 bp, Homo sapiens
tgaaattaaaaatag

SEQ ID NO: 1922983 - DNA, 15 bp, Homo sapiens
gaaattaaaaataga

SEQ ID NO: 1922984 - DNA, 15 bp, Homo sapiens
aaattaaaaatagag

SEQ ID NO: 1922985 - DNA, 15 bp, Homo sapiens
aattaaaaatagaga

SEQ ID NO: 1922986 - DNA, 15 bp, Homo sapiens
attaaaaatagagaa

SEQ ID NO: 1922987 - DNA, 15 bp, Homo sapiens
ttaaaaatagagaac

SEQ ID NO: 1922988 - DNA, 15 bp, Homo sapiens
taaaaatagagaaca

SEQ ID NO: 1922989 - DNA, 15 bp, Homo sapiens
aaaaatagagaacaa

SEQ ID NO: 1922990 - DNA, 15 bp, Homo sapiens
aaaatagagaacaac

SEQ ID NO: 1922991 - DNA, 15 bp, Homo sapiens
aaatagagaacaaca

SEQ ID NO: 1922992 - DNA, 15 bp, Homo sapiens
aatagagaacaacaa

SEQ ID NO: 1922993 - DNA, 15 bp, Homo sapiens
atagagaacaacaat

SEQ ID NO: 1922994 - DNA, 15 bp, Homo sapiens
tagagaacaacaatt

SEQ ID NO: 1922995 - DNA, 15 bp, Homo sapiens
agagaacaacaatta

SEQ ID NO: 1922996 - DNA, 15 bp, Homo sapiens
gagaacaacaattag

SEQ ID NO: 1922997 - DNA, 15 bp, Homo sapiens
agaacaacaattagg

SEQ ID NO: 1922998 - DNA, 15 bp, Homo sapiens
gaacaacaattaggt

SEQ ID NO: 1922999 - DNA, 15 bp, Homo sapiens
aacaacaattaggta

SEQ ID NO: 1923000 - DNA, 15 bp, Homo sapiens
acaacaattaggtat

SEQ ID NO: 1923001 - DNA, 15 bp, Homo sapiens
caacaattaggtatc

SEQ ID NO: 1923002 - DNA, 15 bp, Homo sapiens
aacaattaggtatcc

SEQ ID NO: 1923003 - DNA, 15 bp, Homo sapiens
acaattaggtatcca

SEQ ID NO: 1923004 - DNA, 15 bp, Homo sapiens
caattaggtatccac

SEQ ID NO: 1923005 - DNA, 15 bp, Homo sapiens
aattaggtatccaca

SEQ ID NO: 1923006 - DNA, 15 bp, Homo sapiens
attaggtatccacat

SEQ ID NO: 1923007 - DNA, 15 bp, Homo sapiens
ttaggtatccacatg

SEQ ID NO: 1923008 - DNA, 15 bp, Homo sapiens
taggtatccacatgg

SEQ ID NO: 1923009 - DNA, 15 bp, Homo sapiens
aggtatccacatggg

SEQ ID NO: 1923010 - DNA, 15 bp, Homo sapiens
ggtatccacatgggt

SEQ ID NO: 1923011 - DNA, 15 bp, Homo sapiens
gtatccacatgggtg

SEQ ID NO: 1923012 - DNA, 15 bp, Homo sapiens
tatccacatgggtgg

SEQ ID NO: 1923013 - DNA, 15 bp, Homo sapiens
atccacatgggtggg

SEQ ID NO: 1923014 - DNA, 15 bp, Homo sapiens
tccacatgggtgggg

SEQ ID NO: 1923015 - DNA, 15 bp, Homo sapiens
ccacatgggtgggga

SEQ ID NO: 1923016 - DNA, 15 bp, Homo sapiens
cacatgggtggggat

SEQ ID NO: 1923017 - DNA, 15 bp, Homo sapiens
acatgggtggggata

SEQ ID NO: 1923018 - DNA, 15 bp, Homo sapiens
catgggtggggataa

SEQ ID NO: 1923019 - DNA, 15 bp, Homo sapiens
atgggtggggataat

SEQ ID NO: 1923020 - DNA, 15 bp, Homo sapiens
tgggtggggataata

SEQ ID NO: 1923021 - DNA, 15 bp, Homo sapiens
gggtggggataatat

SEQ ID NO: 1923022 - DNA, 15 bp, Homo sapiens
ggtggggataatatt

SEQ ID NO: 1923023 - DNA, 15 bp, Homo sapiens
gtggggataatattt

SEQ ID NO: 1923024 - DNA, 15 bp, Homo sapiens
tggggataatattta

SEQ ID NO: 1923025 - DNA, 15 bp, Homo sapiens
ggggataatatttac

SEQ ID NO: 1923026 - DNA, 15 bp, Homo sapiens
gggataatatttaca

SEQ ID NO: 1923027 - DNA, 15 bp, Homo sapiens
ggataatatttacaa

SEQ ID NO: 1923028 - DNA, 15 bp, Homo sapiens
gataatatttacaaa

SEQ ID NO: 1923029 - DNA, 15 bp, Homo sapiens
ataatatttacaaag

SEQ ID NO: 1923030 - DNA, 15 bp, Homo sapiens
taatatttacaaagt

SEQ ID NO: 1923031 - DNA, 15 bp, Homo sapiens
aatatttacaaagta

SEQ ID NO: 1923032 - DNA, 15 bp, Homo sapiens
atatttacaaagtat

SEQ ID NO: 1923033 - DNA, 15 bp, Homo sapiens
tatttacaaagtatt

SEQ ID NO: 1923034 - DNA, 15 bp, Homo sapiens
atttacaaagtattg

SEQ ID NO: 1923035 - DNA, 15 bp, Homo sapiens
tttacaaagtattgg

SEQ ID NO: 1923036 - DNA, 15 bp, Homo sapiens
ttacaaagtattggt

SEQ ID NO: 1923037 - DNA, 15 bp, Homo sapiens
tacaaagtattggta

SEQ ID NO: 1923038 - DNA, 15 bp, Homo sapiens
acaaagtattggtat

SEQ ID NO: 1923039 - DNA, 15 bp, Homo sapiens
caaagtattggtatg

SEQ ID NO: 1923040 - DNA, 15 bp, Homo sapiens
aaagtattggtatgg

SEQ ID NO: 1923041 - DNA, 15 bp, Homo sapiens
aagtattggtatggg

SEQ ID NO: 1923042 - DNA, 15 bp, Homo sapiens
agtattggtatgggg

SEQ ID NO: 1923043 - DNA, 15 bp, Homo sapiens
gtattggtatggggc

SEQ ID NO: 1923044 - DNA, 15 bp, Homo sapiens
tattggtatggggct

SEQ ID NO: 1923045 - DNA, 15 bp, Homo sapiens
attggtatggggctt

SEQ ID NO: 1923046 - DNA, 15 bp, Homo sapiens
ttggtatggggctta

SEQ ID NO: 1923047 - DNA, 15 bp, Homo sapiens
tggtatggggcttaa

SEQ ID NO: 1923048 - DNA, 15 bp, Homo sapiens
ggtatggggcttaaa

SEQ ID NO: 1923049 - DNA, 15 bp, Homo sapiens
gtatggggcttaaat

SEQ ID NO: 1923050 - DNA, 15 bp, Homo sapiens
tatggggcttaaatg

SEQ ID NO: 1923051 - DNA, 15 bp, Homo sapiens
atggggcttaaatgg

SEQ ID NO: 1923052 - DNA, 15 bp, Homo sapiens
tggggcttaaatggc

SEQ ID NO: 1923053 - DNA, 15 bp, Homo sapiens
ggggcttaaatggct

SEQ ID NO: 1923054 - DNA, 15 bp, Homo sapiens
gggcttaaatggctt

SEQ ID NO: 1923055 - DNA, 15 bp, Homo sapiens
ggcttaaatggctta

SEQ ID NO: 1923056 - DNA, 15 bp, Homo sapiens
gcttaaatggcttat

SEQ ID NO: 1923057 - DNA, 15 bp, Homo sapiens
cttaaatggcttatg

SEQ ID NO: 1923058 - DNA, 15 bp, Homo sapiens
ttaaatggcttatgt

SEQ ID NO: 1923059 - DNA, 15 bp, Homo sapiens
taaatggcttatgta

SEQ ID NO: 1923060 - DNA, 15 bp, Homo sapiens
aaatggcttatgtat

SEQ ID NO: 1923061 - DNA, 15 bp, Homo sapiens
aatggcttatgtatg

SEQ ID NO: 1923062 - DNA, 15 bp, Homo sapiens
atggcttatgtatgt

SEQ ID NO: 1923063 - DNA, 15 bp, Homo sapiens
tggcttatgtatgta

SEQ ID NO: 1923064 - DNA, 15 bp, Homo sapiens
ggcttatgtatgtaa

SEQ ID NO: 1923065 - DNA, 15 bp, Homo sapiens
gcttatgtatgtaaa

SEQ ID NO: 1923066 - DNA, 15 bp, Homo sapiens
cttatgtatgtaaat

SEQ ID NO: 1923067 - DNA, 15 bp, Homo sapiens
ttatgtatgtaaata

SEQ ID NO: 1923068 - DNA, 15 bp, Homo sapiens
tatgtatgtaaatat

SEQ ID NO: 1923069 - DNA, 15 bp, Homo sapiens
atgtatgtaaatatc

SEQ ID NO: 1923070 - DNA, 15 bp, Homo sapiens
tgtatgtaaatatca

SEQ ID NO: 1923071 - DNA, 15 bp, Homo sapiens
gtatgtaaatatcaa

SEQ ID NO: 1923072 - DNA, 15 bp, Homo sapiens
tatgtaaatatcaag

SEQ ID NO: 1923073 - DNA, 15 bp, Homo sapiens
atgtaaatatcaagc

SEQ ID NO: 1923074 - DNA, 15 bp, Homo sapiens
tgtaaatatcaagca

SEQ ID NO: 1923075 - DNA, 15 bp, Homo sapiens
gtaaatatcaagcat

SEQ ID NO: 1923076 - DNA, 15 bp, Homo sapiens
taaatatcaagcatt

SEQ ID NO: 1923077 - DNA, 15 bp, Homo sapiens
aaatatcaagcattg

SEQ ID NO: 1923078 - DNA, 15 bp, Homo sapiens
aatatcaagcattgt

SEQ ID NO: 1923079 - DNA, 15 bp, Homo sapiens
atatcaagcattgta

SEQ ID NO: 1923080 - DNA, 15 bp, Homo sapiens
tatcaagcattgtat

SEQ ID NO: 1923081 - DNA, 15 bp, Homo sapiens
atcaagcattgtata

SEQ ID NO: 1923082 - DNA, 15 bp, Homo sapiens
tcaagcattgtatac

SEQ ID NO: 1923083 - DNA, 15 bp, Homo sapiens
caagcattgtataca

SEQ ID NO: 1923084 - DNA, 15 bp, Homo sapiens
aagcattgtatacag

SEQ ID NO: 1923085 - DNA, 15 bp, Homo sapiens
agcattgtatacagc

SEQ ID NO: 1923086 - DNA, 15 bp, Homo sapiens
gcattgtatacagca

SEQ ID NO: 1923087 - DNA, 15 bp, Homo sapiens
cattgtatacagcat

SEQ ID NO: 1923088 - DNA, 15 bp, Homo sapiens
attgtatacagcata

SEQ ID NO: 1923089 - DNA, 15 bp, Homo sapiens
ttgtatacagcatat

SEQ ID NO: 1923090 - DNA, 15 bp, Homo sapiens
tgtatacagcatata

SEQ ID NO: 1923091 - DNA, 15 bp, Homo sapiens
gtatacagcatataa

SEQ ID NO: 1923092 - DNA, 15 bp, Homo sapiens
tatacagcatataac

SEQ ID NO: 1923093 - DNA, 15 bp, Homo sapiens
atacagcatataaca

SEQ ID NO: 1923094 - DNA, 15 bp, Homo sapiens
tacagcatataacag

SEQ ID NO: 1923095 - DNA, 15 bp, Homo sapiens
acagcatataacaga

SEQ ID NO: 1923096 - DNA, 15 bp, Homo sapiens
cagcatataacagac

SEQ ID NO: 1923097 - DNA, 15 bp, Homo sapiens
agcatataacagaca

SEQ ID NO: 1923098 - DNA, 15 bp, Homo sapiens
gcatataacagacat

SEQ ID NO: 1923099 - DNA, 15 bp, Homo sapiens
catataacagacata

SEQ ID NO: 1923100 - DNA, 15 bp, Homo sapiens
atataacagacataa

SEQ ID NO: 1923101 - DNA, 15 bp, Homo sapiens
tataacagacataat

SEQ ID NO: 1923102 - DNA, 15 bp, Homo sapiens
ataacagacataata

SEQ ID NO: 1923103 - DNA, 15 bp, Homo sapiens
taacagacataatag

SEQ ID NO: 1923104 - DNA, 15 bp, Homo sapiens
aacagacataatagt

SEQ ID NO: 1923105 - DNA, 15 bp, Homo sapiens
acagacataatagta

SEQ ID NO: 1923106 - DNA, 15 bp, Homo sapiens
cagacataatagtaa

SEQ ID NO: 1923107 - DNA, 15 bp, Homo sapiens
agacataatagtaaa

SEQ ID NO: 1923108 - DNA, 15 bp, Homo sapiens
gacataatagtaaat

SEQ ID NO: 1923109 - DNA, 15 bp, Homo sapiens
acataatagtaaata

SEQ ID NO: 1923110 - DNA, 15 bp, Homo sapiens
cataatagtaaataa

SEQ ID NO: 1923111 - DNA, 15 bp, Homo sapiens
ataatagtaaataac

SEQ ID NO: 1923112 - DNA, 15 bp, Homo sapiens
taatagtaaataaca

SEQ ID NO: 1923113 - DNA, 15 bp, Homo sapiens
aatagtaaataacag

SEQ ID NO: 1923114 - DNA, 15 bp, Homo sapiens
atagtaaataacagt

SEQ ID NO: 1923115 - DNA, 15 bp, Homo sapiens
tagtaaataacagta

SEQ ID NO: 1923116 - DNA, 15 bp, Homo sapiens
agtaaataacagtag

SEQ ID NO: 1923117 - DNA, 15 bp, Homo sapiens
gtaaataacagtagc

SEQ ID NO: 1923118 - DNA, 15 bp, Homo sapiens
taaataacagtagct

SEQ ID NO: 1923119 - DNA, 15 bp, Homo sapiens
aaataacagtagcta

SEQ ID NO: 1923120 - DNA, 15 bp, Homo sapiens
aataacagtagctat

SEQ ID NO: 1923121 - DNA, 15 bp, Homo sapiens
ataacagtagctatt

SEQ ID NO: 1923122 - DNA, 15 bp, Homo sapiens
taacagtagctatta

SEQ ID NO: 1923123 - DNA, 15 bp, Homo sapiens
aacagtagctattat

SEQ ID NO: 1923124 - DNA, 15 bp, Homo sapiens
acagtagctattata

SEQ ID NO: 1923125 - DNA, 15 bp, Homo sapiens
cagtagctattataa

SEQ ID NO: 1923126 - DNA, 15 bp, Homo sapiens
agtagctattataat

SEQ ID NO: 1923127 - DNA, 15 bp, Homo sapiens
gtagctattataatt

SEQ ID NO: 1923128 - DNA, 15 bp, Homo sapiens
tagctattataatta

SEQ ID NO: 1923129 - DNA, 15 bp, Homo sapiens
agctattataattaa

SEQ ID NO: 1923130 - DNA, 15 bp, Homo sapiens
gctattataattaat

SEQ ID NO: 1923131 - DNA, 15 bp, Homo sapiens
ctattataattaata

SEQ ID NO: 1923132 - DNA, 15 bp, Homo sapiens
tattataattaataa

SEQ ID NO: 1923133 - DNA, 15 bp, Homo sapiens
attataattaataat

SEQ ID NO: 1923134 - DNA, 15 bp, Homo sapiens
ttataattaataata

SEQ ID NO: 1923135 - DNA, 15 bp, Homo sapiens
tataattaataataa

SEQ ID NO: 1923136 - DNA, 15 bp, Homo sapiens
ataattaataataaa

SEQ ID NO: 1923137 - DNA, 15 bp, Homo sapiens
taattaataataaat

SEQ ID NO: 1923138 - DNA, 15 bp, Homo sapiens
aattaataataaatg

SEQ ID NO: 1923139 - DNA, 15 bp, Homo sapiens
attaataataaatgt

SEQ ID NO: 1923140 - DNA, 15 bp, Homo sapiens
ttaataataaatgta

SEQ ID NO: 1923141 - DNA, 15 bp, Homo sapiens
taataataaatgtac

SEQ ID NO: 1923142 - DNA, 15 bp, Homo sapiens
ataataaatgtacaa

SEQ ID NO: 1923143 - DNA, 15 bp, Homo sapiens
taataaatgtacaag

SEQ ID NO: 1923144 - DNA, 15 bp, Homo sapiens
aataaatgtacaagt

SEQ ID NO: 1923145 - DNA, 15 bp, Homo sapiens
ataaatgtacaagtc

SEQ ID NO: 1923146 - DNA, 15 bp, Homo sapiens
taaatgtacaagtcg

SEQ ID NO: 1923147 - DNA, 15 bp, Homo sapiens
aaatgtacaagtcgt

SEQ ID NO: 1923148 - DNA, 15 bp, Homo sapiens
aatgtacaagtcgta

SEQ ID NO: 1923149 - DNA, 15 bp, Homo sapiens
atgtacaagtcgtat

SEQ ID NO: 1923150 - DNA, 15 bp, Homo sapiens
tgtacaagtcgtatt

SEQ ID NO: 1923151 - DNA, 15 bp, Homo sapiens
gtacaagtcgtatta

SEQ ID NO: 1923152 - DNA, 15 bp, Homo sapiens
tacaagtcgtattag

SEQ ID NO: 1923153 - DNA, 15 bp, Homo sapiens
acaagtcgtattagt

SEQ ID NO: 1923154 - DNA, 15 bp, Homo sapiens
caagtcgtattagta

SEQ ID NO: 1923155 - DNA, 15 bp, Homo sapiens
aagtcgtattagtat

SEQ ID NO: 1923156 - DNA, 15 bp, Homo sapiens
agtcgtattagtata

SEQ ID NO: 1923157 - DNA, 15 bp, Homo sapiens
gtcgtattagtatac

SEQ ID NO: 1923158 - DNA, 15 bp, Homo sapiens
tcgtattagtatacc

SEQ ID NO: 1923159 - DNA, 15 bp, Homo sapiens
cgtattagtataccc

SEQ ID NO: 1923160 - DNA, 15 bp, Homo sapiens
gtattagtataccca

SEQ ID NO: 1923161 - DNA, 15 bp, Homo sapiens
tattagtatacccac

SEQ ID NO: 1923162 - DNA, 15 bp, Homo sapiens
attagtatacccact

SEQ ID NO: 1923163 - DNA, 15 bp, Homo sapiens
ttagtatacccacta

SEQ ID NO: 1923164 - DNA, 15 bp, Homo sapiens
tagtatacccactag

SEQ ID NO: 1923165 - DNA, 15 bp, Homo sapiens
agtatacccactagt

SEQ ID NO: 1923166 - DNA, 15 bp, Homo sapiens
gtatacccactagta

SEQ ID NO: 1923167 - DNA, 15 bp, Homo sapiens
tatacccactagtag

SEQ ID NO: 1923168 - DNA, 15 bp, Homo sapiens
atacccactagtagt

SEQ ID NO: 1923169 - DNA, 15 bp, Homo sapiens
tacccactagtagta

SEQ ID NO: 1923170 - DNA, 15 bp, Homo sapiens
acccactagtagtat

SEQ ID NO: 1923171 - DNA, 15 bp, Homo sapiens
cccactagtagtata

SEQ ID NO: 1923172 - DNA, 15 bp, Homo sapiens
ccactagtagtatat

SEQ ID NO: 1923173 - DNA, 15 bp, Homo sapiens
cactagtagtatata

SEQ ID NO: 1923174 - DNA, 15 bp, Homo sapiens
actagtagtatataa

SEQ ID NO: 1923175 - DNA, 15 bp, Homo sapiens
ctagtagtatataat

SEQ ID NO: 1923176 - DNA, 15 bp, Homo sapiens
tagtagtatataatc

SEQ ID NO: 1923177 - DNA, 15 bp, Homo sapiens
agtagtatataatct

SEQ ID NO: 1923178 - DNA, 15 bp, Homo sapiens
gtagtatataatctc

SEQ ID NO: 1923179 - DNA, 15 bp, Homo sapiens
tagtatataatctct

SEQ ID NO: 1923180 - DNA, 15 bp, Homo sapiens
agtatataatctctt

SEQ ID NO: 1923181 - DNA, 15 bp, Homo sapiens
gtatataatctcttg

SEQ ID NO: 1923182 - DNA, 15 bp, Homo sapiens
tatataatctcttgg

SEQ ID NO: 1923183 - DNA, 15 bp, Homo sapiens
atataatctcttgga

SEQ ID NO: 1923184 - DNA, 15 bp, Homo sapiens
tataatctcttggag

SEQ ID NO: 1923185 - DNA, 15 bp, Homo sapiens
ataatctcttggagc

SEQ ID NO: 1923186 - DNA, 15 bp, Homo sapiens
taatctcttggagct

SEQ ID NO: 1923187 - DNA, 15 bp, Homo sapiens
aatctcttggagcta

SEQ ID NO: 1923188 - DNA, 15 bp, Homo sapiens
atctcttggagctag

SEQ ID NO: 1923189 - DNA, 15 bp, Homo sapiens
tctcttggagctaga

SEQ ID NO: 1923190 - DNA, 15 bp, Homo sapiens
ctcttggagctagaa

SEQ ID NO: 1923191 - DNA, 15 bp, Homo sapiens
tcttggagctagaat

SEQ ID NO: 1923192 - DNA, 15 bp, Homo sapiens
cttggagctagaata

SEQ ID NO: 1923193 - DNA, 15 bp, Homo sapiens
ttggagctagaatag

SEQ ID NO: 1923194 - DNA, 15 bp, Homo sapiens
tggagctagaatagc

SEQ ID NO: 1923195 - DNA, 15 bp, Homo sapiens
ggagctagaatagct

SEQ ID NO: 1923196 - DNA, 15 bp, Homo sapiens
gagctagaatagctc

SEQ ID NO: 1923197 - DNA, 15 bp, Homo sapiens
agctagaatagctct

SEQ ID NO: 1923198 - DNA, 15 bp, Homo sapiens
gctagaatagctcta

SEQ ID NO: 1923199 - DNA, 15 bp, Homo sapiens
ctagaatagctctaa

SEQ ID NO: 1923200 - DNA, 15 bp, Homo sapiens
tagaatagctctaaa

SEQ ID NO: 1923201 - DNA, 15 bp, Homo sapiens
agaatagctctaaaa

SEQ ID NO: 1923202 - DNA, 15 bp, Homo sapiens
gaatagctctaaaat

SEQ ID NO: 1923203 - DNA, 15 bp, Homo sapiens
aatagctctaaaatg

SEQ ID NO: 1923204 - DNA, 15 bp, Homo sapiens
atagctctaaaatgt

SEQ ID NO: 1923205 - DNA, 15 bp, Homo sapiens
tagctctaaaatgtc

SEQ ID NO: 1923206 - DNA, 15 bp, Homo sapiens
agctctaaaatgtca

SEQ ID NO: 1923207 - DNA, 15 bp, Homo sapiens
gctctaaaatgtcat

SEQ ID NO: 1923208 - DNA, 15 bp, Homo sapiens
ctctaaaatgtcatt

SEQ ID NO: 1923209 - DNA, 15 bp, Homo sapiens
tctaaaatgtcattt

SEQ ID NO: 1923210 - DNA, 15 bp, Homo sapiens
ctaaaatgtcatttt

SEQ ID NO: 1923211 - DNA, 15 bp, Homo sapiens
taaaatgtcattttg

SEQ ID NO: 1923212 - DNA, 15 bp, Homo sapiens
aaaatgtcattttgc

SEQ ID NO: 1923213 - DNA, 15 bp, Homo sapiens
aaatgtcattttgcc

SEQ ID NO: 1923214 - DNA, 15 bp, Homo sapiens
aatgtcattttgccc

SEQ ID NO: 1923215 - DNA, 15 bp, Homo sapiens
atgtcattttgccca

SEQ ID NO: 1923216 - DNA, 15 bp, Homo sapiens
tgtcattttgcccaa

SEQ ID NO: 1923217 - DNA, 15 bp, Homo sapiens
gtcattttgcccaaa

SEQ ID NO: 1923218 - DNA, 15 bp, Homo sapiens
tcattttgcccaaaa

SEQ ID NO: 1923219 - DNA, 15 bp, Homo sapiens
cattttgcccaaaac

SEQ ID NO: 1923220 - DNA, 15 bp, Homo sapiens
attttgcccaaaacg

SEQ ID NO: 1923221 - DNA, 15 bp, Homo sapiens
ttttgcccaaaacgc

SEQ ID NO: 1923222 - DNA, 15 bp, Homo sapiens
tttgcccaaaacgca

SEQ ID NO: 1923223 - DNA, 15 bp, Homo sapiens
ttgcccaaaacgcac

SEQ ID NO: 1923224 - DNA, 15 bp, Homo sapiens
tgcccaaaacgcaca

SEQ ID NO: 1923225 - DNA, 15 bp, Homo sapiens
gcccaaaacgcacat

SEQ ID NO: 1923226 - DNA, 15 bp, Homo sapiens
cccaaaacgcacatc

SEQ ID NO: 1923227 - DNA, 15 bp, Homo sapiens
ccaaaacgcacatca

SEQ ID NO: 1923228 - DNA, 15 bp, Homo sapiens
caaaacgcacatcaa

SEQ ID NO: 1923229 - DNA, 15 bp, Homo sapiens
aaaacgcacatcaac

SEQ ID NO: 1923230 - DNA, 15 bp, Homo sapiens
aaacgcacatcaaca

SEQ ID NO: 1923231 - DNA, 15 bp, Homo sapiens
aacgcacatcaacaa

SEQ ID NO: 1923232 - DNA, 15 bp, Homo sapiens
acgcacatcaacaaa

SEQ ID NO: 1923233 - DNA, 15 bp, Homo sapiens
cgcacatcaacaaat

SEQ ID NO: 1923234 - DNA, 15 bp, Homo sapiens
gcacatcaacaaatt

SEQ ID NO: 1923235 - DNA, 15 bp, Homo sapiens
cacatcaacaaattc

SEQ ID NO: 1923236 - DNA, 15 bp, Homo sapiens
acatcaacaaattcc

SEQ ID NO: 1923237 - DNA, 15 bp, Homo sapiens
catcaacaaattcct

SEQ ID NO: 1923238 - DNA, 15 bp, Homo sapiens
atcaacaaattcctt

SEQ ID NO: 1923239 - DNA, 15 bp, Homo sapiens
tcaacaaattccttc

SEQ ID NO: 1923240 - DNA, 15 bp, Homo sapiens
caacaaattccttct

SEQ ID NO: 1923241 - DNA, 15 bp, Homo sapiens
aacaaattccttcta

SEQ ID NO: 1923242 - DNA, 15 bp, Homo sapiens
acaaattccttctat

SEQ ID NO: 1923243 - DNA, 15 bp, Homo sapiens
caaattccttctata

SEQ ID NO: 1923244 - DNA, 15 bp, Homo sapiens
aaattccttctatag

SEQ ID NO: 1923245 - DNA, 15 bp, Homo sapiens
aattccttctataga

SEQ ID NO: 1923246 - DNA, 15 bp, Homo sapiens
attccttctatagat

SEQ ID NO: 1923247 - DNA, 15 bp, Homo sapiens
ttccttctatagatt

SEQ ID NO: 1923248 - DNA, 15 bp, Homo sapiens
tccttctatagattt

SEQ ID NO: 1923249 - DNA, 15 bp, Homo sapiens
ccttctatagatttt

SEQ ID NO: 1923250 - DNA, 15 bp, Homo sapiens
cttctatagatttta

SEQ ID NO: 1923251 - DNA, 15 bp, Homo sapiens
ttctatagattttaa

SEQ ID NO: 1923252 - DNA, 15 bp, Homo sapiens
tctatagattttaag

SEQ ID NO: 1923253 - DNA, 15 bp, Homo sapiens
ctatagattttaagc

SEQ ID NO: 1923254 - DNA, 15 bp, Homo sapiens
tatagattttaagca

SEQ ID NO: 1923255 - DNA, 15 bp, Homo sapiens
atagattttaagcag

SEQ ID NO: 1923256 - DNA, 15 bp, Homo sapiens
tagattttaagcagg

SEQ ID NO: 1923257 - DNA, 15 bp, Homo sapiens
agattttaagcagga

SEQ ID NO: 1923258 - DNA, 15 bp, Homo sapiens
gattttaagcaggaa

SEQ ID NO: 1923259 - DNA, 15 bp, Homo sapiens
attttaagcaggaat

SEQ ID NO: 1923260 - DNA, 15 bp, Homo sapiens
ttttaagcaggaatc

SEQ ID NO: 1923261 - DNA, 15 bp, Homo sapiens
tttaagcaggaatca

SEQ ID NO: 1923262 - DNA, 15 bp, Homo sapiens
ttaagcaggaatcat

SEQ ID NO: 1923263 - DNA, 15 bp, Homo sapiens
taagcaggaatcatc

SEQ ID NO: 1923264 - DNA, 15 bp, Homo sapiens
aagcaggaatcatct

SEQ ID NO: 1923265 - DNA, 15 bp, Homo sapiens
agcaggaatcatcta

SEQ ID NO: 1923266 - DNA, 15 bp, Homo sapiens
gcaggaatcatctag

SEQ ID NO: 1923267 - DNA, 15 bp, Homo sapiens
caggaatcatctagc

SEQ ID NO: 1923268 - DNA, 15 bp, Homo sapiens
aggaatcatctagca

SEQ ID NO: 1923269 - DNA, 15 bp, Homo sapiens
ggaatcatctagcaa

SEQ ID NO: 1923270 - DNA, 15 bp, Homo sapiens
gaatcatctagcaat

SEQ ID NO: 1923271 - DNA, 15 bp, Homo sapiens
aatcatctagcaata

SEQ ID NO: 1923272 - DNA, 15 bp, Homo sapiens
atcatctagcaatag

SEQ ID NO: 1923273 - DNA, 15 bp, Homo sapiens
tcatctagcaatagg

SEQ ID NO: 1923274 - DNA, 15 bp, Homo sapiens
catctagcaatagga

SEQ ID NO: 1923275 - DNA, 15 bp, Homo sapiens
atctagcaataggaa

SEQ ID NO: 1923276 - DNA, 15 bp, Homo sapiens
tctagcaataggaat

SEQ ID NO: 1923277 - DNA, 15 bp, Homo sapiens
ctagcaataggaatg

SEQ ID NO: 1923278 - DNA, 15 bp, Homo sapiens
tagcaataggaatgg

SEQ ID NO: 1923279 - DNA, 15 bp, Homo sapiens
agcaataggaatggt

SEQ ID NO: 1923280 - DNA, 15 bp, Homo sapiens
gcaataggaatggtt

SEQ ID NO: 1923281 - DNA, 15 bp, Homo sapiens
caataggaatggtta

SEQ ID NO: 1923282 - DNA, 15 bp, Homo sapiens
aataggaatggttac

SEQ ID NO: 1923283 - DNA, 15 bp, Homo sapiens
ataggaatggttact

SEQ ID NO: 1923284 - DNA, 15 bp, Homo sapiens
taggaatggttacta

SEQ ID NO: 1923285 - DNA, 15 bp, Homo sapiens
aggaatggttactac

SEQ ID NO: 1923286 - DNA, 15 bp, Homo sapiens
ggaatggttactacc

SEQ ID NO: 1923287 - DNA, 15 bp, Homo sapiens
gaatggttactacct

SEQ ID NO: 1923288 - DNA, 15 bp, Homo sapiens
aatggttactacctg

SEQ ID NO: 1923289 - DNA, 15 bp, Homo sapiens
atggttactacctga

SEQ ID NO: 1923290 - DNA, 15 bp, Homo sapiens
tggttactacctgaa

SEQ ID NO: 1923291 - DNA, 15 bp, Homo sapiens
ggttactacctgaat

SEQ ID NO: 1923292 - DNA, 15 bp, Homo sapiens
gttactacctgaatc

SEQ ID NO: 1923293 - DNA, 15 bp, Homo sapiens
ttactacctgaatcc

SEQ ID NO: 1923294 - DNA, 15 bp, Homo sapiens
tactacctgaatcct

SEQ ID NO: 1923295 - DNA, 15 bp, Homo sapiens
actacctgaatcctg

SEQ ID NO: 1923296 - DNA, 15 bp, Homo sapiens
ctacctgaatcctgc

SEQ ID NO: 1923297 - DNA, 15 bp, Homo sapiens
tacctgaatcctgcc

SEQ ID NO: 1923298 - DNA, 15 bp, Homo sapiens
acctgaatcctgcca

SEQ ID NO: 1923299 - DNA, 15 bp, Homo sapiens
cctgaatcctgccag

SEQ ID NO: 1923300 - DNA, 15 bp, Homo sapiens
ctgaatcctgccagt

SEQ ID NO: 1923301 - DNA, 15 bp, Homo sapiens
tgaatcctgccagtg

SEQ ID NO: 1923302 - DNA, 15 bp, Homo sapiens
gaatcctgccagtga

SEQ ID NO: 1923303 - DNA, 15 bp, Homo sapiens
aatcctgccagtgat

SEQ ID NO: 1923304 - DNA, 15 bp, Homo sapiens
atcctgccagtgata

SEQ ID NO: 1923305 - DNA, 15 bp, Homo sapiens
tcctgccagtgatag

SEQ ID NO: 1923306 - DNA, 15 bp, Homo sapiens
cctgccagtgatagg

SEQ ID NO: 1923307 - DNA, 15 bp, Homo sapiens
ctgccagtgatagga

SEQ ID NO: 1923308 - DNA, 15 bp, Homo sapiens
tgccagtgataggac

SEQ ID NO: 1923309 - DNA, 15 bp, Homo sapiens
gccagtgataggaca

SEQ ID NO: 1923310 - DNA, 15 bp, Homo sapiens
ccagtgataggacag

SEQ ID NO: 1923311 - DNA, 15 bp, Homo sapiens
cagtgataggacagg

SEQ ID NO: 1923312 - DNA, 15 bp, Homo sapiens
agtgataggacaggt

SEQ ID NO: 1923313 - DNA, 15 bp, Homo sapiens
gtgataggacaggtc

SEQ ID NO: 1923314 - DNA, 15 bp, Homo sapiens
tgataggacaggtca

SEQ ID NO: 1923315 - DNA, 15 bp, Homo sapiens
gataggacaggtcac

SEQ ID NO: 1923316 - DNA, 15 bp, Homo sapiens
ataggacaggtcacc

SEQ ID NO: 1923317 - DNA, 15 bp, Homo sapiens
taggacaggtcacca

SEQ ID NO: 1923318 - DNA, 15 bp, Homo sapiens
aggacaggtcaccac

SEQ ID NO: 1923319 - DNA, 15 bp, Homo sapiens
ggacaggtcaccact

SEQ ID NO: 1923320 - DNA, 15 bp, Homo sapiens
gacaggtcaccactt

SEQ ID NO: 1923321 - DNA, 15 bp, Homo sapiens
acaggtcaccactta

SEQ ID NO: 1923322 - DNA, 15 bp, Homo sapiens
caggtcaccacttaa

SEQ ID NO: 1923323 - DNA, 15 bp, Homo sapiens
aggtcaccacttaat

SEQ ID NO: 1923324 - DNA, 15 bp, Homo sapiens
ggtcaccacttaatg

SEQ ID NO: 1923325 - DNA, 15 bp, Homo sapiens
gtcaccacttaatgc

SEQ ID NO: 1923326 - DNA, 15 bp, Homo sapiens
tcaccacttaatgct

SEQ ID NO: 1923327 - DNA, 15 bp, Homo sapiens
caccacttaatgcta

SEQ ID NO: 1923328 - DNA, 15 bp, Homo sapiens
accacttaatgctaa

SEQ ID NO: 1923329 - DNA, 15 bp, Homo sapiens
ccacttaatgctaac

SEQ ID NO: 1923330 - DNA, 15 bp, Homo sapiens
cacttaatgctaaca

SEQ ID NO: 1923331 - DNA, 15 bp, Homo sapiens
acttaatgctaacat

SEQ ID NO: 1923332 - DNA, 15 bp, Homo sapiens
cttaatgctaacatg

SEQ ID NO: 1923333 - DNA, 15 bp, Homo sapiens
ttaatgctaacatgt

SEQ ID NO: 1923334 - DNA, 15 bp, Homo sapiens
taatgctaacatgtt

SEQ ID NO: 1923335 - DNA, 15 bp, Homo sapiens
aatgctaacatgttt

SEQ ID NO: 1923336 - DNA, 15 bp, Homo sapiens
atgctaacatgtttt

SEQ ID NO: 1923337 - DNA, 15 bp, Homo sapiens
tgctaacatgttttc

SEQ ID NO: 1923338 - DNA, 15 bp, Homo sapiens
gctaacatgttttcc

SEQ ID NO: 1923339 - DNA, 15 bp, Homo sapiens
ctaacatgttttcct

SEQ ID NO: 1923340 - DNA, 15 bp, Homo sapiens
taacatgttttcctc

SEQ ID NO: 1923341 - DNA, 15 bp, Homo sapiens
acatgttttcctcat

SEQ ID NO: 1923342 - DNA, 15 bp, Homo sapiens
catgttttcctcata

SEQ ID NO: 1923343 - DNA, 15 bp, Homo sapiens
atgttttcctcataa

SEQ ID NO: 1923344 - DNA, 15 bp, Homo sapiens
tgttttcctcataac

SEQ ID NO: 1923345 - DNA, 15 bp, Homo sapiens
gttttcctcataaca

SEQ ID NO: 1923346 - DNA, 15 bp, Homo sapiens
ttttcctcataacaa

SEQ ID NO: 1923347 - DNA, 15 bp, Homo sapiens
tttcctcataacaag

SEQ ID NO: 1923348 - DNA, 15 bp, Homo sapiens
ttcctcataacaagt

SEQ ID NO: 1923349 - DNA, 15 bp, Homo sapiens
tcctcataacaagtt

SEQ ID NO: 1923350 - DNA, 15 bp, Homo sapiens
cctcataacaagttg

SEQ ID NO: 1923351 - DNA, 15 bp, Homo sapiens
ctcataacaagttga

SEQ ID NO: 1923352 - DNA, 15 bp, Homo sapiens
tcataacaagttgaa

SEQ ID NO: 1923353 - DNA, 15 bp, Homo sapiens
cataacaagttgaag

SEQ ID NO: 1923354 - DNA, 15 bp, Homo sapiens
ataacaagttgaagt

SEQ ID NO: 1923355 - DNA, 15 bp, Homo sapiens
taacaagttgaagtc

SEQ ID NO: 1923356 - DNA, 15 bp, Homo sapiens
aacaagttgaagtct

SEQ ID NO: 1923357 - DNA, 15 bp, Homo sapiens
acaagttgaagtctg

SEQ ID NO: 1923358 - DNA, 15 bp, Homo sapiens
caagttgaagtctgt

SEQ ID NO: 1923359 - DNA, 15 bp, Homo sapiens
aagttgaagtctgtc

SEQ ID NO: 1923360 - DNA, 15 bp, Homo sapiens
agttgaagtctgtct

SEQ ID NO: 1923361 - DNA, 15 bp, Homo sapiens
gttgaagtctgtctc

SEQ ID NO: 1923362 - DNA, 15 bp, Homo sapiens
ttgaagtctgtctcc

SEQ ID NO: 1923363 - DNA, 15 bp, Homo sapiens
tgaagtctgtctccc

SEQ ID NO: 1923364 - DNA, 15 bp, Homo sapiens
gaagtctgtctccct

SEQ ID NO: 1923365 - DNA, 15 bp, Homo sapiens
aagtctgtctccctg

SEQ ID NO: 1923366 - DNA, 15 bp, Homo sapiens
agtctgtctccctgt

SEQ ID NO: 1923367 - DNA, 15 bp, Homo sapiens
gtctgtctccctgta

SEQ ID NO: 1923368 - DNA, 15 bp, Homo sapiens
tctgtctccctgtaa

SEQ ID NO: 1923369 - DNA, 15 bp, Homo sapiens
ctgtctccctgtaat

SEQ ID NO: 1923370 - DNA, 15 bp, Homo sapiens
tgtctccctgtaata

SEQ ID NO: 1923371 - DNA, 15 bp, Homo sapiens
gtctccctgtaatat

SEQ ID NO: 1923372 - DNA, 15 bp, Homo sapiens
tctccctgtaatatc

SEQ ID NO: 1923373 - DNA, 15 bp, Homo sapiens
ctccctgtaatatct

SEQ ID NO: 1923374 - DNA, 15 bp, Homo sapiens
tccctgtaatatcta

SEQ ID NO: 1923375 - DNA, 15 bp, Homo sapiens
ccctgtaatatctac

SEQ ID NO: 1923376 - DNA, 15 bp, Homo sapiens
cctgtaatatctacc

SEQ ID NO: 1923377 - DNA, 15 bp, Homo sapiens
ctgtaatatctaccc

SEQ ID NO: 1923378 - DNA, 15 bp, Homo sapiens
tgtaatatctaccca

SEQ ID NO: 1923379 - DNA, 15 bp, Homo sapiens
gtaatatctacccac

SEQ ID NO: 1923380 - DNA, 15 bp, Homo sapiens
taatatctacccacc

SEQ ID NO: 1923381 - DNA, 15 bp, Homo sapiens
aatatctacccacca

SEQ ID NO: 1923382 - DNA, 15 bp, Homo sapiens
atatctacccaccaa

SEQ ID NO: 1923383 - DNA, 15 bp, Homo sapiens
tatctacccaccaaa

SEQ ID NO: 1923384 - DNA, 15 bp, Homo sapiens
atctacccaccaaat

SEQ ID NO: 1923385 - DNA, 15 bp, Homo sapiens
tctacccaccaaatc

SEQ ID NO: 1923386 - DNA, 15 bp, Homo sapiens
ctacccaccaaatct

SEQ ID NO: 1923387 - DNA, 15 bp, Homo sapiens
tacccaccaaatcta

SEQ ID NO: 1923388 - DNA, 15 bp, Homo sapiens
acccaccaaatctat

SEQ ID NO: 1923389 - DNA, 15 bp, Homo sapiens
cccaccaaatctata

SEQ ID NO: 1923390 - DNA, 15 bp, Homo sapiens
ccaccaaatctatac

SEQ ID NO: 1923391 - DNA, 15 bp, Homo sapiens
caccaaatctataca

SEQ ID NO: 1923392 - DNA, 15 bp, Homo sapiens
accaaatctatacaa

SEQ ID NO: 1923393 - DNA, 15 bp, Homo sapiens
ccaaatctatacaat

SEQ ID NO: 1923394 - DNA, 15 bp, Homo sapiens
caaatctatacaata

SEQ ID NO: 1923395 - DNA, 15 bp, Homo sapiens
aaatctatacaataa

SEQ ID NO: 1923396 - DNA, 15 bp, Homo sapiens
aatctatacaataaa

SEQ ID NO: 1923397 - DNA, 15 bp, Homo sapiens
atctatacaataaaa

SEQ ID NO: 1923398 - DNA, 15 bp, Homo sapiens
tctatacaataaaat

SEQ ID NO: 1923399 - DNA, 15 bp, Homo sapiens
ctatacaataaaatc

SEQ ID NO: 1923400 - DNA, 15 bp, Homo sapiens
tatacaataaaatca

SEQ ID NO: 1923401 - DNA, 15 bp, Homo sapiens
atacaataaaatcaa

SEQ ID NO: 1923402 - DNA, 15 bp, Homo sapiens
tacaataaaatcaat

SEQ ID NO: 1923403 - DNA, 15 bp, Homo sapiens
acaataaaatcaata

SEQ ID NO: 1923404 - DNA, 15 bp, Homo sapiens
caataaaatcaatac

SEQ ID NO: 1923405 - DNA, 15 bp, Homo sapiens
aataaaatcaatact

SEQ ID NO: 1923406 - DNA, 15 bp, Homo sapiens
ataaaatcaatactc

SEQ ID NO: 1923407 - DNA, 15 bp, Homo sapiens
taaaatcaatactcc

SEQ ID NO: 1923408 - DNA, 15 bp, Homo sapiens
aaaatcaatactcct

SEQ ID NO: 1923409 - DNA, 15 bp, Homo sapiens
aaatcaatactcctg

SEQ ID NO: 1923410 - DNA, 15 bp, Homo sapiens
aatcaatactcctgc

SEQ ID NO: 1923411 - DNA, 15 bp, Homo sapiens
atcaatactcctgca

SEQ ID NO: 1923412 - DNA, 15 bp, Homo sapiens
tcaatactcctgcac

SEQ ID NO: 1923413 - DNA, 15 bp, Homo sapiens
caatactcctgcact

SEQ ID NO: 1923414 - DNA, 15 bp, Homo sapiens
aatactcctgcactg

SEQ ID NO: 1923415 - DNA, 15 bp, Homo sapiens
atactcctgcactga

SEQ ID NO: 1923416 - DNA, 15 bp, Homo sapiens
tactcctgcactgac

SEQ ID NO: 1923417 - DNA, 15 bp, Homo sapiens
actcctgcactgact

SEQ ID NO: 1923418 - DNA, 15 bp, Homo sapiens
ctcctgcactgactt

SEQ ID NO: 1923419 - DNA, 15 bp, Homo sapiens
tcctgcactgactta

SEQ ID NO: 1923420 - DNA, 15 bp, Homo sapiens
cctgcactgacttat

SEQ ID NO: 1923421 - DNA, 15 bp, Homo sapiens
ctgcactgacttatt

SEQ ID NO: 1923422 - DNA, 15 bp, Homo sapiens
tgcactgacttattt

SEQ ID NO: 1923423 - DNA, 15 bp, Homo sapiens
gcactgacttatttt

SEQ ID NO: 1923424 - DNA, 15 bp, Homo sapiens
cactgacttatttta

SEQ ID NO: 1923425 - DNA, 15 bp, Homo sapiens
actgacttattttat

SEQ ID NO: 1923426 - DNA, 15 bp, Homo sapiens
ctgacttattttatt

SEQ ID NO: 1923427 - DNA, 15 bp, Homo sapiens
tgacttattttatta

SEQ ID NO: 1923428 - DNA, 15 bp, Homo sapiens
gacttattttattag

SEQ ID NO: 1923429 - DNA, 15 bp, Homo sapiens
acttattttattagt

SEQ ID NO: 1923430 - DNA, 15 bp, Homo sapiens
cttattttattagtg

SEQ ID NO: 1923431 - DNA, 15 bp, Homo sapiens
ttattttattagtgt

SEQ ID NO: 1923432 - DNA, 15 bp, Homo sapiens
tattttattagtgtt

SEQ ID NO: 1923433 - DNA, 15 bp, Homo sapiens
attttattagtgtta

SEQ ID NO: 1923434 - DNA, 15 bp, Homo sapiens
ttttattagtgttat

SEQ ID NO: 1923435 - DNA, 15 bp, Homo sapiens
tttattagtgttatt

SEQ ID NO: 1923436 - DNA, 15 bp, Homo sapiens
ttattagtgttattt

SEQ ID NO: 1923437 - DNA, 15 bp, Homo sapiens
tattagtgttatttt

SEQ ID NO: 1923438 - DNA, 15 bp, Homo sapiens
attagtgttatttta

SEQ ID NO: 1923439 - DNA, 15 bp, Homo sapiens
ttagtgttattttat

SEQ ID NO: 1923440 - DNA, 15 bp, Homo sapiens
tagtgttattttatt

SEQ ID NO: 1923441 - DNA, 15 bp, Homo sapiens
agtgttattttattg

SEQ ID NO: 1923442 - DNA, 15 bp, Homo sapiens
gtgttattttattga

SEQ ID NO: 1923443 - DNA, 15 bp, Homo sapiens
tgttattttattgaa

SEQ ID NO: 1923444 - DNA, 15 bp, Homo sapiens
gttattttattgaaa

SEQ ID NO: 1923445 - DNA, 15 bp, Homo sapiens
ttattttattgaaat

SEQ ID NO: 1923446 - DNA, 15 bp, Homo sapiens
tattttattgaaatg

SEQ ID NO: 1923447 - DNA, 15 bp, Homo sapiens
attttattgaaatga

SEQ ID NO: 1923448 - DNA, 15 bp, Homo sapiens
ttttattgaaatgaa

SEQ ID NO: 1923449 - DNA, 15 bp, Homo sapiens
tttattgaaatgaag

SEQ ID NO: 1923450 - DNA, 15 bp, Homo sapiens
ttattgaaatgaagg

SEQ ID NO: 1923451 - DNA, 15 bp, Homo sapiens
tattgaaatgaagga

SEQ ID NO: 1923452 - DNA, 15 bp, Homo sapiens
attgaaatgaaggag

SEQ ID NO: 1923453 - DNA, 15 bp, Homo sapiens
ttgaaatgaaggagg

SEQ ID NO: 1923454 - DNA, 15 bp, Homo sapiens
tgaaatgaaggaggg

SEQ ID NO: 1923455 - DNA, 15 bp, Homo sapiens
gaaatgaaggagggg

SEQ ID NO: 1923456 - DNA, 15 bp, Homo sapiens
aaatgaaggagggga

SEQ ID NO: 1923457 - DNA, 15 bp, Homo sapiens
aatgaaggaggggat

SEQ ID NO: 1923458 - DNA, 15 bp, Homo sapiens
atgaaggaggggatg

SEQ ID NO: 1923459 - DNA, 15 bp, Homo sapiens
tgaaggaggggatgg

SEQ ID NO: 1923460 - DNA, 15 bp, Homo sapiens
gaaggaggggatggg

SEQ ID NO: 1923461 - DNA, 15 bp, Homo sapiens
aaggaggggatgggg

SEQ ID NO: 1923462 - DNA, 15 bp, Homo sapiens
gggatggggaagagc

SEQ ID NO: 1923463 - DNA, 15 bp, Homo sapiens
ggatggggaagagca

SEQ ID NO: 1923464 - DNA, 15 bp, Homo sapiens
gatggggaagagcaa

SEQ ID NO: 1923465 - DNA, 15 bp, Homo sapiens
atggggaagagcaat

SEQ ID NO: 1923466 - DNA, 15 bp, Homo sapiens
tggggaagagcaatt

SEQ ID NO: 1923467 - DNA, 15 bp, Homo sapiens
ggggaagagcaattt

SEQ ID NO: 1923468 - DNA, 15 bp, Homo sapiens
gggaagagcaatttc

SEQ ID NO: 1923469 - DNA, 15 bp, Homo sapiens
ggaagagcaatttcc

SEQ ID NO: 1923470 - DNA, 15 bp, Homo sapiens
gaagagcaatttcca

SEQ ID NO: 1923471 - DNA, 15 bp, Homo sapiens
aagagcaatttccat

SEQ ID NO: 1923472 - DNA, 15 bp, Homo sapiens
agagcaatttccatt

SEQ ID NO: 1923473 - DNA, 15 bp, Homo sapiens
gagcaatttccattt

SEQ ID NO: 1923474 - DNA, 15 bp, Homo sapiens
agcaatttccatttg

SEQ ID NO: 1923475 - DNA, 15 bp, Homo sapiens
gcaatttccatttgt

SEQ ID NO: 1923476 - DNA, 15 bp, Homo sapiens
caatttccatttgtc

SEQ ID NO: 1923477 - DNA, 15 bp, Homo sapiens
aatttccatttgtct

SEQ ID NO: 1923478 - DNA, 15 bp, Homo sapiens
atttccatttgtctc

SEQ ID NO: 1923479 - DNA, 15 bp, Homo sapiens
tttccatttgtctca

SEQ ID NO: 1923480 - DNA, 15 bp, Homo sapiens
ttccatttgtctcaa

SEQ ID NO: 1923481 - DNA, 15 bp, Homo sapiens
tccatttgtctcaaa

SEQ ID NO: 1923482 - DNA, 15 bp, Homo sapiens
ccatttgtctcaaac

SEQ ID NO: 1923483 - DNA, 15 bp, Homo sapiens
catttgtctcaaaca

SEQ ID NO: 1923484 - DNA, 15 bp, Homo sapiens
atttgtctcaaacat

SEQ ID NO: 1923485 - DNA, 15 bp, Homo sapiens
tttgtctcaaacata

SEQ ID NO: 1923486 - DNA, 15 bp, Homo sapiens
ttgtctcaaacataa

SEQ ID NO: 1923487 - DNA, 15 bp, Homo sapiens
tgtctcaaacataag

SEQ ID NO: 1923488 - DNA, 15 bp, Homo sapiens
tctcaaacataagac

SEQ ID NO: 1923489 - DNA, 15 bp, Homo sapiens
ctcaaacataagacc

SEQ ID NO: 1923490 - DNA, 15 bp, Homo sapiens
tcaaacataagacca

SEQ ID NO: 1923491 - DNA, 15 bp, Homo sapiens
caaacataagaccat

SEQ ID NO: 1923492 - DNA, 15 bp, Homo sapiens
aaacataagaccatg

SEQ ID NO: 1923493 - DNA, 15 bp, Homo sapiens
aacataagaccatga

SEQ ID NO: 1923494 - DNA, 15 bp, Homo sapiens
acataagaccatgaa

SEQ ID NO: 1923495 - DNA, 15 bp, Homo sapiens
cataagaccatgaaa

SEQ ID NO: 1923496 - DNA, 15 bp, Homo sapiens
ataagaccatgaaaa

SEQ ID NO: 1923497 - DNA, 15 bp, Homo sapiens
taagaccatgaaaaa

SEQ ID NO: 1923498 - DNA, 15 bp, Homo sapiens
aagaccatgaaaaat

SEQ ID NO: 1923499 - DNA, 15 bp, Homo sapiens
agaccatgaaaaata

SEQ ID NO: 1923500 - DNA, 15 bp, Homo sapiens
gaccatgaaaaataa

SEQ ID NO: 1923501 - DNA, 15 bp, Homo sapiens
accatgaaaaataac

SEQ ID NO: 1923502 - DNA, 15 bp, Homo sapiens
ccatgaaaaataacc

SEQ ID NO: 1923503 - DNA, 15 bp, Homo sapiens
catgaaaaataaccc

SEQ ID NO: 1923504 - DNA, 15 bp, Homo sapiens
atgaaaaataaccca

SEQ ID NO: 1923505 - DNA, 15 bp, Homo sapiens
tgaaaaataacccat

SEQ ID NO: 1923506 - DNA, 15 bp, Homo sapiens
gaaaaataacccatt

SEQ ID NO: 1923507 - DNA, 15 bp, Homo sapiens
aaaaataacccattc

SEQ ID NO: 1923508 - DNA, 15 bp, Homo sapiens
aaaataacccattca

SEQ ID NO: 1923509 - DNA, 15 bp, Homo sapiens
aaataacccattcag

SEQ ID NO: 1923510 - DNA, 15 bp, Homo sapiens
aataacccattcaga

SEQ ID NO: 1923511 - DNA, 15 bp, Homo sapiens
ataacccattcagac

SEQ ID NO: 1923512 - DNA, 15 bp, Homo sapiens
taacccattcagaca

SEQ ID NO: 1923513 - DNA, 15 bp, Homo sapiens
aacccattcagacag

SEQ ID NO: 1923514 - DNA, 15 bp, Homo sapiens
acccattcagacaga

SEQ ID NO: 1923515 - DNA, 15 bp, Homo sapiens
cccattcagacagaa

SEQ ID NO: 1923516 - DNA, 15 bp, Homo sapiens
ccattcagacagaat

SEQ ID NO: 1923517 - DNA, 15 bp, Homo sapiens
cattcagacagaatt

SEQ ID NO: 1923518 - DNA, 15 bp, Homo sapiens
attcagacagaatta

SEQ ID NO: 1923519 - DNA, 15 bp, Homo sapiens
ttcagacagaattat

SEQ ID NO: 1923520 - DNA, 15 bp, Homo sapiens
tcagacagaattatg

SEQ ID NO: 1923521 - DNA, 15 bp, Homo sapiens
cagacagaattatga

SEQ ID NO: 1923522 - DNA, 15 bp, Homo sapiens
agacagaattatgac

SEQ ID NO: 1923523 - DNA, 15 bp, Homo sapiens
gacagaattatgaca

SEQ ID NO: 1923524 - DNA, 15 bp, Homo sapiens
acagaattatgacat

SEQ ID NO: 1923525 - DNA, 15 bp, Homo sapiens
cagaattatgacata

SEQ ID NO: 1923526 - DNA, 15 bp, Homo sapiens
agaattatgacataa

SEQ ID NO: 1923527 - DNA, 15 bp, Homo sapiens
gaattatgacataaa

SEQ ID NO: 1923528 - DNA, 15 bp, Homo sapiens
aattatgacataaag

SEQ ID NO: 1923529 - DNA, 15 bp, Homo sapiens
attatgacataaagg

SEQ ID NO: 1923530 - DNA, 15 bp, Homo sapiens
ttatgacataaaggg

SEQ ID NO: 1923531 - DNA, 15 bp, Homo sapiens
tatgacataaaggga

SEQ ID NO: 1923532 - DNA, 15 bp, Homo sapiens
atgacataaagggaa

SEQ ID NO: 1923533 - DNA, 15 bp, Homo sapiens
tgacataaagggaaa

SEQ ID NO: 1923534 - DNA, 15 bp, Homo sapiens
gacataaagggaaat

SEQ ID NO: 1923535 - DNA, 15 bp, Homo sapiens
acataaagggaaatt

SEQ ID NO: 1923536 - DNA, 15 bp, Homo sapiens
cataaagggaaattt

SEQ ID NO: 1923537 - DNA, 15 bp, Homo sapiens
ataaagggaaattta

SEQ ID NO: 1923538 - DNA, 15 bp, Homo sapiens
taaagggaaatttat

SEQ ID NO: 1923539 - DNA, 15 bp, Homo sapiens
aaagggaaatttatg

SEQ ID NO: 1923540 - DNA, 15 bp, Homo sapiens
aagggaaatttatga

SEQ ID NO: 1923541 - DNA, 15 bp, Homo sapiens
agggaaatttatgaa

SEQ ID NO: 1923542 - DNA, 15 bp, Homo sapiens
gggaaatttatgaag

SEQ ID NO: 1923543 - DNA, 15 bp, Homo sapiens
ggaaatttatgaagg

SEQ ID NO: 1923544 - DNA, 15 bp, Homo sapiens
gaaatttatgaaggt

SEQ ID NO: 1923545 - DNA, 15 bp, Homo sapiens
aaatttatgaaggtg

SEQ ID NO: 1923546 - DNA, 15 bp, Homo sapiens
aatttatgaaggtgg

SEQ ID NO: 1923547 - DNA, 15 bp, Homo sapiens
atttatgaaggtggc

SEQ ID NO: 1923548 - DNA, 15 bp, Homo sapiens
tttatgaaggtggca

SEQ ID NO: 1923549 - DNA, 15 bp, Homo sapiens
ttatgaaggtggcac

SEQ ID NO: 1923550 - DNA, 15 bp, Homo sapiens
tatgaaggtggcaca

SEQ ID NO: 1923551 - DNA, 15 bp, Homo sapiens
atgaaggtggcacaa

SEQ ID NO: 1923552 - DNA, 15 bp, Homo sapiens
tgaaggtggcacaaa

SEQ ID NO: 1923553 - DNA, 15 bp, Homo sapiens
gaaggtggcacaaag

SEQ ID NO: 1923554 - DNA, 15 bp, Homo sapiens
aaggtggcacaaagg

SEQ ID NO: 1923555 - DNA, 15 bp, Homo sapiens
aggtggcacaaagga

SEQ ID NO: 1923556 - DNA, 15 bp, Homo sapiens
ggtggcacaaaggac

SEQ ID NO: 1923557 - DNA, 15 bp, Homo sapiens
gtggcacaaaggaca

SEQ ID NO: 1923558 - DNA, 15 bp, Homo sapiens
tggcacaaaggacat

SEQ ID NO: 1923559 - DNA, 15 bp, Homo sapiens
ggcacaaaggacatc

SEQ ID NO: 1923560 - DNA, 15 bp, Homo sapiens
gcacaaaggacatca

SEQ ID NO: 1923561 - DNA, 15 bp, Homo sapiens
cacaaaggacatcag

SEQ ID NO: 1923562 - DNA, 15 bp, Homo sapiens
acaaaggacatcagt

SEQ ID NO: 1923563 - DNA, 15 bp, Homo sapiens
caaaggacatcagtt

SEQ ID NO: 1923564 - DNA, 15 bp, Homo sapiens
aaaggacatcagttt

SEQ ID NO: 1923565 - DNA, 15 bp, Homo sapiens
aaggacatcagtttt

SEQ ID NO: 1923566 - DNA, 15 bp, Homo sapiens
aggacatcagtttta

SEQ ID NO: 1923567 - DNA, 15 bp, Homo sapiens
ggacatcagttttaa

SEQ ID NO: 1923568 - DNA, 15 bp, Homo sapiens
gacatcagttttaaa

SEQ ID NO: 1923569 - DNA, 15 bp, Homo sapiens
acatcagttttaaaa

SEQ ID NO: 1923570 - DNA, 15 bp, Homo sapiens
catcagttttaaaag

SEQ ID NO: 1923571 - DNA, 15 bp, Homo sapiens
atcagttttaaaaga

SEQ ID NO: 1923572 - DNA, 15 bp, Homo sapiens
tcagttttaaaagat

SEQ ID NO: 1923573 - DNA, 15 bp, Homo sapiens
cagttttaaaagatt

SEQ ID NO: 1923574 - DNA, 15 bp, Homo sapiens
agttttaaaagatta

SEQ ID NO: 1923575 - DNA, 15 bp, Homo sapiens
gttttaaaagattaa

SEQ ID NO: 1923576 - DNA, 15 bp, Homo sapiens
ttttaaaagattaag

SEQ ID NO: 1923577 - DNA, 15 bp, Homo sapiens
tttaaaagattaaga

SEQ ID NO: 1923578 - DNA, 15 bp, Homo sapiens
atctagtccaggctt

SEQ ID NO: 1923579 - DNA, 15 bp, Homo sapiens
tctagtccaggctta

SEQ ID NO: 1923580 - DNA, 15 bp, Homo sapiens
ctagtccaggcttaa

SEQ ID NO: 1923581 - DNA, 15 bp, Homo sapiens
tagtccaggcttaag

SEQ ID NO: 1923582 - DNA, 15 bp, Homo sapiens
agtccaggcttaaga

SEQ ID NO: 1923583 - DNA, 15 bp, Homo sapiens
gtccaggcttaagat

SEQ ID NO: 1923584 - DNA, 15 bp, Homo sapiens
tccaggcttaagatt

SEQ ID NO: 1923585 - DNA, 15 bp, Homo sapiens
ccaggcttaagattt

SEQ ID NO: 1923586 - DNA, 15 bp, Homo sapiens
caggcttaagatttg

SEQ ID NO: 1923587 - DNA, 15 bp, Homo sapiens
aggcttaagatttgt

SEQ ID NO: 1923588 - DNA, 15 bp, Homo sapiens
ggcttaagatttgta

SEQ ID NO: 1923589 - DNA, 15 bp, Homo sapiens
gcttaagatttgtag

SEQ ID NO: 1923590 - DNA, 15 bp, Homo sapiens
cttaagatttgtagg

SEQ ID NO: 1923591 - DNA, 15 bp, Homo sapiens
ttaagatttgtagga

SEQ ID NO: 1923592 - DNA, 15 bp, Homo sapiens
taagatttgtaggat

SEQ ID NO: 1923593 - DNA, 15 bp, Homo sapiens
aagatttgtaggatt

SEQ ID NO: 1923594 - DNA, 15 bp, Homo sapiens
agatttgtaggattt

SEQ ID NO: 1923595 - DNA, 15 bp, Homo sapiens
gatttgtaggatttc

SEQ ID NO: 1923596 - DNA, 15 bp, Homo sapiens
atttgtaggatttct

SEQ ID NO: 1923597 - DNA, 15 bp, Homo sapiens
tttgtaggatttctt

SEQ ID NO: 1923598 - DNA, 15 bp, Homo sapiens
ttgtaggatttcttt

SEQ ID NO: 1923599 - DNA, 15 bp, Homo sapiens
tgtaggatttctttt

SEQ ID NO: 1923600 - DNA, 15 bp, Homo sapiens
gtaggatttcttttg

SEQ ID NO: 1923601 - DNA, 15 bp, Homo sapiens
taggatttcttttgc

SEQ ID NO: 1923602 - DNA, 15 bp, Homo sapiens
aggatttcttttgct

SEQ ID NO: 1923603 - DNA, 15 bp, Homo sapiens
ggatttcttttgctg

SEQ ID NO: 1923604 - DNA, 15 bp, Homo sapiens
gatttcttttgctgt

SEQ ID NO: 1923605 - DNA, 15 bp, Homo sapiens
atttcttttgctgtt

SEQ ID NO: 1923606 - DNA, 15 bp, Homo sapiens
tttcttttgctgttt

SEQ ID NO: 1923607 - DNA, 15 bp, Homo sapiens
ttcttttgctgtttc

SEQ ID NO: 1923608 - DNA, 15 bp, Homo sapiens
tcttttgctgtttcc

SEQ ID NO: 1923609 - DNA, 15 bp, Homo sapiens
cttttgctgtttccc

SEQ ID NO: 1923610 - DNA, 15 bp, Homo sapiens
ttttgctgtttccct

SEQ ID NO: 1923611 - DNA, 15 bp, Homo sapiens
tttgctgtttccctt

SEQ ID NO: 1923612 - DNA, 15 bp, Homo sapiens
ttgctgtttcccttt

SEQ ID NO: 1923613 - DNA, 15 bp, Homo sapiens
tgctgtttccctttt

SEQ ID NO: 1923614 - DNA, 15 bp, Homo sapiens
gctgtttcccttttt

SEQ ID NO: 1923615 - DNA, 15 bp, Homo sapiens
ctgtttccctttttt

SEQ ID NO: 1923616 - DNA, 15 bp, Homo sapiens
tgtttcccttttttt

SEQ ID NO: 1923617 - DNA, 15 bp, Homo sapiens
gtttcccttttttta

SEQ ID NO: 1923618 - DNA, 15 bp, Homo sapiens
tttccctttttttac

SEQ ID NO: 1923619 - DNA, 15 bp, Homo sapiens
ttccctttttttact

SEQ ID NO: 1923620 - DNA, 15 bp, Homo sapiens
tccctttttttactt

SEQ ID NO: 1923621 - DNA, 15 bp, Homo sapiens
ccctttttttacttg

SEQ ID NO: 1923622 - DNA, 15 bp, Homo sapiens
cctttttttacttgt

SEQ ID NO: 1923623 - DNA, 15 bp, Homo sapiens
ctttttttacttgtc

SEQ ID NO: 1923624 - DNA, 15 bp, Homo sapiens
tttttttacttgtca

SEQ ID NO: 1923625 - DNA, 15 bp, Homo sapiens
ttttttacttgtcag

SEQ ID NO: 1923626 - DNA, 15 bp, Homo sapiens
tttttacttgtcagg

SEQ ID NO: 1923627 - DNA, 15 bp, Homo sapiens
ttttacttgtcaggg

SEQ ID NO: 1923628 - DNA, 15 bp, Homo sapiens
tttacttgtcaggga

SEQ ID NO: 1923629 - DNA, 15 bp, Homo sapiens
ttacttgtcagggaa

SEQ ID NO: 1923630 - DNA, 15 bp, Homo sapiens
tacttgtcagggaaa

SEQ ID NO: 1923631 - DNA, 15 bp, Homo sapiens
acttgtcagggaaac

SEQ ID NO: 1923632 - DNA, 15 bp, Homo sapiens
cttgtcagggaaaca

SEQ ID NO: 1923633 - DNA, 15 bp, Homo sapiens
ttgtcagggaaacaa

SEQ ID NO: 1923634 - DNA, 15 bp, Homo sapiens
tgtcagggaaacaag

SEQ ID NO: 1923635 - DNA, 15 bp, Homo sapiens
gtcagggaaacaagg

SEQ ID NO: 1923636 - DNA, 15 bp, Homo sapiens
tcagggaaacaaggc

SEQ ID NO: 1923637 - DNA, 15 bp, Homo sapiens
cagggaaacaaggca

SEQ ID NO: 1923638 - DNA, 15 bp, Homo sapiens
agggaaacaaggcat

SEQ ID NO: 1923639 - DNA, 15 bp, Homo sapiens
gggaaacaaggcata

SEQ ID NO: 1923640 - DNA, 15 bp, Homo sapiens
ggaaacaaggcataa

SEQ ID NO: 1923641 - DNA, 15 bp, Homo sapiens
gaaacaaggcataaa

SEQ ID NO: 1923642 - DNA, 15 bp, Homo sapiens
aaacaaggcataaat

SEQ ID NO: 1923643 - DNA, 15 bp, Homo sapiens
aacaaggcataaata

SEQ ID NO: 1923644 - DNA, 15 bp, Homo sapiens
acaaggcataaatat

SEQ ID NO: 1923645 - DNA, 15 bp, Homo sapiens
caaggcataaatatt

SEQ ID NO: 1923646 - DNA, 15 bp, Homo sapiens
aaggcataaatattt

SEQ ID NO: 1923647 - DNA, 15 bp, Homo sapiens
aggcataaatatttc

SEQ ID NO: 1923648 - DNA, 15 bp, Homo sapiens
ggcataaatatttca

SEQ ID NO: 1923649 - DNA, 15 bp, Homo sapiens
gcataaatatttcag

SEQ ID NO: 1923650 - DNA, 15 bp, Homo sapiens
cataaatatttcagc

SEQ ID NO: 1923651 - DNA, 15 bp, Homo sapiens
ataaatatttcagct

SEQ ID NO: 1923652 - DNA, 15 bp, Homo sapiens
taaatatttcagctt

SEQ ID NO: 1923653 - DNA, 15 bp, Homo sapiens
aaatatttcagcttg

SEQ ID NO: 1923654 - DNA, 15 bp, Homo sapiens
aatatttcagcttgg

SEQ ID NO: 1923655 - DNA, 15 bp, Homo sapiens
atatttcagcttgga

SEQ ID NO: 1923656 - DNA, 15 bp, Homo sapiens
tatttcagcttggac

SEQ ID NO: 1923657 - DNA, 15 bp, Homo sapiens
atttcagcttggacg

SEQ ID NO: 1923658 - DNA, 15 bp, Homo sapiens
tttcagcttggacga

SEQ ID NO: 1923659 - DNA, 15 bp, Homo sapiens
ttcagcttggacgaa

SEQ ID NO: 1923660 - DNA, 15 bp, Homo sapiens
tcagcttggacgaat

SEQ ID NO: 1923661 - DNA, 15 bp, Homo sapiens
cagcttggacgaatc

SEQ ID NO: 1923662 - DNA, 15 bp, Homo sapiens
agcttggacgaatca

SEQ ID NO: 1923663 - DNA, 15 bp, Homo sapiens
gcttggacgaatcag

SEQ ID NO: 1923664 - DNA, 15 bp, Homo sapiens
cttggacgaatcaga

SEQ ID NO: 1923665 - DNA, 15 bp, Homo sapiens
ttggacgaatcagat

SEQ ID NO: 1923666 - DNA, 15 bp, Homo sapiens
tggacgaatcagatg

SEQ ID NO: 1923667 - DNA, 15 bp, Homo sapiens
ggacgaatcagatgg

SEQ ID NO: 1923668 - DNA, 15 bp, Homo sapiens
gacgaatcagatggg

SEQ ID NO: 1923669 - DNA, 15 bp, Homo sapiens
acgaatcagatgggg

SEQ ID NO: 1923670 - DNA, 15 bp, Homo sapiens
cgaatcagatggggt

SEQ ID NO: 1923671 - DNA, 15 bp, Homo sapiens
gaatcagatggggta

SEQ ID NO: 1923672 - DNA, 15 bp, Homo sapiens
aatcagatggggtaa

SEQ ID NO: 1923673 - DNA, 15 bp, Homo sapiens
atcagatggggtaac

SEQ ID NO: 1923674 - DNA, 15 bp, Homo sapiens
tcagatggggtaacc

SEQ ID NO: 1923675 - DNA, 15 bp, Homo sapiens
cagatggggtaaccc

SEQ ID NO: 1923676 - DNA, 15 bp, Homo sapiens
agatggggtaaccca

SEQ ID NO: 1923677 - DNA, 15 bp, Homo sapiens
gatggggtaacccat

SEQ ID NO: 1923678 - DNA, 15 bp, Homo sapiens
atggggtaacccatg

SEQ ID NO: 1923679 - DNA, 15 bp, Homo sapiens
tggggtaacccatga

SEQ ID NO: 1923680 - DNA, 15 bp, Homo sapiens
ggggtaacccatgaa

SEQ ID NO: 1923681 - DNA, 15 bp, Homo sapiens
gggtaacccatgaag

SEQ ID NO: 1923682 - DNA, 15 bp, Homo sapiens
ggtaacccatgaagt

SEQ ID NO: 1923683 - DNA, 15 bp, Homo sapiens
gtaacccatgaagtt

SEQ ID NO: 1923684 - DNA, 15 bp, Homo sapiens
taacccatgaagttg

SEQ ID NO: 1923685 - DNA, 15 bp, Homo sapiens
aacccatgaagttgt

SEQ ID NO: 1923686 - DNA, 15 bp, Homo sapiens
acccatgaagttgtt

SEQ ID NO: 1923687 - DNA, 15 bp, Homo sapiens
cccatgaagttgttg

SEQ ID NO: 1923688 - DNA, 15 bp, Homo sapiens
ccatgaagttgttga

SEQ ID NO: 1923689 - DNA, 15 bp, Homo sapiens
catgaagttgttgat

SEQ ID NO: 1923690 - DNA, 15 bp, Homo sapiens
atgaagttgttgatt

SEQ ID NO: 1923691 - DNA, 15 bp, Homo sapiens
tgaagttgttgattg

SEQ ID NO: 1923692 - DNA, 15 bp, Homo sapiens
gaagttgttgattgt

SEQ ID NO: 1923693 - DNA, 15 bp, Homo sapiens
aagttgttgattgtt

SEQ ID NO: 1923694 - DNA, 15 bp, Homo sapiens
agttgttgattgttt

SEQ ID NO: 1923695 - DNA, 15 bp, Homo sapiens
gttgttgattgtttt

SEQ ID NO: 1923696 - DNA, 15 bp, Homo sapiens
ttgttgattgttttt

SEQ ID NO: 1923697 - DNA, 15 bp, Homo sapiens
tgttgattgtttttg

SEQ ID NO: 1923698 - DNA, 15 bp, Homo sapiens
gttgattgtttttgc

SEQ ID NO: 1923699 - DNA, 15 bp, Homo sapiens
ttgattgtttttgcc

SEQ ID NO: 1923700 - DNA, 15 bp, Homo sapiens
tgattgtttttgccc

SEQ ID NO: 1923701 - DNA, 15 bp, Homo sapiens
gattgtttttgccca

SEQ ID NO: 1923702 - DNA, 15 bp, Homo sapiens
attgtttttgcccac

SEQ ID NO: 1923703 - DNA, 15 bp, Homo sapiens
ttgtttttgcccacc

SEQ ID NO: 1923704 - DNA, 15 bp, Homo sapiens
tgtttttgcccacct

SEQ ID NO: 1923705 - DNA, 15 bp, Homo sapiens
gtttttgcccacctg

SEQ ID NO: 1923706 - DNA, 15 bp, Homo sapiens
tttttgcccacctgg

SEQ ID NO: 1923707 - DNA, 15 bp, Homo sapiens
ttttgcccacctggc

SEQ ID NO: 1923708 - DNA, 15 bp, Homo sapiens
tttgcccacctggct

SEQ ID NO: 1923709 - DNA, 15 bp, Homo sapiens
ttgcccacctggctg

SEQ ID NO: 1923710 - DNA, 15 bp, Homo sapiens
tgcccacctggctgc

SEQ ID NO: 1923711 - DNA, 15 bp, Homo sapiens
gcccacctggctgca

SEQ ID NO: 1923712 - DNA, 15 bp, Homo sapiens
cccacctggctgcaa

SEQ ID NO: 1923713 - DNA, 15 bp, Homo sapiens
cacctggctgcaaag

SEQ ID NO: 1923714 - DNA, 15 bp, Homo sapiens
acctggctgcaaagc

SEQ ID NO: 1923715 - DNA, 15 bp, Homo sapiens
cctggctgcaaagcg

SEQ ID NO: 1923716 - DNA, 15 bp, Homo sapiens
ctggctgcaaagcga

SEQ ID NO: 1923717 - DNA, 15 bp, Homo sapiens
tggctgcaaagcgag

SEQ ID NO: 1923718 - DNA, 15 bp, Homo sapiens
ggctgcaaagcgagg

SEQ ID NO: 1923719 - DNA, 15 bp, Homo sapiens
gctgcaaagcgaggc

SEQ ID NO: 1923720 - DNA, 15 bp, Homo sapiens
ctgcaaagcgaggca

SEQ ID NO: 1923721 - DNA, 15 bp, Homo sapiens
tgcaaagcgaggcaa

SEQ ID NO: 1923722 - DNA, 15 bp, Homo sapiens
gcaaagcgaggcaag

SEQ ID NO: 1923723 - DNA, 15 bp, Homo sapiens
caaagcgaggcaagt

SEQ ID NO: 1923724 - DNA, 15 bp, Homo sapiens
aaagcgaggcaagta

SEQ ID NO: 1923725 - DNA, 15 bp, Homo sapiens
aagcgaggcaagtaa

SEQ ID NO: 1923726 - DNA, 15 bp, Homo sapiens
agcgaggcaagtaat

SEQ ID NO: 1923727 - DNA, 15 bp, Homo sapiens
gcgaggcaagtaatc

SEQ ID NO: 1923728 - DNA, 15 bp, Homo sapiens
cgaggcaagtaatca

SEQ ID NO: 1923729 - DNA, 15 bp, Homo sapiens
gaggcaagtaatcat

SEQ ID NO: 1923730 - DNA, 15 bp, Homo sapiens
aggcaagtaatcatt

SEQ ID NO: 1923731 - DNA, 15 bp, Homo sapiens
ggcaagtaatcattt

SEQ ID NO: 1923732 - DNA, 15 bp, Homo sapiens
gcaagtaatcatttg

SEQ ID NO: 1923733 - DNA, 15 bp, Homo sapiens
caagtaatcatttgc

SEQ ID NO: 1923734 - DNA, 15 bp, Homo sapiens
aagtaatcatttgct

SEQ ID NO: 1923735 - DNA, 15 bp, Homo sapiens
agtaatcatttgctc

SEQ ID NO: 1923736 - DNA, 15 bp, Homo sapiens
gtaatcatttgctct

SEQ ID NO: 1923737 - DNA, 15 bp, Homo sapiens
taatcatttgctctg

SEQ ID NO: 1923738 - DNA, 15 bp, Homo sapiens
aatcatttgctctgg

SEQ ID NO: 1923739 - DNA, 15 bp, Homo sapiens
atcatttgctctgga

SEQ ID NO: 1923740 - DNA, 15 bp, Homo sapiens
tcatttgctctggaa

SEQ ID NO: 1923741 - DNA, 15 bp, Homo sapiens
catttgctctggaag

SEQ ID NO: 1923742 - DNA, 15 bp, Homo sapiens
atttgctctggaagt

SEQ ID NO: 1923743 - DNA, 15 bp, Homo sapiens
tttgctctggaagta

SEQ ID NO: 1923744 - DNA, 15 bp, Homo sapiens
ttgctctggaagtag

SEQ ID NO: 1923745 - DNA, 15 bp, Homo sapiens
tgctctggaagtagt

SEQ ID NO: 1923746 - DNA, 15 bp, Homo sapiens
gctctggaagtagtc

SEQ ID NO: 1923747 - DNA, 15 bp, Homo sapiens
ctctggaagtagtcg

SEQ ID NO: 1923748 - DNA, 15 bp, Homo sapiens
tctggaagtagtcgt

SEQ ID NO: 1923749 - DNA, 15 bp, Homo sapiens
ctggaagtagtcgtg

SEQ ID NO: 1923750 - DNA, 15 bp, Homo sapiens
tggaagtagtcgtgg

SEQ ID NO: 1923751 - DNA, 15 bp, Homo sapiens
ggaagtagtcgtggt

SEQ ID NO: 1923752 - DNA, 15 bp, Homo sapiens
gaagtagtcgtggtg

SEQ ID NO: 1923753 - DNA, 15 bp, Homo sapiens
aagtagtcgtggtgt

SEQ ID NO: 1923754 - DNA, 15 bp, Homo sapiens
agtagtcgtggtgta

SEQ ID NO: 1923755 - DNA, 15 bp, Homo sapiens
gtagtcgtggtgtag

SEQ ID NO: 1923756 - DNA, 15 bp, Homo sapiens
tagtcgtggtgtagc

SEQ ID NO: 1923757 - DNA, 15 bp, Homo sapiens
agtcgtggtgtagca

SEQ ID NO: 1923758 - DNA, 15 bp, Homo sapiens
gtcgtggtgtagcat

SEQ ID NO: 1923759 - DNA, 15 bp, Homo sapiens
tcgtggtgtagcatg

SEQ ID NO: 1923760 - DNA, 15 bp, Homo sapiens
cgtggtgtagcatgt

SEQ ID NO: 1923761 - DNA, 15 bp, Homo sapiens
gtggtgtagcatgtc

SEQ ID NO: 1923762 - DNA, 15 bp, Homo sapiens
tggtgtagcatgtcc

SEQ ID NO: 1923763 - DNA, 15 bp, Homo sapiens
ggtgtagcatgtcct

SEQ ID NO: 1923764 - DNA, 15 bp, Homo sapiens
gtgtagcatgtcctt

SEQ ID NO: 1923765 - DNA, 15 bp, Homo sapiens
tgtagcatgtcctta

SEQ ID NO: 1923766 - DNA, 15 bp, Homo sapiens
gtagcatgtccttac

SEQ ID NO: 1923767 - DNA, 15 bp, Homo sapiens
tagcatgtccttaca

SEQ ID NO: 1923768 - DNA, 15 bp, Homo sapiens
agcatgtccttacag

SEQ ID NO: 1923769 - DNA, 15 bp, Homo sapiens
gcatgtccttacaga

SEQ ID NO: 1923770 - DNA, 15 bp, Homo sapiens
catgtccttacagag

SEQ ID NO: 1923771 - DNA, 15 bp, Homo sapiens
atgtccttacagaga

SEQ ID NO: 1923772 - DNA, 15 bp, Homo sapiens
tgtccttacagagag

SEQ ID NO: 1923773 - DNA, 15 bp, Homo sapiens
gtccttacagagaga

SEQ ID NO: 1923774 - DNA, 15 bp, Homo sapiens
tccttacagagagaa

SEQ ID NO: 1923775 - DNA, 15 bp, Homo sapiens
ccttacagagagaac

SEQ ID NO: 1923776 - DNA, 15 bp, Homo sapiens
cttacagagagaact

SEQ ID NO: 1923777 - DNA, 15 bp, Homo sapiens
ttacagagagaactg

SEQ ID NO: 1923778 - DNA, 15 bp, Homo sapiens
tacagagagaactga

SEQ ID NO: 1923779 - DNA, 15 bp, Homo sapiens
acagagagaactgat

SEQ ID NO: 1923780 - DNA, 15 bp, Homo sapiens
cagagagaactgatt

SEQ ID NO: 1923781 - DNA, 15 bp, Homo sapiens
agagagaactgattc

SEQ ID NO: 1923782 - DNA, 15 bp, Homo sapiens
gagagaactgattcc

SEQ ID NO: 1923783 - DNA, 15 bp, Homo sapiens
agagaactgattcct

SEQ ID NO: 1923784 - DNA, 15 bp, Homo sapiens
gagaactgattcctt

SEQ ID NO: 1923785 - DNA, 15 bp, Homo sapiens
agaactgattccttg

SEQ ID NO: 1923786 - DNA, 15 bp, Homo sapiens
gaactgattccttgc

SEQ ID NO: 1923787 - DNA, 15 bp, Homo sapiens
aactgattccttgct

SEQ ID NO: 1923788 - DNA, 15 bp, Homo sapiens
actgattccttgctg

SEQ ID NO: 1923789 - DNA, 15 bp, Homo sapiens
ctgattccttgctgc

SEQ ID NO: 1923790 - DNA, 15 bp, Homo sapiens
tgattccttgctgcc

SEQ ID NO: 1923791 - DNA, 15 bp, Homo sapiens
gattccttgctgcca

SEQ ID NO: 1923792 - DNA, 15 bp, Homo sapiens
attccttgctgccag

SEQ ID NO: 1923793 - DNA, 15 bp, Homo sapiens
ttccttgctgccaga

SEQ ID NO: 1923794 - DNA, 15 bp, Homo sapiens
tccttgctgccagaa

SEQ ID NO: 1923795 - DNA, 15 bp, Homo sapiens
ccttgctgccagaat

SEQ ID NO: 1923796 - DNA, 15 bp, Homo sapiens
cttgctgccagaatg

SEQ ID NO: 1923797 - DNA, 15 bp, Homo sapiens
tgctgccagaatgtt

SEQ ID NO: 1923798 - DNA, 15 bp, Homo sapiens
gctgccagaatgtta

SEQ ID NO: 1923799 - DNA, 15 bp, Homo sapiens
ctgccagaatgttaa

SEQ ID NO: 1923800 - DNA, 15 bp, Homo sapiens
tgccagaatgttaat

SEQ ID NO: 1923801 - DNA, 15 bp, Homo sapiens
gccagaatgttaatg

SEQ ID NO: 1923802 - DNA, 15 bp, Homo sapiens
cagaatgttaatggg

SEQ ID NO: 1923803 - DNA, 15 bp, Homo sapiens
agaatgttaatggga

SEQ ID NO: 1923804 - DNA, 15 bp, Homo sapiens
gaatgttaatgggaa

SEQ ID NO: 1923805 - DNA, 15 bp, Homo sapiens
aatgttaatgggaat

SEQ ID NO: 1923806 - DNA, 15 bp, Homo sapiens
atgttaatgggaatg

SEQ ID NO: 1923807 - DNA, 15 bp, Homo sapiens
tgttaatgggaatgt

SEQ ID NO: 1923808 - DNA, 15 bp, Homo sapiens
gttaatgggaatgtg

SEQ ID NO: 1923809 - DNA, 15 bp, Homo sapiens
ttaatgggaatgtgg

SEQ ID NO: 1923810 - DNA, 15 bp, Homo sapiens
taatgggaatgtggt

SEQ ID NO: 1923811 - DNA, 15 bp, Homo sapiens
aatgggaatgtggtc

SEQ ID NO: 1923812 - DNA, 15 bp, Homo sapiens
atgggaatgtggtca

SEQ ID NO: 1923813 - DNA, 15 bp, Homo sapiens
tgggaatgtggtcac

SEQ ID NO: 1923814 - DNA, 15 bp, Homo sapiens
gggaatgtggtcact

SEQ ID NO: 1923815 - DNA, 15 bp, Homo sapiens
ggaatgtggtcactt

SEQ ID NO: 1923816 - DNA, 15 bp, Homo sapiens
gaatgtggtcactta

SEQ ID NO: 1923817 - DNA, 15 bp, Homo sapiens
aatgtggtcacttaa

SEQ ID NO: 1923818 - DNA, 15 bp, Homo sapiens
atgtggtcacttaac

SEQ ID NO: 1923819 - DNA, 15 bp, Homo sapiens
tgtggtcacttaact

SEQ ID NO: 1923820 - DNA, 15 bp, Homo sapiens
gtggtcacttaactt

SEQ ID NO: 1923821 - DNA, 15 bp, Homo sapiens
tggtcacttaacttt

SEQ ID NO: 1923822 - DNA, 15 bp, Homo sapiens
ggtcacttaactttg

SEQ ID NO: 1923823 - DNA, 15 bp, Homo sapiens
gtcacttaactttgc

SEQ ID NO: 1923824 - DNA, 15 bp, Homo sapiens
tcacttaactttgcc

SEQ ID NO: 1923825 - DNA, 15 bp, Homo sapiens
cacttaactttgcca

SEQ ID NO: 1923826 - DNA, 15 bp, Homo sapiens
acttaactttgccaa

SEQ ID NO: 1923827 - DNA, 15 bp, Homo sapiens
cttaactttgccaat

SEQ ID NO: 1923828 - DNA, 15 bp, Homo sapiens
ttaactttgccaata

SEQ ID NO: 1923829 - DNA, 15 bp, Homo sapiens
taactttgccaatat

SEQ ID NO: 1923830 - DNA, 15 bp, Homo sapiens
aactttgccaatatt

SEQ ID NO: 1923831 - DNA, 15 bp, Homo sapiens
actttgccaatattg

SEQ ID NO: 1923832 - DNA, 15 bp, Homo sapiens
ctttgccaatattga

SEQ ID NO: 1923833 - DNA, 15 bp, Homo sapiens
tttgccaatattgat

SEQ ID NO: 1923834 - DNA, 15 bp, Homo sapiens
ttgccaatattgata

SEQ ID NO: 1923835 - DNA, 15 bp, Homo sapiens
tgccaatattgatag

SEQ ID NO: 1923836 - DNA, 15 bp, Homo sapiens
gccaatattgatagt

SEQ ID NO: 1923837 - DNA, 15 bp, Homo sapiens
ccaatattgatagtt

SEQ ID NO: 1923838 - DNA, 15 bp, Homo sapiens
caatattgatagttt

SEQ ID NO: 1923839 - DNA, 15 bp, Homo sapiens
aatattgatagtttg

SEQ ID NO: 1923840 - DNA, 15 bp, Homo sapiens
atattgatagtttgc

SEQ ID NO: 1923841 - DNA, 15 bp, Homo sapiens
tattgatagtttgct

SEQ ID NO: 1923842 - DNA, 15 bp, Homo sapiens
attgatagtttgctt

SEQ ID NO: 1923843 - DNA, 15 bp, Homo sapiens
ttgatagtttgcttc

SEQ ID NO: 1923844 - DNA, 15 bp, Homo sapiens
tgatagtttgcttca

SEQ ID NO: 1923845 - DNA, 15 bp, Homo sapiens
gatagtttgcttcaa

SEQ ID NO: 1923846 - DNA, 15 bp, Homo sapiens
atagtttgcttcaat

SEQ ID NO: 1923847 - DNA, 15 bp, Homo sapiens
tagtttgcttcaatt

SEQ ID NO: 1923848 - DNA, 15 bp, Homo sapiens
agtttgcttcaattt

SEQ ID NO: 1923849 - DNA, 15 bp, Homo sapiens
gtttgcttcaattta

SEQ ID NO: 1923850 - DNA, 15 bp, Homo sapiens
tttgcttcaatttat

SEQ ID NO: 1923851 - DNA, 15 bp, Homo sapiens
ttgcttcaatttatg

SEQ ID NO: 1923852 - DNA, 15 bp, Homo sapiens
tgcttcaatttatga

SEQ ID NO: 1923853 - DNA, 15 bp, Homo sapiens
gcttcaatttatgat

SEQ ID NO: 1923854 - DNA, 15 bp, Homo sapiens
cttcaatttatgatt

SEQ ID NO: 1923855 - DNA, 15 bp, Homo sapiens
ttcaatttatgattg

SEQ ID NO: 1923856 - DNA, 15 bp, Homo sapiens
tcaatttatgattga

SEQ ID NO: 1923857 - DNA, 15 bp, Homo sapiens
caatttatgattgat

SEQ ID NO: 1923858 - DNA, 15 bp, Homo sapiens
aatttatgattgatt

SEQ ID NO: 1923859 - DNA, 15 bp, Homo sapiens
atttatgattgattg

SEQ ID NO: 1923860 - DNA, 15 bp, Homo sapiens
tttatgattgattga

SEQ ID NO: 1923861 - DNA, 15 bp, Homo sapiens
ttatgattgattgat

SEQ ID NO: 1923862 - DNA, 15 bp, Homo sapiens
tatgattgattgata

SEQ ID NO: 1923863 - DNA, 15 bp, Homo sapiens
atgattgattgataa

SEQ ID NO: 1923864 - DNA, 15 bp, Homo sapiens
tgattgattgataat

SEQ ID NO: 1923865 - DNA, 15 bp, Homo sapiens
gattgattgataatt

SEQ ID NO: 1923866 - DNA, 15 bp, Homo sapiens
attgattgataatta

SEQ ID NO: 1923867 - DNA, 15 bp, Homo sapiens
ttgattgataattat

SEQ ID NO: 1923868 - DNA, 15 bp, Homo sapiens
tgattgataattata

SEQ ID NO: 1923869 - DNA, 15 bp, Homo sapiens
gattgataattataa

SEQ ID NO: 1923870 - DNA, 15 bp, Homo sapiens
attgataattataat

SEQ ID NO: 1923871 - DNA, 15 bp, Homo sapiens
ttgataattataatt

SEQ ID NO: 1923872 - DNA, 15 bp, Homo sapiens
tgataattataattc

SEQ ID NO: 1923873 - DNA, 15 bp, Homo sapiens
gataattataattca

SEQ ID NO: 1923874 - DNA, 15 bp, Homo sapiens
ataattataattcat

SEQ ID NO: 1923875 - DNA, 15 bp, Homo sapiens
taattataattcatt

SEQ ID NO: 1923876 - DNA, 15 bp, Homo sapiens
aattataattcatta

SEQ ID NO: 1923877 - DNA, 15 bp, Homo sapiens
attataattcattat

SEQ ID NO: 1923878 - DNA, 15 bp, Homo sapiens
ttataattcattatg

SEQ ID NO: 1923879 - DNA, 15 bp, Homo sapiens
tataattcattatga

SEQ ID NO: 1923880 - DNA, 15 bp, Homo sapiens
ataattcattatgat

SEQ ID NO: 1923881 - DNA, 15 bp, Homo sapiens
taattcattatgatt

SEQ ID NO: 1923882 - DNA, 15 bp, Homo sapiens
aattcattatgatta

SEQ ID NO: 1923883 - DNA, 15 bp, Homo sapiens
attcattatgattaa

SEQ ID NO: 1923884 - DNA, 15 bp, Homo sapiens
ttcattatgattaac

SEQ ID NO: 1923885 - DNA, 15 bp, Homo sapiens
tcattatgattaaca

SEQ ID NO: 1923886 - DNA, 15 bp, Homo sapiens
cattatgattaacag

SEQ ID NO: 1923887 - DNA, 15 bp, Homo sapiens
attatgattaacagt

SEQ ID NO: 1923888 - DNA, 15 bp, Homo sapiens
ttatgattaacagtt

SEQ ID NO: 1923889 - DNA, 15 bp, Homo sapiens
tatgattaacagttc

SEQ ID NO: 1923890 - DNA, 15 bp, Homo sapiens
atgattaacagttca

SEQ ID NO: 1923891 - DNA, 15 bp, Homo sapiens
tgattaacagttcat

SEQ ID NO: 1923892 - DNA, 15 bp, Homo sapiens
gattaacagttcata

SEQ ID NO: 1923893 - DNA, 15 bp, Homo sapiens
attaacagttcatat

SEQ ID NO: 1923894 - DNA, 15 bp, Homo sapiens
ttaacagttcatatt

SEQ ID NO: 1923895 - DNA, 15 bp, Homo sapiens
taacagttcatattc

SEQ ID NO: 1923896 - DNA, 15 bp, Homo sapiens
aacagttcatattca

SEQ ID NO: 1923897 - DNA, 15 bp, Homo sapiens
acagttcatattcag

SEQ ID NO: 1923898 - DNA, 15 bp, Homo sapiens
cagttcatattcagt

SEQ ID NO: 1923899 - DNA, 15 bp, Homo sapiens
agttcatattcagtt

SEQ ID NO: 1923900 - DNA, 15 bp, Homo sapiens
gttcatattcagtta

SEQ ID NO: 1923901 - DNA, 15 bp, Homo sapiens
ttcatattcagttag

SEQ ID NO: 1923902 - DNA, 15 bp, Homo sapiens
tcatattcagttaga

SEQ ID NO: 1923903 - DNA, 15 bp, Homo sapiens
catattcagttagaa

SEQ ID NO: 1923904 - DNA, 15 bp, Homo sapiens
atattcagttagaag

SEQ ID NO: 1923905 - DNA, 15 bp, Homo sapiens
tattcagttagaagg

SEQ ID NO: 1923906 - DNA, 15 bp, Homo sapiens
attcagttagaaggt

SEQ ID NO: 1923907 - DNA, 15 bp, Homo sapiens
ttcagttagaaggta

SEQ ID NO: 1923908 - DNA, 15 bp, Homo sapiens
tcagttagaaggtag

SEQ ID NO: 1923909 - DNA, 15 bp, Homo sapiens
cagttagaaggtagg

SEQ ID NO: 1923910 - DNA, 15 bp, Homo sapiens
agttagaaggtaggc

SEQ ID NO: 1923911 - DNA, 15 bp, Homo sapiens
gttagaaggtaggct

SEQ ID NO: 1923912 - DNA, 15 bp, Homo sapiens
ttagaaggtaggctt

SEQ ID NO: 1923913 - DNA, 15 bp, Homo sapiens
tagaaggtaggcttt

SEQ ID NO: 1923914 - DNA, 15 bp, Homo sapiens
agaaggtaggcttta

SEQ ID NO: 1923915 - DNA, 15 bp, Homo sapiens
gaaggtaggctttaa

SEQ ID NO: 1923916 - DNA, 15 bp, Homo sapiens
aaggtaggctttaat

SEQ ID NO: 1923917 - DNA, 15 bp, Homo sapiens
aggtaggctttaatt

SEQ ID NO: 1923918 - DNA, 15 bp, Homo sapiens
ggtaggctttaattc

SEQ ID NO: 1923919 - DNA, 15 bp, Homo sapiens
gtaggctttaattca

SEQ ID NO: 1923920 - DNA, 15 bp, Homo sapiens
taggctttaattcat

SEQ ID NO: 1923921 - DNA, 15 bp, Homo sapiens
aggctttaattcatg

SEQ ID NO: 1923922 - DNA, 15 bp, Homo sapiens
ggctttaattcatga

SEQ ID NO: 1923923 - DNA, 15 bp, Homo sapiens
gctttaattcatgat

SEQ ID NO: 1923924 - DNA, 15 bp, Homo sapiens
ctttaattcatgatt

SEQ ID NO: 1923925 - DNA, 15 bp, Homo sapiens
tttaattcatgatta

SEQ ID NO: 1923926 - DNA, 15 bp, Homo sapiens
ttaattcatgattaa

SEQ ID NO: 1923927 - DNA, 15 bp, Homo sapiens
taattcatgattaat

SEQ ID NO: 1923928 - DNA, 15 bp, Homo sapiens
aattcatgattaata

SEQ ID NO: 1923929 - DNA, 15 bp, Homo sapiens
attcatgattaatag

SEQ ID NO: 1923930 - DNA, 15 bp, Homo sapiens
ttcatgattaatagc

SEQ ID NO: 1923931 - DNA, 15 bp, Homo sapiens
tcatgattaatagct

SEQ ID NO: 1923932 - DNA, 15 bp, Homo sapiens
catgattaatagctg

SEQ ID NO: 1923933 - DNA, 15 bp, Homo sapiens
atgattaatagctgg

SEQ ID NO: 1923934 - DNA, 15 bp, Homo sapiens
tgattaatagctggc

SEQ ID NO: 1923935 - DNA, 15 bp, Homo sapiens
gattaatagctggca

SEQ ID NO: 1923936 - DNA, 15 bp, Homo sapiens
attaatagctggcac

SEQ ID NO: 1923937 - DNA, 15 bp, Homo sapiens
ttaatagctggcaca

SEQ ID NO: 1923938 - DNA, 15 bp, Homo sapiens
taatagctggcacat

SEQ ID NO: 1923939 - DNA, 15 bp, Homo sapiens
aatagctggcacata

SEQ ID NO: 1923940 - DNA, 15 bp, Homo sapiens
atagctggcacatag

SEQ ID NO: 1923941 - DNA, 15 bp, Homo sapiens
tagctggcacataga

SEQ ID NO: 1923942 - DNA, 15 bp, Homo sapiens
agctggcacatagag

SEQ ID NO: 1923943 - DNA, 15 bp, Homo sapiens
gctggcacatagagc

SEQ ID NO: 1923944 - DNA, 15 bp, Homo sapiens
ctggcacatagagca

SEQ ID NO: 1923945 - DNA, 15 bp, Homo sapiens
tggcacatagagcaa

SEQ ID NO: 1923946 - DNA, 15 bp, Homo sapiens
ggcacatagagcaaa

SEQ ID NO: 1923947 - DNA, 15 bp, Homo sapiens
gcacatagagcaaat

SEQ ID NO: 1923948 - DNA, 15 bp, Homo sapiens
cacatagagcaaatt

SEQ ID NO: 1923949 - DNA, 15 bp, Homo sapiens
acatagagcaaattt

SEQ ID NO: 1923950 - DNA, 15 bp, Homo sapiens
catagagcaaatttg

SEQ ID NO: 1923951 - DNA, 15 bp, Homo sapiens
atagagcaaatttga

SEQ ID NO: 1923952 - DNA, 15 bp, Homo sapiens
tagagcaaatttgat

SEQ ID NO: 1923953 - DNA, 15 bp, Homo sapiens
agagcaaatttgatt

SEQ ID NO: 1923954 - DNA, 15 bp, Homo sapiens
gagcaaatttgattt

SEQ ID NO: 1923955 - DNA, 15 bp, Homo sapiens
agcaaatttgatttt

SEQ ID NO: 1923956 - DNA, 15 bp, Homo sapiens
gcaaatttgattttc

SEQ ID NO: 1923957 - DNA, 15 bp, Homo sapiens
caaatttgattttct

SEQ ID NO: 1923958 - DNA, 15 bp, Homo sapiens
aaatttgattttcta

SEQ ID NO: 1923959 - DNA, 15 bp, Homo sapiens
aatttgattttctag

SEQ ID NO: 1923960 - DNA, 15 bp, Homo sapiens
atttgattttctagc

SEQ ID NO: 1923961 - DNA, 15 bp, Homo sapiens
tttgattttctagcc

SEQ ID NO: 1923962 - DNA, 15 bp, Homo sapiens
ttgattttctagcct

SEQ ID NO: 1923963 - DNA, 15 bp, Homo sapiens
tgattttctagccta

SEQ ID NO: 1923964 - DNA, 15 bp, Homo sapiens
gattttctagcctat

SEQ ID NO: 1923965 - DNA, 15 bp, Homo sapiens
attttctagcctatt

SEQ ID NO: 1923966 - DNA, 15 bp, Homo sapiens
ttttctagcctattt

SEQ ID NO: 1923967 - DNA, 15 bp, Homo sapiens
tttctagcctatttg

SEQ ID NO: 1923968 - DNA, 15 bp, Homo sapiens
ttctagcctatttgc

SEQ ID NO: 1923969 - DNA, 15 bp, Homo sapiens
tctagcctatttgcc

SEQ ID NO: 1923970 - DNA, 15 bp, Homo sapiens
ctagcctatttgccc

SEQ ID NO: 1923971 - DNA, 15 bp, Homo sapiens
tagcctatttgccct

SEQ ID NO: 1923972 - DNA, 15 bp, Homo sapiens
agcctatttgccctt

SEQ ID NO: 1923973 - DNA, 15 bp, Homo sapiens
gcctatttgcccttt

SEQ ID NO: 1923974 - DNA, 15 bp, Homo sapiens
cctatttgccctttc

SEQ ID NO: 1923975 - DNA, 15 bp, Homo sapiens
ctatttgccctttcc

SEQ ID NO: 1923976 - DNA, 15 bp, Homo sapiens
tatttgccctttcct

SEQ ID NO: 1923977 - DNA, 15 bp, Homo sapiens
atttgccctttccta

SEQ ID NO: 1923978 - DNA, 15 bp, Homo sapiens
tttgccctttcctag

SEQ ID NO: 1923979 - DNA, 15 bp, Homo sapiens
ttgccctttcctaga

SEQ ID NO: 1923980 - DNA, 15 bp, Homo sapiens
tgccctttcctagat

SEQ ID NO: 1923981 - DNA, 15 bp, Homo sapiens
gccctttcctagatc

SEQ ID NO: 1923982 - DNA, 15 bp, Homo sapiens
ccctttcctagatca

SEQ ID NO: 1923983 - DNA, 15 bp, Homo sapiens
cctttcctagatcat

SEQ ID NO: 1923984 - DNA, 15 bp, Homo sapiens
ctttcctagatcatt

SEQ ID NO: 1923985 - DNA, 15 bp, Homo sapiens
tttcctagatcattt

SEQ ID NO: 1923986 - DNA, 15 bp, Homo sapiens
ttcctagatcattta

SEQ ID NO: 1923987 - DNA, 15 bp, Homo sapiens
tcctagatcatttaa

SEQ ID NO: 1923988 - DNA, 15 bp, Homo sapiens
cctagatcatttaaa

SEQ ID NO: 1923989 - DNA, 15 bp, Homo sapiens
ctagatcatttaaag

SEQ ID NO: 1923990 - DNA, 15 bp, Homo sapiens
tagatcatttaaagt

SEQ ID NO: 1923991 - DNA, 15 bp, Homo sapiens
agatcatttaaagtg

SEQ ID NO: 1923992 - DNA, 15 bp, Homo sapiens
gatcatttaaagtgg

SEQ ID NO: 1923993 - DNA, 15 bp, Homo sapiens
atcatttaaagtggg

SEQ ID NO: 1923994 - DNA, 15 bp, Homo sapiens
tcatttaaagtgggt

SEQ ID NO: 1923995 - DNA, 15 bp, Homo sapiens
catttaaagtgggta

SEQ ID NO: 1923996 - DNA, 15 bp, Homo sapiens
atttaaagtgggtaa

SEQ ID NO: 1923997 - DNA, 15 bp, Homo sapiens
tttaaagtgggtaag

SEQ ID NO: 1923998 - DNA, 15 bp, Homo sapiens
ttaaagtgggtaagt

SEQ ID NO: 1923999 - DNA, 15 bp, Homo sapiens
taaagtgggtaagtt

SEQ ID NO: 1924000 - DNA, 15 bp, Homo sapiens
aaagtgggtaagttg

SEQ ID NO: 1924001 - DNA, 15 bp, Homo sapiens
aagtgggtaagttga

SEQ ID NO: 1924002 - DNA, 15 bp, Homo sapiens
agtgggtaagttgat

SEQ ID NO: 1924003 - DNA, 15 bp, Homo sapiens
gtgggtaagttgatg

SEQ ID NO: 1924004 - DNA, 15 bp, Homo sapiens
tgggtaagttgatgg

SEQ ID NO: 1924005 - DNA, 15 bp, Homo sapiens
gggtaagttgatggg

SEQ ID NO: 1924006 - DNA, 15 bp, Homo sapiens
ggtaagttgatgggt

SEQ ID NO: 1924007 - DNA, 15 bp, Homo sapiens
gtaagttgatgggta

SEQ ID NO: 1924008 - DNA, 15 bp, Homo sapiens
taagttgatgggtac

SEQ ID NO: 1924009 - DNA, 15 bp, Homo sapiens
aagttgatgggtact

SEQ ID NO: 1924010 - DNA, 15 bp, Homo sapiens
agttgatgggtactt

SEQ ID NO: 1924011 - DNA, 15 bp, Homo sapiens
gttgatgggtacttc

SEQ ID NO: 1924012 - DNA, 15 bp, Homo sapiens
ttgatgggtacttca

SEQ ID NO: 1924013 - DNA, 15 bp, Homo sapiens
tgatgggtacttcac

SEQ ID NO: 1924014 - DNA, 15 bp, Homo sapiens
gatgggtacttcact

SEQ ID NO: 1924015 - DNA, 15 bp, Homo sapiens
atgggtacttcactc

SEQ ID NO: 1924016 - DNA, 15 bp, Homo sapiens
tgggtacttcactca

SEQ ID NO: 1924017 - DNA, 15 bp, Homo sapiens
gggtacttcactcat

SEQ ID NO: 1924018 - DNA, 15 bp, Homo sapiens
ggtacttcactcatg

SEQ ID NO: 1924019 - DNA, 15 bp, Homo sapiens
gtacttcactcatga

SEQ ID NO: 1924020 - DNA, 15 bp, Homo sapiens
tacttcactcatgac

SEQ ID NO: 1924021 - DNA, 15 bp, Homo sapiens
acttcactcatgacc

SEQ ID NO: 1924022 - DNA, 15 bp, Homo sapiens
cttcactcatgacca

SEQ ID NO: 1924023 - DNA, 15 bp, Homo sapiens
ttcactcatgaccat

SEQ ID NO: 1924024 - DNA, 15 bp, Homo sapiens
tcactcatgaccatc

SEQ ID NO: 1924025 - DNA, 15 bp, Homo sapiens
cactcatgaccatct

SEQ ID NO: 1924026 - DNA, 15 bp, Homo sapiens
actcatgaccatctt

SEQ ID NO: 1924027 - DNA, 15 bp, Homo sapiens
ctcatgaccatcttt

SEQ ID NO: 1924028 - DNA, 15 bp, Homo sapiens
tcatgaccatcttta

SEQ ID NO: 1924029 - DNA, 15 bp, Homo sapiens
catgaccatctttat

SEQ ID NO: 1924030 - DNA, 15 bp, Homo sapiens
atgaccatctttatg

SEQ ID NO: 1924031 - DNA, 15 bp, Homo sapiens
tgaccatctttatga

SEQ ID NO: 1924032 - DNA, 15 bp, Homo sapiens
gaccatctttatgag

SEQ ID NO: 1924033 - DNA, 15 bp, Homo sapiens
accatctttatgagt

SEQ ID NO: 1924034 - DNA, 15 bp, Homo sapiens
ccatctttatgagta

SEQ ID NO: 1924035 - DNA, 15 bp, Homo sapiens
catctttatgagtat

SEQ ID NO: 1924036 - DNA, 15 bp, Homo sapiens
atctttatgagtatg

SEQ ID NO: 1924037 - DNA, 15 bp, Homo sapiens
tctttatgagtatgc

SEQ ID NO: 1924038 - DNA, 15 bp, Homo sapiens
ctttatgagtatgcg

SEQ ID NO: 1924039 - DNA, 15 bp, Homo sapiens
tttatgagtatgcga

SEQ ID NO: 1924040 - DNA, 15 bp, Homo sapiens
ttatgagtatgcgaa

SEQ ID NO: 1924041 - DNA, 15 bp, Homo sapiens
tatgagtatgcgaat

SEQ ID NO: 1924042 - DNA, 15 bp, Homo sapiens
atgagtatgcgaatg

SEQ ID NO: 1924043 - DNA, 15 bp, Homo sapiens
tgagtatgcgaatgg

SEQ ID NO: 1924044 - DNA, 15 bp, Homo sapiens
gagtatgcgaatggg

SEQ ID NO: 1924045 - DNA, 15 bp, Homo sapiens
agtatgcgaatgggt

SEQ ID NO: 1924046 - DNA, 15 bp, Homo sapiens
gtatgcgaatgggtc

SEQ ID NO: 1924047 - DNA, 15 bp, Homo sapiens
tatgcgaatgggtca

SEQ ID NO: 1924048 - DNA, 15 bp, Homo sapiens
atgcgaatgggtcag

SEQ ID NO: 1924049 - DNA, 15 bp, Homo sapiens
tgcgaatgggtcagt

SEQ ID NO: 1924050 - DNA, 15 bp, Homo sapiens
gcgaatgggtcagtt

SEQ ID NO: 1924051 - DNA, 15 bp, Homo sapiens
cgaatgggtcagttt

SEQ ID NO: 1924052 - DNA, 15 bp, Homo sapiens
gaatgggtcagtttt

SEQ ID NO: 1924053 - DNA, 15 bp, Homo sapiens
aatgggtcagttttt

SEQ ID NO: 1924054 - DNA, 15 bp, Homo sapiens
atgggtcagtttttc

SEQ ID NO: 1924055 - DNA, 15 bp, Homo sapiens
tgggtcagtttttct

SEQ ID NO: 1924056 - DNA, 15 bp, Homo sapiens
gggtcagtttttctg

SEQ ID NO: 1924057 - DNA, 15 bp, Homo sapiens
ggtcagtttttctgc

SEQ ID NO: 1924058 - DNA, 15 bp, Homo sapiens
gtcagtttttctgca

SEQ ID NO: 1924059 - DNA, 15 bp, Homo sapiens
tcagtttttctgcaa

SEQ ID NO: 1924060 - DNA, 15 bp, Homo sapiens
cagtttttctgcaaa

SEQ ID NO: 1924061 - DNA, 15 bp, Homo sapiens
agtttttctgcaaaa

SEQ ID NO: 1924062 - DNA, 15 bp, Homo sapiens
gtttttctgcaaaag

SEQ ID NO: 1924063 - DNA, 15 bp, Homo sapiens
tttttctgcaaaaga

SEQ ID NO: 1924064 - DNA, 15 bp, Homo sapiens
ttttctgcaaaagaa

SEQ ID NO: 1924065 - DNA, 15 bp, Homo sapiens
tttctgcaaaagaag

SEQ ID NO: 1924066 - DNA, 15 bp, Homo sapiens
ttctgcaaaagaagg

SEQ ID NO: 1924067 - DNA, 15 bp, Homo sapiens
tctgcaaaagaaggc

SEQ ID NO: 1924068 - DNA, 15 bp, Homo sapiens
ctgcaaaagaaggca

SEQ ID NO: 1924069 - DNA, 15 bp, Homo sapiens
tgcaaaagaaggcag

SEQ ID NO: 1924070 - DNA, 15 bp, Homo sapiens
gcaaaagaaggcaga

SEQ ID NO: 1924071 - DNA, 15 bp, Homo sapiens
caaaagaaggcagaa

SEQ ID NO: 1924072 - DNA, 15 bp, Homo sapiens
aaaagaaggcagaaa

SEQ ID NO: 1924073 - DNA, 15 bp, Homo sapiens
aaagaaggcagaaaa

SEQ ID NO: 1924074 - DNA, 15 bp, Homo sapiens
aagaaggcagaaaat

SEQ ID NO: 1924075 - DNA, 15 bp, Homo sapiens
agaaggcagaaaata

SEQ ID NO: 1924076 - DNA, 15 bp, Homo sapiens
gaaggcagaaaataa

SEQ ID NO: 1924077 - DNA, 15 bp, Homo sapiens
aaggcagaaaataag

SEQ ID NO: 1924078 - DNA, 15 bp, Homo sapiens
aggcagaaaataaga

SEQ ID NO: 1924079 - DNA, 15 bp, Homo sapiens
ggcagaaaataagaa

SEQ ID NO: 1924080 - DNA, 15 bp, Homo sapiens
gcagaaaataagaat

SEQ ID NO: 1924081 - DNA, 15 bp, Homo sapiens
cagaaaataagaata

SEQ ID NO: 1924082 - DNA, 15 bp, Homo sapiens
agaaaataagaataa

SEQ ID NO: 1924083 - DNA, 15 bp, Homo sapiens
gaaaataagaataat

SEQ ID NO: 1924084 - DNA, 15 bp, Homo sapiens
aaaataagaataatt

SEQ ID NO: 1924085 - DNA, 15 bp, Homo sapiens
aaataagaataatta

SEQ ID NO: 1924086 - DNA, 15 bp, Homo sapiens
aataagaataattac

SEQ ID NO: 1924087 - DNA, 15 bp, Homo sapiens
ataagaataattact

SEQ ID NO: 1924088 - DNA, 15 bp, Homo sapiens
taagaataattactt

SEQ ID NO: 1924089 - DNA, 15 bp, Homo sapiens
aagaataattacttt

SEQ ID NO: 1924090 - DNA, 15 bp, Homo sapiens
agaataattactttc

SEQ ID NO: 1924091 - DNA, 15 bp, Homo sapiens
gaataattactttcg

SEQ ID NO: 1924092 - DNA, 15 bp, Homo sapiens
aataattactttcgt

SEQ ID NO: 1924093 - DNA, 15 bp, Homo sapiens
ataattactttcgta

SEQ ID NO: 1924094 - DNA, 15 bp, Homo sapiens
taattactttcgtat

SEQ ID NO: 1924095 - DNA, 15 bp, Homo sapiens
aattactttcgtatt

SEQ ID NO: 1924096 - DNA, 15 bp, Homo sapiens
attactttcgtattt

SEQ ID NO: 1924097 - DNA, 15 bp, Homo sapiens
ttactttcgtatttt

SEQ ID NO: 1924098 - DNA, 15 bp, Homo sapiens
tactttcgtattttg

SEQ ID NO: 1924099 - DNA, 15 bp, Homo sapiens
actttcgtattttgg

SEQ ID NO: 1924100 - DNA, 15 bp, Homo sapiens
ctttcgtattttggt

SEQ ID NO: 1924101 - DNA, 15 bp, Homo sapiens
tttcgtattttggtg

SEQ ID NO: 1924102 - DNA, 15 bp, Homo sapiens
ttcgtattttggtga

SEQ ID NO: 1924103 - DNA, 15 bp, Homo sapiens
tcgtattttggtgaa

SEQ ID NO: 1924104 - DNA, 15 bp, Homo sapiens
cgtattttggtgaaa

SEQ ID NO: 1924105 - DNA, 15 bp, Homo sapiens
gtattttggtgaaac

SEQ ID NO: 1924106 - DNA, 15 bp, Homo sapiens
tattttggtgaaact

SEQ ID NO: 1924107 - DNA, 15 bp, Homo sapiens
attttggtgaaactt

SEQ ID NO: 1924108 - DNA, 15 bp, Homo sapiens
ttttggtgaaacttc

SEQ ID NO: 1924109 - DNA, 15 bp, Homo sapiens
tttggtgaaacttct

SEQ ID NO: 1924110 - DNA, 15 bp, Homo sapiens
ttggtgaaacttctt

SEQ ID NO: 1924111 - DNA, 15 bp, Homo sapiens
tggtgaaacttcttt

SEQ ID NO: 1924112 - DNA, 15 bp, Homo sapiens
ggtgaaacttctttc

SEQ ID NO: 1924113 - DNA, 15 bp, Homo sapiens
gtgaaacttctttct

SEQ ID NO: 1924114 - DNA, 15 bp, Homo sapiens
tgaaacttctttctt

SEQ ID NO: 1924115 - DNA, 15 bp, Homo sapiens
gaaacttctttcttt

SEQ ID NO: 1924116 - DNA, 15 bp, Homo sapiens
aaacttctttctttt

SEQ ID NO: 1924117 - DNA, 15 bp, Homo sapiens
aacttctttctttta

SEQ ID NO: 1924118 - DNA, 15 bp, Homo sapiens
acttctttcttttac

SEQ ID NO: 1924119 - DNA, 15 bp, Homo sapiens
cttctttcttttacc

SEQ ID NO: 1924120 - DNA, 15 bp, Homo sapiens
ttctttcttttacct

SEQ ID NO: 1924121 - DNA, 15 bp, Homo sapiens
tctttcttttaccta

SEQ ID NO: 1924122 - DNA, 15 bp, Homo sapiens
ctttcttttacctag

SEQ ID NO: 1924123 - DNA, 15 bp, Homo sapiens
tttcttttacctaga

SEQ ID NO: 1924124 - DNA, 15 bp, Homo sapiens
ttcttttacctagat

SEQ ID NO: 1924125 - DNA, 15 bp, Homo sapiens
tcttttacctagatg

SEQ ID NO: 1924126 - DNA, 15 bp, Homo sapiens
cttttacctagatgg

SEQ ID NO: 1924127 - DNA, 15 bp, Homo sapiens
ttttacctagatggc

SEQ ID NO: 1924128 - DNA, 15 bp, Homo sapiens
tttacctagatggca

SEQ ID NO: 1924129 - DNA, 15 bp, Homo sapiens
ttacctagatggcag

SEQ ID NO: 1924130 - DNA, 15 bp, Homo sapiens
tacctagatggcaga

SEQ ID NO: 1924131 - DNA, 15 bp, Homo sapiens
acctagatggcagaa

SEQ ID NO: 1924132 - DNA, 15 bp, Homo sapiens
cctagatggcagaaa

SEQ ID NO: 1924133 - DNA, 15 bp, Homo sapiens
ctagatggcagaaat

SEQ ID NO: 1924134 - DNA, 15 bp, Homo sapiens
tagatggcagaaatt

SEQ ID NO: 1924135 - DNA, 15 bp, Homo sapiens
agatggcagaaattc

SEQ ID NO: 1924136 - DNA, 15 bp, Homo sapiens
gatggcagaaattca

SEQ ID NO: 1924137 - DNA, 15 bp, Homo sapiens
atggcagaaattcac

SEQ ID NO: 1924138 - DNA, 15 bp, Homo sapiens
tggcagaaattcact

SEQ ID NO: 1924139 - DNA, 15 bp, Homo sapiens
ggcagaaattcactc

SEQ ID NO: 1924140 - DNA, 15 bp, Homo sapiens
gcagaaattcactct

SEQ ID NO: 1924141 - DNA, 15 bp, Homo sapiens
cagaaattcactctt

SEQ ID NO: 1924142 - DNA, 15 bp, Homo sapiens
agaaattcactcttt

SEQ ID NO: 1924143 - DNA, 15 bp, Homo sapiens
gaaattcactctttc

SEQ ID NO: 1924144 - DNA, 15 bp, Homo sapiens
aaattcactctttca

SEQ ID NO: 1924145 - DNA, 15 bp, Homo sapiens
aattcactctttcag

SEQ ID NO: 1924146 - DNA, 15 bp, Homo sapiens
attcactctttcaga

SEQ ID NO: 1924147 - DNA, 15 bp, Homo sapiens
ttcactctttcagag

SEQ ID NO: 1924148 - DNA, 15 bp, Homo sapiens
tcactctttcagaga

SEQ ID NO: 1924149 - DNA, 15 bp, Homo sapiens
cactctttcagagac

SEQ ID NO: 1924150 - DNA, 15 bp, Homo sapiens
actctttcagagaca

SEQ ID NO: 1924151 - DNA, 15 bp, Homo sapiens
ctctttcagagacaa

SEQ ID NO: 1924152 - DNA, 15 bp, Homo sapiens
tctttcagagacaaa

SEQ ID NO: 1924153 - DNA, 15 bp, Homo sapiens
ctttcagagacaaat

SEQ ID NO: 1924154 - DNA, 15 bp, Homo sapiens
tttcagagacaaatg

SEQ ID NO: 1924155 - DNA, 15 bp, Homo sapiens
ttcagagacaaatga

SEQ ID NO: 1924156 - DNA, 15 bp, Homo sapiens
tcagagacaaatgaa

SEQ ID NO: 1924157 - DNA, 15 bp, Homo sapiens
cagagacaaatgaaa

SEQ ID NO: 1924158 - DNA, 15 bp, Homo sapiens
agagacaaatgaaag

SEQ ID NO: 1924159 - DNA, 15 bp, Homo sapiens
gacaaatgaaagaaa

SEQ ID NO: 1924160 - DNA, 15 bp, Homo sapiens
acaaatgaaagaaac

SEQ ID NO: 1924161 - DNA, 15 bp, Homo sapiens
caaatgaaagaaacc

SEQ ID NO: 1924162 - DNA, 15 bp, Homo sapiens
aaatgaaagaaaccc

SEQ ID NO: 1924163 - DNA, 15 bp, Homo sapiens
aatgaaagaaaccca

SEQ ID NO: 1924164 - DNA, 15 bp, Homo sapiens
atgaaagaaacccaa

SEQ ID NO: 1924165 - DNA, 15 bp, Homo sapiens
tgaaagaaacccaag

SEQ ID NO: 1924166 - DNA, 15 bp, Homo sapiens
gaaagaaacccaagt

SEQ ID NO: 1924167 - DNA, 15 bp, Homo sapiens
aaagaaacccaagtc

SEQ ID NO: 1924168 - DNA, 15 bp, Homo sapiens
aagaaacccaagtca

SEQ ID NO: 1924169 - DNA, 15 bp, Homo sapiens
agaaacccaagtcag

SEQ ID NO: 1924170 - DNA, 15 bp, Homo sapiens
gaaacccaagtcagt

SEQ ID NO: 1924171 - DNA, 15 bp, Homo sapiens
aaacccaagtcagtc

SEQ ID NO: 1924172 - DNA, 15 bp, Homo sapiens
aacccaagtcagtct

SEQ ID NO: 1924173 - DNA, 15 bp, Homo sapiens
acccaagtcagtctg

SEQ ID NO: 1924174 - DNA, 15 bp, Homo sapiens
cccaagtcagtctgg

SEQ ID NO: 1924175 - DNA, 15 bp, Homo sapiens
ccaagtcagtctggc

SEQ ID NO: 1924176 - DNA, 15 bp, Homo sapiens
caagtcagtctggct

SEQ ID NO: 1924177 - DNA, 15 bp, Homo sapiens
aagtcagtctggctt

SEQ ID NO: 1924178 - DNA, 15 bp, Homo sapiens
agtcagtctggcttc

SEQ ID NO: 1924179 - DNA, 15 bp, Homo sapiens
gtcagtctggcttca

SEQ ID NO: 1924180 - DNA, 15 bp, Homo sapiens
tcagtctggcttcag

SEQ ID NO: 1924181 - DNA, 15 bp, Homo sapiens
cagtctggcttcagc

SEQ ID NO: 1924182 - DNA, 15 bp, Homo sapiens
agtctggcttcagca

SEQ ID NO: 1924183 - DNA, 15 bp, Homo sapiens
gtctggcttcagcag

SEQ ID NO: 1924184 - DNA, 15 bp, Homo sapiens
tctggcttcagcaga

SEQ ID NO: 1924185 - DNA, 15 bp, Homo sapiens
ctggcttcagcagaa

SEQ ID NO: 1924186 - DNA, 15 bp, Homo sapiens
tggcttcagcagaaa

SEQ ID NO: 1924187 - DNA, 15 bp, Homo sapiens
ggcttcagcagaaag

SEQ ID NO: 1924188 - DNA, 15 bp, Homo sapiens
gcttcagcagaaagt

SEQ ID NO: 1924189 - DNA, 15 bp, Homo sapiens
cttcagcagaaagtg

SEQ ID NO: 1924190 - DNA, 15 bp, Homo sapiens
ttcagcagaaagtga

SEQ ID NO: 1924191 - DNA, 15 bp, Homo sapiens
tcagcagaaagtgaa

SEQ ID NO: 1924192 - DNA, 15 bp, Homo sapiens
cagcagaaagtgaat

SEQ ID NO: 1924193 - DNA, 15 bp, Homo sapiens
agcagaaagtgaatt

SEQ ID NO: 1924194 - DNA, 15 bp, Homo sapiens
gcagaaagtgaattt

SEQ ID NO: 1924195 - DNA, 15 bp, Homo sapiens
cagaaagtgaattta

SEQ ID NO: 1924196 - DNA, 15 bp, Homo sapiens
agaaagtgaatttac

SEQ ID NO: 1924197 - DNA, 15 bp, Homo sapiens
gaaagtgaatttact

SEQ ID NO: 1924198 - DNA, 15 bp, Homo sapiens
aaagtgaatttactg

SEQ ID NO: 1924199 - DNA, 15 bp, Homo sapiens
aagtgaatttactga

SEQ ID NO: 1924200 - DNA, 15 bp, Homo sapiens
agtgaatttactgac

SEQ ID NO: 1924201 - DNA, 15 bp, Homo sapiens
gtgaatttactgact

SEQ ID NO: 1924202 - DNA, 15 bp, Homo sapiens
tgaatttactgactc

SEQ ID NO: 1924203 - DNA, 15 bp, Homo sapiens
gaatttactgactca

SEQ ID NO: 1924204 - DNA, 15 bp, Homo sapiens
aatttactgactcat

SEQ ID NO: 1924205 - DNA, 15 bp, Homo sapiens
atttactgactcatg

SEQ ID NO: 1924206 - DNA, 15 bp, Homo sapiens
tttactgactcatgt

SEQ ID NO: 1924207 - DNA, 15 bp, Homo sapiens
ttactgactcatgta

SEQ ID NO: 1924208 - DNA, 15 bp, Homo sapiens
tactgactcatgtaa

SEQ ID NO: 1924209 - DNA, 15 bp, Homo sapiens
actgactcatgtaac

SEQ ID NO: 1924210 - DNA, 15 bp, Homo sapiens
ctgactcatgtaaca

SEQ ID NO: 1924211 - DNA, 15 bp, Homo sapiens
tgactcatgtaacag

SEQ ID NO: 1924212 - DNA, 15 bp, Homo sapiens
gactcatgtaacagg

SEQ ID NO: 1924213 - DNA, 15 bp, Homo sapiens
actcatgtaacaggg

SEQ ID NO: 1924214 - DNA, 15 bp, Homo sapiens
ctcatgtaacaggga

SEQ ID NO: 1924215 - DNA, 15 bp, Homo sapiens
tcatgtaacagggaa

SEQ ID NO: 1924216 - DNA, 15 bp, Homo sapiens
catgtaacagggaag

SEQ ID NO: 1924217 - DNA, 15 bp, Homo sapiens
atgtaacagggaagt

SEQ ID NO: 1924218 - DNA, 15 bp, Homo sapiens
tgtaacagggaagtg

SEQ ID NO: 1924219 - DNA, 15 bp, Homo sapiens
gtaacagggaagtgt

SEQ ID NO: 1924220 - DNA, 15 bp, Homo sapiens
taacagggaagtgta

SEQ ID NO: 1924221 - DNA, 15 bp, Homo sapiens
aacagggaagtgtat

SEQ ID NO: 1924222 - DNA, 15 bp, Homo sapiens
acagggaagtgtatc

SEQ ID NO: 1924223 - DNA, 15 bp, Homo sapiens
cagggaagtgtatcc

SEQ ID NO: 1924224 - DNA, 15 bp, Homo sapiens
agggaagtgtatcca

SEQ ID NO: 1924225 - DNA, 15 bp, Homo sapiens
gggaagtgtatccag

SEQ ID NO: 1924226 - DNA, 15 bp, Homo sapiens
ggaagtgtatccagg

SEQ ID NO: 1924227 - DNA, 15 bp, Homo sapiens
gaagtgtatccagga

SEQ ID NO: 1924228 - DNA, 15 bp, Homo sapiens
aagtgtatccaggag

SEQ ID NO: 1924229 - DNA, 15 bp, Homo sapiens
agtgtatccaggagt

SEQ ID NO: 1924230 - DNA, 15 bp, Homo sapiens
gtgtatccaggagtg

SEQ ID NO: 1924231 - DNA, 15 bp, Homo sapiens
tgtatccaggagtgg

SEQ ID NO: 1924232 - DNA, 15 bp, Homo sapiens
gtatccaggagtgga

SEQ ID NO: 1924233 - DNA, 15 bp, Homo sapiens
tatccaggagtggac

SEQ ID NO: 1924234 - DNA, 15 bp, Homo sapiens
atccaggagtggact

SEQ ID NO: 1924235 - DNA, 15 bp, Homo sapiens
tccaggagtggactg

SEQ ID NO: 1924236 - DNA, 15 bp, Homo sapiens
ccaggagtggactgg

SEQ ID NO: 1924237 - DNA, 15 bp, Homo sapiens
caggagtggactggc

SEQ ID NO: 1924238 - DNA, 15 bp, Homo sapiens
aggagtggactggct

SEQ ID NO: 1924239 - DNA, 15 bp, Homo sapiens
ggagtggactggctt

SEQ ID NO: 1924240 - DNA, 15 bp, Homo sapiens
gagtggactggcttc

SEQ ID NO: 1924241 - DNA, 15 bp, Homo sapiens
agtggactggcttca

SEQ ID NO: 1924242 - DNA, 15 bp, Homo sapiens
gtggactggcttcag

SEQ ID NO: 1924243 - DNA, 15 bp, Homo sapiens
tggactggcttcagg

SEQ ID NO: 1924244 - DNA, 15 bp, Homo sapiens
ggactggcttcaggc

SEQ ID NO: 1924245 - DNA, 15 bp, Homo sapiens
gactggcttcaggca

SEQ ID NO: 1924246 - DNA, 15 bp, Homo sapiens
actggcttcaggcac

SEQ ID NO: 1924247 - DNA, 15 bp, Homo sapiens
ctggcttcaggcaca

SEQ ID NO: 1924248 - DNA, 15 bp, Homo sapiens
tggcttcaggcacag

SEQ ID NO: 1924249 - DNA, 15 bp, Homo sapiens
ggcttcaggcacagc

SEQ ID NO: 1924250 - DNA, 15 bp, Homo sapiens
gcttcaggcacagct

SEQ ID NO: 1924251 - DNA, 15 bp, Homo sapiens
cttcaggcacagctg

SEQ ID NO: 1924252 - DNA, 15 bp, Homo sapiens
ttcaggcacagctgg

SEQ ID NO: 1924253 - DNA, 15 bp, Homo sapiens
tcaggcacagctgga

SEQ ID NO: 1924254 - DNA, 15 bp, Homo sapiens
caggcacagctggat

SEQ ID NO: 1924255 - DNA, 15 bp, Homo sapiens
aggcacagctggatc

SEQ ID NO: 1924256 - DNA, 15 bp, Homo sapiens
ggcacagctggatct

SEQ ID NO: 1924257 - DNA, 15 bp, Homo sapiens
gcacagctggatcta

SEQ ID NO: 1924258 - DNA, 15 bp, Homo sapiens
cacagctggatctag

SEQ ID NO: 1924259 - DNA, 15 bp, Homo sapiens
acagctggatctaga

SEQ ID NO: 1924260 - DNA, 15 bp, Homo sapiens
cagctggatctagaa

SEQ ID NO: 1924261 - DNA, 15 bp, Homo sapiens
agctggatctagaag

SEQ ID NO: 1924262 - DNA, 15 bp, Homo sapiens
gctggatctagaagt

SEQ ID NO: 1924263 - DNA, 15 bp, Homo sapiens
ctggatctagaagtt

SEQ ID NO: 1924264 - DNA, 15 bp, Homo sapiens
tggatctagaagttc

SEQ ID NO: 1924265 - DNA, 15 bp, Homo sapiens
ggatctagaagttca

SEQ ID NO: 1924266 - DNA, 15 bp, Homo sapiens
gatctagaagttcaa

SEQ ID NO: 1924267 - DNA, 15 bp, Homo sapiens
atctagaagttcaaa

SEQ ID NO: 1924268 - DNA, 15 bp, Homo sapiens
tctagaagttcaaac

SEQ ID NO: 1924269 - DNA, 15 bp, Homo sapiens
ctagaagttcaaaca

SEQ ID NO: 1924270 - DNA, 15 bp, Homo sapiens
tagaagttcaaacat

SEQ ID NO: 1924271 - DNA, 15 bp, Homo sapiens
agaagttcaaacatt

SEQ ID NO: 1924272 - DNA, 15 bp, Homo sapiens
gaagttcaaacattc

SEQ ID NO: 1924273 - DNA, 15 bp, Homo sapiens
aagttcaaacattct

SEQ ID NO: 1924274 - DNA, 15 bp, Homo sapiens
agttcaaacattctc

SEQ ID NO: 1924275 - DNA, 15 bp, Homo sapiens
gttcaaacattctca

SEQ ID NO: 1924276 - DNA, 15 bp, Homo sapiens
ttcaaacattctcat

SEQ ID NO: 1924277 - DNA, 15 bp, Homo sapiens
tcaaacattctcatt

SEQ ID NO: 1924278 - DNA, 15 bp, Homo sapiens
caaacattctcattt

SEQ ID NO: 1924279 - DNA, 15 bp, Homo sapiens
aaacattctcatttg

SEQ ID NO: 1924280 - DNA, 15 bp, Homo sapiens
aacattctcatttgg

SEQ ID NO: 1924281 - DNA, 15 bp, Homo sapiens
acattctcatttggg

SEQ ID NO: 1924282 - DNA, 15 bp, Homo sapiens
cattctcatttgggc

SEQ ID NO: 1924283 - DNA, 15 bp, Homo sapiens
attctcatttgggca

SEQ ID NO: 1924284 - DNA, 15 bp, Homo sapiens
ttctcatttgggcaa

SEQ ID NO: 1924285 - DNA, 15 bp, Homo sapiens
tctcatttgggcaac

SEQ ID NO: 1924286 - DNA, 15 bp, Homo sapiens
ctcatttgggcaact

SEQ ID NO: 1924287 - DNA, 15 bp, Homo sapiens
tcatttgggcaactt

SEQ ID NO: 1924288 - DNA, 15 bp, Homo sapiens
catttgggcaacttt

SEQ ID NO: 1924289 - DNA, 15 bp, Homo sapiens
atttgggcaactttt

SEQ ID NO: 1924290 - DNA, 15 bp, Homo sapiens
tttgggcaacttttc

SEQ ID NO: 1924291 - DNA, 15 bp, Homo sapiens
ttgggcaacttttct

SEQ ID NO: 1924292 - DNA, 15 bp, Homo sapiens
tgggcaacttttctc

SEQ ID NO: 1924293 - DNA, 15 bp, Homo sapiens
gggcaacttttctct

SEQ ID NO: 1924294 - DNA, 15 bp, Homo sapiens
ggcaacttttctctc

SEQ ID NO: 1924295 - DNA, 15 bp, Homo sapiens
gcaacttttctctct

SEQ ID NO: 1924296 - DNA, 15 bp, Homo sapiens
caacttttctctctc

SEQ ID NO: 1924297 - DNA, 15 bp, Homo sapiens
aacttttctctctct

SEQ ID NO: 1924298 - DNA, 15 bp, Homo sapiens
acttttctctctcta

SEQ ID NO: 1924299 - DNA, 15 bp, Homo sapiens
cttttctctctctac

SEQ ID NO: 1924300 - DNA, 15 bp, Homo sapiens
ttttctctctctacc

SEQ ID NO: 1924301 - DNA, 15 bp, Homo sapiens
tttctctctctacct

SEQ ID NO: 1924302 - DNA, 15 bp, Homo sapiens
ttctctctctacctt

SEQ ID NO: 1924303 - DNA, 15 bp, Homo sapiens
tctctctctaccttt

SEQ ID NO: 1924304 - DNA, 15 bp, Homo sapiens
ctctctctacctttt

SEQ ID NO: 1924305 - DNA, 15 bp, Homo sapiens
tctctctaccttttt

SEQ ID NO: 1924306 - DNA, 15 bp, Homo sapiens
ctctctacctttttc

SEQ ID NO: 1924307 - DNA, 15 bp, Homo sapiens
tctctacctttttcc

SEQ ID NO: 1924308 - DNA, 15 bp, Homo sapiens
ctctacctttttccc

SEQ ID NO: 1924309 - DNA, 15 bp, Homo sapiens
tctacctttttccct

SEQ ID NO: 1924310 - DNA, 15 bp, Homo sapiens
ctacctttttccctc

SEQ ID NO: 1924311 - DNA, 15 bp, Homo sapiens
tacctttttccctct

SEQ ID NO: 1924312 - DNA, 15 bp, Homo sapiens
acctttttccctctc

SEQ ID NO: 1924313 - DNA, 15 bp, Homo sapiens
cctttttccctctcc

SEQ ID NO: 1924314 - DNA, 15 bp, Homo sapiens
ctttttccctctcct

SEQ ID NO: 1924315 - DNA, 15 bp, Homo sapiens
tttttccctctcctt

SEQ ID NO: 1924316 - DNA, 15 bp, Homo sapiens
ttttccctctccttg

SEQ ID NO: 1924317 - DNA, 15 bp, Homo sapiens
tttccctctccttgt

SEQ ID NO: 1924318 - DNA, 15 bp, Homo sapiens
ttccctctccttgtc

SEQ ID NO: 1924319 - DNA, 15 bp, Homo sapiens
tccctctccttgtct

SEQ ID NO: 1924320 - DNA, 15 bp, Homo sapiens
ccctctccttgtctg

SEQ ID NO: 1924321 - DNA, 15 bp, Homo sapiens
cctctccttgtctgt

SEQ ID NO: 1924322 - DNA, 15 bp, Homo sapiens
ctctccttgtctgtc

SEQ ID NO: 1924323 - DNA, 15 bp, Homo sapiens
tctccttgtctgtcc

SEQ ID NO: 1924324 - DNA, 15 bp, Homo sapiens
ctccttgtctgtcct

SEQ ID NO: 1924325 - DNA, 15 bp, Homo sapiens
tccttgtctgtccta

SEQ ID NO: 1924326 - DNA, 15 bp, Homo sapiens
ccttgtctgtcctac

SEQ ID NO: 1924327 - DNA, 15 bp, Homo sapiens
cttgtctgtcctaca

SEQ ID NO: 1924328 - DNA, 15 bp, Homo sapiens
ttgtctgtcctacag

SEQ ID NO: 1924329 - DNA, 15 bp, Homo sapiens
tgtctgtcctacaga

SEQ ID NO: 1924330 - DNA, 15 bp, Homo sapiens
gtctgtcctacagac

SEQ ID NO: 1924331 - DNA, 15 bp, Homo sapiens
tctgtcctacagaca

SEQ ID NO: 1924332 - DNA, 15 bp, Homo sapiens
ctgtcctacagacaa

SEQ ID NO: 1924333 - DNA, 15 bp, Homo sapiens
tgtcctacagacaag

SEQ ID NO: 1924334 - DNA, 15 bp, Homo sapiens
gtcctacagacaagt

SEQ ID NO: 1924335 - DNA, 15 bp, Homo sapiens
tcctacagacaagtt

SEQ ID NO: 1924336 - DNA, 15 bp, Homo sapiens
cctacagacaagttc

SEQ ID NO: 1924337 - DNA, 15 bp, Homo sapiens
ctacagacaagttcc

SEQ ID NO: 1924338 - DNA, 15 bp, Homo sapiens
tacagacaagttccc

SEQ ID NO: 1924339 - DNA, 15 bp, Homo sapiens
acagacaagttccct

SEQ ID NO: 1924340 - DNA, 15 bp, Homo sapiens
cagacaagttccctc

SEQ ID NO: 1924341 - DNA, 15 bp, Homo sapiens
agacaagttccctct

SEQ ID NO: 1924342 - DNA, 15 bp, Homo sapiens
gacaagttccctcta

SEQ ID NO: 1924343 - DNA, 15 bp, Homo sapiens
acaagttccctctat

SEQ ID NO: 1924344 - DNA, 15 bp, Homo sapiens
caagttccctctatg

SEQ ID NO: 1924345 - DNA, 15 bp, Homo sapiens
aagttccctctatgt

SEQ ID NO: 1924346 - DNA, 15 bp, Homo sapiens
agttccctctatgtg

SEQ ID NO: 1924347 - DNA, 15 bp, Homo sapiens
gttccctctatgtgg

SEQ ID NO: 1924348 - DNA, 15 bp, Homo sapiens
ttccctctatgtggt

SEQ ID NO: 1924349 - DNA, 15 bp, Homo sapiens
tccctctatgtggta

SEQ ID NO: 1924350 - DNA, 15 bp, Homo sapiens
ccctctatgtggtag

SEQ ID NO: 1924351 - DNA, 15 bp, Homo sapiens
cctctatgtggtagg

SEQ ID NO: 1924352 - DNA, 15 bp, Homo sapiens
ctctatgtggtaggt

SEQ ID NO: 1924353 - DNA, 15 bp, Homo sapiens
tctatgtggtaggta

SEQ ID NO: 1924354 - DNA, 15 bp, Homo sapiens
ctatgtggtaggtaa

SEQ ID NO: 1924355 - DNA, 15 bp, Homo sapiens
tatgtggtaggtaag

SEQ ID NO: 1924356 - DNA, 15 bp, Homo sapiens
atgtggtaggtaaga

SEQ ID NO: 1924357 - DNA, 15 bp, Homo sapiens
tgtggtaggtaagat

SEQ ID NO: 1924358 - DNA, 15 bp, Homo sapiens
gtggtaggtaagatg

SEQ ID NO: 1924359 - DNA, 15 bp, Homo sapiens
tggtaggtaagatgg

SEQ ID NO: 1924360 - DNA, 15 bp, Homo sapiens
ggtaggtaagatggg

SEQ ID NO: 1924361 - DNA, 15 bp, Homo sapiens
gtaggtaagatgggt

SEQ ID NO: 1924362 - DNA, 15 bp, Homo sapiens
taggtaagatgggtg

SEQ ID NO: 1924363 - DNA, 15 bp, Homo sapiens
aggtaagatgggtga

SEQ ID NO: 1924364 - DNA, 15 bp, Homo sapiens
ggtaagatgggtgac

SEQ ID NO: 1924365 - DNA, 15 bp, Homo sapiens
gtaagatgggtgaca

SEQ ID NO: 1924366 - DNA, 15 bp, Homo sapiens
taagatgggtgacaa

SEQ ID NO: 1924367 - DNA, 15 bp, Homo sapiens
aagatgggtgacaat

SEQ ID NO: 1924368 - DNA, 15 bp, Homo sapiens
agatgggtgacaata

SEQ ID NO: 1924369 - DNA, 15 bp, Homo sapiens
gatgggtgacaatat

SEQ ID NO: 1924370 - DNA, 15 bp, Homo sapiens
atgggtgacaatatc

SEQ ID NO: 1924371 - DNA, 15 bp, Homo sapiens
tgggtgacaatatct

SEQ ID NO: 1924372 - DNA, 15 bp, Homo sapiens
gggtgacaatatctc

SEQ ID NO: 1924373 - DNA, 15 bp, Homo sapiens
ggtgacaatatctct

SEQ ID NO: 1924374 - DNA, 15 bp, Homo sapiens
gtgacaatatctctg

SEQ ID NO: 1924375 - DNA, 15 bp, Homo sapiens
tgacaatatctctga

SEQ ID NO: 1924376 - DNA, 15 bp, Homo sapiens
gacaatatctctgaa

SEQ ID NO: 1924377 - DNA, 15 bp, Homo sapiens
acaatatctctgaat

SEQ ID NO: 1924378 - DNA, 15 bp, Homo sapiens
caatatctctgaata

SEQ ID NO: 1924379 - DNA, 15 bp, Homo sapiens
aatatctctgaataa

SEQ ID NO: 1924380 - DNA, 15 bp, Homo sapiens
atatctctgaataaa

SEQ ID NO: 1924381 - DNA, 15 bp, Homo sapiens
tatctctgaataaaa

SEQ ID NO: 1924382 - DNA, 15 bp, Homo sapiens
atctctgaataaaat

SEQ ID NO: 1924383 - DNA, 15 bp, Homo sapiens
tctctgaataaaatt

SEQ ID NO: 1924384 - DNA, 15 bp, Homo sapiens
ctctgaataaaattc

SEQ ID NO: 1924385 - DNA, 15 bp, Homo sapiens
tctgaataaaattct

SEQ ID NO: 1924386 - DNA, 15 bp, Homo sapiens
ctgaataaaattctc

SEQ ID NO: 1924387 - DNA, 15 bp, Homo sapiens
tgaataaaattctct

SEQ ID NO: 1924388 - DNA, 15 bp, Homo sapiens
gaataaaattctcta

SEQ ID NO: 1924389 - DNA, 15 bp, Homo sapiens
aataaaattctctag

SEQ ID NO: 1924390 - DNA, 15 bp, Homo sapiens
ataaaattctctagc

SEQ ID NO: 1924391 - DNA, 15 bp, Homo sapiens
taaaattctctagct

SEQ ID NO: 1924392 - DNA, 15 bp, Homo sapiens
aaaattctctagctg

SEQ ID NO: 1924393 - DNA, 15 bp, Homo sapiens
aaattctctagctga

SEQ ID NO: 1924394 - DNA, 15 bp, Homo sapiens
aattctctagctgaa

SEQ ID NO: 1924395 - DNA, 15 bp, Homo sapiens
attctctagctgaac

SEQ ID NO: 1924396 - DNA, 15 bp, Homo sapiens
ttctctagctgaaca

SEQ ID NO: 1924397 - DNA, 15 bp, Homo sapiens
tctctagctgaacag

SEQ ID NO: 1924398 - DNA, 15 bp, Homo sapiens
ctctagctgaacagc

SEQ ID NO: 1924399 - DNA, 15 bp, Homo sapiens
tctagctgaacagcc

SEQ ID NO: 1924400 - DNA, 15 bp, Homo sapiens
ctagctgaacagccc

SEQ ID NO: 1924401 - DNA, 15 bp, Homo sapiens
tagctgaacagccct

SEQ ID NO: 1924402 - DNA, 15 bp, Homo sapiens
agctgaacagccctg

SEQ ID NO: 1924403 - DNA, 15 bp, Homo sapiens
gctgaacagccctgg

SEQ ID NO: 1924404 - DNA, 15 bp, Homo sapiens
ctgaacagccctggt

SEQ ID NO: 1924405 - DNA, 15 bp, Homo sapiens
tgaacagccctggtg

SEQ ID NO: 1924406 - DNA, 15 bp, Homo sapiens
gaacagccctggtga

SEQ ID NO: 1924407 - DNA, 15 bp, Homo sapiens
aacagccctggtgaa

SEQ ID NO: 1924408 - DNA, 15 bp, Homo sapiens
acagccctggtgaaa

SEQ ID NO: 1924409 - DNA, 15 bp, Homo sapiens
cagccctggtgaaaa

SEQ ID NO: 1924410 - DNA, 15 bp, Homo sapiens
agccctggtgaaaat

SEQ ID NO: 1924411 - DNA, 15 bp, Homo sapiens
gccctggtgaaaata

SEQ ID NO: 1924412 - DNA, 15 bp, Homo sapiens
ccctggtgaaaatag

SEQ ID NO: 1924413 - DNA, 15 bp, Homo sapiens
cctggtgaaaataga

SEQ ID NO: 1924414 - DNA, 15 bp, Homo sapiens
ctggtgaaaatagaa

SEQ ID NO: 1924415 - DNA, 15 bp, Homo sapiens
tggtgaaaatagaag

SEQ ID NO: 1924416 - DNA, 15 bp, Homo sapiens
ggtgaaaatagaagt

SEQ ID NO: 1924417 - DNA, 15 bp, Homo sapiens
gtgaaaatagaagtt

SEQ ID NO: 1924418 - DNA, 15 bp, Homo sapiens
tgaaaatagaagttt

SEQ ID NO: 1924419 - DNA, 15 bp, Homo sapiens
gaaaatagaagtttt

SEQ ID NO: 1924420 - DNA, 15 bp, Homo sapiens
aaaatagaagttttg

SEQ ID NO: 1924421 - DNA, 15 bp, Homo sapiens
aaatagaagttttgt

SEQ ID NO: 1924422 - DNA, 15 bp, Homo sapiens
aatagaagttttgtc

SEQ ID NO: 1924423 - DNA, 15 bp, Homo sapiens
atagaagttttgtct

SEQ ID NO: 1924424 - DNA, 15 bp, Homo sapiens
tagaagttttgtctt

SEQ ID NO: 1924425 - DNA, 15 bp, Homo sapiens
agaagttttgtcttc

SEQ ID NO: 1924426 - DNA, 15 bp, Homo sapiens
gaagttttgtcttcc

SEQ ID NO: 1924427 - DNA, 15 bp, Homo sapiens
aagttttgtcttcca

SEQ ID NO: 1924428 - DNA, 15 bp, Homo sapiens
agttttgtcttccag

SEQ ID NO: 1924429 - DNA, 15 bp, Homo sapiens
gttttgtcttccagc

SEQ ID NO: 1924430 - DNA, 15 bp, Homo sapiens
ttttgtcttccagca

SEQ ID NO: 1924431 - DNA, 15 bp, Homo sapiens
tttgtcttccagcat

SEQ ID NO: 1924432 - DNA, 15 bp, Homo sapiens
ttgtcttccagcatc

SEQ ID NO: 1924433 - DNA, 15 bp, Homo sapiens
tgtcttccagcatcc

SEQ ID NO: 1924434 - DNA, 15 bp, Homo sapiens
gtcttccagcatcct

SEQ ID NO: 1924435 - DNA, 15 bp, Homo sapiens
tcttccagcatcctt

SEQ ID NO: 1924436 - DNA, 15 bp, Homo sapiens
cttccagcatcctta

SEQ ID NO: 1924437 - DNA, 15 bp, Homo sapiens
ttccagcatccttac

SEQ ID NO: 1924438 - DNA, 15 bp, Homo sapiens
tccagcatccttaca

SEQ ID NO: 1924439 - DNA, 15 bp, Homo sapiens
ccagcatccttacac

SEQ ID NO: 1924440 - DNA, 15 bp, Homo sapiens
cagcatccttacact

SEQ ID NO: 1924441 - DNA, 15 bp, Homo sapiens
agcatccttacacta

SEQ ID NO: 1924442 - DNA, 15 bp, Homo sapiens
gcatccttacactac

SEQ ID NO: 1924443 - DNA, 15 bp, Homo sapiens
catccttacactact

SEQ ID NO: 1924444 - DNA, 15 bp, Homo sapiens
atccttacactactc

SEQ ID NO: 1924445 - DNA, 15 bp, Homo sapiens
tccttacactactct

SEQ ID NO: 1924446 - DNA, 15 bp, Homo sapiens
ccttacactactctc

SEQ ID NO: 1924447 - DNA, 15 bp, Homo sapiens
cttacactactctca

SEQ ID NO: 1924448 - DNA, 15 bp, Homo sapiens
ttacactactctcag

SEQ ID NO: 1924449 - DNA, 15 bp, Homo sapiens
tacactactctcaga

SEQ ID NO: 1924450 - DNA, 15 bp, Homo sapiens
acactactctcagag

SEQ ID NO: 1924451 - DNA, 15 bp, Homo sapiens
cactactctcagaga

SEQ ID NO: 1924452 - DNA, 15 bp, Homo sapiens
actactctcagagaa

SEQ ID NO: 1924453 - DNA, 15 bp, Homo sapiens
ctactctcagagaaa

SEQ ID NO: 1924454 - DNA, 15 bp, Homo sapiens
tactctcagagaaaa

SEQ ID NO: 1924455 - DNA, 15 bp, Homo sapiens
actctcagagaaaac

SEQ ID NO: 1924456 - DNA, 15 bp, Homo sapiens
ctctcagagaaaact

SEQ ID NO: 1924457 - DNA, 15 bp, Homo sapiens
tctcagagaaaactc

SEQ ID NO: 1924458 - DNA, 15 bp, Homo sapiens
ctcagagaaaactca

SEQ ID NO: 1924459 - DNA, 15 bp, Homo sapiens
tcagagaaaactcat

SEQ ID NO: 1924460 - DNA, 15 bp, Homo sapiens
cagagaaaactcatt

SEQ ID NO: 1924461 - DNA, 15 bp, Homo sapiens
agagaaaactcattt

SEQ ID NO: 1924462 - DNA, 15 bp, Homo sapiens
gagaaaactcatttg

SEQ ID NO: 1924463 - DNA, 15 bp, Homo sapiens
agaaaactcatttgc

SEQ ID NO: 1924464 - DNA, 15 bp, Homo sapiens
gaaaactcatttgct

SEQ ID NO: 1924465 - DNA, 15 bp, Homo sapiens
aaaactcatttgctc

SEQ ID NO: 1924466 - DNA, 15 bp, Homo sapiens
aaactcatttgctcc

SEQ ID NO: 1924467 - DNA, 15 bp, Homo sapiens
aactcatttgctccg

SEQ ID NO: 1924468 - DNA, 15 bp, Homo sapiens
actcatttgctccgc

SEQ ID NO: 1924469 - DNA, 15 bp, Homo sapiens
ctcatttgctccgct

SEQ ID NO: 1924470 - DNA, 15 bp, Homo sapiens
tcatttgctccgctt

SEQ ID NO: 1924471 - DNA, 15 bp, Homo sapiens
catttgctccgcttg

SEQ ID NO: 1924472 - DNA, 15 bp, Homo sapiens
atttgctccgcttgg

SEQ ID NO: 1924473 - DNA, 15 bp, Homo sapiens
tttgctccgcttgga

SEQ ID NO: 1924474 - DNA, 15 bp, Homo sapiens
ttgctccgcttggat

SEQ ID NO: 1924475 - DNA, 15 bp, Homo sapiens
tgctccgcttggatc

SEQ ID NO: 1924476 - DNA, 15 bp, Homo sapiens
gctccgcttggatcg

SEQ ID NO: 1924477 - DNA, 15 bp, Homo sapiens
ctccgcttggatcgt

SEQ ID NO: 1924478 - DNA, 15 bp, Homo sapiens
tccgcttggatcgtg

SEQ ID NO: 1924479 - DNA, 15 bp, Homo sapiens
ccgcttggatcgtgt

SEQ ID NO: 1924480 - DNA, 15 bp, Homo sapiens
cgcttggatcgtgtg

SEQ ID NO: 1924481 - DNA, 15 bp, Homo sapiens
gcttggatcgtgtgt

SEQ ID NO: 1924482 - DNA, 15 bp, Homo sapiens
cttggatcgtgtgtt

SEQ ID NO: 1924483 - DNA, 15 bp, Homo sapiens
ttggatcgtgtgttc

SEQ ID NO: 1924484 - DNA, 15 bp, Homo sapiens
tggatcgtgtgttca

SEQ ID NO: 1924485 - DNA, 15 bp, Homo sapiens
ggatcgtgtgttcat

SEQ ID NO: 1924486 - DNA, 15 bp, Homo sapiens
gatcgtgtgttcatt

SEQ ID NO: 1924487 - DNA, 15 bp, Homo sapiens
atcgtgtgttcattc

SEQ ID NO: 1924488 - DNA, 15 bp, Homo sapiens
tcgtgtgttcattct

SEQ ID NO: 1924489 - DNA, 15 bp, Homo sapiens
cgtgtgttcattctg

SEQ ID NO: 1924490 - DNA, 15 bp, Homo sapiens
gtgtgttcattctgg

SEQ ID NO: 1924491 - DNA, 15 bp, Homo sapiens
tgtgttcattctgga

SEQ ID NO: 1924492 - DNA, 15 bp, Homo sapiens
gtgttcattctggaa

SEQ ID NO: 1924493 - DNA, 15 bp, Homo sapiens
tgttcattctggaag

SEQ ID NO: 1924494 - DNA, 15 bp, Homo sapiens
gttcattctggaagt

SEQ ID NO: 1924495 - DNA, 15 bp, Homo sapiens
ttcattctggaagta

SEQ ID NO: 1924496 - DNA, 15 bp, Homo sapiens
tcattctggaagtag

SEQ ID NO: 1924497 - DNA, 15 bp, Homo sapiens
cattctggaagtagt

SEQ ID NO: 1924498 - DNA, 15 bp, Homo sapiens
attctggaagtagtc

SEQ ID NO: 1924499 - DNA, 15 bp, Homo sapiens
ttctggaagtagtcc

SEQ ID NO: 1924500 - DNA, 15 bp, Homo sapiens
tctggaagtagtccc

SEQ ID NO: 1924501 - DNA, 15 bp, Homo sapiens
ctggaagtagtccct

SEQ ID NO: 1924502 - DNA, 15 bp, Homo sapiens
tggaagtagtccctc

SEQ ID NO: 1924503 - DNA, 15 bp, Homo sapiens
ggaagtagtccctca

SEQ ID NO: 1924504 - DNA, 15 bp, Homo sapiens
gaagtagtccctcac

SEQ ID NO: 1924505 - DNA, 15 bp, Homo sapiens
aagtagtccctcact

SEQ ID NO: 1924506 - DNA, 15 bp, Homo sapiens
agtagtccctcactg

SEQ ID NO: 1924507 - DNA, 15 bp, Homo sapiens
gtagtccctcactgg

SEQ ID NO: 1924508 - DNA, 15 bp, Homo sapiens
tagtccctcactggg

SEQ ID NO: 1924509 - DNA, 15 bp, Homo sapiens
agtccctcactggga

SEQ ID NO: 1924510 - DNA, 15 bp, Homo sapiens
gtccctcactgggaa

SEQ ID NO: 1924511 - DNA, 15 bp, Homo sapiens
tccctcactgggaac

SEQ ID NO: 1924512 - DNA, 15 bp, Homo sapiens
ccctcactgggaaca

SEQ ID NO: 1924513 - DNA, 15 bp, Homo sapiens
cctcactgggaacat

SEQ ID NO: 1924514 - DNA, 15 bp, Homo sapiens
ctcactgggaacatg

SEQ ID NO: 1924515 - DNA, 15 bp, Homo sapiens
tcactgggaacatgg

SEQ ID NO: 1924516 - DNA, 15 bp, Homo sapiens
cactgggaacatggt

SEQ ID NO: 1924517 - DNA, 15 bp, Homo sapiens
actgggaacatggta

SEQ ID NO: 1924518 - DNA, 15 bp, Homo sapiens
ctgggaacatggtat

SEQ ID NO: 1924519 - DNA, 15 bp, Homo sapiens
tgggaacatggtata

SEQ ID NO: 1924520 - DNA, 15 bp, Homo sapiens
gggaacatggtatat

SEQ ID NO: 1924521 - DNA, 15 bp, Homo sapiens
ggaacatggtatatg

SEQ ID NO: 1924522 - DNA, 15 bp, Homo sapiens
gaacatggtatatgt

SEQ ID NO: 1924523 - DNA, 15 bp, Homo sapiens
aacatggtatatgtg

SEQ ID NO: 1924524 - DNA, 15 bp, Homo sapiens
acatggtatatgtga

SEQ ID NO: 1924525 - DNA, 15 bp, Homo sapiens
catggtatatgtgaa

SEQ ID NO: 1924526 - DNA, 15 bp, Homo sapiens
atggtatatgtgaac

SEQ ID NO: 1924527 - DNA, 15 bp, Homo sapiens
tggtatatgtgaact

SEQ ID NO: 1924528 - DNA, 15 bp, Homo sapiens
ggtatatgtgaactg

SEQ ID NO: 1924529 - DNA, 15 bp, Homo sapiens
gtatatgtgaactgg

SEQ ID NO: 1924530 - DNA, 15 bp, Homo sapiens
tatatgtgaactgga

SEQ ID NO: 1924531 - DNA, 15 bp, Homo sapiens
atatgtgaactggat

SEQ ID NO: 1924532 - DNA, 15 bp, Homo sapiens
tatgtgaactggatg

SEQ ID NO: 1924533 - DNA, 15 bp, Homo sapiens
atgtgaactggatga

SEQ ID NO: 1924534 - DNA, 15 bp, Homo sapiens
tgtgaactggatgat

SEQ ID NO: 1924535 - DNA, 15 bp, Homo sapiens
gtgaactggatgatc

SEQ ID NO: 1924536 - DNA, 15 bp, Homo sapiens
tgaactggatgatct

SEQ ID NO: 1924537 - DNA, 15 bp, Homo sapiens
gaactggatgatctg

SEQ ID NO: 1924538 - DNA, 15 bp, Homo sapiens
aactggatgatctgg

SEQ ID NO: 1924539 - DNA, 15 bp, Homo sapiens
actggatgatctggg

SEQ ID NO: 1924540 - DNA, 15 bp, Homo sapiens
ctggatgatctgggt

SEQ ID NO: 1924541 - DNA, 15 bp, Homo sapiens
tggatgatctgggtg

SEQ ID NO: 1924542 - DNA, 15 bp, Homo sapiens
ggatgatctgggtga

SEQ ID NO: 1924543 - DNA, 15 bp, Homo sapiens
gatgatctgggtgaa

SEQ ID NO: 1924544 - DNA, 15 bp, Homo sapiens
atgatctgggtgaaa

SEQ ID NO: 1924545 - DNA, 15 bp, Homo sapiens
tgatctgggtgaaat

SEQ ID NO: 1924546 - DNA, 15 bp, Homo sapiens
gatctgggtgaaata

SEQ ID NO: 1924547 - DNA, 15 bp, Homo sapiens
atctgggtgaaatac

SEQ ID NO: 1924548 - DNA, 15 bp, Homo sapiens
tctgggtgaaatact

SEQ ID NO: 1924549 - DNA, 15 bp, Homo sapiens
ctgggtgaaatactc

SEQ ID NO: 1924550 - DNA, 15 bp, Homo sapiens
tgggtgaaatactca

SEQ ID NO: 1924551 - DNA, 15 bp, Homo sapiens
gggtgaaatactcat

SEQ ID NO: 1924552 - DNA, 15 bp, Homo sapiens
ggtgaaatactcatc

SEQ ID NO: 1924553 - DNA, 15 bp, Homo sapiens
gtgaaatactcatcc

SEQ ID NO: 1924554 - DNA, 15 bp, Homo sapiens
tgaaatactcatccc

SEQ ID NO: 1924555 - DNA, 15 bp, Homo sapiens
gaaatactcatccct

SEQ ID NO: 1924556 - DNA, 15 bp, Homo sapiens
aaatactcatccctg

SEQ ID NO: 1924557 - DNA, 15 bp, Homo sapiens
aatactcatccctgt

SEQ ID NO: 1924558 - DNA, 15 bp, Homo sapiens
atactcatccctgtg

SEQ ID NO: 1924559 - DNA, 15 bp, Homo sapiens
tactcatccctgtgg

SEQ ID NO: 1924560 - DNA, 15 bp, Homo sapiens
actcatccctgtggg

SEQ ID NO: 1924561 - DNA, 15 bp, Homo sapiens
ctcatccctgtggga

SEQ ID NO: 1924562 - DNA, 15 bp, Homo sapiens
tcatccctgtgggag

SEQ ID NO: 1924563 - DNA, 15 bp, Homo sapiens
catccctgtgggagg

SEQ ID NO: 1924564 - DNA, 15 bp, Homo sapiens
atccctgtgggaggg

SEQ ID NO: 1924565 - DNA, 15 bp, Homo sapiens
tccctgtgggagggt

SEQ ID NO: 1924566 - DNA, 15 bp, Homo sapiens
ccctgtgggagggtg

SEQ ID NO: 1924567 - DNA, 15 bp, Homo sapiens
cctgtgggagggtgg

SEQ ID NO: 1924568 - DNA, 15 bp, Homo sapiens
ctgtgggagggtggc

SEQ ID NO: 1924569 - DNA, 15 bp, Homo sapiens
tgtgggagggtggcc

SEQ ID NO: 1924570 - DNA, 15 bp, Homo sapiens
gtgggagggtggccg

SEQ ID NO: 1924571 - DNA, 15 bp, Homo sapiens
tgggagggtggccgg

SEQ ID NO: 1924572 - DNA, 15 bp, Homo sapiens
gggagggtggccgga

SEQ ID NO: 1924573 - DNA, 15 bp, Homo sapiens
ggagggtggccggat

SEQ ID NO: 1924574 - DNA, 15 bp, Homo sapiens
gagggtggccggata

SEQ ID NO: 1924575 - DNA, 15 bp, Homo sapiens
agggtggccggatac

SEQ ID NO: 1924576 - DNA, 15 bp, Homo sapiens
gggtggccggatacc

SEQ ID NO: 1924577 - DNA, 15 bp, Homo sapiens
ggtggccggatacca

SEQ ID NO: 1924578 - DNA, 15 bp, Homo sapiens
gtggccggataccac

SEQ ID NO: 1924579 - DNA, 15 bp, Homo sapiens
tggccggataccaca

SEQ ID NO: 1924580 - DNA, 15 bp, Homo sapiens
ggccggataccacaa

SEQ ID NO: 1924581 - DNA, 15 bp, Homo sapiens
gccggataccacaat

SEQ ID NO: 1924582 - DNA, 15 bp, Homo sapiens
ccggataccacaatt

SEQ ID NO: 1924583 - DNA, 15 bp, Homo sapiens
cggataccacaattg

SEQ ID NO: 1924584 - DNA, 15 bp, Homo sapiens
ggataccacaattga

SEQ ID NO: 1924585 - DNA, 15 bp, Homo sapiens
gataccacaattgag

SEQ ID NO: 1924586 - DNA, 15 bp, Homo sapiens
ataccacaattgaga

SEQ ID NO: 1924587 - DNA, 15 bp, Homo sapiens
taccacaattgagag

SEQ ID NO: 1924588 - DNA, 15 bp, Homo sapiens
accacaattgagaga

SEQ ID NO: 1924589 - DNA, 15 bp, Homo sapiens
ccacaattgagagat

SEQ ID NO: 1924590 - DNA, 15 bp, Homo sapiens
cacaattgagagatc

SEQ ID NO: 1924591 - DNA, 15 bp, Homo sapiens
acaattgagagatcc

SEQ ID NO: 1924592 - DNA, 15 bp, Homo sapiens
caattgagagatccc

SEQ ID NO: 1924593 - DNA, 15 bp, Homo sapiens
aattgagagatccct

SEQ ID NO: 1924594 - DNA, 15 bp, Homo sapiens
attgagagatcccta

SEQ ID NO: 1924595 - DNA, 15 bp, Homo sapiens
ttgagagatccctaa

SEQ ID NO: 1924596 - DNA, 15 bp, Homo sapiens
tgagagatccctaag

SEQ ID NO: 1924597 - DNA, 15 bp, Homo sapiens
gagagatccctaagg

SEQ ID NO: 1924598 - DNA, 15 bp, Homo sapiens
agagatccctaagga

SEQ ID NO: 1924599 - DNA, 15 bp, Homo sapiens
gagatccctaaggac

SEQ ID NO: 1924600 - DNA, 15 bp, Homo sapiens
agatccctaaggaca

SEQ ID NO: 1924601 - DNA, 15 bp, Homo sapiens
gatccctaaggacac

SEQ ID NO: 1924602 - DNA, 15 bp, Homo sapiens
atccctaaggacaca

SEQ ID NO: 1924603 - DNA, 15 bp, Homo sapiens
tccctaaggacacat

SEQ ID NO: 1924604 - DNA, 15 bp, Homo sapiens
ccctaaggacacatg

SEQ ID NO: 1924605 - DNA, 15 bp, Homo sapiens
cctaaggacacatgt

SEQ ID NO: 1924606 - DNA, 15 bp, Homo sapiens
ctaaggacacatgtg

SEQ ID NO: 1924607 - DNA, 15 bp, Homo sapiens
taaggacacatgtgg

SEQ ID NO: 1924608 - DNA, 15 bp, Homo sapiens
aaggacacatgtggg

SEQ ID NO: 1924609 - DNA, 15 bp, Homo sapiens
aggacacatgtgggc

SEQ ID NO: 1924610 - DNA, 15 bp, Homo sapiens
ggacacatgtgggca

SEQ ID NO: 1924611 - DNA, 15 bp, Homo sapiens
gacacatgtgggcaa

SEQ ID NO: 1924612 - DNA, 15 bp, Homo sapiens
acacatgtgggcaag

SEQ ID NO: 1924613 - DNA, 15 bp, Homo sapiens
cacatgtgggcaagg

SEQ ID NO: 1924614 - DNA, 15 bp, Homo sapiens
acatgtgggcaagga

SEQ ID NO: 1924615 - DNA, 15 bp, Homo sapiens
catgtgggcaaggag

SEQ ID NO: 1924616 - DNA, 15 bp, Homo sapiens
atgtgggcaaggagt

SEQ ID NO: 1924617 - DNA, 15 bp, Homo sapiens
tgtgggcaaggagta

SEQ ID NO: 1924618 - DNA, 15 bp, Homo sapiens
gtgggcaaggagtag

SEQ ID NO: 1924619 - DNA, 15 bp, Homo sapiens
tgggcaaggagtagt

SEQ ID NO: 1924620 - DNA, 15 bp, Homo sapiens
gggcaaggagtagtt

SEQ ID NO: 1924621 - DNA, 15 bp, Homo sapiens
ggcaaggagtagttt

SEQ ID NO: 1924622 - DNA, 15 bp, Homo sapiens
gcaaggagtagtttc

SEQ ID NO: 1924623 - DNA, 15 bp, Homo sapiens
caaggagtagtttct

SEQ ID NO: 1924624 - DNA, 15 bp, Homo sapiens
aaggagtagtttctc

SEQ ID NO: 1924625 - DNA, 15 bp, Homo sapiens
aggagtagtttctcc

SEQ ID NO: 1924626 - DNA, 15 bp, Homo sapiens
ggagtagtttctcca

SEQ ID NO: 1924627 - DNA, 15 bp, Homo sapiens
gagtagtttctccaa

SEQ ID NO: 1924628 - DNA, 15 bp, Homo sapiens
agtagtttctccaaa

SEQ ID NO: 1924629 - DNA, 15 bp, Homo sapiens
gtagtttctccaaag

SEQ ID NO: 1924630 - DNA, 15 bp, Homo sapiens
tagtttctccaaagg

SEQ ID NO: 1924631 - DNA, 15 bp, Homo sapiens
agtttctccaaagga

SEQ ID NO: 1924632 - DNA, 15 bp, Homo sapiens
gtttctccaaaggaa

SEQ ID NO: 1924633 - DNA, 15 bp, Homo sapiens
tttctccaaaggaat

SEQ ID NO: 1924634 - DNA, 15 bp, Homo sapiens
ttctccaaaggaatc

SEQ ID NO: 1924635 - DNA, 15 bp, Homo sapiens
tctccaaaggaatca

SEQ ID NO: 1924636 - DNA, 15 bp, Homo sapiens
ctccaaaggaatcag

SEQ ID NO: 1924637 - DNA, 15 bp, Homo sapiens
tccaaaggaatcaga

SEQ ID NO: 1924638 - DNA, 15 bp, Homo sapiens
ccaaaggaatcagaa

SEQ ID NO: 1924639 - DNA, 15 bp, Homo sapiens
caaaggaatcagaag

SEQ ID NO: 1924640 - DNA, 15 bp, Homo sapiens
aaaggaatcagaaga

SEQ ID NO: 1924641 - DNA, 15 bp, Homo sapiens
aaggaatcagaagaa

SEQ ID NO: 1924642 - DNA, 15 bp, Homo sapiens
aggaatcagaagaaa

SEQ ID NO: 1924643 - DNA, 15 bp, Homo sapiens
ggaatcagaagaaaa

SEQ ID NO: 1924644 - DNA, 15 bp, Homo sapiens
gaatcagaagaaaag

SEQ ID NO: 1924645 - DNA, 15 bp, Homo sapiens
aatcagaagaaaagg

SEQ ID NO: 1924646 - DNA, 15 bp, Homo sapiens
atcagaagaaaaggg

SEQ ID NO: 1924647 - DNA, 15 bp, Homo sapiens
tcagaagaaaagggg

SEQ ID NO: 1924648 - DNA, 15 bp, Homo sapiens
cagaagaaaaggggt

SEQ ID NO: 1924649 - DNA, 15 bp, Homo sapiens
agaagaaaaggggtg

SEQ ID NO: 1924650 - DNA, 15 bp, Homo sapiens
gaagaaaaggggtgg

SEQ ID NO: 1924651 - DNA, 15 bp, Homo sapiens
aagaaaaggggtggg

SEQ ID NO: 1924652 - DNA, 15 bp, Homo sapiens
agaaaaggggtggga

SEQ ID NO: 1924653 - DNA, 15 bp, Homo sapiens
gaaaaggggtgggaa

SEQ ID NO: 1924654 - DNA, 15 bp, Homo sapiens
aaaaggggtgggaag

SEQ ID NO: 1924655 - DNA, 15 bp, Homo sapiens
aaaggggtgggaagc

SEQ ID NO: 1924656 - DNA, 15 bp, Homo sapiens
aaggggtgggaagcg

SEQ ID NO: 1924657 - DNA, 15 bp, Homo sapiens
aggggtgggaagcgg

SEQ ID NO: 1924658 - DNA, 15 bp, Homo sapiens
ggggtgggaagcggg

SEQ ID NO: 1924659 - DNA, 15 bp, Homo sapiens
gggtgggaagcggga

SEQ ID NO: 1924660 - DNA, 15 bp, Homo sapiens
ggtgggaagcgggat

SEQ ID NO: 1924661 - DNA, 15 bp, Homo sapiens
gtgggaagcgggatg

SEQ ID NO: 1924662 - DNA, 15 bp, Homo sapiens
tgggaagcgggatga

SEQ ID NO: 1924663 - DNA, 15 bp, Homo sapiens
gggaagcgggatgag

SEQ ID NO: 1924664 - DNA, 15 bp, Homo sapiens
ggaagcgggatgagc

SEQ ID NO: 1924665 - DNA, 15 bp, Homo sapiens
gaagcgggatgagca

SEQ ID NO: 1924666 - DNA, 15 bp, Homo sapiens
aagcgggatgagcag

SEQ ID NO: 1924667 - DNA, 15 bp, Homo sapiens
agcgggatgagcaga

SEQ ID NO: 1924668 - DNA, 15 bp, Homo sapiens
gcgggatgagcagac

SEQ ID NO: 1924669 - DNA, 15 bp, Homo sapiens
cgggatgagcagaca

SEQ ID NO: 1924670 - DNA, 15 bp, Homo sapiens
gggatgagcagacaa

SEQ ID NO: 1924671 - DNA, 15 bp, Homo sapiens
ggatgagcagacaaa

SEQ ID NO: 1924672 - DNA, 15 bp, Homo sapiens
gatgagcagacaaaa

SEQ ID NO: 1924673 - DNA, 15 bp, Homo sapiens
atgagcagacaaaag

SEQ ID NO: 1924674 - DNA, 15 bp, Homo sapiens
tgagcagacaaaagt

SEQ ID NO: 1924675 - DNA, 15 bp, Homo sapiens
gagcagacaaaagtt

SEQ ID NO: 1924676 - DNA, 15 bp, Homo sapiens
agcagacaaaagttg

SEQ ID NO: 1924677 - DNA, 15 bp, Homo sapiens
gcagacaaaagttgt

SEQ ID NO: 1924678 - DNA, 15 bp, Homo sapiens
cagacaaaagttgta

SEQ ID NO: 1924679 - DNA, 15 bp, Homo sapiens
agacaaaagttgtag

SEQ ID NO: 1924680 - DNA, 15 bp, Homo sapiens
gacaaaagttgtagt

SEQ ID NO: 1924681 - DNA, 15 bp, Homo sapiens
acaaaagttgtagtt

SEQ ID NO: 1924682 - DNA, 15 bp, Homo sapiens
caaaagttgtagtta

SEQ ID NO: 1924683 - DNA, 15 bp, Homo sapiens
aaaagttgtagttac

SEQ ID NO: 1924684 - DNA, 15 bp, Homo sapiens
aaagttgtagttacc

SEQ ID NO: 1924685 - DNA, 15 bp, Homo sapiens
aagttgtagttacca

SEQ ID NO: 1924686 - DNA, 15 bp, Homo sapiens
agttgtagttaccac

SEQ ID NO: 1924687 - DNA, 15 bp, Homo sapiens
gttgtagttaccaca

SEQ ID NO: 1924688 - DNA, 15 bp, Homo sapiens
ttgtagttaccacag

SEQ ID NO: 1924689 - DNA, 15 bp, Homo sapiens
tgtagttaccacagt

SEQ ID NO: 1924690 - DNA, 15 bp, Homo sapiens
gtagttaccacagtc

SEQ ID NO: 1924691 - DNA, 15 bp, Homo sapiens
tagttaccacagtct

SEQ ID NO: 1924692 - DNA, 15 bp, Homo sapiens
agttaccacagtctt

SEQ ID NO: 1924693 - DNA, 15 bp, Homo sapiens
gttaccacagtcttg

SEQ ID NO: 1924694 - DNA, 15 bp, Homo sapiens
ttaccacagtcttgc

SEQ ID NO: 1924695 - DNA, 15 bp, Homo sapiens
taccacagtcttgca

SEQ ID NO: 1924696 - DNA, 15 bp, Homo sapiens
accacagtcttgcaa

SEQ ID NO: 1924697 - DNA, 15 bp, Homo sapiens
ccacagtcttgcaaa

SEQ ID NO: 1924698 - DNA, 15 bp, Homo sapiens
cacagtcttgcaaat

SEQ ID NO: 1924699 - DNA, 15 bp, Homo sapiens
acagtcttgcaaatg

SEQ ID NO: 1924700 - DNA, 15 bp, Homo sapiens
cagtcttgcaaatgg

SEQ ID NO: 1924701 - DNA, 15 bp, Homo sapiens
agtcttgcaaatggt

SEQ ID NO: 1924702 - DNA, 15 bp, Homo sapiens
gtcttgcaaatggtc

SEQ ID NO: 1924703 - DNA, 15 bp, Homo sapiens
tcttgcaaatggtct

SEQ ID NO: 1924704 - DNA, 15 bp, Homo sapiens
cttgcaaatggtctt

SEQ ID NO: 1924705 - DNA, 15 bp, Homo sapiens
ttgcaaatggtcttt

SEQ ID NO: 1924706 - DNA, 15 bp, Homo sapiens
tgcaaatggtctttc

SEQ ID NO: 1924707 - DNA, 15 bp, Homo sapiens
gcaaatggtctttca

SEQ ID NO: 1924708 - DNA, 15 bp, Homo sapiens
caaatggtctttcaa

SEQ ID NO: 1924709 - DNA, 15 bp, Homo sapiens
aaatggtctttcaaa

SEQ ID NO: 1924710 - DNA, 15 bp, Homo sapiens
aatggtctttcaaaa

SEQ ID NO: 1924711 - DNA, 15 bp, Homo sapiens
atggtctttcaaaat

SEQ ID NO: 1924712 - DNA, 15 bp, Homo sapiens
tggtctttcaaaata

SEQ ID NO: 1924713 - DNA, 15 bp, Homo sapiens
ggtctttcaaaatat

SEQ ID NO: 1924714 - DNA, 15 bp, Homo sapiens
gtctttcaaaatatc

SEQ ID NO: 1924715 - DNA, 15 bp, Homo sapiens
ctttcaaaatatctg

SEQ ID NO: 1924716 - DNA, 15 bp, Homo sapiens
tttcaaaatatctgc

SEQ ID NO: 1924717 - DNA, 15 bp, Homo sapiens
ttcaaaatatctgcc

SEQ ID NO: 1924718 - DNA, 15 bp, Homo sapiens
tcaaaatatctgcct

SEQ ID NO: 1924719 - DNA, 15 bp, Homo sapiens
caaaatatctgcctt

SEQ ID NO: 1924720 - DNA, 15 bp, Homo sapiens
aaaatatctgccttc

SEQ ID NO: 1924721 - DNA, 15 bp, Homo sapiens
aaatatctgccttcc

SEQ ID NO: 1924722 - DNA, 15 bp, Homo sapiens
aatatctgccttcct

SEQ ID NO: 1924723 - DNA, 15 bp, Homo sapiens
atatctgccttcctc

SEQ ID NO: 1924724 - DNA, 15 bp, Homo sapiens
tatctgccttcctct

SEQ ID NO: 1924725 - DNA, 15 bp, Homo sapiens
atctgccttcctctc

SEQ ID NO: 1924726 - DNA, 15 bp, Homo sapiens
tctgccttcctctca

SEQ ID NO: 1924727 - DNA, 15 bp, Homo sapiens
ctgccttcctctcat

SEQ ID NO: 1924728 - DNA, 15 bp, Homo sapiens
tgccttcctctcatt

SEQ ID NO: 1924729 - DNA, 15 bp, Homo sapiens
gccttcctctcattc

SEQ ID NO: 1924730 - DNA, 15 bp, Homo sapiens
ccttcctctcattct

SEQ ID NO: 1924731 - DNA, 15 bp, Homo sapiens
cttcctctcattcta

SEQ ID NO: 1924732 - DNA, 15 bp, Homo sapiens
ttcctctcattctac

SEQ ID NO: 1924733 - DNA, 15 bp, Homo sapiens
tcctctcattctacc

SEQ ID NO: 1924734 - DNA, 15 bp, Homo sapiens
cctctcattctacca

SEQ ID NO: 1924735 - DNA, 15 bp, Homo sapiens
ctctcattctaccag

SEQ ID NO: 1924736 - DNA, 15 bp, Homo sapiens
tctcattctaccaga

SEQ ID NO: 1924737 - DNA, 15 bp, Homo sapiens
ctcattctaccagat

SEQ ID NO: 1924738 - DNA, 15 bp, Homo sapiens
tcattctaccagata

SEQ ID NO: 1924739 - DNA, 15 bp, Homo sapiens
cattctaccagatat

SEQ ID NO: 1924740 - DNA, 15 bp, Homo sapiens
attctaccagatatt

SEQ ID NO: 1924741 - DNA, 15 bp, Homo sapiens
ttctaccagatattg

SEQ ID NO: 1924742 - DNA, 15 bp, Homo sapiens
tctaccagatattgc

SEQ ID NO: 1924743 - DNA, 15 bp, Homo sapiens
ctaccagatattgcc

SEQ ID NO: 1924744 - DNA, 15 bp, Homo sapiens
taccagatattgcct

SEQ ID NO: 1924745 - DNA, 15 bp, Homo sapiens
accagatattgcctt

SEQ ID NO: 1924746 - DNA, 15 bp, Homo sapiens
ccagatattgccttt

SEQ ID NO: 1924747 - DNA, 15 bp, Homo sapiens
cagatattgcctttt

SEQ ID NO: 1924748 - DNA, 15 bp, Homo sapiens
agatattgccttttc

SEQ ID NO: 1924749 - DNA, 15 bp, Homo sapiens
gatattgccttttct

SEQ ID NO: 1924750 - DNA, 15 bp, Homo sapiens
atattgccttttctt

SEQ ID NO: 1924751 - DNA, 15 bp, Homo sapiens
tattgccttttcttc

SEQ ID NO: 1924752 - DNA, 15 bp, Homo sapiens
attgccttttcttct

SEQ ID NO: 1924753 - DNA, 15 bp, Homo sapiens
ttgccttttcttctg

SEQ ID NO: 1924754 - DNA, 15 bp, Homo sapiens
tgccttttcttctgg

SEQ ID NO: 1924755 - DNA, 15 bp, Homo sapiens
gccttttcttctgga

SEQ ID NO: 1924756 - DNA, 15 bp, Homo sapiens
ccttttcttctggaa

SEQ ID NO: 1924757 - DNA, 15 bp, Homo sapiens
cttttcttctggaac

SEQ ID NO: 1924758 - DNA, 15 bp, Homo sapiens
ttttcttctggaact

SEQ ID NO: 1924759 - DNA, 15 bp, Homo sapiens
tttcttctggaactg

SEQ ID NO: 1924760 - DNA, 15 bp, Homo sapiens
ttcttctggaactgt

SEQ ID NO: 1924761 - DNA, 15 bp, Homo sapiens
tcttctggaactgtc

SEQ ID NO: 1924762 - DNA, 15 bp, Homo sapiens
cttctggaactgtct

SEQ ID NO: 1924763 - DNA, 15 bp, Homo sapiens
ttctggaactgtctg

SEQ ID NO: 1924764 - DNA, 15 bp, Homo sapiens
tctggaactgtctgg

SEQ ID NO: 1924765 - DNA, 15 bp, Homo sapiens
ctggaactgtctggg

SEQ ID NO: 1924766 - DNA, 15 bp, Homo sapiens
tggaactgtctgggt

SEQ ID NO: 1924767 - DNA, 15 bp, Homo sapiens
ggaactgtctgggtc

SEQ ID NO: 1924768 - DNA, 15 bp, Homo sapiens
gaactgtctgggtct

SEQ ID NO: 1924769 - DNA, 15 bp, Homo sapiens
aactgtctgggtctt

SEQ ID NO: 1924770 - DNA, 15 bp, Homo sapiens
actgtctgggtcttt

SEQ ID NO: 1924771 - DNA, 15 bp, Homo sapiens
ctgtctgggtctttc

SEQ ID NO: 1924772 - DNA, 15 bp, Homo sapiens
tgtctgggtctttcc

SEQ ID NO: 1924773 - DNA, 15 bp, Homo sapiens
gtctgggtctttcca

SEQ ID NO: 1924774 - DNA, 15 bp, Homo sapiens
tctgggtctttccag

SEQ ID NO: 1924775 - DNA, 15 bp, Homo sapiens
ctgggtctttccagc

SEQ ID NO: 1924776 - DNA, 15 bp, Homo sapiens
tgggtctttccagct

SEQ ID NO: 1924777 - DNA, 15 bp, Homo sapiens
gggtctttccagctt

SEQ ID NO: 1924778 - DNA, 15 bp, Homo sapiens
ggtctttccagcttc

SEQ ID NO: 1924779 - DNA, 15 bp, Homo sapiens
gtctttccagcttca

SEQ ID NO: 1924780 - DNA, 15 bp, Homo sapiens
tctttccagcttcag

SEQ ID NO: 1924781 - DNA, 15 bp, Homo sapiens
ctttccagcttcagg

SEQ ID NO: 1924782 - DNA, 15 bp, Homo sapiens
tttccagcttcagga

SEQ ID NO: 1924783 - DNA, 15 bp, Homo sapiens
ttccagcttcaggaa

SEQ ID NO: 1924784 - DNA, 15 bp, Homo sapiens
tccagcttcaggaag

SEQ ID NO: 1924785 - DNA, 15 bp, Homo sapiens
ccagcttcaggaagc

SEQ ID NO: 1924786 - DNA, 15 bp, Homo sapiens
cagcttcaggaagct

SEQ ID NO: 1924787 - DNA, 15 bp, Homo sapiens
agcttcaggaagctt

SEQ ID NO: 1924788 - DNA, 15 bp, Homo sapiens
gcttcaggaagctta

SEQ ID NO: 1924789 - DNA, 15 bp, Homo sapiens
cttcaggaagcttat

SEQ ID NO: 1924790 - DNA, 15 bp, Homo sapiens
ttcaggaagcttatt

SEQ ID NO: 1924791 - DNA, 15 bp, Homo sapiens
tcaggaagcttattt

SEQ ID NO: 1924792 - DNA, 15 bp, Homo sapiens
caggaagcttatttc

SEQ ID NO: 1924793 - DNA, 15 bp, Homo sapiens
aggaagcttatttct

SEQ ID NO: 1924794 - DNA, 15 bp, Homo sapiens
ggaagcttatttctg

SEQ ID NO: 1924795 - DNA, 15 bp, Homo sapiens
gaagcttatttctgt

SEQ ID NO: 1924796 - DNA, 15 bp, Homo sapiens
aagcttatttctgtc

SEQ ID NO: 1924797 - DNA, 15 bp, Homo sapiens
agcttatttctgtcc

SEQ ID NO: 1924798 - DNA, 15 bp, Homo sapiens
gcttatttctgtcct

SEQ ID NO: 1924799 - DNA, 15 bp, Homo sapiens
cttatttctgtcctg

SEQ ID NO: 1924800 - DNA, 15 bp, Homo sapiens
ttatttctgtcctgt

SEQ ID NO: 1924801 - DNA, 15 bp, Homo sapiens
tatttctgtcctgtc

SEQ ID NO: 1924802 - DNA, 15 bp, Homo sapiens
atttctgtcctgtct

SEQ ID NO: 1924803 - DNA, 15 bp, Homo sapiens
tttctgtcctgtctc

SEQ ID NO: 1924804 - DNA, 15 bp, Homo sapiens
ttctgtcctgtctct

SEQ ID NO: 1924805 - DNA, 15 bp, Homo sapiens
tctgtcctgtctctc

SEQ ID NO: 1924806 - DNA, 15 bp, Homo sapiens
ctgtcctgtctctcc

SEQ ID NO: 1924807 - DNA, 15 bp, Homo sapiens
tgtcctgtctctcct

SEQ ID NO: 1924808 - DNA, 15 bp, Homo sapiens
gtcctgtctctcctt

SEQ ID NO: 1924809 - DNA, 15 bp, Homo sapiens
tcctgtctctccttc

SEQ ID NO: 1924810 - DNA, 15 bp, Homo sapiens
cctgtctctccttca

SEQ ID NO: 1924811 - DNA, 15 bp, Homo sapiens
ctgtctctccttcac

SEQ ID NO: 1924812 - DNA, 15 bp, Homo sapiens
tgtctctccttcact

SEQ ID NO: 1924813 - DNA, 15 bp, Homo sapiens
gtctctccttcactg

SEQ ID NO: 1924814 - DNA, 15 bp, Homo sapiens
tctctccttcactgt

SEQ ID NO: 1924815 - DNA, 15 bp, Homo sapiens
ctctccttcactgtc

SEQ ID NO: 1924816 - DNA, 15 bp, Homo sapiens
tctccttcactgtct

SEQ ID NO: 1924817 - DNA, 15 bp, Homo sapiens
ctccttcactgtctt

SEQ ID NO: 1924818 - DNA, 15 bp, Homo sapiens
tccttcactgtcttc

SEQ ID NO: 1924819 - DNA, 15 bp, Homo sapiens
ccttcactgtcttct

SEQ ID NO: 1924820 - DNA, 15 bp, Homo sapiens
cttcactgtcttctg

SEQ ID NO: 1924821 - DNA, 15 bp, Homo sapiens
ttcactgtcttctgg

SEQ ID NO: 1924822 - DNA, 15 bp, Homo sapiens
tcactgtcttctggc

SEQ ID NO: 1924823 - DNA, 15 bp, Homo sapiens
cactgtcttctggca

SEQ ID NO: 1924824 - DNA, 15 bp, Homo sapiens
actgtcttctggcac

SEQ ID NO: 1924825 - DNA, 15 bp, Homo sapiens
ctgtcttctggcact

SEQ ID NO: 1924826 - DNA, 15 bp, Homo sapiens
tgtcttctggcactc

SEQ ID NO: 1924827 - DNA, 15 bp, Homo sapiens
gtcttctggcactca

SEQ ID NO: 1924828 - DNA, 15 bp, Homo sapiens
tcttctggcactcat

SEQ ID NO: 1924829 - DNA, 15 bp, Homo sapiens
cttctggcactcatg

SEQ ID NO: 1924830 - DNA, 15 bp, Homo sapiens
ttctggcactcatgg

SEQ ID NO: 1924831 - DNA, 15 bp, Homo sapiens
tctggcactcatggg

SEQ ID NO: 1924832 - DNA, 15 bp, Homo sapiens
ctggcactcatgggc

SEQ ID NO: 1924833 - DNA, 15 bp, Homo sapiens
tggcactcatgggcc

SEQ ID NO: 1924834 - DNA, 15 bp, Homo sapiens
ggcactcatgggcca

SEQ ID NO: 1924835 - DNA, 15 bp, Homo sapiens
gcactcatgggccat

SEQ ID NO: 1924836 - DNA, 15 bp, Homo sapiens
cactcatgggccatg

SEQ ID NO: 1924837 - DNA, 15 bp, Homo sapiens
actcatgggccatgc

SEQ ID NO: 1924838 - DNA, 15 bp, Homo sapiens
ctcatgggccatgcc

SEQ ID NO: 1924839 - DNA, 15 bp, Homo sapiens
tcatgggccatgcca

SEQ ID NO: 1924840 - DNA, 15 bp, Homo sapiens
catgggccatgccac

SEQ ID NO: 1924841 - DNA, 15 bp, Homo sapiens
atgggccatgccacc

SEQ ID NO: 1924842 - DNA, 15 bp, Homo sapiens
tgggccatgccacca

SEQ ID NO: 1924843 - DNA, 15 bp, Homo sapiens
gggccatgccaccaa

SEQ ID NO: 1924844 - DNA, 15 bp, Homo sapiens
ggccatgccaccaat

SEQ ID NO: 1924845 - DNA, 15 bp, Homo sapiens
gccatgccaccaatt

SEQ ID NO: 1924846 - DNA, 15 bp, Homo sapiens
ccatgccaccaatta

SEQ ID NO: 1924847 - DNA, 15 bp, Homo sapiens
catgccaccaattaa

SEQ ID NO: 1924848 - DNA, 15 bp, Homo sapiens
atgccaccaattaaa

SEQ ID NO: 1924849 - DNA, 15 bp, Homo sapiens
tgccaccaattaaaa

SEQ ID NO: 1924850 - DNA, 15 bp, Homo sapiens
gccaccaattaaaat

SEQ ID NO: 1924851 - DNA, 15 bp, Homo sapiens
ccaccaattaaaata

SEQ ID NO: 1924852 - DNA, 15 bp, Homo sapiens
caccaattaaaataa

SEQ ID NO: 1924853 - DNA, 15 bp, Homo sapiens
accaattaaaataat

SEQ ID NO: 1924854 - DNA, 15 bp, Homo sapiens
ccaattaaaataata

SEQ ID NO: 1924855 - DNA, 15 bp, Homo sapiens
caattaaaataatac

SEQ ID NO: 1924856 - DNA, 15 bp, Homo sapiens
aattaaaataataca

SEQ ID NO: 1924857 - DNA, 15 bp, Homo sapiens
attaaaataatacat

SEQ ID NO: 1924858 - DNA, 15 bp, Homo sapiens
ttaaaataatacatg

SEQ ID NO: 1924859 - DNA, 15 bp, Homo sapiens
taaaataatacatgc

SEQ ID NO: 1924860 - DNA, 15 bp, Homo sapiens
aaaataatacatgct

SEQ ID NO: 1924861 - DNA, 15 bp, Homo sapiens
aaataatacatgctg

SEQ ID NO: 1924862 - DNA, 15 bp, Homo sapiens
aataatacatgctgc

SEQ ID NO: 1924863 - DNA, 15 bp, Homo sapiens
ataatacatgctgct

SEQ ID NO: 1924864 - DNA, 15 bp, Homo sapiens
taatacatgctgctc

SEQ ID NO: 1924865 - DNA, 15 bp, Homo sapiens
aatacatgctgctct

SEQ ID NO: 1924866 - DNA, 15 bp, Homo sapiens
atacatgctgctctg

SEQ ID NO: 1924867 - DNA, 15 bp, Homo sapiens
tacatgctgctctgt

SEQ ID NO: 1924868 - DNA, 15 bp, Homo sapiens
acatgctgctctgta

SEQ ID NO: 1924869 - DNA, 15 bp, Homo sapiens
catgctgctctgtat

SEQ ID NO: 1924870 - DNA, 15 bp, Homo sapiens
atgctgctctgtatt

SEQ ID NO: 1924871 - DNA, 15 bp, Homo sapiens
tgctgctctgtattc

SEQ ID NO: 1924872 - DNA, 15 bp, Homo sapiens
gctgctctgtattct

SEQ ID NO: 1924873 - DNA, 15 bp, Homo sapiens
ctgctctgtattctt

SEQ ID NO: 1924874 - DNA, 15 bp, Homo sapiens
tgctctgtattcttt

SEQ ID NO: 1924875 - DNA, 15 bp, Homo sapiens
gctctgtattctttt

SEQ ID NO: 1924876 - DNA, 15 bp, Homo sapiens
ctctgtattcttttg

SEQ ID NO: 1924877 - DNA, 15 bp, Homo sapiens
tctgtattcttttga

SEQ ID NO: 1924878 - DNA, 15 bp, Homo sapiens
ctgtattcttttgaa

SEQ ID NO: 1924879 - DNA, 15 bp, Homo sapiens
tgtattcttttgaat

SEQ ID NO: 1924880 - DNA, 15 bp, Homo sapiens
gtattcttttgaatt

SEQ ID NO: 1924881 - DNA, 15 bp, Homo sapiens
tattcttttgaatta

SEQ ID NO: 1924882 - DNA, 15 bp, Homo sapiens
attcttttgaattaa

SEQ ID NO: 1924883 - DNA, 15 bp, Homo sapiens
ttcttttgaattaat

SEQ ID NO: 1924884 - DNA, 15 bp, Homo sapiens
tcttttgaattaata

SEQ ID NO: 1924885 - DNA, 15 bp, Homo sapiens
cttttgaattaataa

SEQ ID NO: 1924886 - DNA, 15 bp, Homo sapiens
ttttgaattaataaa

SEQ ID NO: 1924887 - DNA, 15 bp, Homo sapiens
tttgaattaataaaa

SEQ ID NO: 1924888 - DNA, 15 bp, Homo sapiens
ttgaattaataaaaa

SEQ ID NO: 1924889 - DNA, 15 bp, Homo sapiens
tgaattaataaaaaa

SEQ ID NO: 1924890 - DNA, 15 bp, Homo sapiens
gaattaataaaaaaa

SEQ ID NO: 1924891 - DNA, 15 bp, Homo sapiens
aattaataaaaaaaa

SEQ ID NO: 1924892 - DNA, 15 bp, Homo sapiens
attaataaaaaaaat

SEQ ID NO: 1924893 - DNA, 15 bp, Homo sapiens
ttaataaaaaaaatt

SEQ ID NO: 1924894 - DNA, 15 bp, Homo sapiens
taataaaaaaaattt

SEQ ID NO: 1924895 - DNA, 15 bp, Homo sapiens
aataaaaaaaatttt

SEQ ID NO: 1924896 - DNA, 15 bp, Homo sapiens
ataaaaaaaatttta

SEQ ID NO: 1924897 - DNA, 15 bp, Homo sapiens
taaaaaaaattttat

SEQ ID NO: 1924898 - DNA, 15 bp, Homo sapiens
aaaaaaaattttatt

SEQ ID NO: 1924899 - DNA, 15 bp, Homo sapiens
aaaaaaattttattt

SEQ ID NO: 1924900 - DNA, 15 bp, Homo sapiens
aaaaaattttatttt

SEQ ID NO: 1924901 - DNA, 15 bp, Homo sapiens
aaaaattttatttta

SEQ ID NO: 1924902 - DNA, 15 bp, Homo sapiens
aaattttattttatt

SEQ ID NO: 1924903 - DNA, 15 bp, Homo sapiens
aattttattttattt

SEQ ID NO: 1924904 - DNA, 15 bp, Homo sapiens
tattttattttattt

SEQ ID NO: 1924905 - DNA, 15 bp, Homo sapiens
ttttattttattttg

SEQ ID NO: 1924906 - DNA, 15 bp, Homo sapiens
tttattttattttga

SEQ ID NO: 1924907 - DNA, 15 bp, Homo sapiens
ttattttattttgag

SEQ ID NO: 1924908 - DNA, 15 bp, Homo sapiens
tattttattttgaga

SEQ ID NO: 1924909 - DNA, 15 bp, Homo sapiens
attttattttgagac

SEQ ID NO: 1924910 - DNA, 15 bp, Homo sapiens
ttttattttgagacg

SEQ ID NO: 1924911 - DNA, 15 bp, Homo sapiens
ttattttgagacggg

SEQ ID NO: 1924912 - DNA, 15 bp, Homo sapiens
tattttgagacgggg

SEQ ID NO: 1924913 - DNA, 15 bp, Homo sapiens
attttgagacggggt

SEQ ID NO: 1924914 - DNA, 15 bp, Homo sapiens
ttttgagacggggtt

SEQ ID NO: 1924915 - DNA, 15 bp, Homo sapiens
tttgagacggggttt

SEQ ID NO: 1924916 - DNA, 15 bp, Homo sapiens
ttgagacggggtttt

SEQ ID NO: 1924917 - DNA, 15 bp, Homo sapiens
tgagacggggttttg

SEQ ID NO: 1924918 - DNA, 15 bp, Homo sapiens
agacggggttttgct

SEQ ID NO: 1924919 - DNA, 15 bp, Homo sapiens
gacggggttttgctc

SEQ ID NO: 1924920 - DNA, 15 bp, Homo sapiens
acggggttttgctct

SEQ ID NO: 1924921 - DNA, 15 bp, Homo sapiens
cggggttttgctctt

SEQ ID NO: 1924922 - DNA, 15 bp, Homo sapiens
ggggttttgctcttg

SEQ ID NO: 1924923 - DNA, 15 bp, Homo sapiens
gggttttgctcttgt

SEQ ID NO: 1924924 - DNA, 15 bp, Homo sapiens
ggttttgctcttgtt

SEQ ID NO: 1924925 - DNA, 15 bp, Homo sapiens
cttgttgcccaggca

SEQ ID NO: 1924926 - DNA, 15 bp, Homo sapiens
ttgttgcccaggcaa

SEQ ID NO: 1924927 - DNA, 15 bp, Homo sapiens
tgttgcccaggcaat

SEQ ID NO: 1924928 - DNA, 15 bp, Homo sapiens
gttgcccaggcaatg

SEQ ID NO: 1924929 - DNA, 15 bp, Homo sapiens
ttgcccaggcaatgg

SEQ ID NO: 1924930 - DNA, 15 bp, Homo sapiens
tgcccaggcaatggc

SEQ ID NO: 1924931 - DNA, 15 bp, Homo sapiens
gcccaggcaatggcg

SEQ ID NO: 1924932 - DNA, 15 bp, Homo sapiens
cccaggcaatggcgt

SEQ ID NO: 1924933 - DNA, 15 bp, Homo sapiens
ccaggcaatggcgtg

SEQ ID NO: 1924934 - DNA, 15 bp, Homo sapiens
caggcaatggcgtga

SEQ ID NO: 1924935 - DNA, 15 bp, Homo sapiens
aggcaatggcgtgat

SEQ ID NO: 1924936 - DNA, 15 bp, Homo sapiens
ggcaatggcgtgatc

SEQ ID NO: 1924937 - DNA, 15 bp, Homo sapiens
gcaatggcgtgatct

SEQ ID NO: 1924938 - DNA, 15 bp, Homo sapiens
caatggcgtgatctc

SEQ ID NO: 1924939 - DNA, 15 bp, Homo sapiens
aatggcgtgatctca

SEQ ID NO: 1924940 - DNA, 15 bp, Homo sapiens
atggcgtgatctcag

SEQ ID NO: 1924941 - DNA, 15 bp, Homo sapiens
ctcactgcaacctcc

SEQ ID NO: 1924942 - DNA, 15 bp, Homo sapiens
ttacaggcatgcgct

SEQ ID NO: 1924943 - DNA, 15 bp, Homo sapiens
tacaggcatgcgcta

SEQ ID NO: 1924944 - DNA, 15 bp, Homo sapiens
acaggcatgcgctat

SEQ ID NO: 1924945 - DNA, 15 bp, Homo sapiens
caggcatgcgctatc

SEQ ID NO: 1924946 - DNA, 15 bp, Homo sapiens
aggcatgcgctatca

SEQ ID NO: 1924947 - DNA, 15 bp, Homo sapiens
ggcatgcgctatcac

SEQ ID NO: 1924948 - DNA, 15 bp, Homo sapiens
gcatgcgctatcaca

SEQ ID NO: 1924949 - DNA, 15 bp, Homo sapiens
catgcgctatcacac

SEQ ID NO: 1924950 - DNA, 15 bp, Homo sapiens
atgcgctatcacacc

SEQ ID NO: 1924951 - DNA, 15 bp, Homo sapiens
tgcgctatcacaccc

SEQ ID NO: 1924952 - DNA, 15 bp, Homo sapiens
gcgctatcacacccg

SEQ ID NO: 1924953 - DNA, 15 bp, Homo sapiens
cgctatcacacccgg

SEQ ID NO: 1924954 - DNA, 15 bp, Homo sapiens
gctatcacacccggc

SEQ ID NO: 1924955 - DNA, 15 bp, Homo sapiens
ctatcacacccggct

SEQ ID NO: 1924956 - DNA, 15 bp, Homo sapiens
tatcacacccggcta

SEQ ID NO: 1924957 - DNA, 15 bp, Homo sapiens
atcacacccggctaa

SEQ ID NO: 1924958 - DNA, 15 bp, Homo sapiens
tcacacccggctaat

SEQ ID NO: 1924959 - DNA, 15 bp, Homo sapiens
tagagacgaggtttt

SEQ ID NO: 1924960 - DNA, 15 bp, Homo sapiens
agagacgaggtttta

SEQ ID NO: 1924961 - DNA, 15 bp, Homo sapiens
gagacgaggttttac

SEQ ID NO: 1924962 - DNA, 15 bp, Homo sapiens
agacgaggttttacc

SEQ ID NO: 1924963 - DNA, 15 bp, Homo sapiens
gacgaggttttacca

SEQ ID NO: 1924964 - DNA, 15 bp, Homo sapiens
acgaggttttaccat

SEQ ID NO: 1924965 - DNA, 15 bp, Homo sapiens
cgaggttttaccatg

SEQ ID NO: 1924966 - DNA, 15 bp, Homo sapiens
gaggttttaccatgt

SEQ ID NO: 1924967 - DNA, 15 bp, Homo sapiens
aggttttaccatgtt

SEQ ID NO: 1924968 - DNA, 15 bp, Homo sapiens
ttaccatgttggcca

SEQ ID NO: 1924969 - DNA, 15 bp, Homo sapiens
taccatgttggccag

SEQ ID NO: 1924970 - DNA, 15 bp, Homo sapiens
gccaggctggtctcc

SEQ ID NO: 1924971 - DNA, 15 bp, Homo sapiens
tggtctccaactcct

SEQ ID NO: 1924972 - DNA, 15 bp, Homo sapiens
ggtctccaactcctg

SEQ ID NO: 1924973 - DNA, 15 bp, Homo sapiens
gtctccaactcctga

SEQ ID NO: 1924974 - DNA, 15 bp, Homo sapiens
tctccaactcctgac

SEQ ID NO: 1924975 - DNA, 15 bp, Homo sapiens
ctccaactcctgacc

SEQ ID NO: 1924976 - DNA, 15 bp, Homo sapiens
tccaactcctgacct

SEQ ID NO: 1924977 - DNA, 15 bp, Homo sapiens
ccaactcctgacctc

SEQ ID NO: 1924978 - DNA, 15 bp, Homo sapiens
caactcctgacctca

SEQ ID NO: 1924979 - DNA, 15 bp, Homo sapiens
acctcaagtgatcta

SEQ ID NO: 1924980 - DNA, 15 bp, Homo sapiens
cctcaagtgatctac

SEQ ID NO: 1924981 - DNA, 15 bp, Homo sapiens
ctcaagtgatctacc

SEQ ID NO: 1924982 - DNA, 15 bp, Homo sapiens
tcaagtgatctaccc

SEQ ID NO: 1924983 - DNA, 15 bp, Homo sapiens
caagtgatctaccca

SEQ ID NO: 1924984 - DNA, 15 bp, Homo sapiens
aagtgatctacccac

SEQ ID NO: 1924985 - DNA, 15 bp, Homo sapiens
agtgatctacccacc

SEQ ID NO: 1924986 - DNA, 15 bp, Homo sapiens
gtgatctacccacct

SEQ ID NO: 1924987 - DNA, 15 bp, Homo sapiens
tgatctacccacctc

SEQ ID NO: 1924988 - DNA, 15 bp, Homo sapiens
gatctacccacctcg

SEQ ID NO: 1924989 - DNA, 15 bp, Homo sapiens
atctacccacctcgg

SEQ ID NO: 1924990 - DNA, 15 bp, Homo sapiens
tctacccacctcggc

SEQ ID NO: 1924991 - DNA, 15 bp, Homo sapiens
ctacccacctcggcc

SEQ ID NO: 1924992 - DNA, 15 bp, Homo sapiens
tacccacctcggcct

SEQ ID NO: 1924993 - DNA, 15 bp, Homo sapiens
gattacaggcatggg

SEQ ID NO: 1924994 - DNA, 15 bp, Homo sapiens
attacaggcatgggc

SEQ ID NO: 1924995 - DNA, 15 bp, Homo sapiens
ttacaggcatgggcc

SEQ ID NO: 1924996 - DNA, 15 bp, Homo sapiens
aggcatgggccacct

SEQ ID NO: 1924997 - DNA, 15 bp, Homo sapiens
ggcatgggccacctc

SEQ ID NO: 1924998 - DNA, 15 bp, Homo sapiens
gcatgggccacctcg

SEQ ID NO: 1924999 - DNA, 15 bp, Homo sapiens
catgggccacctcgc

SEQ ID NO: 1925000 - DNA, 15 bp, Homo sapiens
atgggccacctcgct

SEQ ID NO: 1925001 - DNA, 15 bp, Homo sapiens
tgggccacctcgctc

SEQ ID NO: 1925002 - DNA, 15 bp, Homo sapiens
gggccacctcgctcg

SEQ ID NO: 1925003 - DNA, 15 bp, Homo sapiens
ggccacctcgctcgg

SEQ ID NO: 1925004 - DNA, 15 bp, Homo sapiens
gccacctcgctcggc

SEQ ID NO: 1925005 - DNA, 15 bp, Homo sapiens
ccacctcgctcggcc

SEQ ID NO: 1925006 - DNA, 15 bp, Homo sapiens
cacctcgctcggccg

SEQ ID NO: 1925007 - DNA, 15 bp, Homo sapiens
acctcgctcggccga

SEQ ID NO: 1925008 - DNA, 15 bp, Homo sapiens
cctcgctcggccgaa

SEQ ID NO: 1925009 - DNA, 15 bp, Homo sapiens
ctcgctcggccgaat

SEQ ID NO: 1925010 - DNA, 15 bp, Homo sapiens
tcgctcggccgaata

SEQ ID NO: 1925011 - DNA, 15 bp, Homo sapiens
cgctcggccgaataa

SEQ ID NO: 1925012 - DNA, 15 bp, Homo sapiens
gctcggccgaataaa

SEQ ID NO: 1925013 - DNA, 15 bp, Homo sapiens
ctcggccgaataaaa

SEQ ID NO: 1925014 - DNA, 15 bp, Homo sapiens
tcggccgaataaaaa

SEQ ID NO: 1925015 - DNA, 15 bp, Homo sapiens
cggccgaataaaaat

SEQ ID NO: 1925016 - DNA, 15 bp, Homo sapiens
ggccgaataaaaata

SEQ ID NO: 1925017 - DNA, 15 bp, Homo sapiens
gccgaataaaaatat

SEQ ID NO: 1925018 - DNA, 15 bp, Homo sapiens
ccgaataaaaatatt

SEQ ID NO: 1925019 - DNA, 15 bp, Homo sapiens
cgaataaaaatattt

SEQ ID NO: 1925020 - DNA, 15 bp, Homo sapiens
gaataaaaatatttt

SEQ ID NO: 1925021 - DNA, 15 bp, Homo sapiens
aataaaaatatttta

SEQ ID NO: 1925022 - DNA, 15 bp, Homo sapiens
ataaaaatattttaa

SEQ ID NO: 1925023 - DNA, 15 bp, Homo sapiens
taaaaatattttaaa

SEQ ID NO: 1925024 - DNA, 15 bp, Homo sapiens
aaaaatattttaaat

SEQ ID NO: 1925025 - DNA, 15 bp, Homo sapiens
aaaatattttaaatt

SEQ ID NO: 1925026 - DNA, 15 bp, Homo sapiens
aaatattttaaattt

SEQ ID NO: 1925027 - DNA, 15 bp, Homo sapiens
aatattttaaatttt

SEQ ID NO: 1925028 - DNA, 15 bp, Homo sapiens
attttaaattttata

SEQ ID NO: 1925029 - DNA, 15 bp, Homo sapiens
ttttaaattttataa

SEQ ID NO: 1925030 - DNA, 15 bp, Homo sapiens
tttaaattttataaa

SEQ ID NO: 1925031 - DNA, 15 bp, Homo sapiens
ttaaattttataaat

SEQ ID NO: 1925032 - DNA, 15 bp, Homo sapiens
taaattttataaatg

SEQ ID NO: 1925033 - DNA, 15 bp, Homo sapiens
aaattttataaatga

SEQ ID NO: 1925034 - DNA, 15 bp, Homo sapiens
aattttataaatgat

SEQ ID NO: 1925035 - DNA, 15 bp, Homo sapiens
attttataaatgatt

SEQ ID NO: 1925036 - DNA, 15 bp, Homo sapiens
ttttataaatgattt

SEQ ID NO: 1925037 - DNA, 15 bp, Homo sapiens
tttataaatgatttg

SEQ ID NO: 1925038 - DNA, 15 bp, Homo sapiens
ttataaatgatttga

SEQ ID NO: 1925039 - DNA, 15 bp, Homo sapiens
tataaatgatttgat

SEQ ID NO: 1925040 - DNA, 15 bp, Homo sapiens
ataaatgatttgatg

SEQ ID NO: 1925041 - DNA, 15 bp, Homo sapiens
taaatgatttgatga

SEQ ID NO: 1925042 - DNA, 15 bp, Homo sapiens
aaatgatttgatgat

SEQ ID NO: 1925043 - DNA, 15 bp, Homo sapiens
aatgatttgatgatg

SEQ ID NO: 1925044 - DNA, 15 bp, Homo sapiens
atgatttgatgatgc

SEQ ID NO: 1925045 - DNA, 15 bp, Homo sapiens
tgatttgatgatgca

SEQ ID NO: 1925046 - DNA, 15 bp, Homo sapiens
gatttgatgatgcag

SEQ ID NO: 1925047 - DNA, 15 bp, Homo sapiens
atttgatgatgcagc

SEQ ID NO: 1925048 - DNA, 15 bp, Homo sapiens
tttgatgatgcagcc

SEQ ID NO: 1925049 - DNA, 15 bp, Homo sapiens
ttgatgatgcagccg

SEQ ID NO: 1925050 - DNA, 15 bp, Homo sapiens
tgatgatgcagccga

SEQ ID NO: 1925051 - DNA, 15 bp, Homo sapiens
gatgatgcagccgac

SEQ ID NO: 1925052 - DNA, 15 bp, Homo sapiens
atgatgcagccgact

SEQ ID NO: 1925053 - DNA, 15 bp, Homo sapiens
tgatgcagccgacta

SEQ ID NO: 1925054 - DNA, 15 bp, Homo sapiens
gatgcagccgactac

SEQ ID NO: 1925055 - DNA, 15 bp, Homo sapiens
atgcagccgactaca

SEQ ID NO: 1925056 - DNA, 15 bp, Homo sapiens
tgcagccgactacaa

SEQ ID NO: 1925057 - DNA, 15 bp, Homo sapiens
gcagccgactacaaa

SEQ ID NO: 1925058 - DNA, 15 bp, Homo sapiens
cagccgactacaaaa

SEQ ID NO: 1925059 - DNA, 15 bp, Homo sapiens
agccgactacaaaaa

SEQ ID NO: 1925060 - DNA, 15 bp, Homo sapiens
gccgactacaaaaat

SEQ ID NO: 1925061 - DNA, 15 bp, Homo sapiens
ccgactacaaaaatg

SEQ ID NO: 1925062 - DNA, 15 bp, Homo sapiens
cgactacaaaaatga

SEQ ID NO: 1925063 - DNA, 15 bp, Homo sapiens
gactacaaaaatgac

SEQ ID NO: 1925064 - DNA, 15 bp, Homo sapiens
actacaaaaatgaca

SEQ ID NO: 1925065 - DNA, 15 bp, Homo sapiens
ctacaaaaatgacaa

SEQ ID NO: 1925066 - DNA, 15 bp, Homo sapiens
tacaaaaatgacaaa

SEQ ID NO: 1925067 - DNA, 15 bp, Homo sapiens
acaaaaatgacaaag

SEQ ID NO: 1925068 - DNA, 15 bp, Homo sapiens
caaaaatgacaaagt

SEQ ID NO: 1925069 - DNA, 15 bp, Homo sapiens
aaaaatgacaaagtt

SEQ ID NO: 1925070 - DNA, 15 bp, Homo sapiens
aaaatgacaaagtta

SEQ ID NO: 1925071 - DNA, 15 bp, Homo sapiens
aaatgacaaagttaa

SEQ ID NO: 1925072 - DNA, 15 bp, Homo sapiens
aatgacaaagttaat

SEQ ID NO: 1925073 - DNA, 15 bp, Homo sapiens
atgacaaagttaata

SEQ ID NO: 1925074 - DNA, 15 bp, Homo sapiens
tgacaaagttaataa

SEQ ID NO: 1925075 - DNA, 15 bp, Homo sapiens
gacaaagttaataaa

SEQ ID NO: 1925076 - DNA, 15 bp, Homo sapiens
acaaagttaataaaa

SEQ ID NO: 1925077 - DNA, 15 bp, Homo sapiens
caaagttaataaaaa

SEQ ID NO: 1925078 - DNA, 15 bp, Homo sapiens
aaagttaataaaaat

SEQ ID NO: 1925079 - DNA, 15 bp, Homo sapiens
aagttaataaaaata

SEQ ID NO: 1925080 - DNA, 15 bp, Homo sapiens
agttaataaaaataa

SEQ ID NO: 1925081 - DNA, 15 bp, Homo sapiens
gttaataaaaataaa

SEQ ID NO: 1925082 - DNA, 15 bp, Homo sapiens
ttaataaaaataaaa

SEQ ID NO: 1925083 - DNA, 15 bp, Homo sapiens
taataaaaataaaat

SEQ ID NO: 1925084 - DNA, 15 bp, Homo sapiens
aataaaaataaaatg

SEQ ID NO: 1925085 - DNA, 15 bp, Homo sapiens
ataaaaataaaatga

SEQ ID NO: 1925086 - DNA, 15 bp, Homo sapiens
taaaaataaaatgat

SEQ ID NO: 1925087 - DNA, 15 bp, Homo sapiens
aaaaataaaatgata

SEQ ID NO: 1925088 - DNA, 15 bp, Homo sapiens
aaaataaaatgatat

SEQ ID NO: 1925089 - DNA, 15 bp, Homo sapiens
aaataaaatgatatt

SEQ ID NO: 1925090 - DNA, 15 bp, Homo sapiens
aataaaatgatattg

SEQ ID NO: 1925091 - DNA, 15 bp, Homo sapiens
ataaaatgatattgt

SEQ ID NO: 1925092 - DNA, 15 bp, Homo sapiens
taaaatgatattgta

SEQ ID NO: 1925093 - DNA, 15 bp, Homo sapiens
aaaatgatattgtat

SEQ ID NO: 1925094 - DNA, 15 bp, Homo sapiens
aaatgatattgtata

SEQ ID NO: 1925095 - DNA, 15 bp, Homo sapiens
aatgatattgtataa

SEQ ID NO: 1925096 - DNA, 15 bp, Homo sapiens
atgatattgtataaa

SEQ ID NO: 1925097 - DNA, 15 bp, Homo sapiens
tgatattgtataaaa

SEQ ID NO: 1925098 - DNA, 15 bp, Homo sapiens
gatattgtataaaag

SEQ ID NO: 1925099 - DNA, 15 bp, Homo sapiens
atattgtataaaagg

SEQ ID NO: 1925100 - DNA, 15 bp, Homo sapiens
tattgtataaaagga

SEQ ID NO: 1925101 - DNA, 15 bp, Homo sapiens
attgtataaaaggag

SEQ ID NO: 1925102 - DNA, 15 bp, Homo sapiens
ttgtataaaaggagg

SEQ ID NO: 1925103 - DNA, 15 bp, Homo sapiens
tgtataaaaggaggc

SEQ ID NO: 1925104 - DNA, 15 bp, Homo sapiens
gtataaaaggaggca

SEQ ID NO: 1925105 - DNA, 15 bp, Homo sapiens
tataaaaggaggcat

SEQ ID NO: 1925106 - DNA, 15 bp, Homo sapiens
ataaaaggaggcatt

SEQ ID NO: 1925107 - DNA, 15 bp, Homo sapiens
taaaaggaggcattg

SEQ ID NO: 1925108 - DNA, 15 bp, Homo sapiens
aaaaggaggcattgc

SEQ ID NO: 1925109 - DNA, 15 bp, Homo sapiens
aaaggaggcattgcc

SEQ ID NO: 1925110 - DNA, 15 bp, Homo sapiens
aaggaggcattgccc

SEQ ID NO: 1925111 - DNA, 15 bp, Homo sapiens
aggaggcattgccca

SEQ ID NO: 1925112 - DNA, 15 bp, Homo sapiens
ggaggcattgcccac

SEQ ID NO: 1925113 - DNA, 15 bp, Homo sapiens
gaggcattgcccact

SEQ ID NO: 1925114 - DNA, 15 bp, Homo sapiens
aggcattgcccacta

SEQ ID NO: 1925115 - DNA, 15 bp, Homo sapiens
ggcattgcccactac

SEQ ID NO: 1925116 - DNA, 15 bp, Homo sapiens
gcattgcccactacc

SEQ ID NO: 1925117 - DNA, 15 bp, Homo sapiens
cattgcccactaccc

SEQ ID NO: 1925118 - DNA, 15 bp, Homo sapiens
attgcccactaccct

SEQ ID NO: 1925119 - DNA, 15 bp, Homo sapiens
ttgcccactaccctg

SEQ ID NO: 1925120 - DNA, 15 bp, Homo sapiens
tgcccactaccctgc

SEQ ID NO: 1925121 - DNA, 15 bp, Homo sapiens
gcccactaccctgca

SEQ ID NO: 1925122 - DNA, 15 bp, Homo sapiens
cccactaccctgcat

SEQ ID NO: 1925123 - DNA, 15 bp, Homo sapiens
ccactaccctgcata

SEQ ID NO: 1925124 - DNA, 15 bp, Homo sapiens
cactaccctgcatag

SEQ ID NO: 1925125 - DNA, 15 bp, Homo sapiens
actaccctgcataga

SEQ ID NO: 1925126 - DNA, 15 bp, Homo sapiens
ctaccctgcatagag

SEQ ID NO: 1925127 - DNA, 15 bp, Homo sapiens
taccctgcatagagt

SEQ ID NO: 1925128 - DNA, 15 bp, Homo sapiens
accctgcatagagtg

SEQ ID NO: 1925129 - DNA, 15 bp, Homo sapiens
ccctgcatagagtgg

SEQ ID NO: 1925130 - DNA, 15 bp, Homo sapiens
cctgcatagagtggg

SEQ ID NO: 1925131 - DNA, 15 bp, Homo sapiens
ctgcatagagtgggt

SEQ ID NO: 1925132 - DNA, 15 bp, Homo sapiens
tgcatagagtgggta

SEQ ID NO: 1925133 - DNA, 15 bp, Homo sapiens
gcatagagtgggtat

SEQ ID NO: 1925134 - DNA, 15 bp, Homo sapiens
catagagtgggtatt

SEQ ID NO: 1925135 - DNA, 15 bp, Homo sapiens
atagagtgggtattt

SEQ ID NO: 1925136 - DNA, 15 bp, Homo sapiens
tagagtgggtattta

SEQ ID NO: 1925137 - DNA, 15 bp, Homo sapiens
agagtgggtatttaa

SEQ ID NO: 1925138 - DNA, 15 bp, Homo sapiens
gagtgggtatttaat

SEQ ID NO: 1925139 - DNA, 15 bp, Homo sapiens
agtgggtatttaata

SEQ ID NO: 1925140 - DNA, 15 bp, Homo sapiens
gtgggtatttaataa

SEQ ID NO: 1925141 - DNA, 15 bp, Homo sapiens
tgggtatttaataat

SEQ ID NO: 1925142 - DNA, 15 bp, Homo sapiens
gggtatttaataata

SEQ ID NO: 1925143 - DNA, 15 bp, Homo sapiens
ggtatttaataatat

SEQ ID NO: 1925144 - DNA, 15 bp, Homo sapiens
gtatttaataatatt

SEQ ID NO: 1925145 - DNA, 15 bp, Homo sapiens
tatttaataatattt

SEQ ID NO: 1925146 - DNA, 15 bp, Homo sapiens
atttaataatattta

SEQ ID NO: 1925147 - DNA, 15 bp, Homo sapiens
tttaataatatttat

SEQ ID NO: 1925148 - DNA, 15 bp, Homo sapiens
ttaataatatttatg

SEQ ID NO: 1925149 - DNA, 15 bp, Homo sapiens
taataatatttatga

SEQ ID NO: 1925150 - DNA, 15 bp, Homo sapiens
aataatatttatgat

SEQ ID NO: 1925151 - DNA, 15 bp, Homo sapiens
ataatatttatgatt

SEQ ID NO: 1925152 - DNA, 15 bp, Homo sapiens
taatatttatgattt

SEQ ID NO: 1925153 - DNA, 15 bp, Homo sapiens
aatatttatgatttg

SEQ ID NO: 1925154 - DNA, 15 bp, Homo sapiens
atatttatgatttga

SEQ ID NO: 1925155 - DNA, 15 bp, Homo sapiens
atttatgatttgact

SEQ ID NO: 1925156 - DNA, 15 bp, Homo sapiens
tttatgatttgactt

SEQ ID NO: 1925157 - DNA, 15 bp, Homo sapiens
ttatgatttgactta

SEQ ID NO: 1925158 - DNA, 15 bp, Homo sapiens
tatgatttgacttaa

SEQ ID NO: 1925159 - DNA, 15 bp, Homo sapiens
atgatttgacttaat

SEQ ID NO: 1925160 - DNA, 15 bp, Homo sapiens
tgatttgacttaatg

SEQ ID NO: 1925161 - DNA, 15 bp, Homo sapiens
gatttgacttaatgt

SEQ ID NO: 1925162 - DNA, 15 bp, Homo sapiens
atttgacttaatgtt

SEQ ID NO: 1925163 - DNA, 15 bp, Homo sapiens
tttgacttaatgttt

SEQ ID NO: 1925164 - DNA, 15 bp, Homo sapiens
ttgacttaatgttta

SEQ ID NO: 1925165 - DNA, 15 bp, Homo sapiens
tgacttaatgtttat

SEQ ID NO: 1925166 - DNA, 15 bp, Homo sapiens
gacttaatgtttatg

SEQ ID NO: 1925167 - DNA, 15 bp, Homo sapiens
acttaatgtttatga

SEQ ID NO: 1925168 - DNA, 15 bp, Homo sapiens
cttaatgtttatgaa

SEQ ID NO: 1925169 - DNA, 15 bp, Homo sapiens
ttaatgtttatgaaa

SEQ ID NO: 1925170 - DNA, 15 bp, Homo sapiens
taatgtttatgaaag

SEQ ID NO: 1925171 - DNA, 15 bp, Homo sapiens
aatgtttatgaaaga

SEQ ID NO: 1925172 - DNA, 15 bp, Homo sapiens
tgtttatgaaagata

SEQ ID NO: 1925173 - DNA, 15 bp, Homo sapiens
gtttatgaaagatag

SEQ ID NO: 1925174 - DNA, 15 bp, Homo sapiens
tttatgaaagatagt

SEQ ID NO: 1925175 - DNA, 15 bp, Homo sapiens
ttatgaaagatagtc

SEQ ID NO: 1925176 - DNA, 15 bp, Homo sapiens
tatgaaagatagtca

SEQ ID NO: 1925177 - DNA, 15 bp, Homo sapiens
atgaaagatagtcag

SEQ ID NO: 1925178 - DNA, 15 bp, Homo sapiens
tgaaagatagtcagc

SEQ ID NO: 1925179 - DNA, 15 bp, Homo sapiens
gaaagatagtcagcg

SEQ ID NO: 1925180 - DNA, 15 bp, Homo sapiens
aaagatagtcagcga

SEQ ID NO: 1925181 - DNA, 15 bp, Homo sapiens
aagatagtcagcgac

SEQ ID NO: 1925182 - DNA, 15 bp, Homo sapiens
agatagtcagcgact

SEQ ID NO: 1925183 - DNA, 15 bp, Homo sapiens
gatagtcagcgactg

SEQ ID NO: 1925184 - DNA, 15 bp, Homo sapiens
atagtcagcgactgt

SEQ ID NO: 1925185 - DNA, 15 bp, Homo sapiens
tagtcagcgactgtg

SEQ ID NO: 1925186 - DNA, 15 bp, Homo sapiens
agtcagcgactgtgg

SEQ ID NO: 1925187 - DNA, 15 bp, Homo sapiens
gtcagcgactgtggg

SEQ ID NO: 1925188 - DNA, 15 bp, Homo sapiens
tcagcgactgtgggg

SEQ ID NO: 1925189 - DNA, 15 bp, Homo sapiens
cagcgactgtggggc

SEQ ID NO: 1925190 - DNA, 15 bp, Homo sapiens
agcgactgtggggca

SEQ ID NO: 1925191 - DNA, 15 bp, Homo sapiens
gcgactgtggggcat

SEQ ID NO: 1925192 - DNA, 15 bp, Homo sapiens
cgactgtggggcatg

SEQ ID NO: 1925193 - DNA, 15 bp, Homo sapiens
gactgtggggcatgg

SEQ ID NO: 1925194 - DNA, 15 bp, Homo sapiens
actgtggggcatgga

SEQ ID NO: 1925195 - DNA, 15 bp, Homo sapiens
ctgtggggcatggat

SEQ ID NO: 1925196 - DNA, 15 bp, Homo sapiens
tgtggggcatggatc

SEQ ID NO: 1925197 - DNA, 15 bp, Homo sapiens
gtggggcatggatct

SEQ ID NO: 1925198 - DNA, 15 bp, Homo sapiens
tggggcatggatctt

SEQ ID NO: 1925199 - DNA, 15 bp, Homo sapiens
ggggcatggatcttg

SEQ ID NO: 1925200 - DNA, 15 bp, Homo sapiens
gggcatggatcttgt

SEQ ID NO: 1925201 - DNA, 15 bp, Homo sapiens
ggcatggatcttgta

SEQ ID NO: 1925202 - DNA, 15 bp, Homo sapiens
gcatggatcttgtac

SEQ ID NO: 1925203 - DNA, 15 bp, Homo sapiens
catggatcttgtact

SEQ ID NO: 1925204 - DNA, 15 bp, Homo sapiens
atggatcttgtactc

SEQ ID NO: 1925205 - DNA, 15 bp, Homo sapiens
tggatcttgtactct

SEQ ID NO: 1925206 - DNA, 15 bp, Homo sapiens
ggatcttgtactctc

SEQ ID NO: 1925207 - DNA, 15 bp, Homo sapiens
gatcttgtactctct

SEQ ID NO: 1925208 - DNA, 15 bp, Homo sapiens
atcttgtactctctg

SEQ ID NO: 1925209 - DNA, 15 bp, Homo sapiens
tcttgtactctctga

SEQ ID NO: 1925210 - DNA, 15 bp, Homo sapiens
cttgtactctctgaa

SEQ ID NO: 1925211 - DNA, 15 bp, Homo sapiens
ttgtactctctgaat

SEQ ID NO: 1925212 - DNA, 15 bp, Homo sapiens
tgtactctctgaatg

SEQ ID NO: 1925213 - DNA, 15 bp, Homo sapiens
gtactctctgaatga

SEQ ID NO: 1925214 - DNA, 15 bp, Homo sapiens
tactctctgaatgac

SEQ ID NO: 1925215 - DNA, 15 bp, Homo sapiens
actctctgaatgacc

SEQ ID NO: 1925216 - DNA, 15 bp, Homo sapiens
ctctctgaatgacct

SEQ ID NO: 1925217 - DNA, 15 bp, Homo sapiens
tctctgaatgaccta

SEQ ID NO: 1925218 - DNA, 15 bp, Homo sapiens
ctctgaatgacctag

SEQ ID NO: 1925219 - DNA, 15 bp, Homo sapiens
tctgaatgacctagt

SEQ ID NO: 1925220 - DNA, 15 bp, Homo sapiens
ctgaatgacctagtg

SEQ ID NO: 1925221 - DNA, 15 bp, Homo sapiens
tgaatgacctagtgg

SEQ ID NO: 1925222 - DNA, 15 bp, Homo sapiens
gaatgacctagtggg

SEQ ID NO: 1925223 - DNA, 15 bp, Homo sapiens
aatgacctagtgggc

SEQ ID NO: 1925224 - DNA, 15 bp, Homo sapiens
atgacctagtgggcc

SEQ ID NO: 1925225 - DNA, 15 bp, Homo sapiens
tgacctagtgggcct

SEQ ID NO: 1925226 - DNA, 15 bp, Homo sapiens
gacctagtgggcctg

SEQ ID NO: 1925227 - DNA, 15 bp, Homo sapiens
acctagtgggcctgg

SEQ ID NO: 1925228 - DNA, 15 bp, Homo sapiens
cctagtgggcctgga

SEQ ID NO: 1925229 - DNA, 15 bp, Homo sapiens
ctagtgggcctggag

SEQ ID NO: 1925230 - DNA, 15 bp, Homo sapiens
tagtgggcctggagc

SEQ ID NO: 1925231 - DNA, 15 bp, Homo sapiens
agtgggcctggagca

SEQ ID NO: 1925232 - DNA, 15 bp, Homo sapiens
gtgggcctggagcag

SEQ ID NO: 1925233 - DNA, 15 bp, Homo sapiens
tgggcctggagcagt

SEQ ID NO: 1925234 - DNA, 15 bp, Homo sapiens
gggcctggagcagtg

SEQ ID NO: 1925235 - DNA, 15 bp, Homo sapiens
ggcctggagcagtgg

SEQ ID NO: 1925236 - DNA, 15 bp, Homo sapiens
gcctggagcagtggc

SEQ ID NO: 1925237 - DNA, 15 bp, Homo sapiens
cctggagcagtggcc

SEQ ID NO: 1925238 - DNA, 15 bp, Homo sapiens
ctggagcagtggcca

SEQ ID NO: 1925239 - DNA, 15 bp, Homo sapiens
tggagcagtggccag

SEQ ID NO: 1925240 - DNA, 15 bp, Homo sapiens
ggagcagtggccagt

SEQ ID NO: 1925241 - DNA, 15 bp, Homo sapiens
gagcagtggccagtc

SEQ ID NO: 1925242 - DNA, 15 bp, Homo sapiens
agcagtggccagtct

SEQ ID NO: 1925243 - DNA, 15 bp, Homo sapiens
gcagtggccagtctg

SEQ ID NO: 1925244 - DNA, 15 bp, Homo sapiens
agtggccagtctgcg

SEQ ID NO: 1925245 - DNA, 15 bp, Homo sapiens
gtggccagtctgcga

SEQ ID NO: 1925246 - DNA, 15 bp, Homo sapiens
tggccagtctgcgag

SEQ ID NO: 1925247 - DNA, 15 bp, Homo sapiens
ggccagtctgcgagg

SEQ ID NO: 1925248 - DNA, 15 bp, Homo sapiens
gccagtctgcgaggc

SEQ ID NO: 1925249 - DNA, 15 bp, Homo sapiens
ccagtctgcgaggct

SEQ ID NO: 1925250 - DNA, 15 bp, Homo sapiens
cagtctgcgaggctt

SEQ ID NO: 1925251 - DNA, 15 bp, Homo sapiens
agtctgcgaggctta

SEQ ID NO: 1925252 - DNA, 15 bp, Homo sapiens
gtctgcgaggcttat

SEQ ID NO: 1925253 - DNA, 15 bp, Homo sapiens
tctgcgaggcttatg

SEQ ID NO: 1925254 - DNA, 15 bp, Homo sapiens
ctgcgaggcttatgt

SEQ ID NO: 1925255 - DNA, 15 bp, Homo sapiens
tgcgaggcttatgtg

SEQ ID NO: 1925256 - DNA, 15 bp, Homo sapiens
gcgaggcttatgtgc

SEQ ID NO: 1925257 - DNA, 15 bp, Homo sapiens
cgaggcttatgtgct

SEQ ID NO: 1925258 - DNA, 15 bp, Homo sapiens
gaggcttatgtgctg

SEQ ID NO: 1925259 - DNA, 15 bp, Homo sapiens
aggcttatgtgctga

SEQ ID NO: 1925260 - DNA, 15 bp, Homo sapiens
ggcttatgtgctgaa

SEQ ID NO: 1925261 - DNA, 15 bp, Homo sapiens
gcttatgtgctgaat

SEQ ID NO: 1925262 - DNA, 15 bp, Homo sapiens
cttatgtgctgaatg

SEQ ID NO: 1925263 - DNA, 15 bp, Homo sapiens
ttatgtgctgaatgt

SEQ ID NO: 1925264 - DNA, 15 bp, Homo sapiens
tatgtgctgaatgtg

SEQ ID NO: 1925265 - DNA, 15 bp, Homo sapiens
atgtgctgaatgtgt

SEQ ID NO: 1925266 - DNA, 15 bp, Homo sapiens
tgtgctgaatgtgtc

SEQ ID NO: 1925267 - DNA, 15 bp, Homo sapiens
gtgctgaatgtgtcg

SEQ ID NO: 1925268 - DNA, 15 bp, Homo sapiens
tgctgaatgtgtcga

SEQ ID NO: 1925269 - DNA, 15 bp, Homo sapiens
gctgaatgtgtcgag

SEQ ID NO: 1925270 - DNA, 15 bp, Homo sapiens
ctgaatgtgtcgagg

SEQ ID NO: 1925271 - DNA, 15 bp, Homo sapiens
tgaatgtgtcgagga

SEQ ID NO: 1925272 - DNA, 15 bp, Homo sapiens
gaatgtgtcgaggat

SEQ ID NO: 1925273 - DNA, 15 bp, Homo sapiens
aatgtgtcgaggata

SEQ ID NO: 1925274 - DNA, 15 bp, Homo sapiens
atgtgtcgaggataa

SEQ ID NO: 1925275 - DNA, 15 bp, Homo sapiens
tgtgtcgaggataat

SEQ ID NO: 1925276 - DNA, 15 bp, Homo sapiens
gtgtcgaggataatc

SEQ ID NO: 1925277 - DNA, 15 bp, Homo sapiens
tgtcgaggataatcc

SEQ ID NO: 1925278 - DNA, 15 bp, Homo sapiens
gtcgaggataatcca

SEQ ID NO: 1925279 - DNA, 15 bp, Homo sapiens
tcgaggataatccag

SEQ ID NO: 1925280 - DNA, 15 bp, Homo sapiens
cgaggataatccaga

SEQ ID NO: 1925281 - DNA, 15 bp, Homo sapiens
gaggataatccagag

SEQ ID NO: 1925282 - DNA, 15 bp, Homo sapiens
aggataatccagagg

SEQ ID NO: 1925283 - DNA, 15 bp, Homo sapiens
ggataatccagaggc

SEQ ID NO: 1925284 - DNA, 15 bp, Homo sapiens
gataatccagaggcc

SEQ ID NO: 1925285 - DNA, 15 bp, Homo sapiens
ataatccagaggcct

SEQ ID NO: 1925286 - DNA, 15 bp, Homo sapiens
taatccagaggcctg

SEQ ID NO: 1925287 - DNA, 15 bp, Homo sapiens
aatccagaggcctgc

SEQ ID NO: 1925288 - DNA, 15 bp, Homo sapiens
atccagaggcctgct

SEQ ID NO: 1925289 - DNA, 15 bp, Homo sapiens
tccagaggcctgctg

SEQ ID NO: 1925290 - DNA, 15 bp, Homo sapiens
ccagaggcctgctgc

SEQ ID NO: 1925291 - DNA, 15 bp, Homo sapiens
cagaggcctgctgcc

SEQ ID NO: 1925292 - DNA, 15 bp, Homo sapiens
agaggcctgctgcct

SEQ ID NO: 1925293 - DNA, 15 bp, Homo sapiens
gaggcctgctgcctg

SEQ ID NO: 1925294 - DNA, 15 bp, Homo sapiens
aggcctgctgcctgt

SEQ ID NO: 1925295 - DNA, 15 bp, Homo sapiens
ggcctgctgcctgtg

SEQ ID NO: 1925296 - DNA, 15 bp, Homo sapiens
gcctgctgcctgtgt

SEQ ID NO: 1925297 - DNA, 15 bp, Homo sapiens
cctgctgcctgtgta

SEQ ID NO: 1925298 - DNA, 15 bp, Homo sapiens
ctgctgcctgtgtac

SEQ ID NO: 1925299 - DNA, 15 bp, Homo sapiens
tgctgcctgtgtact

SEQ ID NO: 1925300 - DNA, 15 bp, Homo sapiens
gctgcctgtgtactc

SEQ ID NO: 1925301 - DNA, 15 bp, Homo sapiens
ctgcctgtgtactct

SEQ ID NO: 1925302 - DNA, 15 bp, Homo sapiens
tgcctgtgtactctc

SEQ ID NO: 1925303 - DNA, 15 bp, Homo sapiens
gcctgtgtactctct

SEQ ID NO: 1925304 - DNA, 15 bp, Homo sapiens
cctgtgtactctctg

SEQ ID NO: 1925305 - DNA, 15 bp, Homo sapiens
ctgtgtactctctgg

SEQ ID NO: 1925306 - DNA, 15 bp, Homo sapiens
tgtgtactctctggt

SEQ ID NO: 1925307 - DNA, 15 bp, Homo sapiens
gtgtactctctggtc

SEQ ID NO: 1925308 - DNA, 15 bp, Homo sapiens
tgtactctctggtct

SEQ ID NO: 1925309 - DNA, 15 bp, Homo sapiens
gtactctctggtctg

SEQ ID NO: 1925310 - DNA, 15 bp, Homo sapiens
tactctctggtctgg

SEQ ID NO: 1925311 - DNA, 15 bp, Homo sapiens
actctctggtctggc

SEQ ID NO: 1925312 - DNA, 15 bp, Homo sapiens
ctctctggtctggca

SEQ ID NO: 1925313 - DNA, 15 bp, Homo sapiens
tctctggtctggcaa

SEQ ID NO: 1925314 - DNA, 15 bp, Homo sapiens
ctctggtctggcaaa

SEQ ID NO: 1925315 - DNA, 15 bp, Homo sapiens
tctggtctggcaaaa

SEQ ID NO: 1925316 - DNA, 15 bp, Homo sapiens
ctggtctggcaaaaa

SEQ ID NO: 1925317 - DNA, 15 bp, Homo sapiens
tggtctggcaaaaac

SEQ ID NO: 1925318 - DNA, 15 bp, Homo sapiens
ggtctggcaaaaact

SEQ ID NO: 1925319 - DNA, 15 bp, Homo sapiens
gtctggcaaaaactt

SEQ ID NO: 1925320 - DNA, 15 bp, Homo sapiens
tctggcaaaaacttt

SEQ ID NO: 1925321 - DNA, 15 bp, Homo sapiens
ctggcaaaaactttt

SEQ ID NO: 1925322 - DNA, 15 bp, Homo sapiens
tggcaaaaacttttc

SEQ ID NO: 1925323 - DNA, 15 bp, Homo sapiens
ggcaaaaacttttct

SEQ ID NO: 1925324 - DNA, 15 bp, Homo sapiens
gcaaaaacttttctg

SEQ ID NO: 1925325 - DNA, 15 bp, Homo sapiens
caaaaacttttctga

SEQ ID NO: 1925326 - DNA, 15 bp, Homo sapiens
aaaaacttttctgat

SEQ ID NO: 1925327 - DNA, 15 bp, Homo sapiens
aaaacttttctgatg

SEQ ID NO: 1925328 - DNA, 15 bp, Homo sapiens
aaacttttctgatgc

SEQ ID NO: 1925329 - DNA, 15 bp, Homo sapiens
aacttttctgatgct

SEQ ID NO: 1925330 - DNA, 15 bp, Homo sapiens
acttttctgatgctc

SEQ ID NO: 1925331 - DNA, 15 bp, Homo sapiens
cttttctgatgctca

SEQ ID NO: 1925332 - DNA, 15 bp, Homo sapiens
ttttctgatgctcat

SEQ ID NO: 1925333 - DNA, 15 bp, Homo sapiens
tttctgatgctcata

SEQ ID NO: 1925334 - DNA, 15 bp, Homo sapiens
ttctgatgctcatac

SEQ ID NO: 1925335 - DNA, 15 bp, Homo sapiens
tctgatgctcataca

SEQ ID NO: 1925336 - DNA, 15 bp, Homo sapiens
ctgatgctcatacaa

SEQ ID NO: 1925337 - DNA, 15 bp, Homo sapiens
tgatgctcatacaat

SEQ ID NO: 1925338 - DNA, 15 bp, Homo sapiens
gatgctcatacaatg

SEQ ID NO: 1925339 - DNA, 15 bp, Homo sapiens
atgctcatacaatgt

SEQ ID NO: 1925340 - DNA, 15 bp, Homo sapiens
tgctcatacaatgta

SEQ ID NO: 1925341 - DNA, 15 bp, Homo sapiens
gctcatacaatgtag

SEQ ID NO: 1925342 - DNA, 15 bp, Homo sapiens
ctcatacaatgtagt

SEQ ID NO: 1925343 - DNA, 15 bp, Homo sapiens
tcatacaatgtagtt

SEQ ID NO: 1925344 - DNA, 15 bp, Homo sapiens
catacaatgtagttc

SEQ ID NO: 1925345 - DNA, 15 bp, Homo sapiens
atacaatgtagttcc

SEQ ID NO: 1925346 - DNA, 15 bp, Homo sapiens
tacaatgtagttcca

SEQ ID NO: 1925347 - DNA, 15 bp, Homo sapiens
acaatgtagttccaa

SEQ ID NO: 1925348 - DNA, 15 bp, Homo sapiens
caatgtagttccaat

SEQ ID NO: 1925349 - DNA, 15 bp, Homo sapiens
aatgtagttccaatt

SEQ ID NO: 1925350 - DNA, 15 bp, Homo sapiens
atgtagttccaatta

SEQ ID NO: 1925351 - DNA, 15 bp, Homo sapiens
tgtagttccaattag

SEQ ID NO: 1925352 - DNA, 15 bp, Homo sapiens
gtagttccaattaga

SEQ ID NO: 1925353 - DNA, 15 bp, Homo sapiens
tagttccaattagaa

SEQ ID NO: 1925354 - DNA, 15 bp, Homo sapiens
agttccaattagaat

SEQ ID NO: 1925355 - DNA, 15 bp, Homo sapiens
gttccaattagaatt

SEQ ID NO: 1925356 - DNA, 15 bp, Homo sapiens
ttccaattagaattt

SEQ ID NO: 1925357 - DNA, 15 bp, Homo sapiens
tccaattagaattta

SEQ ID NO: 1925358 - DNA, 15 bp, Homo sapiens
ccaattagaatttac

SEQ ID NO: 1925359 - DNA, 15 bp, Homo sapiens
caattagaatttact

SEQ ID NO: 1925360 - DNA, 15 bp, Homo sapiens
aattagaatttactg

SEQ ID NO: 1925361 - DNA, 15 bp, Homo sapiens
attagaatttactga

SEQ ID NO: 1925362 - DNA, 15 bp, Homo sapiens
ttagaatttactgaa

SEQ ID NO: 1925363 - DNA, 15 bp, Homo sapiens
tagaatttactgaaa

SEQ ID NO: 1925364 - DNA, 15 bp, Homo sapiens
agaatttactgaaac

SEQ ID NO: 1925365 - DNA, 15 bp, Homo sapiens
gaatttactgaaact

SEQ ID NO: 1925366 - DNA, 15 bp, Homo sapiens
aatttactgaaactg

SEQ ID NO: 1925367 - DNA, 15 bp, Homo sapiens
atttactgaaactgc

SEQ ID NO: 1925368 - DNA, 15 bp, Homo sapiens
tttactgaaactgca

SEQ ID NO: 1925369 - DNA, 15 bp, Homo sapiens
ttactgaaactgcat

SEQ ID NO: 1925370 - DNA, 15 bp, Homo sapiens
tactgaaactgcatg

SEQ ID NO: 1925371 - DNA, 15 bp, Homo sapiens
actgaaactgcatgt

SEQ ID NO: 1925372 - DNA, 15 bp, Homo sapiens
ctgaaactgcatgtg

SEQ ID NO: 1925373 - DNA, 15 bp, Homo sapiens
tgaaactgcatgtgg

SEQ ID NO: 1925374 - DNA, 15 bp, Homo sapiens
gaaactgcatgtggt

SEQ ID NO: 1925375 - DNA, 15 bp, Homo sapiens
aaactgcatgtggtg

SEQ ID NO: 1925376 - DNA, 15 bp, Homo sapiens
aactgcatgtggtgg

SEQ ID NO: 1925377 - DNA, 15 bp, Homo sapiens
actgcatgtggtggg

SEQ ID NO: 1925378 - DNA, 15 bp, Homo sapiens
ctgcatgtggtgggg

SEQ ID NO: 1925379 - DNA, 15 bp, Homo sapiens
tgcatgtggtgggga

SEQ ID NO: 1925380 - DNA, 15 bp, Homo sapiens
gcatgtggtggggat

SEQ ID NO: 1925381 - DNA, 15 bp, Homo sapiens
catgtggtggggata

SEQ ID NO: 1925382 - DNA, 15 bp, Homo sapiens
atgtggtggggatac

SEQ ID NO: 1925383 - DNA, 15 bp, Homo sapiens
tgtggtggggataca

SEQ ID NO: 1925384 - DNA, 15 bp, Homo sapiens
gtggtggggatacaa

SEQ ID NO: 1925385 - DNA, 15 bp, Homo sapiens
tggtggggatacaaa

SEQ ID NO: 1925386 - DNA, 15 bp, Homo sapiens
ggtggggatacaaat

SEQ ID NO: 1925387 - DNA, 15 bp, Homo sapiens
gtggggatacaaata

SEQ ID NO: 1925388 - DNA, 15 bp, Homo sapiens
tggggatacaaataa

SEQ ID NO: 1925389 - DNA, 15 bp, Homo sapiens
ggggatacaaataag

SEQ ID NO: 1925390 - DNA, 15 bp, Homo sapiens
gggatacaaataaga

SEQ ID NO: 1925391 - DNA, 15 bp, Homo sapiens
ggatacaaataagaa

SEQ ID NO: 1925392 - DNA, 15 bp, Homo sapiens
gatacaaataagaaa

SEQ ID NO: 1925393 - DNA, 15 bp, Homo sapiens
atacaaataagaaaa

SEQ ID NO: 1925394 - DNA, 15 bp, Homo sapiens
tacaaataagaaaat

SEQ ID NO: 1925395 - DNA, 15 bp, Homo sapiens
acaaataagaaaatc

SEQ ID NO: 1925396 - DNA, 15 bp, Homo sapiens
caaataagaaaatct

SEQ ID NO: 1925397 - DNA, 15 bp, Homo sapiens
aaataagaaaatctc

SEQ ID NO: 1925398 - DNA, 15 bp, Homo sapiens
aataagaaaatctcc

SEQ ID NO: 1925399 - DNA, 15 bp, Homo sapiens
ataagaaaatctcca

SEQ ID NO: 1925400 - DNA, 15 bp, Homo sapiens
taagaaaatctccat

SEQ ID NO: 1925401 - DNA, 15 bp, Homo sapiens
aagaaaatctccatg

SEQ ID NO: 1925402 - DNA, 15 bp, Homo sapiens
agaaaatctccatgt

SEQ ID NO: 1925403 - DNA, 15 bp, Homo sapiens
gaaaatctccatgtt

SEQ ID NO: 1925404 - DNA, 15 bp, Homo sapiens
aaaatctccatgttt

SEQ ID NO: 1925405 - DNA, 15 bp, Homo sapiens
aaatctccatgtttc

SEQ ID NO: 1925406 - DNA, 15 bp, Homo sapiens
aatctccatgtttct

SEQ ID NO: 1925407 - DNA, 15 bp, Homo sapiens
atctccatgtttcta

SEQ ID NO: 1925408 - DNA, 15 bp, Homo sapiens
tctccatgtttctag

SEQ ID NO: 1925409 - DNA, 15 bp, Homo sapiens
ctccatgtttctagc

SEQ ID NO: 1925410 - DNA, 15 bp, Homo sapiens
tccatgtttctagcc

SEQ ID NO: 1925411 - DNA, 15 bp, Homo sapiens
atgtttctagccttt

SEQ ID NO: 1925412 - DNA, 15 bp, Homo sapiens
tgtttctagcctttt

SEQ ID NO: 1925413 - DNA, 15 bp, Homo sapiens
gtttctagcctttta

SEQ ID NO: 1925414 - DNA, 15 bp, Homo sapiens
tttctagccttttac

SEQ ID NO: 1925415 - DNA, 15 bp, Homo sapiens
ttctagccttttacc

SEQ ID NO: 1925416 - DNA, 15 bp, Homo sapiens
tctagccttttacca

SEQ ID NO: 1925417 - DNA, 15 bp, Homo sapiens
ctagccttttaccaa

SEQ ID NO: 1925418 - DNA, 15 bp, Homo sapiens
tagccttttaccaac

SEQ ID NO: 1925419 - DNA, 15 bp, Homo sapiens
agccttttaccaacc

SEQ ID NO: 1925420 - DNA, 15 bp, Homo sapiens
gccttttaccaacca

SEQ ID NO: 1925421 - DNA, 15 bp, Homo sapiens
ccttttaccaaccaa

SEQ ID NO: 1925422 - DNA, 15 bp, Homo sapiens
cttttaccaaccaat

SEQ ID NO: 1925423 - DNA, 15 bp, Homo sapiens
ttttaccaaccaatg

SEQ ID NO: 1925424 - DNA, 15 bp, Homo sapiens
tttaccaaccaatgc

SEQ ID NO: 1925425 - DNA, 15 bp, Homo sapiens
ttaccaaccaatgct

SEQ ID NO: 1925426 - DNA, 15 bp, Homo sapiens
taccaaccaatgcta

SEQ ID NO: 1925427 - DNA, 15 bp, Homo sapiens
accaaccaatgctat

SEQ ID NO: 1925428 - DNA, 15 bp, Homo sapiens
ccaaccaatgctatc

SEQ ID NO: 1925429 - DNA, 15 bp, Homo sapiens
caaccaatgctatct

SEQ ID NO: 1925430 - DNA, 15 bp, Homo sapiens
aaccaatgctatcta

SEQ ID NO: 1925431 - DNA, 15 bp, Homo sapiens
accaatgctatctaa

SEQ ID NO: 1925432 - DNA, 15 bp, Homo sapiens
ccaatgctatctaag

SEQ ID NO: 1925433 - DNA, 15 bp, Homo sapiens
caatgctatctaagg

SEQ ID NO: 1925434 - DNA, 15 bp, Homo sapiens
aatgctatctaagga

SEQ ID NO: 1925435 - DNA, 15 bp, Homo sapiens
atgctatctaaggaa

SEQ ID NO: 1925436 - DNA, 15 bp, Homo sapiens
tgctatctaaggaag

SEQ ID NO: 1925437 - DNA, 15 bp, Homo sapiens
gctatctaaggaaga

SEQ ID NO: 1925438 - DNA, 15 bp, Homo sapiens
ctatctaaggaagat

SEQ ID NO: 1925439 - DNA, 15 bp, Homo sapiens
tatctaaggaagatc

SEQ ID NO: 1925440 - DNA, 15 bp, Homo sapiens
atctaaggaagatcc

SEQ ID NO: 1925441 - DNA, 15 bp, Homo sapiens
tctaaggaagatccc

SEQ ID NO: 1925442 - DNA, 15 bp, Homo sapiens
ctaaggaagatcccg

SEQ ID NO: 1925443 - DNA, 15 bp, Homo sapiens
taaggaagatcccgt

SEQ ID NO: 1925444 - DNA, 15 bp, Homo sapiens
aaggaagatcccgtc

SEQ ID NO: 1925445 - DNA, 15 bp, Homo sapiens
aggaagatcccgtct

SEQ ID NO: 1925446 - DNA, 15 bp, Homo sapiens
ggaagatcccgtctt

SEQ ID NO: 1925447 - DNA, 15 bp, Homo sapiens
gaagatcccgtcttt

SEQ ID NO: 1925448 - DNA, 15 bp, Homo sapiens
aagatcccgtctttg

SEQ ID NO: 1925449 - DNA, 15 bp, Homo sapiens
agatcccgtctttgc

SEQ ID NO: 1925450 - DNA, 15 bp, Homo sapiens
gatcccgtctttgca

SEQ ID NO: 1925451 - DNA, 15 bp, Homo sapiens
atcccgtctttgcag

SEQ ID NO: 1925452 - DNA, 15 bp, Homo sapiens
tcccgtctttgcagt

SEQ ID NO: 1925453 - DNA, 15 bp, Homo sapiens
cccgtctttgcagtg

SEQ ID NO: 1925454 - DNA, 15 bp, Homo sapiens
ccgtctttgcagtgc

SEQ ID NO: 1925455 - DNA, 15 bp, Homo sapiens
cgtctttgcagtgct

SEQ ID NO: 1925456 - DNA, 15 bp, Homo sapiens
gtctttgcagtgcta

SEQ ID NO: 1925457 - DNA, 15 bp, Homo sapiens
tctttgcagtgctaa

SEQ ID NO: 1925458 - DNA, 15 bp, Homo sapiens
ctttgcagtgctaag

SEQ ID NO: 1925459 - DNA, 15 bp, Homo sapiens
tttgcagtgctaagc

SEQ ID NO: 1925460 - DNA, 15 bp, Homo sapiens
ttgcagtgctaagcc

SEQ ID NO: 1925461 - DNA, 15 bp, Homo sapiens
tgcagtgctaagcct

SEQ ID NO: 1925462 - DNA, 15 bp, Homo sapiens
gcagtgctaagccta

SEQ ID NO: 1925463 - DNA, 15 bp, Homo sapiens
cagtgctaagcctag

SEQ ID NO: 1925464 - DNA, 15 bp, Homo sapiens
agtgctaagcctagc

SEQ ID NO: 1925465 - DNA, 15 bp, Homo sapiens
gtgctaagcctagca

SEQ ID NO: 1925466 - DNA, 15 bp, Homo sapiens
tgctaagcctagcac

SEQ ID NO: 1925467 - DNA, 15 bp, Homo sapiens
gctaagcctagcaca

SEQ ID NO: 1925468 - DNA, 15 bp, Homo sapiens
ctaagcctagcacac

SEQ ID NO: 1925469 - DNA, 15 bp, Homo sapiens
taagcctagcacacc

SEQ ID NO: 1925470 - DNA, 15 bp, Homo sapiens
aagcctagcacacct

SEQ ID NO: 1925471 - DNA, 15 bp, Homo sapiens
agcctagcacacctt

SEQ ID NO: 1925472 - DNA, 15 bp, Homo sapiens
gcctagcacacctta

SEQ ID NO: 1925473 - DNA, 15 bp, Homo sapiens
cctagcacaccttat

SEQ ID NO: 1925474 - DNA, 15 bp, Homo sapiens
ctagcacaccttatc

SEQ ID NO: 1925475 - DNA, 15 bp, Homo sapiens
tagcacaccttatcg

SEQ ID NO: 1925476 - DNA, 15 bp, Homo sapiens
agcacaccttatcgt

SEQ ID NO: 1925477 - DNA, 15 bp, Homo sapiens
gcacaccttatcgtg

SEQ ID NO: 1925478 - DNA, 15 bp, Homo sapiens
cacaccttatcgtgc

SEQ ID NO: 1925479 - DNA, 15 bp, Homo sapiens
acaccttatcgtgct

SEQ ID NO: 1925480 - DNA, 15 bp, Homo sapiens
caccttatcgtgctg

SEQ ID NO: 1925481 - DNA, 15 bp, Homo sapiens
accttatcgtgctga

SEQ ID NO: 1925482 - DNA, 15 bp, Homo sapiens
ccttatcgtgctgac

SEQ ID NO: 1925483 - DNA, 15 bp, Homo sapiens
cttatcgtgctgact

SEQ ID NO: 1925484 - DNA, 15 bp, Homo sapiens
ttatcgtgctgactg

SEQ ID NO: 1925485 - DNA, 15 bp, Homo sapiens
tatcgtgctgactgg

SEQ ID NO: 1925486 - DNA, 15 bp, Homo sapiens
atcgtgctgactggt

SEQ ID NO: 1925487 - DNA, 15 bp, Homo sapiens
tcgtgctgactggtt

SEQ ID NO: 1925488 - DNA, 15 bp, Homo sapiens
cgtgctgactggttt

SEQ ID NO: 1925489 - DNA, 15 bp, Homo sapiens
gtgctgactggttta

SEQ ID NO: 1925490 - DNA, 15 bp, Homo sapiens
tgctgactggtttaa

SEQ ID NO: 1925491 - DNA, 15 bp, Homo sapiens
gctgactggtttaac

SEQ ID NO: 1925492 - DNA, 15 bp, Homo sapiens
ctgactggtttaaca

SEQ ID NO: 1925493 - DNA, 15 bp, Homo sapiens
tgactggtttaacag

SEQ ID NO: 1925494 - DNA, 15 bp, Homo sapiens
gactggtttaacaga

SEQ ID NO: 1925495 - DNA, 15 bp, Homo sapiens
actggtttaacagat

SEQ ID NO: 1925496 - DNA, 15 bp, Homo sapiens
ctggtttaacagata

SEQ ID NO: 1925497 - DNA, 15 bp, Homo sapiens
tggtttaacagataa

SEQ ID NO: 1925498 - DNA, 15 bp, Homo sapiens
ggtttaacagataaa

SEQ ID NO: 1925499 - DNA, 15 bp, Homo sapiens
gtttaacagataaac

SEQ ID NO: 1925500 - DNA, 15 bp, Homo sapiens
tttaacagataaaca

SEQ ID NO: 1925501 - DNA, 15 bp, Homo sapiens
ttaacagataaacat

SEQ ID NO: 1925502 - DNA, 15 bp, Homo sapiens
taacagataaacata

SEQ ID NO: 1925503 - DNA, 15 bp, Homo sapiens
aacagataaacataa

SEQ ID NO: 1925504 - DNA, 15 bp, Homo sapiens
acagataaacataag

SEQ ID NO: 1925505 - DNA, 15 bp, Homo sapiens
cagataaacataagg

SEQ ID NO: 1925506 - DNA, 15 bp, Homo sapiens
agataaacataaggt

SEQ ID NO: 1925507 - DNA, 15 bp, Homo sapiens
gataaacataaggtt

SEQ ID NO: 1925508 - DNA, 15 bp, Homo sapiens
ataaacataaggttt

SEQ ID NO: 1925509 - DNA, 15 bp, Homo sapiens
taaacataaggtttg

SEQ ID NO: 1925510 - DNA, 15 bp, Homo sapiens
aaacataaggtttgg

SEQ ID NO: 1925511 - DNA, 15 bp, Homo sapiens
aacataaggtttgga

SEQ ID NO: 1925512 - DNA, 15 bp, Homo sapiens
acataaggtttggaa

SEQ ID NO: 1925513 - DNA, 15 bp, Homo sapiens
cataaggtttggaag

SEQ ID NO: 1925514 - DNA, 15 bp, Homo sapiens
ataaggtttggaaga

SEQ ID NO: 1925515 - DNA, 15 bp, Homo sapiens
taaggtttggaagaa

SEQ ID NO: 1925516 - DNA, 15 bp, Homo sapiens
aaggtttggaagaag

SEQ ID NO: 1925517 - DNA, 15 bp, Homo sapiens
aggtttggaagaagc

SEQ ID NO: 1925518 - DNA, 15 bp, Homo sapiens
ggtttggaagaagca

SEQ ID NO: 1925519 - DNA, 15 bp, Homo sapiens
gtttggaagaagcag

SEQ ID NO: 1925520 - DNA, 15 bp, Homo sapiens
tttggaagaagcagg

SEQ ID NO: 1925521 - DNA, 15 bp, Homo sapiens
ttggaagaagcaggg

SEQ ID NO: 1925522 - DNA, 15 bp, Homo sapiens
tggaagaagcagggg

SEQ ID NO: 1925523 - DNA, 15 bp, Homo sapiens
ggaagaagcagggga

SEQ ID NO: 1925524 - DNA, 15 bp, Homo sapiens
gaagaagcaggggat

SEQ ID NO: 1925525 - DNA, 15 bp, Homo sapiens
aagaagcaggggatt

SEQ ID NO: 1925526 - DNA, 15 bp, Homo sapiens
agaagcaggggattt

SEQ ID NO: 1925527 - DNA, 15 bp, Homo sapiens
gaagcaggggattta

SEQ ID NO: 1925528 - DNA, 15 bp, Homo sapiens
aagcaggggatttaa

SEQ ID NO: 1925529 - DNA, 15 bp, Homo sapiens
agcaggggatttaaa

SEQ ID NO: 1925530 - DNA, 15 bp, Homo sapiens
gcaggggatttaaac

SEQ ID NO: 1925531 - DNA, 15 bp, Homo sapiens
caggggatttaaaca

SEQ ID NO: 1925532 - DNA, 15 bp, Homo sapiens
aggggatttaaacag

SEQ ID NO: 1925533 - DNA, 15 bp, Homo sapiens
ggggatttaaacaga

SEQ ID NO: 1925534 - DNA, 15 bp, Homo sapiens
gggatttaaacagaa

SEQ ID NO: 1925535 - DNA, 15 bp, Homo sapiens
ggatttaaacagaat

SEQ ID NO: 1925536 - DNA, 15 bp, Homo sapiens
gatttaaacagaatt

SEQ ID NO: 1925537 - DNA, 15 bp, Homo sapiens
atttaaacagaatta

SEQ ID NO: 1925538 - DNA, 15 bp, Homo sapiens
tttaaacagaattac

SEQ ID NO: 1925539 - DNA, 15 bp, Homo sapiens
ttaaacagaattaca

SEQ ID NO: 1925540 - DNA, 15 bp, Homo sapiens
taaacagaattacac

SEQ ID NO: 1925541 - DNA, 15 bp, Homo sapiens
aaacagaattacaca

SEQ ID NO: 1925542 - DNA, 15 bp, Homo sapiens
aacagaattacacaa

SEQ ID NO: 1925543 - DNA, 15 bp, Homo sapiens
acagaattacacaag

SEQ ID NO: 1925544 - DNA, 15 bp, Homo sapiens
cagaattacacaaga

SEQ ID NO: 1925545 - DNA, 15 bp, Homo sapiens
agaattacacaagaa

SEQ ID NO: 1925546 - DNA, 15 bp, Homo sapiens
gaattacacaagaaa

SEQ ID NO: 1925547 - DNA, 15 bp, Homo sapiens
aattacacaagaaaa

SEQ ID NO: 1925548 - DNA, 15 bp, Homo sapiens
attacacaagaaaag

SEQ ID NO: 1925549 - DNA, 15 bp, Homo sapiens
ttacacaagaaaagg

SEQ ID NO: 1925550 - DNA, 15 bp, Homo sapiens
tacacaagaaaaggc

SEQ ID NO: 1925551 - DNA, 15 bp, Homo sapiens
acacaagaaaaggca

SEQ ID NO: 1925552 - DNA, 15 bp, Homo sapiens
cacaagaaaaggcat

SEQ ID NO: 1925553 - DNA, 15 bp, Homo sapiens
acaagaaaaggcatt

SEQ ID NO: 1925554 - DNA, 15 bp, Homo sapiens
caagaaaaggcattg

SEQ ID NO: 1925555 - DNA, 15 bp, Homo sapiens
aagaaaaggcattgg

SEQ ID NO: 1925556 - DNA, 15 bp, Homo sapiens
agaaaaggcattggt

SEQ ID NO: 1925557 - DNA, 15 bp, Homo sapiens
gaaaaggcattggtc

SEQ ID NO: 1925558 - DNA, 15 bp, Homo sapiens
aaaaggcattggtca

SEQ ID NO: 1925559 - DNA, 15 bp, Homo sapiens
aaaggcattggtcaa

SEQ ID NO: 1925560 - DNA, 15 bp, Homo sapiens
aaggcattggtcaac

SEQ ID NO: 1925561 - DNA, 15 bp, Homo sapiens
aggcattggtcaact

SEQ ID NO: 1925562 - DNA, 15 bp, Homo sapiens
ggcattggtcaactg

SEQ ID NO: 1925563 - DNA, 15 bp, Homo sapiens
gcattggtcaactgg

SEQ ID NO: 1925564 - DNA, 15 bp, Homo sapiens
cattggtcaactgga

SEQ ID NO: 1925565 - DNA, 15 bp, Homo sapiens
attggtcaactggag

SEQ ID NO: 1925566 - DNA, 15 bp, Homo sapiens
ttggtcaactggaga

SEQ ID NO: 1925567 - DNA, 15 bp, Homo sapiens
tggtcaactggagag

SEQ ID NO: 1925568 - DNA, 15 bp, Homo sapiens
ggtcaactggagagg

SEQ ID NO: 1925569 - DNA, 15 bp, Homo sapiens
gtcaactggagagga

SEQ ID NO: 1925570 - DNA, 15 bp, Homo sapiens
tcaactggagaggag

SEQ ID NO: 1925571 - DNA, 15 bp, Homo sapiens
caactggagaggagc

SEQ ID NO: 1925572 - DNA, 15 bp, Homo sapiens
aactggagaggagcc

SEQ ID NO: 1925573 - DNA, 15 bp, Homo sapiens
actggagaggagcca

SEQ ID NO: 1925574 - DNA, 15 bp, Homo sapiens
ctggagaggagccat

SEQ ID NO: 1925575 - DNA, 15 bp, Homo sapiens
tggagaggagccatt

SEQ ID NO: 1925576 - DNA, 15 bp, Homo sapiens
ggagaggagccattc

SEQ ID NO: 1925577 - DNA, 15 bp, Homo sapiens
gagaggagccattca

SEQ ID NO: 1925578 - DNA, 15 bp, Homo sapiens
agaggagccattcag

SEQ ID NO: 1925579 - DNA, 15 bp, Homo sapiens
gaggagccattcaga

SEQ ID NO: 1925580 - DNA, 15 bp, Homo sapiens
aggagccattcagag

SEQ ID NO: 1925581 - DNA, 15 bp, Homo sapiens
ggagccattcagaga

SEQ ID NO: 1925582 - DNA, 15 bp, Homo sapiens
gagccattcagagat

SEQ ID NO: 1925583 - DNA, 15 bp, Homo sapiens
agccattcagagatg

SEQ ID NO: 1925584 - DNA, 15 bp, Homo sapiens
gccattcagagatgg

SEQ ID NO: 1925585 - DNA, 15 bp, Homo sapiens
ccattcagagatgga

SEQ ID NO: 1925586 - DNA, 15 bp, Homo sapiens
cattcagagatggaa

SEQ ID NO: 1925587 - DNA, 15 bp, Homo sapiens
attcagagatggaag

SEQ ID NO: 1925588 - DNA, 15 bp, Homo sapiens
ttcagagatggaagg

SEQ ID NO: 1925589 - DNA, 15 bp, Homo sapiens
tcagagatggaaggc

SEQ ID NO: 1925590 - DNA, 15 bp, Homo sapiens
cagagatggaaggct

SEQ ID NO: 1925591 - DNA, 15 bp, Homo sapiens
agagatggaaggctg

SEQ ID NO: 1925592 - DNA, 15 bp, Homo sapiens
gagatggaaggctga

SEQ ID NO: 1925593 - DNA, 15 bp, Homo sapiens
agatggaaggctgaa

SEQ ID NO: 1925594 - DNA, 15 bp, Homo sapiens
gatggaaggctgaac

SEQ ID NO: 1925595 - DNA, 15 bp, Homo sapiens
atggaaggctgaact

SEQ ID NO: 1925596 - DNA, 15 bp, Homo sapiens
tggaaggctgaacta

SEQ ID NO: 1925597 - DNA, 15 bp, Homo sapiens
ggaaggctgaactat

SEQ ID NO: 1925598 - DNA, 15 bp, Homo sapiens
gaaggctgaactatt

SEQ ID NO: 1925599 - DNA, 15 bp, Homo sapiens
aaggctgaactattt

SEQ ID NO: 1925600 - DNA, 15 bp, Homo sapiens
aggctgaactatttt

SEQ ID NO: 1925601 - DNA, 15 bp, Homo sapiens
ggctgaactattttg

SEQ ID NO: 1925602 - DNA, 15 bp, Homo sapiens
gctgaactattttgt

SEQ ID NO: 1925603 - DNA, 15 bp, Homo sapiens
ctgaactattttgtc

SEQ ID NO: 1925604 - DNA, 15 bp, Homo sapiens
tgaactattttgtcg

SEQ ID NO: 1925605 - DNA, 15 bp, Homo sapiens
gaactattttgtcga

SEQ ID NO: 1925606 - DNA, 15 bp, Homo sapiens
aactattttgtcgag

SEQ ID NO: 1925607 - DNA, 15 bp, Homo sapiens
actattttgtcgagg

SEQ ID NO: 1925608 - DNA, 15 bp, Homo sapiens
ctattttgtcgaggt

SEQ ID NO: 1925609 - DNA, 15 bp, Homo sapiens
tattttgtcgaggtc

SEQ ID NO: 1925610 - DNA, 15 bp, Homo sapiens
attttgtcgaggtca

SEQ ID NO: 1925611 - DNA, 15 bp, Homo sapiens
ttttgtcgaggtcag

SEQ ID NO: 1925612 - DNA, 15 bp, Homo sapiens
tttgtcgaggtcagt

SEQ ID NO: 1925613 - DNA, 15 bp, Homo sapiens
ttgtcgaggtcagta

SEQ ID NO: 1925614 - DNA, 15 bp, Homo sapiens
tgtcgaggtcagtag

SEQ ID NO: 1925615 - DNA, 15 bp, Homo sapiens
gtcgaggtcagtagg

SEQ ID NO: 1925616 - DNA, 15 bp, Homo sapiens
tcgaggtcagtaggg

SEQ ID NO: 1925617 - DNA, 15 bp, Homo sapiens
cgaggtcagtaggga

SEQ ID NO: 1925618 - DNA, 15 bp, Homo sapiens
gaggtcagtagggaa

SEQ ID NO: 1925619 - DNA, 15 bp, Homo sapiens
aggtcagtagggaag

SEQ ID NO: 1925620 - DNA, 15 bp, Homo sapiens
ggtcagtagggaaga

SEQ ID NO: 1925621 - DNA, 15 bp, Homo sapiens
gtcagtagggaagag

SEQ ID NO: 1925622 - DNA, 15 bp, Homo sapiens
tcagtagggaagaga

SEQ ID NO: 1925623 - DNA, 15 bp, Homo sapiens
cagtagggaagagag

SEQ ID NO: 1925624 - DNA, 15 bp, Homo sapiens
agtagggaagagaga

SEQ ID NO: 1925625 - DNA, 15 bp, Homo sapiens
gtagggaagagagag

SEQ ID NO: 1925626 - DNA, 15 bp, Homo sapiens
tagggaagagagaga

SEQ ID NO: 1925627 - DNA, 15 bp, Homo sapiens
agggaagagagagaa

SEQ ID NO: 1925628 - DNA, 15 bp, Homo sapiens
gggaagagagagaag

SEQ ID NO: 1925629 - DNA, 15 bp, Homo sapiens
ggaagagagagaaga

SEQ ID NO: 1925630 - DNA, 15 bp, Homo sapiens
gaagagagagaagag

SEQ ID NO: 1925631 - DNA, 15 bp, Homo sapiens
aagagagagaagaga

SEQ ID NO: 1925632 - DNA, 15 bp, Homo sapiens
agagagagaagagaa

SEQ ID NO: 1925633 - DNA, 15 bp, Homo sapiens
gagagagaagagaaa

SEQ ID NO: 1925634 - DNA, 15 bp, Homo sapiens
agagagaagagaaat

SEQ ID NO: 1925635 - DNA, 15 bp, Homo sapiens
agagaagagaaattg

SEQ ID NO: 1925636 - DNA, 15 bp, Homo sapiens
gagaagagaaattgg

SEQ ID NO: 1925637 - DNA, 15 bp, Homo sapiens
agaagagaaattggg

SEQ ID NO: 1925638 - DNA, 15 bp, Homo sapiens
gaagagaaattggga

SEQ ID NO: 1925639 - DNA, 15 bp, Homo sapiens
aagagaaattgggag

SEQ ID NO: 1925640 - DNA, 15 bp, Homo sapiens
agagaaattgggagt

SEQ ID NO: 1925641 - DNA, 15 bp, Homo sapiens
gagaaattgggagta

SEQ ID NO: 1925642 - DNA, 15 bp, Homo sapiens
agaaattgggagtac

SEQ ID NO: 1925643 - DNA, 15 bp, Homo sapiens
gaaattgggagtacc

SEQ ID NO: 1925644 - DNA, 15 bp, Homo sapiens
aaattgggagtacca

SEQ ID NO: 1925645 - DNA, 15 bp, Homo sapiens
aattgggagtaccaa

SEQ ID NO: 1925646 - DNA, 15 bp, Homo sapiens
attgggagtaccaag

SEQ ID NO: 1925647 - DNA, 15 bp, Homo sapiens
ttgggagtaccaagg

SEQ ID NO: 1925648 - DNA, 15 bp, Homo sapiens
tgggagtaccaaggg

SEQ ID NO: 1925649 - DNA, 15 bp, Homo sapiens
gggagtaccaagggt

SEQ ID NO: 1925650 - DNA, 15 bp, Homo sapiens
ggagtaccaagggta

SEQ ID NO: 1925651 - DNA, 15 bp, Homo sapiens
gagtaccaagggtac

SEQ ID NO: 1925652 - DNA, 15 bp, Homo sapiens
agtaccaagggtact

SEQ ID NO: 1925653 - DNA, 15 bp, Homo sapiens
gtaccaagggtactt

SEQ ID NO: 1925654 - DNA, 15 bp, Homo sapiens
taccaagggtactta

SEQ ID NO: 1925655 - DNA, 15 bp, Homo sapiens
accaagggtacttac

SEQ ID NO: 1925656 - DNA, 15 bp, Homo sapiens
ccaagggtacttact

SEQ ID NO: 1925657 - DNA, 15 bp, Homo sapiens
caagggtacttacta

SEQ ID NO: 1925658 - DNA, 15 bp, Homo sapiens
aagggtacttactat

SEQ ID NO: 1925659 - DNA, 15 bp, Homo sapiens
agggtacttactatg

SEQ ID NO: 1925660 - DNA, 15 bp, Homo sapiens
gggtacttactatgt

SEQ ID NO: 1925661 - DNA, 15 bp, Homo sapiens
ggtacttactatgtg

SEQ ID NO: 1925662 - DNA, 15 bp, Homo sapiens
gtacttactatgtga

SEQ ID NO: 1925663 - DNA, 15 bp, Homo sapiens
tacttactatgtgag

SEQ ID NO: 1925664 - DNA, 15 bp, Homo sapiens
acttactatgtgaga

SEQ ID NO: 1925665 - DNA, 15 bp, Homo sapiens
cttactatgtgagat

SEQ ID NO: 1925666 - DNA, 15 bp, Homo sapiens
ttactatgtgagatt

SEQ ID NO: 1925667 - DNA, 15 bp, Homo sapiens
tactatgtgagattg

SEQ ID NO: 1925668 - DNA, 15 bp, Homo sapiens
actatgtgagattgc

SEQ ID NO: 1925669 - DNA, 15 bp, Homo sapiens
ctatgtgagattgca

SEQ ID NO: 1925670 - DNA, 15 bp, Homo sapiens
tatgtgagattgcag

SEQ ID NO: 1925671 - DNA, 15 bp, Homo sapiens
atgtgagattgcagg

SEQ ID NO: 1925672 - DNA, 15 bp, Homo sapiens
tgtgagattgcaggg

SEQ ID NO: 1925673 - DNA, 15 bp, Homo sapiens
gtgagattgcaggga

SEQ ID NO: 1925674 - DNA, 15 bp, Homo sapiens
tgagattgcagggaa

SEQ ID NO: 1925675 - DNA, 15 bp, Homo sapiens
gagattgcagggaaa

SEQ ID NO: 1925676 - DNA, 15 bp, Homo sapiens
agattgcagggaaac

SEQ ID NO: 1925677 - DNA, 15 bp, Homo sapiens
gattgcagggaaaca

SEQ ID NO: 1925678 - DNA, 15 bp, Homo sapiens
attgcagggaaacaa

SEQ ID NO: 1925679 - DNA, 15 bp, Homo sapiens
ttgcagggaaacaaa

SEQ ID NO: 1925680 - DNA, 15 bp, Homo sapiens
tgcagggaaacaaat

SEQ ID NO: 1925681 - DNA, 15 bp, Homo sapiens
gcagggaaacaaata

SEQ ID NO: 1925682 - DNA, 15 bp, Homo sapiens
cagggaaacaaatat

SEQ ID NO: 1925683 - DNA, 15 bp, Homo sapiens
agggaaacaaatata

SEQ ID NO: 1925684 - DNA, 15 bp, Homo sapiens
gggaaacaaatataa

SEQ ID NO: 1925685 - DNA, 15 bp, Homo sapiens
ggaaacaaatataat

SEQ ID NO: 1925686 - DNA, 15 bp, Homo sapiens
gaaacaaatataata

SEQ ID NO: 1925687 - DNA, 15 bp, Homo sapiens
aaacaaatataataa

SEQ ID NO: 1925688 - DNA, 15 bp, Homo sapiens
aacaaatataataag

SEQ ID NO: 1925689 - DNA, 15 bp, Homo sapiens
acaaatataataaga

SEQ ID NO: 1925690 - DNA, 15 bp, Homo sapiens
caaatataataagaa

SEQ ID NO: 1925691 - DNA, 15 bp, Homo sapiens
aaatataataagaat

SEQ ID NO: 1925692 - DNA, 15 bp, Homo sapiens
aatataataagaatt

SEQ ID NO: 1925693 - DNA, 15 bp, Homo sapiens
atataataagaattt

SEQ ID NO: 1925694 - DNA, 15 bp, Homo sapiens
tataataagaatttt

SEQ ID NO: 1925695 - DNA, 15 bp, Homo sapiens
ataataagaattttt

SEQ ID NO: 1925696 - DNA, 15 bp, Homo sapiens
taataagaattttta

SEQ ID NO: 1925697 - DNA, 15 bp, Homo sapiens
aataagaatttttag

SEQ ID NO: 1925698 - DNA, 15 bp, Homo sapiens
ataagaatttttagg

SEQ ID NO: 1925699 - DNA, 15 bp, Homo sapiens
taagaatttttaggg

SEQ ID NO: 1925700 - DNA, 15 bp, Homo sapiens
aagaatttttagggc

SEQ ID NO: 1925701 - DNA, 15 bp, Homo sapiens
agaatttttagggca

SEQ ID NO: 1925702 - DNA, 15 bp, Homo sapiens
gaatttttagggcac

SEQ ID NO: 1925703 - DNA, 15 bp, Homo sapiens
aatttttagggcaca

SEQ ID NO: 1925704 - DNA, 15 bp, Homo sapiens
atttttagggcacat

SEQ ID NO: 1925705 - DNA, 15 bp, Homo sapiens
tttttagggcacatg

SEQ ID NO: 1925706 - DNA, 15 bp, Homo sapiens
ttttagggcacatgc

SEQ ID NO: 1925707 - DNA, 15 bp, Homo sapiens
tttagggcacatgct

SEQ ID NO: 1925708 - DNA, 15 bp, Homo sapiens
ttagggcacatgctt

SEQ ID NO: 1925709 - DNA, 15 bp, Homo sapiens
tagggcacatgcttc

SEQ ID NO: 1925710 - DNA, 15 bp, Homo sapiens
agggcacatgcttca

SEQ ID NO: 1925711 - DNA, 15 bp, Homo sapiens
gggcacatgcttcag

SEQ ID NO: 1925712 - DNA, 15 bp, Homo sapiens
ggcacatgcttcaga

SEQ ID NO: 1925713 - DNA, 15 bp, Homo sapiens
gcacatgcttcagat

SEQ ID NO: 1925714 - DNA, 15 bp, Homo sapiens
cacatgcttcagatt

SEQ ID NO: 1925715 - DNA, 15 bp, Homo sapiens
acatgcttcagatta

SEQ ID NO: 1925716 - DNA, 15 bp, Homo sapiens
catgcttcagattac

SEQ ID NO: 1925717 - DNA, 15 bp, Homo sapiens
atgcttcagattaca

SEQ ID NO: 1925718 - DNA, 15 bp, Homo sapiens
tgcttcagattacat

SEQ ID NO: 1925719 - DNA, 15 bp, Homo sapiens
gcttcagattacata

SEQ ID NO: 1925720 - DNA, 15 bp, Homo sapiens
cttcagattacatac

SEQ ID NO: 1925721 - DNA, 15 bp, Homo sapiens
ttcagattacatact

SEQ ID NO: 1925722 - DNA, 15 bp, Homo sapiens
tcagattacatactg

SEQ ID NO: 1925723 - DNA, 15 bp, Homo sapiens
cagattacatactgt

SEQ ID NO: 1925724 - DNA, 15 bp, Homo sapiens
agattacatactgta

SEQ ID NO: 1925725 - DNA, 15 bp, Homo sapiens
gattacatactgtaa

SEQ ID NO: 1925726 - DNA, 15 bp, Homo sapiens
attacatactgtaat

SEQ ID NO: 1925727 - DNA, 15 bp, Homo sapiens
ttacatactgtaatg

SEQ ID NO: 1925728 - DNA, 15 bp, Homo sapiens
tacatactgtaatgt

SEQ ID NO: 1925729 - DNA, 15 bp, Homo sapiens
acatactgtaatgtc

SEQ ID NO: 1925730 - DNA, 15 bp, Homo sapiens
catactgtaatgtcc

SEQ ID NO: 1925731 - DNA, 15 bp, Homo sapiens
atactgtaatgtcct

SEQ ID NO: 1925732 - DNA, 15 bp, Homo sapiens
tactgtaatgtcctc

SEQ ID NO: 1925733 - DNA, 15 bp, Homo sapiens
actgtaatgtcctcc

SEQ ID NO: 1925734 - DNA, 15 bp, Homo sapiens
ctgtaatgtcctccc

SEQ ID NO: 1925735 - DNA, 15 bp, Homo sapiens
tgtaatgtcctccct

SEQ ID NO: 1925736 - DNA, 15 bp, Homo sapiens
gtaatgtcctccctc

SEQ ID NO: 1925737 - DNA, 15 bp, Homo sapiens
taatgtcctccctca

SEQ ID NO: 1925738 - DNA, 15 bp, Homo sapiens
aatgtcctccctcac

SEQ ID NO: 1925739 - DNA, 15 bp, Homo sapiens
atgtcctccctcacc

SEQ ID NO: 1925740 - DNA, 15 bp, Homo sapiens
tgtcctccctcacct

SEQ ID NO: 1925741 - DNA, 15 bp, Homo sapiens
gtcctccctcacctc

SEQ ID NO: 1925742 - DNA, 15 bp, Homo sapiens
tcctccctcacctca

SEQ ID NO: 1925743 - DNA, 15 bp, Homo sapiens
cctccctcacctcac

SEQ ID NO: 1925744 - DNA, 15 bp, Homo sapiens
ctccctcacctcact

SEQ ID NO: 1925745 - DNA, 15 bp, Homo sapiens
tccctcacctcactc

SEQ ID NO: 1925746 - DNA, 15 bp, Homo sapiens
ccctcacctcactcc

SEQ ID NO: 1925747 - DNA, 15 bp, Homo sapiens
cctcacctcactcca

SEQ ID NO: 1925748 - DNA, 15 bp, Homo sapiens
ctcacctcactccag

SEQ ID NO: 1925749 - DNA, 15 bp, Homo sapiens
tcacctcactccagc

SEQ ID NO: 1925750 - DNA, 15 bp, Homo sapiens
cacctcactccagct

SEQ ID NO: 1925751 - DNA, 15 bp, Homo sapiens
acctcactccagctc

SEQ ID NO: 1925752 - DNA, 15 bp, Homo sapiens
cctcactccagctct

SEQ ID NO: 1925753 - DNA, 15 bp, Homo sapiens
ctcactccagctctg

SEQ ID NO: 1925754 - DNA, 15 bp, Homo sapiens
tcactccagctctgc

SEQ ID NO: 1925755 - DNA, 15 bp, Homo sapiens
cactccagctctgct

SEQ ID NO: 1925756 - DNA, 15 bp, Homo sapiens
actccagctctgctg

SEQ ID NO: 1925757 - DNA, 15 bp, Homo sapiens
ctccagctctgctgg

SEQ ID NO: 1925758 - DNA, 15 bp, Homo sapiens
tccagctctgctggt

SEQ ID NO: 1925759 - DNA, 15 bp, Homo sapiens
ccagctctgctggta

SEQ ID NO: 1925760 - DNA, 15 bp, Homo sapiens
cagctctgctggtat

SEQ ID NO: 1925761 - DNA, 15 bp, Homo sapiens
agctctgctggtatt

SEQ ID NO: 1925762 - DNA, 15 bp, Homo sapiens
gctctgctggtattt

SEQ ID NO: 1925763 - DNA, 15 bp, Homo sapiens
ctctgctggtatttc

SEQ ID NO: 1925764 - DNA, 15 bp, Homo sapiens
tctgctggtatttca

SEQ ID NO: 1925765 - DNA, 15 bp, Homo sapiens
ctgctggtatttcag

SEQ ID NO: 1925766 - DNA, 15 bp, Homo sapiens
tgctggtatttcagc

SEQ ID NO: 1925767 - DNA, 15 bp, Homo sapiens
gctggtatttcagct

SEQ ID NO: 1925768 - DNA, 15 bp, Homo sapiens
ctggtatttcagctg

SEQ ID NO: 1925769 - DNA, 15 bp, Homo sapiens
tggtatttcagctga

SEQ ID NO: 1925770 - DNA, 15 bp, Homo sapiens
ggtatttcagctgaa

SEQ ID NO: 1925771 - DNA, 15 bp, Homo sapiens
gtatttcagctgaat

SEQ ID NO: 1925772 - DNA, 15 bp, Homo sapiens
tatttcagctgaatc

SEQ ID NO: 1925773 - DNA, 15 bp, Homo sapiens
atttcagctgaatca

SEQ ID NO: 1925774 - DNA, 15 bp, Homo sapiens
tttcagctgaatcaa

SEQ ID NO: 1925775 - DNA, 15 bp, Homo sapiens
ttcagctgaatcaat

SEQ ID NO: 1925776 - DNA, 15 bp, Homo sapiens
tcagctgaatcaatt

SEQ ID NO: 1925777 - DNA, 15 bp, Homo sapiens
cagctgaatcaatta

SEQ ID NO: 1925778 - DNA, 15 bp, Homo sapiens
agctgaatcaattag

SEQ ID NO: 1925779 - DNA, 15 bp, Homo sapiens
gctgaatcaattaga

SEQ ID NO: 1925780 - DNA, 15 bp, Homo sapiens
ctgaatcaattagaa

SEQ ID NO: 1925781 - DNA, 15 bp, Homo sapiens
tgaatcaattagaac

SEQ ID NO: 1925782 - DNA, 15 bp, Homo sapiens
gaatcaattagaacc

SEQ ID NO: 1925783 - DNA, 15 bp, Homo sapiens
aatcaattagaaccc

SEQ ID NO: 1925784 - DNA, 15 bp, Homo sapiens
atcaattagaaccca

SEQ ID NO: 1925785 - DNA, 15 bp, Homo sapiens
tcaattagaacccat

SEQ ID NO: 1925786 - DNA, 15 bp, Homo sapiens
caattagaacccatt

SEQ ID NO: 1925787 - DNA, 15 bp, Homo sapiens
aattagaacccattt

SEQ ID NO: 1925788 - DNA, 15 bp, Homo sapiens
attagaacccatttg

SEQ ID NO: 1925789 - DNA, 15 bp, Homo sapiens
ttagaacccatttgt

SEQ ID NO: 1925790 - DNA, 15 bp, Homo sapiens
tagaacccatttgtt

SEQ ID NO: 1925791 - DNA, 15 bp, Homo sapiens
agaacccatttgtta

SEQ ID NO: 1925792 - DNA, 15 bp, Homo sapiens
gaacccatttgttaa

SEQ ID NO: 1925793 - DNA, 15 bp, Homo sapiens
aacccatttgttaaa

SEQ ID NO: 1925794 - DNA, 15 bp, Homo sapiens
acccatttgttaaaa

SEQ ID NO: 1925795 - DNA, 15 bp, Homo sapiens
cccatttgttaaaag

SEQ ID NO: 1925796 - DNA, 15 bp, Homo sapiens
ccatttgttaaaagt

SEQ ID NO: 1925797 - DNA, 15 bp, Homo sapiens
catttgttaaaagtc

SEQ ID NO: 1925798 - DNA, 15 bp, Homo sapiens
atttgttaaaagtca

SEQ ID NO: 1925799 - DNA, 15 bp, Homo sapiens
tttgttaaaagtcac

SEQ ID NO: 1925800 - DNA, 15 bp, Homo sapiens
ttgttaaaagtcacc

SEQ ID NO: 1925801 - DNA, 15 bp, Homo sapiens
tgttaaaagtcacca

SEQ ID NO: 1925802 - DNA, 15 bp, Homo sapiens
gttaaaagtcaccaa

SEQ ID NO: 1925803 - DNA, 15 bp, Homo sapiens
ttaaaagtcaccaaa

SEQ ID NO: 1925804 - DNA, 15 bp, Homo sapiens
taaaagtcaccaaaa

SEQ ID NO: 1925805 - DNA, 15 bp, Homo sapiens
aaaagtcaccaaaaa

SEQ ID NO: 1925806 - DNA, 15 bp, Homo sapiens
aaagtcaccaaaaag

SEQ ID NO: 1925807 - DNA, 15 bp, Homo sapiens
aagtcaccaaaaaga

SEQ ID NO: 1925808 - DNA, 15 bp, Homo sapiens
agtcaccaaaaagac

SEQ ID NO: 1925809 - DNA, 15 bp, Homo sapiens
gtcaccaaaaagacg

SEQ ID NO: 1925810 - DNA, 15 bp, Homo sapiens
tcaccaaaaagacgt

SEQ ID NO: 1925811 - DNA, 15 bp, Homo sapiens
caccaaaaagacgtc

SEQ ID NO: 1925812 - DNA, 15 bp, Homo sapiens
accaaaaagacgtct

SEQ ID NO: 1925813 - DNA, 15 bp, Homo sapiens
ccaaaaagacgtctt

SEQ ID NO: 1925814 - DNA, 15 bp, Homo sapiens
caaaaagacgtcttt

SEQ ID NO: 1925815 - DNA, 15 bp, Homo sapiens
aaaaagacgtcttta

SEQ ID NO: 1925816 - DNA, 15 bp, Homo sapiens
aaaagacgtctttat

SEQ ID NO: 1925817 - DNA, 15 bp, Homo sapiens
aaagacgtctttata

SEQ ID NO: 1925818 - DNA, 15 bp, Homo sapiens
aagacgtctttatag

SEQ ID NO: 1925819 - DNA, 15 bp, Homo sapiens
agacgtctttatagc

SEQ ID NO: 1925820 - DNA, 15 bp, Homo sapiens
gacgtctttatagca

SEQ ID NO: 1925821 - DNA, 15 bp, Homo sapiens
acgtctttatagcaa

SEQ ID NO: 1925822 - DNA, 15 bp, Homo sapiens
cgtctttatagcaaa

SEQ ID NO: 1925823 - DNA, 15 bp, Homo sapiens
gtctttatagcaaaa

SEQ ID NO: 1925824 - DNA, 15 bp, Homo sapiens
tctttatagcaaaaa

SEQ ID NO: 1925825 - DNA, 15 bp, Homo sapiens
ctttatagcaaaaaa

SEQ ID NO: 1925826 - DNA, 15 bp, Homo sapiens
tttatagcaaaaaaa

SEQ ID NO: 1925827 - DNA, 15 bp, Homo sapiens
ttatagcaaaaaaaa

SEQ ID NO: 1925828 - DNA, 15 bp, Homo sapiens
tatagcaaaaaaaaa

SEQ ID NO: 1925829 - DNA, 15 bp, Homo sapiens
atagcaaaaaaaaaa

SEQ ID NO: 1925830 - DNA, 15 bp, Homo sapiens
tagcaaaaaaaaaaa

SEQ ID NO: 1925831 - DNA, 15 bp, Homo sapiens
aaaaaaaaaacaaac

SEQ ID NO: 1925832 - DNA, 15 bp, Homo sapiens
aaaaaaaaacaaacc

SEQ ID NO: 1925833 - DNA, 15 bp, Homo sapiens
aaaaaaaacaaacca

SEQ ID NO: 1925834 - DNA, 15 bp, Homo sapiens
aaaaaaacaaaccaa

SEQ ID NO: 1925835 - DNA, 15 bp, Homo sapiens
aaaaaacaaaccaaa

SEQ ID NO: 1925836 - DNA, 15 bp, Homo sapiens
aaaaacaaaccaaaa

SEQ ID NO: 1925837 - DNA, 15 bp, Homo sapiens
aaaacaaaccaaaaa

SEQ ID NO: 1925838 - DNA, 15 bp, Homo sapiens
aaacaaaccaaaaac

SEQ ID NO: 1925839 - DNA, 15 bp, Homo sapiens
aacaaaccaaaaaca

SEQ ID NO: 1925840 - DNA, 15 bp, Homo sapiens
acaaaccaaaaacaa

SEQ ID NO: 1925841 - DNA, 15 bp, Homo sapiens
caaaccaaaaacaaa

SEQ ID NO: 1925842 - DNA, 15 bp, Homo sapiens
aaaccaaaaacaaaa

SEQ ID NO: 1925843 - DNA, 15 bp, Homo sapiens
aaccaaaaacaaaac

SEQ ID NO: 1925844 - DNA, 15 bp, Homo sapiens
accaaaaacaaaaca

SEQ ID NO: 1925845 - DNA, 15 bp, Homo sapiens
ccaaaaacaaaacaa

SEQ ID NO: 1925846 - DNA, 15 bp, Homo sapiens
aacaaaacaaaaaaa

SEQ ID NO: 1925847 - DNA, 15 bp, Homo sapiens
acaaaacaaaaaaaa

SEQ ID NO: 1925848 - DNA, 15 bp, Homo sapiens
caaaacaaaaaaaaa

SEQ ID NO: 1925849 - DNA, 15 bp, Homo sapiens
aacaaaaaaaaacca

SEQ ID NO: 1925850 - DNA, 15 bp, Homo sapiens
acaaaaaaaaaccaa

SEQ ID NO: 1925851 - DNA, 15 bp, Homo sapiens
caaaaaaaaaccaaa

SEQ ID NO: 1925852 - DNA, 15 bp, Homo sapiens
aaaaaaaaaccaaaa

SEQ ID NO: 1925853 - DNA, 15 bp, Homo sapiens
aaaaaaaaccaaaaa

SEQ ID NO: 1925854 - DNA, 15 bp, Homo sapiens
aaaaaaaccaaaaaa

SEQ ID NO: 1925855 - DNA, 15 bp, Homo sapiens
aaaaaaccaaaaaac

SEQ ID NO: 1925856 - DNA, 15 bp, Homo sapiens
aaaaaccaaaaaacc

SEQ ID NO: 1925857 - DNA, 15 bp, Homo sapiens
aaaaccaaaaaaccc

SEQ ID NO: 1925858 - DNA, 15 bp, Homo sapiens
aaaccaaaaaacccc

SEQ ID NO: 1925859 - DNA, 15 bp, Homo sapiens
aaccaaaaaaccccg

SEQ ID NO: 1925860 - DNA, 15 bp, Homo sapiens
accaaaaaaccccgg

SEQ ID NO: 1925861 - DNA, 15 bp, Homo sapiens
ccaaaaaaccccgga

SEQ ID NO: 1925862 - DNA, 15 bp, Homo sapiens
caaaaaaccccggaa

SEQ ID NO: 1925863 - DNA, 15 bp, Homo sapiens
aaaaaaccccggaat

SEQ ID NO: 1925864 - DNA, 15 bp, Homo sapiens
aaaaaccccggaatt

SEQ ID NO: 1925865 - DNA, 15 bp, Homo sapiens
aaaaccccggaattt

SEQ ID NO: 1925866 - DNA, 15 bp, Homo sapiens
aaaccccggaatttc

SEQ ID NO: 1925867 - DNA, 15 bp, Homo sapiens
aaccccggaatttct

SEQ ID NO: 1925868 - DNA, 15 bp, Homo sapiens
accccggaatttcta

SEQ ID NO: 1925869 - DNA, 15 bp, Homo sapiens
ccccggaatttctag

SEQ ID NO: 1925870 - DNA, 15 bp, Homo sapiens
cccggaatttctagc

SEQ ID NO: 1925871 - DNA, 15 bp, Homo sapiens
ccggaatttctagct

SEQ ID NO: 1925872 - DNA, 15 bp, Homo sapiens
cggaatttctagctc

SEQ ID NO: 1925873 - DNA, 15 bp, Homo sapiens
ggaatttctagctcc

SEQ ID NO: 1925874 - DNA, 15 bp, Homo sapiens
gaatttctagctccc

SEQ ID NO: 1925875 - DNA, 15 bp, Homo sapiens
aatttctagctcccg

SEQ ID NO: 1925876 - DNA, 15 bp, Homo sapiens
atttctagctcccgt

SEQ ID NO: 1925877 - DNA, 15 bp, Homo sapiens
tttctagctcccgta

SEQ ID NO: 1925878 - DNA, 15 bp, Homo sapiens
ttctagctcccgtaa

SEQ ID NO: 1925879 - DNA, 15 bp, Homo sapiens
tctagctcccgtaaa

SEQ ID NO: 1925880 - DNA, 15 bp, Homo sapiens
ctagctcccgtaaat

SEQ ID NO: 1925881 - DNA, 15 bp, Homo sapiens
tagctcccgtaaata

SEQ ID NO: 1925882 - DNA, 15 bp, Homo sapiens
agctcccgtaaataa

SEQ ID NO: 1925883 - DNA, 15 bp, Homo sapiens
gctcccgtaaataaa

SEQ ID NO: 1925884 - DNA, 15 bp, Homo sapiens
ctcccgtaaataaaa

SEQ ID NO: 1925885 - DNA, 15 bp, Homo sapiens
tcccgtaaataaaat

SEQ ID NO: 1925886 - DNA, 15 bp, Homo sapiens
cccgtaaataaaata

SEQ ID NO: 1925887 - DNA, 15 bp, Homo sapiens
ccgtaaataaaatag

SEQ ID NO: 1925888 - DNA, 15 bp, Homo sapiens
cgtaaataaaatagt

SEQ ID NO: 1925889 - DNA, 15 bp, Homo sapiens
gtaaataaaatagta

SEQ ID NO: 1925890 - DNA, 15 bp, Homo sapiens
taaataaaatagtat

SEQ ID NO: 1925891 - DNA, 15 bp, Homo sapiens
aaataaaatagtatc

SEQ ID NO: 1925892 - DNA, 15 bp, Homo sapiens
aataaaatagtatca

SEQ ID NO: 1925893 - DNA, 15 bp, Homo sapiens
ataaaatagtatcaa

SEQ ID NO: 1925894 - DNA, 15 bp, Homo sapiens
taaaatagtatcaag

SEQ ID NO: 1925895 - DNA, 15 bp, Homo sapiens
aaaatagtatcaagt

SEQ ID NO: 1925896 - DNA, 15 bp, Homo sapiens
aaatagtatcaagta

SEQ ID NO: 1925897 - DNA, 15 bp, Homo sapiens
aatagtatcaagtag

SEQ ID NO: 1925898 - DNA, 15 bp, Homo sapiens
atagtatcaagtagt

SEQ ID NO: 1925899 - DNA, 15 bp, Homo sapiens
tagtatcaagtagtt

SEQ ID NO: 1925900 - DNA, 15 bp, Homo sapiens
agtatcaagtagttt

SEQ ID NO: 1925901 - DNA, 15 bp, Homo sapiens
gtatcaagtagtttg

SEQ ID NO: 1925902 - DNA, 15 bp, Homo sapiens
tatcaagtagtttga

SEQ ID NO: 1925903 - DNA, 15 bp, Homo sapiens
atcaagtagtttgat

SEQ ID NO: 1925904 - DNA, 15 bp, Homo sapiens
tcaagtagtttgatt

SEQ ID NO: 1925905 - DNA, 15 bp, Homo sapiens
caagtagtttgatta

SEQ ID NO: 1925906 - DNA, 15 bp, Homo sapiens
aagtagtttgattag

SEQ ID NO: 1925907 - DNA, 15 bp, Homo sapiens
agtagtttgattagc

SEQ ID NO: 1925908 - DNA, 15 bp, Homo sapiens
gtagtttgattagcc

SEQ ID NO: 1925909 - DNA, 15 bp, Homo sapiens
tagtttgattagcct

SEQ ID NO: 1925910 - DNA, 15 bp, Homo sapiens
agtttgattagcctg

SEQ ID NO: 1925911 - DNA, 15 bp, Homo sapiens
gtttgattagcctga

SEQ ID NO: 1925912 - DNA, 15 bp, Homo sapiens
tttgattagcctgat

SEQ ID NO: 1925913 - DNA, 15 bp, Homo sapiens
ttgattagcctgatt

SEQ ID NO: 1925914 - DNA, 15 bp, Homo sapiens
tgattagcctgattt

SEQ ID NO: 1925915 - DNA, 15 bp, Homo sapiens
gattagcctgattta

SEQ ID NO: 1925916 - DNA, 15 bp, Homo sapiens
attagcctgatttag

SEQ ID NO: 1925917 - DNA, 15 bp, Homo sapiens
ttagcctgatttagg

SEQ ID NO: 1925918 - DNA, 15 bp, Homo sapiens
tagcctgatttaggt

SEQ ID NO: 1925919 - DNA, 15 bp, Homo sapiens
agcctgatttaggta

SEQ ID NO: 1925920 - DNA, 15 bp, Homo sapiens
gcctgatttaggtac

SEQ ID NO: 1925921 - DNA, 15 bp, Homo sapiens
cctgatttaggtaca

SEQ ID NO: 1925922 - DNA, 15 bp, Homo sapiens
ctgatttaggtacag

SEQ ID NO: 1925923 - DNA, 15 bp, Homo sapiens
tgatttaggtacagt

SEQ ID NO: 1925924 - DNA, 15 bp, Homo sapiens
gatttaggtacagtt

SEQ ID NO: 1925925 - DNA, 15 bp, Homo sapiens
atttaggtacagttt

SEQ ID NO: 1925926 - DNA, 15 bp, Homo sapiens
tttaggtacagtttc

SEQ ID NO: 1925927 - DNA, 15 bp, Homo sapiens
ttaggtacagtttca

SEQ ID NO: 1925928 - DNA, 15 bp, Homo sapiens
taggtacagtttcat

SEQ ID NO: 1925929 - DNA, 15 bp, Homo sapiens
aggtacagtttcatc

SEQ ID NO: 1925930 - DNA, 15 bp, Homo sapiens
ggtacagtttcatct

SEQ ID NO: 1925931 - DNA, 15 bp, Homo sapiens
gtacagtttcatcta

SEQ ID NO: 1925932 - DNA, 15 bp, Homo sapiens
tacagtttcatctag

SEQ ID NO: 1925933 - DNA, 15 bp, Homo sapiens
acagtttcatctagg

SEQ ID NO: 1925934 - DNA, 15 bp, Homo sapiens
cagtttcatctagga

SEQ ID NO: 1925935 - DNA, 15 bp, Homo sapiens
agtttcatctaggat

SEQ ID NO: 1925936 - DNA, 15 bp, Homo sapiens
gtttcatctaggatc

SEQ ID NO: 1925937 - DNA, 15 bp, Homo sapiens
tttcatctaggatct

SEQ ID NO: 1925938 - DNA, 15 bp, Homo sapiens
ttcatctaggatctc

SEQ ID NO: 1925939 - DNA, 15 bp, Homo sapiens
tcatctaggatctca

SEQ ID NO: 1925940 - DNA, 15 bp, Homo sapiens
catctaggatctcaa

SEQ ID NO: 1925941 - DNA, 15 bp, Homo sapiens
atctaggatctcaag

SEQ ID NO: 1925942 - DNA, 15 bp, Homo sapiens
tctaggatctcaagc

SEQ ID NO: 1925943 - DNA, 15 bp, Homo sapiens
ctaggatctcaagca

SEQ ID NO: 1925944 - DNA, 15 bp, Homo sapiens
taggatctcaagcaa

SEQ ID NO: 1925945 - DNA, 15 bp, Homo sapiens
aggatctcaagcaat

SEQ ID NO: 1925946 - DNA, 15 bp, Homo sapiens
ggatctcaagcaata

SEQ ID NO: 1925947 - DNA, 15 bp, Homo sapiens
gatctcaagcaatat

SEQ ID NO: 1925948 - DNA, 15 bp, Homo sapiens
atctcaagcaatatg

SEQ ID NO: 1925949 - DNA, 15 bp, Homo sapiens
tctcaagcaatatgg

SEQ ID NO: 1925950 - DNA, 15 bp, Homo sapiens
ctcaagcaatatggt

SEQ ID NO: 1925951 - DNA, 15 bp, Homo sapiens
tcaagcaatatggtc

SEQ ID NO: 1925952 - DNA, 15 bp, Homo sapiens
caagcaatatggtca

SEQ ID NO: 1925953 - DNA, 15 bp, Homo sapiens
aagcaatatggtcag

SEQ ID NO: 1925954 - DNA, 15 bp, Homo sapiens
agcaatatggtcaga

SEQ ID NO: 1925955 - DNA, 15 bp, Homo sapiens
gcaatatggtcagaa

SEQ ID NO: 1925956 - DNA, 15 bp, Homo sapiens
caatatggtcagaat

SEQ ID NO: 1925957 - DNA, 15 bp, Homo sapiens
aatatggtcagaatt

SEQ ID NO: 1925958 - DNA, 15 bp, Homo sapiens
atatggtcagaattt

SEQ ID NO: 1925959 - DNA, 15 bp, Homo sapiens
tatggtcagaatttc

SEQ ID NO: 1925960 - DNA, 15 bp, Homo sapiens
atggtcagaatttca

SEQ ID NO: 1925961 - DNA, 15 bp, Homo sapiens
tggtcagaatttcat

SEQ ID NO: 1925962 - DNA, 15 bp, Homo sapiens
ggtcagaatttcatt

SEQ ID NO: 1925963 - DNA, 15 bp, Homo sapiens
gtcagaatttcattt

SEQ ID NO: 1925964 - DNA, 15 bp, Homo sapiens
tcagaatttcatttc

SEQ ID NO: 1925965 - DNA, 15 bp, Homo sapiens
cagaatttcatttct

SEQ ID NO: 1925966 - DNA, 15 bp, Homo sapiens
agaatttcatttctg

SEQ ID NO: 1925967 - DNA, 15 bp, Homo sapiens
gaatttcatttctgt

SEQ ID NO: 1925968 - DNA, 15 bp, Homo sapiens
aatttcatttctgtt

SEQ ID NO: 1925969 - DNA, 15 bp, Homo sapiens
atttcatttctgttc

SEQ ID NO: 1925970 - DNA, 15 bp, Homo sapiens
tttcatttctgttca

SEQ ID NO: 1925971 - DNA, 15 bp, Homo sapiens
ttcatttctgttcag

SEQ ID NO: 1925972 - DNA, 15 bp, Homo sapiens
tcatttctgttcagc

SEQ ID NO: 1925973 - DNA, 15 bp, Homo sapiens
catttctgttcagct

SEQ ID NO: 1925974 - DNA, 15 bp, Homo sapiens
atttctgttcagctt

SEQ ID NO: 1925975 - DNA, 15 bp, Homo sapiens
tttctgttcagcttt

SEQ ID NO: 1925976 - DNA, 15 bp, Homo sapiens
ttctgttcagctttt

SEQ ID NO: 1925977 - DNA, 15 bp, Homo sapiens
tctgttcagcttttg

SEQ ID NO: 1925978 - DNA, 15 bp, Homo sapiens
ctgttcagcttttga

SEQ ID NO: 1925979 - DNA, 15 bp, Homo sapiens
tgttcagcttttgaa

SEQ ID NO: 1925980 - DNA, 15 bp, Homo sapiens
gttcagcttttgaat

SEQ ID NO: 1925981 - DNA, 15 bp, Homo sapiens
ttcagcttttgaatc

SEQ ID NO: 1925982 - DNA, 15 bp, Homo sapiens
tcagcttttgaatct

SEQ ID NO: 1925983 - DNA, 15 bp, Homo sapiens
cagcttttgaatcta

SEQ ID NO: 1925984 - DNA, 15 bp, Homo sapiens
agcttttgaatctac

SEQ ID NO: 1925985 - DNA, 15 bp, Homo sapiens
gcttttgaatctacc

SEQ ID NO: 1925986 - DNA, 15 bp, Homo sapiens
cttttgaatctacct

SEQ ID NO: 1925987 - DNA, 15 bp, Homo sapiens
ttttgaatctacctt

SEQ ID NO: 1925988 - DNA, 15 bp, Homo sapiens
tttgaatctaccttc

SEQ ID NO: 1925989 - DNA, 15 bp, Homo sapiens
ttgaatctaccttct

SEQ ID NO: 1925990 - DNA, 15 bp, Homo sapiens
tgaatctaccttcta

SEQ ID NO: 1925991 - DNA, 15 bp, Homo sapiens
gaatctaccttctat

SEQ ID NO: 1925992 - DNA, 15 bp, Homo sapiens
aatctaccttctatc

SEQ ID NO: 1925993 - DNA, 15 bp, Homo sapiens
atctaccttctatca

SEQ ID NO: 1925994 - DNA, 15 bp, Homo sapiens
tctaccttctatcat

SEQ ID NO: 1925995 - DNA, 15 bp, Homo sapiens
ctaccttctatcatg

SEQ ID NO: 1925996 - DNA, 15 bp, Homo sapiens
taccttctatcatgt

SEQ ID NO: 1925997 - DNA, 15 bp, Homo sapiens
accttctatcatgtt

SEQ ID NO: 1925998 - DNA, 15 bp, Homo sapiens
ccttctatcatgttg

SEQ ID NO: 1925999 - DNA, 15 bp, Homo sapiens
cttctatcatgttgg

SEQ ID NO: 1926000 - DNA, 15 bp, Homo sapiens
ttctatcatgttggt

SEQ ID NO: 1926001 - DNA, 15 bp, Homo sapiens
tctatcatgttggtt

SEQ ID NO: 1926002 - DNA, 15 bp, Homo sapiens
ctatcatgttggttt

SEQ ID NO: 1926003 - DNA, 15 bp, Homo sapiens
tatcatgttggtttc

SEQ ID NO: 1926004 - DNA, 15 bp, Homo sapiens
atcatgttggtttca

SEQ ID NO: 1926005 - DNA, 15 bp, Homo sapiens
tcatgttggtttcat

SEQ ID NO: 1926006 - DNA, 15 bp, Homo sapiens
catgttggtttcatt

SEQ ID NO: 1926007 - DNA, 15 bp, Homo sapiens
atgttggtttcattc

SEQ ID NO: 1926008 - DNA, 15 bp, Homo sapiens
tgttggtttcattct

SEQ ID NO: 1926009 - DNA, 15 bp, Homo sapiens
gttggtttcattctt

SEQ ID NO: 1926010 - DNA, 15 bp, Homo sapiens
ttggtttcattcttt

SEQ ID NO: 1926011 - DNA, 15 bp, Homo sapiens
tggtttcattctttg

SEQ ID NO: 1926012 - DNA, 15 bp, Homo sapiens
ggtttcattctttgc

SEQ ID NO: 1926013 - DNA, 15 bp, Homo sapiens
gtttcattctttgct

SEQ ID NO: 1926014 - DNA, 15 bp, Homo sapiens
tttcattctttgcta

SEQ ID NO: 1926015 - DNA, 15 bp, Homo sapiens
ttcattctttgctac

SEQ ID NO: 1926016 - DNA, 15 bp, Homo sapiens
tcattctttgctacc

SEQ ID NO: 1926017 - DNA, 15 bp, Homo sapiens
cattctttgctacca

SEQ ID NO: 1926018 - DNA, 15 bp, Homo sapiens
attctttgctaccat

SEQ ID NO: 1926019 - DNA, 15 bp, Homo sapiens
ttctttgctaccatg

SEQ ID NO: 1926020 - DNA, 15 bp, Homo sapiens
tctttgctaccatga

SEQ ID NO: 1926021 - DNA, 15 bp, Homo sapiens
ctttgctaccatgag

SEQ ID NO: 1926022 - DNA, 15 bp, Homo sapiens
tttgctaccatgaga

SEQ ID NO: 1926023 - DNA, 15 bp, Homo sapiens
ttgctaccatgagaa

SEQ ID NO: 1926024 - DNA, 15 bp, Homo sapiens
tgctaccatgagaag

SEQ ID NO: 1926025 - DNA, 15 bp, Homo sapiens
gctaccatgagaagg

SEQ ID NO: 1926026 - DNA, 15 bp, Homo sapiens
ctaccatgagaaggt

SEQ ID NO: 1926027 - DNA, 15 bp, Homo sapiens
taccatgagaaggtc

SEQ ID NO: 1926028 - DNA, 15 bp, Homo sapiens
accatgagaaggtcc

SEQ ID NO: 1926029 - DNA, 15 bp, Homo sapiens
ccatgagaaggtccc

SEQ ID NO: 1926030 - DNA, 15 bp, Homo sapiens
catgagaaggtccca

SEQ ID NO: 1926031 - DNA, 15 bp, Homo sapiens
atgagaaggtcccag

SEQ ID NO: 1926032 - DNA, 15 bp, Homo sapiens
tgagaaggtcccagg

SEQ ID NO: 1926033 - DNA, 15 bp, Homo sapiens
gagaaggtcccaggt

SEQ ID NO: 1926034 - DNA, 15 bp, Homo sapiens
agaaggtcccaggta

SEQ ID NO: 1926035 - DNA, 15 bp, Homo sapiens
gaaggtcccaggtat

SEQ ID NO: 1926036 - DNA, 15 bp, Homo sapiens
aaggtcccaggtatt

SEQ ID NO: 1926037 - DNA, 15 bp, Homo sapiens
aggtcccaggtattc

SEQ ID NO: 1926038 - DNA, 15 bp, Homo sapiens
ggtcccaggtattca

SEQ ID NO: 1926039 - DNA, 15 bp, Homo sapiens
gtcccaggtattcag

SEQ ID NO: 1926040 - DNA, 15 bp, Homo sapiens
tcccaggtattcaga

SEQ ID NO: 1926041 - DNA, 15 bp, Homo sapiens
cccaggtattcagag

SEQ ID NO: 1926042 - DNA, 15 bp, Homo sapiens
ccaggtattcagagc

SEQ ID NO: 1926043 - DNA, 15 bp, Homo sapiens
caggtattcagagct

SEQ ID NO: 1926044 - DNA, 15 bp, Homo sapiens
aggtattcagagctt

SEQ ID NO: 1926045 - DNA, 15 bp, Homo sapiens
ggtattcagagcttt

SEQ ID NO: 1926046 - DNA, 15 bp, Homo sapiens
gtattcagagcttta

SEQ ID NO: 1926047 - DNA, 15 bp, Homo sapiens
tattcagagctttaa

SEQ ID NO: 1926048 - DNA, 15 bp, Homo sapiens
attcagagctttaat

SEQ ID NO: 1926049 - DNA, 15 bp, Homo sapiens
ttcagagctttaatc

SEQ ID NO: 1926050 - DNA, 15 bp, Homo sapiens
tcagagctttaatct

SEQ ID NO: 1926051 - DNA, 15 bp, Homo sapiens
cagagctttaatctc

SEQ ID NO: 1926052 - DNA, 15 bp, Homo sapiens
agagctttaatctca

SEQ ID NO: 1926053 - DNA, 15 bp, Homo sapiens
gagctttaatctcag

SEQ ID NO: 1926054 - DNA, 15 bp, Homo sapiens
agctttaatctcagt

SEQ ID NO: 1926055 - DNA, 15 bp, Homo sapiens
gctttaatctcagtt

SEQ ID NO: 1926056 - DNA, 15 bp, Homo sapiens
ctttaatctcagttt

SEQ ID NO: 1926057 - DNA, 15 bp, Homo sapiens
tttaatctcagtttc

SEQ ID NO: 1926058 - DNA, 15 bp, Homo sapiens
ttaatctcagtttct

SEQ ID NO: 1926059 - DNA, 15 bp, Homo sapiens
taatctcagtttcta

SEQ ID NO: 1926060 - DNA, 15 bp, Homo sapiens
aatctcagtttctag

SEQ ID NO: 1926061 - DNA, 15 bp, Homo sapiens
atctcagtttctagt

SEQ ID NO: 1926062 - DNA, 15 bp, Homo sapiens
tctcagtttctagtc

SEQ ID NO: 1926063 - DNA, 15 bp, Homo sapiens
ctcagtttctagtcc

SEQ ID NO: 1926064 - DNA, 15 bp, Homo sapiens
tcagtttctagtcct

SEQ ID NO: 1926065 - DNA, 15 bp, Homo sapiens
cagtttctagtcctg

SEQ ID NO: 1926066 - DNA, 15 bp, Homo sapiens
agtttctagtcctgt

SEQ ID NO: 1926067 - DNA, 15 bp, Homo sapiens
gtttctagtcctgtg

SEQ ID NO: 1926068 - DNA, 15 bp, Homo sapiens
tttctagtcctgtgg

SEQ ID NO: 1926069 - DNA, 15 bp, Homo sapiens
ttctagtcctgtgga

SEQ ID NO: 1926070 - DNA, 15 bp, Homo sapiens
tctagtcctgtggaa

SEQ ID NO: 1926071 - DNA, 15 bp, Homo sapiens
ctagtcctgtggaaa

SEQ ID NO: 1926072 - DNA, 15 bp, Homo sapiens
tagtcctgtggaaaa

SEQ ID NO: 1926073 - DNA, 15 bp, Homo sapiens
agtcctgtggaaaaa

SEQ ID NO: 1926074 - DNA, 15 bp, Homo sapiens
gtcctgtggaaaaag

SEQ ID NO: 1926075 - DNA, 15 bp, Homo sapiens
tcctgtggaaaaaga

SEQ ID NO: 1926076 - DNA, 15 bp, Homo sapiens
cctgtggaaaaagaa

SEQ ID NO: 1926077 - DNA, 15 bp, Homo sapiens
ctgtggaaaaagaaa

SEQ ID NO: 1926078 - DNA, 15 bp, Homo sapiens
tgtggaaaaagaaag

SEQ ID NO: 1926079 - DNA, 15 bp, Homo sapiens
gtggaaaaagaaagc

SEQ ID NO: 1926080 - DNA, 15 bp, Homo sapiens
tggaaaaagaaagct

SEQ ID NO: 1926081 - DNA, 15 bp, Homo sapiens
ggaaaaagaaagctt

SEQ ID NO: 1926082 - DNA, 15 bp, Homo sapiens
gaaaaagaaagcttg

SEQ ID NO: 1926083 - DNA, 15 bp, Homo sapiens
aaaaagaaagcttgt

SEQ ID NO: 1926084 - DNA, 15 bp, Homo sapiens
aaaagaaagcttgtc

SEQ ID NO: 1926085 - DNA, 15 bp, Homo sapiens
aaagaaagcttgtct

SEQ ID NO: 1926086 - DNA, 15 bp, Homo sapiens
aagaaagcttgtctc

SEQ ID NO: 1926087 - DNA, 15 bp, Homo sapiens
agaaagcttgtctct

SEQ ID NO: 1926088 - DNA, 15 bp, Homo sapiens
gaaagcttgtctctc

SEQ ID NO: 1926089 - DNA, 15 bp, Homo sapiens
aaagcttgtctctct

SEQ ID NO: 1926090 - DNA, 15 bp, Homo sapiens
aagcttgtctctctt

SEQ ID NO: 1926091 - DNA, 15 bp, Homo sapiens
agcttgtctctcttc

SEQ ID NO: 1926092 - DNA, 15 bp, Homo sapiens
gcttgtctctcttcc

SEQ ID NO: 1926093 - DNA, 15 bp, Homo sapiens
cttgtctctcttcca

SEQ ID NO: 1926094 - DNA, 15 bp, Homo sapiens
ttgtctctcttccaa

SEQ ID NO: 1926095 - DNA, 15 bp, Homo sapiens
tgtctctcttccaac

SEQ ID NO: 1926096 - DNA, 15 bp, Homo sapiens
gtctctcttccaaca

SEQ ID NO: 1926097 - DNA, 15 bp, Homo sapiens
tctctcttccaacaa

SEQ ID NO: 1926098 - DNA, 15 bp, Homo sapiens
ctctcttccaacaac

SEQ ID NO: 1926099 - DNA, 15 bp, Homo sapiens
tctcttccaacaacc

SEQ ID NO: 1926100 - DNA, 15 bp, Homo sapiens
ctcttccaacaaccc

SEQ ID NO: 1926101 - DNA, 15 bp, Homo sapiens
tcttccaacaacccc

SEQ ID NO: 1926102 - DNA, 15 bp, Homo sapiens
cttccaacaacccca

SEQ ID NO: 1926103 - DNA, 15 bp, Homo sapiens
ttccaacaaccccaa

SEQ ID NO: 1926104 - DNA, 15 bp, Homo sapiens
tccaacaaccccaaa

SEQ ID NO: 1926105 - DNA, 15 bp, Homo sapiens
caacaaccccaaaaa

SEQ ID NO: 1926106 - DNA, 15 bp, Homo sapiens
aacaaccccaaaaaa

SEQ ID NO: 1926107 - DNA, 15 bp, Homo sapiens
acaaccccaaaaaac

SEQ ID NO: 1926108 - DNA, 15 bp, Homo sapiens
caaccccaaaaaacg

SEQ ID NO: 1926109 - DNA, 15 bp, Homo sapiens
aaccccaaaaaacgt

SEQ ID NO: 1926110 - DNA, 15 bp, Homo sapiens
accccaaaaaacgtt

SEQ ID NO: 1926111 - DNA, 15 bp, Homo sapiens
ccccaaaaaacgttc

SEQ ID NO: 1926112 - DNA, 15 bp, Homo sapiens
cccaaaaaacgttcc

SEQ ID NO: 1926113 - DNA, 15 bp, Homo sapiens
ccaaaaaacgttcct

SEQ ID NO: 1926114 - DNA, 15 bp, Homo sapiens
caaaaaacgttcctt

SEQ ID NO: 1926115 - DNA, 15 bp, Homo sapiens
aaaaaacgttcctta

SEQ ID NO: 1926116 - DNA, 15 bp, Homo sapiens
aaaaacgttccttaa

SEQ ID NO: 1926117 - DNA, 15 bp, Homo sapiens
aaaacgttccttaat

SEQ ID NO: 1926118 - DNA, 15 bp, Homo sapiens
aaacgttccttaatg

SEQ ID NO: 1926119 - DNA, 15 bp, Homo sapiens
aacgttccttaatgg

SEQ ID NO: 1926120 - DNA, 15 bp, Homo sapiens
acgttccttaatggc

SEQ ID NO: 1926121 - DNA, 15 bp, Homo sapiens
cgttccttaatggct

SEQ ID NO: 1926122 - DNA, 15 bp, Homo sapiens
gttccttaatggctc

SEQ ID NO: 1926123 - DNA, 15 bp, Homo sapiens
ttccttaatggctca

SEQ ID NO: 1926124 - DNA, 15 bp, Homo sapiens
tccttaatggctcat

SEQ ID NO: 1926125 - DNA, 15 bp, Homo sapiens
ccttaatggctcatt

SEQ ID NO: 1926126 - DNA, 15 bp, Homo sapiens
cttaatggctcattg

SEQ ID NO: 1926127 - DNA, 15 bp, Homo sapiens
ttaatggctcattgg

SEQ ID NO: 1926128 - DNA, 15 bp, Homo sapiens
taatggctcattggc

SEQ ID NO: 1926129 - DNA, 15 bp, Homo sapiens
aatggctcattggct

SEQ ID NO: 1926130 - DNA, 15 bp, Homo sapiens
atggctcattggctc

SEQ ID NO: 1926131 - DNA, 15 bp, Homo sapiens
tggctcattggctct

SEQ ID NO: 1926132 - DNA, 15 bp, Homo sapiens
ggctcattggctcta

SEQ ID NO: 1926133 - DNA, 15 bp, Homo sapiens
gctcattggctctat

SEQ ID NO: 1926134 - DNA, 15 bp, Homo sapiens
ctcattggctctata

SEQ ID NO: 1926135 - DNA, 15 bp, Homo sapiens
tcattggctctatat

SEQ ID NO: 1926136 - DNA, 15 bp, Homo sapiens
cattggctctatatt

SEQ ID NO: 1926137 - DNA, 15 bp, Homo sapiens
attggctctatattc

SEQ ID NO: 1926138 - DNA, 15 bp, Homo sapiens
ttggctctatattca

SEQ ID NO: 1926139 - DNA, 15 bp, Homo sapiens
tggctctatattcat

SEQ ID NO: 1926140 - DNA, 15 bp, Homo sapiens
ggctctatattcatt

SEQ ID NO: 1926141 - DNA, 15 bp, Homo sapiens
gctctatattcattc

SEQ ID NO: 1926142 - DNA, 15 bp, Homo sapiens
ctctatattcattca

SEQ ID NO: 1926143 - DNA, 15 bp, Homo sapiens
tctatattcattcac

SEQ ID NO: 1926144 - DNA, 15 bp, Homo sapiens
ctatattcattcaca

SEQ ID NO: 1926145 - DNA, 15 bp, Homo sapiens
tatattcattcacat

SEQ ID NO: 1926146 - DNA, 15 bp, Homo sapiens
atattcattcacatg

SEQ ID NO: 1926147 - DNA, 15 bp, Homo sapiens
tattcattcacatgc

SEQ ID NO: 1926148 - DNA, 15 bp, Homo sapiens
attcattcacatgcc

SEQ ID NO: 1926149 - DNA, 15 bp, Homo sapiens
ttcattcacatgccc

SEQ ID NO: 1926150 - DNA, 15 bp, Homo sapiens
tcattcacatgcccc

SEQ ID NO: 1926151 - DNA, 15 bp, Homo sapiens
cattcacatgccccg

SEQ ID NO: 1926152 - DNA, 15 bp, Homo sapiens
attcacatgccccgc

SEQ ID NO: 1926153 - DNA, 15 bp, Homo sapiens
ttcacatgccccgcc

SEQ ID NO: 1926154 - DNA, 15 bp, Homo sapiens
tcacatgccccgcct

SEQ ID NO: 1926155 - DNA, 15 bp, Homo sapiens
cacatgccccgcctt

SEQ ID NO: 1926156 - DNA, 15 bp, Homo sapiens
acatgccccgccttg

SEQ ID NO: 1926157 - DNA, 15 bp, Homo sapiens
catgccccgccttga

SEQ ID NO: 1926158 - DNA, 15 bp, Homo sapiens
atgccccgccttgaa

SEQ ID NO: 1926159 - DNA, 15 bp, Homo sapiens
tgccccgccttgaat

SEQ ID NO: 1926160 - DNA, 15 bp, Homo sapiens
gccccgccttgaatc

SEQ ID NO: 1926161 - DNA, 15 bp, Homo sapiens
ccccgccttgaatca

SEQ ID NO: 1926162 - DNA, 15 bp, Homo sapiens
cccgccttgaatcac

SEQ ID NO: 1926163 - DNA, 15 bp, Homo sapiens
ccgccttgaatcaca

SEQ ID NO: 1926164 - DNA, 15 bp, Homo sapiens
cgccttgaatcacaa

SEQ ID NO: 1926165 - DNA, 15 bp, Homo sapiens
gccttgaatcacaaa

SEQ ID NO: 1926166 - DNA, 15 bp, Homo sapiens
ccttgaatcacaaat

SEQ ID NO: 1926167 - DNA, 15 bp, Homo sapiens
cttgaatcacaaatg

SEQ ID NO: 1926168 - DNA, 15 bp, Homo sapiens
ttgaatcacaaatga

SEQ ID NO: 1926169 - DNA, 15 bp, Homo sapiens
tgaatcacaaatgag

SEQ ID NO: 1926170 - DNA, 15 bp, Homo sapiens
gaatcacaaatgagg

SEQ ID NO: 1926171 - DNA, 15 bp, Homo sapiens
aatcacaaatgaggg

SEQ ID NO: 1926172 - DNA, 15 bp, Homo sapiens
atcacaaatgagggt

SEQ ID NO: 1926173 - DNA, 15 bp, Homo sapiens
tcacaaatgagggta

SEQ ID NO: 1926174 - DNA, 15 bp, Homo sapiens
cacaaatgagggtaa

SEQ ID NO: 1926175 - DNA, 15 bp, Homo sapiens
acaaatgagggtaag

SEQ ID NO: 1926176 - DNA, 15 bp, Homo sapiens
caaatgagggtaagg

SEQ ID NO: 1926177 - DNA, 15 bp, Homo sapiens
aaatgagggtaaggg

SEQ ID NO: 1926178 - DNA, 15 bp, Homo sapiens
aatgagggtaagggg

SEQ ID NO: 1926179 - DNA, 15 bp, Homo sapiens
atgagggtaagggga

SEQ ID NO: 1926180 - DNA, 15 bp, Homo sapiens
tgagggtaaggggat

SEQ ID NO: 1926181 - DNA, 15 bp, Homo sapiens
gagggtaaggggatg

SEQ ID NO: 1926182 - DNA, 15 bp, Homo sapiens
agggtaaggggatgt

SEQ ID NO: 1926183 - DNA, 15 bp, Homo sapiens
gggtaaggggatgtg

SEQ ID NO: 1926184 - DNA, 15 bp, Homo sapiens
ggtaaggggatgtgc

SEQ ID NO: 1926185 - DNA, 15 bp, Homo sapiens
gtaaggggatgtgct

SEQ ID NO: 1926186 - DNA, 15 bp, Homo sapiens
taaggggatgtgctg

SEQ ID NO: 1926187 - DNA, 15 bp, Homo sapiens
aaggggatgtgctgc

SEQ ID NO: 1926188 - DNA, 15 bp, Homo sapiens
aggggatgtgctgct

SEQ ID NO: 1926189 - DNA, 15 bp, Homo sapiens
ggggatgtgctgctc

SEQ ID NO: 1926190 - DNA, 15 bp, Homo sapiens
gggatgtgctgctct

SEQ ID NO: 1926191 - DNA, 15 bp, Homo sapiens
ggatgtgctgctctg

SEQ ID NO: 1926192 - DNA, 15 bp, Homo sapiens
gatgtgctgctctga

SEQ ID NO: 1926193 - DNA, 15 bp, Homo sapiens
atgtgctgctctgat

SEQ ID NO: 1926194 - DNA, 15 bp, Homo sapiens
tgtgctgctctgata

SEQ ID NO: 1926195 - DNA, 15 bp, Homo sapiens
gtgctgctctgatag

SEQ ID NO: 1926196 - DNA, 15 bp, Homo sapiens
tgctgctctgatagg

SEQ ID NO: 1926197 - DNA, 15 bp, Homo sapiens
gctgctctgataggc

SEQ ID NO: 1926198 - DNA, 15 bp, Homo sapiens
ctgctctgataggct

SEQ ID NO: 1926199 - DNA, 15 bp, Homo sapiens
tgctctgataggcta

SEQ ID NO: 1926200 - DNA, 15 bp, Homo sapiens
gctctgataggctac

SEQ ID NO: 1926201 - DNA, 15 bp, Homo sapiens
ctctgataggctacg

SEQ ID NO: 1926202 - DNA, 15 bp, Homo sapiens
tctgataggctacgc

SEQ ID NO: 1926203 - DNA, 15 bp, Homo sapiens
ctgataggctacgcc

SEQ ID NO: 1926204 - DNA, 15 bp, Homo sapiens
tgataggctacgcct

SEQ ID NO: 1926205 - DNA, 15 bp, Homo sapiens
gataggctacgcctg

SEQ ID NO: 1926206 - DNA, 15 bp, Homo sapiens
ataggctacgcctga

SEQ ID NO: 1926207 - DNA, 15 bp, Homo sapiens
taggctacgcctgag

SEQ ID NO: 1926208 - DNA, 15 bp, Homo sapiens
aggctacgcctgagt

SEQ ID NO: 1926209 - DNA, 15 bp, Homo sapiens
ggctacgcctgagtc

SEQ ID NO: 1926210 - DNA, 15 bp, Homo sapiens
gctacgcctgagtca

SEQ ID NO: 1926211 - DNA, 15 bp, Homo sapiens
ctacgcctgagtcat

SEQ ID NO: 1926212 - DNA, 15 bp, Homo sapiens
tacgcctgagtcata

SEQ ID NO: 1926213 - DNA, 15 bp, Homo sapiens
acgcctgagtcatat

SEQ ID NO: 1926214 - DNA, 15 bp, Homo sapiens
cgcctgagtcatatg

SEQ ID NO: 1926215 - DNA, 15 bp, Homo sapiens
gcctgagtcatatgc

SEQ ID NO: 1926216 - DNA, 15 bp, Homo sapiens
cctgagtcatatgct

SEQ ID NO: 1926217 - DNA, 15 bp, Homo sapiens
ctgagtcatatgctt

SEQ ID NO: 1926218 - DNA, 15 bp, Homo sapiens
tgagtcatatgcttc

SEQ ID NO: 1926219 - DNA, 15 bp, Homo sapiens
gagtcatatgcttca

SEQ ID NO: 1926220 - DNA, 15 bp, Homo sapiens
agtcatatgcttcat

SEQ ID NO: 1926221 - DNA, 15 bp, Homo sapiens
gtcatatgcttcatc

SEQ ID NO: 1926222 - DNA, 15 bp, Homo sapiens
tcatatgcttcatcc

SEQ ID NO: 1926223 - DNA, 15 bp, Homo sapiens
catatgcttcatcct

SEQ ID NO: 1926224 - DNA, 15 bp, Homo sapiens
atatgcttcatcctg

SEQ ID NO: 1926225 - DNA, 15 bp, Homo sapiens
tatgcttcatcctgg

SEQ ID NO: 1926226 - DNA, 15 bp, Homo sapiens
atgcttcatcctgga

SEQ ID NO: 1926227 - DNA, 15 bp, Homo sapiens
tgcttcatcctggag

SEQ ID NO: 1926228 - DNA, 15 bp, Homo sapiens
gcttcatcctggaga

SEQ ID NO: 1926229 - DNA, 15 bp, Homo sapiens
cttcatcctggagat

SEQ ID NO: 1926230 - DNA, 15 bp, Homo sapiens
ttcatcctggagata

SEQ ID NO: 1926231 - DNA, 15 bp, Homo sapiens
tcatcctggagatag

SEQ ID NO: 1926232 - DNA, 15 bp, Homo sapiens
catcctggagataga

SEQ ID NO: 1926233 - DNA, 15 bp, Homo sapiens
atcctggagatagag

SEQ ID NO: 1926234 - DNA, 15 bp, Homo sapiens
tcctggagatagaga

SEQ ID NO: 1926235 - DNA, 15 bp, Homo sapiens
cctggagatagagat

SEQ ID NO: 1926236 - DNA, 15 bp, Homo sapiens
ctggagatagagatg

SEQ ID NO: 1926237 - DNA, 15 bp, Homo sapiens
tggagatagagatgt

SEQ ID NO: 1926238 - DNA, 15 bp, Homo sapiens
ggagatagagatgta

SEQ ID NO: 1926239 - DNA, 15 bp, Homo sapiens
gagatagagatgtag

SEQ ID NO: 1926240 - DNA, 15 bp, Homo sapiens
agatagagatgtagg

SEQ ID NO: 1926241 - DNA, 15 bp, Homo sapiens
gatagagatgtagga

SEQ ID NO: 1926242 - DNA, 15 bp, Homo sapiens
atagagatgtaggac

SEQ ID NO: 1926243 - DNA, 15 bp, Homo sapiens
tagagatgtaggaca

SEQ ID NO: 1926244 - DNA, 15 bp, Homo sapiens
agagatgtaggacaa

SEQ ID NO: 1926245 - DNA, 15 bp, Homo sapiens
gagatgtaggacaag

SEQ ID NO: 1926246 - DNA, 15 bp, Homo sapiens
agatgtaggacaaga

SEQ ID NO: 1926247 - DNA, 15 bp, Homo sapiens
gatgtaggacaagaa

SEQ ID NO: 1926248 - DNA, 15 bp, Homo sapiens
atgtaggacaagaat

SEQ ID NO: 1926249 - DNA, 15 bp, Homo sapiens
tgtaggacaagaatg

SEQ ID NO: 1926250 - DNA, 15 bp, Homo sapiens
gtaggacaagaatgg

SEQ ID NO: 1926251 - DNA, 15 bp, Homo sapiens
taggacaagaatgga

SEQ ID NO: 1926252 - DNA, 15 bp, Homo sapiens
aggacaagaatggag

SEQ ID NO: 1926253 - DNA, 15 bp, Homo sapiens
ggacaagaatggaga

SEQ ID NO: 1926254 - DNA, 15 bp, Homo sapiens
gacaagaatggagag

SEQ ID NO: 1926255 - DNA, 15 bp, Homo sapiens
acaagaatggagagg

SEQ ID NO: 1926256 - DNA, 15 bp, Homo sapiens
caagaatggagaggg

SEQ ID NO: 1926257 - DNA, 15 bp, Homo sapiens
aagaatggagaggga

SEQ ID NO: 1926258 - DNA, 15 bp, Homo sapiens
agaatggagagggaa

SEQ ID NO: 1926259 - DNA, 15 bp, Homo sapiens
gaatggagagggaag

SEQ ID NO: 1926260 - DNA, 15 bp, Homo sapiens
aatggagagggaagg

SEQ ID NO: 1926261 - DNA, 15 bp, Homo sapiens
atggagagggaagga

SEQ ID NO: 1926262 - DNA, 15 bp, Homo sapiens
tggagagggaaggaa

SEQ ID NO: 1926263 - DNA, 15 bp, Homo sapiens
ggagagggaaggaag

SEQ ID NO: 1926264 - DNA, 15 bp, Homo sapiens
gagagggaaggaagg

SEQ ID NO: 1926265 - DNA, 15 bp, Homo sapiens
agagggaaggaagga

SEQ ID NO: 1926266 - DNA, 15 bp, Homo sapiens
gagggaaggaaggaa

SEQ ID NO: 1926267 - DNA, 15 bp, Homo sapiens
ggaaggaaggaaggc

SEQ ID NO: 1926268 - DNA, 15 bp, Homo sapiens
gaaggaaggaaggct

SEQ ID NO: 1926269 - DNA, 15 bp, Homo sapiens
aaggaaggaaggctg

SEQ ID NO: 1926270 - DNA, 15 bp, Homo sapiens
aggaaggaaggctgg

SEQ ID NO: 1926271 - DNA, 15 bp, Homo sapiens
ggaaggaaggctggt

SEQ ID NO: 1926272 - DNA, 15 bp, Homo sapiens
gaaggaaggctggtg

SEQ ID NO: 1926273 - DNA, 15 bp, Homo sapiens
aaggaaggctggtgt

SEQ ID NO: 1926274 - DNA, 15 bp, Homo sapiens
aggaaggctggtgtc

SEQ ID NO: 1926275 - DNA, 15 bp, Homo sapiens
ggaaggctggtgtca

SEQ ID NO: 1926276 - DNA, 15 bp, Homo sapiens
gaaggctggtgtcag

SEQ ID NO: 1926277 - DNA, 15 bp, Homo sapiens
aaggctggtgtcaga

SEQ ID NO: 1926278 - DNA, 15 bp, Homo sapiens
aggctggtgtcagaa

SEQ ID NO: 1926279 - DNA, 15 bp, Homo sapiens
ggctggtgtcagaag

SEQ ID NO: 1926280 - DNA, 15 bp, Homo sapiens
gctggtgtcagaaga

SEQ ID NO: 1926281 - DNA, 15 bp, Homo sapiens
ctggtgtcagaagaa

SEQ ID NO: 1926282 - DNA, 15 bp, Homo sapiens
tggtgtcagaagaaa

SEQ ID NO: 1926283 - DNA, 15 bp, Homo sapiens
ggtgtcagaagaaag

SEQ ID NO: 1926284 - DNA, 15 bp, Homo sapiens
gtgtcagaagaaagc

SEQ ID NO: 1926285 - DNA, 15 bp, Homo sapiens
tgtcagaagaaagct

SEQ ID NO: 1926286 - DNA, 15 bp, Homo sapiens
gtcagaagaaagctg

SEQ ID NO: 1926287 - DNA, 15 bp, Homo sapiens
tcagaagaaagctgg

SEQ ID NO: 1926288 - DNA, 15 bp, Homo sapiens
cagaagaaagctggc

SEQ ID NO: 1926289 - DNA, 15 bp, Homo sapiens
agaagaaagctggca

SEQ ID NO: 1926290 - DNA, 15 bp, Homo sapiens
gaagaaagctggcaa

SEQ ID NO: 1926291 - DNA, 15 bp, Homo sapiens
aagaaagctggcaag

SEQ ID NO: 1926292 - DNA, 15 bp, Homo sapiens
agaaagctggcaagg

SEQ ID NO: 1926293 - DNA, 15 bp, Homo sapiens
gaaagctggcaagga

SEQ ID NO: 1926294 - DNA, 15 bp, Homo sapiens
aaagctggcaaggat

SEQ ID NO: 1926295 - DNA, 15 bp, Homo sapiens
aagctggcaaggata

SEQ ID NO: 1926296 - DNA, 15 bp, Homo sapiens
agctggcaaggatag

SEQ ID NO: 1926297 - DNA, 15 bp, Homo sapiens
gctggcaaggatagg

SEQ ID NO: 1926298 - DNA, 15 bp, Homo sapiens
ctggcaaggatagga

SEQ ID NO: 1926299 - DNA, 15 bp, Homo sapiens
tggcaaggataggag

SEQ ID NO: 1926300 - DNA, 15 bp, Homo sapiens
ggcaaggataggagg

SEQ ID NO: 1926301 - DNA, 15 bp, Homo sapiens
gcaaggataggaggg

SEQ ID NO: 1926302 - DNA, 15 bp, Homo sapiens
caaggataggaggga

SEQ ID NO: 1926303 - DNA, 15 bp, Homo sapiens
aaggataggagggaa

SEQ ID NO: 1926304 - DNA, 15 bp, Homo sapiens
aggataggagggaaa

SEQ ID NO: 1926305 - DNA, 15 bp, Homo sapiens
ggataggagggaaag

SEQ ID NO: 1926306 - DNA, 15 bp, Homo sapiens
gataggagggaaagt

SEQ ID NO: 1926307 - DNA, 15 bp, Homo sapiens
ataggagggaaagta

SEQ ID NO: 1926308 - DNA, 15 bp, Homo sapiens
taggagggaaagtat

SEQ ID NO: 1926309 - DNA, 15 bp, Homo sapiens
aggagggaaagtata

SEQ ID NO: 1926310 - DNA, 15 bp, Homo sapiens
ggagggaaagtataa

SEQ ID NO: 1926311 - DNA, 15 bp, Homo sapiens
gagggaaagtataag

SEQ ID NO: 1926312 - DNA, 15 bp, Homo sapiens
agggaaagtataaga

SEQ ID NO: 1926313 - DNA, 15 bp, Homo sapiens
gggaaagtataagaa

SEQ ID NO: 1926314 - DNA, 15 bp, Homo sapiens
ggaaagtataagaag

SEQ ID NO: 1926315 - DNA, 15 bp, Homo sapiens
gaaagtataagaagg

SEQ ID NO: 1926316 - DNA, 15 bp, Homo sapiens
aaagtataagaaggc

SEQ ID NO: 1926317 - DNA, 15 bp, Homo sapiens
aagtataagaaggcc

SEQ ID NO: 1926318 - DNA, 15 bp, Homo sapiens
agtataagaaggcca

SEQ ID NO: 1926319 - DNA, 15 bp, Homo sapiens
gtataagaaggccag

SEQ ID NO: 1926320 - DNA, 15 bp, Homo sapiens
tataagaaggccagt

SEQ ID NO: 1926321 - DNA, 15 bp, Homo sapiens
ataagaaggccagtt

SEQ ID NO: 1926322 - DNA, 15 bp, Homo sapiens
taagaaggccagtta

SEQ ID NO: 1926323 - DNA, 15 bp, Homo sapiens
aagaaggccagttag

SEQ ID NO: 1926324 - DNA, 15 bp, Homo sapiens
agaaggccagttaga

SEQ ID NO: 1926325 - DNA, 15 bp, Homo sapiens
gaaggccagttagaa

SEQ ID NO: 1926326 - DNA, 15 bp, Homo sapiens
aaggccagttagaac

SEQ ID NO: 1926327 - DNA, 15 bp, Homo sapiens
aggccagttagaaca

SEQ ID NO: 1926328 - DNA, 15 bp, Homo sapiens
ggccagttagaacat

SEQ ID NO: 1926329 - DNA, 15 bp, Homo sapiens
gccagttagaacata

SEQ ID NO: 1926330 - DNA, 15 bp, Homo sapiens
ccagttagaacatat

SEQ ID NO: 1926331 - DNA, 15 bp, Homo sapiens
cagttagaacatatt

SEQ ID NO: 1926332 - DNA, 15 bp, Homo sapiens
agttagaacatattg

SEQ ID NO: 1926333 - DNA, 15 bp, Homo sapiens
gttagaacatattga

SEQ ID NO: 1926334 - DNA, 15 bp, Homo sapiens
ttagaacatattgag

SEQ ID NO: 1926335 - DNA, 15 bp, Homo sapiens
tagaacatattgaga

SEQ ID NO: 1926336 - DNA, 15 bp, Homo sapiens
agaacatattgagag

SEQ ID NO: 1926337 - DNA, 15 bp, Homo sapiens
gaacatattgagagc

SEQ ID NO: 1926338 - DNA, 15 bp, Homo sapiens
aacatattgagagcc

SEQ ID NO: 1926339 - DNA, 15 bp, Homo sapiens
acatattgagagcct

SEQ ID NO: 1926340 - DNA, 15 bp, Homo sapiens
catattgagagcctc

SEQ ID NO: 1926341 - DNA, 15 bp, Homo sapiens
atattgagagcctct

SEQ ID NO: 1926342 - DNA, 15 bp, Homo sapiens
tattgagagcctcta

SEQ ID NO: 1926343 - DNA, 15 bp, Homo sapiens
attgagagcctctaa

SEQ ID NO: 1926344 - DNA, 15 bp, Homo sapiens
ttgagagcctctaat

SEQ ID NO: 1926345 - DNA, 15 bp, Homo sapiens
tgagagcctctaata

SEQ ID NO: 1926346 - DNA, 15 bp, Homo sapiens
gagagcctctaataa

SEQ ID NO: 1926347 - DNA, 15 bp, Homo sapiens
agagcctctaataaa

SEQ ID NO: 1926348 - DNA, 15 bp, Homo sapiens
gagcctctaataaaa

SEQ ID NO: 1926349 - DNA, 15 bp, Homo sapiens
agcctctaataaaag

SEQ ID NO: 1926350 - DNA, 15 bp, Homo sapiens
gcctctaataaaagt

SEQ ID NO: 1926351 - DNA, 15 bp, Homo sapiens
cctctaataaaagtt

SEQ ID NO: 1926352 - DNA, 15 bp, Homo sapiens
ctctaataaaagttt

SEQ ID NO: 1926353 - DNA, 15 bp, Homo sapiens
tctaataaaagtttg

SEQ ID NO: 1926354 - DNA, 15 bp, Homo sapiens
ctaataaaagtttga

SEQ ID NO: 1926355 - DNA, 15 bp, Homo sapiens
taataaaagtttgag

SEQ ID NO: 1926356 - DNA, 15 bp, Homo sapiens
aataaaagtttgagt

SEQ ID NO: 1926357 - DNA, 15 bp, Homo sapiens
ataaaagtttgagtt

SEQ ID NO: 1926358 - DNA, 15 bp, Homo sapiens
taaaagtttgagttt

SEQ ID NO: 1926359 - DNA, 15 bp, Homo sapiens
aaaagtttgagttta

SEQ ID NO: 1926360 - DNA, 15 bp, Homo sapiens
aaagtttgagtttat

SEQ ID NO: 1926361 - DNA, 15 bp, Homo sapiens
aagtttgagtttatt

SEQ ID NO: 1926362 - DNA, 15 bp, Homo sapiens
agtttgagtttattg

SEQ ID NO: 1926363 - DNA, 15 bp, Homo sapiens
gtttgagtttattgt

SEQ ID NO: 1926364 - DNA, 15 bp, Homo sapiens
tttgagtttattgtt

SEQ ID NO: 1926365 - DNA, 15 bp, Homo sapiens
ttgagtttattgttt

SEQ ID NO: 1926366 - DNA, 15 bp, Homo sapiens
tgagtttattgtttc

SEQ ID NO: 1926367 - DNA, 15 bp, Homo sapiens
gagtttattgtttca

SEQ ID NO: 1926368 - DNA, 15 bp, Homo sapiens
agtttattgtttcag

SEQ ID NO: 1926369 - DNA, 15 bp, Homo sapiens
gtttattgtttcagc

SEQ ID NO: 1926370 - DNA, 15 bp, Homo sapiens
tttattgtttcagcc

SEQ ID NO: 1926371 - DNA, 15 bp, Homo sapiens
ttattgtttcagcct

SEQ ID NO: 1926372 - DNA, 15 bp, Homo sapiens
tattgtttcagcctt

SEQ ID NO: 1926373 - DNA, 15 bp, Homo sapiens
attgtttcagccttt

SEQ ID NO: 1926374 - DNA, 15 bp, Homo sapiens
ttgtttcagcctttt

SEQ ID NO: 1926375 - DNA, 15 bp, Homo sapiens
tgtttcagccttttt

SEQ ID NO: 1926376 - DNA, 15 bp, Homo sapiens
gtttcagcctttttt

SEQ ID NO: 1926377 - DNA, 15 bp, Homo sapiens
tttcagccttttttt

SEQ ID NO: 1926378 - DNA, 15 bp, Homo sapiens
ttcagcctttttttt

SEQ ID NO: 1926379 - DNA, 15 bp, Homo sapiens
tcagccttttttttt

SEQ ID NO: 1926380 - DNA, 15 bp, Homo sapiens
cagcctttttttttt

SEQ ID NO: 1926381 - DNA, 15 bp, Homo sapiens
agccttttttttttt

SEQ ID NO: 1926382 - DNA, 15 bp, Homo sapiens
gcctttttttttttt

SEQ ID NO: 1926383 - DNA, 15 bp, Homo sapiens
ttttttttaaagaca

SEQ ID NO: 1926384 - DNA, 15 bp, Homo sapiens
tttttttaaagacaa

SEQ ID NO: 1926385 - DNA, 15 bp, Homo sapiens
ttttttaaagacaaa

SEQ ID NO: 1926386 - DNA, 15 bp, Homo sapiens
tttttaaagacaaag

SEQ ID NO: 1926387 - DNA, 15 bp, Homo sapiens
ttttaaagacaaagt

SEQ ID NO: 1926388 - DNA, 15 bp, Homo sapiens
tttaaagacaaagtc

SEQ ID NO: 1926389 - DNA, 15 bp, Homo sapiens
ttaaagacaaagtct

SEQ ID NO: 1926390 - DNA, 15 bp, Homo sapiens
taaagacaaagtctc

SEQ ID NO: 1926391 - DNA, 15 bp, Homo sapiens
aaagacaaagtctca

SEQ ID NO: 1926392 - DNA, 15 bp, Homo sapiens
aagacaaagtctcac

SEQ ID NO: 1926393 - DNA, 15 bp, Homo sapiens
gacaaagtctcactc

SEQ ID NO: 1926394 - DNA, 15 bp, Homo sapiens
acaaagtctcactct

SEQ ID NO: 1926395 - DNA, 15 bp, Homo sapiens
caaagtctcactctg

SEQ ID NO: 1926396 - DNA, 15 bp, Homo sapiens
aaagtctcactctgt

SEQ ID NO: 1926397 - DNA, 15 bp, Homo sapiens
aagtctcactctgtt

SEQ ID NO: 1926398 - DNA, 15 bp, Homo sapiens
ggagtgcagtggcgt

SEQ ID NO: 1926399 - DNA, 15 bp, Homo sapiens
gagtgcagtggcgtg

SEQ ID NO: 1926400 - DNA, 15 bp, Homo sapiens
agtgcagtggcgtgg

SEQ ID NO: 1926401 - DNA, 15 bp, Homo sapiens
gtgcagtggcgtggt

SEQ ID NO: 1926402 - DNA, 15 bp, Homo sapiens
tgcagtggcgtggtc

SEQ ID NO: 1926403 - DNA, 15 bp, Homo sapiens
gcagtggcgtggtct

SEQ ID NO: 1926404 - DNA, 15 bp, Homo sapiens
cagtggcgtggtctc

SEQ ID NO: 1926405 - DNA, 15 bp, Homo sapiens
agtggcgtggtctcg

SEQ ID NO: 1926406 - DNA, 15 bp, Homo sapiens
gtggcgtggtctcgg

SEQ ID NO: 1926407 - DNA, 15 bp, Homo sapiens
tggcgtggtctcggc

SEQ ID NO: 1926408 - DNA, 15 bp, Homo sapiens
ggcgtggtctcggct

SEQ ID NO: 1926409 - DNA, 15 bp, Homo sapiens
gcgtggtctcggctc

SEQ ID NO: 1926410 - DNA, 15 bp, Homo sapiens
cgtggtctcggctca

SEQ ID NO: 1926411 - DNA, 15 bp, Homo sapiens
gtggtctcggctcac

SEQ ID NO: 1926412 - DNA, 15 bp, Homo sapiens
tggtctcggctcact

SEQ ID NO: 1926413 - DNA, 15 bp, Homo sapiens
ggtctcggctcactg

SEQ ID NO: 1926414 - DNA, 15 bp, Homo sapiens
cggctcactgcaatc

SEQ ID NO: 1926415 - DNA, 15 bp, Homo sapiens
ggctcactgcaatct

SEQ ID NO: 1926416 - DNA, 15 bp, Homo sapiens
gctcactgcaatctc

SEQ ID NO: 1926417 - DNA, 15 bp, Homo sapiens
ctcactgcaatctcc

SEQ ID NO: 1926418 - DNA, 15 bp, Homo sapiens
tcactgcaatctcca

SEQ ID NO: 1926419 - DNA, 15 bp, Homo sapiens
cactgcaatctccac

SEQ ID NO: 1926420 - DNA, 15 bp, Homo sapiens
actgcaatctccacc

SEQ ID NO: 1926421 - DNA, 15 bp, Homo sapiens
ctgcaatctccacct

SEQ ID NO: 1926422 - DNA, 15 bp, Homo sapiens
tgcaatctccacctc

SEQ ID NO: 1926423 - DNA, 15 bp, Homo sapiens
gcaatctccacctcc

SEQ ID NO: 1926424 - DNA, 15 bp, Homo sapiens
caatctccacctccc

SEQ ID NO: 1926425 - DNA, 15 bp, Homo sapiens
aatctccacctccca

SEQ ID NO: 1926426 - DNA, 15 bp, Homo sapiens
atctccacctcccag

SEQ ID NO: 1926427 - DNA, 15 bp, Homo sapiens
tctccacctcccagg

SEQ ID NO: 1926428 - DNA, 15 bp, Homo sapiens
ggattacaggtgcac

SEQ ID NO: 1926429 - DNA, 15 bp, Homo sapiens
gattacaggtgcaca

SEQ ID NO: 1926430 - DNA, 15 bp, Homo sapiens
attacaggtgcacaa

SEQ ID NO: 1926431 - DNA, 15 bp, Homo sapiens
ttacaggtgcacaac

SEQ ID NO: 1926432 - DNA, 15 bp, Homo sapiens
tacaggtgcacaaca

SEQ ID NO: 1926433 - DNA, 15 bp, Homo sapiens
acaggtgcacaacac

SEQ ID NO: 1926434 - DNA, 15 bp, Homo sapiens
caggtgcacaacacc

SEQ ID NO: 1926435 - DNA, 15 bp, Homo sapiens
aggtgcacaacacca

SEQ ID NO: 1926436 - DNA, 15 bp, Homo sapiens
ggtgcacaacaccac

SEQ ID NO: 1926437 - DNA, 15 bp, Homo sapiens
gtgcacaacaccacg

SEQ ID NO: 1926438 - DNA, 15 bp, Homo sapiens
tgcacaacaccacgc

SEQ ID NO: 1926439 - DNA, 15 bp, Homo sapiens
gcacaacaccacgcc

SEQ ID NO: 1926440 - DNA, 15 bp, Homo sapiens
cacaacaccacgcct

SEQ ID NO: 1926441 - DNA, 15 bp, Homo sapiens
acaacaccacgccta

SEQ ID NO: 1926442 - DNA, 15 bp, Homo sapiens
caacaccacgcctag

SEQ ID NO: 1926443 - DNA, 15 bp, Homo sapiens
aacaccacgcctagc

SEQ ID NO: 1926444 - DNA, 15 bp, Homo sapiens
acaccacgcctagct

SEQ ID NO: 1926445 - DNA, 15 bp, Homo sapiens
caccacgcctagcta

SEQ ID NO: 1926446 - DNA, 15 bp, Homo sapiens
accacgcctagctaa

SEQ ID NO: 1926447 - DNA, 15 bp, Homo sapiens
ccacgcctagctaat

SEQ ID NO: 1926448 - DNA, 15 bp, Homo sapiens
cacgcctagctaatt

SEQ ID NO: 1926449 - DNA, 15 bp, Homo sapiens
acgcctagctaattt

SEQ ID NO: 1926450 - DNA, 15 bp, Homo sapiens
cgcctagctaatttt

SEQ ID NO: 1926451 - DNA, 15 bp, Homo sapiens
cctagctaatttttg

SEQ ID NO: 1926452 - DNA, 15 bp, Homo sapiens
ctagctaatttttgt

SEQ ID NO: 1926453 - DNA, 15 bp, Homo sapiens
tagctaatttttgta

SEQ ID NO: 1926454 - DNA, 15 bp, Homo sapiens
agctaatttttgtac

SEQ ID NO: 1926455 - DNA, 15 bp, Homo sapiens
acttttagtagagaa

SEQ ID NO: 1926456 - DNA, 15 bp, Homo sapiens
cttttagtagagaag

SEQ ID NO: 1926457 - DNA, 15 bp, Homo sapiens
tttagtagagaagga

SEQ ID NO: 1926458 - DNA, 15 bp, Homo sapiens
ttagtagagaaggag

SEQ ID NO: 1926459 - DNA, 15 bp, Homo sapiens
tagtagagaaggaga

SEQ ID NO: 1926460 - DNA, 15 bp, Homo sapiens
agtagagaaggagat

SEQ ID NO: 1926461 - DNA, 15 bp, Homo sapiens
gtagagaaggagatt

SEQ ID NO: 1926462 - DNA, 15 bp, Homo sapiens
tagagaaggagattg

SEQ ID NO: 1926463 - DNA, 15 bp, Homo sapiens
agagaaggagattgg

SEQ ID NO: 1926464 - DNA, 15 bp, Homo sapiens
gagaaggagattggc

SEQ ID NO: 1926465 - DNA, 15 bp, Homo sapiens
agaaggagattggcc

SEQ ID NO: 1926466 - DNA, 15 bp, Homo sapiens
gaaggagattggcca

SEQ ID NO: 1926467 - DNA, 15 bp, Homo sapiens
aaggagattggccag

SEQ ID NO: 1926468 - DNA, 15 bp, Homo sapiens
aggagattggccagg

SEQ ID NO: 1926469 - DNA, 15 bp, Homo sapiens
ggagattggccaggc

SEQ ID NO: 1926470 - DNA, 15 bp, Homo sapiens
gagattggccaggct

SEQ ID NO: 1926471 - DNA, 15 bp, Homo sapiens
agattggccaggctg

SEQ ID NO: 1926472 - DNA, 15 bp, Homo sapiens
gattggccaggctga

SEQ ID NO: 1926473 - DNA, 15 bp, Homo sapiens
attggccaggctgat

SEQ ID NO: 1926474 - DNA, 15 bp, Homo sapiens
ttggccaggctgatc

SEQ ID NO: 1926475 - DNA, 15 bp, Homo sapiens
tggccaggctgatct

SEQ ID NO: 1926476 - DNA, 15 bp, Homo sapiens
ggccaggctgatctg

SEQ ID NO: 1926477 - DNA, 15 bp, Homo sapiens
gccaggctgatctgg

SEQ ID NO: 1926478 - DNA, 15 bp, Homo sapiens
ccaggctgatctgga

SEQ ID NO: 1926479 - DNA, 15 bp, Homo sapiens
caggctgatctggaa

SEQ ID NO: 1926480 - DNA, 15 bp, Homo sapiens
aggctgatctggaac

SEQ ID NO: 1926481 - DNA, 15 bp, Homo sapiens
ggctgatctggaact

SEQ ID NO: 1926482 - DNA, 15 bp, Homo sapiens
gctgatctggaactc

SEQ ID NO: 1926483 - DNA, 15 bp, Homo sapiens
ctgatctggaactcc

SEQ ID NO: 1926484 - DNA, 15 bp, Homo sapiens
tgatctggaactcct

SEQ ID NO: 1926485 - DNA, 15 bp, Homo sapiens
gatctggaactcctg

SEQ ID NO: 1926486 - DNA, 15 bp, Homo sapiens
ctcctggcctcaagg

SEQ ID NO: 1926487 - DNA, 15 bp, Homo sapiens
tcctggcctcaaggg

SEQ ID NO: 1926488 - DNA, 15 bp, Homo sapiens
cctggcctcaaggga

SEQ ID NO: 1926489 - DNA, 15 bp, Homo sapiens
ctggcctcaagggat

SEQ ID NO: 1926490 - DNA, 15 bp, Homo sapiens
tggcctcaagggatg

SEQ ID NO: 1926491 - DNA, 15 bp, Homo sapiens
ggcctcaagggatgc

SEQ ID NO: 1926492 - DNA, 15 bp, Homo sapiens
gcctcaagggatgca

SEQ ID NO: 1926493 - DNA, 15 bp, Homo sapiens
cctcaagggatgcat

SEQ ID NO: 1926494 - DNA, 15 bp, Homo sapiens
ctcaagggatgcatc

SEQ ID NO: 1926495 - DNA, 15 bp, Homo sapiens
tcaagggatgcatct

SEQ ID NO: 1926496 - DNA, 15 bp, Homo sapiens
caagggatgcatctg

SEQ ID NO: 1926497 - DNA, 15 bp, Homo sapiens
aagggatgcatctgc

SEQ ID NO: 1926498 - DNA, 15 bp, Homo sapiens
agggatgcatctgcc

SEQ ID NO: 1926499 - DNA, 15 bp, Homo sapiens
gggatgcatctgcct

SEQ ID NO: 1926500 - DNA, 15 bp, Homo sapiens
ggatgcatctgcctc

SEQ ID NO: 1926501 - DNA, 15 bp, Homo sapiens
gatgcatctgcctca

SEQ ID NO: 1926502 - DNA, 15 bp, Homo sapiens
atgcatctgcctcag

SEQ ID NO: 1926503 - DNA, 15 bp, Homo sapiens
tgcatctgcctcagc

SEQ ID NO: 1926504 - DNA, 15 bp, Homo sapiens
gcatctgcctcagcc

SEQ ID NO: 1926505 - DNA, 15 bp, Homo sapiens
catctgcctcagcct

SEQ ID NO: 1926506 - DNA, 15 bp, Homo sapiens
atctgcctcagcctc

SEQ ID NO: 1926507 - DNA, 15 bp, Homo sapiens
gcctcccaaagtgca

SEQ ID NO: 1926508 - DNA, 15 bp, Homo sapiens
cctcccaaagtgcaa

SEQ ID NO: 1926509 - DNA, 15 bp, Homo sapiens
ctcccaaagtgcaat

SEQ ID NO: 1926510 - DNA, 15 bp, Homo sapiens
tcccaaagtgcaatg

SEQ ID NO: 1926511 - DNA, 15 bp, Homo sapiens
cccaaagtgcaatgt

SEQ ID NO: 1926512 - DNA, 15 bp, Homo sapiens
ccaaagtgcaatgtg

SEQ ID NO: 1926513 - DNA, 15 bp, Homo sapiens
caaagtgcaatgtgc

SEQ ID NO: 1926514 - DNA, 15 bp, Homo sapiens
aaagtgcaatgtgct

SEQ ID NO: 1926515 - DNA, 15 bp, Homo sapiens
aagtgcaatgtgcta

SEQ ID NO: 1926516 - DNA, 15 bp, Homo sapiens
agtgcaatgtgctac

SEQ ID NO: 1926517 - DNA, 15 bp, Homo sapiens
gtgcaatgtgctacc

SEQ ID NO: 1926518 - DNA, 15 bp, Homo sapiens
tgcaatgtgctacca

SEQ ID NO: 1926519 - DNA, 15 bp, Homo sapiens
gcaatgtgctaccat

SEQ ID NO: 1926520 - DNA, 15 bp, Homo sapiens
caatgtgctaccatg

SEQ ID NO: 1926521 - DNA, 15 bp, Homo sapiens
aatgtgctaccatgc

SEQ ID NO: 1926522 - DNA, 15 bp, Homo sapiens
atgtgctaccatgcc

SEQ ID NO: 1926523 - DNA, 15 bp, Homo sapiens
tgtgctaccatgcct

SEQ ID NO: 1926524 - DNA, 15 bp, Homo sapiens
gtgctaccatgcctg

SEQ ID NO: 1926525 - DNA, 15 bp, Homo sapiens
tgctaccatgcctgg

SEQ ID NO: 1926526 - DNA, 15 bp, Homo sapiens
gctaccatgcctggt

SEQ ID NO: 1926527 - DNA, 15 bp, Homo sapiens
ctaccatgcctggtc

SEQ ID NO: 1926528 - DNA, 15 bp, Homo sapiens
taccatgcctggtcc

SEQ ID NO: 1926529 - DNA, 15 bp, Homo sapiens
accatgcctggtcct

SEQ ID NO: 1926530 - DNA, 15 bp, Homo sapiens
ccatgcctggtcctg

SEQ ID NO: 1926531 - DNA, 15 bp, Homo sapiens
catgcctggtcctga

SEQ ID NO: 1926532 - DNA, 15 bp, Homo sapiens
atgcctggtcctgat

SEQ ID NO: 1926533 - DNA, 15 bp, Homo sapiens
tgcctggtcctgata

SEQ ID NO: 1926534 - DNA, 15 bp, Homo sapiens
gcctggtcctgatag

SEQ ID NO: 1926535 - DNA, 15 bp, Homo sapiens
cctggtcctgatagt

SEQ ID NO: 1926536 - DNA, 15 bp, Homo sapiens
ctggtcctgatagtt

SEQ ID NO: 1926537 - DNA, 15 bp, Homo sapiens
tggtcctgatagttt

SEQ ID NO: 1926538 - DNA, 15 bp, Homo sapiens
ggtcctgatagtttc

SEQ ID NO: 1926539 - DNA, 15 bp, Homo sapiens
gtcctgatagtttct

SEQ ID NO: 1926540 - DNA, 15 bp, Homo sapiens
tcctgatagtttctt

SEQ ID NO: 1926541 - DNA, 15 bp, Homo sapiens
cctgatagtttcttt

SEQ ID NO: 1926542 - DNA, 15 bp, Homo sapiens
ctgatagtttctttt

SEQ ID NO: 1926543 - DNA, 15 bp, Homo sapiens
cagaagctctttagt

SEQ ID NO: 1926544 - DNA, 15 bp, Homo sapiens
agaagctctttagtg

SEQ ID NO: 1926545 - DNA, 15 bp, Homo sapiens
gaagctctttagtgc

SEQ ID NO: 1926546 - DNA, 15 bp, Homo sapiens
aagctctttagtgca

SEQ ID NO: 1926547 - DNA, 15 bp, Homo sapiens
agctctttagtgcaa

SEQ ID NO: 1926548 - DNA, 15 bp, Homo sapiens
gctctttagtgcaat

SEQ ID NO: 1926549 - DNA, 15 bp, Homo sapiens
ctctttagtgcaatg

SEQ ID NO: 1926550 - DNA, 15 bp, Homo sapiens
tctttagtgcaatgg

SEQ ID NO: 1926551 - DNA, 15 bp, Homo sapiens
ctttagtgcaatggt

SEQ ID NO: 1926552 - DNA, 15 bp, Homo sapiens
tttagtgcaatggtg

SEQ ID NO: 1926553 - DNA, 15 bp, Homo sapiens
ttagtgcaatggtgt

SEQ ID NO: 1926554 - DNA, 15 bp, Homo sapiens
tagtgcaatggtgtg

SEQ ID NO: 1926555 - DNA, 15 bp, Homo sapiens
tgcaatggtgtgatt

SEQ ID NO: 1926556 - DNA, 15 bp, Homo sapiens
gcaatggtgtgattt

SEQ ID NO: 1926557 - DNA, 15 bp, Homo sapiens
caatggtgtgatttc

SEQ ID NO: 1926558 - DNA, 15 bp, Homo sapiens
aatggtgtgatttcg

SEQ ID NO: 1926559 - DNA, 15 bp, Homo sapiens
atggtgtgatttcgg

SEQ ID NO: 1926560 - DNA, 15 bp, Homo sapiens
tggtgtgatttcggt

SEQ ID NO: 1926561 - DNA, 15 bp, Homo sapiens
ggtgtgatttcggtt

SEQ ID NO: 1926562 - DNA, 15 bp, Homo sapiens
gtgtgatttcggttc

SEQ ID NO: 1926563 - DNA, 15 bp, Homo sapiens
tgtgatttcggttca

SEQ ID NO: 1926564 - DNA, 15 bp, Homo sapiens
gtgatttcggttcac

SEQ ID NO: 1926565 - DNA, 15 bp, Homo sapiens
tgatttcggttcact

SEQ ID NO: 1926566 - DNA, 15 bp, Homo sapiens
gatttcggttcactg

SEQ ID NO: 1926567 - DNA, 15 bp, Homo sapiens
atttcggttcactgt

SEQ ID NO: 1926568 - DNA, 15 bp, Homo sapiens
tttcggttcactgta

SEQ ID NO: 1926569 - DNA, 15 bp, Homo sapiens
ttcggttcactgtaa

SEQ ID NO: 1926570 - DNA, 15 bp, Homo sapiens
tcggttcactgtaac

SEQ ID NO: 1926571 - DNA, 15 bp, Homo sapiens
cggttcactgtaacc

SEQ ID NO: 1926572 - DNA, 15 bp, Homo sapiens
ggttcactgtaacct

SEQ ID NO: 1926573 - DNA, 15 bp, Homo sapiens
gttcactgtaacctc

SEQ ID NO: 1926574 - DNA, 15 bp, Homo sapiens
ttcactgtaacctcc

SEQ ID NO: 1926575 - DNA, 15 bp, Homo sapiens
tcactgtaacctcca

SEQ ID NO: 1926576 - DNA, 15 bp, Homo sapiens
cactgtaacctccat

SEQ ID NO: 1926577 - DNA, 15 bp, Homo sapiens
actgtaacctccatc

SEQ ID NO: 1926578 - DNA, 15 bp, Homo sapiens
ctgtaacctccatct

SEQ ID NO: 1926579 - DNA, 15 bp, Homo sapiens
tgtaacctccatctc

SEQ ID NO: 1926580 - DNA, 15 bp, Homo sapiens
gtaacctccatctcc

SEQ ID NO: 1926581 - DNA, 15 bp, Homo sapiens
taacctccatctccc

SEQ ID NO: 1926582 - DNA, 15 bp, Homo sapiens
acaggcacccaccag

SEQ ID NO: 1926583 - DNA, 15 bp, Homo sapiens
caggcacccaccagg

SEQ ID NO: 1926584 - DNA, 15 bp, Homo sapiens
aggcacccaccagga

SEQ ID NO: 1926585 - DNA, 15 bp, Homo sapiens
ggcacccaccaggac

SEQ ID NO: 1926586 - DNA, 15 bp, Homo sapiens
gcacccaccaggaca

SEQ ID NO: 1926587 - DNA, 15 bp, Homo sapiens
cacccaccaggacac

SEQ ID NO: 1926588 - DNA, 15 bp, Homo sapiens
acccaccaggacaca

SEQ ID NO: 1926589 - DNA, 15 bp, Homo sapiens
cccaccaggacacac

SEQ ID NO: 1926590 - DNA, 15 bp, Homo sapiens
ccaccaggacacaca

SEQ ID NO: 1926591 - DNA, 15 bp, Homo sapiens
caccaggacacacag

SEQ ID NO: 1926592 - DNA, 15 bp, Homo sapiens
accaggacacacagt

SEQ ID NO: 1926593 - DNA, 15 bp, Homo sapiens
ccaggacacacagtt

SEQ ID NO: 1926594 - DNA, 15 bp, Homo sapiens
caggacacacagtta

SEQ ID NO: 1926595 - DNA, 15 bp, Homo sapiens
aggacacacagttaa

SEQ ID NO: 1926596 - DNA, 15 bp, Homo sapiens
ggacacacagttaat

SEQ ID NO: 1926597 - DNA, 15 bp, Homo sapiens
gacacacagttaatt

SEQ ID NO: 1926598 - DNA, 15 bp, Homo sapiens
acacacagttaattt

SEQ ID NO: 1926599 - DNA, 15 bp, Homo sapiens
cacacagttaatttt

SEQ ID NO: 1926600 - DNA, 15 bp, Homo sapiens
acacagttaattttt

SEQ ID NO: 1926601 - DNA, 15 bp, Homo sapiens
cacagttaatttttg

SEQ ID NO: 1926602 - DNA, 15 bp, Homo sapiens
acagttaatttttgt

SEQ ID NO: 1926603 - DNA, 15 bp, Homo sapiens
cagttaatttttgtg

SEQ ID NO: 1926604 - DNA, 15 bp, Homo sapiens
agttaatttttgtgt

SEQ ID NO: 1926605 - DNA, 15 bp, Homo sapiens
gttaatttttgtgtt

SEQ ID NO: 1926606 - DNA, 15 bp, Homo sapiens
ttaatttttgtgttt

SEQ ID NO: 1926607 - DNA, 15 bp, Homo sapiens
tagtagagatggggg

SEQ ID NO: 1926608 - DNA, 15 bp, Homo sapiens
agtagagatgggggt

SEQ ID NO: 1926609 - DNA, 15 bp, Homo sapiens
gtagagatgggggtt

SEQ ID NO: 1926610 - DNA, 15 bp, Homo sapiens
tagagatgggggttt

SEQ ID NO: 1926611 - DNA, 15 bp, Homo sapiens
agagatgggggtttc

SEQ ID NO: 1926612 - DNA, 15 bp, Homo sapiens
gagatgggggtttca

SEQ ID NO: 1926613 - DNA, 15 bp, Homo sapiens
agatgggggtttcac

SEQ ID NO: 1926614 - DNA, 15 bp, Homo sapiens
gatgggggtttcacc

SEQ ID NO: 1926615 - DNA, 15 bp, Homo sapiens
gtcaggctggtctcg

SEQ ID NO: 1926616 - DNA, 15 bp, Homo sapiens
tcaggctggtctcga

SEQ ID NO: 1926617 - DNA, 15 bp, Homo sapiens
acctcaggtgatcta

SEQ ID NO: 1926618 - DNA, 15 bp, Homo sapiens
cctcaggtgatctac

SEQ ID NO: 1926619 - DNA, 15 bp, Homo sapiens
ctcaggtgatctacc

SEQ ID NO: 1926620 - DNA, 15 bp, Homo sapiens
tcaggtgatctacct

SEQ ID NO: 1926621 - DNA, 15 bp, Homo sapiens
caggtgatctacctg

SEQ ID NO: 1926622 - DNA, 15 bp, Homo sapiens
aggtgatctacctgc

SEQ ID NO: 1926623 - DNA, 15 bp, Homo sapiens
ggtgatctacctgcc

SEQ ID NO: 1926624 - DNA, 15 bp, Homo sapiens
gtgatctacctgcct

SEQ ID NO: 1926625 - DNA, 15 bp, Homo sapiens
tgatctacctgcctt

SEQ ID NO: 1926626 - DNA, 15 bp, Homo sapiens
gatctacctgcctta

SEQ ID NO: 1926627 - DNA, 15 bp, Homo sapiens
atctacctgccttag

SEQ ID NO: 1926628 - DNA, 15 bp, Homo sapiens
tctacctgccttagc

SEQ ID NO: 1926629 - DNA, 15 bp, Homo sapiens
ctacctgccttagcc

SEQ ID NO: 1926630 - DNA, 15 bp, Homo sapiens
tacctgccttagcct

SEQ ID NO: 1926631 - DNA, 15 bp, Homo sapiens
acctgccttagcctc

SEQ ID NO: 1926632 - DNA, 15 bp, Homo sapiens
tgccttagcctccta

SEQ ID NO: 1926633 - DNA, 15 bp, Homo sapiens
gccttagcctcctaa

SEQ ID NO: 1926634 - DNA, 15 bp, Homo sapiens
ccttagcctcctaaa

SEQ ID NO: 1926635 - DNA, 15 bp, Homo sapiens
cttagcctcctaaag

SEQ ID NO: 1926636 - DNA, 15 bp, Homo sapiens
ttagcctcctaaagt

SEQ ID NO: 1926637 - DNA, 15 bp, Homo sapiens
tagcctcctaaagtg

SEQ ID NO: 1926638 - DNA, 15 bp, Homo sapiens
caccgtgcccggcca

SEQ ID NO: 1926639 - DNA, 15 bp, Homo sapiens
accgtgcccggccaa

SEQ ID NO: 1926640 - DNA, 15 bp, Homo sapiens
ccgtgcccggccaat

SEQ ID NO: 1926641 - DNA, 15 bp, Homo sapiens
cgtgcccggccaata

SEQ ID NO: 1926642 - DNA, 15 bp, Homo sapiens
gtgcccggccaatac

SEQ ID NO: 1926643 - DNA, 15 bp, Homo sapiens
tgcccggccaatact

SEQ ID NO: 1926644 - DNA, 15 bp, Homo sapiens
gcccggccaatactg

SEQ ID NO: 1926645 - DNA, 15 bp, Homo sapiens
cccggccaatactgg

SEQ ID NO: 1926646 - DNA, 15 bp, Homo sapiens
ccggccaatactggc

SEQ ID NO: 1926647 - DNA, 15 bp, Homo sapiens
cggccaatactggcc

SEQ ID NO: 1926648 - DNA, 15 bp, Homo sapiens
ggccaatactggcct

SEQ ID NO: 1926649 - DNA, 15 bp, Homo sapiens
gccaatactggccta

SEQ ID NO: 1926650 - DNA, 15 bp, Homo sapiens
ccaatactggcctat

SEQ ID NO: 1926651 - DNA, 15 bp, Homo sapiens
caatactggcctatt

SEQ ID NO: 1926652 - DNA, 15 bp, Homo sapiens
aatactggcctatta

SEQ ID NO: 1926653 - DNA, 15 bp, Homo sapiens
atactggcctattaa

SEQ ID NO: 1926654 - DNA, 15 bp, Homo sapiens
tactggcctattaaa

SEQ ID NO: 1926655 - DNA, 15 bp, Homo sapiens
actggcctattaaat

SEQ ID NO: 1926656 - DNA, 15 bp, Homo sapiens
ctggcctattaaata

SEQ ID NO: 1926657 - DNA, 15 bp, Homo sapiens
tggcctattaaataa

SEQ ID NO: 1926658 - DNA, 15 bp, Homo sapiens
ggcctattaaataac

SEQ ID NO: 1926659 - DNA, 15 bp, Homo sapiens
gcctattaaataact

SEQ ID NO: 1926660 - DNA, 15 bp, Homo sapiens
cctattaaataactt

SEQ ID NO: 1926661 - DNA, 15 bp, Homo sapiens
ctattaaataacttt

SEQ ID NO: 1926662 - DNA, 15 bp, Homo sapiens
tattaaataacttta

SEQ ID NO: 1926663 - DNA, 15 bp, Homo sapiens
attaaataactttaa

SEQ ID NO: 1926664 - DNA, 15 bp, Homo sapiens
ttaaataactttaag

SEQ ID NO: 1926665 - DNA, 15 bp, Homo sapiens
taaataactttaagt

SEQ ID NO: 1926666 - DNA, 15 bp, Homo sapiens
aaataactttaagtc

SEQ ID NO: 1926667 - DNA, 15 bp, Homo sapiens
aataactttaagtct

SEQ ID NO: 1926668 - DNA, 15 bp, Homo sapiens
ataactttaagtctc

SEQ ID NO: 1926669 - DNA, 15 bp, Homo sapiens
taactttaagtctct

SEQ ID NO: 1926670 - DNA, 15 bp, Homo sapiens
aactttaagtctctt

SEQ ID NO: 1926671 - DNA, 15 bp, Homo sapiens
actttaagtctcttg

SEQ ID NO: 1926672 - DNA, 15 bp, Homo sapiens
ctttaagtctcttgg

SEQ ID NO: 1926673 - DNA, 15 bp, Homo sapiens
tttaagtctcttgga

SEQ ID NO: 1926674 - DNA, 15 bp, Homo sapiens
ttaagtctcttggag

SEQ ID NO: 1926675 - DNA, 15 bp, Homo sapiens
taagtctcttggaga

SEQ ID NO: 1926676 - DNA, 15 bp, Homo sapiens
aagtctcttggagaa

SEQ ID NO: 1926677 - DNA, 15 bp, Homo sapiens
agtctcttggagaat

SEQ ID NO: 1926678 - DNA, 15 bp, Homo sapiens
gtctcttggagaata

SEQ ID NO: 1926679 - DNA, 15 bp, Homo sapiens
tctcttggagaatag

SEQ ID NO: 1926680 - DNA, 15 bp, Homo sapiens
ctcttggagaatagt

SEQ ID NO: 1926681 - DNA, 15 bp, Homo sapiens
tcttggagaatagtc

SEQ ID NO: 1926682 - DNA, 15 bp, Homo sapiens
cttggagaatagtct

SEQ ID NO: 1926683 - DNA, 15 bp, Homo sapiens
ttggagaatagtctg

SEQ ID NO: 1926684 - DNA, 15 bp, Homo sapiens
tggagaatagtctgt

SEQ ID NO: 1926685 - DNA, 15 bp, Homo sapiens
ggagaatagtctgta

SEQ ID NO: 1926686 - DNA, 15 bp, Homo sapiens
gagaatagtctgtat

SEQ ID NO: 1926687 - DNA, 15 bp, Homo sapiens
agaatagtctgtatt

SEQ ID NO: 1926688 - DNA, 15 bp, Homo sapiens
gaatagtctgtattt

SEQ ID NO: 1926689 - DNA, 15 bp, Homo sapiens
aatagtctgtatttt

SEQ ID NO: 1926690 - DNA, 15 bp, Homo sapiens
atagtctgtattttt

SEQ ID NO: 1926691 - DNA, 15 bp, Homo sapiens
tagtctgtatttttt

SEQ ID NO: 1926692 - DNA, 15 bp, Homo sapiens
agtctgtatttttta

SEQ ID NO: 1926693 - DNA, 15 bp, Homo sapiens
gtctgtattttttac

SEQ ID NO: 1926694 - DNA, 15 bp, Homo sapiens
tctgtattttttaca

SEQ ID NO: 1926695 - DNA, 15 bp, Homo sapiens
ctgtattttttacaa

SEQ ID NO: 1926696 - DNA, 15 bp, Homo sapiens
tgtattttttacaag

SEQ ID NO: 1926697 - DNA, 15 bp, Homo sapiens
gtattttttacaagg

SEQ ID NO: 1926698 - DNA, 15 bp, Homo sapiens
tattttttacaaggt

SEQ ID NO: 1926699 - DNA, 15 bp, Homo sapiens
attttttacaaggtc

SEQ ID NO: 1926700 - DNA, 15 bp, Homo sapiens
ttttttacaaggtcc

SEQ ID NO: 1926701 - DNA, 15 bp, Homo sapiens
tttttacaaggtcca

SEQ ID NO: 1926702 - DNA, 15 bp, Homo sapiens
ttttacaaggtccag

SEQ ID NO: 1926703 - DNA, 15 bp, Homo sapiens
tttacaaggtccaga

SEQ ID NO: 1926704 - DNA, 15 bp, Homo sapiens
ttacaaggtccagat

SEQ ID NO: 1926705 - DNA, 15 bp, Homo sapiens
tacaaggtccagata

SEQ ID NO: 1926706 - DNA, 15 bp, Homo sapiens
acaaggtccagatat

SEQ ID NO: 1926707 - DNA, 15 bp, Homo sapiens
caaggtccagatata

SEQ ID NO: 1926708 - DNA, 15 bp, Homo sapiens
aaggtccagatatat

SEQ ID NO: 1926709 - DNA, 15 bp, Homo sapiens
aggtccagatatatg

SEQ ID NO: 1926710 - DNA, 15 bp, Homo sapiens
ggtccagatatatga

SEQ ID NO: 1926711 - DNA, 15 bp, Homo sapiens
gtccagatatatgaa

SEQ ID NO: 1926712 - DNA, 15 bp, Homo sapiens
tccagatatatgaaa

SEQ ID NO: 1926713 - DNA, 15 bp, Homo sapiens
ccagatatatgaaaa

SEQ ID NO: 1926714 - DNA, 15 bp, Homo sapiens
cagatatatgaaaaa

SEQ ID NO: 1926715 - DNA, 15 bp, Homo sapiens
agatatatgaaaaac

SEQ ID NO: 1926716 - DNA, 15 bp, Homo sapiens
gatatatgaaaaact

SEQ ID NO: 1926717 - DNA, 15 bp, Homo sapiens
atatatgaaaaactg

SEQ ID NO: 1926718 - DNA, 15 bp, Homo sapiens
tatatgaaaaactgg

SEQ ID NO: 1926719 - DNA, 15 bp, Homo sapiens
atatgaaaaactggt

SEQ ID NO: 1926720 - DNA, 15 bp, Homo sapiens
tatgaaaaactggta

SEQ ID NO: 1926721 - DNA, 15 bp, Homo sapiens
atgaaaaactggtaa

SEQ ID NO: 1926722 - DNA, 15 bp, Homo sapiens
tgaaaaactggtaat

SEQ ID NO: 1926723 - DNA, 15 bp, Homo sapiens
gaaaaactggtaata

SEQ ID NO: 1926724 - DNA, 15 bp, Homo sapiens
aaaaactggtaatac

SEQ ID NO: 1926725 - DNA, 15 bp, Homo sapiens
aaaactggtaatacc

SEQ ID NO: 1926726 - DNA, 15 bp, Homo sapiens
aaactggtaataccg

SEQ ID NO: 1926727 - DNA, 15 bp, Homo sapiens
aactggtaataccgt

SEQ ID NO: 1926728 - DNA, 15 bp, Homo sapiens
actggtaataccgtt

SEQ ID NO: 1926729 - DNA, 15 bp, Homo sapiens
ctggtaataccgttg

SEQ ID NO: 1926730 - DNA, 15 bp, Homo sapiens
tggtaataccgttgt

SEQ ID NO: 1926731 - DNA, 15 bp, Homo sapiens
ggtaataccgttgtc

SEQ ID NO: 1926732 - DNA, 15 bp, Homo sapiens
gtaataccgttgtct

SEQ ID NO: 1926733 - DNA, 15 bp, Homo sapiens
taataccgttgtctc

SEQ ID NO: 1926734 - DNA, 15 bp, Homo sapiens
aataccgttgtctct

SEQ ID NO: 1926735 - DNA, 15 bp, Homo sapiens
ataccgttgtctctg

SEQ ID NO: 1926736 - DNA, 15 bp, Homo sapiens
taccgttgtctctgt

SEQ ID NO: 1926737 - DNA, 15 bp, Homo sapiens
accgttgtctctgtg

SEQ ID NO: 1926738 - DNA, 15 bp, Homo sapiens
ccgttgtctctgtgg

SEQ ID NO: 1926739 - DNA, 15 bp, Homo sapiens
cgttgtctctgtgga

SEQ ID NO: 1926740 - DNA, 15 bp, Homo sapiens
gttgtctctgtggag

SEQ ID NO: 1926741 - DNA, 15 bp, Homo sapiens
ttgtctctgtggagg

SEQ ID NO: 1926742 - DNA, 15 bp, Homo sapiens
tgtctctgtggaggg

SEQ ID NO: 1926743 - DNA, 15 bp, Homo sapiens
gtctctgtggagggt

SEQ ID NO: 1926744 - DNA, 15 bp, Homo sapiens
tctctgtggagggtt

SEQ ID NO: 1926745 - DNA, 15 bp, Homo sapiens
ctctgtggagggtta

SEQ ID NO: 1926746 - DNA, 15 bp, Homo sapiens
tctgtggagggttat

SEQ ID NO: 1926747 - DNA, 15 bp, Homo sapiens
ctgtggagggttatt

SEQ ID NO: 1926748 - DNA, 15 bp, Homo sapiens
tgtggagggttattg

SEQ ID NO: 1926749 - DNA, 15 bp, Homo sapiens
gtggagggttattgg

SEQ ID NO: 1926750 - DNA, 15 bp, Homo sapiens
tggagggttattggg

SEQ ID NO: 1926751 - DNA, 15 bp, Homo sapiens
ggagggttattgggt

SEQ ID NO: 1926752 - DNA, 15 bp, Homo sapiens
gagggttattgggta

SEQ ID NO: 1926753 - DNA, 15 bp, Homo sapiens
agggttattgggtag

SEQ ID NO: 1926754 - DNA, 15 bp, Homo sapiens
gggttattgggtagc

SEQ ID NO: 1926755 - DNA, 15 bp, Homo sapiens
ggttattgggtagct

SEQ ID NO: 1926756 - DNA, 15 bp, Homo sapiens
gttattgggtagctg

SEQ ID NO: 1926757 - DNA, 15 bp, Homo sapiens
ttattgggtagctga

SEQ ID NO: 1926758 - DNA, 15 bp, Homo sapiens
tattgggtagctgag

SEQ ID NO: 1926759 - DNA, 15 bp, Homo sapiens
attgggtagctgagc

SEQ ID NO: 1926760 - DNA, 15 bp, Homo sapiens
ttgggtagctgagca

SEQ ID NO: 1926761 - DNA, 15 bp, Homo sapiens
tgggtagctgagcaa

SEQ ID NO: 1926762 - DNA, 15 bp, Homo sapiens
gggtagctgagcaac

SEQ ID NO: 1926763 - DNA, 15 bp, Homo sapiens
ggtagctgagcaaca

SEQ ID NO: 1926764 - DNA, 15 bp, Homo sapiens
gtagctgagcaacag

SEQ ID NO: 1926765 - DNA, 15 bp, Homo sapiens
tagctgagcaacagg

SEQ ID NO: 1926766 - DNA, 15 bp, Homo sapiens
agctgagcaacaggg

SEQ ID NO: 1926767 - DNA, 15 bp, Homo sapiens
gctgagcaacaggga

SEQ ID NO: 1926768 - DNA, 15 bp, Homo sapiens
ctgagcaacagggat

SEQ ID NO: 1926769 - DNA, 15 bp, Homo sapiens
tgagcaacagggatg

SEQ ID NO: 1926770 - DNA, 15 bp, Homo sapiens
gagcaacagggatgg

SEQ ID NO: 1926771 - DNA, 15 bp, Homo sapiens
agcaacagggatggg

SEQ ID NO: 1926772 - DNA, 15 bp, Homo sapiens
gcaacagggatggga

SEQ ID NO: 1926773 - DNA, 15 bp, Homo sapiens
caacagggatgggag

SEQ ID NO: 1926774 - DNA, 15 bp, Homo sapiens
aacagggatgggagg

SEQ ID NO: 1926775 - DNA, 15 bp, Homo sapiens
acagggatgggagga

SEQ ID NO: 1926776 - DNA, 15 bp, Homo sapiens
cagggatgggaggag

SEQ ID NO: 1926777 - DNA, 15 bp, Homo sapiens
agggatgggaggagg

SEQ ID NO: 1926778 - DNA, 15 bp, Homo sapiens
gggatgggaggagga

SEQ ID NO: 1926779 - DNA, 15 bp, Homo sapiens
ggatgggaggaggac

SEQ ID NO: 1926780 - DNA, 15 bp, Homo sapiens
gatgggaggaggact

SEQ ID NO: 1926781 - DNA, 15 bp, Homo sapiens
atgggaggaggactc

SEQ ID NO: 1926782 - DNA, 15 bp, Homo sapiens
tgggaggaggactct

SEQ ID NO: 1926783 - DNA, 15 bp, Homo sapiens
gggaggaggactctt

SEQ ID NO: 1926784 - DNA, 15 bp, Homo sapiens
ggaggaggactcttc

SEQ ID NO: 1926785 - DNA, 15 bp, Homo sapiens
gaggaggactcttca

SEQ ID NO: 1926786 - DNA, 15 bp, Homo sapiens
aggaggactcttcac

SEQ ID NO: 1926787 - DNA, 15 bp, Homo sapiens
ggaggactcttcact

SEQ ID NO: 1926788 - DNA, 15 bp, Homo sapiens
gaggactcttcactg

SEQ ID NO: 1926789 - DNA, 15 bp, Homo sapiens
aggactcttcactgt

SEQ ID NO: 1926790 - DNA, 15 bp, Homo sapiens
ggactcttcactgta

SEQ ID NO: 1926791 - DNA, 15 bp, Homo sapiens
gactcttcactgtaa

SEQ ID NO: 1926792 - DNA, 15 bp, Homo sapiens
actcttcactgtaaa

SEQ ID NO: 1926793 - DNA, 15 bp, Homo sapiens
ctcttcactgtaaag

SEQ ID NO: 1926794 - DNA, 15 bp, Homo sapiens
tcttcactgtaaagt

SEQ ID NO: 1926795 - DNA, 15 bp, Homo sapiens
cttcactgtaaagtg

SEQ ID NO: 1926796 - DNA, 15 bp, Homo sapiens
ttcactgtaaagtgg

SEQ ID NO: 1926797 - DNA, 15 bp, Homo sapiens
tcactgtaaagtggt

SEQ ID NO: 1926798 - DNA, 15 bp, Homo sapiens
cactgtaaagtggtg

SEQ ID NO: 1926799 - DNA, 15 bp, Homo sapiens
actgtaaagtggtga

SEQ ID NO: 1926800 - DNA, 15 bp, Homo sapiens
ctgtaaagtggtgaa

SEQ ID NO: 1926801 - DNA, 15 bp, Homo sapiens
tgtaaagtggtgaac

SEQ ID NO: 1926802 - DNA, 15 bp, Homo sapiens
gtaaagtggtgaacc

SEQ ID NO: 1926803 - DNA, 15 bp, Homo sapiens
taaagtggtgaacca

SEQ ID NO: 1926804 - DNA, 15 bp, Homo sapiens
aaagtggtgaaccat

SEQ ID NO: 1926805 - DNA, 15 bp, Homo sapiens
aagtggtgaaccatg

SEQ ID NO: 1926806 - DNA, 15 bp, Homo sapiens
agtggtgaaccatgg

SEQ ID NO: 1926807 - DNA, 15 bp, Homo sapiens
gtggtgaaccatggt

SEQ ID NO: 1926808 - DNA, 15 bp, Homo sapiens
tggtgaaccatggtt

SEQ ID NO: 1926809 - DNA, 15 bp, Homo sapiens
ggtgaaccatggtta

SEQ ID NO: 1926810 - DNA, 15 bp, Homo sapiens
gtgaaccatggttaa

SEQ ID NO: 1926811 - DNA, 15 bp, Homo sapiens
tgaaccatggttaaa

SEQ ID NO: 1926812 - DNA, 15 bp, Homo sapiens
gaaccatggttaaat

SEQ ID NO: 1926813 - DNA, 15 bp, Homo sapiens
aaccatggttaaata

SEQ ID NO: 1926814 - DNA, 15 bp, Homo sapiens
accatggttaaatat

SEQ ID NO: 1926815 - DNA, 15 bp, Homo sapiens
ccatggttaaatatt

SEQ ID NO: 1926816 - DNA, 15 bp, Homo sapiens
catggttaaatatta

SEQ ID NO: 1926817 - DNA, 15 bp, Homo sapiens
atggttaaatattac

SEQ ID NO: 1926818 - DNA, 15 bp, Homo sapiens
tggttaaatattacc

SEQ ID NO: 1926819 - DNA, 15 bp, Homo sapiens
ggttaaatattacct

SEQ ID NO: 1926820 - DNA, 15 bp, Homo sapiens
gttaaatattaccta

SEQ ID NO: 1926821 - DNA, 15 bp, Homo sapiens
ttaaatattacctat

SEQ ID NO: 1926822 - DNA, 15 bp, Homo sapiens
taaatattacctatt

SEQ ID NO: 1926823 - DNA, 15 bp, Homo sapiens
aaatattacctattt

SEQ ID NO: 1926824 - DNA, 15 bp, Homo sapiens
aatattacctattta

SEQ ID NO: 1926825 - DNA, 15 bp, Homo sapiens
atattacctatttaa

SEQ ID NO: 1926826 - DNA, 15 bp, Homo sapiens
tattacctatttaaa

SEQ ID NO: 1926827 - DNA, 15 bp, Homo sapiens
attacctatttaaaa

SEQ ID NO: 1926828 - DNA, 15 bp, Homo sapiens
ttacctatttaaaat

SEQ ID NO: 1926829 - DNA, 15 bp, Homo sapiens
tacctatttaaaata

SEQ ID NO: 1926830 - DNA, 15 bp, Homo sapiens
acctatttaaaataa

SEQ ID NO: 1926831 - DNA, 15 bp, Homo sapiens
cctatttaaaataaa

SEQ ID NO: 1926832 - DNA, 15 bp, Homo sapiens
ctatttaaaataaac

SEQ ID NO: 1926833 - DNA, 15 bp, Homo sapiens
tatttaaaataaacg

SEQ ID NO: 1926834 - DNA, 15 bp, Homo sapiens
atttaaaataaacgt

SEQ ID NO: 1926835 - DNA, 15 bp, Homo sapiens
tttaaaataaacgtg

SEQ ID NO: 1926836 - DNA, 15 bp, Homo sapiens
ttaaaataaacgtgt

SEQ ID NO: 1926837 - DNA, 15 bp, Homo sapiens
taaaataaacgtgta

SEQ ID NO: 1926838 - DNA, 15 bp, Homo sapiens
aaaataaacgtgtaa

SEQ ID NO: 1926839 - DNA, 15 bp, Homo sapiens
aaataaacgtgtaaa

SEQ ID NO: 1926840 - DNA, 15 bp, Homo sapiens
aataaacgtgtaaat

SEQ ID NO: 1926841 - DNA, 15 bp, Homo sapiens
ataaacgtgtaaatt

SEQ ID NO: 1926842 - DNA, 15 bp, Homo sapiens
taaacgtgtaaattt

SEQ ID NO: 1926843 - DNA, 15 bp, Homo sapiens
aaacgtgtaaattta

SEQ ID NO: 1926844 - DNA, 15 bp, Homo sapiens
aacgtgtaaatttaa

SEQ ID NO: 1926845 - DNA, 15 bp, Homo sapiens
acgtgtaaatttaag

SEQ ID NO: 1926846 - DNA, 15 bp, Homo sapiens
cgtgtaaatttaaga

SEQ ID NO: 1926847 - DNA, 15 bp, Homo sapiens
gtgtaaatttaagag

SEQ ID NO: 1926848 - DNA, 15 bp, Homo sapiens
tgtaaatttaagagt

SEQ ID NO: 1926849 - DNA, 15 bp, Homo sapiens
gtaaatttaagagtc

SEQ ID NO: 1926850 - DNA, 15 bp, Homo sapiens
taaatttaagagtct

SEQ ID NO: 1926851 - DNA, 15 bp, Homo sapiens
aaatttaagagtctc

SEQ ID NO: 1926852 - DNA, 15 bp, Homo sapiens
aatttaagagtctcc

SEQ ID NO: 1926853 - DNA, 15 bp, Homo sapiens
atttaagagtctcca

SEQ ID NO: 1926854 - DNA, 15 bp, Homo sapiens
tttaagagtctccat

SEQ ID NO: 1926855 - DNA, 15 bp, Homo sapiens
ttaagagtctccata

SEQ ID NO: 1926856 - DNA, 15 bp, Homo sapiens
taagagtctccatag

SEQ ID NO: 1926857 - DNA, 15 bp, Homo sapiens
aagagtctccataga

SEQ ID NO: 1926858 - DNA, 15 bp, Homo sapiens
agagtctccatagat

SEQ ID NO: 1926859 - DNA, 15 bp, Homo sapiens
gagtctccatagatg

SEQ ID NO: 1926860 - DNA, 15 bp, Homo sapiens
agtctccatagatga

SEQ ID NO: 1926861 - DNA, 15 bp, Homo sapiens
gtctccatagatgat

SEQ ID NO: 1926862 - DNA, 15 bp, Homo sapiens
tctccatagatgatc

SEQ ID NO: 1926863 - DNA, 15 bp, Homo sapiens
ctccatagatgatct

SEQ ID NO: 1926864 - DNA, 15 bp, Homo sapiens
tccatagatgatcta

SEQ ID NO: 1926865 - DNA, 15 bp, Homo sapiens
ccatagatgatctag

SEQ ID NO: 1926866 - DNA, 15 bp, Homo sapiens
catagatgatctaga

SEQ ID NO: 1926867 - DNA, 15 bp, Homo sapiens
atagatgatctagat

SEQ ID NO: 1926868 - DNA, 15 bp, Homo sapiens
tagatgatctagata

SEQ ID NO: 1926869 - DNA, 15 bp, Homo sapiens
agatgatctagatac

SEQ ID NO: 1926870 - DNA, 15 bp, Homo sapiens
gatgatctagataca

SEQ ID NO: 1926871 - DNA, 15 bp, Homo sapiens
atgatctagatacag

SEQ ID NO: 1926872 - DNA, 15 bp, Homo sapiens
tgatctagatacagc

SEQ ID NO: 1926873 - DNA, 15 bp, Homo sapiens
gatctagatacagcc

SEQ ID NO: 1926874 - DNA, 15 bp, Homo sapiens
atctagatacagcca

SEQ ID NO: 1926875 - DNA, 15 bp, Homo sapiens
tctagatacagccaa

SEQ ID NO: 1926876 - DNA, 15 bp, Homo sapiens
ctagatacagccaag

SEQ ID NO: 1926877 - DNA, 15 bp, Homo sapiens
tagatacagccaaga

SEQ ID NO: 1926878 - DNA, 15 bp, Homo sapiens
agatacagccaagat

SEQ ID NO: 1926879 - DNA, 15 bp, Homo sapiens
gatacagccaagatt

SEQ ID NO: 1926880 - DNA, 15 bp, Homo sapiens
atacagccaagattg

SEQ ID NO: 1926881 - DNA, 15 bp, Homo sapiens
tacagccaagattga

SEQ ID NO: 1926882 - DNA, 15 bp, Homo sapiens
acagccaagattgag

SEQ ID NO: 1926883 - DNA, 15 bp, Homo sapiens
cagccaagattgaga

SEQ ID NO: 1926884 - DNA, 15 bp, Homo sapiens
agccaagattgagaa

SEQ ID NO: 1926885 - DNA, 15 bp, Homo sapiens
gccaagattgagaac

SEQ ID NO: 1926886 - DNA, 15 bp, Homo sapiens
ccaagattgagaacc

SEQ ID NO: 1926887 - DNA, 15 bp, Homo sapiens
caagattgagaacca

SEQ ID NO: 1926888 - DNA, 15 bp, Homo sapiens
aagattgagaaccac

SEQ ID NO: 1926889 - DNA, 15 bp, Homo sapiens
agattgagaaccaca

SEQ ID NO: 1926890 - DNA, 15 bp, Homo sapiens
gattgagaaccacag

SEQ ID NO: 1926891 - DNA, 15 bp, Homo sapiens
attgagaaccacagg

SEQ ID NO: 1926892 - DNA, 15 bp, Homo sapiens
ttgagaaccacaggt

SEQ ID NO: 1926893 - DNA, 15 bp, Homo sapiens
tgagaaccacaggta

SEQ ID NO: 1926894 - DNA, 15 bp, Homo sapiens
gagaaccacaggtat

SEQ ID NO: 1926895 - DNA, 15 bp, Homo sapiens
agaaccacaggtata

SEQ ID NO: 1926896 - DNA, 15 bp, Homo sapiens
gaaccacaggtatag

SEQ ID NO: 1926897 - DNA, 15 bp, Homo sapiens
aaccacaggtatagt

SEQ ID NO: 1926898 - DNA, 15 bp, Homo sapiens
accacaggtatagtt

SEQ ID NO: 1926899 - DNA, 15 bp, Homo sapiens
ccacaggtatagtta

SEQ ID NO: 1926900 - DNA, 15 bp, Homo sapiens
cacaggtatagttaa

SEQ ID NO: 1926901 - DNA, 15 bp, Homo sapiens
acaggtatagttaat

SEQ ID NO: 1926902 - DNA, 15 bp, Homo sapiens
caggtatagttaatt

SEQ ID NO: 1926903 - DNA, 15 bp, Homo sapiens
aggtatagttaatta

SEQ ID NO: 1926904 - DNA, 15 bp, Homo sapiens
ggtatagttaattag

SEQ ID NO: 1926905 - DNA, 15 bp, Homo sapiens
gtatagttaattagt

SEQ ID NO: 1926906 - DNA, 15 bp, Homo sapiens
tatagttaattagtg

SEQ ID NO: 1926907 - DNA, 15 bp, Homo sapiens
atagttaattagtga

SEQ ID NO: 1926908 - DNA, 15 bp, Homo sapiens
tagttaattagtgaa

SEQ ID NO: 1926909 - DNA, 15 bp, Homo sapiens
agttaattagtgaat

SEQ ID NO: 1926910 - DNA, 15 bp, Homo sapiens
gttaattagtgaatt

SEQ ID NO: 1926911 - DNA, 15 bp, Homo sapiens
ttaattagtgaatta

SEQ ID NO: 1926912 - DNA, 15 bp, Homo sapiens
taattagtgaattaa

SEQ ID NO: 1926913 - DNA, 15 bp, Homo sapiens
aattagtgaattaaa

SEQ ID NO: 1926914 - DNA, 15 bp, Homo sapiens
attagtgaattaaaa

SEQ ID NO: 1926915 - DNA, 15 bp, Homo sapiens
ttagtgaattaaaaa

SEQ ID NO: 1926916 - DNA, 15 bp, Homo sapiens
tagtgaattaaaaac

SEQ ID NO: 1926917 - DNA, 15 bp, Homo sapiens
agtgaattaaaaaca

SEQ ID NO: 1926918 - DNA, 15 bp, Homo sapiens
gtgaattaaaaacaa

SEQ ID NO: 1926919 - DNA, 15 bp, Homo sapiens
tgaattaaaaacaaa

SEQ ID NO: 1926920 - DNA, 15 bp, Homo sapiens
gaattaaaaacaaaa

SEQ ID NO: 1926921 - DNA, 15 bp, Homo sapiens
aattaaaaacaaaat

SEQ ID NO: 1926922 - DNA, 15 bp, Homo sapiens
attaaaaacaaaata

SEQ ID NO: 1926923 - DNA, 15 bp, Homo sapiens
ttaaaaacaaaataa

SEQ ID NO: 1926924 - DNA, 15 bp, Homo sapiens
taaaaacaaaataat

SEQ ID NO: 1926925 - DNA, 15 bp, Homo sapiens
aaaaacaaaataatg

SEQ ID NO: 1926926 - DNA, 15 bp, Homo sapiens
aaaacaaaataatgt

SEQ ID NO: 1926927 - DNA, 15 bp, Homo sapiens
aaacaaaataatgtg

SEQ ID NO: 1926928 - DNA, 15 bp, Homo sapiens
aacaaaataatgtga

SEQ ID NO: 1926929 - DNA, 15 bp, Homo sapiens
acaaaataatgtgaa

SEQ ID NO: 1926930 - DNA, 15 bp, Homo sapiens
caaaataatgtgaaa

SEQ ID NO: 1926931 - DNA, 15 bp, Homo sapiens
aaaataatgtgaaac

SEQ ID NO: 1926932 - DNA, 15 bp, Homo sapiens
aaataatgtgaaaca

SEQ ID NO: 1926933 - DNA, 15 bp, Homo sapiens
aataatgtgaaacaa

SEQ ID NO: 1926934 - DNA, 15 bp, Homo sapiens
ataatgtgaaacaag

SEQ ID NO: 1926935 - DNA, 15 bp, Homo sapiens
taatgtgaaacaagt

SEQ ID NO: 1926936 - DNA, 15 bp, Homo sapiens
aatgtgaaacaagta

SEQ ID NO: 1926937 - DNA, 15 bp, Homo sapiens
atgtgaaacaagtaa

SEQ ID NO: 1926938 - DNA, 15 bp, Homo sapiens
tgtgaaacaagtaat

SEQ ID NO: 1926939 - DNA, 15 bp, Homo sapiens
gtgaaacaagtaatt

SEQ ID NO: 1926940 - DNA, 15 bp, Homo sapiens
tgaaacaagtaatta

SEQ ID NO: 1926941 - DNA, 15 bp, Homo sapiens
gaaacaagtaattaa

SEQ ID NO: 1926942 - DNA, 15 bp, Homo sapiens
aaacaagtaattaaa

SEQ ID NO: 1926943 - DNA, 15 bp, Homo sapiens
aacaagtaattaaaa

SEQ ID NO: 1926944 - DNA, 15 bp, Homo sapiens
acaagtaattaaaat

SEQ ID NO: 1926945 - DNA, 15 bp, Homo sapiens
caagtaattaaaatt

SEQ ID NO: 1926946 - DNA, 15 bp, Homo sapiens
aagtaattaaaattt

SEQ ID NO: 1926947 - DNA, 15 bp, Homo sapiens
agtaattaaaatttt

SEQ ID NO: 1926948 - DNA, 15 bp, Homo sapiens
gtaattaaaattttc

SEQ ID NO: 1926949 - DNA, 15 bp, Homo sapiens
taattaaaattttct

SEQ ID NO: 1926950 - DNA, 15 bp, Homo sapiens
aattaaaattttcta

SEQ ID NO: 1926951 - DNA, 15 bp, Homo sapiens
attaaaattttctat

SEQ ID NO: 1926952 - DNA, 15 bp, Homo sapiens
ttaaaattttctatt

SEQ ID NO: 1926953 - DNA, 15 bp, Homo sapiens
taaaattttctatta

SEQ ID NO: 1926954 - DNA, 15 bp, Homo sapiens
aaaattttctattaa

SEQ ID NO: 1926955 - DNA, 15 bp, Homo sapiens
aaattttctattaaa

SEQ ID NO: 1926956 - DNA, 15 bp, Homo sapiens
aattttctattaaag

SEQ ID NO: 1926957 - DNA, 15 bp, Homo sapiens
attttctattaaaga

SEQ ID NO: 1926958 - DNA, 15 bp, Homo sapiens
ttttctattaaagat

SEQ ID NO: 1926959 - DNA, 15 bp, Homo sapiens
tttctattaaagata

SEQ ID NO: 1926960 - DNA, 15 bp, Homo sapiens
ttctattaaagataa

SEQ ID NO: 1926961 - DNA, 15 bp, Homo sapiens
tctattaaagataat

SEQ ID NO: 1926962 - DNA, 15 bp, Homo sapiens
ctattaaagataata

SEQ ID NO: 1926963 - DNA, 15 bp, Homo sapiens
tattaaagataatag

SEQ ID NO: 1926964 - DNA, 15 bp, Homo sapiens
attaaagataatagg

SEQ ID NO: 1926965 - DNA, 15 bp, Homo sapiens
ttaaagataataggt

SEQ ID NO: 1926966 - DNA, 15 bp, Homo sapiens
taaagataataggtg

SEQ ID NO: 1926967 - DNA, 15 bp, Homo sapiens
aaagataataggtgc

SEQ ID NO: 1926968 - DNA, 15 bp, Homo sapiens
aagataataggtgct

SEQ ID NO: 1926969 - DNA, 15 bp, Homo sapiens
agataataggtgcta

SEQ ID NO: 1926970 - DNA, 15 bp, Homo sapiens
gataataggtgctag

SEQ ID NO: 1926971 - DNA, 15 bp, Homo sapiens
ataataggtgctaga

SEQ ID NO: 1926972 - DNA, 15 bp, Homo sapiens
taataggtgctagaa

SEQ ID NO: 1926973 - DNA, 15 bp, Homo sapiens
aataggtgctagaat

SEQ ID NO: 1926974 - DNA, 15 bp, Homo sapiens
ataggtgctagaata

SEQ ID NO: 1926975 - DNA, 15 bp, Homo sapiens
taggtgctagaatag

SEQ ID NO: 1926976 - DNA, 15 bp, Homo sapiens
aggtgctagaataga

SEQ ID NO: 1926977 - DNA, 15 bp, Homo sapiens
ggtgctagaatagat

SEQ ID NO: 1926978 - DNA, 15 bp, Homo sapiens
gtgctagaatagatt

SEQ ID NO: 1926979 - DNA, 15 bp, Homo sapiens
tgctagaatagattt

SEQ ID NO: 1926980 - DNA, 15 bp, Homo sapiens
gctagaatagatttg

SEQ ID NO: 1926981 - DNA, 15 bp, Homo sapiens
ctagaatagatttga

SEQ ID NO: 1926982 - DNA, 15 bp, Homo sapiens
tagaatagatttgat

SEQ ID NO: 1926983 - DNA, 15 bp, Homo sapiens
agaatagatttgatg

SEQ ID NO: 1926984 - DNA, 15 bp, Homo sapiens
gaatagatttgatgc

SEQ ID NO: 1926985 - DNA, 15 bp, Homo sapiens
aatagatttgatgct

SEQ ID NO: 1926986 - DNA, 15 bp, Homo sapiens
atagatttgatgctt

SEQ ID NO: 1926987 - DNA, 15 bp, Homo sapiens
tagatttgatgcttg

SEQ ID NO: 1926988 - DNA, 15 bp, Homo sapiens
agatttgatgcttga

SEQ ID NO: 1926989 - DNA, 15 bp, Homo sapiens
gatttgatgcttgag

SEQ ID NO: 1926990 - DNA, 15 bp, Homo sapiens
atttgatgcttgagg

SEQ ID NO: 1926991 - DNA, 15 bp, Homo sapiens
tttgatgcttgaggg

SEQ ID NO: 1926992 - DNA, 15 bp, Homo sapiens
ttgatgcttgagggg

SEQ ID NO: 1926993 - DNA, 15 bp, Homo sapiens
tgatgcttgaggggt

SEQ ID NO: 1926994 - DNA, 15 bp, Homo sapiens
gatgcttgaggggtt

SEQ ID NO: 1926995 - DNA, 15 bp, Homo sapiens
atgcttgaggggtta

SEQ ID NO: 1926996 - DNA, 15 bp, Homo sapiens
tgcttgaggggttaa

SEQ ID NO: 1926997 - DNA, 15 bp, Homo sapiens
gcttgaggggttaat

SEQ ID NO: 1926998 - DNA, 15 bp, Homo sapiens
cttgaggggttaata

SEQ ID NO: 1926999 - DNA, 15 bp, Homo sapiens
ttgaggggttaataa

SEQ ID NO: 1927000 - DNA, 15 bp, Homo sapiens
tgaggggttaataac

SEQ ID NO: 1927001 - DNA, 15 bp, Homo sapiens
gaggggttaataacc

SEQ ID NO: 1927002 - DNA, 15 bp, Homo sapiens
aggggttaataacct

SEQ ID NO: 1927003 - DNA, 15 bp, Homo sapiens
ggggttaataacctt

SEQ ID NO: 1927004 - DNA, 15 bp, Homo sapiens
gggttaataacctta

SEQ ID NO: 1927005 - DNA, 15 bp, Homo sapiens
ggttaataaccttaa

SEQ ID NO: 1927006 - DNA, 15 bp, Homo sapiens
gttaataaccttaaa

SEQ ID NO: 1927007 - DNA, 15 bp, Homo sapiens
ttaataaccttaaag

SEQ ID NO: 1927008 - DNA, 15 bp, Homo sapiens
taataaccttaaaga

SEQ ID NO: 1927009 - DNA, 15 bp, Homo sapiens
aataaccttaaagaa

SEQ ID NO: 1927010 - DNA, 15 bp, Homo sapiens
ataaccttaaagaaa

SEQ ID NO: 1927011 - DNA, 15 bp, Homo sapiens
taaccttaaagaaag

SEQ ID NO: 1927012 - DNA, 15 bp, Homo sapiens
aaccttaaagaaagc

SEQ ID NO: 1927013 - DNA, 15 bp, Homo sapiens
accttaaagaaagca

SEQ ID NO: 1927014 - DNA, 15 bp, Homo sapiens
ccttaaagaaagcaa

SEQ ID NO: 1927015 - DNA, 15 bp, Homo sapiens
cttaaagaaagcaac

SEQ ID NO: 1927016 - DNA, 15 bp, Homo sapiens
ttaaagaaagcaact

SEQ ID NO: 1927017 - DNA, 15 bp, Homo sapiens
taaagaaagcaactt

SEQ ID NO: 1927018 - DNA, 15 bp, Homo sapiens
aaagaaagcaacttt

SEQ ID NO: 1927019 - DNA, 15 bp, Homo sapiens
aagaaagcaactttc

SEQ ID NO: 1927020 - DNA, 15 bp, Homo sapiens
agaaagcaactttcc

SEQ ID NO: 1927021 - DNA, 15 bp, Homo sapiens
gaaagcaactttcca

SEQ ID NO: 1927022 - DNA, 15 bp, Homo sapiens
aaagcaactttccag

SEQ ID NO: 1927023 - DNA, 15 bp, Homo sapiens
aagcaactttccagt

SEQ ID NO: 1927024 - DNA, 15 bp, Homo sapiens
agcaactttccagtg

SEQ ID NO: 1927025 - DNA, 15 bp, Homo sapiens
gcaactttccagtga

SEQ ID NO: 1927026 - DNA, 15 bp, Homo sapiens
caactttccagtgat

SEQ ID NO: 1927027 - DNA, 15 bp, Homo sapiens
aactttccagtgatg

SEQ ID NO: 1927028 - DNA, 15 bp, Homo sapiens
actttccagtgatga

SEQ ID NO: 1927029 - DNA, 15 bp, Homo sapiens
ctttccagtgatgag

SEQ ID NO: 1927030 - DNA, 15 bp, Homo sapiens
tttccagtgatgaga

SEQ ID NO: 1927031 - DNA, 15 bp, Homo sapiens
ttccagtgatgagat

SEQ ID NO: 1927032 - DNA, 15 bp, Homo sapiens
tccagtgatgagatg

SEQ ID NO: 1927033 - DNA, 15 bp, Homo sapiens
ccagtgatgagatgg

SEQ ID NO: 1927034 - DNA, 15 bp, Homo sapiens
cagtgatgagatgga

SEQ ID NO: 1927035 - DNA, 15 bp, Homo sapiens
agtgatgagatggag

SEQ ID NO: 1927036 - DNA, 15 bp, Homo sapiens
gtgatgagatggaga

SEQ ID NO: 1927037 - DNA, 15 bp, Homo sapiens
tgatgagatggagaa

SEQ ID NO: 1927038 - DNA, 15 bp, Homo sapiens
gatgagatggagaag

SEQ ID NO: 1927039 - DNA, 15 bp, Homo sapiens
atgagatggagaagt

SEQ ID NO: 1927040 - DNA, 15 bp, Homo sapiens
tgagatggagaagtt

SEQ ID NO: 1927041 - DNA, 15 bp, Homo sapiens
gagatggagaagtta

SEQ ID NO: 1927042 - DNA, 15 bp, Homo sapiens
agatggagaagttag

SEQ ID NO: 1927043 - DNA, 15 bp, Homo sapiens
gatggagaagttaga

SEQ ID NO: 1927044 - DNA, 15 bp, Homo sapiens
atggagaagttagat

SEQ ID NO: 1927045 - DNA, 15 bp, Homo sapiens
tggagaagttagatc

SEQ ID NO: 1927046 - DNA, 15 bp, Homo sapiens
ggagaagttagatca

SEQ ID NO: 1927047 - DNA, 15 bp, Homo sapiens
gagaagttagatcac

SEQ ID NO: 1927048 - DNA, 15 bp, Homo sapiens
agaagttagatcaca

SEQ ID NO: 1927049 - DNA, 15 bp, Homo sapiens
gaagttagatcacaa

SEQ ID NO: 1927050 - DNA, 15 bp, Homo sapiens
aagttagatcacaat

SEQ ID NO: 1927051 - DNA, 15 bp, Homo sapiens
agttagatcacaatg

SEQ ID NO: 1927052 - DNA, 15 bp, Homo sapiens
gttagatcacaatgg

SEQ ID NO: 1927053 - DNA, 15 bp, Homo sapiens
ttagatcacaatggt

SEQ ID NO: 1927054 - DNA, 15 bp, Homo sapiens
tagatcacaatggtt

SEQ ID NO: 1927055 - DNA, 15 bp, Homo sapiens
agatcacaatggtta

SEQ ID NO: 1927056 - DNA, 15 bp, Homo sapiens
gatcacaatggttaa

SEQ ID NO: 1927057 - DNA, 15 bp, Homo sapiens
atcacaatggttaag

SEQ ID NO: 1927058 - DNA, 15 bp, Homo sapiens
tcacaatggttaagg

SEQ ID NO: 1927059 - DNA, 15 bp, Homo sapiens
cacaatggttaagga

SEQ ID NO: 1927060 - DNA, 15 bp, Homo sapiens
acaatggttaaggag

SEQ ID NO: 1927061 - DNA, 15 bp, Homo sapiens
caatggttaaggagt

SEQ ID NO: 1927062 - DNA, 15 bp, Homo sapiens
aatggttaaggagtc

SEQ ID NO: 1927063 - DNA, 15 bp, Homo sapiens
atggttaaggagtca

SEQ ID NO: 1927064 - DNA, 15 bp, Homo sapiens
tggttaaggagtcag

SEQ ID NO: 1927065 - DNA, 15 bp, Homo sapiens
ggttaaggagtcagg

SEQ ID NO: 1927066 - DNA, 15 bp, Homo sapiens
gttaaggagtcagga

SEQ ID NO: 1927067 - DNA, 15 bp, Homo sapiens
ttaaggagtcaggaa

SEQ ID NO: 1927068 - DNA, 15 bp, Homo sapiens
taaggagtcaggaaa

SEQ ID NO: 1927069 - DNA, 15 bp, Homo sapiens
aaggagtcaggaaag

SEQ ID NO: 1927070 - DNA, 15 bp, Homo sapiens
aggagtcaggaaagg

SEQ ID NO: 1927071 - DNA, 15 bp, Homo sapiens
ggagtcaggaaaggg

SEQ ID NO: 1927072 - DNA, 15 bp, Homo sapiens
gagtcaggaaagggg

SEQ ID NO: 1927073 - DNA, 15 bp, Homo sapiens
agtcaggaaaggggg

SEQ ID NO: 1927074 - DNA, 15 bp, Homo sapiens
gtcaggaaagggggt

SEQ ID NO: 1927075 - DNA, 15 bp, Homo sapiens
tcaggaaagggggtg

SEQ ID NO: 1927076 - DNA, 15 bp, Homo sapiens
caggaaagggggtga

SEQ ID NO: 1927077 - DNA, 15 bp, Homo sapiens
aggaaagggggtgag

SEQ ID NO: 1927078 - DNA, 15 bp, Homo sapiens
ggaaagggggtgagc

SEQ ID NO: 1927079 - DNA, 15 bp, Homo sapiens
gaaagggggtgagca

SEQ ID NO: 1927080 - DNA, 15 bp, Homo sapiens
aaagggggtgagcag

SEQ ID NO: 1927081 - DNA, 15 bp, Homo sapiens
aagggggtgagcaga

SEQ ID NO: 1927082 - DNA, 15 bp, Homo sapiens
agggggtgagcagag

SEQ ID NO: 1927083 - DNA, 15 bp, Homo sapiens
gggggtgagcagagg

SEQ ID NO: 1927084 - DNA, 15 bp, Homo sapiens
ggggtgagcagaggc

SEQ ID NO: 1927085 - DNA, 15 bp, Homo sapiens
gggtgagcagaggcc

SEQ ID NO: 1927086 - DNA, 15 bp, Homo sapiens
ggtgagcagaggcca

SEQ ID NO: 1927087 - DNA, 15 bp, Homo sapiens
gtgagcagaggccaa

SEQ ID NO: 1927088 - DNA, 15 bp, Homo sapiens
tgagcagaggccaaa

SEQ ID NO: 1927089 - DNA, 15 bp, Homo sapiens
gagcagaggccaaag

SEQ ID NO: 1927090 - DNA, 15 bp, Homo sapiens
agcagaggccaaaga

SEQ ID NO: 1927091 - DNA, 15 bp, Homo sapiens
gcagaggccaaagac

SEQ ID NO: 1927092 - DNA, 15 bp, Homo sapiens
cagaggccaaagact

SEQ ID NO: 1927093 - DNA, 15 bp, Homo sapiens
agaggccaaagactg

SEQ ID NO: 1927094 - DNA, 15 bp, Homo sapiens
gaggccaaagactgt

SEQ ID NO: 1927095 - DNA, 15 bp, Homo sapiens
aggccaaagactgta

SEQ ID NO: 1927096 - DNA, 15 bp, Homo sapiens
ggccaaagactgtaa

SEQ ID NO: 1927097 - DNA, 15 bp, Homo sapiens
gccaaagactgtaag

SEQ ID NO: 1927098 - DNA, 15 bp, Homo sapiens
ccaaagactgtaagc

SEQ ID NO: 1927099 - DNA, 15 bp, Homo sapiens
caaagactgtaagct

SEQ ID NO: 1927100 - DNA, 15 bp, Homo sapiens
aaagactgtaagctg

SEQ ID NO: 1927101 - DNA, 15 bp, Homo sapiens
aagactgtaagctgt

SEQ ID NO: 1927102 - DNA, 15 bp, Homo sapiens
agactgtaagctgtc

SEQ ID NO: 1927103 - DNA, 15 bp, Homo sapiens
gactgtaagctgtct

SEQ ID NO: 1927104 - DNA, 15 bp, Homo sapiens
actgtaagctgtctg

SEQ ID NO: 1927105 - DNA, 15 bp, Homo sapiens
ctgtaagctgtctgt

SEQ ID NO: 1927106 - DNA, 15 bp, Homo sapiens
tgtaagctgtctgtt

SEQ ID NO: 1927107 - DNA, 15 bp, Homo sapiens
gtaagctgtctgttg

SEQ ID NO: 1927108 - DNA, 15 bp, Homo sapiens
taagctgtctgttga

SEQ ID NO: 1927109 - DNA, 15 bp, Homo sapiens
aagctgtctgttgat

SEQ ID NO: 1927110 - DNA, 15 bp, Homo sapiens
agctgtctgttgatt

SEQ ID NO: 1927111 - DNA, 15 bp, Homo sapiens
gctgtctgttgattg

SEQ ID NO: 1927112 - DNA, 15 bp, Homo sapiens
ctgtctgttgattgg

SEQ ID NO: 1927113 - DNA, 15 bp, Homo sapiens
tgtctgttgattggc

SEQ ID NO: 1927114 - DNA, 15 bp, Homo sapiens
gtctgttgattggca

SEQ ID NO: 1927115 - DNA, 15 bp, Homo sapiens
tctgttgattggcag

SEQ ID NO: 1927116 - DNA, 15 bp, Homo sapiens
ctgttgattggcagc

SEQ ID NO: 1927117 - DNA, 15 bp, Homo sapiens
tgttgattggcagct

SEQ ID NO: 1927118 - DNA, 15 bp, Homo sapiens
gttgattggcagctg

SEQ ID NO: 1927119 - DNA, 15 bp, Homo sapiens
ttgattggcagctgc

SEQ ID NO: 1927120 - DNA, 15 bp, Homo sapiens
tgattggcagctgca

SEQ ID NO: 1927121 - DNA, 15 bp, Homo sapiens
gattggcagctgcaa

SEQ ID NO: 1927122 - DNA, 15 bp, Homo sapiens
ttggcagctgcaagg

SEQ ID NO: 1927123 - DNA, 15 bp, Homo sapiens
tggcagctgcaaggc

SEQ ID NO: 1927124 - DNA, 15 bp, Homo sapiens
ggcagctgcaaggca

SEQ ID NO: 1927125 - DNA, 15 bp, Homo sapiens
gcagctgcaaggcag

SEQ ID NO: 1927126 - DNA, 15 bp, Homo sapiens
cagctgcaaggcagg

SEQ ID NO: 1927127 - DNA, 15 bp, Homo sapiens
agctgcaaggcaggc

SEQ ID NO: 1927128 - DNA, 15 bp, Homo sapiens
gctgcaaggcaggct

SEQ ID NO: 1927129 - DNA, 15 bp, Homo sapiens
ctgcaaggcaggctg

SEQ ID NO: 1927130 - DNA, 15 bp, Homo sapiens
tgcaaggcaggctgt

SEQ ID NO: 1927131 - DNA, 15 bp, Homo sapiens
gcaaggcaggctgtc

SEQ ID NO: 1927132 - DNA, 15 bp, Homo sapiens
caaggcaggctgtct

SEQ ID NO: 1927133 - DNA, 15 bp, Homo sapiens
aaggcaggctgtcta

SEQ ID NO: 1927134 - DNA, 15 bp, Homo sapiens
aggcaggctgtctaa

SEQ ID NO: 1927135 - DNA, 15 bp, Homo sapiens
ggcaggctgtctaaa

SEQ ID NO: 1927136 - DNA, 15 bp, Homo sapiens
gcaggctgtctaaac

SEQ ID NO: 1927137 - DNA, 15 bp, Homo sapiens
caggctgtctaaacc

SEQ ID NO: 1927138 - DNA, 15 bp, Homo sapiens
aggctgtctaaaccc

SEQ ID NO: 1927139 - DNA, 15 bp, Homo sapiens
ggctgtctaaaccct

SEQ ID NO: 1927140 - DNA, 15 bp, Homo sapiens
gctgtctaaaccctg

SEQ ID NO: 1927141 - DNA, 15 bp, Homo sapiens
ctgtctaaaccctga

SEQ ID NO: 1927142 - DNA, 15 bp, Homo sapiens
tgtctaaaccctgac

SEQ ID NO: 1927143 - DNA, 15 bp, Homo sapiens
gtctaaaccctgacg

SEQ ID NO: 1927144 - DNA, 15 bp, Homo sapiens
tctaaaccctgacga

SEQ ID NO: 1927145 - DNA, 15 bp, Homo sapiens
ctaaaccctgacgac

SEQ ID NO: 1927146 - DNA, 15 bp, Homo sapiens
taaaccctgacgact

SEQ ID NO: 1927147 - DNA, 15 bp, Homo sapiens
aaaccctgacgactc

SEQ ID NO: 1927148 - DNA, 15 bp, Homo sapiens
aaccctgacgactcc

SEQ ID NO: 1927149 - DNA, 15 bp, Homo sapiens
accctgacgactcca

SEQ ID NO: 1927150 - DNA, 15 bp, Homo sapiens
ccctgacgactccac

SEQ ID NO: 1927151 - DNA, 15 bp, Homo sapiens
cctgacgactccact

SEQ ID NO: 1927152 - DNA, 15 bp, Homo sapiens
ctgacgactccactc

SEQ ID NO: 1927153 - DNA, 15 bp, Homo sapiens
tgacgactccactca

SEQ ID NO: 1927154 - DNA, 15 bp, Homo sapiens
gacgactccactcat

SEQ ID NO: 1927155 - DNA, 15 bp, Homo sapiens
acgactccactcatg

SEQ ID NO: 1927156 - DNA, 15 bp, Homo sapiens
cgactccactcatga

SEQ ID NO: 1927157 - DNA, 15 bp, Homo sapiens
gactccactcatgag

SEQ ID NO: 1927158 - DNA, 15 bp, Homo sapiens
actccactcatgagc

SEQ ID NO: 1927159 - DNA, 15 bp, Homo sapiens
ctccactcatgagct

SEQ ID NO: 1927160 - DNA, 15 bp, Homo sapiens
tccactcatgagctg

SEQ ID NO: 1927161 - DNA, 15 bp, Homo sapiens
ccactcatgagctgt

SEQ ID NO: 1927162 - DNA, 15 bp, Homo sapiens
cactcatgagctgtg

SEQ ID NO: 1927163 - DNA, 15 bp, Homo sapiens
actcatgagctgtgg

SEQ ID NO: 1927164 - DNA, 15 bp, Homo sapiens
ctcatgagctgtggg

SEQ ID NO: 1927165 - DNA, 15 bp, Homo sapiens
tcatgagctgtggga

SEQ ID NO: 1927166 - DNA, 15 bp, Homo sapiens
catgagctgtgggac

SEQ ID NO: 1927167 - DNA, 15 bp, Homo sapiens
atgagctgtgggact

SEQ ID NO: 1927168 - DNA, 15 bp, Homo sapiens
tgagctgtgggactt

SEQ ID NO: 1927169 - DNA, 15 bp, Homo sapiens
gagctgtgggacttg

SEQ ID NO: 1927170 - DNA, 15 bp, Homo sapiens
agctgtgggacttgg

SEQ ID NO: 1927171 - DNA, 15 bp, Homo sapiens
gctgtgggacttggg

SEQ ID NO: 1927172 - DNA, 15 bp, Homo sapiens
ctgtgggacttggga

SEQ ID NO: 1927173 - DNA, 15 bp, Homo sapiens
tgtgggacttgggaa

SEQ ID NO: 1927174 - DNA, 15 bp, Homo sapiens
gtgggacttgggaaa

SEQ ID NO: 1927175 - DNA, 15 bp, Homo sapiens
tgggacttgggaaag

SEQ ID NO: 1927176 - DNA, 15 bp, Homo sapiens
gggacttgggaaagt

SEQ ID NO: 1927177 - DNA, 15 bp, Homo sapiens
ggacttgggaaagtt

SEQ ID NO: 1927178 - DNA, 15 bp, Homo sapiens
gacttgggaaagttt

SEQ ID NO: 1927179 - DNA, 15 bp, Homo sapiens
acttgggaaagtttc

SEQ ID NO: 1927180 - DNA, 15 bp, Homo sapiens
cttgggaaagtttct

SEQ ID NO: 1927181 - DNA, 15 bp, Homo sapiens
ttgggaaagtttctc

SEQ ID NO: 1927182 - DNA, 15 bp, Homo sapiens
tgggaaagtttctca

SEQ ID NO: 1927183 - DNA, 15 bp, Homo sapiens
gggaaagtttctcag

SEQ ID NO: 1927184 - DNA, 15 bp, Homo sapiens
ggaaagtttctcagt

SEQ ID NO: 1927185 - DNA, 15 bp, Homo sapiens
gaaagtttctcagtc

SEQ ID NO: 1927186 - DNA, 15 bp, Homo sapiens
aaagtttctcagtcc

SEQ ID NO: 1927187 - DNA, 15 bp, Homo sapiens
aagtttctcagtccc

SEQ ID NO: 1927188 - DNA, 15 bp, Homo sapiens
agtttctcagtcccc

SEQ ID NO: 1927189 - DNA, 15 bp, Homo sapiens
gtttctcagtccccc

SEQ ID NO: 1927190 - DNA, 15 bp, Homo sapiens
tttctcagtccccca

SEQ ID NO: 1927191 - DNA, 15 bp, Homo sapiens
ttctcagtcccccag

SEQ ID NO: 1927192 - DNA, 15 bp, Homo sapiens
tctcagtcccccaga

SEQ ID NO: 1927193 - DNA, 15 bp, Homo sapiens
ctcagtcccccagat

SEQ ID NO: 1927194 - DNA, 15 bp, Homo sapiens
tcagtcccccagatt

SEQ ID NO: 1927195 - DNA, 15 bp, Homo sapiens
cagtcccccagattc

SEQ ID NO: 1927196 - DNA, 15 bp, Homo sapiens
agtcccccagattcc

SEQ ID NO: 1927197 - DNA, 15 bp, Homo sapiens
gtcccccagattcct

SEQ ID NO: 1927198 - DNA, 15 bp, Homo sapiens
tcccccagattcctc

SEQ ID NO: 1927199 - DNA, 15 bp, Homo sapiens
cccccagattcctca

SEQ ID NO: 1927200 - DNA, 15 bp, Homo sapiens
ccccagattcctcat

SEQ ID NO: 1927201 - DNA, 15 bp, Homo sapiens
cccagattcctcatt

SEQ ID NO: 1927202 - DNA, 15 bp, Homo sapiens
ccagattcctcattg

SEQ ID NO: 1927203 - DNA, 15 bp, Homo sapiens
cagattcctcattgt

SEQ ID NO: 1927204 - DNA, 15 bp, Homo sapiens
agattcctcattgta

SEQ ID NO: 1927205 - DNA, 15 bp, Homo sapiens
gattcctcattgtaa

SEQ ID NO: 1927206 - DNA, 15 bp, Homo sapiens
attcctcattgtaac

SEQ ID NO: 1927207 - DNA, 15 bp, Homo sapiens
ttcctcattgtaaca

SEQ ID NO: 1927208 - DNA, 15 bp, Homo sapiens
tcctcattgtaacat

SEQ ID NO: 1927209 - DNA, 15 bp, Homo sapiens
cctcattgtaacata

SEQ ID NO: 1927210 - DNA, 15 bp, Homo sapiens
ctcattgtaacatag

SEQ ID NO: 1927211 - DNA, 15 bp, Homo sapiens
tcattgtaacatagt

SEQ ID NO: 1927212 - DNA, 15 bp, Homo sapiens
cattgtaacatagta

SEQ ID NO: 1927213 - DNA, 15 bp, Homo sapiens
attgtaacatagtat

SEQ ID NO: 1927214 - DNA, 15 bp, Homo sapiens
ttgtaacatagtata

SEQ ID NO: 1927215 - DNA, 15 bp, Homo sapiens
tgtaacatagtataa

SEQ ID NO: 1927216 - DNA, 15 bp, Homo sapiens
gtaacatagtataat

SEQ ID NO: 1927217 - DNA, 15 bp, Homo sapiens
taacatagtataata

SEQ ID NO: 1927218 - DNA, 15 bp, Homo sapiens
aacatagtataatat

SEQ ID NO: 1927219 - DNA, 15 bp, Homo sapiens
acatagtataatatt

SEQ ID NO: 1927220 - DNA, 15 bp, Homo sapiens
catagtataatatta

SEQ ID NO: 1927221 - DNA, 15 bp, Homo sapiens
atagtataatattat

SEQ ID NO: 1927222 - DNA, 15 bp, Homo sapiens
tagtataatattata

SEQ ID NO: 1927223 - DNA, 15 bp, Homo sapiens
agtataatattatat

SEQ ID NO: 1927224 - DNA, 15 bp, Homo sapiens
gtataatattatatg

SEQ ID NO: 1927225 - DNA, 15 bp, Homo sapiens
tataatattatatgc

SEQ ID NO: 1927226 - DNA, 15 bp, Homo sapiens
ataatattatatgcc

SEQ ID NO: 1927227 - DNA, 15 bp, Homo sapiens
taatattatatgccc

SEQ ID NO: 1927228 - DNA, 15 bp, Homo sapiens
aatattatatgccct

SEQ ID NO: 1927229 - DNA, 15 bp, Homo sapiens
atattatatgccctg

SEQ ID NO: 1927230 - DNA, 15 bp, Homo sapiens
tattatatgccctgt

SEQ ID NO: 1927231 - DNA, 15 bp, Homo sapiens
attatatgccctgtg

SEQ ID NO: 1927232 - DNA, 15 bp, Homo sapiens
ttatatgccctgtga

SEQ ID NO: 1927233 - DNA, 15 bp, Homo sapiens
tatatgccctgtgat

SEQ ID NO: 1927234 - DNA, 15 bp, Homo sapiens
atatgccctgtgatt

SEQ ID NO: 1927235 - DNA, 15 bp, Homo sapiens
tatgccctgtgattc

SEQ ID NO: 1927236 - DNA, 15 bp, Homo sapiens
atgccctgtgattct

SEQ ID NO: 1927237 - DNA, 15 bp, Homo sapiens
tgccctgtgattctt

SEQ ID NO: 1927238 - DNA, 15 bp, Homo sapiens
gccctgtgattcttc

SEQ ID NO: 1927239 - DNA, 15 bp, Homo sapiens
ccctgtgattcttca

SEQ ID NO: 1927240 - DNA, 15 bp, Homo sapiens
cctgtgattcttcaa

SEQ ID NO: 1927241 - DNA, 15 bp, Homo sapiens
ctgtgattcttcaag

SEQ ID NO: 1927242 - DNA, 15 bp, Homo sapiens
tgtgattcttcaagg

SEQ ID NO: 1927243 - DNA, 15 bp, Homo sapiens
gtgattcttcaagga

SEQ ID NO: 1927244 - DNA, 15 bp, Homo sapiens
tgattcttcaaggat

SEQ ID NO: 1927245 - DNA, 15 bp, Homo sapiens
gattcttcaaggatc

SEQ ID NO: 1927246 - DNA, 15 bp, Homo sapiens
attcttcaaggatct

SEQ ID NO: 1927247 - DNA, 15 bp, Homo sapiens
ttcttcaaggatcta

SEQ ID NO: 1927248 - DNA, 15 bp, Homo sapiens
tcttcaaggatctag

SEQ ID NO: 1927249 - DNA, 15 bp, Homo sapiens
cttcaaggatctaga

SEQ ID NO: 1927250 - DNA, 15 bp, Homo sapiens
ttcaaggatctagaa

SEQ ID NO: 1927251 - DNA, 15 bp, Homo sapiens
caaggatctagaacc

SEQ ID NO: 1927252 - DNA, 15 bp, Homo sapiens
aaggatctagaacca

SEQ ID NO: 1927253 - DNA, 15 bp, Homo sapiens
aggatctagaaccag

SEQ ID NO: 1927254 - DNA, 15 bp, Homo sapiens
ggatctagaaccaga

SEQ ID NO: 1927255 - DNA, 15 bp, Homo sapiens
gatctagaaccagaa

SEQ ID NO: 1927256 - DNA, 15 bp, Homo sapiens
atctagaaccagaaa

SEQ ID NO: 1927257 - DNA, 15 bp, Homo sapiens
tctagaaccagaaat

SEQ ID NO: 1927258 - DNA, 15 bp, Homo sapiens
ctagaaccagaaata

SEQ ID NO: 1927259 - DNA, 15 bp, Homo sapiens
tagaaccagaaatac

SEQ ID NO: 1927260 - DNA, 15 bp, Homo sapiens
agaaccagaaatacc

SEQ ID NO: 1927261 - DNA, 15 bp, Homo sapiens
gaaccagaaatacca

SEQ ID NO: 1927262 - DNA, 15 bp, Homo sapiens
aaccagaaataccat

SEQ ID NO: 1927263 - DNA, 15 bp, Homo sapiens
accagaaataccatt

SEQ ID NO: 1927264 - DNA, 15 bp, Homo sapiens
ccagaaataccattt

SEQ ID NO: 1927265 - DNA, 15 bp, Homo sapiens
cagaaataccatttg

SEQ ID NO: 1927266 - DNA, 15 bp, Homo sapiens
aataccatttgacca

SEQ ID NO: 1927267 - DNA, 15 bp, Homo sapiens
ataccatttgaccaa

SEQ ID NO: 1927268 - DNA, 15 bp, Homo sapiens
taccatttgaccaag

SEQ ID NO: 1927269 - DNA, 15 bp, Homo sapiens
accatttgaccaagc

SEQ ID NO: 1927270 - DNA, 15 bp, Homo sapiens
ccatttgaccaagca

SEQ ID NO: 1927271 - DNA, 15 bp, Homo sapiens
catttgaccaagcaa

SEQ ID NO: 1927272 - DNA, 15 bp, Homo sapiens
atttgaccaagcaat

SEQ ID NO: 1927273 - DNA, 15 bp, Homo sapiens
tttgaccaagcaatc

SEQ ID NO: 1927274 - DNA, 15 bp, Homo sapiens
ttgaccaagcaatct

SEQ ID NO: 1927275 - DNA, 15 bp, Homo sapiens
tgaccaagcaatctc

SEQ ID NO: 1927276 - DNA, 15 bp, Homo sapiens
gaccaagcaatctca

SEQ ID NO: 1927277 - DNA, 15 bp, Homo sapiens
accaagcaatctcat

SEQ ID NO: 1927278 - DNA, 15 bp, Homo sapiens
ccaagcaatctcatt

SEQ ID NO: 1927279 - DNA, 15 bp, Homo sapiens
caagcaatctcatta

SEQ ID NO: 1927280 - DNA, 15 bp, Homo sapiens
aagcaatctcattac

SEQ ID NO: 1927281 - DNA, 15 bp, Homo sapiens
agcaatctcattact

SEQ ID NO: 1927282 - DNA, 15 bp, Homo sapiens
gcaatctcattactg

SEQ ID NO: 1927283 - DNA, 15 bp, Homo sapiens
caatctcattactgg

SEQ ID NO: 1927284 - DNA, 15 bp, Homo sapiens
aatctcattactggt

SEQ ID NO: 1927285 - DNA, 15 bp, Homo sapiens
atctcattactggtt

SEQ ID NO: 1927286 - DNA, 15 bp, Homo sapiens
tctcattactggtta

SEQ ID NO: 1927287 - DNA, 15 bp, Homo sapiens
ctcattactggttat

SEQ ID NO: 1927288 - DNA, 15 bp, Homo sapiens
tcattactggttata

SEQ ID NO: 1927289 - DNA, 15 bp, Homo sapiens
cattactggttatat

SEQ ID NO: 1927290 - DNA, 15 bp, Homo sapiens
attactggttatata

SEQ ID NO: 1927291 - DNA, 15 bp, Homo sapiens
ttactggttatatac

SEQ ID NO: 1927292 - DNA, 15 bp, Homo sapiens
tactggttatatacc

SEQ ID NO: 1927293 - DNA, 15 bp, Homo sapiens
actggttatataccc

SEQ ID NO: 1927294 - DNA, 15 bp, Homo sapiens
ctggttatataccca

SEQ ID NO: 1927295 - DNA, 15 bp, Homo sapiens
tggttatatacccaa

SEQ ID NO: 1927296 - DNA, 15 bp, Homo sapiens
ggttatatacccaaa

SEQ ID NO: 1927297 - DNA, 15 bp, Homo sapiens
gttatatacccaaag

SEQ ID NO: 1927298 - DNA, 15 bp, Homo sapiens
ttatatacccaaagg

SEQ ID NO: 1927299 - DNA, 15 bp, Homo sapiens
aggattataaatcac

SEQ ID NO: 1927300 - DNA, 15 bp, Homo sapiens
ggattataaatcact

SEQ ID NO: 1927301 - DNA, 15 bp, Homo sapiens
gattataaatcactc

SEQ ID NO: 1927302 - DNA, 15 bp, Homo sapiens
attataaatcactcc

SEQ ID NO: 1927303 - DNA, 15 bp, Homo sapiens
ttataaatcactcca

SEQ ID NO: 1927304 - DNA, 15 bp, Homo sapiens
tataaatcactccac

SEQ ID NO: 1927305 - DNA, 15 bp, Homo sapiens
ataaatcactccact

SEQ ID NO: 1927306 - DNA, 15 bp, Homo sapiens
taaatcactccacta

SEQ ID NO: 1927307 - DNA, 15 bp, Homo sapiens
aaatcactccactat

SEQ ID NO: 1927308 - DNA, 15 bp, Homo sapiens
aatcactccactata

SEQ ID NO: 1927309 - DNA, 15 bp, Homo sapiens
atcactccactataa

SEQ ID NO: 1927310 - DNA, 15 bp, Homo sapiens
tcactccactataaa

SEQ ID NO: 1927311 - DNA, 15 bp, Homo sapiens
cactccactataaag

SEQ ID NO: 1927312 - DNA, 15 bp, Homo sapiens
actccactataaaga

SEQ ID NO: 1927313 - DNA, 15 bp, Homo sapiens
ctccactataaagac

SEQ ID NO: 1927314 - DNA, 15 bp, Homo sapiens
tccactataaagaca

SEQ ID NO: 1927315 - DNA, 15 bp, Homo sapiens
ccactataaagacac

SEQ ID NO: 1927316 - DNA, 15 bp, Homo sapiens
cactataaagacaca

SEQ ID NO: 1927317 - DNA, 15 bp, Homo sapiens
actataaagacacat

SEQ ID NO: 1927318 - DNA, 15 bp, Homo sapiens
ctataaagacacatg

SEQ ID NO: 1927319 - DNA, 15 bp, Homo sapiens
tataaagacacatgt

SEQ ID NO: 1927320 - DNA, 15 bp, Homo sapiens
ataaagacacatgtg

SEQ ID NO: 1927321 - DNA, 15 bp, Homo sapiens
taaagacacatgtgt

SEQ ID NO: 1927322 - DNA, 15 bp, Homo sapiens
aaagacacatgtgta

SEQ ID NO: 1927323 - DNA, 15 bp, Homo sapiens
aagacacatgtgtac

SEQ ID NO: 1927324 - DNA, 15 bp, Homo sapiens
agacacatgtgtaca

SEQ ID NO: 1927325 - DNA, 15 bp, Homo sapiens
gacacatgtgtacat

SEQ ID NO: 1927326 - DNA, 15 bp, Homo sapiens
acacatgtgtacata

SEQ ID NO: 1927327 - DNA, 15 bp, Homo sapiens
cacatgtgtacatat

SEQ ID NO: 1927328 - DNA, 15 bp, Homo sapiens
acatgtgtacatata

SEQ ID NO: 1927329 - DNA, 15 bp, Homo sapiens
catgtgtacatatat

SEQ ID NO: 1927330 - DNA, 15 bp, Homo sapiens
atgtgtacatatatt

SEQ ID NO: 1927331 - DNA, 15 bp, Homo sapiens
tgtgtacatatattt

SEQ ID NO: 1927332 - DNA, 15 bp, Homo sapiens
gtgtacatatattta

SEQ ID NO: 1927333 - DNA, 15 bp, Homo sapiens
tgtacatatatttat

SEQ ID NO: 1927334 - DNA, 15 bp, Homo sapiens
gtacatatatttatt

SEQ ID NO: 1927335 - DNA, 15 bp, Homo sapiens
tacatatatttattg

SEQ ID NO: 1927336 - DNA, 15 bp, Homo sapiens
acatatatttattgc

SEQ ID NO: 1927337 - DNA, 15 bp, Homo sapiens
catatatttattgca

SEQ ID NO: 1927338 - DNA, 15 bp, Homo sapiens
atatatttattgcag

SEQ ID NO: 1927339 - DNA, 15 bp, Homo sapiens
tatatttattgcagc

SEQ ID NO: 1927340 - DNA, 15 bp, Homo sapiens
atatttattgcagca

SEQ ID NO: 1927341 - DNA, 15 bp, Homo sapiens
tatttattgcagcac

SEQ ID NO: 1927342 - DNA, 15 bp, Homo sapiens
atttattgcagcact

SEQ ID NO: 1927343 - DNA, 15 bp, Homo sapiens
tttattgcagcacta

SEQ ID NO: 1927344 - DNA, 15 bp, Homo sapiens
ttattgcagcactat

SEQ ID NO: 1927345 - DNA, 15 bp, Homo sapiens
tattgcagcactatt

SEQ ID NO: 1927346 - DNA, 15 bp, Homo sapiens
attgcagcactattt

SEQ ID NO: 1927347 - DNA, 15 bp, Homo sapiens
ttgcagcactattta

SEQ ID NO: 1927348 - DNA, 15 bp, Homo sapiens
tgcagcactatttac

SEQ ID NO: 1927349 - DNA, 15 bp, Homo sapiens
gcagcactatttaca

SEQ ID NO: 1927350 - DNA, 15 bp, Homo sapiens
cagcactatttacaa

SEQ ID NO: 1927351 - DNA, 15 bp, Homo sapiens
agcactatttacaat

SEQ ID NO: 1927352 - DNA, 15 bp, Homo sapiens
gcactatttacaata

SEQ ID NO: 1927353 - DNA, 15 bp, Homo sapiens
cactatttacaatag

SEQ ID NO: 1927354 - DNA, 15 bp, Homo sapiens
actatttacaatagc

SEQ ID NO: 1927355 - DNA, 15 bp, Homo sapiens
ctatttacaatagca

SEQ ID NO: 1927356 - DNA, 15 bp, Homo sapiens
tttgtagatgttcca

SEQ ID NO: 1927357 - DNA, 15 bp, Homo sapiens
ttgtagatgttccaa

SEQ ID NO: 1927358 - DNA, 15 bp, Homo sapiens
tgtagatgttccaaa

SEQ ID NO: 1927359 - DNA, 15 bp, Homo sapiens
gtagatgttccaaat

SEQ ID NO: 1927360 - DNA, 15 bp, Homo sapiens
tagatgttccaaatg

SEQ ID NO: 1927361 - DNA, 15 bp, Homo sapiens
agatgttccaaatgt

SEQ ID NO: 1927362 - DNA, 15 bp, Homo sapiens
gatgttccaaatgtt

SEQ ID NO: 1927363 - DNA, 15 bp, Homo sapiens
atgttccaaatgttg

SEQ ID NO: 1927364 - DNA, 15 bp, Homo sapiens
tgttccaaatgttga

SEQ ID NO: 1927365 - DNA, 15 bp, Homo sapiens
gttccaaatgttgat

SEQ ID NO: 1927366 - DNA, 15 bp, Homo sapiens
ttccaaatgttgata

SEQ ID NO: 1927367 - DNA, 15 bp, Homo sapiens
tccaaatgttgatac

SEQ ID NO: 1927368 - DNA, 15 bp, Homo sapiens
ccaaatgttgatact

SEQ ID NO: 1927369 - DNA, 15 bp, Homo sapiens
caaatgttgatactt

SEQ ID NO: 1927370 - DNA, 15 bp, Homo sapiens
aaatgttgatacttt

SEQ ID NO: 1927371 - DNA, 15 bp, Homo sapiens
aatgttgatactttt

SEQ ID NO: 1927372 - DNA, 15 bp, Homo sapiens
atgttgatacttttc

SEQ ID NO: 1927373 - DNA, 15 bp, Homo sapiens
tgttgatacttttca

SEQ ID NO: 1927374 - DNA, 15 bp, Homo sapiens
gttgatacttttcat

SEQ ID NO: 1927375 - DNA, 15 bp, Homo sapiens
ttgatacttttcatt

SEQ ID NO: 1927376 - DNA, 15 bp, Homo sapiens
tgatacttttcatta

SEQ ID NO: 1927377 - DNA, 15 bp, Homo sapiens
gatacttttcattat

SEQ ID NO: 1927378 - DNA, 15 bp, Homo sapiens
atacttttcattata

SEQ ID NO: 1927379 - DNA, 15 bp, Homo sapiens
tacttttcattatac

SEQ ID NO: 1927380 - DNA, 15 bp, Homo sapiens
acttttcattatacc

SEQ ID NO: 1927381 - DNA, 15 bp, Homo sapiens
cttttcattatacca

SEQ ID NO: 1927382 - DNA, 15 bp, Homo sapiens
ttttcattataccat

SEQ ID NO: 1927383 - DNA, 15 bp, Homo sapiens
tttcattataccata

SEQ ID NO: 1927384 - DNA, 15 bp, Homo sapiens
ttcattataccatac

SEQ ID NO: 1927385 - DNA, 15 bp, Homo sapiens
tcattataccatact

SEQ ID NO: 1927386 - DNA, 15 bp, Homo sapiens
cattataccatacta

SEQ ID NO: 1927387 - DNA, 15 bp, Homo sapiens
attataccatactaa

SEQ ID NO: 1927388 - DNA, 15 bp, Homo sapiens
ttataccatactaaa

SEQ ID NO: 1927389 - DNA, 15 bp, Homo sapiens
tataccatactaaaa

SEQ ID NO: 1927390 - DNA, 15 bp, Homo sapiens
ataccatactaaaaa

SEQ ID NO: 1927391 - DNA, 15 bp, Homo sapiens
taccatactaaaaaa

SEQ ID NO: 1927392 - DNA, 15 bp, Homo sapiens
accatactaaaaaac

SEQ ID NO: 1927393 - DNA, 15 bp, Homo sapiens
ccatactaaaaaacc

SEQ ID NO: 1927394 - DNA, 15 bp, Homo sapiens
catactaaaaaacca

SEQ ID NO: 1927395 - DNA, 15 bp, Homo sapiens
atactaaaaaaccac

SEQ ID NO: 1927396 - DNA, 15 bp, Homo sapiens
tactaaaaaaccaca

SEQ ID NO: 1927397 - DNA, 15 bp, Homo sapiens
actaaaaaaccacaa

SEQ ID NO: 1927398 - DNA, 15 bp, Homo sapiens
ctaaaaaaccacaat

SEQ ID NO: 1927399 - DNA, 15 bp, Homo sapiens
taaaaaaccacaatt

SEQ ID NO: 1927400 - DNA, 15 bp, Homo sapiens
aaaaaaccacaattg

SEQ ID NO: 1927401 - DNA, 15 bp, Homo sapiens
aaaaaccacaattgt

SEQ ID NO: 1927402 - DNA, 15 bp, Homo sapiens
aaaaccacaattgtt

SEQ ID NO: 1927403 - DNA, 15 bp, Homo sapiens
aaaccacaattgtta

SEQ ID NO: 1927404 - DNA, 15 bp, Homo sapiens
aaccacaattgttaa

SEQ ID NO: 1927405 - DNA, 15 bp, Homo sapiens
accacaattgttaat

SEQ ID NO: 1927406 - DNA, 15 bp, Homo sapiens
ccacaattgttaata

SEQ ID NO: 1927407 - DNA, 15 bp, Homo sapiens
cacaattgttaatat

SEQ ID NO: 1927408 - DNA, 15 bp, Homo sapiens
acaattgttaatatt

SEQ ID NO: 1927409 - DNA, 15 bp, Homo sapiens
caattgttaatatta

SEQ ID NO: 1927410 - DNA, 15 bp, Homo sapiens
aattgttaatattac

SEQ ID NO: 1927411 - DNA, 15 bp, Homo sapiens
attgttaatattacc

SEQ ID NO: 1927412 - DNA, 15 bp, Homo sapiens
ttgttaatattacca

SEQ ID NO: 1927413 - DNA, 15 bp, Homo sapiens
tgttaatattaccaa

SEQ ID NO: 1927414 - DNA, 15 bp, Homo sapiens
gttaatattaccaag

SEQ ID NO: 1927415 - DNA, 15 bp, Homo sapiens
ttaatattaccaaga

SEQ ID NO: 1927416 - DNA, 15 bp, Homo sapiens
taatattaccaagaa

SEQ ID NO: 1927417 - DNA, 15 bp, Homo sapiens
aatattaccaagaat

SEQ ID NO: 1927418 - DNA, 15 bp, Homo sapiens
atattaccaagaatc

SEQ ID NO: 1927419 - DNA, 15 bp, Homo sapiens
tattaccaagaatct

SEQ ID NO: 1927420 - DNA, 15 bp, Homo sapiens
attaccaagaatctc

SEQ ID NO: 1927421 - DNA, 15 bp, Homo sapiens
ttaccaagaatctca

SEQ ID NO: 1927422 - DNA, 15 bp, Homo sapiens
taccaagaatctcat

SEQ ID NO: 1927423 - DNA, 15 bp, Homo sapiens
accaagaatctcatc

SEQ ID NO: 1927424 - DNA, 15 bp, Homo sapiens
ccaagaatctcatca

SEQ ID NO: 1927425 - DNA, 15 bp, Homo sapiens
caagaatctcatcag

SEQ ID NO: 1927426 - DNA, 15 bp, Homo sapiens
aagaatctcatcaga

SEQ ID NO: 1927427 - DNA, 15 bp, Homo sapiens
agaatctcatcagaa

SEQ ID NO: 1927428 - DNA, 15 bp, Homo sapiens
gaatctcatcagaaa

SEQ ID NO: 1927429 - DNA, 15 bp, Homo sapiens
aatctcatcagaaag

SEQ ID NO: 1927430 - DNA, 15 bp, Homo sapiens
atctcatcagaaaga

SEQ ID NO: 1927431 - DNA, 15 bp, Homo sapiens
tctcatcagaaagat

SEQ ID NO: 1927432 - DNA, 15 bp, Homo sapiens
ctcatcagaaagatg

SEQ ID NO: 1927433 - DNA, 15 bp, Homo sapiens
tcatcagaaagatgt

SEQ ID NO: 1927434 - DNA, 15 bp, Homo sapiens
catcagaaagatgtt

SEQ ID NO: 1927435 - DNA, 15 bp, Homo sapiens
atcagaaagatgtta

SEQ ID NO: 1927436 - DNA, 15 bp, Homo sapiens
tcagaaagatgttaa

SEQ ID NO: 1927437 - DNA, 15 bp, Homo sapiens
cagaaagatgttaag

SEQ ID NO: 1927438 - DNA, 15 bp, Homo sapiens
agaaagatgttaagt

SEQ ID NO: 1927439 - DNA, 15 bp, Homo sapiens
gaaagatgttaagtt

SEQ ID NO: 1927440 - DNA, 15 bp, Homo sapiens
aaagatgttaagttt

SEQ ID NO: 1927441 - DNA, 15 bp, Homo sapiens
aagatgttaagttta

SEQ ID NO: 1927442 - DNA, 15 bp, Homo sapiens
agatgttaagtttag

SEQ ID NO: 1927443 - DNA, 15 bp, Homo sapiens
gatgttaagtttagg

SEQ ID NO: 1927444 - DNA, 15 bp, Homo sapiens
atgttaagtttaggg

SEQ ID NO: 1927445 - DNA, 15 bp, Homo sapiens
tgttaagtttaggga

SEQ ID NO: 1927446 - DNA, 15 bp, Homo sapiens
gttaagtttagggac

SEQ ID NO: 1927447 - DNA, 15 bp, Homo sapiens
ttaagtttagggact

SEQ ID NO: 1927448 - DNA, 15 bp, Homo sapiens
taagtttagggactc

SEQ ID NO: 1927449 - DNA, 15 bp, Homo sapiens
aagtttagggactct

SEQ ID NO: 1927450 - DNA, 15 bp, Homo sapiens
agtttagggactcta

SEQ ID NO: 1927451 - DNA, 15 bp, Homo sapiens
gtttagggactctat

SEQ ID NO: 1927452 - DNA, 15 bp, Homo sapiens
tttagggactctatt

SEQ ID NO: 1927453 - DNA, 15 bp, Homo sapiens
ttagggactctatta

SEQ ID NO: 1927454 - DNA, 15 bp, Homo sapiens
tagggactctattag

SEQ ID NO: 1927455 - DNA, 15 bp, Homo sapiens
agggactctattagg

SEQ ID NO: 1927456 - DNA, 15 bp, Homo sapiens
gggactctattaggt

SEQ ID NO: 1927457 - DNA, 15 bp, Homo sapiens
ggactctattaggtt

SEQ ID NO: 1927458 - DNA, 15 bp, Homo sapiens
gactctattaggttc

SEQ ID NO: 1927459 - DNA, 15 bp, Homo sapiens
actctattaggttca

SEQ ID NO: 1927460 - DNA, 15 bp, Homo sapiens
ctctattaggttcag

SEQ ID NO: 1927461 - DNA, 15 bp, Homo sapiens
tctattaggttcagc

SEQ ID NO: 1927462 - DNA, 15 bp, Homo sapiens
ctattaggttcagcg

SEQ ID NO: 1927463 - DNA, 15 bp, Homo sapiens
tattaggttcagcgg

SEQ ID NO: 1927464 - DNA, 15 bp, Homo sapiens
attaggttcagcggc

SEQ ID NO: 1927465 - DNA, 15 bp, Homo sapiens
ttaggttcagcggca

SEQ ID NO: 1927466 - DNA, 15 bp, Homo sapiens
taggttcagcggcag

SEQ ID NO: 1927467 - DNA, 15 bp, Homo sapiens
aggttcagcggcaga

SEQ ID NO: 1927468 - DNA, 15 bp, Homo sapiens
ggttcagcggcagat

SEQ ID NO: 1927469 - DNA, 15 bp, Homo sapiens
gttcagcggcagata

SEQ ID NO: 1927470 - DNA, 15 bp, Homo sapiens
ttcagcggcagataa

SEQ ID NO: 1927471 - DNA, 15 bp, Homo sapiens
tcagcggcagataat

SEQ ID NO: 1927472 - DNA, 15 bp, Homo sapiens
cagcggcagataatg

SEQ ID NO: 1927473 - DNA, 15 bp, Homo sapiens
agcggcagataatga

SEQ ID NO: 1927474 - DNA, 15 bp, Homo sapiens
gcggcagataatgaa

SEQ ID NO: 1927475 - DNA, 15 bp, Homo sapiens
cggcagataatgaaa

SEQ ID NO: 1927476 - DNA, 15 bp, Homo sapiens
ggcagataatgaaaa

SEQ ID NO: 1927477 - DNA, 15 bp, Homo sapiens
gcagataatgaaaat

SEQ ID NO: 1927478 - DNA, 15 bp, Homo sapiens
cagataatgaaaatt

SEQ ID NO: 1927479 - DNA, 15 bp, Homo sapiens
agataatgaaaatta

SEQ ID NO: 1927480 - DNA, 15 bp, Homo sapiens
gataatgaaaattag

SEQ ID NO: 1927481 - DNA, 15 bp, Homo sapiens
ataatgaaaattaga

SEQ ID NO: 1927482 - DNA, 15 bp, Homo sapiens
taatgaaaattagaa

SEQ ID NO: 1927483 - DNA, 15 bp, Homo sapiens
aatgaaaattagaat

SEQ ID NO: 1927484 - DNA, 15 bp, Homo sapiens
atgaaaattagaatt

SEQ ID NO: 1927485 - DNA, 15 bp, Homo sapiens
tgaaaattagaattt

SEQ ID NO: 1927486 - DNA, 15 bp, Homo sapiens
gaaaattagaatttt

SEQ ID NO: 1927487 - DNA, 15 bp, Homo sapiens
aaaattagaattttc

SEQ ID NO: 1927488 - DNA, 15 bp, Homo sapiens
aaattagaattttca

SEQ ID NO: 1927489 - DNA, 15 bp, Homo sapiens
aattagaattttcaa

SEQ ID NO: 1927490 - DNA, 15 bp, Homo sapiens
attagaattttcaaa

SEQ ID NO: 1927491 - DNA, 15 bp, Homo sapiens
ttagaattttcaaaa

SEQ ID NO: 1927492 - DNA, 15 bp, Homo sapiens
tagaattttcaaaat

SEQ ID NO: 1927493 - DNA, 15 bp, Homo sapiens
agaattttcaaaatt

SEQ ID NO: 1927494 - DNA, 15 bp, Homo sapiens
gaattttcaaaattc

SEQ ID NO: 1927495 - DNA, 15 bp, Homo sapiens
aattttcaaaattct

SEQ ID NO: 1927496 - DNA, 15 bp, Homo sapiens
attttcaaaattcta

SEQ ID NO: 1927497 - DNA, 15 bp, Homo sapiens
ttttcaaaattctaa

SEQ ID NO: 1927498 - DNA, 15 bp, Homo sapiens
tttcaaaattctaat

SEQ ID NO: 1927499 - DNA, 15 bp, Homo sapiens
ttcaaaattctaatt

SEQ ID NO: 1927500 - DNA, 15 bp, Homo sapiens
tcaaaattctaattt

SEQ ID NO: 1927501 - DNA, 15 bp, Homo sapiens
caaaattctaatttt

SEQ ID NO: 1927502 - DNA, 15 bp, Homo sapiens
aaaattctaattttg

SEQ ID NO: 1927503 - DNA, 15 bp, Homo sapiens
aaattctaattttga

SEQ ID NO: 1927504 - DNA, 15 bp, Homo sapiens
aattctaattttgaa

SEQ ID NO: 1927505 - DNA, 15 bp, Homo sapiens
attctaattttgaat

SEQ ID NO: 1927506 - DNA, 15 bp, Homo sapiens
ttctaattttgaatt

SEQ ID NO: 1927507 - DNA, 15 bp, Homo sapiens
tctaattttgaattt

SEQ ID NO: 1927508 - DNA, 15 bp, Homo sapiens
ctaattttgaatttc

SEQ ID NO: 1927509 - DNA, 15 bp, Homo sapiens
taattttgaatttct

SEQ ID NO: 1927510 - DNA, 15 bp, Homo sapiens
aattttgaatttcta

SEQ ID NO: 1927511 - DNA, 15 bp, Homo sapiens
attttgaatttctaa

SEQ ID NO: 1927512 - DNA, 15 bp, Homo sapiens
ttttgaatttctaat

SEQ ID NO: 1927513 - DNA, 15 bp, Homo sapiens
tttgaatttctaatg

SEQ ID NO: 1927514 - DNA, 15 bp, Homo sapiens
ttgaatttctaatga

SEQ ID NO: 1927515 - DNA, 15 bp, Homo sapiens
tgaatttctaatgaa

SEQ ID NO: 1927516 - DNA, 15 bp, Homo sapiens
gaatttctaatgaaa

SEQ ID NO: 1927517 - DNA, 15 bp, Homo sapiens
aatttctaatgaaat

SEQ ID NO: 1927518 - DNA, 15 bp, Homo sapiens
atttctaatgaaatt

SEQ ID NO: 1927519 - DNA, 15 bp, Homo sapiens
tttctaatgaaattt

SEQ ID NO: 1927520 - DNA, 15 bp, Homo sapiens
ttctaatgaaatttt

SEQ ID NO: 1927521 - DNA, 15 bp, Homo sapiens
tctaatgaaattttt

SEQ ID NO: 1927522 - DNA, 15 bp, Homo sapiens
ctaatgaaatttttg

SEQ ID NO: 1927523 - DNA, 15 bp, Homo sapiens
taatgaaatttttgt

SEQ ID NO: 1927524 - DNA, 15 bp, Homo sapiens
aatgaaatttttgtt

SEQ ID NO: 1927525 - DNA, 15 bp, Homo sapiens
atgaaatttttgttg

SEQ ID NO: 1927526 - DNA, 15 bp, Homo sapiens
tgaaatttttgttgc

SEQ ID NO: 1927527 - DNA, 15 bp, Homo sapiens
gaaatttttgttgca

SEQ ID NO: 1927528 - DNA, 15 bp, Homo sapiens
aaatttttgttgcaa

SEQ ID NO: 1927529 - DNA, 15 bp, Homo sapiens
aatttttgttgcaag

SEQ ID NO: 1927530 - DNA, 15 bp, Homo sapiens
atttttgttgcaagt

SEQ ID NO: 1927531 - DNA, 15 bp, Homo sapiens
tttttgttgcaagtt

SEQ ID NO: 1927532 - DNA, 15 bp, Homo sapiens
ttttgttgcaagttt

SEQ ID NO: 1927533 - DNA, 15 bp, Homo sapiens
tttgttgcaagtttg

SEQ ID NO: 1927534 - DNA, 15 bp, Homo sapiens
ttgttgcaagtttga

SEQ ID NO: 1927535 - DNA, 15 bp, Homo sapiens
tgttgcaagtttgaa

SEQ ID NO: 1927536 - DNA, 15 bp, Homo sapiens
gttgcaagtttgaat

SEQ ID NO: 1927537 - DNA, 15 bp, Homo sapiens
ttgcaagtttgaatt

SEQ ID NO: 1927538 - DNA, 15 bp, Homo sapiens
tgcaagtttgaattt

SEQ ID NO: 1927539 - DNA, 15 bp, Homo sapiens
gcaagtttgaatttt

SEQ ID NO: 1927540 - DNA, 15 bp, Homo sapiens
caagtttgaatttta

SEQ ID NO: 1927541 - DNA, 15 bp, Homo sapiens
aagtttgaattttat

SEQ ID NO: 1927542 - DNA, 15 bp, Homo sapiens
agtttgaattttatc

SEQ ID NO: 1927543 - DNA, 15 bp, Homo sapiens
gtttgaattttatca

SEQ ID NO: 1927544 - DNA, 15 bp, Homo sapiens
tttgaattttatcat

SEQ ID NO: 1927545 - DNA, 15 bp, Homo sapiens
ttgaattttatcatt

SEQ ID NO: 1927546 - DNA, 15 bp, Homo sapiens
tgaattttatcattg

SEQ ID NO: 1927547 - DNA, 15 bp, Homo sapiens
gaattttatcattgg

SEQ ID NO: 1927548 - DNA, 15 bp, Homo sapiens
aattttatcattggc

SEQ ID NO: 1927549 - DNA, 15 bp, Homo sapiens
attttatcattggca

SEQ ID NO: 1927550 - DNA, 15 bp, Homo sapiens
ttttatcattggcaa

SEQ ID NO: 1927551 - DNA, 15 bp, Homo sapiens
tttatcattggcaac

SEQ ID NO: 1927552 - DNA, 15 bp, Homo sapiens
ttatcattggcaaca

SEQ ID NO: 1927553 - DNA, 15 bp, Homo sapiens
tatcattggcaacaa

SEQ ID NO: 1927554 - DNA, 15 bp, Homo sapiens
atcattggcaacaaa

SEQ ID NO: 1927555 - DNA, 15 bp, Homo sapiens
tcattggcaacaaat

SEQ ID NO: 1927556 - DNA, 15 bp, Homo sapiens
cattggcaacaaata

SEQ ID NO: 1927557 - DNA, 15 bp, Homo sapiens
attggcaacaaatac

SEQ ID NO: 1927558 - DNA, 15 bp, Homo sapiens
ttggcaacaaatact

SEQ ID NO: 1927559 - DNA, 15 bp, Homo sapiens
tggcaacaaatactg

SEQ ID NO: 1927560 - DNA, 15 bp, Homo sapiens
ggcaacaaatactgt

SEQ ID NO: 1927561 - DNA, 15 bp, Homo sapiens
gcaacaaatactgtc

SEQ ID NO: 1927562 - DNA, 15 bp, Homo sapiens
caacaaatactgtca

SEQ ID NO: 1927563 - DNA, 15 bp, Homo sapiens
aacaaatactgtcac

SEQ ID NO: 1927564 - DNA, 15 bp, Homo sapiens
acaaatactgtcaca

SEQ ID NO: 1927565 - DNA, 15 bp, Homo sapiens
caaatactgtcacag

SEQ ID NO: 1927566 - DNA, 15 bp, Homo sapiens
aaatactgtcacagt

SEQ ID NO: 1927567 - DNA, 15 bp, Homo sapiens
aatactgtcacagtt

SEQ ID NO: 1927568 - DNA, 15 bp, Homo sapiens
atactgtcacagttg

SEQ ID NO: 1927569 - DNA, 15 bp, Homo sapiens
tactgtcacagttgt

SEQ ID NO: 1927570 - DNA, 15 bp, Homo sapiens
actgtcacagttgtt

SEQ ID NO: 1927571 - DNA, 15 bp, Homo sapiens
ctgtcacagttgttt

SEQ ID NO: 1927572 - DNA, 15 bp, Homo sapiens
tgtcacagttgtttt

SEQ ID NO: 1927573 - DNA, 15 bp, Homo sapiens
gtcacagttgttttc

SEQ ID NO: 1927574 - DNA, 15 bp, Homo sapiens
tcacagttgttttct

SEQ ID NO: 1927575 - DNA, 15 bp, Homo sapiens
cacagttgttttctt

SEQ ID NO: 1927576 - DNA, 15 bp, Homo sapiens
acagttgttttcttc

SEQ ID NO: 1927577 - DNA, 15 bp, Homo sapiens
cagttgttttcttca

SEQ ID NO: 1927578 - DNA, 15 bp, Homo sapiens
agttgttttcttcaa

SEQ ID NO: 1927579 - DNA, 15 bp, Homo sapiens
gttgttttcttcaaa

SEQ ID NO: 1927580 - DNA, 15 bp, Homo sapiens
ttgttttcttcaaag

SEQ ID NO: 1927581 - DNA, 15 bp, Homo sapiens
tgttttcttcaaaga

SEQ ID NO: 1927582 - DNA, 15 bp, Homo sapiens
gttttcttcaaagag

SEQ ID NO: 1927583 - DNA, 15 bp, Homo sapiens
ttttcttcaaagaga

SEQ ID NO: 1927584 - DNA, 15 bp, Homo sapiens
tttcttcaaagagac

SEQ ID NO: 1927585 - DNA, 15 bp, Homo sapiens
ttcttcaaagagaca

SEQ ID NO: 1927586 - DNA, 15 bp, Homo sapiens
tcttcaaagagacag

SEQ ID NO: 1927587 - DNA, 15 bp, Homo sapiens
cttcaaagagacagg

SEQ ID NO: 1927588 - DNA, 15 bp, Homo sapiens
ttcaaagagacaggc

SEQ ID NO: 1927589 - DNA, 15 bp, Homo sapiens
tcaaagagacaggca

SEQ ID NO: 1927590 - DNA, 15 bp, Homo sapiens
caaagagacaggcac

SEQ ID NO: 1927591 - DNA, 15 bp, Homo sapiens
aaagagacaggcaca

SEQ ID NO: 1927592 - DNA, 15 bp, Homo sapiens
aagagacaggcacat

SEQ ID NO: 1927593 - DNA, 15 bp, Homo sapiens
agagacaggcacata

SEQ ID NO: 1927594 - DNA, 15 bp, Homo sapiens
gagacaggcacatat

SEQ ID NO: 1927595 - DNA, 15 bp, Homo sapiens
agacaggcacatatt

SEQ ID NO: 1927596 - DNA, 15 bp, Homo sapiens
gacaggcacatattg

SEQ ID NO: 1927597 - DNA, 15 bp, Homo sapiens
acaggcacatattgt

SEQ ID NO: 1927598 - DNA, 15 bp, Homo sapiens
caggcacatattgtt

SEQ ID NO: 1927599 - DNA, 15 bp, Homo sapiens
aggcacatattgttc

SEQ ID NO: 1927600 - DNA, 15 bp, Homo sapiens
ggcacatattgttca

SEQ ID NO: 1927601 - DNA, 15 bp, Homo sapiens
gcacatattgttcat

SEQ ID NO: 1927602 - DNA, 15 bp, Homo sapiens
cacatattgttcatt

SEQ ID NO: 1927603 - DNA, 15 bp, Homo sapiens
acatattgttcattt

SEQ ID NO: 1927604 - DNA, 15 bp, Homo sapiens
catattgttcatttt

SEQ ID NO: 1927605 - DNA, 15 bp, Homo sapiens
atattgttcattttc

SEQ ID NO: 1927606 - DNA, 15 bp, Homo sapiens
tattgttcattttca

SEQ ID NO: 1927607 - DNA, 15 bp, Homo sapiens
attgttcattttcaa

SEQ ID NO: 1927608 - DNA, 15 bp, Homo sapiens
ttgttcattttcaag

SEQ ID NO: 1927609 - DNA, 15 bp, Homo sapiens
tgttcattttcaaga

SEQ ID NO: 1927610 - DNA, 15 bp, Homo sapiens
gttcattttcaagaa

SEQ ID NO: 1927611 - DNA, 15 bp, Homo sapiens
ttcattttcaagaaa

SEQ ID NO: 1927612 - DNA, 15 bp, Homo sapiens
tcattttcaagaaaa

SEQ ID NO: 1927613 - DNA, 15 bp, Homo sapiens
cattttcaagaaaat

SEQ ID NO: 1927614 - DNA, 15 bp, Homo sapiens
attttcaagaaaatg

SEQ ID NO: 1927615 - DNA, 15 bp, Homo sapiens
ttttcaagaaaatgt

SEQ ID NO: 1927616 - DNA, 15 bp, Homo sapiens
tttcaagaaaatgtc

SEQ ID NO: 1927617 - DNA, 15 bp, Homo sapiens
ttcaagaaaatgtct

SEQ ID NO: 1927618 - DNA, 15 bp, Homo sapiens
tcaagaaaatgtctg

SEQ ID NO: 1927619 - DNA, 15 bp, Homo sapiens
caagaaaatgtctgc

SEQ ID NO: 1927620 - DNA, 15 bp, Homo sapiens
aagaaaatgtctgcc

SEQ ID NO: 1927621 - DNA, 15 bp, Homo sapiens
agaaaatgtctgcca

SEQ ID NO: 1927622 - DNA, 15 bp, Homo sapiens
gaaaatgtctgccaa

SEQ ID NO: 1927623 - DNA, 15 bp, Homo sapiens
aaaatgtctgccaaa

SEQ ID NO: 1927624 - DNA, 15 bp, Homo sapiens
aaatgtctgccaaat

SEQ ID NO: 1927625 - DNA, 15 bp, Homo sapiens
aatgtctgccaaata

SEQ ID NO: 1927626 - DNA, 15 bp, Homo sapiens
atgtctgccaaatat

SEQ ID NO: 1927627 - DNA, 15 bp, Homo sapiens
tgtctgccaaatatc

SEQ ID NO: 1927628 - DNA, 15 bp, Homo sapiens
gtctgccaaatatcc

SEQ ID NO: 1927629 - DNA, 15 bp, Homo sapiens
tctgccaaatatcca

SEQ ID NO: 1927630 - DNA, 15 bp, Homo sapiens
ctgccaaatatccat

SEQ ID NO: 1927631 - DNA, 15 bp, Homo sapiens
tgccaaatatccatg

SEQ ID NO: 1927632 - DNA, 15 bp, Homo sapiens
gccaaatatccatgt

SEQ ID NO: 1927633 - DNA, 15 bp, Homo sapiens
ccaaatatccatgtc

SEQ ID NO: 1927634 - DNA, 15 bp, Homo sapiens
caaatatccatgtct

SEQ ID NO: 1927635 - DNA, 15 bp, Homo sapiens
aaatatccatgtctg

SEQ ID NO: 1927636 - DNA, 15 bp, Homo sapiens
aatatccatgtctga

SEQ ID NO: 1927637 - DNA, 15 bp, Homo sapiens
atatccatgtctgaa

SEQ ID NO: 1927638 - DNA, 15 bp, Homo sapiens
tatccatgtctgaat

SEQ ID NO: 1927639 - DNA, 15 bp, Homo sapiens
atccatgtctgaata

SEQ ID NO: 1927640 - DNA, 15 bp, Homo sapiens
tccatgtctgaataa

SEQ ID NO: 1927641 - DNA, 15 bp, Homo sapiens
ccatgtctgaataac

SEQ ID NO: 1927642 - DNA, 15 bp, Homo sapiens
catgtctgaataacc

SEQ ID NO: 1927643 - DNA, 15 bp, Homo sapiens
atgtctgaataacca

SEQ ID NO: 1927644 - DNA, 15 bp, Homo sapiens
tgtctgaataaccat

SEQ ID NO: 1927645 - DNA, 15 bp, Homo sapiens
gtctgaataaccata

SEQ ID NO: 1927646 - DNA, 15 bp, Homo sapiens
tctgaataaccatag

SEQ ID NO: 1927647 - DNA, 15 bp, Homo sapiens
ctgaataaccatagc

SEQ ID NO: 1927648 - DNA, 15 bp, Homo sapiens
tgaataaccatagct

SEQ ID NO: 1927649 - DNA, 15 bp, Homo sapiens
gaataaccatagctt

SEQ ID NO: 1927650 - DNA, 15 bp, Homo sapiens
aataaccatagcttg

SEQ ID NO: 1927651 - DNA, 15 bp, Homo sapiens
ataaccatagcttgc

SEQ ID NO: 1927652 - DNA, 15 bp, Homo sapiens
taaccatagcttgcc

SEQ ID NO: 1927653 - DNA, 15 bp, Homo sapiens
aaccatagcttgcct

SEQ ID NO: 1927654 - DNA, 15 bp, Homo sapiens
accatagcttgccta

SEQ ID NO: 1927655 - DNA, 15 bp, Homo sapiens
ccatagcttgcctac

SEQ ID NO: 1927656 - DNA, 15 bp, Homo sapiens
catagcttgcctact

SEQ ID NO: 1927657 - DNA, 15 bp, Homo sapiens
atagcttgcctacta

SEQ ID NO: 1927658 - DNA, 15 bp, Homo sapiens
tagcttgcctactag

SEQ ID NO: 1927659 - DNA, 15 bp, Homo sapiens
agcttgcctactagt

SEQ ID NO: 1927660 - DNA, 15 bp, Homo sapiens
gcttgcctactagtt

SEQ ID NO: 1927661 - DNA, 15 bp, Homo sapiens
cttgcctactagtta

SEQ ID NO: 1927662 - DNA, 15 bp, Homo sapiens
ttgcctactagttat

SEQ ID NO: 1927663 - DNA, 15 bp, Homo sapiens
tgcctactagttatt

SEQ ID NO: 1927664 - DNA, 15 bp, Homo sapiens
gcctactagttattt

SEQ ID NO: 1927665 - DNA, 15 bp, Homo sapiens
cctactagttattta

SEQ ID NO: 1927666 - DNA, 15 bp, Homo sapiens
ctactagttatttaa

SEQ ID NO: 1927667 - DNA, 15 bp, Homo sapiens
tactagttatttaag

SEQ ID NO: 1927668 - DNA, 15 bp, Homo sapiens
actagttatttaagt

SEQ ID NO: 1927669 - DNA, 15 bp, Homo sapiens
ctagttatttaagta

SEQ ID NO: 1927670 - DNA, 15 bp, Homo sapiens
tagttatttaagtaa

SEQ ID NO: 1927671 - DNA, 15 bp, Homo sapiens
agttatttaagtaaa

SEQ ID NO: 1927672 - DNA, 15 bp, Homo sapiens
gttatttaagtaaaa

SEQ ID NO: 1927673 - DNA, 15 bp, Homo sapiens
ttatttaagtaaaaa

SEQ ID NO: 1927674 - DNA, 15 bp, Homo sapiens
tatttaagtaaaaat

SEQ ID NO: 1927675 - DNA, 15 bp, Homo sapiens
atttaagtaaaaatc

SEQ ID NO: 1927676 - DNA, 15 bp, Homo sapiens
tttaagtaaaaatcg

SEQ ID NO: 1927677 - DNA, 15 bp, Homo sapiens
ttaagtaaaaatcgt

SEQ ID NO: 1927678 - DNA, 15 bp, Homo sapiens
taagtaaaaatcgtg

SEQ ID NO: 1927679 - DNA, 15 bp, Homo sapiens
aagtaaaaatcgtgt

SEQ ID NO: 1927680 - DNA, 15 bp, Homo sapiens
agtaaaaatcgtgtt

SEQ ID NO: 1927681 - DNA, 15 bp, Homo sapiens
gtaaaaatcgtgttc

SEQ ID NO: 1927682 - DNA, 15 bp, Homo sapiens
taaaaatcgtgttcc

SEQ ID NO: 1927683 - DNA, 15 bp, Homo sapiens
aaaaatcgtgttcca

SEQ ID NO: 1927684 - DNA, 15 bp, Homo sapiens
aaaatcgtgttccat

SEQ ID NO: 1927685 - DNA, 15 bp, Homo sapiens
aaatcgtgttccata

SEQ ID NO: 1927686 - DNA, 15 bp, Homo sapiens
aatcgtgttccataa

SEQ ID NO: 1927687 - DNA, 15 bp, Homo sapiens
atcgtgttccataaa

SEQ ID NO: 1927688 - DNA, 15 bp, Homo sapiens
tcgtgttccataaaa

SEQ ID NO: 1927689 - DNA, 15 bp, Homo sapiens
cgtgttccataaaaa

SEQ ID NO: 1927690 - DNA, 15 bp, Homo sapiens
gtgttccataaaaac

SEQ ID NO: 1927691 - DNA, 15 bp, Homo sapiens
tgttccataaaaaca

SEQ ID NO: 1927692 - DNA, 15 bp, Homo sapiens
gttccataaaaacag

SEQ ID NO: 1927693 - DNA, 15 bp, Homo sapiens
ttccataaaaacagc

SEQ ID NO: 1927694 - DNA, 15 bp, Homo sapiens
tccataaaaacagca

SEQ ID NO: 1927695 - DNA, 15 bp, Homo sapiens
ccataaaaacagcag

SEQ ID NO: 1927696 - DNA, 15 bp, Homo sapiens
cataaaaacagcagc

SEQ ID NO: 1927697 - DNA, 15 bp, Homo sapiens
ataaaaacagcagct

SEQ ID NO: 1927698 - DNA, 15 bp, Homo sapiens
taaaaacagcagcta

SEQ ID NO: 1927699 - DNA, 15 bp, Homo sapiens
aaaaacagcagctag

SEQ ID NO: 1927700 - DNA, 15 bp, Homo sapiens
aaaacagcagctagt

SEQ ID NO: 1927701 - DNA, 15 bp, Homo sapiens
aaacagcagctagtt

SEQ ID NO: 1927702 - DNA, 15 bp, Homo sapiens
aacagcagctagttc

SEQ ID NO: 1927703 - DNA, 15 bp, Homo sapiens
acagcagctagttca

SEQ ID NO: 1927704 - DNA, 15 bp, Homo sapiens
cagcagctagttcag

SEQ ID NO: 1927705 - DNA, 15 bp, Homo sapiens
agcagctagttcagc

SEQ ID NO: 1927706 - DNA, 15 bp, Homo sapiens
gcagctagttcagct

SEQ ID NO: 1927707 - DNA, 15 bp, Homo sapiens
cagctagttcagctc

SEQ ID NO: 1927708 - DNA, 15 bp, Homo sapiens
agctagttcagctca

SEQ ID NO: 1927709 - DNA, 15 bp, Homo sapiens
gctagttcagctcac

SEQ ID NO: 1927710 - DNA, 15 bp, Homo sapiens
ctagttcagctcaca

SEQ ID NO: 1927711 - DNA, 15 bp, Homo sapiens
tagttcagctcacaa

SEQ ID NO: 1927712 - DNA, 15 bp, Homo sapiens
agttcagctcacaac

SEQ ID NO: 1927713 - DNA, 15 bp, Homo sapiens
gttcagctcacaact

SEQ ID NO: 1927714 - DNA, 15 bp, Homo sapiens
ttcagctcacaactc

SEQ ID NO: 1927715 - DNA, 15 bp, Homo sapiens
tcagctcacaactca

SEQ ID NO: 1927716 - DNA, 15 bp, Homo sapiens
cagctcacaactcaa

SEQ ID NO: 1927717 - DNA, 15 bp, Homo sapiens
agctcacaactcaaa

SEQ ID NO: 1927718 - DNA, 15 bp, Homo sapiens
gctcacaactcaaat

SEQ ID NO: 1927719 - DNA, 15 bp, Homo sapiens
ctcacaactcaaata

SEQ ID NO: 1927720 - DNA, 15 bp, Homo sapiens
tcacaactcaaataa

SEQ ID NO: 1927721 - DNA, 15 bp, Homo sapiens
cacaactcaaataat

SEQ ID NO: 1927722 - DNA, 15 bp, Homo sapiens
acaactcaaataatc

SEQ ID NO: 1927723 - DNA, 15 bp, Homo sapiens
caactcaaataatcc

SEQ ID NO: 1927724 - DNA, 15 bp, Homo sapiens
aactcaaataatccc

SEQ ID NO: 1927725 - DNA, 15 bp, Homo sapiens
actcaaataatccca

SEQ ID NO: 1927726 - DNA, 15 bp, Homo sapiens
ctcaaataatcccac

SEQ ID NO: 1927727 - DNA, 15 bp, Homo sapiens
tcaaataatcccaca

SEQ ID NO: 1927728 - DNA, 15 bp, Homo sapiens
caaataatcccacaa

SEQ ID NO: 1927729 - DNA, 15 bp, Homo sapiens
aaataatcccacaaa

SEQ ID NO: 1927730 - DNA, 15 bp, Homo sapiens
aataatcccacaaat

SEQ ID NO: 1927731 - DNA, 15 bp, Homo sapiens
ataatcccacaaatg

SEQ ID NO: 1927732 - DNA, 15 bp, Homo sapiens
taatcccacaaatgt

SEQ ID NO: 1927733 - DNA, 15 bp, Homo sapiens
aatcccacaaatgtt

SEQ ID NO: 1927734 - DNA, 15 bp, Homo sapiens
atcccacaaatgttt

SEQ ID NO: 1927735 - DNA, 15 bp, Homo sapiens
tcccacaaatgtttc

SEQ ID NO: 1927736 - DNA, 15 bp, Homo sapiens
cccacaaatgtttcc

SEQ ID NO: 1927737 - DNA, 15 bp, Homo sapiens
ccacaaatgtttccc

SEQ ID NO: 1927738 - DNA, 15 bp, Homo sapiens
cacaaatgtttccct

SEQ ID NO: 1927739 - DNA, 15 bp, Homo sapiens
acaaatgtttccctt

SEQ ID NO: 1927740 - DNA, 15 bp, Homo sapiens
caaatgtttcccttt

SEQ ID NO: 1927741 - DNA, 15 bp, Homo sapiens
aaatgtttccctttg

SEQ ID NO: 1927742 - DNA, 15 bp, Homo sapiens
aatgtttccctttga

SEQ ID NO: 1927743 - DNA, 15 bp, Homo sapiens
atgtttccctttgat

SEQ ID NO: 1927744 - DNA, 15 bp, Homo sapiens
tgtttccctttgata

SEQ ID NO: 1927745 - DNA, 15 bp, Homo sapiens
gtttccctttgatac

SEQ ID NO: 1927746 - DNA, 15 bp, Homo sapiens
tttccctttgataca

SEQ ID NO: 1927747 - DNA, 15 bp, Homo sapiens
ttccctttgatacaa

SEQ ID NO: 1927748 - DNA, 15 bp, Homo sapiens
tccctttgatacaac

SEQ ID NO: 1927749 - DNA, 15 bp, Homo sapiens
ccctttgatacaacc

SEQ ID NO: 1927750 - DNA, 15 bp, Homo sapiens
cctttgatacaacca

SEQ ID NO: 1927751 - DNA, 15 bp, Homo sapiens
ctttgatacaaccat

SEQ ID NO: 1927752 - DNA, 15 bp, Homo sapiens
tttgatacaaccata

SEQ ID NO: 1927753 - DNA, 15 bp, Homo sapiens
ttgatacaaccataa

SEQ ID NO: 1927754 - DNA, 15 bp, Homo sapiens
tgatacaaccataat

SEQ ID NO: 1927755 - DNA, 15 bp, Homo sapiens
gatacaaccataata

SEQ ID NO: 1927756 - DNA, 15 bp, Homo sapiens
atacaaccataatac

SEQ ID NO: 1927757 - DNA, 15 bp, Homo sapiens
tacaaccataatact

SEQ ID NO: 1927758 - DNA, 15 bp, Homo sapiens
acaaccataatactt

SEQ ID NO: 1927759 - DNA, 15 bp, Homo sapiens
caaccataatacttg

SEQ ID NO: 1927760 - DNA, 15 bp, Homo sapiens
aaccataatacttgg

SEQ ID NO: 1927761 - DNA, 15 bp, Homo sapiens
accataatacttggg

SEQ ID NO: 1927762 - DNA, 15 bp, Homo sapiens
ccataatacttggga

SEQ ID NO: 1927763 - DNA, 15 bp, Homo sapiens
cataatacttgggat

SEQ ID NO: 1927764 - DNA, 15 bp, Homo sapiens
ataatacttgggatg

SEQ ID NO: 1927765 - DNA, 15 bp, Homo sapiens
taatacttgggatgt

SEQ ID NO: 1927766 - DNA, 15 bp, Homo sapiens
aatacttgggatgtg

SEQ ID NO: 1927767 - DNA, 15 bp, Homo sapiens
atacttgggatgtgg

SEQ ID NO: 1927768 - DNA, 15 bp, Homo sapiens
tacttgggatgtggc

SEQ ID NO: 1927769 - DNA, 15 bp, Homo sapiens
acttgggatgtggca

SEQ ID NO: 1927770 - DNA, 15 bp, Homo sapiens
cttgggatgtggcac

SEQ ID NO: 1927771 - DNA, 15 bp, Homo sapiens
ttgggatgtggcaca

SEQ ID NO: 1927772 - DNA, 15 bp, Homo sapiens
tgggatgtggcacaa

SEQ ID NO: 1927773 - DNA, 15 bp, Homo sapiens
gggatgtggcacaaa

SEQ ID NO: 1927774 - DNA, 15 bp, Homo sapiens
ggatgtggcacaaat

SEQ ID NO: 1927775 - DNA, 15 bp, Homo sapiens
gatgtggcacaaatg

SEQ ID NO: 1927776 - DNA, 15 bp, Homo sapiens
atgtggcacaaatgc

SEQ ID NO: 1927777 - DNA, 15 bp, Homo sapiens
tgtggcacaaatgct

SEQ ID NO: 1927778 - DNA, 15 bp, Homo sapiens
gtggcacaaatgctt

SEQ ID NO: 1927779 - DNA, 15 bp, Homo sapiens
tggcacaaatgcttt

SEQ ID NO: 1927780 - DNA, 15 bp, Homo sapiens
ggcacaaatgctttt

SEQ ID NO: 1927781 - DNA, 15 bp, Homo sapiens
gcacaaatgcttttt

SEQ ID NO: 1927782 - DNA, 15 bp, Homo sapiens
cacaaatgcttttta

SEQ ID NO: 1927783 - DNA, 15 bp, Homo sapiens
acaaatgctttttag

SEQ ID NO: 1927784 - DNA, 15 bp, Homo sapiens
caaatgctttttagg

SEQ ID NO: 1927785 - DNA, 15 bp, Homo sapiens
aaatgctttttaggg

SEQ ID NO: 1927786 - DNA, 15 bp, Homo sapiens
aatgctttttagggt

SEQ ID NO: 1927787 - DNA, 15 bp, Homo sapiens
atgctttttagggta

SEQ ID NO: 1927788 - DNA, 15 bp, Homo sapiens
tgctttttagggtac

SEQ ID NO: 1927789 - DNA, 15 bp, Homo sapiens
gctttttagggtacc

SEQ ID NO: 1927790 - DNA, 15 bp, Homo sapiens
ctttttagggtacct

SEQ ID NO: 1927791 - DNA, 15 bp, Homo sapiens
tttttagggtacctc

SEQ ID NO: 1927792 - DNA, 15 bp, Homo sapiens
ttttagggtacctct

SEQ ID NO: 1927793 - DNA, 15 bp, Homo sapiens
tttagggtacctctc

SEQ ID NO: 1927794 - DNA, 15 bp, Homo sapiens
ttagggtacctctca

SEQ ID NO: 1927795 - DNA, 15 bp, Homo sapiens
tagggtacctctcat

SEQ ID NO: 1927796 - DNA, 15 bp, Homo sapiens
agggtacctctcatt

SEQ ID NO: 1927797 - DNA, 15 bp, Homo sapiens
gggtacctctcattt

SEQ ID NO: 1927798 - DNA, 15 bp, Homo sapiens
ggtacctctcattta

SEQ ID NO: 1927799 - DNA, 15 bp, Homo sapiens
gtacctctcatttat

SEQ ID NO: 1927800 - DNA, 15 bp, Homo sapiens
tacctctcatttatt

SEQ ID NO: 1927801 - DNA, 15 bp, Homo sapiens
acctctcatttattc

SEQ ID NO: 1927802 - DNA, 15 bp, Homo sapiens
cctctcatttattca

SEQ ID NO: 1927803 - DNA, 15 bp, Homo sapiens
ctctcatttattcac

SEQ ID NO: 1927804 - DNA, 15 bp, Homo sapiens
tctcatttattcaca

SEQ ID NO: 1927805 - DNA, 15 bp, Homo sapiens
ctcatttattcacat

SEQ ID NO: 1927806 - DNA, 15 bp, Homo sapiens
tcatttattcacata

SEQ ID NO: 1927807 - DNA, 15 bp, Homo sapiens
catttattcacatag

SEQ ID NO: 1927808 - DNA, 15 bp, Homo sapiens
atttattcacataga

SEQ ID NO: 1927809 - DNA, 15 bp, Homo sapiens
tttattcacatagaa

SEQ ID NO: 1927810 - DNA, 15 bp, Homo sapiens
ttattcacatagaaa

SEQ ID NO: 1927811 - DNA, 15 bp, Homo sapiens
tattcacatagaaaa

SEQ ID NO: 1927812 - DNA, 15 bp, Homo sapiens
attcacatagaaaat

SEQ ID NO: 1927813 - DNA, 15 bp, Homo sapiens
ttcacatagaaaatt

SEQ ID NO: 1927814 - DNA, 15 bp, Homo sapiens
tcacatagaaaatta

SEQ ID NO: 1927815 - DNA, 15 bp, Homo sapiens
cacatagaaaattaa

SEQ ID NO: 1927816 - DNA, 15 bp, Homo sapiens
acatagaaaattaaa

SEQ ID NO: 1927817 - DNA, 15 bp, Homo sapiens
catagaaaattaaat

SEQ ID NO: 1927818 - DNA, 15 bp, Homo sapiens
atagaaaattaaata

SEQ ID NO: 1927819 - DNA, 15 bp, Homo sapiens
tagaaaattaaatag

SEQ ID NO: 1927820 - DNA, 15 bp, Homo sapiens
agaaaattaaatagg

SEQ ID NO: 1927821 - DNA, 15 bp, Homo sapiens
gaaaattaaatagga

SEQ ID NO: 1927822 - DNA, 15 bp, Homo sapiens
aaaattaaataggac

SEQ ID NO: 1927823 - DNA, 15 bp, Homo sapiens
aaattaaataggaca

SEQ ID NO: 1927824 - DNA, 15 bp, Homo sapiens
aattaaataggacac

SEQ ID NO: 1927825 - DNA, 15 bp, Homo sapiens
attaaataggacact

SEQ ID NO: 1927826 - DNA, 15 bp, Homo sapiens
ttaaataggacactt

SEQ ID NO: 1927827 - DNA, 15 bp, Homo sapiens
taaataggacactta

SEQ ID NO: 1927828 - DNA, 15 bp, Homo sapiens
aaataggacacttag

SEQ ID NO: 1927829 - DNA, 15 bp, Homo sapiens
aataggacacttagt

SEQ ID NO: 1927830 - DNA, 15 bp, Homo sapiens
ataggacacttagtc

SEQ ID NO: 1927831 - DNA, 15 bp, Homo sapiens
taggacacttagtca

SEQ ID NO: 1927832 - DNA, 15 bp, Homo sapiens
aggacacttagtcaa

SEQ ID NO: 1927833 - DNA, 15 bp, Homo sapiens
ggacacttagtcaag

SEQ ID NO: 1927834 - DNA, 15 bp, Homo sapiens
gacacttagtcaagg

SEQ ID NO: 1927835 - DNA, 15 bp, Homo sapiens
acacttagtcaaggg

SEQ ID NO: 1927836 - DNA, 15 bp, Homo sapiens
cacttagtcaagggt

SEQ ID NO: 1927837 - DNA, 15 bp, Homo sapiens
acttagtcaagggtg

SEQ ID NO: 1927838 - DNA, 15 bp, Homo sapiens
cttagtcaagggtgc

SEQ ID NO: 1927839 - DNA, 15 bp, Homo sapiens
ttagtcaagggtgca

SEQ ID NO: 1927840 - DNA, 15 bp, Homo sapiens
tagtcaagggtgcag

SEQ ID NO: 1927841 - DNA, 15 bp, Homo sapiens
agtcaagggtgcaga

SEQ ID NO: 1927842 - DNA, 15 bp, Homo sapiens
gtcaagggtgcagat

SEQ ID NO: 1927843 - DNA, 15 bp, Homo sapiens
tcaagggtgcagatg

SEQ ID NO: 1927844 - DNA, 15 bp, Homo sapiens
caagggtgcagatgt

SEQ ID NO: 1927845 - DNA, 15 bp, Homo sapiens
aagggtgcagatgtg

SEQ ID NO: 1927846 - DNA, 15 bp, Homo sapiens
agggtgcagatgtga

SEQ ID NO: 1927847 - DNA, 15 bp, Homo sapiens
gggtgcagatgtgag

SEQ ID NO: 1927848 - DNA, 15 bp, Homo sapiens
ggtgcagatgtgagg

SEQ ID NO: 1927849 - DNA, 15 bp, Homo sapiens
gtgcagatgtgagga

SEQ ID NO: 1927850 - DNA, 15 bp, Homo sapiens
tgcagatgtgaggat

SEQ ID NO: 1927851 - DNA, 15 bp, Homo sapiens
gcagatgtgaggatt

SEQ ID NO: 1927852 - DNA, 15 bp, Homo sapiens
cagatgtgaggattt

SEQ ID NO: 1927853 - DNA, 15 bp, Homo sapiens
agatgtgaggattta

SEQ ID NO: 1927854 - DNA, 15 bp, Homo sapiens
gatgtgaggatttaa

SEQ ID NO: 1927855 - DNA, 15 bp, Homo sapiens
atgtgaggatttaaa

SEQ ID NO: 1927856 - DNA, 15 bp, Homo sapiens
tgtgaggatttaaag

SEQ ID NO: 1927857 - DNA, 15 bp, Homo sapiens
gtgaggatttaaaga

SEQ ID NO: 1927858 - DNA, 15 bp, Homo sapiens
tgaggatttaaagag

SEQ ID NO: 1927859 - DNA, 15 bp, Homo sapiens
gaggatttaaagaga

SEQ ID NO: 1927860 - DNA, 15 bp, Homo sapiens
aggatttaaagagac

SEQ ID NO: 1927861 - DNA, 15 bp, Homo sapiens
ggatttaaagagaca

SEQ ID NO: 1927862 - DNA, 15 bp, Homo sapiens
gatttaaagagacaa

SEQ ID NO: 1927863 - DNA, 15 bp, Homo sapiens
atttaaagagacaat

SEQ ID NO: 1927864 - DNA, 15 bp, Homo sapiens
tttaaagagacaatg

SEQ ID NO: 1927865 - DNA, 15 bp, Homo sapiens
ttaaagagacaatga

SEQ ID NO: 1927866 - DNA, 15 bp, Homo sapiens
taaagagacaatgaa

SEQ ID NO: 1927867 - DNA, 15 bp, Homo sapiens
aaagagacaatgaaa

SEQ ID NO: 1927868 - DNA, 15 bp, Homo sapiens
aagagacaatgaaaa

SEQ ID NO: 1927869 - DNA, 15 bp, Homo sapiens
agagacaatgaaaaa

SEQ ID NO: 1927870 - DNA, 15 bp, Homo sapiens
gagacaatgaaaaaa

SEQ ID NO: 1927871 - DNA, 15 bp, Homo sapiens
agacaatgaaaaaaa

SEQ ID NO: 1927872 - DNA, 15 bp, Homo sapiens
gacaatgaaaaaaag

SEQ ID NO: 1927873 - DNA, 15 bp, Homo sapiens
acaatgaaaaaaagc

SEQ ID NO: 1927874 - DNA, 15 bp, Homo sapiens
caatgaaaaaaagca

SEQ ID NO: 1927875 - DNA, 15 bp, Homo sapiens
aatgaaaaaaagcac

SEQ ID NO: 1927876 - DNA, 15 bp, Homo sapiens
atgaaaaaaagcacc

SEQ ID NO: 1927877 - DNA, 15 bp, Homo sapiens
tgaaaaaaagcacct

SEQ ID NO: 1927878 - DNA, 15 bp, Homo sapiens
gaaaaaaagcaccta

SEQ ID NO: 1927879 - DNA, 15 bp, Homo sapiens
aaaaaaagcacctaa

SEQ ID NO: 1927880 - DNA, 15 bp, Homo sapiens
aaaaaagcacctaac

SEQ ID NO: 1927881 - DNA, 15 bp, Homo sapiens
aaaaagcacctaaca

SEQ ID NO: 1927882 - DNA, 15 bp, Homo sapiens
aaaagcacctaacat

SEQ ID NO: 1927883 - DNA, 15 bp, Homo sapiens
aaagcacctaacatt

SEQ ID NO: 1927884 - DNA, 15 bp, Homo sapiens
aagcacctaacattc

SEQ ID NO: 1927885 - DNA, 15 bp, Homo sapiens
agcacctaacattca

SEQ ID NO: 1927886 - DNA, 15 bp, Homo sapiens
gcacctaacattcag

SEQ ID NO: 1927887 - DNA, 15 bp, Homo sapiens
cacctaacattcaga

SEQ ID NO: 1927888 - DNA, 15 bp, Homo sapiens
acctaacattcagat

SEQ ID NO: 1927889 - DNA, 15 bp, Homo sapiens
cctaacattcagatt

SEQ ID NO: 1927890 - DNA, 15 bp, Homo sapiens
ctaacattcagattg

SEQ ID NO: 1927891 - DNA, 15 bp, Homo sapiens
taacattcagattga

SEQ ID NO: 1927892 - DNA, 15 bp, Homo sapiens
aacattcagattgac

SEQ ID NO: 1927893 - DNA, 15 bp, Homo sapiens
acattcagattgaca

SEQ ID NO: 1927894 - DNA, 15 bp, Homo sapiens
cattcagattgacac

SEQ ID NO: 1927895 - DNA, 15 bp, Homo sapiens
attcagattgacacg

SEQ ID NO: 1927896 - DNA, 15 bp, Homo sapiens
ttcagattgacacgt

SEQ ID NO: 1927897 - DNA, 15 bp, Homo sapiens
tcagattgacacgta

SEQ ID NO: 1927898 - DNA, 15 bp, Homo sapiens
cagattgacacgtaa

SEQ ID NO: 1927899 - DNA, 15 bp, Homo sapiens
agattgacacgtaag

SEQ ID NO: 1927900 - DNA, 15 bp, Homo sapiens
gattgacacgtaagt

SEQ ID NO: 1927901 - DNA, 15 bp, Homo sapiens
attgacacgtaagta

SEQ ID NO: 1927902 - DNA, 15 bp, Homo sapiens
ttgacacgtaagtat

SEQ ID NO: 1927903 - DNA, 15 bp, Homo sapiens
tgacacgtaagtatc

SEQ ID NO: 1927904 - DNA, 15 bp, Homo sapiens
gacacgtaagtatcc

SEQ ID NO: 1927905 - DNA, 15 bp, Homo sapiens
acacgtaagtatcca

SEQ ID NO: 1927906 - DNA, 15 bp, Homo sapiens
cacgtaagtatccaa

SEQ ID NO: 1927907 - DNA, 15 bp, Homo sapiens
acgtaagtatccaaa

SEQ ID NO: 1927908 - DNA, 15 bp, Homo sapiens
cgtaagtatccaaag

SEQ ID NO: 1927909 - DNA, 15 bp, Homo sapiens
gtaagtatccaaagt

SEQ ID NO: 1927910 - DNA, 15 bp, Homo sapiens
taagtatccaaagtt

SEQ ID NO: 1927911 - DNA, 15 bp, Homo sapiens
aagtatccaaagttt

SEQ ID NO: 1927912 - DNA, 15 bp, Homo sapiens
agtatccaaagtttg

SEQ ID NO: 1927913 - DNA, 15 bp, Homo sapiens
gtatccaaagtttgg

SEQ ID NO: 1927914 - DNA, 15 bp, Homo sapiens
accacaaattttgca

SEQ ID NO: 1927915 - DNA, 15 bp, Homo sapiens
ccacaaattttgcat

SEQ ID NO: 1927916 - DNA, 15 bp, Homo sapiens
cacaaattttgcatt

SEQ ID NO: 1927917 - DNA, 15 bp, Homo sapiens
acaaattttgcattg

SEQ ID NO: 1927918 - DNA, 15 bp, Homo sapiens
caaattttgcattgt

SEQ ID NO: 1927919 - DNA, 15 bp, Homo sapiens
aaattttgcattgtt

SEQ ID NO: 1927920 - DNA, 15 bp, Homo sapiens
aattttgcattgttc

SEQ ID NO: 1927921 - DNA, 15 bp, Homo sapiens
attttgcattgttca

SEQ ID NO: 1927922 - DNA, 15 bp, Homo sapiens
ttttgcattgttcat

SEQ ID NO: 1927923 - DNA, 15 bp, Homo sapiens
tttgcattgttcatt

SEQ ID NO: 1927924 - DNA, 15 bp, Homo sapiens
ttgcattgttcattg

SEQ ID NO: 1927925 - DNA, 15 bp, Homo sapiens
tgcattgttcattgt

SEQ ID NO: 1927926 - DNA, 15 bp, Homo sapiens
gcattgttcattgta

SEQ ID NO: 1927927 - DNA, 15 bp, Homo sapiens
cattgttcattgtag

SEQ ID NO: 1927928 - DNA, 15 bp, Homo sapiens
attgttcattgtagc

SEQ ID NO: 1927929 - DNA, 15 bp, Homo sapiens
ttgttcattgtagca

SEQ ID NO: 1927930 - DNA, 15 bp, Homo sapiens
tgttcattgtagcac

SEQ ID NO: 1927931 - DNA, 15 bp, Homo sapiens
gttcattgtagcact

SEQ ID NO: 1927932 - DNA, 15 bp, Homo sapiens
ttcattgtagcacta

SEQ ID NO: 1927933 - DNA, 15 bp, Homo sapiens
tcattgtagcactat

SEQ ID NO: 1927934 - DNA, 15 bp, Homo sapiens
cattgtagcactatt

SEQ ID NO: 1927935 - DNA, 15 bp, Homo sapiens
attgtagcactattg

SEQ ID NO: 1927936 - DNA, 15 bp, Homo sapiens
ttgtagcactattgg

SEQ ID NO: 1927937 - DNA, 15 bp, Homo sapiens
tgtagcactattggt

SEQ ID NO: 1927938 - DNA, 15 bp, Homo sapiens
gtagcactattggta

SEQ ID NO: 1927939 - DNA, 15 bp, Homo sapiens
tagcactattggtaa

SEQ ID NO: 1927940 - DNA, 15 bp, Homo sapiens
agcactattggtaat

SEQ ID NO: 1927941 - DNA, 15 bp, Homo sapiens
gcactattggtaata

SEQ ID NO: 1927942 - DNA, 15 bp, Homo sapiens
cactattggtaataa

SEQ ID NO: 1927943 - DNA, 15 bp, Homo sapiens
actattggtaataaa

SEQ ID NO: 1927944 - DNA, 15 bp, Homo sapiens
ctattggtaataaaa

SEQ ID NO: 1927945 - DNA, 15 bp, Homo sapiens
tattggtaataaaat

SEQ ID NO: 1927946 - DNA, 15 bp, Homo sapiens
attggtaataaaata

SEQ ID NO: 1927947 - DNA, 15 bp, Homo sapiens
ttggtaataaaataa

SEQ ID NO: 1927948 - DNA, 15 bp, Homo sapiens
tggtaataaaataac

SEQ ID NO: 1927949 - DNA, 15 bp, Homo sapiens
ggtaataaaataaca

SEQ ID NO: 1927950 - DNA, 15 bp, Homo sapiens
gtaataaaataacaa

SEQ ID NO: 1927951 - DNA, 15 bp, Homo sapiens
taataaaataacaaa

SEQ ID NO: 1927952 - DNA, 15 bp, Homo sapiens
aataaaataacaaat

SEQ ID NO: 1927953 - DNA, 15 bp, Homo sapiens
ataaaataacaaatg

SEQ ID NO: 1927954 - DNA, 15 bp, Homo sapiens
taaaataacaaatgt

SEQ ID NO: 1927955 - DNA, 15 bp, Homo sapiens
aaataacaaatgttt

SEQ ID NO: 1927956 - DNA, 15 bp, Homo sapiens
aataacaaatgtttg

SEQ ID NO: 1927957 - DNA, 15 bp, Homo sapiens
ataacaaatgtttgt

SEQ ID NO: 1927958 - DNA, 15 bp, Homo sapiens
taacaaatgtttgtg

SEQ ID NO: 1927959 - DNA, 15 bp, Homo sapiens
aacaaatgtttgtgc

SEQ ID NO: 1927960 - DNA, 15 bp, Homo sapiens
acaaatgtttgtgca

SEQ ID NO: 1927961 - DNA, 15 bp, Homo sapiens
caaatgtttgtgcat

SEQ ID NO: 1927962 - DNA, 15 bp, Homo sapiens
aaatgtttgtgcatt

SEQ ID NO: 1927963 - DNA, 15 bp, Homo sapiens
aatgtttgtgcattt

SEQ ID NO: 1927964 - DNA, 15 bp, Homo sapiens
atgtttgtgcatttt

SEQ ID NO: 1927965 - DNA, 15 bp, Homo sapiens
tgtttgtgcattttt

SEQ ID NO: 1927966 - DNA, 15 bp, Homo sapiens
gtttgtgcattttta

SEQ ID NO: 1927967 - DNA, 15 bp, Homo sapiens
tttgtgcatttttat

SEQ ID NO: 1927968 - DNA, 15 bp, Homo sapiens
ttgtgcatttttatg

SEQ ID NO: 1927969 - DNA, 15 bp, Homo sapiens
tgtgcatttttatgt

SEQ ID NO: 1927970 - DNA, 15 bp, Homo sapiens
gtgcatttttatgtg

SEQ ID NO: 1927971 - DNA, 15 bp, Homo sapiens
tgcatttttatgtga

SEQ ID NO: 1927972 - DNA, 15 bp, Homo sapiens
gcatttttatgtgaa

SEQ ID NO: 1927973 - DNA, 15 bp, Homo sapiens
catttttatgtgaag

SEQ ID NO: 1927974 - DNA, 15 bp, Homo sapiens
atttttatgtgaaga

SEQ ID NO: 1927975 - DNA, 15 bp, Homo sapiens
tttttatgtgaagat

SEQ ID NO: 1927976 - DNA, 15 bp, Homo sapiens
ttttatgtgaagatc

SEQ ID NO: 1927977 - DNA, 15 bp, Homo sapiens
tttatgtgaagatcc

SEQ ID NO: 1927978 - DNA, 15 bp, Homo sapiens
ttatgtgaagatcct

SEQ ID NO: 1927979 - DNA, 15 bp, Homo sapiens
tatgtgaagatcctt

SEQ ID NO: 1927980 - DNA, 15 bp, Homo sapiens
atgtgaagatccttc

SEQ ID NO: 1927981 - DNA, 15 bp, Homo sapiens
tgtgaagatccttct

SEQ ID NO: 1927982 - DNA, 15 bp, Homo sapiens
gtgaagatccttctc

SEQ ID NO: 1927983 - DNA, 15 bp, Homo sapiens
tgaagatccttctcg

SEQ ID NO: 1927984 - DNA, 15 bp, Homo sapiens
gaagatccttctcgt

SEQ ID NO: 1927985 - DNA, 15 bp, Homo sapiens
aagatccttctcgta

SEQ ID NO: 1927986 - DNA, 15 bp, Homo sapiens
agatccttctcgtat

SEQ ID NO: 1927987 - DNA, 15 bp, Homo sapiens
gatccttctcgtatt

SEQ ID NO: 1927988 - DNA, 15 bp, Homo sapiens
atccttctcgtattt

SEQ ID NO: 1927989 - DNA, 15 bp, Homo sapiens
tccttctcgtatttc

SEQ ID NO: 1927990 - DNA, 15 bp, Homo sapiens
ccttctcgtatttca

SEQ ID NO: 1927991 - DNA, 15 bp, Homo sapiens
cttctcgtatttcat

SEQ ID NO: 1927992 - DNA, 15 bp, Homo sapiens
ttctcgtatttcatt

SEQ ID NO: 1927993 - DNA, 15 bp, Homo sapiens
tctcgtatttcattt

SEQ ID NO: 1927994 - DNA, 15 bp, Homo sapiens
ctcgtatttcatttg

SEQ ID NO: 1927995 - DNA, 15 bp, Homo sapiens
tcgtatttcatttgg

SEQ ID NO: 1927996 - DNA, 15 bp, Homo sapiens
cgtatttcatttgga

SEQ ID NO: 1927997 - DNA, 15 bp, Homo sapiens
gtatttcatttggaa

SEQ ID NO: 1927998 - DNA, 15 bp, Homo sapiens
tatttcatttggaaa

SEQ ID NO: 1927999 - DNA, 15 bp, Homo sapiens
atttcatttggaaag

SEQ ID NO: 1928000 - DNA, 15 bp, Homo sapiens
tttcatttggaaaga

SEQ ID NO: 1928001 - DNA, 15 bp, Homo sapiens
ttcatttggaaagat

SEQ ID NO: 1928002 - DNA, 15 bp, Homo sapiens
tcatttggaaagatg

SEQ ID NO: 1928003 - DNA, 15 bp, Homo sapiens
catttggaaagatga

SEQ ID NO: 1928004 - DNA, 15 bp, Homo sapiens
atttggaaagatgag

SEQ ID NO: 1928005 - DNA, 15 bp, Homo sapiens
tttggaaagatgagc

SEQ ID NO: 1928006 - DNA, 15 bp, Homo sapiens
ttggaaagatgagca

SEQ ID NO: 1928007 - DNA, 15 bp, Homo sapiens
tggaaagatgagcaa

SEQ ID NO: 1928008 - DNA, 15 bp, Homo sapiens
ggaaagatgagcaag

SEQ ID NO: 1928009 - DNA, 15 bp, Homo sapiens
gaaagatgagcaaga

SEQ ID NO: 1928010 - DNA, 15 bp, Homo sapiens
aaagatgagcaagag

SEQ ID NO: 1928011 - DNA, 15 bp, Homo sapiens
aagatgagcaagagg

SEQ ID NO: 1928012 - DNA, 15 bp, Homo sapiens
agatgagcaagaggt

SEQ ID NO: 1928013 - DNA, 15 bp, Homo sapiens
gatgagcaagaggtc

SEQ ID NO: 1928014 - DNA, 15 bp, Homo sapiens
atgagcaagaggtct

SEQ ID NO: 1928015 - DNA, 15 bp, Homo sapiens
tgagcaagaggtctg

SEQ ID NO: 1928016 - DNA, 15 bp, Homo sapiens
gagcaagaggtctgc

SEQ ID NO: 1928017 - DNA, 15 bp, Homo sapiens
agcaagaggtctgct

SEQ ID NO: 1928018 - DNA, 15 bp, Homo sapiens
gcaagaggtctgctt

SEQ ID NO: 1928019 - DNA, 15 bp, Homo sapiens
caagaggtctgcttc

SEQ ID NO: 1928020 - DNA, 15 bp, Homo sapiens
aagaggtctgcttcc

SEQ ID NO: 1928021 - DNA, 15 bp, Homo sapiens
agaggtctgcttcct

SEQ ID NO: 1928022 - DNA, 15 bp, Homo sapiens
gaggtctgcttcctt

SEQ ID NO: 1928023 - DNA, 15 bp, Homo sapiens
aggtctgcttccttc

SEQ ID NO: 1928024 - DNA, 15 bp, Homo sapiens
ggtctgcttccttca

SEQ ID NO: 1928025 - DNA, 15 bp, Homo sapiens
gtctgcttccttcat

SEQ ID NO: 1928026 - DNA, 15 bp, Homo sapiens
tctgcttccttcatt

SEQ ID NO: 1928027 - DNA, 15 bp, Homo sapiens
ctgcttccttcattt

SEQ ID NO: 1928028 - DNA, 15 bp, Homo sapiens
tgcttccttcatttt

SEQ ID NO: 1928029 - DNA, 15 bp, Homo sapiens
gcttccttcatttta

SEQ ID NO: 1928030 - DNA, 15 bp, Homo sapiens
cttccttcattttac

SEQ ID NO: 1928031 - DNA, 15 bp, Homo sapiens
ttccttcattttact

SEQ ID NO: 1928032 - DNA, 15 bp, Homo sapiens
tccttcattttactt

SEQ ID NO: 1928033 - DNA, 15 bp, Homo sapiens
ccttcattttacttc

SEQ ID NO: 1928034 - DNA, 15 bp, Homo sapiens
cttcattttacttcc

SEQ ID NO: 1928035 - DNA, 15 bp, Homo sapiens
ttcattttacttccc

SEQ ID NO: 1928036 - DNA, 15 bp, Homo sapiens
tcattttacttcccc

SEQ ID NO: 1928037 - DNA, 15 bp, Homo sapiens
cattttacttcccct

SEQ ID NO: 1928038 - DNA, 15 bp, Homo sapiens
attttacttcccctt

SEQ ID NO: 1928039 - DNA, 15 bp, Homo sapiens
ttttacttccccttc

SEQ ID NO: 1928040 - DNA, 15 bp, Homo sapiens
tttacttccccttct

SEQ ID NO: 1928041 - DNA, 15 bp, Homo sapiens
ttacttccccttctg

SEQ ID NO: 1928042 - DNA, 15 bp, Homo sapiens
tacttccccttctgt

SEQ ID NO: 1928043 - DNA, 15 bp, Homo sapiens
cttccccttctgttt

SEQ ID NO: 1928044 - DNA, 15 bp, Homo sapiens
ttccccttctgtttt

SEQ ID NO: 1928045 - DNA, 15 bp, Homo sapiens
tccccttctgttttt

SEQ ID NO: 1928046 - DNA, 15 bp, Homo sapiens
ccccttctgtttttg

SEQ ID NO: 1928047 - DNA, 15 bp, Homo sapiens
cccttctgtttttga

SEQ ID NO: 1928048 - DNA, 15 bp, Homo sapiens
ccttctgtttttgaa

SEQ ID NO: 1928049 - DNA, 15 bp, Homo sapiens
cttctgtttttgaaa

SEQ ID NO: 1928050 - DNA, 15 bp, Homo sapiens
ttctgtttttgaaag

SEQ ID NO: 1928051 - DNA, 15 bp, Homo sapiens
tctgtttttgaaagg

SEQ ID NO: 1928052 - DNA, 15 bp, Homo sapiens
ctgtttttgaaaggc

SEQ ID NO: 1928053 - DNA, 15 bp, Homo sapiens
tgtttttgaaaggca

SEQ ID NO: 1928054 - DNA, 15 bp, Homo sapiens
gtttttgaaaggcag

SEQ ID NO: 1928055 - DNA, 15 bp, Homo sapiens
tttttgaaaggcagt

SEQ ID NO: 1928056 - DNA, 15 bp, Homo sapiens
ttttgaaaggcagtt

SEQ ID NO: 1928057 - DNA, 15 bp, Homo sapiens
tttgaaaggcagttt

SEQ ID NO: 1928058 - DNA, 15 bp, Homo sapiens
ttgaaaggcagtttc

SEQ ID NO: 1928059 - DNA, 15 bp, Homo sapiens
tgaaaggcagtttcg

SEQ ID NO: 1928060 - DNA, 15 bp, Homo sapiens
gaaaggcagtttcgc

SEQ ID NO: 1928061 - DNA, 15 bp, Homo sapiens
aaaggcagtttcgcc

SEQ ID NO: 1928062 - DNA, 15 bp, Homo sapiens
aaggcagtttcgcca

SEQ ID NO: 1928063 - DNA, 15 bp, Homo sapiens
aggcagtttcgccaa

SEQ ID NO: 1928064 - DNA, 15 bp, Homo sapiens
ggcagtttcgccaag

SEQ ID NO: 1928065 - DNA, 15 bp, Homo sapiens
gcagtttcgccaagc

SEQ ID NO: 1928066 - DNA, 15 bp, Homo sapiens
cagtttcgccaagct

SEQ ID NO: 1928067 - DNA, 15 bp, Homo sapiens
agtttcgccaagctt

SEQ ID NO: 1928068 - DNA, 15 bp, Homo sapiens
gtttcgccaagctta

SEQ ID NO: 1928069 - DNA, 15 bp, Homo sapiens
tttcgccaagcttaa

SEQ ID NO: 1928070 - DNA, 15 bp, Homo sapiens
ttcgccaagcttaat

SEQ ID NO: 1928071 - DNA, 15 bp, Homo sapiens
tcgccaagcttaatg

SEQ ID NO: 1928072 - DNA, 15 bp, Homo sapiens
cgccaagcttaatgc

SEQ ID NO: 1928073 - DNA, 15 bp, Homo sapiens
gccaagcttaatgca

SEQ ID NO: 1928074 - DNA, 15 bp, Homo sapiens
ccaagcttaatgcaa

SEQ ID NO: 1928075 - DNA, 15 bp, Homo sapiens
caagcttaatgcaag

SEQ ID NO: 1928076 - DNA, 15 bp, Homo sapiens
aagcttaatgcaaga

SEQ ID NO: 1928077 - DNA, 15 bp, Homo sapiens
agcttaatgcaagaa

SEQ ID NO: 1928078 - DNA, 15 bp, Homo sapiens
gcttaatgcaagaat

SEQ ID NO: 1928079 - DNA, 15 bp, Homo sapiens
cttaatgcaagaata

SEQ ID NO: 1928080 - DNA, 15 bp, Homo sapiens
ttaatgcaagaatat

SEQ ID NO: 1928081 - DNA, 15 bp, Homo sapiens
taatgcaagaatatc

SEQ ID NO: 1928082 - DNA, 15 bp, Homo sapiens
aatgcaagaatatct

SEQ ID NO: 1928083 - DNA, 15 bp, Homo sapiens
atgcaagaatatctg

SEQ ID NO: 1928084 - DNA, 15 bp, Homo sapiens
tgcaagaatatctga

SEQ ID NO: 1928085 - DNA, 15 bp, Homo sapiens
gcaagaatatctgac

SEQ ID NO: 1928086 - DNA, 15 bp, Homo sapiens
caagaatatctgact

SEQ ID NO: 1928087 - DNA, 15 bp, Homo sapiens
aagaatatctgactg

SEQ ID NO: 1928088 - DNA, 15 bp, Homo sapiens
agaatatctgactgt

SEQ ID NO: 1928089 - DNA, 15 bp, Homo sapiens
gaatatctgactgtt

SEQ ID NO: 1928090 - DNA, 15 bp, Homo sapiens
aatatctgactgttt

SEQ ID NO: 1928091 - DNA, 15 bp, Homo sapiens
atatctgactgttta

SEQ ID NO: 1928092 - DNA, 15 bp, Homo sapiens
tatctgactgtttag

SEQ ID NO: 1928093 - DNA, 15 bp, Homo sapiens
atctgactgtttaga

SEQ ID NO: 1928094 - DNA, 15 bp, Homo sapiens
tctgactgtttagaa

SEQ ID NO: 1928095 - DNA, 15 bp, Homo sapiens
ctgactgtttagaag

SEQ ID NO: 1928096 - DNA, 15 bp, Homo sapiens
tgactgtttagaaga

SEQ ID NO: 1928097 - DNA, 15 bp, Homo sapiens
gactgtttagaagaa

SEQ ID NO: 1928098 - DNA, 15 bp, Homo sapiens
actgtttagaagaaa

SEQ ID NO: 1928099 - DNA, 15 bp, Homo sapiens
ctgtttagaagaaag

SEQ ID NO: 1928100 - DNA, 15 bp, Homo sapiens
tgtttagaagaaaga

SEQ ID NO: 1928101 - DNA, 15 bp, Homo sapiens
gtttagaagaaagat

SEQ ID NO: 1928102 - DNA, 15 bp, Homo sapiens
tttagaagaaagata

SEQ ID NO: 1928103 - DNA, 15 bp, Homo sapiens
ttagaagaaagatat

SEQ ID NO: 1928104 - DNA, 15 bp, Homo sapiens
tagaagaaagatatt

SEQ ID NO: 1928105 - DNA, 15 bp, Homo sapiens
agaagaaagatattg

SEQ ID NO: 1928106 - DNA, 15 bp, Homo sapiens
gaagaaagatattgc

SEQ ID NO: 1928107 - DNA, 15 bp, Homo sapiens
aagaaagatattgcc

SEQ ID NO: 1928108 - DNA, 15 bp, Homo sapiens
agaaagatattgcca

SEQ ID NO: 1928109 - DNA, 15 bp, Homo sapiens
gaaagatattgccac

SEQ ID NO: 1928110 - DNA, 15 bp, Homo sapiens
aaagatattgccaca

SEQ ID NO: 1928111 - DNA, 15 bp, Homo sapiens
aagatattgccacaa

SEQ ID NO: 1928112 - DNA, 15 bp, Homo sapiens
agatattgccacaat

SEQ ID NO: 1928113 - DNA, 15 bp, Homo sapiens
gatattgccacaatc

SEQ ID NO: 1928114 - DNA, 15 bp, Homo sapiens
atattgccacaatct

SEQ ID NO: 1928115 - DNA, 15 bp, Homo sapiens
tattgccacaatctc

SEQ ID NO: 1928116 - DNA, 15 bp, Homo sapiens
attgccacaatctct

SEQ ID NO: 1928117 - DNA, 15 bp, Homo sapiens
ttgccacaatctctg

SEQ ID NO: 1928118 - DNA, 15 bp, Homo sapiens
tgccacaatctctgg

SEQ ID NO: 1928119 - DNA, 15 bp, Homo sapiens
gccacaatctctgga

SEQ ID NO: 1928120 - DNA, 15 bp, Homo sapiens
ccacaatctctggat

SEQ ID NO: 1928121 - DNA, 15 bp, Homo sapiens
cacaatctctggatg

SEQ ID NO: 1928122 - DNA, 15 bp, Homo sapiens
acaatctctggatgg

SEQ ID NO: 1928123 - DNA, 15 bp, Homo sapiens
caatctctggatggt

SEQ ID NO: 1928124 - DNA, 15 bp, Homo sapiens
aatctctggatggtt

SEQ ID NO: 1928125 - DNA, 15 bp, Homo sapiens
atctctggatggttt

SEQ ID NO: 1928126 - DNA, 15 bp, Homo sapiens
tctctggatggtttt

SEQ ID NO: 1928127 - DNA, 15 bp, Homo sapiens
ctctggatggttttc

SEQ ID NO: 1928128 - DNA, 15 bp, Homo sapiens
tctggatggttttcc

SEQ ID NO: 1928129 - DNA, 15 bp, Homo sapiens
ctggatggttttcca

SEQ ID NO: 1928130 - DNA, 15 bp, Homo sapiens
tggatggttttccag

SEQ ID NO: 1928131 - DNA, 15 bp, Homo sapiens
ggatggttttccagg

SEQ ID NO: 1928132 - DNA, 15 bp, Homo sapiens
gatggttttccaggg

SEQ ID NO: 1928133 - DNA, 15 bp, Homo sapiens
atggttttccagggt

SEQ ID NO: 1928134 - DNA, 15 bp, Homo sapiens
tggttttccagggtt

SEQ ID NO: 1928135 - DNA, 15 bp, Homo sapiens
ggttttccagggttg

SEQ ID NO: 1928136 - DNA, 15 bp, Homo sapiens
gttttccagggttgt

SEQ ID NO: 1928137 - DNA, 15 bp, Homo sapiens
ttttccagggttgtg

SEQ ID NO: 1928138 - DNA, 15 bp, Homo sapiens
tttccagggttgtgt

SEQ ID NO: 1928139 - DNA, 15 bp, Homo sapiens
ttccagggttgtgtt

SEQ ID NO: 1928140 - DNA, 15 bp, Homo sapiens
tccagggttgtgtta

SEQ ID NO: 1928141 - DNA, 15 bp, Homo sapiens
ccagggttgtgttat

SEQ ID NO: 1928142 - DNA, 15 bp, Homo sapiens
cagggttgtgttatt

SEQ ID NO: 1928143 - DNA, 15 bp, Homo sapiens
agggttgtgttatta

SEQ ID NO: 1928144 - DNA, 15 bp, Homo sapiens
gggttgtgttattac

SEQ ID NO: 1928145 - DNA, 15 bp, Homo sapiens
ggttgtgttattact

SEQ ID NO: 1928146 - DNA, 15 bp, Homo sapiens
gttgtgttattactg

SEQ ID NO: 1928147 - DNA, 15 bp, Homo sapiens
ttgtgttattactga

SEQ ID NO: 1928148 - DNA, 15 bp, Homo sapiens
tgtgttattactgag

SEQ ID NO: 1928149 - DNA, 15 bp, Homo sapiens
gtgttattactgagc

SEQ ID NO: 1928150 - DNA, 15 bp, Homo sapiens
tgttattactgagct

SEQ ID NO: 1928151 - DNA, 15 bp, Homo sapiens
gttattactgagctt

SEQ ID NO: 1928152 - DNA, 15 bp, Homo sapiens
ttattactgagcttc

SEQ ID NO: 1928153 - DNA, 15 bp, Homo sapiens
tattactgagcttca

SEQ ID NO: 1928154 - DNA, 15 bp, Homo sapiens
attactgagcttcat

SEQ ID NO: 1928155 - DNA, 15 bp, Homo sapiens
ttactgagcttcatc

SEQ ID NO: 1928156 - DNA, 15 bp, Homo sapiens
tactgagcttcatct

SEQ ID NO: 1928157 - DNA, 15 bp, Homo sapiens
actgagcttcatctt

SEQ ID NO: 1928158 - DNA, 15 bp, Homo sapiens
ctgagcttcatcttt

SEQ ID NO: 1928159 - DNA, 15 bp, Homo sapiens
tgagcttcatctttc

SEQ ID NO: 1928160 - DNA, 15 bp, Homo sapiens
gagcttcatctttcc

SEQ ID NO: 1928161 - DNA, 15 bp, Homo sapiens
agcttcatctttcca

SEQ ID NO: 1928162 - DNA, 15 bp, Homo sapiens
gcttcatctttccag

SEQ ID NO: 1928163 - DNA, 15 bp, Homo sapiens
cttcatctttccaga

SEQ ID NO: 1928164 - DNA, 15 bp, Homo sapiens
ttcatctttccagaa

SEQ ID NO: 1928165 - DNA, 15 bp, Homo sapiens
tcatctttccagaat

SEQ ID NO: 1928166 - DNA, 15 bp, Homo sapiens
catctttccagaatg

SEQ ID NO: 1928167 - DNA, 15 bp, Homo sapiens
atctttccagaatga

SEQ ID NO: 1928168 - DNA, 15 bp, Homo sapiens
tctttccagaatgag

SEQ ID NO: 1928169 - DNA, 15 bp, Homo sapiens
ctttccagaatgagc

SEQ ID NO: 1928170 - DNA, 15 bp, Homo sapiens
tttccagaatgagca

SEQ ID NO: 1928171 - DNA, 15 bp, Homo sapiens
ttccagaatgagcaa

SEQ ID NO: 1928172 - DNA, 15 bp, Homo sapiens
tccagaatgagcaaa

SEQ ID NO: 1928173 - DNA, 15 bp, Homo sapiens
ccagaatgagcaaaa

SEQ ID NO: 1928174 - DNA, 15 bp, Homo sapiens
cagaatgagcaaaac

SEQ ID NO: 1928175 - DNA, 15 bp, Homo sapiens
agaatgagcaaaaca

SEQ ID NO: 1928176 - DNA, 15 bp, Homo sapiens
gaatgagcaaaacac

SEQ ID NO: 1928177 - DNA, 15 bp, Homo sapiens
aatgagcaaaacact

SEQ ID NO: 1928178 - DNA, 15 bp, Homo sapiens
atgagcaaaacactg

SEQ ID NO: 1928179 - DNA, 15 bp, Homo sapiens
tgagcaaaacactgt

SEQ ID NO: 1928180 - DNA, 15 bp, Homo sapiens
gagcaaaacactgtc

SEQ ID NO: 1928181 - DNA, 15 bp, Homo sapiens
agcaaaacactgtcc

SEQ ID NO: 1928182 - DNA, 15 bp, Homo sapiens
gcaaaacactgtcca

SEQ ID NO: 1928183 - DNA, 15 bp, Homo sapiens
caaaacactgtccag

SEQ ID NO: 1928184 - DNA, 15 bp, Homo sapiens
aaaacactgtccagt

SEQ ID NO: 1928185 - DNA, 15 bp, Homo sapiens
aaacactgtccagtc

SEQ ID NO: 1928186 - DNA, 15 bp, Homo sapiens
aacactgtccagtct

SEQ ID NO: 1928187 - DNA, 15 bp, Homo sapiens
acactgtccagtctt

SEQ ID NO: 1928188 - DNA, 15 bp, Homo sapiens
cactgtccagtcttt

SEQ ID NO: 1928189 - DNA, 15 bp, Homo sapiens
actgtccagtctttg

SEQ ID NO: 1928190 - DNA, 15 bp, Homo sapiens
ctgtccagtctttgt

SEQ ID NO: 1928191 - DNA, 15 bp, Homo sapiens
tgtccagtctttgtt

SEQ ID NO: 1928192 - DNA, 15 bp, Homo sapiens
gtccagtctttgtta

SEQ ID NO: 1928193 - DNA, 15 bp, Homo sapiens
tccagtctttgttac

SEQ ID NO: 1928194 - DNA, 15 bp, Homo sapiens
ccagtctttgttacg

SEQ ID NO: 1928195 - DNA, 15 bp, Homo sapiens
cagtctttgttacga

SEQ ID NO: 1928196 - DNA, 15 bp, Homo sapiens
agtctttgttacgat

SEQ ID NO: 1928197 - DNA, 15 bp, Homo sapiens
gtctttgttacgatt

SEQ ID NO: 1928198 - DNA, 15 bp, Homo sapiens
tctttgttacgattt

SEQ ID NO: 1928199 - DNA, 15 bp, Homo sapiens
ctttgttacgatttt

SEQ ID NO: 1928200 - DNA, 15 bp, Homo sapiens
tttgttacgattttg

SEQ ID NO: 1928201 - DNA, 15 bp, Homo sapiens
ttgttacgattttgt

SEQ ID NO: 1928202 - DNA, 15 bp, Homo sapiens
tgttacgattttgta

SEQ ID NO: 1928203 - DNA, 15 bp, Homo sapiens
gttacgattttgtaa

SEQ ID NO: 1928204 - DNA, 15 bp, Homo sapiens
ttacgattttgtaat

SEQ ID NO: 1928205 - DNA, 15 bp, Homo sapiens
tacgattttgtaata

SEQ ID NO: 1928206 - DNA, 15 bp, Homo sapiens
acgattttgtaataa

SEQ ID NO: 1928207 - DNA, 15 bp, Homo sapiens
cgattttgtaataaa

SEQ ID NO: 1928208 - DNA, 15 bp, Homo sapiens
gattttgtaataaat

SEQ ID NO: 1928209 - DNA, 15 bp, Homo sapiens
attttgtaataaatg

SEQ ID NO: 1928210 - DNA, 15 bp, Homo sapiens
ttttgtaataaatgt

SEQ ID NO: 1928211 - DNA, 15 bp, Homo sapiens
tttgtaataaatgtg

SEQ ID NO: 1928212 - DNA, 15 bp, Homo sapiens
ttgtaataaatgtgt

SEQ ID NO: 1928213 - DNA, 15 bp, Homo sapiens
tgtaataaatgtgta

SEQ ID NO: 1928214 - DNA, 15 bp, Homo sapiens
gtaataaatgtgtac

SEQ ID NO: 1928215 - DNA, 15 bp, Homo sapiens
taataaatgtgtaca

SEQ ID NO: 1928216 - DNA, 15 bp, Homo sapiens
aataaatgtgtacat

SEQ ID NO: 1928217 - DNA, 15 bp, Homo sapiens
ataaatgtgtacatt

SEQ ID NO: 1928218 - DNA, 15 bp, Homo sapiens
taaatgtgtacattt

SEQ ID NO: 1928219 - DNA, 15 bp, Homo sapiens
aaatgtgtacatttt

SEQ ID NO: 1928220 - DNA, 15 bp, Homo sapiens
aatgtgtacattttt

SEQ ID NO: 1928221 - DNA, 15 bp, Homo sapiens
atgtgtacatttttt

SEQ ID NO: 1928222 - DNA, 15 bp, Homo sapiens
tgtgtacattttttt

SEQ ID NO: 1928223 - DNA, 15 bp, Homo sapiens
gtgtacatttttttt

SEQ ID NO: 1928224 - DNA, 15 bp, Homo sapiens
tgtacatttttttta

SEQ ID NO: 1928225 - DNA, 15 bp, Homo sapiens
gtacattttttttaa

SEQ ID NO: 1928226 - DNA, 15 bp, Homo sapiens
acattttttttaaat

SEQ ID NO: 1928227 - DNA, 15 bp, Homo sapiens
cattttttttaaatt

SEQ ID NO: 1928228 - DNA, 15 bp, Homo sapiens
attttttttaaattt

SEQ ID NO: 1928229 - DNA, 15 bp, Homo sapiens
ttttttttaaatttt

SEQ ID NO: 1928230 - DNA, 15 bp, Homo sapiens
tttttttaaattttt

SEQ ID NO: 1928231 - DNA, 15 bp, Homo sapiens
ttttttaaatttttg

SEQ ID NO: 1928232 - DNA, 15 bp, Homo sapiens
tttttaaatttttgg

SEQ ID NO: 1928233 - DNA, 15 bp, Homo sapiens
ttttaaatttttgga

SEQ ID NO: 1928234 - DNA, 15 bp, Homo sapiens
tttaaatttttggac

SEQ ID NO: 1928235 - DNA, 15 bp, Homo sapiens
ttaaatttttggaca

SEQ ID NO: 1928236 - DNA, 15 bp, Homo sapiens
taaatttttggacat

SEQ ID NO: 1928237 - DNA, 15 bp, Homo sapiens
aaatttttggacatc

SEQ ID NO: 1928238 - DNA, 15 bp, Homo sapiens
aatttttggacatca

SEQ ID NO: 1928239 - DNA, 15 bp, Homo sapiens
atttttggacatcac

SEQ ID NO: 1928240 - DNA, 15 bp, Homo sapiens
tttttggacatcaca

SEQ ID NO: 1928241 - DNA, 15 bp, Homo sapiens
ttttggacatcacat

SEQ ID NO: 1928242 - DNA, 15 bp, Homo sapiens
tttggacatcacatg

SEQ ID NO: 1928243 - DNA, 15 bp, Homo sapiens
ttggacatcacatga

SEQ ID NO: 1928244 - DNA, 15 bp, Homo sapiens
tggacatcacatgaa

SEQ ID NO: 1928245 - DNA, 15 bp, Homo sapiens
ggacatcacatgaat

SEQ ID NO: 1928246 - DNA, 15 bp, Homo sapiens
gacatcacatgaata

SEQ ID NO: 1928247 - DNA, 15 bp, Homo sapiens
acatcacatgaataa

SEQ ID NO: 1928248 - DNA, 15 bp, Homo sapiens
catcacatgaataaa

SEQ ID NO: 1928249 - DNA, 15 bp, Homo sapiens
atcacatgaataaag

SEQ ID NO: 1928250 - DNA, 15 bp, Homo sapiens
tcacatgaataaagg

SEQ ID NO: 1928251 - DNA, 15 bp, Homo sapiens
cacatgaataaaggt

SEQ ID NO: 1928252 - DNA, 15 bp, Homo sapiens
acatgaataaaggta

SEQ ID NO: 1928253 - DNA, 15 bp, Homo sapiens
catgaataaaggtat

SEQ ID NO: 1928254 - DNA, 15 bp, Homo sapiens
atgaataaaggtatg

SEQ ID NO: 1928255 - DNA, 15 bp, Homo sapiens
tgaataaaggtatgt

SEQ ID NO: 1928256 - DNA, 15 bp, Homo sapiens
gaataaaggtatgta

SEQ ID NO: 1928257 - DNA, 15 bp, Homo sapiens
aataaaggtatgtat

SEQ ID NO: 1928258 - DNA, 15 bp, Homo sapiens
ataaaggtatgtatg

SEQ ID NO: 1928259 - DNA, 15 bp, Homo sapiens
taaaggtatgtatgt

SEQ ID NO: 1928260 - DNA, 15 bp, Homo sapiens
aaaggtatgtatgta

SEQ ID NO: 1928261 - DNA, 15 bp, Homo sapiens
aaggtatgtatgtac

SEQ ID NO: 1928262 - DNA, 15 bp, Homo sapiens
aggtatgtatgtacg

SEQ ID NO: 1928263 - DNA, 15 bp, Homo sapiens
ggtatgtatgtacga

SEQ ID NO: 1928264 - DNA, 15 bp, Homo sapiens
gtatgtatgtacgaa

SEQ ID NO: 1928265 - DNA, 15 bp, Homo sapiens
tatgtatgtacgaat

SEQ ID NO: 1928266 - DNA, 15 bp, Homo sapiens
atgtatgtacgaatg

SEQ ID NO: 1928267 - DNA, 15 bp, Homo sapiens
tgtatgtacgaatgt

SEQ ID NO: 1928268 - DNA, 15 bp, Homo sapiens
gtatgtacgaatgtg

SEQ ID NO: 1928269 - DNA, 15 bp, Homo sapiens
tatgtacgaatgtgt

SEQ ID NO: 1928270 - DNA, 15 bp, Homo sapiens
atgtacgaatgtgta

SEQ ID NO: 1928271 - DNA, 15 bp, Homo sapiens
tgtacgaatgtgtat

SEQ ID NO: 1928272 - DNA, 15 bp, Homo sapiens
gtacgaatgtgtata

SEQ ID NO: 1928273 - DNA, 15 bp, Homo sapiens
tacgaatgtgtatat

SEQ ID NO: 1928274 - DNA, 15 bp, Homo sapiens
acgaatgtgtatata

SEQ ID NO: 1928275 - DNA, 15 bp, Homo sapiens
cgaatgtgtatatat

SEQ ID NO: 1928276 - DNA, 15 bp, Homo sapiens
gaatgtgtatatatt

SEQ ID NO: 1928277 - DNA, 15 bp, Homo sapiens
aatgtgtatatatta

SEQ ID NO: 1928278 - DNA, 15 bp, Homo sapiens
atgtgtatatattat

SEQ ID NO: 1928279 - DNA, 15 bp, Homo sapiens
tgtgtatatattata

SEQ ID NO: 1928280 - DNA, 15 bp, Homo sapiens
gtgtatatattatat

SEQ ID NO: 1928281 - DNA, 15 bp, Homo sapiens
tatattatatatatg

SEQ ID NO: 1928282 - DNA, 15 bp, Homo sapiens
atattatatatatga

SEQ ID NO: 1928283 - DNA, 15 bp, Homo sapiens
tattatatatatgac

SEQ ID NO: 1928284 - DNA, 15 bp, Homo sapiens
attatatatatgaca

SEQ ID NO: 1928285 - DNA, 15 bp, Homo sapiens
ttatatatatgacat

SEQ ID NO: 1928286 - DNA, 15 bp, Homo sapiens
tatatatatgacatc

SEQ ID NO: 1928287 - DNA, 15 bp, Homo sapiens
atatatatgacatct

SEQ ID NO: 1928288 - DNA, 15 bp, Homo sapiens
tatatatgacatcta

SEQ ID NO: 1928289 - DNA, 15 bp, Homo sapiens
atatatgacatctat

SEQ ID NO: 1928290 - DNA, 15 bp, Homo sapiens
tatatgacatctatt

SEQ ID NO: 1928291 - DNA, 15 bp, Homo sapiens
atatgacatctattt

SEQ ID NO: 1928292 - DNA, 15 bp, Homo sapiens
tatgacatctatttt

SEQ ID NO: 1928293 - DNA, 15 bp, Homo sapiens
atgacatctattttg

SEQ ID NO: 1928294 - DNA, 15 bp, Homo sapiens
tgacatctattttgg

SEQ ID NO: 1928295 - DNA, 15 bp, Homo sapiens
gacatctattttgga

SEQ ID NO: 1928296 - DNA, 15 bp, Homo sapiens
acatctattttggaa

SEQ ID NO: 1928297 - DNA, 15 bp, Homo sapiens
catctattttggaaa

SEQ ID NO: 1928298 - DNA, 15 bp, Homo sapiens
atctattttggaaaa

SEQ ID NO: 1928299 - DNA, 15 bp, Homo sapiens
tctattttggaaaat

SEQ ID NO: 1928300 - DNA, 15 bp, Homo sapiens
ctattttggaaaatg

SEQ ID NO: 1928301 - DNA, 15 bp, Homo sapiens
tattttggaaaatgt

SEQ ID NO: 1928302 - DNA, 15 bp, Homo sapiens
attttggaaaatgtt

SEQ ID NO: 1928303 - DNA, 15 bp, Homo sapiens
ttttggaaaatgttt

SEQ ID NO: 1928304 - DNA, 15 bp, Homo sapiens
tttggaaaatgtttg

SEQ ID NO: 1928305 - DNA, 15 bp, Homo sapiens
ttggaaaatgtttgc

SEQ ID NO: 1928306 - DNA, 15 bp, Homo sapiens
tggaaaatgtttgcc

SEQ ID NO: 1928307 - DNA, 15 bp, Homo sapiens
ggaaaatgtttgccc

SEQ ID NO: 1928308 - DNA, 15 bp, Homo sapiens
gaaaatgtttgccct

SEQ ID NO: 1928309 - DNA, 15 bp, Homo sapiens
aaaatgtttgccctg

SEQ ID NO: 1928310 - DNA, 15 bp, Homo sapiens
aaatgtttgccctgc

SEQ ID NO: 1928311 - DNA, 15 bp, Homo sapiens
aatgtttgccctgct

SEQ ID NO: 1928312 - DNA, 15 bp, Homo sapiens
atgtttgccctgctg

SEQ ID NO: 1928313 - DNA, 15 bp, Homo sapiens
tgtttgccctgctgt

SEQ ID NO: 1928314 - DNA, 15 bp, Homo sapiens
gtttgccctgctgta

SEQ ID NO: 1928315 - DNA, 15 bp, Homo sapiens
tttgccctgctgtac

SEQ ID NO: 1928316 - DNA, 15 bp, Homo sapiens
ttgccctgctgtacc

SEQ ID NO: 1928317 - DNA, 15 bp, Homo sapiens
tgccctgctgtacct

SEQ ID NO: 1928318 - DNA, 15 bp, Homo sapiens
gccctgctgtacctc

SEQ ID NO: 1928319 - DNA, 15 bp, Homo sapiens
ccctgctgtacctca

SEQ ID NO: 1928320 - DNA, 15 bp, Homo sapiens
cctgctgtacctcat

SEQ ID NO: 1928321 - DNA, 15 bp, Homo sapiens
ctgctgtacctcatt

SEQ ID NO: 1928322 - DNA, 15 bp, Homo sapiens
tgctgtacctcattt

SEQ ID NO: 1928323 - DNA, 15 bp, Homo sapiens
gctgtacctcatttt

SEQ ID NO: 1928324 - DNA, 15 bp, Homo sapiens
ctgtacctcattttt

SEQ ID NO: 1928325 - DNA, 15 bp, Homo sapiens
tgtacctcattttta

SEQ ID NO: 1928326 - DNA, 15 bp, Homo sapiens
gtacctcatttttag

SEQ ID NO: 1928327 - DNA, 15 bp, Homo sapiens
tacctcatttttagg

SEQ ID NO: 1928328 - DNA, 15 bp, Homo sapiens
acctcatttttagga

SEQ ID NO: 1928329 - DNA, 15 bp, Homo sapiens
cctcatttttaggag

SEQ ID NO: 1928330 - DNA, 15 bp, Homo sapiens
ctcatttttaggagg

SEQ ID NO: 1928331 - DNA, 15 bp, Homo sapiens
tcatttttaggaggt

SEQ ID NO: 1928332 - DNA, 15 bp, Homo sapiens
catttttaggaggtg

SEQ ID NO: 1928333 - DNA, 15 bp, Homo sapiens
atttttaggaggtgt

SEQ ID NO: 1928334 - DNA, 15 bp, Homo sapiens
tttttaggaggtgtg

SEQ ID NO: 1928335 - DNA, 15 bp, Homo sapiens
ttttaggaggtgtgc

SEQ ID NO: 1928336 - DNA, 15 bp, Homo sapiens
tttaggaggtgtgca

SEQ ID NO: 1928337 - DNA, 15 bp, Homo sapiens
ttaggaggtgtgcat

SEQ ID NO: 1928338 - DNA, 15 bp, Homo sapiens
taggaggtgtgcatg

SEQ ID NO: 1928339 - DNA, 15 bp, Homo sapiens
aggaggtgtgcatgg

SEQ ID NO: 1928340 - DNA, 15 bp, Homo sapiens
ggaggtgtgcatgga

SEQ ID NO: 1928341 - DNA, 15 bp, Homo sapiens
gaggtgtgcatggat

SEQ ID NO: 1928342 - DNA, 15 bp, Homo sapiens
aggtgtgcatggatg

SEQ ID NO: 1928343 - DNA, 15 bp, Homo sapiens
ggtgtgcatggatgc

SEQ ID NO: 1928344 - DNA, 15 bp, Homo sapiens
gtgtgcatggatgca

SEQ ID NO: 1928345 - DNA, 15 bp, Homo sapiens
tgtgcatggatgcaa

SEQ ID NO: 1928346 - DNA, 15 bp, Homo sapiens
gtgcatggatgcaat

SEQ ID NO: 1928347 - DNA, 15 bp, Homo sapiens
tgcatggatgcaata

SEQ ID NO: 1928348 - DNA, 15 bp, Homo sapiens
gcatggatgcaatat

SEQ ID NO: 1928349 - DNA, 15 bp, Homo sapiens
catggatgcaatata

SEQ ID NO: 1928350 - DNA, 15 bp, Homo sapiens
atggatgcaatatat

SEQ ID NO: 1928351 - DNA, 15 bp, Homo sapiens
tggatgcaatatatg

SEQ ID NO: 1928352 - DNA, 15 bp, Homo sapiens
ggatgcaatatatga

SEQ ID NO: 1928353 - DNA, 15 bp, Homo sapiens
gatgcaatatatgaa

SEQ ID NO: 1928354 - DNA, 15 bp, Homo sapiens
atgcaatatatgaaa

SEQ ID NO: 1928355 - DNA, 15 bp, Homo sapiens
tgcaatatatgaaaa

SEQ ID NO: 1928356 - DNA, 15 bp, Homo sapiens
gcaatatatgaaaat

SEQ ID NO: 1928357 - DNA, 15 bp, Homo sapiens
caatatatgaaaatg

SEQ ID NO: 1928358 - DNA, 15 bp, Homo sapiens
aatatatgaaaatgg

SEQ ID NO: 1928359 - DNA, 15 bp, Homo sapiens
atatatgaaaatggg

SEQ ID NO: 1928360 - DNA, 15 bp, Homo sapiens
tatatgaaaatggga

SEQ ID NO: 1928361 - DNA, 15 bp, Homo sapiens
atatgaaaatgggac

SEQ ID NO: 1928362 - DNA, 15 bp, Homo sapiens
tatgaaaatgggaca

SEQ ID NO: 1928363 - DNA, 15 bp, Homo sapiens
atgaaaatgggacat

SEQ ID NO: 1928364 - DNA, 15 bp, Homo sapiens
tgaaaatgggacatt

SEQ ID NO: 1928365 - DNA, 15 bp, Homo sapiens
gaaaatgggacattc

SEQ ID NO: 1928366 - DNA, 15 bp, Homo sapiens
aaaatgggacattct

SEQ ID NO: 1928367 - DNA, 15 bp, Homo sapiens
aaatgggacattctg

SEQ ID NO: 1928368 - DNA, 15 bp, Homo sapiens
aatgggacattctgg

SEQ ID NO: 1928369 - DNA, 15 bp, Homo sapiens
atgggacattctgga

SEQ ID NO: 1928370 - DNA, 15 bp, Homo sapiens
tgggacattctggaa

SEQ ID NO: 1928371 - DNA, 15 bp, Homo sapiens
gggacattctggaac

SEQ ID NO: 1928372 - DNA, 15 bp, Homo sapiens
ggacattctggaact

SEQ ID NO: 1928373 - DNA, 15 bp, Homo sapiens
gacattctggaactg

SEQ ID NO: 1928374 - DNA, 15 bp, Homo sapiens
acattctggaactgc

SEQ ID NO: 1928375 - DNA, 15 bp, Homo sapiens
cattctggaactgct

SEQ ID NO: 1928376 - DNA, 15 bp, Homo sapiens
attctggaactgctg

SEQ ID NO: 1928377 - DNA, 15 bp, Homo sapiens
ttctggaactgctgg

SEQ ID NO: 1928378 - DNA, 15 bp, Homo sapiens
tctggaactgctggt

SEQ ID NO: 1928379 - DNA, 15 bp, Homo sapiens
ctggaactgctggtc

SEQ ID NO: 1928380 - DNA, 15 bp, Homo sapiens
tggaactgctggtca

SEQ ID NO: 1928381 - DNA, 15 bp, Homo sapiens
ggaactgctggtcag

SEQ ID NO: 1928382 - DNA, 15 bp, Homo sapiens
gaactgctggtcagg

SEQ ID NO: 1928383 - DNA, 15 bp, Homo sapiens
aactgctggtcaggg

SEQ ID NO: 1928384 - DNA, 15 bp, Homo sapiens
actgctggtcagggg

SEQ ID NO: 1928385 - DNA, 15 bp, Homo sapiens
ctgctggtcagggga

SEQ ID NO: 1928386 - DNA, 15 bp, Homo sapiens
tgctggtcaggggac

SEQ ID NO: 1928387 - DNA, 15 bp, Homo sapiens
gctggtcaggggact

SEQ ID NO: 1928388 - DNA, 15 bp, Homo sapiens
ctggtcaggggactt

SEQ ID NO: 1928389 - DNA, 15 bp, Homo sapiens
tggtcaggggacttt

SEQ ID NO: 1928390 - DNA, 15 bp, Homo sapiens
ggtcaggggactttg

SEQ ID NO: 1928391 - DNA, 15 bp, Homo sapiens
gtcaggggactttgt

SEQ ID NO: 1928392 - DNA, 15 bp, Homo sapiens
tcaggggactttgtc

SEQ ID NO: 1928393 - DNA, 15 bp, Homo sapiens
caggggactttgtcg

SEQ ID NO: 1928394 - DNA, 15 bp, Homo sapiens
aggggactttgtcgc

SEQ ID NO: 1928395 - DNA, 15 bp, Homo sapiens
ggggactttgtcgcc

SEQ ID NO: 1928396 - DNA, 15 bp, Homo sapiens
gggactttgtcgccc

SEQ ID NO: 1928397 - DNA, 15 bp, Homo sapiens
ggactttgtcgccct

SEQ ID NO: 1928398 - DNA, 15 bp, Homo sapiens
gactttgtcgccctg

SEQ ID NO: 1928399 - DNA, 15 bp, Homo sapiens
actttgtcgccctgt

SEQ ID NO: 1928400 - DNA, 15 bp, Homo sapiens
ctttgtcgccctgtg

SEQ ID NO: 1928401 - DNA, 15 bp, Homo sapiens
tttgtcgccctgtgc

SEQ ID NO: 1928402 - DNA, 15 bp, Homo sapiens
ttgtcgccctgtgca

SEQ ID NO: 1928403 - DNA, 15 bp, Homo sapiens
tgtcgccctgtgcac

SEQ ID NO: 1928404 - DNA, 15 bp, Homo sapiens
gtcgccctgtgcact

SEQ ID NO: 1928405 - DNA, 15 bp, Homo sapiens
tcgccctgtgcacta

SEQ ID NO: 1928406 - DNA, 15 bp, Homo sapiens
cgccctgtgcactaa

SEQ ID NO: 1928407 - DNA, 15 bp, Homo sapiens
gccctgtgcactaaa

SEQ ID NO: 1928408 - DNA, 15 bp, Homo sapiens
ccctgtgcactaaaa

SEQ ID NO: 1928409 - DNA, 15 bp, Homo sapiens
cctgtgcactaaaag

SEQ ID NO: 1928410 - DNA, 15 bp, Homo sapiens
ctgtgcactaaaagg

SEQ ID NO: 1928411 - DNA, 15 bp, Homo sapiens
tgtgcactaaaaggg

SEQ ID NO: 1928412 - DNA, 15 bp, Homo sapiens
gtgcactaaaagggc

SEQ ID NO: 1928413 - DNA, 15 bp, Homo sapiens
tgcactaaaagggcc

SEQ ID NO: 1928414 - DNA, 15 bp, Homo sapiens
gcactaaaagggcca

SEQ ID NO: 1928415 - DNA, 15 bp, Homo sapiens
cactaaaagggccag

SEQ ID NO: 1928416 - DNA, 15 bp, Homo sapiens
actaaaagggccaga

SEQ ID NO: 1928417 - DNA, 15 bp, Homo sapiens
ctaaaagggccagat

SEQ ID NO: 1928418 - DNA, 15 bp, Homo sapiens
taaaagggccagatt

SEQ ID NO: 1928419 - DNA, 15 bp, Homo sapiens
aaaagggccagattt

SEQ ID NO: 1928420 - DNA, 15 bp, Homo sapiens
aaagggccagatttt

SEQ ID NO: 1928421 - DNA, 15 bp, Homo sapiens
aagggccagattttc

SEQ ID NO: 1928422 - DNA, 15 bp, Homo sapiens
agggccagattttca

SEQ ID NO: 1928423 - DNA, 15 bp, Homo sapiens
gggccagattttcag

SEQ ID NO: 1928424 - DNA, 15 bp, Homo sapiens
ggccagattttcagc

SEQ ID NO: 1928425 - DNA, 15 bp, Homo sapiens
gccagattttcagca

SEQ ID NO: 1928426 - DNA, 15 bp, Homo sapiens
ccagattttcagcag

SEQ ID NO: 1928427 - DNA, 15 bp, Homo sapiens
cagattttcagcagc

SEQ ID NO: 1928428 - DNA, 15 bp, Homo sapiens
agattttcagcagcc

SEQ ID NO: 1928429 - DNA, 15 bp, Homo sapiens
gattttcagcagcca

SEQ ID NO: 1928430 - DNA, 15 bp, Homo sapiens
attttcagcagccaa

SEQ ID NO: 1928431 - DNA, 15 bp, Homo sapiens
ttttcagcagccaag

SEQ ID NO: 1928432 - DNA, 15 bp, Homo sapiens
tttcagcagccaagg

SEQ ID NO: 1928433 - DNA, 15 bp, Homo sapiens
ttcagcagccaagga

SEQ ID NO: 1928434 - DNA, 15 bp, Homo sapiens
tcagcagccaaggac

SEQ ID NO: 1928435 - DNA, 15 bp, Homo sapiens
cagcagccaaggaca

SEQ ID NO: 1928436 - DNA, 15 bp, Homo sapiens
agcagccaaggacat

SEQ ID NO: 1928437 - DNA, 15 bp, Homo sapiens
gcagccaaggacatc

SEQ ID NO: 1928438 - DNA, 15 bp, Homo sapiens
cagccaaggacatcc

SEQ ID NO: 1928439 - DNA, 15 bp, Homo sapiens
agccaaggacatcca

SEQ ID NO: 1928440 - DNA, 15 bp, Homo sapiens
gccaaggacatccat

SEQ ID NO: 1928441 - DNA, 15 bp, Homo sapiens
ccaaggacatccata

SEQ ID NO: 1928442 - DNA, 15 bp, Homo sapiens
caaggacatccatac

SEQ ID NO: 1928443 - DNA, 15 bp, Homo sapiens
aaggacatccatacc

SEQ ID NO: 1928444 - DNA, 15 bp, Homo sapiens
aggacatccataccc

SEQ ID NO: 1928445 - DNA, 15 bp, Homo sapiens
ggacatccataccca

SEQ ID NO: 1928446 - DNA, 15 bp, Homo sapiens
gacatccatacccaa

SEQ ID NO: 1928447 - DNA, 15 bp, Homo sapiens
acatccatacccaag

SEQ ID NO: 1928448 - DNA, 15 bp, Homo sapiens
catccatacccaagt

SEQ ID NO: 1928449 - DNA, 15 bp, Homo sapiens
atccatacccaagtg

SEQ ID NO: 1928450 - DNA, 15 bp, Homo sapiens
tccatacccaagtga

SEQ ID NO: 1928451 - DNA, 15 bp, Homo sapiens
ccatacccaagtgaa

SEQ ID NO: 1928452 - DNA, 15 bp, Homo sapiens
catacccaagtgaat

SEQ ID NO: 1928453 - DNA, 15 bp, Homo sapiens
atacccaagtgaatg

SEQ ID NO: 1928454 - DNA, 15 bp, Homo sapiens
tacccaagtgaatgt

SEQ ID NO: 1928455 - DNA, 15 bp, Homo sapiens
acccaagtgaatgtg

SEQ ID NO: 1928456 - DNA, 15 bp, Homo sapiens
cccaagtgaatgtga

SEQ ID NO: 1928457 - DNA, 15 bp, Homo sapiens
ccaagtgaatgtgat

SEQ ID NO: 1928458 - DNA, 15 bp, Homo sapiens
caagtgaatgtgatg

SEQ ID NO: 1928459 - DNA, 15 bp, Homo sapiens
aagtgaatgtgatgg

SEQ ID NO: 1928460 - DNA, 15 bp, Homo sapiens
agtgaatgtgatggg

SEQ ID NO: 1928461 - DNA, 15 bp, Homo sapiens
gtgaatgtgatggga

SEQ ID NO: 1928462 - DNA, 15 bp, Homo sapiens
tgaatgtgatgggac

SEQ ID NO: 1928463 - DNA, 15 bp, Homo sapiens
gaatgtgatgggact

SEQ ID NO: 1928464 - DNA, 15 bp, Homo sapiens
aatgtgatgggactt

SEQ ID NO: 1928465 - DNA, 15 bp, Homo sapiens
atgtgatgggactta

SEQ ID NO: 1928466 - DNA, 15 bp, Homo sapiens
tgtgatgggacttaa

SEQ ID NO: 1928467 - DNA, 15 bp, Homo sapiens
gtgatgggacttaaa

SEQ ID NO: 1928468 - DNA, 15 bp, Homo sapiens
tgatgggacttaaaa

SEQ ID NO: 1928469 - DNA, 15 bp, Homo sapiens
gatgggacttaaaag

SEQ ID NO: 1928470 - DNA, 15 bp, Homo sapiens
atgggacttaaaaga

SEQ ID NO: 1928471 - DNA, 15 bp, Homo sapiens
tgggacttaaaagaa

SEQ ID NO: 1928472 - DNA, 15 bp, Homo sapiens
gggacttaaaagaag

SEQ ID NO: 1928473 - DNA, 15 bp, Homo sapiens
ggacttaaaagaagt

SEQ ID NO: 1928474 - DNA, 15 bp, Homo sapiens
gacttaaaagaagtg

SEQ ID NO: 1928475 - DNA, 15 bp, Homo sapiens
acttaaaagaagtga

SEQ ID NO: 1928476 - DNA, 15 bp, Homo sapiens
cttaaaagaagtgaa

SEQ ID NO: 1928477 - DNA, 15 bp, Homo sapiens
ttaaaagaagtgaac

SEQ ID NO: 1928478 - DNA, 15 bp, Homo sapiens
taaaagaagtgaact

SEQ ID NO: 1928479 - DNA, 15 bp, Homo sapiens
aaaagaagtgaactg

SEQ ID NO: 1928480 - DNA, 15 bp, Homo sapiens
aaagaagtgaactga

SEQ ID NO: 1928481 - DNA, 15 bp, Homo sapiens
aagaagtgaactgag

SEQ ID NO: 1928482 - DNA, 15 bp, Homo sapiens
agaagtgaactgaga

SEQ ID NO: 1928483 - DNA, 15 bp, Homo sapiens
gaagtgaactgagac

SEQ ID NO: 1928484 - DNA, 15 bp, Homo sapiens
aagtgaactgagaca

SEQ ID NO: 1928485 - DNA, 15 bp, Homo sapiens
agtgaactgagacaa

SEQ ID NO: 1928486 - DNA, 15 bp, Homo sapiens
gtgaactgagacaat

SEQ ID NO: 1928487 - DNA, 15 bp, Homo sapiens
tgaactgagacaatt

SEQ ID NO: 1928488 - DNA, 15 bp, Homo sapiens
gaactgagacaattc

SEQ ID NO: 1928489 - DNA, 15 bp, Homo sapiens
aactgagacaattca

SEQ ID NO: 1928490 - DNA, 15 bp, Homo sapiens
actgagacaattcac

SEQ ID NO: 1928491 - DNA, 15 bp, Homo sapiens
ctgagacaattcact

SEQ ID NO: 1928492 - DNA, 15 bp, Homo sapiens
tgagacaattcactc

SEQ ID NO: 1928493 - DNA, 15 bp, Homo sapiens
gagacaattcactct

SEQ ID NO: 1928494 - DNA, 15 bp, Homo sapiens
agacaattcactctg

SEQ ID NO: 1928495 - DNA, 15 bp, Homo sapiens
gacaattcactctgg

SEQ ID NO: 1928496 - DNA, 15 bp, Homo sapiens
acaattcactctggc

SEQ ID NO: 1928497 - DNA, 15 bp, Homo sapiens
caattcactctggct

SEQ ID NO: 1928498 - DNA, 15 bp, Homo sapiens
aattcactctggctg

SEQ ID NO: 1928499 - DNA, 15 bp, Homo sapiens
attcactctggctgt

SEQ ID NO: 1928500 - DNA, 15 bp, Homo sapiens
ttcactctggctgtt

SEQ ID NO: 1928501 - DNA, 15 bp, Homo sapiens
tcactctggctgttt

SEQ ID NO: 1928502 - DNA, 15 bp, Homo sapiens
cactctggctgtttg

SEQ ID NO: 1928503 - DNA, 15 bp, Homo sapiens
actctggctgtttga

SEQ ID NO: 1928504 - DNA, 15 bp, Homo sapiens
ctctggctgtttgaa

SEQ ID NO: 1928505 - DNA, 15 bp, Homo sapiens
tctggctgtttgaac

SEQ ID NO: 1928506 - DNA, 15 bp, Homo sapiens
ctggctgtttgaaca

SEQ ID NO: 1928507 - DNA, 15 bp, Homo sapiens
tggctgtttgaacag

SEQ ID NO: 1928508 - DNA, 15 bp, Homo sapiens
ggctgtttgaacagc

SEQ ID NO: 1928509 - DNA, 15 bp, Homo sapiens
gctgtttgaacagca

SEQ ID NO: 1928510 - DNA, 15 bp, Homo sapiens
ctgtttgaacagcag

SEQ ID NO: 1928511 - DNA, 15 bp, Homo sapiens
tgtttgaacagcagc

SEQ ID NO: 1928512 - DNA, 15 bp, Homo sapiens
gtttgaacagcagcg

SEQ ID NO: 1928513 - DNA, 15 bp, Homo sapiens
tttgaacagcagcgt

SEQ ID NO: 1928514 - DNA, 15 bp, Homo sapiens
ttgaacagcagcgtt

SEQ ID NO: 1928515 - DNA, 15 bp, Homo sapiens
tgaacagcagcgttt

SEQ ID NO: 1928516 - DNA, 15 bp, Homo sapiens
gaacagcagcgtttc

SEQ ID NO: 1928517 - DNA, 15 bp, Homo sapiens
aacagcagcgtttca

SEQ ID NO: 1928518 - DNA, 15 bp, Homo sapiens
acagcagcgtttcat

SEQ ID NO: 1928519 - DNA, 15 bp, Homo sapiens
cagcagcgtttcata

SEQ ID NO: 1928520 - DNA, 15 bp, Homo sapiens
agcagcgtttcatag

SEQ ID NO: 1928521 - DNA, 15 bp, Homo sapiens
gcagcgtttcatagg

SEQ ID NO: 1928522 - DNA, 15 bp, Homo sapiens
cagcgtttcatagga

SEQ ID NO: 1928523 - DNA, 15 bp, Homo sapiens
agcgtttcataggaa

SEQ ID NO: 1928524 - DNA, 15 bp, Homo sapiens
gcgtttcataggaag

SEQ ID NO: 1928525 - DNA, 15 bp, Homo sapiens
cgtttcataggaaga

SEQ ID NO: 1928526 - DNA, 15 bp, Homo sapiens
gtttcataggaagag

SEQ ID NO: 1928527 - DNA, 15 bp, Homo sapiens
tttcataggaagaga

SEQ ID NO: 1928528 - DNA, 15 bp, Homo sapiens
ttcataggaagagaa

SEQ ID NO: 1928529 - DNA, 15 bp, Homo sapiens
tcataggaagagaaa

SEQ ID NO: 1928530 - DNA, 15 bp, Homo sapiens
cataggaagagaaaa

SEQ ID NO: 1928531 - DNA, 15 bp, Homo sapiens
ataggaagagaaaaa

SEQ ID NO: 1928532 - DNA, 15 bp, Homo sapiens
taggaagagaaaaaa

SEQ ID NO: 1928533 - DNA, 15 bp, Homo sapiens
aggaagagaaaaaaa

SEQ ID NO: 1928534 - DNA, 15 bp, Homo sapiens
ggaagagaaaaaaag

SEQ ID NO: 1928535 - DNA, 15 bp, Homo sapiens
gaagagaaaaaaaga

SEQ ID NO: 1928536 - DNA, 15 bp, Homo sapiens
aagagaaaaaaagat

SEQ ID NO: 1928537 - DNA, 15 bp, Homo sapiens
agagaaaaaaagatc

SEQ ID NO: 1928538 - DNA, 15 bp, Homo sapiens
gagaaaaaaagatca

SEQ ID NO: 1928539 - DNA, 15 bp, Homo sapiens
agaaaaaaagatcaa

SEQ ID NO: 1928540 - DNA, 15 bp, Homo sapiens
gaaaaaaagatcaat

SEQ ID NO: 1928541 - DNA, 15 bp, Homo sapiens
aaaaaaagatcaatc

SEQ ID NO: 1928542 - DNA, 15 bp, Homo sapiens
aaaaaagatcaatct

SEQ ID NO: 1928543 - DNA, 15 bp, Homo sapiens
aaaaagatcaatctt

SEQ ID NO: 1928544 - DNA, 15 bp, Homo sapiens
aaaagatcaatcttg

SEQ ID NO: 1928545 - DNA, 15 bp, Homo sapiens
aaagatcaatcttgt

SEQ ID NO: 1928546 - DNA, 15 bp, Homo sapiens
aagatcaatcttgta

SEQ ID NO: 1928547 - DNA, 15 bp, Homo sapiens
agatcaatcttgtat

SEQ ID NO: 1928548 - DNA, 15 bp, Homo sapiens
gatcaatcttgtatt

SEQ ID NO: 1928549 - DNA, 15 bp, Homo sapiens
atcaatcttgtattt

SEQ ID NO: 1928550 - DNA, 15 bp, Homo sapiens
tcaatcttgtatttt

SEQ ID NO: 1928551 - DNA, 15 bp, Homo sapiens
caatcttgtattttc

SEQ ID NO: 1928552 - DNA, 15 bp, Homo sapiens
aatcttgtattttct

SEQ ID NO: 1928553 - DNA, 15 bp, Homo sapiens
atcttgtattttctg

SEQ ID NO: 1928554 - DNA, 15 bp, Homo sapiens
tcttgtattttctga

SEQ ID NO: 1928555 - DNA, 15 bp, Homo sapiens
cttgtattttctgac

SEQ ID NO: 1928556 - DNA, 15 bp, Homo sapiens
ttgtattttctgacc

SEQ ID NO: 1928557 - DNA, 15 bp, Homo sapiens
tgtattttctgacca

SEQ ID NO: 1928558 - DNA, 15 bp, Homo sapiens
gtattttctgaccac

SEQ ID NO: 1928559 - DNA, 15 bp, Homo sapiens
tattttctgaccaca

SEQ ID NO: 1928560 - DNA, 15 bp, Homo sapiens
attttctgaccacat

SEQ ID NO: 1928561 - DNA, 15 bp, Homo sapiens
ttttctgaccacata

SEQ ID NO: 1928562 - DNA, 15 bp, Homo sapiens
tttctgaccacataa

SEQ ID NO: 1928563 - DNA, 15 bp, Homo sapiens
ttctgaccacataaa

SEQ ID NO: 1928564 - DNA, 15 bp, Homo sapiens
tctgaccacataaag

SEQ ID NO: 1928565 - DNA, 15 bp, Homo sapiens
ctgaccacataaagg

SEQ ID NO: 1928566 - DNA, 15 bp, Homo sapiens
tgaccacataaaggc

SEQ ID NO: 1928567 - DNA, 15 bp, Homo sapiens
gaccacataaaggct

SEQ ID NO: 1928568 - DNA, 15 bp, Homo sapiens
accacataaaggctt

SEQ ID NO: 1928569 - DNA, 15 bp, Homo sapiens
ccacataaaggcttc

SEQ ID NO: 1928570 - DNA, 15 bp, Homo sapiens
cacataaaggcttct

SEQ ID NO: 1928571 - DNA, 15 bp, Homo sapiens
acataaaggcttctt

SEQ ID NO: 1928572 - DNA, 15 bp, Homo sapiens
cataaaggcttcttc

SEQ ID NO: 1928573 - DNA, 15 bp, Homo sapiens
ataaaggcttcttct

SEQ ID NO: 1928574 - DNA, 15 bp, Homo sapiens
taaaggcttcttctc

SEQ ID NO: 1928575 - DNA, 15 bp, Homo sapiens
aaaggcttcttctct

SEQ ID NO: 1928576 - DNA, 15 bp, Homo sapiens
aaggcttcttctctt

SEQ ID NO: 1928577 - DNA, 15 bp, Homo sapiens
aggcttcttctcttt

SEQ ID NO: 1928578 - DNA, 15 bp, Homo sapiens
ggcttcttctctttg

SEQ ID NO: 1928579 - DNA, 15 bp, Homo sapiens
gcttcttctctttgt

SEQ ID NO: 1928580 - DNA, 15 bp, Homo sapiens
cttcttctctttgta

SEQ ID NO: 1928581 - DNA, 15 bp, Homo sapiens
ttcttctctttgtaa

SEQ ID NO: 1928582 - DNA, 15 bp, Homo sapiens
tcttctctttgtaat

SEQ ID NO: 1928583 - DNA, 15 bp, Homo sapiens
cttctctttgtaata

SEQ ID NO: 1928584 - DNA, 15 bp, Homo sapiens
ttctctttgtaataa

SEQ ID NO: 1928585 - DNA, 15 bp, Homo sapiens
tctctttgtaataaa

SEQ ID NO: 1928586 - DNA, 15 bp, Homo sapiens
ctctttgtaataaag

SEQ ID NO: 1928587 - DNA, 15 bp, Homo sapiens
tctttgtaataaagt

SEQ ID NO: 1928588 - DNA, 15 bp, Homo sapiens
ctttgtaataaagta

SEQ ID NO: 1928589 - DNA, 15 bp, Homo sapiens
tttgtaataaagtag

SEQ ID NO: 1928590 - DNA, 15 bp, Homo sapiens
ttgtaataaagtaga

SEQ ID NO: 1928591 - DNA, 15 bp, Homo sapiens
tgtaataaagtagaa

SEQ ID NO: 1928592 - DNA, 15 bp, Homo sapiens
gtaataaagtagaaa

SEQ ID NO: 1928593 - DNA, 15 bp, Homo sapiens
taataaagtagaaaa

SEQ ID NO: 1928594 - DNA, 15 bp, Homo sapiens
aataaagtagaaaag

SEQ ID NO: 1928595 - DNA, 15 bp, Homo sapiens
ataaagtagaaaagc

SEQ ID NO: 1928596 - DNA, 15 bp, Homo sapiens
taaagtagaaaagct

SEQ ID NO: 1928597 - DNA, 15 bp, Homo sapiens
aaagtagaaaagctc

SEQ ID NO: 1928598 - DNA, 15 bp, Homo sapiens
aagtagaaaagctct

SEQ ID NO: 1928599 - DNA, 15 bp, Homo sapiens
agtagaaaagctctc

SEQ ID NO: 1928600 - DNA, 15 bp, Homo sapiens
gtagaaaagctctcc

SEQ ID NO: 1928601 - DNA, 15 bp, Homo sapiens
tagaaaagctctcct

SEQ ID NO: 1928602 - DNA, 15 bp, Homo sapiens
agaaaagctctcctc

SEQ ID NO: 1928603 - DNA, 15 bp, Homo sapiens
gaaaagctctcctca

SEQ ID NO: 1928604 - DNA, 15 bp, Homo sapiens
aaaagctctcctcac

SEQ ID NO: 1928605 - DNA, 15 bp, Homo sapiens
aaagctctcctcact

SEQ ID NO: 1928606 - DNA, 15 bp, Homo sapiens
aagctctcctcactg

SEQ ID NO: 1928607 - DNA, 15 bp, Homo sapiens
agctctcctcactgc

SEQ ID NO: 1928608 - DNA, 15 bp, Homo sapiens
gctctcctcactgca

SEQ ID NO: 1928609 - DNA, 15 bp, Homo sapiens
ctctcctcactgcag

SEQ ID NO: 1928610 - DNA, 15 bp, Homo sapiens
tctcctcactgcagt

SEQ ID NO: 1928611 - DNA, 15 bp, Homo sapiens
ctcctcactgcagtg

SEQ ID NO: 1928612 - DNA, 15 bp, Homo sapiens
tcctcactgcagtgt

SEQ ID NO: 1928613 - DNA, 15 bp, Homo sapiens
cctcactgcagtgtt

SEQ ID NO: 1928614 - DNA, 15 bp, Homo sapiens
ctcactgcagtgttg

SEQ ID NO: 1928615 - DNA, 15 bp, Homo sapiens
tcactgcagtgttgg

SEQ ID NO: 1928616 - DNA, 15 bp, Homo sapiens
cactgcagtgttggc

SEQ ID NO: 1928617 - DNA, 15 bp, Homo sapiens
actgcagtgttggct

SEQ ID NO: 1928618 - DNA, 15 bp, Homo sapiens
ctgcagtgttggctt

SEQ ID NO: 1928619 - DNA, 15 bp, Homo sapiens
tgcagtgttggcttt

SEQ ID NO: 1928620 - DNA, 15 bp, Homo sapiens
gcagtgttggctttg

SEQ ID NO: 1928621 - DNA, 15 bp, Homo sapiens
cagtgttggctttga

SEQ ID NO: 1928622 - DNA, 15 bp, Homo sapiens
agtgttggctttgat

SEQ ID NO: 1928623 - DNA, 15 bp, Homo sapiens
gtgttggctttgatt

SEQ ID NO: 1928624 - DNA, 15 bp, Homo sapiens
tgttggctttgattt

SEQ ID NO: 1928625 - DNA, 15 bp, Homo sapiens
gttggctttgatttg

SEQ ID NO: 1928626 - DNA, 15 bp, Homo sapiens
ttggctttgatttga

SEQ ID NO: 1928627 - DNA, 15 bp, Homo sapiens
tggctttgatttgaa

SEQ ID NO: 1928628 - DNA, 15 bp, Homo sapiens
ggctttgatttgaaa

SEQ ID NO: 1928629 - DNA, 15 bp, Homo sapiens
gctttgatttgaaat

SEQ ID NO: 1928630 - DNA, 15 bp, Homo sapiens
ctttgatttgaaatt

SEQ ID NO: 1928631 - DNA, 15 bp, Homo sapiens
tttgatttgaaattg

SEQ ID NO: 1928632 - DNA, 15 bp, Homo sapiens
ttgatttgaaattgc

SEQ ID NO: 1928633 - DNA, 15 bp, Homo sapiens
tgatttgaaattgcg

SEQ ID NO: 1928634 - DNA, 15 bp, Homo sapiens
gatttgaaattgcga

SEQ ID NO: 1928635 - DNA, 15 bp, Homo sapiens
atttgaaattgcgaa

SEQ ID NO: 1928636 - DNA, 15 bp, Homo sapiens
tttgaaattgcgaaa

SEQ ID NO: 1928637 - DNA, 15 bp, Homo sapiens
ttgaaattgcgaaat

SEQ ID NO: 1928638 - DNA, 15 bp, Homo sapiens
tgaaattgcgaaatt

SEQ ID NO: 1928639 - DNA, 15 bp, Homo sapiens
gaaattgcgaaatta

SEQ ID NO: 1928640 - DNA, 15 bp, Homo sapiens
aaattgcgaaattat

SEQ ID NO: 1928641 - DNA, 15 bp, Homo sapiens
aattgcgaaattatt

SEQ ID NO: 1928642 - DNA, 15 bp, Homo sapiens
attgcgaaattattt

SEQ ID NO: 1928643 - DNA, 15 bp, Homo sapiens
ttgcgaaattatttc

SEQ ID NO: 1928644 - DNA, 15 bp, Homo sapiens
tgcgaaattatttct

SEQ ID NO: 1928645 - DNA, 15 bp, Homo sapiens
gcgaaattatttctt

SEQ ID NO: 1928646 - DNA, 15 bp, Homo sapiens
cgaaattatttcttc

SEQ ID NO: 1928647 - DNA, 15 bp, Homo sapiens
gaaattatttcttca

SEQ ID NO: 1928648 - DNA, 15 bp, Homo sapiens
aaattatttcttcaa

SEQ ID NO: 1928649 - DNA, 15 bp, Homo sapiens
aactaggacaaataa

SEQ ID NO: 1928650 - DNA, 15 bp, Homo sapiens
actaggacaaataag

SEQ ID NO: 1928651 - DNA, 15 bp, Homo sapiens
ctaggacaaataagg

SEQ ID NO: 1928652 - DNA, 15 bp, Homo sapiens
taggacaaataaggg

SEQ ID NO: 1928653 - DNA, 15 bp, Homo sapiens
aggacaaataaggga

SEQ ID NO: 1928654 - DNA, 15 bp, Homo sapiens
ggacaaataagggat

SEQ ID NO: 1928655 - DNA, 15 bp, Homo sapiens
gacaaataagggatt

SEQ ID NO: 1928656 - DNA, 15 bp, Homo sapiens
acaaataagggattt

SEQ ID NO: 1928657 - DNA, 15 bp, Homo sapiens
caaataagggatttc

SEQ ID NO: 1928658 - DNA, 15 bp, Homo sapiens
aaataagggatttca

SEQ ID NO: 1928659 - DNA, 15 bp, Homo sapiens
aataagggatttcag

SEQ ID NO: 1928660 - DNA, 15 bp, Homo sapiens
ataagggatttcagt

SEQ ID NO: 1928661 - DNA, 15 bp, Homo sapiens
taagggatttcagtg

SEQ ID NO: 1928662 - DNA, 15 bp, Homo sapiens
aagggatttcagtgc

SEQ ID NO: 1928663 - DNA, 15 bp, Homo sapiens
agggatttcagtgca

SEQ ID NO: 1928664 - DNA, 15 bp, Homo sapiens
gggatttcagtgcaa

SEQ ID NO: 1928665 - DNA, 15 bp, Homo sapiens
ggatttcagtgcaat

SEQ ID NO: 1928666 - DNA, 15 bp, Homo sapiens
gatttcagtgcaata

SEQ ID NO: 1928667 - DNA, 15 bp, Homo sapiens
atttcagtgcaatat

SEQ ID NO: 1928668 - DNA, 15 bp, Homo sapiens
tttcagtgcaatatt

SEQ ID NO: 1928669 - DNA, 15 bp, Homo sapiens
ttcagtgcaatatta

SEQ ID NO: 1928670 - DNA, 15 bp, Homo sapiens
tcagtgcaatattaa

SEQ ID NO: 1928671 - DNA, 15 bp, Homo sapiens
cagtgcaatattaaa

SEQ ID NO: 1928672 - DNA, 15 bp, Homo sapiens
agtgcaatattaaaa

SEQ ID NO: 1928673 - DNA, 15 bp, Homo sapiens
gtgcaatattaaaaa

SEQ ID NO: 1928674 - DNA, 15 bp, Homo sapiens
tgcaatattaaaaag

SEQ ID NO: 1928675 - DNA, 15 bp, Homo sapiens
gcaatattaaaaagt

SEQ ID NO: 1928676 - DNA, 15 bp, Homo sapiens
caatattaaaaagta

SEQ ID NO: 1928677 - DNA, 15 bp, Homo sapiens
aatattaaaaagtaa

SEQ ID NO: 1928678 - DNA, 15 bp, Homo sapiens
atattaaaaagtaac

SEQ ID NO: 1928679 - DNA, 15 bp, Homo sapiens
tattaaaaagtaact

SEQ ID NO: 1928680 - DNA, 15 bp, Homo sapiens
attaaaaagtaactg

SEQ ID NO: 1928681 - DNA, 15 bp, Homo sapiens
ttaaaaagtaactga

SEQ ID NO: 1928682 - DNA, 15 bp, Homo sapiens
taaaaagtaactgag

SEQ ID NO: 1928683 - DNA, 15 bp, Homo sapiens
aaaaagtaactgagt

SEQ ID NO: 1928684 - DNA, 15 bp, Homo sapiens
aaaagtaactgagtt

SEQ ID NO: 1928685 - DNA, 15 bp, Homo sapiens
aaagtaactgagtta

SEQ ID NO: 1928686 - DNA, 15 bp, Homo sapiens
aagtaactgagttaa

SEQ ID NO: 1928687 - DNA, 15 bp, Homo sapiens
agtaactgagttaat

SEQ ID NO: 1928688 - DNA, 15 bp, Homo sapiens
gtaactgagttaatt

SEQ ID NO: 1928689 - DNA, 15 bp, Homo sapiens
taactgagttaattc

SEQ ID NO: 1928690 - DNA, 15 bp, Homo sapiens
aactgagttaattca

SEQ ID NO: 1928691 - DNA, 15 bp, Homo sapiens
actgagttaattcag

SEQ ID NO: 1928692 - DNA, 15 bp, Homo sapiens
ctgagttaattcaga

SEQ ID NO: 1928693 - DNA, 15 bp, Homo sapiens
tgagttaattcagat

SEQ ID NO: 1928694 - DNA, 15 bp, Homo sapiens
gagttaattcagatt

SEQ ID NO: 1928695 - DNA, 15 bp, Homo sapiens
agttaattcagattt

SEQ ID NO: 1928696 - DNA, 15 bp, Homo sapiens
gttaattcagatttt

SEQ ID NO: 1928697 - DNA, 15 bp, Homo sapiens
ttaattcagattttt

SEQ ID NO: 1928698 - DNA, 15 bp, Homo sapiens
taattcagattttta

SEQ ID NO: 1928699 - DNA, 15 bp, Homo sapiens
aattcagatttttaa

SEQ ID NO: 1928700 - DNA, 15 bp, Homo sapiens
attcagatttttaaa

SEQ ID NO: 1928701 - DNA, 15 bp, Homo sapiens
ttcagatttttaaat

SEQ ID NO: 1928702 - DNA, 15 bp, Homo sapiens
tcagatttttaaatc

SEQ ID NO: 1928703 - DNA, 15 bp, Homo sapiens
cagatttttaaatca

SEQ ID NO: 1928704 - DNA, 15 bp, Homo sapiens
agatttttaaatcag

SEQ ID NO: 1928705 - DNA, 15 bp, Homo sapiens
gatttttaaatcagt

SEQ ID NO: 1928706 - DNA, 15 bp, Homo sapiens
atttttaaatcagtt

SEQ ID NO: 1928707 - DNA, 15 bp, Homo sapiens
tttttaaatcagttg

SEQ ID NO: 1928708 - DNA, 15 bp, Homo sapiens
ttttaaatcagttgc

SEQ ID NO: 1928709 - DNA, 15 bp, Homo sapiens
tttaaatcagttgct

SEQ ID NO: 1928710 - DNA, 15 bp, Homo sapiens
ttaaatcagttgctt

SEQ ID NO: 1928711 - DNA, 15 bp, Homo sapiens
taaatcagttgcttt

SEQ ID NO: 1928712 - DNA, 15 bp, Homo sapiens
aaatcagttgctttg

SEQ ID NO: 1928713 - DNA, 15 bp, Homo sapiens
aatcagttgctttgt

SEQ ID NO: 1928714 - DNA, 15 bp, Homo sapiens
atcagttgctttgta

SEQ ID NO: 1928715 - DNA, 15 bp, Homo sapiens
tcagttgctttgtaa

SEQ ID NO: 1928716 - DNA, 15 bp, Homo sapiens
cagttgctttgtaag

SEQ ID NO: 1928717 - DNA, 15 bp, Homo sapiens
agttgctttgtaagg

SEQ ID NO: 1928718 - DNA, 15 bp, Homo sapiens
gttgctttgtaaggc

SEQ ID NO: 1928719 - DNA, 15 bp, Homo sapiens
ttgctttgtaaggcg

SEQ ID NO: 1928720 - DNA, 15 bp, Homo sapiens
tgctttgtaaggcgt

SEQ ID NO: 1928721 - DNA, 15 bp, Homo sapiens
gctttgtaaggcgtt

SEQ ID NO: 1928722 - DNA, 15 bp, Homo sapiens
ctttgtaaggcgtta

SEQ ID NO: 1928723 - DNA, 15 bp, Homo sapiens
tttgtaaggcgttag

SEQ ID NO: 1928724 - DNA, 15 bp, Homo sapiens
ttgtaaggcgttaga

SEQ ID NO: 1928725 - DNA, 15 bp, Homo sapiens
tgtaaggcgttagat

SEQ ID NO: 1928726 - DNA, 15 bp, Homo sapiens
gtaaggcgttagatt

SEQ ID NO: 1928727 - DNA, 15 bp, Homo sapiens
taaggcgttagattt

SEQ ID NO: 1928728 - DNA, 15 bp, Homo sapiens
aaggcgttagattta

SEQ ID NO: 1928729 - DNA, 15 bp, Homo sapiens
aggcgttagatttaa

SEQ ID NO: 1928730 - DNA, 15 bp, Homo sapiens
ggcgttagatttaac

SEQ ID NO: 1928731 - DNA, 15 bp, Homo sapiens
gcgttagatttaact

SEQ ID NO: 1928732 - DNA, 15 bp, Homo sapiens
cgttagatttaactt

SEQ ID NO: 1928733 - DNA, 15 bp, Homo sapiens
gttagatttaacttc

SEQ ID NO: 1928734 - DNA, 15 bp, Homo sapiens
ttagatttaacttca

SEQ ID NO: 1928735 - DNA, 15 bp, Homo sapiens
tagatttaacttcat

SEQ ID NO: 1928736 - DNA, 15 bp, Homo sapiens
agatttaacttcata

SEQ ID NO: 1928737 - DNA, 15 bp, Homo sapiens
gatttaacttcatag

SEQ ID NO: 1928738 - DNA, 15 bp, Homo sapiens
atttaacttcatagg

SEQ ID NO: 1928739 - DNA, 15 bp, Homo sapiens
tttaacttcatagga

SEQ ID NO: 1928740 - DNA, 15 bp, Homo sapiens
ttaacttcataggac

SEQ ID NO: 1928741 - DNA, 15 bp, Homo sapiens
taacttcataggaca

SEQ ID NO: 1928742 - DNA, 15 bp, Homo sapiens
aacttcataggacat

SEQ ID NO: 1928743 - DNA, 15 bp, Homo sapiens
acttcataggacata

SEQ ID NO: 1928744 - DNA, 15 bp, Homo sapiens
cttcataggacataa

SEQ ID NO: 1928745 - DNA, 15 bp, Homo sapiens
ttcataggacataac

SEQ ID NO: 1928746 - DNA, 15 bp, Homo sapiens
tcataggacataacc

SEQ ID NO: 1928747 - DNA, 15 bp, Homo sapiens
cataggacataacct

SEQ ID NO: 1928748 - DNA, 15 bp, Homo sapiens
ataggacataaccta

SEQ ID NO: 1928749 - DNA, 15 bp, Homo sapiens
taggacataacctag

SEQ ID NO: 1928750 - DNA, 15 bp, Homo sapiens
aggacataacctagg

SEQ ID NO: 1928751 - DNA, 15 bp, Homo sapiens
ggacataacctagga

SEQ ID NO: 1928752 - DNA, 15 bp, Homo sapiens
gacataacctaggag

SEQ ID NO: 1928753 - DNA, 15 bp, Homo sapiens
acataacctaggaga

SEQ ID NO: 1928754 - DNA, 15 bp, Homo sapiens
cataacctaggagag

SEQ ID NO: 1928755 - DNA, 15 bp, Homo sapiens
ataacctaggagaga

SEQ ID NO: 1928756 - DNA, 15 bp, Homo sapiens
taacctaggagagac

SEQ ID NO: 1928757 - DNA, 15 bp, Homo sapiens
aacctaggagagact

SEQ ID NO: 1928758 - DNA, 15 bp, Homo sapiens
acctaggagagactg

SEQ ID NO: 1928759 - DNA, 15 bp, Homo sapiens
cctaggagagactgg

SEQ ID NO: 1928760 - DNA, 15 bp, Homo sapiens
ctaggagagactggc

SEQ ID NO: 1928761 - DNA, 15 bp, Homo sapiens
taggagagactggct

SEQ ID NO: 1928762 - DNA, 15 bp, Homo sapiens
aggagagactggctg

SEQ ID NO: 1928763 - DNA, 15 bp, Homo sapiens
ggagagactggctgg

SEQ ID NO: 1928764 - DNA, 15 bp, Homo sapiens
gagagactggctgga

SEQ ID NO: 1928765 - DNA, 15 bp, Homo sapiens
agagactggctggat

SEQ ID NO: 1928766 - DNA, 15 bp, Homo sapiens
gagactggctggata

SEQ ID NO: 1928767 - DNA, 15 bp, Homo sapiens
agactggctggatag

SEQ ID NO: 1928768 - DNA, 15 bp, Homo sapiens
gactggctggatagt

SEQ ID NO: 1928769 - DNA, 15 bp, Homo sapiens
actggctggatagtg

SEQ ID NO: 1928770 - DNA, 15 bp, Homo sapiens
ctggctggatagtgt

SEQ ID NO: 1928771 - DNA, 15 bp, Homo sapiens
tggctggatagtgtt

SEQ ID NO: 1928772 - DNA, 15 bp, Homo sapiens
ggctggatagtgttc

SEQ ID NO: 1928773 - DNA, 15 bp, Homo sapiens
gctggatagtgttct

SEQ ID NO: 1928774 - DNA, 15 bp, Homo sapiens
ctggatagtgttctg

SEQ ID NO: 1928775 - DNA, 15 bp, Homo sapiens
tggatagtgttctgt

SEQ ID NO: 1928776 - DNA, 15 bp, Homo sapiens
ggatagtgttctgtg

SEQ ID NO: 1928777 - DNA, 15 bp, Homo sapiens
gatagtgttctgtgc

SEQ ID NO: 1928778 - DNA, 15 bp, Homo sapiens
atagtgttctgtgca

SEQ ID NO: 1928779 - DNA, 15 bp, Homo sapiens
tagtgttctgtgcat

SEQ ID NO: 1928780 - DNA, 15 bp, Homo sapiens
agtgttctgtgcata

SEQ ID NO: 1928781 - DNA, 15 bp, Homo sapiens
gtgttctgtgcataa

SEQ ID NO: 1928782 - DNA, 15 bp, Homo sapiens
tgttctgtgcataag

SEQ ID NO: 1928783 - DNA, 15 bp, Homo sapiens
gttctgtgcataagg

SEQ ID NO: 1928784 - DNA, 15 bp, Homo sapiens
ttctgtgcataaggt

SEQ ID NO: 1928785 - DNA, 15 bp, Homo sapiens
tctgtgcataaggta

SEQ ID NO: 1928786 - DNA, 15 bp, Homo sapiens
ctgtgcataaggtaa

SEQ ID NO: 1928787 - DNA, 15 bp, Homo sapiens
tgtgcataaggtaag

SEQ ID NO: 1928788 - DNA, 15 bp, Homo sapiens
gtgcataaggtaagg

SEQ ID NO: 1928789 - DNA, 15 bp, Homo sapiens
tgcataaggtaagga

SEQ ID NO: 1928790 - DNA, 15 bp, Homo sapiens
gcataaggtaaggag

SEQ ID NO: 1928791 - DNA, 15 bp, Homo sapiens
cataaggtaaggagt

SEQ ID NO: 1928792 - DNA, 15 bp, Homo sapiens
ataaggtaaggagtt

SEQ ID NO: 1928793 - DNA, 15 bp, Homo sapiens
taaggtaaggagttg

SEQ ID NO: 1928794 - DNA, 15 bp, Homo sapiens
aaggtaaggagttga

SEQ ID NO: 1928795 - DNA, 15 bp, Homo sapiens
aggtaaggagttgaa

SEQ ID NO: 1928796 - DNA, 15 bp, Homo sapiens
ggtaaggagttgaat

SEQ ID NO: 1928797 - DNA, 15 bp, Homo sapiens
gtaaggagttgaatg

SEQ ID NO: 1928798 - DNA, 15 bp, Homo sapiens
taaggagttgaatgt

SEQ ID NO: 1928799 - DNA, 15 bp, Homo sapiens
aaggagttgaatgtc

SEQ ID NO: 1928800 - DNA, 15 bp, Homo sapiens
aggagttgaatgtct

SEQ ID NO: 1928801 - DNA, 15 bp, Homo sapiens
ggagttgaatgtctt

SEQ ID NO: 1928802 - DNA, 15 bp, Homo sapiens
gagttgaatgtctta

SEQ ID NO: 1928803 - DNA, 15 bp, Homo sapiens
agttgaatgtcttaa

SEQ ID NO: 1928804 - DNA, 15 bp, Homo sapiens
gttgaatgtcttaat

SEQ ID NO: 1928805 - DNA, 15 bp, Homo sapiens
ttgaatgtcttaatg

SEQ ID NO: 1928806 - DNA, 15 bp, Homo sapiens
tgaatgtcttaatgt

SEQ ID NO: 1928807 - DNA, 15 bp, Homo sapiens
gaatgtcttaatgtt

SEQ ID NO: 1928808 - DNA, 15 bp, Homo sapiens
aatgtcttaatgttc

SEQ ID NO: 1928809 - DNA, 15 bp, Homo sapiens
atgtcttaatgttcc

SEQ ID NO: 1928810 - DNA, 15 bp, Homo sapiens
tgtcttaatgttcct

SEQ ID NO: 1928811 - DNA, 15 bp, Homo sapiens
gtcttaatgttcctg

SEQ ID NO: 1928812 - DNA, 15 bp, Homo sapiens
tcttaatgttcctgt

SEQ ID NO: 1928813 - DNA, 15 bp, Homo sapiens
cttaatgttcctgtg

SEQ ID NO: 1928814 - DNA, 15 bp, Homo sapiens
ttaatgttcctgtgg

SEQ ID NO: 1928815 - DNA, 15 bp, Homo sapiens
taatgttcctgtggc

SEQ ID NO: 1928816 - DNA, 15 bp, Homo sapiens
aatgttcctgtggct

SEQ ID NO: 1928817 - DNA, 15 bp, Homo sapiens
atgttcctgtggctc

SEQ ID NO: 1928818 - DNA, 15 bp, Homo sapiens
tgttcctgtggctca

SEQ ID NO: 1928819 - DNA, 15 bp, Homo sapiens
gttcctgtggctcat

SEQ ID NO: 1928820 - DNA, 15 bp, Homo sapiens
ttcctgtggctcatt

SEQ ID NO: 1928821 - DNA, 15 bp, Homo sapiens
tcctgtggctcattg

SEQ ID NO: 1928822 - DNA, 15 bp, Homo sapiens
cctgtggctcattga

SEQ ID NO: 1928823 - DNA, 15 bp, Homo sapiens
ctgtggctcattgaa

SEQ ID NO: 1928824 - DNA, 15 bp, Homo sapiens
tgtggctcattgaaa

SEQ ID NO: 1928825 - DNA, 15 bp, Homo sapiens
gtggctcattgaaaa

SEQ ID NO: 1928826 - DNA, 15 bp, Homo sapiens
tggctcattgaaaaa

SEQ ID NO: 1928827 - DNA, 15 bp, Homo sapiens
ggctcattgaaaaag

SEQ ID NO: 1928828 - DNA, 15 bp, Homo sapiens
gctcattgaaaaagt

SEQ ID NO: 1928829 - DNA, 15 bp, Homo sapiens
ctcattgaaaaagtg

SEQ ID NO: 1928830 - DNA, 15 bp, Homo sapiens
tcattgaaaaagtgt

SEQ ID NO: 1928831 - DNA, 15 bp, Homo sapiens
cattgaaaaagtgtt

SEQ ID NO: 1928832 - DNA, 15 bp, Homo sapiens
attgaaaaagtgtta

SEQ ID NO: 1928833 - DNA, 15 bp, Homo sapiens
ttgaaaaagtgttaa

SEQ ID NO: 1928834 - DNA, 15 bp, Homo sapiens
tgaaaaagtgttaaa

SEQ ID NO: 1928835 - DNA, 15 bp, Homo sapiens
gaaaaagtgttaaag

SEQ ID NO: 1928836 - DNA, 15 bp, Homo sapiens
aaaaagtgttaaagt

SEQ ID NO: 1928837 - DNA, 15 bp, Homo sapiens
aaaagtgttaaagta

SEQ ID NO: 1928838 - DNA, 15 bp, Homo sapiens
aaagtgttaaagtaa

SEQ ID NO: 1928839 - DNA, 15 bp, Homo sapiens
aagtgttaaagtaag

SEQ ID NO: 1928840 - DNA, 15 bp, Homo sapiens
agtgttaaagtaagt

SEQ ID NO: 1928841 - DNA, 15 bp, Homo sapiens
gtgttaaagtaagtg

SEQ ID NO: 1928842 - DNA, 15 bp, Homo sapiens
tgttaaagtaagtga

SEQ ID NO: 1928843 - DNA, 15 bp, Homo sapiens
gttaaagtaagtgag

SEQ ID NO: 1928844 - DNA, 15 bp, Homo sapiens
ttaaagtaagtgaga

SEQ ID NO: 1928845 - DNA, 15 bp, Homo sapiens
taaagtaagtgagat

SEQ ID NO: 1928846 - DNA, 15 bp, Homo sapiens
aaagtaagtgagata

SEQ ID NO: 1928847 - DNA, 15 bp, Homo sapiens
aagtaagtgagataa

SEQ ID NO: 1928848 - DNA, 15 bp, Homo sapiens
agtaagtgagataat

SEQ ID NO: 1928849 - DNA, 15 bp, Homo sapiens
gtaagtgagataatt

SEQ ID NO: 1928850 - DNA, 15 bp, Homo sapiens
taagtgagataatta

SEQ ID NO: 1928851 - DNA, 15 bp, Homo sapiens
aagtgagataattac

SEQ ID NO: 1928852 - DNA, 15 bp, Homo sapiens
agtgagataattact

SEQ ID NO: 1928853 - DNA, 15 bp, Homo sapiens
gtgagataattactg

SEQ ID NO: 1928854 - DNA, 15 bp, Homo sapiens
tgagataattactgt

SEQ ID NO: 1928855 - DNA, 15 bp, Homo sapiens
gagataattactgta

SEQ ID NO: 1928856 - DNA, 15 bp, Homo sapiens
agataattactgtat

SEQ ID NO: 1928857 - DNA, 15 bp, Homo sapiens
gataattactgtatt

SEQ ID NO: 1928858 - DNA, 15 bp, Homo sapiens
ataattactgtattt

SEQ ID NO: 1928859 - DNA, 15 bp, Homo sapiens
taattactgtatttc

SEQ ID NO: 1928860 - DNA, 15 bp, Homo sapiens
aattactgtatttca

SEQ ID NO: 1928861 - DNA, 15 bp, Homo sapiens
attactgtatttcag

SEQ ID NO: 1928862 - DNA, 15 bp, Homo sapiens
ttactgtatttcagc

SEQ ID NO: 1928863 - DNA, 15 bp, Homo sapiens
tactgtatttcagca

SEQ ID NO: 1928864 - DNA, 15 bp, Homo sapiens
actgtatttcagcaa

SEQ ID NO: 1928865 - DNA, 15 bp, Homo sapiens
ctgtatttcagcaaa

SEQ ID NO: 1928866 - DNA, 15 bp, Homo sapiens
tgtatttcagcaaat

SEQ ID NO: 1928867 - DNA, 15 bp, Homo sapiens
gtatttcagcaaatc

SEQ ID NO: 1928868 - DNA, 15 bp, Homo sapiens
tatttcagcaaatct

SEQ ID NO: 1928869 - DNA, 15 bp, Homo sapiens
atttcagcaaatcta

SEQ ID NO: 1928870 - DNA, 15 bp, Homo sapiens
tttcagcaaatctaa

SEQ ID NO: 1928871 - DNA, 15 bp, Homo sapiens
ttcagcaaatctaat

SEQ ID NO: 1928872 - DNA, 15 bp, Homo sapiens
tcagcaaatctaatt

SEQ ID NO: 1928873 - DNA, 15 bp, Homo sapiens
cagcaaatctaattg

SEQ ID NO: 1928874 - DNA, 15 bp, Homo sapiens
agcaaatctaattgc

SEQ ID NO: 1928875 - DNA, 15 bp, Homo sapiens
gcaaatctaattgcc

SEQ ID NO: 1928876 - DNA, 15 bp, Homo sapiens
caaatctaattgcca

SEQ ID NO: 1928877 - DNA, 15 bp, Homo sapiens
aaatctaattgccat

SEQ ID NO: 1928878 - DNA, 15 bp, Homo sapiens
aatctaattgccatc

SEQ ID NO: 1928879 - DNA, 15 bp, Homo sapiens
atctaattgccatca

SEQ ID NO: 1928880 - DNA, 15 bp, Homo sapiens
tctaattgccatcaa

SEQ ID NO: 1928881 - DNA, 15 bp, Homo sapiens
ctaattgccatcaat

SEQ ID NO: 1928882 - DNA, 15 bp, Homo sapiens
taattgccatcaatt

SEQ ID NO: 1928883 - DNA, 15 bp, Homo sapiens
aattgccatcaattg

SEQ ID NO: 1928884 - DNA, 15 bp, Homo sapiens
attgccatcaattgt

SEQ ID NO: 1928885 - DNA, 15 bp, Homo sapiens
ttgccatcaattgta

SEQ ID NO: 1928886 - DNA, 15 bp, Homo sapiens
tgccatcaattgtaa

SEQ ID NO: 1928887 - DNA, 15 bp, Homo sapiens
gccatcaattgtaag

SEQ ID NO: 1928888 - DNA, 15 bp, Homo sapiens
ccatcaattgtaagg

SEQ ID NO: 1928889 - DNA, 15 bp, Homo sapiens
catcaattgtaaggg

SEQ ID NO: 1928890 - DNA, 15 bp, Homo sapiens
atcaattgtaaggga

SEQ ID NO: 1928891 - DNA, 15 bp, Homo sapiens
tcaattgtaagggac

SEQ ID NO: 1928892 - DNA, 15 bp, Homo sapiens
caattgtaagggaca

SEQ ID NO: 1928893 - DNA, 15 bp, Homo sapiens
aattgtaagggacac

SEQ ID NO: 1928894 - DNA, 15 bp, Homo sapiens
attgtaagggacacc

SEQ ID NO: 1928895 - DNA, 15 bp, Homo sapiens
ttgtaagggacacca

SEQ ID NO: 1928896 - DNA, 15 bp, Homo sapiens
tgtaagggacaccat

SEQ ID NO: 1928897 - DNA, 15 bp, Homo sapiens
gtaagggacaccatt

SEQ ID NO: 1928898 - DNA, 15 bp, Homo sapiens
taagggacaccattt

SEQ ID NO: 1928899 - DNA, 15 bp, Homo sapiens
aagggacaccatttt

SEQ ID NO: 1928900 - DNA, 15 bp, Homo sapiens
agggacaccatttta

SEQ ID NO: 1928901 - DNA, 15 bp, Homo sapiens
gggacaccattttat

SEQ ID NO: 1928902 - DNA, 15 bp, Homo sapiens
ggacaccattttatg

SEQ ID NO: 1928903 - DNA, 15 bp, Homo sapiens
gacaccattttatgt

SEQ ID NO: 1928904 - DNA, 15 bp, Homo sapiens
acaccattttatgta

SEQ ID NO: 1928905 - DNA, 15 bp, Homo sapiens
caccattttatgtac

SEQ ID NO: 1928906 - DNA, 15 bp, Homo sapiens
accattttatgtacc

SEQ ID NO: 1928907 - DNA, 15 bp, Homo sapiens
ccattttatgtacca

SEQ ID NO: 1928908 - DNA, 15 bp, Homo sapiens
cattttatgtaccac

SEQ ID NO: 1928909 - DNA, 15 bp, Homo sapiens
attttatgtaccact

SEQ ID NO: 1928910 - DNA, 15 bp, Homo sapiens
ttttatgtaccacta

SEQ ID NO: 1928911 - DNA, 15 bp, Homo sapiens
tttatgtaccactaa

SEQ ID NO: 1928912 - DNA, 15 bp, Homo sapiens
ttatgtaccactaag

SEQ ID NO: 1928913 - DNA, 15 bp, Homo sapiens
tatgtaccactaaga

SEQ ID NO: 1928914 - DNA, 15 bp, Homo sapiens
atgtaccactaagac

SEQ ID NO: 1928915 - DNA, 15 bp, Homo sapiens
tgtaccactaagaca

SEQ ID NO: 1928916 - DNA, 15 bp, Homo sapiens
gtaccactaagacaa

SEQ ID NO: 1928917 - DNA, 15 bp, Homo sapiens
taccactaagacaag

SEQ ID NO: 1928918 - DNA, 15 bp, Homo sapiens
accactaagacaagc

SEQ ID NO: 1928919 - DNA, 15 bp, Homo sapiens
ccactaagacaagct

SEQ ID NO: 1928920 - DNA, 15 bp, Homo sapiens
cactaagacaagctg

SEQ ID NO: 1928921 - DNA, 15 bp, Homo sapiens
actaagacaagctgc

SEQ ID NO: 1928922 - DNA, 15 bp, Homo sapiens
ctaagacaagctgcc

SEQ ID NO: 1928923 - DNA, 15 bp, Homo sapiens
taagacaagctgcca

SEQ ID NO: 1928924 - DNA, 15 bp, Homo sapiens
aagacaagctgccaa

SEQ ID NO: 1928925 - DNA, 15 bp, Homo sapiens
agacaagctgccaat

SEQ ID NO: 1928926 - DNA, 15 bp, Homo sapiens
gacaagctgccaatt

SEQ ID NO: 1928927 - DNA, 15 bp, Homo sapiens
acaagctgccaatta

SEQ ID NO: 1928928 - DNA, 15 bp, Homo sapiens
caagctgccaattac

SEQ ID NO: 1928929 - DNA, 15 bp, Homo sapiens
aagctgccaattaca

SEQ ID NO: 1928930 - DNA, 15 bp, Homo sapiens
agctgccaattacag

SEQ ID NO: 1928931 - DNA, 15 bp, Homo sapiens
gctgccaattacaga

SEQ ID NO: 1928932 - DNA, 15 bp, Homo sapiens
ctgccaattacagaa

SEQ ID NO: 1928933 - DNA, 15 bp, Homo sapiens
tgccaattacagaat

SEQ ID NO: 1928934 - DNA, 15 bp, Homo sapiens
gccaattacagaatg

SEQ ID NO: 1928935 - DNA, 15 bp, Homo sapiens
ccaattacagaatgt

SEQ ID NO: 1928936 - DNA, 15 bp, Homo sapiens
caattacagaatgta

SEQ ID NO: 1928937 - DNA, 15 bp, Homo sapiens
aattacagaatgtat

SEQ ID NO: 1928938 - DNA, 15 bp, Homo sapiens
attacagaatgtatc

SEQ ID NO: 1928939 - DNA, 15 bp, Homo sapiens
ttacagaatgtatct

SEQ ID NO: 1928940 - DNA, 15 bp, Homo sapiens
tacagaatgtatcta

SEQ ID NO: 1928941 - DNA, 15 bp, Homo sapiens
acagaatgtatctat

SEQ ID NO: 1928942 - DNA, 15 bp, Homo sapiens
cagaatgtatctatt

SEQ ID NO: 1928943 - DNA, 15 bp, Homo sapiens
agaatgtatctatta

SEQ ID NO: 1928944 - DNA, 15 bp, Homo sapiens
gaatgtatctattat

SEQ ID NO: 1928945 - DNA, 15 bp, Homo sapiens
aatgtatctattatg

SEQ ID NO: 1928946 - DNA, 15 bp, Homo sapiens
atgtatctattatgt

SEQ ID NO: 1928947 - DNA, 15 bp, Homo sapiens
tgtatctattatgtg

SEQ ID NO: 1928948 - DNA, 15 bp, Homo sapiens
gtatctattatgtga

SEQ ID NO: 1928949 - DNA, 15 bp, Homo sapiens
tatctattatgtgaa

SEQ ID NO: 1928950 - DNA, 15 bp, Homo sapiens
atctattatgtgaag

SEQ ID NO: 1928951 - DNA, 15 bp, Homo sapiens
tctattatgtgaaga

SEQ ID NO: 1928952 - DNA, 15 bp, Homo sapiens
ctattatgtgaagaa

SEQ ID NO: 1928953 - DNA, 15 bp, Homo sapiens
tattatgtgaagaaa

SEQ ID NO: 1928954 - DNA, 15 bp, Homo sapiens
attatgtgaagaaag

SEQ ID NO: 1928955 - DNA, 15 bp, Homo sapiens
ttatgtgaagaaaga

SEQ ID NO: 1928956 - DNA, 15 bp, Homo sapiens
tatgtgaagaaagaa

SEQ ID NO: 1928957 - DNA, 15 bp, Homo sapiens
atgtgaagaaagaac

SEQ ID NO: 1928958 - DNA, 15 bp, Homo sapiens
tgtgaagaaagaacg

SEQ ID NO: 1928959 - DNA, 15 bp, Homo sapiens
gtgaagaaagaacgt

SEQ ID NO: 1928960 - DNA, 15 bp, Homo sapiens
tgaagaaagaacgtg

SEQ ID NO: 1928961 - DNA, 15 bp, Homo sapiens
gaagaaagaacgtgc

SEQ ID NO: 1928962 - DNA, 15 bp, Homo sapiens
aagaaagaacgtgca

SEQ ID NO: 1928963 - DNA, 15 bp, Homo sapiens
agaaagaacgtgcat

SEQ ID NO: 1928964 - DNA, 15 bp, Homo sapiens
gaaagaacgtgcatc

SEQ ID NO: 1928965 - DNA, 15 bp, Homo sapiens
aaagaacgtgcatct

SEQ ID NO: 1928966 - DNA, 15 bp, Homo sapiens
aagaacgtgcatctt

SEQ ID NO: 1928967 - DNA, 15 bp, Homo sapiens
agaacgtgcatctta

SEQ ID NO: 1928968 - DNA, 15 bp, Homo sapiens
gaacgtgcatcttag

SEQ ID NO: 1928969 - DNA, 15 bp, Homo sapiens
aacgtgcatcttaga

SEQ ID NO: 1928970 - DNA, 15 bp, Homo sapiens
acgtgcatcttagaa

SEQ ID NO: 1928971 - DNA, 15 bp, Homo sapiens
cgtgcatcttagaat

SEQ ID NO: 1928972 - DNA, 15 bp, Homo sapiens
gtgcatcttagaatt

SEQ ID NO: 1928973 - DNA, 15 bp, Homo sapiens
tgcatcttagaattg

SEQ ID NO: 1928974 - DNA, 15 bp, Homo sapiens
gcatcttagaattga

SEQ ID NO: 1928975 - DNA, 15 bp, Homo sapiens
catcttagaattgat

SEQ ID NO: 1928976 - DNA, 15 bp, Homo sapiens
atcttagaattgatg

SEQ ID NO: 1928977 - DNA, 15 bp, Homo sapiens
tcttagaattgatga

SEQ ID NO: 1928978 - DNA, 15 bp, Homo sapiens
cttagaattgatgag

SEQ ID NO: 1928979 - DNA, 15 bp, Homo sapiens
ttagaattgatgaga

SEQ ID NO: 1928980 - DNA, 15 bp, Homo sapiens
tagaattgatgagat

SEQ ID NO: 1928981 - DNA, 15 bp, Homo sapiens
agaattgatgagatg

SEQ ID NO: 1928982 - DNA, 15 bp, Homo sapiens
gaattgatgagatgt

SEQ ID NO: 1928983 - DNA, 15 bp, Homo sapiens
aattgatgagatgta

SEQ ID NO: 1928984 - DNA, 15 bp, Homo sapiens
attgatgagatgtag

SEQ ID NO: 1928985 - DNA, 15 bp, Homo sapiens
ttgatgagatgtagg

SEQ ID NO: 1928986 - DNA, 15 bp, Homo sapiens
tgatgagatgtaggt

SEQ ID NO: 1928987 - DNA, 15 bp, Homo sapiens
gatgagatgtaggtc

SEQ ID NO: 1928988 - DNA, 15 bp, Homo sapiens
atgagatgtaggtct

SEQ ID NO: 1928989 - DNA, 15 bp, Homo sapiens
tgagatgtaggtctt

SEQ ID NO: 1928990 - DNA, 15 bp, Homo sapiens
gagatgtaggtcttg

SEQ ID NO: 1928991 - DNA, 15 bp, Homo sapiens
agatgtaggtcttgg

SEQ ID NO: 1928992 - DNA, 15 bp, Homo sapiens
gatgtaggtcttgga

SEQ ID NO: 1928993 - DNA, 15 bp, Homo sapiens
atgtaggtcttggag

SEQ ID NO: 1928994 - DNA, 15 bp, Homo sapiens
tgtaggtcttggaga

SEQ ID NO: 1928995 - DNA, 15 bp, Homo sapiens
gtaggtcttggagac

SEQ ID NO: 1928996 - DNA, 15 bp, Homo sapiens
taggtcttggagaca

SEQ ID NO: 1928997 - DNA, 15 bp, Homo sapiens
aggtcttggagacaa

SEQ ID NO: 1928998 - DNA, 15 bp, Homo sapiens
ggtcttggagacaac

SEQ ID NO: 1928999 - DNA, 15 bp, Homo sapiens
gtcttggagacaact

SEQ ID NO: 1929000 - DNA, 15 bp, Homo sapiens
tcttggagacaacta

SEQ ID NO: 1929001 - DNA, 15 bp, Homo sapiens
cttggagacaactaa

SEQ ID NO: 1929002 - DNA, 15 bp, Homo sapiens
ttggagacaactaaa

SEQ ID NO: 1929003 - DNA, 15 bp, Homo sapiens
tggagacaactaaag

SEQ ID NO: 1929004 - DNA, 15 bp, Homo sapiens
ggagacaactaaaga

SEQ ID NO: 1929005 - DNA, 15 bp, Homo sapiens
gagacaactaaagaa

SEQ ID NO: 1929006 - DNA, 15 bp, Homo sapiens
agacaactaaagaat

SEQ ID NO: 1929007 - DNA, 15 bp, Homo sapiens
gacaactaaagaata

SEQ ID NO: 1929008 - DNA, 15 bp, Homo sapiens
acaactaaagaatac

SEQ ID NO: 1929009 - DNA, 15 bp, Homo sapiens
caactaaagaatact

SEQ ID NO: 1929010 - DNA, 15 bp, Homo sapiens
aactaaagaatacta

SEQ ID NO: 1929011 - DNA, 15 bp, Homo sapiens
actaaagaatactaa

SEQ ID NO: 1929012 - DNA, 15 bp, Homo sapiens
ctaaagaatactaag

SEQ ID NO: 1929013 - DNA, 15 bp, Homo sapiens
taaagaatactaagg

SEQ ID NO: 1929014 - DNA, 15 bp, Homo sapiens
aaagaatactaaggg

SEQ ID NO: 1929015 - DNA, 15 bp, Homo sapiens
aagaatactaagggg

SEQ ID NO: 1929016 - DNA, 15 bp, Homo sapiens
agaatactaagggga

SEQ ID NO: 1929017 - DNA, 15 bp, Homo sapiens
gaatactaaggggag

SEQ ID NO: 1929018 - DNA, 15 bp, Homo sapiens
aatactaaggggagg

SEQ ID NO: 1929019 - DNA, 15 bp, Homo sapiens
atactaaggggaggc

SEQ ID NO: 1929020 - DNA, 15 bp, Homo sapiens
tactaaggggaggca

SEQ ID NO: 1929021 - DNA, 15 bp, Homo sapiens
actaaggggaggcat

SEQ ID NO: 1929022 - DNA, 15 bp, Homo sapiens
ctaaggggaggcatg

SEQ ID NO: 1929023 - DNA, 15 bp, Homo sapiens
taaggggaggcatga

SEQ ID NO: 1929024 - DNA, 15 bp, Homo sapiens
aaggggaggcatgac

SEQ ID NO: 1929025 - DNA, 15 bp, Homo sapiens
aggggaggcatgaca

SEQ ID NO: 1929026 - DNA, 15 bp, Homo sapiens
ggggaggcatgacag

SEQ ID NO: 1929027 - DNA, 15 bp, Homo sapiens
gggaggcatgacagt

SEQ ID NO: 1929028 - DNA, 15 bp, Homo sapiens
ggaggcatgacagtt

SEQ ID NO: 1929029 - DNA, 15 bp, Homo sapiens
gaggcatgacagttg

SEQ ID NO: 1929030 - DNA, 15 bp, Homo sapiens
aggcatgacagttgt

SEQ ID NO: 1929031 - DNA, 15 bp, Homo sapiens
ggcatgacagttgtc

SEQ ID NO: 1929032 - DNA, 15 bp, Homo sapiens
gcatgacagttgtca

SEQ ID NO: 1929033 - DNA, 15 bp, Homo sapiens
catgacagttgtcat

SEQ ID NO: 1929034 - DNA, 15 bp, Homo sapiens
atgacagttgtcatc

SEQ ID NO: 1929035 - DNA, 15 bp, Homo sapiens
tgacagttgtcatca

SEQ ID NO: 1929036 - DNA, 15 bp, Homo sapiens
gacagttgtcatcaa

SEQ ID NO: 1929037 - DNA, 15 bp, Homo sapiens
acagttgtcatcaaa

SEQ ID NO: 1929038 - DNA, 15 bp, Homo sapiens
cagttgtcatcaaac

SEQ ID NO: 1929039 - DNA, 15 bp, Homo sapiens
agttgtcatcaaaca

SEQ ID NO: 1929040 - DNA, 15 bp, Homo sapiens
gttgtcatcaaacac

SEQ ID NO: 1929041 - DNA, 15 bp, Homo sapiens
ttgtcatcaaacaca

SEQ ID NO: 1929042 - DNA, 15 bp, Homo sapiens
tgtcatcaaacacag

SEQ ID NO: 1929043 - DNA, 15 bp, Homo sapiens
gtcatcaaacacagg

SEQ ID NO: 1929044 - DNA, 15 bp, Homo sapiens
tcatcaaacacagga

SEQ ID NO: 1929045 - DNA, 15 bp, Homo sapiens
catcaaacacaggaa

SEQ ID NO: 1929046 - DNA, 15 bp, Homo sapiens
atcaaacacaggaag

SEQ ID NO: 1929047 - DNA, 15 bp, Homo sapiens
tcaaacacaggaaga

SEQ ID NO: 1929048 - DNA, 15 bp, Homo sapiens
caaacacaggaagaa

SEQ ID NO: 1929049 - DNA, 15 bp, Homo sapiens
aaacacaggaagaac

SEQ ID NO: 1929050 - DNA, 15 bp, Homo sapiens
aacacaggaagaact

SEQ ID NO: 1929051 - DNA, 15 bp, Homo sapiens
acacaggaagaactg

SEQ ID NO: 1929052 - DNA, 15 bp, Homo sapiens
cacaggaagaactgg

SEQ ID NO: 1929053 - DNA, 15 bp, Homo sapiens
acaggaagaactgga

SEQ ID NO: 1929054 - DNA, 15 bp, Homo sapiens
caggaagaactggaa

SEQ ID NO: 1929055 - DNA, 15 bp, Homo sapiens
aggaagaactggaat

SEQ ID NO: 1929056 - DNA, 15 bp, Homo sapiens
ggaagaactggaata

SEQ ID NO: 1929057 - DNA, 15 bp, Homo sapiens
gaagaactggaatag

SEQ ID NO: 1929058 - DNA, 15 bp, Homo sapiens
aagaactggaatagg

SEQ ID NO: 1929059 - DNA, 15 bp, Homo sapiens
agaactggaataggg

SEQ ID NO: 1929060 - DNA, 15 bp, Homo sapiens
gaactggaatagggc

SEQ ID NO: 1929061 - DNA, 15 bp, Homo sapiens
aactggaatagggca

SEQ ID NO: 1929062 - DNA, 15 bp, Homo sapiens
actggaatagggcaa

SEQ ID NO: 1929063 - DNA, 15 bp, Homo sapiens
ctggaatagggcaag

SEQ ID NO: 1929064 - DNA, 15 bp, Homo sapiens
tggaatagggcaagt

SEQ ID NO: 1929065 - DNA, 15 bp, Homo sapiens
ggaatagggcaagtc

SEQ ID NO: 1929066 - DNA, 15 bp, Homo sapiens
gaatagggcaagtct

SEQ ID NO: 1929067 - DNA, 15 bp, Homo sapiens
aatagggcaagtctc

SEQ ID NO: 1929068 - DNA, 15 bp, Homo sapiens
atagggcaagtctca

SEQ ID NO: 1929069 - DNA, 15 bp, Homo sapiens
tagggcaagtctcaa

SEQ ID NO: 1929070 - DNA, 15 bp, Homo sapiens
agggcaagtctcaaa

SEQ ID NO: 1929071 - DNA, 15 bp, Homo sapiens
gggcaagtctcaaac

SEQ ID NO: 1929072 - DNA, 15 bp, Homo sapiens
ggcaagtctcaaacc

SEQ ID NO: 1929073 - DNA, 15 bp, Homo sapiens
gcaagtctcaaacca

SEQ ID NO: 1929074 - DNA, 15 bp, Homo sapiens
caagtctcaaaccaa

SEQ ID NO: 1929075 - DNA, 15 bp, Homo sapiens
aagtctcaaaccaat

SEQ ID NO: 1929076 - DNA, 15 bp, Homo sapiens
agtctcaaaccaata

SEQ ID NO: 1929077 - DNA, 15 bp, Homo sapiens
gtctcaaaccaataa

SEQ ID NO: 1929078 - DNA, 15 bp, Homo sapiens
tctcaaaccaataag

SEQ ID NO: 1929079 - DNA, 15 bp, Homo sapiens
ctcaaaccaataagg

SEQ ID NO: 1929080 - DNA, 15 bp, Homo sapiens
tcaaaccaataagga

SEQ ID NO: 1929081 - DNA, 15 bp, Homo sapiens
caaaccaataaggag

SEQ ID NO: 1929082 - DNA, 15 bp, Homo sapiens
aaaccaataaggaga

SEQ ID NO: 1929083 - DNA, 15 bp, Homo sapiens
aaccaataaggagaa

SEQ ID NO: 1929084 - DNA, 15 bp, Homo sapiens
accaataaggagaag

SEQ ID NO: 1929085 - DNA, 15 bp, Homo sapiens
ccaataaggagaagt

SEQ ID NO: 1929086 - DNA, 15 bp, Homo sapiens
caataaggagaagtt

SEQ ID NO: 1929087 - DNA, 15 bp, Homo sapiens
aataaggagaagttg

SEQ ID NO: 1929088 - DNA, 15 bp, Homo sapiens
ataaggagaagttga

SEQ ID NO: 1929089 - DNA, 15 bp, Homo sapiens
taaggagaagttgaa

SEQ ID NO: 1929090 - DNA, 15 bp, Homo sapiens
aaggagaagttgaat

SEQ ID NO: 1929091 - DNA, 15 bp, Homo sapiens
aggagaagttgaatg

SEQ ID NO: 1929092 - DNA, 15 bp, Homo sapiens
ggagaagttgaatga

SEQ ID NO: 1929093 - DNA, 15 bp, Homo sapiens
gagaagttgaatgaa

SEQ ID NO: 1929094 - DNA, 15 bp, Homo sapiens
agaagttgaatgaaa

SEQ ID NO: 1929095 - DNA, 15 bp, Homo sapiens
gaagttgaatgaaac

SEQ ID NO: 1929096 - DNA, 15 bp, Homo sapiens
aagttgaatgaaaca

SEQ ID NO: 1929097 - DNA, 15 bp, Homo sapiens
agttgaatgaaacag

SEQ ID NO: 1929098 - DNA, 15 bp, Homo sapiens
gttgaatgaaacaga

SEQ ID NO: 1929099 - DNA, 15 bp, Homo sapiens
ttgaatgaaacagac

SEQ ID NO: 1929100 - DNA, 15 bp, Homo sapiens
tgaatgaaacagact

SEQ ID NO: 1929101 - DNA, 15 bp, Homo sapiens
gaatgaaacagactt

SEQ ID NO: 1929102 - DNA, 15 bp, Homo sapiens
aatgaaacagacttt

SEQ ID NO: 1929103 - DNA, 15 bp, Homo sapiens
atgaaacagactttt

SEQ ID NO: 1929104 - DNA, 15 bp, Homo sapiens
tgaaacagacttttt

SEQ ID NO: 1929105 - DNA, 15 bp, Homo sapiens
gaaacagactttttc

SEQ ID NO: 1929106 - DNA, 15 bp, Homo sapiens
aaacagactttttct

SEQ ID NO: 1929107 - DNA, 15 bp, Homo sapiens
aacagactttttcta

SEQ ID NO: 1929108 - DNA, 15 bp, Homo sapiens
acagactttttctat

SEQ ID NO: 1929109 - DNA, 15 bp, Homo sapiens
cagactttttctata

SEQ ID NO: 1929110 - DNA, 15 bp, Homo sapiens
agactttttctatat

SEQ ID NO: 1929111 - DNA, 15 bp, Homo sapiens
gactttttctatatt

SEQ ID NO: 1929112 - DNA, 15 bp, Homo sapiens
actttttctatatta

SEQ ID NO: 1929113 - DNA, 15 bp, Homo sapiens
ctttttctatattaa

SEQ ID NO: 1929114 - DNA, 15 bp, Homo sapiens
tttttctatattaag

SEQ ID NO: 1929115 - DNA, 15 bp, Homo sapiens
ttttctatattaagg

SEQ ID NO: 1929116 - DNA, 15 bp, Homo sapiens
tttctatattaaggt

SEQ ID NO: 1929117 - DNA, 15 bp, Homo sapiens
ttctatattaaggtg

SEQ ID NO: 1929118 - DNA, 15 bp, Homo sapiens
tctatattaaggtgc

SEQ ID NO: 1929119 - DNA, 15 bp, Homo sapiens
ctatattaaggtgct

SEQ ID NO: 1929120 - DNA, 15 bp, Homo sapiens
tatattaaggtgcta

SEQ ID NO: 1929121 - DNA, 15 bp, Homo sapiens
atattaaggtgctac

SEQ ID NO: 1929122 - DNA, 15 bp, Homo sapiens
tattaaggtgctaca

SEQ ID NO: 1929123 - DNA, 15 bp, Homo sapiens
attaaggtgctacac

SEQ ID NO: 1929124 - DNA, 15 bp, Homo sapiens
ttaaggtgctacaca

SEQ ID NO: 1929125 - DNA, 15 bp, Homo sapiens
taaggtgctacacag

SEQ ID NO: 1929126 - DNA, 15 bp, Homo sapiens
aaggtgctacacagt

SEQ ID NO: 1929127 - DNA, 15 bp, Homo sapiens
aggtgctacacagta

SEQ ID NO: 1929128 - DNA, 15 bp, Homo sapiens
ggtgctacacagtac

SEQ ID NO: 1929129 - DNA, 15 bp, Homo sapiens
gtgctacacagtact

SEQ ID NO: 1929130 - DNA, 15 bp, Homo sapiens
tgctacacagtacta

SEQ ID NO: 1929131 - DNA, 15 bp, Homo sapiens
gctacacagtactag

SEQ ID NO: 1929132 - DNA, 15 bp, Homo sapiens
ctacacagtactagc

SEQ ID NO: 1929133 - DNA, 15 bp, Homo sapiens
tacacagtactagct

SEQ ID NO: 1929134 - DNA, 15 bp, Homo sapiens
acacagtactagctg

SEQ ID NO: 1929135 - DNA, 15 bp, Homo sapiens
cacagtactagctgc

SEQ ID NO: 1929136 - DNA, 15 bp, Homo sapiens
acagtactagctgct

SEQ ID NO: 1929137 - DNA, 15 bp, Homo sapiens
cagtactagctgctt

SEQ ID NO: 1929138 - DNA, 15 bp, Homo sapiens
agtactagctgcttc

SEQ ID NO: 1929139 - DNA, 15 bp, Homo sapiens
gtactagctgcttca

SEQ ID NO: 1929140 - DNA, 15 bp, Homo sapiens
tactagctgcttcat

SEQ ID NO: 1929141 - DNA, 15 bp, Homo sapiens
actagctgcttcatg

SEQ ID NO: 1929142 - DNA, 15 bp, Homo sapiens
ctagctgcttcatga

SEQ ID NO: 1929143 - DNA, 15 bp, Homo sapiens
tagctgcttcatgaa

SEQ ID NO: 1929144 - DNA, 15 bp, Homo sapiens
agctgcttcatgaag

SEQ ID NO: 1929145 - DNA, 15 bp, Homo sapiens
gctgcttcatgaagt

SEQ ID NO: 1929146 - DNA, 15 bp, Homo sapiens
ctgcttcatgaagta

SEQ ID NO: 1929147 - DNA, 15 bp, Homo sapiens
tgcttcatgaagtaa

SEQ ID NO: 1929148 - DNA, 15 bp, Homo sapiens
gcttcatgaagtaaa

SEQ ID NO: 1929149 - DNA, 15 bp, Homo sapiens
cttcatgaagtaaag

SEQ ID NO: 1929150 - DNA, 15 bp, Homo sapiens
ttcatgaagtaaagg

SEQ ID NO: 1929151 - DNA, 15 bp, Homo sapiens
tcatgaagtaaaggt

SEQ ID NO: 1929152 - DNA, 15 bp, Homo sapiens
catgaagtaaaggtt

SEQ ID NO: 1929153 - DNA, 15 bp, Homo sapiens
atgaagtaaaggttc

SEQ ID NO: 1929154 - DNA, 15 bp, Homo sapiens
tgaagtaaaggttca

SEQ ID NO: 1929155 - DNA, 15 bp, Homo sapiens
gaagtaaaggttcag

SEQ ID NO: 1929156 - DNA, 15 bp, Homo sapiens
aagtaaaggttcagt

SEQ ID NO: 1929157 - DNA, 15 bp, Homo sapiens
agtaaaggttcagtc

SEQ ID NO: 1929158 - DNA, 15 bp, Homo sapiens
gtaaaggttcagtca

SEQ ID NO: 1929159 - DNA, 15 bp, Homo sapiens
taaaggttcagtcaa

SEQ ID NO: 1929160 - DNA, 15 bp, Homo sapiens
aaaggttcagtcaat

SEQ ID NO: 1929161 - DNA, 15 bp, Homo sapiens
aaggttcagtcaatg

SEQ ID NO: 1929162 - DNA, 15 bp, Homo sapiens
aggttcagtcaatgt

SEQ ID NO: 1929163 - DNA, 15 bp, Homo sapiens
ggttcagtcaatgtg

SEQ ID NO: 1929164 - DNA, 15 bp, Homo sapiens
gttcagtcaatgtgc

SEQ ID NO: 1929165 - DNA, 15 bp, Homo sapiens
ttcagtcaatgtgca

SEQ ID NO: 1929166 - DNA, 15 bp, Homo sapiens
tcagtcaatgtgcaa

SEQ ID NO: 1929167 - DNA, 15 bp, Homo sapiens
cagtcaatgtgcaaa

SEQ ID NO: 1929168 - DNA, 15 bp, Homo sapiens
agtcaatgtgcaaac

SEQ ID NO: 1929169 - DNA, 15 bp, Homo sapiens
gtcaatgtgcaaaca

SEQ ID NO: 1929170 - DNA, 15 bp, Homo sapiens
tcaatgtgcaaacaa

SEQ ID NO: 1929171 - DNA, 15 bp, Homo sapiens
caatgtgcaaacaaa

SEQ ID NO: 1929172 - DNA, 15 bp, Homo sapiens
aatgtgcaaacaaac

SEQ ID NO: 1929173 - DNA, 15 bp, Homo sapiens
atgtgcaaacaaact

SEQ ID NO: 1929174 - DNA, 15 bp, Homo sapiens
tgtgcaaacaaactg

SEQ ID NO: 1929175 - DNA, 15 bp, Homo sapiens
gtgcaaacaaactga

SEQ ID NO: 1929176 - DNA, 15 bp, Homo sapiens
tgcaaacaaactgaa

SEQ ID NO: 1929177 - DNA, 15 bp, Homo sapiens
gcaaacaaactgaat

SEQ ID NO: 1929178 - DNA, 15 bp, Homo sapiens
caaacaaactgaatg

SEQ ID NO: 1929179 - DNA, 15 bp, Homo sapiens
aaacaaactgaatga

SEQ ID NO: 1929180 - DNA, 15 bp, Homo sapiens
aacaaactgaatgac

SEQ ID NO: 1929181 - DNA, 15 bp, Homo sapiens
acaaactgaatgact

SEQ ID NO: 1929182 - DNA, 15 bp, Homo sapiens
caaactgaatgactc

SEQ ID NO: 1929183 - DNA, 15 bp, Homo sapiens
aaactgaatgactct

SEQ ID NO: 1929184 - DNA, 15 bp, Homo sapiens
aactgaatgactctc

SEQ ID NO: 1929185 - DNA, 15 bp, Homo sapiens
actgaatgactctca

SEQ ID NO: 1929186 - DNA, 15 bp, Homo sapiens
ctgaatgactctcaa

SEQ ID NO: 1929187 - DNA, 15 bp, Homo sapiens
tgaatgactctcaat

SEQ ID NO: 1929188 - DNA, 15 bp, Homo sapiens
gaatgactctcaatt

SEQ ID NO: 1929189 - DNA, 15 bp, Homo sapiens
aatgactctcaatta

SEQ ID NO: 1929190 - DNA, 15 bp, Homo sapiens
atgactctcaattag

SEQ ID NO: 1929191 - DNA, 15 bp, Homo sapiens
tgactctcaattagt

SEQ ID NO: 1929192 - DNA, 15 bp, Homo sapiens
gactctcaattagtt

SEQ ID NO: 1929193 - DNA, 15 bp, Homo sapiens
actctcaattagttg

SEQ ID NO: 1929194 - DNA, 15 bp, Homo sapiens
ctctcaattagttga

SEQ ID NO: 1929195 - DNA, 15 bp, Homo sapiens
tctcaattagttgac

SEQ ID NO: 1929196 - DNA, 15 bp, Homo sapiens
ctcaattagttgaca

SEQ ID NO: 1929197 - DNA, 15 bp, Homo sapiens
tcaattagttgacag

SEQ ID NO: 1929198 - DNA, 15 bp, Homo sapiens
caattagttgacagg

SEQ ID NO: 1929199 - DNA, 15 bp, Homo sapiens
aattagttgacagga

SEQ ID NO: 1929200 - DNA, 15 bp, Homo sapiens
attagttgacaggac

SEQ ID NO: 1929201 - DNA, 15 bp, Homo sapiens
ttagttgacaggact

SEQ ID NO: 1929202 - DNA, 15 bp, Homo sapiens
tagttgacaggactg

SEQ ID NO: 1929203 - DNA, 15 bp, Homo sapiens
agttgacaggactgc

SEQ ID NO: 1929204 - DNA, 15 bp, Homo sapiens
gttgacaggactgcc

SEQ ID NO: 1929205 - DNA, 15 bp, Homo sapiens
ttgacaggactgcct

SEQ ID NO: 1929206 - DNA, 15 bp, Homo sapiens
tgacaggactgcctt

SEQ ID NO: 1929207 - DNA, 15 bp, Homo sapiens
gacaggactgccttt

SEQ ID NO: 1929208 - DNA, 15 bp, Homo sapiens
acaggactgcctttt

SEQ ID NO: 1929209 - DNA, 15 bp, Homo sapiens
caggactgccttttt

SEQ ID NO: 1929210 - DNA, 15 bp, Homo sapiens
aggactgccttttta

SEQ ID NO: 1929211 - DNA, 15 bp, Homo sapiens
ggactgcctttttaa

SEQ ID NO: 1929212 - DNA, 15 bp, Homo sapiens
gactgcctttttaaa

SEQ ID NO: 1929213 - DNA, 15 bp, Homo sapiens
actgcctttttaaat

SEQ ID NO: 1929214 - DNA, 15 bp, Homo sapiens
ctgcctttttaaata

SEQ ID NO: 1929215 - DNA, 15 bp, Homo sapiens
tgcctttttaaataa

SEQ ID NO: 1929216 - DNA, 15 bp, Homo sapiens
gcctttttaaataaa

SEQ ID NO: 1929217 - DNA, 15 bp, Homo sapiens
cctttttaaataaaa

SEQ ID NO: 1929218 - DNA, 15 bp, Homo sapiens
ctttttaaataaaaa

SEQ ID NO: 1929219 - DNA, 15 bp, Homo sapiens
tttttaaataaaaag

SEQ ID NO: 1929220 - DNA, 15 bp, Homo sapiens
ttttaaataaaaagt

SEQ ID NO: 1929221 - DNA, 15 bp, Homo sapiens
tttaaataaaaagtt

SEQ ID NO: 1929222 - DNA, 15 bp, Homo sapiens
ttaaataaaaagttg

SEQ ID NO: 1929223 - DNA, 15 bp, Homo sapiens
taaataaaaagttga

SEQ ID NO: 1929224 - DNA, 15 bp, Homo sapiens
aaataaaaagttgaa

SEQ ID NO: 1929225 - DNA, 15 bp, Homo sapiens
aataaaaagttgaat

SEQ ID NO: 1929226 - DNA, 15 bp, Homo sapiens
ataaaaagttgaatg

SEQ ID NO: 1929227 - DNA, 15 bp, Homo sapiens
taaaaagttgaatgt

SEQ ID NO: 1929228 - DNA, 15 bp, Homo sapiens
aaaaagttgaatgtg

SEQ ID NO: 1929229 - DNA, 15 bp, Homo sapiens
aaaagttgaatgtga

SEQ ID NO: 1929230 - DNA, 15 bp, Homo sapiens
aaagttgaatgtgat

SEQ ID NO: 1929231 - DNA, 15 bp, Homo sapiens
aagttgaatgtgatt

SEQ ID NO: 1929232 - DNA, 15 bp, Homo sapiens
agttgaatgtgatta

SEQ ID NO: 1929233 - DNA, 15 bp, Homo sapiens
gttgaatgtgattac

SEQ ID NO: 1929234 - DNA, 15 bp, Homo sapiens
ttgaatgtgattact

SEQ ID NO: 1929235 - DNA, 15 bp, Homo sapiens
tgaatgtgattactt

SEQ ID NO: 1929236 - DNA, 15 bp, Homo sapiens
gaatgtgattacttc

SEQ ID NO: 1929237 - DNA, 15 bp, Homo sapiens
aatgtgattacttcc

SEQ ID NO: 1929238 - DNA, 15 bp, Homo sapiens
atgtgattacttcca

SEQ ID NO: 1929239 - DNA, 15 bp, Homo sapiens
tgtgattacttccag

SEQ ID NO: 1929240 - DNA, 15 bp, Homo sapiens
gtgattacttccaga

SEQ ID NO: 1929241 - DNA, 15 bp, Homo sapiens
tgattacttccagac

SEQ ID NO: 1929242 - DNA, 15 bp, Homo sapiens
gattacttccagacc

SEQ ID NO: 1929243 - DNA, 15 bp, Homo sapiens
attacttccagacct

SEQ ID NO: 1929244 - DNA, 15 bp, Homo sapiens
ttacttccagacctc

SEQ ID NO: 1929245 - DNA, 15 bp, Homo sapiens
tacttccagacctct

SEQ ID NO: 1929246 - DNA, 15 bp, Homo sapiens
acttccagacctctt

SEQ ID NO: 1929247 - DNA, 15 bp, Homo sapiens
cttccagacctcttt

SEQ ID NO: 1929248 - DNA, 15 bp, Homo sapiens
ttccagacctctttt

SEQ ID NO: 1929249 - DNA, 15 bp, Homo sapiens
tccagacctcttttc

SEQ ID NO: 1929250 - DNA, 15 bp, Homo sapiens
ccagacctcttttca

SEQ ID NO: 1929251 - DNA, 15 bp, Homo sapiens
cagacctcttttcag

SEQ ID NO: 1929252 - DNA, 15 bp, Homo sapiens
agacctcttttcagc

SEQ ID NO: 1929253 - DNA, 15 bp, Homo sapiens
gacctcttttcagct

SEQ ID NO: 1929254 - DNA, 15 bp, Homo sapiens
acctcttttcagctc

SEQ ID NO: 1929255 - DNA, 15 bp, Homo sapiens
cctcttttcagctct

SEQ ID NO: 1929256 - DNA, 15 bp, Homo sapiens
ctcttttcagctctt

SEQ ID NO: 1929257 - DNA, 15 bp, Homo sapiens
tcttttcagctcttt

SEQ ID NO: 1929258 - DNA, 15 bp, Homo sapiens
cttttcagctcttta

SEQ ID NO: 1929259 - DNA, 15 bp, Homo sapiens
ttttcagctctttaa

SEQ ID NO: 1929260 - DNA, 15 bp, Homo sapiens
tttcagctctttaag

SEQ ID NO: 1929261 - DNA, 15 bp, Homo sapiens
ttcagctctttaagg

SEQ ID NO: 1929262 - DNA, 15 bp, Homo sapiens
tcagctctttaaggt

SEQ ID NO: 1929263 - DNA, 15 bp, Homo sapiens
cagctctttaaggta

SEQ ID NO: 1929264 - DNA, 15 bp, Homo sapiens
agctctttaaggtac

SEQ ID NO: 1929265 - DNA, 15 bp, Homo sapiens
gctctttaaggtact

SEQ ID NO: 1929266 - DNA, 15 bp, Homo sapiens
ctctttaaggtactg

SEQ ID NO: 1929267 - DNA, 15 bp, Homo sapiens
tctttaaggtactga

SEQ ID NO: 1929268 - DNA, 15 bp, Homo sapiens
ctttaaggtactgat

SEQ ID NO: 1929269 - DNA, 15 bp, Homo sapiens
tttaaggtactgata

SEQ ID NO: 1929270 - DNA, 15 bp, Homo sapiens
ttaaggtactgatac

SEQ ID NO: 1929271 - DNA, 15 bp, Homo sapiens
taaggtactgatacc

SEQ ID NO: 1929272 - DNA, 15 bp, Homo sapiens
aaggtactgataccc

SEQ ID NO: 1929273 - DNA, 15 bp, Homo sapiens
aggtactgataccct

SEQ ID NO: 1929274 - DNA, 15 bp, Homo sapiens
ggtactgataccctt

SEQ ID NO: 1929275 - DNA, 15 bp, Homo sapiens
gtactgatacccttt

SEQ ID NO: 1929276 - DNA, 15 bp, Homo sapiens
tactgataccctttt

SEQ ID NO: 1929277 - DNA, 15 bp, Homo sapiens
actgatacccttttc

SEQ ID NO: 1929278 - DNA, 15 bp, Homo sapiens
ctgatacccttttct

SEQ ID NO: 1929279 - DNA, 15 bp, Homo sapiens
tgatacccttttctt

SEQ ID NO: 1929280 - DNA, 15 bp, Homo sapiens
gatacccttttcttg

SEQ ID NO: 1929281 - DNA, 15 bp, Homo sapiens
atacccttttcttga

SEQ ID NO: 1929282 - DNA, 15 bp, Homo sapiens
tacccttttcttgat

SEQ ID NO: 1929283 - DNA, 15 bp, Homo sapiens
acccttttcttgatt

SEQ ID NO: 1929284 - DNA, 15 bp, Homo sapiens
cccttttcttgattt

SEQ ID NO: 1929285 - DNA, 15 bp, Homo sapiens
ccttttcttgatttg

SEQ ID NO: 1929286 - DNA, 15 bp, Homo sapiens
cttttcttgatttga

SEQ ID NO: 1929287 - DNA, 15 bp, Homo sapiens
ttttcttgatttgaa

SEQ ID NO: 1929288 - DNA, 15 bp, Homo sapiens
tttcttgatttgaag

SEQ ID NO: 1929289 - DNA, 15 bp, Homo sapiens
ttcttgatttgaagt

SEQ ID NO: 1929290 - DNA, 15 bp, Homo sapiens
tcttgatttgaagtt

SEQ ID NO: 1929291 - DNA, 15 bp, Homo sapiens
cttgatttgaagttg

SEQ ID NO: 1929292 - DNA, 15 bp, Homo sapiens
ttgatttgaagttgg

SEQ ID NO: 1929293 - DNA, 15 bp, Homo sapiens
tgatttgaagttgga

SEQ ID NO: 1929294 - DNA, 15 bp, Homo sapiens
gatttgaagttggag

SEQ ID NO: 1929295 - DNA, 15 bp, Homo sapiens
atttgaagttggaga

SEQ ID NO: 1929296 - DNA, 15 bp, Homo sapiens
tttgaagttggagac

SEQ ID NO: 1929297 - DNA, 15 bp, Homo sapiens
ttgaagttggagact

SEQ ID NO: 1929298 - DNA, 15 bp, Homo sapiens
tgaagttggagacta

SEQ ID NO: 1929299 - DNA, 15 bp, Homo sapiens
gaagttggagactat

SEQ ID NO: 1929300 - DNA, 15 bp, Homo sapiens
aagttggagactatg

SEQ ID NO: 1929301 - DNA, 15 bp, Homo sapiens
agttggagactatga

SEQ ID NO: 1929302 - DNA, 15 bp, Homo sapiens
gttggagactatgat

SEQ ID NO: 1929303 - DNA, 15 bp, Homo sapiens
ttggagactatgatg

SEQ ID NO: 1929304 - DNA, 15 bp, Homo sapiens
tggagactatgatgt

SEQ ID NO: 1929305 - DNA, 15 bp, Homo sapiens
ggagactatgatgtc

SEQ ID NO: 1929306 - DNA, 15 bp, Homo sapiens
gagactatgatgtca

SEQ ID NO: 1929307 - DNA, 15 bp, Homo sapiens
agactatgatgtcat

SEQ ID NO: 1929308 - DNA, 15 bp, Homo sapiens
gactatgatgtcatc

SEQ ID NO: 1929309 - DNA, 15 bp, Homo sapiens
actatgatgtcatca

SEQ ID NO: 1929310 - DNA, 15 bp, Homo sapiens
ctatgatgtcatcag

SEQ ID NO: 1929311 - DNA, 15 bp, Homo sapiens
tatgatgtcatcagg

SEQ ID NO: 1929312 - DNA, 15 bp, Homo sapiens
atgatgtcatcaggg

SEQ ID NO: 1929313 - DNA, 15 bp, Homo sapiens
tgatgtcatcagggc

SEQ ID NO: 1929314 - DNA, 15 bp, Homo sapiens
gatgtcatcagggct

SEQ ID NO: 1929315 - DNA, 15 bp, Homo sapiens
atgtcatcagggcta

SEQ ID NO: 1929316 - DNA, 15 bp, Homo sapiens
tgtcatcagggctaa

SEQ ID NO: 1929317 - DNA, 15 bp, Homo sapiens
gtcatcagggctaaa

SEQ ID NO: 1929318 - DNA, 15 bp, Homo sapiens
tcatcagggctaaaa

SEQ ID NO: 1929319 - DNA, 15 bp, Homo sapiens
catcagggctaaaag

SEQ ID NO: 1929320 - DNA, 15 bp, Homo sapiens
atcagggctaaaagg

SEQ ID NO: 1929321 - DNA, 15 bp, Homo sapiens
tcagggctaaaaggt

SEQ ID NO: 1929322 - DNA, 15 bp, Homo sapiens
cagggctaaaaggta

SEQ ID NO: 1929323 - DNA, 15 bp, Homo sapiens
agggctaaaaggtat

SEQ ID NO: 1929324 - DNA, 15 bp, Homo sapiens
gggctaaaaggtata

SEQ ID NO: 1929325 - DNA, 15 bp, Homo sapiens
ggctaaaaggtatat

SEQ ID NO: 1929326 - DNA, 15 bp, Homo sapiens
gctaaaaggtatata

SEQ ID NO: 1929327 - DNA, 15 bp, Homo sapiens
ctaaaaggtatatac

SEQ ID NO: 1929328 - DNA, 15 bp, Homo sapiens
taaaaggtatatact

SEQ ID NO: 1929329 - DNA, 15 bp, Homo sapiens
aaaaggtatatactt

SEQ ID NO: 1929330 - DNA, 15 bp, Homo sapiens
aaaggtatatactta

SEQ ID NO: 1929331 - DNA, 15 bp, Homo sapiens
aaggtatatacttaa

SEQ ID NO: 1929332 - DNA, 15 bp, Homo sapiens
aggtatatacttaaa

SEQ ID NO: 1929333 - DNA, 15 bp, Homo sapiens
ggtatatacttaaag

SEQ ID NO: 1929334 - DNA, 15 bp, Homo sapiens
gtatatacttaaagc

SEQ ID NO: 1929335 - DNA, 15 bp, Homo sapiens
tatatacttaaagca

SEQ ID NO: 1929336 - DNA, 15 bp, Homo sapiens
atatacttaaagcat

SEQ ID NO: 1929337 - DNA, 15 bp, Homo sapiens
tatacttaaagcatt

SEQ ID NO: 1929338 - DNA, 15 bp, Homo sapiens
atacttaaagcattg

SEQ ID NO: 1929339 - DNA, 15 bp, Homo sapiens
tacttaaagcattga

SEQ ID NO: 1929340 - DNA, 15 bp, Homo sapiens
acttaaagcattgac

SEQ ID NO: 1929341 - DNA, 15 bp, Homo sapiens
cttaaagcattgacc

SEQ ID NO: 1929342 - DNA, 15 bp, Homo sapiens
ttaaagcattgacct

SEQ ID NO: 1929343 - DNA, 15 bp, Homo sapiens
taaagcattgacctt

SEQ ID NO: 1929344 - DNA, 15 bp, Homo sapiens
aaagcattgaccttt

SEQ ID NO: 1929345 - DNA, 15 bp, Homo sapiens
aagcattgaccttta

SEQ ID NO: 1929346 - DNA, 15 bp, Homo sapiens
agcattgacctttaa

SEQ ID NO: 1929347 - DNA, 15 bp, Homo sapiens
gcattgacctttaag

SEQ ID NO: 1929348 - DNA, 15 bp, Homo sapiens
cattgacctttaagt

SEQ ID NO: 1929349 - DNA, 15 bp, Homo sapiens
attgacctttaagta

SEQ ID NO: 1929350 - DNA, 15 bp, Homo sapiens
ttgacctttaagtac

SEQ ID NO: 1929351 - DNA, 15 bp, Homo sapiens
tgacctttaagtaca

SEQ ID NO: 1929352 - DNA, 15 bp, Homo sapiens
gacctttaagtacat

SEQ ID NO: 1929353 - DNA, 15 bp, Homo sapiens
acctttaagtacata

SEQ ID NO: 1929354 - DNA, 15 bp, Homo sapiens
cctttaagtacataa

SEQ ID NO: 1929355 - DNA, 15 bp, Homo sapiens
ctttaagtacataag

SEQ ID NO: 1929356 - DNA, 15 bp, Homo sapiens
tttaagtacataaga

SEQ ID NO: 1929357 - DNA, 15 bp, Homo sapiens
ttaagtacataagaa

SEQ ID NO: 1929358 - DNA, 15 bp, Homo sapiens
taagtacataagaat

SEQ ID NO: 1929359 - DNA, 15 bp, Homo sapiens
aagtacataagaata

SEQ ID NO: 1929360 - DNA, 15 bp, Homo sapiens
agtacataagaatat

SEQ ID NO: 1929361 - DNA, 15 bp, Homo sapiens
gtacataagaatatg

SEQ ID NO: 1929362 - DNA, 15 bp, Homo sapiens
tacataagaatatgc

SEQ ID NO: 1929363 - DNA, 15 bp, Homo sapiens
acataagaatatgct

SEQ ID NO: 1929364 - DNA, 15 bp, Homo sapiens
cataagaatatgctg

SEQ ID NO: 1929365 - DNA, 15 bp, Homo sapiens
ataagaatatgctgt

SEQ ID NO: 1929366 - DNA, 15 bp, Homo sapiens
taagaatatgctgtt

SEQ ID NO: 1929367 - DNA, 15 bp, Homo sapiens
aagaatatgctgttc

SEQ ID NO: 1929368 - DNA, 15 bp, Homo sapiens
agaatatgctgttct

SEQ ID NO: 1929369 - DNA, 15 bp, Homo sapiens
gaatatgctgttctg

SEQ ID NO: 1929370 - DNA, 15 bp, Homo sapiens
aatatgctgttctgt

SEQ ID NO: 1929371 - DNA, 15 bp, Homo sapiens
atatgctgttctgtg

SEQ ID NO: 1929372 - DNA, 15 bp, Homo sapiens
tatgctgttctgtga

SEQ ID NO: 1929373 - DNA, 15 bp, Homo sapiens
atgctgttctgtgaa

SEQ ID NO: 1929374 - DNA, 15 bp, Homo sapiens
tgctgttctgtgaat

SEQ ID NO: 1929375 - DNA, 15 bp, Homo sapiens
gctgttctgtgaatc

SEQ ID NO: 1929376 - DNA, 15 bp, Homo sapiens
ctgttctgtgaatca

SEQ ID NO: 1929377 - DNA, 15 bp, Homo sapiens
tgttctgtgaatcat

SEQ ID NO: 1929378 - DNA, 15 bp, Homo sapiens
gttctgtgaatcatg

SEQ ID NO: 1929379 - DNA, 15 bp, Homo sapiens
ttctgtgaatcatgg

SEQ ID NO: 1929380 - DNA, 15 bp, Homo sapiens
tctgtgaatcatgga

SEQ ID NO: 1929381 - DNA, 15 bp, Homo sapiens
ctgtgaatcatggat

SEQ ID NO: 1929382 - DNA, 15 bp, Homo sapiens
tgtgaatcatggata

SEQ ID NO: 1929383 - DNA, 15 bp, Homo sapiens
gtgaatcatggataa

SEQ ID NO: 1929384 - DNA, 15 bp, Homo sapiens
tgaatcatggataag

SEQ ID NO: 1929385 - DNA, 15 bp, Homo sapiens
gaatcatggataagg

SEQ ID NO: 1929386 - DNA, 15 bp, Homo sapiens
aatcatggataaggt

SEQ ID NO: 1929387 - DNA, 15 bp, Homo sapiens
atcatggataaggta

SEQ ID NO: 1929388 - DNA, 15 bp, Homo sapiens
tcatggataaggtat

SEQ ID NO: 1929389 - DNA, 15 bp, Homo sapiens
catggataaggtata

SEQ ID NO: 1929390 - DNA, 15 bp, Homo sapiens
atggataaggtatac

SEQ ID NO: 1929391 - DNA, 15 bp, Homo sapiens
tggataaggtatact

SEQ ID NO: 1929392 - DNA, 15 bp, Homo sapiens
ggataaggtatactt

SEQ ID NO: 1929393 - DNA, 15 bp, Homo sapiens
gataaggtatactta

SEQ ID NO: 1929394 - DNA, 15 bp, Homo sapiens
ataaggtatacttaa

SEQ ID NO: 1929395 - DNA, 15 bp, Homo sapiens
taaggtatacttaaa

SEQ ID NO: 1929396 - DNA, 15 bp, Homo sapiens
aaggtatacttaaaa

SEQ ID NO: 1929397 - DNA, 15 bp, Homo sapiens
aggtatacttaaaat

SEQ ID NO: 1929398 - DNA, 15 bp, Homo sapiens
ggtatacttaaaatc

SEQ ID NO: 1929399 - DNA, 15 bp, Homo sapiens
gtatacttaaaatca

SEQ ID NO: 1929400 - DNA, 15 bp, Homo sapiens
tatacttaaaatcac

SEQ ID NO: 1929401 - DNA, 15 bp, Homo sapiens
atacttaaaatcact

SEQ ID NO: 1929402 - DNA, 15 bp, Homo sapiens
tacttaaaatcactg

SEQ ID NO: 1929403 - DNA, 15 bp, Homo sapiens
acttaaaatcactgc

SEQ ID NO: 1929404 - DNA, 15 bp, Homo sapiens
cttaaaatcactgct

SEQ ID NO: 1929405 - DNA, 15 bp, Homo sapiens
ttaaaatcactgcta

SEQ ID NO: 1929406 - DNA, 15 bp, Homo sapiens
taaaatcactgctat

SEQ ID NO: 1929407 - DNA, 15 bp, Homo sapiens
aaaatcactgctata

SEQ ID NO: 1929408 - DNA, 15 bp, Homo sapiens
aaatcactgctatat

SEQ ID NO: 1929409 - DNA, 15 bp, Homo sapiens
aatcactgctatatc

SEQ ID NO: 1929410 - DNA, 15 bp, Homo sapiens
atcactgctatatct

SEQ ID NO: 1929411 - DNA, 15 bp, Homo sapiens
tcactgctatatctt

SEQ ID NO: 1929412 - DNA, 15 bp, Homo sapiens
cactgctatatcttt

SEQ ID NO: 1929413 - DNA, 15 bp, Homo sapiens
actgctatatctttg

SEQ ID NO: 1929414 - DNA, 15 bp, Homo sapiens
ctgctatatctttgg

SEQ ID NO: 1929415 - DNA, 15 bp, Homo sapiens
tgctatatctttgga

SEQ ID NO: 1929416 - DNA, 15 bp, Homo sapiens
gctatatctttggaa

SEQ ID NO: 1929417 - DNA, 15 bp, Homo sapiens
ctatatctttggaaa

SEQ ID NO: 1929418 - DNA, 15 bp, Homo sapiens
tatatctttggaaag

SEQ ID NO: 1929419 - DNA, 15 bp, Homo sapiens
atatctttggaaaga

SEQ ID NO: 1929420 - DNA, 15 bp, Homo sapiens
tatctttggaaagaa

SEQ ID NO: 1929421 - DNA, 15 bp, Homo sapiens
atctttggaaagaaa

SEQ ID NO: 1929422 - DNA, 15 bp, Homo sapiens
tctttggaaagaaat

SEQ ID NO: 1929423 - DNA, 15 bp, Homo sapiens
ctttggaaagaaatt

SEQ ID NO: 1929424 - DNA, 15 bp, Homo sapiens
tttggaaagaaattt

SEQ ID NO: 1929425 - DNA, 15 bp, Homo sapiens
ttggaaagaaattta

SEQ ID NO: 1929426 - DNA, 15 bp, Homo sapiens
tggaaagaaatttaa

SEQ ID NO: 1929427 - DNA, 15 bp, Homo sapiens
ggaaagaaatttaaa

SEQ ID NO: 1929428 - DNA, 15 bp, Homo sapiens
gaaagaaatttaaat

SEQ ID NO: 1929429 - DNA, 15 bp, Homo sapiens
aaagaaatttaaatc

SEQ ID NO: 1929430 - DNA, 15 bp, Homo sapiens
aagaaatttaaatca

SEQ ID NO: 1929431 - DNA, 15 bp, Homo sapiens
agaaatttaaatcaa

SEQ ID NO: 1929432 - DNA, 15 bp, Homo sapiens
gaaatttaaatcaaa

SEQ ID NO: 1929433 - DNA, 15 bp, Homo sapiens
aaatttaaatcaaaa

SEQ ID NO: 1929434 - DNA, 15 bp, Homo sapiens
aatttaaatcaaaaa

SEQ ID NO: 1929435 - DNA, 15 bp, Homo sapiens
atttaaatcaaaaaa

SEQ ID NO: 1929436 - DNA, 15 bp, Homo sapiens
tttaaatcaaaaaag

SEQ ID NO: 1929437 - DNA, 15 bp, Homo sapiens
ttaaatcaaaaaaga

SEQ ID NO: 1929438 - DNA, 15 bp, Homo sapiens
taaatcaaaaaagaa

SEQ ID NO: 1929439 - DNA, 15 bp, Homo sapiens
aaatcaaaaaagaat

SEQ ID NO: 1929440 - DNA, 15 bp, Homo sapiens
aatcaaaaaagaatt

SEQ ID NO: 1929441 - DNA, 15 bp, Homo sapiens
atcaaaaaagaatta

SEQ ID NO: 1929442 - DNA, 15 bp, Homo sapiens
tcaaaaaagaattac

SEQ ID NO: 1929443 - DNA, 15 bp, Homo sapiens
caaaaaagaattaca

SEQ ID NO: 1929444 - DNA, 15 bp, Homo sapiens
aaaaaagaattacaa

SEQ ID NO: 1929445 - DNA, 15 bp, Homo sapiens
aaaaagaattacaaa

SEQ ID NO: 1929446 - DNA, 15 bp, Homo sapiens
aaaagaattacaaaa

SEQ ID NO: 1929447 - DNA, 15 bp, Homo sapiens
aaagaattacaaaag

SEQ ID NO: 1929448 - DNA, 15 bp, Homo sapiens
aagaattacaaaagg

SEQ ID NO: 1929449 - DNA, 15 bp, Homo sapiens
agaattacaaaaggc

SEQ ID NO: 1929450 - DNA, 15 bp, Homo sapiens
gaattacaaaaggca

SEQ ID NO: 1929451 - DNA, 15 bp, Homo sapiens
aattacaaaaggcaa

SEQ ID NO: 1929452 - DNA, 15 bp, Homo sapiens
attacaaaaggcaac

SEQ ID NO: 1929453 - DNA, 15 bp, Homo sapiens
ttacaaaaggcaact

SEQ ID NO: 1929454 - DNA, 15 bp, Homo sapiens
tacaaaaggcaactt

SEQ ID NO: 1929455 - DNA, 15 bp, Homo sapiens
acaaaaggcaacttt

SEQ ID NO: 1929456 - DNA, 15 bp, Homo sapiens
caaaaggcaacttta

SEQ ID NO: 1929457 - DNA, 15 bp, Homo sapiens
aaaaggcaactttat

SEQ ID NO: 1929458 - DNA, 15 bp, Homo sapiens
aaaggcaactttatt

SEQ ID NO: 1929459 - DNA, 15 bp, Homo sapiens
aaggcaactttattg

SEQ ID NO: 1929460 - DNA, 15 bp, Homo sapiens
aggcaactttattga

SEQ ID NO: 1929461 - DNA, 15 bp, Homo sapiens
ggcaactttattgaa

SEQ ID NO: 1929462 - DNA, 15 bp, Homo sapiens
gcaactttattgaac

SEQ ID NO: 1929463 - DNA, 15 bp, Homo sapiens
caactttattgaact

SEQ ID NO: 1929464 - DNA, 15 bp, Homo sapiens
aactttattgaactt

SEQ ID NO: 1929465 - DNA, 15 bp, Homo sapiens
actttattgaactta

SEQ ID NO: 1929466 - DNA, 15 bp, Homo sapiens
ctttattgaacttac

SEQ ID NO: 1929467 - DNA, 15 bp, Homo sapiens
tttattgaacttaca

SEQ ID NO: 1929468 - DNA, 15 bp, Homo sapiens
ttattgaacttacat

SEQ ID NO: 1929469 - DNA, 15 bp, Homo sapiens
tattgaacttacatg

SEQ ID NO: 1929470 - DNA, 15 bp, Homo sapiens
attgaacttacatgt

SEQ ID NO: 1929471 - DNA, 15 bp, Homo sapiens
ttgaacttacatgta

SEQ ID NO: 1929472 - DNA, 15 bp, Homo sapiens
tgaacttacatgtag

SEQ ID NO: 1929473 - DNA, 15 bp, Homo sapiens
gaacttacatgtaga

SEQ ID NO: 1929474 - DNA, 15 bp, Homo sapiens
aacttacatgtagag

SEQ ID NO: 1929475 - DNA, 15 bp, Homo sapiens
acttacatgtagagt

SEQ ID NO: 1929476 - DNA, 15 bp, Homo sapiens
cttacatgtagagtt

SEQ ID NO: 1929477 - DNA, 15 bp, Homo sapiens
ttacatgtagagttg

SEQ ID NO: 1929478 - DNA, 15 bp, Homo sapiens
tacatgtagagttgt

SEQ ID NO: 1929479 - DNA, 15 bp, Homo sapiens
acatgtagagttgtt

SEQ ID NO: 1929480 - DNA, 15 bp, Homo sapiens
catgtagagttgttt

SEQ ID NO: 1929481 - DNA, 15 bp, Homo sapiens
atgtagagttgtttt

SEQ ID NO: 1929482 - DNA, 15 bp, Homo sapiens
tgtagagttgttttg

SEQ ID NO: 1929483 - DNA, 15 bp, Homo sapiens
gtagagttgttttga

SEQ ID NO: 1929484 - DNA, 15 bp, Homo sapiens
tagagttgttttgat

SEQ ID NO: 1929485 - DNA, 15 bp, Homo sapiens
agagttgttttgatg

SEQ ID NO: 1929486 - DNA, 15 bp, Homo sapiens
gagttgttttgatgt

SEQ ID NO: 1929487 - DNA, 15 bp, Homo sapiens
agttgttttgatgtt

SEQ ID NO: 1929488 - DNA, 15 bp, Homo sapiens
gttgttttgatgtta

SEQ ID NO: 1929489 - DNA, 15 bp, Homo sapiens
ttgttttgatgttag

SEQ ID NO: 1929490 - DNA, 15 bp, Homo sapiens
tgttttgatgttagg

SEQ ID NO: 1929491 - DNA, 15 bp, Homo sapiens
gttttgatgttagga

SEQ ID NO: 1929492 - DNA, 15 bp, Homo sapiens
ttttgatgttaggag

SEQ ID NO: 1929493 - DNA, 15 bp, Homo sapiens
tttgatgttaggagt

SEQ ID NO: 1929494 - DNA, 15 bp, Homo sapiens
ttgatgttaggagta

SEQ ID NO: 1929495 - DNA, 15 bp, Homo sapiens
tgatgttaggagtag

SEQ ID NO: 1929496 - DNA, 15 bp, Homo sapiens
gatgttaggagtagg

SEQ ID NO: 1929497 - DNA, 15 bp, Homo sapiens
atgttaggagtagga

SEQ ID NO: 1929498 - DNA, 15 bp, Homo sapiens
tgttaggagtaggaa

SEQ ID NO: 1929499 - DNA, 15 bp, Homo sapiens
gttaggagtaggaat

SEQ ID NO: 1929500 - DNA, 15 bp, Homo sapiens
ttaggagtaggaatg

SEQ ID NO: 1929501 - DNA, 15 bp, Homo sapiens
taggagtaggaatgt

SEQ ID NO: 1929502 - DNA, 15 bp, Homo sapiens
aggagtaggaatgtg

SEQ ID NO: 1929503 - DNA, 15 bp, Homo sapiens
ggagtaggaatgtga

SEQ ID NO: 1929504 - DNA, 15 bp, Homo sapiens
gagtaggaatgtgaa

SEQ ID NO: 1929505 - DNA, 15 bp, Homo sapiens
agtaggaatgtgaaa

SEQ ID NO: 1929506 - DNA, 15 bp, Homo sapiens
gtaggaatgtgaaac

SEQ ID NO: 1929507 - DNA, 15 bp, Homo sapiens
taggaatgtgaaaca

SEQ ID NO: 1929508 - DNA, 15 bp, Homo sapiens
aggaatgtgaaacat

SEQ ID NO: 1929509 - DNA, 15 bp, Homo sapiens
ggaatgtgaaacatt

SEQ ID NO: 1929510 - DNA, 15 bp, Homo sapiens
gaatgtgaaacatta

SEQ ID NO: 1929511 - DNA, 15 bp, Homo sapiens
aatgtgaaacattaa

SEQ ID NO: 1929512 - DNA, 15 bp, Homo sapiens
atgtgaaacattaat

SEQ ID NO: 1929513 - DNA, 15 bp, Homo sapiens
tgtgaaacattaata

SEQ ID NO: 1929514 - DNA, 15 bp, Homo sapiens
gtgaaacattaataa

SEQ ID NO: 1929515 - DNA, 15 bp, Homo sapiens
tgaaacattaataaa

SEQ ID NO: 1929516 - DNA, 15 bp, Homo sapiens
gaaacattaataaag

SEQ ID NO: 1929517 - DNA, 15 bp, Homo sapiens
aaacattaataaagc

SEQ ID NO: 1929518 - DNA, 15 bp, Homo sapiens
aacattaataaagca

SEQ ID NO: 1929519 - DNA, 15 bp, Homo sapiens
acattaataaagcac

SEQ ID NO: 1929520 - DNA, 15 bp, Homo sapiens
cattaataaagcaca

SEQ ID NO: 1929521 - DNA, 15 bp, Homo sapiens
attaataaagcacaa

SEQ ID NO: 1929522 - DNA, 15 bp, Homo sapiens
ttaataaagcacaac

SEQ ID NO: 1929523 - DNA, 15 bp, Homo sapiens
taataaagcacaaca

SEQ ID NO: 1929524 - DNA, 15 bp, Homo sapiens
aataaagcacaacaa

SEQ ID NO: 1929525 - DNA, 15 bp, Homo sapiens
ataaagcacaacaaa

SEQ ID NO: 1929526 - DNA, 15 bp, Homo sapiens
taaagcacaacaaat

SEQ ID NO: 1929527 - DNA, 15 bp, Homo sapiens
aaagcacaacaaata

SEQ ID NO: 1929528 - DNA, 15 bp, Homo sapiens
aagcacaacaaatag

SEQ ID NO: 1929529 - DNA, 15 bp, Homo sapiens
agcacaacaaatagt

SEQ ID NO: 1929530 - DNA, 15 bp, Homo sapiens
gcacaacaaatagta

SEQ ID NO: 1929531 - DNA, 15 bp, Homo sapiens
cacaacaaatagtaa

SEQ ID NO: 1929532 - DNA, 15 bp, Homo sapiens
acaacaaatagtaat

SEQ ID NO: 1929533 - DNA, 15 bp, Homo sapiens
caacaaatagtaatc

SEQ ID NO: 1929534 - DNA, 15 bp, Homo sapiens
aacaaatagtaatca

SEQ ID NO: 1929535 - DNA, 15 bp, Homo sapiens
acaaatagtaatcat

SEQ ID NO: 1929536 - DNA, 15 bp, Homo sapiens
caaatagtaatcata

SEQ ID NO: 1929537 - DNA, 15 bp, Homo sapiens
aaatagtaatcatat

SEQ ID NO: 1929538 - DNA, 15 bp, Homo sapiens
aatagtaatcatatg

SEQ ID NO: 1929539 - DNA, 15 bp, Homo sapiens
atagtaatcatatgt

SEQ ID NO: 1929540 - DNA, 15 bp, Homo sapiens
tagtaatcatatgta

SEQ ID NO: 1929541 - DNA, 15 bp, Homo sapiens
agtaatcatatgtat

SEQ ID NO: 1929542 - DNA, 15 bp, Homo sapiens
gtaatcatatgtatg

SEQ ID NO: 1929543 - DNA, 15 bp, Homo sapiens
taatcatatgtatgt

SEQ ID NO: 1929544 - DNA, 15 bp, Homo sapiens
aatcatatgtatgtg

SEQ ID NO: 1929545 - DNA, 15 bp, Homo sapiens
atcatatgtatgtgt

SEQ ID NO: 1929546 - DNA, 15 bp, Homo sapiens
tcatatgtatgtgtg

SEQ ID NO: 1929547 - DNA, 15 bp, Homo sapiens
catatgtatgtgtgt

SEQ ID NO: 1929548 - DNA, 15 bp, Homo sapiens
atatgtatgtgtgta

SEQ ID NO: 1929549 - DNA, 15 bp, Homo sapiens
atgtatgtgtgtatt

SEQ ID NO: 1929550 - DNA, 15 bp, Homo sapiens
tgtatgtgtgtattc

SEQ ID NO: 1929551 - DNA, 15 bp, Homo sapiens
gtatgtgtgtattca

SEQ ID NO: 1929552 - DNA, 15 bp, Homo sapiens
tatgtgtgtattcac

SEQ ID NO: 1929553 - DNA, 15 bp, Homo sapiens
atgtgtgtattcacc

SEQ ID NO: 1929554 - DNA, 15 bp, Homo sapiens
tgtgtgtattcacca

SEQ ID NO: 1929555 - DNA, 15 bp, Homo sapiens
gtgtgtattcaccag

SEQ ID NO: 1929556 - DNA, 15 bp, Homo sapiens
tgtgtattcaccaga

SEQ ID NO: 1929557 - DNA, 15 bp, Homo sapiens
gtgtattcaccagat

SEQ ID NO: 1929558 - DNA, 15 bp, Homo sapiens
tgtattcaccagatt

SEQ ID NO: 1929559 - DNA, 15 bp, Homo sapiens
gtattcaccagattt

SEQ ID NO: 1929560 - DNA, 15 bp, Homo sapiens
tattcaccagattta

SEQ ID NO: 1929561 - DNA, 15 bp, Homo sapiens
attcaccagatttat

SEQ ID NO: 1929562 - DNA, 15 bp, Homo sapiens
ttcaccagatttatt

SEQ ID NO: 1929563 - DNA, 15 bp, Homo sapiens
tcaccagatttattt

SEQ ID NO: 1929564 - DNA, 15 bp, Homo sapiens
caccagatttattta

SEQ ID NO: 1929565 - DNA, 15 bp, Homo sapiens
accagatttatttat

SEQ ID NO: 1929566 - DNA, 15 bp, Homo sapiens
ccagatttatttatg

SEQ ID NO: 1929567 - DNA, 15 bp, Homo sapiens
cagatttatttatgt

SEQ ID NO: 1929568 - DNA, 15 bp, Homo sapiens
agatttatttatgtg

SEQ ID NO: 1929569 - DNA, 15 bp, Homo sapiens
gatttatttatgtgt

SEQ ID NO: 1929570 - DNA, 15 bp, Homo sapiens
atttatttatgtgta

SEQ ID NO: 1929571 - DNA, 15 bp, Homo sapiens
tttatttatgtgtat

SEQ ID NO: 1929572 - DNA, 15 bp, Homo sapiens
ttatttatgtgtata

SEQ ID NO: 1929573 - DNA, 15 bp, Homo sapiens
tatttatgtgtatat

SEQ ID NO: 1929574 - DNA, 15 bp, Homo sapiens
atttatgtgtatatt

SEQ ID NO: 1929575 - DNA, 15 bp, Homo sapiens
tttatgtgtatattt

SEQ ID NO: 1929576 - DNA, 15 bp, Homo sapiens
ttatgtgtatatttc

SEQ ID NO: 1929577 - DNA, 15 bp, Homo sapiens
tatgtgtatatttct

SEQ ID NO: 1929578 - DNA, 15 bp, Homo sapiens
atgtgtatatttcta

SEQ ID NO: 1929579 - DNA, 15 bp, Homo sapiens
tgtgtatatttctac

SEQ ID NO: 1929580 - DNA, 15 bp, Homo sapiens
gtgtatatttctaca

SEQ ID NO: 1929581 - DNA, 15 bp, Homo sapiens
tgtatatttctacat

SEQ ID NO: 1929582 - DNA, 15 bp, Homo sapiens
gtatatttctacatt

SEQ ID NO: 1929583 - DNA, 15 bp, Homo sapiens
tatatttctacattt

SEQ ID NO: 1929584 - DNA, 15 bp, Homo sapiens
atatttctacatttg

SEQ ID NO: 1929585 - DNA, 15 bp, Homo sapiens
tatttctacatttga

SEQ ID NO: 1929586 - DNA, 15 bp, Homo sapiens
atttctacatttgaa

SEQ ID NO: 1929587 - DNA, 15 bp, Homo sapiens
tttctacatttgaaa

SEQ ID NO: 1929588 - DNA, 15 bp, Homo sapiens
ttctacatttgaaag

SEQ ID NO: 1929589 - DNA, 15 bp, Homo sapiens
tctacatttgaaaga

SEQ ID NO: 1929590 - DNA, 15 bp, Homo sapiens
ctacatttgaaagag

SEQ ID NO: 1929591 - DNA, 15 bp, Homo sapiens
tacatttgaaagagg

SEQ ID NO: 1929592 - DNA, 15 bp, Homo sapiens
acatttgaaagagga

SEQ ID NO: 1929593 - DNA, 15 bp, Homo sapiens
catttgaaagaggaa

SEQ ID NO: 1929594 - DNA, 15 bp, Homo sapiens
atttgaaagaggaaa

SEQ ID NO: 1929595 - DNA, 15 bp, Homo sapiens
tttgaaagaggaaaa

SEQ ID NO: 1929596 - DNA, 15 bp, Homo sapiens
ttgaaagaggaaaaa

SEQ ID NO: 1929597 - DNA, 15 bp, Homo sapiens
tgaaagaggaaaaag

SEQ ID NO: 1929598 - DNA, 15 bp, Homo sapiens
gaaagaggaaaaaga

SEQ ID NO: 1929599 - DNA, 15 bp, Homo sapiens
aaagaggaaaaagac

SEQ ID NO: 1929600 - DNA, 15 bp, Homo sapiens
aagaggaaaaagaca

SEQ ID NO: 1929601 - DNA, 15 bp, Homo sapiens
agaggaaaaagacaa

SEQ ID NO: 1929602 - DNA, 15 bp, Homo sapiens
gaggaaaaagacaat

SEQ ID NO: 1929603 - DNA, 15 bp, Homo sapiens
aggaaaaagacaatt

SEQ ID NO: 1929604 - DNA, 15 bp, Homo sapiens
ggaaaaagacaattt

SEQ ID NO: 1929605 - DNA, 15 bp, Homo sapiens
gaaaaagacaatttt

SEQ ID NO: 1929606 - DNA, 15 bp, Homo sapiens
aaaaagacaattttt

SEQ ID NO: 1929607 - DNA, 15 bp, Homo sapiens
aaaagacaattttta

SEQ ID NO: 1929608 - DNA, 15 bp, Homo sapiens
aaagacaatttttaa

SEQ ID NO: 1929609 - DNA, 15 bp, Homo sapiens
aagacaatttttaag

SEQ ID NO: 1929610 - DNA, 15 bp, Homo sapiens
agacaatttttaagt

SEQ ID NO: 1929611 - DNA, 15 bp, Homo sapiens
gacaatttttaagtt

SEQ ID NO: 1929612 - DNA, 15 bp, Homo sapiens
acaatttttaagttt

SEQ ID NO: 1929613 - DNA, 15 bp, Homo sapiens
caatttttaagtttt

SEQ ID NO: 1929614 - DNA, 15 bp, Homo sapiens
aatttttaagttttg

SEQ ID NO: 1929615 - DNA, 15 bp, Homo sapiens
atttttaagttttga

SEQ ID NO: 1929616 - DNA, 15 bp, Homo sapiens
tttttaagttttgac

SEQ ID NO: 1929617 - DNA, 15 bp, Homo sapiens
ttttaagttttgacg

SEQ ID NO: 1929618 - DNA, 15 bp, Homo sapiens
tttaagttttgacgt

SEQ ID NO: 1929619 - DNA, 15 bp, Homo sapiens
ttaagttttgacgta

SEQ ID NO: 1929620 - DNA, 15 bp, Homo sapiens
taagttttgacgtaa

SEQ ID NO: 1929621 - DNA, 15 bp, Homo sapiens
aagttttgacgtaaa

SEQ ID NO: 1929622 - DNA, 15 bp, Homo sapiens
agttttgacgtaaat

SEQ ID NO: 1929623 - DNA, 15 bp, Homo sapiens
gttttgacgtaaatg

SEQ ID NO: 1929624 - DNA, 15 bp, Homo sapiens
ttttgacgtaaatgt

SEQ ID NO: 1929625 - DNA, 15 bp, Homo sapiens
tttgacgtaaatgtt

SEQ ID NO: 1929626 - DNA, 15 bp, Homo sapiens
ttgacgtaaatgttt

SEQ ID NO: 1929627 - DNA, 15 bp, Homo sapiens
tgacgtaaatgttta

SEQ ID NO: 1929628 - DNA, 15 bp, Homo sapiens
gacgtaaatgtttag

SEQ ID NO: 1929629 - DNA, 15 bp, Homo sapiens
acgtaaatgtttagt

SEQ ID NO: 1929630 - DNA, 15 bp, Homo sapiens
cgtaaatgtttagtc

SEQ ID NO: 1929631 - DNA, 15 bp, Homo sapiens
gtaaatgtttagtct

SEQ ID NO: 1929632 - DNA, 15 bp, Homo sapiens
taaatgtttagtctg

SEQ ID NO: 1929633 - DNA, 15 bp, Homo sapiens
aaatgtttagtctga

SEQ ID NO: 1929634 - DNA, 15 bp, Homo sapiens
aatgtttagtctgaa

SEQ ID NO: 1929635 - DNA, 15 bp, Homo sapiens
atgtttagtctgaaa

SEQ ID NO: 1929636 - DNA, 15 bp, Homo sapiens
tgtttagtctgaaat

SEQ ID NO: 1929637 - DNA, 15 bp, Homo sapiens
gtttagtctgaaatt

SEQ ID NO: 1929638 - DNA, 15 bp, Homo sapiens
tttagtctgaaattg

SEQ ID NO: 1929639 - DNA, 15 bp, Homo sapiens
ttagtctgaaattgt

SEQ ID NO: 1929640 - DNA, 15 bp, Homo sapiens
tagtctgaaattgta

SEQ ID NO: 1929641 - DNA, 15 bp, Homo sapiens
agtctgaaattgtac

SEQ ID NO: 1929642 - DNA, 15 bp, Homo sapiens
gtctgaaattgtacg

SEQ ID NO: 1929643 - DNA, 15 bp, Homo sapiens
tctgaaattgtacgt

SEQ ID NO: 1929644 - DNA, 15 bp, Homo sapiens
ctgaaattgtacgtt

SEQ ID NO: 1929645 - DNA, 15 bp, Homo sapiens
tgaaattgtacgttg

SEQ ID NO: 1929646 - DNA, 15 bp, Homo sapiens
gaaattgtacgttgc

SEQ ID NO: 1929647 - DNA, 15 bp, Homo sapiens
aaattgtacgttgca

SEQ ID NO: 1929648 - DNA, 15 bp, Homo sapiens
aattgtacgttgcat

SEQ ID NO: 1929649 - DNA, 15 bp, Homo sapiens
attgtacgttgcatt

SEQ ID NO: 1929650 - DNA, 15 bp, Homo sapiens
ttgtacgttgcatta

SEQ ID NO: 1929651 - DNA, 15 bp, Homo sapiens
tgtacgttgcattag

SEQ ID NO: 1929652 - DNA, 15 bp, Homo sapiens
gtacgttgcattagt

SEQ ID NO: 1929653 - DNA, 15 bp, Homo sapiens
tacgttgcattagtg

SEQ ID NO: 1929654 - DNA, 15 bp, Homo sapiens
acgttgcattagtgt

SEQ ID NO: 1929655 - DNA, 15 bp, Homo sapiens
cgttgcattagtgtg

SEQ ID NO: 1929656 - DNA, 15 bp, Homo sapiens
gttgcattagtgtgc

SEQ ID NO: 1929657 - DNA, 15 bp, Homo sapiens
ttgcattagtgtgca

SEQ ID NO: 1929658 - DNA, 15 bp, Homo sapiens
tgcattagtgtgcaa

SEQ ID NO: 1929659 - DNA, 15 bp, Homo sapiens
gcattagtgtgcaat

SEQ ID NO: 1929660 - DNA, 15 bp, Homo sapiens
cattagtgtgcaatc

SEQ ID NO: 1929661 - DNA, 15 bp, Homo sapiens
attagtgtgcaatct

SEQ ID NO: 1929662 - DNA, 15 bp, Homo sapiens
ttagtgtgcaatctc

SEQ ID NO: 1929663 - DNA, 15 bp, Homo sapiens
tagtgtgcaatctcc

SEQ ID NO: 1929664 - DNA, 15 bp, Homo sapiens
agtgtgcaatctcct

SEQ ID NO: 1929665 - DNA, 15 bp, Homo sapiens
gtgtgcaatctcctg

SEQ ID NO: 1929666 - DNA, 15 bp, Homo sapiens
tgtgcaatctcctgg

SEQ ID NO: 1929667 - DNA, 15 bp, Homo sapiens
gtgcaatctcctggg

SEQ ID NO: 1929668 - DNA, 15 bp, Homo sapiens
tgcaatctcctgggt

SEQ ID NO: 1929669 - DNA, 15 bp, Homo sapiens
gcaatctcctgggta

SEQ ID NO: 1929670 - DNA, 15 bp, Homo sapiens
caatctcctgggtac

SEQ ID NO: 1929671 - DNA, 15 bp, Homo sapiens
aatctcctgggtaca

SEQ ID NO: 1929672 - DNA, 15 bp, Homo sapiens
atctcctgggtacaa

SEQ ID NO: 1929673 - DNA, 15 bp, Homo sapiens
tctcctgggtacaag

SEQ ID NO: 1929674 - DNA, 15 bp, Homo sapiens
ctcctgggtacaagt

SEQ ID NO: 1929675 - DNA, 15 bp, Homo sapiens
tcctgggtacaagta

SEQ ID NO: 1929676 - DNA, 15 bp, Homo sapiens
cctgggtacaagtac

SEQ ID NO: 1929677 - DNA, 15 bp, Homo sapiens
ctgggtacaagtact

SEQ ID NO: 1929678 - DNA, 15 bp, Homo sapiens
tgggtacaagtacta

SEQ ID NO: 1929679 - DNA, 15 bp, Homo sapiens
gggtacaagtactaa

SEQ ID NO: 1929680 - DNA, 15 bp, Homo sapiens
ggtacaagtactaag

SEQ ID NO: 1929681 - DNA, 15 bp, Homo sapiens
gtacaagtactaagt

SEQ ID NO: 1929682 - DNA, 15 bp, Homo sapiens
tacaagtactaagta

SEQ ID NO: 1929683 - DNA, 15 bp, Homo sapiens
acaagtactaagtag

SEQ ID NO: 1929684 - DNA, 15 bp, Homo sapiens
caagtactaagtaga

SEQ ID NO: 1929685 - DNA, 15 bp, Homo sapiens
aagtactaagtagaa

SEQ ID NO: 1929686 - DNA, 15 bp, Homo sapiens
agtactaagtagaat

SEQ ID NO: 1929687 - DNA, 15 bp, Homo sapiens
gtactaagtagaata

SEQ ID NO: 1929688 - DNA, 15 bp, Homo sapiens
tactaagtagaataa

SEQ ID NO: 1929689 - DNA, 15 bp, Homo sapiens
actaagtagaataaa

SEQ ID NO: 1929690 - DNA, 15 bp, Homo sapiens
ctaagtagaataaaa

SEQ ID NO: 1929691 - DNA, 15 bp, Homo sapiens
taagtagaataaaat

SEQ ID NO: 1929692 - DNA, 15 bp, Homo sapiens
aagtagaataaaatc

SEQ ID NO: 1929693 - DNA, 15 bp, Homo sapiens
agtagaataaaatct

SEQ ID NO: 1929694 - DNA, 15 bp, Homo sapiens
gtagaataaaatctt

SEQ ID NO: 1929695 - DNA, 15 bp, Homo sapiens
tagaataaaatcttg

SEQ ID NO: 1929696 - DNA, 15 bp, Homo sapiens
agaataaaatcttgt

SEQ ID NO: 1929697 - DNA, 15 bp, Homo sapiens
gaataaaatcttgtt

SEQ ID NO: 1929698 - DNA, 15 bp, Homo sapiens
aataaaatcttgttt

SEQ ID NO: 1929699 - DNA, 15 bp, Homo sapiens
ataaaatcttgtttc

SEQ ID NO: 1929700 - DNA, 15 bp, Homo sapiens
taaaatcttgtttct

SEQ ID NO: 1929701 - DNA, 15 bp, Homo sapiens
aaaatcttgtttctt

SEQ ID NO: 1929702 - DNA, 15 bp, Homo sapiens
aaatcttgtttctta

SEQ ID NO: 1929703 - DNA, 15 bp, Homo sapiens
aatcttgtttcttaa

SEQ ID NO: 1929704 - DNA, 15 bp, Homo sapiens
atcttgtttcttaaa

SEQ ID NO: 1929705 - DNA, 15 bp, Homo sapiens
tcttgtttcttaaaa

SEQ ID NO: 1929706 - DNA, 15 bp, Homo sapiens
cttgtttcttaaaat

SEQ ID NO: 1929707 - DNA, 15 bp, Homo sapiens
tgtttcttaaaatcc

SEQ ID NO: 1929708 - DNA, 15 bp, Homo sapiens
gtttcttaaaatccc

SEQ ID NO: 1929709 - DNA, 15 bp, Homo sapiens
tttcttaaaatccca

SEQ ID NO: 1929710 - DNA, 15 bp, Homo sapiens
ttcttaaaatcccac

SEQ ID NO: 1929711 - DNA, 15 bp, Homo sapiens
tcttaaaatcccact

SEQ ID NO: 1929712 - DNA, 15 bp, Homo sapiens
cttaaaatcccacta

SEQ ID NO: 1929713 - DNA, 15 bp, Homo sapiens
ttaaaatcccactaa

SEQ ID NO: 1929714 - DNA, 15 bp, Homo sapiens
taaaatcccactaaa

SEQ ID NO: 1929715 - DNA, 15 bp, Homo sapiens
aaaatcccactaaat

SEQ ID NO: 1929716 - DNA, 15 bp, Homo sapiens
aaatcccactaaata

SEQ ID NO: 1929717 - DNA, 15 bp, Homo sapiens
aatcccactaaatat

SEQ ID NO: 1929718 - DNA, 15 bp, Homo sapiens
atcccactaaatatt

SEQ ID NO: 1929719 - DNA, 15 bp, Homo sapiens
tcccactaaatatta

SEQ ID NO: 1929720 - DNA, 15 bp, Homo sapiens
cccactaaatattat

SEQ ID NO: 1929721 - DNA, 15 bp, Homo sapiens
ccactaaatattata

SEQ ID NO: 1929722 - DNA, 15 bp, Homo sapiens
cactaaatattataa

SEQ ID NO: 1929723 - DNA, 15 bp, Homo sapiens
actaaatattataat

SEQ ID NO: 1929724 - DNA, 15 bp, Homo sapiens
ctaaatattataatc

SEQ ID NO: 1929725 - DNA, 15 bp, Homo sapiens
taaatattataatcc

SEQ ID NO: 1929726 - DNA, 15 bp, Homo sapiens
aaatattataatccc

SEQ ID NO: 1929727 - DNA, 15 bp, Homo sapiens
aatattataatccct

SEQ ID NO: 1929728 - DNA, 15 bp, Homo sapiens
atattataatccctg

SEQ ID NO: 1929729 - DNA, 15 bp, Homo sapiens
tattataatccctgt

SEQ ID NO: 1929730 - DNA, 15 bp, Homo sapiens
attataatccctgtg

SEQ ID NO: 1929731 - DNA, 15 bp, Homo sapiens
ttataatccctgtgt

SEQ ID NO: 1929732 - DNA, 15 bp, Homo sapiens
tataatccctgtgta

SEQ ID NO: 1929733 - DNA, 15 bp, Homo sapiens
ataatccctgtgtat

SEQ ID NO: 1929734 - DNA, 15 bp, Homo sapiens
taatccctgtgtatc

SEQ ID NO: 1929735 - DNA, 15 bp, Homo sapiens
aatccctgtgtatca

SEQ ID NO: 1929736 - DNA, 15 bp, Homo sapiens
atccctgtgtatcag

SEQ ID NO: 1929737 - DNA, 15 bp, Homo sapiens
tccctgtgtatcagg

SEQ ID NO: 1929738 - DNA, 15 bp, Homo sapiens
ccctgtgtatcaggg

SEQ ID NO: 1929739 - DNA, 15 bp, Homo sapiens
cctgtgtatcagggg

SEQ ID NO: 1929740 - DNA, 15 bp, Homo sapiens
ctgtgtatcaggggc

SEQ ID NO: 1929741 - DNA, 15 bp, Homo sapiens
tgtgtatcaggggca

SEQ ID NO: 1929742 - DNA, 15 bp, Homo sapiens
gtgtatcaggggcat

SEQ ID NO: 1929743 - DNA, 15 bp, Homo sapiens
tgtatcaggggcatt

SEQ ID NO: 1929744 - DNA, 15 bp, Homo sapiens
gtatcaggggcattc

SEQ ID NO: 1929745 - DNA, 15 bp, Homo sapiens
tatcaggggcattca

SEQ ID NO: 1929746 - DNA, 15 bp, Homo sapiens
atcaggggcattcat

SEQ ID NO: 1929747 - DNA, 15 bp, Homo sapiens
tcaggggcattcatt

SEQ ID NO: 1929748 - DNA, 15 bp, Homo sapiens
caggggcattcattt

SEQ ID NO: 1929749 - DNA, 15 bp, Homo sapiens
aggggcattcattta

SEQ ID NO: 1929750 - DNA, 15 bp, Homo sapiens
ggggcattcatttac

SEQ ID NO: 1929751 - DNA, 15 bp, Homo sapiens
gggcattcatttact

SEQ ID NO: 1929752 - DNA, 15 bp, Homo sapiens
ggcattcatttactt

SEQ ID NO: 1929753 - DNA, 15 bp, Homo sapiens
gcattcatttacttt

SEQ ID NO: 1929754 - DNA, 15 bp, Homo sapiens
cattcatttactttt

SEQ ID NO: 1929755 - DNA, 15 bp, Homo sapiens
attcatttacttttt

SEQ ID NO: 1929756 - DNA, 15 bp, Homo sapiens
ttcatttactttttc

SEQ ID NO: 1929757 - DNA, 15 bp, Homo sapiens
tcatttactttttcc

SEQ ID NO: 1929758 - DNA, 15 bp, Homo sapiens
catttactttttcct

SEQ ID NO: 1929759 - DNA, 15 bp, Homo sapiens
atttactttttccta

SEQ ID NO: 1929760 - DNA, 15 bp, Homo sapiens
tttactttttcctat

SEQ ID NO: 1929761 - DNA, 15 bp, Homo sapiens
ttactttttcctata

SEQ ID NO: 1929762 - DNA, 15 bp, Homo sapiens
tactttttcctataa

SEQ ID NO: 1929763 - DNA, 15 bp, Homo sapiens
actttttcctataac

SEQ ID NO: 1929764 - DNA, 15 bp, Homo sapiens
ctttttcctataaca

SEQ ID NO: 1929765 - DNA, 15 bp, Homo sapiens
tttttcctataacat

SEQ ID NO: 1929766 - DNA, 15 bp, Homo sapiens
ttttcctataacatc

SEQ ID NO: 1929767 - DNA, 15 bp, Homo sapiens
tttcctataacatcc

SEQ ID NO: 1929768 - DNA, 15 bp, Homo sapiens
ttcctataacatcca

SEQ ID NO: 1929769 - DNA, 15 bp, Homo sapiens
tcctataacatccaa

SEQ ID NO: 1929770 - DNA, 15 bp, Homo sapiens
cctataacatccaat

SEQ ID NO: 1929771 - DNA, 15 bp, Homo sapiens
ctataacatccaatg

SEQ ID NO: 1929772 - DNA, 15 bp, Homo sapiens
tataacatccaatgt

SEQ ID NO: 1929773 - DNA, 15 bp, Homo sapiens
ataacatccaatgtt

SEQ ID NO: 1929774 - DNA, 15 bp, Homo sapiens
taacatccaatgttc

SEQ ID NO: 1929775 - DNA, 15 bp, Homo sapiens
aacatccaatgttct

SEQ ID NO: 1929776 - DNA, 15 bp, Homo sapiens
acatccaatgttcta

SEQ ID NO: 1929777 - DNA, 15 bp, Homo sapiens
catccaatgttctag

SEQ ID NO: 1929778 - DNA, 15 bp, Homo sapiens
atccaatgttctagg

SEQ ID NO: 1929779 - DNA, 15 bp, Homo sapiens
tccaatgttctaggg

SEQ ID NO: 1929780 - DNA, 15 bp, Homo sapiens
ccaatgttctagggc

SEQ ID NO: 1929781 - DNA, 15 bp, Homo sapiens
caatgttctagggca

SEQ ID NO: 1929782 - DNA, 15 bp, Homo sapiens
aatgttctagggcag

SEQ ID NO: 1929783 - DNA, 15 bp, Homo sapiens
atgttctagggcaga

SEQ ID NO: 1929784 - DNA, 15 bp, Homo sapiens
tgttctagggcagaa

SEQ ID NO: 1929785 - DNA, 15 bp, Homo sapiens
gttctagggcagaaa

SEQ ID NO: 1929786 - DNA, 15 bp, Homo sapiens
ttctagggcagaaac

SEQ ID NO: 1929787 - DNA, 15 bp, Homo sapiens
tctagggcagaaacc

SEQ ID NO: 1929788 - DNA, 15 bp, Homo sapiens
ctagggcagaaacca

SEQ ID NO: 1929789 - DNA, 15 bp, Homo sapiens
tagggcagaaaccat

SEQ ID NO: 1929790 - DNA, 15 bp, Homo sapiens
agggcagaaaccatg

SEQ ID NO: 1929791 - DNA, 15 bp, Homo sapiens
gggcagaaaccatgt

SEQ ID NO: 1929792 - DNA, 15 bp, Homo sapiens
ggcagaaaccatgtt

SEQ ID NO: 1929793 - DNA, 15 bp, Homo sapiens
gcagaaaccatgtta

SEQ ID NO: 1929794 - DNA, 15 bp, Homo sapiens
cagaaaccatgttac

SEQ ID NO: 1929795 - DNA, 15 bp, Homo sapiens
agaaaccatgttact

SEQ ID NO: 1929796 - DNA, 15 bp, Homo sapiens
gaaaccatgttacta

SEQ ID NO: 1929797 - DNA, 15 bp, Homo sapiens
aaaccatgttactac

SEQ ID NO: 1929798 - DNA, 15 bp, Homo sapiens
aaccatgttactaca

SEQ ID NO: 1929799 - DNA, 15 bp, Homo sapiens
accatgttactacaa

SEQ ID NO: 1929800 - DNA, 15 bp, Homo sapiens
ccatgttactacaat

SEQ ID NO: 1929801 - DNA, 15 bp, Homo sapiens
catgttactacaata

SEQ ID NO: 1929802 - DNA, 15 bp, Homo sapiens
atgttactacaatag

SEQ ID NO: 1929803 - DNA, 15 bp, Homo sapiens
tgttactacaatagt

SEQ ID NO: 1929804 - DNA, 15 bp, Homo sapiens
gttactacaatagta

SEQ ID NO: 1929805 - DNA, 15 bp, Homo sapiens
ttactacaatagtat

SEQ ID NO: 1929806 - DNA, 15 bp, Homo sapiens
tactacaatagtatt

SEQ ID NO: 1929807 - DNA, 15 bp, Homo sapiens
actacaatagtattt

SEQ ID NO: 1929808 - DNA, 15 bp, Homo sapiens
ctacaatagtatttg

SEQ ID NO: 1929809 - DNA, 15 bp, Homo sapiens
tacaatagtatttgt

SEQ ID NO: 1929810 - DNA, 15 bp, Homo sapiens
acaatagtatttgtt

SEQ ID NO: 1929811 - DNA, 15 bp, Homo sapiens
caatagtatttgtta

SEQ ID NO: 1929812 - DNA, 15 bp, Homo sapiens
aatagtatttgttag

SEQ ID NO: 1929813 - DNA, 15 bp, Homo sapiens
atagtatttgttagc

SEQ ID NO: 1929814 - DNA, 15 bp, Homo sapiens
tagtatttgttagca

SEQ ID NO: 1929815 - DNA, 15 bp, Homo sapiens
agtatttgttagcag

SEQ ID NO: 1929816 - DNA, 15 bp, Homo sapiens
gtatttgttagcaga

SEQ ID NO: 1929817 - DNA, 15 bp, Homo sapiens
tatttgttagcagaa

SEQ ID NO: 1929818 - DNA, 15 bp, Homo sapiens
atttgttagcagaac

SEQ ID NO: 1929819 - DNA, 15 bp, Homo sapiens
tttgttagcagaaca

SEQ ID NO: 1929820 - DNA, 15 bp, Homo sapiens
ttgttagcagaacag

SEQ ID NO: 1929821 - DNA, 15 bp, Homo sapiens
tgttagcagaacagg

SEQ ID NO: 1929822 - DNA, 15 bp, Homo sapiens
gttagcagaacagga

SEQ ID NO: 1929823 - DNA, 15 bp, Homo sapiens
ttagcagaacaggag

SEQ ID NO: 1929824 - DNA, 15 bp, Homo sapiens
tagcagaacaggagg

SEQ ID NO: 1929825 - DNA, 15 bp, Homo sapiens
agcagaacaggagga

SEQ ID NO: 1929826 - DNA, 15 bp, Homo sapiens
gcagaacaggaggaa

SEQ ID NO: 1929827 - DNA, 15 bp, Homo sapiens
cagaacaggaggaaa

SEQ ID NO: 1929828 - DNA, 15 bp, Homo sapiens
agaacaggaggaaag

SEQ ID NO: 1929829 - DNA, 15 bp, Homo sapiens
gaacaggaggaaagc

SEQ ID NO: 1929830 - DNA, 15 bp, Homo sapiens
aacaggaggaaagct

SEQ ID NO: 1929831 - DNA, 15 bp, Homo sapiens
acaggaggaaagctg

SEQ ID NO: 1929832 - DNA, 15 bp, Homo sapiens
caggaggaaagctga

SEQ ID NO: 1929833 - DNA, 15 bp, Homo sapiens
aggaggaaagctgaa

SEQ ID NO: 1929834 - DNA, 15 bp, Homo sapiens
ggaggaaagctgaat

SEQ ID NO: 1929835 - DNA, 15 bp, Homo sapiens
gaggaaagctgaatc

SEQ ID NO: 1929836 - DNA, 15 bp, Homo sapiens
aggaaagctgaatcc

SEQ ID NO: 1929837 - DNA, 15 bp, Homo sapiens
ggaaagctgaatcca

SEQ ID NO: 1929838 - DNA, 15 bp, Homo sapiens
gaaagctgaatccat

SEQ ID NO: 1929839 - DNA, 15 bp, Homo sapiens
aaagctgaatccata

SEQ ID NO: 1929840 - DNA, 15 bp, Homo sapiens
aagctgaatccatat

SEQ ID NO: 1929841 - DNA, 15 bp, Homo sapiens
agctgaatccatata

SEQ ID NO: 1929842 - DNA, 15 bp, Homo sapiens
gctgaatccatatat

SEQ ID NO: 1929843 - DNA, 15 bp, Homo sapiens
ctgaatccatatata

SEQ ID NO: 1929844 - DNA, 15 bp, Homo sapiens
tgaatccatatataa

SEQ ID NO: 1929845 - DNA, 15 bp, Homo sapiens
gaatccatatataaa

SEQ ID NO: 1929846 - DNA, 15 bp, Homo sapiens
aatccatatataaat

SEQ ID NO: 1929847 - DNA, 15 bp, Homo sapiens
atccatatataaata

SEQ ID NO: 1929848 - DNA, 15 bp, Homo sapiens
tccatatataaatat

SEQ ID NO: 1929849 - DNA, 15 bp, Homo sapiens
ccatatataaatata

SEQ ID NO: 1929850 - DNA, 15 bp, Homo sapiens
catatataaatataa

SEQ ID NO: 1929851 - DNA, 15 bp, Homo sapiens
atatataaatataaa

SEQ ID NO: 1929852 - DNA, 15 bp, Homo sapiens
tatataaatataaaa

SEQ ID NO: 1929853 - DNA, 15 bp, Homo sapiens
atataaatataaaac

SEQ ID NO: 1929854 - DNA, 15 bp, Homo sapiens
tataaatataaaaca

SEQ ID NO: 1929855 - DNA, 15 bp, Homo sapiens
ataaatataaaacag

SEQ ID NO: 1929856 - DNA, 15 bp, Homo sapiens
taaatataaaacagc

SEQ ID NO: 1929857 - DNA, 15 bp, Homo sapiens
aaatataaaacagca

SEQ ID NO: 1929858 - DNA, 15 bp, Homo sapiens
aatataaaacagcaa

SEQ ID NO: 1929859 - DNA, 15 bp, Homo sapiens
atataaaacagcaaa

SEQ ID NO: 1929860 - DNA, 15 bp, Homo sapiens
tataaaacagcaaaa

SEQ ID NO: 1929861 - DNA, 15 bp, Homo sapiens
ataaaacagcaaaag

SEQ ID NO: 1929862 - DNA, 15 bp, Homo sapiens
taaaacagcaaaagt

SEQ ID NO: 1929863 - DNA, 15 bp, Homo sapiens
aaaacagcaaaagtg

SEQ ID NO: 1929864 - DNA, 15 bp, Homo sapiens
aaacagcaaaagtgc

SEQ ID NO: 1929865 - DNA, 15 bp, Homo sapiens
aacagcaaaagtgct

SEQ ID NO: 1929866 - DNA, 15 bp, Homo sapiens
acagcaaaagtgctt

SEQ ID NO: 1929867 - DNA, 15 bp, Homo sapiens
cagcaaaagtgcttt

SEQ ID NO: 1929868 - DNA, 15 bp, Homo sapiens
agcaaaagtgctttt

SEQ ID NO: 1929869 - DNA, 15 bp, Homo sapiens
gcaaaagtgctttta

SEQ ID NO: 1929870 - DNA, 15 bp, Homo sapiens
caaaagtgcttttat

SEQ ID NO: 1929871 - DNA, 15 bp, Homo sapiens
aaaagtgcttttatc

SEQ ID NO: 1929872 - DNA, 15 bp, Homo sapiens
aaagtgcttttatct

SEQ ID NO: 1929873 - DNA, 15 bp, Homo sapiens
aagtgcttttatctc

SEQ ID NO: 1929874 - DNA, 15 bp, Homo sapiens
agtgcttttatctca

SEQ ID NO: 1929875 - DNA, 15 bp, Homo sapiens
gtgcttttatctcag

SEQ ID NO: 1929876 - DNA, 15 bp, Homo sapiens
tgcttttatctcagt

SEQ ID NO: 1929877 - DNA, 15 bp, Homo sapiens
gcttttatctcagtt

SEQ ID NO: 1929878 - DNA, 15 bp, Homo sapiens
cttttatctcagtta

SEQ ID NO: 1929879 - DNA, 15 bp, Homo sapiens
ttttatctcagttat

SEQ ID NO: 1929880 - DNA, 15 bp, Homo sapiens
tttatctcagttatt

SEQ ID NO: 1929881 - DNA, 15 bp, Homo sapiens
ttatctcagttattt

SEQ ID NO: 1929882 - DNA, 15 bp, Homo sapiens
tatctcagttatttc

SEQ ID NO: 1929883 - DNA, 15 bp, Homo sapiens
atctcagttatttcc

SEQ ID NO: 1929884 - DNA, 15 bp, Homo sapiens
tctcagttatttcct

SEQ ID NO: 1929885 - DNA, 15 bp, Homo sapiens
ctcagttatttcctg

SEQ ID NO: 1929886 - DNA, 15 bp, Homo sapiens
tcagttatttcctgg

SEQ ID NO: 1929887 - DNA, 15 bp, Homo sapiens
cagttatttcctggg

SEQ ID NO: 1929888 - DNA, 15 bp, Homo sapiens
agttatttcctggga

SEQ ID NO: 1929889 - DNA, 15 bp, Homo sapiens
gttatttcctgggaa

SEQ ID NO: 1929890 - DNA, 15 bp, Homo sapiens
ttatttcctgggaat

SEQ ID NO: 1929891 - DNA, 15 bp, Homo sapiens
tatttcctgggaata

SEQ ID NO: 1929892 - DNA, 15 bp, Homo sapiens
atttcctgggaatat

SEQ ID NO: 1929893 - DNA, 15 bp, Homo sapiens
tttcctgggaatatt

SEQ ID NO: 1929894 - DNA, 15 bp, Homo sapiens
ttcctgggaatattt

SEQ ID NO: 1929895 - DNA, 15 bp, Homo sapiens
tcctgggaatatttc

SEQ ID NO: 1929896 - DNA, 15 bp, Homo sapiens
cctgggaatatttct

SEQ ID NO: 1929897 - DNA, 15 bp, Homo sapiens
ctgggaatatttctg

SEQ ID NO: 1929898 - DNA, 15 bp, Homo sapiens
tgggaatatttctgc

SEQ ID NO: 1929899 - DNA, 15 bp, Homo sapiens
gggaatatttctgct

SEQ ID NO: 1929900 - DNA, 15 bp, Homo sapiens
ggaatatttctgctg

SEQ ID NO: 1929901 - DNA, 15 bp, Homo sapiens
gaatatttctgctga

SEQ ID NO: 1929902 - DNA, 15 bp, Homo sapiens
aatatttctgctgat

SEQ ID NO: 1929903 - DNA, 15 bp, Homo sapiens
atatttctgctgatc

SEQ ID NO: 1929904 - DNA, 15 bp, Homo sapiens
tatttctgctgatct

SEQ ID NO: 1929905 - DNA, 15 bp, Homo sapiens
atttctgctgatctt

SEQ ID NO: 1929906 - DNA, 15 bp, Homo sapiens
tttctgctgatctta

SEQ ID NO: 1929907 - DNA, 15 bp, Homo sapiens
ttctgctgatcttaa

SEQ ID NO: 1929908 - DNA, 15 bp, Homo sapiens
tctgctgatcttaag

SEQ ID NO: 1929909 - DNA, 15 bp, Homo sapiens
ctgctgatcttaaga

SEQ ID NO: 1929910 - DNA, 15 bp, Homo sapiens
tgctgatcttaagat

SEQ ID NO: 1929911 - DNA, 15 bp, Homo sapiens
gctgatcttaagatt

SEQ ID NO: 1929912 - DNA, 15 bp, Homo sapiens
ctgatcttaagattt

SEQ ID NO: 1929913 - DNA, 15 bp, Homo sapiens
tgatcttaagatttc

SEQ ID NO: 1929914 - DNA, 15 bp, Homo sapiens
gatcttaagatttcc

SEQ ID NO: 1929915 - DNA, 15 bp, Homo sapiens
atcttaagatttcct

SEQ ID NO: 1929916 - DNA, 15 bp, Homo sapiens
tcttaagatttcctc

SEQ ID NO: 1929917 - DNA, 15 bp, Homo sapiens
cttaagatttcctct

SEQ ID NO: 1929918 - DNA, 15 bp, Homo sapiens
ttaagatttcctctt

SEQ ID NO: 1929919 - DNA, 15 bp, Homo sapiens
taagatttcctcttc

SEQ ID NO: 1929920 - DNA, 15 bp, Homo sapiens
aagatttcctcttca

SEQ ID NO: 1929921 - DNA, 15 bp, Homo sapiens
agatttcctcttcag

SEQ ID NO: 1929922 - DNA, 15 bp, Homo sapiens
gatttcctcttcagt

SEQ ID NO: 1929923 - DNA, 15 bp, Homo sapiens
atttcctcttcagtt

SEQ ID NO: 1929924 - DNA, 15 bp, Homo sapiens
tttcctcttcagttt

SEQ ID NO: 1929925 - DNA, 15 bp, Homo sapiens
ttcctcttcagtttg

SEQ ID NO: 1929926 - DNA, 15 bp, Homo sapiens
tcctcttcagtttgt

SEQ ID NO: 1929927 - DNA, 15 bp, Homo sapiens
cctcttcagtttgta

SEQ ID NO: 1929928 - DNA, 15 bp, Homo sapiens
ctcttcagtttgtat

SEQ ID NO: 1929929 - DNA, 15 bp, Homo sapiens
tcttcagtttgtatg

SEQ ID NO: 1929930 - DNA, 15 bp, Homo sapiens
cttcagtttgtatgt

SEQ ID NO: 1929931 - DNA, 15 bp, Homo sapiens
ttcagtttgtatgta

SEQ ID NO: 1929932 - DNA, 15 bp, Homo sapiens
tcagtttgtatgtat

SEQ ID NO: 1929933 - DNA, 15 bp, Homo sapiens
cagtttgtatgtata

SEQ ID NO: 1929934 - DNA, 15 bp, Homo sapiens
agtttgtatgtataa

SEQ ID NO: 1929935 - DNA, 15 bp, Homo sapiens
gtttgtatgtataaa

SEQ ID NO: 1929936 - DNA, 15 bp, Homo sapiens
tttgtatgtataaaa

SEQ ID NO: 1929937 - DNA, 15 bp, Homo sapiens
ttgtatgtataaaaa

SEQ ID NO: 1929938 - DNA, 15 bp, Homo sapiens
tgtatgtataaaaac

SEQ ID NO: 1929939 - DNA, 15 bp, Homo sapiens
gtatgtataaaaact

SEQ ID NO: 1929940 - DNA, 15 bp, Homo sapiens
tatgtataaaaactg

SEQ ID NO: 1929941 - DNA, 15 bp, Homo sapiens
atgtataaaaactga

SEQ ID NO: 1929942 - DNA, 15 bp, Homo sapiens
tgtataaaaactgat

SEQ ID NO: 1929943 - DNA, 15 bp, Homo sapiens
gtataaaaactgata

SEQ ID NO: 1929944 - DNA, 15 bp, Homo sapiens
tataaaaactgataa

SEQ ID NO: 1929945 - DNA, 15 bp, Homo sapiens
ataaaaactgataat

SEQ ID NO: 1929946 - DNA, 15 bp, Homo sapiens
taaaaactgataatg

SEQ ID NO: 1929947 - DNA, 15 bp, Homo sapiens
aaaaactgataatgt

SEQ ID NO: 1929948 - DNA, 15 bp, Homo sapiens
aaaactgataatgta

SEQ ID NO: 1929949 - DNA, 15 bp, Homo sapiens
aaactgataatgtaa

SEQ ID NO: 1929950 - DNA, 15 bp, Homo sapiens
aactgataatgtaat

SEQ ID NO: 1929951 - DNA, 15 bp, Homo sapiens
actgataatgtaatg

SEQ ID NO: 1929952 - DNA, 15 bp, Homo sapiens
ctgataatgtaatgg

SEQ ID NO: 1929953 - DNA, 15 bp, Homo sapiens
tgataatgtaatggg

SEQ ID NO: 1929954 - DNA, 15 bp, Homo sapiens
gataatgtaatggga

SEQ ID NO: 1929955 - DNA, 15 bp, Homo sapiens
ataatgtaatgggaa

SEQ ID NO: 1929956 - DNA, 15 bp, Homo sapiens
taatgtaatgggaat

SEQ ID NO: 1929957 - DNA, 15 bp, Homo sapiens
aatgtaatgggaatt

SEQ ID NO: 1929958 - DNA, 15 bp, Homo sapiens
atgtaatgggaatta

SEQ ID NO: 1929959 - DNA, 15 bp, Homo sapiens
tgtaatgggaattac

SEQ ID NO: 1929960 - DNA, 15 bp, Homo sapiens
gtaatgggaattaca

SEQ ID NO: 1929961 - DNA, 15 bp, Homo sapiens
taatgggaattacat

SEQ ID NO: 1929962 - DNA, 15 bp, Homo sapiens
aatgggaattacatt

SEQ ID NO: 1929963 - DNA, 15 bp, Homo sapiens
atgggaattacatta

SEQ ID NO: 1929964 - DNA, 15 bp, Homo sapiens
tgggaattacattat

SEQ ID NO: 1929965 - DNA, 15 bp, Homo sapiens
gggaattacattatc

SEQ ID NO: 1929966 - DNA, 15 bp, Homo sapiens
ggaattacattatca

SEQ ID NO: 1929967 - DNA, 15 bp, Homo sapiens
gaattacattatcag

SEQ ID NO: 1929968 - DNA, 15 bp, Homo sapiens
aattacattatcagt

SEQ ID NO: 1929969 - DNA, 15 bp, Homo sapiens
attacattatcagtt

SEQ ID NO: 1929970 - DNA, 15 bp, Homo sapiens
ttacattatcagtta

SEQ ID NO: 1929971 - DNA, 15 bp, Homo sapiens
tacattatcagttat

SEQ ID NO: 1929972 - DNA, 15 bp, Homo sapiens
acattatcagttatg

SEQ ID NO: 1929973 - DNA, 15 bp, Homo sapiens
cattatcagttatgt

SEQ ID NO: 1929974 - DNA, 15 bp, Homo sapiens
attatcagttatgta

SEQ ID NO: 1929975 - DNA, 15 bp, Homo sapiens
ttatcagttatgtat

SEQ ID NO: 1929976 - DNA, 15 bp, Homo sapiens
tatcagttatgtatg

SEQ ID NO: 1929977 - DNA, 15 bp, Homo sapiens
atcagttatgtatgc

SEQ ID NO: 1929978 - DNA, 15 bp, Homo sapiens
tcagttatgtatgca

SEQ ID NO: 1929979 - DNA, 15 bp, Homo sapiens
cagttatgtatgcat

SEQ ID NO: 1929980 - DNA, 15 bp, Homo sapiens
agttatgtatgcatt

SEQ ID NO: 1929981 - DNA, 15 bp, Homo sapiens
gttatgtatgcatta

SEQ ID NO: 1929982 - DNA, 15 bp, Homo sapiens
ttatgtatgcattaa

SEQ ID NO: 1929983 - DNA, 15 bp, Homo sapiens
tatgtatgcattaat

SEQ ID NO: 1929984 - DNA, 15 bp, Homo sapiens
atgtatgcattaatt

SEQ ID NO: 1929985 - DNA, 15 bp, Homo sapiens
tgtatgcattaattg

SEQ ID NO: 1929986 - DNA, 15 bp, Homo sapiens
gtatgcattaattga

SEQ ID NO: 1929987 - DNA, 15 bp, Homo sapiens
tatgcattaattgaa

SEQ ID NO: 1929988 - DNA, 15 bp, Homo sapiens
atgcattaattgaag

SEQ ID NO: 1929989 - DNA, 15 bp, Homo sapiens
tgcattaattgaagg

SEQ ID NO: 1929990 - DNA, 15 bp, Homo sapiens
gcattaattgaaggt

SEQ ID NO: 1929991 - DNA, 15 bp, Homo sapiens
cattaattgaaggtt

SEQ ID NO: 1929992 - DNA, 15 bp, Homo sapiens
attaattgaaggttt

SEQ ID NO: 1929993 - DNA, 15 bp, Homo sapiens
ttaattgaaggtttt

SEQ ID NO: 1929994 - DNA, 15 bp, Homo sapiens
taattgaaggttttt

SEQ ID NO: 1929995 - DNA, 15 bp, Homo sapiens
aattgaaggtttttt

SEQ ID NO: 1929996 - DNA, 15 bp, Homo sapiens
attgaaggtttttta

SEQ ID NO: 1929997 - DNA, 15 bp, Homo sapiens
ttgaaggttttttaa

SEQ ID NO: 1929998 - DNA, 15 bp, Homo sapiens
tgaaggttttttaat

SEQ ID NO: 1929999 - DNA, 15 bp, Homo sapiens
gaaggttttttaatc

SEQ ID NO: 1930000 - DNA, 15 bp, Homo sapiens
aaggttttttaatcc

SEQ ID NO: 1930001 - DNA, 15 bp, Homo sapiens
aggttttttaatcca

SEQ ID NO: 1930002 - DNA, 15 bp, Homo sapiens
ggttttttaatccaa

SEQ ID NO: 1930003 - DNA, 15 bp, Homo sapiens
gttttttaatccaat

SEQ ID NO: 1930004 - DNA, 15 bp, Homo sapiens
ttttttaatccaatt

SEQ ID NO: 1930005 - DNA, 15 bp, Homo sapiens
tttttaatccaatta

SEQ ID NO: 1930006 - DNA, 15 bp, Homo sapiens
ttttaatccaattaa

SEQ ID NO: 1930007 - DNA, 15 bp, Homo sapiens
tttaatccaattaaa

SEQ ID NO: 1930008 - DNA, 15 bp, Homo sapiens
ttaatccaattaaac

SEQ ID NO: 1930009 - DNA, 15 bp, Homo sapiens
taatccaattaaaca

SEQ ID NO: 1930010 - DNA, 15 bp, Homo sapiens
aatccaattaaacag

SEQ ID NO: 1930011 - DNA, 15 bp, Homo sapiens
atccaattaaacagt

SEQ ID NO: 1930012 - DNA, 15 bp, Homo sapiens
tccaattaaacagtt

SEQ ID NO: 1930013 - DNA, 15 bp, Homo sapiens
ccaattaaacagttg

SEQ ID NO: 1930014 - DNA, 15 bp, Homo sapiens
caattaaacagttgt

SEQ ID NO: 1930015 - DNA, 15 bp, Homo sapiens
aattaaacagttgtg

SEQ ID NO: 1930016 - DNA, 15 bp, Homo sapiens
attaaacagttgtgt

SEQ ID NO: 1930017 - DNA, 15 bp, Homo sapiens
ttaaacagttgtgta

SEQ ID NO: 1930018 - DNA, 15 bp, Homo sapiens
taaacagttgtgtaa

SEQ ID NO: 1930019 - DNA, 15 bp, Homo sapiens
aaacagttgtgtaaa

SEQ ID NO: 1930020 - DNA, 15 bp, Homo sapiens
aacagttgtgtaaat

SEQ ID NO: 1930021 - DNA, 15 bp, Homo sapiens
acagttgtgtaaata

SEQ ID NO: 1930022 - DNA, 15 bp, Homo sapiens
cagttgtgtaaatac

SEQ ID NO: 1930023 - DNA, 15 bp, Homo sapiens
agttgtgtaaatact

SEQ ID NO: 1930024 - DNA, 15 bp, Homo sapiens
gttgtgtaaatactg

SEQ ID NO: 1930025 - DNA, 15 bp, Homo sapiens
ttgtgtaaatactgt

SEQ ID NO: 1930026 - DNA, 15 bp, Homo sapiens
tgtgtaaatactgtg

SEQ ID NO: 1930027 - DNA, 15 bp, Homo sapiens
gtgtaaatactgtga

SEQ ID NO: 1930028 - DNA, 15 bp, Homo sapiens
tgtaaatactgtgac

SEQ ID NO: 1930029 - DNA, 15 bp, Homo sapiens
gtaaatactgtgaca

SEQ ID NO: 1930030 - DNA, 15 bp, Homo sapiens
taaatactgtgacaa

SEQ ID NO: 1930031 - DNA, 15 bp, Homo sapiens
aaatactgtgacaag

SEQ ID NO: 1930032 - DNA, 15 bp, Homo sapiens
aatactgtgacaaga

SEQ ID NO: 1930033 - DNA, 15 bp, Homo sapiens
atactgtgacaagat

SEQ ID NO: 1930034 - DNA, 15 bp, Homo sapiens
tactgtgacaagatt

SEQ ID NO: 1930035 - DNA, 15 bp, Homo sapiens
actgtgacaagattt

SEQ ID NO: 1930036 - DNA, 15 bp, Homo sapiens
ctgtgacaagatttt

SEQ ID NO: 1930037 - DNA, 15 bp, Homo sapiens
tgtgacaagatttta

SEQ ID NO: 1930038 - DNA, 15 bp, Homo sapiens
gtgacaagattttag

SEQ ID NO: 1930039 - DNA, 15 bp, Homo sapiens
tgacaagattttagt

SEQ ID NO: 1930040 - DNA, 15 bp, Homo sapiens
gacaagattttagtg

SEQ ID NO: 1930041 - DNA, 15 bp, Homo sapiens
acaagattttagtga

SEQ ID NO: 1930042 - DNA, 15 bp, Homo sapiens
caagattttagtgac

SEQ ID NO: 1930043 - DNA, 15 bp, Homo sapiens
aagattttagtgaca

SEQ ID NO: 1930044 - DNA, 15 bp, Homo sapiens
agattttagtgacat

SEQ ID NO: 1930045 - DNA, 15 bp, Homo sapiens
gattttagtgacatg

SEQ ID NO: 1930046 - DNA, 15 bp, Homo sapiens
attttagtgacatgt

SEQ ID NO: 1930047 - DNA, 15 bp, Homo sapiens
ttttagtgacatgtc

SEQ ID NO: 1930048 - DNA, 15 bp, Homo sapiens
tttagtgacatgtct

SEQ ID NO: 1930049 - DNA, 15 bp, Homo sapiens
ttagtgacatgtctc

SEQ ID NO: 1930050 - DNA, 15 bp, Homo sapiens
tagtgacatgtctct

SEQ ID NO: 1930051 - DNA, 15 bp, Homo sapiens
agtgacatgtctctt

SEQ ID NO: 1930052 - DNA, 15 bp, Homo sapiens
gtgacatgtctcttt

SEQ ID NO: 1930053 - DNA, 15 bp, Homo sapiens
tgacatgtctcttta

SEQ ID NO: 1930054 - DNA, 15 bp, Homo sapiens
gacatgtctctttat

SEQ ID NO: 1930055 - DNA, 15 bp, Homo sapiens
acatgtctctttatc

SEQ ID NO: 1930056 - DNA, 15 bp, Homo sapiens
catgtctctttatca

SEQ ID NO: 1930057 - DNA, 15 bp, Homo sapiens
atgtctctttatcat

SEQ ID NO: 1930058 - DNA, 15 bp, Homo sapiens
tgtctctttatcata

SEQ ID NO: 1930059 - DNA, 15 bp, Homo sapiens
gtctctttatcataa

SEQ ID NO: 1930060 - DNA, 15 bp, Homo sapiens
tctctttatcataag

SEQ ID NO: 1930061 - DNA, 15 bp, Homo sapiens
ctctttatcataaga

SEQ ID NO: 1930062 - DNA, 15 bp, Homo sapiens
tctttatcataagaa

SEQ ID NO: 1930063 - DNA, 15 bp, Homo sapiens
ctttatcataagaac

SEQ ID NO: 1930064 - DNA, 15 bp, Homo sapiens
tttatcataagaact

SEQ ID NO: 1930065 - DNA, 15 bp, Homo sapiens
ttatcataagaactc

SEQ ID NO: 1930066 - DNA, 15 bp, Homo sapiens
tatcataagaactca

SEQ ID NO: 1930067 - DNA, 15 bp, Homo sapiens
atcataagaactcaa

SEQ ID NO: 1930068 - DNA, 15 bp, Homo sapiens
tcataagaactcaag

SEQ ID NO: 1930069 - DNA, 15 bp, Homo sapiens
cataagaactcaaga

SEQ ID NO: 1930070 - DNA, 15 bp, Homo sapiens
ataagaactcaagat

SEQ ID NO: 1930071 - DNA, 15 bp, Homo sapiens
taagaactcaagatt

SEQ ID NO: 1930072 - DNA, 15 bp, Homo sapiens
aagaactcaagattt

SEQ ID NO: 1930073 - DNA, 15 bp, Homo sapiens
agaactcaagattta

SEQ ID NO: 1930074 - DNA, 15 bp, Homo sapiens
gaactcaagatttat

SEQ ID NO: 1930075 - DNA, 15 bp, Homo sapiens
aactcaagatttata

SEQ ID NO: 1930076 - DNA, 15 bp, Homo sapiens
actcaagatttatag

SEQ ID NO: 1930077 - DNA, 15 bp, Homo sapiens
ctcaagatttatagg

SEQ ID NO: 1930078 - DNA, 15 bp, Homo sapiens
tcaagatttataggg

SEQ ID NO: 1930079 - DNA, 15 bp, Homo sapiens
caagatttatagggc

SEQ ID NO: 1930080 - DNA, 15 bp, Homo sapiens
aagatttatagggct

SEQ ID NO: 1930081 - DNA, 15 bp, Homo sapiens
agatttatagggctt

SEQ ID NO: 1930082 - DNA, 15 bp, Homo sapiens
gatttatagggcttt

SEQ ID NO: 1930083 - DNA, 15 bp, Homo sapiens
atttatagggctttt

SEQ ID NO: 1930084 - DNA, 15 bp, Homo sapiens
tttatagggcttttt

SEQ ID NO: 1930085 - DNA, 15 bp, Homo sapiens
ttatagggcttttta

SEQ ID NO: 1930086 - DNA, 15 bp, Homo sapiens
tatagggctttttaa

SEQ ID NO: 1930087 - DNA, 15 bp, Homo sapiens
atagggctttttaaa

SEQ ID NO: 1930088 - DNA, 15 bp, Homo sapiens
tagggctttttaaaa

SEQ ID NO: 1930089 - DNA, 15 bp, Homo sapiens
agggctttttaaaaa

SEQ ID NO: 1930090 - DNA, 15 bp, Homo sapiens
gggctttttaaaaag

SEQ ID NO: 1930091 - DNA, 15 bp, Homo sapiens
ggctttttaaaaagc

SEQ ID NO: 1930092 - DNA, 15 bp, Homo sapiens
gctttttaaaaagct

SEQ ID NO: 1930093 - DNA, 15 bp, Homo sapiens
ctttttaaaaagcta

SEQ ID NO: 1930094 - DNA, 15 bp, Homo sapiens
tttttaaaaagctag

SEQ ID NO: 1930095 - DNA, 15 bp, Homo sapiens
ttttaaaaagctagt

SEQ ID NO: 1930096 - DNA, 15 bp, Homo sapiens
tttaaaaagctagtc

SEQ ID NO: 1930097 - DNA, 15 bp, Homo sapiens
ttaaaaagctagtca

SEQ ID NO: 1930098 - DNA, 15 bp, Homo sapiens
taaaaagctagtcat

SEQ ID NO: 1930099 - DNA, 15 bp, Homo sapiens
aaaaagctagtcatt

SEQ ID NO: 1930100 - DNA, 15 bp, Homo sapiens
aaaagctagtcattt

SEQ ID NO: 1930101 - DNA, 15 bp, Homo sapiens
aaagctagtcatttc

SEQ ID NO: 1930102 - DNA, 15 bp, Homo sapiens
aagctagtcatttcc

SEQ ID NO: 1930103 - DNA, 15 bp, Homo sapiens
agctagtcatttcca

SEQ ID NO: 1930104 - DNA, 15 bp, Homo sapiens
gctagtcatttccat

SEQ ID NO: 1930105 - DNA, 15 bp, Homo sapiens
ctagtcatttccatg

SEQ ID NO: 1930106 - DNA, 15 bp, Homo sapiens
tagtcatttccatgt

SEQ ID NO: 1930107 - DNA, 15 bp, Homo sapiens
agtcatttccatgtt

SEQ ID NO: 1930108 - DNA, 15 bp, Homo sapiens
gtcatttccatgttt

SEQ ID NO: 1930109 - DNA, 15 bp, Homo sapiens
tcatttccatgttta

SEQ ID NO: 1930110 - DNA, 15 bp, Homo sapiens
catttccatgtttat

SEQ ID NO: 1930111 - DNA, 15 bp, Homo sapiens
atttccatgtttatt

SEQ ID NO: 1930112 - DNA, 15 bp, Homo sapiens
tttccatgtttattg

SEQ ID NO: 1930113 - DNA, 15 bp, Homo sapiens
ttccatgtttattgt

SEQ ID NO: 1930114 - DNA, 15 bp, Homo sapiens
tccatgtttattgta

SEQ ID NO: 1930115 - DNA, 15 bp, Homo sapiens
ccatgtttattgtac

SEQ ID NO: 1930116 - DNA, 15 bp, Homo sapiens
catgtttattgtaca

SEQ ID NO: 1930117 - DNA, 15 bp, Homo sapiens
atgtttattgtacag

SEQ ID NO: 1930118 - DNA, 15 bp, Homo sapiens
tgtttattgtacagt

SEQ ID NO: 1930119 - DNA, 15 bp, Homo sapiens
gtttattgtacagtt

SEQ ID NO: 1930120 - DNA, 15 bp, Homo sapiens
tttattgtacagttt

SEQ ID NO: 1930121 - DNA, 15 bp, Homo sapiens
ttattgtacagtttt

SEQ ID NO: 1930122 - DNA, 15 bp, Homo sapiens
tattgtacagttttc

SEQ ID NO: 1930123 - DNA, 15 bp, Homo sapiens
attgtacagttttct

SEQ ID NO: 1930124 - DNA, 15 bp, Homo sapiens
ttgtacagttttctc

SEQ ID NO: 1930125 - DNA, 15 bp, Homo sapiens
tgtacagttttctct

SEQ ID NO: 1930126 - DNA, 15 bp, Homo sapiens
gtacagttttctctc

SEQ ID NO: 1930127 - DNA, 15 bp, Homo sapiens
tacagttttctctca

SEQ ID NO: 1930128 - DNA, 15 bp, Homo sapiens
acagttttctctcag

SEQ ID NO: 1930129 - DNA, 15 bp, Homo sapiens
cagttttctctcagt

SEQ ID NO: 1930130 - DNA, 15 bp, Homo sapiens
agttttctctcagtt

SEQ ID NO: 1930131 - DNA, 15 bp, Homo sapiens
gttttctctcagtta

SEQ ID NO: 1930132 - DNA, 15 bp, Homo sapiens
ttttctctcagttat

SEQ ID NO: 1930133 - DNA, 15 bp, Homo sapiens
tttctctcagttatt

SEQ ID NO: 1930134 - DNA, 15 bp, Homo sapiens
ttctctcagttattt

SEQ ID NO: 1930135 - DNA, 15 bp, Homo sapiens
tctctcagttattta

SEQ ID NO: 1930136 - DNA, 15 bp, Homo sapiens
ctctcagttatttaa

SEQ ID NO: 1930137 - DNA, 15 bp, Homo sapiens
tctcagttatttaaa

SEQ ID NO: 1930138 - DNA, 15 bp, Homo sapiens
ctcagttatttaaat

SEQ ID NO: 1930139 - DNA, 15 bp, Homo sapiens
tcagttatttaaatg

SEQ ID NO: 1930140 - DNA, 15 bp, Homo sapiens
cagttatttaaatga

SEQ ID NO: 1930141 - DNA, 15 bp, Homo sapiens
agttatttaaatgac

SEQ ID NO: 1930142 - DNA, 15 bp, Homo sapiens
gttatttaaatgact

SEQ ID NO: 1930143 - DNA, 15 bp, Homo sapiens
ttatttaaatgactt

SEQ ID NO: 1930144 - DNA, 15 bp, Homo sapiens
tatttaaatgacttc

SEQ ID NO: 1930145 - DNA, 15 bp, Homo sapiens
atttaaatgacttct

SEQ ID NO: 1930146 - DNA, 15 bp, Homo sapiens
tttaaatgacttctt

SEQ ID NO: 1930147 - DNA, 15 bp, Homo sapiens
ttaaatgacttcttg

SEQ ID NO: 1930148 - DNA, 15 bp, Homo sapiens
taaatgacttcttga

SEQ ID NO: 1930149 - DNA, 15 bp, Homo sapiens
aaatgacttcttgaa

SEQ ID NO: 1930150 - DNA, 15 bp, Homo sapiens
aatgacttcttgaaa

SEQ ID NO: 1930151 - DNA, 15 bp, Homo sapiens
atgacttcttgaaag

SEQ ID NO: 1930152 - DNA, 15 bp, Homo sapiens
tgacttcttgaaagt

SEQ ID NO: 1930153 - DNA, 15 bp, Homo sapiens
gacttcttgaaagtg

SEQ ID NO: 1930154 - DNA, 15 bp, Homo sapiens
acttcttgaaagtgt

SEQ ID NO: 1930155 - DNA, 15 bp, Homo sapiens
cttcttgaaagtgtc

SEQ ID NO: 1930156 - DNA, 15 bp, Homo sapiens
ttcttgaaagtgtca

SEQ ID NO: 1930157 - DNA, 15 bp, Homo sapiens
tcttgaaagtgtcaa

SEQ ID NO: 1930158 - DNA, 15 bp, Homo sapiens
cttgaaagtgtcaaa

SEQ ID NO: 1930159 - DNA, 15 bp, Homo sapiens
ttgaaagtgtcaaaa

SEQ ID NO: 1930160 - DNA, 15 bp, Homo sapiens
tgaaagtgtcaaaat

SEQ ID NO: 1930161 - DNA, 15 bp, Homo sapiens
gaaagtgtcaaaatt

SEQ ID NO: 1930162 - DNA, 15 bp, Homo sapiens
aaagtgtcaaaattc

SEQ ID NO: 1930163 - DNA, 15 bp, Homo sapiens
aagtgtcaaaattca

SEQ ID NO: 1930164 - DNA, 15 bp, Homo sapiens
agtgtcaaaattcac

SEQ ID NO: 1930165 - DNA, 15 bp, Homo sapiens
gtgtcaaaattcaca

SEQ ID NO: 1930166 - DNA, 15 bp, Homo sapiens
tgtcaaaattcacaa

SEQ ID NO: 1930167 - DNA, 15 bp, Homo sapiens
gtcaaaattcacaag

SEQ ID NO: 1930168 - DNA, 15 bp, Homo sapiens
tcaaaattcacaagg

SEQ ID NO: 1930169 - DNA, 15 bp, Homo sapiens
caaaattcacaaggt

SEQ ID NO: 1930170 - DNA, 15 bp, Homo sapiens
aaaattcacaaggtc

SEQ ID NO: 1930171 - DNA, 15 bp, Homo sapiens
aaattcacaaggtcc

SEQ ID NO: 1930172 - DNA, 15 bp, Homo sapiens
aattcacaaggtcct

SEQ ID NO: 1930173 - DNA, 15 bp, Homo sapiens
attcacaaggtccta

SEQ ID NO: 1930174 - DNA, 15 bp, Homo sapiens
ttcacaaggtcctaa

SEQ ID NO: 1930175 - DNA, 15 bp, Homo sapiens
tcacaaggtcctaat

SEQ ID NO: 1930176 - DNA, 15 bp, Homo sapiens
cacaaggtcctaatt

SEQ ID NO: 1930177 - DNA, 15 bp, Homo sapiens
acaaggtcctaattg

SEQ ID NO: 1930178 - DNA, 15 bp, Homo sapiens
caaggtcctaattgt

SEQ ID NO: 1930179 - DNA, 15 bp, Homo sapiens
aaggtcctaattgtc

SEQ ID NO: 1930180 - DNA, 15 bp, Homo sapiens
aggtcctaattgtca

SEQ ID NO: 1930181 - DNA, 15 bp, Homo sapiens
ggtcctaattgtcat

SEQ ID NO: 1930182 - DNA, 15 bp, Homo sapiens
gtcctaattgtcata

SEQ ID NO: 1930183 - DNA, 15 bp, Homo sapiens
tcctaattgtcataa

SEQ ID NO: 1930184 - DNA, 15 bp, Homo sapiens
cctaattgtcataat

SEQ ID NO: 1930185 - DNA, 15 bp, Homo sapiens
ctaattgtcataatt

SEQ ID NO: 1930186 - DNA, 15 bp, Homo sapiens
taattgtcataattc

SEQ ID NO: 1930187 - DNA, 15 bp, Homo sapiens
aattgtcataattct

SEQ ID NO: 1930188 - DNA, 15 bp, Homo sapiens
attgtcataattctc

SEQ ID NO: 1930189 - DNA, 15 bp, Homo sapiens
ttgtcataattctct

SEQ ID NO: 1930190 - DNA, 15 bp, Homo sapiens
tgtcataattctcta

SEQ ID NO: 1930191 - DNA, 15 bp, Homo sapiens
gtcataattctctat

SEQ ID NO: 1930192 - DNA, 15 bp, Homo sapiens
tcataattctctatc

SEQ ID NO: 1930193 - DNA, 15 bp, Homo sapiens
cataattctctatct

SEQ ID NO: 1930194 - DNA, 15 bp, Homo sapiens
ataattctctatctt

SEQ ID NO: 1930195 - DNA, 15 bp, Homo sapiens
taattctctatcttg

SEQ ID NO: 1930196 - DNA, 15 bp, Homo sapiens
aattctctatcttga

SEQ ID NO: 1930197 - DNA, 15 bp, Homo sapiens
attctctatcttgaa

SEQ ID NO: 1930198 - DNA, 15 bp, Homo sapiens
ttctctatcttgaaa

SEQ ID NO: 1930199 - DNA, 15 bp, Homo sapiens
tctctatcttgaaaa

SEQ ID NO: 1930200 - DNA, 15 bp, Homo sapiens
ctctatcttgaaaat

SEQ ID NO: 1930201 - DNA, 15 bp, Homo sapiens
tctatcttgaaaatc

SEQ ID NO: 1930202 - DNA, 15 bp, Homo sapiens
ctatcttgaaaatcc

SEQ ID NO: 1930203 - DNA, 15 bp, Homo sapiens
tatcttgaaaatcca

SEQ ID NO: 1930204 - DNA, 15 bp, Homo sapiens
atcttgaaaatccaa

SEQ ID NO: 1930205 - DNA, 15 bp, Homo sapiens
tcttgaaaatccaaa

SEQ ID NO: 1930206 - DNA, 15 bp, Homo sapiens
cttgaaaatccaaat

SEQ ID NO: 1930207 - DNA, 15 bp, Homo sapiens
ttgaaaatccaaatt

SEQ ID NO: 1930208 - DNA, 15 bp, Homo sapiens
tgaaaatccaaatta

SEQ ID NO: 1930209 - DNA, 15 bp, Homo sapiens
gaaaatccaaattat

SEQ ID NO: 1930210 - DNA, 15 bp, Homo sapiens
aaaatccaaattatt

SEQ ID NO: 1930211 - DNA, 15 bp, Homo sapiens
aaatccaaattattg

SEQ ID NO: 1930212 - DNA, 15 bp, Homo sapiens
aatccaaattattgc

SEQ ID NO: 1930213 - DNA, 15 bp, Homo sapiens
atccaaattattgca

SEQ ID NO: 1930214 - DNA, 15 bp, Homo sapiens
tccaaattattgcat

SEQ ID NO: 1930215 - DNA, 15 bp, Homo sapiens
ccaaattattgcata

SEQ ID NO: 1930216 - DNA, 15 bp, Homo sapiens
caaattattgcatag

SEQ ID NO: 1930217 - DNA, 15 bp, Homo sapiens
aaattattgcatagt

SEQ ID NO: 1930218 - DNA, 15 bp, Homo sapiens
aattattgcatagtc

SEQ ID NO: 1930219 - DNA, 15 bp, Homo sapiens
attattgcatagtca

SEQ ID NO: 1930220 - DNA, 15 bp, Homo sapiens
ttattgcatagtcaa

SEQ ID NO: 1930221 - DNA, 15 bp, Homo sapiens
tattgcatagtcaaa

SEQ ID NO: 1930222 - DNA, 15 bp, Homo sapiens
attgcatagtcaaat

SEQ ID NO: 1930223 - DNA, 15 bp, Homo sapiens
ttgcatagtcaaata

SEQ ID NO: 1930224 - DNA, 15 bp, Homo sapiens
tgcatagtcaaatag

SEQ ID NO: 1930225 - DNA, 15 bp, Homo sapiens
gcatagtcaaatagc

SEQ ID NO: 1930226 - DNA, 15 bp, Homo sapiens
catagtcaaatagca

SEQ ID NO: 1930227 - DNA, 15 bp, Homo sapiens
atagtcaaatagcat

SEQ ID NO: 1930228 - DNA, 15 bp, Homo sapiens
tagtcaaatagcata

SEQ ID NO: 1930229 - DNA, 15 bp, Homo sapiens
agtcaaatagcatat

SEQ ID NO: 1930230 - DNA, 15 bp, Homo sapiens
gtcaaatagcatatg

SEQ ID NO: 1930231 - DNA, 15 bp, Homo sapiens
tcaaatagcatatga

SEQ ID NO: 1930232 - DNA, 15 bp, Homo sapiens
caaatagcatatgat

SEQ ID NO: 1930233 - DNA, 15 bp, Homo sapiens
aaatagcatatgata

SEQ ID NO: 1930234 - DNA, 15 bp, Homo sapiens
aatagcatatgataa

SEQ ID NO: 1930235 - DNA, 15 bp, Homo sapiens
atagcatatgataac

SEQ ID NO: 1930236 - DNA, 15 bp, Homo sapiens
tagcatatgataacc

SEQ ID NO: 1930237 - DNA, 15 bp, Homo sapiens
agcatatgataacca

SEQ ID NO: 1930238 - DNA, 15 bp, Homo sapiens
gcatatgataaccag

SEQ ID NO: 1930239 - DNA, 15 bp, Homo sapiens
catatgataaccagt

SEQ ID NO: 1930240 - DNA, 15 bp, Homo sapiens
atatgataaccagtt

SEQ ID NO: 1930241 - DNA, 15 bp, Homo sapiens
tatgataaccagttg

SEQ ID NO: 1930242 - DNA, 15 bp, Homo sapiens
atgataaccagttga

SEQ ID NO: 1930243 - DNA, 15 bp, Homo sapiens
tgataaccagttgac

SEQ ID NO: 1930244 - DNA, 15 bp, Homo sapiens
gataaccagttgaca

SEQ ID NO: 1930245 - DNA, 15 bp, Homo sapiens
ataaccagttgacat

SEQ ID NO: 1930246 - DNA, 15 bp, Homo sapiens
taaccagttgacatg

SEQ ID NO: 1930247 - DNA, 15 bp, Homo sapiens
aaccagttgacatgt

SEQ ID NO: 1930248 - DNA, 15 bp, Homo sapiens
accagttgacatgtg

SEQ ID NO: 1930249 - DNA, 15 bp, Homo sapiens
ccagttgacatgtgc

SEQ ID NO: 1930250 - DNA, 15 bp, Homo sapiens
cagttgacatgtgct

SEQ ID NO: 1930251 - DNA, 15 bp, Homo sapiens
agttgacatgtgcta

SEQ ID NO: 1930252 - DNA, 15 bp, Homo sapiens
gttgacatgtgctaa

SEQ ID NO: 1930253 - DNA, 15 bp, Homo sapiens
ttgacatgtgctaaa

SEQ ID NO: 1930254 - DNA, 15 bp, Homo sapiens
tgacatgtgctaaaa

SEQ ID NO: 1930255 - DNA, 15 bp, Homo sapiens
gacatgtgctaaaat

SEQ ID NO: 1930256 - DNA, 15 bp, Homo sapiens
acatgtgctaaaata

SEQ ID NO: 1930257 - DNA, 15 bp, Homo sapiens
catgtgctaaaatac

SEQ ID NO: 1930258 - DNA, 15 bp, Homo sapiens
atgtgctaaaatact

SEQ ID NO: 1930259 - DNA, 15 bp, Homo sapiens
tgtgctaaaatactt

SEQ ID NO: 1930260 - DNA, 15 bp, Homo sapiens
gtgctaaaatactta

SEQ ID NO: 1930261 - DNA, 15 bp, Homo sapiens
tgctaaaatacttaa

SEQ ID NO: 1930262 - DNA, 15 bp, Homo sapiens
gctaaaatacttaaa

SEQ ID NO: 1930263 - DNA, 15 bp, Homo sapiens
ctaaaatacttaaac

SEQ ID NO: 1930264 - DNA, 15 bp, Homo sapiens
taaaatacttaaact

SEQ ID NO: 1930265 - DNA, 15 bp, Homo sapiens
aaaatacttaaacta

SEQ ID NO: 1930266 - DNA, 15 bp, Homo sapiens
aaatacttaaactat

SEQ ID NO: 1930267 - DNA, 15 bp, Homo sapiens
aatacttaaactatc

SEQ ID NO: 1930268 - DNA, 15 bp, Homo sapiens
atacttaaactatct

SEQ ID NO: 1930269 - DNA, 15 bp, Homo sapiens
tacttaaactatctt

SEQ ID NO: 1930270 - DNA, 15 bp, Homo sapiens
acttaaactatcttc

SEQ ID NO: 1930271 - DNA, 15 bp, Homo sapiens
cttaaactatcttct

SEQ ID NO: 1930272 - DNA, 15 bp, Homo sapiens
ttaaactatcttcta

SEQ ID NO: 1930273 - DNA, 15 bp, Homo sapiens
taaactatcttctac

SEQ ID NO: 1930274 - DNA, 15 bp, Homo sapiens
aaactatcttctaca

SEQ ID NO: 1930275 - DNA, 15 bp, Homo sapiens
aactatcttctacat

SEQ ID NO: 1930276 - DNA, 15 bp, Homo sapiens
actatcttctacata

SEQ ID NO: 1930277 - DNA, 15 bp, Homo sapiens
ctatcttctacatag

SEQ ID NO: 1930278 - DNA, 15 bp, Homo sapiens
tatcttctacatagc

SEQ ID NO: 1930279 - DNA, 15 bp, Homo sapiens
atcttctacatagca

SEQ ID NO: 1930280 - DNA, 15 bp, Homo sapiens
tcttctacatagcaa

SEQ ID NO: 1930281 - DNA, 15 bp, Homo sapiens
cttctacatagcaaa

SEQ ID NO: 1930282 - DNA, 15 bp, Homo sapiens
ttctacatagcaaag

SEQ ID NO: 1930283 - DNA, 15 bp, Homo sapiens
tctacatagcaaagc

SEQ ID NO: 1930284 - DNA, 15 bp, Homo sapiens
ctacatagcaaagcc

SEQ ID NO: 1930285 - DNA, 15 bp, Homo sapiens
tacatagcaaagcca

SEQ ID NO: 1930286 - DNA, 15 bp, Homo sapiens
acatagcaaagccaa

SEQ ID NO: 1930287 - DNA, 15 bp, Homo sapiens
catagcaaagccaat

SEQ ID NO: 1930288 - DNA, 15 bp, Homo sapiens
atagcaaagccaatt

SEQ ID NO: 1930289 - DNA, 15 bp, Homo sapiens
tagcaaagccaattt

SEQ ID NO: 1930290 - DNA, 15 bp, Homo sapiens
agcaaagccaatttt

SEQ ID NO: 1930291 - DNA, 15 bp, Homo sapiens
gcaaagccaattttt

SEQ ID NO: 1930292 - DNA, 15 bp, Homo sapiens
caaagccaatttttc

SEQ ID NO: 1930293 - DNA, 15 bp, Homo sapiens
aaagccaatttttca

SEQ ID NO: 1930294 - DNA, 15 bp, Homo sapiens
aagccaatttttcat

SEQ ID NO: 1930295 - DNA, 15 bp, Homo sapiens
agccaatttttcatt

SEQ ID NO: 1930296 - DNA, 15 bp, Homo sapiens
gccaatttttcattc

SEQ ID NO: 1930297 - DNA, 15 bp, Homo sapiens
ccaatttttcattct

SEQ ID NO: 1930298 - DNA, 15 bp, Homo sapiens
caatttttcattctt

SEQ ID NO: 1930299 - DNA, 15 bp, Homo sapiens
aatttttcattcttt

SEQ ID NO: 1930300 - DNA, 15 bp, Homo sapiens
atttttcattctttt

SEQ ID NO: 1930301 - DNA, 15 bp, Homo sapiens
tttttcattcttttt

SEQ ID NO: 1930302 - DNA, 15 bp, Homo sapiens
ttttcattctttttg

SEQ ID NO: 1930303 - DNA, 15 bp, Homo sapiens
tttcattctttttga

SEQ ID NO: 1930304 - DNA, 15 bp, Homo sapiens
ttcattctttttgaa

SEQ ID NO: 1930305 - DNA, 15 bp, Homo sapiens
tcattctttttgaaa

SEQ ID NO: 1930306 - DNA, 15 bp, Homo sapiens
cattctttttgaaat

SEQ ID NO: 1930307 - DNA, 15 bp, Homo sapiens
attctttttgaaatt

SEQ ID NO: 1930308 - DNA, 15 bp, Homo sapiens
ttctttttgaaattt

SEQ ID NO: 1930309 - DNA, 15 bp, Homo sapiens
tctttttgaaattta

SEQ ID NO: 1930310 - DNA, 15 bp, Homo sapiens
ctttttgaaatttat

SEQ ID NO: 1930311 - DNA, 15 bp, Homo sapiens
tttttgaaatttatc

SEQ ID NO: 1930312 - DNA, 15 bp, Homo sapiens
ttttgaaatttatct

SEQ ID NO: 1930313 - DNA, 15 bp, Homo sapiens
tttgaaatttatctt

SEQ ID NO: 1930314 - DNA, 15 bp, Homo sapiens
ttgaaatttatctta

SEQ ID NO: 1930315 - DNA, 15 bp, Homo sapiens
tgaaatttatcttag

SEQ ID NO: 1930316 - DNA, 15 bp, Homo sapiens
gaaatttatcttagt

SEQ ID NO: 1930317 - DNA, 15 bp, Homo sapiens
aaatttatcttagtt

SEQ ID NO: 1930318 - DNA, 15 bp, Homo sapiens
aatttatcttagttt

SEQ ID NO: 1930319 - DNA, 15 bp, Homo sapiens
atttatcttagtttt

SEQ ID NO: 1930320 - DNA, 15 bp, Homo sapiens
tttatcttagttttc

SEQ ID NO: 1930321 - DNA, 15 bp, Homo sapiens
ttatcttagttttca

SEQ ID NO: 1930322 - DNA, 15 bp, Homo sapiens
tatcttagttttcat

SEQ ID NO: 1930323 - DNA, 15 bp, Homo sapiens
atcttagttttcatt

SEQ ID NO: 1930324 - DNA, 15 bp, Homo sapiens
tcttagttttcattt

SEQ ID NO: 1930325 - DNA, 15 bp, Homo sapiens
cttagttttcatttc

SEQ ID NO: 1930326 - DNA, 15 bp, Homo sapiens
ttagttttcatttct

SEQ ID NO: 1930327 - DNA, 15 bp, Homo sapiens
tagttttcatttcta

SEQ ID NO: 1930328 - DNA, 15 bp, Homo sapiens
agttttcatttctag

SEQ ID NO: 1930329 - DNA, 15 bp, Homo sapiens
gttttcatttctagg

SEQ ID NO: 1930330 - DNA, 15 bp, Homo sapiens
ttttcatttctaggc

SEQ ID NO: 1930331 - DNA, 15 bp, Homo sapiens
tttcatttctaggcc

SEQ ID NO: 1930332 - DNA, 15 bp, Homo sapiens
ttcatttctaggcct

SEQ ID NO: 1930333 - DNA, 15 bp, Homo sapiens
tcatttctaggcctg

SEQ ID NO: 1930334 - DNA, 15 bp, Homo sapiens
catttctaggcctga

SEQ ID NO: 1930335 - DNA, 15 bp, Homo sapiens
atttctaggcctgaa

SEQ ID NO: 1930336 - DNA, 15 bp, Homo sapiens
tttctaggcctgaaa

SEQ ID NO: 1930337 - DNA, 15 bp, Homo sapiens
ttctaggcctgaaag

SEQ ID NO: 1930338 - DNA, 15 bp, Homo sapiens
tctaggcctgaaagg

SEQ ID NO: 1930339 - DNA, 15 bp, Homo sapiens
ctaggcctgaaaggc

SEQ ID NO: 1930340 - DNA, 15 bp, Homo sapiens
taggcctgaaaggcc

SEQ ID NO: 1930341 - DNA, 15 bp, Homo sapiens
aggcctgaaaggcca

SEQ ID NO: 1930342 - DNA, 15 bp, Homo sapiens
ggcctgaaaggccat

SEQ ID NO: 1930343 - DNA, 15 bp, Homo sapiens
gcctgaaaggccata

SEQ ID NO: 1930344 - DNA, 15 bp, Homo sapiens
cctgaaaggccatac

SEQ ID NO: 1930345 - DNA, 15 bp, Homo sapiens
ctgaaaggccatacc

SEQ ID NO: 1930346 - DNA, 15 bp, Homo sapiens
tgaaaggccatacca

SEQ ID NO: 1930347 - DNA, 15 bp, Homo sapiens
gaaaggccataccat

SEQ ID NO: 1930348 - DNA, 15 bp, Homo sapiens
aaaggccataccata

SEQ ID NO: 1930349 - DNA, 15 bp, Homo sapiens
aaggccataccatac

SEQ ID NO: 1930350 - DNA, 15 bp, Homo sapiens
aggccataccatacc

SEQ ID NO: 1930351 - DNA, 15 bp, Homo sapiens
ggccataccatacca

SEQ ID NO: 1930352 - DNA, 15 bp, Homo sapiens
gccataccataccac

SEQ ID NO: 1930353 - DNA, 15 bp, Homo sapiens
ccataccataccacc

SEQ ID NO: 1930354 - DNA, 15 bp, Homo sapiens
cataccataccacca

SEQ ID NO: 1930355 - DNA, 15 bp, Homo sapiens
ataccataccaccaa

SEQ ID NO: 1930356 - DNA, 15 bp, Homo sapiens
taccataccaccaaa

SEQ ID NO: 1930357 - DNA, 15 bp, Homo sapiens
accataccaccaaaa

SEQ ID NO: 1930358 - DNA, 15 bp, Homo sapiens
ccataccaccaaaat

SEQ ID NO: 1930359 - DNA, 15 bp, Homo sapiens
cataccaccaaaatg

SEQ ID NO: 1930360 - DNA, 15 bp, Homo sapiens
ataccaccaaaatgt

SEQ ID NO: 1930361 - DNA, 15 bp, Homo sapiens
taccaccaaaatgtt

SEQ ID NO: 1930362 - DNA, 15 bp, Homo sapiens
accaccaaaatgttt

SEQ ID NO: 1930363 - DNA, 15 bp, Homo sapiens
ccaccaaaatgtttt

SEQ ID NO: 1930364 - DNA, 15 bp, Homo sapiens
caccaaaatgttttg

SEQ ID NO: 1930365 - DNA, 15 bp, Homo sapiens
accaaaatgttttga

SEQ ID NO: 1930366 - DNA, 15 bp, Homo sapiens
ccaaaatgttttgac

SEQ ID NO: 1930367 - DNA, 15 bp, Homo sapiens
caaaatgttttgaca

SEQ ID NO: 1930368 - DNA, 15 bp, Homo sapiens
aaaatgttttgacat

SEQ ID NO: 1930369 - DNA, 15 bp, Homo sapiens
aaatgttttgacatc

SEQ ID NO: 1930370 - DNA, 15 bp, Homo sapiens
aatgttttgacatct

SEQ ID NO: 1930371 - DNA, 15 bp, Homo sapiens
atgttttgacatctt

SEQ ID NO: 1930372 - DNA, 15 bp, Homo sapiens
tgttttgacatcttt

SEQ ID NO: 1930373 - DNA, 15 bp, Homo sapiens
gttttgacatctttc

SEQ ID NO: 1930374 - DNA, 15 bp, Homo sapiens
ttttgacatctttct

SEQ ID NO: 1930375 - DNA, 15 bp, Homo sapiens
tttgacatctttctt

SEQ ID NO: 1930376 - DNA, 15 bp, Homo sapiens
ttgacatctttctta

SEQ ID NO: 1930377 - DNA, 15 bp, Homo sapiens
tgacatctttcttag

SEQ ID NO: 1930378 - DNA, 15 bp, Homo sapiens
gacatctttcttaga

SEQ ID NO: 1930379 - DNA, 15 bp, Homo sapiens
acatctttcttagag

SEQ ID NO: 1930380 - DNA, 15 bp, Homo sapiens
catctttcttagaga

SEQ ID NO: 1930381 - DNA, 15 bp, Homo sapiens
atctttcttagagaa

SEQ ID NO: 1930382 - DNA, 15 bp, Homo sapiens
tctttcttagagaag

SEQ ID NO: 1930383 - DNA, 15 bp, Homo sapiens
ctttcttagagaaga

SEQ ID NO: 1930384 - DNA, 15 bp, Homo sapiens
tttcttagagaagat

SEQ ID NO: 1930385 - DNA, 15 bp, Homo sapiens
ttcttagagaagatt

SEQ ID NO: 1930386 - DNA, 15 bp, Homo sapiens
tcttagagaagatta

SEQ ID NO: 1930387 - DNA, 15 bp, Homo sapiens
cttagagaagattaa

SEQ ID NO: 1930388 - DNA, 15 bp, Homo sapiens
ttagagaagattaaa

SEQ ID NO: 1930389 - DNA, 15 bp, Homo sapiens
tagagaagattaaat

SEQ ID NO: 1930390 - DNA, 15 bp, Homo sapiens
agagaagattaaata

SEQ ID NO: 1930391 - DNA, 15 bp, Homo sapiens
gagaagattaaataa

SEQ ID NO: 1930392 - DNA, 15 bp, Homo sapiens
agaagattaaataaa

SEQ ID NO: 1930393 - DNA, 15 bp, Homo sapiens
gaagattaaataaaa

SEQ ID NO: 1930394 - DNA, 15 bp, Homo sapiens
aagattaaataaaac

SEQ ID NO: 1930395 - DNA, 15 bp, Homo sapiens
agattaaataaaact

SEQ ID NO: 1930396 - DNA, 15 bp, Homo sapiens
gattaaataaaactg

SEQ ID NO: 1930397 - DNA, 15 bp, Homo sapiens
attaaataaaactgg

SEQ ID NO: 1930398 - DNA, 15 bp, Homo sapiens
ttaaataaaactggc

SEQ ID NO: 1930399 - DNA, 15 bp, Homo sapiens
taaataaaactggct

SEQ ID NO: 1930400 - DNA, 15 bp, Homo sapiens
aaataaaactggctt

SEQ ID NO: 1930401 - DNA, 15 bp, Homo sapiens
aataaaactggcttt

SEQ ID NO: 1930402 - DNA, 15 bp, Homo sapiens
ataaaactggcttta

SEQ ID NO: 1930403 - DNA, 15 bp, Homo sapiens
taaaactggctttat

SEQ ID NO: 1930404 - DNA, 15 bp, Homo sapiens
aaaactggctttatg

SEQ ID NO: 1930405 - DNA, 15 bp, Homo sapiens
aaactggctttatgc

SEQ ID NO: 1930406 - DNA, 15 bp, Homo sapiens
aactggctttatgcc

SEQ ID NO: 1930407 - DNA, 15 bp, Homo sapiens
actggctttatgcca

SEQ ID NO: 1930408 - DNA, 15 bp, Homo sapiens
ctggctttatgccaa

SEQ ID NO: 1930409 - DNA, 15 bp, Homo sapiens
tggctttatgccaaa

SEQ ID NO: 1930410 - DNA, 15 bp, Homo sapiens
ggctttatgccaaaa

SEQ ID NO: 1930411 - DNA, 15 bp, Homo sapiens
gctttatgccaaaag

SEQ ID NO: 1930412 - DNA, 15 bp, Homo sapiens
ctttatgccaaaagt

SEQ ID NO: 1930413 - DNA, 15 bp, Homo sapiens
tttatgccaaaagtg

SEQ ID NO: 1930414 - DNA, 15 bp, Homo sapiens
ttatgccaaaagtgt

SEQ ID NO: 1930415 - DNA, 15 bp, Homo sapiens
tatgccaaaagtgtt

SEQ ID NO: 1930416 - DNA, 15 bp, Homo sapiens
atgccaaaagtgtta

SEQ ID NO: 1930417 - DNA, 15 bp, Homo sapiens
tgccaaaagtgttag

SEQ ID NO: 1930418 - DNA, 15 bp, Homo sapiens
gccaaaagtgttagt

SEQ ID NO: 1930419 - DNA, 15 bp, Homo sapiens
ccaaaagtgttagtt

SEQ ID NO: 1930420 - DNA, 15 bp, Homo sapiens
caaaagtgttagttc

SEQ ID NO: 1930421 - DNA, 15 bp, Homo sapiens
aaaagtgttagttct

SEQ ID NO: 1930422 - DNA, 15 bp, Homo sapiens
aaagtgttagttctt

SEQ ID NO: 1930423 - DNA, 15 bp, Homo sapiens
aagtgttagttcttt

SEQ ID NO: 1930424 - DNA, 15 bp, Homo sapiens
agtgttagttctttt

SEQ ID NO: 1930425 - DNA, 15 bp, Homo sapiens
gtgttagttctttta

SEQ ID NO: 1930426 - DNA, 15 bp, Homo sapiens
tgttagttcttttag

SEQ ID NO: 1930427 - DNA, 15 bp, Homo sapiens
gttagttcttttaga

SEQ ID NO: 1930428 - DNA, 15 bp, Homo sapiens
ttagttcttttagac

SEQ ID NO: 1930429 - DNA, 15 bp, Homo sapiens
tagttcttttagaca

SEQ ID NO: 1930430 - DNA, 15 bp, Homo sapiens
agttcttttagacaa

SEQ ID NO: 1930431 - DNA, 15 bp, Homo sapiens
gttcttttagacaat

SEQ ID NO: 1930432 - DNA, 15 bp, Homo sapiens
ttcttttagacaata

SEQ ID NO: 1930433 - DNA, 15 bp, Homo sapiens
tcttttagacaataa

SEQ ID NO: 1930434 - DNA, 15 bp, Homo sapiens
cttttagacaataat

SEQ ID NO: 1930435 - DNA, 15 bp, Homo sapiens
ttttagacaataatt

SEQ ID NO: 1930436 - DNA, 15 bp, Homo sapiens
tttagacaataattg

SEQ ID NO: 1930437 - DNA, 15 bp, Homo sapiens
ttagacaataattga

SEQ ID NO: 1930438 - DNA, 15 bp, Homo sapiens
tagacaataattgaa

SEQ ID NO: 1930439 - DNA, 15 bp, Homo sapiens
agacaataattgaag

SEQ ID NO: 1930440 - DNA, 15 bp, Homo sapiens
gacaataattgaagg

SEQ ID NO: 1930441 - DNA, 15 bp, Homo sapiens
acaataattgaaggc

SEQ ID NO: 1930442 - DNA, 15 bp, Homo sapiens
caataattgaaggca

SEQ ID NO: 1930443 - DNA, 15 bp, Homo sapiens
aataattgaaggcac

SEQ ID NO: 1930444 - DNA, 15 bp, Homo sapiens
ataattgaaggcact

SEQ ID NO: 1930445 - DNA, 15 bp, Homo sapiens
taattgaaggcacta

SEQ ID NO: 1930446 - DNA, 15 bp, Homo sapiens
aattgaaggcactag

SEQ ID NO: 1930447 - DNA, 15 bp, Homo sapiens
attgaaggcactagc

SEQ ID NO: 1930448 - DNA, 15 bp, Homo sapiens
ttgaaggcactagct

SEQ ID NO: 1930449 - DNA, 15 bp, Homo sapiens
tgaaggcactagctg

SEQ ID NO: 1930450 - DNA, 15 bp, Homo sapiens
gaaggcactagctga

SEQ ID NO: 1930451 - DNA, 15 bp, Homo sapiens
aaggcactagctgag

SEQ ID NO: 1930452 - DNA, 15 bp, Homo sapiens
aggcactagctgagg

SEQ ID NO: 1930453 - DNA, 15 bp, Homo sapiens
ggcactagctgagga

SEQ ID NO: 1930454 - DNA, 15 bp, Homo sapiens
gcactagctgaggaa

SEQ ID NO: 1930455 - DNA, 15 bp, Homo sapiens
cactagctgaggaaa

SEQ ID NO: 1930456 - DNA, 15 bp, Homo sapiens
actagctgaggaaaa

SEQ ID NO: 1930457 - DNA, 15 bp, Homo sapiens
ctagctgaggaaaac

SEQ ID NO: 1930458 - DNA, 15 bp, Homo sapiens
tagctgaggaaaaca

SEQ ID NO: 1930459 - DNA, 15 bp, Homo sapiens
agctgaggaaaacaa

SEQ ID NO: 1930460 - DNA, 15 bp, Homo sapiens
gctgaggaaaacaaa

SEQ ID NO: 1930461 - DNA, 15 bp, Homo sapiens
ctgaggaaaacaaat

SEQ ID NO: 1930462 - DNA, 15 bp, Homo sapiens
tgaggaaaacaaatc

SEQ ID NO: 1930463 - DNA, 15 bp, Homo sapiens
gaggaaaacaaatct

SEQ ID NO: 1930464 - DNA, 15 bp, Homo sapiens
aggaaaacaaatctt

SEQ ID NO: 1930465 - DNA, 15 bp, Homo sapiens
ggaaaacaaatcttt

SEQ ID NO: 1930466 - DNA, 15 bp, Homo sapiens
gaaaacaaatcttta

SEQ ID NO: 1930467 - DNA, 15 bp, Homo sapiens
aaaacaaatctttac

SEQ ID NO: 1930468 - DNA, 15 bp, Homo sapiens
aaacaaatctttact

SEQ ID NO: 1930469 - DNA, 15 bp, Homo sapiens
aacaaatctttacta

SEQ ID NO: 1930470 - DNA, 15 bp, Homo sapiens
acaaatctttactat

SEQ ID NO: 1930471 - DNA, 15 bp, Homo sapiens
caaatctttactatg

SEQ ID NO: 1930472 - DNA, 15 bp, Homo sapiens
aaatctttactatga

SEQ ID NO: 1930473 - DNA, 15 bp, Homo sapiens
aatctttactatgaa

SEQ ID NO: 1930474 - DNA, 15 bp, Homo sapiens
atctttactatgaat

SEQ ID NO: 1930475 - DNA, 15 bp, Homo sapiens
tctttactatgaatc

SEQ ID NO: 1930476 - DNA, 15 bp, Homo sapiens
ctttactatgaatca

SEQ ID NO: 1930477 - DNA, 15 bp, Homo sapiens
tttactatgaatcag

SEQ ID NO: 1930478 - DNA, 15 bp, Homo sapiens
ttactatgaatcaga

SEQ ID NO: 1930479 - DNA, 15 bp, Homo sapiens
tactatgaatcagag

SEQ ID NO: 1930480 - DNA, 15 bp, Homo sapiens
actatgaatcagagc

SEQ ID NO: 1930481 - DNA, 15 bp, Homo sapiens
ctatgaatcagagct

SEQ ID NO: 1930482 - DNA, 15 bp, Homo sapiens
tatgaatcagagctg

SEQ ID NO: 1930483 - DNA, 15 bp, Homo sapiens
atgaatcagagctgg

SEQ ID NO: 1930484 - DNA, 15 bp, Homo sapiens
tgaatcagagctggt

SEQ ID NO: 1930485 - DNA, 15 bp, Homo sapiens
gaatcagagctggtc

SEQ ID NO: 1930486 - DNA, 15 bp, Homo sapiens
aatcagagctggtct

SEQ ID NO: 1930487 - DNA, 15 bp, Homo sapiens
atcagagctggtctc

SEQ ID NO: 1930488 - DNA, 15 bp, Homo sapiens
tcagagctggtctct

SEQ ID NO: 1930489 - DNA, 15 bp, Homo sapiens
cagagctggtctcta

SEQ ID NO: 1930490 - DNA, 15 bp, Homo sapiens
agagctggtctctaa

SEQ ID NO: 1930491 - DNA, 15 bp, Homo sapiens
gagctggtctctaat

SEQ ID NO: 1930492 - DNA, 15 bp, Homo sapiens
agctggtctctaatt

SEQ ID NO: 1930493 - DNA, 15 bp, Homo sapiens
gctggtctctaattt

SEQ ID NO: 1930494 - DNA, 15 bp, Homo sapiens
ctggtctctaatttg

SEQ ID NO: 1930495 - DNA, 15 bp, Homo sapiens
tggtctctaatttgt

SEQ ID NO: 1930496 - DNA, 15 bp, Homo sapiens
ggtctctaatttgta

SEQ ID NO: 1930497 - DNA, 15 bp, Homo sapiens
gtctctaatttgtat

SEQ ID NO: 1930498 - DNA, 15 bp, Homo sapiens
tctctaatttgtatg

SEQ ID NO: 1930499 - DNA, 15 bp, Homo sapiens
ctctaatttgtatgt

SEQ ID NO: 1930500 - DNA, 15 bp, Homo sapiens
tctaatttgtatgtg

SEQ ID NO: 1930501 - DNA, 15 bp, Homo sapiens
ctaatttgtatgtgt

SEQ ID NO: 1930502 - DNA, 15 bp, Homo sapiens
taatttgtatgtgtt

SEQ ID NO: 1930503 - DNA, 15 bp, Homo sapiens
aatttgtatgtgttt

SEQ ID NO: 1930504 - DNA, 15 bp, Homo sapiens
atttgtatgtgtttc

SEQ ID NO: 1930505 - DNA, 15 bp, Homo sapiens
tttgtatgtgtttcc

SEQ ID NO: 1930506 - DNA, 15 bp, Homo sapiens
ttgtatgtgtttcct

SEQ ID NO: 1930507 - DNA, 15 bp, Homo sapiens
tgtatgtgtttcctg

SEQ ID NO: 1930508 - DNA, 15 bp, Homo sapiens
gtatgtgtttcctga

SEQ ID NO: 1930509 - DNA, 15 bp, Homo sapiens
tatgtgtttcctgaa

SEQ ID NO: 1930510 - DNA, 15 bp, Homo sapiens
atgtgtttcctgaaa

SEQ ID NO: 1930511 - DNA, 15 bp, Homo sapiens
tgtgtttcctgaaat

SEQ ID NO: 1930512 - DNA, 15 bp, Homo sapiens
gtgtttcctgaaatg

SEQ ID NO: 1930513 - DNA, 15 bp, Homo sapiens
tgtttcctgaaatgt

SEQ ID NO: 1930514 - DNA, 15 bp, Homo sapiens
gtttcctgaaatgta

SEQ ID NO: 1930515 - DNA, 15 bp, Homo sapiens
tttcctgaaatgtaa

SEQ ID NO: 1930516 - DNA, 15 bp, Homo sapiens
ttcctgaaatgtaat

SEQ ID NO: 1930517 - DNA, 15 bp, Homo sapiens
tcctgaaatgtaatg

SEQ ID NO: 1930518 - DNA, 15 bp, Homo sapiens
cctgaaatgtaatgt

SEQ ID NO: 1930519 - DNA, 15 bp, Homo sapiens
ctgaaatgtaatgtt

SEQ ID NO: 1930520 - DNA, 15 bp, Homo sapiens
tgaaatgtaatgttt

SEQ ID NO: 1930521 - DNA, 15 bp, Homo sapiens
gaaatgtaatgtttt

SEQ ID NO: 1930522 - DNA, 15 bp, Homo sapiens
aaatgtaatgttttt

SEQ ID NO: 1930523 - DNA, 15 bp, Homo sapiens
aatgtaatgtttttg

SEQ ID NO: 1930524 - DNA, 15 bp, Homo sapiens
atgtaatgtttttgt

SEQ ID NO: 1930525 - DNA, 15 bp, Homo sapiens
tgtaatgtttttgtg

SEQ ID NO: 1930526 - DNA, 15 bp, Homo sapiens
gtaatgtttttgtga

SEQ ID NO: 1930527 - DNA, 15 bp, Homo sapiens
taatgtttttgtgat

SEQ ID NO: 1930528 - DNA, 15 bp, Homo sapiens
aatgtttttgtgatt

SEQ ID NO: 1930529 - DNA, 15 bp, Homo sapiens
atgtttttgtgattt

SEQ ID NO: 1930530 - DNA, 15 bp, Homo sapiens
tgtttttgtgatttg

SEQ ID NO: 1930531 - DNA, 15 bp, Homo sapiens
gtttttgtgatttgc

SEQ ID NO: 1930532 - DNA, 15 bp, Homo sapiens
tttttgtgatttgca

SEQ ID NO: 1930533 - DNA, 15 bp, Homo sapiens
ttttgtgatttgcat

SEQ ID NO: 1930534 - DNA, 15 bp, Homo sapiens
tttgtgatttgcatt

SEQ ID NO: 1930535 - DNA, 15 bp, Homo sapiens
tgtgatttgcattta

SEQ ID NO: 1930536 - DNA, 15 bp, Homo sapiens
gtgatttgcatttat

SEQ ID NO: 1930537 - DNA, 15 bp, Homo sapiens
tgatttgcatttatt

SEQ ID NO: 1930538 - DNA, 15 bp, Homo sapiens
gatttgcatttattt

SEQ ID NO: 1930539 - DNA, 15 bp, Homo sapiens
atttgcatttatttt

SEQ ID NO: 1930540 - DNA, 15 bp, Homo sapiens
tttgcatttattttt

SEQ ID NO: 1930541 - DNA, 15 bp, Homo sapiens
ttgcatttatttttg

SEQ ID NO: 1930542 - DNA, 15 bp, Homo sapiens
tgcatttatttttgg

SEQ ID NO: 1930543 - DNA, 15 bp, Homo sapiens
gcatttatttttggc

SEQ ID NO: 1930544 - DNA, 15 bp, Homo sapiens
catttatttttggcc

SEQ ID NO: 1930545 - DNA, 15 bp, Homo sapiens
atttatttttggcct

SEQ ID NO: 1930546 - DNA, 15 bp, Homo sapiens
tttatttttggccta

SEQ ID NO: 1930547 - DNA, 15 bp, Homo sapiens
ttatttttggcctaa

SEQ ID NO: 1930548 - DNA, 15 bp, Homo sapiens
tatttttggcctaag

SEQ ID NO: 1930549 - DNA, 15 bp, Homo sapiens
atttttggcctaagt

SEQ ID NO: 1930550 - DNA, 15 bp, Homo sapiens
tttttggcctaagtg

SEQ ID NO: 1930551 - DNA, 15 bp, Homo sapiens
ttttggcctaagtga

SEQ ID NO: 1930552 - DNA, 15 bp, Homo sapiens
tttggcctaagtgac

SEQ ID NO: 1930553 - DNA, 15 bp, Homo sapiens
ttggcctaagtgaca

SEQ ID NO: 1930554 - DNA, 15 bp, Homo sapiens
tggcctaagtgacat

SEQ ID NO: 1930555 - DNA, 15 bp, Homo sapiens
ggcctaagtgacatt

SEQ ID NO: 1930556 - DNA, 15 bp, Homo sapiens
gcctaagtgacattt

SEQ ID NO: 1930557 - DNA, 15 bp, Homo sapiens
cctaagtgacatttt

SEQ ID NO: 1930558 - DNA, 15 bp, Homo sapiens
ctaagtgacattttg

SEQ ID NO: 1930559 - DNA, 15 bp, Homo sapiens
taagtgacattttga

SEQ ID NO: 1930560 - DNA, 15 bp, Homo sapiens
aagtgacattttgac

SEQ ID NO: 1930561 - DNA, 15 bp, Homo sapiens
agtgacattttgacc

SEQ ID NO: 1930562 - DNA, 15 bp, Homo sapiens
gtgacattttgacca

SEQ ID NO: 1930563 - DNA, 15 bp, Homo sapiens
tgacattttgaccat

SEQ ID NO: 1930564 - DNA, 15 bp, Homo sapiens
gacattttgaccata

SEQ ID NO: 1930565 - DNA, 15 bp, Homo sapiens
acattttgaccatat

SEQ ID NO: 1930566 - DNA, 15 bp, Homo sapiens
cattttgaccatata

SEQ ID NO: 1930567 - DNA, 15 bp, Homo sapiens
attttgaccatataa

SEQ ID NO: 1930568 - DNA, 15 bp, Homo sapiens
ttttgaccatataat

SEQ ID NO: 1930569 - DNA, 15 bp, Homo sapiens
tttgaccatataatt

SEQ ID NO: 1930570 - DNA, 15 bp, Homo sapiens
ttgaccatataattt

SEQ ID NO: 1930571 - DNA, 15 bp, Homo sapiens
tgaccatataattta

SEQ ID NO: 1930572 - DNA, 15 bp, Homo sapiens
gaccatataatttac

SEQ ID NO: 1930573 - DNA, 15 bp, Homo sapiens
accatataatttact

SEQ ID NO: 1930574 - DNA, 15 bp, Homo sapiens
ccatataatttactt

SEQ ID NO: 1930575 - DNA, 15 bp, Homo sapiens
catataatttacttt

SEQ ID NO: 1930576 - DNA, 15 bp, Homo sapiens
atataatttactttt

SEQ ID NO: 1930577 - DNA, 15 bp, Homo sapiens
tataatttactttta

SEQ ID NO: 1930578 - DNA, 15 bp, Homo sapiens
ataatttacttttaa

SEQ ID NO: 1930579 - DNA, 15 bp, Homo sapiens
taatttacttttaaa

SEQ ID NO: 1930580 - DNA, 15 bp, Homo sapiens
aatttacttttaaaa

SEQ ID NO: 1930581 - DNA, 15 bp, Homo sapiens
atttacttttaaaac

SEQ ID NO: 1930582 - DNA, 15 bp, Homo sapiens
tttacttttaaaact

SEQ ID NO: 1930583 - DNA, 15 bp, Homo sapiens
ttacttttaaaactt

SEQ ID NO: 1930584 - DNA, 15 bp, Homo sapiens
tacttttaaaactta

SEQ ID NO: 1930585 - DNA, 15 bp, Homo sapiens
acttttaaaacttac

SEQ ID NO: 1930586 - DNA, 15 bp, Homo sapiens
cttttaaaacttaca

SEQ ID NO: 1930587 - DNA, 15 bp, Homo sapiens
ttttaaaacttacaa

SEQ ID NO: 1930588 - DNA, 15 bp, Homo sapiens
tttaaaacttacaat

SEQ ID NO: 1930589 - DNA, 15 bp, Homo sapiens
ttaaaacttacaata

SEQ ID NO: 1930590 - DNA, 15 bp, Homo sapiens
taaaacttacaatac

SEQ ID NO: 1930591 - DNA, 15 bp, Homo sapiens
aaaacttacaataca

SEQ ID NO: 1930592 - DNA, 15 bp, Homo sapiens
aaacttacaatacat

SEQ ID NO: 1930593 - DNA, 15 bp, Homo sapiens
aacttacaatacatg

SEQ ID NO: 1930594 - DNA, 15 bp, Homo sapiens
acttacaatacatgc

SEQ ID NO: 1930595 - DNA, 15 bp, Homo sapiens
cttacaatacatgct

SEQ ID NO: 1930596 - DNA, 15 bp, Homo sapiens
ttacaatacatgctt

SEQ ID NO: 1930597 - DNA, 15 bp, Homo sapiens
tacaatacatgcttt

SEQ ID NO: 1930598 - DNA, 15 bp, Homo sapiens
acaatacatgctttt

SEQ ID NO: 1930599 - DNA, 15 bp, Homo sapiens
caatacatgcttttt

SEQ ID NO: 1930600 - DNA, 15 bp, Homo sapiens
aatacatgctttttt

SEQ ID NO: 1930601 - DNA, 15 bp, Homo sapiens
atacatgcttttttc

SEQ ID NO: 1930602 - DNA, 15 bp, Homo sapiens
tacatgcttttttct

SEQ ID NO: 1930603 - DNA, 15 bp, Homo sapiens
acatgcttttttctt

SEQ ID NO: 1930604 - DNA, 15 bp, Homo sapiens
catgcttttttcttc

SEQ ID NO: 1930605 - DNA, 15 bp, Homo sapiens
atgcttttttcttcc

SEQ ID NO: 1930606 - DNA, 15 bp, Homo sapiens
tgcttttttcttcca

SEQ ID NO: 1930607 - DNA, 15 bp, Homo sapiens
gcttttttcttccag

SEQ ID NO: 1930608 - DNA, 15 bp, Homo sapiens
cttttttcttccagg

SEQ ID NO: 1930609 - DNA, 15 bp, Homo sapiens
ttttttcttccaggc

SEQ ID NO: 1930610 - DNA, 15 bp, Homo sapiens
tttttcttccaggcc

SEQ ID NO: 1930611 - DNA, 15 bp, Homo sapiens
ttttcttccaggcca

SEQ ID NO: 1930612 - DNA, 15 bp, Homo sapiens
tttcttccaggccaa

SEQ ID NO: 1930613 - DNA, 15 bp, Homo sapiens
ttcttccaggccaaa

SEQ ID NO: 1930614 - DNA, 15 bp, Homo sapiens
tcttccaggccaaac

SEQ ID NO: 1930615 - DNA, 15 bp, Homo sapiens
cttccaggccaaact

SEQ ID NO: 1930616 - DNA, 15 bp, Homo sapiens
ttccaggccaaacta

SEQ ID NO: 1930617 - DNA, 15 bp, Homo sapiens
tccaggccaaactat

SEQ ID NO: 1930618 - DNA, 15 bp, Homo sapiens
ccaggccaaactatt

SEQ ID NO: 1930619 - DNA, 15 bp, Homo sapiens
caggccaaactattt

SEQ ID NO: 1930620 - DNA, 15 bp, Homo sapiens
aggccaaactatttc

SEQ ID NO: 1930621 - DNA, 15 bp, Homo sapiens
ggccaaactatttcc

SEQ ID NO: 1930622 - DNA, 15 bp, Homo sapiens
gccaaactatttcct

SEQ ID NO: 1930623 - DNA, 15 bp, Homo sapiens
ccaaactatttccta

SEQ ID NO: 1930624 - DNA, 15 bp, Homo sapiens
caaactatttcctag

SEQ ID NO: 1930625 - DNA, 15 bp, Homo sapiens
aaactatttcctagt

SEQ ID NO: 1930626 - DNA, 15 bp, Homo sapiens
aactatttcctagtg

SEQ ID NO: 1930627 - DNA, 15 bp, Homo sapiens
actatttcctagtgc

SEQ ID NO: 1930628 - DNA, 15 bp, Homo sapiens
ctatttcctagtgca

SEQ ID NO: 1930629 - DNA, 15 bp, Homo sapiens
tatttcctagtgcat

SEQ ID NO: 1930630 - DNA, 15 bp, Homo sapiens
atttcctagtgcata

SEQ ID NO: 1930631 - DNA, 15 bp, Homo sapiens
tttcctagtgcataa

SEQ ID NO: 1930632 - DNA, 15 bp, Homo sapiens
ttcctagtgcataat

SEQ ID NO: 1930633 - DNA, 15 bp, Homo sapiens
tcctagtgcataatg

SEQ ID NO: 1930634 - DNA, 15 bp, Homo sapiens
cctagtgcataatga

SEQ ID NO: 1930635 - DNA, 15 bp, Homo sapiens
ctagtgcataatgaa

SEQ ID NO: 1930636 - DNA, 15 bp, Homo sapiens
tagtgcataatgaag

SEQ ID NO: 1930637 - DNA, 15 bp, Homo sapiens
agtgcataatgaaga

SEQ ID NO: 1930638 - DNA, 15 bp, Homo sapiens
gtgcataatgaagat

SEQ ID NO: 1930639 - DNA, 15 bp, Homo sapiens
tgcataatgaagata

SEQ ID NO: 1930640 - DNA, 15 bp, Homo sapiens
gcataatgaagataa

SEQ ID NO: 1930641 - DNA, 15 bp, Homo sapiens
cataatgaagataat

SEQ ID NO: 1930642 - DNA, 15 bp, Homo sapiens
ataatgaagataatt

SEQ ID NO: 1930643 - DNA, 15 bp, Homo sapiens
taatgaagataattt

SEQ ID NO: 1930644 - DNA, 15 bp, Homo sapiens
aatgaagataatttt

SEQ ID NO: 1930645 - DNA, 15 bp, Homo sapiens
atgaagataattttg

SEQ ID NO: 1930646 - DNA, 15 bp, Homo sapiens
tgaagataattttga

SEQ ID NO: 1930647 - DNA, 15 bp, Homo sapiens
gaagataattttgat

SEQ ID NO: 1930648 - DNA, 15 bp, Homo sapiens
aagataattttgatg

SEQ ID NO: 1930649 - DNA, 15 bp, Homo sapiens
agataattttgatga

SEQ ID NO: 1930650 - DNA, 15 bp, Homo sapiens
gataattttgatgat

SEQ ID NO: 1930651 - DNA, 15 bp, Homo sapiens
ataattttgatgata

SEQ ID NO: 1930652 - DNA, 15 bp, Homo sapiens
taattttgatgataa

SEQ ID NO: 1930653 - DNA, 15 bp, Homo sapiens
aattttgatgataat

SEQ ID NO: 1930654 - DNA, 15 bp, Homo sapiens
attttgatgataata

SEQ ID NO: 1930655 - DNA, 15 bp, Homo sapiens
ttttgatgataatac

SEQ ID NO: 1930656 - DNA, 15 bp, Homo sapiens
tttgatgataataca

SEQ ID NO: 1930657 - DNA, 15 bp, Homo sapiens
ttgatgataatacat

SEQ ID NO: 1930658 - DNA, 15 bp, Homo sapiens
tgatgataatacatg

SEQ ID NO: 1930659 - DNA, 15 bp, Homo sapiens
gatgataatacatga

SEQ ID NO: 1930660 - DNA, 15 bp, Homo sapiens
atgataatacatgaa

SEQ ID NO: 1930661 - DNA, 15 bp, Homo sapiens
tgataatacatgaat

SEQ ID NO: 1930662 - DNA, 15 bp, Homo sapiens
gataatacatgaatt

SEQ ID NO: 1930663 - DNA, 15 bp, Homo sapiens
ataatacatgaattc

SEQ ID NO: 1930664 - DNA, 15 bp, Homo sapiens
taatacatgaattct

SEQ ID NO: 1930665 - DNA, 15 bp, Homo sapiens
aatacatgaattctt

SEQ ID NO: 1930666 - DNA, 15 bp, Homo sapiens
atacatgaattcttc

SEQ ID NO: 1930667 - DNA, 15 bp, Homo sapiens
tacatgaattcttca

SEQ ID NO: 1930668 - DNA, 15 bp, Homo sapiens
acatgaattcttcaa

SEQ ID NO: 1930669 - DNA, 15 bp, Homo sapiens
catgaattcttcaaa

SEQ ID NO: 1930670 - DNA, 15 bp, Homo sapiens
atgaattcttcaaac

SEQ ID NO: 1930671 - DNA, 15 bp, Homo sapiens
tgaattcttcaaaca

SEQ ID NO: 1930672 - DNA, 15 bp, Homo sapiens
gaattcttcaaacat

SEQ ID NO: 1930673 - DNA, 15 bp, Homo sapiens
aattcttcaaacatt

SEQ ID NO: 1930674 - DNA, 15 bp, Homo sapiens
attcttcaaacattt

SEQ ID NO: 1930675 - DNA, 15 bp, Homo sapiens
ttcttcaaacatttt

SEQ ID NO: 1930676 - DNA, 15 bp, Homo sapiens
tcttcaaacattttg

SEQ ID NO: 1930677 - DNA, 15 bp, Homo sapiens
cttcaaacattttgg

SEQ ID NO: 1930678 - DNA, 15 bp, Homo sapiens
ttcaaacattttgga

SEQ ID NO: 1930679 - DNA, 15 bp, Homo sapiens
tcaaacattttggaa

SEQ ID NO: 1930680 - DNA, 15 bp, Homo sapiens
caaacattttggaag

SEQ ID NO: 1930681 - DNA, 15 bp, Homo sapiens
aaacattttggaaga

SEQ ID NO: 1930682 - DNA, 15 bp, Homo sapiens
aacattttggaagaa

SEQ ID NO: 1930683 - DNA, 15 bp, Homo sapiens
acattttggaagaat

SEQ ID NO: 1930684 - DNA, 15 bp, Homo sapiens
cattttggaagaata

SEQ ID NO: 1930685 - DNA, 15 bp, Homo sapiens
attttggaagaatac

SEQ ID NO: 1930686 - DNA, 15 bp, Homo sapiens
ttttggaagaatact

SEQ ID NO: 1930687 - DNA, 15 bp, Homo sapiens
tttggaagaatactt

SEQ ID NO: 1930688 - DNA, 15 bp, Homo sapiens
ttggaagaatacttc

SEQ ID NO: 1930689 - DNA, 15 bp, Homo sapiens
tggaagaatacttca

SEQ ID NO: 1930690 - DNA, 15 bp, Homo sapiens
ggaagaatacttcaa

SEQ ID NO: 1930691 - DNA, 15 bp, Homo sapiens
gaagaatacttcaaa

SEQ ID NO: 1930692 - DNA, 15 bp, Homo sapiens
aagaatacttcaaat

SEQ ID NO: 1930693 - DNA, 15 bp, Homo sapiens
agaatacttcaaatt

SEQ ID NO: 1930694 - DNA, 15 bp, Homo sapiens
gaatacttcaaattt

SEQ ID NO: 1930695 - DNA, 15 bp, Homo sapiens
aatacttcaaatttc

SEQ ID NO: 1930696 - DNA, 15 bp, Homo sapiens
atacttcaaatttca

SEQ ID NO: 1930697 - DNA, 15 bp, Homo sapiens
tacttcaaatttcaa

SEQ ID NO: 1930698 - DNA, 15 bp, Homo sapiens
acttcaaatttcaag

SEQ ID NO: 1930699 - DNA, 15 bp, Homo sapiens
cttcaaatttcaagg

SEQ ID NO: 1930700 - DNA, 15 bp, Homo sapiens
ttcaaatttcaaggg

SEQ ID NO: 1930701 - DNA, 15 bp, Homo sapiens
tcaaatttcaagggt

SEQ ID NO: 1930702 - DNA, 15 bp, Homo sapiens
caaatttcaagggtg

SEQ ID NO: 1930703 - DNA, 15 bp, Homo sapiens
aaatttcaagggtgg

SEQ ID NO: 1930704 - DNA, 15 bp, Homo sapiens
aatttcaagggtggt

SEQ ID NO: 1930705 - DNA, 15 bp, Homo sapiens
atttcaagggtggta

SEQ ID NO: 1930706 - DNA, 15 bp, Homo sapiens
tttcaagggtggtat

SEQ ID NO: 1930707 - DNA, 15 bp, Homo sapiens
ttcaagggtggtatg

SEQ ID NO: 1930708 - DNA, 15 bp, Homo sapiens
tcaagggtggtatga

SEQ ID NO: 1930709 - DNA, 15 bp, Homo sapiens
caagggtggtatgat

SEQ ID NO: 1930710 - DNA, 15 bp, Homo sapiens
aagggtggtatgatg

SEQ ID NO: 1930711 - DNA, 15 bp, Homo sapiens
agggtggtatgatgt

SEQ ID NO: 1930712 - DNA, 15 bp, Homo sapiens
gggtggtatgatgtc

SEQ ID NO: 1930713 - DNA, 15 bp, Homo sapiens
ggtggtatgatgtcc

SEQ ID NO: 1930714 - DNA, 15 bp, Homo sapiens
gtggtatgatgtcca

SEQ ID NO: 1930715 - DNA, 15 bp, Homo sapiens
tggtatgatgtccac

SEQ ID NO: 1930716 - DNA, 15 bp, Homo sapiens
ggtatgatgtccaca

SEQ ID NO: 1930717 - DNA, 15 bp, Homo sapiens
gtatgatgtccacaa

SEQ ID NO: 1930718 - DNA, 15 bp, Homo sapiens
tatgatgtccacaaa

SEQ ID NO: 1930719 - DNA, 15 bp, Homo sapiens
atgatgtccacaaat

SEQ ID NO: 1930720 - DNA, 15 bp, Homo sapiens
tgatgtccacaaatc

SEQ ID NO: 1930721 - DNA, 15 bp, Homo sapiens
gatgtccacaaatcg

SEQ ID NO: 1930722 - DNA, 15 bp, Homo sapiens
atgtccacaaatcgc

SEQ ID NO: 1930723 - DNA, 15 bp, Homo sapiens
tgtccacaaatcgct

SEQ ID NO: 1930724 - DNA, 15 bp, Homo sapiens
gtccacaaatcgctg

SEQ ID NO: 1930725 - DNA, 15 bp, Homo sapiens
tccacaaatcgctga

SEQ ID NO: 1930726 - DNA, 15 bp, Homo sapiens
ccacaaatcgctgag

SEQ ID NO: 1930727 - DNA, 15 bp, Homo sapiens
cacaaatcgctgagt

SEQ ID NO: 1930728 - DNA, 15 bp, Homo sapiens
acaaatcgctgagtc

SEQ ID NO: 1930729 - DNA, 15 bp, Homo sapiens
caaatcgctgagtct

SEQ ID NO: 1930730 - DNA, 15 bp, Homo sapiens
aaatcgctgagtctg

SEQ ID NO: 1930731 - DNA, 15 bp, Homo sapiens
aatcgctgagtctgc

SEQ ID NO: 1930732 - DNA, 15 bp, Homo sapiens
atcgctgagtctgct

SEQ ID NO: 1930733 - DNA, 15 bp, Homo sapiens
tcgctgagtctgctt

SEQ ID NO: 1930734 - DNA, 15 bp, Homo sapiens
cgctgagtctgcttg

SEQ ID NO: 1930735 - DNA, 15 bp, Homo sapiens
gctgagtctgcttga

SEQ ID NO: 1930736 - DNA, 15 bp, Homo sapiens
ctgagtctgcttgat

SEQ ID NO: 1930737 - DNA, 15 bp, Homo sapiens
tgagtctgcttgatt

SEQ ID NO: 1930738 - DNA, 15 bp, Homo sapiens
gagtctgcttgattc

SEQ ID NO: 1930739 - DNA, 15 bp, Homo sapiens
agtctgcttgattct

SEQ ID NO: 1930740 - DNA, 15 bp, Homo sapiens
gtctgcttgattctt

SEQ ID NO: 1930741 - DNA, 15 bp, Homo sapiens
tctgcttgattcttt

SEQ ID NO: 1930742 - DNA, 15 bp, Homo sapiens
ctgcttgattctttt

SEQ ID NO: 1930743 - DNA, 15 bp, Homo sapiens
tgcttgattcttttt

SEQ ID NO: 1930744 - DNA, 15 bp, Homo sapiens
gcttgattcttttta

SEQ ID NO: 1930745 - DNA, 15 bp, Homo sapiens
cttgattctttttag

SEQ ID NO: 1930746 - DNA, 15 bp, Homo sapiens
ttgattctttttaga

SEQ ID NO: 1930747 - DNA, 15 bp, Homo sapiens
tgattctttttagaa

SEQ ID NO: 1930748 - DNA, 15 bp, Homo sapiens
gattctttttagaat

SEQ ID NO: 1930749 - DNA, 15 bp, Homo sapiens
attctttttagaatc

SEQ ID NO: 1930750 - DNA, 15 bp, Homo sapiens
ttctttttagaatca

SEQ ID NO: 1930751 - DNA, 15 bp, Homo sapiens
tctttttagaatcag

SEQ ID NO: 1930752 - DNA, 15 bp, Homo sapiens
ctttttagaatcagg

SEQ ID NO: 1930753 - DNA, 15 bp, Homo sapiens
tttttagaatcaggc

SEQ ID NO: 1930754 - DNA, 15 bp, Homo sapiens
ttttagaatcaggcc

SEQ ID NO: 1930755 - DNA, 15 bp, Homo sapiens
tttagaatcaggcct

SEQ ID NO: 1930756 - DNA, 15 bp, Homo sapiens
ttagaatcaggcctc

SEQ ID NO: 1930757 - DNA, 15 bp, Homo sapiens
tagaatcaggcctct

SEQ ID NO: 1930758 - DNA, 15 bp, Homo sapiens
agaatcaggcctctt

SEQ ID NO: 1930759 - DNA, 15 bp, Homo sapiens
gaatcaggcctcttg

SEQ ID NO: 1930760 - DNA, 15 bp, Homo sapiens
aatcaggcctcttga

SEQ ID NO: 1930761 - DNA, 15 bp, Homo sapiens
atcaggcctcttgat

SEQ ID NO: 1930762 - DNA, 15 bp, Homo sapiens
tcaggcctcttgata

SEQ ID NO: 1930763 - DNA, 15 bp, Homo sapiens
caggcctcttgatac

SEQ ID NO: 1930764 - DNA, 15 bp, Homo sapiens
aggcctcttgatact

SEQ ID NO: 1930765 - DNA, 15 bp, Homo sapiens
ggcctcttgatacta

SEQ ID NO: 1930766 - DNA, 15 bp, Homo sapiens
gcctcttgatactaa

SEQ ID NO: 1930767 - DNA, 15 bp, Homo sapiens
cctcttgatactaat

SEQ ID NO: 1930768 - DNA, 15 bp, Homo sapiens
ctcttgatactaatt

SEQ ID NO: 1930769 - DNA, 15 bp, Homo sapiens
tcttgatactaattt

SEQ ID NO: 1930770 - DNA, 15 bp, Homo sapiens
cttgatactaattta

SEQ ID NO: 1930771 - DNA, 15 bp, Homo sapiens
ttgatactaatttat

SEQ ID NO: 1930772 - DNA, 15 bp, Homo sapiens
tgatactaatttata

SEQ ID NO: 1930773 - DNA, 15 bp, Homo sapiens
gatactaatttataa

SEQ ID NO: 1930774 - DNA, 15 bp, Homo sapiens
atactaatttataat

SEQ ID NO: 1930775 - DNA, 15 bp, Homo sapiens
tactaatttataatg

SEQ ID NO: 1930776 - DNA, 15 bp, Homo sapiens
actaatttataatga

SEQ ID NO: 1930777 - DNA, 15 bp, Homo sapiens
ctaatttataatgag

SEQ ID NO: 1930778 - DNA, 15 bp, Homo sapiens
taatttataatgaga

SEQ ID NO: 1930779 - DNA, 15 bp, Homo sapiens
aatttataatgagaa

SEQ ID NO: 1930780 - DNA, 15 bp, Homo sapiens
atttataatgagaaa

SEQ ID NO: 1930781 - DNA, 15 bp, Homo sapiens
tttataatgagaaaa

SEQ ID NO: 1930782 - DNA, 15 bp, Homo sapiens
ttataatgagaaaac

SEQ ID NO: 1930783 - DNA, 15 bp, Homo sapiens
tataatgagaaaact

SEQ ID NO: 1930784 - DNA, 15 bp, Homo sapiens
ataatgagaaaacta

SEQ ID NO: 1930785 - DNA, 15 bp, Homo sapiens
taatgagaaaactat

SEQ ID NO: 1930786 - DNA, 15 bp, Homo sapiens
aatgagaaaactatt

SEQ ID NO: 1930787 - DNA, 15 bp, Homo sapiens
atgagaaaactattt

SEQ ID NO: 1930788 - DNA, 15 bp, Homo sapiens
tgagaaaactatttt

SEQ ID NO: 1930789 - DNA, 15 bp, Homo sapiens
gagaaaactatttta

SEQ ID NO: 1930790 - DNA, 15 bp, Homo sapiens
agaaaactattttaa

SEQ ID NO: 1930791 - DNA, 15 bp, Homo sapiens
gaaaactattttaaa

SEQ ID NO: 1930792 - DNA, 15 bp, Homo sapiens
aaaactattttaaat

SEQ ID NO: 1930793 - DNA, 15 bp, Homo sapiens
aaactattttaaatt

SEQ ID NO: 1930794 - DNA, 15 bp, Homo sapiens
aactattttaaatta

SEQ ID NO: 1930795 - DNA, 15 bp, Homo sapiens
actattttaaattaa

SEQ ID NO: 1930796 - DNA, 15 bp, Homo sapiens
ctattttaaattaaa

SEQ ID NO: 1930797 - DNA, 15 bp, Homo sapiens
tattttaaattaaac

SEQ ID NO: 1930798 - DNA, 15 bp, Homo sapiens
attttaaattaaaca

SEQ ID NO: 1930799 - DNA, 15 bp, Homo sapiens
ttttaaattaaacat

SEQ ID NO: 1930800 - DNA, 15 bp, Homo sapiens
tttaaattaaacatt

SEQ ID NO: 1930801 - DNA, 15 bp, Homo sapiens
ttaaattaaacattt

SEQ ID NO: 1930802 - DNA, 15 bp, Homo sapiens
taaattaaacattta

SEQ ID NO: 1930803 - DNA, 15 bp, Homo sapiens
aaattaaacatttat

SEQ ID NO: 1930804 - DNA, 15 bp, Homo sapiens
aattaaacatttatt

SEQ ID NO: 1930805 - DNA, 15 bp, Homo sapiens
attaaacatttattc

SEQ ID NO: 1930806 - DNA, 15 bp, Homo sapiens
ttaaacatttattct

SEQ ID NO: 1930807 - DNA, 15 bp, Homo sapiens
taaacatttattctt

SEQ ID NO: 1930808 - DNA, 15 bp, Homo sapiens
aaacatttattcttc

SEQ ID NO: 1930809 - DNA, 15 bp, Homo sapiens
aacatttattcttca

SEQ ID NO: 1930810 - DNA, 15 bp, Homo sapiens
acatttattcttcaa

SEQ ID NO: 1930811 - DNA, 15 bp, Homo sapiens
catttattcttcaaa

SEQ ID NO: 1930812 - DNA, 15 bp, Homo sapiens
atttattcttcaaaa

SEQ ID NO: 1930813 - DNA, 15 bp, Homo sapiens
tttattcttcaaaat

SEQ ID NO: 1930814 - DNA, 15 bp, Homo sapiens
ttattcttcaaaatt

SEQ ID NO: 1930815 - DNA, 15 bp, Homo sapiens
tattcttcaaaatta

SEQ ID NO: 1930816 - DNA, 15 bp, Homo sapiens
attcttcaaaattat

SEQ ID NO: 1930817 - DNA, 15 bp, Homo sapiens
ttcttcaaaattata

SEQ ID NO: 1930818 - DNA, 15 bp, Homo sapiens
tcttcaaaattatac

SEQ ID NO: 1930819 - DNA, 15 bp, Homo sapiens
cttcaaaattataca

SEQ ID NO: 1930820 - DNA, 15 bp, Homo sapiens
ttcaaaattatacat

SEQ ID NO: 1930821 - DNA, 15 bp, Homo sapiens
tcaaaattatacatc

SEQ ID NO: 1930822 - DNA, 15 bp, Homo sapiens
caaaattatacatct

SEQ ID NO: 1930823 - DNA, 15 bp, Homo sapiens
aaaattatacatctg

SEQ ID NO: 1930824 - DNA, 15 bp, Homo sapiens
aaattatacatctga

SEQ ID NO: 1930825 - DNA, 15 bp, Homo sapiens
aattatacatctgaa

SEQ ID NO: 1930826 - DNA, 15 bp, Homo sapiens
attatacatctgaat

SEQ ID NO: 1930827 - DNA, 15 bp, Homo sapiens
ttatacatctgaatg

SEQ ID NO: 1930828 - DNA, 15 bp, Homo sapiens
tatacatctgaatga

SEQ ID NO: 1930829 - DNA, 15 bp, Homo sapiens
atacatctgaatgag

SEQ ID NO: 1930830 - DNA, 15 bp, Homo sapiens
tacatctgaatgaga

SEQ ID NO: 1930831 - DNA, 15 bp, Homo sapiens
acatctgaatgagaa

SEQ ID NO: 1930832 - DNA, 15 bp, Homo sapiens
catctgaatgagaaa

SEQ ID NO: 1930833 - DNA, 15 bp, Homo sapiens
atctgaatgagaaaa

SEQ ID NO: 1930834 - DNA, 15 bp, Homo sapiens
tctgaatgagaaaac

SEQ ID NO: 1930835 - DNA, 15 bp, Homo sapiens
ctgaatgagaaaaca

SEQ ID NO: 1930836 - DNA, 15 bp, Homo sapiens
tgaatgagaaaacat

SEQ ID NO: 1930837 - DNA, 15 bp, Homo sapiens
gaatgagaaaacatt

SEQ ID NO: 1930838 - DNA, 15 bp, Homo sapiens
aatgagaaaacatta

SEQ ID NO: 1930839 - DNA, 15 bp, Homo sapiens
atgagaaaacattac

SEQ ID NO: 1930840 - DNA, 15 bp, Homo sapiens
tgagaaaacattaca

SEQ ID NO: 1930841 - DNA, 15 bp, Homo sapiens
gagaaaacattacat

SEQ ID NO: 1930842 - DNA, 15 bp, Homo sapiens
agaaaacattacatg

SEQ ID NO: 1930843 - DNA, 15 bp, Homo sapiens
gaaaacattacatga

SEQ ID NO: 1930844 - DNA, 15 bp, Homo sapiens
aaaacattacatgag

SEQ ID NO: 1930845 - DNA, 15 bp, Homo sapiens
aaacattacatgagg

SEQ ID NO: 1930846 - DNA, 15 bp, Homo sapiens
aacattacatgaggg

SEQ ID NO: 1930847 - DNA, 15 bp, Homo sapiens
acattacatgaggga

SEQ ID NO: 1930848 - DNA, 15 bp, Homo sapiens
cattacatgagggaa

SEQ ID NO: 1930849 - DNA, 15 bp, Homo sapiens
attacatgagggaat

SEQ ID NO: 1930850 - DNA, 15 bp, Homo sapiens
ttacatgagggaatg

SEQ ID NO: 1930851 - DNA, 15 bp, Homo sapiens
tacatgagggaatga

SEQ ID NO: 1930852 - DNA, 15 bp, Homo sapiens
acatgagggaatgat

SEQ ID NO: 1930853 - DNA, 15 bp, Homo sapiens
catgagggaatgata

SEQ ID NO: 1930854 - DNA, 15 bp, Homo sapiens
atgagggaatgatat

SEQ ID NO: 1930855 - DNA, 15 bp, Homo sapiens
tgagggaatgatata

SEQ ID NO: 1930856 - DNA, 15 bp, Homo sapiens
gagggaatgatataa

SEQ ID NO: 1930857 - DNA, 15 bp, Homo sapiens
agggaatgatataaa

SEQ ID NO: 1930858 - DNA, 15 bp, Homo sapiens
gggaatgatataaat

SEQ ID NO: 1930859 - DNA, 15 bp, Homo sapiens
ggaatgatataaata

SEQ ID NO: 1930860 - DNA, 15 bp, Homo sapiens
gaatgatataaatag

SEQ ID NO: 1930861 - DNA, 15 bp, Homo sapiens
aatgatataaatagt

SEQ ID NO: 1930862 - DNA, 15 bp, Homo sapiens
atgatataaatagtt

SEQ ID NO: 1930863 - DNA, 15 bp, Homo sapiens
tgatataaatagttt

SEQ ID NO: 1930864 - DNA, 15 bp, Homo sapiens
gatataaatagtttc

SEQ ID NO: 1930865 - DNA, 15 bp, Homo sapiens
atataaatagtttca

SEQ ID NO: 1930866 - DNA, 15 bp, Homo sapiens
tataaatagtttcat

SEQ ID NO: 1930867 - DNA, 15 bp, Homo sapiens
ataaatagtttcatc

SEQ ID NO: 1930868 - DNA, 15 bp, Homo sapiens
taaatagtttcatct

SEQ ID NO: 1930869 - DNA, 15 bp, Homo sapiens
aaatagtttcatctt

SEQ ID NO: 1930870 - DNA, 15 bp, Homo sapiens
aatagtttcatcttc

SEQ ID NO: 1930871 - DNA, 15 bp, Homo sapiens
atagtttcatcttct

SEQ ID NO: 1930872 - DNA, 15 bp, Homo sapiens
tagtttcatcttctt

SEQ ID NO: 1930873 - DNA, 15 bp, Homo sapiens
agtttcatcttctta

SEQ ID NO: 1930874 - DNA, 15 bp, Homo sapiens
gtttcatcttcttat

SEQ ID NO: 1930875 - DNA, 15 bp, Homo sapiens
tttcatcttcttatg

SEQ ID NO: 1930876 - DNA, 15 bp, Homo sapiens
ttcatcttcttatgt

SEQ ID NO: 1930877 - DNA, 15 bp, Homo sapiens
tcatcttcttatgta

SEQ ID NO: 1930878 - DNA, 15 bp, Homo sapiens
catcttcttatgtat

SEQ ID NO: 1930879 - DNA, 15 bp, Homo sapiens
atcttcttatgtata

SEQ ID NO: 1930880 - DNA, 15 bp, Homo sapiens
tcttcttatgtataa

SEQ ID NO: 1930881 - DNA, 15 bp, Homo sapiens
cttcttatgtataaa

SEQ ID NO: 1930882 - DNA, 15 bp, Homo sapiens
ttcttatgtataaaa

SEQ ID NO: 1930883 - DNA, 15 bp, Homo sapiens
tcttatgtataaaaa

SEQ ID NO: 1930884 - DNA, 15 bp, Homo sapiens
cttatgtataaaaat

SEQ ID NO: 1930885 - DNA, 15 bp, Homo sapiens
ttatgtataaaaata

SEQ ID NO: 1930886 - DNA, 15 bp, Homo sapiens
tatgtataaaaataa

SEQ ID NO: 1930887 - DNA, 15 bp, Homo sapiens
atgtataaaaataaa

SEQ ID NO: 1930888 - DNA, 15 bp, Homo sapiens
tgtataaaaataaag

SEQ ID NO: 1930889 - DNA, 15 bp, Homo sapiens
gtataaaaataaaga

SEQ ID NO: 1930890 - DNA, 15 bp, Homo sapiens
tataaaaataaagat

SEQ ID NO: 1930891 - DNA, 15 bp, Homo sapiens
ataaaaataaagatt

SEQ ID NO: 1930892 - DNA, 15 bp, Homo sapiens
taaaaataaagattt

SEQ ID NO: 1930893 - DNA, 15 bp, Homo sapiens
aaaaataaagatttg

SEQ ID NO: 1930894 - DNA, 15 bp, Homo sapiens
aaaataaagatttgg

SEQ ID NO: 1930895 - DNA, 15 bp, Homo sapiens
aaataaagatttggg

SEQ ID NO: 1930896 - DNA, 15 bp, Homo sapiens
aataaagatttgggg

SEQ ID NO: 1930897 - DNA, 15 bp, Homo sapiens
ataaagatttggggc

SEQ ID NO: 1930898 - DNA, 15 bp, Homo sapiens
taaagatttggggca

SEQ ID NO: 1930899 - DNA, 15 bp, Homo sapiens
aaagatttggggcag

SEQ ID NO: 1930900 - DNA, 15 bp, Homo sapiens
aagatttggggcagc

SEQ ID NO: 1930901 - DNA, 15 bp, Homo sapiens
agatttggggcagcc

SEQ ID NO: 1930902 - DNA, 15 bp, Homo sapiens
gatttggggcagcca

SEQ ID NO: 1930903 - DNA, 15 bp, Homo sapiens
atttggggcagccag

SEQ ID NO: 1930904 - DNA, 15 bp, Homo sapiens
tttggggcagccaga

SEQ ID NO: 1930905 - DNA, 15 bp, Homo sapiens
ttggggcagccagaa

SEQ ID NO: 1930906 - DNA, 15 bp, Homo sapiens
tggggcagccagaat

SEQ ID NO: 1930907 - DNA, 15 bp, Homo sapiens
ggggcagccagaatg

SEQ ID NO: 1930908 - DNA, 15 bp, Homo sapiens
gggcagccagaatgt

SEQ ID NO: 1930909 - DNA, 15 bp, Homo sapiens
ggcagccagaatgtt

SEQ ID NO: 1930910 - DNA, 15 bp, Homo sapiens
gcagccagaatgttt

SEQ ID NO: 1930911 - DNA, 15 bp, Homo sapiens
cagccagaatgtttc

SEQ ID NO: 1930912 - DNA, 15 bp, Homo sapiens
agccagaatgtttca

SEQ ID NO: 1930913 - DNA, 15 bp, Homo sapiens
gccagaatgtttcaa

SEQ ID NO: 1930914 - DNA, 15 bp, Homo sapiens
ccagaatgtttcaaa

SEQ ID NO: 1930915 - DNA, 15 bp, Homo sapiens
cagaatgtttcaaag

SEQ ID NO: 1930916 - DNA, 15 bp, Homo sapiens
agaatgtttcaaagc

SEQ ID NO: 1930917 - DNA, 15 bp, Homo sapiens
gaatgtttcaaagct

SEQ ID NO: 1930918 - DNA, 15 bp, Homo sapiens
aatgtttcaaagcta

SEQ ID NO: 1930919 - DNA, 15 bp, Homo sapiens
atgtttcaaagctac

SEQ ID NO: 1930920 - DNA, 15 bp, Homo sapiens
tgtttcaaagctacc

SEQ ID NO: 1930921 - DNA, 15 bp, Homo sapiens
gtttcaaagctacct

SEQ ID NO: 1930922 - DNA, 15 bp, Homo sapiens
tttcaaagctacctt

SEQ ID NO: 1930923 - DNA, 15 bp, Homo sapiens
ttcaaagctaccttt

SEQ ID NO: 1930924 - DNA, 15 bp, Homo sapiens
tcaaagctaccttta

SEQ ID NO: 1930925 - DNA, 15 bp, Homo sapiens
caaagctacctttaa

SEQ ID NO: 1930926 - DNA, 15 bp, Homo sapiens
aaagctacctttaaa

SEQ ID NO: 1930927 - DNA, 15 bp, Homo sapiens
aagctacctttaaat

SEQ ID NO: 1930928 - DNA, 15 bp, Homo sapiens
agctacctttaaatc

SEQ ID NO: 1930929 - DNA, 15 bp, Homo sapiens
gctacctttaaatct

SEQ ID NO: 1930930 - DNA, 15 bp, Homo sapiens
ctacctttaaatctg

SEQ ID NO: 1930931 - DNA, 15 bp, Homo sapiens
tacctttaaatctgt

SEQ ID NO: 1930932 - DNA, 15 bp, Homo sapiens
acctttaaatctgtt

SEQ ID NO: 1930933 - DNA, 15 bp, Homo sapiens
cctttaaatctgtta

SEQ ID NO: 1930934 - DNA, 15 bp, Homo sapiens
ctttaaatctgttac

SEQ ID NO: 1930935 - DNA, 15 bp, Homo sapiens
tttaaatctgttaca

SEQ ID NO: 1930936 - DNA, 15 bp, Homo sapiens
ttaaatctgttacat

SEQ ID NO: 1930937 - DNA, 15 bp, Homo sapiens
taaatctgttacata

SEQ ID NO: 1930938 - DNA, 15 bp, Homo sapiens
aaatctgttacatac

SEQ ID NO: 1930939 - DNA, 15 bp, Homo sapiens
aatctgttacatact

SEQ ID NO: 1930940 - DNA, 15 bp, Homo sapiens
atctgttacatactg

SEQ ID NO: 1930941 - DNA, 15 bp, Homo sapiens
tctgttacatactga

SEQ ID NO: 1930942 - DNA, 15 bp, Homo sapiens
ctgttacatactgaa

SEQ ID NO: 1930943 - DNA, 15 bp, Homo sapiens
tgttacatactgaac

SEQ ID NO: 1930944 - DNA, 15 bp, Homo sapiens
gttacatactgaaca

SEQ ID NO: 1930945 - DNA, 15 bp, Homo sapiens
ttacatactgaacat

SEQ ID NO: 1930946 - DNA, 15 bp, Homo sapiens
tacatactgaacatt

SEQ ID NO: 1930947 - DNA, 15 bp, Homo sapiens
acatactgaacattt

SEQ ID NO: 1930948 - DNA, 15 bp, Homo sapiens
catactgaacattta

SEQ ID NO: 1930949 - DNA, 15 bp, Homo sapiens
atactgaacatttat

SEQ ID NO: 1930950 - DNA, 15 bp, Homo sapiens
tactgaacatttatt

SEQ ID NO: 1930951 - DNA, 15 bp, Homo sapiens
actgaacatttattt

SEQ ID NO: 1930952 - DNA, 15 bp, Homo sapiens
ctgaacatttatttt

SEQ ID NO: 1930953 - DNA, 15 bp, Homo sapiens
tgaacatttatttta

SEQ ID NO: 1930954 - DNA, 15 bp, Homo sapiens
gaacatttattttaa

SEQ ID NO: 1930955 - DNA, 15 bp, Homo sapiens
aacatttattttaag

SEQ ID NO: 1930956 - DNA, 15 bp, Homo sapiens
acatttattttaaga

SEQ ID NO: 1930957 - DNA, 15 bp, Homo sapiens
catttattttaagat

SEQ ID NO: 1930958 - DNA, 15 bp, Homo sapiens
atttattttaagatg

SEQ ID NO: 1930959 - DNA, 15 bp, Homo sapiens
tttattttaagatgg

SEQ ID NO: 1930960 - DNA, 15 bp, Homo sapiens
ttattttaagatgga

SEQ ID NO: 1930961 - DNA, 15 bp, Homo sapiens
tattttaagatggag

SEQ ID NO: 1930962 - DNA, 15 bp, Homo sapiens
attttaagatggagt

SEQ ID NO: 1930963 - DNA, 15 bp, Homo sapiens
ttttaagatggagtt

SEQ ID NO: 1930964 - DNA, 15 bp, Homo sapiens
tttaagatggagttt

SEQ ID NO: 1930965 - DNA, 15 bp, Homo sapiens
ttaagatggagtttt

SEQ ID NO: 1930966 - DNA, 15 bp, Homo sapiens
taagatggagtttta

SEQ ID NO: 1930967 - DNA, 15 bp, Homo sapiens
aagatggagttttaa

SEQ ID NO: 1930968 - DNA, 15 bp, Homo sapiens
agatggagttttaat

SEQ ID NO: 1930969 - DNA, 15 bp, Homo sapiens
gatggagttttaatt

SEQ ID NO: 1930970 - DNA, 15 bp, Homo sapiens
atggagttttaatta

SEQ ID NO: 1930971 - DNA, 15 bp, Homo sapiens
tggagttttaattac

SEQ ID NO: 1930972 - DNA, 15 bp, Homo sapiens
ggagttttaattacc

SEQ ID NO: 1930973 - DNA, 15 bp, Homo sapiens
gagttttaattacca

SEQ ID NO: 1930974 - DNA, 15 bp, Homo sapiens
agttttaattaccat

SEQ ID NO: 1930975 - DNA, 15 bp, Homo sapiens
gttttaattaccata

SEQ ID NO: 1930976 - DNA, 15 bp, Homo sapiens
ttttaattaccatat

SEQ ID NO: 1930977 - DNA, 15 bp, Homo sapiens
tttaattaccatatg

SEQ ID NO: 1930978 - DNA, 15 bp, Homo sapiens
ttaattaccatatgt

SEQ ID NO: 1930979 - DNA, 15 bp, Homo sapiens
taattaccatatgta

SEQ ID NO: 1930980 - DNA, 15 bp, Homo sapiens
aattaccatatgtaa

SEQ ID NO: 1930981 - DNA, 15 bp, Homo sapiens
attaccatatgtaac

SEQ ID NO: 1930982 - DNA, 15 bp, Homo sapiens
ttaccatatgtaaca

SEQ ID NO: 1930983 - DNA, 15 bp, Homo sapiens
taccatatgtaacag

SEQ ID NO: 1930984 - DNA, 15 bp, Homo sapiens
accatatgtaacagt

SEQ ID NO: 1930985 - DNA, 15 bp, Homo sapiens
ccatatgtaacagtg

SEQ ID NO: 1930986 - DNA, 15 bp, Homo sapiens
catatgtaacagtgc

SEQ ID NO: 1930987 - DNA, 15 bp, Homo sapiens
atatgtaacagtgca

SEQ ID NO: 1930988 - DNA, 15 bp, Homo sapiens
tatgtaacagtgcat

SEQ ID NO: 1930989 - DNA, 15 bp, Homo sapiens
atgtaacagtgcatg

SEQ ID NO: 1930990 - DNA, 15 bp, Homo sapiens
tgtaacagtgcatga

SEQ ID NO: 1930991 - DNA, 15 bp, Homo sapiens
gtaacagtgcatgaa

SEQ ID NO: 1930992 - DNA, 15 bp, Homo sapiens
taacagtgcatgaaa

SEQ ID NO: 1930993 - DNA, 15 bp, Homo sapiens
aacagtgcatgaaaa

SEQ ID NO: 1930994 - DNA, 15 bp, Homo sapiens
acagtgcatgaaaaa

SEQ ID NO: 1930995 - DNA, 15 bp, Homo sapiens
cagtgcatgaaaaat

SEQ ID NO: 1930996 - DNA, 15 bp, Homo sapiens
agtgcatgaaaaatg

SEQ ID NO: 1930997 - DNA, 15 bp, Homo sapiens
gtgcatgaaaaatgg

SEQ ID NO: 1930998 - DNA, 15 bp, Homo sapiens
tgcatgaaaaatggg

SEQ ID NO: 1930999 - DNA, 15 bp, Homo sapiens
gcatgaaaaatgggc

SEQ ID NO: 1931000 - DNA, 15 bp, Homo sapiens
catgaaaaatgggct

SEQ ID NO: 1931001 - DNA, 15 bp, Homo sapiens
atgaaaaatgggctg

SEQ ID NO: 1931002 - DNA, 15 bp, Homo sapiens
tgaaaaatgggctgt

SEQ ID NO: 1931003 - DNA, 15 bp, Homo sapiens
gaaaaatgggctgtc

SEQ ID NO: 1931004 - DNA, 15 bp, Homo sapiens
aaaaatgggctgtct

SEQ ID NO: 1931005 - DNA, 15 bp, Homo sapiens
aaaatgggctgtctt

SEQ ID NO: 1931006 - DNA, 15 bp, Homo sapiens
aaatgggctgtcttt

SEQ ID NO: 1931007 - DNA, 15 bp, Homo sapiens
aatgggctgtctttg

SEQ ID NO: 1931008 - DNA, 15 bp, Homo sapiens
atgggctgtctttga

SEQ ID NO: 1931009 - DNA, 15 bp, Homo sapiens
tgggctgtctttgag

SEQ ID NO: 1931010 - DNA, 15 bp, Homo sapiens
gggctgtctttgagt

SEQ ID NO: 1931011 - DNA, 15 bp, Homo sapiens
ggctgtctttgagtt

SEQ ID NO: 1931012 - DNA, 15 bp, Homo sapiens
gctgtctttgagtta

SEQ ID NO: 1931013 - DNA, 15 bp, Homo sapiens
ctgtctttgagttaa

SEQ ID NO: 1931014 - DNA, 15 bp, Homo sapiens
tgtctttgagttaaa

SEQ ID NO: 1931015 - DNA, 15 bp, Homo sapiens
gtctttgagttaaat

SEQ ID NO: 1931016 - DNA, 15 bp, Homo sapiens
tctttgagttaaata

SEQ ID NO: 1931017 - DNA, 15 bp, Homo sapiens
ctttgagttaaatat

SEQ ID NO: 1931018 - DNA, 15 bp, Homo sapiens
tttgagttaaatatt

SEQ ID NO: 1931019 - DNA, 15 bp, Homo sapiens
ttgagttaaatattt

SEQ ID NO: 1931020 - DNA, 15 bp, Homo sapiens
tgagttaaatatttc

SEQ ID NO: 1931021 - DNA, 15 bp, Homo sapiens
gagttaaatatttcc

SEQ ID NO: 1931022 - DNA, 15 bp, Homo sapiens
agttaaatatttccc

SEQ ID NO: 1931023 - DNA, 15 bp, Homo sapiens
gttaaatatttcccc

SEQ ID NO: 1931024 - DNA, 15 bp, Homo sapiens
ttaaatatttcccct

SEQ ID NO: 1931025 - DNA, 15 bp, Homo sapiens
taaatatttcccctc

SEQ ID NO: 1931026 - DNA, 15 bp, Homo sapiens
aaatatttcccctct

SEQ ID NO: 1931027 - DNA, 15 bp, Homo sapiens
aatatttcccctctt

SEQ ID NO: 1931028 - DNA, 15 bp, Homo sapiens
atatttcccctctta

SEQ ID NO: 1931029 - DNA, 15 bp, Homo sapiens
tatttcccctcttaa

SEQ ID NO: 1931030 - DNA, 15 bp, Homo sapiens
atttcccctcttaag

SEQ ID NO: 1931031 - DNA, 15 bp, Homo sapiens
tttcccctcttaaga

SEQ ID NO: 1931032 - DNA, 15 bp, Homo sapiens
ttcccctcttaagag

SEQ ID NO: 1931033 - DNA, 15 bp, Homo sapiens
tcccctcttaagaga

SEQ ID NO: 1931034 - DNA, 15 bp, Homo sapiens
cccctcttaagagaa

SEQ ID NO: 1931035 - DNA, 15 bp, Homo sapiens
ccctcttaagagaaa

SEQ ID NO: 1931036 - DNA, 15 bp, Homo sapiens
cctcttaagagaaag

SEQ ID NO: 1931037 - DNA, 15 bp, Homo sapiens
ctcttaagagaaaga

SEQ ID NO: 1931038 - DNA, 15 bp, Homo sapiens
tcttaagagaaagat

SEQ ID NO: 1931039 - DNA, 15 bp, Homo sapiens
cttaagagaaagata

SEQ ID NO: 1931040 - DNA, 15 bp, Homo sapiens
ttaagagaaagatat

SEQ ID NO: 1931041 - DNA, 15 bp, Homo sapiens
taagagaaagatatg

SEQ ID NO: 1931042 - DNA, 15 bp, Homo sapiens
aagagaaagatatgt

SEQ ID NO: 1931043 - DNA, 15 bp, Homo sapiens
agagaaagatatgtt

SEQ ID NO: 1931044 - DNA, 15 bp, Homo sapiens
gagaaagatatgttt

SEQ ID NO: 1931045 - DNA, 15 bp, Homo sapiens
agaaagatatgtttg

SEQ ID NO: 1931046 - DNA, 15 bp, Homo sapiens
gaaagatatgtttgt

SEQ ID NO: 1931047 - DNA, 15 bp, Homo sapiens
aaagatatgtttgtt

SEQ ID NO: 1931048 - DNA, 15 bp, Homo sapiens
aagatatgtttgttt

SEQ ID NO: 1931049 - DNA, 15 bp, Homo sapiens
agatatgtttgtttt

SEQ ID NO: 1931050 - DNA, 15 bp, Homo sapiens
gatatgtttgttttt

SEQ ID NO: 1931051 - DNA, 15 bp, Homo sapiens
atatgtttgtttttt

SEQ ID NO: 1931052 - DNA, 15 bp, Homo sapiens
tatgtttgttttttt

SEQ ID NO: 1931053 - DNA, 15 bp, Homo sapiens
atgtttgttttttta

SEQ ID NO: 1931054 - DNA, 15 bp, Homo sapiens
tgtttgtttttttat

SEQ ID NO: 1931055 - DNA, 15 bp, Homo sapiens
gtttgtttttttatt

SEQ ID NO: 1931056 - DNA, 15 bp, Homo sapiens
tgtttttttattttg

SEQ ID NO: 1931057 - DNA, 15 bp, Homo sapiens
gtttttttattttga

SEQ ID NO: 1931058 - DNA, 15 bp, Homo sapiens
tttttttattttgaa

SEQ ID NO: 1931059 - DNA, 15 bp, Homo sapiens
ttttttattttgaat

SEQ ID NO: 1931060 - DNA, 15 bp, Homo sapiens
tttttattttgaatg

SEQ ID NO: 1931061 - DNA, 15 bp, Homo sapiens
ttttattttgaatgt

SEQ ID NO: 1931062 - DNA, 15 bp, Homo sapiens
tttattttgaatgtt

SEQ ID NO: 1931063 - DNA, 15 bp, Homo sapiens
ttattttgaatgttt

SEQ ID NO: 1931064 - DNA, 15 bp, Homo sapiens
tattttgaatgtttt

SEQ ID NO: 1931065 - DNA, 15 bp, Homo sapiens
attttgaatgtttta

SEQ ID NO: 1931066 - DNA, 15 bp, Homo sapiens
ttttgaatgttttaa

SEQ ID NO: 1931067 - DNA, 15 bp, Homo sapiens
tttgaatgttttaac

SEQ ID NO: 1931068 - DNA, 15 bp, Homo sapiens
ttgaatgttttaact

SEQ ID NO: 1931069 - DNA, 15 bp, Homo sapiens
tgaatgttttaactt

SEQ ID NO: 1931070 - DNA, 15 bp, Homo sapiens
gaatgttttaactta

SEQ ID NO: 1931071 - DNA, 15 bp, Homo sapiens
aatgttttaacttat

SEQ ID NO: 1931072 - DNA, 15 bp, Homo sapiens
atgttttaacttatt

SEQ ID NO: 1931073 - DNA, 15 bp, Homo sapiens
tgttttaacttattg

SEQ ID NO: 1931074 - DNA, 15 bp, Homo sapiens
gttttaacttattgt

SEQ ID NO: 1931075 - DNA, 15 bp, Homo sapiens
ttttaacttattgtc

SEQ ID NO: 1931076 - DNA, 15 bp, Homo sapiens
tttaacttattgtct

SEQ ID NO: 1931077 - DNA, 15 bp, Homo sapiens
ttaacttattgtctt

SEQ ID NO: 1931078 - DNA, 15 bp, Homo sapiens
taacttattgtcttc

SEQ ID NO: 1931079 - DNA, 15 bp, Homo sapiens
aacttattgtcttca

SEQ ID NO: 1931080 - DNA, 15 bp, Homo sapiens
acttattgtcttcaa

SEQ ID NO: 1931081 - DNA, 15 bp, Homo sapiens
cttattgtcttcaag

SEQ ID NO: 1931082 - DNA, 15 bp, Homo sapiens
ttattgtcttcaagt

SEQ ID NO: 1931083 - DNA, 15 bp, Homo sapiens
tattgtcttcaagtg

SEQ ID NO: 1931084 - DNA, 15 bp, Homo sapiens
attgtcttcaagtgg

SEQ ID NO: 1931085 - DNA, 15 bp, Homo sapiens
ttgtcttcaagtggt

SEQ ID NO: 1931086 - DNA, 15 bp, Homo sapiens
tgtcttcaagtggtt

SEQ ID NO: 1931087 - DNA, 15 bp, Homo sapiens
gtcttcaagtggtta

SEQ ID NO: 1931088 - DNA, 15 bp, Homo sapiens
tcttcaagtggttaa

SEQ ID NO: 1931089 - DNA, 15 bp, Homo sapiens
cttcaagtggttaat

SEQ ID NO: 1931090 - DNA, 15 bp, Homo sapiens
ttcaagtggttaata

SEQ ID NO: 1931091 - DNA, 15 bp, Homo sapiens
tcaagtggttaatat

SEQ ID NO: 1931092 - DNA, 15 bp, Homo sapiens
caagtggttaatatt

SEQ ID NO: 1931093 - DNA, 15 bp, Homo sapiens
aagtggttaatattc

SEQ ID NO: 1931094 - DNA, 15 bp, Homo sapiens
agtggttaatattct

SEQ ID NO: 1931095 - DNA, 15 bp, Homo sapiens
gtggttaatattctt

SEQ ID NO: 1931096 - DNA, 15 bp, Homo sapiens
tggttaatattcttc

SEQ ID NO: 1931097 - DNA, 15 bp, Homo sapiens
ggttaatattcttca

SEQ ID NO: 1931098 - DNA, 15 bp, Homo sapiens
gttaatattcttcaa

SEQ ID NO: 1931099 - DNA, 15 bp, Homo sapiens
ttaatattcttcaaa

SEQ ID NO: 1931100 - DNA, 15 bp, Homo sapiens
taatattcttcaaat

SEQ ID NO: 1931101 - DNA, 15 bp, Homo sapiens
aatattcttcaaata

SEQ ID NO: 1931102 - DNA, 15 bp, Homo sapiens
atattcttcaaatat

SEQ ID NO: 1931103 - DNA, 15 bp, Homo sapiens
tattcttcaaatata

SEQ ID NO: 1931104 - DNA, 15 bp, Homo sapiens
attcttcaaatataa

SEQ ID NO: 1931105 - DNA, 15 bp, Homo sapiens
ttcttcaaatataac

SEQ ID NO: 1931106 - DNA, 15 bp, Homo sapiens
tcttcaaatataaca

SEQ ID NO: 1931107 - DNA, 15 bp, Homo sapiens
cttcaaatataacat

SEQ ID NO: 1931108 - DNA, 15 bp, Homo sapiens
ttcaaatataacatg

SEQ ID NO: 1931109 - DNA, 15 bp, Homo sapiens
tcaaatataacatgc

SEQ ID NO: 1931110 - DNA, 15 bp, Homo sapiens
caaatataacatgct

SEQ ID NO: 1931111 - DNA, 15 bp, Homo sapiens
aaatataacatgctg

SEQ ID NO: 1931112 - DNA, 15 bp, Homo sapiens
aatataacatgctgt

SEQ ID NO: 1931113 - DNA, 15 bp, Homo sapiens
atataacatgctgtc

SEQ ID NO: 1931114 - DNA, 15 bp, Homo sapiens
tataacatgctgtct

SEQ ID NO: 1931115 - DNA, 15 bp, Homo sapiens
ataacatgctgtcta

SEQ ID NO: 1931116 - DNA, 15 bp, Homo sapiens
taacatgctgtctat

SEQ ID NO: 1931117 - DNA, 15 bp, Homo sapiens
aacatgctgtctatt

SEQ ID NO: 1931118 - DNA, 15 bp, Homo sapiens
acatgctgtctattg

SEQ ID NO: 1931119 - DNA, 15 bp, Homo sapiens
catgctgtctattgc

SEQ ID NO: 1931120 - DNA, 15 bp, Homo sapiens
atgctgtctattgca

SEQ ID NO: 1931121 - DNA, 15 bp, Homo sapiens
tgctgtctattgcat

SEQ ID NO: 1931122 - DNA, 15 bp, Homo sapiens
gctgtctattgcatg

SEQ ID NO: 1931123 - DNA, 15 bp, Homo sapiens
ctgtctattgcatga

SEQ ID NO: 1931124 - DNA, 15 bp, Homo sapiens
tgtctattgcatgag

SEQ ID NO: 1931125 - DNA, 15 bp, Homo sapiens
gtctattgcatgagt

SEQ ID NO: 1931126 - DNA, 15 bp, Homo sapiens
tctattgcatgagtt

SEQ ID NO: 1931127 - DNA, 15 bp, Homo sapiens
ctattgcatgagtta

SEQ ID NO: 1931128 - DNA, 15 bp, Homo sapiens
tattgcatgagttat

SEQ ID NO: 1931129 - DNA, 15 bp, Homo sapiens
attgcatgagttata

SEQ ID NO: 1931130 - DNA, 15 bp, Homo sapiens
ttgcatgagttatat

SEQ ID NO: 1931131 - DNA, 15 bp, Homo sapiens
tgcatgagttatatc

SEQ ID NO: 1931132 - DNA, 15 bp, Homo sapiens
gcatgagttatatct

SEQ ID NO: 1931133 - DNA, 15 bp, Homo sapiens
catgagttatatctc

SEQ ID NO: 1931134 - DNA, 15 bp, Homo sapiens
atgagttatatctca

SEQ ID NO: 1931135 - DNA, 15 bp, Homo sapiens
tgagttatatctcag

SEQ ID NO: 1931136 - DNA, 15 bp, Homo sapiens
gagttatatctcagt

SEQ ID NO: 1931137 - DNA, 15 bp, Homo sapiens
agttatatctcagtt

SEQ ID NO: 1931138 - DNA, 15 bp, Homo sapiens
gttatatctcagttt

SEQ ID NO: 1931139 - DNA, 15 bp, Homo sapiens
ttatatctcagtttt

SEQ ID NO: 1931140 - DNA, 15 bp, Homo sapiens
tatatctcagtttta

SEQ ID NO: 1931141 - DNA, 15 bp, Homo sapiens
atatctcagttttaa

SEQ ID NO: 1931142 - DNA, 15 bp, Homo sapiens
tatctcagttttaaa

SEQ ID NO: 1931143 - DNA, 15 bp, Homo sapiens
atctcagttttaaaa

SEQ ID NO: 1931144 - DNA, 15 bp, Homo sapiens
tctcagttttaaaaa

SEQ ID NO: 1931145 - DNA, 15 bp, Homo sapiens
ctcagttttaaaaaa

SEQ ID NO: 1931146 - DNA, 15 bp, Homo sapiens
tcagttttaaaaaat

SEQ ID NO: 1931147 - DNA, 15 bp, Homo sapiens
cagttttaaaaaatg

SEQ ID NO: 1931148 - DNA, 15 bp, Homo sapiens
agttttaaaaaatgc

SEQ ID NO: 1931149 - DNA, 15 bp, Homo sapiens
gttttaaaaaatgca

SEQ ID NO: 1931150 - DNA, 15 bp, Homo sapiens
ttttaaaaaatgcaa

SEQ ID NO: 1931151 - DNA, 15 bp, Homo sapiens
tttaaaaaatgcaag

SEQ ID NO: 1931152 - DNA, 15 bp, Homo sapiens
ttaaaaaatgcaagt

SEQ ID NO: 1931153 - DNA, 15 bp, Homo sapiens
taaaaaatgcaagtc

SEQ ID NO: 1931154 - DNA, 15 bp, Homo sapiens
aaaaaatgcaagtca

SEQ ID NO: 1931155 - DNA, 15 bp, Homo sapiens
aaaaatgcaagtcat

SEQ ID NO: 1931156 - DNA, 15 bp, Homo sapiens
aaaatgcaagtcatg

SEQ ID NO: 1931157 - DNA, 15 bp, Homo sapiens
aaatgcaagtcatgt

SEQ ID NO: 1931158 - DNA, 15 bp, Homo sapiens
aatgcaagtcatgtt

SEQ ID NO: 1931159 - DNA, 15 bp, Homo sapiens
atgcaagtcatgtta

SEQ ID NO: 1931160 - DNA, 15 bp, Homo sapiens
tgcaagtcatgttac

SEQ ID NO: 1931161 - DNA, 15 bp, Homo sapiens
gcaagtcatgttact

SEQ ID NO: 1931162 - DNA, 15 bp, Homo sapiens
caagtcatgttactc

SEQ ID NO: 1931163 - DNA, 15 bp, Homo sapiens
aagtcatgttactcc

SEQ ID NO: 1931164 - DNA, 15 bp, Homo sapiens
agtcatgttactcct

SEQ ID NO: 1931165 - DNA, 15 bp, Homo sapiens
gtcatgttactcctc

SEQ ID NO: 1931166 - DNA, 15 bp, Homo sapiens
tcatgttactcctct

SEQ ID NO: 1931167 - DNA, 15 bp, Homo sapiens
catgttactcctctg

SEQ ID NO: 1931168 - DNA, 15 bp, Homo sapiens
atgttactcctctgc

SEQ ID NO: 1931169 - DNA, 15 bp, Homo sapiens
tgttactcctctgct

SEQ ID NO: 1931170 - DNA, 15 bp, Homo sapiens
gttactcctctgctc

SEQ ID NO: 1931171 - DNA, 15 bp, Homo sapiens
ttactcctctgctca

SEQ ID NO: 1931172 - DNA, 15 bp, Homo sapiens
tactcctctgctcaa

SEQ ID NO: 1931173 - DNA, 15 bp, Homo sapiens
actcctctgctcaaa

SEQ ID NO: 1931174 - DNA, 15 bp, Homo sapiens
ctcctctgctcaaaa

SEQ ID NO: 1931175 - DNA, 15 bp, Homo sapiens
tcctctgctcaaaaa

SEQ ID NO: 1931176 - DNA, 15 bp, Homo sapiens
cctctgctcaaaaag

SEQ ID NO: 1931177 - DNA, 15 bp, Homo sapiens
ctctgctcaaaaagt

SEQ ID NO: 1931178 - DNA, 15 bp, Homo sapiens
tctgctcaaaaagtt

SEQ ID NO: 1931179 - DNA, 15 bp, Homo sapiens
ctgctcaaaaagtta

SEQ ID NO: 1931180 - DNA, 15 bp, Homo sapiens
tgctcaaaaagttat

SEQ ID NO: 1931181 - DNA, 15 bp, Homo sapiens
gctcaaaaagttatt

SEQ ID NO: 1931182 - DNA, 15 bp, Homo sapiens
ctcaaaaagttattt

SEQ ID NO: 1931183 - DNA, 15 bp, Homo sapiens
tcaaaaagttatttc

SEQ ID NO: 1931184 - DNA, 15 bp, Homo sapiens
caaaaagttatttcc

SEQ ID NO: 1931185 - DNA, 15 bp, Homo sapiens
aaaaagttatttcca

SEQ ID NO: 1931186 - DNA, 15 bp, Homo sapiens
aaaagttatttccag

SEQ ID NO: 1931187 - DNA, 15 bp, Homo sapiens
aaagttatttccaga

SEQ ID NO: 1931188 - DNA, 15 bp, Homo sapiens
aagttatttccagat

SEQ ID NO: 1931189 - DNA, 15 bp, Homo sapiens
agttatttccagatt

SEQ ID NO: 1931190 - DNA, 15 bp, Homo sapiens
gttatttccagattt

SEQ ID NO: 1931191 - DNA, 15 bp, Homo sapiens
ttatttccagatttc

SEQ ID NO: 1931192 - DNA, 15 bp, Homo sapiens
tatttccagatttcc

SEQ ID NO: 1931193 - DNA, 15 bp, Homo sapiens
atttccagatttccc

SEQ ID NO: 1931194 - DNA, 15 bp, Homo sapiens
tttccagatttccct

SEQ ID NO: 1931195 - DNA, 15 bp, Homo sapiens
ttccagatttccctt

SEQ ID NO: 1931196 - DNA, 15 bp, Homo sapiens
tccagatttcccttt

SEQ ID NO: 1931197 - DNA, 15 bp, Homo sapiens
ccagatttccctttt

SEQ ID NO: 1931198 - DNA, 15 bp, Homo sapiens
cagatttcccttttt

SEQ ID NO: 1931199 - DNA, 15 bp, Homo sapiens
agatttccctttttt

SEQ ID NO: 1931200 - DNA, 15 bp, Homo sapiens
gatttcccttttttt

SEQ ID NO: 1931201 - DNA, 15 bp, Homo sapiens
atttcccttttttta

SEQ ID NO: 1931202 - DNA, 15 bp, Homo sapiens
tttccctttttttat

SEQ ID NO: 1931203 - DNA, 15 bp, Homo sapiens
ttccctttttttatc

SEQ ID NO: 1931204 - DNA, 15 bp, Homo sapiens
tccctttttttatct

SEQ ID NO: 1931205 - DNA, 15 bp, Homo sapiens
ccctttttttatcta

SEQ ID NO: 1931206 - DNA, 15 bp, Homo sapiens
cctttttttatctaa

SEQ ID NO: 1931207 - DNA, 15 bp, Homo sapiens
ctttttttatctaaa

SEQ ID NO: 1931208 - DNA, 15 bp, Homo sapiens
tttttttatctaaag

SEQ ID NO: 1931209 - DNA, 15 bp, Homo sapiens
ttttttatctaaagt

SEQ ID NO: 1931210 - DNA, 15 bp, Homo sapiens
tttttatctaaagtt

SEQ ID NO: 1931211 - DNA, 15 bp, Homo sapiens
ttttatctaaagttt

SEQ ID NO: 1931212 - DNA, 15 bp, Homo sapiens
tttatctaaagtttt

SEQ ID NO: 1931213 - DNA, 15 bp, Homo sapiens
ttatctaaagttttg

SEQ ID NO: 1931214 - DNA, 15 bp, Homo sapiens
tatctaaagttttgt

SEQ ID NO: 1931215 - DNA, 15 bp, Homo sapiens
atctaaagttttgta

SEQ ID NO: 1931216 - DNA, 15 bp, Homo sapiens
tctaaagttttgtat

SEQ ID NO: 1931217 - DNA, 15 bp, Homo sapiens
ctaaagttttgtata

SEQ ID NO: 1931218 - DNA, 15 bp, Homo sapiens
taaagttttgtataa

SEQ ID NO: 1931219 - DNA, 15 bp, Homo sapiens
aaagttttgtataat

SEQ ID NO: 1931220 - DNA, 15 bp, Homo sapiens
aagttttgtataatt

SEQ ID NO: 1931221 - DNA, 15 bp, Homo sapiens
agttttgtataattt

SEQ ID NO: 1931222 - DNA, 15 bp, Homo sapiens
gttttgtataatttt

SEQ ID NO: 1931223 - DNA, 15 bp, Homo sapiens
ttttgtataattttt

SEQ ID NO: 1931224 - DNA, 15 bp, Homo sapiens
tttgtataatttttt

SEQ ID NO: 1931225 - DNA, 15 bp, Homo sapiens
ttgtataattttttt

SEQ ID NO: 1931226 - DNA, 15 bp, Homo sapiens
tgtataatttttttc

SEQ ID NO: 1931227 - DNA, 15 bp, Homo sapiens
gtataatttttttca

SEQ ID NO: 1931228 - DNA, 15 bp, Homo sapiens
tataatttttttcag

SEQ ID NO: 1931229 - DNA, 15 bp, Homo sapiens
ataatttttttcagt

SEQ ID NO: 1931230 - DNA, 15 bp, Homo sapiens
taatttttttcagtt

SEQ ID NO: 1931231 - DNA, 15 bp, Homo sapiens
aatttttttcagttc

SEQ ID NO: 1931232 - DNA, 15 bp, Homo sapiens
atttttttcagttca

SEQ ID NO: 1931233 - DNA, 15 bp, Homo sapiens
tttttttcagttcac

SEQ ID NO: 1931234 - DNA, 15 bp, Homo sapiens
ttttttcagttcact

SEQ ID NO: 1931235 - DNA, 15 bp, Homo sapiens
tttttcagttcactc

SEQ ID NO: 1931236 - DNA, 15 bp, Homo sapiens
ttttcagttcactct

SEQ ID NO: 1931237 - DNA, 15 bp, Homo sapiens
tttcagttcactcta

SEQ ID NO: 1931238 - DNA, 15 bp, Homo sapiens
ttcagttcactctaa

SEQ ID NO: 1931239 - DNA, 15 bp, Homo sapiens
tcagttcactctaaa

SEQ ID NO: 1931240 - DNA, 15 bp, Homo sapiens
cagttcactctaaat

SEQ ID NO: 1931241 - DNA, 15 bp, Homo sapiens
agttcactctaaatg

SEQ ID NO: 1931242 - DNA, 15 bp, Homo sapiens
gttcactctaaatga

SEQ ID NO: 1931243 - DNA, 15 bp, Homo sapiens
ttcactctaaatgac

SEQ ID NO: 1931244 - DNA, 15 bp, Homo sapiens
tcactctaaatgact

SEQ ID NO: 1931245 - DNA, 15 bp, Homo sapiens
cactctaaatgactt

SEQ ID NO: 1931246 - DNA, 15 bp, Homo sapiens
actctaaatgactta

SEQ ID NO: 1931247 - DNA, 15 bp, Homo sapiens
ctctaaatgacttaa

SEQ ID NO: 1931248 - DNA, 15 bp, Homo sapiens
tctaaatgacttaat

SEQ ID NO: 1931249 - DNA, 15 bp, Homo sapiens
ctaaatgacttaata

SEQ ID NO: 1931250 - DNA, 15 bp, Homo sapiens
taaatgacttaatat

SEQ ID NO: 1931251 - DNA, 15 bp, Homo sapiens
aaatgacttaatata

SEQ ID NO: 1931252 - DNA, 15 bp, Homo sapiens
aatgacttaatatag

SEQ ID NO: 1931253 - DNA, 15 bp, Homo sapiens
atgacttaatatagg

SEQ ID NO: 1931254 - DNA, 15 bp, Homo sapiens
tgacttaatataggt

SEQ ID NO: 1931255 - DNA, 15 bp, Homo sapiens
gacttaatataggtc

SEQ ID NO: 1931256 - DNA, 15 bp, Homo sapiens
acttaatataggtct

SEQ ID NO: 1931257 - DNA, 15 bp, Homo sapiens
cttaatataggtcta

SEQ ID NO: 1931258 - DNA, 15 bp, Homo sapiens
ttaatataggtctaa

SEQ ID NO: 1931259 - DNA, 15 bp, Homo sapiens
taatataggtctaaa

SEQ ID NO: 1931260 - DNA, 15 bp, Homo sapiens
aatataggtctaaaa

SEQ ID NO: 1931261 - DNA, 15 bp, Homo sapiens
atataggtctaaaat

SEQ ID NO: 1931262 - DNA, 15 bp, Homo sapiens
tataggtctaaaatt

SEQ ID NO: 1931263 - DNA, 15 bp, Homo sapiens
ataggtctaaaattt

SEQ ID NO: 1931264 - DNA, 15 bp, Homo sapiens
taggtctaaaatttg

SEQ ID NO: 1931265 - DNA, 15 bp, Homo sapiens
aggtctaaaatttga

SEQ ID NO: 1931266 - DNA, 15 bp, Homo sapiens
ggtctaaaatttgaa

SEQ ID NO: 1931267 - DNA, 15 bp, Homo sapiens
gtctaaaatttgaat

SEQ ID NO: 1931268 - DNA, 15 bp, Homo sapiens
tctaaaatttgaata

SEQ ID NO: 1931269 - DNA, 15 bp, Homo sapiens
ctaaaatttgaatat

SEQ ID NO: 1931270 - DNA, 15 bp, Homo sapiens
taaaatttgaatatt

SEQ ID NO: 1931271 - DNA, 15 bp, Homo sapiens
aaaatttgaatatta

SEQ ID NO: 1931272 - DNA, 15 bp, Homo sapiens
aaatttgaatattag

SEQ ID NO: 1931273 - DNA, 15 bp, Homo sapiens
aatttgaatattagt

SEQ ID NO: 1931274 - DNA, 15 bp, Homo sapiens
atttgaatattagtt

SEQ ID NO: 1931275 - DNA, 15 bp, Homo sapiens
tttgaatattagttg

SEQ ID NO: 1931276 - DNA, 15 bp, Homo sapiens
ttgaatattagttga

SEQ ID NO: 1931277 - DNA, 15 bp, Homo sapiens
tgaatattagttgac

SEQ ID NO: 1931278 - DNA, 15 bp, Homo sapiens
gaatattagttgact

SEQ ID NO: 1931279 - DNA, 15 bp, Homo sapiens
aatattagttgactt

SEQ ID NO: 1931280 - DNA, 15 bp, Homo sapiens
atattagttgacttg

SEQ ID NO: 1931281 - DNA, 15 bp, Homo sapiens
tattagttgacttgt

SEQ ID NO: 1931282 - DNA, 15 bp, Homo sapiens
attagttgacttgta

SEQ ID NO: 1931283 - DNA, 15 bp, Homo sapiens
ttagttgacttgtat

SEQ ID NO: 1931284 - DNA, 15 bp, Homo sapiens
tagttgacttgtata

SEQ ID NO: 1931285 - DNA, 15 bp, Homo sapiens
agttgacttgtatat

SEQ ID NO: 1931286 - DNA, 15 bp, Homo sapiens
gttgacttgtatatc

SEQ ID NO: 1931287 - DNA, 15 bp, Homo sapiens
ttgacttgtatatca

SEQ ID NO: 1931288 - DNA, 15 bp, Homo sapiens
tgacttgtatatcac

SEQ ID NO: 1931289 - DNA, 15 bp, Homo sapiens
gacttgtatatcact

SEQ ID NO: 1931290 - DNA, 15 bp, Homo sapiens
acttgtatatcacta

SEQ ID NO: 1931291 - DNA, 15 bp, Homo sapiens
cttgtatatcactat

SEQ ID NO: 1931292 - DNA, 15 bp, Homo sapiens
ttgtatatcactatt

SEQ ID NO: 1931293 - DNA, 15 bp, Homo sapiens
tgtatatcactatta

SEQ ID NO: 1931294 - DNA, 15 bp, Homo sapiens
gtatatcactattag

SEQ ID NO: 1931295 - DNA, 15 bp, Homo sapiens
tatatcactattagg

SEQ ID NO: 1931296 - DNA, 15 bp, Homo sapiens
atatcactattagga

SEQ ID NO: 1931297 - DNA, 15 bp, Homo sapiens
tatcactattaggaa

SEQ ID NO: 1931298 - DNA, 15 bp, Homo sapiens
atcactattaggaat

SEQ ID NO: 1931299 - DNA, 15 bp, Homo sapiens
tcactattaggaatc

SEQ ID NO: 1931300 - DNA, 15 bp, Homo sapiens
cactattaggaatcc

SEQ ID NO: 1931301 - DNA, 15 bp, Homo sapiens
actattaggaatcca

SEQ ID NO: 1931302 - DNA, 15 bp, Homo sapiens
ctattaggaatccaa

SEQ ID NO: 1931303 - DNA, 15 bp, Homo sapiens
tattaggaatccaaa

SEQ ID NO: 1931304 - DNA, 15 bp, Homo sapiens
attaggaatccaaat

SEQ ID NO: 1931305 - DNA, 15 bp, Homo sapiens
ttaggaatccaaatt

SEQ ID NO: 1931306 - DNA, 15 bp, Homo sapiens
taggaatccaaattc

SEQ ID NO: 1931307 - DNA, 15 bp, Homo sapiens
aggaatccaaattcc

SEQ ID NO: 1931308 - DNA, 15 bp, Homo sapiens
ggaatccaaattccc

SEQ ID NO: 1931309 - DNA, 15 bp, Homo sapiens
gaatccaaattccct

SEQ ID NO: 1931310 - DNA, 15 bp, Homo sapiens
aatccaaattcccta

SEQ ID NO: 1931311 - DNA, 15 bp, Homo sapiens
atccaaattccctac

SEQ ID NO: 1931312 - DNA, 15 bp, Homo sapiens
tccaaattccctaca

SEQ ID NO: 1931313 - DNA, 15 bp, Homo sapiens
ccaaattccctacat

SEQ ID NO: 1931314 - DNA, 15 bp, Homo sapiens
caaattccctacatt

SEQ ID NO: 1931315 - DNA, 15 bp, Homo sapiens
aaattccctacattt

SEQ ID NO: 1931316 - DNA, 15 bp, Homo sapiens
aattccctacatttg

SEQ ID NO: 1931317 - DNA, 15 bp, Homo sapiens
attccctacatttgc

SEQ ID NO: 1931318 - DNA, 15 bp, Homo sapiens
ttccctacatttgca

SEQ ID NO: 1931319 - DNA, 15 bp, Homo sapiens
tccctacatttgcaa

SEQ ID NO: 1931320 - DNA, 15 bp, Homo sapiens
ccctacatttgcaat

SEQ ID NO: 1931321 - DNA, 15 bp, Homo sapiens
cctacatttgcaatg

SEQ ID NO: 1931322 - DNA, 15 bp, Homo sapiens
ctacatttgcaatga

SEQ ID NO: 1931323 - DNA, 15 bp, Homo sapiens
tacatttgcaatgac

SEQ ID NO: 1931324 - DNA, 15 bp, Homo sapiens
acatttgcaatgaca

SEQ ID NO: 1931325 - DNA, 15 bp, Homo sapiens
catttgcaatgacac

SEQ ID NO: 1931326 - DNA, 15 bp, Homo sapiens
atttgcaatgacact

SEQ ID NO: 1931327 - DNA, 15 bp, Homo sapiens
tttgcaatgacactg

SEQ ID NO: 1931328 - DNA, 15 bp, Homo sapiens
ttgcaatgacactgt

SEQ ID NO: 1931329 - DNA, 15 bp, Homo sapiens
tgcaatgacactgtc

SEQ ID NO: 1931330 - DNA, 15 bp, Homo sapiens
gcaatgacactgtca

SEQ ID NO: 1931331 - DNA, 15 bp, Homo sapiens
caatgacactgtcat

SEQ ID NO: 1931332 - DNA, 15 bp, Homo sapiens
aatgacactgtcatt

SEQ ID NO: 1931333 - DNA, 15 bp, Homo sapiens
atgacactgtcattg

SEQ ID NO: 1931334 - DNA, 15 bp, Homo sapiens
tgacactgtcattga

SEQ ID NO: 1931335 - DNA, 15 bp, Homo sapiens
gacactgtcattgaa

SEQ ID NO: 1931336 - DNA, 15 bp, Homo sapiens
acactgtcattgaac

SEQ ID NO: 1931337 - DNA, 15 bp, Homo sapiens
cactgtcattgaaca

SEQ ID NO: 1931338 - DNA, 15 bp, Homo sapiens
actgtcattgaacaa

SEQ ID NO: 1931339 - DNA, 15 bp, Homo sapiens
ctgtcattgaacaac

SEQ ID NO: 1931340 - DNA, 15 bp, Homo sapiens
tgtcattgaacaaca

SEQ ID NO: 1931341 - DNA, 15 bp, Homo sapiens
gtcattgaacaacaa

SEQ ID NO: 1931342 - DNA, 15 bp, Homo sapiens
tcattgaacaacaaa

SEQ ID NO: 1931343 - DNA, 15 bp, Homo sapiens
cattgaacaacaaaa

SEQ ID NO: 1931344 - DNA, 15 bp, Homo sapiens
attgaacaacaaaat

SEQ ID NO: 1931345 - DNA, 15 bp, Homo sapiens
ttgaacaacaaaatc

SEQ ID NO: 1931346 - DNA, 15 bp, Homo sapiens
tgaacaacaaaatcc

SEQ ID NO: 1931347 - DNA, 15 bp, Homo sapiens
gaacaacaaaatcca

SEQ ID NO: 1931348 - DNA, 15 bp, Homo sapiens
aacaacaaaatccat

SEQ ID NO: 1931349 - DNA, 15 bp, Homo sapiens
acaacaaaatccatt

SEQ ID NO: 1931350 - DNA, 15 bp, Homo sapiens
caacaaaatccatta

SEQ ID NO: 1931351 - DNA, 15 bp, Homo sapiens
aacaaaatccattat

SEQ ID NO: 1931352 - DNA, 15 bp, Homo sapiens
acaaaatccattatc

SEQ ID NO: 1931353 - DNA, 15 bp, Homo sapiens
caaaatccattatcc

SEQ ID NO: 1931354 - DNA, 15 bp, Homo sapiens
aaaatccattatcct

SEQ ID NO: 1931355 - DNA, 15 bp, Homo sapiens
aaatccattatccta

SEQ ID NO: 1931356 - DNA, 15 bp, Homo sapiens
aatccattatcctag

SEQ ID NO: 1931357 - DNA, 15 bp, Homo sapiens
atccattatcctaga

SEQ ID NO: 1931358 - DNA, 15 bp, Homo sapiens
tccattatcctagaa

SEQ ID NO: 1931359 - DNA, 15 bp, Homo sapiens
ccattatcctagaag

SEQ ID NO: 1931360 - DNA, 15 bp, Homo sapiens
cattatcctagaagt

SEQ ID NO: 1931361 - DNA, 15 bp, Homo sapiens
attatcctagaagtg

SEQ ID NO: 1931362 - DNA, 15 bp, Homo sapiens
ttatcctagaagtgt

SEQ ID NO: 1931363 - DNA, 15 bp, Homo sapiens
tatcctagaagtgtt

SEQ ID NO: 1931364 - DNA, 15 bp, Homo sapiens
atcctagaagtgttt

SEQ ID NO: 1931365 - DNA, 15 bp, Homo sapiens
tcctagaagtgtttg

SEQ ID NO: 1931366 - DNA, 15 bp, Homo sapiens
cctagaagtgtttgt

SEQ ID NO: 1931367 - DNA, 15 bp, Homo sapiens
ctagaagtgtttgta

SEQ ID NO: 1931368 - DNA, 15 bp, Homo sapiens
tagaagtgtttgtaa

SEQ ID NO: 1931369 - DNA, 15 bp, Homo sapiens
agaagtgtttgtaaa

SEQ ID NO: 1931370 - DNA, 15 bp, Homo sapiens
gaagtgtttgtaaat

SEQ ID NO: 1931371 - DNA, 15 bp, Homo sapiens
aagtgtttgtaaatt

SEQ ID NO: 1931372 - DNA, 15 bp, Homo sapiens
agtgtttgtaaattg

SEQ ID NO: 1931373 - DNA, 15 bp, Homo sapiens
gtgtttgtaaattgg

SEQ ID NO: 1931374 - DNA, 15 bp, Homo sapiens
tgtttgtaaattgga

SEQ ID NO: 1931375 - DNA, 15 bp, Homo sapiens
gtttgtaaattggaa

SEQ ID NO: 1931376 - DNA, 15 bp, Homo sapiens
tttgtaaattggaat

SEQ ID NO: 1931377 - DNA, 15 bp, Homo sapiens
ttgtaaattggaata

SEQ ID NO: 1931378 - DNA, 15 bp, Homo sapiens
tgtaaattggaatat

SEQ ID NO: 1931379 - DNA, 15 bp, Homo sapiens
gtaaattggaatatc

SEQ ID NO: 1931380 - DNA, 15 bp, Homo sapiens
taaattggaatatca

SEQ ID NO: 1931381 - DNA, 15 bp, Homo sapiens
aaattggaatatcat

SEQ ID NO: 1931382 - DNA, 15 bp, Homo sapiens
aattggaatatcatg

SEQ ID NO: 1931383 - DNA, 15 bp, Homo sapiens
attggaatatcatgg

SEQ ID NO: 1931384 - DNA, 15 bp, Homo sapiens
ttggaatatcatgga

SEQ ID NO: 1931385 - DNA, 15 bp, Homo sapiens
tggaatatcatggaa

SEQ ID NO: 1931386 - DNA, 15 bp, Homo sapiens
ggaatatcatggaaa

SEQ ID NO: 1931387 - DNA, 15 bp, Homo sapiens
gaatatcatggaaaa

SEQ ID NO: 1931388 - DNA, 15 bp, Homo sapiens
aatatcatggaaaag

SEQ ID NO: 1931389 - DNA, 15 bp, Homo sapiens
atatcatggaaaaga

SEQ ID NO: 1931390 - DNA, 15 bp, Homo sapiens
tatcatggaaaagaa

SEQ ID NO: 1931391 - DNA, 15 bp, Homo sapiens
atcatggaaaagaaa

SEQ ID NO: 1931392 - DNA, 15 bp, Homo sapiens
tcatggaaaagaaaa

SEQ ID NO: 1931393 - DNA, 15 bp, Homo sapiens
catggaaaagaaaag

SEQ ID NO: 1931394 - DNA, 15 bp, Homo sapiens
atggaaaagaaaagc

SEQ ID NO: 1931395 - DNA, 15 bp, Homo sapiens
tggaaaagaaaagct

SEQ ID NO: 1931396 - DNA, 15 bp, Homo sapiens
ggaaaagaaaagctc

SEQ ID NO: 1931397 - DNA, 15 bp, Homo sapiens
gaaaagaaaagctca

SEQ ID NO: 1931398 - DNA, 15 bp, Homo sapiens
aaaagaaaagctcag

SEQ ID NO: 1931399 - DNA, 15 bp, Homo sapiens
aaagaaaagctcaga

SEQ ID NO: 1931400 - DNA, 15 bp, Homo sapiens
aagaaaagctcagac

SEQ ID NO: 1931401 - DNA, 15 bp, Homo sapiens
agaaaagctcagact

SEQ ID NO: 1931402 - DNA, 15 bp, Homo sapiens
gaaaagctcagactt

SEQ ID NO: 1931403 - DNA, 15 bp, Homo sapiens
aaaagctcagacttt

SEQ ID NO: 1931404 - DNA, 15 bp, Homo sapiens
aaagctcagactttc

SEQ ID NO: 1931405 - DNA, 15 bp, Homo sapiens
aagctcagactttcg

SEQ ID NO: 1931406 - DNA, 15 bp, Homo sapiens
agctcagactttcga

SEQ ID NO: 1931407 - DNA, 15 bp, Homo sapiens
gctcagactttcgaa

SEQ ID NO: 1931408 - DNA, 15 bp, Homo sapiens
ctcagactttcgaat

SEQ ID NO: 1931409 - DNA, 15 bp, Homo sapiens
tcagactttcgaatg

SEQ ID NO: 1931410 - DNA, 15 bp, Homo sapiens
cagactttcgaatgt

SEQ ID NO: 1931411 - DNA, 15 bp, Homo sapiens
agactttcgaatgtt

SEQ ID NO: 1931412 - DNA, 15 bp, Homo sapiens
gactttcgaatgtta

SEQ ID NO: 1931413 - DNA, 15 bp, Homo sapiens
actttcgaatgttaa

SEQ ID NO: 1931414 - DNA, 15 bp, Homo sapiens
ctttcgaatgttaaa

SEQ ID NO: 1931415 - DNA, 15 bp, Homo sapiens
tttcgaatgttaaag

SEQ ID NO: 1931416 - DNA, 15 bp, Homo sapiens
ttcgaatgttaaagt

SEQ ID NO: 1931417 - DNA, 15 bp, Homo sapiens
tcgaatgttaaagtg

SEQ ID NO: 1931418 - DNA, 15 bp, Homo sapiens
cgaatgttaaagtgg

SEQ ID NO: 1931419 - DNA, 15 bp, Homo sapiens
gaatgttaaagtggg

SEQ ID NO: 1931420 - DNA, 15 bp, Homo sapiens
aatgttaaagtgggg

SEQ ID NO: 1931421 - DNA, 15 bp, Homo sapiens
atgttaaagtggggc

SEQ ID NO: 1931422 - DNA, 15 bp, Homo sapiens
tgttaaagtggggca

SEQ ID NO: 1931423 - DNA, 15 bp, Homo sapiens
gttaaagtggggcat

SEQ ID NO: 1931424 - DNA, 15 bp, Homo sapiens
ttaaagtggggcatc

SEQ ID NO: 1931425 - DNA, 15 bp, Homo sapiens
taaagtggggcatcc

SEQ ID NO: 1931426 - DNA, 15 bp, Homo sapiens
aaagtggggcatcct

SEQ ID NO: 1931427 - DNA, 15 bp, Homo sapiens
aagtggggcatcctt

SEQ ID NO: 1931428 - DNA, 15 bp, Homo sapiens
agtggggcatccttt

SEQ ID NO: 1931429 - DNA, 15 bp, Homo sapiens
gtggggcatcctttc

SEQ ID NO: 1931430 - DNA, 15 bp, Homo sapiens
tggggcatcctttcc

SEQ ID NO: 1931431 - DNA, 15 bp, Homo sapiens
ggggcatcctttcca

SEQ ID NO: 1931432 - DNA, 15 bp, Homo sapiens
gggcatcctttccaa

SEQ ID NO: 1931433 - DNA, 15 bp, Homo sapiens
ggcatcctttccaac

SEQ ID NO: 1931434 - DNA, 15 bp, Homo sapiens
gcatcctttccaact

SEQ ID NO: 1931435 - DNA, 15 bp, Homo sapiens
catcctttccaactt

SEQ ID NO: 1931436 - DNA, 15 bp, Homo sapiens
atcctttccaacttt

SEQ ID NO: 1931437 - DNA, 15 bp, Homo sapiens
tcctttccaactttg

SEQ ID NO: 1931438 - DNA, 15 bp, Homo sapiens
cctttccaactttga

SEQ ID NO: 1931439 - DNA, 15 bp, Homo sapiens
ctttccaactttgac

SEQ ID NO: 1931440 - DNA, 15 bp, Homo sapiens
tttccaactttgact

SEQ ID NO: 1931441 - DNA, 15 bp, Homo sapiens
ttccaactttgactt

SEQ ID NO: 1931442 - DNA, 15 bp, Homo sapiens
tccaactttgactta

SEQ ID NO: 1931443 - DNA, 15 bp, Homo sapiens
ccaactttgacttat

SEQ ID NO: 1931444 - DNA, 15 bp, Homo sapiens
caactttgacttatt

SEQ ID NO: 1931445 - DNA, 15 bp, Homo sapiens
aactttgacttatta

SEQ ID NO: 1931446 - DNA, 15 bp, Homo sapiens
actttgacttattat

SEQ ID NO: 1931447 - DNA, 15 bp, Homo sapiens
ctttgacttattatt

SEQ ID NO: 1931448 - DNA, 15 bp, Homo sapiens
tttgacttattattc

SEQ ID NO: 1931449 - DNA, 15 bp, Homo sapiens
ttgacttattattct

SEQ ID NO: 1931450 - DNA, 15 bp, Homo sapiens
tgacttattattctt

SEQ ID NO: 1931451 - DNA, 15 bp, Homo sapiens
gacttattattctta

SEQ ID NO: 1931452 - DNA, 15 bp, Homo sapiens
acttattattcttag

SEQ ID NO: 1931453 - DNA, 15 bp, Homo sapiens
cttattattcttagc

SEQ ID NO: 1931454 - DNA, 15 bp, Homo sapiens
ttattattcttagca

SEQ ID NO: 1931455 - DNA, 15 bp, Homo sapiens
tattattcttagcat

SEQ ID NO: 1931456 - DNA, 15 bp, Homo sapiens
attattcttagcatt

SEQ ID NO: 1931457 - DNA, 15 bp, Homo sapiens
ttattcttagcattt

SEQ ID NO: 1931458 - DNA, 15 bp, Homo sapiens
tattcttagcatttt

SEQ ID NO: 1931459 - DNA, 15 bp, Homo sapiens
attcttagcattttg

SEQ ID NO: 1931460 - DNA, 15 bp, Homo sapiens
ttcttagcattttgg

SEQ ID NO: 1931461 - DNA, 15 bp, Homo sapiens
tcttagcattttgga

SEQ ID NO: 1931462 - DNA, 15 bp, Homo sapiens
cttagcattttggac

SEQ ID NO: 1931463 - DNA, 15 bp, Homo sapiens
ttagcattttggact

SEQ ID NO: 1931464 - DNA, 15 bp, Homo sapiens
tagcattttggacta

SEQ ID NO: 1931465 - DNA, 15 bp, Homo sapiens
agcattttggactaa

SEQ ID NO: 1931466 - DNA, 15 bp, Homo sapiens
gcattttggactaag

SEQ ID NO: 1931467 - DNA, 15 bp, Homo sapiens
cattttggactaagg

SEQ ID NO: 1931468 - DNA, 15 bp, Homo sapiens
attttggactaaggg

SEQ ID NO: 1931469 - DNA, 15 bp, Homo sapiens
ttttggactaagggt

SEQ ID NO: 1931470 - DNA, 15 bp, Homo sapiens
tttggactaagggta

SEQ ID NO: 1931471 - DNA, 15 bp, Homo sapiens
ttggactaagggtaa

SEQ ID NO: 1931472 - DNA, 15 bp, Homo sapiens
tggactaagggtaaa

SEQ ID NO: 1931473 - DNA, 15 bp, Homo sapiens
ggactaagggtaaaa

SEQ ID NO: 1931474 - DNA, 15 bp, Homo sapiens
gactaagggtaaaac

SEQ ID NO: 1931475 - DNA, 15 bp, Homo sapiens
actaagggtaaaacc

SEQ ID NO: 1931476 - DNA, 15 bp, Homo sapiens
ctaagggtaaaacct

SEQ ID NO: 1931477 - DNA, 15 bp, Homo sapiens
taagggtaaaacctt

SEQ ID NO: 1931478 - DNA, 15 bp, Homo sapiens
aagggtaaaacctta

SEQ ID NO: 1931479 - DNA, 15 bp, Homo sapiens
agggtaaaaccttag

SEQ ID NO: 1931480 - DNA, 15 bp, Homo sapiens
gggtaaaaccttagt

SEQ ID NO: 1931481 - DNA, 15 bp, Homo sapiens
ggtaaaaccttagtt

SEQ ID NO: 1931482 - DNA, 15 bp, Homo sapiens
gtaaaaccttagttt

SEQ ID NO: 1931483 - DNA, 15 bp, Homo sapiens
taaaaccttagtttc

SEQ ID NO: 1931484 - DNA, 15 bp, Homo sapiens
aaaaccttagtttcc

SEQ ID NO: 1931485 - DNA, 15 bp, Homo sapiens
aaaccttagtttcct

SEQ ID NO: 1931486 - DNA, 15 bp, Homo sapiens
aaccttagtttccta

SEQ ID NO: 1931487 - DNA, 15 bp, Homo sapiens
accttagtttcctac

SEQ ID NO: 1931488 - DNA, 15 bp, Homo sapiens
ccttagtttcctaca

SEQ ID NO: 1931489 - DNA, 15 bp, Homo sapiens
cttagtttcctacat

SEQ ID NO: 1931490 - DNA, 15 bp, Homo sapiens
ttagtttcctacatc

SEQ ID NO: 1931491 - DNA, 15 bp, Homo sapiens
tagtttcctacatca

SEQ ID NO: 1931492 - DNA, 15 bp, Homo sapiens
agtttcctacatcat

SEQ ID NO: 1931493 - DNA, 15 bp, Homo sapiens
gtttcctacatcata

SEQ ID NO: 1931494 - DNA, 15 bp, Homo sapiens
tttcctacatcatat

SEQ ID NO: 1931495 - DNA, 15 bp, Homo sapiens
ttcctacatcatatc

SEQ ID NO: 1931496 - DNA, 15 bp, Homo sapiens
tcctacatcatatca

SEQ ID NO: 1931497 - DNA, 15 bp, Homo sapiens
cctacatcatatcaa

SEQ ID NO: 1931498 - DNA, 15 bp, Homo sapiens
ctacatcatatcaaa

SEQ ID NO: 1931499 - DNA, 15 bp, Homo sapiens
tacatcatatcaaaa

SEQ ID NO: 1931500 - DNA, 15 bp, Homo sapiens
acatcatatcaaaag

SEQ ID NO: 1931501 - DNA, 15 bp, Homo sapiens
catcatatcaaaaga

SEQ ID NO: 1931502 - DNA, 15 bp, Homo sapiens
atcatatcaaaagag

SEQ ID NO: 1931503 - DNA, 15 bp, Homo sapiens
tcatatcaaaagaga

SEQ ID NO: 1931504 - DNA, 15 bp, Homo sapiens
catatcaaaagagaa

SEQ ID NO: 1931505 - DNA, 15 bp, Homo sapiens
atatcaaaagagaat

SEQ ID NO: 1931506 - DNA, 15 bp, Homo sapiens
tatcaaaagagaata

SEQ ID NO: 1931507 - DNA, 15 bp, Homo sapiens
atcaaaagagaatac

SEQ ID NO: 1931508 - DNA, 15 bp, Homo sapiens
tcaaaagagaatact

SEQ ID NO: 1931509 - DNA, 15 bp, Homo sapiens
caaaagagaatactg

SEQ ID NO: 1931510 - DNA, 15 bp, Homo sapiens
aaaagagaatactga

SEQ ID NO: 1931511 - DNA, 15 bp, Homo sapiens
aaagagaatactgaa

SEQ ID NO: 1931512 - DNA, 15 bp, Homo sapiens
aagagaatactgaag

SEQ ID NO: 1931513 - DNA, 15 bp, Homo sapiens
agagaatactgaaga

SEQ ID NO: 1931514 - DNA, 15 bp, Homo sapiens
gagaatactgaagaa

SEQ ID NO: 1931515 - DNA, 15 bp, Homo sapiens
agaatactgaagaaa

SEQ ID NO: 1931516 - DNA, 15 bp, Homo sapiens
gaatactgaagaaac

SEQ ID NO: 1931517 - DNA, 15 bp, Homo sapiens
aatactgaagaaact

SEQ ID NO: 1931518 - DNA, 15 bp, Homo sapiens
atactgaagaaactg

SEQ ID NO: 1931519 - DNA, 15 bp, Homo sapiens
tactgaagaaactgg

SEQ ID NO: 1931520 - DNA, 15 bp, Homo sapiens
actgaagaaactgga

SEQ ID NO: 1931521 - DNA, 15 bp, Homo sapiens
ctgaagaaactggaa

SEQ ID NO: 1931522 - DNA, 15 bp, Homo sapiens
tgaagaaactggaag

SEQ ID NO: 1931523 - DNA, 15 bp, Homo sapiens
gaagaaactggaagt

SEQ ID NO: 1931524 - DNA, 15 bp, Homo sapiens
aagaaactggaagtt

SEQ ID NO: 1931525 - DNA, 15 bp, Homo sapiens
agaaactggaagttg

SEQ ID NO: 1931526 - DNA, 15 bp, Homo sapiens
gaaactggaagttgt

SEQ ID NO: 1931527 - DNA, 15 bp, Homo sapiens
aaactggaagttgtg

SEQ ID NO: 1931528 - DNA, 15 bp, Homo sapiens
aactggaagttgtgc

SEQ ID NO: 1931529 - DNA, 15 bp, Homo sapiens
actggaagttgtgca

SEQ ID NO: 1931530 - DNA, 15 bp, Homo sapiens
ctggaagttgtgcat

SEQ ID NO: 1931531 - DNA, 15 bp, Homo sapiens
tggaagttgtgcata

SEQ ID NO: 1931532 - DNA, 15 bp, Homo sapiens
ggaagttgtgcataa

SEQ ID NO: 1931533 - DNA, 15 bp, Homo sapiens
gaagttgtgcataac

SEQ ID NO: 1931534 - DNA, 15 bp, Homo sapiens
aagttgtgcataaca

SEQ ID NO: 1931535 - DNA, 15 bp, Homo sapiens
agttgtgcataacaa

SEQ ID NO: 1931536 - DNA, 15 bp, Homo sapiens
gttgtgcataacaaa

SEQ ID NO: 1931537 - DNA, 15 bp, Homo sapiens
ttgtgcataacaaaa

SEQ ID NO: 1931538 - DNA, 15 bp, Homo sapiens
tgtgcataacaaaag

SEQ ID NO: 1931539 - DNA, 15 bp, Homo sapiens
gtgcataacaaaagg

SEQ ID NO: 1931540 - DNA, 15 bp, Homo sapiens
tgcataacaaaaggc

SEQ ID NO: 1931541 - DNA, 15 bp, Homo sapiens
gcataacaaaaggcc

SEQ ID NO: 1931542 - DNA, 15 bp, Homo sapiens
cataacaaaaggcct

SEQ ID NO: 1931543 - DNA, 15 bp, Homo sapiens
ataacaaaaggccta

SEQ ID NO: 1931544 - DNA, 15 bp, Homo sapiens
taacaaaaggcctag

SEQ ID NO: 1931545 - DNA, 15 bp, Homo sapiens
aacaaaaggcctagg

SEQ ID NO: 1931546 - DNA, 15 bp, Homo sapiens
acaaaaggcctagga

SEQ ID NO: 1931547 - DNA, 15 bp, Homo sapiens
caaaaggcctaggag

SEQ ID NO: 1931548 - DNA, 15 bp, Homo sapiens
aaaaggcctaggaga

SEQ ID NO: 1931549 - DNA, 15 bp, Homo sapiens
aaaggcctaggagag

SEQ ID NO: 1931550 - DNA, 15 bp, Homo sapiens
aaggcctaggagaga

SEQ ID NO: 1931551 - DNA, 15 bp, Homo sapiens
aggcctaggagagac

SEQ ID NO: 1931552 - DNA, 15 bp, Homo sapiens
ggcctaggagagaca

SEQ ID NO: 1931553 - DNA, 15 bp, Homo sapiens
gcctaggagagacat

SEQ ID NO: 1931554 - DNA, 15 bp, Homo sapiens
cctaggagagacata

SEQ ID NO: 1931555 - DNA, 15 bp, Homo sapiens
ctaggagagacataa

SEQ ID NO: 1931556 - DNA, 15 bp, Homo sapiens
taggagagacataat

SEQ ID NO: 1931557 - DNA, 15 bp, Homo sapiens
aggagagacataatg

SEQ ID NO: 1931558 - DNA, 15 bp, Homo sapiens
ggagagacataatgg

SEQ ID NO: 1931559 - DNA, 15 bp, Homo sapiens
gagagacataatggc

SEQ ID NO: 1931560 - DNA, 15 bp, Homo sapiens
agagacataatggct

SEQ ID NO: 1931561 - DNA, 15 bp, Homo sapiens
gagacataatggctg

SEQ ID NO: 1931562 - DNA, 15 bp, Homo sapiens
agacataatggctgt

SEQ ID NO: 1931563 - DNA, 15 bp, Homo sapiens
gacataatggctgtc

SEQ ID NO: 1931564 - DNA, 15 bp, Homo sapiens
acataatggctgtct

SEQ ID NO: 1931565 - DNA, 15 bp, Homo sapiens
cataatggctgtctt

SEQ ID NO: 1931566 - DNA, 15 bp, Homo sapiens
ataatggctgtcttc

SEQ ID NO: 1931567 - DNA, 15 bp, Homo sapiens
taatggctgtcttct

SEQ ID NO: 1931568 - DNA, 15 bp, Homo sapiens
aatggctgtcttctc

SEQ ID NO: 1931569 - DNA, 15 bp, Homo sapiens
atggctgtcttctca

SEQ ID NO: 1931570 - DNA, 15 bp, Homo sapiens
tggctgtcttctcac

SEQ ID NO: 1931571 - DNA, 15 bp, Homo sapiens
ggctgtcttctcacc

SEQ ID NO: 1931572 - DNA, 15 bp, Homo sapiens
gctgtcttctcacct

SEQ ID NO: 1931573 - DNA, 15 bp, Homo sapiens
ctgtcttctcacctc

SEQ ID NO: 1931574 - DNA, 15 bp, Homo sapiens
tgtcttctcacctct

SEQ ID NO: 1931575 - DNA, 15 bp, Homo sapiens
gtcttctcacctctg

SEQ ID NO: 1931576 - DNA, 15 bp, Homo sapiens
tcttctcacctctga

SEQ ID NO: 1931577 - DNA, 15 bp, Homo sapiens
cttctcacctctgag

SEQ ID NO: 1931578 - DNA, 15 bp, Homo sapiens
ttctcacctctgagg

SEQ ID NO: 1931579 - DNA, 15 bp, Homo sapiens
tctcacctctgaggt

SEQ ID NO: 1931580 - DNA, 15 bp, Homo sapiens
ctcacctctgaggta

SEQ ID NO: 1931581 - DNA, 15 bp, Homo sapiens
tcacctctgaggtag

SEQ ID NO: 1931582 - DNA, 15 bp, Homo sapiens
cacctctgaggtaga

SEQ ID NO: 1931583 - DNA, 15 bp, Homo sapiens
acctctgaggtagag

SEQ ID NO: 1931584 - DNA, 15 bp, Homo sapiens
cctctgaggtagagt

SEQ ID NO: 1931585 - DNA, 15 bp, Homo sapiens
ctctgaggtagagtc

SEQ ID NO: 1931586 - DNA, 15 bp, Homo sapiens
tctgaggtagagtca

SEQ ID NO: 1931587 - DNA, 15 bp, Homo sapiens
ctgaggtagagtcat

SEQ ID NO: 1931588 - DNA, 15 bp, Homo sapiens
tgaggtagagtcatt

SEQ ID NO: 1931589 - DNA, 15 bp, Homo sapiens
gaggtagagtcattt

SEQ ID NO: 1931590 - DNA, 15 bp, Homo sapiens
aggtagagtcatttg

SEQ ID NO: 1931591 - DNA, 15 bp, Homo sapiens
ggtagagtcatttgt

SEQ ID NO: 1931592 - DNA, 15 bp, Homo sapiens
gtagagtcatttgta

SEQ ID NO: 1931593 - DNA, 15 bp, Homo sapiens
tagagtcatttgtaa

SEQ ID NO: 1931594 - DNA, 15 bp, Homo sapiens
agagtcatttgtaag

SEQ ID NO: 1931595 - DNA, 15 bp, Homo sapiens
gagtcatttgtaagg

SEQ ID NO: 1931596 - DNA, 15 bp, Homo sapiens
agtcatttgtaaggc

SEQ ID NO: 1931597 - DNA, 15 bp, Homo sapiens
gtcatttgtaaggct

SEQ ID NO: 1931598 - DNA, 15 bp, Homo sapiens
tcatttgtaaggctt

SEQ ID NO: 1931599 - DNA, 15 bp, Homo sapiens
catttgtaaggctta

SEQ ID NO: 1931600 - DNA, 15 bp, Homo sapiens
atttgtaaggcttaa

SEQ ID NO: 1931601 - DNA, 15 bp, Homo sapiens
tttgtaaggcttaat

SEQ ID NO: 1931602 - DNA, 15 bp, Homo sapiens
ttgtaaggcttaatc

SEQ ID NO: 1931603 - DNA, 15 bp, Homo sapiens
tgtaaggcttaatcc

SEQ ID NO: 1931604 - DNA, 15 bp, Homo sapiens
gtaaggcttaatcct

SEQ ID NO: 1931605 - DNA, 15 bp, Homo sapiens
taaggcttaatcctt

SEQ ID NO: 1931606 - DNA, 15 bp, Homo sapiens
aaggcttaatccttt

SEQ ID NO: 1931607 - DNA, 15 bp, Homo sapiens
aggcttaatcctttt

SEQ ID NO: 1931608 - DNA, 15 bp, Homo sapiens
ggcttaatccttttt

SEQ ID NO: 1931609 - DNA, 15 bp, Homo sapiens
gcttaatcctttttt

SEQ ID NO: 1931610 - DNA, 15 bp, Homo sapiens
cttaatccttttttt

SEQ ID NO: 1931611 - DNA, 15 bp, Homo sapiens
ttaatcctttttttt

SEQ ID NO: 1931612 - DNA, 15 bp, Homo sapiens
atccttttttttttt

SEQ ID NO: 1931613 - DNA, 15 bp, Homo sapiens
tttttttttttcttg

SEQ ID NO: 1931614 - DNA, 15 bp, Homo sapiens
tttttttcttgagac

SEQ ID NO: 1931615 - DNA, 15 bp, Homo sapiens
ttttttcttgagacg

SEQ ID NO: 1931616 - DNA, 15 bp, Homo sapiens
tttttcttgagacgg

SEQ ID NO: 1931617 - DNA, 15 bp, Homo sapiens
ttttcttgagacgga

SEQ ID NO: 1931618 - DNA, 15 bp, Homo sapiens
tttcttgagacggag

SEQ ID NO: 1931619 - DNA, 15 bp, Homo sapiens
ttcttgagacggagt

SEQ ID NO: 1931620 - DNA, 15 bp, Homo sapiens
cagtggtgcgatctc

SEQ ID NO: 1931621 - DNA, 15 bp, Homo sapiens
agtggtgcgatctcg

SEQ ID NO: 1931622 - DNA, 15 bp, Homo sapiens
gtggtgcgatctcgg

SEQ ID NO: 1931623 - DNA, 15 bp, Homo sapiens
tggtgcgatctcggc

SEQ ID NO: 1931624 - DNA, 15 bp, Homo sapiens
ggtgcgatctcggct

SEQ ID NO: 1931625 - DNA, 15 bp, Homo sapiens
gtgcgatctcggctc

SEQ ID NO: 1931626 - DNA, 15 bp, Homo sapiens
tgcgatctcggctca

SEQ ID NO: 1931627 - DNA, 15 bp, Homo sapiens
gttcacgccattctg

SEQ ID NO: 1931628 - DNA, 15 bp, Homo sapiens
ttcacgccattctgc

SEQ ID NO: 1931629 - DNA, 15 bp, Homo sapiens
tcacgccattctgcc

SEQ ID NO: 1931630 - DNA, 15 bp, Homo sapiens
cacgccattctgcct

SEQ ID NO: 1931631 - DNA, 15 bp, Homo sapiens
acgccattctgcctc

SEQ ID NO: 1931632 - DNA, 15 bp, Homo sapiens
cgccattctgcctca

SEQ ID NO: 1931633 - DNA, 15 bp, Homo sapiens
gccattctgcctcat

SEQ ID NO: 1931634 - DNA, 15 bp, Homo sapiens
ccattctgcctcatg

SEQ ID NO: 1931635 - DNA, 15 bp, Homo sapiens
cattctgcctcatgt

SEQ ID NO: 1931636 - DNA, 15 bp, Homo sapiens
attctgcctcatgta

SEQ ID NO: 1931637 - DNA, 15 bp, Homo sapiens
ttctgcctcatgtaa

SEQ ID NO: 1931638 - DNA, 15 bp, Homo sapiens
tctgcctcatgtaag

SEQ ID NO: 1931639 - DNA, 15 bp, Homo sapiens
ctgcctcatgtaagg

SEQ ID NO: 1931640 - DNA, 15 bp, Homo sapiens
tgcctcatgtaaggc

SEQ ID NO: 1931641 - DNA, 15 bp, Homo sapiens
gcctcatgtaaggct

SEQ ID NO: 1931642 - DNA, 15 bp, Homo sapiens
cctcatgtaaggctt

SEQ ID NO: 1931643 - DNA, 15 bp, Homo sapiens
ctcatgtaaggcttt

SEQ ID NO: 1931644 - DNA, 15 bp, Homo sapiens
tcatgtaaggcttta

SEQ ID NO: 1931645 - DNA, 15 bp, Homo sapiens
catgtaaggctttat

SEQ ID NO: 1931646 - DNA, 15 bp, Homo sapiens
atgtaaggctttatt

SEQ ID NO: 1931647 - DNA, 15 bp, Homo sapiens
tgtaaggctttattc

SEQ ID NO: 1931648 - DNA, 15 bp, Homo sapiens
gtaaggctttattct

SEQ ID NO: 1931649 - DNA, 15 bp, Homo sapiens
taaggctttattctt

SEQ ID NO: 1931650 - DNA, 15 bp, Homo sapiens
aaggctttattctta

SEQ ID NO: 1931651 - DNA, 15 bp, Homo sapiens
aggctttattcttaa

SEQ ID NO: 1931652 - DNA, 15 bp, Homo sapiens
ggctttattcttaaa

SEQ ID NO: 1931653 - DNA, 15 bp, Homo sapiens
gctttattcttaaaa

SEQ ID NO: 1931654 - DNA, 15 bp, Homo sapiens
ctttattcttaaaaa

SEQ ID NO: 1931655 - DNA, 15 bp, Homo sapiens
tttattcttaaaaat

SEQ ID NO: 1931656 - DNA, 15 bp, Homo sapiens
ttattcttaaaaata

SEQ ID NO: 1931657 - DNA, 15 bp, Homo sapiens
tattcttaaaaatat

SEQ ID NO: 1931658 - DNA, 15 bp, Homo sapiens
attcttaaaaatatc

SEQ ID NO: 1931659 - DNA, 15 bp, Homo sapiens
ttcttaaaaatatct

SEQ ID NO: 1931660 - DNA, 15 bp, Homo sapiens
tcttaaaaatatctt

SEQ ID NO: 1931661 - DNA, 15 bp, Homo sapiens
cttaaaaatatcttt

SEQ ID NO: 1931662 - DNA, 15 bp, Homo sapiens
ttaaaaatatcttta

SEQ ID NO: 1931663 - DNA, 15 bp, Homo sapiens
taaaaatatctttat

SEQ ID NO: 1931664 - DNA, 15 bp, Homo sapiens
aaaaatatctttatc

SEQ ID NO: 1931665 - DNA, 15 bp, Homo sapiens
aaaatatctttatcc

SEQ ID NO: 1931666 - DNA, 15 bp, Homo sapiens
aaatatctttatcct

SEQ ID NO: 1931667 - DNA, 15 bp, Homo sapiens
aatatctttatccta

SEQ ID NO: 1931668 - DNA, 15 bp, Homo sapiens
atatctttatcctac

SEQ ID NO: 1931669 - DNA, 15 bp, Homo sapiens
tatctttatcctaca

SEQ ID NO: 1931670 - DNA, 15 bp, Homo sapiens
atctttatcctacat

SEQ ID NO: 1931671 - DNA, 15 bp, Homo sapiens
tctttatcctacata

SEQ ID NO: 1931672 - DNA, 15 bp, Homo sapiens
ctttatcctacataa

SEQ ID NO: 1931673 - DNA, 15 bp, Homo sapiens
tttatcctacataac

SEQ ID NO: 1931674 - DNA, 15 bp, Homo sapiens
ttatcctacataacg

SEQ ID NO: 1931675 - DNA, 15 bp, Homo sapiens
tatcctacataacgc

SEQ ID NO: 1931676 - DNA, 15 bp, Homo sapiens
atcctacataacgcc

SEQ ID NO: 1931677 - DNA, 15 bp, Homo sapiens
tcctacataacgcca

SEQ ID NO: 1931678 - DNA, 15 bp, Homo sapiens
cctacataacgccag

SEQ ID NO: 1931679 - DNA, 15 bp, Homo sapiens
ctacataacgccaga

SEQ ID NO: 1931680 - DNA, 15 bp, Homo sapiens
tacataacgccagag

SEQ ID NO: 1931681 - DNA, 15 bp, Homo sapiens
acataacgccagagg

SEQ ID NO: 1931682 - DNA, 15 bp, Homo sapiens
cataacgccagagga

SEQ ID NO: 1931683 - DNA, 15 bp, Homo sapiens
ataacgccagaggac

SEQ ID NO: 1931684 - DNA, 15 bp, Homo sapiens
taacgccagaggaca

SEQ ID NO: 1931685 - DNA, 15 bp, Homo sapiens
aacgccagaggacag

SEQ ID NO: 1931686 - DNA, 15 bp, Homo sapiens
acgccagaggacaga

SEQ ID NO: 1931687 - DNA, 15 bp, Homo sapiens
cgccagaggacagaa

SEQ ID NO: 1931688 - DNA, 15 bp, Homo sapiens
gccagaggacagaat

SEQ ID NO: 1931689 - DNA, 15 bp, Homo sapiens
ccagaggacagaata

SEQ ID NO: 1931690 - DNA, 15 bp, Homo sapiens
cagaggacagaataa

SEQ ID NO: 1931691 - DNA, 15 bp, Homo sapiens
agaggacagaataag

SEQ ID NO: 1931692 - DNA, 15 bp, Homo sapiens
gaggacagaataagg

SEQ ID NO: 1931693 - DNA, 15 bp, Homo sapiens
aggacagaataagga

SEQ ID NO: 1931694 - DNA, 15 bp, Homo sapiens
ggacagaataaggac

SEQ ID NO: 1931695 - DNA, 15 bp, Homo sapiens
gacagaataaggacc

SEQ ID NO: 1931696 - DNA, 15 bp, Homo sapiens
acagaataaggacca

SEQ ID NO: 1931697 - DNA, 15 bp, Homo sapiens
cagaataaggaccat

SEQ ID NO: 1931698 - DNA, 15 bp, Homo sapiens
agaataaggaccatt

SEQ ID NO: 1931699 - DNA, 15 bp, Homo sapiens
gaataaggaccatta

SEQ ID NO: 1931700 - DNA, 15 bp, Homo sapiens
aataaggaccattac

SEQ ID NO: 1931701 - DNA, 15 bp, Homo sapiens
ataaggaccattaca

SEQ ID NO: 1931702 - DNA, 15 bp, Homo sapiens
taaggaccattacat

SEQ ID NO: 1931703 - DNA, 15 bp, Homo sapiens
aaggaccattacata

SEQ ID NO: 1931704 - DNA, 15 bp, Homo sapiens
aggaccattacatag

SEQ ID NO: 1931705 - DNA, 15 bp, Homo sapiens
ggaccattacatagc

SEQ ID NO: 1931706 - DNA, 15 bp, Homo sapiens
gaccattacatagct

SEQ ID NO: 1931707 - DNA, 15 bp, Homo sapiens
accattacatagctg

SEQ ID NO: 1931708 - DNA, 15 bp, Homo sapiens
ccattacatagctgt

SEQ ID NO: 1931709 - DNA, 15 bp, Homo sapiens
cattacatagctgtt

SEQ ID NO: 1931710 - DNA, 15 bp, Homo sapiens
attacatagctgtta

SEQ ID NO: 1931711 - DNA, 15 bp, Homo sapiens
ttacatagctgttat

SEQ ID NO: 1931712 - DNA, 15 bp, Homo sapiens
tacatagctgttatg

SEQ ID NO: 1931713 - DNA, 15 bp, Homo sapiens
acatagctgttatgg

SEQ ID NO: 1931714 - DNA, 15 bp, Homo sapiens
catagctgttatggc

SEQ ID NO: 1931715 - DNA, 15 bp, Homo sapiens
atagctgttatggca

SEQ ID NO: 1931716 - DNA, 15 bp, Homo sapiens
tagctgttatggcaa

SEQ ID NO: 1931717 - DNA, 15 bp, Homo sapiens
agctgttatggcaag

SEQ ID NO: 1931718 - DNA, 15 bp, Homo sapiens
gctgttatggcaagg

SEQ ID NO: 1931719 - DNA, 15 bp, Homo sapiens
ctgttatggcaaggc

SEQ ID NO: 1931720 - DNA, 15 bp, Homo sapiens
tgttatggcaaggca

SEQ ID NO: 1931721 - DNA, 15 bp, Homo sapiens
gttatggcaaggcaa

SEQ ID NO: 1931722 - DNA, 15 bp, Homo sapiens
ttatggcaaggcaaa

SEQ ID NO: 1931723 - DNA, 15 bp, Homo sapiens
tatggcaaggcaaat

SEQ ID NO: 1931724 - DNA, 15 bp, Homo sapiens
atggcaaggcaaatt

SEQ ID NO: 1931725 - DNA, 15 bp, Homo sapiens
tggcaaggcaaattt

SEQ ID NO: 1931726 - DNA, 15 bp, Homo sapiens
ggcaaggcaaatttc

SEQ ID NO: 1931727 - DNA, 15 bp, Homo sapiens
gcaaggcaaatttca

SEQ ID NO: 1931728 - DNA, 15 bp, Homo sapiens
caaggcaaatttcaa

SEQ ID NO: 1931729 - DNA, 15 bp, Homo sapiens
aaggcaaatttcaat

SEQ ID NO: 1931730 - DNA, 15 bp, Homo sapiens
aggcaaatttcaatc

SEQ ID NO: 1931731 - DNA, 15 bp, Homo sapiens
ggcaaatttcaatct

SEQ ID NO: 1931732 - DNA, 15 bp, Homo sapiens
gcaaatttcaatcta

SEQ ID NO: 1931733 - DNA, 15 bp, Homo sapiens
caaatttcaatctac

SEQ ID NO: 1931734 - DNA, 15 bp, Homo sapiens
aaatttcaatctaca

SEQ ID NO: 1931735 - DNA, 15 bp, Homo sapiens
aatttcaatctacag

SEQ ID NO: 1931736 - DNA, 15 bp, Homo sapiens
atttcaatctacagt

SEQ ID NO: 1931737 - DNA, 15 bp, Homo sapiens
tttcaatctacagta

SEQ ID NO: 1931738 - DNA, 15 bp, Homo sapiens
ttcaatctacagtaa

SEQ ID NO: 1931739 - DNA, 15 bp, Homo sapiens
tcaatctacagtaat

SEQ ID NO: 1931740 - DNA, 15 bp, Homo sapiens
caatctacagtaata

SEQ ID NO: 1931741 - DNA, 15 bp, Homo sapiens
aatctacagtaataa

SEQ ID NO: 1931742 - DNA, 15 bp, Homo sapiens
atctacagtaataaa

SEQ ID NO: 1931743 - DNA, 15 bp, Homo sapiens
tctacagtaataaag

SEQ ID NO: 1931744 - DNA, 15 bp, Homo sapiens
ctacagtaataaagt

SEQ ID NO: 1931745 - DNA, 15 bp, Homo sapiens
tacagtaataaagta

SEQ ID NO: 1931746 - DNA, 15 bp, Homo sapiens
acagtaataaagtac

SEQ ID NO: 1931747 - DNA, 15 bp, Homo sapiens
cagtaataaagtacc

SEQ ID NO: 1931748 - DNA, 15 bp, Homo sapiens
agtaataaagtacca

SEQ ID NO: 1931749 - DNA, 15 bp, Homo sapiens
gtaataaagtaccag

SEQ ID NO: 1931750 - DNA, 15 bp, Homo sapiens
taataaagtaccagt

SEQ ID NO: 1931751 - DNA, 15 bp, Homo sapiens
aataaagtaccagtt

SEQ ID NO: 1931752 - DNA, 15 bp, Homo sapiens
ataaagtaccagttt

SEQ ID NO: 1931753 - DNA, 15 bp, Homo sapiens
taaagtaccagttta

SEQ ID NO: 1931754 - DNA, 15 bp, Homo sapiens
aaagtaccagtttat

SEQ ID NO: 1931755 - DNA, 15 bp, Homo sapiens
aagtaccagtttata

SEQ ID NO: 1931756 - DNA, 15 bp, Homo sapiens
agtaccagtttataa

SEQ ID NO: 1931757 - DNA, 15 bp, Homo sapiens
gtaccagtttataat

SEQ ID NO: 1931758 - DNA, 15 bp, Homo sapiens
taccagtttataatt

SEQ ID NO: 1931759 - DNA, 15 bp, Homo sapiens
accagtttataattt

SEQ ID NO: 1931760 - DNA, 15 bp, Homo sapiens
ccagtttataatttt

SEQ ID NO: 1931761 - DNA, 15 bp, Homo sapiens
cagtttataattttt

SEQ ID NO: 1931762 - DNA, 15 bp, Homo sapiens
agtttataatttttc

SEQ ID NO: 1931763 - DNA, 15 bp, Homo sapiens
gtttataatttttca

SEQ ID NO: 1931764 - DNA, 15 bp, Homo sapiens
tttataatttttcaa

SEQ ID NO: 1931765 - DNA, 15 bp, Homo sapiens
ttataatttttcaaa

SEQ ID NO: 1931766 - DNA, 15 bp, Homo sapiens
tataatttttcaaaa

SEQ ID NO: 1931767 - DNA, 15 bp, Homo sapiens
ataatttttcaaaag

SEQ ID NO: 1931768 - DNA, 15 bp, Homo sapiens
taatttttcaaaagt

SEQ ID NO: 1931769 - DNA, 15 bp, Homo sapiens
aatttttcaaaagtt

SEQ ID NO: 1931770 - DNA, 15 bp, Homo sapiens
atttttcaaaagttc

SEQ ID NO: 1931771 - DNA, 15 bp, Homo sapiens
tttttcaaaagttcc

SEQ ID NO: 1931772 - DNA, 15 bp, Homo sapiens
ttttcaaaagttcca

SEQ ID NO: 1931773 - DNA, 15 bp, Homo sapiens
tttcaaaagttccag

SEQ ID NO: 1931774 - DNA, 15 bp, Homo sapiens
ttcaaaagttccaga

SEQ ID NO: 1931775 - DNA, 15 bp, Homo sapiens
tcaaaagttccagaa

SEQ ID NO: 1931776 - DNA, 15 bp, Homo sapiens
caaaagttccagaaa

SEQ ID NO: 1931777 - DNA, 15 bp, Homo sapiens
aaaagttccagaaat

SEQ ID NO: 1931778 - DNA, 15 bp, Homo sapiens
aaagttccagaaatc

SEQ ID NO: 1931779 - DNA, 15 bp, Homo sapiens
aagttccagaaatca

SEQ ID NO: 1931780 - DNA, 15 bp, Homo sapiens
agttccagaaatcat

SEQ ID NO: 1931781 - DNA, 15 bp, Homo sapiens
gttccagaaatcatt

SEQ ID NO: 1931782 - DNA, 15 bp, Homo sapiens
ttccagaaatcatta

SEQ ID NO: 1931783 - DNA, 15 bp, Homo sapiens
tccagaaatcattag

SEQ ID NO: 1931784 - DNA, 15 bp, Homo sapiens
ccagaaatcattagg

SEQ ID NO: 1931785 - DNA, 15 bp, Homo sapiens
cagaaatcattagga

SEQ ID NO: 1931786 - DNA, 15 bp, Homo sapiens
agaaatcattaggag

SEQ ID NO: 1931787 - DNA, 15 bp, Homo sapiens
gaaatcattaggagt

SEQ ID NO: 1931788 - DNA, 15 bp, Homo sapiens
aaatcattaggagtt

SEQ ID NO: 1931789 - DNA, 15 bp, Homo sapiens
aatcattaggagtta

SEQ ID NO: 1931790 - DNA, 15 bp, Homo sapiens
atcattaggagttat

SEQ ID NO: 1931791 - DNA, 15 bp, Homo sapiens
tcattaggagttata

SEQ ID NO: 1931792 - DNA, 15 bp, Homo sapiens
cattaggagttatat

SEQ ID NO: 1931793 - DNA, 15 bp, Homo sapiens
attaggagttatatc

SEQ ID NO: 1931794 - DNA, 15 bp, Homo sapiens
ttaggagttatatct

SEQ ID NO: 1931795 - DNA, 15 bp, Homo sapiens
taggagttatatctt

SEQ ID NO: 1931796 - DNA, 15 bp, Homo sapiens
aggagttatatcttt

SEQ ID NO: 1931797 - DNA, 15 bp, Homo sapiens
ggagttatatctttc

SEQ ID NO: 1931798 - DNA, 15 bp, Homo sapiens
gagttatatctttcc

SEQ ID NO: 1931799 - DNA, 15 bp, Homo sapiens
agttatatctttcca

SEQ ID NO: 1931800 - DNA, 15 bp, Homo sapiens
gttatatctttccat

SEQ ID NO: 1931801 - DNA, 15 bp, Homo sapiens
ttatatctttccatc

SEQ ID NO: 1931802 - DNA, 15 bp, Homo sapiens
tatatctttccatca

SEQ ID NO: 1931803 - DNA, 15 bp, Homo sapiens
atatctttccatcac

SEQ ID NO: 1931804 - DNA, 15 bp, Homo sapiens
tatctttccatcact

SEQ ID NO: 1931805 - DNA, 15 bp, Homo sapiens
atctttccatcactg

SEQ ID NO: 1931806 - DNA, 15 bp, Homo sapiens
tctttccatcactgg

SEQ ID NO: 1931807 - DNA, 15 bp, Homo sapiens
ctttccatcactgga

SEQ ID NO: 1931808 - DNA, 15 bp, Homo sapiens
tttccatcactggaa

SEQ ID NO: 1931809 - DNA, 15 bp, Homo sapiens
ttccatcactggaag

SEQ ID NO: 1931810 - DNA, 15 bp, Homo sapiens
tccatcactggaagt

SEQ ID NO: 1931811 - DNA, 15 bp, Homo sapiens
ccatcactggaagtg

SEQ ID NO: 1931812 - DNA, 15 bp, Homo sapiens
catcactggaagtgt

SEQ ID NO: 1931813 - DNA, 15 bp, Homo sapiens
atcactggaagtgtc

SEQ ID NO: 1931814 - DNA, 15 bp, Homo sapiens
tcactggaagtgtcc

SEQ ID NO: 1931815 - DNA, 15 bp, Homo sapiens
cactggaagtgtcca

SEQ ID NO: 1931816 - DNA, 15 bp, Homo sapiens
actggaagtgtccaa

SEQ ID NO: 1931817 - DNA, 15 bp, Homo sapiens
ctggaagtgtccaag

SEQ ID NO: 1931818 - DNA, 15 bp, Homo sapiens
tggaagtgtccaaga

SEQ ID NO: 1931819 - DNA, 15 bp, Homo sapiens
ggaagtgtccaagaa

SEQ ID NO: 1931820 - DNA, 15 bp, Homo sapiens
gaagtgtccaagaaa

SEQ ID NO: 1931821 - DNA, 15 bp, Homo sapiens
aagtgtccaagaaaa

SEQ ID NO: 1931822 - DNA, 15 bp, Homo sapiens
agtgtccaagaaaag

SEQ ID NO: 1931823 - DNA, 15 bp, Homo sapiens
gtgtccaagaaaagg

SEQ ID NO: 1931824 - DNA, 15 bp, Homo sapiens
tgtccaagaaaaggc

SEQ ID NO: 1931825 - DNA, 15 bp, Homo sapiens
gtccaagaaaaggca

SEQ ID NO: 1931826 - DNA, 15 bp, Homo sapiens
tccaagaaaaggcaa

SEQ ID NO: 1931827 - DNA, 15 bp, Homo sapiens
ccaagaaaaggcaaa

SEQ ID NO: 1931828 - DNA, 15 bp, Homo sapiens
caagaaaaggcaaaa

SEQ ID NO: 1931829 - DNA, 15 bp, Homo sapiens
aagaaaaggcaaaaa

SEQ ID NO: 1931830 - DNA, 15 bp, Homo sapiens
agaaaaggcaaaaaa

SEQ ID NO: 1931831 - DNA, 15 bp, Homo sapiens
gaaaaggcaaaaaaa

SEQ ID NO: 1931832 - DNA, 15 bp, Homo sapiens
aaaaggcaaaaaaaa

SEQ ID NO: 1931833 - DNA, 15 bp, Homo sapiens
aaaggcaaaaaaaaa

SEQ ID NO: 1931834 - DNA, 15 bp, Homo sapiens
aaggcaaaaaaaaaa

SEQ ID NO: 1931835 - DNA, 15 bp, Homo sapiens
aggcaaaaaaaaaaa

SEQ ID NO: 1931836 - DNA, 15 bp, Homo sapiens
ggcaaaaaaaaaaaa

SEQ ID NO: 1931837 - DNA, 15 bp, Homo sapiens
aaaaaaaaaaagtat

SEQ ID NO: 1931838 - DNA, 15 bp, Homo sapiens
aaaaaaaaaagtatt

SEQ ID NO: 1931839 - DNA, 15 bp, Homo sapiens
aaaaaaaaagtatta

SEQ ID NO: 1931840 - DNA, 15 bp, Homo sapiens
aaaaaaaagtattat

SEQ ID NO: 1931841 - DNA, 15 bp, Homo sapiens
aaaaaaagtattatt

SEQ ID NO: 1931842 - DNA, 15 bp, Homo sapiens
aaaaaagtattatta

SEQ ID NO: 1931843 - DNA, 15 bp, Homo sapiens
aaaaagtattattag

SEQ ID NO: 1931844 - DNA, 15 bp, Homo sapiens
aaaagtattattaga

SEQ ID NO: 1931845 - DNA, 15 bp, Homo sapiens
aaagtattattagaa

SEQ ID NO: 1931846 - DNA, 15 bp, Homo sapiens
aagtattattagaaa

SEQ ID NO: 1931847 - DNA, 15 bp, Homo sapiens
agtattattagaaat

SEQ ID NO: 1931848 - DNA, 15 bp, Homo sapiens
gtattattagaaata

SEQ ID NO: 1931849 - DNA, 15 bp, Homo sapiens
tattattagaaatat

SEQ ID NO: 1931850 - DNA, 15 bp, Homo sapiens
attattagaaatatt

SEQ ID NO: 1931851 - DNA, 15 bp, Homo sapiens
ttattagaaatattc

SEQ ID NO: 1931852 - DNA, 15 bp, Homo sapiens
tattagaaatattcg

SEQ ID NO: 1931853 - DNA, 15 bp, Homo sapiens
attagaaatattcga

SEQ ID NO: 1931854 - DNA, 15 bp, Homo sapiens
ttagaaatattcgat

SEQ ID NO: 1931855 - DNA, 15 bp, Homo sapiens
tagaaatattcgatg

SEQ ID NO: 1931856 - DNA, 15 bp, Homo sapiens
agaaatattcgatga

SEQ ID NO: 1931857 - DNA, 15 bp, Homo sapiens
gaaatattcgatgat

SEQ ID NO: 1931858 - DNA, 15 bp, Homo sapiens
aaatattcgatgatg

SEQ ID NO: 1931859 - DNA, 15 bp, Homo sapiens
aatattcgatgatgc

SEQ ID NO: 1931860 - DNA, 15 bp, Homo sapiens
atattcgatgatgct

SEQ ID NO: 1931861 - DNA, 15 bp, Homo sapiens
tattcgatgatgctt

SEQ ID NO: 1931862 - DNA, 15 bp, Homo sapiens
attcgatgatgcttt

SEQ ID NO: 1931863 - DNA, 15 bp, Homo sapiens
ttcgatgatgctttt

SEQ ID NO: 1931864 - DNA, 15 bp, Homo sapiens
tcgatgatgcttttc

SEQ ID NO: 1931865 - DNA, 15 bp, Homo sapiens
cgatgatgcttttca

SEQ ID NO: 1931866 - DNA, 15 bp, Homo sapiens
gatgatgcttttcag

SEQ ID NO: 1931867 - DNA, 15 bp, Homo sapiens
atgatgcttttcagt

SEQ ID NO: 1931868 - DNA, 15 bp, Homo sapiens
tgatgcttttcagtc

SEQ ID NO: 1931869 - DNA, 15 bp, Homo sapiens
gatgcttttcagtct

SEQ ID NO: 1931870 - DNA, 15 bp, Homo sapiens
atgcttttcagtctg

SEQ ID NO: 1931871 - DNA, 15 bp, Homo sapiens
tgcttttcagtctgc

SEQ ID NO: 1931872 - DNA, 15 bp, Homo sapiens
gcttttcagtctgca

SEQ ID NO: 1931873 - DNA, 15 bp, Homo sapiens
cttttcagtctgcag

SEQ ID NO: 1931874 - DNA, 15 bp, Homo sapiens
ttttcagtctgcaga

SEQ ID NO: 1931875 - DNA, 15 bp, Homo sapiens
tttcagtctgcagag

SEQ ID NO: 1931876 - DNA, 15 bp, Homo sapiens
ttcagtctgcagagg

SEQ ID NO: 1931877 - DNA, 15 bp, Homo sapiens
tcagtctgcagagga

SEQ ID NO: 1931878 - DNA, 15 bp, Homo sapiens
cagtctgcagaggat

SEQ ID NO: 1931879 - DNA, 15 bp, Homo sapiens
agtctgcagaggata

SEQ ID NO: 1931880 - DNA, 15 bp, Homo sapiens
gtctgcagaggatag

SEQ ID NO: 1931881 - DNA, 15 bp, Homo sapiens
tctgcagaggatagg

SEQ ID NO: 1931882 - DNA, 15 bp, Homo sapiens
ctgcagaggatagga

SEQ ID NO: 1931883 - DNA, 15 bp, Homo sapiens
tgcagaggataggat

SEQ ID NO: 1931884 - DNA, 15 bp, Homo sapiens
gcagaggataggatt

SEQ ID NO: 1931885 - DNA, 15 bp, Homo sapiens
cagaggataggattt

SEQ ID NO: 1931886 - DNA, 15 bp, Homo sapiens
agaggataggatttc

SEQ ID NO: 1931887 - DNA, 15 bp, Homo sapiens
gaggataggatttcc

SEQ ID NO: 1931888 - DNA, 15 bp, Homo sapiens
aggataggatttcct

SEQ ID NO: 1931889 - DNA, 15 bp, Homo sapiens
ggataggatttcctt

SEQ ID NO: 1931890 - DNA, 15 bp, Homo sapiens
gataggatttccttc

SEQ ID NO: 1931891 - DNA, 15 bp, Homo sapiens
ataggatttccttct

SEQ ID NO: 1931892 - DNA, 15 bp, Homo sapiens
taggatttccttctg

SEQ ID NO: 1931893 - DNA, 15 bp, Homo sapiens
aggatttccttctgc

SEQ ID NO: 1931894 - DNA, 15 bp, Homo sapiens
ggatttccttctgcc

SEQ ID NO: 1931895 - DNA, 15 bp, Homo sapiens
gatttccttctgcct

SEQ ID NO: 1931896 - DNA, 15 bp, Homo sapiens
atttccttctgcctt

SEQ ID NO: 1931897 - DNA, 15 bp, Homo sapiens
tttccttctgcctta

SEQ ID NO: 1931898 - DNA, 15 bp, Homo sapiens
ttccttctgccttat

SEQ ID NO: 1931899 - DNA, 15 bp, Homo sapiens
tccttctgccttata

SEQ ID NO: 1931900 - DNA, 15 bp, Homo sapiens
ccttctgccttataa

SEQ ID NO: 1931901 - DNA, 15 bp, Homo sapiens
cttctgccttataac

SEQ ID NO: 1931902 - DNA, 15 bp, Homo sapiens
ttctgccttataact

SEQ ID NO: 1931903 - DNA, 15 bp, Homo sapiens
tctgccttataacta

SEQ ID NO: 1931904 - DNA, 15 bp, Homo sapiens
ctgccttataactat

SEQ ID NO: 1931905 - DNA, 15 bp, Homo sapiens
tgccttataactatt

SEQ ID NO: 1931906 - DNA, 15 bp, Homo sapiens
gccttataactattg

SEQ ID NO: 1931907 - DNA, 15 bp, Homo sapiens
ccttataactattgc

SEQ ID NO: 1931908 - DNA, 15 bp, Homo sapiens
cttataactattgca

SEQ ID NO: 1931909 - DNA, 15 bp, Homo sapiens
ttataactattgcac

SEQ ID NO: 1931910 - DNA, 15 bp, Homo sapiens
tataactattgcaca

SEQ ID NO: 1931911 - DNA, 15 bp, Homo sapiens
ataactattgcacat

SEQ ID NO: 1931912 - DNA, 15 bp, Homo sapiens
taactattgcacatc

SEQ ID NO: 1931913 - DNA, 15 bp, Homo sapiens
aactattgcacatct

SEQ ID NO: 1931914 - DNA, 15 bp, Homo sapiens
actattgcacatcta

SEQ ID NO: 1931915 - DNA, 15 bp, Homo sapiens
ctattgcacatctag

SEQ ID NO: 1931916 - DNA, 15 bp, Homo sapiens
tattgcacatctagt

SEQ ID NO: 1931917 - DNA, 15 bp, Homo sapiens
attgcacatctagtt

SEQ ID NO: 1931918 - DNA, 15 bp, Homo sapiens
ttgcacatctagtta

SEQ ID NO: 1931919 - DNA, 15 bp, Homo sapiens
tgcacatctagttat

SEQ ID NO: 1931920 - DNA, 15 bp, Homo sapiens
gcacatctagttatt

SEQ ID NO: 1931921 - DNA, 15 bp, Homo sapiens
cacatctagttattc

SEQ ID NO: 1931922 - DNA, 15 bp, Homo sapiens
acatctagttattcc

SEQ ID NO: 1931923 - DNA, 15 bp, Homo sapiens
catctagttattccc

SEQ ID NO: 1931924 - DNA, 15 bp, Homo sapiens
atctagttattccct

SEQ ID NO: 1931925 - DNA, 15 bp, Homo sapiens
tctagttattccctg

SEQ ID NO: 1931926 - DNA, 15 bp, Homo sapiens
ctagttattccctgt

SEQ ID NO: 1931927 - DNA, 15 bp, Homo sapiens
tagttattccctgta

SEQ ID NO: 1931928 - DNA, 15 bp, Homo sapiens
agttattccctgtat

SEQ ID NO: 1931929 - DNA, 15 bp, Homo sapiens
gttattccctgtatt

SEQ ID NO: 1931930 - DNA, 15 bp, Homo sapiens
ttattccctgtattt

SEQ ID NO: 1931931 - DNA, 15 bp, Homo sapiens
tattccctgtattta

SEQ ID NO: 1931932 - DNA, 15 bp, Homo sapiens
attccctgtatttac

SEQ ID NO: 1931933 - DNA, 15 bp, Homo sapiens
ttccctgtatttact

SEQ ID NO: 1931934 - DNA, 15 bp, Homo sapiens
tccctgtatttactt

SEQ ID NO: 1931935 - DNA, 15 bp, Homo sapiens
ccctgtatttacttc

SEQ ID NO: 1931936 - DNA, 15 bp, Homo sapiens
cctgtatttacttct

SEQ ID NO: 1931937 - DNA, 15 bp, Homo sapiens
ctgtatttacttcta

SEQ ID NO: 1931938 - DNA, 15 bp, Homo sapiens
tgtatttacttctac

SEQ ID NO: 1931939 - DNA, 15 bp, Homo sapiens
gtatttacttctacc

SEQ ID NO: 1931940 - DNA, 15 bp, Homo sapiens
tatttacttctacct

SEQ ID NO: 1931941 - DNA, 15 bp, Homo sapiens
atttacttctacctt

SEQ ID NO: 1931942 - DNA, 15 bp, Homo sapiens
tttacttctaccttg

SEQ ID NO: 1931943 - DNA, 15 bp, Homo sapiens
ttacttctaccttga

SEQ ID NO: 1931944 - DNA, 15 bp, Homo sapiens
tacttctaccttgaa

SEQ ID NO: 1931945 - DNA, 15 bp, Homo sapiens
acttctaccttgaat

SEQ ID NO: 1931946 - DNA, 15 bp, Homo sapiens
cttctaccttgaatt

SEQ ID NO: 1931947 - DNA, 15 bp, Homo sapiens
ttctaccttgaattt

SEQ ID NO: 1931948 - DNA, 15 bp, Homo sapiens
tctaccttgaatttt

SEQ ID NO: 1931949 - DNA, 15 bp, Homo sapiens
ctaccttgaatttta

SEQ ID NO: 1931950 - DNA, 15 bp, Homo sapiens
taccttgaattttag

SEQ ID NO: 1931951 - DNA, 15 bp, Homo sapiens
accttgaattttagc

SEQ ID NO: 1931952 - DNA, 15 bp, Homo sapiens
ccttgaattttagct

SEQ ID NO: 1931953 - DNA, 15 bp, Homo sapiens
cttgaattttagctt

SEQ ID NO: 1931954 - DNA, 15 bp, Homo sapiens
ttgaattttagcttg

SEQ ID NO: 1931955 - DNA, 15 bp, Homo sapiens
tgaattttagcttga

SEQ ID NO: 1931956 - DNA, 15 bp, Homo sapiens
gaattttagcttgaa

SEQ ID NO: 1931957 - DNA, 15 bp, Homo sapiens
aattttagcttgaat

SEQ ID NO: 1931958 - DNA, 15 bp, Homo sapiens
attttagcttgaatt

SEQ ID NO: 1931959 - DNA, 15 bp, Homo sapiens
ttttagcttgaattt

SEQ ID NO: 1931960 - DNA, 15 bp, Homo sapiens
tttagcttgaatttt

SEQ ID NO: 1931961 - DNA, 15 bp, Homo sapiens
ttagcttgaattttt

SEQ ID NO: 1931962 - DNA, 15 bp, Homo sapiens
tagcttgaattttta

SEQ ID NO: 1931963 - DNA, 15 bp, Homo sapiens
agcttgaatttttag

SEQ ID NO: 1931964 - DNA, 15 bp, Homo sapiens
gcttgaatttttagc

SEQ ID NO: 1931965 - DNA, 15 bp, Homo sapiens
cttgaatttttagca

SEQ ID NO: 1931966 - DNA, 15 bp, Homo sapiens
ttgaatttttagcaa

SEQ ID NO: 1931967 - DNA, 15 bp, Homo sapiens
tgaatttttagcaag

SEQ ID NO: 1931968 - DNA, 15 bp, Homo sapiens
gaatttttagcaagc

SEQ ID NO: 1931969 - DNA, 15 bp, Homo sapiens
aatttttagcaagcc

SEQ ID NO: 1931970 - DNA, 15 bp, Homo sapiens
atttttagcaagcca

SEQ ID NO: 1931971 - DNA, 15 bp, Homo sapiens
tttttagcaagccac

SEQ ID NO: 1931972 - DNA, 15 bp, Homo sapiens
ttttagcaagccact

SEQ ID NO: 1931973 - DNA, 15 bp, Homo sapiens
tttagcaagccacta

SEQ ID NO: 1931974 - DNA, 15 bp, Homo sapiens
ttagcaagccactag

SEQ ID NO: 1931975 - DNA, 15 bp, Homo sapiens
tagcaagccactaga

SEQ ID NO: 1931976 - DNA, 15 bp, Homo sapiens
agcaagccactagaa

SEQ ID NO: 1931977 - DNA, 15 bp, Homo sapiens
gcaagccactagaaa

SEQ ID NO: 1931978 - DNA, 15 bp, Homo sapiens
caagccactagaaac

SEQ ID NO: 1931979 - DNA, 15 bp, Homo sapiens
aagccactagaaacc

SEQ ID NO: 1931980 - DNA, 15 bp, Homo sapiens
agccactagaaacct

SEQ ID NO: 1931981 - DNA, 15 bp, Homo sapiens
gccactagaaaccta

SEQ ID NO: 1931982 - DNA, 15 bp, Homo sapiens
ccactagaaacctaa

SEQ ID NO: 1931983 - DNA, 15 bp, Homo sapiens
cactagaaacctaac

SEQ ID NO: 1931984 - DNA, 15 bp, Homo sapiens
actagaaacctaact

SEQ ID NO: 1931985 - DNA, 15 bp, Homo sapiens
ctagaaacctaactt

SEQ ID NO: 1931986 - DNA, 15 bp, Homo sapiens
tagaaacctaactta

SEQ ID NO: 1931987 - DNA, 15 bp, Homo sapiens
agaaacctaacttaa

SEQ ID NO: 1931988 - DNA, 15 bp, Homo sapiens
gaaacctaacttaat

SEQ ID NO: 1931989 - DNA, 15 bp, Homo sapiens
aaacctaacttaatc

SEQ ID NO: 1931990 - DNA, 15 bp, Homo sapiens
aacctaacttaatct

SEQ ID NO: 1931991 - DNA, 15 bp, Homo sapiens
acctaacttaatctc

SEQ ID NO: 1931992 - DNA, 15 bp, Homo sapiens
cctaacttaatctct

SEQ ID NO: 1931993 - DNA, 15 bp, Homo sapiens
ctaacttaatctctc

SEQ ID NO: 1931994 - DNA, 15 bp, Homo sapiens
taacttaatctctct

SEQ ID NO: 1931995 - DNA, 15 bp, Homo sapiens
aacttaatctctctg

SEQ ID NO: 1931996 - DNA, 15 bp, Homo sapiens
acttaatctctctgt

SEQ ID NO: 1931997 - DNA, 15 bp, Homo sapiens
cttaatctctctgtt

SEQ ID NO: 1931998 - DNA, 15 bp, Homo sapiens
ttaatctctctgttc

SEQ ID NO: 1931999 - DNA, 15 bp, Homo sapiens
taatctctctgttcc

SEQ ID NO: 1932000 - DNA, 15 bp, Homo sapiens
aatctctctgttcca

SEQ ID NO: 1932001 - DNA, 15 bp, Homo sapiens
atctctctgttccac

SEQ ID NO: 1932002 - DNA, 15 bp, Homo sapiens
tctctctgttccaca

SEQ ID NO: 1932003 - DNA, 15 bp, Homo sapiens
ctctctgttccacat

SEQ ID NO: 1932004 - DNA, 15 bp, Homo sapiens
tctctgttccacata

SEQ ID NO: 1932005 - DNA, 15 bp, Homo sapiens
ctctgttccacataa

SEQ ID NO: 1932006 - DNA, 15 bp, Homo sapiens
tctgttccacataaa

SEQ ID NO: 1932007 - DNA, 15 bp, Homo sapiens
ctgttccacataaaa

SEQ ID NO: 1932008 - DNA, 15 bp, Homo sapiens
tgttccacataaaac

SEQ ID NO: 1932009 - DNA, 15 bp, Homo sapiens
gttccacataaaaca

SEQ ID NO: 1932010 - DNA, 15 bp, Homo sapiens
ttccacataaaacag

SEQ ID NO: 1932011 - DNA, 15 bp, Homo sapiens
tccacataaaacagt

SEQ ID NO: 1932012 - DNA, 15 bp, Homo sapiens
ccacataaaacagta

SEQ ID NO: 1932013 - DNA, 15 bp, Homo sapiens
cacataaaacagtac

SEQ ID NO: 1932014 - DNA, 15 bp, Homo sapiens
acataaaacagtact

SEQ ID NO: 1932015 - DNA, 15 bp, Homo sapiens
cataaaacagtacta

SEQ ID NO: 1932016 - DNA, 15 bp, Homo sapiens
ataaaacagtactac

SEQ ID NO: 1932017 - DNA, 15 bp, Homo sapiens
taaaacagtactact

SEQ ID NO: 1932018 - DNA, 15 bp, Homo sapiens
aaaacagtactacta

SEQ ID NO: 1932019 - DNA, 15 bp, Homo sapiens
aaacagtactactac

SEQ ID NO: 1932020 - DNA, 15 bp, Homo sapiens
aacagtactactact

SEQ ID NO: 1932021 - DNA, 15 bp, Homo sapiens
acagtactactacta

SEQ ID NO: 1932022 - DNA, 15 bp, Homo sapiens
cagtactactactat

SEQ ID NO: 1932023 - DNA, 15 bp, Homo sapiens
agtactactactatt

SEQ ID NO: 1932024 - DNA, 15 bp, Homo sapiens
gtactactactattt

SEQ ID NO: 1932025 - DNA, 15 bp, Homo sapiens
tactactactatttg

SEQ ID NO: 1932026 - DNA, 15 bp, Homo sapiens
actactactatttgc

SEQ ID NO: 1932027 - DNA, 15 bp, Homo sapiens
ctactactatttgct

SEQ ID NO: 1932028 - DNA, 15 bp, Homo sapiens
tactactatttgcta

SEQ ID NO: 1932029 - DNA, 15 bp, Homo sapiens
actactatttgctaa

SEQ ID NO: 1932030 - DNA, 15 bp, Homo sapiens
ctactatttgctaag

SEQ ID NO: 1932031 - DNA, 15 bp, Homo sapiens
tactatttgctaagc

SEQ ID NO: 1932032 - DNA, 15 bp, Homo sapiens
actatttgctaagca

SEQ ID NO: 1932033 - DNA, 15 bp, Homo sapiens
ctatttgctaagcat

SEQ ID NO: 1932034 - DNA, 15 bp, Homo sapiens
tatttgctaagcatc

SEQ ID NO: 1932035 - DNA, 15 bp, Homo sapiens
atttgctaagcatct

SEQ ID NO: 1932036 - DNA, 15 bp, Homo sapiens
tttgctaagcatctg

SEQ ID NO: 1932037 - DNA, 15 bp, Homo sapiens
ttgctaagcatctga

SEQ ID NO: 1932038 - DNA, 15 bp, Homo sapiens
tgctaagcatctgaa

SEQ ID NO: 1932039 - DNA, 15 bp, Homo sapiens
gctaagcatctgaag

SEQ ID NO: 1932040 - DNA, 15 bp, Homo sapiens
ctaagcatctgaaga

SEQ ID NO: 1932041 - DNA, 15 bp, Homo sapiens
taagcatctgaagag

SEQ ID NO: 1932042 - DNA, 15 bp, Homo sapiens
aagcatctgaagagg

SEQ ID NO: 1932043 - DNA, 15 bp, Homo sapiens
agcatctgaagaggc

SEQ ID NO: 1932044 - DNA, 15 bp, Homo sapiens
gcatctgaagaggct

SEQ ID NO: 1932045 - DNA, 15 bp, Homo sapiens
catctgaagaggcta

SEQ ID NO: 1932046 - DNA, 15 bp, Homo sapiens
atctgaagaggctat

SEQ ID NO: 1932047 - DNA, 15 bp, Homo sapiens
tctgaagaggctatt

SEQ ID NO: 1932048 - DNA, 15 bp, Homo sapiens
ctgaagaggctattt

SEQ ID NO: 1932049 - DNA, 15 bp, Homo sapiens
tgaagaggctatttt

SEQ ID NO: 1932050 - DNA, 15 bp, Homo sapiens
gaagaggctattttc

SEQ ID NO: 1932051 - DNA, 15 bp, Homo sapiens
aagaggctattttca

SEQ ID NO: 1932052 - DNA, 15 bp, Homo sapiens
agaggctattttcaa

SEQ ID NO: 1932053 - DNA, 15 bp, Homo sapiens
gaggctattttcaac

SEQ ID NO: 1932054 - DNA, 15 bp, Homo sapiens
aggctattttcaaca

SEQ ID NO: 1932055 - DNA, 15 bp, Homo sapiens
ggctattttcaacac

SEQ ID NO: 1932056 - DNA, 15 bp, Homo sapiens
gctattttcaacaca

SEQ ID NO: 1932057 - DNA, 15 bp, Homo sapiens
ctattttcaacacaa

SEQ ID NO: 1932058 - DNA, 15 bp, Homo sapiens
tattttcaacacaaa

SEQ ID NO: 1932059 - DNA, 15 bp, Homo sapiens
attttcaacacaaat

SEQ ID NO: 1932060 - DNA, 15 bp, Homo sapiens
ttttcaacacaaatg

SEQ ID NO: 1932061 - DNA, 15 bp, Homo sapiens
tttcaacacaaatgt

SEQ ID NO: 1932062 - DNA, 15 bp, Homo sapiens
ttcaacacaaatgtg

SEQ ID NO: 1932063 - DNA, 15 bp, Homo sapiens
tcaacacaaatgtga

SEQ ID NO: 1932064 - DNA, 15 bp, Homo sapiens
caacacaaatgtgat

SEQ ID NO: 1932065 - DNA, 15 bp, Homo sapiens
aacacaaatgtgatt

SEQ ID NO: 1932066 - DNA, 15 bp, Homo sapiens
acacaaatgtgattc

SEQ ID NO: 1932067 - DNA, 15 bp, Homo sapiens
cacaaatgtgattca

SEQ ID NO: 1932068 - DNA, 15 bp, Homo sapiens
acaaatgtgattcag

SEQ ID NO: 1932069 - DNA, 15 bp, Homo sapiens
caaatgtgattcaga

SEQ ID NO: 1932070 - DNA, 15 bp, Homo sapiens
aaatgtgattcagag

SEQ ID NO: 1932071 - DNA, 15 bp, Homo sapiens
aatgtgattcagagt

SEQ ID NO: 1932072 - DNA, 15 bp, Homo sapiens
atgtgattcagagta

SEQ ID NO: 1932073 - DNA, 15 bp, Homo sapiens
tgtgattcagagtaa

SEQ ID NO: 1932074 - DNA, 15 bp, Homo sapiens
gtgattcagagtaaa

SEQ ID NO: 1932075 - DNA, 15 bp, Homo sapiens
tgattcagagtaaaa

SEQ ID NO: 1932076 - DNA, 15 bp, Homo sapiens
gattcagagtaaaat

SEQ ID NO: 1932077 - DNA, 15 bp, Homo sapiens
attcagagtaaaatt

SEQ ID NO: 1932078 - DNA, 15 bp, Homo sapiens
ttcagagtaaaatta

SEQ ID NO: 1932079 - DNA, 15 bp, Homo sapiens
tcagagtaaaattaa

SEQ ID NO: 1932080 - DNA, 15 bp, Homo sapiens
cagagtaaaattaag

SEQ ID NO: 1932081 - DNA, 15 bp, Homo sapiens
agagtaaaattaagc

SEQ ID NO: 1932082 - DNA, 15 bp, Homo sapiens
gagtaaaattaagca

SEQ ID NO: 1932083 - DNA, 15 bp, Homo sapiens
agtaaaattaagcag

SEQ ID NO: 1932084 - DNA, 15 bp, Homo sapiens
gtaaaattaagcagg

SEQ ID NO: 1932085 - DNA, 15 bp, Homo sapiens
taaaattaagcaggg

SEQ ID NO: 1932086 - DNA, 15 bp, Homo sapiens
aaaattaagcagggg

SEQ ID NO: 1932087 - DNA, 15 bp, Homo sapiens
aaattaagcaggggg

SEQ ID NO: 1932088 - DNA, 15 bp, Homo sapiens
aattaagcaggggga

SEQ ID NO: 1932089 - DNA, 15 bp, Homo sapiens
attaagcagggggac

SEQ ID NO: 1932090 - DNA, 15 bp, Homo sapiens
ttaagcagggggacc

SEQ ID NO: 1932091 - DNA, 15 bp, Homo sapiens
taagcagggggacca

SEQ ID NO: 1932092 - DNA, 15 bp, Homo sapiens
aagcagggggaccag

SEQ ID NO: 1932093 - DNA, 15 bp, Homo sapiens
agcagggggaccaga

SEQ ID NO: 1932094 - DNA, 15 bp, Homo sapiens
gcagggggaccagat

SEQ ID NO: 1932095 - DNA, 15 bp, Homo sapiens
cagggggaccagatt

SEQ ID NO: 1932096 - DNA, 15 bp, Homo sapiens
agggggaccagatta

SEQ ID NO: 1932097 - DNA, 15 bp, Homo sapiens
gggggaccagattaa

SEQ ID NO: 1932098 - DNA, 15 bp, Homo sapiens
ggggaccagattaaa

SEQ ID NO: 1932099 - DNA, 15 bp, Homo sapiens
gggaccagattaaat

SEQ ID NO: 1932100 - DNA, 15 bp, Homo sapiens
ggaccagattaaatt

SEQ ID NO: 1932101 - DNA, 15 bp, Homo sapiens
gaccagattaaatta

SEQ ID NO: 1932102 - DNA, 15 bp, Homo sapiens
accagattaaattat

SEQ ID NO: 1932103 - DNA, 15 bp, Homo sapiens
ccagattaaattatt

SEQ ID NO: 1932104 - DNA, 15 bp, Homo sapiens
cagattaaattatta

SEQ ID NO: 1932105 - DNA, 15 bp, Homo sapiens
agattaaattattag

SEQ ID NO: 1932106 - DNA, 15 bp, Homo sapiens
gattaaattattagt

SEQ ID NO: 1932107 - DNA, 15 bp, Homo sapiens
attaaattattagtt

SEQ ID NO: 1932108 - DNA, 15 bp, Homo sapiens
ttaaattattagttc

SEQ ID NO: 1932109 - DNA, 15 bp, Homo sapiens
taaattattagttcc

SEQ ID NO: 1932110 - DNA, 15 bp, Homo sapiens
aaattattagttcct

SEQ ID NO: 1932111 - DNA, 15 bp, Homo sapiens
aattattagttcctt

SEQ ID NO: 1932112 - DNA, 15 bp, Homo sapiens
attattagttccttc

SEQ ID NO: 1932113 - DNA, 15 bp, Homo sapiens
ttattagttccttca

SEQ ID NO: 1932114 - DNA, 15 bp, Homo sapiens
tattagttccttcag

SEQ ID NO: 1932115 - DNA, 15 bp, Homo sapiens
attagttccttcagc

SEQ ID NO: 1932116 - DNA, 15 bp, Homo sapiens
ttagttccttcagcc

SEQ ID NO: 1932117 - DNA, 15 bp, Homo sapiens
tagttccttcagcct

SEQ ID NO: 1932118 - DNA, 15 bp, Homo sapiens
agttccttcagcctc

SEQ ID NO: 1932119 - DNA, 15 bp, Homo sapiens
gttccttcagcctct

SEQ ID NO: 1932120 - DNA, 15 bp, Homo sapiens
ttccttcagcctcta

SEQ ID NO: 1932121 - DNA, 15 bp, Homo sapiens
tccttcagcctctac

SEQ ID NO: 1932122 - DNA, 15 bp, Homo sapiens
ccttcagcctctact

SEQ ID NO: 1932123 - DNA, 15 bp, Homo sapiens
cttcagcctctactc

SEQ ID NO: 1932124 - DNA, 15 bp, Homo sapiens
ttcagcctctactca

SEQ ID NO: 1932125 - DNA, 15 bp, Homo sapiens
tcagcctctactcac

SEQ ID NO: 1932126 - DNA, 15 bp, Homo sapiens
cagcctctactcacc

SEQ ID NO: 1932127 - DNA, 15 bp, Homo sapiens
agcctctactcaccg

SEQ ID NO: 1932128 - DNA, 15 bp, Homo sapiens
gcctctactcaccgt

SEQ ID NO: 1932129 - DNA, 15 bp, Homo sapiens
cctctactcaccgtc

SEQ ID NO: 1932130 - DNA, 15 bp, Homo sapiens
ctctactcaccgtcc

SEQ ID NO: 1932131 - DNA, 15 bp, Homo sapiens
tctactcaccgtccc

SEQ ID NO: 1932132 - DNA, 15 bp, Homo sapiens
ctactcaccgtcccc

SEQ ID NO: 1932133 - DNA, 15 bp, Homo sapiens
tactcaccgtcccct

SEQ ID NO: 1932134 - DNA, 15 bp, Homo sapiens
actcaccgtcccctt

SEQ ID NO: 1932135 - DNA, 15 bp, Homo sapiens
ctcaccgtccccttc

SEQ ID NO: 1932136 - DNA, 15 bp, Homo sapiens
tcaccgtccccttca

SEQ ID NO: 1932137 - DNA, 15 bp, Homo sapiens
caccgtccccttcat

SEQ ID NO: 1932138 - DNA, 15 bp, Homo sapiens
accgtccccttcata

SEQ ID NO: 1932139 - DNA, 15 bp, Homo sapiens
ccgtccccttcataa

SEQ ID NO: 1932140 - DNA, 15 bp, Homo sapiens
cgtccccttcataat

SEQ ID NO: 1932141 - DNA, 15 bp, Homo sapiens
gtccccttcataatc

SEQ ID NO: 1932142 - DNA, 15 bp, Homo sapiens
tccccttcataatcg

SEQ ID NO: 1932143 - DNA, 15 bp, Homo sapiens
ccccttcataatcgt

SEQ ID NO: 1932144 - DNA, 15 bp, Homo sapiens
cccttcataatcgtt

SEQ ID NO: 1932145 - DNA, 15 bp, Homo sapiens
ccttcataatcgttt

SEQ ID NO: 1932146 - DNA, 15 bp, Homo sapiens
cttcataatcgtttc

SEQ ID NO: 1932147 - DNA, 15 bp, Homo sapiens
ttcataatcgtttca

SEQ ID NO: 1932148 - DNA, 15 bp, Homo sapiens
tcataatcgtttcac

SEQ ID NO: 1932149 - DNA, 15 bp, Homo sapiens
cataatcgtttcaca

SEQ ID NO: 1932150 - DNA, 15 bp, Homo sapiens
ataatcgtttcacag

SEQ ID NO: 1932151 - DNA, 15 bp, Homo sapiens
taatcgtttcacagt

SEQ ID NO: 1932152 - DNA, 15 bp, Homo sapiens
aatcgtttcacagta

SEQ ID NO: 1932153 - DNA, 15 bp, Homo sapiens
atcgtttcacagtag

SEQ ID NO: 1932154 - DNA, 15 bp, Homo sapiens
tcgtttcacagtaga

SEQ ID NO: 1932155 - DNA, 15 bp, Homo sapiens
cgtttcacagtagag

SEQ ID NO: 1932156 - DNA, 15 bp, Homo sapiens
gtttcacagtagaga

SEQ ID NO: 1932157 - DNA, 15 bp, Homo sapiens
tttcacagtagagat

SEQ ID NO: 1932158 - DNA, 15 bp, Homo sapiens
ttcacagtagagatt

SEQ ID NO: 1932159 - DNA, 15 bp, Homo sapiens
tcacagtagagattt

SEQ ID NO: 1932160 - DNA, 15 bp, Homo sapiens
cacagtagagatttt

SEQ ID NO: 1932161 - DNA, 15 bp, Homo sapiens
acagtagagattttg

SEQ ID NO: 1932162 - DNA, 15 bp, Homo sapiens
cagtagagattttga

SEQ ID NO: 1932163 - DNA, 15 bp, Homo sapiens
agtagagattttgat

SEQ ID NO: 1932164 - DNA, 15 bp, Homo sapiens
gtagagattttgatt

SEQ ID NO: 1932165 - DNA, 15 bp, Homo sapiens
tagagattttgatta

SEQ ID NO: 1932166 - DNA, 15 bp, Homo sapiens
agagattttgattaa

SEQ ID NO: 1932167 - DNA, 15 bp, Homo sapiens
gagattttgattaag

SEQ ID NO: 1932168 - DNA, 15 bp, Homo sapiens
agattttgattaagc

SEQ ID NO: 1932169 - DNA, 15 bp, Homo sapiens
gattttgattaagcc

SEQ ID NO: 1932170 - DNA, 15 bp, Homo sapiens
attttgattaagcct

SEQ ID NO: 1932171 - DNA, 15 bp, Homo sapiens
ttttgattaagccta

SEQ ID NO: 1932172 - DNA, 15 bp, Homo sapiens
tttgattaagcctaa

SEQ ID NO: 1932173 - DNA, 15 bp, Homo sapiens
ttgattaagcctaac

SEQ ID NO: 1932174 - DNA, 15 bp, Homo sapiens
tgattaagcctaact

SEQ ID NO: 1932175 - DNA, 15 bp, Homo sapiens
gattaagcctaactg

SEQ ID NO: 1932176 - DNA, 15 bp, Homo sapiens
attaagcctaactgt

SEQ ID NO: 1932177 - DNA, 15 bp, Homo sapiens
ttaagcctaactgta

SEQ ID NO: 1932178 - DNA, 15 bp, Homo sapiens
taagcctaactgtac

SEQ ID NO: 1932179 - DNA, 15 bp, Homo sapiens
aagcctaactgtact

SEQ ID NO: 1932180 - DNA, 15 bp, Homo sapiens
agcctaactgtactt

SEQ ID NO: 1932181 - DNA, 15 bp, Homo sapiens
gcctaactgtactta

SEQ ID NO: 1932182 - DNA, 15 bp, Homo sapiens
cctaactgtacttaa

SEQ ID NO: 1932183 - DNA, 15 bp, Homo sapiens
ctaactgtacttaaa

SEQ ID NO: 1932184 - DNA, 15 bp, Homo sapiens
taactgtacttaaat

SEQ ID NO: 1932185 - DNA, 15 bp, Homo sapiens
aactgtacttaaata

SEQ ID NO: 1932186 - DNA, 15 bp, Homo sapiens
actgtacttaaatat

SEQ ID NO: 1932187 - DNA, 15 bp, Homo sapiens
ctgtacttaaatata

SEQ ID NO: 1932188 - DNA, 15 bp, Homo sapiens
tgtacttaaatataa

SEQ ID NO: 1932189 - DNA, 15 bp, Homo sapiens
gtacttaaatataag

SEQ ID NO: 1932190 - DNA, 15 bp, Homo sapiens
tacttaaatataagt

SEQ ID NO: 1932191 - DNA, 15 bp, Homo sapiens
acttaaatataagta

SEQ ID NO: 1932192 - DNA, 15 bp, Homo sapiens
cttaaatataagtat

SEQ ID NO: 1932193 - DNA, 15 bp, Homo sapiens
ttaaatataagtata

SEQ ID NO: 1932194 - DNA, 15 bp, Homo sapiens
taaatataagtatag

SEQ ID NO: 1932195 - DNA, 15 bp, Homo sapiens
aaatataagtataga

SEQ ID NO: 1932196 - DNA, 15 bp, Homo sapiens
aatataagtatagaa

SEQ ID NO: 1932197 - DNA, 15 bp, Homo sapiens
atataagtatagaaa

SEQ ID NO: 1932198 - DNA, 15 bp, Homo sapiens
tataagtatagaaac

SEQ ID NO: 1932199 - DNA, 15 bp, Homo sapiens
ataagtatagaaaca

SEQ ID NO: 1932200 - DNA, 15 bp, Homo sapiens
taagtatagaaacac

SEQ ID NO: 1932201 - DNA, 15 bp, Homo sapiens
aagtatagaaacaca

SEQ ID NO: 1932202 - DNA, 15 bp, Homo sapiens
agtatagaaacacat

SEQ ID NO: 1932203 - DNA, 15 bp, Homo sapiens
gtatagaaacacatt

SEQ ID NO: 1932204 - DNA, 15 bp, Homo sapiens
tatagaaacacattt

SEQ ID NO: 1932205 - DNA, 15 bp, Homo sapiens
atagaaacacatttt

SEQ ID NO: 1932206 - DNA, 15 bp, Homo sapiens
tagaaacacatttta

SEQ ID NO: 1932207 - DNA, 15 bp, Homo sapiens
agaaacacattttaa

SEQ ID NO: 1932208 - DNA, 15 bp, Homo sapiens
gaaacacattttaaa

SEQ ID NO: 1932209 - DNA, 15 bp, Homo sapiens
aaacacattttaaat

SEQ ID NO: 1932210 - DNA, 15 bp, Homo sapiens
aacacattttaaatc

SEQ ID NO: 1932211 - DNA, 15 bp, Homo sapiens
acacattttaaatcc

SEQ ID NO: 1932212 - DNA, 15 bp, Homo sapiens
cacattttaaatcca

SEQ ID NO: 1932213 - DNA, 15 bp, Homo sapiens
acattttaaatccat

SEQ ID NO: 1932214 - DNA, 15 bp, Homo sapiens
cattttaaatccatt

SEQ ID NO: 1932215 - DNA, 15 bp, Homo sapiens
attttaaatccattc

SEQ ID NO: 1932216 - DNA, 15 bp, Homo sapiens
ttttaaatccattca

SEQ ID NO: 1932217 - DNA, 15 bp, Homo sapiens
tttaaatccattcat

SEQ ID NO: 1932218 - DNA, 15 bp, Homo sapiens
ttaaatccattcata

SEQ ID NO: 1932219 - DNA, 15 bp, Homo sapiens
taaatccattcataa

SEQ ID NO: 1932220 - DNA, 15 bp, Homo sapiens
aaatccattcataaa

SEQ ID NO: 1932221 - DNA, 15 bp, Homo sapiens
aatccattcataaat

SEQ ID NO: 1932222 - DNA, 15 bp, Homo sapiens
atccattcataaatg

SEQ ID NO: 1932223 - DNA, 15 bp, Homo sapiens
tccattcataaatgc

SEQ ID NO: 1932224 - DNA, 15 bp, Homo sapiens
ccattcataaatgct

SEQ ID NO: 1932225 - DNA, 15 bp, Homo sapiens
cattcataaatgctt

SEQ ID NO: 1932226 - DNA, 15 bp, Homo sapiens
attcataaatgcttt

SEQ ID NO: 1932227 - DNA, 15 bp, Homo sapiens
ttcataaatgctttt

SEQ ID NO: 1932228 - DNA, 15 bp, Homo sapiens
tcataaatgcttttt

SEQ ID NO: 1932229 - DNA, 15 bp, Homo sapiens
cataaatgctttttg

SEQ ID NO: 1932230 - DNA, 15 bp, Homo sapiens
ataaatgctttttgt

SEQ ID NO: 1932231 - DNA, 15 bp, Homo sapiens
taaatgctttttgta

SEQ ID NO: 1932232 - DNA, 15 bp, Homo sapiens
aaatgctttttgtat

SEQ ID NO: 1932233 - DNA, 15 bp, Homo sapiens
aatgctttttgtatt

SEQ ID NO: 1932234 - DNA, 15 bp, Homo sapiens
atgctttttgtatta

SEQ ID NO: 1932235 - DNA, 15 bp, Homo sapiens
tgctttttgtattat

SEQ ID NO: 1932236 - DNA, 15 bp, Homo sapiens
gctttttgtattatc

SEQ ID NO: 1932237 - DNA, 15 bp, Homo sapiens
ctttttgtattatct

SEQ ID NO: 1932238 - DNA, 15 bp, Homo sapiens
tttttgtattatcta

SEQ ID NO: 1932239 - DNA, 15 bp, Homo sapiens
ttttgtattatctac

SEQ ID NO: 1932240 - DNA, 15 bp, Homo sapiens
tttgtattatctaca

SEQ ID NO: 1932241 - DNA, 15 bp, Homo sapiens
ttgtattatctacac

SEQ ID NO: 1932242 - DNA, 15 bp, Homo sapiens
tgtattatctacact

SEQ ID NO: 1932243 - DNA, 15 bp, Homo sapiens
gtattatctacactt

SEQ ID NO: 1932244 - DNA, 15 bp, Homo sapiens
tattatctacacttc

SEQ ID NO: 1932245 - DNA, 15 bp, Homo sapiens
attatctacacttca

SEQ ID NO: 1932246 - DNA, 15 bp, Homo sapiens
ttatctacacttcat

SEQ ID NO: 1932247 - DNA, 15 bp, Homo sapiens
tatctacacttcatt

SEQ ID NO: 1932248 - DNA, 15 bp, Homo sapiens
atctacacttcattt

SEQ ID NO: 1932249 - DNA, 15 bp, Homo sapiens
tctacacttcatttt

SEQ ID NO: 1932250 - DNA, 15 bp, Homo sapiens
ctacacttcattttt

SEQ ID NO: 1932251 - DNA, 15 bp, Homo sapiens
tacacttcatttttg

SEQ ID NO: 1932252 - DNA, 15 bp, Homo sapiens
acacttcatttttgt

SEQ ID NO: 1932253 - DNA, 15 bp, Homo sapiens
cacttcatttttgtt

SEQ ID NO: 1932254 - DNA, 15 bp, Homo sapiens
acttcatttttgtta

SEQ ID NO: 1932255 - DNA, 15 bp, Homo sapiens
cttcatttttgttaa

SEQ ID NO: 1932256 - DNA, 15 bp, Homo sapiens
ttcatttttgttaac

SEQ ID NO: 1932257 - DNA, 15 bp, Homo sapiens
tcatttttgttaaca

SEQ ID NO: 1932258 - DNA, 15 bp, Homo sapiens
catttttgttaacaa

SEQ ID NO: 1932259 - DNA, 15 bp, Homo sapiens
atttttgttaacaaa

SEQ ID NO: 1932260 - DNA, 15 bp, Homo sapiens
tttttgttaacaaat

SEQ ID NO: 1932261 - DNA, 15 bp, Homo sapiens
ttttgttaacaaatt

SEQ ID NO: 1932262 - DNA, 15 bp, Homo sapiens
tttgttaacaaattt

SEQ ID NO: 1932263 - DNA, 15 bp, Homo sapiens
ttgttaacaaatttc

SEQ ID NO: 1932264 - DNA, 15 bp, Homo sapiens
tgttaacaaatttct

SEQ ID NO: 1932265 - DNA, 15 bp, Homo sapiens
gttaacaaatttctt

SEQ ID NO: 1932266 - DNA, 15 bp, Homo sapiens
ttaacaaatttctta

SEQ ID NO: 1932267 - DNA, 15 bp, Homo sapiens
taacaaatttcttag

SEQ ID NO: 1932268 - DNA, 15 bp, Homo sapiens
aacaaatttcttaga

SEQ ID NO: 1932269 - DNA, 15 bp, Homo sapiens
acaaatttcttagaa

SEQ ID NO: 1932270 - DNA, 15 bp, Homo sapiens
caaatttcttagaag

SEQ ID NO: 1932271 - DNA, 15 bp, Homo sapiens
aaatttcttagaagt

SEQ ID NO: 1932272 - DNA, 15 bp, Homo sapiens
aatttcttagaagtg

SEQ ID NO: 1932273 - DNA, 15 bp, Homo sapiens
atttcttagaagtgg

SEQ ID NO: 1932274 - DNA, 15 bp, Homo sapiens
tttcttagaagtggc

SEQ ID NO: 1932275 - DNA, 15 bp, Homo sapiens
ttcttagaagtggca

SEQ ID NO: 1932276 - DNA, 15 bp, Homo sapiens
tcttagaagtggcat

SEQ ID NO: 1932277 - DNA, 15 bp, Homo sapiens
cttagaagtggcata

SEQ ID NO: 1932278 - DNA, 15 bp, Homo sapiens
ttagaagtggcatag

SEQ ID NO: 1932279 - DNA, 15 bp, Homo sapiens
tagaagtggcatagt

SEQ ID NO: 1932280 - DNA, 15 bp, Homo sapiens
agaagtggcatagta

SEQ ID NO: 1932281 - DNA, 15 bp, Homo sapiens
gaagtggcatagtat

SEQ ID NO: 1932282 - DNA, 15 bp, Homo sapiens
aagtggcatagtata

SEQ ID NO: 1932283 - DNA, 15 bp, Homo sapiens
agtggcatagtatag

SEQ ID NO: 1932284 - DNA, 15 bp, Homo sapiens
gtggcatagtatagt

SEQ ID NO: 1932285 - DNA, 15 bp, Homo sapiens
tggcatagtatagta

SEQ ID NO: 1932286 - DNA, 15 bp, Homo sapiens
ggcatagtatagtag

SEQ ID NO: 1932287 - DNA, 15 bp, Homo sapiens
gcatagtatagtaga

SEQ ID NO: 1932288 - DNA, 15 bp, Homo sapiens
catagtatagtagaa

SEQ ID NO: 1932289 - DNA, 15 bp, Homo sapiens
atagtatagtagaaa

SEQ ID NO: 1932290 - DNA, 15 bp, Homo sapiens
tagtatagtagaaaa

SEQ ID NO: 1932291 - DNA, 15 bp, Homo sapiens
agtatagtagaaaaa

SEQ ID NO: 1932292 - DNA, 15 bp, Homo sapiens
gtatagtagaaaaat

SEQ ID NO: 1932293 - DNA, 15 bp, Homo sapiens
tatagtagaaaaatt

SEQ ID NO: 1932294 - DNA, 15 bp, Homo sapiens
atagtagaaaaattg

SEQ ID NO: 1932295 - DNA, 15 bp, Homo sapiens
tagtagaaaaattgt

SEQ ID NO: 1932296 - DNA, 15 bp, Homo sapiens
agtagaaaaattgtt

SEQ ID NO: 1932297 - DNA, 15 bp, Homo sapiens
gtagaaaaattgttt

SEQ ID NO: 1932298 - DNA, 15 bp, Homo sapiens
tagaaaaattgtttt

SEQ ID NO: 1932299 - DNA, 15 bp, Homo sapiens
agaaaaattgtttta

SEQ ID NO: 1932300 - DNA, 15 bp, Homo sapiens
gaaaaattgttttag

SEQ ID NO: 1932301 - DNA, 15 bp, Homo sapiens
aaaaattgttttagg

SEQ ID NO: 1932302 - DNA, 15 bp, Homo sapiens
aaaattgttttaggt

SEQ ID NO: 1932303 - DNA, 15 bp, Homo sapiens
aaattgttttaggta

SEQ ID NO: 1932304 - DNA, 15 bp, Homo sapiens
aattgttttaggtaa

SEQ ID NO: 1932305 - DNA, 15 bp, Homo sapiens
attgttttaggtaat

SEQ ID NO: 1932306 - DNA, 15 bp, Homo sapiens
ttgttttaggtaatt

SEQ ID NO: 1932307 - DNA, 15 bp, Homo sapiens
tgttttaggtaattt

SEQ ID NO: 1932308 - DNA, 15 bp, Homo sapiens
gttttaggtaattta

SEQ ID NO: 1932309 - DNA, 15 bp, Homo sapiens
ttttaggtaatttat

SEQ ID NO: 1932310 - DNA, 15 bp, Homo sapiens
tttaggtaatttatt

SEQ ID NO: 1932311 - DNA, 15 bp, Homo sapiens
ttaggtaatttatta

SEQ ID NO: 1932312 - DNA, 15 bp, Homo sapiens
taggtaatttattat

SEQ ID NO: 1932313 - DNA, 15 bp, Homo sapiens
aggtaatttattatc

SEQ ID NO: 1932314 - DNA, 15 bp, Homo sapiens
ggtaatttattatct

SEQ ID NO: 1932315 - DNA, 15 bp, Homo sapiens
gtaatttattatctt

SEQ ID NO: 1932316 - DNA, 15 bp, Homo sapiens
taatttattatcttc

SEQ ID NO: 1932317 - DNA, 15 bp, Homo sapiens
aatttattatcttcg

SEQ ID NO: 1932318 - DNA, 15 bp, Homo sapiens
atttattatcttcga

SEQ ID NO: 1932319 - DNA, 15 bp, Homo sapiens
tttattatcttcgag

SEQ ID NO: 1932320 - DNA, 15 bp, Homo sapiens
ttattatcttcgagt

SEQ ID NO: 1932321 - DNA, 15 bp, Homo sapiens
tattatcttcgagta

SEQ ID NO: 1932322 - DNA, 15 bp, Homo sapiens
attatcttcgagtag

SEQ ID NO: 1932323 - DNA, 15 bp, Homo sapiens
ttatcttcgagtagt

SEQ ID NO: 1932324 - DNA, 15 bp, Homo sapiens
tatcttcgagtagtt

SEQ ID NO: 1932325 - DNA, 15 bp, Homo sapiens
atcttcgagtagtta

SEQ ID NO: 1932326 - DNA, 15 bp, Homo sapiens
tcttcgagtagttag

SEQ ID NO: 1932327 - DNA, 15 bp, Homo sapiens
cttcgagtagttagt

SEQ ID NO: 1932328 - DNA, 15 bp, Homo sapiens
ttcgagtagttagta

SEQ ID NO: 1932329 - DNA, 15 bp, Homo sapiens
tcgagtagttagtat

SEQ ID NO: 1932330 - DNA, 15 bp, Homo sapiens
cgagtagttagtatt

SEQ ID NO: 1932331 - DNA, 15 bp, Homo sapiens
gagtagttagtattt

SEQ ID NO: 1932332 - DNA, 15 bp, Homo sapiens
agtagttagtatttc

SEQ ID NO: 1932333 - DNA, 15 bp, Homo sapiens
gtagttagtatttct

SEQ ID NO: 1932334 - DNA, 15 bp, Homo sapiens
tagttagtatttctt

SEQ ID NO: 1932335 - DNA, 15 bp, Homo sapiens
agttagtatttctta

SEQ ID NO: 1932336 - DNA, 15 bp, Homo sapiens
gttagtatttcttaa

SEQ ID NO: 1932337 - DNA, 15 bp, Homo sapiens
ttagtatttcttaaa

SEQ ID NO: 1932338 - DNA, 15 bp, Homo sapiens
tagtatttcttaaat

SEQ ID NO: 1932339 - DNA, 15 bp, Homo sapiens
agtatttcttaaata

SEQ ID NO: 1932340 - DNA, 15 bp, Homo sapiens
gtatttcttaaatat

SEQ ID NO: 1932341 - DNA, 15 bp, Homo sapiens
tatttcttaaatata

SEQ ID NO: 1932342 - DNA, 15 bp, Homo sapiens
atttcttaaatataa

SEQ ID NO: 1932343 - DNA, 15 bp, Homo sapiens
tttcttaaatataag

SEQ ID NO: 1932344 - DNA, 15 bp, Homo sapiens
ttcttaaatataaga

SEQ ID NO: 1932345 - DNA, 15 bp, Homo sapiens
tcttaaatataagat

SEQ ID NO: 1932346 - DNA, 15 bp, Homo sapiens
cttaaatataagata

SEQ ID NO: 1932347 - DNA, 15 bp, Homo sapiens
ttaaatataagatac

SEQ ID NO: 1932348 - DNA, 15 bp, Homo sapiens
taaatataagatact

SEQ ID NO: 1932349 - DNA, 15 bp, Homo sapiens
aaatataagatacta

SEQ ID NO: 1932350 - DNA, 15 bp, Homo sapiens
aatataagatactat

SEQ ID NO: 1932351 - DNA, 15 bp, Homo sapiens
atataagatactatg

SEQ ID NO: 1932352 - DNA, 15 bp, Homo sapiens
tataagatactatgt

SEQ ID NO: 1932353 - DNA, 15 bp, Homo sapiens
ataagatactatgta

SEQ ID NO: 1932354 - DNA, 15 bp, Homo sapiens
taagatactatgtaa

SEQ ID NO: 1932355 - DNA, 15 bp, Homo sapiens
aagatactatgtaaa

SEQ ID NO: 1932356 - DNA, 15 bp, Homo sapiens
agatactatgtaaaa

SEQ ID NO: 1932357 - DNA, 15 bp, Homo sapiens
gatactatgtaaaat

SEQ ID NO: 1932358 - DNA, 15 bp, Homo sapiens
atactatgtaaaatg

SEQ ID NO: 1932359 - DNA, 15 bp, Homo sapiens
tactatgtaaaatgc

SEQ ID NO: 1932360 - DNA, 15 bp, Homo sapiens
actatgtaaaatgca

SEQ ID NO: 1932361 - DNA, 15 bp, Homo sapiens
ctatgtaaaatgcaa

SEQ ID NO: 1932362 - DNA, 15 bp, Homo sapiens
tatgtaaaatgcaaa

SEQ ID NO: 1932363 - DNA, 15 bp, Homo sapiens
atgtaaaatgcaaat

SEQ ID NO: 1932364 - DNA, 15 bp, Homo sapiens
tgtaaaatgcaaata

SEQ ID NO: 1932365 - DNA, 15 bp, Homo sapiens
gtaaaatgcaaatat

SEQ ID NO: 1932366 - DNA, 15 bp, Homo sapiens
taaaatgcaaatata

SEQ ID NO: 1932367 - DNA, 15 bp, Homo sapiens
aaaatgcaaatataa

SEQ ID NO: 1932368 - DNA, 15 bp, Homo sapiens
aaatgcaaatataaa

SEQ ID NO: 1932369 - DNA, 15 bp, Homo sapiens
atgcaaatataaaat

SEQ ID NO: 1932370 - DNA, 15 bp, Homo sapiens
tgcaaatataaaatc

SEQ ID NO: 1932371 - DNA, 15 bp, Homo sapiens
gcaaatataaaatcc

SEQ ID NO: 1932372 - DNA, 15 bp, Homo sapiens
caaatataaaatccc

SEQ ID NO: 1932373 - DNA, 15 bp, Homo sapiens
aaatataaaatcccc

SEQ ID NO: 1932374 - DNA, 15 bp, Homo sapiens
aatataaaatcccct

SEQ ID NO: 1932375 - DNA, 15 bp, Homo sapiens
atataaaatcccctg

SEQ ID NO: 1932376 - DNA, 15 bp, Homo sapiens
tataaaatcccctgg

SEQ ID NO: 1932377 - DNA, 15 bp, Homo sapiens
ataaaatcccctggc

SEQ ID NO: 1932378 - DNA, 15 bp, Homo sapiens
taaaatcccctggcc

SEQ ID NO: 1932379 - DNA, 15 bp, Homo sapiens
aaaatcccctggccc

SEQ ID NO: 1932380 - DNA, 15 bp, Homo sapiens
aaatcccctggccct

SEQ ID NO: 1932381 - DNA, 15 bp, Homo sapiens
aatcccctggccctg

SEQ ID NO: 1932382 - DNA, 15 bp, Homo sapiens
atcccctggccctgt

SEQ ID NO: 1932383 - DNA, 15 bp, Homo sapiens
tcccctggccctgtc

SEQ ID NO: 1932384 - DNA, 15 bp, Homo sapiens
cccctggccctgtca

SEQ ID NO: 1932385 - DNA, 15 bp, Homo sapiens
ccctggccctgtcac

SEQ ID NO: 1932386 - DNA, 15 bp, Homo sapiens
cctggccctgtcaca

SEQ ID NO: 1932387 - DNA, 15 bp, Homo sapiens
ctggccctgtcacaa

SEQ ID NO: 1932388 - DNA, 15 bp, Homo sapiens
tggccctgtcacaat

SEQ ID NO: 1932389 - DNA, 15 bp, Homo sapiens
ggccctgtcacaata

SEQ ID NO: 1932390 - DNA, 15 bp, Homo sapiens
gccctgtcacaatat

SEQ ID NO: 1932391 - DNA, 15 bp, Homo sapiens
ccctgtcacaatatg

SEQ ID NO: 1932392 - DNA, 15 bp, Homo sapiens
cctgtcacaatatgt

SEQ ID NO: 1932393 - DNA, 15 bp, Homo sapiens
ctgtcacaatatgtg

SEQ ID NO: 1932394 - DNA, 15 bp, Homo sapiens
tgtcacaatatgtgt

SEQ ID NO: 1932395 - DNA, 15 bp, Homo sapiens
gtcacaatatgtgtg

SEQ ID NO: 1932396 - DNA, 15 bp, Homo sapiens
tcacaatatgtgtgc

SEQ ID NO: 1932397 - DNA, 15 bp, Homo sapiens
cacaatatgtgtgca

SEQ ID NO: 1932398 - DNA, 15 bp, Homo sapiens
acaatatgtgtgcag

SEQ ID NO: 1932399 - DNA, 15 bp, Homo sapiens
caatatgtgtgcagt

SEQ ID NO: 1932400 - DNA, 15 bp, Homo sapiens
aatatgtgtgcagtc

SEQ ID NO: 1932401 - DNA, 15 bp, Homo sapiens
atatgtgtgcagtct

SEQ ID NO: 1932402 - DNA, 15 bp, Homo sapiens
tatgtgtgcagtctt

SEQ ID NO: 1932403 - DNA, 15 bp, Homo sapiens
atgtgtgcagtcttg

SEQ ID NO: 1932404 - DNA, 15 bp, Homo sapiens
tgtgtgcagtcttgc

SEQ ID NO: 1932405 - DNA, 15 bp, Homo sapiens
gtgtgcagtcttgca

SEQ ID NO: 1932406 - DNA, 15 bp, Homo sapiens
tgtgcagtcttgcaa

SEQ ID NO: 1932407 - DNA, 15 bp, Homo sapiens
gtgcagtcttgcaaa

SEQ ID NO: 1932408 - DNA, 15 bp, Homo sapiens
tgcagtcttgcaaaa

SEQ ID NO: 1932409 - DNA, 15 bp, Homo sapiens
gcagtcttgcaaaaa

SEQ ID NO: 1932410 - DNA, 15 bp, Homo sapiens
cagtcttgcaaaaat

SEQ ID NO: 1932411 - DNA, 15 bp, Homo sapiens
agtcttgcaaaaatt

SEQ ID NO: 1932412 - DNA, 15 bp, Homo sapiens
gtcttgcaaaaatta

SEQ ID NO: 1932413 - DNA, 15 bp, Homo sapiens
tcttgcaaaaattac

SEQ ID NO: 1932414 - DNA, 15 bp, Homo sapiens
cttgcaaaaattacc

SEQ ID NO: 1932415 - DNA, 15 bp, Homo sapiens
ttgcaaaaattacct

SEQ ID NO: 1932416 - DNA, 15 bp, Homo sapiens
tgcaaaaattaccta

SEQ ID NO: 1932417 - DNA, 15 bp, Homo sapiens
gcaaaaattacctaa

SEQ ID NO: 1932418 - DNA, 15 bp, Homo sapiens
caaaaattacctaat

SEQ ID NO: 1932419 - DNA, 15 bp, Homo sapiens
aaaaattacctaatc

SEQ ID NO: 1932420 - DNA, 15 bp, Homo sapiens
aaaattacctaatct

SEQ ID NO: 1932421 - DNA, 15 bp, Homo sapiens
aaattacctaatctc

SEQ ID NO: 1932422 - DNA, 15 bp, Homo sapiens
aattacctaatctct

SEQ ID NO: 1932423 - DNA, 15 bp, Homo sapiens
attacctaatctctg

SEQ ID NO: 1932424 - DNA, 15 bp, Homo sapiens
ttacctaatctctga

SEQ ID NO: 1932425 - DNA, 15 bp, Homo sapiens
tacctaatctctgaa

SEQ ID NO: 1932426 - DNA, 15 bp, Homo sapiens
acctaatctctgaat

SEQ ID NO: 1932427 - DNA, 15 bp, Homo sapiens
cctaatctctgaatg

SEQ ID NO: 1932428 - DNA, 15 bp, Homo sapiens
ctaatctctgaatgt

SEQ ID NO: 1932429 - DNA, 15 bp, Homo sapiens
taatctctgaatgtt

SEQ ID NO: 1932430 - DNA, 15 bp, Homo sapiens
aatctctgaatgttt

SEQ ID NO: 1932431 - DNA, 15 bp, Homo sapiens
atctctgaatgtttt

SEQ ID NO: 1932432 - DNA, 15 bp, Homo sapiens
tctgaatgtttttcc

SEQ ID NO: 1932433 - DNA, 15 bp, Homo sapiens
ctgaatgtttttccc

SEQ ID NO: 1932434 - DNA, 15 bp, Homo sapiens
tgaatgtttttccct

SEQ ID NO: 1932435 - DNA, 15 bp, Homo sapiens
gaatgtttttccctc

SEQ ID NO: 1932436 - DNA, 15 bp, Homo sapiens
aatgtttttccctct

SEQ ID NO: 1932437 - DNA, 15 bp, Homo sapiens
atgtttttccctctt

SEQ ID NO: 1932438 - DNA, 15 bp, Homo sapiens
tgtttttccctcttc

SEQ ID NO: 1932439 - DNA, 15 bp, Homo sapiens
gtttttccctcttct

SEQ ID NO: 1932440 - DNA, 15 bp, Homo sapiens
tttttccctcttctt

SEQ ID NO: 1932441 - DNA, 15 bp, Homo sapiens
ttttccctcttcttc

SEQ ID NO: 1932442 - DNA, 15 bp, Homo sapiens
tttccctcttcttct

SEQ ID NO: 1932443 - DNA, 15 bp, Homo sapiens
ttccctcttcttctc

SEQ ID NO: 1932444 - DNA, 15 bp, Homo sapiens
tccctcttcttctca

SEQ ID NO: 1932445 - DNA, 15 bp, Homo sapiens
ccctcttcttctcat

SEQ ID NO: 1932446 - DNA, 15 bp, Homo sapiens
cctcttcttctcatg

SEQ ID NO: 1932447 - DNA, 15 bp, Homo sapiens
ctcttcttctcatgg

SEQ ID NO: 1932448 - DNA, 15 bp, Homo sapiens
tcttcttctcatggg

SEQ ID NO: 1932449 - DNA, 15 bp, Homo sapiens
cttcttctcatggga

SEQ ID NO: 1932450 - DNA, 15 bp, Homo sapiens
ttcttctcatgggaa

SEQ ID NO: 1932451 - DNA, 15 bp, Homo sapiens
tcttctcatgggaag

SEQ ID NO: 1932452 - DNA, 15 bp, Homo sapiens
cttctcatgggaagg

SEQ ID NO: 1932453 - DNA, 15 bp, Homo sapiens
ttctcatgggaaggt

SEQ ID NO: 1932454 - DNA, 15 bp, Homo sapiens
tctcatgggaaggtt

SEQ ID NO: 1932455 - DNA, 15 bp, Homo sapiens
ctcatgggaaggtta

SEQ ID NO: 1932456 - DNA, 15 bp, Homo sapiens
tcatgggaaggttaa

SEQ ID NO: 1932457 - DNA, 15 bp, Homo sapiens
catgggaaggttaaa

SEQ ID NO: 1932458 - DNA, 15 bp, Homo sapiens
atgggaaggttaaat

SEQ ID NO: 1932459 - DNA, 15 bp, Homo sapiens
tgggaaggttaaatt

SEQ ID NO: 1932460 - DNA, 15 bp, Homo sapiens
gggaaggttaaatta

SEQ ID NO: 1932461 - DNA, 15 bp, Homo sapiens
ggaaggttaaattaa

SEQ ID NO: 1932462 - DNA, 15 bp, Homo sapiens
gaaggttaaattaag

SEQ ID NO: 1932463 - DNA, 15 bp, Homo sapiens
aaggttaaattaagg

SEQ ID NO: 1932464 - DNA, 15 bp, Homo sapiens
aggttaaattaaggc

SEQ ID NO: 1932465 - DNA, 15 bp, Homo sapiens
ggttaaattaaggca

SEQ ID NO: 1932466 - DNA, 15 bp, Homo sapiens
gttaaattaaggcat

SEQ ID NO: 1932467 - DNA, 15 bp, Homo sapiens
ttaaattaaggcatt

SEQ ID NO: 1932468 - DNA, 15 bp, Homo sapiens
taaattaaggcattt

SEQ ID NO: 1932469 - DNA, 15 bp, Homo sapiens
aaattaaggcatttg

SEQ ID NO: 1932470 - DNA, 15 bp, Homo sapiens
aattaaggcatttgt

SEQ ID NO: 1932471 - DNA, 15 bp, Homo sapiens
attaaggcatttgta

SEQ ID NO: 1932472 - DNA, 15 bp, Homo sapiens
ttaaggcatttgtaa

SEQ ID NO: 1932473 - DNA, 15 bp, Homo sapiens
taaggcatttgtaaa

SEQ ID NO: 1932474 - DNA, 15 bp, Homo sapiens
aaggcatttgtaaat

SEQ ID NO: 1932475 - DNA, 15 bp, Homo sapiens
aggcatttgtaaata

SEQ ID NO: 1932476 - DNA, 15 bp, Homo sapiens
ggcatttgtaaataa

SEQ ID NO: 1932477 - DNA, 15 bp, Homo sapiens
gcatttgtaaataac

SEQ ID NO: 1932478 - DNA, 15 bp, Homo sapiens
catttgtaaataacc

SEQ ID NO: 1932479 - DNA, 15 bp, Homo sapiens
atttgtaaataacct

SEQ ID NO: 1932480 - DNA, 15 bp, Homo sapiens
tttgtaaataaccta

SEQ ID NO: 1932481 - DNA, 15 bp, Homo sapiens
ttgtaaataacctag

SEQ ID NO: 1932482 - DNA, 15 bp, Homo sapiens
tgtaaataacctagc

SEQ ID NO: 1932483 - DNA, 15 bp, Homo sapiens
gtaaataacctagct

SEQ ID NO: 1932484 - DNA, 15 bp, Homo sapiens
taaataacctagctt

SEQ ID NO: 1932485 - DNA, 15 bp, Homo sapiens
aaataacctagctta

SEQ ID NO: 1932486 - DNA, 15 bp, Homo sapiens
aataacctagcttat

SEQ ID NO: 1932487 - DNA, 15 bp, Homo sapiens
ataacctagcttata

SEQ ID NO: 1932488 - DNA, 15 bp, Homo sapiens
taacctagcttatat

SEQ ID NO: 1932489 - DNA, 15 bp, Homo sapiens
aacctagcttatatt

SEQ ID NO: 1932490 - DNA, 15 bp, Homo sapiens
acctagcttatatta

SEQ ID NO: 1932491 - DNA, 15 bp, Homo sapiens
cctagcttatattag

SEQ ID NO: 1932492 - DNA, 15 bp, Homo sapiens
ctagcttatattagg

SEQ ID NO: 1932493 - DNA, 15 bp, Homo sapiens
tagcttatattaggt

SEQ ID NO: 1932494 - DNA, 15 bp, Homo sapiens
agcttatattaggtg

SEQ ID NO: 1932495 - DNA, 15 bp, Homo sapiens
gcttatattaggtgt

SEQ ID NO: 1932496 - DNA, 15 bp, Homo sapiens
cttatattaggtgtt

SEQ ID NO: 1932497 - DNA, 15 bp, Homo sapiens
ttatattaggtgttg

SEQ ID NO: 1932498 - DNA, 15 bp, Homo sapiens
tatattaggtgttgc

SEQ ID NO: 1932499 - DNA, 15 bp, Homo sapiens
atattaggtgttgca

SEQ ID NO: 1932500 - DNA, 15 bp, Homo sapiens
tattaggtgttgcat

SEQ ID NO: 1932501 - DNA, 15 bp, Homo sapiens
attaggtgttgcatc

SEQ ID NO: 1932502 - DNA, 15 bp, Homo sapiens
ttaggtgttgcatcg

SEQ ID NO: 1932503 - DNA, 15 bp, Homo sapiens
taggtgttgcatcga

SEQ ID NO: 1932504 - DNA, 15 bp, Homo sapiens
aggtgttgcatcgac

SEQ ID NO: 1932505 - DNA, 15 bp, Homo sapiens
ggtgttgcatcgacg

SEQ ID NO: 1932506 - DNA, 15 bp, Homo sapiens
gtgttgcatcgacgt

SEQ ID NO: 1932507 - DNA, 15 bp, Homo sapiens
tgttgcatcgacgta

SEQ ID NO: 1932508 - DNA, 15 bp, Homo sapiens
gttgcatcgacgtag

SEQ ID NO: 1932509 - DNA, 15 bp, Homo sapiens
ttgcatcgacgtagg

SEQ ID NO: 1932510 - DNA, 15 bp, Homo sapiens
tgcatcgacgtaggt

SEQ ID NO: 1932511 - DNA, 15 bp, Homo sapiens
gcatcgacgtaggtc

SEQ ID NO: 1932512 - DNA, 15 bp, Homo sapiens
catcgacgtaggtcc

SEQ ID NO: 1932513 - DNA, 15 bp, Homo sapiens
atcgacgtaggtcca

SEQ ID NO: 1932514 - DNA, 15 bp, Homo sapiens
tcgacgtaggtccat

SEQ ID NO: 1932515 - DNA, 15 bp, Homo sapiens
cgacgtaggtccatt

SEQ ID NO: 1932516 - DNA, 15 bp, Homo sapiens
gacgtaggtccattt

SEQ ID NO: 1932517 - DNA, 15 bp, Homo sapiens
acgtaggtccatttc

SEQ ID NO: 1932518 - DNA, 15 bp, Homo sapiens
cgtaggtccatttct

SEQ ID NO: 1932519 - DNA, 15 bp, Homo sapiens
gtaggtccatttctc

SEQ ID NO: 1932520 - DNA, 15 bp, Homo sapiens
taggtccatttctct

SEQ ID NO: 1932521 - DNA, 15 bp, Homo sapiens
aggtccatttctcta

SEQ ID NO: 1932522 - DNA, 15 bp, Homo sapiens
ggtccatttctctaa

SEQ ID NO: 1932523 - DNA, 15 bp, Homo sapiens
gtccatttctctaaa

SEQ ID NO: 1932524 - DNA, 15 bp, Homo sapiens
tccatttctctaaag

SEQ ID NO: 1932525 - DNA, 15 bp, Homo sapiens
ccatttctctaaaga

SEQ ID NO: 1932526 - DNA, 15 bp, Homo sapiens
catttctctaaagac

SEQ ID NO: 1932527 - DNA, 15 bp, Homo sapiens
atttctctaaagaca

SEQ ID NO: 1932528 - DNA, 15 bp, Homo sapiens
tttctctaaagacaa

SEQ ID NO: 1932529 - DNA, 15 bp, Homo sapiens
ttctctaaagacaaa

SEQ ID NO: 1932530 - DNA, 15 bp, Homo sapiens
tctctaaagacaaac

SEQ ID NO: 1932531 - DNA, 15 bp, Homo sapiens
ctctaaagacaaaca

SEQ ID NO: 1932532 - DNA, 15 bp, Homo sapiens
tctaaagacaaacac

SEQ ID NO: 1932533 - DNA, 15 bp, Homo sapiens
ctaaagacaaacact

SEQ ID NO: 1932534 - DNA, 15 bp, Homo sapiens
taaagacaaacactc

SEQ ID NO: 1932535 - DNA, 15 bp, Homo sapiens
aaagacaaacactct

SEQ ID NO: 1932536 - DNA, 15 bp, Homo sapiens
aagacaaacactctt

SEQ ID NO: 1932537 - DNA, 15 bp, Homo sapiens
agacaaacactcttc

SEQ ID NO: 1932538 - DNA, 15 bp, Homo sapiens
gacaaacactcttcc

SEQ ID NO: 1932539 - DNA, 15 bp, Homo sapiens
acaaacactcttcct

SEQ ID NO: 1932540 - DNA, 15 bp, Homo sapiens
caaacactcttcctg

SEQ ID NO: 1932541 - DNA, 15 bp, Homo sapiens
aaacactcttcctgt

SEQ ID NO: 1932542 - DNA, 15 bp, Homo sapiens
aacactcttcctgtt

SEQ ID NO: 1932543 - DNA, 15 bp, Homo sapiens
acactcttcctgtta

SEQ ID NO: 1932544 - DNA, 15 bp, Homo sapiens
cactcttcctgttag

SEQ ID NO: 1932545 - DNA, 15 bp, Homo sapiens
actcttcctgttagc

SEQ ID NO: 1932546 - DNA, 15 bp, Homo sapiens
ctcttcctgttagcc

SEQ ID NO: 1932547 - DNA, 15 bp, Homo sapiens
tcttcctgttagcca

SEQ ID NO: 1932548 - DNA, 15 bp, Homo sapiens
cttcctgttagccat

SEQ ID NO: 1932549 - DNA, 15 bp, Homo sapiens
ttcctgttagccatc

SEQ ID NO: 1932550 - DNA, 15 bp, Homo sapiens
tcctgttagccatca

SEQ ID NO: 1932551 - DNA, 15 bp, Homo sapiens
cctgttagccatcat

SEQ ID NO: 1932552 - DNA, 15 bp, Homo sapiens
tgttagccatcatgc

SEQ ID NO: 1932553 - DNA, 15 bp, Homo sapiens
gttagccatcatgct

SEQ ID NO: 1932554 - DNA, 15 bp, Homo sapiens
ttagccatcatgcta

SEQ ID NO: 1932555 - DNA, 15 bp, Homo sapiens
tagccatcatgctag

SEQ ID NO: 1932556 - DNA, 15 bp, Homo sapiens
agccatcatgctagg

SEQ ID NO: 1932557 - DNA, 15 bp, Homo sapiens
gccatcatgctagga

SEQ ID NO: 1932558 - DNA, 15 bp, Homo sapiens
ccatcatgctaggac

SEQ ID NO: 1932559 - DNA, 15 bp, Homo sapiens
catcatgctaggaca

SEQ ID NO: 1932560 - DNA, 15 bp, Homo sapiens
atcatgctaggacag

SEQ ID NO: 1932561 - DNA, 15 bp, Homo sapiens
tcatgctaggacagg

SEQ ID NO: 1932562 - DNA, 15 bp, Homo sapiens
catgctaggacaggc

SEQ ID NO: 1932563 - DNA, 15 bp, Homo sapiens
atgctaggacaggct

SEQ ID NO: 1932564 - DNA, 15 bp, Homo sapiens
tgctaggacaggctc

SEQ ID NO: 1932565 - DNA, 15 bp, Homo sapiens
gctaggacaggctct

SEQ ID NO: 1932566 - DNA, 15 bp, Homo sapiens
ctaggacaggctctc

SEQ ID NO: 1932567 - DNA, 15 bp, Homo sapiens
taggacaggctctcc

SEQ ID NO: 1932568 - DNA, 15 bp, Homo sapiens
aggacaggctctcca

SEQ ID NO: 1932569 - DNA, 15 bp, Homo sapiens
ggacaggctctccat

SEQ ID NO: 1932570 - DNA, 15 bp, Homo sapiens
gacaggctctccatg

SEQ ID NO: 1932571 - DNA, 15 bp, Homo sapiens
acaggctctccatgt

SEQ ID NO: 1932572 - DNA, 15 bp, Homo sapiens
caggctctccatgtt

SEQ ID NO: 1932573 - DNA, 15 bp, Homo sapiens
aggctctccatgttt

SEQ ID NO: 1932574 - DNA, 15 bp, Homo sapiens
ggctctccatgtttt

SEQ ID NO: 1932575 - DNA, 15 bp, Homo sapiens
gctctccatgttttt

SEQ ID NO: 1932576 - DNA, 15 bp, Homo sapiens
ctctccatgtttttg

SEQ ID NO: 1932577 - DNA, 15 bp, Homo sapiens
tctccatgtttttgg

SEQ ID NO: 1932578 - DNA, 15 bp, Homo sapiens
ctccatgtttttgga

SEQ ID NO: 1932579 - DNA, 15 bp, Homo sapiens
tccatgtttttggat

SEQ ID NO: 1932580 - DNA, 15 bp, Homo sapiens
ccatgtttttggatt

SEQ ID NO: 1932581 - DNA, 15 bp, Homo sapiens
catgtttttggattc

SEQ ID NO: 1932582 - DNA, 15 bp, Homo sapiens
atgtttttggattct

SEQ ID NO: 1932583 - DNA, 15 bp, Homo sapiens
tgtttttggattctg

SEQ ID NO: 1932584 - DNA, 15 bp, Homo sapiens
gtttttggattctgt

SEQ ID NO: 1932585 - DNA, 15 bp, Homo sapiens
tttttggattctgtt

SEQ ID NO: 1932586 - DNA, 15 bp, Homo sapiens
ttttggattctgttc

SEQ ID NO: 1932587 - DNA, 15 bp, Homo sapiens
tttggattctgttca

SEQ ID NO: 1932588 - DNA, 15 bp, Homo sapiens
ttggattctgttcaa

SEQ ID NO: 1932589 - DNA, 15 bp, Homo sapiens
tggattctgttcaag

SEQ ID NO: 1932590 - DNA, 15 bp, Homo sapiens
ggattctgttcaaga

SEQ ID NO: 1932591 - DNA, 15 bp, Homo sapiens
gattctgttcaagac

SEQ ID NO: 1932592 - DNA, 15 bp, Homo sapiens
attctgttcaagacc

SEQ ID NO: 1932593 - DNA, 15 bp, Homo sapiens
ttctgttcaagacct

SEQ ID NO: 1932594 - DNA, 15 bp, Homo sapiens
tctgttcaagacctt

SEQ ID NO: 1932595 - DNA, 15 bp, Homo sapiens
ctgttcaagaccttt

SEQ ID NO: 1932596 - DNA, 15 bp, Homo sapiens
tgttcaagacctttt

SEQ ID NO: 1932597 - DNA, 15 bp, Homo sapiens
gttcaagacctttta

SEQ ID NO: 1932598 - DNA, 15 bp, Homo sapiens
ttcaagaccttttaa

SEQ ID NO: 1932599 - DNA, 15 bp, Homo sapiens
tcaagaccttttaac

SEQ ID NO: 1932600 - DNA, 15 bp, Homo sapiens
caagaccttttaact

SEQ ID NO: 1932601 - DNA, 15 bp, Homo sapiens
aagaccttttaactt

SEQ ID NO: 1932602 - DNA, 15 bp, Homo sapiens
agaccttttaacttc

SEQ ID NO: 1932603 - DNA, 15 bp, Homo sapiens
gaccttttaacttca

SEQ ID NO: 1932604 - DNA, 15 bp, Homo sapiens
accttttaacttcac

SEQ ID NO: 1932605 - DNA, 15 bp, Homo sapiens
ccttttaacttcact

SEQ ID NO: 1932606 - DNA, 15 bp, Homo sapiens
cttttaacttcacta

SEQ ID NO: 1932607 - DNA, 15 bp, Homo sapiens
ttttaacttcactag

SEQ ID NO: 1932608 - DNA, 15 bp, Homo sapiens
tttaacttcactaga

SEQ ID NO: 1932609 - DNA, 15 bp, Homo sapiens
ttaacttcactagat

SEQ ID NO: 1932610 - DNA, 15 bp, Homo sapiens
taacttcactagata

SEQ ID NO: 1932611 - DNA, 15 bp, Homo sapiens
aacttcactagatac

SEQ ID NO: 1932612 - DNA, 15 bp, Homo sapiens
acttcactagatact

SEQ ID NO: 1932613 - DNA, 15 bp, Homo sapiens
cttcactagatactg

SEQ ID NO: 1932614 - DNA, 15 bp, Homo sapiens
ttcactagatactgt

SEQ ID NO: 1932615 - DNA, 15 bp, Homo sapiens
tcactagatactgtt

SEQ ID NO: 1932616 - DNA, 15 bp, Homo sapiens
cactagatactgtta

SEQ ID NO: 1932617 - DNA, 15 bp, Homo sapiens
actagatactgttat

SEQ ID NO: 1932618 - DNA, 15 bp, Homo sapiens
ctagatactgttata

SEQ ID NO: 1932619 - DNA, 15 bp, Homo sapiens
tagatactgttatat

SEQ ID NO: 1932620 - DNA, 15 bp, Homo sapiens
agatactgttatata

SEQ ID NO: 1932621 - DNA, 15 bp, Homo sapiens
gatactgttatatag

SEQ ID NO: 1932622 - DNA, 15 bp, Homo sapiens
atactgttatatagc

SEQ ID NO: 1932623 - DNA, 15 bp, Homo sapiens
tactgttatatagca

SEQ ID NO: 1932624 - DNA, 15 bp, Homo sapiens
actgttatatagcaa

SEQ ID NO: 1932625 - DNA, 15 bp, Homo sapiens
ctgttatatagcaat

SEQ ID NO: 1932626 - DNA, 15 bp, Homo sapiens
tgttatatagcaata

SEQ ID NO: 1932627 - DNA, 15 bp, Homo sapiens
gttatatagcaatac

SEQ ID NO: 1932628 - DNA, 15 bp, Homo sapiens
ttatatagcaatacc

SEQ ID NO: 1932629 - DNA, 15 bp, Homo sapiens
tatatagcaataccc

SEQ ID NO: 1932630 - DNA, 15 bp, Homo sapiens
atatagcaataccca

SEQ ID NO: 1932631 - DNA, 15 bp, Homo sapiens
tatagcaatacccaa

SEQ ID NO: 1932632 - DNA, 15 bp, Homo sapiens
atagcaatacccaat

SEQ ID NO: 1932633 - DNA, 15 bp, Homo sapiens
tagcaatacccaatt

SEQ ID NO: 1932634 - DNA, 15 bp, Homo sapiens
agcaatacccaattt

SEQ ID NO: 1932635 - DNA, 15 bp, Homo sapiens
gcaatacccaatttt

SEQ ID NO: 1932636 - DNA, 15 bp, Homo sapiens
caatacccaattttc

SEQ ID NO: 1932637 - DNA, 15 bp, Homo sapiens
aatacccaattttct

SEQ ID NO: 1932638 - DNA, 15 bp, Homo sapiens
atacccaattttcta

SEQ ID NO: 1932639 - DNA, 15 bp, Homo sapiens
cccaattttctaaag

SEQ ID NO: 1932640 - DNA, 15 bp, Homo sapiens
ccaattttctaaagt

SEQ ID NO: 1932641 - DNA, 15 bp, Homo sapiens
caattttctaaagtg

SEQ ID NO: 1932642 - DNA, 15 bp, Homo sapiens
aattttctaaagtgc

SEQ ID NO: 1932643 - DNA, 15 bp, Homo sapiens
attttctaaagtgca

SEQ ID NO: 1932644 - DNA, 15 bp, Homo sapiens
ttttctaaagtgcat

SEQ ID NO: 1932645 - DNA, 15 bp, Homo sapiens
tttctaaagtgcatg

SEQ ID NO: 1932646 - DNA, 15 bp, Homo sapiens
ttctaaagtgcatgg

SEQ ID NO: 1932647 - DNA, 15 bp, Homo sapiens
tctaaagtgcatggc

SEQ ID NO: 1932648 - DNA, 15 bp, Homo sapiens
ctaaagtgcatggca

SEQ ID NO: 1932649 - DNA, 15 bp, Homo sapiens
taaagtgcatggcaa

SEQ ID NO: 1932650 - DNA, 15 bp, Homo sapiens
aaagtgcatggcaaa

SEQ ID NO: 1932651 - DNA, 15 bp, Homo sapiens
aagtgcatggcaaaa

SEQ ID NO: 1932652 - DNA, 15 bp, Homo sapiens
agtgcatggcaaaac

SEQ ID NO: 1932653 - DNA, 15 bp, Homo sapiens
gtgcatggcaaaaca

SEQ ID NO: 1932654 - DNA, 15 bp, Homo sapiens
tgcatggcaaaacaa

SEQ ID NO: 1932655 - DNA, 15 bp, Homo sapiens
gcatggcaaaacaaa

SEQ ID NO: 1932656 - DNA, 15 bp, Homo sapiens
catggcaaaacaaaa

SEQ ID NO: 1932657 - DNA, 15 bp, Homo sapiens
atggcaaaacaaaaa

SEQ ID NO: 1932658 - DNA, 15 bp, Homo sapiens
tggcaaaacaaaaat

SEQ ID NO: 1932659 - DNA, 15 bp, Homo sapiens
ggcaaaacaaaaatg

SEQ ID NO: 1932660 - DNA, 15 bp, Homo sapiens
gcaaaacaaaaatgg

SEQ ID NO: 1932661 - DNA, 15 bp, Homo sapiens
caaaacaaaaatggg

SEQ ID NO: 1932662 - DNA, 15 bp, Homo sapiens
aaaacaaaaatggga

SEQ ID NO: 1932663 - DNA, 15 bp, Homo sapiens
aaacaaaaatgggaa

SEQ ID NO: 1932664 - DNA, 15 bp, Homo sapiens
aacaaaaatgggaat

SEQ ID NO: 1932665 - DNA, 15 bp, Homo sapiens
acaaaaatgggaatt

SEQ ID NO: 1932666 - DNA, 15 bp, Homo sapiens
caaaaatgggaatta

SEQ ID NO: 1932667 - DNA, 15 bp, Homo sapiens
aaaaatgggaattag

SEQ ID NO: 1932668 - DNA, 15 bp, Homo sapiens
aaaatgggaattaga

SEQ ID NO: 1932669 - DNA, 15 bp, Homo sapiens
aaatgggaattagat

SEQ ID NO: 1932670 - DNA, 15 bp, Homo sapiens
aatgggaattagata

SEQ ID NO: 1932671 - DNA, 15 bp, Homo sapiens
atgggaattagatac

SEQ ID NO: 1932672 - DNA, 15 bp, Homo sapiens
tgggaattagatact

SEQ ID NO: 1932673 - DNA, 15 bp, Homo sapiens
gggaattagatacta

SEQ ID NO: 1932674 - DNA, 15 bp, Homo sapiens
ggaattagatactag

SEQ ID NO: 1932675 - DNA, 15 bp, Homo sapiens
gaattagatactaga

SEQ ID NO: 1932676 - DNA, 15 bp, Homo sapiens
aattagatactagaa

SEQ ID NO: 1932677 - DNA, 15 bp, Homo sapiens
attagatactagaat

SEQ ID NO: 1932678 - DNA, 15 bp, Homo sapiens
ttagatactagaata

SEQ ID NO: 1932679 - DNA, 15 bp, Homo sapiens
tagatactagaatac

SEQ ID NO: 1932680 - DNA, 15 bp, Homo sapiens
agatactagaatact

SEQ ID NO: 1932681 - DNA, 15 bp, Homo sapiens
gatactagaatacta

SEQ ID NO: 1932682 - DNA, 15 bp, Homo sapiens
atactagaatactaa

SEQ ID NO: 1932683 - DNA, 15 bp, Homo sapiens
tactagaatactaaa

SEQ ID NO: 1932684 - DNA, 15 bp, Homo sapiens
actagaatactaaaa

SEQ ID NO: 1932685 - DNA, 15 bp, Homo sapiens
ctagaatactaaaac

SEQ ID NO: 1932686 - DNA, 15 bp, Homo sapiens
tagaatactaaaact

SEQ ID NO: 1932687 - DNA, 15 bp, Homo sapiens
agaatactaaaactc

SEQ ID NO: 1932688 - DNA, 15 bp, Homo sapiens
gaatactaaaactct

SEQ ID NO: 1932689 - DNA, 15 bp, Homo sapiens
aatactaaaactctt

SEQ ID NO: 1932690 - DNA, 15 bp, Homo sapiens
atactaaaactcttc

SEQ ID NO: 1932691 - DNA, 15 bp, Homo sapiens
tactaaaactcttct

SEQ ID NO: 1932692 - DNA, 15 bp, Homo sapiens
actaaaactcttcta

SEQ ID NO: 1932693 - DNA, 15 bp, Homo sapiens
ctaaaactcttctag

SEQ ID NO: 1932694 - DNA, 15 bp, Homo sapiens
taaaactcttctaga

SEQ ID NO: 1932695 - DNA, 15 bp, Homo sapiens
aaaactcttctagac

SEQ ID NO: 1932696 - DNA, 15 bp, Homo sapiens
aaactcttctagacc

SEQ ID NO: 1932697 - DNA, 15 bp, Homo sapiens
aactcttctagacca

SEQ ID NO: 1932698 - DNA, 15 bp, Homo sapiens
actcttctagaccaa

SEQ ID NO: 1932699 - DNA, 15 bp, Homo sapiens
ctcttctagaccaac

SEQ ID NO: 1932700 - DNA, 15 bp, Homo sapiens
tcttctagaccaacc

SEQ ID NO: 1932701 - DNA, 15 bp, Homo sapiens
cttctagaccaaccc

SEQ ID NO: 1932702 - DNA, 15 bp, Homo sapiens
ttctagaccaaccct

SEQ ID NO: 1932703 - DNA, 15 bp, Homo sapiens
tctagaccaaccctt

SEQ ID NO: 1932704 - DNA, 15 bp, Homo sapiens
ctagaccaacccttt

SEQ ID NO: 1932705 - DNA, 15 bp, Homo sapiens
tagaccaaccctttt

SEQ ID NO: 1932706 - DNA, 15 bp, Homo sapiens
agaccaacccttttg

SEQ ID NO: 1932707 - DNA, 15 bp, Homo sapiens
gaccaacccttttgt

SEQ ID NO: 1932708 - DNA, 15 bp, Homo sapiens
accaacccttttgta

SEQ ID NO: 1932709 - DNA, 15 bp, Homo sapiens
ccaacccttttgtac

SEQ ID NO: 1932710 - DNA, 15 bp, Homo sapiens
caacccttttgtacg

SEQ ID NO: 1932711 - DNA, 15 bp, Homo sapiens
aacccttttgtacga

SEQ ID NO: 1932712 - DNA, 15 bp, Homo sapiens
acccttttgtacgac

SEQ ID NO: 1932713 - DNA, 15 bp, Homo sapiens
cccttttgtacgaca

SEQ ID NO: 1932714 - DNA, 15 bp, Homo sapiens
ccttttgtacgacaa

SEQ ID NO: 1932715 - DNA, 15 bp, Homo sapiens
cttttgtacgacaag

SEQ ID NO: 1932716 - DNA, 15 bp, Homo sapiens
ttttgtacgacaagg

SEQ ID NO: 1932717 - DNA, 15 bp, Homo sapiens
tttgtacgacaagga

SEQ ID NO: 1932718 - DNA, 15 bp, Homo sapiens
ttgtacgacaaggag

SEQ ID NO: 1932719 - DNA, 15 bp, Homo sapiens
tgtacgacaaggagg

SEQ ID NO: 1932720 - DNA, 15 bp, Homo sapiens
gtacgacaaggagga

SEQ ID NO: 1932721 - DNA, 15 bp, Homo sapiens
tacgacaaggaggaa

SEQ ID NO: 1932722 - DNA, 15 bp, Homo sapiens
acgacaaggaggaaa

SEQ ID NO: 1932723 - DNA, 15 bp, Homo sapiens
cgacaaggaggaaac

SEQ ID NO: 1932724 - DNA, 15 bp, Homo sapiens
gacaaggaggaaact

SEQ ID NO: 1932725 - DNA, 15 bp, Homo sapiens
acaaggaggaaacta

SEQ ID NO: 1932726 - DNA, 15 bp, Homo sapiens
caaggaggaaactaa

SEQ ID NO: 1932727 - DNA, 15 bp, Homo sapiens
aaggaggaaactaat

SEQ ID NO: 1932728 - DNA, 15 bp, Homo sapiens
aggaggaaactaata

SEQ ID NO: 1932729 - DNA, 15 bp, Homo sapiens
ggaggaaactaatat

SEQ ID NO: 1932730 - DNA, 15 bp, Homo sapiens
gaggaaactaatatt

SEQ ID NO: 1932731 - DNA, 15 bp, Homo sapiens
aggaaactaatattg

SEQ ID NO: 1932732 - DNA, 15 bp, Homo sapiens
ggaaactaatattgc

SEQ ID NO: 1932733 - DNA, 15 bp, Homo sapiens
gaaactaatattgct

SEQ ID NO: 1932734 - DNA, 15 bp, Homo sapiens
aaactaatattgcta

SEQ ID NO: 1932735 - DNA, 15 bp, Homo sapiens
aactaatattgctat

SEQ ID NO: 1932736 - DNA, 15 bp, Homo sapiens
actaatattgctatg

SEQ ID NO: 1932737 - DNA, 15 bp, Homo sapiens
ctaatattgctatgg

SEQ ID NO: 1932738 - DNA, 15 bp, Homo sapiens
taatattgctatggt

SEQ ID NO: 1932739 - DNA, 15 bp, Homo sapiens
aatattgctatggtt

SEQ ID NO: 1932740 - DNA, 15 bp, Homo sapiens
atattgctatggttt

SEQ ID NO: 1932741 - DNA, 15 bp, Homo sapiens
tattgctatggttta

SEQ ID NO: 1932742 - DNA, 15 bp, Homo sapiens
attgctatggtttaa

SEQ ID NO: 1932743 - DNA, 15 bp, Homo sapiens
ttgctatggtttaaa

SEQ ID NO: 1932744 - DNA, 15 bp, Homo sapiens
tgctatggtttaaaa

SEQ ID NO: 1932745 - DNA, 15 bp, Homo sapiens
gctatggtttaaaag

SEQ ID NO: 1932746 - DNA, 15 bp, Homo sapiens
ctatggtttaaaagt

SEQ ID NO: 1932747 - DNA, 15 bp, Homo sapiens
tatggtttaaaagtg

SEQ ID NO: 1932748 - DNA, 15 bp, Homo sapiens
atggtttaaaagtgt

SEQ ID NO: 1932749 - DNA, 15 bp, Homo sapiens
tggtttaaaagtgtc

SEQ ID NO: 1932750 - DNA, 15 bp, Homo sapiens
ggtttaaaagtgtcc

SEQ ID NO: 1932751 - DNA, 15 bp, Homo sapiens
gtttaaaagtgtccc

SEQ ID NO: 1932752 - DNA, 15 bp, Homo sapiens
tttaaaagtgtcccc

SEQ ID NO: 1932753 - DNA, 15 bp, Homo sapiens
ttaaaagtgtccccc

SEQ ID NO: 1932754 - DNA, 15 bp, Homo sapiens
taaaagtgtccccca

SEQ ID NO: 1932755 - DNA, 15 bp, Homo sapiens
aaaagtgtcccccaa

SEQ ID NO: 1932756 - DNA, 15 bp, Homo sapiens
aaagtgtcccccaaa

SEQ ID NO: 1932757 - DNA, 15 bp, Homo sapiens
aagtgtcccccaaat

SEQ ID NO: 1932758 - DNA, 15 bp, Homo sapiens
agtgtcccccaaatt

SEQ ID NO: 1932759 - DNA, 15 bp, Homo sapiens
gtgtcccccaaattt

SEQ ID NO: 1932760 - DNA, 15 bp, Homo sapiens
tgtcccccaaattta

SEQ ID NO: 1932761 - DNA, 15 bp, Homo sapiens
gtcccccaaatttaa

SEQ ID NO: 1932762 - DNA, 15 bp, Homo sapiens
tcccccaaatttaat

SEQ ID NO: 1932763 - DNA, 15 bp, Homo sapiens
cccccaaatttaatg

SEQ ID NO: 1932764 - DNA, 15 bp, Homo sapiens
ccccaaatttaatgt

SEQ ID NO: 1932765 - DNA, 15 bp, Homo sapiens
cccaaatttaatgtg

SEQ ID NO: 1932766 - DNA, 15 bp, Homo sapiens
ccaaatttaatgtgt

SEQ ID NO: 1932767 - DNA, 15 bp, Homo sapiens
caaatttaatgtgtt

SEQ ID NO: 1932768 - DNA, 15 bp, Homo sapiens
aaatttaatgtgtta

SEQ ID NO: 1932769 - DNA, 15 bp, Homo sapiens
aatttaatgtgttag

SEQ ID NO: 1932770 - DNA, 15 bp, Homo sapiens
atttaatgtgttaga

SEQ ID NO: 1932771 - DNA, 15 bp, Homo sapiens
tttaatgtgttagaa

SEQ ID NO: 1932772 - DNA, 15 bp, Homo sapiens
ttaatgtgttagaac

SEQ ID NO: 1932773 - DNA, 15 bp, Homo sapiens
taatgtgttagaaca

SEQ ID NO: 1932774 - DNA, 15 bp, Homo sapiens
aatgtgttagaacat

SEQ ID NO: 1932775 - DNA, 15 bp, Homo sapiens
atgtgttagaacata

SEQ ID NO: 1932776 - DNA, 15 bp, Homo sapiens
tgtgttagaacatat

SEQ ID NO: 1932777 - DNA, 15 bp, Homo sapiens
gtgttagaacatatt

SEQ ID NO: 1932778 - DNA, 15 bp, Homo sapiens
tgttagaacatattc

SEQ ID NO: 1932779 - DNA, 15 bp, Homo sapiens
gttagaacatattcc

SEQ ID NO: 1932780 - DNA, 15 bp, Homo sapiens
ttagaacatattccc

SEQ ID NO: 1932781 - DNA, 15 bp, Homo sapiens
tagaacatattcccc

SEQ ID NO: 1932782 - DNA, 15 bp, Homo sapiens
agaacatattcccca

SEQ ID NO: 1932783 - DNA, 15 bp, Homo sapiens
gaacatattccccaa

SEQ ID NO: 1932784 - DNA, 15 bp, Homo sapiens
aacatattccccaaa

SEQ ID NO: 1932785 - DNA, 15 bp, Homo sapiens
acatattccccaaat

SEQ ID NO: 1932786 - DNA, 15 bp, Homo sapiens
catattccccaaatt

SEQ ID NO: 1932787 - DNA, 15 bp, Homo sapiens
atattccccaaattc

SEQ ID NO: 1932788 - DNA, 15 bp, Homo sapiens
tattccccaaattca

SEQ ID NO: 1932789 - DNA, 15 bp, Homo sapiens
attccccaaattcat

SEQ ID NO: 1932790 - DNA, 15 bp, Homo sapiens
ttccccaaattcata

SEQ ID NO: 1932791 - DNA, 15 bp, Homo sapiens
tccccaaattcatat

SEQ ID NO: 1932792 - DNA, 15 bp, Homo sapiens
ccccaaattcatatt

SEQ ID NO: 1932793 - DNA, 15 bp, Homo sapiens
cccaaattcatattt

SEQ ID NO: 1932794 - DNA, 15 bp, Homo sapiens
ccaaattcatatttt

SEQ ID NO: 1932795 - DNA, 15 bp, Homo sapiens
caaattcatattttt

SEQ ID NO: 1932796 - DNA, 15 bp, Homo sapiens
aaattcatatttttg

SEQ ID NO: 1932797 - DNA, 15 bp, Homo sapiens
aattcatatttttga

SEQ ID NO: 1932798 - DNA, 15 bp, Homo sapiens
attcatatttttgat

SEQ ID NO: 1932799 - DNA, 15 bp, Homo sapiens
ttcatatttttgatg

SEQ ID NO: 1932800 - DNA, 15 bp, Homo sapiens
tcatatttttgatgg

SEQ ID NO: 1932801 - DNA, 15 bp, Homo sapiens
catatttttgatggc

SEQ ID NO: 1932802 - DNA, 15 bp, Homo sapiens
atatttttgatggca

SEQ ID NO: 1932803 - DNA, 15 bp, Homo sapiens
tatttttgatggcat

SEQ ID NO: 1932804 - DNA, 15 bp, Homo sapiens
atttttgatggcatt

SEQ ID NO: 1932805 - DNA, 15 bp, Homo sapiens
tttttgatggcattt

SEQ ID NO: 1932806 - DNA, 15 bp, Homo sapiens
ttttgatggcatttc

SEQ ID NO: 1932807 - DNA, 15 bp, Homo sapiens
tttgatggcatttcg

SEQ ID NO: 1932808 - DNA, 15 bp, Homo sapiens
ttgatggcatttcga

SEQ ID NO: 1932809 - DNA, 15 bp, Homo sapiens
tgatggcatttcgag

SEQ ID NO: 1932810 - DNA, 15 bp, Homo sapiens
gatggcatttcgaga

SEQ ID NO: 1932811 - DNA, 15 bp, Homo sapiens
atggcatttcgagat

SEQ ID NO: 1932812 - DNA, 15 bp, Homo sapiens
tggcatttcgagatg

SEQ ID NO: 1932813 - DNA, 15 bp, Homo sapiens
ggcatttcgagatgg

SEQ ID NO: 1932814 - DNA, 15 bp, Homo sapiens
gcatttcgagatggg

SEQ ID NO: 1932815 - DNA, 15 bp, Homo sapiens
catttcgagatgggg

SEQ ID NO: 1932816 - DNA, 15 bp, Homo sapiens
atttcgagatggggc

SEQ ID NO: 1932817 - DNA, 15 bp, Homo sapiens
tttcgagatggggcc

SEQ ID NO: 1932818 - DNA, 15 bp, Homo sapiens
ttcgagatggggcct

SEQ ID NO: 1932819 - DNA, 15 bp, Homo sapiens
tcgagatggggcctt

SEQ ID NO: 1932820 - DNA, 15 bp, Homo sapiens
cgagatggggccttt

SEQ ID NO: 1932821 - DNA, 15 bp, Homo sapiens
gagatggggcctttg

SEQ ID NO: 1932822 - DNA, 15 bp, Homo sapiens
agatggggcctttgg

SEQ ID NO: 1932823 - DNA, 15 bp, Homo sapiens
gatggggcctttggg

SEQ ID NO: 1932824 - DNA, 15 bp, Homo sapiens
atggggcctttggga

SEQ ID NO: 1932825 - DNA, 15 bp, Homo sapiens
tggggcctttgggag

SEQ ID NO: 1932826 - DNA, 15 bp, Homo sapiens
ggggcctttgggaga

SEQ ID NO: 1932827 - DNA, 15 bp, Homo sapiens
gggcctttgggagat

SEQ ID NO: 1932828 - DNA, 15 bp, Homo sapiens
ggcctttgggagata

SEQ ID NO: 1932829 - DNA, 15 bp, Homo sapiens
gcctttgggagataa

SEQ ID NO: 1932830 - DNA, 15 bp, Homo sapiens
cctttgggagataat

SEQ ID NO: 1932831 - DNA, 15 bp, Homo sapiens
ctttgggagataatt

SEQ ID NO: 1932832 - DNA, 15 bp, Homo sapiens
tttgggagataatta

SEQ ID NO: 1932833 - DNA, 15 bp, Homo sapiens
ttgggagataattag

SEQ ID NO: 1932834 - DNA, 15 bp, Homo sapiens
tgggagataattagg

SEQ ID NO: 1932835 - DNA, 15 bp, Homo sapiens
gggagataattagga

SEQ ID NO: 1932836 - DNA, 15 bp, Homo sapiens
ggagataattaggat

SEQ ID NO: 1932837 - DNA, 15 bp, Homo sapiens
gagataattaggatt

SEQ ID NO: 1932838 - DNA, 15 bp, Homo sapiens
agataattaggatta

SEQ ID NO: 1932839 - DNA, 15 bp, Homo sapiens
gataattaggattaa

SEQ ID NO: 1932840 - DNA, 15 bp, Homo sapiens
ataattaggattaaa

SEQ ID NO: 1932841 - DNA, 15 bp, Homo sapiens
taattaggattaaat

SEQ ID NO: 1932842 - DNA, 15 bp, Homo sapiens
aattaggattaaata

SEQ ID NO: 1932843 - DNA, 15 bp, Homo sapiens
attaggattaaataa

SEQ ID NO: 1932844 - DNA, 15 bp, Homo sapiens
ttaggattaaataag

SEQ ID NO: 1932845 - DNA, 15 bp, Homo sapiens
taggattaaataagg

SEQ ID NO: 1932846 - DNA, 15 bp, Homo sapiens
aggattaaataaggt

SEQ ID NO: 1932847 - DNA, 15 bp, Homo sapiens
ggattaaataaggtc

SEQ ID NO: 1932848 - DNA, 15 bp, Homo sapiens
gattaaataaggtca

SEQ ID NO: 1932849 - DNA, 15 bp, Homo sapiens
attaaataaggtcat

SEQ ID NO: 1932850 - DNA, 15 bp, Homo sapiens
ttaaataaggtcatc

SEQ ID NO: 1932851 - DNA, 15 bp, Homo sapiens
taaataaggtcatca

SEQ ID NO: 1932852 - DNA, 15 bp, Homo sapiens
aaataaggtcatcag

SEQ ID NO: 1932853 - DNA, 15 bp, Homo sapiens
aataaggtcatcagg

SEQ ID NO: 1932854 - DNA, 15 bp, Homo sapiens
ataaggtcatcaggg

SEQ ID NO: 1932855 - DNA, 15 bp, Homo sapiens
taaggtcatcagggt

SEQ ID NO: 1932856 - DNA, 15 bp, Homo sapiens
aaggtcatcagggtg

SEQ ID NO: 1932857 - DNA, 15 bp, Homo sapiens
aggtcatcagggtgt

SEQ ID NO: 1932858 - DNA, 15 bp, Homo sapiens
ggtcatcagggtgtg

SEQ ID NO: 1932859 - DNA, 15 bp, Homo sapiens
gtcatcagggtgtgg

SEQ ID NO: 1932860 - DNA, 15 bp, Homo sapiens
tcatcagggtgtggg

SEQ ID NO: 1932861 - DNA, 15 bp, Homo sapiens
catcagggtgtgggg

SEQ ID NO: 1932862 - DNA, 15 bp, Homo sapiens
atcagggtgtggggc

SEQ ID NO: 1932863 - DNA, 15 bp, Homo sapiens
tcagggtgtggggcc

SEQ ID NO: 1932864 - DNA, 15 bp, Homo sapiens
cagggtgtggggcct

SEQ ID NO: 1932865 - DNA, 15 bp, Homo sapiens
agggtgtggggcctg

SEQ ID NO: 1932866 - DNA, 15 bp, Homo sapiens
gggtgtggggcctga

SEQ ID NO: 1932867 - DNA, 15 bp, Homo sapiens
ggtgtggggcctgat

SEQ ID NO: 1932868 - DNA, 15 bp, Homo sapiens
gtgtggggcctgatg

SEQ ID NO: 1932869 - DNA, 15 bp, Homo sapiens
tgtggggcctgatgg

SEQ ID NO: 1932870 - DNA, 15 bp, Homo sapiens
ggggcctgatgggac

SEQ ID NO: 1932871 - DNA, 15 bp, Homo sapiens
gggcctgatgggact

SEQ ID NO: 1932872 - DNA, 15 bp, Homo sapiens
ggcctgatgggactg

SEQ ID NO: 1932873 - DNA, 15 bp, Homo sapiens
gcctgatgggactgg

SEQ ID NO: 1932874 - DNA, 15 bp, Homo sapiens
cctgatgggactggt

SEQ ID NO: 1932875 - DNA, 15 bp, Homo sapiens
ctgatgggactggtg

SEQ ID NO: 1932876 - DNA, 15 bp, Homo sapiens
tgatgggactggtgg

SEQ ID NO: 1932877 - DNA, 15 bp, Homo sapiens
gatgggactggtggc

SEQ ID NO: 1932878 - DNA, 15 bp, Homo sapiens
atgggactggtggct

SEQ ID NO: 1932879 - DNA, 15 bp, Homo sapiens
tgggactggtggctt

SEQ ID NO: 1932880 - DNA, 15 bp, Homo sapiens
gggactggtggcttt

SEQ ID NO: 1932881 - DNA, 15 bp, Homo sapiens
ggactggtggcttta

SEQ ID NO: 1932882 - DNA, 15 bp, Homo sapiens
gactggtggctttat

SEQ ID NO: 1932883 - DNA, 15 bp, Homo sapiens
actggtggctttata

SEQ ID NO: 1932884 - DNA, 15 bp, Homo sapiens
ctggtggctttatat

SEQ ID NO: 1932885 - DNA, 15 bp, Homo sapiens
tggtggctttatatg

SEQ ID NO: 1932886 - DNA, 15 bp, Homo sapiens
ggtggctttatatgt

SEQ ID NO: 1932887 - DNA, 15 bp, Homo sapiens
gtggctttatatgta

SEQ ID NO: 1932888 - DNA, 15 bp, Homo sapiens
tggctttatatgtac

SEQ ID NO: 1932889 - DNA, 15 bp, Homo sapiens
ggctttatatgtaca

SEQ ID NO: 1932890 - DNA, 15 bp, Homo sapiens
gctttatatgtacag

SEQ ID NO: 1932891 - DNA, 15 bp, Homo sapiens
ctttatatgtacagt

SEQ ID NO: 1932892 - DNA, 15 bp, Homo sapiens
tttatatgtacagtg

SEQ ID NO: 1932893 - DNA, 15 bp, Homo sapiens
ttatatgtacagtgg

SEQ ID NO: 1932894 - DNA, 15 bp, Homo sapiens
tatatgtacagtggc

SEQ ID NO: 1932895 - DNA, 15 bp, Homo sapiens
atatgtacagtggcc

SEQ ID NO: 1932896 - DNA, 15 bp, Homo sapiens
tatgtacagtggcct

SEQ ID NO: 1932897 - DNA, 15 bp, Homo sapiens
atgtacagtggcctg

SEQ ID NO: 1932898 - DNA, 15 bp, Homo sapiens
tgtacagtggcctga

SEQ ID NO: 1932899 - DNA, 15 bp, Homo sapiens
gtacagtggcctgag

SEQ ID NO: 1932900 - DNA, 15 bp, Homo sapiens
tacagtggcctgagt

SEQ ID NO: 1932901 - DNA, 15 bp, Homo sapiens
acagtggcctgagtt

SEQ ID NO: 1932902 - DNA, 15 bp, Homo sapiens
cagtggcctgagtta

SEQ ID NO: 1932903 - DNA, 15 bp, Homo sapiens
agtggcctgagttaa

SEQ ID NO: 1932904 - DNA, 15 bp, Homo sapiens
gtggcctgagttaat

SEQ ID NO: 1932905 - DNA, 15 bp, Homo sapiens
tggcctgagttaata

SEQ ID NO: 1932906 - DNA, 15 bp, Homo sapiens
ggcctgagttaatag

SEQ ID NO: 1932907 - DNA, 15 bp, Homo sapiens
gcctgagttaatagg

SEQ ID NO: 1932908 - DNA, 15 bp, Homo sapiens
cctgagttaataggc

SEQ ID NO: 1932909 - DNA, 15 bp, Homo sapiens
ctgagttaataggca

SEQ ID NO: 1932910 - DNA, 15 bp, Homo sapiens
tgagttaataggcat

SEQ ID NO: 1932911 - DNA, 15 bp, Homo sapiens
gagttaataggcatt

SEQ ID NO: 1932912 - DNA, 15 bp, Homo sapiens
agttaataggcattc

SEQ ID NO: 1932913 - DNA, 15 bp, Homo sapiens
gttaataggcattct

SEQ ID NO: 1932914 - DNA, 15 bp, Homo sapiens
ttaataggcattctt

SEQ ID NO: 1932915 - DNA, 15 bp, Homo sapiens
taataggcattcttg

SEQ ID NO: 1932916 - DNA, 15 bp, Homo sapiens
aataggcattcttgc

SEQ ID NO: 1932917 - DNA, 15 bp, Homo sapiens
ataggcattcttgct

SEQ ID NO: 1932918 - DNA, 15 bp, Homo sapiens
taggcattcttgctt

SEQ ID NO: 1932919 - DNA, 15 bp, Homo sapiens
aggcattcttgcttt

SEQ ID NO: 1932920 - DNA, 15 bp, Homo sapiens
ggcattcttgctttc

SEQ ID NO: 1932921 - DNA, 15 bp, Homo sapiens
gcattcttgctttct

SEQ ID NO: 1932922 - DNA, 15 bp, Homo sapiens
cattcttgctttctt

SEQ ID NO: 1932923 - DNA, 15 bp, Homo sapiens
attcttgctttcttg

SEQ ID NO: 1932924 - DNA, 15 bp, Homo sapiens
ttcttgctttcttgc

SEQ ID NO: 1932925 - DNA, 15 bp, Homo sapiens
tcttgctttcttgct

SEQ ID NO: 1932926 - DNA, 15 bp, Homo sapiens
cttgctttcttgcta

SEQ ID NO: 1932927 - DNA, 15 bp, Homo sapiens
ttgctttcttgctat

SEQ ID NO: 1932928 - DNA, 15 bp, Homo sapiens
tgctttcttgctatg

SEQ ID NO: 1932929 - DNA, 15 bp, Homo sapiens
gctttcttgctatgg

SEQ ID NO: 1932930 - DNA, 15 bp, Homo sapiens
ctttcttgctatgga

SEQ ID NO: 1932931 - DNA, 15 bp, Homo sapiens
tttcttgctatggaa

SEQ ID NO: 1932932 - DNA, 15 bp, Homo sapiens
ttcttgctatggaac

SEQ ID NO: 1932933 - DNA, 15 bp, Homo sapiens
tcttgctatggaact

SEQ ID NO: 1932934 - DNA, 15 bp, Homo sapiens
cttgctatggaactg

SEQ ID NO: 1932935 - DNA, 15 bp, Homo sapiens
ttgctatggaactgc

SEQ ID NO: 1932936 - DNA, 15 bp, Homo sapiens
tgctatggaactgcc

SEQ ID NO: 1932937 - DNA, 15 bp, Homo sapiens
gctatggaactgcct

SEQ ID NO: 1932938 - DNA, 15 bp, Homo sapiens
ctatggaactgcctt

SEQ ID NO: 1932939 - DNA, 15 bp, Homo sapiens
tatggaactgccttc

SEQ ID NO: 1932940 - DNA, 15 bp, Homo sapiens
atggaactgccttct

SEQ ID NO: 1932941 - DNA, 15 bp, Homo sapiens
tggaactgccttctg

SEQ ID NO: 1932942 - DNA, 15 bp, Homo sapiens
ggaactgccttctgc

SEQ ID NO: 1932943 - DNA, 15 bp, Homo sapiens
gaactgccttctgcc

SEQ ID NO: 1932944 - DNA, 15 bp, Homo sapiens
aactgccttctgcca

SEQ ID NO: 1932945 - DNA, 15 bp, Homo sapiens
actgccttctgccat

SEQ ID NO: 1932946 - DNA, 15 bp, Homo sapiens
ctgccttctgccatg

SEQ ID NO: 1932947 - DNA, 15 bp, Homo sapiens
tgccttctgccatgt

SEQ ID NO: 1932948 - DNA, 15 bp, Homo sapiens
gccttctgccatgtt

SEQ ID NO: 1932949 - DNA, 15 bp, Homo sapiens
ccttctgccatgtta

SEQ ID NO: 1932950 - DNA, 15 bp, Homo sapiens
cttctgccatgttag

SEQ ID NO: 1932951 - DNA, 15 bp, Homo sapiens
ttctgccatgttagg

SEQ ID NO: 1932952 - DNA, 15 bp, Homo sapiens
tctgccatgttaggg

SEQ ID NO: 1932953 - DNA, 15 bp, Homo sapiens
ctgccatgttagggt

SEQ ID NO: 1932954 - DNA, 15 bp, Homo sapiens
tgccatgttagggta

SEQ ID NO: 1932955 - DNA, 15 bp, Homo sapiens
gccatgttagggtac

SEQ ID NO: 1932956 - DNA, 15 bp, Homo sapiens
ccatgttagggtaca

SEQ ID NO: 1932957 - DNA, 15 bp, Homo sapiens
catgttagggtacac

SEQ ID NO: 1932958 - DNA, 15 bp, Homo sapiens
atgttagggtacaca

SEQ ID NO: 1932959 - DNA, 15 bp, Homo sapiens
tgttagggtacacaa

SEQ ID NO: 1932960 - DNA, 15 bp, Homo sapiens
gttagggtacacaag

SEQ ID NO: 1932961 - DNA, 15 bp, Homo sapiens
ttagggtacacaagg

SEQ ID NO: 1932962 - DNA, 15 bp, Homo sapiens
tagggtacacaagga

SEQ ID NO: 1932963 - DNA, 15 bp, Homo sapiens
agggtacacaaggac

SEQ ID NO: 1932964 - DNA, 15 bp, Homo sapiens
gggtacacaaggacc

SEQ ID NO: 1932965 - DNA, 15 bp, Homo sapiens
ggtacacaaggacct

SEQ ID NO: 1932966 - DNA, 15 bp, Homo sapiens
gtacacaaggacctg

SEQ ID NO: 1932967 - DNA, 15 bp, Homo sapiens
tacacaaggacctga

SEQ ID NO: 1932968 - DNA, 15 bp, Homo sapiens
acacaaggacctgac

SEQ ID NO: 1932969 - DNA, 15 bp, Homo sapiens
cacaaggacctgacc

SEQ ID NO: 1932970 - DNA, 15 bp, Homo sapiens
acaaggacctgacca

SEQ ID NO: 1932971 - DNA, 15 bp, Homo sapiens
caaggacctgaccag

SEQ ID NO: 1932972 - DNA, 15 bp, Homo sapiens
aaggacctgaccaga

SEQ ID NO: 1932973 - DNA, 15 bp, Homo sapiens
aggacctgaccagat

SEQ ID NO: 1932974 - DNA, 15 bp, Homo sapiens
ggacctgaccagata

SEQ ID NO: 1932975 - DNA, 15 bp, Homo sapiens
gacctgaccagatac

SEQ ID NO: 1932976 - DNA, 15 bp, Homo sapiens
acctgaccagatact

SEQ ID NO: 1932977 - DNA, 15 bp, Homo sapiens
cctgaccagatacta

SEQ ID NO: 1932978 - DNA, 15 bp, Homo sapiens
ctgaccagatactac

SEQ ID NO: 1932979 - DNA, 15 bp, Homo sapiens
tgaccagatactact

SEQ ID NO: 1932980 - DNA, 15 bp, Homo sapiens
gaccagatactactg

SEQ ID NO: 1932981 - DNA, 15 bp, Homo sapiens
accagatactactgt

SEQ ID NO: 1932982 - DNA, 15 bp, Homo sapiens
ccagatactactgtc

SEQ ID NO: 1932983 - DNA, 15 bp, Homo sapiens
cagatactactgtca

SEQ ID NO: 1932984 - DNA, 15 bp, Homo sapiens
agatactactgtcat

SEQ ID NO: 1932985 - DNA, 15 bp, Homo sapiens
gatactactgtcatg

SEQ ID NO: 1932986 - DNA, 15 bp, Homo sapiens
atactactgtcatgc

SEQ ID NO: 1932987 - DNA, 15 bp, Homo sapiens
tactactgtcatgct

SEQ ID NO: 1932988 - DNA, 15 bp, Homo sapiens
actactgtcatgctc

SEQ ID NO: 1932989 - DNA, 15 bp, Homo sapiens
ctactgtcatgctct

SEQ ID NO: 1932990 - DNA, 15 bp, Homo sapiens
tactgtcatgctctt

SEQ ID NO: 1932991 - DNA, 15 bp, Homo sapiens
actgtcatgctcttg

SEQ ID NO: 1932992 - DNA, 15 bp, Homo sapiens
ctgtcatgctcttgg

SEQ ID NO: 1932993 - DNA, 15 bp, Homo sapiens
tgtcatgctcttgga

SEQ ID NO: 1932994 - DNA, 15 bp, Homo sapiens
gtcatgctcttggac

SEQ ID NO: 1932995 - DNA, 15 bp, Homo sapiens
tcatgctcttggact

SEQ ID NO: 1932996 - DNA, 15 bp, Homo sapiens
catgctcttggactt

SEQ ID NO: 1932997 - DNA, 15 bp, Homo sapiens
atgctcttggacttc

SEQ ID NO: 1932998 - DNA, 15 bp, Homo sapiens
tgctcttggacttcc

SEQ ID NO: 1932999 - DNA, 15 bp, Homo sapiens
gctcttggacttccc

SEQ ID NO: 1933000 - DNA, 15 bp, Homo sapiens
ctcttggacttccca

SEQ ID NO: 1933001 - DNA, 15 bp, Homo sapiens
tcttggacttcccag

SEQ ID NO: 1933002 - DNA, 15 bp, Homo sapiens
cttggacttcccagc

SEQ ID NO: 1933003 - DNA, 15 bp, Homo sapiens
ttggacttcccagca

SEQ ID NO: 1933004 - DNA, 15 bp, Homo sapiens
tggacttcccagcat

SEQ ID NO: 1933005 - DNA, 15 bp, Homo sapiens
ggacttcccagcatc

SEQ ID NO: 1933006 - DNA, 15 bp, Homo sapiens
gacttcccagcatct

SEQ ID NO: 1933007 - DNA, 15 bp, Homo sapiens
acttcccagcatcta

SEQ ID NO: 1933008 - DNA, 15 bp, Homo sapiens
cttcccagcatctag

SEQ ID NO: 1933009 - DNA, 15 bp, Homo sapiens
ttcccagcatctaga

SEQ ID NO: 1933010 - DNA, 15 bp, Homo sapiens
tcccagcatctagaa

SEQ ID NO: 1933011 - DNA, 15 bp, Homo sapiens
cccagcatctagaat

SEQ ID NO: 1933012 - DNA, 15 bp, Homo sapiens
ccagcatctagaatt

SEQ ID NO: 1933013 - DNA, 15 bp, Homo sapiens
cagcatctagaattg

SEQ ID NO: 1933014 - DNA, 15 bp, Homo sapiens
agcatctagaattgt

SEQ ID NO: 1933015 - DNA, 15 bp, Homo sapiens
gcatctagaattgta

SEQ ID NO: 1933016 - DNA, 15 bp, Homo sapiens
catctagaattgtaa

SEQ ID NO: 1933017 - DNA, 15 bp, Homo sapiens
atctagaattgtaag

SEQ ID NO: 1933018 - DNA, 15 bp, Homo sapiens
tctagaattgtaaga

SEQ ID NO: 1933019 - DNA, 15 bp, Homo sapiens
ctagaattgtaagaa

SEQ ID NO: 1933020 - DNA, 15 bp, Homo sapiens
tagaattgtaagaaa

SEQ ID NO: 1933021 - DNA, 15 bp, Homo sapiens
agaattgtaagaaat

SEQ ID NO: 1933022 - DNA, 15 bp, Homo sapiens
gaattgtaagaaata

SEQ ID NO: 1933023 - DNA, 15 bp, Homo sapiens
aattgtaagaaataa

SEQ ID NO: 1933024 - DNA, 15 bp, Homo sapiens
attgtaagaaataag

SEQ ID NO: 1933025 - DNA, 15 bp, Homo sapiens
ttgtaagaaataagt

SEQ ID NO: 1933026 - DNA, 15 bp, Homo sapiens
tgtaagaaataagtt

SEQ ID NO: 1933027 - DNA, 15 bp, Homo sapiens
gtaagaaataagttt

SEQ ID NO: 1933028 - DNA, 15 bp, Homo sapiens
taagaaataagtttc

SEQ ID NO: 1933029 - DNA, 15 bp, Homo sapiens
aagaaataagtttct

SEQ ID NO: 1933030 - DNA, 15 bp, Homo sapiens
agaaataagtttctt

SEQ ID NO: 1933031 - DNA, 15 bp, Homo sapiens
gaaataagtttcttt

SEQ ID NO: 1933032 - DNA, 15 bp, Homo sapiens
aaataagtttcttta

SEQ ID NO: 1933033 - DNA, 15 bp, Homo sapiens
aataagtttctttat

SEQ ID NO: 1933034 - DNA, 15 bp, Homo sapiens
ataagtttctttata

SEQ ID NO: 1933035 - DNA, 15 bp, Homo sapiens
taagtttctttataa

SEQ ID NO: 1933036 - DNA, 15 bp, Homo sapiens
aagtttctttataaa

SEQ ID NO: 1933037 - DNA, 15 bp, Homo sapiens
agtttctttataaat

SEQ ID NO: 1933038 - DNA, 15 bp, Homo sapiens
gtttctttataaatt

SEQ ID NO: 1933039 - DNA, 15 bp, Homo sapiens
tttctttataaatta

SEQ ID NO: 1933040 - DNA, 15 bp, Homo sapiens
ttctttataaattac

SEQ ID NO: 1933041 - DNA, 15 bp, Homo sapiens
tctttataaattacc

SEQ ID NO: 1933042 - DNA, 15 bp, Homo sapiens
agtctcaggtattca

SEQ ID NO: 1933043 - DNA, 15 bp, Homo sapiens
gtctcaggtattcag

SEQ ID NO: 1933044 - DNA, 15 bp, Homo sapiens
tctcaggtattcagt

SEQ ID NO: 1933045 - DNA, 15 bp, Homo sapiens
ctcaggtattcagtt

SEQ ID NO: 1933046 - DNA, 15 bp, Homo sapiens
tcaggtattcagtta

SEQ ID NO: 1933047 - DNA, 15 bp, Homo sapiens
caggtattcagttat

SEQ ID NO: 1933048 - DNA, 15 bp, Homo sapiens
aggtattcagttata

SEQ ID NO: 1933049 - DNA, 15 bp, Homo sapiens
ggtattcagttatag

SEQ ID NO: 1933050 - DNA, 15 bp, Homo sapiens
gtattcagttatagc

SEQ ID NO: 1933051 - DNA, 15 bp, Homo sapiens
tattcagttatagca

SEQ ID NO: 1933052 - DNA, 15 bp, Homo sapiens
attcagttatagcaa

SEQ ID NO: 1933053 - DNA, 15 bp, Homo sapiens
ttcagttatagcaac

SEQ ID NO: 1933054 - DNA, 15 bp, Homo sapiens
tcagttatagcaaca

SEQ ID NO: 1933055 - DNA, 15 bp, Homo sapiens
cagttatagcaacag

SEQ ID NO: 1933056 - DNA, 15 bp, Homo sapiens
agttatagcaacaga

SEQ ID NO: 1933057 - DNA, 15 bp, Homo sapiens
gttatagcaacagaa

SEQ ID NO: 1933058 - DNA, 15 bp, Homo sapiens
ttatagcaacagaaa

SEQ ID NO: 1933059 - DNA, 15 bp, Homo sapiens
tatagcaacagaaaa

SEQ ID NO: 1933060 - DNA, 15 bp, Homo sapiens
atagcaacagaaaat

SEQ ID NO: 1933061 - DNA, 15 bp, Homo sapiens
tagcaacagaaaata

SEQ ID NO: 1933062 - DNA, 15 bp, Homo sapiens
agcaacagaaaatag

SEQ ID NO: 1933063 - DNA, 15 bp, Homo sapiens
gcaacagaaaataga

SEQ ID NO: 1933064 - DNA, 15 bp, Homo sapiens
caacagaaaatagac

SEQ ID NO: 1933065 - DNA, 15 bp, Homo sapiens
aacagaaaatagact

SEQ ID NO: 1933066 - DNA, 15 bp, Homo sapiens
acagaaaatagacta

SEQ ID NO: 1933067 - DNA, 15 bp, Homo sapiens
cagaaaatagactaa

SEQ ID NO: 1933068 - DNA, 15 bp, Homo sapiens
agaaaatagactaag

SEQ ID NO: 1933069 - DNA, 15 bp, Homo sapiens
gaaaatagactaaga

SEQ ID NO: 1933070 - DNA, 15 bp, Homo sapiens
aaaatagactaagag

SEQ ID NO: 1933071 - DNA, 15 bp, Homo sapiens
aaatagactaagagg

SEQ ID NO: 1933072 - DNA, 15 bp, Homo sapiens
aatagactaagagga

SEQ ID NO: 1933073 - DNA, 15 bp, Homo sapiens
atagactaagaggat

SEQ ID NO: 1933074 - DNA, 15 bp, Homo sapiens
tagactaagaggatt

SEQ ID NO: 1933075 - DNA, 15 bp, Homo sapiens
agactaagaggatta

SEQ ID NO: 1933076 - DNA, 15 bp, Homo sapiens
gactaagaggattat

SEQ ID NO: 1933077 - DNA, 15 bp, Homo sapiens
actaagaggattatt

SEQ ID NO: 1933078 - DNA, 15 bp, Homo sapiens
ctaagaggattattt

SEQ ID NO: 1933079 - DNA, 15 bp, Homo sapiens
taagaggattattta

SEQ ID NO: 1933080 - DNA, 15 bp, Homo sapiens
aagaggattatttac

SEQ ID NO: 1933081 - DNA, 15 bp, Homo sapiens
agaggattatttacc

SEQ ID NO: 1933082 - DNA, 15 bp, Homo sapiens
gaggattatttacct

SEQ ID NO: 1933083 - DNA, 15 bp, Homo sapiens
aggattatttacctt

SEQ ID NO: 1933084 - DNA, 15 bp, Homo sapiens
ggattatttaccttg

SEQ ID NO: 1933085 - DNA, 15 bp, Homo sapiens
gattatttaccttgt

SEQ ID NO: 1933086 - DNA, 15 bp, Homo sapiens
attatttaccttgtg

SEQ ID NO: 1933087 - DNA, 15 bp, Homo sapiens
ttatttaccttgtgt

SEQ ID NO: 1933088 - DNA, 15 bp, Homo sapiens
tatttaccttgtgtc

SEQ ID NO: 1933089 - DNA, 15 bp, Homo sapiens
atttaccttgtgtca

SEQ ID NO: 1933090 - DNA, 15 bp, Homo sapiens
tttaccttgtgtcaa

SEQ ID NO: 1933091 - DNA, 15 bp, Homo sapiens
ttaccttgtgtcaaa

SEQ ID NO: 1933092 - DNA, 15 bp, Homo sapiens
taccttgtgtcaaat

SEQ ID NO: 1933093 - DNA, 15 bp, Homo sapiens
accttgtgtcaaatt

SEQ ID NO: 1933094 - DNA, 15 bp, Homo sapiens
ccttgtgtcaaatta

SEQ ID NO: 1933095 - DNA, 15 bp, Homo sapiens
cttgtgtcaaattat

SEQ ID NO: 1933096 - DNA, 15 bp, Homo sapiens
ttgtgtcaaattatt

SEQ ID NO: 1933097 - DNA, 15 bp, Homo sapiens
tgtgtcaaattattt

SEQ ID NO: 1933098 - DNA, 15 bp, Homo sapiens
gtgtcaaattattta

SEQ ID NO: 1933099 - DNA, 15 bp, Homo sapiens
tgtcaaattatttac

SEQ ID NO: 1933100 - DNA, 15 bp, Homo sapiens
gtcaaattatttact

SEQ ID NO: 1933101 - DNA, 15 bp, Homo sapiens
tcaaattatttacta

SEQ ID NO: 1933102 - DNA, 15 bp, Homo sapiens
caaattatttactac

SEQ ID NO: 1933103 - DNA, 15 bp, Homo sapiens
aaattatttactact

SEQ ID NO: 1933104 - DNA, 15 bp, Homo sapiens
aattatttactacta

SEQ ID NO: 1933105 - DNA, 15 bp, Homo sapiens
attatttactactaa

SEQ ID NO: 1933106 - DNA, 15 bp, Homo sapiens
ttatttactactaaa

SEQ ID NO: 1933107 - DNA, 15 bp, Homo sapiens
tatttactactaaag

SEQ ID NO: 1933108 - DNA, 15 bp, Homo sapiens
atttactactaaagc

SEQ ID NO: 1933109 - DNA, 15 bp, Homo sapiens
tttactactaaagct

SEQ ID NO: 1933110 - DNA, 15 bp, Homo sapiens
ttactactaaagctg

SEQ ID NO: 1933111 - DNA, 15 bp, Homo sapiens
tactactaaagctgg

SEQ ID NO: 1933112 - DNA, 15 bp, Homo sapiens
actactaaagctggg

SEQ ID NO: 1933113 - DNA, 15 bp, Homo sapiens
ctactaaagctggga

SEQ ID NO: 1933114 - DNA, 15 bp, Homo sapiens
tactaaagctgggac

SEQ ID NO: 1933115 - DNA, 15 bp, Homo sapiens
actaaagctgggacc

SEQ ID NO: 1933116 - DNA, 15 bp, Homo sapiens
ctaaagctgggacca

SEQ ID NO: 1933117 - DNA, 15 bp, Homo sapiens
taaagctgggaccaa

SEQ ID NO: 1933118 - DNA, 15 bp, Homo sapiens
aaagctgggaccaaa

SEQ ID NO: 1933119 - DNA, 15 bp, Homo sapiens
aagctgggaccaaaa

SEQ ID NO: 1933120 - DNA, 15 bp, Homo sapiens
agctgggaccaaaac

SEQ ID NO: 1933121 - DNA, 15 bp, Homo sapiens
gctgggaccaaaacc

SEQ ID NO: 1933122 - DNA, 15 bp, Homo sapiens
ctgggaccaaaacct

SEQ ID NO: 1933123 - DNA, 15 bp, Homo sapiens
tgggaccaaaacctc

SEQ ID NO: 1933124 - DNA, 15 bp, Homo sapiens
gggaccaaaacctct

SEQ ID NO: 1933125 - DNA, 15 bp, Homo sapiens
ggaccaaaacctctt

SEQ ID NO: 1933126 - DNA, 15 bp, Homo sapiens
gaccaaaacctcttg

SEQ ID NO: 1933127 - DNA, 15 bp, Homo sapiens
accaaaacctcttgg

SEQ ID NO: 1933128 - DNA, 15 bp, Homo sapiens
ccaaaacctcttggc

SEQ ID NO: 1933129 - DNA, 15 bp, Homo sapiens
caaaacctcttggcc

SEQ ID NO: 1933130 - DNA, 15 bp, Homo sapiens
aaaacctcttggcct

SEQ ID NO: 1933131 - DNA, 15 bp, Homo sapiens
aaacctcttggcctc

SEQ ID NO: 1933132 - DNA, 15 bp, Homo sapiens
aacctcttggcctct

SEQ ID NO: 1933133 - DNA, 15 bp, Homo sapiens
acctcttggcctcta

SEQ ID NO: 1933134 - DNA, 15 bp, Homo sapiens
cctcttggcctctat

SEQ ID NO: 1933135 - DNA, 15 bp, Homo sapiens
ctcttggcctctatg

SEQ ID NO: 1933136 - DNA, 15 bp, Homo sapiens
tcttggcctctatgt

SEQ ID NO: 1933137 - DNA, 15 bp, Homo sapiens
cttggcctctatgtt

SEQ ID NO: 1933138 - DNA, 15 bp, Homo sapiens
ttggcctctatgttt

SEQ ID NO: 1933139 - DNA, 15 bp, Homo sapiens
tggcctctatgtttc

SEQ ID NO: 1933140 - DNA, 15 bp, Homo sapiens
ggcctctatgtttca

SEQ ID NO: 1933141 - DNA, 15 bp, Homo sapiens
gcctctatgtttcaa

SEQ ID NO: 1933142 - DNA, 15 bp, Homo sapiens
cctctatgtttcaag

SEQ ID NO: 1933143 - DNA, 15 bp, Homo sapiens
ctctatgtttcaagt

SEQ ID NO: 1933144 - DNA, 15 bp, Homo sapiens
tctatgtttcaagtt

SEQ ID NO: 1933145 - DNA, 15 bp, Homo sapiens
ctatgtttcaagttc

SEQ ID NO: 1933146 - DNA, 15 bp, Homo sapiens
tatgtttcaagttcc

SEQ ID NO: 1933147 - DNA, 15 bp, Homo sapiens
atgtttcaagttcca

SEQ ID NO: 1933148 - DNA, 15 bp, Homo sapiens
tgtttcaagttccaa

SEQ ID NO: 1933149 - DNA, 15 bp, Homo sapiens
gtttcaagttccaaa

SEQ ID NO: 1933150 - DNA, 15 bp, Homo sapiens
tttcaagttccaaag

SEQ ID NO: 1933151 - DNA, 15 bp, Homo sapiens
ttcaagttccaaagc

SEQ ID NO: 1933152 - DNA, 15 bp, Homo sapiens
tcaagttccaaagct

SEQ ID NO: 1933153 - DNA, 15 bp, Homo sapiens
caagttccaaagctg

SEQ ID NO: 1933154 - DNA, 15 bp, Homo sapiens
aagttccaaagctga

SEQ ID NO: 1933155 - DNA, 15 bp, Homo sapiens
agttccaaagctgat

SEQ ID NO: 1933156 - DNA, 15 bp, Homo sapiens
gttccaaagctgatt

SEQ ID NO: 1933157 - DNA, 15 bp, Homo sapiens
ttccaaagctgattt

SEQ ID NO: 1933158 - DNA, 15 bp, Homo sapiens
tccaaagctgatttc

SEQ ID NO: 1933159 - DNA, 15 bp, Homo sapiens
ccaaagctgatttcc

SEQ ID NO: 1933160 - DNA, 15 bp, Homo sapiens
caaagctgatttccc

SEQ ID NO: 1933161 - DNA, 15 bp, Homo sapiens
aaagctgatttccct

SEQ ID NO: 1933162 - DNA, 15 bp, Homo sapiens
aagctgatttccctt

SEQ ID NO: 1933163 - DNA, 15 bp, Homo sapiens
agctgatttcccttt

SEQ ID NO: 1933164 - DNA, 15 bp, Homo sapiens
gctgatttccctttt

SEQ ID NO: 1933165 - DNA, 15 bp, Homo sapiens
ctgatttccctttta

SEQ ID NO: 1933166 - DNA, 15 bp, Homo sapiens
tgatttcccttttac

SEQ ID NO: 1933167 - DNA, 15 bp, Homo sapiens
gatttcccttttact

SEQ ID NO: 1933168 - DNA, 15 bp, Homo sapiens
atttcccttttacta

SEQ ID NO: 1933169 - DNA, 15 bp, Homo sapiens
tttcccttttactac

SEQ ID NO: 1933170 - DNA, 15 bp, Homo sapiens
ttcccttttactaca

SEQ ID NO: 1933171 - DNA, 15 bp, Homo sapiens
tcccttttactacat

SEQ ID NO: 1933172 - DNA, 15 bp, Homo sapiens
cccttttactacata

SEQ ID NO: 1933173 - DNA, 15 bp, Homo sapiens
ccttttactacatac

SEQ ID NO: 1933174 - DNA, 15 bp, Homo sapiens
cttttactacatacc

SEQ ID NO: 1933175 - DNA, 15 bp, Homo sapiens
ttttactacatacct

SEQ ID NO: 1933176 - DNA, 15 bp, Homo sapiens
tttactacatacctg

SEQ ID NO: 1933177 - DNA, 15 bp, Homo sapiens
ttactacatacctgt

SEQ ID NO: 1933178 - DNA, 15 bp, Homo sapiens
tactacatacctgtg

SEQ ID NO: 1933179 - DNA, 15 bp, Homo sapiens
actacatacctgtgt

SEQ ID NO: 1933180 - DNA, 15 bp, Homo sapiens
ctacatacctgtgta

SEQ ID NO: 1933181 - DNA, 15 bp, Homo sapiens
tacatacctgtgtat

SEQ ID NO: 1933182 - DNA, 15 bp, Homo sapiens
acatacctgtgtata

SEQ ID NO: 1933183 - DNA, 15 bp, Homo sapiens
catacctgtgtatat

SEQ ID NO: 1933184 - DNA, 15 bp, Homo sapiens
atacctgtgtatatc

SEQ ID NO: 1933185 - DNA, 15 bp, Homo sapiens
tacctgtgtatatct

SEQ ID NO: 1933186 - DNA, 15 bp, Homo sapiens
acctgtgtatatctc

SEQ ID NO: 1933187 - DNA, 15 bp, Homo sapiens
cctgtgtatatctct

SEQ ID NO: 1933188 - DNA, 15 bp, Homo sapiens
ctgtgtatatctctc

SEQ ID NO: 1933189 - DNA, 15 bp, Homo sapiens
tgtgtatatctctcc

SEQ ID NO: 1933190 - DNA, 15 bp, Homo sapiens
gtgtatatctctccc

SEQ ID NO: 1933191 - DNA, 15 bp, Homo sapiens
tgtatatctctccca

SEQ ID NO: 1933192 - DNA, 15 bp, Homo sapiens
gtatatctctcccat

SEQ ID NO: 1933193 - DNA, 15 bp, Homo sapiens
tatatctctcccata

SEQ ID NO: 1933194 - DNA, 15 bp, Homo sapiens
atatctctcccatac

SEQ ID NO: 1933195 - DNA, 15 bp, Homo sapiens
tatctctcccataca

SEQ ID NO: 1933196 - DNA, 15 bp, Homo sapiens
atctctcccatacag

SEQ ID NO: 1933197 - DNA, 15 bp, Homo sapiens
tctctcccatacaga

SEQ ID NO: 1933198 - DNA, 15 bp, Homo sapiens
ctctcccatacagat

SEQ ID NO: 1933199 - DNA, 15 bp, Homo sapiens
tctcccatacagatt

SEQ ID NO: 1933200 - DNA, 15 bp, Homo sapiens
ctcccatacagattc

SEQ ID NO: 1933201 - DNA, 15 bp, Homo sapiens
tcccatacagattca

SEQ ID NO: 1933202 - DNA, 15 bp, Homo sapiens
cccatacagattcac

SEQ ID NO: 1933203 - DNA, 15 bp, Homo sapiens
ccatacagattcact

SEQ ID NO: 1933204 - DNA, 15 bp, Homo sapiens
catacagattcactg

SEQ ID NO: 1933205 - DNA, 15 bp, Homo sapiens
atacagattcactgc

SEQ ID NO: 1933206 - DNA, 15 bp, Homo sapiens
tacagattcactgca

SEQ ID NO: 1933207 - DNA, 15 bp, Homo sapiens
acagattcactgcag

SEQ ID NO: 1933208 - DNA, 15 bp, Homo sapiens
cagattcactgcagt

SEQ ID NO: 1933209 - DNA, 15 bp, Homo sapiens
agattcactgcagtt

SEQ ID NO: 1933210 - DNA, 15 bp, Homo sapiens
gattcactgcagtta

SEQ ID NO: 1933211 - DNA, 15 bp, Homo sapiens
attcactgcagttaa

SEQ ID NO: 1933212 - DNA, 15 bp, Homo sapiens
ttcactgcagttaac

SEQ ID NO: 1933213 - DNA, 15 bp, Homo sapiens
tcactgcagttaaca

SEQ ID NO: 1933214 - DNA, 15 bp, Homo sapiens
cactgcagttaacat

SEQ ID NO: 1933215 - DNA, 15 bp, Homo sapiens
actgcagttaacatg

SEQ ID NO: 1933216 - DNA, 15 bp, Homo sapiens
ctgcagttaacatga

SEQ ID NO: 1933217 - DNA, 15 bp, Homo sapiens
tgcagttaacatgaa

SEQ ID NO: 1933218 - DNA, 15 bp, Homo sapiens
gcagttaacatgaaa

SEQ ID NO: 1933219 - DNA, 15 bp, Homo sapiens
cagttaacatgaaag

SEQ ID NO: 1933220 - DNA, 15 bp, Homo sapiens
agttaacatgaaaga

SEQ ID NO: 1933221 - DNA, 15 bp, Homo sapiens
gttaacatgaaagac

SEQ ID NO: 1933222 - DNA, 15 bp, Homo sapiens
ttaacatgaaagact

SEQ ID NO: 1933223 - DNA, 15 bp, Homo sapiens
taacatgaaagactc

SEQ ID NO: 1933224 - DNA, 15 bp, Homo sapiens
aacatgaaagactca

SEQ ID NO: 1933225 - DNA, 15 bp, Homo sapiens
acatgaaagactcaa

SEQ ID NO: 1933226 - DNA, 15 bp, Homo sapiens
catgaaagactcaac

SEQ ID NO: 1933227 - DNA, 15 bp, Homo sapiens
atgaaagactcaaca

SEQ ID NO: 1933228 - DNA, 15 bp, Homo sapiens
tgaaagactcaacag

SEQ ID NO: 1933229 - DNA, 15 bp, Homo sapiens
gaaagactcaacagt

SEQ ID NO: 1933230 - DNA, 15 bp, Homo sapiens
aaagactcaacagtt

SEQ ID NO: 1933231 - DNA, 15 bp, Homo sapiens
aagactcaacagttg

SEQ ID NO: 1933232 - DNA, 15 bp, Homo sapiens
agactcaacagttgg

SEQ ID NO: 1933233 - DNA, 15 bp, Homo sapiens
gactcaacagttggt

SEQ ID NO: 1933234 - DNA, 15 bp, Homo sapiens
actcaacagttggtg

SEQ ID NO: 1933235 - DNA, 15 bp, Homo sapiens
ctcaacagttggtga

SEQ ID NO: 1933236 - DNA, 15 bp, Homo sapiens
tcaacagttggtgag

SEQ ID NO: 1933237 - DNA, 15 bp, Homo sapiens
caacagttggtgaga

SEQ ID NO: 1933238 - DNA, 15 bp, Homo sapiens
aacagttggtgagat

SEQ ID NO: 1933239 - DNA, 15 bp, Homo sapiens
acagttggtgagatt

SEQ ID NO: 1933240 - DNA, 15 bp, Homo sapiens
cagttggtgagattt

SEQ ID NO: 1933241 - DNA, 15 bp, Homo sapiens
agttggtgagatttt

SEQ ID NO: 1933242 - DNA, 15 bp, Homo sapiens
gttggtgagatttta

SEQ ID NO: 1933243 - DNA, 15 bp, Homo sapiens
ttggtgagattttag

SEQ ID NO: 1933244 - DNA, 15 bp, Homo sapiens
tggtgagattttagg

SEQ ID NO: 1933245 - DNA, 15 bp, Homo sapiens
ggtgagattttagga

SEQ ID NO: 1933246 - DNA, 15 bp, Homo sapiens
gtgagattttaggaa

SEQ ID NO: 1933247 - DNA, 15 bp, Homo sapiens
tgagattttaggaac

SEQ ID NO: 1933248 - DNA, 15 bp, Homo sapiens
gagattttaggaact

SEQ ID NO: 1933249 - DNA, 15 bp, Homo sapiens
agattttaggaactc

SEQ ID NO: 1933250 - DNA, 15 bp, Homo sapiens
gattttaggaactct

SEQ ID NO: 1933251 - DNA, 15 bp, Homo sapiens
attttaggaactcta

SEQ ID NO: 1933252 - DNA, 15 bp, Homo sapiens
ttttaggaactctag

SEQ ID NO: 1933253 - DNA, 15 bp, Homo sapiens
tttaggaactctaga

SEQ ID NO: 1933254 - DNA, 15 bp, Homo sapiens
ttaggaactctagag

SEQ ID NO: 1933255 - DNA, 15 bp, Homo sapiens
taggaactctagagc

SEQ ID NO: 1933256 - DNA, 15 bp, Homo sapiens
aggaactctagagca

SEQ ID NO: 1933257 - DNA, 15 bp, Homo sapiens
ggaactctagagcac

SEQ ID NO: 1933258 - DNA, 15 bp, Homo sapiens
gaactctagagcact

SEQ ID NO: 1933259 - DNA, 15 bp, Homo sapiens
aactctagagcacta

SEQ ID NO: 1933260 - DNA, 15 bp, Homo sapiens
actctagagcactac

SEQ ID NO: 1933261 - DNA, 15 bp, Homo sapiens
ctctagagcactacc

SEQ ID NO: 1933262 - DNA, 15 bp, Homo sapiens
tctagagcactacca

SEQ ID NO: 1933263 - DNA, 15 bp, Homo sapiens
ctagagcactaccag

SEQ ID NO: 1933264 - DNA, 15 bp, Homo sapiens
tagagcactaccagt

SEQ ID NO: 1933265 - DNA, 15 bp, Homo sapiens
agagcactaccagta

SEQ ID NO: 1933266 - DNA, 15 bp, Homo sapiens
gagcactaccagtat

SEQ ID NO: 1933267 - DNA, 15 bp, Homo sapiens
agcactaccagtatg

SEQ ID NO: 1933268 - DNA, 15 bp, Homo sapiens
gcactaccagtatgg

SEQ ID NO: 1933269 - DNA, 15 bp, Homo sapiens
cactaccagtatggt

SEQ ID NO: 1933270 - DNA, 15 bp, Homo sapiens
actaccagtatggta

SEQ ID NO: 1933271 - DNA, 15 bp, Homo sapiens
ctaccagtatggtat

SEQ ID NO: 1933272 - DNA, 15 bp, Homo sapiens
taccagtatggtatt

SEQ ID NO: 1933273 - DNA, 15 bp, Homo sapiens
accagtatggtatta

SEQ ID NO: 1933274 - DNA, 15 bp, Homo sapiens
ccagtatggtattaa

SEQ ID NO: 1933275 - DNA, 15 bp, Homo sapiens
cagtatggtattaaa

SEQ ID NO: 1933276 - DNA, 15 bp, Homo sapiens
agtatggtattaaaa

SEQ ID NO: 1933277 - DNA, 15 bp, Homo sapiens
gtatggtattaaaaa

SEQ ID NO: 1933278 - DNA, 15 bp, Homo sapiens
tatggtattaaaaat

SEQ ID NO: 1933279 - DNA, 15 bp, Homo sapiens
atggtattaaaaatt

SEQ ID NO: 1933280 - DNA, 15 bp, Homo sapiens
tggtattaaaaattt

SEQ ID NO: 1933281 - DNA, 15 bp, Homo sapiens
ggtattaaaaatttg

SEQ ID NO: 1933282 - DNA, 15 bp, Homo sapiens
gtattaaaaatttgc

SEQ ID NO: 1933283 - DNA, 15 bp, Homo sapiens
tattaaaaatttgct

SEQ ID NO: 1933284 - DNA, 15 bp, Homo sapiens
attaaaaatttgcta

SEQ ID NO: 1933285 - DNA, 15 bp, Homo sapiens
ttaaaaatttgctaa

SEQ ID NO: 1933286 - DNA, 15 bp, Homo sapiens
taaaaatttgctaat

SEQ ID NO: 1933287 - DNA, 15 bp, Homo sapiens
aaaaatttgctaatc

SEQ ID NO: 1933288 - DNA, 15 bp, Homo sapiens
aaaatttgctaatct

SEQ ID NO: 1933289 - DNA, 15 bp, Homo sapiens
aaatttgctaatcta

SEQ ID NO: 1933290 - DNA, 15 bp, Homo sapiens
aatttgctaatctat

SEQ ID NO: 1933291 - DNA, 15 bp, Homo sapiens
atttgctaatctatc

SEQ ID NO: 1933292 - DNA, 15 bp, Homo sapiens
tttgctaatctatcc

SEQ ID NO: 1933293 - DNA, 15 bp, Homo sapiens
ttgctaatctatcca

SEQ ID NO: 1933294 - DNA, 15 bp, Homo sapiens
tgctaatctatccag

SEQ ID NO: 1933295 - DNA, 15 bp, Homo sapiens
gctaatctatccaga

SEQ ID NO: 1933296 - DNA, 15 bp, Homo sapiens
ctaatctatccagaa

SEQ ID NO: 1933297 - DNA, 15 bp, Homo sapiens
taatctatccagaat

SEQ ID NO: 1933298 - DNA, 15 bp, Homo sapiens
aatctatccagaatg

SEQ ID NO: 1933299 - DNA, 15 bp, Homo sapiens
atctatccagaatgt

SEQ ID NO: 1933300 - DNA, 15 bp, Homo sapiens
tctatccagaatgta

SEQ ID NO: 1933301 - DNA, 15 bp, Homo sapiens
ctatccagaatgtaa

SEQ ID NO: 1933302 - DNA, 15 bp, Homo sapiens
tatccagaatgtaaa

SEQ ID NO: 1933303 - DNA, 15 bp, Homo sapiens
atccagaatgtaaat

SEQ ID NO: 1933304 - DNA, 15 bp, Homo sapiens
tccagaatgtaaatt

SEQ ID NO: 1933305 - DNA, 15 bp, Homo sapiens
ccagaatgtaaattt

SEQ ID NO: 1933306 - DNA, 15 bp, Homo sapiens
cagaatgtaaatttt

SEQ ID NO: 1933307 - DNA, 15 bp, Homo sapiens
agaatgtaaatttta

SEQ ID NO: 1933308 - DNA, 15 bp, Homo sapiens
gaatgtaaattttaa

SEQ ID NO: 1933309 - DNA, 15 bp, Homo sapiens
aatgtaaattttaat

SEQ ID NO: 1933310 - DNA, 15 bp, Homo sapiens
atgtaaattttaatg

SEQ ID NO: 1933311 - DNA, 15 bp, Homo sapiens
tgtaaattttaatgg

SEQ ID NO: 1933312 - DNA, 15 bp, Homo sapiens
gtaaattttaatgga

SEQ ID NO: 1933313 - DNA, 15 bp, Homo sapiens
taaattttaatggaa

SEQ ID NO: 1933314 - DNA, 15 bp, Homo sapiens
aaattttaatggaaa

SEQ ID NO: 1933315 - DNA, 15 bp, Homo sapiens
aattttaatggaaaa

SEQ ID NO: 1933316 - DNA, 15 bp, Homo sapiens
attttaatggaaaaa

SEQ ID NO: 1933317 - DNA, 15 bp, Homo sapiens
ttttaatggaaaaaa

SEQ ID NO: 1933318 - DNA, 15 bp, Homo sapiens
tttaatggaaaaaat

SEQ ID NO: 1933319 - DNA, 15 bp, Homo sapiens
ttaatggaaaaaatg

SEQ ID NO: 1933320 - DNA, 15 bp, Homo sapiens
taatggaaaaaatgt

SEQ ID NO: 1933321 - DNA, 15 bp, Homo sapiens
aatggaaaaaatgtg

SEQ ID NO: 1933322 - DNA, 15 bp, Homo sapiens
atggaaaaaatgtga

SEQ ID NO: 1933323 - DNA, 15 bp, Homo sapiens
tggaaaaaatgtgaa

SEQ ID NO: 1933324 - DNA, 15 bp, Homo sapiens
ggaaaaaatgtgaat

SEQ ID NO: 1933325 - DNA, 15 bp, Homo sapiens
gaaaaaatgtgaatt

SEQ ID NO: 1933326 - DNA, 15 bp, Homo sapiens
aaaaaatgtgaattg

SEQ ID NO: 1933327 - DNA, 15 bp, Homo sapiens
aaaaatgtgaattga

SEQ ID NO: 1933328 - DNA, 15 bp, Homo sapiens
aaaatgtgaattgat

SEQ ID NO: 1933329 - DNA, 15 bp, Homo sapiens
aaatgtgaattgatt

SEQ ID NO: 1933330 - DNA, 15 bp, Homo sapiens
aatgtgaattgattg

SEQ ID NO: 1933331 - DNA, 15 bp, Homo sapiens
atgtgaattgattgt

SEQ ID NO: 1933332 - DNA, 15 bp, Homo sapiens
tgtgaattgattgtc

SEQ ID NO: 1933333 - DNA, 15 bp, Homo sapiens
gtgaattgattgtct

SEQ ID NO: 1933334 - DNA, 15 bp, Homo sapiens
tgaattgattgtctg

SEQ ID NO: 1933335 - DNA, 15 bp, Homo sapiens
gaattgattgtctgt

SEQ ID NO: 1933336 - DNA, 15 bp, Homo sapiens
aattgattgtctgtg

SEQ ID NO: 1933337 - DNA, 15 bp, Homo sapiens
attgattgtctgtgt

SEQ ID NO: 1933338 - DNA, 15 bp, Homo sapiens
ttgattgtctgtgtt

SEQ ID NO: 1933339 - DNA, 15 bp, Homo sapiens
tgattgtctgtgttt

SEQ ID NO: 1933340 - DNA, 15 bp, Homo sapiens
gattgtctgtgtttt

SEQ ID NO: 1933341 - DNA, 15 bp, Homo sapiens
attgtctgtgttttg

SEQ ID NO: 1933342 - DNA, 15 bp, Homo sapiens
ttgtctgtgttttgc

SEQ ID NO: 1933343 - DNA, 15 bp, Homo sapiens
tgtctgtgttttgct

SEQ ID NO: 1933344 - DNA, 15 bp, Homo sapiens
gtctgtgttttgctt

SEQ ID NO: 1933345 - DNA, 15 bp, Homo sapiens
tctgtgttttgcttt

SEQ ID NO: 1933346 - DNA, 15 bp, Homo sapiens
ctgtgttttgctttc

SEQ ID NO: 1933347 - DNA, 15 bp, Homo sapiens
tgtgttttgctttcc

SEQ ID NO: 1933348 - DNA, 15 bp, Homo sapiens
gtgttttgctttcct

SEQ ID NO: 1933349 - DNA, 15 bp, Homo sapiens
tgttttgctttcctc

SEQ ID NO: 1933350 - DNA, 15 bp, Homo sapiens
gttttgctttcctca

SEQ ID NO: 1933351 - DNA, 15 bp, Homo sapiens
ttttgctttcctcag

SEQ ID NO: 1933352 - DNA, 15 bp, Homo sapiens
tttgctttcctcagt

SEQ ID NO: 1933353 - DNA, 15 bp, Homo sapiens
ttgctttcctcagtt

SEQ ID NO: 1933354 - DNA, 15 bp, Homo sapiens
tgctttcctcagttg

SEQ ID NO: 1933355 - DNA, 15 bp, Homo sapiens
gctttcctcagttgc

SEQ ID NO: 1933356 - DNA, 15 bp, Homo sapiens
ctttcctcagttgca

SEQ ID NO: 1933357 - DNA, 15 bp, Homo sapiens
tttcctcagttgcaa

SEQ ID NO: 1933358 - DNA, 15 bp, Homo sapiens
ttcctcagttgcaaa

SEQ ID NO: 1933359 - DNA, 15 bp, Homo sapiens
tcctcagttgcaaac

SEQ ID NO: 1933360 - DNA, 15 bp, Homo sapiens
cctcagttgcaaaca

SEQ ID NO: 1933361 - DNA, 15 bp, Homo sapiens
ctcagttgcaaacat

SEQ ID NO: 1933362 - DNA, 15 bp, Homo sapiens
tcagttgcaaacata

SEQ ID NO: 1933363 - DNA, 15 bp, Homo sapiens
cagttgcaaacataa

SEQ ID NO: 1933364 - DNA, 15 bp, Homo sapiens
agttgcaaacataaa

SEQ ID NO: 1933365 - DNA, 15 bp, Homo sapiens
gttgcaaacataaag

SEQ ID NO: 1933366 - DNA, 15 bp, Homo sapiens
ttgcaaacataaagg

SEQ ID NO: 1933367 - DNA, 15 bp, Homo sapiens
tgcaaacataaaggc

SEQ ID NO: 1933368 - DNA, 15 bp, Homo sapiens
gcaaacataaaggct

SEQ ID NO: 1933369 - DNA, 15 bp, Homo sapiens
caaacataaaggcta

SEQ ID NO: 1933370 - DNA, 15 bp, Homo sapiens
aaacataaaggctat

SEQ ID NO: 1933371 - DNA, 15 bp, Homo sapiens
aacataaaggctata

SEQ ID NO: 1933372 - DNA, 15 bp, Homo sapiens
acataaaggctatac

SEQ ID NO: 1933373 - DNA, 15 bp, Homo sapiens
cataaaggctataca

SEQ ID NO: 1933374 - DNA, 15 bp, Homo sapiens
ataaaggctatacac

SEQ ID NO: 1933375 - DNA, 15 bp, Homo sapiens
taaaggctatacaca

SEQ ID NO: 1933376 - DNA, 15 bp, Homo sapiens
aaaggctatacacaa

SEQ ID NO: 1933377 - DNA, 15 bp, Homo sapiens
aaggctatacacaaa

SEQ ID NO: 1933378 - DNA, 15 bp, Homo sapiens
aggctatacacaaac

SEQ ID NO: 1933379 - DNA, 15 bp, Homo sapiens
ggctatacacaaaca

SEQ ID NO: 1933380 - DNA, 15 bp, Homo sapiens
gctatacacaaacat

SEQ ID NO: 1933381 - DNA, 15 bp, Homo sapiens
ctatacacaaacata

SEQ ID NO: 1933382 - DNA, 15 bp, Homo sapiens
tatacacaaacataa

SEQ ID NO: 1933383 - DNA, 15 bp, Homo sapiens
atacacaaacataaa

SEQ ID NO: 1933384 - DNA, 15 bp, Homo sapiens
tacacaaacataaat

SEQ ID NO: 1933385 - DNA, 15 bp, Homo sapiens
acacaaacataaatt

SEQ ID NO: 1933386 - DNA, 15 bp, Homo sapiens
cacaaacataaattt

SEQ ID NO: 1933387 - DNA, 15 bp, Homo sapiens
acaaacataaatttg

SEQ ID NO: 1933388 - DNA, 15 bp, Homo sapiens
caaacataaatttga

SEQ ID NO: 1933389 - DNA, 15 bp, Homo sapiens
aaacataaatttgag

SEQ ID NO: 1933390 - DNA, 15 bp, Homo sapiens
aacataaatttgagc

SEQ ID NO: 1933391 - DNA, 15 bp, Homo sapiens
acataaatttgagct

SEQ ID NO: 1933392 - DNA, 15 bp, Homo sapiens
cataaatttgagctt

SEQ ID NO: 1933393 - DNA, 15 bp, Homo sapiens
ataaatttgagcttt

SEQ ID NO: 1933394 - DNA, 15 bp, Homo sapiens
taaatttgagctttt

SEQ ID NO: 1933395 - DNA, 15 bp, Homo sapiens
aaatttgagctttta

SEQ ID NO: 1933396 - DNA, 15 bp, Homo sapiens
aatttgagcttttaa

SEQ ID NO: 1933397 - DNA, 15 bp, Homo sapiens
atttgagcttttaaa

SEQ ID NO: 1933398 - DNA, 15 bp, Homo sapiens
tttgagcttttaaaa

SEQ ID NO: 1933399 - DNA, 15 bp, Homo sapiens
ttgagcttttaaaaa

SEQ ID NO: 1933400 - DNA, 15 bp, Homo sapiens
tgagcttttaaaaaa

SEQ ID NO: 1933401 - DNA, 15 bp, Homo sapiens
gagcttttaaaaaat

SEQ ID NO: 1933402 - DNA, 15 bp, Homo sapiens
agcttttaaaaaata

SEQ ID NO: 1933403 - DNA, 15 bp, Homo sapiens
gcttttaaaaaatat

SEQ ID NO: 1933404 - DNA, 15 bp, Homo sapiens
cttttaaaaaatatt

SEQ ID NO: 1933405 - DNA, 15 bp, Homo sapiens
ttaaaaaatatttta

SEQ ID NO: 1933406 - DNA, 15 bp, Homo sapiens
taaaaaatattttaa

SEQ ID NO: 1933407 - DNA, 15 bp, Homo sapiens
aaaaaatattttaaa

SEQ ID NO: 1933408 - DNA, 15 bp, Homo sapiens
aaaaatattttaaat

SEQ ID NO: 1933409 - DNA, 15 bp, Homo sapiens
aaaatattttaaata

SEQ ID NO: 1933410 - DNA, 15 bp, Homo sapiens
aaatattttaaataa

SEQ ID NO: 1933411 - DNA, 15 bp, Homo sapiens
aatattttaaataac

SEQ ID NO: 1933412 - DNA, 15 bp, Homo sapiens
atattttaaataact

SEQ ID NO: 1933413 - DNA, 15 bp, Homo sapiens
tattttaaataacta

SEQ ID NO: 1933414 - DNA, 15 bp, Homo sapiens
attttaaataactac

SEQ ID NO: 1933415 - DNA, 15 bp, Homo sapiens
ttttaaataactaca

SEQ ID NO: 1933416 - DNA, 15 bp, Homo sapiens
tttaaataactacaa

SEQ ID NO: 1933417 - DNA, 15 bp, Homo sapiens
ttaaataactacaat

SEQ ID NO: 1933418 - DNA, 15 bp, Homo sapiens
taaataactacaatt

SEQ ID NO: 1933419 - DNA, 15 bp, Homo sapiens
aaataactacaatta

SEQ ID NO: 1933420 - DNA, 15 bp, Homo sapiens
aataactacaattac

SEQ ID NO: 1933421 - DNA, 15 bp, Homo sapiens
ataactacaattaca

SEQ ID NO: 1933422 - DNA, 15 bp, Homo sapiens
taactacaattacaa

SEQ ID NO: 1933423 - DNA, 15 bp, Homo sapiens
aactacaattacaag

SEQ ID NO: 1933424 - DNA, 15 bp, Homo sapiens
actacaattacaagc

SEQ ID NO: 1933425 - DNA, 15 bp, Homo sapiens
ctacaattacaagca

SEQ ID NO: 1933426 - DNA, 15 bp, Homo sapiens
tacaattacaagcaa

SEQ ID NO: 1933427 - DNA, 15 bp, Homo sapiens
acaattacaagcaaa

SEQ ID NO: 1933428 - DNA, 15 bp, Homo sapiens
caattacaagcaaaa

SEQ ID NO: 1933429 - DNA, 15 bp, Homo sapiens
aattacaagcaaaat

SEQ ID NO: 1933430 - DNA, 15 bp, Homo sapiens
attacaagcaaaatg

SEQ ID NO: 1933431 - DNA, 15 bp, Homo sapiens
ttacaagcaaaatgc

SEQ ID NO: 1933432 - DNA, 15 bp, Homo sapiens
tacaagcaaaatgca

SEQ ID NO: 1933433 - DNA, 15 bp, Homo sapiens
acaagcaaaatgcaa

SEQ ID NO: 1933434 - DNA, 15 bp, Homo sapiens
caagcaaaatgcaaa

SEQ ID NO: 1933435 - DNA, 15 bp, Homo sapiens
aagcaaaatgcaaag

SEQ ID NO: 1933436 - DNA, 15 bp, Homo sapiens
agcaaaatgcaaagt

SEQ ID NO: 1933437 - DNA, 15 bp, Homo sapiens
gcaaaatgcaaagtc

SEQ ID NO: 1933438 - DNA, 15 bp, Homo sapiens
caaaatgcaaagtct

SEQ ID NO: 1933439 - DNA, 15 bp, Homo sapiens
aaaatgcaaagtctg

SEQ ID NO: 1933440 - DNA, 15 bp, Homo sapiens
aaatgcaaagtctgg

SEQ ID NO: 1933441 - DNA, 15 bp, Homo sapiens
aatgcaaagtctggg

SEQ ID NO: 1933442 - DNA, 15 bp, Homo sapiens
atgcaaagtctggga

SEQ ID NO: 1933443 - DNA, 15 bp, Homo sapiens
tgcaaagtctgggag

SEQ ID NO: 1933444 - DNA, 15 bp, Homo sapiens
gcaaagtctgggagc

SEQ ID NO: 1933445 - DNA, 15 bp, Homo sapiens
caaagtctgggagct

SEQ ID NO: 1933446 - DNA, 15 bp, Homo sapiens
aaagtctgggagctt

SEQ ID NO: 1933447 - DNA, 15 bp, Homo sapiens
aagtctgggagcttc

SEQ ID NO: 1933448 - DNA, 15 bp, Homo sapiens
agtctgggagcttct

SEQ ID NO: 1933449 - DNA, 15 bp, Homo sapiens
gtctgggagcttctt

SEQ ID NO: 1933450 - DNA, 15 bp, Homo sapiens
tctgggagcttcttg

SEQ ID NO: 1933451 - DNA, 15 bp, Homo sapiens
ctgggagcttcttgg

SEQ ID NO: 1933452 - DNA, 15 bp, Homo sapiens
tgggagcttcttggt

SEQ ID NO: 1933453 - DNA, 15 bp, Homo sapiens
gggagcttcttggtt

SEQ ID NO: 1933454 - DNA, 15 bp, Homo sapiens
ggagcttcttggtta

SEQ ID NO: 1933455 - DNA, 15 bp, Homo sapiens
gagcttcttggttaa

SEQ ID NO: 1933456 - DNA, 15 bp, Homo sapiens
agcttcttggttaat

SEQ ID NO: 1933457 - DNA, 15 bp, Homo sapiens
gcttcttggttaatg

SEQ ID NO: 1933458 - DNA, 15 bp, Homo sapiens
cttcttggttaatgt

SEQ ID NO: 1933459 - DNA, 15 bp, Homo sapiens
ttcttggttaatgtt

SEQ ID NO: 1933460 - DNA, 15 bp, Homo sapiens
tcttggttaatgttg

SEQ ID NO: 1933461 - DNA, 15 bp, Homo sapiens
cttggttaatgttga

SEQ ID NO: 1933462 - DNA, 15 bp, Homo sapiens
ttggttaatgttgaa

SEQ ID NO: 1933463 - DNA, 15 bp, Homo sapiens
tggttaatgttgaac

SEQ ID NO: 1933464 - DNA, 15 bp, Homo sapiens
ggttaatgttgaact

SEQ ID NO: 1933465 - DNA, 15 bp, Homo sapiens
gttaatgttgaacta

SEQ ID NO: 1933466 - DNA, 15 bp, Homo sapiens
ttaatgttgaactag

SEQ ID NO: 1933467 - DNA, 15 bp, Homo sapiens
taatgttgaactagg

SEQ ID NO: 1933468 - DNA, 15 bp, Homo sapiens
aatgttgaactaggc

SEQ ID NO: 1933469 - DNA, 15 bp, Homo sapiens
atgttgaactaggca

SEQ ID NO: 1933470 - DNA, 15 bp, Homo sapiens
tgttgaactaggcaa

SEQ ID NO: 1933471 - DNA, 15 bp, Homo sapiens
gttgaactaggcaat

SEQ ID NO: 1933472 - DNA, 15 bp, Homo sapiens
ttgaactaggcaatg

SEQ ID NO: 1933473 - DNA, 15 bp, Homo sapiens
tgaactaggcaatgg

SEQ ID NO: 1933474 - DNA, 15 bp, Homo sapiens
gaactaggcaatggt

SEQ ID NO: 1933475 - DNA, 15 bp, Homo sapiens
aactaggcaatggtt

SEQ ID NO: 1933476 - DNA, 15 bp, Homo sapiens
actaggcaatggtta

SEQ ID NO: 1933477 - DNA, 15 bp, Homo sapiens
ctaggcaatggttaa

SEQ ID NO: 1933478 - DNA, 15 bp, Homo sapiens
taggcaatggttaaa

SEQ ID NO: 1933479 - DNA, 15 bp, Homo sapiens
aggcaatggttaaaa

SEQ ID NO: 1933480 - DNA, 15 bp, Homo sapiens
ggcaatggttaaaat

SEQ ID NO: 1933481 - DNA, 15 bp, Homo sapiens
gcaatggttaaaatc

SEQ ID NO: 1933482 - DNA, 15 bp, Homo sapiens
caatggttaaaatcc

SEQ ID NO: 1933483 - DNA, 15 bp, Homo sapiens
aatggttaaaatccc

SEQ ID NO: 1933484 - DNA, 15 bp, Homo sapiens
atggttaaaatccct

SEQ ID NO: 1933485 - DNA, 15 bp, Homo sapiens
tggttaaaatccctt

SEQ ID NO: 1933486 - DNA, 15 bp, Homo sapiens
ggttaaaatcccttc

SEQ ID NO: 1933487 - DNA, 15 bp, Homo sapiens
gttaaaatcccttcc

SEQ ID NO: 1933488 - DNA, 15 bp, Homo sapiens
ttaaaatcccttcct

SEQ ID NO: 1933489 - DNA, 15 bp, Homo sapiens
taaaatcccttcctg

SEQ ID NO: 1933490 - DNA, 15 bp, Homo sapiens
aaaatcccttcctgt

SEQ ID NO: 1933491 - DNA, 15 bp, Homo sapiens
aaatcccttcctgtt

SEQ ID NO: 1933492 - DNA, 15 bp, Homo sapiens
aatcccttcctgttc

SEQ ID NO: 1933493 - DNA, 15 bp, Homo sapiens
atcccttcctgttct

SEQ ID NO: 1933494 - DNA, 15 bp, Homo sapiens
tcccttcctgttcta

SEQ ID NO: 1933495 - DNA, 15 bp, Homo sapiens
cccttcctgttctaa

SEQ ID NO: 1933496 - DNA, 15 bp, Homo sapiens
ccttcctgttctaat

SEQ ID NO: 1933497 - DNA, 15 bp, Homo sapiens
cttcctgttctaatt

SEQ ID NO: 1933498 - DNA, 15 bp, Homo sapiens
ttcctgttctaattt

SEQ ID NO: 1933499 - DNA, 15 bp, Homo sapiens
tcctgttctaattta

SEQ ID NO: 1933500 - DNA, 15 bp, Homo sapiens
cctgttctaatttac

SEQ ID NO: 1933501 - DNA, 15 bp, Homo sapiens
ctgttctaatttact

SEQ ID NO: 1933502 - DNA, 15 bp, Homo sapiens
tgttctaatttactg

SEQ ID NO: 1933503 - DNA, 15 bp, Homo sapiens
gttctaatttactgt

SEQ ID NO: 1933504 - DNA, 15 bp, Homo sapiens
ttctaatttactgta

SEQ ID NO: 1933505 - DNA, 15 bp, Homo sapiens
tctaatttactgtaa

SEQ ID NO: 1933506 - DNA, 15 bp, Homo sapiens
ctaatttactgtaat

SEQ ID NO: 1933507 - DNA, 15 bp, Homo sapiens
taatttactgtaatt

SEQ ID NO: 1933508 - DNA, 15 bp, Homo sapiens
aatttactgtaatta

SEQ ID NO: 1933509 - DNA, 15 bp, Homo sapiens
atttactgtaattag

SEQ ID NO: 1933510 - DNA, 15 bp, Homo sapiens
tttactgtaattaga

SEQ ID NO: 1933511 - DNA, 15 bp, Homo sapiens
ttactgtaattagag

SEQ ID NO: 1933512 - DNA, 15 bp, Homo sapiens
tactgtaattagaga

SEQ ID NO: 1933513 - DNA, 15 bp, Homo sapiens
actgtaattagagat

SEQ ID NO: 1933514 - DNA, 15 bp, Homo sapiens
ctgtaattagagata

SEQ ID NO: 1933515 - DNA, 15 bp, Homo sapiens
tcaaggtccgagctt

SEQ ID NO: 1933516 - DNA, 15 bp, Homo sapiens
caaggtccgagcttc

SEQ ID NO: 1933517 - DNA, 15 bp, Homo sapiens
aaggtccgagcttca

SEQ ID NO: 1933518 - DNA, 15 bp, Homo sapiens
aggtccgagcttcag

SEQ ID NO: 1933519 - DNA, 15 bp, Homo sapiens
ggtccgagcttcagc

SEQ ID NO: 1933520 - DNA, 15 bp, Homo sapiens
gtccgagcttcagct

SEQ ID NO: 1933521 - DNA, 15 bp, Homo sapiens
tccgagcttcagctg

SEQ ID NO: 1933522 - DNA, 15 bp, Homo sapiens
ccgagcttcagctgg

SEQ ID NO: 1933523 - DNA, 15 bp, Homo sapiens
cgagcttcagctggt

SEQ ID NO: 1933524 - DNA, 15 bp, Homo sapiens
gagcttcagctggtc

SEQ ID NO: 1933525 - DNA, 15 bp, Homo sapiens
agcttcagctggtct

SEQ ID NO: 1933526 - DNA, 15 bp, Homo sapiens
gcttcagctggtctc

SEQ ID NO: 1933527 - DNA, 15 bp, Homo sapiens
cttcagctggtctca

SEQ ID NO: 1933528 - DNA, 15 bp, Homo sapiens
ttcagctggtctcat

SEQ ID NO: 1933529 - DNA, 15 bp, Homo sapiens
tcagctggtctcatc

SEQ ID NO: 1933530 - DNA, 15 bp, Homo sapiens
cagctggtctcatct

SEQ ID NO: 1933531 - DNA, 15 bp, Homo sapiens
agctggtctcatcta

SEQ ID NO: 1933532 - DNA, 15 bp, Homo sapiens
gctggtctcatctag

SEQ ID NO: 1933533 - DNA, 15 bp, Homo sapiens
ctggtctcatctaga

SEQ ID NO: 1933534 - DNA, 15 bp, Homo sapiens
tggtctcatctagaa

SEQ ID NO: 1933535 - DNA, 15 bp, Homo sapiens
ggtctcatctagaac

SEQ ID NO: 1933536 - DNA, 15 bp, Homo sapiens
gtctcatctagaact

SEQ ID NO: 1933537 - DNA, 15 bp, Homo sapiens
tctcatctagaactc

SEQ ID NO: 1933538 - DNA, 15 bp, Homo sapiens
ctcatctagaactca

SEQ ID NO: 1933539 - DNA, 15 bp, Homo sapiens
tcatctagaactcag

SEQ ID NO: 1933540 - DNA, 15 bp, Homo sapiens
catctagaactcaga

SEQ ID NO: 1933541 - DNA, 15 bp, Homo sapiens
atctagaactcagat

SEQ ID NO: 1933542 - DNA, 15 bp, Homo sapiens
tctagaactcagatg

SEQ ID NO: 1933543 - DNA, 15 bp, Homo sapiens
ctagaactcagatgg

SEQ ID NO: 1933544 - DNA, 15 bp, Homo sapiens
tagaactcagatgga

SEQ ID NO: 1933545 - DNA, 15 bp, Homo sapiens
agaactcagatggaa

SEQ ID NO: 1933546 - DNA, 15 bp, Homo sapiens
gaactcagatggaat

SEQ ID NO: 1933547 - DNA, 15 bp, Homo sapiens
aactcagatggaatg

SEQ ID NO: 1933548 - DNA, 15 bp, Homo sapiens
actcagatggaatga

SEQ ID NO: 1933549 - DNA, 15 bp, Homo sapiens
ctcagatggaatgac

SEQ ID NO: 1933550 - DNA, 15 bp, Homo sapiens
tcagatggaatgacc

SEQ ID NO: 1933551 - DNA, 15 bp, Homo sapiens
cagatggaatgacct

SEQ ID NO: 1933552 - DNA, 15 bp, Homo sapiens
agatggaatgacctt

SEQ ID NO: 1933553 - DNA, 15 bp, Homo sapiens
gatggaatgaccttc

SEQ ID NO: 1933554 - DNA, 15 bp, Homo sapiens
atggaatgaccttcc

SEQ ID NO: 1933555 - DNA, 15 bp, Homo sapiens
tggaatgaccttcct

SEQ ID NO: 1933556 - DNA, 15 bp, Homo sapiens
ggaatgaccttcctt

SEQ ID NO: 1933557 - DNA, 15 bp, Homo sapiens
gaatgaccttccttg

SEQ ID NO: 1933558 - DNA, 15 bp, Homo sapiens
aatgaccttccttga

SEQ ID NO: 1933559 - DNA, 15 bp, Homo sapiens
atgaccttccttgaa

SEQ ID NO: 1933560 - DNA, 15 bp, Homo sapiens
tgaccttccttgaaa

SEQ ID NO: 1933561 - DNA, 15 bp, Homo sapiens
gaccttccttgaaag

SEQ ID NO: 1933562 - DNA, 15 bp, Homo sapiens
accttccttgaaagg

SEQ ID NO: 1933563 - DNA, 15 bp, Homo sapiens
ccttccttgaaaggt

SEQ ID NO: 1933564 - DNA, 15 bp, Homo sapiens
cttccttgaaaggtc

SEQ ID NO: 1933565 - DNA, 15 bp, Homo sapiens
ttccttgaaaggtcg

SEQ ID NO: 1933566 - DNA, 15 bp, Homo sapiens
tccttgaaaggtcga

SEQ ID NO: 1933567 - DNA, 15 bp, Homo sapiens
ccttgaaaggtcgag

SEQ ID NO: 1933568 - DNA, 15 bp, Homo sapiens
cttgaaaggtcgagg

SEQ ID NO: 1933569 - DNA, 15 bp, Homo sapiens
ttgaaaggtcgaggg

SEQ ID NO: 1933570 - DNA, 15 bp, Homo sapiens
tgaaaggtcgagggg

SEQ ID NO: 1933571 - DNA, 15 bp, Homo sapiens
gaaaggtcgagggga

SEQ ID NO: 1933572 - DNA, 15 bp, Homo sapiens
aaaggtcgaggggac

SEQ ID NO: 1933573 - DNA, 15 bp, Homo sapiens
aaggtcgaggggact

SEQ ID NO: 1933574 - DNA, 15 bp, Homo sapiens
aggtcgaggggactc

SEQ ID NO: 1933575 - DNA, 15 bp, Homo sapiens
ggtcgaggggactct

SEQ ID NO: 1933576 - DNA, 15 bp, Homo sapiens
gtcgaggggactctc

SEQ ID NO: 1933577 - DNA, 15 bp, Homo sapiens
tcgaggggactctcg

SEQ ID NO: 1933578 - DNA, 15 bp, Homo sapiens
cgaggggactctcga

SEQ ID NO: 1933579 - DNA, 15 bp, Homo sapiens
gaggggactctcgaa

SEQ ID NO: 1933580 - DNA, 15 bp, Homo sapiens
aggggactctcgaaa

SEQ ID NO: 1933581 - DNA, 15 bp, Homo sapiens
ggggactctcgaaag

SEQ ID NO: 1933582 - DNA, 15 bp, Homo sapiens
gggactctcgaaagt

SEQ ID NO: 1933583 - DNA, 15 bp, Homo sapiens
ggactctcgaaagtt

SEQ ID NO: 1933584 - DNA, 15 bp, Homo sapiens
gactctcgaaagttg

SEQ ID NO: 1933585 - DNA, 15 bp, Homo sapiens
actctcgaaagttgt

SEQ ID NO: 1933586 - DNA, 15 bp, Homo sapiens
ctctcgaaagttgtg

SEQ ID NO: 1933587 - DNA, 15 bp, Homo sapiens
tctcgaaagttgtga

SEQ ID NO: 1933588 - DNA, 15 bp, Homo sapiens
ctcgaaagttgtgag

SEQ ID NO: 1933589 - DNA, 15 bp, Homo sapiens
tcgaaagttgtgaga

SEQ ID NO: 1933590 - DNA, 15 bp, Homo sapiens
cgaaagttgtgagag

SEQ ID NO: 1933591 - DNA, 15 bp, Homo sapiens
gaaagttgtgagaga

SEQ ID NO: 1933592 - DNA, 15 bp, Homo sapiens
aaagttgtgagagag

SEQ ID NO: 1933593 - DNA, 15 bp, Homo sapiens
aagttgtgagagagt

SEQ ID NO: 1933594 - DNA, 15 bp, Homo sapiens
agttgtgagagagtt

SEQ ID NO: 1933595 - DNA, 15 bp, Homo sapiens
gttgtgagagagttc

SEQ ID NO: 1933596 - DNA, 15 bp, Homo sapiens
ttgtgagagagttcc

SEQ ID NO: 1933597 - DNA, 15 bp, Homo sapiens
tgtgagagagttcct

SEQ ID NO: 1933598 - DNA, 15 bp, Homo sapiens
gtgagagagttcctc

SEQ ID NO: 1933599 - DNA, 15 bp, Homo sapiens
tgagagagttcctca

SEQ ID NO: 1933600 - DNA, 15 bp, Homo sapiens
gagagagttcctcac

SEQ ID NO: 1933601 - DNA, 15 bp, Homo sapiens
agagagttcctcacc

SEQ ID NO: 1933602 - DNA, 15 bp, Homo sapiens
gagagttcctcacct

SEQ ID NO: 1933603 - DNA, 15 bp, Homo sapiens
agagttcctcacctt

SEQ ID NO: 1933604 - DNA, 15 bp, Homo sapiens
gagttcctcaccttt

SEQ ID NO: 1933605 - DNA, 15 bp, Homo sapiens
agttcctcacctttt

SEQ ID NO: 1933606 - DNA, 15 bp, Homo sapiens
gttcctcaccttttc

SEQ ID NO: 1933607 - DNA, 15 bp, Homo sapiens
ttcctcaccttttcg

SEQ ID NO: 1933608 - DNA, 15 bp, Homo sapiens
tcctcaccttttcgc

SEQ ID NO: 1933609 - DNA, 15 bp, Homo sapiens
cctcaccttttcgct

SEQ ID NO: 1933610 - DNA, 15 bp, Homo sapiens
ctcaccttttcgctc

SEQ ID NO: 1933611 - DNA, 15 bp, Homo sapiens
tcaccttttcgctct

SEQ ID NO: 1933612 - DNA, 15 bp, Homo sapiens
caccttttcgctcta

SEQ ID NO: 1933613 - DNA, 15 bp, Homo sapiens
accttttcgctctac

SEQ ID NO: 1933614 - DNA, 15 bp, Homo sapiens
ccttttcgctctaca

SEQ ID NO: 1933615 - DNA, 15 bp, Homo sapiens
cttttcgctctacat

SEQ ID NO: 1933616 - DNA, 15 bp, Homo sapiens
ttttcgctctacata

SEQ ID NO: 1933617 - DNA, 15 bp, Homo sapiens
tttcgctctacatag

SEQ ID NO: 1933618 - DNA, 15 bp, Homo sapiens
ttcgctctacatagg

SEQ ID NO: 1933619 - DNA, 15 bp, Homo sapiens
tcgctctacataggc

SEQ ID NO: 1933620 - DNA, 15 bp, Homo sapiens
cgctctacataggca

SEQ ID NO: 1933621 - DNA, 15 bp, Homo sapiens
gctctacataggcat

SEQ ID NO: 1933622 - DNA, 15 bp, Homo sapiens
ctctacataggcatt

SEQ ID NO: 1933623 - DNA, 15 bp, Homo sapiens
tctacataggcattt

SEQ ID NO: 1933624 - DNA, 15 bp, Homo sapiens
ctacataggcatttt

SEQ ID NO: 1933625 - DNA, 15 bp, Homo sapiens
tacataggcattttc

SEQ ID NO: 1933626 - DNA, 15 bp, Homo sapiens
acataggcattttca

SEQ ID NO: 1933627 - DNA, 15 bp, Homo sapiens
cataggcattttcaa

SEQ ID NO: 1933628 - DNA, 15 bp, Homo sapiens
ataggcattttcaac

SEQ ID NO: 1933629 - DNA, 15 bp, Homo sapiens
taggcattttcaact

SEQ ID NO: 1933630 - DNA, 15 bp, Homo sapiens
aggcattttcaactt

SEQ ID NO: 1933631 - DNA, 15 bp, Homo sapiens
ggcattttcaacttg

SEQ ID NO: 1933632 - DNA, 15 bp, Homo sapiens
gcattttcaacttgg

SEQ ID NO: 1933633 - DNA, 15 bp, Homo sapiens
cattttcaacttggg

SEQ ID NO: 1933634 - DNA, 15 bp, Homo sapiens
attttcaacttgggg

SEQ ID NO: 1933635 - DNA, 15 bp, Homo sapiens
ttttcaacttggggt

SEQ ID NO: 1933636 - DNA, 15 bp, Homo sapiens
tttcaacttggggtt

SEQ ID NO: 1933637 - DNA, 15 bp, Homo sapiens
ttcaacttggggttc

SEQ ID NO: 1933638 - DNA, 15 bp, Homo sapiens
tcaacttggggttca

SEQ ID NO: 1933639 - DNA, 15 bp, Homo sapiens
caacttggggttcaa

SEQ ID NO: 1933640 - DNA, 15 bp, Homo sapiens
aacttggggttcaaa

SEQ ID NO: 1933641 - DNA, 15 bp, Homo sapiens
acttggggttcaaag

SEQ ID NO: 1933642 - DNA, 15 bp, Homo sapiens
cttggggttcaaaga

SEQ ID NO: 1933643 - DNA, 15 bp, Homo sapiens
ttggggttcaaagat

SEQ ID NO: 1933644 - DNA, 15 bp, Homo sapiens
tggggttcaaagata

SEQ ID NO: 1933645 - DNA, 15 bp, Homo sapiens
ggggttcaaagataa

SEQ ID NO: 1933646 - DNA, 15 bp, Homo sapiens
gggttcaaagataag

SEQ ID NO: 1933647 - DNA, 15 bp, Homo sapiens
ggttcaaagataagc

SEQ ID NO: 1933648 - DNA, 15 bp, Homo sapiens
gttcaaagataagct

SEQ ID NO: 1933649 - DNA, 15 bp, Homo sapiens
ttcaaagataagctt

SEQ ID NO: 1933650 - DNA, 15 bp, Homo sapiens
tcaaagataagcttt

SEQ ID NO: 1933651 - DNA, 15 bp, Homo sapiens
caaagataagctttt

SEQ ID NO: 1933652 - DNA, 15 bp, Homo sapiens
aaagataagcttttg

SEQ ID NO: 1933653 - DNA, 15 bp, Homo sapiens
aagataagcttttgt

SEQ ID NO: 1933654 - DNA, 15 bp, Homo sapiens
agataagcttttgtg

SEQ ID NO: 1933655 - DNA, 15 bp, Homo sapiens
gataagcttttgtgg

SEQ ID NO: 1933656 - DNA, 15 bp, Homo sapiens
ataagcttttgtggc

SEQ ID NO: 1933657 - DNA, 15 bp, Homo sapiens
taagcttttgtggct

SEQ ID NO: 1933658 - DNA, 15 bp, Homo sapiens
aagcttttgtggctt

SEQ ID NO: 1933659 - DNA, 15 bp, Homo sapiens
agcttttgtggcttg

SEQ ID NO: 1933660 - DNA, 15 bp, Homo sapiens
gcttttgtggcttga

SEQ ID NO: 1933661 - DNA, 15 bp, Homo sapiens
cttttgtggcttgac

SEQ ID NO: 1933662 - DNA, 15 bp, Homo sapiens
ttttgtggcttgaca

SEQ ID NO: 1933663 - DNA, 15 bp, Homo sapiens
tttgtggcttgacaa

SEQ ID NO: 1933664 - DNA, 15 bp, Homo sapiens
ttgtggcttgacaaa

SEQ ID NO: 1933665 - DNA, 15 bp, Homo sapiens
tgtggcttgacaaac

SEQ ID NO: 1933666 - DNA, 15 bp, Homo sapiens
gtggcttgacaaacg

SEQ ID NO: 1933667 - DNA, 15 bp, Homo sapiens
tggcttgacaaacga

SEQ ID NO: 1933668 - DNA, 15 bp, Homo sapiens
ggcttgacaaacgac

SEQ ID NO: 1933669 - DNA, 15 bp, Homo sapiens
gcttgacaaacgacc

SEQ ID NO: 1933670 - DNA, 15 bp, Homo sapiens
cttgacaaacgaccc

SEQ ID NO: 1933671 - DNA, 15 bp, Homo sapiens
ttgacaaacgacccg

SEQ ID NO: 1933672 - DNA, 15 bp, Homo sapiens
tgacaaacgacccgg

SEQ ID NO: 1933673 - DNA, 15 bp, Homo sapiens
gacaaacgacccgga

SEQ ID NO: 1933674 - DNA, 15 bp, Homo sapiens
acaaacgacccggaa

SEQ ID NO: 1933675 - DNA, 15 bp, Homo sapiens
caaacgacccggaat

SEQ ID NO: 1933676 - DNA, 15 bp, Homo sapiens
aaacgacccggaatc

SEQ ID NO: 1933677 - DNA, 15 bp, Homo sapiens
aacgacccggaatca

SEQ ID NO: 1933678 - DNA, 15 bp, Homo sapiens
acgacccggaatcaa

SEQ ID NO: 1933679 - DNA, 15 bp, Homo sapiens
cgacccggaatcaaa

SEQ ID NO: 1933680 - DNA, 15 bp, Homo sapiens
gacccggaatcaaat

SEQ ID NO: 1933681 - DNA, 15 bp, Homo sapiens
acccggaatcaaatg

SEQ ID NO: 1933682 - DNA, 15 bp, Homo sapiens
cccggaatcaaatgt

SEQ ID NO: 1933683 - DNA, 15 bp, Homo sapiens
ccggaatcaaatgtg

SEQ ID NO: 1933684 - DNA, 15 bp, Homo sapiens
cggaatcaaatgtgg

SEQ ID NO: 1933685 - DNA, 15 bp, Homo sapiens
ggaatcaaatgtgga

SEQ ID NO: 1933686 - DNA, 15 bp, Homo sapiens
gaatcaaatgtggaa

SEQ ID NO: 1933687 - DNA, 15 bp, Homo sapiens
aatcaaatgtggaat

SEQ ID NO: 1933688 - DNA, 15 bp, Homo sapiens
atcaaatgtggaata

SEQ ID NO: 1933689 - DNA, 15 bp, Homo sapiens
tcaaatgtggaatat

SEQ ID NO: 1933690 - DNA, 15 bp, Homo sapiens
caaatgtggaatatt

SEQ ID NO: 1933691 - DNA, 15 bp, Homo sapiens
aaatgtggaatattg

SEQ ID NO: 1933692 - DNA, 15 bp, Homo sapiens
aatgtggaatattgc

SEQ ID NO: 1933693 - DNA, 15 bp, Homo sapiens
atgtggaatattgcg

SEQ ID NO: 1933694 - DNA, 15 bp, Homo sapiens
tgtggaatattgcgg

SEQ ID NO: 1933695 - DNA, 15 bp, Homo sapiens
gtggaatattgcggg

SEQ ID NO: 1933696 - DNA, 15 bp, Homo sapiens
tggaatattgcgggt

SEQ ID NO: 1933697 - DNA, 15 bp, Homo sapiens
ggaatattgcgggtc

SEQ ID NO: 1933698 - DNA, 15 bp, Homo sapiens
gaatattgcgggtcc

SEQ ID NO: 1933699 - DNA, 15 bp, Homo sapiens
aatattgcgggtcca

SEQ ID NO: 1933700 - DNA, 15 bp, Homo sapiens
atattgcgggtccat

SEQ ID NO: 1933701 - DNA, 15 bp, Homo sapiens
tattgcgggtccatt

SEQ ID NO: 1933702 - DNA, 15 bp, Homo sapiens
attgcgggtccattt

SEQ ID NO: 1933703 - DNA, 15 bp, Homo sapiens
ttgcgggtccatttt

SEQ ID NO: 1933704 - DNA, 15 bp, Homo sapiens
tgcgggtccattttg

SEQ ID NO: 1933705 - DNA, 15 bp, Homo sapiens
gcgggtccattttgg

SEQ ID NO: 1933706 - DNA, 15 bp, Homo sapiens
cgggtccattttggg

SEQ ID NO: 1933707 - DNA, 15 bp, Homo sapiens
gggtccattttggga

SEQ ID NO: 1933708 - DNA, 15 bp, Homo sapiens
ggtccattttgggaa

SEQ ID NO: 1933709 - DNA, 15 bp, Homo sapiens
gtccattttgggaag

SEQ ID NO: 1933710 - DNA, 15 bp, Homo sapiens
tccattttgggaagt

SEQ ID NO: 1933711 - DNA, 15 bp, Homo sapiens
ccattttgggaagta

SEQ ID NO: 1933712 - DNA, 15 bp, Homo sapiens
cattttgggaagtac

SEQ ID NO: 1933713 - DNA, 15 bp, Homo sapiens
attttgggaagtaca

SEQ ID NO: 1933714 - DNA, 15 bp, Homo sapiens
ttttgggaagtacag

SEQ ID NO: 1933715 - DNA, 15 bp, Homo sapiens
tttgggaagtacaga

SEQ ID NO: 1933716 - DNA, 15 bp, Homo sapiens
ttgggaagtacagag

SEQ ID NO: 1933717 - DNA, 15 bp, Homo sapiens
tgggaagtacagagg

SEQ ID NO: 1933718 - DNA, 15 bp, Homo sapiens
gggaagtacagaggg

SEQ ID NO: 1933719 - DNA, 15 bp, Homo sapiens
ggaagtacagagggc

SEQ ID NO: 1933720 - DNA, 15 bp, Homo sapiens
gaagtacagagggct

SEQ ID NO: 1933721 - DNA, 15 bp, Homo sapiens
aagtacagagggctc

SEQ ID NO: 1933722 - DNA, 15 bp, Homo sapiens
agtacagagggctcc

SEQ ID NO: 1933723 - DNA, 15 bp, Homo sapiens
gtacagagggctcct

SEQ ID NO: 1933724 - DNA, 15 bp, Homo sapiens
tacagagggctccta

SEQ ID NO: 1933725 - DNA, 15 bp, Homo sapiens
acagagggctcctag

SEQ ID NO: 1933726 - DNA, 15 bp, Homo sapiens
cagagggctcctagt

SEQ ID NO: 1933727 - DNA, 15 bp, Homo sapiens
agagggctcctagtt

SEQ ID NO: 1933728 - DNA, 15 bp, Homo sapiens
gagggctcctagttt

SEQ ID NO: 1933729 - DNA, 15 bp, Homo sapiens
agggctcctagtttt

SEQ ID NO: 1933730 - DNA, 15 bp, Homo sapiens
gggctcctagttttc

SEQ ID NO: 1933731 - DNA, 15 bp, Homo sapiens
ggctcctagttttca

SEQ ID NO: 1933732 - DNA, 15 bp, Homo sapiens
gctcctagttttcat

SEQ ID NO: 1933733 - DNA, 15 bp, Homo sapiens
ctcctagttttcatg

SEQ ID NO: 1933734 - DNA, 15 bp, Homo sapiens
tcctagttttcatga

SEQ ID NO: 1933735 - DNA, 15 bp, Homo sapiens
cctagttttcatgaa

SEQ ID NO: 1933736 - DNA, 15 bp, Homo sapiens
ctagttttcatgaaa

SEQ ID NO: 1933737 - DNA, 15 bp, Homo sapiens
tagttttcatgaaat

SEQ ID NO: 1933738 - DNA, 15 bp, Homo sapiens
agttttcatgaaata

SEQ ID NO: 1933739 - DNA, 15 bp, Homo sapiens
gttttcatgaaatag

SEQ ID NO: 1933740 - DNA, 15 bp, Homo sapiens
ttttcatgaaataga

SEQ ID NO: 1933741 - DNA, 15 bp, Homo sapiens
tttcatgaaatagat

SEQ ID NO: 1933742 - DNA, 15 bp, Homo sapiens
ttcatgaaatagatt

SEQ ID NO: 1933743 - DNA, 15 bp, Homo sapiens
tcatgaaatagattc

SEQ ID NO: 1933744 - DNA, 15 bp, Homo sapiens
catgaaatagattct

SEQ ID NO: 1933745 - DNA, 15 bp, Homo sapiens
atgaaatagattctc

SEQ ID NO: 1933746 - DNA, 15 bp, Homo sapiens
tgaaatagattctca

SEQ ID NO: 1933747 - DNA, 15 bp, Homo sapiens
gaaatagattctcaa

SEQ ID NO: 1933748 - DNA, 15 bp, Homo sapiens
aaatagattctcaaa

SEQ ID NO: 1933749 - DNA, 15 bp, Homo sapiens
aatagattctcaaaa

SEQ ID NO: 1933750 - DNA, 15 bp, Homo sapiens
atagattctcaaaag

SEQ ID NO: 1933751 - DNA, 15 bp, Homo sapiens
tagattctcaaaaga

SEQ ID NO: 1933752 - DNA, 15 bp, Homo sapiens
agattctcaaaagag

SEQ ID NO: 1933753 - DNA, 15 bp, Homo sapiens
gattctcaaaagagt

SEQ ID NO: 1933754 - DNA, 15 bp, Homo sapiens
attctcaaaagagtc

SEQ ID NO: 1933755 - DNA, 15 bp, Homo sapiens
ttctcaaaagagtct

SEQ ID NO: 1933756 - DNA, 15 bp, Homo sapiens
tctcaaaagagtcta

SEQ ID NO: 1933757 - DNA, 15 bp, Homo sapiens
ctcaaaagagtctac

SEQ ID NO: 1933758 - DNA, 15 bp, Homo sapiens
tcaaaagagtctaca

SEQ ID NO: 1933759 - DNA, 15 bp, Homo sapiens
caaaagagtctacag

SEQ ID NO: 1933760 - DNA, 15 bp, Homo sapiens
aaaagagtctacagg

SEQ ID NO: 1933761 - DNA, 15 bp, Homo sapiens
aaagagtctacaggg

SEQ ID NO: 1933762 - DNA, 15 bp, Homo sapiens
aagagtctacaggga

SEQ ID NO: 1933763 - DNA, 15 bp, Homo sapiens
agagtctacagggag

SEQ ID NO: 1933764 - DNA, 15 bp, Homo sapiens
gagtctacagggagc

SEQ ID NO: 1933765 - DNA, 15 bp, Homo sapiens
agtctacagggagcc

SEQ ID NO: 1933766 - DNA, 15 bp, Homo sapiens
gtctacagggagcct

SEQ ID NO: 1933767 - DNA, 15 bp, Homo sapiens
tctacagggagccta

SEQ ID NO: 1933768 - DNA, 15 bp, Homo sapiens
ctacagggagcctag

SEQ ID NO: 1933769 - DNA, 15 bp, Homo sapiens
tacagggagcctagt

SEQ ID NO: 1933770 - DNA, 15 bp, Homo sapiens
acagggagcctagtt

SEQ ID NO: 1933771 - DNA, 15 bp, Homo sapiens
cagggagcctagtta

SEQ ID NO: 1933772 - DNA, 15 bp, Homo sapiens
agggagcctagttac

SEQ ID NO: 1933773 - DNA, 15 bp, Homo sapiens
gggagcctagttacc

SEQ ID NO: 1933774 - DNA, 15 bp, Homo sapiens
ggagcctagttaccc

SEQ ID NO: 1933775 - DNA, 15 bp, Homo sapiens
gagcctagttaccct

SEQ ID NO: 1933776 - DNA, 15 bp, Homo sapiens
agcctagttaccctt

SEQ ID NO: 1933777 - DNA, 15 bp, Homo sapiens
gcctagttacccttt

SEQ ID NO: 1933778 - DNA, 15 bp, Homo sapiens
cctagttaccctttg

SEQ ID NO: 1933779 - DNA, 15 bp, Homo sapiens
ctagttaccctttgt

SEQ ID NO: 1933780 - DNA, 15 bp, Homo sapiens
tagttaccctttgtg

SEQ ID NO: 1933781 - DNA, 15 bp, Homo sapiens
agttaccctttgtgt

SEQ ID NO: 1933782 - DNA, 15 bp, Homo sapiens
gttaccctttgtgtt

SEQ ID NO: 1933783 - DNA, 15 bp, Homo sapiens
ttaccctttgtgttt

SEQ ID NO: 1933784 - DNA, 15 bp, Homo sapiens
taccctttgtgttta

SEQ ID NO: 1933785 - DNA, 15 bp, Homo sapiens
accctttgtgtttag

SEQ ID NO: 1933786 - DNA, 15 bp, Homo sapiens
ccctttgtgtttagg

SEQ ID NO: 1933787 - DNA, 15 bp, Homo sapiens
cctttgtgtttaggg

SEQ ID NO: 1933788 - DNA, 15 bp, Homo sapiens
ctttgtgtttaggga

SEQ ID NO: 1933789 - DNA, 15 bp, Homo sapiens
tttgtgtttagggac

SEQ ID NO: 1933790 - DNA, 15 bp, Homo sapiens
ttgtgtttagggaca

SEQ ID NO: 1933791 - DNA, 15 bp, Homo sapiens
tgtgtttagggacag

SEQ ID NO: 1933792 - DNA, 15 bp, Homo sapiens
gtgtttagggacagt

SEQ ID NO: 1933793 - DNA, 15 bp, Homo sapiens
tgtttagggacagtc

SEQ ID NO: 1933794 - DNA, 15 bp, Homo sapiens
gtttagggacagtca

SEQ ID NO: 1933795 - DNA, 15 bp, Homo sapiens
tttagggacagtcag

SEQ ID NO: 1933796 - DNA, 15 bp, Homo sapiens
ttagggacagtcagg

SEQ ID NO: 1933797 - DNA, 15 bp, Homo sapiens
tagggacagtcagga

SEQ ID NO: 1933798 - DNA, 15 bp, Homo sapiens
agggacagtcaggag

SEQ ID NO: 1933799 - DNA, 15 bp, Homo sapiens
gggacagtcaggagt

SEQ ID NO: 1933800 - DNA, 15 bp, Homo sapiens
ggacagtcaggagtc

SEQ ID NO: 1933801 - DNA, 15 bp, Homo sapiens
gacagtcaggagtcg

SEQ ID NO: 1933802 - DNA, 15 bp, Homo sapiens
acagtcaggagtcgt

SEQ ID NO: 1933803 - DNA, 15 bp, Homo sapiens
cagtcaggagtcgtc

SEQ ID NO: 1933804 - DNA, 15 bp, Homo sapiens
agtcaggagtcgtct

SEQ ID NO: 1933805 - DNA, 15 bp, Homo sapiens
gtcaggagtcgtctg

SEQ ID NO: 1933806 - DNA, 15 bp, Homo sapiens
tcaggagtcgtctgg

SEQ ID NO: 1933807 - DNA, 15 bp, Homo sapiens
caggagtcgtctgga

SEQ ID NO: 1933808 - DNA, 15 bp, Homo sapiens
aggagtcgtctggag

SEQ ID NO: 1933809 - DNA, 15 bp, Homo sapiens
ggagtcgtctggaga

SEQ ID NO: 1933810 - DNA, 15 bp, Homo sapiens
gagtcgtctggagaa

SEQ ID NO: 1933811 - DNA, 15 bp, Homo sapiens
agtcgtctggagaac

SEQ ID NO: 1933812 - DNA, 15 bp, Homo sapiens
gtcgtctggagaaca

SEQ ID NO: 1933813 - DNA, 15 bp, Homo sapiens
tcgtctggagaacag

SEQ ID NO: 1933814 - DNA, 15 bp, Homo sapiens
cgtctggagaacagt

SEQ ID NO: 1933815 - DNA, 15 bp, Homo sapiens
gtctggagaacagta

SEQ ID NO: 1933816 - DNA, 15 bp, Homo sapiens
tctggagaacagtaa

SEQ ID NO: 1933817 - DNA, 15 bp, Homo sapiens
ctggagaacagtaaa

SEQ ID NO: 1933818 - DNA, 15 bp, Homo sapiens
tggagaacagtaaaa

SEQ ID NO: 1933819 - DNA, 15 bp, Homo sapiens
ggagaacagtaaaac

SEQ ID NO: 1933820 - DNA, 15 bp, Homo sapiens
gagaacagtaaaact

SEQ ID NO: 1933821 - DNA, 15 bp, Homo sapiens
agaacagtaaaactt

SEQ ID NO: 1933822 - DNA, 15 bp, Homo sapiens
gaacagtaaaacttg

SEQ ID NO: 1933823 - DNA, 15 bp, Homo sapiens
aacagtaaaacttgc

SEQ ID NO: 1933824 - DNA, 15 bp, Homo sapiens
acagtaaaacttgct

SEQ ID NO: 1933825 - DNA, 15 bp, Homo sapiens
cagtaaaacttgctg

SEQ ID NO: 1933826 - DNA, 15 bp, Homo sapiens
agtaaaacttgctga

SEQ ID NO: 1933827 - DNA, 15 bp, Homo sapiens
gtaaaacttgctgaa

SEQ ID NO: 1933828 - DNA, 15 bp, Homo sapiens
taaaacttgctgaaa

SEQ ID NO: 1933829 - DNA, 15 bp, Homo sapiens
aaaacttgctgaaaa

SEQ ID NO: 1933830 - DNA, 15 bp, Homo sapiens
aaacttgctgaaaat

SEQ ID NO: 1933831 - DNA, 15 bp, Homo sapiens
aacttgctgaaaata

SEQ ID NO: 1933832 - DNA, 15 bp, Homo sapiens
acttgctgaaaatag

SEQ ID NO: 1933833 - DNA, 15 bp, Homo sapiens
cttgctgaaaataga

SEQ ID NO: 1933834 - DNA, 15 bp, Homo sapiens
ttgctgaaaatagaa

SEQ ID NO: 1933835 - DNA, 15 bp, Homo sapiens
tgctgaaaatagaaa

SEQ ID NO: 1933836 - DNA, 15 bp, Homo sapiens
gctgaaaatagaaaa

SEQ ID NO: 1933837 - DNA, 15 bp, Homo sapiens
ctgaaaatagaaaac

SEQ ID NO: 1933838 - DNA, 15 bp, Homo sapiens
tgaaaatagaaaacc

SEQ ID NO: 1933839 - DNA, 15 bp, Homo sapiens
gaaaatagaaaacct

SEQ ID NO: 1933840 - DNA, 15 bp, Homo sapiens
aaaatagaaaacctt

SEQ ID NO: 1933841 - DNA, 15 bp, Homo sapiens
aaatagaaaaccttc

SEQ ID NO: 1933842 - DNA, 15 bp, Homo sapiens
aatagaaaaccttca

SEQ ID NO: 1933843 - DNA, 15 bp, Homo sapiens
atagaaaaccttcag

SEQ ID NO: 1933844 - DNA, 15 bp, Homo sapiens
tagaaaaccttcagt

SEQ ID NO: 1933845 - DNA, 15 bp, Homo sapiens
agaaaaccttcagtg

SEQ ID NO: 1933846 - DNA, 15 bp, Homo sapiens
gaaaaccttcagtga

SEQ ID NO: 1933847 - DNA, 15 bp, Homo sapiens
aaaaccttcagtgaa

SEQ ID NO: 1933848 - DNA, 15 bp, Homo sapiens
aaaccttcagtgaaa

SEQ ID NO: 1933849 - DNA, 15 bp, Homo sapiens
aaccttcagtgaaat

SEQ ID NO: 1933850 - DNA, 15 bp, Homo sapiens
accttcagtgaaatg

SEQ ID NO: 1933851 - DNA, 15 bp, Homo sapiens
ccttcagtgaaatgt

SEQ ID NO: 1933852 - DNA, 15 bp, Homo sapiens
cttcagtgaaatgta

SEQ ID NO: 1933853 - DNA, 15 bp, Homo sapiens
ttcagtgaaatgtac

SEQ ID NO: 1933854 - DNA, 15 bp, Homo sapiens
tcagtgaaatgtacc

SEQ ID NO: 1933855 - DNA, 15 bp, Homo sapiens
cagtgaaatgtacct

SEQ ID NO: 1933856 - DNA, 15 bp, Homo sapiens
agtgaaatgtaccta

SEQ ID NO: 1933857 - DNA, 15 bp, Homo sapiens
gtgaaatgtacctaa

SEQ ID NO: 1933858 - DNA, 15 bp, Homo sapiens
tgaaatgtacctaat

SEQ ID NO: 1933859 - DNA, 15 bp, Homo sapiens
gaaatgtacctaata

SEQ ID NO: 1933860 - DNA, 15 bp, Homo sapiens
aaatgtacctaatat

SEQ ID NO: 1933861 - DNA, 15 bp, Homo sapiens
aatgtacctaatatg

SEQ ID NO: 1933862 - DNA, 15 bp, Homo sapiens
atgtacctaatatga

SEQ ID NO: 1933863 - DNA, 15 bp, Homo sapiens
tgtacctaatatgac

SEQ ID NO: 1933864 - DNA, 15 bp, Homo sapiens
gtacctaatatgact

SEQ ID NO: 1933865 - DNA, 15 bp, Homo sapiens
tacctaatatgactt

SEQ ID NO: 1933866 - DNA, 15 bp, Homo sapiens
acctaatatgacttc

SEQ ID NO: 1933867 - DNA, 15 bp, Homo sapiens
cctaatatgacttct

SEQ ID NO: 1933868 - DNA, 15 bp, Homo sapiens
ctaatatgacttctc

SEQ ID NO: 1933869 - DNA, 15 bp, Homo sapiens
taatatgacttctct

SEQ ID NO: 1933870 - DNA, 15 bp, Homo sapiens
aatatgacttctctg

SEQ ID NO: 1933871 - DNA, 15 bp, Homo sapiens
atatgacttctctga

SEQ ID NO: 1933872 - DNA, 15 bp, Homo sapiens
tatgacttctctgac

SEQ ID NO: 1933873 - DNA, 15 bp, Homo sapiens
atgacttctctgaca

SEQ ID NO: 1933874 - DNA, 15 bp, Homo sapiens
tgacttctctgacaa

SEQ ID NO: 1933875 - DNA, 15 bp, Homo sapiens
gacttctctgacaac

SEQ ID NO: 1933876 - DNA, 15 bp, Homo sapiens
acttctctgacaact

SEQ ID NO: 1933877 - DNA, 15 bp, Homo sapiens
cttctctgacaactt

SEQ ID NO: 1933878 - DNA, 15 bp, Homo sapiens
ttctctgacaacttc

SEQ ID NO: 1933879 - DNA, 15 bp, Homo sapiens
tctctgacaacttct

SEQ ID NO: 1933880 - DNA, 15 bp, Homo sapiens
ctctgacaacttcta

SEQ ID NO: 1933881 - DNA, 15 bp, Homo sapiens
tctgacaacttctat

SEQ ID NO: 1933882 - DNA, 15 bp, Homo sapiens
ctgacaacttctatt

SEQ ID NO: 1933883 - DNA, 15 bp, Homo sapiens
tgacaacttctattg

SEQ ID NO: 1933884 - DNA, 15 bp, Homo sapiens
gacaacttctattgg

SEQ ID NO: 1933885 - DNA, 15 bp, Homo sapiens
acaacttctattggt

SEQ ID NO: 1933886 - DNA, 15 bp, Homo sapiens
caacttctattggtc

SEQ ID NO: 1933887 - DNA, 15 bp, Homo sapiens
aacttctattggtct

SEQ ID NO: 1933888 - DNA, 15 bp, Homo sapiens
acttctattggtctc

SEQ ID NO: 1933889 - DNA, 15 bp, Homo sapiens
cttctattggtctcg

SEQ ID NO: 1933890 - DNA, 15 bp, Homo sapiens
ttctattggtctcga

SEQ ID NO: 1933891 - DNA, 15 bp, Homo sapiens
tctattggtctcgaa

SEQ ID NO: 1933892 - DNA, 15 bp, Homo sapiens
ctattggtctcgaaa

SEQ ID NO: 1933893 - DNA, 15 bp, Homo sapiens
tattggtctcgaaag

SEQ ID NO: 1933894 - DNA, 15 bp, Homo sapiens
attggtctcgaaagc

SEQ ID NO: 1933895 - DNA, 15 bp, Homo sapiens
ttggtctcgaaagca

SEQ ID NO: 1933896 - DNA, 15 bp, Homo sapiens
tggtctcgaaagcaa

SEQ ID NO: 1933897 - DNA, 15 bp, Homo sapiens
ggtctcgaaagcaag

SEQ ID NO: 1933898 - DNA, 15 bp, Homo sapiens
gtctcgaaagcaagc

SEQ ID NO: 1933899 - DNA, 15 bp, Homo sapiens
tctcgaaagcaagca

SEQ ID NO: 1933900 - DNA, 15 bp, Homo sapiens
ctcgaaagcaagcaa

SEQ ID NO: 1933901 - DNA, 15 bp, Homo sapiens
tcgaaagcaagcaag

SEQ ID NO: 1933902 - DNA, 15 bp, Homo sapiens
cgaaagcaagcaaga

SEQ ID NO: 1933903 - DNA, 15 bp, Homo sapiens
gaaagcaagcaagaa

SEQ ID NO: 1933904 - DNA, 15 bp, Homo sapiens
aaagcaagcaagaag

SEQ ID NO: 1933905 - DNA, 15 bp, Homo sapiens
aagcaagcaagaaga

SEQ ID NO: 1933906 - DNA, 15 bp, Homo sapiens
agcaagcaagaagaa

SEQ ID NO: 1933907 - DNA, 15 bp, Homo sapiens
gcaagcaagaagaaa

SEQ ID NO: 1933908 - DNA, 15 bp, Homo sapiens
caagcaagaagaaaa

SEQ ID NO: 1933909 - DNA, 15 bp, Homo sapiens
aagcaagaagaaaaa

SEQ ID NO: 1933910 - DNA, 15 bp, Homo sapiens
gcaagaagaaaaaga

SEQ ID NO: 1933911 - DNA, 15 bp, Homo sapiens
caagaagaaaaagaa

SEQ ID NO: 1933912 - DNA, 15 bp, Homo sapiens
aagaagaaaaagaaa

SEQ ID NO: 1933913 - DNA, 15 bp, Homo sapiens
agaagaaaaagaaaa

SEQ ID NO: 1933914 - DNA, 15 bp, Homo sapiens
gaagaaaaagaaaaa

SEQ ID NO: 1933915 - DNA, 15 bp, Homo sapiens
aaagaaaaagaaaaa

SEQ ID NO: 1933916 - DNA, 15 bp, Homo sapiens
aagaaaaagaaaaaa

SEQ ID NO: 1933917 - DNA, 15 bp, Homo sapiens
agaaaaagaaaaaaa

SEQ ID NO: 1933918 - DNA, 15 bp, Homo sapiens
gaaaaagaaaaaaaa

SEQ ID NO: 1933919 - DNA, 15 bp, Homo sapiens
agaaaaaaaaaaaag

SEQ ID NO: 1933920 - DNA, 15 bp, Homo sapiens
gaaaaaaaaaaaaga

SEQ ID NO: 1933921 - DNA, 15 bp, Homo sapiens
aaaaaaaaaagataa

SEQ ID NO: 1933922 - DNA, 15 bp, Homo sapiens
aaaaaaaaagataaa

SEQ ID NO: 1933923 - DNA, 15 bp, Homo sapiens
aaaaaaaagataaaa

SEQ ID NO: 1933924 - DNA, 15 bp, Homo sapiens
aaaaaaagataaaac

SEQ ID NO: 1933925 - DNA, 15 bp, Homo sapiens
aaaaaagataaaacc

SEQ ID NO: 1933926 - DNA, 15 bp, Homo sapiens
aaaaagataaaacct

SEQ ID NO: 1933927 - DNA, 15 bp, Homo sapiens
aaaagataaaacctg

SEQ ID NO: 1933928 - DNA, 15 bp, Homo sapiens
aaagataaaacctgg

SEQ ID NO: 1933929 - DNA, 15 bp, Homo sapiens
aagataaaacctggt

SEQ ID NO: 1933930 - DNA, 15 bp, Homo sapiens
agataaaacctggtt

SEQ ID NO: 1933931 - DNA, 15 bp, Homo sapiens
gataaaacctggtta

SEQ ID NO: 1933932 - DNA, 15 bp, Homo sapiens
ataaaacctggttag

SEQ ID NO: 1933933 - DNA, 15 bp, Homo sapiens
taaaacctggttagg

SEQ ID NO: 1933934 - DNA, 15 bp, Homo sapiens
aaaacctggttagga

SEQ ID NO: 1933935 - DNA, 15 bp, Homo sapiens
aaacctggttaggac

SEQ ID NO: 1933936 - DNA, 15 bp, Homo sapiens
aacctggttaggact

SEQ ID NO: 1933937 - DNA, 15 bp, Homo sapiens
acctggttaggactc

SEQ ID NO: 1933938 - DNA, 15 bp, Homo sapiens
cctggttaggactcc

SEQ ID NO: 1933939 - DNA, 15 bp, Homo sapiens
ctggttaggactccc

SEQ ID NO: 1933940 - DNA, 15 bp, Homo sapiens
tggttaggactcccg

SEQ ID NO: 1933941 - DNA, 15 bp, Homo sapiens
ggttaggactcccgg

SEQ ID NO: 1933942 - DNA, 15 bp, Homo sapiens
gttaggactcccggg

SEQ ID NO: 1933943 - DNA, 15 bp, Homo sapiens
ttaggactcccggga

SEQ ID NO: 1933944 - DNA, 15 bp, Homo sapiens
taggactcccgggat

SEQ ID NO: 1933945 - DNA, 15 bp, Homo sapiens
aggactcccgggatg

SEQ ID NO: 1933946 - DNA, 15 bp, Homo sapiens
ggactcccgggatgg

SEQ ID NO: 1933947 - DNA, 15 bp, Homo sapiens
gactcccgggatgga

SEQ ID NO: 1933948 - DNA, 15 bp, Homo sapiens
actcccgggatggag

SEQ ID NO: 1933949 - DNA, 15 bp, Homo sapiens
ctcccgggatggaga

SEQ ID NO: 1933950 - DNA, 15 bp, Homo sapiens
tcccgggatggagag

SEQ ID NO: 1933951 - DNA, 15 bp, Homo sapiens
cccgggatggagagc

SEQ ID NO: 1933952 - DNA, 15 bp, Homo sapiens
ccgggatggagagca

SEQ ID NO: 1933953 - DNA, 15 bp, Homo sapiens
cgggatggagagcag

SEQ ID NO: 1933954 - DNA, 15 bp, Homo sapiens
gggatggagagcaga

SEQ ID NO: 1933955 - DNA, 15 bp, Homo sapiens
ggatggagagcagag

SEQ ID NO: 1933956 - DNA, 15 bp, Homo sapiens
gatggagagcagaga

SEQ ID NO: 1933957 - DNA, 15 bp, Homo sapiens
atggagagcagagag

SEQ ID NO: 1933958 - DNA, 15 bp, Homo sapiens
tggagagcagagaga

SEQ ID NO: 1933959 - DNA, 15 bp, Homo sapiens
ggagagcagagagag

SEQ ID NO: 1933960 - DNA, 15 bp, Homo sapiens
gagagcagagagagg

SEQ ID NO: 1933961 - DNA, 15 bp, Homo sapiens
agagcagagagagga

SEQ ID NO: 1933962 - DNA, 15 bp, Homo sapiens
gagcagagagaggaa

SEQ ID NO: 1933963 - DNA, 15 bp, Homo sapiens
agcagagagaggaag

SEQ ID NO: 1933964 - DNA, 15 bp, Homo sapiens
gcagagagaggaagt

SEQ ID NO: 1933965 - DNA, 15 bp, Homo sapiens
cagagagaggaagtc

SEQ ID NO: 1933966 - DNA, 15 bp, Homo sapiens
agagagaggaagtct

SEQ ID NO: 1933967 - DNA, 15 bp, Homo sapiens
gagagaggaagtctc

SEQ ID NO: 1933968 - DNA, 15 bp, Homo sapiens
agagaggaagtctca

SEQ ID NO: 1933969 - DNA, 15 bp, Homo sapiens
gagaggaagtctcag

SEQ ID NO: 1933970 - DNA, 15 bp, Homo sapiens
agaggaagtctcaga

SEQ ID NO: 1933971 - DNA, 15 bp, Homo sapiens
gaggaagtctcagaa

SEQ ID NO: 1933972 - DNA, 15 bp, Homo sapiens
aggaagtctcagaaa

SEQ ID NO: 1933973 - DNA, 15 bp, Homo sapiens
ggaagtctcagaaaa

SEQ ID NO: 1933974 - DNA, 15 bp, Homo sapiens
gaagtctcagaaaac

SEQ ID NO: 1933975 - DNA, 15 bp, Homo sapiens
aagtctcagaaaact

SEQ ID NO: 1933976 - DNA, 15 bp, Homo sapiens
agtctcagaaaactg

SEQ ID NO: 1933977 - DNA, 15 bp, Homo sapiens
gtctcagaaaactgt

SEQ ID NO: 1933978 - DNA, 15 bp, Homo sapiens
tctcagaaaactgtt

SEQ ID NO: 1933979 - DNA, 15 bp, Homo sapiens
ctcagaaaactgttc

SEQ ID NO: 1933980 - DNA, 15 bp, Homo sapiens
tcagaaaactgttcc

SEQ ID NO: 1933981 - DNA, 15 bp, Homo sapiens
cagaaaactgttccc

SEQ ID NO: 1933982 - DNA, 15 bp, Homo sapiens
agaaaactgttccca

SEQ ID NO: 1933983 - DNA, 15 bp, Homo sapiens
gaaaactgttcccaa

SEQ ID NO: 1933984 - DNA, 15 bp, Homo sapiens
aaaactgttcccaat

SEQ ID NO: 1933985 - DNA, 15 bp, Homo sapiens
aaactgttcccaatg

SEQ ID NO: 1933986 - DNA, 15 bp, Homo sapiens
aactgttcccaatgg

SEQ ID NO: 1933987 - DNA, 15 bp, Homo sapiens
actgttcccaatgga

SEQ ID NO: 1933988 - DNA, 15 bp, Homo sapiens
ctgttcccaatggag

SEQ ID NO: 1933989 - DNA, 15 bp, Homo sapiens
tgttcccaatggaga

SEQ ID NO: 1933990 - DNA, 15 bp, Homo sapiens
gttcccaatggagaa

SEQ ID NO: 1933991 - DNA, 15 bp, Homo sapiens
ttcccaatggagaaa

SEQ ID NO: 1933992 - DNA, 15 bp, Homo sapiens
tcccaatggagaaaa

SEQ ID NO: 1933993 - DNA, 15 bp, Homo sapiens
cccaatggagaaaaa

SEQ ID NO: 1933994 - DNA, 15 bp, Homo sapiens
ccaatggagaaaaat

SEQ ID NO: 1933995 - DNA, 15 bp, Homo sapiens
caatggagaaaaata

SEQ ID NO: 1933996 - DNA, 15 bp, Homo sapiens
aatggagaaaaataa

SEQ ID NO: 1933997 - DNA, 15 bp, Homo sapiens
atggagaaaaataac

SEQ ID NO: 1933998 - DNA, 15 bp, Homo sapiens
tggagaaaaataact

SEQ ID NO: 1933999 - DNA, 15 bp, Homo sapiens
ggagaaaaataactt

SEQ ID NO: 1934000 - DNA, 15 bp, Homo sapiens
gagaaaaataactta

SEQ ID NO: 1934001 - DNA, 15 bp, Homo sapiens
agaaaaataacttat

SEQ ID NO: 1934002 - DNA, 15 bp, Homo sapiens
gaaaaataacttata

SEQ ID NO: 1934003 - DNA, 15 bp, Homo sapiens
aaaaataacttataa

SEQ ID NO: 1934004 - DNA, 15 bp, Homo sapiens
aaaataacttataaa

SEQ ID NO: 1934005 - DNA, 15 bp, Homo sapiens
aaataacttataaaa

SEQ ID NO: 1934006 - DNA, 15 bp, Homo sapiens
aataacttataaaaa

SEQ ID NO: 1934007 - DNA, 15 bp, Homo sapiens
ataacttataaaaag

SEQ ID NO: 1934008 - DNA, 15 bp, Homo sapiens
taacttataaaaagc

SEQ ID NO: 1934009 - DNA, 15 bp, Homo sapiens
aacttataaaaagca

SEQ ID NO: 1934010 - DNA, 15 bp, Homo sapiens
acttataaaaagcag

SEQ ID NO: 1934011 - DNA, 15 bp, Homo sapiens
cttataaaaagcagt

SEQ ID NO: 1934012 - DNA, 15 bp, Homo sapiens
ttataaaaagcagtg

SEQ ID NO: 1934013 - DNA, 15 bp, Homo sapiens
tataaaaagcagtgt

SEQ ID NO: 1934014 - DNA, 15 bp, Homo sapiens
ataaaaagcagtgtc

SEQ ID NO: 1934015 - DNA, 15 bp, Homo sapiens
taaaaagcagtgtcc

SEQ ID NO: 1934016 - DNA, 15 bp, Homo sapiens
aaaaagcagtgtcct

SEQ ID NO: 1934017 - DNA, 15 bp, Homo sapiens
aaaagcagtgtcctt

SEQ ID NO: 1934018 - DNA, 15 bp, Homo sapiens
aaagcagtgtcctta

SEQ ID NO: 1934019 - DNA, 15 bp, Homo sapiens
aagcagtgtccttag

SEQ ID NO: 1934020 - DNA, 15 bp, Homo sapiens
agcagtgtccttagc

SEQ ID NO: 1934021 - DNA, 15 bp, Homo sapiens
gcagtgtccttagcc

SEQ ID NO: 1934022 - DNA, 15 bp, Homo sapiens
cagtgtccttagcct

SEQ ID NO: 1934023 - DNA, 15 bp, Homo sapiens
agtgtccttagcctg

SEQ ID NO: 1934024 - DNA, 15 bp, Homo sapiens
gtgtccttagcctgt

SEQ ID NO: 1934025 - DNA, 15 bp, Homo sapiens
tgtccttagcctgtg

SEQ ID NO: 1934026 - DNA, 15 bp, Homo sapiens
gtccttagcctgtga

SEQ ID NO: 1934027 - DNA, 15 bp, Homo sapiens
tccttagcctgtgaa

SEQ ID NO: 1934028 - DNA, 15 bp, Homo sapiens
ccttagcctgtgaac

SEQ ID NO: 1934029 - DNA, 15 bp, Homo sapiens
cttagcctgtgaact

SEQ ID NO: 1934030 - DNA, 15 bp, Homo sapiens
ttagcctgtgaacta

SEQ ID NO: 1934031 - DNA, 15 bp, Homo sapiens
tagcctgtgaactaa

SEQ ID NO: 1934032 - DNA, 15 bp, Homo sapiens
agcctgtgaactaat

SEQ ID NO: 1934033 - DNA, 15 bp, Homo sapiens
gcctgtgaactaatt

SEQ ID NO: 1934034 - DNA, 15 bp, Homo sapiens
cctgtgaactaattg

SEQ ID NO: 1934035 - DNA, 15 bp, Homo sapiens
ctgtgaactaattga

SEQ ID NO: 1934036 - DNA, 15 bp, Homo sapiens
tgtgaactaattgag

SEQ ID NO: 1934037 - DNA, 15 bp, Homo sapiens
gtgaactaattgagc

SEQ ID NO: 1934038 - DNA, 15 bp, Homo sapiens
tgaactaattgagct

SEQ ID NO: 1934039 - DNA, 15 bp, Homo sapiens
gaactaattgagctt

SEQ ID NO: 1934040 - DNA, 15 bp, Homo sapiens
aactaattgagcttt

SEQ ID NO: 1934041 - DNA, 15 bp, Homo sapiens
actaattgagctttg

SEQ ID NO: 1934042 - DNA, 15 bp, Homo sapiens
ctaattgagctttgt

SEQ ID NO: 1934043 - DNA, 15 bp, Homo sapiens
taattgagctttgta

SEQ ID NO: 1934044 - DNA, 15 bp, Homo sapiens
aattgagctttgtag

SEQ ID NO: 1934045 - DNA, 15 bp, Homo sapiens
attgagctttgtagt

SEQ ID NO: 1934046 - DNA, 15 bp, Homo sapiens
ttgagctttgtagtg

SEQ ID NO: 1934047 - DNA, 15 bp, Homo sapiens
tgagctttgtagtgc

SEQ ID NO: 1934048 - DNA, 15 bp, Homo sapiens
gagctttgtagtgca

SEQ ID NO: 1934049 - DNA, 15 bp, Homo sapiens
agctttgtagtgcac

SEQ ID NO: 1934050 - DNA, 15 bp, Homo sapiens
gctttgtagtgcacc

SEQ ID NO: 1934051 - DNA, 15 bp, Homo sapiens
ctttgtagtgcacct

SEQ ID NO: 1934052 - DNA, 15 bp, Homo sapiens
tttgtagtgcacctg

SEQ ID NO: 1934053 - DNA, 15 bp, Homo sapiens
ttgtagtgcacctgg

SEQ ID NO: 1934054 - DNA, 15 bp, Homo sapiens
tgtagtgcacctggt

SEQ ID NO: 1934055 - DNA, 15 bp, Homo sapiens
gtagtgcacctggtt

SEQ ID NO: 1934056 - DNA, 15 bp, Homo sapiens
tagtgcacctggttc

SEQ ID NO: 1934057 - DNA, 15 bp, Homo sapiens
agtgcacctggttct

SEQ ID NO: 1934058 - DNA, 15 bp, Homo sapiens
gtgcacctggttctg

SEQ ID NO: 1934059 - DNA, 15 bp, Homo sapiens
tgcacctggttctgg

SEQ ID NO: 1934060 - DNA, 15 bp, Homo sapiens
gcacctggttctggt

SEQ ID NO: 1934061 - DNA, 15 bp, Homo sapiens
cacctggttctggtt

SEQ ID NO: 1934062 - DNA, 15 bp, Homo sapiens
acctggttctggttc

SEQ ID NO: 1934063 - DNA, 15 bp, Homo sapiens
cctggttctggttcc

SEQ ID NO: 1934064 - DNA, 15 bp, Homo sapiens
ctggttctggttccg

SEQ ID NO: 1934065 - DNA, 15 bp, Homo sapiens
tggttctggttccgt

SEQ ID NO: 1934066 - DNA, 15 bp, Homo sapiens
ggttctggttccgtt

SEQ ID NO: 1934067 - DNA, 15 bp, Homo sapiens
gttctggttccgttt

SEQ ID NO: 1934068 - DNA, 15 bp, Homo sapiens
ttctggttccgtttc

SEQ ID NO: 1934069 - DNA, 15 bp, Homo sapiens
tctggttccgtttct

SEQ ID NO: 1934070 - DNA, 15 bp, Homo sapiens
ctggttccgtttcta

SEQ ID NO: 1934071 - DNA, 15 bp, Homo sapiens
tggttccgtttctac

SEQ ID NO: 1934072 - DNA, 15 bp, Homo sapiens
ggttccgtttctact

SEQ ID NO: 1934073 - DNA, 15 bp, Homo sapiens
gttccgtttctactt

SEQ ID NO: 1934074 - DNA, 15 bp, Homo sapiens
ttccgtttctacttc

SEQ ID NO: 1934075 - DNA, 15 bp, Homo sapiens
tccgtttctacttcc

SEQ ID NO: 1934076 - DNA, 15 bp, Homo sapiens
ccgtttctacttccc

SEQ ID NO: 1934077 - DNA, 15 bp, Homo sapiens
cgtttctacttccct

SEQ ID NO: 1934078 - DNA, 15 bp, Homo sapiens
gtttctacttccctt

SEQ ID NO: 1934079 - DNA, 15 bp, Homo sapiens
tttctacttcccttg

SEQ ID NO: 1934080 - DNA, 15 bp, Homo sapiens
ttctacttcccttga

SEQ ID NO: 1934081 - DNA, 15 bp, Homo sapiens
tctacttcccttgat

SEQ ID NO: 1934082 - DNA, 15 bp, Homo sapiens
ctacttcccttgatc

SEQ ID NO: 1934083 - DNA, 15 bp, Homo sapiens
tacttcccttgatct

SEQ ID NO: 1934084 - DNA, 15 bp, Homo sapiens
acttcccttgatctt

SEQ ID NO: 1934085 - DNA, 15 bp, Homo sapiens
cttcccttgatcttt

SEQ ID NO: 1934086 - DNA, 15 bp, Homo sapiens
ttcccttgatctttt

SEQ ID NO: 1934087 - DNA, 15 bp, Homo sapiens
tcccttgatcttttc

SEQ ID NO: 1934088 - DNA, 15 bp, Homo sapiens
cccttgatcttttct

SEQ ID NO: 1934089 - DNA, 15 bp, Homo sapiens
ccttgatcttttctg

SEQ ID NO: 1934090 - DNA, 15 bp, Homo sapiens
cttgatcttttctgc

SEQ ID NO: 1934091 - DNA, 15 bp, Homo sapiens
ttgatcttttctgct

SEQ ID NO: 1934092 - DNA, 15 bp, Homo sapiens
tgatcttttctgctc

SEQ ID NO: 1934093 - DNA, 15 bp, Homo sapiens
gatcttttctgctct

SEQ ID NO: 1934094 - DNA, 15 bp, Homo sapiens
atcttttctgctctc

SEQ ID NO: 1934095 - DNA, 15 bp, Homo sapiens
tcttttctgctctcc

SEQ ID NO: 1934096 - DNA, 15 bp, Homo sapiens
cttttctgctctcct

SEQ ID NO: 1934097 - DNA, 15 bp, Homo sapiens
ttttctgctctcctt

SEQ ID NO: 1934098 - DNA, 15 bp, Homo sapiens
tttctgctctccttg

SEQ ID NO: 1934099 - DNA, 15 bp, Homo sapiens
ttctgctctccttgt

SEQ ID NO: 1934100 - DNA, 15 bp, Homo sapiens
tctgctctccttgtt

SEQ ID NO: 1934101 - DNA, 15 bp, Homo sapiens
ctgctctccttgttg

SEQ ID NO: 1934102 - DNA, 15 bp, Homo sapiens
tgctctccttgttgc

SEQ ID NO: 1934103 - DNA, 15 bp, Homo sapiens
gctctccttgttgct

SEQ ID NO: 1934104 - DNA, 15 bp, Homo sapiens
ctctccttgttgctt

SEQ ID NO: 1934105 - DNA, 15 bp, Homo sapiens
tctccttgttgctta

SEQ ID NO: 1934106 - DNA, 15 bp, Homo sapiens
ctccttgttgcttaa

SEQ ID NO: 1934107 - DNA, 15 bp, Homo sapiens
tccttgttgcttaac

SEQ ID NO: 1934108 - DNA, 15 bp, Homo sapiens
ccttgttgcttaact

SEQ ID NO: 1934109 - DNA, 15 bp, Homo sapiens
cttgttgcttaacta

SEQ ID NO: 1934110 - DNA, 15 bp, Homo sapiens
ttgttgcttaactat

SEQ ID NO: 1934111 - DNA, 15 bp, Homo sapiens
tgttgcttaactatc

SEQ ID NO: 1934112 - DNA, 15 bp, Homo sapiens
gttgcttaactatca

SEQ ID NO: 1934113 - DNA, 15 bp, Homo sapiens
ttgcttaactatcaa

SEQ ID NO: 1934114 - DNA, 15 bp, Homo sapiens
tgcttaactatcaaa

SEQ ID NO: 1934115 - DNA, 15 bp, Homo sapiens
gcttaactatcaaag

SEQ ID NO: 1934116 - DNA, 15 bp, Homo sapiens
cttaactatcaaagg

SEQ ID NO: 1934117 - DNA, 15 bp, Homo sapiens
ttaactatcaaaggt

SEQ ID NO: 1934118 - DNA, 15 bp, Homo sapiens
taactatcaaaggta

SEQ ID NO: 1934119 - DNA, 15 bp, Homo sapiens
aactatcaaaggtat

SEQ ID NO: 1934120 - DNA, 15 bp, Homo sapiens
actatcaaaggtatg

SEQ ID NO: 1934121 - DNA, 15 bp, Homo sapiens
ctatcaaaggtatgt

SEQ ID NO: 1934122 - DNA, 15 bp, Homo sapiens
tatcaaaggtatgta

SEQ ID NO: 1934123 - DNA, 15 bp, Homo sapiens
atcaaaggtatgtat

SEQ ID NO: 1934124 - DNA, 15 bp, Homo sapiens
tcaaaggtatgtatc

SEQ ID NO: 1934125 - DNA, 15 bp, Homo sapiens
caaaggtatgtatct

SEQ ID NO: 1934126 - DNA, 15 bp, Homo sapiens
aaaggtatgtatctt

SEQ ID NO: 1934127 - DNA, 15 bp, Homo sapiens
aaggtatgtatcttt

SEQ ID NO: 1934128 - DNA, 15 bp, Homo sapiens
aggtatgtatctttt

SEQ ID NO: 1934129 - DNA, 15 bp, Homo sapiens
ggtatgtatcttttt

SEQ ID NO: 1934130 - DNA, 15 bp, Homo sapiens
gtatgtatcttttta

SEQ ID NO: 1934131 - DNA, 15 bp, Homo sapiens
tatgtatctttttaa

SEQ ID NO: 1934132 - DNA, 15 bp, Homo sapiens
atgtatctttttaaa

SEQ ID NO: 1934133 - DNA, 15 bp, Homo sapiens
tgtatctttttaaaa

SEQ ID NO: 1934134 - DNA, 15 bp, Homo sapiens
gtatctttttaaaag

SEQ ID NO: 1934135 - DNA, 15 bp, Homo sapiens
tatctttttaaaagt

SEQ ID NO: 1934136 - DNA, 15 bp, Homo sapiens
atctttttaaaagtt

SEQ ID NO: 1934137 - DNA, 15 bp, Homo sapiens
tctttttaaaagtta

SEQ ID NO: 1934138 - DNA, 15 bp, Homo sapiens
ctttttaaaagttac

SEQ ID NO: 1934139 - DNA, 15 bp, Homo sapiens
tttttaaaagttact

SEQ ID NO: 1934140 - DNA, 15 bp, Homo sapiens
ttttaaaagttactg

SEQ ID NO: 1934141 - DNA, 15 bp, Homo sapiens
tttaaaagttactga

SEQ ID NO: 1934142 - DNA, 15 bp, Homo sapiens
ttaaaagttactgac

SEQ ID NO: 1934143 - DNA, 15 bp, Homo sapiens
taaaagttactgaca

SEQ ID NO: 1934144 - DNA, 15 bp, Homo sapiens
aaaagttactgacat

SEQ ID NO: 1934145 - DNA, 15 bp, Homo sapiens
aaagttactgacatt

SEQ ID NO: 1934146 - DNA, 15 bp, Homo sapiens
aagttactgacattt

SEQ ID NO: 1934147 - DNA, 15 bp, Homo sapiens
agttactgacatttt

SEQ ID NO: 1934148 - DNA, 15 bp, Homo sapiens
gttactgacattttt

SEQ ID NO: 1934149 - DNA, 15 bp, Homo sapiens
ttactgacatttttc

SEQ ID NO: 1934150 - DNA, 15 bp, Homo sapiens
tactgacatttttcc

SEQ ID NO: 1934151 - DNA, 15 bp, Homo sapiens
actgacatttttcct

SEQ ID NO: 1934152 - DNA, 15 bp, Homo sapiens
ctgacatttttcctt

SEQ ID NO: 1934153 - DNA, 15 bp, Homo sapiens
tgacatttttccttt

SEQ ID NO: 1934154 - DNA, 15 bp, Homo sapiens
gacatttttcctttt

SEQ ID NO: 1934155 - DNA, 15 bp, Homo sapiens
acatttttccttttt

SEQ ID NO: 1934156 - DNA, 15 bp, Homo sapiens
catttttcctttttt

SEQ ID NO: 1934157 - DNA, 15 bp, Homo sapiens
atttttccttttttt

SEQ ID NO: 1934158 - DNA, 15 bp, Homo sapiens
tttttcctttttttg

SEQ ID NO: 1934159 - DNA, 15 bp, Homo sapiens
ttttcctttttttga

SEQ ID NO: 1934160 - DNA, 15 bp, Homo sapiens
tttcctttttttgag

SEQ ID NO: 1934161 - DNA, 15 bp, Homo sapiens
ttcctttttttgagg

SEQ ID NO: 1934162 - DNA, 15 bp, Homo sapiens
tcctttttttgaggg

SEQ ID NO: 1934163 - DNA, 15 bp, Homo sapiens
cctttttttgaggga

SEQ ID NO: 1934164 - DNA, 15 bp, Homo sapiens
ctttttttgagggat

SEQ ID NO: 1934165 - DNA, 15 bp, Homo sapiens
tttttttgagggatc

SEQ ID NO: 1934166 - DNA, 15 bp, Homo sapiens
ttttttgagggatca

SEQ ID NO: 1934167 - DNA, 15 bp, Homo sapiens
tttttgagggatcaa

SEQ ID NO: 1934168 - DNA, 15 bp, Homo sapiens
ttttgagggatcaag

SEQ ID NO: 1934169 - DNA, 15 bp, Homo sapiens
tttgagggatcaagc

SEQ ID NO: 1934170 - DNA, 15 bp, Homo sapiens
ttgagggatcaagca

SEQ ID NO: 1934171 - DNA, 15 bp, Homo sapiens
tgagggatcaagcag

SEQ ID NO: 1934172 - DNA, 15 bp, Homo sapiens
gagggatcaagcaga

SEQ ID NO: 1934173 - DNA, 15 bp, Homo sapiens
agggatcaagcagaa

SEQ ID NO: 1934174 - DNA, 15 bp, Homo sapiens
gggatcaagcagaaa

SEQ ID NO: 1934175 - DNA, 15 bp, Homo sapiens
ggatcaagcagaaaa

SEQ ID NO: 1934176 - DNA, 15 bp, Homo sapiens
gatcaagcagaaaaa

SEQ ID NO: 1934177 - DNA, 15 bp, Homo sapiens
atcaagcagaaaaac

SEQ ID NO: 1934178 - DNA, 15 bp, Homo sapiens
tcaagcagaaaaaca

SEQ ID NO: 1934179 - DNA, 15 bp, Homo sapiens
caagcagaaaaacag

SEQ ID NO: 1934180 - DNA, 15 bp, Homo sapiens
aagcagaaaaacagt

SEQ ID NO: 1934181 - DNA, 15 bp, Homo sapiens
agcagaaaaacagtc

SEQ ID NO: 1934182 - DNA, 15 bp, Homo sapiens
gcagaaaaacagtcc

SEQ ID NO: 1934183 - DNA, 15 bp, Homo sapiens
cagaaaaacagtcca

SEQ ID NO: 1934184 - DNA, 15 bp, Homo sapiens
agaaaaacagtccaa

SEQ ID NO: 1934185 - DNA, 15 bp, Homo sapiens
gaaaaacagtccaaa

SEQ ID NO: 1934186 - DNA, 15 bp, Homo sapiens
aaaaacagtccaaaa

SEQ ID NO: 1934187 - DNA, 15 bp, Homo sapiens
aaaacagtccaaaag

SEQ ID NO: 1934188 - DNA, 15 bp, Homo sapiens
aaacagtccaaaagg

SEQ ID NO: 1934189 - DNA, 15 bp, Homo sapiens
aacagtccaaaaggg

SEQ ID NO: 1934190 - DNA, 15 bp, Homo sapiens
acagtccaaaaggga

SEQ ID NO: 1934191 - DNA, 15 bp, Homo sapiens
cagtccaaaagggaa

SEQ ID NO: 1934192 - DNA, 15 bp, Homo sapiens
agtccaaaagggaat

SEQ ID NO: 1934193 - DNA, 15 bp, Homo sapiens
gtccaaaagggaatg

SEQ ID NO: 1934194 - DNA, 15 bp, Homo sapiens
tccaaaagggaatgc

SEQ ID NO: 1934195 - DNA, 15 bp, Homo sapiens
ccaaaagggaatgca

SEQ ID NO: 1934196 - DNA, 15 bp, Homo sapiens
caaaagggaatgcat

SEQ ID NO: 1934197 - DNA, 15 bp, Homo sapiens
aaaagggaatgcatc

SEQ ID NO: 1934198 - DNA, 15 bp, Homo sapiens
aaagggaatgcatct

SEQ ID NO: 1934199 - DNA, 15 bp, Homo sapiens
aagggaatgcatctt

SEQ ID NO: 1934200 - DNA, 15 bp, Homo sapiens
agggaatgcatcttg

SEQ ID NO: 1934201 - DNA, 15 bp, Homo sapiens
gggaatgcatcttgt

SEQ ID NO: 1934202 - DNA, 15 bp, Homo sapiens
ggaatgcatcttgtg

SEQ ID NO: 1934203 - DNA, 15 bp, Homo sapiens
gaatgcatcttgtgt

SEQ ID NO: 1934204 - DNA, 15 bp, Homo sapiens
aatgcatcttgtgtt

SEQ ID NO: 1934205 - DNA, 15 bp, Homo sapiens
atgcatcttgtgttc

SEQ ID NO: 1934206 - DNA, 15 bp, Homo sapiens
tgcatcttgtgttca

SEQ ID NO: 1934207 - DNA, 15 bp, Homo sapiens
gcatcttgtgttcac

SEQ ID NO: 1934208 - DNA, 15 bp, Homo sapiens
catcttgtgttcaca

SEQ ID NO: 1934209 - DNA, 15 bp, Homo sapiens
atcttgtgttcacag

SEQ ID NO: 1934210 - DNA, 15 bp, Homo sapiens
tcttgtgttcacagg

SEQ ID NO: 1934211 - DNA, 15 bp, Homo sapiens
cttgtgttcacagga

SEQ ID NO: 1934212 - DNA, 15 bp, Homo sapiens
ttgtgttcacaggaa

SEQ ID NO: 1934213 - DNA, 15 bp, Homo sapiens
tgtgttcacaggaaa

SEQ ID NO: 1934214 - DNA, 15 bp, Homo sapiens
gtgttcacaggaaaa

SEQ ID NO: 1934215 - DNA, 15 bp, Homo sapiens
tgttcacaggaaaac

SEQ ID NO: 1934216 - DNA, 15 bp, Homo sapiens
gttcacaggaaaact

SEQ ID NO: 1934217 - DNA, 15 bp, Homo sapiens
ttcacaggaaaactt

SEQ ID NO: 1934218 - DNA, 15 bp, Homo sapiens
tcacaggaaaacttt

SEQ ID NO: 1934219 - DNA, 15 bp, Homo sapiens
cacaggaaaactttc

SEQ ID NO: 1934220 - DNA, 15 bp, Homo sapiens
acaggaaaactttct

SEQ ID NO: 1934221 - DNA, 15 bp, Homo sapiens
caggaaaactttctg

SEQ ID NO: 1934222 - DNA, 15 bp, Homo sapiens
aggaaaactttctgt

SEQ ID NO: 1934223 - DNA, 15 bp, Homo sapiens
ggaaaactttctgtt

SEQ ID NO: 1934224 - DNA, 15 bp, Homo sapiens
gaaaactttctgtta

SEQ ID NO: 1934225 - DNA, 15 bp, Homo sapiens
aaaactttctgttaa

SEQ ID NO: 1934226 - DNA, 15 bp, Homo sapiens
aaactttctgttaac

SEQ ID NO: 1934227 - DNA, 15 bp, Homo sapiens
aactttctgttaact

SEQ ID NO: 1934228 - DNA, 15 bp, Homo sapiens
actttctgttaactc

SEQ ID NO: 1934229 - DNA, 15 bp, Homo sapiens
ctttctgttaactct

SEQ ID NO: 1934230 - DNA, 15 bp, Homo sapiens
tttctgttaactcta

SEQ ID NO: 1934231 - DNA, 15 bp, Homo sapiens
ttctgttaactctaa

SEQ ID NO: 1934232 - DNA, 15 bp, Homo sapiens
tctgttaactctaac

SEQ ID NO: 1934233 - DNA, 15 bp, Homo sapiens
ctgttaactctaaca

SEQ ID NO: 1934234 - DNA, 15 bp, Homo sapiens
tgttaactctaacaa

SEQ ID NO: 1934235 - DNA, 15 bp, Homo sapiens
gttaactctaacaag

SEQ ID NO: 1934236 - DNA, 15 bp, Homo sapiens
ttaactctaacaaga

SEQ ID NO: 1934237 - DNA, 15 bp, Homo sapiens
taactctaacaagat

SEQ ID NO: 1934238 - DNA, 15 bp, Homo sapiens
aactctaacaagata

SEQ ID NO: 1934239 - DNA, 15 bp, Homo sapiens
actctaacaagatat

SEQ ID NO: 1934240 - DNA, 15 bp, Homo sapiens
ctctaacaagatata

SEQ ID NO: 1934241 - DNA, 15 bp, Homo sapiens
tctaacaagatatat

SEQ ID NO: 1934242 - DNA, 15 bp, Homo sapiens
ctaacaagatatatt

SEQ ID NO: 1934243 - DNA, 15 bp, Homo sapiens
taacaagatatattt

SEQ ID NO: 1934244 - DNA, 15 bp, Homo sapiens
aacaagatatattta

SEQ ID NO: 1934245 - DNA, 15 bp, Homo sapiens
acaagatatatttat

SEQ ID NO: 1934246 - DNA, 15 bp, Homo sapiens
caagatatatttata

SEQ ID NO: 1934247 - DNA, 15 bp, Homo sapiens
aagatatatttatat

SEQ ID NO: 1934248 - DNA, 15 bp, Homo sapiens
agatatatttatatt

SEQ ID NO: 1934249 - DNA, 15 bp, Homo sapiens
gatatatttatatta

SEQ ID NO: 1934250 - DNA, 15 bp, Homo sapiens
atatatttatattaa

SEQ ID NO: 1934251 - DNA, 15 bp, Homo sapiens
tatatttatattaat

SEQ ID NO: 1934252 - DNA, 15 bp, Homo sapiens
atatttatattaatc

SEQ ID NO: 1934253 - DNA, 15 bp, Homo sapiens
tatttatattaatcc

SEQ ID NO: 1934254 - DNA, 15 bp, Homo sapiens
atttatattaatcca

SEQ ID NO: 1934255 - DNA, 15 bp, Homo sapiens
tttatattaatccaa

SEQ ID NO: 1934256 - DNA, 15 bp, Homo sapiens
ttatattaatccaaa

SEQ ID NO: 1934257 - DNA, 15 bp, Homo sapiens
tatattaatccaaaa

SEQ ID NO: 1934258 - DNA, 15 bp, Homo sapiens
atattaatccaaaag

SEQ ID NO: 1934259 - DNA, 15 bp, Homo sapiens
tattaatccaaaaga

SEQ ID NO: 1934260 - DNA, 15 bp, Homo sapiens
attaatccaaaagaa

SEQ ID NO: 1934261 - DNA, 15 bp, Homo sapiens
ttaatccaaaagaaa

SEQ ID NO: 1934262 - DNA, 15 bp, Homo sapiens
taatccaaaagaaaa

SEQ ID NO: 1934263 - DNA, 15 bp, Homo sapiens
aatccaaaagaaaaa

SEQ ID NO: 1934264 - DNA, 15 bp, Homo sapiens
atccaaaagaaaaaa

SEQ ID NO: 1934265 - DNA, 15 bp, Homo sapiens
tccaaaagaaaaaaa

SEQ ID NO: 1934266 - DNA, 15 bp, Homo sapiens
ccaaaagaaaaaaat

SEQ ID NO: 1934267 - DNA, 15 bp, Homo sapiens
caaaagaaaaaaatt

SEQ ID NO: 1934268 - DNA, 15 bp, Homo sapiens
aaaagaaaaaaattc

SEQ ID NO: 1934269 - DNA, 15 bp, Homo sapiens
aaagaaaaaaattct

SEQ ID NO: 1934270 - DNA, 15 bp, Homo sapiens
aagaaaaaaattcta

SEQ ID NO: 1934271 - DNA, 15 bp, Homo sapiens
agaaaaaaattctac

SEQ ID NO: 1934272 - DNA, 15 bp, Homo sapiens
gaaaaaaattctaca

SEQ ID NO: 1934273 - DNA, 15 bp, Homo sapiens
aaaaaaattctacat

SEQ ID NO: 1934274 - DNA, 15 bp, Homo sapiens
aaaaaattctacatt

SEQ ID NO: 1934275 - DNA, 15 bp, Homo sapiens
aaaaattctacatta

SEQ ID NO: 1934276 - DNA, 15 bp, Homo sapiens
aaaattctacattaa

SEQ ID NO: 1934277 - DNA, 15 bp, Homo sapiens
aaattctacattaat

SEQ ID NO: 1934278 - DNA, 15 bp, Homo sapiens
aattctacattaata

SEQ ID NO: 1934279 - DNA, 15 bp, Homo sapiens
attctacattaatat

SEQ ID NO: 1934280 - DNA, 15 bp, Homo sapiens
ttctacattaatatt

SEQ ID NO: 1934281 - DNA, 15 bp, Homo sapiens
tctacattaatatta

SEQ ID NO: 1934282 - DNA, 15 bp, Homo sapiens
ctacattaatattat

SEQ ID NO: 1934283 - DNA, 15 bp, Homo sapiens
tacattaatattata

SEQ ID NO: 1934284 - DNA, 15 bp, Homo sapiens
acattaatattataa

SEQ ID NO: 1934285 - DNA, 15 bp, Homo sapiens
cattaatattataat

SEQ ID NO: 1934286 - DNA, 15 bp, Homo sapiens
attaatattataata

SEQ ID NO: 1934287 - DNA, 15 bp, Homo sapiens
ttaatattataatag

SEQ ID NO: 1934288 - DNA, 15 bp, Homo sapiens
taatattataatagt

SEQ ID NO: 1934289 - DNA, 15 bp, Homo sapiens
aatattataatagta

SEQ ID NO: 1934290 - DNA, 15 bp, Homo sapiens
atattataatagtat

SEQ ID NO: 1934291 - DNA, 15 bp, Homo sapiens
tattataatagtatt

SEQ ID NO: 1934292 - DNA, 15 bp, Homo sapiens
attataatagtattt

SEQ ID NO: 1934293 - DNA, 15 bp, Homo sapiens
ttataatagtattta

SEQ ID NO: 1934294 - DNA, 15 bp, Homo sapiens
tataatagtatttaa

SEQ ID NO: 1934295 - DNA, 15 bp, Homo sapiens
ataatagtatttaaa

SEQ ID NO: 1934296 - DNA, 15 bp, Homo sapiens
taatagtatttaaaa

SEQ ID NO: 1934297 - DNA, 15 bp, Homo sapiens
aatagtatttaaaac

SEQ ID NO: 1934298 - DNA, 15 bp, Homo sapiens
atagtatttaaaaca

SEQ ID NO: 1934299 - DNA, 15 bp, Homo sapiens
tagtatttaaaacag

SEQ ID NO: 1934300 - DNA, 15 bp, Homo sapiens
agtatttaaaacagc

SEQ ID NO: 1934301 - DNA, 15 bp, Homo sapiens
gtatttaaaacagct

SEQ ID NO: 1934302 - DNA, 15 bp, Homo sapiens
tatttaaaacagctt

SEQ ID NO: 1934303 - DNA, 15 bp, Homo sapiens
atttaaaacagctta

SEQ ID NO: 1934304 - DNA, 15 bp, Homo sapiens
tttaaaacagcttac

SEQ ID NO: 1934305 - DNA, 15 bp, Homo sapiens
ttaaaacagcttacc

SEQ ID NO: 1934306 - DNA, 15 bp, Homo sapiens
taaaacagcttaccg

SEQ ID NO: 1934307 - DNA, 15 bp, Homo sapiens
aaaacagcttaccgt

SEQ ID NO: 1934308 - DNA, 15 bp, Homo sapiens
aaacagcttaccgtc

SEQ ID NO: 1934309 - DNA, 15 bp, Homo sapiens
aacagcttaccgtca

SEQ ID NO: 1934310 - DNA, 15 bp, Homo sapiens
acagcttaccgtcac

SEQ ID NO: 1934311 - DNA, 15 bp, Homo sapiens
cagcttaccgtcact

SEQ ID NO: 1934312 - DNA, 15 bp, Homo sapiens
agcttaccgtcactc

SEQ ID NO: 1934313 - DNA, 15 bp, Homo sapiens
gcttaccgtcactct

SEQ ID NO: 1934314 - DNA, 15 bp, Homo sapiens
cttaccgtcactctg

SEQ ID NO: 1934315 - DNA, 15 bp, Homo sapiens
ttaccgtcactctgc

SEQ ID NO: 1934316 - DNA, 15 bp, Homo sapiens
taccgtcactctgca

SEQ ID NO: 1934317 - DNA, 15 bp, Homo sapiens
accgtcactctgcaa

SEQ ID NO: 1934318 - DNA, 15 bp, Homo sapiens
ccgtcactctgcaat

SEQ ID NO: 1934319 - DNA, 15 bp, Homo sapiens
cgtcactctgcaata

SEQ ID NO: 1934320 - DNA, 15 bp, Homo sapiens
gtcactctgcaataa

SEQ ID NO: 1934321 - DNA, 15 bp, Homo sapiens
tcactctgcaataaa

SEQ ID NO: 1934322 - DNA, 15 bp, Homo sapiens
cactctgcaataaaa

SEQ ID NO: 1934323 - DNA, 15 bp, Homo sapiens
actctgcaataaaac

SEQ ID NO: 1934324 - DNA, 15 bp, Homo sapiens
ctctgcaataaaact

SEQ ID NO: 1934325 - DNA, 15 bp, Homo sapiens
tctgcaataaaactt

SEQ ID NO: 1934326 - DNA, 15 bp, Homo sapiens
ctgcaataaaacttg

SEQ ID NO: 1934327 - DNA, 15 bp, Homo sapiens
tgcaataaaacttgt

SEQ ID NO: 1934328 - DNA, 15 bp, Homo sapiens
gcaataaaacttgtg

SEQ ID NO: 1934329 - DNA, 15 bp, Homo sapiens
caataaaacttgtgg

SEQ ID NO: 1934330 - DNA, 15 bp, Homo sapiens
aataaaacttgtggt

SEQ ID NO: 1934331 - DNA, 15 bp, Homo sapiens
ataaaacttgtggtc

SEQ ID NO: 1934332 - DNA, 15 bp, Homo sapiens
taaaacttgtggtct

SEQ ID NO: 1934333 - DNA, 15 bp, Homo sapiens
aaaacttgtggtctt

SEQ ID NO: 1934334 - DNA, 15 bp, Homo sapiens
aaacttgtggtctta

SEQ ID NO: 1934335 - DNA, 15 bp, Homo sapiens
aacttgtggtcttac

SEQ ID NO: 1934336 - DNA, 15 bp, Homo sapiens
acttgtggtcttacc

SEQ ID NO: 1934337 - DNA, 15 bp, Homo sapiens
cttgtggtcttacct

SEQ ID NO: 1934338 - DNA, 15 bp, Homo sapiens
ttgtggtcttacctc

SEQ ID NO: 1934339 - DNA, 15 bp, Homo sapiens
tgtggtcttacctcc

SEQ ID NO: 1934340 - DNA, 15 bp, Homo sapiens
gtggtcttacctcct

SEQ ID NO: 1934341 - DNA, 15 bp, Homo sapiens
tggtcttacctcctg

SEQ ID NO: 1934342 - DNA, 15 bp, Homo sapiens
ggtcttacctcctga

SEQ ID NO: 1934343 - DNA, 15 bp, Homo sapiens
gtcttacctcctgaa

SEQ ID NO: 1934344 - DNA, 15 bp, Homo sapiens
tcttacctcctgaac

SEQ ID NO: 1934345 - DNA, 15 bp, Homo sapiens
cttacctcctgaaca

SEQ ID NO: 1934346 - DNA, 15 bp, Homo sapiens
ttacctcctgaacag

SEQ ID NO: 1934347 - DNA, 15 bp, Homo sapiens
tacctcctgaacagt

SEQ ID NO: 1934348 - DNA, 15 bp, Homo sapiens
acctcctgaacagta

SEQ ID NO: 1934349 - DNA, 15 bp, Homo sapiens
cctcctgaacagtaa

SEQ ID NO: 1934350 - DNA, 15 bp, Homo sapiens
ctcctgaacagtaaa

SEQ ID NO: 1934351 - DNA, 15 bp, Homo sapiens
tcctgaacagtaaat

SEQ ID NO: 1934352 - DNA, 15 bp, Homo sapiens
cctgaacagtaaatt

SEQ ID NO: 1934353 - DNA, 15 bp, Homo sapiens
ctgaacagtaaattc

SEQ ID NO: 1934354 - DNA, 15 bp, Homo sapiens
tgaacagtaaattct

SEQ ID NO: 1934355 - DNA, 15 bp, Homo sapiens
gaacagtaaattctt

SEQ ID NO: 1934356 - DNA, 15 bp, Homo sapiens
aacagtaaattcttg

SEQ ID NO: 1934357 - DNA, 15 bp, Homo sapiens
acagtaaattcttga

SEQ ID NO: 1934358 - DNA, 15 bp, Homo sapiens
cagtaaattcttgaa

SEQ ID NO: 1934359 - DNA, 15 bp, Homo sapiens
agtaaattcttgaat

SEQ ID NO: 1934360 - DNA, 15 bp, Homo sapiens
gtaaattcttgaatt

SEQ ID NO: 1934361 - DNA, 15 bp, Homo sapiens
taaattcttgaattt

SEQ ID NO: 1934362 - DNA, 15 bp, Homo sapiens
aaattcttgaatttg

SEQ ID NO: 1934363 - DNA, 15 bp, Homo sapiens
aattcttgaatttga

SEQ ID NO: 1934364 - DNA, 15 bp, Homo sapiens
attcttgaatttgag

SEQ ID NO: 1934365 - DNA, 15 bp, Homo sapiens
ttcttgaatttgaga

SEQ ID NO: 1934366 - DNA, 15 bp, Homo sapiens
tcttgaatttgagac

SEQ ID NO: 1934367 - DNA, 15 bp, Homo sapiens
cttgaatttgagaca

SEQ ID NO: 1934368 - DNA, 15 bp, Homo sapiens
ttgaatttgagacat

SEQ ID NO: 1934369 - DNA, 15 bp, Homo sapiens
tgaatttgagacatt

SEQ ID NO: 1934370 - DNA, 15 bp, Homo sapiens
gaatttgagacattt

SEQ ID NO: 1934371 - DNA, 15 bp, Homo sapiens
aatttgagacattta

SEQ ID NO: 1934372 - DNA, 15 bp, Homo sapiens
atttgagacatttag

SEQ ID NO: 1934373 - DNA, 15 bp, Homo sapiens
tttgagacatttaga

SEQ ID NO: 1934374 - DNA, 15 bp, Homo sapiens
ttgagacatttagaa

SEQ ID NO: 1934375 - DNA, 15 bp, Homo sapiens
tgagacatttagaaa

SEQ ID NO: 1934376 - DNA, 15 bp, Homo sapiens
gagacatttagaaaa

SEQ ID NO: 1934377 - DNA, 15 bp, Homo sapiens
agacatttagaaaat

SEQ ID NO: 1934378 - DNA, 15 bp, Homo sapiens
gacatttagaaaata

SEQ ID NO: 1934379 - DNA, 15 bp, Homo sapiens
acatttagaaaatat

SEQ ID NO: 1934380 - DNA, 15 bp, Homo sapiens
catttagaaaatatt

SEQ ID NO: 1934381 - DNA, 15 bp, Homo sapiens
atttagaaaatattt

SEQ ID NO: 1934382 - DNA, 15 bp, Homo sapiens
tttagaaaatatttc

SEQ ID NO: 1934383 - DNA, 15 bp, Homo sapiens
ttagaaaatatttct

SEQ ID NO: 1934384 - DNA, 15 bp, Homo sapiens
tagaaaatatttctt

SEQ ID NO: 1934385 - DNA, 15 bp, Homo sapiens
agaaaatatttcttt

SEQ ID NO: 1934386 - DNA, 15 bp, Homo sapiens
gaaaatatttctttt

SEQ ID NO: 1934387 - DNA, 15 bp, Homo sapiens
aaaatatttcttttt

SEQ ID NO: 1934388 - DNA, 15 bp, Homo sapiens
aaatatttcttttta

SEQ ID NO: 1934389 - DNA, 15 bp, Homo sapiens
aatatttctttttaa

SEQ ID NO: 1934390 - DNA, 15 bp, Homo sapiens
atatttctttttaaa

SEQ ID NO: 1934391 - DNA, 15 bp, Homo sapiens
tatttctttttaaaa

SEQ ID NO: 1934392 - DNA, 15 bp, Homo sapiens
atttctttttaaaaa

SEQ ID NO: 1934393 - DNA, 15 bp, Homo sapiens
tttctttttaaaaat

SEQ ID NO: 1934394 - DNA, 15 bp, Homo sapiens
ttctttttaaaaata

SEQ ID NO: 1934395 - DNA, 15 bp, Homo sapiens
tctttttaaaaatat

SEQ ID NO: 1934396 - DNA, 15 bp, Homo sapiens
ctttttaaaaatatg

SEQ ID NO: 1934397 - DNA, 15 bp, Homo sapiens
tttttaaaaatatga

SEQ ID NO: 1934398 - DNA, 15 bp, Homo sapiens
ttttaaaaatatgaa

SEQ ID NO: 1934399 - DNA, 15 bp, Homo sapiens
tttaaaaatatgaat

SEQ ID NO: 1934400 - DNA, 15 bp, Homo sapiens
ttaaaaatatgaatg

SEQ ID NO: 1934401 - DNA, 15 bp, Homo sapiens
taaaaatatgaatga

SEQ ID NO: 1934402 - DNA, 15 bp, Homo sapiens
aaaaatatgaatgac

SEQ ID NO: 1934403 - DNA, 15 bp, Homo sapiens
aaaatatgaatgact

SEQ ID NO: 1934404 - DNA, 15 bp, Homo sapiens
aaatatgaatgactc

SEQ ID NO: 1934405 - DNA, 15 bp, Homo sapiens
aatatgaatgactcc

SEQ ID NO: 1934406 - DNA, 15 bp, Homo sapiens
atatgaatgactcct

SEQ ID NO: 1934407 - DNA, 15 bp, Homo sapiens
tatgaatgactcctc

SEQ ID NO: 1934408 - DNA, 15 bp, Homo sapiens
atgaatgactcctct

SEQ ID NO: 1934409 - DNA, 15 bp, Homo sapiens
tgaatgactcctctc

SEQ ID NO: 1934410 - DNA, 15 bp, Homo sapiens
gaatgactcctctca

SEQ ID NO: 1934411 - DNA, 15 bp, Homo sapiens
aatgactcctctcaa

SEQ ID NO: 1934412 - DNA, 15 bp, Homo sapiens
atgactcctctcaaa

SEQ ID NO: 1934413 - DNA, 15 bp, Homo sapiens
tgactcctctcaaaa

SEQ ID NO: 1934414 - DNA, 15 bp, Homo sapiens
gactcctctcaaaaa

SEQ ID NO: 1934415 - DNA, 15 bp, Homo sapiens
actcctctcaaaaaa

SEQ ID NO: 1934416 - DNA, 15 bp, Homo sapiens
ctcctctcaaaaaaa

SEQ ID NO: 1934417 - DNA, 15 bp, Homo sapiens
tctcaaaaaaaaaat

SEQ ID NO: 1934418 - DNA, 15 bp, Homo sapiens
ctcaaaaaaaaaatg

SEQ ID NO: 1934419 - DNA, 15 bp, Homo sapiens
tcaaaaaaaaaatgc

SEQ ID NO: 1934420 - DNA, 15 bp, Homo sapiens
caaaaaaaaaatgct

SEQ ID NO: 1934421 - DNA, 15 bp, Homo sapiens
aaaaaaaaaatgctc

SEQ ID NO: 1934422 - DNA, 15 bp, Homo sapiens
aaaaaaaaatgctcc

SEQ ID NO: 1934423 - DNA, 15 bp, Homo sapiens
aaaaaaaatgctcct

SEQ ID NO: 1934424 - DNA, 15 bp, Homo sapiens
aaaaaaatgctcctg

SEQ ID NO: 1934425 - DNA, 15 bp, Homo sapiens
aaaaaatgctcctgt

SEQ ID NO: 1934426 - DNA, 15 bp, Homo sapiens
aaaaatgctcctgtc

SEQ ID NO: 1934427 - DNA, 15 bp, Homo sapiens
aaaatgctcctgtcg

SEQ ID NO: 1934428 - DNA, 15 bp, Homo sapiens
aaatgctcctgtcga

SEQ ID NO: 1934429 - DNA, 15 bp, Homo sapiens
aatgctcctgtcgac

SEQ ID NO: 1934430 - DNA, 15 bp, Homo sapiens
atgctcctgtcgaca

SEQ ID NO: 1934431 - DNA, 15 bp, Homo sapiens
tgctcctgtcgacaa

SEQ ID NO: 1934432 - DNA, 15 bp, Homo sapiens
gctcctgtcgacaaa

SEQ ID NO: 1934433 - DNA, 15 bp, Homo sapiens
ctcctgtcgacaaat

SEQ ID NO: 1934434 - DNA, 15 bp, Homo sapiens
tcctgtcgacaaatg

SEQ ID NO: 1934435 - DNA, 15 bp, Homo sapiens
cctgtcgacaaatga

SEQ ID NO: 1934436 - DNA, 15 bp, Homo sapiens
ctgtcgacaaatgaa

SEQ ID NO: 1934437 - DNA, 15 bp, Homo sapiens
tgtcgacaaatgaat

SEQ ID NO: 1934438 - DNA, 15 bp, Homo sapiens
gtcgacaaatgaata

SEQ ID NO: 1934439 - DNA, 15 bp, Homo sapiens
tcgacaaatgaatat

SEQ ID NO: 1934440 - DNA, 15 bp, Homo sapiens
cgacaaatgaatatt

SEQ ID NO: 1934441 - DNA, 15 bp, Homo sapiens
gacaaatgaatattg

SEQ ID NO: 1934442 - DNA, 15 bp, Homo sapiens
acaaatgaatattga

SEQ ID NO: 1934443 - DNA, 15 bp, Homo sapiens
caaatgaatattgat

SEQ ID NO: 1934444 - DNA, 15 bp, Homo sapiens
aaatgaatattgatt

SEQ ID NO: 1934445 - DNA, 15 bp, Homo sapiens
aatgaatattgattt

SEQ ID NO: 1934446 - DNA, 15 bp, Homo sapiens
atgaatattgattta

SEQ ID NO: 1934447 - DNA, 15 bp, Homo sapiens
tgaatattgatttac

SEQ ID NO: 1934448 - DNA, 15 bp, Homo sapiens
gaatattgatttacc

SEQ ID NO: 1934449 - DNA, 15 bp, Homo sapiens
aatattgatttacct

SEQ ID NO: 1934450 - DNA, 15 bp, Homo sapiens
atattgatttacctt

SEQ ID NO: 1934451 - DNA, 15 bp, Homo sapiens
tattgatttacctta

SEQ ID NO: 1934452 - DNA, 15 bp, Homo sapiens
attgatttaccttaa

SEQ ID NO: 1934453 - DNA, 15 bp, Homo sapiens
ttgatttaccttaaa

SEQ ID NO: 1934454 - DNA, 15 bp, Homo sapiens
tgatttaccttaaaa

SEQ ID NO: 1934455 - DNA, 15 bp, Homo sapiens
gatttaccttaaaaa

SEQ ID NO: 1934456 - DNA, 15 bp, Homo sapiens
atttaccttaaaaaa

SEQ ID NO: 1934457 - DNA, 15 bp, Homo sapiens
tttaccttaaaaaat

SEQ ID NO: 1934458 - DNA, 15 bp, Homo sapiens
ttaccttaaaaaata

SEQ ID NO: 1934459 - DNA, 15 bp, Homo sapiens
taccttaaaaaatat

SEQ ID NO: 1934460 - DNA, 15 bp, Homo sapiens
accttaaaaaatatc

SEQ ID NO: 1934461 - DNA, 15 bp, Homo sapiens
ccttaaaaaatatca

SEQ ID NO: 1934462 - DNA, 15 bp, Homo sapiens
cttaaaaaatatcaa

SEQ ID NO: 1934463 - DNA, 15 bp, Homo sapiens
ttaaaaaatatcaat

SEQ ID NO: 1934464 - DNA, 15 bp, Homo sapiens
taaaaaatatcaata

SEQ ID NO: 1934465 - DNA, 15 bp, Homo sapiens
aaaaaatatcaataa

SEQ ID NO: 1934466 - DNA, 15 bp, Homo sapiens
aaaaatatcaataat

SEQ ID NO: 1934467 - DNA, 15 bp, Homo sapiens
aaaatatcaataata

SEQ ID NO: 1934468 - DNA, 15 bp, Homo sapiens
aaatatcaataatac

SEQ ID NO: 1934469 - DNA, 15 bp, Homo sapiens
aatatcaataataca

SEQ ID NO: 1934470 - DNA, 15 bp, Homo sapiens
atatcaataatacat

SEQ ID NO: 1934471 - DNA, 15 bp, Homo sapiens
tatcaataatacata

SEQ ID NO: 1934472 - DNA, 15 bp, Homo sapiens
atcaataatacataa

SEQ ID NO: 1934473 - DNA, 15 bp, Homo sapiens
tcaataatacataag

SEQ ID NO: 1934474 - DNA, 15 bp, Homo sapiens
caataatacataagc

SEQ ID NO: 1934475 - DNA, 15 bp, Homo sapiens
aataatacataagca

SEQ ID NO: 1934476 - DNA, 15 bp, Homo sapiens
ataatacataagcag

SEQ ID NO: 1934477 - DNA, 15 bp, Homo sapiens
taatacataagcagt

SEQ ID NO: 1934478 - DNA, 15 bp, Homo sapiens
aatacataagcagta

SEQ ID NO: 1934479 - DNA, 15 bp, Homo sapiens
atacataagcagtaa

SEQ ID NO: 1934480 - DNA, 15 bp, Homo sapiens
tacataagcagtaaa

SEQ ID NO: 1934481 - DNA, 15 bp, Homo sapiens
acataagcagtaaat

SEQ ID NO: 1934482 - DNA, 15 bp, Homo sapiens
cataagcagtaaata

SEQ ID NO: 1934483 - DNA, 15 bp, Homo sapiens
ataagcagtaaatat

SEQ ID NO: 1934484 - DNA, 15 bp, Homo sapiens
taagcagtaaatata

SEQ ID NO: 1934485 - DNA, 15 bp, Homo sapiens
aagcagtaaatatag

SEQ ID NO: 1934486 - DNA, 15 bp, Homo sapiens
agcagtaaatatagg

SEQ ID NO: 1934487 - DNA, 15 bp, Homo sapiens
gcagtaaatatagga

SEQ ID NO: 1934488 - DNA, 15 bp, Homo sapiens
cagtaaatataggac

SEQ ID NO: 1934489 - DNA, 15 bp, Homo sapiens
agtaaatataggact

SEQ ID NO: 1934490 - DNA, 15 bp, Homo sapiens
gtaaatataggacta

SEQ ID NO: 1934491 - DNA, 15 bp, Homo sapiens
taaatataggactaa

SEQ ID NO: 1934492 - DNA, 15 bp, Homo sapiens
aaatataggactaag

SEQ ID NO: 1934493 - DNA, 15 bp, Homo sapiens
aatataggactaaga

SEQ ID NO: 1934494 - DNA, 15 bp, Homo sapiens
atataggactaagaa

SEQ ID NO: 1934495 - DNA, 15 bp, Homo sapiens
tataggactaagaat

SEQ ID NO: 1934496 - DNA, 15 bp, Homo sapiens
ataggactaagaata

SEQ ID NO: 1934497 - DNA, 15 bp, Homo sapiens
taggactaagaatat

SEQ ID NO: 1934498 - DNA, 15 bp, Homo sapiens
aggactaagaatata

SEQ ID NO: 1934499 - DNA, 15 bp, Homo sapiens
ggactaagaatatag

SEQ ID NO: 1934500 - DNA, 15 bp, Homo sapiens
gactaagaatataga

SEQ ID NO: 1934501 - DNA, 15 bp, Homo sapiens
actaagaatatagaa

SEQ ID NO: 1934502 - DNA, 15 bp, Homo sapiens
ctaagaatatagaat

SEQ ID NO: 1934503 - DNA, 15 bp, Homo sapiens
taagaatatagaatt

SEQ ID NO: 1934504 - DNA, 15 bp, Homo sapiens
aagaatatagaattt

SEQ ID NO: 1934505 - DNA, 15 bp, Homo sapiens
agaatatagaatttg

SEQ ID NO: 1934506 - DNA, 15 bp, Homo sapiens
gaatatagaatttgg

SEQ ID NO: 1934507 - DNA, 15 bp, Homo sapiens
aatatagaatttgga

SEQ ID NO: 1934508 - DNA, 15 bp, Homo sapiens
atatagaatttggag

SEQ ID NO: 1934509 - DNA, 15 bp, Homo sapiens
tatagaatttggagt

SEQ ID NO: 1934510 - DNA, 15 bp, Homo sapiens
atagaatttggagta

SEQ ID NO: 1934511 - DNA, 15 bp, Homo sapiens
tagaatttggagtat

SEQ ID NO: 1934512 - DNA, 15 bp, Homo sapiens
agaatttggagtata

SEQ ID NO: 1934513 - DNA, 15 bp, Homo sapiens
gaatttggagtataa

SEQ ID NO: 1934514 - DNA, 15 bp, Homo sapiens
aatttggagtataat

SEQ ID NO: 1934515 - DNA, 15 bp, Homo sapiens
atttggagtataatg

SEQ ID NO: 1934516 - DNA, 15 bp, Homo sapiens
tttggagtataatgt

SEQ ID NO: 1934517 - DNA, 15 bp, Homo sapiens
ttggagtataatgtt

SEQ ID NO: 1934518 - DNA, 15 bp, Homo sapiens
tggagtataatgtta

SEQ ID NO: 1934519 - DNA, 15 bp, Homo sapiens
ggagtataatgttaa

SEQ ID NO: 1934520 - DNA, 15 bp, Homo sapiens
gagtataatgttaaa

SEQ ID NO: 1934521 - DNA, 15 bp, Homo sapiens
agtataatgttaaag

SEQ ID NO: 1934522 - DNA, 15 bp, Homo sapiens
gtataatgttaaaga

SEQ ID NO: 1934523 - DNA, 15 bp, Homo sapiens
tataatgttaaagat

SEQ ID NO: 1934524 - DNA, 15 bp, Homo sapiens
ataatgttaaagatc

SEQ ID NO: 1934525 - DNA, 15 bp, Homo sapiens
taatgttaaagatct

SEQ ID NO: 1934526 - DNA, 15 bp, Homo sapiens
aatgttaaagatctt

SEQ ID NO: 1934527 - DNA, 15 bp, Homo sapiens
atgttaaagatcttg

SEQ ID NO: 1934528 - DNA, 15 bp, Homo sapiens
tgttaaagatcttga

SEQ ID NO: 1934529 - DNA, 15 bp, Homo sapiens
gttaaagatcttgaa

SEQ ID NO: 1934530 - DNA, 15 bp, Homo sapiens
ttaaagatcttgaag

SEQ ID NO: 1934531 - DNA, 15 bp, Homo sapiens
taaagatcttgaaga

SEQ ID NO: 1934532 - DNA, 15 bp, Homo sapiens
aaagatcttgaagag

SEQ ID NO: 1934533 - DNA, 15 bp, Homo sapiens
aagatcttgaagagg

SEQ ID NO: 1934534 - DNA, 15 bp, Homo sapiens
agatcttgaagaggt

SEQ ID NO: 1934535 - DNA, 15 bp, Homo sapiens
gatcttgaagaggtg

SEQ ID NO: 1934536 - DNA, 15 bp, Homo sapiens
atcttgaagaggtga

SEQ ID NO: 1934537 - DNA, 15 bp, Homo sapiens
tcttgaagaggtgat

SEQ ID NO: 1934538 - DNA, 15 bp, Homo sapiens
cttgaagaggtgata

SEQ ID NO: 1934539 - DNA, 15 bp, Homo sapiens
ttgaagaggtgataa

SEQ ID NO: 1934540 - DNA, 15 bp, Homo sapiens
tgaagaggtgataac

SEQ ID NO: 1934541 - DNA, 15 bp, Homo sapiens
gaagaggtgataacg

SEQ ID NO: 1934542 - DNA, 15 bp, Homo sapiens
aagaggtgataacgt

SEQ ID NO: 1934543 - DNA, 15 bp, Homo sapiens
agaggtgataacgtc

SEQ ID NO: 1934544 - DNA, 15 bp, Homo sapiens
gaggtgataacgtct

SEQ ID NO: 1934545 - DNA, 15 bp, Homo sapiens
aggtgataacgtctc

SEQ ID NO: 1934546 - DNA, 15 bp, Homo sapiens
ggtgataacgtctca

SEQ ID NO: 1934547 - DNA, 15 bp, Homo sapiens
gtgataacgtctcaa

SEQ ID NO: 1934548 - DNA, 15 bp, Homo sapiens
tgataacgtctcaaa

SEQ ID NO: 1934549 - DNA, 15 bp, Homo sapiens
gataacgtctcaaag

SEQ ID NO: 1934550 - DNA, 15 bp, Homo sapiens
ataacgtctcaaaga

SEQ ID NO: 1934551 - DNA, 15 bp, Homo sapiens
taacgtctcaaagac

SEQ ID NO: 1934552 - DNA, 15 bp, Homo sapiens
aacgtctcaaagaca

SEQ ID NO: 1934553 - DNA, 15 bp, Homo sapiens
acgtctcaaagacaa

SEQ ID NO: 1934554 - DNA, 15 bp, Homo sapiens
cgtctcaaagacaaa

SEQ ID NO: 1934555 - DNA, 15 bp, Homo sapiens
gtctcaaagacaaat

SEQ ID NO: 1934556 - DNA, 15 bp, Homo sapiens
tctcaaagacaaatg

SEQ ID NO: 1934557 - DNA, 15 bp, Homo sapiens
ctcaaagacaaatgt

SEQ ID NO: 1934558 - DNA, 15 bp, Homo sapiens
tcaaagacaaatgtt

SEQ ID NO: 1934559 - DNA, 15 bp, Homo sapiens
caaagacaaatgttg

SEQ ID NO: 1934560 - DNA, 15 bp, Homo sapiens
aaagacaaatgttgt

SEQ ID NO: 1934561 - DNA, 15 bp, Homo sapiens
aagacaaatgttgta

SEQ ID NO: 1934562 - DNA, 15 bp, Homo sapiens
agacaaatgttgtaa

SEQ ID NO: 1934563 - DNA, 15 bp, Homo sapiens
gacaaatgttgtaac

SEQ ID NO: 1934564 - DNA, 15 bp, Homo sapiens
acaaatgttgtaact

SEQ ID NO: 1934565 - DNA, 15 bp, Homo sapiens
caaatgttgtaactt

SEQ ID NO: 1934566 - DNA, 15 bp, Homo sapiens
aaatgttgtaacttg

SEQ ID NO: 1934567 - DNA, 15 bp, Homo sapiens
aatgttgtaacttga

SEQ ID NO: 1934568 - DNA, 15 bp, Homo sapiens
atgttgtaacttgat

SEQ ID NO: 1934569 - DNA, 15 bp, Homo sapiens
tgttgtaacttgatc

SEQ ID NO: 1934570 - DNA, 15 bp, Homo sapiens
gttgtaacttgatcc

SEQ ID NO: 1934571 - DNA, 15 bp, Homo sapiens
ttgtaacttgatcct

SEQ ID NO: 1934572 - DNA, 15 bp, Homo sapiens
tgtaacttgatcctc

SEQ ID NO: 1934573 - DNA, 15 bp, Homo sapiens
gtaacttgatcctct

SEQ ID NO: 1934574 - DNA, 15 bp, Homo sapiens
taacttgatcctctt

SEQ ID NO: 1934575 - DNA, 15 bp, Homo sapiens
aacttgatcctctta

SEQ ID NO: 1934576 - DNA, 15 bp, Homo sapiens
acttgatcctcttaa

SEQ ID NO: 1934577 - DNA, 15 bp, Homo sapiens
cttgatcctcttaat

SEQ ID NO: 1934578 - DNA, 15 bp, Homo sapiens
ttgatcctcttaatg

SEQ ID NO: 1934579 - DNA, 15 bp, Homo sapiens
tgatcctcttaatgc

SEQ ID NO: 1934580 - DNA, 15 bp, Homo sapiens
gatcctcttaatgct

SEQ ID NO: 1934581 - DNA, 15 bp, Homo sapiens
atcctcttaatgctc

SEQ ID NO: 1934582 - DNA, 15 bp, Homo sapiens
tcctcttaatgctca

SEQ ID NO: 1934583 - DNA, 15 bp, Homo sapiens
cctcttaatgctcag

SEQ ID NO: 1934584 - DNA, 15 bp, Homo sapiens
ctcttaatgctcagg

SEQ ID NO: 1934585 - DNA, 15 bp, Homo sapiens
tcttaatgctcagga

SEQ ID NO: 1934586 - DNA, 15 bp, Homo sapiens
cttaatgctcaggaa

SEQ ID NO: 1934587 - DNA, 15 bp, Homo sapiens
ttaatgctcaggaat

SEQ ID NO: 1934588 - DNA, 15 bp, Homo sapiens
taatgctcaggaatt

SEQ ID NO: 1934589 - DNA, 15 bp, Homo sapiens
aatgctcaggaattt

SEQ ID NO: 1934590 - DNA, 15 bp, Homo sapiens
atgctcaggaattta

SEQ ID NO: 1934591 - DNA, 15 bp, Homo sapiens
tgctcaggaatttaa

SEQ ID NO: 1934592 - DNA, 15 bp, Homo sapiens
gctcaggaatttaaa

SEQ ID NO: 1934593 - DNA, 15 bp, Homo sapiens
ctcaggaatttaaaa

SEQ ID NO: 1934594 - DNA, 15 bp, Homo sapiens
tcaggaatttaaaaa

SEQ ID NO: 1934595 - DNA, 15 bp, Homo sapiens
caggaatttaaaaag

SEQ ID NO: 1934596 - DNA, 15 bp, Homo sapiens
aggaatttaaaaaga

SEQ ID NO: 1934597 - DNA, 15 bp, Homo sapiens
ggaatttaaaaagaa

SEQ ID NO: 1934598 - DNA, 15 bp, Homo sapiens
gaatttaaaaagaaa

SEQ ID NO: 1934599 - DNA, 15 bp, Homo sapiens
aatttaaaaagaaat

SEQ ID NO: 1934600 - DNA, 15 bp, Homo sapiens
atttaaaaagaaatc

SEQ ID NO: 1934601 - DNA, 15 bp, Homo sapiens
tttaaaaagaaatct

SEQ ID NO: 1934602 - DNA, 15 bp, Homo sapiens
ttaaaaagaaatctc

SEQ ID NO: 1934603 - DNA, 15 bp, Homo sapiens
taaaaagaaatctca

SEQ ID NO: 1934604 - DNA, 15 bp, Homo sapiens
aaaaagaaatctcag

SEQ ID NO: 1934605 - DNA, 15 bp, Homo sapiens
aaaagaaatctcagg

SEQ ID NO: 1934606 - DNA, 15 bp, Homo sapiens
aaagaaatctcaggg

SEQ ID NO: 1934607 - DNA, 15 bp, Homo sapiens
aagaaatctcagggt

SEQ ID NO: 1934608 - DNA, 15 bp, Homo sapiens
agaaatctcagggtt

SEQ ID NO: 1934609 - DNA, 15 bp, Homo sapiens
gaaatctcagggttt

SEQ ID NO: 1934610 - DNA, 15 bp, Homo sapiens
aaatctcagggtttt

SEQ ID NO: 1934611 - DNA, 15 bp, Homo sapiens
aatctcagggtttta

SEQ ID NO: 1934612 - DNA, 15 bp, Homo sapiens
atctcagggttttag

SEQ ID NO: 1934613 - DNA, 15 bp, Homo sapiens
tctcagggttttaga

SEQ ID NO: 1934614 - DNA, 15 bp, Homo sapiens
ctcagggttttagaa

SEQ ID NO: 1934615 - DNA, 15 bp, Homo sapiens
tcagggttttagaaa

SEQ ID NO: 1934616 - DNA, 15 bp, Homo sapiens
cagggttttagaaac

SEQ ID NO: 1934617 - DNA, 15 bp, Homo sapiens
agggttttagaaaca

SEQ ID NO: 1934618 - DNA, 15 bp, Homo sapiens
gggttttagaaacat

SEQ ID NO: 1934619 - DNA, 15 bp, Homo sapiens
ggttttagaaacatt

SEQ ID NO: 1934620 - DNA, 15 bp, Homo sapiens
gttttagaaacattt

SEQ ID NO: 1934621 - DNA, 15 bp, Homo sapiens
ttttagaaacatttt

SEQ ID NO: 1934622 - DNA, 15 bp, Homo sapiens
tttagaaacattttt

SEQ ID NO: 1934623 - DNA, 15 bp, Homo sapiens
ttagaaacatttttt

SEQ ID NO: 1934624 - DNA, 15 bp, Homo sapiens
tagaaacattttttt

SEQ ID NO: 1934625 - DNA, 15 bp, Homo sapiens
agaaacatttttttt

SEQ ID NO: 1934626 - DNA, 15 bp, Homo sapiens
gaaacattttttttt

SEQ ID NO: 1934627 - DNA, 15 bp, Homo sapiens
acattttttttttta

SEQ ID NO: 1934628 - DNA, 15 bp, Homo sapiens
catttttttttttag

SEQ ID NO: 1934629 - DNA, 15 bp, Homo sapiens
atttttttttttaga

SEQ ID NO: 1934630 - DNA, 15 bp, Homo sapiens
ttttttttttagaat

SEQ ID NO: 1934631 - DNA, 15 bp, Homo sapiens
tttttttttagaatt

SEQ ID NO: 1934632 - DNA, 15 bp, Homo sapiens
ttttttttagaatta

SEQ ID NO: 1934633 - DNA, 15 bp, Homo sapiens
tttttttagaattaa

SEQ ID NO: 1934634 - DNA, 15 bp, Homo sapiens
ttttttagaattaaa

SEQ ID NO: 1934635 - DNA, 15 bp, Homo sapiens
tttttagaattaaat

SEQ ID NO: 1934636 - DNA, 15 bp, Homo sapiens
ttttagaattaaatc

SEQ ID NO: 1934637 - DNA, 15 bp, Homo sapiens
tttagaattaaatca

SEQ ID NO: 1934638 - DNA, 15 bp, Homo sapiens
ttagaattaaatcaa

SEQ ID NO: 1934639 - DNA, 15 bp, Homo sapiens
tagaattaaatcaat

SEQ ID NO: 1934640 - DNA, 15 bp, Homo sapiens
agaattaaatcaata

SEQ ID NO: 1934641 - DNA, 15 bp, Homo sapiens
gaattaaatcaataa

SEQ ID NO: 1934642 - DNA, 15 bp, Homo sapiens
aattaaatcaataat

SEQ ID NO: 1934643 - DNA, 15 bp, Homo sapiens
attaaatcaataatg

SEQ ID NO: 1934644 - DNA, 15 bp, Homo sapiens
ttaaatcaataatgt

SEQ ID NO: 1934645 - DNA, 15 bp, Homo sapiens
taaatcaataatgtc

SEQ ID NO: 1934646 - DNA, 15 bp, Homo sapiens
aaatcaataatgtca

SEQ ID NO: 1934647 - DNA, 15 bp, Homo sapiens
aatcaataatgtcaa

SEQ ID NO: 1934648 - DNA, 15 bp, Homo sapiens
atcaataatgtcaaa

SEQ ID NO: 1934649 - DNA, 15 bp, Homo sapiens
tcaataatgtcaaag

SEQ ID NO: 1934650 - DNA, 15 bp, Homo sapiens
caataatgtcaaaga

SEQ ID NO: 1934651 - DNA, 15 bp, Homo sapiens
aataatgtcaaagat

SEQ ID NO: 1934652 - DNA, 15 bp, Homo sapiens
ataatgtcaaagatg

SEQ ID NO: 1934653 - DNA, 15 bp, Homo sapiens
taatgtcaaagatga

SEQ ID NO: 1934654 - DNA, 15 bp, Homo sapiens
aatgtcaaagatgag

SEQ ID NO: 1934655 - DNA, 15 bp, Homo sapiens
atgtcaaagatgagt

SEQ ID NO: 1934656 - DNA, 15 bp, Homo sapiens
tgtcaaagatgagtg

SEQ ID NO: 1934657 - DNA, 15 bp, Homo sapiens
gtcaaagatgagtgc

SEQ ID NO: 1934658 - DNA, 15 bp, Homo sapiens
tcaaagatgagtgcc

SEQ ID NO: 1934659 - DNA, 15 bp, Homo sapiens
caaagatgagtgcca

SEQ ID NO: 1934660 - DNA, 15 bp, Homo sapiens
aaagatgagtgccaa

SEQ ID NO: 1934661 - DNA, 15 bp, Homo sapiens
aagatgagtgccaac

SEQ ID NO: 1934662 - DNA, 15 bp, Homo sapiens
agatgagtgccaacc

SEQ ID NO: 1934663 - DNA, 15 bp, Homo sapiens
gatgagtgccaacca

SEQ ID NO: 1934664 - DNA, 15 bp, Homo sapiens
atgagtgccaaccag

SEQ ID NO: 1934665 - DNA, 15 bp, Homo sapiens
tgagtgccaaccagt

SEQ ID NO: 1934666 - DNA, 15 bp, Homo sapiens
gagtgccaaccagta

SEQ ID NO: 1934667 - DNA, 15 bp, Homo sapiens
agtgccaaccagtag

SEQ ID NO: 1934668 - DNA, 15 bp, Homo sapiens
gtgccaaccagtagt

SEQ ID NO: 1934669 - DNA, 15 bp, Homo sapiens
tgccaaccagtagta

SEQ ID NO: 1934670 - DNA, 15 bp, Homo sapiens
gccaaccagtagtaa

SEQ ID NO: 1934671 - DNA, 15 bp, Homo sapiens
ccaaccagtagtaat

SEQ ID NO: 1934672 - DNA, 15 bp, Homo sapiens
caaccagtagtaatg

SEQ ID NO: 1934673 - DNA, 15 bp, Homo sapiens
aaccagtagtaatga

SEQ ID NO: 1934674 - DNA, 15 bp, Homo sapiens
accagtagtaatgat

SEQ ID NO: 1934675 - DNA, 15 bp, Homo sapiens
ccagtagtaatgatt

SEQ ID NO: 1934676 - DNA, 15 bp, Homo sapiens
cagtagtaatgattt

SEQ ID NO: 1934677 - DNA, 15 bp, Homo sapiens
agtagtaatgattta

SEQ ID NO: 1934678 - DNA, 15 bp, Homo sapiens
gtagtaatgatttag

SEQ ID NO: 1934679 - DNA, 15 bp, Homo sapiens
tagtaatgatttaga

SEQ ID NO: 1934680 - DNA, 15 bp, Homo sapiens
agtaatgatttagaa

SEQ ID NO: 1934681 - DNA, 15 bp, Homo sapiens
gtaatgatttagaaa

SEQ ID NO: 1934682 - DNA, 15 bp, Homo sapiens
taatgatttagaaat

SEQ ID NO: 1934683 - DNA, 15 bp, Homo sapiens
aatgatttagaaatt

SEQ ID NO: 1934684 - DNA, 15 bp, Homo sapiens
atgatttagaaatta

SEQ ID NO: 1934685 - DNA, 15 bp, Homo sapiens
tgatttagaaattat

SEQ ID NO: 1934686 - DNA, 15 bp, Homo sapiens
gatttagaaattata

SEQ ID NO: 1934687 - DNA, 15 bp, Homo sapiens
atttagaaattatat

SEQ ID NO: 1934688 - DNA, 15 bp, Homo sapiens
tttagaaattatatg

SEQ ID NO: 1934689 - DNA, 15 bp, Homo sapiens
ttagaaattatatgg

SEQ ID NO: 1934690 - DNA, 15 bp, Homo sapiens
tagaaattatatggc

SEQ ID NO: 1934691 - DNA, 15 bp, Homo sapiens
agaaattatatggca

SEQ ID NO: 1934692 - DNA, 15 bp, Homo sapiens
gaaattatatggcag

SEQ ID NO: 1934693 - DNA, 15 bp, Homo sapiens
aaattatatggcagt

SEQ ID NO: 1934694 - DNA, 15 bp, Homo sapiens
aattatatggcagtt

SEQ ID NO: 1934695 - DNA, 15 bp, Homo sapiens
attatatggcagttc

SEQ ID NO: 1934696 - DNA, 15 bp, Homo sapiens
ttatatggcagttca

SEQ ID NO: 1934697 - DNA, 15 bp, Homo sapiens
tatatggcagttcat

SEQ ID NO: 1934698 - DNA, 15 bp, Homo sapiens
atatggcagttcatc

SEQ ID NO: 1934699 - DNA, 15 bp, Homo sapiens
tatggcagttcatca

SEQ ID NO: 1934700 - DNA, 15 bp, Homo sapiens
atggcagttcatcat

SEQ ID NO: 1934701 - DNA, 15 bp, Homo sapiens
tggcagttcatcatt

SEQ ID NO: 1934702 - DNA, 15 bp, Homo sapiens
ggcagttcatcattt

SEQ ID NO: 1934703 - DNA, 15 bp, Homo sapiens
gcagttcatcattta

SEQ ID NO: 1934704 - DNA, 15 bp, Homo sapiens
cagttcatcatttag

SEQ ID NO: 1934705 - DNA, 15 bp, Homo sapiens
agttcatcatttaga

SEQ ID NO: 1934706 - DNA, 15 bp, Homo sapiens
gttcatcatttagaa

SEQ ID NO: 1934707 - DNA, 15 bp, Homo sapiens
ttcatcatttagaag

SEQ ID NO: 1934708 - DNA, 15 bp, Homo sapiens
tcatcatttagaagt

SEQ ID NO: 1934709 - DNA, 15 bp, Homo sapiens
catcatttagaagtt

SEQ ID NO: 1934710 - DNA, 15 bp, Homo sapiens
atcatttagaagttg

SEQ ID NO: 1934711 - DNA, 15 bp, Homo sapiens
tcatttagaagttgt

SEQ ID NO: 1934712 - DNA, 15 bp, Homo sapiens
catttagaagttgtt

SEQ ID NO: 1934713 - DNA, 15 bp, Homo sapiens
atttagaagttgtta

SEQ ID NO: 1934714 - DNA, 15 bp, Homo sapiens
tttagaagttgttat

SEQ ID NO: 1934715 - DNA, 15 bp, Homo sapiens
ttagaagttgttata

SEQ ID NO: 1934716 - DNA, 15 bp, Homo sapiens
tagaagttgttatag

SEQ ID NO: 1934717 - DNA, 15 bp, Homo sapiens
agaagttgttatagt

SEQ ID NO: 1934718 - DNA, 15 bp, Homo sapiens
gaagttgttatagtt

SEQ ID NO: 1934719 - DNA, 15 bp, Homo sapiens
aagttgttatagttg

SEQ ID NO: 1934720 - DNA, 15 bp, Homo sapiens
agttgttatagttgg

SEQ ID NO: 1934721 - DNA, 15 bp, Homo sapiens
gttgttatagttggt

SEQ ID NO: 1934722 - DNA, 15 bp, Homo sapiens
ttgttatagttggtg

SEQ ID NO: 1934723 - DNA, 15 bp, Homo sapiens
tgttatagttggtga

SEQ ID NO: 1934724 - DNA, 15 bp, Homo sapiens
gttatagttggtgaa

SEQ ID NO: 1934725 - DNA, 15 bp, Homo sapiens
ttatagttggtgaaa

SEQ ID NO: 1934726 - DNA, 15 bp, Homo sapiens
tatagttggtgaaac

SEQ ID NO: 1934727 - DNA, 15 bp, Homo sapiens
atagttggtgaaacg

SEQ ID NO: 1934728 - DNA, 15 bp, Homo sapiens
tagttggtgaaacgt

SEQ ID NO: 1934729 - DNA, 15 bp, Homo sapiens
agttggtgaaacgtt

SEQ ID NO: 1934730 - DNA, 15 bp, Homo sapiens
gttggtgaaacgttg

SEQ ID NO: 1934731 - DNA, 15 bp, Homo sapiens
ttggtgaaacgttgc

SEQ ID NO: 1934732 - DNA, 15 bp, Homo sapiens
tggtgaaacgttgct

SEQ ID NO: 1934733 - DNA, 15 bp, Homo sapiens
ggtgaaacgttgcta

SEQ ID NO: 1934734 - DNA, 15 bp, Homo sapiens
gtgaaacgttgctaa

SEQ ID NO: 1934735 - DNA, 15 bp, Homo sapiens
tgaaacgttgctaat

SEQ ID NO: 1934736 - DNA, 15 bp, Homo sapiens
gaaacgttgctaatt

SEQ ID NO: 1934737 - DNA, 15 bp, Homo sapiens
aaacgttgctaatta

SEQ ID NO: 1934738 - DNA, 15 bp, Homo sapiens
aacgttgctaattat

SEQ ID NO: 1934739 - DNA, 15 bp, Homo sapiens
acgttgctaattatt

SEQ ID NO: 1934740 - DNA, 15 bp, Homo sapiens
cgttgctaattattt

SEQ ID NO: 1934741 - DNA, 15 bp, Homo sapiens
gttgctaattatttt

SEQ ID NO: 1934742 - DNA, 15 bp, Homo sapiens
ttgctaattatttta

SEQ ID NO: 1934743 - DNA, 15 bp, Homo sapiens
tgctaattattttaa

SEQ ID NO: 1934744 - DNA, 15 bp, Homo sapiens
gctaattattttaag

SEQ ID NO: 1934745 - DNA, 15 bp, Homo sapiens
ctaattattttaaga

SEQ ID NO: 1934746 - DNA, 15 bp, Homo sapiens
taattattttaagat

SEQ ID NO: 1934747 - DNA, 15 bp, Homo sapiens
aattattttaagata

SEQ ID NO: 1934748 - DNA, 15 bp, Homo sapiens
attattttaagatag

SEQ ID NO: 1934749 - DNA, 15 bp, Homo sapiens
ttattttaagatagt

SEQ ID NO: 1934750 - DNA, 15 bp, Homo sapiens
tattttaagatagtg

SEQ ID NO: 1934751 - DNA, 15 bp, Homo sapiens
attttaagatagtgg

SEQ ID NO: 1934752 - DNA, 15 bp, Homo sapiens
ttttaagatagtggt

SEQ ID NO: 1934753 - DNA, 15 bp, Homo sapiens
tttaagatagtggtt

SEQ ID NO: 1934754 - DNA, 15 bp, Homo sapiens
ttaagatagtggttc

SEQ ID NO: 1934755 - DNA, 15 bp, Homo sapiens
taagatagtggttca

SEQ ID NO: 1934756 - DNA, 15 bp, Homo sapiens
aagatagtggttcaa

SEQ ID NO: 1934757 - DNA, 15 bp, Homo sapiens
agatagtggttcaag

SEQ ID NO: 1934758 - DNA, 15 bp, Homo sapiens
gatagtggttcaagc

SEQ ID NO: 1934759 - DNA, 15 bp, Homo sapiens
atagtggttcaagca

SEQ ID NO: 1934760 - DNA, 15 bp, Homo sapiens
tagtggttcaagcac

SEQ ID NO: 1934761 - DNA, 15 bp, Homo sapiens
agtggttcaagcact

SEQ ID NO: 1934762 - DNA, 15 bp, Homo sapiens
gtggttcaagcacta

SEQ ID NO: 1934763 - DNA, 15 bp, Homo sapiens
tggttcaagcactaa

SEQ ID NO: 1934764 - DNA, 15 bp, Homo sapiens
ggttcaagcactaat

SEQ ID NO: 1934765 - DNA, 15 bp, Homo sapiens
gttcaagcactaata

SEQ ID NO: 1934766 - DNA, 15 bp, Homo sapiens
ttcaagcactaataa

SEQ ID NO: 1934767 - DNA, 15 bp, Homo sapiens
tcaagcactaataaa

SEQ ID NO: 1934768 - DNA, 15 bp, Homo sapiens
caagcactaataaat

SEQ ID NO: 1934769 - DNA, 15 bp, Homo sapiens
aagcactaataaatt

SEQ ID NO: 1934770 - DNA, 15 bp, Homo sapiens
agcactaataaattt

SEQ ID NO: 1934771 - DNA, 15 bp, Homo sapiens
gcactaataaatttc

SEQ ID NO: 1934772 - DNA, 15 bp, Homo sapiens
cactaataaatttca

SEQ ID NO: 1934773 - DNA, 15 bp, Homo sapiens
actaataaatttcat

SEQ ID NO: 1934774 - DNA, 15 bp, Homo sapiens
ctaataaatttcata

SEQ ID NO: 1934775 - DNA, 15 bp, Homo sapiens
taataaatttcatat

SEQ ID NO: 1934776 - DNA, 15 bp, Homo sapiens
aataaatttcatatc

SEQ ID NO: 1934777 - DNA, 15 bp, Homo sapiens
ataaatttcatatct

SEQ ID NO: 1934778 - DNA, 15 bp, Homo sapiens
taaatttcatatcta

SEQ ID NO: 1934779 - DNA, 15 bp, Homo sapiens
aaatttcatatctat

SEQ ID NO: 1934780 - DNA, 15 bp, Homo sapiens
aatttcatatctata

SEQ ID NO: 1934781 - DNA, 15 bp, Homo sapiens
atttcatatctatat

SEQ ID NO: 1934782 - DNA, 15 bp, Homo sapiens
tttcatatctatata

SEQ ID NO: 1934783 - DNA, 15 bp, Homo sapiens
ttcatatctatatat

SEQ ID NO: 1934784 - DNA, 15 bp, Homo sapiens
tcatatctatatata

SEQ ID NO: 1934785 - DNA, 15 bp, Homo sapiens
catatctatatatac

SEQ ID NO: 1934786 - DNA, 15 bp, Homo sapiens
atatctatatataca

SEQ ID NO: 1934787 - DNA, 15 bp, Homo sapiens
tatctatatatacat

SEQ ID NO: 1934788 - DNA, 15 bp, Homo sapiens
atctatatatacata

SEQ ID NO: 1934789 - DNA, 15 bp, Homo sapiens
tctatatatacatat

SEQ ID NO: 1934790 - DNA, 15 bp, Homo sapiens
ctatatatacatata

SEQ ID NO: 1934791 - DNA, 15 bp, Homo sapiens
atatatacatatata

SEQ ID NO: 1934792 - DNA, 15 bp, Homo sapiens
tatatacatatatat

SEQ ID NO: 1934793 - DNA, 15 bp, Homo sapiens
atatacatatatatg

SEQ ID NO: 1934794 - DNA, 15 bp, Homo sapiens
tatacatatatatgc

SEQ ID NO: 1934795 - DNA, 15 bp, Homo sapiens
atacatatatatgca

SEQ ID NO: 1934796 - DNA, 15 bp, Homo sapiens
tacatatatatgcac

SEQ ID NO: 1934797 - DNA, 15 bp, Homo sapiens
acatatatatgcaca

SEQ ID NO: 1934798 - DNA, 15 bp, Homo sapiens
catatatatgcacac

SEQ ID NO: 1934799 - DNA, 15 bp, Homo sapiens
atatatatgcacaca

SEQ ID NO: 1934800 - DNA, 15 bp, Homo sapiens
tatatatgcacacac

SEQ ID NO: 1934801 - DNA, 15 bp, Homo sapiens
atatatgcacacaca

SEQ ID NO: 1934802 - DNA, 15 bp, Homo sapiens
tatatgcacacacac

SEQ ID NO: 1934803 - DNA, 15 bp, Homo sapiens
atatgcacacacaca

SEQ ID NO: 1934804 - DNA, 15 bp, Homo sapiens
tatgcacacacacat

SEQ ID NO: 1934805 - DNA, 15 bp, Homo sapiens
atgcacacacacatt

SEQ ID NO: 1934806 - DNA, 15 bp, Homo sapiens
tgcacacacacatta

SEQ ID NO: 1934807 - DNA, 15 bp, Homo sapiens
gcacacacacattaa

SEQ ID NO: 1934808 - DNA, 15 bp, Homo sapiens
cacacacacattaat

SEQ ID NO: 1934809 - DNA, 15 bp, Homo sapiens
acacacacattaata

SEQ ID NO: 1934810 - DNA, 15 bp, Homo sapiens
cacacacattaataa

SEQ ID NO: 1934811 - DNA, 15 bp, Homo sapiens
acacacattaataaa

SEQ ID NO: 1934812 - DNA, 15 bp, Homo sapiens
cacacattaataaat

SEQ ID NO: 1934813 - DNA, 15 bp, Homo sapiens
acacattaataaatg

SEQ ID NO: 1934814 - DNA, 15 bp, Homo sapiens
cacattaataaatgg

SEQ ID NO: 1934815 - DNA, 15 bp, Homo sapiens
acattaataaatggc

SEQ ID NO: 1934816 - DNA, 15 bp, Homo sapiens
cattaataaatggct

SEQ ID NO: 1934817 - DNA, 15 bp, Homo sapiens
attaataaatggcta

SEQ ID NO: 1934818 - DNA, 15 bp, Homo sapiens
ttaataaatggctaa

SEQ ID NO: 1934819 - DNA, 15 bp, Homo sapiens
taataaatggctaat

SEQ ID NO: 1934820 - DNA, 15 bp, Homo sapiens
aataaatggctaata

SEQ ID NO: 1934821 - DNA, 15 bp, Homo sapiens
ataaatggctaatat

SEQ ID NO: 1934822 - DNA, 15 bp, Homo sapiens
taaatggctaatatc

SEQ ID NO: 1934823 - DNA, 15 bp, Homo sapiens
aaatggctaatatct

SEQ ID NO: 1934824 - DNA, 15 bp, Homo sapiens
aatggctaatatcta

SEQ ID NO: 1934825 - DNA, 15 bp, Homo sapiens
atggctaatatctaa

SEQ ID NO: 1934826 - DNA, 15 bp, Homo sapiens
tggctaatatctaat

SEQ ID NO: 1934827 - DNA, 15 bp, Homo sapiens
ggctaatatctaatc

SEQ ID NO: 1934828 - DNA, 15 bp, Homo sapiens
gctaatatctaatca

SEQ ID NO: 1934829 - DNA, 15 bp, Homo sapiens
ctaatatctaatcaa

SEQ ID NO: 1934830 - DNA, 15 bp, Homo sapiens
taatatctaatcaag

SEQ ID NO: 1934831 - DNA, 15 bp, Homo sapiens
aatatctaatcaaga

SEQ ID NO: 1934832 - DNA, 15 bp, Homo sapiens
atatctaatcaagac

SEQ ID NO: 1934833 - DNA, 15 bp, Homo sapiens
tatctaatcaagaca

SEQ ID NO: 1934834 - DNA, 15 bp, Homo sapiens
atctaatcaagacaa

SEQ ID NO: 1934835 - DNA, 15 bp, Homo sapiens
tctaatcaagacaag

SEQ ID NO: 1934836 - DNA, 15 bp, Homo sapiens
ctaatcaagacaagg

SEQ ID NO: 1934837 - DNA, 15 bp, Homo sapiens
taatcaagacaagga

SEQ ID NO: 1934838 - DNA, 15 bp, Homo sapiens
aatcaagacaaggac

SEQ ID NO: 1934839 - DNA, 15 bp, Homo sapiens
atcaagacaaggaca

SEQ ID NO: 1934840 - DNA, 15 bp, Homo sapiens
tcaagacaaggacaa

SEQ ID NO: 1934841 - DNA, 15 bp, Homo sapiens
caagacaaggacaaa

SEQ ID NO: 1934842 - DNA, 15 bp, Homo sapiens
aagacaaggacaaat

SEQ ID NO: 1934843 - DNA, 15 bp, Homo sapiens
agacaaggacaaatt

SEQ ID NO: 1934844 - DNA, 15 bp, Homo sapiens
gacaaggacaaatta

SEQ ID NO: 1934845 - DNA, 15 bp, Homo sapiens
acaaggacaaattat

SEQ ID NO: 1934846 - DNA, 15 bp, Homo sapiens
caaggacaaattata

SEQ ID NO: 1934847 - DNA, 15 bp, Homo sapiens
aaggacaaattataa

SEQ ID NO: 1934848 - DNA, 15 bp, Homo sapiens
aggacaaattataat

SEQ ID NO: 1934849 - DNA, 15 bp, Homo sapiens
ggacaaattataatt

SEQ ID NO: 1934850 - DNA, 15 bp, Homo sapiens
gacaaattataattt

SEQ ID NO: 1934851 - DNA, 15 bp, Homo sapiens
acaaattataattta

SEQ ID NO: 1934852 - DNA, 15 bp, Homo sapiens
caaattataatttat

SEQ ID NO: 1934853 - DNA, 15 bp, Homo sapiens
aaattataatttatt

SEQ ID NO: 1934854 - DNA, 15 bp, Homo sapiens
aattataatttatta

SEQ ID NO: 1934855 - DNA, 15 bp, Homo sapiens
attataatttattac

SEQ ID NO: 1934856 - DNA, 15 bp, Homo sapiens
ttataatttattaca

SEQ ID NO: 1934857 - DNA, 15 bp, Homo sapiens
tataatttattacaa

SEQ ID NO: 1934858 - DNA, 15 bp, Homo sapiens
ataatttattacaaa

SEQ ID NO: 1934859 - DNA, 15 bp, Homo sapiens
taatttattacaaaa

SEQ ID NO: 1934860 - DNA, 15 bp, Homo sapiens
aatttattacaaaaa

SEQ ID NO: 1934861 - DNA, 15 bp, Homo sapiens
atttattacaaaaag

SEQ ID NO: 1934862 - DNA, 15 bp, Homo sapiens
tttattacaaaaaga

SEQ ID NO: 1934863 - DNA, 15 bp, Homo sapiens
ttattacaaaaagac

SEQ ID NO: 1934864 - DNA, 15 bp, Homo sapiens
tattacaaaaagact

SEQ ID NO: 1934865 - DNA, 15 bp, Homo sapiens
attacaaaaagactg

SEQ ID NO: 1934866 - DNA, 15 bp, Homo sapiens
ttacaaaaagactgc

SEQ ID NO: 1934867 - DNA, 15 bp, Homo sapiens
tacaaaaagactgct

SEQ ID NO: 1934868 - DNA, 15 bp, Homo sapiens
acaaaaagactgctt

SEQ ID NO: 1934869 - DNA, 15 bp, Homo sapiens
caaaaagactgcttc

SEQ ID NO: 1934870 - DNA, 15 bp, Homo sapiens
aaaaagactgcttca

SEQ ID NO: 1934871 - DNA, 15 bp, Homo sapiens
aaaagactgcttcac

SEQ ID NO: 1934872 - DNA, 15 bp, Homo sapiens
aaagactgcttcaca

SEQ ID NO: 1934873 - DNA, 15 bp, Homo sapiens
aagactgcttcacaa

SEQ ID NO: 1934874 - DNA, 15 bp, Homo sapiens
agactgcttcacaat

SEQ ID NO: 1934875 - DNA, 15 bp, Homo sapiens
gactgcttcacaatt

SEQ ID NO: 1934876 - DNA, 15 bp, Homo sapiens
actgcttcacaattt

SEQ ID NO: 1934877 - DNA, 15 bp, Homo sapiens
ctgcttcacaatttt

SEQ ID NO: 1934878 - DNA, 15 bp, Homo sapiens
tgcttcacaattttc

SEQ ID NO: 1934879 - DNA, 15 bp, Homo sapiens
gcttcacaattttca

SEQ ID NO: 1934880 - DNA, 15 bp, Homo sapiens
cttcacaattttcag

SEQ ID NO: 1934881 - DNA, 15 bp, Homo sapiens
ttcacaattttcagg

SEQ ID NO: 1934882 - DNA, 15 bp, Homo sapiens
tcacaattttcaggc

SEQ ID NO: 1934883 - DNA, 15 bp, Homo sapiens
cacaattttcaggca

SEQ ID NO: 1934884 - DNA, 15 bp, Homo sapiens
acaattttcaggcag

SEQ ID NO: 1934885 - DNA, 15 bp, Homo sapiens
caattttcaggcagt

SEQ ID NO: 1934886 - DNA, 15 bp, Homo sapiens
aattttcaggcagtt

SEQ ID NO: 1934887 - DNA, 15 bp, Homo sapiens
attttcaggcagttt

SEQ ID NO: 1934888 - DNA, 15 bp, Homo sapiens
ttttcaggcagtttg

SEQ ID NO: 1934889 - DNA, 15 bp, Homo sapiens
tttcaggcagtttga

SEQ ID NO: 1934890 - DNA, 15 bp, Homo sapiens
ttcaggcagtttgaa

SEQ ID NO: 1934891 - DNA, 15 bp, Homo sapiens
tcaggcagtttgaag

SEQ ID NO: 1934892 - DNA, 15 bp, Homo sapiens
caggcagtttgaagt

SEQ ID NO: 1934893 - DNA, 15 bp, Homo sapiens
aggcagtttgaagta

SEQ ID NO: 1934894 - DNA, 15 bp, Homo sapiens
ggcagtttgaagtat

SEQ ID NO: 1934895 - DNA, 15 bp, Homo sapiens
gcagtttgaagtatc

SEQ ID NO: 1934896 - DNA, 15 bp, Homo sapiens
cagtttgaagtatct

SEQ ID NO: 1934897 - DNA, 15 bp, Homo sapiens
agtttgaagtatctg

SEQ ID NO: 1934898 - DNA, 15 bp, Homo sapiens
gtttgaagtatctgg

SEQ ID NO: 1934899 - DNA, 15 bp, Homo sapiens
tttgaagtatctggc

SEQ ID NO: 1934900 - DNA, 15 bp, Homo sapiens
ttgaagtatctggca

SEQ ID NO: 1934901 - DNA, 15 bp, Homo sapiens
tgaagtatctggcag

SEQ ID NO: 1934902 - DNA, 15 bp, Homo sapiens
gaagtatctggcaga

SEQ ID NO: 1934903 - DNA, 15 bp, Homo sapiens
aagtatctggcagaa

SEQ ID NO: 1934904 - DNA, 15 bp, Homo sapiens
agtatctggcagaaa

SEQ ID NO: 1934905 - DNA, 15 bp, Homo sapiens
gtatctggcagaaaa

SEQ ID NO: 1934906 - DNA, 15 bp, Homo sapiens
tatctggcagaaaaa

SEQ ID NO: 1934907 - DNA, 15 bp, Homo sapiens
atctggcagaaaaag

SEQ ID NO: 1934908 - DNA, 15 bp, Homo sapiens
tctggcagaaaaagt

SEQ ID NO: 1934909 - DNA, 15 bp, Homo sapiens
ctggcagaaaaagta

SEQ ID NO: 1934910 - DNA, 15 bp, Homo sapiens
tggcagaaaaagtaa

SEQ ID NO: 1934911 - DNA, 15 bp, Homo sapiens
ggcagaaaaagtaaa

SEQ ID NO: 1934912 - DNA, 15 bp, Homo sapiens
gcagaaaaagtaaat

SEQ ID NO: 1934913 - DNA, 15 bp, Homo sapiens
cagaaaaagtaaatt

SEQ ID NO: 1934914 - DNA, 15 bp, Homo sapiens
agaaaaagtaaattg

SEQ ID NO: 1934915 - DNA, 15 bp, Homo sapiens
gaaaaagtaaattga

SEQ ID NO: 1934916 - DNA, 15 bp, Homo sapiens
aaaaagtaaattgaa

SEQ ID NO: 1934917 - DNA, 15 bp, Homo sapiens
aaaagtaaattgaaa

SEQ ID NO: 1934918 - DNA, 15 bp, Homo sapiens
aaagtaaattgaaat

SEQ ID NO: 1934919 - DNA, 15 bp, Homo sapiens
aagtaaattgaaatc

SEQ ID NO: 1934920 - DNA, 15 bp, Homo sapiens
agtaaattgaaatca

SEQ ID NO: 1934921 - DNA, 15 bp, Homo sapiens
gtaaattgaaatcat

SEQ ID NO: 1934922 - DNA, 15 bp, Homo sapiens
taaattgaaatcatt

SEQ ID NO: 1934923 - DNA, 15 bp, Homo sapiens
aaattgaaatcattg

SEQ ID NO: 1934924 - DNA, 15 bp, Homo sapiens
aattgaaatcattgg

SEQ ID NO: 1934925 - DNA, 15 bp, Homo sapiens
attgaaatcattggg

SEQ ID NO: 1934926 - DNA, 15 bp, Homo sapiens
ttgaaatcattggga

SEQ ID NO: 1934927 - DNA, 15 bp, Homo sapiens
tgaaatcattgggac

SEQ ID NO: 1934928 - DNA, 15 bp, Homo sapiens
gaaatcattgggacg

SEQ ID NO: 1934929 - DNA, 15 bp, Homo sapiens
aaatcattgggacgt

SEQ ID NO: 1934930 - DNA, 15 bp, Homo sapiens
aatcattgggacgtt

SEQ ID NO: 1934931 - DNA, 15 bp, Homo sapiens
atcattgggacgttg

SEQ ID NO: 1934932 - DNA, 15 bp, Homo sapiens
tcattgggacgttga

SEQ ID NO: 1934933 - DNA, 15 bp, Homo sapiens
cattgggacgttgat

SEQ ID NO: 1934934 - DNA, 15 bp, Homo sapiens
attgggacgttgatt

SEQ ID NO: 1934935 - DNA, 15 bp, Homo sapiens
ttgggacgttgattt

SEQ ID NO: 1934936 - DNA, 15 bp, Homo sapiens
tgggacgttgatttt

SEQ ID NO: 1934937 - DNA, 15 bp, Homo sapiens
gggacgttgattttt

SEQ ID NO: 1934938 - DNA, 15 bp, Homo sapiens
ggacgttgattttta

SEQ ID NO: 1934939 - DNA, 15 bp, Homo sapiens
gacgttgatttttaa

SEQ ID NO: 1934940 - DNA, 15 bp, Homo sapiens
acgttgatttttaaa

SEQ ID NO: 1934941 - DNA, 15 bp, Homo sapiens
cgttgatttttaaat

SEQ ID NO: 1934942 - DNA, 15 bp, Homo sapiens
gttgatttttaaatt

SEQ ID NO: 1934943 - DNA, 15 bp, Homo sapiens
ttgatttttaaatta

SEQ ID NO: 1934944 - DNA, 15 bp, Homo sapiens
tgatttttaaattac

SEQ ID NO: 1934945 - DNA, 15 bp, Homo sapiens
gatttttaaattacc

SEQ ID NO: 1934946 - DNA, 15 bp, Homo sapiens
atttttaaattacct

SEQ ID NO: 1934947 - DNA, 15 bp, Homo sapiens
tttttaaattaccta

SEQ ID NO: 1934948 - DNA, 15 bp, Homo sapiens
ttttaaattacctag

SEQ ID NO: 1934949 - DNA, 15 bp, Homo sapiens
tttaaattacctaga

SEQ ID NO: 1934950 - DNA, 15 bp, Homo sapiens
ttaaattacctagaa

SEQ ID NO: 1934951 - DNA, 15 bp, Homo sapiens
taaattacctagaag

SEQ ID NO: 1934952 - DNA, 15 bp, Homo sapiens
aaattacctagaagc

SEQ ID NO: 1934953 - DNA, 15 bp, Homo sapiens
aattacctagaagca

SEQ ID NO: 1934954 - DNA, 15 bp, Homo sapiens
attacctagaagcaa

SEQ ID NO: 1934955 - DNA, 15 bp, Homo sapiens
ttacctagaagcaat

SEQ ID NO: 1934956 - DNA, 15 bp, Homo sapiens
tacctagaagcaatc

SEQ ID NO: 1934957 - DNA, 15 bp, Homo sapiens
acctagaagcaatcc

SEQ ID NO: 1934958 - DNA, 15 bp, Homo sapiens
cctagaagcaatccc

SEQ ID NO: 1934959 - DNA, 15 bp, Homo sapiens
ctagaagcaatccca

SEQ ID NO: 1934960 - DNA, 15 bp, Homo sapiens
tagaagcaatcccaa

SEQ ID NO: 1934961 - DNA, 15 bp, Homo sapiens
agaagcaatcccaat

SEQ ID NO: 1934962 - DNA, 15 bp, Homo sapiens
gaagcaatcccaatg

SEQ ID NO: 1934963 - DNA, 15 bp, Homo sapiens
aagcaatcccaatgc

SEQ ID NO: 1934964 - DNA, 15 bp, Homo sapiens
agcaatcccaatgct

SEQ ID NO: 1934965 - DNA, 15 bp, Homo sapiens
gcaatcccaatgctt

SEQ ID NO: 1934966 - DNA, 15 bp, Homo sapiens
caatcccaatgcttt

SEQ ID NO: 1934967 - DNA, 15 bp, Homo sapiens
aatcccaatgcttta

SEQ ID NO: 1934968 - DNA, 15 bp, Homo sapiens
atcccaatgctttat

SEQ ID NO: 1934969 - DNA, 15 bp, Homo sapiens
tcccaatgctttatg

SEQ ID NO: 1934970 - DNA, 15 bp, Homo sapiens
cccaatgctttatgt

SEQ ID NO: 1934971 - DNA, 15 bp, Homo sapiens
ccaatgctttatgta

SEQ ID NO: 1934972 - DNA, 15 bp, Homo sapiens
caatgctttatgtaa

SEQ ID NO: 1934973 - DNA, 15 bp, Homo sapiens
aatgctttatgtaat

SEQ ID NO: 1934974 - DNA, 15 bp, Homo sapiens
atgctttatgtaata

SEQ ID NO: 1934975 - DNA, 15 bp, Homo sapiens
tgctttatgtaatac

SEQ ID NO: 1934976 - DNA, 15 bp, Homo sapiens
gctttatgtaatact

SEQ ID NO: 1934977 - DNA, 15 bp, Homo sapiens
ctttatgtaatacta

SEQ ID NO: 1934978 - DNA, 15 bp, Homo sapiens
tttatgtaatactaa

SEQ ID NO: 1934979 - DNA, 15 bp, Homo sapiens
ttatgtaatactaaa

SEQ ID NO: 1934980 - DNA, 15 bp, Homo sapiens
tatgtaatactaaaa

SEQ ID NO: 1934981 - DNA, 15 bp, Homo sapiens
atgtaatactaaaat

SEQ ID NO: 1934982 - DNA, 15 bp, Homo sapiens
tgtaatactaaaatt

SEQ ID NO: 1934983 - DNA, 15 bp, Homo sapiens
gtaatactaaaattt

SEQ ID NO: 1934984 - DNA, 15 bp, Homo sapiens
taatactaaaatttc

SEQ ID NO: 1934985 - DNA, 15 bp, Homo sapiens
aatactaaaatttct

SEQ ID NO: 1934986 - DNA, 15 bp, Homo sapiens
atactaaaatttctc

SEQ ID NO: 1934987 - DNA, 15 bp, Homo sapiens
tactaaaatttctcc

SEQ ID NO: 1934988 - DNA, 15 bp, Homo sapiens
actaaaatttctcct

SEQ ID NO: 1934989 - DNA, 15 bp, Homo sapiens
ctaaaatttctcctc

SEQ ID NO: 1934990 - DNA, 15 bp, Homo sapiens
taaaatttctcctct

SEQ ID NO: 1934991 - DNA, 15 bp, Homo sapiens
aaaatttctcctctc

SEQ ID NO: 1934992 - DNA, 15 bp, Homo sapiens
aaatttctcctctct

SEQ ID NO: 1934993 - DNA, 15 bp, Homo sapiens
aatttctcctctctc

SEQ ID NO: 1934994 - DNA, 15 bp, Homo sapiens
atttctcctctctct

SEQ ID NO: 1934995 - DNA, 15 bp, Homo sapiens
tttctcctctctctt

SEQ ID NO: 1934996 - DNA, 15 bp, Homo sapiens
ttctcctctctcttt

SEQ ID NO: 1934997 - DNA, 15 bp, Homo sapiens
tctcctctctctttt

SEQ ID NO: 1934998 - DNA, 15 bp, Homo sapiens
ctcctctctcttttc

SEQ ID NO: 1934999 - DNA, 15 bp, Homo sapiens
tcctctctcttttct

SEQ ID NO: 1935000 - DNA, 15 bp, Homo sapiens
cctctctcttttctt

SEQ ID NO: 1935001 - DNA, 15 bp, Homo sapiens
ctctctcttttcttt

SEQ ID NO: 1935002 - DNA, 15 bp, Homo sapiens
tctctcttttcttta

SEQ ID NO: 1935003 - DNA, 15 bp, Homo sapiens
ctctcttttctttat

SEQ ID NO: 1935004 - DNA, 15 bp, Homo sapiens
tctcttttctttatc

SEQ ID NO: 1935005 - DNA, 15 bp, Homo sapiens
ctcttttctttatct

SEQ ID NO: 1935006 - DNA, 15 bp, Homo sapiens
tcttttctttatctc

SEQ ID NO: 1935007 - DNA, 15 bp, Homo sapiens
cttttctttatctct

SEQ ID NO: 1935008 - DNA, 15 bp, Homo sapiens
ttttctttatctctc

SEQ ID NO: 1935009 - DNA, 15 bp, Homo sapiens
tttctttatctctct

SEQ ID NO: 1935010 - DNA, 15 bp, Homo sapiens
ttctttatctctctc

SEQ ID NO: 1935011 - DNA, 15 bp, Homo sapiens
tttatctctctctcc

SEQ ID NO: 1935012 - DNA, 15 bp, Homo sapiens
ttatctctctctccc

SEQ ID NO: 1935013 - DNA, 15 bp, Homo sapiens
tatctctctctcccc

SEQ ID NO: 1935014 - DNA, 15 bp, Homo sapiens
atctctctctcccct

SEQ ID NO: 1935015 - DNA, 15 bp, Homo sapiens
tctctctctcccctg

SEQ ID NO: 1935016 - DNA, 15 bp, Homo sapiens
ctctctctcccctga

SEQ ID NO: 1935017 - DNA, 15 bp, Homo sapiens
tctctctcccctgaa

SEQ ID NO: 1935018 - DNA, 15 bp, Homo sapiens
ctctctcccctgaaa

SEQ ID NO: 1935019 - DNA, 15 bp, Homo sapiens
tctctcccctgaaaa

SEQ ID NO: 1935020 - DNA, 15 bp, Homo sapiens
ctctcccctgaaaat

SEQ ID NO: 1935021 - DNA, 15 bp, Homo sapiens
tctcccctgaaaata

SEQ ID NO: 1935022 - DNA, 15 bp, Homo sapiens
ctcccctgaaaataa

SEQ ID NO: 1935023 - DNA, 15 bp, Homo sapiens
tcccctgaaaataat

SEQ ID NO: 1935024 - DNA, 15 bp, Homo sapiens
cccctgaaaataatc

SEQ ID NO: 1935025 - DNA, 15 bp, Homo sapiens
ccctgaaaataatca

SEQ ID NO: 1935026 - DNA, 15 bp, Homo sapiens
cctgaaaataatcat

SEQ ID NO: 1935027 - DNA, 15 bp, Homo sapiens
ctgaaaataatcatt

SEQ ID NO: 1935028 - DNA, 15 bp, Homo sapiens
tgaaaataatcattt

SEQ ID NO: 1935029 - DNA, 15 bp, Homo sapiens
gaaaataatcatttt

SEQ ID NO: 1935030 - DNA, 15 bp, Homo sapiens
aaaataatcattttt

SEQ ID NO: 1935031 - DNA, 15 bp, Homo sapiens
aaataatcatttttt

SEQ ID NO: 1935032 - DNA, 15 bp, Homo sapiens
aataatcattttttt

SEQ ID NO: 1935033 - DNA, 15 bp, Homo sapiens
ataatcatttttttt

SEQ ID NO: 1935034 - DNA, 15 bp, Homo sapiens
taatcattttttttc

SEQ ID NO: 1935035 - DNA, 15 bp, Homo sapiens
aatcattttttttcc

SEQ ID NO: 1935036 - DNA, 15 bp, Homo sapiens
atcattttttttcca

SEQ ID NO: 1935037 - DNA, 15 bp, Homo sapiens
tcattttttttccag

SEQ ID NO: 1935038 - DNA, 15 bp, Homo sapiens
cattttttttccagt

SEQ ID NO: 1935039 - DNA, 15 bp, Homo sapiens
attttttttccagtg

SEQ ID NO: 1935040 - DNA, 15 bp, Homo sapiens
ttttttttccagtgc

SEQ ID NO: 1935041 - DNA, 15 bp, Homo sapiens
tttttttccagtgcc

SEQ ID NO: 1935042 - DNA, 15 bp, Homo sapiens
ttttttccagtgcca

SEQ ID NO: 1935043 - DNA, 15 bp, Homo sapiens
tttttccagtgccag

SEQ ID NO: 1935044 - DNA, 15 bp, Homo sapiens
ttttccagtgccagt

SEQ ID NO: 1935045 - DNA, 15 bp, Homo sapiens
tttccagtgccagtt

SEQ ID NO: 1935046 - DNA, 15 bp, Homo sapiens
ttccagtgccagttc

SEQ ID NO: 1935047 - DNA, 15 bp, Homo sapiens
tccagtgccagttca

SEQ ID NO: 1935048 - DNA, 15 bp, Homo sapiens
ccagtgccagttcag

SEQ ID NO: 1935049 - DNA, 15 bp, Homo sapiens
cagtgccagttcaga

SEQ ID NO: 1935050 - DNA, 15 bp, Homo sapiens
agtgccagttcagat

SEQ ID NO: 1935051 - DNA, 15 bp, Homo sapiens
gtgccagttcagatc

SEQ ID NO: 1935052 - DNA, 15 bp, Homo sapiens
tgccagttcagatct

SEQ ID NO: 1935053 - DNA, 15 bp, Homo sapiens
gccagttcagatctt

SEQ ID NO: 1935054 - DNA, 15 bp, Homo sapiens
ccagttcagatcttg

SEQ ID NO: 1935055 - DNA, 15 bp, Homo sapiens
cagttcagatcttgg

SEQ ID NO: 1935056 - DNA, 15 bp, Homo sapiens
agttcagatcttggc

SEQ ID NO: 1935057 - DNA, 15 bp, Homo sapiens
gttcagatcttggca

SEQ ID NO: 1935058 - DNA, 15 bp, Homo sapiens
ttcagatcttggcaa

SEQ ID NO: 1935059 - DNA, 15 bp, Homo sapiens
tcagatcttggcaac

SEQ ID NO: 1935060 - DNA, 15 bp, Homo sapiens
cagatcttggcaaca

SEQ ID NO: 1935061 - DNA, 15 bp, Homo sapiens
agatcttggcaacag

SEQ ID NO: 1935062 - DNA, 15 bp, Homo sapiens
gatcttggcaacagt

SEQ ID NO: 1935063 - DNA, 15 bp, Homo sapiens
atcttggcaacagtt

SEQ ID NO: 1935064 - DNA, 15 bp, Homo sapiens
tcttggcaacagttg

SEQ ID NO: 1935065 - DNA, 15 bp, Homo sapiens
cttggcaacagttgt

SEQ ID NO: 1935066 - DNA, 15 bp, Homo sapiens
ttggcaacagttgtt

SEQ ID NO: 1935067 - DNA, 15 bp, Homo sapiens
tggcaacagttgttt

SEQ ID NO: 1935068 - DNA, 15 bp, Homo sapiens
ggcaacagttgtttt

SEQ ID NO: 1935069 - DNA, 15 bp, Homo sapiens
gcaacagttgttttg

SEQ ID NO: 1935070 - DNA, 15 bp, Homo sapiens
caacagttgttttga

SEQ ID NO: 1935071 - DNA, 15 bp, Homo sapiens
aacagttgttttgaa

SEQ ID NO: 1935072 - DNA, 15 bp, Homo sapiens
acagttgttttgaaa

SEQ ID NO: 1935073 - DNA, 15 bp, Homo sapiens
cagttgttttgaaaa

SEQ ID NO: 1935074 - DNA, 15 bp, Homo sapiens
agttgttttgaaaaa

SEQ ID NO: 1935075 - DNA, 15 bp, Homo sapiens
gttgttttgaaaaag

SEQ ID NO: 1935076 - DNA, 15 bp, Homo sapiens
ttgttttgaaaaagt

SEQ ID NO: 1935077 - DNA, 15 bp, Homo sapiens
tgttttgaaaaagta

SEQ ID NO: 1935078 - DNA, 15 bp, Homo sapiens
gttttgaaaaagtac

SEQ ID NO: 1935079 - DNA, 15 bp, Homo sapiens
ttttgaaaaagtacc

SEQ ID NO: 1935080 - DNA, 15 bp, Homo sapiens
tttgaaaaagtacct

SEQ ID NO: 1935081 - DNA, 15 bp, Homo sapiens
ttgaaaaagtacctg

SEQ ID NO: 1935082 - DNA, 15 bp, Homo sapiens
tgaaaaagtacctga

SEQ ID NO: 1935083 - DNA, 15 bp, Homo sapiens
gaaaaagtacctgaa

SEQ ID NO: 1935084 - DNA, 15 bp, Homo sapiens
aaaaagtacctgaac

SEQ ID NO: 1935085 - DNA, 15 bp, Homo sapiens
aaaagtacctgaaca

SEQ ID NO: 1935086 - DNA, 15 bp, Homo sapiens
aaagtacctgaacaa

SEQ ID NO: 1935087 - DNA, 15 bp, Homo sapiens
aagtacctgaacaaa

SEQ ID NO: 1935088 - DNA, 15 bp, Homo sapiens
agtacctgaacaaaa

SEQ ID NO: 1935089 - DNA, 15 bp, Homo sapiens
gtacctgaacaaaat

SEQ ID NO: 1935090 - DNA, 15 bp, Homo sapiens
tacctgaacaaaata

SEQ ID NO: 1935091 - DNA, 15 bp, Homo sapiens
acctgaacaaaatac

SEQ ID NO: 1935092 - DNA, 15 bp, Homo sapiens
cctgaacaaaataca

SEQ ID NO: 1935093 - DNA, 15 bp, Homo sapiens
ctgaacaaaatacat

SEQ ID NO: 1935094 - DNA, 15 bp, Homo sapiens
tgaacaaaatacatt

SEQ ID NO: 1935095 - DNA, 15 bp, Homo sapiens
gaacaaaatacattt

SEQ ID NO: 1935096 - DNA, 15 bp, Homo sapiens
aacaaaatacatttt

SEQ ID NO: 1935097 - DNA, 15 bp, Homo sapiens
acaaaatacatttta

SEQ ID NO: 1935098 - DNA, 15 bp, Homo sapiens
caaaatacattttat

SEQ ID NO: 1935099 - DNA, 15 bp, Homo sapiens
aaaatacattttata

SEQ ID NO: 1935100 - DNA, 15 bp, Homo sapiens
aaatacattttataa

SEQ ID NO: 1935101 - DNA, 15 bp, Homo sapiens
aatacattttataaa

SEQ ID NO: 1935102 - DNA, 15 bp, Homo sapiens
atacattttataaag

SEQ ID NO: 1935103 - DNA, 15 bp, Homo sapiens
tacattttataaagt

SEQ ID NO: 1935104 - DNA, 15 bp, Homo sapiens
acattttataaagta

SEQ ID NO: 1935105 - DNA, 15 bp, Homo sapiens
cattttataaagtaa

SEQ ID NO: 1935106 - DNA, 15 bp, Homo sapiens
attttataaagtaaa

SEQ ID NO: 1935107 - DNA, 15 bp, Homo sapiens
ttttataaagtaaag

SEQ ID NO: 1935108 - DNA, 15 bp, Homo sapiens
tttataaagtaaagt

SEQ ID NO: 1935109 - DNA, 15 bp, Homo sapiens
ttataaagtaaagta

SEQ ID NO: 1935110 - DNA, 15 bp, Homo sapiens
tataaagtaaagtat

SEQ ID NO: 1935111 - DNA, 15 bp, Homo sapiens
ataaagtaaagtatt

SEQ ID NO: 1935112 - DNA, 15 bp, Homo sapiens
taaagtaaagtattc

SEQ ID NO: 1935113 - DNA, 15 bp, Homo sapiens
aaagtaaagtattca

SEQ ID NO: 1935114 - DNA, 15 bp, Homo sapiens
aagtaaagtattcag

SEQ ID NO: 1935115 - DNA, 15 bp, Homo sapiens
agtaaagtattcagg

SEQ ID NO: 1935116 - DNA, 15 bp, Homo sapiens
gtaaagtattcagga

SEQ ID NO: 1935117 - DNA, 15 bp, Homo sapiens
taaagtattcaggaa

SEQ ID NO: 1935118 - DNA, 15 bp, Homo sapiens
aaagtattcaggaac

SEQ ID NO: 1935119 - DNA, 15 bp, Homo sapiens
aagtattcaggaact

SEQ ID NO: 1935120 - DNA, 15 bp, Homo sapiens
agtattcaggaactg

SEQ ID NO: 1935121 - DNA, 15 bp, Homo sapiens
gtattcaggaactga

SEQ ID NO: 1935122 - DNA, 15 bp, Homo sapiens
tattcaggaactgac

SEQ ID NO: 1935123 - DNA, 15 bp, Homo sapiens
attcaggaactgaca

SEQ ID NO: 1935124 - DNA, 15 bp, Homo sapiens
ttcaggaactgacag

SEQ ID NO: 1935125 - DNA, 15 bp, Homo sapiens
tcaggaactgacaga

SEQ ID NO: 1935126 - DNA, 15 bp, Homo sapiens
caggaactgacagaa

SEQ ID NO: 1935127 - DNA, 15 bp, Homo sapiens
aggaactgacagaac

SEQ ID NO: 1935128 - DNA, 15 bp, Homo sapiens
ggaactgacagaact

SEQ ID NO: 1935129 - DNA, 15 bp, Homo sapiens
gaactgacagaactg

SEQ ID NO: 1935130 - DNA, 15 bp, Homo sapiens
aactgacagaactgg

SEQ ID NO: 1935131 - DNA, 15 bp, Homo sapiens
actgacagaactgga

SEQ ID NO: 1935132 - DNA, 15 bp, Homo sapiens
ctgacagaactggag

SEQ ID NO: 1935133 - DNA, 15 bp, Homo sapiens
tgacagaactggaga

SEQ ID NO: 1935134 - DNA, 15 bp, Homo sapiens
gacagaactggagaa

SEQ ID NO: 1935135 - DNA, 15 bp, Homo sapiens
acagaactggagaag

SEQ ID NO: 1935136 - DNA, 15 bp, Homo sapiens
cagaactggagaaga

SEQ ID NO: 1935137 - DNA, 15 bp, Homo sapiens
agaactggagaagaa

SEQ ID NO: 1935138 - DNA, 15 bp, Homo sapiens
gaactggagaagaat

SEQ ID NO: 1935139 - DNA, 15 bp, Homo sapiens
aactggagaagaata

SEQ ID NO: 1935140 - DNA, 15 bp, Homo sapiens
actggagaagaatat

SEQ ID NO: 1935141 - DNA, 15 bp, Homo sapiens
ctggagaagaatata

SEQ ID NO: 1935142 - DNA, 15 bp, Homo sapiens
tggagaagaatatat

SEQ ID NO: 1935143 - DNA, 15 bp, Homo sapiens
ggagaagaatatatt

SEQ ID NO: 1935144 - DNA, 15 bp, Homo sapiens
gagaagaatatattt

SEQ ID NO: 1935145 - DNA, 15 bp, Homo sapiens
agaagaatatattta

SEQ ID NO: 1935146 - DNA, 15 bp, Homo sapiens
gaagaatatatttat

SEQ ID NO: 1935147 - DNA, 15 bp, Homo sapiens
aagaatatatttatg

SEQ ID NO: 1935148 - DNA, 15 bp, Homo sapiens
agaatatatttatgt

SEQ ID NO: 1935149 - DNA, 15 bp, Homo sapiens
gaatatatttatgtt

SEQ ID NO: 1935150 - DNA, 15 bp, Homo sapiens
aatatatttatgtta

SEQ ID NO: 1935151 - DNA, 15 bp, Homo sapiens
atatatttatgttac

SEQ ID NO: 1935152 - DNA, 15 bp, Homo sapiens
tatatttatgttaca

SEQ ID NO: 1935153 - DNA, 15 bp, Homo sapiens
atatttatgttacag

SEQ ID NO: 1935154 - DNA, 15 bp, Homo sapiens
tatttatgttacaga

SEQ ID NO: 1935155 - DNA, 15 bp, Homo sapiens
atttatgttacagaa

SEQ ID NO: 1935156 - DNA, 15 bp, Homo sapiens
tttatgttacagaag

SEQ ID NO: 1935157 - DNA, 15 bp, Homo sapiens
ttatgttacagaagt

SEQ ID NO: 1935158 - DNA, 15 bp, Homo sapiens
tatgttacagaagtc

SEQ ID NO: 1935159 - DNA, 15 bp, Homo sapiens
atgttacagaagtca

SEQ ID NO: 1935160 - DNA, 15 bp, Homo sapiens
tgttacagaagtcat

SEQ ID NO: 1935161 - DNA, 15 bp, Homo sapiens
gttacagaagtcatg

SEQ ID NO: 1935162 - DNA, 15 bp, Homo sapiens
ttacagaagtcatgg

SEQ ID NO: 1935163 - DNA, 15 bp, Homo sapiens
tacagaagtcatgga

SEQ ID NO: 1935164 - DNA, 15 bp, Homo sapiens
acagaagtcatggac

SEQ ID NO: 1935165 - DNA, 15 bp, Homo sapiens
cagaagtcatggaca

SEQ ID NO: 1935166 - DNA, 15 bp, Homo sapiens
agaagtcatggacaa

SEQ ID NO: 1935167 - DNA, 15 bp, Homo sapiens
gaagtcatggacaac

SEQ ID NO: 1935168 - DNA, 15 bp, Homo sapiens
aagtcatggacaaca

SEQ ID NO: 1935169 - DNA, 15 bp, Homo sapiens
agtcatggacaacat

SEQ ID NO: 1935170 - DNA, 15 bp, Homo sapiens
gtcatggacaacatc

SEQ ID NO: 1935171 - DNA, 15 bp, Homo sapiens
tcatggacaacatcc

SEQ ID NO: 1935172 - DNA, 15 bp, Homo sapiens
catggacaacatcct

SEQ ID NO: 1935173 - DNA, 15 bp, Homo sapiens
atggacaacatccta

SEQ ID NO: 1935174 - DNA, 15 bp, Homo sapiens
tggacaacatcctat

SEQ ID NO: 1935175 - DNA, 15 bp, Homo sapiens
ggacaacatcctatt

SEQ ID NO: 1935176 - DNA, 15 bp, Homo sapiens
gacaacatcctattc

SEQ ID NO: 1935177 - DNA, 15 bp, Homo sapiens
acaacatcctattca

SEQ ID NO: 1935178 - DNA, 15 bp, Homo sapiens
caacatcctattcat

SEQ ID NO: 1935179 - DNA, 15 bp, Homo sapiens
aacatcctattcatt

SEQ ID NO: 1935180 - DNA, 15 bp, Homo sapiens
acatcctattcattt

SEQ ID NO: 1935181 - DNA, 15 bp, Homo sapiens
catcctattcatttt

SEQ ID NO: 1935182 - DNA, 15 bp, Homo sapiens
atcctattcatttta

SEQ ID NO: 1935183 - DNA, 15 bp, Homo sapiens
tcctattcattttag

SEQ ID NO: 1935184 - DNA, 15 bp, Homo sapiens
cctattcattttagt

SEQ ID NO: 1935185 - DNA, 15 bp, Homo sapiens
ctattcattttagtc

SEQ ID NO: 1935186 - DNA, 15 bp, Homo sapiens
tattcattttagtca

SEQ ID NO: 1935187 - DNA, 15 bp, Homo sapiens
attcattttagtcaa

SEQ ID NO: 1935188 - DNA, 15 bp, Homo sapiens
ttcattttagtcaag

SEQ ID NO: 1935189 - DNA, 15 bp, Homo sapiens
tcattttagtcaagg

SEQ ID NO: 1935190 - DNA, 15 bp, Homo sapiens
cattttagtcaaggt

SEQ ID NO: 1935191 - DNA, 15 bp, Homo sapiens
attttagtcaaggtt

SEQ ID NO: 1935192 - DNA, 15 bp, Homo sapiens
ttttagtcaaggttt

SEQ ID NO: 1935193 - DNA, 15 bp, Homo sapiens
tttagtcaaggtttt

SEQ ID NO: 1935194 - DNA, 15 bp, Homo sapiens
ttagtcaaggttttc

SEQ ID NO: 1935195 - DNA, 15 bp, Homo sapiens
tagtcaaggttttct

SEQ ID NO: 1935196 - DNA, 15 bp, Homo sapiens
agtcaaggttttctc

SEQ ID NO: 1935197 - DNA, 15 bp, Homo sapiens
gtcaaggttttctca

SEQ ID NO: 1935198 - DNA, 15 bp, Homo sapiens
tcaaggttttctcag

SEQ ID NO: 1935199 - DNA, 15 bp, Homo sapiens
caaggttttctcagc

SEQ ID NO: 1935200 - DNA, 15 bp, Homo sapiens
aaggttttctcagcc

SEQ ID NO: 1935201 - DNA, 15 bp, Homo sapiens
aggttttctcagcca

SEQ ID NO: 1935202 - DNA, 15 bp, Homo sapiens
ggttttctcagccaa

SEQ ID NO: 1935203 - DNA, 15 bp, Homo sapiens
gttttctcagccaaa

SEQ ID NO: 1935204 - DNA, 15 bp, Homo sapiens
ttttctcagccaaac

SEQ ID NO: 1935205 - DNA, 15 bp, Homo sapiens
tttctcagccaaacc

SEQ ID NO: 1935206 - DNA, 15 bp, Homo sapiens
ttctcagccaaacca

SEQ ID NO: 1935207 - DNA, 15 bp, Homo sapiens
tctcagccaaaccaa

SEQ ID NO: 1935208 - DNA, 15 bp, Homo sapiens
ctcagccaaaccaat

SEQ ID NO: 1935209 - DNA, 15 bp, Homo sapiens
tcagccaaaccaatt

SEQ ID NO: 1935210 - DNA, 15 bp, Homo sapiens
cagccaaaccaattt

SEQ ID NO: 1935211 - DNA, 15 bp, Homo sapiens
agccaaaccaattta

SEQ ID NO: 1935212 - DNA, 15 bp, Homo sapiens
gccaaaccaatttat

SEQ ID NO: 1935213 - DNA, 15 bp, Homo sapiens
ccaaaccaatttata

SEQ ID NO: 1935214 - DNA, 15 bp, Homo sapiens
caaaccaatttatat

SEQ ID NO: 1935215 - DNA, 15 bp, Homo sapiens
aaaccaatttatatc

SEQ ID NO: 1935216 - DNA, 15 bp, Homo sapiens
aaccaatttatatct

SEQ ID NO: 1935217 - DNA, 15 bp, Homo sapiens
accaatttatatctc

SEQ ID NO: 1935218 - DNA, 15 bp, Homo sapiens
ccaatttatatctct

SEQ ID NO: 1935219 - DNA, 15 bp, Homo sapiens
caatttatatctctt

SEQ ID NO: 1935220 - DNA, 15 bp, Homo sapiens
aatttatatctcttt

SEQ ID NO: 1935221 - DNA, 15 bp, Homo sapiens
atttatatctcttta

SEQ ID NO: 1935222 - DNA, 15 bp, Homo sapiens
tttatatctctttat

SEQ ID NO: 1935223 - DNA, 15 bp, Homo sapiens
ttatatctctttatc

SEQ ID NO: 1935224 - DNA, 15 bp, Homo sapiens
tatatctctttatcc

SEQ ID NO: 1935225 - DNA, 15 bp, Homo sapiens
atatctctttatcca

SEQ ID NO: 1935226 - DNA, 15 bp, Homo sapiens
tatctctttatccag

SEQ ID NO: 1935227 - DNA, 15 bp, Homo sapiens
atctctttatccaga

SEQ ID NO: 1935228 - DNA, 15 bp, Homo sapiens
tctctttatccagat

SEQ ID NO: 1935229 - DNA, 15 bp, Homo sapiens
ctctttatccagatt

SEQ ID NO: 1935230 - DNA, 15 bp, Homo sapiens
tctttatccagatta

SEQ ID NO: 1935231 - DNA, 15 bp, Homo sapiens
ctttatccagattat

SEQ ID NO: 1935232 - DNA, 15 bp, Homo sapiens
tttatccagattata

SEQ ID NO: 1935233 - DNA, 15 bp, Homo sapiens
ttatccagattataa

SEQ ID NO: 1935234 - DNA, 15 bp, Homo sapiens
tatccagattataat

SEQ ID NO: 1935235 - DNA, 15 bp, Homo sapiens
atccagattataatt

SEQ ID NO: 1935236 - DNA, 15 bp, Homo sapiens
tccagattataatta

SEQ ID NO: 1935237 - DNA, 15 bp, Homo sapiens
ccagattataattat

SEQ ID NO: 1935238 - DNA, 15 bp, Homo sapiens
cagattataattatg

SEQ ID NO: 1935239 - DNA, 15 bp, Homo sapiens
agattataattatgt

SEQ ID NO: 1935240 - DNA, 15 bp, Homo sapiens
gattataattatgtt

SEQ ID NO: 1935241 - DNA, 15 bp, Homo sapiens
attataattatgttg

SEQ ID NO: 1935242 - DNA, 15 bp, Homo sapiens
ttataattatgttgt

SEQ ID NO: 1935243 - DNA, 15 bp, Homo sapiens
tataattatgttgta

SEQ ID NO: 1935244 - DNA, 15 bp, Homo sapiens
ataattatgttgtat

SEQ ID NO: 1935245 - DNA, 15 bp, Homo sapiens
taattatgttgtatc

SEQ ID NO: 1935246 - DNA, 15 bp, Homo sapiens
aattatgttgtatca

SEQ ID NO: 1935247 - DNA, 15 bp, Homo sapiens
attatgttgtatcat

SEQ ID NO: 1935248 - DNA, 15 bp, Homo sapiens
ttatgttgtatcatt

SEQ ID NO: 1935249 - DNA, 15 bp, Homo sapiens
tatgttgtatcattt

SEQ ID NO: 1935250 - DNA, 15 bp, Homo sapiens
atgttgtatcattta

SEQ ID NO: 1935251 - DNA, 15 bp, Homo sapiens
tgttgtatcatttat

SEQ ID NO: 1935252 - DNA, 15 bp, Homo sapiens
gttgtatcatttata

SEQ ID NO: 1935253 - DNA, 15 bp, Homo sapiens
ttgtatcatttatag

SEQ ID NO: 1935254 - DNA, 15 bp, Homo sapiens
tgtatcatttataga

SEQ ID NO: 1935255 - DNA, 15 bp, Homo sapiens
gtatcatttatagac

SEQ ID NO: 1935256 - DNA, 15 bp, Homo sapiens
tatcatttatagact

SEQ ID NO: 1935257 - DNA, 15 bp, Homo sapiens
atcatttatagactg

SEQ ID NO: 1935258 - DNA, 15 bp, Homo sapiens
tcatttatagactgt

SEQ ID NO: 1935259 - DNA, 15 bp, Homo sapiens
catttatagactgta

SEQ ID NO: 1935260 - DNA, 15 bp, Homo sapiens
atttatagactgtaa

SEQ ID NO: 1935261 - DNA, 15 bp, Homo sapiens
tttatagactgtaag

SEQ ID NO: 1935262 - DNA, 15 bp, Homo sapiens
ttatagactgtaagt

SEQ ID NO: 1935263 - DNA, 15 bp, Homo sapiens
tatagactgtaagtt

SEQ ID NO: 1935264 - DNA, 15 bp, Homo sapiens
atagactgtaagttt

SEQ ID NO: 1935265 - DNA, 15 bp, Homo sapiens
tagactgtaagtttg

SEQ ID NO: 1935266 - DNA, 15 bp, Homo sapiens
agactgtaagtttgt

SEQ ID NO: 1935267 - DNA, 15 bp, Homo sapiens
gactgtaagtttgtt

SEQ ID NO: 1935268 - DNA, 15 bp, Homo sapiens
actgtaagtttgttc

SEQ ID NO: 1935269 - DNA, 15 bp, Homo sapiens
ctgtaagtttgttct

SEQ ID NO: 1935270 - DNA, 15 bp, Homo sapiens
tgtaagtttgttctt

SEQ ID NO: 1935271 - DNA, 15 bp, Homo sapiens
gtaagtttgttcttt

SEQ ID NO: 1935272 - DNA, 15 bp, Homo sapiens
taagtttgttcttta

SEQ ID NO: 1935273 - DNA, 15 bp, Homo sapiens
aagtttgttctttag

SEQ ID NO: 1935274 - DNA, 15 bp, Homo sapiens
agtttgttctttagc

SEQ ID NO: 1935275 - DNA, 15 bp, Homo sapiens
gtttgttctttagca

SEQ ID NO: 1935276 - DNA, 15 bp, Homo sapiens
tttgttctttagcat

SEQ ID NO: 1935277 - DNA, 15 bp, Homo sapiens
ttgttctttagcatc

SEQ ID NO: 1935278 - DNA, 15 bp, Homo sapiens
tgttctttagcatca

SEQ ID NO: 1935279 - DNA, 15 bp, Homo sapiens
gttctttagcatcac

SEQ ID NO: 1935280 - DNA, 15 bp, Homo sapiens
ttctttagcatcacc

SEQ ID NO: 1935281 - DNA, 15 bp, Homo sapiens
tctttagcatcacct

SEQ ID NO: 1935282 - DNA, 15 bp, Homo sapiens
tagcatcacctttct

SEQ ID NO: 1935283 - DNA, 15 bp, Homo sapiens
agcatcacctttcta

SEQ ID NO: 1935284 - DNA, 15 bp, Homo sapiens
gcatcacctttctat

SEQ ID NO: 1935285 - DNA, 15 bp, Homo sapiens
catcacctttctatt

SEQ ID NO: 1935286 - DNA, 15 bp, Homo sapiens
atcacctttctattt

SEQ ID NO: 1935287 - DNA, 15 bp, Homo sapiens
tcacctttctatttt

SEQ ID NO: 1935288 - DNA, 15 bp, Homo sapiens
cacctttctattttt

SEQ ID NO: 1935289 - DNA, 15 bp, Homo sapiens
acctttctatttttg

SEQ ID NO: 1935290 - DNA, 15 bp, Homo sapiens
cctttctatttttga

SEQ ID NO: 1935291 - DNA, 15 bp, Homo sapiens
ctttctatttttgac

SEQ ID NO: 1935292 - DNA, 15 bp, Homo sapiens
tttctatttttgacc

SEQ ID NO: 1935293 - DNA, 15 bp, Homo sapiens
ttctatttttgacca

SEQ ID NO: 1935294 - DNA, 15 bp, Homo sapiens
tctatttttgaccaa

SEQ ID NO: 1935295 - DNA, 15 bp, Homo sapiens
ctatttttgaccaat

SEQ ID NO: 1935296 - DNA, 15 bp, Homo sapiens
tatttttgaccaata

SEQ ID NO: 1935297 - DNA, 15 bp, Homo sapiens
atttttgaccaataa

SEQ ID NO: 1935298 - DNA, 15 bp, Homo sapiens
tttttgaccaataaa

SEQ ID NO: 1935299 - DNA, 15 bp, Homo sapiens
ttttgaccaataaat

SEQ ID NO: 1935300 - DNA, 15 bp, Homo sapiens
tttgaccaataaatt

SEQ ID NO: 1935301 - DNA, 15 bp, Homo sapiens
ttgaccaataaattc

SEQ ID NO: 1935302 - DNA, 15 bp, Homo sapiens
tgaccaataaattct

SEQ ID NO: 1935303 - DNA, 15 bp, Homo sapiens
gaccaataaattctc

SEQ ID NO: 1935304 - DNA, 15 bp, Homo sapiens
accaataaattctca

SEQ ID NO: 1935305 - DNA, 15 bp, Homo sapiens
ccaataaattctcaa

SEQ ID NO: 1935306 - DNA, 15 bp, Homo sapiens
caataaattctcaat

SEQ ID NO: 1935307 - DNA, 15 bp, Homo sapiens
aataaattctcaatt

SEQ ID NO: 1935308 - DNA, 15 bp, Homo sapiens
ataaattctcaattt

SEQ ID NO: 1935309 - DNA, 15 bp, Homo sapiens
taaattctcaatttg

SEQ ID NO: 1935310 - DNA, 15 bp, Homo sapiens
aaattctcaatttgg

SEQ ID NO: 1935311 - DNA, 15 bp, Homo sapiens
aattctcaatttgga

SEQ ID NO: 1935312 - DNA, 15 bp, Homo sapiens
attctcaatttggaa

SEQ ID NO: 1935313 - DNA, 15 bp, Homo sapiens
ttctcaatttggaaa

SEQ ID NO: 1935314 - DNA, 15 bp, Homo sapiens
tctcaatttggaaat

SEQ ID NO: 1935315 - DNA, 15 bp, Homo sapiens
ctcaatttggaaatt

SEQ ID NO: 1935316 - DNA, 15 bp, Homo sapiens
tcaatttggaaattc

SEQ ID NO: 1935317 - DNA, 15 bp, Homo sapiens
caatttggaaattct

SEQ ID NO: 1935318 - DNA, 15 bp, Homo sapiens
aatttggaaattctt

SEQ ID NO: 1935319 - DNA, 15 bp, Homo sapiens
atttggaaattctta

SEQ ID NO: 1935320 - DNA, 15 bp, Homo sapiens
tttggaaattcttat

SEQ ID NO: 1935321 - DNA, 15 bp, Homo sapiens
ttggaaattcttata

SEQ ID NO: 1935322 - DNA, 15 bp, Homo sapiens
tggaaattcttatag

SEQ ID NO: 1935323 - DNA, 15 bp, Homo sapiens
ggaaattcttatagg

SEQ ID NO: 1935324 - DNA, 15 bp, Homo sapiens
gaaattcttataggc

SEQ ID NO: 1935325 - DNA, 15 bp, Homo sapiens
aaattcttataggca

SEQ ID NO: 1935326 - DNA, 15 bp, Homo sapiens
aattcttataggcag

SEQ ID NO: 1935327 - DNA, 15 bp, Homo sapiens
attcttataggcagt

SEQ ID NO: 1935328 - DNA, 15 bp, Homo sapiens
ttcttataggcagtg

SEQ ID NO: 1935329 - DNA, 15 bp, Homo sapiens
tcttataggcagtgt

SEQ ID NO: 1935330 - DNA, 15 bp, Homo sapiens
cttataggcagtgtg

SEQ ID NO: 1935331 - DNA, 15 bp, Homo sapiens
ttataggcagtgtga

SEQ ID NO: 1935332 - DNA, 15 bp, Homo sapiens
tataggcagtgtgat

SEQ ID NO: 1935333 - DNA, 15 bp, Homo sapiens
ataggcagtgtgatg

SEQ ID NO: 1935334 - DNA, 15 bp, Homo sapiens
taggcagtgtgatgg

SEQ ID NO: 1935335 - DNA, 15 bp, Homo sapiens
aggcagtgtgatgga

SEQ ID NO: 1935336 - DNA, 15 bp, Homo sapiens
ggcagtgtgatggaa

SEQ ID NO: 1935337 - DNA, 15 bp, Homo sapiens
gcagtgtgatggaaa

SEQ ID NO: 1935338 - DNA, 15 bp, Homo sapiens
cagtgtgatggaaaa

SEQ ID NO: 1935339 - DNA, 15 bp, Homo sapiens
agtgtgatggaaaaa

SEQ ID NO: 1935340 - DNA, 15 bp, Homo sapiens
gtgtgatggaaaaat

SEQ ID NO: 1935341 - DNA, 15 bp, Homo sapiens
tgtgatggaaaaatt

SEQ ID NO: 1935342 - DNA, 15 bp, Homo sapiens
gtgatggaaaaattc

SEQ ID NO: 1935343 - DNA, 15 bp, Homo sapiens
tgatggaaaaattca

SEQ ID NO: 1935344 - DNA, 15 bp, Homo sapiens
gatggaaaaattcaa

SEQ ID NO: 1935345 - DNA, 15 bp, Homo sapiens
atggaaaaattcaat

SEQ ID NO: 1935346 - DNA, 15 bp, Homo sapiens
tggaaaaattcaatg

SEQ ID NO: 1935347 - DNA, 15 bp, Homo sapiens
ggaaaaattcaatgt

SEQ ID NO: 1935348 - DNA, 15 bp, Homo sapiens
gaaaaattcaatgta

SEQ ID NO: 1935349 - DNA, 15 bp, Homo sapiens
aaaaattcaatgtaa

SEQ ID NO: 1935350 - DNA, 15 bp, Homo sapiens
aaaattcaatgtaat

SEQ ID NO: 1935351 - DNA, 15 bp, Homo sapiens
aaattcaatgtaata

SEQ ID NO: 1935352 - DNA, 15 bp, Homo sapiens
aattcaatgtaataa

SEQ ID NO: 1935353 - DNA, 15 bp, Homo sapiens
attcaatgtaataaa

SEQ ID NO: 1935354 - DNA, 15 bp, Homo sapiens
ttcaatgtaataaaa

SEQ ID NO: 1935355 - DNA, 15 bp, Homo sapiens
tcaatgtaataaaaa

SEQ ID NO: 1935356 - DNA, 15 bp, Homo sapiens
caatgtaataaaaat

SEQ ID NO: 1935357 - DNA, 15 bp, Homo sapiens
aatgtaataaaaata

SEQ ID NO: 1935358 - DNA, 15 bp, Homo sapiens
atgtaataaaaatat

SEQ ID NO: 1935359 - DNA, 15 bp, Homo sapiens
tgtaataaaaatatt

SEQ ID NO: 1935360 - DNA, 15 bp, Homo sapiens
gtaataaaaatatta

SEQ ID NO: 1935361 - DNA, 15 bp, Homo sapiens
taataaaaatattat

SEQ ID NO: 1935362 - DNA, 15 bp, Homo sapiens
aataaaaatattatg

SEQ ID NO: 1935363 - DNA, 15 bp, Homo sapiens
ataaaaatattatgc

SEQ ID NO: 1935364 - DNA, 15 bp, Homo sapiens
taaaaatattatgcc

SEQ ID NO: 1935365 - DNA, 15 bp, Homo sapiens
aaaaatattatgcca

SEQ ID NO: 1935366 - DNA, 15 bp, Homo sapiens
aaaatattatgccag

SEQ ID NO: 1935367 - DNA, 15 bp, Homo sapiens
aaatattatgccaga

SEQ ID NO: 1935368 - DNA, 15 bp, Homo sapiens
aatattatgccagag

SEQ ID NO: 1935369 - DNA, 15 bp, Homo sapiens
atattatgccagagt

SEQ ID NO: 1935370 - DNA, 15 bp, Homo sapiens
tattatgccagagtc

SEQ ID NO: 1935371 - DNA, 15 bp, Homo sapiens
attatgccagagtca

SEQ ID NO: 1935372 - DNA, 15 bp, Homo sapiens
ttatgccagagtcat

SEQ ID NO: 1935373 - DNA, 15 bp, Homo sapiens
tatgccagagtcatg

SEQ ID NO: 1935374 - DNA, 15 bp, Homo sapiens
atgccagagtcatgt

SEQ ID NO: 1935375 - DNA, 15 bp, Homo sapiens
tgccagagtcatgta

SEQ ID NO: 1935376 - DNA, 15 bp, Homo sapiens
gccagagtcatgtac

SEQ ID NO: 1935377 - DNA, 15 bp, Homo sapiens
ccagagtcatgtaca

SEQ ID NO: 1935378 - DNA, 15 bp, Homo sapiens
cagagtcatgtacat

SEQ ID NO: 1935379 - DNA, 15 bp, Homo sapiens
agagtcatgtacata

SEQ ID NO: 1935380 - DNA, 15 bp, Homo sapiens
gagtcatgtacataa

SEQ ID NO: 1935381 - DNA, 15 bp, Homo sapiens
agtcatgtacataag

SEQ ID NO: 1935382 - DNA, 15 bp, Homo sapiens
gtcatgtacataagc

SEQ ID NO: 1935383 - DNA, 15 bp, Homo sapiens
tcatgtacataagca

SEQ ID NO: 1935384 - DNA, 15 bp, Homo sapiens
catgtacataagcag

SEQ ID NO: 1935385 - DNA, 15 bp, Homo sapiens
atgtacataagcaga

SEQ ID NO: 1935386 - DNA, 15 bp, Homo sapiens
tgtacataagcagag

SEQ ID NO: 1935387 - DNA, 15 bp, Homo sapiens
gtacataagcagagt

SEQ ID NO: 1935388 - DNA, 15 bp, Homo sapiens
tacataagcagagtg

SEQ ID NO: 1935389 - DNA, 15 bp, Homo sapiens
acataagcagagtgt

SEQ ID NO: 1935390 - DNA, 15 bp, Homo sapiens
cataagcagagtgtt

SEQ ID NO: 1935391 - DNA, 15 bp, Homo sapiens
ataagcagagtgttt

SEQ ID NO: 1935392 - DNA, 15 bp, Homo sapiens
taagcagagtgtttc

SEQ ID NO: 1935393 - DNA, 15 bp, Homo sapiens
aagcagagtgtttcc

SEQ ID NO: 1935394 - DNA, 15 bp, Homo sapiens
agcagagtgtttcca

SEQ ID NO: 1935395 - DNA, 15 bp, Homo sapiens
gcagagtgtttccac

SEQ ID NO: 1935396 - DNA, 15 bp, Homo sapiens
cagagtgtttccaca

SEQ ID NO: 1935397 - DNA, 15 bp, Homo sapiens
agagtgtttccacag

SEQ ID NO: 1935398 - DNA, 15 bp, Homo sapiens
gagtgtttccacagt

SEQ ID NO: 1935399 - DNA, 15 bp, Homo sapiens
agtgtttccacagtg

SEQ ID NO: 1935400 - DNA, 15 bp, Homo sapiens
gtgtttccacagtgt

SEQ ID NO: 1935401 - DNA, 15 bp, Homo sapiens
tgtttccacagtgtc

SEQ ID NO: 1935402 - DNA, 15 bp, Homo sapiens
gtttccacagtgtcc

SEQ ID NO: 1935403 - DNA, 15 bp, Homo sapiens
tttccacagtgtccc

SEQ ID NO: 1935404 - DNA, 15 bp, Homo sapiens
ttccacagtgtccct

SEQ ID NO: 1935405 - DNA, 15 bp, Homo sapiens
tccacagtgtccctg

SEQ ID NO: 1935406 - DNA, 15 bp, Homo sapiens
ccacagtgtccctgc

SEQ ID NO: 1935407 - DNA, 15 bp, Homo sapiens
cacagtgtccctgca

SEQ ID NO: 1935408 - DNA, 15 bp, Homo sapiens
acagtgtccctgcaa

SEQ ID NO: 1935409 - DNA, 15 bp, Homo sapiens
cagtgtccctgcaat

SEQ ID NO: 1935410 - DNA, 15 bp, Homo sapiens
agtgtccctgcaatt

SEQ ID NO: 1935411 - DNA, 15 bp, Homo sapiens
gtgtccctgcaatta

SEQ ID NO: 1935412 - DNA, 15 bp, Homo sapiens
tgtccctgcaattag

SEQ ID NO: 1935413 - DNA, 15 bp, Homo sapiens
gtccctgcaattagg

SEQ ID NO: 1935414 - DNA, 15 bp, Homo sapiens
tccctgcaattaggc

SEQ ID NO: 1935415 - DNA, 15 bp, Homo sapiens
ccctgcaattaggca

SEQ ID NO: 1935416 - DNA, 15 bp, Homo sapiens
cctgcaattaggcaa

SEQ ID NO: 1935417 - DNA, 15 bp, Homo sapiens
ctgcaattaggcaat

SEQ ID NO: 1935418 - DNA, 15 bp, Homo sapiens
tgcaattaggcaata

SEQ ID NO: 1935419 - DNA, 15 bp, Homo sapiens
gcaattaggcaatac

SEQ ID NO: 1935420 - DNA, 15 bp, Homo sapiens
caattaggcaatacc

SEQ ID NO: 1935421 - DNA, 15 bp, Homo sapiens
aattaggcaataccc

SEQ ID NO: 1935422 - DNA, 15 bp, Homo sapiens
attaggcaataccca

SEQ ID NO: 1935423 - DNA, 15 bp, Homo sapiens
ttaggcaatacccat

SEQ ID NO: 1935424 - DNA, 15 bp, Homo sapiens
taggcaatacccatt

SEQ ID NO: 1935425 - DNA, 15 bp, Homo sapiens
aggcaatacccattg

SEQ ID NO: 1935426 - DNA, 15 bp, Homo sapiens
ggcaatacccattgt

SEQ ID NO: 1935427 - DNA, 15 bp, Homo sapiens
gcaatacccattgtc

SEQ ID NO: 1935428 - DNA, 15 bp, Homo sapiens
caatacccattgtcc

SEQ ID NO: 1935429 - DNA, 15 bp, Homo sapiens
aatacccattgtcca

SEQ ID NO: 1935430 - DNA, 15 bp, Homo sapiens
atacccattgtccat

SEQ ID NO: 1935431 - DNA, 15 bp, Homo sapiens
tacccattgtccatt

SEQ ID NO: 1935432 - DNA, 15 bp, Homo sapiens
acccattgtccattc

SEQ ID NO: 1935433 - DNA, 15 bp, Homo sapiens
cccattgtccattcc

SEQ ID NO: 1935434 - DNA, 15 bp, Homo sapiens
ccattgtccattcct

SEQ ID NO: 1935435 - DNA, 15 bp, Homo sapiens
cattgtccattcctg

SEQ ID NO: 1935436 - DNA, 15 bp, Homo sapiens
attgtccattcctgt

SEQ ID NO: 1935437 - DNA, 15 bp, Homo sapiens
ttgtccattcctgtt

SEQ ID NO: 1935438 - DNA, 15 bp, Homo sapiens
tgtccattcctgttg

SEQ ID NO: 1935439 - DNA, 15 bp, Homo sapiens
gtccattcctgttgg

SEQ ID NO: 1935440 - DNA, 15 bp, Homo sapiens
tccattcctgttggc

SEQ ID NO: 1935441 - DNA, 15 bp, Homo sapiens
ccattcctgttggct

SEQ ID NO: 1935442 - DNA, 15 bp, Homo sapiens
cattcctgttggctc

SEQ ID NO: 1935443 - DNA, 15 bp, Homo sapiens
attcctgttggctct

SEQ ID NO: 1935444 - DNA, 15 bp, Homo sapiens
ttcctgttggctctt

SEQ ID NO: 1935445 - DNA, 15 bp, Homo sapiens
tcctgttggctcttg

SEQ ID NO: 1935446 - DNA, 15 bp, Homo sapiens
cctgttggctcttgg

SEQ ID NO: 1935447 - DNA, 15 bp, Homo sapiens
ctgttggctcttggc

SEQ ID NO: 1935448 - DNA, 15 bp, Homo sapiens
tgttggctcttggct

SEQ ID NO: 1935449 - DNA, 15 bp, Homo sapiens
gttggctcttggctg

SEQ ID NO: 1935450 - DNA, 15 bp, Homo sapiens
ttggctcttggctgc

SEQ ID NO: 1935451 - DNA, 15 bp, Homo sapiens
tggctcttggctgcc

SEQ ID NO: 1935452 - DNA, 15 bp, Homo sapiens
ggctcttggctgcct

SEQ ID NO: 1935453 - DNA, 15 bp, Homo sapiens
gctcttggctgccta

SEQ ID NO: 1935454 - DNA, 15 bp, Homo sapiens
ctcttggctgcctag

SEQ ID NO: 1935455 - DNA, 15 bp, Homo sapiens
tcttggctgcctaga

SEQ ID NO: 1935456 - DNA, 15 bp, Homo sapiens
cttggctgcctagat

SEQ ID NO: 1935457 - DNA, 15 bp, Homo sapiens
ttggctgcctagatc

SEQ ID NO: 1935458 - DNA, 15 bp, Homo sapiens
tggctgcctagatct

SEQ ID NO: 1935459 - DNA, 15 bp, Homo sapiens
ggctgcctagatctt

SEQ ID NO: 1935460 - DNA, 15 bp, Homo sapiens
gctgcctagatcttt

SEQ ID NO: 1935461 - DNA, 15 bp, Homo sapiens
ctgcctagatctttt

SEQ ID NO: 1935462 - DNA, 15 bp, Homo sapiens
tgcctagatcttttc

SEQ ID NO: 1935463 - DNA, 15 bp, Homo sapiens
gcctagatcttttct

SEQ ID NO: 1935464 - DNA, 15 bp, Homo sapiens
cctagatcttttctt

SEQ ID NO: 1935465 - DNA, 15 bp, Homo sapiens
ctagatcttttcttt

SEQ ID NO: 1935466 - DNA, 15 bp, Homo sapiens
tagatcttttctttg

SEQ ID NO: 1935467 - DNA, 15 bp, Homo sapiens
agatcttttctttgc

SEQ ID NO: 1935468 - DNA, 15 bp, Homo sapiens
gatcttttctttgcc

SEQ ID NO: 1935469 - DNA, 15 bp, Homo sapiens
atcttttctttgcct

SEQ ID NO: 1935470 - DNA, 15 bp, Homo sapiens
tcttttctttgcctt

SEQ ID NO: 1935471 - DNA, 15 bp, Homo sapiens
cttttctttgcctta

SEQ ID NO: 1935472 - DNA, 15 bp, Homo sapiens
ttttctttgccttac

SEQ ID NO: 1935473 - DNA, 15 bp, Homo sapiens
tttctttgccttact

SEQ ID NO: 1935474 - DNA, 15 bp, Homo sapiens
ttctttgccttactt

SEQ ID NO: 1935475 - DNA, 15 bp, Homo sapiens
tctttgccttacttt

SEQ ID NO: 1935476 - DNA, 15 bp, Homo sapiens
ctttgccttacttta

SEQ ID NO: 1935477 - DNA, 15 bp, Homo sapiens
tttgccttactttac

SEQ ID NO: 1935478 - DNA, 15 bp, Homo sapiens
ttgccttactttacc

SEQ ID NO: 1935479 - DNA, 15 bp, Homo sapiens
tgccttactttacct

SEQ ID NO: 1935480 - DNA, 15 bp, Homo sapiens
gccttactttacctc

SEQ ID NO: 1935481 - DNA, 15 bp, Homo sapiens
ccttactttacctct

SEQ ID NO: 1935482 - DNA, 15 bp, Homo sapiens
cttactttacctctt

SEQ ID NO: 1935483 - DNA, 15 bp, Homo sapiens
ttactttacctcttt

SEQ ID NO: 1935484 - DNA, 15 bp, Homo sapiens
tactttacctcttta

SEQ ID NO: 1935485 - DNA, 15 bp, Homo sapiens
actttacctctttat

SEQ ID NO: 1935486 - DNA, 15 bp, Homo sapiens
ctttacctctttatt

SEQ ID NO: 1935487 - DNA, 15 bp, Homo sapiens
tttacctctttattg

SEQ ID NO: 1935488 - DNA, 15 bp, Homo sapiens
ttacctctttattga

SEQ ID NO: 1935489 - DNA, 15 bp, Homo sapiens
tacctctttattgaa

SEQ ID NO: 1935490 - DNA, 15 bp, Homo sapiens
acctctttattgaag

SEQ ID NO: 1935491 - DNA, 15 bp, Homo sapiens
cctctttattgaagg

SEQ ID NO: 1935492 - DNA, 15 bp, Homo sapiens
ctctttattgaaggc

SEQ ID NO: 1935493 - DNA, 15 bp, Homo sapiens
tctttattgaaggcc

SEQ ID NO: 1935494 - DNA, 15 bp, Homo sapiens
ctttattgaaggcct

SEQ ID NO: 1935495 - DNA, 15 bp, Homo sapiens
tttattgaaggccta

SEQ ID NO: 1935496 - DNA, 15 bp, Homo sapiens
ttattgaaggcctat

SEQ ID NO: 1935497 - DNA, 15 bp, Homo sapiens
tattgaaggcctatg

SEQ ID NO: 1935498 - DNA, 15 bp, Homo sapiens
attgaaggcctatgc

SEQ ID NO: 1935499 - DNA, 15 bp, Homo sapiens
ttgaaggcctatgct

SEQ ID NO: 1935500 - DNA, 15 bp, Homo sapiens
tgaaggcctatgctt

SEQ ID NO: 1935501 - DNA, 15 bp, Homo sapiens
gaaggcctatgcttc

SEQ ID NO: 1935502 - DNA, 15 bp, Homo sapiens
aaggcctatgcttcc

SEQ ID NO: 1935503 - DNA, 15 bp, Homo sapiens
aggcctatgcttccc

SEQ ID NO: 1935504 - DNA, 15 bp, Homo sapiens
ggcctatgcttcccc

SEQ ID NO: 1935505 - DNA, 15 bp, Homo sapiens
gcctatgcttcccct

SEQ ID NO: 1935506 - DNA, 15 bp, Homo sapiens
cctatgcttcccctc

SEQ ID NO: 1935507 - DNA, 15 bp, Homo sapiens
ctatgcttcccctct

SEQ ID NO: 1935508 - DNA, 15 bp, Homo sapiens
tatgcttcccctctg

SEQ ID NO: 1935509 - DNA, 15 bp, Homo sapiens
atgcttcccctctgt

SEQ ID NO: 1935510 - DNA, 15 bp, Homo sapiens
tgcttcccctctgtt

SEQ ID NO: 1935511 - DNA, 15 bp, Homo sapiens
gcttcccctctgttt

SEQ ID NO: 1935512 - DNA, 15 bp, Homo sapiens
cttcccctctgtttc

SEQ ID NO: 1935513 - DNA, 15 bp, Homo sapiens
ttcccctctgtttct

SEQ ID NO: 1935514 - DNA, 15 bp, Homo sapiens
tcccctctgtttctt

SEQ ID NO: 1935515 - DNA, 15 bp, Homo sapiens
cccctctgtttcttt

SEQ ID NO: 1935516 - DNA, 15 bp, Homo sapiens
ccctctgtttctttg

SEQ ID NO: 1935517 - DNA, 15 bp, Homo sapiens
cctctgtttctttgt

SEQ ID NO: 1935518 - DNA, 15 bp, Homo sapiens
ctctgtttctttgta

SEQ ID NO: 1935519 - DNA, 15 bp, Homo sapiens
tctgtttctttgtag

SEQ ID NO: 1935520 - DNA, 15 bp, Homo sapiens
ctgtttctttgtaga

SEQ ID NO: 1935521 - DNA, 15 bp, Homo sapiens
tgtttctttgtagaa

SEQ ID NO: 1935522 - DNA, 15 bp, Homo sapiens
gtttctttgtagaat

SEQ ID NO: 1935523 - DNA, 15 bp, Homo sapiens
tttctttgtagaatg

SEQ ID NO: 1935524 - DNA, 15 bp, Homo sapiens
ttctttgtagaatgt

SEQ ID NO: 1935525 - DNA, 15 bp, Homo sapiens
tctttgtagaatgtc

SEQ ID NO: 1935526 - DNA, 15 bp, Homo sapiens
ctttgtagaatgtct

SEQ ID NO: 1935527 - DNA, 15 bp, Homo sapiens
tttgtagaatgtcta

SEQ ID NO: 1935528 - DNA, 15 bp, Homo sapiens
ttgtagaatgtctag

SEQ ID NO: 1935529 - DNA, 15 bp, Homo sapiens
tgtagaatgtctaga

SEQ ID NO: 1935530 - DNA, 15 bp, Homo sapiens
gtagaatgtctagat

SEQ ID NO: 1935531 - DNA, 15 bp, Homo sapiens
tagaatgtctagatt

SEQ ID NO: 1935532 - DNA, 15 bp, Homo sapiens
agaatgtctagattc

SEQ ID NO: 1935533 - DNA, 15 bp, Homo sapiens
gaatgtctagattcc

SEQ ID NO: 1935534 - DNA, 15 bp, Homo sapiens
aatgtctagattccc

SEQ ID NO: 1935535 - DNA, 15 bp, Homo sapiens
atgtctagattccca

SEQ ID NO: 1935536 - DNA, 15 bp, Homo sapiens
tgtctagattcccaa

SEQ ID NO: 1935537 - DNA, 15 bp, Homo sapiens
gtctagattcccaac

SEQ ID NO: 1935538 - DNA, 15 bp, Homo sapiens
tctagattcccaaca

SEQ ID NO: 1935539 - DNA, 15 bp, Homo sapiens
ctagattcccaacag

SEQ ID NO: 1935540 - DNA, 15 bp, Homo sapiens
tagattcccaacagt

SEQ ID NO: 1935541 - DNA, 15 bp, Homo sapiens
agattcccaacagtg

SEQ ID NO: 1935542 - DNA, 15 bp, Homo sapiens
gattcccaacagtgt

SEQ ID NO: 1935543 - DNA, 15 bp, Homo sapiens
attcccaacagtgtc

SEQ ID NO: 1935544 - DNA, 15 bp, Homo sapiens
ttcccaacagtgtct

SEQ ID NO: 1935545 - DNA, 15 bp, Homo sapiens
tcccaacagtgtctt

SEQ ID NO: 1935546 - DNA, 15 bp, Homo sapiens
cccaacagtgtcttg

SEQ ID NO: 1935547 - DNA, 15 bp, Homo sapiens
ccaacagtgtcttga

SEQ ID NO: 1935548 - DNA, 15 bp, Homo sapiens
caacagtgtcttgaa

SEQ ID NO: 1935549 - DNA, 15 bp, Homo sapiens
aacagtgtcttgaat

SEQ ID NO: 1935550 - DNA, 15 bp, Homo sapiens
acagtgtcttgaatc

SEQ ID NO: 1935551 - DNA, 15 bp, Homo sapiens
cagtgtcttgaatcc

SEQ ID NO: 1935552 - DNA, 15 bp, Homo sapiens
agtgtcttgaatccc

SEQ ID NO: 1935553 - DNA, 15 bp, Homo sapiens
gtgtcttgaatccca

SEQ ID NO: 1935554 - DNA, 15 bp, Homo sapiens
tgtcttgaatcccag

SEQ ID NO: 1935555 - DNA, 15 bp, Homo sapiens
gtcttgaatcccagc

SEQ ID NO: 1935556 - DNA, 15 bp, Homo sapiens
tcttgaatcccagcc

SEQ ID NO: 1935557 - DNA, 15 bp, Homo sapiens
cttgaatcccagccg

SEQ ID NO: 1935558 - DNA, 15 bp, Homo sapiens
ttgaatcccagccgc

SEQ ID NO: 1935559 - DNA, 15 bp, Homo sapiens
tgaatcccagccgcc

SEQ ID NO: 1935560 - DNA, 15 bp, Homo sapiens
gaatcccagccgcct

SEQ ID NO: 1935561 - DNA, 15 bp, Homo sapiens
aatcccagccgcctc

SEQ ID NO: 1935562 - DNA, 15 bp, Homo sapiens
atcccagccgcctcc

SEQ ID NO: 1935563 - DNA, 15 bp, Homo sapiens
tcccagccgcctcca

SEQ ID NO: 1935564 - DNA, 15 bp, Homo sapiens
cccagccgcctccag

SEQ ID NO: 1935565 - DNA, 15 bp, Homo sapiens
ccagccgcctccagg

SEQ ID NO: 1935566 - DNA, 15 bp, Homo sapiens
cagccgcctccaggc

SEQ ID NO: 1935567 - DNA, 15 bp, Homo sapiens
agccgcctccaggct

SEQ ID NO: 1935568 - DNA, 15 bp, Homo sapiens
gccgcctccaggctt

SEQ ID NO: 1935569 - DNA, 15 bp, Homo sapiens
ccgcctccaggcttt

SEQ ID NO: 1935570 - DNA, 15 bp, Homo sapiens
cgcctccaggctttt

SEQ ID NO: 1935571 - DNA, 15 bp, Homo sapiens
gcctccaggcttttc

SEQ ID NO: 1935572 - DNA, 15 bp, Homo sapiens
cctccaggcttttct

SEQ ID NO: 1935573 - DNA, 15 bp, Homo sapiens
ctccaggcttttctt

SEQ ID NO: 1935574 - DNA, 15 bp, Homo sapiens
tccaggcttttcttc

SEQ ID NO: 1935575 - DNA, 15 bp, Homo sapiens
ccaggcttttcttca

SEQ ID NO: 1935576 - DNA, 15 bp, Homo sapiens
caggcttttcttcat

SEQ ID NO: 1935577 - DNA, 15 bp, Homo sapiens
aggcttttcttcatg

SEQ ID NO: 1935578 - DNA, 15 bp, Homo sapiens
ggcttttcttcatga

SEQ ID NO: 1935579 - DNA, 15 bp, Homo sapiens
gcttttcttcatgac

SEQ ID NO: 1935580 - DNA, 15 bp, Homo sapiens
cttttcttcatgacc

SEQ ID NO: 1935581 - DNA, 15 bp, Homo sapiens
ttttcttcatgaccc

SEQ ID NO: 1935582 - DNA, 15 bp, Homo sapiens
tttcttcatgaccca

SEQ ID NO: 1935583 - DNA, 15 bp, Homo sapiens
ttcttcatgacccac

SEQ ID NO: 1935584 - DNA, 15 bp, Homo sapiens
tcttcatgacccacc

SEQ ID NO: 1935585 - DNA, 15 bp, Homo sapiens
cttcatgacccacca

SEQ ID NO: 1935586 - DNA, 15 bp, Homo sapiens
ttcatgacccaccaa

SEQ ID NO: 1935587 - DNA, 15 bp, Homo sapiens
tcatgacccaccaac

SEQ ID NO: 1935588 - DNA, 15 bp, Homo sapiens
catgacccaccaaca

SEQ ID NO: 1935589 - DNA, 15 bp, Homo sapiens
atgacccaccaacac

SEQ ID NO: 1935590 - DNA, 15 bp, Homo sapiens
tgacccaccaacaca

SEQ ID NO: 1935591 - DNA, 15 bp, Homo sapiens
gacccaccaacacaa

SEQ ID NO: 1935592 - DNA, 15 bp, Homo sapiens
acccaccaacacaag

SEQ ID NO: 1935593 - DNA, 15 bp, Homo sapiens
cccaccaacacaaga

SEQ ID NO: 1935594 - DNA, 15 bp, Homo sapiens
ccaccaacacaagaa

SEQ ID NO: 1935595 - DNA, 15 bp, Homo sapiens
caccaacacaagaaa

SEQ ID NO: 1935596 - DNA, 15 bp, Homo sapiens
accaacacaagaaac

SEQ ID NO: 1935597 - DNA, 15 bp, Homo sapiens
ccaacacaagaaacc

SEQ ID NO: 1935598 - DNA, 15 bp, Homo sapiens
caacacaagaaacca

SEQ ID NO: 1935599 - DNA, 15 bp, Homo sapiens
aacacaagaaaccac

SEQ ID NO: 1935600 - DNA, 15 bp, Homo sapiens
acacaagaaaccact

SEQ ID NO: 1935601 - DNA, 15 bp, Homo sapiens
cacaagaaaccactt

SEQ ID NO: 1935602 - DNA, 15 bp, Homo sapiens
acaagaaaccactta

SEQ ID NO: 1935603 - DNA, 15 bp, Homo sapiens
caagaaaccacttag

SEQ ID NO: 1935604 - DNA, 15 bp, Homo sapiens
aagaaaccacttagg

SEQ ID NO: 1935605 - DNA, 15 bp, Homo sapiens
agaaaccacttagga

SEQ ID NO: 1935606 - DNA, 15 bp, Homo sapiens
gaaaccacttaggaa

SEQ ID NO: 1935607 - DNA, 15 bp, Homo sapiens
aaaccacttaggaaa

SEQ ID NO: 1935608 - DNA, 15 bp, Homo sapiens
aaccacttaggaaat

SEQ ID NO: 1935609 - DNA, 15 bp, Homo sapiens
accacttaggaaatc

SEQ ID NO: 1935610 - DNA, 15 bp, Homo sapiens
ccacttaggaaatca

SEQ ID NO: 1935611 - DNA, 15 bp, Homo sapiens
cacttaggaaatcac

SEQ ID NO: 1935612 - DNA, 15 bp, Homo sapiens
acttaggaaatcact

SEQ ID NO: 1935613 - DNA, 15 bp, Homo sapiens
cttaggaaatcactt

SEQ ID NO: 1935614 - DNA, 15 bp, Homo sapiens
ttaggaaatcacttc

SEQ ID NO: 1935615 - DNA, 15 bp, Homo sapiens
taggaaatcacttct

SEQ ID NO: 1935616 - DNA, 15 bp, Homo sapiens
aggaaatcacttctt

SEQ ID NO: 1935617 - DNA, 15 bp, Homo sapiens
ggaaatcacttctta

SEQ ID NO: 1935618 - DNA, 15 bp, Homo sapiens
gaaatcacttcttag

SEQ ID NO: 1935619 - DNA, 15 bp, Homo sapiens
aaatcacttcttaga

SEQ ID NO: 1935620 - DNA, 15 bp, Homo sapiens
aatcacttcttagaa

SEQ ID NO: 1935621 - DNA, 15 bp, Homo sapiens
atcacttcttagaaa

SEQ ID NO: 1935622 - DNA, 15 bp, Homo sapiens
tcacttcttagaaaa

SEQ ID NO: 1935623 - DNA, 15 bp, Homo sapiens
cacttcttagaaaaa

SEQ ID NO: 1935624 - DNA, 15 bp, Homo sapiens
acttcttagaaaaaa

SEQ ID NO: 1935625 - DNA, 15 bp, Homo sapiens
cttcttagaaaaaat

SEQ ID NO: 1935626 - DNA, 15 bp, Homo sapiens
ttcttagaaaaaata

SEQ ID NO: 1935627 - DNA, 15 bp, Homo sapiens
tcttagaaaaaatag

SEQ ID NO: 1935628 - DNA, 15 bp, Homo sapiens
cttagaaaaaataga

SEQ ID NO: 1935629 - DNA, 15 bp, Homo sapiens
ttagaaaaaatagaa

SEQ ID NO: 1935630 - DNA, 15 bp, Homo sapiens
tagaaaaaatagaat

SEQ ID NO: 1935631 - DNA, 15 bp, Homo sapiens
agaaaaaatagaata

SEQ ID NO: 1935632 - DNA, 15 bp, Homo sapiens
gaaaaaatagaataa

SEQ ID NO: 1935633 - DNA, 15 bp, Homo sapiens
aaaaaatagaataag

SEQ ID NO: 1935634 - DNA, 15 bp, Homo sapiens
aaaaatagaataagg

SEQ ID NO: 1935635 - DNA, 15 bp, Homo sapiens
aaaatagaataagga

SEQ ID NO: 1935636 - DNA, 15 bp, Homo sapiens
aaatagaataaggag

SEQ ID NO: 1935637 - DNA, 15 bp, Homo sapiens
aatagaataaggagt

SEQ ID NO: 1935638 - DNA, 15 bp, Homo sapiens
atagaataaggagtt

SEQ ID NO: 1935639 - DNA, 15 bp, Homo sapiens
tagaataaggagttt

SEQ ID NO: 1935640 - DNA, 15 bp, Homo sapiens
agaataaggagtttt

SEQ ID NO: 1935641 - DNA, 15 bp, Homo sapiens
gaataaggagttttt

SEQ ID NO: 1935642 - DNA, 15 bp, Homo sapiens
aataaggagtttttt

SEQ ID NO: 1935643 - DNA, 15 bp, Homo sapiens
ataaggagttttttc

SEQ ID NO: 1935644 - DNA, 15 bp, Homo sapiens
taaggagttttttcc

SEQ ID NO: 1935645 - DNA, 15 bp, Homo sapiens
aaggagttttttcct

SEQ ID NO: 1935646 - DNA, 15 bp, Homo sapiens
aggagttttttcctc

SEQ ID NO: 1935647 - DNA, 15 bp, Homo sapiens
ggagttttttcctct

SEQ ID NO: 1935648 - DNA, 15 bp, Homo sapiens
gagttttttcctctc

SEQ ID NO: 1935649 - DNA, 15 bp, Homo sapiens
agttttttcctctcc

SEQ ID NO: 1935650 - DNA, 15 bp, Homo sapiens
gttttttcctctccc

SEQ ID NO: 1935651 - DNA, 15 bp, Homo sapiens
ttttttcctctccct

SEQ ID NO: 1935652 - DNA, 15 bp, Homo sapiens
tttttcctctccctt

SEQ ID NO: 1935653 - DNA, 15 bp, Homo sapiens
ttttcctctcccttg

SEQ ID NO: 1935654 - DNA, 15 bp, Homo sapiens
tttcctctcccttga

SEQ ID NO: 1935655 - DNA, 15 bp, Homo sapiens
ttcctctcccttgag

SEQ ID NO: 1935656 - DNA, 15 bp, Homo sapiens
tcctctcccttgagt

SEQ ID NO: 1935657 - DNA, 15 bp, Homo sapiens
cctctcccttgagtt

SEQ ID NO: 1935658 - DNA, 15 bp, Homo sapiens
ctctcccttgagttt

SEQ ID NO: 1935659 - DNA, 15 bp, Homo sapiens
tctcccttgagtttc

SEQ ID NO: 1935660 - DNA, 15 bp, Homo sapiens
ctcccttgagtttcc

SEQ ID NO: 1935661 - DNA, 15 bp, Homo sapiens
tcccttgagtttcct

SEQ ID NO: 1935662 - DNA, 15 bp, Homo sapiens
cccttgagtttcctg

SEQ ID NO: 1935663 - DNA, 15 bp, Homo sapiens
ccttgagtttcctgc

SEQ ID NO: 1935664 - DNA, 15 bp, Homo sapiens
cttgagtttcctgca

SEQ ID NO: 1935665 - DNA, 15 bp, Homo sapiens
ttgagtttcctgcat

SEQ ID NO: 1935666 - DNA, 15 bp, Homo sapiens
tgagtttcctgcatt

SEQ ID NO: 1935667 - DNA, 15 bp, Homo sapiens
gagtttcctgcatta

SEQ ID NO: 1935668 - DNA, 15 bp, Homo sapiens
agtttcctgcattaa

SEQ ID NO: 1935669 - DNA, 15 bp, Homo sapiens
gtttcctgcattaat

SEQ ID NO: 1935670 - DNA, 15 bp, Homo sapiens
tttcctgcattaatt

SEQ ID NO: 1935671 - DNA, 15 bp, Homo sapiens
ttcctgcattaatta

SEQ ID NO: 1935672 - DNA, 15 bp, Homo sapiens
tcctgcattaattac

SEQ ID NO: 1935673 - DNA, 15 bp, Homo sapiens
cctgcattaattaca

SEQ ID NO: 1935674 - DNA, 15 bp, Homo sapiens
ctgcattaattacag

SEQ ID NO: 1935675 - DNA, 15 bp, Homo sapiens
tgcattaattacagt

SEQ ID NO: 1935676 - DNA, 15 bp, Homo sapiens
gcattaattacagta

SEQ ID NO: 1935677 - DNA, 15 bp, Homo sapiens
cattaattacagtaa

SEQ ID NO: 1935678 - DNA, 15 bp, Homo sapiens
attaattacagtaag

SEQ ID NO: 1935679 - DNA, 15 bp, Homo sapiens
ttaattacagtaaga

SEQ ID NO: 1935680 - DNA, 15 bp, Homo sapiens
taattacagtaagag

SEQ ID NO: 1935681 - DNA, 15 bp, Homo sapiens
aattacagtaagagg

SEQ ID NO: 1935682 - DNA, 15 bp, Homo sapiens
attacagtaagaggc

SEQ ID NO: 1935683 - DNA, 15 bp, Homo sapiens
ttacagtaagaggca

SEQ ID NO: 1935684 - DNA, 15 bp, Homo sapiens
tacagtaagaggcag

SEQ ID NO: 1935685 - DNA, 15 bp, Homo sapiens
acagtaagaggcagg

SEQ ID NO: 1935686 - DNA, 15 bp, Homo sapiens
cagtaagaggcagga

SEQ ID NO: 1935687 - DNA, 15 bp, Homo sapiens
agtaagaggcaggag

SEQ ID NO: 1935688 - DNA, 15 bp, Homo sapiens
gtaagaggcaggaga

SEQ ID NO: 1935689 - DNA, 15 bp, Homo sapiens
taagaggcaggagag

SEQ ID NO: 1935690 - DNA, 15 bp, Homo sapiens
aagaggcaggagagg

SEQ ID NO: 1935691 - DNA, 15 bp, Homo sapiens
agaggcaggagaggg

SEQ ID NO: 1935692 - DNA, 15 bp, Homo sapiens
gaggcaggagaggga

SEQ ID NO: 1935693 - DNA, 15 bp, Homo sapiens
aggcaggagagggaa

SEQ ID NO: 1935694 - DNA, 15 bp, Homo sapiens
ggcaggagagggaaa

SEQ ID NO: 1935695 - DNA, 15 bp, Homo sapiens
gcaggagagggaaag

SEQ ID NO: 1935696 - DNA, 15 bp, Homo sapiens
caggagagggaaaga

SEQ ID NO: 1935697 - DNA, 15 bp, Homo sapiens
aggagagggaaagaa

SEQ ID NO: 1935698 - DNA, 15 bp, Homo sapiens
ggagagggaaagaat

SEQ ID NO: 1935699 - DNA, 15 bp, Homo sapiens
gagagggaaagaata

SEQ ID NO: 1935700 - DNA, 15 bp, Homo sapiens
agagggaaagaatac

SEQ ID NO: 1935701 - DNA, 15 bp, Homo sapiens
gagggaaagaataca

SEQ ID NO: 1935702 - DNA, 15 bp, Homo sapiens
agggaaagaatacat

SEQ ID NO: 1935703 - DNA, 15 bp, Homo sapiens
gggaaagaatacatt

SEQ ID NO: 1935704 - DNA, 15 bp, Homo sapiens
ggaaagaatacattg

SEQ ID NO: 1935705 - DNA, 15 bp, Homo sapiens
gaaagaatacattgc

SEQ ID NO: 1935706 - DNA, 15 bp, Homo sapiens
aaagaatacattgca

SEQ ID NO: 1935707 - DNA, 15 bp, Homo sapiens
aagaatacattgcaa

SEQ ID NO: 1935708 - DNA, 15 bp, Homo sapiens
agaatacattgcaaa

SEQ ID NO: 1935709 - DNA, 15 bp, Homo sapiens
gaatacattgcaaat

SEQ ID NO: 1935710 - DNA, 15 bp, Homo sapiens
aatacattgcaaata

SEQ ID NO: 1935711 - DNA, 15 bp, Homo sapiens
atacattgcaaatac

SEQ ID NO: 1935712 - DNA, 15 bp, Homo sapiens
tacattgcaaataca

SEQ ID NO: 1935713 - DNA, 15 bp, Homo sapiens
acattgcaaatacag

SEQ ID NO: 1935714 - DNA, 15 bp, Homo sapiens
cattgcaaatacaga

SEQ ID NO: 1935715 - DNA, 15 bp, Homo sapiens
attgcaaatacagaa

SEQ ID NO: 1935716 - DNA, 15 bp, Homo sapiens
ttgcaaatacagaat

SEQ ID NO: 1935717 - DNA, 15 bp, Homo sapiens
tgcaaatacagaatt

SEQ ID NO: 1935718 - DNA, 15 bp, Homo sapiens
gcaaatacagaattt

SEQ ID NO: 1935719 - DNA, 15 bp, Homo sapiens
caaatacagaatttc

SEQ ID NO: 1935720 - DNA, 15 bp, Homo sapiens
aaatacagaatttct

SEQ ID NO: 1935721 - DNA, 15 bp, Homo sapiens
aatacagaatttctt

SEQ ID NO: 1935722 - DNA, 15 bp, Homo sapiens
atacagaatttctta

SEQ ID NO: 1935723 - DNA, 15 bp, Homo sapiens
tacagaatttcttaa

SEQ ID NO: 1935724 - DNA, 15 bp, Homo sapiens
acagaatttcttaag

SEQ ID NO: 1935725 - DNA, 15 bp, Homo sapiens
cagaatttcttaagc

SEQ ID NO: 1935726 - DNA, 15 bp, Homo sapiens
agaatttcttaagcc

SEQ ID NO: 1935727 - DNA, 15 bp, Homo sapiens
gaatttcttaagcca

SEQ ID NO: 1935728 - DNA, 15 bp, Homo sapiens
aatttcttaagccat

SEQ ID NO: 1935729 - DNA, 15 bp, Homo sapiens
atttcttaagccata

SEQ ID NO: 1935730 - DNA, 15 bp, Homo sapiens
tttcttaagccataa

SEQ ID NO: 1935731 - DNA, 15 bp, Homo sapiens
ttcttaagccataag

SEQ ID NO: 1935732 - DNA, 15 bp, Homo sapiens
tcttaagccataagc

SEQ ID NO: 1935733 - DNA, 15 bp, Homo sapiens
cttaagccataagct

SEQ ID NO: 1935734 - DNA, 15 bp, Homo sapiens
ttaagccataagctg

SEQ ID NO: 1935735 - DNA, 15 bp, Homo sapiens
taagccataagctgc

SEQ ID NO: 1935736 - DNA, 15 bp, Homo sapiens
aagccataagctgct

SEQ ID NO: 1935737 - DNA, 15 bp, Homo sapiens
agccataagctgctg

SEQ ID NO: 1935738 - DNA, 15 bp, Homo sapiens
gccataagctgctga

SEQ ID NO: 1935739 - DNA, 15 bp, Homo sapiens
ccataagctgctgaa

SEQ ID NO: 1935740 - DNA, 15 bp, Homo sapiens
cataagctgctgaag

SEQ ID NO: 1935741 - DNA, 15 bp, Homo sapiens
ataagctgctgaaga

SEQ ID NO: 1935742 - DNA, 15 bp, Homo sapiens
taagctgctgaagaa

SEQ ID NO: 1935743 - DNA, 15 bp, Homo sapiens
aagctgctgaagaag

SEQ ID NO: 1935744 - DNA, 15 bp, Homo sapiens
agctgctgaagaaga

SEQ ID NO: 1935745 - DNA, 15 bp, Homo sapiens
gctgctgaagaagat

SEQ ID NO: 1935746 - DNA, 15 bp, Homo sapiens
ctgctgaagaagata

SEQ ID NO: 1935747 - DNA, 15 bp, Homo sapiens
tgctgaagaagatac

SEQ ID NO: 1935748 - DNA, 15 bp, Homo sapiens
gctgaagaagatact

SEQ ID NO: 1935749 - DNA, 15 bp, Homo sapiens
ctgaagaagatactg

SEQ ID NO: 1935750 - DNA, 15 bp, Homo sapiens
tgaagaagatactgt

SEQ ID NO: 1935751 - DNA, 15 bp, Homo sapiens
gaagaagatactgtg

SEQ ID NO: 1935752 - DNA, 15 bp, Homo sapiens
aagaagatactgtga

SEQ ID NO: 1935753 - DNA, 15 bp, Homo sapiens
agaagatactgtgag

SEQ ID NO: 1935754 - DNA, 15 bp, Homo sapiens
gaagatactgtgagt

SEQ ID NO: 1935755 - DNA, 15 bp, Homo sapiens
aagatactgtgagta

SEQ ID NO: 1935756 - DNA, 15 bp, Homo sapiens
agatactgtgagtaa

SEQ ID NO: 1935757 - DNA, 15 bp, Homo sapiens
gatactgtgagtaaa

SEQ ID NO: 1935758 - DNA, 15 bp, Homo sapiens
atactgtgagtaaat

SEQ ID NO: 1935759 - DNA, 15 bp, Homo sapiens
tactgtgagtaaatt

SEQ ID NO: 1935760 - DNA, 15 bp, Homo sapiens
actgtgagtaaattt

SEQ ID NO: 1935761 - DNA, 15 bp, Homo sapiens
ctgtgagtaaatttg

SEQ ID NO: 1935762 - DNA, 15 bp, Homo sapiens
tgtgagtaaatttga

SEQ ID NO: 1935763 - DNA, 15 bp, Homo sapiens
gtgagtaaatttgat

SEQ ID NO: 1935764 - DNA, 15 bp, Homo sapiens
tgagtaaatttgatc

SEQ ID NO: 1935765 - DNA, 15 bp, Homo sapiens
gagtaaatttgatct

SEQ ID NO: 1935766 - DNA, 15 bp, Homo sapiens
agtaaatttgatctt

SEQ ID NO: 1935767 - DNA, 15 bp, Homo sapiens
gtaaatttgatcttt

SEQ ID NO: 1935768 - DNA, 15 bp, Homo sapiens
taaatttgatctttg

SEQ ID NO: 1935769 - DNA, 15 bp, Homo sapiens
aaatttgatctttga

SEQ ID NO: 1935770 - DNA, 15 bp, Homo sapiens
aatttgatctttgac

SEQ ID NO: 1935771 - DNA, 15 bp, Homo sapiens
atttgatctttgact

SEQ ID NO: 1935772 - DNA, 15 bp, Homo sapiens
tttgatctttgacta

SEQ ID NO: 1935773 - DNA, 15 bp, Homo sapiens
ttgatctttgactaa

SEQ ID NO: 1935774 - DNA, 15 bp, Homo sapiens
tgatctttgactaat

SEQ ID NO: 1935775 - DNA, 15 bp, Homo sapiens
gatctttgactaata

SEQ ID NO: 1935776 - DNA, 15 bp, Homo sapiens
atctttgactaataa

SEQ ID NO: 1935777 - DNA, 15 bp, Homo sapiens
tctttgactaataat

SEQ ID NO: 1935778 - DNA, 15 bp, Homo sapiens
ctttgactaataatt

SEQ ID NO: 1935779 - DNA, 15 bp, Homo sapiens
tttgactaataattt

SEQ ID NO: 1935780 - DNA, 15 bp, Homo sapiens
ttgactaataatttc

SEQ ID NO: 1935781 - DNA, 15 bp, Homo sapiens
tgactaataatttct

SEQ ID NO: 1935782 - DNA, 15 bp, Homo sapiens
gactaataatttctt

SEQ ID NO: 1935783 - DNA, 15 bp, Homo sapiens
actaataatttcttt

SEQ ID NO: 1935784 - DNA, 15 bp, Homo sapiens
ctaataatttcttta

SEQ ID NO: 1935785 - DNA, 15 bp, Homo sapiens
taataatttctttaa

SEQ ID NO: 1935786 - DNA, 15 bp, Homo sapiens
aataatttctttaaa

SEQ ID NO: 1935787 - DNA, 15 bp, Homo sapiens
ataatttctttaaaa

SEQ ID NO: 1935788 - DNA, 15 bp, Homo sapiens
taatttctttaaaat

SEQ ID NO: 1935789 - DNA, 15 bp, Homo sapiens
aatttctttaaaata

SEQ ID NO: 1935790 - DNA, 15 bp, Homo sapiens
atttctttaaaatac

SEQ ID NO: 1935791 - DNA, 15 bp, Homo sapiens
tttctttaaaatacc

SEQ ID NO: 1935792 - DNA, 15 bp, Homo sapiens
ttctttaaaatacct

SEQ ID NO: 1935793 - DNA, 15 bp, Homo sapiens
tctttaaaatacctt

SEQ ID NO: 1935794 - DNA, 15 bp, Homo sapiens
ctttaaaataccttg

SEQ ID NO: 1935795 - DNA, 15 bp, Homo sapiens
tttaaaataccttga

SEQ ID NO: 1935796 - DNA, 15 bp, Homo sapiens
ttaaaataccttgag

SEQ ID NO: 1935797 - DNA, 15 bp, Homo sapiens
taaaataccttgagt

SEQ ID NO: 1935798 - DNA, 15 bp, Homo sapiens
aaaataccttgagtt

SEQ ID NO: 1935799 - DNA, 15 bp, Homo sapiens
aaataccttgagttc

SEQ ID NO: 1935800 - DNA, 15 bp, Homo sapiens
aataccttgagttcc

SEQ ID NO: 1935801 - DNA, 15 bp, Homo sapiens
ataccttgagttcct

SEQ ID NO: 1935802 - DNA, 15 bp, Homo sapiens
taccttgagttccta

SEQ ID NO: 1935803 - DNA, 15 bp, Homo sapiens
accttgagttcctac

SEQ ID NO: 1935804 - DNA, 15 bp, Homo sapiens
ccttgagttcctact

SEQ ID NO: 1935805 - DNA, 15 bp, Homo sapiens
cttgagttcctactg

SEQ ID NO: 1935806 - DNA, 15 bp, Homo sapiens
ttgagttcctactga

SEQ ID NO: 1935807 - DNA, 15 bp, Homo sapiens
tgagttcctactgaa

SEQ ID NO: 1935808 - DNA, 15 bp, Homo sapiens
gagttcctactgaat

SEQ ID NO: 1935809 - DNA, 15 bp, Homo sapiens
agttcctactgaatt

SEQ ID NO: 1935810 - DNA, 15 bp, Homo sapiens
gttcctactgaattt

SEQ ID NO: 1935811 - DNA, 15 bp, Homo sapiens
ttcctactgaattta

SEQ ID NO: 1935812 - DNA, 15 bp, Homo sapiens
tcctactgaatttat

SEQ ID NO: 1935813 - DNA, 15 bp, Homo sapiens
cctactgaatttatt

SEQ ID NO: 1935814 - DNA, 15 bp, Homo sapiens
ctactgaatttattt

SEQ ID NO: 1935815 - DNA, 15 bp, Homo sapiens
tactgaatttatttg

SEQ ID NO: 1935816 - DNA, 15 bp, Homo sapiens
actgaatttatttgt

SEQ ID NO: 1935817 - DNA, 15 bp, Homo sapiens
ctgaatttatttgta

SEQ ID NO: 1935818 - DNA, 15 bp, Homo sapiens
tgaatttatttgtat

SEQ ID NO: 1935819 - DNA, 15 bp, Homo sapiens
gaatttatttgtatt

SEQ ID NO: 1935820 - DNA, 15 bp, Homo sapiens
aatttatttgtattt

SEQ ID NO: 1935821 - DNA, 15 bp, Homo sapiens
atttatttgtatttt

SEQ ID NO: 1935822 - DNA, 15 bp, Homo sapiens
tttatttgtattttg

SEQ ID NO: 1935823 - DNA, 15 bp, Homo sapiens
ttatttgtattttga

SEQ ID NO: 1935824 - DNA, 15 bp, Homo sapiens
tatttgtattttgaa

SEQ ID NO: 1935825 - DNA, 15 bp, Homo sapiens
atttgtattttgaat

SEQ ID NO: 1935826 - DNA, 15 bp, Homo sapiens
tttgtattttgaatc

SEQ ID NO: 1935827 - DNA, 15 bp, Homo sapiens
ttgtattttgaatca

SEQ ID NO: 1935828 - DNA, 15 bp, Homo sapiens
tgtattttgaatcat

SEQ ID NO: 1935829 - DNA, 15 bp, Homo sapiens
gtattttgaatcata

SEQ ID NO: 1935830 - DNA, 15 bp, Homo sapiens
tattttgaatcatat

SEQ ID NO: 1935831 - DNA, 15 bp, Homo sapiens
attttgaatcatatc

SEQ ID NO: 1935832 - DNA, 15 bp, Homo sapiens
ttttgaatcatatcc

SEQ ID NO: 1935833 - DNA, 15 bp, Homo sapiens
tttgaatcatatcct

SEQ ID NO: 1935834 - DNA, 15 bp, Homo sapiens
ttgaatcatatcctt

SEQ ID NO: 1935835 - DNA, 15 bp, Homo sapiens
tgaatcatatcctta

SEQ ID NO: 1935836 - DNA, 15 bp, Homo sapiens
gaatcatatccttat

SEQ ID NO: 1935837 - DNA, 15 bp, Homo sapiens
aatcatatccttatt

SEQ ID NO: 1935838 - DNA, 15 bp, Homo sapiens
atcatatccttattg

SEQ ID NO: 1935839 - DNA, 15 bp, Homo sapiens
tcatatccttattgt

SEQ ID NO: 1935840 - DNA, 15 bp, Homo sapiens
catatccttattgtc

SEQ ID NO: 1935841 - DNA, 15 bp, Homo sapiens
atatccttattgtct

SEQ ID NO: 1935842 - DNA, 15 bp, Homo sapiens
tatccttattgtcta

SEQ ID NO: 1935843 - DNA, 15 bp, Homo sapiens
atccttattgtctaa

SEQ ID NO: 1935844 - DNA, 15 bp, Homo sapiens
tccttattgtctaaa

SEQ ID NO: 1935845 - DNA, 15 bp, Homo sapiens
ccttattgtctaaag

SEQ ID NO: 1935846 - DNA, 15 bp, Homo sapiens
cttattgtctaaagc

SEQ ID NO: 1935847 - DNA, 15 bp, Homo sapiens
ttattgtctaaagca

SEQ ID NO: 1935848 - DNA, 15 bp, Homo sapiens
tattgtctaaagcaa

SEQ ID NO: 1935849 - DNA, 15 bp, Homo sapiens
attgtctaaagcaat

SEQ ID NO: 1935850 - DNA, 15 bp, Homo sapiens
ttgtctaaagcaatc

SEQ ID NO: 1935851 - DNA, 15 bp, Homo sapiens
tgtctaaagcaatca

SEQ ID NO: 1935852 - DNA, 15 bp, Homo sapiens
gtctaaagcaatcac

SEQ ID NO: 1935853 - DNA, 15 bp, Homo sapiens
tctaaagcaatcact

SEQ ID NO: 1935854 - DNA, 15 bp, Homo sapiens
ctaaagcaatcacta

SEQ ID NO: 1935855 - DNA, 15 bp, Homo sapiens
taaagcaatcactat

SEQ ID NO: 1935856 - DNA, 15 bp, Homo sapiens
aaagcaatcactata

SEQ ID NO: 1935857 - DNA, 15 bp, Homo sapiens
aagcaatcactatat

SEQ ID NO: 1935858 - DNA, 15 bp, Homo sapiens
agcaatcactatatc

SEQ ID NO: 1935859 - DNA, 15 bp, Homo sapiens
gcaatcactatatcc

SEQ ID NO: 1935860 - DNA, 15 bp, Homo sapiens
caatcactatatcca

SEQ ID NO: 1935861 - DNA, 15 bp, Homo sapiens
aatcactatatccag

SEQ ID NO: 1935862 - DNA, 15 bp, Homo sapiens
atcactatatccagt

SEQ ID NO: 1935863 - DNA, 15 bp, Homo sapiens
tcactatatccagtc

SEQ ID NO: 1935864 - DNA, 15 bp, Homo sapiens
cactatatccagtct

SEQ ID NO: 1935865 - DNA, 15 bp, Homo sapiens
actatatccagtctt

SEQ ID NO: 1935866 - DNA, 15 bp, Homo sapiens
ctatatccagtcttg

SEQ ID NO: 1935867 - DNA, 15 bp, Homo sapiens
tatatccagtcttgt

SEQ ID NO: 1935868 - DNA, 15 bp, Homo sapiens
atatccagtcttgta

SEQ ID NO: 1935869 - DNA, 15 bp, Homo sapiens
tatccagtcttgtaa

SEQ ID NO: 1935870 - DNA, 15 bp, Homo sapiens
atccagtcttgtaat

SEQ ID NO: 1935871 - DNA, 15 bp, Homo sapiens
tccagtcttgtaata

SEQ ID NO: 1935872 - DNA, 15 bp, Homo sapiens
ccagtcttgtaatag

SEQ ID NO: 1935873 - DNA, 15 bp, Homo sapiens
cagtcttgtaataga

SEQ ID NO: 1935874 - DNA, 15 bp, Homo sapiens
agtcttgtaatagag

SEQ ID NO: 1935875 - DNA, 15 bp, Homo sapiens
gtcttgtaatagagt

SEQ ID NO: 1935876 - DNA, 15 bp, Homo sapiens
tcttgtaatagagta

SEQ ID NO: 1935877 - DNA, 15 bp, Homo sapiens
cttgtaatagagtat

SEQ ID NO: 1935878 - DNA, 15 bp, Homo sapiens
ttgtaatagagtatt

SEQ ID NO: 1935879 - DNA, 15 bp, Homo sapiens
tgtaatagagtattc

SEQ ID NO: 1935880 - DNA, 15 bp, Homo sapiens
gtaatagagtattca

SEQ ID NO: 1935881 - DNA, 15 bp, Homo sapiens
taatagagtattcaa

SEQ ID NO: 1935882 - DNA, 15 bp, Homo sapiens
aatagagtattcaag

SEQ ID NO: 1935883 - DNA, 15 bp, Homo sapiens
atagagtattcaagg

SEQ ID NO: 1935884 - DNA, 15 bp, Homo sapiens
tagagtattcaaggc

SEQ ID NO: 1935885 - DNA, 15 bp, Homo sapiens
agagtattcaaggca

SEQ ID NO: 1935886 - DNA, 15 bp, Homo sapiens
gagtattcaaggcaa

SEQ ID NO: 1935887 - DNA, 15 bp, Homo sapiens
agtattcaaggcaac

SEQ ID NO: 1935888 - DNA, 15 bp, Homo sapiens
gtattcaaggcaaca

SEQ ID NO: 1935889 - DNA, 15 bp, Homo sapiens
tattcaaggcaacaa

SEQ ID NO: 1935890 - DNA, 15 bp, Homo sapiens
attcaaggcaacaaa

SEQ ID NO: 1935891 - DNA, 15 bp, Homo sapiens
ttcaaggcaacaaat

SEQ ID NO: 1935892 - DNA, 15 bp, Homo sapiens
tcaaggcaacaaatt

SEQ ID NO: 1935893 - DNA, 15 bp, Homo sapiens
caaggcaacaaattg

SEQ ID NO: 1935894 - DNA, 15 bp, Homo sapiens
aaggcaacaaattgt

SEQ ID NO: 1935895 - DNA, 15 bp, Homo sapiens
aggcaacaaattgtc

SEQ ID NO: 1935896 - DNA, 15 bp, Homo sapiens
ggcaacaaattgtcc

SEQ ID NO: 1935897 - DNA, 15 bp, Homo sapiens
gcaacaaattgtcca

SEQ ID NO: 1935898 - DNA, 15 bp, Homo sapiens
caacaaattgtccac

SEQ ID NO: 1935899 - DNA, 15 bp, Homo sapiens
aacaaattgtccaca

SEQ ID NO: 1935900 - DNA, 15 bp, Homo sapiens
acaaattgtccacag

SEQ ID NO: 1935901 - DNA, 15 bp, Homo sapiens
caaattgtccacagg

SEQ ID NO: 1935902 - DNA, 15 bp, Homo sapiens
aaattgtccacaggg

SEQ ID NO: 1935903 - DNA, 15 bp, Homo sapiens
aattgtccacaggga

SEQ ID NO: 1935904 - DNA, 15 bp, Homo sapiens
attgtccacagggag

SEQ ID NO: 1935905 - DNA, 15 bp, Homo sapiens
ttgtccacagggaga

SEQ ID NO: 1935906 - DNA, 15 bp, Homo sapiens
tgtccacagggagat

SEQ ID NO: 1935907 - DNA, 15 bp, Homo sapiens
gtccacagggagatt

SEQ ID NO: 1935908 - DNA, 15 bp, Homo sapiens
tccacagggagatta

SEQ ID NO: 1935909 - DNA, 15 bp, Homo sapiens
ccacagggagattat

SEQ ID NO: 1935910 - DNA, 15 bp, Homo sapiens
cacagggagattatc

SEQ ID NO: 1935911 - DNA, 15 bp, Homo sapiens
acagggagattatct

SEQ ID NO: 1935912 - DNA, 15 bp, Homo sapiens
cagggagattatctc

SEQ ID NO: 1935913 - DNA, 15 bp, Homo sapiens
agggagattatctct

SEQ ID NO: 1935914 - DNA, 15 bp, Homo sapiens
gggagattatctctg

SEQ ID NO: 1935915 - DNA, 15 bp, Homo sapiens
ggagattatctctgt

SEQ ID NO: 1935916 - DNA, 15 bp, Homo sapiens
gagattatctctgtg

SEQ ID NO: 1935917 - DNA, 15 bp, Homo sapiens
agattatctctgtgg

SEQ ID NO: 1935918 - DNA, 15 bp, Homo sapiens
gattatctctgtgga

SEQ ID NO: 1935919 - DNA, 15 bp, Homo sapiens
attatctctgtggat

SEQ ID NO: 1935920 - DNA, 15 bp, Homo sapiens
ttatctctgtggatt

SEQ ID NO: 1935921 - DNA, 15 bp, Homo sapiens
tatctctgtggatta

SEQ ID NO: 1935922 - DNA, 15 bp, Homo sapiens
atctctgtggattaa

SEQ ID NO: 1935923 - DNA, 15 bp, Homo sapiens
tctctgtggattaac

SEQ ID NO: 1935924 - DNA, 15 bp, Homo sapiens
ctctgtggattaacc

SEQ ID NO: 1935925 - DNA, 15 bp, Homo sapiens
tctgtggattaacca

SEQ ID NO: 1935926 - DNA, 15 bp, Homo sapiens
ctgtggattaaccat

SEQ ID NO: 1935927 - DNA, 15 bp, Homo sapiens
tgtggattaaccata

SEQ ID NO: 1935928 - DNA, 15 bp, Homo sapiens
gtggattaaccatag

SEQ ID NO: 1935929 - DNA, 15 bp, Homo sapiens
tggattaaccatagc

SEQ ID NO: 1935930 - DNA, 15 bp, Homo sapiens
ggattaaccatagca

SEQ ID NO: 1935931 - DNA, 15 bp, Homo sapiens
gattaaccatagcaa

SEQ ID NO: 1935932 - DNA, 15 bp, Homo sapiens
attaaccatagcaaa

SEQ ID NO: 1935933 - DNA, 15 bp, Homo sapiens
ttaaccatagcaaaa

SEQ ID NO: 1935934 - DNA, 15 bp, Homo sapiens
taaccatagcaaaat

SEQ ID NO: 1935935 - DNA, 15 bp, Homo sapiens
aaccatagcaaaatc

SEQ ID NO: 1935936 - DNA, 15 bp, Homo sapiens
accatagcaaaatct

SEQ ID NO: 1935937 - DNA, 15 bp, Homo sapiens
ccatagcaaaatcta

SEQ ID NO: 1935938 - DNA, 15 bp, Homo sapiens
catagcaaaatctaa

SEQ ID NO: 1935939 - DNA, 15 bp, Homo sapiens
atagcaaaatctaaa

SEQ ID NO: 1935940 - DNA, 15 bp, Homo sapiens
tagcaaaatctaaat

SEQ ID NO: 1935941 - DNA, 15 bp, Homo sapiens
agcaaaatctaaatt

SEQ ID NO: 1935942 - DNA, 15 bp, Homo sapiens
gcaaaatctaaattc

SEQ ID NO: 1935943 - DNA, 15 bp, Homo sapiens
caaaatctaaattcg

SEQ ID NO: 1935944 - DNA, 15 bp, Homo sapiens
aaaatctaaattcgg

SEQ ID NO: 1935945 - DNA, 15 bp, Homo sapiens
aaatctaaattcggg

SEQ ID NO: 1935946 - DNA, 15 bp, Homo sapiens
aatctaaattcgggg

SEQ ID NO: 1935947 - DNA, 15 bp, Homo sapiens
atctaaattcggggt

SEQ ID NO: 1935948 - DNA, 15 bp, Homo sapiens
tctaaattcggggtc

SEQ ID NO: 1935949 - DNA, 15 bp, Homo sapiens
ctaaattcggggtca

SEQ ID NO: 1935950 - DNA, 15 bp, Homo sapiens
taaattcggggtcaa

SEQ ID NO: 1935951 - DNA, 15 bp, Homo sapiens
aaattcggggtcaac

SEQ ID NO: 1935952 - DNA, 15 bp, Homo sapiens
aattcggggtcaact

SEQ ID NO: 1935953 - DNA, 15 bp, Homo sapiens
attcggggtcaactt

SEQ ID NO: 1935954 - DNA, 15 bp, Homo sapiens
ttcggggtcaacttc

SEQ ID NO: 1935955 - DNA, 15 bp, Homo sapiens
tcggggtcaacttcc

SEQ ID NO: 1935956 - DNA, 15 bp, Homo sapiens
cggggtcaacttcct

SEQ ID NO: 1935957 - DNA, 15 bp, Homo sapiens
ggggtcaacttcctc

SEQ ID NO: 1935958 - DNA, 15 bp, Homo sapiens
gggtcaacttcctct

SEQ ID NO: 1935959 - DNA, 15 bp, Homo sapiens
ggtcaacttcctctt

SEQ ID NO: 1935960 - DNA, 15 bp, Homo sapiens
gtcaacttcctcttg

SEQ ID NO: 1935961 - DNA, 15 bp, Homo sapiens
tcaacttcctcttgc

SEQ ID NO: 1935962 - DNA, 15 bp, Homo sapiens
caacttcctcttgct

SEQ ID NO: 1935963 - DNA, 15 bp, Homo sapiens
aacttcctcttgcta

SEQ ID NO: 1935964 - DNA, 15 bp, Homo sapiens
acttcctcttgctac

SEQ ID NO: 1935965 - DNA, 15 bp, Homo sapiens
cttcctcttgctact

SEQ ID NO: 1935966 - DNA, 15 bp, Homo sapiens
ttcctcttgctacta

SEQ ID NO: 1935967 - DNA, 15 bp, Homo sapiens
tcctcttgctactat

SEQ ID NO: 1935968 - DNA, 15 bp, Homo sapiens
cctcttgctactatt

SEQ ID NO: 1935969 - DNA, 15 bp, Homo sapiens
ctcttgctactattc

SEQ ID NO: 1935970 - DNA, 15 bp, Homo sapiens
tcttgctactattcc

SEQ ID NO: 1935971 - DNA, 15 bp, Homo sapiens
cttgctactattcca

SEQ ID NO: 1935972 - DNA, 15 bp, Homo sapiens
ttgctactattccag

SEQ ID NO: 1935973 - DNA, 15 bp, Homo sapiens
tgctactattccagt

SEQ ID NO: 1935974 - DNA, 15 bp, Homo sapiens
gctactattccagtc

SEQ ID NO: 1935975 - DNA, 15 bp, Homo sapiens
ctactattccagtca

SEQ ID NO: 1935976 - DNA, 15 bp, Homo sapiens
tactattccagtcac

SEQ ID NO: 1935977 - DNA, 15 bp, Homo sapiens
actattccagtcact

SEQ ID NO: 1935978 - DNA, 15 bp, Homo sapiens
ctattccagtcactg

SEQ ID NO: 1935979 - DNA, 15 bp, Homo sapiens
tattccagtcactgc

SEQ ID NO: 1935980 - DNA, 15 bp, Homo sapiens
attccagtcactgca

SEQ ID NO: 1935981 - DNA, 15 bp, Homo sapiens
ttccagtcactgcac

SEQ ID NO: 1935982 - DNA, 15 bp, Homo sapiens
tccagtcactgcact

SEQ ID NO: 1935983 - DNA, 15 bp, Homo sapiens
ccagtcactgcacta

SEQ ID NO: 1935984 - DNA, 15 bp, Homo sapiens
cagtcactgcactat

SEQ ID NO: 1935985 - DNA, 15 bp, Homo sapiens
agtcactgcactatc

SEQ ID NO: 1935986 - DNA, 15 bp, Homo sapiens
gtcactgcactatct

SEQ ID NO: 1935987 - DNA, 15 bp, Homo sapiens
tcactgcactatctc

SEQ ID NO: 1935988 - DNA, 15 bp, Homo sapiens
cactgcactatctct

SEQ ID NO: 1935989 - DNA, 15 bp, Homo sapiens
actgcactatctctt

SEQ ID NO: 1935990 - DNA, 15 bp, Homo sapiens
ctgcactatctcttg

SEQ ID NO: 1935991 - DNA, 15 bp, Homo sapiens
tgcactatctcttgg

SEQ ID NO: 1935992 - DNA, 15 bp, Homo sapiens
gcactatctcttggt

SEQ ID NO: 1935993 - DNA, 15 bp, Homo sapiens
cactatctcttggtg

SEQ ID NO: 1935994 - DNA, 15 bp, Homo sapiens
actatctcttggtga

SEQ ID NO: 1935995 - DNA, 15 bp, Homo sapiens
ctatctcttggtgac

SEQ ID NO: 1935996 - DNA, 15 bp, Homo sapiens
tatctcttggtgact

SEQ ID NO: 1935997 - DNA, 15 bp, Homo sapiens
atctcttggtgactc

SEQ ID NO: 1935998 - DNA, 15 bp, Homo sapiens
tctcttggtgactca

SEQ ID NO: 1935999 - DNA, 15 bp, Homo sapiens
ctcttggtgactcac

SEQ ID NO: 1936000 - DNA, 15 bp, Homo sapiens
tcttggtgactcaca

SEQ ID NO: 1936001 - DNA, 15 bp, Homo sapiens
cttggtgactcacag

SEQ ID NO: 1936002 - DNA, 15 bp, Homo sapiens
ttggtgactcacagt

SEQ ID NO: 1936003 - DNA, 15 bp, Homo sapiens
tggtgactcacagtt

SEQ ID NO: 1936004 - DNA, 15 bp, Homo sapiens
ggtgactcacagttg

SEQ ID NO: 1936005 - DNA, 15 bp, Homo sapiens
gtgactcacagttgt

SEQ ID NO: 1936006 - DNA, 15 bp, Homo sapiens
tgactcacagttgta

SEQ ID NO: 1936007 - DNA, 15 bp, Homo sapiens
gactcacagttgtat

SEQ ID NO: 1936008 - DNA, 15 bp, Homo sapiens
actcacagttgtata

SEQ ID NO: 1936009 - DNA, 15 bp, Homo sapiens
ctcacagttgtatat

SEQ ID NO: 1936010 - DNA, 15 bp, Homo sapiens
tcacagttgtatatg

SEQ ID NO: 1936011 - DNA, 15 bp, Homo sapiens
cacagttgtatatgc

SEQ ID NO: 1936012 - DNA, 15 bp, Homo sapiens
acagttgtatatgct

SEQ ID NO: 1936013 - DNA, 15 bp, Homo sapiens
cagttgtatatgcta

SEQ ID NO: 1936014 - DNA, 15 bp, Homo sapiens
agttgtatatgctag

SEQ ID NO: 1936015 - DNA, 15 bp, Homo sapiens
gttgtatatgctagg

SEQ ID NO: 1936016 - DNA, 15 bp, Homo sapiens
ttgtatatgctagga

SEQ ID NO: 1936017 - DNA, 15 bp, Homo sapiens
tgtatatgctaggag

SEQ ID NO: 1936018 - DNA, 15 bp, Homo sapiens
gtatatgctaggagc

SEQ ID NO: 1936019 - DNA, 15 bp, Homo sapiens
tatatgctaggagct

SEQ ID NO: 1936020 - DNA, 15 bp, Homo sapiens
atatgctaggagctt

SEQ ID NO: 1936021 - DNA, 15 bp, Homo sapiens
tatgctaggagcttt

SEQ ID NO: 1936022 - DNA, 15 bp, Homo sapiens
atgctaggagctttg

SEQ ID NO: 1936023 - DNA, 15 bp, Homo sapiens
tgctaggagctttgg

SEQ ID NO: 1936024 - DNA, 15 bp, Homo sapiens
gctaggagctttggt

SEQ ID NO: 1936025 - DNA, 15 bp, Homo sapiens
ctaggagctttggtt

SEQ ID NO: 1936026 - DNA, 15 bp, Homo sapiens
taggagctttggttc

SEQ ID NO: 1936027 - DNA, 15 bp, Homo sapiens
aggagctttggttct

SEQ ID NO: 1936028 - DNA, 15 bp, Homo sapiens
ggagctttggttctc

SEQ ID NO: 1936029 - DNA, 15 bp, Homo sapiens
gagctttggttctca

SEQ ID NO: 1936030 - DNA, 15 bp, Homo sapiens
agctttggttctcac

SEQ ID NO: 1936031 - DNA, 15 bp, Homo sapiens
gctttggttctcacc

SEQ ID NO: 1936032 - DNA, 15 bp, Homo sapiens
ctttggttctcacct

SEQ ID NO: 1936033 - DNA, 15 bp, Homo sapiens
tttggttctcaccta

SEQ ID NO: 1936034 - DNA, 15 bp, Homo sapiens
ttggttctcacctat

SEQ ID NO: 1936035 - DNA, 15 bp, Homo sapiens
tggttctcacctatg

SEQ ID NO: 1936036 - DNA, 15 bp, Homo sapiens
ggttctcacctatgg

SEQ ID NO: 1936037 - DNA, 15 bp, Homo sapiens
gttctcacctatggc

SEQ ID NO: 1936038 - DNA, 15 bp, Homo sapiens
ttctcacctatggct

SEQ ID NO: 1936039 - DNA, 15 bp, Homo sapiens
tctcacctatggctg

SEQ ID NO: 1936040 - DNA, 15 bp, Homo sapiens
ctcacctatggctgt

SEQ ID NO: 1936041 - DNA, 15 bp, Homo sapiens
tcacctatggctgta

SEQ ID NO: 1936042 - DNA, 15 bp, Homo sapiens
cacctatggctgtac

SEQ ID NO: 1936043 - DNA, 15 bp, Homo sapiens
acctatggctgtacc

SEQ ID NO: 1936044 - DNA, 15 bp, Homo sapiens
cctatggctgtacct

SEQ ID NO: 1936045 - DNA, 15 bp, Homo sapiens
ctatggctgtacctt

SEQ ID NO: 1936046 - DNA, 15 bp, Homo sapiens
tatggctgtacctta

SEQ ID NO: 1936047 - DNA, 15 bp, Homo sapiens
atggctgtaccttag

SEQ ID NO: 1936048 - DNA, 15 bp, Homo sapiens
tggctgtaccttaga

SEQ ID NO: 1936049 - DNA, 15 bp, Homo sapiens
ggctgtaccttagaa

SEQ ID NO: 1936050 - DNA, 15 bp, Homo sapiens
gctgtaccttagaat

SEQ ID NO: 1936051 - DNA, 15 bp, Homo sapiens
ctgtaccttagaatc

SEQ ID NO: 1936052 - DNA, 15 bp, Homo sapiens
tgtaccttagaatca

SEQ ID NO: 1936053 - DNA, 15 bp, Homo sapiens
gtaccttagaatcac

SEQ ID NO: 1936054 - DNA, 15 bp, Homo sapiens
taccttagaatcacc

SEQ ID NO: 1936055 - DNA, 15 bp, Homo sapiens
accttagaatcacca

SEQ ID NO: 1936056 - DNA, 15 bp, Homo sapiens
ccttagaatcaccag

SEQ ID NO: 1936057 - DNA, 15 bp, Homo sapiens
cttagaatcaccagg

SEQ ID NO: 1936058 - DNA, 15 bp, Homo sapiens
ttagaatcaccaggg

SEQ ID NO: 1936059 - DNA, 15 bp, Homo sapiens
tagaatcaccagggg

SEQ ID NO: 1936060 - DNA, 15 bp, Homo sapiens
agaatcaccagggga

SEQ ID NO: 1936061 - DNA, 15 bp, Homo sapiens
gaatcaccaggggaa

SEQ ID NO: 1936062 - DNA, 15 bp, Homo sapiens
aatcaccaggggaac

SEQ ID NO: 1936063 - DNA, 15 bp, Homo sapiens
atcaccaggggaact

SEQ ID NO: 1936064 - DNA, 15 bp, Homo sapiens
tcaccaggggaactt

SEQ ID NO: 1936065 - DNA, 15 bp, Homo sapiens
caccaggggaacttt

SEQ ID NO: 1936066 - DNA, 15 bp, Homo sapiens
accaggggaacttta

SEQ ID NO: 1936067 - DNA, 15 bp, Homo sapiens
ccaggggaactttaa

SEQ ID NO: 1936068 - DNA, 15 bp, Homo sapiens
caggggaactttaaa

SEQ ID NO: 1936069 - DNA, 15 bp, Homo sapiens
aggggaactttaaaa

SEQ ID NO: 1936070 - DNA, 15 bp, Homo sapiens
ggggaactttaaaaa

SEQ ID NO: 1936071 - DNA, 15 bp, Homo sapiens
gggaactttaaaaag

SEQ ID NO: 1936072 - DNA, 15 bp, Homo sapiens
ggaactttaaaaaga

SEQ ID NO: 1936073 - DNA, 15 bp, Homo sapiens
gaactttaaaaagaa

SEQ ID NO: 1936074 - DNA, 15 bp, Homo sapiens
aactttaaaaagaag

SEQ ID NO: 1936075 - DNA, 15 bp, Homo sapiens
actttaaaaagaagt

SEQ ID NO: 1936076 - DNA, 15 bp, Homo sapiens
ctttaaaaagaagtt

SEQ ID NO: 1936077 - DNA, 15 bp, Homo sapiens
tttaaaaagaagttc

SEQ ID NO: 1936078 - DNA, 15 bp, Homo sapiens
ttaaaaagaagttct

SEQ ID NO: 1936079 - DNA, 15 bp, Homo sapiens
taaaaagaagttctt

SEQ ID NO: 1936080 - DNA, 15 bp, Homo sapiens
aaaaagaagttctta

SEQ ID NO: 1936081 - DNA, 15 bp, Homo sapiens
aaaagaagttcttat

SEQ ID NO: 1936082 - DNA, 15 bp, Homo sapiens
aaagaagttcttatg

SEQ ID NO: 1936083 - DNA, 15 bp, Homo sapiens
aagaagttcttatgg

SEQ ID NO: 1936084 - DNA, 15 bp, Homo sapiens
agaagttcttatggc

SEQ ID NO: 1936085 - DNA, 15 bp, Homo sapiens
gaagttcttatggct

SEQ ID NO: 1936086 - DNA, 15 bp, Homo sapiens
aagttcttatggctg

SEQ ID NO: 1936087 - DNA, 15 bp, Homo sapiens
agttcttatggctgg

SEQ ID NO: 1936088 - DNA, 15 bp, Homo sapiens
gttcttatggctggg

SEQ ID NO: 1936089 - DNA, 15 bp, Homo sapiens
ttcttatggctgggt

SEQ ID NO: 1936090 - DNA, 15 bp, Homo sapiens
tcttatggctgggtc

SEQ ID NO: 1936091 - DNA, 15 bp, Homo sapiens
cttatggctgggtcc

SEQ ID NO: 1936092 - DNA, 15 bp, Homo sapiens
ttatggctgggtcca

SEQ ID NO: 1936093 - DNA, 15 bp, Homo sapiens
tatggctgggtccaa

SEQ ID NO: 1936094 - DNA, 15 bp, Homo sapiens
atggctgggtccaac

SEQ ID NO: 1936095 - DNA, 15 bp, Homo sapiens
tggctgggtccaact

SEQ ID NO: 1936096 - DNA, 15 bp, Homo sapiens
ggctgggtccaactc

SEQ ID NO: 1936097 - DNA, 15 bp, Homo sapiens
gctgggtccaactct

SEQ ID NO: 1936098 - DNA, 15 bp, Homo sapiens
ctgggtccaactctc

SEQ ID NO: 1936099 - DNA, 15 bp, Homo sapiens
tgggtccaactctcc

SEQ ID NO: 1936100 - DNA, 15 bp, Homo sapiens
gggtccaactctcca

SEQ ID NO: 1936101 - DNA, 15 bp, Homo sapiens
ggtccaactctccaa

SEQ ID NO: 1936102 - DNA, 15 bp, Homo sapiens
gtccaactctccaag

SEQ ID NO: 1936103 - DNA, 15 bp, Homo sapiens
tccaactctccaaga

SEQ ID NO: 1936104 - DNA, 15 bp, Homo sapiens
ccaactctccaagat

SEQ ID NO: 1936105 - DNA, 15 bp, Homo sapiens
caactctccaagatt

SEQ ID NO: 1936106 - DNA, 15 bp, Homo sapiens
aactctccaagattc

SEQ ID NO: 1936107 - DNA, 15 bp, Homo sapiens
actctccaagattct

SEQ ID NO: 1936108 - DNA, 15 bp, Homo sapiens
ctctccaagattctg

SEQ ID NO: 1936109 - DNA, 15 bp, Homo sapiens
tctccaagattctga

SEQ ID NO: 1936110 - DNA, 15 bp, Homo sapiens
ctccaagattctgat

SEQ ID NO: 1936111 - DNA, 15 bp, Homo sapiens
tccaagattctgatt

SEQ ID NO: 1936112 - DNA, 15 bp, Homo sapiens
ccaagattctgattt

SEQ ID NO: 1936113 - DNA, 15 bp, Homo sapiens
caagattctgatttg

SEQ ID NO: 1936114 - DNA, 15 bp, Homo sapiens
aagattctgatttgg

SEQ ID NO: 1936115 - DNA, 15 bp, Homo sapiens
agattctgatttggt

SEQ ID NO: 1936116 - DNA, 15 bp, Homo sapiens
gattctgatttggtc

SEQ ID NO: 1936117 - DNA, 15 bp, Homo sapiens
attctgatttggtct

SEQ ID NO: 1936118 - DNA, 15 bp, Homo sapiens
ttctgatttggtctt

SEQ ID NO: 1936119 - DNA, 15 bp, Homo sapiens
tctgatttggtcttg

SEQ ID NO: 1936120 - DNA, 15 bp, Homo sapiens
ctgatttggtcttgg

SEQ ID NO: 1936121 - DNA, 15 bp, Homo sapiens
tgatttggtcttggg

SEQ ID NO: 1936122 - DNA, 15 bp, Homo sapiens
gatttggtcttgggt

SEQ ID NO: 1936123 - DNA, 15 bp, Homo sapiens
atttggtcttgggtg

SEQ ID NO: 1936124 - DNA, 15 bp, Homo sapiens
tttggtcttgggtgg

SEQ ID NO: 1936125 - DNA, 15 bp, Homo sapiens
ttggtcttgggtggg

SEQ ID NO: 1936126 - DNA, 15 bp, Homo sapiens
tggtcttgggtgggg

SEQ ID NO: 1936127 - DNA, 15 bp, Homo sapiens
ggtcttgggtggggc

SEQ ID NO: 1936128 - DNA, 15 bp, Homo sapiens
gtcttgggtggggcc

SEQ ID NO: 1936129 - DNA, 15 bp, Homo sapiens
tcttgggtggggcct

SEQ ID NO: 1936130 - DNA, 15 bp, Homo sapiens
cttgggtggggcctg

SEQ ID NO: 1936131 - DNA, 15 bp, Homo sapiens
ttgggtggggcctgg

SEQ ID NO: 1936132 - DNA, 15 bp, Homo sapiens
tgggtggggcctggg

SEQ ID NO: 1936133 - DNA, 15 bp, Homo sapiens
gggtggggcctgggc

SEQ ID NO: 1936134 - DNA, 15 bp, Homo sapiens
ggtggggcctgggca

SEQ ID NO: 1936135 - DNA, 15 bp, Homo sapiens
gtggggcctgggcat

SEQ ID NO: 1936136 - DNA, 15 bp, Homo sapiens
tggggcctgggcatt

SEQ ID NO: 1936137 - DNA, 15 bp, Homo sapiens
ggggcctgggcattg

SEQ ID NO: 1936138 - DNA, 15 bp, Homo sapiens
gggcctgggcattga

SEQ ID NO: 1936139 - DNA, 15 bp, Homo sapiens
ggcctgggcattgat

SEQ ID NO: 1936140 - DNA, 15 bp, Homo sapiens
gcctgggcattgatg

SEQ ID NO: 1936141 - DNA, 15 bp, Homo sapiens
cctgggcattgatgt

SEQ ID NO: 1936142 - DNA, 15 bp, Homo sapiens
ctgggcattgatgtt

SEQ ID NO: 1936143 - DNA, 15 bp, Homo sapiens
tgggcattgatgttt

SEQ ID NO: 1936144 - DNA, 15 bp, Homo sapiens
gggcattgatgtttt

SEQ ID NO: 1936145 - DNA, 15 bp, Homo sapiens
ggcattgatgttttt

SEQ ID NO: 1936146 - DNA, 15 bp, Homo sapiens
gcattgatgtttttt

SEQ ID NO: 1936147 - DNA, 15 bp, Homo sapiens
cattgatgtttttta

SEQ ID NO: 1936148 - DNA, 15 bp, Homo sapiens
attgatgttttttaa

SEQ ID NO: 1936149 - DNA, 15 bp, Homo sapiens
ttgatgttttttaaa

SEQ ID NO: 1936150 - DNA, 15 bp, Homo sapiens
tgatgttttttaaaa

SEQ ID NO: 1936151 - DNA, 15 bp, Homo sapiens
gatgttttttaaaag

SEQ ID NO: 1936152 - DNA, 15 bp, Homo sapiens
atgttttttaaaagt

SEQ ID NO: 1936153 - DNA, 15 bp, Homo sapiens
tgttttttaaaagtt

SEQ ID NO: 1936154 - DNA, 15 bp, Homo sapiens
gttttttaaaagttc

SEQ ID NO: 1936155 - DNA, 15 bp, Homo sapiens
ttttttaaaagttct

SEQ ID NO: 1936156 - DNA, 15 bp, Homo sapiens
tttttaaaagttctg

SEQ ID NO: 1936157 - DNA, 15 bp, Homo sapiens
ttttaaaagttctgt

SEQ ID NO: 1936158 - DNA, 15 bp, Homo sapiens
tttaaaagttctgtg

SEQ ID NO: 1936159 - DNA, 15 bp, Homo sapiens
ttaaaagttctgtga

SEQ ID NO: 1936160 - DNA, 15 bp, Homo sapiens
taaaagttctgtgat

SEQ ID NO: 1936161 - DNA, 15 bp, Homo sapiens
aaaagttctgtgatg

SEQ ID NO: 1936162 - DNA, 15 bp, Homo sapiens
aaagttctgtgatga

SEQ ID NO: 1936163 - DNA, 15 bp, Homo sapiens
aagttctgtgatgat

SEQ ID NO: 1936164 - DNA, 15 bp, Homo sapiens
agttctgtgatgatt

SEQ ID NO: 1936165 - DNA, 15 bp, Homo sapiens
gttctgtgatgattc

SEQ ID NO: 1936166 - DNA, 15 bp, Homo sapiens
ttctgtgatgattct

SEQ ID NO: 1936167 - DNA, 15 bp, Homo sapiens
tctgtgatgattcta

SEQ ID NO: 1936168 - DNA, 15 bp, Homo sapiens
ctgtgatgattctaa

SEQ ID NO: 1936169 - DNA, 15 bp, Homo sapiens
tgtgatgattctaat

SEQ ID NO: 1936170 - DNA, 15 bp, Homo sapiens
gtgatgattctaatg

SEQ ID NO: 1936171 - DNA, 15 bp, Homo sapiens
tgatgattctaatgt

SEQ ID NO: 1936172 - DNA, 15 bp, Homo sapiens
gatgattctaatgtg

SEQ ID NO: 1936173 - DNA, 15 bp, Homo sapiens
atgattctaatgtga

SEQ ID NO: 1936174 - DNA, 15 bp, Homo sapiens
tgattctaatgtgaa

SEQ ID NO: 1936175 - DNA, 15 bp, Homo sapiens
gattctaatgtgaag

SEQ ID NO: 1936176 - DNA, 15 bp, Homo sapiens
attctaatgtgaaga

SEQ ID NO: 1936177 - DNA, 15 bp, Homo sapiens
ttctaatgtgaagac

SEQ ID NO: 1936178 - DNA, 15 bp, Homo sapiens
tctaatgtgaagaca

SEQ ID NO: 1936179 - DNA, 15 bp, Homo sapiens
ctaatgtgaagacaa

SEQ ID NO: 1936180 - DNA, 15 bp, Homo sapiens
taatgtgaagacaag

SEQ ID NO: 1936181 - DNA, 15 bp, Homo sapiens
aatgtgaagacaaga

SEQ ID NO: 1936182 - DNA, 15 bp, Homo sapiens
atgtgaagacaagat

SEQ ID NO: 1936183 - DNA, 15 bp, Homo sapiens
tgtgaagacaagatt

SEQ ID NO: 1936184 - DNA, 15 bp, Homo sapiens
gtgaagacaagattc

SEQ ID NO: 1936185 - DNA, 15 bp, Homo sapiens
tgaagacaagattca

SEQ ID NO: 1936186 - DNA, 15 bp, Homo sapiens
gaagacaagattcaa

SEQ ID NO: 1936187 - DNA, 15 bp, Homo sapiens
aagacaagattcaaa

SEQ ID NO: 1936188 - DNA, 15 bp, Homo sapiens
agacaagattcaaaa

SEQ ID NO: 1936189 - DNA, 15 bp, Homo sapiens
gacaagattcaaaaa

SEQ ID NO: 1936190 - DNA, 15 bp, Homo sapiens
acaagattcaaaaac

SEQ ID NO: 1936191 - DNA, 15 bp, Homo sapiens
caagattcaaaaacc

SEQ ID NO: 1936192 - DNA, 15 bp, Homo sapiens
aagattcaaaaacca

SEQ ID NO: 1936193 - DNA, 15 bp, Homo sapiens
agattcaaaaaccac

SEQ ID NO: 1936194 - DNA, 15 bp, Homo sapiens
gattcaaaaaccact

SEQ ID NO: 1936195 - DNA, 15 bp, Homo sapiens
attcaaaaaccactg

SEQ ID NO: 1936196 - DNA, 15 bp, Homo sapiens
ttcaaaaaccactgt

SEQ ID NO: 1936197 - DNA, 15 bp, Homo sapiens
tcaaaaaccactgtc

SEQ ID NO: 1936198 - DNA, 15 bp, Homo sapiens
caaaaaccactgtct

SEQ ID NO: 1936199 - DNA, 15 bp, Homo sapiens
aaaaaccactgtctt

SEQ ID NO: 1936200 - DNA, 15 bp, Homo sapiens
aaaaccactgtctta

SEQ ID NO: 1936201 - DNA, 15 bp, Homo sapiens
aaaccactgtcttag

SEQ ID NO: 1936202 - DNA, 15 bp, Homo sapiens
aaccactgtcttaga

SEQ ID NO: 1936203 - DNA, 15 bp, Homo sapiens
accactgtcttagaa

SEQ ID NO: 1936204 - DNA, 15 bp, Homo sapiens
ccactgtcttagaaa

SEQ ID NO: 1936205 - DNA, 15 bp, Homo sapiens
cactgtcttagaaaa

SEQ ID NO: 1936206 - DNA, 15 bp, Homo sapiens
actgtcttagaaaat

SEQ ID NO: 1936207 - DNA, 15 bp, Homo sapiens
ctgtcttagaaaatg

SEQ ID NO: 1936208 - DNA, 15 bp, Homo sapiens
tgtcttagaaaatgt

SEQ ID NO: 1936209 - DNA, 15 bp, Homo sapiens
gtcttagaaaatgtt

SEQ ID NO: 1936210 - DNA, 15 bp, Homo sapiens
tcttagaaaatgttc

SEQ ID NO: 1936211 - DNA, 15 bp, Homo sapiens
cttagaaaatgttct

SEQ ID NO: 1936212 - DNA, 15 bp, Homo sapiens
ttagaaaatgttctc

SEQ ID NO: 1936213 - DNA, 15 bp, Homo sapiens
tagaaaatgttctca

SEQ ID NO: 1936214 - DNA, 15 bp, Homo sapiens
agaaaatgttctcat

SEQ ID NO: 1936215 - DNA, 15 bp, Homo sapiens
gaaaatgttctcatc

SEQ ID NO: 1936216 - DNA, 15 bp, Homo sapiens
aaaatgttctcatct

SEQ ID NO: 1936217 - DNA, 15 bp, Homo sapiens
aaatgttctcatctg

SEQ ID NO: 1936218 - DNA, 15 bp, Homo sapiens
aatgttctcatctgc

SEQ ID NO: 1936219 - DNA, 15 bp, Homo sapiens
atgttctcatctgct

SEQ ID NO: 1936220 - DNA, 15 bp, Homo sapiens
tgttctcatctgctg

SEQ ID NO: 1936221 - DNA, 15 bp, Homo sapiens
gttctcatctgctgt

SEQ ID NO: 1936222 - DNA, 15 bp, Homo sapiens
ttctcatctgctgtg

SEQ ID NO: 1936223 - DNA, 15 bp, Homo sapiens
tctcatctgctgtgc

SEQ ID NO: 1936224 - DNA, 15 bp, Homo sapiens
ctcatctgctgtgca

SEQ ID NO: 1936225 - DNA, 15 bp, Homo sapiens
tcatctgctgtgcaa

SEQ ID NO: 1936226 - DNA, 15 bp, Homo sapiens
catctgctgtgcaag

SEQ ID NO: 1936227 - DNA, 15 bp, Homo sapiens
atctgctgtgcaaga

SEQ ID NO: 1936228 - DNA, 15 bp, Homo sapiens
tctgctgtgcaagaa

SEQ ID NO: 1936229 - DNA, 15 bp, Homo sapiens
ctgctgtgcaagaaa

SEQ ID NO: 1936230 - DNA, 15 bp, Homo sapiens
tgctgtgcaagaaaa

SEQ ID NO: 1936231 - DNA, 15 bp, Homo sapiens
gctgtgcaagaaaaa

SEQ ID NO: 1936232 - DNA, 15 bp, Homo sapiens
ctgtgcaagaaaaac

SEQ ID NO: 1936233 - DNA, 15 bp, Homo sapiens
tgtgcaagaaaaaca

SEQ ID NO: 1936234 - DNA, 15 bp, Homo sapiens
gtgcaagaaaaacaa

SEQ ID NO: 1936235 - DNA, 15 bp, Homo sapiens
tgcaagaaaaacaac

SEQ ID NO: 1936236 - DNA, 15 bp, Homo sapiens
gcaagaaaaacaacc

SEQ ID NO: 1936237 - DNA, 15 bp, Homo sapiens
caagaaaaacaacct

SEQ ID NO: 1936238 - DNA, 15 bp, Homo sapiens
aagaaaaacaacctg

SEQ ID NO: 1936239 - DNA, 15 bp, Homo sapiens
agaaaaacaacctga

SEQ ID NO: 1936240 - DNA, 15 bp, Homo sapiens
gaaaaacaacctgag

SEQ ID NO: 1936241 - DNA, 15 bp, Homo sapiens
aaaaacaacctgaga

SEQ ID NO: 1936242 - DNA, 15 bp, Homo sapiens
aaaacaacctgagaa

SEQ ID NO: 1936243 - DNA, 15 bp, Homo sapiens
aaacaacctgagaac

SEQ ID NO: 1936244 - DNA, 15 bp, Homo sapiens
aacaacctgagaacc

SEQ ID NO: 1936245 - DNA, 15 bp, Homo sapiens
acaacctgagaacca

SEQ ID NO: 1936246 - DNA, 15 bp, Homo sapiens
caacctgagaaccaa

SEQ ID NO: 1936247 - DNA, 15 bp, Homo sapiens
aacctgagaaccaaa

SEQ ID NO: 1936248 - DNA, 15 bp, Homo sapiens
acctgagaaccaaaa

SEQ ID NO: 1936249 - DNA, 15 bp, Homo sapiens
cctgagaaccaaaaa

SEQ ID NO: 1936250 - DNA, 15 bp, Homo sapiens
ctgagaaccaaaaag

SEQ ID NO: 1936251 - DNA, 15 bp, Homo sapiens
tgagaaccaaaaagg

SEQ ID NO: 1936252 - DNA, 15 bp, Homo sapiens
gagaaccaaaaagga

SEQ ID NO: 1936253 - DNA, 15 bp, Homo sapiens
agaaccaaaaaggag

SEQ ID NO: 1936254 - DNA, 15 bp, Homo sapiens
gaaccaaaaaggagt

SEQ ID NO: 1936255 - DNA, 15 bp, Homo sapiens
aaccaaaaaggagtc

SEQ ID NO: 1936256 - DNA, 15 bp, Homo sapiens
accaaaaaggagtca

SEQ ID NO: 1936257 - DNA, 15 bp, Homo sapiens
ccaaaaaggagtcat

SEQ ID NO: 1936258 - DNA, 15 bp, Homo sapiens
caaaaaggagtcatt

SEQ ID NO: 1936259 - DNA, 15 bp, Homo sapiens
aaaaaggagtcattg

SEQ ID NO: 1936260 - DNA, 15 bp, Homo sapiens
aaaaggagtcattgt

SEQ ID NO: 1936261 - DNA, 15 bp, Homo sapiens
aaaggagtcattgtg

SEQ ID NO: 1936262 - DNA, 15 bp, Homo sapiens
aaggagtcattgtga

SEQ ID NO: 1936263 - DNA, 15 bp, Homo sapiens
aggagtcattgtgat

SEQ ID NO: 1936264 - DNA, 15 bp, Homo sapiens
ggagtcattgtgatt

SEQ ID NO: 1936265 - DNA, 15 bp, Homo sapiens
gagtcattgtgatta

SEQ ID NO: 1936266 - DNA, 15 bp, Homo sapiens
agtcattgtgattaa

SEQ ID NO: 1936267 - DNA, 15 bp, Homo sapiens
gtcattgtgattaat

SEQ ID NO: 1936268 - DNA, 15 bp, Homo sapiens
tcattgtgattaata

SEQ ID NO: 1936269 - DNA, 15 bp, Homo sapiens
cattgtgattaatat

SEQ ID NO: 1936270 - DNA, 15 bp, Homo sapiens
attgtgattaatatt

SEQ ID NO: 1936271 - DNA, 15 bp, Homo sapiens
ttgtgattaatattt

SEQ ID NO: 1936272 - DNA, 15 bp, Homo sapiens
tgtgattaatatttg

SEQ ID NO: 1936273 - DNA, 15 bp, Homo sapiens
gtgattaatatttgt

SEQ ID NO: 1936274 - DNA, 15 bp, Homo sapiens
tgattaatatttgtg

SEQ ID NO: 1936275 - DNA, 15 bp, Homo sapiens
gattaatatttgtgt

SEQ ID NO: 1936276 - DNA, 15 bp, Homo sapiens
attaatatttgtgtt

SEQ ID NO: 1936277 - DNA, 15 bp, Homo sapiens
ttaatatttgtgttt

SEQ ID NO: 1936278 - DNA, 15 bp, Homo sapiens
taatatttgtgtttt

SEQ ID NO: 1936279 - DNA, 15 bp, Homo sapiens
aatatttgtgttttc

SEQ ID NO: 1936280 - DNA, 15 bp, Homo sapiens
atatttgtgttttca

SEQ ID NO: 1936281 - DNA, 15 bp, Homo sapiens
tatttgtgttttcag

SEQ ID NO: 1936282 - DNA, 15 bp, Homo sapiens
atttgtgttttcaga

SEQ ID NO: 1936283 - DNA, 15 bp, Homo sapiens
tttgtgttttcagat

SEQ ID NO: 1936284 - DNA, 15 bp, Homo sapiens
ttgtgttttcagatt

SEQ ID NO: 1936285 - DNA, 15 bp, Homo sapiens
tgtgttttcagatta

SEQ ID NO: 1936286 - DNA, 15 bp, Homo sapiens
gtgttttcagattaa

SEQ ID NO: 1936287 - DNA, 15 bp, Homo sapiens
tgttttcagattaaa

SEQ ID NO: 1936288 - DNA, 15 bp, Homo sapiens
gttttcagattaaaa

SEQ ID NO: 1936289 - DNA, 15 bp, Homo sapiens
ttttcagattaaaag

SEQ ID NO: 1936290 - DNA, 15 bp, Homo sapiens
tttcagattaaaaga

SEQ ID NO: 1936291 - DNA, 15 bp, Homo sapiens
ttcagattaaaagat

SEQ ID NO: 1936292 - DNA, 15 bp, Homo sapiens
tcagattaaaagata

SEQ ID NO: 1936293 - DNA, 15 bp, Homo sapiens
cagattaaaagatat

SEQ ID NO: 1936294 - DNA, 15 bp, Homo sapiens
agattaaaagatatt

SEQ ID NO: 1936295 - DNA, 15 bp, Homo sapiens
gattaaaagatattg

SEQ ID NO: 1936296 - DNA, 15 bp, Homo sapiens
attaaaagatattgt

SEQ ID NO: 1936297 - DNA, 15 bp, Homo sapiens
ttaaaagatattgtt

SEQ ID NO: 1936298 - DNA, 15 bp, Homo sapiens
taaaagatattgttg

SEQ ID NO: 1936299 - DNA, 15 bp, Homo sapiens
aaaagatattgttgg

SEQ ID NO: 1936300 - DNA, 15 bp, Homo sapiens
aaagatattgttggt

SEQ ID NO: 1936301 - DNA, 15 bp, Homo sapiens
aagatattgttggtg

SEQ ID NO: 1936302 - DNA, 15 bp, Homo sapiens
agatattgttggtgc

SEQ ID NO: 1936303 - DNA, 15 bp, Homo sapiens
gatattgttggtgct

SEQ ID NO: 1936304 - DNA, 15 bp, Homo sapiens
atattgttggtgcta

SEQ ID NO: 1936305 - DNA, 15 bp, Homo sapiens
tattgttggtgctac

SEQ ID NO: 1936306 - DNA, 15 bp, Homo sapiens
attgttggtgctact

SEQ ID NO: 1936307 - DNA, 15 bp, Homo sapiens
ttgttggtgctactg

SEQ ID NO: 1936308 - DNA, 15 bp, Homo sapiens
tgttggtgctactga

SEQ ID NO: 1936309 - DNA, 15 bp, Homo sapiens
gttggtgctactgaa

SEQ ID NO: 1936310 - DNA, 15 bp, Homo sapiens
ttggtgctactgaat

SEQ ID NO: 1936311 - DNA, 15 bp, Homo sapiens
tggtgctactgaatt

SEQ ID NO: 1936312 - DNA, 15 bp, Homo sapiens
ggtgctactgaattt

SEQ ID NO: 1936313 - DNA, 15 bp, Homo sapiens
gtgctactgaatttt

SEQ ID NO: 1936314 - DNA, 15 bp, Homo sapiens
tgctactgaattttt

SEQ ID NO: 1936315 - DNA, 15 bp, Homo sapiens
gctactgaatttttt

SEQ ID NO: 1936316 - DNA, 15 bp, Homo sapiens
ctactgaattttttg

SEQ ID NO: 1936317 - DNA, 15 bp, Homo sapiens
tactgaattttttgt

SEQ ID NO: 1936318 - DNA, 15 bp, Homo sapiens
actgaattttttgtt

SEQ ID NO: 1936319 - DNA, 15 bp, Homo sapiens
ctgaattttttgttt

SEQ ID NO: 1936320 - DNA, 15 bp, Homo sapiens
tgaattttttgtttt

SEQ ID NO: 1936321 - DNA, 15 bp, Homo sapiens
gaattttttgttttt

SEQ ID NO: 1936322 - DNA, 15 bp, Homo sapiens
aattttttgtttttt

SEQ ID NO: 1936323 - DNA, 15 bp, Homo sapiens
attttttgttttttt

SEQ ID NO: 1936324 - DNA, 15 bp, Homo sapiens
ttttttgtttttttg

SEQ ID NO: 1936325 - DNA, 15 bp, Homo sapiens
tttttgtttttttgt

SEQ ID NO: 1936326 - DNA, 15 bp, Homo sapiens
tttgtttttttgttt

SEQ ID NO: 1936327 - DNA, 15 bp, Homo sapiens
ttgtttttttgtttt

SEQ ID NO: 1936328 - DNA, 15 bp, Homo sapiens
tgtttttttgttttt

SEQ ID NO: 1936329 - DNA, 15 bp, Homo sapiens
tttgttttttttttg

SEQ ID NO: 1936330 - DNA, 15 bp, Homo sapiens
ttgttttttttttga

SEQ ID NO: 1936331 - DNA, 15 bp, Homo sapiens
tgttttttttttgag

SEQ ID NO: 1936332 - DNA, 15 bp, Homo sapiens
gttttttttttgaga

SEQ ID NO: 1936333 - DNA, 15 bp, Homo sapiens
ctggagtgcattggc

SEQ ID NO: 1936334 - DNA, 15 bp, Homo sapiens
tggagtgcattggca

SEQ ID NO: 1936335 - DNA, 15 bp, Homo sapiens
ggagtgcattggcat

SEQ ID NO: 1936336 - DNA, 15 bp, Homo sapiens
gagtgcattggcatg

SEQ ID NO: 1936337 - DNA, 15 bp, Homo sapiens
agtgcattggcatga

SEQ ID NO: 1936338 - DNA, 15 bp, Homo sapiens
gtgcattggcatgat

SEQ ID NO: 1936339 - DNA, 15 bp, Homo sapiens
tgcattggcatgatc

SEQ ID NO: 1936340 - DNA, 15 bp, Homo sapiens
gcattggcatgatct

SEQ ID NO: 1936341 - DNA, 15 bp, Homo sapiens
cattggcatgatctc

SEQ ID NO: 1936342 - DNA, 15 bp, Homo sapiens
attggcatgatctcg

SEQ ID NO: 1936343 - DNA, 15 bp, Homo sapiens
ttggcatgatctcgg

SEQ ID NO: 1936344 - DNA, 15 bp, Homo sapiens
gcctccctggttcat

SEQ ID NO: 1936345 - DNA, 15 bp, Homo sapiens
cctccctggttcatg

SEQ ID NO: 1936346 - DNA, 15 bp, Homo sapiens
ctccctggttcatgc

SEQ ID NO: 1936347 - DNA, 15 bp, Homo sapiens
tccctggttcatgcc

SEQ ID NO: 1936348 - DNA, 15 bp, Homo sapiens
ccctggttcatgcca

SEQ ID NO: 1936349 - DNA, 15 bp, Homo sapiens
cctggttcatgccat

SEQ ID NO: 1936350 - DNA, 15 bp, Homo sapiens
ctggttcatgccatt

SEQ ID NO: 1936351 - DNA, 15 bp, Homo sapiens
tggttcatgccattc

SEQ ID NO: 1936352 - DNA, 15 bp, Homo sapiens
gactacaggcgccca

SEQ ID NO: 1936353 - DNA, 15 bp, Homo sapiens
actacaggcgcccac

SEQ ID NO: 1936354 - DNA, 15 bp, Homo sapiens
ctacaggcgcccacc

SEQ ID NO: 1936355 - DNA, 15 bp, Homo sapiens
ggcgcccaccaccac

SEQ ID NO: 1936356 - DNA, 15 bp, Homo sapiens
gcgcccaccaccacg

SEQ ID NO: 1936357 - DNA, 15 bp, Homo sapiens
cgcccaccaccacgc

SEQ ID NO: 1936358 - DNA, 15 bp, Homo sapiens
gcccaccaccacgcc

SEQ ID NO: 1936359 - DNA, 15 bp, Homo sapiens
cccaccaccacgcct

SEQ ID NO: 1936360 - DNA, 15 bp, Homo sapiens
ccaccaccacgcctg

SEQ ID NO: 1936361 - DNA, 15 bp, Homo sapiens
ctggctaattttttc

SEQ ID NO: 1936362 - DNA, 15 bp, Homo sapiens
tggctaattttttct

SEQ ID NO: 1936363 - DNA, 15 bp, Homo sapiens
ggctaattttttcta

SEQ ID NO: 1936364 - DNA, 15 bp, Homo sapiens
gctaattttttctat

SEQ ID NO: 1936365 - DNA, 15 bp, Homo sapiens
ctaattttttctatt

SEQ ID NO: 1936366 - DNA, 15 bp, Homo sapiens
taattttttctattt

SEQ ID NO: 1936367 - DNA, 15 bp, Homo sapiens
aattttttctatttt

SEQ ID NO: 1936368 - DNA, 15 bp, Homo sapiens
attttttctattttt

SEQ ID NO: 1936369 - DNA, 15 bp, Homo sapiens
ttttttctattttta

SEQ ID NO: 1936370 - DNA, 15 bp, Homo sapiens
tttttctatttttag

SEQ ID NO: 1936371 - DNA, 15 bp, Homo sapiens
ttttctatttttagt

SEQ ID NO: 1936372 - DNA, 15 bp, Homo sapiens
tttctatttttagtg

SEQ ID NO: 1936373 - DNA, 15 bp, Homo sapiens
ttctatttttagtga

SEQ ID NO: 1936374 - DNA, 15 bp, Homo sapiens
tctatttttagtgag

SEQ ID NO: 1936375 - DNA, 15 bp, Homo sapiens
ctatttttagtgaga

SEQ ID NO: 1936376 - DNA, 15 bp, Homo sapiens
tatttttagtgagat

SEQ ID NO: 1936377 - DNA, 15 bp, Homo sapiens
atttttagtgagatg

SEQ ID NO: 1936378 - DNA, 15 bp, Homo sapiens
tttttagtgagatga

SEQ ID NO: 1936379 - DNA, 15 bp, Homo sapiens
ttttagtgagatgag

SEQ ID NO: 1936380 - DNA, 15 bp, Homo sapiens
tttagtgagatgagg

SEQ ID NO: 1936381 - DNA, 15 bp, Homo sapiens
ttagtgagatgaggt

SEQ ID NO: 1936382 - DNA, 15 bp, Homo sapiens
tagtgagatgaggtt

SEQ ID NO: 1936383 - DNA, 15 bp, Homo sapiens
agtgagatgaggttt

SEQ ID NO: 1936384 - DNA, 15 bp, Homo sapiens
gtgagatgaggtttc

SEQ ID NO: 1936385 - DNA, 15 bp, Homo sapiens
tgagatgaggtttca

SEQ ID NO: 1936386 - DNA, 15 bp, Homo sapiens
ctcgtgatccacccc

SEQ ID NO: 1936387 - DNA, 15 bp, Homo sapiens
tcgtgatccacccct

SEQ ID NO: 1936388 - DNA, 15 bp, Homo sapiens
cgtgatccacccctg

SEQ ID NO: 1936389 - DNA, 15 bp, Homo sapiens
gtgatccacccctgc

SEQ ID NO: 1936390 - DNA, 15 bp, Homo sapiens
tgatccacccctgcc

SEQ ID NO: 1936391 - DNA, 15 bp, Homo sapiens
gatccacccctgcct

SEQ ID NO: 1936392 - DNA, 15 bp, Homo sapiens
atccacccctgcctt

SEQ ID NO: 1936393 - DNA, 15 bp, Homo sapiens
tccacccctgccttg

SEQ ID NO: 1936394 - DNA, 15 bp, Homo sapiens
ccacccctgccttgg

SEQ ID NO: 1936395 - DNA, 15 bp, Homo sapiens
cacccctgccttggc

SEQ ID NO: 1936396 - DNA, 15 bp, Homo sapiens
acccctgccttggcc

SEQ ID NO: 1936397 - DNA, 15 bp, Homo sapiens
cccctgccttggcct

SEQ ID NO: 1936398 - DNA, 15 bp, Homo sapiens
ccctgccttggcctc

SEQ ID NO: 1936399 - DNA, 15 bp, Homo sapiens
ttggcctcccaaagg

SEQ ID NO: 1936400 - DNA, 15 bp, Homo sapiens
tggcctcccaaaggg

SEQ ID NO: 1936401 - DNA, 15 bp, Homo sapiens
ggcctcccaaagggc

SEQ ID NO: 1936402 - DNA, 15 bp, Homo sapiens
gcctcccaaagggct

SEQ ID NO: 1936403 - DNA, 15 bp, Homo sapiens
cctcccaaagggctg

SEQ ID NO: 1936404 - DNA, 15 bp, Homo sapiens
tcccaaagggctggg

SEQ ID NO: 1936405 - DNA, 15 bp, Homo sapiens
cccaaagggctggga

SEQ ID NO: 1936406 - DNA, 15 bp, Homo sapiens
ccaaagggctgggat

SEQ ID NO: 1936407 - DNA, 15 bp, Homo sapiens
caaagggctgggatt

SEQ ID NO: 1936408 - DNA, 15 bp, Homo sapiens
aaagggctgggatta

SEQ ID NO: 1936409 - DNA, 15 bp, Homo sapiens
aagggctgggattac

SEQ ID NO: 1936410 - DNA, 15 bp, Homo sapiens
agggctgggattaca

SEQ ID NO: 1936411 - DNA, 15 bp, Homo sapiens
gggctgggattacag

SEQ ID NO: 1936412 - DNA, 15 bp, Homo sapiens
cgcgcccggccagtg

SEQ ID NO: 1936413 - DNA, 15 bp, Homo sapiens
gcgcccggccagtgc

SEQ ID NO: 1936414 - DNA, 15 bp, Homo sapiens
cgcccggccagtgct

SEQ ID NO: 1936415 - DNA, 15 bp, Homo sapiens
gcccggccagtgcta

SEQ ID NO: 1936416 - DNA, 15 bp, Homo sapiens
cccggccagtgctac

SEQ ID NO: 1936417 - DNA, 15 bp, Homo sapiens
ccggccagtgctact

SEQ ID NO: 1936418 - DNA, 15 bp, Homo sapiens
cggccagtgctactg

SEQ ID NO: 1936419 - DNA, 15 bp, Homo sapiens
ggccagtgctactga

SEQ ID NO: 1936420 - DNA, 15 bp, Homo sapiens
gccagtgctactgaa

SEQ ID NO: 1936421 - DNA, 15 bp, Homo sapiens
ccagtgctactgaat

SEQ ID NO: 1936422 - DNA, 15 bp, Homo sapiens
cagtgctactgaatt

SEQ ID NO: 1936423 - DNA, 15 bp, Homo sapiens
agtgctactgaattt

SEQ ID NO: 1936424 - DNA, 15 bp, Homo sapiens
gtgctactgaattta

SEQ ID NO: 1936425 - DNA, 15 bp, Homo sapiens
tgctactgaatttag

SEQ ID NO: 1936426 - DNA, 15 bp, Homo sapiens
gctactgaatttagg

SEQ ID NO: 1936427 - DNA, 15 bp, Homo sapiens
ctactgaatttaggg

SEQ ID NO: 1936428 - DNA, 15 bp, Homo sapiens
tactgaatttaggga

SEQ ID NO: 1936429 - DNA, 15 bp, Homo sapiens
actgaatttagggag

SEQ ID NO: 1936430 - DNA, 15 bp, Homo sapiens
ctgaatttagggagt

SEQ ID NO: 1936431 - DNA, 15 bp, Homo sapiens
tgaatttagggagtc

SEQ ID NO: 1936432 - DNA, 15 bp, Homo sapiens
gaatttagggagtcg

SEQ ID NO: 1936433 - DNA, 15 bp, Homo sapiens
aatttagggagtcgg

SEQ ID NO: 1936434 - DNA, 15 bp, Homo sapiens
atttagggagtcggt

SEQ ID NO: 1936435 - DNA, 15 bp, Homo sapiens
tttagggagtcggta

SEQ ID NO: 1936436 - DNA, 15 bp, Homo sapiens
ttagggagtcggtat

SEQ ID NO: 1936437 - DNA, 15 bp, Homo sapiens
tagggagtcggtata

SEQ ID NO: 1936438 - DNA, 15 bp, Homo sapiens
agggagtcggtataa

SEQ ID NO: 1936439 - DNA, 15 bp, Homo sapiens
gggagtcggtataaa

SEQ ID NO: 1936440 - DNA, 15 bp, Homo sapiens
ggagtcggtataaaa

SEQ ID NO: 1936441 - DNA, 15 bp, Homo sapiens
gagtcggtataaaag

SEQ ID NO: 1936442 - DNA, 15 bp, Homo sapiens
agtcggtataaaagg

SEQ ID NO: 1936443 - DNA, 15 bp, Homo sapiens
gtcggtataaaagga

SEQ ID NO: 1936444 - DNA, 15 bp, Homo sapiens
tcggtataaaaggaa

SEQ ID NO: 1936445 - DNA, 15 bp, Homo sapiens
cggtataaaaggaaa

SEQ ID NO: 1936446 - DNA, 15 bp, Homo sapiens
ggtataaaaggaaat

SEQ ID NO: 1936447 - DNA, 15 bp, Homo sapiens
gtataaaaggaaatt

SEQ ID NO: 1936448 - DNA, 15 bp, Homo sapiens
tataaaaggaaattc

SEQ ID NO: 1936449 - DNA, 15 bp, Homo sapiens
ataaaaggaaattct

SEQ ID NO: 1936450 - DNA, 15 bp, Homo sapiens
taaaaggaaattctg

SEQ ID NO: 1936451 - DNA, 15 bp, Homo sapiens
aaaaggaaattctga

SEQ ID NO: 1936452 - DNA, 15 bp, Homo sapiens
aaaggaaattctgaa

SEQ ID NO: 1936453 - DNA, 15 bp, Homo sapiens
aaggaaattctgaag

SEQ ID NO: 1936454 - DNA, 15 bp, Homo sapiens
aggaaattctgaagg

SEQ ID NO: 1936455 - DNA, 15 bp, Homo sapiens
ggaaattctgaagga

SEQ ID NO: 1936456 - DNA, 15 bp, Homo sapiens
gaaattctgaaggaa

SEQ ID NO: 1936457 - DNA, 15 bp, Homo sapiens
aaattctgaaggaaa

SEQ ID NO: 1936458 - DNA, 15 bp, Homo sapiens
aattctgaaggaaag

SEQ ID NO: 1936459 - DNA, 15 bp, Homo sapiens
attctgaaggaaagg

SEQ ID NO: 1936460 - DNA, 15 bp, Homo sapiens
ttctgaaggaaaggg

SEQ ID NO: 1936461 - DNA, 15 bp, Homo sapiens
tctgaaggaaaggga

SEQ ID NO: 1936462 - DNA, 15 bp, Homo sapiens
ctgaaggaaagggag

SEQ ID NO: 1936463 - DNA, 15 bp, Homo sapiens
tgaaggaaagggaga

SEQ ID NO: 1936464 - DNA, 15 bp, Homo sapiens
gaaggaaagggagag

SEQ ID NO: 1936465 - DNA, 15 bp, Homo sapiens
aaggaaagggagagt

SEQ ID NO: 1936466 - DNA, 15 bp, Homo sapiens
aggaaagggagagta

SEQ ID NO: 1936467 - DNA, 15 bp, Homo sapiens
ggaaagggagagtat

SEQ ID NO: 1936468 - DNA, 15 bp, Homo sapiens
gaaagggagagtatt

SEQ ID NO: 1936469 - DNA, 15 bp, Homo sapiens
aaagggagagtatta

SEQ ID NO: 1936470 - DNA, 15 bp, Homo sapiens
aagggagagtattat

SEQ ID NO: 1936471 - DNA, 15 bp, Homo sapiens
agggagagtattatt

SEQ ID NO: 1936472 - DNA, 15 bp, Homo sapiens
gggagagtattattt

SEQ ID NO: 1936473 - DNA, 15 bp, Homo sapiens
ggagagtattattta

SEQ ID NO: 1936474 - DNA, 15 bp, Homo sapiens
gagagtattatttaa

SEQ ID NO: 1936475 - DNA, 15 bp, Homo sapiens
agagtattatttaaa

SEQ ID NO: 1936476 - DNA, 15 bp, Homo sapiens
gagtattatttaaaa

SEQ ID NO: 1936477 - DNA, 15 bp, Homo sapiens
agtattatttaaaat

SEQ ID NO: 1936478 - DNA, 15 bp, Homo sapiens
gtattatttaaaatt

SEQ ID NO: 1936479 - DNA, 15 bp, Homo sapiens
tattatttaaaatta

SEQ ID NO: 1936480 - DNA, 15 bp, Homo sapiens
attatttaaaattat

SEQ ID NO: 1936481 - DNA, 15 bp, Homo sapiens
ttatttaaaattatt

SEQ ID NO: 1936482 - DNA, 15 bp, Homo sapiens
tatttaaaattatta

SEQ ID NO: 1936483 - DNA, 15 bp, Homo sapiens
atttaaaattattat

SEQ ID NO: 1936484 - DNA, 15 bp, Homo sapiens
tttaaaattattatg

SEQ ID NO: 1936485 - DNA, 15 bp, Homo sapiens
ttaaaattattatgt

SEQ ID NO: 1936486 - DNA, 15 bp, Homo sapiens
taaaattattatgta

SEQ ID NO: 1936487 - DNA, 15 bp, Homo sapiens
aaaattattatgtaa

SEQ ID NO: 1936488 - DNA, 15 bp, Homo sapiens
aaattattatgtaaa

SEQ ID NO: 1936489 - DNA, 15 bp, Homo sapiens
aattattatgtaaat

SEQ ID NO: 1936490 - DNA, 15 bp, Homo sapiens
attattatgtaaata

SEQ ID NO: 1936491 - DNA, 15 bp, Homo sapiens
ttattatgtaaataa

SEQ ID NO: 1936492 - DNA, 15 bp, Homo sapiens
tattatgtaaataat

SEQ ID NO: 1936493 - DNA, 15 bp, Homo sapiens
attatgtaaataata

SEQ ID NO: 1936494 - DNA, 15 bp, Homo sapiens
ttatgtaaataatag

SEQ ID NO: 1936495 - DNA, 15 bp, Homo sapiens
tatgtaaataatagt

SEQ ID NO: 1936496 - DNA, 15 bp, Homo sapiens
atgtaaataatagtt

SEQ ID NO: 1936497 - DNA, 15 bp, Homo sapiens
tgtaaataatagttt

SEQ ID NO: 1936498 - DNA, 15 bp, Homo sapiens
gtaaataatagttta

SEQ ID NO: 1936499 - DNA, 15 bp, Homo sapiens
taaataatagtttaa

SEQ ID NO: 1936500 - DNA, 15 bp, Homo sapiens
aaataatagtttaaa

SEQ ID NO: 1936501 - DNA, 15 bp, Homo sapiens
aataatagtttaaaa

SEQ ID NO: 1936502 - DNA, 15 bp, Homo sapiens
ataatagtttaaaac

SEQ ID NO: 1936503 - DNA, 15 bp, Homo sapiens
taatagtttaaaacc

SEQ ID NO: 1936504 - DNA, 15 bp, Homo sapiens
aatagtttaaaacca

SEQ ID NO: 1936505 - DNA, 15 bp, Homo sapiens
atagtttaaaaccaa

SEQ ID NO: 1936506 - DNA, 15 bp, Homo sapiens
tagtttaaaaccaat

SEQ ID NO: 1936507 - DNA, 15 bp, Homo sapiens
agtttaaaaccaata

SEQ ID NO: 1936508 - DNA, 15 bp, Homo sapiens
gtttaaaaccaataa

SEQ ID NO: 1936509 - DNA, 15 bp, Homo sapiens
tttaaaaccaataag

SEQ ID NO: 1936510 - DNA, 15 bp, Homo sapiens
ttaaaaccaataagt

SEQ ID NO: 1936511 - DNA, 15 bp, Homo sapiens
taaaaccaataagtt

SEQ ID NO: 1936512 - DNA, 15 bp, Homo sapiens
aaaaccaataagttt

SEQ ID NO: 1936513 - DNA, 15 bp, Homo sapiens
aaaccaataagttta

SEQ ID NO: 1936514 - DNA, 15 bp, Homo sapiens
aaccaataagtttaa

SEQ ID NO: 1936515 - DNA, 15 bp, Homo sapiens
accaataagtttaaa

SEQ ID NO: 1936516 - DNA, 15 bp, Homo sapiens
ccaataagtttaaat

SEQ ID NO: 1936517 - DNA, 15 bp, Homo sapiens
caataagtttaaatg

SEQ ID NO: 1936518 - DNA, 15 bp, Homo sapiens
aataagtttaaatga

SEQ ID NO: 1936519 - DNA, 15 bp, Homo sapiens
ataagtttaaatgaa

SEQ ID NO: 1936520 - DNA, 15 bp, Homo sapiens
agtttaaatgaaatg

SEQ ID NO: 1936521 - DNA, 15 bp, Homo sapiens
gtttaaatgaaatga

SEQ ID NO: 1936522 - DNA, 15 bp, Homo sapiens
tttaaatgaaatgaa

SEQ ID NO: 1936523 - DNA, 15 bp, Homo sapiens
ttaaatgaaatgaac

SEQ ID NO: 1936524 - DNA, 15 bp, Homo sapiens
taaatgaaatgaact

SEQ ID NO: 1936525 - DNA, 15 bp, Homo sapiens
aaatgaaatgaactt

SEQ ID NO: 1936526 - DNA, 15 bp, Homo sapiens
aatgaaatgaacttg

SEQ ID NO: 1936527 - DNA, 15 bp, Homo sapiens
atgaaatgaacttga

SEQ ID NO: 1936528 - DNA, 15 bp, Homo sapiens
tgaaatgaacttgat

SEQ ID NO: 1936529 - DNA, 15 bp, Homo sapiens
gaaatgaacttgatt

SEQ ID NO: 1936530 - DNA, 15 bp, Homo sapiens
aaatgaacttgattc

SEQ ID NO: 1936531 - DNA, 15 bp, Homo sapiens
aatgaacttgattcc

SEQ ID NO: 1936532 - DNA, 15 bp, Homo sapiens
atgaacttgattcca

SEQ ID NO: 1936533 - DNA, 15 bp, Homo sapiens
tgaacttgattccag

SEQ ID NO: 1936534 - DNA, 15 bp, Homo sapiens
gaacttgattccaga

SEQ ID NO: 1936535 - DNA, 15 bp, Homo sapiens
aacttgattccagac

SEQ ID NO: 1936536 - DNA, 15 bp, Homo sapiens
acttgattccagaca

SEQ ID NO: 1936537 - DNA, 15 bp, Homo sapiens
cttgattccagacat

SEQ ID NO: 1936538 - DNA, 15 bp, Homo sapiens
ttgattccagacatt

SEQ ID NO: 1936539 - DNA, 15 bp, Homo sapiens
tgattccagacattt

SEQ ID NO: 1936540 - DNA, 15 bp, Homo sapiens
gattccagacatttg

SEQ ID NO: 1936541 - DNA, 15 bp, Homo sapiens
attccagacatttgc

SEQ ID NO: 1936542 - DNA, 15 bp, Homo sapiens
ttccagacatttgca

SEQ ID NO: 1936543 - DNA, 15 bp, Homo sapiens
tccagacatttgcat

SEQ ID NO: 1936544 - DNA, 15 bp, Homo sapiens
ccagacatttgcatt

SEQ ID NO: 1936545 - DNA, 15 bp, Homo sapiens
cagacatttgcattt

SEQ ID NO: 1936546 - DNA, 15 bp, Homo sapiens
agacatttgcatttg

SEQ ID NO: 1936547 - DNA, 15 bp, Homo sapiens
gacatttgcatttgc

SEQ ID NO: 1936548 - DNA, 15 bp, Homo sapiens
acatttgcatttgca

SEQ ID NO: 1936549 - DNA, 15 bp, Homo sapiens
catttgcatttgcat

SEQ ID NO: 1936550 - DNA, 15 bp, Homo sapiens
atttgcatttgcata

SEQ ID NO: 1936551 - DNA, 15 bp, Homo sapiens
tttgcatttgcataa

SEQ ID NO: 1936552 - DNA, 15 bp, Homo sapiens
ttgcatttgcataat

SEQ ID NO: 1936553 - DNA, 15 bp, Homo sapiens
tgcatttgcataatt

SEQ ID NO: 1936554 - DNA, 15 bp, Homo sapiens
gcatttgcataatta

SEQ ID NO: 1936555 - DNA, 15 bp, Homo sapiens
catttgcataattat

SEQ ID NO: 1936556 - DNA, 15 bp, Homo sapiens
atttgcataattata

SEQ ID NO: 1936557 - DNA, 15 bp, Homo sapiens
tttgcataattatat

SEQ ID NO: 1936558 - DNA, 15 bp, Homo sapiens
ttgcataattatata

SEQ ID NO: 1936559 - DNA, 15 bp, Homo sapiens
tgcataattatatac

SEQ ID NO: 1936560 - DNA, 15 bp, Homo sapiens
gcataattatataca

SEQ ID NO: 1936561 - DNA, 15 bp, Homo sapiens
cataattatatacat

SEQ ID NO: 1936562 - DNA, 15 bp, Homo sapiens
ataattatatacatt

SEQ ID NO: 1936563 - DNA, 15 bp, Homo sapiens
taattatatacattg

SEQ ID NO: 1936564 - DNA, 15 bp, Homo sapiens
aattatatacattgg

SEQ ID NO: 1936565 - DNA, 15 bp, Homo sapiens
attatatacattgga

SEQ ID NO: 1936566 - DNA, 15 bp, Homo sapiens
ttatatacattggat

SEQ ID NO: 1936567 - DNA, 15 bp, Homo sapiens
tatatacattggatg

SEQ ID NO: 1936568 - DNA, 15 bp, Homo sapiens
atatacattggatgg

SEQ ID NO: 1936569 - DNA, 15 bp, Homo sapiens
tatacattggatggc

SEQ ID NO: 1936570 - DNA, 15 bp, Homo sapiens
atacattggatggcc

SEQ ID NO: 1936571 - DNA, 15 bp, Homo sapiens
tacattggatggcca

SEQ ID NO: 1936572 - DNA, 15 bp, Homo sapiens
acattggatggccaa

SEQ ID NO: 1936573 - DNA, 15 bp, Homo sapiens
cattggatggccaaa

SEQ ID NO: 1936574 - DNA, 15 bp, Homo sapiens
attggatggccaaaa

SEQ ID NO: 1936575 - DNA, 15 bp, Homo sapiens
ttggatggccaaaaa

SEQ ID NO: 1936576 - DNA, 15 bp, Homo sapiens
tggatggccaaaaaa

SEQ ID NO: 1936577 - DNA, 15 bp, Homo sapiens
gatggccaaaaaaaa

SEQ ID NO: 1936578 - DNA, 15 bp, Homo sapiens
atggccaaaaaaaaa

SEQ ID NO: 1936579 - DNA, 15 bp, Homo sapiens
tggccaaaaaaaaaa

SEQ ID NO: 1936580 - DNA, 15 bp, Homo sapiens
ggccaaaaaaaaaaa

SEQ ID NO: 1936581 - DNA, 15 bp, Homo sapiens
aaaaaaaaaaaggtg

SEQ ID NO: 1936582 - DNA, 15 bp, Homo sapiens
aaaaaaaaaaggtga

SEQ ID NO: 1936583 - DNA, 15 bp, Homo sapiens
aaaaaaaaaggtgag

SEQ ID NO: 1936584 - DNA, 15 bp, Homo sapiens
aaaaaaaaggtgagt

SEQ ID NO: 1936585 - DNA, 15 bp, Homo sapiens
aaaaaaaggtgagtt

SEQ ID NO: 1936586 - DNA, 15 bp, Homo sapiens
aaaaaaggtgagttt

SEQ ID NO: 1936587 - DNA, 15 bp, Homo sapiens
aaaaaggtgagtttt

SEQ ID NO: 1936588 - DNA, 15 bp, Homo sapiens
aaaaggtgagttttt

SEQ ID NO: 1936589 - DNA, 15 bp, Homo sapiens
aaaggtgagttttta

SEQ ID NO: 1936590 - DNA, 15 bp, Homo sapiens
aaggtgagtttttaa

SEQ ID NO: 1936591 - DNA, 15 bp, Homo sapiens
aggtgagtttttaaa

SEQ ID NO: 1936592 - DNA, 15 bp, Homo sapiens
ggtgagtttttaaaa

SEQ ID NO: 1936593 - DNA, 15 bp, Homo sapiens
gtgagtttttaaaac

SEQ ID NO: 1936594 - DNA, 15 bp, Homo sapiens
tgagtttttaaaact

SEQ ID NO: 1936595 - DNA, 15 bp, Homo sapiens
gagtttttaaaactg

SEQ ID NO: 1936596 - DNA, 15 bp, Homo sapiens
agtttttaaaactgc

SEQ ID NO: 1936597 - DNA, 15 bp, Homo sapiens
gtttttaaaactgcc

SEQ ID NO: 1936598 - DNA, 15 bp, Homo sapiens
tttttaaaactgccc

SEQ ID NO: 1936599 - DNA, 15 bp, Homo sapiens
ttttaaaactgccct

SEQ ID NO: 1936600 - DNA, 15 bp, Homo sapiens
tttaaaactgccctc

SEQ ID NO: 1936601 - DNA, 15 bp, Homo sapiens
ttaaaactgccctct

SEQ ID NO: 1936602 - DNA, 15 bp, Homo sapiens
taaaactgccctctt

SEQ ID NO: 1936603 - DNA, 15 bp, Homo sapiens
aaaactgccctcttg

SEQ ID NO: 1936604 - DNA, 15 bp, Homo sapiens
aaactgccctcttgt

SEQ ID NO: 1936605 - DNA, 15 bp, Homo sapiens
aactgccctcttgta

SEQ ID NO: 1936606 - DNA, 15 bp, Homo sapiens
actgccctcttgtat

SEQ ID NO: 1936607 - DNA, 15 bp, Homo sapiens
ctgccctcttgtatg

SEQ ID NO: 1936608 - DNA, 15 bp, Homo sapiens
tgccctcttgtatgt

SEQ ID NO: 1936609 - DNA, 15 bp, Homo sapiens
gccctcttgtatgtg

SEQ ID NO: 1936610 - DNA, 15 bp, Homo sapiens
ccctcttgtatgtga

SEQ ID NO: 1936611 - DNA, 15 bp, Homo sapiens
cctcttgtatgtgag

SEQ ID NO: 1936612 - DNA, 15 bp, Homo sapiens
ctcttgtatgtgaga

SEQ ID NO: 1936613 - DNA, 15 bp, Homo sapiens
tcttgtatgtgagac

SEQ ID NO: 1936614 - DNA, 15 bp, Homo sapiens
cttgtatgtgagaca

SEQ ID NO: 1936615 - DNA, 15 bp, Homo sapiens
ttgtatgtgagacaa

SEQ ID NO: 1936616 - DNA, 15 bp, Homo sapiens
tgtatgtgagacaag

SEQ ID NO: 1936617 - DNA, 15 bp, Homo sapiens
gtatgtgagacaaga

SEQ ID NO: 1936618 - DNA, 15 bp, Homo sapiens
tatgtgagacaagac

SEQ ID NO: 1936619 - DNA, 15 bp, Homo sapiens
atgtgagacaagaca

SEQ ID NO: 1936620 - DNA, 15 bp, Homo sapiens
tgtgagacaagacag

SEQ ID NO: 1936621 - DNA, 15 bp, Homo sapiens
gtgagacaagacaga

SEQ ID NO: 1936622 - DNA, 15 bp, Homo sapiens
tgagacaagacagag

SEQ ID NO: 1936623 - DNA, 15 bp, Homo sapiens
gagacaagacagagt

SEQ ID NO: 1936624 - DNA, 15 bp, Homo sapiens
agacaagacagagtg

SEQ ID NO: 1936625 - DNA, 15 bp, Homo sapiens
gacaagacagagtga

SEQ ID NO: 1936626 - DNA, 15 bp, Homo sapiens
acaagacagagtgag

SEQ ID NO: 1936627 - DNA, 15 bp, Homo sapiens
caagacagagtgagt

SEQ ID NO: 1936628 - DNA, 15 bp, Homo sapiens
aagacagagtgagtg

SEQ ID NO: 1936629 - DNA, 15 bp, Homo sapiens
agacagagtgagtga

SEQ ID NO: 1936630 - DNA, 15 bp, Homo sapiens
gacagagtgagtgat

SEQ ID NO: 1936631 - DNA, 15 bp, Homo sapiens
acagagtgagtgatt

SEQ ID NO: 1936632 - DNA, 15 bp, Homo sapiens
cagagtgagtgatta

SEQ ID NO: 1936633 - DNA, 15 bp, Homo sapiens
agagtgagtgattag

SEQ ID NO: 1936634 - DNA, 15 bp, Homo sapiens
gagtgagtgattaga

SEQ ID NO: 1936635 - DNA, 15 bp, Homo sapiens
agtgagtgattagag

SEQ ID NO: 1936636 - DNA, 15 bp, Homo sapiens
gtgagtgattagaga

SEQ ID NO: 1936637 - DNA, 15 bp, Homo sapiens
tgagtgattagagat

SEQ ID NO: 1936638 - DNA, 15 bp, Homo sapiens
gagtgattagagata

SEQ ID NO: 1936639 - DNA, 15 bp, Homo sapiens
agtgattagagataa

SEQ ID NO: 1936640 - DNA, 15 bp, Homo sapiens
gtgattagagataat

SEQ ID NO: 1936641 - DNA, 15 bp, Homo sapiens
tgattagagataata

SEQ ID NO: 1936642 - DNA, 15 bp, Homo sapiens
gattagagataatat

SEQ ID NO: 1936643 - DNA, 15 bp, Homo sapiens
attagagataatatg

SEQ ID NO: 1936644 - DNA, 15 bp, Homo sapiens
ttagagataatatgg

SEQ ID NO: 1936645 - DNA, 15 bp, Homo sapiens
tagagataatatggt

SEQ ID NO: 1936646 - DNA, 15 bp, Homo sapiens
agagataatatggtt

SEQ ID NO: 1936647 - DNA, 15 bp, Homo sapiens
gagataatatggtta

SEQ ID NO: 1936648 - DNA, 15 bp, Homo sapiens
agataatatggttat

SEQ ID NO: 1936649 - DNA, 15 bp, Homo sapiens
gataatatggttatt

SEQ ID NO: 1936650 - DNA, 15 bp, Homo sapiens
ataatatggttattt

SEQ ID NO: 1936651 - DNA, 15 bp, Homo sapiens
taatatggttatttc

SEQ ID NO: 1936652 - DNA, 15 bp, Homo sapiens
aatatggttatttca

SEQ ID NO: 1936653 - DNA, 15 bp, Homo sapiens
atatggttatttcat

SEQ ID NO: 1936654 - DNA, 15 bp, Homo sapiens
tatggttatttcatt
